(19) United States
(12) Patent Application Publication
(10) Pub. No.: US 2024/0026386 A1
(43) Pub. Date: Jan. 25, 2024

(54) COMPOSITIONS AND METHODS FOR THE TARGETING OF BCL11A

(71) Applicant: Scribe Therapeutics Inc., Alameda, CA (US)

(72) Inventors: Benjamin OAKES, El Cerrito, CA (US); Sean HIGGINS, Alameda, CA (US); Sarah DENNY, San Francisco, CA (US); Brett T. STAAHL, Tiburon, CA (US); Isabel COLIN, Oakland, CA (US); Maroof ADIL, Davis, CA (US); Cole URNES, Los Angeles, CA (US)

(21) Appl. No.: 18/255,172

(22) PCT Filed: Dec. 2, 2021
(86) PCT No.: PCT/US2021/061672

§ 371 Date: May 31, 2023

Related U.S. Application Data
(60) Provisional application No. 63/120,885, filed on Dec. 3, 2020.

(51) Int. Cl. C12N 15/90; C12N 9/22; C12N 15/11; A61K 35/28; A61K 35/545; A61K 35/34; A61K 35/18

(52) U.S. Cl. CPC C12N 15/907; C12N 9/22; C12N 15/11; C12N 15/111; A61K 35/28; A61K 35/545; A61K 35/34; A61K 35/18; C12N 2310/20

(57) ABSTRACT

Provided herein are systems comprising Class 2, Type V CRISPR polypeptides, guide nucleic acids (gNA), and optionally donor template nucleic acids useful in the modification of a BCL11A gene. The systems are also useful for the modification of cells in subjects with a hemoglobinopathy-related disease. Also provided are methods of treatment of subjects having a hemoglobinopathy-related disease by administration of the systems or nucleic acids encoding such systems that target the BCL11A gene in such subjects.

### CROSS-REFERENCE TO RELATED APPLICATIONS

[0001] This application claims priority to U.S. provisional patent application No. 63/120,885, filed on Dec. 3, 2020, the contents of which are incorporated by reference in their entirety herein.

### INCORPORATION BY REFERENCE OF SEQUENCE LISTING

[0002] This application contains a Sequence Listing which has been submitted in ASCII format via EFS-WEB and is hereby incorporated by reference in its entirety. Said ASCII copy, created on Dec. 1, 2021 is named SCRB_030_01WO_SeqList_ST25.txt and is 8.78 MB in size.

### BACKGROUND

[0003] Fetal hemoglobin (also hemoglobin F, HbF, or α2γ2) is the main oxygen carrier protein in the human fetus. HbF has a different composition from the adult forms of hemoglobin, which allows it to bind oxygen more strongly than the adult form, allowing the developing fetus to retrieve oxygen from the mother's bloodstream. HbF is a tetramer of two adult α-globin polypeptides and two fetal β-like γ-globin polypeptides. During gestation, the duplicated γ-globin genes constitute the predominant genes transcribed in the β-globin cluster. After birth, γ-globin is replaced by adult β-globin, a process referred to as the “fetal switch”, a process that involves expression of BCL11A, a regulator of HbF silencing (Sankaran, V. G., et al. Human Fetal Hemoglobin Expression Is Regulated by the Developmental Stage-Specific Repressor BCL11A. Science 322(5909):1839-1842 (2008); Liu, N., et al. Direct Promoter Repression by BCL11A Controls the Fetal to Adult Hemoglobin Switch. Cell 173(2):430 (2018)). In healthy adults, the composition of hemoglobin is hemoglobin A (˜97%), hemoglobin A2 (2.2-3.5%) and hemoglobin F (<1%) (Thomas, C and Lumb, A. B. Physiology of haemoglobin. Continuing Education in Anaesthesia Critical Care & Pain. 12(5): 251-256 (2012)).

[0004] Hemoglobinopathies are inherited single-gene disorders that, in most cases, are inherited as autosomal co-dominant traits. Common hemoglobinopathies include sickle-cell disease and α- and β-thalassemias. Hemoglobinopathies are most common in populations from Africa, the Mediterranean basin and Southeast Asia. Most hemoglobinopathies, including sickle cell anemia, are simply structural abnormalities in the globin proteins themselves. Sickle cell anemia results from a point mutation in the β-globin structural gene, HBB, leading to the production of an abnormal hemoglobin (HbS), which results in a reduced oxygen-carrying capacity of the blood. Thalassemias, in contrast, usually result in underproduction of normal globin proteins, often through mutations in regulatory genes, leading to deficient or absent adult hemoglobin (HbA). In β-thalassemia, where β-globin is deficient, increased γ-globin expression reduces the imbalance of the α- and β-globin chains that underlies the pathophysiology of anemia in this condition (Liu, N., et al. Direct Promoter Repression by BCL11A Controls the Fetal to Adult Hemoglobin Switch. Cell 173(2): 430 (2018)). Both sickle cell disease and thalassemia may cause anemia.

[0005] B-cell lymphoma/leukemia 11A (BCL11A) is a protein that in humans is encoded by the BCL11A gene. During hematopoietic cell differentiation, this gene is down-regulated and has been found to play a role in the suppression of fetal hemoglobin production. BCL11A is a major repressor protein of hemoglobin F production, by binding to the gene coding for the γ subunit at the promoter region (Sankaran V G, et al. Human fetal hemoglobin expression is regulated by the developmental stage-specific repressor BCL11A. Science 322:1839 (2008)). As increased γ-globin reduces the clinical severity of the β-hemoglobinopathies, sickle-cell disease, and β-thalassemia caused by mutation or decreased expression of β-globin, respectively, gene editing of BCL11A to increase expression of γ-globin beyond the residual ˜1% fetal hemoglobin has been proposed as an attractive therapeutic strategy in adults with hemoglobinopathies (Smith, E. C., et al. Strict in vivo specificity of the Bc111a erythroid enhancer. Blood 128(19):2338 (2016)).

[0006] The advent of CRISPR/Cas systems and the programmable nature of these minimal systems has facilitated their use as a versatile technology for genomic manipulation and engineering. To date, the use of CRISPR/Cas systems for the treatment of hemoglobinopathies have been limited to the editing of cells ex vivo, followed by transplantation into subjects suffering from the underlying hemoglobinopathy. Thus, there is a need for compositions and methods to regulate BCL11A to reduce direct γ-globin gene promoter repression in vivo in subjects with these diseases. Provided herein are compositions and methods for targeting the BCL11A gene to the address this need.

### SUMMARY

[0007] The present disclosure relates to compositions of modified Class 2, Type V CRISPR proteins and guide nucleic acids used to alter a target nucleic acid comprising a BCL11A gene in cells. The Class 2, Type V CRISPR proteins and guide nucleic acids are modified for passive entry into target cells. The Class 2, Type V CRISPR proteins and guide nucleic acids are useful in a variety of methods for target nucleic acid modification of BCL11A-related diseases, which methods are also provided.

[0008] In one aspect, the present disclosure relates to CasX:guide nucleic acid systems (CasX:gRNA systems) and methods used to knock-down or knock-out a BCL11A gene in order to reduce or eliminate expression of the BCL11A gene product in subjects having a 0-hemoglobinopathy-related disease.

[0009] In some embodiments, the CasX:gRNA system gRNA is a gRNA, or a chimera of RNA and DNA, and may be a single-molecule gRNA or a dual-molecule gRNA. In other embodiments, the CasX:gRNA system gRNA has a targeting sequence complementary to a target nucleic acid sequence comprising a region within the BCL11A gene. In some embodiments, the targeting sequence of the gRNA is selected from the group consisting of SEQ ID NOS: 272-2100 and 2286-26789 or a sequence having at least about 50%, at least about 60%, at least about 70%, at least about 80%, at least about 85%, at least about 90%, or at least about 95% identity thereto. The gRNA can comprise a targeting sequence comprising 15 to 20 consecutive nucleotides. In other embodiments, the targeting sequence of the gRNA consists of 20 nucleotides. In other embodiments, the targeting sequence consists of 19 nucleotides. In other embodiments, the targeting sequence consists of 18 nucleotides. In other embodiments, the targeting sequence consists of 17 nucleotides. In other embodiments, the targeting sequence consists of 16 nucleotides. In other embodiments, the targeting sequence consists of 15 nucleotides. In other embodiments, the targeting sequence of the gRNA has a sequence selected from the group consisting of SEQ ID NOS: 272-2100 and 2286-26789. In other embodiments, the targeting sequence of the gRNA has a sequence selected from the group consisting of SEQ ID NOS: 272-2100 and 2286-26789, with a single nucleotide removed from the 3′ end of the sequence. In other embodiments, the targeting sequence consists of 18 nucleotides, has a sequence selected from the group consisting of SEQ ID NOS: 272-2100 and 2286-26789, with two nucleotides removed from the 3′ end of the sequence. In other embodiments, the targeting sequence consists of 17 nucleotides, has a sequence selected from the group consisting of SEQ ID NOS: 272-2100 and 2286-26789, with three nucleotides removed from the 3′ end of the sequence. In other embodiments, the targeting sequence consists of 16 nucleotides, has a sequence selected from the group consisting of SEQ ID NOS: 272-2100 and 2286-26789, with four nucleotides removed from the 3′ end of the sequence. In other embodiments, the targeting sequence consists of 15 nucleotides, has a sequence selected from the group consisting of SEQ ID NOS: 272-2100 and 2286-26789, with five nucleotides removed from the 3′ end of the sequence.

[0010] In some embodiments, the gRNA has a scaffold comprising a sequence selected from the group consisting of sequences SEQ ID NOS: 2238-2285, 26794-26839 and 27219-27265, or as set forth in Table 3, or a sequence having at least about 50%, at least about 60%, at least about 70%, at least about 80%, at least about 90%, at least about 95%, at least about 96%, at least about 97%, at least about 98%, at least about 99% sequence identity thereto. In some embodiments, the gRNA has a scaffold comprising a sequence selected from the group consisting of sequences SEQ ID NOS: 2238-2285, 26794-26839 and 27219-27265. In some embodiments, the gRNA has a scaffold comprising a sequence selected from the group consisting of sequences SEQ ID NOS: 2101-2285, 26794-26839 and 27219-27265.

[0011] In some embodiments, the CasX:gRNA systems comprise a CasX variant sequence having a sequence selected from the group consisting of SEQ ID NOS: 36-99, 101-148, 26908-27154, or a sequence having at least about 50%, at least about 60%, at least about 70%, at least about 80%, or at least about 90%, or at least about 95%, or at least about 96%, or at least about 97%, or at least about 98%, or at least about 99% sequence identity thereto. In some embodiments, the CasX:gRNA systems comprise a CasX variant sequence having a sequence selected from the group consisting of SEQ ID NOS: 36-99, 101-148, 26908-27154. In some embodiments, the CasX:gRNA systems comprise a CasX variant sequence having a sequence selected from the group consisting of SEQ ID NOS: 59, 72-99, 101-148, and 26908-27154, or as set forth in Table 4, or a sequence having at least about 50%, at least about 60%, at least about 70%, at least about 80%, or at least about 90%, or at least about 95%, or at least about 96%, or at least about 97%, or at least about 98%, or at least about 99% sequence identity thereto. In some embodiments, the CasX:gRNA systems comprise a CasX variant sequence having a sequence selected from the group consisting of SEQ ID NOS: 59, 72-99, 101-148, and 26908-27154. In some embodiments, the CasX:gRNA systems comprise a CasX variant sequence having a sequence selected from the group consisting of SEQ ID NOS: 132-148 and 26908-27154, or a sequence having at least about 50%, at least about 60%, at least about 70%, at least about 80%, or at least about 90%, or at least about 95%, or at least about 96%, or at least about 97%, or at least about 98%, or at least about 99% sequence identity thereto. In some embodiments, the CasX:gRNA systems comprise a CasX variant sequence having a sequence selected from the group consisting of SEQ ID NOS: 132-148 and 26908-27154. In these embodiments, a CasX variant exhibits one or more improved characteristics relative to any one of the reference CasX proteins of SEQ ID NOS: 1-3. In some embodiments, the CasX variant protein has binding affinity for a protospacer adjacent motif (PAM) sequence selected from the group consisting of TTC, ATC, GTC, and CTC. In some embodiments, the CasX variant protein has binding affinity for the PAM sequence that is at least 1.5-fold greater compared to the binding affinity of any one of the reference CasX proteins of SEQ ID NOS: 1-3 for the PAM sequences selected from the group consisting of TTC, ATC, GTC, and CTC.

[0012] In other embodiments of the CasX:gRNA system, the CasX molecule and the gRNA molecule are associated together in a ribonuclear protein complex (RNP). In a particular embodiment, the RNP comprising the CasX variant and the gRNA variant exhibits greater editing efficiency and/or binding of a target sequence in the target DNA when any one of the PAM sequences TTC, ATC, GTC, or CTC is located 1 nucleotide 5′ to the non-target strand sequence having identity with the targeting sequence of the gRNA in a cellular assay system compared to the editing efficiency and/or binding of an RNP comprising a reference CasX protein and a reference gRNA in a comparable assay system.

[0013] In some embodiments, the CasX:gRNA system further comprises a donor template comprising a nucleic acid comprising at least a portion of a BCL11A gene and having at least 1 to about 5 mutations relative to the wild-type sequence, wherein the BCL11A gene portion is selected from the group consisting of a BCL11A exon, a BCL11A intron, a BCL11A intron-exon junction, a BCL11A regulatory element, or combinations thereof, wherein the donor template is used to knock down or knock out the BCL11A gene. In some cases, the donor sequence is a single-stranded DNA template or a single stranded RNA template. In other cases, the donor template is a double-stranded DNA template.

[0014] In other embodiments, the disclosure relates to nucleic acids encoding the CasX:gRNA systems of any of the embodiments described herein, as well as vectors comprising the nucleic acids. In some embodiments, the vector is selected from the group consisting of a retroviral vector, a lentiviral vector, an adenoviral vector, an adeno-associated viral (AAV) vector, a herpes simplex virus (HSV) vector, a plasmid, a minicircle, a nanoplasmid, and an RNA vector. In other embodiments, the vector is a CasX delivery particle (XDP) comprising an RNP of a CasX and gRNA of any of the embodiments described herein and, optionally, a donor template nucleic acid and a targeting moiety such as a viral-derived glycoprotein.

[0015] In other embodiments, the disclosure provides a method of modifying a BCL11A target nucleic acid sequence of a cells of a population, wherein said method comprises introducing into the cell: a) CasX:gRNA system of any of the embodiments disclosed herein; b) the nucleic acid of any of the embodiments disclosed herein; c) the vector of any of the embodiments disclosed herein; d) the XDP of any of the embodiments disclosed herein; or e) a combination of the foregoing. In some embodiments of the method, the modifying comprises introducing an insertion, deletion, substitution, duplication, or inversion of one or more nucleotides in the target nucleic acid sequence as compared to the wild-type sequence. The target BCL11A gene includes the GATA1 erythroid-specific enhancer binding site (GATA1) as a regulatory element. In some embodiments, the method of modifying comprises modification of the GATA1 sequence, wherein the BCL11A gene is knocked down or knocked out by the modification. In some cases, the method further comprises contacting the target nucleic acid with a donor template nucleic acid of any of the embodiments disclosed herein. In some embodiments of the method, the donor template comprises a nucleic acid comprising at least a portion of a BCL11A gene but with one or more mutations for knocking out or knocking down the BCL11A gene. In some cases, the modifying of the target nucleic acid sequence occurs in vitro or ex vivo. In some cases, the modifying of the target nucleic acid sequence occurs in vivo. In some embodiments, the cell is a eukaryotic cell selected from the group consisting of a rodent cell, a mouse cell, a rat cell, a primate cell, and a non-human primate cell. In some embodiments, the cell is a human cell. In some embodiments, the cell is a selected from the group consisting of a hematopoietic stem cell (HSC), a hematopoietic progenitor cell (HPC), a CD34+ cell, a mesenchymal stem cell (MSC), induced pluripotent stem cell (iPSC), a common myeloid progenitor cell, a proerythroblast cell, and a erythroblast cell. In some embodiments, the cell is an autologous cell derived from a subject with a β-hemoglobinopathy-related disease. In other embodiments, the cell is allogenic, but of the same species as the subject to be treated.

[0016] In other embodiments, the disclosure provides methods of modifying a target nucleic acid sequence of the BCL11A gene wherein the target cells of a population are contacted using vectors encoding the CasX protein and one or more gRNAs comprising a targeting sequence complementary to the BCL11A gene, and optionally further comprising a donor template. In some cases, the vector is an Adeno-Associated Viral (AAV) vector selected from AAV1, AAV2, AAV3, AAV4, AAV5, AAV6, AAV7, AAV8, AAV9, AAV10, AAV-Rh74, or AAVRh10. In other cases, the vector is a lentiviral vector. In other embodiments, the disclosure provides methods wherein the target cells are contacted using a vector, and wherein the vector is a CasX delivery particle (XDP) comprising an RNP of a CasX and gRNA of any of the embodiments described herein and, optionally, a donor template nucleic acid. In some embodiments of the method, the vector is administered to a subject at a therapeutically effective dose. The subject can be a mouse, rat, pig, non-human primate, or a human. The dose can be administered by a route of administration selected from transplantation, local injection, systemic infusion, or combinations thereof.

[0017] In other embodiments, the disclosure provides a method of treating a (β-hemoglobinopathy-related disease in a subject in need thereof, comprising modifying a gene encoding BCL11A gene in a cell of the subject, the modifying comprising either contacting said cell with: a) CasX:gRNA system of any of the embodiments disclosed herein; b) the nucleic acid of any of the embodiments disclosed herein; c) the vector of any of the embodiments disclosed herein; d) the XDP of any of the embodiments disclosed herein; or e) a combination of the foregoing. In some embodiments, the β-hemoglobinopathy-related disease is sickle cell anemia or beta-thalassemia. In some cases, the methods of treating a subject with a β-hemoglobinopathy-related disease result in improvement in at least one clinically-relevant parameter. In other cases, the methods of treating a subject with a β-hemoglobinopathy-related disease result in improvement in at least two clinically-relevant parameters.

[0018] In other embodiments, the disclosure provides use of the CasX:gRNA systems, nucleic acids, vectors or XDP described herein for treating a β-hemoglobinopathy-related disease in a subject in need thereof. In some embodiments, the use comprises modifying a gene encoding BCL11A gene in a cell of the subject, the modifying comprising either contacting said cell with: a) CasX:gRNA system of any of the embodiments disclosed herein; b) the nucleic acid of any of the embodiments disclosed herein; c) the vector of any of the embodiments disclosed herein; d) the XDP of any of the embodiments disclosed herein; or e) a combination of the foregoing.

### INCORPORATION BY REFERENCE

[0019] All publications, patents, and patent applications mentioned in this specification are herein incorporated by reference to the same extent as if each individual publication, patent, or patent application was specifically and individually indicated to be incorporated by reference.

[0020] The contents of U.S. provisional applications 63/121,196, filed on Dec. 3, 2020, 63/162,346 filed on Mar. 17, 2021, and 63/208,855, filed on Jun. 9, 2021, which disclose CasX variants and gRNA variants, are hereby incorporated by reference in their entireties. The contents of international application publications WO 2020/247882, published Dec. 10, 2020, WO 2020/247883, published Dec. 10, 2020, and WO 2021/113772, published Jun. 10, 2021 are hereby incorporated by reference in their entireties.

### BRIEF DESCRIPTION OF THE DRAWINGS

[0021] The novel features of the disclosure are set forth with particularity in the appended claims. A better understanding of the features and advantages of the present disclosure will be obtained by reference to the following detailed description that sets forth illustrative embodiments, in which the principles of the disclosure are utilized, and the accompanying drawings of which:

[0022] FIG. 1 is a graph of the results of an assay for the quantification of active fractions of RNP formed by sgRNA174 (SEQ ID NO: 2238) and the CasX variants 119 (SEQ ID NO: 59), 457 (SEQ ID NO: 101), 488 (SEQ ID NO: 123) and 491 (SEQ ID NO: 126), as described in Example 8. Equimolar amounts of RNP and target were co-incubated and the amount of cleaved target was determined at the indicated timepoints. Mean and standard deviation of three independent replicates are shown for each timepoint. The biphasic fit of the combined replicates is shown. “2” refers to the reference CasX protein of SEQ ID NO: 2.

[0023] FIG. 2 shows the quantification of active fractions of RNP formed by CasX2 (reference CasX protein of SEQ ID NO:2) and the modified sgRNAs, as described in Example 8. Equimolar amounts of RNP and target were co-incubated and the amount of cleaved target was determined at the indicated timepoints. Mean and standard deviation of three independent replicates are shown for each timepoint. The biphasic fit of the combined replicates is shown.

[0024] FIG. 3 shows the quantification of active fractions of RNP formed by CasX 491 and the modified sgRNAs under guide-limiting conditions, as described in Example 8. Equimolar amounts of RNP and target were co-incubated and the amount of cleaved target was determined at the indicated timepoints. The biphasic fit of the data is shown.

[0025] FIG. 4 shows the quantification of cleavage rates of RNP formed by sgRNA174 and the CasX variants, as described in Example 8. Target DNA was incubated with a 20-fold excess of the indicated RNP and the amount of cleaved target was determined at the indicated time points. Mean and standard deviation of three independent replicates are shown for each timepoint, except for 488 and 491 where a single replicate is shown. The monophasic fit of the combined replicates is shown.

[0026] FIG. 5 shows the quantification of cleavage rates of RNP formed by CasX2 and the indicated sgRNA variants, as described in Example 8. Target DNA was incubated with a 20-fold excess of the indicated RNP and the amount of cleaved target was determined at the indicated time points. Mean and standard deviation of three independent replicates are shown for each timepoint. The monophasic fit of the combined replicates is shown.

[0027] FIG. 6 shows the quantification of initial velocities of RNP formed by CasX2 and the sgRNA variants, as described in Example 8. The first two time-points of the previous cleavage experiment were fit with a linear model to determine the initial cleavage velocity.

[0028] FIG. 7 shows the quantification of cleavage rates of RNP formed by CasX491 and the sgRNA variants, as described in Example 8. Target DNA was incubated with a 20-fold excess of the indicated RNP at 10° C. and the amount of cleaved target was determined at the indicated time points. The monophasic fit of the timepoints is shown.

[0029] FIG. 8 shows the quantification of competent fractions of RNP of CasX variant 515 (SEQ ID NO: 133) and 526 (SEQ ID NO: 143) complexed with gRNA variant 174 compared to RNP of reference CasX 2 complexed with gRNA 2 using equimolar amounts of indicated RNP and a complementary target, as described in Example 8. The biphasic fit for each time course or set of combined replicates is shown.

[0030] FIG. 9 shows the quantification of cleavage rates of RNP of CasX variant 515 and 526 complexed with gRNA variant 174 compared to RNP of reference CasX 2 complexed with gRNA 2 using with a 20-fold excess of the indicated RNP, as described in Example 8.

[0031] FIG. 10A shows the quantification of cleavage rates of CasX variants on TTC PAM, as described in Example 5. Target DNA substrates with identical spacers and the indicated PAM sequence were incubated with a 20-fold excess of the indicated RNP at 37° C. and the amount of cleaved target was determined at the indicated time points. Monophasic fit of a single replicate is shown.

[0032] FIG. 10B shows the quantification of cleavage rates of CasX variants on CTC PAM, as described in Example 5. Target DNA substrates with identical spacers and the indicated PAM sequence were incubated with a 20-fold excess of the indicated RNP at 37° C. and the amount of cleaved target was determined at the indicated time points. Monophasic fit of a single replicate is shown.

[0033] FIG. 10C shows the quantification of cleavage rates of CasX variants on GTC PAM, as described in Example 5. Target DNA substrates with identical spacers and the indicated PAM sequence were incubated with a 20-fold excess of the indicated RNP at 37° C. and the amount of cleaved target was determined at the indicated time points. Monophasic fit of a single replicate is shown.

[0034] FIG. 10D shows the quantification of cleavage rates of CasX variants on ATC PAM, as described in Example 5. Target DNA substrates with identical spacers and the indicated PAM sequence were incubated with a 20-fold excess of the indicated RNP at 37° C. and the amount of cleaved target was determined at the indicated time points. Monophasic fit of a single replicate is shown.

[0035] FIG. 11A shows the quantification of cleavage rates of RNP of CasX variant 491 and guide 174 on NTC PAMs, as described in Example 5. Timepoints were taken over the course of 10 minutes and the fraction cleaved was graphed for each target and timepoint, but only the first two minutes of the time course are shown for clarity.

[0036] FIG. 11B shows the quantification of cleavage rates of RNP of CasX variant 491 and guide 174 on NTT PAMs, as described in Example 5. Timepoints were taken over the course of 10 minutes and the fraction cleaved was graphed for each target and timepoint.

[0037] FIG. 12A shows the quantification of cleavage by RNP formed by sgRNA174 and the CasX variants 515 using spacer lengths of 18, 19, or 20 nucleotides, as described in Example 9.

[0038] Target DNA was incubated with a 20-fold excess of the indicated RNP and the amount of cleaved target was determined at the indicated time points. Mean and standard deviation of three independent replicates are shown for each timepoint. The monophasic fit of the combined replicates is shown.

[0039] FIG. 12B shows the quantification of cleavage by RNP formed by sgRNA174 and the CasX variant 526 using spacer lengths of 18, 19, or 20 nucleotides, as described in Example 9. Target DNA was incubated with a 20-fold excess of the indicated RNP and the amount of cleaved target was determined at the indicated time points. Mean and standard deviation of three independent replicates are shown for each timepoint. The monophasic fit of the combined replicates is shown.

[0040] FIG. 13 is a schematic showing an example of CasX protein and scaffold DNA sequence for packaging in adeno-associated virus (AAV). The DNA segment between the AAV inverted terminal repeats (ITRs), comprised of a CasX-encoding DNA and its promoter, and scaffold-encoding DNA and its promoter gets packaged within an AAV capsid during AAV production.

[0041] FIG. 14 shows the results of an editing assay comparing gRNA scaffolds 229-237 (see Table 3 for corresponding sequences and SEQ ID NOs) to scaffold 174 in mouse neural progenitor cells (mNPC) isolated from the Ai9-tdtomato transgenic mice. Cells were nucleofected with the indicated doses of p59 plasmids encoding CasX 491, the scaffold, and spacer 11.30 (5′ AAGGGGCUCCGCACCACGCC 3′, SEQ ID NO: 27197) targeting mRHO. Editing at the mRHO locus was assessed 5 days post-transfection by NGS, and show that editing with constructs with scaffolds 230, 231, 234 and 235 demonstrated greater editing compared to constructs with scaffold 174 at both doses.

[0042] FIG. 15 shows the results of an editing assay comparing gRNA scaffolds 229-237 to scaffold 174 in mNPC cells. Cells were nucleofected with the indicated doses of p59 plasmids encoding CasX 491, the scaffold, and spacer 12.7 (5′ CUGCAUUCUAGUUGUGGUUU 3′, SEQ ID NO: 27198) targeting repeat elements preventing expression of the tdTomato fluorescent protein. Editing was assessed 5 days post-transfection by FACS, to quantify the fraction of tdTomato positive cells. Cells nucleofected with scaffolds 231-235 displayed approximately 35% greater editing compared to constructs with scaffold 174 at the high dose, and approximately 25% greater editing at the low dose.

[0043] FIG. 16 shows the results of an editing assay comparing CasX nucleases 2, 119, 491, 515, 527, 528, 529, 530, and 531 (see Table 4 for corresponding sequences and SEQ ID NOs) in a custom HEK293 cell line, PASS_V1.01. Cells were lipofected with 2 μg of p67 plasmid encoding the indicated CasX protein. After five days, cell genomic DNA was extracted. PCR amplification and Next-Generation Sequencing was performed to isolate and quantify the fraction of edited cells at custom designed on-target editing sites. For each sample, editing was evaluated at target sites (individual points) consisting of the following PAM sequences: 48 TTC, 14 ATC, 22 CTC, 11 GTC individual sites, and percent editing was normalized to a vehicle control. Cells lipofected with any nuclease displayed higher mean editing at TTC PAM target sites (horizontal bar) than that of the wild-type nuclease CasX 2, except CasX 528. The relative preference of any given nuclease for the four different PAM sequences is also represented by the violin plots. In particular, CasX nucleases 527, 528, and 529 exhibit substantially different PAM preferences than that of the wild-type nuclease CasX 2.

[0044] FIG. 17 shows the results of an editing assay comparing improved CasX nuclease 491 to improved nucleases 532 and 533 in a custom HEK293 cell line, PASS_V1.01. Cells were lipofected, in duplicate, with 2 μg of p67 plasmid encoding the indicated CasX protein and a puromycin resistance gene, and grown under puromycin selection. After three days, cell genomic DNA was extracted. PCR amplification and Next-Generation Sequencing was performed to isolate and quantify the fraction of edited cells at custom designed on-target editing sites. For each sample, editing was evaluated at target sites consisting of the following PAM sequences: 48 TTC, 14 ATC, 22 CTC, 11 GTC individual sites, and fraction editing was normalized to a vehicle control. Cells lipofected with CasX 532 or 533 displayed higher mean editing than Cas 491 at each of the PAM sequences, with the exception of CasX 533 at TTC PAM target sites. Error bars represent standard error of the mean for n=2 biological samples.

[0045] FIG. 18 shows the results of editing of the BCL11A erythroid enhancer locus in HEK293T cells by CasX protein variant 438 with scaffold 174 compared to a Cas9 system, as described in Example 13.

[0046] FIG. 19 shows the results of editing at the GATA1 binding region of the BCL11A erythroid enhancer locus in K562 cells by CasX protein variant 491 with scaffold 174 compared to CasX protein variant 119 with scaffold 174, as described in Example 14.

[0047] FIG. 20 shows the results of editing at the GATA1 binding region of the BCL11A erythroid enhancer locus in K562 cells by CasX protein variant 491 with scaffold 174 delivered by various doses of XDP, as described in Example 14.

[0048] FIG. 21 shows the results of editing at the GATA1 binding region of the BCL11A erythroid enhancer locus in HSC cells by CasX protein variant 491 with scaffold 174 compared to CasX protein variant 119 with scaffold 174, as described in Example 15.

[0049] FIG. 22 shows the results of editing at the GATA1 binding region of the BCL11A erythroid enhancer locus in HSC cells by CasX protein variant 491 with scaffold 174 delivered by various doses of XDP, as described in Example 15.

[0050] FIG. 23 is a schematic showing the positioning of the spacer 21.1 (SEQ ID NO: 22) relative to the GATA1 binding site sequence in the target nucleic acid. Top strand: SEQ ID NO: 26790, bottom strand: SEQ ID NO: 26791.

### DETAILED DESCRIPTION

[0051] While exemplary embodiments have been shown and described herein, it will be obvious to those skilled in the art that such embodiments are provided by way of example only.

[0052] Numerous variations, changes, and substitutions will now occur to those skilled in the art without departing from the inventions claimed herein. It should be understood that various alternatives to the embodiments described herein may be employed in practicing the embodiments of the disclosure. It is intended that the claims define the scope of the invention and that methods and structures within the scope of these claims and their equivalents be covered thereby.

[0053] Unless otherwise defined, all technical and scientific terms used herein have the same meaning as commonly understood by one of ordinary skill in the art to which this invention belongs. Although methods and materials similar or equivalent to those described herein can be used in the practice or testing of the present embodiments, suitable methods and materials are described below. In case of conflict, the patent specification, including definitions, will control. In addition, the materials, methods, and examples are illustrative only and not intended to be limiting. Numerous variations, changes, and substitutions will now occur to those skilled in the art without departing from the invention.

### Definitions

[0054] The terms “polynucleotide” and “nucleic acid,” used interchangeably herein, refer to a polymeric form of nucleotides of any length, either ribonucleotides or deoxyribonucleotides. Thus, terms “polynucleotide” and “nucleic acid” encompass single-stranded DNA; double-stranded DNA; multi-stranded DNA; single-stranded RNA; double-stranded RNA; multi-stranded RNA; genomic DNA; cDNA; DNA-RNA hybrids; and a polymer comprising purine and pyrimidine bases or other natural, chemically or biochemically modified, non-natural, or derivatized nucleotide bases.

[0055] “Hybridizable” or “complementary” are used interchangeably to mean that a nucleic acid (e.g., RNA, DNA) comprises a sequence of nucleotides that enables it to non-covalently bind, i.e., form Watson-Crick base pairs and/or G/U base pairs, “anneal”, or “hybridize,” to another nucleic acid in a sequence-specific, antiparallel, manner (i.e., a nucleic acid specifically binds to a complementary nucleic acid) under the appropriate in vitro and/or in vivo conditions of temperature and solution ionic strength. It is understood that the sequence of a polynucleotide need not be 100% complementary to that of its target nucleic acid to be specifically hybridizable; it can have at least about 70%, at least about 80%, or at least about 90%, or at least about 95% sequence identity and still hybridize to the target nucleic acid. Moreover, a polynucleotide may hybridize over one or more segments such that intervening or adjacent segments are not involved in the hybridization event (e.g., a loop structure or hairpin structure, a ‘bulge’, ‘bubble’ and the like).

[0056] A “gene,” for the purposes of the present disclosure, includes a DNA region encoding a gene product (e.g., a protein, RNA), as well as all DNA regions which regulate the production of the gene product, whether or not such regulatory element sequences are adjacent to coding and/or transcribed sequences. Accordingly, a gene may include regulatory sequences including, but not necessarily limited to, promoter sequences, terminators, translational regulatory sequences such as ribosome binding sites and internal ribosome entry sites, enhancers, silencers, insulators, boundary elements, replication origins, matrix attachment sites and locus control regions. Coding sequences encode a gene product upon transcription or transcription and translation; the coding sequences of the disclosure may comprise fragments and need not contain a full-length open reading frame. A gene can include both the strand that is transcribed, e.g. the strand containing the coding sequence, as well as the complementary strand.

[0057] The term “downstream” refers to a nucleotide sequence that is located 3′ to a reference nucleotide sequence. In certain embodiments, downstream nucleotide sequences relate to sequences that follow the starting point of transcription. For example, the translation initiation codon of a gene is located downstream of the start site of transcription.

[0058] The term “upstream” refers to a nucleotide sequence that is located 5′ to a reference nucleotide sequence. In certain embodiments, upstream nucleotide sequences relate to sequences that are located on the 5′ side of a coding region or starting point of transcription. For example, most promoters are located upstream of the start site of transcription.

[0059] The term “adjacent to” with respect to polynucleotide or amino acid sequences refers to sequences that are next to, or adjoining each other in a polynucleotide or polypeptide. The skilled artisan will appreciate that two sequences can be considered to be adjacent to each other and still encompass a limited amount of intervening sequence, e.g., 1, 2, 3, 4, 5, 6, 7, 8, 9 or 10 nucleotides or amino acids.

[0060] The term “regulatory element” is used interchangeably herein with the term “regulatory sequence,” and is intended to include promoters, enhancers, and other expression regulatory elements (e.g. transcription termination signals, such as polyadenylation signals and poly-U sequences). Exemplary regulatory elements include a transcription promoter such as, but not limited to, CMV, CMV+ intron A, SV40, RSV, HIV-Ltr, elongation factor 1 alpha (EF11a), MMLV-1tr, internal ribosome entry site (IRES) or P2A peptide to permit translation of multiple genes from a single transcript, metallothionein, a transcription enhancer element, a transcription termination signal, polyadenylation sequences, sequences for optimization of initiation of translation, and translation termination sequences. It will be understood that the choice of the appropriate regulatory element will depend on the encoded component to be expressed (e.g., protein or RNA) or whether the nucleic acid comprises multiple components that require different polymerases or are not intended to be expressed as a fusion protein.

[0061] The term “promoter” refers to a DNA sequence that contains an RNA polymerase binding site, transcription start site, TATA box, and/or B recognition element and assists or promotes the transcription and expression of an associated transcribable polynucleotide sequence and/or gene (or transgene). A promoter can be synthetically produced or can be derived from a known or naturally occurring promoter sequence or another promoter sequence. A promoter can be proximal or distal to the gene to be transcribed. A promoter can also include a chimeric promoter comprising a combination of two or more heterologous sequences to confer certain properties. A promoter of the present disclosure can include variants of promoter sequences that are similar in composition, but not identical to, other promoter sequence(s) known or provided herein. A promoter can be classified according to criteria relating to the pattern of expression of an associated coding or transcribable sequence or gene operably linked to the promoter, such as constitutive, developmental, tissue specific, inducible, etc.

[0062] The term “enhancer” refers to regulatory element DNA sequences that, when bound by specific proteins called transcription factors, regulate the expression of an associated gene. Enhancers may be located in the intron of the gene, or 5′ or 3′ of the coding sequence of the gene. Enhancers may be proximal to the gene (i.e., within a few tens or hundreds of base pairs (bp) of the promoter), or may be located distal to the gene (i.e., thousands of bp, hundreds of thousands of bp, or even millions of bp away from the promoter). A single gene may be regulated by more than one enhancer, all of which are envisaged as within the scope of the instant disclosure.

[0063] As used herein, a “post-transcriptional regulatory element (PRE),” such as a hepatitis PRE, refers to a DNA sequence that, when transcribed creates a tertiary structure capable of exhibiting post-transcriptional activity to enhance or promote expression of an associated gene operably linked thereto.

[0064] The term “GATA binding site” refers to a DNA binding site for the GATA family of transcription factors. GATA transcription factors typically recognize a target site conforming to the consensus sequence WGATAR (where W=A or T and R=A or G).

[0065] “Recombinant,” as used herein, means that a particular nucleic acid (DNA or RNA) is the product of various combinations of cloning, restriction, and/or ligation steps resulting in a construct having a structural coding or non-coding sequence distinguishable from endogenous nucleic acids found in natural systems. Generally, DNA sequences encoding the structural coding sequence can be assembled from cDNA fragments and short oligonucleotide linkers, or from a series of synthetic oligonucleotides, to provide a synthetic nucleic acid which is capable of being expressed from a recombinant transcriptional unit contained in a cell or in a cell-free transcription and translation system. Such sequences can be provided in the form of an open reading frame uninterrupted by internal non-translated sequences, or introns, which are typically present in eukaryotic genes. Genomic DNA comprising the relevant sequences can also be used in the formation of a recombinant gene or transcriptional unit. Sequences of non-translated DNA may be present 5′ or 3′ from the open reading frame, where such sequences do not interfere with manipulation or expression of the coding regions, and may indeed act to modulate production of a desired product by various mechanisms (see “enhancers” and “promoters”, above).

[0066] The term “recombinant polynucleotide” or “recombinant nucleic acid” refers to one which is not naturally occurring, e.g., is made by the artificial combination of two otherwise separated segments of sequence through human intervention. This artificial combination is often accomplished by either chemical synthesis means, or by the artificial manipulation of isolated segments of nucleic acids, e.g., by genetic engineering techniques. Such can be done to replace a codon with a redundant codon encoding the same or a conservative amino acid, while typically introducing or removing a sequence recognition site. Alternatively, it is performed to join together nucleic acid segments of desired functions to generate a desired combination of functions. This artificial combination is often accomplished by either chemical synthesis means, or by the artificial manipulation of isolated segments of nucleic acids, e.g., by genetic engineering techniques.

[0067] Similarly, the term “recombinant polypeptide” or “recombinant protein” refers to a polypeptide or protein which is not naturally occurring, e.g., is made by the artificial combination of two otherwise separated segments of amino sequence through human intervention. Thus, e.g., a protein that comprises a heterologous amino acid sequence is recombinant.

[0068] As used herein, the term “contacting” means establishing a physical connection between two or more entities. For example, contacting a target nucleic acid sequence with a guide nucleic acid means that the target nucleic acid sequence and the guide nucleic acid are made to share a physical connection; e.g., can hybridize if the sequences share sequence similarity.

[0069] “Dissociation constant”, or “K_{d}”, are used interchangeably and mean the affinity between a ligand “L” and a protein “P”; i.e., how tightly a ligand binds to a particular protein. It can be calculated using the formula K_{d}=[L] [P]/[LP], where [P], [L] and [LP] represent molar concentrations of the protein, ligand and complex, respectively.

[0070] The disclosure provides compositions and methods useful for editing a target nucleic acid sequence. As used herein “editing” is used interchangeably with “modifying” and includes but is not limited to cleaving, nicking, deleting, knocking in, knocking out, and the like.

[0071] The term “knock-out” refers to the elimination of a gene or the expression of a gene. For example, a gene can be knocked out by either a deletion or an addition of a nucleotide sequence that leads to a disruption of the reading frame. As another example, a gene may be knocked out by replacing a part of the gene with an irrelevant sequence. The term “knock-down” as used herein refers to reduction in the expression of a gene or its gene product(s). As a result of a gene knock-down, the protein activity or function may be attenuated or the protein levels may be reduced or eliminated.

[0072] As used herein, “homology-directed repair” (HDR) refers to the form of DNA repair that takes place during repair of double-strand breaks in cells. This process requires nucleotide sequence homology, and uses a donor template to repair or knock-out a target DNA, and leads to the transfer of genetic information from the donor (e.g., such as the donor template) to the target. Homology-directed repair can result in an alteration of the sequence of the target nucleic acid sequence by insertion, deletion, or mutation if the donor template differs from the target DNA sequence and part or all of the sequence of the donor template is incorporated into the target DNA at the correct genomic locus.

[0073] As used herein, “non-homologous end joining” (NHEJ) refers to the repair of double-strand breaks in DNA by direct ligation of the break ends to one another without the need for a homologous template (in contrast to homology-directed repair, which requires a homologous sequence to guide repair). NHEJ often results in indels; the loss (deletion) or insertion of nucleotide sequence near the site of the double-strand break.

[0074] As used herein “micro-homology mediated end joining” (MMEJ) refers to a mutagenic double strand break (DSB) repair mechanism, which always associates with deletions flanking the break sites without the need for a homologous template (in contrast to homology-directed repair, which requires a homologous sequence to guide repair). MMEJ often results in the loss (deletion) of nucleotide sequence near the site of the double-strand break.

[0075] A polynucleotide or polypeptide (or protein) has a certain percent “sequence similarity” or “sequence identity” to another polynucleotide or polypeptide, meaning that, when aligned, that percentage of bases or amino acids are the same, and in the same relative position, when comparing the two sequences. Sequence similarity (sometimes referred to as percent similarity, percent identity, or homology) can be determined in a number of different manners. To determine sequence similarity, sequences can be aligned using the methods and computer programs that are known in the art, including BLAST, available over the world wide web at ncbi.nlm.nih.gov/BLAST. Percent complementarity between particular stretches of nucleic acid sequences within nucleic acids can be determined using any convenient method. Example methods include BLAST programs (basic local alignment search tools) and PowerBLAST programs (Altschul et al., J. Mol. Biol., 1990, 215, 403-410; Zhang and Madden, Genome Res., 1997, 7, 649-656) or by using the Gap program (Wisconsin Sequence Analysis Package, Version 8 for Unix, Genetics Computer Group, University Research Park, Madison Wis.), e.g., using default settings, which uses the algorithm of Smith and Waterman (Adv. Appl. Math., 1981, 2, 482-489).

[0076] The terms “polypeptide,” and “protein” are used interchangeably herein, and refer to a polymeric form of amino acids of any length, which can include coded and non-coded amino acids, chemically or biochemically modified or derivatized amino acids, and polypeptides having modified peptide backbones. The term includes fusion proteins, including, but not limited to, fusion proteins with a heterologous amino acid sequence.

[0077] A “vector” or “expression vector” is a replicon, such as plasmid, phage, virus, virus-like particle, or cosmid, to which another DNA segment, i.e., an “insert”, may be attached so as to bring about the replication or expression of the attached segment in a cell.

[0078] The term “naturally-occurring” or “unmodified” or “wild type” as used herein as applied to a nucleic acid, a polypeptide, a cell, or an organism, refers to a nucleic acid, polypeptide, cell, or organism that is found in nature.

[0079] As used herein, a “mutation” refers to an insertion, deletion, substitution, duplication, or inversion of one or more amino acids or nucleotides as compared to a wild-type or reference amino acid sequence or to a wild-type or reference nucleotide sequence.

[0080] As used herein the term “isolated” is meant to describe a polynucleotide, a polypeptide, or a cell that is in an environment different from that in which the polynucleotide, the polypeptide, or the cell naturally occurs. An isolated genetically modified host cell may be present in a mixed population of genetically modified host cells.

[0081] A “host cell,” as used herein, denotes a eukaryotic cell, a prokaryotic cell, or a cell from a multicellular organism (e.g., a cell line) cultured as a unicellular entity, which eukaryotic or prokaryotic cells are used as recipients for a nucleic acid (e.g., an expression vector), and include the progeny of the original cell which has been genetically modified by the nucleic acid. It is understood that the progeny of a single cell may not necessarily be completely identical in morphology or in genomic or total DNA complement as the original parent, due to natural, accidental, or deliberate mutation. A “recombinant host cell” (also referred to as a “genetically modified host cell”) is a host cell into which has been introduced a heterologous nucleic acid, e.g., an expression vector.

[0082] The term “conservative amino acid substitution” refers to the interchangeability in proteins of amino acid residues having similar side chains. For example, a group of amino acids having aliphatic side chains consists of glycine, alanine, valine, leucine, and isoleucine; a group of amino acids having aliphatic-hydroxyl side chains consists of serine and threonine; a group of amino acids having amide-containing side chains consists of asparagine and glutamine; a group of amino acids having aromatic side chains consists of phenylalanine, tyrosine, and tryptophan; a group of amino acids having basic side chains consists of lysine, arginine, and histidine; and a group of amino acids having sulfur-containing side chains consists of cysteine and methionine. Exemplary conservative amino acid substitution groups are: valine-leucine-isoleucine, phenylalanine-tyrosine, lysine-arginine, alanine-valine, and asparagine-glutamine.

[0083] As used herein, “treatment” or “treating,” are used interchangeably herein and refer to an approach for obtaining beneficial or desired results, including but not limited to a therapeutic benefit and/or a prophylactic benefit. By therapeutic benefit is meant eradication or amelioration of the underlying disorder or disease being treated. A therapeutic benefit can also be achieved with the eradication or amelioration of one or more of the symptoms or an improvement in one or more clinical parameters associated with the underlying disease such that an improvement is observed in the subject, notwithstanding that the subject may still be afflicted with the underlying disease.

[0084] The terms “therapeutically effective amount” and “therapeutically effective dose”, as used herein, refer to an amount of a drug or a biologic, alone or as a part of a composition, that is capable of having any detectable, beneficial effect on any symptom, aspect, measured parameter or characteristics of a disease state or condition when administered in one or repeated doses to a subject such as a human or an experimental animal. Such effect need not be absolute to be beneficial.

[0085] As used herein, “administering” is meant as a method of giving a dosage of a composition of the disclosure to a subject.

[0086] As used herein, a “subject” is a mammal. Mammals include, but are not limited to, domesticated animals, primates, non-human primates, humans, dogs, porcine (pigs), rabbits, mice, rats and other rodents.

[0087] All publications, patents, and patent applications mentioned in this specification are herein incorporated by reference to the same extent as if each individual publication, patent, or patent application was specifically and individually indicated to be incorporated by reference.

### I. General Methods

[0088] The practice of the present invention employs, unless otherwise indicated, conventional techniques of immunology, biochemistry, chemistry, molecular biology, microbiology, cell biology, genomics and recombinant DNA, which can be found in such standard textbooks as Molecular Cloning: A Laboratory Manual, 3rd Ed. (Sambrook et al., Harbor Laboratory Press 2001); Short Protocols in Molecular Biology, 4th Ed. (Ausubel et al. eds., John Wiley & Sons 1999); Protein Methods (Bollag et al., John Wiley & Sons 1996); Nonviral Vectors for Gene Therapy (Wagner et al. eds., Academic Press 1999); Viral Vectors (Kaplift & Loewy eds., Academic Press 1995); Immunology Methods Manual (I. Lefkovits ed., Academic Press 1997); and Cell and Tissue Culture: Laboratory Procedures in Biotechnology (Doyle & Griffiths, John Wiley & Sons 1998), the disclosures of which are incorporated herein by reference.

[0089] Where a range of values is provided, it is understood that endpoints are included and that each intervening value, to the tenth of the unit of the lower limit unless the context clearly dictates otherwise, between the upper and lower limit of that range and any other stated or intervening value in that stated range, is encompassed. The upper and lower limits of these smaller ranges may independently be included in the smaller ranges, and are also encompassed, subject to any specifically excluded limit in the stated range. Where the stated range includes one or both of the limits, ranges excluding either or both of those included limits are also included.

[0090] Unless defined otherwise, all technical and scientific terms used herein have the same meaning as commonly understood by one of ordinary skill in the art to which this invention belongs. All publications mentioned herein are incorporated herein by reference to disclose and describe the methods and/or materials in connection with which the publications are cited.

[0091] It must be noted that as used herein and in the appended claims, the singular forms “a,” “an,” and “the” include plural referents unless the context clearly dictates otherwise.

[0092] It will be appreciated that certain features of the disclosure, which are, for clarity, described in the context of separate embodiments, may also be provided in combination in a single embodiment. In other cases, various features of the disclosure, which are, for brevity, described in the context of a single embodiment, may also be provided separately or in any suitable sub-combination. It is intended that all combinations of the embodiments pertaining to the disclosure are specifically embraced by the present disclosure and are disclosed herein just as if each and every combination was individually and explicitly disclosed. In addition, all sub-combinations of the various embodiments and elements thereof are also specifically embraced by the present disclosure and are disclosed herein just as if each and every such sub-combination was individually and explicitly disclosed herein.

### II Systems for Genetic Editing of BCL11A Genes

[0093] In a first aspect, the present disclosure provides systems comprising a Class 2, Type V CRISPR nuclease protein and one or more guide nucleic acids (gRNA) for use in modifying or editing a BCL11A gene in order to reduce or eliminate expression of the BCL11A gene product. Exemplary Class 2, Type V CRISPR nuclease protein and guide nucleic acid systems include the CasX:gRNA system. The CasX:gRNA systems are specifically designed to modify the BCL11A gene in eukaryotic cells. In some cases, the CasX:gRNA systems are designed to knock-down or knock-out the BCL11A gene. Generally, any portion of the BCL11A gene can be targeted using the programable compositions and methods provided herein. In some embodiments, the BCL11A gene to be modified is a wild-type sequence, and the portion to be modified is selected from the group consisting of a BCL11A intron, a BCL11A exon, a BCL11A intron-exon junction, a BCL11A regulatory element, and an intergenic region, or the modification is deletion or mutation of one or more exons.

[0094] As used herein, a “system,” such as the systems comprising a CRISPR nuclease protein and one or more gRNAs the disclosure, as well as nucleic acids encoding the CRISPR nuclease proteins and gRNA and vectors comprising the nucleic acids or CRISPR nuclease protein and one or more gRNAs the disclosure, is used interchangeably with term “composition.”

[0095] The human BCL11A gene (HGNC: 13221) encodes a protein (Q9H165) having the sequence

MSRRKQGKPQHLSKREFSPEPLEAILTDDEPDHGPLGAPEGDHDLLTCGQCQMNFPLGDILIFIEHKRKQCNGSLCL EKAVDKPPSPSPIEMKKASNPVEVGIQVTPEDDDCLSTSSRGICPKQEHIADKLLHWRGLSSPRSAHGALIPTPGMS AEYAPQGICKDEPSSYTCTTCKQPFTSAWFLLQHAQNTHGLRIYLESEHGSPLTPRVGIPSGLGAECPSQPPLHGIH IADNNPFNLLRIPGSVSREASGLAEGRFPPTPPLFSPPPRHHLDPHRIERLGAEEMALATHHPSAFDRVLRLNPMAM EPPAMDFSRRLRELAGNTSSPPLSPGRPSPMQRLLQPFQPGSKPPFLATPPLPPLQSAPPPSQPPVKSKSCEFCGKT FKFQSNLVVHRRSHTGEKPYKCNLCDHACTQASKLKRHMKTHMHKSSPMTVKSDDGLSTASSPEPGTSDLVGSASSA LKSVVAKFKSENDPNLIPENGDEEEEEDDEEEEEEEEEEEEELTESERVDYGFGLSLEAARHHENSSRGAVVGVGDE SRALPDVMQGMVLSSMQHFSEAFHQVLGEKHKRGHLAEAEGHRDTCDEDSVAGESDRIDDGTVNGRGCSPGESASGG LSKKLLLGSPSSLSPFSKRIKLEKEFDLPPAAMPNTENVYSQWLAGYAASRQLKDPFLSFGDSRQSPFASSSEHSSE NGSLRFSTPPGELDGGISGRSGTGSGGSTPHISGPGPGRPSSKEGRRSDTCEYCGKVFKNCSNLTVHRRSHTGERPY KCELCNYACAQSSKLTRHMKTHGQVGKDVYKCEICKMPFSVYSTLEKHMKKWHSDRVLNNDIKTE (SEQ ID NO: 100). The BCL11A gene is defined as the sequence that spans chr2 60450520-60554467 (GRCh38/hg38 Ensembl 100) of the human genome on chromosome 2.

[0096] In some embodiments, the disclosure provides systems specifically designed to modify the BCL11A gene in eukaryotic cells; either in vitro, ex vivo, or in vivo in a subject. Generally, any portion of the BCL11A target nucleic acid can be targeted using the programmable compositions and methods provided herein. In some embodiments, the CRISPR nuclease is a Class 2, Type V nuclease. Although members of Class 2 Type V CRISPR-Cas systems have differences, they share some common characteristics that distinguish them from the Cas9 systems. Firstly, the Type V nucleases possess an RNA-guided single effector containing a RuvC domain but no HNH domain, and they recognize T-rich PAM 5′ upstream to the target region on the non-targeted strand, which is different from Cas9 systems which rely on G-rich PAM at 3′ side of target sequences. Type V nucleases generate staggered double-stranded breaks distal to the PAM sequence, unlike Cas9, which generates a blunt end in the proximal site close to the PAM. In addition, Type V nucleases degrade ssDNA in trans when activated by target dsDNA or ssDNA binding in cis. In some embodiments, the disclosure provides Class 2, Type V nuclease selected from the group consisting of Cas12a, Cas12b, Cas12c, Cas12d (CasY), Cas12j. Cas12k, CasZ, and CasX. In some embodiments, the disclosure provides systems comprising one or more CasX proteins and one or more guide nucleic acids (gRNA) as a CasX:gRNA system. In other embodiments, the CasX:gRNA systems of the disclosure comprise one or more CasX proteins, one or more guide nucleic acids (gRNA) and one or more donor template nucleic acids comprising a nucleic acid encoding a portion of a BCL11A gene wherein the donor template nucleic acid comprises a deletion, an insertion, or a mutation of one or more nucleotides in comparison to a genomic nucleic acid sequence encoding the BCL11A protein. Each of these components and their use in the editing of the BCL11A gene is described herein, below.

[0097] In some embodiments, the disclosure provides gene editing pairs of a CasX and a gRNA of any of the embodiments described herein that are capable of being bound together prior to their use for gene editing and, thus, are “pre-complexed” as a ribonuclear protein complex (RNP). The use of a pre-complexed RNP confers advantages in the delivery of the system components to a cell or target nucleic acid sequence for editing of the target nucleic acid sequence.

[0098] In some embodiments, the functional RNP can be delivered ex vivo to a cell by electrophoresis or by chemical means. In other embodiments, the functional RNP can be delivered either ex vivo or in vivo by a vector in their functional form. In some embodiments, the RNP can be delivered in vivo to a subject using a CasX delivery particle (XDP). The gRNA can provide target specificity to the complex by including a targeting sequence (or “spacer”) having a nucleotide sequence that is complementary to a sequence of the target nucleic acid sequence while the CasX variant protein of the pre-complexed CasX:gRNA provides the site-specific activity, such as cleavage or nicking of the target sequence, that is guided to a target site (e.g., stabilized at a target site) within a target nucleic acid sequence by virtue of its association with the gRNA.

[0099] The systems have utility in the treatment of a subject having a hemoglobinopathy disease, such as sickle cell anemia or β-thalassemia. Each of the components of the CasX:gRNA systems, their functions, and their use in the editing of the target nucleic acids in cells is described more fully, below.

### III. Guide Nucleic Acids of the Systems for Genetic Editing

[0100] In another aspect, the disclosure relates to specifically-designed guide ribonucleic acids (gRNA) comprising a targeting sequence complementary to (and are therefore able to hybridize with) a target nucleic acid sequence of a BCL11A gene that have utility, when complexed with a CRISPR nuclease, in genome editing of the BCL11A target nucleic acid in a cell. It is envisioned that in some embodiments, multiple gRNAs are delivered in the systems for the modification of a target nucleic acid. For example, a pair of gRNAs with targeting sequences to different or overlapping regions of the target nucleic acid sequence can be used, when each is complexed with a CRISPR nuclease, in order to bind and cleave at two different or overlapping sites within the gene, which is then edited by non-homologous end joining (NHEJ), homology-directed repair (HDR), homology-independent targeted integration (HITI), micro-homology mediated end joining (MMEJ), single strand annealing (SSA) or base excision repair (BER).

[0101] In some embodiments, the disclosure provides gRNAs utilized in the CasX:gRNA systems that have utility in genome editing a BCL11A gene in a eukaryotic cell. In a particular embodiment, the gRNA of the systems are capable of forming a complex with a CasX nuclease. The present disclosure provides specifically-designed gRNAs wherein the targeting sequence (or spacer, described more fully, below) of the gRNA is complementary to (and are therefore able to hybridize with) target nucleic acid sequences when used as a component of the gene editing CasX:gRNA systems. SEQ ID NOs of representative, but non-limiting examples of targeting sequences to the BCL11A target nucleic acid that can be utilized in the gRNA of the embodiments are presented in Table 1, described more fully below.

[0102] a. Reference gRNA and gRNA variants

[0103] As used herein, a “reference gRNA” refers to a CRISPR guide nucleic acid comprising a wild-type sequence of a naturally-occurring gRNA. In some embodiments, a reference gRNA of the disclosure may be subjected to one or more mutagenesis methods, such as the mutagenesis methods described herein, which may include Deep Mutational Evolution (DME), deep mutational scanning (DMS), error prone PCR, cassette mutagenesis, random mutagenesis, staggered extension PCR, gene shuffling, or domain swapping, in order to generate one or more gRNA variants with enhanced or varied properties relative to the reference gRNA. gRNA variants also include variants comprising one or more exogenous sequences, for example fused to either the 5′ or 3′ end, or inserted internally. The activity of reference gRNAs may be used as a benchmark against which the activity of gRNA variants are compared, thereby measuring improvements in function or other characteristics of the gRNA variants. In other embodiments, a reference gRNA may be subjected to one or more deliberate, specifically-targeted mutations in order to produce a gRNA variant, for example a rationally designed variant.

[0104] The gRNAs of the disclosure comprise two segments: a targeting sequence and a protein-binding segment. The targeting segment of a gRNA includes a nucleotide sequence (referred to interchangeably as a guide sequence, a spacer, a targeter, or a targeting sequence) that is complementary to (and therefore hybridizes with) a specific sequence (a target site) within the target nucleic acid sequence (e.g., a target ssRNA, a target ssDNA, a strand of a double stranded target DNA, etc.), described more fully below. The targeting sequence of a gRNA is capable of binding to a target nucleic acid sequence, including a coding sequence, a complement of a coding sequence, a non-coding sequence, and to regulatory elements. The protein-binding segment (or “activator” or “protein-binding sequence”) interacts with (e.g., binds to) a CasX protein as a complex, forming an RNP (described more fully, below). The protein-binding segment is alternatively referred to herein as a “scaffold”, which is comprised of several regions, described more fully, below.

[0105] In the case of a dual guide RNA (dgRNA), the targeter and the activator portions each have a duplex-forming segment, where the duplex forming segment of the targeter and the duplex-forming segment of the activator have complementarity with one another and hybridize to one another to form a double stranded duplex (dsRNA duplex for a gRNA). When the gRNA is a gRNA, the term “targeter” or “targeter RNA” is used herein to refer to a crRNA-like molecule (crRNA: “CRISPR RNA”) of a CasX dual guide RNA (and therefore of a CasX single guide RNA when the “activator” and the “targeter” are linked together, e.g., by intervening nucleotides). The crRNA has a 5′ region that anneals with the tracrRNA followed by the nucleotides of the targeting sequence. Thus, for example, a guide RNA (dgRNA or sgRNA) comprises a guide sequence and a duplex-forming segment of a crRNA, which can also be referred to as a crRNA repeat. A corresponding tracrRNA-like molecule (activator) also comprises a duplex-forming stretch of nucleotides that forms the other half of the dsRNA duplex of the protein-binding segment of the guide RNA. Thus, a targeter and an activator, as a corresponding pair, hybridize to form a dual guide NA, referred to herein as a “dual guide NA”, a “dual-molecule gRNA”, a “dgRNA”, a “double-molecule guide NA”, or a “two-molecule guide NA”. Site-specific binding and/or cleavage of a target nucleic acid sequence (e.g., genomic DNA) by the CasX protein can occur at one or more locations (e.g., a sequence of a target nucleic acid) determined by base-pairing complementarity between the targeting sequence of the gRNA and the target nucleic acid sequence. Thus, for example, the gRNA of the disclosure have sequences complementarity to and therefore can hybridize with the target nucleic acid that is adjacent to a sequence complementary to a TC PAM motif or a PAM sequence, such as ATC, CTC, GTC, or TTC. Because the targeting sequence of a guide sequence hybridizes with a sequence of a target nucleic acid sequence, a targeter can be modified by a user to hybridize with a specific target nucleic acid sequence, so long as the location of the PAM sequence is considered. Thus, in some cases, the sequence of a targeter may be a non-naturally occurring sequence. In other cases, the sequence of a targeter may be a naturally-occurring sequence, derived from the gene to be edited. In other embodiments, the activator and targeter of the gRNA are covalently linked to one another (rather than hybridizing to one another) and comprise a single molecule, referred to herein as a “single-molecule gRNA,” “one-molecule guide NA,” “single guide NA”, “single guide RNA”, a “single-molecule guide RNA,” a “one-molecule guide RNA”, or a “sgRNA”. In some embodiments, the sgRNA includes an “activator” or a “targeter” and thus can be an “activator-RNA” and a “targeter-RNA,” respectively. In some embodiments, the gRNA is a ribonucleic acid molecule (“gRNA”), and in other embodiments, the gRNA is a chimera, and comprises both DNA and RNA. As used herein, the term gRNA cover naturally-occurring molecules, as well as sequence variants.

[0106] Collectively, the assembled gRNAs of the disclosure comprise four distinct regions, or domains: the RNA triplex, the scaffold stem, the extended stem, and the targeting sequence that, in the embodiments of the disclosure is specific for a target nucleic acid and is located on the 3′ end of the gRNA. The RNA triplex, the scaffold stem, and the extended stem, together, are referred to as the “scaffold” of the gRNA.

[0107] b. RNA triplex

[0108] In some embodiments of the guide NAs provided herein (including reference sgRNAs), there is a RNA triplex, and the RNA triplex comprises the sequence of a UUU—nX(˜4-15)—UUU (SEQ ID NO: 226) stem loop that ends with an AAAG after 2 intervening stem loops (the scaffold stem loop and the extended stem loop), forming a pseudoknot that may also extend past the triplex into a duplex pseudoknot. The UU-UUU-AAA sequence of the triplex forms as a nexus between the targeting sequence, scaffold stem, and extended stem. In exemplary CasX sgRNAs, the UUU-loop-UUU region is coded for first, then the scaffold stem loop, and then the extended stem loop, which is linked by the tetraloop, and then an AAAG closes off the triplex before becoming the targeting sequence.

[0109] c. Scaffold Stem Loop

[0110] In some embodiments of sgRNAs of the disclosure, the triplex region is followed by the scaffold stem loop. The scaffold stem loop is a region of the gRNA that is bound by CasX protein (such as a reference or CasX variant protein). In some embodiments, the scaffold stem loop is a fairly short and stable stem loop. In some cases, the scaffold stem loop does not tolerate many changes, and requires some form of an RNA bubble. In some embodiments, the scaffold stem is necessary for CasX sgRNA function. While it is perhaps analogous to the nexus stem of Cas9 as being a critical stem loop, the scaffold stem of a CasX sgRNA, in some embodiments, has a necessary bulge (RNA bubble) that is different from many other stem loops found in CRISPR/Cas systems. In some embodiments, the presence of this bulge is conserved across sgRNA that interact with different CasX proteins. An exemplary sequence of a scaffold stem loop sequence of a gRNA comprises the sequence CCAGCGACUAUGUCGUAUGG (SEQ ID NO: 20).

[0111] d. Extended Stem Loop

[0112] In some embodiments of the CasX sgRNAs of the disclosure, the scaffold stem loop is followed by the extended stem loop. In some embodiments, the extended stem comprises a synthetic tracr and crRNA fusion that is largely unbound by the CasX protein. In some embodiments, the extended stem loop can be highly malleable. In some embodiments, a single guide gRNA is made with a GAAA tetraloop linker or a GAGAAA linker between the tracr and crRNA in the extended stem loop. In some cases, the targeter and activator of a CasX sgRNA are linked to one another by intervening nucleotides and the linker can have a length of from 3 to 20 nucleotides. In some embodiments of the CasX sgRNAs of the disclosure, the extended stem is a large 32-bp loop that sits outside of the CasX protein in the ribonucleoprotein complex. An exemplary sequence of an extended stem loop sequence of a sgRNA comprises the sequence GCGCUUAUUUAUCGGAGAGAAAUCCGAUAAAUAAGAAGC (SEQ ID NO: 21). In some embodiments, the extended stem loop comprises a GAGAAA spacer sequence.

[0113] e. Targeting Sequence

[0114] In some embodiments of the gRNAs of the disclosure, the extended stem loop is followed by a region that forms part of the triplex, and then the targeting sequence (or “spacer”) at the 3′ end of the gRNA. The targeting sequence targets the CasX ribonucleoprotein holo complex to a specific region of the target nucleic acid sequence of the gene to be modified. Thus, for example, gRNA targeting sequences of the disclosure have sequences complementarity to, and therefore can hybridize to, a portion of the BCL11A gene in a nucleic acid in a eukaryotic cell (e.g., a eukaryotic chromosome, chromosomal sequence, a eukaryotic RNA, etc.) as a component of the RNP when the TC PAM motif or any one of the PAM sequences TTC, ATC, GTC, or CTC is located 1 nucleotide 5′ to the non-target strand sequence complementary to the target sequence. The targeting sequence of a gRNA can be modified so that the gRNA can target a desired sequence of any desired target nucleic acid sequence, so long as the PAM sequence location is taken into consideration. In some embodiments, the gRNA scaffold is 5′ of the targeting sequence, with the targeting sequence on the 3′ end of the gRNA. In some embodiments, the PAM motif sequence recognized by the nuclease of the RNP is TC. In other embodiments, the PAM sequence recognized by the nuclease of the RNP is NTC.

[0115] In some embodiments, the targeting sequence of the gRNA is specific for a portion of a gene encoding a BCL11A protein. In some embodiments, the targeting sequence of a gRNA is specific for a BCL11A exon. In some embodiments, the targeting sequence of a gRNA is specific for a BCL11A intron. In some embodiments, the targeting sequence of the gRNA is specific for a BCL11A intron-exon junction. In some embodiments, the targeting sequence of the gRNA has a sequence that hybridizes with a BCL11A regulatory element, a BCL11A coding region, a BCL11A non-coding region, or combinations thereof (e.g., the intersection of two regions). In some embodiments, the regulatory element comprises a GATA binding sequence. In some embodiments, the targeting sequence of the gRNA is complementary to a sequence comprising one or more single nucleotide polymorphisms (SNPs) of the BCL11A gene or its complement. SNPs that are within BCL11A coding sequence or within BCL11A non-coding sequence are both within the scope of the instant disclosure. In other embodiments, the targeting sequence of the gRNA is complementary to a sequence of an intergenic region of the BCL11A gene or a sequence complementary to an intergenic region of the BCL11A gene.

[0116] In some embodiments, the targeting sequence of a gRNA is designed to be specific for a regulatory element that regulates expression of the BCL11A gene product. Such regulatory elements include, but are not limited to promoter regions, enhancer regions, intergenic regions, 5′ untranslated regions (5′ UTR), 3′ untranslated regions (3′ UTR), conserved elements, and regions comprising cis-regulatory elements. The promoter region is intended to encompass nucleotides within 5 kb of the initiation point of the encoding sequence or, in the case of gene enhancer elements or conserved elements, can be thousands of base pairs (bp), hundreds of thousands of bp, or even millions of bp away from the encoding sequence of the gene of the target nucleic acid. In particular embodiments, the targeting sequence of the gRNA hybridizes with a sequence that is complementary to a BCL11A regulatory element. In one embodiment, the targeting sequence of the gRNA is UGGAGCCUGUGAUAAAAGCA (SEQ ID NO: 22), which hybridizes with the BCL11A GATA1 erythroid-specific enhancer binding site sequence, or has at least 90% or at least 95% sequence identity thereto (see FIG. 23). In another embodiment, the targeting sequence of the gRNA is UGCUUUUAUCACAGGCUCCA (SEQ ID NO: 23), or has at least 90% or at least 95% sequence identity thereto. In another embodiment, the targeting sequence of the gRNA is UGCUUUUAUCACAGGCUCCA (SEQ ID NO: 23), or has at least 90% or at least 95% sequence identity thereto. In other embodiments, the targeting sequence of the gRNA is selected from the group consisting of CAGGCUCCAGGAAGGGUUUG (SEQ ID NO: 2949), GAGGCCAAACCCUUCCUGGA (SEQ ID NO: 2948), AGUGCAAGCUAACAGUUGCU (SEQ ID NO: 15747), and AUACAACUUUGAAGCUAGUC (SEQ ID NO: 15748).

[0117] In subjects that are maturing after birth, GATA1 binding enhances BCL11A expression which, in turn, represses hemoglobin F (HbF) expression, in favor of hemoglobin gamma. However, in subjects with certain hemoglobinopathies, repressing BCL11A expression has been demonstrated to permit HbF expression to resume, which can compensate for otherwise defective hemoglobin in the subject.

[0118] In some embodiments, the targeting sequence of the gRNA has between 14 and 35 consecutive nucleotides. In some embodiments, the targeting sequence has 14, 15, 16, 18, 18, 19, 20, 21, 22, 23 24, 25, 26, 27, 28, 29, 30, 31, 32, 33, 34 or 35 consecutive nucleotides. In some embodiments, the targeting sequence consists of 20 consecutive nucleotides. In some embodiments, the targeting sequence consists of 19 consecutive nucleotides. In some embodiments, the targeting sequence consists of 18 consecutive nucleotides. In some embodiments, the targeting sequence consists of 17 consecutive nucleotides. In some embodiments, the targeting sequence consists of 16 consecutive nucleotides. In some embodiments, the targeting sequence consists of 15 consecutive nucleotides. In some embodiments, the targeting sequence has 14, 15, 16, 17, 18, 19, 20, 21, 22, 23, 24, 25, 26, 27, 28, 29, 30, 31, 32, 33, 34 or 35 consecutive nucleotides and the targeting sequence can comprise 0 to 5, 0 to 4, 0 to 3, or 0 to 2 mismatches relative to the target nucleic acid sequence and retain sufficient binding specificity such that the RNP comprising the gRNA comprising the targeting sequence can form a complementary bond with respect to the target nucleic acid.

[0119] Representative, but non-limiting examples of targeting sequences to the target nucleic acid sequence contemplated for use in the gRNA of the disclosure are presented as SEQ ID NOS: 272-2100 and 2286-26789 (see Table 1). In some embodiments, the disclosure provides targeting sequences for an ATC PAM comprising a sequence that is at least 50% identical, at least 55% identical, at least 60% identical, at least 65% identical, at least 70% identical, at least 75% identical, at least 80% identical, at least 85% identical, at least 90% identical, at least 95% identical, or 100% identical to a sequence of SEQ ID NOs: 272-2100 or 2286-5625. In some embodiments, the disclosure provides targeting sequences for an ATC PAM comprising a sequence of SEQ ID NOs: 272-2100 or 2286-5625. In some embodiments, the disclosure provides targeting sequences for an CTC PAM comprising a sequence that is at least 50% identical, at least 55% identical, at least 60% identical, at least 65% identical, at least 70% identical, at least 75% identical, at least 80% identical, at least 85% identical, at least 90% identical, at least 95% identical, or 100% identical to a sequence of SEQ ID NOs: 5626-13616. In some embodiments, the disclosure provides targeting sequences for an CTC PAM comprising a sequence of SEQ ID NOs: 5626-13616. In some embodiments, the disclosure provides targeting sequences for an GTC PAM comprising a sequence that is at least 50% identical, at least 55% identical, at least 60% identical, at least 65% identical, at least 70% identical, at least 75% identical, at least 80% identical, at least 85% identical, at least 90% identical, at least 95% identical, or 100% identical to a sequence of SEQ ID NOs: 13617-17903. In some embodiments, the disclosure provides targeting sequences for an GTC PAM comprising a sequence of SEQ ID NOs: 13617-17903. In some embodiments, the disclosure provides targeting sequences for an TTC PAM comprising a sequence that is at least 50% identical, at least 55% identical, at least 60% identical, at least 65% identical, at least 70% identical, at least 75% identical, at least 80% identical, at least 85% identical, at least 90% identical, at least 95% identical, or 100% identical to a sequence of SEQ ID NOs: 17904-26789. In some embodiments, the disclosure provides targeting sequences for an TTC PAM comprising a sequence of SEQ ID NOs: 17904-26789. In some embodiments, the targeting sequence contemplated for use in the gRNA of the disclosure of the gRNA comprises a sequence of SEQ ID NOs: 272-2100 or 2286-26789 with a single nucleotide removed from the 3′ end of the sequence. In other embodiments, the targeting sequence of the gRNA comprises a sequence of SEQ ID NOs: 272-2100 or 2286-26789 with two nucleotides removed from the 3′ end of the sequence. In other embodiments, the targeting sequence of the gRNA comprises a sequence of SEQ ID NOs: 272-2100 or 2286-26789 with three nucleotides removed from the 3′ end of the sequence. In other embodiments, the targeting sequence of the gRNA comprises a sequence of SEQ ID NOs: 272-2100 or 2286-26789 with four nucleotides removed from the 3′ end of the sequence. In other embodiments, the targeting sequence of the gRNA comprises a sequence of SEQ ID NOs: 272-2100 or 2286-26789 with five nucleotides removed from the 3′ end of the sequence. In the foregoing embodiments of the paragraph, thymine (T) nucleotides can be substituted for one or more or all of the uracil (U) nucleotides in any of the targeting sequences such that the gRNA targeting sequence can be a gDNA or a gRNA, or a chimera of RNA and DNA, or in those cases where the encoding sequence for the spacer is incorporated into an expression vector. In some embodiments, a targeting sequence of SEQ ID NOs: 272-2100 or 2286-26789 has at least 1, 2, 3, 4, 5, or 6 or more thymine nucleotides substituted for uracil nucleotides.

TABLE 1
SEQ ID NOs for gRNA Targeting Sequences for BCL11A Gene

| PAM Type | SEQ ID NO |
|---|---|
| ATC | 272-2100, 2286-5625 |
| CTC | 5626-13616 |
| GTC | 13617-17903 |
| TTC | 17904-26789 |

[0120] In some embodiments, the CasX:gRNA system comprises a first gRNA and further comprises a second (and optionally a third, fourth, fifth, or more) gRNA, wherein the second gRNA or additional gRNA has a targeting sequence complementary to a different or overlapping portion of the target nucleic acid sequence compared to the targeting sequence of the first gRNA such that multiple points in the target nucleic acid are targeted, and, for example, multiple breaks are introduced in the target nucleic acid by the CasX. It will be understood that in such cases, the second or additional gRNA is complexed with an additional copy of the CasX protein. By selection of the targeting sequences of the gRNA, defined regions of the target nucleic acid sequence bracketing a particular location within the target nucleic acid can be modified or edited using the CasX:gRNA systems described herein, including facilitating the insertion of a donor template comprising a mutation of the BCL11A gene. In a particular embodiment, a second gRNA can comprise a targeting sequence complementary to a sequence that is 5′ or 3′ and adjacent to the GATA1 binding site such that the GATA1 binding site is disrupted.

[0121] f gRNA Scaffolds

[0122] With the exception of the targeting sequence domain, the remaining components of the gRNA are referred to herein as the scaffold. In some embodiments, the gRNA scaffolds are derived from naturally-occurring sequences, described below as reference gRNA. In other embodiments, the gRNA scaffolds are variants of reference gRNA wherein mutations, insertions, deletions or domain substitutions are introduced to confer desirable or improved properties on the gRNA.

[0123] The term “adjacent to” with respect to polynucleotide or amino acid sequences refers to sequences that are next to, or adjoining each other in a polynucleotide or polypeptide. The skilled artisan will appreciate that two sequences can be considered to be adjacent to each other and still encompass a limited amount of intervening sequence, e.g., 1, 2, 3, 4, 5, 6, 7, 8, 9 or 10 nucleotides or amino acids.

[0124] Table 2 provides the sequences of reference gRNA tracr and scaffold sequences. In some embodiments, the disclosure provides gRNA sequences wherein the gRNA has a scaffold comprising a sequence of SEQ ID NOs: 4-16 as set forth in Table 2, or a sequence having at least one nucleotide modification relative to a reference gRNA sequence having a sequence of any one of SEQ ID NOS: 4-16 of Table 2. It will be understood that in those embodiments wherein a vector comprises a DNA encoding sequence for a gRNA, or where a gRNA is a chimera of RNA and DNA, that thymine (T) bases can be substituted for the uracil (U) bases of any of the gRNA sequence embodiments described herein.

TABLE 2
Reference gRNA tracr and scaffold sequences

| SEQ | |
|---|---|
| ID | |
| NO. | Nucleotide Sequence |
| 4 | ACAUCUGGCGCGUUUAUUCCAUUACUUUGGAGCCAGUCCCAGCG |
| | ACUAUGUCGUAUGGACGAAGCGCUUAUUUAUCGGAGAGAAACCG |
| | AUAAGUAAAACGCAUCAAAG |
| 5 | UACUGGCGCUUUUAUCUCAUUACUUUGAGAGCCAUCACCAGCGA |
| | CUAUGUCGUAUGGGUAAAGCGCUUAUUUAUCGGAGAGAAAUCCG |
| | AUAAAUAAGAAGCAUCAAAG |
| 6 | ACAUCUGGCGCGUUUAUUCCAUUACUUUGGAGCCAGUCCCAGCG |
| | ACUAUGUCGUAUGGACGAAGCGCUUAUUUAUCGGAGA |
| 7 | ACAUCUGGCGCGUUUAUUCCAUUACUUUGGAGCCAGUCCCAGCG |
| | ACUAUGUCGUAUGGACGAAGCGCUUAUUUAUCGG |
| 8 | UACUGGCGCUUUUAUCUCAUUACUUUGAGAGCCAUCACCAGCGA |
| | CUAUGUCGUAUGGGUAAAGCGCUUAUUUAUCGGAGA |
| 9 | UACUGGCGCUUUUAUCUCAUUACUUUGAGAGCCAUCACCAGCGA |
| | CUAUGUCGUAUGGGUAAAGCGCUUAUUUAUCGG |
| 10 | GUUUACACACUCCCUCUCAUAGGGU |
| 11 | GUUUACACACUCCCUCUCAUGAGGU |
| 12 | UUUUACAUACCCCCUCUCAUGGGAU |
| 13 | GUUUACACACUCCCUCUCAUGGGGG |
| 14 | CCAGCGACUAUGUCGUAUGG |
| 15 | GCGCUUAUUUAUCGGAGAGAAAUCCGAUAAAUAAGAAGC |
| 16 | GGCGCUUUUAUCUCAUUACUUUGAGAGCCAUCACCAGCGACUAU |
| | GUCGUAUGGGUAAAGCGCUUAUUUAUCGGA |

[0125] g. gRNA Variants

[0126] In another aspect, the disclosure relates to guide nucleic acid variants (referred to herein alternatively as “gRNA variant” or “gRNA variant”), which comprise one or more modifications relative to a reference gRNA scaffold. As used herein, “scaffold” refers to all parts to the gRNA necessary for gRNA function with the exception of the targeting sequence.

[0127] In some embodiments, a gRNA variant comprises one or more nucleotide substitutions, insertions, deletions, or swapped or replaced regions relative to a reference gRNA sequence of the disclosure. In some embodiments, a mutation can occur in any region of a reference gRNA scaffold to produce a gRNA variant. In some embodiments, the scaffold of the gRNA variant sequence has at least 20%, at least 30%, at least 40%, at least 50%, at least 60%, or at least 70%, at least 80%, at least 85%, at least about 90%, at least about 95%, at least about 96%, at least about 97%, at least about 98%, or at least about 99% identity to the sequence of SEQ ID NO: 4 or SEQ ID NO: 5.

[0128] In some embodiments, a gRNA variant comprises one or more nucleotide changes within one or more regions of the reference gRNA that improve a characteristic relative to the reference gRNA. Exemplary regions include the RNA triplex, the pseudoknot, the scaffold stem loop, and the extended stem loop. In some cases, the variant scaffold stem further comprises a bubble. In other cases, the variant scaffold further comprises a triplex loop region. In still other cases, the variant scaffold further comprises a 5′ unstructured region. In one embodiment, the gRNA variant scaffold comprises a scaffold stem loop having at least 60% sequence identity to SEQ ID NO: 14. In another embodiment, the gRNA variant comprises a scaffold stem loop having the sequence of CCAGCGACUAUGUCGUAGUGG (SEQ ID NO: 25). In another embodiment, the disclosure provides a gRNA scaffold comprising, relative to SEQ ID NO:5, a C18G substitution, a G55 insertion, a U1 deletion, and a modified extended stem loop in which the original 6 nt loop and 13 most-loop-proximal base pairs (32 nucleotides total) are replaced by a Uvsx hairpin (4 nt loop and 5 loop-proximal base pairs; 14 nucleotides total) and the loop-distal base of the extended stem was converted to a fully base-paired stem contiguous with the new Uvsx hairpin by deletion of the A99 and substitution of G64U. In the foregoing embodiment, the gRNA scaffold comprises the sequence

(SEQ ID NO: 2238)
ACUGGCGCUUUUAUCUGAUUACUUUGAGAGCCAUCACCAGCGACUAUGUC
GUAGUGGGUAAAGCUCCCUCUUCGGAGGGAGCAUCAAAG

[0129] All gRNA variants that have one or more improved functions or characteristics, or add one or more new functions when the variant gRNA is compared to a reference gRNA described herein, are envisaged as within the scope of the disclosure. A representative example of such a gRNA variant is guide 174 (SEQ ID NO: 2238), the design of which (and the rationale for the design) is described in the Examples. In some embodiments, the gRNA variant adds a new function to the RNP comprising the gRNA variant. In some embodiments, the gRNA variant has an improved characteristic selected from: improved stability; improved solubility; improved transcription of the gRNA; improved resistance to nuclease activity; increased folding rate of the gRNA; decreased side product formation during folding; increased productive folding; improved binding affinity to a CasX protein; improved binding affinity to a target DNA when complexed with a CasX protein; improved gene editing when complexed with a CasX protein; improved specificity of editing when complexed with a CasX protein; and improved ability to utilize a greater spectrum of one or more PAM sequences, including ATC, CTC, GTC, or TTC, in the editing of target DNA when complexed with a CasX protein, or any combination thereof. In some cases, the one or more of the improved characteristics of the gRNA variant is at least about 1.1 to about 100,000-fold improved relative to the reference gRNA of SEQ ID NO: 4 or SEQ ID NO: 5. In other cases, the one or more improved characteristics of the gRNA variant is at least about 1.1, at least about 10, at least about 100, at least about 1000, at least about 10,000, at least about 100,000-fold or more improved relative to the reference gRNA of SEQ ID NO: 4 or SEQ ID NO: 5. In other cases, the one or more of the improved characteristics of the gRNA variant is about 1.1 to 100,00-fold, about 1.1 to 10,00-fold, about 1.1 to 1,000-fold, about 1.1 to 500-fold, about 1.1 to 100-fold, about 1.1 to 50-fold, about 1.1 to 20-fold, about 10 to 100,00-fold, about 10 to 10,00-fold, about 10 to 1,000-fold, about 10 to 500-fold, about 10 to 100-fold, about 10 to 50-fold, about 10 to 20-fold, about 2 to 70-fold, about 2 to 50-fold, about 2 to 30-fold, about 2 to 20-fold, about 2 to 10-fold, about 5 to 50-fold, about 5 to 30-fold, about 5 to 10-fold, about 100 to 100,00-fold, about 100 to 10,00-fold, about 100 to 1,000-fold, about 100 to 500-fold, about 500 to 100,00-fold, about 500 to 10,00-fold, about 500 to 1,000-fold, about 500 to 750-fold, about 1,000 to 100,00-fold, about 10,000 to 100,00-fold, about 20 to 500-fold, about 20 to 250-fold, about 20 to 200-fold, about 20 to 100-fold, about 20 to 50-fold, about 50 to 10,000-fold, about 50 to 1,000-fold, about 50 to 500-fold, about 50 to 200-fold, or about 50 to 100-fold, improved relative to the reference gRNA of SEQ ID NO: 4 or SEQ ID NO: 5. In other cases, the one or more improved characteristics of the gRNA variant is about 1.1-fold, 1.2-fold, 1.3-fold, 1.4-fold, 1.5-fold, 1.6-fold, 1.7-fold, 1.8-fold, 1.9-fold, 2-fold, 3-fold, 4-fold, 5-fold, 6-fold, γ-fold, 8-fold, 9-fold, 10-fold, 11-fold, 12-fold, 13-fold, 14-fold, 15-fold, 16-fold, 17-fold, 18-fold, 19-fold, 20-fold, 25-fold, 30-fold, 40-fold, 45-fold, 50-fold, 55-fold, 60-fold, 70-fold, 80-fold, 90-fold, 100-fold, 110-fold, 120-fold, 130-fold, 140-fold, 150-fold, 160-fold, 170-fold, 180-fold, 190-fold, 200-fold, 210-fold, 220-fold, 230-fold, 240-fold, 250-fold, 260-fold, 270-fold, 280-fold, 290-fold, 300-fold, 310-fold, 320-fold, 330-fold, 340-fold, 350-fold, 360-fold, 370-fold, 380-fold, 390-fold, 400-fold, 425-fold, 450-fold, 475-fold, or 500-fold improved relative to the reference gRNA of SEQ ID NO: 4 or SEQ ID NO: 5.

[0130] In some embodiments, a gRNA variant can be created by subjecting a reference gRNA to a one or more mutagenesis methods, such as the mutagenesis methods described herein, below, which may include Deep Mutational Evolution (DME), deep mutational scanning (DMS), error prone PCR, cassette mutagenesis, random mutagenesis, staggered extension PCR, gene shuffling, or domain swapping, in order to generate the gRNA variants of the disclosure. The activity of reference gRNAs may be used as a benchmark against which the activity of gRNA variants are compared, thereby measuring improvements in function of gRNA variants compared to the reference gRNA. In other embodiments, a reference gRNA may be subjected to one or more deliberate, targeted mutations, substitutions, or domain swaps in order to produce a gRNA variant, for example a rationally designed variant. Exemplary gRNA variants produced by such methods are described in the Examples and representative sequences of gRNA scaffolds are presented in Table 3.

[0131] In some embodiments, the gRNA variant comprises one or more modifications compared to a reference guide nucleic acid scaffold sequence, wherein the one or more modification is selected from: at least one nucleotide substitution in a region of the gRNA variant; at least one nucleotide deletion in a region of the gRNA variant; at least one nucleotide insertion in a region of the gRNA variant; a substitution of all or a portion of a region of the gRNA variant; a deletion of all or a portion of a region of the gRNA variant; or any combination of the foregoing. In some cases, the modification is a substitution of 1 to 15 consecutive or non-consecutive nucleotides in the gRNA variant in one or more regions. In other cases, the modification is a deletion of 1 to 10 consecutive or non-consecutive nucleotides in the gRNA variant in one or more regions. In other cases, the modification is an insertion of 1 to 10 consecutive or non-consecutive nucleotides in the gRNA variant in one or more regions. In other cases, the modification is a substitution of the scaffold stem loop or the extended stem loop with an RNA stem loop sequence from a heterologous RNA source with proximal 5′ and 3′ ends. In some cases, a gRNA variant of the disclosure comprises two or more modifications in one region. In other cases, a gRNA variant of the disclosure comprises modifications in two or more regions. In other cases, a gRNA variant comprises any combination of the foregoing modifications described in this paragraph.

[0132] In some embodiments, a 5′ G is added to a gRNA variant sequence for expression in vivo, as transcription from a U6 promoter is more efficient and more consistent with regard to the start site when the +1 nucleotide is a G. In other embodiments, two 5′ Gs are added to a gRNA variant sequence for in vitro transcription to increase production efficiency, as T7 polymerase strongly prefers a G in the +1 position and a purine in the +2 position. In some cases, the 5′ G bases are added to the reference scaffolds of Table 2. In other cases, the 5′ G bases are added to the variant scaffolds SEQ ID NOS: 2238-2285, 26794-26839 and 27219-2726 of Table 3.

[0133] Table 3 provides exemplary gRNA variant scaffold sequences of the disclosure. In some embodiments, the gRNA variant scaffold comprises any one of the sequences listed in Table 3, SEQ ID NOS: 2238-2285, 26794-26839 and 27219-27265, or a sequence having at least about 50%, at least about 60%, at least about 70%, at least about 80%, at least about 90%, at least about 95%, at least about 95%, at least about 96%, at least about 97%, at least about 98%, at least about 99% sequence identity thereto. In some embodiments, the gRNA variant scaffold comprises any one of SEQ ID NOS: 2238-2285, 26794-26839 and 27219-27265. In some embodiments, the gRNA variant scaffold comprises any one of SEQ ID NOS: 2281-2285, 26794-26839 and 27219-27265, or a sequence having at least about 50%, at least about 60%, at least about 70%, at least about 80%, at least about 90%, at least about 95%, at least about 95%, at least about 96%, at least about 97%, at least about 98%, at least about 99% sequence identity thereto. In some embodiments, the gRNA variant scaffold comprises any one of SEQ ID NOS: 2281-2285, 26794-26839 and 27219-27265. It will be understood that in those embodiments wherein a vector comprises a DNA encoding sequence for a gRNA, or where a gRNA is a chimera of RNA and DNA, that thymine (T) bases can be substituted for the uracil (U) bases of any of the gRNA sequence embodiments described herein.

TABLE 3
Exemplary gRNA Scaffold Sequences

| SEQ | | |
|---|---|---|
| ID | | |
| NO: | NAME | NUCLEOTIDE SEQUENCE OR DESCRIPTION OF MODIFICATION |
| 2101 | ND | phage replication stable |
| 2102 | ND | Kissing loop_b1 |
| 2103 | ND | Kissing loop_a |
| 2104 | ND | 32, uvsX hairpin |
| 2105 | ND | PP7 |
| 2106 | ND | 64, trip mut, extended stem truncation |
| 2107 | ND | hyperstable tetraloop |
| 2108 | ND | C18G |
| 2109 | ND | U17G |
| 2110 | ND | CUUCGG loop |
| 2111 | ND | MS2 |
| 2112 | ND | −1, A2G, −78, G77U |
| 2113 | ND | QB |
| 2114 | ND | 45,44 hairpin |
| 2115 | ND | U1A |
| 2116 | ND | A14C, U17G |
| 2117 | ND | CUUCGG loop modified |
| 2118 | ND | Kissing loop_b2 |
| 2119 | ND | −76:78, −83:87 |
| 2120 | ND | −4 |
| 2121 | ND | extended stem truncation |
| 2122 | ND | C55 |
| 2123 | ND | trip mut |
| 2124 | ND | −76:78 |
| 2125 | ND | −1:5 |
| 2126 | ND | −83:87 |
| 2127 | ND | =+G28, A82U, −84, |
| 2128 | ND | =+51U |
| 2129 | ND | −1:4, +G5A, +G86, |
| 2130 | ND | =+A94 |
| 2131 | ND | =+G72 |
| 2132 | ND | shorten front, CUUCGG loop modified. extend extended |
| 2133 | ND | A14C |
| 2134 | ND | −1:3, +G3 |
| 2135 | ND | =+C45, +U46 |
| 2136 | ND | CUUCGG loop modified, fun start |
| 2137 | ND | −93:94 |
| 2138 | ND | =+U45 |
| 2139 | ND | −69, −94 |
| 2140 | ND | −94 |
| 2141 | ND | modified CUUCGG, minus U in 1st triplex |
| 2142 | ND | −1:4, +C4, A14C, U17G, +G72, −76:78, −83:87 |
| 2143 | ND | UIC, −73 |
| 2144 | ND | Scaffold uuCG, stem uuCG. Stem swap, t shorten |
| 2145 | ND | Scaffold uuCG, stem uuCG. Stem swap |
| 2146 | ND | =+G60 |
| 2147 | ND | no stem Scaffold uuCG |
| 2148 | ND | no stem Scaffold uuCG, fun start |
| 2149 | ND | Scaffold uuCG, stem uuCG, fun start |
| 2150 | ND | Pseudoknots |
| 2151 | ND | Scaffold uuCG, stem uuCG |
| 2152 | ND | Scaffold uuCG, stem uuCG, no start |
| 2153 | ND | Scaffold uuCG |
| 2154 | ND | =+GCUC36 |
| 2155 | ND | G quadriplex telomere basket+ ends |
| 2156 | ND | G quadriplex M3q |
| 2157 | ND | G quadriplex telomere basket no ends |
| 2158 | ND | 45,44 hairpin (old version) |
| 2159 | ND | Sarcin-ricin loop |
| 2160 | ND | uvsX, C18G |
| 2161 | ND | truncated stem loop, C18G, trip mut (U10C) |
| 2162 | ND | short phage rep, C18G |
| 2163 | ND | phage rep loop, C18G |
| 2164 | ND | =+G18, stacked onto 64 |
| 2165 | ND | truncated stem loop, C18G, −1 A2G |
| 2166 | ND | phage rep loop, C18G, trip mut (U10C) |
| 2167 | ND | short phage rep, C18G, trip mut (U10C) |
| 2168 | ND | uvsX, trip mut (U10C) |
| 2169 | ND | truncated stem loop |
| 2170 | ND | =+A17, stacked onto 64 |
| 2171 | ND | 3′ HDV genomic ribozyme |
| 2172 | ND | phage rep loop, trip mut (U10C) |
| 2173 | ND | −79:80 |
| 2174 | ND | short phage rep, trip mut (U10C) |
| 2175 | ND | extra truncated stem loop |
| 2176 | ND | U17G, C18G |
| 2177 | ND | short phage rep |
| 2178 | ND | uvsX, C18G, −1 A2G |
| 2179 | ND | uvsX, C18G, trip mut (U10C), −1 A2G, HDV −99 G65U |
| 2180 | ND | 3′ HDV antigenomic ribozyme |
| 2181 | ND | uvsX, C18G, trip mut (U10C), −1 A2G, HDV AA(98:99)C |
| 2182 | ND | 3′ HDV ribozyme (Lior Nissim, Timothy Lu) |
| 2183 | ND | TAC(1:3)GA, stacked onto 64 |
| 2184 | ND | uvsX, −1 A2G |
| 2185 | ND | truncated stem loop, C18G, trip mut (U10C), −1 A2G, HDV −99 G65U |
| 2186 | ND | short phage rep, C18G, trip mut (U10C), −1 A2G, HDV −99 G65U |
| 2187 | ND | 3′ sTRSV WT viral Hammerhead ribozyme |
| 2188 | ND | short phage rep, C18G, −1 A2G |
| 2189 | ND | short phage rep, C18G, trip mut (U10C), −1 A2G, 3′ genomic HDV |
| 2190 | ND | phage rep loop, C18G, trip mut (U10C), −1 A2G, HDV −99 G65U |
| 2191 | ND | 3′ HDV ribozyme (Owen Ryan, Jamie Cate) |
| 2192 | ND | phage rep loop, C18G, −1 A2G |
| 2193 | ND | 0.14 |
| 2194 | ND | −78, G77U |
| 2195 | ND | ND |
| 2196 | ND | short phage rep, −1 A2G |
| 2197 | ND | truncated stem loop, C18G, trip mut (U10C), −1 A2G |
| 2198 | ND | −1, A2G |
| 2199 | ND | truncated stem loop, trip mut (U10C), −1 A2G |
| 2200 | ND | uvsX, C18G, trip mut (U10C), −1 A2G |
| 2201 | ND | phage rep loop, −1 A2G |
| 2202 | ND | phage rep loop, trip mut (U10C), −1 A2G |
| 2203 | ND | phage rep loop, C18G, trip mut (U10C), −1 A2G |
| 2204 | ND | truncated stem loop, C18G |
| 2205 | ND | uvsX, trip mut (U10C), −1 A2G |
| 2206 | ND | truncated stem loop, −1 A2G |
| 2207 | ND | short phage rep, trip mut (U10C), −1 A2G |
| 2208 | ND | 5′HDV ribozyme (Owen Ryan, Jamie Cate) |
| 2209 | ND | 5′HDV genomic ribozyme |
| 2210 | ND | truncated stem loop, C18G, trip mut (U10C), −1 A2G, HDV AA(98:99)C |
| 2211 | ND | 5′env25 pistol ribozyme (with an added CUUCGG loop) |
| 2212 | ND | 5′HDV antigenomic ribozyme |
| 2213 | ND | 3′ Hammerhead ribozyme (Lior Nissim, Timothy Lu) guide scaffold scar |
| 2214 | ND | =+A27, stacked onto 64 |
| 2215 | ND | 5′Hammerhead ribozyme (Lior Nissim, Timothy Lu) smaller scar |
| 2216 | ND | phage rep loop, C18G, trip mut (U10C), −1 A2G, HDV AA(98:99)C |
| 2217 | ND | −27, stacked onto 64 |
| 2218 | ND | 3′ Hatchet |
| 2219 | ND | 3′ Hammerhead ribozyme (Lior Nissim, Timothy Lu) |
| 2220 | ND | 5′Hatchet |
| 2221 | ND | 5′HDV ribozyme (Lior Nissim, Timothy Lu) |
| 2222 | ND | 5′Hammerhead ribozyme (Lior Nissim, Timothy Lu) |
| 2223 | ND | 3′ HH15 Minimal Hammerhead ribozyme |
| 2224 | ND | 5′ RBMX recruiting motif |
| 2225 | ND | 3′ Hammerhead ribozyme (Lior Nissim, Timothy Lu) smaller scar |
| 2226 | ND | 3′ env25 pistol ribozyme (with an added CUUCGG loop) |
| 2227 | ND | 3′ Env-9 Twister |
| 2228 | ND | =+AUUAUCUCAUUACU25 |
| 2229 | ND | 5′Env-9 Twister |
| 2230 | ND | 3′ Twisted Sister 1 |
| 2231 | ND | no stem |
| 2232 | ND | 5′HH15 Minimal Hammerhead ribozyme |
| 2233 | ND | 5′Hammerhead ribozyme (Lior Nissim, Timothy Lu) guide scaffold scar |
| 2234 | ND | 5′Twisted Sister 1 |
| 2235 | ND | 5′sTRSV WT viral Hammerhead ribozyme |
| 2236 | ND | 148, =+G55, stacked onto 64 |
| 2237 | ND | 158, 103+148(+G55) −99, G65U |
| 2238 | 174 | ACUGGCGCUUUUAUCUGAUUACUUUGAGAGCCAUCACCAGCGACUAUGUCGUAGUGGGUAA |
| | | AGCUCCCUCUUCGGAGGGAGCAUCAAAG |
| 2239 | 175 | ACUGGCGCCUUUAUCUCAUUACUUUGAGAGCCAUCACCAGCGACUAUGUCGUAUGGGUAAA |
| | | GCGCUUACGGACUUCGGUCCGUAAGAAGCAUCAAAG |
| 2240 | 176 | GCUGGCGCUUUUAUCUGAUUACUUUGAGAGCCAUCACCAGCGACUAUGUCGUAGUGGGUAA |
| | | AGCUCCCUCUUCGGAGGGAGCAUCAAAG |
| 2241 | 177 | ACUGGCGCUUUUAUCUGAUUACUUUGAGAGCCAUCACCAGCGACUAUGUCGUAUGGGUAAA |
| | | GCUCCCUCUUCGGAGGGAGCAUCAAAG |
| 2242 | 181 | ACUGGCGCCUUUAUCUGAUUACUUUGAGAGCCAUCACCAGCGACUAUGUCGUAUGGGUAAA |
| | | GCGCUUACGGACUUCGGUCCGUAAGAAGCAUCAAAG |
| 2243 | 182 | ACUGGCGCUUUUAUCUGAUUACUUUGAGAGCCAUCACCAGCGACUAUGUCGUAUGGGUAAA |
| | | GCGCUUACGGACUUCGGUCCGUAAGAAGCAUCAAAG |
| 2244 | 183 | ACUGGCGCUUUUAUCUGAUUACUUUGAGAGCCAUCACCAGCGACUAUGUCGUAGUGGGUAA |
| | | AGCGCUUACGGACUUCGGUCCGUAAGAAGCAUCAAAG |
| 2245 | 184 | ACUGGCGCUUUUAUCUGAUUACUUUGAGAGCCAUCACCAGCGACUAUGUCGUAUUGGGUAA |
| | | AGCUCCCUCUUCGGAGGGAGCAUCAAAG |
| 2246 | 185 | ACUGGCGCUUUUAUCUGAUUACUUUGAGAGCCAUCACCAGCGACUAUGUCGUAUUGGGUAA |
| | | AGCGCUUACGGACUUCGGUCCGUAAGAAGCAUCAAAG |
| 2247 | 186 | ACUGGCGCCUUUAUCAUCAUUACUUUGAGAGCCAUCACCAGCGACUAUGUCGUAUGGGUAA |
| | | AGCGCUUACGGACUUCGGUCCGUAAGAAGCAUCAAAG |
| 2248 | 187 | ACUGGCGCUUUUAUCUGAUUACUUUGAGAGCCAUCACCAGCGACUAUGUCGUAGUGGGUAA |
| | | AGCGCCCUCUUCGGAGGGAAGCAUCAAAG |
| 2249 | 188 | ACUGGCGCUUUUAUCUGAUUACUUUGAGAGCCAUCACCAGCGACUAUGUCGUAGUGGGUAA |
| | | AGCUCACAUGAGGAUCACCCAUGUGAGCAUCAAAG |
| 2250 | 189 | ACUGGCACUUUUACCUGAUUACUUUGAGAGCCAACACCAGCGACUAUGUCGUAGUGGGUAA |
| | | AGCUCCCUCUUCGGAGGGAGCAUCAAAG |
| 2251 | 190 | ACUGGCACUUUUAUCUGAUUACUUUGAGAGCCAUCACCAGCGACUAUGUCGUAGUGGGUAA |
| | | AGCUCCCUCUUCGGAGGGAGCAUCAAAG |
| 2252 | 191 | ACUGGCCCUUUUAUCUGAUUACUUUGAGAGCCAUCACCAGCGACUAUGUCGUAGUGGGUAA |
| | | AGCUCCCUCUUCGGAGGGAGCAUCAAAG |
| 2253 | 192 | ACUGGCGCUUUUACCUGAUUACUUUGAGAGCCAUCACCAGCGACUAUGUCGUAGUGGGUAA |
| | | AGCUCCCUCUUCGGAGGGAGCAUCAAAG |
| 2254 | 193 | ACUGGCGCUUUUAUCUGAUUACUUUGAGAGCCAACACCAGCGACUAUGUCGUAGUGGGUAA |
| | | AGCUCCCUCUUCGGAGGGAGCAUCAAAG |
| 2255 | 195 | ACUGGCACCUUUACCUGAUUACUUUGAGAGCCAACACCAGCGACUAUGUCGUAUGGGUAAA |
| | | GCGCUUACGGACUUCGGUCCGUAAGAAGCAUCAAAG |
| 2256 | 196 | ACUGGCACCUUUAUCUGAUUACUUUGAGAGCCAUCACCAGCGACUAUGUCGUAUGGGUAAA |
| | | GCGCUUACGGACUUCGGUCCGUAAGAAGCAUCAAAG |
| 2257 | 197 | ACUGGCCCCUUUAUCUGAUUACUUUGAGAGCCAUCACCAGCGACUAUGUCGUAUGGGUAAA |
| | | GCGCUUACGGACUUCGGUCCGUAAGAAGCAUCAAAG |
| 2258 | 198 | ACUGGCGCCUUUAUCUGAUUACUUUGAGAGCCAACACCAGCGACUAUGUCGUAUGGGUAAA |
| | | GCGCUUACGGACUUCGGUCCGUAAGAAGCAUCAAAG |
| 2259 | 199 | GCUGGCGCUUUUAUCUGAUUACUUUGAGAGCCAUCACCAGCGACUAUGUCGUAGUGGGUAA |
| | | AGCUCCCUCUUCGGAGGGAGCAUCAAAG |
| 2260 | 200 | GACUGGCGCUUUUAUCUGAUUACUUUGAGAGCCAUCACCAGCGACUAUGUCGUAGUGGGUA |
| | | AAGCUCCCUCUUCGGAGGGAGCAUCAAAG |
| 2261 | 201 | ACUGGCGCCUUUAUCUGAUUACUUUGGAGAGCCAUCACCAGCGACUAUGUCGUAGUGGGUA |
| | | AAGCUCCCUCUUCGGAGGGAGCAUCAAAG |
| 2262 | 202 | ACUGGCGCAUUUAUCUGAUUACUUUGUGAGCCAUCACCAGCGACUAUGUCGUAGUGGGUAA |
| | | AGCUCCCUCUUCGGAGGGAGCAUCAAAG |
| 2263 | 203 | ACUGGCGCCUUUAUCUGAUUACUUUGAGAGCCAUCACCAGCGACUAUGUCGUAGUGGGUAA |
| | | AGCUCCCUCUUCGGAGGGAGCAUCAAAG |
| 2264 | 204 | ACUGGCGCUUUUAUCUGAUUACUUUGGAGAGCCAUCACCAGCGACUAUGUCGUAGUGGGUA |
| | | AAGCUCCCUCUUCGGAGGGAGCAUCAAAG |
| 2265 | 205 | ACUGGCGCAUUUAUCUGAUUACUUUGAGAGCCAUCACCAGCGACUAUGUCGUAGUGGGUAA |
| | | AGCUCCCUCUUCGGAGGGAGCAUCAAAG |
| 2266 | 206 | ACUGGCGCUUUUAUCUGAUUACUUUGUGAGCCAUCACCAGCGACUAUGUCGUAGUGGGUAA |
| | | AGCUCCCUCUUCGGAGGGAGCAUCAAAG |
| 2267 | 207 | ACUGGCGCUUUUAUUCUGAUUACUUUGAGAGCCAUCACCAGCGACUAUGUCGUAGUGGGUA |
| | | AAGCUCCCUCUUCGGAGGGAGCAUCAAAG |
| 2268 | 208 | ACGGCGCUUUUAUCUGAUUACUUUGAGAGCCAUCACCAGCGACUAUGUCGUAGUGGGUAAA |
| | | GCUCCCUCUUCGGAGGGAGCAUCAAAG |
| 2269 | 209 | ACUGGCGCUUUUAUAUGAUUACUUUGAGAGCCAUCACCAGCGACUAUGUCGUAGUGGGUAA |
| | | AGCUCCCUCUUCGGAGGGAGCAUCAAAG |
| 2270 | 210 | ACUGGCGCUUUUAUCUUGAUUACUUUGAGAGCCAUCACCAGCGACUAUGUCGUAGUGGGUA |
| | | AAGCUCCCUCUUCGGAGGGAGCAUCAAAG |
| 2271 | 211 | ACUGGCGCUUUUAUCUGAUUACUUUGAGAGCCAGCACCAGCGACUAUGUCGUAGUGGGUAA |
| | | AGCUCCCUCUUCGGAGGGAGCAUCAAAG |
| 2272 | 212 | ACUGGCGCUGUUAUCUGAUUACUUCGAGAGCCAUCACCAGCGACUAUGUCGUAGUGGGUAA |
| | | AGCUCCCUCUUCGGAGGGAGCAUCGAAG |
| 2273 | 213 | ACUGGCGCUCUUAUCUGAUUACUUCGAGAGCCAUCACCAGCGACUAUGUCGUAGUGGGUAA |
| | | AGCUCCCUCUUCGGAGGGAGCAUCGAAG |
| 2274 | 214 | ACUGGCGCUUGUAUCUGAUUACUCUGAGAGCCAUCACCAGCGACUAUGUCGUAGUGGGUAA |
| | | AGCUCCCUCUUCGGAGGGAGCAUCAGAG |
| 2275 | 215 | ACUGGCGCUUCUAUCUGAUUACUCUGAGAGCCAUCACCAGCGACUAUGUCGUAGUGGGUAA |
| | | AGCUCCCUCUUCGGAGGGAGCAUCAGAG |
| 2276 | 216 | ACUGGCGCUUUGAUCUGAUUACCUUGAGAGCCAUCACCAGCGACUAUGUCGUAGUGGGUAA |
| | | AGCUCCCUCUUCGGAGGGAGCAUCAAGG |
| 2277 | 217 | ACUGGCGCUUUCAUCUGAUUACCUUGAGAGCCAUCACCAGCGACUAUGUCGUAGUGGGUAA |
| | | AGCUCCCUCUUCGGAGGGAGCAUCAAGG |
| 2278 | 218 | ACUGGCGCUGUUAUCUGAUUACUUUGAGAGCCAUCACCAGCGACUAUGUCGUAGUGGGUAA |
| | | AGCUCCCUCUUCGGAGGGAGCAUCAAAG |
| 2279 | 219 | ACUGGCGCUUUUAUCUGAUUACUUUGAGAGCCAUCACCAGCGACUAUGUCGUAGUGGGUAA |
| | | AGCUCCCUCUUCGGAGGGAGCAUCGAAG |
| 2280 | 220 | ACUGGCGCUUUUAUCUGAUUACUUCGAGAGCCAUCACCAGCGACUAUGUCGUAGUGGGUAA |
| | | AGCUCCCUCUUCGGAGGGAGCAUCAAAG |
| 2281 | 221 | ACUGGCACUUCUAUCUGAUUACUCUGAGAGCCAUCACCAGCGACUAUGUCGUAUGGGUAAA |
| | | GCCGCUUACGGACUUCGGUCCGUAAGAGGCAUCAGAG |
| 2282 | 222 | ACUGGCACUUCUAUCUGAUUACUCUGAGAGCCAUCACCAGCGACUAUGUCGUAGUGGGUAA |
| | | AGCUCCCUCUUCGGAGGGAGCAUCAGAG |
| 2283 | 223 | ACUGGCACCUUUAUCUGAUUACUUUGAGAGCCAUCACCAGCGACUAUGUCGUAUGGGUAAA |
| | | GCCGCUUACGGACUUCGGUCCGUAAGAGGCAUCAAAG |
| 2284 | 224 | ACUGGCACUUGUAUCUGAUUACUCUGAGAGCCAUCACCAGCGACUAUGUCGUAUGGGUAAA |
| | | GCCGCUUACGGACUUCGGUCCGUAAGAGGCAUCAGAG |
| 2285 | 225 | ACUGGCACUUGUAUCUGAUUACUCUGAGAGCCAUCACCAGCGACUAUGUCGUAGUGGGUAA |
| | | AGCUCCCUCUUCGGAGGGAGCAUCAGAG |
| 27219 | 226 | ACUGGCGCUUUUAUCUGAUUACUUUGAGAGCCAUCACCAGCGACUAUGUCGUAGUGGGUAA |
| | | AGCUGCACUAUGGGCGCAGCGUCAAUGACGCUGACGGUACAGGCCAGACAAUUAUUGUCUG |
| | | GUAUAGUGCAGCAUCAAAG |
| 26794 | 229 | ACUGGCACUUUUAUCUGAUUACUUUGAGAGCCAUCACCAGCGACUAUGUCGUAUGGGUAAA |
| | | GCGCUUACGGACUUCGGUCCGUAAGAAGCAUCAAAG |
| 26795 | 230 | ACUGGCACUUCUAUCUGAUUACUCUGAGAGCCAUCACCAGCGACUAUGUCGUAUGGGUAAA |
| | | GCGCUUACGGACUUCGGUCCGUAAGAAGCAUCAGAG |
| 26796 | 231 | ACUGGCGCUUCUAUCUGAUUACUCUGAGAGCCAUCACCAGCGACUAUGUCGUAUGGGUAAA |
| | | GCCGCUUACGGACUUCGGUCCGUAAGAGGCAUCAGAG |
| 26797 | 232 | ACUGGCACUUCUAUCUGAUUACUCUGAGCGCCAUCACCAGCGACUAUGUCGUAUGGGUAAA |
| | | GCCGCUUACGGACUUCGGUCCGUAAGAGGCAUCAGAG |
| 26798 | 233 | ACUGGCGCUUCUAUCUGAUUACUCUGAGCGCCAUCACCAGCGACUAUGUCGUAUGGGUAAA |
| | | GCCGCUUACGGACUUCGGUCCGUAAGAGGCAUCAGAG |
| 26799 | 234 | ACUGGCGCUUCUAUCUGAUUACUCUGAGCGCCAUCACCAGCGACUAUGUCGUAUGGGUAAA |
| | | GCGCCUUACGGACUUCGGUCCGUAAGGAGCAUCAGAG |
| 26800 | 235 | ACUGGCGCUUCUAUCUGAUUACUCUGAGCGCCAUCACCAGCGACUAUGUCGUAGUGGGUAA |
| | | AGCCGCUUACGGACUUCGGUCCGUAAGAGGCAUCAGAG |
| 26801 | 236 | ACGGGACUUUCUAUCUGAUUACUCUGAAGUCCCUCACCAGCGACUAUGUCGUAUGGGUAAA |
| | | GCCGCUUACGGACUUCGGUCCGUAAGAGGCAUCAGAG |
| 26802 | 237 | ACCUGUAGUUCUAUCUGAUUACUCUGACUACAGUCACCAGCGACUAUGUCGUAUGGGUAAA |
| | | GCCGCUUACGGACUUCGGUCCGUAAGAGGCAUCAGAG |
| 26803 | 238 | ACUGGCGCUUUUAUCUGAUUACUUUGAGAGCCAUCACCAGCGACUAUGUCGUAGUGGGUAA |
| | | AGCUGCACGGUGGGCGCAGCUUCGGCUGACGGUACACCGUGCAGCAUCAAAG |
| 26804 | 239 | ACUGGCGCUUUUAUCUGAUUACUUUGAGAGCCAUCACCAGCGACUAUGUCGUAGUGGGUAA |
| | | AGCUGCACGGUGGGCGCAGCUUCGGCUGACGGUACACCGGUGGGCGCAGCUUCGGCUGACG |
| | | GUACACCGUGCAGCAUCAAAG |
| 26805 | 240 | ACUGGCGCUUUUAUCUGAUUACUUUGAGAGCCAUCACCAGCGACUAUGUCGUAGUGGGUAA |
| | | AGCUGCACGGUGGGCGCAGCUUCGGCUGACGGUACACCGGUGGGCGCAGCUUCGGCUGACG |
| | | GUACACCGGUGGGCGCAGCUUCGGCUGACGGUACACCGUGCAGCAUCAAAG |
| 26806 | 241 | ACUGGCGCUUUUAUCUGAUUACUUUGAGAGCCAUCACCAGCGACUAUGUCGUAGUGGGUAA |
| | | AGCUGCACGGUGGGCGCAGCUUCGGCUGACGGUACACCGGUGGGCGCAGCUUCGGCUGACG |
| | | GUACACCGGUGGGCGCAGCUUCGGCUGACGGUACACCGGUGGGCGCAGCUUCGGCUGACGG |
| | | UACACCGUGCAGCAUCAAAG |
| 26807 | 242 | ACUGGCGCUUUUAUCUGAUUACUUUGAGAGCCAUCACCAGCGACUAUGUCGUAGUGGGUAA |
| | | AGCUGCACGGUGGGCGCAGCUUCGGCUGACGGUACACCGGUGGGCGCAGCUUCGGCUGACG |
| | | GUACACCGGUGGGCGCAGCUUCGGCUGACGGUACACCGGUGGGCGCAGCUUCGGCUGACGG |
| | | UACACCGGUGGGCGCAGCUUCGGCUGACGGUACACCGUGCAGCAUCAAAG |
| 26808 | 243 | ACUGGCGCUUUUAUCUGAUUACUUUGAGAGCCAUCACCAGCGACUAUGUCGUAGUGGGUAA |
| | | AGCUGCACCUAGCGGAGGCUAGGUGCAGCAUCAAAG |
| 26809 | 244 | ACUGGCGCUUUUAUCUGAUUACUUUGAGAGCCAUCACCAGCGACUAUGUCGUAGUGGGUAA |
| | | AGCUGCACCUCGGCUUGCUGAAGCGCGCACGGCAAGAGGCGAGGUGCAGCAUCAAAG |
| 26810 | 245 | ACUGGCGCUUUUAUCUGAUUACUUUGAGAGCCAUCACCAGCGACUAUGUCGUAGUGGGUAA |
| | | AGCUGCACCUCUCUCGACGCAGGACUCGGCUUGCUGAAGCGCGCACGGCAAGAGGCGAGGG |
| | | GCGGCGACUGGUGAGUACGCCAAAAAUUUUGACUAGCGGAGGCUAGAAGGAGAGAGGUGCA |
| | | GCAUCAAAG |
| 26811 | 246 | ACUGGCGCUUUUAUCUGAUUACUUUGAGAGCCAUCACCAGCGACUAUGUCGUAGUGGGUAA |
| | | AGCUGCACGGUGCCCGUCUGUUGUGUCGAGAGACGCCAAAAAUUUUGACUAGCGGAGGCUA |
| | | GAAGGAGAGAGAUGGGUGCCGUGCAGCAUCAAAG |
| 26812 | 247 | ACUGGCGCUUUUAUCUGAUUACUUUGAGAGCCAUCACCAGCGACUAUGUCGUAGUGGGUAA |
| | | AGCUGCACAUGGAGAGGAGAUGUGCAGCAUCAAAG |
| 26813 | 248 | ACUGGCGCUUUUAUCUGAUUACUUUGAGAGCCAUCACCAGCGACUAUGUCGUAGUGGGUAA |
| | | AGCUGCACAUGGAGAUGUGCAGCAUCAAAG |
| 26814 | 249 | ACUGGCGCUUUUAUCUGAUUACUUUGAGAGCCAUCACCAGCGACUAUGUCGUAGUGGGUAA |
| | | AGCUUGGGCGCAGCGUCAAUGACGCUGACGGUACAAGCAUCAAAG |
| 26815 | 250 | ACUGGCGCUUUUAUCUGAUUACUUUGAGAGCCAUCACCAGCGACUAUGUCGUAGUGGGUAA |
| | | AGCUGCACUAUGGGCGCAGCGUCAAUGACGCUGACGGUACAGGCCACAUGAGGAUCACCCA |
| | | UGUGGUAUAGUGCAGCAUCAAAG |
| 26816 | 251 | ACUGGCGCUUUUAUCUGAUUACUUUGAGAGCCAUCACCAGCGACUAUGUCGUAGUGGGUAA |
| | | AGCUGCACUAUGGGCGCAGCUCAUGAGGAUCACCCAUGAGCUGACGGUACAGGCCACAUGA |
| | | GGAUCACCCAUGUGGUAUAGUGCAGCAUCAAAG |
| 26817 | 252 | ACUGGCGCUUUUAUCUGAUUACUUUGAGAGCCAUCACCAGCGACUAUGUCGUAGUGGGUAA |
| | | AGCUGCACUAUGGGCGCAGCGUCAAUGACGCUGACGGUACAGGCCACAUGGCAGUCGUAAC |
| | | GACGCGGGUGGUAUAGUGCAGCAUCAAAG |
| 26818 | 253 | ACUGGCGCUUUUAUCUGAUUACUUUGAGAGCCAUCACCAGCGACUAUGUCGUAGUGGGUAA |
| | | AGCUGCACUAUGGGCGCAGCAAACAUGGCAGUCCUAAGGACGCGGGUUUUGCUGACGGUAC |
| | | AGGCCACAUGGCAGUCGUAACGACGCGGGUGGUAUAGUGCAGCAUCAAAG |
| 26819 | 254 | ACUGGCGCUUUUAUCUGAUUACUUUGAGAGCCAUCACCAGCGACUAUGUCGUAGUGGGUAA |
| | | AGCUGCACUAUGGGCGCAGACAUGGCAGUCGUAACGACGCGGGUCUGACGGUACAGGCCAC |
| | | AUGAGGAUCACCCAUGUGGUAUAGUGCAGCAUCAAAG |
| 26820 | 255 | ACUGGCGCUUUUAUCUGAUUACUUUGAGAGCCAUCACCAGCGACUAUGUCGUAGUGGGUAA |
| | | AGCUGCACUAAGGAGUUUAUAUGGAAACCCUUAGUGCAGCAUCAAAG |
| 26821 | 256 | ACUGGCGCUUUUAUCUGAUUACUUUGAGAGCCAUCACCAGCGACUAUGUCGUAGUGGGUAA |
| | | AGCUCAGGAAGCACUAUGGGCGCAGCGUCAAUGACGCUGACGGUACAGGCCAGACAAUUAU |
| | | UGUCUGGUAUAGUGCAGCAGCAGAACAAUUUGCUGAGGGCUAUUGAGGCGCAACAGCAUCU |
| | | GUUGCAACUCACAGUCUGGGGCAUCAAGCAGCUCCAGGCAAGAAUCCUGAGCAUCAAAG |
| 26822 | 257 | ACUGGCGCUUUUAUCUGAUUACUUUGAGAGCCAUCACCAGCGACUAUGUCGUAGUGGGUAA |
| | | AGCUGCACGCCCUGAAGAAGGGCGUGCAGCAUCAAAG |
| 26823 | 258 | ACUGGCGCUUUUAUCUGAUUACUUUGAGAGCCAUCACCAGCGACUAUGUCGUAGUGGGUAA |
| | | AGCUGCACGGCUCGUGUAGCUCAUUAGCUCCGAGCCGUGCAGCAUCAAAG |
| 26824 | 259 | ACUGGCGCUUUUAUCUGAUUACUUUGAGAGCCAUCACCAGCGACUAUGUCGUAGUGGGUAA |
| | | AGCUGCACCCGUGUGCAUCCGCAGUGUCGGAUCCACGGGUGCAGCAUCAAAG |
| 26825 | 260 | ACUGGCGCUUUUAUCUGAUUACUUUGAGAGCCAUCACCAGCGACUAUGUCGUAGUGGGUAA |
| | | AGCUGCACGGAAUCCAUUGCACUCCGGAUUUCACUAGGUGCAGCAUCAAAG |
| 26826 | 261 | ACUGGCGCUUUUAUCUGAUUACUUUGAGAGCCAUCACCAGCGACUAUGUCGUAGUGGGUAA |
| | | AGCUGCACAUGCAUGUCUAAGACAGCAUGUGCAGCAUCAAAG |
| 26827 | 262 | ACUGGCGCUUUUAUCUGAUUACUUUGAGAGCCAUCACCAGCGACUAUGUCGUAGUGGGUAA |
| | | AGCUGCACAAAACAUAAGGAAAACCUAUGUUGUGCAGCAUCAAAG |
| 26828 | 263 | ACUGGCGCUUCUAUCUGAUUACUCUGAGCGCCAUCACCAGCGACUAUGUCGUAGUGGGUAA |
| | | AGCCGCUUACGGACUAUGGGCGCAGCGUCAAUGACGCUGACGGUACAGGCCAGACAAUUAU |
| | | UGUCUGGUAUAGUCCGUAAGAGGCAUCAGAG |
| 26829 | 264 | ACUGGCGCUUCUAUCUGAUUACUCUGAGCGCCAUCACCAGCGACUAUGUCGUAGUGGGUAA |
| | | AGCCGCUUACGGGUGGGCGCAGCGUCAAUGACGCUGACGGUACAGGCCAGACAAUUAUUGU |
| | | CUGGUACCCGUAAGAGGCAUCAGAG |
| 26830 | 265 | ACUGGCGCUUCUAUCUGAUUACUCUGAGCGCCAUCACCAGCGACUAUGUCGUAGUGGGUAA |
| | | AGCCGCUUACGGUAUGGGCGCAGCGUCAAUGACGCUGACGGUACAGGCCACAUGAGGAUCA |
| | | CCCAUGUGGUAUACCGUAAGAGGCAUCAGAG |
| 26831 | 266 | ACUGGCGCUUUUAUCUGAUUACUUUGAGAGCCAUCACCAGCGACUAUGUCGUAGUGGGUAA |
| | | AGCUCCCUAUGGGCGCAGCGUCAAUGACGCUGACGGUACAGGCCACAUGAGGAUCACCCAU |
| | | GUGGUAUAGGGAGCAUCAAAG |
| 26832 | 267 | ACUGGCGCUUCUAUCUGAUUACUCUGAGCGCCAUCACCAGCGACUAUGUCGUAGUGGGUAA |
| | | AGCCGCUUACGGUAUGGGCGCAGCUCAUGAGGAUCACCCAUGAGCUGACGGUACAGGCCAC |
| | | AUGAGGAUCACCCAUGUGGUAUACCGUAAGAGGCAUCAGAG |
| 26833 | 268 | ACUGGCGCUUUUAUCUGAUUACUUUGAGAGCCAUCACCAGCGACUAUGUCGUAGUGGGUAA |
| | | AGCUCCCUAUGGGCGCAGCUCAUGAGGAUCACCCAUGAGCUGACGGUACAGGCCACAUGAG |
| | | GAUCACCCAUGUGGUAUAGGGAGCAUCAAAG |
| 26834 | 269 | ACUGGCGCUUCUAUCUGAUUACUCUGAGCGCCAUCACCAGCGACUAUGUCGUAGUGGGUAA |
| | | AGCCGCUUACGGUAUGGGCGCAGCGUCAAUGACGCUGACGGUACAGGCCACAUGGCAGUCG |
| | | UAACGACGCGGGUGGUAUACCGUAAGAGGCAUCAGAG |
| 26835 | 270 | ACUGGCGCUUUUAUCUGAUUACUUUGAGAGCCAUCACCAGCGACUAUGUCGUAGUGGGUAA |
| | | AGCUCCCUAUGGGCGCAGCGUCAAUGACGCUGACGGUACAGGCCACAUGGCAGUCGUAACG |
| | | ACGCGGGUGGUAUAGGGAGCAUCAAAG |
| 26836 | 271 | ACUGGCGCUUCUAUCUGAUUACUCUGAGCGCCAUCACCAGCGACUAUGUCGUAGUGGGUAA |
| | | AGCCGCUUACGGUAUGGGCGCAGCAAACAUGGCAGUCCUAAGGACGCGGGUUUUGCUGACG |
| | | GUACAGGCCACAUGGCAGUCGUAACGACGCGGGUGGUAUACCGUAAGAGGCAUCAGAG |
| 26837 | 272 | ACUGGCGCUUUUAUCUGAUUACUUUGAGAGCCAUCACCAGCGACUAUGUCGUAGUGGGUAA |
| | | AGCUCCCUAUGGGCGCAGCAAACAUGGCAGUCCUAAGGACGCGGGUUUUGCUGACGGUACA |
| | | GGCCACAUGGCAGUCGUAACGACGCGGGUGGUAUAGGGAGCAUCAAAG |
| 26838 | 273 | ACUGGCGCUUCUAUCUGAUUACUCUGAGCGCCAUCACCAGCGACUAUGUCGUAGUGGGUAA |
| | | AGCCGCUUACGGUAUGGGCGCAGACAUGGCAGUCGUAACGACGCGGGUCUGACGGUACAGG |
| | | CCACAUGAGGAUCACCCAUGUGGUAUACCGUAAGAGGCAUCAGAG |
| 26839 | 274 | ACUGGCGCUUUUAUCUGAUUACUUUGAGAGCCAUCACCAGCGACUAUGUCGUAGUGGGUAA |
| | | AGCUCCCUAUGGGCGCAGACAUGGCAGUCGUAACGACGCGGGUCUGACGGUACAGGCCACA |
| | | UGAGGAUCACCCAUGUGGUAUAGGGAGCAUCAAAG |
| 27220 | 275 | ACUGGCGCUUUUAUCUGAUUACUUUGAGAGCCAUCACCAGCGACUAUGUCG |
| | | UAGUGGGUAAAGCUGCACUAUGGGCGCAGCACCUGAGGAUCACCCAGGUGC |
| | | UGACGGUACAGGCCACCUGAGGAUCACCCAGGUGGUAUAGUGCAGCAUCAA |
| | | AG |
| 27221 | 276 | ACUGGCGCUUUUAUCUGAUUACUUUGAGAGCCAUCACCAGCGACUAUGUCG |
| | | UAGUGGGUAAAGCUGCACUAUGGGCGCAGCGCAUGAGGAUCACCCAUGCGC |
| | | UGACGGUACAGGCCGCAUGAGGAUCACCCAUGCGGUAUAGUGCAGCAUCAA |
| | | AG |
| 27222 | 277 | ACUGGCGCUUUUAUCUGAUUACUUUGAGAGCCAUCACCAGCGACUAUGUCG |
| | | UAGUGGGUAAAGCUGCACUAUGGGCGCAGCGCCUGAGGAUCACCCAGGCGC |
| | | UGACGGUACAGGCCGCCUGAGGAUCACCCAGGCGGUAUAGUGCAGCAUCAA |
| | | AG |
| 27223 | 278 | ACUGGCGCUUUUAUCUGAUUACUUUGAGAGCCAUCACCAGCGACUAUGUCG |
| | | UAGUGGGUAAAGCUGCACUAUGGGCGCAGCGCCUGAGCAUCAGCCAGGCGC |
| | | UGACGGUACAGGCCGCCUGAGCAUCAGCCAGGCGGUAUAGUGCAGCAUCAA |
| | | AG |
| 27224 | 279 | ACUGGCGCUUUUAUCUGAUUACUUUGAGAGCCAUCACCAGCGACUAUGUCG |
| | | UAGUGGGUAAAGCUGCACUAUGGGCGCAGCACAUGAGCAUCAGCCAUGUGC |
| | | UGACGGUACAGGCCACAUGAGCAUCAGCCAUGUGGUAUAGUGCAGCAUCAA |
| | | AG |
| 27225 | 280 | ACUGGCGCUUUUAUCUGAUUACUUUGAGAGCCAUCACCAGCGACUAUGUCG |
| | | UAGUGGGUAAAGCUGCACUAUGGGCGCAGCACAUGAGUAUCAACCAUGUGC |
| | | UGACGGUACAGGCCACAUGAGUAUCAACCAUGUGGUAUAGUGCAGCAUCAA |
| | | AG |
| 27226 | 281 | ACUGGCGCUUUUAUCUGAUUACUUUGAGAGCCAUCACCAGCGACUAUGUCG |
| | | UAGUGGGUAAAGCUGCACUAUGGGCGCAGCACAUGAGAAUCAGCCAUGUGC |
| | | UGACGGUACAGGCCACAUGAGAAUCAGCCAUGUGGUAUAGUGCAGCAUCAA |
| | | AG |
| 27227 | 282 | ACUGGCGCUUUUAUCUGAUUACUUUGAGAGCCAUCACCAGCGACUAUGUCG |
| | | UAGUGGGUAAAGCUGCACUAUGGGCGCAGCCCUUGAGGAUCACCCAUGUGC |
| | | UGACGGUACAGGCCCCUUGAGGAUCACCCAUGUGGUAUAGUGCAGCAUCAA |
| | | AG |
| 27228 | 283 | ACUGGCGCUUUUAUCUGAUUACUUUGAGAGCCAUCACCAGCGACUAUGUCG |
| | | UAGUGGGUAAAGCUGCACUAUGGGCGCAGCACUUGAGGAUCACCCAUGUGC |
| | | UGACGGUACAGGCCACUUGAGGAUCACCCAUGUGGUAUAGUGCAGCAUCAA |
| | | AG |
| 27229 | 284 | ACUGGCGCUUUUAUCUGAUUACUUUGAGAGCCAUCACCAGCGACUAUGUCG |
| | | UAGUGGGUAAAGCUGCACUAUGGGCGCAGCACCUGAGGAUCACCCAUGUGC |
| | | UGACGGUACAGGCCACCUGAGGAUCACCCAUGUGGUAUAGUGCAGCAUCAA |
| | | AG |
| 27230 | 285 | ACUGGCGCUUUUAUCUGAUUACUUUGAGAGCCAUCACCAGCGACUAUGUCGUAGU |
| | | GGGUAAAGCUGCACUAUGGGCGCAGCACAUGAGGAUCACCUAUGUGCUGACGGUA |
| | | CAGGCCACAUGAGGAUCACCUAUGUGGUAUAGUGCAGCAUCAAAG |
| 27231 | 286 | ACUGGCGCUUUUAUCUGAUUACUUUGAGAGCCAUCACCAGCGACUAUGUCGUAGU |
| | | GGGUAAAGCUGCACUAUGGGCGCAGCACAUUAGGAUCACCAAUGUGCUGACGGUA |
| | | CAGGCCACAUUAGGAUCACCAAUGUGGUAUAGUGCAGCAUCAAAG |
| 27232 | 287 | ACUGGCGCUUUUAUCUGAUUACUUUGAGAGCCAUCACCAGCGACUAUGUCGUAGU |
| | | GGGUAAAGCUGCACUAUGGGCGCAGCACAUUAGGAUCACCGAUGUGCUGACGGUA |
| | | CAGGCCACAUUAGGAUCACCGAUGUGGUAUAGUGCAGCAUCAAAG |
| 27233 | 288 | ACUGGCGCUUUUAUCUGAUUACUUUGAGAGCCAUCACCAGCGACUAUGUCGUAGU |
| | | GGGUAAAGCUGCACUAUGGGCGCAGCACAUUAGGAUCACCUAUGUGCUGACGGUA |
| | | CAGGCCACAUUAGGAUCACCUAUGUGGUAUAGUGCAGCAUCAAAG |
| 27234 | 289 | ACUGGCGCUUUUAUCUGAUUACUUUGAGAGCCAUCACCAGCGACUAUGUCGUAGU |
| | | GGGUAAAGCUGCACUAUGGGCGCAGCACAUGAGGAUUACCCAUGUGCUGACGGUA |
| | | CAGGCCACAUGAGGAUUACCCAUGUGGUAUAGUGCAGCAUCAAAG |
| 27235 | 290 | ACUGGCGCUUUUAUCUGAUUACUUUGAGAGCCAUCACCAGCGACUAUGUCGUAGU |
| | | GGGUAAAGCUGCACUAUGGGCGCAGCACAUGAGGAUAACCCAUGUGCUGACGGUA |
| | | CAGGCCACAUGAGGAUAACCCAUGUGGUAUAGUGCAGCAUCAAAG |
| 27236 | 291 | ACUGGCGCUUUUAUCUGAUUACUUUGAGAGCCAUCACCAGCGACUAUGUCGUAGU |
| | | GGGUAAAGCUGCACUAUGGGCGCAGCACAUGAGGAUGACCCAUGUGCUGACGGUA |
| | | CAGGCCACAUGAGGAUGACCCAUGUGGUAUAGUGCAGCAUCAAAG |
| 27237 | 292 | ACUGGCGCUUUUAUCUGAUUACUUUGAGAGCCAUCACCAGCGACUAUGUCGUAGU |
| | | GGGUAAAGCUGCACUAUGGGCGCAGCACAUGAGGACCACCCAUGUGCUGACGGUA |
| | | CAGGCCACAUGAGGACCACCCAUGUGGUAUAGUGCAGCAUCAAAG |
| 27238 | 293 | ACUGGCGCUUUUAUCUGAUUACUUUGAGAGCCAUCACCAGCGACUAUGUCGUAGU |
| | | GGGUAAAGCUGCACUAUGGGCGCAGCAGAUGAGGAUCACCCAUGGGCUGACGGUA |
| | | CAGGCCAGAUGAGGAUCACCCAUGGGGUAUAGUGCAGCAUCAAAG |
| 27239 | 294 | ACUGGCGCUUUUAUCUGAUUACUUUGAGAGCCAUCACCAGCGACUAUGUCGUAGU |
| | | GGGUAAAGCUGCACUAUGGGCGCAGCACAUGGGGAUCACCCAUGUGCUGACGGUA |
| | | CAGGCCACAUGGGGAUCACCCAUGUGGUAUAGUGCAGCAUCAAAG |
| 27240 | 295 | ACUGGCGCUUUUAUCUGAUUACUUUGAGAGCCAUCACCAGCGACUAUGUCGUAGU |
| | | GGGUAAAGCUGCACUAUGGGCGCAGCACAUGAGGAUCACCCAUGUGCUGACGGUA |
| | | CAGGCCACAUGAGGAUCACCCAUGUGGUAUAGUGCAGCAUCAAAG |
| 27241 | 296 | ACUGGCGCUUUUAUCUGAUUACUUUGAGAGCCAUCACCAGCGACUAUGUCGUAGU |
| | | GGGUAAAGCUCACCUGAGGAUCACCCAGGUGAGCAUCAAAG |
| 27242 | 297 | ACUGGCGCUUUUAUCUGAUUACUUUGAGAGCCAUCACCAGCGACUAUGUCGUAGU |
| | | GGGUAAAGCUCGCAUGAGGAUCACCCAUGCGAGCAUCAAAG |
| 27243 | 298 | ACUGGCGCUUUUAUCUGAUUACUUUGAGAGCCAUCACCAGCGACUAUGUCGUAGU |
| | | GGGUAAAGCUCGCCUGAGGAUCACCCAGGCGAGCAUCAAAG |
| 27244 | 299 | ACUGGCGCUUUUAUCUGAUUACUUUGAGAGCCAUCACCAGCGACUAUGUCGUAGU |
| | | GGGUAAAGCUCGCCUGAGCAUCAGCCAGGCGAGCAUCAAAG |
| 27245 | 300 | ACUGGCGCUUUUAUCUGAUUACUUUGAGAGCCAUCACCAGCGACUAUGUCGUAGU |
| | | GGGUAAAGCUCACAUGAGCAUCAGCCAUGUGAGCAUCAAAG |
| 27246 | 301 | ACUGGCGCUUUUAUCUGAUUACUUUGAGAGCCAUCACCAGCGACUAUGUCGUAGU |
| | | GGGUAAAGCUCACAUGAGUAUCAACCAUGUGAGCAUCAAAG |
| 27247 | 302 | ACUGGCGCUUUUAUCUGAUUACUUUGAGAGCCAUCACCAGCGACUAUGUCGUAGU |
| | | GGGUAAAGCUCACAUGAGAAUCAGCCAUGUGAGCAUCAAAG |
| 27248 | 303 | ACUGGCGCUUUUAUCUGAUUACUUUGAGAGCCAUCACCAGCGACUAUGUCGUAGU |
| | | GGGUAAAGCUCCCUUGAGGAUCACCCAUGUGAGCAUCAAAG |
| 27249 | 304 | ACUGGCGCUUUUAUCUGAUUACUUUGAGAGCCAUCACCAGCGACUAUGUCGUAGU |
| | | GGGUAAAGCUCACUUGAGGAUCACCCAUGUGAGCAUCAAAG |
| 27250 | 305 | ACUGGCGCUUUUAUCUGAUUACUUUGAGAGCCAUCACCAGCGACUAUGUCGUAGU |
| | | GGGUAAAGCUCACCUGAGGAUCACCCAUGUGAGCAUCAAAG |
| 27251 | 306 | ACUGGCGCUUUUAUCUGAUUACUUUGAGAGCCAUCACCAGCGACUAUGUCGUAGU |
| | | GGGUAAAGCUCACAUGAGGAUCACCUAUGUGAGCAUCAAAG |
| 27252 | 307 | ACUGGCGCUUUUAUCUGAUUACUUUGAGAGCCAUCACCAGCGACUAUGUCGUAGU |
| | | GGGUAAAGCUCACAUUAGGAUCACCAAUGUGAGCAUCAAAG |
| 27253 | 308 | ACUGGCGCUUUUAUCUGAUUACUUUGAGAGCCAUCACCAGCGACUAUGUCGUAGU |
| | | GGGUAAAGCUCACAUUAGGAUCACCGAUGUGAGCAUCAAAG |
| 27254 | 309 | ACUGGCGCUUUUAUCUGAUUACUUUGAGAGCCAUCACCAGCGACUAUGUCGUAGU |
| | | GGGUAAAGCUCACAUUAGGAUCACCUAUGUGAGCAUCAAAG |
| 27255 | 310 | ACUGGCGCUUUUAUCUGAUUACUUUGAGAGCCAUCACCAGCGACUAUGUCGUAGU |
| | | GGGUAAAGCUCACAUGAGGAUUACCCAUGUGAGCAUCAAAG |
| 27256 | 311 | ACUGGCGCUUUUAUCUGAUUACUUUGAGAGCCAUCACCAGCGACUAUGUCGUAGU |
| | | GGGUAAAGCUCACAUGAGGAUAACCCAUGUGAGCAUCAAAG |
| 27257 | 312 | ACUGGCGCUUUUAUCUGAUUACUUUGAGAGCCAUCACCAGCGACUAUGUCGUAGU |
| | | GGGUAAAGCUCACAUGAGGAUGACCCAUGUGAGCAUCAAAG |
| 27258 | 313 | ACUGGCGCUUUUAUCUGAUUACUUUGAGAGCCAUCACCAGCGACUAUGUCGUAGU |
| | | GGGUAAAGCUCACAUGAGGACCACCCAUGUGAGCAUCAAAG |
| 27259 | 314 | ACUGGCGCUUUUAUCUGAUUACUUUGAGAGCCAUCACCAGCGACUAUGUCGUAGU |
| | | GGGUAAAGCUCAGAUGAGGAUCACCCAUGGGAGCAUCAAAG |
| 27260 | 315 | ACUGGCGCUUUUAUCUGAUUACUUUGAGAGCCAUCACCAGCGACUAUGUCGUAGU |
| | | GGGUAAAGCUCACAUGGGGAUCACCCAUGUGAGCAUCAAAG |
| 27261 | 317 | ACUGGCGCUUCUAUCUGAUUACUCUGAGCGCCAUCACCAGCGACUAUGUCGUAGUGGGUAA |
| | | AGCUCACAUGAGGAUCACCCAUGUGAGCAUCAGAG |
| 27262 | 318 | ACUGGCGCUUCUAUCUGAUUACUCUGAGCGCCAUCACCAGCGACUAUGUCGUAGUGGGUAA |
| | | AGCUGCACUAUGGGCGCAGCGUCAAUGACGCUGACGGUACAGGCCACAUGAGGAUCACCCA |
| | | UGUGGUAUAGUGCAGCAUCAGAG |
| 27263 | 319 | ACUGGCGCUUCUAUCUGAUUACUCUGAGCGCCAUCACCAGCGACUAUGUCGUAGUGGGUAA |
| | | AGCUGCACUAUGGGCGCAGCUCAUGAGGAUCACCCAUGAGCUGACGGUACAGGCCACAUGA |
| | | GGAUCACCCAUGUGGUAUAGUGCAGCAUCAGAG |
| 27264 | 320 | ACUGGCGCUUCUAUCUGAUUACUCUGAGCGCCAUCACCAGCGACUAUGUCGUAGUGGGUAA |
| | | AGCUGCACUAUGGGCGCAGACAUGGCAGUCGUAACGACGCGGGUCUGACGGUACAGGCCAC |
| | | AUGAGGAUCACCCAUGUGGUAUAGUGCAGCAUCAGAG |
| 27265 | 321 | ACUGGCGCUUUUAUCUGAUUACUUUGAGAGCCAUCACCAGCGACUAUGUCGUAGU |
| | | GGGUAAAGCUGCACUAUGGGGCCACAUGAGGAUCACCCAUGUGGUGUACAGCGCA |
| | | GCGUCAAUGACGCUGACGAUAGUGCAGCAUCAAAG |

[0134] In some embodiments, a sgRNA variant comprises one or more additional changes to a sequence of SEQ ID NO:2238, SEQ ID NO:2239, SEQ ID NO:2240, SEQ ID NO:2241, SEQ ID NO:2243, SEQ ID NO:2256, SEQ ID NO:2274, SEQ ID NO:2275, SEQ ID NO:2279, SEQ ID NO:2281, SEQ ID NO: 2285, SEQ ID NO: 26797, or SEQ ID NO: 26800 of Table 3.

[0135] In some embodiments of the gRNA variants of the disclosure, the gRNA variant comprises at least one modification, wherein the at least one modification compared to the reference guide scaffold of SEQ ID NO:5 is selected from one or more of: (a) a C18G substitution in the triplex loop; (b) a G55 insertion in the stem bubble; (c) a U1 deletion; (d) a modification of the extended stem loop wherein (i) a 6 nt loop and 13 loop-proximal base pairs are replaced by a Uvsx hairpin; and (ii) a deletion of A99 and a substitution of G65U that results in a loop-distal base that is fully base-paired. In exemplary embodiments of the foregoing, the gRNA variant comprises the sequence of any one of SEQ ID NOS: 2238, 2241, 2244, 2248, 2249, 2256, 2259-2285, 26797 or 26800.

[0136] In some embodiments, a gRNA variant comprises an exogenous stem loop having a long non-coding RNA (lncRNA). As used herein, a lncRNA refers to a non-coding RNA that is longer than approximately 200 bp in length. In some embodiments, the 5′ and 3′ ends of the exogenous stem loop are base paired; i.e., interact to form a region of duplex RNA. In some embodiments, the 5′ and 3′ ends of the exogenous stem loop are base paired, and one or more regions between the 5′ and 3′ ends of the exogenous stem loop are not base paired.

[0137] In some embodiments, the disclosure provide gRNA variants with nucleotide modifications relative to reference gRNA having: (a) substitution of 1 to 15 consecutive or non-consecutive nucleotides in the gRNA variant in one or more regions; (b) a deletion of 1 to 10 consecutive or non-consecutive nucleotides in the gRNA variant in one or more regions; (c) an insertion of 1 to 10 consecutive or non-consecutive nucleotides in the gRNA variant in one or more regions; (d) a substitution of the scaffold stem loop or the extended stem loop with an RNA stem loop sequence from a heterologous RNA source with proximal 5′ and 3′ ends; or any combination of (a)-(d). Any of the substitutions, insertions and deletions described herein can be combined to generate a gNA variant of the disclosure. For example, a gNA variant can comprise at least one substitution and at least one deletion relative to a reference gRNA, at least one substitution and at least one insertion relative to a reference gRNA, at least one insertion and at least one deletion relative to a reference gRNA, or at least one substitution, one insertion and one deletion relative to a reference gRNA.

[0138] In some embodiments, a sgRNA variant of the disclosure comprises one or more additional changes to a previously generated variant, the previously generated variant itself serving as the sequence to be modified. In some embodiments, a sgRNA variant comprises one or more additional changes to a sequence of SEQ ID NO: 2238, SEQ ID NO: 2239, SEQ ID NO: 2240, SEQ ID NO: 2241, SEQ ID NO:2241, SEQ ID NO:2274, SEQ ID NO:2275, SEQ ID NO: 2279, or SEQ ID NO: 2285, SEQ ID NO: 26797, or SEQ ID NO: 26800.

[0139] In exemplary embodiments, a gRNA variant comprises one or more modification relative to gRNA scaffold variant 174 (SEQ ID NO:2238), wherein the resulting gRNA variant exhibits a functional improvement compared to the parent 174, when assessed in an in vitro or in vivo assay under comparable conditions.

[0140] In exemplary embodiments, a gRNA variant comprises one or more modification relative to gRNA scaffold variant 175 (SEQ ID NO:2239), wherein the resulting gRNA variant exhibits a functional improvement compared to the parent 174, when assessed in an in vitro or in vivo assay under comparable conditions.

[0141] In exemplary embodiments, a gRNA variant comprises one or more modification relative to gRNA scaffold variant 215 (SEQ ID NO:2275), wherein the resulting gRNA variant exhibits a functional improvement compared to the parent 215, when assessed in an in vitro or in vivo assay under comparable conditions.

[0142] In exemplary embodiments, a gRNA variant comprises one or more modification relative to gRNA scaffold variant 221 (SEQ ID NO: 2281), wherein the resulting gRNA variant exhibits a functional improvement compared to the parent 221, when assessed in an in vitro or in vivo assay under comparable conditions.

[0143] In exemplary embodiments, a gRNA variant comprises one or more modification relative to gRNA scaffold variant 225 (SEQ ID NO: 2285), wherein the resulting gRNA variant exhibits a functional improvement compared to the parent 225, when assessed in an in vitro or in vivo assay under comparable conditions.

[0144] In exemplary embodiments, a gRNA variant comprises one or more modification relative to gRNA scaffold variant 235 (SEQ ID NO: 26800), wherein the resulting gRNA variant exhibits a functional improvement compared to the parent 225, when assessed in an in vitro or in vivo assay under comparable conditions.

[0145] In some embodiments, the gRNA variant comprises an exogenous extended stem loop, with such differences from a reference gRNA described as follows. In some embodiments, an exogenous extended stem loop has little or no identity to the reference stem loop regions disclosed herein (e.g., SEQ ID NO:15). In some embodiments, an exogenous stem loop is at least 10 bp, at least 20 bp, at least 30 bp, at least 40 bp, at least 50 bp, at least 60 bp, at least 70 bp, at least 80 bp, at least 90 bp, at least 100 bp, at least 200 bp, at least 300 bp, at least 400 bp, at least 500 bp, at least 600 bp, at least 700 bp, at least 800 bp, at least 900 bp, at least 1,000 bp, at least 2,000 bp, at least 3,000 bp, at least 4,000 bp, at least 5,000 bp, at least 6,000 bp, at least 7,000 bp, at least 8,000 bp, at least 9,000 bp, at least 10,000 bp, at least 12,000 bp, at least 15,000 bp or at least 20,000 bp. In some embodiments, the gRNA variant comprises an extended stem loop region comprising at least 10, at least 100, at least 500, at least 1000, or at least 10,000 nucleotides. In some embodiments, the heterologous stem loop increases the stability of the gRNA. In some embodiments, the heterologous RNA stem loop is capable of binding a protein, an RNA structure, a DNA sequence, or a small molecule. In some embodiments, an exogenous stem loop region replacing the stem loop comprises an RNA stem loop or hairpin in which the resulting gRNA has increased stability and, depending on the choice of loop, can interact with certain cellular proteins or RNA. Such exogenous extended stem loops can comprise, for example a thermostable RNA such as MS2 hairpin (ACAUGAGGAUCACCCAUGU (SEQ ID NO: 27)), QP hairpin (UGCAUGUCUAAGACAGCA (SEQ ID NO: 28)), U1 hairpin II (AAUCCAUUGCACUCCGGAUU (SEQ ID NO: 29)), Uvsx (CCUCUUCGGAGG (SEQ ID NO: 30)), PP7 hairpin (AGGAGUUUCUAUGGAAACCCU (SEQ ID NO: 31)), Phage replication loop (AGGUGGGACGACCUCUCGGUCGUCCUAUCU (SEQ ID NO: 32)), Kissing loop_a (UGCUCGCUCCGUUCGAGCA (SEQ ID NO: 33)), Kissing loop_bl (UGCUCGACGCGUCCUCGAGCA (SEQ ID NO: 34)), Kissing loop_b2 (UGCUCGUUUGCGGCUACGAGCA (SEQ ID NO: 35)), G quadriplex M3q (AGGGAGGGAGGGAGAGG (SEQ ID NO: 149)), G quadriplex telomere basket (GGUUAGGGUUAGGGUUAGG (SEQ ID NO: 150)), Sarcin-ricin loop (CUGCUCAGUACGAGAGGAACCGCAG (SEQ ID NO: 151)) or Pseudoknots (UACACUGGGAUCGCUGAAUUAGAGAUCGGCGUCCUUUCAUUCUAUAUACUUUGG AGUUUUAAAAUGUCUCUAAGUACA (SEQ ID NO: 152)). In some embodiments, one of the foregoing hairpin sequences is incorporated into the stem loop to help traffic the incorporation of the gRNA (and an associated CasX in an RNP complex) into a budding XDP (described more fully, below).

[0146] In the embodiments of the gRNA variants, the gRNA variant further comprises a spacer (or targeting sequence) region located at the 3′ end of the gRNA, capable of hybridizing with a target nucleic acid specific to a DMPK sequence described more fully, supra, which comprises at least 14 to about 35 nucleotides wherein the spacer is designed with a sequence that is complementary to a target DNA. In some embodiments, the encoded gRNA variant comprises a targeting sequence of at least 10 to 20 nucleotides complementary to a target DNA. In some embodiments, the targeting sequence has 14, 15, 16, 17, 18, 19, 20, 21, 22, 23, 24, 25, 26, 27, 28, 29, 30, 31, 32, 33, 34 or 35 nucleotides. In some embodiments, the encoded gRNA variant comprises a targeting sequence having 20 nucleotides. In some embodiments, the targeting sequence has 25 nucleotides. In some embodiments, the targeting sequence has 24 nucleotides. In some embodiments, the targeting sequence has 23 nucleotides. In some embodiments, the targeting sequence has 22 nucleotides. In some embodiments, the targeting sequence has 21 nucleotides. In some embodiments, the targeting sequence has 20 nucleotides. In some embodiments, the targeting sequence has 19 nucleotides. In some embodiments, the targeting sequence has 18 nucleotides. In some embodiments, the targeting sequence has 17 nucleotides. In some embodiments, the targeting sequence has 16 nucleotides. In some embodiments, the targeting sequence has 15 nucleotides. In some embodiments, the targeting sequence has 14 nucleotides.

[0147] h. Complex Formation with CasX Protein

[0148] In some embodiments, upon expression, the gRNA variant is complexed as an RNP with a CasX variant protein comprising any one of the sequences of Table 4 (SEQ ID NOS: 36-99, 101-148, and 26908-27154), or a sequence having at least about 50%, at least about 60%, at least about 70%, at least about 80%, at least about 85%, at least about 90%, at least about 91%, at least about 92%, at least about 93%, at least about 94%, at least about 95%, at least about 96%, at least about 97%, at least about 98%, or at least about 99% identity thereto. In some embodiments, upon expression, the gRNA variant is complexed as an RNP with a CasX variant protein comprising any one of SEQ ID NOS: 59, 72-99, 101-148, or 26908-27154, or a sequence having at least about 50%, at least about 60%, at least about 70%, at least about 80%, at least about 85%, at least about 90%, at least about 91%, at least about 92%, at least about 93%, at least about 94%, at least about 95%, at least about 96%, at least about 97%, at least about 98%, or at least about 99% identity thereto. In some embodiments, upon expression, the gRNA variant is complexed as an RNP with a CasX variant protein comprising any one of SEQ ID NOS 132-148, or 26908-27154 or a sequence having at least about 50%, at least about 60%, at least about 70%, at least about 80%, at least about 85%, at least about 90%, at least about 91%, at least about 92%, at least about 93%, at least about 94%, at least about 95%, at least about 96%, at least about 97%, at least about 98%, or at least about 99% identity thereto.

[0149] In some embodiments, a gRNA variant has an improved ability to form a complex with a CasX protein (such as a reference CasX or a CasX variant protein) when compared to a reference gRNA. In some embodiments, a gRNA variant has an improved affinity for a CasX protein (such as a reference or variant protein) when compared to a reference gRNA, thereby improving its ability to form a ribonucleoprotein (RNP) complex with the CasX protein, as described in the Examples. Improving ribonucleoprotein complex formation may, in some embodiments, improve the efficiency with which functional RNPs are assembled. In some embodiments, greater than 90%, greater than 93%, greater than 95%, greater than 96%, greater than 97%, greater than 98% or greater than 99% of RNPs comprising a gRNA variant and its targeting sequence are competent for gene editing of a target nucleic acid.

[0150] Exemplary nucleotide changes that can improve the ability of gRNA variants to form a complex with CasX protein may, in some embodiments, include replacing the scaffold stem with a thermostable stem loop. Without wishing to be bound by any theory, replacing the scaffold stem with a thermostable stem loop could increase the overall binding stability of the gRNA variant with the CasX protein. Alternatively, or in addition, removing a large section of the stem loop could change the gRNA variant folding kinetics and make a functional folded gRNA easier and quicker to structurally-assemble, for example by lessening the degree to which the gRNA variant can get “tangled” in itself. In some embodiments, choice of scaffold stem loop sequence could change with different targeting sequences that are utilized for the gRNA. In some embodiments, scaffold sequence can be tailored to the targeting sequence and therefore the target sequence. Biochemical assays can be used to evaluate the binding affinity of CasX protein for the gRNA variant to form the RNP, including the assays of the Examples. For example, a person of ordinary skill can measure changes in the amount of a fluorescently tagged gRNA that is bound to an immobilized CasX protein, as a response to increasing concentrations of an additional unlabeled “cold competitor” gRNA. Alternatively, or in addition, fluorescence signal can be monitored to or seeing how it changes as different amounts of fluorescently labeled gRNA are flowed over immobilized CasX protein. Alternatively, the ability to form an RNP can be assessed using in vitro cleavage assays against a defined target nucleic acid sequence.

### IV. Proteins for Modifying a Target Nucleic Acid

[0151] The present disclosure provides systems comprising a CRISPR nuclease that have utility in genome editing of eukaryotic cells. In some embodiments, the CRISPR nuclease employed in the genome editing systems is a Class 2 Type V nuclease. Although members of Class 2, Type V CRISPR-Cas systems have differences, they share some common characteristics that distinguish them from the Cas9 systems. Firstly, the Class 2, Type V nucleases possess a single RNA-guided RuvC domain-containing effector but no HNH domain, and they recognize T-rich PAM 5′ upstream to the target region on the non-targeted strand, which is different from Cas9 systems which rely on G-rich PAM at 3′ side of target sequences. Type V nucleases generate staggered double-stranded breaks distal to the PAM sequence, unlike Cas9, which generates a blunt end in the proximal site close to the PAM. In addition, Type V nucleases degrade ssDNA in trans when activated by target dsDNA or ssDNA binding in cis. In some embodiments, the Type V nucleases of the embodiments recognize a 5′-TC PAM motif and produce staggered ends cleaved solely by the RuvC domain. In some embodiments, the Type V nuclease is selected from the group consisting of Cas12a, Cas12b, Cas12c, Cas12d (CasY), Cas12j, Cas12k, CasZ and CasX. In some embodiments, the present disclosure provides systems comprising a CasX protein and one or more gRNA acids (CasX:gRNA system) that are specifically designed to modify a target nucleic acid sequence in eukaryotic cells.

[0152] The term “CasX protein”, as used herein, refers to a family of proteins, and encompasses all naturally occurring CasX proteins, proteins that share at least 50% identity to naturally occurring CasX proteins, as well as CasX variants possessing one or more improved characteristics relative to a naturally-occurring reference CasX protein.

[0153] CasX proteins of the disclosure comprise at least one of the following domains: a non-target strand binding (NTSB) domain, a target strand loading (TSL) domain, a helical I domain, a helical II domain, an oligonucleotide binding domain (OBD), and a RuvC DNA cleavage domain.

[0154] In some embodiments, a CasX protein can bind and/or modify (e.g., nick, catalyze a double strand break, methylate, demethylate, etc.) a target nucleic acid at a specific sequence targeted by an associated gRNA, which hybridizes to a sequence within the target nucleic acid sequence.

[0155] a. Reference CasX Proteins

[0156] The disclosure provides naturally-occurring CasX proteins (referred to herein as a “reference CasX protein”), which were subsequently modified to create the CasX variants of the disclosure. For example, reference CasX proteins can be isolated from naturally occurring prokaryotes, such as Deltaproteobacteria, Planctomycetes, or Candidatus Sungbacteria species. A reference CasX protein (interchangeably referred to herein as a reference CasX polypeptide) is a type II CRISPR/Cas endonuclease belonging to the CasX (interchangeably referred to as Cas12e) family of proteins that interacts with a guide RNA to form a ribonucleoprotein (RNP) complex.

[0157] In some cases, a reference CasX protein is isolated or derived from Deltaproteobacter having a sequence of:

| (SEQ ID NO: 1) | |
|---|---|
| 1 | MEKRINKIRK KLSADNATKP VSRSGPMKTL LVRVMTDDLK KRLEKRRKKP EVMPQVISNN |
| 61 | AANNLRMLLD DYTKMKEAIL QVYWQEFKDD HVGLMCKFAQ PASKKIDQNK LKPEMDEKGN |
| 121 | LTTAGFACSQ CGQPLFVYKL EQVSEKGKAY TNYFGRCNVA EHEKLILLAQ LKPEKDSDEA |
| 181 | VTYSLGKFGQ RALDFYSIHV TKESTHPVKP LAQIAGNRYA SGPVGKALSD ACMGTIASFL |
| 241 | SKYQDIIIEH QKVVKGNQKR LESLRELAGK ENLEYPSVTL PPQPHTKEGV DAYNEVIARV |
| 301 | RMWVNLNLWQ KLKLSRDDAK PLLRLKGFPS FPVVERRENE VDWWNTINEV KKLIDAKRDM |
| 361 | GRVFWSGVTA EKRNTILEGY NYLPNENDHK KREGSLENPK KPAKRQFGDL LLYLEKKYAG |
| 421 | DWGKVFDEAW ERIDKKIAGL TSHIEREEAR NAEDAQSKAV LTDWLRAKAS FVLERLKEMD |
| 481 | EKEFYACEIQ LQKWYGDLRG NPFAVEAENR VVDISGFSIG SDGHSIQYRN LLAWKYLENG |
| 541 | KREFYLLMNY GKKGRIRFTD GTDIKKSGKW QGLLYGGGKA KVIDLTFDPD DEQLIILPLA |
| 601 | FGTRQGREFI WNDLLSLETG LIKLANGRVI EKTIYNKKIG RDEPALFVAL TFERREVVDP |
| 661 | SNIKPVNLIG VDRGENIPAV IALTDPEGCP LPEFKDSSGG PTDILRIGEG YKEKQRAIQA |
| 721 | AKEVEQRRAG GYSRKFASKS RNLADDMVRN SARDLFYHAV THDAVLVFEN LSRGFGRQGK |
| 781 | RTFMTERQYT KMEDWLTAKL AYEGLTSKTY LSKTLAQYTS KTCSNCGFTI TTADYDGMLV |
| 840 | RLKKTSDGWA TTLNNKELKA EGQITYYNRY KRQTVEKELS AELDRLSEES GNNDISKWTK |
| 901 | GRRDEALFLL KKRFSHRPVQ EQFVCLDCGH EVHADEQAAL NIARSWLFLN SNSTEFKSYK |
| 961 | SGKQPFVGAW QAFYKRRLKE VWKPNA. |

[0158] In some cases, a reference CasX protein is isolated or derived from Planctomycetes having a sequence of:

| (SEQ ID NO: 2) | |
|---|---|
| 1 | MQEIKRINKI RRRLVKDSNT KKAGKTGPMK TLLVRVMTPD LRERLENLRK KPENIPQPIS |
| 61 | NTSRANLNKL LTDYTEMKKA ILHVYWEEFQ KDPVGLMSRV AQPAPKNIDQ RKLIPVKDGN |
| 121 | ERLTSSGFAC SQCCQPLYVY KLEQVNDKGK PHTNYFGRCN VSEHERLILL SPHKPEANDE |
| 181 | LVTYSLGKFG QRALDFYSIH VTRESNHPVK PLEQIGGNSC ASGPVGKALS DACMGAVASF |
| 241 | LTKYQDIILE HQKVIKKNEK RLANLKDIAS ANGLAFPKIT LPPQPHTKEG IEAYNNVVAQ |
| 301 | IVIWVNLNLW QKLKIGRDEA KPLQRLKGFP SFPLVERQAN EVDWWDMVCN VKKLINEKKE |
| 361 | DGKVFWQNLA GYKRQEALLP YLSSEEDRKK GKKFARYQFG DLLLHLEKKH GEDWGKVYDE |
| 421 | AWERIDKKVE GLSKHIKLEE ERRSEDAQSK AALTDWLRAK ASFVIEGLKE ADKDEFCRCE |
| 481 | LKLQKWYGDL RGKPFAIEAE NSILDISGFS KQYNCAFIWQ KDGVKKLNLY LIINYFKGGK |
| 541 | LRFKKIKPEA FEANRFYTVI NKKSGEIVPM EVNENFDDPN LIILPLAFGK RQGREFIWND |
| 601 | LLSLETGSLK LANGRVIEKT LYNRRTRQDE PALFVALTFE RREVLDSSNI KPMNLIGIDR |
| 661 | GENIPAVIAL TDPEGCPLSR FKDSLGNPTH ILRIGESYKE KQRTIQAAKE VEQRRAGGYS |
| 721 | RKYASKAKNL ADDMVRNTAR DLLYYAVTQD AMLIFENLSR GFGRQGKRTF MAERQYTRME |
| 781 | DWLTAKLAYE GLPSKTYLSK TLAQYTSKTC SNCGFTITSA DYDRVLEKLK KTATGWMTTI |
| 840 | NGKELKVEGQ ITYYNRYKRQ NVVKDLSVEL DRLSEESVNN DISSWTKGRS GEALSLLKKR |
| 901 | FSHRPVQEKF VCLNCGFETH ADEQAALNIA RSWLELRSQE YKKYQTNKTT GNTDKRAFVE |
| 961 | TWQSFYRKKL KEVWKPAV. |

[0159] In some cases, a reference CasX protein is isolated or derived from Candidatus Sungbacteria having a sequence of

| (SEQ ID NO: 3) | |
|---|---|
| 1 | MDNANKPSTK SLVNTTRISD HFGVTPGQVT RVFSFGIIPT KRQYAIIERW FAAVEAARER |
| 61 | LYGMLYAHFQ ENPPAYLKEK FSYETFFKGR PVLNGLRDID PTIMTSAVFT ALRHKAEGAM |
| 121 | AAFHTNHRRL FEEARKKMRE YAECLKANEA LLRGAADIDW DKIVNALRTR LNTCLAPEYD |
| 181 | AVIADFGALC AFRALIAETN ALKGAYNHAL NQMLPALVKV DEPEEAEESP RLRFENGRIN |
| 241 | DLPKFPVAER ETPPDTETII RQLEDMARVI PDTAEILGYI HRIRHKAARR KPGSAVPLPQ |
| 301 | RVALYCAIRM ERNPEEDPST VAGHFLGEID RVCEKRRQGL VRTPEDSQIR ARYMDIISER |
| 361 | ATLAHPDRWT EIQFLRSNAA SRRVRAETIS APFEGFSWTS NRTNPAPQYG MALAKDANAP |
| 421 | ADAPELCICL SPSSAAFSVR EKGGDLIYMR PTGGRRGKDN PGKEITWVPG SFDEYPASGV |
| 481 | ALKLRLYFGR SQARRMLINK TWGLLSDNPR VFAANAELVG KKRNPQDRWK LFFHMVISGP |
| 541 | PPVEYLDFSS DVRSRARTVI GINRGEVNPL AYAVVSVEDG QVLEEGLLGK KEYIDQLIET |
| 601 | RRRISEYQSR EQTPPRDLRQ RVRHLQDTVL GSARAKIHSL IAFWKGILAI ERLDDQFHGR |
| 661 | EQKIIPKKTY LANKTGEMNA LSFSGAVRVD KKGNPWGGMI EIYPGGISRT CTQCGTVWLA |
| 721 | RRPKNPGHRD AMVVIPDIVD DAAATGFDNV DCDAGTVDYG ELFTLSREWV RLTPRYSRVM |
| 781 | RGTLGDLERA IRQGDDRKSR QMLELALEPQ PQWGQFFCHR CGFNGQSDVL AATNLARRAI |
| 841 | SLIRRLPDTD TPPTP. |

[0160] b. CasX Variant Proteins

[0161] The present disclosure provides variants of a reference CasX protein (interchangeably referred to herein as “CasX variant” or “CasX variant protein”), wherein the CasX variants comprise at least one modification in at least one domain relative to the reference CasX protein, including but not limited to the sequences of SEQ ID NOS:1-3.

[0162] The CasX variants of the disclosure have one or more improved characteristics compared to reference CasX proteins. Exemplary improved characteristics of the CasX variant embodiments include, but are not limited to improved folding of the variant, improved binding affinity to the gRNA, improved binding affinity to the target nucleic acid, improved ability to utilize a greater spectrum of PAM sequences in the editing and/or binding of target DNA, improved unwinding of the target DNA, increased editing activity, improved editing efficiency, improved editing specificity, increased percentage of a eukaryotic genome that can be efficiently edited, increased activity of the nuclease, increased target strand loading for double strand cleavage, decreased target strand loading for single strand nicking, decreased off-target cleavage, improved binding of the non-target strand of DNA, improved protein stability, improved protein:gRNA (RNP) complex stability, improved protein solubility, improved protein:gRNA (RNP) complex solubility, improved protein yield, improved protein expression, and improved fusion characteristics, as described more fully, below. Exemplary improved characteristics are described in WO 2020/247882A1 and WO 2020/247883, incorporated by reference herein. In the foregoing embodiments, the one or more of the improved characteristics of the CasX variant is at least about 1.1 to about 100,000-fold improved relative to the reference CasX protein of SEQ ID NO: 1, SEQ ID NO: 2, or SEQ ID NO: 3, when assayed in a comparable fashion. In other embodiments, the improvement is at least about 1.1-fold, at least about 2-fold, at least about 5-fold, at least about 10-fold, at least about 50-fold, at least about 100-fold, at least about 500-fold, at least about 1000-fold, at least about 5000-fold, at least about 10,000-fold, or at least about 100,000-fold compared to the reference CasX protein of SEQ ID NO: 1, SEQ ID NO: 2, or SEQ ID NO: 3, when assayed in a comparable fashion. In other cases, the one or more improved characteristics of an RNP of the CasX variant and the gRNA variant are at least about 1.1, at least about 10, at least about 100, at least about 1000, at least about 10,000, at least about 100,000-fold or more improved relative to an RNP of the reference CasX protein of SEQ ID NO:1, SEQ ID NO:2, or SEQ ID NO:3 and the gRNA of Table 2. In other cases, the one or more of the improved characteristics of an RNP of the CasX variant and the gRNA variant are about 1.1 to 100,00-fold, about 1.1 to 10,00-fold, about 1.1 to 1,000-fold, about 1.1 to 500-fold, about 1.1 to 100-fold, about 1.1 to 50-fold, about 1.1 to 20-fold, about 10 to 100,00-fold, about 10 to 10,00-fold, about 10 to 1,000-fold, about 10 to 500-fold, about 10 to 100-fold, about 10 to 50-fold, about 10 to 20-fold, about 2 to 70-fold, about 2 to 50-fold, about 2 to 30-fold, about 2 to 20-fold, about 2 to 10-fold, about 5 to 50-fold, about 5 to 30-fold, about 5 to 10-fold, about 100 to 100,00-fold, about 100 to 10,00-fold, about 100 to 1,000-fold, about 100 to 500-fold, about 500 to 100,00-fold, about 500 to 10,00-fold, about 500 to 1,000-fold, about 500 to 750-fold, about 1,000 to 100,00-fold, about 10,000 to 100,00-fold, about 20 to 500-fold, about 20 to 250-fold, about 20 to 200-fold, about 20 to 100-fold, about 20 to 50-fold, about 50 to 10,000-fold, about 50 to 1,000-fold, about 50 to 500-fold, about 50 to 200-fold, or about 50 to 100-fold, improved relative to an RNP of the reference CasX protein of SEQ ID NO:1, SEQ ID NO:2, or SEQ ID NO:3 and the gRNA of Table 2, when assayed in a comparable fashion. In other cases, the one or more improved characteristics of an RNP of the CasX variant and the gRNA variant are about 1.1-fold, 1.2-fold, 1.3-fold, 1.4-fold, 1.5-fold, 1.6-fold, 1.7-fold, 1.8-fold, 1.9-fold, 2-fold, 3-fold, 4-fold, 5-fold, 6-fold, 7-fold, 8-fold, 9-fold, 10-fold, 11-fold, 12-fold, 13-fold, 14-fold, 15-fold, 16-fold, 17-fold, 18-fold, 19-fold, 20-fold, 25-fold, 30-fold, 40-fold, 45-fold, 50-fold, 55-fold, 60-fold, 70-fold, 80-fold, 90-fold, 100-fold, 110-fold, 120-fold, 130-fold, 140-fold, 150-fold, 160-fold, 170-fold, 180-fold, 190-fold, 200-fold, 210-fold, 220-fold, 230-fold, 240-fold, 250-fold, 260-fold, 270-fold, 280-fold, 290-fold, 300-fold, 310-fold, 320-fold, 330-fold, 340-fold, 350-fold, 360-fold, 370-fold, 380-fold, 390-fold, 400-fold, 425-fold, 450-fold, 475-fold, or 500-fold improved relative to an RNP of the reference CasX protein of SEQ ID NO:1, SEQ ID NO:2, or SEQ ID NO:3 and the gRNA of Table 2, when assayed in a comparable fashion.

[0163] The term CasX variant is inclusive of variants that are fusion proteins; i.e. the CasX is “fused to” a heterologous sequence. This includes CasX variants comprising CasX variant sequences and N-terminal, C-terminal, or internal fusions of the CasX to a heterologous protein or domain thereof.

[0164] In some embodiments, the CasX variant comprises at least one modification in the NTSB domain. In some embodiments, the CasX variant comprises at least one modification in the TSL domain. In some embodiments, the CasX variant comprises at least one modification in the helical I domain. In some embodiments, the CasX variant comprises at least one modification in the helical II domain. In some embodiments, the CasX variant comprises at least one modification in the OBD domain. In some embodiments, the CasX variant comprises at least one modification in the RuvC DNA cleavage domain. In some embodiments, the at least one modification in the RuvC DNA cleavage domain comprises an amino acid substitution of one or more of amino acids K682, G695, A708, V711, D732, A739, D733, L742, V747, F755, M771, M779, W782, A788, G791, L792, P793, Y797, M799, Q804, S819, or Y857 or a deletion of amino acid P793 of SEQ ID NO:2.

[0165] In some embodiments, the CasX variant protein comprises at least one modification in at least 1 domain, in at least each of 2 domains, in at least each of 3 domains, in at least each of 4 domains or in at least each of 5 domains of the reference CasX protein, including the sequences of SEQ ID NOS: 1-3. In some embodiments, the CasX variant protein comprises two or more modifications in at least one domain of the reference CasX protein. In some embodiments, the CasX variant protein comprises at least two modifications in at least one domain of the reference CasX protein, at least three modifications in at least one domain of the reference CasX protein or at least four modifications in at least one domain of the reference CasX protein. In some embodiments, wherein the CasX variant comprises two or more modifications compared to a reference CasX protein, each modification is made in a domain independently selected from the group consisting of a NTSBD, TSLD, Helical I domain, Helical II domain, OBD, and RuvC DNA cleavage domain. In some embodiments, the at least one modification of the CasX variant protein comprises a deletion of at least a portion of one domain of the reference CasX protein of SEQ ID NOS: 1-3. In some embodiments, the deletion is in the NTSBD, TSLD, Helical I domain, Helical II domain, OBD, or RuvC DNA cleavage domain. In other embodiments, the disclosure provides CasX variants wherein the CasX variants comprise at least one modification relative to another CasX variant; e.g., CasX variant 515 is a variant of CasX variant 491. All variants that improve one or more functions or characteristics of the CasX variant protein when compared to a reference CasX protein (or the variant from which it was derived) described herein are envisaged as being within the scope of the disclosure.

[0166] In some embodiments, the modification of the CasX variant is a mutation in one or more amino acids of the reference CasX. In other embodiments, the modification is a substitution of one or more domains of the reference CasX with one or more domains from a different CasX. In some embodiments, insertion includes the insertion of a part or all of a domain from a different CasX protein. Mutations can occur in any one or more domains of the reference CasX protein, and may include, for example, deletion of part or all of one or more domains, or one or more amino acid substitutions, deletions, or insertions in any domain of the reference CasX protein. The domains of CasX proteins include the non-target strand binding (NTSB) domain, the target strand loading (TSL) domain, the helical I domain, the helical II domain, the oligonucleotide binding domain (OBD), and the RuvC DNA cleavage domain. Any change in amino acid sequence of a reference CasX protein that leads to an improved characteristic of the CasX protein is considered a CasX variant protein of the disclosure. For example, CasX variants can comprise one or more amino acid substitutions, insertions, deletions, or swapped domains, or any combinations thereof, relative to a reference CasX protein sequence.

[0167] Suitable mutagenesis methods for generating CasX variant proteins of the disclosure may include, for example, Deep Mutational Evolution (DME), deep mutational scanning (DMS), error prone PCR, cassette mutagenesis, random mutagenesis, staggered extension PCR, gene shuffling, or domain swapping. In some embodiments, the CasX variants are designed, for example by selecting one or more desired mutations in a reference CasX. In certain embodiments, the activity of a reference CasX protein is used as a benchmark against which the activity of one or more CasX variants are compared, thereby measuring improvements in function of the CasX variants.

[0168] In some embodiments of the CasX variants described herein, the at least one modification comprises: (a) a substitution of 1 to 100 consecutive or non-consecutive amino acids in the CasX variant compared to a reference CasX of SEQ ID NO:1, SEQ ID NO:2, SEQ ID NO:3, CasX variant 491 or CasX variant 515; (b) a deletion of 1 to 100 consecutive or non-consecutive amino acids in the CasX variant compared to a reference CasX or the variant from which it was derived; (c) an insertion of 1 to 100 consecutive or non-consecutive amino acids in the CasX compared to a reference CasX or the variant from which it was derived; or (d) any combination of (a)-(c). In some embodiments, the at least one modification comprises: (a) a substitution of 5-10 consecutive or non-consecutive amino acids in the CasX variant compared to a reference CasX of SEQ ID NO:1, SEQ ID NO:2, SEQ ID NO:3, CasX 491 or CasX 515; (b) a deletion of 1-5 consecutive or non-consecutive amino acids in the CasX variant compared to a reference CasX or the variant from which it was derived; (c) an insertion of 1-5 consecutive or non-consecutive amino acids in the CasX compared to a reference CasX or the variant from which it was derived; or (d) any combination of (a)-(c).

[0169] In some embodiments, the CasX variant protein comprises or consists of a sequence that has at least 1, at least 2, at least 3, at least 4, at least 5, at least 6, at least 7, at least 8, at least 9, at least 10, at least 20, at least 30, at least 40, at least 50, at least 60, at least 70, at lease 80, at least 90, or at least 100 alterations relative to the sequence of SEQ ID NO:1, SEQ ID NO:2, SEQ ID NO:3, CasX 491 (with reference to Table 4) or CasX 515 (with reference to Table 4). These alterations can be amino acid insertions, deletions, substitutions, or any combinations thereof. The alterations can be in one domain or in any domain or any combination of domains of the CasX variant. Any amino acid can be substituted for any other amino acid in the substitutions described herein. The substitution can be a conservative substitution (e.g., a basic amino acid is substituted for another basic amino acid). The substitution can be a non-conservative substitution (e.g., a basic amino acid is substituted for an acidic amino acid or vice versa). For example, a proline in a reference CasX protein can be substituted for any of arginine, histidine, lysine, aspartic acid, glutamic acid, serine, threonine, asparagine, glutamine, cysteine, glycine, alanine, isoleucine, leucine, methionine, phenylalanine, tryptophan, tyrosine or valine to generate a CasX variant protein of the disclosure.

[0170] Any permutation of the substitution, insertion and deletion embodiments described herein can be combined to generate a CasX variant protein of the disclosure. For example, a CasX variant protein can comprise at least one substitution and at least one deletion relative to a reference CasX protein sequence, at least one substitution and at least one insertion relative to a reference CasX protein sequence, at least one insertion and at least one deletion relative to a reference CasX protein sequence, or at least one substitution, one insertion and one deletion relative to a reference CasX protein sequence.

[0171] In some embodiments, the CasX variant comprises at least one modification compared to the reference CasX sequence of SEQ ID NO:2 is selected from one or more of: (a) an amino acid substitution of L379R; (b) an amino acid substitution of A708K; (c) an amino acid substitution of T620P; (d) an amino acid substitution of E385P; (e) an amino acid substitution of Y857R; (f) an amino acid substitution of I658V; (g) an amino acid substitution of F399L; (h) an amino acid substitution of Q252K; (i) an amino acid substitution of L404K; and (j) an amino acid deletion of P793.

[0172] In some embodiments, the CasX variant protein comprises between 400 and 2000 amino acids, between 500 and 1500 amino acids, between 700 and 1200 amino acids, between 800 and 1100 amino acids, or between 900 and 1000 amino acids.

[0173] In some embodiments, a CasX variant protein comprises a sequence of SEQ ID NOS: 59, 72-99, 101-148, and 26908-27154 as set forth in Table 4. In some embodiments, a CasX variant protein consists of a sequence of SEQ ID NOS: 59, 72-99, 101-148, and 26908-27154 as set forth in Table 4. In other embodiments, a CasX variant protein comprises a sequence at least 60% identical, at least 65% identical, at least 70% identical, at least 75% identical, at least 80% identical, at least 81% identical, at least 82% identical, at least 83% identical, at least 84% identical, at least 85% identical, at least 86% identical, at least 86% identical, at least 87% identical, at least 88% identical, at least 89% identical, at least 89% identical, at least 90% identical, at least 91% identical, at least 92% identical, at least 93% identical, at least 94% identical, at least 95% identical, at least 96% identical, at least 97% identical, at least 98% identical, at least 99% identical, at least 99.5% identical to a sequence of SEQ ID NOS: 59, 72-99, 101-148, or 26908-27154 as set forth in Table 4. In some embodiments, a CasX variant protein comprises or consists of a sequence of SEQ ID NOS: 536-99, 101-148, or 26908-27154. In other embodiments, a CasX variant protein comprises a sequence at least 60% identical, at least 65% identical, at least 70% identical, at least 75% identical, at least 80% identical, at least 81% identical, at least 82% identical, at least 83% identical, at least 84% identical, at least 85% identical, at least 86% identical, at least 86% identical, at least 87% identical, at least 88% identical, at least 89% identical, at least 89% identical, at least 90% identical, at least 91% identical, at least 92% identical, at least 93% identical, at least 94% identical, at least 95% identical, at least 96% identical, at least 97% identical, at least 98% identical, at least 99% identical, at least 99.5% identical to a sequence of SEQ ID NOS: 36-99, 101-148, or 26908-27154. In some embodiments, a CasX variant protein comprises or consists of a sequence of SEQ ID NOS: 132-148, or 26908-27154. In other embodiments, a CasX variant protein comprises a sequence at least 60% identical, at least 65% identical, at least 70% identical, at least 75% identical, at least 80% identical, at least 81% identical, at least 82% identical, at least 83% identical, at least 84% identical, at least 85% identical, at least 86% identical, at least 86% identical, at least 87% identical, at least 88% identical, at least 89% identical, at least 89% identical, at least 90% identical, at least 91% identical, at least 92% identical, at least 93% identical, at least 94% identical, at least 95% identical, at least 96% identical, at least 97% identical, at least 98% identical, at least 99% identical, at least 99.5% identical to a sequence of SEQ ID NOS: 132-148 or 26908-27154.

TABLE 4
CasX Variant Sequences

| SEQ | | |
|---|---|---|
| ID NO | Variant | Description of Variant |
| 36 | ND | TSL, Helical I, Helical II, OBD and RuvC domains from SEQ ID NO: 2 and an |
| | | NTSB domain from SEQ ID NO: 1 |
| 37 | ND | NTSB, Helical I, Helical II, OBD and RuvC domains from SEQ ID NO: 2 and a TSL |
| | | domain from SEQ ID NO: 1. |
| 38 | ND | TSL, Helical I, Helical II, OBD and RuvC domains from SEQ ID NO: 1 and an |
| | | NTSB domain from SEQ ID NO: 2 |
| 39 | ND | NTSB, Helical I, Helical II, OBD and RuvC domains from SEQ ID NO: 1 and an |
| | | TSL domain from SEQ ID NO: 2. |
| 40 | ND | NTSB, TSL, Helical I, Helical II and OBD domains SEQ ID NO: 2 and an exogenous |
| | | RuvC domain or a portion thereof from a second CasX protein. |
| 41 | ND | ND |
| 42 | ND | NTSB, TSL, Helical II, OBD and RuvC domains from SEQ ID NO: 2 and a Helical I |
| | | domain from SEQ ID NO: 1 |
| 43 | ND | NTSB, TSL, Helical I, OBD and RuvC domains from SEQ ID NO: 2 and a Helical II |
| | | domain from SEQ ID NO: 1 |
| 44 | ND | NTSB, TSL, Helical I, Helical II and RuvC domains from a first CasX protein and an |
| | | exogenous OBD or a part thereof from a second CasX protein |
| 45 | ND | ND |
| 46 | ND | ND |
| 47 | ND | substitution of L379R, a substitution of C477K, a substitution of A708K, a deletion of |
| | | P at position 793 and a substitution of T620P of SEQ ID NO: 2 |
| 48 | ND | substitution of M771A of SEQ ID NO: 2. |
| 49 | ND | substitution of L379R, a substitution of A708K, a deletion of P at position 793 and a |
| | | substitution of D732N of SEQ ID NO: 2. |
| 50 | ND | substitution of W782Q of SEQ ID NO: 2. |
| 51 | ND | substitution of M771Q of SEQ ID NO: 2 |
| 52 | ND | substitution of R458I and a substitution of A739V of SEQ ID NO: 2. |
| 53 | ND | L379R, a substitution of A708K, a deletion of P at position 793 and a substitution of |
| | | M771N of SEQ ID NO: 2 |
| 54 | ND | substitution of L379R, a substitution of A708K, a deletion of P at position 793 and a |
| | | substitution of A739T of SEQ ID NO: 2 |
| 55 | ND | substitution of L379R, a substitution of C477K, a substitution of A708K, a deletion of |
| | | P at position 793 and a substitution of D489S of SEQ ID NO: 2. |
| 56 | ND | substitution of L379R, a substitution of C477K, a substitution of A708K, a deletion of |
| | | P at position 793 and a substitution of D732N of SEQ ID NO: 2. |
| 57 | ND | substitution of V711K of SEQ ID NO: 2. |
| 58 | ND | substitution of L379R, a substitution of C477K, a substitution of A708K, a deletion of |
| | | P at position 793 and a substitution of Y797L of SEQ ID NO: 2. |
| 60 | ND | substitution of L379R, a substitution of C477K, a substitution of A708K, a deletion of |
| | | P at position 793 and a substitution of M771N of SEQ ID NO: 2. |
| 61 | ND | substitution of A708K, a deletion of P at position 793 and a substitution of E386S of |
| | | SEQ ID NO: 2. |
| 62 | ND | substitution of L379R, a substitution of C477K, a substitution of A708K and a |
| | | deletion of P at position 793 of SEQ ID NO: 2. |
| 63 | ND | substitution of L792D of SEQ ID NO: 2. |
| 64 | ND | substitution of G791F of SEQ ID NO: 2. |
| 65 | ND | substitution of A708K, a deletion of P at position 793 and a substitution of A739V of |
| | | SEQ ID NO: 2. |
| 66 | ND | substitution of L379R, a substitution of A708K, a deletion of P at position 793 and a |
| | | substitution of A739V of SEQ ID NO: 2. |
| 67 | ND | substitution of C477K, a substitution of A708K and a deletion of P at position 793 of |
| | | SEQ ID NO: 2. |
| 68 | ND | substitution of L2491 and a substitution of M771N of SEQ ID NO: 2. |
| 69 | ND | substitution of V747K of SEQ ID NO: 2. |
| 70 | ND | substitution of L379R, a substitution of C477K, a substitution of A708K, a deletion of |
| | | P at position 793 and a substitution of M779N of SEQ ID NO: 2. |
| 71 | ND | L379R, F755M |
| 59 | 119 | ND |
| 72 | 429 | ND |
| 73 | 430 | ND |
| 74 | 431 | ND |
| 75 | 432 | ND |
| 76 | 433 | ND |
| 77 | 434 | ND |
| 78 | 435 | ND |
| 79 | 436 | ND |
| 80 | 437 | ND |
| 81 | 438 | ND |
| 82 | 439 | ND |
| 83 | 440 | ND |
| 84 | 441 | ND |
| 85 | 442 | ND |
| 86 | 443 | ND |
| 87 | 444 | ND |
| 88 | 445 | ND |
| 89 | 446 | ND |
| 90 | 447 | ND |
| 91 | 448 | ND |
| 92 | 449 | ND |
| 93 | 450 | ND |
| 94 | 451 | ND |
| 95 | 452 | ND |
| 96 | 453 | ND |
| 97 | 454 | ND |
| 98 | 455 | ND |
| 99 | 456 | ND |
| 101 | 457 | ND |
| 102 | 458 | ND |
| 103 | 459 | ND |
| 104 | 460 | ND |
| 105 | 278 | ND |
| 106 | 279 | ND |
| 107 | 280 | ND |
| 108 | 285 | ND |
| 109 | 286 | ND |
| 110 | 287 | ND |
| 111 | 288 | ND |
| 112 | 290 | ND |
| 113 | 291 | ND |
| 114 | 293 | ND |
| 115 | 300 | ND |
| 116 | 492 | ND |
| 117 | 493 | ND |
| 118 | 387 | ND |
| 119 | 395 | ND |
| 120 | 485 | ND |
| 121 | 486 | ND |
| 122 | 487 | ND |
| 123 | 488 | ND |
| 124 | 489 | ND |
| 125 | 490 | ND |
| 126 | 491 | ND |
| 127 | 494 | ND |
| 128 | 328 | ND |
| 129 | 388 | ND |
| 130 | 389 | ND |
| 131 | 390 | ND |
| 132 | 514 | ND |
| 133 | 515 | ND |
| 134 | 516 | ND |
| 135 | 517 | ND |
| 136 | 518 | ND |
| 137 | 519 | ND |
| 138 | 520 | ND |
| 139 | 522 | ND |
| 140 | 523 | ND |
| 141 | 524 | ND |
| 142 | 525 | ND |
| 143 | 526 | ND |
| 144 | 527 | ND |
| 145 | 528 | ND |
| 146 | 529 | ND |
| 147 | 530 | ND |
| 148 | 531 | ND |
| 26908 | 532 | ND |
| 26909 | 533 | ND |
| 26910 | 534 | ND |
| 26911 | 535 | ND |
| 26912 | 536 | ND |
| 26913 | 537 | ND |
| 26914 | 538 | ND |
| 26915 | 539 | ND |
| 26916 | 540 | ND |
| 26917 | 541 | ND |
| 26918 | 542 | ND |
| 26919 | 543 | ND |
| 26920 | 544 | ND |
| 26921 | 545 | ND |
| 26922 | 546 | ND |
| 26923 | 547 | ND |
| 26924 | 548 | ND |
| 26925 | 550 | ND |
| 26926 | 551 | ND |
| 26927 | 552 | ND |
| 26928 | 553 | ND |
| 26929 | 554 | ND |
| 26930 | 555 | ND |
| 26931 | 556 | ND |
| 26932 | 557 | ND |
| 26933 | 558 | ND |
| 26934 | 559 | ND |
| 26935 | 560 | ND |
| 26936 | 561 | ND |
| 26937 | 562 | ND |
| 26938 | 563 | ND |
| 26939 | 564 | ND |
| 26940 | 565 | ND |
| 26941 | 566 | ND |
| 26942 | 567 | ND |
| 26943 | 568 | ND |
| 26944 | 569 | ND |
| 26945 | 570 | ND |
| 26946 | 571 | ND |
| 26947 | 572 | ND |
| 26948 | 573 | ND |
| 26949 | 574 | ND |
| 26950 | 575 | ND |
| 26951 | 576 | ND |
| 26952 | 577 | ND |
| 26953 | 578 | ND |
| 26954 | 579 | ND |
| 26955 | 580 | ND |
| 26956 | 581 | ND |
| 26957 | 582 | ND |
| 26958 | 583 | ND |
| 26959 | 584 | ND |
| 26960 | 585 | ND |
| 26961 | 586 | ND |
| 26962 | 587 | ND |
| 26963 | 588 | ND |
| 26964 | 589 | ND |
| 26965 | 590 | ND |
| 26966 | 591 | ND |
| 26967 | 592 | ND |
| 26968 | 593 | ND |
| 26969 | 594 | ND |
| 26970 | 595 | ND |
| 26971 | 596 | ND |
| 26972 | 597 | ND |
| 26973 | 598 | ND |
| 26974 | 599 | ND |
| 26975 | 600 | ND |
| 26976 | 601 | ND |
| 26977 | 602 | ND |
| 26978 | 603 | ND |
| 26979 | 604 | ND |
| 26980 | 605 | ND |
| 26981 | 606 | ND |
| 26982 | 607 | ND |
| 26983 | 608 | ND |
| 26984 | 609 | ND |
| 26985 | 610 | ND |
| 26986 | 611 | ND |
| 26987 | 612 | ND |
| 26988 | 613 | ND |
| 26989 | 614 | ND |
| 26990 | 615 | ND |
| 26991 | 616 | ND |
| 26992 | 617 | ND |
| 26993 | 618 | ND |
| 26994 | 619 | ND |
| 26995 | 620 | ND |
| 26996 | 621 | ND |
| 26997 | 622 | ND |
| 26998 | 623 | ND |
| 26999 | 624 | ND |
| 27000 | 625 | ND |
| 27001 | 626 | ND |
| 27002 | 627 | ND |
| 27003 | 628 | ND |
| 27004 | 629 | ND |
| 27005 | 630 | ND |
| 27006 | 631 | ND |
| 27007 | 632 | ND |
| 27008 | 633 | ND |
| 27009 | 634 | ND |
| 27010 | 635 | ND |
| 27011 | 636 | ND |
| 27012 | 637 | ND |
| 27013 | 638 | ND |
| 27014 | 639 | ND |
| 27015 | 640 | ND |
| 27016 | 641 | ND |
| 27017 | 642 | ND |
| 27018 | 643 | ND |
| 27019 | 644 | ND |
| 27020 | 645 | ND |
| 27021 | 646 | ND |
| 27022 | 647 | ND |
| 27023 | 648 | ND |
| 27024 | 649 | ND |
| 27025 | 650 | ND |
| 27026 | 651 | ND |
| 27027 | 652 | ND |
| 27028 | 653 | ND |
| 27029 | 654 | ND |
| 27030 | 655 | ND |
| 27031 | 656 | ND |
| 27032 | 657 | ND |
| 27033 | 658 | ND |
| 27034 | 659 | ND |
| 27035 | 660 | ND |
| 27036 | 661 | ND |
| 27037 | 662 | ND |
| 27038 | 663 | ND |
| 27039 | 664 | ND |
| 27040 | 665 | ND |
| 27041 | 666 | ND |
| 27042 | 667 | ND |
| 27043 | 668 | ND |
| 27044 | 669 | ND |
| 27154 | 670 | ND |
| 27045 | 671 | ND |
| 27046 | 672 | ND |
| 27047 | 673 | ND |
| 27048 | 674 | ND |
| 27049 | 675 | ND |
| 27050 | 676 | ND |
| 27051 | 677 | ND |
| 27052 | 678 | ND |
| 27053 | 679 | ND |
| 27054 | 680 | ND |
| 27055 | 681 | ND |
| 27056 | 682 | ND |
| 27057 | 683 | ND |
| 27058 | 684 | ND |
| 27059 | 685 | ND |
| 27060 | 686 | ND |
| 27061 | 687 | ND |
| 27062 | 688 | ND |
| 27063 | 689 | ND |
| 27064 | 690 | ND |
| 27065 | 691 | ND |
| 27066 | 692 | ND |
| 27067 | 693 | ND |
| 27068 | 694 | ND |
| 27069 | 701 | ND |
| 27070 | 702 | ND |
| 27071 | 703 | ND |
| 27072 | 704 | ND |
| 27073 | 705 | ND |
| 27074 | 706 | ND |
| 27075 | 707 | ND |
| 27076 | 708 | ND |
| 27077 | 709 | ND |
| 27078 | 710 | ND |
| 27079 | 711 | ND |
| 27080 | 712 | ND |
| 27081 | 713 | ND |
| 27082 | 714 | ND |
| 27083 | 715 | ND |
| 27084 | 716 | ND |
| 27085 | 717 | ND |
| 27086 | 718 | ND |
| 27087 | 719 | ND |
| 27088 | 720 | ND |
| 27089 | 721 | ND |
| 27090 | 722 | ND |
| 27091 | 723 | ND |
| 27092 | 724 | ND |
| 27093 | 725 | ND |
| 27094 | 726 | ND |
| 27095 | 727 | ND |
| 27096 | 728 | ND |
| 27097 | 729 | ND |
| 27098 | 730 | ND |
| 27099 | 731 | ND |
| 27100 | 732 | ND |
| 27101 | 733 | ND |
| 27102 | 734 | ND |
| 27103 | 735 | ND |
| 27104 | 736 | ND |
| 27105 | 737 | ND |
| 27106 | 738 | ND |
| 27107 | 739 | ND |
| 27108 | 740 | ND |
| 27109 | 741 | ND |
| 27110 | 742 | ND |
| 27111 | 743 | ND |
| 27112 | 744 | ND |
| 27113 | 745 | ND |
| 27114 | 746 | ND |
| 27115 | 747 | ND |
| 27116 | 748 | ND |
| 27117 | 749 | ND |
| 27118 | 750 | ND |
| 27119 | 751 | ND |
| 27120 | 752 | ND |
| 27121 | 753 | ND |
| 27122 | 754 | ND |
| 27123 | 755 | ND |
| 27124 | 756 | ND |
| 27125 | 757 | ND |
| 27126 | 758 | ND |
| 27127 | 759 | ND |
| 27128 | 760 | ND |
| 27129 | 761 | ND |
| 27130 | 762 | ND |
| 27131 | 763 | ND |
| 27132 | 764 | ND |
| 27133 | 765 | ND |
| 27134 | 766 | ND |
| 27135 | 767 | ND |
| 27136 | 768 | ND |
| 27137 | 769 | ND |
| 27138 | 770 | ND |
| 27139 | 777 | ND |
| 27140 | 778 | ND |
| 27141 | 779 | ND |
| 27142 | 780 | ND |
| 27143 | 781 | ND |
| 27144 | 782 | ND |
| 27145 | 783 | ND |
| 27146 | 784 | ND |
| 27147 | 785 | ND |
| 27148 | 786 | ND |
| 27149 | 787 | ND |
| 27150 | 788 | ND |
| 27151 | 789 | ND |
| 27152 | 790 | ND |
| 27153 | 791 | ND |

[0174] c. CasX Variant Proteins with Domains from Multiple Source Proteins

[0175] In certain embodiments, the disclosure provides a chimeric CasX protein comprising protein domains from two or more different CasX proteins, such as two or more naturally occurring CasX proteins, or two or more CasX variant protein sequences as described herein.

[0176] As used herein, a “chimeric CasX protein” refers to a CasX containing at least two domains isolated or derived from different sources, such as two naturally occurring proteins, which may, in some embodiments, be isolated from different species. For example, in some embodiments, a chimeric CasX protein comprises a first domain from a first CasX protein and a second domain from a second, different CasX protein. In some embodiments, the first domain can be selected from the group consisting of the NTSB, TSL, helical I, helical II, OBD and RuvC domains. In some embodiments, the second domain is selected from the group consisting of the NTSB, TSL, helical I, helical II, OBD and RuvC domains with the second domain being different from the foregoing first domain. In the case of split or non-contiguous domains such as helical I, RuvC and OBD, a portion of the non-contiguous domain can be replaced with the corresponding portion from any other source. For example, the helical I-I domain (sometimes referred to as helical I-a) in SEQ ID NO: 2 can be replaced with the corresponding helical I-I sequence from SEQ ID NO: 1, and the like. Domain sequences from reference CasX proteins, and their coordinates, are shown in Table 5. Representative examples of chimeric CasX proteins include the variants of CasX 472-483, 485-491 and 515, the sequences of which are set forth in Table 4.

TABLE 5
Domain coordinates in Reference CasX proteins

| | Coordinates in | Coordinates in |
|---|---|---|
| Domain Name | SEQ ID NO: 1 | SEQ ID NO: 2 |
| OBD a | 1-55 | 1-57 |
| helical I a | 56-99 | 58-101 |
| NTSB | 100-190 | 102-191 |
| helical I b | 191-331 | 192-332 |
| helical II | 332-508 | 333-500 |
| OBD b | 509-659 | 501-646 |
| RuvC a | 660-823 | 647-810 |
| TSL | 824-933 | 811-920 |
| RuvC b | 934-986 | 921-978 |

*OBD a and b, helical I a and b, and RuvC a and b are also referred to herein as OBD I and II, helical I-I and I-II, and RuvC I and II.

[0177] d. Protein Affinity for the gRNA

[0178] In some embodiments, a CasX variant protein has improved affinity for the gRNA relative to a reference CasX protein, leading to the formation of the ribonucleoprotein complex (RNP). Increased affinity of the CasX variant protein for the gRNA may, for example, result in a lower K_{d} for the generation of a RNP complex, which can, in some cases, result in a more stable ribonucleoprotein complex formation. In some embodiments, increased affinity of the CasX variant protein for the gRNA results in increased stability of the ribonucleoprotein complex when delivered to human cells. This increased stability can affect the function and utility of the complex in the cells of a subject, as well as result in improved pharmacokinetic properties in blood, when delivered to a subject. In some embodiments, increased affinity of the CasX variant protein, and the resulting increased stability of the ribonucleoprotein complex, allows for a lower dose of the CasX variant protein to be delivered to the subject or cells while still having the desired activity, for example in vivo or in vitro gene editing. In some embodiments, a higher affinity (tighter binding) of a CasX variant protein to a gRNA allows for a greater amount of editing events when both the CasX variant protein and the gRNA remain in an RNP complex. Increased editing events can be assessed using editing assays such as the tdTom editing assays described herein. In some embodiments, the K_{d} of a CasX variant protein for a gRNA is increased relative to a reference CasX protein by a factor of at least about 1.1, at least about 1.2, at least about 1.3, at least about 1.4, at least about 1.5, at least about 1.6, at least about 1.7, at least about 1.8, at least about 1.9, at least about 2, at least about 3, at least about 4, at least about 5, at least about 6, at least about 7, at least about 8, at least about 9, at least about 10, at least about 15, at least about 20, at least about 25, at least about 30, at least about 35, at least about 40, at least about 45, at least about 50, at least about 60, at least about 70, at least about 80, at least about 90, or at least about 100. In some embodiments, the CasX variant has about 1.1 to about 10-fold increased binding affinity to the gRNA compared to the reference CasX protein of SEQ ID NO: 2.

[0179] In some embodiments, increased affinity of the CasX variant protein for the gRNA results in increased stability of the ribonucleoprotein complex when delivered to mammalian cells, including in vivo delivery to a subject. This increased stability can affect the function and utility of the complex in the cells of a subject, as well as result in improved pharmacokinetic properties in blood, when delivered to a subject. In some embodiments, increased affinity of the CasX variant protein, and the resulting increased stability of the ribonucleoprotein complex, allows for a lower dose of the CasX variant protein to be delivered to the subject or cells while still having the desired activity; for example in vivo or in vitro gene editing. The increased ability to form RNP and keep them in stable form can be assessed using assays such as the in vitro cleavage assays described in the Examples herein. In some embodiments, RNP comprising the CasX variants of the disclosure are able to achieve a k_{cleave} rate when complexed as an RNP that is at last 2-fold, at least 5-fold, or at least 10-fold higher compared to RNP comprising a reference CasX of SEQ ID NOS: 1-3.

[0180] In some embodiments, a higher affinity (tighter binding) of a CasX variant protein to a gRNA allows for a greater amount of editing events when both the CasX variant protein and the gRNA remain in an RNP complex. Increased editing events can be assessed using editing assays such as the assays described herein.

[0181] Without wishing to be bound by theory, in some embodiments amino acid changes in the Helical I domain can increase the binding affinity of the CasX variant protein with the gRNA targeting sequence, while changes in the Helical II domain can increase the binding affinity of the CasX variant protein with the gRNA scaffold stem loop, and changes in the oligonucleotide binding domain (OBD) increase the binding affinity of the CasX variant protein with the gRNA triplex.

[0182] Methods of measuring CasX protein binding affinity for a gRNA include in vitro methods using purified CasX protein and gRNA. The binding affinity for reference CasX and variant proteins can be measured by fluorescence polarization if the gRNA or CasX protein is tagged with a fluorophore. Alternatively, or in addition, binding affinity can be measured by biolayer interferometry, electrophoretic mobility shift assays (EMSAs), or filter binding. Additional standard techniques to quantify absolute affinities of RNA binding proteins such as the reference CasX and variant proteins of the disclosure for specific gRNAs such as reference gRNAs and variants thereof include, but are not limited to, isothermal calorimetry (ITC), and surface plasmon resonance (SPR), as well as the methods of the Examples.

[0183] e. Affinity for Target Nucleic Acid

[0184] In some embodiments, a CasX variant protein has improved binding affinity for a target nucleic acid sequence relative to the affinity of a reference CasX protein for a target nucleic acid sequence. In some embodiments, affinity of a CasX variant protein of the disclosure for a target nucleic acid molecule is increased relative to a reference CasX protein by a factor of at least about 1.1, at least about 1.2, at least about 1.3, at least about 1.4, at least about 1.5, at least about 1.6, at least about 1.7, at least about 1.8, at least about 1.9, at least about 2, at least about 3, at least about 4, at least about 5, at least about 6, at least about 7, at least about 8, at least about 9, at least about 10, at least about 15, at least about 20, at least about 25, at least about 30, at least about 35, at least about 40, at least about 45, at least about 50, at least about 60, at least about 70, at least about 80, at least about 90, or at least about 100.

[0185] CasX variants with higher affinity for their target nucleic acid may, in some embodiments, cleave the target nucleic acid sequence more rapidly than a reference CasX protein that does not have increased affinity for the target nucleic acid. In some embodiments, the improved affinity for the target nucleic acid sequence comprises improved affinity for the target nucleic acid sequence, improved binding affinity to a wider spectrum of PAM sequences, an improved ability to search DNA for the target nucleic acid sequence, or any combinations thereof, resulting in an increased ability to modify the target nucleic acid. In some embodiments, a CasX variant protein with improved target nucleic acid affinity has increased affinity for specific PAM sequences other than the canonical TTC PAM recognized by the reference CasX protein of SEQ ID NO: 2, including binding affinity for PAM sequences selected from the group consisting of TTC, ATC, GTC, and CTC. A higher overall affinity for DNA also, in some embodiments, can increase the frequency at which a CasX protein can effectively start and finish a binding and unwinding step, thereby facilitating target strand invasion and R-loop formation, and ultimately the cleavage of a target nucleic acid sequence.

[0186] In some embodiments, a CasX variant protein has improved binding affinity for the non-target strand of the target nucleic acid. As used herein, the term “non-target strand” refers to the strand of the DNA target nucleic acid sequence that does not form Watson and Crick base pairs with the targeting sequence in the gRNA and is complementary to the target DNA strand. In some embodiments, the CasX variant protein has about 1.1 to about 100-fold increased binding affinity to the non-target stand of the target nucleic acid compared to the reference protein of SEQ ID NO: 1, SEQ ID NO: 2, or SEQ ID NO: 3.

[0187] Methods of measuring CasX variant protein affinity for a target nucleic acid molecule may include electrophoretic mobility shift assays (EMSAs), filter binding, isothermal calorimetry (ITC), and surface plasmon resonance (SPR), fluorescence polarization and biolayer interferometry (BLI). Further methods of measuring CasX protein affinity for a target include in vitro biochemical assays that measure DNA cleavage events over time; e.g., determination of the k_{cleave} rate, as described in the Examples.

[0188] f Improved Specificity for a Target Site

[0189] In some embodiments, a CasX variant protein has improved specificity for a target nucleic acid sequence relative to a reference CasX protein. As used herein, “specificity,” interchangeably referred to as “target specificity,” refers to the degree to which a CRISPR/Cas system ribonucleoprotein complex cleaves off-target sequences that are similar, but not identical to the target nucleic acid sequence; e.g., a CasX variant RNP with a higher degree of specificity would exhibit reduced off-target cleavage of sequences relative to a reference CasX protein. The specificity, and the reduction of potentially deleterious off-target effects, of CRISPR/Cas system proteins can be vitally important in order to achieve an acceptable therapeutic index for use in mammalian subjects.

[0190] In some embodiments, a CasX variant protein has improved specificity for a target site within the target sequence that is complementary to the targeting sequence of the gRNA relative to a reference CasX protein of SEQ ID NOS: 1-3. Without wishing to be bound by theory, it is possible that amino acid changes in the helical I and II domains that increase the specificity of the CasX variant protein for the target nucleic acid strand can increase the specificity of the CasX variant protein for the target nucleic acid overall. In some embodiments, amino acid changes that increase specificity of CasX variant proteins for target nucleic acid may also result in decreased affinity of CasX variant proteins for DNA.

[0191] Methods of testing CasX protein (such as variant or reference) target specificity may include guide and Circularization for In vitro Reporting of Cleavage Effects by Sequencing (CIRCLE-seq), or similar methods. In brief, in CIRCLE-seq techniques, genomic DNA is sheared and circularized by ligation of stem-loop adapters, which are nicked in the stem-loop regions to expose 4 nucleotide palindromic overhangs. This is followed by intramolecular ligation and degradation of remaining linear DNA. Circular DNA molecules containing a CasX cleavage site are subsequently linearized with CasX, and adapter adapters are ligated to the exposed ends followed by high-throughput sequencing to generate paired end reads that contain information about the off-target site. Additional assays that can be used to detect off-target events, and therefore CasX protein specificity include assays used to detect and quantify indels (insertions and deletions) formed at those selected off-target sites such as mismatch-detection nuclease assays and next generation sequencing (NGS). Exemplary mismatch-detection assays include nuclease assays, in which genomic DNA from cells treated with CasX and sgRNA is PCR amplified, denatured and rehybridized to form hetero-duplex DNA, containing one wild-type strand and one strand with an indel. Mismatches are recognized and cleaved by mismatch detection nucleases, such as Surveyor nuclease or T7 endonuclease I.

[0192] g. Protospacer and PAM Sequences

[0193] Herein, the protospacer is defined as the DNA sequence complementary to the targeting sequence of the guide RNA and the DNA complementary to that sequence, referred to as the target strand and non-target strand, respectively. As used herein, the PAM is a nucleotide sequence located is located 1 nucleotide 5′ of the sequence in the non-target strand that is complementary to the target nucleic acid sequence in the target strand of the target nucleic acid that, in conjunction with the targeting sequence of the gRNA, helps the orientation and positioning of the CasX for the potential cleavage of the protospacer strand(s). PAM sequences may be degenerate, and specific RNP constructs may have different preferred and tolerated PAM sequences that support different efficiencies of cleavage. Following convention, unless stated otherwise, the disclosure refers to both the PAM and the protospacer sequence and their directionality according to the orientation of the non-target strand. This does not imply that the PAM sequence of the non-target strand, rather than the target strand, is determinative of cleavage or mechanistically involved in target recognition. For example, when reference is to a TTC PAM, it may in fact be the complementary GAA sequence that is required for target cleavage, or it may be some combination of nucleotides from both strands. In the case of the CasX proteins disclosed herein, the PAM is located 5′ of the protospacer with a single nucleotide separating the PAM from the first nucleotide of the protospacer. Thus, in the case of reference CasX, a TTC PAM should be understood to mean a sequence following the formula 5′- . . . NNTTCN(protospacer)NNNNNN . . . 3′ where ‘N’ is any DNA nucleotide and ‘(protospacer)’ is a DNA sequence having identity with the targeting sequence of the guide RNA. In the case of a CasX variant with expanded PAM recognition, a TTC, CTC, GTC, or ATC PAM should be understood to mean a sequence following the formulae:

5′- . . . NNTTCN(protospacer)NNNNNN . . . 3′;
5′- . . . NNCTCN(protospacer)NNNNNN . . . 3′;
5′- . . . NNGTCN(protospacer)NNNNNN . . . 3′;
or
5′- . . . NNATCN(protospacer)NNNNNN . . . 3′.

[0194] Alternatively, a TC PAM should be understood to mean a sequence following the formula: 5′- . . . NNNTCN(protospacer)NNNNNN . . . 3′ Additionally, the CasX variant proteins of the disclosure have an enhanced ability to efficiently edit and/or bind target DNA, when complexed with a gRNA as an RNP, utilizing a PAM TC motif, including PAM sequences selected from TTC, ATC, GTC, or CTC, (in a 5′ to 3′ orientation), compared to an RNP of a reference CasX protein and reference gRNA. In the foregoing, the PAM sequence is located at least 1 nucleotide 5′ to the non-target strand of the protospacer having identity with the targeting sequence of the gRNA in an assay system compared to the editing efficiency and/or binding of an RNP comprising a reference CasX protein and reference gRNA in a comparable assay system. In one embodiment, an RNP of a CasX variant and gRNA variant exhibits greater editing efficiency and/or binding of a target sequence in the target DNA compared to an RNP comprising a reference CasX protein and a reference gRNA in a comparable assay system, wherein the PAM sequence of the target DNA is TTC. In another embodiment, an RNP of a CasX variant and gRNA variant exhibits greater editing efficiency and/or binding of a target sequence in the target DNA compared to an RNP comprising a reference CasX protein and a reference gRNA in a comparable assay system, wherein the PAM sequence of the target DNA is ATC. In another embodiment, an RNP of a CasX variant and gRNA variant exhibits greater editing efficiency and/or binding of a target sequence in the target DNA compared to an RNP comprising a reference CasX protein and a reference gRNA in a comparable assay system, wherein the PAM sequence of the target DNA is CTC. In another embodiment, an RNP of a CasX variant and gRNA variant exhibits greater editing efficiency and/or binding of a target sequence in the target DNA compared to an RNP comprising a reference CasX protein and a reference gRNA in a comparable assay system, wherein the PAM sequence of the target DNA is GTC. In the foregoing embodiments, the increased editing efficiency and/or binding affinity for the one or more PAM sequences is at least 1.5-fold greater or more compared to the editing efficiency and/or binding affinity of an RNP of any one of the CasX proteins of SEQ ID NOS:1-3 and the gRNA of Table 2 for the PAM sequences. Exemplary assays demonstrating the improved editing are described herein, in the Examples.

[0195] h. Unwinding of DNA

[0196] In some embodiments, a CasX variant protein has improved ability of unwinding DNA relative to a reference CasX protein. Poor dsDNA unwinding has been shown previously to impair or prevent the ability of CRISPR/Cas system proteins AnaCas9 or Cas14s to cleave DNA. Therefore, without wishing to be bound by any theory, it is likely that increased DNA cleavage activity by some CasX variant proteins of the disclosure is due, at least in part, to an increased ability to find and unwind the dsDNA at a target site.

[0197] Without wishing to be bound by theory, it is thought that amino acid changes in the NTSB domain may produce CasX variant proteins with increased DNA unwinding characteristics. Alternatively, or in addition, amino acid changes in the OBD or the helical domain regions that interact with the PAM may also produce CasX variant proteins with increased DNA unwinding characteristics.

[0198] Methods of measuring the ability of CasX proteins (such as variant or reference) to unwind DNA include, but are not limited to, in vitro assays that observe increased on rates of dsDNA targets in fluorescence polarization or biolayer interferometry.

[0199] i. Catalytic Activity

[0200] The ribonucleoprotein complex of the CasX:gRNA systems disclosed herein comprise a CasX variant that bind to a target nucleic acid sequence and cleaves the target nucleic acid sequence. In some embodiments, a CasX variant protein has improved catalytic activity relative to a reference CasX protein. Without wishing to be bound by theory, it is thought that in some cases cleavage of the target strand can be a limiting factor for Cas12-like molecules in creating a dsDNA break. In some embodiments, CasX variant proteins improve bending of the target strand of DNA and cleavage of this strand, resulting in an improvement in the overall efficiency of dsDNA cleavage by the CasX ribonucleoprotein complex.

[0201] In some embodiments, a CasX variant protein has increased nuclease activity compared to a reference CasX protein. Variants with increased nuclease activity can be generated, for example, through amino acid changes in the RuvC nuclease domain. In some embodiments, the CasX variant comprises a RuvC nuclease domain having nickase activity. In the foregoing, the CasX nickase of a CasX:gRNA system generates a single-stranded break within 10-18 nucleotides 3′ of a PAM site in the non-target strand. In other embodiments, the CasX variant comprises a RuvC nuclease domain having double-stranded cleavage activity. In the foregoing, the CasX of the CasX:gRNA system generates a double-stranded break within 18-26 nucleotides 5′ of a PAM site on the target strand and 10-18 nucleotides 3′ on the non-target strand. Nuclease activity can be assayed by a variety of methods, including those of the Examples. In some embodiments, a CasX variant has a k_{cleave} constant that is at least 2-fold, or at least 3-fold, or at least 4-fold, or at least 5-fold, or at least 6-fold, or at least 7-fold, or at least 8-fold, or at least 9-fold, or at least 10-fold greater compared to a reference CasX.

[0202] In some embodiments, a CasX variant protein has the improved characteristic of forming RNP with gRNA that result in a higher percentage of cleavage-competent RNP compared to an RNP of a reference CasX protein of SEQ ID NO: 1, SEQ ID NO: 2, or SEQ ID NO: 3 and the gRNA, as described in the Examples. By cleavage competent, it is meant that the RNP that is formed has the ability to cleave the target nucleic acid. In some embodiments, the RNP of the CasX variant and the gRNA exhibit at least a 2-fold, or at least a 3-fold, or at least a 4-fold, or at least a 5-fold, or at least a 10-fold cleavage rate compared to an RNP of a reference CasX protein of SEQ ID NO: 1, SEQ ID NO: 2, or SEQ ID NO: 3 and the gRNA of Table 2. In the foregoing embodiment, the improved competency rate can be demonstrated in an in vitro assay, such as described in the Examples.

[0203] In some embodiments, a CasX variant protein has increased target strand loading for double strand cleavage compared to a reference CasX. Variants with increased target strand loading activity can be generated, for example, through amino acid changes in the TLS domain. Without wishing to be bound by theory, amino acid changes in the TSL domain may result in CasX variant proteins with improved catalytic activity. Alternatively, or in addition, amino acid changes around the binding channel for the RNA:DNA duplex may also improve catalytic activity of the CasX variant protein. In some embodiments, a CasX variant protein has increased collateral cleavage activity compared to a reference CasX protein. As used herein, “collateral cleavage activity” refers to additional, non-targeted cleavage of nucleic acids following recognition and cleavage of a target nucleic acid sequence. In some embodiments, a CasX variant protein has decreased collateral cleavage activity compared to a reference CasX protein.

[0204] In some embodiments, for example those embodiments encompassing applications where cleavage of the target nucleic acid sequence is not a desired outcome, improving the catalytic activity of a CasX variant protein comprises altering, reducing, or abolishing the catalytic activity of the CasX variant protein. In some embodiments, a ribonucleoprotein complex comprising a dCasX variant protein binds to a target nucleic acid sequence and does not cleave the target nucleic acid.

[0205] In some embodiments, the CasX ribonucleoprotein complex comprising a CasX variant protein binds a target DNA but generates a single stranded nick in the target DNA. In some embodiments, particularly those embodiments wherein the CasX protein is a nickase, a CasX variant protein has decreased target strand loading for single strand nicking. Variants with decreased target strand loading may be generated, for example, through amino acid changes in the TSL domain.

[0206] Exemplary methods for characterizing the catalytic activity of CasX proteins may include, but are not limited to, in vitro cleavage assays, including those of the Examples, below. In some embodiments, electrophoresis of DNA products on agarose gels can interrogate the kinetics of strand cleavage.

[0207] j. CasX Fusion Proteins

[0208] In some embodiments, the disclosure provides CasX proteins comprising a heterologous protein fused to the CasX. In some cases, the CasX is a reference CasX protein. In other cases, the CasX is a CasX variant of any of the embodiments described herein.

[0209] In some embodiments, the CasX variant protein comprises any one of SEQ ID NOS: 59, 72-99, 101-148, and 26908-27154 of the sequences of Table 4 fused to one or more proteins or domains thereof that has a different activity of interest, resulting in a fusion protein. In some embodiments, the CasX variant protein comprises any one of SEQ ID NOS: 36-99, 101-148, 26908-27154 fused to one or more proteins or domains thereof. In some embodiments, the CasX variant protein comprises any one of SEQ ID NOS: 132-148, 26908-2715 fused to one or more proteins or domains thereof. For example, in some embodiments, the CasX variant protein is fused to a protein (or domain thereof) that inhibits transcription, modifies a target nucleic acid sequence, or modifies a polypeptide associated with a nucleic acid (e.g., histone modification).

[0210] In some embodiments, a heterologous polypeptide (or heterologous amino acid such as a cysteine residue or a non-natural amino acid) can be inserted at one or more positions within a CasX protein to generate a CasX fusion protein. In other embodiments, a cysteine residue can be inserted at one or more positions within a CasX protein followed by conjugation of a heterologous polypeptide described below. In some alternative embodiments, a heterologous polypeptide or heterologous amino acid can be added at the N- or C-terminus of the CasX variant protein. In other embodiments, a heterologous polypeptide or heterologous amino acid can be inserted internally within the sequence of the CasX protein.

[0211] In some embodiments, the CasX variant fusion protein retains RNA-guided sequence specific target nucleic acid binding and cleavage activity. In some cases, the CasX variant fusion protein has (retains) 50% or more of the activity (e.g., cleavage and/or binding activity) of the corresponding CasX variant protein that does not have the insertion of the heterologous protein. In some cases, the CasX variant fusion protein retains at least about 60%, or at least about 70% or more, at least about 80%, or at least about 90%, or at least about 92%, or at least about 95%, or at least about 98%, or at least about 100% of the activity (e.g., cleavage and/or binding activity) of the corresponding CasX protein that does not have the insertion of the heterologous protein.

[0212] In some cases, the CasX variant fusion protein retains (has) target nucleic acid binding activity relative to the activity of the CasX protein without the inserted heterologous amino acid or heterologous polypeptide. In some cases, the CasX variant fusion protein retains at least about 60%, or at least about 70% or more, at least about 80%, or at least about 90%, or at least about 92%, or at least about 95%, or at least about 98%, or at least about 100% of the binding activity of the corresponding CasX protein that does not have the insertion of the heterologous protein.

[0213] In some cases, the CasX variant fusion protein retains (has) target nucleic acid binding and/or cleavage activity relative to the activity of the parent CasX protein without the inserted heterologous amino acid or heterologous polypeptide. For example, in some cases, the CasX variant fusion protein has (retains) 50% or more of the binding and/or cleavage activity of the corresponding parent CasX protein (the CasX protein that does not have the insertion). For example, in some cases, the CasX variant fusion protein has (retains) 60% or more (70% or more, 80% or more, 90% or more, 92% or more, 95% or more, 98% or more, or 100%) of the binding and/or cleavage activity of the corresponding CasX parent protein (the CasX protein that does not have the insertion). Methods of measuring cleaving and/or binding activity of a CasX protein and/or a CasX fusion protein will be known to one of ordinary skill in the art and any convenient method can be used.

[0214] A variety of heterologous polypeptides are suitable for inclusion in a reference CasX or CasX variant fusion protein of the disclosure. In some cases, the fusion partner can modulate transcription (e.g., inhibit transcription, increase transcription) of a target DNA. For example, in some cases the fusion partner is a protein (or a domain from a protein) that inhibits transcription (e.g., a transcriptional repressor, a protein that functions via recruitment of transcription inhibitor proteins, modification of target DNA such as methylation, recruitment of a DNA modifier, modulation of histones associated with target DNA, recruitment of a histone modifier such as those that modify acetylation and/or methylation of histones, and the like).

[0215] In some cases the fusion partner is a protein (or a domain from a protein) that increases transcription (e.g., a transcription activator, a protein that acts via recruitment of transcription activator proteins, modification of target DNA such as demethylation, recruitment of a DNA modifier, modulation of histones associated with target DNA, recruitment of a histone modifier such as those that modify acetylation and/or methylation of histones, and the like).In some cases, a fusion partner has enzymatic activity that modifies a target nucleic acid sequence; e.g., nuclease activity, methyltransferase activity, demethylase activity, DNA repair activity, DNA damage activity, deamination activity, dismutase activity, alkylation activity, depurination activity, oxidation activity, pyrimidine dimer forming activity, integrase activity, transposase activity, recombinase activity, polymerase activity, ligase activity, helicase activity, photolyase activity or glycosylase activity. In some embodiments, a CasX variant comprises any one of SEQ ID NOS: 36-99, 101-148, or 26908-27154, or any one of SEQ ID NOS: 59, 72-99, 101-148, or 26908-27154, or any one of SEQ ID NOS 132-148, or 26908-27154, and a polypeptide with methyltransferase activity, demethylase activity, acetyltransferase activity, deacetylase activity, kinase activity, phosphatase activity, ubiquitin ligase activity, deubiquitinating activity, adenylation activity, deadenylation activity, SUMOylating activity, deSUMOylating activity, ribosylation activity, deribosylation activity, myristoylation activity or demyristoylation activity.

[0216] In some embodiments, a CasX variant comprises any one of SEQ ID NOS: 36-99, 101-148, and 26908-27154, or any one of SEQ ID NOS: 59, 72-99, 101-148, or 26908-27154, or any one of SEQ ID NOS 132-148, or 26908-27154, and a fusion partner having enzymatic activity that modifies a polypeptide (e.g., a histone) associated with a target nucleic acid (e.g., methyltransferase activity, demethylase activity, acetyltransferase activity, deacetylase activity, kinase activity, phosphatase activity, ubiquitin ligase activity, deubiquitinating activity, adenylation activity, deadenylation activity, SUMOylating activity, deSUMOylating activity, ribosylation activity, deribosylation activity, myristoylation activity or demyristoylation activity). Examples of proteins (or fragments thereof) that can be used as a fusion partner to increase transcription include but are not limited to: transcriptional activators such as VP16, VP64, VP48, VP160, p65 subdomain (e.g., from NFkB), and activation domain of EDLL and/or TAL activation domain (e.g., for activity in plants); histone lysine methyltransferases such as SET1A, SET1B, MLL1 to 5, ASH1, SYMD2, NSD1, and the like; histone lysine demethylases such as JHDM2a/b, UTX, JMJD3, and the like; histone acetyltransferases such as GCN5, PCAF, CBP, p300, TAF1, TIP60/PLIP, MOZ/MYST3, MORF/MYST4, SRC1, ACTR, P160, CLOCK, and the like; and DNA demethylases such as Ten-Eleven Translocation (TET) dioxygenase 1 (TET1CD), TET1, DME, DML1, DML2, ROS1, and the like.

[0217] Examples of proteins (or fragments thereof) that can be used as a fusion partner to decrease transcription include but are not limited to: transcriptional repressors such as the Kruppel associated box (KRAB or SKD); KOX1 repression domain; the Mad mSIN3 interaction domain (SID); the ERF repressor domain (ERD), the SRDX repression domain (e.g., for repression in plants), and the like; histone lysine methyltransferases such as Pr-SET⅞, SUV4-20H1, RIZ1, and the like; histone lysine demethylases such as JMJD2A/JHDM3A, JMJD2B, JMJD2C/GASC1, JMJD2D, JARID1A/RBP2, JARID1B/PLU-1, JARID 1C/SMCX, JARID1D/SMCY, and the like; histone lysine deacetylases such as HDAC1, HDAC2, HDAC3, HDAC8, HDAC4, HDAC5, HDAC7, HDAC9, SIRT1, SIRT2, HDAC11, and the like; DNA methylases such as HhaI DNA m5c-methyltransferase (M.HhaI), DNA methyltransferase 1 (DNMT1), DNA methyltransferase 3a (DNMT3a), DNA methyltransferase 3b (DNMT3b), METI, DRM3 (plants), ZMET2, CMT1, CMT2 (plants), and the like; and periphery recruitment elements such as Lamin A, Lamin B, and the like.

[0218] In some cases, the fusion partner to a CasX variant has enzymatic activity that modifies the target nucleic acid sequence (e.g., ssRNA, dsRNA, ssDNA, dsDNA). Examples of enzymatic activity that can be provided by the fusion partner include but are not limited to: nuclease activity such as that provided by a restriction enzyme (e.g., FokI nuclease), methyltransferase activity such as that provided by a methyltransferase (e.g., Hha1 DNA m5c-methyltransferase (M.Hhal), DNA methyltransferase 1 (DNMT1), DNA methyltransferase 3a (DNMT3a), DNA methyltransferase 3b (DNMT3b), METI, DRM3 (plants), ZMET2, CMT1, CMT2 (plants), and the like); demethylase activity such as that provided by a demethylase (e.g., Ten-Eleven Translocation (TET) dioxygenase 1 (TET 1 CD), TET1, DME, DML1, DML2, ROS1, and the like), DNA repair activity, DNA damage activity, deamination activity such as that provided by a deaminase (e.g., a cytosine deaminase enzyme, e.g., an APOBEC protein such as rat APOBECl), dismutase activity, alkylation activity, depurination activity, oxidation activity, pyrimidine dimer forming activity, integrase activity such as that provided by an integrase and/or resolvase (e.g., Gin invertase such as the hyperactive mutant of the Gin invertase, GinH106Y; human immunodeficiency virus type 1 integrase (IN); Tn3 resolvase; and the like), transposase activity, recombinase activity such as that provided by a recombinase (e.g., catalytic domain of Gin recombinase), polymerase activity, ligase activity, helicase activity, photolyase activity, and glycosylase activity).

[0219] In some cases, a CasX variant protein of the present disclosure is fused to a polypeptide selected from a domain for increasing transcription (e.g., a VP16 domain, a VP64 domain), a domain for decreasing transcription (e.g., a KRAB domain, e.g., from the Kox1 protein), a core catalytic domain of a histone acetyltransferase (e.g., histone acetyltransferase p300), a protein/domain that provides a detectable signal (e.g., a fluorescent protein such as GFP), a nuclease domain (e.g., a Fokl nuclease), or a base editor (e.g., cytidine deaminase such as APOBEC1).

[0220] In some embodiments, a CasX variant comprises any one of SEQ ID NOS: 36-99, 101-148, or 26908-27154, or any one of SEQ ID NOS: 59, 72-99, 101-148, or 26908-27154, or any one of SEQ ID NOS 132-148, or 26908-27154, and a fusion partner having enzymatic activity that modifies a protein associated with the target nucleic acid (e.g., ssRNA, dsRNA, ssDNA, dsDNA) (e.g., a histone, an RNA binding protein, a DNA binding protein, and the like).

[0221] Examples of enzymatic activity (that modifies a protein associated with a target nucleic acid) that can be provided by the fusion partner include but are not limited to: methyltransferase activity such as that provided by a histone methyltransferase (HMT) (e.g., suppressor of variegation β-9 homolog 1 (SUV39H1, also known as KMT1A), euchromatic histone lysine methyltransferase 2 (G9A, also known as KMT1C and EHMT2), SUV39H2, ESET/SETDB 1, and the like, SET1A, SET1B, MLL1 to 5, ASH1, SYMD2, NSD1, DOT1L, Pr-SET⅞, SUV4-20H1, EZH2, RIZ1), demethylase activity such as that provided by a histone demethylase (e.g., Lysine Demethylase 1A (KDM1A also known as LSD1), JHDM2a/b, JMJD2A/JHDM3A, JMJD2B, JMJD2C/GASC1, JMJD2D, JARID1A/RBP2, JARID1B/PLU-1, JARID1C/SMCX, JARID1D/SMCY, UTX, JMJD3, and the like), acetyltransferase activity such as that provided by a histone acetylase transferase (e.g., catalytic core/fragment of the human acetyltransferase p300, GCN5, PCAF, CBP, TAF1, TIP60/PLIP, MOZ/MYST3, MORF/MYST4, HB01/MYST2, HMOF/MYST1, SRC1, ACTR, P160, CLOCK, and the like), deacetylase activity such as that provided by a histone deacetylase (e.g., HDAC1, HDAC2, HDAC3, HDAC8, HDAC4, HDACS, HDAC7, HDAC9, SIRT1, SIRT2, HDAC11, and the like), kinase activity, phosphatase activity, ubiquitin ligase activity, deubiquitinating activity, adenylation activity, deadenylation activity, SUMOylating activity, deSUMOylating activity, ribosylation activity, deribosylation activity, myristoylation activity, and demyristoylation activity.

[0222] Additional examples of suitable fusion partners for a CasX variant are (i) a dihydrofolate reductase (DHFR) destabilization domain (e.g., to generate a chemically controllable subject RNA-guided polypeptide or a conditionally active RNA-guided polypeptide), and (ii) a chloroplast transit peptide. In some embodiments, a CasX variant comprises any one of SEQ ID NOS: 36-99, 101-148, or 26908-27154, or any one of SEQ ID NOS: 59, 72-99, 101-148, or 26908-27154, or any one of SEQ ID NOS 132-148, or 26908-27154, or a sequence of Table 4, and a chloroplast transit peptide including, but are not limited to:

(SEQ ID NO: 154)
MASMISSSAVTTVSRASRGQSAAMAPFGGLKSMTGFPVRKVNTDITSIT
SNGGRVKCMQVWPPIGKKKFETLSYLPPLTRDSRA;
(SEQ ID NO: 155)
MASMISSSAVTTVSRASRGQSAAMAPFGGLKSMTGFPVRKVNTDITSIT
SNGGRVKS;
(SEQ ID NO: 156)
MASSMLSSATMVASPAQATMVAPFNGLKSSAAFPATRKANNDITSITSN
GGRVNCMQVWPPIEKKKFETLSYLPDLTDSGGRVNC;
(SEQ ID NO: 157)
MAQVSRICNGVQNPSLISNLSKSSQRKSPLSVSLKTQQHPRAYPISSSW
GLKKSGMTLIGSELRPLKVMSSVSTAC;
(SEQ ID NO: 158)
MAQVSRICNGVWNPSLISNLSKSSQRKSPLSVSLKTQQHPRAYPISSSW
GLKKSGMTLIGSELRPLKVMSSVSTAC;
(SEQ ID NO: 159)
MAQINNMAQGIQTLNPNSNFHKPQVPKSSSFLVFGSKKLKNSANSMLVL
KKDSIFMQLFCSFRISASVATAC;
(SEQ ID NO: 160)
MAALVTSQLATSGTVLSVTDRFRRPGFQGLRPRNPADAALGMRTVGASA
APKQSRKPHRFDRRCLSMVV;
(SEQ ID NO: 161)
MAALTTSQLATSATGFGIADRSAPSSLLRHGFQGLKPRSPAGGDATSLS
VTTSARATPKQQRSVQRGSRRFPSVVVC;
(SEQ ID NO: 162)
MASSVLSSAAVATRSNVAQANMVAPFTGLKSAASFPVSRKQNLDITSIA
SNGGRVQC;
(SEQ ID NO: 163)
MESLAATSVFAPSRVAVPAARALVRAGTVVPTRRTSSTSGTSGVKCSAA
VTPQASPVISRSAAAA;
and
(SEQ ID NO: 164)
MGAAATSMQSLKFSNRLVPPSRRLSPVPNNVTCNNLPKSAAPVRTVKCC
ASSWNSTINGAAATTNGASAASS.

[0223] In some cases, a CasX variant protein of the present disclosure can include an endosomal escape peptide. In some cases, an endosomal escape polypeptide comprises the amino acid sequence GLFXALLXLLXSLWXLLLXA (SEQ ID NO: 165), wherein each X is independently selected from lysine, histidine, and arginine. In some cases, an endosomal escape polypeptide comprises the amino acid sequence GLFHALLHLLHSLWHLLLHA (SEQ ID NO: 166), or HHHHHHHHHH (SEQ ID NO: 167).

[0224] Non-limiting examples of fusion partners for use with CasX variant proteins when targeting ssRNA target nucleic acid sequences include (but are not limited to): splicing factors (e.g., RS domains); protein translation components (e.g., translation initiation, elongation, and/or release factors; e.g., eIF4G); RNA methylases; RNA editing enzymes (e.g., RNA deaminases, e.g., adenosine deaminase acting on RNA (ADAR), including A to I and/or C to U editing enzymes); helicases; RNA-binding proteins; and the like. It is understood that a heterologous polypeptide can include the entire protein or in some cases can include a fragment of the protein (e.g., a functional domain).

[0225] In some embodiments, a CasX variant comprises any one of SEQ ID NOS: 36-99, 101-148, or 26908-27154, or any one of SEQ ID NOS: 59, 72-99, 101-148, or 26908-27154, or any one of SEQ ID NOS 132-148, or 26908-27154 and a fusion partner of any domain capable of interacting with ssRNA (which, for the purposes of this disclosure, includes intramolecular and/or intermolecular secondary structures, e.g., double-stranded RNA duplexes such as hairpins, stem-loops, etc.), whether transiently or irreversibly, directly or indirectly, including but not limited to an effector domain selected from the group comprising; endonucleases (for example RNase III, the CRR22 DYW domain, Dicer, and PIN (PilT N-terminus) domains from proteins such as SMG5 and SMG6); proteins and protein domains responsible for stimulating RNA cleavage (for example CPSF, CstF, CFIm and CFIIm); exonucleases (for example XRN-1 or Exonuclease T); deadenylases (for example HNT3); proteins and protein domains responsible for nonsense mediated RNA decay (for example UPF1, UPF2, UPF3, UPF3b, RNP SI, Y14, DEK, REF2, and SRm160); proteins and protein domains responsible for stabilizing RNA (for example PABP); proteins and protein domains responsible for repressing translation (for example Ago2 and Ago4); proteins and protein domains responsible for stimulating translation (for example Staufen); proteins and protein domains responsible for (e.g., capable of) modulating translation (e.g., translation factors such as initiation factors, elongation factors, release factors, etc., e.g., eIF4G); proteins and protein domains responsible for polyadenylation of RNA (for example PAP1, GLD-2, and Star-PAP); proteins and protein domains responsible for polyuridinylation of RNA (for example CI Dl and terminal uridylate transferase); proteins and protein domains responsible for RNA localization (for example from IMPI, ZBP1, She2p, She3p, and Bicaudal-D); proteins and protein domains responsible for nuclear retention of RNA (for example Rrp6); proteins and protein domains responsible for nuclear export of RNA (for example TAP, NXF1, THO, TREX, REF, and Aly); proteins and protein domains responsible for repression of RNA splicing (for example PTB, Sam68, and hnRNP Al); proteins and protein domains responsible for stimulation of RNA splicing (for example serine/arginine-rich (SR) domains); proteins and protein domains responsible for reducing the efficiency of transcription (for example FUS (TLS)); and proteins and protein domains responsible for stimulating transcription (for example CDK7 and HIV Tat). Alternatively, the effector domain may be selected from the group comprising endonucleases; proteins and protein domains capable of stimulating RNA cleavage; exonucleases; deadenylases; proteins and protein domains having nonsense mediated RNA decay activity; proteins and protein domains capable of stabilizing RNA; proteins and protein domains capable of repressing translation; proteins and protein domains capable of stimulating translation; proteins and protein domains capable of modulating translation (e.g., translation factors such as initiation factors, elongation factors, release factors, etc., e.g., eIF4G); proteins and protein domains capable of polyadenylation of RNA; proteins and protein domains capable of polyuridinylation of RNA; proteins and protein domains having RNA localization activity; proteins and protein domains capable of nuclear retention of RNA; proteins and protein domains having RNA nuclear export activity; proteins and protein domains capable of repression of RNA splicing; proteins and protein domains capable of stimulation of RNA splicing; proteins and protein domains capable of reducing the efficiency of transcription; and proteins and protein domains capable of stimulating transcription. Another suitable heterologous polypeptide is a PUF RNA-binding domain, which is described in more detail in WO2012068627, which is hereby incorporated by reference in its entirety.

[0226] Some RNA splicing factors that can be used (in whole or as fragments thereof) as a fusion partner with a CasX variant have modular organization, with separate sequence-specific RNA binding modules and splicing effector domains. For example, members of the serine/arginine-rich (SR) protein family contain N-terminal RNA recognition motifs (RRMs) that bind to exonic splicing enhancers (ESEs) in pre-mRNAs and C-terminal RS domains that promote exon inclusion. As another example, the hnRNP protein hnRNP Al binds to exonic splicing silencers (ESSs) through its RRM domains and inhibits exon inclusion through a C-terminal glycine-rich domain. Some splicing factors can regulate alternative use of splice site (ss) by binding to regulatory sequences between the two alternative sites. For example, ASF/SF2 can recognize ESEs and promote the use of intron proximal sites, whereas hnRNP Al can bind to ESSs and shift splicing towards the use of intron distal sites. One application for such factors is to generate ESFs that modulate alternative splicing of endogenous genes, particularly disease associated genes. For example, Bc1-x pre-mRNA produces two splicing isoforms with two alternative 5′ splice sites to encode proteins of opposite functions. The long splicing isoform Bc1-xL is a potent apoptosis inhibitor expressed in long-lived post mitotic cells and is up-regulated in many cancer cells, protecting cells against apoptotic signals. The short isoform Bc1-xS is a pro-apoptotic isoform and expressed at high levels in cells with a high turnover rate (e.g., developing lymphocytes). The ratio of the two Bc1-x splicing isoforms is regulated by multiple cc-elements that are located in either the core exon region or the exon extension region (i.e., between the two alternative 5′ splice sites). For more examples, see WO2010075303, which is hereby incorporated by reference in its entirety.

[0227] Further suitable fusion partners for use with a CasX variant include, but are not limited to proteins (or fragments thereof) that are boundary elements (e.g., CTCF), proteins and fragments thereof that provide periphery recruitment (e.g., Lamin A, Lamin B, etc.), and protein docking elements (e.g., FKBP/FRB, Pill/Abyl, etc.).

[0228] In some cases, a heterologous polypeptide (a fusion partner) for use with a CasX variant provides for subcellular localization, i.e., the heterologous polypeptide contains a subcellular localization sequence (e.g., a nuclear localization signal (NLS) for targeting to the nucleus, a sequence to keep the fusion protein out of the nucleus, e.g., a nuclear export sequence (NES), a sequence to keep the fusion protein retained in the cytoplasm, a mitochondrial localization signal for targeting to the mitochondria, a chloroplast localization signal for targeting to a chloroplast, an ER retention signal, and the like). In some embodiments, a subject RNA-guided polypeptide or a conditionally active RNA-guided polypeptide and/or subject CasX fusion protein does not include a NLS so that the protein is not targeted to the nucleus (which can be advantageous, e.g., when the target nucleic acid sequence is an RNA that is present in the cytosol). In some embodiments, a fusion partner can provide a tag (i.e., the heterologous polypeptide is a detectable label) for ease of tracking and/or purification (e.g., a fluorescent protein, e.g., green fluorescent protein (GFP), yellow fluorescent protein (YFP), red fluorescent protein (RFP), cyan fluorescent protein (CFP), mCherry, tdTomato, and the like; a histidine tag, e.g., a 6XHis tag; a hemagglutinin (HA) tag; a FLAG tag; a Myc tag; and the like).

[0229] In some cases, non-limiting examples of NLSs suitable for use with a CasX variant include sequences having at least about 80%, at least about 90%, or at least about 95% identity or are identical to sequences derived from: the NLS of the SV40 virus large T-antigen, having the amino acid sequence PKKKRKV (SEQ ID NO: 168); the NLS from nucleoplasmin (e.g., the nucleoplasmin bipartite NLS with the sequence KRPAATKKAGQAKKKK (SEQ ID NO: 169); the c-myc NLS having the amino acid sequence PAAKRVKLD (SEQ ID NO: 170) or RQRRNELKRSP (SEQ ID NO: 171); the hRNPAl M9 NLS having the sequence NQSSNFGPMKGGNFGGRSSGPYGGGGQYFAKPRNQGGY (SEQ ID NO: 172); the sequence RMRIZFKNKGKDTAELRRRRVEVSVELRKAKKDEQILKRRNV (SEQ ID NO: 173) of the IBB domain from importin-alpha; the sequences VSRKRPRP (SEQ ID NO: 174) and PPKKARED (SEQ ID NO: 175) of the myoma T protein; the sequence PQPKKKPL (SEQ ID NO: 176) of human p53; the sequence SALIKKKKKMAP (SEQ ID NO: 177) of mouse c-abl IV; the sequences DRLRR (SEQ ID NO: 178) and PKQKKRK (SEQ ID NO: 179) of the influenza virus NS1; the sequence RKLKKKIKKL (SEQ ID NO: 180) of the Hepatitis virus delta antigen; the sequence REKKKFLKRR (SEQ ID NO: 181) of the mouse Mxl protein; the sequence KRKGDEVDGVDEVAKKKSKK (SEQ ID NO: 182) of the human poly(ADP-ribose) polymerase; the sequence RKCLQAGMNLEARKTKK (SEQ ID NO: 183) of the steroid hormone receptors (human) glucocorticoid; the sequence PRPRKIPR (SEQ ID NO: 184) of Borna disease virus P protein (BDV-P1); the sequence PPRKKRTVV (SEQ ID NO: 185) of hepatitis C virus nonstructural protein (HCV-NS5A);the sequence NLSKKKKRKREK (SEQ ID NO: 186) of LEF1; the sequence RRPSRPFRKP (SEQ ID NO: 187) of ORF57 simirae; the sequence KRPRSPSS (SEQ ID NO: 188) of EBV LANA; the sequence KRGINDRNFWRGENERKTR (SEQ ID NO: 189) of Influenza A protein; the sequence PRPPKMARYDN (SEQ ID NO: 190) of human RNA helicase A (RHA); the sequence KRSFSKAF (SEQ ID NO: 191) of nucleolar RNA helicase II; the sequence KLKIKRPVK (SEQ ID NO: 192) of TUS-protein; the sequence PKKKRKVPPPPAAKRVKLD (SEQ ID NO: 193) associated with importin-alpha; the sequence PKTRRRPRRSQRKRPPT (SEQ ID NO:26792) from the Rex protein in HTLV-1; the sequence SRRRKANPTKLSENAKKLAKEVEN (SEQ ID NO: 194) from the EGL-13 protein of Caenorhabditis elegans; and the sequences KTRRRPRRSQRKRPPT (SEQ ID NO: 195), RRKKRRPRRKKRR (SEQ ID NO: 196), PKKKSRKPKKKSRK (SEQ ID NO: 197), HKKKHPDASVNFSEFSK (SEQ ID NO: 198), QRPGPYDRPQRPGPYDRP (SEQ ID NO: 199), LSPSLSPLLSPSLSPL (SEQ ID NO: 200), RGKGGKGLGKGGAKRHRK (SEQ ID NO: 201), PKRGRGRPKRGRGR (SEQ ID NO: 202), PKKKRKVPPPPAAKRVKLD (SEQ ID NO: 203), PKKKRKVPPPPKKKRKV (SEQ ID NO: 204), PAKRARRGYKC (SEQ ID NO: 27199), KLGPRKATGRW (SEQ ID NO: 27200), PRRKREE (SEQ ID NO: 27201), PYRGRKE (SEQ ID NO: 27202), PLRKRPRR (SEQ ID NO: 27203), PLRKRPRRGSPLRKRPRR (SEQ ID NO: 27204), PAAKRVKLDGGKRTADGSEFESPKKKRKV (SEQ ID NO: 27205), PAAKRVKLDGGKRTADGSEFESPKKKRKVGIHGVPAA (SEQ ID NO: 27206), PAAKRVKLDGGKRTADGSEFESPKKKRKVAEAAAKEAAAKEAAAKA (SEQ ID NO: 207), PAAKRVKLDGGKRTADGSEFESPKKKRKVPG (SEQ ID NO: 27208), KRKGSPERGERKRHW (SEQ ID NO: 27209), KRTADSQHSTPPKTKRKVEFEPKKKRKV (SEQ ID NO: 27210), and PKKKRKVGGSKRTADSQHSTPPKTKRKVEFEPKKKRKV (SEQ ID NO: 27211). In some embodiments, the one or more NLS are linked to the CRISPR protein or to adjacent NLS with a linker peptide wherein the linker peptide is selected from the group consisting of RS, (G)n (SEQ ID NO: 27212), (GS)n (SEQ ID NO: 27213), (GSGGS)n (SEQ ID NO: 214), (GGSGGS)n (SEQ ID NO: 215), (GGGS)n (SEQ ID NO: 216), GGSG (SEQ ID NO: 217), GGSGG (SEQ ID NO: 218), GSGSG (SEQ ID NO: 219), GSGGG (SEQ ID NO: 220), GGGSG (SEQ ID NO: 221), GSSSG (SEQ ID NO: 222), GPGP (SEQ ID NO: 223), GGP, PPP, PPAPPA (SEQ ID NO: 224), PPPG (SEQ ID NO: 27214), PPPGPPP (SEQ ID NO: 225), PPP(GGGS)n (SEQ ID NO: 27215), (GGGS)nPPP (SEQ ID NO: 27216), AEAAAKEAAAKEAAAKA (SEQ ID NO: 27217), and TPPKTKRKVEFE (SEQ ID NO: 27218), where n is 1 to 5. In general, NLS (or multiple NLSs) are of sufficient strength to drive accumulation of a CasX variant fusion protein in the nucleus of a eukaryotic cell. Detection of accumulation in the nucleus may be performed by any suitable technique. For example, a detectable marker may be fused to a CasX variant fusion protein such that location within a cell may be visualized. Cell nuclei may also be isolated from cells, the contents of which may then be analyzed by any suitable process for detecting protein, such as immunohistochemistry, Western blot, or enzyme activity assay. Accumulation in the nucleus may also be determined indirectly.

[0230] In general, NLS (or multiple NLSs) are of sufficient strength to drive accumulation of an expressed CasX variant fusion protein in the nucleus of a eukaryotic cell. Detection of accumulation in the nucleus may be performed by any suitable technique. For example, a detectable marker may be fused to a CasX variant fusion protein such that location within a cell may be visualized. Cell nuclei may also be isolated from cells, the contents of which may then be analyzed by any suitable process for detecting protein, such as immunohistochemistry, Western blot, or enzyme activity assay. Accumulation in the nucleus may also be determined indirectly.

[0231] In some cases, a CasX variant fusion protein includes a “Protein Transduction Domain” or PTD (also known as a CPP—cell penetrating peptide), which refers to a protein, polynucleotide, carbohydrate, or organic or inorganic compound that facilitates traversing a lipid bilayer, micelle, cell membrane, organelle membrane, or vesicle membrane. A PTD attached to another molecule, which can range from a small polar molecule to a large macromolecule and/or a nanoparticle, facilitates the molecule traversing a membrane, for example going from an extracellular space to an intracellular space, or from the cytosol to within an organelle. In some embodiments, a PTD is covalently linked to the amino terminus of a CasX variant fusion protein. In some embodiments, a PTD is covalently linked to the carboxyl terminus of a CasX variant fusion protein. In some cases, the PTD is inserted internally in the sequence of a CasX variant fusion protein at a suitable insertion site. In some cases, a CasX variant fusion protein includes (is conjugated to, is fused to) one or more PTDs (e.g., two or more, three or more, four or more PTDs). In some cases, a PTD includes one or more nuclear localization signals (NLS). Examples of PTDs include but are not limited to peptide transduction domain of HIV TAT comprising YGRKKRRQRRR (SEQ ID NO: 205), RKKRRQRR (SEQ ID NO: 206); YARAAARQARA (SEQ ID NO: 207); THRLPRRRRRR (SEQ ID NO: 208); and GGRRARRRRRR (SEQ ID NO: 209); a polyarginine sequence comprising a number of arginine residues sufficient to direct entry into a cell (e.g., 3, 4, 5, 6, 7, 8, 9, 10, or 10-50 arginine residues (SEQ ID NO: 26793); a VP22 domain (Zender et al. (2002) Cancer Gene Ther. 9(6):489-96); an Drosophila Antennapedia protein transduction domain (Noguchi et al. (2003) Diabetes 52(7): 1732-1737); a truncated human calcitonin peptide (Trehin et al. (2004) Pharm. Research 21:1248-1256); polylysine (Wender et al. (2000) Proc. Natl. Acad. Sci. USA 97: 13003-13008); RRQRRTSKLMKR (SEQ ID NO: 210); Transportan GWTLNSAGYLLGKINLKALAALAKKIL (SEQ ID NO: 211); KALAWEAKLAKALAKALAKHLAKALAKALKCEA (SEQ ID NO: 212); and RQIKIWFQNRRMKWKK (SEQ ID NO: 213). In some embodiments, the PTD is an activatable CPP (ACPP) (Aguilera et al. (2009) Integr Biol (Camb) June; 1(5-6): 371-381). ACPPs comprise a polycationic CPP (e.g., Arg9 or “R9”) connected via a cleavable linker to a matching polyanion (e.g., Glu9 or “E9”), which reduces the net charge to nearly zero and thereby inhibits adhesion and uptake into cells. Upon cleavage of the linker, the polyanion is released, locally unmasking the polyarginine and its inherent adhesiveness, thus “activating” the ACPP to traverse the membrane.

[0232] In some embodiments, a CasX variant fusion protein for use in the systems can include a CasX protein that is linked to an internally inserted heterologous amino acid or heterologous polypeptide (a heterologous amino acid sequence) via a linker polypeptide (e.g., one or more linker polypeptides). In some embodiments, a CasX variant fusion protein can be linked at the C-terminal and/or N-terminal end to a heterologous polypeptide (fusion partner) via a linker polypeptide (e.g., one or more linker polypeptides). The linker polypeptide may have any of a variety of amino acid sequences. Proteins can be joined by a spacer peptide, generally of a flexible nature, although other chemical linkages are not excluded. Suitable linkers include polypeptides of between 4 amino acids and 40 amino acids in length, or between 4 amino acids and 25 amino acids in length. These linkers are generally produced by using synthetic, linker-encoding oligonucleotides to couple the proteins. Peptide linkers with a degree of flexibility can be used. The linking peptides may have virtually any amino acid sequence, bearing in mind that the preferred linkers will have a sequence that results in a generally flexible peptide. The use of small amino acids, such as glycine and alanine, are of use in creating a flexible peptide. The creation of such sequences is routine to those of skill in the art. A variety of different linkers are commercially available and are considered suitable for use. Exemplary linker polypeptides include peptides selected from the group consisting of RS, (G)n (SEQ ID NO: 27212), (GS)n (SEQ ID NO: 27213), (GSGGS)n (SEQ ID NO: 214), (GGSGGS)n (SEQ ID NO: 215), (GGGS)n (SEQ ID NO: 216), where n is an integer of 1 to 5, GGSG (SEQ ID NO: 217), GGSGG (SEQ ID NO: 218), GSGSG (SEQ ID NO: 219), GSGGG (SEQ ID NO: 220), GGGSG (SEQ ID NO: 221), GSSSG (SEQ ID NO: 222), GPGP (SEQ ID NO: 223), GGP, PPP, PPAPPA (SEQ ID NO: 224), PPPG (SEQ ID NO: 27214), PPPGPPP (SEQ ID NO: 225), PPP(GGGS)n (SEQ ID NO: 27215), (GGGS)nPPP (SEQ ID NO: 27216), AEAAAKEAAAKEAAAKA (SEQ ID NO: 27217), and TPPKTKRKVEFE (SEQ ID NO: 27218), where n is 1 to 5. and the like. The ordinarily skilled artisan will recognize that design of a peptide conjugated to any elements described above can include linkers that are all or partially flexible, such that the linker can include a flexible linker as well as one or more portions that confer less flexible structure.

### V. Systems and Methods for Modification of BCL11A Genes

[0233] The CRISPR proteins, guide nucleic acids, and variants thereof provided herein are useful for various applications, including as therapeutics, diagnostics, and for research. In some embodiments, to effect the methods of the disclosure for gene editing, provided herein are programmable CasX:gRNA systems. The programmable nature of the systems provided herein allows for the precise targeting to achieve the desired modification at one or more regions of predetermined interest in the BCL11A gene target nucleic acid. A variety of strategies and methods can be employed to modify the target nucleic acid sequence in a cell using the systems provided herein. As used herein “modifying” includes, but is not limited to, cleaving, nicking, editing, deleting, knocking out, knocking down, mutating, correcting, exon-skipping and the like. Depending on the system components utilized, the editing event may be a cleavage event followed by introducing random insertions or deletions (indels) or other mutations (e.g., a substitution, duplication, or inversion of one or more nucleotides), for example by utilizing the imprecise non-homologous DNA end joining (NHEJ) repair pathway, which may generate, for example, a frame shift mutation. Alternatively, the editing event may be a cleavage event followed by homology-directed repair (HDR), homology-independent targeted integration (HITI), micro-homology mediated end joining (MMEJ), single strand annealing (SSA) or base excision repair (BER), resulting in modification of the target nucleic acid sequence.

[0234] In some embodiments of the method, the BCL11A gene to be modified comprises a sequence corresponding to a polynucleotide encoding all or a portion of the sequence of SEQ ID NO: 100 or comprises a polynucleotide sequence that spans all or a portion of chr2 60450520-60554467 (GRCh38/hg38 Ensembl 100) of the human genome on chromosome 2. In other embodiments of the method, the target nucleic acid sequence to be modified includes regions of the BCL11A gene encoding the BCL11A protein, a BCL11A regulatory element, a non-coding region of the BCL11A gene, or overlapping portions thereof. In a particular embodiment of the method, the target nucleic acid sequence to be modified comprises the GATA1 binding motif sequence or its complement.

[0235] In some embodiments, the disclosure provides methods of modifying a BCL11A target nucleic acid in a cell, the method comprising introducing into the cell a Class 2, Type V CRISPR system. In some embodiments of the methods, the cells to be modified are autologous with respect to a subject to be administered said cell(s). In other embodiments, the cells to be modified are allogeneic with respect to a subject to be administered said cell(s). Thus, the systems and methods described herein can be used to engineer a variety of cells in which mutations exist in the β-globin gene and are associated with disease, e.g., hemoglobinopathies, including sickle-cell disease and α- and β-thalassemias. This approach, therefore, can be used to modify cells for applications in a subject with a hemoglobinopathy-related disease such as, but not limited to sickle-cell disease and α- and β-thalassemias.

[0236] In some embodiments, the disclosure provides methods of modifying a BCL11A target nucleic acid in a cell, the method comprising introducing into the cell: i) a CasX:gRNA system comprising a CasX and a gRNA of any one of the embodiments described herein; ii) a CasX:gRNA system comprising a CasX, a gRNA, and a donor template of any one of the embodiments described herein; iii) a nucleic acid encoding the CasX and the gRNA, and optionally comprising the donor template; iv) a vector comprising the nucleic acid of (iii), above; v) an XDP comprising the CasX:gRNA system of any one of the embodiments described herein; or vi) combinations of two or more of (i) to (v), wherein the target nucleic acid sequence of the cells is modified by the CasX protein and, optionally, the donor template. In some embodiments, the vector is an AAV vector. In some embodiments, the disclosure provides CasX:gRNA systems for use in the methods of modifying the BCL11A gene in a cell, wherein the system comprises a CasX variant selected from the group consisting of SEQ ID NOS: 36-99, 101-148, and 26908-27154, or a CasX variant selected from the group consisting of SEQ ID NOS: 59, 72-99, 101-148, and 26908-27154, or a CasX variant selected from the group consisting of SEQ ID NOS 132-148, and 26908-27154, or a variant sequence at least 60% identical, at least 70% identical, at least 80% identical, at least 81% identical, at least 82% identical, at least 83% identical, at least 84% identical, at least 85% identical, at least 86% identical, at least 86% identical, at least 87% identical, at least 88% identical, at least 89% identical, at least 89% identical, at least 90% identical, at least 91% identical, at least 92% identical, at least 93% identical, at least 94% identical, at least 95% identical, at least 96% identical, at least 97% identical, at least 98% identical, at least 99% identical, or at least 99.5% identical thereto, the gRNA scaffold comprises a sequence selected from the group consisting of SEQ ID NOS: 2101-2285, 26794-26839 and 27219-27265 as set forth in Table 3 or from the group consisting of SEQ ID NOS: 2281-2285, 26794-26839 and 27219-27265, or a sequence at least 65% identical, at least 70% identical, at least 75% identical, at least 80% identical, at least 81% identical, at least 82% identical, at least 83% identical, at least 84% identical, at least 85% identical, at least 86% identical, at least 86% identical, at least 87% identical, at least 88% identical, at least 89% identical, at least 89% identical, at least 90% identical, at least 91% identical, at least 92% identical, at least 93% identical, at least 94% identical, at least 95% identical, at least 96% identical, at least 97% identical, at least 98% identical, at least 99% identical, at least 99.5% identical thereto, and the gRNA comprises a targeting sequence selected from the group consisting of SEQ ID NOS: 272-2100 or 2286-26789, or a sequence at least 65% identical, at least 70% identical, at least 75% identical, at least 80% identical, at least 85% identical, at least 90% identical, or at least 95% identical thereto and having between 15 and 20 nucleotides. In particular embodiments, the targeting sequence of the gRNA is complementary to, and therefore is capable of hybridizing with, a sequence within the GATA1 binding motif sequence or that is 5′ or 3′ to the GATA1 binding motif sequence. In one embodiment, the targeting sequence of the gRNA is UGGAGCCUGUGAUAAAAGCA (SEQ ID NO: 22), which hybridizes with the BCL11A GATA1 erythroid-specific enhancer binding site sequence, or is a sequence having at least 90% or at least 95% sequence identity thereto. In another embodiment, the targeting sequence of the gRNA is UGCUUUUAUCACAGGCUCCA (SEQ ID NO: 23), which hybridizes with a sequence that is complementary to the reverse complement of the BCL11A GATA1 erythroid-specific enhancer binding site sequence, or is a sequence having at least 90% or at least 95% sequence identity thereto. In another particular embodiment, the targeting sequence of the gRNA is complementary to, and therefore is capable of hybridizing with a sequence within the promoter of the BCL11A gene. In one embodiment of the method, the CasX and gRNA are associated together in a ribonuclear protein complex (RNP). In some embodiments of the method of modifying a BCL11A target nucleic acid sequence in a cell, the modification comprises introducing a single-stranded break in the target nucleic acid sequence. In other embodiments of the method, the modification comprises introducing a double-stranded break in the target nucleic acid sequence. In some embodiments of the method, the modifying comprises introducing an insertion, deletion, substitution, duplication, or inversion of one or more nucleotides in the target nucleic acid sequence. As described herein, a CasX variant introducing double-stranded cleavage of the target nucleic acid generates a double-stranded break within 18-26 nucleotides 5′ of a PAM site on the target strand and 10-18 nucleotides 3′ on the non-target strand. Thus, in some embodiments, the resulting modification by the method can result in random insertions or deletions (indels), or a substitution, duplication, or inversion of one or more nucleotides in those region by non-homologous DNA end joining (NHEJ) repair mechanisms.

[0237] In other embodiments of the method of modifying a BCL11A target nucleic acid sequence in a cell, the method comprises contacting the target nucleic acid sequence with a CasX:gRNA system with a first and a second, or a plurality of gRNAs targeted to different or overlapping portions of the BCL11A gene (e.g., wherein the targeting sequence of the second gRNA is complementary to a sequence that is 5′ or 3′ to the GATA1 binding site) wherein the CasX protein introduces multiple breaks in the target nucleic acid that result in a permanent indel or mutation in the target nucleic acid, as described herein, or an excision of the GATA1 binding motif sequence with a corresponding modulation of expression or alteration in the function of the BCL11A gene product, thereby creating an edited cell. In some cases of the foregoing, the plurality of the gRNAs target locations 5′ and 3′ relative to the GATA1 binding motif sequence of the BCL11A gene such that some or all of the GATA1 binding motif sequence is excised from the target gene between the dual cut sites targeted by the two gRNA. It will be understood that the foregoing embodiments of the method can also be effected by use of encoding nucleic acids, vectors comprising the encoding acids, or XDP comprising the CasX:gRNA system components.

[0238] In some embodiments, the methods of the disclosure provide CasX protein and gRNA pairs that generate site-specific double strand breaks (DSBs) or single strand breaks (SSBs) (e.g., when the CasX protein is a nickase that can cleave only one strand of a target nucleic acid) within 18-24 nucleotides 3′ of a PAM site, which can then be repaired either by non-homologous end joining (NHEJ), homology-directed repair (HDR), homology-independent targeted integration (HITI), micro-homology mediated end joining (MMEJ), single strand annealing (SSA) or base excision repair (BER), wherein the modification of the BCL11A gene comprises introducing an insertion, a deletion, an inversion, or a duplication mutation of one or more nucleotides as compared to the wild-type sequence, with a corresponding modulation of expression or alteration in the function of the BCL11A gene product, thereby creating an edited cell.

[0239] In some cases, the CasX:gRNA system for use in the methods of modifying the BCL11A gene further comprises a donor template nucleic acid of any of the embodiments disclosed herein, wherein the donor template can be inserted by the homology-directed repair (HDR) or homology-independent targeted integration (HITI) repair mechanisms of the host cell. Thus, in some cases, the methods provided herein include contacting the BCL11A gene with a donor template by introducing the donor template (either in vitro inside a cell or in vivo inside a cell), wherein the donor template, a portion of the donor template, a copy of the donor template, or a portion of a copy of the donor template integrates into the BCL11A gene to replace a portion of the BCL11A gene. The donor template can be a short single-stranded or double-stranded oligonucleotide, or a long single-stranded or double-stranded oligonucleotide. In some embodiments, the donor template comprises at least a portion of the BCL11A gene, wherein the BCL11A gene portion is selected from the group consisting of a BCL11A exon, a BCL11A intron, a BCL11A intron-exon junction, a BCL11A regulatory element, or a combination thereof. In some embodiments, the disclosure provides donor templates for use in targeting, or disrupting, the transcriptional activator GATA1 binding site in the BCL11A target sequence wherein the donor template includes sequences that are nonhomologous to regions of DNA within or near GATA1 site in the BCL11A gene, flanked by two regions of homology (“homologous arms”) to the 5′ and 3′ sides of the break site(s) such that the repair mechanisms between the target DNA region and the two flanking sequences results in insertion of the donor template at the target region to facilitate insertion by HDR. The donor template may contain one or more single base changes, insertions, deletions, inversions or rearrangements with respect to the genomic sequence, provided that there is sufficient homology with the target nucleic acid sequence to support its integration into the target nucleic acid, which can result in a frame-shift or other mutation such that the BCL11A protein is not expressed (a knock-out) or is expressed at a lower level (a knock-down). The exogenous donor template inserted by HITI can be any length, for example, a relatively short sequence of between 10 and 50 nucleotides in length, or a longer sequence of about 50-1000 nucleotides in length. The lack of homology can be, for example, having no more than 20-50% sequence identity and/or lacking in specific hybridization at low stringency. In other cases, the lack of homology can further include a criterion of having no more than 5, 6, 7, 8, or 9 bp identity. In some embodiments, the donor template polynucleotide comprises at least about 10, at least about 50, at least about 100, or at least about 200, or at least about 300, or at least about 400, or at least about 500, or at least about 600, or at least about 700, or at least about 800, or at least about 900, or at least about 1000, or at least about 10,000, or at least about 15,000 nucleotides. In other embodiments, the donor template comprises at least about 10 to about 15,000 nucleotides, or at least about 100 to about 10,000 nucleotides, or at least about 400 to about 8,000 nucleotides, or at least about 600 to about 5000 nucleotides, or at least about 1000 to about 2000 nucleotides. The donor template sequence may comprise certain sequence differences as compared to the genomic sequence, e.g., restriction sites, nucleotide polymorphisms, selectable markers (e.g., drug resistance genes, fluorescent proteins, enzymes etc.), etc., which may be used to assess for successful insertion of the donor nucleic acid at the cleavage site or in some cases may be used for other purposes (e.g., to signify expression at the targeted genomic locus). Alternatively, these sequence differences may include flanking recombination sequences such as FLPs, loxP sequences, or the like, that can be activated at a later time for removal of the marker sequence.

[0240] In some embodiments of the methods of modifying a BCL11A target nucleic acid of a cell in vitro or ex vivo, to induce cleavage or any desired modification to a target nucleic acid, the gRNA and/or the CasX protein of the present disclosure and, optionally, the donor template sequence, whether they be introduced as nucleic acids or polypeptides, complexed RNP, vectors or XDP, are provided to the cells for about 30 minutes to about 24 hours, or at least about 1 hour, 1.5 hours, 2 hours, 2.5 hours, 3 hours, 3.5 hours 4 hours, 5 hours, 6 hours, 7 hours, 8 hours, 12 hours, 16 hours, 18 hours, 20 hours, or any other period from about 30 minutes to about 24 hours, which may be repeated with a frequency of about every day to about every 4 days, e.g., every 1.5 days, every 2 days, every 3 days, or any other frequency from about every day to about every four days. The agent(s) may be provided to the subject cells one or more times, e.g., one time, twice, three times, or more than three times, and the cells allowed to incubate with the agent(s) for some amount of time following each contacting event e.g., 30 minutes to about 24 hours. In the case of in vitro-based methods, after the incubation period with the CasX and gRNA (and optionally the donor template), the media is replaced with fresh media and the cells are cultured further.

[0241] In some embodiments of the methods of modifying a BCL11A target nucleic acid in a cell, the methods further comprises contacting the target nucleic acid sequence of the cell with: a) an additional CRISPR nuclease and a gRNA targeting a different or overlapping portion of the BCL11A target nucleic acid compared to the first gRNA; b) a polynucleotide encoding the additional CRISPR nuclease and the gRNA of (a); c) a vector comprising the polynucleotide of (b); or d) a XDP comprising the additional CRISPR nuclease and the gRNA of (a), wherein the contacting results in modification of the BCL11A target nucleic acid at a different location in the sequence compared to the first gRNA. In some cases, the additional CRISPR nuclease is a CasX protein having a sequence different from the CasX protein of any of the preceding claims. In other cases, the additional CRISPR nuclease is not a CasX protein and is selected from the group consisting of Cas9, Cas12a, Cas12b, Cas12c, Cas12d (CasY), Cas12j, Cas12k, Cas13a, Cas13b, Cas13c, Cas13d, CasY, Cas14, Cpf1, C2cl, Csn2, Cas Phi, and sequence variants thereof.

[0242] In those cases where the modification results in a knock-down of the BCL11A gene, expression of the BCL11A protein is reduced by at least about 10%, at least about 20%, at least about 30%, at least about 40%, at least about 50%, at least about 60%, at least about 70%, at least about 80%, or at least about 90% in comparison to cells that have not been modified. In other cases, wherein the modification results in a knock-out of the BCL11A gene, the target nucleic acid of the cells of the population is modified such that expression of the BCL11A protein cannot be detected. Expression of a BCL11A protein can be measured by flow cytometry, ELISA, cell-based assays, Western blot, qRT-PCR, or other methods know in the art, or as described in the Examples.

[0243] In some embodiments, the disclosure provides methods of modifying a BCL11A target nucleic acid in a population of cells in vivo in a subject. In some embodiments, the modifying of the target nucleic acid sequence is carried out ex vivo in a eukaryotic cell, wherein the eukaryotic cell is selected from the group consisting of a hematopoietic stem cell (HSC), a hematopoietic progenitor cell (HPC), a CD34+ cell, a mesenchymal stem cell (MSC), induced pluripotent stem cell (iPSC), a common myeloid progenitor cell, a proerythroblast cell, and an erythroblast cell. In the foregoing embodiment, a population of the modified cells can be utilized in a method of treatment in a subject, wherein the modified cells are administered to the subject in need thereof, and wherein the subject is selected from the group consisting of mouse, rat, pig, non-human primate, and human. In some cases, the ex vivo cell is autologous and is isolated from the subject's bone marrow or peripheral blood. In other cases, the ex vivo cell is allogeneic and is isolated from a different subject's bone marrow or peripheral blood. In the methods of treatment, the modified cell can be administered to the subject by a route of administration selected from intraparenchymal, intravenous, intra-arterial, intramuscular, subcuticular, intraarticular, intracardiac, intrapericardial, intravitreal, sub-capsular, or by subcutaneous injection and can be implanted into the subject by transplantation, local injection, systemic infusion, or combinations thereof. In the foregoing embodiment, the method results in the persistence of the modified cell or its progeny for at least about 1 month, at least about 2 months, at least about 3 months, at least about 4 months, at least about 6 months, at least about 7 months, at least about 8 months, at least about 9 months, at least about 10 months, at least about 11 months, at least about 12 months, at least about 18 months, at least about 2 years, at least about 3 years, at least about 4 years, or at least about 5 years.

[0244] In some embodiments of the methods of modifying a target nucleic acid sequence, modifying the BCL11A gene comprises binding of the CasX:gRNA complex to the target nucleic acid sequence and is introduced into the cells as an RNP. In some embodiments, the CasX is a catalytically inactive CasX (dCasX) protein that retains the ability to bind to the gRNA and the target nucleic acid sequence. For example, the target nucleic acid sequence comprises a BCL11A sequence comprising a sequence complementary to the GATA1 binding motif sequence, and binding of the dCasX:gRNA complex to the target sequence interferes with or represses transcription of the BCL11A allele. In some embodiments, the dCasX comprises a mutation at residues D672, E769, and/or D935 corresponding to the CasX protein of SEQ ID NO: 1 or D659, E756 and/or D922 corresponding to the CasX protein of SEQ ID NO: 2. In some embodiments of the foregoing, the mutation in the CasX variant protein is a substitution of alanine or glycine for the residue and can be utilized for any of the variants described herein.

[0245] Introducing recombinant expression vectors comprising the components or the nucleic acids encoding the components of the system embodiments into a target cell can be carried out in vivo, in vitro or ex vivo. In some embodiments of the method, vectors may be provided directly to a target host cell. Methods of introducing a nucleic acid (e.g., a nucleic acid comprising a donor polynucleotide sequence, one or more nucleic acids (DNA or RNA) encoding a CasX protein and/or gRNA, or a vector comprising same) into a cell are known in the art, and any convenient method can be used to introduce a nucleic acid (e.g., an expression construct) into a cell. Suitable methods include e.g., viral infection, transfection, lipofection, electroporation, calcium phosphate precipitation, polyethyleneimine (PEI)-mediated transfection, DEAE-dextran mediated transfection, liposome-mediated transfection, particle gun technology, nucleofection, electroporation, direct addition by cell penetrating CasX proteins that are fused to or recruit donor DNA, cell squeezing, calcium phosphate precipitation, direct microinjection, nanoparticle-mediated nucleic acid delivery, and the like. Nucleic acids may be introduced into the cells using well-developed commercially-available transfection techniques such as use of TransMessenger® reagents from Qiagen, Stemfect™ RNA Transfection Kit from Stemgent, and TransIT®-mRNA Transfection Kit from Mirus Bio LLC, Lonza nucleofection, Maxagen electroporation and the like. Introducing recombinant expression vectors comprising sequences encoding the CasX:gRNA systems (and, optionally, the donor sequences) of the disclosure into cells under in vitro conditions can occur in any suitable culture media and under any suitable culture conditions that promote the survival of the cells. For example, cells may be contacted with vectors comprising the subject nucleic acids (e.g., recombinant expression vectors having the donor template sequence and nucleic acid encoding the CasX and gRNA) such that the vectors are taken up by the cells. Vectors used for providing the nucleic acids encoding gRNAs and/or CasX proteins to a target host cell can include suitable promoters for driving the expression, that is, transcriptional activation of the nucleic acid of interest. In some cases, the encoding nucleic acid of interest will be operably linked to a promoter. This may include ubiquitously acting promoters, for example, the CMV-beta-actin promoter, or inducible promoters, such as promoters that are active in particular cell populations or that respond to the presence of drugs such as tetracycline or kanamycin. By transcriptional activation, it is intended that transcription will be increased above basal levels in the target host cell comprising the vector by at least about 10-fold, by at least about 100-fold, more usually by at least about 1000-fold. In addition, vectors used for providing a nucleic acid encoding a gRNA and/or a CasX protein to a cell may include nucleic acid sequences that encode for selectable markers in the target cells, so as to identify cells that have taken up the CasX protein and/or the gRNA.

[0246] For viral vector delivery, cells can be contacted with viral particles comprising the subject viral expression vectors and the nucleic acid encoding the CasX and gRNA and, optionally, the donor template. In some embodiments, the vector is an Adeno-Associated Viral (AAV) vector, wherein the AAV is selected from AAV1, AAV2, AAV3, AAV4, AAV5, AAV6, AAV7, AAV8, AAV9, AAV10, AAV11, AAV12, AAV44.9, AAV-Rh74, or AAVRh10. In other cases, the AAV is selected from AAV1, AAV2, AAV5, AAV6, AAV7, AAV8, and AAV9, which are efficient for muscle transduction (Gruntman A M, et al. Gene transfer in skeletal and cardiac muscle using recombinant adeno-associated virus. Curr Protoc Microbiol. 14(14D):3 (2013). Embodiments of AAV vectors are described more fully, below. In other embodiments, the vector is a lentiviral vector. Retroviruses, for example, lentiviruses, may be suitable for use in methods of the present disclosure. Commonly used retroviral vectors are “defective”, e.g., are unable to produce viral proteins required for productive infection. Rather, replication of the vector requires growth in a packaging cell line. To generate viral particles comprising nucleic acids of interest, the retroviral nucleic acids comprising the nucleic acid are packaged into viral capsids by a packaging cell line. Different packaging cell lines provide a different envelope protein (ecotropic, amphotropic or xenotropic) to be incorporated into the capsid, and this envelope protein determines the specificity or tropism of the viral particle for the cells (ecotropic for murine and rat; amphotropic for most mammalian cell types including human, dog and mouse; and xenotropic for most mammalian cell types except murine cells). The appropriate packaging cell line may be used to ensure that the cells are targeted by the packaged viral particles. Methods of introducing subject vector expression vectors into packaging cell lines, and of collecting the viral particles that are generated by the packaging lines, are well known in the art, including U.S. Pat. No. 5,173,414; Tratschin et al., Mol. Cell. Biol. 5:3251-3260 (1985); Tratschin, et al., Mol. Cell. Biol. 4:2072-2081 (1984); Hermonat & Muzyczka, PNAS 81:6466-6470 (1984); and Samulski et al., J. Virol. 63:03822-3828 (1989). Nucleic acids can also be introduced by direct micro-injection (e.g., injection of RNA).

[0247] In other embodiments of the methods of modifying a BCL11A gene, the method utilizes CasX delivery particles (XDP) for the targeted delivery of RNPs to the cells of the subject. XDP are particles that closely resemble viruses, but do not contain viral genetic material and are therefore non-infectious. In some embodiments, the XDP comprise a CasX and gRNA complexed as an RNP and, optionally, a donor template comprising all or a portion of the BCL11A gene to either knock-down or knock-out the BCL11A gene or a portion of the gene by insertion via HDR or HITI mechanisms. Embodiments of XDPs are described more fully, below.

### VI Polynucleotides and Vectors

[0248] In another aspect, the present disclosure relates to polynucleotides encoding the Class2, Type V nucleases and gRNA that have utility in the editing of the BCL11A gene. In some embodiments, the disclosure provides polynucleotides encoding the CasX proteins and the polynucleotides of the gRNAs of any of the CasX:gRNA system embodiments described herein. In additional embodiments, the disclosure provides donor template polynucleotides encoding portions or all of a BCL11A gene. In some cases, the donor template comprises a mutation or a heterologous sequence for knocking down or knocking out the BCL11A gene upon its insertion in the target nucleic acid. In yet further embodiments, the disclosure provides vectors comprising polynucleotides encoding the CasX proteins and the CasX gRNAs described herein, as well as the donor templates of the embodiments.

[0249] In some embodiments, the disclosure provides a polynucleotide sequence encoding the CasX variants of any of the embodiments described herein, including the CasX protein variants of SEQ ID NOS: 59, 72-99, 101-148, and 26908-27154 as described in Table 4 or sequences having at least about 50%, at least about 60%, at least about 70%, at least about 80%, at least about 90%, at least about 95%, at least about 96%, at least about 97%, at least about 98%, or at least about 99% sequence identity to a sequence of SEQ ID NOS: 59, 72-99, 101-148, and 26908-27154 of Table 4. In some embodiments, the disclosure provides a polynucleotide sequence encoding the CasX variants of any of the embodiments described herein, including the CasX protein variants of SEQ ID NOS: 36-99, 101-148, and 26908-27154 as described in Table 4 or sequences having at least about 50%, at least about 60%, at least about 70%, at least about 80%, at least about 90%, at least about 95%, at least about 96%, at least about 97%, at least about 98%, or at least about 99% sequence identity to a sequence of SEQ ID NOS: 36-99, 101-148, and 26908-27154 of Table 4. In some embodiments, the disclosure provides an isolated polynucleotide sequence encoding a gRNA sequence of any of the embodiments described herein, including the sequences of SEQ ID NOS: 4-16, 2238-2285, 26794-26839 or 27219-27265 of Tables 2 and 3, together with the targeting sequences of SEQ ID NOS: 272-2100 or 2286-26789. In some embodiments, the disclosure provides an isolated polynucleotide sequence encoding a gRNA sequence of any of the embodiments described herein, including the sequences of SEQ ID NOS: 2101-2285, 26794-26839 and 27219-27265, together with the targeting sequences of SEQ ID NOS: 272-2100 or 2286-26789. In some embodiments, the disclosure provides an isolated polynucleotide sequence encoding a gRNA sequence of any of the embodiments described herein, including the sequences of SEQ ID NOS: 2281-2285, 26794-26839 and 27219-27265, together with the targeting sequences of SEQ ID NOS: 272-2100 or 2286-26789. In some embodiments, the sequences encoding the CasX protein are codon optimized for expression in a eukaryotic cell.

[0250] In some embodiments, the disclosure provides a polynucleotide encoding a gRNA scaffold sequence of SEQ ID NOS: 4-16, 2238-2285, 26794-26839 or 27219-27265, or as set forth in Table 2 or Table 3, or a sequence having at least about 50%, at least about 60%, at least about 70%, at least about 80%, at least about 90%, at least about 95%, at least about 95%, at least about 96%, at least about 97%, at least about 98%, at least about 99% sequence identity thereto. In other embodiments, the disclosure provides a targeting sequence polynucleotide of Table 1, or a sequence having at least about 65%, at least about 75%, at least about 85%, or at least about 95% identity to a sequence of SEQ ID NOS: 272-2100 or 2286-26789. In some embodiments, the targeting sequence polynucleotide is, in turn, linked to the 3′ end of the gRNA scaffold sequence; either as a sgRNA or a dgRNA. In other embodiments, the disclosure provides gRNAs comprising targeting sequence polynucleotides having one or more single nucleotide polymorphisms (SNP) relative to a sequence of SEQ ID NOS: 272-2100 or 2286-26789.

[0251] In other embodiments, the disclosure provides an isolated polynucleotide sequence encoding a gRNA comprising a targeting sequence that is complementary to, and therefore is capable of hybridizing with, the BCL11A gene. In some embodiments, the polynucleotide sequence encodes a gRNA comprising a targeting sequence that hybridizes with a BCL11A exon. In other embodiments, the polynucleotide sequence encodes a gRNA comprising a targeting sequence that hybridizes with a BCL11A intron. In other embodiments, the polynucleotide sequence encodes a gRNA comprising a targeting sequence that hybridizes with a BCL11A intron-exon junction. In other embodiments, the polynucleotide sequence encodes a gRNA comprising a targeting sequence that hybridizes with an intergenic region of the BCL11A gene. In other embodiments, the polynucleotide sequence encodes a gRNA comprising a targeting sequence that hybridizes with a BCL11A regulatory element. In some cases, the BCL11A regulatory element is a BCL11A promoter or enhancer. In some cases, the BCL11A regulatory element is located 5′ of the BCL11A transcription start site, 3′ of the BCL11A transcription start, or in a BCL11A intron. In other embodiments, the polynucleotide sequence encodes a gRNA comprising a targeting sequence that hybridizes with a sequence located 5′ to the GATA1 binding motif sequence. In other embodiments, the polynucleotide sequence encodes a gRNA comprising a targeting sequence that hybridizes with a sequence overlapping the GATA1 binding motif sequence. In a particular embodiment of the foregoing, the polynucleotide sequence encodes a gRNA comprising a targeting sequence having SEQ ID NO: 22. In some cases, the BCL11A regulatory element is in an intron of the BCL11A gene. In other cases, the BCL11A regulatory element comprises the 5′ UTR of the BCL11A gene. In still other cases, the BCL11A regulatory element comprises the 3′ UTR of the BCL11A gene.

[0252] In other embodiments, the disclosure provides donor template nucleic acids, wherein the donor template comprises a nucleotide sequence having homology to a BCL11A target nucleic acid sequence. In some embodiments, the BCL11A donor template is intended for gene editing in conjunction with the CasX:gRNA system and comprises at least a portion of a BCL11A gene. In other embodiments, the BCL11A donor sequence comprises a sequence that encodes at least a portion of a BCL11A exon. In other embodiments, the BCL11A donor template has a sequence that encodes at least a portion of a BCL11A intron. In other embodiments, the BCL11A donor template has a sequence that encodes at least a portion of a BCL11A intron-exon junction. In other embodiments, the BCL11A donor template has a sequence that encodes at least a portion of an intergenic region of the BCL11A gene. In other embodiments, the BCL11A donor template has a sequence that encodes at least a portion of a BCL11A regulatory element. In some cases, the BCL11A donor template is a wild-type sequence that encodes at least a portion of SEQ ID NO: 100. In other cases, the BCL11A donor template sequence comprises one or more mutations relative to a wild-type BCL11A gene. In a particular embodiment, the donor template has a sequence that encodes a portion or all of the GATA1 binding motif sequence but with at least 1 to 5 mutations relative to the wild-type sequence. In the foregoing embodiments, the donor template is at least 10 nucleotides, at least 100 nucleotides, at least 200 nucleotides, at least 300 nucleotides, at least 400 nucleotides, at least 500 nucleotides, at least 600 nucleotides, at least 700 nucleotides, at least 800 nucleotides, at least 900 nucleotides, at least 1,000 nucleotides, at least 2,000 nucleotides, at least 3,000 nucleotides, at least 4,000 nucleotides, at least 5,000 nucleotides, at least 6,000 nucleotides, at least 7,000 nucleotides, at least 8,000 nucleotides, at least 9,000 nucleotides, at least 10,000 nucleotides, at least 12,000 nucleotides, or at least 15,000 nucleotides. In some embodiments, the donor template comprises at least about 10 to about 15,000 nucleotides. In some embodiments, the donor template is a single-stranded DNA template. In other embodiments, the donor template is a single stranded RNA template. In other embodiments, the donor template is a double-stranded DNA template. In some embodiments, the donor template can be provided as naked nucleic acid in the systems to edit the BCL11A gene and does not need to be incorporated into a vector. In other embodiments, the donor template can be incorporated into a vector to facilitate its delivery to a cell; e.g., in a viral vector.

[0253] In other aspects, the disclosure relates to methods to produce polynucleotide sequences encoding the CasX variants, or the gRNA of any of the embodiments described herein, including homologous variants thereof, as well as methods to express the proteins expressed or RNA transcribed by the polynucleotide sequences. In general, the methods include producing a polynucleotide sequence coding for the CasX variants, or the gRNA of any of the embodiments described herein and incorporating the encoding gene into an expression vector appropriate for a host cell. Standard recombinant techniques in molecular biology can be used to make the polynucleotides and expression vectors of the present disclosure. For production of the encoded reference CasX, the CasX variants, or the gRNA of any of the embodiments described herein, the methods include transforming an appropriate host cell with an expression vector comprising the encoding polynucleotide, and culturing the host cell under conditions causing or permitting the resulting reference CasX, the CasX variants, or the gRNA of any of the embodiments described herein to be expressed or transcribed in the transformed host cell, thereby producing the CasX variants, or the gRNA, which are recovered by methods described herein or by standard purification methods known in the art or as described in the Examples.

[0254] In accordance with the disclosure, nucleic acid sequences that encode the CasX variants, or the gRNA of any of the embodiments described herein (or their complement) are used to generate recombinant DNA molecules that direct the expression in appropriate host cells. Several cloning strategies are suitable for performing the present disclosure, many of which are used to generate a construct that comprises a gene coding for a composition of the present disclosure, or its complement. In some embodiments, the cloning strategy is used to create a gene that encodes a construct that comprises nucleotides encoding the CasX variants, or the gRNA that is used to transform a host cell for expression of the composition.

[0255] In some approaches, a construct is first prepared containing the DNA sequence encoding a CasX variant or a gRNA. Exemplary methods for the preparation of such constructs are described in the Examples. The construct is then used to create an expression vector suitable for transforming a host cell, such as a prokaryotic or eukaryotic host cell for the expression and recovery of the protein construct, in the case of the CasX, or the gRNA. Where desired, the host cell is an E. coli. In other embodiments, the host cell is a eukaryotic cell. The eukaryotic host cell can be selected from Baby Hamster Kidney fibroblast (BHK) cells, human embryonic kidney 293 (HEK293), human embryonic kidney 293T (HEK293T), NS0 cells, SP2/0 cells, YO myeloma cells, P3X63 mouse myeloma cells, PER cells, PER.C6 cells, hybridoma cells, NIH3T3 cells, CV-1 (simian) in Origin with SV40 genetic material (COS), HeLa, Chinese hamster ovary (CHO), or yeast cells, or other eukaryotic cells known in the art suitable for the production of recombinant products. Exemplary methods for the creation of expression vectors, the transformation of host cells and the expression and recovery of the CasX variants or the gRNA are described in the Examples.

[0256] The gene encoding the CasX variant, or the gRNA construct can be made in one or more steps, either fully synthetically or by synthesis combined with enzymatic processes, such as restriction enzyme-mediated cloning, PCR and overlap extension, including methods more fully described in the Examples. The methods disclosed herein can be used, for example, to ligate sequences of polynucleotides encoding the various components (e.g., CasX and gRNA) genes of a desired sequence. Genes encoding polypeptide compositions are assembled from oligonucleotides using standard techniques of gene synthesis.

[0257] In some embodiments, the nucleotide sequence encoding a CasX protein is codon optimized for the intended host cell. This type of optimization can entail a mutation of an encoding nucleotide sequence to mimic the codon preferences of the intended host organism or cell while encoding the same CasX protein. Thus, the codons can be changed, but the encoded protein or gRNA remains unchanged. For example, if the intended target cell of the CasX protein was a human cell, a human codon-optimized CasX-encoding nucleotide sequence could be used. As another non-limiting example, if the intended host cell were a mouse cell, then a mouse codon-optimized CasX-encoding nucleotide sequence could be generated. The gene design can be performed using algorithms that optimize codon usage and amino acid composition appropriate for the host cell utilized in the production of the reference CasX or the CasX variants. In one method of the disclosure, a library of polynucleotides encoding the components of the constructs is created and then assembled, as described above. The resulting genes are then assembled and the resulting genes used to transform a host cell and produce and recover the CasX variants, or the gRNA compositions for evaluation of its properties, as described herein.

[0258] The disclosure provides for the use of plasmid expression vectors containing replication and control sequences that are compatible with and recognized by the host cell and are operably linked to the gene encoding the polypeptide for controlled expression of the polypeptide or transcription of the RNA. Such vector sequences are well known for a variety of bacteria, yeast, and viruses. Useful expression vectors that can be used include, for example, segments of chromosomal, non-chromosomal and synthetic DNA sequences. “Expression vector” refers to a DNA construct containing a DNA sequence that is operably linked to a suitable control sequence capable of effecting the expression of the DNA encoding the polypeptide in a suitable host. The requirements are that the vectors are replicable and viable in the host cell of choice. Low- or high-copy number vectors may be used as desired. The control sequences of the vector include a promoter to effect transcription, an optional operator sequence to control such transcription, a sequence encoding suitable mRNA ribosome binding sites, and sequences that control termination of transcription and translation. In some embodiments, a nucleotide sequence encoding a gRNA is operably linked to a control element, e.g., a transcriptional control element, such as a promoter. In some embodiments, a nucleotide sequence encoding a CasX protein is operably linked to a control element, e.g., a transcriptional control element, such as a promoter. In other cases, the nucleotide encoding the CasX and gRNA are linked and are operably linked to a single control element. The promoter may be any DNA sequence, which shows transcriptional activity in the host cell of choice and may be derived from genes encoding proteins either homologous or heterologous to the host cell. Exemplary regulatory elements include a transcription promoter, a transcription enhancer element, a transcription termination signal, internal ribosome entry site (IRES) or P2A peptide to permit translation of multiple genes from a single transcript, polyadenylation sequences to promote downstream transcriptional termination, sequences for optimization of initiation of translation, and translation termination sequences. In some cases, the promoter is a constitutively active promoter. In some cases, the promoter is a regulatable promoter. In some cases, the promoter is an inducible promoter. In some cases, the promoter is a tissue-specific promoter. In some cases, the promoter is a cell type-specific promoter. In some cases, the transcriptional control element (e.g., the promoter) is functional in a targeted cell type or targeted cell population. For example, in some cases, the transcriptional control element can be functional in eukaryotic cells, e.g., packaging cells for viral or XDP vectors, hematopoietic stem cells (HSC), hematopoietic progenitor cells (HPC), CD34+ cells, mesenchymal stem cells (MSC), embryonic stem (ES) cells, induced pluripotent stem cells (iPSC), common myeloid progenitor cells, proerythroblast cells, and erythroblast cells.

[0259] Non-limiting examples of pol II promoters include, but are not limited to EF-1alpha, EF-1alpha core promoter, Jens Tornoe (JeT), promoters from cytomegalovirus (CMV), CMV immediate early (CMVIE), CMV enhancer, herpes simplex virus (HSV) thymidine kinase, early and late simian virus 40 (SV40), the SV40 enhancer, long terminal repeats (LTRs) from retrovirus, mouse metallothionein-I, adenovirus major late promoter (Ad MLP), CMV promoter full-length promoter, the minimal CMV promoter, the chicken CE<-actin promoter (CBA), CBA hybrid (CBh), chicken CE≤-actin promoter with cytomegalovirus enhancer (CB7), chicken beta-Actin promoter and rabbit beta-Globin splice acceptor site fusion (CAG), the rous sarcoma virus (RSV) promoter, the HIV-Ltr promoter, the hPGK promoter, the HSV TK promoter, a 7SK promoter, the Mini-TK promoter, the human synapsin I (SYN) promoter which confers neuron-specific expression, beta-actin promoter, super core promoter 1 (SCP1), the Mecp2 promoter for selective expression in neurons, the minimal IL-2 promoter, the Rous sarcoma virus enhancer/promoter (single), the spleen focus-forming virus long terminal repeat (LTR) promoter, the TBG promoter, promoter from the human thyroxine-binding globulin gene (Liver specific), the PGK promoter, the human ubiquitin C promoter (UBC), the UCOE promoter (Promoter of HNRPA2B1-CBX3), the synthetic CAG promoter, the Histone H2 promoter, the Histone H3 promoter, the U1a1 small nuclear RNA promoter (226 nt), the U1a1 small nuclear RNA promoter (226 nt), the Ulb2 small nuclear RNA promoter (246 nt) 26, the GUSB promoter, the CBh promoter, rhodopsin (Rho) promoter, silencing-prone spleen focus forming virus (SFFV) promoter, a human H1 promoter (H1), a POL1 promoter, the TTR minimal enhancer/promoter, the b-kinesin promoter, mouse mammary tumor virus long terminal repeat (LTR) promoter, the human eukaryotic initiation factor 4A (EIF4A1) promoter, the ROSA26 promoter, the glyceraldehyde 3-phosphate dehydrogenase (GAPDH) promoter, tRNA promoters, and truncated versions and sequence variants of the foregoing. In a particular embodiment, the pol II promoter is EF-1alpha, wherein the promoter enhances transfection efficiency, the transgene transcription or expression of the CRISPR nuclease, the proportion of expression-positive clones and the copy number of the episomal vector in long-term culture.

[0260] Non-limiting examples of pol III promoters include, but are not limited to U6, mini U6, U6 truncated promoters,7SK, and H1 variants, BiH1 (Bidrectional H1 promoter), BiU6, Bi7SK, BiH1 (Bidirectional U6, 7SK, and H1 promoters), gorilla U6, rhesus U6, human 7SK, human H1 promoters, and sequence variants thereof. In the foregoing embodiment, the pol III promoter enhances the transcription of the gRNA.

[0261] Selection of the appropriate vector and promoter is well within the level of ordinary skill in the art, as it related to controlling expression, e.g., for modifying a BCL11A gene. The expression vector may also contain a ribosome binding site for translation initiation and a transcription terminator. The expression vector may also include appropriate sequences for amplifying expression. The expression vector may also include nucleotide sequences encoding protein tags (e.g., 6×His tag, hemagglutinin tag, fluorescent protein, etc.) that can be fused to the CasX protein, thus resulting in a chimeric CasX protein that are used for purification or detection.

[0262] Recombinant expression vectors of the disclosure can also comprise elements that facilitate robust expression of CasX proteins and the gRNAs of the disclosure. For example, recombinant expression vectors can include one or more of a polyadenylation signal (poly(A)), an intronic sequence or a post-transcriptional regulatory element such as a woodchuck hepatitis post-transcriptional regulatory element (WPRE). Exemplary poly(A) sequences include hGH poly(A) signal (short), HSV TK poly(A) signal, synthetic polyadenylation signals, SV40 poly(A) signal, β-globin poly(A) signal and the like. A person of ordinary skill in the art will be able to select suitable elements to include in the recombinant expression vectors described herein.

[0263] In some embodiments, provided herein are one or more recombinant expression vectors comprising one or more of: (i) a nucleotide sequence of a donor template nucleic acid where the donor template comprises a nucleotide sequence having homology to a sequence of the target BCL11A locus of the target nucleic acid (e.g., a target genome); (ii) a nucleotide sequence that encodes a gRNA that hybridizes to a target sequence of the BCL11A locus of the targeted genome (e.g., configured as a single or dual guide RNA) operably linked to a promoter that is operable in a target cell such as a eukaryotic cell; and (iii) a nucleotide sequence encoding a CasX protein operably linked to a promoter that is operable in a target cell such as a eukaryotic cell. In some embodiments, the sequences encoding the donor template, the gRNA and the CasX protein are in different recombinant expression vectors, and in other embodiments one or more polynucleotide sequences (for the donor template, CasX, and the gRNA) are in the same recombinant expression vector. In other cases, the CasX and gRNA are delivered to the target cell as an RNP (e.g., by electroporation or chemical means) and the donor template is delivered by a vector.

[0264] The polynucleotide sequence(s) are inserted into the vector by a variety of procedures. In general, DNA is inserted into an appropriate restriction endonuclease site(s) using techniques known in the art. Vector components generally include, but are not limited to, one or more of a signal sequence, an origin of replication, one or more marker genes, an enhancer element, a promoter, and a transcription termination sequence. Construction of suitable vectors containing one or more of these components employs standard ligation techniques which are known to the skilled artisan. Such techniques are well known in the art and well described in the scientific and patent literature. Various vectors are publicly available. The vector may, for example, be in the form of a plasmid, cosmid, viral particle, or phage that may conveniently be subjected to recombinant DNA procedures, and the choice of vector will often depend on the host cell into which it is to be introduced. Thus, the vector may be an autonomously replicating vector, i.e., a vector, which exists as an extrachromosomal entity, the replication of which is independent of chromosomal replication, e.g., a plasmid. Alternatively, the vector may be one which, when introduced into a host cell, is integrated into the host cell genome and replicated together with the chromosome(s) into which it has been integrated. Once introduced into a suitable host cell, expression of the protein involved in antigen processing, antigen presentation, antigen recognition, and/or antigen response can be determined using any nucleic acid or protein assay known in the art. For example, the presence of transcribed mRNA of reference CasX or the CasX variants can be detected and/or quantified by conventional hybridization assays (e.g., Northern blot analysis), amplification procedures (e.g. RT-PCR), SAGE (U.S. Pat. No. 5,695,937), and array-based technologies (see e.g., U.S. Pat. Nos. 5,405,783, 5,412,087 and 5,445,934), using probes complementary to any region of the polynucleotide.

[0265] The polynucleotides and recombinant expression vectors can be delivered to the target host cells by a variety of methods. Such methods include, but are not limited to, viral infection, transfection, lipofection, electroporation, calcium phosphate precipitation, polyethyleneimine (PEI)-mediated transfection, DEAE-dextran mediated transfection, microinjection, liposome-mediated transfection, particle gun technology, nucleofection, direct addition by cell penetrating CasX proteins that are fused to or recruit donor DNA, cell squeezing, calcium phosphate precipitation, direct microinjection, nanoparticle-mediated nucleic acid delivery, and using the commercially available TransMessenger® reagents from Qiagen, Stemfect™ RNA Transfection Kit from Stemgent, and TransIT®-mRNA Transfection Kit from Mirus Bio LLC, Lonza nucleofection, Maxagen electroporation and the like.

[0266] A recombinant expression vector sequence can be packaged into a virus or virus-like particle (also referred to herein as a “particle” or “virion”) for subsequent infection and transformation of a cell, ex vivo, in vitro or in vivo. Such particles or virions will typically include proteins that encapsidate or package the vector genome. Suitable expression vectors may include viral expression vectors based on vaccinia virus; poliovirus; adenovirus; a retroviral vector (e.g., Murine Leukemia Virus), spleen necrosis virus, and vectors derived from retroviruses such as Rous Sarcoma Virus, Harvey Sarcoma Virus, avian leukosis virus, a lentivirus, human immunodeficiency virus, myeloproliferative sarcoma virus, and mammary tumor virus; and the like. In some embodiments, a recombinant expression vector of the present disclosure is a recombinant adeno-associated virus (AAV) vector. In some embodiments, a recombinant expression vector of the present disclosure is a recombinant lentivirus vector. In some embodiments, a recombinant expression vector of the present disclosure is a recombinant retroviral vector.

[0267] In some embodiments, a recombinant expression vector of the present disclosure is a recombinant adeno-associated virus (AAV) vector. In some embodiments, a recombinant expression vector of the present disclosure is a recombinant lentivirus vector. In some embodiments, a recombinant expression vector of the present disclosure is a recombinant retroviral vector.

[0268] AAV is a small (20 nm), nonpathogenic virus that is useful in treating human diseases in situations that employ a viral vector for delivery to a cell such as a eukaryotic cell, either in vivo or ex vivo for cells to be prepared for administering to a subject. A construct is generated, for example a construct encoding any of the CasX proteins and/or CasX gRNA embodiments as described herein, and is flanked with AAV inverted terminal repeat (ITR) sequences, thereby enabling packaging of the AAV vector into an AAV viral particle.

[0269] An “AAV” vector may refer to the naturally occurring wild-type virus itself or derivatives thereof. The term covers all subtypes, serotypes and pseudotypes, and both naturally occurring and recombinant forms, except where required otherwise. As used herein, the term “serotype” refers to an AAV which is identified by and distinguished from other AAVs based on capsid protein reactivity with defined antisera, e.g., there are many known serotypes of primate AAVs. In some embodiments, the AAV vector is selected from AAV1, AAV2, AAV3, AAV4, AAV5, AAV6, AAV7, AAV8, AAV9, AAV10, AAV11, AAV12, AAV44.9, AAV-Rh74 (Rhesus macaque-derived AAV), and AAVRh10, and modified capsids of these serotypes. For example, serotype AAV-2 is used to refer to an AAV which contains capsid proteins encoded from the cap gene of AAV-2 and a genome containing 5′ and 3′ ITR sequences from the same AAV-2 serotype. Pseudotyped AAV refers to an AAV that contains capsid proteins from one serotype and a viral genome including 5′-3′ ITRs of a second serotype. Pseudotyped rAAV would be expected to have cell surface binding properties of the capsid serotype and genetic properties consistent with the ITR serotype. Pseudotyped recombinant AAV (rAAV) are produced using standard techniques described in the art. As used herein, for example, rAAV1 may be used to refer an AAV having both capsid proteins and 5′-3′ ITRs from the same serotype or it may refer to an AAV having capsid proteins from serotype 1 and 5′-3′ ITRs from a different AAV serotype, e.g., AAV serotype 2. For each example illustrated herein the description of the vector design and production describes the serotype of the capsid and 5′-3′ ITR sequences.

[0270] An “AAV virus” or “AAV viral particle” refers to a viral particle composed of at least one AAV capsid protein (preferably by all of the capsid proteins of a wild-type AAV) and an encapsidated polynucleotide. If the particle additionally comprises a heterologous polynucleotide (i.e., a polynucleotide other than a wild-type AAV genome to be delivered to a mammalian cell), it is typically referred to as “rAAV”. An exemplary heterologous polynucleotide is a polynucleotide comprising a CasX protein and/or sgRNA and, optionally, a donor template of any of the embodiments described herein.

[0271] By “adeno-associated virus inverted terminal repeats” or “AAV ITRs” is meant the art recognized regions found at each end of the AAV genome which function together in cis as origins of DNA replication and as packaging signals for the virus. AAV ITRs, together with the AAV rep coding region, provide for the efficient excision and rescue from, and integration of a nucleotide sequence interposed between two flanking ITRs into a mammalian cell genome. The nucleotide sequences of AAV ITR regions are known. See, for example Kotin, R. M. (1994) Human Gene Therapy 5:793-801; Berns, K. I. “Parvoviridae and their Replication” in Fundamental Virology, 2^{nd} Edition, (B. N. Fields and D. M. Knipe, eds.). As used herein, an AAV ITR need not have the wild-type nucleotide sequence depicted, but may be altered, e.g., by the insertion, deletion or substitution of nucleotides. Additionally, the AAV ITR may be derived from any of several AAV serotypes, including without limitation, AAV1, AAV2, AAV3, AAV4, AAV5, AAV6, AAV7, AAV8, AAV9, AAV10, AAV-Rh74, and AAVRh10, and modified capsids of these serotypes. Furthermore, 5′ and 3′ ITRs which flank a selected nucleotide sequence in an AAV vector need not necessarily be identical or derived from the same AAV serotype or isolate, so long as they function as intended, i.e., to allow for excision and rescue of the sequence of interest from a host cell genome or vector, and to allow integration of the heterologous sequence into the recipient cell genome when AAV Rep gene products are present in the cell. Use of AAV serotypes for integration of heterologous sequences into a host cell is known in the art (see, e.g., WO2018195555A1 and US20180258424A1, incorporated by reference herein).

[0272] By “AAV rep coding region” is meant the region of the AAV genome which encodes the replication proteins Rep 78, Rep 68, Rep 52 and Rep 40. These Rep expression products have been shown to possess many functions, including recognition, binding and nicking of the AAV origin of DNA replication, DNA helicase activity and modulation of transcription from AAV (or other heterologous) promoters. The Rep expression products are collectively required for replicating the AAV genome. By “AAV cap coding region” is meant the region of the AAV genome which encodes the capsid proteins VP1, VP2, and VP3, or functional homologues thereof. These Cap expression products supply the packaging functions which are collectively required for packaging the viral genome.

[0273] In some embodiments, AAV capsids utilized for delivery of the encoding sequences for the CasX and gRNA, and, optionally, the DMPK donor template nucleotides to a host cell can be derived from any of several AAV serotypes, including without limitation, AAV1, AAV2, AAV3, AAV4, AAV5, AAV6, AAV7, AAV8, AAV9, AAV10, AAV11, AAV12, AAV44.9, AAV-Rh74 (Rhesus macaque-derived AAV), and AAVRh10, and the AAV ITRs are derived from AAV serotype 2. In a particular embodiment, AAV1, AAV7, AAV6, AAV8, or AAV9 are utilized for delivery of the CasX, gRNA, and, optionally, donor template nucleotides, to a host muscle cell.

[0274] In order to produce rAAV viral particles, an AAV expression vector is introduced into a suitable host cell using known techniques, such as by transfection. Packaging cells are typically used to form virus particles; such cells include HEK293 cells (and other cells known in the art), which package adenovirus. A number of transfection techniques are generally known in the art; see, e.g., Sambrook et al. (1989) Molecular Cloning, a laboratory manual, Cold Spring Harbor Laboratories, New York. Particularly suitable transfection methods include calcium phosphate co-precipitation, direct microinjection into cultured cells, electroporation, liposome mediated gene transfer, lipid-mediated transduction, and nucleic acid delivery using high-velocity microprojectiles.

[0275] In an advantage of rAAV constructs of the present disclosure, the smaller size of the CRISPR Type V nucleases; e.g., the CasX of the embodiments, permits the inclusion of all the necessary editing and ancillary expression components into the transgene such that a single rAAV particle can deliver and transduce these components into a target cell in a form that results in the expression of the CRISPR nuclease and gRNA that are capable of effectively modifying the target nucleic acid of the target cell. A representative schematic of such a construct is presented in FIG. 13. This stands in marked contrast to other CRISPR systems, such as Cas9, where typically a two-particle system is employed to deliver the necessary editing components to a target cell. Thus, in some embodiments of the rAAV systems, the disclosure provides; i) a first plasmid comprising the ITRs, sequences encoding the CasX variant, sequences encoding one or more gRNA, a first promoter operably linked to the CasX and a second promoter operably linked to the gRNA, and, optionally, one or more enhancer elements; ii) a second plasmid comprising the rep and cap genes; and iii) a third plasmid comprising helper genes, wherein upon transfection of an appropriate packaging cell, the cell is capable of producing an rAAV having the ability to deliver to a target cell, in a single particle, sequences capable of expressing the CasX nuclease and gRNA having the ability to edit the target nucleic acid of the target cell. In some embodiments of the rAAV systems, the sequence encoding the CRISPR protein and the sequence encoding the at least first gRNA are less than about 3100, less than about 3090, less than about 3080, less than about 3070, less than about 3060, less than about 3050, or less than about 3040 nucleotides in length, such that the sequences encoding the first and second promoter and, optionally, one or more enhance elements can have at least about 1300, at least about 1350, at least about 1360, at least about 1370, at least about 1380, at least about 1390, at least about 1400, at least about 1500, at least about 1600 nucleotides, at least 1650, at least about 1700, at least about 1750, at least about 1800, at least about 1850, or at least about 1900 nucleotides in combined length. In some embodiments of the rAAV systems, the sequence encoding the first promoter and the at least one accessory element have greater than at least about 1300, at least about 1350, at least about 1360, at least about 1370, at least about 1380, at least about 1390, at least about 1400, at least about 1500, at least about 1600 nucleotides, at least 1650, at least about 1700, at least about 1750, at least about 1800, at least about 1850, or at least about 1900 nucleotides in combined length. In some embodiments of the rAAV systems, the sequence encoding the first and second promoters and the at least one accessory element have greater than at least about 1300, at least about 1350, at least about 1360, at least about 1370, at least about 1380, at least about 1390, at least about 1400, at least about 1500, at least about 1600 nucleotides, at least 1650, at least about 1700, at least about 1750, at least about 1800, at least about 1850, or at least about 1900 nucleotides in combined length.

[0276] In some embodiments, host cells transfected with the above-described AAV expression vectors are rendered capable of providing AAV helper functions in order to replicate and encapsidate the nucleotide sequences flanked by the AAV ITRs to produce rAAV viral particles. AAV helper functions are generally AAV-derived coding sequences which can be expressed to provide AAV gene products that, in turn, function in trans for productive AAV replication. AAV helper functions are used herein to complement necessary AAV functions that are missing from the AAV expression vectors. Thus, AAV helper functions include one, or both of the major AAV ORFs (open reading frames), encoding the rep and cap coding regions, or functional homologues thereof. Accessory functions can be introduced into and then expressed in host cells using methods known to those of skill in the art. Commonly, accessory functions are provided by infection of the host cells with an unrelated helper virus. In some embodiments, accessory functions are provided using an accessory function vector. Depending on the host/vector system utilized, any of a number of suitable transcription and translation control elements, including constitutive and inducible promoters, transcription enhancer elements, transcription terminators, etc., may be used in the expression vector. In some embodiments, the disclosure provides host cells comprising the AAV vectors of the embodiments disclosed herein.

[0277] In other embodiments, suitable vectors may include virus-like particles (VLP). Virus-like particles (VLPs) are particles that closely resemble viruses, but do not contain viral genetic material and are therefore non-infectious. In some embodiments, VLPs comprise a polynucleotide encoding a transgene of interest, for example any of the CasX protein and/or a gRNA embodiments, and, optionally, donor template polynucleotides described herein, packaged with one or more viral structural proteins. In other embodiments, the disclosure provides XDPs produced in vitro that comprise a CasX:gRNA RNP complex and, optionally, a donor template. Combinations of structural proteins from different viruses can be used to create XDPs, including components from virus families including Parvoviridae (e.g., adeno-associated virus), Retroviridae (e.g., alpharetrovirus, a betaretrovirus, a gammaretrovirus, a deltaretrovirus, a epsilonretrovirus, or a lentivirus), Flaviviridae (e.g., Hepatitis C virus), Paramyxoviridae (e.g., Nipah) and bacteriophages (e.g., QP, AP205). In some embodiments, the disclosure provides XDP systems designed using components of retrovirus, including lentiviruses (such as HIV) and alpharetrovirus, betaretrovirus, gammaretrovirus, deltaretrovirus, epsilonretrovirus, in which individual plasmids comprising polynucleotides encoding the various components are introduced into a packaging cell that, in turn, produce the XDP. In some embodiments, the disclosure provides XDP comprising one or more components of i) protease, ii) a protease cleavage site, iii) one or more components of a gag polyprotein selected from a matrix protein (MA), a nucleocapsid protein (NC), a capsid protein (CA), a p1 peptide, a p6 peptide, a P2A peptide, a P2B peptide, a P10 peptide, a p12 peptide, a PP 21/24 peptide, a P12/P3/P8 peptide, and a P20 peptide; v) CasX; vi) gRNA, and vi) targeting glycoproteins or antibody fragments wherein the resulting XDP particle encapsidates a CasX:gRNA RNP. The polynucleotides encoding the Gag, CasX and gRNA can further comprise paired components designed to assist the trafficking of the components out of the nucleus of the host cell and into the budding XDP. Non-limiting examples of such trafficking components include hairpin RNA such as MS2 hairpin, PP7 hairpin, QP hairpin, and U1 hairpin II that have binding affinity for MS2 coat protein, PP7 coat protein, QP coat protein, and U1A signal recognition particle, respectively. In other embodiments, the gRNA can comprise Rev response element (RRE) or portions thereof that have binding affinity to Rev, which can be linked to the Gag polyprotein. In other embodiments, the gRNA can comprise one or more RRE and one or more MS2 hairpin sequences. In other embodiments, the gRNA can comprise Rev response element (RRE) or portions thereof that have binding affinity to Rev, which can be linked to the Gag polyprotein. The RRE can be selected from the group consisting of Stem IIB of Rev response element (RRE), Stem II-V of RRE, Stem II of RRE, Rev-binding element (RBE) of Stem IIB, and full-length RRE. In the foregoing embodiment, the components include sequences of

UGGGCGCAGCGUCAAUGACGCUGACGGUACA (Stem IIB; SEQ ID NO: 27266), GCACUAUGGGCGCAGCGUCAAUGACGCUGACGGUACAGGCCAGACAAUUAUUGU CUGGUAUAGUGC (Stem II; SEQ ID NO: 27267), GCUGACGGUACAGGC (RBE, SEQ ID NO: 27268), CAGGAAGCACUAUGGGCGCAGCGUCAAUGACGCUGACGGUACAGGCCAGACAAU UAUUGUCUGGUAUAGUGCAGCAGCAGAACAAUUUGCUGAGGGCUAUUGAGGCGC AACAGCAUCUGUUGCAACUCACAGUCUGGGGCAUCAAGCAGCUCCAGGCAAGAA UCCUG (Stem II-V; SEQ ID NO: 27269), and AGGAGCUUUGUUCCUUGGGUUCUUGGGAGCAGCAGGAAGCACUAUGGGCGCAGC GUCAAUGACGCUGACGGUACAGGCCAGACAAUUAUUGUCUGGUAUAGUGCAGCA GCAGAACAAUUUGCUGAGGGCUAUUGAGGCGCAACAGCAUCUGUUGCAACUCAC AGUCUGGGGCAUCAAGCAGCUCCAGGCAAGAAUCCUGGCUGUGGAAAGAUACCU AAAGGAUCAACAGCUCCU (full-length RRE; SEQ ID NO: 27270). In other embodiments, the gRNA can comprise one or more RRE and one or more MS2 hairpin sequences. In a particular embodiment, the gRNA comprises an MS2 hairpin variant that is optimized to increase the binding affinity to the MS2 coat protein, thereby enhancing the incorporation of the gRNA and associated CasX into the budding XDP. gRNA variants comprising MS2 hairpin variants include gRNA variants 275-315 and 317-320 (SEQ ID NOS: 2722-27264).

[0278] The targeting glycoproteins or antibody fragments on the surface that provides tropism of the XDP to the target cell, wherein upon administration and entry into the target cell, the RNP molecule is free to be transported into the nucleus of the cell. The envelope glycoprotein can be derived from any enveloped viruses known in the art to confer tropism to XDP, including but not limited to the group consisting of Argentine hemorrhagic fever virus, Australian bat virus, Autographa californica multiple nucleopolyhedrovirus, Avian leukosis virus, baboon endogenous virus, Bolivian hemorrhagic fever virus, Borna disease virus, Breda virus, Bunyamwera virus, Chandipura virus, Chikungunya virus, Crimean-Congo hemorrhagic fever virus, Dengue fever virus, Duvenhage virus, Eastern equine encephalitis virus, Ebola hemorrhagic fever virus, Ebola Zaire virus, enteric adenovirus, Ephemerovirus, Epstein-Bar virus (EBV), European bat virus 1, European bat virus 2, Fug Synthetic gP Fusion, Gibbon ape leukemia virus, Hantavirus, Hendra virus, hepatitis A virus, hepatitis B virus, hepatitis C virus, hepatitis D virus, hepatitis E virus, hepatitis G Virus (GB virus C), herpes simplex virus type 1, herpes simplex virus type 2, human cytomegalovirus (HHV5), human foamy virus, human herpesvirus (HHV), human Herpesvirus 7, human herpesvirus type 6, human herpesvirus type 8, human immunodeficiency virus 1 (HIV-1), human metapneumovirus, human T-lymphotropic virus 1, influenza A, influenza B, influenza C virus, Japanese encephalitis virus, Kaposi's sarcoma-associated herpesvirus (HHV8), Kaysanur Forest disease virus, La Crosse virus, Lagos bat virus, Lassa fever virus, lymphocytic choriomeningitis virus (LCMV), Machupo virus, Marburg hemorrhagic fever virus, measles virus, Middle eastern respiratory syndrome-related coronavirus, Mokola virus, Moloney murine leukemia virus, monkey pox, mouse mammary tumor virus, mumps virus, murine gammaherpesvirus, Newcastle disease virus, Nipah virus, Nipah virus, Norwalk virus, Omsk hemorrhagic fever virus, papilloma virus, parvovirus, pseudorabies virus, Quaranfil virus, rabies virus, RD 114 Endogenous Feline Retrovirus, respiratory syncytial virus (RSV), Rift Valley fever virus, Ross River virus, rRotavirus, Rous sarcoma virus, rubella virus, Sabia-associated hemorrhagic fever virus, SARS-associated coronavirus (SARS-CoV), Sendai virus, Tacaribe virus, Thogotovirus, tick-borne encephalitis causing virus, varicella zoster virus (HHV3), varicella zoster virus (HHV3), variola major virus, variola minor virus, Venezuelan equine encephalitis virus, Venezuelan hemorrhagic fever virus, vesicular stomatitis virus (VSV), VSV-G, Vesiculovirus, West Nile virus, western equine encephalitis virus, and Zika Virus.

[0279] In other embodiments, the disclosure provides XDP of the foregoing and further comprises one or more components of a pol polyprotein (e.g., a protease), and, optionally, a second CasX or a donor template. The disclosure contemplates multiple configurations of the arrangement of the encoded components, including duplicates of some of the encoded components. The foregoing offers advantages over other vectors in the art in that viral transduction to dividing and non-dividing cells is efficient and that the XDP delivers potent and short-lived RNP that escape a subject's immune surveillance mechanisms that would otherwise detect a foreign protein. Non-limiting, exemplary XDP systems are described in PCT/US20/63488 and WO2021113772A1, incorporated by reference herein. In some embodiments, the disclosure provides host cells comprising polynucleotides or vectors encoding any of the foregoing XDP embodiments.

[0280] Upon production and recovery of the XDP comprising the CasX:gRNA RNP of any of the embodiments described herein, the XDP can be used in methods to edit target cells of subjects by the administering of such XDP, as described more fully, below.

### VII. Cells

[0281] In another aspect, provided herein are populations of cells comprising a BCL11A gene modified ex vivo by embodiments of any of the systems or methods described herein. In some embodiments, cells that have been genetically modified in this way may be administered to a subject for purposes such as gene therapy; e.g., in methods of treatment of a hemoglobinopathy-related disease, such as sickle cell disease or beta-thalassemia wherein the administration results in an increased expression of γ-globin and an increase of fetal hemoglobin (HbF) in the subject. In other embodiments, the disclosure provides compositions of modified cells for use as a medicament in the treatment of a hemoglobinopathy-related disease.

[0282] Cells of the present disclosure suitable for ex vivo modification of the BCL11A gene by a Class 2, Type V Cas nuclease and one or more guides targeted to the BCL11A target nucleic acid can be a hematopoietic progenitor cell (HPC), a hematopoietic stem cell (HSC), a CD34+ cell, a mesenchymal stem cell (MSC), an induced pluripotent stem cell (iPSC), a common myeloid progenitor cell, a proerythroblast cell, or an erythroblast cell. In some embodiments, the population of modified cells are animal cells; for example, derived from a rodent, rat, mouse, rabbit, dog cell, or a non-human primate cell; e.g., a cynomolgus monkey cell. In some embodiments, the cell is a human cell. In some cases, the cells to be modified are autologous with respect to the subject to be administered the cells. In other cases, the cells are allogeneic with respect to the subject to be administered the cells. In some cases, the ex vivo cell is isolated from the subject's bone marrow or peripheral blood.

[0283] In some embodiments, the disclosure provides methods and populations of cells modified by introducing into each cell of the population: i) a CasX:gRNA system comprising a CasX and a gRNA of any one of the embodiments described herein; ii) a CasX:gRNA system comprising a CasX, a gRNA, and a donor template of any one of the embodiments described herein; iii) a nucleic acid encoding the CasX and the gRNA, and optionally comprising the donor template; iv) a vector comprising the nucleic acid of (iii), above, which can be an AAV of any of the embodiments described herein; v) a XDP comprising the CasX:gRNA system of any one of the embodiments described herein; or vi) combinations of two or more of (i) to (v), wherein the BCL11A target nucleic acid sequence of the cells targeted by the gRNA is modified by the CasX protein and, optionally, the donor template. In some embodiments, the method further comprises administering a second gRNA or a nucleic acid encoding the second gRNA, wherein the second gRNA has a targeting sequence complementary to a different or overlapping portion of the target nucleic acid sequence compared to the first gRNA. In some cases, the CasX and gRNA are delivered to the cells of the population as an RNP (embodiments of which are described herein, supra), and, optionally, the donor template. In some embodiments, the disclosure provides a population of cells modified by the foregoing methods wherein the cells have been modified such that at least 60%, at least 70%, at least 75%, at least 80%, at least 85%, at least 90%, or at least 95% of the modified cells do not express a detectable level of BCL11A protein. In other embodiments, the disclosure provides a population of cells wherein the cells have been modified such that the expression of BCL11A protein is reduced by at least 70%, at least 75%, at least 80%, at least 85%, at least 90%, or at least 95% compared to cells that have not been modified. In still other embodiments, the disclosure provides a population of cells wherein expression of the BCL11A protein cannot be detected in the modified cells of the population. The effects of the modification can be assessed by Western blots, flow cytometry, ELISA, cell-based assays, qRT-PCR, electrochemiluminescence assays, sense transcripts can be analyzed by RNA fluorescence in situ hybridization (FISH) assay, or other methods know in the art, or as described in the Examples.

[0284] In some embodiments, the disclosure provides methods of modifying a BCL11A target nucleic acid in a population of cells by in vitro or ex vivo methods. The method provides that the cells can be obtained from a subject using any number of techniques known to the skilled artisan; e.g., a biopsy of the marrow or by obtaining a sample of the peripheral blood. The desired cells may be separated from the remainder of the sample, washed to remove fluids and debris and, optionally, placed in an appropriate buffer or media for subsequent processing steps. The method may include one or more steps of i) introducing into the cells the CasX:gRNA system components for the editing of the target nucleic acids; ii) introducing into the cells a nucleic acid or vector encoding the CasX:gRNA system components to the cells; iii) expansion of the cells in an appropriate medium under conditions suitable for their propagation, and iv) cryopreservation of the cells for subsequent administration to the subject. Thus, the CasX:gRNA systems and methods described herein can be used to modify a variety of cells associated with the hemoglobinopathy to produce populations of cells in which the expression of the BCL11A protein is reduced or eliminated and HbF is increased. This approach, therefore, could be used for methods of treatment in a subject with a hemoglobinopathy such as sickle cell anemia or beta-thalassemia, amongst others. In some cases, the cells are contacted with a CasX and a gRNA wherein the gRNA is a guide RNA (gRNA). In other cases, the cells are contacted with a CasX and a gRNA wherein the gRNA is a chimera comprising DNA and RNA. As described herein, in embodiments of any of the combinations, each of said gRNA molecules (a combination of the scaffold and targeting sequence, which can be configured as a sgRNA or a dgRNA) can be provided as an RNP with a CasX embodiment described herein for incorporation into the cells to be modified. In one embodiment, the target nucleic acid of the cell is modified by contacting the cells with a CasX protein, a guide nucleic acid (gRNA) comprising a targeting sequence complementary to the BCL11A target nucleic acid, and a donor template wherein the donor template is inserted into or replaces a portion of the target nucleic acid sequence of the cell such that the BCL11A protein is not expressed or is expressed at a reduced level. In other cases, the CasX and gRNA are delivered to the cells of the population in a vector (embodiments of which are described herein, supra), wherein the target nucleic acid is modified such that the BCL11A protein is not expressed or is expressed at a reduced level.

[0285] In some embodiments, the cells of the population are contacted with a CasX variant comprising a sequence of Table 4 or a sequence at least 65% identical, at least 70% identical, at least 75% identical, at least 80% identical, at least 81% identical, at least 82% identical, at least 83% identical, at least 84% identical, at least 85% identical, at least 86% identical, at least 86% identical, at least 87% identical, at least 88% identical, at least 89% identical, at least 89% identical, at least 90% identical, at least 91% identical, at least 92% identical, at least 93% identical, at least 94% identical, at least 95% identical, at least 96% identical, at least 97% identical, at least 98% identical, at least 99% identical, or at least 99.5% identical thereto, the gRNA scaffold comprises a sequence of Table 3 or a sequence at least 65% identical, at least 70% identical, at least 75% identical, at least 80% identical, at least 81% identical, at least 82% identical, at least 83% identical, at least 84% identical, at least 85% identical, at least 86% identical, at least 86% identical, at least 87% identical, at least 88% identical, at least 89% identical, at least 89% identical, at least 90% identical, at least 91% identical, at least 92% identical, at least 93% identical, at least 94% identical, at least 95% identical, at least 96% identical, at least 97% identical, at least 98% identical, at least 99% identical, at least 99.5% identical thereto, and the gRNA comprises a targeting sequence selected from the group consisting of SEQ ID NOS: 272-2100 and 2286-26789 of Table 1 or a sequence at least 65% identical, at least 70% identical, at least 75% identical, at least 80% identical, at least 85% identical, at least 90% identical, or at least 95% identical thereto and having between 15 and 20 amino acids. In other cases, the CasX and the one or more gRNA are introduced into the population of cells as encoding polynucleotides using a vector; embodiments of which are described herein. Additional methods of modification of the cells using the CasX:gRNA system components include viral infection, transfection, conjugation, protoplast fusion, particle gun technology, calcium phosphate precipitation, direct microinjection, and the like. The choice of method is generally dependent on the type of cell being transformed and the circumstances under which the transformation is taking place; e.g., in vitro, ex vivo, or in vivo. A general discussion of these methods can be found in Ausubel, et al, Short Protocols in Molecular Biology, 3rd ed., Wiley & Sons, 1995.

[0286] Upon hybridization with the target nucleic acid by the CasX and the gRNA, the CasX introduces one or more single-strand breaks or double-strand breaks within the BCL11A gene that results in a modification of the target nucleic acid such as a permanent indel (deletion or insertion) or other mutation (e.g., substitution, duplication, or inversion) in the target nucleic acid that, in connection with the repair mechanisms of the host cell, results in a corresponding reduction or elimination of the expression of functional BCL11A protein, thereby creating the modified population of cells. As described herein, a CasX variant introducing double-stranded cleavage of the target nucleic acid generates a double-stranded break within 18-26 nucleotides 5′ of a PAM site on the target strand and 10-18 nucleotides 3′ on the non-target strand. Thus, in some embodiments, the resulting modification by the method can result in random insertions or deletions (indels), or a substitution, duplication, or inversion of one or more nucleotides in those region by non-homologous DNA end joining (NHEJ) repair mechanisms.

[0287] In some embodiments of the method of modifying a population of cells, the first gRNA comprises a targeting sequence complementary to a sequence proximal to or within any one of BCL11A gene exons. In one embodiment, the first gRNA comprises a targeting sequence complementary to a sequence proximal to or within or adjacent to any one of the regulatory elements of the BCL11A gene. In a particular embodiment, the first gRNA comprises a targeting sequence complementary to a sequence within or 5′ adjacent to the GATA1 binding motif sequence of the BCL11A gene. In a particular embodiment, the targeting sequence is SEQ ID NO: 22. By the foregoing, disruption of the target nucleic acid sequence results in a modification of the BCL11A gene such that expression of functional BCL11A protein is reduced or eliminated in the modified cells of the population.

[0288] In some embodiments of the method, the target nucleic acid of the cells of the population is modified using a plurality of gRNAs (e.g., two, three, four or more) targeted to different or overlapping portions of the BCL11A gene wherein the CasX protein introduces multiple breaks in the target nucleic acid sequence that result in a permanent indel (deletion or insertion) or other mutations (e.g., a substitution, duplication, or inversion of one or more nucleotides) such that expression of functional BCL11A protein is reduced or eliminated in the modified cells of the population.

[0289] In other embodiments, disclosure provides populations of cells modified by contacting the cell with a CasX protein, one or more gRNA comprising a targeting sequence, and a donor template of any of the embodiments described herein wherein the donor template is inserted into the break sites introduced by the nuclease, replacing all or a portion of the target nucleic acid sequence of the BCL11A gene to be modified. In one embodiment of the foregoing, the donor template comprises at least a portion of a BCL11A exon and one or more mutations and the modification of the cell results in a modification of the gene such that expression of functional BCL11A protein is reduced or eliminated in the modified cells of the population. In another embodiment of the foregoing, the donor template comprises a sequence within or 5′ adjacent to the GATA1 binding motif sequence but having one or more mutations relative to the wild-type sequence and the modification of the cell results in a reduction or elimination of expression of functional BCL11A protein in the modified cells of the population. It will be understood that in such cases, the donor template replacements are larger in the 5′ and 3′ direction than the location of the cleavage sites introduced by the nuclease in the specific portions of the target nucleic acid to be replaced and would further comprise homologous arms that are 5′ and 3′ to the cleavage sites introduced by the nuclease to facilitate its insertion. In some cases, the donor template is a single-stranded DNA template or a single stranded RNA template. In other cases, the donor template is a double-stranded DNA template. The insertion of the donor template at the target region which can be mediated by homology-directed repair (HDR, as described, supra) or homology-independent targeted integration (HITI). The exogenous sequence inserted by HITI can be any length, for example, a relatively short sequence of between 10 and 50 nucleotides in length, or a longer sequence of about 50-1000 nucleotides in length. The donor template sequence may comprise certain sequence differences as compared to the genomic sequence, e.g., restriction sites, nucleotide polymorphisms, barcodes, selectable markers (e.g., drug resistance genes, fluorescent proteins, enzymes etc.), etc., which may be used to assess for successful insertion of the donor nucleic acid at the cleavage site or, in some cases, may be used for other purposes (e.g., to signify expression at the targeted genomic locus). Alternatively, these sequence differences may include flanking recombination sequences such as FLPs, loxP sequences, or the like, that can be activated at a later time for removal of the marker sequence.

[0290] In some embodiments of the method of modifying the population of cells, the method further comprises contacting the BCL11A gene target nucleic acid sequence of the population of cells with: i) an additional CRISPR nuclease and a gRNA targeting a different or overlapping portion of the BCL11A target nucleic acid compared to the first gRNA; ii) a polynucleotide encoding the additional CRISPR nuclease and the gRNA of (i); iii) a vector comprising the polynucleotide of (ii); or iv) a XDP comprising the additional CRISPR nuclease and the gRNA of (i), wherein the contacting results in modification of the BCL11A gene at a different location in the sequence compared to the sequence targeted by the first gRNA. In one embodiment of the foregoing, the additional CRISPR nuclease is a CasX protein having a sequence different from the CasX protein of the previous embodiments. In another embodiment of the foregoing, the additional CRISPR nuclease is not a CasX protein and is selected from the group consisting of Cas9, Cas12a, Cas12b, Cas12c, Cas12d (CasY), Cas12j, Cask, Cas13a, Cas13b, Cas13c, Cas13d, Cas14, Cpf1, C2cl, Csn2, and sequence variants thereof.

[0291] In other embodiments, the disclosure provides methods of modifying a BCL11A target nucleic acid in a population of cells in vivo in a subject. In one embodiment of the method of in vivo modification, the method comprises administration of a vector of the embodiments described herein to the subject at a therapeutically effective dose. In some embodiments, the vector is administered to the subject at a dose of at least about 1×10⁵ vector genomes (vg/kg), at least about 1×10⁶ vg/kg, at least about 1×10⁷ vg/kg, at least about 1×10⁸ vg/kg, at least about 1×10⁹ vg/kg, at least about 1×10¹⁰ vg/kg, at least about 1×10¹¹ vg/kg, at least about 1×10¹² vg/kg, at least about 1×10¹³ vg/kg, at least about 1×10¹⁴ vg/kg, at least about 1×10¹⁵ vg/kg, or at least about 1×10¹⁶ vg/kg. In other embodiments, the vector is administered to the subject at a dose of at least about 1×10⁵ vg/kg to at least about 1×10¹⁶ vg/kg, or at least about 1×10⁶ vg/kg to about 1×10¹⁵ vg/kg, or at least about 1×10⁷ vg/kg to about 1×10¹⁴ vg/kg, or at least about 1×10⁸ vg/kg to about 1×10¹⁴ vg/kg. In another embodiment of the method of in vivo modification, the method comprises administration of a XDP to the subject at a therapeutically effective dose, wherein the XDP comprises a CasX and gRNA complexed in an RNP and, optionally, a donor template (described more fully, supra), wherein the XDP has tropism for the target cells and is able to deliver the RNP for the editing of the BCL11A gene, as described herein. The XDP embodiments utilized in the foregoing method of editing are described herein. In one embodiment, the XDP is administered to the subject at a dose of at least about 1×10⁵ particles/kg, at least about 1×10⁶ particles/kg, at least about 1×10⁷ particles/kg at least about 1×10⁸ particles/kg, at least about 1×10⁹ particles/kg, at least about 1×10¹⁰ particles/kg, at least about 1×10¹¹ particles/kg, at least about 1×10¹² particles/kg, at least about 1×10¹³ particles/kg, at least about 1×10¹⁴ particles/kg, at least about 1×10¹⁵ particles/kg, at least about 1×10¹⁶ particles/kg, or at least about 1×10⁶ particles/kg to about 1×10¹⁵ particles/kg, or at least about 1×10⁷ particles/kg to about 1×10¹⁴ particles/kg. In the foregoing embodiments of the paragraph, the vector or XDP is administered to the subject by a route of administration selected from intraparenchymal, intravenous, intra-arterial, intraperitoneal, intracapsular, subcutaneously, intramuscularly, intraabdominally, or combinations thereof, wherein the administering method is injection, transfusion, or implantation.

### VIII Therapeutic Methods

[0292] In another aspect, the present disclosure relates to methods of treating a hemoglobinopathy-related disease in a subject in need thereof, including but not limited to sickle-cell disease or beta-thalassemia in which repression or elimination of expression of the BCL11A protein by modifying the BCL11A gene in target cells of the subject ameliorates the signs, symptoms, or effects of the disease, notwithstanding that the subject may still be afflicted with the underlying disease.

[0293] A number of therapeutic strategies have been used to design the compositions for use in the methods of treatment of a subject with a hemoglobinopathy-related disease. In some embodiments, the method comprises administering to the subject having a hemoglobinopathy (e.g., sickle cell anemia or beta-thalassemia) a therapeutically effective dose of a Class 2, Type V CRISPR nuclease and guide RNA disclosed herein. In some embodiments, the method of treatment comprises administering to the subject a therapeutically effective dose of: i) the CasX:gRNA system comprising a first CasX protein and a first gRNA with a targeting sequence complementary to the target nucleic acid; ii) the CasX:gRNA system comprising a first CasX protein and a first gRNA with a targeting sequence complementary to the target nucleic acid and a donor template; iii) a nucleic acid encoding the CasX:gRNA system of (i) or (ii); iv) a vector comprising the nucleic acid of (iii), which can be an AAV of any of the embodiments described herein; v) a XDP comprising the CasX:gRNA system of (i) or (ii); or vi) combinations of two or more of (i)-(v), wherein 1) the BCL11A gene of the cells of the subject targeted by the first gRNA is modified (e.g., knocked-down or knocked-out) by the CasX protein and, optionally, the donor template; and 2) an increase in production of hemoglobin F (HbF) results in the subject. In some embodiments, the method of treating further comprises administering a second gRNA or a nucleic acid encoding the second gRNA, wherein the second gRNA has a targeting sequence complementary to a different or overlapping portion of the target nucleic acid sequence compared to the first gRNA. In some cases, the cells targeted for modification are selected from the group consisting of hematopoietic stem cells (HSC), hematopoietic progenitor cells (HPC), CD34+ cells, mesenchymal stem cells (MSC), induced pluripotent stem cells (iPSC), common myeloid progenitor cells, proerythroblast cells, and erythroblast cells. In some embodiments, the subject to be treated is selected from the group consisting of rodent, mouse, rat, and non-human primate. In another embodiment, the subject is a human.

[0294] In some embodiments of the method of treatment, the vector is an AAV vector encoding the CasX:gRNA system, and is administered to the subject at a dose of at least about 1×10⁵ vector genomes/kg (vg/kg), at least about 1×10⁶ vg/kg, at least about 1×10⁷ vg/kg, at least about 1×10⁸ vg/kg, at least about 1×10⁹ vg/kg, at least about 1×10¹⁰ vg/kg, at least about 1×10¹¹ vg/kg, at least about 1×10¹² vg/kg, at least about 1×10¹³ vg/kg, at least about 1×10¹⁴ vg/kg, at least about 1×10¹⁵ vg/kg, or at least about 1×10¹⁶ vg/kg. In other embodiments of the method, the AAV vector is administered to the subject at a dose of at least about 1×10⁵ vg/kg to about 1×10¹⁶ vg/kg, at least about 1×10⁶ vg/kg to about 1×10¹⁵ vg/kg, or at least about 1×10⁷ vg/kg to about 1×10¹⁴ vg/kg. In other embodiments, the method of treatment comprises administering a therapeutically effective dose of a XDP comprising the CasX:gRNA system to the subject. In one embodiment, the XDP is administered to the subject at a dose of at least about 1×10⁵ particles/kg, at least about 1×10⁶ particles/kg, at least about 1×10⁷ particles/kg at least about 1×10⁸ particles/kg, at least about 1×10⁹ particles/kg, at least about 1×10¹⁰ particles/kg, at least about 1×10¹¹ particles/kg, at least about 1×10¹² particles/kg, at least about 1×10¹³ particles/kg, at least about 1×10¹⁴ particles/kg, at least about 1×10¹⁵ particles/kg, at least about 1×10¹⁶ particles/kg. In another embodiment, the XDP is administered to the subject at a dose of at least about 1×10⁵ particles/kg to about 1×10¹⁶ particles/kg, or at least about 1×10⁶ particles/kg to about 1×10¹⁵ particles/kg, or at least about 1×10⁷ particles/kg to about 1×10¹⁴ particles/kg. In the foregoing embodiments of the paragraph, the vector or XDP is administered to the subject by a route of administration selected from intraparenchymal, intravenous, intra-arterial, intraperitoneal, intracapsular, subcutaneously, intramuscularly, intraabdominally, or combinations thereof, wherein the administering method is injection, transfusion, or implantation. The administration can be once, twice, or can be administered multiple times using a regimen schedule of weekly, every two weeks, monthly, quarterly, or every six months.

[0295] In some embodiments, the method of treatment comprises administering a vector comprising a polynucleotide encoding a CasX and a plurality of gRNAs targeted to different or overlapping regions of the BCL11A gene to a subject, wherein the administration results in contacting the subject target nucleic acid sequence with the expression product(s) of the vectors within a cell of the subject, and wherein the BCL11A gene is modified in the cell of the subject. In other embodiments of the methods of treatment, the methods comprise administering to a subject a vector encoding the CasX protein and the gRNA, and further comprising a donor template, wherein said administering results in modification of the target nucleic acid sequence of a cell of the subject by cleavage by the CasX protein and insertion of the donor template into the target nucleic acid. In other embodiments, the methods comprise administering a first vector comprising a polynucleotide encoding a CasX and a plurality of gRNAs targeted to different or overlapping sequences of the BCL11A gene and a second vector comprising a donor template polynucleotide encoding at least a portion of or the entirety of a BCL11A gene to a subject, wherein the administration of the vectors results in contacting the subject target nucleic acid sequence within a cell of the subject with the expression product(s) of the CasX and gRNA vectors and the donor template, wherein the BCL11A gene is modified in the cell of the subject, as described herein. In some embodiments of the methods of treatment, the vector administered to the subject is an AAV vector as described herein. In the foregoing, the AAV vector is selected from AAV1, AAV2, AAV3, AAV4, AAV5, AAV6, AAV7, AAV8, AAV9, AAV10, AAV-Rh74, or AAVRh10. In some embodiments of the methods of treatment, the vector administered to the subject is a XDP as described herein, comprising an RNP of a CasX:gRNA system.

[0296] In some embodiments of the method, the modifying comprises introducing a single-stranded break in the BCL11A gene of the cells of a population. In other cases, the modifying comprises introducing a double-stranded break in the BCL11A gene of the cells of a population. In some embodiments, the modifying introduces one or more mutations in the BCL11A target nucleic acid, such as an insertion, deletion, substitution, duplication, or inversion of one or more nucleotides in the BCL11A gene, wherein expression of BCL11A protein in the cells of the subject is reduced by at least about 10%, at least about 20%, at least about 30%, at least about 40%, at least about 50%, at least about 60%, at least about 70%, at least about 80%, or at least about 90% in comparison to a cell that has not been modified. In some cases, the BCL11A gene of the cells of the subject are modified such that at least 70%, at least 75%, at least 80%, at least 85%, at least 90%, or at least 95% of the modified cells do not express a detectable level of BCL11A protein. In other cases of the method of treatment, the modifying results in an increased production of HbF in the circulating blood of the subject of at least about 5%, at least about 10%, at least about 20%, at least about 30%, at least about 40%, or at least about 50% compared to the levels of HbF in the subject prior to treatment. In other embodiments, the method results in a ratio of HbF to hemoglobin S (HbS) in the circulating blood of the subject of at least 0.01:1.0, at least 0.025:1.0, at least 0.05:1.0, at least 0.075:1.0 at least 0.1:1.0, at least 0.2:1.0, at least 0.3:1.0, at least 0.4:1.0, at least 0.5:1:0, at least 0.75:1.0, at least 1.0:1.0, at least 1.25:1.0, at least 1.5:1.0, or at least 1.75:1.0. In other embodiments, the method results in HbF levels of at least about 5%, or at least about 10%, or at least about 20%, or at least about 30% of total hemoglobin in the circulating blood of the subject. In the foregoing embodiments, the subject is selected from the group consisting of mouse, rat, pig, non-human primate, and human. Methods of obtaining samples from treated subjects for analysis to determine the effectiveness of the treatment, such as body fluids or tissues, and methods of preparation of the samples to allow for analysis are well known to those skilled in the art. Methods for analysis of RNA and protein levels are discussed above and are well known to those skilled in the art. The effects of treatment can also be assessed by measuring biomarkers associated with the target gene expression in the aforementioned fluids, tissues or organs, collected from an animal contacted with one or more compounds of the invention, by routine clinical methods known in the art. Biomarkers of hemoglobinopathy diseases include, but are not limited to, percentage of sickle cells in circulating blood, BCL11A levels, BCL11A RNA, hemoglobin S levels, hemoglobin-gamma levels, and hemoglobin F levels.

[0297] In some cases, the method of treating a hemoglobinopathy in a subject further comprises administering a therapeutically effective dose of an additional CRISPR nuclease, or a polynucleotide encoding the additional CRISPR nuclease. In one embodiment, the additional CRISPR nuclease is a CasX protein having a sequence different from the first CasX. In another embodiment, the additional CRISPR nuclease is not a CasX protein; i.e., is a Cas9, Cas12a, Cas12b, Cas12c, Cas12d (CasY), Cas12j, Cas12k, Cas13a, Cas13b, Cas13c, Cas13d, Cas14, Cpf1, C2cl, Csn2, or is a sequence variant thereof. In some embodiments, the method of treating a hemoglobinopathy in a subject further comprises administering a chemotherapeutic agent.

[0298] In other embodiments, the disclosure provides methods of treating a hemoglobinopathy-related disease in a subject in need thereof by the administration to the subject of a therapeutically effective amount of a population of cells modified in vitro or ex vivo by CasX:gRNA system compositions of the embodiments described herein, including i) the CasX:gRNA system comprising a first CasX protein and a first gRNA with a targeting sequence complementary to the target nucleic acid; ii) the CasX:gRNA system comprising a first CasX protein and a first gRNA with a targeting sequence complementary to the target nucleic acid and a donor template; iii) a nucleic acid encoding the CasX:gRNA system of (i) or (ii); iv) a vector comprising the nucleic acid of (iii), which can be an AAV of any of the embodiments described herein; v) a XDP comprising the CasX:gRNA system of (i) or (ii); or vi) combinations of two or more of (i)-(v). In one embodiment, the method of treatment comprises: i) isolating induced pluripotent stem cells (iPSC) or hematopoietic stem cells (HSC) from a subject; ii) modifying the BCL11A target nucleic acid of the iPSC or HSC by the methods of any of the embodiments described herein; iii) differentiating the modified iPSC or HSC into a hematopoietic progenitor cell; and iv) implanting the hematopoietic progenitor cell into the subject with the hemoglobinopathy, wherein the method results in an increased levels of hemoglobin F (HbF) in circulating blood of the subject of at least about 5%, at least about 10%, at least about 20%, at least about 30%, at least about 40%, or at least about 50% compared to the levels of HbF in the subject prior to treatment. In some cases, the cells are autologous with respect to the subject to be administered the cells and are isolated from the subject's bone marrow or peripheral blood. In other cases, the cells are allogeneic with respect to the subject to be administered the cells and are isolated from a different subject's bone marrow or peripheral blood. The modified cells can be implanted into the subject by transplantation, local injection, systemic infusion, or combinations thereof. The methods to modify the cells for administration to a subject have been described herein, but, briefly, the modifying comprises contacting the cells with: i) the CasX:gRNA system comprising a first CasX protein and a first gRNA with a targeting sequence complementary to the target nucleic acid; ii) the CasX:gRNA system comprising a first CasX protein and a first gRNA with a targeting sequence complementary to the target nucleic acid and a donor template; iii) a nucleic acid encoding the CasX:gRNA system of (i) or (ii); iv) a vector comprising the nucleic acid of (iii), which can be an AAV of any of the embodiments described herein; v) a XDP comprising the CasX:gRNA system of (i) or (ii); or vi) combinations of two or more of (i)-(v), wherein expression of the BCL11A protein is reduced or the cell does not express a detectable level of the BCL11A protein. In some embodiments, the method further comprises administering a second gRNA or a nucleic acid encoding the second gRNA, wherein the second gRNA has a targeting sequence complementary to a different or overlapping portion of the target nucleic acid sequence compared to the first gRNA. In some cases, the CasX and gRNA is delivered to the cells of the population as an RNP (embodiments of which are described herein, supra), and, optionally, the donor template, wherein the target nucleic acid is modified such that the BCL11A protein is not expressed or is expressed at a reduced level. In other cases, the CasX and gRNA is delivered to the cells of the population in a vector (embodiments of which are described herein, supra), wherein the target nucleic acid is modified such that the BCL11A protein is not expressed or is expressed at a reduced level. In some embodiments, the cells of the population to be modified by the administration of the compositions are eukaryotic cells selected from the group consisting of rodent cells, mouse cells, rat cells, and non-human primate cells. In some embodiments, the eukaryotic cells are human cells. In some embodiments, the eukaryotic cell is selected from the group consisting of a hematopoietic stem cell (HSC), a hematopoietic progenitor cell (HPC), a CD34+ cell, a mesenchymal stem cell (MSC), induced pluripotent stem cell (iPSC), a common myeloid progenitor cell, a proerythroblast cell, and an erythroblast cell. In some embodiments of the method, the cells or their progeny administered to the subject persist in the subject for at least one month, two month, three months, four months, five months, six months, seven months, eight months, nine months, ten months, eleven months, twelve months, thirteen months, fourteen month, fifteen months, sixteen months, seventeen months, eighteen months, nineteen months, twenty months, twenty-one months, twenty-two months, twenty-three months, two years, three years, four years, or five years after administration to the subject. In some embodiments, the methods of treatment of the disclosure result in an increased levels of hemoglobin F (HbF) in circulating blood of at least about 5%, at least about 10%, at least about 20%, at least about 30%, at least about 40%, or at least about 50% compared to the levels of HbF in the subject prior to treatment. In other embodiments, the method results in a ratio of HbF to hemoglobin S (HbS) in the subject of at least 0.01:1.0, at least 0.025:1.0, at least 0.05:1.0, at least 0.075:1.0 at least 0.1:1.0, at least 0.2:1.0, at least 0.3:1.0, at least 0.4:1.0, at least 0.5:1:0, at least 0.75:1.0, at least 1.0:1.0, at least 1.25:1.0, at least 1.5:1.0, or at least 1.75:1.0. In other embodiments, the method results in HbF levels of at least about 5%, or at least about 10%, or at lease about 20%, or at least about 30% of total circulating hemoglobin in the subject.

[0299] In other embodiments, the disclosure provides methods of increasing fetal hemoglobin (HbF) in a subject having a hemoglobinopathy by genome editing, the method comprising: i) administering to the subject an effective dose of a vector or a XDP embodiment described herein, wherein the vector or XDP delivers the CasX:gRNA system to cells of the subject; ii) the BCL11A target nucleic acid of cells of the subject are edited by the CasX targeted by the first gRNA; iii) the editing comprises introducing an insertion, deletion, substitution, duplication, or inversion of one or more nucleotides in the target nucleic acid sequence such that expression of BCL11A protein is reduced or eliminated, wherein the method results in an increased levels of hemoglobin F (HbF) in circulating blood of the subject of at least about 5%, at least about 10%, at least about 20%, at least about 30%, at least about 40%, or at least about 50% compared to the levels of HbF in the subject prior to treatment. In the foregoing, the cells are selected from the group consisting of hematopoietic stem cells (HSC), hematopoietic progenitor cells (HPC), CD34+ cells, mesenchymal stem cells (MSC), induced pluripotent stem cells (iPSC), common myeloid progenitor cells, proerythroblast cells, and erythroblast cells. In one embodiment of the method, the target nucleic acid of the cells has been edited such that expression of the BCL11A protein is reduced by at least about 10%, at least about 20%, at least about 30%, at least about 40%, at least about 50%, at least about 60%, at least about 70%, at least about 80%, or at least about 90% in comparison to target nucleic acid of cells that have not been edited. In some cases, the subject is selected from the group consisting of mouse, rat, pig, and non-human primate. In other cases, the subject is a human.

[0300] In some embodiments of the method of treating a hemoglobinopathy in a subject, the method results in improvement in at least one clinically-relevant parameter selected from the group consisting of occurrence of end-organ disease, albuminuria, hypertension, hyposthenia, hyposthenuria, diastolic dysfunction, functional exercise capacity, acute coronary syndrome, pain events, pain severity, anemia, hemolysis, tissue hypoxia, organ dysfunction, abnormal hematocrit values, childhood mortality, incidence of strokes, hemoglobin levels compared to baseline, HbF levels, reduced incidence of pulmonary embolisms, incidence of vaso-occlusive crises, concentration of hemoglobin S in erythrocytes, rate of hospitalizations, liver iron concentration, required blood transfusions, and quality of life score. In other embodiments of the method of treating a hemoglobinopathy in a subject, the method results in improvement in at least two clinically-relevant parameters selected from the group consisting of occurrence of end-organ disease, albuminuria, hypertension, hyposthenia, hyposthenuria, diastolic dysfunction, functional exercise capacity, acute coronary syndrome, pain events, pain severity, anemia, hemolysis, tissue hypoxia, organ dysfunction, abnormal hematocrit values, childhood mortality, incidence of strokes, hemoglobin levels compared to baseline, HbF levels, reduced incidence of pulmonary embolisms, incidence of vaso-occlusive crises, concentration of hemoglobin S in erythrocytes, rate of hospitalizations, liver iron concentration, required blood transfusions, and quality of life score.

[0301] In some embodiments, the method of treatment comprises administering to the subject a liposome or lipid nanoparticle comprising the CasX protein and the gRNA. In some embodiments, the liposome or lipid nanoparticle further comprises a donor template of any of the embodiments described herein.

[0302] In some embodiments, the disclosure provides a method of treatment of a subject having a hemoglobinopathy-related disease, the method comprising administering to the subject a CasX:gRNA composition, or a vector, or a XDP comprising an RNP of the CasX:gRNA composition of any of the embodiments disclosed herein according to a treatment regimen comprising one or more consecutive doses using a therapeutically effective dose. In some embodiments of the treatment regimen, the therapeutically effective dose of the composition or vector is administered as a single dose. In other embodiments of the treatment regimen, the therapeutically effective dose is administered to the subject as two or more doses over a period of at least two weeks, or at least one month, or at least two months, or at least three months, or at least four months, or at least five months, or at least six months. In some embodiments of the treatment regimen, the effective doses are administered by a route selected from the group consisting of transplantation, local injection, systemic infusion, or combinations thereof.

[0303] In some embodiments, the methods of treatment further comprise administering a chemotherapeutic agent wherein the agent is effective in improving the signs or symptoms associated with a hemoglobinopathy-related disease, including but not limited to hydroxyurea, L-glutamine oral powder, voxelotor, and analgesics.

[0304] In some embodiments, the present disclosure provides a CasX:gRNA composition, a nucleic acid encoding a CasX:gRNA composition, a vector comprising the nucleic acid, or a XDP comprising an RNP of the CasX:gRNA for use as a medicament for the treatment of a hemoglobinopathy, including sickle-cell disease or beta-thalassemia.

### XIV. Kits and Compositions

[0305] In other embodiments, provided herein are kits comprising a CasX protein, one or a plurality of gRNA of any of the embodiments of the disclosure comprising a targeting sequence specific for a BCL11A gene, and a suitable container (for example a tube, vial or plate). In some embodiments, the kit further comprises a buffer, a nuclease inhibitor, a protease inhibitor, a liposome, a therapeutic agent, a label, a label visualization reagent, or any combination of the foregoing. In some embodiments, the kit further comprises a pharmaceutically acceptable carrier, diluent or excipient. In some embodiments, the kit comprises appropriate control compositions for gene modifying applications, and instructions for use. In some embodiments, the kit comprises a vector comprising a sequence encoding a CasX protein of the disclosure, a gRNA of the disclosure, optionally a donor template, or a combination thereof.

[0306] In other embodiments of the kits of the disclosure, the kit comprises a composition for the treatment of a hemoglobinopathy in a subject by modifying a BCL11A target nucleic acid in isolated cells of the subject, the modifying comprising contacting the target nucleic acid sequence of the cells with an embodiment disclosed herein of: i) a CasX:gRNA system; ii) a nucleic acid encoding the components of the CasX:gRNA system; iii) a vector comprising the nucleic acid; iv) a XDP comprising a CasX protein and a guide nucleic acid (gRNA); or v) combinations of any of (i)-(iv), wherein i) said contacting results in modification of the BCL11A target nucleic acid sequence by the CasX protein; ii) reduced expression of the BCL11A protein; and iii) increased production of hemoglobin F (HbF) upon maturation of the cells. In some cases, the cell is an induced pluripotent stem cell (iPSC). In other cases, the cell is a hematopoietic stem cell (HSC). In one embodiment, the use of the composition results in reduction of expression of the BCL11A protein by the matured cells is reduced by at least about 10%, at least about 20%, at least about 30%, at least about 40%, at least about 50%, at least about 60%, at least about 70%, at least about 80%, or at least about 90% in comparison to target nucleic acid that has not been modified. In another embodiment, expression of the BCL11A protein by the matured cells cannot be detected.

[0307] In some embodiments, the kit comprises a plurality of cells edited using the CasX:gRNA systems described herein.

[0308] The present description sets forth numerous exemplary configurations, methods, parameters, and the like. It should be recognized, however, that such description is not intended as a limitation on the scope of the present disclosure, but is instead provided as a description of exemplary embodiments.

### Enumerated Embodiments

[0309] The invention may be defined by reference to the following enumerated, illustrative embodiments.

### Set I

[0310] Embodiment 1. A composition comprising a Class 2 Type V CRISPR protein and a first guide nucleic acid (gNA), wherein the gNA comprises a targeting sequence complementary to a polypyrimidine tract-binding protein 1 (BCL11A) gene target nucleic acid sequence.

[0311] Embodiment 2. The composition of embodiment 1, wherein the gNA comprises a targeting sequence complementary to a target nucleic acid sequence selected from the group consisting of:
[0312] a. a BCL11A intron;
[0313] b. a BCL11A exon;
[0314] c. a BCL11A intron-exon junction;
[0315] d. a BCL11A regulatory element; and
[0316] e. an intergenic region.

[0317] Embodiment 3. The composition of embodiment 1, wherein the BCL11A gene comprises a wild-type sequence.

[0318] Embodiment 4. The composition of any one of embodiments 1-3, wherein the gNA is a guide RNA (gRNA).

[0319] Embodiment 5. The composition of any one of embodiments 1-3, wherein the gNA is a guide DNA (gDNA).

[0320] Embodiment 6. The composition of any one of embodiments 1-3, wherein the gNA is a chimera comprising DNA and RNA.

[0321] Embodiment The composition of any one of embodiments 1-6, wherein the gNA is a single-molecule gNA (sgNA).

[0322] Embodiment 8. The composition of any one of embodiments 1-6, wherein the gNA is a dual-molecule gNA (dgNA).

[0323] Embodiment 9. The composition of any one of embodiments 1-8, wherein the targeting sequence of the gNA comprises a sequence selected from the group consisting of SEQ ID NOS: 272-2100 and 2286-26789, or a sequence having at least about 65%, at least about 75%, at least about 85%, or at least about 95% identity thereto.

[0324] Embodiment 10. The composition of any one of embodiments 1-8, wherein the targeting sequence of the gNA comprises a sequence selected from the group consisting of the SEQ ID NOS: 272-2100 and 2286-26789.

[0325] Embodiment 11. The composition of any one of embodiments 1-8, wherein the targeting sequence of the gNA comprises a sequence of SEQ ID NOS: 272-2100 and 2286-26789 with a single nucleotide removed from the 3′ end of the sequence.

[0326] Embodiment 12. The composition of any one of embodiments 1-8, wherein the targeting sequence of the gNA comprises a sequence of SEQ ID NOS: 272-2100 and 2286-26789 with two nucleotides removed from the 3′ end of the sequence.

[0327] Embodiment 13. The composition of any one of embodiments 1-8, wherein the targeting sequence of the gNA comprises a sequence of SEQ ID NOS: 272-2100 and 2286-26789 with three nucleotides removed from the 3′ end of the sequence.

[0328] Embodiment 14. The composition of any one of embodiments 1-8, wherein the targeting sequence of the gNA comprises a sequence of SEQ ID NOS: 272-2100 and 2286-26789 with four nucleotides removed from the 3′ end of the sequence.

[0329] Embodiment 15. The composition of any one of embodiments 1-8, wherein the targeting sequence of the gNA comprises a sequence of SEQ ID NOS: 272-2100 and 2286-26789 with five nucleotides removed from the 3′ end of the sequence.

[0330] Embodiment 16. The composition of any one of embodiments 1-15, wherein the targeting sequence of the gNA is complementary to a sequence of a BCL11A exon.

[0331] Embodiment 17. The composition of embodiment 16, wherein the targeting sequence of the gNA is complementary to a sequence selected from the group consisting of a BCL11A exon 1 sequence, BCL11A exon 2 sequence, BCL11A exon 3 sequence, BCL11A exon 4 sequence, BCL11A exon 5 sequence, BCL11A exon 6 sequence, BCL11A exon 7 sequence, BCL11A exon 8 sequence, and a BCL11A exon 9 sequence.

[0332] Embodiment 18. The composition of embodiment 17, wherein the targeting sequence of the gNA is complementary to a sequence selected from the group consisting of a BCL11A exon 1 sequence, BCL11A exon 2 sequence, and a BCL11A exon 3 sequence.

[0333] Embodiment 19. The composition of any one of embodiments 1-15, wherein the targeting sequence of the gNA is complementary to a sequence of a BCL11A regulatory element.

[0334] Embodiment 20. The composition of embodiment 19, wherein the targeting sequence of the gNA is complementary to a sequence of a promoter of the BCL11A gene.

[0335] Embodiment 21. The composition of embodiment 19, wherein the targeting sequence of the gNA is complementary to a sequence of an enhancer regulatory element.

[0336] Embodiment 22. The composition of embodiment 21, wherein the targeting sequence of the gNA is complementary to a sequence that comprises a GATA1 erythroid-specific enhancer binding site (GATA1) of the BCL11A gene.

[0337] Embodiment 23. The composition of embodiment 22, wherein the targeting sequence of the gNA has the sequence UGGAGCCUGUGAUAAAAGCA (SEQ ID NO: 22), or a sequence having at least 90% or 95% sequence identity thereto.

[0338] Embodiment 24. The composition of embodiment 22, wherein the targeting sequence of the gNA consists of the sequence UGGAGCCUGUGAUAAAAGCA (SEQ ID NO: 22).

[0339] Embodiment 25. The composition of embodiment 21, wherein the targeting sequence of the gNA has the sequence UGCUUUUAUCACAGGCUCCA (SEQ ID NO: 23), or a sequence having at least 90% or 95% sequence identity thereto.

[0340] Embodiment 26. The composition of embodiment 21, wherein the targeting sequence of the gNA consists of the sequence UGCUUUUAUCACAGGCUCCA (SEQ ID NO: 23).

[0341] Embodiment 27. The composition of any one of embodiments 1-26, further comprising a second gNA, wherein the second gNA has a targeting sequence complementary to a different or overlapping portion of the BCL11A target nucleic acid compared to the targeting sequence of the gNA of the first gNA.

[0342] Embodiment 28. The composition of embodiment 27, wherein the targeting sequence of the second gNA is complementary to a sequence of the target nucleic acid that is 5′ or 3′ to the GATA1 binding site sequence.

[0343] Embodiment 29. The composition of embodiment 27, wherein the second gNA has a targeting sequence complementary to the same exon targeted by the first gNA.

[0344] Embodiment 30. The composition of any one of embodiments 1-29, wherein the first or second gNA has a scaffold comprising a sequence having at least about 50%, at least about 60%, at least about 70%, at least about 80%, at least about 90%, at least about 95%, at least about 96%, at least about 97%, at least about 98%, at least about 99% sequence identity to a sequence selected from the group consisting of SEQ ID NOS: 4-16 and 2101-2285 as set forth in Tables 1 and 2.

[0345] Embodiment 31. The composition of any one of embodiments 1-30, wherein the first or second gNA has a scaffold comprising a sequence selected from the group consisting of SEQ ID NOs:2101-2285.

[0346] Embodiment 32. The composition of any one of embodiments 1-30, wherein the first or second gNA has a scaffold consisting of a sequence selected from the group consisting of SEQ ID NOs:2101-2285.

[0347] Embodiment 33. The composition of any one of embodiments 1-30, wherein the first or second gNA scaffold comprises a sequence having at least one modification relative to a reference gNA sequence selected from the group consisting of SEQ ID NOS: 4-16.

[0348] Embodiment 34. The composition of embodiment 33, wherein the at least one modification of the reference gNA comprises at least one substitution, deletion, or substitution of a nucleotide of the reference gNA sequence.

[0349] Embodiment 35. The composition of any one of embodiments 1-34, wherein the first or second gNA variant comprises a targeting sequence of UGGAGCCUGUGAUAAAAGCA (SEQ ID NO: 22).

[0350] Embodiment 36. The composition of any one of embodiments 1-35, wherein the first or second gNA is chemically modified.

[0351] Embodiment 37. The composition of any one of embodiments 1-36, wherein the Class 2 Type V CRISPR protein is a reference CasX protein having a sequence of any one of SEQ ID NOS: 1-3, a CasX variant protein having a sequence SEQ ID NOS: 36-99 or 101-148 as set forth in Table 4, or a sequence having at least about 50%, at least about 60%, at least about 70%, at least about 80%, at least about 90%, or at least about 95%, or at least about 95%, or at least about 96%, or at least about 97%, or at least about 98%, or at least about 99% sequence identity thereto.

[0352] Embodiment 38. The composition of embodiment 37, wherein the Class 2 Type V CRISPR protein is a CasX variant protein having a sequence of SEQ ID NOS: 36-99 or 101-148.

[0353] Embodiment 39. The composition of embodiment 37, wherein the CasX variant protein consists of a sequence of SEQ ID NOS: 36-99 or 101-148.

[0354] Embodiment 40. The composition of embodiment 37, wherein the CasX variant protein comprises at least one modification relative to a reference CasX protein having a sequence selected from SEQ ID NOS:1-3.

[0355] Embodiment 41. The composition of embodiment 40, wherein the at least one modification comprises at least one amino acid substitution, deletion, or substitution in a domain of the CasX variant protein relative to the reference CasX protein.

[0356] Embodiment 42. The composition of embodiment 41, wherein the domain is selected from the group consisting of a non-target strand binding (NTSB) domain, a target strand loading (TSL) domain, a helical I domain, a helical II domain, an oligonucleotide binding domain (OBD), and a RuvC DNA cleavage domain.

[0357] Embodiment 43. The composition of any one of embodiments 37-42, wherein the CasX protein further comprises one or more nuclear localization signals (NLS).

[0358] Embodiment 44. The composition of embodiment 43, wherein the one or more NLS are selected from the group of sequences consisting of PKKKRKV (SEQ ID NO: 168), KRPAATKKAGQAKKKK (SEQ ID NO: 169), PAAKRVKLD (SEQ ID NO: 170), RQRRNELKRSP (SEQ ID NO: 171), NQSSNFGPMKGGNFGGRSSGPYGGGGQYFAKPRNQGGY (SEQ ID NO: 172), RMRIZFKNKGKDTAELRRRRVEVSVELRKAKKDEQILKRRNV (SEQ ID NO: 173), VSRKRPRP (SEQ ID NO: 174), PPKKARED (SEQ ID NO: 175), PQPKKKPL (SEQ ID NO: 176), SALIKKKKKMAP (SEQ ID NO: 177), DRLRR (SEQ ID NO: 178), PKQKKRK (SEQ ID NO: 179), RKLKKKIKKL (SEQ ID NO: 180), REKKKFLKRR (SEQ ID NO: 181), KRKGDEVDGVDEVAKKKSKK (ESQ ID NO: 182), RKCLQAGMNLEARKTKK (SEQ ID NO: 183), PRPRKIPR (SEQ ID NO: 184), PPRKKRTVV (SEQ ID NO: 185), NLSKKKKRKREK (SEQ ID NO: 186), RRPSRPFRKP (SEQ ID NO: 187), KRPRSPSS (SEQ ID NO: 188), KRGINDRNFWRGENERKTR (SEQ ID NO: 189), PRPPKMARYDN (SEQ ID NO: 190), KRSFSKAF (SEQ ID NO: 191), KLKIKRPVK (SEQ ID NO: 192), PKTRRRPRRSQRKRPPT (SEQ ID NO: 26792), RRKKRRPRRKKRR (SEQ ID NO: 196), PKKKSRKPKKKSRK (SEQ ID NO: 197), HKKKHPDASVNFSEFSK (SEQ ID NO: 198), QRPGPYDRPQRPGPYDRP (SEQ ID NO: 199), LSPSLSPLLSPSLSPL (SEQ ID NO: 200), RGKGGKGLGKGGAKRHRK (SEQ ID NO: 201), PKRGRGRPKRGRGR (SEQ ID NO: 202), MSRRRKANPTKLSENAKKLAKEVEN (SEQ ID NO: 194), PKKKRKVPPPPAAKRVKLD (SEQ ID NO: 193), and PKKKRKVPPPPKKKRKV (SEQ ID NO: 204).

[0359] Embodiment 45. The composition of embodiment 43 or embodiment 44, wherein the one or more NLS are expressed at or near the C-terminus of the CasX protein.

[0360] Embodiment 46. The composition of embodiment 43 or embodiment 44, wherein the one or more NLS are expressed at or near the N-terminus of the CasX protein.

[0361] Embodiment 47. The composition of embodiment 43 or embodiment 44, comprising one or more NLS located at or near the N-terminus and at or near the C-terminus of the CasX protein.

[0362] Embodiment 48. The composition of any one of embodiments 37-47, wherein the CasX variant is capable of forming a ribonuclear protein complex (RNP) with a guide nucleic acid (gNA).

[0363] Embodiment 49. The composition of embodiment 48, wherein an RNP of the CasX variant protein and the gNA variant exhibit at least one or more improved characteristics as compared to an RNP of a reference CasX protein of SEQ ID NO: 1, SEQ ID NO: 2, or SEQ ID NO: 3 and a gNA comprising a sequence of SEQ ID NOs: 4-16.

[0364] Embodiment 50. The composition of embodiment 49, wherein the improved characteristic is selected from one or more of the group consisting of improved folding of the CasX variant; improved binding affinity to a guide nucleic acid (gNA); improved binding affinity to a target DNA; improved ability to utilize a greater spectrum of one or more PAM sequences, including ATC, CTC, GTC, or TTC, in the editing of target DNA; improved unwinding of the target DNA; increased editing activity; improved editing efficiency; improved editing specificity; increased nuclease activity; increased target strand loading for double strand cleavage; decreased target strand loading for single strand nicking; decreased off-target cleavage; improved binding of non-target DNA strand; improved protein stability; improved protein solubility; improved protein:gNA complex (RNP) stability; improved protein:gNA complex solubility; improved protein yield; improved protein expression; and improved fusion characteristics.

[0365] Embodiment 51. The composition of embodiment 49 or embodiment 50, wherein the improved characteristic of the RNP of the CasX variant protein and the gNA variant is at least about 1.1 to about 100-fold or more improved relative to the RNP of the reference CasX protein of SEQ ID NO: 1, SEQ ID NO: 2, or SEQ ID NO: 3 and the gNA comprising a sequence of SEQ ID NOs: 4-16.

[0366] Embodiment 52. The composition of embodiment 49 or embodiment 50, wherein the improved characteristic of the CasX variant protein is at least about 1.1, at least about 2, at least about 10, at least about 100-fold or more improved relative to the reference CasX protein of SEQ ID NO: 1, SEQ ID NO: 2, or SEQ ID NO: 3 and the gNA comprising a sequence of SEQ ID NOs: 4-16.

[0367] Embodiment 53. The composition of any one of embodiments 49-52, wherein the improved characteristic comprises editing efficiency, and the RNP of the CasX variant protein and the gNA variant comprises a 1.1 to 100-fold improvement in editing efficiency compared to the RNP of the reference CasX protein of SEQ ID NO: 2 and the gNA of SEQ ID NOs: 4-16.

[0368] Embodiment 54. The composition of any one of embodiments 48-53, wherein the RNP comprising the CasX variant and the gNA variant exhibits greater editing efficiency and/or binding of a target sequence in the target DNA when any one of the PAM sequences TTC, ATC, GTC, or CTC is located 1 nucleotide 5′ to the non-target strand of the protospacer having identity with the targeting sequence of the gNA in a cellular assay system compared to the editing efficiency and/or binding of an RNP comprising a reference CasX protein and a reference gNA in a comparable assay system.

[0369] Embodiment 55. The composition of embodiment 54, wherein the PAM sequence is TTC.

[0370] Embodiment 56. The composition of embodiment 54, wherein the PAM sequence is ATC.

[0371] Embodiment 57. The composition of embodiment 54, wherein the PAM sequence is CTC.

[0372] Embodiment 58. The composition of embodiment 54, wherein the PAM sequence is GTC.

[0373] Embodiment 59. The composition of any one of embodiments 54-58, wherein the increased binding affinity for the one or more PAM sequences is at least 1.5-fold greater compared to the binding affinity of any one of the CasX proteins of SEQ ID NOS: 1-3 for the PAM sequences.

[0374] Embodiment 60. The composition of any one of embodiments 48-59, wherein the RNP has at least a 5%, at least a 10%, at least a 15%, or at least a 20% higher percentage of cleavage-competent RNP compared to an RNP of the reference CasX and the gNA of SEQ ID NOs: 4-16.

[0375] Embodiment 61. The composition of any one of embodiments 37-60, wherein the CasX variant protein comprises a RuvC DNA cleavage domain having nickase activity.

[0376] Embodiment 62. The composition of any one of embodiments 37-60, wherein the CasX variant protein comprises a RuvC DNA cleavage domain having double-stranded cleavage activity.

[0377] Embodiment 63. The composition of any one of embodiments 1-48, wherein the CasX protein is a catalytically inactive CasX (dCasX) protein, and wherein the dCasX and the gNA retain the ability to bind to the BCL11A target nucleic acid.

[0378] Embodiment 64. The composition of embodiment 63, wherein the dCasX comprises a mutation at residues:
[0379] a. D672, E769, and/or D935 corresponding to the CasX protein of SEQ ID NO:1; or
[0380] b. D659, E756 and/or D922 corresponding to the CasX protein of SEQ ID NO: 2.

[0381] Embodiment 65. The composition of embodiment 64, wherein the mutation is a substitution of alanine for the residue.

[0382] Embodiment 66. The composition of any one of embodiments 1-62, further comprising a donor template nucleic acid.

[0383] Embodiment 67. The composition of embodiment 66, wherein the donor template comprises a nucleic acid comprising at least a portion of a BCL11A gene selected from the group consisting of a BCL11A exon, a BCL11A intron, a BCL11A intron-exon junction, a BCL11A regulatory element, and the GATA1 binding site sequence.

[0384] Embodiment 68. The composition of embodiment 67, wherein the donor template sequence comprises one or more mutations relative to a corresponding portion of a wild-type BCL11A gene.

[0385] Embodiment 69. The composition of embodiment 67 or embodiment 68, wherein the donor template comprises a nucleic acid comprising at least a portion of a BCL11A exon selected from the group consisting of BCL11A exon 1, BCL11A exon 2, BCL11A exon 3, BCL11A exon 4, BCL11A exon 5, BCL11A exon 6, BCL11A exon 7, BCL11A exon 8, and BCL11A exon 9.

[0386] Embodiment 70. The composition of embodiment 69, wherein the donor template comprises a nucleic acid comprising at least a portion of a BCL11A exon selected from the group consisting of BCL11A exon 1, BCL11A exon 2, and BCL11A exon 3.

[0387] Embodiment 71. The composition of any one of embodiments 66-70, wherein the donor template ranges in size from 10-15,000 nucleotides.

[0388] Embodiment 72. The composition of any one of embodiments 66-71, wherein the donor template is a single-stranded DNA template or a single stranded RNA template.

[0389] Embodiment 73. The composition of any one of embodiments 66-71, wherein the donor template is a double-stranded DNA template.

[0390] Embodiment 74. The composition of any one of embodiments 66-73, wherein the donor template comprises homologous arms at or near the 5′ and 3′ ends of the donor template that are complementary to sequences flanking cleavage sites in the BCL11A target nucleic acid introduced by the Class 2 Type V CRISPR protein.

[0391] Embodiment 75. A nucleic acid comprising the donor template of any one of embodiments 66-74.

[0392] Embodiment 76. A nucleic acid comprising a sequence that encodes the CasX of any one of embodiments 37-65.

[0393] Embodiment 77. A nucleic acid comprising a sequence that encodes the gNA of any one of embodiments 1-36.

[0394] Embodiment 78. The nucleic acid of embodiment 76, wherein the sequence that encodes the CasX protein is codon optimized for expression in a eukaryotic cell.

[0395] Embodiment 79. A vector comprising the gNA of any one of embodiments 1-36, the CasX protein of any one of embodiments 37-65, or the nucleic acid of any one of embodiments 75-78.

[0396] Embodiment The vector of embodiment 79, wherein the vector further comprises a promoter.

[0397] Embodiment 81. The vector of embodiment 79 or embodiment 80, wherein the vector is selected from the group consisting of a retroviral vector, a lentiviral vector, an adenoviral vector, an adeno-associated viral (AAV) vector, a herpes simplex virus (HSV) vector, a virus-like particle (VLP), a plasmid, a minicircle, a nanoplasmid, a DNA vector, and an RNA vector.

[0398] Embodiment 82. The vector of embodiment 81, wherein the vector is an AAV vector.

[0399] Embodiment 83. The vector of embodiment 82, wherein the AAV vector is selected from AAV1, AAV2, AAV3, AAV4, AAV5, AAV6, AAV7, AAV8, AAV9, AAV10, AAV-Rh74, or AAVRh10.

[0400] Embodiment 84. The vector of embodiment 81, wherein the vector is a retroviral vector.

[0401] Embodiment 85. The vector of embodiment 81, wherein the vector is a VLP comprising one or more components of a gag polyprotein.

[0402] Embodiment 86. The vector of embodiment 85, wherein the one or more components of the gag polyprotein are selected from the group consisting of matrix protein (MA), nucleocapsid protein (NC), capsid protein (CA), and p1-p6 protein.

[0403] Embodiment 87. The vector of embodiment 85 or embodiment 86, comprising the CasX protein and the gNA.

[0404] Embodiment 88. The vector of embodiment 87, wherein the CasX protein and the gNA are associated together in an RNP.

[0405] Embodiment 89. The VLP of any one of embodiments 85-88, further comprising a pseudotyping viral envelope glycoprotein or antibody fragment that provides for binding and fusion of the VLP to a target cell.

[0406] Embodiment 90. The VLP of embodiment of embodiment 89, wherein the target cell is selected from the group consisting of a hematopoietic stem cell (HSC), a hematopoietic progenitor cell (HPC), a CD34+ cell, a mesenchymal stem cell (MSC), an embryonic stem (ES) cell, an induced pluripotent stem cell (iPSC), a common myeloid progenitor cell, a proerythroblast cell, and an erythroblast cell.

[0407] Embodiment 91. The vector of any one of embodiments 85-90, further comprising the donor template.

[0408] Embodiment 92. A host cell comprising the vector of any one of embodiments 79-91.

[0409] Embodiment 93. The host cell of embodiment 92, wherein the host cell is selected from the group consisting of BHK, HEK293, HEK293T, NS0, SP2/0, YO myeloma cells, P3X63 mouse myeloma cells, PER, PER.C6, NIH3T3, COS, HeLa, CHO, and yeast cells.

[0410] Embodiment 94. A method of modifying a BCL11A target nucleic acid sequence in a population of cells, the method comprising introducing into cells of the population:
[0411] a. the composition of any one of embodiments 1-74;
[0412] b. the nucleic acid of any one of embodiments 75-78;
[0413] c. the vector as in any one of embodiments 79-84;
[0414] d. the VLP of any one of embodiments 85-91; or
[0415] e. combinations of two or more of (a)-(d),
   wherein the BCL11A gene target nucleic acid sequence of the cells targeted by the first gNA is modified by the CasX protein.

[0416] Embodiment 95. The method of embodiment 94, wherein the modifying comprises introducing a single-stranded break in the BCL11A gene target nucleic acid sequence of the cells of the population.

[0417] Embodiment 96. The method of embodiment 94, wherein the modifying comprises introducing a double-stranded break in the BCL11A gene target nucleic acid sequence of the cells of the population.

[0418] Embodiment 97. The method of any one of embodiments 94-96, further comprising introducing into the cells of the population a second gNA or a nucleic acid encoding the second gNA, wherein the second gNA has a targeting sequence complementary to a different or overlapping portion of the BCL11A gene target nucleic acid compared to the first gNA, resulting in an additional break in the BCL11A target nucleic acid of the cells of the population.

[0419] Embodiment 98. The method of any one of embodiments 94-97, wherein the modifying comprises introducing an insertion, deletion, substitution, duplication, or inversion of one or more nucleotides in the BCL11A gene of the cells of the population.

[0420] Embodiment 99. The method of embodiment 94-98, wherein a GATA1 binding site sequence of the target nucleic acid is modified.

[0421] Embodiment 100. The method of any one of embodiments 94-97, wherein the method comprises insertion of the donor template into the break site(s) of the BCL11A gene target nucleic acid sequence of the cells of the population.

[0422] Embodiment 101. The method of embodiment 98, wherein the insertion of the donor template is mediated by homology-directed repair (HDR) or homology-independent targeted integration (HITI).

[0423] Embodiment 102. The method of embodiment 100 or embodiment 101, wherein the GATA1 binding site sequence of the target nucleic acid is modified.

[0424] Embodiment 103. The method of any one of embodiments 100-102, wherein insertion of the donor template results in a knock-down or knock-out of the BCL11A gene in the cells of the population.

[0425] Embodiment 104. The method of any one of embodiments 94-103, wherein the BCL11A gene of the cells of the population is modified such that expression of the BCL11A protein is reduced by at least about 10%, at least about 20%, at least about 30%, at least about 40%, at least about 50%, at least about 60%, at least about 70%, at least about 80%, or at least about 90% in comparison to cells in which the BCL11A gene has not been modified.

[0426] Embodiment 105. The method of any one of embodiments 94-103, wherein the BCL11A gene of the cells of the population is modified such that at least about 10%, at least about 20%, at least about 30%, at least about 40%, at least about 50%, at least about 60%, at least about 70%, at least about 80%, or at least about 90% of the cells do not express a detectable level of BCL11A protein.

[0427] Embodiment 106. The method of any one of embodiments 94-105, wherein the cells are eukaryotic.

[0428] Embodiment 107. The method of embodiment 106, wherein the eukaryotic cells are selected from the group consisting of rodent cells, mouse cells, rat cells, and non-human primate cells.

[0429] Embodiment 108. The method of embodiment 106, wherein the eukaryotic cells are human cells.

[0430] Embodiment 109. The method of any one of embodiments 106-108, wherein the eukaryotic cell is selected from the group consisting of a hematopoietic stem cell (HSC), a hematopoietic progenitor cell (HPC), a CD34+ cell, a mesenchymal stem cell (MSC), induced pluripotent stem cell (iPSC), a common myeloid progenitor cell, a proerythroblast cell, and an erythroblast cell.

[0431] Embodiment 110. The method of any one of embodiment 94-109, wherein the modification of the BCL11A gene target nucleic acid sequence of the population of cells occurs in vitro or ex vivo.

[0432] Embodiment 111. The method of any one of embodiment 94-109, wherein the modification of the BCL11A gene target nucleic acid sequence of the population of cells occurs in vivo in a subject.

[0433] Embodiment 112. The method of embodiment 111, wherein the subject is selected from the group consisting of a rodent, a mouse, a rat, and a non-human primate.

[0434] Embodiment 113. The method of embodiment 111, wherein the subject is a human.

[0435] Embodiment 114. The method of any one of embodiments 111-113, wherein the method comprises administering a therapeutically effective dose of an AAV vector to the subject.

[0436] Embodiment 115. The method of embodiment 114, wherein the AAV vector is administered to the subject at a dose of at least about 1×10⁵ vector genomes/kg (vg/kg), at least about 1×10⁶ vg/kg, at least about 1×10⁷ vg/kg, at least about 1×10⁸ vg/kg, at least about 1×109 vg/kg, at least about 1×10¹⁰ vg/kg, at least about 1×10¹¹ vg/kg, at least about 1×10¹² vg/kg, at least about 1×10¹³ vg/kg, at least about 1×10¹⁴ vg/kg, at least about 1×10¹⁵ vg/kg, or at least about 1×10¹⁶ vg/kg.

[0437] Embodiment 116. The method of embodiment 114, wherein the AAV vector is administered to the subject at a dose of at least about 1×10⁵ vg/kg to about 1×10¹⁶ vg/kg, at least about 1×10⁶ vg/kg to about 1×10¹⁵ vg/kg, or at least about 1×10⁷ vg/kg to about 1×10¹⁴ vg/kg.

[0438] Embodiment 117. The method of any one of embodiments 111-113, wherein the method comprises administering a therapeutically effective dose of a VLP to the subject.

[0439] Embodiment 118. The method of embodiment 117, wherein the VLP is administered to the subject at a dose of at least about 1×10⁵ particles/kg, at least about 1×10⁶ particles/kg, at least about 1×10⁷ particles/kg at least about 1×10⁸ particles/kg, at least about 1×10⁹ particles/kg, at least about 1×10¹⁰ particles/kg, at least about 1×10¹¹ particles/kg, at least about 1×10¹² particles/kg, at least about 1×10¹³ particles/kg, at least about 1×10¹⁴ particles/kg, at least about 1×10¹⁵ particles/kg, at least about 1×10¹⁶ particles/kg.

[0440] Embodiment 119. The method of embodiment 117, wherein the VLP is administered to the subject at a dose of at least about 1×10⁵ particles/kg to about 1×10¹⁶ particles/kg, or at least about 1×10⁶ particles/kg to about 1×10¹⁵ particles/kg, or at least about 1×10⁷ particles/kg to about 1×10¹⁴ particles/kg

[0441] Embodiment 120. The method of any one of embodiments 112-119, wherein the vector or VLP is administered to the subject by a route of administration selected from transplantation, local injection, systemic infusion, or combinations thereof.

[0442] Embodiment 121. The method of any one of embodiments 94-120, further comprising contacting the BCL11A gene target nucleic acid sequence of the population of cells with:
[0443] a. an additional CRISPR nuclease and a gNA targeting a different or overlapping portion of the BCL11A target nucleic acid compared to the first gNA;
[0444] b. a polynucleotide encoding the additional CRISPR nuclease and the gNA of (a);
[0445] c. a vector comprising the polynucleotide of (b); or
[0446] d. a VLP comprising the additional CRISPR nuclease and the gNA of (a) wherein the contacting results in modification of the BCL11A gene at a different location in the sequence compared to the sequence targeted by the first gNA.

[0447] Embodiment 122. The method of embodiment 121, wherein the additional CRISPR nuclease is a CasX protein having a sequence different from the CasX protein of any of the preceding embodiments.

[0448] Embodiment 123. The method of embodiment 121, wherein the additional CRISPR nuclease is not a CasX protein.

[0449] Embodiment 124. The method of embodiment 123, wherein the additional CRISPR nuclease is selected from the group consisting of Cas9, Cas12a, Cas12b, Cas12c, Cas12d (CasY), Cas12J, Cas13a, Cas13b, Cas13c, Cas13d, CasX, CasY, Cas14, Cpf1, C2cl, Csn2, and sequence variants thereof.

[0450] Embodiment 125. A population of cells modified by the method of any one of embodiments 94-124, wherein the cells have been modified such that at least 70%, at least 75%, at least 80%, at least 85%, at least 90%, or at least 95% of the modified cells do not express a detectable level of BCL11A protein.

[0451] Embodiment 126. A population of cells modified by the method of any one of embodiments 94-124, wherein the cells have been modified such that the expression of BCL11A protein is reduced by at least 70%, at least 75%, at least 80%, at least 85%, at least 90%, or at least 95% compared to cells where the BCL11A gene has not been modified.

[0452] Embodiment 127. A method of treating a hemoglobinopathy in a subject in need thereof, the method comprising administering to the subject a therapeutically effective amount of the cells of embodiment 125 or embodiment 126.

[0453] Embodiment 128. The method of embodiment 127, wherein the hemoglobinopathy is a sickle cell disease or beta-thalassemia.

[0454] Embodiment 129. The method of any one of embodiments 127 or embodiment 128, wherein the cells are autologous with respect to the subject to be administered the cells.

[0455] Embodiment 130. The method of any one of embodiments 127 or embodiment 128, wherein the cells are allogeneic with respect to the subject to be administered the cells.

[0456] Embodiment 131. The method of any one of embodiments 127-130, wherein the cells or their progeny persist in the subject for at least one month, two month, three months, four months, five months, six months, seven months, eight months, nine months, ten months, eleven months, twelve months, thirteen months, fourteen month, fifteen months, sixteen months, seventeen months, eighteen months, nineteen months, twenty months, twenty-one months, twenty-two months, twenty-three months, two years, three years, four years, or five years after administration of the modified cells to the subject.

[0457] Embodiment 132. The method of any one of embodiments 127-131, wherein the method results in an increased levels of hemoglobin F (HbF) in circulating blood of at least about 5%, at least about 10%, at least about 20%, at least about 30%, at least about 40%, or at least about 50% compared to the levels of HbF in the subject prior to treatment.

[0458] Embodiment 133. The method of any one of embodiments 127-131, wherein the method results in a ratio of HbF to hemoglobin S (HbS) in the subject of at least 0.01:1.0, at least 0.025:1.0, at least 0.05:1.0, at least 0.075:1.0 at least 0.1:1.0, at least 0.2:1.0, at least 0.3:1.0, at least 0.4:1.0, at least 0.5:1:0, at least 0.75:1.0, at least 1.0:1.0, at least 1.25:1.0, at least 1.5:1.0, or at least 1.75:1.0.

[0459] Embodiment 134. The method of any one of embodiments 127-131, wherein the method results in HbF levels of at least about 5%, or at least about 10%, or at least about 20%, or at least about 30% of total circulating hemoglobin in the subject.

[0460] Embodiment 135. The method of any one of embodiments 127-134, wherein the subject is selected from the group consisting of a rodent, a mouse, a rat, and a non-human primate.

[0461] Embodiment 136. The method of any one of embodiments 127-134, wherein the subject is a human.

[0462] Embodiment 137. A method of treating a hemoglobinopathy in a subject in need thereof, comprising modifying a BCL11A gene in cells of the subject, the modifying comprising contacting said cells with a therapeutically effective dose of:
[0463] a. the composition of any one of embodiments 1-74;
[0464] b. the nucleic acid of any one of embodiments 75-78;
[0465] c. the vector as in any one of embodiments 79-84;
[0466] d. the VLP of any one of embodiments 85-88; or
[0467] e. combinations of two or more of (a)-(d),
   wherein the BCL11A gene of the cells targeted by the first gNA is modified by the CasX protein.

[0468] Embodiment 138. The method of embodiment 137, wherein the hemoglobinopathy is sickle cell disease or beta-thalassemia.

[0469] Embodiment 139. The method of any one of embodiments 137 or embodiment 138, wherein the cell is selected from the group consisting of hematopoietic stem cells (HSC), hematopoietic progenitor cells (HPC), CD34+ cells, mesenchymal stem cells (MSC), induced pluripotent stem cells (iPSC), common myeloid progenitor cells, proerythroblast cells, and erythroblast cells.

[0470] Embodiment 140. The method of any one of embodiments 137-139, wherein the modifying comprises introducing a single-stranded break in the BCL11A gene of the cells.

[0471] Embodiment 141. The method of any one of embodiments 137-139, wherein the modifying comprises introducing a double-stranded break in the BCL11A gene of the cells.

[0472] Embodiment 142. The method of any one of embodiments 137-141, further comprising introducing into the cells of the subject a second gNA or a nucleic acid encoding the second gNA, wherein the second gNA has a targeting sequence complementary to a different or overlapping portion of the target nucleic acid compared to the first gNA, resulting in an additional break in the BCL11A target nucleic acid of the cells of the subject.

[0473] Embodiment 143. The method of any one of embodiments 137-142, wherein the modifying comprises introducing an insertion, deletion, substitution, duplication, or inversion of one or more nucleotides in the BCL11A gene of the cells.

[0474] Embodiment 144. The method of embodiment 143, wherein the modifying results in a knock-down or knock-out of the BCL11A gene in the modified cells of the subject.

[0475] Embodiment 145. The method of any one of embodiments 137-144, wherein the BCL11A gene of the cells are modified such that expression of the BCL11A protein by the modified cells is reduced by at least about 10%, at least about 20%, at least about 30%, at least about 40%, at least about 50%, at least about 60%, at least about 70%, at least about 80%, or at least about 90% in comparison to cells that have not been modified.

[0476] Embodiment 146. The method of any one of embodiments 137-144, wherein the BCL11A gene of the cells of the subject are modified such that at least 70%, at least 75%, at least 80%, at least 85%, at least 90%, or at least 95% of the modified cells do not express a detectable level of BCL11A protein.

[0477] Embodiment 147. The method of any one of embodiments 137-146, wherein the method results in an increased levels of hemoglobin F (HbF) in circulating blood of the subject of at least about 5%, at least about 10%, at least about 20%, at least about 30%, at least about 40%, or at least about 50% compared to the levels of HbF in the subject prior to treatment.

[0478] Embodiment 148. The method of any one of embodiments 137-147, wherein the method results in a ratio of HbF to hemoglobin S (HbS) in circulating blood of the subject of at least 0.01:1.0, at least 0.025:1.0, at least 0.05:1.0, at least 0.075:1.0 at least 0.1:1.0, at least 0.2:1.0, at least 0.3:1.0, at least 0.4:1.0, at least 0.5:1:0, at least 0.75:1.0, at least 1.0:1.0, at least 1.25:1.0, at least 1.5:1.0, or at least 1.75:1.0.

[0479] Embodiment 149. The method of any one of embodiments 137-146, wherein the method results in HbF levels of at least about 5%, or at least about 10%, or at least about 20%, or at least about 30% of total hemoglobin in circulating blood of the subject.

[0480] Embodiment 150. The method of any one of embodiments 137-142, wherein the method comprises insertion of the donor template into the break site(s) of the BCL11A gene target nucleic acid sequence of the cells.

[0481] Embodiment 151. The method of embodiment 149, wherein the insertion of the donor template is mediated by homology-directed repair (HDR) or homology-independent targeted integration (HITI).

[0482] Embodiment 152. The method of embodiment 149 or embodiment 151, wherein insertion of the donor template results in a knock-down or knock-out of the BCL11A gene in the modified cells of the subject.

[0483] Embodiment 153. The method of any one of embodiments 147-152, wherein the BCL11A gene of the cells are modified such that expression of the BCL11A protein by the modified cells is reduced by at least about 10%, at least about 20%, at least about 30%, at least about 40%, at least about 50%, at least about 60%, at least about 70%, at least about 80%, or at least about 90% in comparison to cells that have not been modified.

[0484] Embodiment 154. The method of any one of embodiments 147-152, wherein the BCL11A gene of the cells of the subject are modified such that at least 70%, at least 75%, at least 80%, at least 85%, at least 90%, or at least 95% of the modified cells do not express a detectable level of BCL11A protein.

[0485] Embodiment 155. The method of any one of embodiments 147-154, wherein the method results in an increased levels of hemoglobin F (HbF) in circulating blood of the subject of at least about 5%, at least about 10%, at least about 20%, at least about 30%, at least about 40%, or at least about 50% compared to the levels of HbF in the subject prior to treatment.

[0486] Embodiment 156. The method of any one of embodiments 147-154, wherein the method results in a ratio of HbF to hemoglobin S (HbS) in circulating blood of the subject of at least 0.01:1.0, at least 0.025:1.0, at least 0.05:1.0, at least 0.075:1.0 at least 0.1:1.0, at least 0.2:1.0, at least 0.3:1.0, at least 0.4:1.0, at least 0.5:1:0, at least 0.75:1.0, at least 1.0:1.0, at least 1.25:1.0, at least 1.5:1.0, or at least 1.75:1.0.

[0487] Embodiment 157. The method of any one of embodiments 147-154, wherein the method results in HbF levels of at least about 5%, or at least about 10%, or at least about 20%, or at least about 30% of total hemoglobin in circulating blood of the subject.

[0488] Embodiment 158. The method of any one of embodiments 137-156, wherein the subject is selected from the group consisting of rodent, mouse, rat, and non-human primate.

[0489] Embodiment 159. The method of any one of embodiments 137-156, wherein the subject is a human.

[0490] Embodiment 160. The method of any one of embodiments 137-159, wherein the vector is AAV and is administered to the subject at a dose of at least about 1×10⁵ vector genomes/kg (vg/kg), at least about 1×10⁶ vg/kg, at least about 1×10⁷ vg/kg, at least about 1×10⁸ vg/kg, at least about 1×10⁹ vg/kg, at least about 1×10¹⁰ vg/kg, at least about 1×10¹¹ vg/kg, at least about 1×10¹² vg/kg, at least about 1×10¹³ vg/kg, at least about 1×10¹⁴ vg/kg, at least about 1×10¹⁵ vg/kg, or at least about 1×10¹⁶ vg/kg.

[0491] Embodiment 161. The method of any one of embodiments 137-159, wherein the vector is AAV and is administered to the subject at a dose of at least about 1×10⁵ vg/kg to about 1×10¹⁶ vg/kg, at least about 1×10⁶ vg/kg to about 1×10¹⁵ vg/kg, or at least about 1×10⁷ vg/kg to about 1×10¹⁴ vg/kg.

[0492] Embodiment 162. The method of any one of embodiments 137-159, wherein the VLP is administered to the subject at a dose of at least about 1×10⁵ particles/kg, at least about 1×10⁶ particles/kg, at least about 1×10⁷ particles/kg at least about 1×10⁸ particles/kg, at least about 1×10⁹ particles/kg, at least about 1×10¹⁰ particles/kg, at least about 1×10¹¹ particles/kg, at least about 1×10¹² particles/kg, at least about 1×10¹³ particles/kg, at least about 1×10¹⁴ particles/kg, at least about 1×10¹5 particles/kg, at least about 1×10¹⁶ particles/kg.

[0493] Embodiment 163. The method of any one of embodiments 137-159, wherein the VLP is administered to the subject at a dose of at least about 1×10⁵ particles/kg to about 1×10¹⁶ particles/kg, or at least about 1×10⁶ particles/kg to about 1×10¹⁵ particles/kg, or at least about 1×10⁷ particles/kg to about 1×10¹⁴ particles/kg

[0494] Embodiment 164. The method of any one of embodiments 137-163, wherein the vector or VLP is administered to the subject by a route of administration selected from transplantation, local injection, systemic infusion, or combinations thereof.

[0495] Embodiment 165. The method of any one of embodiments 137-164, wherein the method results in improvement in at least one clinically-relevant endpoint in the subject.

[0496] Embodiment 166. The method of embodiment 165, wherein the method results in improvement in at least one clinically-relevant parameter selected from the group consisting of occurrence of end-organ disease, albuminuria, hypertension, hyposthenia, hyposthenuria, diastolic dysfunction, functional exercise capacity, acute coronary syndrome, pain events, pain severity, anemia, hemolysis, tissue hypoxia, organ dysfunction, abnormal hematocrit values, childhood mortality, incidence of strokes, hemoglobin levels compared to baseline, HbF levels, reduced incidence of pulmonary embolisms, incidence of vaso-occlusive crises, concentration of hemoglobin S in erythrocytes, rate of hospitalizations, liver iron concentration, required blood transfusions, and quality of life score.

[0497] Embodiment 167. The method of embodiment 165, wherein the method results in improvement in at least two clinically-relevant parameters selected from the group consisting of occurrence of end-organ disease, albuminuria, hypertension, hyposthenia, hyposthenuria, diastolic dysfunction, functional exercise capacity, acute coronary syndrome, pain events, pain severity, anemia, hemolysis, tissue hypoxia, organ dysfunction, abnormal hematocrit values, childhood mortality, incidence of strokes, hemoglobin levels compared to baseline, HbF levels, reduced incidence of pulmonary embolisms, incidence of vaso-occlusive crises, concentration of hemoglobin S in erythrocytes, rate of hospitalizations, liver iron concentration, required blood transfusions, and quality of life score.

[0498] Embodiment 168. A method for treating a subject with a hemoglobinopathy, the method comprising:
[0499] a. isolating induced pluripotent stem cells (iPSC) or hematopoietic stem cells (HSC) from a subject;
[0500] b. modifying the BCL11A target nucleic acid of the iPSC or HSC by the method of any one of embodiments 94-110;
[0501] c. differentiating the modified iPSC or HSC into a hematopoietic progenitor cell; and
[0502] d. implanting the hematopoietic progenitor cell into the subject with the hemoglobinopathy, wherein the method results in an increased levels of hemoglobin F (HbF) in circulating blood of the subject of at least about 5%, at least about 10%, at least about 20%, at least about 30%, at least about 40%, or at least about 50% compared to the levels of HbF in the subject prior to treatment.

[0503] Embodiment 169. The method of embodiment 168, wherein the iPSC or HSC is autologous and is isolated from the subject's bone marrow or peripheral blood.

[0504] Embodiment 170. The method of embodiment 168, wherein the iPSC or HSC is allogeneic and is isolated from a different subject's bone marrow or peripheral blood.

[0505] Embodiment 171. The method of any one of embodiments 168-170, wherein the implanting comprises administering the hematopoietic progenitor cell to the subject by transplantation, local injection, systemic infusion, or combinations thereof.

[0506] Embodiment 172. The method of any one of embodiments 168-171, wherein the hemoglobinopathy is sickle cell disease or beta-thalassemia.

[0507] Embodiment 173. A method of increasing fetal hemoglobin (HbF) in a subject by genome editing, the method comprising: a. administering to the subject an effective dose of the vector of any one of embodiments 79-84 or the VLP of any one of embodiments 85-90, wherein the vector or VLP delivers the CasX:gNA system to cells of the subject;
[0508] b. the BCL11A target nucleic acid of cells of the subject are edited by the CasX targeted by the first gNA;
[0509] c. the editing comprises introducing an insertion, deletion, substitution, duplication, or inversion of one or more nucleotides in the target nucleic acid sequence such that expression of BCL11A protein is reduced or eliminated,
[0510] wherein the method results in an increased levels of hemoglobin F (HbF) in circulating blood of the subject of at least about 5%, at least about 10%, at least about 20%, at least about 30%, at least about 40%, or at least about 50% compared to the levels of HbF in the subject prior to treatment.

[0511] Embodiment 174. The method of embodiment 173, wherein the cells are selected from the group consisting of hematopoietic stem cells (HSC), hematopoietic progenitor cells (HPC), CD34+ cells, mesenchymal stem cells (MSC), induced pluripotent stem cells (iPSC), common myeloid progenitor cells, proerythroblast cells, and erythroblast cells.

[0512] Embodiment 175. The method of embodiment 173 or embodiment 174, wherein the target nucleic acid of the cells has been edited such that expression of the BCL11A protein is reduced by at least about 10%, at least about 20%, at least about 30%, at least about 40%, at least about 50%, at least about 60%, at least about 70%, at least about 80%, or at least about 90% in comparison to target nucleic acid of cells that have not been edited.

[0513] Embodiment 176. The method of any one of embodiments 173-175, wherein the subject is selected from the group consisting of mouse, rat, pig, and non-human primate.

[0514] Embodiment 177. The method of any one of embodiments 173-175, wherein the subject is a human.

[0515] Embodiment 178. The method of any one of embodiments 173-177, wherein the vector is administered at a dose of at least about 1×10⁵ vector genomes/kg (vg/kg), at least about 1×10⁶ vg/kg, at least about 1×10⁷ vg/kg, at least about 1×10⁸ vg/kg, at least about 1×10⁹ vg/kg, at least about 1×10¹⁰ vg/kg at least about 1×10¹¹ vg/kg, at least about 1×10¹² vg/kg, at least about 1×10¹³ vg/kg, at least about 1×10¹⁴vg/kg, at least about 1×10¹⁵ vg/kg, or at least about 1×10¹⁶ vg/kg.

[0516] Embodiment 179. The method of any one of embodiments 173-177, wherein the VLP is administered at a dose of at least about 1×10⁵ particles/kg, at least about 1×10⁶ particles/kg, at least about 1×10⁷ particles/kg, at least about 1×10⁸ particles/kg, at least about 1×10⁹ particles/kg, at least about 1×10¹⁰ particles/kg at least about 1×10¹¹ particles/kg, at least about 1×10¹² particles/kg, at least about 1×10¹³ particles/kg, at least about 1×10¹⁴ particles/kg, at least about 1×10¹⁵ particles/kg, or at least about 1×10¹⁶ particles/kg.

[0517] Embodiment 180. The method of any one of embodiments 173-179, wherein the vector or VLP is administered by a route of administration selected from transplantation, local injection, systemic infusion, or combinations thereof.

[0518] Embodiment 181. The composition of any one of embodiments 1-74, the nucleic acid of any one of embodiments 75-78, the vector of any one of 79-84, the VLP of any one of embodiments 85-88, the host cell of embodiment 92 or embodiment 93, or the population of cells of embodiment 125 or embodiment 126, for use as a medicament for the treatment of a hemoglobinopathy.

[0519] Embodiment 182. The composition of embodiment 1, wherein the target nucleic acid sequence is complementary to a non-target strand sequence located 1 nucleotide 3′ of a protospacer adjacent motif (PAM) sequence.

[0520] Embodiment 183. The composition of embodiment 182, wherein the PAM sequence comprises a TC motif.

[0521] Embodiment 184. The composition of embodiment 183, wherein the PAM sequence comprises ATC, GTC, CTC or TTC.

[0522] Embodiment 185. The composition of any one of embodiments 182-184, wherein the Class 2 Type V CRISPR protein comprises a RuvC domain.

[0523] Embodiment 186. The composition of embodiment 185, wherein the RuvC domain generates a staggered double-stranded break in the target nucleic acid sequence.

[0524] Embodiment 187. The composition of any one of embodiments 182-186, wherein the Class 2 Type V CRISPR protein does not comprise an HNH nuclease domain.

[0525] Set II

[0526] Embodiment 1. A system comprising a Class 2 Type V CRISPR protein and a first guide ribonucleic acid (gRNA), wherein the gRNA comprises a targeting sequence complementary to a target nucleic acid sequence comprising a polypyrimidine tract-binding protein 1 (BCL11A) gene.

[0527] Embodiment 2. The system of embodiment 1, wherein the gRNA comprises a targeting sequence complementary to a target nucleic acid sequence selected from the group consisting of:
[0528] a. a BCL11A intron;
[0529] b. a BCL11A exon;
[0530] c. a BCL11A intron-exon junction;
[0531] d. a BCL11A regulatory element; and e. an intergenic region.

[0532] Embodiment 3. The system of embodiment 1 or embodiment 2, wherein the BCL11A gene comprises a wild-type sequence.

[0533] Embodiment 4. The system of any one of embodiments 1-3, wherein the gRNA is a single-molecule gRNA (sgRNA).

[0534] Embodiment 5. The system of any one of embodiments 1-4, wherein the gRNA is a dual-molecule gRNA (dgRNA).

[0535] Embodiment 6. The system of any one of embodiments 1-5, wherein the targeting sequence of the gRNA comprises a sequence selected from the group consisting of SEQ ID NOS: 272-2100 and 2286-26789, or a sequence having at least about 65%, at least about 75%, at least about 85%, or at least about 95% identity thereto.

[0536] Embodiment 7. The system of any one of embodiments 1-5, wherein the targeting sequence of the gRNA comprises a sequence selected from the group consisting of SEQ ID NOS: 272-2100 and 2286-26789.

[0537] Embodiment 8. The system of embodiment 7, wherein the targeting sequence has a single nucleotide removed from the 3′ end of the sequence.

[0538] Embodiment 9. The system of embodiment 7, wherein the targeting sequence has two nucleotides removed from the 3′ end of the sequence.

[0539] Embodiment 10. The system of embodiment 7, wherein the targeting sequence has three nucleotides removed from the 3′ end of the sequence.

[0540] Embodiment 11. The system of embodiments 7, wherein the targeting sequence has four nucleotides removed from the 3′ end of the sequence.

[0541] Embodiment 12. The system of embodiment 7, wherein the targeting sequence has five nucleotides removed from the 3′ end of the sequence.

[0542] Embodiment 13. The system of any one of embodiments 1-12, wherein the targeting sequence of the gRNA is complementary to a sequence of a BCL11A exon.

[0543] Embodiment 14. The system of embodiment 13, wherein the targeting sequence of the gRNA is complementary to a sequence selected from the group consisting of a BCL11A exon 1 sequence, BCL11A exon 2 sequence, BCL11A exon 3 sequence, BCL11A exon 4 sequence, BCL11A exon 5 sequence, BCL11A exon 6 sequence, BCL11A exon 7 sequence, BCL11A exon 8 sequence, and a BCL11A exon 9 sequence.

[0544] Embodiment 15. The system of embodiment 14, wherein the targeting sequence of the gRNA is complementary to a sequence selected from the group consisting of a BCL11A exon 1 sequence, BCL11A exon 2 sequence, and a BCL11A exon 3 sequence.

[0545] Embodiment 16. The system of any one of embodiments 1-12, wherein the targeting sequence of the gRNA is complementary to a sequence of a BCL11A regulatory element.

[0546] Embodiment 17. The system of embodiment 16, wherein the targeting sequence of the gRNA is complementary to a sequence of a promoter of the BCL11A gene.

[0547] Embodiment 18. The system of embodiment 16, wherein the targeting sequence of the gRNA is complementary to a sequence of an enhancer regulatory element.

[0548] Embodiment 19. The system of embodiment 18, wherein the targeting sequence of the gRNA is complementary to a sequence that comprises a GATA1 erythroid-specific enhancer binding site (GATA1) of the BCL11A gene.

[0549] Embodiment 20. The system of embodiment 16, wherein the targeting sequence of the gRNA is complementary to a sequence that is 5′ to the GATA1 binding site of the BCL11A gene.

[0550] Embodiment 21. The system of embodiment 19 or embodiment 20, wherein the targeting sequence of the gRNA comprises a sequence of UGGAGCCUGUGAUAAAAGCA (SEQ ID NO: 22), or a sequence having at least 90% or 95% sequence identity thereto.

[0551] Embodiment 22. The system of embodiment 19, wherein the targeting sequence of the gRNA consists of a sequence of UGGAGCCUGUGAUAAAAGCA (SEQ ID NO: 22).

[0552] Embodiment 23. The system of embodiment 18, wherein the targeting sequence of the gRNA comprises a sequence of UGCUUUUAUCACAGGCUCCA (SEQ ID NO: 23), or a sequence having at least 90% or 95% sequence identity thereto.

[0553] Embodiment 24. The system of embodiment 18, wherein the targeting sequence of the gRNA consists of a sequence of UGCUUUUAUCACAGGCUCCA (SEQ ID NO: 23).

[0554] Embodiment 25. The system of embodiment 19 or embodiment 20, wherein the targeting sequence of the gRNA comprises a sequence of CAGGCUCCAGGAAGGGUUUG (SEQ ID NO: 2949), or a sequence having at least 90% or 95% sequence identity thereto.

[0555] Embodiment 26. The system of embodiment 19 or embodiment 20, wherein the targeting sequence of the gRNA consists of a sequence of CAGGCUCCAGGAAGGGUUUG (SEQ ID NO: 2949).

[0556] Embodiment 27. The system of embodiment 19 or embodiment 20, wherein the targeting sequence of the gRNA comprises a sequence of GAGGCCAAACCCUUCCUGGA (SEQ ID NO: 2948), or a sequence having at least 90% or 95% sequence identity thereto.

[0557] Embodiment 28. The system of embodiment 19 or embodiment 20, wherein the targeting sequence of the gRNA consists of a sequence of CAGGCUCCAGGAAGGGUUUG (SEQ ID NO: 2948).

[0558] Embodiment 29. The system of embodiment 19 or embodiment 20, wherein the targeting sequence of the gRNA comprises a sequence of AGUGCAAGCUAACAGUUGCU (SEQ ID NO: 15747), or a sequence having at least 90% or 95% sequence identity thereto.

[0559] Embodiment 30. The system of embodiment 19 or embodiment 20, wherein the targeting sequence of the gRNA consists of a sequence of AGUGCAAGCUAACAGUUGCU (SEQ ID NO: 15747).

[0560] Embodiment 31. The system of embodiment 19 or embodiment 20, wherein the targeting sequence of the gRNA comprises a sequence of AUACAACUUUGAAGCUAGUC (SEQ ID NO: 15748), or a sequence having at least 90% or 95% sequence identity thereto.

[0561] Embodiment 32. The system of embodiment 19 or embodiment 20, wherein the targeting sequence of the gRNA consists of a sequence of AUACAACUUUGAAGCUAGUC (SEQ ID NO: 15748).

[0562] Embodiment 33. The system of any one of embodiments 1-32, further comprising a second gRNA, wherein the second gRNA has a targeting sequence complementary to a different or overlapping portion of the BCL11A target nucleic acid compared to the targeting sequence of the gRNA of the first gRNA.

[0563] Embodiment 34. The system of embodiment 33, wherein the targeting sequence of the second gRNA is complementary to a sequence of the target nucleic acid that is 5′ or 3′ to the GATA1 binding site sequence.

[0564] Embodiment 35. The system of embodiment 33, wherein the first and the second gRNA each have a targeting sequence complementary to a sequence within the promoter of the BCL11A gene.

[0565] Embodiment 36. The system of any one of embodiments 1-35, wherein the first or second gRNA has a scaffold comprising a sequence selected from the group consisting of SEQ ID NOS: 2238-2285, 26794-26839 and 27219-27265 or a sequence having at least about 50%, at least about 60%, at least about 70%, at least about 80%, at least about 90%, at least about 95%, at least about 96%, at least about 97%, at least about 98%, at least about 99% sequence identity thereto.

[0566] Embodiment 37. The system of any one of embodiments 1-36, wherein the first or second gRNA has a scaffold comprising a sequence selected from the group consisting of SEQ ID NOs: 2238-2285, 26794-26839 and 27219-27265.

[0567] Embodiment 38. The system of any one of embodiments 1-36, wherein the first or second gRNA has a scaffold consisting of a sequence selected from the group consisting of SEQ ID NOs: 2238-2285, 26794-26839 and 27219-27265.

[0568] Embodiment 39. The system of embodiment 38, wherein the first or second gRNA has a scaffold consisting of the sequence of SEQ ID NO: 2238 or SEQ ID NO: 26800.

[0569] Embodiment 40. The system of any one of embodiments 36-39, wherein targeting sequence is linked to the 3′ end of the scaffold of the gRNA.

[0570] Embodiment 41. The system of any one of embodiments 1-40, wherein the Class 2 Type V CRISPR protein is a CasX variant protein comprising a sequence selected from the group consisting of SEQ ID NOS: 59, 72-99, 101-148, and 26908-27154, or a sequence having at least about 50%, at least about 60%, at least about 70%, at least about 80%, at least about 90%, or at least about 95%, or at least about 95%, or at least about 96%, or at least about 97%, or at least about 98%, or at least about 99% sequence identity thereto.

[0571] Embodiment 42. The system of embodiment 41, wherein the Class 2 Type V CRISPR protein is a CasX variant protein comprising a sequence selected from the group consisting of SEQ ID NOS: 59, 72-99, 101-148, and 26908-27154.

[0572] Embodiment 43. The system of embodiment 41, wherein the CasX variant protein consists of a sequence selected from the group consisting of SEQ ID NOS: 59, 72-99, 101-148, and 26908-27154.

[0573] Embodiment 44. The system of embodiment 42, wherein the CasX variant protein consists of a sequence selected from the group consisting of SEQ ID NOS: 126, 27043, 27046, 27050.

[0574] Embodiment 45. The system of embodiment 41, wherein the CasX variant protein comprises at least one modification relative to a reference CasX protein having a sequence selected from SEQ ID NOS:1-3.

[0575] Embodiment 46. The system of embodiment 45, wherein the at least one modification comprises at least one amino acid substitution, deletion, or substitution in a domain of the CasX variant protein relative to the reference CasX protein.

[0576] Embodiment 47. The system of embodiment 46, wherein the domain is selected from the group consisting of a non-target strand binding (NTSB) domain, a target strand loading (TSL) domain, a helical I domain, a helical II domain, an oligonucleotide binding domain (OBD), and a RuvC DNA cleavage domain.

[0577] Embodiment 48. The system of any one of embodiments 41-47, wherein the CasX variant protein does not comprise an HNH domain.

[0578] Embodiment 49. The system of any one of embodiments 41-48, wherein the CasX variant protein further comprises one or more nuclear localization signals (NLS).

[0579] Embodiment 50. The system of embodiment 49, wherein the one or more NLS are selected from the group of sequences consisting of PKKKRKV (SEQ ID NO: 168), KRPAATKKAGQAKKKK (SEQ ID NO: 169), PAAKRVKLD (SEQ ID NO: 170), RQRRNELKRSP (SEQ ID NO: 171), NQSSNFGPMKGGNFGGRSSGPYGGGGQYFAKPRNQGGY (SEQ ID NO: 172), RMRIZFKNKGKDTAELRRRRVEVSVELRKAKKDEQILKRRNV (SEQ ID NO: 173), VSRKRPRP (SEQ ID NO: 174), PPKKARED (SEQ ID NO: 175), PQPKKKPL (SEQ ID NO: 176), SALIKKKKKMAP (SEQ ID NO: 177), DRLRR (SEQ ID NO: 178), PKQKKRK (SEQ ID NO: 179), RKLKKKIKKL (SEQ ID NO: 180), REKKKFLKRR (SEQ ID NO: 181), KRKGDEVDGVDEVAKKKSKK (SEQ ID NO: 182), RKCLQAGMNLEARKTKK (SEQ ID NO: 183), PRPRKIPR (SEQ ID NO: 184), PPRKKRTVV (SEQ ID NO: 185), NLSKKKKRKREK (SEQ ID NO: 186), RRPSRPFRKP (SEQ ID NO: 187), KRPRSPSS (SEQ ID NO: 188), KRGINDRNFWRGENERKTR (SEQ ID NO: 189), PRPPKMARYDN (SEQ ID NO: 190), KRSFSKAF (SEQ ID NO: 191), KLKIKRPVK (SEQ ID NO: 192), PKKKRKVPPPPAAKRVKLD (SEQ ID NO: 193), PKTRRRPRRSQRKRPPT (SEQ ID NO:26792), SRRRKANPTKLSENAKKLAKEVEN (SEQ ID NO: 194), KTRRRPRRSQRKRPPT (SEQ ID NO: 195), RRKKRRPRRKKRR (SEQ ID NO: 196), PKKKSRKPKKKSRK (SEQ ID NO: 197), HKKKHPDASVNFSEFSK (SEQ ID NO: 198), QRPGPYDRPQRPGPYDRP (SEQ ID NO: 199), LSPSLSPLLSPSLSPL (SEQ ID NO: 200), RGKGGKGLGKGGAKRHRK (SEQ ID NO: 201), PKRGRGRPKRGRGR (SEQ ID NO: 202), PKKKRKVPPPPAAKRVKLD (SEQ ID NO: 203), PKKKRKVPPPPKKKRKV (SEQ ID NO: 204), PAKRARRGYKC (SEQ ID NO: 27199), KLGPRKATGRW (SEQ ID NO: 27200), PRRKREE (SEQ ID NO: 27201), PYRGRKE (SEQ ID NO: 27202), PLRKRPRR (SEQ ID NO: 27203), PLRKRPRRGSPLRKRPRR (SEQ ID NO: 27204), PAAKRVKLDGGKRTADGSEFESPKKKRKV (SEQ ID NO: 27205), PAAKRVKLDGGKRTADGSEFESPKKKRKVGIHGVPAA (SEQ ID NO: 27206), PAAKRVKLDGGKRTADGSEFESPKKKRKVAEAAAKEAAAKEAAAKA (SEQ ID NO: 207), PAAKRVKLDGGKRTADGSEFESPKKKRKVPG (SEQ ID NO: 27208), KRKGSPERGERKRHW (SEQ ID NO: 27209), KRTADSQHSTPPKTKRKVEFEPKKKRKV (SEQ ID NO: 27210), and PKKKRKVGGSKRTADSQHSTPPKTKRKVEFEPKKKRKV (SEQ ID NO: 27211), wherein the one or more NLS are linked to the CRISPR protein or to adjacent NLS with a linker peptide wherein the linker peptide is selected from the group consisting of RS, (G)n (SEQ ID NO: 27212), (GS)n (SEQ ID NO: 27213), (GSGGS)n (SEQ ID NO: 214), (GGSGGS)n (SEQ ID NO: 215), (GGGS)n (SEQ ID NO: 216), GGSG (SEQ ID NO: 217), GGSGG (SEQ ID NO: 218), GSGSG (SEQ ID NO: 219), GSGGG (SEQ ID NO: 220), GGGSG (SEQ ID NO: 221), GSSSG (SEQ ID NO: 222), GPGP (SEQ ID NO: 223), GGP, PPP, PPAPPA (SEQ ID NO: 224), PPPG (SEQ ID NO: 27214), PPPGPPP (SEQ ID NO: 225), PPP(GGGS)n (SEQ ID NO: 27215), (GGGS)nPPP (SEQ ID NO: 27216), AEAAAKEAAAKEAAAKA (SEQ ID NO: 27217), and TPPKTKRKVEFE (SEQ ID NO: 27218), wherein n is 1 to 5.

[0580] Embodiment 51. The system of embodiment 49 or embodiment 50, wherein the one or more NLS are located at or near the C-terminus of the CasX variant protein.

[0581] Embodiment 52. The system of embodiment 49 or embodiment 50, wherein the one or more NLS are located at or near the N-terminus of the CasX variant protein.

[0582] Embodiment 53. The system of embodiment 49 or embodiment 50, comprising one or more NLS located at or near the N-terminus and at or near the C-terminus of the CasX variant protein.

[0583] Embodiment 54. The system of any one of embodiments 41-53, wherein the CasX variant is capable of forming a ribonuclear protein complex (RNP) with a guide nucleic acid (gRNA).

[0584] Embodiment 55. The system of embodiment 54, wherein an RNP of the CasX variant protein and the gRNA variant exhibit at least one or more improved characteristics as compared to an RNP of a reference CasX protein of SEQ ID NO: 1, SEQ ID NO: 2, or SEQ ID NO: 3 and a gRNA comprising a sequence of any one of SEQ ID NOs: 4-16.

[0585] Embodiment 56. The system of embodiment 55, wherein the improved characteristic is selected from one or more of the group consisting of improved folding of the CasX variant; improved binding affinity to a guide nucleic acid (gRNA); improved binding affinity to a target DNA; improved ability to utilize a greater spectrum of one or more protospacer adjacent motif (PAM) sequences, including ATC, CTC, GTC, or TTC, in the editing of target DNA; improved unwinding of the target DNA; increased editing activity; improved editing efficiency; improved editing specificity; increased nuclease activity; improved target nucleic acid sequence cleavage rate; increased target strand loading for double strand cleavage; decreased target strand loading for single strand nicking; decreased off-target cleavage; improved binding of non-target DNA strand; improved protein stability; improved protein solubility; improved ribonuclear protein complex (RNP) formation; higher percentage of cleavage-competent RNP; improved protein:gRNA complex (RNP) stability; improved protein:gRNA complex solubility; improved protein yield; improved protein expression; and improved fusion characteristics.

[0586] Embodiment 57. The system of embodiment 55 or embodiment 56, wherein the improved characteristic of the RNP of the CasX variant protein and the gRNA variant is at least about 1.1 to about 100-fold or more improved relative to the RNP of the reference CasX protein of SEQ ID NO: 1, SEQ ID NO: 2, or SEQ ID NO: 3 and the gRNA comprising a sequence of any one of SEQ ID NOs: 4-16.

[0587] Embodiment 58. The system of embodiment 55 or embodiment 56, wherein the improved characteristic of the CasX variant protein is at least about 1.1, at least about 2, at least about 10, at least about 100-fold or more improved relative to the reference CasX protein of SEQ ID NO: 1, SEQ ID NO: 2, or SEQ ID NO: 3 and the gRNA comprising a sequence of any one of SEQ ID NOs: 4-16.

[0588] Embodiment 59. The system of embodiment 55 or embodiment 56, wherein the improved characteristic of the CasX variant protein is at least about 1.1, at least about 2, at least about 10, at least about 100-fold or more improved relative to the reference CasX protein of SEQ ID NO: 1, SEQ ID NO: 2, or SEQ ID NO: 3 and the gNA comprising a sequence of any one of SEQ ID NOS: 4-16.

[0589] Embodiment 60. The system of any one of embodiments 55-59, wherein the improved characteristic comprises editing efficiency, and the RNP of the CasX variant protein and the gRNA variant comprises a 1.1 to 100-fold improvement in editing efficiency compared to the RNP of the reference CasX protein of SEQ ID NO: 2 and the gRNA of any one of SEQ ID NOs: 4-16.

[0590] Embodiment 61. The system of any one of embodiments 54-59, wherein the RNP comprising the CasX variant and the gRNA variant exhibits greater editing efficiency and/or binding of a target nucleic acid sequence when any one of the PAM sequences TTC, ATC, GTC, or CTC is located 1 nucleotide 5′ to the non-target strand of a protospacer having identity with the targeting sequence of the gRNA in a cellular assay system compared to the editing efficiency and/or binding of an RNP comprising a reference CasX protein and a reference gRNA in a comparable assay system.

[0591] Embodiment 62. The system of embodiment 61, wherein the PAM sequence is TTC.

[0592] Embodiment 63. The system of embodiment 62, wherein the targeting sequence of the gRNA comprises a sequence selected from the group consisting of SEQ ID NOS: 17904-26789.

[0593] Embodiment 64. The system of embodiment 61, wherein the PAM sequence is ATC.

[0594] Embodiment 65. The system of embodiment 64, wherein the targeting sequence of the gRNA comprises a sequence selected from the group consisting of SEQ ID NOS: 272-2100 and 2286-5625.

[0595] Embodiment 66. The system of embodiment 61, wherein the PAM sequence is CTC.

[0596] Embodiment 67. The system of embodiment 66, wherein the targeting sequence of the gRNA comprises a sequence selected from the group consisting of SEQ ID NOS: 5626-13616.

[0597] Embodiment 68. The system of embodiment 61, wherein the PAM sequence is GTC.

[0598] Embodiment 69. The system of embodiment 66, wherein the targeting sequence of the gRNA comprises a sequence selected from the group consisting of SEQ ID NOS: 13617-17903.

[0599] Embodiment 70. The system of any one of embodiments 61-68, wherein the increased binding affinity for the one or more PAM sequences is at least 1.5-fold greater compared to the binding affinity of any one of the reference CasX proteins of SEQ ID NOS: 1-3 for the PAM sequences.

[0600] Embodiment 71. The system of any one of embodiments 54-70, wherein the RNP has at least a 5%, at least a 10%, at least a 15%, or at least a 20% higher percentage of cleavage-competent RNP compared to an RNP of the reference CasX protein and the gRNA of SEQ ID NOs: 4-16.

[0601] Embodiment 72. The system of any one of embodiments 41-71, wherein the CasX variant protein comprises a RuvC DNA cleavage domain having nickase activity.

[0602] Embodiment 73. The system of any one of embodiments 41-71, wherein the CasX variant protein comprises a RuvC DNA cleavage domain having double-stranded cleavage activity.

[0603] Embodiment 74. The system of any one of embodiments 1-54, wherein the CasX protein is a catalytically inactive CasX (dCasX) protein, and wherein the dCasX and the gRNA retain the ability to bind to the BCL11A target nucleic acid.

[0604] Embodiment 75. The system of embodiment 74, wherein the dCasX comprises a mutation at residues:
[0605] a. D672, E769, and/or D935 corresponding to the CasX protein of SEQ ID NO:1; or b. D659, E756 and/or D922 corresponding to the CasX protein of SEQ ID NO: 2.

[0606] Embodiment 76. The system of embodiment 75, wherein the mutation is a substitution of alanine for the residue.

[0607] Embodiment 77. The system of any one of embodiments 1-73, further comprising a donor template nucleic acid.

[0608] Embodiment 78. The system of embodiment 77, wherein the donor template comprises a nucleic acid comprising at least a portion of a BCL11A gene selected from the group consisting of a BCL11A exon, a BCL11A intron, a BCL11A intron-exon junction, a BCL11A regulatory element, and the GATA1 binding site sequence.

[0609] Embodiment 79. The system of embodiment 78, wherein the donor template sequence comprises one or more mutations relative to a corresponding portion of a wild-type BCL11A gene.

[0610] Embodiment 80. The system of embodiment 78 or embodiment 79, wherein the donor template comprises a nucleic acid comprising at least a portion of a BCL11A exon selected from the group consisting of BCL11A exon 1, BCL11A exon 2, BCL11A exon 3, BCL11A exon 4, BCL11A exon 5, BCL11A exon 6, BCL11A exon 7, BCL11A exon 8, and BCL11A exon 9.

[0611] Embodiment 81. The system of embodiment 80, wherein the donor template comprises a nucleic acid comprising at least a portion of a BCL11A exon selected from the group consisting of BCL11A exon 1, BCL11A exon 2, and BCL11A exon 3.

[0612] Embodiment 82. The system of any one of embodiments 77-81, wherein the donor template ranges in size from 10-15,000 nucleotides.

[0613] Embodiment 83. The system of any one of embodiments 77-82, wherein the donor template is a single-stranded DNA template or a single stranded RNA template.

[0614] Embodiment 84. The system of any one of embodiments 77-82, wherein the donor template is a double-stranded DNA template.

[0615] Embodiment 85. The system of any one of embodiments 77-84, wherein the donor template comprises homologous arms at or near the 5′ and 3′ ends of the donor template that are complementary to sequences flanking cleavage sites in the BCL11A target nucleic acid introduced by the Class 2 Type V CRISPR protein.

[0616] Embodiment 86. A nucleic acid comprising the donor template of any one of embodiments 77-85.

[0617] Embodiment 87. A nucleic acid comprising a sequence that encodes the CasX of any one of embodiments 41-76.

[0618] Embodiment 88. A nucleic acid comprising a sequence that encodes the gRNA of any one of embodiments 1-39.

[0619] Embodiment 89. The nucleic acid of embodiment 87, wherein the sequence that encodes the CasX protein is codon optimized for expression in a eukaryotic cell.

[0620] Embodiment A vector comprising the gRNA of any one of embodiments 1-39, the CasX protein of any one of embodiments 41-76, or the nucleic acid of any one of embodiments 86-89.

[0621] Embodiment 91. The vector of embodiment 90, wherein the vector further comprises one or more promoters.

[0622] Embodiment 92. The vector of embodiment 90 or embodiment 91, wherein the vector is selected from the group consisting of a retroviral vector, a lentiviral vector, an adenoviral vector, an adeno-associated viral (AAV) vector, a herpes simplex virus (HSV) vector, a virus-like particle (VLP), a CasX delivery particle (XDP), a plasmid, a minicircle, a nanoplasmid, a DNA vector, and an RNA vector.

[0623] Embodiment 93. The vector of embodiment 92, wherein the vector is an AAV vector.

[0624] Embodiment 94. The vector of embodiment 93, wherein the AAV vector is selected from AAV1, AAV2, AAV3, AAV4, AAV5, AAV6, AAV7, AAV8, AAV9, AAV10, AAV-Rh74, or AAVRh10.

[0625] Embodiment 95. The vector of embodiment 94, wherein the AAV vector is selected from AAV1, AAV2, AAV5, AAV8, or AAV9.

[0626] Embodiment 96. The vector of embodiment 94 or embodiment 95, wherein the AAV vector comprises a nucleic acid comprising the following components:
[0627] a. 5′ ITR;
[0628] b. a 3′ ITR; and
[0629] c. a transgene comprising the nucleic acid of embodiment 87 operably linked to a first promoter and the nucleic acid of embodiment 88 operably linked to a second promoter.

[0630] Embodiment 97. The vector of embodiment 96, wherein the nucleic acid further comprises a poly(A) sequence 3′ to the sequence encoding the CasX protein.

[0631] Embodiment 98. The vector of embodiment 96 or embodiment 97, wherein the nucleic acid further comprises one or more enhancer elements.

[0632] Embodiment 99. The vector of any one of embodiments 96-98, wherein a single AAV particle is capable of containing the nucleic acid, wherein the AAV particle has all the components necessary to transduce and effectively modify a target nucleic in a target cell.

[0633] Embodiment 100. The vector of embodiment 92, wherein the vector is a retroviral vector.

[0634] Embodiment 101. The vector of embodiment 92, wherein the vector is a XDP comprising one or more components of a gag polyprotein.

[0635] Embodiment 102. The vector of embodiment 101, wherein the one or more components of the gag polyprotein are selected from the group consisting of a matrix protein (MA), a nucleocapsid protein (NC), a capsid protein (CA), a pl peptide, a p6 peptide, a P2A peptide, a P2B peptide, a P10 peptide, a p12 peptide, a PP 21/24 peptide, a P12/P3/P8 peptide, and a P20 peptide.

[0636] Embodiment 103. The vector of embodiment 101 or embodiment 102, wherein the XDP comprises the one or more components of the gag polyprotein, the CasX protein, and the gRNA.

[0637] Embodiment 104. The vector of embodiment 103, wherein the CasX protein and the gRNA are associated together in an RNP.

[0638] Embodiment 105. The vector of any one of embodiments 101-104, further comprising the donor template.

[0639] Embodiment 106. The vector of any one of embodiments 101-104, further comprising a pseudotyping viral envelope glycoprotein or antibody fragment that provides for binding and fusion of the XDP to a target cell.

[0640] Embodiment 107. The vector of embodiment of embodiment, wherein the target cell is selected from the group consisting of a hematopoietic stem cell (HSC), a hematopoietic progenitor cell (HPC), a CD34+ cell, a mesenchymal stem cell (MSC), an embryonic stem (ES) cell, an induced pluripotent stem cell (iPSC), a common myeloid progenitor cell, a proerythroblast cell, and an erythroblast cell.

[0641] Embodiment 108. A host cell comprising the vector of any one of embodiments 90-107..

[0642] Embodiment 109. The host cell of embodiment 108, wherein the host cell is selected from the group consisting of BHK, HEK293, HEK293T, NS0, SP2/0, YO myeloma cells, P3X63 mouse myeloma cells, PER, PER.C6, NIH3T3, COS, HeLa, CHO, and yeast cells.

[0643] Embodiment 110. A method of modifying a BCL11A target nucleic acid sequence in a population of cells, the method comprising introducing into cells of the population:
[0644] a. the system of any one of embodiments 1-85;
[0645] b. the nucleic acid of any one of embodiments 86-89;
[0646] c. the vector as in any one of embodiments 90-95;
[0647] d. the XDP of any one of embodiments 101-107; or
[0648] e. combinations of two or more of (a)-(d),
   wherein the BCL11A gene target nucleic acid sequence of the cells targeted by the first gRNA is modified by the CasX variant protein.

[0649] Embodiment 111. The method of embodiment 110, wherein the modifying comprises introducing a single-stranded break in the BCL11A gene target nucleic acid sequence of the cells of the population.

[0650] Embodiment 112. The method of embodiment 110, wherein the modifying comprises introducing a double-stranded break in the BCL11A gene target nucleic acid sequence of the cells of the population.

[0651] Embodiment 113. The method of any one of embodiments 110-112, further comprising introducing into the cells of the population a second gRNA or a nucleic acid encoding the second gRNA, wherein the second gRNA has a targeting sequence complementary to a different or overlapping portion of the BCL11A gene target nucleic acid compared to the first gRNA, resulting in an additional break in the BCL11A target nucleic acid of the cells of the population.

[0652] Embodiment 114. The method of any one of embodiments 110-113, wherein the modifying comprises introducing an insertion, deletion, substitution, duplication, or inversion of one or more nucleotides in the BCL11A gene of the cells of the population.

[0653] Embodiment 115. The method of embodiment 110-114, wherein a GATA1 binding site sequence of the target nucleic acid is modified.

[0654] Embodiment 116. The method of any one of embodiments 110-113, wherein the method comprises insertion of the donor template into the break site(s) of the BCL11A gene target nucleic acid sequence of the cells of the population.

[0655] Embodiment 117. The method of embodiment 114, wherein the insertion of the donor template is mediated by homology-directed repair (HDR) or homology-independent targeted integration (HITI).

[0656] Embodiment 118. The method of embodiment 116 or embodiment 117, wherein the GATA1 binding site sequence of the target nucleic acid is modified.

[0657] Embodiment 119. The method of any one of embodiments 116-118, wherein insertion of the donor template results in a knock-down or knock-out of the BCL11A gene in the cells of the population.

[0658] Embodiment 120. The method of any one of embodiments 110-119, wherein the BCL11A gene of the cells of the population is modified such that expression of the BCL11A protein is reduced by at least about 10%, at least about 20%, at least about 30%, at least about 40%, at least about 50%, at least about 60%, at least about 70%, at least about 80%, or at least about 90% in comparison to cells in which the BCL11A gene has not been modified.

[0659] Embodiment 121. The method of any one of embodiments 110-119, wherein the BCL11A gene of the cells of the population is modified such that at least about 10%, at least about 20%, at least about 30%, at least about 40%, at least about 50%, at least about 60%, at least about 70%, at least about 80%, or at least about 90% of the modified cells do not express a detectable level of BCL11A protein.

[0660] Embodiment 122. The method of any one of embodiments 110-121, wherein the cells are eukaryotic.

[0661] Embodiment 123. The method of embodiment 122, wherein the eukaryotic cells are selected from the group consisting of rodent cells, mouse cells, rat cells, and non-human primate cells.

[0662] Embodiment 124. The method of embodiment 122, wherein the eukaryotic cells are human cells.

[0663] Embodiment 125. The method of any one of embodiments 122-124, wherein the eukaryotic cell is selected from the group consisting of a hematopoietic stem cell (HSC), a hematopoietic progenitor cell (HPC), a CD34+ cell, a mesenchymal stem cell (MSC), induced pluripotent stem cell (iPSC), a common myeloid progenitor cell, a proerythroblast cell, and an erythroblast cell.

[0664] Embodiment 126. The method of any one of embodiment 110-125, wherein the modification of the BCL11A gene target nucleic acid sequence of the population of cells occurs in vitro or ex vivo.

[0665] Embodiment 127. The method of any one of embodiment 110-125, wherein the modification of the BCL11A gene target nucleic acid sequence of the population of cells occurs in vivo in a subject.

[0666] Embodiment 128. The method of embodiment 127, wherein the subject is selected from the group consisting of a rodent, a mouse, a rat, and a non-human primate.

[0667] Embodiment 129. The method of embodiment 127, wherein the subject is a human.

[0668] Embodiment 130. The method of any one of embodiments 127-129, wherein the method comprises administering a therapeutically effective dose of the AAV vector to the subject.

[0669] Embodiment 131. The method of embodiment 130, wherein the AAV vector is administered to the subject at a dose of at least about 1×10⁵ vector genomes/kg (vg/kg), at least about 1×10⁶ vg/kg, at least about 1×10⁷ vg/kg, at least about 1×10⁸ vg/kg, at least about 1×109 vg/kg, at least about 1×10¹⁰ vg/kg, at least about 1×10¹¹ vg/kg, at least about 1×10¹² vg/kg, at least about 1×10¹³ vg/kg, at least about 1×10¹⁴ vg/kg, at least about 1×10¹⁵ vg/kg, or at least about 1×10¹⁶ vg/kg.

[0670] Embodiment 132. The method of embodiment 130, wherein the AAV vector is administered to the subject at a dose of at least about 1×10⁵ vg/kg to about 1×10¹⁶ vg/kg, at least about 1×10⁶ vg/kg to about 1×10¹⁵ vg/kg, or at least about 1×10⁷ vg/kg to about 1×10¹⁴ vg/kg.

[0671] Embodiment 133. The method of any one of embodiments 127-129, wherein the method comprises administering a therapeutically effective dose of a XDP to the subject.

[0672] Embodiment 134. The method of embodiment 133, wherein the XDP is administered to the subject at a dose of at least about 1×10⁵ particles/kg, at least about 1×10⁶ particles/kg, at least about 1×10⁷ particles/kg at least about 1×10⁸ particles/kg, at least about 1×10⁹ particles/kg, at least about 1×10¹⁰ particles/kg, at least about 1×10¹¹ particles/kg, at least about 1×10¹² particles/kg, at least about 1×10¹³ particles/kg, at least about 1×10¹⁴ particles/kg, at least about 1×10¹⁵ particles/kg, at least about 1×10¹⁶ particles/kg.

[0673] Embodiment 135. The method of embodiment 133, wherein the XDP is administered to the subject at a dose of at least about 1×10⁵ particles/kg to about 1×10¹⁶ particles/kg, or at least about 1×10⁶ particles/kg to about 1×10¹⁵ particles/kg, or at least about 1×10⁷ particles/kg to about 1×10¹⁴ particles/kg

[0674] Embodiment 136. The method of any one of embodiments 128-135, wherein the vector or XDP is administered to the subject by a route of administration selected from transplantation, local injection, systemic infusion, or combinations thereof.

[0675] Embodiment 137. The method of any one of embodiments 128-136, wherein the method results in an increased levels of hemoglobin F (HbF) in circulating blood of the subject of at least about 5%, at least about 10%, at least about 20%, at least about 30%, at least about 40%, or at least about 50% compared to the levels of HbF in the subject prior to treatment.

[0676] Embodiment 138. The method of any one of embodiments 128-137, wherein the method results in a ratio of HbF to hemoglobin S (HbS) in circulating blood of the subject of at least 0.01:1.0, at least 0.025:1.0, at least 0.05:1.0, at least 0.075:1.0 at least 0.1:1.0, at least 0.2:1.0, at least 0.3:1.0, at least 0.4:1.0, at least 0.5:1:0, at least 0.75:1.0, at least 1.0:1.0, at least 1.25:1.0, at least 1.5:1.0, or at least 1.75:1.0.

[0677] Embodiment 139. The method of any one of embodiments 128-138, wherein the method results in HbF levels of at least about 5%, or at least about 10%, or at least about 20%, or at least about 30% of total hemoglobin in circulating blood of the subject.

[0678] Embodiment 140. The method of any one of embodiments 110-139, further comprising contacting the BCL11A gene target nucleic acid sequence of the population of cells with:
[0679] a. an additional CRISPR nuclease and a gRNA targeting a different or overlapping portion of the BCL11A target nucleic acid compared to the first gRNA;
[0680] b. a polynucleotide encoding the additional CRISPR nuclease and the gRNA of (a);
[0681] c. a vector comprising the polynucleotide of (b); or
[0682] d. a XDP comprising the additional CRISPR nuclease and the gRNA of (a)
   wherein the contacting results in modification of the BCL11A gene at a different location in the sequence compared to the sequence targeted by the first gRNA.

[0683] Embodiment 141. The method of embodiment 140, wherein the additional CRISPR nuclease is a CasX protein having a sequence different from the CasX protein of any of the preceding embodiments.

[0684] Embodiment 142. The method of embodiment 140, wherein the additional CRISPR nuclease is not a CasX protein.

[0685] Embodiment 143. The method of embodiment 142, wherein the additional CRISPR nuclease is selected from the group consisting of Cas9, Cas12a, Cas12b, Cas12c, Cas12d (CasY), Cas12j, Cas12k, Cas13a, Cas13b, Cas13c, Cas13d, Cas14, Cpf1, C2cl, Csn2, and sequence variants thereof.

[0686] Embodiment 144. A population of cells modified by the method of any one of embodiments 110-143, wherein the cells have been modified such that at least 70%, at least 75%, at least 80%, at least 85%, at least 90%, or at least 95% of the modified cells do not express a detectable level of BCL11A protein.

[0687] Embodiment 145. A population of cells modified by the method of any one of embodiments 110-143, wherein the cells have been modified such that the expression of BCL11A protein is reduced by at least 70%, at least 75%, at least 80%, at least 85%, at least 90%, or at least 95% compared to cells where the BCL11A gene has not been modified.

[0688] Embodiment 146. A method of treating a hemoglobinopathy in a subject in need thereof, the method comprising administering to the subject a therapeutically effective amount of the cells of embodiment 144 or embodiment 145.

[0689] Embodiment 147. The method of embodiment 146, wherein the hemoglobinopathy is a sickle cell disease or beta-thalassemia.

[0690] Embodiment 148. The method of embodiment 146 or embodiment 147, wherein the cells are autologous with respect to the subject to be administered the cells.

[0691] Embodiment 149. The method of embodiments 146 or embodiment 147, wherein the cells are allogeneic with respect to the subject to be administered the cells.

[0692] Embodiment 150. The method of any one of embodiments 146-149, wherein the cells or their progeny persist in the subject for at least one month, two month, three months, four months, five months, six months, seven months, eight months, nine months, ten months, eleven months, twelve months, thirteen months, fourteen month, fifteen months, sixteen months, seventeen months, eighteen months, nineteen months, twenty months, twenty-one months, twenty-two months, twenty-three months, two years, three years, four years, or five years after administration of the modified cells to the subject.

[0693] Embodiment 151. The method of any one of embodiments 146-150, wherein the method results in an increased levels of hemoglobin F (HbF) in circulating blood of at least about 5%, at least about 10%, at least about 20%, at least about 30%, at least about 40%, or at least about 50% compared to the levels of HbF in the subject prior to treatment.

[0694] Embodiment 152. The method of any one of embodiments 146-150, wherein the method results in a ratio of HbF to hemoglobin S (HbS) in the subject of at least 0.01:1.0, at least 0.025:1.0, at least 0.05:1.0, at least 0.075:1.0 at least 0.1:1.0, at least 0.2:1.0, at least 0.3:1.0, at least 0.4:1.0, at least 0.5:1:0, at least 0.75:1.0, at least 1.0:1.0, at least 1.25:1.0, at least 1.5:1.0, or at least 1.75:1.0.

[0695] Embodiment 153. The method of any one of embodiments 146-150, wherein the method results in HbF levels of at least about 5%, or at least about 10%, or at least about 20%, or at least about 30% of total circulating hemoglobin in the subject.

[0696] Embodiment 154. The method of any one of embodiments 146-153, wherein the subject is selected from the group consisting of a rodent, a mouse, a rat, and a non-human primate.

[0697] Embodiment 155. The method of any one of embodiments 146-153, wherein the subject is a human.

[0698] Embodiment 156. A method of treating a hemoglobinopathy in a subject in need thereof, comprising modifying a BCL11A gene in cells of the subject, the modifying comprising contacting said cells with a therapeutically effective dose of:
[0699] a. the system of any one of embodiments 1-85;
[0700] b. the nucleic acid of any one of embodiments 86-89;
[0701] c. the vector as in any one of embodiments 90-95;
[0702] d. the XDP of any one of embodiments 101-104; or
[0703] e. combinations of two or more of (a)-(d),
   wherein the BCL11A gene of the cells targeted by the first gRNA is modified by the CasX protein.

[0704] Embodiment 157. The method of embodiment 156, wherein the hemoglobinopathy is sickle cell disease or beta-thalassemia.

[0705] Embodiment 158. The method of any one of embodiments 156 or embodiment 157, wherein the cell is selected from the group consisting of hematopoietic stem cells (HSC), hematopoietic progenitor cells (HPC), CD34+ cells, mesenchymal stem cells (MSC), induced pluripotent stem cells (iPSC), common myeloid progenitor cells, proerythroblast cells, and erythroblast cells.

[0706] Embodiment 159. The method of any one of embodiments 156-158, wherein the modifying comprises introducing a single-stranded break in the BCL11A gene of the cells.

[0707] Embodiment 160. The method of any one of embodiments 156-158, wherein the modifying comprises introducing a double-stranded break in the BCL11A gene of the cells.

[0708] Embodiment 161. The method of any one of embodiments 156-160, further comprising introducing into the cells of the subject a second gRNA or a nucleic acid encoding the second gRNA, wherein the second gRNA has a targeting sequence complementary to a different or overlapping portion of the target nucleic acid compared to the first gRNA, resulting in an additional break in the BCL11A target nucleic acid of the cells of the subject.

[0709] Embodiment 162. The method of any one of embodiments 156-161, wherein the modifying comprises introducing an insertion, deletion, substitution, duplication, or inversion of one or more nucleotides in the BCL11A gene of the cells.

[0710] Embodiment 163. The method of embodiment 162, wherein the modifying results in a knock-down or knock-out of the BCL11A gene in the modified cells of the subject.

[0711] Embodiment 164. The method of any one of embodiments 156-163, wherein the BCL11A gene of the cells are modified such that expression of the BCL11A protein by the modified cells is reduced by at least about 10%, at least about 20%, at least about 30%, at least about 40%, at least about 50%, at least about 60%, at least about 70%, at least about 80%, or at least about 90% in comparison to cells that have not been modified.

[0712] Embodiment 165. The method of any one of embodiments 156-163, wherein the BCL11A gene of the cells of the subject are modified such that at least 70%, at least 75%, at least 80%, at least 85%, at least 90%, or at least 95% of the modified cells do not express a detectable level of BCL11A protein.

[0713] Embodiment 166. The method of any one of embodiments 156-165, wherein the method results in an increased levels of hemoglobin F (HbF) in circulating blood of the subject of at least about 5%, at least about 10%, at least about 20%, at least about 30%, at least about 40%, or at least about 50% compared to the levels of HbF in the subject prior to treatment.

[0714] Embodiment 167. The method of any one of embodiments 156-166, wherein the method results in a ratio of HbF to hemoglobin S (HbS) in circulating blood of the subject of at least 0.01:1.0, at least 0.025:1.0, at least 0.05:1.0, at least 0.075:1.0 at least 0.1:1.0, at least 0.2:1.0, at least 0.3:1.0, at least 0.4:1.0, at least 0.5:1:0, at least 0.75:1.0, at least 1.0:1.0, at least 1.25:1.0, at least 1.5:1.0, or at least 1.75:1.0.

[0715] Embodiment 168. The method of any one of embodiments 156-165, wherein the method results in HbF levels of at least about 5%, or at least about 10%, or at least about 20%, or at least about 30% of total hemoglobin in circulating blood of the subject.

[0716] Embodiment 169. The method of any one of embodiments 156-161, wherein the method comprises insertion of the donor template into the break site(s) of the BCL11A gene target nucleic acid sequence of the cells.

[0717] Embodiment 170. The method of embodiment 168, wherein the insertion of the donor template is mediated by homology-directed repair (HDR) or homology-independent targeted integration (HITI).

[0718] Embodiment 171. The method of embodiment 168 or embodiment 170, wherein insertion of the donor template results in a knock-down or knock-out of the BCL11A gene in the modified cells of the subject.

[0719] Embodiment 172. The method of any one of embodiments 166-171, wherein the BCL11A gene of the cells are modified such that expression of the BCL11A protein by the modified cells is reduced by at least about 10%, at least about 20%, at least about 30%, at least about 40%, at least about 50%, at least about 60%, at least about 70%, at least about 80%, or at least about 90% in comparison to cells that have not been modified.

[0720] Embodiment 173. The method of any one of embodiments 166-171, wherein the BCL11A gene of the cells of the subject are modified such that at least 70%, at least 75%, at least 80%, at least 85%, at least 90%, or at least 95% of the modified cells do not express a detectable level of BCL11A protein.

[0721] Embodiment 174. The method of any one of embodiments 166-173, wherein the method results in an increased levels of hemoglobin F (HbF) in circulating blood of the subject of at least about 5%, at least about 10%, at least about 20%, at least about 30%, at least about 40%, or at least about 50% compared to the levels of HbF in the subject prior to treatment.

[0722] Embodiment 175. The method of any one of embodiments 166-173, wherein the method results in a ratio of HbF to hemoglobin S (HbS) in circulating blood of the subject of at least 0.01:1.0, at least 0.025:1.0, at least 0.05:1.0, at least 0.075:1.0 at least 0.1:1.0, at least 0.2:1.0, at least 0.3:1.0, at least 0.4:1.0, at least 0.5:1:0, at least 0.75:1.0, at least 1.0:1.0, at least 1.25:1.0, at least 1.5:1.0, or at least 1.75:1.0.

[0723] Embodiment 176. The method of any one of embodiments 166-173, wherein the method results in HbF levels of at least about 5%, or at least about 10%, or at least about 20%, or at least about 30% of total hemoglobin in circulating blood of the subject.

[0724] Embodiment 177. The method of any one of embodiments 156-175, wherein the subject is selected from the group consisting of rodent, mouse, rat, and non-human primate.

[0725] Embodiment 178. The method of any one of embodiments 156-175, wherein the subject is a human.

[0726] Embodiment 179. The method of any one of embodiments 156-178, wherein the vector is AAV and is administered to the subject at a dose of at least about 1×10⁵ vector genomes/kg (vg/kg), at least about 1×10⁶ vg/kg, at least about 1×10⁷ vg/kg, at least about 1×10⁸ vg/kg, at least about 1×10⁹ vg/kg, at least about 1×10¹⁰ vg/kg, at least about 1×10¹¹ vg/kg, at least about 1×10¹² vg/kg, at least about 1×10¹³ vg/kg, at least about 1×10¹⁴ vg/kg, at least about 1×10¹⁵ vg/kg, or at least about 1×10¹⁶ vg/kg.

[0727] Embodiment 180. The method of any one of embodiments 156-178, wherein the vector is AAV and is administered to the subject at a dose of at least about 1×10⁵ vg/kg to about 1×10¹⁶ vg/kg, at least about 1×10⁶ vg/kg to about 1×10¹⁵ vg/kg, or at least about 1×10⁷ vg/kg to about 1×10¹⁴ vg/kg.

[0728] Embodiment 181. The method of any one of embodiments 156-178, wherein the XDP is administered to the subject at a dose of at least about 1×10⁵ particles/kg, at least about 1×10⁶ particles/kg, at least about 1×10⁷ particles/kg at least about 1×10⁸ particles/kg, at least about 1×10⁹ particles/kg, at least about 1×10¹⁰ particles/kg, at least about 1×10¹¹ particles/kg, at least about 1×10¹² particles/kg, at least about 1×10¹³ particles/kg, at least about 1×10¹⁴ particles/kg, at least about 1×10¹⁵ particles/kg, at least about 1×10¹⁶ particles/kg.

[0729] Embodiment 182. The method of any one of embodiments 156-178, wherein the XDP is administered to the subject at a dose of at least about 1×10⁵ particles/kg to about 1×10¹⁶ particles/kg, or at least about 1×10⁶ particles/kg to about 1×10¹⁵ particles/kg, or at least about 1×10⁷ particles/kg to about 1×10¹⁴ particles/kg.

[0730] Embodiment 183. The method of any one of embodiments 156-182, wherein the vector or XDP is administered to the subject by a route of administration selected from intraparenchymal, intravenous, intra-arterial, intraperitoneal, intracapsular, subcutaneously, intramuscularly, intraabdominally, or combinations thereof, wherein the administering method is injection, transfusion, or implantation.

[0731] Embodiment 184. The method of any one of embodiments 156-183, wherein the method results in improvement in at least one clinically-relevant endpoint in the subject.

[0732] Embodiment 185. The method of embodiment 184, wherein the method results in improvement in at least one clinically-relevant parameter selected from the group consisting of occurrence of end-organ disease, albuminuria, hypertension, hyposthenia, hyposthenuria, diastolic dysfunction, functional exercise capacity, acute coronary syndrome, pain events, pain severity, anemia, hemolysis, tissue hypoxia, organ dysfunction, abnormal hematocrit values, childhood mortality, incidence of strokes, hemoglobin levels compared to baseline, HbF levels, reduced incidence of pulmonary embolisms, incidence of vaso-occlusive crises, concentration of hemoglobin S in erythrocytes, rate of hospitalizations, liver iron concentration, required blood transfusions, and quality of life score.

[0733] Embodiment 186. The method of embodiment 184, wherein the method results in improvement in at least two clinically-relevant parameters selected from the group consisting of occurrence of end-organ disease, albuminuria, hypertension, hyposthenia, hyposthenuria, diastolic dysfunction, functional exercise capacity, acute coronary syndrome, pain events, pain severity, anemia, hemolysis, tissue hypoxia, organ dysfunction, abnormal hematocrit values, childhood mortality, incidence of strokes, hemoglobin levels compared to baseline, HbF levels, reduced incidence of pulmonary embolisms, incidence of vaso-occlusive crises, concentration of hemoglobin S in erythrocytes, rate of hospitalizations, liver iron concentration, required blood transfusions, and quality of life score.

[0734] Embodiment 187. A method for treating a subject with a hemoglobinopathy, the method comprising:
[0735] a. isolating induced pluripotent stem cells (iPSC) or hematopoietic stem cells (HSC) from a subject;
[0736] b. modifying the BCL11A target nucleic acid of the iPSC or HSC by the method of any one of embodiments 110-126;
[0737] c. differentiating the modified iPSC or HSC into a hematopoietic progenitor cell; and
[0738] d. implanting the hematopoietic progenitor cell into the subject with the hemoglobinopathy,
   wherein the method results in an increased levels of hemoglobin F (HbF) in circulating blood of the subject of at least about 5%, at least about 10%, at least about 20%, at least about 30%, at least about 40%, or at least about 50% compared to the levels of HbF in the subject prior to treatment.

[0739] Embodiment 188. The method of embodiment 187, wherein the iPSC or HSC is autologous and is isolated from the subject's bone marrow or peripheral blood.

[0740] Embodiment 189. The method of embodiment 187, wherein the iPSC or HSC is allogeneic and is isolated from a different subject's bone marrow or peripheral blood.

[0741] Embodiment 190. The method of any one of embodiments 187-189, wherein the implanting comprises administering the hematopoietic progenitor cell to the subject by transplantation, local injection, systemic infusion, or combinations thereof.

[0742] Embodiment 191. The method of any one of embodiments 187-190, wherein the hemoglobinopathy is sickle cell disease or beta-thalassemia.

[0743] Embodiment 192. A method of increasing fetal hemoglobin (HbF) in a subject by genome editing, the method comprising:
[0744] a. administering to the subject an effective dose of the vector of any one of embodiments 90-95 or the XDP of any one of embodiments 101-107, wherein the vector or XDP delivers the CasX:gRNA system to cells of the subject;
[0745] b. the BCL11A target nucleic acid of cells of the subject are edited by the CasX targeted by the first gRNA;
[0746] c. the editing comprises introducing an insertion, deletion, substitution, duplication, or inversion of one or more nucleotides in the target nucleic acid sequence such that expression of BCL11A protein is reduced or eliminated,
   wherein the method results in an increased levels of hemoglobin F (HbF) in circulating blood of the subject of at least about 5%, at least about 10%, at least about 20%, at least about 30%, at least about 40%, or at least about 50% compared to the levels of HbF in the subject prior to treatment.

[0747] Embodiment 193. The method of embodiment 192, wherein the method results in a ratio of HbF to hemoglobin S (HbS) in the subject of at least 0.01:1.0, at least 0.025:1.0, at least 0.05:1.0, at least 0.075:1.0 at least 0.1:1.0, at least 0.2:1.0, at least 0.3:1.0, at least 0.4:1.0, at least 0.5:1:0, at least 0.75:1.0, at least 1.0:1.0, at least 1.25:1.0, at least 1.5:1.0, or at least 1.75:1.0.

[0748] Embodiment 194. The method of embodiment 192 or embodiment 193, wherein the method results in HbF levels of at least about 5%, or at least about 10%, or at least about 20%, or at least about 30% of total circulating hemoglobin in the subject.

[0749] Embodiment 195. The method of any one of embodiments 192-194, wherein the cells are selected from the group consisting of hematopoietic stem cells (HSC), hematopoietic progenitor cells (HPC), CD34+ cells, mesenchymal stem cells (MSC), induced pluripotent stem cells (iPSC), common myeloid progenitor cells, proerythroblast cells, and erythroblast cells.

[0750] Embodiment 196. The method of any one of embodiments 192-195, wherein the target nucleic acid of the cells has been edited such that expression of the BCL11A protein is reduced by at least about 10%, at least about 20%, at least about 30%, at least about 40%, at least about 50%, at least about 60%, at least about 70%, at least about 80%, or at least about 90% in comparison to target nucleic acid of cells that have not been edited.

[0751] Embodiment 197. The method of any one of embodiments 192-196, wherein the subject is selected from the group consisting of mouse, rat, pig, and non-human primate.

[0752] Embodiment 198. The method of any one of embodiments 192-196, wherein the subject is a human.

[0753] Embodiment 199. The method of any one of embodiments 192-198, wherein the vector is administered at a dose of at least about 1×10⁵ vector genomes/kg (vg/kg), at least about 1×106 vg/kg, at least about 1×10⁷ vg/kg, at least about 1×10⁸ vg/kg, at least about 1×10⁹ vg/kg, at least about 1×10¹⁰ vg/kg at least about 1×10¹¹ vg/kg, at least about 1×10¹² vg/kg, at least about 1×10¹³ vg/kg, at least about 1×10¹⁴ vg/kg, at least about 1×10¹⁵ vg/kg, or at least about 1×10¹⁶ vg/kg.

[0754] Embodiment 200. The method of any one of embodiments 192-198, wherein the XDP is administered at a dose of at least about 1×10⁵ particles/kg, at least about 1×10⁶ particles/kg, at least about 1×10⁷ particles/kg, at least about 1×10⁸ particles/kg, at least about 1×10⁹ particles/kg, at least about 1×10¹⁰ particles/kg at least about 1×10¹¹ particles/kg, at least about 1×10¹² particles/kg, at least about 1×10¹³ particles/kg, at least about 1×10¹⁴ particles/kg, at least about 1×10¹⁵ particles/kg, or at least about 1×10¹⁶ particles/kg.

[0755] Embodiment 201. The method of any one of embodiments 192-200, wherein the vector or XDP is administered by a route of administration selected from transplantation, local injection, systemic infusion, or combinations thereof.

[0756] Embodiment 202. The system of any one of embodiments 1-85, the nucleic acid of any one of embodiments 86-89, the vector of any one of 90-95, the XDP of any one of embodiments 101-104, the host cell of embodiment 108 or embodiment 109, or the population of cells of embodiment 144 or embodiment 145, for use as a medicament for the treatment of a hemoglobinopathy.

[0757] Embodiment 203. The system of embodiment 1, wherein the target nucleic acid sequence is complementary to a non-target strand sequence located 1 nucleotide 3′ of a protospacer adjacent motif (PAM) sequence.

[0758] Embodiment 204. The system of embodiment 203, wherein the PAM sequence comprises a TC motif.

[0759] Embodiment 205. The system of embodiment 204, wherein the PAM sequence comprises ATC, GTC, CTC or TTC.

[0760] Embodiment 206. The system of any one of embodiments 203-205, wherein the Class 2 Type V CRISPR protein comprises a RuvC domain.

[0761] Embodiment 207. The system of embodiment 206, wherein the RuvC domain generates a staggered double-stranded break in the target nucleic acid sequence.

[0762] Embodiment 208. The system of any one of embodiments 203-207, wherein the Class 2 Type V CRISPR protein does not comprise an HNH nuclease domain.

### EXAMPLES

### Example 1: Generating CasX Variant Constructs

[0763] In order to generate the CasX 488 construct (sequences in Table 6), the codon-optimized CasX 119 construct (based on the CasX Stx2 construct, encoding Planctomycetes CasX SEQ ID NO: 2, with amino acid substitutions and deletions) was cloned into a destination plasmid (pStX) using standard cloning methods. In order to generate the CasX 491 construct (sequences in Table 6), the codon-optimized CasX 484 construct (based on the CasX Stx2 construct, encoding Planctomycetes CasX SEQ ID NO: 2, with substitutions and deletions of certain amino acids, with fused NLS, and linked guide and non-targeting sequences) was cloned into a destination plasmid (pStX) using standard cloning methods. Construct CasX 1 (CasX SEQ ID NO: 1) was cloned into a destination vector using standard cloning methods. To build CasX 488, the CasX 119 construct DNA was PCR amplified in two reactions using Q5 DNA polymerase according to the manufacturer's protocol, using universal appropriate primers. To build CasX 491, the codon optimized CasX 484 construct DNA was PCR amplified in two reactions using Q5 DNA polymerase according to the manufacturer's protocol, using appropriate primers. The CasX 1 construct was PCR amplified in two reactions using Q5 DNA polymerase according to the manufacturer's protocol, universal appropriate primers. Each of the PCR products were purified by gel extraction from a 1% agarose gel (Gold Bio Cat #A-201-500) using Zymoclean Gel DNA Recovery Kit according to the manufacturer's protocol. The corresponding fragments were then pieced together using Gibson assembly (New England BioLabs Cat #E2621S) following the manufacturer's protocol. Assembled products in pStx1 were transformed into chemically-competent Turbo Competent E. coli bacterial cells, plated on LB-Agar plates containing kanamycin. Individual colonies were picked and miniprepped using Qiagen spin Miniprep Kit following the manufacturer's protocol. The resultant plasmids were sequenced using Sanger sequencing to ensure correct assembly. The correct clones were then subcloned into the mammalian expression vector pStx34 using restriction enzyme cloning. The pStx34 backbone and the CasX 488 and 491 clones in pStx1 were digested with XbaI and BamHI respectively. The digested backbone and respective insert fragments were purified by gel extraction from a 1% agarose gel (Gold Bio Cat #A-201-500) using Zymoclean Gel DNA Recovery Kit according to the manufacturer's protocol. The clean backbone and insert were then ligated together using T4 Ligase (New England Biolabs Cat #M0202L) according to the manufacturer's protocol. The ligated products were transformed into chemically-competent Turbo Competent E. coli bacterial cells, plated on LB-Agar plates containing carbenicillin. Individual colonies were picked and miniprepped using Qiagen spin Miniprep Kit following the manufacturer's protocol. The resultant plasmids were sequenced using Sanger sequencing to ensure correct assembly.

[0764] To build CasX 515 (sequences in Table 6), the CasX 491 construct DNA was PCR amplified in two reactions using Q5 DNA polymerase according to the manufacturer's protocol, using appropriate primers. To build CasX 527 (sequences in Table 6), the CasX 491 construct DNA was PCR amplified in two reactions using Q5 DNA polymerase according to the manufacturer's protocol, using appropriate primers. The PCR products were purified by gel extraction from a 1% agarose gel using Zymoclean Gel DNA Recovery Kit according to the manufacturer's protocol. The pStX backbone was digested using XbaI and SpeI in order to remove the 2931 base pair fragment of DNA between the two sites in plasmid pStx56. The digested backbone fragment was purified by gel extraction from a 1% agarose gel using Zymoclean Gel DNA Recovery Kit according to the manufacturer's protocol. The insert and backbone fragments were then pieced together using Gibson assembly (New England BioLabs Cat #E2621S) following the manufacturer's protocol. Assembled products in the pStx56 were transformed into chemically-competent Turbo Competent E. coli bacterial cells, plated on LB-Agar plates containing kanamycin. Individual colonies were picked and miniprepped using Qiagen spin Miniprep Kit following the manufacturer's protocol. The resultant plasmids were sequenced using Sanger sequencing to ensure correct assembly. pStX34 includes an EF-1a promoter for the protein as well as a selection marker for both puromycin and carbenicillin. pStX56 includes an EF-1a promoter for the protein as well as a selection marker for both puromycin and kanamycin Sequences encoding the targeting sequences that target the gene of interest were designed based on CasX PAM locations. Targeting sequence DNA was ordered as single-stranded DNA (ssDNA) oligos (Integrated DNA Technologies) consisting of the targeting sequence and the reverse complement of this sequence. These two oligos were annealed together and cloned into pStX individually or in bulk by Golden Gate assembly using T4 DNA Ligase and an appropriate restriction enzyme for the plasmid. Golden Gate products were transformed into chemically or electro-competent cells such as NEB Turbo competent E. coli (NEB Cat #C2984I), plated on LB-Agar plates containing the appropriate antibiotic. Individual colonies were picked and miniprepped using Qiaprep spin Miniprep Kit and following the manufacturer's protocol. The resultant plasmids were sequenced using Sanger sequencing to ensure correct ligation.

[0765] To build CasX 535-537 (sequences in Table 6), the CasX 515 construct DNA was PCR amplified in two reactions for each construct using Q5 DNA polymerase according to the manufacturer's protocol. For CasX 535, appropriate primers were used for the amplification. For CasX 536 appropriate primers were used. For CasX 537, appropriate primers were used. The PCR products were purified by gel extraction from a 1% agarose gel using Zymoclean Gel DNA Recovery Kit according to the manufacturer's protocol. The pStX backbone was digested using XbaI and SpeI in order to remove the 2931 base pair fragment of DNA between the two sites in plasmid pStx56. The digested backbone fragment was purified by gel extraction from a 1% agarose gel using Zymoclean Gel DNA Recovery Kit according to the manufacturer's protocol. The insert and backbone fragments were then pieced together using Gibson assembly following the manufacturer's protocol. Assembled products in pStx56 were transformed into chemically-competent Turbo Competent E. coli bacterial cells, plated on LB-Agar plates containing kanamycin. Individual colonies were picked and miniprepped using Qiagen spin Miniprep Kit following the manufacturer's protocol. The resultant plasmids were sequenced using Sanger sequencing to ensure correct assembly. pStX34 includes an EF-1a promoter for the protein as well as a selection marker for both puromycin and carbenicillin. pStX56 includes an EF-1a promoter for the protein as well as a selection marker for both puromycin and kanamycin. Sequences encoding the targeting sequences that target the gene of interest were designed based on CasX PAM locations. Targeting sequence DNA was ordered as single-stranded DNA (ssDNA) oligos (Integrated DNA Technologies) consisting of the targeting sequence and the reverse complement of this sequence. These two oligos were annealed together and cloned into pStX individually or in bulk by Golden Gate assembly using T4 DNA Ligase and an appropriate restriction enzyme for the plasmid. Golden Gate products were transformed into chemically or electro-competent cells such as NEB Turbo competent E. coli, plated on LB-Agar plates containing the appropriate antibiotic. Individual colonies were picked and miniprepped using Qiaprep spin Miniprep Kit and following the manufacturer's protocol. The resultant plasmids were sequenced using Sanger sequencing to ensure correct ligation.

[0766] All subsequent CasX variants, such as CasX 544 and CasX 660-664, 668, 670, 672, 676, and 677 were cloned using the same methodology as described above using Gibson assembly with mutation-specific internal primers and universal forward and reverse primers (the differences between them were the mutation specific primers designed as well as which CasX base construct was used). SaCas9 and SpyCas9 control plasmids were prepared similarly to pStX plasmids described above, with the protein and guide regions of pStX exchanged for the respective protein and guide. Targeting sequences for SaCas9 and SpyCas9 were either obtained from the literature or were rationally designed according to established methods.

[0767] The expression and recovery of the CasX constructs was performed using standard

### Methodologies and are Summarized as Follows:

### Purification:

[0768] Frozen samples were thawed overnight at 4° C. with magnetic stirring. The viscosity of the resulting lysate was reduced by sonication and lysis was completed by homogenization in two passes at 20k PSI using a NanoDeBEE (BEE International). Lysate was clarified by centrifugation at 50,000×g, 4° C., for 30 minutes and the supernatant was collected. The clarified supernatant was applied to a Heparin 6 Fast Flow column (Cytiva) using an AKTA Pure FPLC (Cytiva). The column was washed with 5 CV of Heparin Buffer A (50 mM HEPES-NaOH, 250 mM NaCl, 5 mM MgCl2, 0.5 mM TCEP, 10% glycerol, pH 8), then with 3 CV of Heparin Buffer B (Buffer A with the NaCl concentration adjusted to 500 mM). Protein was eluted with 1.75 CV of Heparin Buffer C (Buffer A with the NaCl concentration adjusted to 1 M). The eluate was applied to a StrepTactin HP column (Cytiva) using the FPLC. The column was washed with 10 CV of Strep Buffer (50 mM HEPES-NaOH, 500 mM NaCl, 5 mM MgCl2, 0.5 mM TCEP, 10% glycerol, pH 8). Protein was eluted from the column using 1.65 CV of Strep Buffer with 2.5 mM Desthiobiotin added. CasX-containing fractions were pooled, concentrated at 4° C. using a 50 kDa cut-off spin concentrator (Amicon), and purified by size exclusion chromatography on a Superdex 200 μg column (Cytiva). The column was equilibrated with SEC Buffer (25 mM sodium phosphate, 300 mM NaCl, 1 mM TCEP, 10% glycerol, pH 7.25) and operated by FPLC. CasX-containing fractions that eluted at the appropriate molecular weight were pooled, concentrated at 4° C. using a 50 kDa cut-off spin concentrator, aliquoted, and snap-frozen in liquid nitrogen before being stored at −80° C.

[0769] CasX variant 488: The average yield was 2.7 mg of purified CasX protein per liter of culture at 98.8% purity, as evaluated by colloidal Coomassie staining.

[0770] CasX Variant 491: The average yield was 12.4 mg of purified CasX protein per liter of culture at 99.4% purity, as evaluated by colloidal Coomassie staining.

[0771] CasX variant 515: The average yield was 7.8 mg of purified CasX protein per liter of culture at 90% purity, as evaluated by colloidal Coomassie staining.

[0772] CasX variant 526: The average yield was 13.79 mg per liter of culture, at 93% purity.

[0773] Purity was evaluated by colloidal Coomassie staining.

TABLE 6
CasX variant DNA and amino acid sequences

| | SEQ ID NO of | SEQ ID NO of |
|---|---|---|
| Construct | DNA Sequence | Amino Acid Sequence |
| CasX 488 | 27155 | 123 |
| CasX 491 | 27156 | 126 |
| CasX 515 | 27157 | 133 |
| CasX 527 | 27158 | 144 |
| CasX 535 | 27159 | 26911 |
| CasX 536 | 27160 | 26912 |
| CasX 537 | 27161 | 26913 |
| CasX 583 | 27162 | 26958 |
| CasX 660 | 27163 | 27035 |
| CasX 661 | 27164 | 27036 |
| CasX 662 | 27165 | 27037 |
| CasX 663 | 27166 | 27038 |
| CasX 664 | 27167 | 27039 |
| CasX 668 | 27168 | 27043 |
| CasX 670 | 27169 | 27154 |
| CasX 672 | 27170 | 27046 |
| CasX 676 | 27171 | 27050 |
| CasX 677 | 27172 | 27051 |

### Example 2: Generation of RNA Guides

[0774] For the generation of RNA single guides and targeting sequences, templates for in vitro transcription were generated by performing PCR with Q5 polymerase, template primers for each backbone, and amplification primers with the T7 promoter and the targeting sequence. The DNA primer sequences for the T7 promoter, guide and targeting sequence for guides and targeting sequences are presented in Table 7, below. The sgl, sg2, sg32, sg64, sg174, and sg235 guides correspond to SEQ ID NOS: 4, 5, 2104, 2106, 2238, and 26800, respectively, with the exception that sg2, sg32, and sg64 were modified with an additional 5′ G to increase transcription efficiency (compare sequences in Table 7 to Table 3). The 7.37 targeting sequence targets beta2-microglobulin (B2M). Following PCR amplification, templates were cleaned and isolated by phenol-chloroform-isoamyl alcohol extraction followed by ethanol precipitation.

[0775] In vitro transcriptions were carried out in buffer containing 50 mM Tris pH 8.0, 30 mM MgCl2, 0.01% Triton X-100, 2 mM spermidine, 20 mM DTT, 5 mM NTPs, 0.5 μM template, and 100 μg/mL T7 RNA polymerase. Reactions were incubated at 37° C. overnight. 20 units of DNase I (Promega #M6101)) were added per 1 mL of transcription volume and incubated for one hour. RNA products were purified via denaturing PAGE, ethanol precipitated, and resuspended in 1× phosphate buffered saline. To fold the sgRNAs, samples were heated to 70° C. for 5 min and then cooled to room temperature. The reactions were supplemented to 1 mM final MgCl2 concentration, heated to 50° C. for 5 min and then cooled to room temperature. Final RNA guide products were stored at −80° C.

TABLE 7
DNA primer sequences for the T7 promoter, guide and targeting sequence for guides

| Primer | SEQ ID NO | RNA product | SEQ ID NO |
|---|---|---|---|
| T7 promoter primer | 234 | Used for all | |
| sg2 backbone fwd | 238 | GGUACUGGCGCUUUUAUCUCAUUACUUUGAGAGCCAUCA | 251 |
| sg2 backbone rev | 239 | CCAGCGACUAUGUCGUAUGGGUAAAGCGCUUAUUUAUCG | |
| sg2.7.37 spacer primer | 240 | GAGAGAAAUCCGAUAAAUAAGAAGCAUCAAAGGGCCGAG | |
| | | AUGUCUCGCUCCG | |
| sg32 backbone fwd | 241 | GGUACUGGCGCUUUUAUCUCAUUACUUUGAGAGCCAUCA | 252 |
| sg32 backbone rev | 242 | CCAGCGACUAUGUCGUAUGGGUAAAGCGCCCUCUUCGGA | |
| sg32.7.37 spacer primer | 243 | GGGAAGCAUCAAAGGGCCGAGAUGUCUCG | |
| sg64 backbone fwd | 244 | GGUACUGGCGCCUUUAUCUCAUUACUUUGAGAGCCAUCA | 253 |
| | | CCAGCGACUAUGUCGUAUGGGUAAAGCGCUUACGGACUU | |
| sg64 backbone rev | 245 | CGGUCCGUAAGAAGCAUCAAAGGGCCGAGAUGUCUCGCU | |
| sg64.7.37 spacer primer | 246 | CCG | |
| sg174 backbone fwd | 247 | ACUGGCGCUUUUAUCUgAUUACUUUGAGAGCCAUCACCA | 254 |
| sg174 backbone rev | 248 | GCGACUAUGUCGUAgUGGGUAAAGCUCCCUCUUCGGAGG | |
| sg174.7.37 spacer | 249 | GAGCAUCAAAGGGCCGAGAUGUCUCGCUCCG | |
| primer | | | |
| sg235 backbone fwd | ND | ACUGGCGCUUCUAUCUGAUUACUCUGAGCGCCAUCACCA | 26800 |
| sg235 backbone rev | ND | GCGACUAUGUCGUAGUGGGUAAAGCCGCUUACGGACUUC | |
| sg235.7.37 spacer | ND | GGUCCGUAAGAGGCAUCAGAG | |
| primer | | | |

### Example 3: Assessing Binding Affinity to the Guide RNA

[0776] Purified wild-type and improved CasX will be incubated with synthetic single-guide RNA containing a 3′ Cy7.5 moiety in low-salt buffer containing magnesium chloride as well as heparin to prevent non-specific binding and aggregation. The sgRNA will be maintained at a concentration of 10 pM, while the protein will be titrated from 1 pM to 100 μM in separate binding reactions. After allowing the reaction to come to equilibrium, the samples will be run through a vacuum manifold filter-binding assay with a nitrocellulose membrane and a positively charged nylon membrane, which bind protein and nucleic acid, respectively. The membranes will be imaged to identify guide RNA, and the fraction of bound vs unbound RNA will be determined by the amount of fluorescence on the nitrocellulose vs nylon membrane for each protein concentration to calculate the dissociation constant of the protein-sgRNA complex. The experiment will also be carried out with improved variants of the sgRNA to determine if these mutations also affect the affinity of the guide for the wild-type and mutant proteins. We will also perform electromobility shift assays to qualitatively compare to the filter-binding assay and confirm that soluble binding, rather than aggregation, is the primary contributor to protein-RNA association.

### Example 4: Assessing Binding Affinity to the Target DNA

[0777] Purified wild-type and improved CasX will be complexed with single-guide RNA bearing a targeting sequence complementary to the target nucleic acid. The RNP complex will be incubated with double-stranded target DNA containing a PAM and the appropriate target nucleic acid sequence with a 5′ Cy7.5 label on the target strand in low-salt buffer containing magnesium chloride as well as heparin to prevent non-specific binding and aggregation. The target DNA will be maintained at a concentration of 1 nM, while the RNP will be titrated from 1 μM to 100 μM in separate binding reactions. After allowing the reaction to come to equilibrium, the samples will be run on a native 5% polyacrylamide gel to separate bound and unbound target DNA. The gel will be imaged to identify mobility shifts of the target DNA, and the fraction of bound vs unbound DNA will be calculated for each protein concentration to determine the dissociation constant of the RNP-target DNA ternary complex.

### Example 5: Assessing Differential PAM Recognition In Vitro

### 1. Comparison of Reference and CasX Variants

[0778] In vitro cleavage assays were performed using CasX2, CasX119, and CasX438 complexed with sg174.7.37, essentially as describe in Example 8. Fluorescently labeled dsDNA targets with a 7.37 spacer and either a TTC, CTC, GTC, or ATC PAM were used (sequences are in Table 8). Time points were taken at 0.25, 0.5, 1, 2, 5, 10, 30, and 60 minutes. Gels were imaged with an Cytiva Typhoon and quantified using the IQTL 8.2 software. Apparent first-order rate constants for non-target strand cleavage (k_{cleave}) were determined for each CasX:sgRNA complex on each target. Rate constants for targets with non-TTC PAM were compared to the TTC PAM target to determine whether the relative preference for each PAM was altered in a given protein variant.

[0779] For all variants, the TTC target supported the highest cleavage rate, followed by the ATC, then the CTC, and finally the GTC target (FIGS. 10A-D, Table 9). For each combination of CasX variant and NTC PAM, the cleavage rate k_{cleave} is shown. For all non-NTC PAMs, the relative cleavage rate as compared to the TTC rate for that variant is shown in parentheses. All non-TTC PAMs exhibited substantially decreased cleavage rates (>10-fold for all). The ratio between the cleavage rate of a given non-TTC PAM and the TTC PAM for a specific variant remained generally consistent across all variants. The CTC target supported cleavage 3.5-4.3% as fast as the TTC target; the GTC target supported cleavage 1.0-1.4% as fast; and the ATC target supported cleavage 6.5-8.3% as fast. The exception is for 491, where the kinetics of cleavage at TTC PAMs are too fast to allow accurate measurement, which artificially decreases the apparent difference between TTC and non-TTC PAMs. Comparing the relative rates of 491 on GTC, CTC, and ATC PAMs, which fall within the measurable range, results in ratios comparable to those for other variants when comparing across non-TTC PAMs, consistent with the rates increasing in tandem. Overall, differences between the variants are not substantial enough to suggest that the relative preference for the various NTC PAMs have been altered. However, the higher basal cleavage rates of the variants allow targets with ATC or CTC PAMs to be cleaved nearly completely within 10 minutes, and the apparent k_{cleaves} are comparable to or greater than the k_{cleave} of CasX2 on a TTC PAM (Table 9). This increased cleavage rate may cross the threshold necessary for effective genome editing in a human cell, explaining the apparent increase in PAM flexibility for these variants.

TABLE 8
Sequences of DNA substrates used in in
vitro PAM cleavage assay

| Guide* | DNA Sequence | SEQ ID NO |
|---|---|---|
| 7.37 | AGCGCGAGCACAGCTAAGGCCACGGAGCGAGACATCTCGGCCCGAATGCTGTCAGCTTCA | 27176 |
| TTC | | |
| PAM TS | | |
| 7.37 | TGAAGCTGACAGCATTCGGGCCGAGATGTCTCGCTCCGTGGCCTTAGCTGTGCTCGCGCT | 27177 |
| TTC | | |
| PAM NTS | | |
| 7.37 | AGCGCGAGCACAGCTAAGGCCACGGAGCGAGACATCTCGGCCCGAGTGCTGTCAGCTTCA | 27178 |
| CTC | | |
| PAM TS | | |
| 7.37 | TGAAGCTGACAGCACTCGGGCCGAGATGTCTCGCTCCGTGGCCTTAGCTGTGCTCGCGCT | 27179 |
| CTC | | |
| PAM NTS | | |
| 7.37 | AGCGCGAGCACAGCTAAGGCCACGGAGCGAGACATCTCGGCCCGACTGCTGTCAGCTTCA | 27180 |
| GTC | | |
| PAM TS | | |
| 7.37 | TGAAGCTGACAGCAGTCGGGCCGAGATGTCTCGCTCCGTGGCCTTAGCTGTGCTCGCGCT | 27181 |
| GTC | | |
| PAM NTS | | |
| 7.37 | AGCGCGAGCACAGCTAAGGCCACGGAGCGAGACATCTCGGCCCGATTGCTGTCAGCTTCA | 27182 |
| ATC | | |
| PAM TS | | |
| 7.37 | TGAAGCTGACAGCAATCGGGCCGAGATGTCTCGCTCCGTGGCCTTAGCTGTGCTCGCGCT | 27183 |
| ATC | | |
| PAM NTS | | |

*The PAM sequences for each are bolded. TS-target strand. NTS-Non-target strand.

TABLE 9
Apparent cleavage rates of CasX variants against NTC PAMs

| Variant | TTC | CTC | GTC | ATC |
|---|---|---|---|---|
| 2 | 0.267 min⁻¹ | 9.29E−3 min⁻¹ | 3.75E−3 min⁻¹ | 1.87E−2 min⁻¹ |
| | | (0.035) | (0.014) | (0.070) |
| 119 | 8.33 min⁻¹ | 0.303 min⁻¹ | 8.64E−2 min⁻¹ | 0.540 min⁻¹ |
| | | (0.036) | (0.010) | (0.065) |
| 438 | 4.94 min⁻¹ | 0.212 min⁻¹ | 1.31E−2 min⁻¹ | 0.408 min⁻¹ |
| | | (0.043) | (0.013) | (0.083) |
| 491 | 16.42 min⁻¹ | 8.605 min⁻¹ | 2.447 min⁻¹ | 11.33 min⁻¹ |
| | | (0.524) | (0.149) | (0.690) |

### 2. Comparison of PAM Recognition Using Single CasX Variant

### Materials and Methods:

[0780] Fluorescently labeled dsDNA targets with a 7.37 spacer and either a TTC, CTC, GTC, ATC, TTT, CTT, GTT, or ATT PAM were used (sequences are in Table 10). Oligos were ordered with a 5′ amino modification and labeled with a Cy7.5 NHS ester for target strand oligos and a Cy5.5 NHS ester for non-target strand oligos. dsDNA targets were formed by mixing the oligos in a 1:1 ratio in 1× cleavage buffer (20 mM Tris HCl pH 7.5, 150 mM NaCl, 1 mM TCEP, 5% glycerol, 10 mM MgCl2), heating to 95° C. for 10 minutes, and allowing the solution to cool to room temperature.

[0781] CasX variant 491 was complexed with sg174.7.37. The guide was diluted in 1× cleavage buffer to a final concentration of 1.5 μM, and then protein was added to a final concentration of 1 μM. The RNP was incubated at 37° C. for 10 minutes and then put on ice.

[0782] Cleavage assays were carried out by diluting RNP in cleavage buffer to a final concentration of 200 nM and adding dsDNA target to a final concentration of 10 nM. Time points were taken at 0.25, 0.5, 1, 2, 5, and 10 minutes and quenched by adding to an equal volume of 95% formamide and 20 mM EDTA. Cleavage products were resolved by running on a 10% urea-PAGE gel. Gels were imaged with an Amersham Typhoon and quantified using the IQTL 8.2 software. Apparent first-order rate constants for non-target strand cleavage (k_{cleave}) were determined for each target using GraphPad Prism.

### Results:

[0783] The relative cleavage rate of the 491.174 RNP on various PAMs was investigated. In addition to aiding in the prediction of cleavage efficiencies of targets and potential off-targets in cells, these data will also allow us to adjust the cleavage rate of synthetic targets. In the case of self-limiting AAV vectors, where new protospacers can be added within the vector to allow for self-targeting, we reasoned that the rate of episome cleavage could be adjusted up or down by changing the PAM.

[0784] We tested the cleavage rate of the RNP against various dsDNA substrates that were identical in sequence aside from the PAM. This experimental setup should allow for the isolation of the effects of the PAM itself, rather than convoluting PAM recognition with effects resulting from spacer sequence and genomic context. All NTC and NTT PAMs were tested. As expected, the RNP cleaved the target with the TTC PAM most quickly, converting essentially all of it to product by the first time point (FIG. 11A). CTC was cleaved roughly half as quickly, though the rapid cleavage of TTC makes determining an accurate k_{cleave} difficult under these assay conditions, which are optimized to capture a broader array of cleavage rates (FIG. 11A, Table 11). The GTC target was cleaved most slowly of the NTC PAMs, with a cleavage rate roughly six-fold slower than the TTC target. All NTT PAMs were cleaved more slowly than all NTC PAMs, with TTT cut most efficiently, followed by GTT (FIG. 111B, Table 11). The relative efficiency of GTT cleavage among all NTT PAMs, compared to the low rate of GTC cleavage compared to all NTC PAMs, demonstrates that recognition of individual PAM nucleotides is context-dependent, with nucleotide identity at one position in the PAM affecting sequence preference at the other positions.

[0785] The PAM sequences tested here yield cleavage rates spanning three orders of magnitude while still maintaining cleavage activity at the same spacer sequence. These data demonstrate that cleavage rates at a given synthetic target can be readily modified by changing the associated PAM, allowing for adjustment of self-cleavage activity to allow for efficient targeting of the genomic target prior to cleavage and elimination of the AAV episome.

TABLE 10
Sequences of DNA substrates used in in vitro PAM cleavage assay*

| PAM & Strand | Spacer and PAM Sequence | SEQ ID NO |
|---|---|---|
| 7.37 TTC PAM TS | AGCGCGAGCACAGCTAAGGCCACGGAGCGAGACATCTCGGCCCGAATGCT | 27176 |
| | GTCAGCTTCA | |
| 7.37 TTC PAM NTS | TGAAGCTGACAGCATTCGGGCCGAGATGTCTCGCTCCGTGGCCTTAGCTG | 27177 |
| | TGCTCGCGCT | |
| 7.37 CTC PAM TS | AGCGCGAGCACAGCTAAGGCCACGGAGCGAGACATCTCGGCCCGAGTGCT | 27178 |
| | GTCAGCTTCA | |
| 7.37 CTC PAM NTS | TGAAGCTGACAGCACTCGGGCCGAGATGTCTCGCTCCGTGGCCTTAGCTG | 27179 |
| | TGCTCGCGCT | |
| 7.37 GTC PAM TS | AGCGCGAGCACAGCTAAGGCCACGGAGCGAGACATCTCGGCCCGACTGCT | 27180 |
| | GTCAGCTTCA | |
| 7.37 GTC PAM NTS | TGAAGCTGACAGCAGTCGGGCCGAGATGTCTCGCTCCGTGGCCTTAGCTG | 27181 |
| | TGCTCGCGCT | |
| 7.37 ATC PAM TS | AGCGCGAGCACAGCTAAGGCCACGGAGCGAGACATCTCGGCCCGATTGCT | 27182 |
| | GTCAGCTTCA | |
| 7.37 ATC PAM NTS | TGAAGCTGACAGCAATCGGGCCGAGATGTCTCGCTCCGTGGCCTTAGCTG | 27183 |
| | TGCTCGCGCT | |
| 7.37 TTT PAM TS | AGCGCGAGCACAGCTAAGGCCACGGAGCGAGACATCTCGGCCCAAATGCT | 27184 |
| | GTCAGCTTCA | |
| 7.37 TTT PAM NTS | TGAAGCTGACAGCATTTGGGCCGAGATGTCTCGCTCCGTGGCCTTAGCTG | 27185 |
| | TGCTCGCGCT | |
| 7.37 CTT PAM TS | AGCGCGAGCACAGCTAAGGCCACGGAGCGAGACATCTCGGCCCTAGTGCT | 27186 |
| | GTCAGCTTCA | |
| 7.37 CTT PAM NTS | TGAAGCTGACAGCACTTGGGCCGAGATGTCTCGCTCCGTGGCCTTAGCTG | 27187 |
| | TGCTCGCGCT | |
| 7.37 GTT PAM TS | AGCGCGAGCACAGCTAAGGCCACGGAGCGAGACATCTCGGCCCTACTGCT | 27188 |
| | GTCAGCTTCA | |
| 7.37 GTT PAM NTS | TGAAGCTGACAGCAGTTGGGCCGAGATGTCTCGCTCCGTGGCCTTAGCTG | 27189 |
| | TGCTCGCGCT | |
| 7.37 ATT PAM TS | AGCGCGAGCACAGCTAAGGCCACGGAGCGAGACATCTCGGCCCTATTGCT | 27190 |
| | GTCAGCTTCA | |
| 7.37 ATT PAM NTS | TGAAGCTGACAGCAATTGGGCCGAGATGTCTCGCTCCGTGGCCTTAGCTG | 27191 |
| | TGCTCGCGCT | |

*The DNA sequences used to generate each dsDNA substrate are shown. The PAM sequences for
each are bolded. TS-target strand. NTS-Non-target strand.

TABLE 11
Apparent cleavage rates of CasX
491.174 against NTC and NTT PAMs

| PAM | TTC | ATC | CTC | GTC | TTT | ATT | CTT | GTT |
|---|---|---|---|---|---|---|---|---|
| k_{cleave} | 15.6* | 6.66 | 9.45 | 2.52 | 1.33 | 0.0675 | 0.0204 | 0.330 |
| (min⁻¹) | | | | | | | | |

*The rate of TTC cleavage exceeds the resolution of this assay, so the resulting k_{cleave} should be taken as a lower bound.

### Example 6: Assessing Nuclease Activity for Double-Strand Cleavage

[0786] Purified wild-type and engineered CasX variants will be complexed with single-guide RNA bearing a fixed HRS targeting sequence. The RNP complexes will be added to buffer containing MgCl2 at a final concentration of 100 nM and incubated with double-stranded target DNA with a 5′ Cy7.5 label on either the target or non-target strand at a concentration of 10 nM. Aliquots of the reactions will be taken at fixed time points and quenched by the addition of an equal volume of 50 mM EDTA and 95% formamide. The samples will be run on a denaturing polyacrylamide gel to separate cleaved and uncleaved DNA substrates. The results will be visualized and the cleavage rates of the target and non-target strands by the wild-type and engineered variants will be determined. To more clearly differentiate between changes to target binding vs the rate of catalysis of the nucleolytic reaction itself, the protein concentration will be titrated over a range from 10 nM to 1 uM and cleavage rates will be determined at each concentration to generate a pseudo-Michaelis-Menten fit and determine the kcat* and KM*. Changes to KM* are indicative of altered binding, while changes to kcat* are indicative of altered catalysis.

### Example 7: The PASS Assay Identifies CasX Protein Variants of Differing PAM Sequence Specificity

[0787] Experiments were conducted to identify the PAM sequence specificities of CasX proteins 2 (SEQ ID NO: 2), 491 (SEQ ID NO: 126), 515 (SEQ ID NO: 133), 533 (SEQ ID NO: 26909), 535 (SEQ ID NO: 26911), 668 (SEQ ID NO: 27043), and 672 (SEQ ID NO: 27046). To accomplish this, the HEK293 cell line PASS_V1.01 or PASS_V1.02 was treated with the above CasX proteins in at least two replicate experiments, and Next-generation sequencing (NGS) was performed to calculate the percent editing using a variety of spacers at their intended target sites.

[0788] Materials and Methods: A multiplexed pooled approach was taken to assay clonal protein variants using the PASS system. Briefly, two pooled HEK293 cell lines were generated and termed PASS_V1.01 and PASS_V1.02. Each cell within the pool contained a genome-integrated single-guide RNA (sgRNA), paired with a specific target site. After transfection of protein-expression constructs, editing at a specific target by a specific spacer could be quantified by NGS. Each guide-target pair was designed to provide data related to activity, specificity, and targetability of the CasX-guide RNP complex.

[0789] Paired spacer-target sequences were synthesized by Twist Biosciences and obtained as an equimolar pool of oligonucleotides. This pool was amplified by PCR and cloned by Golden Gate cloning to generate a final library of plasmids named p77. Each plasmid contained a sgRNA expression element and a target site, along with a GFP expression element. The sgRNA expression element consisted of a U6 promoter driving transcription of gRNA scaffold 174 (SEQ ID NO:2238), followed by a spacer sequence which would target the RNP of the guide and CasX variant to the intended target site. 250 possible unique, paired spacer-target synthetic sequences were designed and synthesized. A pool of lentivirus was then produced from this plasmid library using the LentiX production system (Takara Bio USA, Inc) according to the manufacturer's instructions. The resulting viral preparation was then quantified by qPCR and transduced into a standard HEK293 cell line at a low multiplicity of infection so as to generate single copy integrations. The resulting cell line was then purified by fluorescence-activated cell sorting (FACS) to complete the production of PASS_V1.01 or PASS_V1.02. A cell line was then seeded in six-well plate format and treated in duplicate with either water or was transfected with 2 μg of plasmid p67, delivered by Lipofectamine Transfection Reagent (ThermoFisher) according to the manufacturer's instructions. Plasmid p67 contains an EF-1alpha promoter driving expression of a CasX protein tagged with the SV40 Nuclear Localization Sequence. After two days, treated cells were collected, lysed, and genomic DNA was extracted using a genomic DNA isolation kit (Zymo Research). Genomic DNA was then PCR amplified with custom primers to generate amplicons compatible with Illumina NGS and sequenced on a NextSeq instrument. Sample reads were demultiplexed and filtered for quality. Editing outcome metrics (fraction of reads with indels) were then quantified for each spacer-target synthetic sequence across treated samples.

[0790] To assess the PAM sequence specificity for a CasX protein, editing outcome metrics for four different PAM sequences were categorized. For TTC PAM target sites, 48 different spacer-target pairs were quantified; for ATC, CTC, and GTC PAM target sites, 14, 22, and 11 individual target sites were quantified, respectively. For some CasX proteins, replicate experiments were repeated dozens of times over several months. For each of these experiments, the average editing efficiency was calculated for each of the above described spacers. The average editing efficiency across the four categories of PAM sequence was then calculated from all such experiments, along with the standard deviation of these measurements.

### Results:

[0791] Table 12 lists the average editing efficiency across PAM categories and across CasX protein variants, along with the standard deviation of these measurements. The number of measurements for each category is also indicated. These data indicate that the engineered CasX variants 491 and 515 are specific for the canonical PAM sequence TTC, while other engineered variants of CasX performed more or less efficiently at the PAM sequences tested. In particular, the average rank order of PAM preferences for CasX 491 is TTC»ATC>CTC>GTC, or TTC»ATC>GTC>CTC for CasX 515, while the wild-type CasX 2 exhibits an average rank order of TTC»GTC>CTC>ATC. Note that for the lower editing PAM sequences the error of these average measurements is high. In contrast, CasX variants 535, 668, and 672 have considerably broader PAM recognition, with a rank order of TTC>CTC>ATC>GTC. Finally, CasX 533 exhibits a completely re-ordered ranking relative to the WT CasX, ATC>CTC»GTC>TTC. These data can be used to engineer maximally-active therapeutic CasX molecules for a target DNA sequence of interest.

[0792] Under the conditions of the experiments, a set of CasX proteins was identified that are improved for double-stranded DNA cleavage in human cells at target DNA sequences associated with a PAM of sequence TTC, ATC, CTC, or GTC, supporting that CasX variants with an altered spectrum of PAM specificity, relative to CasX 491, for non-canonical PAM (i.e., ATC, CTC, and GTC).

TABLE 12
Average editing of selected CasX Proteins at spacers associated
with PAM sequences of TTC, ATC, CTC, or GTC

| | PAM | Average Percent | Standard | Number of |
|---|---|---|---|---|
| CasX Name | Sequence | Editing | Deviation | Measurements |
| 2 | ATC | 0.40 | 1.35 | 336 |
| 2 | CTC | 0.46 | 2.29 | 528 |
| 2 | GTC | 0.69 | 6.27 | 264 |
| 2 | TTC | 5.28 | 7.34 | 1152 |
| 491 | ATC | 6.86 | 8.29 | 364 |
| 491 | CTC | 4.54 | 6.40 | 572 |
| 491 | GTC | 3.40 | 6.68 | 286 |
| 491 | TTC | 40.41 | 23.13 | 1248 |
| 515 | ATC | 4.47 | 5.49 | 252 |
| 515 | CTC | 3.36 | 4.80 | 396 |
| 515 | GTC | 3.65 | 10.75 | 198 |
| 515 | TTC | 36.75 | 24.89 | 864 |
| 533 | ATC | 47.50 | 15.86 | 96 |
| 533 | CTC | 25.90 | 14.74 | 28 |
| 533 | GTC | 6.34 | 8.36 | 44 |
| 533 | TTC | 0.87 | 3.05 | 22 |
| 535 | ATC | 9.70 | 10.20 | 56 |
| 535 | CTC | 11.77 | 13.59 | 88 |
| 535 | GTC | 7.62 | 15.04 | 44 |
| 535 | TTC | 29.29 | 18.78 | 192 |
| 668 | ATC | 44.69 | 24.40 | 56 |
| 668 | CTC | 46.14 | 26.57 | 88 |
| 668 | GTC | 30.48 | 24.06 | 44 |
| 668 | TTC | 55.34 | 28.59 | 192 |
| 672 | ATC | 25.51 | 20.85 | 56 |
| 672 | CTC | 30.05 | 22.95 | 88 |
| 672 | GTC | 14.21 | 13.38 | 44 |
| 672 | TTC | 52.36 | 27.64 | 192 |

### Example 8: CasX:gRNA In Vitro Cleavage Assays

### 1. Assembly of RNP

[0793] Purified wild-type and RNP of CasX and single guide RNA (sgRNA) were either prepared immediately before experiments or prepared and snap-frozen in liquid nitrogen and stored at −80° C. for later use. To prepare the RNP complexes, the CasX protein was incubated with sgRNA at 1:1.2 molar ratio. Briefly, sgRNA was added to Buffer #1 (25 mM NaPi, 150 mM NaCl, 200 mM trehalose, 1 mM MgCl2), then the CasX was added to the sgRNA solution, slowly with swirling, and incubated at 37° C. for 10 min to form RNP complexes. RNP complexes were filtered before use through a 0.22 tm Costar 8160 filters that were pre-wet with 200 μl Buffer #1. If needed, the RNP sample was concentrated with a 0.5 ml Ultra 100-Kd cutoff filter, (Millipore part #UFC510096), until the desired volume was obtained. Formation of competent RNP was assessed as described below.

### 2. Determining Cleavage-Competent Fractions for Protein Variants Compared to Wild-Type Reference CasX

[0794] The ability of CasX variants to form active RNP compared to reference CasX was determined using an in vitro cleavage assay. The beta-2 microglobulin (B2M) 7.37 target for the cleavage assay was created as follows. DNA oligos with the sequence TGAAGCTGACAGCATTCGGGCCGAGATGTCTCGCTCCGTGGCCTTAGCTGTGCTCGC GCT (non-target strand, NTS (SEQ ID NO: 27177)) and AGCGCGAGCACAGCTAAGGCCACGGAGCGAGACATCTCGGCCCGAATGCTGTCAGC TTCA (target strand, TS (SEQ ID NO: 27176)) were purchased with 5′ fluorescent labels (LI-COR IRDye 700 and 800, respectively). dsDNA targets were formed by mixing the oligos in a 1:1 ratio in 1× cleavage buffer (20 mM Tris HCl pH 7.5, 150 mM NaCl, 1 mM TCEP, 5% glycerol, 10 mM MgCl2), heating to 95° C. for 10 minutes, and allowing the solution to cool to room temperature.

[0795] CasX RNPs were reconstituted with the indicated CasX and guides (see graphs) at a final concentration of 1 μM with 1.5-fold excess of the indicated guide unless otherwise specified in 1x cleavage buffer (20 mM Tris HCl pH 7.5, 150 mM NaCl, 1 mM TCEP, 5% glycerol, 10 mM MgCl2) at 37° C. for 10 min before being moved to ice until ready to use. The 7.37 target was used, along with sgRNAs having spacers complementary to the 7.37 target.

[0796] Cleavage reactions were prepared with final RNP concentrations of 100 nM and a final target concentration of 100 nM. Reactions were carried out at 37° C. and initiated by the addition of the 7.37 target DNA. Aliquots were taken at 5, 10, 30, 60, and 120 minutes and quenched by adding to 95% formamide, 20 mM EDTA. Samples were denatured by heating at 95° C. for 10 minutes and run on a 10% urea-PAGE gel. The gels were either imaged with a LI-COR Odyssey CLx and quantified using the LI-COR Image Studio software or imaged with a Cytiva Typhoon and quantified using the Cytiva IQTL software. The resulting data were plotted and analyzed using Prism. We assumed that CasX acts essentially as a single-turnover enzyme under the assayed conditions, as indicated by the observation that sub-stoichiometric amounts of enzyme fail to cleave a greater-than-stoichiometric amount of target even under extended time-scales and instead approach a plateau that scales with the amount of enzyme present. Thus, the fraction of target cleaved over long time-scales by an equimolar amount of RNP is indicative of what fraction of the RNP is properly formed and active for cleavage. The cleavage traces were fit with a biphasic rate model, as the cleavage reaction clearly deviates from monophasic under this concentration regime, and the plateau was determined for each of three independent replicates. The mean and standard deviation were calculated to determine the active fraction (Table 13).

[0797] Apparent active (competent) fractions were determined for RNPs formed for CasX2+ guide 174+7.37 spacer, CasX119+ guide 174+7.37 spacer, CasX457+ guide 174+7.37 spacer, CasX488+ guide 174+7.37 spacer, and CasX491+ guide 174+7.37 spacer as shown in FIG. 1. The determined active fractions are shown in Table 13. All CasX variants had higher active fractions than the wild-type CasX2, indicating that the engineered CasX variants form significantly more active and stable RNP with the identical guide under tested conditions compared to wild-type CasX. This may be due to an increased affinity for the sgRNA, increased stability or solubility in the presence of sgRNA, or greater stability of a cleavage-competent conformation of the engineered CasX:sgRNA complex. An increase in solubility of the RNP was indicated by a notable decrease in the observed precipitate formed when CasX457, CasX488, or CasX491 was added to the sgRNA compared to CasX2.

3. In Vitro Cleavage Assays—Determining Cleavage-Competent Fractions for Single Guide Variants relative to reference single guides

[0798] Cleavage-competent fractions were also determined using the same protocol for CasX2.2.7.37, CasX2.32.7.37, CasX2.64.7.37, and CasX2.174.7.37 to be 16±3%, 13±3%, 5+2%, and 22±5%, as shown in FIG. 2 and Table 10.

[0799] A second set of guides were tested under different conditions to better isolate the contribution of the guide to RNP formation. Guides 174, 175, 185, 186, 196, 214, and 215 with 7.37 spacer were mixed with CasX 491 at final concentrations of 1 μM for the guide and 1.5 μM for the protein, rather than with excess guide as before. Results are shown in FIG. 3 and Table 10. Many of these guides exhibited additional improvement over 174, with 185 and 196 achieving 91±4% and 91±1% competent fractions, respectively, compared with 80±9% for 174 under these guide-limiting conditions.

[0800] The data indicate that both CasX variants and sgRNA variants are able to form a higher degree of active RNP with guide RNA compare to wild-type CasX and wild-type sgRNA. The apparent cleavage rates of CasX variants 119, 457, 488, and 491 compared to wild-type reference CasX were determined using an in vitro fluorescent assay for cleavage of the target 7.37.

4. In Vitro Cleavage Assays—Determining k_{cleave} for CasX Variants Compared to Wild-Type Reference CasX

[0801] CasX RNPs were reconstituted with the indicated CasX (see FIG. 4) at a final concentration of 1 μM with 1.5-fold excess of the indicated guide in 1× cleavage buffer (20 mM Tris HCl pH 7.5, 150 mM NaCl, 1 mM TCEP, 5% glycerol, 10 mM MgCl₂) at 37° C. for 10 min before being moved to ice until ready to use. Cleavage reactions were set up with a final RNP concentration of 200 nM and a final target concentration of 10 nM. Reactions were carried out at 37° C. except where otherwise noted and initiated by the addition of the target DNA. Aliquots were taken at 0.25, 0.5, 1, 2, 5, and 10 minutes and quenched by adding to 95% formamide, 20 mM EDTA. Samples were denatured by heating at 95° C. for 10 minutes and run on a 10% urea-PAGE gel. The gels were imaged with a LI-COR Odyssey CLx and quantified using the LI-COR Image Studio software or imaged with a Cytiva Typhoon and quantified using the Cytiva IQTL software. The resulting data were plotted and analyzed using Prism, and the apparent first-order rate constant of non-target strand cleavage (k_{cleave}) was determined for each CasX:sgRNA combination replicate individually. The mean and standard deviation of three replicates with independent fits are presented in Table 10, and the cleavage traces are shown in FIG. 5.

[0802] Apparent cleavage rate constants were determined for wild-type CasX2, and CasX variants 119, 457, 488, and 491 with guide 174 and spacer 7.37 utilized in each assay (see Table 10 and FIG. 4). All CasX variants had improved cleavage rates relative to the wild-type CasX2. CasX 457 cleaved more slowly than 119, despite having a higher competent fraction as determined above. CasX488 and CasX491 had the highest cleavage rates by a large margin; as the target was almost entirely cleaved in the first timepoint, the true cleavage rate exceeds the resolution of this assay, and the reported k_{cleave} should be taken as a lower bound.

[0803] The data indicate that the CasX variants have a higher level of activity, with k_{cleave} rates reaching at least 30-fold higher compared to wild-type CasX2.

### 5. In Vitro Cleavage Assays: Comparison of Guide Variants to Wild-Type Guides

[0804] Cleavage assays were also performed with wild-type reference CasX2 and reference guide 2 compared to guide variants 32, 64, and 174 to determine whether the variants improved cleavage. The experiments were performed as described above. As many of the resulting RNPs did not approach full cleavage of the target in the time tested, we determined initial reaction velocities (V₀) rather than first-order rate constants. The first two timepoints (15 and 30 seconds) were fit with a line for each CasX:sgRNA combination and replicate. The mean and standard deviation of the slope for three replicates were determined.

[0805] Under the assayed conditions, the V₀ for CasX2 with guides 2, 32, 64, and 174 were 20.4±1.4 nM/min, 18.4 2.4 nM/min, 7.8 1.8 nM/min, and 49.3±1.4 nM/min (see Table 13 and FIG. 5 and FIG. 6). Guide 174 showed substantial improvement in the cleavage rate of the resulting RNP (˜2.5-fold relative to 2, see FIG. 6), while guides 32 and 64 performed similar to or worse than guide 2. Notably, guide 64 supports a cleavage rate lower than that of guide 2 but performs much better in vivo (data not shown). Some of the sequence alterations to generate guide 64 likely improve in vivo transcription at the cost of a nucleotide involved in triplex formation. Improved expression of guide 64 likely explains its improved activity in vivo, while its reduced stability may lead to improper folding in vitro.

[0806] Additional experiments were carried out with guides 174, 175, 185, 186, 196, 214, and 215 with spacer 7.37 and CasX 491 to determine relative cleavage rates. To reduce cleavage kinetics to a range measurable with our assay, the cleavage reactions were incubated at 10° C. Results are in FIG. 7 and Table 13. Under these conditions, 215 was the only guide that supported a faster cleavage rate than 174. 196, which exhibited the highest active fraction of RNP under guide-limiting conditions, had kinetics essentially the same as 174, again highlighting that different variants result in improvements of distinct characteristics.

[0807] The data support that, under the conditions of the assay, use of the majority of the guide variants with CasX results in RNP with a higher level of activity than one with the wild-type guide, with improvements in initial cleavage velocity ranging from −2-fold to >6-fold. Numbers in Table 13 indicate, from left to right, CasX variant, sgRNA scaffold, and spacer sequence of the RNP construct. In the RNP construct names in the table below, CasX protein variant, guide scaffold and spacer are indicated from left to right.

### 6. In Vitro Cleavage Assays: Comparing Cleavage Rate and Competent Fraction of 515.174 and 526.174 Against Reference 2.2.

[0808] We wished to compare engineered protein CasX variants 515 and 526 in complex with engineered single-guide variant 174 against the reference wild-type protein 2 (SEQ ID NO:2) and minimally-engineered guide variant 2 (SEQ ID NO: 5). RNP complexes were assembled as described above, with 1.5-fold excess guide. Cleavage assays to determine k_{cleave} and competent fraction were performed as described above, with both performed at 37° C., and with different timepoints used to determine the competent fraction for the wild-type vs engineered RNPs due to the significantly different times needed for the reactions to near completion.

[0809] The resulting data clearly demonstrate the dramatic improvements made to RNP activity by engineering both protein and guide. RNPs of 515.174 and 526.174 had competent fractions of 76% and 91%, respectively, as compared to 16% for 2.2 (FIG. 8, Table 13). In the kinetic assay, both 515.174 and 526.174 cut essentially all of the target DNA by the first timepoint, exceeding the resolution of the assay and resulting in estimated cleavage rates of 17.10 and 19.87 min⁻¹, respectively (FIG. 9, Table 13). AnRNP of 2.2, by contrast, cut on average less than 60. of 5the target DNA by the final 10-minute timepoint and has an estimated k_{cleave} nearly two orders of magnitude lower than the engineered RNPs. The modifications made to the protein and guide have resulted in RNPs that are more stable, more likely to form active particles, and cut DNA much more efficiently on a per-particle basis as well.

TABLE 13
Results of cleavage and RNP formation assays

| RNP Construct | k_{cleave}* | | Initial velocity* | Competent fraction |
|---|---|---|---|---|
| 2.2.7.37 | | | 20.4 ± 1.4 nM/min | 16 ± 3% |
| 2.32.7.37 | | | 18.4 ± 2.4 nM/min | 13 ± 3% |
| 2.64.7.37 | | | 7.8 ± 1.8 nM/min | 5 ± 2% |
| 2.174.7.37 | 0.51 ± 0.01 | min⁻¹ | 49.3 ± 1.4 nM/min | 22 ± 5% |
| 119.174.7.37 | 6.29 ± 2.11 | min⁻¹ | | 35 ± 6% |
| 457.174.7.37 | 3.01 ± 0.90 | min⁻¹ | | 53 ± 7% |
| 488.174.7.37 | 15.19 | min⁻¹ | | 67% |
| 491.174.7.37 | 16.59 min⁻¹/ | | | 83%/17% (guide-limited) |
| | 0.293 min⁻¹ (10° C.) | | | |
| 491.175.7.37 | 0.089 min⁻¹ (10° C.) | | | 5% (guide-limited) |
| 491.185.7.37 | 0.227 min⁻¹ (10° C.) | | | 44% (guide-limited) |
| 491.186.7.37 | 0.099 min⁻¹ (10° C.) | | | 11% (guide-limited) |
| 491.196.7.37 | 0.292 min⁻¹ (10° C.) | | | 46% (guide-limited) |
| 491.214.7.37 | 0.284 min⁻¹ (10° C.) | | | 30% (guide-limited) |
| 491.215.7.37 | 0.398 min⁻¹ (10° C.) | | | 38% (guide-limited) |
| 515.174.7.37 | 17.10 | min⁻¹** | | 76% |
| 526.174.7.37 | 19.87 | min⁻¹** | | 91% |

*Mean and standard deviation
**Rate exceeds resolution of assay

### Example 9: Testing Effects of Spacer Length on In Vitro Cleavage Kinetics

[0810] Ribonuclear protein complexes (RNP) of two CasX variants and guide RNA with spacers of varying length were tested for in vitro cleavage activity to determine what spacer length supports the most efficient cleavage of a target nucleic acid and whether spacer length preference changes with the protein.

### Methods:

[0811] Ribonuclear protein complexes (RNP) of CasX and guide RNA with spacers of varying length were tested for in vitro cleavage activity to determine what spacer length supports the most efficient cleavage of a target nucleic acid.

[0812] CasX variant 515 and 526 were purified as described above. Guides with scaffold 174 (SEQ ID NO: 2238) were prepared by in vitro transcription (IVT). IVT templates were generated by PCR using Q5 polymerase (NEB M0491) according to the recommended protocol, template oligos for each scaffold backbone, and amplification primers with the T7 promoter and the 7.37 spacer (GGCCGAGATGTCTCGCTCCG; targeting tdTomato (SEQ ID NO: 27192)) of 20 nucleotides or truncated from the 3′ end to 18 or 19 nucleotides. Spacer sequences as well as the oligonucleotides used to generate each template are shown in Table 14. The resulting templates were then used with T7 RNA polymerase to produce RNA guides according to standard protocols. The guides were purified using denaturing polyacrylamide gel electrophoresis and refolded prior to use.

[0813] CasX RNPs were reconstituted by diluting CasX to 1 μM in 1× cleavage buffer (20 mM Tris HCl pH 7.5, 150 mM NaCl, 1 mM TCEP, 5% glycerol, 10 mM MgCl2) and adding sgRNA to 1.2 μM and incubating at 37° C. for 10 min before being moved to ice until ready to use. Fluorescently-labeled 7.37 target DNA was purchased as individual oligonucleotides from Integrated DNA Technologies (full sequences in Table 14), and dsDNA target was prepared by heating an equimolar mix of the two complementary strands in 1× cleavage buffer and slow-cooling to room temperature.

[0814] RNPs were diluted in cleavage buffer to a final concentration of 200 nM and incubated at 10° C. without shaking. Cleavage reactions were initiated by the addition of 7.37 target DNA to a final concentration of 10 nM. Timepoints were taken at 0.25, 0.5, 1, 2, 5, 10, and 30 minutes. Timepoints were quenched by adding to an equal volume of 95% formamide, 20 mM EDTA. Samples were denatured by heating at 95° C. for 10 minutes and run on a 10% urea-PAGE gel. Gels were imaged with an Amersham Typhoon and analyzed with IQTL software. The resulting data were plotted and analyzed using Prism. The cleavage of the non-target strand was fit with a single exponential function to determine the apparent first-order rate constant (k_{cleave}).

### Results:

[0815] Cleavage rates were compared for CasX variants 515 and 526 in complex with sgRNAs with 18, 19, or 20 nucleotide spacers to determine which spacer length resulted in the most efficient cleavage for each protein variant. Consistent with other experiments performed with in vitro-transcribed sgRNA, the 18-nt spacer guide performed best for both protein variants (FIGS. 12A and B, Table 14). The 18-nt spacer was 1.4-fold faster than the 20-nt spacer for protein 515, and it was 3-fold faster than the 20-nt spacer for protein 526. The 19-nt spacer had intermediate activity for both proteins, though again the difference was more pronounced for variant 526. In general, spacers shorter than 20-nt have been observed to have increased activity across a range of proteins, spacers, and delivery methods, but the degree of improvement and the optimal spacer length have varied. These data show that two engineered proteins that are quite similar in sequence (different in only two residues) can have changes in activity as a result of spacer length that are similar in direction but substantially different in degree.

TABLE 14
Relevant sequences and oligonucleotides

| Description | Sequence | SEQ ID NO |
|---|---|---|
| 7.37 target sequence non-target | IR700- | 27177 |
| strand | TGAAGCTGACAGCATTCGGGCCGAGATGTCTC | |
| | GCTCCGTGGCCTTAGCTGTGCTCGCGCT | |
| 7.37 target sequence target | IR800- | 27176 |
| strand | AGCGCGAGCACAGCTAAGGCCACGGAGCGAGA | |
| | CATCTCGGCCCGAATGCTGTCAGCTTCA | |
| 20-nt spacer sequence | GGCCGAGATGTCTCGCTCCG | 27191 |
| 18-nt spacer sequence | GGCCGAGATGTCTCGCTC | 27193 |
| 19-nt spacer sequence | GGCCGAGATGTCTCGCTCC | 27194 |
| Scaffold 174 template fwd | GAAATTAATACGACTCACTATAACTGGCGCTT | 247 |
| | TTATCTGATTACTTTGAGAGCCATCACCAGCG | |
| | ACTATGTCGTAGTGGGTAAAGCT | |
| Scaffold 174 template rev | CTTTGATGCTCCCTCCGAAGAGGGAGCTTTAC | 248 |
| | CCACTACGACATAGTCGC | |
| T7 amplification primer | GAAATTAATACGACTCACTATA | 234 |
| Scaffold 174 20-nt spacer primer | CGGAGCGAGACATCTCGGCCCTTTGATGCTCC | 249 |
| | CTCC | |
| Scaffold 174 18-nt spacer primer | GAGCGAGACATCTCGGCCCTTTGATGCTCCCT | 27195 |
| | CC | |
| Scaffold 174 19-nt spacer primer | GGAGCGAGACATCTCGGCCCTTTGATGCTCCC | 27196 |
| | TCC | |

TABLE 15
Cleavage rates of RNPs with truncated spacers

| Spacer length | 515 k_{cleave}(min⁻¹) | 526 k_{cleave}(min⁻¹) |
|---|---|---|
| 18 | 0.215 | 0.427 |
| 19 | 0.182 | 0.282 |
| 20 | 0.150 | 0.143 |

### Example 10: Assessing Binding Affinity to the Guide RNA

[0816] Purified wild-type and improved CasX will be incubated with synthetic single-guide RNA containing a 3′ Cy7.5 moiety in low-salt buffer containing magnesium chloride as well as heparin to prevent non-specific binding and aggregation. The sgRNA will be maintained at a concentration of 10 pM, while the protein will be titrated from 1 pM to 100 μM in separate binding reactions. After allowing the reaction to come to equilibrium, the samples will be run through a vacuum manifold filter-binding assay with a nitrocellulose membrane and a positively charged nylon membrane, which bind protein and nucleic acid, respectively. The membranes will be imaged to identify guide RNA, and the fraction of bound vs unbound RNA will be determined by the amount of fluorescence on the nitrocellulose vs nylon membrane for each protein concentration to calculate the dissociation constant of the protein-sgRNA complex. The experiment will also be carried out with improved variants of the sgRNA to determine if these mutations also affect the affinity of the guide for the wild-type and mutant proteins. We will also perform electromobility shift assays to qualitatively compare to the filter-binding assay and confirm that soluble binding, rather than aggregation, is the primary contributor to protein-RNA association.

### Example 11: Assessing Binding Affinity to the Target DNA

[0817] Purified wild-type and improved CasX will be complexed with single-guide RNA bearing a targeting sequence complementary to the target nucleic acid. The RNP complex will be incubated with double-stranded target DNA containing a PAM and the appropriate target nucleic acid sequence with a 5′ Cy7.5 label on the target strand in low-salt buffer containing magnesium chloride as well as heparin to prevent non-specific binding and aggregation. The target DNA will be maintained at a concentration of 1 nM, while the RNP will be titrated from 1 μM to 100 μM in separate binding reactions. After allowing the reaction to come to equilibrium, the samples will be run on a native 5% polyacrylamide gel to separate bound and unbound target DNA. The gel will be imaged to identify mobility shifts of the target DNA, and the fraction of bound vs unbound DNA will be calculated for each protein concentration to determine the dissociation constant of the RNP-target DNA ternary complex. The experiments are expected to demonstrate the improved binding affinity of the RNP comprising a CasX variant and gRNA variant compared to an RNP comprising a reference CasX and reference gRNA.

### Example 12: Assessing Improved Expression and Solubility Characteristics of CasX Variants for RNP Production

[0818] Wild-type and modified CasX variants will be expressed in BL21 (DE3) E. coli under identical conditions. All proteins will be under the control of an IPTG-inducible T7 promoter. Cells will be grown to an OD of 0.6 in TB media at 37° C., at which point the growth temperature will be reduced to 16° C. and expression will be induced by the addition of 0.5 mM IPTG. Cells will be harvested following 18 hours of expression. Soluble protein fractions will be extracted and analyzed on an SDS-PAGE gel. The relative levels of soluble CasX expression will be identified by Coomassie staining. The proteins will be purified in parallel according to the protocol above, and final yields of pure protein will be compared. To determine the solubility of the purified protein, the constructs will be concentrated in storage buffer until the protein begins to precipitate. Precipitated protein will be removed by centrifugation and the final concentration of soluble protein will be measured to determine the maximum solubility for each variant. Finally, the CasX variants will be complexed with single guide RNA and concentrated until precipitation begins. Precipitated RNP will be removed by centrifugation and the final concentration of soluble RNP will be measured to determine the maximum solubility of each variant when bound to guide RNA.

### Example 13: Editing of GATA1 Binding Region in the BCL11A Erythroid Enhancer Locus in HEK293T Cells

[0819] Experiment were conducted to demonstrate the ability of CasX to edit the GATA1 binding region in the BCL11A erythroid enhancer locus using the CasX variant 438 and guide variant 174, and a spacer targeting the GATA1 binding region of the human BCL11A erythroid enhancer locus in HEK293T cells.

[0820] HEK293T cells were maintained at 37° C. and 5% CO2 in Fibroblast (FB) medium, consisting of Dulbecco's Modified Eagle Medium (DMEM; Corning Cellgro, #10-013-CV) supplemented with 10% fetal bovine serum (FBS; Seradigm, #1500-500), and 100 Units/mL penicillin and 100 mg/mL streptomycin (100×-Pen-Strep; GIBCO #15140-122), and can additionally include sodium pyruvate (100×, Thermofisher #11360070), non-essential amino acids (100× Thermofisher #11140050), HEPES buffer (100× Thermofisher #15630080), and 2-mercaptoethanol (1000× Thermofisher #21985023).

[0821] For this experiment, HEK293T cells were seeded at 20-40k cells/well in a 96 well plate in 100 μL of FB medium and cultured in a 37° C. incubator with 5% CO2. The following day, cells were transfected at ˜75% confluence. CasX and guide construct (see Table 16 for sequences) was transfected into the HEK293T cells at 100-500 ng per well using Lipofectamine 3000 following the manufacturer's protocol, using 3 wells per construct as replicates. A non-targeting plasmid was used as a negative control. SpyCas9 and guide construct targeting the same region was used as a benchmarking control. Cells were selected for successful transfection with puromycin at 0.3-3 μg/ml for 24-48 hours followed by recovery in FB medium. Subsequently, cells for each sample from the experiment were lysed, and the genome was extracted following the manufacturer's protocol and standard practices. Editing in cells from each experimental sample were assayed using NGS analysis. Briefly, genomic DNA was amplified via PCR with primers specific to the target genomic location of interest to form a target amplicon. These primers contain additional sequence at the 5′ ends to introduce Illumina read and 2 sequences. Further, they contain a 16 nt random sequence that functions as a unique molecular identifier (UMI). Quality and quantification of the amplicon was assessed using a Fragment Analyzer DNA analyzer kit (Agilent, dsDNA 35-1500 bp). Amplicons were sequenced on the Illumina Miseq according to the manufacturer's instructions. Raw fastq files from sequencing were processed as follows. (1) The sequences were trimmed for quality and for adapter sequences using the program cutadapt (v. 2.1). (2) The sequences from read 1 and read 2 were merged into a single insert sequence using the program flash2 (v2.2.00). (3) The consensus insert sequences were run through the program CRISPResso2 (v 2.0.29), along with the expected amplicon sequence and the spacer sequence. This program quantifies the percent of reads that were modified in a window around the 3′ end of the spacer (30 bp window centered at −3 bp from 3′ end of spacer). The activity of the CasX molecule was quantified as the total percent of reads that contain insertions and/or deletions anywhere within this window.

TABLE 16
Guide sequences

| | Spacer | SEQ | | SEQ | | SEQ |
|---|---|---|---|---|---|---|
| Spacer | Sequence | ID NO | 174 Guide Sequence | ID NO | Guide + Spacer Sequence | ID NO |
| 21.1 | UGGAGCC | 22 | ACUGGCGCUUUUAUCU | 2238 | ACUGGCGCUUUUAUCUGAUUA | 271 |
| | UGUGAUA | | GAUUACUUUGAGAGCC | | CUUUGAGAGCCAUCACCAGCG | |
| | AAAGCA | | AUCACCAGCGACUAUG | | ACUAUGUCGUAGUGGGUAAAG | |
| | | | UCGUAGUGGGUAAAGC | | CUCCCUCUUCGGAGGGAGCAU | |
| | | | UCCCUCUUCGGAGGGA | | CAAAGUGGAGCCUGUGAUAAA | |
| | | | GCAUCAAAG | | AGCA | |

[0822] Results: The graph in FIG. 18 shows the results of NGS analysis of CasX-mediated editing of the GATA1 binding region at the BCL11A erythroid enhancer locus in HEK293T cells 5 days post-transfection. Each data point is an average measurement of NGS reads of editing outcomes generated by an individual treatment condition. The results indicate that CasX and guide was able to edit the BCL11A erythroid enhancer locus at an average editing level of 90%, while the SpyCas9 construct showed an average editing level of 80%. The construct with non-targeting spacer resulted in no editing (data not shown). This example demonstrates that CasX with an appropriate guide was able to edit the BCL11A erythroid enhancer locus in HEK293T cells. Experiments with CasX variants 668, 672, 676 and gRNA 235 would be performed under similar conditions and would be expected to result in similar editing efficiency.

### Example 14: Editing of GATA1 Binding Region in the BCL11A Erythroid Enhancer Locus in K562 Cells

[0823] Experiment were conducted to demonstrate the ability of CasX to edit the BCL11A erythroid enhancer locus using the CasX variants 119 and 491, scaffold variant 174, and a spacer targeting the GATA1 binding region of the human BCL11A erythroid enhancer locus in K562 cells.

[0824] K562 cells were maintained at 37° C. and 5% CO2 in medium consisting of RPMI (RPMI; Thermofisher, #11875119) supplemented with 10% fetal bovine serum (FBS; Seradigm, #1500-500), and 100 Units/mL penicillin and 100 mg/mL streptomycin (100×-Pen-Strep; GIBCO #15140-122), and can additionally include sodium pyruvate (100×, Thermofisher #11360070) and HEPES buffer (100× Thermofisher #15630080).

[0825] In this experiment, CasX and guide targeting the GATA1 binding region of the BCL11A locus were introduced into K562 cells using two different delivery modalities, RNPs and XDPs (the RNP packaged in a XDP).In the first experimental arm, CasX RNP targeting the GATA1 binding region of the BCL11A locus (see table for spacer sequence) was formulated using standard methods. Briefly, each CasX RNP (see table for sequences) was transduced into 100k-500k K562 cells at 10-100 pmol per condition using a Lonza nucleofector kit following the manufacturer's protocol, using 3 wells per construct as replicates. Cells were cultured in supplemented RPMI medium at 37° C. and 5% CO2.

[0826] In the second experimental arm, XDPs encapsulating CasX targeting the GATA1 binding region of the BCL11A locus were formulated as described below. Briefly, XDPs were produced using four structural plasmids: pXDP17, pSG0010, pGP2, and pXDP3. The plasmid pXDP17 expresses the HIV-1 gag sequence followed by CasX version 491. pSG0010 is scaffold 174 with spacer 21.1 (see below for sequence) targeting BC11A expressed under the U6 promoter. pGP2 expresses the VSV-G targeting moiety. pXDP3 expresses the HIV-1 gag polyprotein with no CasX molecule attached. For producing XDPs, LentiX cells from Takara were split and seeded 24 hours before plasmid DNA transfection. 89 μg of pSG0010, 366 μg of pXDP0017, 30 μg of pXDP0003, and 1.7 μg of pGP2 plasmids were mixed with Opti-MEM and PEI then added to cell culture. Media was changed to Opti-MEM 16 hours post transfection. 54 hours post transfection media was collected and concentrated through centrifugation. XDPs were resuspended in 150 mM NaCl buffer 1 and frozen at −150° C. On the day of the experiment, XDPs were thawed on ice and used immediately on cells.

[0827] K562 cells were seeded at 30-50k/well in a 96-well plate, transduced with XDPs at a range of different MOIs, and cultured in supplemented RPMI medium at 37° C. and 5% CO2.

[0828] Four days later, editing in cells from each experimental sample from RNP or XDP transduced samples were assayed using NGS analysis. Briefly, genomic DNA was amplified via PCR with primers specific to the target genomic location of interest to form a target amplicon. These primers contain additional sequence at the 5′ ends to introduce Illumina read and 2 sequences. Further, they contain a 16 nt random sequence that functions as a unique molecular identifier (UMI). Quality and quantification of the amplicon was assessed using a Fragment Analyzer DNA analyzer kit (Agilent, dsDNA 35-1500 bp). Amplicons were sequenced on the Illumina Miseq according to the manufacturer's instructions. Raw fastq files from sequencing were processed as follows. (1) The sequences were trimmed for quality and for adapter sequences using the program cutadapt (v. 2.1). (2) The sequences from read 1 and read 2 were merged into a single insert sequence using the program flash2 (v2.2.00). (3) The consensus insert sequences were run through the program CRISPResso2 (v 2.0.29), along with the expected amplicon sequence and the spacer sequence. This program quantifies the percent of reads that were modified in a window around the 3′ end of the spacer (30 bp window centered at −3 bp from 3′ end of spacer). The activity of the CasX molecule was quantified as the total percent of reads that contain insertions and/or deletions anywhere within this window.

[0829] Results: The graph in FIG. 19 shows the results of NGS analysis of CasX-mediated editing of the GATA1 binding region at the BCL11A erythroid enhancer locus in K562 cells 4 days post RNP transduction. Each data point is an average measurement of NGS reads of editing outcomes generated by an individual treatment condition. The results indicate that CasX and guide was able to edit the BCL11A erythroid enhancer locus in a dose-dependent manner, with CasX variant 491 consistently showing a higher level of editing relative to CasX variant 119. This example demonstrates that, under the conditions of the assay, CasX with an appropriate guide was able to edit the BCL11A erythroid enhancer locus in K562 cells.

[0830] The graph in FIG. 20 shows the results of NGS analysis of CasX-mediated editing of the GATA1 binding region at the BCL11A erythroid enhancer locus in K562 cells 4 days post XDP transduction. Each data point is an average measurement of NGS reads of editing outcomes generated by an individual treatment condition. The results indicate that CasX and guide was able to edit the BCL11A erythroid enhancer locus in a dose-dependent manner. This example demonstrates that CasX with an appropriate guide was able to edit the BCL11A erythroid enhancer locus in K562 cells. Experiments with CasX variants 668, 672, 676 and gRNA 235 would be performed under similar conditions and would be expected to result in similar editing efficiency.

### Example 15: Editing of GATA1 Binding Region in the BCL11A Erythroid Enhancer Locus in Hematopoietic Stem Cells

[0831] Experiments were conducted to demonstrate the ability of CasX to edit the BCL11A erythroid enhancer locus using the CasX variants 119 and 491, scaffold variant 174, and a spacer targeting the GATA1 binding region of the human BCL11A erythroid enhancer locus in CD34+ Hematopoietic stem cells (HSCs).

[0832] HSCs were cultured in StemSpan SFEM II medium (Stem Cell #9605) supplemented with CC100 (Stem Cell #2697), and maintained at 37° C. and 5% CO2. In this experiment, CasX and guide targeting the GATA1 binding region of the BCL11A locus were introduced into HSCs using two different delivery modalities, RNPs and XDPs. In the first experimental arm, CasX RNP targeting the GATA1 binding region of the BCL11A locus (see table for spacer sequence) was formulated using standard methods. Each CasX RNP (see table for sequences) was transduced into 100k-500k HSCs at 10-100 pmol per condition using a Lonza nucleofector kit following the manufacturer's protocol, using 3 wells per construct as replicates. Cells were cultured in supplemented SFEM II medium at 37° C. and 5% CO2.

[0833] In the second experimental arm, XDPs encapsulating CasX targeting the GATA1 binding region of the BCL11A locus were formulated as described below. Briefly, XDPs were produced using four structural plasmids: pXDP17, pSG0010, pGP2, and pXDP3. The plasmid pXDP17 expresses the HIV-1 gag sequence followed by CasX version 491. pSG0010 is scaffold 174 with spacer 21.1 (see below for sequence) targeting BC11A expressed under the U6 promoter. pGP2 expresses the VSV-G targeting moiety. pXDP3 expresses the HIV-1 gag polyprotein with no CasX molecule attached. For producing XDPs, LentiX cells from Takara were split and seeded 24 hours before plasmid DNA transfection. 89 μg of pSG0010, 366 μg of pXDP0017, 30 μg of pXDP0003, and 1.7 μg of pGP2 plasmids were mixed with Opti-MEM and PEI then added to cell culture. Media was changed to Opti-MEM 16 hours post transfection. 54 hours post transfection media was collected and concentrated through centrifugation. XDPs were resuspended in 150 mM NaCl buffer 1 and frozen at −150° C. On the day of the experiment, XDPs were thawed on ice and used immediately on cells.

[0834] HSCs were seeded at 30-50k/well in a 96-well plate, transduced with XDPs at a range of different MOIs, and cultured in supplemented SFEM II medium at 37° C. and 5% CO2. Four days later, editing in cells from each experimental condition from RNP or XDP transduced samples were assayed using NGS analysis. Briefly, cells for each sample from the experiment were lysed, and the genome was extracted following the manufacturer's protocol and standard practices. Editing in cells from each experimental sample were assayed using NGS analysis. Briefly, genomic DNA was amplified via PCR with primers specific to the target genomic location of interest to form a target amplicon. These primers contain additional sequence at the 5′ ends to introduce Illumina read and 2 sequences. Further, they contain a 16 nt random sequence that functions as a unique molecular identifier (UMI). Quality and quantification of the amplicon was assessed using a Fragment Analyzer DNA analyzer kit (Agilent, dsDNA 35-1500 bp). Amplicons were sequenced on the Illumina Miseq according to the manufacturer's instructions. Raw fastq files from sequencing were processed as follows. (1) The sequences were trimmed for quality and for adapter sequences using the program cutadapt (v. 2.1). (2) The sequences from read 1 and read 2 were merged into a single insert sequence using the program flash2 (v2.2.00). (3) The consensus insert sequences were run through the program CRISPResso2 (v 2.0.29), along with the expected amplicon sequence and the spacer sequence. This program quantifies the percent of reads that were modified in a window around the 3′ end of the spacer (30 bp window centered at −3 bp from 3′ end of spacer). The activity of the CasX molecule was quantified as the total percent of reads that contain insertions and/or deletions anywhere within this window.

[0835] Results: The graph in FIG. 21 shows the results of NGS analysis of CasX-mediated editing of the GATA1 binding region at the BCL11A erythroid enhancer locus in HSCs 4 days post RNP transduction. Each data point is an average measurement of NGS reads of editing outcomes generated by an individual treatment condition. The results indicate that CasX and guide was able to edit the BCL11A erythroid enhancer locus in a dose-dependent manner, with CasX variant 491 consistently showing a higher level of editing relative to CasX variant 119. This example demonstrates that, under the conditions of the assay, CasX with an appropriate guide was able to edit the BCL11A erythroid enhancer locus in HSCs. The graph in FIG. 22 shows the results of NGS analysis of CasX-mediated editing of the GATA1 binding region at the BCL11A erythroid enhancer locus in HSCs 4 days post XDP transduction. Each data point is an average measurement of NGS reads of editing outcomes generated by an individual treatment condition. The results indicate that CasX and guide was able to edit the BCL11A erythroid enhancer locus in a dose-dependent manner. This example demonstrates that CasX with an appropriate guide was able to edit the BCL11A erythroid enhancer locus in HSCs. Experiments with CasX variants 668, 672, 676 and gRNA 235 would be performed under similar conditions and would be expected to result in similar editing efficiency.

The application's sequence listing, which the Patent Office published only in electronic form, follows.

SEQUENCE LISTING (27270 sequences)

SEQ ID NO: 1 - protein, 986 aa, Unknown
  Deltaproteobacteria sp.
MEKRINKIRKKLSADNATKPVSRSGPMKTLLVRVMTDDLKKRLEKRRKKPEVMPQVISNNAANNLRMLLDDYTKMKEAILQVYWQEFKDDHVGLMCKFAQPASKKIDQNKLKPEMDEKGNLTTAGFACSQCGQPLFVYKLEQVSEKGKAYTNYFGRCNVAEHEKLILLAQLKPEKDSDEAVTYSLGKFGQRALDFYSIHVTKESTHPVKPLAQIAGNRYASGPVGKALSDACMGTIASFLSKYQDIIIEHQKVVKGNQKRLESLRELAGKENLEYPSVTLPPQPHTKEGVDAYNEVIARVRMWVNLNLWQKLKLSRDDAKPLLRLKGFPSFPVVERRENEVDWWNTINEVKKLIDAKRDMGRVFWSGVTAEKRNTILEGYNYLPNENDHKKREGSLENPKKPAKRQFGDLLLYLEKKYAGDWGKVFDEAWERIDKKIAGLTSHIEREEARNAEDAQSKAVLTDWLRAKASFVLERLKEMDEKEFYACEIQLQKWYGDLRGNPFAVEAENRVVDISGFSIGSDGHSIQYRNLLAWKYLENGKREFYLLMNYGKKGRIRFTDGTDIKKSGKWQGLLYGGGKAKVIDLTFDPDDEQLIILPLAFGTRQGREFIWNDLLSLETGLIKLANGRVIEKTIYNKKIGRDEPALFVALTFERREVVDPSNIKPVNLIGVDRGENIPAVIALTDPEGCPLPEFKDSSGGPTDILRIGEGYKEKQRAIQAAKEVEQRRAGGYSRKFASKSRNLADDMVRNSARDLFYHAVTHDAVLVFENLSRGFGRQGKRTFMTERQYTKMEDWLTAKLAYEGLTSKTYLSKTLAQYTSKTCSNCGFTITTADYDGMLVRLKKTSDGWATTLNNKELKAEGQITYYNRYKRQTVEKELSAELDRLSEESGNNDISKWTKGRRDEALFLLKKRFSHRPVQEQFVCLDCGHEVHADEQAALNIARSWLFLNSNSTEFKSYKSGKQPFVGAWQAFYKRRLKEVWKPNA

SEQ ID NO: 2 - protein, 978 aa, Unknown
  Planctomycetes sp.
MQEIKRINKIRRRLVKDSNTKKAGKTGPMKTLLVRVMTPDLRERLENLRKKPENIPQPISNTSRANLNKLLTDYTEMKKAILHVYWEEFQKDPVGLMSRVAQPAPKNIDQRKLIPVKDGNERLTSSGFACSQCCQPLYVYKLEQVNDKGKPHTNYFGRCNVSEHERLILLSPHKPEANDELVTYSLGKFGQRALDFYSIHVTRESNHPVKPLEQIGGNSCASGPVGKALSDACMGAVASFLTKYQDIILEHQKVIKKNEKRLANLKDIASANGLAFPKITLPPQPHTKEGIEAYNNVVAQIVIWVNLNLWQKLKIGRDEAKPLQRLKGFPSFPLVERQANEVDWWDMVCNVKKLINEKKEDGKVFWQNLAGYKRQEALLPYLSSEEDRKKGKKFARYQFGDLLLHLEKKHGEDWGKVYDEAWERIDKKVEGLSKHIKLEEERRSEDAQSKAALTDWLRAKASFVIEGLKEADKDEFCRCELKLQKWYGDLRGKPFAIEAENSILDISGFSKQYNCAFIWQKDGVKKLNLYLIINYFKGGKLRFKKIKPEAFEANRFYTVINKKSGEIVPMEVNFNFDDPNLIILPLAFGKRQGREFIWNDLLSLETGSLKLANGRVIEKTLYNRRTRQDEPALFVALTFERREVLDSSNIKPMNLIGIDRGENIPAVIALTDPEGCPLSRFKDSLGNPTHILRIGESYKEKQRTIQAAKEVEQRRAGGYSRKYASKAKNLADDMVRNTARDLLYYAVTQDAMLIFENLSRGFGRQGKRTFMAERQYTRMEDWLTAKLAYEGLPSKTYLSKTLAQYTSKTCSNCGFTITSADYDRVLEKLKKTATGWMTTINGKELKVEGQITYYNRYKRQNVVKDLSVELDRLSEESVNNDISSWTKGRSGEALSLLKKRFSHRPVQEKFVCLNCGFETHADEQAALNIARSWLFLRSQEYKKYQTNKTTGNTDKRAFVETWQSFYRKKLKEVWKPAV

SEQ ID NO: 3 - protein, 855 aa, Unknown
  Candidatus Sungbacteria sp.
MDNANKPSTKSLVNTTRISDHFGVTPGQVTRVFSFGIIPTKRQYAIIERWFAAVEAARERLYGMLYAHFQENPPAYLKEKFSYETFFKGRPVLNGLRDIDPTIMTSAVFTALRHKAEGAMAAFHTNHRRLFEEARKKMREYAECLKANEALLRGAADIDWDKIVNALRTRLNTCLAPEYDAVIADFGALCAFRALIAETNALKGAYNHALNQMLPALVKVDEPEEAEESPRLRFFNGRINDLPKFPVAERETPPDTETIIRQLEDMARVIPDTAEILGYIHRIRHKAARRKPGSAVPLPQRVALYCAIRMERNPEEDPSTVAGHFLGEIDRVCEKRRQGLVRTPFDSQIRARYMDIISFRATLAHPDRWTEIQFLRSNAASRRVRAETISAPFEGFSWTSNRTNPAPQYGMALAKDANAPADAPELCICLSPSSAAFSVREKGGDLIYMRPTGGRRGKDNPGKEITWVPGSFDEYPASGVALKLRLYFGRSQARRMLTNKTWGLLSDNPRVFAANAELVGKKRNPQDRWKLFFHMVISGPPPVEYLDFSSDVRSRARTVIGINRGEVNPLAYAVVSVEDGQVLEEGLLGKKEYIDQLIETRRRISEYQSREQTPPRDLRQRVRHLQDTVLGSARAKIHSLIAFWKGILAIERLDDQFHGREQKIIPKKTYLANKTGFMNALSFSGAVRVDKKGNPWGGMIEIYPGGISRTCTQCGTVWLARRPKNPGHRDAMVVIPDIVDDAAATGFDNVDCDAGTVDYGELFTLSREWVRLTPRYSRVMRGTLGDLERAIRQGDDRKSRQMLELALEPQPQWGQFFCHRCGFNGQSDVLAATNLARRAISLIRRLPDTDTPPTP

SEQ ID NO: 4 - RNA, 108 nt, Artificial Sequence
  gRNA sequence
acaucuggcgcguuuauuccauuacuuuggagccagucccagcgacuaugucguauggacgaagcgcuuauuuaucggagagaaaccgauaaguaaaacgcaucaaag

SEQ ID NO: 5 - RNA, 108 nt, Artificial Sequence
  gRNA sequence
uacuggcgcuuuuaucucauuacuuugagagccaucaccagcgacuaugucguauggguaaagcgcuuauuuaucggagagaaauccgauaaauaagaagcaucaaag

SEQ ID NO: 6 - RNA, 81 nt, Artificial Sequence
  gRNA sequence
acaucuggcgcguuuauuccauuacuuuggagccagucccagcgacuaugucguauggacgaagcgcuuauuuaucggaga

SEQ ID NO: 7 - RNA, 78 nt, Artificial Sequence
  gRNA sequence
acaucuggcgcguuuauuccauuacuuuggagccagucccagcgacuaugucguauggacgaagcgcuuauuuaucgg

SEQ ID NO: 8 - RNA, 80 nt, Artificial Sequence
  gRNA sequence
uacuggcgcuuuuaucucauuacuuugagagccaucaccagcgacuaugucguauggguaaagcgcuuauuuaucggaga

SEQ ID NO: 9 - RNA, 77 nt, Artificial Sequence
  gRNA sequence
uacuggcgcuuuuaucucauuacuuugagagccaucaccagcgacuaugucguauggguaaagcgcuuauuuaucgg

SEQ ID NO: 10 - RNA, 25 nt, Artificial Sequence
  gRNA sequence
guuuacacacucccucucauagggu

SEQ ID NO: 11 - RNA, 25 nt, Artificial Sequence
  gRNA sequence
guuuacacacucccucucaugaggu

SEQ ID NO: 12 - RNA, 25 nt, Artificial Sequence
  gRNA sequence
uuuuacauacccccucucaugggau

SEQ ID NO: 13 - RNA, 25 nt, Artificial Sequence
  gRNA sequence
guuuacacacucccucucauggggg

SEQ ID NO: 14 - RNA, 20 nt, Artificial Sequence
  gRNA sequence
ccagcgacuaugucguaugg

SEQ ID NO: 15 - RNA, 39 nt, Artificial Sequence
  gRNA sequence
gcgcuuauuuaucggagagaaauccgauaaauaagaagc

SEQ ID NO: 16 - RNA, 74 nt, Artificial Sequence
  gRNA sequence
ggcgcuuuuaucucauuacuuugagagccaucaccagcgacuaugucguauggguaaagcgcuuauuuaucgga

SEQ ID NO: 17 - DNA, 20 bp, Artificial Sequence
  E6 spacer target
tgtggtcggggtagcggctg

SEQ ID NO: 18 - DNA, 20 bp, Artificial Sequence
  E7 spacer target
tcaagtccgccatgcccgaa

SEQ ID NO: 19 - RNA, 26 nt, Unknown
  Planctomycetes sp.
ucuccgauaaauaagaagcaucaaag

SEQ ID NO: 20 - RNA, 20 nt, Artificial Sequence
  gNA scaffold stem loop
ccagcgacuaugucguaugg

SEQ ID NO: 21 - RNA, 39 nt, Artificial Sequence; identical to SEQ ID NO: 15
  gNA extended scaffold stem loop

SEQ ID NO: 22 - RNA, 20 nt, Homo sapiens
uggagccugugauaaaagca

SEQ ID NO: 23 - RNA, 20 nt, Homo sapiens
ugcuuuuaucacaggcucca

SEQ ID NO: 24 - RNA, 23 nt, Unknown
  Deltaproteobacteria sp.
ccgauaaguaaaacgcaucaaag

SEQ ID NO: 25 - RNA, 21 nt, Artificial Sequence
  gNA scaffold stem loop
ccagcgacuaugucguagugg

SEQ ID NO: 26 - RNA, 31 nt, Artificial Sequence
  tracrRNA stem loop
  misc_feature (4)..(28): n is any ribonucleotide
  misc_feature (8)..(28): individual nucleotides may be absent
uuunnnnnnnnnnnnnnnnnnnnnnnnnuuu

SEQ ID NO: 27 - RNA, 19 nt, Artificial Sequence
  MS2 stem loop
acaugaggauuacccaugu

SEQ ID NO: 28 - RNA, 18 nt, Artificial Sequence
  Qbeta stem loop
ugcaugucuaagacagca

SEQ ID NO: 29 - RNA, 20 nt, Artificial Sequence
  H1 hairpin II stem loop
aauccauugcacuccggauu

SEQ ID NO: 30 - RNA, 12 nt, Artificial Sequence
  Uvsx stem loop
ccucuucggagg

SEQ ID NO: 31 - RNA, 21 nt, Artificial Sequence
  PP7 stem loop
aggaguuucuauggaaacccu

SEQ ID NO: 32 - RNA, 30 nt, Artificial Sequence
  phage replication loop
aggugggacgaccucucggucguccuaucu

SEQ ID NO: 33 - RNA, 19 nt, Artificial Sequence
  kissing loop a
ugcucgcuccguucgagca

SEQ ID NO: 34 - RNA, 21 nt, Artificial Sequence
  kissing loop b1
ugcucgacgcguccucgagca

SEQ ID NO: 35 - RNA, 22 nt, Artificial Sequence
  kissing loop b2
ugcucguuugcggcuacgagca

SEQ ID NO: 36 - protein, 978 aa, Artificial Sequence
  CasX Variant
MQEIKRINKIRRRLVKDSNTKKAGKTGPMKTLLVRVMTPDLRERLENLRKKPENIPQPISNTSRANLNKLLTDYTEMKKAILHVYWEEFQKDPVGLMSRVAQPASKKIDQNKLKPEMDEKGNLTTAGFACSQCGQPLFVYKLEQVSEKGKAYTNYFGRCNVAEHEKLILLAQLKPEKDSDEAVTYSLGKFGQRALDFYSIHVTRESNHPVKPLEQIGGNSCASGPVGKALSDACMGAVASFLTKYQDIILEHQKVIKKNEKRLANLKDIASANGLAFPKITLPPQPHTKEGIEAYNNVVAQIVIWVNLNLWQKLKIGRDEAKPLQRLKGFPSFPLVERQANEVDWWDMVCNVKKLINEKKEDGKVFWQNLAGYKRQEALRPYLSSEEDRKKGKKFARYQFGDLLLHLEKKHGEDWGKVYDEAWERIDKKVEGLSKHIKLEEERRSEDAQSKAALTDWLRAKASFVIEGLKEADKDEFCRCELKLQKWYGDLRGKPFAIEAENSILDISGFSKQYNCAFIWQKDGVKKLNLYLIINYFKGGKLRFKKIKPEAFEANRFYTVINKKSGEIVPMEVNFNFDDPNLIILPLAFGKRQGREFIWNDLLSLETGSLKLANGRVIEKTLYNRRTRQDEPALFVALTFERREVLDSSNIKPMNLIGIDRGENIPAVIALTDPEGCPLSRFKDSLGNPTHILRIGESYKEKQRTIQAKKEVEQRRAGGYSRKYASKAKNLADDMVRNTARDLLYYAVTQDAMLIFENLSRGFGRQGKRTFMAERQYTRMEDWLTAKLAYEGLSKTYLSKTLAQYTSKTCSNCGFTITSADYDRVLEKLKKTATGWMTTINGKELKVEGQITYYNRYKRQNVVKDLSVELDRLSEESVNNDISSWTKGRSGEALSLLKKRFSHRPVQEKFVCLNCGFETHADEQAALNIARSWLFLRSQEYKKYQTNKTTGNTDKRAFVETWQSFYRKKLKEVWKPAV

SEQ ID NO: 37 - protein, 977 aa, Artificial Sequence
  CasX Variant
MQEIKRINKIRRRLVKDSNTKKAGKTGPMKTLLVRVMTPDLRERLENLRKKPENIPQPISNTSRANLNKLLTDYTEMKKAILHVYWEEFQKDPVGLMSRVAQPAPKNIDQRKLIPVKDGNERLTSSGFACSQCCQPLYVYKLEQVNDKGKPHTNYFGRCNVSEHERLILLSPHKPEANDELVTYSLGKFGQRALDFYSIHVTRESNHPVKPLEQIGGNSCASGPVGKALSDACMGAVASFLTKYQDIILEHQKVIKKNEKRLANLKDIASANGLAFPKITLPPQPHTKEGIEAYNNVVAQIVIWVNLNLWQKLKIGRDEAKPLQRLKGFPSFPLVERQANEVDWWDMVCNVKKLINEKKEDGKVFWQNLAGYKRQEALRPYLSSEEDRKKGKKFARYQFGDLLLHLEKKHGEDWGKVYDEAWERIDKKVEGLSKHIKLEEERRSEDAQSKAALTDWLRAKASFVIEGLKEADKDEFCRCELKLQKWYGDLRGKPFAIEAENSILDISGFSKQYNCAFIWQKDGVKKLNLYLIINYFKGGKLRFKKIKPEAFEANRFYTVINKKSGEIVPMEVNFNFDDPNLIILPLAFGKRQGREFIWNDLLSLETGSLKLANGRVIEKTLYNRRTRQDEPALFVALTFERREVLDSSNIKPMNLIGIDRGENIPAVIALTDPEGCPLSRFKDSLGNPTHILRIGESYKEKQRTIQAKKEVEQRRAGGYSRKYASKAKNLADDMVRNTARDLLYYAVTQDAMLIFENLSRGFGRQGKRTFMAERQYTRMEDWLTAKLAYEGLSKTYLSKTLAQYTSKTCSNCGFTITTADYDGMLVRLKKTSDGWATTLNNKELKAEGQITYYNRYKRQTVEKELSAELDRLSEESGNNDISKWTKGRRDEALFLLKKRFSHRPVQEQFVCLDCGHEVHADEQAALNIARSWLFLRSQEYKKYQTNKTTGNTDKRAFVETWQSFYRKKLKEVWKPAV

SEQ ID NO: 38 - protein, 985 aa, Artificial Sequence
  CasX Variant
MEKRINKIRKKLSADNATKPVSRSGPMKTLLVRVMTDDLKKRLEKRRKKPEVMPQVISNNAANNLRMLLDDYTKMKEAILQVYWQEFKDDHVGLMCKFAQPAPKNIDQRKLIPVKDGNERLTSSGFACSQCCQPLYVYKLEQVNDKGKPHTNYFGRCNVSEHERLILLSPHKPEANDELVTYSLGKFGQRALDFYSIHVTKESTHPVKPLAQIAGNRYASGPVGKALSDACMGTIASFLSKYQDIIIEHQKVVKGNQKRLESLRELAGKENLEYPSVTLPPQPHTKEGVDAYNEVIARVRMWVNLNLWQKLKLSRDDAKPLLRLKGFPSFPVVERRENEVDWWNTINEVKKLIDAKRDMGRVFWSGVTAEKRNTILEGYNYLPNENDHKKREGSLENPKKPAKRQFGDLLLYLEKKYAGDWGKVFDEAWERIDKKIAGLTSHIEREEARNAEDAQSKAVLTDWLRAKASFVLERLKEMDEKEFYACEIQLQKWYGDLRGNPFAVEAENRVVDISGFSIGSDGHSIQYRNLLAWKYLENGKREFYLLMNYGKKGRIRFTDGTDIKKSGKWQGLLYGGGKAKVIDLTFDPDDEQLIILPLAFGTRQGREFIWNDLLSLETGLIKLANGRVIEKTIYNKKIGRDEPALFVALTFERREVVDPSNIKPVNLIGVDRGENIPAVIALTDPEGCPLPEFKDSSGGPTDILRIGEGYKEKQRAIQAAKEVEQRRAGGYSRKFASKSRNLADDMVRNSARDLFYHAVTHDAVLVFENLSRGFGRQGKRTFMTERQYTKMEDWLTAKLAYEGLTSKTYLSKTLAQYTSKTCSNCGFTITTADYDGMLVRLKKTSDGWATTLNNKELKAEGQITYYNRYKRQTVEKELSAELDRLSEESGNNDISKWTKGRRDEALFLLKKRFSHRPVQEQFVCLDCGHEVHADEQAALNIARSWLFLNSNSTEFKSYKSGKQPFVGAWQAFYKRRLKEVWKPNA

SEQ ID NO: 39 - protein, 986 aa, Artificial Sequence
  CasX Variant
MEKRINKIRKKLSADNATKPVSRSGPMKTLLVRVMTDDLKKRLEKRRKKPEVMPQVISNNAANNLRMLLDDYTKMKEAILQVYWQEFKDDHVGLMCKFAQPASKKIDQNKLKPEMDEKGNLTTAGFACSQCGQPLFVYKLEQVSEKGKAYTNYFGRCNVAEHEKLILLAQLKPEKDSDEAVTYSLGKFGQRALDFYSIHVTKESTHPVKPLAQIAGNRYASGPVGKALSDACMGTIASFLSKYQDIIIEHQKVVKGNQKRLESLRELAGKENLEYPSVTLPPQPHTKEGVDAYNEVIARVRMWVNLNLWQKLKLSRDDAKPLLRLKGFPSFPVVERRENEVDWWNTINEVKKLIDAKRDMGRVFWSGVTAEKRNTILEGYNYLPNENDHKKREGSLENPKKPAKRQFGDLLLYLEKKYAGDWGKVFDEAWERIDKKIAGLTSHIEREEARNAEDAQSKAVLTDWLRAKASFVLERLKEMDEKEFYACEIQLQKWYGDLRGNPFAVEAENRVVDISGFSIGSDGHSIQYRNLLAWKYLENGKREFYLLMNYGKKGRIRFTDGTDIKKSGKWQGLLYGGGKAKVIDLTFDPDDEQLIILPLAFGTRQGREFIWNDLLSLETGLIKLANGRVIEKTIYNKKIGRDEPALFVALTFERREVVDPSNIKPVNLIGVDRGENIPAVIALTDPEGCPLPEFKDSSGGPTDILRIGEGYKEKQRAIQAAKEVEQRRAGGYSRKFASKSRNLADDMVRNSARDLFYHAVTHDAVLVFENLSRGFGRQGKRTFMTERQYTKMEDWLTAKLAYEGLTSKTYLSKTLAQYTSKTCSNCGFTITSADYDRVLEKLKKTATGWMTTINGKELKVEGQITYYNRYKRQNVVKDLSVELDRLSEESVNNDISSWTKGRSGEALSLLKKRFSHRPVQEKFVCLNCGFETHADEQAALNIARSWLFLNSNSTEFKSYKSGKQPFVGAWQAFYKRRLKEVWKPNA

SEQ ID NO: 40 - protein, 921 aa, Artificial Sequence
  CasX Variant
MQEIKRINKIRRRLVKDSNTKKAGKTGPMKTLLVRVMTPDLRERLENLRKKPENIPQPISNTSRANLNKLLTDYTEMKKAILHVYWEEFQKDPVGLMSRVAQPAPKNIDQRKLIPVKDGNERLTSSGFACSQCCQPLYVYKLEQVNDKGKPHTNYFGRCNVSEHERLILLSPHKPEANDELVTYSLGKFGQRALDFYSIHVTRESNHPVKPLEQIGGNSCASGPVGKALSDACMGAVASFLTKYQDIILEHQKVIKKNEKRLANLKDIASANGLAFPKITLPPQPHTKEGIEAYNNVVAQIVIWVNLNLWQKLKIGRDEAKPLQRLKGFPSFPLVERQANEVDWWDMVCNVKKLINEKKEDGKVFWQNLAGYKRQEALRPYLSSEEDRKKGKKFARYQFGDLLLHLEKKHGEDWGKVYDEAWERIDKKVEGLSKHIKLEEERRSEDAQSKAALTDWLRAKASFVIEGLKEADKDEFCRCELKLQKWYGDLRGKPFAIEAENSILDISGFSKQYNCAFIWQKDGVKKLNLYLIINYFKGGKLRFKKIKPEAFEANRFYTVINKKSGEIVPMEVNFNFDDPNLIILPLAFGKRQGREFIWNDLLSLETGSLKLANGRVIEKTLYNRRTRQDEPALFVALTFERREVLDSSNIKPVNLIGVDRGENIPAVIALTDPEGCPLPEFKDSSGGPTDILRIGEGYKEKQRAIQAAKEVEQRRAGGYSRKFASKSRNLADDMVRNSARDLFYHAVTHDAVLVFENLSRGFGRQGKRTFMTERQYTKMEDWLTAKLAYEGLTSKTYLSKTLAQYTSKTCSNCGFTITSADYDRVLEKLKKTATGWMTTINGKELKVEGQITYYNRYKRQNVVKDLSVELDRLSEESVNNDISSWTKGRSGEALSLLKKRFSHRPVQEKFVCLNCGFETHA

SEQ ID NO: 41 - protein, 920 aa, Artificial Sequence
  CasX Variant
MQEIKRINKIRRRLVKDSNTKKAGKTGPMKTLLVRVMTPDLRERLENLRKKPENIPQPISNTSRANLNKLLTDYTEMKKAILHVYWEEFQKDPVGLMSRVAQPAPKNIDQRKLIPVKDGNERLTSSGFACSQCCQPLYVYKLEQVNDKGKPHTNYFGRCNVSEHERLILLSPHKPEANDELVTYSLGKFGQRALDFYSIHVTRESNHPVKPLEQIGGNSCASGPVGKALSDACMGAVASFLTKYQDIILEHQKVIKKNEKRLANLKDIASANGLAFPKITLPPQPHTKEGIEAYNNVVAQIVIWVNLNLWQKLKIGRDEAKPLQRLKGFPSFPLVERQANEVDWWDMVCNVKKLINEKKEDGKVFWQNLAGYKRQEALRPYLSSEEDRKKGKKFARYQFGDLLLHLEKKHGEDWGKVYDEAWERIDKKVEGLSKHIKLEEERRSEDAQSKAALTDWLRAKASFVIEGLKEADKDEFCRCELKLQKWYGDLRGKPFAIEAENSILDISGFSKQYNCAFIWQKDGVKKLNLYLIINYFKGGKLRFKKIKPEAFEANRFYTVINKKSGEIVPMEVNFNFDDPNLIILPLAFGKRQGREFIWNDLLSLETGSLKLANGRVIEKTLYNRRTRQDEPALFVALTFERREVLDSSNIKPMNLIGIDRGENIPAVIALTDPEGCPLSRFKDSLGNPTHILRIGESYKEKQRTIQAKKEVEQRRAGGYSRKYASKAKNLADDMVRNTARDLLYYAVTQDAMLIFENLSRGFGRQGKRTFMAERQYTRMEDWLTAKLAYEGLSKTYLSKTLAQYTSKTCSNCGFTITSADYDRVLEKLKKTATGWMTTINGKELKVEGQITYYNRYKRQNVVKDLSVELDRLSEESVNNDISSWTKGRSGEALSLLKKRFSHRPVQEKFVCLNCGFETHA

SEQ ID NO: 42 - protein, 977 aa, Artificial Sequence
  CasX Variant
MQEIKRINKIRRRLVKDSNTKKAGKTGPMKTLLVRVMTPDLRERLENLRKKPENIPQPISNNAANNLRMLLDDYTKMKEAILQVYWQEFKDDHVGLMCKFAQPAPKNIDQRKLIPVKDGNERLTSSGFACSQCCQPLYVYKLEQVNDKGKPHTNYFGRCNVSEHERLILLSPHKPEANDELVTYSLGKFGQRALDFYSIHVTKESTHPVKPLAQIAGNRYASGPVGKALSDACMGTIASFLSKYQDIIIEHQKVVKGNQKRLESLRELAGKENLEYPSVTLPPQPHTKEGVDAYNEVIARVRMWVNLNLWQKLKLSRDDAKPLLRLKGFPSFPLVERQANEVDWWDMVCNVKKLINEKKEDGKVFWQNLAGYKRQEALRPYLSSEEDRKKGKKFARYQFGDLLLHLEKKHGEDWGKVYDEAWERIDKKVEGLSKHIKLEEERRSEDAQSKAALTDWLRAKASFVIEGLKEADKDEFCRCELKLQKWYGDLRGKPFAIEAENSILDISGFSKQYNCAFIWQKDGVKKLNLYLIINYFKGGKLRFKKIKPEAFEANRFYTVINKKSGEIVPMEVNFNFDDPNLIILPLAFGKRQGREFIWNDLLSLETGSLKLANGRVIEKTLYNRRTRQDEPALFVALTFERREVLDSSNIKPMNLIGIDRGENIPAVIALTDPEGCPLSRFKDSLGNPTHILRIGESYKEKQRTIQAKKEVEQRRAGGYSRKYASKAKNLADDMVRNTARDLLYYAVTQDAMLIFENLSRGFGRQGKRTFMAERQYTRMEDWLTAKLAYEGLSKTYLSKTLAQYTSKTCSNCGFTITSADYDRVLEKLKKTATGWMTTINGKELKVEGQITYYNRYKRQNVVKDLSVELDRLSEESVNNDISSWTKGRSGEALSLLKKRFSHRPVQEKFVCLNCGFETHADEQAALNIARSWLFLRSQEYKKYQTNKTTGNTDKRAFVETWQSFYRKKLKEVWKPAV

SEQ ID NO: 43 - protein, 986 aa, Artificial Sequence
  CasX Variant
MQEIKRINKIRRRLVKDSNTKKAGKTGPMKTLLVRVMTPDLRERLENLRKKPENIPQPISNTSRANLNKLLTDYTEMKKAILHVYWEEFQKDPVGLMSRVAQPAPKNIDQRKLIPVKDGNERLTSSGFACSQCCQPLYVYKLEQVNDKGKPHTNYFGRCNVSEHERLILLSPHKPEANDELVTYSLGKFGQRALDFYSIHVTRESNHPVKPLEQIGGNSCASGPVGKALSDACMGAVASFLTKYQDIILEHQKVIKKNEKRLANLKDIASANGLAFPKITLPPQPHTKEGIEAYNNVVAQIVIWVNLNLWQKLKIGRDEAKPLQRLKGFPSFPVVERRENEVDWWNTINEVKKLIDAKRDMGRVFWSGVTAEKRNTILEGYNYLPNENDHKKREGSLENPKKPAKRQFGDLLLYLEKKYAGDWGKVFDEAWERIDKKIAGLTSHIEREEARNAEDAQSKAVLTDWLRAKASFVLERLKEMDEKEFYACEIQLQKWYGDLRGNPFAVEAENSILDISGFSKQYNCAFIWQKDGVKKLNLYLIINYFKGGKLRFKKIKPEAFEANRFYTVINKKSGEIVPMEVNFNFDDPNLIILPLAFGKRQGREFIWNDLLSLETGSLKLANGRVIEKTLYNRRTRQDEPALFVALTFERREVLDSSNIKPMNLIGIDRGENIPAVIALTDPEGCPLSRFKDSLGNPTHILRIGESYKEKQRTIQAKKEVEQRRAGGYSRKYASKAKNLADDMVRNTARDLLYYAVTQDAMLIFENLSRGFGRQGKRTFMAERQYTRMEDWLTAKLAYEGLSKTYLSKTLAQYTSKTCSNCGFTITSADYDRVLEKLKKTATGWMTTINGKELKVEGQITYYNRYKRQNVVKDLSVELDRLSEESVNNDISSWTKGRSGEALSLLKKRFSHRPVQEKFVCLNCGFETHADEQAALNIARSWLFLRSQEYKKYQTNKTTGNTDKRAFVETWQSFYRKKLKEVWKPAV

SEQ ID NO: 44 - protein, 925 aa, Artificial Sequence
  CasX Variant
MISNTSRANLNKLLTDYTEMKKAILHVYWEEFQKDPVGLMSRVAQPAPKNIDQRKLIPVKDGNERLTSSGFACSQCCQPLYVYKLEQVNDKGKPHTNYFGRCNVSEHERLILLSPHKPEANDELVTYSLGKFGQRALDFYSIHVTRESNHPVKPLEQIGGNSCASGPVGKALSDACMGAVASFLTKYQDIILEHQKVIKKNEKRLANLKDIASANGLAFPKITLPPQPHTKEGIEAYNNVVAQIVIWVNLNLWQKLKIGRDEAKPLQRLKGFPSFPLVERQANEVDWWDMVCNVKKLINEKKEDGKVFWQNLAGYKRQEALRPYLSSEEDRKKGKKFARYQFGDLLLHLEKKHGEDWGKVYDEAWERIDKKVEGLSKHIKLEEERRSEDAQSKAALTDWLRAKASFVIEGLKEADKDEFCRCELKLQKWYGDLRGKPFAIEAENRVVDISGFSIGSDGHSIQYRNLLAWKYLENGKREFYLLMNYGKKGRIRFTDGTDIKKSGKWQGLLYGGGKAKVIDLTFDPDDEQLIILPLAFGTRQGREFIWNDLLSLETGLIKLANGRVIEKTIYNKKIGRDEPALFVALTFERREVVDPSNIKPMNLIGIDRGENIPAVIALTDPEGCPLSRFKDSLGNPTHILRIGESYKEKQRTIQAKKEVEQRRAGGYSRKYASKAKNLADDMVRNTARDLLYYAVTQDAMLIFENLSRGFGRQGKRTFMAERQYTRMEDWLTAKLAYEGLSKTYLSKTLAQYTSKTCSNCGFTITSADYDRVLEKLKKTATGWMTTINGKELKVEGQITYYNRYKRQNVVKDLSVELDRLSEESVNNDISSWTKGRSGEALSLLKKRFSHRPVQEKFVCLNCGFETHADEQAALNIARSWLFLRSQEYKKYQTNKTTGNTDKRAFVETWQSFYRKKLKEVWKPAV

SEQ ID NO: 45 - protein, 975 aa, Artificial Sequence
  CasX Variant
MEKRINKIRKKLSADNATKPVSRSGPMKTLLVRVMTDDLKKRLEKRRKKPEVMPQVISNTSRANLNKLLTDYTEMKKAILHVYWEEFQKDPVGLMSRVAQPAPKNIDQRKLIPVKDGNERLTSSGFACSQCCQPLYVYKLEQVNDKGKPHTNYFGRCNVSEHERLILLSPHKPEANDELVTYSLGKFGQRALDFYSIHVTRESNHPVKPLEQIGGNSCASGPVGKALSDACMGAVASFLTKYQDIILEHQKVIKKNEKRLANLKDIASANGLAFPKITLPPQPHTKEGIEAYNNVVAQIVIWVNLNLWQKLKIGRDEAKPLQRLKGFPSFPLVERQANEVDWWDMVCNVKKLINEKKEDGKVFWQNLAGYKRQEALRPYLSSEEDRKKGKKFARYQFGDLLLHLEKKHGEDWGKVYDEAWERIDKKVEGLSKHIKLEEERRSEDAQSKAALTDWLRAKASFVIEGLKEADKDEFCRCELKLQKWYGDLRGKPFAIEAENSILDISGFSKQYNCAFIWQKDGVKKLNLYLIINYFKGGKLRFKKIKPEAFEANRFYTVINKKSGEIVPMEVNFNFDDPNLIILPLAFGKRQGREFIWNDLLSLETGSLKLANGRVIEKTLYNRRTRQDEPALFVALTFERREVLDSSNIKPMNLIGIDRGENIPAVIALTDPEGCPLSRFKDSLGNPTHILRIGESYKEKQRTIQAKKEVEQRRAGGYSRKYASKAKNLADDMVRNTARDLLYYAVTQDAMLIFENLSRGFGRQGKRTFMAERQYTRMEDWLTAKLAYEGLSKTYLSKTLAQYTSKTCSNCGFTITSADYDRVLEKLKKTATGWMTTINGKELKVEGQITYYNRYKRQNVVKDLSVELDRLSEESVNNDISSWTKGRSGEALSLLKKRFSHRPVQEKFVCLNCGFETHADEQAALNIARSWLFLRSQEYKKYQTNKTTGNTDKRAFVETWQSFYRKKLKEVWKPAV

SEQ ID NO: 46 - protein, 982 aa, Artificial Sequence
  CasX Variant
MQEIKRINKIRRRLVKDSNTKKAGKTGPMKTLLVRVMTPDLRERLENLRKKPENIPQPISNTSRANLNKLLTDYTEMKKAILHVYWEEFQKDPVGLMSRVAQPAPKNIDQRKLIPVKDGNERLTSSGFACSQCCQPLYVYKLEQVNDKGKPHTNYFGRCNVSEHERLILLSPHKPEANDELVTYSLGKFGQRALDFYSIHVTRESNHPVKPLEQIGGNSCASGPVGKALSDACMGAVASFLTKYQDIILEHQKVIKKNEKRLANLKDIASANGLAFPKITLPPQPHTKEGIEAYNNVVAQIVIWVNLNLWQKLKIGRDEAKPLQRLKGFPSFPLVERQANEVDWWDMVCNVKKLINEKKEDGKVFWQNLAGYKRQEALRPYLSSEEDRKKGKKFARYQFGDLLLHLEKKHGEDWGKVYDEAWERIDKKVEGLSKHIKLEEERRSEDAQSKAALTDWLRAKASFVIEGLKEADKDEFCRCELKLQKWYGDLRGKPFAIEAENRVVDISGFSIGSDGHSIQYRNLLAWKYLENGKREFYLLMNYGKKGRIRFTDGTDIKKSGKWQGLLYGGGKAKVIDLTFDPDDEQLIILPLAFGTRQGREFIWNDLLSLETGLIKLANGRVIEKTIYNKKIGRDEPALFVALTFERREVVDPSNIKPMNLIGIDRGENIPAVIALTDPEGCPLSRFKDSLGNPTHILRIGESYKEKQRTIQAKKEVEQRRAGGYSRKYASKAKNLADDMVRNTARDLLYYAVTQDAMLIFENLSRGFGRQGKRTFMAERQYTRMEDWLTAKLAYEGLSKTYLSKTLAQYTSKTCSNCGFTITSADYDRVLEKLKKTATGWMTTINGKELKVEGQITYYNRYKRQNVVKDLSVELDRLSEESVNNDISSWTKGRSGEALSLLKKRFSHRPVQEKFVCLNCGFETHADEQAALNIARSWLFLRSQEYKKYQTNKTTGNTDKRAFVETWQSFYRKKLKEVWKPAV

SEQ ID NO: 47 - protein, 977 aa, Artificial Sequence
  CasX Variant
MQEIKRINKIRRRLVKDSNTKKAGKTGPMKTLLVRVMTPDLRERLENLRKKPENIPQPISNTSRANLNKLLTDYTEMKKAILHVYWEEFQKDPVGLMSRVAQPAPKNIDQRKLIPVKDGNERLTSSGFACSQCCQPLYVYKLEQVNDKGKPHTNYFGRCNVSEHERLILLSPHKPEANDELVTYSLGKFGQRALDFYSIHVTRESNHPVKPLEQIGGNSCASGPVGKALSDACMGAVASFLTKYQDIILEHQKVIKKNEKRLANLKDIASANGLAFPKITLPPQPHTKEGIEAYNNVVAQIVIWVNLNLWQKLKIGRDEAKPLQRLKGFPSFPLVERQANEVDWWDMVCNVKKLINEKKEDGKVFWQNLAGYKRQEALRPYLSSEEDRKKGKKFARYQFGDLLLHLEKKHGEDWGKVYDEAWERIDKKVEGLSKHIKLEEERRSEDAQSKAALTDWLRAKASFVIEGLKEADKDEFKRCELKLQKWYGDLRGKPFAIEAENSILDISGFSKQYNCAFIWQKDGVKKLNLYLIINYFKGGKLRFKKIKPEAFEANRFYTVINKKSGEIVPMEVNFNFDDPNLIILPLAFGKRQGREFIWNDLLSLETGSLKLANGRVIEKPLYNRRTRQDEPALFVALTFERREVLDSSNIKPMNLIGIDRGENIPAVIALTDPEGCPLSRFKDSLGNPTHILRIGESYKEKQRTIQAKKEVEQRRAGGYSRKYASKAKNLADDMVRNTARDLLYYAVTQDAMLIFENLSRGFGRQGKRTFMAERQYTRMEDWLTAKLAYEGLSKTYLSKTLAQYTSKTCSNCGFTITSADYDRVLEKLKKTATGWMTTINGKELKVEGQITYYNRYKRQNVVKDLSVELDRLSEESVNNDISSWTKGRSGEALSLLKKRFSHRPVQEKFVCLNCGFETHADEQAALNIARSWLFLRSQEYKKYQTNKTTGNTDKRAFVETWQSFYRKKLKEVWKPAV

SEQ ID NO: 48 - protein, 977 aa, Artificial Sequence
  CasX Variant
MQEIKRINKIRRRLVKDSNTKKAGKTGPMKTLLVRVMTPDLRERLENLRKKPENIPQPISNTSRANLNKLLTDYTEMKKAILHVYWEEFQKDPVGLMSRVAQPAPKNIDQRKLIPVKDGNERLTSSGFACSQCCQPLYVYKLEQVNDKGKPHTNYFGRCNVSEHERLILLSPHKPEANDELVTYSLGKFGQRALDFYSIHVTRESNHPVKPLEQIGGNSCASGPVGKALSDACMGAVASFLTKYQDIILEHQKVIKKNEKRLANLKDIASANGLAFPKITLPPQPHTKEGIEAYNNVVAQIVIWVNLNLWQKLKIGRDEAKPLQRLKGFPSFPLVERQANEVDWWDMVCNVKKLINEKKEDGKVFWQNLAGYKRQEALLPYLSSEEDRKKGKKFARYQFGDLLLHLEKKHGEDWGKVYDEAWERIDKKVEGLSKHIKLEEERRSEDAQSKAALTDWLRAKASFVIEGLKEADKDEFCRCELKLQKWYGDLRGKPFAIEAENSILDISGFSKQYNCAFIWQKDGVKKLNLYLIINYFKGGKLRFKKIKPEAFEANRFYTVINKKSGEIVPMEVNFNFDDPNLIILPLAFGKRQGREFIWNDLLSLETGSLKLANGRVIEKTLYNRRTRQDEPALFVALTFERREVLDSSNIKPMNLIGIDRGENIPAVIALTDPEGCPLSRFKDSLGNPTHILRIGESYKEKQRTIQAAKEVEQRRAGGYSRKYASKAKNLADDMVRNTARDLLYYAVTQDAMLIFENLSRGFGRQGKRTFAAERQYTRMEDWLTAKLAYEGLPSKTYLSKTLAQYTSKTCSNCGFTITSADYDRVLEKLKKTATGWMTTINGKELKVEGQITYYNRYKRQNVVKDLSVELDRLSEESVNNDISSWTKGRSGEALSLLKKRFSHRPVQEKFVCLNCGFETHADEQAALNIARSWLFLRSQEYKKYQTNKTTGNTDKRAFVETWQSFYRKKLKEVWKPA

SEQ ID NO: 49 - protein, 977 aa, Artificial Sequence
  CasX Variant
MQEIKRINKIRRRLVKDSNTKKAGKTGPMKTLLVRVMTPDLRERLENLRKKPENIPQPISNTSRANLNKLLTDYTEMKKAILHVYWEEFQKDPVGLMSRVAQPAPKNIDQRKLIPVKDGNERLTSSGFACSQCCQPLYVYKLEQVNDKGKPHTNYFGRCNVSEHERLILLSPHKPEANDELVTYSLGKFGQRALDFYSIHVTRESNHPVKPLEQIGGNSCASGPVGKALSDACMGAVASFLTKYQDIILEHQKVIKKNEKRLANLKDIASANGLAFPKITLPPQPHTKEGIEAYNNVVAQIVIWVNLNLWQKLKIGRDEAKPLQRLKGFPSFPLVERQANEVDWWDMVCNVKKLINEKKEDGKVFWQNLAGYKRQEALRPYLSSEEDRKKGKKFARYQFGDLLLHLEKKHGEDWGKVYDEAWERIDKKVEGLSKHIKLEEERRSEDAQSKAALTDWLRAKASFVIEGLKEADKDEFCRCELKLQKWYGDLRGKPFAIEAENSILDISGFSKQYNCAFIWQKDGVKKLNLYLIINYFKGGKLRFKKIKPEAFEANRFYTVINKKSGEIVPMEVNFNFDDPNLIILPLAFGKRQGREFIWNDLLSLETGSLKLANGRVIEKTLYNRRTRQDEPALFVALTFERREVLDSSNIKPMNLIGIDRGENIPAVIALTDPEGCPLSRFKDSLGNPTHILRIGESYKEKQRTIQAKKEVEQRRAGGYSRKYASKAKNLANDMVRNTARDLLYYAVTQDAMLIFENLSRGFGRQGKRTFMAERQYTRMEDWLTAKLAYEGLSKTYLSKTLAQYTSKTCSNCGFTITSADYDRVLEKLKKTATGWMTTINGKELKVEGQITYYNRYKRQNVVKDLSVELDRLSEESVNNDISSWTKGRSGEALSLLKKRFSHRPVQEKFVCLNCGFETHADEQAALNIARSWLFLRSQEYKKYQTNKTTGNTDKRAFVETWQSFYRKKLKEVWKPAV

SEQ ID NO: 50 - protein, 978 aa, Artificial Sequence
  CasX Variant
MQEIKRINKIRRRLVKDSNTKKAGKTGPMKTLLVRVMTPDLRERLENLRKKPENIPQPISNTSRANLNKLLTDYTEMKKAILHVYWEEFQKDPVGLMSRVAQPAPKNIDQRKLIPVKDGNERLTSSGFACSQCCQPLYVYKLEQVNDKGKPHTNYFGRCNVSEHERLILLSPHKPEANDELVTYSLGKFGQRALDFYSIHVTRESNHPVKPLEQIGGNSCASGPVGKALSDACMGAVASFLTKYQDIILEHQKVIKKNEKRLANLKDIASANGLAFPKITLPPQPHTKEGIEAYNNVVAQIVIWVNLNLWQKLKIGRDEAKPLQRLKGFPSFPLVERQANEVDWWDMVCNVKKLINEKKEDGKVFWQNLAGYKRQEALLPYLSSEEDRKKGKKFARYQFGDLLLHLEKKHGEDWGKVYDEAWERIDKKVEGLSKHIKLEEERRSEDAQSKAALTDWLRAKASFVIEGLKEADKDEFCRCELKLQKWYGDLRGKPFAIEAENSILDISGFSKQYNCAFIWQKDGVKKLNLYLIINYFKGGKLRFKKIKPEAFEANRFYTVINKKSGEIVPMEVNFNFDDPNLIILPLAFGKRQGREFIWNDLLSLETGSLKLANGRVIEKTLYNRRTRQDEPALFVALTFERREVLDSSNIKPMNLIGIDRGENIPAVIALTDPEGCPLSRFKDSLGNPTHILRIGESYKEKQRTIQAAKEVEQRRAGGYSRKYASKAKNLADDMVRNTARDLLYYAVTQDAMLIFENLSRGFGRQGKRTFMAERQYTRMEDQLTAKLAYEGLPSKTYLSKTLAQYTSKTCSNCGFTITSADYDRVLEKLKKTATGWMTTINGKELKVEGQITYYNRYKRQNVVKDLSVELDRLSEESVNNDISSWTKGRSGEALSLLKKRFSHRPVQEKFVCLNCGFETHADEQAALNIARSWLFLRSQEYKKYQTNKTTGNTDKRAFVETWQSFYRKKLKEVWKPAV

SEQ ID NO: 51 - protein, 978 aa, Artificial Sequence
  CasX Variant
MQEIKRINKIRRRLVKDSNTKKAGKTGPMKTLLVRVMTPDLRERLENLRKKPENIPQPISNTSRANLNKLLTDYTEMKKAILHVYWEEFQKDPVGLMSRVAQPAPKNIDQRKLIPVKDGNERLTSSGFACSQCCQPLYVYKLEQVNDKGKPHTNYFGRCNVSEHERLILLSPHKPEANDELVTYSLGKFGQRALDFYSIHVTRESNHPVKPLEQIGGNSCASGPVGKALSDACMGAVASFLTKYQDIILEHQKVIKKNEKRLANLKDIASANGLAFPKITLPPQPHTKEGIEAYNNVVAQIVIWVNLNLWQKLKIGRDEAKPLQRLKGFPSFPLVERQANEVDWWDMVCNVKKLINEKKEDGKVFWQNLAGYKRQEALLPYLSSEEDRKKGKKFARYQFGDLLLHLEKKHGEDWGKVYDEAWERIDKKVEGLSKHIKLEEERRSEDAQSKAALTDWLRAKASFVIEGLKEADKDEFCRCELKLQKWYGDLRGKPFAIEAENSILDISGFSKQYNCAFIWQKDGVKKLNLYLIINYFKGGKLRFKKIKPEAFEANRFYTVINKKSGEIVPMEVNFNFDDPNLIILPLAFGKRQGREFIWNDLLSLETGSLKLANGRVIEKTLYNRRTRQDEPALFVALTFERREVLDSSNIKPMNLIGIDRGENIPAVIALTDPEGCPLSRFKDSLGNPTHILRIGESYKEKQRTIQAAKEVEQRRAGGYSRKYASKAKNLADDMVRNTARDLLYYAVTQDAMLIFENLSRGFGRQGKRTFQAERQYTRMEDWLTAKLAYEGLPSKTYLSKTLAQYTSKTCSNCGFTITSADYDRVLEKLKKTATGWMTTINGKELKVEGQITYYNRYKRQNVVKDLSVELDRLSEESVNNDISSWTKGRSGEALSLLKKRFSHRPVQEKFVCLNCGFETHADEQAALNIARSWLFLRSQEYKKYQTNKTTGNTDKRAFVETWQSFYRKKLKEVWKPAV

SEQ ID NO: 52 - protein, 978 aa, Artificial Sequence
  CasX Variant
MQEIKRINKIRRRLVKDSNTKKAGKTGPMKTLLVRVMTPDLRERLENLRKKPENIPQPISNTSRANLNKLLTDYTEMKKAILHVYWEEFQKDPVGLMSRVAQPAPKNIDQRKLIPVKDGNERLTSSGFACSQCCQPLYVYKLEQVNDKGKPHTNYFGRCNVSEHERLILLSPHKPEANDELVTYSLGKFGQRALDFYSIHVTRESNHPVKPLEQIGGNSCASGPVGKALSDACMGAVASFLTKYQDIILEHQKVIKKNEKRLANLKDIASANGLAFPKITLPPQPHTKEGIEAYNNVVAQIVIWVNLNLWQKLKIGRDEAKPLQRLKGFPSFPLVERQANEVDWWDMVCNVKKLINEKKEDGKVFWQNLAGYKRQEALLPYLSSEEDRKKGKKFARYQFGDLLLHLEKKHGEDWGKVYDEAWERIDKKVEGLSKHIKLEEERRSEDAQSKAALTDWLIAKASFVIEGLKEADKDEFCRCELKLQKWYGDLRGKPFAIEAENSILDISGFSKQYNCAFIWQKDGVKKLNLYLIINYFKGGKLRFKKIKPEAFEANRFYTVINKKSGEIVPMEVNFNFDDPNLIILPLAFGKRQGREFIWNDLLSLETGSLKLANGRVIEKTLYNRRTRQDEPALFVALTFERREVLDSSNIKPMNLIGIDRGENIPAVIALTDPEGCPLSRFKDSLGNPTHILRIGESYKEKQRTIQAAKEVEQRRAGGYSRKYASKAKNLADDMVRNTVRDLLYYAVTQDAMLIFENLSRGFGRQGKRTFMAERQYTRMEDWLTAKLAYEGLPSKTYLSKTLAQYTSKTCSNCGFTITSADYDRVLEKLKKTATGWMTTINGKELKVEGQITYYNRYKRQNVVKDLSVELDRLSEESVNNDISSWTKGRSGEALSLLKKRFSHRPVQEKFVCLNCGFETHADEQAALNIARSWLFLRSQEYKKYQTNKTTGNTDKRAFVETWQSFYRKKLKEVWKPAV

SEQ ID NO: 53 - protein, 977 aa, Artificial Sequence
  CasX Variant
MQEIKRINKIRRRLVKDSNTKKAGKTGPMKTLLVRVMTPDLRERLENLRKKPENIPQPISNTSRANLNKLLTDYTEMKKAILHVYWEEFQKDPVGLMSRVAQPAPKNIDQRKLIPVKDGNERLTSSGFACSQCCQPLYVYKLEQVNDKGKPHTNYFGRCNVSEHERLILLSPHKPEANDELVTYSLGKFGQRALDFYSIHVTRESNHPVKPLEQIGGNSCASGPVGKALSDACMGAVASFLTKYQDIILEHQKVIKKNEKRLANLKDIASANGLAFPKITLPPQPHTKEGIEAYNNVVAQIVIWVNLNLWQKLKIGRDEAKPLQRLKGFPSFPLVERQANEVDWWDMVCNVKKLINEKKEDGKVFWQNLAGYKRQEALRPYLSSEEDRKKGKKFARYQFGDLLLHLEKKHGEDWGKVYDEAWERIDKKVEGLSKHIKLEEERRSEDAQSKAALTDWLRAKASFVIEGLKEADKDEFCRCELKLQKWYGDLRGKPFAIEAENSILDISGFSKQYNCAFIWQKDGVKKLNLYLIINYFKGGKLRFKKIKPEAFEANRFYTVINKKSGEIVPMEVNFNFDDPNLIILPLAFGKRQGREFIWNDLLSLETGSLKLANGRVIEKTLYNRRTRQDEPALFVALTFERREVLDSSNIKPMNLIGIDRGENIPAVIALTDPEGCPLSRFKDSLGNPTHILRIGESYKEKQRTIQAKKEVEQRRAGGYSRKYASKAKNLADDMVRNTARDLLYYAVTQDAMLIFENLSRGFGRQGKRTFNAERQYTRMEDWLTAKLAYEGLSKTYLSKTLAQYTSKTCSNCGFTITSADYDRVLEKLKKTATGWMTTINGKELKVEGQITYYNRYKRQNVVKDLSVELDRLSEESVNNDISSWTKGRSGEALSLLKKRFSHRPVQEKFVCLNCGFETHADEQAALNIARSWLFLRSQEYKKYQTNKTTGNTDKRAFVETWQSFYRKKLKEVWKPAV

SEQ ID NO: 54 - protein, 977 aa, Artificial Sequence
  CasX Variant
MQEIKRINKIRRRLVKDSNTKKAGKTGPMKTLLVRVMTPDLRERLENLRKKPENIPQPISNTSRANLNKLLTDYTEMKKAILHVYWEEFQKDPVGLMSRVAQPAPKNIDQRKLIPVKDGNERLTSSGFACSQCCQPLYVYKLEQVNDKGKPHTNYFGRCNVSEHERLILLSPHKPEANDELVTYSLGKFGQRALDFYSIHVTRESNHPVKPLEQIGGNSCASGPVGKALSDACMGAVASFLTKYQDIILEHQKVIKKNEKRLANLKDIASANGLAFPKITLPPQPHTKEGIEAYNNVVAQIVIWVNLNLWQKLKIGRDEAKPLQRLKGFPSFPLVERQANEVDWWDMVCNVKKLINEKKEDGKVFWQNLAGYKRQEALRPYLSSEEDRKKGKKFARYQFGDLLLHLEKKHGEDWGKVYDEAWERIDKKVEGLSKHIKLEEERRSEDAQSKAALTDWLRAKASFVIEGLKEADKDEFCRCELKLQKWYGDLRGKPFAIEAENSILDISGFSKQYNCAFIWQKDGVKKLNLYLIINYFKGGKLRFKKIKPEAFEANRFYTVINKKSGEIVPMEVNFNFDDPNLIILPLAFGKRQGREFIWNDLLSLETGSLKLANGRVIEKTLYNRRTRQDEPALFVALTFERREVLDSSNIKPMNLIGIDRGENIPAVIALTDPEGCPLSRFKDSLGNPTHILRIGESYKEKQRTIQAKKEVEQRRAGGYSRKYASKAKNLADDMVRNTTRDLLYYAVTQDAMLIFENLSRGFGRQGKRTFMAERQYTRMEDWLTAKLAYEGLSKTYLSKTLAQYTSKTCSNCGFTITSADYDRVLEKLKKTATGWMTTINGKELKVEGQITYYNRYKRQNVVKDLSVELDRLSEESVNNDISSWTKGRSGEALSLLKKRFSHRPVQEKFVCLNCGFETHADEQAALNIARSWLFLRSQEYKKYQTNKTTGNTDKRAFVETWQSFYRKKLKEVWKPAV

SEQ ID NO: 55 - protein, 977 aa, Artificial Sequence
  CasX Variant
MQEIKRINKIRRRLVKDSNTKKAGKTGPMKTLLVRVMTPDLRERLENLRKKPENIPQPISNTSRANLNKLLTDYTEMKKAILHVYWEEFQKDPVGLMSRVAQPAPKNIDQRKLIPVKDGNERLTSSGFACSQCCQPLYVYKLEQVNDKGKPHTNYFGRCNVSEHERLILLSPHKPEANDELVTYSLGKFGQRALDFYSIHVTRESNHPVKPLEQIGGNSCASGPVGKALSDACMGAVASFLTKYQDIILEHQKVIKKNEKRLANLKDIASANGLAFPKITLPPQPHTKEGIEAYNNVVAQIVIWVNLNLWQKLKIGRDEAKPLQRLKGFPSFPLVERQANEVDWWDMVCNVKKLINEKKEDGKVFWQNLAGYKRQEALRPYLSSEEDRKKGKKFARYQFGDLLLHLEKKHGEDWGKVYDEAWERIDKKVEGLSKHIKLEEERRSEDAQSKAALTDWLRAKASFVIEGLKEADKDEFKRCELKLQKWYGSLRGKPFAIEAENSILDISGFSKQYNCAFIWQKDGVKKLNLYLIINYFKGGKLRFKKIKPEAFEANRFYTVINKKSGEIVPMEVNFNFDDPNLIILPLAFGKRQGREFIWNDLLSLETGSLKLANGRVIEKTLYNRRTRQDEPALFVALTFERREVLDSSNIKPMNLIGIDRGENIPAVIALTDPEGCPLSRFKDSLGNPTHILRIGESYKEKQRTIQAKKEVEQRRAGGYSRKYASKAKNLADDMVRNTARDLLYYAVTQDAMLIFENLSRGFGRQGKRTFMAERQYTRMEDWLTAKLAYEGLSKTYLSKTLAQYTSKTCSNCGFTITSADYDRVLEKLKKTATGWMTTINGKELKVEGQITYYNRYKRQNVVKDLSVELDRLSEESVNNDISSWTKGRSGEALSLLKKRFSHRPVQEKFVCLNCGFETHADEQAALNIARSWLFLRSQEYKKYQTNKTTGNTDKRAFVETWQSFYRKKLKEVWKPAV

SEQ ID NO: 56 - protein, 977 aa, Artificial Sequence
  CasX Variant
MQEIKRINKIRRRLVKDSNTKKAGKTGPMKTLLVRVMTPDLRERLENLRKKPENIPQPISNTSRANLNKLLTDYTEMKKAILHVYWEEFQKDPVGLMSRVAQPAPKNIDQRKLIPVKDGNERLTSSGFACSQCCQPLYVYKLEQVNDKGKPHTNYFGRCNVSEHERLILLSPHKPEANDELVTYSLGKFGQRALDFYSIHVTRESNHPVKPLEQIGGNSCASGPVGKALSDACMGAVASFLTKYQDIILEHQKVIKKNEKRLANLKDIASANGLAFPKITLPPQPHTKEGIEAYNNVVAQIVIWVNLNLWQKLKIGRDEAKPLQRLKGFPSFPLVERQANEVDWWDMVCNVKKLINEKKEDGKVFWQNLAGYKRQEALRPYLSSEEDRKKGKKFARYQFGDLLLHLEKKHGEDWGKVYDEAWERIDKKVEGLSKHIKLEEERRSEDAQSKAALTDWLRAKASFVIEGLKEADKDEFKRCELKLQKWYGDLRGKPFAIEAENSILDISGFSKQYNCAFIWQKDGVKKLNLYLIINYFKGGKLRFKKIKPEAFEANRFYTVINKKSGEIVPMEVNFNFDDPNLIILPLAFGKRQGREFIWNDLLSLETGSLKLANGRVIEKTLYNRRTRQDEPALFVALTFERREVLDSSNIKPMNLIGIDRGENIPAVIALTDPEGCPLSRFKDSLGNPTHILRIGESYKEKQRTIQAKKEVEQRRAGGYSRKYASKAKNLANDMVRNTARDLLYYAVTQDAMLIFENLSRGFGRQGKRTFMAERQYTRMEDWLTAKLAYEGLSKTYLSKTLAQYTSKTCSNCGFTITSADYDRVLEKLKKTATGWMTTINGKELKVEGQITYYNRYKRQNVVKDLSVELDRLSEESVNNDISSWTKGRSGEALSLLKKRFSHRPVQEKFVCLNCGFETHADEQAALNIARSWLFLRSQEYKKYQTNKTTGNTDKRAFVETWQSFYRKKLKEVWKPAV

SEQ ID NO: 57 - protein, 978 aa, Artificial Sequence
  CasX Variant
MQEIKRINKIRRRLVKDSNTKKAGKTGPMKTLLVRVMTPDLRERLENLRKKPENIPQPISNTSRANLNKLLTDYTEMKKAILHVYWEEFQKDPVGLMSRVAQPAPKNIDQRKLIPVKDGNERLTSSGFACSQCCQPLYVYKLEQVNDKGKPHTNYFGRCNVSEHERLILLSPHKPEANDELVTYSLGKFGQRALDFYSIHVTRESNHPVKPLEQIGGNSCASGPVGKALSDACMGAVASFLTKYQDIILEHQKVIKKNEKRLANLKDIASANGLAFPKITLPPQPHTKEGIEAYNNVVAQIVIWVNLNLWQKLKIGRDEAKPLQRLKGFPSFPLVERQANEVDWWDMVCNVKKLINEKKEDGKVFWQNLAGYKRQEALLPYLSSEEDRKKGKKFARYQFGDLLLHLEKKHGEDWGKVYDEAWERIDKKVEGLSKHIKLEEERRSEDAQSKAALTDWLRAKASFVIEGLKEADKDEFCRCELKLQKWYGDLRGKPFAIEAENSILDISGFSKQYNCAFIWQKDGVKKLNLYLIINYFKGGKLRFKKIKPEAFEANRFYTVINKKSGEIVPMEVNFNFDDPNLIILPLAFGKRQGREFIWNDLLSLETGSLKLANGRVIEKTLYNRRTRQDEPALFVALTFERREVLDSSNIKPMNLIGIDRGENIPAVIALTDPEGCPLSRFKDSLGNPTHILRIGESYKEKQRTIQAAKEKEQRRAGGYSRKYASKAKNLADDMVRNTARDLLYYAVTQDAMLIFENLSRGFGRQGKRTFMAERQYTRMEDWLTAKLAYEGLPSKTYLSKTLAQYTSKTCSNCGFTITSADYDRVLEKLKKTATGWMTTINGKELKVEGQITYYNRYKRQNVVKDLSVELDRLSEESVNNDISSWTKGRSGEALSLLKKRFSHRPVQEKFVCLNCGFETHADEQAALNIARSWLFLRSQEYKKYQTNKTTGNTDKRAFVETWQSFYRKKLKEVWKPAV

SEQ ID NO: 58 - protein, 977 aa, Artificial Sequence
  CasX Variant
MQEIKRINKIRRRLVKDSNTKKAGKTGPMKTLLVRVMTPDLRERLENLRKKPENIPQPISNTSRANLNKLLTDYTEMKKAILHVYWEEFQKDPVGLMSRVAQPAPKNIDQRKLIPVKDGNERLTSSGFACSQCCQPLYVYKLEQVNDKGKPHTNYFGRCNVSEHERLILLSPHKPEANDELVTYSLGKFGQRALDFYSIHVTRESNHPVKPLEQIGGNSCASGPVGKALSDACMGAVASFLTKYQDIILEHQKVIKKNEKRLANLKDIASANGLAFPKITLPPQPHTKEGIEAYNNVVAQIVIWVNLNLWQKLKIGRDEAKPLQRLKGFPSFPLVERQANEVDWWDMVCNVKKLINEKKEDGKVFWQNLAGYKRQEALRPYLSSEEDRKKGKKFARYQFGDLLLHLEKKHGEDWGKVYDEAWERIDKKVEGLSKHIKLEEERRSEDAQSKAALTDWLRAKASFVIEGLKEADKDEFKRCELKLQKWYGDLRGKPFAIEAENSILDISGFSKQYNCAFIWQKDGVKKLNLYLIINYFKGGKLRFKKIKPEAFEANRFYTVINKKSGEIVPMEVNFNFDDPNLIILPLAFGKRQGREFIWNDLLSLETGSLKLANGRVIEKTLYNRRTRQDEPALFVALTFERREVLDSSNIKPMNLIGIDRGENIPAVIALTDPEGCPLSRFKDSLGNPTHILRIGESYKEKQRTIQAKKEVEQRRAGGYSRKYASKAKNLADDMVRNTARDLLYYAVTQDAMLIFENLSRGFGRQGKRTFMAERQYTRMEDWLTAKLAYEGLSKTLLSKTLAQYTSKTCSNCGFTITSADYDRVLEKLKKTATGWMTTINGKELKVEGQITYYNRYKRQNVVKDLSVELDRLSEESVNNDISSWTKGRSGEALSLLKKRFSHRPVQEKFVCLNCGFETHADEQAALNIARSWLFLRSQEYKKYQTNKTTGNTDKRAFVETWQSFYRKKLKEVWKPAV

SEQ ID NO: 59 - protein, 977 aa, Artificial Sequence
  CasX Variant
MQEIKRINKIRRRLVKDSNTKKAGKTGPMKTLLVRVMTPDLRERLENLRKKPENIPQPISNTSRANLNKLLTDYTEMKKAILHVYWEEFQKDPVGLMSRVAQPAPKNIDQRKLIPVKDGNERLTSSGFACSQCCQPLYVYKLEQVNDKGKPHTNYFGRCNVSEHERLILLSPHKPEANDELVTYSLGKFGQRALDFYSIHVTRESNHPVKPLEQIGGNSCASGPVGKALSDACMGAVASFLTKYQDIILEHQKVIKKNEKRLANLKDIASANGLAFPKITLPPQPHTKEGIEAYNNVVAQIVIWVNLNLWQKLKIGRDEAKPLQRLKGFPSFPLVERQANEVDWWDMVCNVKKLINEKKEDGKVFWQNLAGYKRQEALRPYLSSEEDRKKGKKFARYQFGDLLLHLEKKHGEDWGKVYDEAWERIDKKVEGLSKHIKLEEERRSEDAQSKAALTDWLRAKASFVIEGLKEADKDEFCRCELKLQKWYGDLRGKPFAIEAENSILDISGFSKQYNCAFIWQKDGVKKLNLYLIINYFKGGKLRFKKIKPEAFEANRFYTVINKKSGEIVPMEVNFNFDDPNLIILPLAFGKRQGREFIWNDLLSLETGSLKLANGRVIEKTLYNRRTRQDEPALFVALTFERREVLDSSNIKPMNLIGIDRGENIPAVIALTDPEGCPLSRFKDSLGNPTHILRIGESYKEKQRTIQAKKEVEQRRAGGYSRKYASKAKNLADDMVRNTARDLLYYAVTQDAMLIFENLSRGFGRQGKRTFMAERQYTRMEDWLTAKLAYEGLSKTYLSKTLAQYTSKTCSNCGFTITSADYDRVLEKLKKTATGWMTTINGKELKVEGQITYYNRYKRQNVVKDLSVELDRLSEESVNNDISSWTKGRSGEALSLLKKRFSHRPVQEKFVCLNCGFETHADEQAALNIARSWLFLRSQEYKKYQTNKTTGNTDKRAFVETWQSFYRKKLKEVWKPAV

SEQ ID NO: 60 - protein, 977 aa, Artificial Sequence
  CasX Variant
MQEIKRINKIRRRLVKDSNTKKAGKTGPMKTLLVRVMTPDLRERLENLRKKPENIPQPISNTSRANLNKLLTDYTEMKKAILHVYWEEFQKDPVGLMSRVAQPAPKNIDQRKLIPVKDGNERLTSSGFACSQCCQPLYVYKLEQVNDKGKPHTNYFGRCNVSEHERLILLSPHKPEANDELVTYSLGKFGQRALDFYSIHVTRESNHPVKPLEQIGGNSCASGPVGKALSDACMGAVASFLTKYQDIILEHQKVIKKNEKRLANLKDIASANGLAFPKITLPPQPHTKEGIEAYNNVVAQIVIWVNLNLWQKLKIGRDEAKPLQRLKGFPSFPLVERQANEVDWWDMVCNVKKLINEKKEDGKVFWQNLAGYKRQEALRPYLSSEEDRKKGKKFARYQFGDLLLHLEKKHGEDWGKVYDEAWERIDKKVEGLSKHIKLEEERRSEDAQSKAALTDWLRAKASFVIEGLKEADKDEFKRCELKLQKWYGDLRGKPFAIEAENSILDISGFSKQYNCAFIWQKDGVKKLNLYLIINYFKGGKLRFKKIKPEAFEANRFYTVINKKSGEIVPMEVNFNFDDPNLIILPLAFGKRQGREFIWNDLLSLETGSLKLANGRVIEKTLYNRRTRQDEPALFVALTFERREVLDSSNIKPMNLIGIDRGENIPAVIALTDPEGCPLSRFKDSLGNPTHILRIGESYKEKQRTIQAKKEVEQRRAGGYSRKYASKAKNLADDMVRNTARDLLYYAVTQDAMLIFENLSRGFGRQGKRTFNAERQYTRMEDWLTAKLAYEGLSKTYLSKTLAQYTSKTCSNCGFTITSADYDRVLEKLKKTATGWMTTINGKELKVEGQITYYNRYKRQNVVKDLSVELDRLSEESVNNDISSWTKGRSGEALSLLKKRFSHRPVQEKFVCLNCGFETHADEQAALNIARSWLFLRSQEYKKYQTNKTTGNTDKRAFVETWQSFYRKKLKEVWKPAV

SEQ ID NO: 61 - protein, 977 aa, Artificial Sequence
  CasX Variant
MQEIKRINKIRRRLVKDSNTKKAGKTGPMKTLLVRVMTPDLRERLENLRKKPENIPQPISNTSRANLNKLLTDYTEMKKAILHVYWEEFQKDPVGLMSRVAQPAPKNIDQRKLIPVKDGNERLTSSGFACSQCCQPLYVYKLEQVNDKGKPHTNYFGRCNVSEHERLILLSPHKPEANDELVTYSLGKFGQRALDFYSIHVTRESNHPVKPLEQIGGNSCASGPVGKALSDACMGAVASFLTKYQDIILEHQKVIKKNEKRLANLKDIASANGLAFPKITLPPQPHTKEGIEAYNNVVAQIVIWVNLNLWQKLKIGRDEAKPLQRLKGFPSFPLVERQANEVDWWDMVCNVKKLINEKKEDGKVFWQNLAGYKRQEALLPYLSSESDRKKGKKFARYQFGDLLLHLEKKHGEDWGKVYDEAWERIDKKVEGLSKHIKLEEERRSEDAQSKAALTDWLRAKASFVIEGLKEADKDEFCRCELKLQKWYGDLRGKPFAIEAENSILDISGFSKQYNCAFIWQKDGVKKLNLYLIINYFKGGKLRFKKIKPEAFEANRFYTVINKKSGEIVPMEVNFNFDDPNLIILPLAFGKRQGREFIWNDLLSLETGSLKLANGRVIEKTLYNRRTRQDEPALFVALTFERREVLDSSNIKPMNLIGIDRGENIPAVIALTDPEGCPLSRFKDSLGNPTHILRIGESYKEKQRTIQAKKEVEQRRAGGYSRKYASKAKNLADDMVRNTARDLLYYAVTQDAMLIFENLSRGFGRQGKRTFMAERQYTRMEDWLTAKLAYEGLSKTYLSKTLAQYTSKTCSNCGFTITSADYDRVLEKLKKTATGWMTTINGKELKVEGQITYYNRYKRQNVVKDLSVELDRLSEESVNNDISSWTKGRSGEALSLLKKRFSHRPVQEKFVCLNCGFETHADEQAALNIARSWLFLRSQEYKKYQTNKTTGNTDKRAFVETWQSFYRKKLKEVWKPAV

SEQ ID NO: 62 - protein, 977 aa, Artificial Sequence
  CasX Variant
MQEIKRINKIRRRLVKDSNTKKAGKTGPMKTLLVRVMTPDLRERLENLRKKPENIPQPISNTSRANLNKLLTDYTEMKKAILHVYWEEFQKDPVGLMSRVAQPAPKNIDQRKLIPVKDGNERLTSSGFACSQCCQPLYVYKLEQVNDKGKPHTNYFGRCNVSEHERLILLSPHKPEANDELVTYSLGKFGQRALDFYSIHVTRESNHPVKPLEQIGGNSCASGPVGKALSDACMGAVASFLTKYQDIILEHQKVIKKNEKRLANLKDIASANGLAFPKITLPPQPHTKEGIEAYNNVVAQIVIWVNLNLWQKLKIGRDEAKPLQRLKGFPSFPLVERQANEVDWWDMVCNVKKLINEKKEDGKVFWQNLAGYKRQEALRPYLSSEEDRKKGKKFARYQFGDLLLHLEKKHGEDWGKVYDEAWERIDKKVEGLSKHIKLEEERRSEDAQSKAALTDWLRAKASFVIEGLKEADKDEFKRCELKLQKWYGDLRGKPFAIEAENSILDISGFSKQYNCAFIWQKDGVKKLNLYLIINYFKGGKLRFKKIKPEAFEANRFYTVINKKSGEIVPMEVNFNFDDPNLIILPLAFGKRQGREFIWNDLLSLETGSLKLANGRVIEKTLYNRRTRQDEPALFVALTFERREVLDSSNIKPMNLIGIDRGENIPAVIALTDPEGCPLSRFKDSLGNPTHILRIGESYKEKQRTIQAKKEVEQRRAGGYSRKYASKAKNLADDMVRNTARDLLYYAVTQDAMLIFENLSRGFGRQGKRTFMAERQYTRMEDWLTAKLAYEGLSKTYLSKTLAQYTSKTCSNCGFTITSADYDRVLEKLKKTATGWMTTINGKELKVEGQITYYNRYKRQNVVKDLSVELDRLSEESVNNDISSWTKGRSGEALSLLKKRFSHRPVQEKFVCLNCGFETHADEQAALNIARSWLFLRSQEYKKYQTNKTTGNTDKRAFVETWQSFYRKKLKEVWKPAV

SEQ ID NO: 63 - protein, 978 aa, Artificial Sequence
  CasX Variant
MQEIKRINKIRRRLVKDSNTKKAGKTGPMKTLLVRVMTPDLRERLENLRKKPENIPQPISNTSRANLNKLLTDYTEMKKAILHVYWEEFQKDPVGLMSRVAQPAPKNIDQRKLIPVKDGNERLTSSGFACSQCCQPLYVYKLEQVNDKGKPHTNYFGRCNVSEHERLILLSPHKPEANDELVTYSLGKFGQRALDFYSIHVTRESNHPVKPLEQIGGNSCASGPVGKALSDACMGAVASFLTKYQDIILEHQKVIKKNEKRLANLKDIASANGLAFPKITLPPQPHTKEGIEAYNNVVAQIVIWVNLNLWQKLKIGRDEAKPLQRLKGFPSFPLVERQANEVDWWDMVCNVKKLINEKKEDGKVFWQNLAGYKRQEALLPYLSSEEDRKKGKKFARYQFGDLLLHLEKKHGEDWGKVYDEAWERIDKKVEGLSKHIKLEEERRSEDAQSKAALTDWLRAKASFVIEGLKEADKDEFCRCELKLQKWYGDLRGKPFAIEAENSILDISGFSKQYNCAFIWQKDGVKKLNLYLIINYFKGGKLRFKKIKPEAFEANRFYTVINKKSGEIVPMEVNFNFDDPNLIILPLAFGKRQGREFIWNDLLSLETGSLKLANGRVIEKTLYNRRTRQDEPALFVALTFERREVLDSSNIKPMNLIGIDRGENIPAVIALTDPEGCPLSRFKDSLGNPTHILRIGESYKEKQRTIQAAKEVEQRRAGGYSRKYASKAKNLADDMVRNTARDLLYYAVTQDAMLIFENLSRGFGRQGKRTFMAERQYTRMEDWLTAKLAYEGDPSKTYLSKTLAQYTSKTCSNCGFTITSADYDRVLEKLKKTATGWMTTINGKELKVEGQITYYNRYKRQNVVKDLSVELDRLSEESVNNDISSWTKGRSGEALSLLKKRFSHRPVQEKFVCLNCGFETHADEQAALNIARSWLFLRSQEYKKYQTNKTTGNTDKRAFVETWQSFYRKKLKEVWKPAV

SEQ ID NO: 64 - protein, 978 aa, Artificial Sequence
  CasX Variant
MQEIKRINKIRRRLVKDSNTKKAGKTGPMKTLLVRVMTPDLRERLENLRKKPENIPQPISNTSRANLNKLLTDYTEMKKAILHVYWEEFQKDPVGLMSRVAQPAPKNIDQRKLIPVKDGNERLTSSGFACSQCCQPLYVYKLEQVNDKGKPHTNYFGRCNVSEHERLILLSPHKPEANDELVTYSLGKFGQRALDFYSIHVTRESNHPVKPLEQIGGNSCASGPVGKALSDACMGAVASFLTKYQDIILEHQKVIKKNEKRLANLKDIASANGLAFPKITLPPQPHTKEGIEAYNNVVAQIVIWVNLNLWQKLKIGRDEAKPLQRLKGFPSFPLVERQANEVDWWDMVCNVKKLINEKKEDGKVFWQNLAGYKRQEALLPYLSSEEDRKKGKKFARYQFGDLLLHLEKKHGEDWGKVYDEAWERIDKKVEGLSKHIKLEEERRSEDAQSKAALTDWLRAKASFVIEGLKEADKDEFCRCELKLQKWYGDLRGKPFAIEAENSILDISGFSKQYNCAFIWQKDGVKKLNLYLIINYFKGGKLRFKKIKPEAFEANRFYTVINKKSGEIVPMEVNFNFDDPNLIILPLAFGKRQGREFIWNDLLSLETGSLKLANGRVIEKTLYNRRTRQDEPALFVALTFERREVLDSSNIKPMNLIGIDRGENIPAVIALTDPEGCPLSRFKDSLGNPTHILRIGESYKEKQRTIQAAKEVEQRRAGGYSRKYASKAKNLADDMVRNTARDLLYYAVTQDAMLIFENLSRGFGRQGKRTFMAERQYTRMEDWLTAKLAYEFLPSKTYLSKTLAQYTSKTCSNCGFTITSADYDRVLEKLKKTATGWMTTINGKELKVEGQITYYNRYKRQNVVKDLSVELDRLSEESVNNDISSWTKGRSGEALSLLKKRFSHRPVQEKFVCLNCGFETHADEQAALNIARSWLFLRSQEYKKYQTNKTTGNTDKRAFVETWQSFYRKKLKEVWKPAV

SEQ ID NO: 65 - protein, 977 aa, Artificial Sequence
  CasX Variant
MQEIKRINKIRRRLVKDSNTKKAGKTGPMKTLLVRVMTPDLRERLENLRKKPENIPQPISNTSRANLNKLLTDYTEMKKAILHVYWEEFQKDPVGLMSRVAQPAPKNIDQRKLIPVKDGNERLTSSGFACSQCCQPLYVYKLEQVNDKGKPHTNYFGRCNVSEHERLILLSPHKPEANDELVTYSLGKFGQRALDFYSIHVTRESNHPVKPLEQIGGNSCASGPVGKALSDACMGAVASFLTKYQDIILEHQKVIKKNEKRLANLKDIASANGLAFPKITLPPQPHTKEGIEAYNNVVAQIVIWVNLNLWQKLKIGRDEAKPLQRLKGFPSFPLVERQANEVDWWDMVCNVKKLINEKKEDGKVFWQNLAGYKRQEALLPYLSSEEDRKKGKKFARYQFGDLLLHLEKKHGEDWGKVYDEAWERIDKKVEGLSKHIKLEEERRSEDAQSKAALTDWLRAKASFVIEGLKEADKDEFCRCELKLQKWYGDLRGKPFAIEAENSILDISGFSKQYNCAFIWQKDGVKKLNLYLIINYFKGGKLRFKKIKPEAFEANRFYTVINKKSGEIVPMEVNFNFDDPNLIILPLAFGKRQGREFIWNDLLSLETGSLKLANGRVIEKTLYNRRTRQDEPALFVALTFERREVLDSSNIKPMNLIGIDRGENIPAVIALTDPEGCPLSRFKDSLGNPTHILRIGESYKEKQRTIQAKKEVEQRRAGGYSRKYASKAKNLADDMVRNTVRDLLYYAVTQDAMLIFENLSRGFGRQGKRTFMAERQYTRMEDWLTAKLAYEGLSKTYLSKTLAQYTSKTCSNCGFTITSADYDRVLEKLKKTATGWMTTINGKELKVEGQITYYNRYKRQNVVKDLSVELDRLSEESVNNDISSWTKGRSGEALSLLKKRFSHRPVQEKFVCLNCGFETHADEQAALNIARSWLFLRSQEYKKYQTNKTTGNTDKRAFVETWQSFYRKKLKEVWKPAV

SEQ ID NO: 66 - protein, 977 aa, Artificial Sequence
  CasX Variant
MQEIKRINKIRRRLVKDSNTKKAGKTGPMKTLLVRVMTPDLRERLENLRKKPENIPQPISNTSRANLNKLLTDYTEMKKAILHVYWEEFQKDPVGLMSRVAQPAPKNIDQRKLIPVKDGNERLTSSGFACSQCCQPLYVYKLEQVNDKGKPHTNYFGRCNVSEHERLILLSPHKPEANDELVTYSLGKFGQRALDFYSIHVTRESNHPVKPLEQIGGNSCASGPVGKALSDACMGAVASFLTKYQDIILEHQKVIKKNEKRLANLKDIASANGLAFPKITLPPQPHTKEGIEAYNNVVAQIVIWVNLNLWQKLKIGRDEAKPLQRLKGFPSFPLVERQANEVDWWDMVCNVKKLINEKKEDGKVFWQNLAGYKRQEALRPYLSSEEDRKKGKKFARYQFGDLLLHLEKKHGEDWGKVYDEAWERIDKKVEGLSKHIKLEEERRSEDAQSKAALTDWLRAKASFVIEGLKEADKDEFCRCELKLQKWYGDLRGKPFAIEAENSILDISGFSKQYNCAFIWQKDGVKKLNLYLIINYFKGGKLRFKKIKPEAFEANRFYTVINKKSGEIVPMEVNFNFDDPNLIILPLAFGKRQGREFIWNDLLSLETGSLKLANGRVIEKTLYNRRTRQDEPALFVALTFERREVLDSSNIKPMNLIGIDRGENIPAVIALTDPEGCPLSRFKDSLGNPTHILRIGESYKEKQRTIQAKKEVEQRRAGGYSRKYASKAKNLADDMVRNTVRDLLYYAVTQDAMLIFENLSRGFGRQGKRTFMAERQYTRMEDWLTAKLAYEGLSKTYLSKTLAQYTSKTCSNCGFTITSADYDRVLEKLKKTATGWMTTINGKELKVEGQITYYNRYKRQNVVKDLSVELDRLSEESVNNDISSWTKGRSGEALSLLKKRFSHRPVQEKFVCLNCGFETHADEQAALNIARSWLFLRSQEYKKYQTNKTTGNTDKRAFVETWQSFYRKKLKEVWKPAV

SEQ ID NO: 67 - protein, 977 aa, Artificial Sequence
  CasX Variant
MQEIKRINKIRRRLVKDSNTKKAGKTGPMKTLLVRVMTPDLRERLENLRKKPENIPQPISNTSRANLNKLLTDYTEMKKAILHVYWEEFQKDPVGLMSRVAQPAPKNIDQRKLIPVKDGNERLTSSGFACSQCCQPLYVYKLEQVNDKGKPHTNYFGRCNVSEHERLILLSPHKPEANDELVTYSLGKFGQRALDFYSIHVTRESNHPVKPLEQIGGNSCASGPVGKALSDACMGAVASFLTKYQDIILEHQKVIKKNEKRLANLKDIASANGLAFPKITLPPQPHTKEGIEAYNNVVAQIVIWVNLNLWQKLKIGRDEAKPLQRLKGFPSFPLVERQANEVDWWDMVCNVKKLINEKKEDGKVFWQNLAGYKRQEALLPYLSSEEDRKKGKKFARYQFGDLLLHLEKKHGEDWGKVYDEAWERIDKKVEGLSKHIKLEEERRSEDAQSKAALTDWLRAKASFVIEGLKEADKDEFKRCELKLQKWYGDLRGKPFAIEAENSILDISGFSKQYNCAFIWQKDGVKKLNLYLIINYFKGGKLRFKKIKPEAFEANRFYTVINKKSGEIVPMEVNFNFDDPNLIILPLAFGKRQGREFIWNDLLSLETGSLKLANGRVIEKTLYNRRTRQDEPALFVALTFERREVLDSSNIKPMNLIGIDRGENIPAVIALTDPEGCPLSRFKDSLGNPTHILRIGESYKEKQRTIQAKKEVEQRRAGGYSRKYASKAKNLADDMVRNTARDLLYYAVTQDAMLIFENLSRGFGRQGKRTFMAERQYTRMEDWLTAKLAYEGLSKTYLSKTLAQYTSKTCSNCGFTITSADYDRVLEKLKKTATGWMTTINGKELKVEGQITYYNRYKRQNVVKDLSVELDRLSEESVNNDISSWTKGRSGEALSLLKKRFSHRPVQEKFVCLNCGFETHADEQAALNIARSWLFLRSQEYKKYQTNKTTGNTDKRAFVETWQSFYRKKLKEVWKPAV

SEQ ID NO: 68 - protein, 978 aa, Artificial Sequence
  CasX Variant
MQEIKRINKIRRRLVKDSNTKKAGKTGPMKTLLVRVMTPDLRERLENLRKKPENIPQPISNTSRANLNKLLTDYTEMKKAILHVYWEEFQKDPVGLMSRVAQPAPKNIDQRKLIPVKDGNERLTSSGFACSQCCQPLYVYKLEQVNDKGKPHTNYFGRCNVSEHERLILLSPHKPEANDELVTYSLGKFGQRALDFYSIHVTRESNHPVKPLEQIGGNSCASGPVGKALSDACMGAVASFLTKYQDIIIEHQKVIKKNEKRLANLKDIASANGLAFPKITLPPQPHTKEGIEAYNNVVAQIVIWVNLNLWQKLKIGRDEAKPLQRLKGFPSFPLVERQANEVDWWDMVCNVKKLINEKKEDGKVFWQNLAGYKRQEALLPYLSSEEDRKKGKKFARYQFGDLLLHLEKKHGEDWGKVYDEAWERIDKKVEGLSKHIKLEEERRSEDAQSKAALTDWLRAKASFVIEGLKEADKDEFCRCELKLQKWYGDLRGKPFAIEAENSILDISGFSKQYNCAFIWQKDGVKKLNLYLIINYFKGGKLRFKKIKPEAFEANRFYTVINKKSGEIVPMEVNFNFDDPNLIILPLAFGKRQGREFIWNDLLSLETGSLKLANGRVIEKTLYNRRTRQDEPALFVALTFERREVLDSSNIKPMNLIGIDRGENIPAVIALTDPEGCPLSRFKDSLGNPTHILRIGESYKEKQRTIQAAKEVEQRRAGGYSRKYASKAKNLADDMVRNTARDLLYYAVTQDAMLIFENLSRGFGRQGKRTFNAERQYTRMEDWLTAKLAYEGLPSKTYLSKTLAQYTSKTCSNCGFTITSADYDRVLEKLKKTATGWMTTINGKELKVEGQITYYNRYKRQNVVKDLSVELDRLSEESVNNDISSWTKGRSGEALSLLKKRFSHRPVQEKFVCLNCGFETHADEQAALNIARSWLFLRSQEYKKYQTNKTTGNTDKRAFVETWQSFYRKKLKEVWKPAV

SEQ ID NO: 69 - protein, 978 aa, Artificial Sequence
  CasX Variant
MQEIKRINKIRRRLVKDSNTKKAGKTGPMKTLLVRVMTPDLRERLENLRKKPENIPQPISNTSRANLNKLLTDYTEMKKAILHVYWEEFQKDPVGLMSRVAQPAPKNIDQRKLIPVKDGNERLTSSGFACSQCCQPLYVYKLEQVNDKGKPHTNYFGRCNVSEHERLILLSPHKPEANDELVTYSLGKFGQRALDFYSIHVTRESNHPVKPLEQIGGNSCASGPVGKALSDACMGAVASFLTKYQDIILEHQKVIKKNEKRLANLKDIASANGLAFPKITLPPQPHTKEGIEAYNNVVAQIVIWVNLNLWQKLKIGRDEAKPLQRLKGFPSFPLVERQANEVDWWDMVCNVKKLINEKKEDGKVFWQNLAGYKRQEALLPYLSSEEDRKKGKKFARYQFGDLLLHLEKKHGEDWGKVYDEAWERIDKKVEGLSKHIKLEEERRSEDAQSKAALTDWLRAKASFVIEGLKEADKDEFCRCELKLQKWYGDLRGKPFAIEAENSILDISGFSKQYNCAFIWQKDGVKKLNLYLIINYFKGGKLRFKKIKPEAFEANRFYTVINKKSGEIVPMEVNFNFDDPNLIILPLAFGKRQGREFIWNDLLSLETGSLKLANGRVIEKTLYNRRTRQDEPALFVALTFERREVLDSSNIKPMNLIGIDRGENIPAVIALTDPEGCPLSRFKDSLGNPTHILRIGESYKEKQRTIQAAKEVEQRRAGGYSRKYASKAKNLADDMVRNTARDLLYYAKTQDAMLIFENLSRGFGRQGKRTFMAERQYTRMEDWLTAKLAYEGLPSKTYLSKTLAQYTSKTCSNCGFTITSADYDRVLEKLKKTATGWMTTINGKELKVEGQITYYNRYKRQNVVKDLSVELDRLSEESVNNDISSWTKGRSGEALSLLKKRFSHRPVQEKFVCLNCGFETHADEQAALNIARSWLFLRSQEYKKYQTNKTTGNTDKRAFVETWQSFYRKKLKEVWKPAV

SEQ ID NO: 70 - protein, 977 aa, Artificial Sequence
  CasX Variant
MQEIKRINKIRRRLVKDSNTKKAGKTGPMKTLLVRVMTPDLRERLENLRKKPENIPQPISNTSRANLNKLLTDYTEMKKAILHVYWEEFQKDPVGLMSRVAQPAPKNIDQRKLIPVKDGNERLTSSGFACSQCCQPLYVYKLEQVNDKGKPHTNYFGRCNVSEHERLILLSPHKPEANDELVTYSLGKFGQRALDFYSIHVTRESNHPVKPLEQIGGNSCASGPVGKALSDACMGAVASFLTKYQDIILEHQKVIKKNEKRLANLKDIASANGLAFPKITLPPQPHTKEGIEAYNNVVAQIVIWVNLNLWQKLKIGRDEAKPLQRLKGFPSFPLVERQANEVDWWDMVCNVKKLINEKKEDGKVFWQNLAGYKRQEALRPYLSSEEDRKKGKKFARYQFGDLLLHLEKKHGEDWGKVYDEAWERIDKKVEGLSKHIKLEEERRSEDAQSKAALTDWLRAKASFVIEGLKEADKDEFKRCELKLQKWYGDLRGKPFAIEAENSILDISGFSKQYNCAFIWQKDGVKKLNLYLIINYFKGGKLRFKKIKPEAFEANRFYTVINKKSGEIVPMEVNFNFDDPNLIILPLAFGKRQGREFIWNDLLSLETGSLKLANGRVIEKTLYNRRTRQDEPALFVALTFERREVLDSSNIKPMNLIGIDRGENIPAVIALTDPEGCPLSRFKDSLGNPTHILRIGESYKEKQRTIQAKKEVEQRRAGGYSRKYASKAKNLADDMVRNTARDLLYYAVTQDAMLIFENLSRGFGRQGKRTFMAERQYTRNEDWLTAKLAYEGLSKTYLSKTLAQYTSKTCSNCGFTITSADYDRVLEKLKKTATGWMTTINGKELKVEGQITYYNRYKRQNVVKDLSVELDRLSEESVNNDISSWTKGRSGEALSLLKKRFSHRPVQEKFVCLNCGFETHADEQAALNIARSWLFLRSQEYKKYQTNKTTGNTDKRAFVETWQSFYRKKLKEVWKPAV

SEQ ID NO: 71 - protein, 978 aa, Artificial Sequence
  CasX Variant
MQEIKRINKIRRRLVKDSNTKKAGKTGPMKTLLVRVMTPDLRERLENLRKKPENIPQPISNTSRANLNKLLTDYTEMKKAILHVYWEEFQKDPVGLMSRVAQPAPKNIDQRKLIPVKDGNERLTSSGFACSQCCQPLYVYKLEQVNDKGKPHTNYFGRCNVSEHERLILLSPHKPEANDELVTYSLGKFGQRALDFYSIHVTRESNHPVKPLEQIGGNSCASGPVGKALSDACMGAVASFLTKYQDIILEHQKVIKKNEKRLANLKDIASANGLAFPKITLPPQPHTKEGIEAYNNVVAQIVIWVNLNLWQKLKIGRDEAKPLQRLKGFPSFPLVERQANEVDWWDMVCNVKKLINEKKEDGKVFWQNLAGYKRQEALLPYLSSEEDRKKGKKFARYQFGDLLLHLEKKHGEDWGKVYDEAWERIDKKVEGLSKHIKLEEERRSEDAQSKAALTDWLRAKASFVIEGLKEADKDEFCRCELKLQKWYGDLRGKPFAIEAENSILDISGFSKQYNCAFIWQKDGVKKLNLYLIINYFKGGKLRFKKIKPEAFEANRFYTVINKKSGEIVPMEVNFNFDDPNLIILPLAFGKRQGREFIWNDLLSLETGSLKLANGRVIEKTLYNRRTRQDEPALFVALTFERREVLDSSNIKPMNLIGIDRGENIPAVIALTDPEGCPLSRFKDSLGNPTHILRIGESYKEKQRTIQAAKEVEQRRAGGYSRKYASKAKNLADDMVRNTARDLLYYAVTQDAMLIMENLSRGFGRQGKRTFMAERQYTRMEDWLTAKLAYEGLPSKTYLSKTLAQYTSKTCSNCGFTITSADYDRVLEKLKKTATGWMTTINGKELKVEGQITYYNRYKRQNVVKDLSVELDRLSEESVNNDISSWTKGRSGEALSLLKKRFSHRPVQEKFVCLNCGFETHADEQAALNIARSWLFLRSQEYKKYQTNKTTGNTDKRAFVETWQSFYRKKLKEVWKPAV

SEQ ID NO: 72 - protein, 977 aa, Artificial Sequence
  CasX Variant
MQEIKRINKIRRRLVKDSNTKKAGKTGPMKTLLVRVMTPDLRERLENLRKKPENIPQPISNTSRANLNKLLTDYTEMKKAILHVYWEEFQKDPVGLMSRVAQPAPKNIDQRKLIPVKDGNERLTSSGFACSQCCQPLYVYKLEQVNDKGKPHTNYFGRCNVSEHERLILLSPHKPEANDELVTYSLGKFGQRALDFYSIHVTRESNHPVKPLEQIGGNSCASGPVGKALSDACMGAVASFLTKYQDIILEHQKVIKKNEKRLANLKDIASANGLAFPKITLPPQPHTKEGIEAYNNVVAQIVIWVNLNLWQKLKIGRDEAKPLQRLKGFPSFPLVERQANEVDWWDMVCNVKKLINEKKEDGKVFWQNLAGYKRQEALRPYLSSEEDRKKGKKFARYQFGDLLLHLEKKHGEDWGKVYDEAWERIDKKVEGLSKHIKLEEERRSEDAQSKAALTDWLRAKASFVIEGLKEADKDEFCRCELKLQKWYGDLRGKPFAIEAENSILDISGFSKQYNCAFIWQKDGVKKLNLYLIINYFKGGKLRFKKIKPEAFEANRFYTVINKKSGEIVPMEVNFNFDDPNLIILPLAFGKRQGREFIWNDLLSLETGSLKLANGRVIEKTLYNRRTRQDEPALFVALTFERREVLDSSNIKPMNLIGIDRGENIPAVIALTDPEGCPLSRFKDSLGNPTHILRIGESYKEKQRTIQAKKEVEQRRAGGYSRKYASKAKNLADDMVRNTARDLLYYAVTQDAMLIFENLSRGFGRQGKRTFMAERQYTRMEDWLTAKLAYEGLSKTYLSKTLAQYTSKTCSNCGFTITSADYDRVLEKLKKTATGWMTTINGKELKVEGQITYYNRRKRQNVVKDLSVELDRLSEESVNNDISSWTKGRSGEALSLLKKRFSHRPVQEKFVCLNCGFETHADEQAALNIARSWLFLRSQEYKKYQTNKTTGNTDKRAFVETWQSFYRKKLKEVWKPAV

SEQ ID NO: 73 - protein, 977 aa, Artificial Sequence
  CasX Variant
MQEIKRINKIRRRLVKDSNTKKAGKTGPMKTLLVRVMTPDLRERLENLRKKPENIPQPISNTSRANLNKLLTDYTEMKKAILHVYWEEFQKDPVGLMSRVAQPAPKNIDQRKLIPVKDGNERLTSSGFACSQCCQPLYVYKLEQVNDKGKPHTNYFGRCNVSEHERLILLSPHKPEANDELVTYSLGKFGQRALDFYSIHVTRESNHPVKPLEQIGGNSCASGPVGKALSDACMGAVASFLTKYQDIILEHQKVIKKNEKRLANLKDIASANGLAFPKITLPPQPHTKEGIEAYNNVVAQIVIWVNLNLWQKLKIGRDEAKPLQRLKGFPSFPLVERQANEVDWWDMVCNVKKLINEKKEDGKVFWQNLAGYKRQEALRPYLSSEEDRKKGKKFARYQFGDLLLHLEKKHGEDWGKVYDEAWERIDKKVEGLSKHIKLEEERRSEDAQSKAALTDWLRAKASFVIEGLKEADKDEFCRCELKLQKWYGDLRGKPFAIEAENSILDISGFSKQYNCAFIWQKDGVKKLNLYLIINYFKGGKLRFKKIKPEAFEANRFYTVINKKSGEIVPMEVNFNFDDPNLIILPLAFGKRQGREFIWNDLLSLETGSLKLANGRVIEKTLYNRRTRQDEPALFVALTFERREVLDSSNIKPMNLIGVDRGENIPAVIALTDPEGCPLSRFKDSLGNPTHILRIGESYKEKQRTIQAKKEVEQRRAGGYSRKYASKAKNLADDMVRNTARDLLYYAVTQDAMLIFENLSRGFGRQGKRTFMAERQYTRMEDWLTAKLAYEGLSKTYLSKTLAQYTSKTCSNCGFTITSADYDRVLEKLKKTATGWMTTINGKELKVEGQITYYNRRKRQNVVKDLSVELDRLSEESVNNDISSWTKGRSGEALSLLKKRFSHRPVQEKFVCLNCGFETHADEQAALNIARSWLFLRSQEYKKYQTNKTTGNTDKRAFVETWQSFYRKKLKEVWKPAV

SEQ ID NO: 74 - protein, 977 aa, Artificial Sequence
  CasX Variant
MQEIKRINKIRRRLVKDSNTKKAGKTGPMKTLLVRVMTPDLRERLENLRKKPENIPQPISNTSRANLNKLLTDYTEMKKAILHVYWEEFQKDPVGLMSRVAQPAPKNIDQRKLIPVKDGNERLTSSGFACSQCCQPLYVYKLEQVNDKGKPHTNYFGRCNVSEHERLILLSPHKPEANDELVTYSLGKFGQRALDFYSIHVTRESNHPVKPLEQIGGNSCASGPVGKALSDACMGAVASFLTKYQDIILEHQKVIKKNEKRLANLKDIASANGLAFPKITLPPQPHTKEGIEAYNNVVAQIVIWVNLNLWQKLKIGRDEAKPLQRLKGFPSFPLVERQANEVDWWDMVCNVKKLINEKKEDGKVFWQNLAGYKRQEALRPYLSSENDRKKGKKFARYQFGDLLLHLEKKHGEDWGKVYDEAWERIDKKVEGLSKHIKLEEERRSEDAQSKAALTDWLRAKASFVIEGLKEADKDEFCRCELKLQKWYGDLRGKPFAIEAENSILDISGFSKQYNCAFIWQKDGVKKLNLYLIINYFKGGKLRFKKIKPEAFEANRFYTVINKKSGEIVPMEVNFNFDDPNLIILPLAFGKRQGREFIWNDLLSLETGSLKLANGRVIEKTLYNRRTRQDEPALFVALTFERREVLDSSNIKPMNLIGVDRGENIPAVIALTDPEGCPLSRFKDSLGNPTHILRIGESYKEKQRTIQAKKEVEQRRAGGYSRKYASKAKNLADDMVRNTARDLLYYAVTQDAMLIFENLSRGFGRQGKRTFMAERQYTRMEDWLTAKLAYEGLSKTYLSKTLAQYTSKTCSNCGFTITSADYDRVLEKLKKTATGWMTTINGKELKVEGQITYYNRRKRQNVVKDLSVELDRLSEESVNNDISSWTKGRSGEALSLLKKRFSHRPVQEKFVCLNCGFETHADEQAALNIARSWLFLRSQEYKKYQTNKTTGNTDKRAFVETWQSFYRKKLKEVWKPAV

SEQ ID NO: 75 - protein, 977 aa, Artificial Sequence
  CasX Variant
MQEIKRINKIRRRLVKDSNTKKAGKTGPMKTLLVRVMTPDLRERLENLRKKPENIPQPISNTSRANLNKLLTDYTEMKKAILHVYWEEFQKDPVGLMSRVAQPAPKNIDQRKLIPVKDGNERLTSSGFACSQCCQPLYVYKLEQVNDKGKPHTNYFGRCNVSEHERLILLSPHKPEANDELVTYSLGKFGQRALDFYSIHVTRESNHPVKPLEQIGGNSCASGPVGKALSDACMGAVASFLTKYQDIILEHQKVIKKNEKRLANLKDIASANGLAFPKITLPPQPHTKEGIEAYNNVVAQIVIWVNLNLWQKLKIGRDEAKPLQRLKGFPSFPLVERQANEVDWWDMVCNVKKLINEKKEDGKVFWQNLAGYKRQEALRPYLSSEEDRKKGKKFARYQFGDLLKHLEKKHGEDWGKVYDEAWERIDKKVEGLSKHIKLEEERRSEDAQSKAALTDWLRAKASFVIEGLKEADKDEFCRCELKLQKWYGDLRGKPFAIEAENSILDISGFSKQYNCAFIWQKDGVKKLNLYLIINYFKGGKLRFKKIKPEAFEANRFYTVINKKSGEIVPMEVNFNFDDPNLIILPLAFGKRQGREFIWNDLLSLETGSLKLANGRVIEKTLYNRRTRQDEPALFVALTFERREVLDSSNIKPMNLIGVDRGENIPAVIALTDPEGCPLSRFKDSLGNPTHILRIGESYKEKQRTIQAKKEVEQRRAGGYSRKYASKAKNLADDMVRNTARDLLYYAVTQDAMLIFENLSRGFGRQGKRTFMAERQYTRMEDWLTAKLAYEGLSKTYLSKTLAQYTSKTCSNCGFTITSADYDRVLEKLKKTATGWMTTINGKELKVEGQITYYNRRKRQNVVKDLSVELDRLSEESVNNDISSWTKGRSGEALSLLKKRFSHRPVQEKFVCLNCGFETHADEQAALNIARSWLFLRSQEYKKYQTNKTTGNTDKRAFVETWQSFYRKKLKEVWKPAV

SEQ ID NO: 76 - protein, 978 aa, Artificial Sequence
  CasX Variant
MQEIKRINKIRRRLVKDSNTKKAGKTGPMKTLLVRVMTPDLRERLENLRKKPENIPQPISNTSRANLNKLLTDYTEMKKAILHVYWEEFQKDPVGLMSRVAQPAPKNIDQRKLIPVKDGNERLTSSGFACSQCCQPLYVYKLEQVNDKGKPHTNYFGRCNVSEHERLILLSPHKPEANDELVTYSLGKFGQVRALDFYSIHVTRESNHPVKPLEQIGGNSCASGPVGKALSDACMGAVASFLTKYQDIILEHQKVIKKNEKRLANLKDIASANGLAFPKITLPPQPHTKEGIEAYNNVVAQIVIWVNLNLWQKLKIGRDEAKPLQRLKGFPSFPLVERQANEVDWWDMVCNVKKLINEKKEDGKVFWQNLAGYKRQEALRPYLSSEEDRKKGKKFARYQFGDLLLHLEKKHGEDWGKVYDEAWERIDKKVEGLSKHIKLEEERRSEDAQSKAALTDWLRAKASFVIEGLKEADKDEFCRCELKLQKWYGDLRGKPFAIEAENSILDISGFSKQYNCAFIWQKDGVKKLNLYLIINYFKGGKLRFKKIKPEAFEANRFYTVINKKSGEIVPMEVNFNFDDPNLIILPLAFGKRQGREFIWNDLLSLETGSLKLANGRVIEKTLYNRRTRQDEPALFVALTFERREVLDSSNIKPMNLIGVDRGENIPAVIALTDPEGCPLSRFKDSLGNPTHILRIGESYKEKQRTIQAKKEVEQRRAGGYSRKYASKAKNLADDMVRNTARDLLYYAVTQDAMLIFENLSRGFGRQGKRTFMAERQYTRMEDWLTAKLAYEGLSKTYLSKTLAQYTSKTCSNCGFTITSADYDRVLEKLKKTATGWMTTINGKELKVEGQITYYNRRKRQNVVKDLSVELDRLSEESVNNDISSWTKGRSGEALSLLKKRFSHRPVQEKFVCLNCGFETHADEQAALNIARSWLFLRSQEYKKYQTNKTTGNTDKRAFVETWQSFYRKKLKEVWKPAV

SEQ ID NO: 77 - protein, 977 aa, Artificial Sequence
  CasX Variant
MQEIKRINKIRRRLVKDSNTKKAGKTGPMKTLLVRVMTPDLRERLENLRKKPENIPQPISNTSRANLNKLLTDYTEMKKAILHVYWEEFQKDPVGLMSRVAQPAPKNIDQRKLIPVKDGNERLTSSGFACSQCCQPLYVYKLEQVNDKGKPHTNYFGRCNVSEHERLILLSPHKPEANDELVTYSLGKFGQRALDFYSIHVTRESNHPVKPLEQIGGNSCASGPVGKALSDACMGAVASFLTKYQDIILEHQKVIKKNEKRLANLKDIASANGLAFPKITLPPQPHTKEGIEAYNNVVAQIVIWVNLNLWQKLKIGRDEAKPLQRLKGFPSFPLVERQANEVDWWDMVCNVKKLINEKKEDGKVFWQNLAGYKRQEALRPYLSSENDRKKGKKFARYQFGDLLKHLEKKHGEDWGKVYDEAWERIDKKVEGLSKHIKLEEERRSEDAQSKAALTDWLRAKASFVIEGLKEADKDEFCRCELKLQKWYGDLRGKPFAIEAENSILDISGFSKQYNCAFIWQKDGVKKLNLYLIINYFKGGKLRFKKIKPEAFEANRFYTVINKKSGEIVPMEVNFNFDDPNLIILPLAFGKRQGREFIWNDLLSLETGSLKLANGRVIEKTLYNRRTRQDEPALFVALTFERREVLDSSNIKPMNLIGVDRGENIPAVIALTDPEGCPLSRFKDSLGNPTHILRIGESYKEKQRTIQAKKEVEQRRAGGYSRKYASKAKNLADDMVRNTARDLLYYAVTQDAMLIFENLSRGFGRQGKRTFMAERQYTRMEDWLTAKLAYEGLSKTYLSKTLAQYTSKTCSNCGFTITSADYDRVLEKLKKTATGWMTTINGKELKVEGQITYYNRRKRQNVVKDLSVELDRLSEESVNNDISSWTKGRSGEALSLLKKRFSHRPVQEKFVCLNCGFETHADEQAALNIARSWLFLRSQEYKKYQTNKTTGNTDKRAFVETWQSFYRKKLKEVWKPAV

SEQ ID NO: 78 - protein, 977 aa, Artificial Sequence
  CasX Variant
MQEIKRINKIRRRLVKDSNTKKAGKTGPMKTLLVRVMTPDLRERLENLRKKPENIPQPISNTSRANLNKLLTDYTEMKKAILHVYWEEFQKDPVGLMSRVAQPAPKNIDQRKLIPVKDGNERLTSSGFACSQCCQPLYVYKLEQVNDKGKPHTNYFGRCNVSEHERLILLSPHKPEANDELVTYSLGKFGQRALDFYSIHVTRESNHPVKPLEQIGGNSCASGPVGKALSDACMGAVASFLTKYQDIILEHQKVIKKNEKRLANLKDIASANGLAFPKITLPPQPHTKEGIEAYNNVVAQIVIWVNLNLWQKLKIGRDEAKPLQRLKGFPSFPLVERQANEVDWWDMVCNVKKLINEKKEDGKVFWQNLAGYKRQEALRPYLSSEEDRKKGKKFARYQLGDLLLHLEKKHGEDWGKVYDEAWERIDKKVEGLSKHIKLEEERRSEDAQSKAALTDWLRAKASFVIEGLKEADKDEFCRCELKLQKWYGDLRGKPFAIEAENSILDISGFSKQYNCAFIWQKDGVKKLNLYLIINYFKGGKLRFKKIKPEAFEANRFYTVINKKSGEIVPMEVNFNFDDPNLIILPLAFGKRQGREFIWNDLLSLETGSLKLANGRVIEKTLYNRRTRQDEPALFVALTFERREVLDSSNIKPMNLIGVDRGENIPAVIALTDPEGCPLSRFKDSLGNPTHILRIGESYKEKQRTIQAKKEVEQRRAGGYSRKYASKAKNLADDMVRNTARDLLYYAVTQDAMLIFENLSRGFGRQGKRTFMAERQYTRMEDWLTAKLAYEGLSKTYLSKTLAQYTSKTCSNCGFTITSADYDRVLEKLKKTATGWMTTINGKELKVEGQITYYNRRKRQNVVKDLSVELDRLSEESVNNDISSWTKGRSGEALSLLKKRFSHRPVQEKFVCLNCGFETHADEQAALNIARSWLFLRSQEYKKYQTNKTTGNTDKRAFVETWQSFYRKKLKEVWKPAV

SEQ ID NO: 79 - protein, 977 aa, Artificial Sequence
  CasX Variant
MQEIKRINKIRRRLVKDSNTKKAGKTGPMKTLLVRVMTPDLRERLENLRKKPENIPQPISNTSRANLNKLLTDYTEMKKAILHVYWEEFQKDPVGLMSRVAQPAPKNIDQRKLIPVKDGNERLTSSGFACSQCCQPLYVYKLEQVNDKGKPHTNYFGRCNVSEHERLILLSPHKPEANDELVTYSLGKFGQRALDFYSIHVTRESNHPVKPLEQIGGNSCASGPVGKALSDACMGAVASFLTKYQDIILEHQKVIKKNEKRLANLKDIASANGLAFPKITLPPQPHTKEGIEAYNNVVAQIVIWVNLNLWQKLKIGRDEAKPLQRLKGFPSFPLVERQANEVDWWDMVCNVKKLINEKKEDGKVFWQNLAGYKRQEALRPYLSSENDRKKGKKFARYQLGDLLLHLEKKHGEDWGKVYDEAWERIDKKVEGLSKHIKLEEERRSEDAQSKAALTDWLRAKASFVIEGLKEADKDEFCRCELKLQKWYGDLRGKPFAIEAENSILDISGFSKQYNCAFIWQKDGVKKLNLYLIINYFKGGKLRFKKIKPEAFEANRFYTVINKKSGEIVPMEVNFNFDDPNLIILPLAFGKRQGREFIWNDLLSLETGSLKLANGRVIEKTLYNRRTRQDEPALFVALTFERREVLDSSNIKPMNLIGVDRGENIPAVIALTDPEGCPLSRFKDSLGNPTHILRIGESYKEKQRTIQAKKEVEQRRAGGYSRKYASKAKNLADDMVRNTARDLLYYAVTQDAMLIFENLSRGFGRQGKRTFMAERQYTRMEDWLTAKLAYEGLSKTYLSKTLAQYTSKTCSNCGFTITSADYDRVLEKLKKTATGWMTTINGKELKVEGQITYYNRRKRQNVVKDLSVELDRLSEESVNNDISSWTKGRSGEALSLLKKRFSHRPVQEKFVCLNCGFETHADEQAALNIARSWLFLRSQEYKKYQTNKTTGNTDKRAFVETWQSFYRKKLKEVWKPAV

SEQ ID NO: 80 - protein, 977 aa, Artificial Sequence
  CasX Variant
MQEIKRINKIRRRLVKDSNTKKAGKTGPMKTLLVRVMTPDLRERLENLRKKPENIPQPISNTSRANLNKLLTDYTEMKKAILHVYWEEFQKDPVGLMSRVAQPAPKNIDQRKLIPVKDGNERLTSSGFACSQCCQPLYVYKLEQVNDKGKPHTNYFGRCNVSEHERLILLSPHKPEANDELVTYSLGKFGQRALDFYSIHVTRESNHPVKPLEQIGGNSCASGPVGKALSDACMGAVASFLTKYQDIILEHQKVIKKNEKRLANLKDIASANGLAFPKITLPPQPHTKEGIEAYNNVVAQIVIWVNLNLWQKLKIGRDEAKPLQRLKGFPSFPLVERQANEVDWWDMVCNVKKLINEKKEDGKVFWQNLAGYKRQEALRPYLSSEEDRKKGKKFARYQLGDLLLHLEKKHGEDWGKVYDEAWERIDKKVEGLSKHIKLEEERRSEDAQSKAALTDWLRAKASFVIEGLKEADKDEFSRCELKLQKWYGDLRGKPFAIEAENSILDISGFSKQYNCAFIWQKDGVKKLNLYLIINYFKGGKLRFKKIKPEAFEANRFYTVINKKSGEIVPMEVNFNFDDPNLIILPLAFGKRQGREFIWNDLLSLETGSLKLANGRVIEKTLYNRRTRQDEPALFVALTFERREVLDSSNIKPMNLIGVDRGENIPAVIALTDPEGCPLSRFKDSLGNPTHILRIGESYKEKQRTIQAKKEVEQRRAGGYSRKYASKAKNLADDMVRNTARDLLYYAVTQDAMLIFENLSRGFGRQGKRTFMAERQYTRMEDWLTAKLAYEGLSKTYLSKTLAQYTSKTCSNCGFTITSADYDRVLEKLKKTATGWMTTINGKELKVEGQITYYNRRKRQNVVKDLSVELDRLSEESVNNDISSWTKGRSGEALSLLKKRFSHRPVQEKFVCLNCGFETHADEQAALNIARSWLFLRSQEYKKYQTNKTTGNTDKRAFVETWQSFYRKKLKEVWKPAV

SEQ ID NO: 81 - protein, 977 aa, Artificial Sequence
  CasX Variant
MQEIKRINKIRRRLVKDSNTKKAGKTGPMKTLLVRVMTPDLRERLENLRKKPENIPQPISNTSRANLNKLLTDYTEMKKAILHVYWEEFQKDPVGLMSRVAQPAPKNIDQRKLIPVKDGNERLTSSGFACSQCCQPLYVYKLEQVNDKGKPHTNYFGRCNVSEHERLILLSPHKPEANDELVTYSLGKFGQRALDFYSIHVTRESNHPVKPLEQIGGNSCASGPVGKALSDACMGAVASFLTKYQDIILEHQKVIKKNEKRLANLKDIASANGLAFPKITLPPQPHTKEGIEAYNNVVAQIVIWVNLNLWQKLKIGRDEAKPLQRLKGFPSFPLVERQANEVDWWDMVCNVKKLINEKKEDGKVFWQNLAGYKRQEALRPYLSSEEDRKKGKKFARYQLGDLLKHLEKKHGEDWGKVYDEAWERIDKKVEGLSKHIKLEEERRSEDAQSKAALTDWLRAKASFVIEGLKEADKDEFCRCELKLQKWYGDLRGKPFAIEAENSILDISGFSKQYNCAFIWQKDGVKKLNLYLIINYFKGGKLRFKKIKPEAFEANRFYTVINKKSGEIVPMEVNFNFDDPNLIILPLAFGKRQGREFIWNDLLSLETGSLKLANGRVIEKTLYNRRTRQDEPALFVALTFERREVLDSSNIKPMNLIGVDRGENIPAVIALTDPEGCPLSRFKDSLGNPTHILRIGESYKEKQRTIQAKKEVEQRRAGGYSRKYASKAKNLADDMVRNTARDLLYYAVTQDAMLIFENLSRGFGRQGKRTFMAERQYTRMEDWLTAKLAYEGLSKTYLSKTLAQYTSKTCSNCGFTITSADYDRVLEKLKKTATGWMTTINGKELKVEGQITYYNRRKRQNVVKDLSVELDRLSEESVNNDISSWTKGRSGEALSLLKKRFSHRPVQEKFVCLNCGFETHADEQAALNIARSWLFLRSQEYKKYQTNKTTGNTDKRAFVETWQSFYRKKLKEVWKPAV

SEQ ID NO: 82 - protein, 977 aa, Artificial Sequence
  CasX Variant
MQEIKRINKIRRRLVKDSNTKKAGKTGPMKTLLVRVMTPDLRERLENLRKKPENIPQPISNTSRANLNKLLTDYTEMKKAILHVYWEEFQKDPVGLMSRVAQPAPKNIDQRKLIPVKDGNERLTSSGFACSQCCQPLYVYKLEQVNDKGKPHTNYFGRCNVSEHERLILLSPHKPEANDELVTYSLGKFGQRALDFYSIHVTRESNHPVKPLEQIGGNSCASGPVGKALSDACMGAVASFLTKYQDIILEHQKVIKKNEKRLANLKDIASANGLAFPKITLPPQPHTKEGIEAYNNVVAQIVIWVNLNLWQKLKIGRDEAKPLQRLKGFPSFPLVERQANEVDWWDMVCNVKKLINEKKEDGKVFWQNLAGYKRQEALRPYLSSENDRKKGKKFARYQLGDLLKHLEKKHGEDWGKVYDEAWERIDKKVEGLSKHIKLEEERRSEDAQSKAALTDWLRAKASFVIEGLKEADKDEFSRCELKLQKWYGDLRGKPFAIEAENSILDISGFSKQYNCAFIWQKDGVKKLNLYLIINYFKGGKLRFKKIKPEAFEANRFYTVINKKSGEIVPMEVNFNFDDPNLIILPLAFGKRQGREFIWNDLLSLETGSLKLANGRVIEKTLYNRRTRQDEPALFVALTFERREVLDSSNIKPMNLIGVDRGENIPAVIALTDPEGCPLSRFKDSLGNPTHILRIGESYKEKQRTIQAKKEVEQRRAGGYSRKYASKAKNLADDMVRNTARDLLYYAVTQDAMLIFENLSRGFGRQGKRTFMAERQYTRMEDWLTAKLAYEGLSKTYLSKTLAQYTSKTCSNCGFTITSADYDRVLEKLKKTATGWMTTINGKELKVEGQITYYNRRKRQNVVKDLSVELDRLSEESVNNDISSWTKGRSGEALSLLKKRFSHRPVQEKFVCLNCGFETHADEQAALNIARSWLFLRSQEYKKYQTNKTTGNTDKRAFVETWQSFYRKKLKEVWKPAV

SEQ ID NO: 83 - protein, 977 aa, Artificial Sequence
  CasX Variant
MQEIKRINKIRRRLVKDSNTKKAGKTGPMKTLLVRVMTPDLRERLENLRKKPENIPQPISNTSRANLNKLLTDYTEMKKAILHVYWEEFQKDPVGLMSRVAQPAPKNIDQRKLIPVKDGNERLTSSGFACSQCCQPLYVYKLEQVNDKGKPHTNYFGRCNVSEHERLILLSPHKPEANDELVTYSLGKFGQRALDFYSIHVTRESNHPVKPLEQIGGNSCASGPVGKALSDACMGAVASFLTKYQDIILEHQKVIKKNEKRLANLKDIASANGLAFPKITLPPQPHTKEGIEAYNNVVAQIVIWVNLNLWQKLKIGRDEAKPLQRLKGFPSFPLVERQANEVDWWDMVCNVKKLINEKKEDGKVFWQNLAGYKRQEALRPYLSSEEDRKKGKKFARYQLGDLLLHLEKKHGEDWGKVYDEAWERIDKKVEGLSKHIKLEEERRSEDAQSKAALTDWLRAKASFVIEGLKEADKDEFCRCELKLQKWYGDLRGKPFAIEAENSILDISGFSKQYNCAFIWQKDGVKKLNLYLIINYFKGGKLRFKKIKPEAFEANRFYTVINKKSGEIVPMEVNFNFDDPNLIILPLAFGKRQGREFIWNDLLSLETGSLKLANGRVIEKTLYNRRTRQDEPALFVALTFERREVLDSSNIKPMNLIGVDRGENIPAVIALTDPEGCPLSRFKDSLGNPTHILRIGESYKEKQRTIQAKKEVEQRRAGGYSRKYASKAKNLADDMVRNTARDLLYYAVTQDAMLIFENLSRGFGRQGKRTFMAERQYTRMEDWLTAKLAYEGLSKTLLSKTLAQYTSKTCSNCGFTITSADYDRVLEKLKKTATGWMTTINGKELKVEGQITYYNRRKRQNVVKDLSVELDRLSEESVNNDISSWTKGRSGEALSLLKKRFSHRPVQEKFVCLNCGFETHADEQAALNIARSWLFLRSQEYKKYQTNKTTGNTDKRAFVETWQSFYRKKLKEVWKPAV

SEQ ID NO: 84 - protein, 977 aa, Artificial Sequence
  CasX Variant
MQEIKRINKIRRRLVKDSNTKKAGKTGPMKTLLVRVMTPDLRERLENLRKKPENIPQPISNTSRANLNKLLTDYTEMKKAILHVYWEEFQKDPVGLMSRVAQPAPKNIDQRKLIPVKDGNERLTSSGFACSQCCQPLYVYKLEQVNDKGKPHTNYFGRCNVSEHERLILLSPHKPEANDELVTYSLGKFGQRALDFYSIHVTRESNHPVKPLEQIGGNSCASGPVGKALSDACMGAVASFLTKYQDIILEHQKVIKKNEKRLANLKDIASANGLAFPKITLPPQPHTKEGIEAYNNVVAQIVIWVNLNLWQKLKIGRDEAKPLQRLKGFPSFPLVERQANEVDWWDMVCNVKKLINEKKEDGKVFWQNLAGYKRQEALRPYLSSENDRKKGKKFARYQLGDLLLHLEKKHGEDWGKVYDEAWERIDKKVEGLSKHIKLEEERRSEDAQSKAALTDWLRAKASFVIEGLKEADKDEFCRCELKLQKWYGDLRGKPFAIEAENSILDISGFSKQYNCAFIWQKDGVKKLNLYLIINYFKGGKLRFKKIKPEAFEANRFYTVINKKSGEIVPMEVNFNFDDPNLIILPLAFGKRQGREFIWNDLLSLETGSLKLANGRVIEKTLYNRRTRQDEPALFVALTFERREVLDSSNIKPMNLIGVDRGENIPAVIALTDPEGCPLSRFKDSLGNPTHILRIGESYKEKQRTIQAKKEVEQRRAGGYSRKYASKAKNLADDMVRNTARDLLYYAVTQDAMLIFENLSRGFGRQGKRTFMAERQYTRMEDWLTAKLAYEGLSKTLLSKTLAQYTSKTCSNCGFTITSADYDRVLEKLKKTATGWMTTINGKELKVEGQITYYNRRKRQNVVKDLSVELDRLSEESVNNDISSWTKGRSGEALSLLKKRFSHRPVQEKFVCLNCGFETHADEQAALNIARSWLFLRSQEYKKYQTNKTTGNTDKRAFVETWQSFYRKKLKEVWKPAV

SEQ ID NO: 85 - protein, 977 aa, Artificial Sequence
  CasX Variant
MQEIKRINKIRRRLVKDSNTKKAGKTGPMKTLLVRVMTPDLRERLENLRKKPENIPQPISNTSRANLNKLLTDYTEMKKAILHVYWEEFQKDPVGLMSRVAQPAPKNIDQRKLIPVKDGNERLTSSGFACSQCCQPLYVYKLEQVNDKGKPHTNYFGRCNVSEHERLILLSPHKPEANDELVTYSLGKFGQRALDFYSIHVTRESNHPVKPLEQIGGNSCASGPVGKALSDACMGAVASFLTKYQDIILEHQKVIKKNEKRLANLKDIASANGLAFPKITLPPQPHTKEGIEAYNNVVAQIVIWVNLNLWQKLKIGRDEAKPLQRLKGFPSFPLVERQANEVDWWDMVCNVKKLINEKKEDGKVFWQNLAGYKRQEALRPYLSSENDRKKGKKFARYQLGDLLKHLEKKHGEDWGKVYDEAWERIDKKVEGLSKHIKLEEERRSEDAQSKAALTDWLRAKASFVIEGLKEADKDEFSRCELKLQKWYGDLRGKPFAIEAENSILDISGFSKQYNCAFIWQKDGVKKLNLYLIINYFKGGKLRFKKIKPEAFEANRFYTVINKKSGEIVPMEVNFNFDDPNLIILPLAFGKRQGREFIWNDLLSLETGSLKLANGRVIEKTLYNRRTRQDEPALFVALTFERREVLDSSNIKPMNLIGVDRGENIPAVIALTDPEGCPLSRFKDSLGNPTHILRIGESYKEKQRTIQAKKEVEQRRAGGYSRKYASKAKNLADDMVRNTARDLLYYAVTQDAMLIFENLSRGFGRQGKRTFMAERQYTRMEDWLTAKLAYEGLSKTLLSKTLAQYTSKTCSNCGFTITSADYDRVLEKLKKTATGWMTTINGKELKVEGQITYYNRRKRQNVVKDLSVELDRLSEESVNNDISSWTKGRSGEALSLLKKRFSHRPVQEKFVCLNCGFETHADEQAALNIARSWLFLRSQEYKKYQTNKTTGNTDKRAFVETWQSFYRKKLKEVWKPAV

SEQ ID NO: 86 - protein, 977 aa, Artificial Sequence
  CasX Variant
MQEIKRINKIRRRLVKDSNTKKAGKTGPMKTLLVRVMTPDLRERLENLRKKPENIPQPISNTSRANLNKLLTDYTEMKKAILHVYWEEFQKDPVGLMSRVAQPAPKNIDQRKLIPVKDGNERLTSSGFACSQCCQPLYVYKLEQVNDKGKPHTNYFGRCNVSEHERLILLSPHKPEANDELVTYSLGKFGQRALDFYSIHVTRESNHPVKPLEQIGGNSCASGPVGKALSDACMGAVASFLTKYQDIILEHQKVIKKNEKRLANLKDIASANGLAFPKITLPPQPHTKEGIEAYNNVVAQIVIWVNLNLWQKLKIGRDEAKPLQRLKGFPSFPLVERQANEVDWWDMVCNVKKLINEKKEDGKVFWQNLAGYKRQEALRPYLSSEEDRKKGKKFARYQFGDLLLHLEKKHGEDWGKVYDEAWERIDKKVEGLSKHIKLEEERRSEDAQSKAALTDWLRAKASFVIEGLKEADKDEFCRCELKLQKWYGDLRGKPFAIEAENSILDISGFSKQYNCAFIWQKDGVKKLNLYLIINYFKGGKLRFKKIKPEAFEANRFYTVINKKSGEIVPMEVNFNFDDPNLIILPLAFGKRQGREFIWNDLLSLETGSLKLANGRVIEKTLYNRRTRQDEPALFVALTFERREVLDSSNIKPMNLIGVDRGENIPAVIALTDPEGCPLSRFKDSLGNPTHILRIGESYKEKQRTIQAKKEVEQRRAGGYSRKYASKAKNLADDMVRNTARDLLYYAVTQDAMLIFENLSRGFGRQGKRTFMAERQYTRMEDWLTAKLAYEGLSKTLLSKTLAQYTSKTCSNCGFTITSADYDRVLEKLKKTATGWMTTINGKELKVEGQITYYNRRKRQNVVKDLSVELDRLSEESVNNDISSWTKGRSGEALSLLKKRFSHRPVQEKFVCLNCGFETHADEQAALNIARSWLFLRSQEYKKYQTNKTTGNTDKRAFVETWQSFYRKKLKEVWKPAV

SEQ ID NO: 87 - protein, 977 aa, Artificial Sequence
  CasX Variant
MQEIKRINKIRRRLVKDSNTKKAGKTGPMKTLLVRVMTPDLRERLENLRKKPENIPQPISNTSRANLNKLLTDYTEMKKAILHVYWEEFQKDPVGLMSRVAQPAPKNIDQRKLIPVKDGNERLTSSGFACSQCCQPLYVYKLEQVNDKGKPHTNYFGRCNVSEHERLILLSPHKPEANDELVTYSLGKFGQRALDFYSIHVTRESNHPVKPLEQIGGNSCASGPVGKALSDACMGAVASFLTKYQDIILEHQKVIKKNEKRLANLKDIASANGLAFPKITLPPQPHTKEGIEAYNNVVAQIVIWVNLNLWQKLKIGRDEAKPLQRLKGFPSFPLVERQANEVDWWDMVCNVKKLINEKKEDGKVFWQNLAGYKRQEALRPYLSSEEDRKKGKKFARYQFGDLLKHLEKKHGEDWGKVYDEAWERIDKKVEGLSKHIKLEEERRSEDAQSKAALTDWLRAKASFVIEGLKEADKDEFCRCELKLQKWYGDLRGKPFAIEAENSILDISGFSKQYNCAFIWQKDGVKKLNLYLIINYFKGGKLRFKKIKPEAFEANRFYTVINKKSGEIVPMEVNFNFDDPNLIILPLAFGKRQGREFIWNDLLSLETGSLKLANGRVIEKTLYNRRTRQDEPALFVALTFERREVLDSSNIKPMNLIGVDRGENIPAVIALTDPEGCPLSRFKDSLGNPTHILRIGESYKEKQRTIQAKKEVEQRRAGGYSRKYASKAKNLADDMVRNTARDLLYYAVTQDAMLIFENLSRGFGRQGKRTFMAERQYTRMEDWLTAKLAYEGLSKTLLSKTLAQYTSKTCSNCGFTITSADYDRVLEKLKKTATGWMTTINGKELKVEGQITYYNRRKRQNVVKDLSVELDRLSEESVNNDISSWTKGRSGEALSLLKKRFSHRPVQEKFVCLNCGFETHADEQAALNIARSWLFLRSQEYKKYQTNKTTGNTDKRAFVETWQSFYRKKLKEVWKPAV

SEQ ID NO: 88 - protein, 977 aa, Artificial Sequence
  CasX Variant
MQEIKRINKIRRRLVKDSNTKKAGKTGPMKTLLVRVMTPDLRERLENLRKKPENIPQPISNTSRANLNKLLTDYTEMKKAILHVYWEEFQKDPVGLMSRVAQPAPKNIDQRKLIPVKDGNERLTSSGFACSQCCQPLYVYKLEQVNDKGKPHTNYFGRCNVSEHERLILLSPHKPEANDELVTYSLGKFGQRALDFYSIHVTRESNHPVKPLEQIGGNSCASGPVGKALSDACMGAVASFLTKYQDIILEHQKVIKKNEKRLANLKDIASANGLAFPKITLPPQPHTKEGIEAYNNVVAQIVIWVNLNLWQKLKIGRDEAKPLQRLKGFPSFPLVERQANEVDWWDMVCNVKKLINEKKEDGKVFWQNLAGYKRQEALRPYLSSENDRKKGKKFARYQFGDLLLHLEKKHGEDWGKVYDEAWERIDKKVEGLSKHIKLEEERRSEDAQSKAALTDWLRAKASFVIEGLKEADKDEFCRCELKLQKWYGDLRGKPFAIEAENSILDISGFSKQYNCAFIWQKDGVKKLNLYLIINYFKGGKLRFKKIKPEAFEANRFYTVINKKSGEIVPMEVNFNFDDPNLIILPLAFGKRQGREFIWNDLLSLETGSLKLANGRVIEKTLYNRRTRQDEPALFVALTFERREVLDSSNIKPMNLIGVDRGENIPAVIALTDPEGCPLSRFKDSLGNPTHILRIGESYKEKQRTIQAKKEVEQRRAGGYSRKYASKAKNLADDMVRNTARDLLYYAVTQDAMLIFENLSRGFGRQGKRTFMAERQYTRMEDWLTAKLAYEGLSKTLLSKTLAQYTSKTCSNCGFTITSADYDRVLEKLKKTATGWMTTINGKELKVEGQITYYNRRKRQNVVKDLSVELDRLSEESVNNDISSWTKGRSGEALSLLKKRFSHRPVQEKFVCLNCGFETHADEQAALNIARSWLFLRSQEYKKYQTNKTTGNTDKRAFVETWQSFYRKKLKEVWKPAV

SEQ ID NO: 89 - protein, 977 aa, Artificial Sequence
  CasX Variant
MQEIKRINKIRRRLVKDSNTKKAGKTGPMKTLLVRVMTPDLRERLENLRKKPENIPQPISNTSRANLNKLLTDYTEMKKAILHVYWEEFQKDPVGLMSRVAQPAPKNIDQRKLIPVKDGNERLTSSGFACSQCCQPLYVYKLEQVNDKGKPHTNYFGRCNVSEHERLILLSPHKPEANDELVTYSLGKFGQRALDFYSIHVTRESNHPVKPLEQIGGNSCASGPVGKALSDACMGAVASFLTKYQDIILEHQKVIKKNEKRLANLKDIASANGLAFPKITLPPQPHTKEGIEAYNNVVAQIVIWVNLNLWQKLKIGRDEAKPLQRLKGFPSFPLVERQANEVDWWDMVCNVKKLINEKKEDGKVFWQNLAGYKRQEALRPYLSSENDRKKGKKFARYQFGDLLKHLEKKHGEDWGKVYDEAWERIDKKVEGLSKHIKLEEERRSEDAQSKAALTDWLRAKASFVIEGLKEADKDEFSRCELKLQKWYGDLRGKPFAIEAENSILDISGFSKQYNCAFIWQKDGVKKLNLYLIINYFKGGKLRFKKIKPEAFEANRFYTVINKKSGEIVPMEVNFNFDDPNLIILPLAFGKRQGREFIWNDLLSLETGSLKLANGRVIEKTLYNRRTRQDEPALFVALTFERREVLDSSNIKPMNLIGVDRGENIPAVIALTDPEGCPLSRFKDSLGNPTHILRIGESYKEKQRTIQAKKEVEQRRAGGYSRKYASKAKNLADDMVRNTARDLLYYAVTQDAMLIFENLSRGFGRQGKRTFMAERQYTRMEDWLTAKLAYEGLSKTLLSKTLAQYTSKTCSNCGFTITSADYDRVLEKLKKTATGWMTTINGKELKVEGQITYYNRRKRQNVVKDLSVELDRLSEESVNNDISSWTKGRSGEALSLLKKRFSHRPVQEKFVCLNCGFETHADEQAALNIARSWLFLRSQEYKKYQTNKTTGNTDKRAFVETWQSFYRKKLKEVWKPAV

SEQ ID NO: 90 - protein, 977 aa, Artificial Sequence
  CasX Variant
MQEIKRINKIRRRLVKDSNTKKAGKTGPMKTLLVRVMTPDLRERLENLRKKPENIPQPISNTSRANLNKLLTDYTEMKKAILHVYWEEFQKDPVGLMSRVAQPAPKNIDQRKLIPVKDGNERLTSSGFACSQCCQPLYVYKLEQVNDKGKPHTNYFGRCNVSEHERLILLSPHKPEANDELVTYSLGKFGQRALDFYSIHVTRESNHPVKPLEQIGGNSCASGPVGKALSDACMGAVASFLTKYQDIILEHQKVIKKNEKRLANLKDIASANGLAFPKITLPPQPHTKEGIEAYNNVVAQIVIWVNLNLWQKLKIGRDEAKPLQRLKGFPSFPLVERQANEVDWWDMVCNVKKLINEKKEDGKVFWQNLAGYKRQEALRPYLSSENDRKKGKKFARYQFGDLLLHLEKKHGEDWGKVYDEAWERIDKKVEGLSKHIKLEEERRSEDAQSKAALTDWLRAKASFVIEGLKEADKDEFCRCELKLQKWYGDLRGKPFAIEAENSILDISGFSKQYNCAFIWQKDGVKKLNLYLIINYFKGGKLRFKKIKPEAFEANRFYTVINKKSGEIVPMEVNFNFDDPNLIILPLAFGKRQGREFIWNDLLSLETGSLKLANGRVIEKTLYNRRTRQDEPALFVALTFERREVLDSSNIKPMNLIGIDRGENIPAVIALTDPEGCPLSRFKDSLGNPTHILRIGESYKEKQRTIQAKKEVEQRRAGGYSRKYASKAKNLADDMVRNTARDLLYYAVTQDAMLIFENLSRGFGRQGKRTFMAERQYTRMEDWLTAKLAYEGLSKTYLSKTLAQYTSKTCSNCGFTITSADYDRVLEKLKKTATGWMTTINGKELKVEGQITYYNRRKRQNVVKDLSVELDRLSEESVNNDISSWTKGRSGEALSLLKKRFSHRPVQEKFVCLNCGFETHADEQAALNIARSWLFLRSQEYKKYQTNKTTGNTDKRAFVETWQSFYRKKLKEVWKPAV

SEQ ID NO: 91 - protein, 977 aa, Artificial Sequence
  CasX Variant
MQEIKRINKIRRRLVKDSNTKKAGKTGPMKTLLVRVMTPDLRERLENLRKKPENIPQPISNTSRANLNKLLTDYTEMKKAILHVYWEEFQKDPVGLMSRVAQPAPKNIDQRKLIPVKDGNERLTSSGFACSQCCQPLYVYKLEQVNDKGKPHTNYFGRCNVSEHERLILLSPHKPEANDELVTYSLGKFGQRALDFYSIHVTRESNHPVKPLEQIGGNSCASGPVGKALSDACMGAVASFLTKYQDIILEHQKVIKKNEKRLANLKDIASANGLAFPKITLPPQPHTKEGIEAYNNVVAQIVIWVNLNLWQKLKIGRDEAKPLQRLKGFPSFPLVERQANEVDWWDMVCNVKKLINEKKEDGKVFWQNLAGYKRQEALRPYLSSENDRKKGKKFARYQFGDLLKHLEKKHGEDWGKVYDEAWERIDKKVEGLSKHIKLEEERRSEDAQSKAALTDWLRAKASFVIEGLKEADKDEFCRCELKLQKWYGDLRGKPFAIEAENSILDISGFSKQYNCAFIWQKDGVKKLNLYLIINYFKGGKLRFKKIKPEAFEANRFYTVINKKSGEIVPMEVNFNFDDPNLIILPLAFGKRQGREFIWNDLLSLETGSLKLANGRVIEKTLYNRRTRQDEPALFVALTFERREVLDSSNIKPMNLIGIDRGENIPAVIALTDPEGCPLSRFKDSLGNPTHILRIGESYKEKQRTIQAKKEVEQRRAGGYSRKYASKAKNLADDMVRNTARDLLYYAVTQDAMLIFENLSRGFGRQGKRTFMAERQYTRMEDWLTAKLAYEGLSKTYLSKTLAQYTSKTCSNCGFTITSADYDRVLEKLKKTATGWMTTINGKELKVEGQITYYNRRKRQNVVKDLSVELDRLSEESVNNDISSWTKGRSGEALSLLKKRFSHRPVQEKFVCLNCGFETHADEQAALNIARSWLFLRSQEYKKYQTNKTTGNTDKRAFVETWQSFYRKKLKEVWKPAV

SEQ ID NO: 92 - protein, 977 aa, Artificial Sequence
  CasX Variant
MQEIKRINKIRRRLVKDSNTKKAGKTGPMKTLLVRVMTPDLRERLENLRKKPENIPQPISNTSRANLNKLLTDYTEMKKAILHVYWEEFQKDPVGLMSRVAQPAPKNIDQRKLIPVKDGNERLTSSGFACSQCCQPLYVYKLEQVNDKGKPHTNYFGRCNVSEHERLILLSPHKPEANDELVTYSLGKFGQRALDFYSIHVTRESNHPVKPLEQIGGNSCASGPVGKALSDACMGAVASFLTKYQDIILEHQKVIKKNEKRLANLKDIASANGLAFPKITLPPQPHTKEGIEAYNNVVAQIVIWVNLNLWQKLKIGRDEAKPLQRLKGFPSFPLVERQANEVDWWDMVCNVKKLINEKKEDGKVFWQNLAGYKRQEALRPYLSSPEDRKKGKKFARYQFGDLLLHLEKKHGEDWGKVYDEAWERIDKKVEGLSKHIKLEEERRSEDAQSKAALTDWLRAKASFVIEGLKEADKDEFCRCELKLQKWYGDLRGKPFAIEAENSILDISGFSKQYNCAFIWQKDGVKKLNLYLIINYFKGGKLRFKKIKPEAFEANRFYTVINKKSGEIVPMEVNFNFDDPNLIILPLAFGKRQGREFIWNDLLSLETGSLKLANGRVIEKTLYNRRTRQDEPALFVALTFERREVLDSSNIKPMNLIGIDRGENIPAVIALTDPEGCPLSRFKDSLGNPTHILRIGESYKEKQRTIQAKKEVEQRRAGGYSRKYASKAKNLANDMVRNTARDLLYYAVTQDAMLIFENLSRGFGRQGKRTFMAERQYTRMEDWLTAKLAYEGLSKTYLSKTLAQYTSKTCSNCGFTITSADYDRVLEKLKKTATGWMTTINGKELKVEGQITYYNRRKRQNVVKDLSVELDRLSEESVNNDISSWTKGRSGEALSLLKKRFSHRPVQEKFVCLNCGFETHADEQAALNIARSWLFLRSQEYKKYQTNKTTGNTDKRAFVETWQSFYRKKLKEVWKPAV

SEQ ID NO: 93 - protein, 977 aa, Artificial Sequence
  CasX Variant
MQEIKRINKIRRRLVKDSNTKKAGKTGPMKTLLVRVMTPDLRERLENLRKKPENIPQPISNTSRANLNKLLTDYTEMKKAILHVYWEEFQKDPVGLMSRVAQPAPKNIDQRKLIPVKDGNERLTSSGFACSQCCQPLYVYKLEQVNDKGKPHTNYFGRCNVSEHERLILLSPHKPEANDELVTYSLGKFGQRALDFYSIHVTRESNHPVKPLEQIGGNSCASGPVGKALSDACMGAVASFLTKYQDIILEHQKVIKKNEKRLANLKDIASANGLAFPKITLPPQPHTKEGIEAYNNVVAQIVIWVNLNLWQKLKIGRDEAKPLQRLKGFPSFPLVERQANEVDWWDMVCNVKKLINEKKEDGKVFWQNLAGYKRQEALRPYLSSPEDRKKGKKFARYQFGDLLLHLEKKHGEDWGKVYDEAWERIDKKVEGLSKHIKLEEERRSEDAQSKAALTDWLRAKASFVIEGLKEADKDEFCRCELKLQKWYGDLRGKPFAIEAENSILDISGFSKQYNCAFIWQKDGVKKLNLYLIINYFKGGKLRFKKIKPEAFEANRFYTVINKKSGEIVPMEVNFNFDDPNLIILPLAFGKRQGREFIWNDLLSLETGSLKLANGRVIEKTLYNRRTRQDEPALFVALTFERREVLDSSNIKPMNLIGVDRGENIPAVIALTDPEGCPLSRFKDSLGNPTHILRIGESYKEKQRTIQAKKEVEQRRAGGYSRKYASKAKNLANDMVRNTARDLLYYAVTQDAMLIFENLSRGFGRQGKRTFMAERQYTRMEDWLTAKLAYEGLSKTYLSKTLAQYTSKTCSNCGFTITSADYDRVLEKLKKTATGWMTTINGKELKVEGQITYYNRRKRQNVVKDLSVELDRLSEESVNNDISSWTKGRSGEALSLLKKRFSHRPVQEKFVCLNCGFETHADEQAALNIARSWLFLRSQEYKKYQTNKTTGNTDKRAFVETWQSFYRKKLKEVWKPAV

SEQ ID NO: 94 - protein, 977 aa, Artificial Sequence
  CasX Variant
MQEIKRINKIRRRLVKDSNTKKAGKTGPMKTLLVRVMTPDLRERLENLRKKPENIPQPISNTSRANLNKLLTDYTEMKKAILHVYWEEFQKDPVGLMSRVAQPAPKNIDQRKLIPVKDGNERLTSSGFACSQCCQPLYVYKLEQVNDKGKPHTNYFGRCNVSEHERLILLSPHKPEANDELVTYSLGKFGQRALDFYSIHVTRESNHPVKPLEQIGGNSCASGPVGKALSDACMGAVASFLTKYQDIILEHQKVIKKNEKRLANLKDIASANGLAFPKITLPPQPHTKEGIEAYNNVVAQIVIWVNLNLWQKLKIGRDEAKPLQRLKGFPSFPLVERQANEVDWWDMVCNVKKLINEKKEDGKVFWQNLAGYKRQEALRPYLSSPEDRKKGKKFARYQLGDLLLHLEKKHGEDWGKVYDEAWERIDKKVEGLSKHIKLEEERRSEDAQSKAALTDWLRAKASFVIEGLKEADKDEFCRCELKLQKWYGDLRGKPFAIEAENSILDISGFSKQYNCAFIWQKDGVKKLNLYLIINYFKGGKLRFKKIKPEAFEANRFYTVINKKSGEIVPMEVNFNFDDPNLIILPLAFGKRQGREFIWNDLLSLETGSLKLANGRVIEKTLYNRRTRQDEPALFVALTFERREVLDSSNIKPMNLIGVDRGENIPAVIALTDPEGCPLSRFKDSLGNPTHILRIGESYKEKQRTIQAKKEVEQRRAGGYSRKYASKAKNLANDMVRNTARDLLYYAVTQDAMLIFENLSRGFGRQGKRTFMAERQYTRMEDWLTAKLAYEGLSKTYLSKTLAQYTSKTCSNCGFTITSADYDRVLEKLKKTATGWMTTINGKELKVEGQITYYNRRKRQNVVKDLSVELDRLSEESVNNDISSWTKGRSGEALSLLKKRFSHRPVQEKFVCLNCGFETHADEQAALNIARSWLFLRSQEYKKYQTNKTTGNTDKRAFVETWQSFYRKKLKEVWKPAV

SEQ ID NO: 95 - protein, 977 aa, Artificial Sequence
  CasX Variant
MQEIKRINKIRRRLVKDSNTKKAGKTGPMKTLLVRVMTPDLRERLENLRKKPENIPQPISNTSRANLNKLLTDYTEMKKAILHVYWEEFQKDPVGLMSRVAQPAPKNIDQRKLIPVKDGNERLTSSGFACSQCCQPLYVYKLEQVNDKGKPHTNYFGRCNVSEHERLILLSPHKPEANDELVTYSLGKFGQRALDFYSIHVTRESNHPVKPLEQIGGNSCASGPVGKALSDACMGAVASFLTKYQDIILEHQKVIKKNEKRLANLKDIASANGLAFPKITLPPQPHTKEGIEAYNNVVAQIVIWVNLNLWQKLKIGRDEAKPLQRLKGFPSFPLVERQANEVDWWDMVCNVKKLINEKKEDGKVFWQNLAGYKRQEALRPYLSSPNDRKKGKKFARYQFGDLLLHLEKKHGEDWGKVYDEAWERIDKKVEGLSKHIKLEEERRSEDAQSKAALTDWLRAKASFVIEGLKEADKDEFCRCELKLQKWYGDLRGKPFAIEAENSILDISGFSKQYNCAFIWQKDGVKKLNLYLIINYFKGGKLRFKKIKPEAFEANRFYTVINKKSGEIVPMEVNFNFDDPNLIILPLAFGKRQGREFIWNDLLSLETGSLKLANGRVIEKTLYNRRTRQDEPALFVALTFERREVLDSSNIKPMNLIGVDRGENIPAVIALTDPEGCPLSRFKDSLGNPTHILRIGESYKEKQRTIQAKKEVEQRRAGGYSRKYASKAKNLANDMVRNTARDLLYYAVTQDAMLIFENLSRGFGRQGKRTFMAERQYTRMEDWLTAKLAYEGLSKTYLSKTLAQYTSKTCSNCGFTITSADYDRVLEKLKKTATGWMTTINGKELKVEGQITYYNRRKRQNVVKDLSVELDRLSEESVNNDISSWTKGRSGEALSLLKKRFSHRPVQEKFVCLNCGFETHADEQAALNIARSWLFLRSQEYKKYQTNKTTGNTDKRAFVETWQSFYRKKLKEVWKPAV

SEQ ID NO: 96 - protein, 977 aa, Artificial Sequence
  CasX Variant
MQEIKRINKIRRRLVKDSNTKKAGKTGPMKTLLVRVMTPDLRERLENLRKKPENIPQPISNTSRANLNKLLTDYTEMKKAILHVYWEEFQKDPVGLMSRVAQPAPKNIDQRKLIPVKDGNERLTSSGFACSQCCQPLYVYKLEQVNDKGKPHTNYFGRCNVSEHERLILLSPHKPEANDELVTYSLGKFGQRALDFYSIHVTRESNHPVKPLEQIGGNSCASGPVGKALSDACMGAVASFLTKYQDIILEHQKVIKKNEKRLANLKDIASANGLAFPKITLPPQPHTKEGIEAYNNVVAQIVIWVNLNLWQKLKIGRDEAKPLQRLKGFPSFPLVERQANEVDWWDMVCNVKKLINEKKEDGKVFWQNLAGYKRQEALRPYLSSPEDRKKGKKFARYQFGDLLKHLEKKHGEDWGKVYDEAWERIDKKVEGLSKHIKLEEERRSEDAQSKAALTDWLRAKASFVIEGLKEADKDEFCRCELKLQKWYGDLRGKPFAIEAENSILDISGFSKQYNCAFIWQKDGVKKLNLYLIINYFKGGKLRFKKIKPEAFEANRFYTVINKKSGEIVPMEVNFNFDDPNLIILPLAFGKRQGREFIWNDLLSLETGSLKLANGRVIEKTLYNRRTRQDEPALFVALTFERREVLDSSNIKPMNLIGVDRGENIPAVIALTDPEGCPLSRFKDSLGNPTHILRIGESYKEKQRTIQAKKEVEQRRAGGYSRKYASKAKNLANDMVRNTARDLLYYAVTQDAMLIFENLSRGFGRQGKRTFMAERQYTRMEDWLTAKLAYEGLSKTYLSKTLAQYTSKTCSNCGFTITSADYDRVLEKLKKTATGWMTTINGKELKVEGQITYYNRRKRQNVVKDLSVELDRLSEESVNNDISSWTKGRSGEALSLLKKRFSHRPVQEKFVCLNCGFETHADEQAALNIARSWLFLRSQEYKKYQTNKTTGNTDKRAFVETWQSFYRKKLKEVWKPAV

SEQ ID NO: 97 - protein, 977 aa, Artificial Sequence
  CasX Variant
MQEIKRINKIRRRLVKDSNTKKAGKTGPMKTLLVRVMTPDLRERLENLRKKPENIPQPISNTSRANLNKLLTDYTEMKKAILHVYWEEFQKDPVGLMSRVAQPAPKNIDQRKLIPVKDGNERLTSSGFACSQCCQPLYVYKLEQVNDKGKPHTNYFGRCNVSEHERLILLSPHKPEANDELVTYSLGKFGQRALDFYSIHVTRESNHPVKPLEQIGGNSCASGPVGKALSDACMGAVASFLTKYQDIILEHKKVIKKNEKRLANLKDIASANGLAFPKITLPPQPHTKEGIEAYNNVVAQIVIWVNLNLWQKLKIGRDEAKPLQRLKGFPSFPLVERQANEVDWWDMVCNVKKLINEKKEDGKVFWQNLAGYKRQEALRPYLSSPEDRKKGKKFARYQFGDLLLHLEKKHGEDWGKVYDEAWERIDKKVEGLSKHIKLEEERRSEDAQSKAALTDWLRAKASFVIEGLKEADKDEFCRCELKLQKWYGDLRGKPFAIEAENSILDISGFSKQYNCAFIWQKDGVKKLNLYLIINYFKGGKLRFKKIKPEAFEANRFYTVINKKSGEIVPMEVNFNFDDPNLIILPLAFGKRQGREFIWNDLLSLETGSLKLANGRVIEKPLYNRRTRQDEPALFVALTFERREVLDSSNIKPMNLIGIDRGENIPAVIALTDPEGCPLSRFKDSLGNPTHILRIGESYKEKQRTIQAKKEVEQRRAGGYSRKYASKAKNLADDMVRNTARDLLYYAVTQDAMLIFENLSRGFGRQGKRTFMAERQYTRMEDWLTAKLAYEGLSKTYLSKTLAQYTSKTCSNCGFTITSADYDRVLEKLKKTATGWMTTINGKELKVEGQITYYNRRKRQNVVKDLSVELDRLSEESVNNDISSWTKGRSGEALSLLKKRFSHRPVQEKFVCLNCGFETHADEQAALNIARSWLFLRSQEYKKYQTNKTTGNTDKRAFVETWQSFYRKKLKEVWKPAV

SEQ ID NO: 98 - protein, 977 aa, Artificial Sequence
  CasX Variant
MQEIKRINKIRRRLVKDSNTKKAGKTGPMKTLLVRVMTPDLRERLENLRKKPENIPQPISNTSRANLNKLLTDYTEMKKAILHVYWEEFQKDPVGLMSRVAQPAPKNIDQRKLIPVKDGNERLTSSGFACSQCCQPLYVYKLEQVNDKGKPHTNYFGRCNVSEHERLILLSPHKPEANDELVTYSLGKFGQRALDFYSIHVTRESNHPVKPLEQIGGNSCASGPVGKALSDACMGAVASFLTKYQDIILEHKKVIKKNEKRLANLKDIASANGLAFPKITLPPQPHTKEGIEAYNNVVAQIVIWVNLNLWQKLKIGRDEAKPLQRLKGFPSFPLVERQANEVDWWDMVCNVKKLINEKKEDGKVFWQNLAGYKRQEALRPYLSSPEDRKKGKKFARYQFGDLLLHLEKKHGEDWGKVYDEAWERIDKKVEGLSKHIKLEEERRSEDAQSKAALTDWLRAKASFVIEGLKEADKDEFCRCELKLQKWYGDLRGKPFAIEAENSILDISGFSKQYNCAFIWQKDGVKKLNLYLIINYFKGGKLRFKKIKPEAFEANRFYTVINKKSGEIVPMEVNFNFDDPNLIILPLAFGKRQGREFIWNDLLSLETGSLKLANGRVIEKPLYNRRTRQDEPALFVALTFERREVLDSSNIKPMNLIGVDRGENIPAVIALTDPEGCPLSRFKDSLGNPTHILRIGESYKEKQRTIQAKKEVEQRRAGGYSRKYASKAKNLADDMVRNTARDLLYYAVTQDAMLIFENLSRGFGRQGKRTFMAERQYTRMEDWLTAKLAYEGLSKTYLSKTLAQYTSKTCSNCGFTITSADYDRVLEKLKKTATGWMTTINGKELKVEGQITYYNRRKRQNVVKDLSVELDRLSEESVNNDISSWTKGRSGEALSLLKKRFSHRPVQEKFVCLNCGFETHADEQAALNIARSWLFLRSQEYKKYQTNKTTGNTDKRAFVETWQSFYRKKLKEVWKPAV

SEQ ID NO: 99 - protein, 977 aa, Artificial Sequence
  CasX Variant
MQEIKRINKIRRRLVKDSNTKKAGKTGPMKTLLVRVMTPDLRERLENLRKKPENIPQPISNTSRANLNKLLTDYTEMKKAILHVYWEEFQKDPVGLMSRVAQPAPKNIDQRKLIPVKDGNERLTSSGFACSQCCQPLYVYKLEQVNDKGKPHTNYFGRCNVSEHERLILLSPHKPEANDELVTYSLGKFGQRALDFYSIHVTRESNHPVKPLEQIGGNSCASGPVGKALSDACMGAVASFLTKYQDIILEHKKVIKKNEKRLANLKDIASANGLAFPKITLPPQPHTKEGIEAYNNVVAQIVIWVNLNLWQKLKIGRDEAKPLQRLKGFPSFPLVERQANEVDWWDMVCNVKKLINEKKEDGKVFWQNLAGYKRQEALRPYLSSPNDRKKGKKFARYQFGDLLLHLEKKHGEDWGKVYDEAWERIDKKVEGLSKHIKLEEERRSEDAQSKAALTDWLRAKASFVIEGLKEADKDEFCRCELKLQKWYGDLRGKPFAIEAENSILDISGFSKQYNCAFIWQKDGVKKLNLYLIINYFKGGKLRFKKIKPEAFEANRFYTVINKKSGEIVPMEVNFNFDDPNLIILPLAFGKRQGREFIWNDLLSLETGSLKLANGRVIEKPLYNRRTRQDEPALFVALTFERREVLDSSNIKPMNLIGVDRGENIPAVIALTDPEGCPLSRFKDSLGNPTHILRIGESYKEKQRTIQAKKEVEQRRAGGYSRKYASKAKNLADDMVRNTARDLLYYAVTQDAMLIFENLSRGFGRQGKRTFMAERQYTRMEDWLTAKLAYEGLSKTYLSKTLAQYTSKTCSNCGFTITSADYDRVLEKLKKTATGWMTTINGKELKVEGQITYYNRRKRQNVVKDLSVELDRLSEESVNNDISSWTKGRSGEALSLLKKRFSHRPVQEKFVCLNCGFETHADEQAALNIARSWLFLRSQEYKKYQTNKTTGNTDKRAFVETWQSFYRKKLKEVWKPAV

SEQ ID NO: 100 - protein, 835 aa, Homo sapiens
MSRRKQGKPQHLSKREFSPEPLEAILTDDEPDHGPLGAPEGDHDLLTCGQCQMNFPLGDILIFIEHKRKQCNGSLCLEKAVDKPPSPSPIEMKKASNPVEVGIQVTPEDDDCLSTSSRGICPKQEHIADKLLHWRGLSSPRSAHGALIPTPGMSAEYAPQGICKDEPSSYTCTTCKQPFTSAWFLLQHAQNTHGLRIYLESEHGSPLTPRVGIPSGLGAECPSQPPLHGIHIADNNPFNLLRIPGSVSREASGLAEGRFPPTPPLFSPPPRHHLDPHRIERLGAEEMALATHHPSAFDRVLRLNPMAMEPPAMDFSRRLRELAGNTSSPPLSPGRPSPMQRLLQPFQPGSKPPFLATPPLPPLQSAPPPSQPPVKSKSCEFCGKTFKFQSNLVVHRRSHTGEKPYKCNLCDHACTQASKLKRHMKTHMHKSSPMTVKSDDGLSTASSPEPGTSDLVGSASSALKSVVAKFKSENDPNLIPENGDEEEEEDDEEEEEEEEEEEEELTESERVDYGFGLSLEAARHHENSSRGAVVGVGDESRALPDVMQGMVLSSMQHFSEAFHQVLGEKHKRGHLAEAEGHRDTCDEDSVAGESDRIDDGTVNGRGCSPGESASGGLSKKLLLGSPSSLSPFSKRIKLEKEFDLPPAAMPNTENVYSQWLAGYAASRQLKDPFLSFGDSRQSPFASSSEHSSENGSLRFSTPPGELDGGISGRSGTGSGGSTPHISGPGPGRPSSKEGRRSDTCEYCGKVFKNCSNLTVHRRSHTGERPYKCELCNYACAQSSKLTRHMKTHGQVGKDVYKCEICKMPFSVYSTLEKHMKKWHSDRVLNNDIKTE

SEQ ID NO: 101 - protein, 977 aa, Artificial Sequence
  CasX Variant
MQEIKRINKIRRRLVKDSNTKKAGKTGPMKTLLVRVMTPDLRERLENLRKKPENIPQPISNTSRANLNKLLTDYTEMKKAILHVYWEEFQKDPVGLMSRVAQPAPKNIDQRKLIPVKDGNERLTSSGFACSQCCQPLYVYKLEQVNDKGKPHTNYFGRCNVSEHERLILLSPHKPEANDELVTYSLGKFGQRALDFYSIHVTRESNHPVKPLEQIGGNSCASGPVGKALSDACMGAVASFLTKYQDIILEHKKVIKKNEKRLANLKDIASANGLAFPKITLPPQPHTKEGIEAYNNVVAQIVIWVNLNLWQKLKIGRDEAKPLQRLKGFPSFPLVERQANEVDWWDMVCNVKKLINEKKEDGKVFWQNLAGYKRQEALRPYLSSPEDRKKGKKFARYQLGDLLLHLEKKHGEDWGKVYDEAWERIDKKVEGLSKHIKLEEERRSEDAQSKAALTDWLRAKASFVIEGLKEADKDEFCRCELKLQKWYGDLRGKPFAIEAENSILDISGFSKQYNCAFIWQKDGVKKLNLYLIINYFKGGKLRFKKIKPEAFEANRFYTVINKKSGEIVPMEVNFNFDDPNLIILPLAFGKRQGREFIWNDLLSLETGSLKLANGRVIEKPLYNRRTRQDEPALFVALTFERREVLDSSNIKPMNLIGVDRGENIPAVIALTDPEGCPLSRFKDSLGNPTHILRIGESYKEKQRTIQAKKEVEQRRAGGYSRKYASKAKNLADDMVRNTARDLLYYAVTQDAMLIFENLSRGFGRQGKRTFMAERQYTRMEDWLTAKLAYEGLSKTYLSKTLAQYTSKTCSNCGFTITSADYDRVLEKLKKTATGWMTTINGKELKVEGQITYYNRRKRQNVVKDLSVELDRLSEESVNNDISSWTKGRSGEALSLLKKRFSHRPVQEKFVCLNCGFETHADEQAALNIARSWLFLRSQEYKKYQTNKTTGNTDKRAFVETWQSFYRKKLKEVWKPAV

SEQ ID NO: 102 - protein, 977 aa, Artificial Sequence
  CasX Variant
MQEIKRINKIRRRLVKDSNTKKAGKTGPMKTLLVRVMTPDLRERLENLRKKPENIPQPISNTSRANLNKLLTDYTEMKKAILHVYWEEFQKDPVGLMSRVAQPAPKNIDQRKLIPVKDGNERLTSSGFACSQCCQPLYVYKLEQVNDKGKPHTNYFGRCNVSEHERLILLSPHKPEANDELVTYSLGKFGQRALDFYSIHVTRESNHPVKPLEQIGGNSCASGPVGKALSDACMGAVASFLTKYQDIILEHKKVIKKNEKRLANLKDIASANGLAFPKITLPPQPHTKEGIEAYNNVVAQIVIWVNLNLWQKLKIGRDEAKPLQRLKGFPSFPLVERQANEVDWWDMVCNVKKLINEKKEDGKVFWQNLAGYKRQEALRPYLSSPEDRKKGKKFARYQFGDLLKHLEKKHGEDWGKVYDEAWERIDKKVEGLSKHIKLEEERRSEDAQSKAALTDWLRAKASFVIEGLKEADKDEFCRCELKLQKWYGDLRGKPFAIEAENSILDISGFSKQYNCAFIWQKDGVKKLNLYLIINYFKGGKLRFKKIKPEAFEANRFYTVINKKSGEIVPMEVNFNFDDPNLIILPLAFGKRQGREFIWNDLLSLETGSLKLANGRVIEKPLYNRRTRQDEPALFVALTFERREVLDSSNIKPMNLIGVDRGENIPAVIALTDPEGCPLSRFKDSLGNPTHILRIGESYKEKQRTIQAKKEVEQRRAGGYSRKYASKAKNLADDMVRNTARDLLYYAVTQDAMLIFENLSRGFGRQGKRTFMAERQYTRMEDWLTAKLAYEGLSKTYLSKTLAQYTSKTCSNCGFTITSADYDRVLEKLKKTATGWMTTINGKELKVEGQITYYNRRKRQNVVKDLSVELDRLSEESVNNDISSWTKGRSGEALSLLKKRFSHRPVQEKFVCLNCGFETHADEQAALNIARSWLFLRSQEYKKYQTNKTTGNTDKRAFVETWQSFYRKKLKEVWKPAV

SEQ ID NO: 103 - protein, 977 aa, Artificial Sequence
  CasX Variant
MQEIKRINKIRRRLVKDSNTKKAGKTGPMKTLLVRVMTPDLRERLENLRKKPENIPQPISNTSRANLNKLLTDYTEMKKAILHVYWEEFQKDPVGLMSRVAQPAPKNIDQRKLIPVKDGNERLTSSGFACSQCCQPLYVYKLEQVNDKGKPHTNYFGRCNVSEHERLILLSPHKPEANDELVTYSLGKFGQRALDFYSIHVTRESNHPVKPLEQIGGNSCASGPVGKALSDACMGAVASFLTKYQDIILEHQKVIKKNEKRLANLKDIASANGLAFPKITLPPQPHTKEGIEAYNNVVAQIVIWVNLNLWQKLKIGRDEAKPLQRLKGFPSFPLVERQANEVDWWDMVCNVKKLINEKKEDGKVFWQNLAGYKRQEALRPYLSSENDRKKGKKFARYQFGDLLLHLEKKHGEDWGKVYDEAWERIDKKVEGLSKHIKLEEERRSEDAQSKAALTDWLRAKASFVIEGLKEADKDEFCRCELKLQKWYGDLRGKPFAIEAENSILDISGFSKQYNCAFIWQKDGVKKLNLYLIINYFKGGKLRFKKIKPEAFEANRFYTVINKKSGEIVPMEVNFNFDDPNLIILPLAFGKRQGREFIWNDLLSLETGSLKLANGRVIEKPLYNRRTRQDEPALFVALTFERREVLDSSNIKPMNLIGVDRGENIPAVIALTDPEGCPLSRFKDSLGNPTHILRIGESYKEKQRTIQAKKEVEQRRAGGYSRKYASKAKNLADDMVRNTARDLLYYAVTQDAMLIFENLSRGFGRQGKRTFMAERQYTRMEDWLTAKLAYEGLSKTYLSKTLAQYTSKTCSNCGFTITSADYDRVLEKLKKTATGWMTTINGKELKVEGQITYYNRRKRQNVVKDLSVELDRLSEESVNNDISSWTKGRSGEALSLLKKRFSHRPVQEKFVCLNCGFETHADEQAALNIARSWLFLRSQEYKKYQTNKTTGNTDKRAFVETWQSFYRKKLKEVWKPAV

SEQ ID NO: 104 - protein, 977 aa, Artificial Sequence
  CasX Variant
MQEIKRINKIRRRLVKDSNTKKAGKTGPMKTLLVRVMTPDLRERLENLRKKPENIPQPISNTSRANLNKLLTDYTEMKKAILHVYWEEFQKDPVGLMSRVAQPAPKNIDQRKLIPVKDGNERLTSSGFACSQCCQPLYVYKLEQVNDKGKPHTNYFGRCNVSEHERLILLSPHKPEANDELVTYSLGKFGQRALDFYSIHVTRESNHPVKPLEQIGGNSCASGPVGKALSDACMGAVASFLTKYQDIILEHKKVIKKNEKRLANLKDIASANGLAFPKITLPPQPHTKEGIEAYNNVVAQIVIWVNLNLWQKLKIGRDEAKPLQRLKGFPSFPLVERQANEVDWWDMVCNVKKLINEKKEDGKVFWQNLAGYKRQEALRPYLSSPEDRKKGKKFARYQFGDLLLHLEKKHGEDWGKVYDEAWERIDKKVEGLSKHIKLEEERRSEDAQSKAALTDWLRAKASFVIEGLKEADKDEFCRCELKLQKWYGDLRGKPFAIEAENSILDISGFSKQYNCAFIWQKDGVKKLNLYLIINYFKGGKLRFKKIKPEAFEANRFYTVINKKSGEIVPMEVNFNFDDPNLIILPLAFGKRQGREFIWNDLLSLETGSLKLANGRVIEKPLYNRRTRQDEPALFVALTFERREVLDSSNIKPMNLIGIDRGENIPAVIALTDPEGCPLSRFKDSLGNPTHILRIGESYKEKQRTIQAKKEVEQRRAGGYSRKYASKAKNLADDMVRNTARDLLYYAVTQDAMLIFENLSRGFGRQGKRTFMAERQYTRMEDWLTAKLAYEGLSKTYLSKTLAQYTSKTCSNCGFTITSADYDRVLEKLKKTATGWMTTINGKELKVEGQITYYNRYKRQNVVKDLSVELDRLSEESVNNDISSWTKGRSGEALSLLKKRFSHRPVQEKFVCLNCGFETHADEQAALNIARSWLFLRSQEYKKYQTNKTTGNTDKRAFVETWQSFYRKKLKEVWKPAV

SEQ ID NO: 105 - protein, 976 aa, Artificial Sequence
  CasX Variant
QEIKRINKIRRRLVKDSNTKKAGKTGPMKTLLVRVMTPDLRERLENLRKKPENIPQPISNTSRANLNKLLTDYTEMKKAILHVYWEEFQKDPVGLMSRVAQPAPKNIDQRKLIPVKDGNERLTSSGFACSQCCQPLYVYKLEQVNDKGKPHTNYFGRCNVSEHERLILLSPHKPEANDELVTYSLGKFGQRALDFYSIHVTRESNHPVKPLEQIGGNSCASGPVGKALSDACMGAVASFLTKYQDIILEHQKVIKKNEKRLANLKDIASANGLAFPKITLPPQPHTKEGIEAYNNVVAQIVIWVNLNLWQKLKIGRDEAKPLQRLKGFPSFPLVERQANEVDWWDMVCNVKKLINEKKEDGKVFWQNLAGYKRQEALRPYLSSEEDRKKGKKFARYQFGDLLLHLEKKHGEDWGKVYDEAWERIDKKVEGLSKHIKLEEERRSEDAQSKAALTDWLRAKASFVIEGLKEADKDEFCRCELKLQKWYGDLRGKPFAIEAENSILDISGFSKQYNCAFIWQKDGVKKLNLYLIINYFKGGKLRFKKIKPEAFEANRFYTVINKKSGEIVPMEVNFNFDDPNLIILPLAFGKRQGREFIWNDLLSLETGSLKLANGRVIEKTLYNRRTRQDEPALFVALTFERREVLDSSNIKPMNLIGIDRGENIPAVIALTDPEGCPLSRFKDSLGNPTHILRIGESYKEKQRTIQAKKEVEQRRAGGYSRKYASKAKNLADDMVRNTARDLLYYAVTQDAMLIFENLSRGFGRQGKRTFMAERQYTRMEDWLTAKLAYEGLSKTYLSKTLAQYTSKTCSNCGFTITSADYDRVLEKLKKTATGWMTTINGKELKVEGQITYYNRYKRQNVVKDLSVELDRLSEESVNNDISSWTKGRSGEALSLLKKRFSHRPVQEKFVCLNCGFETHADEQAALNIARSWLFLRSQEYKKYQTNKTTGNTDKRAFVETWQSFYRKKLKEVWKPAV

SEQ ID NO: 106 - protein, 977 aa, Artificial Sequence; identical to SEQ ID NO: 59
  CasX Variant

SEQ ID NO: 107 - protein, 977 aa, Artificial Sequence; identical to SEQ ID NO: 59
  CasX Variant

SEQ ID NO: 108 - protein, 977 aa, Artificial Sequence; identical to SEQ ID NO: 59
  CasX Variant

SEQ ID NO: 109 - protein, 977 aa, Artificial Sequence; identical to SEQ ID NO: 59
  CasX Variant

SEQ ID NO: 110 - protein, 977 aa, Artificial Sequence; identical to SEQ ID NO: 59
  CasX Variant

SEQ ID NO: 111 - protein, 978 aa, Artificial Sequence
  CasX Variant
MQEIKRINKIRRRLVKDSNTKKAGKTGPMKTLLVRVMTPDLRERLENLRKKPENIPQPISNTSRANLNKLLTDYTEMKKAILHVYWEEFQKDPVGLMSRVAQPAPKNIDQRKLIPVKDGNERLTMSSGFACSQCCQPLYVYKLEQVNDKGKPHTNYFGRCNVSEHERLILLSPHKPEANDELVTYSLGKFGQRALDFYSIHVTRESNHPVKPLEQIGGNSCASGPVGKALSDACMGAVASFLTKYQDIILEHQKVIKKNEKRLANLKDIASANGLAFPKITLPPQPHTKEGIEAYNNVVAQIVIWVNLNLWQKLKIGRDEAKPLQRLKGFPSFPLVERQANEVDWWDMVCNVKKLINEKKEDGKVFWQNLAGYKRQEALRPYLSSEEDRKKGKKFARYQFGDLLLHLEKKHGEDWGKVYDEAWERIDKKVEGLSKHIKLEEERRSEDAQSKAALTDWLRAKASFVIEGLKEADKDEFCRCELKLQKWYGDLRGKPFAIEAENSILDISGFSKQYNCAFIWQKDGVKKLNLYLIINYFKGGKLRFKKIKPEAFEANRFYTVINKKSGEIVPMEVNFNFDDPNLIILPLAFGKRQGREFIWNDLLSLETGSLKLANGRVIEKTLYNRRTRQDEPALFVALTFERREVLDSSNIKPMNLIGIDRGENIPAVIALTDPEGCPLSRFKDSLGNPTHILRIGESYKEKQRTIQAKKEVEQRRAGGYSRKYASKAKNLADDMVRNTARDLLYYAVTQDAMLIFENLSRGFGRQGKRTFMAERQYTRMEDWLTAKLAYEGLSKTYLSKTLAQYTSKTCSNCGFTITSADYDRVLEKLKKTATGWMTTINGKELKVEGQITYYNRYKRQNVVKDLSVELDRLSEESVNNDISSWTKGRSGEALSLLKKRFSHRPVQEKFVCLNCGFETHADEQAALNIARSWLFLRSQEYKKYQTNKTTGNTDKRAFVETWQSFYRKKLKEVWKPAV

SEQ ID NO: 112 - protein, 977 aa, Artificial Sequence; identical to SEQ ID NO: 59
  CasX Variant

SEQ ID NO: 113 - protein, 977 aa, Artificial Sequence; identical to SEQ ID NO: 59
  CasX Variant

SEQ ID NO: 114 - protein, 977 aa, Artificial Sequence; identical to SEQ ID NO: 59
  CasX Variant

SEQ ID NO: 115 - protein, 977 aa, Artificial Sequence; identical to SEQ ID NO: 59
  CasX Variant

SEQ ID NO: 116 - protein, 977 aa, Artificial Sequence; identical to SEQ ID NO: 59
  CasX Variant

SEQ ID NO: 117 - protein, 977 aa, Artificial Sequence; identical to SEQ ID NO: 59
  CasX Variant

SEQ ID NO: 118 - protein, 977 aa, Artificial Sequence
  CasX Variant
QEIKRINKIRRRLVKDSNTKKAGKTGPMKTLLVRVMTPDLRERLENLRKKPENIPQPISNTSRANLNKLLTDYTEMKKAILHVYWEEFQKDPVGLMSRVAQPASKKIDQNKLKPEMDEKGNLTTAGFACSQCGQPLFVYKLEQVSEKGKAYTNYFGRCNVAEHEKLILLAQLKPEKDSDEAVTYSLGKFGQRALDFYSIHVTRESNHPVKPLEQIGGNSCASGPVGKALSDACMGAVASFLTKYQDIILEHQKVIKKNEKRLANLKDIASANGLAFPKITLPPQPHTKEGIEAYNNVVAQIVIWVNLNLWQKLKIGRDEAKPLQRLKGFPSFPLVERQANEVDWWDMVCNVKKLINEKKEDGKVFWQNLAGYKRQEALRPYLSSEEDRKKGKKFARYQFGDLLLHLEKKHGEDWGKVYDEAWERIDKKVEGLSKHIKLEEERRSEDAQSKAALTDWLRAKASFVIEGLKEADKDEFCRCELKLQKWYGDLRGKPFAIEAENSILDISGFSKQYNCAFIWQKDGVKKLNLYLIINYFKGGKLRFKKIKPEAFEANRFYTVINKKSGEIVPMEVNFNFDDPNLIILPLAFGKRQGREFIWNDLLSLETGSLKLANGRVIEKTLYNRRTRQDEPALFVALTFERREVLDSSNIKPMNLIGIDRGENIPAVIALTDPEGCPLSRFKDSLGNPTHILRIGESYKEKQRTIQAKKEVEQRRAGGYSRKYASKAKNLADDMVRNTARDLLYYAVTQDAMLIFENLSRGFGRQGKRTFMAERQYTRMEDWLTAKLAYEGLSKTYLSKTLAQYTSKTCSNCGFTITSADYDRVLEKLKKTATGWMTTINGKELKVEGQITYYNRYKRQNVVKDLSVELDRLSEESVNNDISSWTKGRSGEALSLLKKRFSHRPVQEKFVCLNCGFETHADEQAALNIARSWLFLRSQEYKKYQTNKTTGNTDKRAFVETWQSFYRKKLKEVWKPAV

SEQ ID NO: 119 - protein, 976 aa, Artificial Sequence
  CasX Variant
QEIKRINKIRRRLVKDSNTKKAGKTGPMKTLLVRVMTPDLRERLENLRKKPENIPQPISNTSRANLNKLLTDYTEMKKAILHVYWEEFQKDPVGLMSRVAQPAPKNIDQRKLIPVKDGNERLTSSGFACSQCCQPLYVYKLEQVNDKGKPHTNYFGRCNVSEHERLILLSPHKPEANDELVTYSLGKFGQRALDFYSIHVTKESTHPVKPLAQIAGNRYASGPVGKALSDACMGTIASFLSKYQDIIIEHQKVVKGNQKRLESLRELAGKENLEYPSVTLPPQPHTKEGVDAYNEVIARVRMWVNLNLWQKLKLSRDDAKPLLRLKGFPSFPLVERQANEVDWWDMVCNVKKLINEKKEDGKVFWQNLAGYKRQEALRPYLSSEEDRKKGKKFARYQFGDLLLHLEKKHGEDWGKVYDEAWERIDKKVEGLSKHIKLEEERRSEDAQSKAALTDWLRAKASFVIEGLKEADKDEFCRCELKLQKWYGDLRGKPFAIEAENSILDISGFSKQYNCAFIWQKDGVKKLNLYLIINYFKGGKLRFKKIKPEAFEANRFYTVINKKSGEIVPMEVNFNFDDPNLIILPLAFGKRQGREFIWNDLLSLETGSLKLANGRVIEKTLYNRRTRQDEPALFVALTFERREVLDSSNIKPMNLIGIDRGENIPAVIALTDPEGCPLSRFKDSLGNPTHILRIGESYKEKQRTIQAKKEVEQRRAGGYSRKYASKAKNLADDMVRNTARDLLYYAVTQDAMLIFENLSRGFGRQGKRTFMAERQYTRMEDWLTAKLAYEGLSKTYLSKTLAQYTSKTCSNCGFTITSADYDRVLEKLKKTATGWMTTINGKELKVEGQITYYNRYKRQNVVKDLSVELDRLSEESVNNDISSWTKGRSGEALSLLKKRFSHRPVQEKFVCLNCGFETHADEQAALNIARSWLFLRSQEYKKYQTNKTTGNTDKRAFVETWQSFYRKKLKEVWKPAV

SEQ ID NO: 120 - protein, 976 aa, Artificial Sequence
  CasX Variant
QEIKRINKIRRRLVKDSNTKKAGKTGPMKTLLVRVMTPDLRERLENLRKKPENIPQPISNTSRANLNKLLTDYTEMKKAILHVYWEEFQKDPVGLMSRVAQPAPKNIDQRKLIPVKDGNERLTSSGFACSQCCQPLYVYKLEQVNDKGKPHTNYFGRCNVSEHERLILLSPHKPEANDELVTYSLGKFGQRALDFYSIHVTKESTHPVKPLAQIAGNRYASGPVGKALSDACMGTIASFLSKYQDIIIEHQKVVKGNQKRLESLRELAGKENLEYPSVTLPPQPHTKEGVDAYNEVIARVRMWVNLNLWQKLKLSRDDAKPLLRLKGFPSFPLVERQANEVDWWDMVCNVKKLINEKKEDGKVFWQNLAGYKRQEALRPYLSSEEDRKKGKKFARYQLGDLLLHLEKKHGEDWGKVYDEAWERIDKKVEGLSKHIKLEEERRSEDAQSKAALTDWLRAKASFVIEGLKEADKDEFCRCELKLQKWYGDLRGKPFAIEAENSILDISGFSKQYNCAFIWQKDGVKKLNLYLIINYFKGGKLRFKKIKPEAFEANRFYTVINKKSGEIVPMEVNFNFDDPNLIILPLAFGKRQGREFIWNDLLSLETGSLKLANGRVIEKTLYNRRTRQDEPALFVALTFERREVLDSSNIKPMNLIGVDRGENIPAVIALTDPEGCPLSRFKDSLGNPTHILRIGESYKEKQRTIQAKKEVEQRRAGGYSRKYASKAKNLADDMVRNTARDLLYYAVTQDAMLIFENLSRGFGRQGKRTFMAERQYTRMEDWLTAKLAYEGLSKTYLSKTLAQYTSKTCSNCGFTITSADYDRVLEKLKKTATGWMTTINGKELKVEGQITYYNRRKRQNVVKDLSVELDRLSEESVNNDISSWTKGRSGEALSLLKKRFSHRPVQEKFVCLNCGFETHADEQAALNIARSWLFLRSQEYKKYQTNKTTGNTDKRAFVETWQSFYRKKLKEVWKPAV

SEQ ID NO: 121 - protein, 976 aa, Artificial Sequence
  CasX Variant
QEIKRINKIRRRLVKDSNTKKAGKTGPMKTLLVRVMTPDLRERLENLRKKPENIPQPISNTSRANLNKLLTDYTEMKKAILHVYWEEFQKDPVGLMSRVAQPAPKNIDQRKLIPVKDGNERLTSSGFACSQCCQPLYVYKLEQVNDKGKPHTNYFGRCNVSEHERLILLSPHKPEANDELVTYSLGKFGQRALDFYSIHVTKESTHPVKPLAQIAGNRYASGPVGKALSDACMGTIASFLSKYQDIIIEHQKVVKGNQKRLESLRELAGKENLEYPSVTLPPQPHTKEGVDAYNEVIARVRMWVNLNLWQKLKLSRDDAKPLLRLKGFPSFPLVERQANEVDWWDMVCNVKKLINEKKEDGKVFWQNLAGYKRQEALRPYLSSEEDRKKGKKFARYQLGDLLKHLEKKHGEDWGKVYDEAWERIDKKVEGLSKHIKLEEERRSEDAQSKAALTDWLRAKASFVIEGLKEADKDEFCRCELKLQKWYGDLRGKPFAIEAENSILDISGFSKQYNCAFIWQKDGVKKLNLYLIINYFKGGKLRFKKIKPEAFEANRFYTVINKKSGEIVPMEVNFNFDDPNLIILPLAFGKRQGREFIWNDLLSLETGSLKLANGRVIEKTLYNRRTRQDEPALFVALTFERREVLDSSNIKPMNLIGVDRGENIPAVIALTDPEGCPLSRFKDSLGNPTHILRIGESYKEKQRTIQAKKEVEQRRAGGYSRKYASKAKNLADDMVRNTARDLLYYAVTQDAMLIFENLSRGFGRQGKRTFMAERQYTRMEDWLTAKLAYEGLSKTYLSKTLAQYTSKTCSNCGFTITSADYDRVLEKLKKTATGWMTTINGKELKVEGQITYYNRRKRQNVVKDLSVELDRLSEESVNNDISSWTKGRSGEALSLLKKRFSHRPVQEKFVCLNCGFETHADEQAALNIARSWLFLRSQEYKKYQTNKTTGNTDKRAFVETWQSFYRKKLKEVWKPAV

SEQ ID NO: 122 - protein, 976 aa, Artificial Sequence
  CasX Variant
QEIKRINKIRRRLVKDSNTKKAGKTGPMKTLLVRVMTPDLRERLENLRKKPENIPQPISNTSRANLNKLLTDYTEMKKAILHVYWEEFQKDPVGLMSRVAQPAPKNIDQRKLIPVKDGNERLTSSGFACSQCCQPLYVYKLEQVNDKGKPHTNYFGRCNVSEHERLILLSPHKPEANDELVTYSLGKFGQRALDFYSIHVTKESTHPVKPLAQIAGNRYASGPVGKALSDACMGTIASFLSKYQDIIIEHQKVVKGNQKRLESLRELAGKENLEYPSVTLPPQPHTKEGVDAYNEVIARVRMWVNLNLWQKLKLSRDDAKPLLRLKGFPSFPLVERQANEVDWWDMVCNVKKLINEKKEDGKVFWQNLAGYKRQEALRPYLSSEEDRKKGKKFARYQLGDLLLHLEKKHGEDWGKVYDEAWERIDKKVEGLSKHIKLEEERRSEDAQSKAALTDWLRAKASFVIEGLKEADKDEFCRCELKLQKWYGDLRGKPFAIEAENSILDISGFSKQYNCAFIWQKDGVKKLNLYLIINYFKGGKLRFKKIKPEAFEANRFYTVINKKSGEIVPMEVNFNFDDPNLIILPLAFGKRQGREFIWNDLLSLETGSLKLANGRVIEKTLYNRRTRQDEPALFVALTFERREVLDSSNIKPMNLIGVDRGENIPAVIALTDPEGCPLSRFKDSLGNPTHILRIGESYKEKQRTIQAKKEVEQRRAGGYSRKYASKAKNLADDMVRNTARDLLYYAVTQDAMLIFENLSRGFGRQGKRTFMAERQYTRMEDWLTAKLAYEGLSKTYLSKTLAQYTSKTCSNCGFTITSADYDRVLEKLKKTATGWMTTINGKELKVEGQITYYNRYKRQNVVKDLSVELDRLSEESVNNDISSWTKGRSGEALSLLKKRFSHRPVQEKFVCLNCGFETHADEQAALNIARSWLFLRSQEYKKYQTNKTTGNTDKRAFVETWQSFYRKKLKEVWKPAV

SEQ ID NO: 123 - protein, 977 aa, Artificial Sequence
  CasX Variant
QEIKRINKIRRRLVKDSNTKKAGKTGPMKTLLVRVMTPDLRERLENLRKKPENIPQPISNTSRANLNKLLTDYTEMKKAILHVYWEEFQKDPVGLMSRVAQPASKKIDQNKLKPEMDEKGNLTTAGFACSQCGQPLFVYKLEQVSEKGKAYTNYFGRCNVAEHEKLILLAQLKPEKDSDEAVTYSLGKFGQRALDFYSIHVTKESTHPVKPLAQIAGNRYASGPVGKALSDACMGTIASFLSKYQDIIIEHQKVVKGNQKRLESLRELAGKENLEYPSVTLPPQPHTKEGVDAYNEVIARVRMWVNLNLWQKLKLSRDDAKPLLRLKGFPSFPLVERQANEVDWWDMVCNVKKLINEKKEDGKVFWQNLAGYKRQEALRPYLSSEEDRKKGKKFARYQFGDLLLHLEKKHGEDWGKVYDEAWERIDKKVEGLSKHIKLEEERRSEDAQSKAALTDWLRAKASFVIEGLKEADKDEFCRCELKLQKWYGDLRGKPFAIEAENSILDISGFSKQYNCAFIWQKDGVKKLNLYLIINYFKGGKLRFKKIKPEAFEANRFYTVINKKSGEIVPMEVNFNFDDPNLIILPLAFGKRQGREFIWNDLLSLETGSLKLANGRVIEKTLYNRRTRQDEPALFVALTFERREVLDSSNIKPMNLIGIDRGENIPAVIALTDPEGCPLSRFKDSLGNPTHILRIGESYKEKQRTIQAKKEVEQRRAGGYSRKYASKAKNLADDMVRNTARDLLYYAVTQDAMLIFENLSRGFGRQGKRTFMAERQYTRMEDWLTAKLAYEGLSKTYLSKTLAQYTSKTCSNCGFTITSADYDRVLEKLKKTATGWMTTINGKELKVEGQITYYNRYKRQNVVKDLSVELDRLSEESVNNDISSWTKGRSGEALSLLKKRFSHRPVQEKFVCLNCGFETHADEQAALNIARSWLFLRSQEYKKYQTNKTTGNTDKRAFVETWQSFYRKKLKEVWKPAV

SEQ ID NO: 124 - protein, 977 aa, Artificial Sequence
  CasX Variant
QEIKRINKIRRRLVKDSNTKKAGKTGPMKTLLVRVMTPDLRERLENLRKKPENIPQPISNTSRANLNKLLTDYTEMKKAILHVYWEEFQKDPVGLMSRVAQPASKKIDQNKLKPEMDEKGNLTTAGFACSQCGQPLFVYKLEQVSEKGKAYTNYFGRCNVAEHEKLILLAQLKPEKDSDEAVTYSLGKFGQRALDFYSIHVTKESTHPVKPLAQIAGNRYASGPVGKALSDACMGTIASFLSKYQDIIIEHQKVVKGNQKRLESLRELAGKENLEYPSVTLPPQPHTKEGVDAYNEVIARVRMWVNLNLWQKLKLSRDDAKPLLRLKGFPSFPLVERQANEVDWWDMVCNVKKLINEKKEDGKVFWQNLAGYKRQEALRPYLSSEEDRKKGKKFARYQLGDLLLHLEKKHGEDWGKVYDEAWERIDKKVEGLSKHIKLEEERRSEDAQSKAALTDWLRAKASFVIEGLKEADKDEFCRCELKLQKWYGDLRGKPFAIEAENSILDISGFSKQYNCAFIWQKDGVKKLNLYLIINYFKGGKLRFKKIKPEAFEANRFYTVINKKSGEIVPMEVNFNFDDPNLIILPLAFGKRQGREFIWNDLLSLETGSLKLANGRVIEKTLYNRRTRQDEPALFVALTFERREVLDSSNIKPMNLIGVDRGENIPAVIALTDPEGCPLSRFKDSLGNPTHILRIGESYKEKQRTIQAKKEVEQRRAGGYSRKYASKAKNLADDMVRNTARDLLYYAVTQDAMLIFENLSRGFGRQGKRTFMAERQYTRMEDWLTAKLAYEGLSKTYLSKTLAQYTSKTCSNCGFTITSADYDRVLEKLKKTATGWMTTINGKELKVEGQITYYNRRKRQNVVKDLSVELDRLSEESVNNDISSWTKGRSGEALSLLKKRFSHRPVQEKFVCLNCGFETHADEQAALNIARSWLFLRSQEYKKYQTNKTTGNTDKRAFVETWQSFYRKKLKEVWKPAV

SEQ ID NO: 125 - protein, 977 aa, Artificial Sequence
  CasX Variant
QEIKRINKIRRRLVKDSNTKKAGKTGPMKTLLVRVMTPDLRERLENLRKKPENIPQPISNTSRANLNKLLTDYTEMKKAILHVYWEEFQKDPVGLMSRVAQPASKKIDQNKLKPEMDEKGNLTTAGFACSQCGQPLFVYKLEQVSEKGKAYTNYFGRCNVAEHEKLILLAQLKPEKDSDEAVTYSLGKFGQRALDFYSIHVTKESTHPVKPLAQIAGNRYASGPVGKALSDACMGTIASFLSKYQDIIIEHQKVVKGNQKRLESLRELAGKENLEYPSVTLPPQPHTKEGVDAYNEVIARVRMWVNLNLWQKLKLSRDDAKPLLRLKGFPSFPLVERQANEVDWWDMVCNVKKLINEKKEDGKVFWQNLAGYKRQEALRPYLSSEEDRKKGKKFARYQLGDLLKHLEKKHGEDWGKVYDEAWERIDKKVEGLSKHIKLEEERRSEDAQSKAALTDWLRAKASFVIEGLKEADKDEFCRCELKLQKWYGDLRGKPFAIEAENSILDISGFSKQYNCAFIWQKDGVKKLNLYLIINYFKGGKLRFKKIKPEAFEANRFYTVINKKSGEIVPMEVNFNFDDPNLIILPLAFGKRQGREFIWNDLLSLETGSLKLANGRVIEKTLYNRRTRQDEPALFVALTFERREVLDSSNIKPMNLIGVDRGENIPAVIALTDPEGCPLSRFKDSLGNPTHILRIGESYKEKQRTIQAKKEVEQRRAGGYSRKYASKAKNLADDMVRNTARDLLYYAVTQDAMLIFENLSRGFGRQGKRTFMAERQYTRMEDWLTAKLAYEGLSKTYLSKTLAQYTSKTCSNCGFTITSADYDRVLEKLKKTATGWMTTINGKELKVEGQITYYNRRKRQNVVKDLSVELDRLSEESVNNDISSWTKGRSGEALSLLKKRFSHRPVQEKFVCLNCGFETHADEQAALNIARSWLFLRSQEYKKYQTNKTTGNTDKRAFVETWQSFYRKKLKEVWKPAV

SEQ ID NO: 126 - protein, 977 aa, Artificial Sequence
  CasX Variant
QEIKRINKIRRRLVKDSNTKKAGKTGPMKTLLVRVMTPDLRERLENLRKKPENIPQPISNTSRANLNKLLTDYTEMKKAILHVYWEEFQKDPVGLMSRVAQPASKKIDQNKLKPEMDEKGNLTTAGFACSQCGQPLFVYKLEQVSEKGKAYTNYFGRCNVAEHEKLILLAQLKPEKDSDEAVTYSLGKFGQRALDFYSIHVTKESTHPVKPLAQIAGNRYASGPVGKALSDACMGTIASFLSKYQDIIIEHQKVVKGNQKRLESLRELAGKENLEYPSVTLPPQPHTKEGVDAYNEVIARVRMWVNLNLWQKLKLSRDDAKPLLRLKGFPSFPLVERQANEVDWWDMVCNVKKLINEKKEDGKVFWQNLAGYKRQEALRPYLSSEEDRKKGKKFARYQLGDLLLHLEKKHGEDWGKVYDEAWERIDKKVEGLSKHIKLEEERRSEDAQSKAALTDWLRAKASFVIEGLKEADKDEFCRCELKLQKWYGDLRGKPFAIEAENSILDISGFSKQYNCAFIWQKDGVKKLNLYLIINYFKGGKLRFKKIKPEAFEANRFYTVINKKSGEIVPMEVNFNFDDPNLIILPLAFGKRQGREFIWNDLLSLETGSLKLANGRVIEKTLYNRRTRQDEPALFVALTFERREVLDSSNIKPMNLIGVDRGENIPAVIALTDPEGCPLSRFKDSLGNPTHILRIGESYKEKQRTIQAKKEVEQRRAGGYSRKYASKAKNLADDMVRNTARDLLYYAVTQDAMLIFENLSRGFGRQGKRTFMAERQYTRMEDWLTAKLAYEGLSKTYLSKTLAQYTSKTCSNCGFTITSADYDRVLEKLKKTATGWMTTINGKELKVEGQITYYNRYKRQNVVKDLSVELDRLSEESVNNDISSWTKGRSGEALSLLKKRFSHRPVQEKFVCLNCGFETHADEQAALNIARSWLFLRSQEYKKYQTNKTTGNTDKRAFVETWQSFYRKKLKEVWKPAV

SEQ ID NO: 127 - protein, 977 aa, Artificial Sequence
  CasX Variant
QEIKRINKIRRRLVKDSNTKKAGKTGPMKTLLVRVMTPDLRERLENLRKKPENIPQPISNTSRANLNKLLTDYTEMKKAILHVYWEEFQKDPVGLMSRVAQPASKKIDQNKLKPEMDEKGNLTTAGFACSQCGQPLFVYKLEQVSEKGKAYTNYFGRCNVAEHEKLILLAQLKPEKDSDEAVTYSLGKFGQRALDFYSIHVTRESNHPVKPLEQIGGNSCASGPVGKALSDACMGAVASFLTKYQDIILEHQKVIKKNEKRLANLKDIASANGLAFPKITLPPQPHTKEGIEAYNNVVAQIVIWVNLNLWQKLKIGRDEAKPLQRLKGFPSFPLVERQANEVDWWDMVCNVKKLINEKKEDGKVFWQNLAGYKRQEALRPYLSSEEDRKKGKKFARYQLGDLLLHLEKKHGEDWGKVYDEAWERIDKKVEGLSKHIKLEEERRSEDAQSKAALTDWLRAKASFVIEGLKEADKDEFCRCELKLQKWYGDLRGKPFAIEAENSILDISGFSKQYNCAFIWQKDGVKKLNLYLIINYFKGGKLRFKKIKPEAFEANRFYTVINKKSGEIVPMEVNFNFDDPNLIILPLAFGKRQGREFIWNDLLSLETGSLKLANGRVIEKTLYNRRTRQDEPALFVALTFERREVLDSSNIKPMNLIGVDRGENIPAVIALTDPEGCPLSRFKDSLGNPTHILRIGESYKEKQRTIQAKKEVEQRRAGGYSRKYASKAKNLADDMVRNTARDLLYYAVTQDAMLIFENLSRGFGRQGKRTFMAERQYTRMEDWLTAKLAYEGLSKTYLSKTLAQYTSKTCSNCGFTITSADYDRVLEKLKKTATGWMTTINGKELKVEGQITYYNRYKRQNVVKDLSVELDRLSEESVNNDISSWTKGRSGEALSLLKKRFSHRPVQEKFVCLNCGFETHADEQAALNIARSWLFLRSQEYKKYQTNKTTGNTDKRAFVETWQSFYRKKLKEVWKPAV

SEQ ID NO: 128 - protein, 978 aa, Artificial Sequence
  CasX Variant
MQEIKRINKIRRRLVKDSNTKKAGKTGPMKTLLVRVMTPDLRERLENLRKKPENIPQPISNTSRANLNKLLTDYTEMKKAILHVYWEEFQKDPVGLMSRVAQPAPKNIDQRKLIPVKDGNERLTSSGFACSQCCQPLYVYKLEQVNDKGKPHTNYFGRCNVSEHERLILLSPHKPEANDELVTYSLGKFGQRALDFYSIHVTRESNHPVKPLEQIGGNSCASGPVGKALSDACMGAVASFLTKYQDIILEHQKVIKKNEKRLANLKDIASANGLAFPKITLPPQPHTKEGIEAYNNVVAQIVIWVNLNLWQKLKIGRDEAKPLQRLKGFPSFPLVERQANEVDWWDMVCNVKKLINEKKEDGKVFWQNLAGYKRQEALLPYLSSEEDRKKGKKFARYQFGDLLLHLEKKHGEDWGKVYDEAWERIDKKVEGLSKHIKLEEERRSEDAQSKAALTDWLRAKASFVIEGLKEADKDEFCRCELKLQKWYGDLRGKPFAIEAENSILDISGFSKQYNCAFIWQKDGVKKLNLYLIINYFKGGKLRFKKIKPEAFEANRFYTVINKKSGEIVPMEVNFNFDDPNLIILPLAFGKRQGREFIWNDLLSLETGSLKLANGRVIEKTLYNRRTRQDEPALFVALTFERREVLDSSNIKPMNLIGIDRGENIPAVIALTDPEGCPLSRFKDSLGNPTHILRIGESYKEKQRTIQAAKEVEQRRAGGYSRKYASKAKNLADDMVRNTARDLLYYAVTQDAMLIFENLSRGFGRQGKRTFMAERQYTRMEDWLTAKLAYEGLPSKTYLSKTLAQYTSKTCSNCGFTITSADYDRVLEKLKKTATGWMTTINGKELKVEGQITYYNRYKRQNVVKDLGVELDRLSEESVNNDISSWTKGRSGEALSLLKKRFSHRPVQEKFVCLNCGFETHADEQAALNIARSWLFLRSQEYKKYQTNKTTGNTDKRAFVETWQSFYRKKLKEVWKPAV

SEQ ID NO: 129 - protein, 986 aa, Artificial Sequence; identical to SEQ ID NO: 43
  CasX Variant

SEQ ID NO: 130 - protein, 978 aa, Artificial Sequence
  CasX Variant
MQEIKRINKIRRRLVKDSNTKKAGKTGPMKTLLVRVMTPDLRERLENLRKKPENIPQPISNTSRANLNKLLTDYTEMKKAILHVYWEEFQKDPVGLMSRVAQPAPKNIDQRKLIPVKDGNERLTSSGFACSQCCQPLYVYKLEQVNDKGKPHTNYFGRCNVSEHERLILLSPHKPEANDELVTYSLGKFGQRALDFYSIHVTRESNHPVKPLEQIGGNSCASGPVGKALSDACMGAVASFLTKYQDIILEHQKVIKKNEKRLANLKDIASANGLAFPKITLPPQPHTKEGIEAYNNVVAQIVIWVNLNLWQKLKIGRDEAKPLQRLKGFPSFPLVERQANEVDWWDMVCNVKKLINEKKEDGKVFWQNLAGYKRQEALRPYLSSEEDRKKGKKFARYQFGDLLLHLEKKHGEDWGKVYDEAWERIDKKVEGLSKHIKLEEERRSEDAQSKAALTDWLRAKASFVIEGLKEADKDEFCRCELKLQKWYGDLRGKPFAIEAENSILDISGFSKQYNCAFIWQKDGVKKLNLYLIINYFKGGKLRFKKIKPEAFEANRFYTVINKKSGEIVPMEVNFNFDDPNLIILPLAFGKRQGREFIWNDLLSLETGSLKLANGRVIEKTLYNRRTRQDEPALFVALTFERREVLDSSNIKPVNLIGVDRGENIPAVIALTDPEGCPLPEFKDSSGGPTDILRIGEGYKEKQRAIQAAKEVEQRRAGGYSRKFASKSRNLADDMVRNSARDLFYHAVTHDAVLVFENLSRGFGRQGKRTFMTERQYTKMEDWLTAKLAYEGLTSKTYLSKTLAQYTSKTCSNCGFTITSADYDRVLEKLKKTATGWMTTINGKELKVEGQITYYNRYKRQNVVKDLSVELDRLSEESVNNDISSWTKGRSGEALSLLKKRFSHRPVQEKFVCLNCGFETHADEQAALNIARSWLFLRSQEYKKYQTNKTTGNTDKRAFVETWQSFYRKKLKEVWKPAV

SEQ ID NO: 131 - protein, 972 aa, Artificial Sequence
  CasX Variant
MQEIKRINKIRRRLVKDSNTKKAGKTGPMKTLLVRVMTPDLRERLENLRKKPENIPQPISNTSRANLNKLLTDYTEMKKAILHVYWEEFQKDPVGLMSRVAQPAPKNIDQRKLIPVKDGNERLTSSGFACSQCCQPLYVYKLEQVNDKGKPHTNYFGRCNVSEHERLILLSPHKPEANDELVTYSLGKFGQRALDFYSIHVTRESNHPVKPLEQIGGNSCASGPVGKALSDACMGAVASFLTKYQDIILEHQKVIKKNEKRLANLKDIASANGLAFPKITLPPQPHTKEGIEAYNNVVAQIVIWVNLNLWQKLKIGRDEAKPLQRLKGFPSFPLVERQANEVDWWDMVCNVKKLINEKKEDGKVFWQNLAGYKRQEALRPYLSSEEDRKKGKKFARYQFGDLLLHLEKKHGEDWGKVYDEAWERIDKKVEGLSKHIKLEEERRSEDAQSKAALTDWLRAKASFVIEGLKEADKDEFCRCELKLQKWYGDLRGKPFAIEAENSILDISGFSKQYNCAFIWQKDGVKKLNLYLIINYFKGGKLRFKKIKPEAFEANRFYTVINKKSGEIVPMEVNFNFDDPNLIILPLAFGKRQGREFIWNDLLSLETGSLKLANGRVIEKTLYNRRTRQDEPALFVALTFERREVLDSSNIKPMNLIGIDRGENIPAVIALTDPEGCPLSRFKDSLGNPTHILRIGESYKEKQRTIQAKKEVEQRRAGGYSRKYASKAKNLADDMVRNTARDLLYYAVTQDAMLIFENLSRGFGRQGKRTFMAERQYTRMEDWLTAKLAYEGLSKTYLSKTLAQYTSKTCSNCGFTITSADYDRVLEKLKKTATGWMTTINGKELKVEGQITYYNRYKRQNVVKDLSVELDRLSEESVNNDISSWTKGRSGEALSLLKKRFSHRPVQEKFVCLNCGFETHADEQAALNIARSWLFLNSNSTEFKSYKSGKQPFVGAWQAFYKRRLKEVWKPNA

SEQ ID NO: 132 - protein, 978 aa, Artificial Sequence
  CasX Variant
QEIKRINKIRRRLVKDSNTKKAGKTGPMKTLLVRVMTPDLRERLENLRKKPENIPQPISNTSRANLNKLLTDYTEMKKAILHVYWEEFQKDPVGLMSRVAQPASKKIDQNKLKPEMDEKGNLTTAGFACSQCGQPLFVYKLEQVSEKGKAYTNYFGRCNVAEHEKLILLAQLKPEKDSDEAVTYSLGKFGQRALDFYSIHVTKESTHPVKPLAQIAGNRYASGPVGKALSDACMGTIASFLSKYQDIIIEHQKVVKGNQKRLESLRELAGKENLEYPSVTLPPQPHTKEGVDAYNEVIARVRMWVNLNLWQKLKLSRDDAKPLLRLKGFPSFPLVERQANEVDWWDMVCNVKKLINEKKEDGKVFWQNLAGYKRQEALRPYLSSEEDRKKGKKFARYQLGDLLLHLEKKHGEDWGKVYDEAWERIDKKVEGLSKHIKLEEERRSEDAQSKAALTDWLRAKASFVIEGLKEADKDEFCRCELKLQKWYGDLRGKPFAIEAENSILDISGFSKQYNCAFIWQKDGVKKLNLYLIINYFKGGKLRFKKIKPEAFEANRFYTVINKKSGEIVPMEVNFNFDDPNLIILPLAFGKRQGREFIWNDLLSLETGSLKLANGRVIEKTLYNRRTRQDEPALFVALTFERREVLDSSNIKPMNLIGVDRGENIPAVIALTDPEGCPLSRFKDSLGNPTHILRIGESYKEKQRTIQAKKEVEQRRAGGYSRKYASKAKNLADDMVRNTARDLLYYAVTQDAMLIFENLSRGFGRQGKRTFMAERQYTRMEDWLTAKLAYEGLSKTYLSKTLAQYTSKTCSNCGFTIHTSADYDRVLEKLKKTATGWMTTINGKELKVEGQITYYNRYKRQNVVKDLSVELDRLSEESVNNDISSWTKGRSGEALSLLKKRFSHRPVQEKFVCLNCGFETHADEQAALNIARSWLFLRSQEYKKYQTNKTTGNTDKRAFVETWQSFYRKKLKEVWKPAV

SEQ ID NO: 133 - protein, 978 aa, Artificial Sequence
  CasX Variant
QEIKRINKIRRRLVKDSNTKKAGKTGPMKTLLVRVMTPDLRERLENLRKKPENIPQPISNTSRANLNKLLTDYTEMKKAILHVYWEEFQKDPVGLMSRVAQPASKKIDQNKLKPEMDEKGNLTTAGFACSQCGQPLFVYKLEQVSEKGKAYTNYFGRCNVAEHEKLILLAQLKPEKDSDEAVTYSLGKFGQRALDFYSIHVTKESTHPVKPLAQIAGNRYASGPVGKALSDACMGTIASFLSKYQDIIIEHQKVVKGNQKRLESLRELAGKENLEYPSVTLPPQPHTKEGVDAYNEVIARVRMWVNLNLWQKLKLSRDDAKPLLRLKGFPSFPLVERQANEVDWWDMVCNVKKLINEKKEDGKVFWQNLAGYKRQEALRPYLSSEEDRKKGKKFARYQLGDLLLHLEKKHGEDWGKVYDEAWERIDKKVEGLSKHIKLEEERRSEDAQSKAALTDWLRAKASFVIEGLKEADKDEFCRCELKLQKWYGDLRGKPFAIEAENSILDISGFSKQYNCAFIWQKDGVKKLNLYLIINYFKGGKLRFKKIKPEAFEANRFYTVINKKSGEIVPMEVNFNFDDPNLIILPLAFGKRQGREFIWNDLLSLETGSLKLANGRVIEKTLYNRRTRQDEPALFVALTFERREVLDSSNIKPMNLIGVDRGENIPAVIALTDPEGCPLSRFKDSLGNPTHILRIGESYKEKQRTIQAKKEVEQRRAGGYSRKYASKAKNLADDMVRNTARDLLYYAVTQDAMLIFENLSRGFGRQGKRTFMAERQYTRMEDWLTAKLAYEGLPSKTYLSKTLAQYTSKTCSNCGFTITSADYDRVLEKLKKTATGWMTTINGKELKVEGQITYYNRYKRQNVVKDLSVELDRLSEESVNNDISSWTKGRSGEALSLLKKRFSHRPVQEKFVCLNCGFETHADEQAALNIARSWLFLRSQEYKKYQTNKTTGNTDKRAFVETWQSFYRKKLKEVWKPAV

SEQ ID NO: 134 - protein, 977 aa, Artificial Sequence
  CasX Variant
QEIKRINKIRRRLVKDSNTKKAGKTGPMKTLLVRVMTPDLRERLENLRKKPENIPQPISNTSRANLNKLLTDYTEMKKAILHVYWEEFQKDPVGLMSRVAQPASKKIDQNKLKPEMDEKGNLTTAGFACSQCGQPLFVYKLEQVSEKGKAYTNYFGRCNVAEHEKLILLAQLKPEKDSDEAVTYSLGKFGQRALDFYSIHVTKESTHPVKPLAQIAGNRYASGPVGKALSDACMGTIASFLSKYQDIIIEHQKVVKGNQKRLESLRELAGKENLEYPSVTLPPQPHTKEGVDAYNEVIARVRMWVNHNLWQKLKLSRDDAKPLLRLKGFPSFPLVERQANEVDWWDMVCNVKKLINEKKEDGKVFWQNLAGYKRQEALRPYLSSEEDRKKGKKFARYQLGDLLLHLEKKHGEDWGKVYDEAWERIDKKVEGLSKHIKLEEERRSEDAQSKAALTDWLRAKASFVIEGLKEADKDEFCRCELKLQKWYGDLRGKPFAIEAENSILDISGFSKQYNCAFIWQKDGVKKLNLYLIINYFKGGKLRFKKIKPEAFEANRFYTVINKKSGEIVPMEVNFNFDDPNLIILPLAFGKRQGREFIWNDLLSLETGSLKLANGRVIEKTLYNRRTRQDEPALFVALTFERREVLDSSNIKPMNLIGVDRGENIPAVIALTDPEGCPLSRFKDSLGNPTHILRIGESYKEKQRTIQAKKEVEQRRAGGYSRKYASKAKNLADDMVRNTARDLLYYAVTQDAMLIFENLSRGFGRQGKRTFMAERQYTRMEDWLTAKLAYEGLSKTYLSKTLAQYTSKTCSNCGFTITSADYDRVLEKLKKTATGWMTTINGKELKVEGQITYYNRYKRQNVVKDLSVELDRLSEESVNNDISSWTKGRSGEALSLLKKRFSHRPVQEKFVCLNCGFETHADEQAALNIARSWLFLRSQEYKKYQTNKTTGNTDKRAFVETWQSFYRKKLKEVWKPAV

SEQ ID NO: 135 - protein, 978 aa, Artificial Sequence
  CasX Variant
QEIKRINKIRRRLVKDSNTKKAGKTGPMKTLLVRVMTPDLRERLENLRKKPENIPQPISNTSRANLNKLLTDYTEMKKAILHVYWEEFQKDPVGLMSRVAQPASKKIDQNKLKPEMDEKGNLTTAGFACSQCGQPLFVYKLEQVSEKGKAYTNYFGRCNVAEHEKLILLAQLKPEKDSDEAVTYSLGKFGQRALDFYSIHVTKESTHPVKPLAQIAGNRYASGAPVGKALSDACMGTIASFLSKYQDIIIEHQKVVKGNQKRLESLRELAGKENLEYPSVTLPPQPHTKEGVDAYNEVIARVRMWVNLNLWQKLKLSRDDAKPLLRLKGFPSFPLVERQANEVDWWDMVCNVKKLINEKKEDGKVFWQNLAGYKRQEALRPYLSSEEDRKKGKKFARYQLGDLLLHLEKKHGEDWGKVYDEAWERIDKKVEGLSKHIKLEEERRSEDAQSKAALTDWLRAKASFVIEGLKEADKDEFCRCELKLQKWYGDLRGKPFAIEAENSILDISGFSKQYNCAFIWQKDGVKKLNLYLIINYFKGGKLRFKKIKPEAFEANRFYTVINKKSGEIVPMEVNFNFDDPNLIILPLAFGKRQGREFIWNDLLSLETGSLKLANGRVIEKTLYNRRTRQDEPALFVALTFERREVLDSSNIKPMNLIGVDRGENIPAVIALTDPEGCPLSRFKDSLGNPTHILRIGESYKEKQRTIQAKKEVEQRRAGGYSRKYASKAKNLADDMVRNTARDLLYYAVTQDAMLIFENLSRGFGRQGKRTFMAERQYTRMEDWLTAKLAYEGLSKTYLSKTLAQYTSKTCSNCGFTITSADYDRVLEKLKKTATGWMTTINGKELKVEGQITYYNRYKRQNVVKDLSVELDRLSEESVNNDISSWTKGRSGEALSLLKKRFSHRPVQEKFVCLNCGFETHADEQAALNIARSWLFLRSQEYKKYQTNKTTGNTDKRAFVETWQSFYRKKLKEVWKPAV

SEQ ID NO: 136 - protein, 979 aa, Artificial Sequence
  CasX Variant
RQEIKRINKIRRRLVKDSNTKKAGKTGPMKTLLVRVMTPDLRERLENLRKKPENIPQPISNTSRANLNKLLTDYTEMKKAILHVYWEEFQKDPVGLMSRVAQPASKKIDQNKLKPEMDEKGNLTTAGFACSQCGQPLFVYKLEQVSEKGKAYTNYFGRCNVAEHEKLILLAQLKPEKDSDEAVTYSLGKFGQRALDFYSIHVTKESTHPVKPLAQIAGNRYASGAPVGKALSDACMGTIASFLSKYQDIIIEHQKVVKGNQKRLESLRELAGKENLEYPSVTLPPQPHTKEGVDAYNEVIARVRMWVNLNLWQKLKLSRDDAKPLLRLKGFPSFPLVERQANEVDWWDMVCNVKKLINEKKEDGKVFWQNLAGYKRQEALRPYLSSEEDRKKGKKFARYQLGDLLLHLEKKHGEDWGKVYDEAWERIDKKVEGLSKHIKLEEERRSEDAQSKAALTDWLRAKASFVIEGLKEADKDEFCRCELKLQKWYGDLRGKPFAIEAENSILDISGFSKQYNCAFIWQKDGVKKLNLYLIINYFKGGKLRFKKIKPEAFEANRFYTVINKKSGEIVPMEVNFNFDDPNLIILPLAFGKRQGREFIWNDLLSLETGSLKLANGRVIEKTLYNRRTRQDEPALFVALTFERREVLDSSNIKPMNLIGVDRGENIPAVIALTDPEGCPLSRFKDSLGNPTHILRIGESYKEKQRTIQAKKEVEQRRAGGYSRKYASKAKNLADDMVRNTARDLLYYAVTQDAMLIFENLSRGFGRQGKRTFMAERQYTRMEDWLTAKLAYEGLSKTYLSKTLAQYTSKTCSNCGFTITSADYDRVLEKLKKTATGWMTTINGKELKVEGQITYYNRYKRQNVVKDLSVELDRLSEESVNNDISSWTKGRSGEALSLLKKRFSHRPVQEKFVCLNCGFETHADEQAALNIARSWLFLRSQEYKKYQTNKTTGNTDKRAFVETWQSFYRKKLKEVWKPAV

SEQ ID NO: 137 - protein, 978 aa, Artificial Sequence
  CasX Variant
QEIKRINKIRRRLVKDSNTKKAGKTGPMKTLLVRVMTPDLRERLENLRKKPENIPQPISNTSRANLNKLLTDYTEMKKAILHVYWEEFQKDPVGLMSRVAQPASKKIDQNKLKPEMDEKGNLTTAGFACSQCGQPLFVYKLEQVSEKGKAYTNYFGRCNVAEHEKLILLAQLKPEKDSDEAVTYSLGKFGQRALDFYSIHVTKESTHPVKPLAQIAGNRYASGPVGKALSDACMGTIASFLSKYQDIIIEHQKVVKGNQKRLESLRELAGKENLEYPSVTLPPQPHTKEGVDAYNEVIARVRMWVNLNLWQKLKLSRDDAKPLLRLKGFPSFPLVERQANEVDWWDMVCNVKKLINEKKEDGKVFWQNLAGYKRQEALRPYLSSEEDRKKGKKFARYQLGDLLLHLEKKHGEDWGKVYDEAWERIDKKVEGLSKHIKLEEERRSEDAQSKAALTDWLRAKASFVIEGLKEADKDEFCRCELKLQKWYGDLRGKPFAIEAENSILDISGFSKQYNCAFIWQKDGVKKLNLYLIINYFKGGKLRFKKIKPEAFEANRFYTVINKKSGEIVPMEVNFNFDDPNLIILPLAFGKRQGREFIWNDLLSLETGSLKLANGRVIEKTLYNRRTRQDEPALFVALTFERREVLDSSNIKPMNLIGVDRGENIPAVIALTDPEGCPLSRFKDSLGNPTHIQLRIGESYKEKQRTIQAKKEVEQRRAGGYSRKYASKAKNLADDMVRNTARDLLYYAVTQDAMLIFENLSRGFGRQGKRTFMAERQYTRMEDWLTAKLAYEGLSKTYLSKTLAQYTSKTCSNCGFTITSADYDRVLEKLKKTATGWMTTINGKELKVEGQITYYNRYKRQNVVKDLSVELDRLSEESVNNDISSWTKGRSGEALSLLKKRFSHRPVQEKFVCLNCGFETHADEQAALNIARSWLFLRSQEYKKYQTNKTTGNTDKRAFVETWQSFYRKKLKEVWKPAV

SEQ ID NO: 138 - protein, 977 aa, Artificial Sequence
  CasX Variant
QEIKRINKIRRRLVKDSNTKKAGKTGPMKTLLVRVMTPDLRERLENLRKKPENIPQPISNTSRANLNKLLTDYTEMKKAILHVYWEEFQKDPVGLMSRVAQPASKKIDQNKLKPEMDEKGNLTTAGFACSQCGQPLFVYKLEQVSEKGKAYTNYFGRCNVAEHEKLILLAQLKPEKDSDEAVTYSLGKFGQRALDFYSIHVTKESTHPVKPLAQIAGNRYASGPVGKALSDACMGTIASFLSKYQDIIIEHQKVVKGNQKRLESLRELAGKENLEYPSVTLPPQPHTKEGVDAYNEVIARVRMWVNLNLWQKLKLSRDDAKPLLRLKGFPSFPLVERQANEVDWWDMVCNVKKLINEKKEDGKVFWQNLAGYKRQEALRPYLSSEEDRKKGKKFARYQLGDLLLHLEKKHGEDWGKVYDEAWERIDKKVEGLSKHIKLEEERRSEDAQSKAALTDWLRAKASFVIEGLKEADKDEFCRCELKLQKWYGDLRGKPFAIEAENSILDISGFSKQYNCAFIWQKDGVKKLNLYLIINYFKGGKLRFKKIKPEAFEANRFYTVINKKSGEIVPMEVNFNFDDPNLIILPLAFGKRQGREFIWNDLLSLETGSLKLANGRVIEKTLYNRRTRQDEPALFVALTFERREVLDSSNIKPMNLIGVDRGENIPAVIALTDPEGCPLSRFKDSLGNPTHILRIGESYKEKQRTTQAKKEVEQRRAGGYSRKYASKAKNLADDMVRNTARDLLYYAVTQDAMLIFENLSRGFGRQGKRTFMAERQYTRMEDWLTAKLAYEGLSKTYLSKTLAQYTSKTCSNCGFTITSADYDRVLEKLKKTATGWMTTINGKELKVEGQITYYNRYKRQNVVKDLSVELDRLSEESVNNDISSWTKGRSGEALSLLKKRFSHRPVQEKFVCLNCGFETHADEQAALNIARSWLFLRSQEYKKYQTNKTTGNTDKRAFVETWQSFYRKKLKEVWKPAV

SEQ ID NO: 139 - protein, 977 aa, Artificial Sequence
  CasX Variant
QEIKRINKIRRRLVKDSNTKKAGKTGPMKTLLVRVMTPDLRERLENLRKKPENIPQPISNTSRANLNKLLTDYTEMKKAILHVYWEEFQKDPVGLMSRVAQPASKKIDQNKLKPEMDEKGNLTTAGFACSQCGQPLFVYKLEQVSEKGKAYTNYFGRCNVAEHEKLILLAQLKPEKDSDEAVTYSLGKFGQRALDFYSIHVTKESTHPVKPLAQIAGNRYASGPVGKALSDACMGTIASFLSKYQDIIIEHQKVVKGNQKRLESLRELAGKENLEYPSVTLPPQPHTKEGVDAYNEVIARVRMWVNLNLWQKLKLSRDDAKPLLRLKGFPSFPLVERQANEVDWWDMVCNVKKLINEKKEDGKVFWQNLAGYKRQEALRPYLSSEEDRKKGKKFARYQLGDLLLHLEKKHGEDWGKVYDEAWERIDKKVEGLSKHIKLEEERRSEDAQSKAALTDWLRAKASFVIEGLKEADKDEFCRCELKLQKWYGDLRGKPFAIEAENSILDISGFSKQYNCAFIWQKDGVKKLNLYLIINYFKGGKLRFKKIKPEAFEANRFYTVINKKSGEIVPMEVNFNFDDPNLIILPLAFGKRQGREFIWNDLLSLETGSLKLANGRVIEKTLYNRRTRQDEPALFVALTFERREVLDSSNIKPMNLIGVDRGENIPAVIALTDPEGCPLSRFKRSLGNPTHILRIGESYKEKQRTIQAKKEVEQRRAGGYSRKYASKAKNLADDMVRNTARDLLYYAVTQDAMLIFENLSRGFGRQGKRTFMAERQYTRMEDWLTAKLAYEGLSKTYLSKTLAQYTSKTCSNCGFTITSADYDRVLEKLKKTATGWMTTINGKELKVEGQITYYNRYKRQNVVKDLSVELDRLSEESVNNDISSWTKGRSGEALSLLKKRFSHRPVQEKFVCLNCGFETHADEQAALNIARSWLFLRSQEYKKYQTNKTTGNTDKRAFVETWQSFYRKKLKEVWKPAV

SEQ ID NO: 140 - protein, 977 aa, Artificial Sequence
  CasX Variant
QEIKRINKIRRRLVKDSNTKKAGKTYPMKTLLVRVMTPDLRERLENLRKKPENIPQPISNTSRANLNKLLTDYTEMKKAILHVYWEEFQKDPVGLMSRVAQPASKKIDQNKLKPEMDEKGNLTTAGFACSQCGQPLFVYKLEQVSEKGKAYTNYFGRCNVAEHEKLILLAQLKPEKDSDEAVTYSLGKFGQRALDFYSIHVTKESTHPVKPLAQIAGNRYASGPVGKALSDACMGTIASFLSKYQDIIIEHQKVVKGNQKRLESLRELAGKENLEYPSVTLPPQPHTKEGVDAYNEVIARVRMWVNLNLWQKLKLSRDDAKPLLRLKGFPSFPLVERQANEVDWWDMVCNVKKLINEKKEDGKVFWQNLAGYKRQEALRPYLSSEEDRKKGKKFARYQLGDLLLHLEKKHGEDWGKVYDEAWERIDKKVEGLSKHIKLEEERRSEDAQSKAALTDWLRAKASFVIEGLKEADKDEFCRCELKLQKWYGDLRGKPFAIEAENSILDISGFSKQYNCAFIWQKDGVKKLNLYLIINYFKGGKLRFKKIKPEAFEANRFYTVINKKSGEIVPMEVNFNFDDPNLIILPLAFGKRQGREFIWNDLLSLETGSLKLANGRVIEKTLYNRRTRQDEPALFVALTFERREVLDSSNIKPMNLIGVDRGENIPAVIALTDPEGCPLSRFKDSLGNPTHILRIGESYKEKQRTIQAKKEVEQRRAGGYSRKYASKAKNLADDMVRNTARDLLYYAVTQDAMLIFENLSRGFGRQGKRTFMAERQYTRMEDWLTAKLAYEGLSKTYLSKTLAQYTSKTCSNCGFTITSADYDRVLEKLKKTATGWMTTINGKELKVEGQITYYNRYKRQNVVKDLSVELDRLSEESVNNDISSWTKGRSGEALSLLKKRFSHRPVQEKFVCLNCGFETHADEQAALNIARSWLFLRSQEYKKYQTNKTTGNTDKRAFVETWQSFYRKKLKEVWKPAV

SEQ ID NO: 141 - protein, 977 aa, Artificial Sequence
  CasX Variant
QEIKRINKIRRRLVKDSNTKKAGKTGPMKTLLVRVMTPDLRERLENLRKKPENIPQPISNTSRANLNKLLTDYTEMKKAILHVYWEEFQKDPVGLMSRVAQPASKKIDQNKLKPEMDEKGNLTTAGFACSQCGQPLFVYKLEQVSEKGKAYTNYFGRCNVAEHEKLILLAQLKPEKDSDEAVTYSLGKFGQRALDFYSIHVTKESTHPVKPLAQIAGNRYASGPVGKALSDACMGTIASFLSKYQDIIIEHQKVVKGNQKRLESLRELAGKENLEYPSVTLPPQPHTKEGVDAYNEVIARVRMWVNLNLWQKLKLSRDDAKPLLRLKGFPSFPLVERQANEVDWWDMVCNVKKLINEKKEDGKVFWQNLAGYKRQEALRPYLSSEEDRKKGKKFARYQLGDLLLHLEKKHGEDWGKVYDEAWERIDKKVEGLSKHIKLEEERRSEDAQSKAALTDWLRAKASFVIEGLKEADKDEFCRCELKLQKWYGDLRGKPFAIEAENSILDISGFSKQYNCAFIWQKDGVKKLNLYLIINYFKGGKLRFKKIKPEAFEANRFYTVINKKSGEIVPMEVNFNFDDPNLIILPLAFGKRQGREFIWNDLLSLETGSLKLANGRVIEKTLYNRRTRQDEPALFVALTFERREVLDSSNIKPMNLIGVDRGENIPAVIALTDPEGCPLSRFKDSLGNPTHILRIGESYKEKQRTIQAKKEVEQRRAGGYSRKYASKAKNLADDMVRNTARDLLYYAVTQDAMLIFENLSRGFGRQGKRTFMAERQYTRMEDWLTAKLAYEGLSKTYLSKTLAQYTSKTCSNCGFTIHSADYDRVLEKLKKTATGWMTTINGKELKVEGQITYYNRYKRQNVVKDLSVELDRLSEESVNNDISSWTKGRSGEALSLLKKRFSHRPVQEKFVCLNCGFETHADEQAALNIARSWLFLRSQEYKKYQTNKTTGNTDKRAFVETWQSFYRKKLKEVWKPAV

SEQ ID NO: 142 - protein, 977 aa, Artificial Sequence
  CasX Variant
QEIKRINKIRRRLVKDSNTKKAGKTGPMKTLLVRVMTPDLRERLENLRKKPENIPQPISNTSRANLNKLLTDYTEMKKAILHVYWEEFQKDPVGLMSRVAQPASKKIDQNKLKPEMDEKGNLTTAGFACSQCGQPLFVYKLEQVSEKGKAYTNYFGRCNVAEHEKLILLAQLKPEKDSDEAVTYSLGKFGQRALDFYSIHVTKESTHPVKPLAQIAGNRYASGPVGKALSDACMGTIASFLSKYQDIIIEHQKVVKGNQKRLESLRELAGKENLEYPSVTLPPQPHTKEGVDAYNEVIARVRMWVNLNLWQKLKLSRDDAKPLLRLKGFPSFPLVERQANEVDWWDMVCNVKKLINEKKEDGKVFWQNLAGYKRQEALRPYLSSEEDRKKGKKFARYQLGDLLLHLEKKHGEDWGKVYDEAWERIDKKVEGLSKHIKLEEERRSEDAQSKAALTDWLRAKASFVIEGLKEADKDEFCRCELKLQKWYGDLRGKPFAIEAENSILDISGFSKQYNCAFIWQKDGVKKLNLYLIINYFKGGKLRFKKIKPEAFEANRFYTVINKKSGEIVPMEVNFNFDDPNLIILPLAFGKRQGREFIWNDLLSLETGSLKLANGRVIEKTLYNRRTRQDEPALFVALTFERREVLDSSNIKPMNLIGVDRGENIPAVIALTDPEGCPLSRFKDSLGNPTHILRIGESYKEKQRTIQAKKEVEQRRAGGYSRKYASKAKNLADDMVRNTARDLLYYAATQDAMLIFENLSRGFGRQGKRTFMAERQYTRMEDWLTAKLAYEGLSKTYLSKTLAQYTSKTCSNCGFTITSADYDRVLEKLKKTATGWMTTINGKELKVEGQITYYNRYKRQNVVKDLSVELDRLSEESVNNDISSWTKGRSGEALSLLKKRFSHRPVQEKFVCLNCGFETHADEQAALNIARSWLFLRSQEYKKYQTNKTTGNTDKRAFVETWQSFYRKKLKEVWKPAV

SEQ ID NO: 143 - protein, 977 aa, Artificial Sequence
  CasX Variant
QEIKRINKIRRRLVKDSNTKKAGKTGPMKTLLVRVMTPDLRERLENLRKKPENIPQPISNTSRANLNKLLTDYTEMKKAILHVYWEEFQKDPVGLMSRVAQPASKKIDQNKLKPEMDEKGNLTTAGFACSQCGQPLFVYKLEQVSEKGKAYTNYFGRCNVAEHEKLILLAQLKPEKDSDEAVTYSLGKFGQRALDFYSIHVTKESTHPVKPLAQIAGNRYASGPVGKALSDACMGTIASFLSKYQDIIIEHQKVVKGNQKRLESLRELAGKENLEYPSVTLPPQPHTKEGVDAYNEVIARVRMWVNLNLWQKLKLSRDDAKPLLRLKGFPSFPLVERQANEVDWWDMVCNVKKLINEKKEDGKVFWQNLAGYKRQEALRPYLSSEEDRKKGKKFARYQLGDLLLHLEKKHGEDWGKVYDEAWERIDKKVEGLSKHIKLEEERRSEDAQSKAALTDWLRAKASFVIEGLKEADKDEFCRCELKLQKWYGDLRGKPFAIEAENSILDISGFSKQYNCAFIWQKDGVKKLNLYLIINYFKGGKLRFKKIKPEAFEANRFYTVINKKSGEIVPMEVNFNFDDPNLIILPLAFGKRQGREFIWNDLLSLETGSLKLANGRVIEKTLYNRRTRQDEPALFVALTFERREVLDSSNIKPMNLIGVDRGENIPAVIALTDPEGCPLSRFKDSLGNPTHILRIGESYKEKQRTIQAAKEVEQRRAGGYSRKYASKAKNLADDMVRNTARDLLYYAVTQDAMLIFENLSRGFGRQGKRTFMAERQYTRMEDWLTAKLAYEGLSKTYLSKTLAQYTSKTCSNCGFTITSADYDRVLEKLKKTATGWMTTINGKELKVEGQITYYNRYKRQNVVKDLSVELDRLSEESVNNDISSWTKGRSGEALSLLKKRFSHRPVQEKFVCLNCGFETHADEQAALNIARSWLFLRSQEYKKYQTNKTTGNTDKRAFVETWQSFYRKKLKEVWKPAV

SEQ ID NO: 144 - protein, 978 aa, Artificial Sequence
  CasX Variant
QEIKRINKIRRRLVKDSNTKKAGKTRGPMKTLLVRVMTPDLRERLENLRKKPENIPQPISNTSRANLNKLLTDYTEMKKAILHVYWEEFQKDPVGLMSRVAQPASKKIDQNKLKPEMDEKGNLTTAGFACSQCGQPLFVYKLEQVSEKGKAYTNYFGRCNVAEHEKLILLAQLKPEKDSDEAVTYSLGKFGQRALDFYSIHVTKESTHPVKPLAQIAGNRYASGPVGKALSDACMGTIASFLSKYQDIIIEHQKVVKGNQKRLESLRELAGKENLEYPSVTLPPQPHTKEGVDAYNEVIARVRMWVNLNLWQKLKLSRDDAKPLLRLKGFPSFPLVERQANEVDWWDMVCNVKKLINEKKEDGKVFWQNLAGYKRQEALRPYLSSEEDRKKGKKFARYQLGDLLLHLEKKHGEDWGKVYDEAWERIDKKVEGLSKHIKLEEERRSEDAQSKAALTDWLRAKASFVIEGLKEADKDEFCRCELKLQKWYGDLRGKPFAIEAENSILDISGFSKQYNCAFIWQKDGVKKLNLYLIINYFKGGKLRFKKIKPEAFEANRFYTVINKKSGEIVPMEVNFNFDDPNLIILPLAFGKRQGREFIWNDLLSLETGSLKLANGRVIEKTLYNRRTRQDEPALFVALTFERREVLDSSNIKPMNLIGVDRGENIPAVIALTDPEGCPLSRFKDSLGNPTHILRIGESYKEKQRTIQAKKEVEQRRAGGYSRKYASKAKNLADDMVRNTARDLLYYAVTQDAMLIFENLSRGFGRQGKRTFMAERQYTRMEDWLTAKLAYEGLSKTYLSKTLAQYTSKTCSNCGFTITSADYDRVLEKLKKTATGWMTTINGKELKVEGQITYYNRYKRQNVVKDLSVELDRLSEESVNNDISSWTKGRSGEALSLLKKRFSHRPVQEKFVCLNCGFETHADEQAALNIARSWLFLRSQEYKKYQTNKTTGNTDKRAFVETWQSFYRKKLKEVWKPAV

SEQ ID NO: 145 - protein, 978 aa, Artificial Sequence
  CasX Variant
QEIKRINKIRRRLVKDSNTKKAGKTGPMKTLLVRVMTPDLRERLENLRKKPENIPQPISNTSRANLNKLLTDYTEMKKAILHVYWEEFQKDPVGLMSRVAQPASKKIDQNKLKPEMDEKGNLTTAGFACSQCGQPLFVYKLEQVSEKGKAYTNYFGRCNVAEHEKLILLAQLKPEKDSDEAVTYSLGKFGQRALDFYSIHVTKESTHPVKPLAQIAGNRYASYPVGKALSDACMGTIASFLSKYQDIIIEHQKVVKGNQKRLESLRELAGKENLEYPSVTLPPQPHTKEGVDAYNEVIARVRMWVNLNLWQKLKLSRDDAKPLLRLKGFPSFPLVERQANEVDWWDMVCNVKKLINEKKEDGKVFWQNLAGYKRQEALRPYLSSEEDRKKGKKFARYQLGDLLLHLEKKHGEDWGKVYDEAWERIDKKVEGLSKHIKLEEERRSEDAQSKAALTDWLRAKASFVIEGLKEADKDEFCRCELKLQKWYGDLRGKPFAIEAENSILDISGFSKQYNCAFIWQKDGVKKLNLYLIINYFKGGKLRFKKIKPEAFEANRFYTVINKKSGEIVPMEVNFNFDDPNLIILPLAFGKRQGREFIWNDLLSLETGSLKLANGRVIEKTLYNRRTRQDEPALFVALTFERREVLDSSNIKPMNLIGVDRGENIPAVIALTDPEGCPLSRFKDSLGNPTHILRIGESYKEKQRTIQAKKEVEQRRAGGYSRKYASKAKNLADDMVRNTARDLLYYAVTQDAMLIFENLSRGFGRQGKRTFMAERQYTRMEDWLTAKLAYEGLPSKTYLSKTLAQYTSKTCSNCGFTITSADYDRVLEKLKKTATGWMTTINGKELKVEGQITYYNRYKRQNVVKDLSVELDRLSEESVNNDISSWTKGRSGEALSLLKKRFSHRPVQEKFVCLNCGFETHADEQAALNIARSWLFLRSQEYKKYQTNKTTGNTDKRAFVETWQSFYRKKLKEVWKPAV

SEQ ID NO: 146 - protein, 978 aa, Artificial Sequence
  CasX Variant
QEIKRINKIRRRLVKDSNTKKAGKTGPMKTLLVRVMTPDLRERLENLRKKPENIPQPISNTSRANLNKLLTDYTEMKKAILHVYWEEFQKDPVGLMSRVAQPASKKIDQNKLKPEMDEKGNLTTAGFACSQCGQPLFVYKLEQVSEKGKAYTNYFGRCNVAEHEKLILLAQLKPEKDSDEAVTYSLGKFGQRALDFYSIHVTKESTHPVKPLAQIAGNRYASNPVGKALSDACMGTIASFLSKYQDIIIEHQKVVKGNQKRLESLRELAGKENLEYPSVTLPPQPHTKEGVDAYNEVIARVRMWVNLNLWQKLKLSRDDAKPLLRLKGFPSFPLVERQANEVDWWDMVCNVKKLINEKKEDGKVFWQNLAGYKRQEALRPYLSSEEDRKKGKKFARYQLGDLLLHLEKKHGEDWGKVYDEAWERIDKKVEGLSKHIKLEEERRSEDAQSKAALTDWLRAKASFVIEGLKEADKDEFCRCELKLQKWYGDLRGKPFAIEAENSILDISGFSKQYNCAFIWQKDGVKKLNLYLIINYFKGGKLRFKKIKPEAFEANRFYTVINKKSGEIVPMEVNFNFDDPNLIILPLAFGKRQGREFIWNDLLSLETGSLKLANGRVIEKTLYNRRTRQDEPALFVALTFERREVLDSSNIKPMNLIGVDRGENIPAVIALTDPEGCPLSRFKDSLGNPTHILRIGESYKEKQRTIQAKKEVEQRRAGGYSRKYASKAKNLADDMVRNTARDLLYYAVTQDAMLIFENLSRGFGRQGKRTFMAERQYTRMEDWLTAKLAYEGLPSKTYLSKTLAQYTSKTCSNCGFTITSADYDRVLEKLKKTATGWMTTINGKELKVEGQITYYNRYKRQNVVKDLSVELDRLSEESVNNDISSWTKGRSGEALSLLKKRFSHRPVQEKFVCLNCGFETHADEQAALNIARSWLFLRSQEYKKYQTNKTTGNTDKRAFVETWQSFYRKKLKEVWKPAV

SEQ ID NO: 147 - protein, 979 aa, Artificial Sequence
  CasX Variant
QEIKRINKIRRRLVKDSNTKKAGKTGPMKTLLVRVMTPDLRERLENLRKKPENIPQPISNTSRANLNKLLTDYTEMKKAILHVYWEEFQKDPVGLMSRVAQPASKKIDQNKLKPEMDEKGNLTTAGFACSQCGQPLFVYKLEQVSEKGKAYTNYFGRCNVAEHEKLILLAQLKPEKDSDEAVTYSLGKFGQRALDFYSIHVTKESTHPVKPLAQIAGNRYASGPVGKALSDACMGTIASFLSKYQDIIIEHQKVVKGNQKRLESLRELAGKENLEYPSVTLPPQPHTKEGVDAYNEVIARVRMWVNLNLWQKLKLSRDDAKPLLRLKGFPSFPLVERQANEVDWWDMVCNVKKLINEKKEDGKVFWQNLAGYKRQEALRPYLSSEEDRKKGKKFARYQLGDLLLHLEKKHGEDWGKVYDEAWERIDKKVEGLSKHIKLEEERRSEDAQSKAALTDWLRAKASFVIEGLKEADKDEFCRCELKLQKWYGDLRGKPFAIEAENSILDISGFSKQYNCAFIWQKDGVKKLNLYLIINYFKGWGKLRFKKIKPEAFEANRFYTVINKKSGEIVPMEVNFNFDDPNLIILPLAFGKRQGREFIWNDLLSLETGSLKLANGRVIEKTLYNRRTRQDEPALFVALTFERREVLDSSNIKPMNLIGVDRGENIPAVIALTDPEGCPLSRFKDSLGNPTHILRIGESYKEKQRTIQAKKEVEQRRAGGYSRKYASKAKNLADDMVRNTARDLLYYAVTQDAMLIFENLSRGFGRQGKRTFMAERQYTRMEDWLTAKLAYEGLPSKTYLSKTLAQYTSKTCSNCGFTITSADYDRVLEKLKKTATGWMTTINGKELKVEGQITYYNRYKRQNVVKDLSVELDRLSEESVNNDISSWTKGRSGEALSLLKKRFSHRPVQEKFVCLNCGFETHADEQAALNIARSWLFLRSQEYKKYQTNKTTGNTDKRAFVETWQSFYRKKLKEVWKPAV

SEQ ID NO: 148 - protein, 979 aa, Artificial Sequence
  CasX Variant
QEIKRINKIRRRLVKDSNTKKAGKTGPMKTLLVRVMTPDLRERLENLRKKPENIPQPISNTSRANLNKLLTDYTEMKKAILHVYWEEFQKDPVGLMSRVAQPASKKIDQNKLKPEMDEKGNLTTAGFACSQCGQPLFVYKLEQVSEKGKAYTNYFGRCNVAEHEKLILLAQLKPEKDSDEAVTYSLGKFGQRALDFYSIHVTKESTHPVKPLAQIAGNRYASGPVGKALSDACMGTIASFLSKYQDIIIEHQKVVKGNQKRLESLRELAGKENLEYPSVTLPPQPHTKEGVDAYNEVIARVRMWVNLNLWQKLKLSRDDAKPLLRLKGFPSFPLVERQANEVDWWDMVCNVKKLINEKKEDGKVFWQNLAGYKRQEALRPYLSSEEDRKKGKKFARYQLGDLLLHLEKKHGEDWGKVYDEAWERIDKKVEGLSKHIKLEEERRSEDAQSKAALTDWLRAKASFVIEGLKEADKDEFCRCELKLQKWYGDLRGKPFAIEAENSILDISGFSKQYNCAFIWQKDGVKKLNLYLIINYFKGYGKLRFKKIKPEAFEANRFYTVINKKSGEIVPMEVNFNFDDPNLIILPLAFGKRQGREFIWNDLLSLETGSLKLANGRVIEKTLYNRRTRQDEPALFVALTFERREVLDSSNIKPMNLIGVDRGENIPAVIALTDPEGCPLSRFKDSLGNPTHILRIGESYKEKQRTIQAKKEVEQRRAGGYSRKYASKAKNLADDMVRNTARDLLYYAVTQDAMLIFENLSRGFGRQGKRTFMAERQYTRMEDWLTAKLAYEGLPSKTYLSKTLAQYTSKTCSNCGFTITSADYDRVLEKLKKTATGWMTTINGKELKVEGQITYYNRYKRQNVVKDLSVELDRLSEESVNNDISSWTKGRSGEALSLLKKRFSHRPVQEKFVCLNCGFETHADEQAALNIARSWLFLRSQEYKKYQTNKTTGNTDKRAFVETWQSFYRKKLKEVWKPAV

SEQ ID NO: 149 - RNA, 17 nt, Artificial Sequence
  G quadriplex M3q
agggagggagggagagg

SEQ ID NO: 150 - RNA, 19 nt, Artificial Sequence
  G quadriplex telomere basket
gguuaggguuaggguuagg

SEQ ID NO: 151 - RNA, 25 nt, Artificial Sequence
  Sarcin-ricin loop
cugcucaguacgagaggaaccgcag

SEQ ID NO: 152 - RNA, 78 nt, Artificial Sequence
  pseudoknots
uacacugggaucgcugaauuagagaucggcguccuuucauucuauauacuuuggaguuuuaaaaugucucuaaguaca

SEQ ID NO: 153 - protein, 4 aa, Artificial Sequence
  CXXC zinc/finger ribbon domain
  misc_feature (2)..(3): Xaa is any amino acid
CXXC

SEQ ID NO: 154 - protein, 84 aa, Artificial Sequence
  chloroplast transit peptide
MASMISSSAVTTVSRASRGQSAAMAPFGGLKSMTGFPVRKVNTDITSITSNGGRVKCMQVWPPIGKKKFETLSYLPPLTRDSRA

SEQ ID NO: 155 - protein, 57 aa, Artificial Sequence
  chloroplast transit peptide
MASMISSSAVTTVSRASRGQSAAMAPFGGLKSMTGFPVRKVNTDITSITSNGGRVKS

SEQ ID NO: 156 - protein, 85 aa, Artificial Sequence
  chloroplast transit peptide
MASSMLSSATMVASPAQATMVAPFNGLKSSAAFPATRKANNDITSITSNGGRVNCMQVWPPIEKKKFETLSYLPDLTDSGGRVNC

SEQ ID NO: 157 - protein, 76 aa, Artificial Sequence
  chloroplast transit peptide
MAQVSRICNGVQNPSLISNLSKSSQRKSPLSVSLKTQQHPRAYPISSSWGLKKSGMTLIGSELRPLKVMSSVSTAC

SEQ ID NO: 158 - protein, 76 aa, Artificial Sequence
  chloroplast transit peptide
MAQVSRICNGVWNPSLISNLSKSSQRKSPLSVSLKTQQHPRAYPISSSWGLKKSGMTLIGSELRPLKVMSSVSTAC

SEQ ID NO: 159 - protein, 72 aa, Artificial Sequence
  chloroplast transit peptide
MAQINNMAQGIQTLNPNSNFHKPQVPKSSSFLVFGSKKLKNSANSMLVLKKDSIFMQLFCSFRISASVATAC

SEQ ID NO: 160 - protein, 69 aa, Artificial Sequence
  chloroplast transit peptide
MAALVTSQLATSGTVLSVTDRFRRPGFQGLRPRNPADAALGMRTVGASAAPKQSRKPHRFDRRCLSMVV

SEQ ID NO: 161 - protein, 77 aa, Artificial Sequence
  chloroplast transit peptide
MAALTTSQLATSATGFGIADRSAPSSLLRHGFQGLKPRSPAGGDATSLSVTTSARATPKQQRSVQRGSRRFPSVVVC

SEQ ID NO: 162 - protein, 57 aa, Artificial Sequence
  chloroplast transit peptide
MASSVLSSAAVATRSNVAQANMVAPFTGLKSAASFPVSRKQNLDITSIASNGGRVQC

SEQ ID NO: 163 - protein, 65 aa, Artificial Sequence
  chloroplast transit peptide
MESLAATSVFAPSRVAVPAARALVRAGTVVPTRRTSSTSGTSGVKCSAAVTPQASPVISRSAAAA

SEQ ID NO: 164 - protein, 72 aa, Artificial Sequence
  chloroplast transit peptide
MGAAATSMQSLKFSNRLVPPSRRLSPVPNNVTCNNLPKSAAPVRTVKCCASSWNSTINGAAATTNGASAASS

SEQ ID NO: 165 - protein, 20 aa, Artificial Sequence
  enbdosomal escape polypeptide
  SITE (4)..(4): Xaa is Lys, His or Arg
  SITE (8)..(8): Xaa is Lys, His or Arg
  SITE (11)..(11): Xaa is Lys, His or Arg
  SITE (15)..(15): Xaa is Lys, His or Arg
  SITE (19)..(19): Xaa is Lys, His or Arg
GLFXALLXLLXSLWXLLLXA

SEQ ID NO: 166 - protein, 20 aa, Artificial Sequence
  enbdosomal escape polypeptide
GLFHALLHLLHSLWHLLLHA

SEQ ID NO: 167 - protein, 9 aa, Artificial Sequence
  enbdosomal escape polypeptide
HHHHHHHHH

SEQ ID NO: 168 - protein, 7 aa, Artificial Sequence
  Nuclear Localization Signal
PKKKRKV

SEQ ID NO: 169 - protein, 16 aa, Artificial Sequence
  Nuclear Localization Signal
KRPAATKKAGQAKKKK

SEQ ID NO: 170 - protein, 9 aa, Artificial Sequence
  Nuclear Localization Signal
PAAKRVKLD

SEQ ID NO: 171 - protein, 11 aa, Artificial Sequence
  Nuclear Localization Signal
RQRRNELKRSP

SEQ ID NO: 172 - protein, 38 aa, Artificial Sequence
  Nuclear Localization Signal
NQSSNFGPMKGGNFGGRSSGPYGGGGQYFAKPRNQGGY

SEQ ID NO: 173 - protein, 42 aa, Artificial Sequence
  Nuclear Localization Signal
RMRIZFKNKGKDTAELRRRRVEVSVELRKAKKDEQILKRRNV

SEQ ID NO: 174 - protein, 8 aa, Artificial Sequence
  Nuclear Localization Signal
VSRKRPRP

SEQ ID NO: 175 - protein, 8 aa, Artificial Sequence
  Nuclear Localization Signal
PPKKARED

SEQ ID NO: 176 - protein, 8 aa, Artificial Sequence
  Nuclear Localization Signal
PQPKKKPL

SEQ ID NO: 177 - protein, 12 aa, Artificial Sequence
  Nuclear Localization Signal
SALIKKKKKMAP

SEQ ID NO: 178 - protein, 5 aa, Artificial Sequence
  Nuclear Localization Signal
DRLRR

SEQ ID NO: 179 - protein, 7 aa, Artificial Sequence
  Nuclear Localization Signal
PKQKKRK

SEQ ID NO: 180 - protein, 10 aa, Artificial Sequence
  Nuclear Localization Signal
RKLKKKIKKL

SEQ ID NO: 181 - protein, 10 aa, Artificial Sequence
  Nuclear Localization Signal
REKKKFLKRR

SEQ ID NO: 182 - protein, 20 aa, Artificial Sequence
  Nuclear Localization Signal
KRKGDEVDGVDEVAKKKSKK

SEQ ID NO: 183 - protein, 17 aa, Artificial Sequence
  Nuclear Localization Signal
RKCLQAGMNLEARKTKK

SEQ ID NO: 184 - protein, 8 aa, Artificial Sequence
  Nuclear Localization Signal
PRPRKIPR

SEQ ID NO: 185 - protein, 9 aa, Artificial Sequence
  Nuclear Localization Signal
PPRKKRTVV

SEQ ID NO: 186 - protein, 12 aa, Artificial Sequence
  Nuclear Localization Signal
NLSKKKKRKREK

SEQ ID NO: 187 - protein, 10 aa, Artificial Sequence
  Nuclear Localization Signal
RRPSRPFRKP

SEQ ID NO: 188 - protein, 8 aa, Artificial Sequence
  Nuclear Localization Signal
KRPRSPSS

SEQ ID NO: 189 - protein, 19 aa, Artificial Sequence
  Nuclear Localization Signal
KRGINDRNFWRGENERKTR

SEQ ID NO: 190 - protein, 11 aa, Artificial Sequence
  Nuclear Localization Signal
PRPPKMARYDN

SEQ ID NO: 191 - protein, 8 aa, Artificial Sequence
  Nuclear Localization Signal
KRSFSKAF

SEQ ID NO: 192 - protein, 9 aa, Artificial Sequence
  Nuclear Localization Signal
KLKIKRPVK

SEQ ID NO: 193 - protein, 19 aa, Artificial Sequence
  Nuclear Localization Signal
PKKKRKVPPPPAAKRVKLD

SEQ ID NO: 194 - protein, 25 aa, Artificial Sequence
  Nuclear Localization Signal
MSRRRKANPTKLSENAKKLAKEVEN

SEQ ID NO: 195 - protein, 16 aa, Artificial Sequence
  Nuclear Localization Signal
KTRRRPRRSQRKRPPT

SEQ ID NO: 196 - protein, 13 aa, Artificial Sequence
  Nuclear Localization Signal
RRKKRRPRRKKRR

SEQ ID NO: 197 - protein, 14 aa, Artificial Sequence
  Nuclear Localization Signal
PKKKSRKPKKKSRK

SEQ ID NO: 198 - protein, 17 aa, Artificial Sequence
  Nuclear Localization Signal
HKKKHPDASVNFSEFSK

SEQ ID NO: 199 - protein, 18 aa, Artificial Sequence
  Nuclear Localization Signal
QRPGPYDRPQRPGPYDRP

SEQ ID NO: 200 - protein, 16 aa, Artificial Sequence
  Nuclear Localization Signal
LSPSLSPLLSPSLSPL

SEQ ID NO: 201 - protein, 18 aa, Artificial Sequence
  Nuclear Localization Signal
RGKGGKGLGKGGAKRHRK

SEQ ID NO: 202 - protein, 14 aa, Artificial Sequence
  Nuclear Localization Signal
PKRGRGRPKRGRGR

SEQ ID NO: 203 - protein, 19 aa, Artificial Sequence
  Nuclear Localization Signal
PKKKRKVPPPPAAKRVKLD

SEQ ID NO: 204 - protein, 17 aa, Artificial Sequence
  Nuclear Localization Signal
PKKKRKVPPPPKKKRKV

SEQ ID NO: 205 - protein, 11 aa, Artificial Sequence
  protein transduction domain
YGRKKRRQRRR

SEQ ID NO: 206 - protein, 8 aa, Artificial Sequence
  protein transduction domain
RKKRRQRR

SEQ ID NO: 207 - protein, 11 aa, Artificial Sequence
  protein transduction domain
YARAAARQARA

SEQ ID NO: 208 - protein, 11 aa, Artificial Sequence
  protein transduction domain
THRLPRRRRRR

SEQ ID NO: 209 - protein, 11 aa, Artificial Sequence
  protein transduction domain
GGRRARRRRRR

SEQ ID NO: 210 - protein, 12 aa, Artificial Sequence
  protein transduction domain
RRQRRTSKLMKR

SEQ ID NO: 211 - protein, 27 aa, Artificial Sequence
  protein transduction domain
GWTLNSAGYLLGKINLKALAALAKKIL

SEQ ID NO: 212 - protein, 33 aa, Artificial Sequence
  protein transduction domain
KALAWEAKLAKALAKALAKHLAKALAKALKCEA

SEQ ID NO: 213 - protein, 16 aa, Artificial Sequence
  protein transduction domain
RQIKIWFQNRRMKWKK

SEQ ID NO: 214 - protein, 25 aa, Artificial Sequence
  linker
  SITE (6)..(10): grouped amino acid residues may be present or absent
  SITE (11)..(15): grouped amino acid residues may be present or absent
  SITE (16)..(20): grouped amino acid residues may be present or absent
  SITE (21)..(25): grouped amino acid residues may be present or absent
GSGGSGSGGSGSGGSGSGGSGSGGS

SEQ ID NO: 215 - protein, 30 aa, Artificial Sequence
  linker
  SITE (7)..(12): grouped amino acid residues may be present or absent
  SITE (13)..(18): grouped amino acid residues may be present or absent
  SITE (19)..(24): grouped amino acid residues may be present or absent
  SITE (25)..(30): grouped amino acid residues may be present or absent
GGSGGSGGSGGSGGSGGSGGSGGSGGSGGS

SEQ ID NO: 216 - protein, 20 aa, Artificial Sequence
  linker
  SITE (5)..(8): grouped amino acid residues may be present or absent
  SITE (9)..(12): grouped amino acid residues may be present or absent
  SITE (13)..(16): grouped amino acid residues may be present or absent
  SITE (17)..(20): grouped amino acid residues may be present or absent
GGGSGGGSGGGSGGGSGGGS

SEQ ID NO: 217 - protein, 4 aa, Artificial Sequence
  linker
GGSG

SEQ ID NO: 218 - protein, 5 aa, Artificial Sequence
  linker
GGSGG

SEQ ID NO: 219 - protein, 5 aa, Artificial Sequence
  linker
GSGSG

SEQ ID NO: 220 - protein, 5 aa, Artificial Sequence
  linker
GSGGG

SEQ ID NO: 221 - protein, 5 aa, Artificial Sequence
  linker
GGGSG

SEQ ID NO: 222 - protein, 5 aa, Artificial Sequence
  linker
GSSSG

SEQ ID NO: 223 - protein, 4 aa, Artificial Sequence
  linker
GPGP

SEQ ID NO: 224 - protein, 6 aa, Artificial Sequence
  linker
PPAPPA

SEQ ID NO: 225 - protein, 7 aa, Artificial Sequence
  linker
PPPGPPP

SEQ ID NO: 226 - RNA, 21 nt, Artificial Sequence
  stem loop sequence
  misc_feature (4)..(18): n is any ribonucleotide
  misc_feature (8)..(18): individual nucleotides may be absent
uuunnnnnnnnnnnnnnnuuu

SEQ ID NO: 227 - DNA, 3120 bp, Artificial Sequence
  SV40-NLS-CasX-SV40-NLS-TEV cleavage site -TwinStrep tag
atggctccgaagaagaagcgaaaggtcagccaggaaattaaacgcatcaacaagatccgccgtcgtctggtaaaagacagcaatacgaaaaaagccggaaaaaccggtccgatgaaaacgctgctggtgcgcgtgatgacgccggatctccgcgaacgtcttgagaatttgcgtaagaaacctgaaaatattccgcaaccgatttctaacacctcgcgcgccaatctgaataaactgctgaccgattacaccgaaatgaagaaagcgattctgcacgtttactgggaagagttccagaaagacccggtcggtctgatgagccgcgttgcgcaacctgcgccgaaaaatatcgatcagcgcaagttaatcccggttaaagatggtaatgaacgtttaacctccagcggctttgcctgcagtcagtgctgccagccactttatgtttataaacttgaacaggttaacgataaagggaaaccccataccaattatttcggccgctgcaatgtcagcgaacatgaacgcctgattttgttaagcccgcataaaccggaagcgaatgacgaactggtgacctattccctgggtaaatttggtcagcgggcgctggatttttacagcattcatgtgacgcgggaaagtaaccatccggtaaagccactggaacaaatcggcggtaacagctgcgcctctggcccggttggcaaagcgcttagcgatgcctgtatgggcgcggtggcgagctttctgacaaaataccaggatattatcctggagcatcagaaggtgatcaaaaagaacgagaaacgtctggcaaatttaaaggatattgcctccgctaacggcctggcgttcccgaagattaccttaccgccgcagccgcacaccaaagaaggtatcgaagcgtataacaacgttgttgcccagatcgtcatctgggtgaatctcaacctgtggcaaaaactgaaaattggtcgtgatgaagcaaaaccgttgcagcgactgaaaggattcccgtcgtttccgctggttgaacgacaggcgaacgaagtggattggtgggatatggtttgtaacgtcaaaaaattgatcaacgaaaaaaaggaagatggcaaagttttctggcaaaatctggcgggttacaaacgtcaggaggcgttgcttccgtatctctcttcagaagaagatcgcaaaaaaggcaagaagtttgctcgctatcagtttggcgatttattactgcatctggaaaaaaaacacggcgaagactggggcaaagtgtacgatgaagcctgggagcgtatcgacaaaaaagtggaaggtttgtcgaaacatattaaactcgaagaagagcgccgcagtgaagatgcgcagtcaaaagcagcgctgacggactggttacgtgcgaaagccagttttgtgattgaaggattaaaagaagctgataaagatgaattttgccgttgcgaactgaaactgcaaaaatggtatggcgacctgcgcggcaaaccgttcgccattgaggcagaaaatagcatccttgatatctccggtttcagcaaacaatataactgcgcgtttatttggcagaaagacggcgtgaaaaagcttaacctgtatctgatcattaactattttaaaggcgggaaactgcgtttcaagaaaatcaagccggaagcatttgaagccaatcgtttttataccgttattaataaaaaaagcggtgaaatcgtgccgatggaagttaattttaactttgatgatccgaacttgattattctgccgctggcattcggtaaacggcagggccgtgagtttatctggaacgacctgttatcgctggaaacgggcagcctgaaattagccaacggtcgcgtcattgaaaaaacgctctacaaccgccgcacccgccaggatgagccggcactgtttgtcgcgctgacctttgaacggcgtgaagtcctcgatagcagcaacatcaaaccaatgaaccttatcggtattgatcgtggtgaaaacattcctgccgttatcgccctgactgatccagaaggctgcccgctttctcgcttcaaagattcactgggcaacccgacccatatcctccgtattggcgagagctacaaagagaaacagcgtaccattcaggcagccaaagaagtggagcagcgtcgcgcgggcggctatagccgtaaatatgccagcaaagctaaaaacctggcggatgacatggtgcgtaacacggcgcgcgatttgctgtactacgccgtcacccaggacgcgatgctgatttttgagaacctctcccgcggttttgggcgtcagggtaaacgcacgtttatggcggaacgccagtatacgcgtatggaggactggctgaccgcgaagctggcctatgaaggcttgccgtctaaaacttacctgagcaagaccctggctcagtacaccagtaaaacctgtagtaattgcggctttaccatcaccagcgccgattatgaccgcgtgctggaaaagctgaagaaaaccgccaccggctggatgaccaccatcaatggtaaagagcttaaagtcgaagggcagattacttattacaaccgttataagcggcaaaacgtggtgaaagatctgtcggttgagctggaccgtttgtctgaagaaagcgtgaacaatgatatcagctcctggaccaaaggtcgttccggcgaagcgttaagtctgttgaaaaagcgctttagccatcgcccggtgcaggaaaaattcgtttgcctgaactgtggcttcgaaacccacgccgacgagcaagcggcgctcaatattgcgcgtagctggctgttcctgcgcagccaggaatataaaaaatatcaaaccaacaaaacaactggcaataccgacaagcgtgcctttgttgaaacctggcagagcttctatcgcaaaaaactgaaagaggtctggaaaccggcggtagcgccaaagaaaaaacgcaaagtgagcgaaaatctttattttcaaggtagcgcatggagtcatcctcaattcgagaaaggtggaggttctggcggtggatcgggaggttcagcgtggagccacccgcagttcgaaaaaggaaggggatccggctgctaa

SEQ ID NO: 228 - DNA, 3123 bp, Artificial Sequence
  CasX 119 variant
atggctccgaagaagaagcgaaaggtcagccaggaaattaaacgcatcaacaagatccgccgtcgtctggtaaaagacagcaatacgaaaaaagccggaaaaaccggtccgatgaaaacgctgctggtgcgcgtgatgacgccggatctccgcgaacgtcttgagaatttgcgtaagaaacctgaaaatattccgcaaccgatttctaacacctcgcgcgccaatctgaataaactgctgaccgattacaccgaaatgaagaaagcgattctgcacgtttactgggaagagttccagaaagacccggtcggtctgatgagccgcgttgcgcaacctgcgccgaaaaatatcgatcagcgcaagttaatcccggttaaagatggtaatgaacgtttaacctccagcggctttgcctgcagtcagtgctgccagccactttatgtttataaacttgaacaggttaacgataaagggaaaccccataccaattatttcggccgctgcaatgtcagcgaacatgaacgcctgattttgttaagcccgcataaaccggaagcgaatgacgaactggtgacctattccctgggtaaatttggtcagcgggcgctggatttttacagcattcatgtgacgcgggaaagtaaccatccggtaaagccactggaacaaatcggcggtaacagctgcgcctctggcccggttggcaaagcgcttagcgatgcctgtatgggcgcggtggcgagctttctgacaaaataccaggatattatcctggagcatcagaaggtgatcaaaaagaacgagaaacgtctggcaaatttaaaggatattgcctccgctaacggcctggcgttcccgaagattaccttaccgccgcagccgcacaccaaagaaggtatcgaagcgtataacaacgttgttgcccagatcgtcatctgggtgaatctcaacctgtggcaaaaactgaaaattggtcgtgatgaagcaaaaccgttgcagcgactgaaaggattcccgtcgtttccgctggttgaacgacaggcgaacgaagtggattggtgggatatggtttgtaacgtcaaaaaattgatcaacgaaaaaaaggaagatggcaaagttttctggcaaaatctggcgggttacaaacgtcaggaggcgttgcgtccgtatctctcttcagaagaagatcgcaaaaaaggcaagaagtttgctcgctatcagtttggcgatttattactgcatctggaaaaaaaacacggcgaagactggggcaaagtgtacgatgaagcctgggagcgtatcgacaaaaaagtggaaggtttgtcgaaacatattaaactcgaagaagagcgccgcagtgaagatgcgcagtcaaaagcagcgctgacggactggttacgtgcgaaagccagttttgtgattgaaggattaaaagaagctgataaagatgaattttgccgttgcgaactgaaactgcaaaaatggtatggcgacctgcgcggcaaaccgttcgccattgaggcagaaaatagcatccttgatatctccggtttcagcaaacaatataactgcgcgtttatttggcagaaagacggcgtgaaaaagcttaacctgtatctgatcattaactattttaaaggcgggaaactgcgtttcaagaaaatcaagccggaagcatttgaagccaatcgtttttataccgttattaataaaaaaagcggtgaaatcgtgccgatggaagttaattttaactttgatgatccgaacttgattattctgccgctggcattcggtaaacggcagggccgtgagtttatctggaacgacctgttatcgctggaaacgggcagcctgaaattagccaacggtcgcgtcattgaaaaaacgctctacaaccgccgcacccgccaggatgagccggcactgtttgtcgcgctgacctttgaacggcgtgaagtcctcgatagcagcaacatcaaaccaatgaaccttatcggtattgatcgtggtgaaaacattcctgccgttatcgccctgactgatccagaaggctgcccgctttctcgcttcaaagattcactgggcaacccgacccatatcctccgtattggcgagagctacaaagagaaacagcgtaccattcaggcaaagaaagaagtggagcagcgtcgcgcgggcggctatagccgtaaatatgccagcaaagctaaaaacctggcggatgacatggtgcgtaacacggcgcgcgatttgctgtactacgccgtcacccaggacgcgatgctgatttttgagaacctctcccgcggttttgggcgtcagggtaaacgcacgtttatggcggaacgccagtatacgcgtatggaggactggctgaccgcgaagctggcctatgaaggcttgtctaaaacttacctgagcaagaccctggctcagtacaccagtaaaacctgtagtaattgcggctttaccatcaccagcgccgattatgaccgcgtgctggaaaagctgaagaaaaccgccaccggctggatgaccaccatcaatggtaaagagcttaaagtcgaagggcagattacttattacaaccgttataagcggcaaaacgtggtgaaagatctgtcggttgagctggaccgtttgtctgaagaaagcgtgaacaatgatatcagctcctggaccaaaggtcgttccggcgaagcgttaagtctgttgaaaaagcgctttagccatcgcccggtgcaggaaaaattcgtttgcctgaactgtggcttcgaaacccacgccgacgagcaagcggcgctcaatattgcgcgtagctggctgttcctgcgcagccaggaatataaaaaatatcaaaccaacaaaacaactggcaataccgacaagcgtgcctttgttgaaacctggcagagcttctatcgcaagaagctgaaagaggtctggaaaccggcggtaccacctgcgccaaagaaaaaacgcaaagtgagcgaaaatctttattttcaaggtagcgcatggagtcatcctcaattcgagaaaggtggaggttctggcggtggatcgggaggttcagcgtggagccacccgcagttcgaaaaaggaaggggatccggctgctaa

SEQ ID NO: 229 - DNA, 2928 bp, Artificial Sequence
  CasX 457 variant
caagagatcaagagaatcaacaagatcagaaggagactggtcaaggacagcaacacaaagaaggccggcaagacaggccccatgaaaaccctgctcgtcagagtgatgacccctgacctgagagagcggctggaaaacctgagaaagaagcccgagaacatccctcagcctatcagcaacaccagcagggccaacctgaacaagctgctgaccgactacaccgagatgaagaaagccatcctgcacgtgtactgggaagagttccagaaagaccccgtgggcctgatgagcagagttgctcagcccgctcctaagaacatcgaccagagaaagctgatccccgtgaaggacggcaacgagagactgacctctagcggctttgcctgcagccagtgttgccagcctctgtacgtgtacaagctggaacaagtgaacgacaagggcaagccccacaccaactacttcggcagatgcaacgtgtccgagcacgagaggctgatcctgctgtctcctcacaagcccgaggccaacgatgagctggtcacatacagcctgggcaagttcggacagagagccctggacttctacagcatccacgtgaccagggagagcaatcaccctgtgaagcccctggaacagatcggcggcaatagctgtgcctctggacctgtgggaaaagccctgagcgacgcctgtatgggagccgtggcatccttcctgaccaagtaccaggacatcatcctggaacacaagaaagtgatcaagaagaacgagaaaagactggccaacctcaaggatatcgccagcgctaacggcctggcctttcctaagatcaccctgcctccacagcctcacaccaaagagggcatcgaggcctacaacaacgtggtggcccagatcgtgatttgggtcaacctgaatctgtggcagaagctgaagatcggcagggacgaagccaagccactgcagagactgaagggcttccctagcttccctctggtggaaagacaggccaatgaagtggattggtgggacatggtctgcaacgtgaagaagctgatcaacgagaagaaagaggatggcaaggttttctggcagaacctggccggctacaagagacaagaagccctgaggccttacctgagcagccccgaggaccggaagaagggcaagaagttcgccagataccagctgggcgacctgctgctgcacctggaaaagaagcacggcgaggactggggcaaagtgtacgatgaggcctgggagagaatcgacaagaaggtggaaggcctgagcaagcacattaagctggaagaggaaagaaggagcgaggacgcccaatctaaagccgctctgaccgattggctgagagccaaggccagctttgtgatcgagggcctgaaagaggccgacaaggacgagttctgcagatgcgagctgaagctgcagaagtggtacggcgatctgagaggcaagcccttcgccattgaggccgagaacagcatcctggacatcagcggcttcagcaagcagtacaactgcgccttcatttggcagaaagacggcgtcaagaaactgaacctgtacctgatcatcaattacttcaaaggcggcaagctgcggttcaagaagatcaaacccgaggccttcgaggctaacagattctacaccgtgatcaacaaaaagtccggcgagatcgtgcccatggaagtgaacttcaacttcgacgaccccaacctgattatcctgcctctggccttcggcaagagacagggcagagagttcatctggaacgatctgctgagcctggaaaccggctctctgaagctggccaatggcagagtgatcgagaaacccctgtacaacaggagaaccagacaggacgagcctgctctgtttgtggccctgaccttcgagagaagagaggtgctggacagcagcaacatcaagcccatgaacctgatcggcgtggaccggggcgagaatatccctgctgtgatcgccctgacagaccctgaaggatgcccactgagcagattcaaggactccctgggcaaccctacacacatcctgagaatcggcgagagctacaaagagaagcagaggacaatccaggccaagaaagaggtggaacagagaagagccggcggatactctaggaagtacgccagcaaggccaagaatctggccgacgacatggtccgaaacaccgccagagatctgctgtactacgccgtgacacaggacgccatgctgatcttcgagaatctgagcagaggcttcggccggcagggcaagagaacctttatggccgagaggcagtacaccagaatggaagattggctcacagctaaactggcctacgagggactgagcaagacctacctgtccaaaacactggcccagtatacctccaagacctgcagcaattgcggcttcaccatcaccagcgccgactacgacagagtgctggaaaagctcaagaaaaccgccaccggctggatgaccaccatcaacggcaaagagctgaaggttgagggccagatcacctactacaacaggaggaagaggcagaacgtcgtgaaggatctgagcgtggaactggacagactgagcgaagagagcgtgaacaacgacatcagcagctggacaaagggcagatcaggcgaggctctgagcctgctgaagaagaggtttagccacagacctgtgcaagagaagttcgtgtgcctgaactgcggcttcgagacacacgccgatgaacaggctgccctgaacattgccagaagctggctgttcctgagaagccaagagtacaagaagtaccagaccaacaagaccaccggcaacaccgacaagagggcctttgtggaaacctggcagagcttctacagaaaaaagctgaaagaagtctggaagcccgccgtg

SEQ ID NO: 230 - DNA, 2928 bp, Artificial Sequence
  CasX 438 variant
caagagatcaagagaatcaacaagatcagaaggagactggtcaaggacagcaacacaaagaaggccggcaagacaggccccatgaaaaccctgctcgtcagagtgatgacccctgacctgagagagcggctggaaaacctgagaaagaagcccgagaacatccctcagcctatcagcaacaccagcagggccaacctgaacaagctgctgaccgactacaccgagatgaagaaagccatcctgcacgtgtactgggaagagttccagaaagaccccgtgggcctgatgagcagagttgctcagcccgctcctaagaacatcgaccagagaaagctgatccccgtgaaggacggcaacgagagactgacctctagcggctttgcctgcagccagtgttgccagcctctgtacgtgtacaagctggaacaagtgaacgacaagggcaagccccacaccaactacttcggcagatgcaacgtgtccgagcacgagaggctgatcctgctgtctcctcacaagcccgaggccaacgatgagctggtcacatacagcctgggcaagttcggacagagagccctggacttctacagcatccacgtgaccagggagagcaatcaccctgtgaagcccctggaacagatcggcggcaatagctgtgcctctggacctgtgggaaaagccctgagcgacgcctgtatgggagccgtggcatccttcctgaccaagtaccaggacatcatcctggaacaccagaaagtgatcaagaagaacgagaaaagactggccaacctcaaggatatcgccagcgctaacggcctggcctttcctaagatcaccctgcctccacagcctcacaccaaagagggcatcgaggcctacaacaacgtggtggcccagatcgtgatttgggtcaacctgaatctgtggcagaagctgaagatcggcagggacgaagccaagccactgcagagactgaagggcttccctagcttccctctggtggaaagacaggccaatgaagtggattggtgggacatggtctgcaacgtgaagaagctgatcaacgagaagaaagaggatggcaaggttttctggcagaacctggccggctacaagagacaagaagccctgaggccttacctgagcagcgaagaggaccggaagaagggcaagaagttcgccagataccagctgggcgacctgctgaagcacctggaaaagaagcacggcgaggactggggcaaagtgtacgatgaggcctgggagagaatcgacaagaaggtggaaggcctgagcaagcacattaagctggaagaggaaagaaggagcgaggacgcccaatctaaagccgctctgaccgattggctgagagccaaggccagctttgtgatcgagggcctgaaagaggccgacaaggacgagttctgcagatgcgagctgaagctgcagaagtggtacggcgatctgagaggcaagcccttcgccattgaggccgagaacagcatcctggacatcagcggcttcagcaagcagtacaactgcgccttcatttggcagaaagacggcgtcaagaaactgaacctgtacctgatcatcaattacttcaaaggcggcaagctgcggttcaagaagatcaaacccgaggccttcgaggctaacagattctacaccgtgatcaacaaaaagtccggcgagatcgtgcccatggaagtgaacttcaacttcgacgaccccaacctgattatcctgcctctggccttcggcaagagacagggcagagagttcatctggaacgatctgctgagcctggaaaccggctctctgaagctggccaatggcagagtgatcgagaaaaccctgtacaacaggagaaccagacaggacgagcctgctctgtttgtggccctgaccttcgagagaagagaggtgctggacagcagcaacatcaagcccatgaacctgatcggcgtggaccggggcgagaatatccctgctgtgatcgccctgacagaccctgaaggatgcccactgagcagattcaaggactccctgggcaaccctacacacatcctgagaatcggcgagagctacaaagagaagcagaggacaatccaggccaagaaagaggtggaacagagaagagccggcggatactctaggaagtacgccagcaaggccaagaatctggccgacgacatggtccgaaacaccgccagagatctgctgtactacgccgtgacacaggacgccatgctgatcttcgagaatctgagcagaggcttcggccggcagggcaagagaacctttatggccgagaggcagtacaccagaatggaagattggctcacagctaaactggcctacgagggactgagcaagacctacctgtccaaaacactggcccagtatacctccaagacctgcagcaattgcggcttcaccatcaccagcgccgactacgacagagtgctggaaaagctcaagaaaaccgccaccggctggatgaccaccatcaacggcaaagagctgaaggttgagggccagatcacctactacaacaggaggaagaggcagaacgtcgtgaaggatctgagcgtggaactggacagactgagcgaagagagcgtgaacaacgacatcagcagctggacaaagggcagatcaggcgaggctctgagcctgctgaagaagaggtttagccacagacctgtgcaagagaagttcgtgtgcctgaactgcggcttcgagacacacgccgatgaacaggctgccctgaacattgccagaagctggctgttcctgagaagccaagagtacaagaagtaccagaccaacaagaccaccggcaacaccgacaagagggcctttgtggaaacctggcagagcttctacagaaaaaagctgaaagaagtctggaagcccgccgtg

SEQ ID NO: 231 - protein, 976 aa, Artificial Sequence; identical to SEQ ID NO: 105
  CasX 119 variant

SEQ ID NO: 232 - protein, 976 aa, Artificial Sequence
  CasX 457 variant
QEIKRINKIRRRLVKDSNTKKAGKTGPMKTLLVRVMTPDLRERLENLRKKPENIPQPISNTSRANLNKLLTDYTEMKKAILHVYWEEFQKDPVGLMSRVAQPAPKNIDQRKLIPVKDGNERLTSSGFACSQCCQPLYVYKLEQVNDKGKPHTNYFGRCNVSEHERLILLSPHKPEANDELVTYSLGKFGQRALDFYSIHVTRESNHPVKPLEQIGGNSCASGPVGKALSDACMGAVASFLTKYQDIILEHKKVIKKNEKRLANLKDIASANGLAFPKITLPPQPHTKEGIEAYNNVVAQIVIWVNLNLWQKLKIGRDEAKPLQRLKGFPSFPLVERQANEVDWWDMVCNVKKLINEKKEDGKVFWQNLAGYKRQEALRPYLSSPEDRKKGKKFARYQLGDLLLHLEKKHGEDWGKVYDEAWERIDKKVEGLSKHIKLEEERRSEDAQSKAALTDWLRAKASFVIEGLKEADKDEFCRCELKLQKWYGDLRGKPFAIEAENSILDISGFSKQYNCAFIWQKDGVKKLNLYLIINYFKGGKLRFKKIKPEAFEANRFYTVINKKSGEIVPMEVNFNFDDPNLIILPLAFGKRQGREFIWNDLLSLETGSLKLANGRVIEKPLYNRRTRQDEPALFVALTFERREVLDSSNIKPMNLIGVDRGENIPAVIALTDPEGCPLSRFKDSLGNPTHILRIGESYKEKQRTIQAKKEVEQRRAGGYSRKYASKAKNLADDMVRNTARDLLYYAVTQDAMLIFENLSRGFGRQGKRTFMAERQYTRMEDWLTAKLAYEGLSKTYLSKTLAQYTSKTCSNCGFTITSADYDRVLEKLKKTATGWMTTINGKELKVEGQITYYNRRKRQNVVKDLSVELDRLSEESVNNDISSWTKGRSGEALSLLKKRFSHRPVQEKFVCLNCGFETHADEQAALNIARSWLFLRSQEYKKYQTNKTTGNTDKRAFVETWQSFYRKKLKEVWKPAV

SEQ ID NO: 233 - protein, 976 aa, Artificial Sequence
  CasX 438 variant
QEIKRINKIRRRLVKDSNTKKAGKTGPMKTLLVRVMTPDLRERLENLRKKPENIPQPISNTSRANLNKLLTDYTEMKKAILHVYWEEFQKDPVGLMSRVAQPAPKNIDQRKLIPVKDGNERLTSSGFACSQCCQPLYVYKLEQVNDKGKPHTNYFGRCNVSEHERLILLSPHKPEANDELVTYSLGKFGQRALDFYSIHVTRESNHPVKPLEQIGGNSCASGPVGKALSDACMGAVASFLTKYQDIILEHQKVIKKNEKRLANLKDIASANGLAFPKITLPPQPHTKEGIEAYNNVVAQIVIWVNLNLWQKLKIGRDEAKPLQRLKGFPSFPLVERQANEVDWWDMVCNVKKLINEKKEDGKVFWQNLAGYKRQEALRPYLSSEEDRKKGKKFARYQLGDLLKHLEKKHGEDWGKVYDEAWERIDKKVEGLSKHIKLEEERRSEDAQSKAALTDWLRAKASFVIEGLKEADKDEFCRCELKLQKWYGDLRGKPFAIEAENSILDISGFSKQYNCAFIWQKDGVKKLNLYLIINYFKGGKLRFKKIKPEAFEANRFYTVINKKSGEIVPMEVNFNFDDPNLIILPLAFGKRQGREFIWNDLLSLETGSLKLANGRVIEKTLYNRRTRQDEPALFVALTFERREVLDSSNIKPMNLIGVDRGENIPAVIALTDPEGCPLSRFKDSLGNPTHILRIGESYKEKQRTIQAKKEVEQRRAGGYSRKYASKAKNLADDMVRNTARDLLYYAVTQDAMLIFENLSRGFGRQGKRTFMAERQYTRMEDWLTAKLAYEGLSKTYLSKTLAQYTSKTCSNCGFTITSADYDRVLEKLKKTATGWMTTINGKELKVEGQITYYNRRKRQNVVKDLSVELDRLSEESVNNDISSWTKGRSGEALSLLKKRFSHRPVQEKFVCLNCGFETHADEQAALNIARSWLFLRSQEYKKYQTNKTTGNTDKRAFVETWQSFYRKKLKEVWKPAV

SEQ ID NO: 234 - DNA, 22 bp, Artificial Sequence
  T7 promoter primer
gaaattaatacgactcactata

SEQ ID NO: 235 - DNA, 79 bp, Artificial Sequence
  sg1 backbone fwd
gaaattaatacgactcactataggtggcgcttttatctcattactttgagagccatcaccagcgactatgtcgtatggg

SEQ ID NO: 236 - DNA, 78 bp, Artificial Sequence
  sg1 backbone rev
ctttgatgcttcttatttatcggatttctctccgataaataagcgctttacccatacgacatagtcgctggtgatggc

SEQ ID NO: 237 - DNA, 54 bp, Artificial Sequence
  sg1.7.37 spacer primer
cggagcgagacatctcggccctttgatgcttcttatttatcggatttctctccg

SEQ ID NO: 238 - DNA, 87 bp, Artificial Sequence
  sg2 backbone fwd
gaaattaatacgactcactataggtactggcgcttttatctcattactttgagagccatcaccagcgactatgtcgtatgggtaaag

SEQ ID NO: 239 - DNA, 78 bp, Artificial Sequence; identical to SEQ ID NO: 236
  sg2 backbone rev

SEQ ID NO: 240 - DNA, 54 bp, Artificial Sequence; identical to SEQ ID NO: 237
  sg2.7.37 spacer primer

SEQ ID NO: 241 - DNA, 90 bp, Artificial Sequence
  sg32 backbone fwd
gaaattaatacgactcactataggtactggcgcttttatctcattactttgagagccatcaccagcgactatgtcgtatgggtaaagcgc

SEQ ID NO: 242 - DNA, 46 bp, Artificial Sequence
  sg32 backbone rev
ctttgatgcttccctccgaagagggcgctttacccatacgacatag

SEQ ID NO: 243 - DNA, 43 bp, Artificial Sequence
  sg32.7.37 spacer primer
cggagcgagacatctcggccctttgatgcttccctccgaagag

SEQ ID NO: 244 - DNA, 90 bp, Artificial Sequence
  sg64 backbone fwd
gaaattaatacgactcactataggtactggcgcctttatctcattactttgagagccatcaccagcgactatgtcgtatgggtaaagcgc

SEQ ID NO: 245 - DNA, 54 bp, Artificial Sequence
  sg64 backbone rev
ctttgatgcttcttacggaccgaagtccgtaagcgctttacccatacgacatag

SEQ ID NO: 246 - DNA, 45 bp, Artificial Sequence
  sg64.7.37 spacer primer
cggagcgagacatctcggccctttgatgcttcttacggaccgaag

SEQ ID NO: 247 - DNA, 87 bp, Artificial Sequence
  sg174 backbone fwd
gaaattaatacgactcactataactggcgcttttatctgattactttgagagccatcaccagcgactatgtcgtagtgggtaaagct

SEQ ID NO: 248 - DNA, 50 bp, Artificial Sequence
  sg174 backbone rev
ctttgatgctccctccgaagagggagctttacccactacgacatagtcgc

SEQ ID NO: 249 - DNA, 36 bp, Artificial Sequence
  sg174.7.37 spacer primer
cggagcgagacatctcggccctttgatgctccctcc

SEQ ID NO: 250 - RNA, 127 nt, Artificial Sequence
  gRNA sequence
gguggcgcuuuuaucucauuacuuugagagccaucaccagcgacuaugucguauggguaaagcgcuuauuuaucggagagaaauccgauaaauaagaagcaucaaagggccgagaugucucgcuccg

SEQ ID NO: 251 - RNA, 130 nt, Artificial Sequence
  gRNA sequence
gguacuggcgcuuuuaucucauuacuuugagagccaucaccagcgacuaugucguauggguaaagcgcuuauuuaucggagagaaauccgauaaauaagaagcaucaaagggccgagaugucucgcuccg

SEQ ID NO: 252 - RNA, 107 nt, Artificial Sequence
  gRNA sequence
gguacuggcgcuuuuaucucauuacuuugagagccaucaccagcgacuaugucguauggguaaagcgcccucuucggagggaagcaucaaagggccgagaugucucg

SEQ ID NO: 253 - RNA, 120 nt, Artificial Sequence
  gRNA sequence
gguacuggcgccuuuaucucauuacuuugagagccaucaccagcgacuaugucguauggguaaagcgcuuacggacuucgguccguaagaagcaucaaagggccgagaugucucgcuccg

SEQ ID NO: 254 - RNA, 109 nt, Artificial Sequence
  gRNA sequence
acuggcgcuuuuaucugauuacuuugagagccaucaccagcgacuaugucguaguggguaaagcucccucuucggagggagcaucaaagggccgagaugucucgcuccg

SEQ ID NO: 255 - DNA, 60 bp, Artificial Sequence
  B2M target oligo
tgaagctgacagcattcgggccgagatgtctcgctccgtggccttagctgtgctcgcgct

SEQ ID NO: 256 - DNA, 60 bp, Artificial Sequence; identical to SEQ ID NO: 255
  B2M target oligo

SEQ ID NO: 257 - DNA, 89 bp, Artificial Sequence
  HDV antigenomic ribozyme
gggtcggcatggcatctccacctcctcgcggtccgacctgggcatccgaaggaggacgcacgtccactcggatggctaagggagagcca

SEQ ID NO: 258 - DNA, 86 bp, Artificial Sequence
  HDV genomic ribozyme
ggccggcatggtcccagcctcctcgctggcgccggctgggcaacattccgaggggaccgtcccctcggtaatggcgaatgggaccc

SEQ ID NO: 259 - DNA, 69 bp, Artificial Sequence
  HDV ribozyme (v1)
gatggccggcatggtcccagcctcctcgctggcgccggctgggcaacaccttcgggtggcgaatgggac

SEQ ID NO: 260 - DNA, 78 bp, Artificial Sequence
  HDV ribozyme (v2)
ttttggccggcatggtcccagcctcctcgctggcgccggctgggcaacatgcttcggcatggcgaatgggaccccggg

SEQ ID NO: 261 - DNA, 78 bp, Artificial Sequence
  Hatchet
cattcctcagaaaatgacaaacctgtggggcgtaagtagatcttcggatctatgatcgtgcagacgttaaaatcaggt

SEQ ID NO: 262 - DNA, 64 bp, Artificial Sequence
  env25 pistol ribozyme (with CUUCGG loop)
cgtggttagggccacgttaaatagttgcttaagccctaagcgttgatcttcggatcaggtgcaa

SEQ ID NO: 263 - DNA, 60 bp, Artificial Sequence
  HH15 Minimal Hammerhead ribozyme
gggagccccgctgatgaggtcggggagaccgaaagggacttcggtccctacggggctccc

SEQ ID NO: 264 - DNA, 52 bp, Artificial Sequence
  sTRSV WT viral Hammerhead ribozyme
cctgtcaccggatgtgctttccggtctgatgagtccgtgaggacgaaacagg

SEQ ID NO: 265 - DNA, 63 bp, Artificial Sequence
  Hammerhead ribozyme
cgactactgatgagtccgtgaggacgaaacgagtaagctcgtctagtcgcgtgtagcgaagca

SEQ ID NO: 266 - DNA, 49 bp, Artificial Sequence
  Hammerhead ribozyme, smaller scar
cgactactgatgagtccgtgaggacgaaacgagtaagctcgtctagtcg

SEQ ID NO: 267 - DNA, 63 bp, Artificial Sequence
  Hammerhead ribozyme, guide scaffold scar
ccagtactgatgagtccgtgaggacgaaacgagtaagctcgtctactggcgcttttatctcat

SEQ ID NO: 268 - DNA, 77 bp, Artificial Sequence
  Twisted Sister 1
acccgcaaggccgacggcatccgccgccgctggtgcaagtccagccgccccttcgggggcgggcgctcatgggtaac

SEQ ID NO: 269 - DNA, 76 bp, Artificial Sequence
  Env-9 Twister
ggcaataaagcggttacaagcccgcaaaaatagcagagtaatgtcgcgatagcgcggcattaatgcagctttattg

SEQ ID NO: 270 - DNA, 36 bp, Artificial Sequence
  RBMX recruiting motif
ccacccccaccaccacccccacccccaccaccaccc

SEQ ID NO: 271 - RNA, 109 nt, Artificial Sequence
  gRNA sequence
acuggcgcuuuuaucugauuacuuugagagccaucaccagcgacuaugucguaguggguaaagcucccucuucggagggagcaucaaaguggagccugugauaaaagca

SEQ ID NO: 272 - RNA, 20 nt, Artificial Sequence
  spacer sequence ATCN PAM
uucgggcucugguugggggu

SEQ ID NO: 273 - RNA, 20 nt, Artificial Sequence
  spacer sequence ATCN PAM
agucucuauuauuuccuugc

SEQ ID NO: 274 - RNA, 20 nt, Artificial Sequence
  spacer sequence ATCN PAM
auauucaugcgcccuuucuc

SEQ ID NO: 275 - RNA, 20 nt, Artificial Sequence
  spacer sequence ATCN PAM
guguuaaaggagaaaagagc

SEQ ID NO: 276 - RNA, 20 nt, Artificial Sequence
  spacer sequence ATCN PAM
gcagugggcucuuuucuccu

SEQ ID NO: 277 - RNA, 20 nt, Artificial Sequence
  spacer sequence ATCN PAM
cuucaagcccacccccaccu

SEQ ID NO: 278 - RNA, 20 nt, Artificial Sequence
  spacer sequence ATCN PAM
cugcugccaccaccaccacu

SEQ ID NO: 279 - RNA, 20 nt, Artificial Sequence
  spacer sequence ATCN PAM
gggacuacacaccaccacac

SEQ ID NO: 280 - RNA, 20 nt, Artificial Sequence
  spacer sequence ATCN PAM
uguuggccaggcuggucucg

SEQ ID NO: 281 - RNA, 20 nt, Artificial Sequence
  spacer sequence ATCN PAM
cuugaggccaggaguucgag

SEQ ID NO: 282 - RNA, 20 nt, Artificial Sequence
  spacer sequence ATCN PAM
acuugcuuuggccucccaaa

SEQ ID NO: 283 - RNA, 20 nt, Artificial Sequence
  spacer sequence ATCN PAM
ccagccgagugugguggcuc

SEQ ID NO: 284 - RNA, 20 nt, Artificial Sequence
  spacer sequence ATCN PAM
guccaaguauaaggaacccc

SEQ ID NO: 285 - RNA, 20 nt, Artificial Sequence
  spacer sequence ATCN PAM
gacaccauguaucuguccaa

SEQ ID NO: 286 - RNA, 20 nt, Artificial Sequence
  spacer sequence ATCN PAM
aggucuaucagacaccaugu

SEQ ID NO: 287 - RNA, 20 nt, Artificial Sequence
  spacer sequence ATCN PAM
gaagaaauagagauaaugau

SEQ ID NO: 288 - RNA, 20 nt, Artificial Sequence
  spacer sequence ATCN PAM
cuauuucuucagaugacaag

SEQ ID NO: 289 - RNA, 20 nt, Artificial Sequence
  spacer sequence ATCN PAM
uuaucucuauuucuucagau

SEQ ID NO: 290 - RNA, 20 nt, Artificial Sequence
  spacer sequence ATCN PAM
ucuuaaguugcuauagguag

SEQ ID NO: 291 - RNA, 20 nt, Artificial Sequence
  spacer sequence ATCN PAM
uguggggagaaguggggaca

SEQ ID NO: 292 - RNA, 20 nt, Artificial Sequence
  spacer sequence ATCN PAM
ugcauaugagaaaauggagg

SEQ ID NO: 293 - RNA, 20 nt, Artificial Sequence
  spacer sequence ATCN PAM
guggcuucaacaccguugag

SEQ ID NO: 294 - RNA, 20 nt, Artificial Sequence
  spacer sequence ATCN PAM
uguuccaugccagaggaaag

SEQ ID NO: 295 - RNA, 20 nt, Artificial Sequence
  spacer sequence ATCN PAM
uugggcaucuuguuccaugc

SEQ ID NO: 296 - RNA, 20 nt, Artificial Sequence
  spacer sequence ATCN PAM
uaccaucaacacaaucuaaa

SEQ ID NO: 297 - RNA, 20 nt, Artificial Sequence
  spacer sequence ATCN PAM
acacaaucuaaacugcagca

SEQ ID NO: 298 - RNA, 20 nt, Artificial Sequence
  spacer sequence ATCN PAM
aaacugcagcaaaaugccaa

SEQ ID NO: 299 - RNA, 20 nt, Artificial Sequence
  spacer sequence ATCN PAM
aguaaacagagaucuuggac

SEQ ID NO: 300 - RNA, 20 nt, Artificial Sequence
  spacer sequence ATCN PAM
cuguuuacuagauauuuucc

SEQ ID NO: 301 - RNA, 20 nt, Artificial Sequence
  spacer sequence ATCN PAM
uggacuguugagcuaaggau

SEQ ID NO: 302 - RNA, 20 nt, Artificial Sequence
  spacer sequence ATCN PAM
uuagcucaacaguccaagau

SEQ ID NO: 303 - RNA, 20 nt, Artificial Sequence
  spacer sequence ATCN PAM
aagcaaagaggaccucaggg

SEQ ID NO: 304 - RNA, 20 nt, Artificial Sequence
  spacer sequence ATCN PAM
cugagguccucuuugcuugg

SEQ ID NO: 305 - RNA, 20 nt, Artificial Sequence
  spacer sequence ATCN PAM
cuucuuaggacaauugugag

SEQ ID NO: 306 - RNA, 20 nt, Artificial Sequence
  spacer sequence ATCN PAM
uagauagcacagccagagcu

SEQ ID NO: 307 - RNA, 20 nt, Artificial Sequence
  spacer sequence ATCN PAM
aggauaggcuggaggaaggg

SEQ ID NO: 308 - RNA, 20 nt, Artificial Sequence
  spacer sequence ATCN PAM
augcugugcguuggguagac

SEQ ID NO: 309 - RNA, 20 nt, Artificial Sequence
  spacer sequence ATCN PAM
uuucccagugcgcauuaaca

SEQ ID NO: 310 - RNA, 20 nt, Artificial Sequence
  spacer sequence ATCN PAM
gaaugucgaagguacucugg

SEQ ID NO: 311 - RNA, 20 nt, Artificial Sequence
  spacer sequence ATCN PAM
uugaagccccagaucaauuc

SEQ ID NO: 312 - RNA, 20 nt, Artificial Sequence
  spacer sequence ATCN PAM
ggggcuucaaggaucagaau

SEQ ID NO: 313 - RNA, 20 nt, Artificial Sequence
  spacer sequence ATCN PAM
auuccuacugcuuccaagaa

SEQ ID NO: 314 - RNA, 20 nt, Artificial Sequence
  spacer sequence ATCN PAM
ucaugaguucuuggaugaaa

SEQ ID NO: 315 - RNA, 20 nt, Artificial Sequence
  spacer sequence ATCN PAM
aagaacucaugaggaugagc

SEQ ID NO: 316 - RNA, 20 nt, Artificial Sequence
  spacer sequence ATCN PAM
uuauugguucuccauguucu

SEQ ID NO: 317 - RNA, 20 nt, Artificial Sequence
  spacer sequence ATCN PAM
acaacauauacucacccaga

SEQ ID NO: 318 - RNA, 20 nt, Artificial Sequence
  spacer sequence ATCN PAM
gggugaguauauguuguaga

SEQ ID NO: 319 - RNA, 20 nt, Artificial Sequence
  spacer sequence ATCN PAM
ugagaacaugccucuaucuc

SEQ ID NO: 320 - RNA, 20 nt, Artificial Sequence
  spacer sequence ATCN PAM
cuaucuuuauccauaucccu

SEQ ID NO: 321 - RNA, 20 nt, Artificial Sequence
  spacer sequence ATCN PAM
uuauccauaucccuaccacc

SEQ ID NO: 322 - RNA, 20 nt, Artificial Sequence
  spacer sequence ATCN PAM
auaucccuaccaccugguac

SEQ ID NO: 323 - RNA, 20 nt, Artificial Sequence
  spacer sequence ATCN PAM
cuaccaccugguacuccugu

SEQ ID NO: 324 - RNA, 20 nt, Artificial Sequence
  spacer sequence ATCN PAM
gaggacaggaguaccaggug

SEQ ID NO: 325 - RNA, 20 nt, Artificial Sequence
  spacer sequence ATCN PAM
caaaggaggggucaaguuuu

SEQ ID NO: 326 - RNA, 20 nt, Artificial Sequence
  spacer sequence ATCN PAM
uaacuaaacucugcugcuuu

SEQ ID NO: 327 - RNA, 20 nt, Artificial Sequence
  spacer sequence ATCN PAM
uccuuccaagcccuuuaacu

SEQ ID NO: 328 - RNA, 20 nt, Artificial Sequence
  spacer sequence ATCN PAM
gaaucuccuuggcacuucag

SEQ ID NO: 329 - RNA, 20 nt, Artificial Sequence
  spacer sequence ATCN PAM
ccuuggcacuucagucaagg

SEQ ID NO: 330 - RNA, 20 nt, Artificial Sequence
  spacer sequence ATCN PAM
gugcauugugaccccuaggu

SEQ ID NO: 331 - RNA, 20 nt, Artificial Sequence
  spacer sequence ATCN PAM
agguuucuggaaggccagaa

SEQ ID NO: 332 - RNA, 20 nt, Artificial Sequence
  spacer sequence ATCN PAM
gcucuaugacaucuucugaa

SEQ ID NO: 333 - RNA, 20 nt, Artificial Sequence
  spacer sequence ATCN PAM
ucugaacucugcuuuuccca

SEQ ID NO: 334 - RNA, 20 nt, Artificial Sequence
  spacer sequence ATCN PAM
cuuuggccccuugccaccca

SEQ ID NO: 335 - RNA, 20 nt, Artificial Sequence
  spacer sequence ATCN PAM
cacccccaccccaucacgua

SEQ ID NO: 336 - RNA, 20 nt, Artificial Sequence
  spacer sequence ATCN PAM
cguaacuguuuaguuaacac

SEQ ID NO: 337 - RNA, 20 nt, Artificial Sequence
  spacer sequence ATCN PAM
uuuuauauccuuccagauuu

SEQ ID NO: 338 - RNA, 20 nt, Artificial Sequence
  spacer sequence ATCN PAM
uuccagauuuccuuuacgca

SEQ ID NO: 339 - RNA, 20 nt, Artificial Sequence
  spacer sequence ATCN PAM
ggaaggauauaaaaagauaa

SEQ ID NO: 340 - RNA, 20 nt, Artificial Sequence
  spacer sequence ATCN PAM
auuacaaaaacaaccucaug

SEQ ID NO: 341 - RNA, 20 nt, Artificial Sequence
  spacer sequence ATCN PAM
ucugagccccgggggcaacg

SEQ ID NO: 342 - RNA, 20 nt, Artificial Sequence
  spacer sequence ATCN PAM
gagccccgggggcaacgaug

SEQ ID NO: 343 - RNA, 20 nt, Artificial Sequence
  spacer sequence ATCN PAM
uugcccccggggcucagaug

SEQ ID NO: 344 - RNA, 20 nt, Artificial Sequence
  spacer sequence ATCN PAM
gugguaugccaggccuccca

SEQ ID NO: 345 - RNA, 20 nt, Artificial Sequence
  spacer sequence ATCN PAM
ccucagccuuucaacuuggu

SEQ ID NO: 346 - RNA, 20 nt, Artificial Sequence
  spacer sequence ATCN PAM
ugggcuaggaaucaggagac

SEQ ID NO: 347 - RNA, 20 nt, Artificial Sequence
  spacer sequence ATCN PAM
ggagacuuggauuuccugca

SEQ ID NO: 348 - RNA, 20 nt, Artificial Sequence
  spacer sequence ATCN PAM
aagucuccugauuccuagcc

SEQ ID NO: 349 - RNA, 20 nt, Artificial Sequence
  spacer sequence ATCN PAM
ucuccaagccucguucuucu

SEQ ID NO: 350 - RNA, 20 nt, Artificial Sequence
  spacer sequence ATCN PAM
uuagaaugaggagauggccc

SEQ ID NO: 351 - RNA, 20 nt, Artificial Sequence
  spacer sequence ATCN PAM
ccucauucuaaagaugagaa

SEQ ID NO: 352 - RNA, 20 nt, Artificial Sequence
  spacer sequence ATCN PAM
ccugggccaucuccucauuc

SEQ ID NO: 353 - RNA, 20 nt, Artificial Sequence
  spacer sequence ATCN PAM
uccagggaucugcccacacc

SEQ ID NO: 354 - RNA, 20 nt, Artificial Sequence
  spacer sequence ATCN PAM
cuggaagaucaccugggcca

SEQ ID NO: 355 - RNA, 20 nt, Artificial Sequence
  spacer sequence ATCN PAM
gcccacaccagcacggcccu

SEQ ID NO: 356 - RNA, 20 nt, Artificial Sequence
  spacer sequence ATCN PAM
ccauagcacacaaugucugc

SEQ ID NO: 357 - RNA, 20 nt, Artificial Sequence
  spacer sequence ATCN PAM
acacgcuaaugggcacaggu

SEQ ID NO: 358 - RNA, 20 nt, Artificial Sequence
  spacer sequence ATCN PAM
cagcuaaaauggcacagccu

SEQ ID NO: 359 - RNA, 20 nt, Artificial Sequence
  spacer sequence ATCN PAM
uggggcaacaauucuuuccc

SEQ ID NO: 360 - RNA, 20 nt, Artificial Sequence
  spacer sequence ATCN PAM
aggagaccucacuuaggcuu

SEQ ID NO: 361 - RNA, 20 nt, Artificial Sequence
  spacer sequence ATCN PAM
ucaaggagaccucacuuagg

SEQ ID NO: 362 - RNA, 20 nt, Artificial Sequence
  spacer sequence ATCN PAM
agauauggaucccaugacac

SEQ ID NO: 363 - RNA, 20 nt, Artificial Sequence
  spacer sequence ATCN PAM
ggaucaucaaggagaccuca

SEQ ID NO: 364 - RNA, 20 nt, Artificial Sequence
  spacer sequence ATCN PAM
auaucuggaucaucaaggag

SEQ ID NO: 365 - RNA, 20 nt, Artificial Sequence
  spacer sequence ATCN PAM
caugacaccuaaggacacau

SEQ ID NO: 366 - RNA, 20 nt, Artificial Sequence
  spacer sequence ATCN PAM
agggaggcuagacuacccac

SEQ ID NO: 367 - RNA, 20 nt, Artificial Sequence
  spacer sequence ATCN PAM
guggguagucuagccucccu

SEQ ID NO: 368 - RNA, 20 nt, Artificial Sequence
  spacer sequence ATCN PAM
uugaagcagguggcaccaga

SEQ ID NO: 369 - RNA, 20 nt, Artificial Sequence
  spacer sequence ATCN PAM
cuccuguuucuaacagcagg

SEQ ID NO: 370 - RNA, 20 nt, Artificial Sequence
  spacer sequence ATCN PAM
gguccacccucuuugucuac

SEQ ID NO: 371 - RNA, 20 nt, Artificial Sequence
  spacer sequence ATCN PAM
guagacaaagaggguggacc

SEQ ID NO: 372 - RNA, 20 nt, Artificial Sequence
  spacer sequence ATCN PAM
cuucccugccuguccugcuu

SEQ ID NO: 373 - RNA, 20 nt, Artificial Sequence
  spacer sequence ATCN PAM
cuaauagggaacggggcucc

SEQ ID NO: 374 - RNA, 20 nt, Artificial Sequence
  spacer sequence ATCN PAM
cuaucccuaauagggaacgg

SEQ ID NO: 375 - RNA, 20 nt, Artificial Sequence
  spacer sequence ATCN PAM
gagcuuguggaauuuacuuc

SEQ ID NO: 376 - RNA, 20 nt, Artificial Sequence
  spacer sequence ATCN PAM
cucaauagaaguaaauucca

SEQ ID NO: 377 - RNA, 20 nt, Artificial Sequence
  spacer sequence ATCN PAM
ccacuucucucugccugucu

SEQ ID NO: 378 - RNA, 20 nt, Artificial Sequence
  spacer sequence ATCN PAM
ucucuucuuugaaaagcagc

SEQ ID NO: 379 - RNA, 20 nt, Artificial Sequence
  spacer sequence ATCN PAM
ucugaacagcuugcagcauu

SEQ ID NO: 380 - RNA, 20 nt, Artificial Sequence
  spacer sequence ATCN PAM
aggaacugggcacccgucau

SEQ ID NO: 381 - RNA, 20 nt, Artificial Sequence
  spacer sequence ATCN PAM
aagcggcagcccagaacuca

SEQ ID NO: 382 - RNA, 20 nt, Artificial Sequence
  spacer sequence ATCN PAM
ugcuccucuugaagacgccc

SEQ ID NO: 383 - RNA, 20 nt, Artificial Sequence
  spacer sequence ATCN PAM
gucaacaggcaaguaaguug

SEQ ID NO: 384 - RNA, 20 nt, Artificial Sequence
  spacer sequence ATCN PAM
cucauguccccaugccagca

SEQ ID NO: 385 - RNA, 20 nt, Artificial Sequence
  spacer sequence ATCN PAM
ggcuugagggucguuucggu

SEQ ID NO: 386 - RNA, 20 nt, Artificial Sequence
  spacer sequence ATCN PAM
ucccucccaucauuacagca

SEQ ID NO: 387 - RNA, 20 nt, Artificial Sequence
  spacer sequence ATCN PAM
uuacagcaacacacacacac

SEQ ID NO: 388 - RNA, 20 nt, Artificial Sequence
  spacer sequence ATCN PAM
auagaggaggaguugagugg

SEQ ID NO: 389 - RNA, 20 nt, Artificial Sequence
  spacer sequence ATCN PAM
cagggcccuuucggacugga

SEQ ID NO: 390 - RNA, 20 nt, Artificial Sequence
  spacer sequence ATCN PAM
cacauccuagucuacacgca

SEQ ID NO: 391 - RNA, 20 nt, Artificial Sequence
  spacer sequence ATCN PAM
uagucuacacgcaucaccug

SEQ ID NO: 392 - RNA, 20 nt, Artificial Sequence
  spacer sequence ATCN PAM
ccugccacccaacucguccc

SEQ ID NO: 393 - RNA, 20 nt, Artificial Sequence
  spacer sequence ATCN PAM
uucuaaaugugggcaggggc

SEQ ID NO: 394 - RNA, 20 nt, Artificial Sequence
  spacer sequence ATCN PAM
uauaauuuccagaccguccu

SEQ ID NO: 395 - RNA, 20 nt, Artificial Sequence
  spacer sequence ATCN PAM
gagagaaaccuuaauguuug

SEQ ID NO: 396 - RNA, 20 nt, Artificial Sequence
  spacer sequence ATCN PAM
aacauuaagguuucucucgg

SEQ ID NO: 397 - RNA, 20 nt, Artificial Sequence
  spacer sequence ATCN PAM
caacgaggaagaaaucaaac

SEQ ID NO: 398 - RNA, 20 nt, Artificial Sequence
  spacer sequence ATCN PAM
ugagcuccacaagccacaaa

SEQ ID NO: 399 - RNA, 20 nt, Artificial Sequence
  spacer sequence ATCN PAM
uugaggccaaaaugguguuu

SEQ ID NO: 400 - RNA, 20 nt, Artificial Sequence
  spacer sequence ATCN PAM
auuuuuuaugaugcagaauu

SEQ ID NO: 401 - RNA, 20 nt, Artificial Sequence
  spacer sequence ATCN PAM
uaaaaaauggauuuacaagc

SEQ ID NO: 402 - RNA, 20 nt, Artificial Sequence
  spacer sequence ATCN PAM
cguugcacaugcuguacaau

SEQ ID NO: 403 - RNA, 20 nt, Artificial Sequence
  spacer sequence ATCN PAM
gcaucgcguugcacaugcug

SEQ ID NO: 404 - RNA, 20 nt, Artificial Sequence
  spacer sequence ATCN PAM
ccgugagaaacuuaacuuuu

SEQ ID NO: 405 - RNA, 20 nt, Artificial Sequence
  spacer sequence ATCN PAM
uuguuuugggagguacacau

SEQ ID NO: 406 - RNA, 20 nt, Artificial Sequence
  spacer sequence ATCN PAM
gguagggggaaauucuauau

SEQ ID NO: 407 - RNA, 20 nt, Artificial Sequence
  spacer sequence ATCN PAM
cacugaacaaauuaaaaaug

SEQ ID NO: 408 - RNA, 20 nt, Artificial Sequence
  spacer sequence ATCN PAM
aguucuggguuucuuacuga

SEQ ID NO: 409 - RNA, 20 nt, Artificial Sequence
  spacer sequence ATCN PAM
uucucuuccuccucccuccu

SEQ ID NO: 410 - RNA, 20 nt, Artificial Sequence
  spacer sequence ATCN PAM
cugaccugaagugagacauu

SEQ ID NO: 411 - RNA, 20 nt, Artificial Sequence
  spacer sequence ATCN PAM
cagcccagagaaggugagca

SEQ ID NO: 412 - RNA, 20 nt, Artificial Sequence
  spacer sequence ATCN PAM
aagugauuugggcaaauaua

SEQ ID NO: 413 - RNA, 20 nt, Artificial Sequence
  spacer sequence ATCN PAM
cuuggauaaguuuuucuccu

SEQ ID NO: 414 - RNA, 20 nt, Artificial Sequence
  spacer sequence ATCN PAM
gauuaucacaagcccuauuc

SEQ ID NO: 415 - RNA, 20 nt, Artificial Sequence
  spacer sequence ATCN PAM
gauauauuugcccaaaucac

SEQ ID NO: 416 - RNA, 20 nt, Artificial Sequence
  spacer sequence ATCN PAM
caagcccuauucucuuucug

SEQ ID NO: 417 - RNA, 20 nt, Artificial Sequence
  spacer sequence ATCN PAM
gugccaacagaaagagaaua

SEQ ID NO: 418 - RNA, 20 nt, Artificial Sequence
  spacer sequence ATCN PAM
ggaaauguaauucaccaccc

SEQ ID NO: 419 - RNA, 20 nt, Artificial Sequence
  spacer sequence ATCN PAM
uugaccuggaacagguuuga

SEQ ID NO: 420 - RNA, 20 nt, Artificial Sequence
  spacer sequence ATCN PAM
guugcuaaacugugcucuau

SEQ ID NO: 421 - RNA, 20 nt, Artificial Sequence
  spacer sequence ATCN PAM
auuagcuuuauaaaugaagc

SEQ ID NO: 422 - RNA, 20 nt, Artificial Sequence
  spacer sequence ATCN PAM
auuaacaaauaaagcuaauc

SEQ ID NO: 423 - RNA, 20 nt, Artificial Sequence
  spacer sequence ATCN PAM
accugucacaugacuaaauu

SEQ ID NO: 424 - RNA, 20 nt, Artificial Sequence
  spacer sequence ATCN PAM
agagaagaguagaauaagag

SEQ ID NO: 425 - RNA, 20 nt, Artificial Sequence
  spacer sequence ATCN PAM
ugacugaagcaaagagugug

SEQ ID NO: 426 - RNA, 20 nt, Artificial Sequence
  spacer sequence ATCN PAM
cacagacucacugucucauu

SEQ ID NO: 427 - RNA, 20 nt, Artificial Sequence
  spacer sequence ATCN PAM
uggggaagggccaagaagaa

SEQ ID NO: 428 - RNA, 20 nt, Artificial Sequence
  spacer sequence ATCN PAM
uuccauccuuccaagccuca

SEQ ID NO: 429 - RNA, 20 nt, Artificial Sequence
  spacer sequence ATCN PAM
uuccaagccucauucagccc

SEQ ID NO: 430 - RNA, 20 nt, Artificial Sequence
  spacer sequence ATCN PAM
gggggagcuucagagaggaa

SEQ ID NO: 431 - RNA, 20 nt, Artificial Sequence
  spacer sequence ATCN PAM
ccuggcgacuuguaccagcu

SEQ ID NO: 432 - RNA, 20 nt, Artificial Sequence
  spacer sequence ATCN PAM
caugugucugugcauuccaa

SEQ ID NO: 433 - RNA, 20 nt, Artificial Sequence
  spacer sequence ATCN PAM
aaauuuuaaaugcacuuggc

SEQ ID NO: 434 - RNA, 20 nt, Artificial Sequence
  spacer sequence ATCN PAM
agccuauggaaacacuagcc

SEQ ID NO: 435 - RNA, 20 nt, Artificial Sequence
  spacer sequence ATCN PAM
uuauauaagugggcuagugu

SEQ ID NO: 436 - RNA, 20 nt, Artificial Sequence
  spacer sequence ATCN PAM
ugaauaaugugcuuacugug

SEQ ID NO: 437 - RNA, 20 nt, Artificial Sequence
  spacer sequence ATCN PAM
ggagcaaacccaaauggcca

SEQ ID NO: 438 - RNA, 20 nt, Artificial Sequence
  spacer sequence ATCN PAM
uuuuugaaaaugaugcuaca

SEQ ID NO: 439 - RNA, 20 nt, Artificial Sequence
  spacer sequence ATCN PAM
uuuucaaaaacgauacucuu

SEQ ID NO: 440 - RNA, 20 nt, Artificial Sequence
  spacer sequence ATCN PAM
guauaauuguagguacauuu

SEQ ID NO: 441 - RNA, 20 nt, Artificial Sequence
  spacer sequence ATCN PAM
aaaaagcaaaccacagaaca

SEQ ID NO: 442 - RNA, 20 nt, Artificial Sequence
  spacer sequence ATCN PAM
uacuauaaguguuguucugu

SEQ ID NO: 443 - RNA, 20 nt, Artificial Sequence
  spacer sequence ATCN PAM
uuuuaagaacuagguaguaa

SEQ ID NO: 444 - RNA, 20 nt, Artificial Sequence
  spacer sequence ATCN PAM
gugcucuuaguuaugacuuu

SEQ ID NO: 445 - RNA, 20 nt, Artificial Sequence
  spacer sequence ATCN PAM
aaguguuuugaguccuaaau

SEQ ID NO: 446 - RNA, 20 nt, Artificial Sequence
  spacer sequence ATCN PAM
auauccaaguguuuugaguc

SEQ ID NO: 447 - RNA, 20 nt, Artificial Sequence
  spacer sequence ATCN PAM
uggcuucacugccuacuacc

SEQ ID NO: 448 - RNA, 20 nt, Artificial Sequence
  spacer sequence ATCN PAM
caguuuccuuaucucucaaa

SEQ ID NO: 449 - RNA, 20 nt, Artificial Sequence
  spacer sequence ATCN PAM
cucaaauggggaaaacaguc

SEQ ID NO: 450 - RNA, 20 nt, Artificial Sequence
  spacer sequence ATCN PAM
ggacaugccagacacaauuc

SEQ ID NO: 451 - RNA, 20 nt, Artificial Sequence
  spacer sequence ATCN PAM
gaaaaggaaaaaagacugaa

SEQ ID NO: 452 - RNA, 20 nt, Artificial Sequence
  spacer sequence ATCN PAM
uuucagucuuuuuuccuuuu

SEQ ID NO: 453 - RNA, 20 nt, Artificial Sequence
  spacer sequence ATCN PAM
uauaaaaauaccuccuauuu

SEQ ID NO: 454 - RNA, 20 nt, Artificial Sequence
  spacer sequence ATCN PAM
aaccugccaugcuacugaca

SEQ ID NO: 455 - RNA, 20 nt, Artificial Sequence
  spacer sequence ATCN PAM
cagguagcaguuuguccuua

SEQ ID NO: 456 - RNA, 20 nt, Artificial Sequence
  spacer sequence ATCN PAM
ugacgucuuacauuacaucu

SEQ ID NO: 457 - RNA, 20 nt, Artificial Sequence
  spacer sequence ATCN PAM
ugauucuaauuccaauccac

SEQ ID NO: 458 - RNA, 20 nt, Artificial Sequence
  spacer sequence ATCN PAM
ggauuuagaaauggggaagc

SEQ ID NO: 459 - RNA, 20 nt, Artificial Sequence
  spacer sequence ATCN PAM
acagccagaaaauuaaaaaa

SEQ ID NO: 460 - RNA, 20 nt, Artificial Sequence
  spacer sequence ATCN PAM
uuuauuuuuuaauuuucugg

SEQ ID NO: 461 - RNA, 20 nt, Artificial Sequence
  spacer sequence ATCN PAM
ccagcugcugccccacgcau

SEQ ID NO: 462 - RNA, 20 nt, Artificial Sequence
  spacer sequence ATCN PAM
guuuuaaaaaaugaaagcau

SEQ ID NO: 463 - RNA, 20 nt, Artificial Sequence
  spacer sequence ATCN PAM
auuacuauuuuaaacgggaa

SEQ ID NO: 464 - RNA, 20 nt, Artificial Sequence
  spacer sequence ATCN PAM
ugacagccaagguagggucu

SEQ ID NO: 465 - RNA, 20 nt, Artificial Sequence
  spacer sequence ATCN PAM
ucuuccuguaguagaagaug

SEQ ID NO: 466 - RNA, 20 nt, Artificial Sequence
  spacer sequence ATCN PAM
uccuguaguagaagaugguu

SEQ ID NO: 467 - RNA, 20 nt, Artificial Sequence
  spacer sequence ATCN PAM
ucuacuacaggaagaugauu

SEQ ID NO: 468 - RNA, 20 nt, Artificial Sequence
  spacer sequence ATCN PAM
ucgucuuccaagacaccuuc

SEQ ID NO: 469 - RNA, 20 nt, Artificial Sequence
  spacer sequence ATCN PAM
cucugaguugggaguaggga

SEQ ID NO: 470 - RNA, 20 nt, Artificial Sequence
  spacer sequence ATCN PAM
ggguggcucuccuucuggug

SEQ ID NO: 471 - RNA, 20 nt, Artificial Sequence
  spacer sequence ATCN PAM
ugacaugagucaccagaagg

SEQ ID NO: 472 - RNA, 20 nt, Artificial Sequence
  spacer sequence ATCN PAM
caugacaaucccgucccacu

SEQ ID NO: 473 - RNA, 20 nt, Artificial Sequence
  spacer sequence ATCN PAM
cgucccacuggcuacaacaa

SEQ ID NO: 474 - RNA, 20 nt, Artificial Sequence
  spacer sequence ATCN PAM
aaaguccuuggcccgacacu

SEQ ID NO: 475 - RNA, 20 nt, Artificial Sequence
  spacer sequence ATCN PAM
ccagaaagagagaggaccug

SEQ ID NO: 476 - RNA, 20 nt, Artificial Sequence
  spacer sequence ATCN PAM
caaaaaggaaaaaaaaaaaa

SEQ ID NO: 477 - RNA, 20 nt, Artificial Sequence
  spacer sequence ATCN PAM
cggcucacugcaacucucac

SEQ ID NO: 478 - RNA, 20 nt, Artificial Sequence
  spacer sequence ATCN PAM
ugggaggugagaguugcagu

SEQ ID NO: 479 - RNA, 20 nt, Artificial Sequence
  spacer sequence ATCN PAM
agugauucuccugccucagc

SEQ ID NO: 480 - RNA, 20 nt, Artificial Sequence
  spacer sequence ATCN PAM
cuugauccugggaggugaga

SEQ ID NO: 481 - RNA, 20 nt, Artificial Sequence
  spacer sequence ATCN PAM
cgucucuacuaaaaaaauac

SEQ ID NO: 482 - RNA, 20 nt, Artificial Sequence
  spacer sequence ATCN PAM
uggccaacauggugaaaucc

SEQ ID NO: 483 - RNA, 20 nt, Artificial Sequence
  spacer sequence ATCN PAM
uccuggccaacauggugaaa

SEQ ID NO: 484 - RNA, 20 nt, Artificial Sequence
  spacer sequence ATCN PAM
caaucucuugaccuugugau

SEQ ID NO: 485 - RNA, 20 nt, Artificial Sequence
  spacer sequence ATCN PAM
cuugaccuugugauccaccc

SEQ ID NO: 486 - RNA, 20 nt, Artificial Sequence
  spacer sequence ATCN PAM
caaggucaagagauugagau

SEQ ID NO: 487 - RNA, 20 nt, Artificial Sequence
  spacer sequence ATCN PAM
acccgccucagccucccaaa

SEQ ID NO: 488 - RNA, 20 nt, Artificial Sequence
  spacer sequence ATCN PAM
caguacuuugggaggcugag

SEQ ID NO: 489 - RNA, 20 nt, Artificial Sequence
  spacer sequence ATCN PAM
cuaugcuguuaucagcuugc

SEQ ID NO: 490 - RNA, 20 nt, Artificial Sequence
  spacer sequence ATCN PAM
gcuugcuuuucacauaccca

SEQ ID NO: 491 - RNA, 20 nt, Artificial Sequence
  spacer sequence ATCN PAM
uuauguauuggcuggggacc

SEQ ID NO: 492 - RNA, 20 nt, Artificial Sequence
  spacer sequence ATCN PAM
auuucccccacuccccucug

SEQ ID NO: 493 - RNA, 20 nt, Artificial Sequence
  spacer sequence ATCN PAM
ugugccuagcagaaaaccca

SEQ ID NO: 494 - RNA, 20 nt, Artificial Sequence
  spacer sequence ATCN PAM
cacaagccacccucugaaug

SEQ ID NO: 495 - RNA, 20 nt, Artificial Sequence
  spacer sequence ATCN PAM
aguugaagagacaagcucua

SEQ ID NO: 496 - RNA, 20 nt, Artificial Sequence
  spacer sequence ATCN PAM
caaauuccuggaaggcagga

SEQ ID NO: 497 - RNA, 20 nt, Artificial Sequence
  spacer sequence ATCN PAM
ugccuuccaggaauuugcga

SEQ ID NO: 498 - RNA, 20 nt, Artificial Sequence
  spacer sequence ATCN PAM
gagaaaggaaaagaagcaag

SEQ ID NO: 499 - RNA, 20 nt, Artificial Sequence
  spacer sequence ATCN PAM
ugccccaaaaguuuaaugug

SEQ ID NO: 500 - RNA, 20 nt, Artificial Sequence
  spacer sequence ATCN PAM
aucugacagcucgcuaacuu

SEQ ID NO: 501 - RNA, 20 nt, Artificial Sequence
  spacer sequence ATCN PAM
gacagcucgcuaacuuugua

SEQ ID NO: 502 - RNA, 20 nt, Artificial Sequence
  spacer sequence ATCN PAM
uuuuuuuuuucuuucccagc

SEQ ID NO: 503 - RNA, 20 nt, Artificial Sequence
  spacer sequence ATCN PAM
aaaacuuucagcucugauaa

SEQ ID NO: 504 - RNA, 20 nt, Artificial Sequence
  spacer sequence ATCN PAM
gagcugaaaguuuuggauuu

SEQ ID NO: 505 - RNA, 20 nt, Artificial Sequence
  spacer sequence ATCN PAM
uaucagagcugaaaguuuug

SEQ ID NO: 506 - RNA, 20 nt, Artificial Sequence
  spacer sequence ATCN PAM
aaaauuagagagaagugacc

SEQ ID NO: 507 - RNA, 20 nt, Artificial Sequence
  spacer sequence ATCN PAM
uggucacuucucucuaauuu

SEQ ID NO: 508 - RNA, 20 nt, Artificial Sequence
  spacer sequence ATCN PAM
acuauaaagccagucaacua

SEQ ID NO: 509 - RNA, 20 nt, Artificial Sequence
  spacer sequence ATCN PAM
ugcaucuacuauaaagccag

SEQ ID NO: 510 - RNA, 20 nt, Artificial Sequence
  spacer sequence ATCN PAM
auuuaaaugacuuucuuagg

SEQ ID NO: 511 - RNA, 20 nt, Artificial Sequence
  spacer sequence ATCN PAM
gaugccagaaguccauuuaa

SEQ ID NO: 512 - RNA, 20 nt, Artificial Sequence
  spacer sequence ATCN PAM
gauacauugccugcugcucc

SEQ ID NO: 513 - RNA, 20 nt, Artificial Sequence
  spacer sequence ATCN PAM
ugaaucuauuugaaagauaa

SEQ ID NO: 514 - RNA, 20 nt, Artificial Sequence
  spacer sequence ATCN PAM
auuugaaagauaaacacauu

SEQ ID NO: 515 - RNA, 20 nt, Artificial Sequence
  spacer sequence ATCN PAM
uucaaauagauucaagauga

SEQ ID NO: 516 - RNA, 20 nt, Artificial Sequence
  spacer sequence ATCN PAM
guauuuguacaaauccaggc

SEQ ID NO: 517 - RNA, 20 nt, Artificial Sequence
  spacer sequence ATCN PAM
aggccgagcuggccaacugg

SEQ ID NO: 518 - RNA, 20 nt, Artificial Sequence
  spacer sequence ATCN PAM
ccaauuucaauaggacuuug

SEQ ID NO: 519 - RNA, 20 nt, Artificial Sequence
  spacer sequence ATCN PAM
guaagacagcaguagguguc

SEQ ID NO: 520 - RNA, 20 nt, Artificial Sequence
  spacer sequence ATCN PAM
cagcguuaggcccaucugua

SEQ ID NO: 521 - RNA, 20 nt, Artificial Sequence
  spacer sequence ATCN PAM
uacuggaaaagcaauuuaaa

SEQ ID NO: 522 - RNA, 20 nt, Artificial Sequence
  spacer sequence ATCN PAM
caggaaaagguucaguuuug

SEQ ID NO: 523 - RNA, 20 nt, Artificial Sequence
  spacer sequence ATCN PAM
uggccuugugcagguggugg

SEQ ID NO: 524 - RNA, 20 nt, Artificial Sequence
  spacer sequence ATCN PAM
cuaaccucugcauuccugca

SEQ ID NO: 525 - RNA, 20 nt, Artificial Sequence
  spacer sequence ATCN PAM
agaguccauaaggggucacu

SEQ ID NO: 526 - RNA, 20 nt, Artificial Sequence
  spacer sequence ATCN PAM
gacauaacaucucacaagau

SEQ ID NO: 527 - RNA, 20 nt, Artificial Sequence
  spacer sequence ATCN PAM
cacaagaugagguguggcac

SEQ ID NO: 528 - RNA, 20 nt, Artificial Sequence
  spacer sequence ATCN PAM
ugugagauguuaugucugau

SEQ ID NO: 529 - RNA, 20 nt, Artificial Sequence
  spacer sequence ATCN PAM
caacugugcuggaaacuggg

SEQ ID NO: 530 - RNA, 20 nt, Artificial Sequence
  spacer sequence ATCN PAM
ucaccagccagccccaguuu

SEQ ID NO: 531 - RNA, 20 nt, Artificial Sequence
  spacer sequence ATCN PAM
uagcugaagccucaguggaa

SEQ ID NO: 532 - RNA, 20 nt, Artificial Sequence
  spacer sequence ATCN PAM
aauuucccauaaaaugggac

SEQ ID NO: 533 - RNA, 20 nt, Artificial Sequence
  spacer sequence ATCN PAM
gaauggcuuucuuuuuaggg

SEQ ID NO: 534 - RNA, 20 nt, Artificial Sequence
  spacer sequence ATCN PAM
cauauaauucuuugaaaacg

SEQ ID NO: 535 - RNA, 20 nt, Artificial Sequence
  spacer sequence ATCN PAM
auauggcuugcuagugcccc

SEQ ID NO: 536 - RNA, 20 nt, Artificial Sequence
  spacer sequence ATCN PAM
auaugaauuguugucuugga

SEQ ID NO: 537 - RNA, 20 nt, Artificial Sequence
  spacer sequence ATCN PAM
cuuccuccccaucaauauga

SEQ ID NO: 538 - RNA, 20 nt, Artificial Sequence
  spacer sequence ATCN PAM
cugcccucauuaaaaaagca

SEQ ID NO: 539 - RNA, 20 nt, Artificial Sequence
  spacer sequence ATCN PAM
caguugucaccuuuauguuu

SEQ ID NO: 540 - RNA, 20 nt, Artificial Sequence
  spacer sequence ATCN PAM
ccugguugagacaacucgcu

SEQ ID NO: 541 - RNA, 20 nt, Artificial Sequence
  spacer sequence ATCN PAM
cuugccauuagcacaugaaa

SEQ ID NO: 542 - RNA, 20 nt, Artificial Sequence
  spacer sequence ATCN PAM
aaugccuuuaguagggauga

SEQ ID NO: 543 - RNA, 20 nt, Artificial Sequence
  spacer sequence ATCN PAM
cuacuaaaggcauuagauau

SEQ ID NO: 544 - RNA, 20 nt, Artificial Sequence
  spacer sequence ATCN PAM
auaaugucaacuucagucau

SEQ ID NO: 545 - RNA, 20 nt, Artificial Sequence
  spacer sequence ATCN PAM
uacuacaucuauaaugucaa

SEQ ID NO: 546 - RNA, 20 nt, Artificial Sequence
  spacer sequence ATCN PAM
augccccaaggauguuaaga

SEQ ID NO: 547 - RNA, 20 nt, Artificial Sequence
  spacer sequence ATCN PAM
uuggggcauggaucuuacua

SEQ ID NO: 548 - RNA, 20 nt, Artificial Sequence
  spacer sequence ATCN PAM
uaacauccuuggggcaugga

SEQ ID NO: 549 - RNA, 20 nt, Artificial Sequence
  spacer sequence ATCN PAM
guguuagcucugauaagaaa

SEQ ID NO: 550 - RNA, 20 nt, Artificial Sequence
  spacer sequence ATCN PAM
gagcuaacacagauuauuug

SEQ ID NO: 551 - RNA, 20 nt, Artificial Sequence
  spacer sequence ATCN PAM
uggaaggagaagugaaaaga

SEQ ID NO: 552 - RNA, 20 nt, Artificial Sequence
  spacer sequence ATCN PAM
aaguaggggaagacagaaaa

SEQ ID NO: 553 - RNA, 20 nt, Artificial Sequence
  spacer sequence ATCN PAM
aacuguguucauuuggcaaa

SEQ ID NO: 554 - RNA, 20 nt, Artificial Sequence
  spacer sequence ATCN PAM
gaacuuggcuuaggaacagg

SEQ ID NO: 555 - RNA, 20 nt, Artificial Sequence
  spacer sequence ATCN PAM
aggaguugcacuuaugugca

SEQ ID NO: 556 - RNA, 20 nt, Artificial Sequence
  spacer sequence ATCN PAM
cuuaauacaucuaaauucug

SEQ ID NO: 557 - RNA, 20 nt, Artificial Sequence
  spacer sequence ATCN PAM
aaauucugaugaagucaaug

SEQ ID NO: 558 - RNA, 20 nt, Artificial Sequence
  spacer sequence ATCN PAM
gaauuuagauguauuaaggg

SEQ ID NO: 559 - RNA, 20 nt, Artificial Sequence
  spacer sequence ATCN PAM
ucaagggacuaccaccaacu

SEQ ID NO: 560 - RNA, 20 nt, Artificial Sequence
  spacer sequence ATCN PAM
ccaugugaacuggaaaagcu

SEQ ID NO: 561 - RNA, 20 nt, Artificial Sequence
  spacer sequence ATCN PAM
aagagaaguacaaaaaggca

SEQ ID NO: 562 - RNA, 20 nt, Artificial Sequence
  spacer sequence ATCN PAM
uucauuuugguuucuacuuu

SEQ ID NO: 563 - RNA, 20 nt, Artificial Sequence
  spacer sequence ATCN PAM
aauuuuuaacuuucuaaggu

SEQ ID NO: 564 - RNA, 20 nt, Artificial Sequence
  spacer sequence ATCN PAM
gccucuuccacccaauaugg

SEQ ID NO: 565 - RNA, 20 nt, Artificial Sequence
  spacer sequence ATCN PAM
ucugaaguuucuggcuuaua

SEQ ID NO: 566 - RNA, 20 nt, Artificial Sequence
  spacer sequence ATCN PAM
uuacuguuuuguuucaagaa

SEQ ID NO: 567 - RNA, 20 nt, Artificial Sequence
  spacer sequence ATCN PAM
guugacaauacuuuuugcua

SEQ ID NO: 568 - RNA, 20 nt, Artificial Sequence
  spacer sequence ATCN PAM
uuuucucuauuucaugccaa

SEQ ID NO: 569 - RNA, 20 nt, Artificial Sequence
  spacer sequence ATCN PAM
ucuaguccugacuaauugaa

SEQ ID NO: 570 - RNA, 20 nt, Artificial Sequence
  spacer sequence ATCN PAM
ccaccuauuuuaaaguguaa

SEQ ID NO: 571 - RNA, 20 nt, Artificial Sequence
  spacer sequence ATCN PAM
uccucccacucuuguucuua

SEQ ID NO: 572 - RNA, 20 nt, Artificial Sequence
  spacer sequence ATCN PAM
acgcacaugaguguaguggg

SEQ ID NO: 573 - RNA, 20 nt, Artificial Sequence
  spacer sequence ATCN PAM
ugauguuacuuuaaagccau

SEQ ID NO: 574 - RNA, 20 nt, Artificial Sequence
  spacer sequence ATCN PAM
agauuaaggaaaguuuuuca

SEQ ID NO: 575 - RNA, 20 nt, Artificial Sequence
  spacer sequence ATCN PAM
uaaaucaugcaaccugccaa

SEQ ID NO: 576 - RNA, 20 nt, Artificial Sequence
  spacer sequence ATCN PAM
ugcaaccugccaaucuuguu

SEQ ID NO: 577 - RNA, 20 nt, Artificial Sequence
  spacer sequence ATCN PAM
uguuguguuuuauaaacugu

SEQ ID NO: 578 - RNA, 20 nt, Artificial Sequence
  spacer sequence ATCN PAM
uugggccagaaaugcucuac

SEQ ID NO: 579 - RNA, 20 nt, Artificial Sequence
  spacer sequence ATCN PAM
ccuaguaacaaaugccaguu

SEQ ID NO: 580 - RNA, 20 nt, Artificial Sequence
  spacer sequence ATCN PAM
cuucccauuguaaaaaaaga

SEQ ID NO: 581 - RNA, 20 nt, Artificial Sequence
  spacer sequence ATCN PAM
ggcuagucauaagagaauau

SEQ ID NO: 582 - RNA, 20 nt, Artificial Sequence
  spacer sequence ATCN PAM
ggcaggaaaggccuacguac

SEQ ID NO: 583 - RNA, 20 nt, Artificial Sequence
  spacer sequence ATCN PAM
aggagcaugggcaggcuggg

SEQ ID NO: 584 - RNA, 20 nt, Artificial Sequence
  spacer sequence ATCN PAM
aaaucagugccaaaaccaag

SEQ ID NO: 585 - RNA, 20 nt, Artificial Sequence
  spacer sequence ATCN PAM
gugccaaaaccaagcccuga

SEQ ID NO: 586 - RNA, 20 nt, Artificial Sequence
  spacer sequence ATCN PAM
ugaaggccaugcagaguguc

SEQ ID NO: 587 - RNA, 20 nt, Artificial Sequence
  spacer sequence ATCN PAM
auggaaaaggcagaacccag

SEQ ID NO: 588 - RNA, 20 nt, Artificial Sequence
  spacer sequence ATCN PAM
aacaaagucuccggcagccc

SEQ ID NO: 589 - RNA, 20 nt, Artificial Sequence
  spacer sequence ATCN PAM
ugccuacauuucccugagug

SEQ ID NO: 590 - RNA, 20 nt, Artificial Sequence
  spacer sequence ATCN PAM
cucucccucucauguagagg

SEQ ID NO: 591 - RNA, 20 nt, Artificial Sequence
  spacer sequence ATCN PAM
gugucuaauucauucauccc

SEQ ID NO: 592 - RNA, 20 nt, Artificial Sequence
  spacer sequence ATCN PAM
uccgugucuaauucauucau

SEQ ID NO: 593 - RNA, 20 nt, Artificial Sequence
  spacer sequence ATCN PAM
ggccuuuaauauggagccuu

SEQ ID NO: 594 - RNA, 20 nt, Artificial Sequence
  spacer sequence ATCN PAM
cagcacaaacugaccaggac

SEQ ID NO: 595 - RNA, 20 nt, Artificial Sequence
  spacer sequence ATCN PAM
ccugcuucccccucccuucu

SEQ ID NO: 596 - RNA, 20 nt, Artificial Sequence
  spacer sequence ATCN PAM
acgcaagcagccuguuguuu

SEQ ID NO: 597 - RNA, 20 nt, Artificial Sequence
  spacer sequence ATCN PAM
augcuuuuuacacuauugau

SEQ ID NO: 598 - RNA, 20 nt, Artificial Sequence
  spacer sequence ATCN PAM
auaguguaaaaagcauugau

SEQ ID NO: 599 - RNA, 20 nt, Artificial Sequence
  spacer sequence ATCN PAM
gcuauguauauuuuaugaga

SEQ ID NO: 600 - RNA, 20 nt, Artificial Sequence
  spacer sequence ATCN PAM
uuuucgccuucaguaacaaa

SEQ ID NO: 601 - RNA, 20 nt, Artificial Sequence
  spacer sequence ATCN PAM
uuguuacugaaggcgaaaau

SEQ ID NO: 602 - RNA, 20 nt, Artificial Sequence
  spacer sequence ATCN PAM
gggaguuuuuugaucccugg

SEQ ID NO: 603 - RNA, 20 nt, Artificial Sequence
  spacer sequence ATCN PAM
aaaaacucccugauuuuauc

SEQ ID NO: 604 - RNA, 20 nt, Artificial Sequence
  spacer sequence ATCN PAM
cuggcacagucucgccagcc

SEQ ID NO: 605 - RNA, 20 nt, Artificial Sequence
  spacer sequence ATCN PAM
auccuccauccccucuuccu

SEQ ID NO: 606 - RNA, 20 nt, Artificial Sequence
  spacer sequence ATCN PAM
cucuccauccauccuccauc

SEQ ID NO: 607 - RNA, 20 nt, Artificial Sequence
  spacer sequence ATCN PAM
auguccuucccuuuggugcc

SEQ ID NO: 608 - RNA, 20 nt, Artificial Sequence
  spacer sequence ATCN PAM
cccgcuagguaguuaaccug

SEQ ID NO: 609 - RNA, 20 nt, Artificial Sequence
  spacer sequence ATCN PAM
ggaauaauuaaaccacaaua

SEQ ID NO: 610 - RNA, 20 nt, Artificial Sequence
  spacer sequence ATCN PAM
uaagggccaaccugauccuu

SEQ ID NO: 611 - RNA, 20 nt, Artificial Sequence
  spacer sequence ATCN PAM
gguuggcccuuaggaugugg

SEQ ID NO: 612 - RNA, 20 nt, Artificial Sequence
  spacer sequence ATCN PAM
uucuccaacaauucaagucg

SEQ ID NO: 613 - RNA, 20 nt, Artificial Sequence
  spacer sequence ATCN PAM
gccucucugcucauggcgau

SEQ ID NO: 614 - RNA, 20 nt, Artificial Sequence
  spacer sequence ATCN PAM
ccaugagcagagaggcagau

SEQ ID NO: 615 - RNA, 20 nt, Artificial Sequence
  spacer sequence ATCN PAM
uccagaauguuugccuagaa

SEQ ID NO: 616 - RNA, 20 nt, Artificial Sequence
  spacer sequence ATCN PAM
aacuucagaauuaacaauuc

SEQ ID NO: 617 - RNA, 20 nt, Artificial Sequence
  spacer sequence ATCN PAM
gggaaagcuuccugguggag

SEQ ID NO: 618 - RNA, 20 nt, Artificial Sequence
  spacer sequence ATCN PAM
auuagggaaggcacaugagg

SEQ ID NO: 619 - RNA, 20 nt, Artificial Sequence
  spacer sequence ATCN PAM
aagcagaauugaacugaaug

SEQ ID NO: 620 - RNA, 20 nt, Artificial Sequence
  spacer sequence ATCN PAM
agauuucacugccgcuuucu

SEQ ID NO: 621 - RNA, 20 nt, Artificial Sequence
  spacer sequence ATCN PAM
ugauggcugcagggucauaa

SEQ ID NO: 622 - RNA, 20 nt, Artificial Sequence
  spacer sequence ATCN PAM
ggccucuguucuaauuaaag

SEQ ID NO: 623 - RNA, 20 nt, Artificial Sequence
  spacer sequence ATCN PAM
ugaggacagcugucccuuuu

SEQ ID NO: 624 - RNA, 20 nt, Artificial Sequence
  spacer sequence ATCN PAM
ccaaagcccuuuccugacaa

SEQ ID NO: 625 - RNA, 20 nt, Artificial Sequence
  spacer sequence ATCN PAM
guccagcacaauguuucaca

SEQ ID NO: 626 - RNA, 20 nt, Artificial Sequence
  spacer sequence ATCN PAM
ugggacagugugaaacauug

SEQ ID NO: 627 - RNA, 20 nt, Artificial Sequence
  spacer sequence ATCN PAM
uugaucacugcaagggcaug

SEQ ID NO: 628 - RNA, 20 nt, Artificial Sequence
  spacer sequence ATCN PAM
aagaugcaaaugccuugggu

SEQ ID NO: 629 - RNA, 20 nt, Artificial Sequence
  spacer sequence ATCN PAM
cugcaagggcaugaaacacu

SEQ ID NO: 630 - RNA, 20 nt, Artificial Sequence
  spacer sequence ATCN PAM
ccuuucugaagccuaccauc

SEQ ID NO: 631 - RNA, 20 nt, Artificial Sequence
  spacer sequence ATCN PAM
acuaaguaaugaaaucuaau

SEQ ID NO: 632 - RNA, 20 nt, Artificial Sequence
  spacer sequence ATCN PAM
aauauuuaaagggcaugaca

SEQ ID NO: 633 - RNA, 20 nt, Artificial Sequence
  spacer sequence ATCN PAM
aguauaaacgggugucaugc

SEQ ID NO: 634 - RNA, 20 nt, Artificial Sequence
  spacer sequence ATCN PAM
auguuucauggaagggauaa

SEQ ID NO: 635 - RNA, 20 nt, Artificial Sequence
  spacer sequence ATCN PAM
cuuccaugaaacauugauua

SEQ ID NO: 636 - RNA, 20 nt, Artificial Sequence
  spacer sequence ATCN PAM
uuuaugcaugccuuuuuccu

SEQ ID NO: 637 - RNA, 20 nt, Artificial Sequence
  spacer sequence ATCN PAM
ggaaaaaggcaugcauaaag

SEQ ID NO: 638 - RNA, 20 nt, Artificial Sequence
  spacer sequence ATCN PAM
gcacugcauuuuuuaaaugg

SEQ ID NO: 639 - RNA, 20 nt, Artificial Sequence
  spacer sequence ATCN PAM
agugccuccaaaauauuaag

SEQ ID NO: 640 - RNA, 20 nt, Artificial Sequence
  spacer sequence ATCN PAM
uauuuaccugaacuucaccu

SEQ ID NO: 641 - RNA, 20 nt, Artificial Sequence
  spacer sequence ATCN PAM
cagauaucuuuccuggagga

SEQ ID NO: 642 - RNA, 20 nt, Artificial Sequence
  spacer sequence ATCN PAM
gugauauccuauuuaccuga

SEQ ID NO: 643 - RNA, 20 nt, Artificial Sequence
  spacer sequence ATCN PAM
uuccuggaggauguugacca

SEQ ID NO: 644 - RNA, 20 nt, Artificial Sequence
  spacer sequence ATCN PAM
ugguuccugaaugacacuuu

SEQ ID NO: 645 - RNA, 20 nt, Artificial Sequence
  spacer sequence ATCN PAM
aaaugauuacaguagguaaa

SEQ ID NO: 646 - RNA, 20 nt, Artificial Sequence
  spacer sequence ATCN PAM
uuuugauugcuuucaguuuc

SEQ ID NO: 647 - RNA, 20 nt, Artificial Sequence
  spacer sequence ATCN PAM
uaauuuacuuaaccauuuac

SEQ ID NO: 648 - RNA, 20 nt, Artificial Sequence
  spacer sequence ATCN PAM
aguuguaaccacagugucau

SEQ ID NO: 649 - RNA, 20 nt, Artificial Sequence
  spacer sequence ATCN PAM
cucacacgguuauuauuuuu

SEQ ID NO: 650 - RNA, 20 nt, Artificial Sequence
  spacer sequence ATCN PAM
ugagugauauuaucccuuau

SEQ ID NO: 651 - RNA, 20 nt, Artificial Sequence
  spacer sequence ATCN PAM
cucaugaucccucacacggu

SEQ ID NO: 652 - RNA, 20 nt, Artificial Sequence
  spacer sequence ATCN PAM
cuuaucuuuacuucucgaaa

SEQ ID NO: 653 - RNA, 20 nt, Artificial Sequence
  spacer sequence ATCN PAM
uuacuucucgaaauauccau

SEQ ID NO: 654 - RNA, 20 nt, Artificial Sequence
  spacer sequence ATCN PAM
auaaugcucugucuuuauga

SEQ ID NO: 655 - RNA, 20 nt, Artificial Sequence
  spacer sequence ATCN PAM
uaaagacagagcauuaugga

SEQ ID NO: 656 - RNA, 20 nt, Artificial Sequence
  spacer sequence ATCN PAM
uaauuuggguuuacuauagu

SEQ ID NO: 657 - RNA, 20 nt, Artificial Sequence
  spacer sequence ATCN PAM
agaaagaggccuauaacucu

SEQ ID NO: 658 - RNA, 20 nt, Artificial Sequence
  spacer sequence ATCN PAM
cuggaugggagaaagcagca

SEQ ID NO: 659 - RNA, 20 nt, Artificial Sequence
  spacer sequence ATCN PAM
agugauacugaaauaaacug

SEQ ID NO: 660 - RNA, 20 nt, Artificial Sequence
  spacer sequence ATCN PAM
cucucccuguggccauucca

SEQ ID NO: 661 - RNA, 20 nt, Artificial Sequence
  spacer sequence ATCN PAM
uggcucugcuacagaagauc

SEQ ID NO: 662 - RNA, 20 nt, Artificial Sequence
  spacer sequence ATCN PAM
caggucaaagcugcaaguug

SEQ ID NO: 663 - RNA, 20 nt, Artificial Sequence
  spacer sequence ATCN PAM
gcuguguaugaucuuugaag

SEQ ID NO: 664 - RNA, 20 nt, Artificial Sequence
  spacer sequence ATCN PAM
uacacagcggaucucagguc

SEQ ID NO: 665 - RNA, 20 nt, Artificial Sequence
  spacer sequence ATCN PAM
uugaagaguuaagaagaaug

SEQ ID NO: 666 - RNA, 20 nt, Artificial Sequence
  spacer sequence ATCN PAM
acuggaacaaugggagguaa

SEQ ID NO: 667 - RNA, 20 nt, Artificial Sequence
  spacer sequence ATCN PAM
ugcauacuucuuggccagaa

SEQ ID NO: 668 - RNA, 20 nt, Artificial Sequence
  spacer sequence ATCN PAM
auucccaaaugagcaccucu

SEQ ID NO: 669 - RNA, 20 nt, Artificial Sequence
  spacer sequence ATCN PAM
aaaguguuaugguaaaaagc

SEQ ID NO: 670 - RNA, 20 nt, Artificial Sequence
  spacer sequence ATCN PAM
acccugguguauuaaaauau

SEQ ID NO: 671 - RNA, 20 nt, Artificial Sequence
  spacer sequence ATCN PAM
aacacuggucugugagucua

SEQ ID NO: 672 - RNA, 20 nt, Artificial Sequence
  spacer sequence ATCN PAM
uauucagcuuggaagccaga

SEQ ID NO: 673 - RNA, 20 nt, Artificial Sequence
  spacer sequence ATCN PAM
uuuaacacaccauaggagug

SEQ ID NO: 674 - RNA, 20 nt, Artificial Sequence
  spacer sequence ATCN PAM
caguguuuuuggucucacuu

SEQ ID NO: 675 - RNA, 20 nt, Artificial Sequence
  spacer sequence ATCN PAM
uuucccugggaagaacaugg

SEQ ID NO: 676 - RNA, 20 nt, Artificial Sequence
  spacer sequence ATCN PAM
aguccuacccuucgcuacag

SEQ ID NO: 677 - RNA, 20 nt, Artificial Sequence
  spacer sequence ATCN PAM
uuccaacuuaaugccuccuu

SEQ ID NO: 678 - RNA, 20 nt, Artificial Sequence
  spacer sequence ATCN PAM
ucugagggucaacgcaguug

SEQ ID NO: 679 - RNA, 20 nt, Artificial Sequence
  spacer sequence ATCN PAM
ucacaacaaaucagaaaaac

SEQ ID NO: 680 - RNA, 20 nt, Artificial Sequence
  spacer sequence ATCN PAM
aaugagaucauaggauguuc

SEQ ID NO: 681 - RNA, 20 nt, Artificial Sequence
  spacer sequence ATCN PAM
cauuugauccucacaacaaa

SEQ ID NO: 682 - RNA, 20 nt, Artificial Sequence
  spacer sequence ATCN PAM
uaggauguucuuugaaaauu

SEQ ID NO: 683 - RNA, 20 nt, Artificial Sequence
  spacer sequence ATCN PAM
uaugaucucauuugauccuc

SEQ ID NO: 684 - RNA, 20 nt, Artificial Sequence
  spacer sequence ATCN PAM
uagcucauauuuucuaggaa

SEQ ID NO: 685 - RNA, 20 nt, Artificial Sequence
  spacer sequence ATCN PAM
aaacacaugaugcugaaggc

SEQ ID NO: 686 - RNA, 20 nt, Artificial Sequence
  spacer sequence ATCN PAM
uguguuuagauggcugggcg

SEQ ID NO: 687 - RNA, 20 nt, Artificial Sequence
  spacer sequence ATCN PAM
ugcguggaaugcgcuuguga

SEQ ID NO: 688 - RNA, 20 nt, Artificial Sequence
  spacer sequence ATCN PAM
auuuucugccuguaguugca

SEQ ID NO: 689 - RNA, 20 nt, Artificial Sequence
  spacer sequence ATCN PAM
ggaauaaaaagcaaaggucu

SEQ ID NO: 690 - RNA, 20 nt, Artificial Sequence
  spacer sequence ATCN PAM
guuuauagaaaaaccagagc

SEQ ID NO: 691 - RNA, 20 nt, Artificial Sequence
  spacer sequence ATCN PAM
gcaaaaugaggccuucugug

SEQ ID NO: 692 - RNA, 20 nt, Artificial Sequence
  spacer sequence ATCN PAM
cuaccucuccuucucuccug

SEQ ID NO: 693 - RNA, 20 nt, Artificial Sequence
  spacer sequence ATCN PAM
agguacauuugcccccguac

SEQ ID NO: 694 - RNA, 20 nt, Artificial Sequence
  spacer sequence ATCN PAM
aucauguuagggaaagacua

SEQ ID NO: 695 - RNA, 20 nt, Artificial Sequence
  spacer sequence ATCN PAM
uguuagggaaagacuaaauu

SEQ ID NO: 696 - RNA, 20 nt, Artificial Sequence
  spacer sequence ATCN PAM
agaaaacuaauguaauauuu

SEQ ID NO: 697 - RNA, 20 nt, Artificial Sequence
  spacer sequence ATCN PAM
guguuuuaauaacuguauaa

SEQ ID NO: 698 - RNA, 20 nt, Artificial Sequence
  spacer sequence ATCN PAM
uuugugcuuaggguuuuuug

SEQ ID NO: 699 - RNA, 20 nt, Artificial Sequence
  spacer sequence ATCN PAM
acccaugguaacgugcacuu

SEQ ID NO: 700 - RNA, 20 nt, Artificial Sequence
  spacer sequence ATCN PAM
uccuggaggucaaaugcuaa

SEQ ID NO: 701 - RNA, 20 nt, Artificial Sequence
  spacer sequence ATCN PAM
auuuaaagcaaauauauggu

SEQ ID NO: 702 - RNA, 20 nt, Artificial Sequence
  spacer sequence ATCN PAM
guaauuuaaggugucaaggu

SEQ ID NO: 703 - RNA, 20 nt, Artificial Sequence
  spacer sequence ATCN PAM
caguguuagaggaaguguuu

SEQ ID NO: 704 - RNA, 20 nt, Artificial Sequence
  spacer sequence ATCN PAM
guaccccuugccacggugaa

SEQ ID NO: 705 - RNA, 20 nt, Artificial Sequence
  spacer sequence ATCN PAM
ucacuuccccaccucucauc

SEQ ID NO: 706 - RNA, 20 nt, Artificial Sequence
  spacer sequence ATCN PAM
guucacuuaacaaguuuccu

SEQ ID NO: 707 - RNA, 20 nt, Artificial Sequence
  spacer sequence ATCN PAM
ucuuaucuguucacuuaaca

SEQ ID NO: 708 - RNA, 20 nt, Artificial Sequence
  spacer sequence ATCN PAM
aggagcugugucaacacugg

SEQ ID NO: 709 - RNA, 20 nt, Artificial Sequence
  spacer sequence ATCN PAM
gaauggcaaggcuaauacca

SEQ ID NO: 710 - RNA, 20 nt, Artificial Sequence
  spacer sequence ATCN PAM
ugggcaacgccagccucaga

SEQ ID NO: 711 - RNA, 20 nt, Artificial Sequence
  spacer sequence ATCN PAM
ccaauaagacaauaagaaau

SEQ ID NO: 712 - RNA, 20 nt, Artificial Sequence
  spacer sequence ATCN PAM
ggcacaaaccucccaaggug

SEQ ID NO: 713 - RNA, 20 nt, Artificial Sequence
  spacer sequence ATCN PAM
auucuagaauaugagagauu

SEQ ID NO: 714 - RNA, 20 nt, Artificial Sequence
  spacer sequence ATCN PAM
cucauauucuagaauggaug

SEQ ID NO: 715 - RNA, 20 nt, Artificial Sequence
  spacer sequence ATCN PAM
ugugaagggcuucauuauag

SEQ ID NO: 716 - RNA, 20 nt, Artificial Sequence
  spacer sequence ATCN PAM
uuacaauuaccccaguuuac

SEQ ID NO: 717 - RNA, 20 nt, Artificial Sequence
  spacer sequence ATCN PAM
augaaaacacuggaccucca

SEQ ID NO: 718 - RNA, 20 nt, Artificial Sequence
  spacer sequence ATCN PAM
gugauggaacacagaaugga

SEQ ID NO: 719 - RNA, 20 nt, Artificial Sequence
  spacer sequence ATCN PAM
cugauuaauuuugugacuca

SEQ ID NO: 720 - RNA, 20 nt, Artificial Sequence
  spacer sequence ATCN PAM
aacacguagcacagauccuu

SEQ ID NO: 721 - RNA, 20 nt, Artificial Sequence
  spacer sequence ATCN PAM
gugcuacguguuggauuagg

SEQ ID NO: 722 - RNA, 20 nt, Artificial Sequence
  spacer sequence ATCN PAM
uuacaguucagccaagcaga

SEQ ID NO: 723 - RNA, 20 nt, Artificial Sequence
  spacer sequence ATCN PAM
ugggcaaggguuugaaccug

SEQ ID NO: 724 - RNA, 20 nt, Artificial Sequence
  spacer sequence ATCN PAM
uuaaucauuuccaaaacauu

SEQ ID NO: 725 - RNA, 20 nt, Artificial Sequence
  spacer sequence ATCN PAM
uuuccaaaacauuccaaaug

SEQ ID NO: 726 - RNA, 20 nt, Artificial Sequence
  spacer sequence ATCN PAM
ucucauuuaguucuucuaac

SEQ ID NO: 727 - RNA, 20 nt, Artificial Sequence
  spacer sequence ATCN PAM
cauuuaguucuucuaacagc

SEQ ID NO: 728 - RNA, 20 nt, Artificial Sequence
  spacer sequence ATCN PAM
ugaaccagaaaacaguugaa

SEQ ID NO: 729 - RNA, 20 nt, Artificial Sequence
  spacer sequence ATCN PAM
agcgguugaaggucaaguuc

SEQ ID NO: 730 - RNA, 20 nt, Artificial Sequence
  spacer sequence ATCN PAM
agaccuagaccaucaaacca

SEQ ID NO: 731 - RNA, 20 nt, Artificial Sequence
  spacer sequence ATCN PAM
aaccagaaacugcucauccc

SEQ ID NO: 732 - RNA, 20 nt, Artificial Sequence
  spacer sequence ATCN PAM
uguuugguuaaauaauaaaa

SEQ ID NO: 733 - RNA, 20 nt, Artificial Sequence
  spacer sequence ATCN PAM
guuccaugcacauucccacu

SEQ ID NO: 734 - RNA, 20 nt, Artificial Sequence
  spacer sequence ATCN PAM
gacauggugaaucacaaaaa

SEQ ID NO: 735 - RNA, 20 nt, Artificial Sequence
  spacer sequence ATCN PAM
caaaaagacauuguuuucca

SEQ ID NO: 736 - RNA, 20 nt, Artificial Sequence
  spacer sequence ATCN PAM
guuugccugauuccuggccc

SEQ ID NO: 737 - RNA, 20 nt, Artificial Sequence
  spacer sequence ATCN PAM
ggcaaacagauaaaaacgug

SEQ ID NO: 738 - RNA, 20 nt, Artificial Sequence
  spacer sequence ATCN PAM
uagggucucucagaguuuua

SEQ ID NO: 739 - RNA, 20 nt, Artificial Sequence
  spacer sequence ATCN PAM
aaguauuaugugaucaaaac

SEQ ID NO: 740 - RNA, 20 nt, Artificial Sequence
  spacer sequence ATCN PAM
cauaauacuuggauugcaca

SEQ ID NO: 741 - RNA, 20 nt, Artificial Sequence
  spacer sequence ATCN PAM
aaacacugaacugcccuaau

SEQ ID NO: 742 - RNA, 20 nt, Artificial Sequence
  spacer sequence ATCN PAM
aacaaaaacacuguauuagg

SEQ ID NO: 743 - RNA, 20 nt, Artificial Sequence
  spacer sequence ATCN PAM
uuugggggucagugguguuu

SEQ ID NO: 744 - RNA, 20 nt, Artificial Sequence
  spacer sequence ATCN PAM
cgaaaaaaaaaaaaagaaaa

SEQ ID NO: 745 - RNA, 20 nt, Artificial Sequence
  spacer sequence ATCN PAM
gugucagagccaugauucag

SEQ ID NO: 746 - RNA, 20 nt, Artificial Sequence
  spacer sequence ATCN PAM
uggcucugacacugauaagc

SEQ ID NO: 747 - RNA, 20 nt, Artificial Sequence
  spacer sequence ATCN PAM
gauucaggacucugcuccua

SEQ ID NO: 748 - RNA, 20 nt, Artificial Sequence
  spacer sequence ATCN PAM
gaugcccguaccugaaucau

SEQ ID NO: 749 - RNA, 20 nt, Artificial Sequence
  spacer sequence ATCN PAM
cuugaggucaggaguuugag

SEQ ID NO: 750 - RNA, 20 nt, Artificial Sequence
  spacer sequence ATCN PAM
uccagccucagccccucaaa

SEQ ID NO: 751 - RNA, 20 nt, Artificial Sequence
  spacer sequence ATCN PAM
ccauaucuuaucacuacagu

SEQ ID NO: 752 - RNA, 20 nt, Artificial Sequence
  spacer sequence ATCN PAM
uaucacuacaguuuuauucu

SEQ ID NO: 753 - RNA, 20 nt, Artificial Sequence
  spacer sequence ATCN PAM
cuacaguuuuauucuuuugg

SEQ ID NO: 754 - RNA, 20 nt, Artificial Sequence
  spacer sequence ATCN PAM
uggaagggcaaugucuagaa

SEQ ID NO: 755 - RNA, 20 nt, Artificial Sequence
  spacer sequence ATCN PAM
guaaauaucuuaguucucaa

SEQ ID NO: 756 - RNA, 20 nt, Artificial Sequence
  spacer sequence ATCN PAM
uaguucucaaguaacgaauu

SEQ ID NO: 757 - RNA, 20 nt, Artificial Sequence
  spacer sequence ATCN PAM
guggggcugucuuucugcaa

SEQ ID NO: 758 - RNA, 20 nt, Artificial Sequence
  spacer sequence ATCN PAM
acuagacucuagccuagacu

SEQ ID NO: 759 - RNA, 20 nt, Artificial Sequence
  spacer sequence ATCN PAM
auuccuuuaaccaaagccug

SEQ ID NO: 760 - RNA, 20 nt, Artificial Sequence
  spacer sequence ATCN PAM
auuuagcaaguauucugggg

SEQ ID NO: 761 - RNA, 20 nt, Artificial Sequence
  spacer sequence ATCN PAM
cccaaauuaguagccagcug

SEQ ID NO: 762 - RNA, 20 nt, Artificial Sequence
  spacer sequence ATCN PAM
aaccugaggguauuugugug

SEQ ID NO: 763 - RNA, 20 nt, Artificial Sequence
  spacer sequence ATCN PAM
uucuagugaauuaucaaacc

SEQ ID NO: 764 - RNA, 20 nt, Artificial Sequence
  spacer sequence ATCN PAM
agagcucuggggauccaauc

SEQ ID NO: 765 - RNA, 20 nt, Artificial Sequence
  spacer sequence ATCN PAM
ccagagcucuugaugugagc

SEQ ID NO: 766 - RNA, 20 nt, Artificial Sequence
  spacer sequence ATCN PAM
aauccacuccagagcaucug

SEQ ID NO: 767 - RNA, 20 nt, Artificial Sequence
  spacer sequence ATCN PAM
acuccagagcaucuggggaa

SEQ ID NO: 768 - RNA, 20 nt, Artificial Sequence
  spacer sequence ATCN PAM
ggggaaaagccaccugcucc

SEQ ID NO: 769 - RNA, 20 nt, Artificial Sequence
  spacer sequence ATCN PAM
cagcguguaggucuugggaa

SEQ ID NO: 770 - RNA, 20 nt, Artificial Sequence
  spacer sequence ATCN PAM
agagguuuggaaauugagcc

SEQ ID NO: 771 - RNA, 20 nt, Artificial Sequence
  spacer sequence ATCN PAM
cuuagaacugggggaagcca

SEQ ID NO: 772 - RNA, 20 nt, Artificial Sequence
  spacer sequence ATCN PAM
ggaguggucagaacguggag

SEQ ID NO: 773 - RNA, 20 nt, Artificial Sequence
  spacer sequence ATCN PAM
cugugucugaaggggguaag

SEQ ID NO: 774 - RNA, 20 nt, Artificial Sequence
  spacer sequence ATCN PAM
gcuucuucuuaguggugugu

SEQ ID NO: 775 - RNA, 20 nt, Artificial Sequence
  spacer sequence ATCN PAM
cucaggacaaucugcuucuu

SEQ ID NO: 776 - RNA, 20 nt, Artificial Sequence
  spacer sequence ATCN PAM
gagacucacacauacuuccc

SEQ ID NO: 777 - RNA, 20 nt, Artificial Sequence
  spacer sequence ATCN PAM
gaucccaaaaauccaucuag

SEQ ID NO: 778 - RNA, 20 nt, Artificial Sequence
  spacer sequence ATCN PAM
gauguggcugcauaaagacg

SEQ ID NO: 779 - RNA, 20 nt, Artificial Sequence
  spacer sequence ATCN PAM
caaaaauccaucuagacuca

SEQ ID NO: 780 - RNA, 20 nt, Artificial Sequence
  spacer sequence ATCN PAM
aucuagacucacuggaagaa

SEQ ID NO: 781 - RNA, 20 nt, Artificial Sequence
  spacer sequence ATCN PAM
agacucacuggaagaaagca

SEQ ID NO: 782 - RNA, 20 nt, Artificial Sequence
  spacer sequence ATCN PAM
guaugaaauguaggugcaug

SEQ ID NO: 783 - RNA, 20 nt, Artificial Sequence
  spacer sequence ATCN PAM
cugugauggaaagcaguggc

SEQ ID NO: 784 - RNA, 20 nt, Artificial Sequence
  spacer sequence ATCN PAM
cagugaugaauuuacauggg

SEQ ID NO: 785 - RNA, 20 nt, Artificial Sequence
  spacer sequence ATCN PAM
uauguaugcaaguuuuaauu

SEQ ID NO: 786 - RNA, 20 nt, Artificial Sequence
  spacer sequence ATCN PAM
auugggaauaccuaaaucau

SEQ ID NO: 787 - RNA, 20 nt, Artificial Sequence
  spacer sequence ATCN PAM
gggcuagagggaucucagag

SEQ ID NO: 788 - RNA, 20 nt, Artificial Sequence
  spacer sequence ATCN PAM
cucuagcccugaucuauugg

SEQ ID NO: 789 - RNA, 20 nt, Artificial Sequence
  spacer sequence ATCN PAM
cagaguauuugcuuguaguu

SEQ ID NO: 790 - RNA, 20 nt, Artificial Sequence
  spacer sequence ATCN PAM
gguacucgguucugcccaag

SEQ ID NO: 791 - RNA, 20 nt, Artificial Sequence
  spacer sequence ATCN PAM
uuuaccauggaguuacaugg

SEQ ID NO: 792 - RNA, 20 nt, Artificial Sequence
  spacer sequence ATCN PAM
gagaaaaauauuuuuaacaa

SEQ ID NO: 793 - RNA, 20 nt, Artificial Sequence
  spacer sequence ATCN PAM
ccccugccaguaaguauauc

SEQ ID NO: 794 - RNA, 20 nt, Artificial Sequence
  spacer sequence ATCN PAM
uuuccuaucaagaaggagag

SEQ ID NO: 795 - RNA, 20 nt, Artificial Sequence
  spacer sequence ATCN PAM
agaaggagaggacuucccug

SEQ ID NO: 796 - RNA, 20 nt, Artificial Sequence
  spacer sequence ATCN PAM
cucugaguacuaggcaacga

SEQ ID NO: 797 - RNA, 20 nt, Artificial Sequence
  spacer sequence ATCN PAM
gcguggcaccaccuggcccu

SEQ ID NO: 798 - RNA, 20 nt, Artificial Sequence
  spacer sequence ATCN PAM
cuuguuauuuugucaucugc

SEQ ID NO: 799 - RNA, 20 nt, Artificial Sequence
  spacer sequence ATCN PAM
uaaaauugugaaagaaccuu

SEQ ID NO: 800 - RNA, 20 nt, Artificial Sequence
  spacer sequence ATCN PAM
guaguuuugcgaaagguucu

SEQ ID NO: 801 - RNA, 20 nt, Artificial Sequence
  spacer sequence ATCN PAM
uaguuacccauccuucugcc

SEQ ID NO: 802 - RNA, 20 nt, Artificial Sequence
  spacer sequence ATCN PAM
uucugccagagaaaagggcu

SEQ ID NO: 803 - RNA, 20 nt, Artificial Sequence
  spacer sequence ATCN PAM
gagggagggggaaacugucc

SEQ ID NO: 804 - RNA, 20 nt, Artificial Sequence
  spacer sequence ATCN PAM
uugggccaaucagagggagg

SEQ ID NO: 805 - RNA, 20 nt, Artificial Sequence
  spacer sequence ATCN PAM
gcucuguucacagagugccc

SEQ ID NO: 806 - RNA, 20 nt, Artificial Sequence
  spacer sequence ATCN PAM
uuuggaccucucuuuacuca

SEQ ID NO: 807 - RNA, 20 nt, Artificial Sequence
  spacer sequence ATCN PAM
uuacaauggggauagugaaa

SEQ ID NO: 808 - RNA, 20 nt, Artificial Sequence
  spacer sequence ATCN PAM
ccauuguaaagaugaguaaa

SEQ ID NO: 809 - RNA, 20 nt, Artificial Sequence
  spacer sequence ATCN PAM
caaccgugccugguauggug

SEQ ID NO: 810 - RNA, 20 nt, Artificial Sequence
  spacer sequence ATCN PAM
uuauuacuguggccaguagu

SEQ ID NO: 811 - RNA, 20 nt, Artificial Sequence
  spacer sequence ATCN PAM
ugacuuauuucacagaguac

SEQ ID NO: 812 - RNA, 20 nt, Artificial Sequence
  spacer sequence ATCN PAM
gacauuguaaaaucaaaaag

SEQ ID NO: 813 - RNA, 20 nt, Artificial Sequence
  spacer sequence ATCN PAM
aaaagggcauucucccuggg

SEQ ID NO: 814 - RNA, 20 nt, Artificial Sequence
  spacer sequence ATCN PAM
aaacauaaaugagaaaguau

SEQ ID NO: 815 - RNA, 20 nt, Artificial Sequence
  spacer sequence ATCN PAM
aucauuuucuaaggaaagcc

SEQ ID NO: 816 - RNA, 20 nt, Artificial Sequence
  spacer sequence ATCN PAM
uuuucuaaggaaagccucca

SEQ ID NO: 817 - RNA, 20 nt, Artificial Sequence
  spacer sequence ATCN PAM
uuuuuguucaugugccugga

SEQ ID NO: 818 - RNA, 20 nt, Artificial Sequence
  spacer sequence ATCN PAM
accccucuggggccaaaugc

SEQ ID NO: 819 - RNA, 20 nt, Artificial Sequence
  spacer sequence ATCN PAM
agagcugggcucagcacugg

SEQ ID NO: 820 - RNA, 20 nt, Artificial Sequence
  spacer sequence ATCN PAM
ccuuucuuuuauuucuucag

SEQ ID NO: 821 - RNA, 20 nt, Artificial Sequence
  spacer sequence ATCN PAM
gagguaggcuguuagcugaa

SEQ ID NO: 822 - RNA, 20 nt, Artificial Sequence
  spacer sequence ATCN PAM
ucugagagccuaggagugaa

SEQ ID NO: 823 - RNA, 20 nt, Artificial Sequence
  spacer sequence ATCN PAM
guauuggaagcuagaaaugc

SEQ ID NO: 824 - RNA, 20 nt, Artificial Sequence
  spacer sequence ATCN PAM
aacugcuggguucacauugc

SEQ ID NO: 825 - RNA, 20 nt, Artificial Sequence
  spacer sequence ATCN PAM
ucaggucauuacaagggccu

SEQ ID NO: 826 - RNA, 20 nt, Artificial Sequence
  spacer sequence ATCN PAM
uuggacagagaggaccugag

SEQ ID NO: 827 - RNA, 20 nt, Artificial Sequence
  spacer sequence ATCN PAM
ugcuuugaggcuauuagaaa

SEQ ID NO: 828 - RNA, 20 nt, Artificial Sequence
  spacer sequence ATCN PAM
caugaagauucugcaagacu

SEQ ID NO: 829 - RNA, 20 nt, Artificial Sequence
  spacer sequence ATCN PAM
ucaugugaucuugcuuugag

SEQ ID NO: 830 - RNA, 20 nt, Artificial Sequence
  spacer sequence ATCN PAM
auaugagguuaguccauuug

SEQ ID NO: 831 - RNA, 20 nt, Artificial Sequence
  spacer sequence ATCN PAM
ugggacuaugaaaauagggc

SEQ ID NO: 832 - RNA, 20 nt, Artificial Sequence
  spacer sequence ATCN PAM
aaggaggcgugguuuccuuu

SEQ ID NO: 833 - RNA, 20 nt, Artificial Sequence
  spacer sequence ATCN PAM
ccaagcagcagcugcauggu

SEQ ID NO: 834 - RNA, 20 nt, Artificial Sequence
  spacer sequence ATCN PAM
ucaccaagcagcagcugcau

SEQ ID NO: 835 - RNA, 20 nt, Artificial Sequence
  spacer sequence ATCN PAM
gacccuagaaugcuccacca

SEQ ID NO: 836 - RNA, 20 nt, Artificial Sequence
  spacer sequence ATCN PAM
ggccaaaucccagguuuccc

SEQ ID NO: 837 - RNA, 20 nt, Artificial Sequence
  spacer sequence ATCN PAM
aaagaaggacacucuuuggu

SEQ ID NO: 838 - RNA, 20 nt, Artificial Sequence
  spacer sequence ATCN PAM
uucccaugcauauuuuaaua

SEQ ID NO: 839 - RNA, 20 nt, Artificial Sequence
  spacer sequence ATCN PAM
auauacaguauuguuuagug

SEQ ID NO: 840 - RNA, 20 nt, Artificial Sequence
  spacer sequence ATCN PAM
gcuguagaagugaaaguacc

SEQ ID NO: 841 - RNA, 20 nt, Artificial Sequence
  spacer sequence ATCN PAM
cucuuuuucaacaucaaauu

SEQ ID NO: 842 - RNA, 20 nt, Artificial Sequence
  spacer sequence ATCN PAM
aauuugcugagauuuaggug

SEQ ID NO: 843 - RNA, 20 nt, Artificial Sequence
  spacer sequence ATCN PAM
cagcaaauuugauguugaaa

SEQ ID NO: 844 - RNA, 20 nt, Artificial Sequence
  spacer sequence ATCN PAM
uggaaaaaaaucugugggac

SEQ ID NO: 845 - RNA, 20 nt, Artificial Sequence
  spacer sequence ATCN PAM
gugggacaaacagugggacc

SEQ ID NO: 846 - RNA, 20 nt, Artificial Sequence
  spacer sequence ATCN PAM
cucacaggucccacuguuug

SEQ ID NO: 847 - RNA, 20 nt, Artificial Sequence
  spacer sequence ATCN PAM
gggagagaaaaacucaguua

SEQ ID NO: 848 - RNA, 20 nt, Artificial Sequence
  spacer sequence ATCN PAM
uaggcuggccuuuccugggc

SEQ ID NO: 849 - RNA, 20 nt, Artificial Sequence
  spacer sequence ATCN PAM
ugugcagcacucagggugug

SEQ ID NO: 850 - RNA, 20 nt, Artificial Sequence
  spacer sequence ATCN PAM
caguuucugggccaguugaa

SEQ ID NO: 851 - RNA, 20 nt, Artificial Sequence
  spacer sequence ATCN PAM
aacugaguucaacuggccca

SEQ ID NO: 852 - RNA, 20 nt, Artificial Sequence
  spacer sequence ATCN PAM
ucuguuuagugucucaaaag

SEQ ID NO: 853 - RNA, 20 nt, Artificial Sequence
  spacer sequence ATCN PAM
ggguaucugcaaggccucac

SEQ ID NO: 854 - RNA, 20 nt, Artificial Sequence
  spacer sequence ATCN PAM
gcaaggccucacuuccuccu

SEQ ID NO: 855 - RNA, 20 nt, Artificial Sequence
  spacer sequence ATCN PAM
uauguaaccuugacccugug

SEQ ID NO: 856 - RNA, 20 nt, Artificial Sequence
  spacer sequence ATCN PAM
gagaugucuugagggaaagg

SEQ ID NO: 857 - RNA, 20 nt, Artificial Sequence
  spacer sequence ATCN PAM
cagauaucauauguaaccuu

SEQ ID NO: 858 - RNA, 20 nt, Artificial Sequence
  spacer sequence ATCN PAM
cacgacaaggagcaguugac

SEQ ID NO: 859 - RNA, 20 nt, Artificial Sequence
  spacer sequence ATCN PAM
gucacuaugugcuaaaagca

SEQ ID NO: 860 - RNA, 20 nt, Artificial Sequence
  spacer sequence ATCN PAM
gaaaugagaguccaguuagu

SEQ ID NO: 861 - RNA, 20 nt, Artificial Sequence
  spacer sequence ATCN PAM
auccggcaccuaugggacag

SEQ ID NO: 862 - RNA, 20 nt, Artificial Sequence
  spacer sequence ATCN PAM
ggcaccuaugggacaggaag

SEQ ID NO: 863 - RNA, 20 nt, Artificial Sequence
  spacer sequence ATCN PAM
ggcuccacaaaccuugcugg

SEQ ID NO: 864 - RNA, 20 nt, Artificial Sequence
  spacer sequence ATCN PAM
ccuuuuacuuuccugaaguu

SEQ ID NO: 865 - RNA, 20 nt, Artificial Sequence
  spacer sequence ATCN PAM
guuuuuguacuuggccugcu

SEQ ID NO: 866 - RNA, 20 nt, Artificial Sequence
  spacer sequence ATCN PAM
ggcuuucucugagcaaagac

SEQ ID NO: 867 - RNA, 20 nt, Artificial Sequence
  spacer sequence ATCN PAM
gugaguguguuuuauaaacu

SEQ ID NO: 868 - RNA, 20 nt, Artificial Sequence
  spacer sequence ATCN PAM
cgcccccacccccuacuccu

SEQ ID NO: 869 - RNA, 20 nt, Artificial Sequence
  spacer sequence ATCN PAM
gaacuauucucuuaauaucu

SEQ ID NO: 870 - RNA, 20 nt, Artificial Sequence
  spacer sequence ATCN PAM
ugauccaagguuuucucgga

SEQ ID NO: 871 - RNA, 20 nt, Artificial Sequence
  spacer sequence ATCN PAM
agauauuaagagaauaguuc

SEQ ID NO: 872 - RNA, 20 nt, Artificial Sequence
  spacer sequence ATCN PAM
aagguuuucucggagccugg

SEQ ID NO: 873 - RNA, 20 nt, Artificial Sequence
  spacer sequence ATCN PAM
gggucacuccuaagaaucca

SEQ ID NO: 874 - RNA, 20 nt, Artificial Sequence
  spacer sequence ATCN PAM
aggauccagacccaguacac

SEQ ID NO: 875 - RNA, 20 nt, Artificial Sequence
  spacer sequence ATCN PAM
uggauucuuaggagugaccc

SEQ ID NO: 876 - RNA, 20 nt, Artificial Sequence
  spacer sequence ATCN PAM
agacccaguacacacauauc

SEQ ID NO: 877 - RNA, 20 nt, Artificial Sequence
  spacer sequence ATCN PAM
ggagcucagauuucccacau

SEQ ID NO: 878 - RNA, 20 nt, Artificial Sequence
  spacer sequence ATCN PAM
gagcuccugauaugugugua

SEQ ID NO: 879 - RNA, 20 nt, Artificial Sequence
  spacer sequence ATCN PAM
ggaagggaaauaaagacuac

SEQ ID NO: 880 - RNA, 20 nt, Artificial Sequence
  spacer sequence ATCN PAM
cacaccuguaaucccagcac

SEQ ID NO: 881 - RNA, 20 nt, Artificial Sequence
  spacer sequence ATCN PAM
uaaauaaauaaagucuauau

SEQ ID NO: 882 - RNA, 20 nt, Artificial Sequence
  spacer sequence ATCN PAM
uguuugggcccucaaagaau

SEQ ID NO: 883 - RNA, 20 nt, Artificial Sequence
  spacer sequence ATCN PAM
ucccucccuuuuaaaaagug

SEQ ID NO: 884 - RNA, 20 nt, Artificial Sequence
  spacer sequence ATCN PAM
gcucuguuaaacagcugacu

SEQ ID NO: 885 - RNA, 20 nt, Artificial Sequence
  spacer sequence ATCN PAM
gucagcuguuuaacagagca

SEQ ID NO: 886 - RNA, 20 nt, Artificial Sequence
  spacer sequence ATCN PAM
ucugaugaaugggaaagaaa

SEQ ID NO: 887 - RNA, 20 nt, Artificial Sequence
  spacer sequence ATCN PAM
gaugaaugggaaagaaaaaa

SEQ ID NO: 888 - RNA, 20 nt, Artificial Sequence
  spacer sequence ATCN PAM
gaugaucagucagcuguuua

SEQ ID NO: 889 - RNA, 20 nt, Artificial Sequence
  spacer sequence ATCN PAM
ggggggucaaggaaggccuu

SEQ ID NO: 890 - RNA, 20 nt, Artificial Sequence
  spacer sequence ATCN PAM
cguuaguuugcucauugcac

SEQ ID NO: 891 - RNA, 20 nt, Artificial Sequence
  spacer sequence ATCN PAM
auucacguuuuuaaaaagau

SEQ ID NO: 892 - RNA, 20 nt, Artificial Sequence
  spacer sequence ATCN PAM
uuuuaaaaacgugaauagau

SEQ ID NO: 893 - RNA, 20 nt, Artificial Sequence
  spacer sequence ATCN PAM
cuccuggggcugggcgcggu

SEQ ID NO: 894 - RNA, 20 nt, Artificial Sequence
  spacer sequence ATCN PAM
uaacacuaugggaggccaag

SEQ ID NO: 895 - RNA, 20 nt, Artificial Sequence
  spacer sequence ATCN PAM
gccugucuuggccucccaua

SEQ ID NO: 896 - RNA, 20 nt, Artificial Sequence
  spacer sequence ATCN PAM
cuacuaaaauacaaaaaaaa

SEQ ID NO: 897 - RNA, 20 nt, Artificial Sequence
  spacer sequence ATCN PAM
gccucccggguucaagcaau

SEQ ID NO: 898 - RNA, 20 nt, Artificial Sequence
  spacer sequence ATCN PAM
cggcucauacugcaacaucu

SEQ ID NO: 899 - RNA, 20 nt, Artificial Sequence
  spacer sequence ATCN PAM
gggucguggucuucauuucc

SEQ ID NO: 900 - RNA, 20 nt, Artificial Sequence
  spacer sequence ATCN PAM
gugauugacuuuugugauca

SEQ ID NO: 901 - RNA, 20 nt, Artificial Sequence
  spacer sequence ATCN PAM
cugauggaaaugaagaccac

SEQ ID NO: 902 - RNA, 20 nt, Artificial Sequence
  spacer sequence ATCN PAM
caaaagucaaucacugaugg

SEQ ID NO: 903 - RNA, 20 nt, Artificial Sequence
  spacer sequence ATCN PAM
caggaguugcauucagaugg

SEQ ID NO: 904 - RNA, 20 nt, Artificial Sequence
  spacer sequence ATCN PAM
gaaugcaacuccugugauca

SEQ ID NO: 905 - RNA, 20 nt, Artificial Sequence
  spacer sequence ATCN PAM
ccacacuggguaaccaggaa

SEQ ID NO: 906 - RNA, 20 nt, Artificial Sequence
  spacer sequence ATCN PAM
ccuuccugguuacccagugu

SEQ ID NO: 907 - RNA, 20 nt, Artificial Sequence
  spacer sequence ATCN PAM
cagccuucugccaggccaac

SEQ ID NO: 908 - RNA, 20 nt, Artificial Sequence
  spacer sequence ATCN PAM
cuggugguugaggagucugg

SEQ ID NO: 909 - RNA, 20 nt, Artificial Sequence
  spacer sequence ATCN PAM
agugaugaagcaugacaacu

SEQ ID NO: 910 - RNA, 20 nt, Artificial Sequence
  spacer sequence ATCN PAM
cuugauuuagaggcaauagg

SEQ ID NO: 911 - RNA, 20 nt, Artificial Sequence
  spacer sequence ATCN PAM
uuuaaaaaaguguccugaca

SEQ ID NO: 912 - RNA, 20 nt, Artificial Sequence
  spacer sequence ATCN PAM
ugcacagcuuugggcacacc

SEQ ID NO: 913 - RNA, 20 nt, Artificial Sequence
  spacer sequence ATCN PAM
caagugucccugaggaccag

SEQ ID NO: 914 - RNA, 20 nt, Artificial Sequence
  spacer sequence ATCN PAM
ugguccucagggacacuuga

SEQ ID NO: 915 - RNA, 20 nt, Artificial Sequence
  spacer sequence ATCN PAM
uugacuccuccugcccagag

SEQ ID NO: 916 - RNA, 20 nt, Artificial Sequence
  spacer sequence ATCN PAM
gccaccugccccaggucccc

SEQ ID NO: 917 - RNA, 20 nt, Artificial Sequence
  spacer sequence ATCN PAM
cagagcauugccccucuccc

SEQ ID NO: 918 - RNA, 20 nt, Artificial Sequence
  spacer sequence ATCN PAM
ugcuuccauccuucaugcag

SEQ ID NO: 919 - RNA, 20 nt, Artificial Sequence
  spacer sequence ATCN PAM
uucaugcagugcaugaauaa

SEQ ID NO: 920 - RNA, 20 nt, Artificial Sequence
  spacer sequence ATCN PAM
ccccagggaauguuuaaguu

SEQ ID NO: 921 - RNA, 20 nt, Artificial Sequence
  spacer sequence ATCN PAM
cugguuugccgcaguugcug

SEQ ID NO: 922 - RNA, 20 nt, Artificial Sequence
  spacer sequence ATCN PAM
agcaggcaugcugggcggac

SEQ ID NO: 923 - RNA, 20 nt, Artificial Sequence
  spacer sequence ATCN PAM
gcuaagaaaaugucagacuu

SEQ ID NO: 924 - RNA, 20 nt, Artificial Sequence
  spacer sequence ATCN PAM
ccaaauguuaagucugacau

SEQ ID NO: 925 - RNA, 20 nt, Artificial Sequence
  spacer sequence ATCN PAM
agggaucuuuuaaaaauauu

SEQ ID NO: 926 - RNA, 20 nt, Artificial Sequence
  spacer sequence ATCN PAM
cuugauggcauccccaaaug

SEQ ID NO: 927 - RNA, 20 nt, Artificial Sequence
  spacer sequence ATCN PAM
uuuaaaaauauuuuucuguu

SEQ ID NO: 928 - RNA, 20 nt, Artificial Sequence
  spacer sequence ATCN PAM
uuaacagaaaaauauuuuua

SEQ ID NO: 929 - RNA, 20 nt, Artificial Sequence
  spacer sequence ATCN PAM
uuucuuacccagucugccuu

SEQ ID NO: 930 - RNA, 20 nt, Artificial Sequence
  spacer sequence ATCN PAM
uuugggaaaaggaguuugga

SEQ ID NO: 931 - RNA, 20 nt, Artificial Sequence
  spacer sequence ATCN PAM
ugcaggucauuuuccccaca

SEQ ID NO: 932 - RNA, 20 nt, Artificial Sequence
  spacer sequence ATCN PAM
agauguaugcucuugcauau

SEQ ID NO: 933 - RNA, 20 nt, Artificial Sequence
  spacer sequence ATCN PAM
ggauaccuuuuaccucuugg

SEQ ID NO: 934 - RNA, 20 nt, Artificial Sequence
  spacer sequence ATCN PAM
agucuucugcuccccacacu

SEQ ID NO: 935 - RNA, 20 nt, Artificial Sequence
  spacer sequence ATCN PAM
ggccaauguuaugcauuuaa

SEQ ID NO: 936 - RNA, 20 nt, Artificial Sequence
  spacer sequence ATCN PAM
gccagccucagccucccaaa

SEQ ID NO: 937 - RNA, 20 nt, Artificial Sequence
  spacer sequence ATCN PAM
ccugaggucaggaguucgag

SEQ ID NO: 938 - RNA, 20 nt, Artificial Sequence
  spacer sequence ATCN PAM
uauuugucauguguaaacca

SEQ ID NO: 939 - RNA, 20 nt, Artificial Sequence
  spacer sequence ATCN PAM
cagcuacuggggagguugag

SEQ ID NO: 940 - RNA, 20 nt, Artificial Sequence
  spacer sequence ATCN PAM
cuugaacccaggaggcagag

SEQ ID NO: 941 - RNA, 20 nt, Artificial Sequence
  spacer sequence ATCN PAM
ccgcucacugcaaccucugc

SEQ ID NO: 942 - RNA, 20 nt, Artificial Sequence
  spacer sequence ATCN PAM
auagugcaaucuccgcucac

SEQ ID NO: 943 - RNA, 20 nt, Artificial Sequence
  spacer sequence ATCN PAM
auuaaagcacguagguuacu

SEQ ID NO: 944 - RNA, 20 nt, Artificial Sequence
  spacer sequence ATCN PAM
aauucagagguucuuaaccu

SEQ ID NO: 945 - RNA, 20 nt, Artificial Sequence
  spacer sequence ATCN PAM
auuagcagaauacaaguugc

SEQ ID NO: 946 - RNA, 20 nt, Artificial Sequence
  spacer sequence ATCN PAM
ucuacaaaucaauuagcaga

SEQ ID NO: 947 - RNA, 20 nt, Artificial Sequence
  spacer sequence ATCN PAM
auguaaauaauuugcauucu

SEQ ID NO: 948 - RNA, 20 nt, Artificial Sequence
  spacer sequence ATCN PAM
ucacacccuuuaguccccgg

SEQ ID NO: 949 - RNA, 20 nt, Artificial Sequence
  spacer sequence ATCN PAM
ccuacuucuugccugaguag

SEQ ID NO: 950 - RNA, 20 nt, Artificial Sequence
  spacer sequence ATCN PAM
gacaucacucccagggcaug

SEQ ID NO: 951 - RNA, 20 nt, Artificial Sequence
  spacer sequence ATCN PAM
cucccagggcaugccccguc

SEQ ID NO: 952 - RNA, 20 nt, Artificial Sequence
  spacer sequence ATCN PAM
uguucagcugugguugucgu

SEQ ID NO: 953 - RNA, 20 nt, Artificial Sequence
  spacer sequence ATCN PAM
cagaguaaccaguaggcagg

SEQ ID NO: 954 - RNA, 20 nt, Artificial Sequence
  spacer sequence ATCN PAM
uuuguuuaguuaaagcucuu

SEQ ID NO: 955 - RNA, 20 nt, Artificial Sequence
  spacer sequence ATCN PAM
gugccaagcaccgugcuaga

SEQ ID NO: 956 - RNA, 20 nt, Artificial Sequence
  spacer sequence ATCN PAM
auaugggguuuguaagagga

SEQ ID NO: 957 - RNA, 20 nt, Artificial Sequence
  spacer sequence ATCN PAM
ggacuggggcccgcuggggc

SEQ ID NO: 958 - RNA, 20 nt, Artificial Sequence
  spacer sequence ATCN PAM
gugggaguuuaggguuuuaa

SEQ ID NO: 959 - RNA, 20 nt, Artificial Sequence
  spacer sequence ATCN PAM
aacacuuugugguccuguuu

SEQ ID NO: 960 - RNA, 20 nt, Artificial Sequence
  spacer sequence ATCN PAM
cucagcccacagacuuuccc

SEQ ID NO: 961 - RNA, 20 nt, Artificial Sequence
  spacer sequence ATCN PAM
uaauuaugaugaagggugac

SEQ ID NO: 962 - RNA, 20 nt, Artificial Sequence
  spacer sequence ATCN PAM
uaauuaagauuccccacuga

SEQ ID NO: 963 - RNA, 20 nt, Artificial Sequence
  spacer sequence ATCN PAM
guaauuuaauuacuauuuau

SEQ ID NO: 964 - RNA, 20 nt, Artificial Sequence
  spacer sequence ATCN PAM
ucccuucauaacccgagaag

SEQ ID NO: 965 - RNA, 20 nt, Artificial Sequence
  spacer sequence ATCN PAM
cuucauaacccgagaagcuu

SEQ ID NO: 966 - RNA, 20 nt, Artificial Sequence
  spacer sequence ATCN PAM
aauucuuuaaagguuugaag

SEQ ID NO: 967 - RNA, 20 nt, Artificial Sequence
  spacer sequence ATCN PAM
ugguaguacacauaucuaau

SEQ ID NO: 968 - RNA, 20 nt, Artificial Sequence
  spacer sequence ATCN PAM
gcaacccagaguguaacaga

SEQ ID NO: 969 - RNA, 20 nt, Artificial Sequence
  spacer sequence ATCN PAM
guuacacucuggguugcaga

SEQ ID NO: 970 - RNA, 20 nt, Artificial Sequence
  spacer sequence ATCN PAM
cuagcuuccuuccuuuaaaa

SEQ ID NO: 971 - RNA, 20 nt, Artificial Sequence
  spacer sequence ATCN PAM
cuucccuagggagcaagagg

SEQ ID NO: 972 - RNA, 20 nt, Artificial Sequence
  spacer sequence ATCN PAM
gaagauugaccauauauuaa

SEQ ID NO: 973 - RNA, 20 nt, Artificial Sequence
  spacer sequence ATCN PAM
ucugaugaaaaggcugaggg

SEQ ID NO: 974 - RNA, 20 nt, Artificial Sequence
  spacer sequence ATCN PAM
uuaucacgaaucagaugccu

SEQ ID NO: 975 - RNA, 20 nt, Artificial Sequence
  spacer sequence ATCN PAM
cgaaucagaugccucuucuc

SEQ ID NO: 976 - RNA, 20 nt, Artificial Sequence
  spacer sequence ATCN PAM
gaugccucuucucccaggcu

SEQ ID NO: 977 - RNA, 20 nt, Artificial Sequence
  spacer sequence ATCN PAM
gauucgugauaaggaugagg

SEQ ID NO: 978 - RNA, 20 nt, Artificial Sequence
  spacer sequence ATCN PAM
gugcuggcugagcugagcuu

SEQ ID NO: 979 - RNA, 20 nt, Artificial Sequence
  spacer sequence ATCN PAM
aggacacucccauugccuuc

SEQ ID NO: 980 - RNA, 20 nt, Artificial Sequence
  spacer sequence ATCN PAM
uagcuucaucccauacuggc

SEQ ID NO: 981 - RNA, 20 nt, Artificial Sequence
  spacer sequence ATCN PAM
cauacuggcugugugaucuu

SEQ ID NO: 982 - RNA, 20 nt, Artificial Sequence
  spacer sequence ATCN PAM
cacagccaguaugggaugaa

SEQ ID NO: 983 - RNA, 20 nt, Artificial Sequence
  spacer sequence ATCN PAM
uggcugaguuacuuaaccuc

SEQ ID NO: 984 - RNA, 20 nt, Artificial Sequence
  spacer sequence ATCN PAM
auauucuuuaccauggguag

SEQ ID NO: 985 - RNA, 20 nt, Artificial Sequence
  spacer sequence ATCN PAM
cagggauaccucugaagauc

SEQ ID NO: 986 - RNA, 20 nt, Artificial Sequence
  spacer sequence ATCN PAM
cugugaugcucaaaagucau

SEQ ID NO: 987 - RNA, 20 nt, Artificial Sequence
  spacer sequence ATCN PAM
ucagagguaucccugugaug

SEQ ID NO: 988 - RNA, 20 nt, Artificial Sequence
  spacer sequence ATCN PAM
ugccauauuucacacugaag

SEQ ID NO: 989 - RNA, 20 nt, Artificial Sequence
  spacer sequence ATCN PAM
cccacacugaaagggaccca

SEQ ID NO: 990 - RNA, 20 nt, Artificial Sequence
  spacer sequence ATCN PAM
aggucaauuuuaccugcuua

SEQ ID NO: 991 - RNA, 20 nt, Artificial Sequence
  spacer sequence ATCN PAM
auuuaagaacaucuuccaaa

SEQ ID NO: 992 - RNA, 20 nt, Artificial Sequence
  spacer sequence ATCN PAM
uccaaaacggcagcuggucu

SEQ ID NO: 993 - RNA, 20 nt, Artificial Sequence
  spacer sequence ATCN PAM
uuccagaaaccgagcaguac

SEQ ID NO: 994 - RNA, 20 nt, Artificial Sequence
  spacer sequence ATCN PAM
uucacuccuccaugcauuau

SEQ ID NO: 995 - RNA, 20 nt, Artificial Sequence
  spacer sequence ATCN PAM
uguuuuggucagacguauuc

SEQ ID NO: 996 - RNA, 20 nt, Artificial Sequence
  spacer sequence ATCN PAM
gucccugucaccauaguccu

SEQ ID NO: 997 - RNA, 20 nt, Artificial Sequence
  spacer sequence ATCN PAM
accagggcucaggcgaagau

SEQ ID NO: 998 - RNA, 20 nt, Artificial Sequence
  spacer sequence ATCN PAM
ucgccugagcccugguagau

SEQ ID NO: 999 - RNA, 20 nt, Artificial Sequence
  spacer sequence ATCN PAM
ucaagcucuggugaccaaag

SEQ ID NO: 1000 - RNA, 20 nt, Artificial Sequence
  spacer sequence ATCN PAM
agcucuggugaccaaagcca

SEQ ID NO: 1001 - RNA, 20 nt, Artificial Sequence
  spacer sequence ATCN PAM
cugcucucugaagccauuuc

SEQ ID NO: 1002 - RNA, 20 nt, Artificial Sequence
  spacer sequence ATCN PAM
gaccgcccagguuuaauuca

SEQ ID NO: 1003 - RNA, 20 nt, Artificial Sequence
  spacer sequence ATCN PAM
ccuuugagguuucaggagau

SEQ ID NO: 1004 - RNA, 20 nt, Artificial Sequence
  spacer sequence ATCN PAM
ccugaaaccucaaaggugau

SEQ ID NO: 1005 - RNA, 20 nt, Artificial Sequence
  spacer sequence ATCN PAM
uccagucaauccccaaggcc

SEQ ID NO: 1006 - RNA, 20 nt, Artificial Sequence
  spacer sequence ATCN PAM
ccaaggccucagacagccac

SEQ ID NO: 1007 - RNA, 20 nt, Artificial Sequence
  spacer sequence ATCN PAM
cccuccugggguccuguggc

SEQ ID NO: 1008 - RNA, 20 nt, Artificial Sequence
  spacer sequence ATCN PAM
caugacaccuuugucaaaca

SEQ ID NO: 1009 - RNA, 20 nt, Artificial Sequence
  spacer sequence ATCN PAM
gaaauguagauuuggccugg

SEQ ID NO: 1010 - RNA, 20 nt, Artificial Sequence
  spacer sequence ATCN PAM
acauuucagauuugaaaugg

SEQ ID NO: 1011 - RNA, 20 nt, Artificial Sequence
  spacer sequence ATCN PAM
aggccaaaucuacauuucag

SEQ ID NO: 1012 - RNA, 20 nt, Artificial Sequence
  spacer sequence ATCN PAM
uuucaaugcauucagggugu

SEQ ID NO: 1013 - RNA, 20 nt, Artificial Sequence
  spacer sequence ATCN PAM
ccucgggcuuguuuucccuu

SEQ ID NO: 1014 - RNA, 20 nt, Artificial Sequence
  spacer sequence ATCN PAM
gugccuucucuagagcccuc

SEQ ID NO: 1015 - RNA, 20 nt, Artificial Sequence
  spacer sequence ATCN PAM
guuugcaacuuucuagaugu

SEQ ID NO: 1016 - RNA, 20 nt, Artificial Sequence
  spacer sequence ATCN PAM
agaaaguugcaaacagauuu

SEQ ID NO: 1017 - RNA, 20 nt, Artificial Sequence
  spacer sequence ATCN PAM
uuccgccugugcagcuaaaa

SEQ ID NO: 1018 - RNA, 20 nt, Artificial Sequence
  spacer sequence ATCN PAM
cucccaggccccagcauucu

SEQ ID NO: 1019 - RNA, 20 nt, Artificial Sequence
  spacer sequence ATCN PAM
auagucuucacuacccccuu

SEQ ID NO: 1020 - RNA, 20 nt, Artificial Sequence
  spacer sequence ATCN PAM
ccuaaacucauuuaauuaug

SEQ ID NO: 1021 - RNA, 20 nt, Artificial Sequence
  spacer sequence ATCN PAM
gggggcaucuggaaggaaag

SEQ ID NO: 1022 - RNA, 20 nt, Artificial Sequence
  spacer sequence ATCN PAM
ggaaggaaaguuaauacauu

SEQ ID NO: 1023 - RNA, 20 nt, Artificial Sequence
  spacer sequence ATCN PAM
aauauucauuguauaaguaa

SEQ ID NO: 1024 - RNA, 20 nt, Artificial Sequence
  spacer sequence ATCN PAM
cacauacaguguaggggaag

SEQ ID NO: 1025 - RNA, 20 nt, Artificial Sequence
  spacer sequence ATCN PAM
ugcauaauggacucaugggg

SEQ ID NO: 1026 - RNA, 20 nt, Artificial Sequence
  spacer sequence ATCN PAM
ccaugaguccauuaugcaag

SEQ ID NO: 1027 - RNA, 20 nt, Artificial Sequence
  spacer sequence ATCN PAM
uggguugcaggagguuggcg

SEQ ID NO: 1028 - RNA, 20 nt, Artificial Sequence
  spacer sequence ATCN PAM
ugcuggcuccuaccccgcca

SEQ ID NO: 1029 - RNA, 20 nt, Artificial Sequence
  spacer sequence ATCN PAM
cuuuucaccccgaggcuucg

SEQ ID NO: 1030 - RNA, 20 nt, Artificial Sequence
  spacer sequence ATCN PAM
cagacacccuuugaccaaag

SEQ ID NO: 1031 - RNA, 20 nt, Artificial Sequence
  spacer sequence ATCN PAM
uccuaagauuugaggauuca

SEQ ID NO: 1032 - RNA, 20 nt, Artificial Sequence
  spacer sequence ATCN PAM
uaggaagauuuuugucuggu

SEQ ID NO: 1033 - RNA, 20 nt, Artificial Sequence
  spacer sequence ATCN PAM
ucaaaucuuaggaagauuuu

SEQ ID NO: 1034 - RNA, 20 nt, Artificial Sequence
  spacer sequence ATCN PAM
ugaauccucaaaucuuagga

SEQ ID NO: 1035 - RNA, 20 nt, Artificial Sequence
  spacer sequence ATCN PAM
aacuccgcauggggcuuucu

SEQ ID NO: 1036 - RNA, 20 nt, Artificial Sequence
  spacer sequence ATCN PAM
acaugcaccaugccaugccc

SEQ ID NO: 1037 - RNA, 20 nt, Artificial Sequence
  spacer sequence ATCN PAM
cagaggacaaaacugaggcu

SEQ ID NO: 1038 - RNA, 20 nt, Artificial Sequence
  spacer sequence ATCN PAM
uggcuaggggagcuuuggca

SEQ ID NO: 1039 - RNA, 20 nt, Artificial Sequence
  spacer sequence ATCN PAM
uggcccacaaccccuucuca

SEQ ID NO: 1040 - RNA, 20 nt, Artificial Sequence
  spacer sequence ATCN PAM
gcuggcagcagagcucccca

SEQ ID NO: 1041 - RNA, 20 nt, Artificial Sequence
  spacer sequence ATCN PAM
acauggggacaguuagcaua

SEQ ID NO: 1042 - RNA, 20 nt, Artificial Sequence
  spacer sequence ATCN PAM
aauaaauggcuaaaacuuaa

SEQ ID NO: 1043 - RNA, 20 nt, Artificial Sequence
  spacer sequence ATCN PAM
cacagauggcaugcucccua

SEQ ID NO: 1044 - RNA, 20 nt, Artificial Sequence
  spacer sequence ATCN PAM
gugagauggcacaggcaaac

SEQ ID NO: 1045 - RNA, 20 nt, Artificial Sequence
  spacer sequence ATCN PAM
uacagcuuacugcacggcua

SEQ ID NO: 1046 - RNA, 20 nt, Artificial Sequence
  spacer sequence ATCN PAM
gagggacaggguaagaccga

SEQ ID NO: 1047 - RNA, 20 nt, Artificial Sequence
  spacer sequence ATCN PAM
uaguugcauguuagcauaau

SEQ ID NO: 1048 - RNA, 20 nt, Artificial Sequence
  spacer sequence ATCN PAM
auuuuaucuuaguugcaugu

SEQ ID NO: 1049 - RNA, 20 nt, Artificial Sequence
  spacer sequence ATCN PAM
uuugcccccuuaagaguuau

SEQ ID NO: 1050 - RNA, 20 nt, Artificial Sequence
  spacer sequence ATCN PAM
cucgugggaaaggcucaugg

SEQ ID NO: 1051 - RNA, 20 nt, Artificial Sequence
  spacer sequence ATCN PAM
guuuccagggaggugcguuc

SEQ ID NO: 1052 - RNA, 20 nt, Artificial Sequence
  spacer sequence ATCN PAM
cauccccaaaacacaagccc

SEQ ID NO: 1053 - RNA, 20 nt, Artificial Sequence
  spacer sequence ATCN PAM
ccaaaacacaagcccuccca

SEQ ID NO: 1054 - RNA, 20 nt, Artificial Sequence
  spacer sequence ATCN PAM
uucaggggagccuguuucgu

SEQ ID NO: 1055 - RNA, 20 nt, Artificial Sequence
  spacer sequence ATCN PAM
gaacaggaaaacgaaacagg

SEQ ID NO: 1056 - RNA, 20 nt, Artificial Sequence
  spacer sequence ATCN PAM
uuacaguaagccguggggaa

SEQ ID NO: 1057 - RNA, 20 nt, Artificial Sequence
  spacer sequence ATCN PAM
uaccaagugcucaaugccca

SEQ ID NO: 1058 - RNA, 20 nt, Artificial Sequence
  spacer sequence ATCN PAM
aagaaaggugggagaaagga

SEQ ID NO: 1059 - RNA, 20 nt, Artificial Sequence
  spacer sequence ATCN PAM
ucucacacagaguugggggc

SEQ ID NO: 1060 - RNA, 20 nt, Artificial Sequence
  spacer sequence ATCN PAM
cacacagaguugggggcucc

SEQ ID NO: 1061 - RNA, 20 nt, Artificial Sequence
  spacer sequence ATCN PAM
ucuauagugcccagucuaug

SEQ ID NO: 1062 - RNA, 20 nt, Artificial Sequence
  spacer sequence ATCN PAM
cugugcugguggucauaugg

SEQ ID NO: 1063 - RNA, 20 nt, Artificial Sequence
  spacer sequence ATCN PAM
cucaccuguuugccaucaau

SEQ ID NO: 1064 - RNA, 20 nt, Artificial Sequence
  spacer sequence ATCN PAM
auccccuauccaggccccau

SEQ ID NO: 1065 - RNA, 20 nt, Artificial Sequence
  spacer sequence ATCN PAM
ccuauccaggccccauggcu

SEQ ID NO: 1066 - RNA, 20 nt, Artificial Sequence
  spacer sequence ATCN PAM
aggccccauggcuguuggga

SEQ ID NO: 1067 - RNA, 20 nt, Artificial Sequence
  spacer sequence ATCN PAM
cugaugugucuucuaucacu

SEQ ID NO: 1068 - RNA, 20 nt, Artificial Sequence
  spacer sequence ATCN PAM
gagauucccaacagccaugg

SEQ ID NO: 1069 - RNA, 20 nt, Artificial Sequence
  spacer sequence ATCN PAM
cuauuguuuugccuugucua

SEQ ID NO: 1070 - RNA, 20 nt, Artificial Sequence
  spacer sequence ATCN PAM
uucagaauguagucuuugug

SEQ ID NO: 1071 - RNA, 20 nt, Artificial Sequence
  spacer sequence ATCN PAM
caaggaauaugcuaugugaa

SEQ ID NO: 1072 - RNA, 20 nt, Artificial Sequence
  spacer sequence ATCN PAM
acauuguugcaugcaucuca

SEQ ID NO: 1073 - RNA, 20 nt, Artificial Sequence
  spacer sequence ATCN PAM
caacacaucauaugguugca

SEQ ID NO: 1074 - RNA, 20 nt, Artificial Sequence
  spacer sequence ATCN PAM
uaugguugcaugcauaaagu

SEQ ID NO: 1075 - RNA, 20 nt, Artificial Sequence
  spacer sequence ATCN PAM
auacacuggaauauuacuca

SEQ ID NO: 1076 - RNA, 20 nt, Artificial Sequence
  spacer sequence ATCN PAM
auccauacacuggaauauua

SEQ ID NO: 1077 - RNA, 20 nt, Artificial Sequence
  spacer sequence ATCN PAM
caauuuguuuacccauucau

SEQ ID NO: 1078 - RNA, 20 nt, Artificial Sequence
  spacer sequence ATCN PAM
acacaaagacuuguauuuaa

SEQ ID NO: 1079 - RNA, 20 nt, Artificial Sequence
  spacer sequence ATCN PAM
gcuagcuauauucccagggg

SEQ ID NO: 1080 - RNA, 20 nt, Artificial Sequence
  spacer sequence ATCN PAM
cuacauaugcacucgaauga

SEQ ID NO: 1081 - RNA, 20 nt, Artificial Sequence
  spacer sequence ATCN PAM
ccuugugguuuuaauuugca

SEQ ID NO: 1082 - RNA, 20 nt, Artificial Sequence
  spacer sequence ATCN PAM
uuagucauuagggaaaugca

SEQ ID NO: 1083 - RNA, 20 nt, Artificial Sequence
  spacer sequence ATCN PAM
uuccauguguuuauuugcca

SEQ ID NO: 1084 - RNA, 20 nt, Artificial Sequence
  spacer sequence ATCN PAM
uucgcucauuuucauugugu

SEQ ID NO: 1085 - RNA, 20 nt, Artificial Sequence
  spacer sequence ATCN PAM
augcaacacaaugaaaauga

SEQ ID NO: 1086 - RNA, 20 nt, Artificial Sequence
  spacer sequence ATCN PAM
ggaauaaauaaagcacucuc

SEQ ID NO: 1087 - RNA, 20 nt, Artificial Sequence
  spacer sequence ATCN PAM
gauguauuuuuugcaaaaac

SEQ ID NO: 1088 - RNA, 20 nt, Artificial Sequence
  spacer sequence ATCN PAM
gauaaagaacuuguauccgg

SEQ ID NO: 1089 - RNA, 20 nt, Artificial Sequence
  spacer sequence ATCN PAM
aaggagcuggaauaauuaga

SEQ ID NO: 1090 - RNA, 20 nt, Artificial Sequence
  spacer sequence ATCN PAM
uuucaucaaaggagcuggaa

SEQ ID NO: 1091 - RNA, 20 nt, Artificial Sequence
  spacer sequence ATCN PAM
uugucaaaauucaguuaauc

SEQ ID NO: 1092 - RNA, 20 nt, Artificial Sequence
  spacer sequence ATCN PAM
uauaugcaugggucuaucuc

SEQ ID NO: 1093 - RNA, 20 nt, Artificial Sequence
  spacer sequence ATCN PAM
cuggacuuuguucuauugau

SEQ ID NO: 1094 - RNA, 20 nt, Artificial Sequence
  spacer sequence ATCN PAM
auagaacaaaguccagagau

SEQ ID NO: 1095 - RNA, 20 nt, Artificial Sequence
  spacer sequence ATCN PAM
ugucugucuguacacuaaca

SEQ ID NO: 1096 - RNA, 20 nt, Artificial Sequence
  spacer sequence ATCN PAM
gacuucaaaacuuguggugu

SEQ ID NO: 1097 - RNA, 20 nt, Artificial Sequence
  spacer sequence ATCN PAM
guuugucaauuucaacaaaa

SEQ ID NO: 1098 - RNA, 20 nt, Artificial Sequence
  spacer sequence ATCN PAM
cagcaggcuuuuuuuguuga

SEQ ID NO: 1099 - RNA, 20 nt, Artificial Sequence
  spacer sequence ATCN PAM
aaaucccagcaggcuuuuuu

SEQ ID NO: 1100 - RNA, 20 nt, Artificial Sequence
  spacer sequence ATCN PAM
aaucaaaaucccagcaggcu

SEQ ID NO: 1101 - RNA, 20 nt, Artificial Sequence
  spacer sequence ATCN PAM
auagucaaugcaaauccaau

SEQ ID NO: 1102 - RNA, 20 nt, Artificial Sequence
  spacer sequence ATCN PAM
auuucucucccuguuauguu

SEQ ID NO: 1103 - RNA, 20 nt, Artificial Sequence
  spacer sequence ATCN PAM
ugcauuuccccaugguuccu

SEQ ID NO: 1104 - RNA, 20 nt, Artificial Sequence
  spacer sequence ATCN PAM
cuggcaaugcggcugugauu

SEQ ID NO: 1105 - RNA, 20 nt, Artificial Sequence
  spacer sequence ATCN PAM
cagccgcauugccagagaua

SEQ ID NO: 1106 - RNA, 20 nt, Artificial Sequence
  spacer sequence ATCN PAM
ucacgucugccugugacucu

SEQ ID NO: 1107 - RNA, 20 nt, Artificial Sequence
  spacer sequence ATCN PAM
uccucacgucugccugugac

SEQ ID NO: 1108 - RNA, 20 nt, Artificial Sequence
  spacer sequence ATCN PAM
gggaaaguugcaagaucccc

SEQ ID NO: 1109 - RNA, 20 nt, Artificial Sequence
  spacer sequence ATCN PAM
ugcaacuuucccugauugug

SEQ ID NO: 1110 - RNA, 20 nt, Artificial Sequence
  spacer sequence ATCN PAM
ccagaacuugagauuucuag

SEQ ID NO: 1111 - RNA, 20 nt, Artificial Sequence
  spacer sequence ATCN PAM
caaguucuggggaucuugca

SEQ ID NO: 1112 - RNA, 20 nt, Artificial Sequence
  spacer sequence ATCN PAM
cagacucuaggaacccuagc

SEQ ID NO: 1113 - RNA, 20 nt, Artificial Sequence
  spacer sequence ATCN PAM
ggugaacaaucgccaaagaa

SEQ ID NO: 1114 - RNA, 20 nt, Artificial Sequence
  spacer sequence ATCN PAM
ccaaagaauagaauggaagu

SEQ ID NO: 1115 - RNA, 20 nt, Artificial Sequence
  spacer sequence ATCN PAM
acuuccauucuauucuuugg

SEQ ID NO: 1116 - RNA, 20 nt, Artificial Sequence
  spacer sequence ATCN PAM
cugagaccuuucuagcucuu

SEQ ID NO: 1117 - RNA, 20 nt, Artificial Sequence
  spacer sequence ATCN PAM
ucuaguccacauuuuauaga

SEQ ID NO: 1118 - RNA, 20 nt, Artificial Sequence
  spacer sequence ATCN PAM
aguccacauuuuauagauga

SEQ ID NO: 1119 - RNA, 20 nt, Artificial Sequence
  spacer sequence ATCN PAM
auaaaauguggacuagauga

SEQ ID NO: 1120 - RNA, 20 nt, Artificial Sequence
  spacer sequence ATCN PAM
ggucuucuguccucaaggcu

SEQ ID NO: 1121 - RNA, 20 nt, Artificial Sequence
  spacer sequence ATCN PAM
caucuccccccacuuuuuuu

SEQ ID NO: 1122 - RNA, 20 nt, Artificial Sequence
  spacer sequence ATCN PAM
ccccccacuuuuuuuuuuuu

SEQ ID NO: 1123 - RNA, 20 nt, Artificial Sequence
  spacer sequence ATCN PAM
guuggcugugccagaaaguc

SEQ ID NO: 1124 - RNA, 20 nt, Artificial Sequence
  spacer sequence ATCN PAM
gggggacuugaagaccaaau

SEQ ID NO: 1125 - RNA, 20 nt, Artificial Sequence
  spacer sequence ATCN PAM
aucaacacaagacauuauua

SEQ ID NO: 1126 - RNA, 20 nt, Artificial Sequence
  spacer sequence ATCN PAM
acacaagacauuauuaagaa

SEQ ID NO: 1127 - RNA, 20 nt, Artificial Sequence
  spacer sequence ATCN PAM
aaauccccucuauaaccaga

SEQ ID NO: 1128 - RNA, 20 nt, Artificial Sequence
  spacer sequence ATCN PAM
ccucuauaaccagacucccu

SEQ ID NO: 1129 - RNA, 20 nt, Artificial Sequence
  spacer sequence ATCN PAM
caccaaaauaccugggaagg

SEQ ID NO: 1130 - RNA, 20 nt, Artificial Sequence
  spacer sequence ATCN PAM
caucucaccaaaauaccugg

SEQ ID NO: 1131 - RNA, 20 nt, Artificial Sequence
  spacer sequence ATCN PAM
gggacaugguuuuuaaacca

SEQ ID NO: 1132 - RNA, 20 nt, Artificial Sequence
  spacer sequence ATCN PAM
ucuucccuguaucuuccauu

SEQ ID NO: 1133 - RNA, 20 nt, Artificial Sequence
  spacer sequence ATCN PAM
cuccugcuuugagcaauuua

SEQ ID NO: 1134 - RNA, 20 nt, Artificial Sequence
  spacer sequence ATCN PAM
uaauuuacuaauuaaauugc

SEQ ID NO: 1135 - RNA, 20 nt, Artificial Sequence
  spacer sequence ATCN PAM
uuuuaaagccauuugugguu

SEQ ID NO: 1136 - RNA, 20 nt, Artificial Sequence
  spacer sequence ATCN PAM
augucgcuaauggguagcug

SEQ ID NO: 1137 - RNA, 20 nt, Artificial Sequence
  spacer sequence ATCN PAM
cccucuagccaccuccccca

SEQ ID NO: 1138 - RNA, 20 nt, Artificial Sequence
  spacer sequence ATCN PAM
ucccaccuccccccuccaag

SEQ ID NO: 1139 - RNA, 20 nt, Artificial Sequence
  spacer sequence ATCN PAM
uugcuguuacccugaauggc

SEQ ID NO: 1140 - RNA, 20 nt, Artificial Sequence
  spacer sequence ATCN PAM
auaguuuucacagaagaggg

SEQ ID NO: 1141 - RNA, 20 nt, Artificial Sequence
  spacer sequence ATCN PAM
cuacuacauuuuucucuguc

SEQ ID NO: 1142 - RNA, 20 nt, Artificial Sequence
  spacer sequence ATCN PAM
uagaauaucauaaacuguug

SEQ ID NO: 1143 - RNA, 20 nt, Artificial Sequence
  spacer sequence ATCN PAM
uaaacuguuguagauaacug

SEQ ID NO: 1144 - RNA, 20 nt, Artificial Sequence
  spacer sequence ATCN PAM
acaacaguuuaugauauucu

SEQ ID NO: 1145 - RNA, 20 nt, Artificial Sequence
  spacer sequence ATCN PAM
ugugaaauucccaguuaucu

SEQ ID NO: 1146 - RNA, 20 nt, Artificial Sequence
  spacer sequence ATCN PAM
aacaacccacaaggaacuga

SEQ ID NO: 1147 - RNA, 20 nt, Artificial Sequence
  spacer sequence ATCN PAM
cugagaaguauuuucuaugg

SEQ ID NO: 1148 - RNA, 20 nt, Artificial Sequence
  spacer sequence ATCN PAM
uauggagaaaacaucccuga

SEQ ID NO: 1149 - RNA, 20 nt, Artificial Sequence
  spacer sequence ATCN PAM
gauuuuaaaucaucaaguuc

SEQ ID NO: 1150 - RNA, 20 nt, Artificial Sequence
  spacer sequence ATCN PAM
gauuaucuuauggagaaaac

SEQ ID NO: 1151 - RNA, 20 nt, Artificial Sequence
  spacer sequence ATCN PAM
cccacccauugucuucugug

SEQ ID NO: 1152 - RNA, 20 nt, Artificial Sequence
  spacer sequence ATCN PAM
uuuugaggaauagaauggga

SEQ ID NO: 1153 - RNA, 20 nt, Artificial Sequence
  spacer sequence ATCN PAM
gauaugcauuuaucucagug

SEQ ID NO: 1154 - RNA, 20 nt, Artificial Sequence
  spacer sequence ATCN PAM
gacacucaaaagaaugcaac

SEQ ID NO: 1155 - RNA, 20 nt, Artificial Sequence
  spacer sequence ATCN PAM
cauuacuggguauauaccca

SEQ ID NO: 1156 - RNA, 20 nt, Artificial Sequence
  spacer sequence ATCN PAM
uuuggguauauacccaguaa

SEQ ID NO: 1157 - RNA, 20 nt, Artificial Sequence
  spacer sequence ATCN PAM
uuguuggacauuuggguugg

SEQ ID NO: 1158 - RNA, 20 nt, Artificial Sequence
  spacer sequence ATCN PAM
agucuaucauuguuggacau

SEQ ID NO: 1159 - RNA, 20 nt, Artificial Sequence
  spacer sequence ATCN PAM
uuuuuuacggcugcauagua

SEQ ID NO: 1160 - RNA, 20 nt, Artificial Sequence
  spacer sequence ATCN PAM
cuauuauacugguaggaguu

SEQ ID NO: 1161 - RNA, 20 nt, Artificial Sequence
  spacer sequence ATCN PAM
uaauaacaacuacuaccaau

SEQ ID NO: 1162 - RNA, 20 nt, Artificial Sequence
  spacer sequence ATCN PAM
gaaagaauauuugcaaaguu

SEQ ID NO: 1163 - RNA, 20 nt, Artificial Sequence
  spacer sequence ATCN PAM
ucaccacaacccuggggaaa

SEQ ID NO: 1164 - RNA, 20 nt, Artificial Sequence
  spacer sequence ATCN PAM
agagaguuuaaaccacuuag

SEQ ID NO: 1165 - RNA, 20 nt, Artificial Sequence
  spacer sequence ATCN PAM
acucaacaauggaauauuau

SEQ ID NO: 1166 - RNA, 20 nt, Artificial Sequence
  spacer sequence ATCN PAM
cagcauaauuuaugacagua

SEQ ID NO: 1167 - RNA, 20 nt, Artificial Sequence
  spacer sequence ATCN PAM
uuguacaugcaucugugauc

SEQ ID NO: 1168 - RNA, 20 nt, Artificial Sequence
  spacer sequence ATCN PAM
gugaucgcaucuccaauuau

SEQ ID NO: 1169 - RNA, 20 nt, Artificial Sequence
  spacer sequence ATCN PAM
cagaugcauguacaaggaug

SEQ ID NO: 1170 - RNA, 20 nt, Artificial Sequence
  spacer sequence ATCN PAM
caucuccaauuauuuucuua

SEQ ID NO: 1171 - RNA, 20 nt, Artificial Sequence
  spacer sequence ATCN PAM
ccaauuauuuucuuaggcua

SEQ ID NO: 1172 - RNA, 20 nt, Artificial Sequence
  spacer sequence ATCN PAM
ggagacuuaaaggcguuuuc

SEQ ID NO: 1173 - RNA, 20 nt, Artificial Sequence
  spacer sequence ATCN PAM
ccuugggaauaugaauuggu

SEQ ID NO: 1174 - RNA, 20 nt, Artificial Sequence
  spacer sequence ATCN PAM
cacacuuuaaaacacccuuu

SEQ ID NO: 1175 - RNA, 20 nt, Artificial Sequence
  spacer sequence ATCN PAM
cagaugucauuuuacucaug

SEQ ID NO: 1176 - RNA, 20 nt, Artificial Sequence
  spacer sequence ATCN PAM
gggauguugggaauuuaacc

SEQ ID NO: 1177 - RNA, 20 nt, Artificial Sequence
  spacer sequence ATCN PAM
ccuccuacaaccaugaguaa

SEQ ID NO: 1178 - RNA, 20 nt, Artificial Sequence
  spacer sequence ATCN PAM
ugcaaaugcuuccauuuccc

SEQ ID NO: 1179 - RNA, 20 nt, Artificial Sequence
  spacer sequence ATCN PAM
accugaaacuuaauaaucau

SEQ ID NO: 1180 - RNA, 20 nt, Artificial Sequence
  spacer sequence ATCN PAM
ugcuuuuauaaaacguguau

SEQ ID NO: 1181 - RNA, 20 nt, Artificial Sequence
  spacer sequence ATCN PAM
aauucuggaaaagcugucuc

SEQ ID NO: 1182 - RNA, 20 nt, Artificial Sequence
  spacer sequence ATCN PAM
acuuggagaaggucauccaa

SEQ ID NO: 1183 - RNA, 20 nt, Artificial Sequence
  spacer sequence ATCN PAM
uuauccacuuggagaagguc

SEQ ID NO: 1184 - RNA, 20 nt, Artificial Sequence
  spacer sequence ATCN PAM
ggcagugaaaaauauccuua

SEQ ID NO: 1185 - RNA, 20 nt, Artificial Sequence
  spacer sequence ATCN PAM
uaagcuagggcauugaaauu

SEQ ID NO: 1186 - RNA, 20 nt, Artificial Sequence
  spacer sequence ATCN PAM
ucuagaugguaccuaaggcc

SEQ ID NO: 1187 - RNA, 20 nt, Artificial Sequence
  spacer sequence ATCN PAM
agaggauuacaguuguagug

SEQ ID NO: 1188 - RNA, 20 nt, Artificial Sequence
  spacer sequence ATCN PAM
uccuuuggccuuagguacca

SEQ ID NO: 1189 - RNA, 20 nt, Artificial Sequence
  spacer sequence ATCN PAM
aaguaacuacagagaauuaa

SEQ ID NO: 1190 - RNA, 20 nt, Artificial Sequence
  spacer sequence ATCN PAM
agccuauggugugaaaaucc

SEQ ID NO: 1191 - RNA, 20 nt, Artificial Sequence
  spacer sequence ATCN PAM
aaguccacuucccuuacagu

SEQ ID NO: 1192 - RNA, 20 nt, Artificial Sequence
  spacer sequence ATCN PAM
uuuugaccucuaaaaaccau

SEQ ID NO: 1193 - RNA, 20 nt, Artificial Sequence
  spacer sequence ATCN PAM
gucagagaggcuaacugcug

SEQ ID NO: 1194 - RNA, 20 nt, Artificial Sequence
  spacer sequence ATCN PAM
caaaggccuaacacaauaaa

SEQ ID NO: 1195 - RNA, 20 nt, Artificial Sequence
  spacer sequence ATCN PAM
ggugcaagaccagcuagacc

SEQ ID NO: 1196 - RNA, 20 nt, Artificial Sequence
  spacer sequence ATCN PAM
cagaagcuaguuuggaccug

SEQ ID NO: 1197 - RNA, 20 nt, Artificial Sequence
  spacer sequence ATCN PAM
uuuaaauuucaguauuuacu

SEQ ID NO: 1198 - RNA, 20 nt, Artificial Sequence
  spacer sequence ATCN PAM
cugcagugcccaagcaacca

SEQ ID NO: 1199 - RNA, 20 nt, Artificial Sequence
  spacer sequence ATCN PAM
cuugaggcccauuaauuugg

SEQ ID NO: 1200 - RNA, 20 nt, Artificial Sequence
  spacer sequence ATCN PAM
auccaaaacccuaugagaaa

SEQ ID NO: 1201 - RNA, 20 nt, Artificial Sequence
  spacer sequence ATCN PAM
aaaacccuaugagaaacguu

SEQ ID NO: 1202 - RNA, 20 nt, Artificial Sequence
  spacer sequence ATCN PAM
ucugcuuugccacugguggu

SEQ ID NO: 1203 - RNA, 20 nt, Artificial Sequence
  spacer sequence ATCN PAM
caacaacagccacccccggg

SEQ ID NO: 1204 - RNA, 20 nt, Artificial Sequence
  spacer sequence ATCN PAM
ccccggggguggcuguuguu

SEQ ID NO: 1205 - RNA, 20 nt, Artificial Sequence
  spacer sequence ATCN PAM
cauuuaaucuccccgggggu

SEQ ID NO: 1206 - RNA, 20 nt, Artificial Sequence
  spacer sequence ATCN PAM
cuuuaaauaaaguuuauugg

SEQ ID NO: 1207 - RNA, 20 nt, Artificial Sequence
  spacer sequence ATCN PAM
acuugaacaagguauuuaac

SEQ ID NO: 1208 - RNA, 20 nt, Artificial Sequence
  spacer sequence ATCN PAM
aaaccuuuucuguucccuua

SEQ ID NO: 1209 - RNA, 20 nt, Artificial Sequence
  spacer sequence ATCN PAM
cgcacagaaaggagcgcuuu

SEQ ID NO: 1210 - RNA, 20 nt, Artificial Sequence
  spacer sequence ATCN PAM
cuacuuuuaggacuccucuc

SEQ ID NO: 1211 - RNA, 20 nt, Artificial Sequence
  spacer sequence ATCN PAM
auuauuucauuauuguauca

SEQ ID NO: 1212 - RNA, 20 nt, Artificial Sequence
  spacer sequence ATCN PAM
ccugugucaucuguguagau

SEQ ID NO: 1213 - RNA, 20 nt, Artificial Sequence
  spacer sequence ATCN PAM
guguagauguagguaauuug

SEQ ID NO: 1214 - RNA, 20 nt, Artificial Sequence
  spacer sequence ATCN PAM
acacagaugacacaggugau

SEQ ID NO: 1215 - RNA, 20 nt, Artificial Sequence
  spacer sequence ATCN PAM
gccuuaauagugacuagcuc

SEQ ID NO: 1216 - RNA, 20 nt, Artificial Sequence
  spacer sequence ATCN PAM
gcuccaauuuaccucugcau

SEQ ID NO: 1217 - RNA, 20 nt, Artificial Sequence
  spacer sequence ATCN PAM
cacugcccccagacacaagu

SEQ ID NO: 1218 - RNA, 20 nt, Artificial Sequence
  spacer sequence ATCN PAM
uuucugugcucugagaccca

SEQ ID NO: 1219 - RNA, 20 nt, Artificial Sequence
  spacer sequence ATCN PAM
caagcugggucucagagcac

SEQ ID NO: 1220 - RNA, 20 nt, Artificial Sequence
  spacer sequence ATCN PAM
ucucaagacauggugccaag

SEQ ID NO: 1221 - RNA, 20 nt, Artificial Sequence
  spacer sequence ATCN PAM
ccaaacacagcacaauauaa

SEQ ID NO: 1222 - RNA, 20 nt, Artificial Sequence
  spacer sequence ATCN PAM
gacaaucaccaaacacagca

SEQ ID NO: 1223 - RNA, 20 nt, Artificial Sequence
  spacer sequence ATCN PAM
aacaugcugccuccacaugg

SEQ ID NO: 1224 - RNA, 20 nt, Artificial Sequence
  spacer sequence ATCN PAM
augcucuuauuaauuaauua

SEQ ID NO: 1225 - RNA, 20 nt, Artificial Sequence
  spacer sequence ATCN PAM
agcuaguacaugguaaaguc

SEQ ID NO: 1226 - RNA, 20 nt, Artificial Sequence
  spacer sequence ATCN PAM
agccacuuaacuaguuuaag

SEQ ID NO: 1227 - RNA, 20 nt, Artificial Sequence
  spacer sequence ATCN PAM
ggaaaauggcaauaaugcua

SEQ ID NO: 1228 - RNA, 20 nt, Artificial Sequence
  spacer sequence ATCN PAM
auuaugaaaaaguuuucagg

SEQ ID NO: 1229 - RNA, 20 nt, Artificial Sequence
  spacer sequence ATCN PAM
acaugcugaccuaccugugu

SEQ ID NO: 1230 - RNA, 20 nt, Artificial Sequence
  spacer sequence ATCN PAM
acacacaucuacaugcugac

SEQ ID NO: 1231 - RNA, 20 nt, Artificial Sequence
  spacer sequence ATCN PAM
gaaaauaaaaauuccccaaa

SEQ ID NO: 1232 - RNA, 20 nt, Artificial Sequence
  spacer sequence ATCN PAM
cagcacuuugggaggcagag

SEQ ID NO: 1233 - RNA, 20 nt, Artificial Sequence
  spacer sequence ATCN PAM
gcccgccucugccucccaaa

SEQ ID NO: 1234 - RNA, 20 nt, Artificial Sequence
  spacer sequence ATCN PAM
ucugaggucagguguucaag

SEQ ID NO: 1235 - RNA, 20 nt, Artificial Sequence
  spacer sequence ATCN PAM
gaggucagguguucaagacc

SEQ ID NO: 1236 - RNA, 20 nt, Artificial Sequence
  spacer sequence ATCN PAM
ugucucuacuaaaaaauaca

SEQ ID NO: 1237 - RNA, 20 nt, Artificial Sequence
  spacer sequence ATCN PAM
uagcuacucgggaggcugag

SEQ ID NO: 1238 - RNA, 20 nt, Artificial Sequence
  spacer sequence ATCN PAM
cuugaaccugggaggcagag

SEQ ID NO: 1239 - RNA, 20 nt, Artificial Sequence
  spacer sequence ATCN PAM
cggcucacugcaaccucugc

SEQ ID NO: 1240 - RNA, 20 nt, Artificial Sequence
  spacer sequence ATCN PAM
caccacugcacuccaauuua

SEQ ID NO: 1241 - RNA, 20 nt, Artificial Sequence
  spacer sequence ATCN PAM
uggcuauaauucaguuuaca

SEQ ID NO: 1242 - RNA, 20 nt, Artificial Sequence
  spacer sequence ATCN PAM
uaggcaguuaaauucccaau

SEQ ID NO: 1243 - RNA, 20 nt, Artificial Sequence
  spacer sequence ATCN PAM
cauccuaggcaguuaaauuc

SEQ ID NO: 1244 - RNA, 20 nt, Artificial Sequence
  spacer sequence ATCN PAM
caaaagaugcccaaagcugc

SEQ ID NO: 1245 - RNA, 20 nt, Artificial Sequence
  spacer sequence ATCN PAM
uuugggauucuguuuggaag

SEQ ID NO: 1246 - RNA, 20 nt, Artificial Sequence
  spacer sequence ATCN PAM
uaaauuuaacauguauuggg

SEQ ID NO: 1247 - RNA, 20 nt, Artificial Sequence
  spacer sequence ATCN PAM
uguuuagaaaucauaaauuu

SEQ ID NO: 1248 - RNA, 20 nt, Artificial Sequence
  spacer sequence ATCN PAM
ggucuuuuaucuuguuuaga

SEQ ID NO: 1249 - RNA, 20 nt, Artificial Sequence
  spacer sequence ATCN PAM
aaucaggucuuuuaucuugu

SEQ ID NO: 1250 - RNA, 20 nt, Artificial Sequence
  spacer sequence ATCN PAM
uuaagaaaaaaaaaaaaaag

SEQ ID NO: 1251 - RNA, 20 nt, Artificial Sequence
  spacer sequence ATCN PAM
cuuagacaaaaccugcuugu

SEQ ID NO: 1252 - RNA, 20 nt, Artificial Sequence
  spacer sequence ATCN PAM
guggugagagagaaggaggu

SEQ ID NO: 1253 - RNA, 20 nt, Artificial Sequence
  spacer sequence ATCN PAM
ccgaggagucaccugccaug

SEQ ID NO: 1254 - RNA, 20 nt, Artificial Sequence
  spacer sequence ATCN PAM
cugaaucaccgaggagucac

SEQ ID NO: 1255 - RNA, 20 nt, Artificial Sequence
  spacer sequence ATCN PAM
aagagugaccuuagaauugg

SEQ ID NO: 1256 - RNA, 20 nt, Artificial Sequence
  spacer sequence ATCN PAM
guagcaggagccaaccaauu

SEQ ID NO: 1257 - RNA, 20 nt, Artificial Sequence
  spacer sequence ATCN PAM
uugcuccuucaguucacguu

SEQ ID NO: 1258 - RNA, 20 nt, Artificial Sequence
  spacer sequence ATCN PAM
agugccaugcccagcagcca

SEQ ID NO: 1259 - RNA, 20 nt, Artificial Sequence
  spacer sequence ATCN PAM
aggugcuguguuggguccag

SEQ ID NO: 1260 - RNA, 20 nt, Artificial Sequence
  spacer sequence ATCN PAM
cagcucacuccccgaccuuc

SEQ ID NO: 1261 - RNA, 20 nt, Artificial Sequence
  spacer sequence ATCN PAM
ucucaaagucagaguccuuu

SEQ ID NO: 1262 - RNA, 20 nt, Artificial Sequence
  spacer sequence ATCN PAM
aggugagaugugcuaaaucu

SEQ ID NO: 1263 - RNA, 20 nt, Artificial Sequence
  spacer sequence ATCN PAM
caccuugaugguuccugaag

SEQ ID NO: 1264 - RNA, 20 nt, Artificial Sequence
  spacer sequence ATCN PAM
aucugaggagaggagacuaa

SEQ ID NO: 1265 - RNA, 20 nt, Artificial Sequence
  spacer sequence ATCN PAM
gaggagaggagacuaaagac

SEQ ID NO: 1266 - RNA, 20 nt, Artificial Sequence
  spacer sequence ATCN PAM
gggaggggucuuuagucucc

SEQ ID NO: 1267 - RNA, 20 nt, Artificial Sequence
  spacer sequence ATCN PAM
gagaauaauaaaacaacggc

SEQ ID NO: 1268 - RNA, 20 nt, Artificial Sequence
  spacer sequence ATCN PAM
ugaccagaacagcaaccuca

SEQ ID NO: 1269 - RNA, 20 nt, Artificial Sequence
  spacer sequence ATCN PAM
gaauucggaggggaaggcag

SEQ ID NO: 1270 - RNA, 20 nt, Artificial Sequence
  spacer sequence ATCN PAM
gugccaucagcuauugcaag

SEQ ID NO: 1271 - RNA, 20 nt, Artificial Sequence
  spacer sequence ATCN PAM
gcuauugcaagcugaaugca

SEQ ID NO: 1272 - RNA, 20 nt, Artificial Sequence
  spacer sequence ATCN PAM
uguagaacuaugccucacua

SEQ ID NO: 1273 - RNA, 20 nt, Artificial Sequence
  spacer sequence ATCN PAM
ccccuccccccuccauggaa

SEQ ID NO: 1274 - RNA, 20 nt, Artificial Sequence
  spacer sequence ATCN PAM
aacacacuccugccuagccc

SEQ ID NO: 1275 - RNA, 20 nt, Artificial Sequence
  spacer sequence ATCN PAM
uguccuuucuggucaugccc

SEQ ID NO: 1276 - RNA, 20 nt, Artificial Sequence
  spacer sequence ATCN PAM
uaauccacgccucuucuaac

SEQ ID NO: 1277 - RNA, 20 nt, Artificial Sequence
  spacer sequence ATCN PAM
acgccucuucuaaccgguuc

SEQ ID NO: 1278 - RNA, 20 nt, Artificial Sequence
  spacer sequence ATCN PAM
ccuugcauuacuaguaauaa

SEQ ID NO: 1279 - RNA, 20 nt, Artificial Sequence
  spacer sequence ATCN PAM
ggguggagggcaaggaagug

SEQ ID NO: 1280 - RNA, 20 nt, Artificial Sequence
  spacer sequence ATCN PAM
cagcuugugcccaucgauuu

SEQ ID NO: 1281 - RNA, 20 nt, Artificial Sequence
  spacer sequence ATCN PAM
auuuuccuuaauaagauuaa

SEQ ID NO: 1282 - RNA, 20 nt, Artificial Sequence
  spacer sequence ATCN PAM
augggcacaagcugggauua

SEQ ID NO: 1283 - RNA, 20 nt, Artificial Sequence
  spacer sequence ATCN PAM
uauuaaggaaaaucgauggg

SEQ ID NO: 1284 - RNA, 20 nt, Artificial Sequence
  spacer sequence ATCN PAM
cucaggacucaggaaacaaa

SEQ ID NO: 1285 - RNA, 20 nt, Artificial Sequence
  spacer sequence ATCN PAM
gccucugucaccagcaaaua

SEQ ID NO: 1286 - RNA, 20 nt, Artificial Sequence
  spacer sequence ATCN PAM
gugcugaauacuuggcuccu

SEQ ID NO: 1287 - RNA, 20 nt, Artificial Sequence
  spacer sequence ATCN PAM
ggcuuuagaaccagaagcuc

SEQ ID NO: 1288 - RNA, 20 nt, Artificial Sequence
  spacer sequence ATCN PAM
ucaugccucagccucccaaa

SEQ ID NO: 1289 - RNA, 20 nt, Artificial Sequence
  spacer sequence ATCN PAM
cuugagcccaagaguucgag

SEQ ID NO: 1290 - RNA, 20 nt, Artificial Sequence
  spacer sequence ATCN PAM
cuacaaaaaauuagccgggu

SEQ ID NO: 1291 - RNA, 20 nt, Artificial Sequence
  spacer sequence ATCN PAM
ccagcuacuggggaggcuga

SEQ ID NO: 1292 - RNA, 20 nt, Artificial Sequence
  spacer sequence ATCN PAM
ucccaccucagccuccccag

SEQ ID NO: 1293 - RNA, 20 nt, Artificial Sequence
  spacer sequence ATCN PAM
uccugggcucaagcaauccu

SEQ ID NO: 1294 - RNA, 20 nt, Artificial Sequence
  spacer sequence ATCN PAM
uggcucacugcagccucauc

SEQ ID NO: 1295 - RNA, 20 nt, Artificial Sequence
  spacer sequence ATCN PAM
uacgacugcauuccagccug

SEQ ID NO: 1296 - RNA, 20 nt, Artificial Sequence
  spacer sequence ATCN PAM
caguguucacaccuugcauu

SEQ ID NO: 1297 - RNA, 20 nt, Artificial Sequence
  spacer sequence ATCN PAM
aaggacuuuaaccuucggga

SEQ ID NO: 1298 - RNA, 20 nt, Artificial Sequence
  spacer sequence ATCN PAM
accggcaggggcuggguugu

SEQ ID NO: 1299 - RNA, 20 nt, Artificial Sequence
  spacer sequence ATCN PAM
uguugcuuaaagggaaaaaa

SEQ ID NO: 1300 - RNA, 20 nt, Artificial Sequence
  spacer sequence ATCN PAM
aagcuggagcauaguggcac

SEQ ID NO: 1301 - RNA, 20 nt, Artificial Sequence
  spacer sequence ATCN PAM
aucauagcucacugcagccu

SEQ ID NO: 1302 - RNA, 20 nt, Artificial Sequence
  spacer sequence ATCN PAM
uagcucacugcagccucaaa

SEQ ID NO: 1303 - RNA, 20 nt, Artificial Sequence
  spacer sequence ATCN PAM
uagcuacuugcuugagcuga

SEQ ID NO: 1304 - RNA, 20 nt, Artificial Sequence
  spacer sequence ATCN PAM
caugcuaccaugccuggcuc

SEQ ID NO: 1305 - RNA, 20 nt, Artificial Sequence
  spacer sequence ATCN PAM
uucuaaaaguuucauguugu

SEQ ID NO: 1306 - RNA, 20 nt, Artificial Sequence
  spacer sequence ATCN PAM
acuuuuaucauucuaaaagu

SEQ ID NO: 1307 - RNA, 20 nt, Artificial Sequence
  spacer sequence ATCN PAM
uuuuaaaagccccuauuucu

SEQ ID NO: 1308 - RNA, 20 nt, Artificial Sequence
  spacer sequence ATCN PAM
aauuccgugguugcugcuuc

SEQ ID NO: 1309 - RNA, 20 nt, Artificial Sequence
  spacer sequence ATCN PAM
ccuccucaaaagaaaccuuc

SEQ ID NO: 1310 - RNA, 20 nt, Artificial Sequence
  spacer sequence ATCN PAM
agaaagcacucauaucaacc

SEQ ID NO: 1311 - RNA, 20 nt, Artificial Sequence
  spacer sequence ATCN PAM
acccccggccuuaaaauaga

SEQ ID NO: 1312 - RNA, 20 nt, Artificial Sequence
  spacer sequence ATCN PAM
cacucuggggauaaaacaca

SEQ ID NO: 1313 - RNA, 20 nt, Artificial Sequence
  spacer sequence ATCN PAM
ccagagugggauaaaugacu

SEQ ID NO: 1314 - RNA, 20 nt, Artificial Sequence
  spacer sequence ATCN PAM
cuagggugggagaagugccc

SEQ ID NO: 1315 - RNA, 20 nt, Artificial Sequence
  spacer sequence ATCN PAM
uaucccuagggugggagaag

SEQ ID NO: 1316 - RNA, 20 nt, Artificial Sequence
  spacer sequence ATCN PAM
ugccccggggcuccagggcu

SEQ ID NO: 1317 - RNA, 20 nt, Artificial Sequence
  spacer sequence ATCN PAM
cuucucuggcugauacuggg

SEQ ID NO: 1318 - RNA, 20 nt, Artificial Sequence
  spacer sequence ATCN PAM
gccagagaagagauggcuuu

SEQ ID NO: 1319 - RNA, 20 nt, Artificial Sequence
  spacer sequence ATCN PAM
ugaaaaggaacaaggugucu

SEQ ID NO: 1320 - RNA, 20 nt, Artificial Sequence
  spacer sequence ATCN PAM
cggcucacugcaaccuccgc

SEQ ID NO: 1321 - RNA, 20 nt, Artificial Sequence
  spacer sequence ATCN PAM
cuugaaccugggaggcggag

SEQ ID NO: 1322 - RNA, 20 nt, Artificial Sequence
  spacer sequence ATCN PAM
cagcuacuugggaggcugag

SEQ ID NO: 1323 - RNA, 20 nt, Artificial Sequence
  spacer sequence ATCN PAM
cuacugaaaauaccaaaauu

SEQ ID NO: 1324 - RNA, 20 nt, Artificial Sequence
  spacer sequence ATCN PAM
cagcacuuugggaggccaag

SEQ ID NO: 1325 - RNA, 20 nt, Artificial Sequence
  spacer sequence ATCN PAM
uuugugaguauacacuucag

SEQ ID NO: 1326 - RNA, 20 nt, Artificial Sequence
  spacer sequence ATCN PAM
caccgucuaccuccaacacu

SEQ ID NO: 1327 - RNA, 20 nt, Artificial Sequence
  spacer sequence ATCN PAM
uccccagcauaaauucccua

SEQ ID NO: 1328 - RNA, 20 nt, Artificial Sequence
  spacer sequence ATCN PAM
ccagcauaaauucccuaccc

SEQ ID NO: 1329 - RNA, 20 nt, Artificial Sequence
  spacer sequence ATCN PAM
ccucauuaaucccuuaguaa

SEQ ID NO: 1330 - RNA, 20 nt, Artificial Sequence
  spacer sequence ATCN PAM
cuuaguaaucucuauuccau

SEQ ID NO: 1331 - RNA, 20 nt, Artificial Sequence
  spacer sequence ATCN PAM
cuauuccauuuucugucucu

SEQ ID NO: 1332 - RNA, 20 nt, Artificial Sequence
  spacer sequence ATCN PAM
uauaauauugcuccuuuuau

SEQ ID NO: 1333 - RNA, 20 nt, Artificial Sequence
  spacer sequence ATCN PAM
ggcauaucucauuuagcaca

SEQ ID NO: 1334 - RNA, 20 nt, Artificial Sequence
  spacer sequence ATCN PAM
cauuuagcacaauguaugug

SEQ ID NO: 1335 - RNA, 20 nt, Artificial Sequence
  spacer sequence ATCN PAM
auguuguagcauaugucaaa

SEQ ID NO: 1336 - RNA, 20 nt, Artificial Sequence
  spacer sequence ATCN PAM
auucaucucuucuuuucuuu

SEQ ID NO: 1337 - RNA, 20 nt, Artificial Sequence
  spacer sequence ATCN PAM
cuucuuuucuuuuuuuuuuu

SEQ ID NO: 1338 - RNA, 20 nt, Artificial Sequence
  spacer sequence ATCN PAM
gucucaggaaaaaaaaaaaa

SEQ ID NO: 1339 - RNA, 20 nt, Artificial Sequence
  spacer sequence ATCN PAM
uaccauugcacuccagccug

SEQ ID NO: 1340 - RNA, 20 nt, Artificial Sequence
  spacer sequence ATCN PAM
cagcucacugcaaccuccgc

SEQ ID NO: 1341 - RNA, 20 nt, Artificial Sequence
  spacer sequence ATCN PAM
cuuaagcccgggaggcggag

SEQ ID NO: 1342 - RNA, 20 nt, Artificial Sequence
  spacer sequence ATCN PAM
cuugacaccaggaguucaag

SEQ ID NO: 1343 - RNA, 20 nt, Artificial Sequence
  spacer sequence ATCN PAM
gcccgccucggccuccugaa

SEQ ID NO: 1344 - RNA, 20 nt, Artificial Sequence
  spacer sequence ATCN PAM
caagcacuucaggaggccga

SEQ ID NO: 1345 - RNA, 20 nt, Artificial Sequence
  spacer sequence ATCN PAM
uuuuauggaugcuuggguug

SEQ ID NO: 1346 - RNA, 20 nt, Artificial Sequence
  spacer sequence ATCN PAM
auaaaaagaugaaugaggcc

SEQ ID NO: 1347 - RNA, 20 nt, Artificial Sequence
  spacer sequence ATCN PAM
gcuuaaaucccugauuucca

SEQ ID NO: 1348 - RNA, 20 nt, Artificial Sequence
  spacer sequence ATCN PAM
cugauuuccauucuuuuggc

SEQ ID NO: 1349 - RNA, 20 nt, Artificial Sequence
  spacer sequence ATCN PAM
gggauuuaagcagauuucua

SEQ ID NO: 1350 - RNA, 20 nt, Artificial Sequence
  spacer sequence ATCN PAM
ugaaauuccacucccaggug

SEQ ID NO: 1351 - RNA, 20 nt, Artificial Sequence
  spacer sequence ATCN PAM
uaugguaagugugcaacuuu

SEQ ID NO: 1352 - RNA, 20 nt, Artificial Sequence
  spacer sequence ATCN PAM
cuguggaaaacaguuuggca

SEQ ID NO: 1353 - RNA, 20 nt, Artificial Sequence
  spacer sequence ATCN PAM
ucucuacauucuaacuaaca

SEQ ID NO: 1354 - RNA, 20 nt, Artificial Sequence
  spacer sequence ATCN PAM
aaaaaagcaggcaaacacca

SEQ ID NO: 1355 - RNA, 20 nt, Artificial Sequence
  spacer sequence ATCN PAM
auuaagcugggggccuuaga

SEQ ID NO: 1356 - RNA, 20 nt, Artificial Sequence
  spacer sequence ATCN PAM
cuucaguaugagguagcagc

SEQ ID NO: 1357 - RNA, 20 nt, Artificial Sequence
  spacer sequence ATCN PAM
caggagagcucccagcugcu

SEQ ID NO: 1358 - RNA, 20 nt, Artificial Sequence
  spacer sequence ATCN PAM
gugaaauggaggcaauagca

SEQ ID NO: 1359 - RNA, 20 nt, Artificial Sequence
  spacer sequence ATCN PAM
ccccacagugcugcaaugag

SEQ ID NO: 1360 - RNA, 20 nt, Artificial Sequence
  spacer sequence ATCN PAM
aacgagagaaagcuugucac

SEQ ID NO: 1361 - RNA, 20 nt, Artificial Sequence
  spacer sequence ATCN PAM
gaaaagaauuaaagcccccc

SEQ ID NO: 1362 - RNA, 20 nt, Artificial Sequence
  spacer sequence ATCN PAM
gaagcaacauacauucuguc

SEQ ID NO: 1363 - RNA, 20 nt, Artificial Sequence
  spacer sequence ATCN PAM
cccguggcacagucaagccc

SEQ ID NO: 1364 - RNA, 20 nt, Artificial Sequence
  spacer sequence ATCN PAM
gggcuugacugugccacggg

SEQ ID NO: 1365 - RNA, 20 nt, Artificial Sequence
  spacer sequence ATCN PAM
cuccaagugcuuccuuugaa

SEQ ID NO: 1366 - RNA, 20 nt, Artificial Sequence
  spacer sequence ATCN PAM
aggcuuuaacuucaguuucc

SEQ ID NO: 1367 - RNA, 20 nt, Artificial Sequence
  spacer sequence ATCN PAM
aaacuauaggagaaauagga

SEQ ID NO: 1368 - RNA, 20 nt, Artificial Sequence
  spacer sequence ATCN PAM
acacauuugaaugugguaau

SEQ ID NO: 1369 - RNA, 20 nt, Artificial Sequence
  spacer sequence ATCN PAM
cuaauuaccacauucaaaug

SEQ ID NO: 1370 - RNA, 20 nt, Artificial Sequence
  spacer sequence ATCN PAM
cacucccccgacccaucccc

SEQ ID NO: 1371 - RNA, 20 nt, Artificial Sequence
  spacer sequence ATCN PAM
ccaaucuucugcccaucuga

SEQ ID NO: 1372 - RNA, 20 nt, Artificial Sequence
  spacer sequence ATCN PAM
ucugcccaucugagagcguu

SEQ ID NO: 1373 - RNA, 20 nt, Artificial Sequence
  spacer sequence ATCN PAM
gagagcguuuagaugaucug

SEQ ID NO: 1374 - RNA, 20 nt, Artificial Sequence
  spacer sequence ATCN PAM
aaacgcucucagaugggcag

SEQ ID NO: 1375 - RNA, 20 nt, Artificial Sequence
  spacer sequence ATCN PAM
ucuaaacgcucucagauggg

SEQ ID NO: 1376 - RNA, 20 nt, Artificial Sequence
  spacer sequence ATCN PAM
gaugauguuaauuugaacuu

SEQ ID NO: 1377 - RNA, 20 nt, Artificial Sequence
  spacer sequence ATCN PAM
gaucaucuaaacgcucucag

SEQ ID NO: 1378 - RNA, 20 nt, Artificial Sequence
  spacer sequence ATCN PAM
ucagaucaucuaaacgcucu

SEQ ID NO: 1379 - RNA, 20 nt, Artificial Sequence
  spacer sequence ATCN PAM
aggucucuggaguaacuuac

SEQ ID NO: 1380 - RNA, 20 nt, Artificial Sequence
  spacer sequence ATCN PAM
auccuaggagaggaaauuau

SEQ ID NO: 1381 - RNA, 20 nt, Artificial Sequence
  spacer sequence ATCN PAM
uaggagaggaaauuauccca

SEQ ID NO: 1382 - RNA, 20 nt, Artificial Sequence
  spacer sequence ATCN PAM
caccaaaguucuucuuggcc

SEQ ID NO: 1383 - RNA, 20 nt, Artificial Sequence
  spacer sequence ATCN PAM
augcagaguucacucaucac

SEQ ID NO: 1384 - RNA, 20 nt, Artificial Sequence
  spacer sequence ATCN PAM
cccaggaauuacgugaggag

SEQ ID NO: 1385 - RNA, 20 nt, Artificial Sequence
  spacer sequence ATCN PAM
ugucuuacucuucguggcuu

SEQ ID NO: 1386 - RNA, 20 nt, Artificial Sequence
  spacer sequence ATCN PAM
gauggaaaaauaagacauuu

SEQ ID NO: 1387 - RNA, 20 nt, Artificial Sequence
  spacer sequence ATCN PAM
gauccugucuuacucuucgu

SEQ ID NO: 1388 - RNA, 20 nt, Artificial Sequence
  spacer sequence ATCN PAM
ggguuuaaaaacaaaaaaag

SEQ ID NO: 1389 - RNA, 20 nt, Artificial Sequence
  spacer sequence ATCN PAM
cagcaaggguuauauuucag

SEQ ID NO: 1390 - RNA, 20 nt, Artificial Sequence
  spacer sequence ATCN PAM
gaaggcugggugccgagcgu

SEQ ID NO: 1391 - RNA, 20 nt, Artificial Sequence
  spacer sequence ATCN PAM
guuuuaucugagucuuuccc

SEQ ID NO: 1392 - RNA, 20 nt, Artificial Sequence
  spacer sequence ATCN PAM
gagucuuucccacacuuguu

SEQ ID NO: 1393 - RNA, 20 nt, Artificial Sequence
  spacer sequence ATCN PAM
ccaagucucaacaaggagug

SEQ ID NO: 1394 - RNA, 20 nt, Artificial Sequence
  spacer sequence ATCN PAM
aucaccaagucucaacaagg

SEQ ID NO: 1395 - RNA, 20 nt, Artificial Sequence
  spacer sequence ATCN PAM
uuuuauaacacaauuaggag

SEQ ID NO: 1396 - RNA, 20 nt, Artificial Sequence
  spacer sequence ATCN PAM
uauuaaggaaauccagaccu

SEQ ID NO: 1397 - RNA, 20 nt, Artificial Sequence
  spacer sequence ATCN PAM
agaccuuggcaguuuagcgg

SEQ ID NO: 1398 - RNA, 20 nt, Artificial Sequence
  spacer sequence ATCN PAM
uuaggugaccuggggacccc

SEQ ID NO: 1399 - RNA, 20 nt, Artificial Sequence
  spacer sequence ATCN PAM
gaguaaaugugucucucagc

SEQ ID NO: 1400 - RNA, 20 nt, Artificial Sequence
  spacer sequence ATCN PAM
cauguccucaagggcuggac

SEQ ID NO: 1401 - RNA, 20 nt, Artificial Sequence
  spacer sequence ATCN PAM
cuuuccuccgcagccaacau

SEQ ID NO: 1402 - RNA, 20 nt, Artificial Sequence
  spacer sequence ATCN PAM
aggugaccccugauguuauc

SEQ ID NO: 1403 - RNA, 20 nt, Artificial Sequence
  spacer sequence ATCN PAM
ggggucaccuugauguuggc

SEQ ID NO: 1404 - RNA, 20 nt, Artificial Sequence
  spacer sequence ATCN PAM
aacauaguguuagugguauu

SEQ ID NO: 1405 - RNA, 20 nt, Artificial Sequence
  spacer sequence ATCN PAM
gaggucaauagggcgcaagc

SEQ ID NO: 1406 - RNA, 20 nt, Artificial Sequence
  spacer sequence ATCN PAM
cuaugcuucuugcaauaauu

SEQ ID NO: 1407 - RNA, 20 nt, Artificial Sequence
  spacer sequence ATCN PAM
uaaagguuuaacccccuaaa

SEQ ID NO: 1408 - RNA, 20 nt, Artificial Sequence
  spacer sequence ATCN PAM
gcguuuuagggaggcacaug

SEQ ID NO: 1409 - RNA, 20 nt, Artificial Sequence
  spacer sequence ATCN PAM
ugacucauaggucugaggag

SEQ ID NO: 1410 - RNA, 20 nt, Artificial Sequence
  spacer sequence ATCN PAM
guaagccaggugaaaugcgc

SEQ ID NO: 1411 - RNA, 20 nt, Artificial Sequence
  spacer sequence ATCN PAM
uguguggaccguagagccac

SEQ ID NO: 1412 - RNA, 20 nt, Artificial Sequence
  spacer sequence ATCN PAM
cacaugagucucuggcgggg

SEQ ID NO: 1413 - RNA, 20 nt, Artificial Sequence
  spacer sequence ATCN PAM
guggagcccauggggaugac

SEQ ID NO: 1414 - RNA, 20 nt, Artificial Sequence
  spacer sequence ATCN PAM
ccaugggcuccacagaugag

SEQ ID NO: 1415 - RNA, 20 nt, Artificial Sequence
  spacer sequence ATCN PAM
ucucagugacacccugagag

SEQ ID NO: 1416 - RNA, 20 nt, Artificial Sequence
  spacer sequence ATCN PAM
cucaaucccggcuugcccug

SEQ ID NO: 1417 - RNA, 20 nt, Artificial Sequence
  spacer sequence ATCN PAM
cggcuugcccugugcugcuu

SEQ ID NO: 1418 - RNA, 20 nt, Artificial Sequence
  spacer sequence ATCN PAM
cuguuuuuuauagcuaaagu

SEQ ID NO: 1419 - RNA, 20 nt, Artificial Sequence
  spacer sequence ATCN PAM
gaaguuggccuaugccuuau

SEQ ID NO: 1420 - RNA, 20 nt, Artificial Sequence
  spacer sequence ATCN PAM
uauaauaaggauguuaucau

SEQ ID NO: 1421 - RNA, 20 nt, Artificial Sequence
  spacer sequence ATCN PAM
uuauuauaagaugcaaauug

SEQ ID NO: 1422 - RNA, 20 nt, Artificial Sequence
  spacer sequence ATCN PAM
uacugguuuauggcugagcu

SEQ ID NO: 1423 - RNA, 20 nt, Artificial Sequence
  spacer sequence ATCN PAM
cucuggggcuagauuccccc

SEQ ID NO: 1424 - RNA, 20 nt, Artificial Sequence
  spacer sequence ATCN PAM
agccccagagagauaaaaac

SEQ ID NO: 1425 - RNA, 20 nt, Artificial Sequence
  spacer sequence ATCN PAM
uccagugaaugcaaacauuc

SEQ ID NO: 1426 - RNA, 20 nt, Artificial Sequence
  spacer sequence ATCN PAM
cgccacauccuccagugaau

SEQ ID NO: 1427 - RNA, 20 nt, Artificial Sequence
  spacer sequence ATCN PAM
cugagggcuaauaucccgcc

SEQ ID NO: 1428 - RNA, 20 nt, Artificial Sequence
  spacer sequence ATCN PAM
agucugccacugcgaagaag

SEQ ID NO: 1429 - RNA, 20 nt, Artificial Sequence
  spacer sequence ATCN PAM
cugguguguucauucucuua

SEQ ID NO: 1430 - RNA, 20 nt, Artificial Sequence
  spacer sequence ATCN PAM
aaauguaagagaaugaacac

SEQ ID NO: 1431 - RNA, 20 nt, Artificial Sequence
  spacer sequence ATCN PAM
uagggaaauuaugcauuuuc

SEQ ID NO: 1432 - RNA, 20 nt, Artificial Sequence
  spacer sequence ATCN PAM
ucauagggaaauuaugcauu

SEQ ID NO: 1433 - RNA, 20 nt, Artificial Sequence
  spacer sequence ATCN PAM
uauugcaugcaacuggcaaa

SEQ ID NO: 1434 - RNA, 20 nt, Artificial Sequence
  spacer sequence ATCN PAM
uuugauugccagcuauagaa

SEQ ID NO: 1435 - RNA, 20 nt, Artificial Sequence
  spacer sequence ATCN PAM
aaagaucauauugcaugcaa

SEQ ID NO: 1436 - RNA, 20 nt, Artificial Sequence
  spacer sequence ATCN PAM
ugucauagcacuuugaaaac

SEQ ID NO: 1437 - RNA, 20 nt, Artificial Sequence
  spacer sequence ATCN PAM
aaaaaaaaaaaaaaaaacaa

SEQ ID NO: 1438 - RNA, 20 nt, Artificial Sequence
  spacer sequence ATCN PAM
uuagcaugggcacucuuggu

SEQ ID NO: 1439 - RNA, 20 nt, Artificial Sequence
  spacer sequence ATCN PAM
cccuucuuuggaaccaagcu

SEQ ID NO: 1440 - RNA, 20 nt, Artificial Sequence
  spacer sequence ATCN PAM
ucucccuucuuuggaaccaa

SEQ ID NO: 1441 - RNA, 20 nt, Artificial Sequence
  spacer sequence ATCN PAM
uuucuccaccacccagcugu

SEQ ID NO: 1442 - RNA, 20 nt, Artificial Sequence
  spacer sequence ATCN PAM
caaguccucucacuugcuuc

SEQ ID NO: 1443 - RNA, 20 nt, Artificial Sequence
  spacer sequence ATCN PAM
gaagcaagugagaggacuug

SEQ ID NO: 1444 - RNA, 20 nt, Artificial Sequence
  spacer sequence ATCN PAM
ucugaaucaacaccgaguca

SEQ ID NO: 1445 - RNA, 20 nt, Artificial Sequence
  spacer sequence ATCN PAM
gaaucaacaccgagucacag

SEQ ID NO: 1446 - RNA, 20 nt, Artificial Sequence
  spacer sequence ATCN PAM
acaccgagucacagcuagca

SEQ ID NO: 1447 - RNA, 20 nt, Artificial Sequence
  spacer sequence ATCN PAM
ccaggagcagcccccugagg

SEQ ID NO: 1448 - RNA, 20 nt, Artificial Sequence
  spacer sequence ATCN PAM
agagggagguaaccaauccc

SEQ ID NO: 1449 - RNA, 20 nt, Artificial Sequence
  spacer sequence ATCN PAM
uuggcuguguugguuaaaaa

SEQ ID NO: 1450 - RNA, 20 nt, Artificial Sequence
  spacer sequence ATCN PAM
uggaaaaguuucaccugugg

SEQ ID NO: 1451 - RNA, 20 nt, Artificial Sequence
  spacer sequence ATCN PAM
ucguggaaaaguuucaccug

SEQ ID NO: 1452 - RNA, 20 nt, Artificial Sequence
  spacer sequence ATCN PAM
uuuaaaaaauaaucacagua

SEQ ID NO: 1453 - RNA, 20 nt, Artificial Sequence
  spacer sequence ATCN PAM
caguaauagcagaaggagca

SEQ ID NO: 1454 - RNA, 20 nt, Artificial Sequence
  spacer sequence ATCN PAM
gucuucccagcacacucacu

SEQ ID NO: 1455 - RNA, 20 nt, Artificial Sequence
  spacer sequence ATCN PAM
augcccccuaauggcaaugc

SEQ ID NO: 1456 - RNA, 20 nt, Artificial Sequence
  spacer sequence ATCN PAM
uguuucuauucucuucaagg

SEQ ID NO: 1457 - RNA, 20 nt, Artificial Sequence
  spacer sequence ATCN PAM
aguauauuuucgaagagcag

SEQ ID NO: 1458 - RNA, 20 nt, Artificial Sequence
  spacer sequence ATCN PAM
cauugaauucugacccaagg

SEQ ID NO: 1459 - RNA, 20 nt, Artificial Sequence
  spacer sequence ATCN PAM
ccucuccuacuggaaaucac

SEQ ID NO: 1460 - RNA, 20 nt, Artificial Sequence
  spacer sequence ATCN PAM
guucuauagacacaaggacc

SEQ ID NO: 1461 - RNA, 20 nt, Artificial Sequence
  spacer sequence ATCN PAM
ucuccuggccuagggggucc

SEQ ID NO: 1462 - RNA, 20 nt, Artificial Sequence
  spacer sequence ATCN PAM
ucagaagcuguauucacucu

SEQ ID NO: 1463 - RNA, 20 nt, Artificial Sequence
  spacer sequence ATCN PAM
ucuaguuucuguagucuuau

SEQ ID NO: 1464 - RNA, 20 nt, Artificial Sequence
  spacer sequence ATCN PAM
aagaucaaggccaguaaugu

SEQ ID NO: 1465 - RNA, 20 nt, Artificial Sequence
  spacer sequence ATCN PAM
uugauagucauuauccucua

SEQ ID NO: 1466 - RNA, 20 nt, Artificial Sequence
  spacer sequence ATCN PAM
aggccaguaaugucauugag

SEQ ID NO: 1467 - RNA, 20 nt, Artificial Sequence
  spacer sequence ATCN PAM
caaugacauuacuggccuug

SEQ ID NO: 1468 - RNA, 20 nt, Artificial Sequence
  spacer sequence ATCN PAM
ucauagucguuacagaugag

SEQ ID NO: 1469 - RNA, 20 nt, Artificial Sequence
  spacer sequence ATCN PAM
guaacgacuaugacgaucuc

SEQ ID NO: 1470 - RNA, 20 nt, Artificial Sequence
  spacer sequence ATCN PAM
agacauaaaaaaaugccuca

SEQ ID NO: 1471 - RNA, 20 nt, Artificial Sequence
  spacer sequence ATCN PAM
aucuagacauaaaaaaaugc

SEQ ID NO: 1472 - RNA, 20 nt, Artificial Sequence
  spacer sequence ATCN PAM
auuuauagcacaugccuauu

SEQ ID NO: 1473 - RNA, 20 nt, Artificial Sequence
  spacer sequence ATCN PAM
ugguauauguaugggaagua

SEQ ID NO: 1474 - RNA, 20 nt, Artificial Sequence
  spacer sequence ATCN PAM
augcaaacaggcccuuggaa

SEQ ID NO: 1475 - RNA, 20 nt, Artificial Sequence
  spacer sequence ATCN PAM
cuaaaagucauacauacuau

SEQ ID NO: 1476 - RNA, 20 nt, Artificial Sequence
  spacer sequence ATCN PAM
gugccucagcaaaacauaau

SEQ ID NO: 1477 - RNA, 20 nt, Artificial Sequence
  spacer sequence ATCN PAM
cacacaggccuugcuuuccu

SEQ ID NO: 1478 - RNA, 20 nt, Artificial Sequence
  spacer sequence ATCN PAM
gucacaagagaacggccggg

SEQ ID NO: 1479 - RNA, 20 nt, Artificial Sequence
  spacer sequence ATCN PAM
uuagcauuuauuuacacgcu

SEQ ID NO: 1480 - RNA, 20 nt, Artificial Sequence
  spacer sequence ATCN PAM
uagaguuucucccagagcuc

SEQ ID NO: 1481 - RNA, 20 nt, Artificial Sequence
  spacer sequence ATCN PAM
agcaccaaaaaggaauucuu

SEQ ID NO: 1482 - RNA, 20 nt, Artificial Sequence
  spacer sequence ATCN PAM
uguuucuccuggaagcagga

SEQ ID NO: 1483 - RNA, 20 nt, Artificial Sequence
  spacer sequence ATCN PAM
cucucccccaugccuacuau

SEQ ID NO: 1484 - RNA, 20 nt, Artificial Sequence
  spacer sequence ATCN PAM
gguguccuucccuaucucuc

SEQ ID NO: 1485 - RNA, 20 nt, Artificial Sequence
  spacer sequence ATCN PAM
ucugguguccuucccuaucu

SEQ ID NO: 1486 - RNA, 20 nt, Artificial Sequence
  spacer sequence ATCN PAM
augccuuuauuacgaaauuc

SEQ ID NO: 1487 - RNA, 20 nt, Artificial Sequence
  spacer sequence ATCN PAM
aauguuguggccaaauggca

SEQ ID NO: 1488 - RNA, 20 nt, Artificial Sequence
  spacer sequence ATCN PAM
aaaaauucuuaaaucacagc

SEQ ID NO: 1489 - RNA, 20 nt, Artificial Sequence
  spacer sequence ATCN PAM
cagcugggugguggcucacg

SEQ ID NO: 1490 - RNA, 20 nt, Artificial Sequence
  spacer sequence ATCN PAM
cagcaccuggggaggccaag

SEQ ID NO: 1491 - RNA, 20 nt, Artificial Sequence
  spacer sequence ATCN PAM
uccugccuuggccuccccag

SEQ ID NO: 1492 - RNA, 20 nt, Artificial Sequence
  spacer sequence ATCN PAM
uuugaagccaggaguuugag

SEQ ID NO: 1493 - RNA, 20 nt, Artificial Sequence
  spacer sequence ATCN PAM
ccccucaaaaaagaaguauu

SEQ ID NO: 1494 - RNA, 20 nt, Artificial Sequence
  spacer sequence ATCN PAM
gagagguacaaauacuucuu

SEQ ID NO: 1495 - RNA, 20 nt, Artificial Sequence
  spacer sequence ATCN PAM
gcaaaaaucuuguagcguuc

SEQ ID NO: 1496 - RNA, 20 nt, Artificial Sequence
  spacer sequence ATCN PAM
uguagcguucuauucuuuuu

SEQ ID NO: 1497 - RNA, 20 nt, Artificial Sequence
  spacer sequence ATCN PAM
uuuugcuuugagacaugaua

SEQ ID NO: 1498 - RNA, 20 nt, Artificial Sequence
  spacer sequence ATCN PAM
ugucucaaagcaaaaugaua

SEQ ID NO: 1499 - RNA, 20 nt, Artificial Sequence
  spacer sequence ATCN PAM
cuaggaacuaacuggccugu

SEQ ID NO: 1500 - RNA, 20 nt, Artificial Sequence
  spacer sequence ATCN PAM
uuaggcuguuuguggugugg

SEQ ID NO: 1501 - RNA, 20 nt, Artificial Sequence
  spacer sequence ATCN PAM
uacaccacaccacaccacaa

SEQ ID NO: 1502 - RNA, 20 nt, Artificial Sequence
  spacer sequence ATCN PAM
acccauaaggaagaacuuuu

SEQ ID NO: 1503 - RNA, 20 nt, Artificial Sequence
  spacer sequence ATCN PAM
aagacuguagaagcuugaaa

SEQ ID NO: 1504 - RNA, 20 nt, Artificial Sequence
  spacer sequence ATCN PAM
aaauuccccauuugugcugg

SEQ ID NO: 1505 - RNA, 20 nt, Artificial Sequence
  spacer sequence ATCN PAM
uugacacauucaaauagaca

SEQ ID NO: 1506 - RNA, 20 nt, Artificial Sequence
  spacer sequence ATCN PAM
uucaaugaaacaaccagugc

SEQ ID NO: 1507 - RNA, 20 nt, Artificial Sequence
  spacer sequence ATCN PAM
uggaaggcacugguuguuuc

SEQ ID NO: 1508 - RNA, 20 nt, Artificial Sequence
  spacer sequence ATCN PAM
gccuucuacuggucucuugg

SEQ ID NO: 1509 - RNA, 20 nt, Artificial Sequence
  spacer sequence ATCN PAM
auuucaugcccugcuacacu

SEQ ID NO: 1510 - RNA, 20 nt, Artificial Sequence
  spacer sequence ATCN PAM
uguccauagaaaaguuuugg

SEQ ID NO: 1511 - RNA, 20 nt, Artificial Sequence
  spacer sequence ATCN PAM
uuaacugacuauaagauuua

SEQ ID NO: 1512 - RNA, 20 nt, Artificial Sequence
  spacer sequence ATCN PAM
uauagucaguuaaugauuau

SEQ ID NO: 1513 - RNA, 20 nt, Artificial Sequence
  spacer sequence ATCN PAM
caccuggccuuucuuaaauc

SEQ ID NO: 1514 - RNA, 20 nt, Artificial Sequence
  spacer sequence ATCN PAM
cagcacuuugggaggcugag

SEQ ID NO: 1515 - RNA, 20 nt, Artificial Sequence
  spacer sequence ATCN PAM
acccgccucagccucccaaa

SEQ ID NO: 1516 - RNA, 20 nt, Artificial Sequence
  spacer sequence ATCN PAM
ccugaggucaggaguucaag

SEQ ID NO: 1517 - RNA, 20 nt, Artificial Sequence
  spacer sequence ATCN PAM
uguuggccaggcuggucuug

SEQ ID NO: 1518 - RNA, 20 nt, Artificial Sequence
  spacer sequence ATCN PAM
uggcucacugcaaccuccgc

SEQ ID NO: 1519 - RNA, 20 nt, Artificial Sequence
  spacer sequence ATCN PAM
ugccauugcacucuagcuug

SEQ ID NO: 1520 - RNA, 20 nt, Artificial Sequence
  spacer sequence ATCN PAM
uuuuuuuuuuuuuuuuuuug

SEQ ID NO: 1521 - RNA, 20 nt, Artificial Sequence
  spacer sequence ATCN PAM
uauagucaauaacauuuucu

SEQ ID NO: 1522 - RNA, 20 nt, Artificial Sequence
  spacer sequence ATCN PAM
uuucucucugucaucuaaau

SEQ ID NO: 1523 - RNA, 20 nt, Artificial Sequence
  spacer sequence ATCN PAM
aaauucuagccugucuuuga

SEQ ID NO: 1524 - RNA, 20 nt, Artificial Sequence
  spacer sequence ATCN PAM
aagacaggcuagaauuuaga

SEQ ID NO: 1525 - RNA, 20 nt, Artificial Sequence
  spacer sequence ATCN PAM
cugugggccucagagaaauu

SEQ ID NO: 1526 - RNA, 20 nt, Artificial Sequence
  spacer sequence ATCN PAM
uccucugcauuccuccaguu

SEQ ID NO: 1527 - RNA, 20 nt, Artificial Sequence
  spacer sequence ATCN PAM
cucacuaauggauuaaucau

SEQ ID NO: 1528 - RNA, 20 nt, Artificial Sequence
  spacer sequence ATCN PAM
auuagugagagaugccaacu

SEQ ID NO: 1529 - RNA, 20 nt, Artificial Sequence
  spacer sequence ATCN PAM
uauuacccucuccuauuguu

SEQ ID NO: 1530 - RNA, 20 nt, Artificial Sequence
  spacer sequence ATCN PAM
uagcccccccauaggaccaa

SEQ ID NO: 1531 - RNA, 20 nt, Artificial Sequence
  spacer sequence ATCN PAM
cuuugaggacagggguuuga

SEQ ID NO: 1532 - RNA, 20 nt, Artificial Sequence
  spacer sequence ATCN PAM
aaccccuguccucaaaggga

SEQ ID NO: 1533 - RNA, 20 nt, Artificial Sequence
  spacer sequence ATCN PAM
uguaccuauuuauaguuccc

SEQ ID NO: 1534 - RNA, 20 nt, Artificial Sequence
  spacer sequence ATCN PAM
gcauaagcaaauauuuuccc

SEQ ID NO: 1535 - RNA, 20 nt, Artificial Sequence
  spacer sequence ATCN PAM
ucagcauaagcaaauauuuu

SEQ ID NO: 1536 - RNA, 20 nt, Artificial Sequence
  spacer sequence ATCN PAM
gagaaagauaauacugcaaa

SEQ ID NO: 1537 - RNA, 20 nt, Artificial Sequence
  spacer sequence ATCN PAM
uucucagaucaucagcauaa

SEQ ID NO: 1538 - RNA, 20 nt, Artificial Sequence
  spacer sequence ATCN PAM
uuacuucuccuguuugcagu

SEQ ID NO: 1539 - RNA, 20 nt, Artificial Sequence
  spacer sequence ATCN PAM
guuagaggucaguucagaag

SEQ ID NO: 1540 - RNA, 20 nt, Artificial Sequence
  spacer sequence ATCN PAM
ccuguuacaggucucuuauc

SEQ ID NO: 1541 - RNA, 20 nt, Artificial Sequence
  spacer sequence ATCN PAM
uuacaaagauuguguuccug

SEQ ID NO: 1542 - RNA, 20 nt, Artificial Sequence
  spacer sequence ATCN PAM
uuguaaagauaagagaccug

SEQ ID NO: 1543 - RNA, 20 nt, Artificial Sequence
  spacer sequence ATCN PAM
uugguguuguuauuuacaag

SEQ ID NO: 1544 - RNA, 20 nt, Artificial Sequence
  spacer sequence ATCN PAM
auguauacucaucccuacca

SEQ ID NO: 1545 - RNA, 20 nt, Artificial Sequence
  spacer sequence ATCN PAM
cuaccauuugaaaaacaagu

SEQ ID NO: 1546 - RNA, 20 nt, Artificial Sequence
  spacer sequence ATCN PAM
gugguacacacacuuaaaac

SEQ ID NO: 1547 - RNA, 20 nt, Artificial Sequence
  spacer sequence ATCN PAM
gcauuuuguaaagcccacua

SEQ ID NO: 1548 - RNA, 20 nt, Artificial Sequence
  spacer sequence ATCN PAM
uauuaaauaacugguugcag

SEQ ID NO: 1549 - RNA, 20 nt, Artificial Sequence
  spacer sequence ATCN PAM
gaaauugcuaccaguggaga

SEQ ID NO: 1550 - RNA, 20 nt, Artificial Sequence
  spacer sequence ATCN PAM
cuuccccagcacuuaacuca

SEQ ID NO: 1551 - RNA, 20 nt, Artificial Sequence
  spacer sequence ATCN PAM
acaaauauuuauuagguucc

SEQ ID NO: 1552 - RNA, 20 nt, Artificial Sequence
  spacer sequence ATCN PAM
gccguauggcucauucauuu

SEQ ID NO: 1553 - RNA, 20 nt, Artificial Sequence
  spacer sequence ATCN PAM
gaggaauucacucuccagua

SEQ ID NO: 1554 - RNA, 20 nt, Artificial Sequence
  spacer sequence ATCN PAM
gaaauggacagaaaugcaag

SEQ ID NO: 1555 - RNA, 20 nt, Artificial Sequence
  spacer sequence ATCN PAM
guuuaauuagcacugcuguu

SEQ ID NO: 1556 - RNA, 20 nt, Artificial Sequence
  spacer sequence ATCN PAM
uaaaaaauuaacagcagugc

SEQ ID NO: 1557 - RNA, 20 nt, Artificial Sequence
  spacer sequence ATCN PAM
ugaaauuuucuuaccacuug

SEQ ID NO: 1558 - RNA, 20 nt, Artificial Sequence
  spacer sequence ATCN PAM
accucauccugaaauuuucu

SEQ ID NO: 1559 - RNA, 20 nt, Artificial Sequence
  spacer sequence ATCN PAM
ugugguauagguacuauuau

SEQ ID NO: 1560 - RNA, 20 nt, Artificial Sequence
  spacer sequence ATCN PAM
ucgugugguauagguacuau

SEQ ID NO: 1561 - RNA, 20 nt, Artificial Sequence
  spacer sequence ATCN PAM
ggaagaagaaauaagaacau

SEQ ID NO: 1562 - RNA, 20 nt, Artificial Sequence
  spacer sequence ATCN PAM
cagcacuuugggaggccaag

SEQ ID NO: 1563 - RNA, 20 nt, Artificial Sequence
  spacer sequence ATCN PAM
acccaccuuggccucccaaa

SEQ ID NO: 1564 - RNA, 20 nt, Artificial Sequence
  spacer sequence ATCN PAM
ccugaggucaggaguucgag

SEQ ID NO: 1565 - RNA, 20 nt, Artificial Sequence
  spacer sequence ATCN PAM
acauagugaaagcccgucuc

SEQ ID NO: 1566 - RNA, 20 nt, Artificial Sequence
  spacer sequence ATCN PAM
cagcuacucuggaggcugag

SEQ ID NO: 1567 - RNA, 20 nt, Artificial Sequence
  spacer sequence ATCN PAM
gggaggcggagguugcagug

SEQ ID NO: 1568 - RNA, 20 nt, Artificial Sequence
  spacer sequence ATCN PAM
cagcucacugcaaccuccgc

SEQ ID NO: 1569 - RNA, 20 nt, Artificial Sequence
  spacer sequence ATCN PAM
ugccauuggacuccagccug

SEQ ID NO: 1570 - RNA, 20 nt, Artificial Sequence
  spacer sequence ATCN PAM
caaaaaaaaaaaaaagaaca

SEQ ID NO: 1571 - RNA, 20 nt, Artificial Sequence
  spacer sequence ATCN PAM
uuaucacugugccuagaaca

SEQ ID NO: 1572 - RNA, 20 nt, Artificial Sequence
  spacer sequence ATCN PAM
cugugccuagaacauaguaa

SEQ ID NO: 1573 - RNA, 20 nt, Artificial Sequence
  spacer sequence ATCN PAM
gcuaauguuuauugagaauu

SEQ ID NO: 1574 - RNA, 20 nt, Artificial Sequence
  spacer sequence ATCN PAM
uaucagcuaauguuuauuga

SEQ ID NO: 1575 - RNA, 20 nt, Artificial Sequence
  spacer sequence ATCN PAM
aggacgagaaggguuagguu

SEQ ID NO: 1576 - RNA, 20 nt, Artificial Sequence
  spacer sequence ATCN PAM
cugacugagaaccuaacccu

SEQ ID NO: 1577 - RNA, 20 nt, Artificial Sequence
  spacer sequence ATCN PAM
cauuucagaaacaucugggc

SEQ ID NO: 1578 - RNA, 20 nt, Artificial Sequence
  spacer sequence ATCN PAM
gggccuggaucuccaggcac

SEQ ID NO: 1579 - RNA, 20 nt, Artificial Sequence
  spacer sequence ATCN PAM
aggcccagauguuucugaaa

SEQ ID NO: 1580 - RNA, 20 nt, Artificial Sequence
  spacer sequence ATCN PAM
ccaggcacccgaagaaguuu

SEQ ID NO: 1581 - RNA, 20 nt, Artificial Sequence
  spacer sequence ATCN PAM
cacugaggguggcaaagcac

SEQ ID NO: 1582 - RNA, 20 nt, Artificial Sequence
  spacer sequence ATCN PAM
cuuugguuguacuuuaaggu

SEQ ID NO: 1583 - RNA, 20 nt, Artificial Sequence
  spacer sequence ATCN PAM
uaucacuuugguuguacuuu

SEQ ID NO: 1584 - RNA, 20 nt, Artificial Sequence
  spacer sequence ATCN PAM
cuugcugcuuuuuuucugug

SEQ ID NO: 1585 - RNA, 20 nt, Artificial Sequence
  spacer sequence ATCN PAM
ccguggccaucaagacugga

SEQ ID NO: 1586 - RNA, 20 nt, Artificial Sequence
  spacer sequence ATCN PAM
agacuggaugucaacacucc

SEQ ID NO: 1587 - RNA, 20 nt, Artificial Sequence
  spacer sequence ATCN PAM
agucuugauggccacgggga

SEQ ID NO: 1588 - RNA, 20 nt, Artificial Sequence
  spacer sequence ATCN PAM
guuuccuaccuccuacuucc

SEQ ID NO: 1589 - RNA, 20 nt, Artificial Sequence
  spacer sequence ATCN PAM
uugccaugcugacccaccug

SEQ ID NO: 1590 - RNA, 20 nt, Artificial Sequence
  spacer sequence ATCN PAM
uggcuuuaucauugccaugc

SEQ ID NO: 1591 - RNA, 20 nt, Artificial Sequence
  spacer sequence ATCN PAM
uaacccugagcugugggcuc

SEQ ID NO: 1592 - RNA, 20 nt, Artificial Sequence
  spacer sequence ATCN PAM
ucauccugcccccaacacau

SEQ ID NO: 1593 - RNA, 20 nt, Artificial Sequence
  spacer sequence ATCN PAM
ugcccccaacacauaggccu

SEQ ID NO: 1594 - RNA, 20 nt, Artificial Sequence
  spacer sequence ATCN PAM
acacaaaggaccgcuuuaaa

SEQ ID NO: 1595 - RNA, 20 nt, Artificial Sequence
  spacer sequence ATCN PAM
cuuguguuccugaguucuga

SEQ ID NO: 1596 - RNA, 20 nt, Artificial Sequence
  spacer sequence ATCN PAM
gucacucugaaauagaagca

SEQ ID NO: 1597 - RNA, 20 nt, Artificial Sequence
  spacer sequence ATCN PAM
uagagcccaaaggaagcuaa

SEQ ID NO: 1598 - RNA, 20 nt, Artificial Sequence
  spacer sequence ATCN PAM
cuuccuaccucucaauuggc

SEQ ID NO: 1599 - RNA, 20 nt, Artificial Sequence
  spacer sequence ATCN PAM
gcagggagagagaagcagaa

SEQ ID NO: 1600 - RNA, 20 nt, Artificial Sequence
  spacer sequence ATCN PAM
aaggaaauucaggcaacuau

SEQ ID NO: 1601 - RNA, 20 nt, Artificial Sequence
  spacer sequence ATCN PAM
cugggggaaaaaucaggcaa

SEQ ID NO: 1602 - RNA, 20 nt, Artificial Sequence
  spacer sequence ATCN PAM
ggcaaauuacuucgucucag

SEQ ID NO: 1603 - RNA, 20 nt, Artificial Sequence
  spacer sequence ATCN PAM
ucaacagggauguuugauuu

SEQ ID NO: 1604 - RNA, 20 nt, Artificial Sequence
  spacer sequence ATCN PAM
cuguugaggauggucugaga

SEQ ID NO: 1605 - RNA, 20 nt, Artificial Sequence
  spacer sequence ATCN PAM
aacaucccuguugaggaugg

SEQ ID NO: 1606 - RNA, 20 nt, Artificial Sequence
  spacer sequence ATCN PAM
aagggugacuggcaagaaaa

SEQ ID NO: 1607 - RNA, 20 nt, Artificial Sequence
  spacer sequence ATCN PAM
cagcacuuugggaggccaag

SEQ ID NO: 1608 - RNA, 20 nt, Artificial Sequence
  spacer sequence ATCN PAM
ccugaggucaggaguuugag

SEQ ID NO: 1609 - RNA, 20 nt, Artificial Sequence
  spacer sequence ATCN PAM
cuugaaccagggaggcagag

SEQ ID NO: 1610 - RNA, 20 nt, Artificial Sequence
  spacer sequence ATCN PAM
cggcucaccgcaaccucugc

SEQ ID NO: 1611 - RNA, 20 nt, Artificial Sequence
  spacer sequence ATCN PAM
cgccacugcacuccagccug

SEQ ID NO: 1612 - RNA, 20 nt, Artificial Sequence
  spacer sequence ATCN PAM
caaaaaaaaaaaagaaagaa

SEQ ID NO: 1613 - RNA, 20 nt, Artificial Sequence
  spacer sequence ATCN PAM
uuuucuuucuuuuuuuuuuu

SEQ ID NO: 1614 - RNA, 20 nt, Artificial Sequence
  spacer sequence ATCN PAM
aaauaaccaauagcauaacc

SEQ ID NO: 1615 - RNA, 20 nt, Artificial Sequence
  spacer sequence ATCN PAM
uguuagagaauccaaauaac

SEQ ID NO: 1616 - RNA, 20 nt, Artificial Sequence
  spacer sequence ATCN PAM
cauccuguuagagaauccaa

SEQ ID NO: 1617 - RNA, 20 nt, Artificial Sequence
  spacer sequence ATCN PAM
aaauucaaauucagugggug

SEQ ID NO: 1618 - RNA, 20 nt, Artificial Sequence
  spacer sequence ATCN PAM
ugucuagagaauggaacaga

SEQ ID NO: 1619 - RNA, 20 nt, Artificial Sequence
  spacer sequence ATCN PAM
guuccauucucuagacaaga

SEQ ID NO: 1620 - RNA, 20 nt, Artificial Sequence
  spacer sequence ATCN PAM
ccaaugacuuaagugggucu

SEQ ID NO: 1621 - RNA, 20 nt, Artificial Sequence
  spacer sequence ATCN PAM
aaccaaauucaucuccaaug

SEQ ID NO: 1622 - RNA, 20 nt, Artificial Sequence
  spacer sequence ATCN PAM
auucagguugugaccuaaau

SEQ ID NO: 1623 - RNA, 20 nt, Artificial Sequence
  spacer sequence ATCN PAM
ucuccgucauaggaauacua

SEQ ID NO: 1624 - RNA, 20 nt, Artificial Sequence
  spacer sequence ATCN PAM
uucugaaaugcauacuuuuc

SEQ ID NO: 1625 - RNA, 20 nt, Artificial Sequence
  spacer sequence ATCN PAM
cucccuagugacccacuaaa

SEQ ID NO: 1626 - RNA, 20 nt, Artificial Sequence
  spacer sequence ATCN PAM
uagccaagcuugaaaccaca

SEQ ID NO: 1627 - RNA, 20 nt, Artificial Sequence
  spacer sequence ATCN PAM
cagugugaaaaaaacaucau

SEQ ID NO: 1628 - RNA, 20 nt, Artificial Sequence
  spacer sequence ATCN PAM
uagguacuucacuuaaucuu

SEQ ID NO: 1629 - RNA, 20 nt, Artificial Sequence
  spacer sequence ATCN PAM
uugggcccuuauuauucuga

SEQ ID NO: 1630 - RNA, 20 nt, Artificial Sequence
  spacer sequence ATCN PAM
gaauaauaagggcccaaaga

SEQ ID NO: 1631 - RNA, 20 nt, Artificial Sequence
  spacer sequence ATCN PAM
cuaaaaugagugauuacuag

SEQ ID NO: 1632 - RNA, 20 nt, Artificial Sequence
  spacer sequence ATCN PAM
cucauuuuagagaucagaau

SEQ ID NO: 1633 - RNA, 20 nt, Artificial Sequence
  spacer sequence ATCN PAM
uaguaaucacucauuuuaga

SEQ ID NO: 1634 - RNA, 20 nt, Artificial Sequence
  spacer sequence ATCN PAM
aauuuauagaaucacaagga

SEQ ID NO: 1635 - RNA, 20 nt, Artificial Sequence
  spacer sequence ATCN PAM
caaggaaaauugauucuauc

SEQ ID NO: 1636 - RNA, 20 nt, Artificial Sequence
  spacer sequence ATCN PAM
auuuuccuugugauucuaua

SEQ ID NO: 1637 - RNA, 20 nt, Artificial Sequence
  spacer sequence ATCN PAM
uguauauaaaaguauucuau

SEQ ID NO: 1638 - RNA, 20 nt, Artificial Sequence
  spacer sequence ATCN PAM
uauuacgaaccacauggccu

SEQ ID NO: 1639 - RNA, 20 nt, Artificial Sequence
  spacer sequence ATCN PAM
uaauuuaaacuaagauagaa

SEQ ID NO: 1640 - RNA, 20 nt, Artificial Sequence
  spacer sequence ATCN PAM
uaguuuaaauuaggauaucu

SEQ ID NO: 1641 - RNA, 20 nt, Artificial Sequence
  spacer sequence ATCN PAM
agaagcagucauugucuguu

SEQ ID NO: 1642 - RNA, 20 nt, Artificial Sequence
  spacer sequence ATCN PAM
ugaguuccuaaccagcagag

SEQ ID NO: 1643 - RNA, 20 nt, Artificial Sequence
  spacer sequence ATCN PAM
ccaguuauuuuggaacuucc

SEQ ID NO: 1644 - RNA, 20 nt, Artificial Sequence
  spacer sequence ATCN PAM
gcuuccuucacacuauacuc

SEQ ID NO: 1645 - RNA, 20 nt, Artificial Sequence
  spacer sequence ATCN PAM
uacuauuacuuccggggaca

SEQ ID NO: 1646 - RNA, 20 nt, Artificial Sequence
  spacer sequence ATCN PAM
guguccccggaaguaauagu

SEQ ID NO: 1647 - RNA, 20 nt, Artificial Sequence
  spacer sequence ATCN PAM
ucgucaauguuaaccucacu

SEQ ID NO: 1648 - RNA, 20 nt, Artificial Sequence
  spacer sequence ATCN PAM
aaaaaaaaaaaaaaucaugu

SEQ ID NO: 1649 - RNA, 20 nt, Artificial Sequence
  spacer sequence ATCN PAM
ugucaacgcauacaaaaccu

SEQ ID NO: 1650 - RNA, 20 nt, Artificial Sequence
  spacer sequence ATCN PAM
uucagguuuuguaugcguug

SEQ ID NO: 1651 - RNA, 20 nt, Artificial Sequence
  spacer sequence ATCN PAM
gaaugcucuuggaaacucca

SEQ ID NO: 1652 - RNA, 20 nt, Artificial Sequence
  spacer sequence ATCN PAM
gcugaggucuaacugagugc

SEQ ID NO: 1653 - RNA, 20 nt, Artificial Sequence
  spacer sequence ATCN PAM
uggaaucugcugaggucuaa

SEQ ID NO: 1654 - RNA, 20 nt, Artificial Sequence
  spacer sequence ATCN PAM
uuuaaagaaaacucuuaggc

SEQ ID NO: 1655 - RNA, 20 nt, Artificial Sequence
  spacer sequence ATCN PAM
cugguuuuugaaacaauuau

SEQ ID NO: 1656 - RNA, 20 nt, Artificial Sequence
  spacer sequence ATCN PAM
gccuguuugagaaauaauug

SEQ ID NO: 1657 - RNA, 20 nt, Artificial Sequence
  spacer sequence ATCN PAM
agcauguugaauaucagccu

SEQ ID NO: 1658 - RNA, 20 nt, Artificial Sequence
  spacer sequence ATCN PAM
uggaccccaauucuaacaga

SEQ ID NO: 1659 - RNA, 20 nt, Artificial Sequence
  spacer sequence ATCN PAM
guccgggcgcgguggcuuac

SEQ ID NO: 1660 - RNA, 20 nt, Artificial Sequence
  spacer sequence ATCN PAM
cagcacuuugggaggccgag

SEQ ID NO: 1661 - RNA, 20 nt, Artificial Sequence
  spacer sequence ATCN PAM
cagccacucaggaggcugag

SEQ ID NO: 1662 - RNA, 20 nt, Artificial Sequence
  spacer sequence ATCN PAM
uggcucacugcaaccucuac

SEQ ID NO: 1663 - RNA, 20 nt, Artificial Sequence
  spacer sequence ATCN PAM
ugccauugcacuccagccug

SEQ ID NO: 1664 - RNA, 20 nt, Artificial Sequence
  spacer sequence ATCN PAM
caacaauaauaauaauaaua

SEQ ID NO: 1665 - RNA, 20 nt, Artificial Sequence
  spacer sequence ATCN PAM
gaacagcccacaaaaggcuu

SEQ ID NO: 1666 - RNA, 20 nt, Artificial Sequence
  spacer sequence ATCN PAM
aaguggcugggacucugucc

SEQ ID NO: 1667 - RNA, 20 nt, Artificial Sequence
  spacer sequence ATCN PAM
cucugcaaucugaaguucca

SEQ ID NO: 1668 - RNA, 20 nt, Artificial Sequence
  spacer sequence ATCN PAM
gaaguuccacucugcagaga

SEQ ID NO: 1669 - RNA, 20 nt, Artificial Sequence
  spacer sequence ATCN PAM
gccagggguucucacugugu

SEQ ID NO: 1670 - RNA, 20 nt, Artificial Sequence
  spacer sequence ATCN PAM
augaauggcagaagcaggga

SEQ ID NO: 1671 - RNA, 20 nt, Artificial Sequence
  spacer sequence ATCN PAM
ugguuauccaugaauggcag

SEQ ID NO: 1672 - RNA, 20 nt, Artificial Sequence
  spacer sequence ATCN PAM
ugacucaucacacagagaga

SEQ ID NO: 1673 - RNA, 20 nt, Artificial Sequence
  spacer sequence ATCN PAM
cacagagagaugucuuccca

SEQ ID NO: 1674 - RNA, 20 nt, Artificial Sequence
  spacer sequence ATCN PAM
cucugugugaugagucaaga

SEQ ID NO: 1675 - RNA, 20 nt, Artificial Sequence
  spacer sequence ATCN PAM
uguaugggguuucaaaaguc

SEQ ID NO: 1676 - RNA, 20 nt, Artificial Sequence
  spacer sequence ATCN PAM
cagcacuaugggaggccuag

SEQ ID NO: 1677 - RNA, 20 nt, Artificial Sequence
  spacer sequence ATCN PAM
acccuccuaggccucccaua

SEQ ID NO: 1678 - RNA, 20 nt, Artificial Sequence
  spacer sequence ATCN PAM
cgagaucaggagauggagac

SEQ ID NO: 1679 - RNA, 20 nt, Artificial Sequence
  spacer sequence ATCN PAM
cgugauccacccuccuaggc

SEQ ID NO: 1680 - RNA, 20 nt, Artificial Sequence
  spacer sequence ATCN PAM
ggagauggagaccauccugg

SEQ ID NO: 1681 - RNA, 20 nt, Artificial Sequence
  spacer sequence ATCN PAM
ccugaucucgugauccaccc

SEQ ID NO: 1682 - RNA, 20 nt, Artificial Sequence
  spacer sequence ATCN PAM
uggcuaacacggugaaacgc

SEQ ID NO: 1683 - RNA, 20 nt, Artificial Sequence
  spacer sequence ATCN PAM
acuaaaaauacaaaaaauau

SEQ ID NO: 1684 - RNA, 20 nt, Artificial Sequence
  spacer sequence ATCN PAM
uccugccucagcuucccaag

SEQ ID NO: 1685 - RNA, 20 nt, Artificial Sequence
  spacer sequence ATCN PAM
cuugaacccaguaggcggag

SEQ ID NO: 1686 - RNA, 20 nt, Artificial Sequence
  spacer sequence ATCN PAM
cgcucugucacccaggcugg

SEQ ID NO: 1687 - RNA, 20 nt, Artificial Sequence
  spacer sequence ATCN PAM
ucuucacuguggagaagaac

SEQ ID NO: 1688 - RNA, 20 nt, Artificial Sequence
  spacer sequence ATCN PAM
uuuauccacuucuguuaucc

SEQ ID NO: 1689 - RNA, 20 nt, Artificial Sequence
  spacer sequence ATCN PAM
acuucuguuauccucuugcc

SEQ ID NO: 1690 - RNA, 20 nt, Artificial Sequence
  spacer sequence ATCN PAM
ucuugccccuuaaaaauccc

SEQ ID NO: 1691 - RNA, 20 nt, Artificial Sequence
  spacer sequence ATCN PAM
cacuuuuagagauauccacu

SEQ ID NO: 1692 - RNA, 20 nt, Artificial Sequence
  spacer sequence ATCN PAM
cuaaaagugggauuuuuaag

SEQ ID NO: 1693 - RNA, 20 nt, Artificial Sequence
  spacer sequence ATCN PAM
acuuauuuacaaacugacuc

SEQ ID NO: 1694 - RNA, 20 nt, Artificial Sequence
  spacer sequence ATCN PAM
ugggucuugagacaaguuca

SEQ ID NO: 1695 - RNA, 20 nt, Artificial Sequence
  spacer sequence ATCN PAM
gcaaggaguucagcacauuu

SEQ ID NO: 1696 - RNA, 20 nt, Artificial Sequence
  spacer sequence ATCN PAM
cagaaacccuaauggucuua

SEQ ID NO: 1697 - RNA, 20 nt, Artificial Sequence
  spacer sequence ATCN PAM
auuaguugggacuuccagac

SEQ ID NO: 1698 - RNA, 20 nt, Artificial Sequence
  spacer sequence ATCN PAM
ggguuauuugucauggaaaa

SEQ ID NO: 1699 - RNA, 20 nt, Artificial Sequence
  spacer sequence ATCN PAM
ccuuuccccuguggcuuuuc

SEQ ID NO: 1700 - RNA, 20 nt, Artificial Sequence
  spacer sequence ATCN PAM
guugguaggaagaggcaacu

SEQ ID NO: 1701 - RNA, 20 nt, Artificial Sequence
  spacer sequence ATCN PAM
ugggucuguauguguaagcc

SEQ ID NO: 1702 - RNA, 20 nt, Artificial Sequence
  spacer sequence ATCN PAM
uuuccuguguuagcacauaa

SEQ ID NO: 1703 - RNA, 20 nt, Artificial Sequence
  spacer sequence ATCN PAM
aagggaguaucuuuuccugu

SEQ ID NO: 1704 - RNA, 20 nt, Artificial Sequence
  spacer sequence ATCN PAM
guuaaacagaguuuggugaa

SEQ ID NO: 1705 - RNA, 20 nt, Artificial Sequence
  spacer sequence ATCN PAM
guaagagagaaagcagagaa

SEQ ID NO: 1706 - RNA, 20 nt, Artificial Sequence
  spacer sequence ATCN PAM
ccaccuccauaaaguagaag

SEQ ID NO: 1707 - RNA, 20 nt, Artificial Sequence
  spacer sequence ATCN PAM
cacgacuucuacuuuaugga

SEQ ID NO: 1708 - RNA, 20 nt, Artificial Sequence
  spacer sequence ATCN PAM
gucccagagagcaggugaaa

SEQ ID NO: 1709 - RNA, 20 nt, Artificial Sequence
  spacer sequence ATCN PAM
uuucacuaagcuagguaauc

SEQ ID NO: 1710 - RNA, 20 nt, Artificial Sequence
  spacer sequence ATCN PAM
agccagaagguggauaggua

SEQ ID NO: 1711 - RNA, 20 nt, Artificial Sequence
  spacer sequence ATCN PAM
accuucuggcuagauuaccu

SEQ ID NO: 1712 - RNA, 20 nt, Artificial Sequence
  spacer sequence ATCN PAM
uaccuauccaccuucuggcu

SEQ ID NO: 1713 - RNA, 20 nt, Artificial Sequence
  spacer sequence ATCN PAM
acagcacacaggugucugag

SEQ ID NO: 1714 - RNA, 20 nt, Artificial Sequence
  spacer sequence ATCN PAM
agaagagaauuagaaacaac

SEQ ID NO: 1715 - RNA, 20 nt, Artificial Sequence
  spacer sequence ATCN PAM
ccaagcaguaaaaaauacca

SEQ ID NO: 1716 - RNA, 20 nt, Artificial Sequence
  spacer sequence ATCN PAM
acaaacaggugguaaaaauu

SEQ ID NO: 1717 - RNA, 20 nt, Artificial Sequence
  spacer sequence ATCN PAM
cagcaaugcucuauuccuua

SEQ ID NO: 1718 - RNA, 20 nt, Artificial Sequence
  spacer sequence ATCN PAM
gaacagacaaucacagcaau

SEQ ID NO: 1719 - RNA, 20 nt, Artificial Sequence
  spacer sequence ATCN PAM
gccccaaauuuccugaugua

SEQ ID NO: 1720 - RNA, 20 nt, Artificial Sequence
  spacer sequence ATCN PAM
ggaaauuuggggcagauuuu

SEQ ID NO: 1721 - RNA, 20 nt, Artificial Sequence
  spacer sequence ATCN PAM
uaaugcagacaaacaaacau

SEQ ID NO: 1722 - RNA, 20 nt, Artificial Sequence
  spacer sequence ATCN PAM
ccuucuuuaggauuuaccgc

SEQ ID NO: 1723 - RNA, 20 nt, Artificial Sequence
  spacer sequence ATCN PAM
uaaagaaggugauaaauguc

SEQ ID NO: 1724 - RNA, 20 nt, Artificial Sequence
  spacer sequence ATCN PAM
cugggcgagcgguaaauccu

SEQ ID NO: 1725 - RNA, 20 nt, Artificial Sequence
  spacer sequence ATCN PAM
ugcaugguagccaccaaaag

SEQ ID NO: 1726 - RNA, 20 nt, Artificial Sequence
  spacer sequence ATCN PAM
uguuuuucaaauauaugcuu

SEQ ID NO: 1727 - RNA, 20 nt, Artificial Sequence
  spacer sequence ATCN PAM
uaauuaauguaguaguaaua

SEQ ID NO: 1728 - RNA, 20 nt, Artificial Sequence
  spacer sequence ATCN PAM
uagcaauaucauaauuaaug

SEQ ID NO: 1729 - RNA, 20 nt, Artificial Sequence
  spacer sequence ATCN PAM
aaaugcaaaacuugggaaua

SEQ ID NO: 1730 - RNA, 20 nt, Artificial Sequence
  spacer sequence ATCN PAM
gauaagcgguaaccuaguuc

SEQ ID NO: 1731 - RNA, 20 nt, Artificial Sequence
  spacer sequence ATCN PAM
gauggcauaaauuuucaagg

SEQ ID NO: 1732 - RNA, 20 nt, Artificial Sequence
  spacer sequence ATCN PAM
ccugcccauuucucaaaucu

SEQ ID NO: 1733 - RNA, 20 nt, Artificial Sequence
  spacer sequence ATCN PAM
guuccuccuacccacccgau

SEQ ID NO: 1734 - RNA, 20 nt, Artificial Sequence
  spacer sequence ATCN PAM
gguggguaggaggaacagau

SEQ ID NO: 1735 - RNA, 20 nt, Artificial Sequence
  spacer sequence ATCN PAM
uaagcagccucauugucuua

SEQ ID NO: 1736 - RNA, 20 nt, Artificial Sequence
  spacer sequence ATCN PAM
cucaugacagcgauggucca

SEQ ID NO: 1737 - RNA, 20 nt, Artificial Sequence
  spacer sequence ATCN PAM
cugucaugagugaugcccug

SEQ ID NO: 1738 - RNA, 20 nt, Artificial Sequence
  spacer sequence ATCN PAM
gucccauagagagggcccgu

SEQ ID NO: 1739 - RNA, 20 nt, Artificial Sequence
  spacer sequence ATCN PAM
caaacuagcaggaugacaga

SEQ ID NO: 1740 - RNA, 20 nt, Artificial Sequence
  spacer sequence ATCN PAM
ugcuaguuugugauguuuuc

SEQ ID NO: 1741 - RNA, 20 nt, Artificial Sequence
  spacer sequence ATCN PAM
gaaaacugccacacaucuug

SEQ ID NO: 1742 - RNA, 20 nt, Artificial Sequence
  spacer sequence ATCN PAM
ugagcucucuggguacuacg

SEQ ID NO: 1743 - RNA, 20 nt, Artificial Sequence
  spacer sequence ATCN PAM
uugggccaagucacaccugu

SEQ ID NO: 1744 - RNA, 20 nt, Artificial Sequence
  spacer sequence ATCN PAM
uaagcaugauuucaaacuca

SEQ ID NO: 1745 - RNA, 20 nt, Artificial Sequence
  spacer sequence ATCN PAM
ugcuuaagaugccaguggcu

SEQ ID NO: 1746 - RNA, 20 nt, Artificial Sequence
  spacer sequence ATCN PAM
cugaccucugagucgucuuc

SEQ ID NO: 1747 - RNA, 20 nt, Artificial Sequence
  spacer sequence ATCN PAM
uacaauugggcagggguggg

SEQ ID NO: 1748 - RNA, 20 nt, Artificial Sequence
  spacer sequence ATCN PAM
aaacugauguaaaagcagca

SEQ ID NO: 1749 - RNA, 20 nt, Artificial Sequence
  spacer sequence ATCN PAM
guuuugauuuuuuguuucuu

SEQ ID NO: 1750 - RNA, 20 nt, Artificial Sequence
  spacer sequence ATCN PAM
aguucaacgucaaagcagcc

SEQ ID NO: 1751 - RNA, 20 nt, Artificial Sequence
  spacer sequence ATCN PAM
uuggcugcuuugacguugaa

SEQ ID NO: 1752 - RNA, 20 nt, Artificial Sequence
  spacer sequence ATCN PAM
cugaagagaaaaccagaacc

SEQ ID NO: 1753 - RNA, 20 nt, Artificial Sequence
  spacer sequence ATCN PAM
ggacucccaguucugcugcu

SEQ ID NO: 1754 - RNA, 20 nt, Artificial Sequence
  spacer sequence ATCN PAM
agaccccgggccuccugcgg

SEQ ID NO: 1755 - RNA, 20 nt, Artificial Sequence
  spacer sequence ATCN PAM
cagcugcucucacgcauccc

SEQ ID NO: 1756 - RNA, 20 nt, Artificial Sequence
  spacer sequence ATCN PAM
caccccugagcagagcagcg

SEQ ID NO: 1757 - RNA, 20 nt, Artificial Sequence
  spacer sequence ATCN PAM
cauucccaguccagcgcuaa

SEQ ID NO: 1758 - RNA, 20 nt, Artificial Sequence
  spacer sequence ATCN PAM
gcuaaaggggccucgacgac

SEQ ID NO: 1759 - RNA, 20 nt, Artificial Sequence
  spacer sequence ATCN PAM
aacccuuucguccaaccugc

SEQ ID NO: 1760 - RNA, 20 nt, Artificial Sequence
  spacer sequence ATCN PAM
ugggcauguaccacguucac

SEQ ID NO: 1761 - RNA, 20 nt, Artificial Sequence
  spacer sequence ATCN PAM
ucuaaagcgggagccccuaa

SEQ ID NO: 1762 - RNA, 20 nt, Artificial Sequence
  spacer sequence ATCN PAM
cuaugaaagaucugauacac

SEQ ID NO: 1763 - RNA, 20 nt, Artificial Sequence
  spacer sequence ATCN PAM
uucauagggaugguagaaaa

SEQ ID NO: 1764 - RNA, 20 nt, Artificial Sequence
  spacer sequence ATCN PAM
gauacacgugcucccuugaa

SEQ ID NO: 1765 - RNA, 20 nt, Artificial Sequence
  spacer sequence ATCN PAM
gaucuuucauagggauggua

SEQ ID NO: 1766 - RNA, 20 nt, Artificial Sequence
  spacer sequence ATCN PAM
aaauacguuuuuccuuucug

SEQ ID NO: 1767 - RNA, 20 nt, Artificial Sequence
  spacer sequence ATCN PAM
accaucgagcuguguucagc

SEQ ID NO: 1768 - RNA, 20 nt, Artificial Sequence
  spacer sequence ATCN PAM
agcuguguucagccaaguuu

SEQ ID NO: 1769 - RNA, 20 nt, Artificial Sequence
  spacer sequence ATCN PAM
aguucacacgggucauugua

SEQ ID NO: 1770 - RNA, 20 nt, Artificial Sequence
  spacer sequence ATCN PAM
caugaccguagaugacgcug

SEQ ID NO: 1771 - RNA, 20 nt, Artificial Sequence
  spacer sequence ATCN PAM
acggucaugggauaccauua

SEQ ID NO: 1772 - RNA, 20 nt, Artificial Sequence
  spacer sequence ATCN PAM
cauuagcccgcuguuuaauu

SEQ ID NO: 1773 - RNA, 20 nt, Artificial Sequence
  spacer sequence ATCN PAM
cguuaucccauuagcccgcu

SEQ ID NO: 1774 - RNA, 20 nt, Artificial Sequence
  spacer sequence ATCN PAM
uaccaauucccucuaugugu

SEQ ID NO: 1775 - RNA, 20 nt, Artificial Sequence
  spacer sequence ATCN PAM
gaacacauagagggaauugg

SEQ ID NO: 1776 - RNA, 20 nt, Artificial Sequence
  spacer sequence ATCN PAM
gcuagauggcucaugccuuu

SEQ ID NO: 1777 - RNA, 20 nt, Artificial Sequence
  spacer sequence ATCN PAM
agcagauuuuccuaguuguc

SEQ ID NO: 1778 - RNA, 20 nt, Artificial Sequence
  spacer sequence ATCN PAM
cauccucauaucggcaaagu

SEQ ID NO: 1779 - RNA, 20 nt, Artificial Sequence
  spacer sequence ATCN PAM
ucauaucggcaaaguuccca

SEQ ID NO: 1780 - RNA, 20 nt, Artificial Sequence
  spacer sequence ATCN PAM
gcaaaguucccacaauuuuu

SEQ ID NO: 1781 - RNA, 20 nt, Artificial Sequence
  spacer sequence ATCN PAM
cauucucuuuuuuucagaca

SEQ ID NO: 1782 - RNA, 20 nt, Artificial Sequence
  spacer sequence ATCN PAM
uaaugaggaacacacaguua

SEQ ID NO: 1783 - RNA, 20 nt, Artificial Sequence
  spacer sequence ATCN PAM
ucuccugcuuguaguacuuu

SEQ ID NO: 1784 - RNA, 20 nt, Artificial Sequence
  spacer sequence ATCN PAM
caguaccuuucagcaaacug

SEQ ID NO: 1785 - RNA, 20 nt, Artificial Sequence
  spacer sequence ATCN PAM
cccgccacuuccuuucaagu

SEQ ID NO: 1786 - RNA, 20 nt, Artificial Sequence
  spacer sequence ATCN PAM
uaaugcuagaagugagaacu

SEQ ID NO: 1787 - RNA, 20 nt, Artificial Sequence
  spacer sequence ATCN PAM
acagaaugcccugggaaaaa

SEQ ID NO: 1788 - RNA, 20 nt, Artificial Sequence
  spacer sequence ATCN PAM
ucucuuuguuuaggaccuac

SEQ ID NO: 1789 - RNA, 20 nt, Artificial Sequence
  spacer sequence ATCN PAM
gugagaaauagaauuugcgg

SEQ ID NO: 1790 - RNA, 20 nt, Artificial Sequence
  spacer sequence ATCN PAM
ucauuugagaacaacuuaau

SEQ ID NO: 1791 - RNA, 20 nt, Artificial Sequence
  spacer sequence ATCN PAM
guucagguauguagagaaca

SEQ ID NO: 1792 - RNA, 20 nt, Artificial Sequence
  spacer sequence ATCN PAM
gcacgucaagccuguuacaa

SEQ ID NO: 1793 - RNA, 20 nt, Artificial Sequence
  spacer sequence ATCN PAM
ucaaguaaguuuuuguaaca

SEQ ID NO: 1794 - RNA, 20 nt, Artificial Sequence
  spacer sequence ATCN PAM
uuuuuuuuuaaaugaggaac

SEQ ID NO: 1795 - RNA, 20 nt, Artificial Sequence
  spacer sequence ATCN PAM
ugaauucaucuuacuauugg

SEQ ID NO: 1796 - RNA, 20 nt, Artificial Sequence
  spacer sequence ATCN PAM
uacuauuggaaaugugcaug

SEQ ID NO: 1797 - RNA, 20 nt, Artificial Sequence
  spacer sequence ATCN PAM
uaauauaaaauaacaugcac

SEQ ID NO: 1798 - RNA, 20 nt, Artificial Sequence
  spacer sequence ATCN PAM
agaacucuaaaauuuaaaau

SEQ ID NO: 1799 - RNA, 20 nt, Artificial Sequence
  spacer sequence ATCN PAM
uuuauaagugauaucauguu

SEQ ID NO: 1800 - RNA, 20 nt, Artificial Sequence
  spacer sequence ATCN PAM
cuuauaaaugauauuuugua

SEQ ID NO: 1801 - RNA, 20 nt, Artificial Sequence
  spacer sequence ATCN PAM
uguuggcuagguucucaugu

SEQ ID NO: 1802 - RNA, 20 nt, Artificial Sequence
  spacer sequence ATCN PAM
gcuucagaaauaauauuuua

SEQ ID NO: 1803 - RNA, 20 nt, Artificial Sequence
  spacer sequence ATCN PAM
gaaggcgucaauaagucagg

SEQ ID NO: 1804 - RNA, 20 nt, Artificial Sequence
  spacer sequence ATCN PAM
cccaguaaauuuauuuaacu

SEQ ID NO: 1805 - RNA, 20 nt, Artificial Sequence
  spacer sequence ATCN PAM
aacauaaucugugauuuauc

SEQ ID NO: 1806 - RNA, 20 nt, Artificial Sequence
  spacer sequence ATCN PAM
gugauuuaucaccagauguu

SEQ ID NO: 1807 - RNA, 20 nt, Artificial Sequence
  spacer sequence ATCN PAM
cagauuauguuugauuuaca

SEQ ID NO: 1808 - RNA, 20 nt, Artificial Sequence
  spacer sequence ATCN PAM
ccagauguuugcacuccucc

SEQ ID NO: 1809 - RNA, 20 nt, Artificial Sequence
  spacer sequence ATCN PAM
ggugauaaaucacagauuau

SEQ ID NO: 1810 - RNA, 20 nt, Artificial Sequence
  spacer sequence ATCN PAM
aauggggaauggggaggagu

SEQ ID NO: 1811 - RNA, 20 nt, Artificial Sequence
  spacer sequence ATCN PAM
accauuaauucugucuguca

SEQ ID NO: 1812 - RNA, 20 nt, Artificial Sequence
  spacer sequence ATCN PAM
ugacagacagaauuaauggu

SEQ ID NO: 1813 - RNA, 20 nt, Artificial Sequence
  spacer sequence ATCN PAM
aaagcuggcauggcacuggg

SEQ ID NO: 1814 - RNA, 20 nt, Artificial Sequence
  spacer sequence ATCN PAM
gucuugagcagcauuuugga

SEQ ID NO: 1815 - RNA, 20 nt, Artificial Sequence
  spacer sequence ATCN PAM
aaaaugcugcucaagacaga

SEQ ID NO: 1816 - RNA, 20 nt, Artificial Sequence
  spacer sequence ATCN PAM
aaaacacauacaguauaucu

SEQ ID NO: 1817 - RNA, 20 nt, Artificial Sequence
  spacer sequence ATCN PAM
uuucuaaguucagugacaaa

SEQ ID NO: 1818 - RNA, 20 nt, Artificial Sequence
  spacer sequence ATCN PAM
aguucucaagguaccgcacg

SEQ ID NO: 1819 - RNA, 20 nt, Artificial Sequence
  spacer sequence ATCN PAM
uuucucaguggauuccucua

SEQ ID NO: 1820 - RNA, 20 nt, Artificial Sequence
  spacer sequence ATCN PAM
acugagaaaggauguuggag

SEQ ID NO: 1821 - RNA, 20 nt, Artificial Sequence
  spacer sequence ATCN PAM
uucuaaaguauaaagaaagu

SEQ ID NO: 1822 - RNA, 20 nt, Artificial Sequence
  spacer sequence ATCN PAM
gaggcaagaauaguuuuauc

SEQ ID NO: 1823 - RNA, 20 nt, Artificial Sequence
  spacer sequence ATCN PAM
acacugggaacagggacacg

SEQ ID NO: 1824 - RNA, 20 nt, Artificial Sequence
  spacer sequence ATCN PAM
ugucccuguucccaguguag

SEQ ID NO: 1825 - RNA, 20 nt, Artificial Sequence
  spacer sequence ATCN PAM
cagagguauguguuuaguaa

SEQ ID NO: 1826 - RNA, 20 nt, Artificial Sequence
  spacer sequence ATCN PAM
auuugcuuuacuaaacacau

SEQ ID NO: 1827 - RNA, 20 nt, Artificial Sequence
  spacer sequence ATCN PAM
guguugucacuuuuacaaau

SEQ ID NO: 1828 - RNA, 20 nt, Artificial Sequence
  spacer sequence ATCN PAM
uuagaaaucuguguugucac

SEQ ID NO: 1829 - RNA, 20 nt, Artificial Sequence
  spacer sequence ATCN PAM
ucugaccagccaguuagguc

SEQ ID NO: 1830 - RNA, 20 nt, Artificial Sequence
  spacer sequence ATCN PAM
aggaagacccuaucaaaaca

SEQ ID NO: 1831 - RNA, 20 nt, Artificial Sequence
  spacer sequence ATCN PAM
aaacaccuaaaguaaucugu

SEQ ID NO: 1832 - RNA, 20 nt, Artificial Sequence
  spacer sequence ATCN PAM
guagcaucuaggguuccugg

SEQ ID NO: 1833 - RNA, 20 nt, Artificial Sequence
  spacer sequence ATCN PAM
aggguuccugggaucucaga

SEQ ID NO: 1834 - RNA, 20 nt, Artificial Sequence
  spacer sequence ATCN PAM
caggaacccuagaugcuaca

SEQ ID NO: 1835 - RNA, 20 nt, Artificial Sequence
  spacer sequence ATCN PAM
cagaaccacaaggcaaacca

SEQ ID NO: 1836 - RNA, 20 nt, Artificial Sequence
  spacer sequence ATCN PAM
caggaaaucaguggcugauu

SEQ ID NO: 1837 - RNA, 20 nt, Artificial Sequence
  spacer sequence ATCN PAM
guggcugauuccaaagauuu

SEQ ID NO: 1838 - RNA, 20 nt, Artificial Sequence
  spacer sequence ATCN PAM
gccacugauuuccugagaug

SEQ ID NO: 1839 - RNA, 20 nt, Artificial Sequence
  spacer sequence ATCN PAM
uuggaaucagccacugauuu

SEQ ID NO: 1840 - RNA, 20 nt, Artificial Sequence
  spacer sequence ATCN PAM
gguuuuguuuuguuuuguuu

SEQ ID NO: 1841 - RNA, 20 nt, Artificial Sequence
  spacer sequence ATCN PAM
ggaaacaaaggcaucagguu

SEQ ID NO: 1842 - RNA, 20 nt, Artificial Sequence
  spacer sequence ATCN PAM
aaaaaucuggaaacaaaggc

SEQ ID NO: 1843 - RNA, 20 nt, Artificial Sequence
  spacer sequence ATCN PAM
gcucuuugguuuccauguaa

SEQ ID NO: 1844 - RNA, 20 nt, Artificial Sequence
  spacer sequence ATCN PAM
uuuuuacauuauguucuaag

SEQ ID NO: 1845 - RNA, 20 nt, Artificial Sequence
  spacer sequence ATCN PAM
uagaacauaauguaaaaaag

SEQ ID NO: 1846 - RNA, 20 nt, Artificial Sequence
  spacer sequence ATCN PAM
uugcuuuaucuuagaacaua

SEQ ID NO: 1847 - RNA, 20 nt, Artificial Sequence
  spacer sequence ATCN PAM
uaaacuuuuauuuccuuuaa

SEQ ID NO: 1848 - RNA, 20 nt, Artificial Sequence
  spacer sequence ATCN PAM
auucaaacauaagugaaaaa

SEQ ID NO: 1849 - RNA, 20 nt, Artificial Sequence
  spacer sequence ATCN PAM
cuuagcagaaauccauucaa

SEQ ID NO: 1850 - RNA, 20 nt, Artificial Sequence
  spacer sequence ATCN PAM
gacugaaaacaccuuccauu

SEQ ID NO: 1851 - RNA, 20 nt, Artificial Sequence
  spacer sequence ATCN PAM
caaacccuggacauaguuuu

SEQ ID NO: 1852 - RNA, 20 nt, Artificial Sequence
  spacer sequence ATCN PAM
gaaugcccauagaaauaauc

SEQ ID NO: 1853 - RNA, 20 nt, Artificial Sequence
  spacer sequence ATCN PAM
ugaaaaagacugacuggccu

SEQ ID NO: 1854 - RNA, 20 nt, Artificial Sequence
  spacer sequence ATCN PAM
aaauaaaaaaaaaaauaaaa

SEQ ID NO: 1855 - RNA, 20 nt, Artificial Sequence
  spacer sequence ATCN PAM
uuuauuuuucuuuguuuuua

SEQ ID NO: 1856 - RNA, 20 nt, Artificial Sequence
  spacer sequence ATCN PAM
aauuaagugccucuguuuug

SEQ ID NO: 1857 - RNA, 20 nt, Artificial Sequence
  spacer sequence ATCN PAM
uuuacuaugggagucacuau

SEQ ID NO: 1858 - RNA, 20 nt, Artificial Sequence
  spacer sequence ATCN PAM
aaauauaaagcaccauuuag

SEQ ID NO: 1859 - RNA, 20 nt, Artificial Sequence
  spacer sequence ATCN PAM
uaccuucauaugcaguaaaa

SEQ ID NO: 1860 - RNA, 20 nt, Artificial Sequence
  spacer sequence ATCN PAM
cccuacauuccagcaucuua

SEQ ID NO: 1861 - RNA, 20 nt, Artificial Sequence
  spacer sequence ATCN PAM
uuuuuuguuccuuuuuccug

SEQ ID NO: 1862 - RNA, 20 nt, Artificial Sequence
  spacer sequence ATCN PAM
augugacauucuagcaggcu

SEQ ID NO: 1863 - RNA, 20 nt, Artificial Sequence
  spacer sequence ATCN PAM
guaaugucacacuuuuuugu

SEQ ID NO: 1864 - RNA, 20 nt, Artificial Sequence
  spacer sequence ATCN PAM
ugccaaauuaaaaaaauaua

SEQ ID NO: 1865 - RNA, 20 nt, Artificial Sequence
  spacer sequence ATCN PAM
auguaccuuuuuugguagug

SEQ ID NO: 1866 - RNA, 20 nt, Artificial Sequence
  spacer sequence ATCN PAM
aguguuaggcacuauaguau

SEQ ID NO: 1867 - RNA, 20 nt, Artificial Sequence
  spacer sequence ATCN PAM
acaugagugugcauuuuccu

SEQ ID NO: 1868 - RNA, 20 nt, Artificial Sequence
  spacer sequence ATCN PAM
uaaaccuuuccccaauguau

SEQ ID NO: 1869 - RNA, 20 nt, Artificial Sequence
  spacer sequence ATCN PAM
aaggcauagaauuuccacua

SEQ ID NO: 1870 - RNA, 20 nt, Artificial Sequence
  spacer sequence ATCN PAM
auuuaaaaaugguaguggaa

SEQ ID NO: 1871 - RNA, 20 nt, Artificial Sequence
  spacer sequence ATCN PAM
uugcacuguagaagcgaaag

SEQ ID NO: 1872 - RNA, 20 nt, Artificial Sequence
  spacer sequence ATCN PAM
uucauuucuauguuaagugu

SEQ ID NO: 1873 - RNA, 20 nt, Artificial Sequence
  spacer sequence ATCN PAM
cauugaggagcauuuuuuaa

SEQ ID NO: 1874 - RNA, 20 nt, Artificial Sequence
  spacer sequence ATCN PAM
gagcagguuuauuuuauacu

SEQ ID NO: 1875 - RNA, 20 nt, Artificial Sequence
  spacer sequence ATCN PAM
cugauuagagaaaagauaca

SEQ ID NO: 1876 - RNA, 20 nt, Artificial Sequence
  spacer sequence ATCN PAM
gagauacagagguugaguau

SEQ ID NO: 1877 - RNA, 20 nt, Artificial Sequence
  spacer sequence ATCN PAM
uuucucuaaucagagauaca

SEQ ID NO: 1878 - RNA, 20 nt, Artificial Sequence
  spacer sequence ATCN PAM
guaucuuuucucuaaucaga

SEQ ID NO: 1879 - RNA, 20 nt, Artificial Sequence
  spacer sequence ATCN PAM
caggcagagucaagugcuau

SEQ ID NO: 1880 - RNA, 20 nt, Artificial Sequence
  spacer sequence ATCN PAM
gccccaguugguguucaaau

SEQ ID NO: 1881 - RNA, 20 nt, Artificial Sequence
  spacer sequence ATCN PAM
ucuuccauguuaacacaaau

SEQ ID NO: 1882 - RNA, 20 nt, Artificial Sequence
  spacer sequence ATCN PAM
ucauuguaucaauauuagcu

SEQ ID NO: 1883 - RNA, 20 nt, Artificial Sequence
  spacer sequence ATCN PAM
uuguaucaauauuagcuuau

SEQ ID NO: 1884 - RNA, 20 nt, Artificial Sequence
  spacer sequence ATCN PAM
auauuagcuuauauaccugu

SEQ ID NO: 1885 - RNA, 20 nt, Artificial Sequence
  spacer sequence ATCN PAM
uauuauuuucuucuguuccc

SEQ ID NO: 1886 - RNA, 20 nt, Artificial Sequence
  spacer sequence ATCN PAM
uuugauuguccacuugacaa

SEQ ID NO: 1887 - RNA, 20 nt, Artificial Sequence
  spacer sequence ATCN PAM
aaugauaaacuuuaagaccu

SEQ ID NO: 1888 - RNA, 20 nt, Artificial Sequence
  spacer sequence ATCN PAM
acuugguugucaaguggaca

SEQ ID NO: 1889 - RNA, 20 nt, Artificial Sequence
  spacer sequence ATCN PAM
ggaucuauuucuuuuggugc

SEQ ID NO: 1890 - RNA, 20 nt, Artificial Sequence
  spacer sequence ATCN PAM
agaucuacuugguugucaag

SEQ ID NO: 1891 - RNA, 20 nt, Artificial Sequence
  spacer sequence ATCN PAM
auuucuuuuggugccaguau

SEQ ID NO: 1892 - RNA, 20 nt, Artificial Sequence
  spacer sequence ATCN PAM
ucauaaaaugaacuccuuac

SEQ ID NO: 1893 - RNA, 20 nt, Artificial Sequence
  spacer sequence ATCN PAM
uuguuuaaaaaaaauaaaac

SEQ ID NO: 1894 - RNA, 20 nt, Artificial Sequence
  spacer sequence ATCN PAM
guuuuguuuauaaaauuaaa

SEQ ID NO: 1895 - RNA, 20 nt, Artificial Sequence
  spacer sequence ATCN PAM
uuuuuccuuuaguuuaauuu

SEQ ID NO: 1896 - RNA, 20 nt, Artificial Sequence
  spacer sequence ATCN PAM
ucauuuuuccuuuaguuuaa

SEQ ID NO: 1897 - RNA, 20 nt, Artificial Sequence
  spacer sequence ATCN PAM
uuuuagguagccauuguugu

SEQ ID NO: 1898 - RNA, 20 nt, Artificial Sequence
  spacer sequence ATCN PAM
augugguuuuaauagaucca

SEQ ID NO: 1899 - RNA, 20 nt, Artificial Sequence
  spacer sequence ATCN PAM
augguucuuucuacuuguua

SEQ ID NO: 1900 - RNA, 20 nt, Artificial Sequence
  spacer sequence ATCN PAM
auuaaaaccacaucgauggu

SEQ ID NO: 1901 - RNA, 20 nt, Artificial Sequence
  spacer sequence ATCN PAM
aaggcacucauauuuuaaaa

SEQ ID NO: 1902 - RNA, 20 nt, Artificial Sequence
  spacer sequence ATCN PAM
uuugguuuuaaaauaugagu

SEQ ID NO: 1903 - RNA, 20 nt, Artificial Sequence
  spacer sequence ATCN PAM
auuggaaaggaagaaaaaag

SEQ ID NO: 1904 - RNA, 20 nt, Artificial Sequence
  spacer sequence ATCN PAM
cuaugagcuaaaugucuguc

SEQ ID NO: 1905 - RNA, 20 nt, Artificial Sequence
  spacer sequence ATCN PAM
auucugucuauagaggguua

SEQ ID NO: 1906 - RNA, 20 nt, Artificial Sequence
  spacer sequence ATCN PAM
aaagacuguuuuuccuccuc

SEQ ID NO: 1907 - RNA, 20 nt, Artificial Sequence
  spacer sequence ATCN PAM
uguacaguuuuauuuuauaa

SEQ ID NO: 1908 - RNA, 20 nt, Artificial Sequence
  spacer sequence ATCN PAM
guauggggcaauacuauugc

SEQ ID NO: 1909 - RNA, 20 nt, Artificial Sequence
  spacer sequence ATCN PAM
ugcauucaaacggugagaac

SEQ ID NO: 1910 - RNA, 20 nt, Artificial Sequence
  spacer sequence ATCN PAM
caugggacuagaaaaaaauc

SEQ ID NO: 1911 - RNA, 20 nt, Artificial Sequence
  spacer sequence ATCN PAM
uacagggaguggggcuggag

SEQ ID NO: 1912 - RNA, 20 nt, Artificial Sequence
  spacer sequence ATCN PAM
cccuccagccccacucccug

SEQ ID NO: 1913 - RNA, 20 nt, Artificial Sequence
  spacer sequence ATCN PAM
uuauucaacacucgaucacu

SEQ ID NO: 1914 - RNA, 20 nt, Artificial Sequence
  spacer sequence ATCN PAM
aguguugaauaaugauauaa

SEQ ID NO: 1915 - RNA, 20 nt, Artificial Sequence
  spacer sequence ATCN PAM
cugugccauuuuuucaugug

SEQ ID NO: 1916 - RNA, 20 nt, Artificial Sequence
  spacer sequence ATCN PAM
uacaaauuucacauuuguaa

SEQ ID NO: 1917 - RNA, 20 nt, Artificial Sequence
  spacer sequence ATCN PAM
cacuguccacaggagaagcc

SEQ ID NO: 1918 - RNA, 20 nt, Artificial Sequence
  spacer sequence ATCN PAM
cggggcgcagcggcacggga

SEQ ID NO: 1919 - RNA, 20 nt, Artificial Sequence
  spacer sequence ATCN PAM
cuccguccagcuccccgggc

SEQ ID NO: 1920 - RNA, 20 nt, Artificial Sequence
  spacer sequence ATCN PAM
ccuuuugccuccucgucgga

SEQ ID NO: 1921 - RNA, 20 nt, Artificial Sequence
  spacer sequence ATCN PAM
cuuccuuagcuucggagacu

SEQ ID NO: 1922 - RNA, 20 nt, Artificial Sequence
  spacer sequence ATCN PAM
uugagcugccuggaggccgc

SEQ ID NO: 1923 - RNA, 20 nt, Artificial Sequence
  spacer sequence ATCN PAM
cggccgggggcaggucgaac

SEQ ID NO: 1924 - RNA, 20 nt, Artificial Sequence
  spacer sequence ATCN PAM
agcucgagaaggaguucgac

SEQ ID NO: 1925 - RNA, 20 nt, Artificial Sequence
  spacer sequence ATCN PAM
ucuaugcgguccgacucgcc

SEQ ID NO: 1926 - RNA, 20 nt, Artificial Sequence
  spacer sequence ATCN PAM
cggagaacggggacgaggag

SEQ ID NO: 1927 - RNA, 20 nt, Artificial Sequence
  spacer sequence ATCN PAM
gguuggggucguucucgcuc

SEQ ID NO: 1928 - RNA, 20 nt, Artificial Sequence
  spacer sequence ATCN PAM
ucccccaugacggucaaguc

SEQ ID NO: 1929 - RNA, 20 nt, Artificial Sequence
  spacer sequence ATCN PAM
gccccuccucccucccagcc

SEQ ID NO: 1930 - RNA, 20 nt, Artificial Sequence
  spacer sequence ATCN PAM
auggcgggaggcuccauagc

SEQ ID NO: 1931 - RNA, 20 nt, Artificial Sequence
  spacer sequence ATCN PAM
aauggcuauggagccucccg

SEQ ID NO: 1932 - RNA, 20 nt, Artificial Sequence
  spacer sequence ATCN PAM
cccgagugccuuugacaggg

SEQ ID NO: 1933 - RNA, 20 nt, Artificial Sequence
  spacer sequence ATCN PAM
cuuccgcccccaggcgcucu

SEQ ID NO: 1934 - RNA, 20 nt, Artificial Sequence
  spacer sequence ATCN PAM
cuuggacccccaccgcauag

SEQ ID NO: 1935 - RNA, 20 nt, Artificial Sequence
  spacer sequence ATCN PAM
agagaggcuuccggccuggc

SEQ ID NO: 1936 - RNA, 20 nt, Artificial Sequence
  spacer sequence ATCN PAM
guaucgagagaggcuuccgg

SEQ ID NO: 1937 - RNA, 20 nt, Artificial Sequence
  spacer sequence ATCN PAM
ugguauucuuagcagguuaa

SEQ ID NO: 1938 - RNA, 20 nt, Artificial Sequence
  spacer sequence ATCN PAM
cauggagagguggcugggaa

SEQ ID NO: 1939 - RNA, 20 nt, Artificial Sequence
  spacer sequence ATCN PAM
cuucaggacuaggugcagaa

SEQ ID NO: 1940 - RNA, 20 nt, Artificial Sequence
  spacer sequence ATCN PAM
acuuagaaagcgaacacgga

SEQ ID NO: 1941 - RNA, 20 nt, Artificial Sequence
  spacer sequence ATCN PAM
augaguguucugugcguguu

SEQ ID NO: 1942 - RNA, 20 nt, Artificial Sequence
  spacer sequence ATCN PAM
uuaccugcaaaauaauacaa

SEQ ID NO: 1943 - RNA, 20 nt, Artificial Sequence
  spacer sequence ATCN PAM
auguuuaaucacugaggcgg

SEQ ID NO: 1944 - RNA, 20 nt, Artificial Sequence
  spacer sequence ATCN PAM
cugaggcgggcaucagcaau

SEQ ID NO: 1945 - RNA, 20 nt, Artificial Sequence
  spacer sequence ATCN PAM
gcaauugcuuauuuauguuc

SEQ ID NO: 1946 - RNA, 20 nt, Artificial Sequence
  spacer sequence ATCN PAM
auuggaccaauauuuacugg

SEQ ID NO: 1947 - RNA, 20 nt, Artificial Sequence
  spacer sequence ATCN PAM
uccugccauuaaacucaguu

SEQ ID NO: 1948 - RNA, 20 nt, Artificial Sequence
  spacer sequence ATCN PAM
aauccccaaagcagaaaaau

SEQ ID NO: 1949 - RNA, 20 nt, Artificial Sequence
  spacer sequence ATCN PAM
ccaaagcagaaaaauccuga

SEQ ID NO: 1950 - RNA, 20 nt, Artificial Sequence
  spacer sequence ATCN PAM
ugaccaguucuggcuugagg

SEQ ID NO: 1951 - RNA, 20 nt, Artificial Sequence
  spacer sequence ATCN PAM
ucaagccagaacuggucagg

SEQ ID NO: 1952 - RNA, 20 nt, Artificial Sequence
  spacer sequence ATCN PAM
gcuguaguuuggggcaagcc

SEQ ID NO: 1953 - RNA, 20 nt, Artificial Sequence
  spacer sequence ATCN PAM
caucuccaugugccucuguu

SEQ ID NO: 1954 - RNA, 20 nt, Artificial Sequence
  spacer sequence ATCN PAM
ccaugugccucuguuuccuc

SEQ ID NO: 1955 - RNA, 20 nt, Artificial Sequence
  spacer sequence ATCN PAM
cagcuuucuauuccccccug

SEQ ID NO: 1956 - RNA, 20 nt, Artificial Sequence
  spacer sequence ATCN PAM
aaaaaggggaagaaggucaa

SEQ ID NO: 1957 - RNA, 20 nt, Artificial Sequence
  spacer sequence ATCN PAM
uuagggccauagaacauugu

SEQ ID NO: 1958 - RNA, 20 nt, Artificial Sequence
  spacer sequence ATCN PAM
acaauuaguguguuucaggc

SEQ ID NO: 1959 - RNA, 20 nt, Artificial Sequence
  spacer sequence ATCN PAM
ucccacagucugggguguga

SEQ ID NO: 1960 - RNA, 20 nt, Artificial Sequence
  spacer sequence ATCN PAM
gugagucccaauuuugguuc

SEQ ID NO: 1961 - RNA, 20 nt, Artificial Sequence
  spacer sequence ATCN PAM
caaagaauguuuaaaaaauc

SEQ ID NO: 1962 - RNA, 20 nt, Artificial Sequence
  spacer sequence ATCN PAM
gaaagaaaaacuucauucag

SEQ ID NO: 1963 - RNA, 20 nt, Artificial Sequence
  spacer sequence ATCN PAM
gaaugaaguuuuucuuucag

SEQ ID NO: 1964 - RNA, 20 nt, Artificial Sequence
  spacer sequence ATCN PAM
guuaaaucugaaugaaguuu

SEQ ID NO: 1965 - RNA, 20 nt, Artificial Sequence
  spacer sequence ATCN PAM
aaucuuuaggaguugucccc

SEQ ID NO: 1966 - RNA, 20 nt, Artificial Sequence
  spacer sequence ATCN PAM
uuaggaguugucccccgguc

SEQ ID NO: 1967 - RNA, 20 nt, Artificial Sequence
  spacer sequence ATCN PAM
uaguuuaaggaacaguuaaa

SEQ ID NO: 1968 - RNA, 20 nt, Artificial Sequence
  spacer sequence ATCN PAM
uccuccucauuguuuugaga

SEQ ID NO: 1969 - RNA, 20 nt, Artificial Sequence
  spacer sequence ATCN PAM
ugcgcccucggcugggacuc

SEQ ID NO: 1970 - RNA, 20 nt, Artificial Sequence
  spacer sequence ATCN PAM
uucuguuucuuucucaacug

SEQ ID NO: 1971 - RNA, 20 nt, Artificial Sequence
  spacer sequence ATCN PAM
ccccaaaugaaauauuuugu

SEQ ID NO: 1972 - RNA, 20 nt, Artificial Sequence
  spacer sequence ATCN PAM
ccccauauauauuuaauuua

SEQ ID NO: 1973 - RNA, 20 nt, Artificial Sequence
  spacer sequence ATCN PAM
ucguccuuuggcuaccauua

SEQ ID NO: 1974 - RNA, 20 nt, Artificial Sequence
  spacer sequence ATCN PAM
cugggaaguuuuguuuuucu

SEQ ID NO: 1975 - RNA, 20 nt, Artificial Sequence
  spacer sequence ATCN PAM
accagggagguuaagaguga

SEQ ID NO: 1976 - RNA, 20 nt, Artificial Sequence
  spacer sequence ATCN PAM
auuauaugaugccuccauuu

SEQ ID NO: 1977 - RNA, 20 nt, Artificial Sequence
  spacer sequence ATCN PAM
uauaauugauuaauuccuca

SEQ ID NO: 1978 - RNA, 20 nt, Artificial Sequence
  spacer sequence ATCN PAM
cacucaauauaucucacucc

SEQ ID NO: 1979 - RNA, 20 nt, Artificial Sequence
  spacer sequence ATCN PAM
cacuccuggguaaaucucuu

SEQ ID NO: 1980 - RNA, 20 nt, Artificial Sequence
  spacer sequence ATCN PAM
cuuaaacaagauuagauggu

SEQ ID NO: 1981 - RNA, 20 nt, Artificial Sequence
  spacer sequence ATCN PAM
uguuuaagagauuuacccag

SEQ ID NO: 1982 - RNA, 20 nt, Artificial Sequence
  spacer sequence ATCN PAM
aaucuuguuuaagagauuua

SEQ ID NO: 1983 - RNA, 20 nt, Artificial Sequence
  spacer sequence ATCN PAM
uaccaucuaaucuuguuuaa

SEQ ID NO: 1984 - RNA, 20 nt, Artificial Sequence
  spacer sequence ATCN PAM
uucugccuuuuuucccccuu

SEQ ID NO: 1985 - RNA, 20 nt, Artificial Sequence
  spacer sequence ATCN PAM
cauuaucugccuauuuuugu

SEQ ID NO: 1986 - RNA, 20 nt, Artificial Sequence
  spacer sequence ATCN PAM
gccuauuuuuguuugccucc

SEQ ID NO: 1987 - RNA, 20 nt, Artificial Sequence
  spacer sequence ATCN PAM
gguuccaacuacaugauccu

SEQ ID NO: 1988 - RNA, 20 nt, Artificial Sequence
  spacer sequence ATCN PAM
uguaguuggaaccagauagu

SEQ ID NO: 1989 - RNA, 20 nt, Artificial Sequence
  spacer sequence ATCN PAM
ucuguggcuuccuccuuguc

SEQ ID NO: 1990 - RNA, 20 nt, Artificial Sequence
  spacer sequence ATCN PAM
agggaggacaaggaggaagc

SEQ ID NO: 1991 - RNA, 20 nt, Artificial Sequence
  spacer sequence ATCN PAM
cugggugacuaucauuccua

SEQ ID NO: 1992 - RNA, 20 nt, Artificial Sequence
  spacer sequence ATCN PAM
uuccuauuuagccugacgau

SEQ ID NO: 1993 - RNA, 20 nt, Artificial Sequence
  spacer sequence ATCN PAM
ucaggcuaaauaggaaugau

SEQ ID NO: 1994 - RNA, 20 nt, Artificial Sequence
  spacer sequence ATCN PAM
gaguugggcaaguaaaaaga

SEQ ID NO: 1995 - RNA, 20 nt, Artificial Sequence
  spacer sequence ATCN PAM
uuuuacuugcccaacucaga

SEQ ID NO: 1996 - RNA, 20 nt, Artificial Sequence
  spacer sequence ATCN PAM
gacaaaucuuuuuacuugcc

SEQ ID NO: 1997 - RNA, 20 nt, Artificial Sequence
  spacer sequence ATCN PAM
aaguccuuaacacguucauc

SEQ ID NO: 1998 - RNA, 20 nt, Artificial Sequence
  spacer sequence ATCN PAM
cuccaaaugccuuaaaauua

SEQ ID NO: 1999 - RNA, 20 nt, Artificial Sequence
  spacer sequence ATCN PAM
auugaaauccaggacuagac

SEQ ID NO: 2000 - RNA, 20 nt, Artificial Sequence
  spacer sequence ATCN PAM
auguuuuauaagguaaaaua

SEQ ID NO: 2001 - RNA, 20 nt, Artificial Sequence
  spacer sequence ATCN PAM
aggacuagacucauaauuag

SEQ ID NO: 2002 - RNA, 20 nt, Artificial Sequence
  spacer sequence ATCN PAM
augacuacaauucauggcac

SEQ ID NO: 2003 - RNA, 20 nt, Artificial Sequence
  spacer sequence ATCN PAM
guggcauacagcacuacauc

SEQ ID NO: 2004 - RNA, 20 nt, Artificial Sequence
  spacer sequence ATCN PAM
aggaucucauuuguauccuu

SEQ ID NO: 2005 - RNA, 20 nt, Artificial Sequence
  spacer sequence ATCN PAM
uugauguagugcuguaugcc

SEQ ID NO: 2006 - RNA, 20 nt, Artificial Sequence
  spacer sequence ATCN PAM
cauuuguauccuuucaaaaa

SEQ ID NO: 2007 - RNA, 20 nt, Artificial Sequence
  spacer sequence ATCN PAM
uuucaaaaaggcuuaaauga

SEQ ID NO: 2008 - RNA, 20 nt, Artificial Sequence
  spacer sequence ATCN PAM
uaaacuuuuuuucagagcca

SEQ ID NO: 2009 - RNA, 20 nt, Artificial Sequence
  spacer sequence ATCN PAM
cauaacuggcucugaaaaaa

SEQ ID NO: 2010 - RNA, 20 nt, Artificial Sequence
  spacer sequence ATCN PAM
ugcuacaguauguuaacacu

SEQ ID NO: 2011 - RNA, 20 nt, Artificial Sequence
  spacer sequence ATCN PAM
caguguuaacauacuguagc

SEQ ID NO: 2012 - RNA, 20 nt, Artificial Sequence
  spacer sequence ATCN PAM
uccccucucucucauacauc

SEQ ID NO: 2013 - RNA, 20 nt, Artificial Sequence
  spacer sequence ATCN PAM
ggucagagaaaauggcauuu

SEQ ID NO: 2014 - RNA, 20 nt, Artificial Sequence
  spacer sequence ATCN PAM
uauaaugagcauacaacaua

SEQ ID NO: 2015 - RNA, 20 nt, Artificial Sequence
  spacer sequence ATCN PAM
cauuuuaguauucccaucaa

SEQ ID NO: 2016 - RNA, 20 nt, Artificial Sequence
  spacer sequence ATCN PAM
acuagauauucuagaucaug

SEQ ID NO: 2017 - RNA, 20 nt, Artificial Sequence
  spacer sequence ATCN PAM
aguugaugggaauacuaaaa

SEQ ID NO: 2018 - RNA, 20 nt, Artificial Sequence
  spacer sequence ATCN PAM
agaauaucuaguugauggga

SEQ ID NO: 2019 - RNA, 20 nt, Artificial Sequence
  spacer sequence ATCN PAM
ugagggcagcuaguguaauc

SEQ ID NO: 2020 - RNA, 20 nt, Artificial Sequence
  spacer sequence ATCN PAM
uaaugucaaugagaagggcu

SEQ ID NO: 2021 - RNA, 20 nt, Artificial Sequence
  spacer sequence ATCN PAM
uaacagcccuucucauugac

SEQ ID NO: 2022 - RNA, 20 nt, Artificial Sequence
  spacer sequence ATCN PAM
uuagucucaaucguaacagc

SEQ ID NO: 2023 - RNA, 20 nt, Artificial Sequence
  spacer sequence ATCN PAM
uuugcuauuaguggacuggu

SEQ ID NO: 2024 - RNA, 20 nt, Artificial Sequence
  spacer sequence ATCN PAM
guauuucacucagcucaugc

SEQ ID NO: 2025 - RNA, 20 nt, Artificial Sequence
  spacer sequence ATCN PAM
gugagcacuguaauauaaua

SEQ ID NO: 2026 - RNA, 20 nt, Artificial Sequence
  spacer sequence ATCN PAM
auaaauguguuacuugccau

SEQ ID NO: 2027 - RNA, 20 nt, Artificial Sequence
  spacer sequence ATCN PAM
uugaugauuuagaaagacug

SEQ ID NO: 2028 - RNA, 20 nt, Artificial Sequence
  spacer sequence ATCN PAM
aagauguuaugaacaaagua

SEQ ID NO: 2029 - RNA, 20 nt, Artificial Sequence
  spacer sequence ATCN PAM
ucaaagauguuaugaacaaa

SEQ ID NO: 2030 - RNA, 20 nt, Artificial Sequence
  spacer sequence ATCN PAM
auuccagucuuucuaaauca

SEQ ID NO: 2031 - RNA, 20 nt, Artificial Sequence
  spacer sequence ATCN PAM
auguagcccuaauuuugcca

SEQ ID NO: 2032 - RNA, 20 nt, Artificial Sequence
  spacer sequence ATCN PAM
auaaaucaauguagcccuaa

SEQ ID NO: 2033 - RNA, 20 nt, Artificial Sequence
  spacer sequence ATCN PAM
gaguaaaugaagaauauuau

SEQ ID NO: 2034 - RNA, 20 nt, Artificial Sequence
  spacer sequence ATCN PAM
acuucucaauuugagagccu

SEQ ID NO: 2035 - RNA, 20 nt, Artificial Sequence
  spacer sequence ATCN PAM
ccguaaaugcccaaugaggc

SEQ ID NO: 2036 - RNA, 20 nt, Artificial Sequence
  spacer sequence ATCN PAM
aaacaauccccguaaaugcc

SEQ ID NO: 2037 - RNA, 20 nt, Artificial Sequence
  spacer sequence ATCN PAM
aaaggguuaaaaucagcuau

SEQ ID NO: 2038 - RNA, 20 nt, Artificial Sequence
  spacer sequence ATCN PAM
gcuauuagcccaccuacugg

SEQ ID NO: 2039 - RNA, 20 nt, Artificial Sequence
  spacer sequence ATCN PAM
caugacuuuuucacauuggu

SEQ ID NO: 2040 - RNA, 20 nt, Artificial Sequence
  spacer sequence ATCN PAM
aagccucaagauucagaaga

SEQ ID NO: 2041 - RNA, 20 nt, Artificial Sequence
  spacer sequence ATCN PAM
ugaggcuuagaucacaugac

SEQ ID NO: 2042 - RNA, 20 nt, Artificial Sequence
  spacer sequence ATCN PAM
acuagauuguaacucuggga

SEQ ID NO: 2043 - RNA, 20 nt, Artificial Sequence
  spacer sequence ATCN PAM
aguggauaauagagcuaggc

SEQ ID NO: 2044 - RNA, 20 nt, Artificial Sequence
  spacer sequence ATCN PAM
cagaguuacaaucuagugga

SEQ ID NO: 2045 - RNA, 20 nt, Artificial Sequence
  spacer sequence ATCN PAM
aaugacuaucccagaguuac

SEQ ID NO: 2046 - RNA, 20 nt, Artificial Sequence
  spacer sequence ATCN PAM
guaaaaugagcauaaaaaca

SEQ ID NO: 2047 - RNA, 20 nt, Artificial Sequence
  spacer sequence ATCN PAM
ggucgaaugugaaugugagu

SEQ ID NO: 2048 - RNA, 20 nt, Artificial Sequence
  spacer sequence ATCN PAM
ccccugguaguaaugaaaac

SEQ ID NO: 2049 - RNA, 20 nt, Artificial Sequence
  spacer sequence ATCN PAM
gguuuguucuagagcuuucu

SEQ ID NO: 2050 - RNA, 20 nt, Artificial Sequence
  spacer sequence ATCN PAM
agcucagacuuuccuaccag

SEQ ID NO: 2051 - RNA, 20 nt, Artificial Sequence
  spacer sequence ATCN PAM
aacucccagcccucaggaag

SEQ ID NO: 2052 - RNA, 20 nt, Artificial Sequence
  spacer sequence ATCN PAM
cuucccuccaaaaguggcuc

SEQ ID NO: 2053 - RNA, 20 nt, Artificial Sequence
  spacer sequence ATCN PAM
ggggccugcauggggcugug

SEQ ID NO: 2054 - RNA, 20 nt, Artificial Sequence
  spacer sequence ATCN PAM
gugaccuaacccaggcuuag

SEQ ID NO: 2055 - RNA, 20 nt, Artificial Sequence
  spacer sequence ATCN PAM
gcucccuucccccaagcugg

SEQ ID NO: 2056 - RNA, 20 nt, Artificial Sequence
  spacer sequence ATCN PAM
uagguaacaaagaguuauug

SEQ ID NO: 2057 - RNA, 20 nt, Artificial Sequence
  spacer sequence ATCN PAM
ggucucagggugcaugcccu

SEQ ID NO: 2058 - RNA, 20 nt, Artificial Sequence
  spacer sequence ATCN PAM
gaagagcagggcaugcaccc

SEQ ID NO: 2059 - RNA, 20 nt, Artificial Sequence
  spacer sequence ATCN PAM
uguaaaugguaucugaagag

SEQ ID NO: 2060 - RNA, 20 nt, Artificial Sequence
  spacer sequence ATCN PAM
cccucccaucuaaaaacagu

SEQ ID NO: 2061 - RNA, 20 nt, Artificial Sequence
  spacer sequence ATCN PAM
aaaaacagucccccuuagag

SEQ ID NO: 2062 - RNA, 20 nt, Artificial Sequence
  spacer sequence ATCN PAM
ugcucuuuguuauucucucu

SEQ ID NO: 2063 - RNA, 20 nt, Artificial Sequence
  spacer sequence ATCN PAM
aauuuuuauuugaaaguaaa

SEQ ID NO: 2064 - RNA, 20 nt, Artificial Sequence
  spacer sequence ATCN PAM
cugcccacccccuaaccuuu

SEQ ID NO: 2065 - RNA, 20 nt, Artificial Sequence
  spacer sequence ATCN PAM
ugcauggcuaaaagguuagg

SEQ ID NO: 2066 - RNA, 20 nt, Artificial Sequence
  spacer sequence ATCN PAM
uucagaaaacauuuguauaa

SEQ ID NO: 2067 - RNA, 20 nt, Artificial Sequence
  spacer sequence ATCN PAM
ccaccaccaccaccaccacc

SEQ ID NO: 2068 - RNA, 20 nt, Artificial Sequence
  spacer sequence ATCN PAM
ucaccaccaccaccaccacc

SEQ ID NO: 2069 - RNA, 20 nt, Artificial Sequence
  spacer sequence ATCN PAM
ccaccaccaccaccacuacc

SEQ ID NO: 2070 - RNA, 20 nt, Artificial Sequence
  spacer sequence ATCN PAM
ccaccaacaccaccaucacc

SEQ ID NO: 2071 - RNA, 20 nt, Artificial Sequence
  spacer sequence ATCN PAM
ccaccaccaccaccaccauc

SEQ ID NO: 2072 - RNA, 20 nt, Artificial Sequence
  spacer sequence ATCN PAM
ccaccaccaccaccaccauc

SEQ ID NO: 2073 - RNA, 20 nt, Artificial Sequence
  spacer sequence ATCN PAM
ccaccaccaucaccaccacc

SEQ ID NO: 2074 - RNA, 20 nt, Artificial Sequence
  spacer sequence ATCN PAM
ccgccaucaccaccaccauc

SEQ ID NO: 2075 - RNA, 20 nt, Artificial Sequence
  spacer sequence ATCN PAM
ccaguaccaucaccgccauc

SEQ ID NO: 2076 - RNA, 20 nt, Artificial Sequence
  spacer sequence ATCN PAM
cuaccaccaccaccaucacc

SEQ ID NO: 2077 - RNA, 20 nt, Artificial Sequence
  spacer sequence ATCN PAM
ccaccaccaccauuaccacc

SEQ ID NO: 2078 - RNA, 20 nt, Artificial Sequence
  spacer sequence ATCN PAM
cuaccaccaccaccaccauc

SEQ ID NO: 2079 - RNA, 20 nt, Artificial Sequence
  spacer sequence ATCN PAM
ccaccaccaccauuaccacc

SEQ ID NO: 2080 - RNA, 20 nt, Artificial Sequence
  spacer sequence ATCN PAM
cuaccaccaccaccaccauc

SEQ ID NO: 2081 - RNA, 20 nt, Artificial Sequence
  spacer sequence ATCN PAM
ccaccaccaccauuaccacc

SEQ ID NO: 2082 - RNA, 20 nt, Artificial Sequence
  spacer sequence ATCN PAM
ccaccaucaccaccaccacc

SEQ ID NO: 2083 - RNA, 20 nt, Artificial Sequence
  spacer sequence ATCN PAM
ucaccaccaucaccaccacc

SEQ ID NO: 2084 - RNA, 20 nt, Artificial Sequence
  spacer sequence ATCN PAM
ccaucaucaccaccaucacc

SEQ ID NO: 2085 - RNA, 20 nt, Artificial Sequence
  spacer sequence ATCN PAM
ccaccaguaccaucaccauc

SEQ ID NO: 2086 - RNA, 20 nt, Artificial Sequence
  spacer sequence ATCN PAM
ccaucaccaccaguaccauc

SEQ ID NO: 2087 - RNA, 20 nt, Artificial Sequence
  spacer sequence ATCN PAM
ccaucaccaucaccaccagu

SEQ ID NO: 2088 - RNA, 20 nt, Artificial Sequence
  spacer sequence ATCN PAM
ccaguaccaucaccaucacc

SEQ ID NO: 2089 - RNA, 20 nt, Artificial Sequence
  spacer sequence ATCN PAM
cuaccaccaccaccaucacc

SEQ ID NO: 2090 - RNA, 20 nt, Artificial Sequence
  spacer sequence ATCN PAM
ccaccaccaccauuaccacc

SEQ ID NO: 2091 - RNA, 20 nt, Artificial Sequence
  spacer sequence ATCN PAM
ccaccaccaccauuaccacc

SEQ ID NO: 2092 - RNA, 20 nt, Artificial Sequence
  spacer sequence ATCN PAM
ccaccaucaccaccaccacc

SEQ ID NO: 2093 - RNA, 20 nt, Artificial Sequence
  spacer sequence ATCN PAM
ucaccaccaucaccaccacc

SEQ ID NO: 2094 - RNA, 20 nt, Artificial Sequence
  spacer sequence ATCN PAM
ccaucaucaccaccaucacc

SEQ ID NO: 2095 - RNA, 20 nt, Artificial Sequence
  spacer sequence ATCN PAM
ccaccaguaccaucaccauc

SEQ ID NO: 2096 - RNA, 20 nt, Artificial Sequence
  spacer sequence ATCN PAM
ccaucaccaccaguaccauc

SEQ ID NO: 2097 - RNA, 20 nt, Artificial Sequence
  spacer sequence ATCN PAM
ccaucaccaucaccaccagu

SEQ ID NO: 2098 - RNA, 20 nt, Artificial Sequence
  spacer sequence ATCN PAM
ccaguaccaucaccaucacc

SEQ ID NO: 2099 - RNA, 20 nt, Artificial Sequence
  spacer sequence ATCN PAM
cuaccaccaccaccaucacc

SEQ ID NO: 2100 - RNA, 20 nt, Artificial Sequence
  spacer sequence ATCN PAM
ccaccaccaccauuaccacc

SEQ ID NO: 2101 - RNA, 108 nt, Artificial Sequence
  gNA Variant Scaffold
uacuggcgcuuuuaucucauuacuuugagagccaucaccagcgacuaugucguauggguaaagcgcaggugggacgaccucucggucguccuaucugaagcaucaaag

SEQ ID NO: 2102 - RNA, 99 nt, Artificial Sequence
  gNA Variant Scaffold
uacuggcgcuuuuaucucauuacuuugagagccaucaccagcgacuaugucguauggguaaagcgcugcucgacgcguccucgagcagaagcaucaaag

SEQ ID NO: 2103 - RNA, 97 nt, Artificial Sequence
  gNA Variant Scaffold
uacuggcgcuuuuaucucauuacuuugagagccaucaccagcgacuaugucguauggguaaagcgcugcucgcuccguucgagcagaagcaucaaag

SEQ ID NO: 2104 - RNA, 91 nt, Artificial Sequence
  gNA Variant Scaffold
guacuggcgcuuuuaucucauuacuuugagagccaucaccagcgacuaugucguauggguaaagcgcccucuucggagggaagcaucaaag

SEQ ID NO: 2105 - RNA, 99 nt, Artificial Sequence
  gNA Variant Scaffold
uacuggcgcuuuuaucucauuacuuugagagccaucaccagcgacuaugucguauggguaaagcgcaggaguuucuauggaaacccugaagcaucaaag

SEQ ID NO: 2106 - RNA, 99 nt, Artificial Sequence
  gNA Variant Scaffold
guacuggcgccuuuaucucauuacuuugagagccaucaccagcgacuaugucguauggguaaagcgcuuacggacuucgguccguaagaagcaucaaag

SEQ ID NO: 2107 - RNA, 90 nt, Artificial Sequence
  gNA Variant Scaffold
uacuggcgcuuuuaucucauuacuuugagagccaucaccagcgacuaugucguauggguaaagcgcugcgcuugcgcagaagcaucaaag

SEQ ID NO: 2108 - RNA, 108 nt, Artificial Sequence
  gNA Variant Scaffold
uacuggcgcuuuuaucugauuacuuugagagccaucaccagcgacuaugucguauggguaaagcgcuuauuuaucggagagaaauccgauaaauaagaagcaucaaag

SEQ ID NO: 2109 - RNA, 108 nt, Artificial Sequence
  gNA Variant Scaffold
uacuggcgcuuuuaucgcauuacuuugagagccaucaccagcgacuaugucguauggguaaagcgcuuauuuaucggagagaaauccgauaaauaagaagcaucaaag

SEQ ID NO: 2110 - RNA, 110 nt, Artificial Sequence
  gNA Variant Scaffold
uacuggcgcuuuuaucucauuacuuugagagccaucaccagcgacuaugucguauggguaaagcgcuuauuuaucggagacuucgguccgauaaauaagaagcaucaaag

SEQ ID NO: 2111 - RNA, 97 nt, Artificial Sequence
  gNA Variant Scaffold
uacuggcgcuuuuaucucauuacuuugagagccaucaccagcgacuaugucguauggguaaagcgcacaugaggauuacccaugugaagcaucaaag

SEQ ID NO: 2112 - RNA, 106 nt, Artificial Sequence
  gNA Variant Scaffold
gcuggcgcuuuuaucucauuacuuugagagccaucaccagcgacuaugucguauggguaaagcgcuuauuuaucgugagaaauccgauaaauaagaagcaucaaag

SEQ ID NO: 2113 - RNA, 96 nt, Artificial Sequence
  gNA Variant Scaffold
uacuggcgcuuuuaucucauuacuuugagagccaucaccagcgacuaugucguauggguaaagcgcugcaugucuaagacagcagaagcaucaaag

SEQ ID NO: 2114 - RNA, 90 nt, Artificial Sequence
  gNA Variant Scaffold
uacuggcgcuuuuaucucauuacuuugagagccaucaccagcgacuaugucguauggguaaagcgcagggcuucggccgaagcaucaaag

SEQ ID NO: 2115 - RNA, 98 nt, Artificial Sequence
  gNA Variant Scaffold
uacuggcgcuuuuaucucauuacuuugagagccaucaccagcgacuaugucguauggguaaagcgcaauccauugcacuccggauugaagcaucaaag

SEQ ID NO: 2116 - RNA, 108 nt, Artificial Sequence
  gNA Variant Scaffold
uacuggcgcuuuucucgcauuacuuugagagccaucaccagcgacuaugucguauggguaaagcgcuuauuuaucggagagaaauccgauaaauaagaagcaucaaag

SEQ ID NO: 2117 - RNA, 108 nt, Artificial Sequence
  gNA Variant Scaffold
uacuggcgcuuuuaucucauuacuuugagagccaucaccagcgacuaugucguauggguaaagcgcuuauuuaucggacuucgguccgauaaauaagaagcaucaaag

SEQ ID NO: 2118 - RNA, 100 nt, Artificial Sequence
  gNA Variant Scaffold
uacuggcgcuuuuaucucauuacuuugagagccaucaccagcgacuaugucguauggguaaagcgcugcucguuugcggcuacgagcagaagcaucaaag

SEQ ID NO: 2119 - RNA, 100 nt, Artificial Sequence
  gNA Variant Scaffold
uacuggcgcuuuuaucucauuacuuugagagccaucaccagcgacuaugucguauggguaaagcgcuuauuuaucgagagauaaauaagaagcaucaaag

SEQ ID NO: 2120 - RNA, 107 nt, Artificial Sequence
  gNA Variant Scaffold
uacggcgcuuuuaucucauuacuuugagagccaucaccagcgacuaugucguauggguaaagcgcuuauuuaucggagagaaauccgauaaauaagaagcaucaaag

SEQ ID NO: 2121 - RNA, 99 nt, Artificial Sequence
  gNA Variant Scaffold
uacuggcgccuuuuaucucauuacuuugagagccaucaccagcgacuaugucguauggguaaagcgcuuacggacuucgguccguaagaagcaucaaag

SEQ ID NO: 2122 - RNA, 108 nt, Artificial Sequence
  gNA Variant Scaffold
uacuggcgcuuuuaucucauuacuuugagagccaucaccagcgacuaugucguaucgguaaagcgcuuauuuaucggagagaaauccgauaaauaagaagcaucaaag

SEQ ID NO: 2123 - RNA, 108 nt, Artificial Sequence
  gNA Variant Scaffold
uacuggcgccuuuaucucauuacuuugagagccaucaccagcgacuaugucguauggguaaagcgcuuauuuaucggacuucgguccgauaaauaagaagcaucaaag

SEQ ID NO: 2124 - RNA, 105 nt, Artificial Sequence
  gNA Variant Scaffold
uacuggcgcuuuuaucucauuacuuugagagccaucaccagcgacuaugucguauggguaaagcgcuuauuuaucgagaaauccgauaaauaagaagcaucaaag

SEQ ID NO: 2125 - RNA, 103 nt, Artificial Sequence
  gNA Variant Scaffold
gcgcuuuuaucucauuacuuugagagccaucaccagcgacuaugucguauggguaaagcgcuuauuuaucggagagaaauccgauaaauaagaagcaucaaag

SEQ ID NO: 2126 - RNA, 103 nt, Artificial Sequence
  gNA Variant Scaffold
uacuggcgcuuuuaucucauuacuuugagagccaucaccagcgacuaugucguauggguaaagcgcuuauuuaucggagagagauaaauaagaagcaucaaag

SEQ ID NO: 2127 - RNA, 108 nt, Artificial Sequence
  gNA Variant Scaffold
uacuggcgcuuuuaucucauuacuuuggagagccaucaccagcgacuaugucguauggguaaagcgcuuauuuaucggagaguauccgauaaauaagaagcaucaaag

SEQ ID NO: 2128 - RNA, 109 nt, Artificial Sequence
  gNA Variant Scaffold
uacuggcgcuuuuaucucauuacuuugagagccaucaccagcgacuauguucguauggguaaagcgcuuauuuaucggagagaaauccgauaaauaagaagcaucaaag

SEQ ID NO: 2129 - RNA, 105 nt, Artificial Sequence
  gNA Variant Scaffold
agcgcuuuuaucucauuacuuugagagccaucaccagcgacuaugucguauggguaaagcgcuuauuuaucggagagaaaugccgauaaauaagaagcaucaaag

SEQ ID NO: 2130 - RNA, 109 nt, Artificial Sequence
  gNA Variant Scaffold
uacuggcgcuuuuaucucauuacuuugagagccaucaccagcgacuaugucguauggguaaagcgcuuauuuaucggagagaaauccgauaaaauaagaagcaucaaag

SEQ ID NO: 2131 - RNA, 109 nt, Artificial Sequence
  gNA Variant Scaffold
uacuggcgcuuuuaucucauuacuuugagagccaucaccagcgacuaugucguauggguaaagcgcuuauuguaucggagagaaauccgauaaauaagaagcaucaaag

SEQ ID NO: 2132 - RNA, 102 nt, Artificial Sequence
  gNA Variant Scaffold
gcgcuuuuaucucauuacuuugagagccaucaccagcgacuaugucguauggguaaagcgcuuauuuaucggacuucgguccgauaaauaagcgcaucaaag

SEQ ID NO: 2133 - RNA, 108 nt, Artificial Sequence
  gNA Variant Scaffold
uacuggcgcuuuucucucauuacuuugagagccaucaccagcgacuaugucguauggguaaagcgcuuauuuaucggagagaaauccgauaaauaagaagcaucaaag

SEQ ID NO: 2134 - RNA, 106 nt, Artificial Sequence
  gNA Variant Scaffold
guggcgcuuuuaucucauuacuuugagagccaucaccagcgacuaugucguauggguaaagcgcuuauuuaucggagagaaauccgauaaauaagaagcaucaaag

SEQ ID NO: 2135 - RNA, 110 nt, Artificial Sequence
  gNA Variant Scaffold
uacuggcgcuuuuaucucauuacuuugagagccaucaccagcgaccuuaugucguauggguaaagcgcuuauuuaucggagagaaauccgauaaauaagaagcaucaaag

SEQ ID NO: 2136 - RNA, 107 nt, Artificial Sequence
  gNA Variant Scaffold
gauggcgcuuuuaucucauuacuuugagagccaucaccagcgacuaugucguauggguaaagcgcuuauuuaucggacuucgguccgauaaauaagaagcaucaaag

SEQ ID NO: 2137 - RNA, 106 nt, Artificial Sequence
  gNA Variant Scaffold
uacuggcgcuuuuaucucauuacuuugagagccaucaccagcgacuaugucguauggguaaagcgcuuauuuaucggagagaaauccgauaaaagaagcaucaaag

SEQ ID NO: 2138 - RNA, 109 nt, Artificial Sequence
  gNA Variant Scaffold
uacuggcgcuuuuaucucauuacuuugagagccaucaccagcgaucuaugucguauggguaaagcgcuuauuuaucggagagaaauccgauaaauaagaagcaucaaag

SEQ ID NO: 2139 - RNA, 106 nt, Artificial Sequence
  gNA Variant Scaffold
uacuggcgcuuuuaucucauuacuuugagagccaucaccagcgacuaugucguauggguaaaggcuuauuuaucggagagaaauccgauaaaaagaagcaucaaag

SEQ ID NO: 2140 - RNA, 107 nt, Artificial Sequence
  gNA Variant Scaffold
uacuggcgcuuuuaucucauuacuuugagagccaucaccagcgacuaugucguauggguaaagcgcuuauuuaucggagagaaauccgauaaaaagaagcaucaaag

SEQ ID NO: 2141 - RNA, 107 nt, Artificial Sequence
  gNA Variant Scaffold
uacuggcgcuuuaucucauuacuuugagagccaucaccagcgacuaugucguauggguaaagcgcuuauuuaucggacuucgguccgauaaauaagaagcaucaaag

SEQ ID NO: 2142 - RNA, 98 nt, Artificial Sequence
  gNA Variant Scaffold
cggcgcuuuucucgcauuacuuugagagccaucaccagcgacuaugucguauggguaaagcgcuuauuguaucgagagauaaauaagaagcaucaaag

SEQ ID NO: 2143 - RNA, 107 nt, Artificial Sequence
  gNA Variant Scaffold
cacuggcgcuuuuaucucauuacuuugagagccaucaccagcgacuaugucguauggguaaagcgcuuauuuucggagagaaauccgauaaauaagaagcaucaaag

SEQ ID NO: 2144 - RNA, 106 nt, Artificial Sequence
  gNA Variant Scaffold
uacuggcgcuuuaucucauuacuuugagagccaucaccagcgacuucggucguauggguaaagcgcuuauguaucggcuucggccgauacauaagaagcaucaaag

SEQ ID NO: 2145 - RNA, 107 nt, Artificial Sequence
  gNA Variant Scaffold
uacuggcgcuuuuaucucauuacuuugagagccaucaccagcgacuucggucguauggguaaagcgcuuauguaucggcuucggccgauacauaagaagcaucaaag

SEQ ID NO: 2146 - RNA, 109 nt, Artificial Sequence
  gNA Variant Scaffold
uacuggcgcuuuuaucucauuacuuugagagccaucaccagcgacuaugucguaugggugaaagcgcuuauuuaucggagagaaauccgauaaauaagaagcaucaaag

SEQ ID NO: 2147 - RNA, 64 nt, Artificial Sequence
  gNA Variant Scaffold
uacuggcgcuuuuaucucauuacuuugagagccaucaccagcgacuucggucguauggguaaag

SEQ ID NO: 2148 - RNA, 62 nt, Artificial Sequence
  gNA Variant Scaffold
gaugggcuuuuaucucauuacuuugagagccaucaccagcgacuucggucguauggguaaag

SEQ ID NO: 2149 - RNA, 105 nt, Artificial Sequence
  gNA Variant Scaffold
gaugggcuuuuaucucauuacuuugagagccaucaccagcgacuucggucguauggguaaagcgcuuauuuaucggcuucggccgauaaauaagaagcaucaaag

SEQ ID NO: 2150 - RNA, 156 nt, Artificial Sequence
  gNA Variant Scaffold
uacuggcgcuuuuaucucauuacuuugagagccaucaccagcgacuaugucguauggguaaagcgcuacacugggaucgcugaauuagagaucggcguccuuucauucuauauacuuuggaguuuuaaaaugucucuaaguacagaagcaucaaag

SEQ ID NO: 2151 - RNA, 103 nt, Artificial Sequence
  gNA Variant Scaffold
ggcgcuuuuaucucauuacuuugagagccaucaccagcgacuucggucguauggguaaagcgcuuauuuaucggcuucggccgauaaauaagaagcaucaaag

SEQ ID NO: 2152 - RNA, 106 nt, Artificial Sequence
  gNA Variant Scaffold
gcuggcgcuuuuaucucauuacuuugagagccaucaccagcgacuucggucguauggguaaagcgcuuauuuaucggcuucggccgauaaauaagaagcaucaaag

SEQ ID NO: 2153 - RNA, 109 nt, Artificial Sequence
  gNA Variant Scaffold
uacuggcgcuuuuaucucauuacuuugagagccaucaccagcgacuucggucguauggguaaagcgcuuauuuaucggagagaaauccgauaaauaagaagcaucaaag

SEQ ID NO: 2154 - RNA, 112 nt, Artificial Sequence
  gNA Variant Scaffold
uacuggcgcuuuuaucucauuacuuugagagccaugcuccaccagcgacuaugucguauggguaaagcgcuuauuuaucggagagaaauccgauaaauaagaagcaucaaag

SEQ ID NO: 2155 - RNA, 97 nt, Artificial Sequence
  gNA Variant Scaffold
uacuggcgcuuuuaucucauuacuuugagagccaucaccagcgacuaugucguauggguaaagcgggguuaggguuaggguuagggaagcaucaaag

SEQ ID NO: 2156 - RNA, 96 nt, Artificial Sequence
  gNA Variant Scaffold
uacuggcgcuuuuaucucauuacuuugagagccaucaccagcgacuaugucguauggguaaagcggagggagggagggagagggaaagcaucaaag

SEQ ID NO: 2157 - RNA, 101 nt, Artificial Sequence
  gNA Variant Scaffold
uacuggcgcuuuuaucucauuacuuugagagccaucaccagcgacuaugucguauggguaaagcguuggguuaggguuaggguuagggaaaagcaucaaag

SEQ ID NO: 2158 - RNA, 91 nt, Artificial Sequence
  gNA Variant Scaffold
uacuggcgcuuuuaucucauuacuuugagagccaucaccagcgacuaugucguauggguaaagcgcagggcuucggccggaagcaucaaag

SEQ ID NO: 2159 - RNA, 103 nt, Artificial Sequence
  gNA Variant Scaffold
uacuggcgcuuuuaucucauuacuuugagagccaucaccagcgacuaugucguauggguaaagcgccugcucaguacgagaggaaccgcaggaagcaucaaag

SEQ ID NO: 2160 - RNA, 90 nt, Artificial Sequence
  gNA Variant Scaffold
uacuggcgcuuuuaucugauuacuuugagagccaucaccagcgacuaugucguauggguaaagcgcccucuucggagggaagcaucaaag

SEQ ID NO: 2161 - RNA, 98 nt, Artificial Sequence
  gNA Variant Scaffold
uacuggcgccuuuaucugauuacuuugagagccaucaccagcgacuaugucguauggguaaagcgcuuacggacuucgguccguaagaagcaucaaag

SEQ ID NO: 2162 - RNA, 98 nt, Artificial Sequence
  gNA Variant Scaffold
uacuggcgcuuuuaucugauuacuuugagagccaucaccagcgacuaugucguauggguaaagcgcggacgaccucucggucguccgaagcaucaaag

SEQ ID NO: 2163 - RNA, 108 nt, Artificial Sequence
  gNA Variant Scaffold
uacuggcgcuuuuaucugauuacuuugagagccaucaccagcgacuaugucguauggguaaagcgcaggugggacgaccucucggucguccuaucugaagcaucaaag

SEQ ID NO: 2164 - RNA, 99 nt, Artificial Sequence
  gNA Variant Scaffold
uacuggcgccuuuaucugcauuacuuugagagccaucaccagcgacuaugucguauggguaaagcgcuuacggacuucgguccguaagaagcaucaaag

SEQ ID NO: 2165 - RNA, 97 nt, Artificial Sequence
  gNA Variant Scaffold
gcuggcgcuuuuaucugauuacuuugagagccaucaccagcgacuaugucguauggguaaagcgcuuacggacuucgguccguaagaagcaucaaag

SEQ ID NO: 2166 - RNA, 108 nt, Artificial Sequence
  gNA Variant Scaffold
uacuggcgccuuuaucugauuacuuugagagccaucaccagcgacuaugucguauggguaaagcgcaggugggacgaccucucggucguccuaucugaagcaucaaag

SEQ ID NO: 2167 - RNA, 98 nt, Artificial Sequence
  gNA Variant Scaffold
uacuggcgccuuuaucugauuacuuugagagccaucaccagcgacuaugucguauggguaaagcgcggacgaccucucggucguccgaagcaucaaag

SEQ ID NO: 2168 - RNA, 90 nt, Artificial Sequence
  gNA Variant Scaffold
uacuggcgccuuuaucucauuacuuugagagccaucaccagcgacuaugucguauggguaaagcgcccucuucggagggaagcaucaaag

SEQ ID NO: 2169 - RNA, 98 nt, Artificial Sequence
  gNA Variant Scaffold
uacuggcgcuuuuaucucauuacuuugagagccaucaccagcgacuaugucguauggguaaagcgcuuacggacuucgguccguaagaagcaucaaag

SEQ ID NO: 2170 - RNA, 99 nt, Artificial Sequence
  gNA Variant Scaffold
uacuggcgccuuuaucaucauuacuuugagagccaucaccagcgacuaugucguauggguaaagcgcuuacggacuucgguccguaagaagcaucaaag

SEQ ID NO: 2171 - RNA, 194 nt, Artificial Sequence
  gNA Variant Scaffold
uacuggcgcuuuuaucucauuacuuugagagccaucaccagcgacuaugucguauggguaaagcgcuuauuuaucggagagaaauccgauaaauaagaagcaucaaagggccggcauggucccagccuccucgcuggcgccggcugggcaacauuccgaggggaccguccccucgguaauggcgaaugggaccc

SEQ ID NO: 2172 - RNA, 108 nt, Artificial Sequence
  gNA Variant Scaffold
uacuggcgccuuuaucucauuacuuugagagccaucaccagcgacuaugucguauggguaaagcgcaggugggacgaccucucggucguccuaucugaagcaucaaag

SEQ ID NO: 2173 - RNA, 106 nt, Artificial Sequence
  gNA Variant Scaffold
uacuggcgcuuuuaucucauuacuuugagagccaucaccagcgacuaugucguauggguaaagcgcuuauuuaucggagaaauccgauaaauaagaagcaucaaag

SEQ ID NO: 2174 - RNA, 98 nt, Artificial Sequence
  gNA Variant Scaffold
uacuggcgccuuuaucucauuacuuugagagccaucaccagcgacuaugucguauggguaaagcgcggacgaccucucggucguccgaagcaucaaag

SEQ ID NO: 2175 - RNA, 92 nt, Artificial Sequence
  gNA Variant Scaffold
uacuggcgcuuuuaucucauuacuuugagagccaucaccagcgacuaugucguauggguaaagcgccggacuucgguccggaagcaucaaag

SEQ ID NO: 2176 - RNA, 108 nt, Artificial Sequence
  gNA Variant Scaffold
uacuggcgcuuuuaucggauuacuuugagagccaucaccagcgacuaugucguauggguaaagcgcuuauuuaucggagagaaauccgauaaauaagaagcaucaaag

SEQ ID NO: 2177 - RNA, 98 nt, Artificial Sequence
  gNA Variant Scaffold
uacuggcgcuuuuaucucauuacuuugagagccaucaccagcgacuaugucguauggguaaagcgcggacgaccucucggucguccgaagcaucaaag

SEQ ID NO: 2178 - RNA, 89 nt, Artificial Sequence
  gNA Variant Scaffold
gcuggcgcuuuuaucugauuacuuugagagccaucaccagcgacuaugucguauggguaaagcgcccucuucggagggaagcaucaaag

SEQ ID NO: 2179 - RNA, 88 nt, Artificial Sequence
  gNA Variant Scaffold
gcuggcgccuuuaucugauuacuuugagagccaucaccagcgacuaugucguauggguaaagcucccucuucggagggagcaucaaag

SEQ ID NO: 2180 - RNA, 197 nt, Artificial Sequence
  gNA Variant Scaffold
uacuggcgcuuuuaucucauuacuuugagagccaucaccagcgacuaugucguauggguaaagcgcuuauuuaucggagagaaauccgauaaauaagaagcaucaaaggggucggcauggcaucuccaccuccucgcgguccgaccugggcauccgaaggaggacgcacguccacucggauggcuaagggagagcca

SEQ ID NO: 2181 - RNA, 88 nt, Artificial Sequence
  gNA Variant Scaffold
gcuggcgccuuuaucugauuacuuugagagccaucaccagcgacuaugucguauggguaaagcgcccucuucggagggcgcaucaaag

SEQ ID NO: 2182 - RNA, 186 nt, Artificial Sequence
  gNA Variant Scaffold
uacuggcgcuuuuaucucauuacuuugagagccaucaccagcgacuaugucguauggguaaagcgcuuauuuaucggagagaaauccgauaaauaagaagcaucaaaguuuuggccggcauggucccagccuccucgcuggcgccggcugggcaacaugcuucggcauggcgaaugggaccccggg

SEQ ID NO: 2183 - RNA, 97 nt, Artificial Sequence
  gNA Variant Scaffold
gauggcgccuuuaucucauuacuuugagagccaucaccagcgacuaugucguauggguaaagcgcuuacggacuucgguccguaagaagcaucaaag

SEQ ID NO: 2184 - RNA, 89 nt, Artificial Sequence
  gNA Variant Scaffold
gcuggcgcuuuuaucucauuacuuugagagccaucaccagcgacuaugucguauggguaaagcgcccucuucggagggaagcaucaaag

SEQ ID NO: 2185 - RNA, 96 nt, Artificial Sequence
  gNA Variant Scaffold
gcuggcgccuuuaucugauuacuuugagagccaucaccagcgacuaugucguauggguaaagcucuuacggacuucgguccguaagagcaucaaag

SEQ ID NO: 2186 - RNA, 96 nt, Artificial Sequence
  gNA Variant Scaffold
gcuggcgccuuuaucugauuacuuugagagccaucaccagcgacuaugucguauggguaaagcucggacgaccucucggucguccgagcaucaaag

SEQ ID NO: 2187 - RNA, 160 nt, Artificial Sequence
  gNA Variant Scaffold
uacuggcgcuuuuaucucauuacuuugagagccaucaccagcgacuaugucguauggguaaagcgcuuauuuaucggagagaaauccgauaaauaagaagcaucaaagccugucaccggaugugcuuuccggucugaugaguccgugaggacgaaacagg

SEQ ID NO: 2188 - RNA, 97 nt, Artificial Sequence
  gNA Variant Scaffold
gcuggcgcuuuuaucugauuacuuugagagccaucaccagcgacuaugucguauggguaaagcgcggacgaccucucggucguccgaagcaucaaag

SEQ ID NO: 2189 - RNA, 97 nt, Artificial Sequence
  gNA Variant Scaffold
gcuggcgccuuuaucugauuacuuugagagccaucaccagcgacuaugucguauggguaaagcgcggacgaccucucggucguccgaagcaucaaag

SEQ ID NO: 2190 - RNA, 106 nt, Artificial Sequence
  gNA Variant Scaffold
gcuggcgccuuuaucugauuacuuugagagccaucaccagcgacuaugucguauggguaaagcucaggugggacgaccucucggucguccuaucugagcaucaaag

SEQ ID NO: 2191 - RNA, 177 nt, Artificial Sequence
  gNA Variant Scaffold
uacuggcgcuuuuaucucauuacuuugagagccaucaccagcgacuaugucguauggguaaagcgcuuauuuaucggagagaaauccgauaaauaagaagcaucaaaggauggccggcauggucccagccuccucgcuggcgccggcugggcaacaccuucggguggcgaaugggac

SEQ ID NO: 2192 - RNA, 107 nt, Artificial Sequence
  gNA Variant Scaffold
gcuggcgcuuuuaucugauuacuuugagagccaucaccagcgacuaugucguauggguaaagcgcaggugggacgaccucucggucguccuaucugaagcaucaaag

SEQ ID NO: 2193 - RNA, 109 nt, Artificial Sequence
  gNA Variant Scaffold
uacuggcgcuuuuaucucauuacuuugagagccaucaccagcgacuaugucguacuggguaaagcgcuuauuuaucggagagaaauccgauaaauaagaagcaucaaag

SEQ ID NO: 2194 - RNA, 107 nt, Artificial Sequence
  gNA Variant Scaffold
uacuggcgcuuuuaucucauuacuuugagagccaucaccagcgacuaugucguauggguaaagcgcuuauuuaucgugagaaauccgauaaauaagaagcaucaaag

SEQ ID NO: 2195 - RNA, 109 nt, Artificial Sequence
  gNA Variant Scaffold
guacuggcgcuuuuaucucauuacuuugagagccaucaccagcgacuaugucguauggguaaagcgcuuauuuaucggagagaaauccgauaaauaagaagcaucaaag

SEQ ID NO: 2196 - RNA, 97 nt, Artificial Sequence
  gNA Variant Scaffold
gcuggcgcuuuuaucucauuacuuugagagccaucaccagcgacuaugucguauggguaaagcgcggacgaccucucggucguccgaagcaucaaag

SEQ ID NO: 2197 - RNA, 97 nt, Artificial Sequence
  gNA Variant Scaffold
gcuggcgccuuuaucugauuacuuugagagccaucaccagcgacuaugucguauggguaaagcgcuuacggacuucgguccguaagaagcaucaaag

SEQ ID NO: 2198 - RNA, 107 nt, Artificial Sequence
  gNA Variant Scaffold
gcuggcgcuuuuaucucauuacuuugagagccaucaccagcgacuaugucguauggguaaagcgcuuauuuaucggagagaaauccgauaaauaagaagcaucaaag

SEQ ID NO: 2199 - RNA, 97 nt, Artificial Sequence
  gNA Variant Scaffold
gcuggcgccuuuaucucauuacuuugagagccaucaccagcgacuaugucguauggguaaagcgcuuacggacuucgguccguaagaagcaucaaag

SEQ ID NO: 2200 - RNA, 89 nt, Artificial Sequence
  gNA Variant Scaffold
gcuggcgccuuuaucugauuacuuugagagccaucaccagcgacuaugucguauggguaaagcgcccucuucggagggaagcaucaaag

SEQ ID NO: 2201 - RNA, 107 nt, Artificial Sequence
  gNA Variant Scaffold
gcuggcgcuuuuaucucauuacuuugagagccaucaccagcgacuaugucguauggguaaagcgcaggugggacgaccucucggucguccuaucugaagcaucaaag

SEQ ID NO: 2202 - RNA, 107 nt, Artificial Sequence
  gNA Variant Scaffold
gcuggcgccuuuaucucauuacuuugagagccaucaccagcgacuaugucguauggguaaagcgcaggugggacgaccucucggucguccuaucugaagcaucaaag

SEQ ID NO: 2203 - RNA, 107 nt, Artificial Sequence
  gNA Variant Scaffold
gcuggcgccuuuaucugauuacuuugagagccaucaccagcgacuaugucguauggguaaagcgcaggugggacgaccucucggucguccuaucugaagcaucaaag

SEQ ID NO: 2204 - RNA, 98 nt, Artificial Sequence
  gNA Variant Scaffold
uacuggcgcuuuuaucugauuacuuugagagccaucaccagcgacuaugucguauggguaaagcgcuuacggacuucgguccguaagaagcaucaaag

SEQ ID NO: 2205 - RNA, 89 nt, Artificial Sequence
  gNA Variant Scaffold
gcuggcgccuuuaucucauuacuuugagagccaucaccagcgacuaugucguauggguaaagcgcccucuucggagggaagcaucaaag

SEQ ID NO: 2206 - RNA, 97 nt, Artificial Sequence
  gNA Variant Scaffold
gcuggcgcuuuuaucucauuacuuugagagccaucaccagcgacuaugucguauggguaaagcgcuuacggacuucgguccguaagaagcaucaaag

SEQ ID NO: 2207 - RNA, 97 nt, Artificial Sequence
  gNA Variant Scaffold
gcuggcgccuuuaucucauuacuuugagagccaucaccagcgacuaugucguauggguaaagcgcggacgaccucucggucguccgaagcaucaaag

SEQ ID NO: 2208 - RNA, 177 nt, Artificial Sequence
  gNA Variant Scaffold
gauggccggcauggucccagccuccucgcuggcgccggcugggcaacaccuucggguggcgaaugggacuacuggcgcuuuuaucucauuacuuugagagccaucaccagcgacuaugucguauggguaaagcgcuuauuuaucggagagaaauccgauaaauaagaagcaucaaag

SEQ ID NO: 2209 - RNA, 194 nt, Artificial Sequence
  gNA Variant Scaffold
ggccggcauggucccagccuccucgcuggcgccggcugggcaacauuccgaggggaccguccccucgguaauggcgaaugggacccuacuggcgcuuuuaucucauuacuuugagagccaucaccagcgacuaugucguauggguaaagcgcuuauuuaucggagagaaauccgauaaauaagaagcaucaaag

SEQ ID NO: 2210 - RNA, 96 nt, Artificial Sequence
  gNA Variant Scaffold
gcuggcgccuuuaucugauuacuuugagagccaucaccagcgacuaugucguauggguaaagcgcuuacggacuucgguccguaagcgcaucaaag

SEQ ID NO: 2211 - RNA, 172 nt, Artificial Sequence
  gNA Variant Scaffold
cgugguuagggccacguuaaauaguugcuuaagcccuaagcguugaucuucggaucaggugcaauacuggcgcuuuuaucucauuacuuugagagccaucaccagcgacuaugucguauggguaaagcgcuuauuuaucggagagaaauccgauaaauaagaagcaucaaag

SEQ ID NO: 2212 - RNA, 197 nt, Artificial Sequence
  gNA Variant Scaffold
gggucggcauggcaucuccaccuccucgcgguccgaccugggcauccgaaggaggacgcacguccacucggauggcuaagggagagccauacuggcgcuuuuaucucauuacuuugagagccaucaccagcgacuaugucguauggguaaagcgcuuauuuaucggagagaaauccgauaaauaagaagcaucaaag

SEQ ID NO: 2213 - RNA, 171 nt, Artificial Sequence
  gNA Variant Scaffold
uacuggcgcuuuuaucucauuacuuugagagccaucaccagcgacuaugucguauggguaaagcgcuuauuuaucggagagaaauccgauaaauaagaagcaucaaagccaguacugaugaguccgugaggacgaaacgaguaagcucgucuacuggcgcuuuuaucucau

SEQ ID NO: 2214 - RNA, 99 nt, Artificial Sequence
  gNA Variant Scaffold
uacuggcgccuuuaucucauuacuuuagagagccaucaccagcgacuaugucguauggguaaagcgcuuacggacuucgguccguaagaagcaucaaag

SEQ ID NO: 2215 - RNA, 157 nt, Artificial Sequence
  gNA Variant Scaffold
cgacuacugaugaguccgugaggacgaaacgaguaagcucgucuagucguacuggcgcuuuuaucucauuacuuugagagccaucaccagcgacuaugucguauggguaaagcgcuuauuuaucggagagaaauccgauaaauaagaagcaucaaag

SEQ ID NO: 2216 - RNA, 106 nt, Artificial Sequence
  gNA Variant Scaffold
gcuggcgccuuuaucugauuacuuugagagccaucaccagcgacuaugucguauggguaaagcgcaggugggacgaccucucggucguccuaucugcgcaucaaag

SEQ ID NO: 2217 - RNA, 97 nt, Artificial Sequence
  gNA Variant Scaffold
uacuggcgccuuuaucucauuacuuuagagccaucaccagcgacuaugucguauggguaaagcgcuuacggacuucgguccguaagaagcaucaaag

SEQ ID NO: 2218 - RNA, 186 nt, Artificial Sequence
  gNA Variant Scaffold
uacuggcgcuuuuaucucauuacuuugagagccaucaccagcgacuaugucguauggguaaagcgcuuauuuaucggagagaaauccgauaaauaagaagcaucaaagcauuccucagaaaaugacaaaccuguggggcguaaguagaucuucggaucuaugaucgugcagacguuaaaaucaggu

SEQ ID NO: 2219 - RNA, 171 nt, Artificial Sequence
  gNA Variant Scaffold
uacuggcgcuuuuaucucauuacuuugagagccaucaccagcgacuaugucguauggguaaagcgcuuauuuaucggagagaaauccgauaaauaagaagcaucaaagcgacuacugaugaguccgugaggacgaaacgaguaagcucgucuagucgcguguagcgaagca

SEQ ID NO: 2220 - RNA, 186 nt, Artificial Sequence
  gNA Variant Scaffold
cauuccucagaaaaugacaaaccuguggggcguaaguagaucuucggaucuaugaucgugcagacguuaaaaucagguuacuggcgcuuuuaucucauuacuuugagagccaucaccagcgacuaugucguauggguaaagcgcuuauuuaucggagagaaauccgauaaauaagaagcaucaaag

SEQ ID NO: 2221 - RNA, 186 nt, Artificial Sequence
  gNA Variant Scaffold
uuuuggccggcauggucccagccuccucgcuggcgccggcugggcaacaugcuucggcauggcgaaugggaccccggguacuggcgcuuuuaucucauuacuuugagagccaucaccagcgacuaugucguauggguaaagcgcuuauuuaucggagagaaauccgauaaauaagaagcaucaaag

SEQ ID NO: 2222 - RNA, 171 nt, Artificial Sequence
  gNA Variant Scaffold
cgacuacugaugaguccgugaggacgaaacgaguaagcucgucuagucgcguguagcgaagcauacuggcgcuuuuaucucauuacuuugagagccaucaccagcgacuaugucguauggguaaagcgcuuauuuaucggagagaaauccgauaaauaagaagcaucaaag

SEQ ID NO: 2223 - RNA, 168 nt, Artificial Sequence
  gNA Variant Scaffold
uacuggcgcuuuuaucucauuacuuugagagccaucaccagcgacuaugucguauggguaaagcgcuuauuuaucggagagaaauccgauaaauaagaagcaucaaaggggagccccgcugaugaggucggggagaccgaaagggacuucggucccuacggggcuccc

SEQ ID NO: 2224 - RNA, 144 nt, Artificial Sequence
  gNA Variant Scaffold
ccacccccaccaccacccccacccccaccaccacccuacuggcgcuuuuaucucauuacuuugagagccaucaccagcgacuaugucguauggguaaagcgcuuauuuaucggagagaaauccgauaaauaagaagcaucaaag

SEQ ID NO: 2225 - RNA, 157 nt, Artificial Sequence
  gNA Variant Scaffold
uacuggcgcuuuuaucucauuacuuugagagccaucaccagcgacuaugucguauggguaaagcgcuuauuuaucggagagaaauccgauaaauaagaagcaucaaagcgacuacugaugaguccgugaggacgaaacgaguaagcucgucuagucg

SEQ ID NO: 2226 - RNA, 172 nt, Artificial Sequence
  gNA Variant Scaffold
uacuggcgcuuuuaucucauuacuuugagagccaucaccagcgacuaugucguauggguaaagcgcuuauuuaucggagagaaauccgauaaauaagaagcaucaaagcgugguuagggccacguuaaauaguugcuuaagcccuaagcguugaucuucggaucaggugcaa

SEQ ID NO: 2227 - RNA, 184 nt, Artificial Sequence
  gNA Variant Scaffold
uacuggcgcuuuuaucucauuacuuugagagccaucaccagcgacuaugucguauggguaaagcgcuuauuuaucggagagaaauccgauaaauaagaagcaucaaagggcaauaaagcgguuacaagcccgcaaaaauagcagaguaaugucgcgauagcgcggcauuaaugcagcuuuauug

SEQ ID NO: 2228 - RNA, 122 nt, Artificial Sequence
  gNA Variant Scaffold
uacuggcgcuuuuaucucauuacuauuaucucauuacuuugagagccaucaccagcgacuaugucguauggguaaagcgcuuauuuaucggagagaaauccgauaaauaagaagcaucaaag

SEQ ID NO: 2229 - RNA, 184 nt, Artificial Sequence
  gNA Variant Scaffold
ggcaauaaagcgguuacaagcccgcaaaaauagcagaguaaugucgcgauagcgcggcauuaaugcagcuuuauuguacuggcgcuuuuaucucauuacuuugagagccaucaccagcgacuaugucguauggguaaagcgcuuauuuaucggagagaaauccgauaaauaagaagcaucaaag

SEQ ID NO: 2230 - RNA, 185 nt, Artificial Sequence
  gNA Variant Scaffold
uacuggcgcuuuuaucucauuacuuugagagccaucaccagcgacuaugucguauggguaaagcgcuuauuuaucggagagaaauccgauaaauaagaagcaucaaagacccgcaaggccgacggcauccgccgccgcuggugcaaguccagccgccccuucgggggcgggcgcucauggguaac

SEQ ID NO: 2231 - RNA, 63 nt, Artificial Sequence
  gNA Variant Scaffold
uacuggcgcuuuuaucucauuacuuugagagccaucaccagcgacuaugucguauggguaaag

SEQ ID NO: 2232 - RNA, 168 nt, Artificial Sequence
  gNA Variant Scaffold
gggagccccgcugaugaggucggggagaccgaaagggacuucggucccuacggggcucccuacuggcgcuuuuaucucauuacuuugagagccaucaccagcgacuaugucguauggguaaagcgcuuauuuaucggagagaaauccgauaaauaagaagcaucaaag

SEQ ID NO: 2233 - RNA, 171 nt, Artificial Sequence
  gNA Variant Scaffold
ccaguacugaugaguccgugaggacgaaacgaguaagcucgucuacuggcgcuuuuaucucauuacuggcgcuuuuaucucauuacuuugagagccaucaccagcgacuaugucguauggguaaagcgcuuauuuaucggagagaaauccgauaaauaagaagcaucaaag

SEQ ID NO: 2234 - RNA, 185 nt, Artificial Sequence
  gNA Variant Scaffold
acccgcaaggccgacggcauccgccgccgcuggugcaaguccagccgccccuucgggggcgggcgcucauggguaacuacuggcgcuuuuaucucauuacuuugagagccaucaccagcgacuaugucguauggguaaagcgcuuauuuaucggagagaaauccgauaaauaagaagcaucaaag

SEQ ID NO: 2235 - RNA, 160 nt, Artificial Sequence
  gNA Variant Scaffold
ccugucaccggaugugcuuuccggucugaugaguccgugaggacgaaacagguacuggcgcuuuuaucucauuacuuugagagccaucaccagcgacuaugucguauggguaaagcgcuuauuuaucggagagaaauccgauaaauaagaagcaucaaag

SEQ ID NO: 2236 - RNA, 100 nt, Artificial Sequence
  gNA Variant Scaffold
guacuggcgccuuuaucucauuacuuugagagccaucaccagcgacuaugucguaguggguaaagcgcuuacggacuucgguccguaagaagcaucaaag

SEQ ID NO: 2237 - RNA, 91 nt, Artificial Sequence
  gNA Variant Scaffold
guacuggcgcuuuuaucugauuacuuugagagccaucaccagcgacuaugucguaguggguaaagcucccucuucggagggagcaucaaag

SEQ ID NO: 2238 - RNA, 89 nt, Artificial Sequence
  gNA Variant Scaffold
acuggcgcuuuuaucugauuacuuugagagccaucaccagcgacuaugucguaguggguaaagcucccucuucggagggagcaucaaag

SEQ ID NO: 2239 - RNA, 97 nt, Artificial Sequence
  gNA Variant Scaffold
acuggcgccuuuaucucauuacuuugagagccaucaccagcgacuaugucguauggguaaagcgcuuacggacuucgguccguaagaagcaucaaag

SEQ ID NO: 2240 - RNA, 89 nt, Artificial Sequence
  gNA Variant Scaffold
gcuggcgcuuuuaucugauuacuuugagagccaucaccagcgacuaugucguaguggguaaagcucccucuucggagggagcaucaaag

SEQ ID NO: 2241 - RNA, 88 nt, Artificial Sequence
  gNA Variant Scaffold
acuggcgcuuuuaucugauuacuuugagagccaucaccagcgacuaugucguauggguaaagcucccucuucggagggagcaucaaag

SEQ ID NO: 2242 - RNA, 97 nt, Artificial Sequence
  gNA Variant Scaffold
acuggcgccuuuaucugauuacuuugagagccaucaccagcgacuaugucguauggguaaagcgcuuacggacuucgguccguaagaagcaucaaag

SEQ ID NO: 2243 - RNA, 97 nt, Artificial Sequence
  gNA Variant Scaffold
acuggcgcuuuuaucugauuacuuugagagccaucaccagcgacuaugucguauggguaaagcgcuuacggacuucgguccguaagaagcaucaaag

SEQ ID NO: 2244 - RNA, 98 nt, Artificial Sequence
  gNA Variant Scaffold
acuggcgcuuuuaucugauuacuuugagagccaucaccagcgacuaugucguaguggguaaagcgcuuacggacuucgguccguaagaagcaucaaag

SEQ ID NO: 2245 - RNA, 89 nt, Artificial Sequence
  gNA Variant Scaffold
acuggcgcuuuuaucugauuacuuugagagccaucaccagcgacuaugucguauuggguaaagcucccucuucggagggagcaucaaag

SEQ ID NO: 2246 - RNA, 98 nt, Artificial Sequence
  gNA Variant Scaffold
acuggcgcuuuuaucugauuacuuugagagccaucaccagcgacuaugucguauuggguaaagcgcuuacggacuucgguccguaagaagcaucaaag

SEQ ID NO: 2247 - RNA, 98 nt, Artificial Sequence
  gNA Variant Scaffold
acuggcgccuuuaucaucauuacuuugagagccaucaccagcgacuaugucguauggguaaagcgcuuacggacuucgguccguaagaagcaucaaag

SEQ ID NO: 2248 - RNA, 90 nt, Artificial Sequence
  gNA Variant Scaffold
acuggcgcuuuuaucugauuacuuugagagccaucaccagcgacuaugucguaguggguaaagcgcccucuucggagggaagcaucaaag

SEQ ID NO: 2249 - RNA, 96 nt, Artificial Sequence
  gNA Variant Scaffold
acuggcgcuuuuaucugauuacuuugagagccaucaccagcgacuaugucguaguggguaaagcucacaugaggaucacccaugugagcaucaaag

SEQ ID NO: 2250 - RNA, 89 nt, Artificial Sequence
  gNA Variant Scaffold
acuggcacuuuuaccugauuacuuugagagccaacaccagcgacuaugucguaguggguaaagcucccucuucggagggagcaucaaag

SEQ ID NO: 2251 - RNA, 89 nt, Artificial Sequence
  gNA Variant Scaffold
acuggcacuuuuaucugauuacuuugagagccaucaccagcgacuaugucguaguggguaaagcucccucuucggagggagcaucaaag

SEQ ID NO: 2252 - RNA, 89 nt, Artificial Sequence
  gNA Variant Scaffold
acuggcccuuuuaucugauuacuuugagagccaucaccagcgacuaugucguaguggguaaagcucccucuucggagggagcaucaaag

SEQ ID NO: 2253 - RNA, 89 nt, Artificial Sequence
  gNA Variant Scaffold
acuggcgcuuuuaccugauuacuuugagagccaucaccagcgacuaugucguaguggguaaagcucccucuucggagggagcaucaaag

SEQ ID NO: 2254 - RNA, 89 nt, Artificial Sequence
  gNA Variant Scaffold
acuggcgcuuuuaucugauuacuuugagagccaacaccagcgacuaugucguaguggguaaagcucccucuucggagggagcaucaaag

SEQ ID NO: 2255 - RNA, 97 nt, Artificial Sequence
  gNA Variant Scaffold
acuggcaccuuuaccugauuacuuugagagccaacaccagcgacuaugucguauggguaaagcgcuuacggacuucgguccguaagaagcaucaaag

SEQ ID NO: 2256 - RNA, 97 nt, Artificial Sequence
  gNA Variant Scaffold
acuggcaccuuuaucugauuacuuugagagccaucaccagcgacuaugucguauggguaaagcgcuuacggacuucgguccguaagaagcaucaaag

SEQ ID NO: 2257 - RNA, 97 nt, Artificial Sequence
  gNA Variant Scaffold
acuggccccuuuaucugauuacuuugagagccaucaccagcgacuaugucguauggguaaagcgcuuacggacuucgguccguaagaagcaucaaag

SEQ ID NO: 2258 - RNA, 97 nt, Artificial Sequence
  gNA Variant Scaffold
acuggcgccuuuaucugauuacuuugagagccaacaccagcgacuaugucguauggguaaagcgcuuacggacuucgguccguaagaagcaucaaag

SEQ ID NO: 2259 - RNA, 89 nt, Artificial Sequence; identical to SEQ ID NO: 2240
  gNA Variant Scaffold

SEQ ID NO: 2260 - RNA, 90 nt, Artificial Sequence
  gNA Variant Scaffold
gacuggcgcuuuuaucugauuacuuugagagccaucaccagcgacuaugucguaguggguaaagcucccucuucggagggagcaucaaag

SEQ ID NO: 2261 - RNA, 90 nt, Artificial Sequence
  gNA Variant Scaffold
acuggcgccuuuaucugauuacuuuggagagccaucaccagcgacuaugucguaguggguaaagcucccucuucggagggagcaucaaag

SEQ ID NO: 2262 - RNA, 89 nt, Artificial Sequence
  gNA Variant Scaffold
acuggcgcauuuaucugauuacuuugugagccaucaccagcgacuaugucguaguggguaaagcucccucuucggagggagcaucaaag

SEQ ID NO: 2263 - RNA, 89 nt, Artificial Sequence
  gNA Variant Scaffold
acuggcgccuuuaucugauuacuuugagagccaucaccagcgacuaugucguaguggguaaagcucccucuucggagggagcaucaaag

SEQ ID NO: 2264 - RNA, 90 nt, Artificial Sequence
  gNA Variant Scaffold
acuggcgcuuuuaucugauuacuuuggagagccaucaccagcgacuaugucguaguggguaaagcucccucuucggagggagcaucaaag

SEQ ID NO: 2265 - RNA, 89 nt, Artificial Sequence
  gNA Variant Scaffold
acuggcgcauuuaucugauuacuuugagagccaucaccagcgacuaugucguaguggguaaagcucccucuucggagggagcaucaaag

SEQ ID NO: 2266 - RNA, 89 nt, Artificial Sequence
  gNA Variant Scaffold
acuggcgcuuuuaucugauuacuuugugagccaucaccagcgacuaugucguaguggguaaagcucccucuucggagggagcaucaaag

SEQ ID NO: 2267 - RNA, 90 nt, Artificial Sequence
  gNA Variant Scaffold
acuggcgcuuuuauucugauuacuuugagagccaucaccagcgacuaugucguaguggguaaagcucccucuucggagggagcaucaaag

SEQ ID NO: 2268 - RNA, 88 nt, Artificial Sequence
  gNA Variant Scaffold
acggcgcuuuuaucugauuacuuugagagccaucaccagcgacuaugucguaguggguaaagcucccucuucggagggagcaucaaag

SEQ ID NO: 2269 - RNA, 89 nt, Artificial Sequence
  gNA Variant Scaffold
acuggcgcuuuuauaugauuacuuugagagccaucaccagcgacuaugucguaguggguaaagcucccucuucggagggagcaucaaag

SEQ ID NO: 2270 - RNA, 90 nt, Artificial Sequence
  gNA Variant Scaffold
acuggcgcuuuuaucuugauuacuuugagagccaucaccagcgacuaugucguaguggguaaagcucccucuucggagggagcaucaaag

SEQ ID NO: 2271 - RNA, 89 nt, Artificial Sequence
  gNA Variant Scaffold
acuggcgcuuuuaucugauuacuuugagagccagcaccagcgacuaugucguaguggguaaagcucccucuucggagggagcaucaaag

SEQ ID NO: 2272 - RNA, 89 nt, Artificial Sequence
  gNA Variant Scaffold
acuggcgcuguuaucugauuacuucgagagccaucaccagcgacuaugucguaguggguaaagcucccucuucggagggagcaucgaag

SEQ ID NO: 2273 - RNA, 89 nt, Artificial Sequence
  gNA Variant Scaffold
acuggcgcucuuaucugauuacuucgagagccaucaccagcgacuaugucguaguggguaaagcucccucuucggagggagcaucgaag

SEQ ID NO: 2274 - RNA, 89 nt, Artificial Sequence
  gNA Variant Scaffold
acuggcgcuuguaucugauuacucugagagccaucaccagcgacuaugucguaguggguaaagcucccucuucggagggagcaucagag

SEQ ID NO: 2275 - RNA, 89 nt, Artificial Sequence
  gNA Variant Scaffold
acuggcgcuucuaucugauuacucugagagccaucaccagcgacuaugucguaguggguaaagcucccucuucggagggagcaucagag

SEQ ID NO: 2276 - RNA, 89 nt, Artificial Sequence
  gNA Variant Scaffold
acuggcgcuuugaucugauuaccuugagagccaucaccagcgacuaugucguaguggguaaagcucccucuucggagggagcaucaagg

SEQ ID NO: 2277 - RNA, 89 nt, Artificial Sequence
  gNA Variant Scaffold
acuggcgcuuucaucugauuaccuugagagccaucaccagcgacuaugucguaguggguaaagcucccucuucggagggagcaucaagg

SEQ ID NO: 2278 - RNA, 89 nt, Artificial Sequence
  gNA Variant Scaffold
acuggcgcuguuaucugauuacuuugagagccaucaccagcgacuaugucguaguggguaaagcucccucuucggagggagcaucaaag

SEQ ID NO: 2279 - RNA, 89 nt, Artificial Sequence
  gNA Variant Scaffold
acuggcgcuuuuaucugauuacuuugagagccaucaccagcgacuaugucguaguggguaaagcucccucuucggagggagcaucgaag

SEQ ID NO: 2280 - RNA, 89 nt, Artificial Sequence
  gNA Variant Scaffold
acuggcgcuuuuaucugauuacuucgagagccaucaccagcgacuaugucguaguggguaaagcucccucuucggagggagcaucaaag

SEQ ID NO: 2281 - RNA, 98 nt, Artificial Sequence
  gNA Variant Scaffold
acuggcacuucuaucugauuacucugagagccaucaccagcgacuaugucguauggguaaagccgcuuacggacuucgguccguaagaggcaucagag

SEQ ID NO: 2282 - RNA, 89 nt, Artificial Sequence
  gNA Variant Scaffold
acuggcacuucuaucugauuacucugagagccaucaccagcgacuaugucguaguggguaaagcucccucuucggagggagcaucagag

SEQ ID NO: 2283 - RNA, 98 nt, Artificial Sequence
  gNA Variant Scaffold
acuggcaccuuuaucugauuacuuugagagccaucaccagcgacuaugucguauggguaaagccgcuuacggacuucgguccguaagaggcaucaaag

SEQ ID NO: 2284 - RNA, 98 nt, Artificial Sequence
  gNA Variant Scaffold
acuggcacuuguaucugauuacucugagagccaucaccagcgacuaugucguauggguaaagccgcuuacggacuucgguccguaagaggcaucagag

SEQ ID NO: 2285 - RNA, 89 nt, Artificial Sequence
  gNA Variant Scaffold
acuggcacuuguaucugauuacucugagagccaucaccagcgacuaugucguaguggguaaagcucccucuucggagggagcaucagag

SEQ ID NO: 2286 - RNA, 20 nt, Artificial Sequence
  spacer sequence ATCN PAM
cuaccaccaccaccaccauc

SEQ ID NO: 2287 - RNA, 20 nt, Artificial Sequence
  spacer sequence ATCN PAM
ccaccaccaccauuaccacc

SEQ ID NO: 2288 - RNA, 20 nt, Artificial Sequence
  spacer sequence ATCN PAM
ccaccaucaccaccaccacc

SEQ ID NO: 2289 - RNA, 20 nt, Artificial Sequence
  spacer sequence ATCN PAM
ucaccaccaucaccaccacc

SEQ ID NO: 2290 - RNA, 20 nt, Artificial Sequence
  spacer sequence ATCN PAM
ccaucaucaccaccaucacc

SEQ ID NO: 2291 - RNA, 20 nt, Artificial Sequence
  spacer sequence ATCN PAM
ccaccaguaccaucaccauc

SEQ ID NO: 2292 - RNA, 20 nt, Artificial Sequence
  spacer sequence ATCN PAM
ccaucaccaccaguaccauc

SEQ ID NO: 2293 - RNA, 20 nt, Artificial Sequence
  spacer sequence ATCN PAM
ccaccaccaccaccaucacc

SEQ ID NO: 2294 - RNA, 20 nt, Artificial Sequence
  spacer sequence ATCN PAM
ccaccaguaccaucaccacc

SEQ ID NO: 2295 - RNA, 20 nt, Artificial Sequence
  spacer sequence ATCN PAM
ccaccaguaccaucaccacc

SEQ ID NO: 2296 - RNA, 20 nt, Artificial Sequence
  spacer sequence ATCN PAM
cuaccaccaccaccaucacc

SEQ ID NO: 2297 - RNA, 20 nt, Artificial Sequence
  spacer sequence ATCN PAM
ccaccaccaccauuaccacc

SEQ ID NO: 2298 - RNA, 20 nt, Artificial Sequence
  spacer sequence ATCN PAM
acaccaccaucuccaccacc

SEQ ID NO: 2299 - RNA, 20 nt, Artificial Sequence
  spacer sequence ATCN PAM
ccaucaacaccaccaucucc

SEQ ID NO: 2300 - RNA, 20 nt, Artificial Sequence
  spacer sequence ATCN PAM
ccaccaguaccaucaccauc

SEQ ID NO: 2301 - RNA, 20 nt, Artificial Sequence
  spacer sequence ATCN PAM
ccaccaguaccaucaccacc

SEQ ID NO: 2302 - RNA, 20 nt, Artificial Sequence
  spacer sequence ATCN PAM
ccaucaccaccaguaccauc

SEQ ID NO: 2303 - RNA, 20 nt, Artificial Sequence
  spacer sequence ATCN PAM
ccaccaccaccaccaucacc

SEQ ID NO: 2304 - RNA, 20 nt, Artificial Sequence
  spacer sequence ATCN PAM
ccaccaguagcaucaccacc

SEQ ID NO: 2305 - RNA, 20 nt, Artificial Sequence
  spacer sequence ATCN PAM
ccaccaguaccaucaccacc

SEQ ID NO: 2306 - RNA, 20 nt, Artificial Sequence
  spacer sequence ATCN PAM
cuaccaccaccaccaucacc

SEQ ID NO: 2307 - RNA, 20 nt, Artificial Sequence
  spacer sequence ATCN PAM
cuaccaccaccaccaccacc

SEQ ID NO: 2308 - RNA, 20 nt, Artificial Sequence
  spacer sequence ATCN PAM
ccaccaccaccaucacuacc

SEQ ID NO: 2309 - RNA, 20 nt, Artificial Sequence
  spacer sequence ATCN PAM
ccaccaguaccaucaccacc

SEQ ID NO: 2310 - RNA, 20 nt, Artificial Sequence
  spacer sequence ATCN PAM
cuaccaccaccaccaucacc

SEQ ID NO: 2311 - RNA, 20 nt, Artificial Sequence
  spacer sequence ATCN PAM
ccaccaccaccauuaccacc

SEQ ID NO: 2312 - RNA, 20 nt, Artificial Sequence
  spacer sequence ATCN PAM
ccaccacuaccaccaccacc

SEQ ID NO: 2313 - RNA, 20 nt, Artificial Sequence
  spacer sequence ATCN PAM
ccaccaucaccaccacuacc

SEQ ID NO: 2314 - RNA, 20 nt, Artificial Sequence
  spacer sequence ATCN PAM
ccaccaguaccaucaccacc

SEQ ID NO: 2315 - RNA, 20 nt, Artificial Sequence
  spacer sequence ATCN PAM
cuaccaccaccaccaucacc

SEQ ID NO: 2316 - RNA, 20 nt, Artificial Sequence
  spacer sequence ATCN PAM
ccaccaccaccacaaccacc

SEQ ID NO: 2317 - RNA, 20 nt, Artificial Sequence
  spacer sequence ATCN PAM
ccaccaccaccacaaccacc

SEQ ID NO: 2318 - RNA, 20 nt, Artificial Sequence
  spacer sequence ATCN PAM
ccaccaccaccaccaccauc

SEQ ID NO: 2319 - RNA, 20 nt, Artificial Sequence
  spacer sequence ATCN PAM
uuguaguuaaaaugugaagg

SEQ ID NO: 2320 - RNA, 20 nt, Artificial Sequence
  spacer sequence ATCN PAM
aaaggagucaguuuaggguu

SEQ ID NO: 2321 - RNA, 20 nt, Artificial Sequence
  spacer sequence ATCN PAM
uuagccaaggccagaaucaa

SEQ ID NO: 2322 - RNA, 20 nt, Artificial Sequence
  spacer sequence ATCN PAM
ucaaucacuagccacggagc

SEQ ID NO: 2323 - RNA, 20 nt, Artificial Sequence
  spacer sequence ATCN PAM
cuagccacggagcaagacaa

SEQ ID NO: 2324 - RNA, 20 nt, Artificial Sequence
  spacer sequence ATCN PAM
cugugggucuucuccccagg

SEQ ID NO: 2325 - RNA, 20 nt, Artificial Sequence
  spacer sequence ATCN PAM
gcucccagccuccagugagg

SEQ ID NO: 2326 - RNA, 20 nt, Artificial Sequence
  spacer sequence ATCN PAM
auuuuggaaguaacuccuuc

SEQ ID NO: 2327 - RNA, 20 nt, Artificial Sequence
  spacer sequence ATCN PAM
cuauacacauggacauuugu

SEQ ID NO: 2328 - RNA, 20 nt, Artificial Sequence
  spacer sequence ATCN PAM
caggcguggggauuagagcu

SEQ ID NO: 2329 - RNA, 20 nt, Artificial Sequence
  spacer sequence ATCN PAM
ccacgccugggaugagugca

SEQ ID NO: 2330 - RNA, 20 nt, Artificial Sequence
  spacer sequence ATCN PAM
gugaaagaaacccaaaauca

SEQ ID NO: 2331 - RNA, 20 nt, Artificial Sequence
  spacer sequence ATCN PAM
agcacuacagcuacaaacaa

SEQ ID NO: 2332 - RNA, 20 nt, Artificial Sequence
  spacer sequence ATCN PAM
uaaaccacaggauaucacau

SEQ ID NO: 2333 - RNA, 20 nt, Artificial Sequence
  spacer sequence ATCN PAM
ugugguuuaugaugcacguu

SEQ ID NO: 2334 - RNA, 20 nt, Artificial Sequence
  spacer sequence ATCN PAM
cauuucaauuccauuaaaau

SEQ ID NO: 2335 - RNA, 20 nt, Artificial Sequence
  spacer sequence ATCN PAM
auuuuaauggaauugaaaug

SEQ ID NO: 2336 - RNA, 20 nt, Artificial Sequence
  spacer sequence ATCN PAM
uuacaacagccuugcagaua

SEQ ID NO: 2337 - RNA, 20 nt, Artificial Sequence
  spacer sequence ATCN PAM
gcaaggcuguuguaaugaug

SEQ ID NO: 2338 - RNA, 20 nt, Artificial Sequence
  spacer sequence ATCN PAM
aacaacaacaaauaaauaag

SEQ ID NO: 2339 - RNA, 20 nt, Artificial Sequence
  spacer sequence ATCN PAM
ucuuuccacaagacaauaau

SEQ ID NO: 2340 - RNA, 20 nt, Artificial Sequence
  spacer sequence ATCN PAM
ccccauguuuccaggcuacc

SEQ ID NO: 2341 - RNA, 20 nt, Artificial Sequence
  spacer sequence ATCN PAM
gcaaggcugguuuacaugca

SEQ ID NO: 2342 - RNA, 20 nt, Artificial Sequence
  spacer sequence ATCN PAM
gcauuuugcuuuuugcuugg

SEQ ID NO: 2343 - RNA, 20 nt, Artificial Sequence
  spacer sequence ATCN PAM
acucauuuccuaucagcauu

SEQ ID NO: 2344 - RNA, 20 nt, Artificial Sequence
  spacer sequence ATCN PAM
uuuuuuaugggacagagucc

SEQ ID NO: 2345 - RNA, 20 nt, Artificial Sequence
  spacer sequence ATCN PAM
uaaauauagcaugggaagag

SEQ ID NO: 2346 - RNA, 20 nt, Artificial Sequence
  spacer sequence ATCN PAM
cugaaggcgcuaucauaaau

SEQ ID NO: 2347 - RNA, 20 nt, Artificial Sequence
  spacer sequence ATCN PAM
ugucaacuggaaaccuuaca

SEQ ID NO: 2348 - RNA, 20 nt, Artificial Sequence
  spacer sequence ATCN PAM
guguaagguuuccaguugac

SEQ ID NO: 2349 - RNA, 20 nt, Artificial Sequence
  spacer sequence ATCN PAM
uccauugcuuuguauuguga

SEQ ID NO: 2350 - RNA, 20 nt, Artificial Sequence
  spacer sequence ATCN PAM
uuaucuuccauugcuuugua

SEQ ID NO: 2351 - RNA, 20 nt, Artificial Sequence
  spacer sequence ATCN PAM
ucaccauuuuacugcacuuu

SEQ ID NO: 2352 - RNA, 20 nt, Artificial Sequence
  spacer sequence ATCN PAM
aauagucaaugaaacauuug

SEQ ID NO: 2353 - RNA, 20 nt, Artificial Sequence
  spacer sequence ATCN PAM
cagugcuacaaauguuucau

SEQ ID NO: 2354 - RNA, 20 nt, Artificial Sequence
  spacer sequence ATCN PAM
ggggauuuuacgguuuaugu

SEQ ID NO: 2355 - RNA, 20 nt, Artificial Sequence
  spacer sequence ATCN PAM
ccagauugcacaaaccaaau

SEQ ID NO: 2356 - RNA, 20 nt, Artificial Sequence
  spacer sequence ATCN PAM
ugagacagacuggaggauag

SEQ ID NO: 2357 - RNA, 20 nt, Artificial Sequence
  spacer sequence ATCN PAM
uccagucugucucaagaugg

SEQ ID NO: 2358 - RNA, 20 nt, Artificial Sequence
  spacer sequence ATCN PAM
auccuccagucugucucaag

SEQ ID NO: 2359 - RNA, 20 nt, Artificial Sequence
  spacer sequence ATCN PAM
ugaacuccaaaccucuagaa

SEQ ID NO: 2360 - RNA, 20 nt, Artificial Sequence
  spacer sequence ATCN PAM
ucaugaacuccaaaccucua

SEQ ID NO: 2361 - RNA, 20 nt, Artificial Sequence
  spacer sequence ATCN PAM
aagucuguuuuucuugucuc

SEQ ID NO: 2362 - RNA, 20 nt, Artificial Sequence
  spacer sequence ATCN PAM
uagaguacaacaacaacacu

SEQ ID NO: 2363 - RNA, 20 nt, Artificial Sequence
  spacer sequence ATCN PAM
uguucuccuuauauagagca

SEQ ID NO: 2364 - RNA, 20 nt, Artificial Sequence
  spacer sequence ATCN PAM
ugucccaacugccuuggcug

SEQ ID NO: 2365 - RNA, 20 nt, Artificial Sequence
  spacer sequence ATCN PAM
uuacccaccaggcuccuugc

SEQ ID NO: 2366 - RNA, 20 nt, Artificial Sequence
  spacer sequence ATCN PAM
acagagacauuucauccucu

SEQ ID NO: 2367 - RNA, 20 nt, Artificial Sequence
  spacer sequence ATCN PAM
ucucugacccaaaacaaaau

SEQ ID NO: 2368 - RNA, 20 nt, Artificial Sequence
  spacer sequence ATCN PAM
guaguaauuuuacgccacac

SEQ ID NO: 2369 - RNA, 20 nt, Artificial Sequence
  spacer sequence ATCN PAM
gagaauccaucuuugcacuu

SEQ ID NO: 2370 - RNA, 20 nt, Artificial Sequence
  spacer sequence ATCN PAM
aucuuugcacuuguuuuugc

SEQ ID NO: 2371 - RNA, 20 nt, Artificial Sequence
  spacer sequence ATCN PAM
uugcacuuguuuuugccuca

SEQ ID NO: 2372 - RNA, 20 nt, Artificial Sequence
  spacer sequence ATCN PAM
uuuucuuaggaaacacaggc

SEQ ID NO: 2373 - RNA, 20 nt, Artificial Sequence
  spacer sequence ATCN PAM
cugugaucccagcauaaacg

SEQ ID NO: 2374 - RNA, 20 nt, Artificial Sequence
  spacer sequence ATCN PAM
cagagauaccuggguugccu

SEQ ID NO: 2375 - RNA, 20 nt, Artificial Sequence
  spacer sequence ATCN PAM
cagcauaaacgcaacaggua

SEQ ID NO: 2376 - RNA, 20 nt, Artificial Sequence
  spacer sequence ATCN PAM
aaguaccuguugcguuuaug

SEQ ID NO: 2377 - RNA, 20 nt, Artificial Sequence
  spacer sequence ATCN PAM
uuguauggggaguaucaaau

SEQ ID NO: 2378 - RNA, 20 nt, Artificial Sequence
  spacer sequence ATCN PAM
aauuucaaauucucugccac

SEQ ID NO: 2379 - RNA, 20 nt, Artificial Sequence
  spacer sequence ATCN PAM
augccuagccccucgcauga

SEQ ID NO: 2380 - RNA, 20 nt, Artificial Sequence
  spacer sequence ATCN PAM
cuuguuggcaaacuugucua

SEQ ID NO: 2381 - RNA, 20 nt, Artificial Sequence
  spacer sequence ATCN PAM
gguccugccgucagcuuguu

SEQ ID NO: 2382 - RNA, 20 nt, Artificial Sequence
  spacer sequence ATCN PAM
cuacagugucuggccgugug

SEQ ID NO: 2383 - RNA, 20 nt, Artificial Sequence
  spacer sequence ATCN PAM
gacuaucuggcagcauaguu

SEQ ID NO: 2384 - RNA, 20 nt, Artificial Sequence
  spacer sequence ATCN PAM
ggcagcauaguuuguuuuug

SEQ ID NO: 2385 - RNA, 20 nt, Artificial Sequence
  spacer sequence ATCN PAM
ucaagucugucccuucauuu

SEQ ID NO: 2386 - RNA, 20 nt, Artificial Sequence
  spacer sequence ATCN PAM
agucugucccuucauuuuac

SEQ ID NO: 2387 - RNA, 20 nt, Artificial Sequence
  spacer sequence ATCN PAM
guaaaaugaagggacagacu

SEQ ID NO: 2388 - RNA, 20 nt, Artificial Sequence
  spacer sequence ATCN PAM
guguagccaugggcaaguca

SEQ ID NO: 2389 - RNA, 20 nt, Artificial Sequence
  spacer sequence ATCN PAM
ucaguguagccaugggcaag

SEQ ID NO: 2390 - RNA, 20 nt, Artificial Sequence
  spacer sequence ATCN PAM
ucacauugugguuaaucauc

SEQ ID NO: 2391 - RNA, 20 nt, Artificial Sequence
  spacer sequence ATCN PAM
ccugacuccugauccagugg

SEQ ID NO: 2392 - RNA, 20 nt, Artificial Sequence
  spacer sequence ATCN PAM
ggagucaggagauuaauucu

SEQ ID NO: 2393 - RNA, 20 nt, Artificial Sequence
  spacer sequence ATCN PAM
aguggucuuuccugggaauu

SEQ ID NO: 2394 - RNA, 20 nt, Artificial Sequence
  spacer sequence ATCN PAM
guagaaacaggaccuucuug

SEQ ID NO: 2395 - RNA, 20 nt, Artificial Sequence
  spacer sequence ATCN PAM
auuaagcaguacuuaaccgu

SEQ ID NO: 2396 - RNA, 20 nt, Artificial Sequence
  spacer sequence ATCN PAM
gccuaagaagcuauuuacuu

SEQ ID NO: 2397 - RNA, 20 nt, Artificial Sequence
  spacer sequence ATCN PAM
uccuucaggaagagggucaa

SEQ ID NO: 2398 - RNA, 20 nt, Artificial Sequence
  spacer sequence ATCN PAM
gcugggguccccaguuggcu

SEQ ID NO: 2399 - RNA, 20 nt, Artificial Sequence
  spacer sequence ATCN PAM
auaauauucucuuugguaag

SEQ ID NO: 2400 - RNA, 20 nt, Artificial Sequence
  spacer sequence ATCN PAM
acauucccacaugaacugga

SEQ ID NO: 2401 - RNA, 20 nt, Artificial Sequence
  spacer sequence ATCN PAM
uagcaagaaguuaagcccua

SEQ ID NO: 2402 - RNA, 20 nt, Artificial Sequence
  spacer sequence ATCN PAM
cggcuuaggcaaaguaaagu

SEQ ID NO: 2403 - RNA, 20 nt, Artificial Sequence
  spacer sequence ATCN PAM
caauuaaugcuucugagcgu

SEQ ID NO: 2404 - RNA, 20 nt, Artificial Sequence
  spacer sequence ATCN PAM
cuggcuggggagaaugaaag

SEQ ID NO: 2405 - RNA, 20 nt, Artificial Sequence
  spacer sequence ATCN PAM
cccacuuccuagccagcaac

SEQ ID NO: 2406 - RNA, 20 nt, Artificial Sequence
  spacer sequence ATCN PAM
aguuauguccucuuuuuuuc

SEQ ID NO: 2407 - RNA, 20 nt, Artificial Sequence
  spacer sequence ATCN PAM
cuugccuaagagcacuaaca

SEQ ID NO: 2408 - RNA, 20 nt, Artificial Sequence
  spacer sequence ATCN PAM
ggggugggccugggucugcg

SEQ ID NO: 2409 - RNA, 20 nt, Artificial Sequence
  spacer sequence ATCN PAM
gcaucaccugggaguuuguu

SEQ ID NO: 2410 - RNA, 20 nt, Artificial Sequence
  spacer sequence ATCN PAM
ccugggaguuuguucaaaau

SEQ ID NO: 2411 - RNA, 20 nt, Artificial Sequence
  spacer sequence ATCN PAM
gaaauugaggguggggaagc

SEQ ID NO: 2412 - RNA, 20 nt, Artificial Sequence
  spacer sequence ATCN PAM
ccuggagaauuuauucaaca

SEQ ID NO: 2413 - RNA, 20 nt, Artificial Sequence
  spacer sequence ATCN PAM
gcacugcugucuuaggguaa

SEQ ID NO: 2414 - RNA, 20 nt, Artificial Sequence
  spacer sequence ATCN PAM
cuaaggaucccuccauuagg

SEQ ID NO: 2415 - RNA, 20 nt, Artificial Sequence
  spacer sequence ATCN PAM
uuagggauucccuaagcuua

SEQ ID NO: 2416 - RNA, 20 nt, Artificial Sequence
  spacer sequence ATCN PAM
cuccauuaggaaauucaggu

SEQ ID NO: 2417 - RNA, 20 nt, Artificial Sequence
  spacer sequence ATCN PAM
augacagacggaggguggaa

SEQ ID NO: 2418 - RNA, 20 nt, Artificial Sequence
  spacer sequence ATCN PAM
gguccagggccuucuuagca

SEQ ID NO: 2419 - RNA, 20 nt, Artificial Sequence
  spacer sequence ATCN PAM
gucuggcacaagcugguuug

SEQ ID NO: 2420 - RNA, 20 nt, Artificial Sequence
  spacer sequence ATCN PAM
uuuuucaaaugucuuacacu

SEQ ID NO: 2421 - RNA, 20 nt, Artificial Sequence
  spacer sequence ATCN PAM
aagccauucccaguuugcug

SEQ ID NO: 2422 - RNA, 20 nt, Artificial Sequence
  spacer sequence ATCN PAM
cacugggcuuagagcucuuu

SEQ ID NO: 2423 - RNA, 20 nt, Artificial Sequence
  spacer sequence ATCN PAM
aguuuuuugguuuccucaag

SEQ ID NO: 2424 - RNA, 20 nt, Artificial Sequence
  spacer sequence ATCN PAM
caaagauuccuugacuauua

SEQ ID NO: 2425 - RNA, 20 nt, Artificial Sequence
  spacer sequence ATCN PAM
uugagauguucuugaggaaa

SEQ ID NO: 2426 - RNA, 20 nt, Artificial Sequence
  spacer sequence ATCN PAM
cuggguguguaauacagcca

SEQ ID NO: 2427 - RNA, 20 nt, Artificial Sequence
  spacer sequence ATCN PAM
acagguaauacugcagauuu

SEQ ID NO: 2428 - RNA, 20 nt, Artificial Sequence
  spacer sequence ATCN PAM
gcaguauuaccuguugauua

SEQ ID NO: 2429 - RNA, 20 nt, Artificial Sequence
  spacer sequence ATCN PAM
uuccaacacguuuaaugacu

SEQ ID NO: 2430 - RNA, 20 nt, Artificial Sequence
  spacer sequence ATCN PAM
auguacuccuguggagaguc

SEQ ID NO: 2431 - RNA, 20 nt, Artificial Sequence
  spacer sequence ATCN PAM
aaaaacauauguuuaggaaa

SEQ ID NO: 2432 - RNA, 20 nt, Artificial Sequence
  spacer sequence ATCN PAM
cgugacacugugacccccuu

SEQ ID NO: 2433 - RNA, 20 nt, Artificial Sequence
  spacer sequence ATCN PAM
auucucuuuuugaagaccca

SEQ ID NO: 2434 - RNA, 20 nt, Artificial Sequence
  spacer sequence ATCN PAM
uagugucauccauucucuuu

SEQ ID NO: 2435 - RNA, 20 nt, Artificial Sequence
  spacer sequence ATCN PAM
ucaagucccucagcucuucc

SEQ ID NO: 2436 - RNA, 20 nt, Artificial Sequence
  spacer sequence ATCN PAM
ugaacguuuguaaaguaccc

SEQ ID NO: 2437 - RNA, 20 nt, Artificial Sequence
  spacer sequence ATCN PAM
gauuacuagguucaagccac

SEQ ID NO: 2438 - RNA, 20 nt, Artificial Sequence
  spacer sequence ATCN PAM
gauucagaacuggaaugggu

SEQ ID NO: 2439 - RNA, 20 nt, Artificial Sequence
  spacer sequence ATCN PAM
agcucuugacccuauguuua

SEQ ID NO: 2440 - RNA, 20 nt, Artificial Sequence
  spacer sequence ATCN PAM
augguaaacauagggucaag

SEQ ID NO: 2441 - RNA, 20 nt, Artificial Sequence
  spacer sequence ATCN PAM
aagugagaagaacugguauc

SEQ ID NO: 2442 - RNA, 20 nt, Artificial Sequence
  spacer sequence ATCN PAM
gaguauuauagagcaaacau

SEQ ID NO: 2443 - RNA, 20 nt, Artificial Sequence
  spacer sequence ATCN PAM
guaaugaaaaugugccagcu

SEQ ID NO: 2444 - RNA, 20 nt, Artificial Sequence
  spacer sequence ATCN PAM
ucacucacagacuucuuaau

SEQ ID NO: 2445 - RNA, 20 nt, Artificial Sequence
  spacer sequence ATCN PAM
cucacagacuucuuaauuaa

SEQ ID NO: 2446 - RNA, 20 nt, Artificial Sequence
  spacer sequence ATCN PAM
gaagguuaauuaagaagucu

SEQ ID NO: 2447 - RNA, 20 nt, Artificial Sequence
  spacer sequence ATCN PAM
cacucucuuuuguucuagaa

SEQ ID NO: 2448 - RNA, 20 nt, Artificial Sequence
  spacer sequence ATCN PAM
ugauguucuuuaaaaagugu

SEQ ID NO: 2449 - RNA, 20 nt, Artificial Sequence
  spacer sequence ATCN PAM
ggauuugguaaaacagccag

SEQ ID NO: 2450 - RNA, 20 nt, Artificial Sequence
  spacer sequence ATCN PAM
aaggaccaugagagaguuuc

SEQ ID NO: 2451 - RNA, 20 nt, Artificial Sequence
  spacer sequence ATCN PAM
aggaaucuaaggaccaugag

SEQ ID NO: 2452 - RNA, 20 nt, Artificial Sequence
  spacer sequence ATCN PAM
aucacucauuuuaaaacucu

SEQ ID NO: 2453 - RNA, 20 nt, Artificial Sequence
  spacer sequence ATCN PAM
cucauuuuaaaacucuuuuu

SEQ ID NO: 2454 - RNA, 20 nt, Artificial Sequence
  spacer sequence ATCN PAM
aaaaagaguuuuaaaaugag

SEQ ID NO: 2455 - RNA, 20 nt, Artificial Sequence
  spacer sequence ATCN PAM
augcuauccucuuagagccu

SEQ ID NO: 2456 - RNA, 20 nt, Artificial Sequence
  spacer sequence ATCN PAM
ucuuagagccuugauuacuc

SEQ ID NO: 2457 - RNA, 20 nt, Artificial Sequence
  spacer sequence ATCN PAM
aggcucuaagaggauagcau

SEQ ID NO: 2458 - RNA, 20 nt, Artificial Sequence
  spacer sequence ATCN PAM
cuacuuccucccuuuauuga

SEQ ID NO: 2459 - RNA, 20 nt, Artificial Sequence
  spacer sequence ATCN PAM
auaaaaaugccagccaccaa

SEQ ID NO: 2460 - RNA, 20 nt, Artificial Sequence
  spacer sequence ATCN PAM
gucaggccuaaacaaaauuu

SEQ ID NO: 2461 - RNA, 20 nt, Artificial Sequence
  spacer sequence ATCN PAM
ugcuuuucugaaaagcaacu

SEQ ID NO: 2462 - RNA, 20 nt, Artificial Sequence
  spacer sequence ATCN PAM
uuguguugaaaugcagauuu

SEQ ID NO: 2463 - RNA, 20 nt, Artificial Sequence
  spacer sequence ATCN PAM
gcauuucaacacaaagaugg

SEQ ID NO: 2464 - RNA, 20 nt, Artificial Sequence
  spacer sequence ATCN PAM
uucauuucaaaagguugaau

SEQ ID NO: 2465 - RNA, 20 nt, Artificial Sequence
  spacer sequence ATCN PAM
uauucaaccuuuugaaauga

SEQ ID NO: 2466 - RNA, 20 nt, Artificial Sequence
  spacer sequence ATCN PAM
agugaaaauacuuugggccc

SEQ ID NO: 2467 - RNA, 20 nt, Artificial Sequence
  spacer sequence ATCN PAM
ugaauuagauaaauuuuuau

SEQ ID NO: 2468 - RNA, 20 nt, Artificial Sequence
  spacer sequence ATCN PAM
aauucacgaucaagugaaaa

SEQ ID NO: 2469 - RNA, 20 nt, Artificial Sequence
  spacer sequence ATCN PAM
aggagacugagagggcagcu

SEQ ID NO: 2470 - RNA, 20 nt, Artificial Sequence
  spacer sequence ATCN PAM
cauaccucacuaugcaaaau

SEQ ID NO: 2471 - RNA, 20 nt, Artificial Sequence
  spacer sequence ATCN PAM
ugggaacacacauuuugcau

SEQ ID NO: 2472 - RNA, 20 nt, Artificial Sequence
  spacer sequence ATCN PAM
guguccguguuuucuuugua

SEQ ID NO: 2473 - RNA, 20 nt, Artificial Sequence
  spacer sequence ATCN PAM
guaccucucucaugacacac

SEQ ID NO: 2474 - RNA, 20 nt, Artificial Sequence
  spacer sequence ATCN PAM
uuucucuuggcucuccaggu

SEQ ID NO: 2475 - RNA, 20 nt, Artificial Sequence
  spacer sequence ATCN PAM
uagauaaaaagaaaaagcag

SEQ ID NO: 2476 - RNA, 20 nt, Artificial Sequence
  spacer sequence ATCN PAM
aggauauccuuucucuuggc

SEQ ID NO: 2477 - RNA, 20 nt, Artificial Sequence
  spacer sequence ATCN PAM
uuaccugcuuuuucuuuuua

SEQ ID NO: 2478 - RNA, 20 nt, Artificial Sequence
  spacer sequence ATCN PAM
aaauauugcacacugauuca

SEQ ID NO: 2479 - RNA, 20 nt, Artificial Sequence
  spacer sequence ATCN PAM
gugugcaauauuuugaugug

SEQ ID NO: 2480 - RNA, 20 nt, Artificial Sequence
  spacer sequence ATCN PAM
aguugacagcggaggauacg

SEQ ID NO: 2481 - RNA, 20 nt, Artificial Sequence
  spacer sequence ATCN PAM
uccgcugucaacuggaugaa

SEQ ID NO: 2482 - RNA, 20 nt, Artificial Sequence
  spacer sequence ATCN PAM
aaauaaauccucugaagauu

SEQ ID NO: 2483 - RNA, 20 nt, Artificial Sequence
  spacer sequence ATCN PAM
ucugaagauuucugugacau

SEQ ID NO: 2484 - RNA, 20 nt, Artificial Sequence
  spacer sequence ATCN PAM
ucagaggauuuauuuagaug

SEQ ID NO: 2485 - RNA, 20 nt, Artificial Sequence
  spacer sequence ATCN PAM
ucagcuuucacaagugcgua

SEQ ID NO: 2486 - RNA, 20 nt, Artificial Sequence
  spacer sequence ATCN PAM
guucuguuuuccccccaccu

SEQ ID NO: 2487 - RNA, 20 nt, Artificial Sequence
  spacer sequence ATCN PAM
acacuuguuugucugacuca

SEQ ID NO: 2488 - RNA, 20 nt, Artificial Sequence
  spacer sequence ATCN PAM
auuucagaugucucauugcc

SEQ ID NO: 2489 - RNA, 20 nt, Artificial Sequence
  spacer sequence ATCN PAM
gaaauagauuauuuaagcca

SEQ ID NO: 2490 - RNA, 20 nt, Artificial Sequence
  spacer sequence ATCN PAM
uaaacuggcaaugagacauc

SEQ ID NO: 2491 - RNA, 20 nt, Artificial Sequence
  spacer sequence ATCN PAM
caauguuucuugcacaguca

SEQ ID NO: 2492 - RNA, 20 nt, Artificial Sequence
  spacer sequence ATCN PAM
ucaacuugaccaucccucca

SEQ ID NO: 2493 - RNA, 20 nt, Artificial Sequence
  spacer sequence ATCN PAM
acuugaccaucccuccaaau

SEQ ID NO: 2494 - RNA, 20 nt, Artificial Sequence
  spacer sequence ATCN PAM
cuccaaauuuccccucuuuc

SEQ ID NO: 2495 - RNA, 20 nt, Artificial Sequence
  spacer sequence ATCN PAM
uccccauggcuuugaaaaga

SEQ ID NO: 2496 - RNA, 20 nt, Artificial Sequence
  spacer sequence ATCN PAM
ucagcugaggacucagagca

SEQ ID NO: 2497 - RNA, 20 nt, Artificial Sequence
  spacer sequence ATCN PAM
uguuuguguguagugggggc

SEQ ID NO: 2498 - RNA, 20 nt, Artificial Sequence
  spacer sequence ATCN PAM
gagguauuuaucagguuauu

SEQ ID NO: 2499 - RNA, 20 nt, Artificial Sequence
  spacer sequence ATCN PAM
gguuauuugggagcuacuuu

SEQ ID NO: 2500 - RNA, 20 nt, Artificial Sequence
  spacer sequence ATCN PAM
cugaaaguagcucccaaaua

SEQ ID NO: 2501 - RNA, 20 nt, Artificial Sequence
  spacer sequence ATCN PAM
ggggagugguggcaguggga

SEQ ID NO: 2502 - RNA, 20 nt, Artificial Sequence
  spacer sequence ATCN PAM
uuucuuucuggcccuaagug

SEQ ID NO: 2503 - RNA, 20 nt, Artificial Sequence
  spacer sequence ATCN PAM
uuaaaaggagaagacuggau

SEQ ID NO: 2504 - RNA, 20 nt, Artificial Sequence
  spacer sequence ATCN PAM
agucuucuccuuuuaaagau

SEQ ID NO: 2505 - RNA, 20 nt, Artificial Sequence
  spacer sequence ATCN PAM
aauccagucuucuccuuuua

SEQ ID NO: 2506 - RNA, 20 nt, Artificial Sequence
  spacer sequence ATCN PAM
uggccagcuucuagcacggc

SEQ ID NO: 2507 - RNA, 20 nt, Artificial Sequence
  spacer sequence ATCN PAM
aggucaaggucaugagggga

SEQ ID NO: 2508 - RNA, 20 nt, Artificial Sequence
  spacer sequence ATCN PAM
uuaggcuuagagagugagcc

SEQ ID NO: 2509 - RNA, 20 nt, Artificial Sequence
  spacer sequence ATCN PAM
ggcucacucucuaagccuaa

SEQ ID NO: 2510 - RNA, 20 nt, Artificial Sequence
  spacer sequence ATCN PAM
ucaggcucacucucuaagcc

SEQ ID NO: 2511 - RNA, 20 nt, Artificial Sequence
  spacer sequence ATCN PAM
aucaucaggcucacucucua

SEQ ID NO: 2512 - RNA, 20 nt, Artificial Sequence
  spacer sequence ATCN PAM
gcauggaggguucuuggaaa

SEQ ID NO: 2513 - RNA, 20 nt, Artificial Sequence
  spacer sequence ATCN PAM
uauuugcuaaccaacauaau

SEQ ID NO: 2514 - RNA, 20 nt, Artificial Sequence
  spacer sequence ATCN PAM
cugaaauuauguugguuagc

SEQ ID NO: 2515 - RNA, 20 nt, Artificial Sequence
  spacer sequence ATCN PAM
ucucugucaaguaguuaaug

SEQ ID NO: 2516 - RNA, 20 nt, Artificial Sequence
  spacer sequence ATCN PAM
uuaacuacuugacagagagg

SEQ ID NO: 2517 - RNA, 20 nt, Artificial Sequence
  spacer sequence ATCN PAM
guaaacaaacacuuuaaauu

SEQ ID NO: 2518 - RNA, 20 nt, Artificial Sequence
  spacer sequence ATCN PAM
uucuguaaugugaaaaauca

SEQ ID NO: 2519 - RNA, 20 nt, Artificial Sequence
  spacer sequence ATCN PAM
cucucuaauuuaucaguuuc

SEQ ID NO: 2520 - RNA, 20 nt, Artificial Sequence
  spacer sequence ATCN PAM
guuuccauuaaugagauuuu

SEQ ID NO: 2521 - RNA, 20 nt, Artificial Sequence
  spacer sequence ATCN PAM
cauuaauggaaacugauaaa

SEQ ID NO: 2522 - RNA, 20 nt, Artificial Sequence
  spacer sequence ATCN PAM
augccuuuguaguuagaagg

SEQ ID NO: 2523 - RNA, 20 nt, Artificial Sequence
  spacer sequence ATCN PAM
ucccuucuaacuacaaaggc

SEQ ID NO: 2524 - RNA, 20 nt, Artificial Sequence
  spacer sequence ATCN PAM
caaacaccccgaugccuccc

SEQ ID NO: 2525 - RNA, 20 nt, Artificial Sequence
  spacer sequence ATCN PAM
ggguguuugugauacguuug

SEQ ID NO: 2526 - RNA, 20 nt, Artificial Sequence
  spacer sequence ATCN PAM
uuuucuucauuucucgagug

SEQ ID NO: 2527 - RNA, 20 nt, Artificial Sequence
  spacer sequence ATCN PAM
ucauuuggacaccuggaaag

SEQ ID NO: 2528 - RNA, 20 nt, Artificial Sequence
  spacer sequence ATCN PAM
uuuggacaccuggaaagccu

SEQ ID NO: 2529 - RNA, 20 nt, Artificial Sequence
  spacer sequence ATCN PAM
aauacuuaaccugggagaaa

SEQ ID NO: 2530 - RNA, 20 nt, Artificial Sequence
  spacer sequence ATCN PAM
ucacagccccaugccucuuc

SEQ ID NO: 2531 - RNA, 20 nt, Artificial Sequence
  spacer sequence ATCN PAM
aucuucacagccccaugccu

SEQ ID NO: 2532 - RNA, 20 nt, Artificial Sequence
  spacer sequence ATCN PAM
cauccaucuucacagcccca

SEQ ID NO: 2533 - RNA, 20 nt, Artificial Sequence
  spacer sequence ATCN PAM
uucucaucgcauccaucuuc

SEQ ID NO: 2534 - RNA, 20 nt, Artificial Sequence
  spacer sequence ATCN PAM
uuugcaaacguuugauucug

SEQ ID NO: 2535 - RNA, 20 nt, Artificial Sequence
  spacer sequence ATCN PAM
aacguuugcaaaugaucauu

SEQ ID NO: 2536 - RNA, 20 nt, Artificial Sequence
  spacer sequence ATCN PAM
gaaucaaacguuugcaaaug

SEQ ID NO: 2537 - RNA, 20 nt, Artificial Sequence
  spacer sequence ATCN PAM
aagccagcagaacacacaac

SEQ ID NO: 2538 - RNA, 20 nt, Artificial Sequence
  spacer sequence ATCN PAM
gcaucaacucacaacaaaug

SEQ ID NO: 2539 - RNA, 20 nt, Artificial Sequence
  spacer sequence ATCN PAM
acucacaacaaaugugcuuu

SEQ ID NO: 2540 - RNA, 20 nt, Artificial Sequence
  spacer sequence ATCN PAM
uuucgaucggucuugagaaa

SEQ ID NO: 2541 - RNA, 20 nt, Artificial Sequence
  spacer sequence ATCN PAM
aaaugauaauauagaggcau

SEQ ID NO: 2542 - RNA, 20 nt, Artificial Sequence
  spacer sequence ATCN PAM
gucuugagaaaauacuagaa

SEQ ID NO: 2543 - RNA, 20 nt, Artificial Sequence
  spacer sequence ATCN PAM
cuccccuugccccuccaccc

SEQ ID NO: 2544 - RNA, 20 nt, Artificial Sequence
  spacer sequence ATCN PAM
acauuaggcauuucuccuaa

SEQ ID NO: 2545 - RNA, 20 nt, Artificial Sequence
  spacer sequence ATCN PAM
ucuacauuaggcauuucucc

SEQ ID NO: 2546 - RNA, 20 nt, Artificial Sequence
  spacer sequence ATCN PAM
acccaucaucuacauuaggc

SEQ ID NO: 2547 - RNA, 20 nt, Artificial Sequence
  spacer sequence ATCN PAM
cagaacuuagaguaaaauaa

SEQ ID NO: 2548 - RNA, 20 nt, Artificial Sequence
  spacer sequence ATCN PAM
aacaugguguuuccaagaga

SEQ ID NO: 2549 - RNA, 20 nt, Artificial Sequence
  spacer sequence ATCN PAM
ggagucucuuggaaacacca

SEQ ID NO: 2550 - RNA, 20 nt, Artificial Sequence
  spacer sequence ATCN PAM
uccaagacuggucugugcac

SEQ ID NO: 2551 - RNA, 20 nt, Artificial Sequence
  spacer sequence ATCN PAM
aagacuggucugugcacgga

SEQ ID NO: 2552 - RNA, 20 nt, Artificial Sequence
  spacer sequence ATCN PAM
guccuggccuuuauggaaag

SEQ ID NO: 2553 - RNA, 20 nt, Artificial Sequence
  spacer sequence ATCN PAM
uggcucacugcaaccuccgc

SEQ ID NO: 2554 - RNA, 20 nt, Artificial Sequence
  spacer sequence ATCN PAM
cuacaaaaaauacaaaaauu

SEQ ID NO: 2555 - RNA, 20 nt, Artificial Sequence
  spacer sequence ATCN PAM
caucucuacaaaaaauacaa

SEQ ID NO: 2556 - RNA, 20 nt, Artificial Sequence
  spacer sequence ATCN PAM
caccauguugcccaggcugg

SEQ ID NO: 2557 - RNA, 20 nt, Artificial Sequence
  spacer sequence ATCN PAM
ugccccaacagucgcccugu

SEQ ID NO: 2558 - RNA, 20 nt, Artificial Sequence
  spacer sequence ATCN PAM
ucgaguuccucacugggagg

SEQ ID NO: 2559 - RNA, 20 nt, Artificial Sequence
  spacer sequence ATCN PAM
cagaaguguccugcugugga

SEQ ID NO: 2560 - RNA, 20 nt, Artificial Sequence
  spacer sequence ATCN PAM
ccucacuugccuuucuggca

SEQ ID NO: 2561 - RNA, 20 nt, Artificial Sequence
  spacer sequence ATCN PAM
cuuggccaagacugucacag

SEQ ID NO: 2562 - RNA, 20 nt, Artificial Sequence
  spacer sequence ATCN PAM
cucuggcaaagucccacaga

SEQ ID NO: 2563 - RNA, 20 nt, Artificial Sequence
  spacer sequence ATCN PAM
uucauuuauaccacugacca

SEQ ID NO: 2564 - RNA, 20 nt, Artificial Sequence
  spacer sequence ATCN PAM
ggaaagaguucccugagcaa

SEQ ID NO: 2565 - RNA, 20 nt, Artificial Sequence
  spacer sequence ATCN PAM
ccaauuugcucagggaacuc

SEQ ID NO: 2566 - RNA, 20 nt, Artificial Sequence
  spacer sequence ATCN PAM
gcgggcaucuccaauuugcu

SEQ ID NO: 2567 - RNA, 20 nt, Artificial Sequence
  spacer sequence ATCN PAM
uuggagcagccucaguccag

SEQ ID NO: 2568 - RNA, 20 nt, Artificial Sequence
  spacer sequence ATCN PAM
gcagaauuaguagagccaag

SEQ ID NO: 2569 - RNA, 20 nt, Artificial Sequence
  spacer sequence ATCN PAM
aauguucccagacaccucca

SEQ ID NO: 2570 - RNA, 20 nt, Artificial Sequence
  spacer sequence ATCN PAM
ucaacuccuuucuacccacc

SEQ ID NO: 2571 - RNA, 20 nt, Artificial Sequence
  spacer sequence ATCN PAM
uuuugcuuccagggccucaa

SEQ ID NO: 2572 - RNA, 20 nt, Artificial Sequence
  spacer sequence ATCN PAM
gugggccggugacagagggg

SEQ ID NO: 2573 - RNA, 20 nt, Artificial Sequence
  spacer sequence ATCN PAM
cagcugccaucgcacucaaa

SEQ ID NO: 2574 - RNA, 20 nt, Artificial Sequence
  spacer sequence ATCN PAM
cacucaaacccugucaggcg

SEQ ID NO: 2575 - RNA, 20 nt, Artificial Sequence
  spacer sequence ATCN PAM
auguaauucaaggcaaagag

SEQ ID NO: 2576 - RNA, 20 nt, Artificial Sequence
  spacer sequence ATCN PAM
gcgugggacagguucuuuug

SEQ ID NO: 2577 - RNA, 20 nt, Artificial Sequence
  spacer sequence ATCN PAM
aaagaaccugucccacgcug

SEQ ID NO: 2578 - RNA, 20 nt, Artificial Sequence
  spacer sequence ATCN PAM
gaaaaugaaacgcuucuguc

SEQ ID NO: 2579 - RNA, 20 nt, Artificial Sequence
  spacer sequence ATCN PAM
aaaaacgguugguggaaggg

SEQ ID NO: 2580 - RNA, 20 nt, Artificial Sequence
  spacer sequence ATCN PAM
gaaguugacagguugggaca

SEQ ID NO: 2581 - RNA, 20 nt, Artificial Sequence
  spacer sequence ATCN PAM
uacuuugcauuuauggccug

SEQ ID NO: 2582 - RNA, 20 nt, Artificial Sequence
  spacer sequence ATCN PAM
caguggggccuccucccggg

SEQ ID NO: 2583 - RNA, 20 nt, Artificial Sequence
  spacer sequence ATCN PAM
uuuacaggccuuuguguuac

SEQ ID NO: 2584 - RNA, 20 nt, Artificial Sequence
  spacer sequence ATCN PAM
aggagaaauggaguggagag

SEQ ID NO: 2585 - RNA, 20 nt, Artificial Sequence
  spacer sequence ATCN PAM
aagucucccuguaaucagca

SEQ ID NO: 2586 - RNA, 20 nt, Artificial Sequence
  spacer sequence ATCN PAM
gcauguaucuaccacugguu

SEQ ID NO: 2587 - RNA, 20 nt, Artificial Sequence
  spacer sequence ATCN PAM
accacugguucuccaacuaa

SEQ ID NO: 2588 - RNA, 20 nt, Artificial Sequence
  spacer sequence ATCN PAM
uaauuauuuauugaggggcu

SEQ ID NO: 2589 - RNA, 20 nt, Artificial Sequence
  spacer sequence ATCN PAM
uuuacuagggaagguuuccc

SEQ ID NO: 2590 - RNA, 20 nt, Artificial Sequence
  spacer sequence ATCN PAM
ucuccugggucaaggcugac

SEQ ID NO: 2591 - RNA, 20 nt, Artificial Sequence
  spacer sequence ATCN PAM
cuucacuguacuauuuuggc

SEQ ID NO: 2592 - RNA, 20 nt, Artificial Sequence
  spacer sequence ATCN PAM
guaauaguguauuuacucaa

SEQ ID NO: 2593 - RNA, 20 nt, Artificial Sequence
  spacer sequence ATCN PAM
gguuaaucauucacuuucca

SEQ ID NO: 2594 - RNA, 20 nt, Artificial Sequence
  spacer sequence ATCN PAM
uucacuuuccaaaugcugug

SEQ ID NO: 2595 - RNA, 20 nt, Artificial Sequence
  spacer sequence ATCN PAM
gcuguagcucuuuuaacugu

SEQ ID NO: 2596 - RNA, 20 nt, Artificial Sequence
  spacer sequence ATCN PAM
uccacauuuuccucuauucu

SEQ ID NO: 2597 - RNA, 20 nt, Artificial Sequence
  spacer sequence ATCN PAM
ccuaccugcacccccaucuc

SEQ ID NO: 2598 - RNA, 20 nt, Artificial Sequence
  spacer sequence ATCN PAM
cugucccaagagaaagaaca

SEQ ID NO: 2599 - RNA, 20 nt, Artificial Sequence
  spacer sequence ATCN PAM
uauuuuugaacucauaguuc

SEQ ID NO: 2600 - RNA, 20 nt, Artificial Sequence
  spacer sequence ATCN PAM
gaggcagggaggcagcuggg

SEQ ID NO: 2601 - RNA, 20 nt, Artificial Sequence
  spacer sequence ATCN PAM
agugcaacuugggugacaag

SEQ ID NO: 2602 - RNA, 20 nt, Artificial Sequence
  spacer sequence ATCN PAM
ugguacagcccagugguggc

SEQ ID NO: 2603 - RNA, 20 nt, Artificial Sequence
  spacer sequence ATCN PAM
ccuugagcacagcagggcuu

SEQ ID NO: 2604 - RNA, 20 nt, Artificial Sequence
  spacer sequence ATCN PAM
cauuccagggcccuucccag

SEQ ID NO: 2605 - RNA, 20 nt, Artificial Sequence
  spacer sequence ATCN PAM
ccuccccucccagcacccca

SEQ ID NO: 2606 - RNA, 20 nt, Artificial Sequence
  spacer sequence ATCN PAM
cugcuugggacaugcuggaa

SEQ ID NO: 2607 - RNA, 20 nt, Artificial Sequence
  spacer sequence ATCN PAM
cugcuucauuuuuguuuuca

SEQ ID NO: 2608 - RNA, 20 nt, Artificial Sequence
  spacer sequence ATCN PAM
uaggaaaaguaaaaacauuc

SEQ ID NO: 2609 - RNA, 20 nt, Artificial Sequence
  spacer sequence ATCN PAM
cuguccuccuucaccugcca

SEQ ID NO: 2610 - RNA, 20 nt, Artificial Sequence
  spacer sequence ATCN PAM
aggugacagugcuguccacg

SEQ ID NO: 2611 - RNA, 20 nt, Artificial Sequence
  spacer sequence ATCN PAM
uucuuuuccccacaugcucc

SEQ ID NO: 2612 - RNA, 20 nt, Artificial Sequence
  spacer sequence ATCN PAM
cacuuguggaaaaaaaaugc

SEQ ID NO: 2613 - RNA, 20 nt, Artificial Sequence
  spacer sequence ATCN PAM
cacagaauguacuaggguuc

SEQ ID NO: 2614 - RNA, 20 nt, Artificial Sequence
  spacer sequence ATCN PAM
caguguccuggaaugagcuc

SEQ ID NO: 2615 - RNA, 20 nt, Artificial Sequence
  spacer sequence ATCN PAM
guccaaccccuuucuuuuga

SEQ ID NO: 2616 - RNA, 20 nt, Artificial Sequence
  spacer sequence ATCN PAM
aguucaucaaggucacuucu

SEQ ID NO: 2617 - RNA, 20 nt, Artificial Sequence
  spacer sequence ATCN PAM
aggucacuucugacucccag

SEQ ID NO: 2618 - RNA, 20 nt, Artificial Sequence
  spacer sequence ATCN PAM
cucaugauucuaucuugaga

SEQ ID NO: 2619 - RNA, 20 nt, Artificial Sequence
  spacer sequence ATCN PAM
ugagagaugcaaaaugucca

SEQ ID NO: 2620 - RNA, 20 nt, Artificial Sequence
  spacer sequence ATCN PAM
ugagaguuuaguuugguugg

SEQ ID NO: 2621 - RNA, 20 nt, Artificial Sequence
  spacer sequence ATCN PAM
gccuccuccccacacaccuc

SEQ ID NO: 2622 - RNA, 20 nt, Artificial Sequence
  spacer sequence ATCN PAM
ggaacuggagaaaagugaga

SEQ ID NO: 2623 - RNA, 20 nt, Artificial Sequence
  spacer sequence ATCN PAM
ggauuuggcauuuaaaucca

SEQ ID NO: 2624 - RNA, 20 nt, Artificial Sequence
  spacer sequence ATCN PAM
ugauuuguggcaaaguuguc

SEQ ID NO: 2625 - RNA, 20 nt, Artificial Sequence
  spacer sequence ATCN PAM
acaggaagcaagaagaauag

SEQ ID NO: 2626 - RNA, 20 nt, Artificial Sequence
  spacer sequence ATCN PAM
auaaauaagcagucccucua

SEQ ID NO: 2627 - RNA, 20 nt, Artificial Sequence
  spacer sequence ATCN PAM
gcaaaucuauaaauaagcag

SEQ ID NO: 2628 - RNA, 20 nt, Artificial Sequence
  spacer sequence ATCN PAM
cauucaucugcaaaucuaua

SEQ ID NO: 2629 - RNA, 20 nt, Artificial Sequence
  spacer sequence ATCN PAM
cccaacccugaaagcacacu

SEQ ID NO: 2630 - RNA, 20 nt, Artificial Sequence
  spacer sequence ATCN PAM
caagguuaagaucagcuucc

SEQ ID NO: 2631 - RNA, 20 nt, Artificial Sequence
  spacer sequence ATCN PAM
uaaccuugggaugcagugug

SEQ ID NO: 2632 - RNA, 20 nt, Artificial Sequence
  spacer sequence ATCN PAM
gcuuccugaaaacagggcag

SEQ ID NO: 2633 - RNA, 20 nt, Artificial Sequence
  spacer sequence ATCN PAM
aguuaaauguagugugguac

SEQ ID NO: 2634 - RNA, 20 nt, Artificial Sequence
  spacer sequence ATCN PAM
caugaacugaauccaguuaa

SEQ ID NO: 2635 - RNA, 20 nt, Artificial Sequence
  spacer sequence ATCN PAM
ucucuuucugaugacauuuu

SEQ ID NO: 2636 - RNA, 20 nt, Artificial Sequence
  spacer sequence ATCN PAM
cuuucugaugacauuuuaaa

SEQ ID NO: 2637 - RNA, 20 nt, Artificial Sequence
  spacer sequence ATCN PAM
gaaagagaugauuacacauu

SEQ ID NO: 2638 - RNA, 20 nt, Artificial Sequence
  spacer sequence ATCN PAM
aacuagacaaauaauugcag

SEQ ID NO: 2639 - RNA, 20 nt, Artificial Sequence
  spacer sequence ATCN PAM
auuauugcugcaauuauuug

SEQ ID NO: 2640 - RNA, 20 nt, Artificial Sequence
  spacer sequence ATCN PAM
uccagcuugacucugcuauc

SEQ ID NO: 2641 - RNA, 20 nt, Artificial Sequence
  spacer sequence ATCN PAM
uugauuggcagaguccccac

SEQ ID NO: 2642 - RNA, 20 nt, Artificial Sequence
  spacer sequence ATCN PAM
augaucuuccagcuugacuc

SEQ ID NO: 2643 - RNA, 20 nt, Artificial Sequence
  spacer sequence ATCN PAM
uucuuucaaacauuacagaa

SEQ ID NO: 2644 - RNA, 20 nt, Artificial Sequence
  spacer sequence ATCN PAM
uuucuguaauguuugaaaga

SEQ ID NO: 2645 - RNA, 20 nt, Artificial Sequence
  spacer sequence ATCN PAM
ucauuucuguaauguuugaa

SEQ ID NO: 2646 - RNA, 20 nt, Artificial Sequence
  spacer sequence ATCN PAM
gcaaaaguuagacuuaaaca

SEQ ID NO: 2647 - RNA, 20 nt, Artificial Sequence
  spacer sequence ATCN PAM
gauuuacugauaaaggcacu

SEQ ID NO: 2648 - RNA, 20 nt, Artificial Sequence
  spacer sequence ATCN PAM
gauuuugagcauuuaucagc

SEQ ID NO: 2649 - RNA, 20 nt, Artificial Sequence
  spacer sequence ATCN PAM
guaaaucagauuuugagcau

SEQ ID NO: 2650 - RNA, 20 nt, Artificial Sequence
  spacer sequence ATCN PAM
ugggcugaagugcagguuuu

SEQ ID NO: 2651 - RNA, 20 nt, Artificial Sequence
  spacer sequence ATCN PAM
cgcaaaguaaucaugggcug

SEQ ID NO: 2652 - RNA, 20 nt, Artificial Sequence
  spacer sequence ATCN PAM
ggcagugugauuuauauuau

SEQ ID NO: 2653 - RNA, 20 nt, Artificial Sequence
  spacer sequence ATCN PAM
cacugccugauucuucucaa

SEQ ID NO: 2654 - RNA, 20 nt, Artificial Sequence
  spacer sequence ATCN PAM
uugcaguuauucaugggaaa

SEQ ID NO: 2655 - RNA, 20 nt, Artificial Sequence
  spacer sequence ATCN PAM
acacaggcgagagaaguguu

SEQ ID NO: 2656 - RNA, 20 nt, Artificial Sequence
  spacer sequence ATCN PAM
ggguuuacagccguuuuccc

SEQ ID NO: 2657 - RNA, 20 nt, Artificial Sequence
  spacer sequence ATCN PAM
cgugguagagaaauggucuu

SEQ ID NO: 2658 - RNA, 20 nt, Artificial Sequence
  spacer sequence ATCN PAM
gcuccauucaggccuuugaa

SEQ ID NO: 2659 - RNA, 20 nt, Artificial Sequence
  spacer sequence ATCN PAM
augccucaaauugggacuca

SEQ ID NO: 2660 - RNA, 20 nt, Artificial Sequence
  spacer sequence ATCN PAM
auuuaaaccacuuuucaaag

SEQ ID NO: 2661 - RNA, 20 nt, Artificial Sequence
  spacer sequence ATCN PAM
uugcacugggcaggggaauu

SEQ ID NO: 2662 - RNA, 20 nt, Artificial Sequence
  spacer sequence ATCN PAM
cuggccaaggucagaagacu

SEQ ID NO: 2663 - RNA, 20 nt, Artificial Sequence
  spacer sequence ATCN PAM
gggacuugccuggucucaag

SEQ ID NO: 2664 - RNA, 20 nt, Artificial Sequence
  spacer sequence ATCN PAM
ucugggacuugccuggucuc

SEQ ID NO: 2665 - RNA, 20 nt, Artificial Sequence
  spacer sequence ATCN PAM
caggcaaguccccagguaua

SEQ ID NO: 2666 - RNA, 20 nt, Artificial Sequence
  spacer sequence ATCN PAM
acugcugucuaugucaugug

SEQ ID NO: 2667 - RNA, 20 nt, Artificial Sequence
  spacer sequence ATCN PAM
aaacacaugacauagacagc

SEQ ID NO: 2668 - RNA, 20 nt, Artificial Sequence
  spacer sequence ATCN PAM
ucucuugaguuauuucugac

SEQ ID NO: 2669 - RNA, 20 nt, Artificial Sequence
  spacer sequence ATCN PAM
aaugaaugagcuggcauauu

SEQ ID NO: 2670 - RNA, 20 nt, Artificial Sequence
  spacer sequence ATCN PAM
acgucugcuaauaugccagc

SEQ ID NO: 2671 - RNA, 20 nt, Artificial Sequence
  spacer sequence ATCN PAM
aaaacagaagauguaucugg

SEQ ID NO: 2672 - RNA, 20 nt, Artificial Sequence
  spacer sequence ATCN PAM
ucuguuuuagauuuuccuua

SEQ ID NO: 2673 - RNA, 20 nt, Artificial Sequence
  spacer sequence ATCN PAM
ggaugcuucagcagacaaca

SEQ ID NO: 2674 - RNA, 20 nt, Artificial Sequence
  spacer sequence ATCN PAM
agauacaucuucuguuuuag

SEQ ID NO: 2675 - RNA, 20 nt, Artificial Sequence
  spacer sequence ATCN PAM
uccuucuagugcuuugggcg

SEQ ID NO: 2676 - RNA, 20 nt, Artificial Sequence
  spacer sequence ATCN PAM
gaagcuuguuagauguaaug

SEQ ID NO: 2677 - RNA, 20 nt, Artificial Sequence
  spacer sequence ATCN PAM
aacaagcuucugauuuuuaa

SEQ ID NO: 2678 - RNA, 20 nt, Artificial Sequence
  spacer sequence ATCN PAM
uuacaucuaacaagcuucug

SEQ ID NO: 2679 - RNA, 20 nt, Artificial Sequence
  spacer sequence ATCN PAM
gcauugugacacuuaccgcg

SEQ ID NO: 2680 - RNA, 20 nt, Artificial Sequence
  spacer sequence ATCN PAM
gagggcuuucuaauuaacag

SEQ ID NO: 2681 - RNA, 20 nt, Artificial Sequence
  spacer sequence ATCN PAM
acagcucaugcuuuugaugc

SEQ ID NO: 2682 - RNA, 20 nt, Artificial Sequence
  spacer sequence ATCN PAM
aaagcaugagcugucgauag

SEQ ID NO: 2683 - RNA, 20 nt, Artificial Sequence
  spacer sequence ATCN PAM
ggcuucugggcuacagggaa

SEQ ID NO: 2684 - RNA, 20 nt, Artificial Sequence
  spacer sequence ATCN PAM
gcacucacauucagcugaaa

SEQ ID NO: 2685 - RNA, 20 nt, Artificial Sequence
  spacer sequence ATCN PAM
ucuuucucaucuucucucuc

SEQ ID NO: 2686 - RNA, 20 nt, Artificial Sequence
  spacer sequence ATCN PAM
ucucucucuuuaguccucaa

SEQ ID NO: 2687 - RNA, 20 nt, Artificial Sequence
  spacer sequence ATCN PAM
guaaaaccuacuucccuuuc

SEQ ID NO: 2688 - RNA, 20 nt, Artificial Sequence
  spacer sequence ATCN PAM
cugcuguuucagugaaaagc

SEQ ID NO: 2689 - RNA, 20 nt, Artificial Sequence
  spacer sequence ATCN PAM
ccauuccaguauaaaaccuc

SEQ ID NO: 2690 - RNA, 20 nt, Artificial Sequence
  spacer sequence ATCN PAM
ccccagacccccagcacaua

SEQ ID NO: 2691 - RNA, 20 nt, Artificial Sequence
  spacer sequence ATCN PAM
aguucaagccaaaaagaaau

SEQ ID NO: 2692 - RNA, 20 nt, Artificial Sequence
  spacer sequence ATCN PAM
ucuguggcacuuguuuagga

SEQ ID NO: 2693 - RNA, 20 nt, Artificial Sequence
  spacer sequence ATCN PAM
aaauaggaaauacaaaaaac

SEQ ID NO: 2694 - RNA, 20 nt, Artificial Sequence
  spacer sequence ATCN PAM
cuugcagccacaauuucgca

SEQ ID NO: 2695 - RNA, 20 nt, Artificial Sequence
  spacer sequence ATCN PAM
agaguguaauggaagucugg

SEQ ID NO: 2696 - RNA, 20 nt, Artificial Sequence
  spacer sequence ATCN PAM
cauugcauuucauaagccag

SEQ ID NO: 2697 - RNA, 20 nt, Artificial Sequence
  spacer sequence ATCN PAM
uuggcauucuugcuggagug

SEQ ID NO: 2698 - RNA, 20 nt, Artificial Sequence
  spacer sequence ATCN PAM
ucguucuuggcuagcagaug

SEQ ID NO: 2699 - RNA, 20 nt, Artificial Sequence
  spacer sequence ATCN PAM
gcuagccaagaacgaagaug

SEQ ID NO: 2700 - RNA, 20 nt, Artificial Sequence
  spacer sequence ATCN PAM
acucauuuaaaaagaaaaac

SEQ ID NO: 2701 - RNA, 20 nt, Artificial Sequence
  spacer sequence ATCN PAM
aacgucacgaagcugcugaa

SEQ ID NO: 2702 - RNA, 20 nt, Artificial Sequence
  spacer sequence ATCN PAM
agguugcugggacagcuucc

SEQ ID NO: 2703 - RNA, 20 nt, Artificial Sequence
  spacer sequence ATCN PAM
ggugaagggcuacuucuggg

SEQ ID NO: 2704 - RNA, 20 nt, Artificial Sequence
  spacer sequence ATCN PAM
aucuggugaagggcuacuuc

SEQ ID NO: 2705 - RNA, 20 nt, Artificial Sequence
  spacer sequence ATCN PAM
caucaccagauagcucuugg

SEQ ID NO: 2706 - RNA, 20 nt, Artificial Sequence
  spacer sequence ATCN PAM
ccagauagcucuuggaaaua

SEQ ID NO: 2707 - RNA, 20 nt, Artificial Sequence
  spacer sequence ATCN PAM
ggugaugggauccaucuggu

SEQ ID NO: 2708 - RNA, 20 nt, Artificial Sequence
  spacer sequence ATCN PAM
gauucucauuuucaacaaga

SEQ ID NO: 2709 - RNA, 20 nt, Artificial Sequence
  spacer sequence ATCN PAM
gaugcagcaauguauuauuu

SEQ ID NO: 2710 - RNA, 20 nt, Artificial Sequence
  spacer sequence ATCN PAM
cauuccucagccuucuuguu

SEQ ID NO: 2711 - RNA, 20 nt, Artificial Sequence
  spacer sequence ATCN PAM
uuuuaguauguuuagggauc

SEQ ID NO: 2712 - RNA, 20 nt, Artificial Sequence
  spacer sequence ATCN PAM
cuaaacauacuaaaaagauu

SEQ ID NO: 2713 - RNA, 20 nt, Artificial Sequence
  spacer sequence ATCN PAM
auuuccauaucuacccaaaa

SEQ ID NO: 2714 - RNA, 20 nt, Artificial Sequence
  spacer sequence ATCN PAM
acccaaaaucuccaagcccc

SEQ ID NO: 2715 - RNA, 20 nt, Artificial Sequence
  spacer sequence ATCN PAM
ccaagccccuuguucuauca

SEQ ID NO: 2716 - RNA, 20 nt, Artificial Sequence
  spacer sequence ATCN PAM
gcaggucaagaguagagaac

SEQ ID NO: 2717 - RNA, 20 nt, Artificial Sequence
  spacer sequence ATCN PAM
auuucagaauggagaacagc

SEQ ID NO: 2718 - RNA, 20 nt, Artificial Sequence
  spacer sequence ATCN PAM
uagggagacugguacugggg

SEQ ID NO: 2719 - RNA, 20 nt, Artificial Sequence
  spacer sequence ATCN PAM
ccaguaccagucucccuagg

SEQ ID NO: 2720 - RNA, 20 nt, Artificial Sequence
  spacer sequence ATCN PAM
caagucauucucuggaaagg

SEQ ID NO: 2721 - RNA, 20 nt, Artificial Sequence
  spacer sequence ATCN PAM
aagugagacaccaaucacag

SEQ ID NO: 2722 - RNA, 20 nt, Artificial Sequence
  spacer sequence ATCN PAM
cagcucuacuggcccaccuu

SEQ ID NO: 2723 - RNA, 20 nt, Artificial Sequence
  spacer sequence ATCN PAM
guucuuucucauugugugag

SEQ ID NO: 2724 - RNA, 20 nt, Artificial Sequence
  spacer sequence ATCN PAM
cucaaaaugugugugugugu

SEQ ID NO: 2725 - RNA, 20 nt, Artificial Sequence
  spacer sequence ATCN PAM
aagauacugaaagaaaaugg

SEQ ID NO: 2726 - RNA, 20 nt, Artificial Sequence
  spacer sequence ATCN PAM
uagauugguaggucuuuaga

SEQ ID NO: 2727 - RNA, 20 nt, Artificial Sequence
  spacer sequence ATCN PAM
ggcccagaaaagccuugaaa

SEQ ID NO: 2728 - RNA, 20 nt, Artificial Sequence
  spacer sequence ATCN PAM
acagaccacagcccugugau

SEQ ID NO: 2729 - RNA, 20 nt, Artificial Sequence
  spacer sequence ATCN PAM
cagggcuguggucuguggau

SEQ ID NO: 2730 - RNA, 20 nt, Artificial Sequence
  spacer sequence ATCN PAM
cauguccaucacagggcugu

SEQ ID NO: 2731 - RNA, 20 nt, Artificial Sequence
  spacer sequence ATCN PAM
ucuggcuuugagaugaauaa

SEQ ID NO: 2732 - RNA, 20 nt, Artificial Sequence
  spacer sequence ATCN PAM
caaagccagaggaucucaug

SEQ ID NO: 2733 - RNA, 20 nt, Artificial Sequence
  spacer sequence ATCN PAM
ugcugcucauuucugugcau

SEQ ID NO: 2734 - RNA, 20 nt, Artificial Sequence
  spacer sequence ATCN PAM
aucaugcugcucauuucugu

SEQ ID NO: 2735 - RNA, 20 nt, Artificial Sequence
  spacer sequence ATCN PAM
gccagcuaauccaucaugcu

SEQ ID NO: 2736 - RNA, 20 nt, Artificial Sequence
  spacer sequence ATCN PAM
ggauugggccugaaacuucu

SEQ ID NO: 2737 - RNA, 20 nt, Artificial Sequence
  spacer sequence ATCN PAM
ugauguugaguuggcauguu

SEQ ID NO: 2738 - RNA, 20 nt, Artificial Sequence
  spacer sequence ATCN PAM
aggccuuccugagagaaguu

SEQ ID NO: 2739 - RNA, 20 nt, Artificial Sequence
  spacer sequence ATCN PAM
aaugcuaucaaggccuuccu

SEQ ID NO: 2740 - RNA, 20 nt, Artificial Sequence
  spacer sequence ATCN PAM
cuucccagggagacguuccc

SEQ ID NO: 2741 - RNA, 20 nt, Artificial Sequence
  spacer sequence ATCN PAM
cucugucucucaaaccuggc

SEQ ID NO: 2742 - RNA, 20 nt, Artificial Sequence
  spacer sequence ATCN PAM
gaacaaauuaauauuuaauu

SEQ ID NO: 2743 - RNA, 20 nt, Artificial Sequence
  spacer sequence ATCN PAM
uaaaauuaaauauuaauuug

SEQ ID NO: 2744 - RNA, 20 nt, Artificial Sequence
  spacer sequence ATCN PAM
gaauaaaaaagacucgggag

SEQ ID NO: 2745 - RNA, 20 nt, Artificial Sequence
  spacer sequence ATCN PAM
cccgagucuuuuuuauucug

SEQ ID NO: 2746 - RNA, 20 nt, Artificial Sequence
  spacer sequence ATCN PAM
cagguuggaggcagggaaac

SEQ ID NO: 2747 - RNA, 20 nt, Artificial Sequence
  spacer sequence ATCN PAM
uuccccuuccugccuugugg

SEQ ID NO: 2748 - RNA, 20 nt, Artificial Sequence
  spacer sequence ATCN PAM
uuacauggguaaaagguuag

SEQ ID NO: 2749 - RNA, 20 nt, Artificial Sequence
  spacer sequence ATCN PAM
aguuaauguaauauuuugcc

SEQ ID NO: 2750 - RNA, 20 nt, Artificial Sequence
  spacer sequence ATCN PAM
augaaagaguaagauaauuu

SEQ ID NO: 2751 - RNA, 20 nt, Artificial Sequence
  spacer sequence ATCN PAM
uacucuuucauugauuaaag

SEQ ID NO: 2752 - RNA, 20 nt, Artificial Sequence
  spacer sequence ATCN PAM
aauuaucuuacucuuucauu

SEQ ID NO: 2753 - RNA, 20 nt, Artificial Sequence
  spacer sequence ATCN PAM
uauaaaacucccuaaccuau

SEQ ID NO: 2754 - RNA, 20 nt, Artificial Sequence
  spacer sequence ATCN PAM
acuugcaaaauauagguuag

SEQ ID NO: 2755 - RNA, 20 nt, Artificial Sequence
  spacer sequence ATCN PAM
ccagucaggcuuucaggugu

SEQ ID NO: 2756 - RNA, 20 nt, Artificial Sequence
  spacer sequence ATCN PAM
guauggaaauugggaaaucg

SEQ ID NO: 2757 - RNA, 20 nt, Artificial Sequence
  spacer sequence ATCN PAM
ucuucucaaauguagauuau

SEQ ID NO: 2758 - RNA, 20 nt, Artificial Sequence
  spacer sequence ATCN PAM
acauuugagaagacgauuuc

SEQ ID NO: 2759 - RNA, 20 nt, Artificial Sequence
  spacer sequence ATCN PAM
ucccuugggauccuucugga

SEQ ID NO: 2760 - RNA, 20 nt, Artificial Sequence
  spacer sequence ATCN PAM
caagggaagauaaucuacau

SEQ ID NO: 2761 - RNA, 20 nt, Artificial Sequence
  spacer sequence ATCN PAM
uucuggagggcuauaaauaa

SEQ ID NO: 2762 - RNA, 20 nt, Artificial Sequence
  spacer sequence ATCN PAM
acauuagauauuuaaaaaug

SEQ ID NO: 2763 - RNA, 20 nt, Artificial Sequence
  spacer sequence ATCN PAM
aauguugauuaguauguucu

SEQ ID NO: 2764 - RNA, 20 nt, Artificial Sequence
  spacer sequence ATCN PAM
guauucauuuuuaaauaucu

SEQ ID NO: 2765 - RNA, 20 nt, Artificial Sequence
  spacer sequence ATCN PAM
gaaucuguauucauuuuuaa

SEQ ID NO: 2766 - RNA, 20 nt, Artificial Sequence
  spacer sequence ATCN PAM
uuuaguuuucccuuaaucug

SEQ ID NO: 2767 - RNA, 20 nt, Artificial Sequence
  spacer sequence ATCN PAM
agaacaaaacaaaacaaaaa

SEQ ID NO: 2768 - RNA, 20 nt, Artificial Sequence
  spacer sequence ATCN PAM
gcuaagccuucuuuuucaug

SEQ ID NO: 2769 - RNA, 20 nt, Artificial Sequence
  spacer sequence ATCN PAM
cccuuaaguuagcccuauuc

SEQ ID NO: 2770 - RNA, 20 nt, Artificial Sequence
  spacer sequence ATCN PAM
accauucuaucuaaggaagc

SEQ ID NO: 2771 - RNA, 20 nt, Artificial Sequence
  spacer sequence ATCN PAM
aaggaagcugcagaaaggug

SEQ ID NO: 2772 - RNA, 20 nt, Artificial Sequence
  spacer sequence ATCN PAM
ggauaagaauuuggucuaaa

SEQ ID NO: 2773 - RNA, 20 nt, Artificial Sequence
  spacer sequence ATCN PAM
agauuucccauuaaagguuc

SEQ ID NO: 2774 - RNA, 20 nt, Artificial Sequence
  spacer sequence ATCN PAM
gggagcuggaguuggaguac

SEQ ID NO: 2775 - RNA, 20 nt, Artificial Sequence
  spacer sequence ATCN PAM
gccacuaaagguuuacugac

SEQ ID NO: 2776 - RNA, 20 nt, Artificial Sequence
  spacer sequence ATCN PAM
aaaccuggggaagcaauaua

SEQ ID NO: 2777 - RNA, 20 nt, Artificial Sequence
  spacer sequence ATCN PAM
aauuguucauauauugcuuc

SEQ ID NO: 2778 - RNA, 20 nt, Artificial Sequence
  spacer sequence ATCN PAM
auaagcauuuaauaucuaau

SEQ ID NO: 2779 - RNA, 20 nt, Artificial Sequence
  spacer sequence ATCN PAM
cucucugugcuauuacuuuu

SEQ ID NO: 2780 - RNA, 20 nt, Artificial Sequence
  spacer sequence ATCN PAM
uggaagaguuugucucacgg

SEQ ID NO: 2781 - RNA, 20 nt, Artificial Sequence
  spacer sequence ATCN PAM
gacuauuucaucaaagccug

SEQ ID NO: 2782 - RNA, 20 nt, Artificial Sequence
  spacer sequence ATCN PAM
aagccuguaaaagauaccug

SEQ ID NO: 2783 - RNA, 20 nt, Artificial Sequence
  spacer sequence ATCN PAM
uuuacaggcuuugaugaaau

SEQ ID NO: 2784 - RNA, 20 nt, Artificial Sequence
  spacer sequence ATCN PAM
ugacucagguaucuuuuaca

SEQ ID NO: 2785 - RNA, 20 nt, Artificial Sequence
  spacer sequence ATCN PAM
aguuacaauuugacagcauu

SEQ ID NO: 2786 - RNA, 20 nt, Artificial Sequence
  spacer sequence ATCN PAM
uuaaaugcugucaaauugua

SEQ ID NO: 2787 - RNA, 20 nt, Artificial Sequence
  spacer sequence ATCN PAM
caaguacugucaucuuuaaa

SEQ ID NO: 2788 - RNA, 20 nt, Artificial Sequence
  spacer sequence ATCN PAM
uguuauggcauuguccuauu

SEQ ID NO: 2789 - RNA, 20 nt, Artificial Sequence
  spacer sequence ATCN PAM
augaucaguuuuuguuucau

SEQ ID NO: 2790 - RNA, 20 nt, Artificial Sequence
  spacer sequence ATCN PAM
uagaugacauuaccuaaaug

SEQ ID NO: 2791 - RNA, 20 nt, Artificial Sequence
  spacer sequence ATCN PAM
guuuuuguuucauuuuuugc

SEQ ID NO: 2792 - RNA, 20 nt, Artificial Sequence
  spacer sequence ATCN PAM
guaucaauagccaaagaucc

SEQ ID NO: 2793 - RNA, 20 nt, Artificial Sequence
  spacer sequence ATCN PAM
auagccaaagauccaaaaac

SEQ ID NO: 2794 - RNA, 20 nt, Artificial Sequence
  spacer sequence ATCN PAM
uuggcuauugauacugauuu

SEQ ID NO: 2795 - RNA, 20 nt, Artificial Sequence
  spacer sequence ATCN PAM
aaaaacagccuaaagccacu

SEQ ID NO: 2796 - RNA, 20 nt, Artificial Sequence
  spacer sequence ATCN PAM
uuuuggguagcaguggcuuu

SEQ ID NO: 2797 - RNA, 20 nt, Artificial Sequence
  spacer sequence ATCN PAM
cggcucaccgcaaucuccgc

SEQ ID NO: 2798 - RNA, 20 nt, Artificial Sequence
  spacer sequence ATCN PAM
ccgccucccggguucaagcg

SEQ ID NO: 2799 - RNA, 20 nt, Artificial Sequence
  spacer sequence ATCN PAM
cuugaacccgggaggcggag

SEQ ID NO: 2800 - RNA, 20 nt, Artificial Sequence
  spacer sequence ATCN PAM
cagcuacuugggaggcugag

SEQ ID NO: 2801 - RNA, 20 nt, Artificial Sequence
  spacer sequence ATCN PAM
ccuaaggucgggaguuugag

SEQ ID NO: 2802 - RNA, 20 nt, Artificial Sequence
  spacer sequence ATCN PAM
acccaccucagccucccaaa

SEQ ID NO: 2803 - RNA, 20 nt, Artificial Sequence
  spacer sequence ATCN PAM
cagcacuuugggaggcugag

SEQ ID NO: 2804 - RNA, 20 nt, Artificial Sequence
  spacer sequence ATCN PAM
ucaaagaaaaaaaaugcugu

SEQ ID NO: 2805 - RNA, 20 nt, Artificial Sequence
  spacer sequence ATCN PAM
aaauucauacaauagaggca

SEQ ID NO: 2806 - RNA, 20 nt, Artificial Sequence
  spacer sequence ATCN PAM
uccaggaugacaaacagcca

SEQ ID NO: 2807 - RNA, 20 nt, Artificial Sequence
  spacer sequence ATCN PAM
aggaugacaaacagccacac

SEQ ID NO: 2808 - RNA, 20 nt, Artificial Sequence
  spacer sequence ATCN PAM
uggaugaugaggcagcuauu

SEQ ID NO: 2809 - RNA, 20 nt, Artificial Sequence
  spacer sequence ATCN PAM
caaaagaaaauucugaguag

SEQ ID NO: 2810 - RNA, 20 nt, Artificial Sequence
  spacer sequence ATCN PAM
cugcuuuccuuguucccugg

SEQ ID NO: 2811 - RNA, 20 nt, Artificial Sequence
  spacer sequence ATCN PAM
ccugagcccccgggccguuc

SEQ ID NO: 2812 - RNA, 20 nt, Artificial Sequence
  spacer sequence ATCN PAM
gccccccucucaccccaucc

SEQ ID NO: 2813 - RNA, 20 nt, Artificial Sequence
  spacer sequence ATCN PAM
aaaaauguuuacucaaguuc

SEQ ID NO: 2814 - RNA, 20 nt, Artificial Sequence
  spacer sequence ATCN PAM
cucuuuaauaguguccuccu

SEQ ID NO: 2815 - RNA, 20 nt, Artificial Sequence
  spacer sequence ATCN PAM
cagggauaugaauuuugaug

SEQ ID NO: 2816 - RNA, 20 nt, Artificial Sequence
  spacer sequence ATCN PAM
cugugaucucucuuuaauag

SEQ ID NO: 2817 - RNA, 20 nt, Artificial Sequence
  spacer sequence ATCN PAM
aaauucauaucccugugauc

SEQ ID NO: 2818 - RNA, 20 nt, Artificial Sequence
  spacer sequence ATCN PAM
ucaaaaugauaaaugcuauc

SEQ ID NO: 2819 - RNA, 20 nt, Artificial Sequence
  spacer sequence ATCN PAM
aaaugauaaaugcuaucaug

SEQ ID NO: 2820 - RNA, 20 nt, Artificial Sequence
  spacer sequence ATCN PAM
uuuugaugauaugugacaaa

SEQ ID NO: 2821 - RNA, 20 nt, Artificial Sequence
  spacer sequence ATCN PAM
ugaaacaccauccaugcccu

SEQ ID NO: 2822 - RNA, 20 nt, Artificial Sequence
  spacer sequence ATCN PAM
augcccugaguaucccaaca

SEQ ID NO: 2823 - RNA, 20 nt, Artificial Sequence
  spacer sequence ATCN PAM
caacauggauggacuggagg

SEQ ID NO: 2824 - RNA, 20 nt, Artificial Sequence
  spacer sequence ATCN PAM
auguugggauacucagggca

SEQ ID NO: 2825 - RNA, 20 nt, Artificial Sequence
  spacer sequence ATCN PAM
gggucuguauuggucccuug

SEQ ID NO: 2826 - RNA, 20 nt, Artificial Sequence
  spacer sequence ATCN PAM
agggcccaucagggucugua

SEQ ID NO: 2827 - RNA, 20 nt, Artificial Sequence
  spacer sequence ATCN PAM
gcaaugggggcaaaggcaaa

SEQ ID NO: 2828 - RNA, 20 nt, Artificial Sequence
  spacer sequence ATCN PAM
uggaaagcuuuccuuuugcc

SEQ ID NO: 2829 - RNA, 20 nt, Artificial Sequence
  spacer sequence ATCN PAM
gguuccauucugcuagugaa

SEQ ID NO: 2830 - RNA, 20 nt, Artificial Sequence
  spacer sequence ATCN PAM
ucuagaacauauaagucaac

SEQ ID NO: 2831 - RNA, 20 nt, Artificial Sequence
  spacer sequence ATCN PAM
acccccuuugcagaguccuc

SEQ ID NO: 2832 - RNA, 20 nt, Artificial Sequence
  spacer sequence ATCN PAM
ccuagcaugcugccuuuguc

SEQ ID NO: 2833 - RNA, 20 nt, Artificial Sequence
  spacer sequence ATCN PAM
gaagacaaaggcagcaugcu

SEQ ID NO: 2834 - RNA, 20 nt, Artificial Sequence
  spacer sequence ATCN PAM
gaguauuucagcagcccucu

SEQ ID NO: 2835 - RNA, 20 nt, Artificial Sequence
  spacer sequence ATCN PAM
cagagggcugcugaaauacu

SEQ ID NO: 2836 - RNA, 20 nt, Artificial Sequence
  spacer sequence ATCN PAM
auaggauaugguccaacucc

SEQ ID NO: 2837 - RNA, 20 nt, Artificial Sequence
  spacer sequence ATCN PAM
uauagaucacagagggcugc

SEQ ID NO: 2838 - RNA, 20 nt, Artificial Sequence
  spacer sequence ATCN PAM
uuccagagcuccacaaucca

SEQ ID NO: 2839 - RNA, 20 nt, Artificial Sequence
  spacer sequence ATCN PAM
aacuccaauuuucuauucca

SEQ ID NO: 2840 - RNA, 20 nt, Artificial Sequence
  spacer sequence ATCN PAM
aggaaaauauucugcccaag

SEQ ID NO: 2841 - RNA, 20 nt, Artificial Sequence
  spacer sequence ATCN PAM
cuuccguucucauuuccuuc

SEQ ID NO: 2842 - RNA, 20 nt, Artificial Sequence
  spacer sequence ATCN PAM
ugcucauacuucaaggccuc

SEQ ID NO: 2843 - RNA, 20 nt, Artificial Sequence
  spacer sequence ATCN PAM
aucucauccuucuccaaccu

SEQ ID NO: 2844 - RNA, 20 nt, Artificial Sequence
  spacer sequence ATCN PAM
cauccuucuccaaccucaua

SEQ ID NO: 2845 - RNA, 20 nt, Artificial Sequence
  spacer sequence ATCN PAM
uucuccaaccucauagaaca

SEQ ID NO: 2846 - RNA, 20 nt, Artificial Sequence
  spacer sequence ATCN PAM
caugcaccacucccugacuc

SEQ ID NO: 2847 - RNA, 20 nt, Artificial Sequence
  spacer sequence ATCN PAM
aggccuuacauugcugguua

SEQ ID NO: 2848 - RNA, 20 nt, Artificial Sequence
  spacer sequence ATCN PAM
ugucacaugcugugcuggua

SEQ ID NO: 2849 - RNA, 20 nt, Artificial Sequence
  spacer sequence ATCN PAM
gucauuuauaugcuauuugu

SEQ ID NO: 2850 - RNA, 20 nt, Artificial Sequence
  spacer sequence ATCN PAM
uuucuguucaaaaugguaau

SEQ ID NO: 2851 - RNA, 20 nt, Artificial Sequence
  spacer sequence ATCN PAM
gaagggaaauguuugugggu

SEQ ID NO: 2852 - RNA, 20 nt, Artificial Sequence
  spacer sequence ATCN PAM
acuugaacuuucagauaaaa

SEQ ID NO: 2853 - RNA, 20 nt, Artificial Sequence
  spacer sequence ATCN PAM
gaaaguucaaguagauauca

SEQ ID NO: 2854 - RNA, 20 nt, Artificial Sequence
  spacer sequence ATCN PAM
uuguguagcauaacauguua

SEQ ID NO: 2855 - RNA, 20 nt, Artificial Sequence
  spacer sequence ATCN PAM
acccucuuuaaacagccacc

SEQ ID NO: 2856 - RNA, 20 nt, Artificial Sequence
  spacer sequence ATCN PAM
ucuauaugugaagcccaacu

SEQ ID NO: 2857 - RNA, 20 nt, Artificial Sequence
  spacer sequence ATCN PAM
gcaaagaaguuagucucagc

SEQ ID NO: 2858 - RNA, 20 nt, Artificial Sequence
  spacer sequence ATCN PAM
ucaaugcaaaaagcuaaguu

SEQ ID NO: 2859 - RNA, 20 nt, Artificial Sequence
  spacer sequence ATCN PAM
aaaugagguccuuuuuagua

SEQ ID NO: 2860 - RNA, 20 nt, Artificial Sequence
  spacer sequence ATCN PAM
uuugaaaugcucccggccag

SEQ ID NO: 2861 - RNA, 20 nt, Artificial Sequence
  spacer sequence ATCN PAM
cagcacuuugggaggccggg

SEQ ID NO: 2862 - RNA, 20 nt, Artificial Sequence
  spacer sequence ATCN PAM
uccugccccggccucccaaa

SEQ ID NO: 2863 - RNA, 20 nt, Artificial Sequence
  spacer sequence ATCN PAM
ccugaggucaggaguucaag

SEQ ID NO: 2864 - RNA, 20 nt, Artificial Sequence
  spacer sequence ATCN PAM
ugaacuccugaccucaggug

SEQ ID NO: 2865 - RNA, 20 nt, Artificial Sequence
  spacer sequence ATCN PAM
guuuggacaacacagugaaa

SEQ ID NO: 2866 - RNA, 20 nt, Artificial Sequence
  spacer sequence ATCN PAM
cagcuacucgggaggcugag

SEQ ID NO: 2867 - RNA, 20 nt, Artificial Sequence
  spacer sequence ATCN PAM
ccugccucagccucccgagu

SEQ ID NO: 2868 - RNA, 20 nt, Artificial Sequence
  spacer sequence ATCN PAM
cuugaaccugggaggcagaa

SEQ ID NO: 2869 - RNA, 20 nt, Artificial Sequence
  spacer sequence ATCN PAM
ucugccucccagguucaagc

SEQ ID NO: 2870 - RNA, 20 nt, Artificial Sequence
  spacer sequence ATCN PAM
cggcucacugcaucuucugc

SEQ ID NO: 2871 - RNA, 20 nt, Artificial Sequence
  spacer sequence ATCN PAM
cgccauugcauuccagcccg

SEQ ID NO: 2872 - RNA, 20 nt, Artificial Sequence
  spacer sequence ATCN PAM
ccgucucaccaaaaaaagaa

SEQ ID NO: 2873 - RNA, 20 nt, Artificial Sequence
  spacer sequence ATCN PAM
ucacuccguguugagagcca

SEQ ID NO: 2874 - RNA, 20 nt, Artificial Sequence
  spacer sequence ATCN PAM
cuccguguugagagccaagu

SEQ ID NO: 2875 - RNA, 20 nt, Artificial Sequence
  spacer sequence ATCN PAM
auacaguccuuagcacccaa

SEQ ID NO: 2876 - RNA, 20 nt, Artificial Sequence
  spacer sequence ATCN PAM
gccaaauaaaugaaguucag

SEQ ID NO: 2877 - RNA, 20 nt, Artificial Sequence
  spacer sequence ATCN PAM
gaacuucauuuauuuggcag

SEQ ID NO: 2878 - RNA, 20 nt, Artificial Sequence
  spacer sequence ATCN PAM
ggagaggaagauggauguag

SEQ ID NO: 2879 - RNA, 20 nt, Artificial Sequence
  spacer sequence ATCN PAM
uccucuccagauucccucuc

SEQ ID NO: 2880 - RNA, 20 nt, Artificial Sequence
  spacer sequence ATCN PAM
aucuuccucuccagauuccc

SEQ ID NO: 2881 - RNA, 20 nt, Artificial Sequence
  spacer sequence ATCN PAM
ccugugcugaauuccuguaa

SEQ ID NO: 2882 - RNA, 20 nt, Artificial Sequence
  spacer sequence ATCN PAM
ccgcuuaaggagaagacaua

SEQ ID NO: 2883 - RNA, 20 nt, Artificial Sequence
  spacer sequence ATCN PAM
guaugucuucuccuuaagcg

SEQ ID NO: 2884 - RNA, 20 nt, Artificial Sequence
  spacer sequence ATCN PAM
cagcacuuugggaggucaag

SEQ ID NO: 2885 - RNA, 20 nt, Artificial Sequence
  spacer sequence ATCN PAM
uccugccuugaccucccaaa

SEQ ID NO: 2886 - RNA, 20 nt, Artificial Sequence
  spacer sequence ATCN PAM
cuggagcccaggaguucaag

SEQ ID NO: 2887 - RNA, 20 nt, Artificial Sequence
  spacer sequence ATCN PAM
cuacaaaauuagccaggcau

SEQ ID NO: 2888 - RNA, 20 nt, Artificial Sequence
  spacer sequence ATCN PAM
ugucaccucagccuccugag

SEQ ID NO: 2889 - RNA, 20 nt, Artificial Sequence
  spacer sequence ATCN PAM
ccuaggcucaagccauccug

SEQ ID NO: 2890 - RNA, 20 nt, Artificial Sequence
  spacer sequence ATCN PAM
aggcugcagugagcuaugaa

SEQ ID NO: 2891 - RNA, 20 nt, Artificial Sequence
  spacer sequence ATCN PAM
guuuuccuagaauuccagca

SEQ ID NO: 2892 - RNA, 20 nt, Artificial Sequence
  spacer sequence ATCN PAM
accauaagcagagcauuugg

SEQ ID NO: 2893 - RNA, 20 nt, Artificial Sequence
  spacer sequence ATCN PAM
cagugggccucccucucucu

SEQ ID NO: 2894 - RNA, 20 nt, Artificial Sequence
  spacer sequence ATCN PAM
cagaauacaaagggcauucu

SEQ ID NO: 2895 - RNA, 20 nt, Artificial Sequence
  spacer sequence ATCN PAM
aacuguacacuuaaaaugaa

SEQ ID NO: 2896 - RNA, 20 nt, Artificial Sequence
  spacer sequence ATCN PAM
agauacagaacacguccacc

SEQ ID NO: 2897 - RNA, 20 nt, Artificial Sequence
  spacer sequence ATCN PAM
ugauuuugguggaggccaca

SEQ ID NO: 2898 - RNA, 20 nt, Artificial Sequence
  spacer sequence ATCN PAM
ccuucccuaacccucugacc

SEQ ID NO: 2899 - RNA, 20 nt, Artificial Sequence
  spacer sequence ATCN PAM
uguaugaguccauuuguaac

SEQ ID NO: 2900 - RNA, 20 nt, Artificial Sequence
  spacer sequence ATCN PAM
ucuuuuguguuuaauuucuu

SEQ ID NO: 2901 - RNA, 20 nt, Artificial Sequence
  spacer sequence ATCN PAM
uucugcucuguggaagaaau

SEQ ID NO: 2902 - RNA, 20 nt, Artificial Sequence
  spacer sequence ATCN PAM
cagaaucauucugcucugug

SEQ ID NO: 2903 - RNA, 20 nt, Artificial Sequence
  spacer sequence ATCN PAM
augguguggaguguguuacu

SEQ ID NO: 2904 - RNA, 20 nt, Artificial Sequence
  spacer sequence ATCN PAM
auucaaccuauugguugcca

SEQ ID NO: 2905 - RNA, 20 nt, Artificial Sequence
  spacer sequence ATCN PAM
acacaguguccauuguagca

SEQ ID NO: 2906 - RNA, 20 nt, Artificial Sequence
  spacer sequence ATCN PAM
aaggcauuucgagaacacag

SEQ ID NO: 2907 - RNA, 20 nt, Artificial Sequence
  spacer sequence ATCN PAM
uccaggcugccccccuccca

SEQ ID NO: 2908 - RNA, 20 nt, Artificial Sequence
  spacer sequence ATCN PAM
cagcuaucuguuuggcucag

SEQ ID NO: 2909 - RNA, 20 nt, Artificial Sequence
  spacer sequence ATCN PAM
guuuggcucagcuaccaaau

SEQ ID NO: 2910 - RNA, 20 nt, Artificial Sequence
  spacer sequence ATCN PAM
uauuccgaauagaaaccucu

SEQ ID NO: 2911 - RNA, 20 nt, Artificial Sequence
  spacer sequence ATCN PAM
uuuccuuaguguaguggaga

SEQ ID NO: 2912 - RNA, 20 nt, Artificial Sequence
  spacer sequence ATCN PAM
ggccaaauaaauuggacucu

SEQ ID NO: 2913 - RNA, 20 nt, Artificial Sequence
  spacer sequence ATCN PAM
cugacccagaguccaauuua

SEQ ID NO: 2914 - RNA, 20 nt, Artificial Sequence
  spacer sequence ATCN PAM
ccuugacucuccaugcugcu

SEQ ID NO: 2915 - RNA, 20 nt, Artificial Sequence
  spacer sequence ATCN PAM
aggucucacacaacacucca

SEQ ID NO: 2916 - RNA, 20 nt, Artificial Sequence
  spacer sequence ATCN PAM
uaauuuccugcacugaagcu

SEQ ID NO: 2917 - RNA, 20 nt, Artificial Sequence
  spacer sequence ATCN PAM
ucaucagcuuggccauggca

SEQ ID NO: 2918 - RNA, 20 nt, Artificial Sequence
  spacer sequence ATCN PAM
gcuuggccauggcagggcug

SEQ ID NO: 2919 - RNA, 20 nt, Artificial Sequence
  spacer sequence ATCN PAM
cccagcccugccauggccaa

SEQ ID NO: 2920 - RNA, 20 nt, Artificial Sequence
  spacer sequence ATCN PAM
gaggugaacaggaagcagaa

SEQ ID NO: 2921 - RNA, 20 nt, Artificial Sequence
  spacer sequence ATCN PAM
gcuuccgccacugccugagg

SEQ ID NO: 2922 - RNA, 20 nt, Artificial Sequence
  spacer sequence ATCN PAM
uagacaacaaugcaaggggg

SEQ ID NO: 2923 - RNA, 20 nt, Artificial Sequence
  spacer sequence ATCN PAM
uugagcuacacaggcuaagc

SEQ ID NO: 2924 - RNA, 20 nt, Artificial Sequence
  spacer sequence ATCN PAM
cccucucucacucuugcuua

SEQ ID NO: 2925 - RNA, 20 nt, Artificial Sequence
  spacer sequence ATCN PAM
gugcauggccucuaaacugg

SEQ ID NO: 2926 - RNA, 20 nt, Artificial Sequence
  spacer sequence ATCN PAM
ccaauacccuaaugucuuau

SEQ ID NO: 2927 - RNA, 20 nt, Artificial Sequence
  spacer sequence ATCN PAM
uaugcaauuuuugccaagau

SEQ ID NO: 2928 - RNA, 20 nt, Artificial Sequence
  spacer sequence ATCN PAM
uggcaaaaauugcauaagau

SEQ ID NO: 2929 - RNA, 20 nt, Artificial Sequence
  spacer sequence ATCN PAM
cacugagcucugggccguuu

SEQ ID NO: 2930 - RNA, 20 nt, Artificial Sequence
  spacer sequence ATCN PAM
caucucacugagcucugggc

SEQ ID NO: 2931 - RNA, 20 nt, Artificial Sequence
  spacer sequence ATCN PAM
aaggggacgaaaaguguuca

SEQ ID NO: 2932 - RNA, 20 nt, Artificial Sequence
  spacer sequence ATCN PAM
cccuaaucuccaauuggcaa

SEQ ID NO: 2933 - RNA, 20 nt, Artificial Sequence
  spacer sequence ATCN PAM
ccaauuggcaaagccagacu

SEQ ID NO: 2934 - RNA, 20 nt, Artificial Sequence
  spacer sequence ATCN PAM
cagaaccagucuguauugcc

SEQ ID NO: 2935 - RNA, 20 nt, Artificial Sequence
  spacer sequence ATCN PAM
uuaggaaugagcuaggaguu

SEQ ID NO: 2936 - RNA, 20 nt, Artificial Sequence
  spacer sequence ATCN PAM
ccaaauguucuuucuucagc

SEQ ID NO: 2937 - RNA, 20 nt, Artificial Sequence
  spacer sequence ATCN PAM
guaaaauaggaauaauaaua

SEQ ID NO: 2938 - RNA, 20 nt, Artificial Sequence
  spacer sequence ATCN PAM
ggcccuuuccccaauuccua

SEQ ID NO: 2939 - RNA, 20 nt, Artificial Sequence
  spacer sequence ATCN PAM
guguucccaacugacuugcc

SEQ ID NO: 2940 - RNA, 20 nt, Artificial Sequence
  spacer sequence ATCN PAM
uaacacaguagcugguaccu

SEQ ID NO: 2941 - RNA, 20 nt, Artificial Sequence
  spacer sequence ATCN PAM
gguaccagcuacuguguuag

SEQ ID NO: 2942 - RNA, 20 nt, Artificial Sequence
  spacer sequence ATCN PAM
cauauaggcaccuaucaggu

SEQ ID NO: 2943 - RNA, 20 nt, Artificial Sequence
  spacer sequence ATCN PAM
aucacauauaggcaccuauc

SEQ ID NO: 2944 - RNA, 20 nt, Artificial Sequence
  spacer sequence ATCN PAM
gucgggcuguccacccaucc

SEQ ID NO: 2945 - RNA, 20 nt, Artificial Sequence
  spacer sequence ATCN PAM
aauucuccaucaccaagaga

SEQ ID NO: 2946 - RNA, 20 nt, Artificial Sequence
  spacer sequence ATCN PAM
ccaagagagccuuccgaaag

SEQ ID NO: 2947 - RNA, 20 nt, Artificial Sequence
  spacer sequence ATCN PAM
guggccguuugcccaggggg

SEQ ID NO: 2948 - RNA, 20 nt, Artificial Sequence
  spacer sequence ATCN PAM
gaggccaaacccuuccugga

SEQ ID NO: 2949 - RNA, 20 nt, Artificial Sequence
  spacer sequence ATCN PAM
caggcuccaggaaggguuug

SEQ ID NO: 2950 - RNA, 20 nt, Artificial Sequence
  spacer sequence ATCN PAM
acucuuagacauaacacacc

SEQ ID NO: 2951 - RNA, 20 nt, Artificial Sequence
  spacer sequence ATCN PAM
cuuuucuggccuauguuauu

SEQ ID NO: 2952 - RNA, 20 nt, Artificial Sequence
  spacer sequence ATCN PAM
gcuaucugcucuuacuuaug

SEQ ID NO: 2953 - RNA, 20 nt, Artificial Sequence
  spacer sequence ATCN PAM
gcucuuacuuaugcacaccu

SEQ ID NO: 2954 - RNA, 20 nt, Artificial Sequence
  spacer sequence ATCN PAM
cuuuucagccaucucacuac

SEQ ID NO: 2955 - RNA, 20 nt, Artificial Sequence
  spacer sequence ATCN PAM
cacuacagauaacucccaag

SEQ ID NO: 2956 - RNA, 20 nt, Artificial Sequence
  spacer sequence ATCN PAM
guagugagauggcugaaaag

SEQ ID NO: 2957 - RNA, 20 nt, Artificial Sequence
  spacer sequence ATCN PAM
caggaauagcacccaagguc

SEQ ID NO: 2958 - RNA, 20 nt, Artificial Sequence
  spacer sequence ATCN PAM
guaccucagaguagaacccc

SEQ ID NO: 2959 - RNA, 20 nt, Artificial Sequence
  spacer sequence ATCN PAM
caacaggcagagaaugucug

SEQ ID NO: 2960 - RNA, 20 nt, Artificial Sequence
  spacer sequence ATCN PAM
caacacauacgugugucugu

SEQ ID NO: 2961 - RNA, 20 nt, Artificial Sequence
  spacer sequence ATCN PAM
cugugguuugagaguuugga

SEQ ID NO: 2962 - RNA, 20 nt, Artificial Sequence
  spacer sequence ATCN PAM
gcacauacacacaaaaggua

SEQ ID NO: 2963 - RNA, 20 nt, Artificial Sequence
  spacer sequence ATCN PAM
cuucucuuugguuuguuugu

SEQ ID NO: 2964 - RNA, 20 nt, Artificial Sequence
  spacer sequence ATCN PAM
agaggucacccucauaugug

SEQ ID NO: 2965 - RNA, 20 nt, Artificial Sequence
  spacer sequence ATCN PAM
auugacuuuucacauaugag

SEQ ID NO: 2966 - RNA, 20 nt, Artificial Sequence
  spacer sequence ATCN PAM
uaaagccuucauuaucaauu

SEQ ID NO: 2967 - RNA, 20 nt, Artificial Sequence
  spacer sequence ATCN PAM
ccccuccgguuauccuaaag

SEQ ID NO: 2968 - RNA, 20 nt, Artificial Sequence
  spacer sequence ATCN PAM
ucuccccuccgguuauccua

SEQ ID NO: 2969 - RNA, 20 nt, Artificial Sequence
  spacer sequence ATCN PAM
auuuccugcacaggugcauu

SEQ ID NO: 2970 - RNA, 20 nt, Artificial Sequence
  spacer sequence ATCN PAM
cagaaaaccagaaccgggaa

SEQ ID NO: 2971 - RNA, 20 nt, Artificial Sequence
  spacer sequence ATCN PAM
ugacuuaagcaauggaaguc

SEQ ID NO: 2972 - RNA, 20 nt, Artificial Sequence
  spacer sequence ATCN PAM
gugguagccuguguugccuc

SEQ ID NO: 2973 - RNA, 20 nt, Artificial Sequence
  spacer sequence ATCN PAM
cagugguguuacugaggggc

SEQ ID NO: 2974 - RNA, 20 nt, Artificial Sequence
  spacer sequence ATCN PAM
cuuugccccucaguaacacc

SEQ ID NO: 2975 - RNA, 20 nt, Artificial Sequence
  spacer sequence ATCN PAM
uccucucuucccucuuuccu

SEQ ID NO: 2976 - RNA, 20 nt, Artificial Sequence
  spacer sequence ATCN PAM
uccacuuugcugcagguuca

SEQ ID NO: 2977 - RNA, 20 nt, Artificial Sequence
  spacer sequence ATCN PAM
uugccuugaaccugcagcaa

SEQ ID NO: 2978 - RNA, 20 nt, Artificial Sequence
  spacer sequence ATCN PAM
cuccugccuuguacaacccu

SEQ ID NO: 2979 - RNA, 20 nt, Artificial Sequence
  spacer sequence ATCN PAM
accccuuccucaaaucuccc

SEQ ID NO: 2980 - RNA, 20 nt, Artificial Sequence
  spacer sequence ATCN PAM
cccucacuggaugucacagu

SEQ ID NO: 2981 - RNA, 20 nt, Artificial Sequence
  spacer sequence ATCN PAM
agugagggagauuugaggaa

SEQ ID NO: 2982 - RNA, 20 nt, Artificial Sequence
  spacer sequence ATCN PAM
cuuaugacuguccaugggga

SEQ ID NO: 2983 - RNA, 20 nt, Artificial Sequence
  spacer sequence ATCN PAM
ugaagacagaaauuaagugc

SEQ ID NO: 2984 - RNA, 20 nt, Artificial Sequence
  spacer sequence ATCN PAM
ugaaguaaucgugaagacag

SEQ ID NO: 2985 - RNA, 20 nt, Artificial Sequence
  spacer sequence ATCN PAM
ggauuccaaagggacuauaa

SEQ ID NO: 2986 - RNA, 20 nt, Artificial Sequence
  spacer sequence ATCN PAM
agauuuaucgugaaguaauc

SEQ ID NO: 2987 - RNA, 20 nt, Artificial Sequence
  spacer sequence ATCN PAM
ugcuuccuuccaugugagag

SEQ ID NO: 2988 - RNA, 20 nt, Artificial Sequence
  spacer sequence ATCN PAM
cuacuccucccccaguguug

SEQ ID NO: 2989 - RNA, 20 nt, Artificial Sequence
  spacer sequence ATCN PAM
ccuaagcuagagcuagagcu

SEQ ID NO: 2990 - RNA, 20 nt, Artificial Sequence
  spacer sequence ATCN PAM
uuuuguaaagaggggggaaa

SEQ ID NO: 2991 - RNA, 20 nt, Artificial Sequence
  spacer sequence ATCN PAM
uuuguaaaacgaagcaucgc

SEQ ID NO: 2992 - RNA, 20 nt, Artificial Sequence
  spacer sequence ATCN PAM
ccuuuaacugcucuguuuga

SEQ ID NO: 2993 - RNA, 20 nt, Artificial Sequence
  spacer sequence ATCN PAM
aacagagcaguuaaaggcga

SEQ ID NO: 2994 - RNA, 20 nt, Artificial Sequence
  spacer sequence ATCN PAM
agucagauuuuucagaauau

SEQ ID NO: 2995 - RNA, 20 nt, Artificial Sequence
  spacer sequence ATCN PAM
gacuugaucaaacagagcag

SEQ ID NO: 2996 - RNA, 20 nt, Artificial Sequence
  spacer sequence ATCN PAM
aucccuagaaacuagcccuc

SEQ ID NO: 2997 - RNA, 20 nt, Artificial Sequence
  spacer sequence ATCN PAM
cuagaaacuagcccucaggu

SEQ ID NO: 2998 - RNA, 20 nt, Artificial Sequence
  spacer sequence ATCN PAM
uuggccugcuaaccugaggg

SEQ ID NO: 2999 - RNA, 20 nt, Artificial Sequence
  spacer sequence ATCN PAM
gucuaccuggaauguucuaa

SEQ ID NO: 3000 - RNA, 20 nt, Artificial Sequence
  spacer sequence ATCN PAM
ggaaucagcuagaaacucaa

SEQ ID NO: 3001 - RNA, 20 nt, Artificial Sequence
  spacer sequence ATCN PAM
gcuagaaacucaaucggcuc

SEQ ID NO: 3002 - RNA, 20 nt, Artificial Sequence
  spacer sequence ATCN PAM
gcucuuaccagucacuaccu

SEQ ID NO: 3003 - RNA, 20 nt, Artificial Sequence
  spacer sequence ATCN PAM
uauaauggugaugauaauga

SEQ ID NO: 3004 - RNA, 20 nt, Artificial Sequence
  spacer sequence ATCN PAM
ccauuauaggauauggcacu

SEQ ID NO: 3005 - RNA, 20 nt, Artificial Sequence
  spacer sequence ATCN PAM
ucaccauuauaggauauggc

SEQ ID NO: 3006 - RNA, 20 nt, Artificial Sequence
  spacer sequence ATCN PAM
uaauggucauuaucaucacc

SEQ ID NO: 3007 - RNA, 20 nt, Artificial Sequence
  spacer sequence ATCN PAM
ucauaauggucauuaucauc

SEQ ID NO: 3008 - RNA, 20 nt, Artificial Sequence
  spacer sequence ATCN PAM
ucaucauaauggucauuauc

SEQ ID NO: 3009 - RNA, 20 nt, Artificial Sequence
  spacer sequence ATCN PAM
aguggaagcuauuauuauua

SEQ ID NO: 3010 - RNA, 20 nt, Artificial Sequence
  spacer sequence ATCN PAM
uuuacuuuuuuuggaaggcc

SEQ ID NO: 3011 - RNA, 20 nt, Artificial Sequence
  spacer sequence ATCN PAM
ccuuacuauaggcacauauu

SEQ ID NO: 3012 - RNA, 20 nt, Artificial Sequence
  spacer sequence ATCN PAM
gcaaagggagaaaugagaca

SEQ ID NO: 3013 - RNA, 20 nt, Artificial Sequence
  spacer sequence ATCN PAM
ucagcaaagggagaaaugag

SEQ ID NO: 3014 - RNA, 20 nt, Artificial Sequence
  spacer sequence ATCN PAM
aguagagaaaugaucaaaag

SEQ ID NO: 3015 - RNA, 20 nt, Artificial Sequence
  spacer sequence ATCN PAM
uuucucuacuggaucaucag

SEQ ID NO: 3016 - RNA, 20 nt, Artificial Sequence
  spacer sequence ATCN PAM
aaaggauccugcacauuguc

SEQ ID NO: 3017 - RNA, 20 nt, Artificial Sequence
  spacer sequence ATCN PAM
uuuugaucauuucucuacug

SEQ ID NO: 3018 - RNA, 20 nt, Artificial Sequence
  spacer sequence ATCN PAM
ugcacauuguccuaaaugaa

SEQ ID NO: 3019 - RNA, 20 nt, Artificial Sequence
  spacer sequence ATCN PAM
ugcagaggaagcuugguuuc

SEQ ID NO: 3020 - RNA, 20 nt, Artificial Sequence
  spacer sequence ATCN PAM
ccuggcucacuuccauccug

SEQ ID NO: 3021 - RNA, 20 nt, Artificial Sequence
  spacer sequence ATCN PAM
ucggccaaugaagcgguggg

SEQ ID NO: 3022 - RNA, 20 nt, Artificial Sequence
  spacer sequence ATCN PAM
cugcaacacccugaccuuua

SEQ ID NO: 3023 - RNA, 20 nt, Artificial Sequence
  spacer sequence ATCN PAM
aagaggcccauggagguggg

SEQ ID NO: 3024 - RNA, 20 nt, Artificial Sequence
  spacer sequence ATCN PAM
ccccaccuccaugggccucu

SEQ ID NO: 3025 - RNA, 20 nt, Artificial Sequence
  spacer sequence ATCN PAM
cucuuagcagggcuggggug

SEQ ID NO: 3026 - RNA, 20 nt, Artificial Sequence
  spacer sequence ATCN PAM
ccuccacaccuccauucucc

SEQ ID NO: 3027 - RNA, 20 nt, Artificial Sequence
  spacer sequence ATCN PAM
ccacgcaccacuucugugcc

SEQ ID NO: 3028 - RNA, 20 nt, Artificial Sequence
  spacer sequence ATCN PAM
cuguuggcauuaucuccacg

SEQ ID NO: 3029 - RNA, 20 nt, Artificial Sequence
  spacer sequence ATCN PAM
gugccgaccaagcacacaag

SEQ ID NO: 3030 - RNA, 20 nt, Artificial Sequence
  spacer sequence ATCN PAM
ugugugcuuggucggcacug

SEQ ID NO: 3031 - RNA, 20 nt, Artificial Sequence
  spacer sequence ATCN PAM
ugugggaccccucuguccag

SEQ ID NO: 3032 - RNA, 20 nt, Artificial Sequence
  spacer sequence ATCN PAM
cagggugugcccugagaagg

SEQ ID NO: 3033 - RNA, 20 nt, Artificial Sequence
  spacer sequence ATCN PAM
uccugguaccaggaaggcaa

SEQ ID NO: 3034 - RNA, 20 nt, Artificial Sequence
  spacer sequence ATCN PAM
ugguaccaggaaggcaaugg

SEQ ID NO: 3035 - RNA, 20 nt, Artificial Sequence
  spacer sequence ATCN PAM
ccucugcucagcucugccca

SEQ ID NO: 3036 - RNA, 20 nt, Artificial Sequence
  spacer sequence ATCN PAM
gaccccucuaccuacucaca

SEQ ID NO: 3037 - RNA, 20 nt, Artificial Sequence
  spacer sequence ATCN PAM
uaugugaguagguagagggg

SEQ ID NO: 3038 - RNA, 20 nt, Artificial Sequence
  spacer sequence ATCN PAM
guaaagagaaggaagcaggc

SEQ ID NO: 3039 - RNA, 20 nt, Artificial Sequence
  spacer sequence ATCN PAM
gccugcuuccuucucuuuac

SEQ ID NO: 3040 - RNA, 20 nt, Artificial Sequence
  spacer sequence ATCN PAM
auagguccaaguucguacag

SEQ ID NO: 3041 - RNA, 20 nt, Artificial Sequence
  spacer sequence ATCN PAM
gagaggcuuccuuaagccac

SEQ ID NO: 3042 - RNA, 20 nt, Artificial Sequence
  spacer sequence ATCN PAM
aucagagaggcuuccuuaag

SEQ ID NO: 3043 - RNA, 20 nt, Artificial Sequence
  spacer sequence ATCN PAM
ugaucaaacucagaugacug

SEQ ID NO: 3044 - RNA, 20 nt, Artificial Sequence
  spacer sequence ATCN PAM
agauuuacagguaauucaaa

SEQ ID NO: 3045 - RNA, 20 nt, Artificial Sequence
  spacer sequence ATCN PAM
aacucagaugacuguccaac

SEQ ID NO: 3046 - RNA, 20 nt, Artificial Sequence
  spacer sequence ATCN PAM
gaguuugaucaagauuuaca

SEQ ID NO: 3047 - RNA, 20 nt, Artificial Sequence
  spacer sequence ATCN PAM
agaaacuacguuugucuaau

SEQ ID NO: 3048 - RNA, 20 nt, Artificial Sequence
  spacer sequence ATCN PAM
augcccccccaccacccacc

SEQ ID NO: 3049 - RNA, 20 nt, Artificial Sequence
  spacer sequence ATCN PAM
guggaauggaaaaugaagaa

SEQ ID NO: 3050 - RNA, 20 nt, Artificial Sequence
  spacer sequence ATCN PAM
aaagggaagaaugcuacagc

SEQ ID NO: 3051 - RNA, 20 nt, Artificial Sequence
  spacer sequence ATCN PAM
cccagaaaagccagcgagaa

SEQ ID NO: 3052 - RNA, 20 nt, Artificial Sequence
  spacer sequence ATCN PAM
cccuacaauguguuccccag

SEQ ID NO: 3053 - RNA, 20 nt, Artificial Sequence
  spacer sequence ATCN PAM
ucucuggucucggggcccaa

SEQ ID NO: 3054 - RNA, 20 nt, Artificial Sequence
  spacer sequence ATCN PAM
ggccacagaaccuaaggccu

SEQ ID NO: 3055 - RNA, 20 nt, Artificial Sequence
  spacer sequence ATCN PAM
acucgccuugcacauggcug

SEQ ID NO: 3056 - RNA, 20 nt, Artificial Sequence
  spacer sequence ATCN PAM
ugccuuauuccuucaggagc

SEQ ID NO: 3057 - RNA, 20 nt, Artificial Sequence
  spacer sequence ATCN PAM
cuuagaggaguuacagaaug

SEQ ID NO: 3058 - RNA, 20 nt, Artificial Sequence
  spacer sequence ATCN PAM
auaaaauggggcuaauuucc

SEQ ID NO: 3059 - RNA, 20 nt, Artificial Sequence
  spacer sequence ATCN PAM
gccuauugggccucaggcuc

SEQ ID NO: 3060 - RNA, 20 nt, Artificial Sequence
  spacer sequence ATCN PAM
gucuucucuuccuccuaauc

SEQ ID NO: 3061 - RNA, 20 nt, Artificial Sequence
  spacer sequence ATCN PAM
auaagcaccagaccucaagc

SEQ ID NO: 3062 - RNA, 20 nt, Artificial Sequence
  spacer sequence ATCN PAM
uaguccugcuugaggucuag

SEQ ID NO: 3063 - RNA, 20 nt, Artificial Sequence
  spacer sequence ATCN PAM
cacuggcaggcagccucagg

SEQ ID NO: 3064 - RNA, 20 nt, Artificial Sequence
  spacer sequence ATCN PAM
agggcacagccgcaggccuc

SEQ ID NO: 3065 - RNA, 20 nt, Artificial Sequence
  spacer sequence ATCN PAM
cuaccugcccccuguccccu

SEQ ID NO: 3066 - RNA, 20 nt, Artificial Sequence
  spacer sequence ATCN PAM
gucagcccacagaggcacgg

SEQ ID NO: 3067 - RNA, 20 nt, Artificial Sequence
  spacer sequence ATCN PAM
ucccagcaggaacuuacauc

SEQ ID NO: 3068 - RNA, 20 nt, Artificial Sequence
  spacer sequence ATCN PAM
cagcaggaacuuacaucaga

SEQ ID NO: 3069 - RNA, 20 nt, Artificial Sequence
  spacer sequence ATCN PAM
gagcaggcagccuacccaag

SEQ ID NO: 3070 - RNA, 20 nt, Artificial Sequence
  spacer sequence ATCN PAM
auacacguagucccuuccau

SEQ ID NO: 3071 - RNA, 20 nt, Artificial Sequence
  spacer sequence ATCN PAM
gccuuauaccuugucuuaua

SEQ ID NO: 3072 - RNA, 20 nt, Artificial Sequence
  spacer sequence ATCN PAM
aaccuggaacucacagucgg

SEQ ID NO: 3073 - RNA, 20 nt, Artificial Sequence
  spacer sequence ATCN PAM
accaaggcuugaagugaggu

SEQ ID NO: 3074 - RNA, 20 nt, Artificial Sequence
  spacer sequence ATCN PAM
uaccuauccaccaaggcuug

SEQ ID NO: 3075 - RNA, 20 nt, Artificial Sequence
  spacer sequence ATCN PAM
gucuaacuugggagccugag

SEQ ID NO: 3076 - RNA, 20 nt, Artificial Sequence
  spacer sequence ATCN PAM
agcucaucugucuaacuugg

SEQ ID NO: 3077 - RNA, 20 nt, Artificial Sequence
  spacer sequence ATCN PAM
uucaucuaccaccaauuucc

SEQ ID NO: 3078 - RNA, 20 nt, Artificial Sequence
  spacer sequence ATCN PAM
accaccaauuuccuggcugu

SEQ ID NO: 3079 - RNA, 20 nt, Artificial Sequence
  spacer sequence ATCN PAM
uacacauuuuaccagugaag

SEQ ID NO: 3080 - RNA, 20 nt, Artificial Sequence
  spacer sequence ATCN PAM
gcaaccccagguuggccaua

SEQ ID NO: 3081 - RNA, 20 nt, Artificial Sequence
  spacer sequence ATCN PAM
uccucuguaaaaugggagaa

SEQ ID NO: 3082 - RNA, 20 nt, Artificial Sequence
  spacer sequence ATCN PAM
uuggcacaucuucugaaaca

SEQ ID NO: 3083 - RNA, 20 nt, Artificial Sequence
  spacer sequence ATCN PAM
ucugaaacaagaccuguuuc

SEQ ID NO: 3084 - RNA, 20 nt, Artificial Sequence
  spacer sequence ATCN PAM
aauuuugcacuuauuuauau

SEQ ID NO: 3085 - RNA, 20 nt, Artificial Sequence
  spacer sequence ATCN PAM
aagcagaaugaagguagugu

SEQ ID NO: 3086 - RNA, 20 nt, Artificial Sequence
  spacer sequence ATCN PAM
auaagagcacagguaagugu

SEQ ID NO: 3087 - RNA, 20 nt, Artificial Sequence
  spacer sequence ATCN PAM
uauuacaagaguguucuuca

SEQ ID NO: 3088 - RNA, 20 nt, Artificial Sequence
  spacer sequence ATCN PAM
cuuccaaauacuuuaccugg

SEQ ID NO: 3089 - RNA, 20 nt, Artificial Sequence
  spacer sequence ATCN PAM
caccauugcaccccagccug

SEQ ID NO: 3090 - RNA, 20 nt, Artificial Sequence
  spacer sequence ATCN PAM
cggcucaccaccucugccuc

SEQ ID NO: 3091 - RNA, 20 nt, Artificial Sequence
  spacer sequence ATCN PAM
cagcuacucaggaggcugag

SEQ ID NO: 3092 - RNA, 20 nt, Artificial Sequence
  spacer sequence ATCN PAM
cuauuaaaaauauaaacuua

SEQ ID NO: 3093 - RNA, 20 nt, Artificial Sequence
  spacer sequence ATCN PAM
ccugaggucaagaguuugag

SEQ ID NO: 3094 - RNA, 20 nt, Artificial Sequence
  spacer sequence ATCN PAM
acccaccucggccucccaaa

SEQ ID NO: 3095 - RNA, 20 nt, Artificial Sequence
  spacer sequence ATCN PAM
cacauaaaaauuuaagacgg

SEQ ID NO: 3096 - RNA, 20 nt, Artificial Sequence
  spacer sequence ATCN PAM
uccuguuuucccgucuuaaa

SEQ ID NO: 3097 - RNA, 20 nt, Artificial Sequence
  spacer sequence ATCN PAM
gccccucugccucucuacau

SEQ ID NO: 3098 - RNA, 20 nt, Artificial Sequence
  spacer sequence ATCN PAM
caggcuaacagagcuucagg

SEQ ID NO: 3099 - RNA, 20 nt, Artificial Sequence
  spacer sequence ATCN PAM
gaaugauaugaauauuugua

SEQ ID NO: 3100 - RNA, 20 nt, Artificial Sequence
  spacer sequence ATCN PAM
uucugauagucuugaguugc

SEQ ID NO: 3101 - RNA, 20 nt, Artificial Sequence
  spacer sequence ATCN PAM
auacaaauauucauaucauu

SEQ ID NO: 3102 - RNA, 20 nt, Artificial Sequence
  spacer sequence ATCN PAM
aagcaacaaucagagaucag

SEQ ID NO: 3103 - RNA, 20 nt, Artificial Sequence
  spacer sequence ATCN PAM
gagaucaggucccuccaaau

SEQ ID NO: 3104 - RNA, 20 nt, Artificial Sequence
  spacer sequence ATCN PAM
cugauuguugcuuugauaag

SEQ ID NO: 3105 - RNA, 20 nt, Artificial Sequence
  spacer sequence ATCN PAM
ggucccuccaaaugagcuua

SEQ ID NO: 3106 - RNA, 20 nt, Artificial Sequence
  spacer sequence ATCN PAM
uaaacuguaagcucauuugg

SEQ ID NO: 3107 - RNA, 20 nt, Artificial Sequence
  spacer sequence ATCN PAM
ugcuuuguaaaagcugguga

SEQ ID NO: 3108 - RNA, 20 nt, Artificial Sequence
  spacer sequence ATCN PAM
uuuuguuucaccagcuuuua

SEQ ID NO: 3109 - RNA, 20 nt, Artificial Sequence
  spacer sequence ATCN PAM
aucauuuuguuucaccagcu

SEQ ID NO: 3110 - RNA, 20 nt, Artificial Sequence
  spacer sequence ATCN PAM
gcuauccaucauuuuguuuc

SEQ ID NO: 3111 - RNA, 20 nt, Artificial Sequence
  spacer sequence ATCN PAM
gaaaaagucucagccuaaua

SEQ ID NO: 3112 - RNA, 20 nt, Artificial Sequence
  spacer sequence ATCN PAM
gauucagaagaguagcaggg

SEQ ID NO: 3113 - RNA, 20 nt, Artificial Sequence
  spacer sequence ATCN PAM
gaugaagaaguuauucuguc

SEQ ID NO: 3114 - RNA, 20 nt, Artificial Sequence
  spacer sequence ATCN PAM
gugcuagcgagaaacccccu

SEQ ID NO: 3115 - RNA, 20 nt, Artificial Sequence
  spacer sequence ATCN PAM
cacacuuuguacauacaauu

SEQ ID NO: 3116 - RNA, 20 nt, Artificial Sequence
  spacer sequence ATCN PAM
cagaauuguauguacaaagu

SEQ ID NO: 3117 - RNA, 20 nt, Artificial Sequence
  spacer sequence ATCN PAM
cagguauugcuccuaaagaa

SEQ ID NO: 3118 - RNA, 20 nt, Artificial Sequence
  spacer sequence ATCN PAM
uccuccaacauccaaaagca

SEQ ID NO: 3119 - RNA, 20 nt, Artificial Sequence
  spacer sequence ATCN PAM
aaaagcaguguucacaccca

SEQ ID NO: 3120 - RNA, 20 nt, Artificial Sequence
  spacer sequence ATCN PAM
caugcuuucuaauauuaaaa

SEQ ID NO: 3121 - RNA, 20 nt, Artificial Sequence
  spacer sequence ATCN PAM
cuuuucacugguauuucuua

SEQ ID NO: 3122 - RNA, 20 nt, Artificial Sequence
  spacer sequence ATCN PAM
agaacauuacaacacaaaga

SEQ ID NO: 3123 - RNA, 20 nt, Artificial Sequence
  spacer sequence ATCN PAM
ucaucagagaaaaacaaauu

SEQ ID NO: 3124 - RNA, 20 nt, Artificial Sequence
  spacer sequence ATCN PAM
ucagagaaaaacaaauuuac

SEQ ID NO: 3125 - RNA, 20 nt, Artificial Sequence
  spacer sequence ATCN PAM
gagaaaaacaaauuuaccuc

SEQ ID NO: 3126 - RNA, 20 nt, Artificial Sequence
  spacer sequence ATCN PAM
gagguaaauuuguuuuucuc

SEQ ID NO: 3127 - RNA, 20 nt, Artificial Sequence
  spacer sequence ATCN PAM
ugguagcacaguagagcaga

SEQ ID NO: 3128 - RNA, 20 nt, Artificial Sequence
  spacer sequence ATCN PAM
ccaauugagugcucuuucug

SEQ ID NO: 3129 - RNA, 20 nt, Artificial Sequence
  spacer sequence ATCN PAM
aaagaaauaaauucuagucc

SEQ ID NO: 3130 - RNA, 20 nt, Artificial Sequence
  spacer sequence ATCN PAM
cuaagagaaucaagucucga

SEQ ID NO: 3131 - RNA, 20 nt, Artificial Sequence
  spacer sequence ATCN PAM
agucucgaguggguaaaaug

SEQ ID NO: 3132 - RNA, 20 nt, Artificial Sequence
  spacer sequence ATCN PAM
cccuagacagcccaggccuu

SEQ ID NO: 3133 - RNA, 20 nt, Artificial Sequence
  spacer sequence ATCN PAM
uaauacacacggaauguguu

SEQ ID NO: 3134 - RNA, 20 nt, Artificial Sequence
  spacer sequence ATCN PAM
gggucugucccuuccacaca

SEQ ID NO: 3135 - RNA, 20 nt, Artificial Sequence
  spacer sequence ATCN PAM
acucugcauuuguccuggca

SEQ ID NO: 3136 - RNA, 20 nt, Artificial Sequence
  spacer sequence ATCN PAM
ugggacuaggagugaccagg

SEQ ID NO: 3137 - RNA, 20 nt, Artificial Sequence
  spacer sequence ATCN PAM
cccuugaucauguuagcccc

SEQ ID NO: 3138 - RNA, 20 nt, Artificial Sequence
  spacer sequence ATCN PAM
agggugauguggcuucucca

SEQ ID NO: 3139 - RNA, 20 nt, Artificial Sequence
  spacer sequence ATCN PAM
uguuagccccauucugcagc

SEQ ID NO: 3140 - RNA, 20 nt, Artificial Sequence
  spacer sequence ATCN PAM
gugaauagguggaggagagg

SEQ ID NO: 3141 - RNA, 20 nt, Artificial Sequence
  spacer sequence ATCN PAM
auuagauugcccaaaucugg

SEQ ID NO: 3142 - RNA, 20 nt, Artificial Sequence
  spacer sequence ATCN PAM
aauggauaggagggaggguu

SEQ ID NO: 3143 - RNA, 20 nt, Artificial Sequence
  spacer sequence ATCN PAM
gggaaaauaauguguggcgc

SEQ ID NO: 3144 - RNA, 20 nt, Artificial Sequence
  spacer sequence ATCN PAM
ggguguuugcugagggcuuc

SEQ ID NO: 3145 - RNA, 20 nt, Artificial Sequence
  spacer sequence ATCN PAM
ucuaggcggguuaaauuagu

SEQ ID NO: 3146 - RNA, 20 nt, Artificial Sequence
  spacer sequence ATCN PAM
uggcuccuaaaucuucuagg

SEQ ID NO: 3147 - RNA, 20 nt, Artificial Sequence
  spacer sequence ATCN PAM
agaauauugucccuugcagu

SEQ ID NO: 3148 - RNA, 20 nt, Artificial Sequence
  spacer sequence ATCN PAM
uuugucagagcuuuauuauu

SEQ ID NO: 3149 - RNA, 20 nt, Artificial Sequence
  spacer sequence ATCN PAM
aaaccuccugaaaauugguu

SEQ ID NO: 3150 - RNA, 20 nt, Artificial Sequence
  spacer sequence ATCN PAM
acgaagcagccaauaaccaa

SEQ ID NO: 3151 - RNA, 20 nt, Artificial Sequence
  spacer sequence ATCN PAM
gcuagaagccugcuggaagc

SEQ ID NO: 3152 - RNA, 20 nt, Artificial Sequence
  spacer sequence ATCN PAM
cuguucuguuuggggagucc

SEQ ID NO: 3153 - RNA, 20 nt, Artificial Sequence
  spacer sequence ATCN PAM
ugcaugcgugccgguaggca

SEQ ID NO: 3154 - RNA, 20 nt, Artificial Sequence
  spacer sequence ATCN PAM
augaugaagaugcaguaccu

SEQ ID NO: 3155 - RNA, 20 nt, Artificial Sequence
  spacer sequence ATCN PAM
uugauccugcaugcgugccg

SEQ ID NO: 3156 - RNA, 20 nt, Artificial Sequence
  spacer sequence ATCN PAM
ucaucauugauccugcaugc

SEQ ID NO: 3157 - RNA, 20 nt, Artificial Sequence
  spacer sequence ATCN PAM
ugcagugacuaagaaaggaa

SEQ ID NO: 3158 - RNA, 20 nt, Artificial Sequence
  spacer sequence ATCN PAM
gaaugcuaggauaugacaca

SEQ ID NO: 3159 - RNA, 20 nt, Artificial Sequence
  spacer sequence ATCN PAM
uagcauucagauagguggcc

SEQ ID NO: 3160 - RNA, 20 nt, Artificial Sequence
  spacer sequence ATCN PAM
ggacacccagaaaaaauaau

SEQ ID NO: 3161 - RNA, 20 nt, Artificial Sequence
  spacer sequence ATCN PAM
ccaaggcaaaaagcaaauag

SEQ ID NO: 3162 - RNA, 20 nt, Artificial Sequence
  spacer sequence ATCN PAM
gcuguauuuccaggugagca

SEQ ID NO: 3163 - RNA, 20 nt, Artificial Sequence
  spacer sequence ATCN PAM
agucuugaaauuauauagag

SEQ ID NO: 3164 - RNA, 20 nt, Artificial Sequence
  spacer sequence ATCN PAM
gguacauaucugucccugaa

SEQ ID NO: 3165 - RNA, 20 nt, Artificial Sequence
  spacer sequence ATCN PAM
gucccugaaaaugcuuaaaa

SEQ ID NO: 3166 - RNA, 20 nt, Artificial Sequence
  spacer sequence ATCN PAM
uuuaagcauuuucagggaca

SEQ ID NO: 3167 - RNA, 20 nt, Artificial Sequence
  spacer sequence ATCN PAM
aacugauuccuaucacaugc

SEQ ID NO: 3168 - RNA, 20 nt, Artificial Sequence
  spacer sequence ATCN PAM
guuugaucuuuuaagcauuu

SEQ ID NO: 3169 - RNA, 20 nt, Artificial Sequence
  spacer sequence ATCN PAM
caugccuccccuaccaguga

SEQ ID NO: 3170 - RNA, 20 nt, Artificial Sequence
  spacer sequence ATCN PAM
agaacuccuuauacuucugg

SEQ ID NO: 3171 - RNA, 20 nt, Artificial Sequence
  spacer sequence ATCN PAM
gaaucccuagucuaccccug

SEQ ID NO: 3172 - RNA, 20 nt, Artificial Sequence
  spacer sequence ATCN PAM
cuagucuaccccugcggcug

SEQ ID NO: 3173 - RNA, 20 nt, Artificial Sequence
  spacer sequence ATCN PAM
cauuuuuuuuuugaguaagc

SEQ ID NO: 3174 - RNA, 20 nt, Artificial Sequence
  spacer sequence ATCN PAM
guauccucauuacuaacagc

SEQ ID NO: 3175 - RNA, 20 nt, Artificial Sequence
  spacer sequence ATCN PAM
ucauuacuaacagcacaaug

SEQ ID NO: 3176 - RNA, 20 nt, Artificial Sequence
  spacer sequence ATCN PAM
cuuucgaauguccauugugc

SEQ ID NO: 3177 - RNA, 20 nt, Artificial Sequence
  spacer sequence ATCN PAM
ucuagcuuuuuuggcuuaug

SEQ ID NO: 3178 - RNA, 20 nt, Artificial Sequence
  spacer sequence ATCN PAM
gagagaaaagaagggacgga

SEQ ID NO: 3179 - RNA, 20 nt, Artificial Sequence
  spacer sequence ATCN PAM
gucccuucuuuucucuccga

SEQ ID NO: 3180 - RNA, 20 nt, Artificial Sequence
  spacer sequence ATCN PAM
ggaagaauggggugccaaag

SEQ ID NO: 3181 - RNA, 20 nt, Artificial Sequence
  spacer sequence ATCN PAM
cucaucagguagucagccga

SEQ ID NO: 3182 - RNA, 20 nt, Artificial Sequence
  spacer sequence ATCN PAM
gguagucagccgagugaggc

SEQ ID NO: 3183 - RNA, 20 nt, Artificial Sequence
  spacer sequence ATCN PAM
acacagggaacaagcgggug

SEQ ID NO: 3184 - RNA, 20 nt, Artificial Sequence
  spacer sequence ATCN PAM
uuuuagaauaaaucauucgu

SEQ ID NO: 3185 - RNA, 20 nt, Artificial Sequence
  spacer sequence ATCN PAM
uucguggcugacucuuaaau

SEQ ID NO: 3186 - RNA, 20 nt, Artificial Sequence
  spacer sequence ATCN PAM
guaauuggcccuucccauuu

SEQ ID NO: 3187 - RNA, 20 nt, Artificial Sequence
  spacer sequence ATCN PAM
cugagaacaacucuaccuga

SEQ ID NO: 3188 - RNA, 20 nt, Artificial Sequence
  spacer sequence ATCN PAM
cucccaaaacaacggugggc

SEQ ID NO: 3189 - RNA, 20 nt, Artificial Sequence
  spacer sequence ATCN PAM
gcaucccguaaauacccaga

SEQ ID NO: 3190 - RNA, 20 nt, Artificial Sequence
  spacer sequence ATCN PAM
cguaaauacccagaagcaau

SEQ ID NO: 3191 - RNA, 20 nt, Artificial Sequence
  spacer sequence ATCN PAM
ggcagacgaaccaggugggg

SEQ ID NO: 3192 - RNA, 20 nt, Artificial Sequence
  spacer sequence ATCN PAM
ccacagcaucuggcagacga

SEQ ID NO: 3193 - RNA, 20 nt, Artificial Sequence
  spacer sequence ATCN PAM
gguuucacccgggcugcaaa

SEQ ID NO: 3194 - RNA, 20 nt, Artificial Sequence
  spacer sequence ATCN PAM
ucucgcaccaucugguuuca

SEQ ID NO: 3195 - RNA, 20 nt, Artificial Sequence
  spacer sequence ATCN PAM
cucauaggcaagggauguua

SEQ ID NO: 3196 - RNA, 20 nt, Artificial Sequence
  spacer sequence ATCN PAM
cuugccuaugagugauucac

SEQ ID NO: 3197 - RNA, 20 nt, Artificial Sequence
  spacer sequence ATCN PAM
ccuuucccagccauccuuug

SEQ ID NO: 3198 - RNA, 20 nt, Artificial Sequence
  spacer sequence ATCN PAM
uuugacacccaccauagaaa

SEQ ID NO: 3199 - RNA, 20 nt, Artificial Sequence
  spacer sequence ATCN PAM
cagagaggucagaaagaaca

SEQ ID NO: 3200 - RNA, 20 nt, Artificial Sequence
  spacer sequence ATCN PAM
gaggaagagucaccuucaca

SEQ ID NO: 3201 - RNA, 20 nt, Artificial Sequence
  spacer sequence ATCN PAM
aaugccaccaggcccugcca

SEQ ID NO: 3202 - RNA, 20 nt, Artificial Sequence
  spacer sequence ATCN PAM
gaggaacacugucugaaguu

SEQ ID NO: 3203 - RNA, 20 nt, Artificial Sequence
  spacer sequence ATCN PAM
aggacagagcuggcucagga

SEQ ID NO: 3204 - RNA, 20 nt, Artificial Sequence
  spacer sequence ATCN PAM
cauuuuuccagccucaguga

SEQ ID NO: 3205 - RNA, 20 nt, Artificial Sequence
  spacer sequence ATCN PAM
uuagcccucuaagcagccau

SEQ ID NO: 3206 - RNA, 20 nt, Artificial Sequence
  spacer sequence ATCN PAM
gugguaaaugcugccuucgc

SEQ ID NO: 3207 - RNA, 20 nt, Artificial Sequence
  spacer sequence ATCN PAM
ggcguuuaggaggaaacaug

SEQ ID NO: 3208 - RNA, 20 nt, Artificial Sequence
  spacer sequence ATCN PAM
auuuuucugucagcaaccuc

SEQ ID NO: 3209 - RNA, 20 nt, Artificial Sequence
  spacer sequence ATCN PAM
cagcauuauagacauuauuu

SEQ ID NO: 3210 - RNA, 20 nt, Artificial Sequence
  spacer sequence ATCN PAM
cauuuauaaguacccaugua

SEQ ID NO: 3211 - RNA, 20 nt, Artificial Sequence
  spacer sequence ATCN PAM
gguagcaauuuaauuacauu

SEQ ID NO: 3212 - RNA, 20 nt, Artificial Sequence
  spacer sequence ATCN PAM
aauuuaacuugggauccaaa

SEQ ID NO: 3213 - RNA, 20 nt, Artificial Sequence
  spacer sequence ATCN PAM
caaguuaaauuagauaaugc

SEQ ID NO: 3214 - RNA, 20 nt, Artificial Sequence
  spacer sequence ATCN PAM
aaacuauugaaaagcaugug

SEQ ID NO: 3215 - RNA, 20 nt, Artificial Sequence
  spacer sequence ATCN PAM
caugccuuaccagucagggu

SEQ ID NO: 3216 - RNA, 20 nt, Artificial Sequence
  spacer sequence ATCN PAM
caacagacagagggccaagg

SEQ ID NO: 3217 - RNA, 20 nt, Artificial Sequence
  spacer sequence ATCN PAM
uuggcccucugucuguuggg

SEQ ID NO: 3218 - RNA, 20 nt, Artificial Sequence
  spacer sequence ATCN PAM
gaaaauguaaaagcacuuca

SEQ ID NO: 3219 - RNA, 20 nt, Artificial Sequence
  spacer sequence ATCN PAM
aaugcuccuguaacaaagga

SEQ ID NO: 3220 - RNA, 20 nt, Artificial Sequence
  spacer sequence ATCN PAM
cauaguaugcuguccuuugu

SEQ ID NO: 3221 - RNA, 20 nt, Artificial Sequence
  spacer sequence ATCN PAM
auaguaauuaucccauagua

SEQ ID NO: 3222 - RNA, 20 nt, Artificial Sequence
  spacer sequence ATCN PAM
gcguguguaauaugucuuuu

SEQ ID NO: 3223 - RNA, 20 nt, Artificial Sequence
  spacer sequence ATCN PAM
uauggucuucgguguugguu

SEQ ID NO: 3224 - RNA, 20 nt, Artificial Sequence
  spacer sequence ATCN PAM
guaaccccauaggaaccaac

SEQ ID NO: 3225 - RNA, 20 nt, Artificial Sequence
  spacer sequence ATCN PAM
gucgugcucaguuagggcau

SEQ ID NO: 3226 - RNA, 20 nt, Artificial Sequence
  spacer sequence ATCN PAM
caauaaaccugaaauucucu

SEQ ID NO: 3227 - RNA, 20 nt, Artificial Sequence
  spacer sequence ATCN PAM
caaagaaccaaccuaaaauu

SEQ ID NO: 3228 - RNA, 20 nt, Artificial Sequence
  spacer sequence ATCN PAM
acacuugguucaggacacag

SEQ ID NO: 3229 - RNA, 20 nt, Artificial Sequence
  spacer sequence ATCN PAM
ggccuucccuguguccugaa

SEQ ID NO: 3230 - RNA, 20 nt, Artificial Sequence
  spacer sequence ATCN PAM
cuagcacauuaccuaguugg

SEQ ID NO: 3231 - RNA, 20 nt, Artificial Sequence
  spacer sequence ATCN PAM
cggaggaaagcaaaguccuc

SEQ ID NO: 3232 - RNA, 20 nt, Artificial Sequence
  spacer sequence ATCN PAM
uagguaacccaagggggagc

SEQ ID NO: 3233 - RNA, 20 nt, Artificial Sequence
  spacer sequence ATCN PAM
cucaagguaggccuuagguu

SEQ ID NO: 3234 - RNA, 20 nt, Artificial Sequence
  spacer sequence ATCN PAM
ugaggaccaaggagcucucc

SEQ ID NO: 3235 - RNA, 20 nt, Artificial Sequence
  spacer sequence ATCN PAM
cagaagaaccagugacaggu

SEQ ID NO: 3236 - RNA, 20 nt, Artificial Sequence
  spacer sequence ATCN PAM
gacuccgaaaucacaggcuu

SEQ ID NO: 3237 - RNA, 20 nt, Artificial Sequence
  spacer sequence ATCN PAM
caggcuucuggucuaaagau

SEQ ID NO: 3238 - RNA, 20 nt, Artificial Sequence
  spacer sequence ATCN PAM
uuagaccagaagccugugau

SEQ ID NO: 3239 - RNA, 20 nt, Artificial Sequence
  spacer sequence ATCN PAM
aacaaauugcuuucuuguuu

SEQ ID NO: 3240 - RNA, 20 nt, Artificial Sequence
  spacer sequence ATCN PAM
aagccagccaaagcugagac

SEQ ID NO: 3241 - RNA, 20 nt, Artificial Sequence
  spacer sequence ATCN PAM
ucauaacauccaagccagcc

SEQ ID NO: 3242 - RNA, 20 nt, Artificial Sequence
  spacer sequence ATCN PAM
guuguccucuuuuccacagg

SEQ ID NO: 3243 - RNA, 20 nt, Artificial Sequence
  spacer sequence ATCN PAM
uuuccuggacuucucaggac

SEQ ID NO: 3244 - RNA, 20 nt, Artificial Sequence
  spacer sequence ATCN PAM
ccaauuaacagcagcucgau

SEQ ID NO: 3245 - RNA, 20 nt, Artificial Sequence
  spacer sequence ATCN PAM
agcugcuguuaauuggugau

SEQ ID NO: 3246 - RNA, 20 nt, Artificial Sequence
  spacer sequence ATCN PAM
uucuggaucaaaagaucaag

SEQ ID NO: 3247 - RNA, 20 nt, Artificial Sequence
  spacer sequence ATCN PAM
agaaagaugcgcuuuguuuc

SEQ ID NO: 3248 - RNA, 20 nt, Artificial Sequence
  spacer sequence ATCN PAM
aaagaucaaguugucuuugg

SEQ ID NO: 3249 - RNA, 20 nt, Artificial Sequence
  spacer sequence ATCN PAM
uuugauccagaaagaugcgc

SEQ ID NO: 3250 - RNA, 20 nt, Artificial Sequence
  spacer sequence ATCN PAM
aguugucuuugguagcuaaa

SEQ ID NO: 3251 - RNA, 20 nt, Artificial Sequence
  spacer sequence ATCN PAM
uuuuguucuuuuuccuucuc

SEQ ID NO: 3252 - RNA, 20 nt, Artificial Sequence
  spacer sequence ATCN PAM
ucucagcuauaggcagucaa

SEQ ID NO: 3253 - RNA, 20 nt, Artificial Sequence
  spacer sequence ATCN PAM
cagcuauaggcagucaacug

SEQ ID NO: 3254 - RNA, 20 nt, Artificial Sequence
  spacer sequence ATCN PAM
gggggcuacucucuuucccc

SEQ ID NO: 3255 - RNA, 20 nt, Artificial Sequence
  spacer sequence ATCN PAM
ugaggggaaagagaguagcc

SEQ ID NO: 3256 - RNA, 20 nt, Artificial Sequence
  spacer sequence ATCN PAM
uccugaacagggcaguaguc

SEQ ID NO: 3257 - RNA, 20 nt, Artificial Sequence
  spacer sequence ATCN PAM
acugaaguccugaaguggug

SEQ ID NO: 3258 - RNA, 20 nt, Artificial Sequence
  spacer sequence ATCN PAM
ucugagcaccuccacagccu

SEQ ID NO: 3259 - RNA, 20 nt, Artificial Sequence
  spacer sequence ATCN PAM
caauaaacagcaauucuauu

SEQ ID NO: 3260 - RNA, 20 nt, Artificial Sequence
  spacer sequence ATCN PAM
ugacuccucccuuccuuuca

SEQ ID NO: 3261 - RNA, 20 nt, Artificial Sequence
  spacer sequence ATCN PAM
caccagucagcaaauccugc

SEQ ID NO: 3262 - RNA, 20 nt, Artificial Sequence
  spacer sequence ATCN PAM
ugccgguuuucccuucgaag

SEQ ID NO: 3263 - RNA, 20 nt, Artificial Sequence
  spacer sequence ATCN PAM
agccccuucucacgucccca

SEQ ID NO: 3264 - RNA, 20 nt, Artificial Sequence
  spacer sequence ATCN PAM
cuugccuaaaauuugccuuc

SEQ ID NO: 3265 - RNA, 20 nt, Artificial Sequence
  spacer sequence ATCN PAM
cuccuccaguggcuuccauc

SEQ ID NO: 3266 - RNA, 20 nt, Artificial Sequence
  spacer sequence ATCN PAM
cccuuggagucagagccaaa

SEQ ID NO: 3267 - RNA, 20 nt, Artificial Sequence
  spacer sequence ATCN PAM
cugcucuacguccuucaagg

SEQ ID NO: 3268 - RNA, 20 nt, Artificial Sequence
  spacer sequence ATCN PAM
ucucaaaauucucauggcca

SEQ ID NO: 3269 - RNA, 20 nt, Artificial Sequence
  spacer sequence ATCN PAM
uauuuaaaagccuggucacc

SEQ ID NO: 3270 - RNA, 20 nt, Artificial Sequence
  spacer sequence ATCN PAM
aacugccugcacgaaaauaa

SEQ ID NO: 3271 - RNA, 20 nt, Artificial Sequence
  spacer sequence ATCN PAM
ucucuugccauacuauauaa

SEQ ID NO: 3272 - RNA, 20 nt, Artificial Sequence
  spacer sequence ATCN PAM
ucugucucuccccagcuaga

SEQ ID NO: 3273 - RNA, 20 nt, Artificial Sequence
  spacer sequence ATCN PAM
auaaaacugucaggcagccc

SEQ ID NO: 3274 - RNA, 20 nt, Artificial Sequence
  spacer sequence ATCN PAM
aaagcuaaagugcccccagg

SEQ ID NO: 3275 - RNA, 20 nt, Artificial Sequence
  spacer sequence ATCN PAM
uggguuugagccagauucca

SEQ ID NO: 3276 - RNA, 20 nt, Artificial Sequence
  spacer sequence ATCN PAM
ggcucaaacccaagauccaa

SEQ ID NO: 3277 - RNA, 20 nt, Artificial Sequence
  spacer sequence ATCN PAM
cagugugccuggaaacgcag

SEQ ID NO: 3278 - RNA, 20 nt, Artificial Sequence
  spacer sequence ATCN PAM
aauacugugcaggggcacug

SEQ ID NO: 3279 - RNA, 20 nt, Artificial Sequence
  spacer sequence ATCN PAM
cagcugccuccacggcauua

SEQ ID NO: 3280 - RNA, 20 nt, Artificial Sequence
  spacer sequence ATCN PAM
gaaagcaagaauggagggag

SEQ ID NO: 3281 - RNA, 20 nt, Artificial Sequence
  spacer sequence ATCN PAM
cuucuaccugagagcccggg

SEQ ID NO: 3282 - RNA, 20 nt, Artificial Sequence
  spacer sequence ATCN PAM
cgggcucucagguagaaggg

SEQ ID NO: 3283 - RNA, 20 nt, Artificial Sequence
  spacer sequence ATCN PAM
uuaaguguuuuauugguaac

SEQ ID NO: 3284 - RNA, 20 nt, Artificial Sequence
  spacer sequence ATCN PAM
gagggaaauauuagcauuau

SEQ ID NO: 3285 - RNA, 20 nt, Artificial Sequence
  spacer sequence ATCN PAM
gauucaaaacugaagacuca

SEQ ID NO: 3286 - RNA, 20 nt, Artificial Sequence
  spacer sequence ATCN PAM
gauuagcgcucuguuaacuu

SEQ ID NO: 3287 - RNA, 20 nt, Artificial Sequence
  spacer sequence ATCN PAM
ucacucagucaacguauuuu

SEQ ID NO: 3288 - RNA, 20 nt, Artificial Sequence
  spacer sequence ATCN PAM
cucagucaacguauuuucca

SEQ ID NO: 3289 - RNA, 20 nt, Artificial Sequence
  spacer sequence ATCN PAM
guaaaaugaugaggugcuuc

SEQ ID NO: 3290 - RNA, 20 nt, Artificial Sequence
  spacer sequence ATCN PAM
uuuuacugauuuauuugaaa

SEQ ID NO: 3291 - RNA, 20 nt, Artificial Sequence
  spacer sequence ATCN PAM
ucccagcaauguagguguuc

SEQ ID NO: 3292 - RNA, 20 nt, Artificial Sequence
  spacer sequence ATCN PAM
gcagcuccccagcuccagug

SEQ ID NO: 3293 - RNA, 20 nt, Artificial Sequence
  spacer sequence ATCN PAM
gaggaaagcaggcuuccucu

SEQ ID NO: 3294 - RNA, 20 nt, Artificial Sequence
  spacer sequence ATCN PAM
ggcagccaccaugagcaguu

SEQ ID NO: 3295 - RNA, 20 nt, Artificial Sequence
  spacer sequence ATCN PAM
gcgcaucgggcagccaccau

SEQ ID NO: 3296 - RNA, 20 nt, Artificial Sequence
  spacer sequence ATCN PAM
uucauuugggcuuguggcug

SEQ ID NO: 3297 - RNA, 20 nt, Artificial Sequence
  spacer sequence ATCN PAM
ugcucucagguauaaaggau

SEQ ID NO: 3298 - RNA, 20 nt, Artificial Sequence
  spacer sequence ATCN PAM
uuuauaccugagagcaagau

SEQ ID NO: 3299 - RNA, 20 nt, Artificial Sequence
  spacer sequence ATCN PAM
gucuccuucuaccugccccu

SEQ ID NO: 3300 - RNA, 20 nt, Artificial Sequence
  spacer sequence ATCN PAM
ucucucaaagcugccuuucu

SEQ ID NO: 3301 - RNA, 20 nt, Artificial Sequence
  spacer sequence ATCN PAM
caaugcucugcagagaguac

SEQ ID NO: 3302 - RNA, 20 nt, Artificial Sequence
  spacer sequence ATCN PAM
aaugcuaaauuguaaaaagu

SEQ ID NO: 3303 - RNA, 20 nt, Artificial Sequence
  spacer sequence ATCN PAM
agucucacuuuuuacaauuu

SEQ ID NO: 3304 - RNA, 20 nt, Artificial Sequence
  spacer sequence ATCN PAM
gccucuccucucagcucuaa

SEQ ID NO: 3305 - RNA, 20 nt, Artificial Sequence
  spacer sequence ATCN PAM
aauuggagaugguuucaaua

SEQ ID NO: 3306 - RNA, 20 nt, Artificial Sequence
  spacer sequence ATCN PAM
ccaauuagauaugcaaaaug

SEQ ID NO: 3307 - RNA, 20 nt, Artificial Sequence
  spacer sequence ATCN PAM
aggcaucccuacguuacuug

SEQ ID NO: 3308 - RNA, 20 nt, Artificial Sequence
  spacer sequence ATCN PAM
cuacguuacuugaaguuggu

SEQ ID NO: 3309 - RNA, 20 nt, Artificial Sequence
  spacer sequence ATCN PAM
ggcgacguucacagccuuau

SEQ ID NO: 3310 - RNA, 20 nt, Artificial Sequence
  spacer sequence ATCN PAM
gaggugacucauacuugaga

SEQ ID NO: 3311 - RNA, 20 nt, Artificial Sequence
  spacer sequence ATCN PAM
gucaucagaggugacucaua

SEQ ID NO: 3312 - RNA, 20 nt, Artificial Sequence
  spacer sequence ATCN PAM
auuuggaggagacacagaga

SEQ ID NO: 3313 - RNA, 20 nt, Artificial Sequence
  spacer sequence ATCN PAM
cugagacgucuaagagguga

SEQ ID NO: 3314 - RNA, 20 nt, Artificial Sequence
  spacer sequence ATCN PAM
cugaaccucuccucaaaugg

SEQ ID NO: 3315 - RNA, 20 nt, Artificial Sequence
  spacer sequence ATCN PAM
ugaggacucaccaccccacu

SEQ ID NO: 3316 - RNA, 20 nt, Artificial Sequence
  spacer sequence ATCN PAM
auggauagucuagccuguga

SEQ ID NO: 3317 - RNA, 20 nt, Artificial Sequence
  spacer sequence ATCN PAM
auggauuucagugggguggu

SEQ ID NO: 3318 - RNA, 20 nt, Artificial Sequence
  spacer sequence ATCN PAM
uucucaucuuugagcggcuc

SEQ ID NO: 3319 - RNA, 20 nt, Artificial Sequence
  spacer sequence ATCN PAM
uugagcggcucuuccccaga

SEQ ID NO: 3320 - RNA, 20 nt, Artificial Sequence
  spacer sequence ATCN PAM
ugacucuggggaagagccgc

SEQ ID NO: 3321 - RNA, 20 nt, Artificial Sequence
  spacer sequence ATCN PAM
ccaucaugccccggacucca

SEQ ID NO: 3322 - RNA, 20 nt, Artificial Sequence
  spacer sequence ATCN PAM
ugccccggacuccagucucu

SEQ ID NO: 3323 - RNA, 20 nt, Artificial Sequence
  spacer sequence ATCN PAM
uggagccgugucagcugcag

SEQ ID NO: 3324 - RNA, 20 nt, Artificial Sequence
  spacer sequence ATCN PAM
gccgggugcuucuggagaug

SEQ ID NO: 3325 - RNA, 20 nt, Artificial Sequence
  spacer sequence ATCN PAM
ccagaagcacccggcagaug

SEQ ID NO: 3326 - RNA, 20 nt, Artificial Sequence
  spacer sequence ATCN PAM
gggcgcugguuucugcugug

SEQ ID NO: 3327 - RNA, 20 nt, Artificial Sequence
  spacer sequence ATCN PAM
ccucaagccagccaccccau

SEQ ID NO: 3328 - RNA, 20 nt, Artificial Sequence
  spacer sequence ATCN PAM
ucauguccugucuggaucuu

SEQ ID NO: 3329 - RNA, 20 nt, Artificial Sequence
  spacer sequence ATCN PAM
agacaggacaugaagauuug

SEQ ID NO: 3330 - RNA, 20 nt, Artificial Sequence
  spacer sequence ATCN PAM
ucccaguccugcccucucuc

SEQ ID NO: 3331 - RNA, 20 nt, Artificial Sequence
  spacer sequence ATCN PAM
ucccacccuuccaagggccu

SEQ ID NO: 3332 - RNA, 20 nt, Artificial Sequence
  spacer sequence ATCN PAM
aucuccccacucacacgcua

SEQ ID NO: 3333 - RNA, 20 nt, Artificial Sequence
  spacer sequence ATCN PAM
ccccacucacacgcuaaagu

SEQ ID NO: 3334 - RNA, 20 nt, Artificial Sequence
  spacer sequence ATCN PAM
cugaucaggacugaaaaaag

SEQ ID NO: 3335 - RNA, 20 nt, Artificial Sequence
  spacer sequence ATCN PAM
gggaugaguccgugcuguug

SEQ ID NO: 3336 - RNA, 20 nt, Artificial Sequence
  spacer sequence ATCN PAM
ggacugaaaaaagaaaaaga

SEQ ID NO: 3337 - RNA, 20 nt, Artificial Sequence
  spacer sequence ATCN PAM
caccacucucugggaaaaua

SEQ ID NO: 3338 - RNA, 20 nt, Artificial Sequence
  spacer sequence ATCN PAM
cuggcuuguugagaagagag

SEQ ID NO: 3339 - RNA, 20 nt, Artificial Sequence
  spacer sequence ATCN PAM
agggaguuuugcucaccaca

SEQ ID NO: 3340 - RNA, 20 nt, Artificial Sequence
  spacer sequence ATCN PAM
aggucucgacucaauccagg

SEQ ID NO: 3341 - RNA, 20 nt, Artificial Sequence
  spacer sequence ATCN PAM
ucagagaaggacagacuuga

SEQ ID NO: 3342 - RNA, 20 nt, Artificial Sequence
  spacer sequence ATCN PAM
ccuuguggacuuuccugaga

SEQ ID NO: 3343 - RNA, 20 nt, Artificial Sequence
  spacer sequence ATCN PAM
caccaguggccgggguguuc

SEQ ID NO: 3344 - RNA, 20 nt, Artificial Sequence
  spacer sequence ATCN PAM
cagugcugagccaugagccc

SEQ ID NO: 3345 - RNA, 20 nt, Artificial Sequence
  spacer sequence ATCN PAM
gaaaauagaauuaaauagcc

SEQ ID NO: 3346 - RNA, 20 nt, Artificial Sequence
  spacer sequence ATCN PAM
cagcauuuugggaggccgag

SEQ ID NO: 3347 - RNA, 20 nt, Artificial Sequence
  spacer sequence ATCN PAM
cuacuuaaaaaaaaaaaaaa

SEQ ID NO: 3348 - RNA, 20 nt, Artificial Sequence
  spacer sequence ATCN PAM
gccaggugugauggcaugca

SEQ ID NO: 3349 - RNA, 20 nt, Artificial Sequence
  spacer sequence ATCN PAM
caccuggcugauuuuuuuuu

SEQ ID NO: 3350 - RNA, 20 nt, Artificial Sequence
  spacer sequence ATCN PAM
cagcuacuugggaggcugag

SEQ ID NO: 3351 - RNA, 20 nt, Artificial Sequence
  spacer sequence ATCN PAM
cuugaaccugggaggcggag

SEQ ID NO: 3352 - RNA, 20 nt, Artificial Sequence
  spacer sequence ATCN PAM
cggcucauugcagccuccgc

SEQ ID NO: 3353 - RNA, 20 nt, Artificial Sequence
  spacer sequence ATCN PAM
uagcacugcacuccagccug

SEQ ID NO: 3354 - RNA, 20 nt, Artificial Sequence
  spacer sequence ATCN PAM
caaaaaaaaaaaaaaauuaa

SEQ ID NO: 3355 - RNA, 20 nt, Artificial Sequence
  spacer sequence ATCN PAM
gaguugugcaaauaaaucua

SEQ ID NO: 3356 - RNA, 20 nt, Artificial Sequence
  spacer sequence ATCN PAM
aguuggucugacugucuuua

SEQ ID NO: 3357 - RNA, 20 nt, Artificial Sequence
  spacer sequence ATCN PAM
auggaauucacagccucuua

SEQ ID NO: 3358 - RNA, 20 nt, Artificial Sequence
  spacer sequence ATCN PAM
ucucuuaucaauggaauuca

SEQ ID NO: 3359 - RNA, 20 nt, Artificial Sequence
  spacer sequence ATCN PAM
aaggucuugcauacacauac

SEQ ID NO: 3360 - RNA, 20 nt, Artificial Sequence
  spacer sequence ATCN PAM
ccuuuuaaacucauccaaga

SEQ ID NO: 3361 - RNA, 20 nt, Artificial Sequence
  spacer sequence ATCN PAM
aagagccagucaaagccacc

SEQ ID NO: 3362 - RNA, 20 nt, Artificial Sequence
  spacer sequence ATCN PAM
uuaggucugggcaacacuuu

SEQ ID NO: 3363 - RNA, 20 nt, Artificial Sequence
  spacer sequence ATCN PAM
ucccccacgugcuccuuccc

SEQ ID NO: 3364 - RNA, 20 nt, Artificial Sequence
  spacer sequence ATCN PAM
gcaagcagaguucacugcuu

SEQ ID NO: 3365 - RNA, 20 nt, Artificial Sequence
  spacer sequence ATCN PAM
caaccccagcacuuucacuu

SEQ ID NO: 3366 - RNA, 20 nt, Artificial Sequence
  spacer sequence ATCN PAM
ccagcucccuguccagggaa

SEQ ID NO: 3367 - RNA, 20 nt, Artificial Sequence
  spacer sequence ATCN PAM
auucaaagcccggucuuucu

SEQ ID NO: 3368 - RNA, 20 nt, Artificial Sequence
  spacer sequence ATCN PAM
agcagcgugagcaaaguaca

SEQ ID NO: 3369 - RNA, 20 nt, Artificial Sequence
  spacer sequence ATCN PAM
guacuuugcucacgcugcuu

SEQ ID NO: 3370 - RNA, 20 nt, Artificial Sequence
  spacer sequence ATCN PAM
gugguauucacauuggcucg

SEQ ID NO: 3371 - RNA, 20 nt, Artificial Sequence
  spacer sequence ATCN PAM
ccuuuuaacuaaucccagag

SEQ ID NO: 3372 - RNA, 20 nt, Artificial Sequence
  spacer sequence ATCN PAM
cagagugacaccuccuccaa

SEQ ID NO: 3373 - RNA, 20 nt, Artificial Sequence
  spacer sequence ATCN PAM
ccuucuagugggcuggaccu

SEQ ID NO: 3374 - RNA, 20 nt, Artificial Sequence
  spacer sequence ATCN PAM
gugggacccagcuaccucuc

SEQ ID NO: 3375 - RNA, 20 nt, Artificial Sequence
  spacer sequence ATCN PAM
cuguccgccacccaccacca

SEQ ID NO: 3376 - RNA, 20 nt, Artificial Sequence
  spacer sequence ATCN PAM
agagucauuuggaagccccc

SEQ ID NO: 3377 - RNA, 20 nt, Artificial Sequence
  spacer sequence ATCN PAM
cccaacuuuccagcuucccc

SEQ ID NO: 3378 - RNA, 20 nt, Artificial Sequence
  spacer sequence ATCN PAM
ccacaguaagaccucacagu

SEQ ID NO: 3379 - RNA, 20 nt, Artificial Sequence
  spacer sequence ATCN PAM
uucucgaauugacuuguuca

SEQ ID NO: 3380 - RNA, 20 nt, Artificial Sequence
  spacer sequence ATCN PAM
aauaagggaauauucucugg

SEQ ID NO: 3381 - RNA, 20 nt, Artificial Sequence
  spacer sequence ATCN PAM
cugcuucccuuuuucauaac

SEQ ID NO: 3382 - RNA, 20 nt, Artificial Sequence
  spacer sequence ATCN PAM
agccuuguggccauaagccu

SEQ ID NO: 3383 - RNA, 20 nt, Artificial Sequence
  spacer sequence ATCN PAM
caggcuuauggccacaaggc

SEQ ID NO: 3384 - RNA, 20 nt, Artificial Sequence
  spacer sequence ATCN PAM
uagagcacccaaagcuggca

SEQ ID NO: 3385 - RNA, 20 nt, Artificial Sequence
  spacer sequence ATCN PAM
uccuacacacucacugucac

SEQ ID NO: 3386 - RNA, 20 nt, Artificial Sequence
  spacer sequence ATCN PAM
uacacacucacugucaccuc

SEQ ID NO: 3387 - RNA, 20 nt, Artificial Sequence
  spacer sequence ATCN PAM
uuucugugugcuggggugag

SEQ ID NO: 3388 - RNA, 20 nt, Artificial Sequence
  spacer sequence ATCN PAM
gggcuccgcucuuccaaaac

SEQ ID NO: 3389 - RNA, 20 nt, Artificial Sequence
  spacer sequence ATCN PAM
ggagaacaaagguuuuggaa

SEQ ID NO: 3390 - RNA, 20 nt, Artificial Sequence
  spacer sequence ATCN PAM
ugucuccuaaggugcccccu

SEQ ID NO: 3391 - RNA, 20 nt, Artificial Sequence
  spacer sequence ATCN PAM
uaacucaccgucauccgggg

SEQ ID NO: 3392 - RNA, 20 nt, Artificial Sequence
  spacer sequence ATCN PAM
ggggaaguggagaggaaguc

SEQ ID NO: 3393 - RNA, 20 nt, Artificial Sequence
  spacer sequence ATCN PAM
caggugccccucucuguccu

SEQ ID NO: 3394 - RNA, 20 nt, Artificial Sequence
  spacer sequence ATCN PAM
ggacaacugggagugaaagu

SEQ ID NO: 3395 - RNA, 20 nt, Artificial Sequence
  spacer sequence ATCN PAM
uugagggcaguuaaacuuuc

SEQ ID NO: 3396 - RNA, 20 nt, Artificial Sequence
  spacer sequence ATCN PAM
uugucagccaucuuugaggg

SEQ ID NO: 3397 - RNA, 20 nt, Artificial Sequence
  spacer sequence ATCN PAM
agcauuccuaguggacacca

SEQ ID NO: 3398 - RNA, 20 nt, Artificial Sequence
  spacer sequence ATCN PAM
augaagcacugguuuuuaaa

SEQ ID NO: 3399 - RNA, 20 nt, Artificial Sequence
  spacer sequence ATCN PAM
uaguguuuuccacauucuuu

SEQ ID NO: 3400 - RNA, 20 nt, Artificial Sequence
  spacer sequence ATCN PAM
ugccauuggacucuguaguu

SEQ ID NO: 3401 - RNA, 20 nt, Artificial Sequence
  spacer sequence ATCN PAM
gacuaauguuugaguaaaag

SEQ ID NO: 3402 - RNA, 20 nt, Artificial Sequence
  spacer sequence ATCN PAM
gcugguuuuccagcucuuuu

SEQ ID NO: 3403 - RNA, 20 nt, Artificial Sequence
  spacer sequence ATCN PAM
uguaacccauuuauuguuuc

SEQ ID NO: 3404 - RNA, 20 nt, Artificial Sequence
  spacer sequence ATCN PAM
auuaucuuguaacccauuua

SEQ ID NO: 3405 - RNA, 20 nt, Artificial Sequence
  spacer sequence ATCN PAM
augaguucagguucaggaaa

SEQ ID NO: 3406 - RNA, 20 nt, Artificial Sequence
  spacer sequence ATCN PAM
cuuuccugaaccugaacuca

SEQ ID NO: 3407 - RNA, 20 nt, Artificial Sequence
  spacer sequence ATCN PAM
ccagcuuugggcugaaaugc

SEQ ID NO: 3408 - RNA, 20 nt, Artificial Sequence
  spacer sequence ATCN PAM
caucaccagcuuugggcuga

SEQ ID NO: 3409 - RNA, 20 nt, Artificial Sequence
  spacer sequence ATCN PAM
cuuaugcuucauuuuaaacc

SEQ ID NO: 3410 - RNA, 20 nt, Artificial Sequence
  spacer sequence ATCN PAM
aagguagacaaaaggaagga

SEQ ID NO: 3411 - RNA, 20 nt, Artificial Sequence
  spacer sequence ATCN PAM
uuccuuuugucuaccuucga

SEQ ID NO: 3412 - RNA, 20 nt, Artificial Sequence
  spacer sequence ATCN PAM
caggaaauccuuccuuuugu

SEQ ID NO: 3413 - RNA, 20 nt, Artificial Sequence
  spacer sequence ATCN PAM
gccccugagaggguacacgu

SEQ ID NO: 3414 - RNA, 20 nt, Artificial Sequence
  spacer sequence ATCN PAM
acuccauuaucuccaguuau

SEQ ID NO: 3415 - RNA, 20 nt, Artificial Sequence
  spacer sequence ATCN PAM
ccaguuaucugaauaaaaaa

SEQ ID NO: 3416 - RNA, 20 nt, Artificial Sequence
  spacer sequence ATCN PAM
gaauaaaaaagccaagcuau

SEQ ID NO: 3417 - RNA, 20 nt, Artificial Sequence
  spacer sequence ATCN PAM
ccugugcuguugcagagaau

SEQ ID NO: 3418 - RNA, 20 nt, Artificial Sequence
  spacer sequence ATCN PAM
ccgauaaaagcgugggugca

SEQ ID NO: 3419 - RNA, 20 nt, Artificial Sequence
  spacer sequence ATCN PAM
gugauggcuggaaugcuuuu

SEQ ID NO: 3420 - RNA, 20 nt, Artificial Sequence
  spacer sequence ATCN PAM
cacauggccucuccauggcc

SEQ ID NO: 3421 - RNA, 20 nt, Artificial Sequence
  spacer sequence ATCN PAM
guaaaaugacaggguuaaug

SEQ ID NO: 3422 - RNA, 20 nt, Artificial Sequence
  spacer sequence ATCN PAM
uuaacccugucauuuuacag

SEQ ID NO: 3423 - RNA, 20 nt, Artificial Sequence
  spacer sequence ATCN PAM
ucuauguagacauagacuug

SEQ ID NO: 3424 - RNA, 20 nt, Artificial Sequence
  spacer sequence ATCN PAM
augcucaaagagcugugcuu

SEQ ID NO: 3425 - RNA, 20 nt, Artificial Sequence
  spacer sequence ATCN PAM
uagaagaaagcacagcucuu

SEQ ID NO: 3426 - RNA, 20 nt, Artificial Sequence
  spacer sequence ATCN PAM
cagaaauuuggaaggccaca

SEQ ID NO: 3427 - RNA, 20 nt, Artificial Sequence
  spacer sequence ATCN PAM
ucccucuguggccuuccaaa

SEQ ID NO: 3428 - RNA, 20 nt, Artificial Sequence
  spacer sequence ATCN PAM
cagcaauuauuuuauuuuau

SEQ ID NO: 3429 - RNA, 20 nt, Artificial Sequence
  spacer sequence ATCN PAM
uuucaaagaaaauauaaaau

SEQ ID NO: 3430 - RNA, 20 nt, Artificial Sequence
  spacer sequence ATCN PAM
aucaaaccuagaccuaaaau

SEQ ID NO: 3431 - RNA, 20 nt, Artificial Sequence
  spacer sequence ATCN PAM
aaccuagaccuaaaaucauc

SEQ ID NO: 3432 - RNA, 20 nt, Artificial Sequence
  spacer sequence ATCN PAM
ucuugucucauucccucugu

SEQ ID NO: 3433 - RNA, 20 nt, Artificial Sequence
  spacer sequence ATCN PAM
ugucucauucccucugucaa

SEQ ID NO: 3434 - RNA, 20 nt, Artificial Sequence
  spacer sequence ATCN PAM
gcugagcucucauaauacau

SEQ ID NO: 3435 - RNA, 20 nt, Artificial Sequence
  spacer sequence ATCN PAM
uagauaaaggagucacagga

SEQ ID NO: 3436 - RNA, 20 nt, Artificial Sequence
  spacer sequence ATCN PAM
augauguuuuauguauuaug

SEQ ID NO: 3437 - RNA, 20 nt, Artificial Sequence
  spacer sequence ATCN PAM
ugugacuccuuuaucuauga

SEQ ID NO: 3438 - RNA, 20 nt, Artificial Sequence
  spacer sequence ATCN PAM
cagacauuuuaaaacuaaau

SEQ ID NO: 3439 - RNA, 20 nt, Artificial Sequence
  spacer sequence ATCN PAM
gcucuaucgcagacauuuua

SEQ ID NO: 3440 - RNA, 20 nt, Artificial Sequence
  spacer sequence ATCN PAM
ugaaucugcucuaucgcaga

SEQ ID NO: 3441 - RNA, 20 nt, Artificial Sequence
  spacer sequence ATCN PAM
uacaggcauaauccugaauc

SEQ ID NO: 3442 - RNA, 20 nt, Artificial Sequence
  spacer sequence ATCN PAM
cacaugugaauuuuagcuuc

SEQ ID NO: 3443 - RNA, 20 nt, Artificial Sequence
  spacer sequence ATCN PAM
agagcaaugcuuccugccuu

SEQ ID NO: 3444 - RNA, 20 nt, Artificial Sequence
  spacer sequence ATCN PAM
gagaaucaccacacaccaga

SEQ ID NO: 3445 - RNA, 20 nt, Artificial Sequence
  spacer sequence ATCN PAM
ccacacaccagagagggcau

SEQ ID NO: 3446 - RNA, 20 nt, Artificial Sequence
  spacer sequence ATCN PAM
ucagaguucacuuaaaaguc

SEQ ID NO: 3447 - RNA, 20 nt, Artificial Sequence
  spacer sequence ATCN PAM
gaguucacuuaaaaguccau

SEQ ID NO: 3448 - RNA, 20 nt, Artificial Sequence
  spacer sequence ATCN PAM
agaaucagaacgugggaugg

SEQ ID NO: 3449 - RNA, 20 nt, Artificial Sequence
  spacer sequence ATCN PAM
gaacgugggauggggugccc

SEQ ID NO: 3450 - RNA, 20 nt, Artificial Sequence
  spacer sequence ATCN PAM
cacguucugauucuggaugg

SEQ ID NO: 3451 - RNA, 20 nt, Artificial Sequence
  spacer sequence ATCN PAM
acgcccggcccccaggaaug

SEQ ID NO: 3452 - RNA, 20 nt, Artificial Sequence
  spacer sequence ATCN PAM
auuacuguucaaguucaggu

SEQ ID NO: 3453 - RNA, 20 nt, Artificial Sequence
  spacer sequence ATCN PAM
agcuugaccugaacuugaac

SEQ ID NO: 3454 - RNA, 20 nt, Artificial Sequence
  spacer sequence ATCN PAM
acaugguguugcucgauggg

SEQ ID NO: 3455 - RNA, 20 nt, Artificial Sequence
  spacer sequence ATCN PAM
agcaacaccauguggauggu

SEQ ID NO: 3456 - RNA, 20 nt, Artificial Sequence
  spacer sequence ATCN PAM
uugcccaucgagcaacacca

SEQ ID NO: 3457 - RNA, 20 nt, Artificial Sequence
  spacer sequence ATCN PAM
agaggcagucguucaccacc

SEQ ID NO: 3458 - RNA, 20 nt, Artificial Sequence
  spacer sequence ATCN PAM
gcucccuacaauccacagca

SEQ ID NO: 3459 - RNA, 20 nt, Artificial Sequence
  spacer sequence ATCN PAM
acagcaaaaggagaguuccu

SEQ ID NO: 3460 - RNA, 20 nt, Artificial Sequence
  spacer sequence ATCN PAM
cucuuuaaaagaaggaacuc

SEQ ID NO: 3461 - RNA, 20 nt, Artificial Sequence
  spacer sequence ATCN PAM
cucaacucuugagagaaaau

SEQ ID NO: 3462 - RNA, 20 nt, Artificial Sequence
  spacer sequence ATCN PAM
cacuucuguccauuuucucu

SEQ ID NO: 3463 - RNA, 20 nt, Artificial Sequence
  spacer sequence ATCN PAM
ugauaccagcaggaaacagg

SEQ ID NO: 3464 - RNA, 20 nt, Artificial Sequence
  spacer sequence ATCN PAM
ggauugaaaaaucccacuuc

SEQ ID NO: 3465 - RNA, 20 nt, Artificial Sequence
  spacer sequence ATCN PAM
acaccuuuaaggcauuuugc

SEQ ID NO: 3466 - RNA, 20 nt, Artificial Sequence
  spacer sequence ATCN PAM
aaaagaccgcaaaaugccuu

SEQ ID NO: 3467 - RNA, 20 nt, Artificial Sequence
  spacer sequence ATCN PAM
ccaggcagcugaaagucagu

SEQ ID NO: 3468 - RNA, 20 nt, Artificial Sequence
  spacer sequence ATCN PAM
gcuuuuuaaugaugugaaag

SEQ ID NO: 3469 - RNA, 20 nt, Artificial Sequence
  spacer sequence ATCN PAM
uuaaaaagcugauguacuga

SEQ ID NO: 3470 - RNA, 20 nt, Artificial Sequence
  spacer sequence ATCN PAM
uuaacuuucacaucauuaaa

SEQ ID NO: 3471 - RNA, 20 nt, Artificial Sequence
  spacer sequence ATCN PAM
cuccuuacagguuauagaca

SEQ ID NO: 3472 - RNA, 20 nt, Artificial Sequence
  spacer sequence ATCN PAM
uaggaaaaaggugacugcac

SEQ ID NO: 3473 - RNA, 20 nt, Artificial Sequence
  spacer sequence ATCN PAM
cuccugaaaucugacgugcu

SEQ ID NO: 3474 - RNA, 20 nt, Artificial Sequence
  spacer sequence ATCN PAM
gacgugcuuugcaacagcag

SEQ ID NO: 3475 - RNA, 20 nt, Artificial Sequence
  spacer sequence ATCN PAM
uguagauuucugaggccagu

SEQ ID NO: 3476 - RNA, 20 nt, Artificial Sequence
  spacer sequence ATCN PAM
acaagauuccagugguucca

SEQ ID NO: 3477 - RNA, 20 nt, Artificial Sequence
  spacer sequence ATCN PAM
uguauucuccuaaauuacuc

SEQ ID NO: 3478 - RNA, 20 nt, Artificial Sequence
  spacer sequence ATCN PAM
cuuugucuucacugaguuuu

SEQ ID NO: 3479 - RNA, 20 nt, Artificial Sequence
  spacer sequence ATCN PAM
uuuucauaggcauugucauu

SEQ ID NO: 3480 - RNA, 20 nt, Artificial Sequence
  spacer sequence ATCN PAM
auaacucaggaauucauggc

SEQ ID NO: 3481 - RNA, 20 nt, Artificial Sequence
  spacer sequence ATCN PAM
aagcauagccaugaauuccu

SEQ ID NO: 3482 - RNA, 20 nt, Artificial Sequence
  spacer sequence ATCN PAM
ugucacuggcaagcaauuau

SEQ ID NO: 3483 - RNA, 20 nt, Artificial Sequence
  spacer sequence ATCN PAM
ucuucaaauaauucggccua

SEQ ID NO: 3484 - RNA, 20 nt, Artificial Sequence
  spacer sequence ATCN PAM
uacacacauuugugcauaaa

SEQ ID NO: 3485 - RNA, 20 nt, Artificial Sequence
  spacer sequence ATCN PAM
uuggcuuucugaauuuuuca

SEQ ID NO: 3486 - RNA, 20 nt, Artificial Sequence
  spacer sequence ATCN PAM
auauaccuugccacgcaagg

SEQ ID NO: 3487 - RNA, 20 nt, Artificial Sequence
  spacer sequence ATCN PAM
aaaauaauugcaaaauuauu

SEQ ID NO: 3488 - RNA, 20 nt, Artificial Sequence
  spacer sequence ATCN PAM
uucacaccucaugucuugaa

SEQ ID NO: 3489 - RNA, 20 nt, Artificial Sequence
  spacer sequence ATCN PAM
aaauacuguuuugcaucauu

SEQ ID NO: 3490 - RNA, 20 nt, Artificial Sequence
  spacer sequence ATCN PAM
gugaguauaaauucuggagu

SEQ ID NO: 3491 - RNA, 20 nt, Artificial Sequence
  spacer sequence ATCN PAM
agugccaccaaauuuuuuaa

SEQ ID NO: 3492 - RNA, 20 nt, Artificial Sequence
  spacer sequence ATCN PAM
agauuauaaaaguaaagagc

SEQ ID NO: 3493 - RNA, 20 nt, Artificial Sequence
  spacer sequence ATCN PAM
agauuuuaaaaaauuuggug

SEQ ID NO: 3494 - RNA, 20 nt, Artificial Sequence
  spacer sequence ATCN PAM
cccuucggugggauaaugua

SEQ ID NO: 3495 - RNA, 20 nt, Artificial Sequence
  spacer sequence ATCN PAM
caccgaagggugaugcucuu

SEQ ID NO: 3496 - RNA, 20 nt, Artificial Sequence
  spacer sequence ATCN PAM
ucacagaguuuucugaggaa

SEQ ID NO: 3497 - RNA, 20 nt, Artificial Sequence
  spacer sequence ATCN PAM
aaggccacuuauuuaauuuu

SEQ ID NO: 3498 - RNA, 20 nt, Artificial Sequence
  spacer sequence ATCN PAM
ucacucuccuuggugcuucu

SEQ ID NO: 3499 - RNA, 20 nt, Artificial Sequence
  spacer sequence ATCN PAM
aaaagagcagacaguccccc

SEQ ID NO: 3500 - RNA, 20 nt, Artificial Sequence
  spacer sequence ATCN PAM
acaggaaucugaaggggcag

SEQ ID NO: 3501 - RNA, 20 nt, Artificial Sequence
  spacer sequence ATCN PAM
gaaggggcagccagacauuc

SEQ ID NO: 3502 - RNA, 20 nt, Artificial Sequence
  spacer sequence ATCN PAM
gaucagccaccaaccgaacc

SEQ ID NO: 3503 - RNA, 20 nt, Artificial Sequence
  spacer sequence ATCN PAM
gaugggugguauaggcagaa

SEQ ID NO: 3504 - RNA, 20 nt, Artificial Sequence
  spacer sequence ATCN PAM
gccaccaaccgaaccaaaaa

SEQ ID NO: 3505 - RNA, 20 nt, Artificial Sequence
  spacer sequence ATCN PAM
uuuuuucugcaaagaagggg

SEQ ID NO: 3506 - RNA, 20 nt, Artificial Sequence
  spacer sequence ATCN PAM
auaucuuuuuuucugcaaag

SEQ ID NO: 3507 - RNA, 20 nt, Artificial Sequence
  spacer sequence ATCN PAM
ugcuggguugacaaagguug

SEQ ID NO: 3508 - RNA, 20 nt, Artificial Sequence
  spacer sequence ATCN PAM
cuuuccaaaaaguguuuaga

SEQ ID NO: 3509 - RNA, 20 nt, Artificial Sequence
  spacer sequence ATCN PAM
uugagggugccagguuacau

SEQ ID NO: 3510 - RNA, 20 nt, Artificial Sequence
  spacer sequence ATCN PAM
gcuguaaacccaaguaucag

SEQ ID NO: 3511 - RNA, 20 nt, Artificial Sequence
  spacer sequence ATCN PAM
ggcacuuagauggcagcuaa

SEQ ID NO: 3512 - RNA, 20 nt, Artificial Sequence
  spacer sequence ATCN PAM
aagugccugauacuuggguu

SEQ ID NO: 3513 - RNA, 20 nt, Artificial Sequence
  spacer sequence ATCN PAM
gagaguggcgcuuuuagcug

SEQ ID NO: 3514 - RNA, 20 nt, Artificial Sequence
  spacer sequence ATCN PAM
caccauucccagacccaggc

SEQ ID NO: 3515 - RNA, 20 nt, Artificial Sequence
  spacer sequence ATCN PAM
gcugccuggaagcugagacu

SEQ ID NO: 3516 - RNA, 20 nt, Artificial Sequence
  spacer sequence ATCN PAM
agaagaacaaaauuccccuu

SEQ ID NO: 3517 - RNA, 20 nt, Artificial Sequence
  spacer sequence ATCN PAM
uccaucuugugccccagucc

SEQ ID NO: 3518 - RNA, 20 nt, Artificial Sequence
  spacer sequence ATCN PAM
ugugccccaguccucccuua

SEQ ID NO: 3519 - RNA, 20 nt, Artificial Sequence
  spacer sequence ATCN PAM
ccucucaggcaaaucaucuu

SEQ ID NO: 3520 - RNA, 20 nt, Artificial Sequence
  spacer sequence ATCN PAM
ucuuucucuaauagccaggg

SEQ ID NO: 3521 - RNA, 20 nt, Artificial Sequence
  spacer sequence ATCN PAM
uucucuaauagccagggcuc

SEQ ID NO: 3522 - RNA, 20 nt, Artificial Sequence
  spacer sequence ATCN PAM
gacucugccucaugcacuga

SEQ ID NO: 3523 - RNA, 20 nt, Artificial Sequence
  spacer sequence ATCN PAM
cuugucuuuuucagugcaug

SEQ ID NO: 3524 - RNA, 20 nt, Artificial Sequence
  spacer sequence ATCN PAM
cuguucuuccaggagaaugg

SEQ ID NO: 3525 - RNA, 20 nt, Artificial Sequence
  spacer sequence ATCN PAM
gggaaguucauugugaaggg

SEQ ID NO: 3526 - RNA, 20 nt, Artificial Sequence
  spacer sequence ATCN PAM
caaauacuacaaaaguagag

SEQ ID NO: 3527 - RNA, 20 nt, Artificial Sequence
  spacer sequence ATCN PAM
guccccaaguccacaucuuc

SEQ ID NO: 3528 - RNA, 20 nt, Artificial Sequence
  spacer sequence ATCN PAM
uccagcuccaaccaccacag

SEQ ID NO: 3529 - RNA, 20 nt, Artificial Sequence
  spacer sequence ATCN PAM
ccucccuagcccauuuuauu

SEQ ID NO: 3530 - RNA, 20 nt, Artificial Sequence
  spacer sequence ATCN PAM
acuuaaauaauaaaaugggc

SEQ ID NO: 3531 - RNA, 20 nt, Artificial Sequence
  spacer sequence ATCN PAM
cagacgucauaucauuucau

SEQ ID NO: 3532 - RNA, 20 nt, Artificial Sequence
  spacer sequence ATCN PAM
uuucaucaguaaacaccucu

SEQ ID NO: 3533 - RNA, 20 nt, Artificial Sequence
  spacer sequence ATCN PAM
guaaacaccucuguauguau

SEQ ID NO: 3534 - RNA, 20 nt, Artificial Sequence
  spacer sequence ATCN PAM
caccuaaaaauaauaaaguc

SEQ ID NO: 3535 - RNA, 20 nt, Artificial Sequence
  spacer sequence ATCN PAM
gggucauguuuuggaggauc

SEQ ID NO: 3536 - RNA, 20 nt, Artificial Sequence
  spacer sequence ATCN PAM
uccaaaacaugacccagaug

SEQ ID NO: 3537 - RNA, 20 nt, Artificial Sequence
  spacer sequence ATCN PAM
cuuccagugagguucaagac

SEQ ID NO: 3538 - RNA, 20 nt, Artificial Sequence
  spacer sequence ATCN PAM
cacucucuaaaaagggccuu

SEQ ID NO: 3539 - RNA, 20 nt, Artificial Sequence
  spacer sequence ATCN PAM
acugccccacaggcccugag

SEQ ID NO: 3540 - RNA, 20 nt, Artificial Sequence
  spacer sequence ATCN PAM
ccacauccgacaagcaggug

SEQ ID NO: 3541 - RNA, 20 nt, Artificial Sequence
  spacer sequence ATCN PAM
gacaagcaggugcacuccca

SEQ ID NO: 3542 - RNA, 20 nt, Artificial Sequence
  spacer sequence ATCN PAM
aagacaugcucugugaauga

SEQ ID NO: 3543 - RNA, 20 nt, Artificial Sequence
  spacer sequence ATCN PAM
agucagcuguauauccaaga

SEQ ID NO: 3544 - RNA, 20 nt, Artificial Sequence
  spacer sequence ATCN PAM
ugucuaaaaauaguauuugc

SEQ ID NO: 3545 - RNA, 20 nt, Artificial Sequence
  spacer sequence ATCN PAM
auagguuuuauuguagaccu

SEQ ID NO: 3546 - RNA, 20 nt, Artificial Sequence
  spacer sequence ATCN PAM
gccucuggaacuagugcucc

SEQ ID NO: 3547 - RNA, 20 nt, Artificial Sequence
  spacer sequence ATCN PAM
cugugucucucuggagcacu

SEQ ID NO: 3548 - RNA, 20 nt, Artificial Sequence
  spacer sequence ATCN PAM
uucaggauauaaaauaagua

SEQ ID NO: 3549 - RNA, 20 nt, Artificial Sequence
  spacer sequence ATCN PAM
ugaaagauauuaaguccaac

SEQ ID NO: 3550 - RNA, 20 nt, Artificial Sequence
  spacer sequence ATCN PAM
guacacaguuacuucuuacu

SEQ ID NO: 3551 - RNA, 20 nt, Artificial Sequence
  spacer sequence ATCN PAM
gguuaaauggacuucaguaa

SEQ ID NO: 3552 - RNA, 20 nt, Artificial Sequence
  spacer sequence ATCN PAM
cccuucuuuacgguucugcc

SEQ ID NO: 3553 - RNA, 20 nt, Artificial Sequence
  spacer sequence ATCN PAM
aggauuccugcuugggacug

SEQ ID NO: 3554 - RNA, 20 nt, Artificial Sequence
  spacer sequence ATCN PAM
uggauggcaggcuguccuuu

SEQ ID NO: 3555 - RNA, 20 nt, Artificial Sequence
  spacer sequence ATCN PAM
uaguggcaaauuuaggagca

SEQ ID NO: 3556 - RNA, 20 nt, Artificial Sequence
  spacer sequence ATCN PAM
ucaauccagcgcuaugugaa

SEQ ID NO: 3557 - RNA, 20 nt, Artificial Sequence
  spacer sequence ATCN PAM
agcgcuaugugaacaacaga

SEQ ID NO: 3558 - RNA, 20 nt, Artificial Sequence
  spacer sequence ATCN PAM
gaaagucuguuguucacaua

SEQ ID NO: 3559 - RNA, 20 nt, Artificial Sequence
  spacer sequence ATCN PAM
ccauacuauuuaucugaaag

SEQ ID NO: 3560 - RNA, 20 nt, Artificial Sequence
  spacer sequence ATCN PAM
gacuuaagcaaauuaucucc

SEQ ID NO: 3561 - RNA, 20 nt, Artificial Sequence
  spacer sequence ATCN PAM
aaaucugacuuaagcaaauu

SEQ ID NO: 3562 - RNA, 20 nt, Artificial Sequence
  spacer sequence ATCN PAM
auguagaaaccacuuuucau

SEQ ID NO: 3563 - RNA, 20 nt, Artificial Sequence
  spacer sequence ATCN PAM
auauagaaguuuuugaaagc

SEQ ID NO: 3564 - RNA, 20 nt, Artificial Sequence
  spacer sequence ATCN PAM
aaucaauauagaaguuuuug

SEQ ID NO: 3565 - RNA, 20 nt, Artificial Sequence
  spacer sequence ATCN PAM
uggugaauucuaaagacuuu

SEQ ID NO: 3566 - RNA, 20 nt, Artificial Sequence
  spacer sequence ATCN PAM
auauacacacauacauaugu

SEQ ID NO: 3567 - RNA, 20 nt, Artificial Sequence
  spacer sequence ATCN PAM
uaugaugacaguguugaugu

SEQ ID NO: 3568 - RNA, 20 nt, Artificial Sequence
  spacer sequence ATCN PAM
uaagauaaagcauauauaca

SEQ ID NO: 3569 - RNA, 20 nt, Artificial Sequence
  spacer sequence ATCN PAM
acacugucaucauaagauaa

SEQ ID NO: 3570 - RNA, 20 nt, Artificial Sequence
  spacer sequence ATCN PAM
ccaaacacaucaacacuguc

SEQ ID NO: 3571 - RNA, 20 nt, Artificial Sequence
  spacer sequence ATCN PAM
uucauugccaggcaaaacuu

SEQ ID NO: 3572 - RNA, 20 nt, Artificial Sequence
  spacer sequence ATCN PAM
uacgagcacacaggagcuca

SEQ ID NO: 3573 - RNA, 20 nt, Artificial Sequence
  spacer sequence ATCN PAM
aguaaaugaaucaccaaggc

SEQ ID NO: 3574 - RNA, 20 nt, Artificial Sequence
  spacer sequence ATCN PAM
ccaaggcacagaaagucacu

SEQ ID NO: 3575 - RNA, 20 nt, Artificial Sequence
  spacer sequence ATCN PAM
caucuuaaacuucagccaga

SEQ ID NO: 3576 - RNA, 20 nt, Artificial Sequence
  spacer sequence ATCN PAM
uaaacuucagccagagaucu

SEQ ID NO: 3577 - RNA, 20 nt, Artificial Sequence
  spacer sequence ATCN PAM
cuggcugaaguuuaagaugg

SEQ ID NO: 3578 - RNA, 20 nt, Artificial Sequence
  spacer sequence ATCN PAM
aaaacuuugaagucaauuau

SEQ ID NO: 3579 - RNA, 20 nt, Artificial Sequence
  spacer sequence ATCN PAM
ggggugcuuuauuguuugag

SEQ ID NO: 3580 - RNA, 20 nt, Artificial Sequence
  spacer sequence ATCN PAM
ucauuuaucauccgcuccca

SEQ ID NO: 3581 - RNA, 20 nt, Artificial Sequence
  spacer sequence ATCN PAM
uccgcucccauuucgcaaac

SEQ ID NO: 3582 - RNA, 20 nt, Artificial Sequence
  spacer sequence ATCN PAM
gcucccauuucgcaaacaaa

SEQ ID NO: 3583 - RNA, 20 nt, Artificial Sequence
  spacer sequence ATCN PAM
auauaucacauugugacaca

SEQ ID NO: 3584 - RNA, 20 nt, Artificial Sequence
  spacer sequence ATCN PAM
cauugugacacagcugaccg

SEQ ID NO: 3585 - RNA, 20 nt, Artificial Sequence
  spacer sequence ATCN PAM
ugcauuaacaauacaacggc

SEQ ID NO: 3586 - RNA, 20 nt, Artificial Sequence
  spacer sequence ATCN PAM
gccguuguauuguuaaugca

SEQ ID NO: 3587 - RNA, 20 nt, Artificial Sequence
  spacer sequence ATCN PAM
uaaacuucaugucugaauac

SEQ ID NO: 3588 - RNA, 20 nt, Artificial Sequence
  spacer sequence ATCN PAM
cuggcaugaauguuaucaug

SEQ ID NO: 3589 - RNA, 20 nt, Artificial Sequence
  spacer sequence ATCN PAM
ugcuuuuauuucagguaaua

SEQ ID NO: 3590 - RNA, 20 nt, Artificial Sequence
  spacer sequence ATCN PAM
uaaaaaacaagaaaaaagaa

SEQ ID NO: 3591 - RNA, 20 nt, Artificial Sequence
  spacer sequence ATCN PAM
cugguaacaaaauaaaaucu

SEQ ID NO: 3592 - RNA, 20 nt, Artificial Sequence
  spacer sequence ATCN PAM
gaaacagcugauuaccagug

SEQ ID NO: 3593 - RNA, 20 nt, Artificial Sequence
  spacer sequence ATCN PAM
gcuguuucugauuuugcaug

SEQ ID NO: 3594 - RNA, 20 nt, Artificial Sequence
  spacer sequence ATCN PAM
ccaaaacauuauaaauuaaa

SEQ ID NO: 3595 - RNA, 20 nt, Artificial Sequence
  spacer sequence ATCN PAM
auagcuucaauaaaaaggua

SEQ ID NO: 3596 - RNA, 20 nt, Artificial Sequence
  spacer sequence ATCN PAM
caagagugccuguguccuac

SEQ ID NO: 3597 - RNA, 20 nt, Artificial Sequence
  spacer sequence ATCN PAM
guugugaaauauguguuccu

SEQ ID NO: 3598 - RNA, 20 nt, Artificial Sequence
  spacer sequence ATCN PAM
caugugcucagaguaagggg

SEQ ID NO: 3599 - RNA, 20 nt, Artificial Sequence
  spacer sequence ATCN PAM
aaaacuuucuuuuauuaucc

SEQ ID NO: 3600 - RNA, 20 nt, Artificial Sequence
  spacer sequence ATCN PAM
ucauuauccaaaggauaacu

SEQ ID NO: 3601 - RNA, 20 nt, Artificial Sequence
  spacer sequence ATCN PAM
uuauccaaaggauaacuuug

SEQ ID NO: 3602 - RNA, 20 nt, Artificial Sequence
  spacer sequence ATCN PAM
aaaggauaacuuugaaugcc

SEQ ID NO: 3603 - RNA, 20 nt, Artificial Sequence
  spacer sequence ATCN PAM
uuuggauaaugaugaucuaa

SEQ ID NO: 3604 - RNA, 20 nt, Artificial Sequence
  spacer sequence ATCN PAM
cauucaaugccacauauaaa

SEQ ID NO: 3605 - RNA, 20 nt, Artificial Sequence
  spacer sequence ATCN PAM
gugcuaaaagccaaugguaa

SEQ ID NO: 3606 - RNA, 20 nt, Artificial Sequence
  spacer sequence ATCN PAM
auuuuuuaaacuugguguuu

SEQ ID NO: 3607 - RNA, 20 nt, Artificial Sequence
  spacer sequence ATCN PAM
uugcaauccauuuuuuaaac

SEQ ID NO: 3608 - RNA, 20 nt, Artificial Sequence
  spacer sequence ATCN PAM
caugucccagaacaggccau

SEQ ID NO: 3609 - RNA, 20 nt, Artificial Sequence
  spacer sequence ATCN PAM
uguagguaaaagcauauggc

SEQ ID NO: 3610 - RNA, 20 nt, Artificial Sequence
  spacer sequence ATCN PAM
gaugccuuuaacaagcaaaa

SEQ ID NO: 3611 - RNA, 20 nt, Artificial Sequence
  spacer sequence ATCN PAM
gaugcaacauguuuagaaga

SEQ ID NO: 3612 - RNA, 20 nt, Artificial Sequence
  spacer sequence ATCN PAM
cugaauucagucaguuaauu

SEQ ID NO: 3613 - RNA, 20 nt, Artificial Sequence
  spacer sequence ATCN PAM
aaauagaaguacguuuuuga

SEQ ID NO: 3614 - RNA, 20 nt, Artificial Sequence
  spacer sequence ATCN PAM
uuuaauuguugcaagcuguu

SEQ ID NO: 3615 - RNA, 20 nt, Artificial Sequence
  spacer sequence ATCN PAM
uauaaggcuggaaacuucug

SEQ ID NO: 3616 - RNA, 20 nt, Artificial Sequence
  spacer sequence ATCN PAM
ccauuccauuauacugcacu

SEQ ID NO: 3617 - RNA, 20 nt, Artificial Sequence
  spacer sequence ATCN PAM
uucaaauugcuggaagcaaa

SEQ ID NO: 3618 - RNA, 20 nt, Artificial Sequence
  spacer sequence ATCN PAM
cgaauccaagccuuaaucuc

SEQ ID NO: 3619 - RNA, 20 nt, Artificial Sequence
  spacer sequence ATCN PAM
aagccuuaaucuccaccaua

SEQ ID NO: 3620 - RNA, 20 nt, Artificial Sequence
  spacer sequence ATCN PAM
ccaccauagcuuccaucuuu

SEQ ID NO: 3621 - RNA, 20 nt, Artificial Sequence
  spacer sequence ATCN PAM
uugaggcaaaucaagaaaau

SEQ ID NO: 3622 - RNA, 20 nt, Artificial Sequence
  spacer sequence ATCN PAM
agaaaauaauauucugcugu

SEQ ID NO: 3623 - RNA, 20 nt, Artificial Sequence
  spacer sequence ATCN PAM
aguugcugaauggggcucac

SEQ ID NO: 3624 - RNA, 20 nt, Artificial Sequence
  spacer sequence ATCN PAM
uggggacuuagagacccacc

SEQ ID NO: 3625 - RNA, 20 nt, Artificial Sequence
  spacer sequence ATCN PAM
auuuuaccuacuuuacaaga

SEQ ID NO: 3626 - RNA, 20 nt, Artificial Sequence
  spacer sequence ATCN PAM
cacagcaugauacaauaagg

SEQ ID NO: 3627 - RNA, 20 nt, Artificial Sequence
  spacer sequence ATCN PAM
ugcugugagauuuugggcuc

SEQ ID NO: 3628 - RNA, 20 nt, Artificial Sequence
  spacer sequence ATCN PAM
gaaaaccaggacaccugggu

SEQ ID NO: 3629 - RNA, 20 nt, Artificial Sequence
  spacer sequence ATCN PAM
gugucucucuguuaacacua

SEQ ID NO: 3630 - RNA, 20 nt, Artificial Sequence
  spacer sequence ATCN PAM
guaaugcccaaaagaccuua

SEQ ID NO: 3631 - RNA, 20 nt, Artificial Sequence
  spacer sequence ATCN PAM
ucuuccuucauucguguuug

SEQ ID NO: 3632 - RNA, 20 nt, Artificial Sequence
  spacer sequence ATCN PAM
aaaauaguuuaucauaaugc

SEQ ID NO: 3633 - RNA, 20 nt, Artificial Sequence
  spacer sequence ATCN PAM
uaaugcucucaauuggaagg

SEQ ID NO: 3634 - RNA, 20 nt, Artificial Sequence
  spacer sequence ATCN PAM
gccuguaguaugaagaccuu

SEQ ID NO: 3635 - RNA, 20 nt, Artificial Sequence
  spacer sequence ATCN PAM
ucuaccagaaaauaacagua

SEQ ID NO: 3636 - RNA, 20 nt, Artificial Sequence
  spacer sequence ATCN PAM
uuguuauagaaaaaaccuac

SEQ ID NO: 3637 - RNA, 20 nt, Artificial Sequence
  spacer sequence ATCN PAM
agaaagugaaaucauuguua

SEQ ID NO: 3638 - RNA, 20 nt, Artificial Sequence
  spacer sequence ATCN PAM
agauuugaucaaauucagaa

SEQ ID NO: 3639 - RNA, 20 nt, Artificial Sequence
  spacer sequence ATCN PAM
agauuuugcagaaguucagg

SEQ ID NO: 3640 - RNA, 20 nt, Artificial Sequence
  spacer sequence ATCN PAM
aaucuagauuuugcagaagu

SEQ ID NO: 3641 - RNA, 20 nt, Artificial Sequence
  spacer sequence ATCN PAM
aauucagaaacuggugauuu

SEQ ID NO: 3642 - RNA, 20 nt, Artificial Sequence
  spacer sequence ATCN PAM
ccaguuucugaauuugauca

SEQ ID NO: 3643 - RNA, 20 nt, Artificial Sequence
  spacer sequence ATCN PAM
aaucaccaguuucugaauuu

SEQ ID NO: 3644 - RNA, 20 nt, Artificial Sequence
  spacer sequence ATCN PAM
aauucagaaucccauauuuu

SEQ ID NO: 3645 - RNA, 20 nt, Artificial Sequence
  spacer sequence ATCN PAM
cauauuuugggaugaugugu

SEQ ID NO: 3646 - RNA, 20 nt, Artificial Sequence
  spacer sequence ATCN PAM
caaaauaugggauucugaau

SEQ ID NO: 3647 - RNA, 20 nt, Artificial Sequence
  spacer sequence ATCN PAM
ucccaaaauaugggauucug

SEQ ID NO: 3648 - RNA, 20 nt, Artificial Sequence
  spacer sequence ATCN PAM
uuuggggaagaaagagcaaa

SEQ ID NO: 3649 - RNA, 20 nt, Artificial Sequence
  spacer sequence ATCN PAM
uuaaaaggauuucaacuuca

SEQ ID NO: 3650 - RNA, 20 nt, Artificial Sequence
  spacer sequence ATCN PAM
uuuuaaagaugaaaacuauu

SEQ ID NO: 3651 - RNA, 20 nt, Artificial Sequence
  spacer sequence ATCN PAM
gaaguugaaauccuuuuaaa

SEQ ID NO: 3652 - RNA, 20 nt, Artificial Sequence
  spacer sequence ATCN PAM
aaucaauaaauaaauaagac

SEQ ID NO: 3653 - RNA, 20 nt, Artificial Sequence
  spacer sequence ATCN PAM
auaaauaaauaagacaaaca

SEQ ID NO: 3654 - RNA, 20 nt, Artificial Sequence
  spacer sequence ATCN PAM
uuuaccauuugggaagugua

SEQ ID NO: 3655 - RNA, 20 nt, Artificial Sequence
  spacer sequence ATCN PAM
gcaguaauuaauguacacuu

SEQ ID NO: 3656 - RNA, 20 nt, Artificial Sequence
  spacer sequence ATCN PAM
ccccccacccccucugcauc

SEQ ID NO: 3657 - RNA, 20 nt, Artificial Sequence
  spacer sequence ATCN PAM
cagacagcagugcucaaaag

SEQ ID NO: 3658 - RNA, 20 nt, Artificial Sequence
  spacer sequence ATCN PAM
gggacaaaugagcucugauu

SEQ ID NO: 3659 - RNA, 20 nt, Artificial Sequence
  spacer sequence ATCN PAM
gagcucauuugucccugaug

SEQ ID NO: 3660 - RNA, 20 nt, Artificial Sequence
  spacer sequence ATCN PAM
gcagcgcauuuagauuagcc

SEQ ID NO: 3661 - RNA, 20 nt, Artificial Sequence
  spacer sequence ATCN PAM
aaaugcgcugcagauuaaaa

SEQ ID NO: 3662 - RNA, 20 nt, Artificial Sequence
  spacer sequence ATCN PAM
uugggcuaaucuaaaugcgc

SEQ ID NO: 3663 - RNA, 20 nt, Artificial Sequence
  spacer sequence ATCN PAM
aauuacacuaucuuugggcu

SEQ ID NO: 3664 - RNA, 20 nt, Artificial Sequence
  spacer sequence ATCN PAM
gagaggaggccuauaaacca

SEQ ID NO: 3665 - RNA, 20 nt, Artificial Sequence
  spacer sequence ATCN PAM
ucuucuuuaacacccuccug

SEQ ID NO: 3666 - RNA, 20 nt, Artificial Sequence
  spacer sequence ATCN PAM
ugacuuuuacacaguuguca

SEQ ID NO: 3667 - RNA, 20 nt, Artificial Sequence
  spacer sequence ATCN PAM
gacgcauuauaggucagccc

SEQ ID NO: 3668 - RNA, 20 nt, Artificial Sequence
  spacer sequence ATCN PAM
cugcccagccaacgcauucu

SEQ ID NO: 3669 - RNA, 20 nt, Artificial Sequence
  spacer sequence ATCN PAM
cuagucaacagcauugauuu

SEQ ID NO: 3670 - RNA, 20 nt, Artificial Sequence
  spacer sequence ATCN PAM
augcuguugacuagugauaa

SEQ ID NO: 3671 - RNA, 20 nt, Artificial Sequence
  spacer sequence ATCN PAM
gguugaaguagaaauacuac

SEQ ID NO: 3672 - RNA, 20 nt, Artificial Sequence
  spacer sequence ATCN PAM
aacagccucuuaaccagucc

SEQ ID NO: 3673 - RNA, 20 nt, Artificial Sequence
  spacer sequence ATCN PAM
aauggugagagcaauggaaa

SEQ ID NO: 3674 - RNA, 20 nt, Artificial Sequence
  spacer sequence ATCN PAM
aggcacuuggccugaagggu

SEQ ID NO: 3675 - RNA, 20 nt, Artificial Sequence
  spacer sequence ATCN PAM
aauuugugcuuaccuaacga

SEQ ID NO: 3676 - RNA, 20 nt, Artificial Sequence
  spacer sequence ATCN PAM
ucagagauguggccugauuu

SEQ ID NO: 3677 - RNA, 20 nt, Artificial Sequence
  spacer sequence ATCN PAM
gagauguggccugauuuuca

SEQ ID NO: 3678 - RNA, 20 nt, Artificial Sequence
  spacer sequence ATCN PAM
cugaugauggccuuuuguuu

SEQ ID NO: 3679 - RNA, 20 nt, Artificial Sequence
  spacer sequence ATCN PAM
ggccacaucucugaugaugg

SEQ ID NO: 3680 - RNA, 20 nt, Artificial Sequence
  spacer sequence ATCN PAM
gugaaaaucaggccacaucu

SEQ ID NO: 3681 - RNA, 20 nt, Artificial Sequence
  spacer sequence ATCN PAM
uggcuuuagaacccuucuua

SEQ ID NO: 3682 - RNA, 20 nt, Artificial Sequence
  spacer sequence ATCN PAM
uuucagcuuuaucauuucag

SEQ ID NO: 3683 - RNA, 20 nt, Artificial Sequence
  spacer sequence ATCN PAM
uuucagucuaggagacccag

SEQ ID NO: 3684 - RNA, 20 nt, Artificial Sequence
  spacer sequence ATCN PAM
augugggucaagagcuccaa

SEQ ID NO: 3685 - RNA, 20 nt, Artificial Sequence
  spacer sequence ATCN PAM
caccucaaacucagaagaca

SEQ ID NO: 3686 - RNA, 20 nt, Artificial Sequence
  spacer sequence ATCN PAM
agguugucuucugaguuuga

SEQ ID NO: 3687 - RNA, 20 nt, Artificial Sequence
  spacer sequence ATCN PAM
caaagaaguugucggucaca

SEQ ID NO: 3688 - RNA, 20 nt, Artificial Sequence
  spacer sequence ATCN PAM
aucacaaagaaguugucggu

SEQ ID NO: 3689 - RNA, 20 nt, Artificial Sequence
  spacer sequence ATCN PAM
gaacagccucccuugguucu

SEQ ID NO: 3690 - RNA, 20 nt, Artificial Sequence
  spacer sequence ATCN PAM
gauacucgccagugcugagg

SEQ ID NO: 3691 - RNA, 20 nt, Artificial Sequence
  spacer sequence ATCN PAM
gaugggagcucugcucacuu

SEQ ID NO: 3692 - RNA, 20 nt, Artificial Sequence
  spacer sequence ATCN PAM
uuugguaguugagaagcgcc

SEQ ID NO: 3693 - RNA, 20 nt, Artificial Sequence
  spacer sequence ATCN PAM
uuucaaauuggccaggcuaa

SEQ ID NO: 3694 - RNA, 20 nt, Artificial Sequence
  spacer sequence ATCN PAM
aucugcaacgaaccucaggu

SEQ ID NO: 3695 - RNA, 20 nt, Artificial Sequence
  spacer sequence ATCN PAM
gcaacgaaccucaggucuug

SEQ ID NO: 3696 - RNA, 20 nt, Artificial Sequence
  spacer sequence ATCN PAM
gcauguggcuuccccagagg

SEQ ID NO: 3697 - RNA, 20 nt, Artificial Sequence
  spacer sequence ATCN PAM
uauggagcuguugacugcag

SEQ ID NO: 3698 - RNA, 20 nt, Artificial Sequence
  spacer sequence ATCN PAM
gcuucgaggagguuuucauu

SEQ ID NO: 3699 - RNA, 20 nt, Artificial Sequence
  spacer sequence ATCN PAM
uccuaagaaacaccacugcc

SEQ ID NO: 3700 - RNA, 20 nt, Artificial Sequence
  spacer sequence ATCN PAM
gaauuauacagggagggaga

SEQ ID NO: 3701 - RNA, 20 nt, Artificial Sequence
  spacer sequence ATCN PAM
uaccuucaaaggcuggggag

SEQ ID NO: 3702 - RNA, 20 nt, Artificial Sequence
  spacer sequence ATCN PAM
gagaaguaaaugccacagag

SEQ ID NO: 3703 - RNA, 20 nt, Artificial Sequence
  spacer sequence ATCN PAM
agugaggguccugagaaaca

SEQ ID NO: 3704 - RNA, 20 nt, Artificial Sequence
  spacer sequence ATCN PAM
guccagaaugagccugaaau

SEQ ID NO: 3705 - RNA, 20 nt, Artificial Sequence
  spacer sequence ATCN PAM
ugcuuugcaaguagucauuu

SEQ ID NO: 3706 - RNA, 20 nt, Artificial Sequence
  spacer sequence ATCN PAM
ucugggaaagagaagaaugu

SEQ ID NO: 3707 - RNA, 20 nt, Artificial Sequence
  spacer sequence ATCN PAM
uuuggccugcggccgccacc

SEQ ID NO: 3708 - RNA, 20 nt, Artificial Sequence
  spacer sequence ATCN PAM
aggguuaaaugacuucccug

SEQ ID NO: 3709 - RNA, 20 nt, Artificial Sequence
  spacer sequence ATCN PAM
cacaacaaccucggaaagga

SEQ ID NO: 3710 - RNA, 20 nt, Artificial Sequence
  spacer sequence ATCN PAM
augugucagacacaugguaa

SEQ ID NO: 3711 - RNA, 20 nt, Artificial Sequence
  spacer sequence ATCN PAM
ccauuucacagagaggugaa

SEQ ID NO: 3712 - RNA, 20 nt, Artificial Sequence
  spacer sequence ATCN PAM
uuucaccucucugugaaaug

SEQ ID NO: 3713 - RNA, 20 nt, Artificial Sequence
  spacer sequence ATCN PAM
gaacccagaguaacuguguc

SEQ ID NO: 3714 - RNA, 20 nt, Artificial Sequence
  spacer sequence ATCN PAM
caaccugcucaccccauaau

SEQ ID NO: 3715 - RNA, 20 nt, Artificial Sequence
  spacer sequence ATCN PAM
uaugagagcaugugggggcg

SEQ ID NO: 3716 - RNA, 20 nt, Artificial Sequence
  spacer sequence ATCN PAM
cggggcuugccucauagggc

SEQ ID NO: 3717 - RNA, 20 nt, Artificial Sequence
  spacer sequence ATCN PAM
guaaaguggggagaaucacg

SEQ ID NO: 3718 - RNA, 20 nt, Artificial Sequence
  spacer sequence ATCN PAM
gcccaagguugcacaacuag

SEQ ID NO: 3719 - RNA, 20 nt, Artificial Sequence
  spacer sequence ATCN PAM
aagagaagaagaaaagaaag

SEQ ID NO: 3720 - RNA, 20 nt, Artificial Sequence
  spacer sequence ATCN PAM
ucuuucuuuucuucuucucu

SEQ ID NO: 3721 - RNA, 20 nt, Artificial Sequence
  spacer sequence ATCN PAM
uaugucaagggcauauuucc

SEQ ID NO: 3722 - RNA, 20 nt, Artificial Sequence
  spacer sequence ATCN PAM
aggugggagagaagacugcc

SEQ ID NO: 3723 - RNA, 20 nt, Artificial Sequence
  spacer sequence ATCN PAM
augggauaaacccagaggcc

SEQ ID NO: 3724 - RNA, 20 nt, Artificial Sequence
  spacer sequence ATCN PAM
cauggauaccugcccccgcu

SEQ ID NO: 3725 - RNA, 20 nt, Artificial Sequence
  spacer sequence ATCN PAM
ugccucccuuaugaggccua

SEQ ID NO: 3726 - RNA, 20 nt, Artificial Sequence
  spacer sequence ATCN PAM
cauuuacuuccccuggcuag

SEQ ID NO: 3727 - RNA, 20 nt, Artificial Sequence
  spacer sequence ATCN PAM
cauuuuauauagaugugcac

SEQ ID NO: 3728 - RNA, 20 nt, Artificial Sequence
  spacer sequence ATCN PAM
auauaaaaugugauaaaauc

SEQ ID NO: 3729 - RNA, 20 nt, Artificial Sequence
  spacer sequence ATCN PAM
uagacuugaaaaggcaccau

SEQ ID NO: 3730 - RNA, 20 nt, Artificial Sequence
  spacer sequence ATCN PAM
uuucagacagguccccaaac

SEQ ID NO: 3731 - RNA, 20 nt, Artificial Sequence
  spacer sequence ATCN PAM
caccuaggggacaccagggc

SEQ ID NO: 3732 - RNA, 20 nt, Artificial Sequence
  spacer sequence ATCN PAM
caauaacuuccugacauuuu

SEQ ID NO: 3733 - RNA, 20 nt, Artificial Sequence
  spacer sequence ATCN PAM
ucccaauaacuuccugacau

SEQ ID NO: 3734 - RNA, 20 nt, Artificial Sequence
  spacer sequence ATCN PAM
ucuuggccucuuccuguguu

SEQ ID NO: 3735 - RNA, 20 nt, Artificial Sequence
  spacer sequence ATCN PAM
agaacaaaacaagcccaaac

SEQ ID NO: 3736 - RNA, 20 nt, Artificial Sequence
  spacer sequence ATCN PAM
guccuggguccugcccagga

SEQ ID NO: 3737 - RNA, 20 nt, Artificial Sequence
  spacer sequence ATCN PAM
uucucagccaccgacagcuu

SEQ ID NO: 3738 - RNA, 20 nt, Artificial Sequence
  spacer sequence ATCN PAM
guggaaacucuuuuuuuuuu

SEQ ID NO: 3739 - RNA, 20 nt, Artificial Sequence
  spacer sequence ATCN PAM
ggcccucggguuacuggcgu

SEQ ID NO: 3740 - RNA, 20 nt, Artificial Sequence
  spacer sequence ATCN PAM
caacuuuuuuucccaacggc

SEQ ID NO: 3741 - RNA, 20 nt, Artificial Sequence
  spacer sequence ATCN PAM
uuccuggcuugccguuggga

SEQ ID NO: 3742 - RNA, 20 nt, Artificial Sequence
  spacer sequence ATCN PAM
ucuuuccuggcuugccguug

SEQ ID NO: 3743 - RNA, 20 nt, Artificial Sequence
  spacer sequence ATCN PAM
aaugcucccuggucuuuugg

SEQ ID NO: 3744 - RNA, 20 nt, Artificial Sequence
  spacer sequence ATCN PAM
aaagccuggcccucggccaa

SEQ ID NO: 3745 - RNA, 20 nt, Artificial Sequence
  spacer sequence ATCN PAM
guuaauggacaaccacaacc

SEQ ID NO: 3746 - RNA, 20 nt, Artificial Sequence
  spacer sequence ATCN PAM
auuaugucugcgcuuuuccc

SEQ ID NO: 3747 - RNA, 20 nt, Artificial Sequence
  spacer sequence ATCN PAM
augucuaguuuuuaggagcu

SEQ ID NO: 3748 - RNA, 20 nt, Artificial Sequence
  spacer sequence ATCN PAM
ugaauagaaagggaaaagcg

SEQ ID NO: 3749 - RNA, 20 nt, Artificial Sequence
  spacer sequence ATCN PAM
aucauucugucugcuaaacc

SEQ ID NO: 3750 - RNA, 20 nt, Artificial Sequence
  spacer sequence ATCN PAM
uucugucugcuaaaccaguc

SEQ ID NO: 3751 - RNA, 20 nt, Artificial Sequence
  spacer sequence ATCN PAM
gcuccggagaaggugguaaa

SEQ ID NO: 3752 - RNA, 20 nt, Artificial Sequence
  spacer sequence ATCN PAM
cguuggacccacagaaucuu

SEQ ID NO: 3753 - RNA, 20 nt, Artificial Sequence
  spacer sequence ATCN PAM
uuucgacccucucacacuaa

SEQ ID NO: 3754 - RNA, 20 nt, Artificial Sequence
  spacer sequence ATCN PAM
uauccauuaauuuacccuga

SEQ ID NO: 3755 - RNA, 20 nt, Artificial Sequence
  spacer sequence ATCN PAM
auuaauuuacccugacuugc

SEQ ID NO: 3756 - RNA, 20 nt, Artificial Sequence
  spacer sequence ATCN PAM
auuuuuguuucauuaauauu

SEQ ID NO: 3757 - RNA, 20 nt, Artificial Sequence
  spacer sequence ATCN PAM
cccagacccagugggaaaua

SEQ ID NO: 3758 - RNA, 20 nt, Artificial Sequence
  spacer sequence ATCN PAM
ggguuaaggcucggaauccu

SEQ ID NO: 3759 - RNA, 20 nt, Artificial Sequence
  spacer sequence ATCN PAM
ugcaccagcguuggaagcug

SEQ ID NO: 3760 - RNA, 20 nt, Artificial Sequence
  spacer sequence ATCN PAM
aacacacccaccgcacaauc

SEQ ID NO: 3761 - RNA, 20 nt, Artificial Sequence
  spacer sequence ATCN PAM
aaucuaauuaagaucaggaa

SEQ ID NO: 3762 - RNA, 20 nt, Artificial Sequence
  spacer sequence ATCN PAM
aauuaagaucaggaagaaau

SEQ ID NO: 3763 - RNA, 20 nt, Artificial Sequence
  spacer sequence ATCN PAM
uaauuagauucgauugugcg

SEQ ID NO: 3764 - RNA, 20 nt, Artificial Sequence
  spacer sequence ATCN PAM
ggaagaaauuugcauuuucu

SEQ ID NO: 3765 - RNA, 20 nt, Artificial Sequence
  spacer sequence ATCN PAM
cagaaguucuucaaauuuug

SEQ ID NO: 3766 - RNA, 20 nt, Artificial Sequence
  spacer sequence ATCN PAM
cacugguggucuauuaauag

SEQ ID NO: 3767 - RNA, 20 nt, Artificial Sequence
  spacer sequence ATCN PAM
uaauacccagaguggcccag

SEQ ID NO: 3768 - RNA, 20 nt, Artificial Sequence
  spacer sequence ATCN PAM
guaaaccaggcagagaguaa

SEQ ID NO: 3769 - RNA, 20 nt, Artificial Sequence
  spacer sequence ATCN PAM
uuaugccaaggaauuuucuu

SEQ ID NO: 3770 - RNA, 20 nt, Artificial Sequence
  spacer sequence ATCN PAM
gcaaacauauccuuaugcca

SEQ ID NO: 3771 - RNA, 20 nt, Artificial Sequence
  spacer sequence ATCN PAM
aauuucagaucauguguugu

SEQ ID NO: 3772 - RNA, 20 nt, Artificial Sequence
  spacer sequence ATCN PAM
gaaauuugaucagcaaacau

SEQ ID NO: 3773 - RNA, 20 nt, Artificial Sequence
  spacer sequence ATCN PAM
uguguuguucauuauuauga

SEQ ID NO: 3774 - RNA, 20 nt, Artificial Sequence
  spacer sequence ATCN PAM
cacuguggcaaacuguuuuu

SEQ ID NO: 3775 - RNA, 20 nt, Artificial Sequence
  spacer sequence ATCN PAM
aucucacuguggcaaacugu

SEQ ID NO: 3776 - RNA, 20 nt, Artificial Sequence
  spacer sequence ATCN PAM
accuuuaaaaaaauuguacu

SEQ ID NO: 3777 - RNA, 20 nt, Artificial Sequence
  spacer sequence ATCN PAM
aaaccaguuaaugcuuuaaa

SEQ ID NO: 3778 - RNA, 20 nt, Artificial Sequence
  spacer sequence ATCN PAM
guaaauucccugaaaauaca

SEQ ID NO: 3779 - RNA, 20 nt, Artificial Sequence
  spacer sequence ATCN PAM
uguggcuuugcauaagucuu

SEQ ID NO: 3780 - RNA, 20 nt, Artificial Sequence
  spacer sequence ATCN PAM
cauuagcuccuucaaaauca

SEQ ID NO: 3781 - RNA, 20 nt, Artificial Sequence
  spacer sequence ATCN PAM
acccuggguacacuagauua

SEQ ID NO: 3782 - RNA, 20 nt, Artificial Sequence
  spacer sequence ATCN PAM
aguguacccaggguagauug

SEQ ID NO: 3783 - RNA, 20 nt, Artificial Sequence
  spacer sequence ATCN PAM
auuagaaugaaauuuguacu

SEQ ID NO: 3784 - RNA, 20 nt, Artificial Sequence
  spacer sequence ATCN PAM
uucuugcugcuucuagggcu

SEQ ID NO: 3785 - RNA, 20 nt, Artificial Sequence
  spacer sequence ATCN PAM
aggaguuuugccaugucggu

SEQ ID NO: 3786 - RNA, 20 nt, Artificial Sequence
  spacer sequence ATCN PAM
caagccuuauuauucagucu

SEQ ID NO: 3787 - RNA, 20 nt, Artificial Sequence
  spacer sequence ATCN PAM
uaacaagguaaaaaguaaac

SEQ ID NO: 3788 - RNA, 20 nt, Artificial Sequence
  spacer sequence ATCN PAM
cuuucuuguaaaguuugggg

SEQ ID NO: 3789 - RNA, 20 nt, Artificial Sequence
  spacer sequence ATCN PAM
cccccuucauuccuucucuc

SEQ ID NO: 3790 - RNA, 20 nt, Artificial Sequence
  spacer sequence ATCN PAM
ugcaucacccccuucauucc

SEQ ID NO: 3791 - RNA, 20 nt, Artificial Sequence
  spacer sequence ATCN PAM
cucuccuucuaucuugcauc

SEQ ID NO: 3792 - RNA, 20 nt, Artificial Sequence
  spacer sequence ATCN PAM
acagccaacgcgacugaagc

SEQ ID NO: 3793 - RNA, 20 nt, Artificial Sequence
  spacer sequence ATCN PAM
ucauacuuuauguggggcug

SEQ ID NO: 3794 - RNA, 20 nt, Artificial Sequence
  spacer sequence ATCN PAM
auuagauuucaucauaucuu

SEQ ID NO: 3795 - RNA, 20 nt, Artificial Sequence
  spacer sequence ATCN PAM
aauggauaauuugcuauuug

SEQ ID NO: 3796 - RNA, 20 nt, Artificial Sequence
  spacer sequence ATCN PAM
uaucuuaguaaagcaauuac

SEQ ID NO: 3797 - RNA, 20 nt, Artificial Sequence
  spacer sequence ATCN PAM
uaguaaagcaauuacaucaa

SEQ ID NO: 3798 - RNA, 20 nt, Artificial Sequence
  spacer sequence ATCN PAM
agaaaaugauagugcgugug

SEQ ID NO: 3799 - RNA, 20 nt, Artificial Sequence
  spacer sequence ATCN PAM
uuuucuugauguaauugcuu

SEQ ID NO: 3800 - RNA, 20 nt, Artificial Sequence
  spacer sequence ATCN PAM
auuaugcaugcaguuggccg

SEQ ID NO: 3801 - RNA, 20 nt, Artificial Sequence
  spacer sequence ATCN PAM
cucgacacacacaaauaaaa

SEQ ID NO: 3802 - RNA, 20 nt, Artificial Sequence
  spacer sequence ATCN PAM
aggggcuuuuuauuugugug

SEQ ID NO: 3803 - RNA, 20 nt, Artificial Sequence
  spacer sequence ATCN PAM
cacagauggaccccaucagu

SEQ ID NO: 3804 - RNA, 20 nt, Artificial Sequence
  spacer sequence ATCN PAM
gugagauccaggggcuuuuu

SEQ ID NO: 3805 - RNA, 20 nt, Artificial Sequence
  spacer sequence ATCN PAM
guucaucuuacugccuaaaa

SEQ ID NO: 3806 - RNA, 20 nt, Artificial Sequence
  spacer sequence ATCN PAM
uacugccuaaaaaguucaug

SEQ ID NO: 3807 - RNA, 20 nt, Artificial Sequence
  spacer sequence ATCN PAM
agaacacaaauaaauuauua

SEQ ID NO: 3808 - RNA, 20 nt, Artificial Sequence
  spacer sequence ATCN PAM
auaccaugcuaaaagcaugc

SEQ ID NO: 3809 - RNA, 20 nt, Artificial Sequence
  spacer sequence ATCN PAM
caauuuauuuucuuucauua

SEQ ID NO: 3810 - RNA, 20 nt, Artificial Sequence
  spacer sequence ATCN PAM
gaauaucaguuacacuguuc

SEQ ID NO: 3811 - RNA, 20 nt, Artificial Sequence
  spacer sequence ATCN PAM
guuacacuguucugauucug

SEQ ID NO: 3812 - RNA, 20 nt, Artificial Sequence
  spacer sequence ATCN PAM
gaacaguguaacugauauuc

SEQ ID NO: 3813 - RNA, 20 nt, Artificial Sequence
  spacer sequence ATCN PAM
cugguuaacaagcagaauca

SEQ ID NO: 3814 - RNA, 20 nt, Artificial Sequence
  spacer sequence ATCN PAM
uugguuuaugaguuuaucac

SEQ ID NO: 3815 - RNA, 20 nt, Artificial Sequence
  spacer sequence ATCN PAM
auaauacagcacagguuauu

SEQ ID NO: 3816 - RNA, 20 nt, Artificial Sequence
  spacer sequence ATCN PAM
caggcucucaaaaaucggaa

SEQ ID NO: 3817 - RNA, 20 nt, Artificial Sequence
  spacer sequence ATCN PAM
gaaaccguuaguuagcaccu

SEQ ID NO: 3818 - RNA, 20 nt, Artificial Sequence
  spacer sequence ATCN PAM
uggucuccaggcucccuggg

SEQ ID NO: 3819 - RNA, 20 nt, Artificial Sequence
  spacer sequence ATCN PAM
ccaaaguauauccuggucuc

SEQ ID NO: 3820 - RNA, 20 nt, Artificial Sequence
  spacer sequence ATCN PAM
aguaaguuuucucauucagc

SEQ ID NO: 3821 - RNA, 20 nt, Artificial Sequence
  spacer sequence ATCN PAM
aaaagauaaaagagucagcc

SEQ ID NO: 3822 - RNA, 20 nt, Artificial Sequence
  spacer sequence ATCN PAM
uuuagaucaaguaaguuuuc

SEQ ID NO: 3823 - RNA, 20 nt, Artificial Sequence
  spacer sequence ATCN PAM
aucuaaagaagaaaccuaaa

SEQ ID NO: 3824 - RNA, 20 nt, Artificial Sequence
  spacer sequence ATCN PAM
aaagaagaaaccuaaagcau

SEQ ID NO: 3825 - RNA, 20 nt, Artificial Sequence
  spacer sequence ATCN PAM
gguuccuccuuuggaggagg

SEQ ID NO: 3826 - RNA, 20 nt, Artificial Sequence
  spacer sequence ATCN PAM
aacugcuaacaauaaaacug

SEQ ID NO: 3827 - RNA, 20 nt, Artificial Sequence
  spacer sequence ATCN PAM
ggaagugccucaaucauaua

SEQ ID NO: 3828 - RNA, 20 nt, Artificial Sequence
  spacer sequence ATCN PAM
uauacuuaaauuuuacaguc

SEQ ID NO: 3829 - RNA, 20 nt, Artificial Sequence
  spacer sequence ATCN PAM
uucucauuuggggagaagac

SEQ ID NO: 3830 - RNA, 20 nt, Artificial Sequence
  spacer sequence ATCN PAM
guuuucuuuuaacguuaagu

SEQ ID NO: 3831 - RNA, 20 nt, Artificial Sequence
  spacer sequence ATCN PAM
ucuugccaaguuuccuuuag

SEQ ID NO: 3832 - RNA, 20 nt, Artificial Sequence
  spacer sequence ATCN PAM
uuuugcuccuuucuacuggg

SEQ ID NO: 3833 - RNA, 20 nt, Artificial Sequence
  spacer sequence ATCN PAM
gaggaggagagccacugagg

SEQ ID NO: 3834 - RNA, 20 nt, Artificial Sequence
  spacer sequence ATCN PAM
uguuuuguguauuagcugcc

SEQ ID NO: 3835 - RNA, 20 nt, Artificial Sequence
  spacer sequence ATCN PAM
aaagugauuaacaacagcuu

SEQ ID NO: 3836 - RNA, 20 nt, Artificial Sequence
  spacer sequence ATCN PAM
cuuuugaucauguuuugugu

SEQ ID NO: 3837 - RNA, 20 nt, Artificial Sequence
  spacer sequence ATCN PAM
uguaaauuaaauaugucaaa

SEQ ID NO: 3838 - RNA, 20 nt, Artificial Sequence
  spacer sequence ATCN PAM
cuuggugaacuuuuaaucuu

SEQ ID NO: 3839 - RNA, 20 nt, Artificial Sequence
  spacer sequence ATCN PAM
ugagaagaaaaaacacugcu

SEQ ID NO: 3840 - RNA, 20 nt, Artificial Sequence
  spacer sequence ATCN PAM
ucaauuuugcaagauugaaa

SEQ ID NO: 3841 - RNA, 20 nt, Artificial Sequence
  spacer sequence ATCN PAM
auuuugcaagauugaaaauc

SEQ ID NO: 3842 - RNA, 20 nt, Artificial Sequence
  spacer sequence ATCN PAM
ugcaaaauugaugauguaaa

SEQ ID NO: 3843 - RNA, 20 nt, Artificial Sequence
  spacer sequence ATCN PAM
aagaaucuuggugcuauaaa

SEQ ID NO: 3844 - RNA, 20 nt, Artificial Sequence
  spacer sequence ATCN PAM
uggugcuauaaacaauuuuc

SEQ ID NO: 3845 - RNA, 20 nt, Artificial Sequence
  spacer sequence ATCN PAM
ggcuggccugucagccugcu

SEQ ID NO: 3846 - RNA, 20 nt, Artificial Sequence
  spacer sequence ATCN PAM
aaaaugcaaaacaauucgca

SEQ ID NO: 3847 - RNA, 20 nt, Artificial Sequence
  spacer sequence ATCN PAM
ucaaaggcuaaauugcuuua

SEQ ID NO: 3848 - RNA, 20 nt, Artificial Sequence
  spacer sequence ATCN PAM
guaagauucauccaaaaagc

SEQ ID NO: 3849 - RNA, 20 nt, Artificial Sequence
  spacer sequence ATCN PAM
uacugauaauuugcuaaagc

SEQ ID NO: 3850 - RNA, 20 nt, Artificial Sequence
  spacer sequence ATCN PAM
aaaaagcaaaggguuuuucu

SEQ ID NO: 3851 - RNA, 20 nt, Artificial Sequence
  spacer sequence ATCN PAM
uaggaagaaaaacccuuugc

SEQ ID NO: 3852 - RNA, 20 nt, Artificial Sequence
  spacer sequence ATCN PAM
uccagacugagcuuaaacua

SEQ ID NO: 3853 - RNA, 20 nt, Artificial Sequence
  spacer sequence ATCN PAM
uagccccuuuggcuugacua

SEQ ID NO: 3854 - RNA, 20 nt, Artificial Sequence
  spacer sequence ATCN PAM
ucacggacuuuguucauaaa

SEQ ID NO: 3855 - RNA, 20 nt, Artificial Sequence
  spacer sequence ATCN PAM
cuaaacaugguaauuuauca

SEQ ID NO: 3856 - RNA, 20 nt, Artificial Sequence
  spacer sequence ATCN PAM
aaaacagcccagagucgcuc

SEQ ID NO: 3857 - RNA, 20 nt, Artificial Sequence
  spacer sequence ATCN PAM
guucuguuggaggacuaugc

SEQ ID NO: 3858 - RNA, 20 nt, Artificial Sequence
  spacer sequence ATCN PAM
acugugguauaaaaacagcu

SEQ ID NO: 3859 - RNA, 20 nt, Artificial Sequence
  spacer sequence ATCN PAM
uguugcuugagauuugccuu

SEQ ID NO: 3860 - RNA, 20 nt, Artificial Sequence
  spacer sequence ATCN PAM
caagcaacaggauuugcacu

SEQ ID NO: 3861 - RNA, 20 nt, Artificial Sequence
  spacer sequence ATCN PAM
gaaaggcaaaucucaagcaa

SEQ ID NO: 3862 - RNA, 20 nt, Artificial Sequence
  spacer sequence ATCN PAM
auggugaacgggucaugcag

SEQ ID NO: 3863 - RNA, 20 nt, Artificial Sequence
  spacer sequence ATCN PAM
gcugacauucagaaaguugu

SEQ ID NO: 3864 - RNA, 20 nt, Artificial Sequence
  spacer sequence ATCN PAM
caccccaguuauuagagagu

SEQ ID NO: 3865 - RNA, 20 nt, Artificial Sequence
  spacer sequence ATCN PAM
ugggaaccuggauuugcagg

SEQ ID NO: 3866 - RNA, 20 nt, Artificial Sequence
  spacer sequence ATCN PAM
agguucccacgauacucucu

SEQ ID NO: 3867 - RNA, 20 nt, Artificial Sequence
  spacer sequence ATCN PAM
uuugcuugaaugcuaacuca

SEQ ID NO: 3868 - RNA, 20 nt, Artificial Sequence
  spacer sequence ATCN PAM
cagcuggugugcaagucaga

SEQ ID NO: 3869 - RNA, 20 nt, Artificial Sequence
  spacer sequence ATCN PAM
ccacagcagagagcuuuugg

SEQ ID NO: 3870 - RNA, 20 nt, Artificial Sequence
  spacer sequence ATCN PAM
aagaauauuccaagaaccuc

SEQ ID NO: 3871 - RNA, 20 nt, Artificial Sequence
  spacer sequence ATCN PAM
acucuaggagaaagucugag

SEQ ID NO: 3872 - RNA, 20 nt, Artificial Sequence
  spacer sequence ATCN PAM
uaccggaaauguggauguua

SEQ ID NO: 3873 - RNA, 20 nt, Artificial Sequence
  spacer sequence ATCN PAM
acauuuccgguaagaucaac

SEQ ID NO: 3874 - RNA, 20 nt, Artificial Sequence
  spacer sequence ATCN PAM
aggaaaucggaaagagaagg

SEQ ID NO: 3875 - RNA, 20 nt, Artificial Sequence
  spacer sequence ATCN PAM
gaaagagaagggagaaaaau

SEQ ID NO: 3876 - RNA, 20 nt, Artificial Sequence
  spacer sequence ATCN PAM
cagguacuacccccugauuu

SEQ ID NO: 3877 - RNA, 20 nt, Artificial Sequence
  spacer sequence ATCN PAM
ggggguaguaccugagauuu

SEQ ID NO: 3878 - RNA, 20 nt, Artificial Sequence
  spacer sequence ATCN PAM
uugggcccugcucagaaaug

SEQ ID NO: 3879 - RNA, 20 nt, Artificial Sequence
  spacer sequence ATCN PAM
uuucuaauaaauguuaaaau

SEQ ID NO: 3880 - RNA, 20 nt, Artificial Sequence
  spacer sequence ATCN PAM
uauccuuucuaauaaauguu

SEQ ID NO: 3881 - RNA, 20 nt, Artificial Sequence
  spacer sequence ATCN PAM
acaaccaucuguaugagcca

SEQ ID NO: 3882 - RNA, 20 nt, Artificial Sequence
  spacer sequence ATCN PAM
guaugagccacagguccaca

SEQ ID NO: 3883 - RNA, 20 nt, Artificial Sequence
  spacer sequence ATCN PAM
acccucauugaacucuacuc

SEQ ID NO: 3884 - RNA, 20 nt, Artificial Sequence
  spacer sequence ATCN PAM
cauaucaacccucauugaac

SEQ ID NO: 3885 - RNA, 20 nt, Artificial Sequence
  spacer sequence ATCN PAM
gaauuagauuaaaaacaaaa

SEQ ID NO: 3886 - RNA, 20 nt, Artificial Sequence
  spacer sequence ATCN PAM
aauucugauuugcccuguca

SEQ ID NO: 3887 - RNA, 20 nt, Artificial Sequence
  spacer sequence ATCN PAM
cuugaaggcaguuaggggaa

SEQ ID NO: 3888 - RNA, 20 nt, Artificial Sequence
  spacer sequence ATCN PAM
caucagaaaguaaaguggaa

SEQ ID NO: 3889 - RNA, 20 nt, Artificial Sequence
  spacer sequence ATCN PAM
gaaaguaaaguggaaugcau

SEQ ID NO: 3890 - RNA, 20 nt, Artificial Sequence
  spacer sequence ATCN PAM
caaggcuuccuauaugcauu

SEQ ID NO: 3891 - RNA, 20 nt, Artificial Sequence
  spacer sequence ATCN PAM
gcuuggggcagccugcugcc

SEQ ID NO: 3892 - RNA, 20 nt, Artificial Sequence
  spacer sequence ATCN PAM
cuauuguacaaacaaguacg

SEQ ID NO: 3893 - RNA, 20 nt, Artificial Sequence
  spacer sequence ATCN PAM
acuuguauguagaauaagau

SEQ ID NO: 3894 - RNA, 20 nt, Artificial Sequence
  spacer sequence ATCN PAM
uauucuacauacaaguggau

SEQ ID NO: 3895 - RNA, 20 nt, Artificial Sequence
  spacer sequence ATCN PAM
uggagcugugugacugguag

SEQ ID NO: 3896 - RNA, 20 nt, Artificial Sequence
  spacer sequence ATCN PAM
gaagaaauacauagucuuug

SEQ ID NO: 3897 - RNA, 20 nt, Artificial Sequence
  spacer sequence ATCN PAM
uugaaaacaacugcuguccu

SEQ ID NO: 3898 - RNA, 20 nt, Artificial Sequence
  spacer sequence ATCN PAM
aagaguaucuuuaucagaau

SEQ ID NO: 3899 - RNA, 20 nt, Artificial Sequence
  spacer sequence ATCN PAM
uuaucagaauuaaauuuuuc

SEQ ID NO: 3900 - RNA, 20 nt, Artificial Sequence
  spacer sequence ATCN PAM
gaauuaaauuuuuccuuauu

SEQ ID NO: 3901 - RNA, 20 nt, Artificial Sequence
  spacer sequence ATCN PAM
auaaggaaaaauuuaauucu

SEQ ID NO: 3902 - RNA, 20 nt, Artificial Sequence
  spacer sequence ATCN PAM
uaaccuucucauguuauguu

SEQ ID NO: 3903 - RNA, 20 nt, Artificial Sequence
  spacer sequence ATCN PAM
uucuucaguagccaauguuc

SEQ ID NO: 3904 - RNA, 20 nt, Artificial Sequence
  spacer sequence ATCN PAM
cacccuaauauuuuaaaaaa

SEQ ID NO: 3905 - RNA, 20 nt, Artificial Sequence
  spacer sequence ATCN PAM
cgugaguuucucuccaucac

SEQ ID NO: 3906 - RNA, 20 nt, Artificial Sequence
  spacer sequence ATCN PAM
uaaaucucgugaguuucucu

SEQ ID NO: 3907 - RNA, 20 nt, Artificial Sequence
  spacer sequence ATCN PAM
uuucaguuuccaguuaaaac

SEQ ID NO: 3908 - RNA, 20 nt, Artificial Sequence
  spacer sequence ATCN PAM
gggcaggggaguuaaaaugg

SEQ ID NO: 3909 - RNA, 20 nt, Artificial Sequence
  spacer sequence ATCN PAM
uaaaaucaugguauaccuug

SEQ ID NO: 3910 - RNA, 20 nt, Artificial Sequence
  spacer sequence ATCN PAM
ugguauaccuugaguuggug

SEQ ID NO: 3911 - RNA, 20 nt, Artificial Sequence
  spacer sequence ATCN PAM
cugcaccuccucaaacaaaa

SEQ ID NO: 3912 - RNA, 20 nt, Artificial Sequence
  spacer sequence ATCN PAM
aagcuacacuuuauuucccu

SEQ ID NO: 3913 - RNA, 20 nt, Artificial Sequence
  spacer sequence ATCN PAM
guuaauuuuuagggaaauaa

SEQ ID NO: 3914 - RNA, 20 nt, Artificial Sequence
  spacer sequence ATCN PAM
caucuguuaauuuuuaggga

SEQ ID NO: 3915 - RNA, 20 nt, Artificial Sequence
  spacer sequence ATCN PAM
uuacauauuaagaaaaugaa

SEQ ID NO: 3916 - RNA, 20 nt, Artificial Sequence
  spacer sequence ATCN PAM
guuguucauuuucuuaauau

SEQ ID NO: 3917 - RNA, 20 nt, Artificial Sequence
  spacer sequence ATCN PAM
gggcauuuaaauuuauauuc

SEQ ID NO: 3918 - RNA, 20 nt, Artificial Sequence
  spacer sequence ATCN PAM
guggauucgccucuaucuaa

SEQ ID NO: 3919 - RNA, 20 nt, Artificial Sequence
  spacer sequence ATCN PAM
acugauuaaaaacucccauu

SEQ ID NO: 3920 - RNA, 20 nt, Artificial Sequence
  spacer sequence ATCN PAM
aaaacuaaaaucaaauugua

SEQ ID NO: 3921 - RNA, 20 nt, Artificial Sequence
  spacer sequence ATCN PAM
aauuguaggugcaauuguuc

SEQ ID NO: 3922 - RNA, 20 nt, Artificial Sequence
  spacer sequence ATCN PAM
ccuucaucaacauaccugcu

SEQ ID NO: 3923 - RNA, 20 nt, Artificial Sequence
  spacer sequence ATCN PAM
acauaccugcuccagguucc

SEQ ID NO: 3924 - RNA, 20 nt, Artificial Sequence
  spacer sequence ATCN PAM
gucucugccagagaauuccc

SEQ ID NO: 3925 - RNA, 20 nt, Artificial Sequence
  spacer sequence ATCN PAM
ggaaaagggugugcaaggcg

SEQ ID NO: 3926 - RNA, 20 nt, Artificial Sequence
  spacer sequence ATCN PAM
gguuuaaacuuccuguaaaa

SEQ ID NO: 3927 - RNA, 20 nt, Artificial Sequence
  spacer sequence ATCN PAM
ucucaccuuuagguauauau

SEQ ID NO: 3928 - RNA, 20 nt, Artificial Sequence
  spacer sequence ATCN PAM
caccuuuagguauauauaau

SEQ ID NO: 3929 - RNA, 20 nt, Artificial Sequence
  spacer sequence ATCN PAM
aucuaaagagaucaaaaagg

SEQ ID NO: 3930 - RNA, 20 nt, Artificial Sequence
  spacer sequence ATCN PAM
aaagagaucaaaaagggcaa

SEQ ID NO: 3931 - RNA, 20 nt, Artificial Sequence
  spacer sequence ATCN PAM
cuuuagauagauaaaauacc

SEQ ID NO: 3932 - RNA, 20 nt, Artificial Sequence
  spacer sequence ATCN PAM
aaaagggcaaaagauggagc

SEQ ID NO: 3933 - RNA, 20 nt, Artificial Sequence
  spacer sequence ATCN PAM
uuugcccuuuuugaucucuu

SEQ ID NO: 3934 - RNA, 20 nt, Artificial Sequence
  spacer sequence ATCN PAM
ugcacugcgcguugccuuag

SEQ ID NO: 3935 - RNA, 20 nt, Artificial Sequence
  spacer sequence ATCN PAM
uccagcagcauugcaucaga

SEQ ID NO: 3936 - RNA, 20 nt, Artificial Sequence
  spacer sequence ATCN PAM
gauccacucacaucagucuc

SEQ ID NO: 3937 - RNA, 20 nt, Artificial Sequence
  spacer sequence ATCN PAM
gaugcaaugcugcuggaaga

SEQ ID NO: 3938 - RNA, 20 nt, Artificial Sequence
  spacer sequence ATCN PAM
acucacaucagucuccaggg

SEQ ID NO: 3939 - RNA, 20 nt, Artificial Sequence
  spacer sequence ATCN PAM
gucuccagggugaaccaaga

SEQ ID NO: 3940 - RNA, 20 nt, Artificial Sequence
  spacer sequence ATCN PAM
cuugguucacccuggagacu

SEQ ID NO: 3941 - RNA, 20 nt, Artificial Sequence
  spacer sequence ATCN PAM
acaaaacguauaaagaaaaa

SEQ ID NO: 3942 - RNA, 20 nt, Artificial Sequence
  spacer sequence ATCN PAM
accacaacugcuucugacag

SEQ ID NO: 3943 - RNA, 20 nt, Artificial Sequence
  spacer sequence ATCN PAM
acagcugucagaagcaguug

SEQ ID NO: 3944 - RNA, 20 nt, Artificial Sequence
  spacer sequence ATCN PAM
ucuuuaaaaccucaagcaau

SEQ ID NO: 3945 - RNA, 20 nt, Artificial Sequence
  spacer sequence ATCN PAM
aaaggacuucuguaccuuca

SEQ ID NO: 3946 - RNA, 20 nt, Artificial Sequence
  spacer sequence ATCN PAM
guacuagauuuaaacugaau

SEQ ID NO: 3947 - RNA, 20 nt, Artificial Sequence
  spacer sequence ATCN PAM
aguacugaucuaaaggacuu

SEQ ID NO: 3948 - RNA, 20 nt, Artificial Sequence
  spacer sequence ATCN PAM
ccacaaauauuuacacugua

SEQ ID NO: 3949 - RNA, 20 nt, Artificial Sequence
  spacer sequence ATCN PAM
cauacuuuuaacgggaaaag

SEQ ID NO: 3950 - RNA, 20 nt, Artificial Sequence
  spacer sequence ATCN PAM
uuuucuucucuuggaguugu

SEQ ID NO: 3951 - RNA, 20 nt, Artificial Sequence
  spacer sequence ATCN PAM
uccuuuucuucucuuggagu

SEQ ID NO: 3952 - RNA, 20 nt, Artificial Sequence
  spacer sequence ATCN PAM
auagcgaaaugaaaacauca

SEQ ID NO: 3953 - RNA, 20 nt, Artificial Sequence
  spacer sequence ATCN PAM
aaggagaacaagaauggaaa

SEQ ID NO: 3954 - RNA, 20 nt, Artificial Sequence
  spacer sequence ATCN PAM
agcauuuuuccauugcuguc

SEQ ID NO: 3955 - RNA, 20 nt, Artificial Sequence
  spacer sequence ATCN PAM
aaguuuauacaauuccccag

SEQ ID NO: 3956 - RNA, 20 nt, Artificial Sequence
  spacer sequence ATCN PAM
gacagggcauuuacaugcgc

SEQ ID NO: 3957 - RNA, 20 nt, Artificial Sequence
  spacer sequence ATCN PAM
gagcggcaccugagagcucc

SEQ ID NO: 3958 - RNA, 20 nt, Artificial Sequence
  spacer sequence ATCN PAM
cagcagggaauaggugagcu

SEQ ID NO: 3959 - RNA, 20 nt, Artificial Sequence
  spacer sequence ATCN PAM
gaagugaccucaccaccccc

SEQ ID NO: 3960 - RNA, 20 nt, Artificial Sequence
  spacer sequence ATCN PAM
uucccuugccaaccuaacuc

SEQ ID NO: 3961 - RNA, 20 nt, Artificial Sequence
  spacer sequence ATCN PAM
guuuuaaaauguaacuuauu

SEQ ID NO: 3962 - RNA, 20 nt, Artificial Sequence
  spacer sequence ATCN PAM
gacuguauuucuaaucaguu

SEQ ID NO: 3963 - RNA, 20 nt, Artificial Sequence
  spacer sequence ATCN PAM
aguauacuggcuuuaauaau

SEQ ID NO: 3964 - RNA, 20 nt, Artificial Sequence
  spacer sequence ATCN PAM
gccuuuggucucuaggagca

SEQ ID NO: 3965 - RNA, 20 nt, Artificial Sequence
  spacer sequence ATCN PAM
guaaauuuaccuuuguaauu

SEQ ID NO: 3966 - RNA, 20 nt, Artificial Sequence
  spacer sequence ATCN PAM
uuaaacagcuucuccccuuu

SEQ ID NO: 3967 - RNA, 20 nt, Artificial Sequence
  spacer sequence ATCN PAM
auuaaauuauauagucugaa

SEQ ID NO: 3968 - RNA, 20 nt, Artificial Sequence
  spacer sequence ATCN PAM
aaauugauacauaacauaaa

SEQ ID NO: 3969 - RNA, 20 nt, Artificial Sequence
  spacer sequence ATCN PAM
auuuggaugacauuaaugaa

SEQ ID NO: 3970 - RNA, 20 nt, Artificial Sequence
  spacer sequence ATCN PAM
agcagguuuuuauguuaugu

SEQ ID NO: 3971 - RNA, 20 nt, Artificial Sequence
  spacer sequence ATCN PAM
uuuuuuuuaauccuugaaau

SEQ ID NO: 3972 - RNA, 20 nt, Artificial Sequence
  spacer sequence ATCN PAM
uugaaauaacaacacugcug

SEQ ID NO: 3973 - RNA, 20 nt, Artificial Sequence
  spacer sequence ATCN PAM
gaacaagcagaaagguacua

SEQ ID NO: 3974 - RNA, 20 nt, Artificial Sequence
  spacer sequence ATCN PAM
uuaguaccuuucugcuuguu

SEQ ID NO: 3975 - RNA, 20 nt, Artificial Sequence
  spacer sequence ATCN PAM
ccaagcaucuuuaguaccuu

SEQ ID NO: 3976 - RNA, 20 nt, Artificial Sequence
  spacer sequence ATCN PAM
caugcuaaaaaaguggcaag

SEQ ID NO: 3977 - RNA, 20 nt, Artificial Sequence
  spacer sequence ATCN PAM
agcuggacccagccuggcac

SEQ ID NO: 3978 - RNA, 20 nt, Artificial Sequence
  spacer sequence ATCN PAM
acuuugguuggucuguucac

SEQ ID NO: 3979 - RNA, 20 nt, Artificial Sequence
  spacer sequence ATCN PAM
agugacgcaaucuuggugca

SEQ ID NO: 3980 - RNA, 20 nt, Artificial Sequence
  spacer sequence ATCN PAM
uggugcaucucccuagcugu

SEQ ID NO: 3981 - RNA, 20 nt, Artificial Sequence
  spacer sequence ATCN PAM
cccuagcugugcuuucuacu

SEQ ID NO: 3982 - RNA, 20 nt, Artificial Sequence
  spacer sequence ATCN PAM
caaaaaucuaaaaaauguuu

SEQ ID NO: 3983 - RNA, 20 nt, Artificial Sequence
  spacer sequence ATCN PAM
aaaaaauguuucccuaggau

SEQ ID NO: 3984 - RNA, 20 nt, Artificial Sequence
  spacer sequence ATCN PAM
uagggaaacauuuuuuagau

SEQ ID NO: 3985 - RNA, 20 nt, Artificial Sequence
  spacer sequence ATCN PAM
uuaauuucacacugcagcuu

SEQ ID NO: 3986 - RNA, 20 nt, Artificial Sequence
  spacer sequence ATCN PAM
uuuagaguccuggaaaauca

SEQ ID NO: 3987 - RNA, 20 nt, Artificial Sequence
  spacer sequence ATCN PAM
aacucgccuccucccugagc

SEQ ID NO: 3988 - RNA, 20 nt, Artificial Sequence
  spacer sequence ATCN PAM
gaaauauguuuugcacaccu

SEQ ID NO: 3989 - RNA, 20 nt, Artificial Sequence
  spacer sequence ATCN PAM
uuuauaguaaaggcacaacu

SEQ ID NO: 3990 - RNA, 20 nt, Artificial Sequence
  spacer sequence ATCN PAM
ccccauuccuuguuguguug

SEQ ID NO: 3991 - RNA, 20 nt, Artificial Sequence
  spacer sequence ATCN PAM
ccacaucacacacaggauga

SEQ ID NO: 3992 - RNA, 20 nt, Artificial Sequence
  spacer sequence ATCN PAM
cacacaggaugaucuucaua

SEQ ID NO: 3993 - RNA, 20 nt, Artificial Sequence
  spacer sequence ATCN PAM
ugugugugauguggagauug

SEQ ID NO: 3994 - RNA, 20 nt, Artificial Sequence
  spacer sequence ATCN PAM
uccugugugugauguggaga

SEQ ID NO: 3995 - RNA, 20 nt, Artificial Sequence
  spacer sequence ATCN PAM
ucauaucacguggaccuauu

SEQ ID NO: 3996 - RNA, 20 nt, Artificial Sequence
  spacer sequence ATCN PAM
cguggaccuauucucaaaac

SEQ ID NO: 3997 - RNA, 20 nt, Artificial Sequence
  spacer sequence ATCN PAM
uuuauaaauaauguuuugag

SEQ ID NO: 3998 - RNA, 20 nt, Artificial Sequence
  spacer sequence ATCN PAM
uuucugugucaccacaaggg

SEQ ID NO: 3999 - RNA, 20 nt, Artificial Sequence
  spacer sequence ATCN PAM
caaacuucuucagacauuac

SEQ ID NO: 4000 - RNA, 20 nt, Artificial Sequence
  spacer sequence ATCN PAM
uuaggaucuucuacauuuua

SEQ ID NO: 4001 - RNA, 20 nt, Artificial Sequence
  spacer sequence ATCN PAM
uaaagaucccaaacuucuuc

SEQ ID NO: 4002 - RNA, 20 nt, Artificial Sequence
  spacer sequence ATCN PAM
ucuacauuuuagauauauuu

SEQ ID NO: 4003 - RNA, 20 nt, Artificial Sequence
  spacer sequence ATCN PAM
aaaauguagaagauccuaaa

SEQ ID NO: 4004 - RNA, 20 nt, Artificial Sequence
  spacer sequence ATCN PAM
ugcaaucacugugacaguuc

SEQ ID NO: 4005 - RNA, 20 nt, Artificial Sequence
  spacer sequence ATCN PAM
cugugacaguucuauuuaca

SEQ ID NO: 4006 - RNA, 20 nt, Artificial Sequence
  spacer sequence ATCN PAM
aagcugccaguucacaaccu

SEQ ID NO: 4007 - RNA, 20 nt, Artificial Sequence
  spacer sequence ATCN PAM
aaagacuaauguucaugaaa

SEQ ID NO: 4008 - RNA, 20 nt, Artificial Sequence
  spacer sequence ATCN PAM
uagguacuuauuagaaaaca

SEQ ID NO: 4009 - RNA, 20 nt, Artificial Sequence
  spacer sequence ATCN PAM
agagaguagagaauauuguu

SEQ ID NO: 4010 - RNA, 20 nt, Artificial Sequence
  spacer sequence ATCN PAM
cauaaauaaagagaaaagaa

SEQ ID NO: 4011 - RNA, 20 nt, Artificial Sequence
  spacer sequence ATCN PAM
uccaguucagucugagcuag

SEQ ID NO: 4012 - RNA, 20 nt, Artificial Sequence
  spacer sequence ATCN PAM
gaauggauacaaaaagaaaa

SEQ ID NO: 4013 - RNA, 20 nt, Artificial Sequence
  spacer sequence ATCN PAM
auucugauucucuccuagcu

SEQ ID NO: 4014 - RNA, 20 nt, Artificial Sequence
  spacer sequence ATCN PAM
aauacaauaugcuuuucaga

SEQ ID NO: 4015 - RNA, 20 nt, Artificial Sequence
  spacer sequence ATCN PAM
cccuucuuuagaguaucugu

SEQ ID NO: 4016 - RNA, 20 nt, Artificial Sequence
  spacer sequence ATCN PAM
gucugauauaucauuaucua

SEQ ID NO: 4017 - RNA, 20 nt, Artificial Sequence
  spacer sequence ATCN PAM
gacagauacucuaaagaagg

SEQ ID NO: 4018 - RNA, 20 nt, Artificial Sequence
  spacer sequence ATCN PAM
uuaucuaaauaccagcuaua

SEQ ID NO: 4019 - RNA, 20 nt, Artificial Sequence
  spacer sequence ATCN PAM
aaauaccagcuauacugucu

SEQ ID NO: 4020 - RNA, 20 nt, Artificial Sequence
  spacer sequence ATCN PAM
ggguauuuaaaauuauuugc

SEQ ID NO: 4021 - RNA, 20 nt, Artificial Sequence
  spacer sequence ATCN PAM
ugaacauagacauuuauauc

SEQ ID NO: 4022 - RNA, 20 nt, Artificial Sequence
  spacer sequence ATCN PAM
acaggagcagacuuuacuac

SEQ ID NO: 4023 - RNA, 20 nt, Artificial Sequence
  spacer sequence ATCN PAM
uuaaauuagguuugggcugu

SEQ ID NO: 4024 - RNA, 20 nt, Artificial Sequence
  spacer sequence ATCN PAM
gacaugaugggauaauguuu

SEQ ID NO: 4025 - RNA, 20 nt, Artificial Sequence
  spacer sequence ATCN PAM
ugucagauuugagguuuugg

SEQ ID NO: 4026 - RNA, 20 nt, Artificial Sequence
  spacer sequence ATCN PAM
caucaugucagauuugaggu

SEQ ID NO: 4027 - RNA, 20 nt, Artificial Sequence
  spacer sequence ATCN PAM
uccaugaauauuucccccca

SEQ ID NO: 4028 - RNA, 20 nt, Artificial Sequence
  spacer sequence ATCN PAM
uaaaauaugagacuaaaaaa

SEQ ID NO: 4029 - RNA, 20 nt, Artificial Sequence
  spacer sequence ATCN PAM
gcagccuuugacuugcaguc

SEQ ID NO: 4030 - RNA, 20 nt, Artificial Sequence
  spacer sequence ATCN PAM
gaggguggauauuugacaca

SEQ ID NO: 4031 - RNA, 20 nt, Artificial Sequence
  spacer sequence ATCN PAM
acccucagauaucagcagcc

SEQ ID NO: 4032 - RNA, 20 nt, Artificial Sequence
  spacer sequence ATCN PAM
auaugugugucaaauaucca

SEQ ID NO: 4033 - RNA, 20 nt, Artificial Sequence
  spacer sequence ATCN PAM
uugaaguaguauuaauuuag

SEQ ID NO: 4034 - RNA, 20 nt, Artificial Sequence
  spacer sequence ATCN PAM
caauggaucacaaucacaca

SEQ ID NO: 4035 - RNA, 20 nt, Artificial Sequence
  spacer sequence ATCN PAM
auugagaucauugaaguagu

SEQ ID NO: 4036 - RNA, 20 nt, Artificial Sequence
  spacer sequence ATCN PAM
caaucacacaauauuuugaa

SEQ ID NO: 4037 - RNA, 20 nt, Artificial Sequence
  spacer sequence ATCN PAM
cacaauauuuugaauauuua

SEQ ID NO: 4038 - RNA, 20 nt, Artificial Sequence
  spacer sequence ATCN PAM
gguugcuuuuuucauuuuau

SEQ ID NO: 4039 - RNA, 20 nt, Artificial Sequence
  spacer sequence ATCN PAM
auguguacagcucauaugug

SEQ ID NO: 4040 - RNA, 20 nt, Artificial Sequence
  spacer sequence ATCN PAM
acguacacauaugagcugua

SEQ ID NO: 4041 - RNA, 20 nt, Artificial Sequence
  spacer sequence ATCN PAM
auucaccagguaaaaagaau

SEQ ID NO: 4042 - RNA, 20 nt, Artificial Sequence
  spacer sequence ATCN PAM
ucuaaaaaauacucaguuug

SEQ ID NO: 4043 - RNA, 20 nt, Artificial Sequence
  spacer sequence ATCN PAM
cagcacuuugggaggccaag

SEQ ID NO: 4044 - RNA, 20 nt, Artificial Sequence
  spacer sequence ATCN PAM
accuggcuuggccucccaaa

SEQ ID NO: 4045 - RNA, 20 nt, Artificial Sequence
  spacer sequence ATCN PAM
ccugaggucaggaguucaag

SEQ ID NO: 4046 - RNA, 20 nt, Artificial Sequence
  spacer sequence ATCN PAM
cagcuacuugggaggcugag

SEQ ID NO: 4047 - RNA, 20 nt, Artificial Sequence
  spacer sequence ATCN PAM
cuugaaccuaggaggcagag

SEQ ID NO: 4048 - RNA, 20 nt, Artificial Sequence
  spacer sequence ATCN PAM
ugccacugcacuccagccug

SEQ ID NO: 4049 - RNA, 20 nt, Artificial Sequence
  spacer sequence ATCN PAM
ugaguaaaaugguaugcauu

SEQ ID NO: 4050 - RNA, 20 nt, Artificial Sequence
  spacer sequence ATCN PAM
gaaagucccgaauucuaagc

SEQ ID NO: 4051 - RNA, 20 nt, Artificial Sequence
  spacer sequence ATCN PAM
uaggaagaagaucugucacu

SEQ ID NO: 4052 - RNA, 20 nt, Artificial Sequence
  spacer sequence ATCN PAM
ucuuccuaagauaaauaaag

SEQ ID NO: 4053 - RNA, 20 nt, Artificial Sequence
  spacer sequence ATCN PAM
gucacuguuuuauucuugcu

SEQ ID NO: 4054 - RNA, 20 nt, Artificial Sequence
  spacer sequence ATCN PAM
aacuuacaucacuuuaauaa

SEQ ID NO: 4055 - RNA, 20 nt, Artificial Sequence
  spacer sequence ATCN PAM
cuuuaauaaagccuuuccua

SEQ ID NO: 4056 - RNA, 20 nt, Artificial Sequence
  spacer sequence ATCN PAM
cuagaagaauguguuuggca

SEQ ID NO: 4057 - RNA, 20 nt, Artificial Sequence
  spacer sequence ATCN PAM
auauaucucuuuccuuaaua

SEQ ID NO: 4058 - RNA, 20 nt, Artificial Sequence
  spacer sequence ATCN PAM
cuuuccuuaauacaaggcau

SEQ ID NO: 4059 - RNA, 20 nt, Artificial Sequence
  spacer sequence ATCN PAM
acugaaugauuacuguuauu

SEQ ID NO: 4060 - RNA, 20 nt, Artificial Sequence
  spacer sequence ATCN PAM
uucaguagauauuugaauug

SEQ ID NO: 4061 - RNA, 20 nt, Artificial Sequence
  spacer sequence ATCN PAM
uaaaaagaaaagcagacuug

SEQ ID NO: 4062 - RNA, 20 nt, Artificial Sequence
  spacer sequence ATCN PAM
cgacuucucauaauucacag

SEQ ID NO: 4063 - RNA, 20 nt, Artificial Sequence
  spacer sequence ATCN PAM
cacuuugagaugugaccaca

SEQ ID NO: 4064 - RNA, 20 nt, Artificial Sequence
  spacer sequence ATCN PAM
caaagugagaugucaguaac

SEQ ID NO: 4065 - RNA, 20 nt, Artificial Sequence
  spacer sequence ATCN PAM
ccuguucccacccuggaacu

SEQ ID NO: 4066 - RNA, 20 nt, Artificial Sequence
  spacer sequence ATCN PAM
agacuuuguaauuauucaug

SEQ ID NO: 4067 - RNA, 20 nt, Artificial Sequence
  spacer sequence ATCN PAM
uagacaucuuagagagcuuu

SEQ ID NO: 4068 - RNA, 20 nt, Artificial Sequence
  spacer sequence ATCN PAM
uagagagcuuuucgucucag

SEQ ID NO: 4069 - RNA, 20 nt, Artificial Sequence
  spacer sequence ATCN PAM
uuuaacugagacgaaaagcu

SEQ ID NO: 4070 - RNA, 20 nt, Artificial Sequence
  spacer sequence ATCN PAM
aucauuuaacugagacgaaa

SEQ ID NO: 4071 - RNA, 20 nt, Artificial Sequence
  spacer sequence ATCN PAM
cuuauuucccuacauagauu

SEQ ID NO: 4072 - RNA, 20 nt, Artificial Sequence
  spacer sequence ATCN PAM
auguagggaaauaagagaua

SEQ ID NO: 4073 - RNA, 20 nt, Artificial Sequence
  spacer sequence ATCN PAM
aaaugcuggggggaaggccu

SEQ ID NO: 4074 - RNA, 20 nt, Artificial Sequence
  spacer sequence ATCN PAM
aagacugaauaaccuauuug

SEQ ID NO: 4075 - RNA, 20 nt, Artificial Sequence
  spacer sequence ATCN PAM
agcugcucguuuaaaagaca

SEQ ID NO: 4076 - RNA, 20 nt, Artificial Sequence
  spacer sequence ATCN PAM
uauuuacauaucgagcugcu

SEQ ID NO: 4077 - RNA, 20 nt, Artificial Sequence
  spacer sequence ATCN PAM
cgcaaguguuacuccauauu

SEQ ID NO: 4078 - RNA, 20 nt, Artificial Sequence
  spacer sequence ATCN PAM
ccaaauauggaguaacacuu

SEQ ID NO: 4079 - RNA, 20 nt, Artificial Sequence
  spacer sequence ATCN PAM
aaagccuugcuaaaucacca

SEQ ID NO: 4080 - RNA, 20 nt, Artificial Sequence
  spacer sequence ATCN PAM
ccgaagacgacaaauccccu

SEQ ID NO: 4081 - RNA, 20 nt, Artificial Sequence
  spacer sequence ATCN PAM
ccuuccgccugcucuugcuu

SEQ ID NO: 4082 - RNA, 20 nt, Artificial Sequence
  spacer sequence ATCN PAM
ugccuuacacuucuguucau

SEQ ID NO: 4083 - RNA, 20 nt, Artificial Sequence
  spacer sequence ATCN PAM
ugcugggggguaggggagau

SEQ ID NO: 4084 - RNA, 20 nt, Artificial Sequence
  spacer sequence ATCN PAM
ccccuaccccccagcaggau

SEQ ID NO: 4085 - RNA, 20 nt, Artificial Sequence
  spacer sequence ATCN PAM
ucaccuacaugucacauaag

SEQ ID NO: 4086 - RNA, 20 nt, Artificial Sequence
  spacer sequence ATCN PAM
accacauuuaccuuauguga

SEQ ID NO: 4087 - RNA, 20 nt, Artificial Sequence
  spacer sequence ATCN PAM
gcugcuagggaagcugcauu

SEQ ID NO: 4088 - RNA, 20 nt, Artificial Sequence
  spacer sequence ATCN PAM
gagugcuaucacagaaagca

SEQ ID NO: 4089 - RNA, 20 nt, Artificial Sequence
  spacer sequence ATCN PAM
cagaaagcacuaaaaaaaga

SEQ ID NO: 4090 - RNA, 20 nt, Artificial Sequence
  spacer sequence ATCN PAM
uuaaaaccaaacauggcauu

SEQ ID NO: 4091 - RNA, 20 nt, Artificial Sequence
  spacer sequence ATCN PAM
aauucuagagggggagagga

SEQ ID NO: 4092 - RNA, 20 nt, Artificial Sequence
  spacer sequence ATCN PAM
ccucuagaccacugaccuau

SEQ ID NO: 4093 - RNA, 20 nt, Artificial Sequence
  spacer sequence ATCN PAM
auucaugauaugcacuaccu

SEQ ID NO: 4094 - RNA, 20 nt, Artificial Sequence
  spacer sequence ATCN PAM
ugaauugauucacuggaacu

SEQ ID NO: 4095 - RNA, 20 nt, Artificial Sequence
  spacer sequence ATCN PAM
accuaccacccagcucccga

SEQ ID NO: 4096 - RNA, 20 nt, Artificial Sequence
  spacer sequence ATCN PAM
cuuucuuccaucuaccuacc

SEQ ID NO: 4097 - RNA, 20 nt, Artificial Sequence
  spacer sequence ATCN PAM
accaacaggcauggcauguc

SEQ ID NO: 4098 - RNA, 20 nt, Artificial Sequence
  spacer sequence ATCN PAM
cagaaucugcauugacuuuu

SEQ ID NO: 4099 - RNA, 20 nt, Artificial Sequence
  spacer sequence ATCN PAM
gcauugacuuuugucuaaca

SEQ ID NO: 4100 - RNA, 20 nt, Artificial Sequence
  spacer sequence ATCN PAM
cuuagagaagggaauuuaag

SEQ ID NO: 4101 - RNA, 20 nt, Artificial Sequence
  spacer sequence ATCN PAM
agauacaucugucaaaacca

SEQ ID NO: 4102 - RNA, 20 nt, Artificial Sequence
  spacer sequence ATCN PAM
ugauuuuguuugugguuuac

SEQ ID NO: 4103 - RNA, 20 nt, Artificial Sequence
  spacer sequence ATCN PAM
gucaaaaccacaucagagac

SEQ ID NO: 4104 - RNA, 20 nt, Artificial Sequence
  spacer sequence ATCN PAM
gagacaagagagagcacaga

SEQ ID NO: 4105 - RNA, 20 nt, Artificial Sequence
  spacer sequence ATCN PAM
uuuagcugaggaggcaggcu

SEQ ID NO: 4106 - RNA, 20 nt, Artificial Sequence
  spacer sequence ATCN PAM
uaaagucaaggucauggugu

SEQ ID NO: 4107 - RNA, 20 nt, Artificial Sequence
  spacer sequence ATCN PAM
caccacggggcuguguuuaa

SEQ ID NO: 4108 - RNA, 20 nt, Artificial Sequence
  spacer sequence ATCN PAM
gggcugacagccaauaugga

SEQ ID NO: 4109 - RNA, 20 nt, Artificial Sequence
  spacer sequence ATCN PAM
auauuggcugucagcccgga

SEQ ID NO: 4110 - RNA, 20 nt, Artificial Sequence
  spacer sequence ATCN PAM
aaggcuagcccugaagcuca

SEQ ID NO: 4111 - RNA, 20 nt, Artificial Sequence
  spacer sequence ATCN PAM
ggccaggccuccuuaggggu

SEQ ID NO: 4112 - RNA, 20 nt, Artificial Sequence
  spacer sequence ATCN PAM
ccaccuucucauuuugaagu

SEQ ID NO: 4113 - RNA, 20 nt, Artificial Sequence
  spacer sequence ATCN PAM
aaaaucgacagauccagaga

SEQ ID NO: 4114 - RNA, 20 nt, Artificial Sequence
  spacer sequence ATCN PAM
acagauccagagagaaggug

SEQ ID NO: 4115 - RNA, 20 nt, Artificial Sequence
  spacer sequence ATCN PAM
gucgauuuuggauuucuuuu

SEQ ID NO: 4116 - RNA, 20 nt, Artificial Sequence
  spacer sequence ATCN PAM
agagagaaggugucugaugu

SEQ ID NO: 4117 - RNA, 20 nt, Artificial Sequence
  spacer sequence ATCN PAM
gacaccuucucucuggaucu

SEQ ID NO: 4118 - RNA, 20 nt, Artificial Sequence
  spacer sequence ATCN PAM
ugccuacaucugauucagug

SEQ ID NO: 4119 - RNA, 20 nt, Artificial Sequence
  spacer sequence ATCN PAM
gauucagugagguggaaaau

SEQ ID NO: 4120 - RNA, 20 nt, Artificial Sequence
  spacer sequence ATCN PAM
gauguaggcaggauagguac

SEQ ID NO: 4121 - RNA, 20 nt, Artificial Sequence
  spacer sequence ATCN PAM
uuucuguugcuuacguccag

SEQ ID NO: 4122 - RNA, 20 nt, Artificial Sequence
  spacer sequence ATCN PAM
agaggaauuugccccaaaca

SEQ ID NO: 4123 - RNA, 20 nt, Artificial Sequence
  spacer sequence ATCN PAM
acgucaucuagaggaauuug

SEQ ID NO: 4124 - RNA, 20 nt, Artificial Sequence
  spacer sequence ATCN PAM
ucauccucuggcgugaccug

SEQ ID NO: 4125 - RNA, 20 nt, Artificial Sequence
  spacer sequence ATCN PAM
ucuggcgugaccuggaugcc

SEQ ID NO: 4126 - RNA, 20 nt, Artificial Sequence
  spacer sequence ATCN PAM
aggucacgccagaggaugac

SEQ ID NO: 4127 - RNA, 20 nt, Artificial Sequence
  spacer sequence ATCN PAM
cguggagguuggcauccagg

SEQ ID NO: 4128 - RNA, 20 nt, Artificial Sequence
  spacer sequence ATCN PAM
aaucccguggagguuggcau

SEQ ID NO: 4129 - RNA, 20 nt, Artificial Sequence
  spacer sequence ATCN PAM
cgauuggugaaggggaaggu

SEQ ID NO: 4130 - RNA, 20 nt, Artificial Sequence
  spacer sequence ATCN PAM
agaugaaaaaagcauccaau

SEQ ID NO: 4131 - RNA, 20 nt, Artificial Sequence
  spacer sequence ATCN PAM
acagcuuuuucuaagcagag

SEQ ID NO: 4132 - RNA, 20 nt, Artificial Sequence
  spacer sequence ATCN PAM
agcacaaacggaaacaaugc

SEQ ID NO: 4133 - RNA, 20 nt, Artificial Sequence
  spacer sequence ATCN PAM
ggcacugcccacaggugagg

SEQ ID NO: 4134 - RNA, 20 nt, Artificial Sequence
  spacer sequence ATCN PAM
ugaccuccucaccugugggc

SEQ ID NO: 4135 - RNA, 20 nt, Artificial Sequence
  spacer sequence ATCN PAM
ccuucuggagcucccaacgg

SEQ ID NO: 4136 - RNA, 20 nt, Artificial Sequence
  spacer sequence ATCN PAM
ucuguaagaauggcuucaag

SEQ ID NO: 4137 - RNA, 20 nt, Artificial Sequence
  spacer sequence ATCN PAM
guaagaauggcuucaagagg

SEQ ID NO: 4138 - RNA, 20 nt, Artificial Sequence
  spacer sequence ATCN PAM
caaccccaugccaucccacc

SEQ ID NO: 4139 - RNA, 20 nt, Artificial Sequence
  spacer sequence ATCN PAM
caccacaucauguaaagugu

SEQ ID NO: 4140 - RNA, 20 nt, Artificial Sequence
  spacer sequence ATCN PAM
uguaaaguguuucuaggcuu

SEQ ID NO: 4141 - RNA, 20 nt, Artificial Sequence
  spacer sequence ATCN PAM
uuguacuuuuuguaugcuca

SEQ ID NO: 4142 - RNA, 20 nt, Artificial Sequence
  spacer sequence ATCN PAM
accagagagcaaauuuguca

SEQ ID NO: 4143 - RNA, 20 nt, Artificial Sequence
  spacer sequence ATCN PAM
ucacauauguaaagaaaaca

SEQ ID NO: 4144 - RNA, 20 nt, Artificial Sequence
  spacer sequence ATCN PAM
cauauguaaagaaaacaguc

SEQ ID NO: 4145 - RNA, 20 nt, Artificial Sequence
  spacer sequence ATCN PAM
acuuuuuuuuuuaaccaguu

SEQ ID NO: 4146 - RNA, 20 nt, Artificial Sequence
  spacer sequence ATCN PAM
guuucauaggugcaugcagu

SEQ ID NO: 4147 - RNA, 20 nt, Artificial Sequence
  spacer sequence ATCN PAM
aaauaauaaucaugucgcag

SEQ ID NO: 4148 - RNA, 20 nt, Artificial Sequence
  spacer sequence ATCN PAM
ugucgcagcauaauucacac

SEQ ID NO: 4149 - RNA, 20 nt, Artificial Sequence
  spacer sequence ATCN PAM
aagaaauaccaaaugcacgg

SEQ ID NO: 4150 - RNA, 20 nt, Artificial Sequence
  spacer sequence ATCN PAM
cauuuagcuaaugugucuga

SEQ ID NO: 4151 - RNA, 20 nt, Artificial Sequence
  spacer sequence ATCN PAM
augauauaaaaaucagaaug

SEQ ID NO: 4152 - RNA, 20 nt, Artificial Sequence
  spacer sequence ATCN PAM
uagaugccaccaagugcaaa

SEQ ID NO: 4153 - RNA, 20 nt, Artificial Sequence
  spacer sequence ATCN PAM
gaauggucaagcaaacacca

SEQ ID NO: 4154 - RNA, 20 nt, Artificial Sequence
  spacer sequence ATCN PAM
ccagcggaugguauaacaag

SEQ ID NO: 4155 - RNA, 20 nt, Artificial Sequence
  spacer sequence ATCN PAM
gcuggugauuaugugugcag

SEQ ID NO: 4156 - RNA, 20 nt, Artificial Sequence
  spacer sequence ATCN PAM
acuuuaccagcuucuaucau

SEQ ID NO: 4157 - RNA, 20 nt, Artificial Sequence
  spacer sequence ATCN PAM
uuuuuuaagcuuccaaaggg

SEQ ID NO: 4158 - RNA, 20 nt, Artificial Sequence
  spacer sequence ATCN PAM
uaugcuugcucuaucaaaaa

SEQ ID NO: 4159 - RNA, 20 nt, Artificial Sequence
  spacer sequence ATCN PAM
aaaaaaaaaaaaaaaucaca

SEQ ID NO: 4160 - RNA, 20 nt, Artificial Sequence
  spacer sequence ATCN PAM
caaaauacaaaacauccagg

SEQ ID NO: 4161 - RNA, 20 nt, Artificial Sequence
  spacer sequence ATCN PAM
aggaugcugccaguuaauaa

SEQ ID NO: 4162 - RNA, 20 nt, Artificial Sequence
  spacer sequence ATCN PAM
uggauguuuuguauuuugug

SEQ ID NO: 4163 - RNA, 20 nt, Artificial Sequence
  spacer sequence ATCN PAM
gucugaccuucuuuagcaag

SEQ ID NO: 4164 - RNA, 20 nt, Artificial Sequence
  spacer sequence ATCN PAM
aaaaauagauuuuaauuuga

SEQ ID NO: 4165 - RNA, 20 nt, Artificial Sequence
  spacer sequence ATCN PAM
auuuuuugauucucuguggc

SEQ ID NO: 4166 - RNA, 20 nt, Artificial Sequence
  spacer sequence ATCN PAM
guuccaauauucuacacuca

SEQ ID NO: 4167 - RNA, 20 nt, Artificial Sequence
  spacer sequence ATCN PAM
aaaucuguuccaauauucua

SEQ ID NO: 4168 - RNA, 20 nt, Artificial Sequence
  spacer sequence ATCN PAM
agugaacucagguuaaauuu

SEQ ID NO: 4169 - RNA, 20 nt, Artificial Sequence
  spacer sequence ATCN PAM
ucccccucaauauucagccu

SEQ ID NO: 4170 - RNA, 20 nt, Artificial Sequence
  spacer sequence ATCN PAM
ggaguaacucccagaugugc

SEQ ID NO: 4171 - RNA, 20 nt, Artificial Sequence
  spacer sequence ATCN PAM
gggaguuacuccagaucuuc

SEQ ID NO: 4172 - RNA, 20 nt, Artificial Sequence
  spacer sequence ATCN PAM
cauaauuucuagccucuggu

SEQ ID NO: 4173 - RNA, 20 nt, Artificial Sequence
  spacer sequence ATCN PAM
uuuggccaguauguugggca

SEQ ID NO: 4174 - RNA, 20 nt, Artificial Sequence
  spacer sequence ATCN PAM
uuaauucagacaacaggaau

SEQ ID NO: 4175 - RNA, 20 nt, Artificial Sequence
  spacer sequence ATCN PAM
auguguacuuaaaauccuua

SEQ ID NO: 4176 - RNA, 20 nt, Artificial Sequence
  spacer sequence ATCN PAM
aacuuacuaguacauagaac

SEQ ID NO: 4177 - RNA, 20 nt, Artificial Sequence
  spacer sequence ATCN PAM
uaacgguggaaauaaaaaau

SEQ ID NO: 4178 - RNA, 20 nt, Artificial Sequence
  spacer sequence ATCN PAM
aauaguuaaagguaaugugg

SEQ ID NO: 4179 - RNA, 20 nt, Artificial Sequence
  spacer sequence ATCN PAM
guucagucacuacauuuaga

SEQ ID NO: 4180 - RNA, 20 nt, Artificial Sequence
  spacer sequence ATCN PAM
aaaccgggaaaugaaguggu

SEQ ID NO: 4181 - RNA, 20 nt, Artificial Sequence
  spacer sequence ATCN PAM
gcaaccucugaauuaccacu

SEQ ID NO: 4182 - RNA, 20 nt, Artificial Sequence
  spacer sequence ATCN PAM
uguuauuuucaagaacuuug

SEQ ID NO: 4183 - RNA, 20 nt, Artificial Sequence
  spacer sequence ATCN PAM
ucuuguuauuuucaagaacu

SEQ ID NO: 4184 - RNA, 20 nt, Artificial Sequence
  spacer sequence ATCN PAM
aauguacagauauaaaaccu

SEQ ID NO: 4185 - RNA, 20 nt, Artificial Sequence
  spacer sequence ATCN PAM
guacauuugaucaucuuguu

SEQ ID NO: 4186 - RNA, 20 nt, Artificial Sequence
  spacer sequence ATCN PAM
gucuccuugcaaaacauuug

SEQ ID NO: 4187 - RNA, 20 nt, Artificial Sequence
  spacer sequence ATCN PAM
uugcugguauauuauuaaaa

SEQ ID NO: 4188 - RNA, 20 nt, Artificial Sequence
  spacer sequence ATCN PAM
gacaaagugggacacaaaga

SEQ ID NO: 4189 - RNA, 20 nt, Artificial Sequence
  spacer sequence ATCN PAM
guagacuacaccaugagaau

SEQ ID NO: 4190 - RNA, 20 nt, Artificial Sequence
  spacer sequence ATCN PAM
uuucucaguggcaaucaaca

SEQ ID NO: 4191 - RNA, 20 nt, Artificial Sequence
  spacer sequence ATCN PAM
acauuuccuuucugggcauc

SEQ ID NO: 4192 - RNA, 20 nt, Artificial Sequence
  spacer sequence ATCN PAM
gauaauuucucugcauuuua

SEQ ID NO: 4193 - RNA, 20 nt, Artificial Sequence
  spacer sequence ATCN PAM
gaugcccagaaaggaaaugu

SEQ ID NO: 4194 - RNA, 20 nt, Artificial Sequence
  spacer sequence ATCN PAM
uccuucgccccaacaauacc

SEQ ID NO: 4195 - RNA, 20 nt, Artificial Sequence
  spacer sequence ATCN PAM
aggacucccugcuuuguagc

SEQ ID NO: 4196 - RNA, 20 nt, Artificial Sequence
  spacer sequence ATCN PAM
uaauaauuagccgcgaauuc

SEQ ID NO: 4197 - RNA, 20 nt, Artificial Sequence
  spacer sequence ATCN PAM
cagucugucacugagacauu

SEQ ID NO: 4198 - RNA, 20 nt, Artificial Sequence
  spacer sequence ATCN PAM
cuuuccucucuguguaguug

SEQ ID NO: 4199 - RNA, 20 nt, Artificial Sequence
  spacer sequence ATCN PAM
uuauaggaaauguugguaag

SEQ ID NO: 4200 - RNA, 20 nt, Artificial Sequence
  spacer sequence ATCN PAM
cccuuucccccucccccucc

SEQ ID NO: 4201 - RNA, 20 nt, Artificial Sequence
  spacer sequence ATCN PAM
aggagaaggacuuggaaagc

SEQ ID NO: 4202 - RNA, 20 nt, Artificial Sequence
  spacer sequence ATCN PAM
ccgcacacaccucaagcgcg

SEQ ID NO: 4203 - RNA, 20 nt, Artificial Sequence
  spacer sequence ATCN PAM
caggacccgcgcuugaggug

SEQ ID NO: 4204 - RNA, 20 nt, Artificial Sequence
  spacer sequence ATCN PAM
cccaaaguaaaaaguguaag

SEQ ID NO: 4205 - RNA, 20 nt, Artificial Sequence
  spacer sequence ATCN PAM
cugcaaaugcauuucccccg

SEQ ID NO: 4206 - RNA, 20 nt, Artificial Sequence
  spacer sequence ATCN PAM
uuaugaugauaacuauuacu

SEQ ID NO: 4207 - RNA, 20 nt, Artificial Sequence
  spacer sequence ATCN PAM
uaaugaugcgggcaggcagc

SEQ ID NO: 4208 - RNA, 20 nt, Artificial Sequence
  spacer sequence ATCN PAM
ucauaaugaugcgggcaggc

SEQ ID NO: 4209 - RNA, 20 nt, Artificial Sequence
  spacer sequence ATCN PAM
caacaauaguaauaguuauc

SEQ ID NO: 4210 - RNA, 20 nt, Artificial Sequence
  spacer sequence ATCN PAM
cccucuucggccaugccccg

SEQ ID NO: 4211 - RNA, 20 nt, Artificial Sequence
  spacer sequence ATCN PAM
ccccguaugucuuuguucuu

SEQ ID NO: 4212 - RNA, 20 nt, Artificial Sequence
  spacer sequence ATCN PAM
ccgggcaggaggugggggag

SEQ ID NO: 4213 - RNA, 20 nt, Artificial Sequence
  spacer sequence ATCN PAM
agaaagcucagcgaacuuga

SEQ ID NO: 4214 - RNA, 20 nt, Artificial Sequence
  spacer sequence ATCN PAM
uguucugccuccuagcgacc

SEQ ID NO: 4215 - RNA, 20 nt, Artificial Sequence
  spacer sequence ATCN PAM
cgguccucaguaccaccccc

SEQ ID NO: 4216 - RNA, 20 nt, Artificial Sequence
  spacer sequence ATCN PAM
ugggacacucuaggcuggga

SEQ ID NO: 4217 - RNA, 20 nt, Artificial Sequence
  spacer sequence ATCN PAM
uuccgaagaagggccugacu

SEQ ID NO: 4218 - RNA, 20 nt, Artificial Sequence
  spacer sequence ATCN PAM
gacgcggcgcgcggcggugu

SEQ ID NO: 4219 - RNA, 20 nt, Artificial Sequence
  spacer sequence ATCN PAM
gcauccggcgcggccggggg

SEQ ID NO: 4220 - RNA, 20 nt, Artificial Sequence
  spacer sequence ATCN PAM
ggcgcggccgggggaguugg

SEQ ID NO: 4221 - RNA, 20 nt, Artificial Sequence
  spacer sequence ATCN PAM
cucccucgccgcucuccccc

SEQ ID NO: 4222 - RNA, 20 nt, Artificial Sequence
  spacer sequence ATCN PAM
aaaauuuaaaguaagaauca

SEQ ID NO: 4223 - RNA, 20 nt, Artificial Sequence
  spacer sequence ATCN PAM
uaaauugaguagggggggaa

SEQ ID NO: 4224 - RNA, 20 nt, Artificial Sequence
  spacer sequence ATCN PAM
ugggaccccgagcacuucac

SEQ ID NO: 4225 - RNA, 20 nt, Artificial Sequence
  spacer sequence ATCN PAM
agcgcccuuaaaaugcacac

SEQ ID NO: 4226 - RNA, 20 nt, Artificial Sequence
  spacer sequence ATCN PAM
gcugggugaaacucggcuuu

SEQ ID NO: 4227 - RNA, 20 nt, Artificial Sequence
  spacer sequence ATCN PAM
cccacccggcgcccggcgcc

SEQ ID NO: 4228 - RNA, 20 nt, Artificial Sequence
  spacer sequence ATCN PAM
ggggcugggcuggggcgcgg

SEQ ID NO: 4229 - RNA, 20 nt, Artificial Sequence
  spacer sequence ATCN PAM
cgugucugaauguuuacaag

SEQ ID NO: 4230 - RNA, 20 nt, Artificial Sequence
  spacer sequence ATCN PAM
aaauccacuuccacuuuuuu

SEQ ID NO: 4231 - RNA, 20 nt, Artificial Sequence
  spacer sequence ATCN PAM
acuuccacuuuuuuugaaaa

SEQ ID NO: 4232 - RNA, 20 nt, Artificial Sequence
  spacer sequence ATCN PAM
uccaaaaaauaguaagagga

SEQ ID NO: 4233 - RNA, 20 nt, Artificial Sequence
  spacer sequence ATCN PAM
cccucuucccccaaaccccu

SEQ ID NO: 4234 - RNA, 20 nt, Artificial Sequence
  spacer sequence ATCN PAM
agaaaaaaauuuacaaucac

SEQ ID NO: 4235 - RNA, 20 nt, Artificial Sequence
  spacer sequence ATCN PAM
cucaucuagaaaaaaauuua

SEQ ID NO: 4236 - RNA, 20 nt, Artificial Sequence
  spacer sequence ATCN PAM
cacaaucucucaucuagaaa

SEQ ID NO: 4237 - RNA, 20 nt, Artificial Sequence
  spacer sequence ATCN PAM
ccacaauagugagaaagugg

SEQ ID NO: 4238 - RNA, 20 nt, Artificial Sequence
  spacer sequence ATCN PAM
uuuuuuagacuuguacucac

SEQ ID NO: 4239 - RNA, 20 nt, Artificial Sequence
  spacer sequence ATCN PAM
uugcauuccuuuucgaaaag

SEQ ID NO: 4240 - RNA, 20 nt, Artificial Sequence
  spacer sequence ATCN PAM
ggaaccauugccguguaugc

SEQ ID NO: 4241 - RNA, 20 nt, Artificial Sequence
  spacer sequence ATCN PAM
caucuggaaccauugccgug

SEQ ID NO: 4242 - RNA, 20 nt, Artificial Sequence
  spacer sequence ATCN PAM
cuuuuaccucgacucucgga

SEQ ID NO: 4243 - RNA, 20 nt, Artificial Sequence
  spacer sequence ATCN PAM
cgagagcgcgcaggacuaga

SEQ ID NO: 4244 - RNA, 20 nt, Artificial Sequence
  spacer sequence ATCN PAM
ggagagccggguuagaaaga

SEQ ID NO: 4245 - RNA, 20 nt, Artificial Sequence
  spacer sequence ATCN PAM
ucaucagugccuuuugacau

SEQ ID NO: 4246 - RNA, 20 nt, Artificial Sequence
  spacer sequence ATCN PAM
gugccuuuugacauccaaaa

SEQ ID NO: 4247 - RNA, 20 nt, Artificial Sequence
  spacer sequence ATCN PAM
aaaauaaauuagaaauaaua

SEQ ID NO: 4248 - RNA, 20 nt, Artificial Sequence
  spacer sequence ATCN PAM
uuguauuauuucuaauuuau

SEQ ID NO: 4249 - RNA, 20 nt, Artificial Sequence
  spacer sequence ATCN PAM
ucccugcgccaucuuuguau

SEQ ID NO: 4250 - RNA, 20 nt, Artificial Sequence
  spacer sequence ATCN PAM
cucuucucucucucucccuc

SEQ ID NO: 4251 - RNA, 20 nt, Artificial Sequence
  spacer sequence ATCN PAM
cucucucucucucucccucu

SEQ ID NO: 4252 - RNA, 20 nt, Artificial Sequence
  spacer sequence ATCN PAM
agacuccugacguucaaguu

SEQ ID NO: 4253 - RNA, 20 nt, Artificial Sequence
  spacer sequence ATCN PAM
ggggcuggacaugaaaaaga

SEQ ID NO: 4254 - RNA, 20 nt, Artificial Sequence
  spacer sequence ATCN PAM
uucauuuuagaguccgcgug

SEQ ID NO: 4255 - RNA, 20 nt, Artificial Sequence
  spacer sequence ATCN PAM
cccgaaguugagagcugagc

SEQ ID NO: 4256 - RNA, 20 nt, Artificial Sequence
  spacer sequence ATCN PAM
agccuaaguuuggagggcug

SEQ ID NO: 4257 - RNA, 20 nt, Artificial Sequence
  spacer sequence ATCN PAM
gagcgccccgccaagcgacu

SEQ ID NO: 4258 - RNA, 20 nt, Artificial Sequence
  spacer sequence ATCN PAM
cucugugcuuuugcaguugc

SEQ ID NO: 4259 - RNA, 20 nt, Artificial Sequence
  spacer sequence ATCN PAM
caccaccguggucuccccgc

SEQ ID NO: 4260 - RNA, 20 nt, Artificial Sequence
  spacer sequence ATCN PAM
cacgccagagugaagcccgc

SEQ ID NO: 4261 - RNA, 20 nt, Artificial Sequence
  spacer sequence ATCN PAM
cagggggugcuguugcugua

SEQ ID NO: 4262 - RNA, 20 nt, Artificial Sequence
  spacer sequence ATCN PAM
ccccggcggcggcggcggcg

SEQ ID NO: 4263 - RNA, 20 nt, Artificial Sequence
  spacer sequence ATCN PAM
caguccgauuccaaaucugg

SEQ ID NO: 4264 - RNA, 20 nt, Artificial Sequence
  spacer sequence ATCN PAM
gacugcgaucuccccggcgg

SEQ ID NO: 4265 - RNA, 20 nt, Artificial Sequence
  spacer sequence ATCN PAM
ggaaggaguuggggggagag

SEQ ID NO: 4266 - RNA, 20 nt, Artificial Sequence
  spacer sequence ATCN PAM
accugcagcucagggucucg

SEQ ID NO: 4267 - RNA, 20 nt, Artificial Sequence
  spacer sequence ATCN PAM
cccucuucagucuaaagggu

SEQ ID NO: 4268 - RNA, 20 nt, Artificial Sequence
  spacer sequence ATCN PAM
cgcagcccugccggcaagcg

SEQ ID NO: 4269 - RNA, 20 nt, Artificial Sequence
  spacer sequence ATCN PAM
aaaccuccuuuucuuccuua

SEQ ID NO: 4270 - RNA, 20 nt, Artificial Sequence
  spacer sequence ATCN PAM
cucucaauguugagcaucaa

SEQ ID NO: 4271 - RNA, 20 nt, Artificial Sequence
  spacer sequence ATCN PAM
caguacagcccacaucucuc

SEQ ID NO: 4272 - RNA, 20 nt, Artificial Sequence
  spacer sequence ATCN PAM
ucccgcuucuuaaacagaau

SEQ ID NO: 4273 - RNA, 20 nt, Artificial Sequence
  spacer sequence ATCN PAM
cuauuccaccacagucugcu

SEQ ID NO: 4274 - RNA, 20 nt, Artificial Sequence
  spacer sequence ATCN PAM
ggcucacuauuguuaccuga

SEQ ID NO: 4275 - RNA, 20 nt, Artificial Sequence
  spacer sequence ATCN PAM
gaaaagcuugguucugaaag

SEQ ID NO: 4276 - RNA, 20 nt, Artificial Sequence
  spacer sequence ATCN PAM
auagagaagauauauaaaug

SEQ ID NO: 4277 - RNA, 20 nt, Artificial Sequence
  spacer sequence ATCN PAM
ucucuauagauggacuuuua

SEQ ID NO: 4278 - RNA, 20 nt, Artificial Sequence
  spacer sequence ATCN PAM
uacauauauauauauuucca

SEQ ID NO: 4279 - RNA, 20 nt, Artificial Sequence
  spacer sequence ATCN PAM
ucagagcgcacacaauugug

SEQ ID NO: 4280 - RNA, 20 nt, Artificial Sequence
  spacer sequence ATCN PAM
gggcugcuaucuguggcuau

SEQ ID NO: 4281 - RNA, 20 nt, Artificial Sequence
  spacer sequence ATCN PAM
guggcuauuuccaauaaaua

SEQ ID NO: 4282 - RNA, 20 nt, Artificial Sequence
  spacer sequence ATCN PAM
auaaaauguugccaguuauu

SEQ ID NO: 4283 - RNA, 20 nt, Artificial Sequence
  spacer sequence ATCN PAM
gaaacaagugcaauaacaua

SEQ ID NO: 4284 - RNA, 20 nt, Artificial Sequence
  spacer sequence ATCN PAM
uaaaacauacauuaaaaagc

SEQ ID NO: 4285 - RNA, 20 nt, Artificial Sequence
  spacer sequence ATCN PAM
ucgcugcuuaccucuccuuu

SEQ ID NO: 4286 - RNA, 20 nt, Artificial Sequence
  spacer sequence ATCN PAM
uaauaugcccagggugaaau

SEQ ID NO: 4287 - RNA, 20 nt, Artificial Sequence
  spacer sequence ATCN PAM
ggcugggggaggggcgggag

SEQ ID NO: 4288 - RNA, 20 nt, Artificial Sequence
  spacer sequence ATCN PAM
aaugccgacacacagccgug

SEQ ID NO: 4289 - RNA, 20 nt, Artificial Sequence
  spacer sequence ATCN PAM
cuccuggucgucgacccccc

SEQ ID NO: 4290 - RNA, 20 nt, Artificial Sequence
  spacer sequence ATCN PAM
agcagugcugagggaggggu

SEQ ID NO: 4291 - RNA, 20 nt, Artificial Sequence
  spacer sequence ATCN PAM
uucuuuaaacacacauacaa

SEQ ID NO: 4292 - RNA, 20 nt, Artificial Sequence
  spacer sequence ATCN PAM
cuuaaaacgacacaucuuuc

SEQ ID NO: 4293 - RNA, 20 nt, Artificial Sequence
  spacer sequence ATCN PAM
auacuuacguaauauuuuaa

SEQ ID NO: 4294 - RNA, 20 nt, Artificial Sequence
  spacer sequence ATCN PAM
uuaaucaauacuuacguaau

SEQ ID NO: 4295 - RNA, 20 nt, Artificial Sequence
  spacer sequence ATCN PAM
aagugugcgcauuuaaagug

SEQ ID NO: 4296 - RNA, 20 nt, Artificial Sequence
  spacer sequence ATCN PAM
ugcccgcggaggagacgccc

SEQ ID NO: 4297 - RNA, 20 nt, Artificial Sequence
  spacer sequence ATCN PAM
gaggcagaauauauacugca

SEQ ID NO: 4298 - RNA, 20 nt, Artificial Sequence
  spacer sequence ATCN PAM
ccguacuuaauagccaaguc

SEQ ID NO: 4299 - RNA, 20 nt, Artificial Sequence
  spacer sequence ATCN PAM
acucaacucuaaaaauacgg

SEQ ID NO: 4300 - RNA, 20 nt, Artificial Sequence
  spacer sequence ATCN PAM
auacccuaaugcagugagag

SEQ ID NO: 4301 - RNA, 20 nt, Artificial Sequence
  spacer sequence ATCN PAM
uacaggauuucauaguccuu

SEQ ID NO: 4302 - RNA, 20 nt, Artificial Sequence
  spacer sequence ATCN PAM
uguaugauuuacacucucuc

SEQ ID NO: 4303 - RNA, 20 nt, Artificial Sequence
  spacer sequence ATCN PAM
ucgguccgagggcugggacu

SEQ ID NO: 4304 - RNA, 20 nt, Artificial Sequence
  spacer sequence ATCN PAM
ccuggcgcgaggaacucggg

SEQ ID NO: 4305 - RNA, 20 nt, Artificial Sequence
  spacer sequence ATCN PAM
uccagcucagcccgaguucc

SEQ ID NO: 4306 - RNA, 20 nt, Artificial Sequence
  spacer sequence ATCN PAM
ugacagaccuuuuaacccuu

SEQ ID NO: 4307 - RNA, 20 nt, Artificial Sequence
  spacer sequence ATCN PAM
uguaguuuccauccugacag

SEQ ID NO: 4308 - RNA, 20 nt, Artificial Sequence
  spacer sequence ATCN PAM
uugagucuaugaagguguuu

SEQ ID NO: 4309 - RNA, 20 nt, Artificial Sequence
  spacer sequence ATCN PAM
uucauucagucauucacuua

SEQ ID NO: 4310 - RNA, 20 nt, Artificial Sequence
  spacer sequence ATCN PAM
uuuccuucuugauuuuuacu

SEQ ID NO: 4311 - RNA, 20 nt, Artificial Sequence
  spacer sequence ATCN PAM
agaaggaaaugauuguauuu

SEQ ID NO: 4312 - RNA, 20 nt, Artificial Sequence
  spacer sequence ATCN PAM
ucauaaaaauaaaacuuagg

SEQ ID NO: 4313 - RNA, 20 nt, Artificial Sequence
  spacer sequence ATCN PAM
aaaccuaaguuuuauuuuua

SEQ ID NO: 4314 - RNA, 20 nt, Artificial Sequence
  spacer sequence ATCN PAM
uugagacccaaaauacaaaa

SEQ ID NO: 4315 - RNA, 20 nt, Artificial Sequence
  spacer sequence ATCN PAM
cagcacuuugggaagccgag

SEQ ID NO: 4316 - RNA, 20 nt, Artificial Sequence
  spacer sequence ATCN PAM
ucccaccucggcuucccaaa

SEQ ID NO: 4317 - RNA, 20 nt, Artificial Sequence
  spacer sequence ATCN PAM
cuugaggucaggaguucaag

SEQ ID NO: 4318 - RNA, 20 nt, Artificial Sequence
  spacer sequence ATCN PAM
cuacuaaaaauacaaaaaau

SEQ ID NO: 4319 - RNA, 20 nt, Artificial Sequence
  spacer sequence ATCN PAM
cuugaaccugggggacagag

SEQ ID NO: 4320 - RNA, 20 nt, Artificial Sequence
  spacer sequence ATCN PAM
uggcucacugcaaccucugu

SEQ ID NO: 4321 - RNA, 20 nt, Artificial Sequence
  spacer sequence ATCN PAM
caucacugcacuccagcccg

SEQ ID NO: 4322 - RNA, 20 nt, Artificial Sequence
  spacer sequence ATCN PAM
cugcacuccagcccgggcaa

SEQ ID NO: 4323 - RNA, 20 nt, Artificial Sequence
  spacer sequence ATCN PAM
ucuuccacaagcaacucccu

SEQ ID NO: 4324 - RNA, 20 nt, Artificial Sequence
  spacer sequence ATCN PAM
auaccuucuacaaaggcaca

SEQ ID NO: 4325 - RNA, 20 nt, Artificial Sequence
  spacer sequence ATCN PAM
cucaaggaggcuccugggag

SEQ ID NO: 4326 - RNA, 20 nt, Artificial Sequence
  spacer sequence ATCN PAM
uucucuccaggcucccuggg

SEQ ID NO: 4327 - RNA, 20 nt, Artificial Sequence
  spacer sequence ATCN PAM
aaagaaaaaggaaaaggaaa

SEQ ID NO: 4328 - RNA, 20 nt, Artificial Sequence
  spacer sequence ATCN PAM
agaggaaaguauagacuuag

SEQ ID NO: 4329 - RNA, 20 nt, Artificial Sequence
  spacer sequence ATCN PAM
aagacacagaggugcugggc

SEQ ID NO: 4330 - RNA, 20 nt, Artificial Sequence
  spacer sequence ATCN PAM
gcacacaguagauguccaau

SEQ ID NO: 4331 - RNA, 20 nt, Artificial Sequence
  spacer sequence ATCN PAM
acugugugcugauuauugca

SEQ ID NO: 4332 - RNA, 20 nt, Artificial Sequence
  spacer sequence ATCN PAM
aagaccauuuauuggacauc

SEQ ID NO: 4333 - RNA, 20 nt, Artificial Sequence
  spacer sequence ATCN PAM
gauaaauaauaauuugauaa

SEQ ID NO: 4334 - RNA, 20 nt, Artificial Sequence
  spacer sequence ATCN PAM
gauaacuuuauuaauuuauu

SEQ ID NO: 4335 - RNA, 20 nt, Artificial Sequence
  spacer sequence ATCN PAM
aauuauuauuuaucagauaa

SEQ ID NO: 4336 - RNA, 20 nt, Artificial Sequence
  spacer sequence ATCN PAM
uaucaccacauacaugaaac

SEQ ID NO: 4337 - RNA, 20 nt, Artificial Sequence
  spacer sequence ATCN PAM
ccacauacaugaaaccaaca

SEQ ID NO: 4338 - RNA, 20 nt, Artificial Sequence
  spacer sequence ATCN PAM
aaauucuauucauuuucccc

SEQ ID NO: 4339 - RNA, 20 nt, Artificial Sequence
  spacer sequence ATCN PAM
aagccuuauuaguuuugggg

SEQ ID NO: 4340 - RNA, 20 nt, Artificial Sequence
  spacer sequence ATCN PAM
ggcaacccuauuccaagagu

SEQ ID NO: 4341 - RNA, 20 nt, Artificial Sequence
  spacer sequence ATCN PAM
cuuuuauguuuaaacacacu

SEQ ID NO: 4342 - RNA, 20 nt, Artificial Sequence
  spacer sequence ATCN PAM
uuggugggaaucacuuuuau

SEQ ID NO: 4343 - RNA, 20 nt, Artificial Sequence
  spacer sequence ATCN PAM
uuucugagcucaccauccuu

SEQ ID NO: 4344 - RNA, 20 nt, Artificial Sequence
  spacer sequence ATCN PAM
cgaauaucagagcagcugaa

SEQ ID NO: 4345 - RNA, 20 nt, Artificial Sequence
  spacer sequence ATCN PAM
gagcagcugaacaaguaaca

SEQ ID NO: 4346 - RNA, 20 nt, Artificial Sequence
  spacer sequence ATCN PAM
uguauuguuacuuguucagc

SEQ ID NO: 4347 - RNA, 20 nt, Artificial Sequence
  spacer sequence ATCN PAM
ucuccagcagcauacauuau

SEQ ID NO: 4348 - RNA, 20 nt, Artificial Sequence
  spacer sequence ATCN PAM
aauaucuuccaaauaagcca

SEQ ID NO: 4349 - RNA, 20 nt, Artificial Sequence
  spacer sequence ATCN PAM
uccaaauaagccaguaucaa

SEQ ID NO: 4350 - RNA, 20 nt, Artificial Sequence
  spacer sequence ATCN PAM
auaagcugguaucaaaugau

SEQ ID NO: 4351 - RNA, 20 nt, Artificial Sequence
  spacer sequence ATCN PAM
aaugauuucuuuuuuuuuuu

SEQ ID NO: 4352 - RNA, 20 nt, Artificial Sequence
  spacer sequence ATCN PAM
uuugauaccagcuuauugau

SEQ ID NO: 4353 - RNA, 20 nt, Artificial Sequence
  spacer sequence ATCN PAM
aaaagcaauguuaaaaaaaa

SEQ ID NO: 4354 - RNA, 20 nt, Artificial Sequence
  spacer sequence ATCN PAM
aaacaaccaaaaauaaaagg

SEQ ID NO: 4355 - RNA, 20 nt, Artificial Sequence
  spacer sequence ATCN PAM
aguuugaaauaccuuuuauu

SEQ ID NO: 4356 - RNA, 20 nt, Artificial Sequence
  spacer sequence ATCN PAM
uuuaccuuuagcaagggaau

SEQ ID NO: 4357 - RNA, 20 nt, Artificial Sequence
  spacer sequence ATCN PAM
uaaaaacaaccuucaccuau

SEQ ID NO: 4358 - RNA, 20 nt, Artificial Sequence
  spacer sequence ATCN PAM
ggucugacauuuuguacagc

SEQ ID NO: 4359 - RNA, 20 nt, Artificial Sequence
  spacer sequence ATCN PAM
cauugggcugaagcuggcug

SEQ ID NO: 4360 - RNA, 20 nt, Artificial Sequence
  spacer sequence ATCN PAM
guccagaugugaacuuguuu

SEQ ID NO: 4361 - RNA, 20 nt, Artificial Sequence
  spacer sequence ATCN PAM
ggacugauaacuugaauucu

SEQ ID NO: 4362 - RNA, 20 nt, Artificial Sequence
  spacer sequence ATCN PAM
aaaagcuuccucagcugagu

SEQ ID NO: 4363 - RNA, 20 nt, Artificial Sequence
  spacer sequence ATCN PAM
cucucucuccucuuucucuc

SEQ ID NO: 4364 - RNA, 20 nt, Artificial Sequence
  spacer sequence ATCN PAM
cuucuguuucucucucucuc

SEQ ID NO: 4365 - RNA, 20 nt, Artificial Sequence
  spacer sequence ATCN PAM
gaaacuacuaaaaacauucu

SEQ ID NO: 4366 - RNA, 20 nt, Artificial Sequence
  spacer sequence ATCN PAM
caaagaguacuuguccaaau

SEQ ID NO: 4367 - RNA, 20 nt, Artificial Sequence
  spacer sequence ATCN PAM
uggaguauguaugugugggu

SEQ ID NO: 4368 - RNA, 20 nt, Artificial Sequence
  spacer sequence ATCN PAM
agacuauaugccaaggaaug

SEQ ID NO: 4369 - RNA, 20 nt, Artificial Sequence
  spacer sequence ATCN PAM
gaagguagcacagaaugcau

SEQ ID NO: 4370 - RNA, 20 nt, Artificial Sequence
  spacer sequence ATCN PAM
gaggugcuuuauuuuuccuu

SEQ ID NO: 4371 - RNA, 20 nt, Artificial Sequence
  spacer sequence ATCN PAM
ucuuaauccugucuaccaac

SEQ ID NO: 4372 - RNA, 20 nt, Artificial Sequence
  spacer sequence ATCN PAM
uaauccugucuaccaacugu

SEQ ID NO: 4373 - RNA, 20 nt, Artificial Sequence
  spacer sequence ATCN PAM
ugucuaccaacuguguggua

SEQ ID NO: 4374 - RNA, 20 nt, Artificial Sequence
  spacer sequence ATCN PAM
uauuucauaaaagguacagc

SEQ ID NO: 4375 - RNA, 20 nt, Artificial Sequence
  spacer sequence ATCN PAM
cuugguuuguuuggaaggca

SEQ ID NO: 4376 - RNA, 20 nt, Artificial Sequence
  spacer sequence ATCN PAM
ugaguuacccaaggacugua

SEQ ID NO: 4377 - RNA, 20 nt, Artificial Sequence
  spacer sequence ATCN PAM
gucaacagucaaagucaagc

SEQ ID NO: 4378 - RNA, 20 nt, Artificial Sequence
  spacer sequence ATCN PAM
aucugucaacagucaaaguc

SEQ ID NO: 4379 - RNA, 20 nt, Artificial Sequence
  spacer sequence ATCN PAM
gguggaccagaguuuugaaa

SEQ ID NO: 4380 - RNA, 20 nt, Artificial Sequence
  spacer sequence ATCN PAM
cccauaaacauuaguuucau

SEQ ID NO: 4381 - RNA, 20 nt, Artificial Sequence
  spacer sequence ATCN PAM
ucacccauaaacauuaguuu

SEQ ID NO: 4382 - RNA, 20 nt, Artificial Sequence
  spacer sequence ATCN PAM
gccacaucaucacccauaaa

SEQ ID NO: 4383 - RNA, 20 nt, Artificial Sequence
  spacer sequence ATCN PAM
uuguuuuccucaugcauaua

SEQ ID NO: 4384 - RNA, 20 nt, Artificial Sequence
  spacer sequence ATCN PAM
uuaccaccaccauccuuguu

SEQ ID NO: 4385 - RNA, 20 nt, Artificial Sequence
  spacer sequence ATCN PAM
ucauuaccaccaccauccuu

SEQ ID NO: 4386 - RNA, 20 nt, Artificial Sequence
  spacer sequence ATCN PAM
ucaucauuaccaccaccauc

SEQ ID NO: 4387 - RNA, 20 nt, Artificial Sequence
  spacer sequence ATCN PAM
ccaccaucaucaucauuacc

SEQ ID NO: 4388 - RNA, 20 nt, Artificial Sequence
  spacer sequence ATCN PAM
ccaccaccgccaccucuauc

SEQ ID NO: 4389 - RNA, 20 nt, Artificial Sequence
  spacer sequence ATCN PAM
ucaccaccaccgccaccucu

SEQ ID NO: 4390 - RNA, 20 nt, Artificial Sequence
  spacer sequence ATCN PAM
ucaucaccaccaccgccacc

SEQ ID NO: 4391 - RNA, 20 nt, Artificial Sequence
  spacer sequence ATCN PAM
ccaccaguaucaucaucacc

SEQ ID NO: 4392 - RNA, 20 nt, Artificial Sequence
  spacer sequence ATCN PAM
ccaucaccaccaguaucauc

SEQ ID NO: 4393 - RNA, 20 nt, Artificial Sequence
  spacer sequence ATCN PAM
gcacuaccuucuccaucacc

SEQ ID NO: 4394 - RNA, 20 nt, Artificial Sequence
  spacer sequence ATCN PAM
uauuucuacugcccucuggu

SEQ ID NO: 4395 - RNA, 20 nt, Artificial Sequence
  spacer sequence ATCN PAM
uucauccuauuucuacugcc

SEQ ID NO: 4396 - RNA, 20 nt, Artificial Sequence
  spacer sequence ATCN PAM
uguugcuuuagaaaagccac

SEQ ID NO: 4397 - RNA, 20 nt, Artificial Sequence
  spacer sequence ATCN PAM
gguggcggacaaguuaaagu

SEQ ID NO: 4398 - RNA, 20 nt, Artificial Sequence
  spacer sequence ATCN PAM
agccaaggucacauuuuggu

SEQ ID NO: 4399 - RNA, 20 nt, Artificial Sequence
  spacer sequence ATCN PAM
gcauucagaaaucuuuucac

SEQ ID NO: 4400 - RNA, 20 nt, Artificial Sequence
  spacer sequence ATCN PAM
uuucacuuucagaagagcag

SEQ ID NO: 4401 - RNA, 20 nt, Artificial Sequence
  spacer sequence ATCN PAM
cagucagagggaauagagga

SEQ ID NO: 4402 - RNA, 20 nt, Artificial Sequence
  spacer sequence ATCN PAM
gaccaccaaauuaggccacu

SEQ ID NO: 4403 - RNA, 20 nt, Artificial Sequence
  spacer sequence ATCN PAM
aagccugugguccucagugg

SEQ ID NO: 4404 - RNA, 20 nt, Artificial Sequence
  spacer sequence ATCN PAM
uucucacuucacaauagcuu

SEQ ID NO: 4405 - RNA, 20 nt, Artificial Sequence
  spacer sequence ATCN PAM
aaacaugucaccaggcucaa

SEQ ID NO: 4406 - RNA, 20 nt, Artificial Sequence
  spacer sequence ATCN PAM
cacacaaaaaaagucuuaau

SEQ ID NO: 4407 - RNA, 20 nt, Artificial Sequence
  spacer sequence ATCN PAM
cucugucaucuuucuuuggc

SEQ ID NO: 4408 - RNA, 20 nt, Artificial Sequence
  spacer sequence ATCN PAM
uucuuuggcagcuuaguaga

SEQ ID NO: 4409 - RNA, 20 nt, Artificial Sequence
  spacer sequence ATCN PAM
cucuauucucccauucccag

SEQ ID NO: 4410 - RNA, 20 nt, Artificial Sequence
  spacer sequence ATCN PAM
uugcacaaguucaguuaucu

SEQ ID NO: 4411 - RNA, 20 nt, Artificial Sequence
  spacer sequence ATCN PAM
gaaccuccagauuccuauaa

SEQ ID NO: 4412 - RNA, 20 nt, Artificial Sequence
  spacer sequence ATCN PAM
ggagguucagauaacugaac

SEQ ID NO: 4413 - RNA, 20 nt, Artificial Sequence
  spacer sequence ATCN PAM
gguccuaagaauuguuauuc

SEQ ID NO: 4414 - RNA, 20 nt, Artificial Sequence
  spacer sequence ATCN PAM
uauguuugcacagugcagug

SEQ ID NO: 4415 - RNA, 20 nt, Artificial Sequence
  spacer sequence ATCN PAM
aaaagcagggaccacaucuu

SEQ ID NO: 4416 - RNA, 20 nt, Artificial Sequence
  spacer sequence ATCN PAM
uccaaaagcagggaccacau

SEQ ID NO: 4417 - RNA, 20 nt, Artificial Sequence
  spacer sequence ATCN PAM
uauuuuguauagcccuagcu

SEQ ID NO: 4418 - RNA, 20 nt, Artificial Sequence
  spacer sequence ATCN PAM
ucgcuauagguuuagaaccg

SEQ ID NO: 4419 - RNA, 20 nt, Artificial Sequence
  spacer sequence ATCN PAM
augugaggcaacacagcucu

SEQ ID NO: 4420 - RNA, 20 nt, Artificial Sequence
  spacer sequence ATCN PAM
ggugucagagugaccagagc

SEQ ID NO: 4421 - RNA, 20 nt, Artificial Sequence
  spacer sequence ATCN PAM
aguuuuucuccagaaaguac

SEQ ID NO: 4422 - RNA, 20 nt, Artificial Sequence
  spacer sequence ATCN PAM
augaccagaccucauuauuu

SEQ ID NO: 4423 - RNA, 20 nt, Artificial Sequence
  spacer sequence ATCN PAM
gugaucaucuaucucuauca

SEQ ID NO: 4424 - RNA, 20 nt, Artificial Sequence
  spacer sequence ATCN PAM
cagauaucuaugaccagacc

SEQ ID NO: 4425 - RNA, 20 nt, Artificial Sequence
  spacer sequence ATCN PAM
ucuaucucuaucacaguuuu

SEQ ID NO: 4426 - RNA, 20 nt, Artificial Sequence
  spacer sequence ATCN PAM
aucucuaucacaguuuuuau

SEQ ID NO: 4427 - RNA, 20 nt, Artificial Sequence
  spacer sequence ATCN PAM
cuaucacaguuuuuauaaug

SEQ ID NO: 4428 - RNA, 20 nt, Artificial Sequence
  spacer sequence ATCN PAM
caguuuuuauaauguuuuca

SEQ ID NO: 4429 - RNA, 20 nt, Artificial Sequence
  spacer sequence ATCN PAM
uggcucacugcaacuucugc

SEQ ID NO: 4430 - RNA, 20 nt, Artificial Sequence
  spacer sequence ATCN PAM
cagcuacucaggagguugag

SEQ ID NO: 4431 - RNA, 20 nt, Artificial Sequence
  spacer sequence ATCN PAM
cgugaggucaggaguucgag

SEQ ID NO: 4432 - RNA, 20 nt, Artificial Sequence
  spacer sequence ATCN PAM
acccaccucagucucccaaa

SEQ ID NO: 4433 - RNA, 20 nt, Artificial Sequence
  spacer sequence ATCN PAM
cagcacuuugggagacugag

SEQ ID NO: 4434 - RNA, 20 nt, Artificial Sequence
  spacer sequence ATCN PAM
aggaaugaauuccacaaaua

SEQ ID NO: 4435 - RNA, 20 nt, Artificial Sequence
  spacer sequence ATCN PAM
gggggaaacaauuacauguc

SEQ ID NO: 4436 - RNA, 20 nt, Artificial Sequence
  spacer sequence ATCN PAM
guguauauauguguguauaa

SEQ ID NO: 4437 - RNA, 20 nt, Artificial Sequence
  spacer sequence ATCN PAM
uuguauauaugucauaaaag

SEQ ID NO: 4438 - RNA, 20 nt, Artificial Sequence
  spacer sequence ATCN PAM
cccaaguccuaaguuguuag

SEQ ID NO: 4439 - RNA, 20 nt, Artificial Sequence
  spacer sequence ATCN PAM
uucucucccucagcacagag

SEQ ID NO: 4440 - RNA, 20 nt, Artificial Sequence
  spacer sequence ATCN PAM
aagugguuuacuuuguaagu

SEQ ID NO: 4441 - RNA, 20 nt, Artificial Sequence
  spacer sequence ATCN PAM
uaucuaccauagacaaaaug

SEQ ID NO: 4442 - RNA, 20 nt, Artificial Sequence
  spacer sequence ATCN PAM
accauagacaaaauguccuu

SEQ ID NO: 4443 - RNA, 20 nt, Artificial Sequence
  spacer sequence ATCN PAM
gagaauugagaacaauaaaa

SEQ ID NO: 4444 - RNA, 20 nt, Artificial Sequence
  spacer sequence ATCN PAM
uaacagaguaacucugagag

SEQ ID NO: 4445 - RNA, 20 nt, Artificial Sequence
  spacer sequence ATCN PAM
gccuccagaauuagucucuc

SEQ ID NO: 4446 - RNA, 20 nt, Artificial Sequence
  spacer sequence ATCN PAM
agaccugucuagcugguuuu

SEQ ID NO: 4447 - RNA, 20 nt, Artificial Sequence
  spacer sequence ATCN PAM
cuguuuggggguguauggga

SEQ ID NO: 4448 - RNA, 20 nt, Artificial Sequence
  spacer sequence ATCN PAM
guauaugcucuugacauaug

SEQ ID NO: 4449 - RNA, 20 nt, Artificial Sequence
  spacer sequence ATCN PAM
uaugucaagagcauauacug

SEQ ID NO: 4450 - RNA, 20 nt, Artificial Sequence
  spacer sequence ATCN PAM
ugaacucagagcuuaauuag

SEQ ID NO: 4451 - RNA, 20 nt, Artificial Sequence
  spacer sequence ATCN PAM
acuaauuaagcucugaguuc

SEQ ID NO: 4452 - RNA, 20 nt, Artificial Sequence
  spacer sequence ATCN PAM
uuagcaaaacccccuuaugu

SEQ ID NO: 4453 - RNA, 20 nt, Artificial Sequence
  spacer sequence ATCN PAM
auaaucuuuagcaaaacccc

SEQ ID NO: 4454 - RNA, 20 nt, Artificial Sequence
  spacer sequence ATCN PAM
uuugcuuguauugauuuaaa

SEQ ID NO: 4455 - RNA, 20 nt, Artificial Sequence
  spacer sequence ATCN PAM
auacaagcaaaagaucuaua

SEQ ID NO: 4456 - RNA, 20 nt, Artificial Sequence
  spacer sequence ATCN PAM
acucuccuucaugggaacau

SEQ ID NO: 4457 - RNA, 20 nt, Artificial Sequence
  spacer sequence ATCN PAM
aacagaggcagccuccaacc

SEQ ID NO: 4458 - RNA, 20 nt, Artificial Sequence
  spacer sequence ATCN PAM
uauaauuuuuuuuuaaaaga

SEQ ID NO: 4459 - RNA, 20 nt, Artificial Sequence
  spacer sequence ATCN PAM
uggaauucugaagacauuac

SEQ ID NO: 4460 - RNA, 20 nt, Artificial Sequence
  spacer sequence ATCN PAM
aucuuggaauucugaagaca

SEQ ID NO: 4461 - RNA, 20 nt, Artificial Sequence
  spacer sequence ATCN PAM
uuucuuuccacugauguuca

SEQ ID NO: 4462 - RNA, 20 nt, Artificial Sequence
  spacer sequence ATCN PAM
guggaaagaaacgauccauc

SEQ ID NO: 4463 - RNA, 20 nt, Artificial Sequence
  spacer sequence ATCN PAM
agccccuuaaaugugaacau

SEQ ID NO: 4464 - RNA, 20 nt, Artificial Sequence
  spacer sequence ATCN PAM
cuuuaacuuaaugugaccaa

SEQ ID NO: 4465 - RNA, 20 nt, Artificial Sequence
  spacer sequence ATCN PAM
uacugaggguaaaauagcug

SEQ ID NO: 4466 - RNA, 20 nt, Artificial Sequence
  spacer sequence ATCN PAM
ugucaaucuuacugagggua

SEQ ID NO: 4467 - RNA, 20 nt, Artificial Sequence
  spacer sequence ATCN PAM
gauuuguaguaacaaccaaa

SEQ ID NO: 4468 - RNA, 20 nt, Artificial Sequence
  spacer sequence ATCN PAM
gauaucaugucaaucuuacu

SEQ ID NO: 4469 - RNA, 20 nt, Artificial Sequence
  spacer sequence ATCN PAM
ucuuccuucuaaaauguuua

SEQ ID NO: 4470 - RNA, 20 nt, Artificial Sequence
  spacer sequence ATCN PAM
auagugacaaucuucuuccu

SEQ ID NO: 4471 - RNA, 20 nt, Artificial Sequence
  spacer sequence ATCN PAM
ggggcuuuuuugucccuuuu

SEQ ID NO: 4472 - RNA, 20 nt, Artificial Sequence
  spacer sequence ATCN PAM
uuuauuaauuuuuuuaggaa

SEQ ID NO: 4473 - RNA, 20 nt, Artificial Sequence
  spacer sequence ATCN PAM
cucauuccuaaaaaaauuaa

SEQ ID NO: 4474 - RNA, 20 nt, Artificial Sequence
  spacer sequence ATCN PAM
ugagguacauuuuuuucaac

SEQ ID NO: 4475 - RNA, 20 nt, Artificial Sequence
  spacer sequence ATCN PAM
uauuauuucagugcaaguuu

SEQ ID NO: 4476 - RNA, 20 nt, Artificial Sequence
  spacer sequence ATCN PAM
ucuuauuauuucagugcaag

SEQ ID NO: 4477 - RNA, 20 nt, Artificial Sequence
  spacer sequence ATCN PAM
cucugcuuguuacucuggcc

SEQ ID NO: 4478 - RNA, 20 nt, Artificial Sequence
  spacer sequence ATCN PAM
ccuaauguuacacugagagg

SEQ ID NO: 4479 - RNA, 20 nt, Artificial Sequence
  spacer sequence ATCN PAM
cccauuagucaccacagcac

SEQ ID NO: 4480 - RNA, 20 nt, Artificial Sequence
  spacer sequence ATCN PAM
uucugcuugcuguuugggca

SEQ ID NO: 4481 - RNA, 20 nt, Artificial Sequence
  spacer sequence ATCN PAM
auaauacuggagacauaaau

SEQ ID NO: 4482 - RNA, 20 nt, Artificial Sequence
  spacer sequence ATCN PAM
ucuugauuuugauaggcauu

SEQ ID NO: 4483 - RNA, 20 nt, Artificial Sequence
  spacer sequence ATCN PAM
agaggauaaaaauaauuuuu

SEQ ID NO: 4484 - RNA, 20 nt, Artificial Sequence
  spacer sequence ATCN PAM
aaaucaagaggauaaaaaua

SEQ ID NO: 4485 - RNA, 20 nt, Artificial Sequence
  spacer sequence ATCN PAM
uacccuuucuaugcaaaugc

SEQ ID NO: 4486 - RNA, 20 nt, Artificial Sequence
  spacer sequence ATCN PAM
ugaaggaugugcugaugauu

SEQ ID NO: 4487 - RNA, 20 nt, Artificial Sequence
  spacer sequence ATCN PAM
uucaugauaguggaauucca

SEQ ID NO: 4488 - RNA, 20 nt, Artificial Sequence
  spacer sequence ATCN PAM
gcacauccuucaugauagug

SEQ ID NO: 4489 - RNA, 20 nt, Artificial Sequence
  spacer sequence ATCN PAM
ucagcacauccuucaugaua

SEQ ID NO: 4490 - RNA, 20 nt, Artificial Sequence
  spacer sequence ATCN PAM
caagucuauuguacuuaauu

SEQ ID NO: 4491 - RNA, 20 nt, Artificial Sequence
  spacer sequence ATCN PAM
ucaccagaaccucuuucuua

SEQ ID NO: 4492 - RNA, 20 nt, Artificial Sequence
  spacer sequence ATCN PAM
ugcuuccucccuguaucuuc

SEQ ID NO: 4493 - RNA, 20 nt, Artificial Sequence
  spacer sequence ATCN PAM
ucccugaauguuccuguguc

SEQ ID NO: 4494 - RNA, 20 nt, Artificial Sequence
  spacer sequence ATCN PAM
ccaacuaaagaguauaugaa

SEQ ID NO: 4495 - RNA, 20 nt, Artificial Sequence
  spacer sequence ATCN PAM
cucacuaaacugaaaccccu

SEQ ID NO: 4496 - RNA, 20 nt, Artificial Sequence
  spacer sequence ATCN PAM
ccaccucaagaccaaggugc

SEQ ID NO: 4497 - RNA, 20 nt, Artificial Sequence
  spacer sequence ATCN PAM
uaucuccaccucaagaccaa

SEQ ID NO: 4498 - RNA, 20 nt, Artificial Sequence
  spacer sequence ATCN PAM
aaucuuaucuccaccucaag

SEQ ID NO: 4499 - RNA, 20 nt, Artificial Sequence
  spacer sequence ATCN PAM
uaauugaaauuacacccaga

SEQ ID NO: 4500 - RNA, 20 nt, Artificial Sequence
  spacer sequence ATCN PAM
ggcauccagaaccaaacagg

SEQ ID NO: 4501 - RNA, 20 nt, Artificial Sequence
  spacer sequence ATCN PAM
agaaccaaacaggccugagu

SEQ ID NO: 4502 - RNA, 20 nt, Artificial Sequence
  spacer sequence ATCN PAM
ucuuuguggaagcuguccau

SEQ ID NO: 4503 - RNA, 20 nt, Artificial Sequence
  spacer sequence ATCN PAM
gucaagaagggcugaaagaa

SEQ ID NO: 4504 - RNA, 20 nt, Artificial Sequence
  spacer sequence ATCN PAM
aagguauccuuggaacucag

SEQ ID NO: 4505 - RNA, 20 nt, Artificial Sequence
  spacer sequence ATCN PAM
uuggaacucagagccaauaa

SEQ ID NO: 4506 - RNA, 20 nt, Artificial Sequence
  spacer sequence ATCN PAM
aaagguacacuacacauuug

SEQ ID NO: 4507 - RNA, 20 nt, Artificial Sequence
  spacer sequence ATCN PAM
uaagcaaagaacaaaugugu

SEQ ID NO: 4508 - RNA, 20 nt, Artificial Sequence
  spacer sequence ATCN PAM
uuuaaaacccuaguuccaug

SEQ ID NO: 4509 - RNA, 20 nt, Artificial Sequence
  spacer sequence ATCN PAM
auuggguggcuuuuccucgc

SEQ ID NO: 4510 - RNA, 20 nt, Artificial Sequence
  spacer sequence ATCN PAM
gcauagacuuacuuauucau

SEQ ID NO: 4511 - RNA, 20 nt, Artificial Sequence
  spacer sequence ATCN PAM
auuuucaaggaaucagggac

SEQ ID NO: 4512 - RNA, 20 nt, Artificial Sequence
  spacer sequence ATCN PAM
gggacuuaguccuauaacuu

SEQ ID NO: 4513 - RNA, 20 nt, Artificial Sequence
  spacer sequence ATCN PAM
uaaaacaaaacaaaaacaaa

SEQ ID NO: 4514 - RNA, 20 nt, Artificial Sequence
  spacer sequence ATCN PAM
uugcaaggaagcaugaaauu

SEQ ID NO: 4515 - RNA, 20 nt, Artificial Sequence
  spacer sequence ATCN PAM
uauaggagcagugacuaaua

SEQ ID NO: 4516 - RNA, 20 nt, Artificial Sequence
  spacer sequence ATCN PAM
uuuuucauguuuuaaaggag

SEQ ID NO: 4517 - RNA, 20 nt, Artificial Sequence
  spacer sequence ATCN PAM
uccuuuaaaacaugaaaaag

SEQ ID NO: 4518 - RNA, 20 nt, Artificial Sequence
  spacer sequence ATCN PAM
caggaaccugcaggaggcac

SEQ ID NO: 4519 - RNA, 20 nt, Artificial Sequence
  spacer sequence ATCN PAM
cucagaaauuugcauauuua

SEQ ID NO: 4520 - RNA, 20 nt, Artificial Sequence
  spacer sequence ATCN PAM
cagguuguccaagaaaggga

SEQ ID NO: 4521 - RNA, 20 nt, Artificial Sequence
  spacer sequence ATCN PAM
aaaugcuucugaauuuuauu

SEQ ID NO: 4522 - RNA, 20 nt, Artificial Sequence
  spacer sequence ATCN PAM
gguuaauaugugaaauaaau

SEQ ID NO: 4523 - RNA, 20 nt, Artificial Sequence
  spacer sequence ATCN PAM
ggaaauuugcuuuuaucuca

SEQ ID NO: 4524 - RNA, 20 nt, Artificial Sequence
  spacer sequence ATCN PAM
caaacccuuuaaagaugcau

SEQ ID NO: 4525 - RNA, 20 nt, Artificial Sequence
  spacer sequence ATCN PAM
uuaaaggguuugagauaaaa

SEQ ID NO: 4526 - RNA, 20 nt, Artificial Sequence
  spacer sequence ATCN PAM
cuauguaacaugcaucuuua

SEQ ID NO: 4527 - RNA, 20 nt, Artificial Sequence
  spacer sequence ATCN PAM
uggugaguuuuuuuuuuuuu

SEQ ID NO: 4528 - RNA, 20 nt, Artificial Sequence
  spacer sequence ATCN PAM
caaacaccauuuucaaagaa

SEQ ID NO: 4529 - RNA, 20 nt, Artificial Sequence
  spacer sequence ATCN PAM
uuagguaaccucuaggaaau

SEQ ID NO: 4530 - RNA, 20 nt, Artificial Sequence
  spacer sequence ATCN PAM
auuaaaggaaaauuuuguga

SEQ ID NO: 4531 - RNA, 20 nt, Artificial Sequence
  spacer sequence ATCN PAM
aaauguccagucuacacuau

SEQ ID NO: 4532 - RNA, 20 nt, Artificial Sequence
  spacer sequence ATCN PAM
gauggccauagcucuauagu

SEQ ID NO: 4533 - RNA, 20 nt, Artificial Sequence
  spacer sequence ATCN PAM
gauuucaaugugccuaacuu

SEQ ID NO: 4534 - RNA, 20 nt, Artificial Sequence
  spacer sequence ATCN PAM
guaauagagugacuauagag

SEQ ID NO: 4535 - RNA, 20 nt, Artificial Sequence
  spacer sequence ATCN PAM
uaauaugaaaaucuguaaua

SEQ ID NO: 4536 - RNA, 20 nt, Artificial Sequence
  spacer sequence ATCN PAM
uauuauucuguucugucagc

SEQ ID NO: 4537 - RNA, 20 nt, Artificial Sequence
  spacer sequence ATCN PAM
caggucugaauuauaucaua

SEQ ID NO: 4538 - RNA, 20 nt, Artificial Sequence
  spacer sequence ATCN PAM
aauggguugaggaggagucc

SEQ ID NO: 4539 - RNA, 20 nt, Artificial Sequence
  spacer sequence ATCN PAM
gagcaaggacuccuccucaa

SEQ ID NO: 4540 - RNA, 20 nt, Artificial Sequence
  spacer sequence ATCN PAM
aaucacaaaaacuguuaaaa

SEQ ID NO: 4541 - RNA, 20 nt, Artificial Sequence
  spacer sequence ATCN PAM
caaaaacuguuaaaacuugu

SEQ ID NO: 4542 - RNA, 20 nt, Artificial Sequence
  spacer sequence ATCN PAM
caucaaaucacauacacuuu

SEQ ID NO: 4543 - RNA, 20 nt, Artificial Sequence
  spacer sequence ATCN PAM
aaucacauacacuuuuauug

SEQ ID NO: 4544 - RNA, 20 nt, Artificial Sequence
  spacer sequence ATCN PAM
cauacacuuuuauugaaauu

SEQ ID NO: 4545 - RNA, 20 nt, Artificial Sequence
  spacer sequence ATCN PAM
auuucaacuuuagaauuuaa

SEQ ID NO: 4546 - RNA, 20 nt, Artificial Sequence
  spacer sequence ATCN PAM
agaguuuuuaauguacaccu

SEQ ID NO: 4547 - RNA, 20 nt, Artificial Sequence
  spacer sequence ATCN PAM
aggcuugccuugguggcuca

SEQ ID NO: 4548 - RNA, 20 nt, Artificial Sequence
  spacer sequence ATCN PAM
uccccaaggccccacacucc

SEQ ID NO: 4549 - RNA, 20 nt, Artificial Sequence
  spacer sequence ATCN PAM
guuuuaggaauauaagcucu

SEQ ID NO: 4550 - RNA, 20 nt, Artificial Sequence
  spacer sequence ATCN PAM
caccguggcuacauacugaa

SEQ ID NO: 4551 - RNA, 20 nt, Artificial Sequence
  spacer sequence ATCN PAM
gaauauggaaaagaaguaca

SEQ ID NO: 4552 - RNA, 20 nt, Artificial Sequence
  spacer sequence ATCN PAM
uuacagcuacagcaaagugg

SEQ ID NO: 4553 - RNA, 20 nt, Artificial Sequence
  spacer sequence ATCN PAM
gcaccauccaggaaucuugu

SEQ ID NO: 4554 - RNA, 20 nt, Artificial Sequence
  spacer sequence ATCN PAM
aggaaucuuguauccugugu

SEQ ID NO: 4555 - RNA, 20 nt, Artificial Sequence
  spacer sequence ATCN PAM
uguauccuguguguugagcu

SEQ ID NO: 4556 - RNA, 20 nt, Artificial Sequence
  spacer sequence ATCN PAM
uguguguugagcucugaccu

SEQ ID NO: 4557 - RNA, 20 nt, Artificial Sequence
  spacer sequence ATCN PAM
accaguuucucucccuuucu

SEQ ID NO: 4558 - RNA, 20 nt, Artificial Sequence
  spacer sequence ATCN PAM
auuucuaauuaguucugccu

SEQ ID NO: 4559 - RNA, 20 nt, Artificial Sequence
  spacer sequence ATCN PAM
cgauauuaaugguaccaacc

SEQ ID NO: 4560 - RNA, 20 nt, Artificial Sequence
  spacer sequence ATCN PAM
ggaucuauuucuaauuaguu

SEQ ID NO: 4561 - RNA, 20 nt, Artificial Sequence
  spacer sequence ATCN PAM
cucuauaugaucaggagaau

SEQ ID NO: 4562 - RNA, 20 nt, Artificial Sequence
  spacer sequence ATCN PAM
uauagagugaugggugcuug

SEQ ID NO: 4563 - RNA, 20 nt, Artificial Sequence
  spacer sequence ATCN PAM
ggagaauuuuuaaaccccua

SEQ ID NO: 4564 - RNA, 20 nt, Artificial Sequence
  spacer sequence ATCN PAM
auugaaucaagagacuguuu

SEQ ID NO: 4565 - RNA, 20 nt, Artificial Sequence
  spacer sequence ATCN PAM
agagacuguuugaucuuauc

SEQ ID NO: 4566 - RNA, 20 nt, Artificial Sequence
  spacer sequence ATCN PAM
aacagucucuugauucaaua

SEQ ID NO: 4567 - RNA, 20 nt, Artificial Sequence
  spacer sequence ATCN PAM
uaucugcaucugugagcuga

SEQ ID NO: 4568 - RNA, 20 nt, Artificial Sequence
  spacer sequence ATCN PAM
gcaucugugagcugacuguc

SEQ ID NO: 4569 - RNA, 20 nt, Artificial Sequence
  spacer sequence ATCN PAM
gugagcugacugucaaccug

SEQ ID NO: 4570 - RNA, 20 nt, Artificial Sequence
  spacer sequence ATCN PAM
ucuauaguagcuguaucaag

SEQ ID NO: 4571 - RNA, 20 nt, Artificial Sequence
  spacer sequence ATCN PAM
auaguagcuguaucaagcug

SEQ ID NO: 4572 - RNA, 20 nt, Artificial Sequence
  spacer sequence ATCN PAM
agcugggaugaucuguuaau

SEQ ID NO: 4573 - RNA, 20 nt, Artificial Sequence
  spacer sequence ATCN PAM
cagcuugauacagcuacuau

SEQ ID NO: 4574 - RNA, 20 nt, Artificial Sequence
  spacer sequence ATCN PAM
ucccagcuugauacagcuac

SEQ ID NO: 4575 - RNA, 20 nt, Artificial Sequence
  spacer sequence ATCN PAM
guuaauucuaaauuuauuaa

SEQ ID NO: 4576 - RNA, 20 nt, Artificial Sequence
  spacer sequence ATCN PAM
uguuuaaucuaguguagccc

SEQ ID NO: 4577 - RNA, 20 nt, Artificial Sequence
  spacer sequence ATCN PAM
aguguagcccgcauuuauuu

SEQ ID NO: 4578 - RNA, 20 nt, Artificial Sequence
  spacer sequence ATCN PAM
uucuuuaagauauggcugug

SEQ ID NO: 4579 - RNA, 20 nt, Artificial Sequence
  spacer sequence ATCN PAM
uaaagaaggauuuagucuug

SEQ ID NO: 4580 - RNA, 20 nt, Artificial Sequence
  spacer sequence ATCN PAM
uaaugaaacccacauuagcu

SEQ ID NO: 4581 - RNA, 20 nt, Artificial Sequence
  spacer sequence ATCN PAM
auagccuguuaggguagcca

SEQ ID NO: 4582 - RNA, 20 nt, Artificial Sequence
  spacer sequence ATCN PAM
gacauccauagccuguuagg

SEQ ID NO: 4583 - RNA, 20 nt, Artificial Sequence
  spacer sequence ATCN PAM
caggcacucuccuaggcuga

SEQ ID NO: 4584 - RNA, 20 nt, Artificial Sequence
  spacer sequence ATCN PAM
guuagaggacuccuucccuu

SEQ ID NO: 4585 - RNA, 20 nt, Artificial Sequence
  spacer sequence ATCN PAM
gucuuucuggcuuuggacca

SEQ ID NO: 4586 - RNA, 20 nt, Artificial Sequence
  spacer sequence ATCN PAM
auaaggaucagcuauugcug

SEQ ID NO: 4587 - RNA, 20 nt, Artificial Sequence
  spacer sequence ATCN PAM
uuauugauucagaaguuuga

SEQ ID NO: 4588 - RNA, 20 nt, Artificial Sequence
  spacer sequence ATCN PAM
gcuauugcuggaaugaauga

SEQ ID NO: 4589 - RNA, 20 nt, Artificial Sequence
  spacer sequence ATCN PAM
uucauuccagcaauagcuga

SEQ ID NO: 4590 - RNA, 20 nt, Artificial Sequence
  spacer sequence ATCN PAM
gaagacagacuaacauauua

SEQ ID NO: 4591 - RNA, 20 nt, Artificial Sequence
  spacer sequence ATCN PAM
uuuuuuuaucugaagacaga

SEQ ID NO: 4592 - RNA, 20 nt, Artificial Sequence
  spacer sequence ATCN PAM
aucucuucuacuugcccauu

SEQ ID NO: 4593 - RNA, 20 nt, Artificial Sequence
  spacer sequence ATCN PAM
cuucuacuugcccauuacug

SEQ ID NO: 4594 - RNA, 20 nt, Artificial Sequence
  spacer sequence ATCN PAM
guaaugggcaaguagaagag

SEQ ID NO: 4595 - RNA, 20 nt, Artificial Sequence
  spacer sequence ATCN PAM
acauauucauagcuuuucuu

SEQ ID NO: 4596 - RNA, 20 nt, Artificial Sequence
  spacer sequence ATCN PAM
ggcacgugguuaccaaaaaa

SEQ ID NO: 4597 - RNA, 20 nt, Artificial Sequence
  spacer sequence ATCN PAM
cucuaauguagccuaauaac

SEQ ID NO: 4598 - RNA, 20 nt, Artificial Sequence
  spacer sequence ATCN PAM
gaaugcuaaaauuguuauua

SEQ ID NO: 4599 - RNA, 20 nt, Artificial Sequence
  spacer sequence ATCN PAM
cuucaucugaaugcuaaaau

SEQ ID NO: 4600 - RNA, 20 nt, Artificial Sequence
  spacer sequence ATCN PAM
aauagaaaaggcagucacag

SEQ ID NO: 4601 - RNA, 20 nt, Artificial Sequence
  spacer sequence ATCN PAM
aaucuaauagaaaaggcagu

SEQ ID NO: 4602 - RNA, 20 nt, Artificial Sequence
  spacer sequence ATCN PAM
cugccucgaaggcacccacu

SEQ ID NO: 4603 - RNA, 20 nt, Artificial Sequence
  spacer sequence ATCN PAM
aucugugaggcugcuaccga

SEQ ID NO: 4604 - RNA, 20 nt, Artificial Sequence
  spacer sequence ATCN PAM
gugaggcugcuaccgacuca

SEQ ID NO: 4605 - RNA, 20 nt, Artificial Sequence
  spacer sequence ATCN PAM
ggugccagccugcuuuccac

SEQ ID NO: 4606 - RNA, 20 nt, Artificial Sequence
  spacer sequence ATCN PAM
auguugacuaugaagcaaaa

SEQ ID NO: 4607 - RNA, 20 nt, Artificial Sequence
  spacer sequence ATCN PAM
aggcagaacggagcgccucg

SEQ ID NO: 4608 - RNA, 20 nt, Artificial Sequence
  spacer sequence ATCN PAM
uuuccauauacugaaaugug

SEQ ID NO: 4609 - RNA, 20 nt, Artificial Sequence
  spacer sequence ATCN PAM
agccucuuaugcaaucauaa

SEQ ID NO: 4610 - RNA, 20 nt, Artificial Sequence
  spacer sequence ATCN PAM
uaaaucuacauaggagucuu

SEQ ID NO: 4611 - RNA, 20 nt, Artificial Sequence
  spacer sequence ATCN PAM
acauaggagucuugugauuu

SEQ ID NO: 4612 - RNA, 20 nt, Artificial Sequence
  spacer sequence ATCN PAM
caagacuccuauguagauuu

SEQ ID NO: 4613 - RNA, 20 nt, Artificial Sequence
  spacer sequence ATCN PAM
aaucacaagacuccuaugua

SEQ ID NO: 4614 - RNA, 20 nt, Artificial Sequence
  spacer sequence ATCN PAM
uuggaggugaaugaaauauc

SEQ ID NO: 4615 - RNA, 20 nt, Artificial Sequence
  spacer sequence ATCN PAM
cuguugggagggagaaaaaa

SEQ ID NO: 4616 - RNA, 20 nt, Artificial Sequence
  spacer sequence ATCN PAM
agcuuccugcuugcugaaug

SEQ ID NO: 4617 - RNA, 20 nt, Artificial Sequence
  spacer sequence ATCN PAM
uucagcaagcaggaagcuug

SEQ ID NO: 4618 - RNA, 20 nt, Artificial Sequence
  spacer sequence ATCN PAM
aggauuugugugugugugug

SEQ ID NO: 4619 - RNA, 20 nt, Artificial Sequence
  spacer sequence ATCN PAM
uagauaaaagccagugaguu

SEQ ID NO: 4620 - RNA, 20 nt, Artificial Sequence
  spacer sequence ATCN PAM
accaaagcaacggauaguau

SEQ ID NO: 4621 - RNA, 20 nt, Artificial Sequence
  spacer sequence ATCN PAM
guugcuuugguagauuuuua

SEQ ID NO: 4622 - RNA, 20 nt, Artificial Sequence
  spacer sequence ATCN PAM
aagauaccaaaaucaaaucu

SEQ ID NO: 4623 - RNA, 20 nt, Artificial Sequence
  spacer sequence ATCN PAM
uugauacuauccguugcuuu

SEQ ID NO: 4624 - RNA, 20 nt, Artificial Sequence
  spacer sequence ATCN PAM
aaucugacuugaauauccua

SEQ ID NO: 4625 - RNA, 20 nt, Artificial Sequence
  spacer sequence ATCN PAM
gacuugaauauccuacaucu

SEQ ID NO: 4626 - RNA, 20 nt, Artificial Sequence
  spacer sequence ATCN PAM
uacaucuccacacccauccu

SEQ ID NO: 4627 - RNA, 20 nt, Artificial Sequence
  spacer sequence ATCN PAM
ccacacccauccucauuaug

SEQ ID NO: 4628 - RNA, 20 nt, Artificial Sequence
  spacer sequence ATCN PAM
ucauuaugcauuucuagaua

SEQ ID NO: 4629 - RNA, 20 nt, Artificial Sequence
  spacer sequence ATCN PAM
agaaaugcauaaugaggaug

SEQ ID NO: 4630 - RNA, 20 nt, Artificial Sequence
  spacer sequence ATCN PAM
aucuagaaaugcauaaugag

SEQ ID NO: 4631 - RNA, 20 nt, Artificial Sequence
  spacer sequence ATCN PAM
cugaauucugaccccuuuuu

SEQ ID NO: 4632 - RNA, 20 nt, Artificial Sequence
  spacer sequence ATCN PAM
agaggggagagauaaagagg

SEQ ID NO: 4633 - RNA, 20 nt, Artificial Sequence
  spacer sequence ATCN PAM
cuccccucuugaugguuaaa

SEQ ID NO: 4634 - RNA, 20 nt, Artificial Sequence
  spacer sequence ATCN PAM
guuucucucuccucuguguc

SEQ ID NO: 4635 - RNA, 20 nt, Artificial Sequence
  spacer sequence ATCN PAM
uuaccucucucuguuuggca

SEQ ID NO: 4636 - RNA, 20 nt, Artificial Sequence
  spacer sequence ATCN PAM
gcuucucuccucccuaggcc

SEQ ID NO: 4637 - RNA, 20 nt, Artificial Sequence
  spacer sequence ATCN PAM
ggagaaggagacguucgugu

SEQ ID NO: 4638 - RNA, 20 nt, Artificial Sequence
  spacer sequence ATCN PAM
cccacuagaguacacagaug

SEQ ID NO: 4639 - RNA, 20 nt, Artificial Sequence
  spacer sequence ATCN PAM
guguacucuagugggugauc

SEQ ID NO: 4640 - RNA, 20 nt, Artificial Sequence
  spacer sequence ATCN PAM
ggggcugggugguaaagagg

SEQ ID NO: 4641 - RNA, 20 nt, Artificial Sequence
  spacer sequence ATCN PAM
gcacucaacacuuugucauu

SEQ ID NO: 4642 - RNA, 20 nt, Artificial Sequence
  spacer sequence ATCN PAM
ugccccauccucuccaucgc

SEQ ID NO: 4643 - RNA, 20 nt, Artificial Sequence
  spacer sequence ATCN PAM
ucuccaucgcucccaaccac

SEQ ID NO: 4644 - RNA, 20 nt, Artificial Sequence
  spacer sequence ATCN PAM
cucccaaccaccgcgcgccc

SEQ ID NO: 4645 - RNA, 20 nt, Artificial Sequence
  spacer sequence ATCN PAM
ggucuacgacgauuuuuucc

SEQ ID NO: 4646 - RNA, 20 nt, Artificial Sequence
  spacer sequence ATCN PAM
ucguagaccggauguuucca

SEQ ID NO: 4647 - RNA, 20 nt, Artificial Sequence
  spacer sequence ATCN PAM
ggcaguauuugcugcccugc

SEQ ID NO: 4648 - RNA, 20 nt, Artificial Sequence
  spacer sequence ATCN PAM
gaggcagggcagcaaauacu

SEQ ID NO: 4649 - RNA, 20 nt, Artificial Sequence
  spacer sequence ATCN PAM
gagacaagaggcgcccagga

SEQ ID NO: 4650 - RNA, 20 nt, Artificial Sequence
  spacer sequence ATCN PAM
ugggcgccucuugucucaga

SEQ ID NO: 4651 - RNA, 20 nt, Artificial Sequence
  spacer sequence ATCN PAM
ccaggaugggaaccucaagc

SEQ ID NO: 4652 - RNA, 20 nt, Artificial Sequence
  spacer sequence ATCN PAM
uggggauuacaugagcucau

SEQ ID NO: 4653 - RNA, 20 nt, Artificial Sequence
  spacer sequence ATCN PAM
uaaggggcuugagguuccca

SEQ ID NO: 4654 - RNA, 20 nt, Artificial Sequence
  spacer sequence ATCN PAM
uggucuuuuucuuuuuucuu

SEQ ID NO: 4655 - RNA, 20 nt, Artificial Sequence
  spacer sequence ATCN PAM
gaagcaacuugugccaugca

SEQ ID NO: 4656 - RNA, 20 nt, Artificial Sequence
  spacer sequence ATCN PAM
agcgcucuccauggcacugc

SEQ ID NO: 4657 - RNA, 20 nt, Artificial Sequence
  spacer sequence ATCN PAM
acguggguuugcagguuccu

SEQ ID NO: 4658 - RNA, 20 nt, Artificial Sequence
  spacer sequence ATCN PAM
gcaauuacuuuggauauuuc

SEQ ID NO: 4659 - RNA, 20 nt, Artificial Sequence
  spacer sequence ATCN PAM
aaaguaauugcagauugcgg

SEQ ID NO: 4660 - RNA, 20 nt, Artificial Sequence
  spacer sequence ATCN PAM
gggagggaguggaagaaacu

SEQ ID NO: 4661 - RNA, 20 nt, Artificial Sequence
  spacer sequence ATCN PAM
uacuugagaucucuaaucuu

SEQ ID NO: 4662 - RNA, 20 nt, Artificial Sequence
  spacer sequence ATCN PAM
caaguaggaucugggaggga

SEQ ID NO: 4663 - RNA, 20 nt, Artificial Sequence
  spacer sequence ATCN PAM
cuaaucuuucaacuuggguc

SEQ ID NO: 4664 - RNA, 20 nt, Artificial Sequence
  spacer sequence ATCN PAM
uucaacuugggucucuguuu

SEQ ID NO: 4665 - RNA, 20 nt, Artificial Sequence
  spacer sequence ATCN PAM
aagagaaagaaaaaaaaaga

SEQ ID NO: 4666 - RNA, 20 nt, Artificial Sequence
  spacer sequence ATCN PAM
aggaacaauaggcauguaaa

SEQ ID NO: 4667 - RNA, 20 nt, Artificial Sequence
  spacer sequence ATCN PAM
cccuauaaagcucagaaccu

SEQ ID NO: 4668 - RNA, 20 nt, Artificial Sequence
  spacer sequence ATCN PAM
uccuuuaauaaaauuaauua

SEQ ID NO: 4669 - RNA, 20 nt, Artificial Sequence
  spacer sequence ATCN PAM
guuuaugcaauaugacagcc

SEQ ID NO: 4670 - RNA, 20 nt, Artificial Sequence
  spacer sequence ATCN PAM
cuggugacucaacagcgucu

SEQ ID NO: 4671 - RNA, 20 nt, Artificial Sequence
  spacer sequence ATCN PAM
ucacaucauaagcuuauacu

SEQ ID NO: 4672 - RNA, 20 nt, Artificial Sequence
  spacer sequence ATCN PAM
uaagcuuauacuuccugccc

SEQ ID NO: 4673 - RNA, 20 nt, Artificial Sequence
  spacer sequence ATCN PAM
aauggggcaggaaguauaag

SEQ ID NO: 4674 - RNA, 20 nt, Artificial Sequence
  spacer sequence ATCN PAM
ugggcggcaccgugauccgg

SEQ ID NO: 4675 - RNA, 20 nt, Artificial Sequence
  spacer sequence ATCN PAM
cggugccgcccaggaucaaa

SEQ ID NO: 4676 - RNA, 20 nt, Artificial Sequence
  spacer sequence ATCN PAM
gggucugguuuuuguuugac

SEQ ID NO: 4677 - RNA, 20 nt, Artificial Sequence
  spacer sequence ATCN PAM
cgggguucugcacaauugga

SEQ ID NO: 4678 - RNA, 20 nt, Artificial Sequence
  spacer sequence ATCN PAM
guauauucccauugccagac

SEQ ID NO: 4679 - RNA, 20 nt, Artificial Sequence
  spacer sequence ATCN PAM
uagaguggauauuuucuuga

SEQ ID NO: 4680 - RNA, 20 nt, Artificial Sequence
  spacer sequence ATCN PAM
acucuaggaugcaccggagg

SEQ ID NO: 4681 - RNA, 20 nt, Artificial Sequence
  spacer sequence ATCN PAM
gcuuagaaaucacauucuau

SEQ ID NO: 4682 - RNA, 20 nt, Artificial Sequence
  spacer sequence ATCN PAM
cauucuaugaaauccaauau

SEQ ID NO: 4683 - RNA, 20 nt, Artificial Sequence
  spacer sequence ATCN PAM
aauaugccuucucaagagcg

SEQ ID NO: 4684 - RNA, 20 nt, Artificial Sequence
  spacer sequence ATCN PAM
cuguguauuccuuaauugcc

SEQ ID NO: 4685 - RNA, 20 nt, Artificial Sequence
  spacer sequence ATCN PAM
ccuaggaauucuaaugucau

SEQ ID NO: 4686 - RNA, 20 nt, Artificial Sequence
  spacer sequence ATCN PAM
ccuuggauuuuguucaacau

SEQ ID NO: 4687 - RNA, 20 nt, Artificial Sequence
  spacer sequence ATCN PAM
aaggugauaauauaaaaaaa

SEQ ID NO: 4688 - RNA, 20 nt, Artificial Sequence
  spacer sequence ATCN PAM
auguugaacaaaauccaagg

SEQ ID NO: 4689 - RNA, 20 nt, Artificial Sequence
  spacer sequence ATCN PAM
agaaacguauagcauaugua

SEQ ID NO: 4690 - RNA, 20 nt, Artificial Sequence
  spacer sequence ATCN PAM
auuucuauacauaugcuaua

SEQ ID NO: 4691 - RNA, 20 nt, Artificial Sequence
  spacer sequence ATCN PAM
uaucuauuucuauacauaug

SEQ ID NO: 4692 - RNA, 20 nt, Artificial Sequence
  spacer sequence ATCN PAM
aaacaaauuccauaaaagag

SEQ ID NO: 4693 - RNA, 20 nt, Artificial Sequence
  spacer sequence ATCN PAM
aaaucaaaacaaauuccaua

SEQ ID NO: 4694 - RNA, 20 nt, Artificial Sequence
  spacer sequence ATCN PAM
auagauaguaaaaagaauga

SEQ ID NO: 4695 - RNA, 20 nt, Artificial Sequence
  spacer sequence ATCN PAM
auagaucuaaaucaaaacaa

SEQ ID NO: 4696 - RNA, 20 nt, Artificial Sequence
  spacer sequence ATCN PAM
aagauguuuaucacuuuaau

SEQ ID NO: 4697 - RNA, 20 nt, Artificial Sequence
  spacer sequence ATCN PAM
uagauucaguguaauucaca

SEQ ID NO: 4698 - RNA, 20 nt, Artificial Sequence
  spacer sequence ATCN PAM
cuuuaauauuacacuuccua

SEQ ID NO: 4699 - RNA, 20 nt, Artificial Sequence
  spacer sequence ATCN PAM
gaaaguuuggggacuauucc

SEQ ID NO: 4700 - RNA, 20 nt, Artificial Sequence
  spacer sequence ATCN PAM
uauguuccucuccaaaccug

SEQ ID NO: 4701 - RNA, 20 nt, Artificial Sequence
  spacer sequence ATCN PAM
acacuucacauaaaauguuu

SEQ ID NO: 4702 - RNA, 20 nt, Artificial Sequence
  spacer sequence ATCN PAM
caaaaauauuugucucuaac

SEQ ID NO: 4703 - RNA, 20 nt, Artificial Sequence
  spacer sequence ATCN PAM
ugaaacagauucucccagcu

SEQ ID NO: 4704 - RNA, 20 nt, Artificial Sequence
  spacer sequence ATCN PAM
guuucaagauguuugcuuuu

SEQ ID NO: 4705 - RNA, 20 nt, Artificial Sequence
  spacer sequence ATCN PAM
cuaauucucagacugcucuc

SEQ ID NO: 4706 - RNA, 20 nt, Artificial Sequence
  spacer sequence ATCN PAM
gagagcagucugagaauuag

SEQ ID NO: 4707 - RNA, 20 nt, Artificial Sequence
  spacer sequence ATCN PAM
guguaaguuccccaauucuc

SEQ ID NO: 4708 - RNA, 20 nt, Artificial Sequence
  spacer sequence ATCN PAM
guacaauauguuuuuaaaac

SEQ ID NO: 4709 - RNA, 20 nt, Artificial Sequence
  spacer sequence ATCN PAM
ccaucugcucaaauggggga

SEQ ID NO: 4710 - RNA, 20 nt, Artificial Sequence
  spacer sequence ATCN PAM
gcucaaaugggggaaaacca

SEQ ID NO: 4711 - RNA, 20 nt, Artificial Sequence
  spacer sequence ATCN PAM
uaaaaaaaaaagaggugaga

SEQ ID NO: 4712 - RNA, 20 nt, Artificial Sequence
  spacer sequence ATCN PAM
aaagauucagguucuagugc

SEQ ID NO: 4713 - RNA, 20 nt, Artificial Sequence
  spacer sequence ATCN PAM
uuugauagaaccuauguaag

SEQ ID NO: 4714 - RNA, 20 nt, Artificial Sequence
  spacer sequence ATCN PAM
gcuuagcuuuguuuaucagg

SEQ ID NO: 4715 - RNA, 20 nt, Artificial Sequence
  spacer sequence ATCN PAM
ggacucuaagucccuggguu

SEQ ID NO: 4716 - RNA, 20 nt, Artificial Sequence
  spacer sequence ATCN PAM
acccagggacuuagaguccu

SEQ ID NO: 4717 - RNA, 20 nt, Artificial Sequence
  spacer sequence ATCN PAM
uaucaacccagggacuuaga

SEQ ID NO: 4718 - RNA, 20 nt, Artificial Sequence
  spacer sequence ATCN PAM
ucugggaguggggagaaaag

SEQ ID NO: 4719 - RNA, 20 nt, Artificial Sequence
  spacer sequence ATCN PAM
aauagauaaauagauacaaa

SEQ ID NO: 4720 - RNA, 20 nt, Artificial Sequence
  spacer sequence ATCN PAM
auuugauaguugugcuuuuc

SEQ ID NO: 4721 - RNA, 20 nt, Artificial Sequence
  spacer sequence ATCN PAM
auuuaucuauuugauaguug

SEQ ID NO: 4722 - RNA, 20 nt, Artificial Sequence
  spacer sequence ATCN PAM
caauucuuuguaucuauuua

SEQ ID NO: 4723 - RNA, 20 nt, Artificial Sequence
  spacer sequence ATCN PAM
uaucuuuuugugggaaagaa

SEQ ID NO: 4724 - RNA, 20 nt, Artificial Sequence
  spacer sequence ATCN PAM
uuuugugggaaagaaaguag

SEQ ID NO: 4725 - RNA, 20 nt, Artificial Sequence
  spacer sequence ATCN PAM
accuaccuacuuucuuuccc

SEQ ID NO: 4726 - RNA, 20 nt, Artificial Sequence
  spacer sequence ATCN PAM
gccauucagggcuauugaaa

SEQ ID NO: 4727 - RNA, 20 nt, Artificial Sequence
  spacer sequence ATCN PAM
acaacugcuuucaauagccc

SEQ ID NO: 4728 - RNA, 20 nt, Artificial Sequence
  spacer sequence ATCN PAM
aggacccaguggaacuuacu

SEQ ID NO: 4729 - RNA, 20 nt, Artificial Sequence
  spacer sequence ATCN PAM
guauucugcuguuucuucug

SEQ ID NO: 4730 - RNA, 20 nt, Artificial Sequence
  spacer sequence ATCN PAM
ucuaggauguaccaaguugu

SEQ ID NO: 4731 - RNA, 20 nt, Artificial Sequence
  spacer sequence ATCN PAM
aggauguaccaaguuguaag

SEQ ID NO: 4732 - RNA, 20 nt, Artificial Sequence
  spacer sequence ATCN PAM
uagaugaucuguauucugcu

SEQ ID NO: 4733 - RNA, 20 nt, Artificial Sequence
  spacer sequence ATCN PAM
uuacaacuugguacauccua

SEQ ID NO: 4734 - RNA, 20 nt, Artificial Sequence
  spacer sequence ATCN PAM
ucauugcuugaauccuuaca

SEQ ID NO: 4735 - RNA, 20 nt, Artificial Sequence
  spacer sequence ATCN PAM
ucuucauugcuugaauccuu

SEQ ID NO: 4736 - RNA, 20 nt, Artificial Sequence
  spacer sequence ATCN PAM
ucuauuacacccccuguacc

SEQ ID NO: 4737 - RNA, 20 nt, Artificial Sequence
  spacer sequence ATCN PAM
gauggagaggcaaauguacu

SEQ ID NO: 4738 - RNA, 20 nt, Artificial Sequence
  spacer sequence ATCN PAM
gaucuucuauuacacccccu

SEQ ID NO: 4739 - RNA, 20 nt, Artificial Sequence
  spacer sequence ATCN PAM
uaggcuuccacaugacagau

SEQ ID NO: 4740 - RNA, 20 nt, Artificial Sequence
  spacer sequence ATCN PAM
gucauguggaagccuaggau

SEQ ID NO: 4741 - RNA, 20 nt, Artificial Sequence
  spacer sequence ATCN PAM
acuuguuuuaucugucaugu

SEQ ID NO: 4742 - RNA, 20 nt, Artificial Sequence
  spacer sequence ATCN PAM
uaaaaauaaagaaauucaau

SEQ ID NO: 4743 - RNA, 20 nt, Artificial Sequence
  spacer sequence ATCN PAM
cagaauaauaugauguauuu

SEQ ID NO: 4744 - RNA, 20 nt, Artificial Sequence
  spacer sequence ATCN PAM
uauuauucugugauuaauag

SEQ ID NO: 4745 - RNA, 20 nt, Artificial Sequence
  spacer sequence ATCN PAM
ucuccucccuggacagucag

SEQ ID NO: 4746 - RNA, 20 nt, Artificial Sequence
  spacer sequence ATCN PAM
uggugccaaugucuguuuau

SEQ ID NO: 4747 - RNA, 20 nt, Artificial Sequence
  spacer sequence ATCN PAM
aaaagccagaaauuuguaag

SEQ ID NO: 4748 - RNA, 20 nt, Artificial Sequence
  spacer sequence ATCN PAM
cccuuugccagggggaggga

SEQ ID NO: 4749 - RNA, 20 nt, Artificial Sequence
  spacer sequence ATCN PAM
uuuggcucacucuucccucc

SEQ ID NO: 4750 - RNA, 20 nt, Artificial Sequence
  spacer sequence ATCN PAM
ccgucacuguucaguuucag

SEQ ID NO: 4751 - RNA, 20 nt, Artificial Sequence
  spacer sequence ATCN PAM
uuccaggggccugggaauuu

SEQ ID NO: 4752 - RNA, 20 nt, Artificial Sequence
  spacer sequence ATCN PAM
uguuggaguuggguagaaga

SEQ ID NO: 4753 - RNA, 20 nt, Artificial Sequence
  spacer sequence ATCN PAM
gcugcucucuuucuacucaa

SEQ ID NO: 4754 - RNA, 20 nt, Artificial Sequence
  spacer sequence ATCN PAM
aaacaaaaguagcagcugcc

SEQ ID NO: 4755 - RNA, 20 nt, Artificial Sequence
  spacer sequence ATCN PAM
cucuaaacuuauagaauauu

SEQ ID NO: 4756 - RNA, 20 nt, Artificial Sequence
  spacer sequence ATCN PAM
gaaaacugugucacauguug

SEQ ID NO: 4757 - RNA, 20 nt, Artificial Sequence
  spacer sequence ATCN PAM
ugccugauguagcugaagca

SEQ ID NO: 4758 - RNA, 20 nt, Artificial Sequence
  spacer sequence ATCN PAM
ggcaagaugcagcccccaaa

SEQ ID NO: 4759 - RNA, 20 nt, Artificial Sequence
  spacer sequence ATCN PAM
uccugucacuccacugugcu

SEQ ID NO: 4760 - RNA, 20 nt, Artificial Sequence
  spacer sequence ATCN PAM
cuaggcaaaggaaaaccauu

SEQ ID NO: 4761 - RNA, 20 nt, Artificial Sequence
  spacer sequence ATCN PAM
uuucauuugcauaugggcca

SEQ ID NO: 4762 - RNA, 20 nt, Artificial Sequence
  spacer sequence ATCN PAM
ucucuuucauaauugacgau

SEQ ID NO: 4763 - RNA, 20 nt, Artificial Sequence
  spacer sequence ATCN PAM
ucaauuaugaaagagaagau

SEQ ID NO: 4764 - RNA, 20 nt, Artificial Sequence
  spacer sequence ATCN PAM
ucgucaauuaugaaagagaa

SEQ ID NO: 4765 - RNA, 20 nt, Artificial Sequence
  spacer sequence ATCN PAM
gaagcaucaucgucaauuau

SEQ ID NO: 4766 - RNA, 20 nt, Artificial Sequence
  spacer sequence ATCN PAM
ccaucagaagcaucaucguc

SEQ ID NO: 4767 - RNA, 20 nt, Artificial Sequence
  spacer sequence ATCN PAM
uguguauguaaauagaaauc

SEQ ID NO: 4768 - RNA, 20 nt, Artificial Sequence
  spacer sequence ATCN PAM
ucucauagaaagucuacucu

SEQ ID NO: 4769 - RNA, 20 nt, Artificial Sequence
  spacer sequence ATCN PAM
uucccugugggggccccaaa

SEQ ID NO: 4770 - RNA, 20 nt, Artificial Sequence
  spacer sequence ATCN PAM
cucuucuccaccucuaggaa

SEQ ID NO: 4771 - RNA, 20 nt, Artificial Sequence
  spacer sequence ATCN PAM
ucaaguguuucuuccuagag

SEQ ID NO: 4772 - RNA, 20 nt, Artificial Sequence
  spacer sequence ATCN PAM
cauucauucagcauccacua

SEQ ID NO: 4773 - RNA, 20 nt, Artificial Sequence
  spacer sequence ATCN PAM
acuauaugcacaaccuuuug

SEQ ID NO: 4774 - RNA, 20 nt, Artificial Sequence
  spacer sequence ATCN PAM
ucuuuuaaaaaaugaaccca

SEQ ID NO: 4775 - RNA, 20 nt, Artificial Sequence
  spacer sequence ATCN PAM
cuauuuggguucauuuuuua

SEQ ID NO: 4776 - RNA, 20 nt, Artificial Sequence
  spacer sequence ATCN PAM
uuguuuucucaauaucucua

SEQ ID NO: 4777 - RNA, 20 nt, Artificial Sequence
  spacer sequence ATCN PAM
aaugaaagaguaacaauugc

SEQ ID NO: 4778 - RNA, 20 nt, Artificial Sequence
  spacer sequence ATCN PAM
guuaaccgguuggaugguga

SEQ ID NO: 4779 - RNA, 20 nt, Artificial Sequence
  spacer sequence ATCN PAM
aaccgguuaacagauagcaa

SEQ ID NO: 4780 - RNA, 20 nt, Artificial Sequence
  spacer sequence ATCN PAM
cuggugcaauaaagcuaagu

SEQ ID NO: 4781 - RNA, 20 nt, Artificial Sequence
  spacer sequence ATCN PAM
uuuaaaauuagauucuguuu

SEQ ID NO: 4782 - RNA, 20 nt, Artificial Sequence
  spacer sequence ATCN PAM
aauuuuaaaggauuuuuaau

SEQ ID NO: 4783 - RNA, 20 nt, Artificial Sequence
  spacer sequence ATCN PAM
aguagaaaauaacaguauga

SEQ ID NO: 4784 - RNA, 20 nt, Artificial Sequence
  spacer sequence ATCN PAM
ucauaagggcugccagcauu

SEQ ID NO: 4785 - RNA, 20 nt, Artificial Sequence
  spacer sequence ATCN PAM
uguaucuuggcugcuaaaau

SEQ ID NO: 4786 - RNA, 20 nt, Artificial Sequence
  spacer sequence ATCN PAM
uggcugcuaaaaucacugca

SEQ ID NO: 4787 - RNA, 20 nt, Artificial Sequence
  spacer sequence ATCN PAM
cugcaggcugaaucuuguca

SEQ ID NO: 4788 - RNA, 20 nt, Artificial Sequence
  spacer sequence ATCN PAM
ugucauacaggaggagauuu

SEQ ID NO: 4789 - RNA, 20 nt, Artificial Sequence
  spacer sequence ATCN PAM
ccuccuguaugacaagauuc

SEQ ID NO: 4790 - RNA, 20 nt, Artificial Sequence
  spacer sequence ATCN PAM
ugcuccaugcccuggacuga

SEQ ID NO: 4791 - RNA, 20 nt, Artificial Sequence
  spacer sequence ATCN PAM
cagcuaaggugugcuaagaa

SEQ ID NO: 4792 - RNA, 20 nt, Artificial Sequence
  spacer sequence ATCN PAM
cagaucggaacccaguucuc

SEQ ID NO: 4793 - RNA, 20 nt, Artificial Sequence
  spacer sequence ATCN PAM
gggaucacagcuaaggugug

SEQ ID NO: 4794 - RNA, 20 nt, Artificial Sequence
  spacer sequence ATCN PAM
gaacccaguucucuugagaa

SEQ ID NO: 4795 - RNA, 20 nt, Artificial Sequence
  spacer sequence ATCN PAM
aguaacucaaaaauuucucu

SEQ ID NO: 4796 - RNA, 20 nt, Artificial Sequence
  spacer sequence ATCN PAM
uguaagagaaauuuuugagu

SEQ ID NO: 4797 - RNA, 20 nt, Artificial Sequence
  spacer sequence ATCN PAM
cacauaaauauauauuuuaa

SEQ ID NO: 4798 - RNA, 20 nt, Artificial Sequence
  spacer sequence ATCN PAM
auuguaaacauacagcagaa

SEQ ID NO: 4799 - RNA, 20 nt, Artificial Sequence
  spacer sequence ATCN PAM
cuuaauaagaaugagcaaaa

SEQ ID NO: 4800 - RNA, 20 nt, Artificial Sequence
  spacer sequence ATCN PAM
aguuauauaaacacacauuc

SEQ ID NO: 4801 - RNA, 20 nt, Artificial Sequence
  spacer sequence ATCN PAM
gcaaauauuauguaauacau

SEQ ID NO: 4802 - RNA, 20 nt, Artificial Sequence
  spacer sequence ATCN PAM
acuuugauaucaaaauugaa

SEQ ID NO: 4803 - RNA, 20 nt, Artificial Sequence
  spacer sequence ATCN PAM
aaguggauguacuguauauu

SEQ ID NO: 4804 - RNA, 20 nt, Artificial Sequence
  spacer sequence ATCN PAM
aaauugaacaccuauggucu

SEQ ID NO: 4805 - RNA, 20 nt, Artificial Sequence
  spacer sequence ATCN PAM
gacuuaaauucuuacuucca

SEQ ID NO: 4806 - RNA, 20 nt, Artificial Sequence
  spacer sequence ATCN PAM
aacaguaaaagcuuucaugu

SEQ ID NO: 4807 - RNA, 20 nt, Artificial Sequence
  spacer sequence ATCN PAM
gccuucacuuuaucuguuua

SEQ ID NO: 4808 - RNA, 20 nt, Artificial Sequence
  spacer sequence ATCN PAM
guuuaggguauuauuuuaau

SEQ ID NO: 4809 - RNA, 20 nt, Artificial Sequence
  spacer sequence ATCN PAM
auauaccaauuuacauuaaa

SEQ ID NO: 4810 - RNA, 20 nt, Artificial Sequence
  spacer sequence ATCN PAM
uauccauauaccaauuuaca

SEQ ID NO: 4811 - RNA, 20 nt, Artificial Sequence
  spacer sequence ATCN PAM
cagaaauauagcuauuuaug

SEQ ID NO: 4812 - RNA, 20 nt, Artificial Sequence
  spacer sequence ATCN PAM
ucuuuugcuagcuguacuuu

SEQ ID NO: 4813 - RNA, 20 nt, Artificial Sequence
  spacer sequence ATCN PAM
cuuuuuaguugaacuagaag

SEQ ID NO: 4814 - RNA, 20 nt, Artificial Sequence
  spacer sequence ATCN PAM
uuggcaaaaauuaaaaagua

SEQ ID NO: 4815 - RNA, 20 nt, Artificial Sequence
  spacer sequence ATCN PAM
acuuaaaauguaaaagcauc

SEQ ID NO: 4816 - RNA, 20 nt, Artificial Sequence
  spacer sequence ATCN PAM
cuaucuaagaaacaaguuua

SEQ ID NO: 4817 - RNA, 20 nt, Artificial Sequence
  spacer sequence ATCN PAM
aagaaacaaguuuaauaguu

SEQ ID NO: 4818 - RNA, 20 nt, Artificial Sequence
  spacer sequence ATCN PAM
cacucaaauugccauauacu

SEQ ID NO: 4819 - RNA, 20 nt, Artificial Sequence
  spacer sequence ATCN PAM
aaugguuuauuuauuaauaa

SEQ ID NO: 4820 - RNA, 20 nt, Artificial Sequence
  spacer sequence ATCN PAM
auguuucugcuuaauaaacu

SEQ ID NO: 4821 - RNA, 20 nt, Artificial Sequence
  spacer sequence ATCN PAM
aguuuauuaagcagaaacau

SEQ ID NO: 4822 - RNA, 20 nt, Artificial Sequence
  spacer sequence ATCN PAM
aagggaaaauuagaaagugu

SEQ ID NO: 4823 - RNA, 20 nt, Artificial Sequence
  spacer sequence ATCN PAM
aauuauguauuuauuuuguc

SEQ ID NO: 4824 - RNA, 20 nt, Artificial Sequence
  spacer sequence ATCN PAM
gaaaccaaguuuccuuuugc

SEQ ID NO: 4825 - RNA, 20 nt, Artificial Sequence
  spacer sequence ATCN PAM
guaauaucugaaaccaaguu

SEQ ID NO: 4826 - RNA, 20 nt, Artificial Sequence
  spacer sequence ATCN PAM
cuuuggugucuaaucuguaa

SEQ ID NO: 4827 - RNA, 20 nt, Artificial Sequence
  spacer sequence ATCN PAM
auuuccauuuguguuuauaa

SEQ ID NO: 4828 - RNA, 20 nt, Artificial Sequence
  spacer sequence ATCN PAM
acuauguucuuauaaacaca

SEQ ID NO: 4829 - RNA, 20 nt, Artificial Sequence
  spacer sequence ATCN PAM
gugcuggagguaagggagcc

SEQ ID NO: 4830 - RNA, 20 nt, Artificial Sequence
  spacer sequence ATCN PAM
gcucaaaggcccuggauucu

SEQ ID NO: 4831 - RNA, 20 nt, Artificial Sequence
  spacer sequence ATCN PAM
agggccuuugagcugauacc

SEQ ID NO: 4832 - RNA, 20 nt, Artificial Sequence
  spacer sequence ATCN PAM
aaccgcugcccuaaagccag

SEQ ID NO: 4833 - RNA, 20 nt, Artificial Sequence
  spacer sequence ATCN PAM
uggggccaggcuaaccccug

SEQ ID NO: 4834 - RNA, 20 nt, Artificial Sequence
  spacer sequence ATCN PAM
cuacagaagaaaucacauaa

SEQ ID NO: 4835 - RNA, 20 nt, Artificial Sequence
  spacer sequence ATCN PAM
cauaaacuggccugcgguug

SEQ ID NO: 4836 - RNA, 20 nt, Artificial Sequence
  spacer sequence ATCN PAM
aagccccccaaccgcaggcc

SEQ ID NO: 4837 - RNA, 20 nt, Artificial Sequence
  spacer sequence ATCN PAM
ucuaagccccccaaccgcag

SEQ ID NO: 4838 - RNA, 20 nt, Artificial Sequence
  spacer sequence ATCN PAM
caugauaugcuguucccuga

SEQ ID NO: 4839 - RNA, 20 nt, Artificial Sequence
  spacer sequence ATCN PAM
ugagauggggaaggucaauu

SEQ ID NO: 4840 - RNA, 20 nt, Artificial Sequence
  spacer sequence ATCN PAM
uaaguaguuucaacuaagca

SEQ ID NO: 4841 - RNA, 20 nt, Artificial Sequence
  spacer sequence ATCN PAM
agaguucucaugaggaacau

SEQ ID NO: 4842 - RNA, 20 nt, Artificial Sequence
  spacer sequence ATCN PAM
gaaauguugcaggcuucugg

SEQ ID NO: 4843 - RNA, 20 nt, Artificial Sequence
  spacer sequence ATCN PAM
ccagaagccugcaacauuuc

SEQ ID NO: 4844 - RNA, 20 nt, Artificial Sequence
  spacer sequence ATCN PAM
uccuuuuauucugcacugcu

SEQ ID NO: 4845 - RNA, 20 nt, Artificial Sequence
  spacer sequence ATCN PAM
uuuaaggcuuauagguaauu

SEQ ID NO: 4846 - RNA, 20 nt, Artificial Sequence
  spacer sequence ATCN PAM
uaauuaccuauaagccuuaa

SEQ ID NO: 4847 - RNA, 20 nt, Artificial Sequence
  spacer sequence ATCN PAM
cagcacuuugggaggccgag

SEQ ID NO: 4848 - RNA, 20 nt, Artificial Sequence
  spacer sequence ATCN PAM
cuuuucacauugauuuuggc

SEQ ID NO: 4849 - RNA, 20 nt, Artificial Sequence
  spacer sequence ATCN PAM
augugaaaagagaugaaagu

SEQ ID NO: 4850 - RNA, 20 nt, Artificial Sequence
  spacer sequence ATCN PAM
guuagaagaaaaacaacaga

SEQ ID NO: 4851 - RNA, 20 nt, Artificial Sequence
  spacer sequence ATCN PAM
cccuagcauguuugcacaau

SEQ ID NO: 4852 - RNA, 20 nt, Artificial Sequence
  spacer sequence ATCN PAM
gaccuuaacauuccaagcuu

SEQ ID NO: 4853 - RNA, 20 nt, Artificial Sequence
  spacer sequence ATCN PAM
ugcaagcgaauucucucaaa

SEQ ID NO: 4854 - RNA, 20 nt, Artificial Sequence
  spacer sequence ATCN PAM
ucuuggagaguuuauguuuc

SEQ ID NO: 4855 - RNA, 20 nt, Artificial Sequence
  spacer sequence ATCN PAM
uuuuguaaaacagaaauccu

SEQ ID NO: 4856 - RNA, 20 nt, Artificial Sequence
  spacer sequence ATCN PAM
auucuucgcauaaauaagag

SEQ ID NO: 4857 - RNA, 20 nt, Artificial Sequence
  spacer sequence ATCN PAM
caaguccuauuucugccucc

SEQ ID NO: 4858 - RNA, 20 nt, Artificial Sequence
  spacer sequence ATCN PAM
uuggcaucaaaaagcaacuu

SEQ ID NO: 4859 - RNA, 20 nt, Artificial Sequence
  spacer sequence ATCN PAM
aaaagcaacuuucgagugag

SEQ ID NO: 4860 - RNA, 20 nt, Artificial Sequence
  spacer sequence ATCN PAM
uuuccuccccucucacucga

SEQ ID NO: 4861 - RNA, 20 nt, Artificial Sequence
  spacer sequence ATCN PAM
aaauauugagcccuaccaac

SEQ ID NO: 4862 - RNA, 20 nt, Artificial Sequence
  spacer sequence ATCN PAM
ggaagguugcuuuacauacc

SEQ ID NO: 4863 - RNA, 20 nt, Artificial Sequence
  spacer sequence ATCN PAM
caaugucuauuuaaaugugc

SEQ ID NO: 4864 - RNA, 20 nt, Artificial Sequence
  spacer sequence ATCN PAM
augaauguuuacuucaauga

SEQ ID NO: 4865 - RNA, 20 nt, Artificial Sequence
  spacer sequence ATCN PAM
cucugcccgagucagucagu

SEQ ID NO: 4866 - RNA, 20 nt, Artificial Sequence
  spacer sequence ATCN PAM
agcccacacagugucuuugc

SEQ ID NO: 4867 - RNA, 20 nt, Artificial Sequence
  spacer sequence ATCN PAM
ccuuuugacagucauucuua

SEQ ID NO: 4868 - RNA, 20 nt, Artificial Sequence
  spacer sequence ATCN PAM
cacaccuacuaaauuuucau

SEQ ID NO: 4869 - RNA, 20 nt, Artificial Sequence
  spacer sequence ATCN PAM
auuucaggcauaaauggauu

SEQ ID NO: 4870 - RNA, 20 nt, Artificial Sequence
  spacer sequence ATCN PAM
auuuaugccugaaauagaua

SEQ ID NO: 4871 - RNA, 20 nt, Artificial Sequence
  spacer sequence ATCN PAM
ccacacugaaauguuucaac

SEQ ID NO: 4872 - RNA, 20 nt, Artificial Sequence
  spacer sequence ATCN PAM
ggaagcacagaucggauuuu

SEQ ID NO: 4873 - RNA, 20 nt, Artificial Sequence
  spacer sequence ATCN PAM
gugcuuccagaucuccacac

SEQ ID NO: 4874 - RNA, 20 nt, Artificial Sequence
  spacer sequence ATCN PAM
gauuuuggagcugaccuggg

SEQ ID NO: 4875 - RNA, 20 nt, Artificial Sequence
  spacer sequence ATCN PAM
caguuuuuucaauuauugua

SEQ ID NO: 4876 - RNA, 20 nt, Artificial Sequence
  spacer sequence ATCN PAM
uugaaaaguauuaccaaauc

SEQ ID NO: 4877 - RNA, 20 nt, Artificial Sequence
  spacer sequence ATCN PAM
caugcuagggcacauucaau

SEQ ID NO: 4878 - RNA, 20 nt, Artificial Sequence
  spacer sequence ATCN PAM
aggucuuaaaccacuguuca

SEQ ID NO: 4879 - RNA, 20 nt, Artificial Sequence
  spacer sequence ATCN PAM
cacauauguagaauguuaaa

SEQ ID NO: 4880 - RNA, 20 nt, Artificial Sequence
  spacer sequence ATCN PAM
uaaaaucccugcuaaagcag

SEQ ID NO: 4881 - RNA, 20 nt, Artificial Sequence
  spacer sequence ATCN PAM
cugcuaaagcagggccugcu

SEQ ID NO: 4882 - RNA, 20 nt, Artificial Sequence
  spacer sequence ATCN PAM
caagcuuuaguaguucagac

SEQ ID NO: 4883 - RNA, 20 nt, Artificial Sequence
  spacer sequence ATCN PAM
gucugaacuacuaaagcuug

SEQ ID NO: 4884 - RNA, 20 nt, Artificial Sequence
  spacer sequence ATCN PAM
accuauuaauauuaauuguc

SEQ ID NO: 4885 - RNA, 20 nt, Artificial Sequence
  spacer sequence ATCN PAM
cacgggagaugggugggcac

SEQ ID NO: 4886 - RNA, 20 nt, Artificial Sequence
  spacer sequence ATCN PAM
cccgugugauaaugccacau

SEQ ID NO: 4887 - RNA, 20 nt, Artificial Sequence
  spacer sequence ATCN PAM
ggguuuuggcagguauuaga

SEQ ID NO: 4888 - RNA, 20 nt, Artificial Sequence
  spacer sequence ATCN PAM
aauaccugccaaaacccaga

SEQ ID NO: 4889 - RNA, 20 nt, Artificial Sequence
  spacer sequence ATCN PAM
aagggauuacuuggcucagg

SEQ ID NO: 4890 - RNA, 20 nt, Artificial Sequence
  spacer sequence ATCN PAM
cuuugauuacaucuaauacc

SEQ ID NO: 4891 - RNA, 20 nt, Artificial Sequence
  spacer sequence ATCN PAM
ccaggggaaaagaaacaaaa

SEQ ID NO: 4892 - RNA, 20 nt, Artificial Sequence
  spacer sequence ATCN PAM
cuuuuuguuuuuguuucuuu

SEQ ID NO: 4893 - RNA, 20 nt, Artificial Sequence
  spacer sequence ATCN PAM
aucucuuuuuguuuuuguuu

SEQ ID NO: 4894 - RNA, 20 nt, Artificial Sequence
  spacer sequence ATCN PAM
uugugggcuguccauccauc

SEQ ID NO: 4895 - RNA, 20 nt, Artificial Sequence
  spacer sequence ATCN PAM
uauugcccuacagcugaggu

SEQ ID NO: 4896 - RNA, 20 nt, Artificial Sequence
  spacer sequence ATCN PAM
agaaauagaccuguaagugc

SEQ ID NO: 4897 - RNA, 20 nt, Artificial Sequence
  spacer sequence ATCN PAM
ggguucugguaccucaagaa

SEQ ID NO: 4898 - RNA, 20 nt, Artificial Sequence
  spacer sequence ATCN PAM
ucaggguucugguaccucaa

SEQ ID NO: 4899 - RNA, 20 nt, Artificial Sequence
  spacer sequence ATCN PAM
gagcaaaaguugaacauaaa

SEQ ID NO: 4900 - RNA, 20 nt, Artificial Sequence
  spacer sequence ATCN PAM
ucagagcaaaaguugaacau

SEQ ID NO: 4901 - RNA, 20 nt, Artificial Sequence
  spacer sequence ATCN PAM
ugugccuguuacacccgaaa

SEQ ID NO: 4902 - RNA, 20 nt, Artificial Sequence
  spacer sequence ATCN PAM
augcuguaugugaaucuuua

SEQ ID NO: 4903 - RNA, 20 nt, Artificial Sequence
  spacer sequence ATCN PAM
uuauaaaauuuuacugucaa

SEQ ID NO: 4904 - RNA, 20 nt, Artificial Sequence
  spacer sequence ATCN PAM
ggccucccccgcggggcggu

SEQ ID NO: 4905 - RNA, 20 nt, Artificial Sequence
  spacer sequence ATCN PAM
ugcggccugagcuggacacu

SEQ ID NO: 4906 - RNA, 20 nt, Artificial Sequence
  spacer sequence ATCN PAM
ugguauuuuuauucauugua

SEQ ID NO: 4907 - RNA, 20 nt, Artificial Sequence
  spacer sequence ATCN PAM
agaauauuuagugauguagu

SEQ ID NO: 4908 - RNA, 20 nt, Artificial Sequence
  spacer sequence ATCN PAM
cuaaauauucuugaucaugg

SEQ ID NO: 4909 - RNA, 20 nt, Artificial Sequence
  spacer sequence ATCN PAM
ggaacgucacaaaggaaagu

SEQ ID NO: 4910 - RNA, 20 nt, Artificial Sequence
  spacer sequence ATCN PAM
auucuaacuugguacauggc

SEQ ID NO: 4911 - RNA, 20 nt, Artificial Sequence
  spacer sequence ATCN PAM
aggcucugguaauuggaagu

SEQ ID NO: 4912 - RNA, 20 nt, Artificial Sequence
  spacer sequence ATCN PAM
acaacaaggcccaacucugu

SEQ ID NO: 4913 - RNA, 20 nt, Artificial Sequence
  spacer sequence ATCN PAM
ggagagacucuuuaagcacc

SEQ ID NO: 4914 - RNA, 20 nt, Artificial Sequence
  spacer sequence ATCN PAM
uaaagaagacgugaucugca

SEQ ID NO: 4915 - RNA, 20 nt, Artificial Sequence
  spacer sequence ATCN PAM
cgucuucuuuaugaucagga

SEQ ID NO: 4916 - RNA, 20 nt, Artificial Sequence
  spacer sequence ATCN PAM
gcaugccaaauggaaaaagc

SEQ ID NO: 4917 - RNA, 20 nt, Artificial Sequence
  spacer sequence ATCN PAM
gauuuggggagcaggagagc

SEQ ID NO: 4918 - RNA, 20 nt, Artificial Sequence
  spacer sequence ATCN PAM
gaugcuuugcuccaagcagg

SEQ ID NO: 4919 - RNA, 20 nt, Artificial Sequence
  spacer sequence ATCN PAM
uuggcuccugacacggccaa

SEQ ID NO: 4920 - RNA, 20 nt, Artificial Sequence
  spacer sequence ATCN PAM
uccaguuccuuaacuacccc

SEQ ID NO: 4921 - RNA, 20 nt, Artificial Sequence
  spacer sequence ATCN PAM
ucucuuuugaggggagagaa

SEQ ID NO: 4922 - RNA, 20 nt, Artificial Sequence
  spacer sequence ATCN PAM
agagugcaaagggcuucccc

SEQ ID NO: 4923 - RNA, 20 nt, Artificial Sequence
  spacer sequence ATCN PAM
ccaucgagagugcaaagggc

SEQ ID NO: 4924 - RNA, 20 nt, Artificial Sequence
  spacer sequence ATCN PAM
augaagcuucucagccuugc

SEQ ID NO: 4925 - RNA, 20 nt, Artificial Sequence
  spacer sequence ATCN PAM
cuccgccgcgggacugguuu

SEQ ID NO: 4926 - RNA, 20 nt, Artificial Sequence
  spacer sequence ATCN PAM
uaagagcuauuuuagaaaac

SEQ ID NO: 4927 - RNA, 20 nt, Artificial Sequence
  spacer sequence ATCN PAM
gccuugagcucaccucuggg

SEQ ID NO: 4928 - RNA, 20 nt, Artificial Sequence
  spacer sequence ATCN PAM
aucagccuugagcucaccuc

SEQ ID NO: 4929 - RNA, 20 nt, Artificial Sequence
  spacer sequence ATCN PAM
gcagccuuuggaagggacag

SEQ ID NO: 4930 - RNA, 20 nt, Artificial Sequence
  spacer sequence ATCN PAM
auuugcacaccgcucccucu

SEQ ID NO: 4931 - RNA, 20 nt, Artificial Sequence
  spacer sequence ATCN PAM
ccuccaaaucaauuugcaca

SEQ ID NO: 4932 - RNA, 20 nt, Artificial Sequence
  spacer sequence ATCN PAM
auggcucggggcgcggcccc

SEQ ID NO: 4933 - RNA, 20 nt, Artificial Sequence
  spacer sequence ATCN PAM
gugacacggcagcgagccgg

SEQ ID NO: 4934 - RNA, 20 nt, Artificial Sequence
  spacer sequence ATCN PAM
ucuccaaaucgauucacaca

SEQ ID NO: 4935 - RNA, 20 nt, Artificial Sequence
  spacer sequence ATCN PAM
auucacacaccauuccuccu

SEQ ID NO: 4936 - RNA, 20 nt, Artificial Sequence
  spacer sequence ATCN PAM
auuuggagaggaucagugac

SEQ ID NO: 4937 - RNA, 20 nt, Artificial Sequence
  spacer sequence ATCN PAM
gacauggcaggugugcugag

SEQ ID NO: 4938 - RNA, 20 nt, Artificial Sequence
  spacer sequence ATCN PAM
guuucucugacuccuugccu

SEQ ID NO: 4939 - RNA, 20 nt, Artificial Sequence
  spacer sequence ATCN PAM
caucuguuucucugacuccu

SEQ ID NO: 4940 - RNA, 20 nt, Artificial Sequence
  spacer sequence ATCN PAM
ucauaccucucucugacucu

SEQ ID NO: 4941 - RNA, 20 nt, Artificial Sequence
  spacer sequence ATCN PAM
gcuggcucugaagaguccac

SEQ ID NO: 4942 - RNA, 20 nt, Artificial Sequence
  spacer sequence ATCN PAM
uaauauauuucucuuuauac

SEQ ID NO: 4943 - RNA, 20 nt, Artificial Sequence
  spacer sequence ATCN PAM
uucaaaaaccggcauuuuua

SEQ ID NO: 4944 - RNA, 20 nt, Artificial Sequence
  spacer sequence ATCN PAM
ugagggaaaccauuucugug

SEQ ID NO: 4945 - RNA, 20 nt, Artificial Sequence
  spacer sequence ATCN PAM
ucaguuauaaauaggaaaca

SEQ ID NO: 4946 - RNA, 20 nt, Artificial Sequence
  spacer sequence ATCN PAM
uccagggagcuuuucaaaga

SEQ ID NO: 4947 - RNA, 20 nt, Artificial Sequence
  spacer sequence ATCN PAM
agaaaucuuccagggagcuu

SEQ ID NO: 4948 - RNA, 20 nt, Artificial Sequence
  spacer sequence ATCN PAM
acuaaaaguuuuuaacgauc

SEQ ID NO: 4949 - RNA, 20 nt, Artificial Sequence
  spacer sequence ATCN PAM
uuaaaaacuuuuaguugauu

SEQ ID NO: 4950 - RNA, 20 nt, Artificial Sequence
  spacer sequence ATCN PAM
uuuaauccugcuuuugucug

SEQ ID NO: 4951 - RNA, 20 nt, Artificial Sequence
  spacer sequence ATCN PAM
ugcuuuugucugcucuugag

SEQ ID NO: 4952 - RNA, 20 nt, Artificial Sequence
  spacer sequence ATCN PAM
agauucuuccacaggcagag

SEQ ID NO: 4953 - RNA, 20 nt, Artificial Sequence
  spacer sequence ATCN PAM
ugauuucaguggcucaagag

SEQ ID NO: 4954 - RNA, 20 nt, Artificial Sequence
  spacer sequence ATCN PAM
cuuugguucucugccugugg

SEQ ID NO: 4955 - RNA, 20 nt, Artificial Sequence
  spacer sequence ATCN PAM
cuucucauuuguaaaaggga

SEQ ID NO: 4956 - RNA, 20 nt, Artificial Sequence
  spacer sequence ATCN PAM
acccacaacccacagagaga

SEQ ID NO: 4957 - RNA, 20 nt, Artificial Sequence
  spacer sequence ATCN PAM
uuaaacauuugcaagagcaa

SEQ ID NO: 4958 - RNA, 20 nt, Artificial Sequence
  spacer sequence ATCN PAM
gcaggggcuuguucaucuuu

SEQ ID NO: 4959 - RNA, 20 nt, Artificial Sequence
  spacer sequence ATCN PAM
cauucaucaugaacacuuca

SEQ ID NO: 4960 - RNA, 20 nt, Artificial Sequence
  spacer sequence ATCN PAM
ugaacacuucaauucuauca

SEQ ID NO: 4961 - RNA, 20 nt, Artificial Sequence
  spacer sequence ATCN PAM
gaccuucauggcccuucuca

SEQ ID NO: 4962 - RNA, 20 nt, Artificial Sequence
  spacer sequence ATCN PAM
ugauaaacccauugcaagua

SEQ ID NO: 4963 - RNA, 20 nt, Artificial Sequence
  spacer sequence ATCN PAM
ggauguaacccuauuuuaug

SEQ ID NO: 4964 - RNA, 20 nt, Artificial Sequence
  spacer sequence ATCN PAM
uaaaucaaaaaugcgucuaa

SEQ ID NO: 4965 - RNA, 20 nt, Artificial Sequence
  spacer sequence ATCN PAM
aaaaugcgucuaauauaccu

SEQ ID NO: 4966 - RNA, 20 nt, Artificial Sequence
  spacer sequence ATCN PAM
gugagcuauaaaaugggugc

SEQ ID NO: 4967 - RNA, 20 nt, Artificial Sequence
  spacer sequence ATCN PAM
gcaauaauaucugugagcua

SEQ ID NO: 4968 - RNA, 20 nt, Artificial Sequence
  spacer sequence ATCN PAM
gcugacucauuucacuggug

SEQ ID NO: 4969 - RNA, 20 nt, Artificial Sequence
  spacer sequence ATCN PAM
uacauuccacagaggugaca

SEQ ID NO: 4970 - RNA, 20 nt, Artificial Sequence
  spacer sequence ATCN PAM
uugaaggcugacaaucuguc

SEQ ID NO: 4971 - RNA, 20 nt, Artificial Sequence
  spacer sequence ATCN PAM
gucugguucauugcuauucu

SEQ ID NO: 4972 - RNA, 20 nt, Artificial Sequence
  spacer sequence ATCN PAM
aagaaaaacccaggaccuga

SEQ ID NO: 4973 - RNA, 20 nt, Artificial Sequence
  spacer sequence ATCN PAM
gguccuggguuuuucuucga

SEQ ID NO: 4974 - RNA, 20 nt, Artificial Sequence
  spacer sequence ATCN PAM
aaauuggaaagaaagaaguc

SEQ ID NO: 4975 - RNA, 20 nt, Artificial Sequence
  spacer sequence ATCN PAM
uguugucugugaaaaaggcu

SEQ ID NO: 4976 - RNA, 20 nt, Artificial Sequence
  spacer sequence ATCN PAM
uauacuuagaaaugccuaaa

SEQ ID NO: 4977 - RNA, 20 nt, Artificial Sequence
  spacer sequence ATCN PAM
guucuaacaauuuuuuggug

SEQ ID NO: 4978 - RNA, 20 nt, Artificial Sequence
  spacer sequence ATCN PAM
auuuaucaguucuaacaauu

SEQ ID NO: 4979 - RNA, 20 nt, Artificial Sequence
  spacer sequence ATCN PAM
ugcaacuuuacugaauccau

SEQ ID NO: 4980 - RNA, 20 nt, Artificial Sequence
  spacer sequence ATCN PAM
guuggccauuuguauauauu

SEQ ID NO: 4981 - RNA, 20 nt, Artificial Sequence
  spacer sequence ATCN PAM
cucaucaucauaaucagaga

SEQ ID NO: 4982 - RNA, 20 nt, Artificial Sequence
  spacer sequence ATCN PAM
ucauaaucagagaaaugcaa

SEQ ID NO: 4983 - RNA, 20 nt, Artificial Sequence
  spacer sequence ATCN PAM
uaaucagagaaaugcaaauc

SEQ ID NO: 4984 - RNA, 20 nt, Artificial Sequence
  spacer sequence ATCN PAM
gagaaaugcaaaucaaaacc

SEQ ID NO: 4985 - RNA, 20 nt, Artificial Sequence
  spacer sequence ATCN PAM
aaaccauaaugagauaucau

SEQ ID NO: 4986 - RNA, 20 nt, Artificial Sequence
  spacer sequence ATCN PAM
cauuaugguuuugauuugca

SEQ ID NO: 4987 - RNA, 20 nt, Artificial Sequence
  spacer sequence ATCN PAM
uccaugucaccccaguuaaa

SEQ ID NO: 4988 - RNA, 20 nt, Artificial Sequence
  spacer sequence ATCN PAM
augucaccccaguuaaaaug

SEQ ID NO: 4989 - RNA, 20 nt, Artificial Sequence
  spacer sequence ATCN PAM
aaaagacagggaauaaugga

SEQ ID NO: 4990 - RNA, 20 nt, Artificial Sequence
  spacer sequence ATCN PAM
auuauucccugucuuuuuga

SEQ ID NO: 4991 - RNA, 20 nt, Artificial Sequence
  spacer sequence ATCN PAM
uagccagcauccauuauucc

SEQ ID NO: 4992 - RNA, 20 nt, Artificial Sequence
  spacer sequence ATCN PAM
ggugcgggcaccauucagaa

SEQ ID NO: 4993 - RNA, 20 nt, Artificial Sequence
  spacer sequence ATCN PAM
cauagccuugucugaaaugu

SEQ ID NO: 4994 - RNA, 20 nt, Artificial Sequence
  spacer sequence ATCN PAM
ucauggcucaaaguucuuca

SEQ ID NO: 4995 - RNA, 20 nt, Artificial Sequence
  spacer sequence ATCN PAM
uggcucaaaguucuucaaaa

SEQ ID NO: 4996 - RNA, 20 nt, Artificial Sequence
  spacer sequence ATCN PAM
acagcugugucucagagacc

SEQ ID NO: 4997 - RNA, 20 nt, Artificial Sequence
  spacer sequence ATCN PAM
gauaucccccucaugccuuu

SEQ ID NO: 4998 - RNA, 20 nt, Artificial Sequence
  spacer sequence ATCN PAM
gauccacagcugugucucag

SEQ ID NO: 4999 - RNA, 20 nt, Artificial Sequence
  spacer sequence ATCN PAM
cccucaugccuuugacaucu

SEQ ID NO: 5000 - RNA, 20 nt, Artificial Sequence
  spacer sequence ATCN PAM
gagcaagagauauuggagcu

SEQ ID NO: 5001 - RNA, 20 nt, Artificial Sequence
  spacer sequence ATCN PAM
cuugcucagaugucaaaggc

SEQ ID NO: 5002 - RNA, 20 nt, Artificial Sequence
  spacer sequence ATCN PAM
uuuugugacaggggagucau

SEQ ID NO: 5003 - RNA, 20 nt, Artificial Sequence
  spacer sequence ATCN PAM
cuugcucugaaauuuaucug

SEQ ID NO: 5004 - RNA, 20 nt, Artificial Sequence
  spacer sequence ATCN PAM
gaagucaaaaggaguggguu

SEQ ID NO: 5005 - RNA, 20 nt, Artificial Sequence
  spacer sequence ATCN PAM
agaaguuugauggccgagag

SEQ ID NO: 5006 - RNA, 20 nt, Artificial Sequence
  spacer sequence ATCN PAM
uuaggucacauagaccuucu

SEQ ID NO: 5007 - RNA, 20 nt, Artificial Sequence
  spacer sequence ATCN PAM
uuguucuuugaaagaaaaac

SEQ ID NO: 5008 - RNA, 20 nt, Artificial Sequence
  spacer sequence ATCN PAM
ugcagacagccccagggguc

SEQ ID NO: 5009 - RNA, 20 nt, Artificial Sequence
  spacer sequence ATCN PAM
ugaccccuggggcugucugc

SEQ ID NO: 5010 - RNA, 20 nt, Artificial Sequence
  spacer sequence ATCN PAM
augauuagugaauuagugac

SEQ ID NO: 5011 - RNA, 20 nt, Artificial Sequence
  spacer sequence ATCN PAM
uugauuaacuuuauauccug

SEQ ID NO: 5012 - RNA, 20 nt, Artificial Sequence
  spacer sequence ATCN PAM
ugcauggagaaagaaaagga

SEQ ID NO: 5013 - RNA, 20 nt, Artificial Sequence
  spacer sequence ATCN PAM
aguguuuauuuuacuuauuu

SEQ ID NO: 5014 - RNA, 20 nt, Artificial Sequence
  spacer sequence ATCN PAM
ucaaguguuuauuuuacuua

SEQ ID NO: 5015 - RNA, 20 nt, Artificial Sequence
  spacer sequence ATCN PAM
uaucacacaggcuugguuac

SEQ ID NO: 5016 - RNA, 20 nt, Artificial Sequence
  spacer sequence ATCN PAM
cacaggcuugguuacagaaa

SEQ ID NO: 5017 - RNA, 20 nt, Artificial Sequence
  spacer sequence ATCN PAM
gaaucuacacugggguccac

SEQ ID NO: 5018 - RNA, 20 nt, Artificial Sequence
  spacer sequence ATCN PAM
acacugggguccacaaacag

SEQ ID NO: 5019 - RNA, 20 nt, Artificial Sequence
  spacer sequence ATCN PAM
acaaugaccuuauuuccaaa

SEQ ID NO: 5020 - RNA, 20 nt, Artificial Sequence
  spacer sequence ATCN PAM
cuucaaacucucugcuaguu

SEQ ID NO: 5021 - RNA, 20 nt, Artificial Sequence
  spacer sequence ATCN PAM
gcagggcugguuccuucuga

SEQ ID NO: 5022 - RNA, 20 nt, Artificial Sequence
  spacer sequence ATCN PAM
agguaucagcagggcugguu

SEQ ID NO: 5023 - RNA, 20 nt, Artificial Sequence
  spacer sequence ATCN PAM
ugggcuucuagccuccagag

SEQ ID NO: 5024 - RNA, 20 nt, Artificial Sequence
  spacer sequence ATCN PAM
gacucaaaaugugaauaguu

SEQ ID NO: 5025 - RNA, 20 nt, Artificial Sequence
  spacer sequence ATCN PAM
cuaagaaaauuagggcaaaa

SEQ ID NO: 5026 - RNA, 20 nt, Artificial Sequence
  spacer sequence ATCN PAM
uggcuccaguuuugcccuaa

SEQ ID NO: 5027 - RNA, 20 nt, Artificial Sequence
  spacer sequence ATCN PAM
uugagcacguauauccagga

SEQ ID NO: 5028 - RNA, 20 nt, Artificial Sequence
  spacer sequence ATCN PAM
uguauaggagcaugaucuca

SEQ ID NO: 5029 - RNA, 20 nt, Artificial Sequence
  spacer sequence ATCN PAM
ugcuccuauacaugauccuu

SEQ ID NO: 5030 - RNA, 20 nt, Artificial Sequence
  spacer sequence ATCN PAM
caggaaggcuuccaguuuuc

SEQ ID NO: 5031 - RNA, 20 nt, Artificial Sequence
  spacer sequence ATCN PAM
guugcuacuuccuccuaugc

SEQ ID NO: 5032 - RNA, 20 nt, Artificial Sequence
  spacer sequence ATCN PAM
gcaaugcauaggaggaagua

SEQ ID NO: 5033 - RNA, 20 nt, Artificial Sequence
  spacer sequence ATCN PAM
uuccuguggaauuuggacua

SEQ ID NO: 5034 - RNA, 20 nt, Artificial Sequence
  spacer sequence ATCN PAM
ucaaaaugucaguaacuauu

SEQ ID NO: 5035 - RNA, 20 nt, Artificial Sequence
  spacer sequence ATCN PAM
ccauuuauccaacuacuagu

SEQ ID NO: 5036 - RNA, 20 nt, Artificial Sequence
  spacer sequence ATCN PAM
aacuacuagugaccaagcac

SEQ ID NO: 5037 - RNA, 20 nt, Artificial Sequence
  spacer sequence ATCN PAM
ggaaauaugccuuuuaguca

SEQ ID NO: 5038 - RNA, 20 nt, Artificial Sequence
  spacer sequence ATCN PAM
gaaaucaggaaauaugccuu

SEQ ID NO: 5039 - RNA, 20 nt, Artificial Sequence
  spacer sequence ATCN PAM
uagagaauaggagggcugag

SEQ ID NO: 5040 - RNA, 20 nt, Artificial Sequence
  spacer sequence ATCN PAM
uugcagggcugugugcagca

SEQ ID NO: 5041 - RNA, 20 nt, Artificial Sequence
  spacer sequence ATCN PAM
cuucugagcagaguccugag

SEQ ID NO: 5042 - RNA, 20 nt, Artificial Sequence
  spacer sequence ATCN PAM
uuccaaguagcuggaguaca

SEQ ID NO: 5043 - RNA, 20 nt, Artificial Sequence
  spacer sequence ATCN PAM
caaggugccuuguucuguaa

SEQ ID NO: 5044 - RNA, 20 nt, Artificial Sequence
  spacer sequence ATCN PAM
caaauccacacaagaagcaa

SEQ ID NO: 5045 - RNA, 20 nt, Artificial Sequence
  spacer sequence ATCN PAM
acacaagaagcaacaaggac

SEQ ID NO: 5046 - RNA, 20 nt, Artificial Sequence
  spacer sequence ATCN PAM
cucaaggucacccaacuggg

SEQ ID NO: 5047 - RNA, 20 nt, Artificial Sequence
  spacer sequence ATCN PAM
cacugcucguggaauaaauu

SEQ ID NO: 5048 - RNA, 20 nt, Artificial Sequence
  spacer sequence ATCN PAM
caugaauuuauuccacgagc

SEQ ID NO: 5049 - RNA, 20 nt, Artificial Sequence
  spacer sequence ATCN PAM
uaggaaacugccuaucccau

SEQ ID NO: 5050 - RNA, 20 nt, Artificial Sequence
  spacer sequence ATCN PAM
uggaggacuaucuuaggaaa

SEQ ID NO: 5051 - RNA, 20 nt, Artificial Sequence
  spacer sequence ATCN PAM
uguucugcuauugauguccu

SEQ ID NO: 5052 - RNA, 20 nt, Artificial Sequence
  spacer sequence ATCN PAM
auagcagaacaugaucaugg

SEQ ID NO: 5053 - RNA, 20 nt, Artificial Sequence
  spacer sequence ATCN PAM
ccuccucuugaaagugggau

SEQ ID NO: 5054 - RNA, 20 nt, Artificial Sequence
  spacer sequence ATCN PAM
cacuuucaagaggaggggau

SEQ ID NO: 5055 - RNA, 20 nt, Artificial Sequence
  spacer sequence ATCN PAM
cggaagaaacgucucauaac

SEQ ID NO: 5056 - RNA, 20 nt, Artificial Sequence
  spacer sequence ATCN PAM
cacggugucuguacaucugg

SEQ ID NO: 5057 - RNA, 20 nt, Artificial Sequence
  spacer sequence ATCN PAM
ucucacggugucuguacauc

SEQ ID NO: 5058 - RNA, 20 nt, Artificial Sequence
  spacer sequence ATCN PAM
guacaauaagcaagauaggg

SEQ ID NO: 5059 - RNA, 20 nt, Artificial Sequence
  spacer sequence ATCN PAM
ugcuuauuguacugaugagu

SEQ ID NO: 5060 - RNA, 20 nt, Artificial Sequence
  spacer sequence ATCN PAM
auuuguuuuuguugagaccu

SEQ ID NO: 5061 - RNA, 20 nt, Artificial Sequence
  spacer sequence ATCN PAM
ccaugcccagcuaauuuuug

SEQ ID NO: 5062 - RNA, 20 nt, Artificial Sequence
  spacer sequence ATCN PAM
cuacugaaaaagaaagacaa

SEQ ID NO: 5063 - RNA, 20 nt, Artificial Sequence
  spacer sequence ATCN PAM
cagcacuuugggagucugag

SEQ ID NO: 5064 - RNA, 20 nt, Artificial Sequence
  spacer sequence ATCN PAM
cuuuguaugacugucucucc

SEQ ID NO: 5065 - RNA, 20 nt, Artificial Sequence
  spacer sequence ATCN PAM
ucuagcuuaauggagagaca

SEQ ID NO: 5066 - RNA, 20 nt, Artificial Sequence
  spacer sequence ATCN PAM
uggaagacaagaauacuccu

SEQ ID NO: 5067 - RNA, 20 nt, Artificial Sequence
  spacer sequence ATCN PAM
cauucaacaaacacuugguc

SEQ ID NO: 5068 - RNA, 20 nt, Artificial Sequence
  spacer sequence ATCN PAM
cuaucaaacuuuuguuugau

SEQ ID NO: 5069 - RNA, 20 nt, Artificial Sequence
  spacer sequence ATCN PAM
aacuuuuguuugauuaaaaa

SEQ ID NO: 5070 - RNA, 20 nt, Artificial Sequence
  spacer sequence ATCN PAM
aacaaaaguuugauagagau

SEQ ID NO: 5071 - RNA, 20 nt, Artificial Sequence
  spacer sequence ATCN PAM
uuaaucuaguucuacuccca

SEQ ID NO: 5072 - RNA, 20 nt, Artificial Sequence
  spacer sequence ATCN PAM
aguucuacucccaagaggaa

SEQ ID NO: 5073 - RNA, 20 nt, Artificial Sequence
  spacer sequence ATCN PAM
aaauuccucuugggaguaga

SEQ ID NO: 5074 - RNA, 20 nt, Artificial Sequence
  spacer sequence ATCN PAM
uucugccucugcuaguuuug

SEQ ID NO: 5075 - RNA, 20 nt, Artificial Sequence
  spacer sequence ATCN PAM
guggaauuucuguagaaguu

SEQ ID NO: 5076 - RNA, 20 nt, Artificial Sequence
  spacer sequence ATCN PAM
caguuccgcuuuucaaugaa

SEQ ID NO: 5077 - RNA, 20 nt, Artificial Sequence
  spacer sequence ATCN PAM
gugugcccaaauguaaaagg

SEQ ID NO: 5078 - RNA, 20 nt, Artificial Sequence
  spacer sequence ATCN PAM
acuuucuaggaaucuccagu

SEQ ID NO: 5079 - RNA, 20 nt, Artificial Sequence
  spacer sequence ATCN PAM
ccagucuggcuggggacacu

SEQ ID NO: 5080 - RNA, 20 nt, Artificial Sequence
  spacer sequence ATCN PAM
uaaauaauaguguccccagc

SEQ ID NO: 5081 - RNA, 20 nt, Artificial Sequence
  spacer sequence ATCN PAM
ucuuuuaaaauaucuuccag

SEQ ID NO: 5082 - RNA, 20 nt, Artificial Sequence
  spacer sequence ATCN PAM
uuuaaaauaucuuccagccu

SEQ ID NO: 5083 - RNA, 20 nt, Artificial Sequence
  spacer sequence ATCN PAM
uccagccucugcucagguaa

SEQ ID NO: 5084 - RNA, 20 nt, Artificial Sequence
  spacer sequence ATCN PAM
uauccugaccaaccaugaac

SEQ ID NO: 5085 - RNA, 20 nt, Artificial Sequence
  spacer sequence ATCN PAM
ugaccaaccaugaacguauu

SEQ ID NO: 5086 - RNA, 20 nt, Artificial Sequence
  spacer sequence ATCN PAM
caaaagcauugggaaaauuu

SEQ ID NO: 5087 - RNA, 20 nt, Artificial Sequence
  spacer sequence ATCN PAM
aauuacagggcagcaaaugu

SEQ ID NO: 5088 - RNA, 20 nt, Artificial Sequence
  spacer sequence ATCN PAM
uccugaauuucucagcuaaa

SEQ ID NO: 5089 - RNA, 20 nt, Artificial Sequence
  spacer sequence ATCN PAM
uuucuaacgcuucccuuuuu

SEQ ID NO: 5090 - RNA, 20 nt, Artificial Sequence
  spacer sequence ATCN PAM
cuguagccucuacucuucgg

SEQ ID NO: 5091 - RNA, 20 nt, Artificial Sequence
  spacer sequence ATCN PAM
gcucugacaagauccagcuc

SEQ ID NO: 5092 - RNA, 20 nt, Artificial Sequence
  spacer sequence ATCN PAM
ugucagagcagauuuucugu

SEQ ID NO: 5093 - RNA, 20 nt, Artificial Sequence
  spacer sequence ATCN PAM
agcucgacaagauuguguuc

SEQ ID NO: 5094 - RNA, 20 nt, Artificial Sequence
  spacer sequence ATCN PAM
ugucgagcuggaucuuguca

SEQ ID NO: 5095 - RNA, 20 nt, Artificial Sequence
  spacer sequence ATCN PAM
ccaggaacacaaucuugucg

SEQ ID NO: 5096 - RNA, 20 nt, Artificial Sequence
  spacer sequence ATCN PAM
uucccucauuuaucugucau

SEQ ID NO: 5097 - RNA, 20 nt, Artificial Sequence
  spacer sequence ATCN PAM
gucaucucacuuucuagguc

SEQ ID NO: 5098 - RNA, 20 nt, Artificial Sequence
  spacer sequence ATCN PAM
cacuuucuaggucacaucau

SEQ ID NO: 5099 - RNA, 20 nt, Artificial Sequence
  spacer sequence ATCN PAM
uuuccuagcaucuaaagugu

SEQ ID NO: 5100 - RNA, 20 nt, Artificial Sequence
  spacer sequence ATCN PAM
aaaguguugucuguuuauau

SEQ ID NO: 5101 - RNA, 20 nt, Artificial Sequence
  spacer sequence ATCN PAM
acagguucuuugaaaacaag

SEQ ID NO: 5102 - RNA, 20 nt, Artificial Sequence
  spacer sequence ATCN PAM
uccggaaacacagacagccc

SEQ ID NO: 5103 - RNA, 20 nt, Artificial Sequence
  spacer sequence ATCN PAM
cugagggcugucuguguuuc

SEQ ID NO: 5104 - RNA, 20 nt, Artificial Sequence
  spacer sequence ATCN PAM
uuuuugggggacacaauuca

SEQ ID NO: 5105 - RNA, 20 nt, Artificial Sequence
  spacer sequence ATCN PAM
auauaagguaacauucugag

SEQ ID NO: 5106 - RNA, 20 nt, Artificial Sequence
  spacer sequence ATCN PAM
cuaauaauauuaguuuccua

SEQ ID NO: 5107 - RNA, 20 nt, Artificial Sequence
  spacer sequence ATCN PAM
ucauuguaaagcaaagucac

SEQ ID NO: 5108 - RNA, 20 nt, Artificial Sequence
  spacer sequence ATCN PAM
uccuccugcccaccagacuu

SEQ ID NO: 5109 - RNA, 20 nt, Artificial Sequence
  spacer sequence ATCN PAM
acuuauacauaaauauauaa

SEQ ID NO: 5110 - RNA, 20 nt, Artificial Sequence
  spacer sequence ATCN PAM
ucuacuuauacauaaauaua

SEQ ID NO: 5111 - RNA, 20 nt, Artificial Sequence
  spacer sequence ATCN PAM
cauuuguguccguauauguu

SEQ ID NO: 5112 - RNA, 20 nt, Artificial Sequence
  spacer sequence ATCN PAM
uaggggcuuaacaaauauuu

SEQ ID NO: 5113 - RNA, 20 nt, Artificial Sequence
  spacer sequence ATCN PAM
cauuugugggggaucaggaa

SEQ ID NO: 5114 - RNA, 20 nt, Artificial Sequence
  spacer sequence ATCN PAM
cccacaaaugggauucuaca

SEQ ID NO: 5115 - RNA, 20 nt, Artificial Sequence
  spacer sequence ATCN PAM
ggaagcuucccagagaccua

SEQ ID NO: 5116 - RNA, 20 nt, Artificial Sequence
  spacer sequence ATCN PAM
auugcacuuuaggucucugg

SEQ ID NO: 5117 - RNA, 20 nt, Artificial Sequence
  spacer sequence ATCN PAM
gauguccucugauuaaacag

SEQ ID NO: 5118 - RNA, 20 nt, Artificial Sequence
  spacer sequence ATCN PAM
gauauugcuuguuaagguau

SEQ ID NO: 5119 - RNA, 20 nt, Artificial Sequence
  spacer sequence ATCN PAM
gaggacaucagauauugcuu

SEQ ID NO: 5120 - RNA, 20 nt, Artificial Sequence
  spacer sequence ATCN PAM
agguaucugcaggguugguu

SEQ ID NO: 5121 - RNA, 20 nt, Artificial Sequence
  spacer sequence ATCN PAM
gcaggguugguuccuucuug

SEQ ID NO: 5122 - RNA, 20 nt, Artificial Sequence
  spacer sequence ATCN PAM
gguuuccuuccuagguauaa

SEQ ID NO: 5123 - RNA, 20 nt, Artificial Sequence
  spacer sequence ATCN PAM
aaguuuuauuauuguuuggg

SEQ ID NO: 5124 - RNA, 20 nt, Artificial Sequence
  spacer sequence ATCN PAM
caccauguucccacccuggg

SEQ ID NO: 5125 - RNA, 20 nt, Artificial Sequence
  spacer sequence ATCN PAM
uuauuuuacuacuuucagua

SEQ ID NO: 5126 - RNA, 20 nt, Artificial Sequence
  spacer sequence ATCN PAM
gcuacauauuaagugugaca

SEQ ID NO: 5127 - RNA, 20 nt, Artificial Sequence
  spacer sequence ATCN PAM
cuauugucacacuuaauaug

SEQ ID NO: 5128 - RNA, 20 nt, Artificial Sequence
  spacer sequence ATCN PAM
uaaaauauuuauuugaaacu

SEQ ID NO: 5129 - RNA, 20 nt, Artificial Sequence
  spacer sequence ATCN PAM
cgugaaucaucagaaaauca

SEQ ID NO: 5130 - RNA, 20 nt, Artificial Sequence
  spacer sequence ATCN PAM
ucagaaaaucacaaauauga

SEQ ID NO: 5131 - RNA, 20 nt, Artificial Sequence
  spacer sequence ATCN PAM
gaaaaucacaaauaugaauu

SEQ ID NO: 5132 - RNA, 20 nt, Artificial Sequence
  spacer sequence ATCN PAM
caaauaugaauuuuaaauaa

SEQ ID NO: 5133 - RNA, 20 nt, Artificial Sequence
  spacer sequence ATCN PAM
uuugauucauugaauuuuug

SEQ ID NO: 5134 - RNA, 20 nt, Artificial Sequence
  spacer sequence ATCN PAM
aaggauaggaauaugaguuc

SEQ ID NO: 5135 - RNA, 20 nt, Artificial Sequence
  spacer sequence ATCN PAM
uguagggcaggaguuaagag

SEQ ID NO: 5136 - RNA, 20 nt, Artificial Sequence
  spacer sequence ATCN PAM
ccugucuuuuauuugccccc

SEQ ID NO: 5137 - RNA, 20 nt, Artificial Sequence
  spacer sequence ATCN PAM
cagagaaagcuuccuagaac

SEQ ID NO: 5138 - RNA, 20 nt, Artificial Sequence
  spacer sequence ATCN PAM
uuuuucaauaauuuuuacuc

SEQ ID NO: 5139 - RNA, 20 nt, Artificial Sequence
  spacer sequence ATCN PAM
cauuuauuucucugaacauu

SEQ ID NO: 5140 - RNA, 20 nt, Artificial Sequence
  spacer sequence ATCN PAM
cagagcacauaagcacagac

SEQ ID NO: 5141 - RNA, 20 nt, Artificial Sequence
  spacer sequence ATCN PAM
ggugaccuuuggaacuuuca

SEQ ID NO: 5142 - RNA, 20 nt, Artificial Sequence
  spacer sequence ATCN PAM
aggaaaguggaccacaaacc

SEQ ID NO: 5143 - RNA, 20 nt, Artificial Sequence
  spacer sequence ATCN PAM
ugagaggcauuucuuaagaa

SEQ ID NO: 5144 - RNA, 20 nt, Artificial Sequence
  spacer sequence ATCN PAM
aaaacuaaaaacaaaaccag

SEQ ID NO: 5145 - RNA, 20 nt, Artificial Sequence
  spacer sequence ATCN PAM
uuggaaacucaaauugacuu

SEQ ID NO: 5146 - RNA, 20 nt, Artificial Sequence
  spacer sequence ATCN PAM
ucauccuuggaaacucaaau

SEQ ID NO: 5147 - RNA, 20 nt, Artificial Sequence
  spacer sequence ATCN PAM
ucuuucuuuagcaaauaugu

SEQ ID NO: 5148 - RNA, 20 nt, Artificial Sequence
  spacer sequence ATCN PAM
gccaguuaguuuuaaauuuc

SEQ ID NO: 5149 - RNA, 20 nt, Artificial Sequence
  spacer sequence ATCN PAM
gguauaugaggagaaaaugc

SEQ ID NO: 5150 - RNA, 20 nt, Artificial Sequence
  spacer sequence ATCN PAM
cuuuugugguggugcuuguc

SEQ ID NO: 5151 - RNA, 20 nt, Artificial Sequence
  spacer sequence ATCN PAM
gccuuaacucuugaauucuu

SEQ ID NO: 5152 - RNA, 20 nt, Artificial Sequence
  spacer sequence ATCN PAM
uaaugcaguuuuaucagccu

SEQ ID NO: 5153 - RNA, 20 nt, Artificial Sequence
  spacer sequence ATCN PAM
caccugcccaagugugggag

SEQ ID NO: 5154 - RNA, 20 nt, Artificial Sequence
  spacer sequence ATCN PAM
uucuauuuugagaaaggcaa

SEQ ID NO: 5155 - RNA, 20 nt, Artificial Sequence
  spacer sequence ATCN PAM
gcuucuuggaucucugggag

SEQ ID NO: 5156 - RNA, 20 nt, Artificial Sequence
  spacer sequence ATCN PAM
aagaagcagauguuagaggg

SEQ ID NO: 5157 - RNA, 20 nt, Artificial Sequence
  spacer sequence ATCN PAM
cugggaggcucagaaacugg

SEQ ID NO: 5158 - RNA, 20 nt, Artificial Sequence
  spacer sequence ATCN PAM
ccuaagcaccuuuauggaug

SEQ ID NO: 5159 - RNA, 20 nt, Artificial Sequence
  spacer sequence ATCN PAM
auaaaggugcuuaggggauu

SEQ ID NO: 5160 - RNA, 20 nt, Artificial Sequence
  spacer sequence ATCN PAM
uaauucaagaaauuaaucgg

SEQ ID NO: 5161 - RNA, 20 nt, Artificial Sequence
  spacer sequence ATCN PAM
aauacauauaucuguaggug

SEQ ID NO: 5162 - RNA, 20 nt, Artificial Sequence
  spacer sequence ATCN PAM
guagguguuuuaaagacaau

SEQ ID NO: 5163 - RNA, 20 nt, Artificial Sequence
  spacer sequence ATCN PAM
uccaaacccaccaucuuccc

SEQ ID NO: 5164 - RNA, 20 nt, Artificial Sequence
  spacer sequence ATCN PAM
ucccaaaccaggccuauuaa

SEQ ID NO: 5165 - RNA, 20 nt, Artificial Sequence
  spacer sequence ATCN PAM
auucugaaacauuguuuguu

SEQ ID NO: 5166 - RNA, 20 nt, Artificial Sequence
  spacer sequence ATCN PAM
cauggcaugugcagcuaaau

SEQ ID NO: 5167 - RNA, 20 nt, Artificial Sequence
  spacer sequence ATCN PAM
uggaccaaaagcccaacugg

SEQ ID NO: 5168 - RNA, 20 nt, Artificial Sequence
  spacer sequence ATCN PAM
ccuaaaaugacggcuuccca

SEQ ID NO: 5169 - RNA, 20 nt, Artificial Sequence
  spacer sequence ATCN PAM
gagucugaaagcugaaggcc

SEQ ID NO: 5170 - RNA, 20 nt, Artificial Sequence
  spacer sequence ATCN PAM
cuaaaauggggauagcggcc

SEQ ID NO: 5171 - RNA, 20 nt, Artificial Sequence
  spacer sequence ATCN PAM
ccauuuuagagaugaaggca

SEQ ID NO: 5172 - RNA, 20 nt, Artificial Sequence
  spacer sequence ATCN PAM
augccuucuuuagacaucag

SEQ ID NO: 5173 - RNA, 20 nt, Artificial Sequence
  spacer sequence ATCN PAM
gggagccaggauuggcuuua

SEQ ID NO: 5174 - RNA, 20 nt, Artificial Sequence
  spacer sequence ATCN PAM
uggcucccugaugucuaaag

SEQ ID NO: 5175 - RNA, 20 nt, Artificial Sequence
  spacer sequence ATCN PAM
guuuguguuuuaaguccaga

SEQ ID NO: 5176 - RNA, 20 nt, Artificial Sequence
  spacer sequence ATCN PAM
uuucaauuggcuuaaaaauc

SEQ ID NO: 5177 - RNA, 20 nt, Artificial Sequence
  spacer sequence ATCN PAM
ccaaccugaucuucucuacc

SEQ ID NO: 5178 - RNA, 20 nt, Artificial Sequence
  spacer sequence ATCN PAM
gguuggagauuuaaauggaa

SEQ ID NO: 5179 - RNA, 20 nt, Artificial Sequence
  spacer sequence ATCN PAM
ucucuaccaaguuccagagc

SEQ ID NO: 5180 - RNA, 20 nt, Artificial Sequence
  spacer sequence ATCN PAM
uucuauaugucccaccaggg

SEQ ID NO: 5181 - RNA, 20 nt, Artificial Sequence
  spacer sequence ATCN PAM
accuccacuucugacuggcu

SEQ ID NO: 5182 - RNA, 20 nt, Artificial Sequence
  spacer sequence ATCN PAM
aauccaccuccacuucugac

SEQ ID NO: 5183 - RNA, 20 nt, Artificial Sequence
  spacer sequence ATCN PAM
cuauuuccaguccacaucca

SEQ ID NO: 5184 - RNA, 20 nt, Artificial Sequence
  spacer sequence ATCN PAM
uacaaaucauaaaaauaagc

SEQ ID NO: 5185 - RNA, 20 nt, Artificial Sequence
  spacer sequence ATCN PAM
uaaaaauaagcaagaucauc

SEQ ID NO: 5186 - RNA, 20 nt, Artificial Sequence
  spacer sequence ATCN PAM
ucuucugguuucuuccuacu

SEQ ID NO: 5187 - RNA, 20 nt, Artificial Sequence
  spacer sequence ATCN PAM
ucaucagugucaaaaaucca

SEQ ID NO: 5188 - RNA, 20 nt, Artificial Sequence
  spacer sequence ATCN PAM
ucagugucaaaaauccaagg

SEQ ID NO: 5189 - RNA, 20 nt, Artificial Sequence
  spacer sequence ATCN PAM
gugucaaaaauccaagggga

SEQ ID NO: 5190 - RNA, 20 nt, Artificial Sequence
  spacer sequence ATCN PAM
aaggggagggaaugggagcu

SEQ ID NO: 5191 - RNA, 20 nt, Artificial Sequence
  spacer sequence ATCN PAM
auuuuagaacauuuuuauua

SEQ ID NO: 5192 - RNA, 20 nt, Artificial Sequence
  spacer sequence ATCN PAM
ccacaaucaauuuuagaaca

SEQ ID NO: 5193 - RNA, 20 nt, Artificial Sequence
  spacer sequence ATCN PAM
agaauauauacagaauuccu

SEQ ID NO: 5194 - RNA, 20 nt, Artificial Sequence
  spacer sequence ATCN PAM
ucuuuggaaaaauaauucaa

SEQ ID NO: 5195 - RNA, 20 nt, Artificial Sequence
  spacer sequence ATCN PAM
uuucaugugcuuauuggcca

SEQ ID NO: 5196 - RNA, 20 nt, Artificial Sequence
  spacer sequence ATCN PAM
uucuaaugacuagugguguu

SEQ ID NO: 5197 - RNA, 20 nt, Artificial Sequence
  spacer sequence ATCN PAM
aaaccacaaugagauaccac

SEQ ID NO: 5198 - RNA, 20 nt, Artificial Sequence
  spacer sequence ATCN PAM
cauugugguuuugauuugca

SEQ ID NO: 5199 - RNA, 20 nt, Artificial Sequence
  spacer sequence ATCN PAM
ccagaaaacucuuuucauuu

SEQ ID NO: 5200 - RNA, 20 nt, Artificial Sequence
  spacer sequence ATCN PAM
aucuccagaaaacucuuuuc

SEQ ID NO: 5201 - RNA, 20 nt, Artificial Sequence
  spacer sequence ATCN PAM
cagcacuuugggaggccuag

SEQ ID NO: 5202 - RNA, 20 nt, Artificial Sequence
  spacer sequence ATCN PAM
accugccuaggccucccaaa

SEQ ID NO: 5203 - RNA, 20 nt, Artificial Sequence
  spacer sequence ATCN PAM
caugaggucaggaguucgag

SEQ ID NO: 5204 - RNA, 20 nt, Artificial Sequence
  spacer sequence ATCN PAM
cauuccauuuccuucaauua

SEQ ID NO: 5205 - RNA, 20 nt, Artificial Sequence
  spacer sequence ATCN PAM
caauaaauccauuucaaaga

SEQ ID NO: 5206 - RNA, 20 nt, Artificial Sequence
  spacer sequence ATCN PAM
auuucaaagaaaacucaggg

SEQ ID NO: 5207 - RNA, 20 nt, Artificial Sequence
  spacer sequence ATCN PAM
cugaguuuucuuugaaaugg

SEQ ID NO: 5208 - RNA, 20 nt, Artificial Sequence
  spacer sequence ATCN PAM
guucuuuuacuugacuaucc

SEQ ID NO: 5209 - RNA, 20 nt, Artificial Sequence
  spacer sequence ATCN PAM
auauuuguuaugacaguuac

SEQ ID NO: 5210 - RNA, 20 nt, Artificial Sequence
  spacer sequence ATCN PAM
cugccacuaacaaccucuuu

SEQ ID NO: 5211 - RNA, 20 nt, Artificial Sequence
  spacer sequence ATCN PAM
gaauuccuucaguuuccugc

SEQ ID NO: 5212 - RNA, 20 nt, Artificial Sequence
  spacer sequence ATCN PAM
aaucagaauuccuucaguuu

SEQ ID NO: 5213 - RNA, 20 nt, Artificial Sequence
  spacer sequence ATCN PAM
uuggcaaaguugaagauuga

SEQ ID NO: 5214 - RNA, 20 nt, Artificial Sequence
  spacer sequence ATCN PAM
ucaacuuugccaaggaucaa

SEQ ID NO: 5215 - RNA, 20 nt, Artificial Sequence
  spacer sequence ATCN PAM
uccuucucacucucaaucuu

SEQ ID NO: 5216 - RNA, 20 nt, Artificial Sequence
  spacer sequence ATCN PAM
guggaaagcugagaaggcug

SEQ ID NO: 5217 - RNA, 20 nt, Artificial Sequence
  spacer sequence ATCN PAM
cauguuauuaauuuaacgua

SEQ ID NO: 5218 - RNA, 20 nt, Artificial Sequence
  spacer sequence ATCN PAM
auuauugccacauugacuaa

SEQ ID NO: 5219 - RNA, 20 nt, Artificial Sequence
  spacer sequence ATCN PAM
cucacucagugacuuaccca

SEQ ID NO: 5220 - RNA, 20 nt, Artificial Sequence
  spacer sequence ATCN PAM
aaacauagaaaagguacagc

SEQ ID NO: 5221 - RNA, 20 nt, Artificial Sequence
  spacer sequence ATCN PAM
aaacacaucuaaacauagaa

SEQ ID NO: 5222 - RNA, 20 nt, Artificial Sequence
  spacer sequence ATCN PAM
uacugaauacugcaggcaac

SEQ ID NO: 5223 - RNA, 20 nt, Artificial Sequence
  spacer sequence ATCN PAM
caugcuauacacauuuggag

SEQ ID NO: 5224 - RNA, 20 nt, Artificial Sequence
  spacer sequence ATCN PAM
gcaacauaaacucuguaccc

SEQ ID NO: 5225 - RNA, 20 nt, Artificial Sequence
  spacer sequence ATCN PAM
cacauaaguagaaucauaua

SEQ ID NO: 5226 - RNA, 20 nt, Artificial Sequence
  spacer sequence ATCN PAM
uauaauaucuguucuucugu

SEQ ID NO: 5227 - RNA, 20 nt, Artificial Sequence
  spacer sequence ATCN PAM
guucuucugugucugguuua

SEQ ID NO: 5228 - RNA, 20 nt, Artificial Sequence
  spacer sequence ATCN PAM
ucaaacaguuaaacauagaa

SEQ ID NO: 5229 - RNA, 20 nt, Artificial Sequence
  spacer sequence ATCN PAM
gccaccuguuuucuacagcg

SEQ ID NO: 5230 - RNA, 20 nt, Artificial Sequence
  spacer sequence ATCN PAM
cauugugguuuugauuugca

SEQ ID NO: 5231 - RNA, 20 nt, Artificial Sequence
  spacer sequence ATCN PAM
uuucauguguuuauugguca

SEQ ID NO: 5232 - RNA, 20 nt, Artificial Sequence
  spacer sequence ATCN PAM
ucuuugaaaaacugucuauu

SEQ ID NO: 5233 - RNA, 20 nt, Artificial Sequence
  spacer sequence ATCN PAM
acacacagagcuguucuauu

SEQ ID NO: 5234 - RNA, 20 nt, Artificial Sequence
  spacer sequence ATCN PAM
ggaacaagugcugcauuuug

SEQ ID NO: 5235 - RNA, 20 nt, Artificial Sequence
  spacer sequence ATCN PAM
aaaaaaaaaaaacugaaaag

SEQ ID NO: 5236 - RNA, 20 nt, Artificial Sequence
  spacer sequence ATCN PAM
caggcuaauuuucuuacuaa

SEQ ID NO: 5237 - RNA, 20 nt, Artificial Sequence
  spacer sequence ATCN PAM
gcguuuuccauauccuauua

SEQ ID NO: 5238 - RNA, 20 nt, Artificial Sequence
  spacer sequence ATCN PAM
uauuaaauacaagcuaagca

SEQ ID NO: 5239 - RNA, 20 nt, Artificial Sequence
  spacer sequence ATCN PAM
ugucauggagaaaugcuugc

SEQ ID NO: 5240 - RNA, 20 nt, Artificial Sequence
  spacer sequence ATCN PAM
ccaccggaaccaugcugggu

SEQ ID NO: 5241 - RNA, 20 nt, Artificial Sequence
  spacer sequence ATCN PAM
ccaucagcagcaacuacaag

SEQ ID NO: 5242 - RNA, 20 nt, Artificial Sequence
  spacer sequence ATCN PAM
gcagcaacuacaagaagugg

SEQ ID NO: 5243 - RNA, 20 nt, Artificial Sequence
  spacer sequence ATCN PAM
uauaauuuuuagccacuucu

SEQ ID NO: 5244 - RNA, 20 nt, Artificial Sequence
  spacer sequence ATCN PAM
ugaagauucagacuugauca

SEQ ID NO: 5245 - RNA, 20 nt, Artificial Sequence
  spacer sequence ATCN PAM
ucaggaugguugugacauau

SEQ ID NO: 5246 - RNA, 20 nt, Artificial Sequence
  spacer sequence ATCN PAM
agucugaaucuucaggaugg

SEQ ID NO: 5247 - RNA, 20 nt, Artificial Sequence
  spacer sequence ATCN PAM
acacuugaagggaaugaagc

SEQ ID NO: 5248 - RNA, 20 nt, Artificial Sequence
  spacer sequence ATCN PAM
ugggacgauuuacuccagug

SEQ ID NO: 5249 - RNA, 20 nt, Artificial Sequence
  spacer sequence ATCN PAM
ucccaggauaaugguuaccu

SEQ ID NO: 5250 - RNA, 20 nt, Artificial Sequence
  spacer sequence ATCN PAM
gacagagaggaaccuguuuu

SEQ ID NO: 5251 - RNA, 20 nt, Artificial Sequence
  spacer sequence ATCN PAM
cuccaucugacagagaggaa

SEQ ID NO: 5252 - RNA, 20 nt, Artificial Sequence
  spacer sequence ATCN PAM
aacaaaaugauuuugugucu

SEQ ID NO: 5253 - RNA, 20 nt, Artificial Sequence
  spacer sequence ATCN PAM
uuuuguuggauaaaaguauu

SEQ ID NO: 5254 - RNA, 20 nt, Artificial Sequence
  spacer sequence ATCN PAM
accccaugaggcagcccgug

SEQ ID NO: 5255 - RNA, 20 nt, Artificial Sequence
  spacer sequence ATCN PAM
caaugaaccuguuuucauua

SEQ ID NO: 5256 - RNA, 20 nt, Artificial Sequence
  spacer sequence ATCN PAM
agcaauucuccugccucagc

SEQ ID NO: 5257 - RNA, 20 nt, Artificial Sequence
  spacer sequence ATCN PAM
cagcaguuugggaggcugag

SEQ ID NO: 5258 - RNA, 20 nt, Artificial Sequence
  spacer sequence ATCN PAM
cuuuaagaauaaaugcuagc

SEQ ID NO: 5259 - RNA, 20 nt, Artificial Sequence
  spacer sequence ATCN PAM
ccugacauagcugucucauu

SEQ ID NO: 5260 - RNA, 20 nt, Artificial Sequence
  spacer sequence ATCN PAM
gccuacaaagaaagaguguu

SEQ ID NO: 5261 - RNA, 20 nt, Artificial Sequence
  spacer sequence ATCN PAM
ggcccagucucaaacuuggu

SEQ ID NO: 5262 - RNA, 20 nt, Artificial Sequence
  spacer sequence ATCN PAM
ugcaugaggacauuggugau

SEQ ID NO: 5263 - RNA, 20 nt, Artificial Sequence
  spacer sequence ATCN PAM
ccaauguccucaugcaggau

SEQ ID NO: 5264 - RNA, 20 nt, Artificial Sequence
  spacer sequence ATCN PAM
uuucuuaucaccaauguccu

SEQ ID NO: 5265 - RNA, 20 nt, Artificial Sequence
  spacer sequence ATCN PAM
aauguaacuuaaauaacaaa

SEQ ID NO: 5266 - RNA, 20 nt, Artificial Sequence
  spacer sequence ATCN PAM
ucauuuuacaacagcuccuu

SEQ ID NO: 5267 - RNA, 20 nt, Artificial Sequence
  spacer sequence ATCN PAM
accucacacuuucucuucac

SEQ ID NO: 5268 - RNA, 20 nt, Artificial Sequence
  spacer sequence ATCN PAM
gcacuaauuaagccuugaaa

SEQ ID NO: 5269 - RNA, 20 nt, Artificial Sequence
  spacer sequence ATCN PAM
guuauugaacuaccucugca

SEQ ID NO: 5270 - RNA, 20 nt, Artificial Sequence
  spacer sequence ATCN PAM
gcuuugacuaaaaacagaau

SEQ ID NO: 5271 - RNA, 20 nt, Artificial Sequence
  spacer sequence ATCN PAM
ucagcuuugacuaaaaacag

SEQ ID NO: 5272 - RNA, 20 nt, Artificial Sequence
  spacer sequence ATCN PAM
uuucagugcuuauucucagu

SEQ ID NO: 5273 - RNA, 20 nt, Artificial Sequence
  spacer sequence ATCN PAM
aucuuuucagugcuuauucu

SEQ ID NO: 5274 - RNA, 20 nt, Artificial Sequence
  spacer sequence ATCN PAM
cugcuguccuggagugauac

SEQ ID NO: 5275 - RNA, 20 nt, Artificial Sequence
  spacer sequence ATCN PAM
cuccaggacagcagggaucu

SEQ ID NO: 5276 - RNA, 20 nt, Artificial Sequence
  spacer sequence ATCN PAM
ugcuuguacuaaccacuuuu

SEQ ID NO: 5277 - RNA, 20 nt, Artificial Sequence
  spacer sequence ATCN PAM
uuuucugucaugguuuaaaa

SEQ ID NO: 5278 - RNA, 20 nt, Artificial Sequence
  spacer sequence ATCN PAM
cccaugaguccuuacugagc

SEQ ID NO: 5279 - RNA, 20 nt, Artificial Sequence
  spacer sequence ATCN PAM
agcacugggcucuguccagg

SEQ ID NO: 5280 - RNA, 20 nt, Artificial Sequence
  spacer sequence ATCN PAM
cacacccaccaugggcucug

SEQ ID NO: 5281 - RNA, 20 nt, Artificial Sequence
  spacer sequence ATCN PAM
caggcccuaaucccacaccc

SEQ ID NO: 5282 - RNA, 20 nt, Artificial Sequence
  spacer sequence ATCN PAM
uuguggggagcaaggaaaaa

SEQ ID NO: 5283 - RNA, 20 nt, Artificial Sequence
  spacer sequence ATCN PAM
cuuuacuguuaauugucaua

SEQ ID NO: 5284 - RNA, 20 nt, Artificial Sequence
  spacer sequence ATCN PAM
auuauguuauuauuaaaaag

SEQ ID NO: 5285 - RNA, 20 nt, Artificial Sequence
  spacer sequence ATCN PAM
uaaccacucuucuggugcac

SEQ ID NO: 5286 - RNA, 20 nt, Artificial Sequence
  spacer sequence ATCN PAM
ucagccucucagaugaucau

SEQ ID NO: 5287 - RNA, 20 nt, Artificial Sequence
  spacer sequence ATCN PAM
gagaggcugaagauagugga

SEQ ID NO: 5288 - RNA, 20 nt, Artificial Sequence
  spacer sequence ATCN PAM
ucugagaggcugaagauagu

SEQ ID NO: 5289 - RNA, 20 nt, Artificial Sequence
  spacer sequence ATCN PAM
uggcaucaguuaaaauuggg

SEQ ID NO: 5290 - RNA, 20 nt, Artificial Sequence
  spacer sequence ATCN PAM
ucaaaugaguuucacccaau

SEQ ID NO: 5291 - RNA, 20 nt, Artificial Sequence
  spacer sequence ATCN PAM
ccuuuuaaagcauuguacuc

SEQ ID NO: 5292 - RNA, 20 nt, Artificial Sequence
  spacer sequence ATCN PAM
ugguuuuuccaugucuguuc

SEQ ID NO: 5293 - RNA, 20 nt, Artificial Sequence
  spacer sequence ATCN PAM
uugaguaacguuggauauug

SEQ ID NO: 5294 - RNA, 20 nt, Artificial Sequence
  spacer sequence ATCN PAM
aacguuacucaaggauauug

SEQ ID NO: 5295 - RNA, 20 nt, Artificial Sequence
  spacer sequence ATCN PAM
uucagaagaccugugaguug

SEQ ID NO: 5296 - RNA, 20 nt, Artificial Sequence
  spacer sequence ATCN PAM
gucacugugugacucccagg

SEQ ID NO: 5297 - RNA, 20 nt, Artificial Sequence
  spacer sequence ATCN PAM
gugguuggagaagccuggga

SEQ ID NO: 5298 - RNA, 20 nt, Artificial Sequence
  spacer sequence ATCN PAM
aggcauuuaccugaugaaug

SEQ ID NO: 5299 - RNA, 20 nt, Artificial Sequence
  spacer sequence ATCN PAM
gguaaaugccuugauuacuu

SEQ ID NO: 5300 - RNA, 20 nt, Artificial Sequence
  spacer sequence ATCN PAM
uuucaaauacaucuagcaca

SEQ ID NO: 5301 - RNA, 20 nt, Artificial Sequence
  spacer sequence ATCN PAM
agcacauucccauuaagcca

SEQ ID NO: 5302 - RNA, 20 nt, Artificial Sequence
  spacer sequence ATCN PAM
ccaaaauaaaugcaccuugc

SEQ ID NO: 5303 - RNA, 20 nt, Artificial Sequence
  spacer sequence ATCN PAM
aaaaugaaaugaauuugaaa

SEQ ID NO: 5304 - RNA, 20 nt, Artificial Sequence
  spacer sequence ATCN PAM
uaggugaauuagacauucaa

SEQ ID NO: 5305 - RNA, 20 nt, Artificial Sequence
  spacer sequence ATCN PAM
ccugccugugaaauaaugga

SEQ ID NO: 5306 - RNA, 20 nt, Artificial Sequence
  spacer sequence ATCN PAM
ugaguuuggcauuggaaaug

SEQ ID NO: 5307 - RNA, 20 nt, Artificial Sequence
  spacer sequence ATCN PAM
cuaacuugacucugggcuca

SEQ ID NO: 5308 - RNA, 20 nt, Artificial Sequence
  spacer sequence ATCN PAM
ccugugcagaaaggaguggg

SEQ ID NO: 5309 - RNA, 20 nt, Artificial Sequence
  spacer sequence ATCN PAM
uacuuauuuuacucugcuau

SEQ ID NO: 5310 - RNA, 20 nt, Artificial Sequence
  spacer sequence ATCN PAM
aaaaaacaaaaaacaaaaaa

SEQ ID NO: 5311 - RNA, 20 nt, Artificial Sequence
  spacer sequence ATCN PAM
uggccauuuaaccuaaucua

SEQ ID NO: 5312 - RNA, 20 nt, Artificial Sequence
  spacer sequence ATCN PAM
uaucuuguacaaauugagug

SEQ ID NO: 5313 - RNA, 20 nt, Artificial Sequence
  spacer sequence ATCN PAM
uguacaaauugagugccucu

SEQ ID NO: 5314 - RNA, 20 nt, Artificial Sequence
  spacer sequence ATCN PAM
gcagacagaggcacucaauu

SEQ ID NO: 5315 - RNA, 20 nt, Artificial Sequence
  spacer sequence ATCN PAM
aaagcuuuucagaauaugca

SEQ ID NO: 5316 - RNA, 20 nt, Artificial Sequence
  spacer sequence ATCN PAM
uaaguguagacagacaucuc

SEQ ID NO: 5317 - RNA, 20 nt, Artificial Sequence
  spacer sequence ATCN PAM
caugugucuugcuaagcaca

SEQ ID NO: 5318 - RNA, 20 nt, Artificial Sequence
  spacer sequence ATCN PAM
aaaaggugcugcaccuuuug

SEQ ID NO: 5319 - RNA, 20 nt, Artificial Sequence
  spacer sequence ATCN PAM
cgaauuuagaguuuaguuua

SEQ ID NO: 5320 - RNA, 20 nt, Artificial Sequence
  spacer sequence ATCN PAM
auauuucaaaguguaccccc

SEQ ID NO: 5321 - RNA, 20 nt, Artificial Sequence
  spacer sequence ATCN PAM
uucugggggguacacuuuga

SEQ ID NO: 5322 - RNA, 20 nt, Artificial Sequence
  spacer sequence ATCN PAM
ucuuccacccacuggcugau

SEQ ID NO: 5323 - RNA, 20 nt, Artificial Sequence
  spacer sequence ATCN PAM
gccaguggguggaagaggau

SEQ ID NO: 5324 - RNA, 20 nt, Artificial Sequence
  spacer sequence ATCN PAM
cuuuaguuucagcuuugauc

SEQ ID NO: 5325 - RNA, 20 nt, Artificial Sequence
  spacer sequence ATCN PAM
aagcugaaacuaaagugauu

SEQ ID NO: 5326 - RNA, 20 nt, Artificial Sequence
  spacer sequence ATCN PAM
cuguuaaaaugcaaauaccu

SEQ ID NO: 5327 - RNA, 20 nt, Artificial Sequence
  spacer sequence ATCN PAM
gcccuuuacaguccaccgag

SEQ ID NO: 5328 - RNA, 20 nt, Artificial Sequence
  spacer sequence ATCN PAM
aagaaaagcauuagcugaac

SEQ ID NO: 5329 - RNA, 20 nt, Artificial Sequence
  spacer sequence ATCN PAM
uucuacugaaagauaauuca

SEQ ID NO: 5330 - RNA, 20 nt, Artificial Sequence
  spacer sequence ATCN PAM
uucaguagaaugauagcuug

SEQ ID NO: 5331 - RNA, 20 nt, Artificial Sequence
  spacer sequence ATCN PAM
ucaggguucagccuuucugu

SEQ ID NO: 5332 - RNA, 20 nt, Artificial Sequence
  spacer sequence ATCN PAM
guuccuaaauugcauaguau

SEQ ID NO: 5333 - RNA, 20 nt, Artificial Sequence
  spacer sequence ATCN PAM
cauuuacauuuuauauacua

SEQ ID NO: 5334 - RNA, 20 nt, Artificial Sequence
  spacer sequence ATCN PAM
caccacucuuaaauuauuau

SEQ ID NO: 5335 - RNA, 20 nt, Artificial Sequence
  spacer sequence ATCN PAM
cacucuuccaaaugaauuuu

SEQ ID NO: 5336 - RNA, 20 nt, Artificial Sequence
  spacer sequence ATCN PAM
accucacagagauuagugau

SEQ ID NO: 5337 - RNA, 20 nt, Artificial Sequence
  spacer sequence ATCN PAM
cugugagguagaucccacuc

SEQ ID NO: 5338 - RNA, 20 nt, Artificial Sequence
  spacer sequence ATCN PAM
cuaaucucugugagguagau

SEQ ID NO: 5339 - RNA, 20 nt, Artificial Sequence
  spacer sequence ATCN PAM
uguauuuuuaaugaauauca

SEQ ID NO: 5340 - RNA, 20 nt, Artificial Sequence
  spacer sequence ATCN PAM
auaggagaaaccccaugaca

SEQ ID NO: 5341 - RNA, 20 nt, Artificial Sequence
  spacer sequence ATCN PAM
aauuugauuaaacugugcuu

SEQ ID NO: 5342 - RNA, 20 nt, Artificial Sequence
  spacer sequence ATCN PAM
aauuagauggugggcuaugu

SEQ ID NO: 5343 - RNA, 20 nt, Artificial Sequence
  spacer sequence ATCN PAM
uuaaaacagccugcaauaau

SEQ ID NO: 5344 - RNA, 20 nt, Artificial Sequence
  spacer sequence ATCN PAM
uuuuaaggcuauugaacuaa

SEQ ID NO: 5345 - RNA, 20 nt, Artificial Sequence
  spacer sequence ATCN PAM
aagugagcuaauuuuucuua

SEQ ID NO: 5346 - RNA, 20 nt, Artificial Sequence
  spacer sequence ATCN PAM
aaucaaagugagcuaauuuu

SEQ ID NO: 5347 - RNA, 20 nt, Artificial Sequence
  spacer sequence ATCN PAM
aauagaaucaaaucaaagug

SEQ ID NO: 5348 - RNA, 20 nt, Artificial Sequence
  spacer sequence ATCN PAM
uacaaucccagccagcuaac

SEQ ID NO: 5349 - RNA, 20 nt, Artificial Sequence
  spacer sequence ATCN PAM
cagccagcuaacugcuagaa

SEQ ID NO: 5350 - RNA, 20 nt, Artificial Sequence
  spacer sequence ATCN PAM
uuaauaaccauucauuuaug

SEQ ID NO: 5351 - RNA, 20 nt, Artificial Sequence
  spacer sequence ATCN PAM
agccugacaugcucauccga

SEQ ID NO: 5352 - RNA, 20 nt, Artificial Sequence
  spacer sequence ATCN PAM
gaggagcugggcuguagcaa

SEQ ID NO: 5353 - RNA, 20 nt, Artificial Sequence
  spacer sequence ATCN PAM
ucccuuucuacgacuaggaa

SEQ ID NO: 5354 - RNA, 20 nt, Artificial Sequence
  spacer sequence ATCN PAM
ccucuccucucccuccccuu

SEQ ID NO: 5355 - RNA, 20 nt, Artificial Sequence
  spacer sequence ATCN PAM
aaggcucugucuugcuucuc

SEQ ID NO: 5356 - RNA, 20 nt, Artificial Sequence
  spacer sequence ATCN PAM
gucuacauuugggagaagcu

SEQ ID NO: 5357 - RNA, 20 nt, Artificial Sequence
  spacer sequence ATCN PAM
cagcaggagagguuggcuca

SEQ ID NO: 5358 - RNA, 20 nt, Artificial Sequence
  spacer sequence ATCN PAM
gggugucccagggagcuucc

SEQ ID NO: 5359 - RNA, 20 nt, Artificial Sequence
  spacer sequence ATCN PAM
gccucagucuucuuugcaga

SEQ ID NO: 5360 - RNA, 20 nt, Artificial Sequence
  spacer sequence ATCN PAM
cuuucccuggugaaaagcca

SEQ ID NO: 5361 - RNA, 20 nt, Artificial Sequence
  spacer sequence ATCN PAM
gagaguuggugugauacugc

SEQ ID NO: 5362 - RNA, 20 nt, Artificial Sequence
  spacer sequence ATCN PAM
caccaacucucagaucacuu

SEQ ID NO: 5363 - RNA, 20 nt, Artificial Sequence
  spacer sequence ATCN PAM
gaagaaagagacaaacuggg

SEQ ID NO: 5364 - RNA, 20 nt, Artificial Sequence
  spacer sequence ATCN PAM
auuuucuuuaagucuuuccc

SEQ ID NO: 5365 - RNA, 20 nt, Artificial Sequence
  spacer sequence ATCN PAM
aaugaauaauucacuaaaug

SEQ ID NO: 5366 - RNA, 20 nt, Artificial Sequence
  spacer sequence ATCN PAM
acagcgacagcucugaguaa

SEQ ID NO: 5367 - RNA, 20 nt, Artificial Sequence
  spacer sequence ATCN PAM
acuaaccauuacuacuccuu

SEQ ID NO: 5368 - RNA, 20 nt, Artificial Sequence
  spacer sequence ATCN PAM
agaaauauuuccucucccuu

SEQ ID NO: 5369 - RNA, 20 nt, Artificial Sequence
  spacer sequence ATCN PAM
aaugaaaaagcccuguauuu

SEQ ID NO: 5370 - RNA, 20 nt, Artificial Sequence
  spacer sequence ATCN PAM
cacgagacuaauucacacca

SEQ ID NO: 5371 - RNA, 20 nt, Artificial Sequence
  spacer sequence ATCN PAM
gaugguuuuaccagggguuu

SEQ ID NO: 5372 - RNA, 20 nt, Artificial Sequence
  spacer sequence ATCN PAM
gaucucacgagacuaauuca

SEQ ID NO: 5373 - RNA, 20 nt, Artificial Sequence
  spacer sequence ATCN PAM
uccucauucucucuuugccu

SEQ ID NO: 5374 - RNA, 20 nt, Artificial Sequence
  spacer sequence ATCN PAM
auguaagauggaacuuucuc

SEQ ID NO: 5375 - RNA, 20 nt, Artificial Sequence
  spacer sequence ATCN PAM
uacauggauggcagcaggca

SEQ ID NO: 5376 - RNA, 20 nt, Artificial Sequence
  spacer sequence ATCN PAM
cagacaacccaacacuuuuu

SEQ ID NO: 5377 - RNA, 20 nt, Artificial Sequence
  spacer sequence ATCN PAM
ugugcgugcaugcacguauu

SEQ ID NO: 5378 - RNA, 20 nt, Artificial Sequence
  spacer sequence ATCN PAM
acucccccaaccuaccccuu

SEQ ID NO: 5379 - RNA, 20 nt, Artificial Sequence
  spacer sequence ATCN PAM
agggucuucuagguucaccu

SEQ ID NO: 5380 - RNA, 20 nt, Artificial Sequence
  spacer sequence ATCN PAM
ccaaauauguaauucuugau

SEQ ID NO: 5381 - RNA, 20 nt, Artificial Sequence
  spacer sequence ATCN PAM
agaauuacauauuuggagau

SEQ ID NO: 5382 - RNA, 20 nt, Artificial Sequence
  spacer sequence ATCN PAM
uccaauuggaauuaaaaauu

SEQ ID NO: 5383 - RNA, 20 nt, Artificial Sequence
  spacer sequence ATCN PAM
aaauguaggucaaguaauuu

SEQ ID NO: 5384 - RNA, 20 nt, Artificial Sequence
  spacer sequence ATCN PAM
ucugacucuguuuuugagca

SEQ ID NO: 5385 - RNA, 20 nt, Artificial Sequence
  spacer sequence ATCN PAM
gcagcagcuguuucaagaac

SEQ ID NO: 5386 - RNA, 20 nt, Artificial Sequence
  spacer sequence ATCN PAM
caaauccaguuguuuuaaca

SEQ ID NO: 5387 - RNA, 20 nt, Artificial Sequence
  spacer sequence ATCN PAM
aguuguuuuaacagaaaaua

SEQ ID NO: 5388 - RNA, 20 nt, Artificial Sequence
  spacer sequence ATCN PAM
cagucugccacuuucccaua

SEQ ID NO: 5389 - RNA, 20 nt, Artificial Sequence
  spacer sequence ATCN PAM
cauaaauuuuccacuuuaaa

SEQ ID NO: 5390 - RNA, 20 nt, Artificial Sequence
  spacer sequence ATCN PAM
cuuuaccccaguuuuuaggg

SEQ ID NO: 5391 - RNA, 20 nt, Artificial Sequence
  spacer sequence ATCN PAM
aucucuuuaccccaguuuuu

SEQ ID NO: 5392 - RNA, 20 nt, Artificial Sequence
  spacer sequence ATCN PAM
gcgguuuuggacccaaaaug

SEQ ID NO: 5393 - RNA, 20 nt, Artificial Sequence
  spacer sequence ATCN PAM
caacagguuuccuguaugug

SEQ ID NO: 5394 - RNA, 20 nt, Artificial Sequence
  spacer sequence ATCN PAM
cuguugacacauacucaauu

SEQ ID NO: 5395 - RNA, 20 nt, Artificial Sequence
  spacer sequence ATCN PAM
uuuccaauagguccuggcug

SEQ ID NO: 5396 - RNA, 20 nt, Artificial Sequence
  spacer sequence ATCN PAM
cagaaaguugggacaaagga

SEQ ID NO: 5397 - RNA, 20 nt, Artificial Sequence
  spacer sequence ATCN PAM
aaugcaguuaaaaggcacuu

SEQ ID NO: 5398 - RNA, 20 nt, Artificial Sequence
  spacer sequence ATCN PAM
ccaggcccuaagccauaauc

SEQ ID NO: 5399 - RNA, 20 nt, Artificial Sequence
  spacer sequence ATCN PAM
gaaaaugcaccguggcucua

SEQ ID NO: 5400 - RNA, 20 nt, Artificial Sequence
  spacer sequence ATCN PAM
ucugaaaaugcaccguggcu

SEQ ID NO: 5401 - RNA, 20 nt, Artificial Sequence
  spacer sequence ATCN PAM
acaagucagucccugccggu

SEQ ID NO: 5402 - RNA, 20 nt, Artificial Sequence
  spacer sequence ATCN PAM
ucuggccuuaccggcaggga

SEQ ID NO: 5403 - RNA, 20 nt, Artificial Sequence
  spacer sequence ATCN PAM
uauaagugugucauuuuuca

SEQ ID NO: 5404 - RNA, 20 nt, Artificial Sequence
  spacer sequence ATCN PAM
aguucugcuucuccaagauu

SEQ ID NO: 5405 - RNA, 20 nt, Artificial Sequence
  spacer sequence ATCN PAM
cauccaguucugcuucucca

SEQ ID NO: 5406 - RNA, 20 nt, Artificial Sequence
  spacer sequence ATCN PAM
uaauugaguaagcagacaca

SEQ ID NO: 5407 - RNA, 20 nt, Artificial Sequence
  spacer sequence ATCN PAM
auuauguaguacacuguuag

SEQ ID NO: 5408 - RNA, 20 nt, Artificial Sequence
  spacer sequence ATCN PAM
agcucacagaagacugcugc

SEQ ID NO: 5409 - RNA, 20 nt, Artificial Sequence
  spacer sequence ATCN PAM
aucaagcucacagaagacug

SEQ ID NO: 5410 - RNA, 20 nt, Artificial Sequence
  spacer sequence ATCN PAM
gcuacaaugacauggcaaag

SEQ ID NO: 5411 - RNA, 20 nt, Artificial Sequence
  spacer sequence ATCN PAM
auacccccuuuuguaccuaa

SEQ ID NO: 5412 - RNA, 20 nt, Artificial Sequence
  spacer sequence ATCN PAM
uauuuuauugccuucaagcu

SEQ ID NO: 5413 - RNA, 20 nt, Artificial Sequence
  spacer sequence ATCN PAM
ugccagucgacucagaagaa

SEQ ID NO: 5414 - RNA, 20 nt, Artificial Sequence
  spacer sequence ATCN PAM
cuuggggacuagagcuguga

SEQ ID NO: 5415 - RNA, 20 nt, Artificial Sequence
  spacer sequence ATCN PAM
cagcucuaguccccaaggga

SEQ ID NO: 5416 - RNA, 20 nt, Artificial Sequence
  spacer sequence ATCN PAM
uaauauguuuaauuuuauca

SEQ ID NO: 5417 - RNA, 20 nt, Artificial Sequence
  spacer sequence ATCN PAM
cacuucaucaucaauaaagc

SEQ ID NO: 5418 - RNA, 20 nt, Artificial Sequence
  spacer sequence ATCN PAM
ucaauaaagcaauuacacau

SEQ ID NO: 5419 - RNA, 20 nt, Artificial Sequence
  spacer sequence ATCN PAM
auaaagcaauuacacauauc

SEQ ID NO: 5420 - RNA, 20 nt, Artificial Sequence
  spacer sequence ATCN PAM
gaucuaauuuaauucucuca

SEQ ID NO: 5421 - RNA, 20 nt, Artificial Sequence
  spacer sequence ATCN PAM
gauauguguaauugcuuuau

SEQ ID NO: 5422 - RNA, 20 nt, Artificial Sequence
  spacer sequence ATCN PAM
aauuuaauucucucacuaac

SEQ ID NO: 5423 - RNA, 20 nt, Artificial Sequence
  spacer sequence ATCN PAM
uucccucauuacaaaaaacc

SEQ ID NO: 5424 - RNA, 20 nt, Artificial Sequence
  spacer sequence ATCN PAM
augcuacuguuuugguguug

SEQ ID NO: 5425 - RNA, 20 nt, Artificial Sequence
  spacer sequence ATCN PAM
cuaguuaccauauaaacccu

SEQ ID NO: 5426 - RNA, 20 nt, Artificial Sequence
  spacer sequence ATCN PAM
agauaaaagagacucacccu

SEQ ID NO: 5427 - RNA, 20 nt, Artificial Sequence
  spacer sequence ATCN PAM
ugaucacuaguuaccauaua

SEQ ID NO: 5428 - RNA, 20 nt, Artificial Sequence
  spacer sequence ATCN PAM
uguugcuccauuauucuuaa

SEQ ID NO: 5429 - RNA, 20 nt, Artificial Sequence
  spacer sequence ATCN PAM
caugguccaacauggcugcu

SEQ ID NO: 5430 - RNA, 20 nt, Artificial Sequence
  spacer sequence ATCN PAM
cauaaauucuaaccaauagg

SEQ ID NO: 5431 - RNA, 20 nt, Artificial Sequence
  spacer sequence ATCN PAM
aaaacucuucugguugcaag

SEQ ID NO: 5432 - RNA, 20 nt, Artificial Sequence
  spacer sequence ATCN PAM
cuugcaaccagaagaguuuu

SEQ ID NO: 5433 - RNA, 20 nt, Artificial Sequence
  spacer sequence ATCN PAM
aaccacauggcucagucuca

SEQ ID NO: 5434 - RNA, 20 nt, Artificial Sequence
  spacer sequence ATCN PAM
uucccaggcagguucucuuu

SEQ ID NO: 5435 - RNA, 20 nt, Artificial Sequence
  spacer sequence ATCN PAM
ccucugcuggaccagaguug

SEQ ID NO: 5436 - RNA, 20 nt, Artificial Sequence
  spacer sequence ATCN PAM
uugagccaaucauggugucu

SEQ ID NO: 5437 - RNA, 20 nt, Artificial Sequence
  spacer sequence ATCN PAM
uggugucucugacuggccug

SEQ ID NO: 5438 - RNA, 20 nt, Artificial Sequence
  spacer sequence ATCN PAM
caaggggggacgagaguggu

SEQ ID NO: 5439 - RNA, 20 nt, Artificial Sequence
  spacer sequence ATCN PAM
uguugacguuugaucccuga

SEQ ID NO: 5440 - RNA, 20 nt, Artificial Sequence
  spacer sequence ATCN PAM
cuuaguauaguacuuacuuc

SEQ ID NO: 5441 - RNA, 20 nt, Artificial Sequence
  spacer sequence ATCN PAM
ucacccccuguccccuaggc

SEQ ID NO: 5442 - RNA, 20 nt, Artificial Sequence
  spacer sequence ATCN PAM
caacccaugcagaagcaucu

SEQ ID NO: 5443 - RNA, 20 nt, Artificial Sequence
  spacer sequence ATCN PAM
gacugaagaguuuagugaac

SEQ ID NO: 5444 - RNA, 20 nt, Artificial Sequence
  spacer sequence ATCN PAM
gaaaguccauaagaacuaaa

SEQ ID NO: 5445 - RNA, 20 nt, Artificial Sequence
  spacer sequence ATCN PAM
uccaaaagucuccauuggug

SEQ ID NO: 5446 - RNA, 20 nt, Artificial Sequence
  spacer sequence ATCN PAM
cccucaaaaagucugugcaa

SEQ ID NO: 5447 - RNA, 20 nt, Artificial Sequence
  spacer sequence ATCN PAM
ccucuccuucagaucauggu

SEQ ID NO: 5448 - RNA, 20 nt, Artificial Sequence
  spacer sequence ATCN PAM
gaaggagaggugauuugucu

SEQ ID NO: 5449 - RNA, 20 nt, Artificial Sequence
  spacer sequence ATCN PAM
uggugagauucaauaauuuu

SEQ ID NO: 5450 - RNA, 20 nt, Artificial Sequence
  spacer sequence ATCN PAM
caccaugaucugaaggagag

SEQ ID NO: 5451 - RNA, 20 nt, Artificial Sequence
  spacer sequence ATCN PAM
cuaaauaaauaaauaaaauu

SEQ ID NO: 5452 - RNA, 20 nt, Artificial Sequence
  spacer sequence ATCN PAM
cagcacuuugggaggcugag

SEQ ID NO: 5453 - RNA, 20 nt, Artificial Sequence
  spacer sequence ATCN PAM
guaaucccagcacuuuggga

SEQ ID NO: 5454 - RNA, 20 nt, Artificial Sequence
  spacer sequence ATCN PAM
uuauuggccaggcgcguggc

SEQ ID NO: 5455 - RNA, 20 nt, Artificial Sequence
  spacer sequence ATCN PAM
uucaaaguaaaaauagaggg

SEQ ID NO: 5456 - RNA, 20 nt, Artificial Sequence
  spacer sequence ATCN PAM
uugcuauuuuaucuuucaaa

SEQ ID NO: 5457 - RNA, 20 nt, Artificial Sequence
  spacer sequence ATCN PAM
cagcugugagguguagggaa

SEQ ID NO: 5458 - RNA, 20 nt, Artificial Sequence
  spacer sequence ATCN PAM
gacccuccacaucuauagag

SEQ ID NO: 5459 - RNA, 20 nt, Artificial Sequence
  spacer sequence ATCN PAM
auagagguacaucugcaauu

SEQ ID NO: 5460 - RNA, 20 nt, Artificial Sequence
  spacer sequence ATCN PAM
gcaauugagaugcauaucac

SEQ ID NO: 5461 - RNA, 20 nt, Artificial Sequence
  spacer sequence ATCN PAM
uucuuauaagugauaugcau

SEQ ID NO: 5462 - RNA, 20 nt, Artificial Sequence
  spacer sequence ATCN PAM
augugaccugugaugacaaa

SEQ ID NO: 5463 - RNA, 20 nt, Artificial Sequence
  spacer sequence ATCN PAM
caggucacauggauuaaagu

SEQ ID NO: 5464 - RNA, 20 nt, Artificial Sequence
  spacer sequence ATCN PAM
cacggcuaguaacuauuaac

SEQ ID NO: 5465 - RNA, 20 nt, Artificial Sequence
  spacer sequence ATCN PAM
cuuccuuuuuauaggugagg

SEQ ID NO: 5466 - RNA, 20 nt, Artificial Sequence
  spacer sequence ATCN PAM
gcguaagcacacacugugug

SEQ ID NO: 5467 - RNA, 20 nt, Artificial Sequence
  spacer sequence ATCN PAM
guguuugauuaaccuucgac

SEQ ID NO: 5468 - RNA, 20 nt, Artificial Sequence
  spacer sequence ATCN PAM
aacacagaugggggaaaugu

SEQ ID NO: 5469 - RNA, 20 nt, Artificial Sequence
  spacer sequence ATCN PAM
guugugacuaggccaagagg

SEQ ID NO: 5470 - RNA, 20 nt, Artificial Sequence
  spacer sequence ATCN PAM
uaacaaaaaaaauuaaacag

SEQ ID NO: 5471 - RNA, 20 nt, Artificial Sequence
  spacer sequence ATCN PAM
uguuaacuuuagucacaauu

SEQ ID NO: 5472 - RNA, 20 nt, Artificial Sequence
  spacer sequence ATCN PAM
aucuuguuaacuuuagucac

SEQ ID NO: 5473 - RNA, 20 nt, Artificial Sequence
  spacer sequence ATCN PAM
uggcugcacauuaaaaucac

SEQ ID NO: 5474 - RNA, 20 nt, Artificial Sequence
  spacer sequence ATCN PAM
ccugcagagcuuuaaaaacu

SEQ ID NO: 5475 - RNA, 20 nt, Artificial Sequence
  spacer sequence ATCN PAM
gaaucaccugcagagcuuua

SEQ ID NO: 5476 - RNA, 20 nt, Artificial Sequence
  spacer sequence ATCN PAM
gagauuucaaaacucuauca

SEQ ID NO: 5477 - RNA, 20 nt, Artificial Sequence
  spacer sequence ATCN PAM
ccgauucugagucccggcua

SEQ ID NO: 5478 - RNA, 20 nt, Artificial Sequence
  spacer sequence ATCN PAM
gaacuugacaaaugacagca

SEQ ID NO: 5479 - RNA, 20 nt, Artificial Sequence
  spacer sequence ATCN PAM
gaaagcagcuucccccgagg

SEQ ID NO: 5480 - RNA, 20 nt, Artificial Sequence
  spacer sequence ATCN PAM
uguagcauauauuuuggagc

SEQ ID NO: 5481 - RNA, 20 nt, Artificial Sequence
  spacer sequence ATCN PAM
acugucaaaagacaaaaauu

SEQ ID NO: 5482 - RNA, 20 nt, Artificial Sequence
  spacer sequence ATCN PAM
aaacucaaauccacugucaa

SEQ ID NO: 5483 - RNA, 20 nt, Artificial Sequence
  spacer sequence ATCN PAM
uuugaagguuuuuauccaaa

SEQ ID NO: 5484 - RNA, 20 nt, Artificial Sequence
  spacer sequence ATCN PAM
agcucgcugaauaugcuggg

SEQ ID NO: 5485 - RNA, 20 nt, Artificial Sequence
  spacer sequence ATCN PAM
ugcaaaauggcccagcauau

SEQ ID NO: 5486 - RNA, 20 nt, Artificial Sequence
  spacer sequence ATCN PAM
ccuuggccauauguuguguu

SEQ ID NO: 5487 - RNA, 20 nt, Artificial Sequence
  spacer sequence ATCN PAM
auccccuuggccauauguug

SEQ ID NO: 5488 - RNA, 20 nt, Artificial Sequence
  spacer sequence ATCN PAM
gucucaugcgccucauaauu

SEQ ID NO: 5489 - RNA, 20 nt, Artificial Sequence
  spacer sequence ATCN PAM
acauugucuuuuaaugacag

SEQ ID NO: 5490 - RNA, 20 nt, Artificial Sequence
  spacer sequence ATCN PAM
ggaugugugagggcuggcgg

SEQ ID NO: 5491 - RNA, 20 nt, Artificial Sequence
  spacer sequence ATCN PAM
agaucaacauugucuuuuaa

SEQ ID NO: 5492 - RNA, 20 nt, Artificial Sequence
  spacer sequence ATCN PAM
gccucauuauguacggguca

SEQ ID NO: 5493 - RNA, 20 nt, Artificial Sequence
  spacer sequence ATCN PAM
cuguucagggacaccagacu

SEQ ID NO: 5494 - RNA, 20 nt, Artificial Sequence
  spacer sequence ATCN PAM
caccugguugcagaguuucc

SEQ ID NO: 5495 - RNA, 20 nt, Artificial Sequence
  spacer sequence ATCN PAM
ucucaccugguugcagaguu

SEQ ID NO: 5496 - RNA, 20 nt, Artificial Sequence
  spacer sequence ATCN PAM
caacgcaauauugaaucauc

SEQ ID NO: 5497 - RNA, 20 nt, Artificial Sequence
  spacer sequence ATCN PAM
gauaaauccuaacuggugag

SEQ ID NO: 5498 - RNA, 20 nt, Artificial Sequence
  spacer sequence ATCN PAM
gauagaaugugagggaauuu

SEQ ID NO: 5499 - RNA, 20 nt, Artificial Sequence
  spacer sequence ATCN PAM
uaacuggugagagcacaaca

SEQ ID NO: 5500 - RNA, 20 nt, Artificial Sequence
  spacer sequence ATCN PAM
uaaaucaaccggacuuuacu

SEQ ID NO: 5501 - RNA, 20 nt, Artificial Sequence
  spacer sequence ATCN PAM
accggacuuuacuuccagcu

SEQ ID NO: 5502 - RNA, 20 nt, Artificial Sequence
  spacer sequence ATCN PAM
ugcaguuauuuucuuuccca

SEQ ID NO: 5503 - RNA, 20 nt, Artificial Sequence
  spacer sequence ATCN PAM
gggaaagaaaauaacugcaa

SEQ ID NO: 5504 - RNA, 20 nt, Artificial Sequence
  spacer sequence ATCN PAM
caucugggaaagaaaauaac

SEQ ID NO: 5505 - RNA, 20 nt, Artificial Sequence
  spacer sequence ATCN PAM
gcuguggacauuaaccauug

SEQ ID NO: 5506 - RNA, 20 nt, Artificial Sequence
  spacer sequence ATCN PAM
uacagacagaagacuccaga

SEQ ID NO: 5507 - RNA, 20 nt, Artificial Sequence
  spacer sequence ATCN PAM
gcauuugaauggcucugaga

SEQ ID NO: 5508 - RNA, 20 nt, Artificial Sequence
  spacer sequence ATCN PAM
uuuuucauuauuguaguuuu

SEQ ID NO: 5509 - RNA, 20 nt, Artificial Sequence
  spacer sequence ATCN PAM
caucuccucugccucuaaca

SEQ ID NO: 5510 - RNA, 20 nt, Artificial Sequence
  spacer sequence ATCN PAM
ccucugccucuaacauuuca

SEQ ID NO: 5511 - RNA, 20 nt, Artificial Sequence
  spacer sequence ATCN PAM
ggcccuggauuuuacauagc

SEQ ID NO: 5512 - RNA, 20 nt, Artificial Sequence
  spacer sequence ATCN PAM
agggccugauuggaaggcuu

SEQ ID NO: 5513 - RNA, 20 nt, Artificial Sequence
  spacer sequence ATCN PAM
cucauaaggugaaugcuugu

SEQ ID NO: 5514 - RNA, 20 nt, Artificial Sequence
  spacer sequence ATCN PAM
ugguauuuugcauuucuaaa

SEQ ID NO: 5515 - RNA, 20 nt, Artificial Sequence
  spacer sequence ATCN PAM
cagaagagucagcauuuggg

SEQ ID NO: 5516 - RNA, 20 nt, Artificial Sequence
  spacer sequence ATCN PAM
gccuucacaccucccuuuaa

SEQ ID NO: 5517 - RNA, 20 nt, Artificial Sequence
  spacer sequence ATCN PAM
gucauggcagcccauccagc

SEQ ID NO: 5518 - RNA, 20 nt, Artificial Sequence
  spacer sequence ATCN PAM
agcucuguucucagggagcu

SEQ ID NO: 5519 - RNA, 20 nt, Artificial Sequence
  spacer sequence ATCN PAM
gcugcuaaaguuagcucccu

SEQ ID NO: 5520 - RNA, 20 nt, Artificial Sequence
  spacer sequence ATCN PAM
gcuggcggaguuugacacag

SEQ ID NO: 5521 - RNA, 20 nt, Artificial Sequence
  spacer sequence ATCN PAM
ugagaacuaaucaucccccu

SEQ ID NO: 5522 - RNA, 20 nt, Artificial Sequence
  spacer sequence ATCN PAM
ucccccuacuuuccuaacgu

SEQ ID NO: 5523 - RNA, 20 nt, Artificial Sequence
  spacer sequence ATCN PAM
cccuacuuuccuaacgugua

SEQ ID NO: 5524 - RNA, 20 nt, Artificial Sequence
  spacer sequence ATCN PAM
aaguuaacaagcaguccuau

SEQ ID NO: 5525 - RNA, 20 nt, Artificial Sequence
  spacer sequence ATCN PAM
ggagcccaucuucugacuuc

SEQ ID NO: 5526 - RNA, 20 nt, Artificial Sequence
  spacer sequence ATCN PAM
ucugacuucaaaauaaauaa

SEQ ID NO: 5527 - RNA, 20 nt, Artificial Sequence
  spacer sequence ATCN PAM
uuuuuauuuauuuugaaguc

SEQ ID NO: 5528 - RNA, 20 nt, Artificial Sequence
  spacer sequence ATCN PAM
gaguuauagaaaaucuuuuu

SEQ ID NO: 5529 - RNA, 20 nt, Artificial Sequence
  spacer sequence ATCN PAM
ucaccuuucuccaaauaaag

SEQ ID NO: 5530 - RNA, 20 nt, Artificial Sequence
  spacer sequence ATCN PAM
ccucaagugguuaaaagguu

SEQ ID NO: 5531 - RNA, 20 nt, Artificial Sequence
  spacer sequence ATCN PAM
cugagucgagcucacaugug

SEQ ID NO: 5532 - RNA, 20 nt, Artificial Sequence
  spacer sequence ATCN PAM
uuucgcuguuuguuagaagu

SEQ ID NO: 5533 - RNA, 20 nt, Artificial Sequence
  spacer sequence ATCN PAM
uaguaauuuaucuuauuuau

SEQ ID NO: 5534 - RNA, 20 nt, Artificial Sequence
  spacer sequence ATCN PAM
uauuuauuuuccuaaaaagu

SEQ ID NO: 5535 - RNA, 20 nt, Artificial Sequence
  spacer sequence ATCN PAM
cauuguuauaggggccaaga

SEQ ID NO: 5536 - RNA, 20 nt, Artificial Sequence
  spacer sequence ATCN PAM
uaauagccccauuuaaaauu

SEQ ID NO: 5537 - RNA, 20 nt, Artificial Sequence
  spacer sequence ATCN PAM
cugcuuagcugcaacaccgu

SEQ ID NO: 5538 - RNA, 20 nt, Artificial Sequence
  spacer sequence ATCN PAM
ggagaccaaucacugcuuag

SEQ ID NO: 5539 - RNA, 20 nt, Artificial Sequence
  spacer sequence ATCN PAM
ccaaaaccuccaacuuucaa

SEQ ID NO: 5540 - RNA, 20 nt, Artificial Sequence
  spacer sequence ATCN PAM
ucacaaaugcauugugcagc

SEQ ID NO: 5541 - RNA, 20 nt, Artificial Sequence
  spacer sequence ATCN PAM
uguggcaccaaaauaagggu

SEQ ID NO: 5542 - RNA, 20 nt, Artificial Sequence
  spacer sequence ATCN PAM
aaacccuuauuuuggugcca

SEQ ID NO: 5543 - RNA, 20 nt, Artificial Sequence
  spacer sequence ATCN PAM
aaucuaaacccuuauuuugg

SEQ ID NO: 5544 - RNA, 20 nt, Artificial Sequence
  spacer sequence ATCN PAM
gggacagguagcaaauuugc

SEQ ID NO: 5545 - RNA, 20 nt, Artificial Sequence
  spacer sequence ATCN PAM
uucagcuuugaucugcuucc

SEQ ID NO: 5546 - RNA, 20 nt, Artificial Sequence
  spacer sequence ATCN PAM
aagcugaaugaucugggaca

SEQ ID NO: 5547 - RNA, 20 nt, Artificial Sequence
  spacer sequence ATCN PAM
gcuuccaacaagucuuagga

SEQ ID NO: 5548 - RNA, 20 nt, Artificial Sequence
  spacer sequence ATCN PAM
acgucuuuaaggaacuauuu

SEQ ID NO: 5549 - RNA, 20 nt, Artificial Sequence
  spacer sequence ATCN PAM
ggaauucaaagaaccuuuaa

SEQ ID NO: 5550 - RNA, 20 nt, Artificial Sequence
  spacer sequence ATCN PAM
caggcuuucaauguggggcu

SEQ ID NO: 5551 - RNA, 20 nt, Artificial Sequence
  spacer sequence ATCN PAM
ucagagccgaggccccuacc

SEQ ID NO: 5552 - RNA, 20 nt, Artificial Sequence
  spacer sequence ATCN PAM
gagccgaggccccuacccca

SEQ ID NO: 5553 - RNA, 20 nt, Artificial Sequence
  spacer sequence ATCN PAM
cucaccuuccuucauuucag

SEQ ID NO: 5554 - RNA, 20 nt, Artificial Sequence
  spacer sequence ATCN PAM
uguuucaaugacucugcugc

SEQ ID NO: 5555 - RNA, 20 nt, Artificial Sequence
  spacer sequence ATCN PAM
ugcuccaagauaguaaacuu

SEQ ID NO: 5556 - RNA, 20 nt, Artificial Sequence
  spacer sequence ATCN PAM
uggagcaugaugcauuguca

SEQ ID NO: 5557 - RNA, 20 nt, Artificial Sequence
  spacer sequence ATCN PAM
uacagaggucaugagaaaaa

SEQ ID NO: 5558 - RNA, 20 nt, Artificial Sequence
  spacer sequence ATCN PAM
aguggagguuagcaaacugu

SEQ ID NO: 5559 - RNA, 20 nt, Artificial Sequence
  spacer sequence ATCN PAM
uccaagcacuguaaaagcac

SEQ ID NO: 5560 - RNA, 20 nt, Artificial Sequence
  spacer sequence ATCN PAM
aagcacuguaaaagcacaaa

SEQ ID NO: 5561 - RNA, 20 nt, Artificial Sequence
  spacer sequence ATCN PAM
uuugugcuuuuacagugcuu

SEQ ID NO: 5562 - RNA, 20 nt, Artificial Sequence
  spacer sequence ATCN PAM
ucgggcucaguuuauuauaa

SEQ ID NO: 5563 - RNA, 20 nt, Artificial Sequence
  spacer sequence ATCN PAM
guaaaacaucuuuuugacag

SEQ ID NO: 5564 - RNA, 20 nt, Artificial Sequence
  spacer sequence ATCN PAM
uuuugacagugucuuuuuaa

SEQ ID NO: 5565 - RNA, 20 nt, Artificial Sequence
  spacer sequence ATCN PAM
ugugcuaccucuccuuuaag

SEQ ID NO: 5566 - RNA, 20 nt, Artificial Sequence
  spacer sequence ATCN PAM
uccccccucacuuucccaca

SEQ ID NO: 5567 - RNA, 20 nt, Artificial Sequence
  spacer sequence ATCN PAM
ccccucacuuucccacacgu

SEQ ID NO: 5568 - RNA, 20 nt, Artificial Sequence
  spacer sequence ATCN PAM
ucuuguguacgugugggaaa

SEQ ID NO: 5569 - RNA, 20 nt, Artificial Sequence
  spacer sequence ATCN PAM
ccaucgccucucugcaugcc

SEQ ID NO: 5570 - RNA, 20 nt, Artificial Sequence
  spacer sequence ATCN PAM
ccucucugcaugccagagac

SEQ ID NO: 5571 - RNA, 20 nt, Artificial Sequence
  spacer sequence ATCN PAM
uucucaguagucucguuucu

SEQ ID NO: 5572 - RNA, 20 nt, Artificial Sequence
  spacer sequence ATCN PAM
aggaacaauucugccgugaa

SEQ ID NO: 5573 - RNA, 20 nt, Artificial Sequence
  spacer sequence ATCN PAM
ugaguuaauguuacuugcag

SEQ ID NO: 5574 - RNA, 20 nt, Artificial Sequence
  spacer sequence ATCN PAM
uuuuauuuguauuuccuggg

SEQ ID NO: 5575 - RNA, 20 nt, Artificial Sequence
  spacer sequence ATCN PAM
ucuuuuuauuuguauuuccu

SEQ ID NO: 5576 - RNA, 20 nt, Artificial Sequence
  spacer sequence ATCN PAM
gugacucuugagagcauuug

SEQ ID NO: 5577 - RNA, 20 nt, Artificial Sequence
  spacer sequence ATCN PAM
aagguuugagcuauaguuag

SEQ ID NO: 5578 - RNA, 20 nt, Artificial Sequence
  spacer sequence ATCN PAM
uagaaaaauccaagguuuga

SEQ ID NO: 5579 - RNA, 20 nt, Artificial Sequence
  spacer sequence ATCN PAM
uaccucucucccacaguaau

SEQ ID NO: 5580 - RNA, 20 nt, Artificial Sequence
  spacer sequence ATCN PAM
uacgguuuaaccacccagga

SEQ ID NO: 5581 - RNA, 20 nt, Artificial Sequence
  spacer sequence ATCN PAM
caagaagcucaggguucaca

SEQ ID NO: 5582 - RNA, 20 nt, Artificial Sequence
  spacer sequence ATCN PAM
uauccccaaaaggaaagaca

SEQ ID NO: 5583 - RNA, 20 nt, Artificial Sequence
  spacer sequence ATCN PAM
ccaaaaggaaagacaaguua

SEQ ID NO: 5584 - RNA, 20 nt, Artificial Sequence
  spacer sequence ATCN PAM
cacauucuuuaacuugucuu

SEQ ID NO: 5585 - RNA, 20 nt, Artificial Sequence
  spacer sequence ATCN PAM
cugcuuuuguguauuccagu

SEQ ID NO: 5586 - RNA, 20 nt, Artificial Sequence
  spacer sequence ATCN PAM
acaauacuuuggaggguuag

SEQ ID NO: 5587 - RNA, 20 nt, Artificial Sequence
  spacer sequence ATCN PAM
gcugaauaaauauugagggg

SEQ ID NO: 5588 - RNA, 20 nt, Artificial Sequence
  spacer sequence ATCN PAM
uaauaaccccucaauauuua

SEQ ID NO: 5589 - RNA, 20 nt, Artificial Sequence
  spacer sequence ATCN PAM
ucuauuuuguauuggaauca

SEQ ID NO: 5590 - RNA, 20 nt, Artificial Sequence
  spacer sequence ATCN PAM
acuuauuguguacaauauau

SEQ ID NO: 5591 - RNA, 20 nt, Artificial Sequence
  spacer sequence ATCN PAM
aaaagucaaaaauaaaagcu

SEQ ID NO: 5592 - RNA, 20 nt, Artificial Sequence
  spacer sequence ATCN PAM
cuggcuggggagcuuuuauu

SEQ ID NO: 5593 - RNA, 20 nt, Artificial Sequence
  spacer sequence ATCN PAM
uuaugcuucaacucagguac

SEQ ID NO: 5594 - RNA, 20 nt, Artificial Sequence
  spacer sequence ATCN PAM
uccuggcccucgugcaugcu

SEQ ID NO: 5595 - RNA, 20 nt, Artificial Sequence
  spacer sequence ATCN PAM
agugacuugcagcucugugg

SEQ ID NO: 5596 - RNA, 20 nt, Artificial Sequence
  spacer sequence ATCN PAM
uagcacuuugggaagccaag

SEQ ID NO: 5597 - RNA, 20 nt, Artificial Sequence
  spacer sequence ATCN PAM
gcccaccuuggcuucccaaa

SEQ ID NO: 5598 - RNA, 20 nt, Artificial Sequence
  spacer sequence ATCN PAM
cuugagcucagaaguuugag

SEQ ID NO: 5599 - RNA, 20 nt, Artificial Sequence
  spacer sequence ATCN PAM
caagggaaaguguggcaaaa

SEQ ID NO: 5600 - RNA, 20 nt, Artificial Sequence
  spacer sequence ATCN PAM
ucuguguugccaccucccgu

SEQ ID NO: 5601 - RNA, 20 nt, Artificial Sequence
  spacer sequence ATCN PAM
ggugaccgcacauguuucua

SEQ ID NO: 5602 - RNA, 20 nt, Artificial Sequence
  spacer sequence ATCN PAM
ccccaagucauuaggcuggu

SEQ ID NO: 5603 - RNA, 20 nt, Artificial Sequence
  spacer sequence ATCN PAM
aagagaaaggagaguggagc

SEQ ID NO: 5604 - RNA, 20 nt, Artificial Sequence
  spacer sequence ATCN PAM
auguacagcuccacucuccu

SEQ ID NO: 5605 - RNA, 20 nt, Artificial Sequence
  spacer sequence ATCN PAM
ucuucggagaccccaaaggu

SEQ ID NO: 5606 - RNA, 20 nt, Artificial Sequence
  spacer sequence ATCN PAM
gugccagccacaaaacuuau

SEQ ID NO: 5607 - RNA, 20 nt, Artificial Sequence
  spacer sequence ATCN PAM
gcguauagaacauuccacua

SEQ ID NO: 5608 - RNA, 20 nt, Artificial Sequence
  spacer sequence ATCN PAM
acgaccaugagaggguuguc

SEQ ID NO: 5609 - RNA, 20 nt, Artificial Sequence
  spacer sequence ATCN PAM
gggacugcuaucuacgacca

SEQ ID NO: 5610 - RNA, 20 nt, Artificial Sequence
  spacer sequence ATCN PAM
accggaggccaauuaaaaga

SEQ ID NO: 5611 - RNA, 20 nt, Artificial Sequence
  spacer sequence ATCN PAM
aaauauuuccacuucgcuca

SEQ ID NO: 5612 - RNA, 20 nt, Artificial Sequence
  spacer sequence ATCN PAM
auuuugagcgaaguggaaau

SEQ ID NO: 5613 - RNA, 20 nt, Artificial Sequence
  spacer sequence ATCN PAM
caggacuguuuggaauccau

SEQ ID NO: 5614 - RNA, 20 nt, Artificial Sequence
  spacer sequence ATCN PAM
cugagaaucccaggacuguu

SEQ ID NO: 5615 - RNA, 20 nt, Artificial Sequence
  spacer sequence ATCN PAM
uuuagauuuucugcuuaaaa

SEQ ID NO: 5616 - RNA, 20 nt, Artificial Sequence
  spacer sequence ATCN PAM
aaaagauggucuagcuagga

SEQ ID NO: 5617 - RNA, 20 nt, Artificial Sequence
  spacer sequence ATCN PAM
ugggguguggagaggaggag

SEQ ID NO: 5618 - RNA, 20 nt, Artificial Sequence
  spacer sequence ATCN PAM
aaauuaauaaguacccuauc

SEQ ID NO: 5619 - RNA, 20 nt, Artificial Sequence
  spacer sequence ATCN PAM
uauuaaagauaaugaauuuu

SEQ ID NO: 5620 - RNA, 20 nt, Artificial Sequence
  spacer sequence ATCN PAM
uuaauaggauuucuuuacua

SEQ ID NO: 5621 - RNA, 20 nt, Artificial Sequence
  spacer sequence ATCN PAM
acaguggucgcagcuuugug

SEQ ID NO: 5622 - RNA, 20 nt, Artificial Sequence
  spacer sequence ATCN PAM
ucuucuccucauguugaguu

SEQ ID NO: 5623 - RNA, 20 nt, Artificial Sequence
  spacer sequence ATCN PAM
gaagggagugucccugaagg

SEQ ID NO: 5624 - RNA, 20 nt, Artificial Sequence
  spacer sequence ATCN PAM
uuguguuuuucuuucuccuu

SEQ ID NO: 5625 - RNA, 20 nt, Artificial Sequence
  spacer sequence ATCN PAM
aggccaauuuuuuauuucuu

SEQ ID NO: 5626 - RNA, 20 nt, Artificial Sequence
  spacer sequence CTCN PAM
aacgcagcaucugugccagg

SEQ ID NO: 5627 - RNA, 20 nt, Artificial Sequence
  spacer sequence CTCN PAM
cucugcucucuguggagucc

SEQ ID NO: 5628 - RNA, 20 nt, Artificial Sequence
  spacer sequence CTCN PAM
gcucucuguggaguccucca

SEQ ID NO: 5629 - RNA, 20 nt, Artificial Sequence
  spacer sequence CTCN PAM
cuguggaguccuccacccac

SEQ ID NO: 5630 - RNA, 20 nt, Artificial Sequence
  spacer sequence CTCN PAM
guggaguccuccacccacgc

SEQ ID NO: 5631 - RNA, 20 nt, Artificial Sequence
  spacer sequence CTCN PAM
acagagagcagagggagcag

SEQ ID NO: 5632 - RNA, 20 nt, Artificial Sequence
  spacer sequence CTCN PAM
acccacgcccacgcccaggc

SEQ ID NO: 5633 - RNA, 20 nt, Artificial Sequence
  spacer sequence CTCN PAM
gguugggggugggguagccu

SEQ ID NO: 5634 - RNA, 20 nt, Artificial Sequence
  spacer sequence CTCN PAM
guucacaucauucgggcucu

SEQ ID NO: 5635 - RNA, 20 nt, Artificial Sequence
  spacer sequence CTCN PAM
gcagguggcagggagggggg

SEQ ID NO: 5636 - RNA, 20 nt, Artificial Sequence
  spacer sequence CTCN PAM
cugccaccugcagagcccug

SEQ ID NO: 5637 - RNA, 20 nt, Artificial Sequence
  spacer sequence CTCN PAM
ccccucccugccaccugcag

SEQ ID NO: 5638 - RNA, 20 nt, Artificial Sequence
  spacer sequence CTCN PAM
auuauuuccuugcgugugca

SEQ ID NO: 5639 - RNA, 20 nt, Artificial Sequence
  spacer sequence CTCN PAM
caagcauaaacaauccaguc

SEQ ID NO: 5640 - RNA, 20 nt, Artificial Sequence
  spacer sequence CTCN PAM
uuuaacacugaugcugggua

SEQ ID NO: 5641 - RNA, 20 nt, Artificial Sequence
  spacer sequence CTCN PAM
uuucuccuuuaacacugaug

SEQ ID NO: 5642 - RNA, 20 nt, Artificial Sequence
  spacer sequence CTCN PAM
cccucccagguucaagcaau

SEQ ID NO: 5643 - RNA, 20 nt, Artificial Sequence
  spacer sequence CTCN PAM
cucccagguucaagcaauuc

SEQ ID NO: 5644 - RNA, 20 nt, Artificial Sequence
  spacer sequence CTCN PAM
cagguucaagcaauucuccu

SEQ ID NO: 5645 - RNA, 20 nt, Artificial Sequence
  spacer sequence CTCN PAM
ugccucagccucacaaguau

SEQ ID NO: 5646 - RNA, 20 nt, Artificial Sequence
  spacer sequence CTCN PAM
gccucacaaguaucugggac

SEQ ID NO: 5647 - RNA, 20 nt, Artificial Sequence
  spacer sequence CTCN PAM
caaguaucugggacuacaca

SEQ ID NO: 5648 - RNA, 20 nt, Artificial Sequence
  spacer sequence CTCN PAM
acuaaaaauacaaaaauuag

SEQ ID NO: 5649 - RNA, 20 nt, Artificial Sequence
  spacer sequence CTCN PAM
aacuccuggccucaagugau

SEQ ID NO: 5650 - RNA, 20 nt, Artificial Sequence
  spacer sequence CTCN PAM
uggccucaagugauccacuu

SEQ ID NO: 5651 - RNA, 20 nt, Artificial Sequence
  spacer sequence CTCN PAM
agugauccacuugcuuuggc

SEQ ID NO: 5652 - RNA, 20 nt, Artificial Sequence
  spacer sequence CTCN PAM
caaaguucuggaauuacagu

SEQ ID NO: 5653 - RNA, 20 nt, Artificial Sequence
  spacer sequence CTCN PAM
cgacuguaauuccagaacuu

SEQ ID NO: 5654 - RNA, 20 nt, Artificial Sequence
  spacer sequence CTCN PAM
gcuggagaugucagaguuau

SEQ ID NO: 5655 - RNA, 20 nt, Artificial Sequence
  spacer sequence CTCN PAM
agccgagugugguggcucac

SEQ ID NO: 5656 - RNA, 20 nt, Artificial Sequence
  spacer sequence CTCN PAM
gacaucuccagccgagugug

SEQ ID NO: 5657 - RNA, 20 nt, Artificial Sequence
  spacer sequence CTCN PAM
gcaacuuccuaguuacauga

SEQ ID NO: 5658 - RNA, 20 nt, Artificial Sequence
  spacer sequence CTCN PAM
auuucuuugaccuucagcuu

SEQ ID NO: 5659 - RNA, 20 nt, Artificial Sequence
  spacer sequence CTCN PAM
auuucuucagaugacaagcu

SEQ ID NO: 5660 - RNA, 20 nt, Artificial Sequence
  spacer sequence CTCN PAM
uaaguugcuauagguaggga

SEQ ID NO: 5661 - RNA, 20 nt, Artificial Sequence
  spacer sequence CTCN PAM
uguguccccacuucucccca

SEQ ID NO: 5662 - RNA, 20 nt, Artificial Sequence
  spacer sequence CTCN PAM
ccacaugauuugaacauguu

SEQ ID NO: 5663 - RNA, 20 nt, Artificial Sequence
  spacer sequence CTCN PAM
ccggaccuccauuuucucau

SEQ ID NO: 5664 - RNA, 20 nt, Artificial Sequence
  spacer sequence CTCN PAM
ggaccuccauuuucucauau

SEQ ID NO: 5665 - RNA, 20 nt, Artificial Sequence
  spacer sequence CTCN PAM
auuuucucauaugcaagaug

SEQ ID NO: 5666 - RNA, 20 nt, Artificial Sequence
  spacer sequence CTCN PAM
uaugcaagaugagaagguug

SEQ ID NO: 5667 - RNA, 20 nt, Artificial Sequence
  spacer sequence CTCN PAM
ucuugcauaugagaaaaugg

SEQ ID NO: 5668 - RNA, 20 nt, Artificial Sequence
  spacer sequence CTCN PAM
accuucucaucuugcauaug

SEQ ID NO: 5669 - RNA, 20 nt, Artificial Sequence
  spacer sequence CTCN PAM
acgguguugaagccacugau

SEQ ID NO: 5670 - RNA, 20 nt, Artificial Sequence
  spacer sequence CTCN PAM
ggcauggaacaagaugccca

SEQ ID NO: 5671 - RNA, 20 nt, Artificial Sequence
  spacer sequence CTCN PAM
guuuacuagauauuuuccug

SEQ ID NO: 5672 - RNA, 20 nt, Artificial Sequence
  spacer sequence CTCN PAM
acaguccaagaucucuguuu

SEQ ID NO: 5673 - RNA, 20 nt, Artificial Sequence
  spacer sequence CTCN PAM
ucccuugagacuggcaagug

SEQ ID NO: 5674 - RNA, 20 nt, Artificial Sequence
  spacer sequence CTCN PAM
agggaagagacuauccuuag

SEQ ID NO: 5675 - RNA, 20 nt, Artificial Sequence
  spacer sequence CTCN PAM
cuugccagucucaagggaag

SEQ ID NO: 5676 - RNA, 20 nt, Artificial Sequence
  spacer sequence CTCN PAM
uugcuuggauuagaacaaaa

SEQ ID NO: 5677 - RNA, 20 nt, Artificial Sequence
  spacer sequence CTCN PAM
gggauaggagaggaaugagu

SEQ ID NO: 5678 - RNA, 20 nt, Artificial Sequence
  spacer sequence CTCN PAM
uaucccugagguccucuuug

SEQ ID NO: 5679 - RNA, 20 nt, Artificial Sequence
  spacer sequence CTCN PAM
ccuaucccugagguccucuu

SEQ ID NO: 5680 - RNA, 20 nt, Artificial Sequence
  spacer sequence CTCN PAM
uuccucuccuaucccugagg

SEQ ID NO: 5681 - RNA, 20 nt, Artificial Sequence
  spacer sequence CTCN PAM
cauuacuaccuccuaaguca

SEQ ID NO: 5682 - RNA, 20 nt, Artificial Sequence
  spacer sequence CTCN PAM
uaagucaggcuuucagaauc

SEQ ID NO: 5683 - RNA, 20 nt, Artificial Sequence
  spacer sequence CTCN PAM
ucuuaggacaauugugaggg

SEQ ID NO: 5684 - RNA, 20 nt, Artificial Sequence
  spacer sequence CTCN PAM
caauuguccuaagaagagau

SEQ ID NO: 5685 - RNA, 20 nt, Artificial Sequence
  spacer sequence CTCN PAM
uaacuugucaugcugcuuca

SEQ ID NO: 5686 - RNA, 20 nt, Artificial Sequence
  spacer sequence CTCN PAM
agccuauccuagauagcaca

SEQ ID NO: 5687 - RNA, 20 nt, Artificial Sequence
  spacer sequence CTCN PAM
ggcugugcuaucuaggauag

SEQ ID NO: 5688 - RNA, 20 nt, Artificial Sequence
  spacer sequence CTCN PAM
cucaugcucaaaauccuuuc

SEQ ID NO: 5689 - RNA, 20 nt, Artificial Sequence
  spacer sequence CTCN PAM
caugcucaaaauccuuuccc

SEQ ID NO: 5690 - RNA, 20 nt, Artificial Sequence
  spacer sequence CTCN PAM
ugcucaaaauccuuucccag

SEQ ID NO: 5691 - RNA, 20 nt, Artificial Sequence
  spacer sequence CTCN PAM
aaauccuuucccagugcgca

SEQ ID NO: 5692 - RNA, 20 nt, Artificial Sequence
  spacer sequence CTCN PAM
uucuucccuccacccagagu

SEQ ID NO: 5693 - RNA, 20 nt, Artificial Sequence
  spacer sequence CTCN PAM
acccagaguaccuucgacau

SEQ ID NO: 5694 - RNA, 20 nt, Artificial Sequence
  spacer sequence CTCN PAM
ggguggagggaagaacgagu

SEQ ID NO: 5695 - RNA, 20 nt, Artificial Sequence
  spacer sequence CTCN PAM
uccucaugaguucuuggaug

SEQ ID NO: 5696 - RNA, 20 nt, Artificial Sequence
  spacer sequence CTCN PAM
ugaguucuuggaugaaauag

SEQ ID NO: 5697 - RNA, 20 nt, Artificial Sequence
  spacer sequence CTCN PAM
ugaggaugagcuucuuggaa

SEQ ID NO: 5698 - RNA, 20 nt, Artificial Sequence
  spacer sequence CTCN PAM
cuauuucauccaagaacuca

SEQ ID NO: 5699 - RNA, 20 nt, Artificial Sequence
  spacer sequence CTCN PAM
cuggagaauuucaagaagaa

SEQ ID NO: 5700 - RNA, 20 nt, Artificial Sequence
  spacer sequence CTCN PAM
agugagugggaacucccuau

SEQ ID NO: 5701 - RNA, 20 nt, Artificial Sequence
  spacer sequence CTCN PAM
agcacaugcucaggaaucuu

SEQ ID NO: 5702 - RNA, 20 nt, Artificial Sequence
  spacer sequence CTCN PAM
ggaaucuuuauugguucucc

SEQ ID NO: 5703 - RNA, 20 nt, Artificial Sequence
  spacer sequence CTCN PAM
auguucuauugaauuaaaaa

SEQ ID NO: 5704 - RNA, 20 nt, Artificial Sequence
  spacer sequence CTCN PAM
aacugacagucaauacaauc

SEQ ID NO: 5705 - RNA, 20 nt, Artificial Sequence
  spacer sequence CTCN PAM
cccagauucccacccuacua

SEQ ID NO: 5706 - RNA, 20 nt, Artificial Sequence
  spacer sequence CTCN PAM
ggauuagcaggggacuaggc

SEQ ID NO: 5707 - RNA, 20 nt, Artificial Sequence
  spacer sequence CTCN PAM
aucucuaucuuuauccauau

SEQ ID NO: 5708 - RNA, 20 nt, Artificial Sequence
  spacer sequence CTCN PAM
aucuuuauccauaucccuac

SEQ ID NO: 5709 - RNA, 20 nt, Artificial Sequence
  spacer sequence CTCN PAM
uguccuccgauugucaaaac

SEQ ID NO: 5710 - RNA, 20 nt, Artificial Sequence
  spacer sequence CTCN PAM
gauugucaaaacuugacccc

SEQ ID NO: 5711 - RNA, 20 nt, Artificial Sequence
  spacer sequence CTCN PAM
uuugagauuuauuucaaauc

SEQ ID NO: 5712 - RNA, 20 nt, Artificial Sequence
  spacer sequence CTCN PAM
aaggaggggucaaguuuuga

SEQ ID NO: 5713 - RNA, 20 nt, Artificial Sequence
  spacer sequence CTCN PAM
gcugcuuucccuaauucuau

SEQ ID NO: 5714 - RNA, 20 nt, Artificial Sequence
  spacer sequence CTCN PAM
uuccaagcccuuuaacuccu

SEQ ID NO: 5715 - RNA, 20 nt, Artificial Sequence
  spacer sequence CTCN PAM
uguguuucuuguuuuucccu

SEQ ID NO: 5716 - RNA, 20 nt, Artificial Sequence
  spacer sequence CTCN PAM
uuggcacuucagucaagggu

SEQ ID NO: 5717 - RNA, 20 nt, Artificial Sequence
  spacer sequence CTCN PAM
aaguguacccuugacugaag

SEQ ID NO: 5718 - RNA, 20 nt, Artificial Sequence
  spacer sequence CTCN PAM
auggccuuauguucuccaag

SEQ ID NO: 5719 - RNA, 20 nt, Artificial Sequence
  spacer sequence CTCN PAM
auaauuccuaaaugcuaugg

SEQ ID NO: 5720 - RNA, 20 nt, Artificial Sequence
  spacer sequence CTCN PAM
cucaauaauuccuaaaugcu

SEQ ID NO: 5721 - RNA, 20 nt, Artificial Sequence
  spacer sequence CTCN PAM
cgaagguccaugucuuggcu

SEQ ID NO: 5722 - RNA, 20 nt, Artificial Sequence
  spacer sequence CTCN PAM
aagguccaugucuuggcugu

SEQ ID NO: 5723 - RNA, 20 nt, Artificial Sequence
  spacer sequence CTCN PAM
uguguuuuguacaacagcca

SEQ ID NO: 5724 - RNA, 20 nt, Artificial Sequence
  spacer sequence CTCN PAM
uccaguucuggccuuccaga

SEQ ID NO: 5725 - RNA, 20 nt, Artificial Sequence
  spacer sequence CTCN PAM
augacaucuucugaacucug

SEQ ID NO: 5726 - RNA, 20 nt, Artificial Sequence
  spacer sequence CTCN PAM
gcuuuucccaaaucccuuug

SEQ ID NO: 5727 - RNA, 20 nt, Artificial Sequence
  spacer sequence CTCN PAM
cccccaccccaucacguaac

SEQ ID NO: 5728 - RNA, 20 nt, Artificial Sequence
  spacer sequence CTCN PAM
ugcaagcuacuguuugugua

SEQ ID NO: 5729 - RNA, 20 nt, Artificial Sequence
  spacer sequence CTCN PAM
caaaucaauuacaaaaacaa

SEQ ID NO: 5730 - RNA, 20 nt, Artificial Sequence
  spacer sequence CTCN PAM
ccagcugcagugaaauugcu

SEQ ID NO: 5731 - RNA, 20 nt, Artificial Sequence
  spacer sequence CTCN PAM
caacacagcaauuucacugc

SEQ ID NO: 5732 - RNA, 20 nt, Artificial Sequence
  spacer sequence CTCN PAM
uuuaugcccuacuaugccua

SEQ ID NO: 5733 - RNA, 20 nt, Artificial Sequence
  spacer sequence CTCN PAM
gggcuaggcacauaaaaaug

SEQ ID NO: 5734 - RNA, 20 nt, Artificial Sequence
  spacer sequence CTCN PAM
aguccugccuggagcugaaa

SEQ ID NO: 5735 - RNA, 20 nt, Artificial Sequence
  spacer sequence CTCN PAM
aggcaggacuggagaagguu

SEQ ID NO: 5736 - RNA, 20 nt, Artificial Sequence
  spacer sequence CTCN PAM
aacgugugaggagaggcccu

SEQ ID NO: 5737 - RNA, 20 nt, Artificial Sequence
  spacer sequence CTCN PAM
cacguuggagcuguaaguag

SEQ ID NO: 5738 - RNA, 20 nt, Artificial Sequence
  spacer sequence CTCN PAM
ucacacguuggagcuguaag

SEQ ID NO: 5739 - RNA, 20 nt, Artificial Sequence
  spacer sequence CTCN PAM
ccucacacguuggagcugua

SEQ ID NO: 5740 - RNA, 20 nt, Artificial Sequence
  spacer sequence CTCN PAM
cacuuccucagacacauuuu

SEQ ID NO: 5741 - RNA, 20 nt, Artificial Sequence
  spacer sequence CTCN PAM
cuuccucagacacauuuuua

SEQ ID NO: 5742 - RNA, 20 nt, Artificial Sequence
  spacer sequence CTCN PAM
gacacauuuuuagagaauca

SEQ ID NO: 5743 - RNA, 20 nt, Artificial Sequence
  spacer sequence CTCN PAM
aaaaaugugucugaggaagu

SEQ ID NO: 5744 - RNA, 20 nt, Artificial Sequence
  spacer sequence CTCN PAM
gaugauucucuaaaaaugug

SEQ ID NO: 5745 - RNA, 20 nt, Artificial Sequence
  spacer sequence CTCN PAM
caucaccucagccuuucaac

SEQ ID NO: 5746 - RNA, 20 nt, Artificial Sequence
  spacer sequence CTCN PAM
gccuuucaacuuggugggag

SEQ ID NO: 5747 - RNA, 20 nt, Artificial Sequence
  spacer sequence CTCN PAM
caccaaguugaaaggcugag

SEQ ID NO: 5748 - RNA, 20 nt, Artificial Sequence
  spacer sequence CTCN PAM
cccaccaaguugaaaggcug

SEQ ID NO: 5749 - RNA, 20 nt, Artificial Sequence
  spacer sequence CTCN PAM
ugauuccuagcccaugauau

SEQ ID NO: 5750 - RNA, 20 nt, Artificial Sequence
  spacer sequence CTCN PAM
acaagacacucauccucucc

SEQ ID NO: 5751 - RNA, 20 nt, Artificial Sequence
  spacer sequence CTCN PAM
uccucuccaagccucguucu

SEQ ID NO: 5752 - RNA, 20 nt, Artificial Sequence
  spacer sequence CTCN PAM
ccaagccucguucuucucau

SEQ ID NO: 5753 - RNA, 20 nt, Artificial Sequence
  spacer sequence CTCN PAM
aagccucguucuucucaucu

SEQ ID NO: 5754 - RNA, 20 nt, Artificial Sequence
  spacer sequence CTCN PAM
uucuucucaucuuuagaaug

SEQ ID NO: 5755 - RNA, 20 nt, Artificial Sequence
  spacer sequence CTCN PAM
ucuuuagaaugaggagaugg

SEQ ID NO: 5756 - RNA, 20 nt, Artificial Sequence
  spacer sequence CTCN PAM
uucuaaagaugagaagaacg

SEQ ID NO: 5757 - RNA, 20 nt, Artificial Sequence
  spacer sequence CTCN PAM
ucauucuaaagaugagaaga

SEQ ID NO: 5758 - RNA, 20 nt, Artificial Sequence
  spacer sequence CTCN PAM
gccagucccuuccagccuca

SEQ ID NO: 5759 - RNA, 20 nt, Artificial Sequence
  spacer sequence CTCN PAM
gcugugcagacauugugugc

SEQ ID NO: 5760 - RNA, 20 nt, Artificial Sequence
  spacer sequence CTCN PAM
uccccauagcacacaauguc

SEQ ID NO: 5761 - RNA, 20 nt, Artificial Sequence
  spacer sequence CTCN PAM
cccuggaccugugcccauua

SEQ ID NO: 5762 - RNA, 20 nt, Artificial Sequence
  spacer sequence CTCN PAM
ugcaauguugugugacugug

SEQ ID NO: 5763 - RNA, 20 nt, Artificial Sequence
  spacer sequence CTCN PAM
ggggcccgggccuguggccc

SEQ ID NO: 5764 - RNA, 20 nt, Artificial Sequence
  spacer sequence CTCN PAM
ugacuuaccaggaaaggcua

SEQ ID NO: 5765 - RNA, 20 nt, Artificial Sequence
  spacer sequence CTCN PAM
cuuaggcuucucuugacuua

SEQ ID NO: 5766 - RNA, 20 nt, Artificial Sequence
  spacer sequence CTCN PAM
uugaugauccagauauggau

SEQ ID NO: 5767 - RNA, 20 nt, Artificial Sequence
  spacer sequence CTCN PAM
cuagauguguccuuaggugu

SEQ ID NO: 5768 - RNA, 20 nt, Artificial Sequence
  spacer sequence CTCN PAM
cacucacauccuugaagcag

SEQ ID NO: 5769 - RNA, 20 nt, Artificial Sequence
  spacer sequence CTCN PAM
cucacauccuugaagcaggu

SEQ ID NO: 5770 - RNA, 20 nt, Artificial Sequence
  spacer sequence CTCN PAM
cauccuugaagcagguggca

SEQ ID NO: 5771 - RNA, 20 nt, Artificial Sequence
  spacer sequence CTCN PAM
ugggaaccacacaauucccc

SEQ ID NO: 5772 - RNA, 20 nt, Artificial Sequence
  spacer sequence CTCN PAM
gugggggaauuccucuccau

SEQ ID NO: 5773 - RNA, 20 nt, Artificial Sequence
  spacer sequence CTCN PAM
ccauuccucucugcccgacu

SEQ ID NO: 5774 - RNA, 20 nt, Artificial Sequence
  spacer sequence CTCN PAM
auuccucucugcccgacugc

SEQ ID NO: 5775 - RNA, 20 nt, Artificial Sequence
  spacer sequence CTCN PAM
cugcccgacugcccuccuca

SEQ ID NO: 5776 - RNA, 20 nt, Artificial Sequence
  spacer sequence CTCN PAM
gcccgacugcccuccucacc

SEQ ID NO: 5777 - RNA, 20 nt, Artificial Sequence
  spacer sequence CTCN PAM
ucaccugcuuccaccugcug

SEQ ID NO: 5778 - RNA, 20 nt, Artificial Sequence
  spacer sequence CTCN PAM
ccugcuuccaccugcuguua

SEQ ID NO: 5779 - RNA, 20 nt, Artificial Sequence
  spacer sequence CTCN PAM
uguuucuaacagcaggugga

SEQ ID NO: 5780 - RNA, 20 nt, Artificial Sequence
  spacer sequence CTCN PAM
ccuguuucuaacagcaggug

SEQ ID NO: 5781 - RNA, 20 nt, Artificial Sequence
  spacer sequence CTCN PAM
aagaccaucugguccacccu

SEQ ID NO: 5782 - RNA, 20 nt, Artificial Sequence
  spacer sequence CTCN PAM
uugucuacagauucagaaac

SEQ ID NO: 5783 - RNA, 20 nt, Artificial Sequence
  spacer sequence CTCN PAM
guuucugaaucuguagacaa

SEQ ID NO: 5784 - RNA, 20 nt, Artificial Sequence
  spacer sequence CTCN PAM
ggacucaguuucugaaucug

SEQ ID NO: 5785 - RNA, 20 nt, Artificial Sequence
  spacer sequence CTCN PAM
cuggacucaguuucugaauc

SEQ ID NO: 5786 - RNA, 20 nt, Artificial Sequence
  spacer sequence CTCN PAM
cucuggacucaguuucugaa

SEQ ID NO: 5787 - RNA, 20 nt, Artificial Sequence
  spacer sequence CTCN PAM
cuuggggcaugcagcugccu

SEQ ID NO: 5788 - RNA, 20 nt, Artificial Sequence
  spacer sequence CTCN PAM
ggcagcugcaugccccaagu

SEQ ID NO: 5789 - RNA, 20 nt, Artificial Sequence
  spacer sequence CTCN PAM
cucaggcagcugcaugcccc

SEQ ID NO: 5790 - RNA, 20 nt, Artificial Sequence
  spacer sequence CTCN PAM
acacgucucagagaagccag

SEQ ID NO: 5791 - RNA, 20 nt, Artificial Sequence
  spacer sequence CTCN PAM
gagaagccagccagggcucc

SEQ ID NO: 5792 - RNA, 20 nt, Artificial Sequence
  spacer sequence CTCN PAM
gagacguguugaguggcuug

SEQ ID NO: 5793 - RNA, 20 nt, Artificial Sequence
  spacer sequence CTCN PAM
cuucccccuucuggaggccg

SEQ ID NO: 5794 - RNA, 20 nt, Artificial Sequence
  spacer sequence CTCN PAM
agaagggggaagggagcccu

SEQ ID NO: 5795 - RNA, 20 nt, Artificial Sequence
  spacer sequence CTCN PAM
cgacucagggaacagggugg

SEQ ID NO: 5796 - RNA, 20 nt, Artificial Sequence
  spacer sequence CTCN PAM
acucagggaacaggguggga

SEQ ID NO: 5797 - RNA, 20 nt, Artificial Sequence
  spacer sequence CTCN PAM
gggaacagggugggaaagcu

SEQ ID NO: 5798 - RNA, 20 nt, Artificial Sequence
  spacer sequence CTCN PAM
gggggagcagccaggaacac

SEQ ID NO: 5799 - RNA, 20 nt, Artificial Sequence
  spacer sequence CTCN PAM
cccugagaagcuuucccacc

SEQ ID NO: 5800 - RNA, 20 nt, Artificial Sequence
  spacer sequence CTCN PAM
guucucugcaccaguggcga

SEQ ID NO: 5801 - RNA, 20 nt, Artificial Sequence
  spacer sequence CTCN PAM
gcaccaguggcgaaggcugg

SEQ ID NO: 5802 - RNA, 20 nt, Artificial Sequence
  spacer sequence CTCN PAM
gggggcuuaauguggguaua

SEQ ID NO: 5803 - RNA, 20 nt, Artificial Sequence
  spacer sequence CTCN PAM
ucccugccuguccugcuuac

SEQ ID NO: 5804 - RNA, 20 nt, Artificial Sequence
  spacer sequence CTCN PAM
caguuccagccugaacacug

SEQ ID NO: 5805 - RNA, 20 nt, Artificial Sequence
  spacer sequence CTCN PAM
uaacaauagcuuuuuuuugu

SEQ ID NO: 5806 - RNA, 20 nt, Artificial Sequence
  spacer sequence CTCN PAM
aucccuaauagggaacgggg

SEQ ID NO: 5807 - RNA, 20 nt, Artificial Sequence
  spacer sequence CTCN PAM
gaucucuaucccuaauaggg

SEQ ID NO: 5808 - RNA, 20 nt, Artificial Sequence
  spacer sequence CTCN PAM
auagaaguaaauuccacaag

SEQ ID NO: 5809 - RNA, 20 nt, Artificial Sequence
  spacer sequence CTCN PAM
cugccugucuaaauccucuc

SEQ ID NO: 5810 - RNA, 20 nt, Artificial Sequence
  spacer sequence CTCN PAM
gccugucuaaauccucucuu

SEQ ID NO: 5811 - RNA, 20 nt, Artificial Sequence
  spacer sequence CTCN PAM
cuucuuugaaaagcagcuca

SEQ ID NO: 5812 - RNA, 20 nt, Artificial Sequence
  spacer sequence CTCN PAM
ucuuugaaaagcagcucaga

SEQ ID NO: 5813 - RNA, 20 nt, Artificial Sequence
  spacer sequence CTCN PAM
gagcugccucuuucuugaag

SEQ ID NO: 5814 - RNA, 20 nt, Artificial Sequence
  spacer sequence CTCN PAM
gagcugcuuuucaaagaaga

SEQ ID NO: 5815 - RNA, 20 nt, Artificial Sequence
  spacer sequence CTCN PAM
uucuugaagccuuccuugcc

SEQ ID NO: 5816 - RNA, 20 nt, Artificial Sequence
  spacer sequence CTCN PAM
auccucugaacagcuugcag

SEQ ID NO: 5817 - RNA, 20 nt, Artificial Sequence
  spacer sequence CTCN PAM
gaacagcuugcagcauuucc

SEQ ID NO: 5818 - RNA, 20 nt, Artificial Sequence
  spacer sequence CTCN PAM
ugaaggaaaugcugcaagcu

SEQ ID NO: 5819 - RNA, 20 nt, Artificial Sequence
  spacer sequence CTCN PAM
ugacgggugcccaguuccuu

SEQ ID NO: 5820 - RNA, 20 nt, Artificial Sequence
  spacer sequence CTCN PAM
ggcacaugcguaaucuaagc

SEQ ID NO: 5821 - RNA, 20 nt, Artificial Sequence
  spacer sequence CTCN PAM
ugaagacgcccagccuuugg

SEQ ID NO: 5822 - RNA, 20 nt, Artificial Sequence
  spacer sequence CTCN PAM
ucuugaagacgcccagccuu

SEQ ID NO: 5823 - RNA, 20 nt, Artificial Sequence
  spacer sequence CTCN PAM
gcagcccacggcccagcaga

SEQ ID NO: 5824 - RNA, 20 nt, Artificial Sequence
  spacer sequence CTCN PAM
ccccaaaggacagcgaagcc

SEQ ID NO: 5825 - RNA, 20 nt, Artificial Sequence
  spacer sequence CTCN PAM
ugaaaugcuuguuucuccug

SEQ ID NO: 5826 - RNA, 20 nt, Artificial Sequence
  spacer sequence CTCN PAM
ugucagacaucccucauguc

SEQ ID NO: 5827 - RNA, 20 nt, Artificial Sequence
  spacer sequence CTCN PAM
uguccccaugccagcacccc

SEQ ID NO: 5828 - RNA, 20 nt, Artificial Sequence
  spacer sequence CTCN PAM
ccguggaacugccugggggu

SEQ ID NO: 5829 - RNA, 20 nt, Artificial Sequence
  spacer sequence CTCN PAM
ccccguggaacugccugggg

SEQ ID NO: 5830 - RNA, 20 nt, Artificial Sequence
  spacer sequence CTCN PAM
ucuccccguggaacugccug

SEQ ID NO: 5831 - RNA, 20 nt, Artificial Sequence
  spacer sequence CTCN PAM
gccaccuuacacuccucucc

SEQ ID NO: 5832 - RNA, 20 nt, Artificial Sequence
  spacer sequence CTCN PAM
agccugaugccaguuccaga

SEQ ID NO: 5833 - RNA, 20 nt, Artificial Sequence
  spacer sequence CTCN PAM
acacugccucacggaccagg

SEQ ID NO: 5834 - RNA, 20 nt, Artificial Sequence
  spacer sequence CTCN PAM
cggaccaggugcagcacagc

SEQ ID NO: 5835 - RNA, 20 nt, Artificial Sequence
  spacer sequence CTCN PAM
cucccaucauuacagcaaca

SEQ ID NO: 5836 - RNA, 20 nt, Artificial Sequence
  spacer sequence CTCN PAM
caucauuacagcaacacaca

SEQ ID NO: 5837 - RNA, 20 nt, Artificial Sequence
  spacer sequence CTCN PAM
uguuuuucccucuuuggcug

SEQ ID NO: 5838 - RNA, 20 nt, Artificial Sequence
  spacer sequence CTCN PAM
uuggcugccccugaagccua

SEQ ID NO: 5839 - RNA, 20 nt, Artificial Sequence
  spacer sequence CTCN PAM
acuccuccucuauggauaug

SEQ ID NO: 5840 - RNA, 20 nt, Artificial Sequence
  spacer sequence CTCN PAM
uccucuauggauauguucgg

SEQ ID NO: 5841 - RNA, 20 nt, Artificial Sequence
  spacer sequence CTCN PAM
ucuauggauauguucggaca

SEQ ID NO: 5842 - RNA, 20 nt, Artificial Sequence
  spacer sequence CTCN PAM
auggauauguucggacaugu

SEQ ID NO: 5843 - RNA, 20 nt, Artificial Sequence
  spacer sequence CTCN PAM
aguccgaaagggcccuggga

SEQ ID NO: 5844 - RNA, 20 nt, Artificial Sequence
  spacer sequence CTCN PAM
cauccuagucuacacgcauc

SEQ ID NO: 5845 - RNA, 20 nt, Artificial Sequence
  spacer sequence CTCN PAM
ucccccagggacucccucca

SEQ ID NO: 5846 - RNA, 20 nt, Artificial Sequence
  spacer sequence CTCN PAM
cuccagcucugggaaaggcc

SEQ ID NO: 5847 - RNA, 20 nt, Artificial Sequence
  spacer sequence CTCN PAM
agcucugggaaaggccaggu

SEQ ID NO: 5848 - RNA, 20 nt, Artificial Sequence
  spacer sequence CTCN PAM
gggaaaggccaggugacagc

SEQ ID NO: 5849 - RNA, 20 nt, Artificial Sequence
  spacer sequence CTCN PAM
cacaccggcucuggugugga

SEQ ID NO: 5850 - RNA, 20 nt, Artificial Sequence
  spacer sequence CTCN PAM
caccggcucugguguggaga

SEQ ID NO: 5851 - RNA, 20 nt, Artificial Sequence
  spacer sequence CTCN PAM
gguguggagaggggucagag

SEQ ID NO: 5852 - RNA, 20 nt, Artificial Sequence
  spacer sequence CTCN PAM
acaccagagccggugugaga

SEQ ID NO: 5853 - RNA, 20 nt, Artificial Sequence
  spacer sequence CTCN PAM
ccacaccagagccgguguga

SEQ ID NO: 5854 - RNA, 20 nt, Artificial Sequence
  spacer sequence CTCN PAM
gaccccucuccacaccagag

SEQ ID NO: 5855 - RNA, 20 nt, Artificial Sequence
  spacer sequence CTCN PAM
guuucugguuuuacuuacuc

SEQ ID NO: 5856 - RNA, 20 nt, Artificial Sequence
  spacer sequence CTCN PAM
cggaagccccugcccacauu

SEQ ID NO: 5857 - RNA, 20 nt, Artificial Sequence
  spacer sequence CTCN PAM
gauuauuauugaccaggacg

SEQ ID NO: 5858 - RNA, 20 nt, Artificial Sequence
  spacer sequence CTCN PAM
cggauuauuauugaccagga

SEQ ID NO: 5859 - RNA, 20 nt, Artificial Sequence
  spacer sequence CTCN PAM
uugugauuuguggcuugugg

SEQ ID NO: 5860 - RNA, 20 nt, Artificial Sequence
  spacer sequence CTCN PAM
acaagccacaaaucacaacg

SEQ ID NO: 5861 - RNA, 20 nt, Artificial Sequence
  spacer sequence CTCN PAM
agaucuuugaggccaaaaug

SEQ ID NO: 5862 - RNA, 20 nt, Artificial Sequence
  spacer sequence CTCN PAM
aagaucuugagcuccacaag

SEQ ID NO: 5863 - RNA, 20 nt, Artificial Sequence
  spacer sequence CTCN PAM
agucugcccccgccuggccc

SEQ ID NO: 5864 - RNA, 20 nt, Artificial Sequence
  spacer sequence CTCN PAM
gcuggggccaggcgggggca

SEQ ID NO: 5865 - RNA, 20 nt, Artificial Sequence
  spacer sequence CTCN PAM
ggaaaccuccuuggcaacgg

SEQ ID NO: 5866 - RNA, 20 nt, Artificial Sequence
  spacer sequence CTCN PAM
uuggcaacggcuaagggucu

SEQ ID NO: 5867 - RNA, 20 nt, Artificial Sequence
  spacer sequence CTCN PAM
cagugacauuaacccagcca

SEQ ID NO: 5868 - RNA, 20 nt, Artificial Sequence
  spacer sequence CTCN PAM
ggaauauuacauguguggaa

SEQ ID NO: 5869 - RNA, 20 nt, Artificial Sequence
  spacer sequence CTCN PAM
cggugauguuaacacauccg

SEQ ID NO: 5870 - RNA, 20 nt, Artificial Sequence
  spacer sequence CTCN PAM
caaaacaaggauauucaaaa

SEQ ID NO: 5871 - RNA, 20 nt, Artificial Sequence
  spacer sequence CTCN PAM
auuauuugcaucaaguucug

SEQ ID NO: 5872 - RNA, 20 nt, Artificial Sequence
  spacer sequence CTCN PAM
uguguuuuuguuucacaagc

SEQ ID NO: 5873 - RNA, 20 nt, Artificial Sequence
  spacer sequence CTCN PAM
uuacccuacccccagccaac

SEQ ID NO: 5874 - RNA, 20 nt, Artificial Sequence
  spacer sequence CTCN PAM
cuccuuacccuacccccagc

SEQ ID NO: 5875 - RNA, 20 nt, Artificial Sequence
  spacer sequence CTCN PAM
ucccuccuuacccuaccccc

SEQ ID NO: 5876 - RNA, 20 nt, Artificial Sequence
  spacer sequence CTCN PAM
uccuccucccuccuuacccu

SEQ ID NO: 5877 - RNA, 20 nt, Artificial Sequence
  spacer sequence CTCN PAM
cuucaggucagagauuagaa

SEQ ID NO: 5878 - RNA, 20 nt, Artificial Sequence
  spacer sequence CTCN PAM
gaccugaagugagacauuga

SEQ ID NO: 5879 - RNA, 20 nt, Artificial Sequence
  spacer sequence CTCN PAM
gugugaacagggcaccugcu

SEQ ID NO: 5880 - RNA, 20 nt, Artificial Sequence
  spacer sequence CTCN PAM
ccuucucugggcugugauuu

SEQ ID NO: 5881 - RNA, 20 nt, Artificial Sequence
  spacer sequence CTCN PAM
gggcugugauuuccugcucc

SEQ ID NO: 5882 - RNA, 20 nt, Artificial Sequence
  spacer sequence CTCN PAM
agcaccagcgugcuucagca

SEQ ID NO: 5883 - RNA, 20 nt, Artificial Sequence
  spacer sequence CTCN PAM
gucaaugcugaagcacgcug

SEQ ID NO: 5884 - RNA, 20 nt, Artificial Sequence
  spacer sequence CTCN PAM
ucugucaaugcugaagcacg

SEQ ID NO: 5885 - RNA, 20 nt, Artificial Sequence
  spacer sequence CTCN PAM
uucuguuggcacugaucggg

SEQ ID NO: 5886 - RNA, 20 nt, Artificial Sequence
  spacer sequence CTCN PAM
agugccauaguccauggagu

SEQ ID NO: 5887 - RNA, 20 nt, Artificial Sequence
  spacer sequence CTCN PAM
auggacuauggcacuggagg

SEQ ID NO: 5888 - RNA, 20 nt, Artificial Sequence
  spacer sequence CTCN PAM
auucuucugccuugacauaa

SEQ ID NO: 5889 - RNA, 20 nt, Artificial Sequence
  spacer sequence CTCN PAM
uauucuacucuucucuugau

SEQ ID NO: 5890 - RNA, 20 nt, Artificial Sequence
  spacer sequence CTCN PAM
ucucuugauggucggcuggc

SEQ ID NO: 5891 - RNA, 20 nt, Artificial Sequence
  spacer sequence CTCN PAM
ugauggucggcuggcugacc

SEQ ID NO: 5892 - RNA, 20 nt, Artificial Sequence
  spacer sequence CTCN PAM
uugcuucagucaggauggca

SEQ ID NO: 5893 - RNA, 20 nt, Artificial Sequence
  spacer sequence CTCN PAM
cugucucauucuucaacuac

SEQ ID NO: 5894 - RNA, 20 nt, Artificial Sequence
  spacer sequence CTCN PAM
uucuucaacuacaccaccuc

SEQ ID NO: 5895 - RNA, 20 nt, Artificial Sequence
  spacer sequence CTCN PAM
cgccuaagccucguucuucu

SEQ ID NO: 5896 - RNA, 20 nt, Artificial Sequence
  spacer sequence CTCN PAM
uucuucuuggcccuucccca

SEQ ID NO: 5897 - RNA, 20 nt, Artificial Sequence
  spacer sequence CTCN PAM
ccaaccccuucccuccaucu

SEQ ID NO: 5898 - RNA, 20 nt, Artificial Sequence
  spacer sequence CTCN PAM
aaccccuucccuccaucuuu

SEQ ID NO: 5899 - RNA, 20 nt, Artificial Sequence
  spacer sequence CTCN PAM
aucuuuccauccuuccaagc

SEQ ID NO: 5900 - RNA, 20 nt, Artificial Sequence
  spacer sequence CTCN PAM
uucagccccaguuccucucu

SEQ ID NO: 5901 - RNA, 20 nt, Artificial Sequence
  spacer sequence CTCN PAM
cugaagcucccccugauacc

SEQ ID NO: 5902 - RNA, 20 nt, Artificial Sequence
  spacer sequence CTCN PAM
gaagcucccccugauaccuu

SEQ ID NO: 5903 - RNA, 20 nt, Artificial Sequence
  spacer sequence CTCN PAM
cccugauaccuuccaccccu

SEQ ID NO: 5904 - RNA, 20 nt, Artificial Sequence
  spacer sequence CTCN PAM
cagaccucccugcucucuac

SEQ ID NO: 5905 - RNA, 20 nt, Artificial Sequence
  spacer sequence CTCN PAM
cugcucucuacacaccugua

SEQ ID NO: 5906 - RNA, 20 nt, Artificial Sequence
  spacer sequence CTCN PAM
cuacacaccuguagugcucc

SEQ ID NO: 5907 - RNA, 20 nt, Artificial Sequence
  spacer sequence CTCN PAM
acacaccuguagugcuccca

SEQ ID NO: 5908 - RNA, 20 nt, Artificial Sequence
  spacer sequence CTCN PAM
cagcauaugccaccagcuuu

SEQ ID NO: 5909 - RNA, 20 nt, Artificial Sequence
  spacer sequence CTCN PAM
ccacucuuguaaaccugugg

SEQ ID NO: 5910 - RNA, 20 nt, Artificial Sequence
  spacer sequence CTCN PAM
acucuuguaaaccuguggga

SEQ ID NO: 5911 - RNA, 20 nt, Artificial Sequence
  spacer sequence CTCN PAM
uguaaaccugugggagggcc

SEQ ID NO: 5912 - RNA, 20 nt, Artificial Sequence
  spacer sequence CTCN PAM
cacagguuuacaagagugga

SEQ ID NO: 5913 - RNA, 20 nt, Artificial Sequence
  spacer sequence CTCN PAM
ugugucugugcauuccaaag

SEQ ID NO: 5914 - RNA, 20 nt, Artificial Sequence
  spacer sequence CTCN PAM
uaggcauucuuuggaaugca

SEQ ID NO: 5915 - RNA, 20 nt, Artificial Sequence
  spacer sequence CTCN PAM
aagugcaacacccucuuagg

SEQ ID NO: 5916 - RNA, 20 nt, Artificial Sequence
  spacer sequence CTCN PAM
ccaaacaggcaaguauuuau

SEQ ID NO: 5917 - RNA, 20 nt, Artificial Sequence
  spacer sequence CTCN PAM
aaccuaccagucccucuucc

SEQ ID NO: 5918 - RNA, 20 nt, Artificial Sequence
  spacer sequence CTCN PAM
uccaggcaucuagccuaugg

SEQ ID NO: 5919 - RNA, 20 nt, Artificial Sequence
  spacer sequence CTCN PAM
uuuaaacauacaucuuuaua

SEQ ID NO: 5920 - RNA, 20 nt, Artificial Sequence
  spacer sequence CTCN PAM
acaauagcaguagcaacaac

SEQ ID NO: 5921 - RNA, 20 nt, Artificial Sequence
  spacer sequence CTCN PAM
caacaauagcaguagcaaca

SEQ ID NO: 5922 - RNA, 20 nt, Artificial Sequence
  spacer sequence CTCN PAM
agauuuuugcuauuauaaac

SEQ ID NO: 5923 - RNA, 20 nt, Artificial Sequence
  spacer sequence CTCN PAM
uccuucuggccauuuggguu

SEQ ID NO: 5924 - RNA, 20 nt, Artificial Sequence
  spacer sequence CTCN PAM
uaguuaugacuuuaugcugc

SEQ ID NO: 5925 - RNA, 20 nt, Artificial Sequence
  spacer sequence CTCN PAM
aaacacuuggauauugaucc

SEQ ID NO: 5926 - RNA, 20 nt, Artificial Sequence
  spacer sequence CTCN PAM
cguagguaguaggcagugaa

SEQ ID NO: 5927 - RNA, 20 nt, Artificial Sequence
  spacer sequence CTCN PAM
agaaaauuacuuaacaucuc

SEQ ID NO: 5928 - RNA, 20 nt, Artificial Sequence
  spacer sequence CTCN PAM
guuuccuuaucucucaaaug

SEQ ID NO: 5929 - RNA, 20 nt, Artificial Sequence
  spacer sequence CTCN PAM
caaauggggaaaacagucau

SEQ ID NO: 5930 - RNA, 20 nt, Artificial Sequence
  spacer sequence CTCN PAM
aauggggaaaacagucauau

SEQ ID NO: 5931 - RNA, 20 nt, Artificial Sequence
  spacer sequence CTCN PAM
gaggacuggcacagggacua

SEQ ID NO: 5932 - RNA, 20 nt, Artificial Sequence
  spacer sequence CTCN PAM
gaggcaauaugacuguuuuc

SEQ ID NO: 5933 - RNA, 20 nt, Artificial Sequence
  spacer sequence CTCN PAM
uuuagucccugugccagucc

SEQ ID NO: 5934 - RNA, 20 nt, Artificial Sequence
  spacer sequence CTCN PAM
ggagagacaaauuaggagaa

SEQ ID NO: 5935 - RNA, 20 nt, Artificial Sequence
  spacer sequence CTCN PAM
agaggaaaccacuguuaaca

SEQ ID NO: 5936 - RNA, 20 nt, Artificial Sequence
  spacer sequence CTCN PAM
ccagaggaaaccacuguuaa

SEQ ID NO: 5937 - RNA, 20 nt, Artificial Sequence
  spacer sequence CTCN PAM
uaauuugucucuccagagga

SEQ ID NO: 5938 - RNA, 20 nt, Artificial Sequence
  spacer sequence CTCN PAM
uauuugucaguagcauggca

SEQ ID NO: 5939 - RNA, 20 nt, Artificial Sequence
  spacer sequence CTCN PAM
gguagcaguuuguccuuaug

SEQ ID NO: 5940 - RNA, 20 nt, Artificial Sequence
  spacer sequence CTCN PAM
gcaaccccacaacaugcuga

SEQ ID NO: 5941 - RNA, 20 nt, Artificial Sequence
  spacer sequence CTCN PAM
auuuuucagcauguuguggg

SEQ ID NO: 5942 - RNA, 20 nt, Artificial Sequence
  spacer sequence CTCN PAM
cuuucaccuggcaaaauccu

SEQ ID NO: 5943 - RNA, 20 nt, Artificial Sequence
  spacer sequence CTCN PAM
ucuuccaagacaccuuccca

SEQ ID NO: 5944 - RNA, 20 nt, Artificial Sequence
  spacer sequence CTCN PAM
agucugcagcauucucuccc

SEQ ID NO: 5945 - RNA, 20 nt, Artificial Sequence
  spacer sequence CTCN PAM
cccuacucccaacucagaga

SEQ ID NO: 5946 - RNA, 20 nt, Artificial Sequence
  spacer sequence CTCN PAM
cuacucccaacucagagaga

SEQ ID NO: 5947 - RNA, 20 nt, Artificial Sequence
  spacer sequence CTCN PAM
caacucagagagauucucug

SEQ ID NO: 5948 - RNA, 20 nt, Artificial Sequence
  spacer sequence CTCN PAM
gagagauucucugcccuccc

SEQ ID NO: 5949 - RNA, 20 nt, Artificial Sequence
  spacer sequence CTCN PAM
gaguugggaguagggagaga

SEQ ID NO: 5950 - RNA, 20 nt, Artificial Sequence
  spacer sequence CTCN PAM
cugaguugggaguagggaga

SEQ ID NO: 5951 - RNA, 20 nt, Artificial Sequence
  spacer sequence CTCN PAM
gcccucccgcaucugggugg

SEQ ID NO: 5952 - RNA, 20 nt, Artificial Sequence
  spacer sequence CTCN PAM
cgcaucuggguggcucuccu

SEQ ID NO: 5953 - RNA, 20 nt, Artificial Sequence
  spacer sequence CTCN PAM
ccuucuggugacucauguca

SEQ ID NO: 5954 - RNA, 20 nt, Artificial Sequence
  spacer sequence CTCN PAM
uucuggugacucaugucaug

SEQ ID NO: 5955 - RNA, 20 nt, Artificial Sequence
  spacer sequence CTCN PAM
ugucaugauuuaacauaagc

SEQ ID NO: 5956 - RNA, 20 nt, Artificial Sequence
  spacer sequence CTCN PAM
ggggccuuggguggugcuua

SEQ ID NO: 5957 - RNA, 20 nt, Artificial Sequence
  spacer sequence CTCN PAM
acacucuggggccuugggug

SEQ ID NO: 5958 - RNA, 20 nt, Artificial Sequence
  spacer sequence CTCN PAM
uguucuccacacucuggggc

SEQ ID NO: 5959 - RNA, 20 nt, Artificial Sequence
  spacer sequence CTCN PAM
cugccucagguuucuguguc

SEQ ID NO: 5960 - RNA, 20 nt, Artificial Sequence
  spacer sequence CTCN PAM
gccucagguuucuguguccu

SEQ ID NO: 5961 - RNA, 20 nt, Artificial Sequence
  spacer sequence CTCN PAM
gguuucuguguccuccacca

SEQ ID NO: 5962 - RNA, 20 nt, Artificial Sequence
  spacer sequence CTCN PAM
accacaucucaugacaaucc

SEQ ID NO: 5963 - RNA, 20 nt, Artificial Sequence
  spacer sequence CTCN PAM
ugacaaucccgucccacugg

SEQ ID NO: 5964 - RNA, 20 nt, Artificial Sequence
  spacer sequence CTCN PAM
aggccuccccaccauagccc

SEQ ID NO: 5965 - RNA, 20 nt, Artificial Sequence
  spacer sequence CTCN PAM
ccaccauagccccacacucu

SEQ ID NO: 5966 - RNA, 20 nt, Artificial Sequence
  spacer sequence CTCN PAM
ccaccagguccucucucuuu

SEQ ID NO: 5967 - RNA, 20 nt, Artificial Sequence
  spacer sequence CTCN PAM
accagguccucucucuuucu

SEQ ID NO: 5968 - RNA, 20 nt, Artificial Sequence
  spacer sequence CTCN PAM
cucuuucuggggaugcaguc

SEQ ID NO: 5969 - RNA, 20 nt, Artificial Sequence
  spacer sequence CTCN PAM
cuuucuggggaugcagucag

SEQ ID NO: 5970 - RNA, 20 nt, Artificial Sequence
  spacer sequence CTCN PAM
uucuggggaugcagucagac

SEQ ID NO: 5971 - RNA, 20 nt, Artificial Sequence
  spacer sequence CTCN PAM
gccagucugacugcaucccc

SEQ ID NO: 5972 - RNA, 20 nt, Artificial Sequence
  spacer sequence CTCN PAM
accuuuugcucuccauugcu

SEQ ID NO: 5973 - RNA, 20 nt, Artificial Sequence
  spacer sequence CTCN PAM
ccauugcuuacuuuuuuuuu

SEQ ID NO: 5974 - RNA, 20 nt, Artificial Sequence
  spacer sequence CTCN PAM
auugcuuacuuuuuuuuuuu

SEQ ID NO: 5975 - RNA, 20 nt, Artificial Sequence
  spacer sequence CTCN PAM
aaaaggaaaaaaaaaaaaaa

SEQ ID NO: 5976 - RNA, 20 nt, Artificial Sequence
  spacer sequence CTCN PAM
aucucaaaaaggaaaaaaaa

SEQ ID NO: 5977 - RNA, 20 nt, Artificial Sequence
  spacer sequence CTCN PAM
gucaccaggcuggagugcag

SEQ ID NO: 5978 - RNA, 20 nt, Artificial Sequence
  spacer sequence CTCN PAM
agccuggugacagaguaaga

SEQ ID NO: 5979 - RNA, 20 nt, Artificial Sequence
  spacer sequence CTCN PAM
gcucacugcaacucucaccu

SEQ ID NO: 5980 - RNA, 20 nt, Artificial Sequence
  spacer sequence CTCN PAM
cugcaacucucaccucccag

SEQ ID NO: 5981 - RNA, 20 nt, Artificial Sequence
  spacer sequence CTCN PAM
caccucccaggaucaaguga

SEQ ID NO: 5982 - RNA, 20 nt, Artificial Sequence
  spacer sequence CTCN PAM
ccucccaggaucaagugauu

SEQ ID NO: 5983 - RNA, 20 nt, Artificial Sequence
  spacer sequence CTCN PAM
caggaucaagugauucuccu

SEQ ID NO: 5984 - RNA, 20 nt, Artificial Sequence
  spacer sequence CTCN PAM
ugccucagccucccaaguag

SEQ ID NO: 5985 - RNA, 20 nt, Artificial Sequence
  spacer sequence CTCN PAM
gccucccaaguagcugggac

SEQ ID NO: 5986 - RNA, 20 nt, Artificial Sequence
  spacer sequence CTCN PAM
caaguagcugggacuacagg

SEQ ID NO: 5987 - RNA, 20 nt, Artificial Sequence
  spacer sequence CTCN PAM
gcuaauuuuuguauuuuuuu

SEQ ID NO: 5988 - RNA, 20 nt, Artificial Sequence
  spacer sequence CTCN PAM
acuaaaaaaauacaaaaauu

SEQ ID NO: 5989 - RNA, 20 nt, Artificial Sequence
  spacer sequence CTCN PAM
aucucuugaccuugugaucc

SEQ ID NO: 5990 - RNA, 20 nt, Artificial Sequence
  spacer sequence CTCN PAM
ugaccuugugauccacccgc

SEQ ID NO: 5991 - RNA, 20 nt, Artificial Sequence
  spacer sequence CTCN PAM
gccucccaaaguacugggau

SEQ ID NO: 5992 - RNA, 20 nt, Artificial Sequence
  spacer sequence CTCN PAM
caaaguacugggauuacagg

SEQ ID NO: 5993 - RNA, 20 nt, Artificial Sequence
  spacer sequence CTCN PAM
cgccuguaaucccaguacuu

SEQ ID NO: 5994 - RNA, 20 nt, Artificial Sequence
  spacer sequence CTCN PAM
cuuuuguggccacuuucccc

SEQ ID NO: 5995 - RNA, 20 nt, Artificial Sequence
  spacer sequence CTCN PAM
augcuguuaucagcuugcuu

SEQ ID NO: 5996 - RNA, 20 nt, Artificial Sequence
  spacer sequence CTCN PAM
cgcuauuccuucaggccaac

SEQ ID NO: 5997 - RNA, 20 nt, Artificial Sequence
  spacer sequence CTCN PAM
cuauuccuucaggccaacuu

SEQ ID NO: 5998 - RNA, 20 nt, Artificial Sequence
  spacer sequence CTCN PAM
ccucugcaccccucauccug

SEQ ID NO: 5999 - RNA, 20 nt, Artificial Sequence
  spacer sequence CTCN PAM
gcaccccucauccugugccu

SEQ ID NO: 6000 - RNA, 20 nt, Artificial Sequence
  spacer sequence CTCN PAM
uccugugccuagcagaaaac

SEQ ID NO: 6001 - RNA, 20 nt, Artificial Sequence
  spacer sequence CTCN PAM
gaauggguagagcuugucuc

SEQ ID NO: 6002 - RNA, 20 nt, Artificial Sequence
  spacer sequence CTCN PAM
acccauucagaggguggcuu

SEQ ID NO: 6003 - RNA, 20 nt, Artificial Sequence
  spacer sequence CTCN PAM
ucaacuggaucgcaaauucc

SEQ ID NO: 6004 - RNA, 20 nt, Artificial Sequence
  spacer sequence CTCN PAM
gauugggcaugaguggagug

SEQ ID NO: 6005 - RNA, 20 nt, Artificial Sequence
  spacer sequence CTCN PAM
ugcccaaucugagaaaggaa

SEQ ID NO: 6006 - RNA, 20 nt, Artificial Sequence
  spacer sequence CTCN PAM
acucaugcccaaucugagaa

SEQ ID NO: 6007 - RNA, 20 nt, Artificial Sequence
  spacer sequence CTCN PAM
acuccacucaugcccaaucu

SEQ ID NO: 6008 - RNA, 20 nt, Artificial Sequence
  spacer sequence CTCN PAM
aagccuuugcuccacuccac

SEQ ID NO: 6009 - RNA, 20 nt, Artificial Sequence
  spacer sequence CTCN PAM
acuccaagccuuugcuccac

SEQ ID NO: 6010 - RNA, 20 nt, Artificial Sequence
  spacer sequence CTCN PAM
gccuucccucaacuccaagc

SEQ ID NO: 6011 - RNA, 20 nt, Artificial Sequence
  spacer sequence CTCN PAM
cuccgccuucccucaacucc

SEQ ID NO: 6012 - RNA, 20 nt, Artificial Sequence
  spacer sequence CTCN PAM
cuaacuuuguauggcaacac

SEQ ID NO: 6013 - RNA, 20 nt, Artificial Sequence
  spacer sequence CTCN PAM
gauaagaugaauuuucucaa

SEQ ID NO: 6014 - RNA, 20 nt, Artificial Sequence
  spacer sequence CTCN PAM
aaagccaauaauuccacaug

SEQ ID NO: 6015 - RNA, 20 nt, Artificial Sequence
  spacer sequence CTCN PAM
ucuaaaauuagagagaagug

SEQ ID NO: 6016 - RNA, 20 nt, Artificial Sequence
  spacer sequence CTCN PAM
aauuuuagaugagccaugug

SEQ ID NO: 6017 - RNA, 20 nt, Artificial Sequence
  spacer sequence CTCN PAM
cuaauuuuagaugagccaug

SEQ ID NO: 6018 - RNA, 20 nt, Artificial Sequence
  spacer sequence CTCN PAM
aauucccuaagaaagucauu

SEQ ID NO: 6019 - RNA, 20 nt, Artificial Sequence
  spacer sequence CTCN PAM
agggcauuucugucccugcc

SEQ ID NO: 6020 - RNA, 20 nt, Artificial Sequence
  spacer sequence CTCN PAM
gccuggauuuguacaaauac

SEQ ID NO: 6021 - RNA, 20 nt, Artificial Sequence
  spacer sequence CTCN PAM
ucaauuuccuuguuuagaaa

SEQ ID NO: 6022 - RNA, 20 nt, Artificial Sequence
  spacer sequence CTCN PAM
auuuccuuguuuagaaacac

SEQ ID NO: 6023 - RNA, 20 nt, Artificial Sequence
  spacer sequence CTCN PAM
aauuucaauaggacuuuguu

SEQ ID NO: 6024 - RNA, 20 nt, Artificial Sequence
  spacer sequence CTCN PAM
cagcuccuccagccccaacg

SEQ ID NO: 6025 - RNA, 20 nt, Artificial Sequence
  spacer sequence CTCN PAM
gcuccuccagccccaacgug

SEQ ID NO: 6026 - RNA, 20 nt, Artificial Sequence
  spacer sequence CTCN PAM
uccagccccaacgugcuugc

SEQ ID NO: 6027 - RNA, 20 nt, Artificial Sequence
  spacer sequence CTCN PAM
agccccaacgugcuugccau

SEQ ID NO: 6028 - RNA, 20 nt, Artificial Sequence
  spacer sequence CTCN PAM
uaaacagcugcagccuggac

SEQ ID NO: 6029 - RNA, 20 nt, Artificial Sequence
  spacer sequence CTCN PAM
gcguuaggcccaucuguaag

SEQ ID NO: 6030 - RNA, 20 nt, Artificial Sequence
  spacer sequence CTCN PAM
cugagcaggccccgugcuac

SEQ ID NO: 6031 - RNA, 20 nt, Artificial Sequence
  spacer sequence CTCN PAM
gggaguguggguccguguau

SEQ ID NO: 6032 - RNA, 20 nt, Artificial Sequence
  spacer sequence CTCN PAM
aaccucugcauuccugcagg

SEQ ID NO: 6033 - RNA, 20 nt, Artificial Sequence
  spacer sequence CTCN PAM
gcauuccugcagggguccuc

SEQ ID NO: 6034 - RNA, 20 nt, Artificial Sequence
  spacer sequence CTCN PAM
ggguaacucugccccccacc

SEQ ID NO: 6035 - RNA, 20 nt, Artificial Sequence
  spacer sequence CTCN PAM
gccccccacccaguuaguga

SEQ ID NO: 6036 - RNA, 20 nt, Artificial Sequence
  spacer sequence CTCN PAM
ggauuggguguuugguagcc

SEQ ID NO: 6037 - RNA, 20 nt, Artificial Sequence
  spacer sequence CTCN PAM
ggcuaccaaacacccaaucc

SEQ ID NO: 6038 - RNA, 20 nt, Artificial Sequence
  spacer sequence CTCN PAM
gcuggccauaggaaacucag

SEQ ID NO: 6039 - RNA, 20 nt, Artificial Sequence
  spacer sequence CTCN PAM
caagaugagguguggcacaa

SEQ ID NO: 6040 - RNA, 20 nt, Artificial Sequence
  spacer sequence CTCN PAM
ucuugugagauguuaugucu

SEQ ID NO: 6041 - RNA, 20 nt, Artificial Sequence
  spacer sequence CTCN PAM
ccagccagccccaguuucca

SEQ ID NO: 6042 - RNA, 20 nt, Artificial Sequence
  spacer sequence CTCN PAM
uccccauaguucucaaaggu

SEQ ID NO: 6043 - RNA, 20 nt, Artificial Sequence
  spacer sequence CTCN PAM
aagguuauagaacccccuuc

SEQ ID NO: 6044 - RNA, 20 nt, Artificial Sequence
  spacer sequence CTCN PAM
uucagcaauagucuucccug

SEQ ID NO: 6045 - RNA, 20 nt, Artificial Sequence
  spacer sequence CTCN PAM
cccuauauugucaacacauc

SEQ ID NO: 6046 - RNA, 20 nt, Artificial Sequence
  spacer sequence CTCN PAM
guggaauaccccauccaauu

SEQ ID NO: 6047 - RNA, 20 nt, Artificial Sequence
  spacer sequence CTCN PAM
cacugacccuaaaaagaaag

SEQ ID NO: 6048 - RNA, 20 nt, Artificial Sequence
  spacer sequence CTCN PAM
cugacccuaaaaagaaagcc

SEQ ID NO: 6049 - RNA, 20 nt, Artificial Sequence
  spacer sequence CTCN PAM
ucaacauucccauuuuaauu

SEQ ID NO: 6050 - RNA, 20 nt, Artificial Sequence
  spacer sequence CTCN PAM
aagacaacaauucauauuga

SEQ ID NO: 6051 - RNA, 20 nt, Artificial Sequence
  spacer sequence CTCN PAM
ccaucaauaugaauuguugu

SEQ ID NO: 6052 - RNA, 20 nt, Artificial Sequence
  spacer sequence CTCN PAM
uggaauaauguccuuaaaaa

SEQ ID NO: 6053 - RNA, 20 nt, Artificial Sequence
  spacer sequence CTCN PAM
cuuggaauaauguccuuaaa

SEQ ID NO: 6054 - RNA, 20 nt, Artificial Sequence
  spacer sequence CTCN PAM
gucaggugcaguggacuuaa

SEQ ID NO: 6055 - RNA, 20 nt, Artificial Sequence
  spacer sequence CTCN PAM
ugacaucucugcccucauua

SEQ ID NO: 6056 - RNA, 20 nt, Artificial Sequence
  spacer sequence CTCN PAM
gcccucauuaaaaaagcaua

SEQ ID NO: 6057 - RNA, 20 nt, Artificial Sequence
  spacer sequence CTCN PAM
uuaaaaaagcauaucacagu

SEQ ID NO: 6058 - RNA, 20 nt, Artificial Sequence
  spacer sequence CTCN PAM
caugcaugcaugcucaacgc

SEQ ID NO: 6059 - RNA, 20 nt, Artificial Sequence
  spacer sequence CTCN PAM
acgccaaaaauccgagagga

SEQ ID NO: 6060 - RNA, 20 nt, Artificial Sequence
  spacer sequence CTCN PAM
accaggggauaguaaaggcu

SEQ ID NO: 6061 - RNA, 20 nt, Artificial Sequence
  spacer sequence CTCN PAM
ucagcagcaccacuuacgca

SEQ ID NO: 6062 - RNA, 20 nt, Artificial Sequence
  spacer sequence CTCN PAM
gguagguaaauggucccucc

SEQ ID NO: 6063 - RNA, 20 nt, Artificial Sequence
  spacer sequence CTCN PAM
ugcagucuuguucacacugu

SEQ ID NO: 6064 - RNA, 20 nt, Artificial Sequence
  spacer sequence CTCN PAM
gcaaauuaacagugugaaca

SEQ ID NO: 6065 - RNA, 20 nt, Artificial Sequence
  spacer sequence CTCN PAM
aggacugugcaaacaccggu

SEQ ID NO: 6066 - RNA, 20 nt, Artificial Sequence
  spacer sequence CTCN PAM
gauaagaaauccacuagagu

SEQ ID NO: 6067 - RNA, 20 nt, Artificial Sequence
  spacer sequence CTCN PAM
uuccaagauucagaauugua

SEQ ID NO: 6068 - RNA, 20 nt, Artificial Sequence
  spacer sequence CTCN PAM
gcaguuauggaaaaugacua

SEQ ID NO: 6069 - RNA, 20 nt, Artificial Sequence
  spacer sequence CTCN PAM
ccuagggaccaucagaacuu

SEQ ID NO: 6070 - RNA, 20 nt, Artificial Sequence
  spacer sequence CTCN PAM
uagggaccaucagaacuugg

SEQ ID NO: 6071 - RNA, 20 nt, Artificial Sequence
  spacer sequence CTCN PAM
ccaaacaccuugagaacuuc

SEQ ID NO: 6072 - RNA, 20 nt, Artificial Sequence
  spacer sequence CTCN PAM
aaacaccuugagaacuucau

SEQ ID NO: 6073 - RNA, 20 nt, Artificial Sequence
  spacer sequence CTCN PAM
agguguuuggagagccuguu

SEQ ID NO: 6074 - RNA, 20 nt, Artificial Sequence
  spacer sequence CTCN PAM
uugaucccuuaauacaucua

SEQ ID NO: 6075 - RNA, 20 nt, Artificial Sequence
  spacer sequence CTCN PAM
gacaccuucauugacuucau

SEQ ID NO: 6076 - RNA, 20 nt, Artificial Sequence
  spacer sequence CTCN PAM
agggacuaccaccaacuuag

SEQ ID NO: 6077 - RNA, 20 nt, Artificial Sequence
  spacer sequence CTCN PAM
augugaacuggaaaagcuaa

SEQ ID NO: 6078 - RNA, 20 nt, Artificial Sequence
  spacer sequence CTCN PAM
acuuaucaaagagaaguaca

SEQ ID NO: 6079 - RNA, 20 nt, Artificial Sequence
  spacer sequence CTCN PAM
uugauaaguggaguuaacau

SEQ ID NO: 6080 - RNA, 20 nt, Artificial Sequence
  spacer sequence CTCN PAM
auuaugaaaaguagaaacca

SEQ ID NO: 6081 - RNA, 20 nt, Artificial Sequence
  spacer sequence CTCN PAM
caauaucauucauuuugguu

SEQ ID NO: 6082 - RNA, 20 nt, Artificial Sequence
  spacer sequence CTCN PAM
gcugggguuuccugaauuua

SEQ ID NO: 6083 - RNA, 20 nt, Artificial Sequence
  spacer sequence CTCN PAM
uccacccaauaugguaguug

SEQ ID NO: 6084 - RNA, 20 nt, Artificial Sequence
  spacer sequence CTCN PAM
ugacuuccccuuucuuucau

SEQ ID NO: 6085 - RNA, 20 nt, Artificial Sequence
  spacer sequence CTCN PAM
cuggccuccugacuuccccu

SEQ ID NO: 6086 - RNA, 20 nt, Artificial Sequence
  spacer sequence CTCN PAM
cagguccucccuggccuccu

SEQ ID NO: 6087 - RNA, 20 nt, Artificial Sequence
  spacer sequence CTCN PAM
cuggccucccagguccuccc

SEQ ID NO: 6088 - RNA, 20 nt, Artificial Sequence
  spacer sequence CTCN PAM
ucccuggccucccagguccu

SEQ ID NO: 6089 - RNA, 20 nt, Artificial Sequence
  spacer sequence CTCN PAM
uccucccuggccucccaggu

SEQ ID NO: 6090 - RNA, 20 nt, Artificial Sequence
  spacer sequence CTCN PAM
aauaaguaaaucuguugaca

SEQ ID NO: 6091 - RNA, 20 nt, Artificial Sequence
  spacer sequence CTCN PAM
uuacucuaauaaguaaaucu

SEQ ID NO: 6092 - RNA, 20 nt, Artificial Sequence
  spacer sequence CTCN PAM
auuucaugccaaaguuaggc

SEQ ID NO: 6093 - RNA, 20 nt, Artificial Sequence
  spacer sequence CTCN PAM
agcguccugguaaaggagac

SEQ ID NO: 6094 - RNA, 20 nt, Artificial Sequence
  spacer sequence CTCN PAM
uuuaccaggacgcuggagaa

SEQ ID NO: 6095 - RNA, 20 nt, Artificial Sequence
  spacer sequence CTCN PAM
agggucugucuaccuuuugg

SEQ ID NO: 6096 - RNA, 20 nt, Artificial Sequence
  spacer sequence CTCN PAM
ucuccagggucugucuaccu

SEQ ID NO: 6097 - RNA, 20 nt, Artificial Sequence
  spacer sequence CTCN PAM
uuacaccucuucuccagggu

SEQ ID NO: 6098 - RNA, 20 nt, Artificial Sequence
  spacer sequence CTCN PAM
aguccugacuaauugaaagu

SEQ ID NO: 6099 - RNA, 20 nt, Artificial Sequence
  spacer sequence CTCN PAM
ucauucaagggauuuucccc

SEQ ID NO: 6100 - RNA, 20 nt, Artificial Sequence
  spacer sequence CTCN PAM
gugagcaauccccaccuauu

SEQ ID NO: 6101 - RNA, 20 nt, Artificial Sequence
  spacer sequence CTCN PAM
cugagcucuucauucaaggg

SEQ ID NO: 6102 - RNA, 20 nt, Artificial Sequence
  spacer sequence CTCN PAM
cacucuuguucuuagucacu

SEQ ID NO: 6103 - RNA, 20 nt, Artificial Sequence
  spacer sequence CTCN PAM
uguucuuagucacuugagcc

SEQ ID NO: 6104 - RNA, 20 nt, Artificial Sequence
  spacer sequence CTCN PAM
agugacuaagaacaagagug

SEQ ID NO: 6105 - RNA, 20 nt, Artificial Sequence
  spacer sequence CTCN PAM
ugugcguggaugcagaaaau

SEQ ID NO: 6106 - RNA, 20 nt, Artificial Sequence
  spacer sequence CTCN PAM
cacaguuuauaaaacacaac

SEQ ID NO: 6107 - RNA, 20 nt, Artificial Sequence
  spacer sequence CTCN PAM
acugcucccacaguuuauaa

SEQ ID NO: 6108 - RNA, 20 nt, Artificial Sequence
  spacer sequence CTCN PAM
uaguaacaaaugccaguucu

SEQ ID NO: 6109 - RNA, 20 nt, Artificial Sequence
  spacer sequence CTCN PAM
auaccacuugaccucuuaaa

SEQ ID NO: 6110 - RNA, 20 nt, Artificial Sequence
  spacer sequence CTCN PAM
uaaacaaggcccuacaaaua

SEQ ID NO: 6111 - RNA, 20 nt, Artificial Sequence
  spacer sequence CTCN PAM
auuucuuuuuuuacaauggg

SEQ ID NO: 6112 - RNA, 20 nt, Artificial Sequence
  spacer sequence CTCN PAM
uaugacuagccugauggagc

SEQ ID NO: 6113 - RNA, 20 nt, Artificial Sequence
  spacer sequence CTCN PAM
aucaggcuagucauaagaga

SEQ ID NO: 6114 - RNA, 20 nt, Artificial Sequence
  spacer sequence CTCN PAM
uugauggcauccaaaucagu

SEQ ID NO: 6115 - RNA, 20 nt, Artificial Sequence
  spacer sequence CTCN PAM
gcauggccuucaggaucaau

SEQ ID NO: 6116 - RNA, 20 nt, Artificial Sequence
  spacer sequence CTCN PAM
ccuggguucugccuuuucca

SEQ ID NO: 6117 - RNA, 20 nt, Artificial Sequence
  spacer sequence CTCN PAM
gcucgccuggguucugccuu

SEQ ID NO: 6118 - RNA, 20 nt, Artificial Sequence
  spacer sequence CTCN PAM
aagcacagcugcugcagacg

SEQ ID NO: 6119 - RNA, 20 nt, Artificial Sequence
  spacer sequence CTCN PAM
ggcagcccucucugcauaaa

SEQ ID NO: 6120 - RNA, 20 nt, Artificial Sequence
  spacer sequence CTCN PAM
cugcauaaagaacauggaau

SEQ ID NO: 6121 - RNA, 20 nt, Artificial Sequence
  spacer sequence CTCN PAM
gcauaaagaacauggaaucg

SEQ ID NO: 6122 - RNA, 20 nt, Artificial Sequence
  spacer sequence CTCN PAM
gggaaauguaggcacgauuc

SEQ ID NO: 6123 - RNA, 20 nt, Artificial Sequence
  spacer sequence CTCN PAM
gcccuagcugucccucuaca

SEQ ID NO: 6124 - RNA, 20 nt, Artificial Sequence
  spacer sequence CTCN PAM
acaugagagggagagggaug

SEQ ID NO: 6125 - RNA, 20 nt, Artificial Sequence
  spacer sequence CTCN PAM
uguagagggacagcuagggc

SEQ ID NO: 6126 - RNA, 20 nt, Artificial Sequence
  spacer sequence CTCN PAM
cauguagagggacagcuagg

SEQ ID NO: 6127 - RNA, 20 nt, Artificial Sequence
  spacer sequence CTCN PAM
cucucauguagagggacagc

SEQ ID NO: 6128 - RNA, 20 nt, Artificial Sequence
  spacer sequence CTCN PAM
cccucucauguagagggaca

SEQ ID NO: 6129 - RNA, 20 nt, Artificial Sequence
  spacer sequence CTCN PAM
gacagccagccauuaauuac

SEQ ID NO: 6130 - RNA, 20 nt, Artificial Sequence
  spacer sequence CTCN PAM
cugacagccagccauuaauu

SEQ ID NO: 6131 - RNA, 20 nt, Artificial Sequence
  spacer sequence CTCN PAM
aaaaugacucucugacagcc

SEQ ID NO: 6132 - RNA, 20 nt, Artificial Sequence
  spacer sequence CTCN PAM
gccguugaaggcuccauauu

SEQ ID NO: 6133 - RNA, 20 nt, Artificial Sequence
  spacer sequence CTCN PAM
auauuaaaggccggauccca

SEQ ID NO: 6134 - RNA, 20 nt, Artificial Sequence
  spacer sequence CTCN PAM
cucucuaaaugguaggagug

SEQ ID NO: 6135 - RNA, 20 nt, Artificial Sequence
  spacer sequence CTCN PAM
cuaaaugguaggagugacgu

SEQ ID NO: 6136 - RNA, 20 nt, Artificial Sequence
  spacer sequence CTCN PAM
aaaugguaggagugacgugg

SEQ ID NO: 6137 - RNA, 20 nt, Artificial Sequence
  spacer sequence CTCN PAM
uaccauuuagagagggaguu

SEQ ID NO: 6138 - RNA, 20 nt, Artificial Sequence
  spacer sequence CTCN PAM
cuucuugccccaggugccca

SEQ ID NO: 6139 - RNA, 20 nt, Artificial Sequence
  spacer sequence CTCN PAM
ugcuucccccucccuucuug

SEQ ID NO: 6140 - RNA, 20 nt, Artificial Sequence
  spacer sequence CTCN PAM
uucgccaucuccugcuuccc

SEQ ID NO: 6141 - RNA, 20 nt, Artificial Sequence
  spacer sequence CTCN PAM
aaaccuccuucgccaucucc

SEQ ID NO: 6142 - RNA, 20 nt, Artificial Sequence
  spacer sequence CTCN PAM
acuuccccucuaaaccuccu

SEQ ID NO: 6143 - RNA, 20 nt, Artificial Sequence
  spacer sequence CTCN PAM
gaagucaguuugccguaaug

SEQ ID NO: 6144 - RNA, 20 nt, Artificial Sequence
  spacer sequence CTCN PAM
ugucagaacucugaagucag

SEQ ID NO: 6145 - RNA, 20 nt, Artificial Sequence
  spacer sequence CTCN PAM
cuuuccgcccccuaauaagc

SEQ ID NO: 6146 - RNA, 20 nt, Artificial Sequence
  spacer sequence CTCN PAM
uaaaauauacauagcagauc

SEQ ID NO: 6147 - RNA, 20 nt, Artificial Sequence
  spacer sequence CTCN PAM
cugauuuuaucuuuguuacu

SEQ ID NO: 6148 - RNA, 20 nt, Artificial Sequence
  spacer sequence CTCN PAM
ccagccauucuuuugguacu

SEQ ID NO: 6149 - RNA, 20 nt, Artificial Sequence
  spacer sequence CTCN PAM
auccauccuccauccccucu

SEQ ID NO: 6150 - RNA, 20 nt, Artificial Sequence
  spacer sequence CTCN PAM
ccauccauccuccauccccu

SEQ ID NO: 6151 - RNA, 20 nt, Artificial Sequence
  spacer sequence CTCN PAM
aucccucuccauccauccuc

SEQ ID NO: 6152 - RNA, 20 nt, Artificial Sequence
  spacer sequence CTCN PAM
uccaucccucuccauccauc

SEQ ID NO: 6153 - RNA, 20 nt, Artificial Sequence
  spacer sequence CTCN PAM
agcuggcucauuuccaugaa

SEQ ID NO: 6154 - RNA, 20 nt, Artificial Sequence
  spacer sequence CTCN PAM
uuuccaugaaggugggcagc

SEQ ID NO: 6155 - RNA, 20 nt, Artificial Sequence
  spacer sequence CTCN PAM
cucugccugccgccagugcc

SEQ ID NO: 6156 - RNA, 20 nt, Artificial Sequence
  spacer sequence CTCN PAM
gccugccgccagugccacca

SEQ ID NO: 6157 - RNA, 20 nt, Artificial Sequence
  spacer sequence CTCN PAM
guugguggcacuggcggcag

SEQ ID NO: 6158 - RNA, 20 nt, Artificial Sequence
  spacer sequence CTCN PAM
cgcuagguaguuaaccugca

SEQ ID NO: 6159 - RNA, 20 nt, Artificial Sequence
  spacer sequence CTCN PAM
aaauggugcauaugguaacc

SEQ ID NO: 6160 - RNA, 20 nt, Artificial Sequence
  spacer sequence CTCN PAM
aacaauucaagucgggugaa

SEQ ID NO: 6161 - RNA, 20 nt, Artificial Sequence
  spacer sequence CTCN PAM
cggcucguucuauuugugca

SEQ ID NO: 6162 - RNA, 20 nt, Artificial Sequence
  spacer sequence CTCN PAM
uucuauuugugcaaguccua

SEQ ID NO: 6163 - RNA, 20 nt, Artificial Sequence
  spacer sequence CTCN PAM
cugcucauggcgauccucca

SEQ ID NO: 6164 - RNA, 20 nt, Artificial Sequence
  spacer sequence CTCN PAM
gcucauggcgauccuccaga

SEQ ID NO: 6165 - RNA, 20 nt, Artificial Sequence
  spacer sequence CTCN PAM
uggcgauccuccagaauguu

SEQ ID NO: 6166 - RNA, 20 nt, Artificial Sequence
  spacer sequence CTCN PAM
agaauguuugccuagaaucg

SEQ ID NO: 6167 - RNA, 20 nt, Artificial Sequence
  spacer sequence CTCN PAM
gaauuguuaauucugaaguu

SEQ ID NO: 6168 - RNA, 20 nt, Artificial Sequence
  spacer sequence CTCN PAM
accaggaagcuuucccagau

SEQ ID NO: 6169 - RNA, 20 nt, Artificial Sequence
  spacer sequence CTCN PAM
caauaggaauaaauuacuuc

SEQ ID NO: 6170 - RNA, 20 nt, Artificial Sequence
  spacer sequence CTCN PAM
auaggaauaaauuacuuccc

SEQ ID NO: 6171 - RNA, 20 nt, Artificial Sequence
  spacer sequence CTCN PAM
ugugccuucccuaauagaua

SEQ ID NO: 6172 - RNA, 20 nt, Artificial Sequence
  spacer sequence CTCN PAM
uaucuauuagggaaggcaca

SEQ ID NO: 6173 - RNA, 20 nt, Artificial Sequence
  spacer sequence CTCN PAM
aggaagccucuuaucuauua

SEQ ID NO: 6174 - RNA, 20 nt, Artificial Sequence
  spacer sequence CTCN PAM
auagaaagcccacaccccgg

SEQ ID NO: 6175 - RNA, 20 nt, Artificial Sequence
  spacer sequence CTCN PAM
auaaaucuaagcagaauuga

SEQ ID NO: 6176 - RNA, 20 nt, Artificial Sequence
  spacer sequence CTCN PAM
guucuaauuaaagugggcaa

SEQ ID NO: 6177 - RNA, 20 nt, Artificial Sequence
  spacer sequence CTCN PAM
uccgguucuaguagggcugg

SEQ ID NO: 6178 - RNA, 20 nt, Artificial Sequence
  spacer sequence CTCN PAM
accagcuugcuagcucuucc

SEQ ID NO: 6179 - RNA, 20 nt, Artificial Sequence
  spacer sequence CTCN PAM
ugacuccuuucucccccacc

SEQ ID NO: 6180 - RNA, 20 nt, Artificial Sequence
  spacer sequence CTCN PAM
uuucucccccacccccaucc

SEQ ID NO: 6181 - RNA, 20 nt, Artificial Sequence
  spacer sequence CTCN PAM
cccacccccauccugaggac

SEQ ID NO: 6182 - RNA, 20 nt, Artificial Sequence
  spacer sequence CTCN PAM
ggaugggggugggggagaaa

SEQ ID NO: 6183 - RNA, 20 nt, Artificial Sequence
  spacer sequence CTCN PAM
uuauggacacaaguguuuca

SEQ ID NO: 6184 - RNA, 20 nt, Artificial Sequence
  spacer sequence CTCN PAM
gcuggcucuuuauggacaca

SEQ ID NO: 6185 - RNA, 20 nt, Artificial Sequence
  spacer sequence CTCN PAM
cauagacccacuacugugca

SEQ ID NO: 6186 - RNA, 20 nt, Artificial Sequence
  spacer sequence CTCN PAM
caaaacucacccuuucacau

SEQ ID NO: 6187 - RNA, 20 nt, Artificial Sequence
  spacer sequence CTCN PAM
gaggucaugaaguucaaugg

SEQ ID NO: 6188 - RNA, 20 nt, Artificial Sequence
  spacer sequence CTCN PAM
gagugaaugugaaaggguga

SEQ ID NO: 6189 - RNA, 20 nt, Artificial Sequence
  spacer sequence CTCN PAM
auugaacuucaugaccucag

SEQ ID NO: 6190 - RNA, 20 nt, Artificial Sequence
  spacer sequence CTCN PAM
uucuaccccuuuguuuucuc

SEQ ID NO: 6191 - RNA, 20 nt, Artificial Sequence
  spacer sequence CTCN PAM
uauuuggcaugccaguggcc

SEQ ID NO: 6192 - RNA, 20 nt, Artificial Sequence
  spacer sequence CTCN PAM
aaaauauuaaguagaggguc

SEQ ID NO: 6193 - RNA, 20 nt, Artificial Sequence
  spacer sequence CTCN PAM
acuuaauauuuuggaggcac

SEQ ID NO: 6194 - RNA, 20 nt, Artificial Sequence
  spacer sequence CTCN PAM
cuaagugcuauauuacugac

SEQ ID NO: 6195 - RNA, 20 nt, Artificial Sequence
  spacer sequence CTCN PAM
agauggagucuugcucuguc

SEQ ID NO: 6196 - RNA, 20 nt, Artificial Sequence
  spacer sequence CTCN PAM
aggaaagauaucugugauau

SEQ ID NO: 6197 - RNA, 20 nt, Artificial Sequence
  spacer sequence CTCN PAM
ucuguccuuugcaacauacu

SEQ ID NO: 6198 - RNA, 20 nt, Artificial Sequence
  spacer sequence CTCN PAM
gaaugaaucacagguacuuu

SEQ ID NO: 6199 - RNA, 20 nt, Artificial Sequence
  spacer sequence CTCN PAM
ucaacuuauggaauagugaa

SEQ ID NO: 6200 - RNA, 20 nt, Artificial Sequence
  spacer sequence CTCN PAM
acuuauggaauagugaagac

SEQ ID NO: 6201 - RNA, 20 nt, Artificial Sequence
  spacer sequence CTCN PAM
acaguagacauugcauuuga

SEQ ID NO: 6202 - RNA, 20 nt, Artificial Sequence
  spacer sequence CTCN PAM
uaauggcuacaugaaggucc

SEQ ID NO: 6203 - RNA, 20 nt, Artificial Sequence
  spacer sequence CTCN PAM
cacgguuauuauuuuuguuu

SEQ ID NO: 6204 - RNA, 20 nt, Artificial Sequence
  spacer sequence CTCN PAM
ugaucccucacacgguuauu

SEQ ID NO: 6205 - RNA, 20 nt, Artificial Sequence
  spacer sequence CTCN PAM
aaauauccauaaugcucugu

SEQ ID NO: 6206 - RNA, 20 nt, Artificial Sequence
  spacer sequence CTCN PAM
gucuuuaugaugcaaaagaa

SEQ ID NO: 6207 - RNA, 20 nt, Artificial Sequence
  spacer sequence CTCN PAM
uuaaagaacuauuauuuuuu

SEQ ID NO: 6208 - RNA, 20 nt, Artificial Sequence
  spacer sequence CTCN PAM
acaugaaacaucuuaauuug

SEQ ID NO: 6209 - RNA, 20 nt, Artificial Sequence
  spacer sequence CTCN PAM
gugucaauggaaagcuaccu

SEQ ID NO: 6210 - RNA, 20 nt, Artificial Sequence
  spacer sequence CTCN PAM
uucuagauauuuucauuuca

SEQ ID NO: 6211 - RNA, 20 nt, Artificial Sequence
  spacer sequence CTCN PAM
cuguggccauuccagggucc

SEQ ID NO: 6212 - RNA, 20 nt, Artificial Sequence
  spacer sequence CTCN PAM
cccuguggccauuccagggu

SEQ ID NO: 6213 - RNA, 20 nt, Artificial Sequence
  spacer sequence CTCN PAM
cucccuguggccauuccagg

SEQ ID NO: 6214 - RNA, 20 nt, Artificial Sequence
  spacer sequence CTCN PAM
guaucucucucccuguggcc

SEQ ID NO: 6215 - RNA, 20 nt, Artificial Sequence
  spacer sequence CTCN PAM
uucuuccuggcuccguaucu

SEQ ID NO: 6216 - RNA, 20 nt, Artificial Sequence
  spacer sequence CTCN PAM
aaucuuggcucugcuacaga

SEQ ID NO: 6217 - RNA, 20 nt, Artificial Sequence
  spacer sequence CTCN PAM
ggucaaagcugcaaguuguu

SEQ ID NO: 6218 - RNA, 20 nt, Artificial Sequence
  spacer sequence CTCN PAM
ucaaagaucauacacagcgg

SEQ ID NO: 6219 - RNA, 20 nt, Artificial Sequence
  spacer sequence CTCN PAM
uucuucuuaacucuucaaag

SEQ ID NO: 6220 - RNA, 20 nt, Artificial Sequence
  spacer sequence CTCN PAM
cauuguuccaguggaucaug

SEQ ID NO: 6221 - RNA, 20 nt, Artificial Sequence
  spacer sequence CTCN PAM
uuugggaauggauucuggcc

SEQ ID NO: 6222 - RNA, 20 nt, Artificial Sequence
  spacer sequence CTCN PAM
gcgucucacagaaaagagug

SEQ ID NO: 6223 - RNA, 20 nt, Artificial Sequence
  spacer sequence CTCN PAM
cagaaaagaguguaccuaaa

SEQ ID NO: 6224 - RNA, 20 nt, Artificial Sequence
  spacer sequence CTCN PAM
uuucugugagacgcagaggu

SEQ ID NO: 6225 - RNA, 20 nt, Artificial Sequence
  spacer sequence CTCN PAM
uccuaggaauuggcuuuuua

SEQ ID NO: 6226 - RNA, 20 nt, Artificial Sequence
  spacer sequence CTCN PAM
uaggaauuggcuuuuuacca

SEQ ID NO: 6227 - RNA, 20 nt, Artificial Sequence
  spacer sequence CTCN PAM
uaagacuagcucuuuaagcu

SEQ ID NO: 6228 - RNA, 20 nt, Artificial Sequence
  spacer sequence CTCN PAM
uuaagcuguuacagccacuu

SEQ ID NO: 6229 - RNA, 20 nt, Artificial Sequence
  spacer sequence CTCN PAM
gguugcauauaaaaguggcu

SEQ ID NO: 6230 - RNA, 20 nt, Artificial Sequence
  spacer sequence CTCN PAM
uaugguguguuaaaagauuu

SEQ ID NO: 6231 - RNA, 20 nt, Artificial Sequence
  spacer sequence CTCN PAM
uuugcugaccucuuccucau

SEQ ID NO: 6232 - RNA, 20 nt, Artificial Sequence
  spacer sequence CTCN PAM
uccucaucucaguguuuuug

SEQ ID NO: 6233 - RNA, 20 nt, Artificial Sequence
  spacer sequence CTCN PAM
ucucaguguuuuuggucuca

SEQ ID NO: 6234 - RNA, 20 nt, Artificial Sequence
  spacer sequence CTCN PAM
guguuuuuggucucacuucu

SEQ ID NO: 6235 - RNA, 20 nt, Artificial Sequence
  spacer sequence CTCN PAM
uucuuccuaucguuucccug

SEQ ID NO: 6236 - RNA, 20 nt, Artificial Sequence
  spacer sequence CTCN PAM
ucucccaggugaaaguccuc

SEQ ID NO: 6237 - RNA, 20 nt, Artificial Sequence
  spacer sequence CTCN PAM
caggugaaaguccucgucag

SEQ ID NO: 6238 - RNA, 20 nt, Artificial Sequence
  spacer sequence CTCN PAM
ucagcaccugaaucauggag

SEQ ID NO: 6239 - RNA, 20 nt, Artificial Sequence
  spacer sequence CTCN PAM
ugccaagaaaaguaugggua

SEQ ID NO: 6240 - RNA, 20 nt, Artificial Sequence
  spacer sequence CTCN PAM
gcucaugccaagaaaaguau

SEQ ID NO: 6241 - RNA, 20 nt, Artificial Sequence
  spacer sequence CTCN PAM
cagguuuuugcaagucugcc

SEQ ID NO: 6242 - RNA, 20 nt, Artificial Sequence
  spacer sequence CTCN PAM
gguuuuugcaagucugccug

SEQ ID NO: 6243 - RNA, 20 nt, Artificial Sequence
  spacer sequence CTCN PAM
gggugggcugagauuucugu

SEQ ID NO: 6244 - RNA, 20 nt, Artificial Sequence
  spacer sequence CTCN PAM
uccuugacucugggugggcu

SEQ ID NO: 6245 - RNA, 20 nt, Artificial Sequence
  spacer sequence CTCN PAM
uuucugcaauaacccucuuc

SEQ ID NO: 6246 - RNA, 20 nt, Artificial Sequence
  spacer sequence CTCN PAM
ccaaguauccuuccaacuua

SEQ ID NO: 6247 - RNA, 20 nt, Artificial Sequence
  spacer sequence CTCN PAM
aagugcugugcuugggccac

SEQ ID NO: 6248 - RNA, 20 nt, Artificial Sequence
  spacer sequence CTCN PAM
gagggucaacgcaguugccc

SEQ ID NO: 6249 - RNA, 20 nt, Artificial Sequence
  spacer sequence CTCN PAM
gaggauauugaacuacagca

SEQ ID NO: 6250 - RNA, 20 nt, Artificial Sequence
  spacer sequence CTCN PAM
caacaaaucagaaaaacagg

SEQ ID NO: 6251 - RNA, 20 nt, Artificial Sequence
  spacer sequence CTCN PAM
uuugauccucacaacaaauc

SEQ ID NO: 6252 - RNA, 20 nt, Artificial Sequence
  spacer sequence CTCN PAM
guucuguguaauucuuguuu

SEQ ID NO: 6253 - RNA, 20 nt, Artificial Sequence
  spacer sequence CTCN PAM
aaacuaccauccuagcucau

SEQ ID NO: 6254 - RNA, 20 nt, Artificial Sequence
  spacer sequence CTCN PAM
uauuuucuaggaagccuaua

SEQ ID NO: 6255 - RNA, 20 nt, Artificial Sequence
  spacer sequence CTCN PAM
uaaagccuucauuguuucug

SEQ ID NO: 6256 - RNA, 20 nt, Artificial Sequence
  spacer sequence CTCN PAM
cgcccagccaucuaaacaca

SEQ ID NO: 6257 - RNA, 20 nt, Artificial Sequence
  spacer sequence CTCN PAM
ucaccagcccucacaagcgc

SEQ ID NO: 6258 - RNA, 20 nt, Artificial Sequence
  spacer sequence CTCN PAM
ccagcccucacaagcgcauu

SEQ ID NO: 6259 - RNA, 20 nt, Artificial Sequence
  spacer sequence CTCN PAM
caagcgcauuccacgcagga

SEQ ID NO: 6260 - RNA, 20 nt, Artificial Sequence
  spacer sequence CTCN PAM
uucuaaacaugcaacuacag

SEQ ID NO: 6261 - RNA, 20 nt, Artificial Sequence
  spacer sequence CTCN PAM
gguuuuucuauaaacagauu

SEQ ID NO: 6262 - RNA, 20 nt, Artificial Sequence
  spacer sequence CTCN PAM
cuucaggggccacggagggg

SEQ ID NO: 6263 - RNA, 20 nt, Artificial Sequence
  spacer sequence CTCN PAM
guggccccugaagggagcuc

SEQ ID NO: 6264 - RNA, 20 nt, Artificial Sequence
  spacer sequence CTCN PAM
accccuccguggccccugaa

SEQ ID NO: 6265 - RNA, 20 nt, Artificial Sequence
  spacer sequence CTCN PAM
gccaaccuuccuccaccccu

SEQ ID NO: 6266 - RNA, 20 nt, Artificial Sequence
  spacer sequence CTCN PAM
ucaaauagagcagcugcacu

SEQ ID NO: 6267 - RNA, 20 nt, Artificial Sequence
  spacer sequence CTCN PAM
auuugaagaggaaguugggg

SEQ ID NO: 6268 - RNA, 20 nt, Artificial Sequence
  spacer sequence CTCN PAM
uuuugcugauuuuuuuuuuu

SEQ ID NO: 6269 - RNA, 20 nt, Artificial Sequence
  spacer sequence CTCN PAM
gucucagccaaggcgccuac

SEQ ID NO: 6270 - RNA, 20 nt, Artificial Sequence
  spacer sequence CTCN PAM
gccaaggcgccuacuucggg

SEQ ID NO: 6271 - RNA, 20 nt, Artificial Sequence
  spacer sequence CTCN PAM
cagggguugcccgaaguagg

SEQ ID NO: 6272 - RNA, 20 nt, Artificial Sequence
  spacer sequence CTCN PAM
ugcccugucccccaccuaga

SEQ ID NO: 6273 - RNA, 20 nt, Artificial Sequence
  spacer sequence CTCN PAM
aaagaaacauauuaaugccu

SEQ ID NO: 6274 - RNA, 20 nt, Artificial Sequence
  spacer sequence CTCN PAM
gaaguggcaccaggaagcaa

SEQ ID NO: 6275 - RNA, 20 nt, Artificial Sequence
  spacer sequence CTCN PAM
gacuugcuuccuggugccac

SEQ ID NO: 6276 - RNA, 20 nt, Artificial Sequence
  spacer sequence CTCN PAM
cagaagguguaagcggaaac

SEQ ID NO: 6277 - RNA, 20 nt, Artificial Sequence
  spacer sequence CTCN PAM
uucuggacaauguccaaacc

SEQ ID NO: 6278 - RNA, 20 nt, Artificial Sequence
  spacer sequence CTCN PAM
ugucuaugcacacacacaca

SEQ ID NO: 6279 - RNA, 20 nt, Artificial Sequence
  spacer sequence CTCN PAM
ccugucuaugcacacacaca

SEQ ID NO: 6280 - RNA, 20 nt, Artificial Sequence
  spacer sequence CTCN PAM
uucucuccugucuaugcaca

SEQ ID NO: 6281 - RNA, 20 nt, Artificial Sequence
  spacer sequence CTCN PAM
ccuucucuccugucuaugca

SEQ ID NO: 6282 - RNA, 20 nt, Artificial Sequence
  spacer sequence CTCN PAM
accucuccuucucuccuguc

SEQ ID NO: 6283 - RNA, 20 nt, Artificial Sequence
  spacer sequence CTCN PAM
aucucuaccucuccuucucu

SEQ ID NO: 6284 - RNA, 20 nt, Artificial Sequence
  spacer sequence CTCN PAM
gaauaaauacuggaggggua

SEQ ID NO: 6285 - RNA, 20 nt, Artificial Sequence
  spacer sequence CTCN PAM
aguauuuauucagagaaauu

SEQ ID NO: 6286 - RNA, 20 nt, Artificial Sequence
  spacer sequence CTCN PAM
uaccccuccaguauuuauuc

SEQ ID NO: 6287 - RNA, 20 nt, Artificial Sequence
  spacer sequence CTCN PAM
ucuccuaccccuccaguauu

SEQ ID NO: 6288 - RNA, 20 nt, Artificial Sequence
  spacer sequence CTCN PAM
uuaauugcuugacauauuuc

SEQ ID NO: 6289 - RNA, 20 nt, Artificial Sequence
  spacer sequence CTCN PAM
ucuauaagaauucacuuuca

SEQ ID NO: 6290 - RNA, 20 nt, Artificial Sequence
  spacer sequence CTCN PAM
auaagaauucacuuucauag

SEQ ID NO: 6291 - RNA, 20 nt, Artificial Sequence
  spacer sequence CTCN PAM
uucacccaaauguguaugca

SEQ ID NO: 6292 - RNA, 20 nt, Artificial Sequence
  spacer sequence CTCN PAM
acagcaacaucuuuugugcu

SEQ ID NO: 6293 - RNA, 20 nt, Artificial Sequence
  spacer sequence CTCN PAM
aggaagauguuuauuugaag

SEQ ID NO: 6294 - RNA, 20 nt, Artificial Sequence
  spacer sequence CTCN PAM
auuggguuaaugaauguggc

SEQ ID NO: 6295 - RNA, 20 nt, Artificial Sequence
  spacer sequence CTCN PAM
cuaacggggcuguucaagac

SEQ ID NO: 6296 - RNA, 20 nt, Artificial Sequence
  spacer sequence CTCN PAM
cguggaacacugaaguuaca

SEQ ID NO: 6297 - RNA, 20 nt, Artificial Sequence
  spacer sequence CTCN PAM
guuuacucacguggaacacu

SEQ ID NO: 6298 - RNA, 20 nt, Artificial Sequence
  spacer sequence CTCN PAM
accaccgugccucaguuuac

SEQ ID NO: 6299 - RNA, 20 nt, Artificial Sequence
  spacer sequence CTCN PAM
ccaccaccgugccucaguuu

SEQ ID NO: 6300 - RNA, 20 nt, Artificial Sequence
  spacer sequence CTCN PAM
gaaugagguauaggaucugg

SEQ ID NO: 6301 - RNA, 20 nt, Artificial Sequence
  spacer sequence CTCN PAM
uucugagaaaaguuacucuc

SEQ ID NO: 6302 - RNA, 20 nt, Artificial Sequence
  spacer sequence CTCN PAM
uuucauuuggggcaaagaca

SEQ ID NO: 6303 - RNA, 20 nt, Artificial Sequence
  spacer sequence CTCN PAM
uugguuuuggaacuuaucug

SEQ ID NO: 6304 - RNA, 20 nt, Artificial Sequence
  spacer sequence CTCN PAM
aaacacugacaccaauuuuc

SEQ ID NO: 6305 - RNA, 20 nt, Artificial Sequence
  spacer sequence CTCN PAM
aacacugggauaggaagguu

SEQ ID NO: 6306 - RNA, 20 nt, Artificial Sequence
  spacer sequence CTCN PAM
uuccaauaagcgaguagccg

SEQ ID NO: 6307 - RNA, 20 nt, Artificial Sequence
  spacer sequence CTCN PAM
cuuauuggaaugagucaaag

SEQ ID NO: 6308 - RNA, 20 nt, Artificial Sequence
  spacer sequence CTCN PAM
cuuccccaccucucauccca

SEQ ID NO: 6309 - RNA, 20 nt, Artificial Sequence
  spacer sequence CTCN PAM
uucuuucuggaagagaugcu

SEQ ID NO: 6310 - RNA, 20 nt, Artificial Sequence
  spacer sequence CTCN PAM
ucauucuuucuggaagagau

SEQ ID NO: 6311 - RNA, 20 nt, Artificial Sequence
  spacer sequence CTCN PAM
uaucuguucacuuaacaagu

SEQ ID NO: 6312 - RNA, 20 nt, Artificial Sequence
  spacer sequence CTCN PAM
uggaucugaauggcaaggcu

SEQ ID NO: 6313 - RNA, 20 nt, Artificial Sequence
  spacer sequence CTCN PAM
gaaccacaauuacaaucgcc

SEQ ID NO: 6314 - RNA, 20 nt, Artificial Sequence
  spacer sequence CTCN PAM
ucuuuggcccagguuguuga

SEQ ID NO: 6315 - RNA, 20 nt, Artificial Sequence
  spacer sequence CTCN PAM
uuggcccagguuguugaguu

SEQ ID NO: 6316 - RNA, 20 nt, Artificial Sequence
  spacer sequence CTCN PAM
acaaccugggccaaagagga

SEQ ID NO: 6317 - RNA, 20 nt, Artificial Sequence
  spacer sequence CTCN PAM
auuauuguuuauaaagaaaa

SEQ ID NO: 6318 - RNA, 20 nt, Artificial Sequence
  spacer sequence CTCN PAM
uuguugcaucaggcacaaac

SEQ ID NO: 6319 - RNA, 20 nt, Artificial Sequence
  spacer sequence CTCN PAM
caaggugcaugcucucagcc

SEQ ID NO: 6320 - RNA, 20 nt, Artificial Sequence
  spacer sequence CTCN PAM
uauucuagaauggauggaca

SEQ ID NO: 6321 - RNA, 20 nt, Artificial Sequence
  spacer sequence CTCN PAM
cauauucuagaauggaugga

SEQ ID NO: 6322 - RNA, 20 nt, Artificial Sequence
  spacer sequence CTCN PAM
auuuauagaugagaaaacug

SEQ ID NO: 6323 - RNA, 20 nt, Artificial Sequence
  spacer sequence CTCN PAM
augacuuaacugagucacaa

SEQ ID NO: 6324 - RNA, 20 nt, Artificial Sequence
  spacer sequence CTCN PAM
guuaagucauggagguccag

SEQ ID NO: 6325 - RNA, 20 nt, Artificial Sequence
  spacer sequence CTCN PAM
gacugaagacagacgucugc

SEQ ID NO: 6326 - RNA, 20 nt, Artificial Sequence
  spacer sequence CTCN PAM
ugaucagaaggcaagcagac

SEQ ID NO: 6327 - RNA, 20 nt, Artificial Sequence
  spacer sequence CTCN PAM
uucuaggagcaaugacagga

SEQ ID NO: 6328 - RNA, 20 nt, Artificial Sequence
  spacer sequence CTCN PAM
uagaaggaggcccagacagg

SEQ ID NO: 6329 - RNA, 20 nt, Artificial Sequence
  spacer sequence CTCN PAM
ugucauugcuccuagaagga

SEQ ID NO: 6330 - RNA, 20 nt, Artificial Sequence
  spacer sequence CTCN PAM
uuuaguucuucuaacagccc

SEQ ID NO: 6331 - RNA, 20 nt, Artificial Sequence
  spacer sequence CTCN PAM
acuauguccuuucaacuguu

SEQ ID NO: 6332 - RNA, 20 nt, Artificial Sequence
  spacer sequence CTCN PAM
uugaacuugaccuucaaccg

SEQ ID NO: 6333 - RNA, 20 nt, Artificial Sequence
  spacer sequence CTCN PAM
ugcauuugguaauaauauau

SEQ ID NO: 6334 - RNA, 20 nt, Artificial Sequence
  spacer sequence CTCN PAM
gagagacccuaagaugccag

SEQ ID NO: 6335 - RNA, 20 nt, Artificial Sequence
  spacer sequence CTCN PAM
gaguuuuaaccagugggcca

SEQ ID NO: 6336 - RNA, 20 nt, Artificial Sequence
  spacer sequence CTCN PAM
cagaguuuuaaccagugggc

SEQ ID NO: 6337 - RNA, 20 nt, Artificial Sequence
  spacer sequence CTCN PAM
aaaaaaaaaaaaagaaaaag

SEQ ID NO: 6338 - RNA, 20 nt, Artificial Sequence
  spacer sequence CTCN PAM
gacacugauaagcagguccc

SEQ ID NO: 6339 - RNA, 20 nt, Artificial Sequence
  spacer sequence CTCN PAM
gcuccuaacugcggacucca

SEQ ID NO: 6340 - RNA, 20 nt, Artificial Sequence
  spacer sequence CTCN PAM
uaacugcggacuccagagag

SEQ ID NO: 6341 - RNA, 20 nt, Artificial Sequence
  spacer sequence CTCN PAM
agagagcuuaguaagaacuu

SEQ ID NO: 6342 - RNA, 20 nt, Artificial Sequence
  spacer sequence CTCN PAM
ggaguccgcaguuaggagca

SEQ ID NO: 6343 - RNA, 20 nt, Artificial Sequence
  spacer sequence CTCN PAM
cuggaguccgcaguuaggag

SEQ ID NO: 6344 - RNA, 20 nt, Artificial Sequence
  spacer sequence CTCN PAM
ccauguugcccaggcugguc

SEQ ID NO: 6345 - RNA, 20 nt, Artificial Sequence
  spacer sequence CTCN PAM
aacuccugaccucaagagau

SEQ ID NO: 6346 - RNA, 20 nt, Artificial Sequence
  spacer sequence CTCN PAM
ugaccucaagagauccucca

SEQ ID NO: 6347 - RNA, 20 nt, Artificial Sequence
  spacer sequence CTCN PAM
agagauccuccagccucagc

SEQ ID NO: 6348 - RNA, 20 nt, Artificial Sequence
  spacer sequence CTCN PAM
ugaggucaggaguuugagac

SEQ ID NO: 6349 - RNA, 20 nt, Artificial Sequence
  spacer sequence CTCN PAM
agccucagccccucaaagug

SEQ ID NO: 6350 - RNA, 20 nt, Artificial Sequence
  spacer sequence CTCN PAM
gccccucaaagugcugggau

SEQ ID NO: 6351 - RNA, 20 nt, Artificial Sequence
  spacer sequence CTCN PAM
aagugcugggauuauaggca

SEQ ID NO: 6352 - RNA, 20 nt, Artificial Sequence
  spacer sequence CTCN PAM
uaaagagacuccucccucuc

SEQ ID NO: 6353 - RNA, 20 nt, Artificial Sequence
  spacer sequence CTCN PAM
uuaugagccaaaagaauaaa

SEQ ID NO: 6354 - RNA, 20 nt, Artificial Sequence
  spacer sequence CTCN PAM
ucccucucauuaaaauacaa

SEQ ID NO: 6355 - RNA, 20 nt, Artificial Sequence
  spacer sequence CTCN PAM
cucucauuaaaauacaaauc

SEQ ID NO: 6356 - RNA, 20 nt, Artificial Sequence
  spacer sequence CTCN PAM
cauuaaaauacaaaucuugg

SEQ ID NO: 6357 - RNA, 20 nt, Artificial Sequence
  spacer sequence CTCN PAM
uuaaaauacaaaucuuggaa

SEQ ID NO: 6358 - RNA, 20 nt, Artificial Sequence
  spacer sequence CTCN PAM
aguaacgaauuagcagaaaa

SEQ ID NO: 6359 - RNA, 20 nt, Artificial Sequence
  spacer sequence CTCN PAM
uuuccauuuucugcuaauuc

SEQ ID NO: 6360 - RNA, 20 nt, Artificial Sequence
  spacer sequence CTCN PAM
guagagacuuggcaauaccc

SEQ ID NO: 6361 - RNA, 20 nt, Artificial Sequence
  spacer sequence CTCN PAM
aucuguggggcugucuuucu

SEQ ID NO: 6362 - RNA, 20 nt, Artificial Sequence
  spacer sequence CTCN PAM
agccuagacucuuuaaucca

SEQ ID NO: 6363 - RNA, 20 nt, Artificial Sequence
  spacer sequence CTCN PAM
uaacaauagcaguacaucaa

SEQ ID NO: 6364 - RNA, 20 nt, Artificial Sequence
  spacer sequence CTCN PAM
caaauuaguagccagcugau

SEQ ID NO: 6365 - RNA, 20 nt, Artificial Sequence
  spacer sequence CTCN PAM
gguuugauaauucacuagaa

SEQ ID NO: 6366 - RNA, 20 nt, Artificial Sequence
  spacer sequence CTCN PAM
gaaucauucuagugaauuau

SEQ ID NO: 6367 - RNA, 20 nt, Artificial Sequence
  spacer sequence CTCN PAM
ggaaggcgcuaugcuuguga

SEQ ID NO: 6368 - RNA, 20 nt, Artificial Sequence
  spacer sequence CTCN PAM
uuugaaguuuauuuccacuc

SEQ ID NO: 6369 - RNA, 20 nt, Artificial Sequence
  spacer sequence CTCN PAM
uauguuaugugcuugaaccc

SEQ ID NO: 6370 - RNA, 20 nt, Artificial Sequence
  spacer sequence CTCN PAM
guacagucucauauguuaug

SEQ ID NO: 6371 - RNA, 20 nt, Artificial Sequence
  spacer sequence CTCN PAM
caguacagucucauauguua

SEQ ID NO: 6372 - RNA, 20 nt, Artificial Sequence
  spacer sequence CTCN PAM
caucaagagcucuggggauc

SEQ ID NO: 6373 - RNA, 20 nt, Artificial Sequence
  spacer sequence CTCN PAM
ugaugugagcccgcaggcuu

SEQ ID NO: 6374 - RNA, 20 nt, Artificial Sequence
  spacer sequence CTCN PAM
ggggauccaauccacuccag

SEQ ID NO: 6375 - RNA, 20 nt, Artificial Sequence
  spacer sequence CTCN PAM
agagcaucuggggaaaagcc

SEQ ID NO: 6376 - RNA, 20 nt, Artificial Sequence
  spacer sequence CTCN PAM
ggaguggauuggauccccag

SEQ ID NO: 6377 - RNA, 20 nt, Artificial Sequence
  spacer sequence CTCN PAM
auuuccaaaccucuggauug

SEQ ID NO: 6378 - RNA, 20 nt, Artificial Sequence
  spacer sequence CTCN PAM
ggauugagacaucucuuaga

SEQ ID NO: 6379 - RNA, 20 nt, Artificial Sequence
  spacer sequence CTCN PAM
auccagagguuuggaaauug

SEQ ID NO: 6380 - RNA, 20 nt, Artificial Sequence
  spacer sequence CTCN PAM
uagaacugggggaagccaag

SEQ ID NO: 6381 - RNA, 20 nt, Artificial Sequence
  spacer sequence CTCN PAM
ugauuagaagcuuggcuucc

SEQ ID NO: 6382 - RNA, 20 nt, Artificial Sequence
  spacer sequence CTCN PAM
acguucugaccacuccugau

SEQ ID NO: 6383 - RNA, 20 nt, Artificial Sequence
  spacer sequence CTCN PAM
gcccgcuucccggucccagc

SEQ ID NO: 6384 - RNA, 20 nt, Artificial Sequence
  spacer sequence CTCN PAM
uccgcccgcuucccgguccc

SEQ ID NO: 6385 - RNA, 20 nt, Artificial Sequence
  spacer sequence CTCN PAM
ccuccgcccgcuucccgguc

SEQ ID NO: 6386 - RNA, 20 nt, Artificial Sequence
  spacer sequence CTCN PAM
gcuggcacacacagcaugcc

SEQ ID NO: 6387 - RNA, 20 nt, Artificial Sequence
  spacer sequence CTCN PAM
ugugcuccgaccuaaacaau

SEQ ID NO: 6388 - RNA, 20 nt, Artificial Sequence
  spacer sequence CTCN PAM
gaccuaaacaaugagcguaa

SEQ ID NO: 6389 - RNA, 20 nt, Artificial Sequence
  spacer sequence CTCN PAM
uuguuuaggucggagcacag

SEQ ID NO: 6390 - RNA, 20 nt, Artificial Sequence
  spacer sequence CTCN PAM
acaggguccugcaggagguc

SEQ ID NO: 6391 - RNA, 20 nt, Artificial Sequence
  spacer sequence CTCN PAM
ugcaggacccuguggagggc

SEQ ID NO: 6392 - RNA, 20 nt, Artificial Sequence
  spacer sequence CTCN PAM
gaaacaagaccuccugcagg

SEQ ID NO: 6393 - RNA, 20 nt, Artificial Sequence
  spacer sequence CTCN PAM
guuuaaccagagcagaccca

SEQ ID NO: 6394 - RNA, 20 nt, Artificial Sequence
  spacer sequence CTCN PAM
gguuaaacagaggccccccu

SEQ ID NO: 6395 - RNA, 20 nt, Artificial Sequence
  spacer sequence CTCN PAM
gcggggcaaaguugacauac

SEQ ID NO: 6396 - RNA, 20 nt, Artificial Sequence
  spacer sequence CTCN PAM
guuguucuagaauuucaaac

SEQ ID NO: 6397 - RNA, 20 nt, Artificial Sequence
  spacer sequence CTCN PAM
ggacaaucugcuucuucuua

SEQ ID NO: 6398 - RNA, 20 nt, Artificial Sequence
  spacer sequence CTCN PAM
cuuuuguucuucaauaaauc

SEQ ID NO: 6399 - RNA, 20 nt, Artificial Sequence
  spacer sequence CTCN PAM
ucuuuuucuuucccucacuu

SEQ ID NO: 6400 - RNA, 20 nt, Artificial Sequence
  spacer sequence CTCN PAM
gauaauucucuucuuuuucu

SEQ ID NO: 6401 - RNA, 20 nt, Artificial Sequence
  spacer sequence CTCN PAM
cacauacuucccuuuccucc

SEQ ID NO: 6402 - RNA, 20 nt, Artificial Sequence
  spacer sequence CTCN PAM
ugucuggccuaaggagaaca

SEQ ID NO: 6403 - RNA, 20 nt, Artificial Sequence
  spacer sequence CTCN PAM
uuaggccagacaggaggaaa

SEQ ID NO: 6404 - RNA, 20 nt, Artificial Sequence
  spacer sequence CTCN PAM
cuccccaacggaaaggccuc

SEQ ID NO: 6405 - RNA, 20 nt, Artificial Sequence
  spacer sequence CTCN PAM
ccaacggaaaggccucaaaa

SEQ ID NO: 6406 - RNA, 20 nt, Artificial Sequence
  spacer sequence CTCN PAM
aaacacugacauuuugcuuu

SEQ ID NO: 6407 - RNA, 20 nt, Artificial Sequence
  spacer sequence CTCN PAM
gaaaaagcaaaaugucagug

SEQ ID NO: 6408 - RNA, 20 nt, Artificial Sequence
  spacer sequence CTCN PAM
cuggaagaaagcaggcggcg

SEQ ID NO: 6409 - RNA, 20 nt, Artificial Sequence
  spacer sequence CTCN PAM
cccugacccugccgccgccu

SEQ ID NO: 6410 - RNA, 20 nt, Artificial Sequence
  spacer sequence CTCN PAM
cccccugacccugccgccgc

SEQ ID NO: 6411 - RNA, 20 nt, Artificial Sequence
  spacer sequence CTCN PAM
cucccccugacccugccgcc

SEQ ID NO: 6412 - RNA, 20 nt, Artificial Sequence
  spacer sequence CTCN PAM
ccucuucccuucugacucac

SEQ ID NO: 6413 - RNA, 20 nt, Artificial Sequence
  spacer sequence CTCN PAM
aaagccaaauuccagccuug

SEQ ID NO: 6414 - RNA, 20 nt, Artificial Sequence
  spacer sequence CTCN PAM
caaaguaaaagaauaguaac

SEQ ID NO: 6415 - RNA, 20 nt, Artificial Sequence
  spacer sequence CTCN PAM
gaguaagagccagaacucuu

SEQ ID NO: 6416 - RNA, 20 nt, Artificial Sequence
  spacer sequence CTCN PAM
gagccuuccuaccagucacc

SEQ ID NO: 6417 - RNA, 20 nt, Artificial Sequence
  spacer sequence CTCN PAM
uacucagagccuuccuacca

SEQ ID NO: 6418 - RNA, 20 nt, Artificial Sequence
  spacer sequence CTCN PAM
uuggccucagguuuuuccca

SEQ ID NO: 6419 - RNA, 20 nt, Artificial Sequence
  spacer sequence CTCN PAM
gguuuuucccauguaaauuc

SEQ ID NO: 6420 - RNA, 20 nt, Artificial Sequence
  spacer sequence CTCN PAM
gcugcgcauuggaaaugcca

SEQ ID NO: 6421 - RNA, 20 nt, Artificial Sequence
  spacer sequence CTCN PAM
agcccugaucuauugggaau

SEQ ID NO: 6422 - RNA, 20 nt, Artificial Sequence
  spacer sequence CTCN PAM
gaguauuugcuuguaguugc

SEQ ID NO: 6423 - RNA, 20 nt, Artificial Sequence
  spacer sequence CTCN PAM
gagaucccucuagcccugau

SEQ ID NO: 6424 - RNA, 20 nt, Artificial Sequence
  spacer sequence CTCN PAM
guucugcccaagaagcaauu

SEQ ID NO: 6425 - RNA, 20 nt, Artificial Sequence
  spacer sequence CTCN PAM
gcuuccuaccaggugacccc

SEQ ID NO: 6426 - RNA, 20 nt, Artificial Sequence
  spacer sequence CTCN PAM
cugcuuccuaccaggugacc

SEQ ID NO: 6427 - RNA, 20 nt, Artificial Sequence
  spacer sequence CTCN PAM
cucugcuuccuaccagguga

SEQ ID NO: 6428 - RNA, 20 nt, Artificial Sequence
  spacer sequence CTCN PAM
augguaaaugauucucucuc

SEQ ID NO: 6429 - RNA, 20 nt, Artificial Sequence
  spacer sequence CTCN PAM
gauauacuuacuggcagggg

SEQ ID NO: 6430 - RNA, 20 nt, Artificial Sequence
  spacer sequence CTCN PAM
ccugccaguaaguauaucug

SEQ ID NO: 6431 - RNA, 20 nt, Artificial Sequence
  spacer sequence CTCN PAM
uucuugauaggaaaggauga

SEQ ID NO: 6432 - RNA, 20 nt, Artificial Sequence
  spacer sequence CTCN PAM
ccuucuugauaggaaaggau

SEQ ID NO: 6433 - RNA, 20 nt, Artificial Sequence
  spacer sequence CTCN PAM
ggcagggaaguccucuccuu

SEQ ID NO: 6434 - RNA, 20 nt, Artificial Sequence
  spacer sequence CTCN PAM
gagagauacauacuccaggg

SEQ ID NO: 6435 - RNA, 20 nt, Artificial Sequence
  spacer sequence CTCN PAM
gaguacuaggcaacgagcag

SEQ ID NO: 6436 - RNA, 20 nt, Artificial Sequence
  spacer sequence CTCN PAM
cugaguacuaggcaacgagc

SEQ ID NO: 6437 - RNA, 20 nt, Artificial Sequence
  spacer sequence CTCN PAM
agggccagguggugccacgc

SEQ ID NO: 6438 - RNA, 20 nt, Artificial Sequence
  spacer sequence CTCN PAM
ggcagaaggauggguaacua

SEQ ID NO: 6439 - RNA, 20 nt, Artificial Sequence
  spacer sequence CTCN PAM
ugaacugaacuggacaguuu

SEQ ID NO: 6440 - RNA, 20 nt, Artificial Sequence
  spacer sequence CTCN PAM
cucugauuggcccaaggauu

SEQ ID NO: 6441 - RNA, 20 nt, Artificial Sequence
  spacer sequence CTCN PAM
gauuggcccaaggauuggca

SEQ ID NO: 6442 - RNA, 20 nt, Artificial Sequence
  spacer sequence CTCN PAM
ggggcacucugugaacagag

SEQ ID NO: 6443 - RNA, 20 nt, Artificial Sequence
  spacer sequence CTCN PAM
gugaacagagcugaugagaa

SEQ ID NO: 6444 - RNA, 20 nt, Artificial Sequence
  spacer sequence CTCN PAM
guucacagagugccccugag

SEQ ID NO: 6445 - RNA, 20 nt, Artificial Sequence
  spacer sequence CTCN PAM
ucagcucuguucacagagug

SEQ ID NO: 6446 - RNA, 20 nt, Artificial Sequence
  spacer sequence CTCN PAM
cucuaugagccccuccaacu

SEQ ID NO: 6447 - RNA, 20 nt, Artificial Sequence
  spacer sequence CTCN PAM
cuaugagccccuccaacuaa

SEQ ID NO: 6448 - RNA, 20 nt, Artificial Sequence
  spacer sequence CTCN PAM
augagccccuccaacuaaaa

SEQ ID NO: 6449 - RNA, 20 nt, Artificial Sequence
  spacer sequence CTCN PAM
uagagagagucuguucucau

SEQ ID NO: 6450 - RNA, 20 nt, Artificial Sequence
  spacer sequence CTCN PAM
aacuaaaagcugccccuacc

SEQ ID NO: 6451 - RNA, 20 nt, Artificial Sequence
  spacer sequence CTCN PAM
cuuuacucaucuuuacaaug

SEQ ID NO: 6452 - RNA, 20 nt, Artificial Sequence
  spacer sequence CTCN PAM
uuacucaucuuuacaauggg

SEQ ID NO: 6453 - RNA, 20 nt, Artificial Sequence
  spacer sequence CTCN PAM
ucuuuacaauggggauagug

SEQ ID NO: 6454 - RNA, 20 nt, Artificial Sequence
  spacer sequence CTCN PAM
ucagacuguuuuaagaauua

SEQ ID NO: 6455 - RNA, 20 nt, Artificial Sequence
  spacer sequence CTCN PAM
gacuguuuuaagaauuaagu

SEQ ID NO: 6456 - RNA, 20 nt, Artificial Sequence
  spacer sequence CTCN PAM
gaaaauuguacucugugaaa

SEQ ID NO: 6457 - RNA, 20 nt, Artificial Sequence
  spacer sequence CTCN PAM
gugaaauaagucaggaucug

SEQ ID NO: 6458 - RNA, 20 nt, Artificial Sequence
  spacer sequence CTCN PAM
cugggaaauagcuagcagcu

SEQ ID NO: 6459 - RNA, 20 nt, Artificial Sequence
  spacer sequence CTCN PAM
uaguggcaaauuccagacuu

SEQ ID NO: 6460 - RNA, 20 nt, Artificial Sequence
  spacer sequence CTCN PAM
uuuauguuuugauuuaugaa

SEQ ID NO: 6461 - RNA, 20 nt, Artificial Sequence
  spacer sequence CTCN PAM
aggcacaugaacaaaaauga

SEQ ID NO: 6462 - RNA, 20 nt, Artificial Sequence
  spacer sequence CTCN PAM
ggggccaaaugccugacuug

SEQ ID NO: 6463 - RNA, 20 nt, Artificial Sequence
  spacer sequence CTCN PAM
agauuuaucuaccccucugg

SEQ ID NO: 6464 - RNA, 20 nt, Artificial Sequence
  spacer sequence CTCN PAM
gcacugggacccaaagguca

SEQ ID NO: 6465 - RNA, 20 nt, Artificial Sequence
  spacer sequence CTCN PAM
agaauccccuuucuuuuauu

SEQ ID NO: 6466 - RNA, 20 nt, Artificial Sequence
  spacer sequence CTCN PAM
gaucuucugagagccuagga

SEQ ID NO: 6467 - RNA, 20 nt, Artificial Sequence
  spacer sequence CTCN PAM
gaagaucugagguaggcugu

SEQ ID NO: 6468 - RNA, 20 nt, Artificial Sequence
  spacer sequence CTCN PAM
cagaagaucugagguaggcu

SEQ ID NO: 6469 - RNA, 20 nt, Artificial Sequence
  spacer sequence CTCN PAM
gcauuucuagcuuccaauac

SEQ ID NO: 6470 - RNA, 20 nt, Artificial Sequence
  spacer sequence CTCN PAM
uuuuugcucgaggcugggaa

SEQ ID NO: 6471 - RNA, 20 nt, Artificial Sequence
  spacer sequence CTCN PAM
aggcugggaacaugugagag

SEQ ID NO: 6472 - RNA, 20 nt, Artificial Sequence
  spacer sequence CTCN PAM
agcaaaaaugagguaucugu

SEQ ID NO: 6473 - RNA, 20 nt, Artificial Sequence
  spacer sequence CTCN PAM
guuuccuaccaucuauacag

SEQ ID NO: 6474 - RNA, 20 nt, Artificial Sequence
  spacer sequence CTCN PAM
agccucaguuuccuaccauc

SEQ ID NO: 6475 - RNA, 20 nt, Artificial Sequence
  spacer sequence CTCN PAM
cuagccucaguuuccuacca

SEQ ID NO: 6476 - RNA, 20 nt, Artificial Sequence
  spacer sequence CTCN PAM
gcccuuuaccacugugucac

SEQ ID NO: 6477 - RNA, 20 nt, Artificial Sequence
  spacer sequence CTCN PAM
ucauuuccaucuucagguca

SEQ ID NO: 6478 - RNA, 20 nt, Artificial Sequence
  spacer sequence CTCN PAM
guccaaggauuuaguuggcu

SEQ ID NO: 6479 - RNA, 20 nt, Artificial Sequence
  spacer sequence CTCN PAM
cuguccaaggauuuaguugg

SEQ ID NO: 6480 - RNA, 20 nt, Artificial Sequence
  spacer sequence CTCN PAM
gguccucucuguccaaggau

SEQ ID NO: 6481 - RNA, 20 nt, Artificial Sequence
  spacer sequence CTCN PAM
accuugagucaccuugcagu

SEQ ID NO: 6482 - RNA, 20 nt, Artificial Sequence
  spacer sequence CTCN PAM
gugcuuggcuggaagccuuu

SEQ ID NO: 6483 - RNA, 20 nt, Artificial Sequence
  spacer sequence CTCN PAM
aagcaagaucacaugaagau

SEQ ID NO: 6484 - RNA, 20 nt, Artificial Sequence
  spacer sequence CTCN PAM
aaaaaaaaaaaaaaaagaaa

SEQ ID NO: 6485 - RNA, 20 nt, Artificial Sequence
  spacer sequence CTCN PAM
uauugauccugggacuauga

SEQ ID NO: 6486 - RNA, 20 nt, Artificial Sequence
  spacer sequence CTCN PAM
aaaaaguccaaauuuaguau

SEQ ID NO: 6487 - RNA, 20 nt, Artificial Sequence
  spacer sequence CTCN PAM
ugcaaaggacaagcuuccuc

SEQ ID NO: 6488 - RNA, 20 nt, Artificial Sequence
  spacer sequence CTCN PAM
uccauugaaaggaaaggaag

SEQ ID NO: 6489 - RNA, 20 nt, Artificial Sequence
  spacer sequence CTCN PAM
auugaaaggaaaggaaggga

SEQ ID NO: 6490 - RNA, 20 nt, Artificial Sequence
  spacer sequence CTCN PAM
cuuccuuuccuuucaaugga

SEQ ID NO: 6491 - RNA, 20 nt, Artificial Sequence
  spacer sequence CTCN PAM
caggccagcagcugagauaa

SEQ ID NO: 6492 - RNA, 20 nt, Artificial Sequence
  spacer sequence CTCN PAM
cggaaggugagagagggaga

SEQ ID NO: 6493 - RNA, 20 nt, Artificial Sequence
  spacer sequence CTCN PAM
ccuuccgugaggcaggaagc

SEQ ID NO: 6494 - RNA, 20 nt, Artificial Sequence
  spacer sequence CTCN PAM
caccuuccgugaggcaggaa

SEQ ID NO: 6495 - RNA, 20 nt, Artificial Sequence
  spacer sequence CTCN PAM
cucaccuuccgugaggcagg

SEQ ID NO: 6496 - RNA, 20 nt, Artificial Sequence
  spacer sequence CTCN PAM
cucucucaccuuccgugagg

SEQ ID NO: 6497 - RNA, 20 nt, Artificial Sequence
  spacer sequence CTCN PAM
cccucucucaccuuccguga

SEQ ID NO: 6498 - RNA, 20 nt, Artificial Sequence
  spacer sequence CTCN PAM
cucucccucucucaccuucc

SEQ ID NO: 6499 - RNA, 20 nt, Artificial Sequence
  spacer sequence CTCN PAM
gcauucguggcaguuauuca

SEQ ID NO: 6500 - RNA, 20 nt, Artificial Sequence
  spacer sequence CTCN PAM
ccgcauucguggcaguuauu

SEQ ID NO: 6501 - RNA, 20 nt, Artificial Sequence
  spacer sequence CTCN PAM
uuugauaaauaccaugcagc

SEQ ID NO: 6502 - RNA, 20 nt, Artificial Sequence
  spacer sequence CTCN PAM
cccugguggagcauucuagg

SEQ ID NO: 6503 - RNA, 20 nt, Artificial Sequence
  spacer sequence CTCN PAM
accagggcgagaccaucauc

SEQ ID NO: 6504 - RNA, 20 nt, Artificial Sequence
  spacer sequence CTCN PAM
guaaacaucugacccuagaa

SEQ ID NO: 6505 - RNA, 20 nt, Artificial Sequence
  spacer sequence CTCN PAM
uuggugacaccugaaaauua

SEQ ID NO: 6506 - RNA, 20 nt, Artificial Sequence
  spacer sequence CTCN PAM
caagccacgcaaaagcaggu

SEQ ID NO: 6507 - RNA, 20 nt, Artificial Sequence
  spacer sequence CTCN PAM
uuuucaacaucaaauuugcu

SEQ ID NO: 6508 - RNA, 20 nt, Artificial Sequence
  spacer sequence CTCN PAM
gcaaauuugauguugaaaaa

SEQ ID NO: 6509 - RNA, 20 nt, Artificial Sequence
  spacer sequence CTCN PAM
ccuaaaucucagcaaauuug

SEQ ID NO: 6510 - RNA, 20 nt, Artificial Sequence
  spacer sequence CTCN PAM
caggucccacuguuuguccc

SEQ ID NO: 6511 - RNA, 20 nt, Artificial Sequence
  spacer sequence CTCN PAM
cugaucacucacagguccca

SEQ ID NO: 6512 - RNA, 20 nt, Artificial Sequence
  spacer sequence CTCN PAM
cccugaucacucacaggucc

SEQ ID NO: 6513 - RNA, 20 nt, Artificial Sequence
  spacer sequence CTCN PAM
cacugaccagcaagucaagc

SEQ ID NO: 6514 - RNA, 20 nt, Artificial Sequence
  spacer sequence CTCN PAM
guggguagcccuggccaucc

SEQ ID NO: 6515 - RNA, 20 nt, Artificial Sequence
  spacer sequence CTCN PAM
gcugguccugugugguggaa

SEQ ID NO: 6516 - RNA, 20 nt, Artificial Sequence
  spacer sequence CTCN PAM
cucuggguuaaaugugaaug

SEQ ID NO: 6517 - RNA, 20 nt, Artificial Sequence
  spacer sequence CTCN PAM
cuggguuaaaugugaauggc

SEQ ID NO: 6518 - RNA, 20 nt, Artificial Sequence
  spacer sequence CTCN PAM
ggguuaaaugugaauggcuc

SEQ ID NO: 6519 - RNA, 20 nt, Artificial Sequence
  spacer sequence CTCN PAM
gaaauacaugcuagaaguuc

SEQ ID NO: 6520 - RNA, 20 nt, Artificial Sequence
  spacer sequence CTCN PAM
ggguguggaaauuccauuuu

SEQ ID NO: 6521 - RNA, 20 nt, Artificial Sequence
  spacer sequence CTCN PAM
ccacaccccagugguucauc

SEQ ID NO: 6522 - RNA, 20 nt, Artificial Sequence
  spacer sequence CTCN PAM
aauacuuucuccccacaccc

SEQ ID NO: 6523 - RNA, 20 nt, Artificial Sequence
  spacer sequence CTCN PAM
guuucugggccaguugaacu

SEQ ID NO: 6524 - RNA, 20 nt, Artificial Sequence
  spacer sequence CTCN PAM
guuggauccucuguuuagug

SEQ ID NO: 6525 - RNA, 20 nt, Artificial Sequence
  spacer sequence CTCN PAM
guuuagugucucaaaagcca

SEQ ID NO: 6526 - RNA, 20 nt, Artificial Sequence
  spacer sequence CTCN PAM
aaagccaaaaucaggguauc

SEQ ID NO: 6527 - RNA, 20 nt, Artificial Sequence
  spacer sequence CTCN PAM
ucuagcuuguccagguugcu

SEQ ID NO: 6528 - RNA, 20 nt, Artificial Sequence
  spacer sequence CTCN PAM
agccacaagaaaccgaauuc

SEQ ID NO: 6529 - RNA, 20 nt, Artificial Sequence
  spacer sequence CTCN PAM
gauaucauauguaaccuuga

SEQ ID NO: 6530 - RNA, 20 nt, Artificial Sequence
  spacer sequence CTCN PAM
agacaucucagauaucauau

SEQ ID NO: 6531 - RNA, 20 nt, Artificial Sequence
  spacer sequence CTCN PAM
cgacaaggagcaguugacag

SEQ ID NO: 6532 - RNA, 20 nt, Artificial Sequence
  spacer sequence CTCN PAM
uugucgugagauucccaccu

SEQ ID NO: 6533 - RNA, 20 nt, Artificial Sequence
  spacer sequence CTCN PAM
cuugcugguuugcuuuuagc

SEQ ID NO: 6534 - RNA, 20 nt, Artificial Sequence
  spacer sequence CTCN PAM
uguuuuagcugaagaacguu

SEQ ID NO: 6535 - RNA, 20 nt, Artificial Sequence
  spacer sequence CTCN PAM
auuuucuuuucuuaacguuc

SEQ ID NO: 6536 - RNA, 20 nt, Artificial Sequence
  spacer sequence CTCN PAM
uucgagguacuguuuacuga

SEQ ID NO: 6537 - RNA, 20 nt, Artificial Sequence
  spacer sequence CTCN PAM
aaagagaacuccauuuucuu

SEQ ID NO: 6538 - RNA, 20 nt, Artificial Sequence
  spacer sequence CTCN PAM
guaaacaguaccucgaaaga

SEQ ID NO: 6539 - RNA, 20 nt, Artificial Sequence
  spacer sequence CTCN PAM
uuuugcaccucaguaaacag

SEQ ID NO: 6540 - RNA, 20 nt, Artificial Sequence
  spacer sequence CTCN PAM
cauuuugcaccucaguaaac

SEQ ID NO: 6541 - RNA, 20 nt, Artificial Sequence
  spacer sequence CTCN PAM
ugguuucuuguguuuggguc

SEQ ID NO: 6542 - RNA, 20 nt, Artificial Sequence
  spacer sequence CTCN PAM
ugcuggacccaaacacaaga

SEQ ID NO: 6543 - RNA, 20 nt, Artificial Sequence
  spacer sequence CTCN PAM
acuccugcuggacccaaaca

SEQ ID NO: 6544 - RNA, 20 nt, Artificial Sequence
  spacer sequence CTCN PAM
caacuccugcuggacccaaa

SEQ ID NO: 6545 - RNA, 20 nt, Artificial Sequence
  spacer sequence CTCN PAM
gaauggccaugcuggggggu

SEQ ID NO: 6546 - RNA, 20 nt, Artificial Sequence
  spacer sequence CTCN PAM
aauguguaaagucuugcaca

SEQ ID NO: 6547 - RNA, 20 nt, Artificial Sequence
  spacer sequence CTCN PAM
acaaaccuugcuggcuuccu

SEQ ID NO: 6548 - RNA, 20 nt, Artificial Sequence
  spacer sequence CTCN PAM
gcauuaauuaacuucaggaa

SEQ ID NO: 6549 - RNA, 20 nt, Artificial Sequence
  spacer sequence CTCN PAM
acucagcauuaauuaacuuc

SEQ ID NO: 6550 - RNA, 20 nt, Artificial Sequence
  spacer sequence CTCN PAM
gagcaaagacuccacauuuu

SEQ ID NO: 6551 - RNA, 20 nt, Artificial Sequence
  spacer sequence CTCN PAM
gagaaagccugaucaguuuu

SEQ ID NO: 6552 - RNA, 20 nt, Artificial Sequence
  spacer sequence CTCN PAM
acauuuuacccauaaagcca

SEQ ID NO: 6553 - RNA, 20 nt, Artificial Sequence
  spacer sequence CTCN PAM
cagcuaggccugaccugcau

SEQ ID NO: 6554 - RNA, 20 nt, Artificial Sequence
  spacer sequence CTCN PAM
guaccucccagcuaggccug

SEQ ID NO: 6555 - RNA, 20 nt, Artificial Sequence
  spacer sequence CTCN PAM
uucugguguuucccuucugg

SEQ ID NO: 6556 - RNA, 20 nt, Artificial Sequence
  spacer sequence CTCN PAM
ccgaugggcccuuggggcac

SEQ ID NO: 6557 - RNA, 20 nt, Artificial Sequence
  spacer sequence CTCN PAM
aagucagucuguuuuuguac

SEQ ID NO: 6558 - RNA, 20 nt, Artificial Sequence
  spacer sequence CTCN PAM
ucuaucucgcccccaccccc

SEQ ID NO: 6559 - RNA, 20 nt, Artificial Sequence
  spacer sequence CTCN PAM
aucucgcccccacccccuac

SEQ ID NO: 6560 - RNA, 20 nt, Artificial Sequence
  spacer sequence CTCN PAM
cccccacccccuacuccugc

SEQ ID NO: 6561 - RNA, 20 nt, Artificial Sequence
  spacer sequence CTCN PAM
ugcccaaguuacauuauggg

SEQ ID NO: 6562 - RNA, 20 nt, Artificial Sequence
  spacer sequence CTCN PAM
cauauuuccuaaaaggucca

SEQ ID NO: 6563 - RNA, 20 nt, Artificial Sequence
  spacer sequence CTCN PAM
cuuuccuuuggaaaaagccc

SEQ ID NO: 6564 - RNA, 20 nt, Artificial Sequence
  spacer sequence CTCN PAM
uaauaucuugauccaagguu

SEQ ID NO: 6565 - RNA, 20 nt, Artificial Sequence
  spacer sequence CTCN PAM
gagccuggugcuguagccua

SEQ ID NO: 6566 - RNA, 20 nt, Artificial Sequence
  spacer sequence CTCN PAM
gagaaaaccuuggaucaaga

SEQ ID NO: 6567 - RNA, 20 nt, Artificial Sequence
  spacer sequence CTCN PAM
uuguucaagcaaccccuuug

SEQ ID NO: 6568 - RNA, 20 nt, Artificial Sequence
  spacer sequence CTCN PAM
gcaacgggcagugaggccuc

SEQ ID NO: 6569 - RNA, 20 nt, Artificial Sequence
  spacer sequence CTCN PAM
cugcccguugcugaggccug

SEQ ID NO: 6570 - RNA, 20 nt, Artificial Sequence
  spacer sequence CTCN PAM
gcucccaggcccuggacagc

SEQ ID NO: 6571 - RNA, 20 nt, Artificial Sequence
  spacer sequence CTCN PAM
caggcccuggacagccucca

SEQ ID NO: 6572 - RNA, 20 nt, Artificial Sequence
  spacer sequence CTCN PAM
agaacauccgggucacuccu

SEQ ID NO: 6573 - RNA, 20 nt, Artificial Sequence
  spacer sequence CTCN PAM
uaagaauccaggauccagac

SEQ ID NO: 6574 - RNA, 20 nt, Artificial Sequence
  spacer sequence CTCN PAM
ugauauguguguacuggguc

SEQ ID NO: 6575 - RNA, 20 nt, Artificial Sequence
  spacer sequence CTCN PAM
gauuucccacaucaggaagg

SEQ ID NO: 6576 - RNA, 20 nt, Artificial Sequence
  spacer sequence CTCN PAM
caccuguaaucccagcacuu

SEQ ID NO: 6577 - RNA, 20 nt, Artificial Sequence
  spacer sequence CTCN PAM
aucguaaauaaauaaagucu

SEQ ID NO: 6578 - RNA, 20 nt, Artificial Sequence
  spacer sequence CTCN PAM
aagaauauagacuuuauuua

SEQ ID NO: 6579 - RNA, 20 nt, Artificial Sequence
  spacer sequence CTCN PAM
uuuuuuuguuuuuguuuuug

SEQ ID NO: 6580 - RNA, 20 nt, Artificial Sequence
  spacer sequence CTCN PAM
cgaaauuacuuuaaucugcu

SEQ ID NO: 6581 - RNA, 20 nt, Artificial Sequence
  spacer sequence CTCN PAM
aaauuacuuuaaucugcucu

SEQ ID NO: 6582 - RNA, 20 nt, Artificial Sequence
  spacer sequence CTCN PAM
guuaaacagcugacugauca

SEQ ID NO: 6583 - RNA, 20 nt, Artificial Sequence
  spacer sequence CTCN PAM
gaaaggccuuccuugacccc

SEQ ID NO: 6584 - RNA, 20 nt, Artificial Sequence
  spacer sequence CTCN PAM
auguguccuucaguuuccag

SEQ ID NO: 6585 - RNA, 20 nt, Artificial Sequence
  spacer sequence CTCN PAM
acuguucaccuguuuaacuc

SEQ ID NO: 6586 - RNA, 20 nt, Artificial Sequence
  spacer sequence CTCN PAM
uccuccacuguucaccuguu

SEQ ID NO: 6587 - RNA, 20 nt, Artificial Sequence
  spacer sequence CTCN PAM
aaagcucuuccuccacuguu

SEQ ID NO: 6588 - RNA, 20 nt, Artificial Sequence
  spacer sequence CTCN PAM
auggugccugccucaaaagc

SEQ ID NO: 6589 - RNA, 20 nt, Artificial Sequence
  spacer sequence CTCN PAM
ggacccuucagucuucucca

SEQ ID NO: 6590 - RNA, 20 nt, Artificial Sequence
  spacer sequence CTCN PAM
uggucuuugccugugguggu

SEQ ID NO: 6591 - RNA, 20 nt, Artificial Sequence
  spacer sequence CTCN PAM
cagggugcagcuuuguccaa

SEQ ID NO: 6592 - RNA, 20 nt, Artificial Sequence
  spacer sequence CTCN PAM
gggugcagcuuuguccaagu

SEQ ID NO: 6593 - RNA, 20 nt, Artificial Sequence
  spacer sequence CTCN PAM
uugcacuuggacaaagcugc

SEQ ID NO: 6594 - RNA, 20 nt, Artificial Sequence
  spacer sequence CTCN PAM
ccuggggcugggcgcggugg

SEQ ID NO: 6595 - RNA, 20 nt, Artificial Sequence
  spacer sequence CTCN PAM
uggggcugggcgcgguggcu

SEQ ID NO: 6596 - RNA, 20 nt, Artificial Sequence
  spacer sequence CTCN PAM
cgccuguaauccuaacacua

SEQ ID NO: 6597 - RNA, 20 nt, Artificial Sequence
  spacer sequence CTCN PAM
cauaguguuaggauuacagg

SEQ ID NO: 6598 - RNA, 20 nt, Artificial Sequence
  spacer sequence CTCN PAM
ggcaaucugccugucuuggc

SEQ ID NO: 6599 - RNA, 20 nt, Artificial Sequence
  spacer sequence CTCN PAM
ggaguucgagaccacccugg

SEQ ID NO: 6600 - RNA, 20 nt, Artificial Sequence
  spacer sequence CTCN PAM
ugagcucaggcaaucugccu

SEQ ID NO: 6601 - RNA, 20 nt, Artificial Sequence
  spacer sequence CTCN PAM
aacuccugagcucaggcaau

SEQ ID NO: 6602 - RNA, 20 nt, Artificial Sequence
  spacer sequence CTCN PAM
acuaaaauacaaaaaaaaua

SEQ ID NO: 6603 - RNA, 20 nt, Artificial Sequence
  spacer sequence CTCN PAM
uggguagcugggacuauaug

SEQ ID NO: 6604 - RNA, 20 nt, Artificial Sequence
  spacer sequence CTCN PAM
gccuccuggguagcugggac

SEQ ID NO: 6605 - RNA, 20 nt, Artificial Sequence
  spacer sequence CTCN PAM
cggguucaagcaauucuuau

SEQ ID NO: 6606 - RNA, 20 nt, Artificial Sequence
  spacer sequence CTCN PAM
uacugcaacaucugccuccc

SEQ ID NO: 6607 - RNA, 20 nt, Artificial Sequence
  spacer sequence CTCN PAM
gcucauacugcaacaucugc

SEQ ID NO: 6608 - RNA, 20 nt, Artificial Sequence
  spacer sequence CTCN PAM
aucucggcucauacugcaac

SEQ ID NO: 6609 - RNA, 20 nt, Artificial Sequence
  spacer sequence CTCN PAM
agacugagugacacaacaag

SEQ ID NO: 6610 - RNA, 20 nt, Artificial Sequence
  spacer sequence CTCN PAM
gucuggaguacaguggcuca

SEQ ID NO: 6611 - RNA, 20 nt, Artificial Sequence
  spacer sequence CTCN PAM
gccucaaaaaaaaaaaaaaa

SEQ ID NO: 6612 - RNA, 20 nt, Artificial Sequence
  spacer sequence CTCN PAM
aaaaaaaaaaaaaaaaaaaa

SEQ ID NO: 6613 - RNA, 20 nt, Artificial Sequence
  spacer sequence CTCN PAM
cccuagaacuccuguuguuc

SEQ ID NO: 6614 - RNA, 20 nt, Artificial Sequence
  spacer sequence CTCN PAM
cuagaacuccuguuguuccu

SEQ ID NO: 6615 - RNA, 20 nt, Artificial Sequence
  spacer sequence CTCN PAM
uguuguuccuggagcucuga

SEQ ID NO: 6616 - RNA, 20 nt, Artificial Sequence
  spacer sequence CTCN PAM
aggaacaacaggaguucuag

SEQ ID NO: 6617 - RNA, 20 nt, Artificial Sequence
  spacer sequence CTCN PAM
gagaaacgugguuugaaaag

SEQ ID NO: 6618 - RNA, 20 nt, Artificial Sequence
  spacer sequence CTCN PAM
gagcuccaggaacaacagga

SEQ ID NO: 6619 - RNA, 20 nt, Artificial Sequence
  spacer sequence CTCN PAM
gguuggcccuuuucaaacca

SEQ ID NO: 6620 - RNA, 20 nt, Artificial Sequence
  spacer sequence CTCN PAM
ugugaucacaaaagucaauc

SEQ ID NO: 6621 - RNA, 20 nt, Artificial Sequence
  spacer sequence CTCN PAM
gcaaaccaucugaaugcaac

SEQ ID NO: 6622 - RNA, 20 nt, Artificial Sequence
  spacer sequence CTCN PAM
ggcagacacgaaagagaaug

SEQ ID NO: 6623 - RNA, 20 nt, Artificial Sequence
  spacer sequence CTCN PAM
uucgugucugccagagcaac

SEQ ID NO: 6624 - RNA, 20 nt, Artificial Sequence
  spacer sequence CTCN PAM
cauucucuuucgugucugcc

SEQ ID NO: 6625 - RNA, 20 nt, Artificial Sequence
  spacer sequence CTCN PAM
agaacugugucuguguuucu

SEQ ID NO: 6626 - RNA, 20 nt, Artificial Sequence
  spacer sequence CTCN PAM
gcaaaguagcaaauccccac

SEQ ID NO: 6627 - RNA, 20 nt, Artificial Sequence
  spacer sequence CTCN PAM
uuccugguuacccagugugg

SEQ ID NO: 6628 - RNA, 20 nt, Artificial Sequence
  spacer sequence CTCN PAM
ucuccuuccugguuacccag

SEQ ID NO: 6629 - RNA, 20 nt, Artificial Sequence
  spacer sequence CTCN PAM
ccggaaggccacacucaucu

SEQ ID NO: 6630 - RNA, 20 nt, Artificial Sequence
  spacer sequence CTCN PAM
uccugaggggcgcuucaggc

SEQ ID NO: 6631 - RNA, 20 nt, Artificial Sequence
  spacer sequence CTCN PAM
ggaagagcgggucucaccgg

SEQ ID NO: 6632 - RNA, 20 nt, Artificial Sequence
  spacer sequence CTCN PAM
ggugccugaagcgccccuca

SEQ ID NO: 6633 - RNA, 20 nt, Artificial Sequence
  spacer sequence CTCN PAM
cucaugacucccucagccaa

SEQ ID NO: 6634 - RNA, 20 nt, Artificial Sequence
  spacer sequence CTCN PAM
ugacucccucagccaaucuc

SEQ ID NO: 6635 - RNA, 20 nt, Artificial Sequence
  spacer sequence CTCN PAM
cucagccaaucucagccuuc

SEQ ID NO: 6636 - RNA, 20 nt, Artificial Sequence
  spacer sequence CTCN PAM
gccaaucucagccuucugcc

SEQ ID NO: 6637 - RNA, 20 nt, Artificial Sequence
  spacer sequence CTCN PAM
gccuucugccaggccaacca

SEQ ID NO: 6638 - RNA, 20 nt, Artificial Sequence
  spacer sequence CTCN PAM
ucaaccaccagagauuagaa

SEQ ID NO: 6639 - RNA, 20 nt, Artificial Sequence
  spacer sequence CTCN PAM
accaccagagauuagaagaa

SEQ ID NO: 6640 - RNA, 20 nt, Artificial Sequence
  spacer sequence CTCN PAM
ggugguugaggagucugguu

SEQ ID NO: 6641 - RNA, 20 nt, Artificial Sequence
  spacer sequence CTCN PAM
aaaucaagugaugaagcaug

SEQ ID NO: 6642 - RNA, 20 nt, Artificial Sequence
  spacer sequence CTCN PAM
ggacaaaucguuuaaaaaag

SEQ ID NO: 6643 - RNA, 20 nt, Artificial Sequence
  spacer sequence CTCN PAM
ggaagaauguguucacaaac

SEQ ID NO: 6644 - RNA, 20 nt, Artificial Sequence
  spacer sequence CTCN PAM
agugucccugaggaccagga

SEQ ID NO: 6645 - RNA, 20 nt, Artificial Sequence
  spacer sequence CTCN PAM
gggacacuugagaugggugu

SEQ ID NO: 6646 - RNA, 20 nt, Artificial Sequence
  spacer sequence CTCN PAM
uccugcccagaggaagcuuc

SEQ ID NO: 6647 - RNA, 20 nt, Artificial Sequence
  spacer sequence CTCN PAM
ugcccagaggaagcuuccag

SEQ ID NO: 6648 - RNA, 20 nt, Artificial Sequence
  spacer sequence CTCN PAM
gggcaggaggagucaaagau

SEQ ID NO: 6649 - RNA, 20 nt, Artificial Sequence
  spacer sequence CTCN PAM
aguggcuguugggcuguggu

SEQ ID NO: 6650 - RNA, 20 nt, Artificial Sequence
  spacer sequence CTCN PAM
gugagaaucggccaccugcc

SEQ ID NO: 6651 - RNA, 20 nt, Artificial Sequence
  spacer sequence CTCN PAM
cagagaccccacuucccuuu

SEQ ID NO: 6652 - RNA, 20 nt, Artificial Sequence
  spacer sequence CTCN PAM
agcucucuucacagacccug

SEQ ID NO: 6653 - RNA, 20 nt, Artificial Sequence
  spacer sequence CTCN PAM
cuucacagacccugaguggg

SEQ ID NO: 6654 - RNA, 20 nt, Artificial Sequence
  spacer sequence CTCN PAM
ucacagacccugagugggga

SEQ ID NO: 6655 - RNA, 20 nt, Artificial Sequence
  spacer sequence CTCN PAM
gggucugugaagagagcugg

SEQ ID NO: 6656 - RNA, 20 nt, Artificial Sequence
  spacer sequence CTCN PAM
ccacucagggucugugaaga

SEQ ID NO: 6657 - RNA, 20 nt, Artificial Sequence
  spacer sequence CTCN PAM
ccccacucagggucugugaa

SEQ ID NO: 6658 - RNA, 20 nt, Artificial Sequence
  spacer sequence CTCN PAM
gugauuuauucauccugcuu

SEQ ID NO: 6659 - RNA, 20 nt, Artificial Sequence
  spacer sequence CTCN PAM
uucauuuauucaugcacugc

SEQ ID NO: 6660 - RNA, 20 nt, Artificial Sequence
  spacer sequence CTCN PAM
gcugaaaggaaaauaaaaaa

SEQ ID NO: 6661 - RNA, 20 nt, Artificial Sequence
  spacer sequence CTCN PAM
uauucccuucuuuuuuauuu

SEQ ID NO: 6662 - RNA, 20 nt, Artificial Sequence
  spacer sequence CTCN PAM
aauaaaugaccaagaagcaa

SEQ ID NO: 6663 - RNA, 20 nt, Artificial Sequence
  spacer sequence CTCN PAM
ugggcuguggugcuuaaugg

SEQ ID NO: 6664 - RNA, 20 nt, Artificial Sequence
  spacer sequence CTCN PAM
uuccauuaagcaccacagcc

SEQ ID NO: 6665 - RNA, 20 nt, Artificial Sequence
  spacer sequence CTCN PAM
gcaacugcggcaaaccaggg

SEQ ID NO: 6666 - RNA, 20 nt, Artificial Sequence
  spacer sequence CTCN PAM
uuugugaagguacuuugugu

SEQ ID NO: 6667 - RNA, 20 nt, Artificial Sequence
  spacer sequence CTCN PAM
gucaucauuaacagaaaaau

SEQ ID NO: 6668 - RNA, 20 nt, Artificial Sequence
  spacer sequence CTCN PAM
acccucagucaucauuaaca

SEQ ID NO: 6669 - RNA, 20 nt, Artificial Sequence
  spacer sequence CTCN PAM
uucuccacccucagucauca

SEQ ID NO: 6670 - RNA, 20 nt, Artificial Sequence
  spacer sequence CTCN PAM
uucucuuucuccacccucag

SEQ ID NO: 6671 - RNA, 20 nt, Artificial Sequence
  spacer sequence CTCN PAM
aguuucccuucuauuuuuca

SEQ ID NO: 6672 - RNA, 20 nt, Artificial Sequence
  spacer sequence CTCN PAM
ucuguugaacaguacagaag

SEQ ID NO: 6673 - RNA, 20 nt, Artificial Sequence
  spacer sequence CTCN PAM
guugaacaguacagaagcag

SEQ ID NO: 6674 - RNA, 20 nt, Artificial Sequence
  spacer sequence CTCN PAM
uuuucccaaaugauccuuuc

SEQ ID NO: 6675 - RNA, 20 nt, Artificial Sequence
  spacer sequence CTCN PAM
auguaaaauccugcagguca

SEQ ID NO: 6676 - RNA, 20 nt, Artificial Sequence
  spacer sequence CTCN PAM
uggcuuguggggaaaaugac

SEQ ID NO: 6677 - RNA, 20 nt, Artificial Sequence
  spacer sequence CTCN PAM
ugcauauccagucuucugcu

SEQ ID NO: 6678 - RNA, 20 nt, Artificial Sequence
  spacer sequence CTCN PAM
ccacacuuaaaugcauaaca

SEQ ID NO: 6679 - RNA, 20 nt, Artificial Sequence
  spacer sequence CTCN PAM
cgccuguaauuccaacacuu

SEQ ID NO: 6680 - RNA, 20 nt, Artificial Sequence
  spacer sequence CTCN PAM
caaaguguuggaauuacagg

SEQ ID NO: 6681 - RNA, 20 nt, Artificial Sequence
  spacer sequence CTCN PAM
gccucccaaaguguuggaau

SEQ ID NO: 6682 - RNA, 20 nt, Artificial Sequence
  spacer sequence CTCN PAM
ggugaucugccagccucagc

SEQ ID NO: 6683 - RNA, 20 nt, Artificial Sequence
  spacer sequence CTCN PAM
ugaccucaggugaucugcca

SEQ ID NO: 6684 - RNA, 20 nt, Artificial Sequence
  spacer sequence CTCN PAM
aacuccugaccucaggugau

SEQ ID NO: 6685 - RNA, 20 nt, Artificial Sequence
  spacer sequence CTCN PAM
gaauucaugcacuccucugc

SEQ ID NO: 6686 - RNA, 20 nt, Artificial Sequence
  spacer sequence CTCN PAM
ucugcucccaggaaaaaccu

SEQ ID NO: 6687 - RNA, 20 nt, Artificial Sequence
  spacer sequence CTCN PAM
gcucccaggaaaaaccuugg

SEQ ID NO: 6688 - RNA, 20 nt, Artificial Sequence
  spacer sequence CTCN PAM
caggaaaaaccuugguuuac

SEQ ID NO: 6689 - RNA, 20 nt, Artificial Sequence
  spacer sequence CTCN PAM
ccaguagcugggauuacagg

SEQ ID NO: 6690 - RNA, 20 nt, Artificial Sequence
  spacer sequence CTCN PAM
accuccccaguagcugggau

SEQ ID NO: 6691 - RNA, 20 nt, Artificial Sequence
  spacer sequence CTCN PAM
ugccucaaccuccccaguag

SEQ ID NO: 6692 - RNA, 20 nt, Artificial Sequence
  spacer sequence CTCN PAM
uggguucaagugauucuccu

SEQ ID NO: 6693 - RNA, 20 nt, Artificial Sequence
  spacer sequence CTCN PAM
gccuccuggguucaagugau

SEQ ID NO: 6694 - RNA, 20 nt, Artificial Sequence
  spacer sequence CTCN PAM
cugcaaccucugccuccugg

SEQ ID NO: 6695 - RNA, 20 nt, Artificial Sequence
  spacer sequence CTCN PAM
gcucacugcaaccucugccu

SEQ ID NO: 6696 - RNA, 20 nt, Artificial Sequence
  spacer sequence CTCN PAM
aauuagaccagcaguucuca

SEQ ID NO: 6697 - RNA, 20 nt, Artificial Sequence
  spacer sequence CTCN PAM
accagaggcaauuucacccu

SEQ ID NO: 6698 - RNA, 20 nt, Artificial Sequence
  spacer sequence CTCN PAM
gguugagaacugcuggucua

SEQ ID NO: 6699 - RNA, 20 nt, Artificial Sequence
  spacer sequence CTCN PAM
ugcccaaaaugucaacagug

SEQ ID NO: 6700 - RNA, 20 nt, Artificial Sequence
  spacer sequence CTCN PAM
gcacuguugacauuuugggc

SEQ ID NO: 6701 - RNA, 20 nt, Artificial Sequence
  spacer sequence CTCN PAM
gaauuagauggugaguuucu

SEQ ID NO: 6702 - RNA, 20 nt, Artificial Sequence
  spacer sequence CTCN PAM
ccaucuaauucagagguucu

SEQ ID NO: 6703 - RNA, 20 nt, Artificial Sequence
  spacer sequence CTCN PAM
gagcaaggauaucccauuuc

SEQ ID NO: 6704 - RNA, 20 nt, Artificial Sequence
  spacer sequence CTCN PAM
gagaaacucaccaucuaauu

SEQ ID NO: 6705 - RNA, 20 nt, Artificial Sequence
  spacer sequence CTCN PAM
ggguucccggggacuaaagg

SEQ ID NO: 6706 - RNA, 20 nt, Artificial Sequence
  spacer sequence CTCN PAM
ggcaagaaguaggugauuau

SEQ ID NO: 6707 - RNA, 20 nt, Artificial Sequence
  spacer sequence CTCN PAM
cagggcaugccccgucccag

SEQ ID NO: 6708 - RNA, 20 nt, Artificial Sequence
  spacer sequence CTCN PAM
gggauuguggcccaggacuc

SEQ ID NO: 6709 - RNA, 20 nt, Artificial Sequence
  spacer sequence CTCN PAM
gaacucagcugaacaugcuu

SEQ ID NO: 6710 - RNA, 20 nt, Artificial Sequence
  spacer sequence CTCN PAM
uggaauugggcugcucugaa

SEQ ID NO: 6711 - RNA, 20 nt, Artificial Sequence
  spacer sequence CTCN PAM
agcuucuagcacggugcuug

SEQ ID NO: 6712 - RNA, 20 nt, Artificial Sequence
  spacer sequence CTCN PAM
uacaaaccccauauggauuc

SEQ ID NO: 6713 - RNA, 20 nt, Artificial Sequence
  spacer sequence CTCN PAM
ggagggggugggggucaaug

SEQ ID NO: 6714 - RNA, 20 nt, Artificial Sequence
  spacer sequence CTCN PAM
ugagaaagggaauccauaug

SEQ ID NO: 6715 - RNA, 20 nt, Artificial Sequence
  spacer sequence CTCN PAM
cacagaugucagucuggcug

SEQ ID NO: 6716 - RNA, 20 nt, Artificial Sequence
  spacer sequence CTCN PAM
gaaaggcuguccacucccug

SEQ ID NO: 6717 - RNA, 20 nt, Artificial Sequence
  spacer sequence CTCN PAM
cugucugagaauaaacagga

SEQ ID NO: 6718 - RNA, 20 nt, Artificial Sequence
  spacer sequence CTCN PAM
gacagggaguggacagccuu

SEQ ID NO: 6719 - RNA, 20 nt, Artificial Sequence
  spacer sequence CTCN PAM
cacacacacacacacacaca

SEQ ID NO: 6720 - RNA, 20 nt, Artificial Sequence
  spacer sequence CTCN PAM
cacacacacacacacacaca

SEQ ID NO: 6721 - RNA, 20 nt, Artificial Sequence
  spacer sequence CTCN PAM
cucacacacacacacacaca

SEQ ID NO: 6722 - RNA, 20 nt, Artificial Sequence
  spacer sequence CTCN PAM
cucucacacacacacacaca

SEQ ID NO: 6723 - RNA, 20 nt, Artificial Sequence
  spacer sequence CTCN PAM
cucucucacacacacacaca

SEQ ID NO: 6724 - RNA, 20 nt, Artificial Sequence
  spacer sequence CTCN PAM
gaggucagcagaggcucagc

SEQ ID NO: 6725 - RNA, 20 nt, Artificial Sequence
  spacer sequence CTCN PAM
gaguuaaggaagucucucuc

SEQ ID NO: 6726 - RNA, 20 nt, Artificial Sequence
  spacer sequence CTCN PAM
gcugaccucugaguuaagga

SEQ ID NO: 6727 - RNA, 20 nt, Artificial Sequence
  spacer sequence CTCN PAM
gcccugcccaccucagcccc

SEQ ID NO: 6728 - RNA, 20 nt, Artificial Sequence
  spacer sequence CTCN PAM
gcccccacacaccaaucccu

SEQ ID NO: 6729 - RNA, 20 nt, Artificial Sequence
  spacer sequence CTCN PAM
gcccacagacuuucccagga

SEQ ID NO: 6730 - RNA, 20 nt, Artificial Sequence
  spacer sequence CTCN PAM
guccgccucuuccuccccca

SEQ ID NO: 6731 - RNA, 20 nt, Artificial Sequence
  spacer sequence CTCN PAM
uccucccccacacccuucca

SEQ ID NO: 6732 - RNA, 20 nt, Artificial Sequence
  spacer sequence CTCN PAM
cccacacccuuccagaugcu

SEQ ID NO: 6733 - RNA, 20 nt, Artificial Sequence
  spacer sequence CTCN PAM
aauuucaaacuuccuggagu

SEQ ID NO: 6734 - RNA, 20 nt, Artificial Sequence
  spacer sequence CTCN PAM
aggaaguuugaaauuggagu

SEQ ID NO: 6735 - RNA, 20 nt, Artificial Sequence
  spacer sequence CTCN PAM
gaacuccaggaaguuugaaa

SEQ ID NO: 6736 - RNA, 20 nt, Artificial Sequence
  spacer sequence CTCN PAM
gguuaugaagggaugauaaa

SEQ ID NO: 6737 - RNA, 20 nt, Artificial Sequence
  spacer sequence CTCN PAM
ggguugcagaucuugguagu

SEQ ID NO: 6738 - RNA, 20 nt, Artificial Sequence
  spacer sequence CTCN PAM
cuaaaauguguuuacccuga

SEQ ID NO: 6739 - RNA, 20 nt, Artificial Sequence
  spacer sequence CTCN PAM
cuagggaagggauuuuuuuc

SEQ ID NO: 6740 - RNA, 20 nt, Artificial Sequence
  spacer sequence CTCN PAM
ugcucccuagggaagggauu

SEQ ID NO: 6741 - RNA, 20 nt, Artificial Sequence
  spacer sequence CTCN PAM
ucuugcucccuagggaaggg

SEQ ID NO: 6742 - RNA, 20 nt, Artificial Sequence
  spacer sequence CTCN PAM
auauaccugcccuccucuug

SEQ ID NO: 6743 - RNA, 20 nt, Artificial Sequence
  spacer sequence CTCN PAM
caauauaccugcccuccucu

SEQ ID NO: 6744 - RNA, 20 nt, Artificial Sequence
  spacer sequence CTCN PAM
aagcugaccuuuaacccuca

SEQ ID NO: 6745 - RNA, 20 nt, Artificial Sequence
  spacer sequence CTCN PAM
gccuuuucaucagaagauug

SEQ ID NO: 6746 - RNA, 20 nt, Artificial Sequence
  spacer sequence CTCN PAM
gcuuaauauauggucaaucu

SEQ ID NO: 6747 - RNA, 20 nt, Artificial Sequence
  spacer sequence CTCN PAM
uccuuaucacgaaucagaug

SEQ ID NO: 6748 - RNA, 20 nt, Artificial Sequence
  spacer sequence CTCN PAM
ucucccaggcuggcuucagu

SEQ ID NO: 6749 - RNA, 20 nt, Artificial Sequence
  spacer sequence CTCN PAM
caggcuggcuucaguccaga

SEQ ID NO: 6750 - RNA, 20 nt, Artificial Sequence
  spacer sequence CTCN PAM
gcucagccagcacagauagu

SEQ ID NO: 6751 - RNA, 20 nt, Artificial Sequence
  spacer sequence CTCN PAM
gccagcacagauaguguucc

SEQ ID NO: 6752 - RNA, 20 nt, Artificial Sequence
  spacer sequence CTCN PAM
cauugccuucaaaaugcagg

SEQ ID NO: 6753 - RNA, 20 nt, Artificial Sequence
  spacer sequence CTCN PAM
gccaagaucacacagccagu

SEQ ID NO: 6754 - RNA, 20 nt, Artificial Sequence
  spacer sequence CTCN PAM
cugaaggucaauuucuucau

SEQ ID NO: 6755 - RNA, 20 nt, Artificial Sequence
  spacer sequence CTCN PAM
gaaggucaauuucuucaugu

SEQ ID NO: 6756 - RNA, 20 nt, Artificial Sequence
  spacer sequence CTCN PAM
ucugacauauaaauaggaau

SEQ ID NO: 6757 - RNA, 20 nt, Artificial Sequence
  spacer sequence CTCN PAM
gacauauaaauaggaauuca

SEQ ID NO: 6758 - RNA, 20 nt, Artificial Sequence
  spacer sequence CTCN PAM
uaagaauguguggcuucccc

SEQ ID NO: 6759 - RNA, 20 nt, Artificial Sequence
  spacer sequence CTCN PAM
aaagucaugaaacuuguugg

SEQ ID NO: 6760 - RNA, 20 nt, Artificial Sequence
  spacer sequence CTCN PAM
gaagaucuugccauauuuca

SEQ ID NO: 6761 - RNA, 20 nt, Artificial Sequence
  spacer sequence CTCN PAM
cccagacuucagugugaaau

SEQ ID NO: 6762 - RNA, 20 nt, Artificial Sequence
  spacer sequence CTCN PAM
ugcuacuucacaaguucuaa

SEQ ID NO: 6763 - RNA, 20 nt, Artificial Sequence
  spacer sequence CTCN PAM
cacacugaaagggacccaaa

SEQ ID NO: 6764 - RNA, 20 nt, Artificial Sequence
  spacer sequence CTCN PAM
uaaaaauuugggucccuuuc

SEQ ID NO: 6765 - RNA, 20 nt, Artificial Sequence
  spacer sequence CTCN PAM
acucuuaaaaauuugggucc

SEQ ID NO: 6766 - RNA, 20 nt, Artificial Sequence
  spacer sequence CTCN PAM
augcauuauggaauccuucc

SEQ ID NO: 6767 - RNA, 20 nt, Artificial Sequence
  spacer sequence CTCN PAM
uccaugcauuauggaauccu

SEQ ID NO: 6768 - RNA, 20 nt, Artificial Sequence
  spacer sequence CTCN PAM
ggcgaagaucaucaagcucu

SEQ ID NO: 6769 - RNA, 20 nt, Artificial Sequence
  spacer sequence CTCN PAM
ggugaccaaagccagaggug

SEQ ID NO: 6770 - RNA, 20 nt, Artificial Sequence
  spacer sequence CTCN PAM
ggcuuuggucaccagagcuu

SEQ ID NO: 6771 - RNA, 20 nt, Artificial Sequence
  spacer sequence CTCN PAM
gggccgcagaaaugaaaggu

SEQ ID NO: 6772 - RNA, 20 nt, Artificial Sequence
  spacer sequence CTCN PAM
cugaagccauuucaaaugca

SEQ ID NO: 6773 - RNA, 20 nt, Artificial Sequence
  spacer sequence CTCN PAM
gaagccauuucaaaugcauc

SEQ ID NO: 6774 - RNA, 20 nt, Artificial Sequence
  spacer sequence CTCN PAM
aaggugaugaauuaaaccug

SEQ ID NO: 6775 - RNA, 20 nt, Artificial Sequence
  spacer sequence CTCN PAM
ugaaaccucaaaggugauga

SEQ ID NO: 6776 - RNA, 20 nt, Artificial Sequence
  spacer sequence CTCN PAM
ggucugcagcccagggucgg

SEQ ID NO: 6777 - RNA, 20 nt, Artificial Sequence
  spacer sequence CTCN PAM
ccuucaaggacacaggcacg

SEQ ID NO: 6778 - RNA, 20 nt, Artificial Sequence
  spacer sequence CTCN PAM
cccuccccgcauccuccagu

SEQ ID NO: 6779 - RNA, 20 nt, Artificial Sequence
  spacer sequence CTCN PAM
ccgcauccuccagucaaucc

SEQ ID NO: 6780 - RNA, 20 nt, Artificial Sequence
  spacer sequence CTCN PAM
agucaauccccaaggccuca

SEQ ID NO: 6781 - RNA, 20 nt, Artificial Sequence
  spacer sequence CTCN PAM
gacagccacaggaccccagg

SEQ ID NO: 6782 - RNA, 20 nt, Artificial Sequence
  spacer sequence CTCN PAM
ugggguccuguggcugucug

SEQ ID NO: 6783 - RNA, 20 nt, Artificial Sequence
  spacer sequence CTCN PAM
ugugccuggucaggccuguc

SEQ ID NO: 6784 - RNA, 20 nt, Artificial Sequence
  spacer sequence CTCN PAM
agggcuucucaugccaccac

SEQ ID NO: 6785 - RNA, 20 nt, Artificial Sequence
  spacer sequence CTCN PAM
ugccaccacauuaaaaaaaa

SEQ ID NO: 6786 - RNA, 20 nt, Artificial Sequence
  spacer sequence CTCN PAM
gacuugcuuuucguaaacca

SEQ ID NO: 6787 - RNA, 20 nt, Artificial Sequence
  spacer sequence CTCN PAM
cagacuugcuuuucguaaac

SEQ ID NO: 6788 - RNA, 20 nt, Artificial Sequence
  spacer sequence CTCN PAM
gaggacaguccccaagguac

SEQ ID NO: 6789 - RNA, 20 nt, Artificial Sequence
  spacer sequence CTCN PAM
gaguugccuucccacccaga

SEQ ID NO: 6790 - RNA, 20 nt, Artificial Sequence
  spacer sequence CTCN PAM
gaacugcgaacacugaccuu

SEQ ID NO: 6791 - RNA, 20 nt, Artificial Sequence
  spacer sequence CTCN PAM
ccccugcucccccauuucaa

SEQ ID NO: 6792 - RNA, 20 nt, Artificial Sequence
  spacer sequence CTCN PAM
cccauuucaaaucugaaaug

SEQ ID NO: 6793 - RNA, 20 nt, Artificial Sequence
  spacer sequence CTCN PAM
aaccaggacugaacguuugc

SEQ ID NO: 6794 - RNA, 20 nt, Artificial Sequence
  spacer sequence CTCN PAM
gaccccggcauuguaucauu

SEQ ID NO: 6795 - RNA, 20 nt, Artificial Sequence
  spacer sequence CTCN PAM
uuauuucuaaacaccacuau

SEQ ID NO: 6796 - RNA, 20 nt, Artificial Sequence
  spacer sequence CTCN PAM
aacccaagucucaaauguaa

SEQ ID NO: 6797 - RNA, 20 nt, Artificial Sequence
  spacer sequence CTCN PAM
aauguaagagaauuuucacu

SEQ ID NO: 6798 - RNA, 20 nt, Artificial Sequence
  spacer sequence CTCN PAM
uacauuugagacuuggguug

SEQ ID NO: 6799 - RNA, 20 nt, Artificial Sequence
  spacer sequence CTCN PAM
ucgggcuuguuuucccuuca

SEQ ID NO: 6800 - RNA, 20 nt, Artificial Sequence
  spacer sequence CTCN PAM
ggcuuguuuucccuucacuc

SEQ ID NO: 6801 - RNA, 20 nt, Artificial Sequence
  spacer sequence CTCN PAM
ccuuauucauuccauguccu

SEQ ID NO: 6802 - RNA, 20 nt, Artificial Sequence
  spacer sequence CTCN PAM
uuauucauuccauguccuug

SEQ ID NO: 6803 - RNA, 20 nt, Artificial Sequence
  spacer sequence CTCN PAM
agagcccuccuuuuuaaaac

SEQ ID NO: 6804 - RNA, 20 nt, Artificial Sequence
  spacer sequence CTCN PAM
agagaaggcacugauauaua

SEQ ID NO: 6805 - RNA, 20 nt, Artificial Sequence
  spacer sequence CTCN PAM
uuuuuaaaacagcacaagaa

SEQ ID NO: 6806 - RNA, 20 nt, Artificial Sequence
  spacer sequence CTCN PAM
cuuaaggugccuucuugugc

SEQ ID NO: 6807 - RNA, 20 nt, Artificial Sequence
  spacer sequence CTCN PAM
cucagacgcaggacaccucc

SEQ ID NO: 6808 - RNA, 20 nt, Artificial Sequence
  spacer sequence CTCN PAM
gacgcaggacaccuccucca

SEQ ID NO: 6809 - RNA, 20 nt, Artificial Sequence
  spacer sequence CTCN PAM
uccagcugaaaaacuagauu

SEQ ID NO: 6810 - RNA, 20 nt, Artificial Sequence
  spacer sequence CTCN PAM
agcugaaaaacuagauucug

SEQ ID NO: 6811 - RNA, 20 nt, Artificial Sequence
  spacer sequence CTCN PAM
caggccccagcauucuagcc

SEQ ID NO: 6812 - RNA, 20 nt, Artificial Sequence
  spacer sequence CTCN PAM
uaaacucauuuaauuauguc

SEQ ID NO: 6813 - RNA, 20 nt, Artificial Sequence
  spacer sequence CTCN PAM
uuuaauuauguccagaguaa

SEQ ID NO: 6814 - RNA, 20 nt, Artificial Sequence
  spacer sequence CTCN PAM
ggacauaauuaaaugaguuu

SEQ ID NO: 6815 - RNA, 20 nt, Artificial Sequence
  spacer sequence CTCN PAM
uggggaucauggguugcagg

SEQ ID NO: 6816 - RNA, 20 nt, Artificial Sequence
  spacer sequence CTCN PAM
ugcaacccaugauccccaug

SEQ ID NO: 6817 - RNA, 20 nt, Artificial Sequence
  spacer sequence CTCN PAM
uaccccgccaaccuccugca

SEQ ID NO: 6818 - RNA, 20 nt, Artificial Sequence
  spacer sequence CTCN PAM
uagcaugucugggugaaucc

SEQ ID NO: 6819 - RNA, 20 nt, Artificial Sequence
  spacer sequence CTCN PAM
cugucuccuagcaugucugg

SEQ ID NO: 6820 - RNA, 20 nt, Artificial Sequence
  spacer sequence CTCN PAM
gggugaaaagggauuaguga

SEQ ID NO: 6821 - RNA, 20 nt, Artificial Sequence
  spacer sequence CTCN PAM
cuaaucccuuuucaccccga

SEQ ID NO: 6822 - RNA, 20 nt, Artificial Sequence
  spacer sequence CTCN PAM
ucacuaaucccuuuucaccc

SEQ ID NO: 6823 - RNA, 20 nt, Artificial Sequence
  spacer sequence CTCN PAM
ggaaucucagacacccuuug

SEQ ID NO: 6824 - RNA, 20 nt, Artificial Sequence
  spacer sequence CTCN PAM
gacacccuuugaccaaaguu

SEQ ID NO: 6825 - RNA, 20 nt, Artificial Sequence
  spacer sequence CTCN PAM
ugggaacuuuggucaaaggg

SEQ ID NO: 6826 - RNA, 20 nt, Artificial Sequence
  spacer sequence CTCN PAM
aaucuuaggaagauuuuugu

SEQ ID NO: 6827 - RNA, 20 nt, Artificial Sequence
  spacer sequence CTCN PAM
gucugcuuuuaaaaggaauc

SEQ ID NO: 6828 - RNA, 20 nt, Artificial Sequence
  spacer sequence CTCN PAM
cuccccaaucaaacuccgca

SEQ ID NO: 6829 - RNA, 20 nt, Artificial Sequence
  spacer sequence CTCN PAM
ccaaucaaacuccgcauggg

SEQ ID NO: 6830 - RNA, 20 nt, Artificial Sequence
  spacer sequence CTCN PAM
gcauggggcuuucuuccucu

SEQ ID NO: 6831 - RNA, 20 nt, Artificial Sequence
  spacer sequence CTCN PAM
accugucugacaggggaaag

SEQ ID NO: 6832 - RNA, 20 nt, Artificial Sequence
  spacer sequence CTCN PAM
ucccaaauuccccuucugag

SEQ ID NO: 6833 - RNA, 20 nt, Artificial Sequence
  spacer sequence CTCN PAM
caaauuccccuucugagaag

SEQ ID NO: 6834 - RNA, 20 nt, Artificial Sequence
  spacer sequence CTCN PAM
gaaggggaauuugggaggag

SEQ ID NO: 6835 - RNA, 20 nt, Artificial Sequence
  spacer sequence CTCN PAM
uaccccuucucagaagggga

SEQ ID NO: 6836 - RNA, 20 nt, Artificial Sequence
  spacer sequence CTCN PAM
uuccuuuuugucuacaagca

SEQ ID NO: 6837 - RNA, 20 nt, Artificial Sequence
  spacer sequence CTCN PAM
acacuugacaggcugugugg

SEQ ID NO: 6838 - RNA, 20 nt, Artificial Sequence
  spacer sequence CTCN PAM
uggugacugaagccagccuc

SEQ ID NO: 6839 - RNA, 20 nt, Artificial Sequence
  spacer sequence CTCN PAM
guuuuguccucugugaugug

SEQ ID NO: 6840 - RNA, 20 nt, Artificial Sequence
  spacer sequence CTCN PAM
gugaugugaggacuugagca

SEQ ID NO: 6841 - RNA, 20 nt, Artificial Sequence
  spacer sequence CTCN PAM
caucacagaggacaaaacug

SEQ ID NO: 6842 - RNA, 20 nt, Artificial Sequence
  spacer sequence CTCN PAM
aguccucacaucacagagga

SEQ ID NO: 6843 - RNA, 20 nt, Artificial Sequence
  spacer sequence CTCN PAM
ccuagccaggauacucuaca

SEQ ID NO: 6844 - RNA, 20 nt, Artificial Sequence
  spacer sequence CTCN PAM
acaauugcacaccccuggcu

SEQ ID NO: 6845 - RNA, 20 nt, Artificial Sequence
  spacer sequence CTCN PAM
ccagggaacuuuaccuccug

SEQ ID NO: 6846 - RNA, 20 nt, Artificial Sequence
  spacer sequence CTCN PAM
uggugagaagggguuguggg

SEQ ID NO: 6847 - RNA, 20 nt, Artificial Sequence
  spacer sequence CTCN PAM
ccaggagguaaaguucccug

SEQ ID NO: 6848 - RNA, 20 nt, Artificial Sequence
  spacer sequence CTCN PAM
gcugccagcagaucuuggcc

SEQ ID NO: 6849 - RNA, 20 nt, Artificial Sequence
  spacer sequence CTCN PAM
ccagcaugggccauuaaucc

SEQ ID NO: 6850 - RNA, 20 nt, Artificial Sequence
  spacer sequence CTCN PAM
cacuuaacaauuaaguuuua

SEQ ID NO: 6851 - RNA, 20 nt, Artificial Sequence
  spacer sequence CTCN PAM
cagauggcaugcucccuaau

SEQ ID NO: 6852 - RNA, 20 nt, Artificial Sequence
  spacer sequence CTCN PAM
cuaauccuacagcuuacugc

SEQ ID NO: 6853 - RNA, 20 nt, Artificial Sequence
  spacer sequence CTCN PAM
gauggugucuagccgugcag

SEQ ID NO: 6854 - RNA, 20 nt, Artificial Sequence
  spacer sequence CTCN PAM
gucuuacccugucccucgga

SEQ ID NO: 6855 - RNA, 20 nt, Artificial Sequence
  spacer sequence CTCN PAM
ugcucaccucccaguuggcc

SEQ ID NO: 6856 - RNA, 20 nt, Artificial Sequence
  spacer sequence CTCN PAM
ccucccaguuggccccacac

SEQ ID NO: 6857 - RNA, 20 nt, Artificial Sequence
  spacer sequence CTCN PAM
caguuggccccacaccaugc

SEQ ID NO: 6858 - RNA, 20 nt, Artificial Sequence
  spacer sequence CTCN PAM
gguccuggugaggccacuug

SEQ ID NO: 6859 - RNA, 20 nt, Artificial Sequence
  spacer sequence CTCN PAM
ccaggaccugagugugcaug

SEQ ID NO: 6860 - RNA, 20 nt, Artificial Sequence
  spacer sequence CTCN PAM
uaagggggcaaaagaucccu

SEQ ID NO: 6861 - RNA, 20 nt, Artificial Sequence
  spacer sequence CTCN PAM
ugggaaaggcucaugguaag

SEQ ID NO: 6862 - RNA, 20 nt, Artificial Sequence
  spacer sequence CTCN PAM
ugguaagagaacgcaccucc

SEQ ID NO: 6863 - RNA, 20 nt, Artificial Sequence
  spacer sequence CTCN PAM
uaccaugagccuuucccacg

SEQ ID NO: 6864 - RNA, 20 nt, Artificial Sequence
  spacer sequence CTCN PAM
cuggaaacagaugucuuggu

SEQ ID NO: 6865 - RNA, 20 nt, Artificial Sequence
  spacer sequence CTCN PAM
cauaaaucauucaggggagc

SEQ ID NO: 6866 - RNA, 20 nt, Artificial Sequence
  spacer sequence CTCN PAM
ccugaaugauuuaugggagg

SEQ ID NO: 6867 - RNA, 20 nt, Artificial Sequence
  spacer sequence CTCN PAM
aggccaaaagcacugccaca

SEQ ID NO: 6868 - RNA, 20 nt, Artificial Sequence
  spacer sequence CTCN PAM
agcaacuccacacuucccca

SEQ ID NO: 6869 - RNA, 20 nt, Artificial Sequence
  spacer sequence CTCN PAM
aguguggcagugcuuuuggc

SEQ ID NO: 6870 - RNA, 20 nt, Artificial Sequence
  spacer sequence CTCN PAM
acacuuccccacggcuuacu

SEQ ID NO: 6871 - RNA, 20 nt, Artificial Sequence
  spacer sequence CTCN PAM
gccugugggcagaacccugg

SEQ ID NO: 6872 - RNA, 20 nt, Artificial Sequence
  spacer sequence CTCN PAM
uccuuugccaauccuaccaa

SEQ ID NO: 6873 - RNA, 20 nt, Artificial Sequence
  spacer sequence CTCN PAM
uuugccaauccuaccaagug

SEQ ID NO: 6874 - RNA, 20 nt, Artificial Sequence
  spacer sequence CTCN PAM
augcccacccacguuggucu

SEQ ID NO: 6875 - RNA, 20 nt, Artificial Sequence
  spacer sequence CTCN PAM
uuucucccaccuuucuugga

SEQ ID NO: 6876 - RNA, 20 nt, Artificial Sequence
  spacer sequence CTCN PAM
caccuuucuuggaucaucuc

SEQ ID NO: 6877 - RNA, 20 nt, Artificial Sequence
  spacer sequence CTCN PAM
cacagaguugggggcuccag

SEQ ID NO: 6878 - RNA, 20 nt, Artificial Sequence
  spacer sequence CTCN PAM
gugugagaugauccaagaaa

SEQ ID NO: 6879 - RNA, 20 nt, Artificial Sequence
  spacer sequence CTCN PAM
aggucccauuuuuuaucuuc

SEQ ID NO: 6880 - RNA, 20 nt, Artificial Sequence
  spacer sequence CTCN PAM
gguuugggcauucucucuga

SEQ ID NO: 6881 - RNA, 20 nt, Artificial Sequence
  spacer sequence CTCN PAM
cugacucuaacuugcguugu

SEQ ID NO: 6882 - RNA, 20 nt, Artificial Sequence
  spacer sequence CTCN PAM
gacucuaacuugcguuguuu

SEQ ID NO: 6883 - RNA, 20 nt, Artificial Sequence
  spacer sequence CTCN PAM
aacuugcguuguuuguuuca

SEQ ID NO: 6884 - RNA, 20 nt, Artificial Sequence
  spacer sequence CTCN PAM
cuccacauuguauuuucugu

SEQ ID NO: 6885 - RNA, 20 nt, Artificial Sequence
  spacer sequence CTCN PAM
ccacauuguauuuucuguag

SEQ ID NO: 6886 - RNA, 20 nt, Artificial Sequence
  spacer sequence CTCN PAM
acauuguauuuucuguaguc

SEQ ID NO: 6887 - RNA, 20 nt, Artificial Sequence
  spacer sequence CTCN PAM
uucaauugcgcacuuacagu

SEQ ID NO: 6888 - RNA, 20 nt, Artificial Sequence
  spacer sequence CTCN PAM
caccuguuugccaucaaucc

SEQ ID NO: 6889 - RNA, 20 nt, Artificial Sequence
  spacer sequence CTCN PAM
ccuguuugccaucaaucccc

SEQ ID NO: 6890 - RNA, 20 nt, Artificial Sequence
  spacer sequence CTCN PAM
gaugugucuucuaucacuau

SEQ ID NO: 6891 - RNA, 20 nt, Artificial Sequence
  spacer sequence CTCN PAM
agacaaggcaaaacaauagu

SEQ ID NO: 6892 - RNA, 20 nt, Artificial Sequence
  spacer sequence CTCN PAM
aggaauaugcuaugugaaag

SEQ ID NO: 6893 - RNA, 20 nt, Artificial Sequence
  spacer sequence CTCN PAM
acacaucauaugguugcaug

SEQ ID NO: 6894 - RNA, 20 nt, Artificial Sequence
  spacer sequence CTCN PAM
uuuuagagcugaguaauauu

SEQ ID NO: 6895 - RNA, 20 nt, Artificial Sequence
  spacer sequence CTCN PAM
aaaaagagcugaaguacuga

SEQ ID NO: 6896 - RNA, 20 nt, Artificial Sequence
  spacer sequence CTCN PAM
gcucuaaaaagagcugaagu

SEQ ID NO: 6897 - RNA, 20 nt, Artificial Sequence
  spacer sequence CTCN PAM
uuuccccugggaauauagcu

SEQ ID NO: 6898 - RNA, 20 nt, Artificial Sequence
  spacer sequence CTCN PAM
gcaauuuaucugcuagcuau

SEQ ID NO: 6899 - RNA, 20 nt, Artificial Sequence
  spacer sequence CTCN PAM
aaugaucaaaauuaaaaaga

SEQ ID NO: 6900 - RNA, 20 nt, Artificial Sequence
  spacer sequence CTCN PAM
uugugguuuuaauuugcauu

SEQ ID NO: 6901 - RNA, 20 nt, Artificial Sequence
  spacer sequence CTCN PAM
uuuucauuguguugcauuga

SEQ ID NO: 6902 - RNA, 20 nt, Artificial Sequence
  spacer sequence CTCN PAM
aaagucaauaguaagaaauc

SEQ ID NO: 6903 - RNA, 20 nt, Artificial Sequence
  spacer sequence CTCN PAM
caaaagucaauaguaagaaa

SEQ ID NO: 6904 - RNA, 20 nt, Artificial Sequence
  spacer sequence CTCN PAM
cagucugucuugucuuuuua

SEQ ID NO: 6905 - RNA, 20 nt, Artificial Sequence
  spacer sequence CTCN PAM
uuugaugaaaagauugcccu

SEQ ID NO: 6906 - RNA, 20 nt, Artificial Sequence
  spacer sequence CTCN PAM
ggacuuuguucuauugaucc

SEQ ID NO: 6907 - RNA, 20 nt, Artificial Sequence
  spacer sequence CTCN PAM
aaauguguuuuucuuuuuca

SEQ ID NO: 6908 - RNA, 20 nt, Artificial Sequence
  spacer sequence CTCN PAM
cccuguuauguuuuaagcuc

SEQ ID NO: 6909 - RNA, 20 nt, Artificial Sequence
  spacer sequence CTCN PAM
cuguuauguuuuaagcuccu

SEQ ID NO: 6910 - RNA, 20 nt, Artificial Sequence
  spacer sequence CTCN PAM
uggaggacaaggaaccuauc

SEQ ID NO: 6911 - RNA, 20 nt, Artificial Sequence
  spacer sequence CTCN PAM
aggagcuuaaaacauaacag

SEQ ID NO: 6912 - RNA, 20 nt, Artificial Sequence
  spacer sequence CTCN PAM
ggaaccauggggaaaugcaa

SEQ ID NO: 6913 - RNA, 20 nt, Artificial Sequence
  spacer sequence CTCN PAM
ggcaaugcggcugugauugg

SEQ ID NO: 6914 - RNA, 20 nt, Artificial Sequence
  spacer sequence CTCN PAM
ccgcccccaaucacagccgc

SEQ ID NO: 6915 - RNA, 20 nt, Artificial Sequence
  spacer sequence CTCN PAM
cuuggcuuucacccuccccg

SEQ ID NO: 6916 - RNA, 20 nt, Artificial Sequence
  spacer sequence CTCN PAM
cgcuuggcuuucacccuccc

SEQ ID NO: 6917 - RNA, 20 nt, Artificial Sequence
  spacer sequence CTCN PAM
cucgcuuggcuuucacccuc

SEQ ID NO: 6918 - RNA, 20 nt, Artificial Sequence
  spacer sequence CTCN PAM
acaccauuccuugccuucug

SEQ ID NO: 6919 - RNA, 20 nt, Artificial Sequence
  spacer sequence CTCN PAM
cgucugccugugacucuaca

SEQ ID NO: 6920 - RNA, 20 nt, Artificial Sequence
  spacer sequence CTCN PAM
uggcuggugucauguauucu

SEQ ID NO: 6921 - RNA, 20 nt, Artificial Sequence
  spacer sequence CTCN PAM
ggagaggccaguuuucuucu

SEQ ID NO: 6922 - RNA, 20 nt, Artificial Sequence
  spacer sequence CTCN PAM
cgagucaccacuuccuugug

SEQ ID NO: 6923 - RNA, 20 nt, Artificial Sequence
  spacer sequence CTCN PAM
cccgagucaccacuuccuug

SEQ ID NO: 6924 - RNA, 20 nt, Artificial Sequence
  spacer sequence CTCN PAM
uagccaaggucacuguuuca

SEQ ID NO: 6925 - RNA, 20 nt, Artificial Sequence
  spacer sequence CTCN PAM
aguucuggggaucuugcaac

SEQ ID NO: 6926 - RNA, 20 nt, Artificial Sequence
  spacer sequence CTCN PAM
aggaacccuagcuuguccua

SEQ ID NO: 6927 - RNA, 20 nt, Artificial Sequence
  spacer sequence CTCN PAM
uucuagaaggaagcuaaagu

SEQ ID NO: 6928 - RNA, 20 nt, Artificial Sequence
  spacer sequence CTCN PAM
gagaucaucuaguccacauu

SEQ ID NO: 6929 - RNA, 20 nt, Artificial Sequence
  spacer sequence CTCN PAM
gagaccuuucuagcucuuuc

SEQ ID NO: 6930 - RNA, 20 nt, Artificial Sequence
  spacer sequence CTCN PAM
ucuauaaaauguggacuaga

SEQ ID NO: 6931 - RNA, 20 nt, Artificial Sequence
  spacer sequence CTCN PAM
gucuuuccaguucuuguuuu

SEQ ID NO: 6932 - RNA, 20 nt, Artificial Sequence
  spacer sequence CTCN PAM
gugaccucagucuuuccagu

SEQ ID NO: 6933 - RNA, 20 nt, Artificial Sequence
  spacer sequence CTCN PAM
aggcuguugaccuuuuggcu

SEQ ID NO: 6934 - RNA, 20 nt, Artificial Sequence
  spacer sequence CTCN PAM
ccccacuuuuuuuuuuuuuu

SEQ ID NO: 6935 - RNA, 20 nt, Artificial Sequence
  spacer sequence CTCN PAM
ccugucugucaccagagcca

SEQ ID NO: 6936 - RNA, 20 nt, Artificial Sequence
  spacer sequence CTCN PAM
ugucugucaccagagccauu

SEQ ID NO: 6937 - RNA, 20 nt, Artificial Sequence
  spacer sequence CTCN PAM
ggugacagacaggagaggac

SEQ ID NO: 6938 - RNA, 20 nt, Artificial Sequence
  spacer sequence CTCN PAM
aguucugugacguaaauggc

SEQ ID NO: 6939 - RNA, 20 nt, Artificial Sequence
  spacer sequence CTCN PAM
uagaagucaaucaguuggcu

SEQ ID NO: 6940 - RNA, 20 nt, Artificial Sequence
  spacer sequence CTCN PAM
uccuuuccugugcaucuauc

SEQ ID NO: 6941 - RNA, 20 nt, Artificial Sequence
  spacer sequence CTCN PAM
uuuccugugcaucuaucaac

SEQ ID NO: 6942 - RNA, 20 nt, Artificial Sequence
  spacer sequence CTCN PAM
ucaaaauccccucuauaacc

SEQ ID NO: 6943 - RNA, 20 nt, Artificial Sequence
  spacer sequence CTCN PAM
auaaccagacucccuuuccc

SEQ ID NO: 6944 - RNA, 20 nt, Artificial Sequence
  spacer sequence CTCN PAM
cuuucccugccauuugcuuc

SEQ ID NO: 6945 - RNA, 20 nt, Artificial Sequence
  spacer sequence CTCN PAM
ccaaaauaccugggaaggcc

SEQ ID NO: 6946 - RNA, 20 nt, Artificial Sequence
  spacer sequence CTCN PAM
agaaacaaacuuuuucugaa

SEQ ID NO: 6947 - RNA, 20 nt, Artificial Sequence
  spacer sequence CTCN PAM
cugccagaagcaggaauuac

SEQ ID NO: 6948 - RNA, 20 nt, Artificial Sequence
  spacer sequence CTCN PAM
uuuguaauuccugcuucugg

SEQ ID NO: 6949 - RNA, 20 nt, Artificial Sequence
  spacer sequence CTCN PAM
gguuccuggaagacucaaaa

SEQ ID NO: 6950 - RNA, 20 nt, Artificial Sequence
  spacer sequence CTCN PAM
aaacucagugagccuggaac

SEQ ID NO: 6951 - RNA, 20 nt, Artificial Sequence
  spacer sequence CTCN PAM
gugagccuggaacugacccu

SEQ ID NO: 6952 - RNA, 20 nt, Artificial Sequence
  spacer sequence CTCN PAM
cugaguuuugagucuuccag

SEQ ID NO: 6953 - RNA, 20 nt, Artificial Sequence
  spacer sequence CTCN PAM
gcuuaucucuccugcuuuga

SEQ ID NO: 6954 - RNA, 20 nt, Artificial Sequence
  spacer sequence CTCN PAM
ccugcuuugagcaauuuaau

SEQ ID NO: 6955 - RNA, 20 nt, Artificial Sequence
  spacer sequence CTCN PAM
ugcuuugagcaauuuaauua

SEQ ID NO: 6956 - RNA, 20 nt, Artificial Sequence
  spacer sequence CTCN PAM
aagcaggagagauaagcaga

SEQ ID NO: 6957 - RNA, 20 nt, Artificial Sequence
  spacer sequence CTCN PAM
cucuagccaccucccccacc

SEQ ID NO: 6958 - RNA, 20 nt, Artificial Sequence
  spacer sequence CTCN PAM
agccaccucccccacccacg

SEQ ID NO: 6959 - RNA, 20 nt, Artificial Sequence
  spacer sequence CTCN PAM
cccacccacguccuaaucuu

SEQ ID NO: 6960 - RNA, 20 nt, Artificial Sequence
  spacer sequence CTCN PAM
ccccuccaaggagaaccaua

SEQ ID NO: 6961 - RNA, 20 nt, Artificial Sequence
  spacer sequence CTCN PAM
aaggagaaccauacugucuu

SEQ ID NO: 6962 - RNA, 20 nt, Artificial Sequence
  spacer sequence CTCN PAM
uuggaggggggaggugggaa

SEQ ID NO: 6963 - RNA, 20 nt, Artificial Sequence
  spacer sequence CTCN PAM
aagacaagacaguaugguuc

SEQ ID NO: 6964 - RNA, 20 nt, Artificial Sequence
  spacer sequence CTCN PAM
auuugcauggaaauguggca

SEQ ID NO: 6965 - RNA, 20 nt, Artificial Sequence
  spacer sequence CTCN PAM
ggacacucaauuugcaugga

SEQ ID NO: 6966 - RNA, 20 nt, Artificial Sequence
  spacer sequence CTCN PAM
auggcugaguugcuggagua

SEQ ID NO: 6967 - RNA, 20 nt, Artificial Sequence
  spacer sequence CTCN PAM
gccauggagaaaguccgggc

SEQ ID NO: 6968 - RNA, 20 nt, Artificial Sequence
  spacer sequence CTCN PAM
agcaacucagccauggagaa

SEQ ID NO: 6969 - RNA, 20 nt, Artificial Sequence
  spacer sequence CTCN PAM
ucugugaaaacuauggaugc

SEQ ID NO: 6970 - RNA, 20 nt, Artificial Sequence
  spacer sequence CTCN PAM
auuaccuacaaauggcaucc

SEQ ID NO: 6971 - RNA, 20 nt, Artificial Sequence
  spacer sequence CTCN PAM
gcauauuuuucuaauuauca

SEQ ID NO: 6972 - RNA, 20 nt, Artificial Sequence
  spacer sequence CTCN PAM
gucuccaaaauaugccccca

SEQ ID NO: 6973 - RNA, 20 nt, Artificial Sequence
  spacer sequence CTCN PAM
aaaauaugcccccauccuag

SEQ ID NO: 6974 - RNA, 20 nt, Artificial Sequence
  spacer sequence CTCN PAM
aggggcccccagccacuagc

SEQ ID NO: 6975 - RNA, 20 nt, Artificial Sequence
  spacer sequence CTCN PAM
auggcuaguggcugggggcc

SEQ ID NO: 6976 - RNA, 20 nt, Artificial Sequence
  spacer sequence CTCN PAM
guuccucaauggcuaguggc

SEQ ID NO: 6977 - RNA, 20 nt, Artificial Sequence
  spacer sequence CTCN PAM
auccaacaacccacaaggaa

SEQ ID NO: 6978 - RNA, 20 nt, Artificial Sequence
  spacer sequence CTCN PAM
gggauguuuucuccauaaga

SEQ ID NO: 6979 - RNA, 20 nt, Artificial Sequence
  spacer sequence CTCN PAM
auaagauaaucagauuuuaa

SEQ ID NO: 6980 - RNA, 20 nt, Artificial Sequence
  spacer sequence CTCN PAM
cagaagacaaugggugggcg

SEQ ID NO: 6981 - RNA, 20 nt, Artificial Sequence
  spacer sequence CTCN PAM
ccaucgcccacccauugucu

SEQ ID NO: 6982 - RNA, 20 nt, Artificial Sequence
  spacer sequence CTCN PAM
cuucucaccaucgcccaccc

SEQ ID NO: 6983 - RNA, 20 nt, Artificial Sequence
  spacer sequence CTCN PAM
acucacuucucaccaucgcc

SEQ ID NO: 6984 - RNA, 20 nt, Artificial Sequence
  spacer sequence CTCN PAM
aaaagauagcuacuaacaua

SEQ ID NO: 6985 - RNA, 20 nt, Artificial Sequence
  spacer sequence CTCN PAM
cucacaauuugucuacaagg

SEQ ID NO: 6986 - RNA, 20 nt, Artificial Sequence
  spacer sequence CTCN PAM
caauuugucuacaaggaaau

SEQ ID NO: 6987 - RNA, 20 nt, Artificial Sequence
  spacer sequence CTCN PAM
aaagaaugcaaccauuuguc

SEQ ID NO: 6988 - RNA, 20 nt, Artificial Sequence
  spacer sequence CTCN PAM
ucuguaccuaugaccuggaa

SEQ ID NO: 6989 - RNA, 20 nt, Artificial Sequence
  spacer sequence CTCN PAM
cagcaggaaggggguuucca

SEQ ID NO: 6990 - RNA, 20 nt, Artificial Sequence
  spacer sequence CTCN PAM
uccuuuuuuacggcugcaua

SEQ ID NO: 6991 - RNA, 20 nt, Artificial Sequence
  spacer sequence CTCN PAM
aaaauugguaguaguuguua

SEQ ID NO: 6992 - RNA, 20 nt, Artificial Sequence
  spacer sequence CTCN PAM
ccacaacccuggggaaaaaa

SEQ ID NO: 6993 - RNA, 20 nt, Artificial Sequence
  spacer sequence CTCN PAM
ggauuuuuuuccccaggguu

SEQ ID NO: 6994 - RNA, 20 nt, Artificial Sequence
  spacer sequence CTCN PAM
cuggauuuuuuuccccaggg

SEQ ID NO: 6995 - RNA, 20 nt, Artificial Sequence
  spacer sequence CTCN PAM
gacaugugcuaacugccuac

SEQ ID NO: 6996 - RNA, 20 nt, Artificial Sequence
  spacer sequence CTCN PAM
gcucugacaugugcuaacug

SEQ ID NO: 6997 - RNA, 20 nt, Artificial Sequence
  spacer sequence CTCN PAM
ucucucuuguauuugcuuau

SEQ ID NO: 6998 - RNA, 20 nt, Artificial Sequence
  spacer sequence CTCN PAM
acaauggaauauuaugcagc

SEQ ID NO: 6999 - RNA, 20 nt, Artificial Sequence
  spacer sequence CTCN PAM
aauuauuuucuuaggcuaga

SEQ ID NO: 7000 - RNA, 20 nt, Artificial Sequence
  spacer sequence CTCN PAM
agccuaagaaaauaauugga

SEQ ID NO: 7001 - RNA, 20 nt, Artificial Sequence
  spacer sequence CTCN PAM
agugcucuagccuaagaaaa

SEQ ID NO: 7002 - RNA, 20 nt, Artificial Sequence
  spacer sequence CTCN PAM
ucuagugcucuagccuaaga

SEQ ID NO: 7003 - RNA, 20 nt, Artificial Sequence
  spacer sequence CTCN PAM
cgaugccaguugccaaauug

SEQ ID NO: 7004 - RNA, 20 nt, Artificial Sequence
  spacer sequence CTCN PAM
uugggaauaugaauugguac

SEQ ID NO: 7005 - RNA, 20 nt, Artificial Sequence
  spacer sequence CTCN PAM
cacuuuaaaacacccuuucc

SEQ ID NO: 7006 - RNA, 20 nt, Artificial Sequence
  spacer sequence CTCN PAM
uugaguuccgcacaaaggcc

SEQ ID NO: 7007 - RNA, 20 nt, Artificial Sequence
  spacer sequence CTCN PAM
aggaguuguuccuuuaaaca

SEQ ID NO: 7008 - RNA, 20 nt, Artificial Sequence
  spacer sequence CTCN PAM
gaaccccugugaaccauggg

SEQ ID NO: 7009 - RNA, 20 nt, Artificial Sequence
  spacer sequence CTCN PAM
gcccaugguucacagggguu

SEQ ID NO: 7010 - RNA, 20 nt, Artificial Sequence
  spacer sequence CTCN PAM
ugguuguaggaggagauuca

SEQ ID NO: 7011 - RNA, 20 nt, Artificial Sequence
  spacer sequence CTCN PAM
uacaaccaugaguaaaauga

SEQ ID NO: 7012 - RNA, 20 nt, Artificial Sequence
  spacer sequence CTCN PAM
uccuacaaccaugaguaaaa

SEQ ID NO: 7013 - RNA, 20 nt, Artificial Sequence
  spacer sequence CTCN PAM
agaaaggaccauacacguuu

SEQ ID NO: 7014 - RNA, 20 nt, Artificial Sequence
  spacer sequence CTCN PAM
aaguggauaaggauauuuuu

SEQ ID NO: 7015 - RNA, 20 nt, Artificial Sequence
  spacer sequence CTCN PAM
uuguguauguguauagaaau

SEQ ID NO: 7016 - RNA, 20 nt, Artificial Sequence
  spacer sequence CTCN PAM
uucucuuuguguauguguau

SEQ ID NO: 7017 - RNA, 20 nt, Artificial Sequence
  spacer sequence CTCN PAM
cuccuucucuuuguguaugu

SEQ ID NO: 7018 - RNA, 20 nt, Artificial Sequence
  spacer sequence CTCN PAM
gcucccuccuucucuuugug

SEQ ID NO: 7019 - RNA, 20 nt, Artificial Sequence
  spacer sequence CTCN PAM
uucuggguggcuaaauauuu

SEQ ID NO: 7020 - RNA, 20 nt, Artificial Sequence
  spacer sequence CTCN PAM
ucuuucuggguggcuaaaua

SEQ ID NO: 7021 - RNA, 20 nt, Artificial Sequence
  spacer sequence CTCN PAM
agaugguaccuaaggccaaa

SEQ ID NO: 7022 - RNA, 20 nt, Artificial Sequence
  spacer sequence CTCN PAM
accccaauuuguuaugcauu

SEQ ID NO: 7023 - RNA, 20 nt, Artificial Sequence
  spacer sequence CTCN PAM
uccaauucacaaaggaaaau

SEQ ID NO: 7024 - RNA, 20 nt, Artificial Sequence
  spacer sequence CTCN PAM
cucuuccaauucacaaagga

SEQ ID NO: 7025 - RNA, 20 nt, Artificial Sequence
  spacer sequence CTCN PAM
cccucuuccaauucacaaag

SEQ ID NO: 7026 - RNA, 20 nt, Artificial Sequence
  spacer sequence CTCN PAM
cucccucuuccaauucacaa

SEQ ID NO: 7027 - RNA, 20 nt, Artificial Sequence
  spacer sequence CTCN PAM
guaguuacuuggauuuucac

SEQ ID NO: 7028 - RNA, 20 nt, Artificial Sequence
  spacer sequence CTCN PAM
aaaaaccauaccacgcaggc

SEQ ID NO: 7029 - RNA, 20 nt, Artificial Sequence
  spacer sequence CTCN PAM
gacugaugcagggcauuuca

SEQ ID NO: 7030 - RNA, 20 nt, Artificial Sequence
  spacer sequence CTCN PAM
cugacugaugcagggcauuu

SEQ ID NO: 7031 - RNA, 20 nt, Artificial Sequence
  spacer sequence CTCN PAM
aaggccuaacacaauaaacu

SEQ ID NO: 7032 - RNA, 20 nt, Artificial Sequence
  spacer sequence CTCN PAM
cccagccccuaugccugugu

SEQ ID NO: 7033 - RNA, 20 nt, Artificial Sequence
  spacer sequence CTCN PAM
ggcauaccagcauggcugcc

SEQ ID NO: 7034 - RNA, 20 nt, Artificial Sequence
  spacer sequence CTCN PAM
agagauaaacauggacaucc

SEQ ID NO: 7035 - RNA, 20 nt, Artificial Sequence
  spacer sequence CTCN PAM
ugaggcccauuaauuugguu

SEQ ID NO: 7036 - RNA, 20 nt, Artificial Sequence
  spacer sequence CTCN PAM
uaggguuuuggauggauguc

SEQ ID NO: 7037 - RNA, 20 nt, Artificial Sequence
  spacer sequence CTCN PAM
gcuuugccacugguggugac

SEQ ID NO: 7038 - RNA, 20 nt, Artificial Sequence
  spacer sequence CTCN PAM
ccggggguggcuguuguugc

SEQ ID NO: 7039 - RNA, 20 nt, Artificial Sequence
  spacer sequence CTCN PAM
aagugguauuguguggcuuc

SEQ ID NO: 7040 - RNA, 20 nt, Artificial Sequence
  spacer sequence CTCN PAM
accccacaacuuccaaccuc

SEQ ID NO: 7041 - RNA, 20 nt, Artificial Sequence
  spacer sequence CTCN PAM
ccuguccaacugcagagcac

SEQ ID NO: 7042 - RNA, 20 nt, Artificial Sequence
  spacer sequence CTCN PAM
uguccaacugcagagcacua

SEQ ID NO: 7043 - RNA, 20 nt, Artificial Sequence
  spacer sequence CTCN PAM
uuaaauaaaguuuauuggca

SEQ ID NO: 7044 - RNA, 20 nt, Artificial Sequence
  spacer sequence CTCN PAM
gaaguugccaauaaacuuua

SEQ ID NO: 7045 - RNA, 20 nt, Artificial Sequence
  spacer sequence CTCN PAM
gcuucucagaaguugccaau

SEQ ID NO: 7046 - RNA, 20 nt, Artificial Sequence
  spacer sequence CTCN PAM
gaaaaccaaccugacaccga

SEQ ID NO: 7047 - RNA, 20 nt, Artificial Sequence
  spacer sequence CTCN PAM
gugucagguugguuuucaga

SEQ ID NO: 7048 - RNA, 20 nt, Artificial Sequence
  spacer sequence CTCN PAM
ucaaccaaugaaacaccugc

SEQ ID NO: 7049 - RNA, 20 nt, Artificial Sequence
  spacer sequence CTCN PAM
uuucugugcgugaucaaaac

SEQ ID NO: 7050 - RNA, 20 nt, Artificial Sequence
  spacer sequence CTCN PAM
ugggaacacagggcuuuuaa

SEQ ID NO: 7051 - RNA, 20 nt, Artificial Sequence
  spacer sequence CTCN PAM
acuuuuaggacuccucucau

SEQ ID NO: 7052 - RNA, 20 nt, Artificial Sequence
  spacer sequence CTCN PAM
ucucauuauuauuucaucaa

SEQ ID NO: 7053 - RNA, 20 nt, Artificial Sequence
  spacer sequence CTCN PAM
cauuauuauuucaucaauua

SEQ ID NO: 7054 - RNA, 20 nt, Artificial Sequence
  spacer sequence CTCN PAM
uuauuauuucaucaauuauu

SEQ ID NO: 7055 - RNA, 20 nt, Artificial Sequence
  spacer sequence CTCN PAM
uugacagcaauuuccacaug

SEQ ID NO: 7056 - RNA, 20 nt, Artificial Sequence
  spacer sequence CTCN PAM
ccccucccaguucuccuucu

SEQ ID NO: 7057 - RNA, 20 nt, Artificial Sequence
  spacer sequence CTCN PAM
caguucuccuucuggacuua

SEQ ID NO: 7058 - RNA, 20 nt, Artificial Sequence
  spacer sequence CTCN PAM
uucuggacuuagagcuaguc

SEQ ID NO: 7059 - RNA, 20 nt, Artificial Sequence
  spacer sequence CTCN PAM
aaguccagaaggagaacugg

SEQ ID NO: 7060 - RNA, 20 nt, Artificial Sequence
  spacer sequence CTCN PAM
cacguucaucugccuuaaua

SEQ ID NO: 7061 - RNA, 20 nt, Artificial Sequence
  spacer sequence CTCN PAM
ucacuauuugaggguugaaa

SEQ ID NO: 7062 - RNA, 20 nt, Artificial Sequence
  spacer sequence CTCN PAM
aauagugaagagggugguuu

SEQ ID NO: 7063 - RNA, 20 nt, Artificial Sequence
  spacer sequence CTCN PAM
agguaguuauaauugaaccu

SEQ ID NO: 7064 - RNA, 20 nt, Artificial Sequence
  spacer sequence CTCN PAM
aagcaggugaccuugcaaag

SEQ ID NO: 7065 - RNA, 20 nt, Artificial Sequence
  spacer sequence CTCN PAM
aauuuaccucugcaucucac

SEQ ID NO: 7066 - RNA, 20 nt, Artificial Sequence
  spacer sequence CTCN PAM
gcaucucacugcccccagac

SEQ ID NO: 7067 - RNA, 20 nt, Artificial Sequence
  spacer sequence CTCN PAM
cugcccccagacacaaguuc

SEQ ID NO: 7068 - RNA, 20 nt, Artificial Sequence
  spacer sequence CTCN PAM
ucucuauucaugguuccugc

SEQ ID NO: 7069 - RNA, 20 nt, Artificial Sequence
  spacer sequence CTCN PAM
auucaugguuccugcaaauc

SEQ ID NO: 7070 - RNA, 20 nt, Artificial Sequence
  spacer sequence CTCN PAM
gagacccagcuugagauccu

SEQ ID NO: 7071 - RNA, 20 nt, Artificial Sequence
  spacer sequence CTCN PAM
gagcacagaaaagauuugca

SEQ ID NO: 7072 - RNA, 20 nt, Artificial Sequence
  spacer sequence CTCN PAM
agcugggucucagagcacag

SEQ ID NO: 7073 - RNA, 20 nt, Artificial Sequence
  spacer sequence CTCN PAM
caagacauggugccaagccu

SEQ ID NO: 7074 - RNA, 20 nt, Artificial Sequence
  spacer sequence CTCN PAM
agacauggugccaagccucu

SEQ ID NO: 7075 - RNA, 20 nt, Artificial Sequence
  spacer sequence CTCN PAM
ccagcugacauauucucccu

SEQ ID NO: 7076 - RNA, 20 nt, Artificial Sequence
  spacer sequence CTCN PAM
agcugacauauucucccuuc

SEQ ID NO: 7077 - RNA, 20 nt, Artificial Sequence
  spacer sequence CTCN PAM
cuucccugaauucauauagc

SEQ ID NO: 7078 - RNA, 20 nt, Artificial Sequence
  spacer sequence CTCN PAM
uaaauuagcacuuaauuaca

SEQ ID NO: 7079 - RNA, 20 nt, Artificial Sequence
  spacer sequence CTCN PAM
aaggggaagaaucagacaau

SEQ ID NO: 7080 - RNA, 20 nt, Artificial Sequence
  spacer sequence CTCN PAM
gugugcucuaaggggaagaa

SEQ ID NO: 7081 - RNA, 20 nt, Artificial Sequence
  spacer sequence CTCN PAM
acauggggcacucugugugc

SEQ ID NO: 7082 - RNA, 20 nt, Artificial Sequence
  spacer sequence CTCN PAM
ucaaacaugcugccuccaca

SEQ ID NO: 7083 - RNA, 20 nt, Artificial Sequence
  spacer sequence CTCN PAM
auuaauauuucuuaaauuaa

SEQ ID NO: 7084 - RNA, 20 nt, Artificial Sequence
  spacer sequence CTCN PAM
uauuaauuaauuaauuuaag

SEQ ID NO: 7085 - RNA, 20 nt, Artificial Sequence
  spacer sequence CTCN PAM
aaaauccaugcucuuauuaa

SEQ ID NO: 7086 - RNA, 20 nt, Artificial Sequence
  spacer sequence CTCN PAM
auaaaggucaucuagcuagu

SEQ ID NO: 7087 - RNA, 20 nt, Artificial Sequence
  spacer sequence CTCN PAM
aaugucuuuaucuggaaaau

SEQ ID NO: 7088 - RNA, 20 nt, Artificial Sequence
  spacer sequence CTCN PAM
aagccauguagcauuauugc

SEQ ID NO: 7089 - RNA, 20 nt, Artificial Sequence
  spacer sequence CTCN PAM
caguugcucaaguggagagc

SEQ ID NO: 7090 - RNA, 20 nt, Artificial Sequence
  spacer sequence CTCN PAM
aguggagagcauguucuuua

SEQ ID NO: 7091 - RNA, 20 nt, Artificial Sequence
  spacer sequence CTCN PAM
acuugagcaacugugaggug

SEQ ID NO: 7092 - RNA, 20 nt, Artificial Sequence
  spacer sequence CTCN PAM
ccacuugagcaacugugagg

SEQ ID NO: 7093 - RNA, 20 nt, Artificial Sequence
  spacer sequence CTCN PAM
gugggcacuuggcaggggua

SEQ ID NO: 7094 - RNA, 20 nt, Artificial Sequence
  spacer sequence CTCN PAM
ggaauacaaacugguuuaga

SEQ ID NO: 7095 - RNA, 20 nt, Artificial Sequence
  spacer sequence CTCN PAM
acauuucccaaauuguauua

SEQ ID NO: 7096 - RNA, 20 nt, Artificial Sequence
  spacer sequence CTCN PAM
cagcuguaaucccagcacuu

SEQ ID NO: 7097 - RNA, 20 nt, Artificial Sequence
  spacer sequence CTCN PAM
caaagugcugggauuacagc

SEQ ID NO: 7098 - RNA, 20 nt, Artificial Sequence
  spacer sequence CTCN PAM
gccucccaaagugcugggau

SEQ ID NO: 7099 - RNA, 20 nt, Artificial Sequence
  spacer sequence CTCN PAM
gaugauccgcccgccucugc

SEQ ID NO: 7100 - RNA, 20 nt, Artificial Sequence
  spacer sequence CTCN PAM
acuaaaaaauacaaaaauua

SEQ ID NO: 7101 - RNA, 20 nt, Artificial Sequence
  spacer sequence CTCN PAM
ggaggcugagacaggagaau

SEQ ID NO: 7102 - RNA, 20 nt, Artificial Sequence
  spacer sequence CTCN PAM
cgaguagcuaugauuuuugg

SEQ ID NO: 7103 - RNA, 20 nt, Artificial Sequence
  spacer sequence CTCN PAM
gccucccgaguagcuaugau

SEQ ID NO: 7104 - RNA, 20 nt, Artificial Sequence
  spacer sequence CTCN PAM
ugucucagccucccgaguag

SEQ ID NO: 7105 - RNA, 20 nt, Artificial Sequence
  spacer sequence CTCN PAM
cagguucaagcgauucuccu

SEQ ID NO: 7106 - RNA, 20 nt, Artificial Sequence
  spacer sequence CTCN PAM
gccucccagguucaagcgau

SEQ ID NO: 7107 - RNA, 20 nt, Artificial Sequence
  spacer sequence CTCN PAM
cugcaaccucugccucccag

SEQ ID NO: 7108 - RNA, 20 nt, Artificial Sequence
  spacer sequence CTCN PAM
gcucacugcaaccucugccu

SEQ ID NO: 7109 - RNA, 20 nt, Artificial Sequence
  spacer sequence CTCN PAM
aauuuaggcaacagaguaag

SEQ ID NO: 7110 - RNA, 20 nt, Artificial Sequence
  spacer sequence CTCN PAM
guugccuaaauuggagugca

SEQ ID NO: 7111 - RNA, 20 nt, Artificial Sequence
  spacer sequence CTCN PAM
gucucaaaaauaaaauaaac

SEQ ID NO: 7112 - RNA, 20 nt, Artificial Sequence
  spacer sequence CTCN PAM
aaaauaaaauaaacuaaaau

SEQ ID NO: 7113 - RNA, 20 nt, Artificial Sequence
  spacer sequence CTCN PAM
auuuguguuuguaaacugaa

SEQ ID NO: 7114 - RNA, 20 nt, Artificial Sequence
  spacer sequence CTCN PAM
gcauucuaagcuauauuuca

SEQ ID NO: 7115 - RNA, 20 nt, Artificial Sequence
  spacer sequence CTCN PAM
gccucguaaauacucccagc

SEQ ID NO: 7116 - RNA, 20 nt, Artificial Sequence
  spacer sequence CTCN PAM
uaaauacucccagccuaaug

SEQ ID NO: 7117 - RNA, 20 nt, Artificial Sequence
  spacer sequence CTCN PAM
cagccuaaugacucaaugcc

SEQ ID NO: 7118 - RNA, 20 nt, Artificial Sequence
  spacer sequence CTCN PAM
augcccccaaacagccccug

SEQ ID NO: 7119 - RNA, 20 nt, Artificial Sequence
  spacer sequence CTCN PAM
ugaccaaguugggacccugc

SEQ ID NO: 7120 - RNA, 20 nt, Artificial Sequence
  spacer sequence CTCN PAM
uuccccugacuggccugcac

SEQ ID NO: 7121 - RNA, 20 nt, Artificial Sequence
  spacer sequence CTCN PAM
uucucucucaccacagauug

SEQ ID NO: 7122 - RNA, 20 nt, Artificial Sequence
  spacer sequence CTCN PAM
cucaccacagauugcucaug

SEQ ID NO: 7123 - RNA, 20 nt, Artificial Sequence
  spacer sequence CTCN PAM
caccacagauugcucauggc

SEQ ID NO: 7124 - RNA, 20 nt, Artificial Sequence
  spacer sequence CTCN PAM
ccacagauugcucauggcag

SEQ ID NO: 7125 - RNA, 20 nt, Artificial Sequence
  spacer sequence CTCN PAM
uggcaggugacuccucggug

SEQ ID NO: 7126 - RNA, 20 nt, Artificial Sequence
  spacer sequence CTCN PAM
ucggugauucagggaugccu

SEQ ID NO: 7127 - RNA, 20 nt, Artificial Sequence
  spacer sequence CTCN PAM
gugauucagggaugccuccu

SEQ ID NO: 7128 - RNA, 20 nt, Artificial Sequence
  spacer sequence CTCN PAM
ugugccucugccugguggcu

SEQ ID NO: 7129 - RNA, 20 nt, Artificial Sequence
  spacer sequence CTCN PAM
gccugguggcuucguaccug

SEQ ID NO: 7130 - RNA, 20 nt, Artificial Sequence
  spacer sequence CTCN PAM
ggguggccagguacgaagcc

SEQ ID NO: 7131 - RNA, 20 nt, Artificial Sequence
  spacer sequence CTCN PAM
cagacgccccuccuggguuc

SEQ ID NO: 7132 - RNA, 20 nt, Artificial Sequence
  spacer sequence CTCN PAM
uggguucucuuccagugaga

SEQ ID NO: 7133 - RNA, 20 nt, Artificial Sequence
  spacer sequence CTCN PAM
uccagugagaguccuguaga

SEQ ID NO: 7134 - RNA, 20 nt, Artificial Sequence
  spacer sequence CTCN PAM
cuggaagagaacccaggagg

SEQ ID NO: 7135 - RNA, 20 nt, Artificial Sequence
  spacer sequence CTCN PAM
cacuggaagagaacccagga

SEQ ID NO: 7136 - RNA, 20 nt, Artificial Sequence
  spacer sequence CTCN PAM
uagauucuacaggacucuca

SEQ ID NO: 7137 - RNA, 20 nt, Artificial Sequence
  spacer sequence CTCN PAM
ugcuacagaugagaaaacua

SEQ ID NO: 7138 - RNA, 20 nt, Artificial Sequence
  spacer sequence CTCN PAM
ucuguagcaggagccaacca

SEQ ID NO: 7139 - RNA, 20 nt, Artificial Sequence
  spacer sequence CTCN PAM
gggucuuaguuuucucaucu

SEQ ID NO: 7140 - RNA, 20 nt, Artificial Sequence
  spacer sequence CTCN PAM
ucucugggucuuaguuuucu

SEQ ID NO: 7141 - RNA, 20 nt, Artificial Sequence
  spacer sequence CTCN PAM
uucaguucacguucuucucu

SEQ ID NO: 7142 - RNA, 20 nt, Artificial Sequence
  spacer sequence CTCN PAM
aauccuugcuccuucaguuc

SEQ ID NO: 7143 - RNA, 20 nt, Artificial Sequence
  spacer sequence CTCN PAM
cgggcucuaauccuugcucc

SEQ ID NO: 7144 - RNA, 20 nt, Artificial Sequence
  spacer sequence CTCN PAM
gcagcccccucccugagaca

SEQ ID NO: 7145 - RNA, 20 nt, Artificial Sequence
  spacer sequence CTCN PAM
cugagacacuccugucagcu

SEQ ID NO: 7146 - RNA, 20 nt, Artificial Sequence
  spacer sequence CTCN PAM
gggagggggcugcugagguu

SEQ ID NO: 7147 - RNA, 20 nt, Artificial Sequence
  spacer sequence CTCN PAM
ugucagcucacauggggagu

SEQ ID NO: 7148 - RNA, 20 nt, Artificial Sequence
  spacer sequence CTCN PAM
cauggggaguaggaggaguu

SEQ ID NO: 7149 - RNA, 20 nt, Artificial Sequence
  spacer sequence CTCN PAM
ccaugugagcugacaggagu

SEQ ID NO: 7150 - RNA, 20 nt, Artificial Sequence
  spacer sequence CTCN PAM
uacuccccaugugagcugac

SEQ ID NO: 7151 - RNA, 20 nt, Artificial Sequence
  spacer sequence CTCN PAM
uccuacuccccaugugagcu

SEQ ID NO: 7152 - RNA, 20 nt, Artificial Sequence
  spacer sequence CTCN PAM
cugccagcgcuccugccagc

SEQ ID NO: 7153 - RNA, 20 nt, Artificial Sequence
  spacer sequence CTCN PAM
ugccagcucgucucaucuca

SEQ ID NO: 7154 - RNA, 20 nt, Artificial Sequence
  spacer sequence CTCN PAM
ucucaucucagcucacuccc

SEQ ID NO: 7155 - RNA, 20 nt, Artificial Sequence
  spacer sequence CTCN PAM
ucucagcucacuccccgacc

SEQ ID NO: 7156 - RNA, 20 nt, Artificial Sequence
  spacer sequence CTCN PAM
gcucacuccccgaccuucca

SEQ ID NO: 7157 - RNA, 20 nt, Artificial Sequence
  spacer sequence CTCN PAM
cuccccgaccuuccauccuc

SEQ ID NO: 7158 - RNA, 20 nt, Artificial Sequence
  spacer sequence CTCN PAM
ccgaccuuccauccucucaa

SEQ ID NO: 7159 - RNA, 20 nt, Artificial Sequence
  spacer sequence CTCN PAM
caaagucagaguccuuucuu

SEQ ID NO: 7160 - RNA, 20 nt, Artificial Sequence
  spacer sequence CTCN PAM
aagucagaguccuuucuuca

SEQ ID NO: 7161 - RNA, 20 nt, Artificial Sequence
  spacer sequence CTCN PAM
gacuuugagaggauggaagg

SEQ ID NO: 7162 - RNA, 20 nt, Artificial Sequence
  spacer sequence CTCN PAM
ccuugaugguuccugaagaa

SEQ ID NO: 7163 - RNA, 20 nt, Artificial Sequence
  spacer sequence CTCN PAM
gauagauuuagcacaucuca

SEQ ID NO: 7164 - RNA, 20 nt, Artificial Sequence
  spacer sequence CTCN PAM
ucagauagauuuagcacauc

SEQ ID NO: 7165 - RNA, 20 nt, Artificial Sequence
  spacer sequence CTCN PAM
ccucagauagauuuagcaca

SEQ ID NO: 7166 - RNA, 20 nt, Artificial Sequence
  spacer sequence CTCN PAM
ucuccucagauagauuuagc

SEQ ID NO: 7167 - RNA, 20 nt, Artificial Sequence
  spacer sequence CTCN PAM
cagauaaucugagaauaaua

SEQ ID NO: 7168 - RNA, 20 nt, Artificial Sequence
  spacer sequence CTCN PAM
gauuaucugggaggggucuu

SEQ ID NO: 7169 - RNA, 20 nt, Artificial Sequence
  spacer sequence CTCN PAM
uuccuucaguaggccguugu

SEQ ID NO: 7170 - RNA, 20 nt, Artificial Sequence
  spacer sequence CTCN PAM
aaagagggcaucugaauucg

SEQ ID NO: 7171 - RNA, 20 nt, Artificial Sequence
  spacer sequence CTCN PAM
uuugagguugcuguucuggu

SEQ ID NO: 7172 - RNA, 20 nt, Artificial Sequence
  spacer sequence CTCN PAM
gaauucagaugcccucuuuu

SEQ ID NO: 7173 - RNA, 20 nt, Artificial Sequence
  spacer sequence CTCN PAM
ccugccuuccccuccgaauu

SEQ ID NO: 7174 - RNA, 20 nt, Artificial Sequence
  spacer sequence CTCN PAM
ggaguggcccagagacucca

SEQ ID NO: 7175 - RNA, 20 nt, Artificial Sequence
  spacer sequence CTCN PAM
ugaggcuggccagcuccccu

SEQ ID NO: 7176 - RNA, 20 nt, Artificial Sequence
  spacer sequence CTCN PAM
gggccacuccugaggcuggc

SEQ ID NO: 7177 - RNA, 20 nt, Artificial Sequence
  spacer sequence CTCN PAM
auucaucagugccaucagcu

SEQ ID NO: 7178 - RNA, 20 nt, Artificial Sequence
  spacer sequence CTCN PAM
cuagccugacccagcacuca

SEQ ID NO: 7179 - RNA, 20 nt, Artificial Sequence
  spacer sequence CTCN PAM
cacccugcccuuccaagaaa

SEQ ID NO: 7180 - RNA, 20 nt, Artificial Sequence
  spacer sequence CTCN PAM
ccccuccauggaaggguuag

SEQ ID NO: 7181 - RNA, 20 nt, Artificial Sequence
  spacer sequence CTCN PAM
auggaaggguuaggaccagc

SEQ ID NO: 7182 - RNA, 20 nt, Artificial Sequence
  spacer sequence CTCN PAM
agccugagcacugcaagagc

SEQ ID NO: 7183 - RNA, 20 nt, Artificial Sequence
  spacer sequence CTCN PAM
ggcuagagcugguccuaacc

SEQ ID NO: 7184 - RNA, 20 nt, Artificial Sequence
  spacer sequence CTCN PAM
ugcagugcucaggcuagagc

SEQ ID NO: 7185 - RNA, 20 nt, Artificial Sequence
  spacer sequence CTCN PAM
auucccacacucaccccaca

SEQ ID NO: 7186 - RNA, 20 nt, Artificial Sequence
  spacer sequence CTCN PAM
ccccacaacauccaacacac

SEQ ID NO: 7187 - RNA, 20 nt, Artificial Sequence
  spacer sequence CTCN PAM
ugccuagcccucagcaugug

SEQ ID NO: 7188 - RNA, 20 nt, Artificial Sequence
  spacer sequence CTCN PAM
gcaugugucuaaacccaggc

SEQ ID NO: 7189 - RNA, 20 nt, Artificial Sequence
  spacer sequence CTCN PAM
uucugcagacuucccuuggg

SEQ ID NO: 7190 - RNA, 20 nt, Artificial Sequence
  spacer sequence CTCN PAM
ucuaaccgguucuguggccu

SEQ ID NO: 7191 - RNA, 20 nt, Artificial Sequence
  spacer sequence CTCN PAM
aacaaacccccggacugcuc

SEQ ID NO: 7192 - RNA, 20 nt, Artificial Sequence
  spacer sequence CTCN PAM
cagccucaguuuacuucucu

SEQ ID NO: 7193 - RNA, 20 nt, Artificial Sequence
  spacer sequence CTCN PAM
gccucaguuuacuucucuga

SEQ ID NO: 7194 - RNA, 20 nt, Artificial Sequence
  spacer sequence CTCN PAM
guuuacuucucugagaaauu

SEQ ID NO: 7195 - RNA, 20 nt, Artificial Sequence
  spacer sequence CTCN PAM
gagaaauuagggcaauagca

SEQ ID NO: 7196 - RNA, 20 nt, Artificial Sequence
  spacer sequence CTCN PAM
gagaaguaaacugaggcuga

SEQ ID NO: 7197 - RNA, 20 nt, Artificial Sequence
  spacer sequence CTCN PAM
augccacccagguauugcua

SEQ ID NO: 7198 - RNA, 20 nt, Artificial Sequence
  spacer sequence CTCN PAM
uuuugucucuaugccaccca

SEQ ID NO: 7199 - RNA, 20 nt, Artificial Sequence
  spacer sequence CTCN PAM
ucaaacuuaaaaguauuugu

SEQ ID NO: 7200 - RNA, 20 nt, Artificial Sequence
  spacer sequence CTCN PAM
uugcauuacuaguaauaaua

SEQ ID NO: 7201 - RNA, 20 nt, Artificial Sequence
  spacer sequence CTCN PAM
acccagauauuuacucagaa

SEQ ID NO: 7202 - RNA, 20 nt, Artificial Sequence
  spacer sequence CTCN PAM
gaauuuucagagaauucccc

SEQ ID NO: 7203 - RNA, 20 nt, Artificial Sequence
  spacer sequence CTCN PAM
gaaaauucugaguaaauauc

SEQ ID NO: 7204 - RNA, 20 nt, Artificial Sequence
  spacer sequence CTCN PAM
uucuuccaaggugcuuggua

SEQ ID NO: 7205 - RNA, 20 nt, Artificial Sequence
  spacer sequence CTCN PAM
ugcugcucaaauucccuugu

SEQ ID NO: 7206 - RNA, 20 nt, Artificial Sequence
  spacer sequence CTCN PAM
aauucccuuguaguuaaucc

SEQ ID NO: 7207 - RNA, 20 nt, Artificial Sequence
  spacer sequence CTCN PAM
caggacucaggaaacaaaac

SEQ ID NO: 7208 - RNA, 20 nt, Artificial Sequence
  spacer sequence CTCN PAM
ggacucaggaaacaaaaccg

SEQ ID NO: 7209 - RNA, 20 nt, Artificial Sequence
  spacer sequence CTCN PAM
ggaaacaaaaccguuuggua

SEQ ID NO: 7210 - RNA, 20 nt, Artificial Sequence
  spacer sequence CTCN PAM
gucaccagcaaauauaugcu

SEQ ID NO: 7211 - RNA, 20 nt, Artificial Sequence
  spacer sequence CTCN PAM
gugcuaccugagagcaaauc

SEQ ID NO: 7212 - RNA, 20 nt, Artificial Sequence
  spacer sequence CTCN PAM
gguagcacugagcauauauu

SEQ ID NO: 7213 - RNA, 20 nt, Artificial Sequence
  spacer sequence CTCN PAM
cagguagcacugagcauaua

SEQ ID NO: 7214 - RNA, 20 nt, Artificial Sequence
  spacer sequence CTCN PAM
ucugcacugguuucagaaug

SEQ ID NO: 7215 - RNA, 20 nt, Artificial Sequence
  spacer sequence CTCN PAM
gcacugguuucagaauguaa

SEQ ID NO: 7216 - RNA, 20 nt, Artificial Sequence
  spacer sequence CTCN PAM
aaaguaaagggacuucagaa

SEQ ID NO: 7217 - RNA, 20 nt, Artificial Sequence
  spacer sequence CTCN PAM
agaacuggccucaaaaguaa

SEQ ID NO: 7218 - RNA, 20 nt, Artificial Sequence
  spacer sequence CTCN PAM
uacaguuugggaggcugagg

SEQ ID NO: 7219 - RNA, 20 nt, Artificial Sequence
  spacer sequence CTCN PAM
caaacuguaggaguacaggu

SEQ ID NO: 7220 - RNA, 20 nt, Artificial Sequence
  spacer sequence CTCN PAM
gccucccaaacuguaggagu

SEQ ID NO: 7221 - RNA, 20 nt, Artificial Sequence
  spacer sequence CTCN PAM
ugccucagccucccaaacug

SEQ ID NO: 7222 - RNA, 20 nt, Artificial Sequence
  spacer sequence CTCN PAM
agggauccucaugccucagc

SEQ ID NO: 7223 - RNA, 20 nt, Artificial Sequence
  spacer sequence CTCN PAM
ugggcucaagggauccucau

SEQ ID NO: 7224 - RNA, 20 nt, Artificial Sequence
  spacer sequence CTCN PAM
aacucuugggcucaagggau

SEQ ID NO: 7225 - RNA, 20 nt, Artificial Sequence
  spacer sequence CTCN PAM
guauguugcccaggcuggcc

SEQ ID NO: 7226 - RNA, 20 nt, Artificial Sequence
  spacer sequence CTCN PAM
acaaaaaauuagccgggugu

SEQ ID NO: 7227 - RNA, 20 nt, Artificial Sequence
  spacer sequence CTCN PAM
ccaguagcuggggauagcca

SEQ ID NO: 7228 - RNA, 20 nt, Artificial Sequence
  spacer sequence CTCN PAM
gccuccccaguagcugggga

SEQ ID NO: 7229 - RNA, 20 nt, Artificial Sequence
  spacer sequence CTCN PAM
caccucagccuccccaguag

SEQ ID NO: 7230 - RNA, 20 nt, Artificial Sequence
  spacer sequence CTCN PAM
agcaauccucccaccucagc

SEQ ID NO: 7231 - RNA, 20 nt, Artificial Sequence
  spacer sequence CTCN PAM
ugggcucaagcaauccuccc

SEQ ID NO: 7232 - RNA, 20 nt, Artificial Sequence
  spacer sequence CTCN PAM
uccuccugggcucaagcaau

SEQ ID NO: 7233 - RNA, 20 nt, Artificial Sequence
  spacer sequence CTCN PAM
cugcagccucauccuccugg

SEQ ID NO: 7234 - RNA, 20 nt, Artificial Sequence
  spacer sequence CTCN PAM
gucacccaggcuggaaugca

SEQ ID NO: 7235 - RNA, 20 nt, Artificial Sequence
  spacer sequence CTCN PAM
guuuuauuuuauuuuuaaga

SEQ ID NO: 7236 - RNA, 20 nt, Artificial Sequence
  spacer sequence CTCN PAM
uggcaacaaacaaaacaugu

SEQ ID NO: 7237 - RNA, 20 nt, Artificial Sequence
  spacer sequence CTCN PAM
gcuuuaucucaguguucaca

SEQ ID NO: 7238 - RNA, 20 nt, Artificial Sequence
  spacer sequence CTCN PAM
guguucacaccuugcauucc

SEQ ID NO: 7239 - RNA, 20 nt, Artificial Sequence
  spacer sequence CTCN PAM
guucggucccgaagguuaaa

SEQ ID NO: 7240 - RNA, 20 nt, Artificial Sequence
  spacer sequence CTCN PAM
acuaucuuguugcuuaaagg

SEQ ID NO: 7241 - RNA, 20 nt, Artificial Sequence
  spacer sequence CTCN PAM
uuuuucccuuuaagcaacaa

SEQ ID NO: 7242 - RNA, 20 nt, Artificial Sequence
  spacer sequence CTCN PAM
cuuuuuucccuuuaagcaac

SEQ ID NO: 7243 - RNA, 20 nt, Artificial Sequence
  spacer sequence CTCN PAM
ucucuuuuuucccuuuaagc

SEQ ID NO: 7244 - RNA, 20 nt, Artificial Sequence
  spacer sequence CTCN PAM
gccagccuuagucccuuuuu

SEQ ID NO: 7245 - RNA, 20 nt, Artificial Sequence
  spacer sequence CTCN PAM
aaaaaaaaaaaaaaaaaaaa

SEQ ID NO: 7246 - RNA, 20 nt, Artificial Sequence
  spacer sequence CTCN PAM
gucucaaaaaaaaaaaaaaa

SEQ ID NO: 7247 - RNA, 20 nt, Artificial Sequence
  spacer sequence CTCN PAM
cucugucauccaagcuggag

SEQ ID NO: 7248 - RNA, 20 nt, Artificial Sequence
  spacer sequence CTCN PAM
gucauccaagcuggagcaua

SEQ ID NO: 7249 - RNA, 20 nt, Artificial Sequence
  spacer sequence CTCN PAM
agcuuggaugacagagcgag

SEQ ID NO: 7250 - RNA, 20 nt, Artificial Sequence
  spacer sequence CTCN PAM
cugcagccucaaagucuuca

SEQ ID NO: 7251 - RNA, 20 nt, Artificial Sequence
  spacer sequence CTCN PAM
aagucuucagcucaagcaag

SEQ ID NO: 7252 - RNA, 20 nt, Artificial Sequence
  spacer sequence CTCN PAM
agcaaguagcuaagauuaca

SEQ ID NO: 7253 - RNA, 20 nt, Artificial Sequence
  spacer sequence CTCN PAM
aaguccaaguuugaaagcca

SEQ ID NO: 7254 - RNA, 20 nt, Artificial Sequence
  spacer sequence CTCN PAM
caguaaagagcugggcccca

SEQ ID NO: 7255 - RNA, 20 nt, Artificial Sequence
  spacer sequence CTCN PAM
uuacugugaguuugugacau

SEQ ID NO: 7256 - RNA, 20 nt, Artificial Sequence
  spacer sequence CTCN PAM
cuaccuuggggcccagcucu

SEQ ID NO: 7257 - RNA, 20 nt, Artificial Sequence
  spacer sequence CTCN PAM
caucauuuuaaaagccccua

SEQ ID NO: 7258 - RNA, 20 nt, Artificial Sequence
  spacer sequence CTCN PAM
cuuuugaauaauuuuuaagc

SEQ ID NO: 7259 - RNA, 20 nt, Artificial Sequence
  spacer sequence CTCN PAM
aauuauauucucacuuuuga

SEQ ID NO: 7260 - RNA, 20 nt, Artificial Sequence
  spacer sequence CTCN PAM
uccucaaaagaaaccuucca

SEQ ID NO: 7261 - RNA, 20 nt, Artificial Sequence
  spacer sequence CTCN PAM
ucaaaagaaaccuuccacua

SEQ ID NO: 7262 - RNA, 20 nt, Artificial Sequence
  spacer sequence CTCN PAM
aaagaaaccuuccacuaaag

SEQ ID NO: 7263 - RNA, 20 nt, Artificial Sequence
  spacer sequence CTCN PAM
aagggcgcaguucaucaaga

SEQ ID NO: 7264 - RNA, 20 nt, Artificial Sequence
  spacer sequence CTCN PAM
uaucaacccccggccuuaaa

SEQ ID NO: 7265 - RNA, 20 nt, Artificial Sequence
  spacer sequence CTCN PAM
ggggauaaaacacauaaaua

SEQ ID NO: 7266 - RNA, 20 nt, Artificial Sequence
  spacer sequence CTCN PAM
cacccuagggauaugauccu

SEQ ID NO: 7267 - RNA, 20 nt, Artificial Sequence
  spacer sequence CTCN PAM
agggcugcugccaugcagua

SEQ ID NO: 7268 - RNA, 20 nt, Artificial Sequence
  spacer sequence CTCN PAM
ucucuggcugauacugggac

SEQ ID NO: 7269 - RNA, 20 nt, Artificial Sequence
  spacer sequence CTCN PAM
ggcugauacugggacaguuu

SEQ ID NO: 7270 - RNA, 20 nt, Artificial Sequence
  spacer sequence CTCN PAM
ugcagggaaacugucccagu

SEQ ID NO: 7271 - RNA, 20 nt, Artificial Sequence
  spacer sequence CTCN PAM
ggccccagagaaugccucuc

SEQ ID NO: 7272 - RNA, 20 nt, Artificial Sequence
  spacer sequence CTCN PAM
ggggccugagacuccugcag

SEQ ID NO: 7273 - RNA, 20 nt, Artificial Sequence
  spacer sequence CTCN PAM
cuucccagcacuaagguaug

SEQ ID NO: 7274 - RNA, 20 nt, Artificial Sequence
  spacer sequence CTCN PAM
ucccagcacuaagguaugcg

SEQ ID NO: 7275 - RNA, 20 nt, Artificial Sequence
  spacer sequence CTCN PAM
gcccaaggggucgcauaccu

SEQ ID NO: 7276 - RNA, 20 nt, Artificial Sequence
  spacer sequence CTCN PAM
cccagagacaccuuguuccu

SEQ ID NO: 7277 - RNA, 20 nt, Artificial Sequence
  spacer sequence CTCN PAM
cagagacaccuuguuccuuu

SEQ ID NO: 7278 - RNA, 20 nt, Artificial Sequence
  spacer sequence CTCN PAM
gggagagguccagguggugc

SEQ ID NO: 7279 - RNA, 20 nt, Artificial Sequence
  spacer sequence CTCN PAM
cuucuuccuuugccuccuuu

SEQ ID NO: 7280 - RNA, 20 nt, Artificial Sequence
  spacer sequence CTCN PAM
ucuuccuuugccuccuuuuu

SEQ ID NO: 7281 - RNA, 20 nt, Artificial Sequence
  spacer sequence CTCN PAM
uuuuuugcuuuuguuuguuc

SEQ ID NO: 7282 - RNA, 20 nt, Artificial Sequence
  spacer sequence CTCN PAM
agaaaaaaaaaaaaaaaaaa

SEQ ID NO: 7283 - RNA, 20 nt, Artificial Sequence
  spacer sequence CTCN PAM
gucucaagaaaaaaaaaaaa

SEQ ID NO: 7284 - RNA, 20 nt, Artificial Sequence
  spacer sequence CTCN PAM
cucuugucacccaggcugga

SEQ ID NO: 7285 - RNA, 20 nt, Artificial Sequence
  spacer sequence CTCN PAM
ugucacccaggcuggacugc

SEQ ID NO: 7286 - RNA, 20 nt, Artificial Sequence
  spacer sequence CTCN PAM
gcucacugcaaccuccgccu

SEQ ID NO: 7287 - RNA, 20 nt, Artificial Sequence
  spacer sequence CTCN PAM
cugcaaccuccgccucccag

SEQ ID NO: 7288 - RNA, 20 nt, Artificial Sequence
  spacer sequence CTCN PAM
gccucccagguucaagcgau

SEQ ID NO: 7289 - RNA, 20 nt, Artificial Sequence
  spacer sequence CTCN PAM
cagguucaagcgauucucgu

SEQ ID NO: 7290 - RNA, 20 nt, Artificial Sequence
  spacer sequence CTCN PAM
ugccucagccucccaaguag

SEQ ID NO: 7291 - RNA, 20 nt, Artificial Sequence
  spacer sequence CTCN PAM
gccucccaaguagcugggau

SEQ ID NO: 7292 - RNA, 20 nt, Artificial Sequence
  spacer sequence CTCN PAM
caaguagcugggauuacagg

SEQ ID NO: 7293 - RNA, 20 nt, Artificial Sequence
  spacer sequence CTCN PAM
acugaaaauaccaaaauuaa

SEQ ID NO: 7294 - RNA, 20 nt, Artificial Sequence
  spacer sequence CTCN PAM
uguccucaagugaccuuggc

SEQ ID NO: 7295 - RNA, 20 nt, Artificial Sequence
  spacer sequence CTCN PAM
agugaccuuggccucccaaa

SEQ ID NO: 7296 - RNA, 20 nt, Artificial Sequence
  spacer sequence CTCN PAM
caaagugcugagauuacagg

SEQ ID NO: 7297 - RNA, 20 nt, Artificial Sequence
  spacer sequence CTCN PAM
gcacuuugggaggccaaggu

SEQ ID NO: 7298 - RNA, 20 nt, Artificial Sequence
  spacer sequence CTCN PAM
ugccuguaaucucagcacuu

SEQ ID NO: 7299 - RNA, 20 nt, Artificial Sequence
  spacer sequence CTCN PAM
caaaugauuaaaaugguaaa

SEQ ID NO: 7300 - RNA, 20 nt, Artificial Sequence
  spacer sequence CTCN PAM
ucccaccgucuaccuccaac

SEQ ID NO: 7301 - RNA, 20 nt, Artificial Sequence
  spacer sequence CTCN PAM
aacacuuuuucaucaucccc

SEQ ID NO: 7302 - RNA, 20 nt, Artificial Sequence
  spacer sequence CTCN PAM
ccuuccccauccccucauua

SEQ ID NO: 7303 - RNA, 20 nt, Artificial Sequence
  spacer sequence CTCN PAM
uuaaucccuuaguaaucucu

SEQ ID NO: 7304 - RNA, 20 nt, Artificial Sequence
  spacer sequence CTCN PAM
auuccauuuucugucucuau

SEQ ID NO: 7305 - RNA, 20 nt, Artificial Sequence
  spacer sequence CTCN PAM
augaauuuacccaguauagg

SEQ ID NO: 7306 - RNA, 20 nt, Artificial Sequence
  spacer sequence CTCN PAM
uggaaguggaaucauauaau

SEQ ID NO: 7307 - RNA, 20 nt, Artificial Sequence
  spacer sequence CTCN PAM
uuuuauaucuggcauaucuc

SEQ ID NO: 7308 - RNA, 20 nt, Artificial Sequence
  spacer sequence CTCN PAM
uuuagcacaauguaugugag

SEQ ID NO: 7309 - RNA, 20 nt, Artificial Sequence
  spacer sequence CTCN PAM
cauacauugugcuaaaugag

SEQ ID NO: 7310 - RNA, 20 nt, Artificial Sequence
  spacer sequence CTCN PAM
cauuuuguuuauccauucau

SEQ ID NO: 7311 - RNA, 20 nt, Artificial Sequence
  spacer sequence CTCN PAM
ucuuuucuuuuuuuuuuuuu

SEQ ID NO: 7312 - RNA, 20 nt, Artificial Sequence
  spacer sequence CTCN PAM
ggaaaaaaaaaaaaaaaaaa

SEQ ID NO: 7313 - RNA, 20 nt, Artificial Sequence
  spacer sequence CTCN PAM
gucacccaggcuggagugca

SEQ ID NO: 7314 - RNA, 20 nt, Artificial Sequence
  spacer sequence CTCN PAM
agccugggugacagagggaa

SEQ ID NO: 7315 - RNA, 20 nt, Artificial Sequence
  spacer sequence CTCN PAM
gcucacugcaaccuccgccu

SEQ ID NO: 7316 - RNA, 20 nt, Artificial Sequence
  spacer sequence CTCN PAM
cugcaaccuccgccucccgg

SEQ ID NO: 7317 - RNA, 20 nt, Artificial Sequence
  spacer sequence CTCN PAM
gccucccgggcuuaagugau

SEQ ID NO: 7318 - RNA, 20 nt, Artificial Sequence
  spacer sequence CTCN PAM
cgggcuuaagugauucucgu

SEQ ID NO: 7319 - RNA, 20 nt, Artificial Sequence
  spacer sequence CTCN PAM
ugccucagccuccugaguag

SEQ ID NO: 7320 - RNA, 20 nt, Artificial Sequence
  spacer sequence CTCN PAM
gccuccugaguagcuggaau

SEQ ID NO: 7321 - RNA, 20 nt, Artificial Sequence
  spacer sequence CTCN PAM
ugaguagcuggaauuacagg

SEQ ID NO: 7322 - RNA, 20 nt, Artificial Sequence
  spacer sequence CTCN PAM
ggaggcugaggcacgagaau

SEQ ID NO: 7323 - RNA, 20 nt, Artificial Sequence
  spacer sequence CTCN PAM
acuaaaaauauaaaaauuag

SEQ ID NO: 7324 - RNA, 20 nt, Artificial Sequence
  spacer sequence CTCN PAM
uggugucaagugaucugccc

SEQ ID NO: 7325 - RNA, 20 nt, Artificial Sequence
  spacer sequence CTCN PAM
gccuccugaagugcuuggga

SEQ ID NO: 7326 - RNA, 20 nt, Artificial Sequence
  spacer sequence CTCN PAM
ugaagugcuugggauuacag

SEQ ID NO: 7327 - RNA, 20 nt, Artificial Sequence
  spacer sequence CTCN PAM
ugccuguaaucccaagcacu

SEQ ID NO: 7328 - RNA, 20 nt, Artificial Sequence
  spacer sequence CTCN PAM
uucaucuuuuuauggaugcu

SEQ ID NO: 7329 - RNA, 20 nt, Artificial Sequence
  spacer sequence CTCN PAM
cguucauagcaguauuaguc

SEQ ID NO: 7330 - RNA, 20 nt, Artificial Sequence
  spacer sequence CTCN PAM
cagguguauagccaaaagaa

SEQ ID NO: 7331 - RNA, 20 nt, Artificial Sequence
  spacer sequence CTCN PAM
aaaaguugcacacuuaccau

SEQ ID NO: 7332 - RNA, 20 nt, Artificial Sequence
  spacer sequence CTCN PAM
aucuucucuacauucuaacu

SEQ ID NO: 7333 - RNA, 20 nt, Artificial Sequence
  spacer sequence CTCN PAM
acauucuaacuaacacuugu

SEQ ID NO: 7334 - RNA, 20 nt, Artificial Sequence
  spacer sequence CTCN PAM
aucaaaaaaagcaggcaaac

SEQ ID NO: 7335 - RNA, 20 nt, Artificial Sequence
  spacer sequence CTCN PAM
accuccaucaaaaaaagcag

SEQ ID NO: 7336 - RNA, 20 nt, Artificial Sequence
  spacer sequence CTCN PAM
gugaauuggcugugacaaua

SEQ ID NO: 7337 - RNA, 20 nt, Artificial Sequence
  spacer sequence CTCN PAM
uuuagcuauugucacagcca

SEQ ID NO: 7338 - RNA, 20 nt, Artificial Sequence
  spacer sequence CTCN PAM
uacugaagagauguuuccua

SEQ ID NO: 7339 - RNA, 20 nt, Artificial Sequence
  spacer sequence CTCN PAM
ucaguaugagguagcagccu

SEQ ID NO: 7340 - RNA, 20 nt, Artificial Sequence
  spacer sequence CTCN PAM
ggugacaaacuuaggaaaca

SEQ ID NO: 7341 - RNA, 20 nt, Artificial Sequence
  spacer sequence CTCN PAM
ccggugacaaacuuaggaaa

SEQ ID NO: 7342 - RNA, 20 nt, Artificial Sequence
  spacer sequence CTCN PAM
aagacaauaaguugguucgg

SEQ ID NO: 7343 - RNA, 20 nt, Artificial Sequence
  spacer sequence CTCN PAM
gagaaaaaaacagucuacag

SEQ ID NO: 7344 - RNA, 20 nt, Artificial Sequence
  spacer sequence CTCN PAM
gagaaguucaagucuucugc

SEQ ID NO: 7345 - RNA, 20 nt, Artificial Sequence
  spacer sequence CTCN PAM
cacacuacugaaagcucuac

SEQ ID NO: 7346 - RNA, 20 nt, Artificial Sequence
  spacer sequence CTCN PAM
acccuggggaccuggcuuga

SEQ ID NO: 7347 - RNA, 20 nt, Artificial Sequence
  spacer sequence CTCN PAM
ggagagcucccagcugcucu

SEQ ID NO: 7348 - RNA, 20 nt, Artificial Sequence
  spacer sequence CTCN PAM
ugagauaacacagcuaguua

SEQ ID NO: 7349 - RNA, 20 nt, Artificial Sequence
  spacer sequence CTCN PAM
ccugagauaacacagcuagu

SEQ ID NO: 7350 - RNA, 20 nt, Artificial Sequence
  spacer sequence CTCN PAM
cagcugcucugagucucagu

SEQ ID NO: 7351 - RNA, 20 nt, Artificial Sequence
  spacer sequence CTCN PAM
gagucucagucucucaauca

SEQ ID NO: 7352 - RNA, 20 nt, Artificial Sequence
  spacer sequence CTCN PAM
gagcagcugggagcucuccu

SEQ ID NO: 7353 - RNA, 20 nt, Artificial Sequence
  spacer sequence CTCN PAM
gucucucaaucagugaaaug

SEQ ID NO: 7354 - RNA, 20 nt, Artificial Sequence
  spacer sequence CTCN PAM
caaucagugaaauggaggca

SEQ ID NO: 7355 - RNA, 20 nt, Artificial Sequence
  spacer sequence CTCN PAM
aucagugaaauggaggcaau

SEQ ID NO: 7356 - RNA, 20 nt, Artificial Sequence
  spacer sequence CTCN PAM
auuucacugauugagagacu

SEQ ID NO: 7357 - RNA, 20 nt, Artificial Sequence
  spacer sequence CTCN PAM
uugcagcacuguggggcgau

SEQ ID NO: 7358 - RNA, 20 nt, Artificial Sequence
  spacer sequence CTCN PAM
uuggaugcucauugcagcac

SEQ ID NO: 7359 - RNA, 20 nt, Artificial Sequence
  spacer sequence CTCN PAM
cguuggaugcucauugcagc

SEQ ID NO: 7360 - RNA, 20 nt, Artificial Sequence
  spacer sequence CTCN PAM
cgccuccuccaaaagccagg

SEQ ID NO: 7361 - RNA, 20 nt, Artificial Sequence
  spacer sequence CTCN PAM
uccaaaagccagggacugcu

SEQ ID NO: 7362 - RNA, 20 nt, Artificial Sequence
  spacer sequence CTCN PAM
aaaagccagggacugcuuca

SEQ ID NO: 7363 - RNA, 20 nt, Artificial Sequence
  spacer sequence CTCN PAM
aggacugcugcuccagcauu

SEQ ID NO: 7364 - RNA, 20 nt, Artificial Sequence
  spacer sequence CTCN PAM
agcauuuccggcagcugcug

SEQ ID NO: 7365 - RNA, 20 nt, Artificial Sequence
  spacer sequence CTCN PAM
aucugggcuugacugugcca

SEQ ID NO: 7366 - RNA, 20 nt, Artificial Sequence
  spacer sequence CTCN PAM
cucagagagaggcacccagg

SEQ ID NO: 7367 - RNA, 20 nt, Artificial Sequence
  spacer sequence CTCN PAM
gagagaggcacccagggcuc

SEQ ID NO: 7368 - RNA, 20 nt, Artificial Sequence
  spacer sequence CTCN PAM
gagggaggcccuugcuccau

SEQ ID NO: 7369 - RNA, 20 nt, Artificial Sequence
  spacer sequence CTCN PAM
cugagggaggcccuugcucc

SEQ ID NO: 7370 - RNA, 20 nt, Artificial Sequence
  spacer sequence CTCN PAM
cucugagggaggcccuugcu

SEQ ID NO: 7371 - RNA, 20 nt, Artificial Sequence
  spacer sequence CTCN PAM
cccuucaaaggaagcacuug

SEQ ID NO: 7372 - RNA, 20 nt, Artificial Sequence
  spacer sequence CTCN PAM
aagugcuuccuuugaagggu

SEQ ID NO: 7373 - RNA, 20 nt, Artificial Sequence
  spacer sequence CTCN PAM
aaggucacacaggaaacuga

SEQ ID NO: 7374 - RNA, 20 nt, Artificial Sequence
  spacer sequence CTCN PAM
uauaguuuagauccaggcuu

SEQ ID NO: 7375 - RNA, 20 nt, Artificial Sequence
  spacer sequence CTCN PAM
uauuucuccuauaguuuaga

SEQ ID NO: 7376 - RNA, 20 nt, Artificial Sequence
  spacer sequence CTCN PAM
cccgacccauccccaaucuu

SEQ ID NO: 7377 - RNA, 20 nt, Artificial Sequence
  spacer sequence CTCN PAM
gaugggcagaagauugggga

SEQ ID NO: 7378 - RNA, 20 nt, Artificial Sequence
  spacer sequence CTCN PAM
cagaugggcagaagauuggg

SEQ ID NO: 7379 - RNA, 20 nt, Artificial Sequence
  spacer sequence CTCN PAM
agcguuuugaaguucaaauu

SEQ ID NO: 7380 - RNA, 20 nt, Artificial Sequence
  spacer sequence CTCN PAM
agagaccuggaugcaugugg

SEQ ID NO: 7381 - RNA, 20 nt, Artificial Sequence
  spacer sequence CTCN PAM
ggaguaacuuacuuuuguuu

SEQ ID NO: 7382 - RNA, 20 nt, Artificial Sequence
  spacer sequence CTCN PAM
uaggauggauuuuauuuucc

SEQ ID NO: 7383 - RNA, 20 nt, Artificial Sequence
  spacer sequence CTCN PAM
ccuaggauggauuuuauuuu

SEQ ID NO: 7384 - RNA, 20 nt, Artificial Sequence
  spacer sequence CTCN PAM
gggcaucuaugcagaguuca

SEQ ID NO: 7385 - RNA, 20 nt, Artificial Sequence
  spacer sequence CTCN PAM
gcauagaugcccagagguaa

SEQ ID NO: 7386 - RNA, 20 nt, Artificial Sequence
  spacer sequence CTCN PAM
ucacccaggaauuacgugag

SEQ ID NO: 7387 - RNA, 20 nt, Artificial Sequence
  spacer sequence CTCN PAM
cguaauuccugggugaugag

SEQ ID NO: 7388 - RNA, 20 nt, Artificial Sequence
  spacer sequence CTCN PAM
ucacguaauuccugggugau

SEQ ID NO: 7389 - RNA, 20 nt, Artificial Sequence
  spacer sequence CTCN PAM
ucguggcuucccuuguagca

SEQ ID NO: 7390 - RNA, 20 nt, Artificial Sequence
  spacer sequence CTCN PAM
aauuaauaaagcccuaagag

SEQ ID NO: 7391 - RNA, 20 nt, Artificial Sequence
  spacer sequence CTCN PAM
uagggcuuuauuaauuggag

SEQ ID NO: 7392 - RNA, 20 nt, Artificial Sequence
  spacer sequence CTCN PAM
uuuguaugaaauaaucuggg

SEQ ID NO: 7393 - RNA, 20 nt, Artificial Sequence
  spacer sequence CTCN PAM
acuuugcauucuucaauaaa

SEQ ID NO: 7394 - RNA, 20 nt, Artificial Sequence
  spacer sequence CTCN PAM
gcaaggguuauauuucaguc

SEQ ID NO: 7395 - RNA, 20 nt, Artificial Sequence
  spacer sequence CTCN PAM
cugugacguaagcuaggccc

SEQ ID NO: 7396 - RNA, 20 nt, Artificial Sequence
  spacer sequence CTCN PAM
uggcuaagaggagagacuuc

SEQ ID NO: 7397 - RNA, 20 nt, Artificial Sequence
  spacer sequence CTCN PAM
uagccaggagucugggggcc

SEQ ID NO: 7398 - RNA, 20 nt, Artificial Sequence
  spacer sequence CTCN PAM
ucuuagccaggagucugggg

SEQ ID NO: 7399 - RNA, 20 nt, Artificial Sequence
  spacer sequence CTCN PAM
ccucuuagccaggagucugg

SEQ ID NO: 7400 - RNA, 20 nt, Artificial Sequence
  spacer sequence CTCN PAM
gcacccagccuucugaucag

SEQ ID NO: 7401 - RNA, 20 nt, Artificial Sequence
  spacer sequence CTCN PAM
gauaaaacugaucagaaggc

SEQ ID NO: 7402 - RNA, 20 nt, Artificial Sequence
  spacer sequence CTCN PAM
ugguuuugcuggggugcacu

SEQ ID NO: 7403 - RNA, 20 nt, Artificial Sequence
  spacer sequence CTCN PAM
ccugguuuugcuggggugca

SEQ ID NO: 7404 - RNA, 20 nt, Artificial Sequence
  spacer sequence CTCN PAM
uuguugagacuuggugauug

SEQ ID NO: 7405 - RNA, 20 nt, Artificial Sequence
  spacer sequence CTCN PAM
acaaggagugaagacacgga

SEQ ID NO: 7406 - RNA, 20 nt, Artificial Sequence
  spacer sequence CTCN PAM
acccagccuuugugggguaa

SEQ ID NO: 7407 - RNA, 20 nt, Artificial Sequence
  spacer sequence CTCN PAM
ccuaauuguguuauaaaaag

SEQ ID NO: 7408 - RNA, 20 nt, Artificial Sequence
  spacer sequence CTCN PAM
uaauuguguuauaaaaagau

SEQ ID NO: 7409 - RNA, 20 nt, Artificial Sequence
  spacer sequence CTCN PAM
gccccgcuaaacugccaagg

SEQ ID NO: 7410 - RNA, 20 nt, Artificial Sequence
  spacer sequence CTCN PAM
cccagucugccucaagguua

SEQ ID NO: 7411 - RNA, 20 nt, Artificial Sequence
  spacer sequence CTCN PAM
agguuaacugaguuucauca

SEQ ID NO: 7412 - RNA, 20 nt, Artificial Sequence
  spacer sequence CTCN PAM
guuaaccuugaggcagacug

SEQ ID NO: 7413 - RNA, 20 nt, Artificial Sequence
  spacer sequence CTCN PAM
ggccccuucccucuccuccc

SEQ ID NO: 7414 - RNA, 20 nt, Artificial Sequence
  spacer sequence CTCN PAM
ccucccugcugucccuaacu

SEQ ID NO: 7415 - RNA, 20 nt, Artificial Sequence
  spacer sequence CTCN PAM
ucccugcugucccuaacuuu

SEQ ID NO: 7416 - RNA, 20 nt, Artificial Sequence
  spacer sequence CTCN PAM
cugcugucccuaacuuucac

SEQ ID NO: 7417 - RNA, 20 nt, Artificial Sequence
  spacer sequence CTCN PAM
ucaggagguggcugguggcc

SEQ ID NO: 7418 - RNA, 20 nt, Artificial Sequence
  spacer sequence CTCN PAM
ugaagagugaaaguuaggga

SEQ ID NO: 7419 - RNA, 20 nt, Artificial Sequence
  spacer sequence CTCN PAM
agaaauaggccaccagccac

SEQ ID NO: 7420 - RNA, 20 nt, Artificial Sequence
  spacer sequence CTCN PAM
ccagaaauaggccaccagcc

SEQ ID NO: 7421 - RNA, 20 nt, Artificial Sequence
  spacer sequence CTCN PAM
ugggcuugagccaacgccau

SEQ ID NO: 7422 - RNA, 20 nt, Artificial Sequence
  spacer sequence CTCN PAM
agcccaagaggacgcuaugg

SEQ ID NO: 7423 - RNA, 20 nt, Artificial Sequence
  spacer sequence CTCN PAM
gauggcguuggcucaagccc

SEQ ID NO: 7424 - RNA, 20 nt, Artificial Sequence
  spacer sequence CTCN PAM
cagcaaacaucucauguccu

SEQ ID NO: 7425 - RNA, 20 nt, Artificial Sequence
  spacer sequence CTCN PAM
gcaaacaucucauguccuca

SEQ ID NO: 7426 - RNA, 20 nt, Artificial Sequence
  spacer sequence CTCN PAM
uguccucaagggcuggacau

SEQ ID NO: 7427 - RNA, 20 nt, Artificial Sequence
  spacer sequence CTCN PAM
agggcuggacaucccuuucc

SEQ ID NO: 7428 - RNA, 20 nt, Artificial Sequence
  spacer sequence CTCN PAM
gcagccaacaucaaggugac

SEQ ID NO: 7429 - RNA, 20 nt, Artificial Sequence
  spacer sequence CTCN PAM
gaugcaucccuaugcuucuu

SEQ ID NO: 7430 - RNA, 20 nt, Artificial Sequence
  spacer sequence CTCN PAM
aaucauaaagguuuaacccc

SEQ ID NO: 7431 - RNA, 20 nt, Artificial Sequence
  spacer sequence CTCN PAM
uuuuuaggggguuaaaccuu

SEQ ID NO: 7432 - RNA, 20 nt, Artificial Sequence
  spacer sequence CTCN PAM
cuuaauucuucaaacccugc

SEQ ID NO: 7433 - RNA, 20 nt, Artificial Sequence
  spacer sequence CTCN PAM
uaauucuucaaacccugcaa

SEQ ID NO: 7434 - RNA, 20 nt, Artificial Sequence
  spacer sequence CTCN PAM
uucaccauuuagggcuugca

SEQ ID NO: 7435 - RNA, 20 nt, Artificial Sequence
  spacer sequence CTCN PAM
ugcaguggucagaggguagg

SEQ ID NO: 7436 - RNA, 20 nt, Artificial Sequence
  spacer sequence CTCN PAM
gaccacugcaugagccccuc

SEQ ID NO: 7437 - RNA, 20 nt, Artificial Sequence
  spacer sequence CTCN PAM
caaguucaugugccucccua

SEQ ID NO: 7438 - RNA, 20 nt, Artificial Sequence
  spacer sequence CTCN PAM
cuaaaacgcagaucgugacu

SEQ ID NO: 7439 - RNA, 20 nt, Artificial Sequence
  spacer sequence CTCN PAM
uaggucugaggagggagggg

SEQ ID NO: 7440 - RNA, 20 nt, Artificial Sequence
  spacer sequence CTCN PAM
gaccuaugagucacgaucug

SEQ ID NO: 7441 - RNA, 20 nt, Artificial Sequence
  spacer sequence CTCN PAM
ucagaccuaugagucacgau

SEQ ID NO: 7442 - RNA, 20 nt, Artificial Sequence
  spacer sequence CTCN PAM
cuccucagaccuaugaguca

SEQ ID NO: 7443 - RNA, 20 nt, Artificial Sequence
  spacer sequence CTCN PAM
guggcucuacgguccacaca

SEQ ID NO: 7444 - RNA, 20 nt, Artificial Sequence
  spacer sequence CTCN PAM
acgguccacacacgauccca

SEQ ID NO: 7445 - RNA, 20 nt, Artificial Sequence
  spacer sequence CTCN PAM
ugugggaucguguguggacc

SEQ ID NO: 7446 - RNA, 20 nt, Artificial Sequence
  spacer sequence CTCN PAM
ggcggggagcucccuucacc

SEQ ID NO: 7447 - RNA, 20 nt, Artificial Sequence
  spacer sequence CTCN PAM
ccgccagagacucauguggg

SEQ ID NO: 7448 - RNA, 20 nt, Artificial Sequence
  spacer sequence CTCN PAM
cuucacccagaacccccagg

SEQ ID NO: 7449 - RNA, 20 nt, Artificial Sequence
  spacer sequence CTCN PAM
ccuggggguucugggugaag

SEQ ID NO: 7450 - RNA, 20 nt, Artificial Sequence
  spacer sequence CTCN PAM
gaagccuuccucaccugggg

SEQ ID NO: 7451 - RNA, 20 nt, Artificial Sequence
  spacer sequence CTCN PAM
cagaagccuuccucaccugg

SEQ ID NO: 7452 - RNA, 20 nt, Artificial Sequence
  spacer sequence CTCN PAM
gcccccucucagaagccuuc

SEQ ID NO: 7453 - RNA, 20 nt, Artificial Sequence
  spacer sequence CTCN PAM
gcucugcccccucucagaag

SEQ ID NO: 7454 - RNA, 20 nt, Artificial Sequence
  spacer sequence CTCN PAM
ucuguggagcccauggggau

SEQ ID NO: 7455 - RNA, 20 nt, Artificial Sequence
  spacer sequence CTCN PAM
acagaugaggacaccggccc

SEQ ID NO: 7456 - RNA, 20 nt, Artificial Sequence
  spacer sequence CTCN PAM
agguggucauccccaugggc

SEQ ID NO: 7457 - RNA, 20 nt, Artificial Sequence
  spacer sequence CTCN PAM
gugugucuccagguggucau

SEQ ID NO: 7458 - RNA, 20 nt, Artificial Sequence
  spacer sequence CTCN PAM
cagugacacccugagaggga

SEQ ID NO: 7459 - RNA, 20 nt, Artificial Sequence
  spacer sequence CTCN PAM
gugacacccugagagggaau

SEQ ID NO: 7460 - RNA, 20 nt, Artificial Sequence
  spacer sequence CTCN PAM
gggugucacugagaggaugc

SEQ ID NO: 7461 - RNA, 20 nt, Artificial Sequence
  spacer sequence CTCN PAM
cagggugucacugagaggau

SEQ ID NO: 7462 - RNA, 20 nt, Artificial Sequence
  spacer sequence CTCN PAM
aggguggcaggaaggccacu

SEQ ID NO: 7463 - RNA, 20 nt, Artificial Sequence
  spacer sequence CTCN PAM
uucccuggguggcacaaaca

SEQ ID NO: 7464 - RNA, 20 nt, Artificial Sequence
  spacer sequence CTCN PAM
uggggaagugcgucuucucc

SEQ ID NO: 7465 - RNA, 20 nt, Artificial Sequence
  spacer sequence CTCN PAM
ucuccaaaccacaggcucac

SEQ ID NO: 7466 - RNA, 20 nt, Artificial Sequence
  spacer sequence CTCN PAM
ccaaaccacaggcucacaag

SEQ ID NO: 7467 - RNA, 20 nt, Artificial Sequence
  spacer sequence CTCN PAM
aaaccacaggcucacaagca

SEQ ID NO: 7468 - RNA, 20 nt, Artificial Sequence
  spacer sequence CTCN PAM
caagcagaccagcucaagug

SEQ ID NO: 7469 - RNA, 20 nt, Artificial Sequence
  spacer sequence CTCN PAM
agugaaguuccugcaaugac

SEQ ID NO: 7470 - RNA, 20 nt, Artificial Sequence
  spacer sequence CTCN PAM
gcaggggccggaaaagcagg

SEQ ID NO: 7471 - RNA, 20 nt, Artificial Sequence
  spacer sequence CTCN PAM
cagcaggggccggaaaagca

SEQ ID NO: 7472 - RNA, 20 nt, Artificial Sequence
  spacer sequence CTCN PAM
gggaccccucucagcagggg

SEQ ID NO: 7473 - RNA, 20 nt, Artificial Sequence
  spacer sequence CTCN PAM
cagggaccccucucagcagg

SEQ ID NO: 7474 - RNA, 20 nt, Artificial Sequence
  spacer sequence CTCN PAM
cucagggaccccucucagca

SEQ ID NO: 7475 - RNA, 20 nt, Artificial Sequence
  spacer sequence CTCN PAM
uggaccucucucagggaccc

SEQ ID NO: 7476 - RNA, 20 nt, Artificial Sequence
  spacer sequence CTCN PAM
cccacccggagccaacucgc

SEQ ID NO: 7477 - RNA, 20 nt, Artificial Sequence
  spacer sequence CTCN PAM
gggugggggaggcugggguu

SEQ ID NO: 7478 - RNA, 20 nt, Artificial Sequence
  spacer sequence CTCN PAM
ccuccagcacacgggcgcug

SEQ ID NO: 7479 - RNA, 20 nt, Artificial Sequence
  spacer sequence CTCN PAM
agcacacgggcgcugugccu

SEQ ID NO: 7480 - RNA, 20 nt, Artificial Sequence
  spacer sequence CTCN PAM
cagccuaagccaggaaagaa

SEQ ID NO: 7481 - RNA, 20 nt, Artificial Sequence
  spacer sequence CTCN PAM
aauuuaagugucagcguaca

SEQ ID NO: 7482 - RNA, 20 nt, Artificial Sequence
  spacer sequence CTCN PAM
caauuaucucucaaucccgg

SEQ ID NO: 7483 - RNA, 20 nt, Artificial Sequence
  spacer sequence CTCN PAM
caaucccggcuugcccugug

SEQ ID NO: 7484 - RNA, 20 nt, Artificial Sequence
  spacer sequence CTCN PAM
aucccggcuugcccugugcu

SEQ ID NO: 7485 - RNA, 20 nt, Artificial Sequence
  spacer sequence CTCN PAM
cccucguuuuaaguacauug

SEQ ID NO: 7486 - RNA, 20 nt, Artificial Sequence
  spacer sequence CTCN PAM
uuuuaaguacauugugcaua

SEQ ID NO: 7487 - RNA, 20 nt, Artificial Sequence
  spacer sequence CTCN PAM
auuugcaucuuauaauaagg

SEQ ID NO: 7488 - RNA, 20 nt, Artificial Sequence
  spacer sequence CTCN PAM
gccauaaaccaguaugauaa

SEQ ID NO: 7489 - RNA, 20 nt, Artificial Sequence
  spacer sequence CTCN PAM
uuaguuuuuaucucucuggg

SEQ ID NO: 7490 - RNA, 20 nt, Artificial Sequence
  spacer sequence CTCN PAM
cuggggcuagauucccccuc

SEQ ID NO: 7491 - RNA, 20 nt, Artificial Sequence
  spacer sequence CTCN PAM
ggggcuagauucccccucau

SEQ ID NO: 7492 - RNA, 20 nt, Artificial Sequence
  spacer sequence CTCN PAM
ugaguucaauauaaguccau

SEQ ID NO: 7493 - RNA, 20 nt, Artificial Sequence
  spacer sequence CTCN PAM
ugagggggaaucuagcccca

SEQ ID NO: 7494 - RNA, 20 nt, Artificial Sequence
  spacer sequence CTCN PAM
uaaggguguuaauguuaaca

SEQ ID NO: 7495 - RNA, 20 nt, Artificial Sequence
  spacer sequence CTCN PAM
ccaaaguguacagaauguuu

SEQ ID NO: 7496 - RNA, 20 nt, Artificial Sequence
  spacer sequence CTCN PAM
agugaaugcaaacauucugu

SEQ ID NO: 7497 - RNA, 20 nt, Artificial Sequence
  spacer sequence CTCN PAM
gugauagcugugguugcuca

SEQ ID NO: 7498 - RNA, 20 nt, Artificial Sequence
  spacer sequence CTCN PAM
uaagugaaaggaguugaguc

SEQ ID NO: 7499 - RNA, 20 nt, Artificial Sequence
  spacer sequence CTCN PAM
uuucacuuaugagcaaccac

SEQ ID NO: 7500 - RNA, 20 nt, Artificial Sequence
  spacer sequence CTCN PAM
acuccuuucacuuaugagca

SEQ ID NO: 7501 - RNA, 20 nt, Artificial Sequence
  spacer sequence CTCN PAM
uugcacugagacauaaucuc

SEQ ID NO: 7502 - RNA, 20 nt, Artificial Sequence
  spacer sequence CTCN PAM
gugcaaagaggugaaaaagg

SEQ ID NO: 7503 - RNA, 20 nt, Artificial Sequence
  spacer sequence CTCN PAM
gguguguucauucucuuaca

SEQ ID NO: 7504 - RNA, 20 nt, Artificial Sequence
  spacer sequence CTCN PAM
uacauuuagauuaauuauaa

SEQ ID NO: 7505 - RNA, 20 nt, Artificial Sequence
  spacer sequence CTCN PAM
ggaaaaugcauaauuucccu

SEQ ID NO: 7506 - RNA, 20 nt, Artificial Sequence
  spacer sequence CTCN PAM
ugguuguuuuuuuuuuuuuu

SEQ ID NO: 7507 - RNA, 20 nt, Artificial Sequence
  spacer sequence CTCN PAM
cuucuuuggaaccaagcuga

SEQ ID NO: 7508 - RNA, 20 nt, Artificial Sequence
  spacer sequence CTCN PAM
uaucaucucccuucuuugga

SEQ ID NO: 7509 - RNA, 20 nt, Artificial Sequence
  spacer sequence CTCN PAM
ccuaucaucucccuucuuug

SEQ ID NO: 7510 - RNA, 20 nt, Artificial Sequence
  spacer sequence CTCN PAM
cccucuccuaucaucucccu

SEQ ID NO: 7511 - RNA, 20 nt, Artificial Sequence
  spacer sequence CTCN PAM
accacccagcuguguuaggc

SEQ ID NO: 7512 - RNA, 20 nt, Artificial Sequence
  spacer sequence CTCN PAM
uacccucuguacaggcccaa

SEQ ID NO: 7513 - RNA, 20 nt, Artificial Sequence
  spacer sequence CTCN PAM
guacaggcccaacacacaug

SEQ ID NO: 7514 - RNA, 20 nt, Artificial Sequence
  spacer sequence CTCN PAM
aguccucucacuugcuucag

SEQ ID NO: 7515 - RNA, 20 nt, Artificial Sequence
  spacer sequence CTCN PAM
cacuugcuucagauuuucca

SEQ ID NO: 7516 - RNA, 20 nt, Artificial Sequence
  spacer sequence CTCN PAM
cuugcuucagauuuuccaag

SEQ ID NO: 7517 - RNA, 20 nt, Artificial Sequence
  spacer sequence CTCN PAM
acugcagccauacaccccgg

SEQ ID NO: 7518 - RNA, 20 nt, Artificial Sequence
  spacer sequence CTCN PAM
gggguguauggcugcaguag

SEQ ID NO: 7519 - RNA, 20 nt, Artificial Sequence
  spacer sequence CTCN PAM
guguugauucagaugauucc

SEQ ID NO: 7520 - RNA, 20 nt, Artificial Sequence
  spacer sequence CTCN PAM
ccuugcuggcaguggcugaa

SEQ ID NO: 7521 - RNA, 20 nt, Artificial Sequence
  spacer sequence CTCN PAM
uugcuggcaguggcugaaau

SEQ ID NO: 7522 - RNA, 20 nt, Artificial Sequence
  spacer sequence CTCN PAM
gggggcugcuccuggggauu

SEQ ID NO: 7523 - RNA, 20 nt, Artificial Sequence
  spacer sequence CTCN PAM
uggggauugguuaccucccu

SEQ ID NO: 7524 - RNA, 20 nt, Artificial Sequence
  spacer sequence CTCN PAM
cucuagauacugggcuccau

SEQ ID NO: 7525 - RNA, 20 nt, Artificial Sequence
  spacer sequence CTCN PAM
agauacugggcuccauccuu

SEQ ID NO: 7526 - RNA, 20 nt, Artificial Sequence
  spacer sequence CTCN PAM
auccuuggcuguguugguua

SEQ ID NO: 7527 - RNA, 20 nt, Artificial Sequence
  spacer sequence CTCN PAM
gcugguaacgacacuugguu

SEQ ID NO: 7528 - RNA, 20 nt, Artificial Sequence
  spacer sequence CTCN PAM
uguccuucgaggucucucuc

SEQ ID NO: 7529 - RNA, 20 nt, Artificial Sequence
  spacer sequence CTCN PAM
aaggacaggagcccuccgcu

SEQ ID NO: 7530 - RNA, 20 nt, Artificial Sequence
  spacer sequence CTCN PAM
cuccaggucuccacagguga

SEQ ID NO: 7531 - RNA, 20 nt, Artificial Sequence
  spacer sequence CTCN PAM
ccaggucuccacaggugaaa

SEQ ID NO: 7532 - RNA, 20 nt, Artificial Sequence
  spacer sequence CTCN PAM
aggucuccacaggugaaacu

SEQ ID NO: 7533 - RNA, 20 nt, Artificial Sequence
  spacer sequence CTCN PAM
acaggugaaacuuuuccacg

SEQ ID NO: 7534 - RNA, 20 nt, Artificial Sequence
  spacer sequence CTCN PAM
uucugcuauuacugugauua

SEQ ID NO: 7535 - RNA, 20 nt, Artificial Sequence
  spacer sequence CTCN PAM
aacccauccgucuucccagc

SEQ ID NO: 7536 - RNA, 20 nt, Artificial Sequence
  spacer sequence CTCN PAM
cugggcaaguugguaacccc

SEQ ID NO: 7537 - RNA, 20 nt, Artificial Sequence
  spacer sequence CTCN PAM
guguguuuuaaaacuaaaau

SEQ ID NO: 7538 - RNA, 20 nt, Artificial Sequence
  spacer sequence CTCN PAM
ucaaggccuccuacgucucu

SEQ ID NO: 7539 - RNA, 20 nt, Artificial Sequence
  spacer sequence CTCN PAM
uacgucucucugaccucuac

SEQ ID NO: 7540 - RNA, 20 nt, Artificial Sequence
  spacer sequence CTCN PAM
cugaccucuacccucugcuc

SEQ ID NO: 7541 - RNA, 20 nt, Artificial Sequence
  spacer sequence CTCN PAM
gaccucuacccucugcucuu

SEQ ID NO: 7542 - RNA, 20 nt, Artificial Sequence
  spacer sequence CTCN PAM
acccucugcucuucgaaaau

SEQ ID NO: 7543 - RNA, 20 nt, Artificial Sequence
  spacer sequence CTCN PAM
gcucuucgaaaauauacugg

SEQ ID NO: 7544 - RNA, 20 nt, Artificial Sequence
  spacer sequence CTCN PAM
ucgaaaauauacuggaugug

SEQ ID NO: 7545 - RNA, 20 nt, Artificial Sequence
  spacer sequence CTCN PAM
caaccccaaaaggcucaaag

SEQ ID NO: 7546 - RNA, 20 nt, Artificial Sequence
  spacer sequence CTCN PAM
accccaaaaggcucaaaguc

SEQ ID NO: 7547 - RNA, 20 nt, Artificial Sequence
  spacer sequence CTCN PAM
aagucuuguagcuuaauuac

SEQ ID NO: 7548 - RNA, 20 nt, Artificial Sequence
  spacer sequence CTCN PAM
guguugcaaauggaaaggua

SEQ ID NO: 7549 - RNA, 20 nt, Artificial Sequence
  spacer sequence CTCN PAM
uacuggaaaucacauugaau

SEQ ID NO: 7550 - RNA, 20 nt, Artificial Sequence
  spacer sequence CTCN PAM
ccuacuggaaaucacauuga

SEQ ID NO: 7551 - RNA, 20 nt, Artificial Sequence
  spacer sequence CTCN PAM
agcccaccccacaucuguuc

SEQ ID NO: 7552 - RNA, 20 nt, Artificial Sequence
  spacer sequence CTCN PAM
uggccuaggggguccuugug

SEQ ID NO: 7553 - RNA, 20 nt, Artificial Sequence
  spacer sequence CTCN PAM
ccuggccuaggggguccuug

SEQ ID NO: 7554 - RNA, 20 nt, Artificial Sequence
  spacer sequence CTCN PAM
aggagaagagugggagccca

SEQ ID NO: 7555 - RNA, 20 nt, Artificial Sequence
  spacer sequence CTCN PAM
uggaguuaaagguaaaggcu

SEQ ID NO: 7556 - RNA, 20 nt, Artificial Sequence
  spacer sequence CTCN PAM
ucuccuggaguuaaagguaa

SEQ ID NO: 7557 - RNA, 20 nt, Artificial Sequence
  spacer sequence CTCN PAM
cacucuucuccuggaguuaa

SEQ ID NO: 7558 - RNA, 20 nt, Artificial Sequence
  spacer sequence CTCN PAM
gggcucccacucuucuccug

SEQ ID NO: 7559 - RNA, 20 nt, Artificial Sequence
  spacer sequence CTCN PAM
gaagcuguauucacucuggg

SEQ ID NO: 7560 - RNA, 20 nt, Artificial Sequence
  spacer sequence CTCN PAM
aguuucuguagucuuauccu

SEQ ID NO: 7561 - RNA, 20 nt, Artificial Sequence
  spacer sequence CTCN PAM
augacauuacuggccuugau

SEQ ID NO: 7562 - RNA, 20 nt, Artificial Sequence
  spacer sequence CTCN PAM
ucuguaacgacuaugacgau

SEQ ID NO: 7563 - RNA, 20 nt, Artificial Sequence
  spacer sequence CTCN PAM
ugggcaaaauggaaaagaac

SEQ ID NO: 7564 - RNA, 20 nt, Artificial Sequence
  spacer sequence CTCN PAM
gcaaaacauaaucacuaaaa

SEQ ID NO: 7565 - RNA, 20 nt, Artificial Sequence
  spacer sequence CTCN PAM
ucaugucagcacaaggcuua

SEQ ID NO: 7566 - RNA, 20 nt, Artificial Sequence
  spacer sequence CTCN PAM
cagacuucaucucacacagg

SEQ ID NO: 7567 - RNA, 20 nt, Artificial Sequence
  spacer sequence CTCN PAM
cacaggccuugcuuuccucc

SEQ ID NO: 7568 - RNA, 20 nt, Artificial Sequence
  spacer sequence CTCN PAM
cuguccccacucaaggucua

SEQ ID NO: 7569 - RNA, 20 nt, Artificial Sequence
  spacer sequence CTCN PAM
aggucuauaccucacuuuuu

SEQ ID NO: 7570 - RNA, 20 nt, Artificial Sequence
  spacer sequence CTCN PAM
cuuuuucauuacacuuuacu

SEQ ID NO: 7571 - RNA, 20 nt, Artificial Sequence
  spacer sequence CTCN PAM
cacugaaauauaguaaagug

SEQ ID NO: 7572 - RNA, 20 nt, Artificial Sequence
  spacer sequence CTCN PAM
gcuauuaccaggacgcccca

SEQ ID NO: 7573 - RNA, 20 nt, Artificial Sequence
  spacer sequence CTCN PAM
ggggaacacuuccaugugug

SEQ ID NO: 7574 - RNA, 20 nt, Artificial Sequence
  spacer sequence CTCN PAM
gacgccucccggccguucuc

SEQ ID NO: 7575 - RNA, 20 nt, Artificial Sequence
  spacer sequence CTCN PAM
cggccguucucuugugacug

SEQ ID NO: 7576 - RNA, 20 nt, Artificial Sequence
  spacer sequence CTCN PAM
ugugacugauccuuagcauu

SEQ ID NO: 7577 - RNA, 20 nt, Artificial Sequence
  spacer sequence CTCN PAM
uaggccaccguccugaggug

SEQ ID NO: 7578 - RNA, 20 nt, Artificial Sequence
  spacer sequence CTCN PAM
ggacgguggccuaggagcaa

SEQ ID NO: 7579 - RNA, 20 nt, Artificial Sequence
  spacer sequence CTCN PAM
gcaaugcccacccugcaaca

SEQ ID NO: 7580 - RNA, 20 nt, Artificial Sequence
  spacer sequence CTCN PAM
ugugaccugccauggccaca

SEQ ID NO: 7581 - RNA, 20 nt, Artificial Sequence
  spacer sequence CTCN PAM
acuccugugaccugccaugg

SEQ ID NO: 7582 - RNA, 20 nt, Artificial Sequence
  spacer sequence CTCN PAM
guggucuccacuccugugac

SEQ ID NO: 7583 - RNA, 20 nt, Artificial Sequence
  spacer sequence CTCN PAM
gggagaaacucuaggaugaa

SEQ ID NO: 7584 - RNA, 20 nt, Artificial Sequence
  spacer sequence CTCN PAM
cagagcucuguggucuccac

SEQ ID NO: 7585 - RNA, 20 nt, Artificial Sequence
  spacer sequence CTCN PAM
aggaugaaauagagaguuug

SEQ ID NO: 7586 - RNA, 20 nt, Artificial Sequence
  spacer sequence CTCN PAM
auuucauccuagaguuucuc

SEQ ID NO: 7587 - RNA, 20 nt, Artificial Sequence
  spacer sequence CTCN PAM
cuauuucauccuagaguuuc

SEQ ID NO: 7588 - RNA, 20 nt, Artificial Sequence
  spacer sequence CTCN PAM
uggaagcaggacuagucuau

SEQ ID NO: 7589 - RNA, 20 nt, Artificial Sequence
  spacer sequence CTCN PAM
cccaugccuacuauccuguu

SEQ ID NO: 7590 - RNA, 20 nt, Artificial Sequence
  spacer sequence CTCN PAM
cccccaugccuacuauccug

SEQ ID NO: 7591 - RNA, 20 nt, Artificial Sequence
  spacer sequence CTCN PAM
cucccccaugccuacuaucc

SEQ ID NO: 7592 - RNA, 20 nt, Artificial Sequence
  spacer sequence CTCN PAM
auuuuugaaaugcaagcucc

SEQ ID NO: 7593 - RNA, 20 nt, Artificial Sequence
  spacer sequence CTCN PAM
aagagagugaagccccagcc

SEQ ID NO: 7594 - RNA, 20 nt, Artificial Sequence
  spacer sequence CTCN PAM
uggagcuugcauuucaaaaa

SEQ ID NO: 7595 - RNA, 20 nt, Artificial Sequence
  spacer sequence CTCN PAM
cuuggagcuugcauuucaaa

SEQ ID NO: 7596 - RNA, 20 nt, Artificial Sequence
  spacer sequence CTCN PAM
gcacaaaguaaggcagugca

SEQ ID NO: 7597 - RNA, 20 nt, Artificial Sequence
  spacer sequence CTCN PAM
uauuuguaaaaguuacauua

SEQ ID NO: 7598 - RNA, 20 nt, Artificial Sequence
  spacer sequence CTCN PAM
cgccuauaaucccagcaccu

SEQ ID NO: 7599 - RNA, 20 nt, Artificial Sequence
  spacer sequence CTCN PAM
ccaggugcugggauuauagg

SEQ ID NO: 7600 - RNA, 20 nt, Artificial Sequence
  spacer sequence CTCN PAM
ugccuuggccuccccaggug

SEQ ID NO: 7601 - RNA, 20 nt, Artificial Sequence
  spacer sequence CTCN PAM
uggcuucaaaugauccuccu

SEQ ID NO: 7602 - RNA, 20 nt, Artificial Sequence
  spacer sequence CTCN PAM
aacuccuggcuucaaaugau

SEQ ID NO: 7603 - RNA, 20 nt, Artificial Sequence
  spacer sequence CTCN PAM
ccucaaaaaagaaguauuug

SEQ ID NO: 7604 - RNA, 20 nt, Artificial Sequence
  spacer sequence CTCN PAM
aaaaagaaguauuuguaccu

SEQ ID NO: 7605 - RNA, 20 nt, Artificial Sequence
  spacer sequence CTCN PAM
cugaucugcaaaaaucuugu

SEQ ID NO: 7606 - RNA, 20 nt, Artificial Sequence
  spacer sequence CTCN PAM
gaucugcaaaaaucuuguag

SEQ ID NO: 7607 - RNA, 20 nt, Artificial Sequence
  spacer sequence CTCN PAM
aagcaaaaugauaaaccuaa

SEQ ID NO: 7608 - RNA, 20 nt, Artificial Sequence
  spacer sequence CTCN PAM
uuaagcacuuaacacuuuag

SEQ ID NO: 7609 - RNA, 20 nt, Artificial Sequence
  spacer sequence CTCN PAM
aggucuuuaucuuuaggcug

SEQ ID NO: 7610 - RNA, 20 nt, Artificial Sequence
  spacer sequence CTCN PAM
uggcuuguuuugaauucccu

SEQ ID NO: 7611 - RNA, 20 nt, Artificial Sequence
  spacer sequence CTCN PAM
uccaaaacuuuucuauggac

SEQ ID NO: 7612 - RNA, 20 nt, Artificial Sequence
  spacer sequence CTCN PAM
cuccuguaaucccagcacuu

SEQ ID NO: 7613 - RNA, 20 nt, Artificial Sequence
  spacer sequence CTCN PAM
uguaaucccagcacuuuggg

SEQ ID NO: 7614 - RNA, 20 nt, Artificial Sequence
  spacer sequence CTCN PAM
caaagugcugggauuacagg

SEQ ID NO: 7615 - RNA, 20 nt, Artificial Sequence
  spacer sequence CTCN PAM
gccucccaaagugcugggau

SEQ ID NO: 7616 - RNA, 20 nt, Artificial Sequence
  spacer sequence CTCN PAM
ggcgauccacccgccucagc

SEQ ID NO: 7617 - RNA, 20 nt, Artificial Sequence
  spacer sequence CTCN PAM
ugaccucaggcgauccaccc

SEQ ID NO: 7618 - RNA, 20 nt, Artificial Sequence
  spacer sequence CTCN PAM
acuaaaaauacaaaaaauua

SEQ ID NO: 7619 - RNA, 20 nt, Artificial Sequence
  spacer sequence CTCN PAM
ggaggcugaggcaggagaau

SEQ ID NO: 7620 - RNA, 20 nt, Artificial Sequence
  spacer sequence CTCN PAM
cgaguagcuggaauuacagg

SEQ ID NO: 7621 - RNA, 20 nt, Artificial Sequence
  spacer sequence CTCN PAM
gccucccgaguagcuggaau

SEQ ID NO: 7622 - RNA, 20 nt, Artificial Sequence
  spacer sequence CTCN PAM
ugccucagccucccgaguag

SEQ ID NO: 7623 - RNA, 20 nt, Artificial Sequence
  spacer sequence CTCN PAM
cagguuccagcaauucuccu

SEQ ID NO: 7624 - RNA, 20 nt, Artificial Sequence
  spacer sequence CTCN PAM
gccucccagguuccagcaau

SEQ ID NO: 7625 - RNA, 20 nt, Artificial Sequence
  spacer sequence CTCN PAM
cugcaaccuccgccucccag

SEQ ID NO: 7626 - RNA, 20 nt, Artificial Sequence
  spacer sequence CTCN PAM
agcuugggcaacaagaguga

SEQ ID NO: 7627 - RNA, 20 nt, Artificial Sequence
  spacer sequence CTCN PAM
uguugcccaagcuagagugc

SEQ ID NO: 7628 - RNA, 20 nt, Artificial Sequence
  spacer sequence CTCN PAM
gucucaaaaaaaaaaaaaaa

SEQ ID NO: 7629 - RNA, 20 nt, Artificial Sequence
  spacer sequence CTCN PAM
aaaaaaaaaaaaaaaaaaag

SEQ ID NO: 7630 - RNA, 20 nt, Artificial Sequence
  spacer sequence CTCN PAM
auaacauggccccaaauuag

SEQ ID NO: 7631 - RNA, 20 nt, Artificial Sequence
  spacer sequence CTCN PAM
uccugccauacuggucuggu

SEQ ID NO: 7632 - RNA, 20 nt, Artificial Sequence
  spacer sequence CTCN PAM
agacacugcaguacugccuu

SEQ ID NO: 7633 - RNA, 20 nt, Artificial Sequence
  spacer sequence CTCN PAM
cugucaucuaaauucuagcc

SEQ ID NO: 7634 - RNA, 20 nt, Artificial Sequence
  spacer sequence CTCN PAM
gucaucuaaauucuagccug

SEQ ID NO: 7635 - RNA, 20 nt, Artificial Sequence
  spacer sequence CTCN PAM
gugggccucagagaaauuau

SEQ ID NO: 7636 - RNA, 20 nt, Artificial Sequence
  spacer sequence CTCN PAM
gagaaauuaucuuccucugc

SEQ ID NO: 7637 - RNA, 20 nt, Artificial Sequence
  spacer sequence CTCN PAM
gaggcccacagagauguuag

SEQ ID NO: 7638 - RNA, 20 nt, Artificial Sequence
  spacer sequence CTCN PAM
gcauuccuccaguuggcauc

SEQ ID NO: 7639 - RNA, 20 nt, Artificial Sequence
  spacer sequence CTCN PAM
aguuggcaucucucacuaau

SEQ ID NO: 7640 - RNA, 20 nt, Artificial Sequence
  spacer sequence CTCN PAM
cacuaauggauuaaucauau

SEQ ID NO: 7641 - RNA, 20 nt, Artificial Sequence
  spacer sequence CTCN PAM
cuaauggauuaaucauauua

SEQ ID NO: 7642 - RNA, 20 nt, Artificial Sequence
  spacer sequence CTCN PAM
ccuauuguuaugugcuuuua

SEQ ID NO: 7643 - RNA, 20 nt, Artificial Sequence
  spacer sequence CTCN PAM
uauuguuaugugcuuuuaug

SEQ ID NO: 7644 - RNA, 20 nt, Artificial Sequence
  spacer sequence CTCN PAM
aagggauuacaguugguccu

SEQ ID NO: 7645 - RNA, 20 nt, Artificial Sequence
  spacer sequence CTCN PAM
aggcacguggggaacuauaa

SEQ ID NO: 7646 - RNA, 20 nt, Artificial Sequence
  spacer sequence CTCN PAM
ugcacacuguaggcuggggg

SEQ ID NO: 7647 - RNA, 20 nt, Artificial Sequence
  spacer sequence CTCN PAM
gaucaucagcauaagcaaau

SEQ ID NO: 7648 - RNA, 20 nt, Artificial Sequence
  spacer sequence CTCN PAM
uguuugcaguauuaucuuuc

SEQ ID NO: 7649 - RNA, 20 nt, Artificial Sequence
  spacer sequence CTCN PAM
aacugauuaccugccacuaa

SEQ ID NO: 7650 - RNA, 20 nt, Artificial Sequence
  spacer sequence CTCN PAM
uaucuuuacaaagauugugu

SEQ ID NO: 7651 - RNA, 20 nt, Artificial Sequence
  spacer sequence CTCN PAM
uucuaaaucauugguguugu

SEQ ID NO: 7652 - RNA, 20 nt, Artificial Sequence
  spacer sequence CTCN PAM
cauauuuggcccaguccuuc

SEQ ID NO: 7653 - RNA, 20 nt, Artificial Sequence
  spacer sequence CTCN PAM
ucccuaccauuugaaaaaca

SEQ ID NO: 7654 - RNA, 20 nt, Artificial Sequence
  spacer sequence CTCN PAM
ggaaugaaugggaacguuau

SEQ ID NO: 7655 - RNA, 20 nt, Artificial Sequence
  spacer sequence CTCN PAM
ggcccuuugccugggacugc

SEQ ID NO: 7656 - RNA, 20 nt, Artificial Sequence
  spacer sequence CTCN PAM
ccguaccagcuuaacugcaa

SEQ ID NO: 7657 - RNA, 20 nt, Artificial Sequence
  spacer sequence CTCN PAM
acugguagcaauuucugaug

SEQ ID NO: 7658 - RNA, 20 nt, Artificial Sequence
  spacer sequence CTCN PAM
uugcaucccuuccccagcac

SEQ ID NO: 7659 - RNA, 20 nt, Artificial Sequence
  spacer sequence CTCN PAM
gcagguugcauauagcagga

SEQ ID NO: 7660 - RNA, 20 nt, Artificial Sequence
  spacer sequence CTCN PAM
uucauuuguucaaucaacaa

SEQ ID NO: 7661 - RNA, 20 nt, Artificial Sequence
  spacer sequence CTCN PAM
aucugccguauggcucauuc

SEQ ID NO: 7662 - RNA, 20 nt, Artificial Sequence
  spacer sequence CTCN PAM
aguauucuccaucugccgua

SEQ ID NO: 7663 - RNA, 20 nt, Artificial Sequence
  spacer sequence CTCN PAM
ccaguauucuccaucugccg

SEQ ID NO: 7664 - RNA, 20 nt, Artificial Sequence
  spacer sequence CTCN PAM
gauaugccucacaaaaccau

SEQ ID NO: 7665 - RNA, 20 nt, Artificial Sequence
  spacer sequence CTCN PAM
caaaaccauaccgguccucc

SEQ ID NO: 7666 - RNA, 20 nt, Artificial Sequence
  spacer sequence CTCN PAM
cagcaucagaaauggacaga

SEQ ID NO: 7667 - RNA, 20 nt, Artificial Sequence
  spacer sequence CTCN PAM
auagucugcagaaccagagc

SEQ ID NO: 7668 - RNA, 20 nt, Artificial Sequence
  spacer sequence CTCN PAM
gguucugcagacuauggagc

SEQ ID NO: 7669 - RNA, 20 nt, Artificial Sequence
  spacer sequence CTCN PAM
aagcaaaaccacuuugaaua

SEQ ID NO: 7670 - RNA, 20 nt, Artificial Sequence
  spacer sequence CTCN PAM
gcauuggcauuacaaguggu

SEQ ID NO: 7671 - RNA, 20 nt, Artificial Sequence
  spacer sequence CTCN PAM
uccugaaauuuucuuaccac

SEQ ID NO: 7672 - RNA, 20 nt, Artificial Sequence
  spacer sequence CTCN PAM
uaguaucuaccucauccuga

SEQ ID NO: 7673 - RNA, 20 nt, Artificial Sequence
  spacer sequence CTCN PAM
accuuuugacuccuaguauc

SEQ ID NO: 7674 - RNA, 20 nt, Artificial Sequence
  spacer sequence CTCN PAM
caaccucuaccuuuugacuc

SEQ ID NO: 7675 - RNA, 20 nt, Artificial Sequence
  spacer sequence CTCN PAM
cuaagcuuaaguagaaugaa

SEQ ID NO: 7676 - RNA, 20 nt, Artificial Sequence
  spacer sequence CTCN PAM
aagcuuaaguagaaugaaaa

SEQ ID NO: 7677 - RNA, 20 nt, Artificial Sequence
  spacer sequence CTCN PAM
augcauguucuuauuucuuc

SEQ ID NO: 7678 - RNA, 20 nt, Artificial Sequence
  spacer sequence CTCN PAM
cgucuguaaucccagcacuu

SEQ ID NO: 7679 - RNA, 20 nt, Artificial Sequence
  spacer sequence CTCN PAM
caaagugcugggauuacaga

SEQ ID NO: 7680 - RNA, 20 nt, Artificial Sequence
  spacer sequence CTCN PAM
ggugauccacccaccuuggc

SEQ ID NO: 7681 - RNA, 20 nt, Artificial Sequence
  spacer sequence CTCN PAM
ugaccucaggugauccaccc

SEQ ID NO: 7682 - RNA, 20 nt, Artificial Sequence
  spacer sequence CTCN PAM
aacuccugaccucaggugau

SEQ ID NO: 7683 - RNA, 20 nt, Artificial Sequence
  spacer sequence CTCN PAM
acuaaaaauauaaaaauuag

SEQ ID NO: 7684 - RNA, 20 nt, Artificial Sequence
  spacer sequence CTCN PAM
ggaggcugagguaggagaau

SEQ ID NO: 7685 - RNA, 20 nt, Artificial Sequence
  spacer sequence CTCN PAM
agaguagcugggauuauagg

SEQ ID NO: 7686 - RNA, 20 nt, Artificial Sequence
  spacer sequence CTCN PAM
gccuccagaguagcugggau

SEQ ID NO: 7687 - RNA, 20 nt, Artificial Sequence
  spacer sequence CTCN PAM
uaccucagccuccagaguag

SEQ ID NO: 7688 - RNA, 20 nt, Artificial Sequence
  spacer sequence CTCN PAM
cggauucaagcaauucuccu

SEQ ID NO: 7689 - RNA, 20 nt, Artificial Sequence
  spacer sequence CTCN PAM
gccucccggauucaagcaau

SEQ ID NO: 7690 - RNA, 20 nt, Artificial Sequence
  spacer sequence CTCN PAM
cugcaaccuccgccucccgg

SEQ ID NO: 7691 - RNA, 20 nt, Artificial Sequence
  spacer sequence CTCN PAM
gcucacugcaaccuccgccu

SEQ ID NO: 7692 - RNA, 20 nt, Artificial Sequence
  spacer sequence CTCN PAM
agccugggcaacaauagcaa

SEQ ID NO: 7693 - RNA, 20 nt, Artificial Sequence
  spacer sequence CTCN PAM
aucucaaaaaaaaaaaaaag

SEQ ID NO: 7694 - RNA, 20 nt, Artificial Sequence
  spacer sequence CTCN PAM
aaaaaaaaaaaaagaacaug

SEQ ID NO: 7695 - RNA, 20 nt, Artificial Sequence
  spacer sequence CTCN PAM
auaaacauuagcugauauga

SEQ ID NO: 7696 - RNA, 20 nt, Artificial Sequence
  spacer sequence CTCN PAM
uuaccaagcucugggcaguc

SEQ ID NO: 7697 - RNA, 20 nt, Artificial Sequence
  spacer sequence CTCN PAM
gggcagucugccaaucaagg

SEQ ID NO: 7698 - RNA, 20 nt, Artificial Sequence
  spacer sequence CTCN PAM
uccuugauuggcagacugcc

SEQ ID NO: 7699 - RNA, 20 nt, Artificial Sequence
  spacer sequence CTCN PAM
gucagagaucacauuucaga

SEQ ID NO: 7700 - RNA, 20 nt, Artificial Sequence
  spacer sequence CTCN PAM
gacugagaaccuaacccuuc

SEQ ID NO: 7701 - RNA, 20 nt, Artificial Sequence
  spacer sequence CTCN PAM
aggcacccgaagaaguuugg

SEQ ID NO: 7702 - RNA, 20 nt, Artificial Sequence
  spacer sequence CTCN PAM
gugagaugccgaggcccugu

SEQ ID NO: 7703 - RNA, 20 nt, Artificial Sequence
  spacer sequence CTCN PAM
cugaggguggcaaagcacca

SEQ ID NO: 7704 - RNA, 20 nt, Artificial Sequence
  spacer sequence CTCN PAM
gcaucucacugaggguggca

SEQ ID NO: 7705 - RNA, 20 nt, Artificial Sequence
  spacer sequence CTCN PAM
augcuacccuccagcaggaa

SEQ ID NO: 7706 - RNA, 20 nt, Artificial Sequence
  spacer sequence CTCN PAM
agcaggaaaaggggugaaga

SEQ ID NO: 7707 - RNA, 20 nt, Artificial Sequence
  spacer sequence CTCN PAM
ucaccccuuuuccugcugga

SEQ ID NO: 7708 - RNA, 20 nt, Artificial Sequence
  spacer sequence CTCN PAM
gggugcaucuuaucacuuug

SEQ ID NO: 7709 - RNA, 20 nt, Artificial Sequence
  spacer sequence CTCN PAM
agucccaagaggccggaaca

SEQ ID NO: 7710 - RNA, 20 nt, Artificial Sequence
  spacer sequence CTCN PAM
ugggacuggaguguugacau

SEQ ID NO: 7711 - RNA, 20 nt, Artificial Sequence
  spacer sequence CTCN PAM
cacugcugugacuguugcgu

SEQ ID NO: 7712 - RNA, 20 nt, Artificial Sequence
  spacer sequence CTCN PAM
uacuucccagcagcacgcaa

SEQ ID NO: 7713 - RNA, 20 nt, Artificial Sequence
  spacer sequence CTCN PAM
gaaaaaggaaggacacaauc

SEQ ID NO: 7714 - RNA, 20 nt, Artificial Sequence
  spacer sequence CTCN PAM
cucugaaaaaggaaggacac

SEQ ID NO: 7715 - RNA, 20 nt, Artificial Sequence
  spacer sequence CTCN PAM
uucugcaugugacacauuca

SEQ ID NO: 7716 - RNA, 20 nt, Artificial Sequence
  spacer sequence CTCN PAM
ggguuaugaucuuggcuuua

SEQ ID NO: 7717 - RNA, 20 nt, Artificial Sequence
  spacer sequence CTCN PAM
gagaacagcaccauuuacca

SEQ ID NO: 7718 - RNA, 20 nt, Artificial Sequence
  spacer sequence CTCN PAM
gagcccacagcucaggguua

SEQ ID NO: 7719 - RNA, 20 nt, Artificial Sequence
  spacer sequence CTCN PAM
uccugcccccaacacauagg

SEQ ID NO: 7720 - RNA, 20 nt, Artificial Sequence
  spacer sequence CTCN PAM
gacacaggccuauguguugg

SEQ ID NO: 7721 - RNA, 20 nt, Artificial Sequence
  spacer sequence CTCN PAM
cagagaagcugaaaaauaaa

SEQ ID NO: 7722 - RNA, 20 nt, Artificial Sequence
  spacer sequence CTCN PAM
gagaagcugaaaaauaaaaa

SEQ ID NO: 7723 - RNA, 20 nt, Artificial Sequence
  spacer sequence CTCN PAM
gagagcacauuuucuuuucc

SEQ ID NO: 7724 - RNA, 20 nt, Artificial Sequence
  spacer sequence CTCN PAM
uuuuauuuuucagcuucucu

SEQ ID NO: 7725 - RNA, 20 nt, Artificial Sequence
  spacer sequence CTCN PAM
uguguuccugaguucugagc

SEQ ID NO: 7726 - RNA, 20 nt, Artificial Sequence
  spacer sequence CTCN PAM
ggaacacaagagauuuuucu

SEQ ID NO: 7727 - RNA, 20 nt, Artificial Sequence
  spacer sequence CTCN PAM
gaacucaggaacacaagaga

SEQ ID NO: 7728 - RNA, 20 nt, Artificial Sequence
  spacer sequence CTCN PAM
cccaaagcucagaacucagg

SEQ ID NO: 7729 - RNA, 20 nt, Artificial Sequence
  spacer sequence CTCN PAM
ucagaaacucacccaaagcu

SEQ ID NO: 7730 - RNA, 20 nt, Artificial Sequence
  spacer sequence CTCN PAM
gaaauagaagcaugaguaac

SEQ ID NO: 7731 - RNA, 20 nt, Artificial Sequence
  spacer sequence CTCN PAM
ugcuucuauuucagagugac

SEQ ID NO: 7732 - RNA, 20 nt, Artificial Sequence
  spacer sequence CTCN PAM
aagauuugcaguuacucaug

SEQ ID NO: 7733 - RNA, 20 nt, Artificial Sequence
  spacer sequence CTCN PAM
uccuaccucucaauuggcuu

SEQ ID NO: 7734 - RNA, 20 nt, Artificial Sequence
  spacer sequence CTCN PAM
caauuggcuuucuacguauu

SEQ ID NO: 7735 - RNA, 20 nt, Artificial Sequence
  spacer sequence CTCN PAM
auuggcuuucuacguauucu

SEQ ID NO: 7736 - RNA, 20 nt, Artificial Sequence
  spacer sequence CTCN PAM
ucuagaauacguagaaagcc

SEQ ID NO: 7737 - RNA, 20 nt, Artificial Sequence
  spacer sequence CTCN PAM
cugcugauuugucccucuuc

SEQ ID NO: 7738 - RNA, 20 nt, Artificial Sequence
  spacer sequence CTCN PAM
cccugcugauuugucccucu

SEQ ID NO: 7739 - RNA, 20 nt, Artificial Sequence
  spacer sequence CTCN PAM
cucccugcugauuugucccu

SEQ ID NO: 7740 - RNA, 20 nt, Artificial Sequence
  spacer sequence CTCN PAM
cgcugccauuucugaaccuu

SEQ ID NO: 7741 - RNA, 20 nt, Artificial Sequence
  spacer sequence CTCN PAM
gaccauccucaacagggaug

SEQ ID NO: 7742 - RNA, 20 nt, Artificial Sequence
  spacer sequence CTCN PAM
acagggauguuugauuugcu

SEQ ID NO: 7743 - RNA, 20 nt, Artificial Sequence
  spacer sequence CTCN PAM
gugaggcuucccgcugucuu

SEQ ID NO: 7744 - RNA, 20 nt, Artificial Sequence
  spacer sequence CTCN PAM
cugagcaacagcaaaucaaa

SEQ ID NO: 7745 - RNA, 20 nt, Artificial Sequence
  spacer sequence CTCN PAM
uauuucagggagggcuuugc

SEQ ID NO: 7746 - RNA, 20 nt, Artificial Sequence
  spacer sequence CTCN PAM
cugaaauaggagaaagacag

SEQ ID NO: 7747 - RNA, 20 nt, Artificial Sequence
  spacer sequence CTCN PAM
aaacagcugcugcgcacagc

SEQ ID NO: 7748 - RNA, 20 nt, Artificial Sequence
  spacer sequence CTCN PAM
guggccauuucuuuucuugc

SEQ ID NO: 7749 - RNA, 20 nt, Artificial Sequence
  spacer sequence CTCN PAM
cgccuguaaucccagcacuu

SEQ ID NO: 7750 - RNA, 20 nt, Artificial Sequence
  spacer sequence CTCN PAM
caaagugcugggauuacagg

SEQ ID NO: 7751 - RNA, 20 nt, Artificial Sequence
  spacer sequence CTCN PAM
ggugauucgcccaccuuggc

SEQ ID NO: 7752 - RNA, 20 nt, Artificial Sequence
  spacer sequence CTCN PAM
ugaccucaggugauucgccc

SEQ ID NO: 7753 - RNA, 20 nt, Artificial Sequence
  spacer sequence CTCN PAM
aacuccugaccucaggugau

SEQ ID NO: 7754 - RNA, 20 nt, Artificial Sequence
  spacer sequence CTCN PAM
auuucuacuaaaaauacaaa

SEQ ID NO: 7755 - RNA, 20 nt, Artificial Sequence
  spacer sequence CTCN PAM
ggaggcugaggcaggggaau

SEQ ID NO: 7756 - RNA, 20 nt, Artificial Sequence
  spacer sequence CTCN PAM
ugaguagcuggaacuacagg

SEQ ID NO: 7757 - RNA, 20 nt, Artificial Sequence
  spacer sequence CTCN PAM
gccuccugaguagcuggaac

SEQ ID NO: 7758 - RNA, 20 nt, Artificial Sequence
  spacer sequence CTCN PAM
cugguucaagugauuccccu

SEQ ID NO: 7759 - RNA, 20 nt, Artificial Sequence
  spacer sequence CTCN PAM
gccucccugguucaagugau

SEQ ID NO: 7760 - RNA, 20 nt, Artificial Sequence
  spacer sequence CTCN PAM
ccgcaaccucugccucccug

SEQ ID NO: 7761 - RNA, 20 nt, Artificial Sequence
  spacer sequence CTCN PAM
gcucaccgcaaccucugccu

SEQ ID NO: 7762 - RNA, 20 nt, Artificial Sequence
  spacer sequence CTCN PAM
agccugggagacagggugag

SEQ ID NO: 7763 - RNA, 20 nt, Artificial Sequence
  spacer sequence CTCN PAM
caggcuggagugcaguggcg

SEQ ID NO: 7764 - RNA, 20 nt, Artificial Sequence
  spacer sequence CTCN PAM
cccugucucccaggcuggag

SEQ ID NO: 7765 - RNA, 20 nt, Artificial Sequence
  spacer sequence CTCN PAM
aucucaaaaaaaaaaaagaa

SEQ ID NO: 7766 - RNA, 20 nt, Artificial Sequence
  spacer sequence CTCN PAM
aaaaaaaaaaagaaagaaaa

SEQ ID NO: 7767 - RNA, 20 nt, Artificial Sequence
  spacer sequence CTCN PAM
aacaggaugugauguggcau

SEQ ID NO: 7768 - RNA, 20 nt, Artificial Sequence
  spacer sequence CTCN PAM
uauaucuugucuagagaaug

SEQ ID NO: 7769 - RNA, 20 nt, Artificial Sequence
  spacer sequence CTCN PAM
agacaagauauaagagaaac

SEQ ID NO: 7770 - RNA, 20 nt, Artificial Sequence
  spacer sequence CTCN PAM
caaucuguuccauucucuag

SEQ ID NO: 7771 - RNA, 20 nt, Artificial Sequence
  spacer sequence CTCN PAM
aaugacuuaagugggucuca

SEQ ID NO: 7772 - RNA, 20 nt, Artificial Sequence
  spacer sequence CTCN PAM
ucaaaccaaauucaucucca

SEQ ID NO: 7773 - RNA, 20 nt, Artificial Sequence
  spacer sequence CTCN PAM
cagcaauucuuggucuccag

SEQ ID NO: 7774 - RNA, 20 nt, Artificial Sequence
  spacer sequence CTCN PAM
gcaauucuuggucuccaggu

SEQ ID NO: 7775 - RNA, 20 nt, Artificial Sequence
  spacer sequence CTCN PAM
agguuuauuucuaccguugg

SEQ ID NO: 7776 - RNA, 20 nt, Artificial Sequence
  spacer sequence CTCN PAM
aacgguagaaauaaaccugg

SEQ ID NO: 7777 - RNA, 20 nt, Artificial Sequence
  spacer sequence CTCN PAM
gucauaggaauacuauuuua

SEQ ID NO: 7778 - RNA, 20 nt, Artificial Sequence
  spacer sequence CTCN PAM
cuagugacccacuaaauuca

SEQ ID NO: 7779 - RNA, 20 nt, Artificial Sequence
  spacer sequence CTCN PAM
cccuagugacccacuaaauu

SEQ ID NO: 7780 - RNA, 20 nt, Artificial Sequence
  spacer sequence CTCN PAM
ugugcaaaggaauucaagug

SEQ ID NO: 7781 - RNA, 20 nt, Artificial Sequence
  spacer sequence CTCN PAM
cagcuccugugcaaaggaau

SEQ ID NO: 7782 - RNA, 20 nt, Artificial Sequence
  spacer sequence CTCN PAM
gccacuaacugugugguuuc

SEQ ID NO: 7783 - RNA, 20 nt, Artificial Sequence
  spacer sequence CTCN PAM
aaaaugagugauuacuagga

SEQ ID NO: 7784 - RNA, 20 nt, Artificial Sequence
  spacer sequence CTCN PAM
uuuuagagaucagaauaaua

SEQ ID NO: 7785 - RNA, 20 nt, Artificial Sequence
  spacer sequence CTCN PAM
caggaaguacuuaagcuuua

SEQ ID NO: 7786 - RNA, 20 nt, Artificial Sequence
  spacer sequence CTCN PAM
cuuccaguaaaauccagaag

SEQ ID NO: 7787 - RNA, 20 nt, Artificial Sequence
  spacer sequence CTCN PAM
aggggaaugcaaacugaaga

SEQ ID NO: 7788 - RNA, 20 nt, Artificial Sequence
  spacer sequence CTCN PAM
ucaguuugcauuccccugga

SEQ ID NO: 7789 - RNA, 20 nt, Artificial Sequence
  spacer sequence CTCN PAM
ccuaggcagucagaggaaag

SEQ ID NO: 7790 - RNA, 20 nt, Artificial Sequence
  spacer sequence CTCN PAM
uaggcagucagaggaaagaa

SEQ ID NO: 7791 - RNA, 20 nt, Artificial Sequence
  spacer sequence CTCN PAM
gacugccuaggagagacagu

SEQ ID NO: 7792 - RNA, 20 nt, Artificial Sequence
  spacer sequence CTCN PAM
gcugguuaggaacucaagau

SEQ ID NO: 7793 - RNA, 20 nt, Artificial Sequence
  spacer sequence CTCN PAM
agaugaacucuugaagaagg

SEQ ID NO: 7794 - RNA, 20 nt, Artificial Sequence
  spacer sequence CTCN PAM
ugaagaaggaaggugugcuu

SEQ ID NO: 7795 - RNA, 20 nt, Artificial Sequence
  spacer sequence CTCN PAM
aaauuccucaaaucugcuuc

SEQ ID NO: 7796 - RNA, 20 nt, Artificial Sequence
  spacer sequence CTCN PAM
aaucugcuuccuucacacua

SEQ ID NO: 7797 - RNA, 20 nt, Artificial Sequence
  spacer sequence CTCN PAM
aaaaggagucaaagcuaugu

SEQ ID NO: 7798 - RNA, 20 nt, Artificial Sequence
  spacer sequence CTCN PAM
uuuuggaguauagugugaag

SEQ ID NO: 7799 - RNA, 20 nt, Artificial Sequence
  spacer sequence CTCN PAM
cuaucaaaaaaaaaaaaaaa

SEQ ID NO: 7800 - RNA, 20 nt, Artificial Sequence
  spacer sequence CTCN PAM
uggaaacuccaagcaaaagu

SEQ ID NO: 7801 - RNA, 20 nt, Artificial Sequence
  spacer sequence CTCN PAM
aagcaaaagugcccagaaaa

SEQ ID NO: 7802 - RNA, 20 nt, Artificial Sequence
  spacer sequence CTCN PAM
guuagaccucagcagauucc

SEQ ID NO: 7803 - RNA, 20 nt, Artificial Sequence
  spacer sequence CTCN PAM
gcagauuccaagauugcacu

SEQ ID NO: 7804 - RNA, 20 nt, Artificial Sequence
  spacer sequence CTCN PAM
uugccuaagaguuuucuuua

SEQ ID NO: 7805 - RNA, 20 nt, Artificial Sequence
  spacer sequence CTCN PAM
uaggcaaggagugcaaucuu

SEQ ID NO: 7806 - RNA, 20 nt, Artificial Sequence
  spacer sequence CTCN PAM
aacaggcugauauucaacau

SEQ ID NO: 7807 - RNA, 20 nt, Artificial Sequence
  spacer sequence CTCN PAM
aagccccugcagcacccagc

SEQ ID NO: 7808 - RNA, 20 nt, Artificial Sequence
  spacer sequence CTCN PAM
cccaucauggaccccaauuc

SEQ ID NO: 7809 - RNA, 20 nt, Artificial Sequence
  spacer sequence CTCN PAM
caucauggaccccaauucua

SEQ ID NO: 7810 - RNA, 20 nt, Artificial Sequence
  spacer sequence CTCN PAM
caaagugcugggauuacagg

SEQ ID NO: 7811 - RNA, 20 nt, Artificial Sequence
  spacer sequence CTCN PAM
gccucccaaagugcugggau

SEQ ID NO: 7812 - RNA, 20 nt, Artificial Sequence
  spacer sequence CTCN PAM
ugaggucaggaguucgagac

SEQ ID NO: 7813 - RNA, 20 nt, Artificial Sequence
  spacer sequence CTCN PAM
ugagccaccugccucggccu

SEQ ID NO: 7814 - RNA, 20 nt, Artificial Sequence
  spacer sequence CTCN PAM
ugaccucaugagccaccugc

SEQ ID NO: 7815 - RNA, 20 nt, Artificial Sequence
  spacer sequence CTCN PAM
aacuccugaccucaugagcc

SEQ ID NO: 7816 - RNA, 20 nt, Artificial Sequence
  spacer sequence CTCN PAM
acuaaaaauacaaaaauuag

SEQ ID NO: 7817 - RNA, 20 nt, Artificial Sequence
  spacer sequence CTCN PAM
ggaggcugaggcaggagaac

SEQ ID NO: 7818 - RNA, 20 nt, Artificial Sequence
  spacer sequence CTCN PAM
ugaguggcugggauuacagg

SEQ ID NO: 7819 - RNA, 20 nt, Artificial Sequence
  spacer sequence CTCN PAM
gccuccugaguggcugggau

SEQ ID NO: 7820 - RNA, 20 nt, Artificial Sequence
  spacer sequence CTCN PAM
ugccucagccuccugagugg

SEQ ID NO: 7821 - RNA, 20 nt, Artificial Sequence
  spacer sequence CTCN PAM
cggguucaagugguucuccu

SEQ ID NO: 7822 - RNA, 20 nt, Artificial Sequence
  spacer sequence CTCN PAM
accucccggguucaaguggu

SEQ ID NO: 7823 - RNA, 20 nt, Artificial Sequence
  spacer sequence CTCN PAM
cugcaaccucuaccucccgg

SEQ ID NO: 7824 - RNA, 20 nt, Artificial Sequence
  spacer sequence CTCN PAM
agccugggcaauagagugag

SEQ ID NO: 7825 - RNA, 20 nt, Artificial Sequence
  spacer sequence CTCN PAM
auugcccaggcuggagugca

SEQ ID NO: 7826 - RNA, 20 nt, Artificial Sequence
  spacer sequence CTCN PAM
cucuauugcccaggcuggag

SEQ ID NO: 7827 - RNA, 20 nt, Artificial Sequence
  spacer sequence CTCN PAM
aucucaacaauaauaauaau

SEQ ID NO: 7828 - RNA, 20 nt, Artificial Sequence
  spacer sequence CTCN PAM
acaauaauaauaauaauaau

SEQ ID NO: 7829 - RNA, 20 nt, Artificial Sequence
  spacer sequence CTCN PAM
uccauccaaguggcugggac

SEQ ID NO: 7830 - RNA, 20 nt, Artificial Sequence
  spacer sequence CTCN PAM
auccaaguggcugggacucu

SEQ ID NO: 7831 - RNA, 20 nt, Artificial Sequence
  spacer sequence CTCN PAM
guccucuagucugugcucau

SEQ ID NO: 7832 - RNA, 20 nt, Artificial Sequence
  spacer sequence CTCN PAM
agucugugcucaugucaggc

SEQ ID NO: 7833 - RNA, 20 nt, Artificial Sequence
  spacer sequence CTCN PAM
ugucaggcaaccaauuuauc

SEQ ID NO: 7834 - RNA, 20 nt, Artificial Sequence
  spacer sequence CTCN PAM
cugcaaucugaaguuccacu

SEQ ID NO: 7835 - RNA, 20 nt, Artificial Sequence
  spacer sequence CTCN PAM
gcaaucugaaguuccacucu

SEQ ID NO: 7836 - RNA, 20 nt, Artificial Sequence
  spacer sequence CTCN PAM
gcagagaggacacagugaga

SEQ ID NO: 7837 - RNA, 20 nt, Artificial Sequence
  spacer sequence CTCN PAM
gcagaguggaacuucagauu

SEQ ID NO: 7838 - RNA, 20 nt, Artificial Sequence
  spacer sequence CTCN PAM
cugcagaguggaacuucaga

SEQ ID NO: 7839 - RNA, 20 nt, Artificial Sequence
  spacer sequence CTCN PAM
cuguguccucucugcagagu

SEQ ID NO: 7840 - RNA, 20 nt, Artificial Sequence
  spacer sequence CTCN PAM
caaaucugccagggguucuc

SEQ ID NO: 7841 - RNA, 20 nt, Artificial Sequence
  spacer sequence CTCN PAM
ucccugcuucugccauucau

SEQ ID NO: 7842 - RNA, 20 nt, Artificial Sequence
  spacer sequence CTCN PAM
ucacacagagagaugucuuc

SEQ ID NO: 7843 - RNA, 20 nt, Artificial Sequence
  spacer sequence CTCN PAM
gugugaugagucaagaucau

SEQ ID NO: 7844 - RNA, 20 nt, Artificial Sequence
  spacer sequence CTCN PAM
cugugugaugagucaagauc

SEQ ID NO: 7845 - RNA, 20 nt, Artificial Sequence
  spacer sequence CTCN PAM
ccuggccuagggcuagacuu

SEQ ID NO: 7846 - RNA, 20 nt, Artificial Sequence
  spacer sequence CTCN PAM
aaucccagcacuaugggagg

SEQ ID NO: 7847 - RNA, 20 nt, Artificial Sequence
  spacer sequence CTCN PAM
cauagugcugggauuagagg

SEQ ID NO: 7848 - RNA, 20 nt, Artificial Sequence
  spacer sequence CTCN PAM
uaggccucccauagugcugg

SEQ ID NO: 7849 - RNA, 20 nt, Artificial Sequence
  spacer sequence CTCN PAM
ugauccacccuccuaggccu

SEQ ID NO: 7850 - RNA, 20 nt, Artificial Sequence
  spacer sequence CTCN PAM
ugaucucgugauccacccuc

SEQ ID NO: 7851 - RNA, 20 nt, Artificial Sequence
  spacer sequence CTCN PAM
aucuccugaucucgugaucc

SEQ ID NO: 7852 - RNA, 20 nt, Artificial Sequence
  spacer sequence CTCN PAM
gcuucccaaguagcugggac

SEQ ID NO: 7853 - RNA, 20 nt, Artificial Sequence
  spacer sequence CTCN PAM
ugccucagcuucccaaguag

SEQ ID NO: 7854 - RNA, 20 nt, Artificial Sequence
  spacer sequence CTCN PAM
gccuacuggguucaagggau

SEQ ID NO: 7855 - RNA, 20 nt, Artificial Sequence
  spacer sequence CTCN PAM
ccacaaccuccgccuacugg

SEQ ID NO: 7856 - RNA, 20 nt, Artificial Sequence
  spacer sequence CTCN PAM
gcucaccacaaccuccgccu

SEQ ID NO: 7857 - RNA, 20 nt, Artificial Sequence
  spacer sequence CTCN PAM
agccugggugacagagcgag

SEQ ID NO: 7858 - RNA, 20 nt, Artificial Sequence
  spacer sequence CTCN PAM
gucacccaggcuggagugca

SEQ ID NO: 7859 - RNA, 20 nt, Artificial Sequence
  spacer sequence CTCN PAM
cucugucacccaggcuggag

SEQ ID NO: 7860 - RNA, 20 nt, Artificial Sequence
  spacer sequence CTCN PAM
aaacaaacagaacaaaaaga

SEQ ID NO: 7861 - RNA, 20 nt, Artificial Sequence
  spacer sequence CTCN PAM
acagugaagaggauaaaaca

SEQ ID NO: 7862 - RNA, 20 nt, Artificial Sequence
  spacer sequence CTCN PAM
ucacuguggagaagaacccc

SEQ ID NO: 7863 - RNA, 20 nt, Artificial Sequence
  spacer sequence CTCN PAM
ugccccuuaaaaaucccacu

SEQ ID NO: 7864 - RNA, 20 nt, Artificial Sequence
  spacer sequence CTCN PAM
aaaagugggauuuuuaaggg

SEQ ID NO: 7865 - RNA, 20 nt, Artificial Sequence
  spacer sequence CTCN PAM
gagaagaaauauauaaaaag

SEQ ID NO: 7866 - RNA, 20 nt, Artificial Sequence
  spacer sequence CTCN PAM
gagucaguuuguaaauaagu

SEQ ID NO: 7867 - RNA, 20 nt, Artificial Sequence
  spacer sequence CTCN PAM
agacccaggauuguuguuuc

SEQ ID NO: 7868 - RNA, 20 nt, Artificial Sequence
  spacer sequence CTCN PAM
cuuuggaaguggugucacuc

SEQ ID NO: 7869 - RNA, 20 nt, Artificial Sequence
  spacer sequence CTCN PAM
uucuaggcaucagcaaggag

SEQ ID NO: 7870 - RNA, 20 nt, Artificial Sequence
  spacer sequence CTCN PAM
uugcugaugccuagaaagag

SEQ ID NO: 7871 - RNA, 20 nt, Artificial Sequence
  spacer sequence CTCN PAM
cuaaaugugcugaacuccuu

SEQ ID NO: 7872 - RNA, 20 nt, Artificial Sequence
  spacer sequence CTCN PAM
gccuauguguugcugaaaca

SEQ ID NO: 7873 - RNA, 20 nt, Artificial Sequence
  spacer sequence CTCN PAM
cugccccaugcucugccuau

SEQ ID NO: 7874 - RNA, 20 nt, Artificial Sequence
  spacer sequence CTCN PAM
cccugccccaugcucugccu

SEQ ID NO: 7875 - RNA, 20 nt, Artificial Sequence
  spacer sequence CTCN PAM
ugcaaucaggguuauuuguc

SEQ ID NO: 7876 - RNA, 20 nt, Artificial Sequence
  spacer sequence CTCN PAM
uugccaucaccuuuccccug

SEQ ID NO: 7877 - RNA, 20 nt, Artificial Sequence
  spacer sequence CTCN PAM
cuuucucagugcacacaucu

SEQ ID NO: 7878 - RNA, 20 nt, Artificial Sequence
  spacer sequence CTCN PAM
gugcacacaucuguugguag

SEQ ID NO: 7879 - RNA, 20 nt, Artificial Sequence
  spacer sequence CTCN PAM
uccuaccaacagaugugugc

SEQ ID NO: 7880 - RNA, 20 nt, Artificial Sequence
  spacer sequence CTCN PAM
gcaugccuuuaccaaaggcc

SEQ ID NO: 7881 - RNA, 20 nt, Artificial Sequence
  spacer sequence CTCN PAM
cuuugaucaguuaaacagag

SEQ ID NO: 7882 - RNA, 20 nt, Artificial Sequence
  spacer sequence CTCN PAM
guuuaacugaucaaagggag

SEQ ID NO: 7883 - RNA, 20 nt, Artificial Sequence
  spacer sequence CTCN PAM
ggacaagaaaccagaaaacc

SEQ ID NO: 7884 - RNA, 20 nt, Artificial Sequence
  spacer sequence CTCN PAM
gcuuucucucuuacugaugu

SEQ ID NO: 7885 - RNA, 20 nt, Artificial Sequence
  spacer sequence CTCN PAM
cuuacugauguggccucugg

SEQ ID NO: 7886 - RNA, 20 nt, Artificial Sequence
  spacer sequence CTCN PAM
uacugauguggccucuggca

SEQ ID NO: 7887 - RNA, 20 nt, Artificial Sequence
  spacer sequence CTCN PAM
ggcaagcccuuaaccuuggu

SEQ ID NO: 7888 - RNA, 20 nt, Artificial Sequence
  spacer sequence CTCN PAM
aucuccaccuccauaaagua

SEQ ID NO: 7889 - RNA, 20 nt, Artificial Sequence
  spacer sequence CTCN PAM
accuccauaaaguagaaguc

SEQ ID NO: 7890 - RNA, 20 nt, Artificial Sequence
  spacer sequence CTCN PAM
auaaaguagaagucgugaga

SEQ ID NO: 7891 - RNA, 20 nt, Artificial Sequence
  spacer sequence CTCN PAM
cgacuucuacuuuauggagg

SEQ ID NO: 7892 - RNA, 20 nt, Artificial Sequence
  spacer sequence CTCN PAM
gggacagaucucacgacuuc

SEQ ID NO: 7893 - RNA, 20 nt, Artificial Sequence
  spacer sequence CTCN PAM
cugggacagaucucacgacu

SEQ ID NO: 7894 - RNA, 20 nt, Artificial Sequence
  spacer sequence CTCN PAM
ugcauuauuucaccugcucu

SEQ ID NO: 7895 - RNA, 20 nt, Artificial Sequence
  spacer sequence CTCN PAM
gacaccugugugcuguagau

SEQ ID NO: 7896 - RNA, 20 nt, Artificial Sequence
  spacer sequence CTCN PAM
auuauugacaaaccuauuuu

SEQ ID NO: 7897 - RNA, 20 nt, Artificial Sequence
  spacer sequence CTCN PAM
ucuggaucuccaagcaguaa

SEQ ID NO: 7898 - RNA, 20 nt, Artificial Sequence
  spacer sequence CTCN PAM
aagcaguaaaaaauaccaaa

SEQ ID NO: 7899 - RNA, 20 nt, Artificial Sequence
  spacer sequence CTCN PAM
guuugguauuuuuuacugcu

SEQ ID NO: 7900 - RNA, 20 nt, Artificial Sequence
  spacer sequence CTCN PAM
auuccuuagaaauuagugcc

SEQ ID NO: 7901 - RNA, 20 nt, Artificial Sequence
  spacer sequence CTCN PAM
uauaauuuccccccucuaaa

SEQ ID NO: 7902 - RNA, 20 nt, Artificial Sequence
  spacer sequence CTCN PAM
aaaaucugccccaaauuucc

SEQ ID NO: 7903 - RNA, 20 nt, Artificial Sequence
  spacer sequence CTCN PAM
cccagugauguucuuuccua

SEQ ID NO: 7904 - RNA, 20 nt, Artificial Sequence
  spacer sequence CTCN PAM
uugaaaauuuaugccaucug

SEQ ID NO: 7905 - RNA, 20 nt, Artificial Sequence
  spacer sequence CTCN PAM
uacaucuccugcccauuucu

SEQ ID NO: 7906 - RNA, 20 nt, Artificial Sequence
  spacer sequence CTCN PAM
ugcccauuucucaaaucugu

SEQ ID NO: 7907 - RNA, 20 nt, Artificial Sequence
  spacer sequence CTCN PAM
aaucuguuccuccuacccac

SEQ ID NO: 7908 - RNA, 20 nt, Artificial Sequence
  spacer sequence CTCN PAM
uacccacccgaugggugucu

SEQ ID NO: 7909 - RNA, 20 nt, Artificial Sequence
  spacer sequence CTCN PAM
uugucuuauaagcauuaaaa

SEQ ID NO: 7910 - RNA, 20 nt, Artificial Sequence
  spacer sequence CTCN PAM
aacauuuauugugucaaugu

SEQ ID NO: 7911 - RNA, 20 nt, Artificial Sequence
  spacer sequence CTCN PAM
ugcgcauuuccacaauacag

SEQ ID NO: 7912 - RNA, 20 nt, Artificial Sequence
  spacer sequence CTCN PAM
ugacagcgaugguccacggg

SEQ ID NO: 7913 - RNA, 20 nt, Artificial Sequence
  spacer sequence CTCN PAM
cuaugggacugauucacugu

SEQ ID NO: 7914 - RNA, 20 nt, Artificial Sequence
  spacer sequence CTCN PAM
augggacugauucacuguuc

SEQ ID NO: 7915 - RNA, 20 nt, Artificial Sequence
  spacer sequence CTCN PAM
gcaggacucugucuucgcac

SEQ ID NO: 7916 - RNA, 20 nt, Artificial Sequence
  spacer sequence CTCN PAM
gucuucgcacaacggcuucu

SEQ ID NO: 7917 - RNA, 20 nt, Artificial Sequence
  spacer sequence CTCN PAM
aagaagccguugugcgaaga

SEQ ID NO: 7918 - RNA, 20 nt, Artificial Sequence
  spacer sequence CTCN PAM
gaacuuaagggcucucgagc

SEQ ID NO: 7919 - RNA, 20 nt, Artificial Sequence
  spacer sequence CTCN PAM
cgagcuuccauccgaaaacu

SEQ ID NO: 7920 - RNA, 20 nt, Artificial Sequence
  spacer sequence CTCN PAM
agcuuccauccgaaaacugc

SEQ ID NO: 7921 - RNA, 20 nt, Artificial Sequence
  spacer sequence CTCN PAM
agagcccuuaaguucugaga

SEQ ID NO: 7922 - RNA, 20 nt, Artificial Sequence
  spacer sequence CTCN PAM
agauguguggcaguuuucgg

SEQ ID NO: 7923 - RNA, 20 nt, Artificial Sequence
  spacer sequence CTCN PAM
cuggguacuacgccgaaugg

SEQ ID NO: 7924 - RNA, 20 nt, Artificial Sequence
  spacer sequence CTCN PAM
ggguacuacgccgaaugggg

SEQ ID NO: 7925 - RNA, 20 nt, Artificial Sequence
  spacer sequence CTCN PAM
uucuagguucuucacacacc

SEQ ID NO: 7926 - RNA, 20 nt, Artificial Sequence
  spacer sequence CTCN PAM
aaccucuuucuagguucuuc

SEQ ID NO: 7927 - RNA, 20 nt, Artificial Sequence
  spacer sequence CTCN PAM
gucuccaaccucuuucuagg

SEQ ID NO: 7928 - RNA, 20 nt, Artificial Sequence
  spacer sequence CTCN PAM
ucugucuccaaccucuuucu

SEQ ID NO: 7929 - RNA, 20 nt, Artificial Sequence
  spacer sequence CTCN PAM
aacuagcuuuuuaaaaauua

SEQ ID NO: 7930 - RNA, 20 nt, Artificial Sequence
  spacer sequence CTCN PAM
accugugguugguuuaaguu

SEQ ID NO: 7931 - RNA, 20 nt, Artificial Sequence
  spacer sequence CTCN PAM
gccuccccuccccaaguauc

SEQ ID NO: 7932 - RNA, 20 nt, Artificial Sequence
  spacer sequence CTCN PAM
ccuccccaaguaucucugac

SEQ ID NO: 7933 - RNA, 20 nt, Artificial Sequence
  spacer sequence CTCN PAM
ccaaguaucucugaccucug

SEQ ID NO: 7934 - RNA, 20 nt, Artificial Sequence
  spacer sequence CTCN PAM
gaccucugagucgucuuccc

SEQ ID NO: 7935 - RNA, 20 nt, Artificial Sequence
  spacer sequence CTCN PAM
gagucgucuucccaugccuc

SEQ ID NO: 7936 - RNA, 20 nt, Artificial Sequence
  spacer sequence CTCN PAM
gaggucagagauacuugggg

SEQ ID NO: 7937 - RNA, 20 nt, Artificial Sequence
  spacer sequence CTCN PAM
cucccuuccguccccccaag

SEQ ID NO: 7938 - RNA, 20 nt, Artificial Sequence
  spacer sequence CTCN PAM
cuuccguccccccaaggagg

SEQ ID NO: 7939 - RNA, 20 nt, Artificial Sequence
  spacer sequence CTCN PAM
uuggggggacggaagggagg

SEQ ID NO: 7940 - RNA, 20 nt, Artificial Sequence
  spacer sequence CTCN PAM
ggacacaccuggaaggaaac

SEQ ID NO: 7941 - RNA, 20 nt, Artificial Sequence
  spacer sequence CTCN PAM
gucauaagggcaaguguuuc

SEQ ID NO: 7942 - RNA, 20 nt, Artificial Sequence
  spacer sequence CTCN PAM
accaaaggacuguuucuuac

SEQ ID NO: 7943 - RNA, 20 nt, Artificial Sequence
  spacer sequence CTCN PAM
ucaaccaaaggacuguuucu

SEQ ID NO: 7944 - RNA, 20 nt, Artificial Sequence
  spacer sequence CTCN PAM
ccucaaccaaaggacuguuu

SEQ ID NO: 7945 - RNA, 20 nt, Artificial Sequence
  spacer sequence CTCN PAM
cgcucuccucaaccaaagga

SEQ ID NO: 7946 - RNA, 20 nt, Artificial Sequence
  spacer sequence CTCN PAM
cccgcucuccucaaccaaag

SEQ ID NO: 7947 - RNA, 20 nt, Artificial Sequence
  spacer sequence CTCN PAM
cucucccgcucuccucaacc

SEQ ID NO: 7948 - RNA, 20 nt, Artificial Sequence
  spacer sequence CTCN PAM
ucccucucccgcucuccuca

SEQ ID NO: 7949 - RNA, 20 nt, Artificial Sequence
  spacer sequence CTCN PAM
aaauaauaauaaaauuauaa

SEQ ID NO: 7950 - RNA, 20 nt, Artificial Sequence
  spacer sequence CTCN PAM
uguaaaucauuggcugcuuu

SEQ ID NO: 7951 - RNA, 20 nt, Artificial Sequence
  spacer sequence CTCN PAM
gaagagaaaaccagaaccca

SEQ ID NO: 7952 - RNA, 20 nt, Artificial Sequence
  spacer sequence CTCN PAM
ucagagauuuguucgccucu

SEQ ID NO: 7953 - RNA, 20 nt, Artificial Sequence
  spacer sequence CTCN PAM
uuuggguucugguuuucucu

SEQ ID NO: 7954 - RNA, 20 nt, Artificial Sequence
  spacer sequence CTCN PAM
caaauugcaccaaaaacugc

SEQ ID NO: 7955 - RNA, 20 nt, Artificial Sequence
  spacer sequence CTCN PAM
aauugcaccaaaaacugccu

SEQ ID NO: 7956 - RNA, 20 nt, Artificial Sequence
  spacer sequence CTCN PAM
cuucuucccuucaccauugc

SEQ ID NO: 7957 - RNA, 20 nt, Artificial Sequence
  spacer sequence CTCN PAM
gggguuccucccuugcugug

SEQ ID NO: 7958 - RNA, 20 nt, Artificial Sequence
  spacer sequence CTCN PAM
cuugcuguggacauugacuu

SEQ ID NO: 7959 - RNA, 20 nt, Artificial Sequence
  spacer sequence CTCN PAM
caguucugcugcuucaaguc

SEQ ID NO: 7960 - RNA, 20 nt, Artificial Sequence
  spacer sequence CTCN PAM
gcacauccggacucccaguu

SEQ ID NO: 7961 - RNA, 20 nt, Artificial Sequence
  spacer sequence CTCN PAM
uccucggcacauccggacuc

SEQ ID NO: 7962 - RNA, 20 nt, Artificial Sequence
  spacer sequence CTCN PAM
uugccauggcgacccgaagc

SEQ ID NO: 7963 - RNA, 20 nt, Artificial Sequence
  spacer sequence CTCN PAM
ucuccccugacuuggcgccg

SEQ ID NO: 7964 - RNA, 20 nt, Artificial Sequence
  spacer sequence CTCN PAM
ccccugacuuggcgccgcag

SEQ ID NO: 7965 - RNA, 20 nt, Artificial Sequence
  spacer sequence CTCN PAM
ccugacuuggcgccgcagga

SEQ ID NO: 7966 - RNA, 20 nt, Artificial Sequence
  spacer sequence CTCN PAM
ugcggcgccaagucagggga

SEQ ID NO: 7967 - RNA, 20 nt, Artificial Sequence
  spacer sequence CTCN PAM
gcugcucucacgcaucccac

SEQ ID NO: 7968 - RNA, 20 nt, Artificial Sequence
  spacer sequence CTCN PAM
cacgcaucccaccccugagc

SEQ ID NO: 7969 - RNA, 20 nt, Artificial Sequence
  spacer sequence CTCN PAM
cgcaucccaccccugagcag

SEQ ID NO: 7970 - RNA, 20 nt, Artificial Sequence
  spacer sequence CTCN PAM
ggggugggaugcgugagagc

SEQ ID NO: 7971 - RNA, 20 nt, Artificial Sequence
  spacer sequence CTCN PAM
gcucaggggugggaugcgug

SEQ ID NO: 7972 - RNA, 20 nt, Artificial Sequence
  spacer sequence CTCN PAM
gcugcucugcucaggggugg

SEQ ID NO: 7973 - RNA, 20 nt, Artificial Sequence
  spacer sequence CTCN PAM
gcccaggucuccgcugcucu

SEQ ID NO: 7974 - RNA, 20 nt, Artificial Sequence
  spacer sequence CTCN PAM
acgacagugacuuagcgcug

SEQ ID NO: 7975 - RNA, 20 nt, Artificial Sequence
  spacer sequence CTCN PAM
cgcuuuagaggauacuuggg

SEQ ID NO: 7976 - RNA, 20 nt, Artificial Sequence
  spacer sequence CTCN PAM
aaagcgggagccccuaaacc

SEQ ID NO: 7977 - RNA, 20 nt, Artificial Sequence
  spacer sequence CTCN PAM
cuugaaauaguuuuugccac

SEQ ID NO: 7978 - RNA, 20 nt, Artificial Sequence
  spacer sequence CTCN PAM
augguugauccaaauacguu

SEQ ID NO: 7979 - RNA, 20 nt, Artificial Sequence
  spacer sequence CTCN PAM
aguacaaugacccgugugaa

SEQ ID NO: 7980 - RNA, 20 nt, Artificial Sequence
  spacer sequence CTCN PAM
uucccauuuggaagggagga

SEQ ID NO: 7981 - RNA, 20 nt, Artificial Sequence
  spacer sequence CTCN PAM
cuuccaaaugggaaagagac

SEQ ID NO: 7982 - RNA, 20 nt, Artificial Sequence
  spacer sequence CTCN PAM
auuucccagcgucaucuacg

SEQ ID NO: 7983 - RNA, 20 nt, Artificial Sequence
  spacer sequence CTCN PAM
cuauuucccagcgucaucua

SEQ ID NO: 7984 - RNA, 20 nt, Artificial Sequence
  spacer sequence CTCN PAM
cucuauuucccagcgucauc

SEQ ID NO: 7985 - RNA, 20 nt, Artificial Sequence
  spacer sequence CTCN PAM
cucucuauuucccagcguca

SEQ ID NO: 7986 - RNA, 20 nt, Artificial Sequence
  spacer sequence CTCN PAM
uucucucucucuauuuccca

SEQ ID NO: 7987 - RNA, 20 nt, Artificial Sequence
  spacer sequence CTCN PAM
cuuucucucucucuauuucc

SEQ ID NO: 7988 - RNA, 20 nt, Artificial Sequence
  spacer sequence CTCN PAM
cucuuucucucucucuauuu

SEQ ID NO: 7989 - RNA, 20 nt, Artificial Sequence
  spacer sequence CTCN PAM
cucucuuucucucucucuau

SEQ ID NO: 7990 - RNA, 20 nt, Artificial Sequence
  spacer sequence CTCN PAM
cucucucuuucucucucucu

SEQ ID NO: 7991 - RNA, 20 nt, Artificial Sequence
  spacer sequence CTCN PAM
cucucucucuuucucucucu

SEQ ID NO: 7992 - RNA, 20 nt, Artificial Sequence
  spacer sequence CTCN PAM
cucucucucucuuucucucu

SEQ ID NO: 7993 - RNA, 20 nt, Artificial Sequence
  spacer sequence CTCN PAM
cucucucucucucuuucucu

SEQ ID NO: 7994 - RNA, 20 nt, Artificial Sequence
  spacer sequence CTCN PAM
gccuuuaggggaauggggcu

SEQ ID NO: 7995 - RNA, 20 nt, Artificial Sequence
  spacer sequence CTCN PAM
ugcuguauguaguaaauuaa

SEQ ID NO: 7996 - RNA, 20 nt, Artificial Sequence
  spacer sequence CTCN PAM
uuaucccauuagcccgcugu

SEQ ID NO: 7997 - RNA, 20 nt, Artificial Sequence
  spacer sequence CTCN PAM
agggcugcuauagcuaugaa

SEQ ID NO: 7998 - RNA, 20 nt, Artificial Sequence
  spacer sequence CTCN PAM
auguguucugauguccauuu

SEQ ID NO: 7999 - RNA, 20 nt, Artificial Sequence
  spacer sequence CTCN PAM
aacaauggguucguuuauuu

SEQ ID NO: 8000 - RNA, 20 nt, Artificial Sequence
  spacer sequence CTCN PAM
uaaagcccugcauauuuccc

SEQ ID NO: 8001 - RNA, 20 nt, Artificial Sequence
  spacer sequence CTCN PAM
ugccuuuuaaaaguuagcag

SEQ ID NO: 8002 - RNA, 20 nt, Artificial Sequence
  spacer sequence CTCN PAM
accugcuuggaaaaauguuu

SEQ ID NO: 8003 - RNA, 20 nt, Artificial Sequence
  spacer sequence CTCN PAM
caaccugcuuggaaaaaugu

SEQ ID NO: 8004 - RNA, 20 nt, Artificial Sequence
  spacer sequence CTCN PAM
gccaaucccauccucauauc

SEQ ID NO: 8005 - RNA, 20 nt, Artificial Sequence
  spacer sequence CTCN PAM
uaucggcaaaguucccacaa

SEQ ID NO: 8006 - RNA, 20 nt, Artificial Sequence
  spacer sequence CTCN PAM
uuuuuucagacaacuuccca

SEQ ID NO: 8007 - RNA, 20 nt, Artificial Sequence
  spacer sequence CTCN PAM
auugucccugggccuggugu

SEQ ID NO: 8008 - RNA, 20 nt, Artificial Sequence
  spacer sequence CTCN PAM
uuacgauucuguuacuccau

SEQ ID NO: 8009 - RNA, 20 nt, Artificial Sequence
  spacer sequence CTCN PAM
guacacacaugaacaugacu

SEQ ID NO: 8010 - RNA, 20 nt, Artificial Sequence
  spacer sequence CTCN PAM
uuucccccuccguacacaca

SEQ ID NO: 8011 - RNA, 20 nt, Artificial Sequence
  spacer sequence CTCN PAM
cucagucucugugagcaaag

SEQ ID NO: 8012 - RNA, 20 nt, Artificial Sequence
  spacer sequence CTCN PAM
gucucugugagcaaaguacu

SEQ ID NO: 8013 - RNA, 20 nt, Artificial Sequence
  spacer sequence CTCN PAM
gugagcaaaguacuacaagc

SEQ ID NO: 8014 - RNA, 20 nt, Artificial Sequence
  spacer sequence CTCN PAM
cagagacugagggaggaaau

SEQ ID NO: 8015 - RNA, 20 nt, Artificial Sequence
  spacer sequence CTCN PAM
ugcuuguaguacuuugcuca

SEQ ID NO: 8016 - RNA, 20 nt, Artificial Sequence
  spacer sequence CTCN PAM
ccugcuuguaguacuuugcu

SEQ ID NO: 8017 - RNA, 20 nt, Artificial Sequence
  spacer sequence CTCN PAM
ggccccauccucuccugcuu

SEQ ID NO: 8018 - RNA, 20 nt, Artificial Sequence
  spacer sequence CTCN PAM
acuccuuuucaggaaggccc

SEQ ID NO: 8019 - RNA, 20 nt, Artificial Sequence
  spacer sequence CTCN PAM
uuuucaggaaggcccgaaau

SEQ ID NO: 8020 - RNA, 20 nt, Artificial Sequence
  spacer sequence CTCN PAM
uuuccuuauuucuccaauug

SEQ ID NO: 8021 - RNA, 20 nt, Artificial Sequence
  spacer sequence CTCN PAM
aauuggaauuauaccuaagc

SEQ ID NO: 8022 - RNA, 20 nt, Artificial Sequence
  spacer sequence CTCN PAM
cgccacuuccuuucaaguuc

SEQ ID NO: 8023 - RNA, 20 nt, Artificial Sequence
  spacer sequence CTCN PAM
cuucuagcauuaugauuaua

SEQ ID NO: 8024 - RNA, 20 nt, Artificial Sequence
  spacer sequence CTCN PAM
acuacuucacacuuucugcc

SEQ ID NO: 8025 - RNA, 20 nt, Artificial Sequence
  spacer sequence CTCN PAM
cuucuuagcaaccuuuguaa

SEQ ID NO: 8026 - RNA, 20 nt, Artificial Sequence
  spacer sequence CTCN PAM
uuguuuaggaccuacaaaaa

SEQ ID NO: 8027 - RNA, 20 nt, Artificial Sequence
  spacer sequence CTCN PAM
cuuuguuuaggaccuacaaa

SEQ ID NO: 8028 - RNA, 20 nt, Artificial Sequence
  spacer sequence CTCN PAM
uuccugaacccauuugcuau

SEQ ID NO: 8029 - RNA, 20 nt, Artificial Sequence
  spacer sequence CTCN PAM
uccagugccuauauuaccuc

SEQ ID NO: 8030 - RNA, 20 nt, Artificial Sequence
  spacer sequence CTCN PAM
cagauuuuaaaccagaaacu

SEQ ID NO: 8031 - RNA, 20 nt, Artificial Sequence
  spacer sequence CTCN PAM
aaugaagauuaaaaagaaca

SEQ ID NO: 8032 - RNA, 20 nt, Artificial Sequence
  spacer sequence CTCN PAM
acauaccugaacugaugcuu

SEQ ID NO: 8033 - RNA, 20 nt, Artificial Sequence
  spacer sequence CTCN PAM
aguaaguuuuuguaacaggc

SEQ ID NO: 8034 - RNA, 20 nt, Artificial Sequence
  spacer sequence CTCN PAM
uaaaauccucaaguaaguuu

SEQ ID NO: 8035 - RNA, 20 nt, Artificial Sequence
  spacer sequence CTCN PAM
uuuaaaaaaaaaagaucaug

SEQ ID NO: 8036 - RNA, 20 nt, Artificial Sequence
  spacer sequence CTCN PAM
aaaauuuaaaaucuuaauau

SEQ ID NO: 8037 - RNA, 20 nt, Artificial Sequence
  spacer sequence CTCN PAM
uguuucuauuguucaucagc

SEQ ID NO: 8038 - RNA, 20 nt, Artificial Sequence
  spacer sequence CTCN PAM
ugacuuauugacgccuucug

SEQ ID NO: 8039 - RNA, 20 nt, Artificial Sequence
  spacer sequence CTCN PAM
caguaaauuuauuuaacuuu

SEQ ID NO: 8040 - RNA, 20 nt, Artificial Sequence
  spacer sequence CTCN PAM
uccccauuccccauuugauu

SEQ ID NO: 8041 - RNA, 20 nt, Artificial Sequence
  spacer sequence CTCN PAM
ccauuccccauuugauuuaa

SEQ ID NO: 8042 - RNA, 20 nt, Artificial Sequence
  spacer sequence CTCN PAM
uagcguaauuagguuuugca

SEQ ID NO: 8043 - RNA, 20 nt, Artificial Sequence
  spacer sequence CTCN PAM
guauaugcugcucuuagcgu

SEQ ID NO: 8044 - RNA, 20 nt, Artificial Sequence
  spacer sequence CTCN PAM
uagcuccuaauaaaagagua

SEQ ID NO: 8045 - RNA, 20 nt, Artificial Sequence
  spacer sequence CTCN PAM
uaauaaaagaguaauaggga

SEQ ID NO: 8046 - RNA, 20 nt, Artificial Sequence
  spacer sequence CTCN PAM
uuuauuaggagcuaugagug

SEQ ID NO: 8047 - RNA, 20 nt, Artificial Sequence
  spacer sequence CTCN PAM
gugugucccuauuacucuuu

SEQ ID NO: 8048 - RNA, 20 nt, Artificial Sequence
  spacer sequence CTCN PAM
acccuauuaaauguccauaa

SEQ ID NO: 8049 - RNA, 20 nt, Artificial Sequence
  spacer sequence CTCN PAM
agacagauagaaauaauucc

SEQ ID NO: 8050 - RNA, 20 nt, Artificial Sequence
  spacer sequence CTCN PAM
aaaacugaauccaaaaugcu

SEQ ID NO: 8051 - RNA, 20 nt, Artificial Sequence
  spacer sequence CTCN PAM
agguaccgcacgcccacccc

SEQ ID NO: 8052 - RNA, 20 nt, Artificial Sequence
  spacer sequence CTCN PAM
uauguaauauucuccaacau

SEQ ID NO: 8053 - RNA, 20 nt, Artificial Sequence
  spacer sequence CTCN PAM
aacauccuuucucaguggau

SEQ ID NO: 8054 - RNA, 20 nt, Artificial Sequence
  spacer sequence CTCN PAM
guggauuccucuagccccac

SEQ ID NO: 8055 - RNA, 20 nt, Artificial Sequence
  spacer sequence CTCN PAM
agccccacucucuccuuccc

SEQ ID NO: 8056 - RNA, 20 nt, Artificial Sequence
  spacer sequence CTCN PAM
cuccuucccacccaaacugg

SEQ ID NO: 8057 - RNA, 20 nt, Artificial Sequence
  spacer sequence CTCN PAM
ccuucccacccaaacuggcu

SEQ ID NO: 8058 - RNA, 20 nt, Artificial Sequence
  spacer sequence CTCN PAM
uucccacccaaacuggcuuu

SEQ ID NO: 8059 - RNA, 20 nt, Artificial Sequence
  spacer sequence CTCN PAM
gauaaaaggcaugacaugaa

SEQ ID NO: 8060 - RNA, 20 nt, Artificial Sequence
  spacer sequence CTCN PAM
caggcacuagggcauaagaa

SEQ ID NO: 8061 - RNA, 20 nt, Artificial Sequence
  spacer sequence CTCN PAM
guucuuaugcccuagugccu

SEQ ID NO: 8062 - RNA, 20 nt, Artificial Sequence
  spacer sequence CTCN PAM
gugauaucgugucccuguuc

SEQ ID NO: 8063 - RNA, 20 nt, Artificial Sequence
  spacer sequence CTCN PAM
gaaccacaaggcaaaccacu

SEQ ID NO: 8064 - RNA, 20 nt, Artificial Sequence
  spacer sequence CTCN PAM
ggaaaucaguggcugauucc

SEQ ID NO: 8065 - RNA, 20 nt, Artificial Sequence
  spacer sequence CTCN PAM
cucuuuuuuucucccucuuu

SEQ ID NO: 8066 - RNA, 20 nt, Artificial Sequence
  spacer sequence CTCN PAM
cuuuuuuucucccucuuuuu

SEQ ID NO: 8067 - RNA, 20 nt, Artificial Sequence
  spacer sequence CTCN PAM
uuuuuucucccucuuuuuua

SEQ ID NO: 8068 - RNA, 20 nt, Artificial Sequence
  spacer sequence CTCN PAM
cucuuuuuuaaacaaaacaa

SEQ ID NO: 8069 - RNA, 20 nt, Artificial Sequence
  spacer sequence CTCN PAM
uuuuuaaacaaaacaaaaca

SEQ ID NO: 8070 - RNA, 20 nt, Artificial Sequence
  spacer sequence CTCN PAM
uaacaaaauaaccccacuuu

SEQ ID NO: 8071 - RNA, 20 nt, Artificial Sequence
  spacer sequence CTCN PAM
uacauggaaaccaaagagcu

SEQ ID NO: 8072 - RNA, 20 nt, Artificial Sequence
  spacer sequence CTCN PAM
uugguuuccauguaagaguc

SEQ ID NO: 8073 - RNA, 20 nt, Artificial Sequence
  spacer sequence CTCN PAM
cauccuugcuuuaucuuaga

SEQ ID NO: 8074 - RNA, 20 nt, Artificial Sequence
  spacer sequence CTCN PAM
uagcagaaauccauucaaac

SEQ ID NO: 8075 - RNA, 20 nt, Artificial Sequence
  spacer sequence CTCN PAM
aucucuuagcagaaauccau

SEQ ID NO: 8076 - RNA, 20 nt, Artificial Sequence
  spacer sequence CTCN PAM
aacccuggacauaguuuuaa

SEQ ID NO: 8077 - RNA, 20 nt, Artificial Sequence
  spacer sequence CTCN PAM
uaaaaccuguuauuuucuug

SEQ ID NO: 8078 - RNA, 20 nt, Artificial Sequence
  spacer sequence CTCN PAM
guaaauuacuugcaagaaaa

SEQ ID NO: 8079 - RNA, 20 nt, Artificial Sequence
  spacer sequence CTCN PAM
uuugacacacucuguaaauu

SEQ ID NO: 8080 - RNA, 20 nt, Artificial Sequence
  spacer sequence CTCN PAM
guuuugaacagggcacauaa

SEQ ID NO: 8081 - RNA, 20 nt, Artificial Sequence
  spacer sequence CTCN PAM
cauaguaaaagauaaaauuu

SEQ ID NO: 8082 - RNA, 20 nt, Artificial Sequence
  spacer sequence CTCN PAM
uuaauaugcuuugcauauga

SEQ ID NO: 8083 - RNA, 20 nt, Artificial Sequence
  spacer sequence CTCN PAM
cccaaaccgccauuauaugg

SEQ ID NO: 8084 - RNA, 20 nt, Artificial Sequence
  spacer sequence CTCN PAM
ucuguaaugucacacuuuuu

SEQ ID NO: 8085 - RNA, 20 nt, Artificial Sequence
  spacer sequence CTCN PAM
cuuuuuuuuuuuuuugaagc

SEQ ID NO: 8086 - RNA, 20 nt, Artificial Sequence
  spacer sequence CTCN PAM
uuuuuuuuuuuuugaagcau

SEQ ID NO: 8087 - RNA, 20 nt, Artificial Sequence
  spacer sequence CTCN PAM
uaaaagguaucaauguaccu

SEQ ID NO: 8088 - RNA, 20 nt, Artificial Sequence
  spacer sequence CTCN PAM
uguugauuccuaugcuaaaa

SEQ ID NO: 8089 - RNA, 20 nt, Artificial Sequence
  spacer sequence CTCN PAM
ucagguuguaaaaaaaaaaa

SEQ ID NO: 8090 - RNA, 20 nt, Artificial Sequence
  spacer sequence CTCN PAM
auagucaaguaaauggcugg

SEQ ID NO: 8091 - RNA, 20 nt, Artificial Sequence
  spacer sequence CTCN PAM
ucaaugagauuguguucaau

SEQ ID NO: 8092 - RNA, 20 nt, Artificial Sequence
  spacer sequence CTCN PAM
augagauuguguucaauuuu

SEQ ID NO: 8093 - RNA, 20 nt, Artificial Sequence
  spacer sequence CTCN PAM
uugaggagcauuuuuuaaaa

SEQ ID NO: 8094 - RNA, 20 nt, Artificial Sequence
  spacer sequence CTCN PAM
gauaggacaauuaagugcac

SEQ ID NO: 8095 - RNA, 20 nt, Artificial Sequence
  spacer sequence CTCN PAM
accucuguaucucugauuag

SEQ ID NO: 8096 - RNA, 20 nt, Artificial Sequence
  spacer sequence CTCN PAM
guaucucugauuagagaaaa

SEQ ID NO: 8097 - RNA, 20 nt, Artificial Sequence
  spacer sequence CTCN PAM
gauuagagaaaagauacaga

SEQ ID NO: 8098 - RNA, 20 nt, Artificial Sequence
  spacer sequence CTCN PAM
aaucagagauacagagguug

SEQ ID NO: 8099 - RNA, 20 nt, Artificial Sequence
  spacer sequence CTCN PAM
gccugugauaucuguaucuu

SEQ ID NO: 8100 - RNA, 20 nt, Artificial Sequence
  spacer sequence CTCN PAM
uccauguuaacacaaauagc

SEQ ID NO: 8101 - RNA, 20 nt, Artificial Sequence
  spacer sequence CTCN PAM
cuaaaaguuguacuucauuu

SEQ ID NO: 8102 - RNA, 20 nt, Artificial Sequence
  spacer sequence CTCN PAM
uaaaauucuuucucuucuuu

SEQ ID NO: 8103 - RNA, 20 nt, Artificial Sequence
  spacer sequence CTCN PAM
ucuuuuuuuaagaaugucac

SEQ ID NO: 8104 - RNA, 20 nt, Artificial Sequence
  spacer sequence CTCN PAM
gucaaaccuuauugucagcc

SEQ ID NO: 8105 - RNA, 20 nt, Artificial Sequence
  spacer sequence CTCN PAM
uccuuucaauaugguauaca

SEQ ID NO: 8106 - RNA, 20 nt, Artificial Sequence
  spacer sequence CTCN PAM
uuacuaguguauuuaauugc

SEQ ID NO: 8107 - RNA, 20 nt, Artificial Sequence
  spacer sequence CTCN PAM
caccaggagcaaaguagcuu

SEQ ID NO: 8108 - RNA, 20 nt, Artificial Sequence
  spacer sequence CTCN PAM
ccaggagcaaaguagcuuuu

SEQ ID NO: 8109 - RNA, 20 nt, Artificial Sequence
  spacer sequence CTCN PAM
uggugagagcuuaaaagaaa

SEQ ID NO: 8110 - RNA, 20 nt, Artificial Sequence
  spacer sequence CTCN PAM
caacaauggcuaccuaaaaa

SEQ ID NO: 8111 - RNA, 20 nt, Artificial Sequence
  spacer sequence CTCN PAM
cccaaugcugaauuaagcua

SEQ ID NO: 8112 - RNA, 20 nt, Artificial Sequence
  spacer sequence CTCN PAM
uauuuuaaaaccaaaugaua

SEQ ID NO: 8113 - RNA, 20 nt, Artificial Sequence
  spacer sequence CTCN PAM
aaaggguuaaauguaucaau

SEQ ID NO: 8114 - RNA, 20 nt, Artificial Sequence
  spacer sequence CTCN PAM
uagagauuuuuuuucagugc

SEQ ID NO: 8115 - RNA, 20 nt, Artificial Sequence
  spacer sequence CTCN PAM
augagcuaaaugucugucuc

SEQ ID NO: 8116 - RNA, 20 nt, Artificial Sequence
  spacer sequence CTCN PAM
auagacagaauagauagcac

SEQ ID NO: 8117 - RNA, 20 nt, Artificial Sequence
  spacer sequence CTCN PAM
ucacguuauaaaauaaaacu

SEQ ID NO: 8118 - RNA, 20 nt, Artificial Sequence
  spacer sequence CTCN PAM
cguuauaaaauaaaacugua

SEQ ID NO: 8119 - RNA, 20 nt, Artificial Sequence
  spacer sequence CTCN PAM
cucucucucuuuuucucuca

SEQ ID NO: 8120 - RNA, 20 nt, Artificial Sequence
  spacer sequence CTCN PAM
cucucucuuuuucucucaga

SEQ ID NO: 8121 - RNA, 20 nt, Artificial Sequence
  spacer sequence CTCN PAM
cucucuuuuucucucagaac

SEQ ID NO: 8122 - RNA, 20 nt, Artificial Sequence
  spacer sequence CTCN PAM
cucuuuuucucucagaacgg

SEQ ID NO: 8123 - RNA, 20 nt, Artificial Sequence
  spacer sequence CTCN PAM
cuuuuucucucagaacggaa

SEQ ID NO: 8124 - RNA, 20 nt, Artificial Sequence
  spacer sequence CTCN PAM
uuuucucucagaacggaacu

SEQ ID NO: 8125 - RNA, 20 nt, Artificial Sequence
  spacer sequence CTCN PAM
cagaacggaacuggaaacag

SEQ ID NO: 8126 - RNA, 20 nt, Artificial Sequence
  spacer sequence CTCN PAM
gaacggaacuggaaacagca

SEQ ID NO: 8127 - RNA, 20 nt, Artificial Sequence
  spacer sequence CTCN PAM
gcaacgaauuagggacaauu

SEQ ID NO: 8128 - RNA, 20 nt, Artificial Sequence
  spacer sequence CTCN PAM
ugugcaauaauuuacauguu

SEQ ID NO: 8129 - RNA, 20 nt, Artificial Sequence
  spacer sequence CTCN PAM
aaguuugcguaaaaugcaau

SEQ ID NO: 8130 - RNA, 20 nt, Artificial Sequence
  spacer sequence CTCN PAM
ccguuugaaugcaugaucug

SEQ ID NO: 8131 - RNA, 20 nt, Artificial Sequence
  spacer sequence CTCN PAM
cauauucuuagcuucguuac

SEQ ID NO: 8132 - RNA, 20 nt, Artificial Sequence
  spacer sequence CTCN PAM
uauucuuagcuucguuacuu

SEQ ID NO: 8133 - RNA, 20 nt, Artificial Sequence
  spacer sequence CTCN PAM
cuguaggauuuuuuucuagu

SEQ ID NO: 8134 - RNA, 20 nt, Artificial Sequence
  spacer sequence CTCN PAM
agccccacucccuguaggau

SEQ ID NO: 8135 - RNA, 20 nt, Artificial Sequence
  spacer sequence CTCN PAM
ccuuccccaucgcccuccag

SEQ ID NO: 8136 - RNA, 20 nt, Artificial Sequence
  spacer sequence CTCN PAM
caccugacacccccuuuuuc

SEQ ID NO: 8137 - RNA, 20 nt, Artificial Sequence
  spacer sequence CTCN PAM
cucccaccugacacccccuu

SEQ ID NO: 8138 - RNA, 20 nt, Artificial Sequence
  spacer sequence CTCN PAM
cucacucccaccugacaccc

SEQ ID NO: 8139 - RNA, 20 nt, Artificial Sequence
  spacer sequence CTCN PAM
auucaguuuuuauaucauua

SEQ ID NO: 8140 - RNA, 20 nt, Artificial Sequence
  spacer sequence CTCN PAM
aucacugugccauuuuuuca

SEQ ID NO: 8141 - RNA, 20 nt, Artificial Sequence
  spacer sequence CTCN PAM
aggguacuguacacgcuaaa

SEQ ID NO: 8142 - RNA, 20 nt, Artificial Sequence
  spacer sequence CTCN PAM
ccaggcacaugaaaacgcau

SEQ ID NO: 8143 - RNA, 20 nt, Artificial Sequence
  spacer sequence CTCN PAM
gggcacaggcauaguugcac

SEQ ID NO: 8144 - RNA, 20 nt, Artificial Sequence
  spacer sequence CTCN PAM
cauuuauaaggccuuucgcc

SEQ ID NO: 8145 - RNA, 20 nt, Artificial Sequence
  spacer sequence CTCN PAM
uguggacagugagauugcua

SEQ ID NO: 8146 - RNA, 20 nt, Artificial Sequence
  spacer sequence CTCN PAM
cuguccacaggagaagccac

SEQ ID NO: 8147 - RNA, 20 nt, Artificial Sequence
  spacer sequence CTCN PAM
caagugucgcugcgucugcc

SEQ ID NO: 8148 - RNA, 20 nt, Artificial Sequence
  spacer sequence CTCN PAM
uuugagcugggccugcccgg

SEQ ID NO: 8149 - RNA, 20 nt, Artificial Sequence
  spacer sequence CTCN PAM
aaagagggcagacgcagcga

SEQ ID NO: 8150 - RNA, 20 nt, Artificial Sequence
  spacer sequence CTCN PAM
cuccacuucccgugccgcug

SEQ ID NO: 8151 - RNA, 20 nt, Artificial Sequence
  spacer sequence CTCN PAM
acuucccgugccgcugcgcc

SEQ ID NO: 8152 - RNA, 20 nt, Artificial Sequence
  spacer sequence CTCN PAM
gggcgcagcggcacgggaag

SEQ ID NO: 8153 - RNA, 20 nt, Artificial Sequence
  spacer sequence CTCN PAM
guccagcuccccgggcggug

SEQ ID NO: 8154 - RNA, 20 nt, Artificial Sequence
  spacer sequence CTCN PAM
ccgggcgguguggagaagcg

SEQ ID NO: 8155 - RNA, 20 nt, Artificial Sequence
  spacer sequence CTCN PAM
acaccgcccggggagcugga

SEQ ID NO: 8156 - RNA, 20 nt, Artificial Sequence
  spacer sequence CTCN PAM
cguucuccgaggagugcucc

SEQ ID NO: 8157 - RNA, 20 nt, Artificial Sequence
  spacer sequence CTCN PAM
gaggagugcuccgacgagga

SEQ ID NO: 8158 - RNA, 20 nt, Artificial Sequence
  spacer sequence CTCN PAM
gagaacgggaguuugcgcuu

SEQ ID NO: 8159 - RNA, 20 nt, Artificial Sequence
  spacer sequence CTCN PAM
ucggagaacgggaguuugcg

SEQ ID NO: 8160 - RNA, 20 nt, Artificial Sequence
  spacer sequence CTCN PAM
gacgaggaggcaaaaggcga

SEQ ID NO: 8161 - RNA, 20 nt, Artificial Sequence
  spacer sequence CTCN PAM
ucggagcacuccucggagaa

SEQ ID NO: 8162 - RNA, 20 nt, Artificial Sequence
  spacer sequence CTCN PAM
ucgucggagcacuccucgga

SEQ ID NO: 8163 - RNA, 20 nt, Artificial Sequence
  spacer sequence CTCN PAM
agacaaucgccuuuugccuc

SEQ ID NO: 8164 - RNA, 20 nt, Artificial Sequence
  spacer sequence CTCN PAM
gaagcuaaggaagggaucuu

SEQ ID NO: 8165 - RNA, 20 nt, Artificial Sequence
  spacer sequence CTCN PAM
aagaucccuuccuuagcuuc

SEQ ID NO: 8166 - RNA, 20 nt, Artificial Sequence
  spacer sequence CTCN PAM
aggcagcucaaagaucccuu

SEQ ID NO: 8167 - RNA, 20 nt, Artificial Sequence
  spacer sequence CTCN PAM
ccggcuacgcggccuccagg

SEQ ID NO: 8168 - RNA, 20 nt, Artificial Sequence
  spacer sequence CTCN PAM
caguggcucgccggcuacgc

SEQ ID NO: 8169 - RNA, 20 nt, Artificial Sequence
  spacer sequence CTCN PAM
guguugggcaucgcggccgg

SEQ ID NO: 8170 - RNA, 20 nt, Artificial Sequence
  spacer sequence CTCN PAM
uucucgagcuugaugcgcuu

SEQ ID NO: 8171 - RNA, 20 nt, Artificial Sequence
  spacer sequence CTCN PAM
agcuugaugcgcuuagagaa

SEQ ID NO: 8172 - RNA, 20 nt, Artificial Sequence
  spacer sequence CTCN PAM
agaaggaguucgaccugccc

SEQ ID NO: 8173 - RNA, 20 nt, Artificial Sequence
  spacer sequence CTCN PAM
aagcgcaucaagcucgagaa

SEQ ID NO: 8174 - RNA, 20 nt, Artificial Sequence
  spacer sequence CTCN PAM
gcgagcuggggcugcccagc

SEQ ID NO: 8175 - RNA, 20 nt, Artificial Sequence
  spacer sequence CTCN PAM
cugagccccuucucuaagcg

SEQ ID NO: 8176 - RNA, 20 nt, Artificial Sequence
  spacer sequence CTCN PAM
gggggccuguccaaaaagcu

SEQ ID NO: 8177 - RNA, 20 nt, Artificial Sequence
  spacer sequence CTCN PAM
cccggggagcagccgcggcc

SEQ ID NO: 8178 - RNA, 20 nt, Artificial Sequence
  spacer sequence CTCN PAM
ccgggcgagucggccucggg

SEQ ID NO: 8179 - RNA, 20 nt, Artificial Sequence
  spacer sequence CTCN PAM
ccggccaccgagucuucguc

SEQ ID NO: 8180 - RNA, 20 nt, Artificial Sequence
  spacer sequence CTCN PAM
guggccggcgagucggaccg

SEQ ID NO: 8181 - RNA, 20 nt, Artificial Sequence
  spacer sequence CTCN PAM
gccucggccagguggccgcg

SEQ ID NO: 8182 - RNA, 20 nt, Artificial Sequence
  spacer sequence CTCN PAM
gccagguggccgcgcuuaug

SEQ ID NO: 8183 - RNA, 20 nt, Artificial Sequence
  spacer sequence CTCN PAM
cccaggaccugguggaaggc

SEQ ID NO: 8184 - RNA, 20 nt, Artificial Sequence
  spacer sequence CTCN PAM
cugaagugcugcauggagcu

SEQ ID NO: 8185 - RNA, 20 nt, Artificial Sequence
  spacer sequence CTCN PAM
augcagcacuucagcgaggc

SEQ ID NO: 8186 - RNA, 20 nt, Artificial Sequence
  spacer sequence CTCN PAM
gcuccaugcagcacuucagc

SEQ ID NO: 8187 - RNA, 20 nt, Artificial Sequence
  spacer sequence CTCN PAM
cgucgcccacgcccacgacc

SEQ ID NO: 8188 - RNA, 20 nt, Artificial Sequence
  spacer sequence CTCN PAM
ucgcccacgcccacgaccgc

SEQ ID NO: 8189 - RNA, 20 nt, Artificial Sequence
  spacer sequence CTCN PAM
cggggcgcggucgugggcgu

SEQ ID NO: 8190 - RNA, 20 nt, Artificial Sequence
  spacer sequence CTCN PAM
ugguggcgcgccgccuccag

SEQ ID NO: 8191 - RNA, 20 nt, Artificial Sequence
  spacer sequence CTCN PAM
aggcucagcccgaagccgua

SEQ ID NO: 8192 - RNA, 20 nt, Artificial Sequence
  spacer sequence CTCN PAM
gcccgaagccguaguccacc

SEQ ID NO: 8193 - RNA, 20 nt, Artificial Sequence
  spacer sequence CTCN PAM
cgcucuccgucagcuccucc

SEQ ID NO: 8194 - RNA, 20 nt, Artificial Sequence
  spacer sequence CTCN PAM
cucuccgucagcuccuccuc

SEQ ID NO: 8195 - RNA, 20 nt, Artificial Sequence
  spacer sequence CTCN PAM
ccgucagcuccuccuccucc

SEQ ID NO: 8196 - RNA, 20 nt, Artificial Sequence
  spacer sequence CTCN PAM
gucagcuccuccuccuccuc

SEQ ID NO: 8197 - RNA, 20 nt, Artificial Sequence
  spacer sequence CTCN PAM
uccuccuccucuuccuccuc

SEQ ID NO: 8198 - RNA, 20 nt, Artificial Sequence
  spacer sequence CTCN PAM
uccuccucuuccuccucuuc

SEQ ID NO: 8199 - RNA, 20 nt, Artificial Sequence
  spacer sequence CTCN PAM
uccucuuccuccucuucuuc

SEQ ID NO: 8200 - RNA, 20 nt, Artificial Sequence
  spacer sequence CTCN PAM
ucuuccuccucuucuuccuc

SEQ ID NO: 8201 - RNA, 20 nt, Artificial Sequence
  spacer sequence CTCN PAM
uccuccucuucuuccucuuc

SEQ ID NO: 8202 - RNA, 20 nt, Artificial Sequence
  spacer sequence CTCN PAM
ucuucuuccucuuccucguc

SEQ ID NO: 8203 - RNA, 20 nt, Artificial Sequence
  spacer sequence CTCN PAM
ucuuccucuuccucgucguc

SEQ ID NO: 8204 - RNA, 20 nt, Artificial Sequence
  spacer sequence CTCN PAM
uccucgucguccuccucuuc

SEQ ID NO: 8205 - RNA, 20 nt, Artificial Sequence
  spacer sequence CTCN PAM
ucguccuccucuuccuccuc

SEQ ID NO: 8206 - RNA, 20 nt, Artificial Sequence
  spacer sequence CTCN PAM
ucuuccuccucguccccguu

SEQ ID NO: 8207 - RNA, 20 nt, Artificial Sequence
  spacer sequence CTCN PAM
uccuccucguccccguucuc

SEQ ID NO: 8208 - RNA, 20 nt, Artificial Sequence
  spacer sequence CTCN PAM
ucguccccguucuccgggau

SEQ ID NO: 8209 - RNA, 20 nt, Artificial Sequence
  spacer sequence CTCN PAM
uccccguucuccgggaucag

SEQ ID NO: 8210 - RNA, 20 nt, Artificial Sequence
  spacer sequence CTCN PAM
gggaucagguuggggucguu

SEQ ID NO: 8211 - RNA, 20 nt, Artificial Sequence
  spacer sequence CTCN PAM
cucuugaacuuggccaccac

SEQ ID NO: 8212 - RNA, 20 nt, Artificial Sequence
  spacer sequence CTCN PAM
ugaacuuggccaccacggac

SEQ ID NO: 8213 - RNA, 20 nt, Artificial Sequence
  spacer sequence CTCN PAM
aguccgugguggccaaguuc

SEQ ID NO: 8214 - RNA, 20 nt, Artificial Sequence
  spacer sequence CTCN PAM
ccggaacccggcaccagcga

SEQ ID NO: 8215 - RNA, 20 nt, Artificial Sequence
  spacer sequence CTCN PAM
accgccagcuccccggaacc

SEQ ID NO: 8216 - RNA, 20 nt, Artificial Sequence
  spacer sequence CTCN PAM
ccaccgccagcuccccggaa

SEQ ID NO: 8217 - RNA, 20 nt, Artificial Sequence
  spacer sequence CTCN PAM
cccguguggcugcgccggug

SEQ ID NO: 8218 - RNA, 20 nt, Artificial Sequence
  spacer sequence CTCN PAM
gaaauuugaacgucuugccg

SEQ ID NO: 8219 - RNA, 20 nt, Artificial Sequence
  spacer sequence CTCN PAM
caugacuuggacuugaccgg

SEQ ID NO: 8220 - RNA, 20 nt, Artificial Sequence
  spacer sequence CTCN PAM
cagcccccggucaaguccaa

SEQ ID NO: 8221 - RNA, 20 nt, Artificial Sequence
  spacer sequence CTCN PAM
cucccagcccccggucaagu

SEQ ID NO: 8222 - RNA, 20 nt, Artificial Sequence
  spacer sequence CTCN PAM
ucccucccagcccccgguca

SEQ ID NO: 8223 - RNA, 20 nt, Artificial Sequence
  spacer sequence CTCN PAM
gcaauccgccccuccucccu

SEQ ID NO: 8224 - RNA, 20 nt, Artificial Sequence
  spacer sequence CTCN PAM
ucugcaauccgccccuccuc

SEQ ID NO: 8225 - RNA, 20 nt, Artificial Sequence
  spacer sequence CTCN PAM
cuccucugcaauccgccccu

SEQ ID NO: 8226 - RNA, 20 nt, Artificial Sequence
  spacer sequence CTCN PAM
cuaagucuccuagagaaauc

SEQ ID NO: 8227 - RNA, 20 nt, Artificial Sequence
  spacer sequence CTCN PAM
aagucuccuagagaaaucca

SEQ ID NO: 8228 - RNA, 20 nt, Artificial Sequence
  spacer sequence CTCN PAM
uagagaaauccauggcggga

SEQ ID NO: 8229 - RNA, 20 nt, Artificial Sequence
  spacer sequence CTCN PAM
aggagacuuagagagcuggc

SEQ ID NO: 8230 - RNA, 20 nt, Artificial Sequence
  spacer sequence CTCN PAM
cgccauggauuucucuagga

SEQ ID NO: 8231 - RNA, 20 nt, Artificial Sequence
  spacer sequence CTCN PAM
auagccauuggauucaaccg

SEQ ID NO: 8232 - RNA, 20 nt, Artificial Sequence
  spacer sequence CTCN PAM
ggugauggguggccagggcc

SEQ ID NO: 8233 - RNA, 20 nt, Artificial Sequence
  spacer sequence CTCN PAM
uccgcccccaggcgcucuau

SEQ ID NO: 8234 - RNA, 20 nt, Artificial Sequence
  spacer sequence CTCN PAM
augcgguggggguccaagug

SEQ ID NO: 8235 - RNA, 20 nt, Artificial Sequence
  spacer sequence CTCN PAM
gugguggacuaaacaggggg

SEQ ID NO: 8236 - RNA, 20 nt, Artificial Sequence
  spacer sequence CTCN PAM
cccccuguuuaguccaccac

SEQ ID NO: 8237 - RNA, 20 nt, Artificial Sequence
  spacer sequence CTCN PAM
cucgauacugauccugguau

SEQ ID NO: 8238 - RNA, 20 nt, Artificial Sequence
  spacer sequence CTCN PAM
cgauacugauccugguauuc

SEQ ID NO: 8239 - RNA, 20 nt, Artificial Sequence
  spacer sequence CTCN PAM
auacugauccugguauucuu

SEQ ID NO: 8240 - RNA, 20 nt, Artificial Sequence
  spacer sequence CTCN PAM
augggauucauauugcagac

SEQ ID NO: 8241 - RNA, 20 nt, Artificial Sequence
  spacer sequence CTCN PAM
ccaugggauucauauugcag

SEQ ID NO: 8242 - RNA, 20 nt, Artificial Sequence
  spacer sequence CTCN PAM
uggauuaagaaucuacuuag

SEQ ID NO: 8243 - RNA, 20 nt, Artificial Sequence
  spacer sequence CTCN PAM
ugcaacacgcacagaacacu

SEQ ID NO: 8244 - RNA, 20 nt, Artificial Sequence
  spacer sequence CTCN PAM
ucuuuaccugcaaaauaaua

SEQ ID NO: 8245 - RNA, 20 nt, Artificial Sequence
  spacer sequence CTCN PAM
gugauuaaacauugauguug

SEQ ID NO: 8246 - RNA, 20 nt, Artificial Sequence
  spacer sequence CTCN PAM
agccuucccugcccccaccc

SEQ ID NO: 8247 - RNA, 20 nt, Artificial Sequence
  spacer sequence CTCN PAM
accccaaggccuaagcccuc

SEQ ID NO: 8248 - RNA, 20 nt, Artificial Sequence
  spacer sequence CTCN PAM
cugaccuacccccugugccu

SEQ ID NO: 8249 - RNA, 20 nt, Artificial Sequence
  spacer sequence CTCN PAM
gacgugccaggcacaggggg

SEQ ID NO: 8250 - RNA, 20 nt, Artificial Sequence
  spacer sequence CTCN PAM
guucuagaaauuuuauaucc

SEQ ID NO: 8251 - RNA, 20 nt, Artificial Sequence
  spacer sequence CTCN PAM
agccagaacuggucaggauu

SEQ ID NO: 8252 - RNA, 20 nt, Artificial Sequence
  spacer sequence CTCN PAM
acaaaugucuucuaaacuuu

SEQ ID NO: 8253 - RNA, 20 nt, Artificial Sequence
  spacer sequence CTCN PAM
ucuccaugugccucuguuuc

SEQ ID NO: 8254 - RNA, 20 nt, Artificial Sequence
  spacer sequence CTCN PAM
augugccucuguuuccuccu

SEQ ID NO: 8255 - RNA, 20 nt, Artificial Sequence
  spacer sequence CTCN PAM
guuuccuccuuguuaaguga

SEQ ID NO: 8256 - RNA, 20 nt, Artificial Sequence
  spacer sequence CTCN PAM
uuguuaagugagaaacuugg

SEQ ID NO: 8257 - RNA, 20 nt, Artificial Sequence
  spacer sequence CTCN PAM
cuuaacaaggaggaaacaga

SEQ ID NO: 8258 - RNA, 20 nt, Artificial Sequence
  spacer sequence CTCN PAM
augaaauguuugccuauuua

SEQ ID NO: 8259 - RNA, 20 nt, Artificial Sequence
  spacer sequence CTCN PAM
cuacaauguucuauggcccu

SEQ ID NO: 8260 - RNA, 20 nt, Artificial Sequence
  spacer sequence CTCN PAM
uuuuaacaauaucaacaauu

SEQ ID NO: 8261 - RNA, 20 nt, Artificial Sequence
  spacer sequence CTCN PAM
cauuuuaacaauaucaacaa

SEQ ID NO: 8262 - RNA, 20 nt, Artificial Sequence
  spacer sequence CTCN PAM
uaaaauacuuccguggaaaa

SEQ ID NO: 8263 - RNA, 20 nt, Artificial Sequence
  spacer sequence CTCN PAM
caccccagacugugggagga

SEQ ID NO: 8264 - RNA, 20 nt, Artificial Sequence
  spacer sequence CTCN PAM
cacagucuggggugugagaa

SEQ ID NO: 8265 - RNA, 20 nt, Artificial Sequence
  spacer sequence CTCN PAM
cugauccucccacagucugg

SEQ ID NO: 8266 - RNA, 20 nt, Artificial Sequence
  spacer sequence CTCN PAM
aagaauguuuaaaaaaucug

SEQ ID NO: 8267 - RNA, 20 nt, Artificial Sequence
  spacer sequence CTCN PAM
uaaagauuggauacagccua

SEQ ID NO: 8268 - RNA, 20 nt, Artificial Sequence
  spacer sequence CTCN PAM
uaacuuuuccagacuugcau

SEQ ID NO: 8269 - RNA, 20 nt, Artificial Sequence
  spacer sequence CTCN PAM
uccuaacuuuuccagacuug

SEQ ID NO: 8270 - RNA, 20 nt, Artificial Sequence
  spacer sequence CTCN PAM
gccugcugccugucauggcg

SEQ ID NO: 8271 - RNA, 20 nt, Artificial Sequence
  spacer sequence CTCN PAM
uccucauuguuuugagaggc

SEQ ID NO: 8272 - RNA, 20 nt, Artificial Sequence
  spacer sequence CTCN PAM
ucauuguuuugagaggcuaa

SEQ ID NO: 8273 - RNA, 20 nt, Artificial Sequence
  spacer sequence CTCN PAM
uuguuuugagaggcuaacaa

SEQ ID NO: 8274 - RNA, 20 nt, Artificial Sequence
  spacer sequence CTCN PAM
aaacaaugaggaggaggaua

SEQ ID NO: 8275 - RNA, 20 nt, Artificial Sequence
  spacer sequence CTCN PAM
caaaacaaugaggaggagga

SEQ ID NO: 8276 - RNA, 20 nt, Artificial Sequence
  spacer sequence CTCN PAM
gcugggacucagcuccaguu

SEQ ID NO: 8277 - RNA, 20 nt, Artificial Sequence
  spacer sequence CTCN PAM
gcuccaguugagaaagaaac

SEQ ID NO: 8278 - RNA, 20 nt, Artificial Sequence
  spacer sequence CTCN PAM
aguugagaaagaaacagaaa

SEQ ID NO: 8279 - RNA, 20 nt, Artificial Sequence
  spacer sequence CTCN PAM
acuggagcugagucccagcc

SEQ ID NO: 8280 - RNA, 20 nt, Artificial Sequence
  spacer sequence CTCN PAM
ggccaguagccaagccgucu

SEQ ID NO: 8281 - RNA, 20 nt, Artificial Sequence
  spacer sequence CTCN PAM
agacggcuuggcuacuggcc

SEQ ID NO: 8282 - RNA, 20 nt, Artificial Sequence
  spacer sequence CTCN PAM
ccagacggcuuggcuacugg

SEQ ID NO: 8283 - RNA, 20 nt, Artificial Sequence
  spacer sequence CTCN PAM
uggguucuuuucagcaaggg

SEQ ID NO: 8284 - RNA, 20 nt, Artificial Sequence
  spacer sequence CTCN PAM
ccaaaugaaauauuuuguga

SEQ ID NO: 8285 - RNA, 20 nt, Artificial Sequence
  spacer sequence CTCN PAM
ccauauauauuuaauuuagc

SEQ ID NO: 8286 - RNA, 20 nt, Artificial Sequence
  spacer sequence CTCN PAM
uccuuuggcuaccauuacuu

SEQ ID NO: 8287 - RNA, 20 nt, Artificial Sequence
  spacer sequence CTCN PAM
uccucguccuuuggcuacca

SEQ ID NO: 8288 - RNA, 20 nt, Artificial Sequence
  spacer sequence CTCN PAM
gggaaguuuuguuuuucuca

SEQ ID NO: 8289 - RNA, 20 nt, Artificial Sequence
  spacer sequence CTCN PAM
guuauauuuuaaggcuuuuu

SEQ ID NO: 8290 - RNA, 20 nt, Artificial Sequence
  spacer sequence CTCN PAM
uucuuuuaaaagaagggcug

SEQ ID NO: 8291 - RNA, 20 nt, Artificial Sequence
  spacer sequence CTCN PAM
ugcagcccuucuuuuaaaag

SEQ ID NO: 8292 - RNA, 20 nt, Artificial Sequence
  spacer sequence CTCN PAM
cugguagauuuuuuuuuuuu

SEQ ID NO: 8293 - RNA, 20 nt, Artificial Sequence
  spacer sequence CTCN PAM
uaaccucccugguagauuuu

SEQ ID NO: 8294 - RNA, 20 nt, Artificial Sequence
  spacer sequence CTCN PAM
cucuuaaccucccugguaga

SEQ ID NO: 8295 - RNA, 20 nt, Artificial Sequence
  spacer sequence CTCN PAM
uucucacucuuaaccucccu

SEQ ID NO: 8296 - RNA, 20 nt, Artificial Sequence
  spacer sequence CTCN PAM
auuuagcaagucagaaagaa

SEQ ID NO: 8297 - RNA, 20 nt, Artificial Sequence
  spacer sequence CTCN PAM
ggagcccccaaacacuggua

SEQ ID NO: 8298 - RNA, 20 nt, Artificial Sequence
  spacer sequence CTCN PAM
ugagaagacccugccggcuu

SEQ ID NO: 8299 - RNA, 20 nt, Artificial Sequence
  spacer sequence CTCN PAM
cucaagcacuugucuaaaua

SEQ ID NO: 8300 - RNA, 20 nt, Artificial Sequence
  spacer sequence CTCN PAM
agcacuugucuaaauaaugg

SEQ ID NO: 8301 - RNA, 20 nt, Artificial Sequence
  spacer sequence CTCN PAM
ugcccugaccuuguaauuua

SEQ ID NO: 8302 - RNA, 20 nt, Artificial Sequence
  spacer sequence CTCN PAM
auauaucucacuccugggua

SEQ ID NO: 8303 - RNA, 20 nt, Artificial Sequence
  spacer sequence CTCN PAM
cuccuggguaaaucucuuaa

SEQ ID NO: 8304 - RNA, 20 nt, Artificial Sequence
  spacer sequence CTCN PAM
uggguaaaucucuuaaacaa

SEQ ID NO: 8305 - RNA, 20 nt, Artificial Sequence
  spacer sequence CTCN PAM
uaaacaagauuagaugguaa

SEQ ID NO: 8306 - RNA, 20 nt, Artificial Sequence
  spacer sequence CTCN PAM
ucucuucaaagggaaauaaa

SEQ ID NO: 8307 - RNA, 20 nt, Artificial Sequence
  spacer sequence CTCN PAM
cuucaaagggaaauaaaaag

SEQ ID NO: 8308 - RNA, 20 nt, Artificial Sequence
  spacer sequence CTCN PAM
ucaaagggaaauaaaaagcu

SEQ ID NO: 8309 - RNA, 20 nt, Artificial Sequence
  spacer sequence CTCN PAM
augaagcuuuuuauuucccu

SEQ ID NO: 8310 - RNA, 20 nt, Artificial Sequence
  spacer sequence CTCN PAM
guggcuuccuccuuguccuc

SEQ ID NO: 8311 - RNA, 20 nt, Artificial Sequence
  spacer sequence CTCN PAM
uuguccucccuagaucucug

SEQ ID NO: 8312 - RNA, 20 nt, Artificial Sequence
  spacer sequence CTCN PAM
cuagaucucugggugacuau

SEQ ID NO: 8313 - RNA, 20 nt, Artificial Sequence
  spacer sequence CTCN PAM
gggugacuaucauuccuauu

SEQ ID NO: 8314 - RNA, 20 nt, Artificial Sequence
  spacer sequence CTCN PAM
gaucgucaggcuaaauagga

SEQ ID NO: 8315 - RNA, 20 nt, Artificial Sequence
  spacer sequence CTCN PAM
aaaugccuuaaaauuauauu

SEQ ID NO: 8316 - RNA, 20 nt, Artificial Sequence
  spacer sequence CTCN PAM
uaauuaguggugcugguuuc

SEQ ID NO: 8317 - RNA, 20 nt, Artificial Sequence
  spacer sequence CTCN PAM
uuuguauccuuucaaaaagg

SEQ ID NO: 8318 - RNA, 20 nt, Artificial Sequence
  spacer sequence CTCN PAM
uuuaagccuuuuugaaagga

SEQ ID NO: 8319 - RNA, 20 nt, Artificial Sequence
  spacer sequence CTCN PAM
gggcagcaaaauaaaaugga

SEQ ID NO: 8320 - RNA, 20 nt, Artificial Sequence
  spacer sequence CTCN PAM
gaaaaaaaguuuaggaugcu

SEQ ID NO: 8321 - RNA, 20 nt, Artificial Sequence
  spacer sequence CTCN PAM
ccucucucucauacaucagg

SEQ ID NO: 8322 - RNA, 20 nt, Artificial Sequence
  spacer sequence CTCN PAM
cucucauacaucaggucaga

SEQ ID NO: 8323 - RNA, 20 nt, Artificial Sequence
  spacer sequence CTCN PAM
cucauacaucaggucagaga

SEQ ID NO: 8324 - RNA, 20 nt, Artificial Sequence
  spacer sequence CTCN PAM
cauacaucaggucagagaaa

SEQ ID NO: 8325 - RNA, 20 nt, Artificial Sequence
  spacer sequence CTCN PAM
uacaucaggucagagaaaau

SEQ ID NO: 8326 - RNA, 20 nt, Artificial Sequence
  spacer sequence CTCN PAM
gaccugauguaugagagaga

SEQ ID NO: 8327 - RNA, 20 nt, Artificial Sequence
  spacer sequence CTCN PAM
uuauaagauaaaaugccauu

SEQ ID NO: 8328 - RNA, 20 nt, Artificial Sequence
  spacer sequence CTCN PAM
ugaucuagaauaucuaguug

SEQ ID NO: 8329 - RNA, 20 nt, Artificial Sequence
  spacer sequence CTCN PAM
uugacauuaugauuacacua

SEQ ID NO: 8330 - RNA, 20 nt, Artificial Sequence
  spacer sequence CTCN PAM
aucguaacagcccuucucau

SEQ ID NO: 8331 - RNA, 20 nt, Artificial Sequence
  spacer sequence CTCN PAM
auguaaucuuuagucucaau

SEQ ID NO: 8332 - RNA, 20 nt, Artificial Sequence
  spacer sequence CTCN PAM
ccauguaaucuuuagucuca

SEQ ID NO: 8333 - RNA, 20 nt, Artificial Sequence
  spacer sequence CTCN PAM
cuccauguaaucuuuagucu

SEQ ID NO: 8334 - RNA, 20 nt, Artificial Sequence
  spacer sequence CTCN PAM
gcucaugccgguguaccaua

SEQ ID NO: 8335 - RNA, 20 nt, Artificial Sequence
  spacer sequence CTCN PAM
ugccgguguaccauauuaua

SEQ ID NO: 8336 - RNA, 20 nt, Artificial Sequence
  spacer sequence CTCN PAM
cagauucuaaauuccuaaac

SEQ ID NO: 8337 - RNA, 20 nt, Artificial Sequence
  spacer sequence CTCN PAM
gaugaaaaucaacuucucaa

SEQ ID NO: 8338 - RNA, 20 nt, Artificial Sequence
  spacer sequence CTCN PAM
auuugagagccucauugggc

SEQ ID NO: 8339 - RNA, 20 nt, Artificial Sequence
  spacer sequence CTCN PAM
aauugagaaguugauuuuca

SEQ ID NO: 8340 - RNA, 20 nt, Artificial Sequence
  spacer sequence CTCN PAM
caaauugagaaguugauuuu

SEQ ID NO: 8341 - RNA, 20 nt, Artificial Sequence
  spacer sequence CTCN PAM
uugggcauuuacggggauug

SEQ ID NO: 8342 - RNA, 20 nt, Artificial Sequence
  spacer sequence CTCN PAM
aaaucaaaacaauccccgua

SEQ ID NO: 8343 - RNA, 20 nt, Artificial Sequence
  spacer sequence CTCN PAM
aguuccuaugcuuaggggcc

SEQ ID NO: 8344 - RNA, 20 nt, Artificial Sequence
  spacer sequence CTCN PAM
agauucagaagaacaaggag

SEQ ID NO: 8345 - RNA, 20 nt, Artificial Sequence
  spacer sequence CTCN PAM
uuguucuucugaaucuugag

SEQ ID NO: 8346 - RNA, 20 nt, Artificial Sequence
  spacer sequence CTCN PAM
gaccuccuuguucuucugaa

SEQ ID NO: 8347 - RNA, 20 nt, Artificial Sequence
  spacer sequence CTCN PAM
agucucagaccuccuuguuc

SEQ ID NO: 8348 - RNA, 20 nt, Artificial Sequence
  spacer sequence CTCN PAM
auuauccacuagauuguaac

SEQ ID NO: 8349 - RNA, 20 nt, Artificial Sequence
  spacer sequence CTCN PAM
gggauagucauuugauuucu

SEQ ID NO: 8350 - RNA, 20 nt, Artificial Sequence
  spacer sequence CTCN PAM
gagucuuggaauuccuaucu

SEQ ID NO: 8351 - RNA, 20 nt, Artificial Sequence
  spacer sequence CTCN PAM
gagaaaucaaaugacuaucc

SEQ ID NO: 8352 - RNA, 20 nt, Artificial Sequence
  spacer sequence CTCN PAM
uuuuacagauaggaauucca

SEQ ID NO: 8353 - RNA, 20 nt, Artificial Sequence
  spacer sequence CTCN PAM
guaaacuaucaggucgaaug

SEQ ID NO: 8354 - RNA, 20 nt, Artificial Sequence
  spacer sequence CTCN PAM
cauucacauucgaccugaua

SEQ ID NO: 8355 - RNA, 20 nt, Artificial Sequence
  spacer sequence CTCN PAM
guaauuaaucaccccuggua

SEQ ID NO: 8356 - RNA, 20 nt, Artificial Sequence
  spacer sequence CTCN PAM
ggaagccguucggggugugu

SEQ ID NO: 8357 - RNA, 20 nt, Artificial Sequence
  spacer sequence CTCN PAM
uuuuggccuggguuaaggcc

SEQ ID NO: 8358 - RNA, 20 nt, Artificial Sequence
  spacer sequence CTCN PAM
aguuaaagagcaggggugac

SEQ ID NO: 8359 - RNA, 20 nt, Artificial Sequence
  spacer sequence CTCN PAM
uuaacuagagccuccuuuug

SEQ ID NO: 8360 - RNA, 20 nt, Artificial Sequence
  spacer sequence CTCN PAM
gcugugugccagucaccccu

SEQ ID NO: 8361 - RNA, 20 nt, Artificial Sequence
  spacer sequence CTCN PAM
uagcacuucccuguggccac

SEQ ID NO: 8362 - RNA, 20 nt, Artificial Sequence
  spacer sequence CTCN PAM
ggaagccaggggcagcaggu

SEQ ID NO: 8363 - RNA, 20 nt, Artificial Sequence
  spacer sequence CTCN PAM
agaacaaaccugaugcccau

SEQ ID NO: 8364 - RNA, 20 nt, Artificial Sequence
  spacer sequence CTCN PAM
uaaauugguccugccagcag

SEQ ID NO: 8365 - RNA, 20 nt, Artificial Sequence
  spacer sequence CTCN PAM
cuuugugggaaggugggaga

SEQ ID NO: 8366 - RNA, 20 nt, Artificial Sequence
  spacer sequence CTCN PAM
caccuucccacaaagggagg

SEQ ID NO: 8367 - RNA, 20 nt, Artificial Sequence
  spacer sequence CTCN PAM
cccaccuucccacaaaggga

SEQ ID NO: 8368 - RNA, 20 nt, Artificial Sequence
  spacer sequence CTCN PAM
gacuuuccuaccagucaaau

SEQ ID NO: 8369 - RNA, 20 nt, Artificial Sequence
  spacer sequence CTCN PAM
cagcccucaggaagaccagg

SEQ ID NO: 8370 - RNA, 20 nt, Artificial Sequence
  spacer sequence CTCN PAM
ggaagaccaggcugaagacc

SEQ ID NO: 8371 - RNA, 20 nt, Artificial Sequence
  spacer sequence CTCN PAM
gucuucagccuggucuuccu

SEQ ID NO: 8372 - RNA, 20 nt, Artificial Sequence
  spacer sequence CTCN PAM
caacuccacccuccucugaa

SEQ ID NO: 8373 - RNA, 20 nt, Artificial Sequence
  spacer sequence CTCN PAM
acuccacccuccucugaacu

SEQ ID NO: 8374 - RNA, 20 nt, Artificial Sequence
  spacer sequence CTCN PAM
acccuccucugaacugcuca

SEQ ID NO: 8375 - RNA, 20 nt, Artificial Sequence
  spacer sequence CTCN PAM
ucugaacugcucaacucccu

SEQ ID NO: 8376 - RNA, 20 nt, Artificial Sequence
  spacer sequence CTCN PAM
gaacugcucaacucccuucu

SEQ ID NO: 8377 - RNA, 20 nt, Artificial Sequence
  spacer sequence CTCN PAM
acucccuucuaucccuuccc

SEQ ID NO: 8378 - RNA, 20 nt, Artificial Sequence
  spacer sequence CTCN PAM
cuucuaucccuucccuccaa

SEQ ID NO: 8379 - RNA, 20 nt, Artificial Sequence
  spacer sequence CTCN PAM
aaaaguggcuccguuuccac

SEQ ID NO: 8380 - RNA, 20 nt, Artificial Sequence
  spacer sequence CTCN PAM
guuuccacagccccaugcag

SEQ ID NO: 8381 - RNA, 20 nt, Artificial Sequence
  spacer sequence CTCN PAM
uguugcugggggcaucuggg

SEQ ID NO: 8382 - RNA, 20 nt, Artificial Sequence
  spacer sequence CTCN PAM
ccuguugcugggggcaucug

SEQ ID NO: 8383 - RNA, 20 nt, Artificial Sequence
  spacer sequence CTCN PAM
ccccacccagccagcaugca

SEQ ID NO: 8384 - RNA, 20 nt, Artificial Sequence
  spacer sequence CTCN PAM
ccacccagccagcaugcagg

SEQ ID NO: 8385 - RNA, 20 nt, Artificial Sequence
  spacer sequence CTCN PAM
cgguuucuagucccugcaug

SEQ ID NO: 8386 - RNA, 20 nt, Artificial Sequence
  spacer sequence CTCN PAM
uaaaccuucugcaaucugug

SEQ ID NO: 8387 - RNA, 20 nt, Artificial Sequence
  spacer sequence CTCN PAM
cuucccccaagcugggccua

SEQ ID NO: 8388 - RNA, 20 nt, Artificial Sequence
  spacer sequence CTCN PAM
ucugcucccuucccccaagc

SEQ ID NO: 8389 - RNA, 20 nt, Artificial Sequence
  spacer sequence CTCN PAM
ggaccugagggcuuaugaaa

SEQ ID NO: 8390 - RNA, 20 nt, Artificial Sequence
  spacer sequence CTCN PAM
gguccugagggcuggguggu

SEQ ID NO: 8391 - RNA, 20 nt, Artificial Sequence
  spacer sequence CTCN PAM
uuguuaccuaggauuaccua

SEQ ID NO: 8392 - RNA, 20 nt, Artificial Sequence
  spacer sequence CTCN PAM
uagguaauccuagguaacaa

SEQ ID NO: 8393 - RNA, 20 nt, Artificial Sequence
  spacer sequence CTCN PAM
gggugcaugcccugcucuuc

SEQ ID NO: 8394 - RNA, 20 nt, Artificial Sequence
  spacer sequence CTCN PAM
ucagauaccauuuacaagau

SEQ ID NO: 8395 - RNA, 20 nt, Artificial Sequence
  spacer sequence CTCN PAM
cucccaucuaaaaacagucc

SEQ ID NO: 8396 - RNA, 20 nt, Artificial Sequence
  spacer sequence CTCN PAM
caucuaaaaacagucccccu

SEQ ID NO: 8397 - RNA, 20 nt, Artificial Sequence
  spacer sequence CTCN PAM
aagggggacuguuuuuagau

SEQ ID NO: 8398 - RNA, 20 nt, Artificial Sequence
  spacer sequence CTCN PAM
ggcaucuugcucuuuguuau

SEQ ID NO: 8399 - RNA, 20 nt, Artificial Sequence
  spacer sequence CTCN PAM
uuguuauucucucuccauga

SEQ ID NO: 8400 - RNA, 20 nt, Artificial Sequence
  spacer sequence CTCN PAM
cuccaugaccuuuuuccuuu

SEQ ID NO: 8401 - RNA, 20 nt, Artificial Sequence
  spacer sequence CTCN PAM
ccaugaccuuuuuccuuuuc

SEQ ID NO: 8402 - RNA, 20 nt, Artificial Sequence
  spacer sequence CTCN PAM
augaccuuuuuccuuuucuu

SEQ ID NO: 8403 - RNA, 20 nt, Artificial Sequence
  spacer sequence CTCN PAM
guguaggaacacaugguaug

SEQ ID NO: 8404 - RNA, 20 nt, Artificial Sequence
  spacer sequence CTCN PAM
cuugaacaaguaaauggugg

SEQ ID NO: 8405 - RNA, 20 nt, Artificial Sequence
  spacer sequence CTCN PAM
accaccaccauuaccaccac

SEQ ID NO: 8406 - RNA, 20 nt, Artificial Sequence
  spacer sequence CTCN PAM
acuaucaccaccaccaccac

SEQ ID NO: 8407 - RNA, 20 nt, Artificial Sequence
  spacer sequence CTCN PAM
aaaaccaggagaaaaauuag

SEQ ID NO: 8408 - RNA, 20 nt, Artificial Sequence
  spacer sequence CTCN PAM
ugguuuuagagaaaaaugca

SEQ ID NO: 8409 - RNA, 20 nt, Artificial Sequence
  spacer sequence CTCN PAM
ggaauaacccuaaacugacu

SEQ ID NO: 8410 - RNA, 20 nt, Artificial Sequence
  spacer sequence CTCN PAM
uuuugauucuggccuuggcu

SEQ ID NO: 8411 - RNA, 20 nt, Artificial Sequence
  spacer sequence CTCN PAM
uuuaggacuuuggguauagu

SEQ ID NO: 8412 - RNA, 20 nt, Artificial Sequence
  spacer sequence CTCN PAM
uguggccucauuuaggacuu

SEQ ID NO: 8413 - RNA, 20 nt, Artificial Sequence
  spacer sequence CTCN PAM
agaggcacaggcaucuucaa

SEQ ID NO: 8414 - RNA, 20 nt, Artificial Sequence
  spacer sequence CTCN PAM
ggagcccauuuuauuacugg

SEQ ID NO: 8415 - RNA, 20 nt, Artificial Sequence
  spacer sequence CTCN PAM
guggcuagugauugaagaug

SEQ ID NO: 8416 - RNA, 20 nt, Artificial Sequence
  spacer sequence CTCN PAM
ccagggucuugucuugcucc

SEQ ID NO: 8417 - RNA, 20 nt, Artificial Sequence
  spacer sequence CTCN PAM
ucccugugggucuucucccc

SEQ ID NO: 8418 - RNA, 20 nt, Artificial Sequence
  spacer sequence CTCN PAM
cagccuccagugaggaaaga

SEQ ID NO: 8419 - RNA, 20 nt, Artificial Sequence
  spacer sequence CTCN PAM
agugaggaaagaaaaagggg

SEQ ID NO: 8420 - RNA, 20 nt, Artificial Sequence
  spacer sequence CTCN PAM
cuggaggcugggagcugaua

SEQ ID NO: 8421 - RNA, 20 nt, Artificial Sequence
  spacer sequence CTCN PAM
ccuuuuucuuuccucacugg

SEQ ID NO: 8422 - RNA, 20 nt, Artificial Sequence
  spacer sequence CTCN PAM
ggggcugaguggagugggga

SEQ ID NO: 8423 - RNA, 20 nt, Artificial Sequence
  spacer sequence CTCN PAM
gccccagagggacuucuucc

SEQ ID NO: 8424 - RNA, 20 nt, Artificial Sequence
  spacer sequence CTCN PAM
acucagccccagagggacuu

SEQ ID NO: 8425 - RNA, 20 nt, Artificial Sequence
  spacer sequence CTCN PAM
ccacuccacucagccccaga

SEQ ID NO: 8426 - RNA, 20 nt, Artificial Sequence
  spacer sequence CTCN PAM
cuuggcagccgcuccccacu

SEQ ID NO: 8427 - RNA, 20 nt, Artificial Sequence
  spacer sequence CTCN PAM
uucaguacuuaaaaaguaag

SEQ ID NO: 8428 - RNA, 20 nt, Artificial Sequence
  spacer sequence CTCN PAM
ucucuauacacauggacauu

SEQ ID NO: 8429 - RNA, 20 nt, Artificial Sequence
  spacer sequence CTCN PAM
auacacauggacauuuguag

SEQ ID NO: 8430 - RNA, 20 nt, Artificial Sequence
  spacer sequence CTCN PAM
acuuacaaauacccugcggg

SEQ ID NO: 8431 - RNA, 20 nt, Artificial Sequence
  spacer sequence CTCN PAM
ucccaggcguggggauuaga

SEQ ID NO: 8432 - RNA, 20 nt, Artificial Sequence
  spacer sequence CTCN PAM
aauccccacgccugggauga

SEQ ID NO: 8433 - RNA, 20 nt, Artificial Sequence
  spacer sequence CTCN PAM
augugcagaacgaggggagg

SEQ ID NO: 8434 - RNA, 20 nt, Artificial Sequence
  spacer sequence CTCN PAM
uucugcacauggagcucuaa

SEQ ID NO: 8435 - RNA, 20 nt, Artificial Sequence
  spacer sequence CTCN PAM
ccucguucugcacauggagc

SEQ ID NO: 8436 - RNA, 20 nt, Artificial Sequence
  spacer sequence CTCN PAM
uccccucguucugcacaugg

SEQ ID NO: 8437 - RNA, 20 nt, Artificial Sequence
  spacer sequence CTCN PAM
ccuccccucguucugcacau

SEQ ID NO: 8438 - RNA, 20 nt, Artificial Sequence
  spacer sequence CTCN PAM
agugcagaaguuuaucugug

SEQ ID NO: 8439 - RNA, 20 nt, Artificial Sequence
  spacer sequence CTCN PAM
ucuuuuguuucaggccuugg

SEQ ID NO: 8440 - RNA, 20 nt, Artificial Sequence
  spacer sequence CTCN PAM
ccacucuucuuuuguuucag

SEQ ID NO: 8441 - RNA, 20 nt, Artificial Sequence
  spacer sequence CTCN PAM
gggaaauaacucaccacucu

SEQ ID NO: 8442 - RNA, 20 nt, Artificial Sequence
  spacer sequence CTCN PAM
ccuuuccuaaaacaaacccu

SEQ ID NO: 8443 - RNA, 20 nt, Artificial Sequence
  spacer sequence CTCN PAM
ccccuuuccuaaaacaaacc

SEQ ID NO: 8444 - RNA, 20 nt, Artificial Sequence
  spacer sequence CTCN PAM
uuuccuaucagcauuuugcu

SEQ ID NO: 8445 - RNA, 20 nt, Artificial Sequence
  spacer sequence CTCN PAM
gucccauaaaaaacgauuca

SEQ ID NO: 8446 - RNA, 20 nt, Artificial Sequence
  spacer sequence CTCN PAM
gucccucugccccccucuuc

SEQ ID NO: 8447 - RNA, 20 nt, Artificial Sequence
  spacer sequence CTCN PAM
gccccccucuucccaugcua

SEQ ID NO: 8448 - RNA, 20 nt, Artificial Sequence
  spacer sequence CTCN PAM
ucccaugcuauauuuaugau

SEQ ID NO: 8449 - RNA, 20 nt, Artificial Sequence
  spacer sequence CTCN PAM
guccagaaaugcccagguuu

SEQ ID NO: 8450 - RNA, 20 nt, Artificial Sequence
  spacer sequence CTCN PAM
agaauccugucaacuggaaa

SEQ ID NO: 8451 - RNA, 20 nt, Artificial Sequence
  spacer sequence CTCN PAM
caauacaaagcaauggaaga

SEQ ID NO: 8452 - RNA, 20 nt, Artificial Sequence
  spacer sequence CTCN PAM
ggugaagacaagugacuucu

SEQ ID NO: 8453 - RNA, 20 nt, Artificial Sequence
  spacer sequence CTCN PAM
cacuaauaaaaugaaucuaa

SEQ ID NO: 8454 - RNA, 20 nt, Artificial Sequence
  spacer sequence CTCN PAM
gugcuacaaauguuucauug

SEQ ID NO: 8455 - RNA, 20 nt, Artificial Sequence
  spacer sequence CTCN PAM
aaaaaaucucagugcuacaa

SEQ ID NO: 8456 - RNA, 20 nt, Artificial Sequence
  spacer sequence CTCN PAM
ucucaaaaaaaucucagugc

SEQ ID NO: 8457 - RNA, 20 nt, Artificial Sequence
  spacer sequence CTCN PAM
ucuagcuaacuaaccaugua

SEQ ID NO: 8458 - RNA, 20 nt, Artificial Sequence
  spacer sequence CTCN PAM
agcuaacuaaccauguagcu

SEQ ID NO: 8459 - RNA, 20 nt, Artificial Sequence
  spacer sequence CTCN PAM
agauggacagcuacaugguu

SEQ ID NO: 8460 - RNA, 20 nt, Artificial Sequence
  spacer sequence CTCN PAM
agucugucucaagauggaca

SEQ ID NO: 8461 - RNA, 20 nt, Artificial Sequence
  spacer sequence CTCN PAM
ugcaccaucuauccuccagu

SEQ ID NO: 8462 - RNA, 20 nt, Artificial Sequence
  spacer sequence CTCN PAM
guguguucuagagguuugga

SEQ ID NO: 8463 - RNA, 20 nt, Artificial Sequence
  spacer sequence CTCN PAM
agaacacacagagcgucucc

SEQ ID NO: 8464 - RNA, 20 nt, Artificial Sequence
  spacer sequence CTCN PAM
aaaccucuagaacacacaga

SEQ ID NO: 8465 - RNA, 20 nt, Artificial Sequence
  spacer sequence CTCN PAM
ccaaucaucaugaacuccaa

SEQ ID NO: 8466 - RNA, 20 nt, Artificial Sequence
  spacer sequence CTCN PAM
cgcccuccccaaucaucaug

SEQ ID NO: 8467 - RNA, 20 nt, Artificial Sequence
  spacer sequence CTCN PAM
uaauauuaagcuaauggaaa

SEQ ID NO: 8468 - RNA, 20 nt, Artificial Sequence
  spacer sequence CTCN PAM
aggauagcaggucucaagug

SEQ ID NO: 8469 - RNA, 20 nt, Artificial Sequence
  spacer sequence CTCN PAM
aguguaaaauacauccuguu

SEQ ID NO: 8470 - RNA, 20 nt, Artificial Sequence
  spacer sequence CTCN PAM
uuauauagagcacacugcca

SEQ ID NO: 8471 - RNA, 20 nt, Artificial Sequence
  spacer sequence CTCN PAM
auauaaggagaacaggaugu

SEQ ID NO: 8472 - RNA, 20 nt, Artificial Sequence
  spacer sequence CTCN PAM
uugcgaaaggaaaucuuguc

SEQ ID NO: 8473 - RNA, 20 nt, Artificial Sequence
  spacer sequence CTCN PAM
gcagcacaccaucguuaccc

SEQ ID NO: 8474 - RNA, 20 nt, Artificial Sequence
  spacer sequence CTCN PAM
uacacagacagcauaggucu

SEQ ID NO: 8475 - RNA, 20 nt, Artificial Sequence
  spacer sequence CTCN PAM
gcaggccugguaacagcaga

SEQ ID NO: 8476 - RNA, 20 nt, Artificial Sequence
  spacer sequence CTCN PAM
ggcuagguggugcuuccacc

SEQ ID NO: 8477 - RNA, 20 nt, Artificial Sequence
  spacer sequence CTCN PAM
guagauguucucaggcuagg

SEQ ID NO: 8478 - RNA, 20 nt, Artificial Sequence
  spacer sequence CTCN PAM
cugacccaaaacaaaauaaa

SEQ ID NO: 8479 - RNA, 20 nt, Artificial Sequence
  spacer sequence CTCN PAM
gacccaaaacaaaauaaaca

SEQ ID NO: 8480 - RNA, 20 nt, Artificial Sequence
  spacer sequence CTCN PAM
auucacuugacguaaacagu

SEQ ID NO: 8481 - RNA, 20 nt, Artificial Sequence
  spacer sequence CTCN PAM
caauucacuugacguaaaca

SEQ ID NO: 8482 - RNA, 20 nt, Artificial Sequence
  spacer sequence CTCN PAM
uugaaaaauaccaugacaaa

SEQ ID NO: 8483 - RNA, 20 nt, Artificial Sequence
  spacer sequence CTCN PAM
gauuucucauugaaaaauac

SEQ ID NO: 8484 - RNA, 20 nt, Artificial Sequence
  spacer sequence CTCN PAM
gccguucacuaaguuugcug

SEQ ID NO: 8485 - RNA, 20 nt, Artificial Sequence
  spacer sequence CTCN PAM
gugaucccagcauaaacgca

SEQ ID NO: 8486 - RNA, 20 nt, Artificial Sequence
  spacer sequence CTCN PAM
ccauacaaggauccaaguac

SEQ ID NO: 8487 - RNA, 20 nt, Artificial Sequence
  spacer sequence CTCN PAM
gccacuuacucugggaagag

SEQ ID NO: 8488 - RNA, 20 nt, Artificial Sequence
  spacer sequence CTCN PAM
gggaagagacccugaagugc

SEQ ID NO: 8489 - RNA, 20 nt, Artificial Sequence
  spacer sequence CTCN PAM
ucccagaguaaguggcagag

SEQ ID NO: 8490 - RNA, 20 nt, Artificial Sequence
  spacer sequence CTCN PAM
agcaagaaaugggagaacug

SEQ ID NO: 8491 - RNA, 20 nt, Artificial Sequence
  spacer sequence CTCN PAM
cauuucuugcuggaggccug

SEQ ID NO: 8492 - RNA, 20 nt, Artificial Sequence
  spacer sequence CTCN PAM
caugaaucucuuguuggcaa

SEQ ID NO: 8493 - RNA, 20 nt, Artificial Sequence
  spacer sequence CTCN PAM
uguuggcaaacuugucuaca

SEQ ID NO: 8494 - RNA, 20 nt, Artificial Sequence
  spacer sequence CTCN PAM
acagugucuggccguguggc

SEQ ID NO: 8495 - RNA, 20 nt, Artificial Sequence
  spacer sequence CTCN PAM
cuuugccacacggccagaca

SEQ ID NO: 8496 - RNA, 20 nt, Artificial Sequence
  spacer sequence CTCN PAM
ucugacuaucuggcagcaua

SEQ ID NO: 8497 - RNA, 20 nt, Artificial Sequence
  spacer sequence CTCN PAM
guuuccccaucuguaaaaug

SEQ ID NO: 8498 - RNA, 20 nt, Artificial Sequence
  spacer sequence CTCN PAM
uggccucaguuuccccaucu

SEQ ID NO: 8499 - RNA, 20 nt, Artificial Sequence
  spacer sequence CTCN PAM
ugacuccugauccagugguc

SEQ ID NO: 8500 - RNA, 20 nt, Artificial Sequence
  spacer sequence CTCN PAM
ugauccaguggucuuuccug

SEQ ID NO: 8501 - RNA, 20 nt, Artificial Sequence
  spacer sequence CTCN PAM
uccccccugcugcuccugcc

SEQ ID NO: 8502 - RNA, 20 nt, Artificial Sequence
  spacer sequence CTCN PAM
ugccguggucuucacugccc

SEQ ID NO: 8503 - RNA, 20 nt, Artificial Sequence
  spacer sequence CTCN PAM
cccaagacgguuaaguacug

SEQ ID NO: 8504 - RNA, 20 nt, Artificial Sequence
  spacer sequence CTCN PAM
caauuggaaaacaaggccug

SEQ ID NO: 8505 - RNA, 20 nt, Artificial Sequence
  spacer sequence CTCN PAM
gcugccugggccuccuggcc

SEQ ID NO: 8506 - RNA, 20 nt, Artificial Sequence
  spacer sequence CTCN PAM
uggccucaccuuugcugugu

SEQ ID NO: 8507 - RNA, 20 nt, Artificial Sequence
  spacer sequence CTCN PAM
ccuuugcuguguucacccuc

SEQ ID NO: 8508 - RNA, 20 nt, Artificial Sequence
  spacer sequence CTCN PAM
accucugcuuccccugcaga

SEQ ID NO: 8509 - RNA, 20 nt, Artificial Sequence
  spacer sequence CTCN PAM
gcuuccccugcagaauuaga

SEQ ID NO: 8510 - RNA, 20 nt, Artificial Sequence
  spacer sequence CTCN PAM
caaagacagugugcuuuuuu

SEQ ID NO: 8511 - RNA, 20 nt, Artificial Sequence
  spacer sequence CTCN PAM
cccuugcauuuaucuuccuu

SEQ ID NO: 8512 - RNA, 20 nt, Artificial Sequence
  spacer sequence CTCN PAM
uccugaaggaagauaaaugc

SEQ ID NO: 8513 - RNA, 20 nt, Artificial Sequence
  spacer sequence CTCN PAM
uugguaaguaaaaucgacau

SEQ ID NO: 8514 - RNA, 20 nt, Artificial Sequence
  spacer sequence CTCN PAM
cuagggcuuaacuucuugcu

SEQ ID NO: 8515 - RNA, 20 nt, Artificial Sequence
  spacer sequence CTCN PAM
gaagcauuaauugugauacu

SEQ ID NO: 8516 - RNA, 20 nt, Artificial Sequence
  spacer sequence CTCN PAM
aggagcagcucugccuuccc

SEQ ID NO: 8517 - RNA, 20 nt, Artificial Sequence
  spacer sequence CTCN PAM
aguuugacgcucagaagcau

SEQ ID NO: 8518 - RNA, 20 nt, Artificial Sequence
  spacer sequence CTCN PAM
ucgaguuugacgcucagaag

SEQ ID NO: 8519 - RNA, 20 nt, Artificial Sequence
  spacer sequence CTCN PAM
gccuucccaggccaaggugg

SEQ ID NO: 8520 - RNA, 20 nt, Artificial Sequence
  spacer sequence CTCN PAM
uuuuccccaccuuggccugg

SEQ ID NO: 8521 - RNA, 20 nt, Artificial Sequence
  spacer sequence CTCN PAM
accaggggcagcuccuuuuc

SEQ ID NO: 8522 - RNA, 20 nt, Artificial Sequence
  spacer sequence CTCN PAM
ucuuuucccaccuucgcuuu

SEQ ID NO: 8523 - RNA, 20 nt, Artificial Sequence
  spacer sequence CTCN PAM
ccagccagagaugggcucug

SEQ ID NO: 8524 - RNA, 20 nt, Artificial Sequence
  spacer sequence CTCN PAM
ggcuggggagaaugaaagcg

SEQ ID NO: 8525 - RNA, 20 nt, Artificial Sequence
  spacer sequence CTCN PAM
gguugcuggcuaggaagugg

SEQ ID NO: 8526 - RNA, 20 nt, Artificial Sequence
  spacer sequence CTCN PAM
uuuuuucuuuguuagugcuc

SEQ ID NO: 8527 - RNA, 20 nt, Artificial Sequence
  spacer sequence CTCN PAM
uaggcaagugauucucacag

SEQ ID NO: 8528 - RNA, 20 nt, Artificial Sequence
  spacer sequence CTCN PAM
cagcgcagacccaggcccac

SEQ ID NO: 8529 - RNA, 20 nt, Artificial Sequence
  spacer sequence CTCN PAM
caggugaugcugaucggggg

SEQ ID NO: 8530 - RNA, 20 nt, Artificial Sequence
  spacer sequence CTCN PAM
gacuuacugaaucagaaauu

SEQ ID NO: 8531 - RNA, 20 nt, Artificial Sequence
  spacer sequence CTCN PAM
auuucugauucaguaagucu

SEQ ID NO: 8532 - RNA, 20 nt, Artificial Sequence
  spacer sequence CTCN PAM
aggugauucucaugcacacu

SEQ ID NO: 8533 - RNA, 20 nt, Artificial Sequence
  spacer sequence CTCN PAM
ugcacacucaagcugaauca

SEQ ID NO: 8534 - RNA, 20 nt, Artificial Sequence
  spacer sequence CTCN PAM
agcugaaucagcacugcugu

SEQ ID NO: 8535 - RNA, 20 nt, Artificial Sequence
  spacer sequence CTCN PAM
gcccagggaauuucaaagcu

SEQ ID NO: 8536 - RNA, 20 nt, Artificial Sequence
  spacer sequence CTCN PAM
uggcccaugggucucugccc

SEQ ID NO: 8537 - RNA, 20 nt, Artificial Sequence
  spacer sequence CTCN PAM
uguccaggacccaccuccuu

SEQ ID NO: 8538 - RNA, 20 nt, Artificial Sequence
  spacer sequence CTCN PAM
uuuaggacuggaacagucaa

SEQ ID NO: 8539 - RNA, 20 nt, Artificial Sequence
  spacer sequence CTCN PAM
auuaggaaauucagguucca

SEQ ID NO: 8540 - RNA, 20 nt, Artificial Sequence
  spacer sequence CTCN PAM
gucugucauugauaaggaca

SEQ ID NO: 8541 - RNA, 20 nt, Artificial Sequence
  spacer sequence CTCN PAM
ccaucagguccagggccuuc

SEQ ID NO: 8542 - RNA, 20 nt, Artificial Sequence
  spacer sequence CTCN PAM
aucagguccagggccuucuu

SEQ ID NO: 8543 - RNA, 20 nt, Artificial Sequence
  spacer sequence CTCN PAM
ugcuaagaaggcccuggacc

SEQ ID NO: 8544 - RNA, 20 nt, Artificial Sequence
  spacer sequence CTCN PAM
cugcuuccauuaaagccgac

SEQ ID NO: 8545 - RNA, 20 nt, Artificial Sequence
  spacer sequence CTCN PAM
uguuucccuuucuggucucu

SEQ ID NO: 8546 - RNA, 20 nt, Artificial Sequence
  spacer sequence CTCN PAM
caaaugggacacauuucccu

SEQ ID NO: 8547 - RNA, 20 nt, Artificial Sequence
  spacer sequence CTCN PAM
aaugggacacauuucccuuu

SEQ ID NO: 8548 - RNA, 20 nt, Artificial Sequence
  spacer sequence CTCN PAM
aucuuuuuucaaaugucuua

SEQ ID NO: 8549 - RNA, 20 nt, Artificial Sequence
  spacer sequence CTCN PAM
cuagacccaguauuuccacu

SEQ ID NO: 8550 - RNA, 20 nt, Artificial Sequence
  spacer sequence CTCN PAM
agacccaguauuuccacuug

SEQ ID NO: 8551 - RNA, 20 nt, Artificial Sequence
  spacer sequence CTCN PAM
gaaaugccuuacacauuauu

SEQ ID NO: 8552 - RNA, 20 nt, Artificial Sequence
  spacer sequence CTCN PAM
uauuuuucagguuucauuaa

SEQ ID NO: 8553 - RNA, 20 nt, Artificial Sequence
  spacer sequence CTCN PAM
uugucaaaaguugguaccca

SEQ ID NO: 8554 - RNA, 20 nt, Artificial Sequence
  spacer sequence CTCN PAM
aagcccagugggauguuccu

SEQ ID NO: 8555 - RNA, 20 nt, Artificial Sequence
  spacer sequence CTCN PAM
agaacaucucaaagauuccu

SEQ ID NO: 8556 - RNA, 20 nt, Artificial Sequence
  spacer sequence CTCN PAM
aagauuccuugacuauuaac

SEQ ID NO: 8557 - RNA, 20 nt, Artificial Sequence
  spacer sequence CTCN PAM
caaagcagucauuaaacgug

SEQ ID NO: 8558 - RNA, 20 nt, Artificial Sequence
  spacer sequence CTCN PAM
ccacaggaguacauagaugu

SEQ ID NO: 8559 - RNA, 20 nt, Artificial Sequence
  spacer sequence CTCN PAM
acaggaguacauagaugugu

SEQ ID NO: 8560 - RNA, 20 nt, Artificial Sequence
  spacer sequence CTCN PAM
uguggagaguccugugguuu

SEQ ID NO: 8561 - RNA, 20 nt, Artificial Sequence
  spacer sequence CTCN PAM
caaacacauaugcaugcaca

SEQ ID NO: 8562 - RNA, 20 nt, Artificial Sequence
  spacer sequence CTCN PAM
cauauacacacacaugaaca

SEQ ID NO: 8563 - RNA, 20 nt, Artificial Sequence
  spacer sequence CTCN PAM
cugaaaaaaaaaaaaaaaca

SEQ ID NO: 8564 - RNA, 20 nt, Artificial Sequence
  spacer sequence CTCN PAM
acugcuuuugugccugucuc

SEQ ID NO: 8565 - RNA, 20 nt, Artificial Sequence
  spacer sequence CTCN PAM
ugacacugugacccccuuuc

SEQ ID NO: 8566 - RNA, 20 nt, Artificial Sequence
  spacer sequence CTCN PAM
uuuugaagacccagggugaa

SEQ ID NO: 8567 - RNA, 20 nt, Artificial Sequence
  spacer sequence CTCN PAM
ucauagugucauccauucuc

SEQ ID NO: 8568 - RNA, 20 nt, Artificial Sequence
  spacer sequence CTCN PAM
ucaucauagugucauccauu

SEQ ID NO: 8569 - RNA, 20 nt, Artificial Sequence
  spacer sequence CTCN PAM
auauuggugacaggccaaaa

SEQ ID NO: 8570 - RNA, 20 nt, Artificial Sequence
  spacer sequence CTCN PAM
agucccucagcucuuccaug

SEQ ID NO: 8571 - RNA, 20 nt, Artificial Sequence
  spacer sequence CTCN PAM
gcucuuccauguaccaccuu

SEQ ID NO: 8572 - RNA, 20 nt, Artificial Sequence
  spacer sequence CTCN PAM
uccauguaccaccuucuaga

SEQ ID NO: 8573 - RNA, 20 nt, Artificial Sequence
  spacer sequence CTCN PAM
gacuagcugcacuguuguua

SEQ ID NO: 8574 - RNA, 20 nt, Artificial Sequence
  spacer sequence CTCN PAM
agcucagacuagcugcacug

SEQ ID NO: 8575 - RNA, 20 nt, Artificial Sequence
  spacer sequence CTCN PAM
ugacccuauguuuaccauag

SEQ ID NO: 8576 - RNA, 20 nt, Artificial Sequence
  spacer sequence CTCN PAM
cuuagauucucugacuuauc

SEQ ID NO: 8577 - RNA, 20 nt, Artificial Sequence
  spacer sequence CTCN PAM
gacuuaucagaguauuauag

SEQ ID NO: 8578 - RNA, 20 nt, Artificial Sequence
  spacer sequence CTCN PAM
gauaagucagagaaucuaag

SEQ ID NO: 8579 - RNA, 20 nt, Artificial Sequence
  spacer sequence CTCN PAM
auaauacucugauaagucag

SEQ ID NO: 8580 - RNA, 20 nt, Artificial Sequence
  spacer sequence CTCN PAM
agucacaggcauagcuaaug

SEQ ID NO: 8581 - RNA, 20 nt, Artificial Sequence
  spacer sequence CTCN PAM
cagacuucuuaauuaaccuu

SEQ ID NO: 8582 - RNA, 20 nt, Artificial Sequence
  spacer sequence CTCN PAM
cuuuuguucuagaaaugagc

SEQ ID NO: 8583 - RNA, 20 nt, Artificial Sequence
  spacer sequence CTCN PAM
uuuguucuagaaaugagcau

SEQ ID NO: 8584 - RNA, 20 nt, Artificial Sequence
  spacer sequence CTCN PAM
uuucuagaacaaaagagagu

SEQ ID NO: 8585 - RNA, 20 nt, Artificial Sequence
  spacer sequence CTCN PAM
cucaugguccuuagauuccu

SEQ ID NO: 8586 - RNA, 20 nt, Artificial Sequence
  spacer sequence CTCN PAM
caugguccuuagauuccuug

SEQ ID NO: 8587 - RNA, 20 nt, Artificial Sequence
  spacer sequence CTCN PAM
ugguccuuagauuccuugau

SEQ ID NO: 8588 - RNA, 20 nt, Artificial Sequence
  spacer sequence CTCN PAM
uuuuaaaacucuuuuuugau

SEQ ID NO: 8589 - RNA, 20 nt, Artificial Sequence
  spacer sequence CTCN PAM
uuuuugaucaaugcuauccu

SEQ ID NO: 8590 - RNA, 20 nt, Artificial Sequence
  spacer sequence CTCN PAM
uagagccuugauuacucaaa

SEQ ID NO: 8591 - RNA, 20 nt, Artificial Sequence
  spacer sequence CTCN PAM
aagaggauagcauugaucaa

SEQ ID NO: 8592 - RNA, 20 nt, Artificial Sequence
  spacer sequence CTCN PAM
aacaacagguuacuaacuuc

SEQ ID NO: 8593 - RNA, 20 nt, Artificial Sequence
  spacer sequence CTCN PAM
uaaaaggugaaguuaguaac

SEQ ID NO: 8594 - RNA, 20 nt, Artificial Sequence
  spacer sequence CTCN PAM
uccuaggcuuuuucucaaua

SEQ ID NO: 8595 - RNA, 20 nt, Artificial Sequence
  spacer sequence CTCN PAM
uaggcuuuuucucaauaaag

SEQ ID NO: 8596 - RNA, 20 nt, Artificial Sequence
  spacer sequence CTCN PAM
auaaagggaggaaguagaga

SEQ ID NO: 8597 - RNA, 20 nt, Artificial Sequence
  spacer sequence CTCN PAM
cuuuauugagaaaaagccua

SEQ ID NO: 8598 - RNA, 20 nt, Artificial Sequence
  spacer sequence CTCN PAM
acuuccucccuuuauugaga

SEQ ID NO: 8599 - RNA, 20 nt, Artificial Sequence
  spacer sequence CTCN PAM
aauaauauucuuuggcucug

SEQ ID NO: 8600 - RNA, 20 nt, Artificial Sequence
  spacer sequence CTCN PAM
gggcccaaaguauuuucacu

SEQ ID NO: 8601 - RNA, 20 nt, Artificial Sequence
  spacer sequence CTCN PAM
uagauaaguuccgccauucu

SEQ ID NO: 8602 - RNA, 20 nt, Artificial Sequence
  spacer sequence CTCN PAM
gucuccuagauaaguuccgc

SEQ ID NO: 8603 - RNA, 20 nt, Artificial Sequence
  spacer sequence CTCN PAM
cagucuccuagauaaguucc

SEQ ID NO: 8604 - RNA, 20 nt, Artificial Sequence
  spacer sequence CTCN PAM
cuaugcaaaauguguguucc

SEQ ID NO: 8605 - RNA, 20 nt, Artificial Sequence
  spacer sequence CTCN PAM
caugcauucauucaaccucu

SEQ ID NO: 8606 - RNA, 20 nt, Artificial Sequence
  spacer sequence CTCN PAM
ugcauucauucaaccucuca

SEQ ID NO: 8607 - RNA, 20 nt, Artificial Sequence
  spacer sequence CTCN PAM
caugcauucauucaacaaau

SEQ ID NO: 8608 - RNA, 20 nt, Artificial Sequence
  spacer sequence CTCN PAM
ugcauucauucaacaaauau

SEQ ID NO: 8609 - RNA, 20 nt, Artificial Sequence
  spacer sequence CTCN PAM
guaaauauuuguugaaugaa

SEQ ID NO: 8610 - RNA, 20 nt, Artificial Sequence
  spacer sequence CTCN PAM
cacagcaggcuucauuuagu

SEQ ID NO: 8611 - RNA, 20 nt, Artificial Sequence
  spacer sequence CTCN PAM
acccccauguagaaagugug

SEQ ID NO: 8612 - RNA, 20 nt, Artificial Sequence
  spacer sequence CTCN PAM
ugacacacuuucuacauggg

SEQ ID NO: 8613 - RNA, 20 nt, Artificial Sequence
  spacer sequence CTCN PAM
caugacacacuuucuacaug

SEQ ID NO: 8614 - RNA, 20 nt, Artificial Sequence
  spacer sequence CTCN PAM
cucaugacacacuuucuaca

SEQ ID NO: 8615 - RNA, 20 nt, Artificial Sequence
  spacer sequence CTCN PAM
ucuguaccucucucaugaca

SEQ ID NO: 8616 - RNA, 20 nt, Artificial Sequence
  spacer sequence CTCN PAM
uccuuugaauuuccauagca

SEQ ID NO: 8617 - RNA, 20 nt, Artificial Sequence
  spacer sequence CTCN PAM
cuuccaaauggaaauaauuu

SEQ ID NO: 8618 - RNA, 20 nt, Artificial Sequence
  spacer sequence CTCN PAM
cucccuuccaaauggaaaua

SEQ ID NO: 8619 - RNA, 20 nt, Artificial Sequence
  spacer sequence CTCN PAM
cccucccuuccaaauggaaa

SEQ ID NO: 8620 - RNA, 20 nt, Artificial Sequence
  spacer sequence CTCN PAM
cucccucccuuccaaaugga

SEQ ID NO: 8621 - RNA, 20 nt, Artificial Sequence
  spacer sequence CTCN PAM
uucccaaagccucucucccu

SEQ ID NO: 8622 - RNA, 20 nt, Artificial Sequence
  spacer sequence CTCN PAM
uaaguuuuccucuuucccaa

SEQ ID NO: 8623 - RNA, 20 nt, Artificial Sequence
  spacer sequence CTCN PAM
agguuuaacucauaaguuuu

SEQ ID NO: 8624 - RNA, 20 nt, Artificial Sequence
  spacer sequence CTCN PAM
ccagguuuaacucauaaguu

SEQ ID NO: 8625 - RNA, 20 nt, Artificial Sequence
  spacer sequence CTCN PAM
uggcucuccagguuuaacuc

SEQ ID NO: 8626 - RNA, 20 nt, Artificial Sequence
  spacer sequence CTCN PAM
aagcaucuuuaccugcuuuu

SEQ ID NO: 8627 - RNA, 20 nt, Artificial Sequence
  spacer sequence CTCN PAM
cuaagcaucuuuaccugcuu

SEQ ID NO: 8628 - RNA, 20 nt, Artificial Sequence
  spacer sequence CTCN PAM
gugcccaccuugggcuuugc

SEQ ID NO: 8629 - RNA, 20 nt, Artificial Sequence
  spacer sequence CTCN PAM
gcugucaacuggaugaauca

SEQ ID NO: 8630 - RNA, 20 nt, Artificial Sequence
  spacer sequence CTCN PAM
gaagauuucugugacaucuu

SEQ ID NO: 8631 - RNA, 20 nt, Artificial Sequence
  spacer sequence CTCN PAM
ugugaaacuccaugaagguu

SEQ ID NO: 8632 - RNA, 20 nt, Artificial Sequence
  spacer sequence CTCN PAM
augaagguucaucuguucug

SEQ ID NO: 8633 - RNA, 20 nt, Artificial Sequence
  spacer sequence CTCN PAM
auuguuucuucccccaauga

SEQ ID NO: 8634 - RNA, 20 nt, Artificial Sequence
  spacer sequence CTCN PAM
gagucagacaaacaaguguu

SEQ ID NO: 8635 - RNA, 20 nt, Artificial Sequence
  spacer sequence CTCN PAM
gaggaauaaaacauaguaaa

SEQ ID NO: 8636 - RNA, 20 nt, Artificial Sequence
  spacer sequence CTCN PAM
cuggcuuaaauaaucuauuu

SEQ ID NO: 8637 - RNA, 20 nt, Artificial Sequence
  spacer sequence CTCN PAM
uugccaguuuaagaugggcu

SEQ ID NO: 8638 - RNA, 20 nt, Artificial Sequence
  spacer sequence CTCN PAM
auguuucuugcacagucauu

SEQ ID NO: 8639 - RNA, 20 nt, Artificial Sequence
  spacer sequence CTCN PAM
ucaaucaucaacuugaccau

SEQ ID NO: 8640 - RNA, 20 nt, Artificial Sequence
  spacer sequence CTCN PAM
aaauuuccccucuuucuucu

SEQ ID NO: 8641 - RNA, 20 nt, Artificial Sequence
  spacer sequence CTCN PAM
uucuucuuuucaaagccaug

SEQ ID NO: 8642 - RNA, 20 nt, Artificial Sequence
  spacer sequence CTCN PAM
ccauggcuuugaaaagaaga

SEQ ID NO: 8643 - RNA, 20 nt, Artificial Sequence
  spacer sequence CTCN PAM
ugcucugaguccucagcuga

SEQ ID NO: 8644 - RNA, 20 nt, Artificial Sequence
  spacer sequence CTCN PAM
gaguccucagcugaggaucu

SEQ ID NO: 8645 - RNA, 20 nt, Artificial Sequence
  spacer sequence CTCN PAM
gagcaggaguaagggcaccc

SEQ ID NO: 8646 - RNA, 20 nt, Artificial Sequence
  spacer sequence CTCN PAM
gcugaggaucuuguuugugu

SEQ ID NO: 8647 - RNA, 20 nt, Artificial Sequence
  spacer sequence CTCN PAM
gcugaggacucagagcagga

SEQ ID NO: 8648 - RNA, 20 nt, Artificial Sequence
  spacer sequence CTCN PAM
cccugcccccacuacacaca

SEQ ID NO: 8649 - RNA, 20 nt, Artificial Sequence
  spacer sequence CTCN PAM
auccgagguauuuaucaggu

SEQ ID NO: 8650 - RNA, 20 nt, Artificial Sequence
  spacer sequence CTCN PAM
gauagaggcaaggcuacacc

SEQ ID NO: 8651 - RNA, 20 nt, Artificial Sequence
  spacer sequence CTCN PAM
caaauaaccugauaaauacc

SEQ ID NO: 8652 - RNA, 20 nt, Artificial Sequence
  spacer sequence CTCN PAM
gaaaguagcucccaaauaac

SEQ ID NO: 8653 - RNA, 20 nt, Artificial Sequence
  spacer sequence CTCN PAM
auguauucccacugccacca

SEQ ID NO: 8654 - RNA, 20 nt, Artificial Sequence
  spacer sequence CTCN PAM
ccggauucuuuucuuccuuu

SEQ ID NO: 8655 - RNA, 20 nt, Artificial Sequence
  spacer sequence CTCN PAM
ggagagacugcuagaggaaa

SEQ ID NO: 8656 - RNA, 20 nt, Artificial Sequence
  spacer sequence CTCN PAM
agaggaacaagucccugcuu

SEQ ID NO: 8657 - RNA, 20 nt, Artificial Sequence
  spacer sequence CTCN PAM
ccagaggaacaagucccugc

SEQ ID NO: 8658 - RNA, 20 nt, Artificial Sequence
  spacer sequence CTCN PAM
agcagucucuccagaggaac

SEQ ID NO: 8659 - RNA, 20 nt, Artificial Sequence
  spacer sequence CTCN PAM
gccacucaccagcuguuucg

SEQ ID NO: 8660 - RNA, 20 nt, Artificial Sequence
  spacer sequence CTCN PAM
ccagcuguuucgugacuuug

SEQ ID NO: 8661 - RNA, 20 nt, Artificial Sequence
  spacer sequence CTCN PAM
uuuuaaagauggaaacacuu

SEQ ID NO: 8662 - RNA, 20 nt, Artificial Sequence
  spacer sequence CTCN PAM
cuccugccucccaugcaagu

SEQ ID NO: 8663 - RNA, 20 nt, Artificial Sequence
  spacer sequence CTCN PAM
ccugccucccaugcaagucc

SEQ ID NO: 8664 - RNA, 20 nt, Artificial Sequence
  spacer sequence CTCN PAM
ugccucccaugcaaguccag

SEQ ID NO: 8665 - RNA, 20 nt, Artificial Sequence
  spacer sequence CTCN PAM
caugcaaguccaggccuccu

SEQ ID NO: 8666 - RNA, 20 nt, Artificial Sequence
  spacer sequence CTCN PAM
uuuggaccaaccaagagacc

SEQ ID NO: 8667 - RNA, 20 nt, Artificial Sequence
  spacer sequence CTCN PAM
ugguugguccaaaggaggcc

SEQ ID NO: 8668 - RNA, 20 nt, Artificial Sequence
  spacer sequence CTCN PAM
ugaccuugaccuggaugagg

SEQ ID NO: 8669 - RNA, 20 nt, Artificial Sequence
  spacer sequence CTCN PAM
uccaggucaaggucaugagg

SEQ ID NO: 8670 - RNA, 20 nt, Artificial Sequence
  spacer sequence CTCN PAM
ucauccaggucaaggucaug

SEQ ID NO: 8671 - RNA, 20 nt, Artificial Sequence
  spacer sequence CTCN PAM
uauaaggcccuccucaucca

SEQ ID NO: 8672 - RNA, 20 nt, Artificial Sequence
  spacer sequence CTCN PAM
ccuauaaggcccuccucauc

SEQ ID NO: 8673 - RNA, 20 nt, Artificial Sequence
  spacer sequence CTCN PAM
aagccuaaggauuagccugg

SEQ ID NO: 8674 - RNA, 20 nt, Artificial Sequence
  spacer sequence CTCN PAM
cuaagccuaaggauuagccu

SEQ ID NO: 8675 - RNA, 20 nt, Artificial Sequence
  spacer sequence CTCN PAM
cucucuaagccuaaggauua

SEQ ID NO: 8676 - RNA, 20 nt, Artificial Sequence
  spacer sequence CTCN PAM
ugggacacagucuugcaaag

SEQ ID NO: 8677 - RNA, 20 nt, Artificial Sequence
  spacer sequence CTCN PAM
gacauguaaacuuugcaaga

SEQ ID NO: 8678 - RNA, 20 nt, Artificial Sequence
  spacer sequence CTCN PAM
uugaagcucagacauguaaa

SEQ ID NO: 8679 - RNA, 20 nt, Artificial Sequence
  spacer sequence CTCN PAM
ggacacaccuagguuuccuc

SEQ ID NO: 8680 - RNA, 20 nt, Artificial Sequence
  spacer sequence CTCN PAM
uuggcucaggacacaccuag

SEQ ID NO: 8681 - RNA, 20 nt, Artificial Sequence
  spacer sequence CTCN PAM
gaccuucagucucauuggcu

SEQ ID NO: 8682 - RNA, 20 nt, Artificial Sequence
  spacer sequence CTCN PAM
guggcucaugccagaagucc

SEQ ID NO: 8683 - RNA, 20 nt, Artificial Sequence
  spacer sequence CTCN PAM
ugccagaaguccaguagcaa

SEQ ID NO: 8684 - RNA, 20 nt, Artificial Sequence
  spacer sequence CTCN PAM
gccucaugccagagccuggc

SEQ ID NO: 8685 - RNA, 20 nt, Artificial Sequence
  spacer sequence CTCN PAM
ugccagagccuggcacccau

SEQ ID NO: 8686 - RNA, 20 nt, Artificial Sequence
  spacer sequence CTCN PAM
ggcaugaggccgagcuuugc

SEQ ID NO: 8687 - RNA, 20 nt, Artificial Sequence
  spacer sequence CTCN PAM
caaaggcacacacaggacuc

SEQ ID NO: 8688 - RNA, 20 nt, Artificial Sequence
  spacer sequence CTCN PAM
aagaaaagggaguccucucc

SEQ ID NO: 8689 - RNA, 20 nt, Artificial Sequence
  spacer sequence CTCN PAM
cuuuucuuagaguccugugu

SEQ ID NO: 8690 - RNA, 20 nt, Artificial Sequence
  spacer sequence CTCN PAM
ccccagccaccacaaaccag

SEQ ID NO: 8691 - RNA, 20 nt, Artificial Sequence
  spacer sequence CTCN PAM
ccagccaccacaaaccagga

SEQ ID NO: 8692 - RNA, 20 nt, Artificial Sequence
  spacer sequence CTCN PAM
caccacaccccaucagcaug

SEQ ID NO: 8693 - RNA, 20 nt, Artificial Sequence
  spacer sequence CTCN PAM
augcugaugggguguggugg

SEQ ID NO: 8694 - RNA, 20 nt, Artificial Sequence
  spacer sequence CTCN PAM
gaaauuauguugguuagcaa

SEQ ID NO: 8695 - RNA, 20 nt, Artificial Sequence
  spacer sequence CTCN PAM
uugaaaauuggcagggcuuc

SEQ ID NO: 8696 - RNA, 20 nt, Artificial Sequence
  spacer sequence CTCN PAM
cugucaaguaguuaaugauc

SEQ ID NO: 8697 - RNA, 20 nt, Artificial Sequence
  spacer sequence CTCN PAM
gucaaguaguuaaugaucug

SEQ ID NO: 8698 - RNA, 20 nt, Artificial Sequence
  spacer sequence CTCN PAM
cccacugaauuuaaaguguu

SEQ ID NO: 8699 - RNA, 20 nt, Artificial Sequence
  spacer sequence CTCN PAM
cuauuuaaagaaacccugug

SEQ ID NO: 8700 - RNA, 20 nt, Artificial Sequence
  spacer sequence CTCN PAM
cuaauuuaucaguuuccauu

SEQ ID NO: 8701 - RNA, 20 nt, Artificial Sequence
  spacer sequence CTCN PAM
aauuuaucaguuuccauuaa

SEQ ID NO: 8702 - RNA, 20 nt, Artificial Sequence
  spacer sequence CTCN PAM
uuaauggaaacugauaaauu

SEQ ID NO: 8703 - RNA, 20 nt, Artificial Sequence
  spacer sequence CTCN PAM
acugcaauccaugccuuugu

SEQ ID NO: 8704 - RNA, 20 nt, Artificial Sequence
  spacer sequence CTCN PAM
cugccccacucgagaaauga

SEQ ID NO: 8705 - RNA, 20 nt, Artificial Sequence
  spacer sequence CTCN PAM
agaaaugaagaaaaggaugg

SEQ ID NO: 8706 - RNA, 20 nt, Artificial Sequence
  spacer sequence CTCN PAM
aguggggcagggaggcaucg

SEQ ID NO: 8707 - RNA, 20 nt, Artificial Sequence
  spacer sequence CTCN PAM
cagguuaaguauuagauacc

SEQ ID NO: 8708 - RNA, 20 nt, Artificial Sequence
  spacer sequence CTCN PAM
gguaucuaauacuuaaccug

SEQ ID NO: 8709 - RNA, 20 nt, Artificial Sequence
  spacer sequence CTCN PAM
guugaaaaugcguauuucac

SEQ ID NO: 8710 - RNA, 20 nt, Artificial Sequence
  spacer sequence CTCN PAM
uccugaaugcucaguugaaa

SEQ ID NO: 8711 - RNA, 20 nt, Artificial Sequence
  spacer sequence CTCN PAM
ucgcauccaucuucacagcc

SEQ ID NO: 8712 - RNA, 20 nt, Artificial Sequence
  spacer sequence CTCN PAM
ggcagguguuaucagaauca

SEQ ID NO: 8713 - RNA, 20 nt, Artificial Sequence
  spacer sequence CTCN PAM
gcucuggcagguguuaucag

SEQ ID NO: 8714 - RNA, 20 nt, Artificial Sequence
  spacer sequence CTCN PAM
caaauuacucugaagaccac

SEQ ID NO: 8715 - RNA, 20 nt, Artificial Sequence
  spacer sequence CTCN PAM
gaagaccaccccaagccuuu

SEQ ID NO: 8716 - RNA, 20 nt, Artificial Sequence
  spacer sequence CTCN PAM
caacaaaugugcuuuaugcc

SEQ ID NO: 8717 - RNA, 20 nt, Artificial Sequence
  spacer sequence CTCN PAM
auauuaucauuucgaucggu

SEQ ID NO: 8718 - RNA, 20 nt, Artificial Sequence
  spacer sequence CTCN PAM
agaccgaucgaaaugauaau

SEQ ID NO: 8719 - RNA, 20 nt, Artificial Sequence
  spacer sequence CTCN PAM
acccauguuugguuuucuuu

SEQ ID NO: 8720 - RNA, 20 nt, Artificial Sequence
  spacer sequence CTCN PAM
ccuugccccuccacccaugu

SEQ ID NO: 8721 - RNA, 20 nt, Artificial Sequence
  spacer sequence CTCN PAM
uaaugcuaucccuccccuug

SEQ ID NO: 8722 - RNA, 20 nt, Artificial Sequence
  spacer sequence CTCN PAM
aaguucugggauacaugugc

SEQ ID NO: 8723 - RNA, 20 nt, Artificial Sequence
  spacer sequence CTCN PAM
uggaaacaccauguuugauu

SEQ ID NO: 8724 - RNA, 20 nt, Artificial Sequence
  spacer sequence CTCN PAM
ugauguuuuguucgugggca

SEQ ID NO: 8725 - RNA, 20 nt, Artificial Sequence
  spacer sequence CTCN PAM
cagcaccacugccccuguuu

SEQ ID NO: 8726 - RNA, 20 nt, Artificial Sequence
  spacer sequence CTCN PAM
cacagcaccacugccccugu

SEQ ID NO: 8727 - RNA, 20 nt, Artificial Sequence
  spacer sequence CTCN PAM
cuugucucucacagcaccac

SEQ ID NO: 8728 - RNA, 20 nt, Artificial Sequence
  spacer sequence CTCN PAM
ccacucccuugucucucaca

SEQ ID NO: 8729 - RNA, 20 nt, Artificial Sequence
  spacer sequence CTCN PAM
accuggccgggcugcagugu

SEQ ID NO: 8730 - RNA, 20 nt, Artificial Sequence
  spacer sequence CTCN PAM
gugcacagaccagucuugga

SEQ ID NO: 8731 - RNA, 20 nt, Artificial Sequence
  spacer sequence CTCN PAM
gucaggccucccccaaggcc

SEQ ID NO: 8732 - RNA, 20 nt, Artificial Sequence
  spacer sequence CTCN PAM
cccaaggccaacaagcccag

SEQ ID NO: 8733 - RNA, 20 nt, Artificial Sequence
  spacer sequence CTCN PAM
gggcuuguuggccuuggggg

SEQ ID NO: 8734 - RNA, 20 nt, Artificial Sequence
  spacer sequence CTCN PAM
ucugggcuuguuggccuugg

SEQ ID NO: 8735 - RNA, 20 nt, Artificial Sequence
  spacer sequence CTCN PAM
aacucuagcccuucuuaagg

SEQ ID NO: 8736 - RNA, 20 nt, Artificial Sequence
  spacer sequence CTCN PAM
agcccuucuuaaggaagcac

SEQ ID NO: 8737 - RNA, 20 nt, Artificial Sequence
  spacer sequence CTCN PAM
auuaaaaaaaaaaaaaaaaa

SEQ ID NO: 8738 - RNA, 20 nt, Artificial Sequence
  spacer sequence CTCN PAM
cucuguugcccaggcuggag

SEQ ID NO: 8739 - RNA, 20 nt, Artificial Sequence
  spacer sequence CTCN PAM
guugcccaggcuggagugca

SEQ ID NO: 8740 - RNA, 20 nt, Artificial Sequence
  spacer sequence CTCN PAM
agccugggcaacagagugag

SEQ ID NO: 8741 - RNA, 20 nt, Artificial Sequence
  spacer sequence CTCN PAM
cugcaaccuccgccucccga

SEQ ID NO: 8742 - RNA, 20 nt, Artificial Sequence
  spacer sequence CTCN PAM
gccucccgaguucaagcagu

SEQ ID NO: 8743 - RNA, 20 nt, Artificial Sequence
  spacer sequence CTCN PAM
cgaguucaagcaguccuccu

SEQ ID NO: 8744 - RNA, 20 nt, Artificial Sequence
  spacer sequence CTCN PAM
ggaggcggagguugcaguga

SEQ ID NO: 8745 - RNA, 20 nt, Artificial Sequence
  spacer sequence CTCN PAM
ugccucagcucucaaguagc

SEQ ID NO: 8746 - RNA, 20 nt, Artificial Sequence
  spacer sequence CTCN PAM
gcucucaaguagcuaggacu

SEQ ID NO: 8747 - RNA, 20 nt, Artificial Sequence
  spacer sequence CTCN PAM
caaguagcuaggacuacagg

SEQ ID NO: 8748 - RNA, 20 nt, Artificial Sequence
  spacer sequence CTCN PAM
aguagcuaggacuacaggca

SEQ ID NO: 8749 - RNA, 20 nt, Artificial Sequence
  spacer sequence CTCN PAM
acaaaaaauacaaaaauuag

SEQ ID NO: 8750 - RNA, 20 nt, Artificial Sequence
  spacer sequence CTCN PAM
ccauguugcccaggcugggu

SEQ ID NO: 8751 - RNA, 20 nt, Artificial Sequence
  spacer sequence CTCN PAM
ccucacauccugccccaaca

SEQ ID NO: 8752 - RNA, 20 nt, Artificial Sequence
  spacer sequence CTCN PAM
ucacauccugccccaacagu

SEQ ID NO: 8753 - RNA, 20 nt, Artificial Sequence
  spacer sequence CTCN PAM
cauccugccccaacagucgc

SEQ ID NO: 8754 - RNA, 20 nt, Artificial Sequence
  spacer sequence CTCN PAM
uuccacagggcgacuguugg

SEQ ID NO: 8755 - RNA, 20 nt, Artificial Sequence
  spacer sequence CTCN PAM
ccucccagugaggaacucga

SEQ ID NO: 8756 - RNA, 20 nt, Artificial Sequence
  spacer sequence CTCN PAM
cagugaggaacucgaagauc

SEQ ID NO: 8757 - RNA, 20 nt, Artificial Sequence
  spacer sequence CTCN PAM
cugggaggugaggcuaauac

SEQ ID NO: 8758 - RNA, 20 nt, Artificial Sequence
  spacer sequence CTCN PAM
aagaucucagaaguguccug

SEQ ID NO: 8759 - RNA, 20 nt, Artificial Sequence
  spacer sequence CTCN PAM
gaaguguccugcuguggaca

SEQ ID NO: 8760 - RNA, 20 nt, Artificial Sequence
  spacer sequence CTCN PAM
cuguccacagcaggacacuu

SEQ ID NO: 8761 - RNA, 20 nt, Artificial Sequence
  spacer sequence CTCN PAM
cacugccaccucagggccgc

SEQ ID NO: 8762 - RNA, 20 nt, Artificial Sequence
  spacer sequence CTCN PAM
gggccgcggcagaaaccugu

SEQ ID NO: 8763 - RNA, 20 nt, Artificial Sequence
  spacer sequence CTCN PAM
ucacuugccuuucuggcacu

SEQ ID NO: 8764 - RNA, 20 nt, Artificial Sequence
  spacer sequence CTCN PAM
cuugccuuucuggcacuauu

SEQ ID NO: 8765 - RNA, 20 nt, Artificial Sequence
  spacer sequence CTCN PAM
auagugccagaaaggcaagu

SEQ ID NO: 8766 - RNA, 20 nt, Artificial Sequence
  spacer sequence CTCN PAM
gugacagucuuggccaagag

SEQ ID NO: 8767 - RNA, 20 nt, Artificial Sequence
  spacer sequence CTCN PAM
uggccaagacugucacagag

SEQ ID NO: 8768 - RNA, 20 nt, Artificial Sequence
  spacer sequence CTCN PAM
gaaucucuuggccaagacug

SEQ ID NO: 8769 - RNA, 20 nt, Artificial Sequence
  spacer sequence CTCN PAM
agaauuaaaaccuauuaugu

SEQ ID NO: 8770 - RNA, 20 nt, Artificial Sequence
  spacer sequence CTCN PAM
guguuaaccauaggacauaa

SEQ ID NO: 8771 - RNA, 20 nt, Artificial Sequence
  spacer sequence CTCN PAM
gaaauuaugagaacuaauuu

SEQ ID NO: 8772 - RNA, 20 nt, Artificial Sequence
  spacer sequence CTCN PAM
uaauuucugagcagcucugu

SEQ ID NO: 8773 - RNA, 20 nt, Artificial Sequence
  spacer sequence CTCN PAM
accaaaaaaaauggucuagc

SEQ ID NO: 8774 - RNA, 20 nt, Artificial Sequence
  spacer sequence CTCN PAM
aacauuucuucaggaauaaa

SEQ ID NO: 8775 - RNA, 20 nt, Artificial Sequence
  spacer sequence CTCN PAM
cgccugaggugaggcugaau

SEQ ID NO: 8776 - RNA, 20 nt, Artificial Sequence
  spacer sequence CTCN PAM
ccugaggugaggcugaauga

SEQ ID NO: 8777 - RNA, 20 nt, Artificial Sequence
  spacer sequence CTCN PAM
ggcgagagggcagccuaguu

SEQ ID NO: 8778 - RNA, 20 nt, Artificial Sequence
  spacer sequence CTCN PAM
ccucaggcgagagggcagcc

SEQ ID NO: 8779 - RNA, 20 nt, Artificial Sequence
  spacer sequence CTCN PAM
uucauucagccucaccucag

SEQ ID NO: 8780 - RNA, 20 nt, Artificial Sequence
  spacer sequence CTCN PAM
ggugcugcgaggccaggccu

SEQ ID NO: 8781 - RNA, 20 nt, Artificial Sequence
  spacer sequence CTCN PAM
cagcaccagagcgcuccuuc

SEQ ID NO: 8782 - RNA, 20 nt, Artificial Sequence
  spacer sequence CTCN PAM
ucccaugacggcaaguccuu

SEQ ID NO: 8783 - RNA, 20 nt, Artificial Sequence
  spacer sequence CTCN PAM
caugacggcaaguccuucuu

SEQ ID NO: 8784 - RNA, 20 nt, Artificial Sequence
  spacer sequence CTCN PAM
gcccggggcaugcugcagcu

SEQ ID NO: 8785 - RNA, 20 nt, Artificial Sequence
  spacer sequence CTCN PAM
gcagugccucagcaccuucc

SEQ ID NO: 8786 - RNA, 20 nt, Artificial Sequence
  spacer sequence CTCN PAM
gcaccuucccgccucccagg

SEQ ID NO: 8787 - RNA, 20 nt, Artificial Sequence
  spacer sequence CTCN PAM
caggcacacagcagcccagc

SEQ ID NO: 8788 - RNA, 20 nt, Artificial Sequence
  spacer sequence CTCN PAM
guccucaucucucuggcaaa

SEQ ID NO: 8789 - RNA, 20 nt, Artificial Sequence
  spacer sequence CTCN PAM
ucucucuggcaaagucccac

SEQ ID NO: 8790 - RNA, 20 nt, Artificial Sequence
  spacer sequence CTCN PAM
cuggcaaagucccacagaac

SEQ ID NO: 8791 - RNA, 20 nt, Artificial Sequence
  spacer sequence CTCN PAM
ggcaaagucccacagaacaa

SEQ ID NO: 8792 - RNA, 20 nt, Artificial Sequence
  spacer sequence CTCN PAM
ucccuggcuuuuuacccaau

SEQ ID NO: 8793 - RNA, 20 nt, Artificial Sequence
  spacer sequence CTCN PAM
cuggcuuuuuacccaauuuc

SEQ ID NO: 8794 - RNA, 20 nt, Artificial Sequence
  spacer sequence CTCN PAM
uuccagauuggucaguggua

SEQ ID NO: 8795 - RNA, 20 nt, Artificial Sequence
  spacer sequence CTCN PAM
gggaacucuuuccagauugg

SEQ ID NO: 8796 - RNA, 20 nt, Artificial Sequence
  spacer sequence CTCN PAM
aauuugcucagggaacucuu

SEQ ID NO: 8797 - RNA, 20 nt, Artificial Sequence
  spacer sequence CTCN PAM
aaugauggcagguuguaucu

SEQ ID NO: 8798 - RNA, 20 nt, Artificial Sequence
  spacer sequence CTCN PAM
guccagccaugggguguggc

SEQ ID NO: 8799 - RNA, 20 nt, Artificial Sequence
  spacer sequence CTCN PAM
acuaauucugcugauuccau

SEQ ID NO: 8800 - RNA, 20 nt, Artificial Sequence
  spacer sequence CTCN PAM
uauggaaucagcagaauuag

SEQ ID NO: 8801 - RNA, 20 nt, Artificial Sequence
  spacer sequence CTCN PAM
aagcuccuccaaccaacagc

SEQ ID NO: 8802 - RNA, 20 nt, Artificial Sequence
  spacer sequence CTCN PAM
uccaaccaacagcacaacau

SEQ ID NO: 8803 - RNA, 20 nt, Artificial Sequence
  spacer sequence CTCN PAM
aaccaacagcacaacaucuu

SEQ ID NO: 8804 - RNA, 20 nt, Artificial Sequence
  spacer sequence CTCN PAM
uuucuacccaccuagcaggu

SEQ ID NO: 8805 - RNA, 20 nt, Artificial Sequence
  spacer sequence CTCN PAM
gccuauggacaccuggccuc

SEQ ID NO: 8806 - RNA, 20 nt, Artificial Sequence
  spacer sequence CTCN PAM
gcgggcacagcggccacaca

SEQ ID NO: 8807 - RNA, 20 nt, Artificial Sequence
  spacer sequence CTCN PAM
gggucccaccguggugugug

SEQ ID NO: 8808 - RNA, 20 nt, Artificial Sequence
  spacer sequence CTCN PAM
aaacaaaaaauggucuccgg

SEQ ID NO: 8809 - RNA, 20 nt, Artificial Sequence
  spacer sequence CTCN PAM
cuaagacugcuugggaaaug

SEQ ID NO: 8810 - RNA, 20 nt, Artificial Sequence
  spacer sequence CTCN PAM
aagacugcuugggaaaugag

SEQ ID NO: 8811 - RNA, 20 nt, Artificial Sequence
  spacer sequence CTCN PAM
uuucccaagcagucuuagag

SEQ ID NO: 8812 - RNA, 20 nt, Artificial Sequence
  spacer sequence CTCN PAM
caggucuagcauuuccacgc

SEQ ID NO: 8813 - RNA, 20 nt, Artificial Sequence
  spacer sequence CTCN PAM
ggucuagcauuuccacgcag

SEQ ID NO: 8814 - RNA, 20 nt, Artificial Sequence
  spacer sequence CTCN PAM
ugguugggacugcguggaaa

SEQ ID NO: 8815 - RNA, 20 nt, Artificial Sequence
  spacer sequence CTCN PAM
ggucagccucaugguuggga

SEQ ID NO: 8816 - RNA, 20 nt, Artificial Sequence
  spacer sequence CTCN PAM
cucaggucuacuaggaacag

SEQ ID NO: 8817 - RNA, 20 nt, Artificial Sequence
  spacer sequence CTCN PAM
caggucuacuaggaacagga

SEQ ID NO: 8818 - RNA, 20 nt, Artificial Sequence
  spacer sequence CTCN PAM
ggucuacuaggaacaggaaa

SEQ ID NO: 8819 - RNA, 20 nt, Artificial Sequence
  spacer sequence CTCN PAM
cccuuaacaagccccucagg

SEQ ID NO: 8820 - RNA, 20 nt, Artificial Sequence
  spacer sequence CTCN PAM
cuuaacaagccccucaggcu

SEQ ID NO: 8821 - RNA, 20 nt, Artificial Sequence
  spacer sequence CTCN PAM
ggcugaaauccuuuugcuuc

SEQ ID NO: 8822 - RNA, 20 nt, Artificial Sequence
  spacer sequence CTCN PAM
accuucuacugcuggguaga

SEQ ID NO: 8823 - RNA, 20 nt, Artificial Sequence
  spacer sequence CTCN PAM
gucaccggcccacagaucuc

SEQ ID NO: 8824 - RNA, 20 nt, Artificial Sequence
  spacer sequence CTCN PAM
gcugccaucgcacucaaacc

SEQ ID NO: 8825 - RNA, 20 nt, Artificial Sequence
  spacer sequence CTCN PAM
aacccugucaggcgguggag

SEQ ID NO: 8826 - RNA, 20 nt, Artificial Sequence
  spacer sequence CTCN PAM
accgccugacaggguuugag

SEQ ID NO: 8827 - RNA, 20 nt, Artificial Sequence
  spacer sequence CTCN PAM
ccaccgccugacaggguuug

SEQ ID NO: 8828 - RNA, 20 nt, Artificial Sequence
  spacer sequence CTCN PAM
uugaaaccgcgucagccugc

SEQ ID NO: 8829 - RNA, 20 nt, Artificial Sequence
  spacer sequence CTCN PAM
ugccccagcucuaaugcaau

SEQ ID NO: 8830 - RNA, 20 nt, Artificial Sequence
  spacer sequence CTCN PAM
aaugcaauaaaaugucuuuu

SEQ ID NO: 8831 - RNA, 20 nt, Artificial Sequence
  spacer sequence CTCN PAM
uugccuugaauuacauugau

SEQ ID NO: 8832 - RNA, 20 nt, Artificial Sequence
  spacer sequence CTCN PAM
uuaaaauggugacagacccu

SEQ ID NO: 8833 - RNA, 20 nt, Artificial Sequence
  spacer sequence CTCN PAM
ggcucaaaccuggcauguaa

SEQ ID NO: 8834 - RNA, 20 nt, Artificial Sequence
  spacer sequence CTCN PAM
aaccuggcauguaagguauc

SEQ ID NO: 8835 - RNA, 20 nt, Artificial Sequence
  spacer sequence CTCN PAM
cuuccaccaaccguuuuuug

SEQ ID NO: 8836 - RNA, 20 nt, Artificial Sequence
  spacer sequence CTCN PAM
ccauaaaucaaaaaacgguu

SEQ ID NO: 8837 - RNA, 20 nt, Artificial Sequence
  spacer sequence CTCN PAM
uccccauaaaucaaaaaacg

SEQ ID NO: 8838 - RNA, 20 nt, Artificial Sequence
  spacer sequence CTCN PAM
acucagcuuucucacucaaa

SEQ ID NO: 8839 - RNA, 20 nt, Artificial Sequence
  spacer sequence CTCN PAM
gcuuucucacucaaaagcug

SEQ ID NO: 8840 - RNA, 20 nt, Artificial Sequence
  spacer sequence CTCN PAM
cucaaaagcugcuuuuguua

SEQ ID NO: 8841 - RNA, 20 nt, Artificial Sequence
  spacer sequence CTCN PAM
aaagcugcuuuuguuaaauc

SEQ ID NO: 8842 - RNA, 20 nt, Artificial Sequence
  spacer sequence CTCN PAM
uggcugacuuuggcggcucc

SEQ ID NO: 8843 - RNA, 20 nt, Artificial Sequence
  spacer sequence CTCN PAM
uccgguguggagcaagcugu

SEQ ID NO: 8844 - RNA, 20 nt, Artificial Sequence
  spacer sequence CTCN PAM
gguguggagcaagcugugga

SEQ ID NO: 8845 - RNA, 20 nt, Artificial Sequence
  spacer sequence CTCN PAM
acaccggaggagccgccaaa

SEQ ID NO: 8846 - RNA, 20 nt, Artificial Sequence
  spacer sequence CTCN PAM
cggggaaguccacagcuugc

SEQ ID NO: 8847 - RNA, 20 nt, Artificial Sequence
  spacer sequence CTCN PAM
ucccggggaaguccacagcu

SEQ ID NO: 8848 - RNA, 20 nt, Artificial Sequence
  spacer sequence CTCN PAM
guggggccuccucccgggga

SEQ ID NO: 8849 - RNA, 20 nt, Artificial Sequence
  spacer sequence CTCN PAM
gcaccaaggacagcgaggag

SEQ ID NO: 8850 - RNA, 20 nt, Artificial Sequence
  spacer sequence CTCN PAM
cuguccuuggugcagagugg

SEQ ID NO: 8851 - RNA, 20 nt, Artificial Sequence
  spacer sequence CTCN PAM
ucgcuguccuuggugcagag

SEQ ID NO: 8852 - RNA, 20 nt, Artificial Sequence
  spacer sequence CTCN PAM
acccccaccuuccccccucc

SEQ ID NO: 8853 - RNA, 20 nt, Artificial Sequence
  spacer sequence CTCN PAM
uccacccccaccuucccccc

SEQ ID NO: 8854 - RNA, 20 nt, Artificial Sequence
  spacer sequence CTCN PAM
agcuccuccacccccaccuu

SEQ ID NO: 8855 - RNA, 20 nt, Artificial Sequence
  spacer sequence CTCN PAM
cuucugaaccuggcucucca

SEQ ID NO: 8856 - RNA, 20 nt, Artificial Sequence
  spacer sequence CTCN PAM
ucugaaccuggcucuccacu

SEQ ID NO: 8857 - RNA, 20 nt, Artificial Sequence
  spacer sequence CTCN PAM
ccacuccauuucuccuggau

SEQ ID NO: 8858 - RNA, 20 nt, Artificial Sequence
  spacer sequence CTCN PAM
acuccauuucuccuggaucc

SEQ ID NO: 8859 - RNA, 20 nt, Artificial Sequence
  spacer sequence CTCN PAM
auuucuccuggauccaaguc

SEQ ID NO: 8860 - RNA, 20 nt, Artificial Sequence
  spacer sequence CTCN PAM
uggauccaagucucccugua

SEQ ID NO: 8861 - RNA, 20 nt, Artificial Sequence
  spacer sequence CTCN PAM
cuguaaucagcauguaucua

SEQ ID NO: 8862 - RNA, 20 nt, Artificial Sequence
  spacer sequence CTCN PAM
aacuaaaaguucaaggcuuc

SEQ ID NO: 8863 - RNA, 20 nt, Artificial Sequence
  spacer sequence CTCN PAM
guggucuaccucugacuguc

SEQ ID NO: 8864 - RNA, 20 nt, Artificial Sequence
  spacer sequence CTCN PAM
gacuguccagcaccaugcug

SEQ ID NO: 8865 - RNA, 20 nt, Artificial Sequence
  spacer sequence CTCN PAM
ucuuugcccagcauggugcu

SEQ ID NO: 8866 - RNA, 20 nt, Artificial Sequence
  spacer sequence CTCN PAM
auaaauaauuaggauucaag

SEQ ID NO: 8867 - RNA, 20 nt, Artificial Sequence
  spacer sequence CTCN PAM
aacaggaagaaaaguucacu

SEQ ID NO: 8868 - RNA, 20 nt, Artificial Sequence
  spacer sequence CTCN PAM
ccaacaggaagaaaaguuca

SEQ ID NO: 8869 - RNA, 20 nt, Artificial Sequence
  spacer sequence CTCN PAM
auggccugguccuuccagcc

SEQ ID NO: 8870 - RNA, 20 nt, Artificial Sequence
  spacer sequence CTCN PAM
uugguuagugaaucauuuac

SEQ ID NO: 8871 - RNA, 20 nt, Artificial Sequence
  spacer sequence CTCN PAM
gggucagccuugacccagga

SEQ ID NO: 8872 - RNA, 20 nt, Artificial Sequence
  spacer sequence CTCN PAM
ugggucaaggcugacccaga

SEQ ID NO: 8873 - RNA, 20 nt, Artificial Sequence
  spacer sequence CTCN PAM
ccugggucaaggcugaccca

SEQ ID NO: 8874 - RNA, 20 nt, Artificial Sequence
  spacer sequence CTCN PAM
augguuguuauggacaauca

SEQ ID NO: 8875 - RNA, 20 nt, Artificial Sequence
  spacer sequence CTCN PAM
uuuaacuguguaauuacaca

SEQ ID NO: 8876 - RNA, 20 nt, Artificial Sequence
  spacer sequence CTCN PAM
auuacuagucugggucccuu

SEQ ID NO: 8877 - RNA, 20 nt, Artificial Sequence
  spacer sequence CTCN PAM
cucaauuuguuuuagcaauc

SEQ ID NO: 8878 - RNA, 20 nt, Artificial Sequence
  spacer sequence CTCN PAM
caauuuguuuuagcaauccu

SEQ ID NO: 8879 - RNA, 20 nt, Artificial Sequence
  spacer sequence CTCN PAM
auuuguuuuagcaauccucc

SEQ ID NO: 8880 - RNA, 20 nt, Artificial Sequence
  spacer sequence CTCN PAM
acauuuuccucuauucucau

SEQ ID NO: 8881 - RNA, 20 nt, Artificial Sequence
  spacer sequence CTCN PAM
auucucauccccuaccugca

SEQ ID NO: 8882 - RNA, 20 nt, Artificial Sequence
  spacer sequence CTCN PAM
uccccuaccugcacccccau

SEQ ID NO: 8883 - RNA, 20 nt, Artificial Sequence
  spacer sequence CTCN PAM
gucccaagagaaagaacagu

SEQ ID NO: 8884 - RNA, 20 nt, Artificial Sequence
  spacer sequence CTCN PAM
ugggacagagaugggggugc

SEQ ID NO: 8885 - RNA, 20 nt, Artificial Sequence
  spacer sequence CTCN PAM
gcuugaauaauccuauuuuu

SEQ ID NO: 8886 - RNA, 20 nt, Artificial Sequence
  spacer sequence CTCN PAM
uaguucuaaauaguuuuugc

SEQ ID NO: 8887 - RNA, 20 nt, Artificial Sequence
  spacer sequence CTCN PAM
acuaaaagggcuuaaaaaua

SEQ ID NO: 8888 - RNA, 20 nt, Artificial Sequence
  spacer sequence CTCN PAM
caggucuagcuuccuagccu

SEQ ID NO: 8889 - RNA, 20 nt, Artificial Sequence
  spacer sequence CTCN PAM
cugccucagaugcagggaga

SEQ ID NO: 8890 - RNA, 20 nt, Artificial Sequence
  spacer sequence CTCN PAM
gaugcagggagaacaccugc

SEQ ID NO: 8891 - RNA, 20 nt, Artificial Sequence
  spacer sequence CTCN PAM
cugcaucugaggcagggagg

SEQ ID NO: 8892 - RNA, 20 nt, Artificial Sequence
  spacer sequence CTCN PAM
gggaagaaagaaggcaaagc

SEQ ID NO: 8893 - RNA, 20 nt, Artificial Sequence
  spacer sequence CTCN PAM
aggagauugaggcuucccag

SEQ ID NO: 8894 - RNA, 20 nt, Artificial Sequence
  spacer sequence CTCN PAM
uugagcacagcagggcuuug

SEQ ID NO: 8895 - RNA, 20 nt, Artificial Sequence
  spacer sequence CTCN PAM
aucuccuugagcacagcagg

SEQ ID NO: 8896 - RNA, 20 nt, Artificial Sequence
  spacer sequence CTCN PAM
ccucccagcaccccauuccc

SEQ ID NO: 8897 - RNA, 20 nt, Artificial Sequence
  spacer sequence CTCN PAM
cagcaccccauucccaaacc

SEQ ID NO: 8898 - RNA, 20 nt, Artificial Sequence
  spacer sequence CTCN PAM
gcuugggacaugcuggaagg

SEQ ID NO: 8899 - RNA, 20 nt, Artificial Sequence
  spacer sequence CTCN PAM
ucuugccuuccagcaugucc

SEQ ID NO: 8900 - RNA, 20 nt, Artificial Sequence
  spacer sequence CTCN PAM
cuucuugccuuccagcaugu

SEQ ID NO: 8901 - RNA, 20 nt, Artificial Sequence
  spacer sequence CTCN PAM
uugaaaacaaaaaugaagca

SEQ ID NO: 8902 - RNA, 20 nt, Artificial Sequence
  spacer sequence CTCN PAM
cugucucccacgaccuacac

SEQ ID NO: 8903 - RNA, 20 nt, Artificial Sequence
  spacer sequence CTCN PAM
gucucccacgaccuacacca

SEQ ID NO: 8904 - RNA, 20 nt, Artificial Sequence
  spacer sequence CTCN PAM
cacgaccuacaccaggcccu

SEQ ID NO: 8905 - RNA, 20 nt, Artificial Sequence
  spacer sequence CTCN PAM
gcuuugcggcuuuaacgcac

SEQ ID NO: 8906 - RNA, 20 nt, Artificial Sequence
  spacer sequence CTCN PAM
caggagucagagggucaccc

SEQ ID NO: 8907 - RNA, 20 nt, Artificial Sequence
  spacer sequence CTCN PAM
ggagucagagggucacccag

SEQ ID NO: 8908 - RNA, 20 nt, Artificial Sequence
  spacer sequence CTCN PAM
ugagagcauguguaugugcu

SEQ ID NO: 8909 - RNA, 20 nt, Artificial Sequence
  spacer sequence CTCN PAM
gacuccugagagcaugugua

SEQ ID NO: 8910 - RNA, 20 nt, Artificial Sequence
  spacer sequence CTCN PAM
uucaccugccagcuuguggg

SEQ ID NO: 8911 - RNA, 20 nt, Artificial Sequence
  spacer sequence CTCN PAM
uagccaggggccagcgugga

SEQ ID NO: 8912 - RNA, 20 nt, Artificial Sequence
  spacer sequence CTCN PAM
auuuccauggcucgugaauu

SEQ ID NO: 8913 - RNA, 20 nt, Artificial Sequence
  spacer sequence CTCN PAM
ugaauuuuuuugucuuguuu

SEQ ID NO: 8914 - RNA, 20 nt, Artificial Sequence
  spacer sequence CTCN PAM
acccccuacaucuuucuuuu

SEQ ID NO: 8915 - RNA, 20 nt, Artificial Sequence
  spacer sequence CTCN PAM
agcacauacaacucagggcu

SEQ ID NO: 8916 - RNA, 20 nt, Artificial Sequence
  spacer sequence CTCN PAM
gggcuccaguguuuuaaggg

SEQ ID NO: 8917 - RNA, 20 nt, Artificial Sequence
  spacer sequence CTCN PAM
aguguuuuaagggcauuuuu

SEQ ID NO: 8918 - RNA, 20 nt, Artificial Sequence
  spacer sequence CTCN PAM
cuuguggaaaaaaaaugccc

SEQ ID NO: 8919 - RNA, 20 nt, Artificial Sequence
  spacer sequence CTCN PAM
caccaucacacagaauguac

SEQ ID NO: 8920 - RNA, 20 nt, Artificial Sequence
  spacer sequence CTCN PAM
cccaccaucacacagaaugu

SEQ ID NO: 8921 - RNA, 20 nt, Artificial Sequence
  spacer sequence CTCN PAM
uuccaggacacugugauggu

SEQ ID NO: 8922 - RNA, 20 nt, Artificial Sequence
  spacer sequence CTCN PAM
gcaugcucucugggaaguga

SEQ ID NO: 8923 - RNA, 20 nt, Artificial Sequence
  spacer sequence CTCN PAM
cugggaagugaauugggaaa

SEQ ID NO: 8924 - RNA, 20 nt, Artificial Sequence
  spacer sequence CTCN PAM
gggaagugaauugggaaagu

SEQ ID NO: 8925 - RNA, 20 nt, Artificial Sequence
  spacer sequence CTCN PAM
acacacagacagccccaugg

SEQ ID NO: 8926 - RNA, 20 nt, Artificial Sequence
  spacer sequence CTCN PAM
agcucaggaaacccaccuag

SEQ ID NO: 8927 - RNA, 20 nt, Artificial Sequence
  spacer sequence CTCN PAM
ggaaacccaccuagguauag

SEQ ID NO: 8928 - RNA, 20 nt, Artificial Sequence
  spacer sequence CTCN PAM
auaccuagguggguuuccug

SEQ ID NO: 8929 - RNA, 20 nt, Artificial Sequence
  spacer sequence CTCN PAM
ggaaccucuggucuguucua

SEQ ID NO: 8930 - RNA, 20 nt, Artificial Sequence
  spacer sequence CTCN PAM
ggucuguucuaguccugcug

SEQ ID NO: 8931 - RNA, 20 nt, Artificial Sequence
  spacer sequence CTCN PAM
acugggaaacaucaguccaa

SEQ ID NO: 8932 - RNA, 20 nt, Artificial Sequence
  spacer sequence CTCN PAM
caggaagagaggcagaccug

SEQ ID NO: 8933 - RNA, 20 nt, Artificial Sequence
  spacer sequence CTCN PAM
uccugggagucagaagugac

SEQ ID NO: 8934 - RNA, 20 nt, Artificial Sequence
  spacer sequence CTCN PAM
cuuccugggagucagaagug

SEQ ID NO: 8935 - RNA, 20 nt, Artificial Sequence
  spacer sequence CTCN PAM
aaccacccgccccuuaacag

SEQ ID NO: 8936 - RNA, 20 nt, Artificial Sequence
  spacer sequence CTCN PAM
caugauucuaucuugagagu

SEQ ID NO: 8937 - RNA, 20 nt, Artificial Sequence
  spacer sequence CTCN PAM
ugauucuaucuugagaguuu

SEQ ID NO: 8938 - RNA, 20 nt, Artificial Sequence
  spacer sequence CTCN PAM
agauagaaucaugagagaug

SEQ ID NO: 8939 - RNA, 20 nt, Artificial Sequence
  spacer sequence CTCN PAM
caagauagaaucaugagaga

SEQ ID NO: 8940 - RNA, 20 nt, Artificial Sequence
  spacer sequence CTCN PAM
aaccaaacuaaacucucaag

SEQ ID NO: 8941 - RNA, 20 nt, Artificial Sequence
  spacer sequence CTCN PAM
aaaacuaaacuccaaccaaa

SEQ ID NO: 8942 - RNA, 20 nt, Artificial Sequence
  spacer sequence CTCN PAM
uccuccauuaaaaaaaaaaa

SEQ ID NO: 8943 - RNA, 20 nt, Artificial Sequence
  spacer sequence CTCN PAM
auuaaaaaaaaaaauuggag

SEQ ID NO: 8944 - RNA, 20 nt, Artificial Sequence
  spacer sequence CTCN PAM
aauuuuuuuuuuuaauggag

SEQ ID NO: 8945 - RNA, 20 nt, Artificial Sequence
  spacer sequence CTCN PAM
gugaacaggaaacagaaaua

SEQ ID NO: 8946 - RNA, 20 nt, Artificial Sequence
  spacer sequence CTCN PAM
uucuguccgcuccgugaaca

SEQ ID NO: 8947 - RNA, 20 nt, Artificial Sequence
  spacer sequence CTCN PAM
acugcacacccuccuucugu

SEQ ID NO: 8948 - RNA, 20 nt, Artificial Sequence
  spacer sequence CTCN PAM
uccacugcacacccuccuuc

SEQ ID NO: 8949 - RNA, 20 nt, Artificial Sequence
  spacer sequence CTCN PAM
ccacacaccuccuccacugc

SEQ ID NO: 8950 - RNA, 20 nt, Artificial Sequence
  spacer sequence CTCN PAM
uccccacacaccuccuccac

SEQ ID NO: 8951 - RNA, 20 nt, Artificial Sequence
  spacer sequence CTCN PAM
auguaucagccuccucccca

SEQ ID NO: 8952 - RNA, 20 nt, Artificial Sequence
  spacer sequence CTCN PAM
gcuccauguaucagccuccu

SEQ ID NO: 8953 - RNA, 20 nt, Artificial Sequence
  spacer sequence CTCN PAM
gcucugcuccauguaucagc

SEQ ID NO: 8954 - RNA, 20 nt, Artificial Sequence
  spacer sequence CTCN PAM
aguuccggauauucucggcu

SEQ ID NO: 8955 - RNA, 20 nt, Artificial Sequence
  spacer sequence CTCN PAM
cuuuucuccaguuccggaua

SEQ ID NO: 8956 - RNA, 20 nt, Artificial Sequence
  spacer sequence CTCN PAM
auuucucacuuuucuccagu

SEQ ID NO: 8957 - RNA, 20 nt, Artificial Sequence
  spacer sequence CTCN PAM
guaugccuggugcccaggaa

SEQ ID NO: 8958 - RNA, 20 nt, Artificial Sequence
  spacer sequence CTCN PAM
auucuucuugcuuccugugg

SEQ ID NO: 8959 - RNA, 20 nt, Artificial Sequence
  spacer sequence CTCN PAM
uucaucugcaaaucuauaaa

SEQ ID NO: 8960 - RNA, 20 nt, Artificial Sequence
  spacer sequence CTCN PAM
cguaugugaaggagcaauuc

SEQ ID NO: 8961 - RNA, 20 nt, Artificial Sequence
  spacer sequence CTCN PAM
uucacauacgcgagaagugc

SEQ ID NO: 8962 - RNA, 20 nt, Artificial Sequence
  spacer sequence CTCN PAM
auaauuaaguaucacccaac

SEQ ID NO: 8963 - RNA, 20 nt, Artificial Sequence
  spacer sequence CTCN PAM
aaaauucuauuuugaaggac

SEQ ID NO: 8964 - RNA, 20 nt, Artificial Sequence
  spacer sequence CTCN PAM
uucugaugacauuuuaaaua

SEQ ID NO: 8965 - RNA, 20 nt, Artificial Sequence
  spacer sequence CTCN PAM
gcuaucaauuauugcugcaa

SEQ ID NO: 8966 - RNA, 20 nt, Artificial Sequence
  spacer sequence CTCN PAM
gccaaucaaugaucuuccag

SEQ ID NO: 8967 - RNA, 20 nt, Artificial Sequence
  spacer sequence CTCN PAM
aaaucugauuuacugauaaa

SEQ ID NO: 8968 - RNA, 20 nt, Artificial Sequence
  spacer sequence CTCN PAM
caaaguaaucaugggcugaa

SEQ ID NO: 8969 - RNA, 20 nt, Artificial Sequence
  spacer sequence CTCN PAM
aacaucucgcaaaguaauca

SEQ ID NO: 8970 - RNA, 20 nt, Artificial Sequence
  spacer sequence CTCN PAM
aacuacccacacuauccuug

SEQ ID NO: 8971 - RNA, 20 nt, Artificial Sequence
  spacer sequence CTCN PAM
uccaacuacccacacuaucc

SEQ ID NO: 8972 - RNA, 20 nt, Artificial Sequence
  spacer sequence CTCN PAM
ccuguguugauucuccucca

SEQ ID NO: 8973 - RNA, 20 nt, Artificial Sequence
  spacer sequence CTCN PAM
cgccuguguugauucuccuc

SEQ ID NO: 8974 - RNA, 20 nt, Artificial Sequence
  spacer sequence CTCN PAM
uuaaugcuacacuuccugaa

SEQ ID NO: 8975 - RNA, 20 nt, Artificial Sequence
  spacer sequence CTCN PAM
aauauauaucccgugguaga

SEQ ID NO: 8976 - RNA, 20 nt, Artificial Sequence
  spacer sequence CTCN PAM
accacgggauauauauuaga

SEQ ID NO: 8977 - RNA, 20 nt, Artificial Sequence
  spacer sequence CTCN PAM
auucaggccuuugaaaagug

SEQ ID NO: 8978 - RNA, 20 nt, Artificial Sequence
  spacer sequence CTCN PAM
aauugggacucaaauucccc

SEQ ID NO: 8979 - RNA, 20 nt, Artificial Sequence
  spacer sequence CTCN PAM
aauuccccugcccagugcaa

SEQ ID NO: 8980 - RNA, 20 nt, Artificial Sequence
  spacer sequence CTCN PAM
agucuucugaccuuggccag

SEQ ID NO: 8981 - RNA, 20 nt, Artificial Sequence
  spacer sequence CTCN PAM
ggcaaguccccagguauagc

SEQ ID NO: 8982 - RNA, 20 nt, Artificial Sequence
  spacer sequence CTCN PAM
guccaaggcagaacccaaau

SEQ ID NO: 8983 - RNA, 20 nt, Artificial Sequence
  spacer sequence CTCN PAM
gacccuguggaaugcugcag

SEQ ID NO: 8984 - RNA, 20 nt, Artificial Sequence
  spacer sequence CTCN PAM
agagaggaugcucgucccca

SEQ ID NO: 8985 - RNA, 20 nt, Artificial Sequence
  spacer sequence CTCN PAM
ugaguuauuucugacaacug

SEQ ID NO: 8986 - RNA, 20 nt, Artificial Sequence
  spacer sequence CTCN PAM
cuugaguuauuucugacaac

SEQ ID NO: 8987 - RNA, 20 nt, Artificial Sequence
  spacer sequence CTCN PAM
uccccaggaaacaucaaaug

SEQ ID NO: 8988 - RNA, 20 nt, Artificial Sequence
  spacer sequence CTCN PAM
uucauuugauguuuccuggg

SEQ ID NO: 8989 - RNA, 20 nt, Artificial Sequence
  spacer sequence CTCN PAM
cccaaagcacuagaaggagg

SEQ ID NO: 8990 - RNA, 20 nt, Artificial Sequence
  spacer sequence CTCN PAM
uucuagugcuuugggcgagu

SEQ ID NO: 8991 - RNA, 20 nt, Artificial Sequence
  spacer sequence CTCN PAM
cuuuuuuucuuuccuucuuu

SEQ ID NO: 8992 - RNA, 20 nt, Artificial Sequence
  spacer sequence CTCN PAM
uuuauaaugguucaguuuca

SEQ ID NO: 8993 - RNA, 20 nt, Artificial Sequence
  spacer sequence CTCN PAM
uagcuucuguuaaaaaucag

SEQ ID NO: 8994 - RNA, 20 nt, Artificial Sequence
  spacer sequence CTCN PAM
uacgcgguaagugucacaau

SEQ ID NO: 8995 - RNA, 20 nt, Artificial Sequence
  spacer sequence CTCN PAM
aauuuagagcuccucuguua

SEQ ID NO: 8996 - RNA, 20 nt, Artificial Sequence
  spacer sequence CTCN PAM
aaauuagaguaaagcuguuc

SEQ ID NO: 8997 - RNA, 20 nt, Artificial Sequence
  spacer sequence CTCN PAM
ucuguuaauuagaaagcccu

SEQ ID NO: 8998 - RNA, 20 nt, Artificial Sequence
  spacer sequence CTCN PAM
guuaauuagaaagcccucag

SEQ ID NO: 8999 - RNA, 20 nt, Artificial Sequence
  spacer sequence CTCN PAM
gauuuucugcaaaugcaggu

SEQ ID NO: 9000 - RNA, 20 nt, Artificial Sequence
  spacer sequence CTCN PAM
ugcuuuugaugcuucgucug

SEQ ID NO: 9001 - RNA, 20 nt, Artificial Sequence
  spacer sequence CTCN PAM
uagaagggcaacccaacaac

SEQ ID NO: 9002 - RNA, 20 nt, Artificial Sequence
  spacer sequence CTCN PAM
gacagugucagaaaaugcag

SEQ ID NO: 9003 - RNA, 20 nt, Artificial Sequence
  spacer sequence CTCN PAM
cauucagcugaaaauagcuc

SEQ ID NO: 9004 - RNA, 20 nt, Artificial Sequence
  spacer sequence CTCN PAM
aauuccaacccucucucccc

SEQ ID NO: 9005 - RNA, 20 nt, Artificial Sequence
  spacer sequence CTCN PAM
cucccccugccuccucucuu

SEQ ID NO: 9006 - RNA, 20 nt, Artificial Sequence
  spacer sequence CTCN PAM
cccccugccuccucucuucc

SEQ ID NO: 9007 - RNA, 20 nt, Artificial Sequence
  spacer sequence CTCN PAM
cccugccuccucucuucccc

SEQ ID NO: 9008 - RNA, 20 nt, Artificial Sequence
  spacer sequence CTCN PAM
ucucuuccccuuuuccuccu

SEQ ID NO: 9009 - RNA, 20 nt, Artificial Sequence
  spacer sequence CTCN PAM
cuuccccuuuuccuccuuuc

SEQ ID NO: 9010 - RNA, 20 nt, Artificial Sequence
  spacer sequence CTCN PAM
uccccuuuuccuccuuucua

SEQ ID NO: 9011 - RNA, 20 nt, Artificial Sequence
  spacer sequence CTCN PAM
uuucuacuuccuugccucuc

SEQ ID NO: 9012 - RNA, 20 nt, Artificial Sequence
  spacer sequence CTCN PAM
cuuucuccaaccucuguuuc

SEQ ID NO: 9013 - RNA, 20 nt, Artificial Sequence
  spacer sequence CTCN PAM
uucuccaaccucuguuucca

SEQ ID NO: 9014 - RNA, 20 nt, Artificial Sequence
  spacer sequence CTCN PAM
aaccucuguuuccagcaucu

SEQ ID NO: 9015 - RNA, 20 nt, Artificial Sequence
  spacer sequence CTCN PAM
guuuccagcaucuucuuucu

SEQ ID NO: 9016 - RNA, 20 nt, Artificial Sequence
  spacer sequence CTCN PAM
ucuucucucucuuuaguccu

SEQ ID NO: 9017 - RNA, 20 nt, Artificial Sequence
  spacer sequence CTCN PAM
cucuuuaguccucaacaacu

SEQ ID NO: 9018 - RNA, 20 nt, Artificial Sequence
  spacer sequence CTCN PAM
cuuuaguccucaacaacugg

SEQ ID NO: 9019 - RNA, 20 nt, Artificial Sequence
  spacer sequence CTCN PAM
uuaguccucaacaacugggg

SEQ ID NO: 9020 - RNA, 20 nt, Artificial Sequence
  spacer sequence CTCN PAM
acaacugggguccucugcug

SEQ ID NO: 9021 - RNA, 20 nt, Artificial Sequence
  spacer sequence CTCN PAM
gcugucaaaaacagccacau

SEQ ID NO: 9022 - RNA, 20 nt, Artificial Sequence
  spacer sequence CTCN PAM
ccccucccugccuuuuaaau

SEQ ID NO: 9023 - RNA, 20 nt, Artificial Sequence
  spacer sequence CTCN PAM
ccucccugccuuuuaaauaa

SEQ ID NO: 9024 - RNA, 20 nt, Artificial Sequence
  spacer sequence CTCN PAM
cugccuuuuaaauaauauuu

SEQ ID NO: 9025 - RNA, 20 nt, Artificial Sequence
  spacer sequence CTCN PAM
ccaggugcggcugcugaccg

SEQ ID NO: 9026 - RNA, 20 nt, Artificial Sequence
  spacer sequence CTCN PAM
gccucaccaggugcggcugc

SEQ ID NO: 9027 - RNA, 20 nt, Artificial Sequence
  spacer sequence CTCN PAM
cguguuuuuucuuaagagaa

SEQ ID NO: 9028 - RNA, 20 nt, Artificial Sequence
  spacer sequence CTCN PAM
uaagaaaaaacacgugagcc

SEQ ID NO: 9029 - RNA, 20 nt, Artificial Sequence
  spacer sequence CTCN PAM
aaauucccccuucucuuaag

SEQ ID NO: 9030 - RNA, 20 nt, Artificial Sequence
  spacer sequence CTCN PAM
uucuuuuuuugccccccucc

SEQ ID NO: 9031 - RNA, 20 nt, Artificial Sequence
  spacer sequence CTCN PAM
uucuccuucuuuuuuugccc

SEQ ID NO: 9032 - RNA, 20 nt, Artificial Sequence
  spacer sequence CTCN PAM
cuuucuccuucuuuuuuugc

SEQ ID NO: 9033 - RNA, 20 nt, Artificial Sequence
  spacer sequence CTCN PAM
agaaaaaaugcacaugggcu

SEQ ID NO: 9034 - RNA, 20 nt, Artificial Sequence
  spacer sequence CTCN PAM
agugguuaaccuuuccucuc

SEQ ID NO: 9035 - RNA, 20 nt, Artificial Sequence
  spacer sequence CTCN PAM
gcccaugugcauuuuuucuc

SEQ ID NO: 9036 - RNA, 20 nt, Artificial Sequence
  spacer sequence CTCN PAM
aauuaugggaauucucacuu

SEQ ID NO: 9037 - RNA, 20 nt, Artificial Sequence
  spacer sequence CTCN PAM
cuuaggaacaccucauuaug

SEQ ID NO: 9038 - RNA, 20 nt, Artificial Sequence
  spacer sequence CTCN PAM
uuauggaacauaugugcugg

SEQ ID NO: 9039 - RNA, 20 nt, Artificial Sequence
  spacer sequence CTCN PAM
ccagacccccagcacauaug

SEQ ID NO: 9040 - RNA, 20 nt, Artificial Sequence
  spacer sequence CTCN PAM
caucuccccagacccccagc

SEQ ID NO: 9041 - RNA, 20 nt, Artificial Sequence
  spacer sequence CTCN PAM
aaauuuuaucaaguucaagc

SEQ ID NO: 9042 - RNA, 20 nt, Artificial Sequence
  spacer sequence CTCN PAM
guggcacuuguuuaggacuu

SEQ ID NO: 9043 - RNA, 20 nt, Artificial Sequence
  spacer sequence CTCN PAM
ccaccaccaccaaggcauag

SEQ ID NO: 9044 - RNA, 20 nt, Artificial Sequence
  spacer sequence CTCN PAM
ggaugacugcauuuauuugc

SEQ ID NO: 9045 - RNA, 20 nt, Artificial Sequence
  spacer sequence CTCN PAM
aaggccagacuuccauuaca

SEQ ID NO: 9046 - RNA, 20 nt, Artificial Sequence
  spacer sequence CTCN PAM
ucccauugcauuucauaagc

SEQ ID NO: 9047 - RNA, 20 nt, Artificial Sequence
  spacer sequence CTCN PAM
ccccaccucaucccauugca

SEQ ID NO: 9048 - RNA, 20 nt, Artificial Sequence
  spacer sequence CTCN PAM
caccccaccucaucccauug

SEQ ID NO: 9049 - RNA, 20 nt, Artificial Sequence
  spacer sequence CTCN PAM
acccuaccuggucacugugc

SEQ ID NO: 9050 - RNA, 20 nt, Artificial Sequence
  spacer sequence CTCN PAM
agcaagaaugccaaggauag

SEQ ID NO: 9051 - RNA, 20 nt, Artificial Sequence
  spacer sequence CTCN PAM
acggccauguugcugucauc

SEQ ID NO: 9052 - RNA, 20 nt, Artificial Sequence
  spacer sequence CTCN PAM
augccuuuaagcuaacugca

SEQ ID NO: 9053 - RNA, 20 nt, Artificial Sequence
  spacer sequence CTCN PAM
caccguucuguuuuugcagu

SEQ ID NO: 9054 - RNA, 20 nt, Artificial Sequence
  spacer sequence CTCN PAM
uuuauauucuaccuauaagg

SEQ ID NO: 9055 - RNA, 20 nt, Artificial Sequence
  spacer sequence CTCN PAM
uuuaaaaagaaaaacccucc

SEQ ID NO: 9056 - RNA, 20 nt, Artificial Sequence
  spacer sequence CTCN PAM
auccaacgucacgaagcugc

SEQ ID NO: 9057 - RNA, 20 nt, Artificial Sequence
  spacer sequence CTCN PAM
uaucuagguugcugggacag

SEQ ID NO: 9058 - RNA, 20 nt, Artificial Sequence
  spacer sequence CTCN PAM
ccccagaauagcaagcguug

SEQ ID NO: 9059 - RNA, 20 nt, Artificial Sequence
  spacer sequence CTCN PAM
ggacugucaaacacagucua

SEQ ID NO: 9060 - RNA, 20 nt, Artificial Sequence
  spacer sequence CTCN PAM
gcccguaguucacaaggggc

SEQ ID NO: 9061 - RNA, 20 nt, Artificial Sequence
  spacer sequence CTCN PAM
acccagagaaggcaaguguu

SEQ ID NO: 9062 - RNA, 20 nt, Artificial Sequence
  spacer sequence CTCN PAM
ggguugagcucagcccguag

SEQ ID NO: 9063 - RNA, 20 nt, Artificial Sequence
  spacer sequence CTCN PAM
uggaaauaauacauugcugc

SEQ ID NO: 9064 - RNA, 20 nt, Artificial Sequence
  spacer sequence CTCN PAM
uuuucaacaagaaggcugag

SEQ ID NO: 9065 - RNA, 20 nt, Artificial Sequence
  spacer sequence CTCN PAM
gccuucuuguugaaaaugag

SEQ ID NO: 9066 - RNA, 20 nt, Artificial Sequence
  spacer sequence CTCN PAM
uuccucagccuucuuguuga

SEQ ID NO: 9067 - RNA, 20 nt, Artificial Sequence
  spacer sequence CTCN PAM
aaccuucugcucugguucuc

SEQ ID NO: 9068 - RNA, 20 nt, Artificial Sequence
  spacer sequence CTCN PAM
gguucuccucucccccacca

SEQ ID NO: 9069 - RNA, 20 nt, Artificial Sequence
  spacer sequence CTCN PAM
ucucccccaccacacguaca

SEQ ID NO: 9070 - RNA, 20 nt, Artificial Sequence
  spacer sequence CTCN PAM
cccccaccacacguacaaaa

SEQ ID NO: 9071 - RNA, 20 nt, Artificial Sequence
  spacer sequence CTCN PAM
cccaccacacguacaaaaaa

SEQ ID NO: 9072 - RNA, 20 nt, Artificial Sequence
  spacer sequence CTCN PAM
aagccccuuguucuaucagc

SEQ ID NO: 9073 - RNA, 20 nt, Artificial Sequence
  spacer sequence CTCN PAM
ugaccugcugauagaacaag

SEQ ID NO: 9074 - RNA, 20 nt, Artificial Sequence
  spacer sequence CTCN PAM
acucuugaccugcugauaga

SEQ ID NO: 9075 - RNA, 20 nt, Artificial Sequence
  spacer sequence CTCN PAM
auucugaaauggauuugacu

SEQ ID NO: 9076 - RNA, 20 nt, Artificial Sequence
  spacer sequence CTCN PAM
cuaggaugucuugccuuuca

SEQ ID NO: 9077 - RNA, 20 nt, Artificial Sequence
  spacer sequence CTCN PAM
uuuccagagaaugacuugug

SEQ ID NO: 9078 - RNA, 20 nt, Artificial Sequence
  spacer sequence CTCN PAM
ggaaaggagccaugguccac

SEQ ID NO: 9079 - RNA, 20 nt, Artificial Sequence
  spacer sequence CTCN PAM
cuccuacacaucaaagugag

SEQ ID NO: 9080 - RNA, 20 nt, Artificial Sequence
  spacer sequence CTCN PAM
ccuacacaucaaagugagac

SEQ ID NO: 9081 - RNA, 20 nt, Artificial Sequence
  spacer sequence CTCN PAM
uacacaucaaagugagacac

SEQ ID NO: 9082 - RNA, 20 nt, Artificial Sequence
  spacer sequence CTCN PAM
cuuugauguguaggagagag

SEQ ID NO: 9083 - RNA, 20 nt, Artificial Sequence
  spacer sequence CTCN PAM
acuggcccaccuugccccac

SEQ ID NO: 9084 - RNA, 20 nt, Artificial Sequence
  spacer sequence CTCN PAM
aauuuggcaacuuugccucc

SEQ ID NO: 9085 - RNA, 20 nt, Artificial Sequence
  spacer sequence CTCN PAM
uucucacacaaugagaaaga

SEQ ID NO: 9086 - RNA, 20 nt, Artificial Sequence
  spacer sequence CTCN PAM
cacaaugagaaagaacggau

SEQ ID NO: 9087 - RNA, 20 nt, Artificial Sequence
  spacer sequence CTCN PAM
uugugugagaaggaggcaaa

SEQ ID NO: 9088 - RNA, 20 nt, Artificial Sequence
  spacer sequence CTCN PAM
uagaauuuggcuauccguuc

SEQ ID NO: 9089 - RNA, 20 nt, Artificial Sequence
  spacer sequence CTCN PAM
cuucaguacuuaacuacaca

SEQ ID NO: 9090 - RNA, 20 nt, Artificial Sequence
  spacer sequence CTCN PAM
aaaugugugugugugugccu

SEQ ID NO: 9091 - RNA, 20 nt, Artificial Sequence
  spacer sequence CTCN PAM
caaaaugugugugugugugc

SEQ ID NO: 9092 - RNA, 20 nt, Artificial Sequence
  spacer sequence CTCN PAM
uguccaucacagggcugugg

SEQ ID NO: 9093 - RNA, 20 nt, Artificial Sequence
  spacer sequence CTCN PAM
ggcuuugagaugaauaaugc

SEQ ID NO: 9094 - RNA, 20 nt, Artificial Sequence
  spacer sequence CTCN PAM
aagccagaggaucucauguc

SEQ ID NO: 9095 - RNA, 20 nt, Artificial Sequence
  spacer sequence CTCN PAM
uuucugugcauuauucaucu

SEQ ID NO: 9096 - RNA, 20 nt, Artificial Sequence
  spacer sequence CTCN PAM
acaucaggauugggccugaa

SEQ ID NO: 9097 - RNA, 20 nt, Artificial Sequence
  spacer sequence CTCN PAM
caggaaggccuugauagcau

SEQ ID NO: 9098 - RNA, 20 nt, Artificial Sequence
  spacer sequence CTCN PAM
ggaaggccuugauagcauua

SEQ ID NO: 9099 - RNA, 20 nt, Artificial Sequence
  spacer sequence CTCN PAM
gucaaccaucuaaugcuauc

SEQ ID NO: 9100 - RNA, 20 nt, Artificial Sequence
  spacer sequence CTCN PAM
gucacacuguaauaccucug

SEQ ID NO: 9101 - RNA, 20 nt, Artificial Sequence
  spacer sequence CTCN PAM
gacucugucacacuguaaua

SEQ ID NO: 9102 - RNA, 20 nt, Artificial Sequence
  spacer sequence CTCN PAM
gacugugggcucagacucug

SEQ ID NO: 9103 - RNA, 20 nt, Artificial Sequence
  spacer sequence CTCN PAM
cugggaagggauguggucau

SEQ ID NO: 9104 - RNA, 20 nt, Artificial Sequence
  spacer sequence CTCN PAM
acacccugggaagacuacug

SEQ ID NO: 9105 - RNA, 20 nt, Artificial Sequence
  spacer sequence CTCN PAM
gucucucaaaccuggccaug

SEQ ID NO: 9106 - RNA, 20 nt, Artificial Sequence
  spacer sequence CTCN PAM
caaaccuggccauggcucag

SEQ ID NO: 9107 - RNA, 20 nt, Artificial Sequence
  spacer sequence CTCN PAM
aaccuggccauggcucagcc

SEQ ID NO: 9108 - RNA, 20 nt, Artificial Sequence
  spacer sequence CTCN PAM
gcccacgcccuuucauguau

SEQ ID NO: 9109 - RNA, 20 nt, Artificial Sequence
  spacer sequence CTCN PAM
ggagauucaaagcgaaggca

SEQ ID NO: 9110 - RNA, 20 nt, Artificial Sequence
  spacer sequence CTCN PAM
cgagucuuuuuuauucugau

SEQ ID NO: 9111 - RNA, 20 nt, Artificial Sequence
  spacer sequence CTCN PAM
uuuaagucuaacguugcuau

SEQ ID NO: 9112 - RNA, 20 nt, Artificial Sequence
  spacer sequence CTCN PAM
uaaaugccugaauagcaacg

SEQ ID NO: 9113 - RNA, 20 nt, Artificial Sequence
  spacer sequence CTCN PAM
cugugucuagcgcuccuaaa

SEQ ID NO: 9114 - RNA, 20 nt, Artificial Sequence
  spacer sequence CTCN PAM
aaccugugauuugccacaag

SEQ ID NO: 9115 - RNA, 20 nt, Artificial Sequence
  spacer sequence CTCN PAM
uucauugauuaaaggcaaaa

SEQ ID NO: 9116 - RNA, 20 nt, Artificial Sequence
  spacer sequence CTCN PAM
cuaaccuauauuuugcaagu

SEQ ID NO: 9117 - RNA, 20 nt, Artificial Sequence
  spacer sequence CTCN PAM
ucaugcuaaugucagcagag

SEQ ID NO: 9118 - RNA, 20 nt, Artificial Sequence
  spacer sequence CTCN PAM
gcugacauuagcaugaagag

SEQ ID NO: 9119 - RNA, 20 nt, Artificial Sequence
  spacer sequence CTCN PAM
agucaggcuuucaggugucu

SEQ ID NO: 9120 - RNA, 20 nt, Artificial Sequence
  spacer sequence CTCN PAM
guguguggcauuguggggug

SEQ ID NO: 9121 - RNA, 20 nt, Artificial Sequence
  spacer sequence CTCN PAM
cgguguguggcauugugggg

SEQ ID NO: 9122 - RNA, 20 nt, Artificial Sequence
  spacer sequence CTCN PAM
cccugcugaauuuucuuuuu

SEQ ID NO: 9123 - RNA, 20 nt, Artificial Sequence
  spacer sequence CTCN PAM
aauguagauuaucuucccuu

SEQ ID NO: 9124 - RNA, 20 nt, Artificial Sequence
  spacer sequence CTCN PAM
agaaggaucccaagggaaga

SEQ ID NO: 9125 - RNA, 20 nt, Artificial Sequence
  spacer sequence CTCN PAM
ggcaaccacaccagccuuua

SEQ ID NO: 9126 - RNA, 20 nt, Artificial Sequence
  spacer sequence CTCN PAM
uuaaaggcuggugugguugc

SEQ ID NO: 9127 - RNA, 20 nt, Artificial Sequence
  spacer sequence CTCN PAM
cuuauuuaugagcagcagaa

SEQ ID NO: 9128 - RNA, 20 nt, Artificial Sequence
  spacer sequence CTCN PAM
uaaauaagggagugggaaau

SEQ ID NO: 9129 - RNA, 20 nt, Artificial Sequence
  spacer sequence CTCN PAM
ugcuuuuuacauucugcugc

SEQ ID NO: 9130 - RNA, 20 nt, Artificial Sequence
  spacer sequence CTCN PAM
ucaaccauucuaucuaagga

SEQ ID NO: 9131 - RNA, 20 nt, Artificial Sequence
  spacer sequence CTCN PAM
ucauauauuuagaccaaauu

SEQ ID NO: 9132 - RNA, 20 nt, Artificial Sequence
  spacer sequence CTCN PAM
aacuccagcucccugauaac

SEQ ID NO: 9133 - RNA, 20 nt, Artificial Sequence
  spacer sequence CTCN PAM
agcucccugauaacaucugc

SEQ ID NO: 9134 - RNA, 20 nt, Artificial Sequence
  spacer sequence CTCN PAM
cugauaacaucugccacuaa

SEQ ID NO: 9135 - RNA, 20 nt, Artificial Sequence
  spacer sequence CTCN PAM
agaauggagcccucaucuaa

SEQ ID NO: 9136 - RNA, 20 nt, Artificial Sequence
  spacer sequence CTCN PAM
auucuagaguugggaaaacc

SEQ ID NO: 9137 - RNA, 20 nt, Artificial Sequence
  spacer sequence CTCN PAM
ucuaaaccuggggaagcaau

SEQ ID NO: 9138 - RNA, 20 nt, Artificial Sequence
  spacer sequence CTCN PAM
cugugcuauuacuuuugacc

SEQ ID NO: 9139 - RNA, 20 nt, Artificial Sequence
  spacer sequence CTCN PAM
gugcuauuacuuuugaccug

SEQ ID NO: 9140 - RNA, 20 nt, Artificial Sequence
  spacer sequence CTCN PAM
uuauguagaaacauuuaaau

SEQ ID NO: 9141 - RNA, 20 nt, Artificial Sequence
  spacer sequence CTCN PAM
uccaggauaauuuaaauguu

SEQ ID NO: 9142 - RNA, 20 nt, Artificial Sequence
  spacer sequence CTCN PAM
cgggcuguucaaagaguguu

SEQ ID NO: 9143 - RNA, 20 nt, Artificial Sequence
  spacer sequence CTCN PAM
uugaacagcccgugagacaa

SEQ ID NO: 9144 - RNA, 20 nt, Artificial Sequence
  spacer sequence CTCN PAM
uguuccuagaaggaaaggaa

SEQ ID NO: 9145 - RNA, 20 nt, Artificial Sequence
  spacer sequence CTCN PAM
ucauguuccuagaaggaaag

SEQ ID NO: 9146 - RNA, 20 nt, Artificial Sequence
  spacer sequence CTCN PAM
gguaucuuuuacaggcuuug

SEQ ID NO: 9147 - RNA, 20 nt, Artificial Sequence
  spacer sequence CTCN PAM
aagaauucagacugugagag

SEQ ID NO: 9148 - RNA, 20 nt, Artificial Sequence
  spacer sequence CTCN PAM
cagucugaauucuuggagac

SEQ ID NO: 9149 - RNA, 20 nt, Artificial Sequence
  spacer sequence CTCN PAM
cacagucugaauucuuggag

SEQ ID NO: 9150 - RNA, 20 nt, Artificial Sequence
  spacer sequence CTCN PAM
uuggugcagugggaauugcc

SEQ ID NO: 9151 - RNA, 20 nt, Artificial Sequence
  spacer sequence CTCN PAM
cugguuccucuccucugucc

SEQ ID NO: 9152 - RNA, 20 nt, Artificial Sequence
  spacer sequence CTCN PAM
ccucuguccuuggcaaucca

SEQ ID NO: 9153 - RNA, 20 nt, Artificial Sequence
  spacer sequence CTCN PAM
ucuguccuuggcaauccagu

SEQ ID NO: 9154 - RNA, 20 nt, Artificial Sequence
  spacer sequence CTCN PAM
guccuuggcaauccaguuac

SEQ ID NO: 9155 - RNA, 20 nt, Artificial Sequence
  spacer sequence CTCN PAM
aguacugucaucuuuaaaug

SEQ ID NO: 9156 - RNA, 20 nt, Artificial Sequence
  spacer sequence CTCN PAM
gugcuacuuauacaauucac

SEQ ID NO: 9157 - RNA, 20 nt, Artificial Sequence
  spacer sequence CTCN PAM
gaaacaaaaaacaaacaaac

SEQ ID NO: 9158 - RNA, 20 nt, Artificial Sequence
  spacer sequence CTCN PAM
accucagaaacaaaaaacaa

SEQ ID NO: 9159 - RNA, 20 nt, Artificial Sequence
  spacer sequence CTCN PAM
uguugcccgggcuggagugc

SEQ ID NO: 9160 - RNA, 20 nt, Artificial Sequence
  spacer sequence CTCN PAM
agcccgggcaacaagagcga

SEQ ID NO: 9161 - RNA, 20 nt, Artificial Sequence
  spacer sequence CTCN PAM
gcucaccgcaaucuccgccu

SEQ ID NO: 9162 - RNA, 20 nt, Artificial Sequence
  spacer sequence CTCN PAM
ccgcaaucuccgccucccgg

SEQ ID NO: 9163 - RNA, 20 nt, Artificial Sequence
  spacer sequence CTCN PAM
gccucccggguucaagcgau

SEQ ID NO: 9164 - RNA, 20 nt, Artificial Sequence
  spacer sequence CTCN PAM
cggguucaagcgauucuccu

SEQ ID NO: 9165 - RNA, 20 nt, Artificial Sequence
  spacer sequence CTCN PAM
ugccucagccucccaaguag

SEQ ID NO: 9166 - RNA, 20 nt, Artificial Sequence
  spacer sequence CTCN PAM
gccucccaaguagcugggau

SEQ ID NO: 9167 - RNA, 20 nt, Artificial Sequence
  spacer sequence CTCN PAM
caaguagcugggauuauagg

SEQ ID NO: 9168 - RNA, 20 nt, Artificial Sequence
  spacer sequence CTCN PAM
accaaaaauacagaaauuag

SEQ ID NO: 9169 - RNA, 20 nt, Artificial Sequence
  spacer sequence CTCN PAM
auguuggucaggcuggucuc

SEQ ID NO: 9170 - RNA, 20 nt, Artificial Sequence
  spacer sequence CTCN PAM
aacucccgaccuuaggugau

SEQ ID NO: 9171 - RNA, 20 nt, Artificial Sequence
  spacer sequence CTCN PAM
cgaccuuaggugauccaccc

SEQ ID NO: 9172 - RNA, 20 nt, Artificial Sequence
  spacer sequence CTCN PAM
gccucccaaagugcugggau

SEQ ID NO: 9173 - RNA, 20 nt, Artificial Sequence
  spacer sequence CTCN PAM
caaagugcugggauuauagg

SEQ ID NO: 9174 - RNA, 20 nt, Artificial Sequence
  spacer sequence CTCN PAM
aaagcaacaguuuaauuggg

SEQ ID NO: 9175 - RNA, 20 nt, Artificial Sequence
  spacer sequence CTCN PAM
cagugugaauuuaguuaggu

SEQ ID NO: 9176 - RNA, 20 nt, Artificial Sequence
  spacer sequence CTCN PAM
cacagugugaauuuaguuag

SEQ ID NO: 9177 - RNA, 20 nt, Artificial Sequence
  spacer sequence CTCN PAM
uuccauuucuuuuaugucau

SEQ ID NO: 9178 - RNA, 20 nt, Artificial Sequence
  spacer sequence CTCN PAM
auuguaugaauuuggauaug

SEQ ID NO: 9179 - RNA, 20 nt, Artificial Sequence
  spacer sequence CTCN PAM
gcuuccuaacuaauuucugc

SEQ ID NO: 9180 - RNA, 20 nt, Artificial Sequence
  spacer sequence CTCN PAM
uagaagcccuuauuucuugg

SEQ ID NO: 9181 - RNA, 20 nt, Artificial Sequence
  spacer sequence CTCN PAM
ucauccaggaugacaaacag

SEQ ID NO: 9182 - RNA, 20 nt, Artificial Sequence
  spacer sequence CTCN PAM
aaagaaaauucugaguagaa

SEQ ID NO: 9183 - RNA, 20 nt, Artificial Sequence
  spacer sequence CTCN PAM
gaauuuucuuuugagauagg

SEQ ID NO: 9184 - RNA, 20 nt, Artificial Sequence
  spacer sequence CTCN PAM
ucuacucagaauuuucuuuu

SEQ ID NO: 9185 - RNA, 20 nt, Artificial Sequence
  spacer sequence CTCN PAM
guuagaauuucaaaugucag

SEQ ID NO: 9186 - RNA, 20 nt, Artificial Sequence
  spacer sequence CTCN PAM
aggacacucugggucacuag

SEQ ID NO: 9187 - RNA, 20 nt, Artificial Sequence
  spacer sequence CTCN PAM
gggucacuagcaucucugcu

SEQ ID NO: 9188 - RNA, 20 nt, Artificial Sequence
  spacer sequence CTCN PAM
gcuuuccuuguucccuggcu

SEQ ID NO: 9189 - RNA, 20 nt, Artificial Sequence
  spacer sequence CTCN PAM
ucuccugagcccccgggccg

SEQ ID NO: 9190 - RNA, 20 nt, Artificial Sequence
  spacer sequence CTCN PAM
ugagcccccgggccguucuc

SEQ ID NO: 9191 - RNA, 20 nt, Artificial Sequence
  spacer sequence CTCN PAM
ggagaugagccagggaacaa

SEQ ID NO: 9192 - RNA, 20 nt, Artificial Sequence
  spacer sequence CTCN PAM
uuuccaacugucuauuuacu

SEQ ID NO: 9193 - RNA, 20 nt, Artificial Sequence
  spacer sequence CTCN PAM
caccccauccaaaaauguuu

SEQ ID NO: 9194 - RNA, 20 nt, Artificial Sequence
  spacer sequence CTCN PAM
ccccauccaaaaauguuuac

SEQ ID NO: 9195 - RNA, 20 nt, Artificial Sequence
  spacer sequence CTCN PAM
aguucaggcuagcuuaauaa

SEQ ID NO: 9196 - RNA, 20 nt, Artificial Sequence
  spacer sequence CTCN PAM
ugcuuuggggguuauuaagc

SEQ ID NO: 9197 - RNA, 20 nt, Artificial Sequence
  spacer sequence CTCN PAM
uuaauaguguccuccugcuu

SEQ ID NO: 9198 - RNA, 20 nt, Artificial Sequence
  spacer sequence CTCN PAM
cuuuaauaguguccuccugc

SEQ ID NO: 9199 - RNA, 20 nt, Artificial Sequence
  spacer sequence CTCN PAM
gggcauggaugguguuucau

SEQ ID NO: 9200 - RNA, 20 nt, Artificial Sequence
  spacer sequence CTCN PAM
aguccauccauguugggaua

SEQ ID NO: 9201 - RNA, 20 nt, Artificial Sequence
  spacer sequence CTCN PAM
uccaguccauccauguuggg

SEQ ID NO: 9202 - RNA, 20 nt, Artificial Sequence
  spacer sequence CTCN PAM
ccuccaguccauccauguug

SEQ ID NO: 9203 - RNA, 20 nt, Artificial Sequence
  spacer sequence CTCN PAM
ccaucugcaaugggggcaaa

SEQ ID NO: 9204 - RNA, 20 nt, Artificial Sequence
  spacer sequence CTCN PAM
auauuaguaacagacccaug

SEQ ID NO: 9205 - RNA, 20 nt, Artificial Sequence
  spacer sequence CTCN PAM
uacaauaucugguuccauuc

SEQ ID NO: 9206 - RNA, 20 nt, Artificial Sequence
  spacer sequence CTCN PAM
auccucuagaacauauaagu

SEQ ID NO: 9207 - RNA, 20 nt, Artificial Sequence
  spacer sequence CTCN PAM
agaacauauaagucaacagg

SEQ ID NO: 9208 - RNA, 20 nt, Artificial Sequence
  spacer sequence CTCN PAM
ccuguugacuuauauguucu

SEQ ID NO: 9209 - RNA, 20 nt, Artificial Sequence
  spacer sequence CTCN PAM
gcaugaaggguauaacagag

SEQ ID NO: 9210 - RNA, 20 nt, Artificial Sequence
  spacer sequence CTCN PAM
guuauacccuucaugccgag

SEQ ID NO: 9211 - RNA, 20 nt, Artificial Sequence
  spacer sequence CTCN PAM
uccacccccuuugcagaguc

SEQ ID NO: 9212 - RNA, 20 nt, Artificial Sequence
  spacer sequence CTCN PAM
gcaaaggggguggaugaguu

SEQ ID NO: 9213 - RNA, 20 nt, Artificial Sequence
  spacer sequence CTCN PAM
cuuaacauccccuagcaugc

SEQ ID NO: 9214 - RNA, 20 nt, Artificial Sequence
  spacer sequence CTCN PAM
gaucagaagacaaaggcagc

SEQ ID NO: 9215 - RNA, 20 nt, Artificial Sequence
  spacer sequence CTCN PAM
gugaucuauaggauaugguc

SEQ ID NO: 9216 - RNA, 20 nt, Artificial Sequence
  spacer sequence CTCN PAM
uuaagccaucauuccagagc

SEQ ID NO: 9217 - RNA, 20 nt, Artificial Sequence
  spacer sequence CTCN PAM
ggaaugauggcuuaaggagu

SEQ ID NO: 9218 - RNA, 20 nt, Artificial Sequence
  spacer sequence CTCN PAM
acaauccaacuccaauuuuc

SEQ ID NO: 9219 - RNA, 20 nt, Artificial Sequence
  spacer sequence CTCN PAM
aauuuucuauuccagucuua

SEQ ID NO: 9220 - RNA, 20 nt, Artificial Sequence
  spacer sequence CTCN PAM
uuuccuuccuggcuuuucuu

SEQ ID NO: 9221 - RNA, 20 nt, Artificial Sequence
  spacer sequence CTCN PAM
uaccuccuggaauccugcuc

SEQ ID NO: 9222 - RNA, 20 nt, Artificial Sequence
  spacer sequence CTCN PAM
uggaauccugcucauacuuc

SEQ ID NO: 9223 - RNA, 20 nt, Artificial Sequence
  spacer sequence CTCN PAM
uacuucaaggccucaaugaa

SEQ ID NO: 9224 - RNA, 20 nt, Artificial Sequence
  spacer sequence CTCN PAM
augaaggucuaccuagucac

SEQ ID NO: 9225 - RNA, 20 nt, Artificial Sequence
  spacer sequence CTCN PAM
uccuucuccaaccucauaga

SEQ ID NO: 9226 - RNA, 20 nt, Artificial Sequence
  spacer sequence CTCN PAM
aaccucauagaacacucauc

SEQ ID NO: 9227 - RNA, 20 nt, Artificial Sequence
  spacer sequence CTCN PAM
uagaacacucaucccaugca

SEQ ID NO: 9228 - RNA, 20 nt, Artificial Sequence
  spacer sequence CTCN PAM
ucccaugcaccacucccuga

SEQ ID NO: 9229 - RNA, 20 nt, Artificial Sequence
  spacer sequence CTCN PAM
cugacucauaucuaggccuu

SEQ ID NO: 9230 - RNA, 20 nt, Artificial Sequence
  spacer sequence CTCN PAM
uaucuaggccuuacauugcu

SEQ ID NO: 9231 - RNA, 20 nt, Artificial Sequence
  spacer sequence CTCN PAM
augccucuaauuaauuucau

SEQ ID NO: 9232 - RNA, 20 nt, Artificial Sequence
  spacer sequence CTCN PAM
aauuaauuucauguguuccc

SEQ ID NO: 9233 - RNA, 20 nt, Artificial Sequence
  spacer sequence CTCN PAM
uugggaacacaugaaauuaa

SEQ ID NO: 9234 - RNA, 20 nt, Artificial Sequence
  spacer sequence CTCN PAM
uucuccuacuugcuucuauu

SEQ ID NO: 9235 - RNA, 20 nt, Artificial Sequence
  spacer sequence CTCN PAM
uacuugcuucuauuauauuu

SEQ ID NO: 9236 - RNA, 20 nt, Artificial Sequence
  spacer sequence CTCN PAM
uuaaacagccaccccacacc

SEQ ID NO: 9237 - RNA, 20 nt, Artificial Sequence
  spacer sequence CTCN PAM
agggugugggguggcuguuu

SEQ ID NO: 9238 - RNA, 20 nt, Artificial Sequence
  spacer sequence CTCN PAM
ucuccagggugugggguggc

SEQ ID NO: 9239 - RNA, 20 nt, Artificial Sequence
  spacer sequence CTCN PAM
gucagacuuuaccaaccugg

SEQ ID NO: 9240 - RNA, 20 nt, Artificial Sequence
  spacer sequence CTCN PAM
auagcugacuuucaaccaug

SEQ ID NO: 9241 - RNA, 20 nt, Artificial Sequence
  spacer sequence CTCN PAM
gccaccugcgcauccucaau

SEQ ID NO: 9242 - RNA, 20 nt, Artificial Sequence
  spacer sequence CTCN PAM
augcaaaaagcuaaguucua

SEQ ID NO: 9243 - RNA, 20 nt, Artificial Sequence
  spacer sequence CTCN PAM
uuuugaugccagagggcagc

SEQ ID NO: 9244 - RNA, 20 nt, Artificial Sequence
  spacer sequence CTCN PAM
ggcaucaaaaugagguccuu

SEQ ID NO: 9245 - RNA, 20 nt, Artificial Sequence
  spacer sequence CTCN PAM
cggccaggcgcuguggcuca

SEQ ID NO: 9246 - RNA, 20 nt, Artificial Sequence
  spacer sequence CTCN PAM
caccuguaaucccagcacuu

SEQ ID NO: 9247 - RNA, 20 nt, Artificial Sequence
  spacer sequence CTCN PAM
caaagugcugggauuacagg

SEQ ID NO: 9248 - RNA, 20 nt, Artificial Sequence
  spacer sequence CTCN PAM
ugccccggccucccaaagug

SEQ ID NO: 9249 - RNA, 20 nt, Artificial Sequence
  spacer sequence CTCN PAM
ggugauccuccugccccggc

SEQ ID NO: 9250 - RNA, 20 nt, Artificial Sequence
  spacer sequence CTCN PAM
ugaccucaggugauccuccu

SEQ ID NO: 9251 - RNA, 20 nt, Artificial Sequence
  spacer sequence CTCN PAM
acuaaaaauacaaaauuagc

SEQ ID NO: 9252 - RNA, 20 nt, Artificial Sequence
  spacer sequence CTCN PAM
gcuacucgggaggcugaggc

SEQ ID NO: 9253 - RNA, 20 nt, Artificial Sequence
  spacer sequence CTCN PAM
ggaggcugaggcaggagauc

SEQ ID NO: 9254 - RNA, 20 nt, Artificial Sequence
  spacer sequence CTCN PAM
cgaguagcugagauuacagg

SEQ ID NO: 9255 - RNA, 20 nt, Artificial Sequence
  spacer sequence CTCN PAM
gccucccgaguagcugagau

SEQ ID NO: 9256 - RNA, 20 nt, Artificial Sequence
  spacer sequence CTCN PAM
ugccucagccucccgaguag

SEQ ID NO: 9257 - RNA, 20 nt, Artificial Sequence
  spacer sequence CTCN PAM
cagguucaagcgaucuccug

SEQ ID NO: 9258 - RNA, 20 nt, Artificial Sequence
  spacer sequence CTCN PAM
cugcaucuucugccucccag

SEQ ID NO: 9259 - RNA, 20 nt, Artificial Sequence
  spacer sequence CTCN PAM
gcucacugcaucuucugccu

SEQ ID NO: 9260 - RNA, 20 nt, Artificial Sequence
  spacer sequence CTCN PAM
uguugcccgggcuggaaugc

SEQ ID NO: 9261 - RNA, 20 nt, Artificial Sequence
  spacer sequence CTCN PAM
gucucaccaaaaaaagaaaa

SEQ ID NO: 9262 - RNA, 20 nt, Artificial Sequence
  spacer sequence CTCN PAM
ccaaaaaaagaaaaaagaaa

SEQ ID NO: 9263 - RNA, 20 nt, Artificial Sequence
  spacer sequence CTCN PAM
ccucaguucuccaggcuggg

SEQ ID NO: 9264 - RNA, 20 nt, Artificial Sequence
  spacer sequence CTCN PAM
guucuccaggcugggcugac

SEQ ID NO: 9265 - RNA, 20 nt, Artificial Sequence
  spacer sequence CTCN PAM
aggcugggcugacugcccac

SEQ ID NO: 9266 - RNA, 20 nt, Artificial Sequence
  spacer sequence CTCN PAM
guguugagagccaaguggcc

SEQ ID NO: 9267 - RNA, 20 nt, Artificial Sequence
  spacer sequence CTCN PAM
acacggagugaugaugccua

SEQ ID NO: 9268 - RNA, 20 nt, Artificial Sequence
  spacer sequence CTCN PAM
caacacggagugaugaugcc

SEQ ID NO: 9269 - RNA, 20 nt, Artificial Sequence
  spacer sequence CTCN PAM
auuuccaagguauuuagcgu

SEQ ID NO: 9270 - RNA, 20 nt, Artificial Sequence
  spacer sequence CTCN PAM
caauuuccaagguauuuagc

SEQ ID NO: 9271 - RNA, 20 nt, Artificial Sequence
  spacer sequence CTCN PAM
agauucccucucaauuucca

SEQ ID NO: 9272 - RNA, 20 nt, Artificial Sequence
  spacer sequence CTCN PAM
ccagauucccucucaauuuc

SEQ ID NO: 9273 - RNA, 20 nt, Artificial Sequence
  spacer sequence CTCN PAM
cuuuacaggaauucagcaca

SEQ ID NO: 9274 - RNA, 20 nt, Artificial Sequence
  spacer sequence CTCN PAM
ugugcugaauuccuguaaag

SEQ ID NO: 9275 - RNA, 20 nt, Artificial Sequence
  spacer sequence CTCN PAM
gcuuaaggagaagacauacu

SEQ ID NO: 9276 - RNA, 20 nt, Artificial Sequence
  spacer sequence CTCN PAM
uuaagcggagaugcuaacaa

SEQ ID NO: 9277 - RNA, 20 nt, Artificial Sequence
  spacer sequence CTCN PAM
gucuuauucaucaguauguc

SEQ ID NO: 9278 - RNA, 20 nt, Artificial Sequence
  spacer sequence CTCN PAM
cgccuguaaucccagcacuu

SEQ ID NO: 9279 - RNA, 20 nt, Artificial Sequence
  spacer sequence CTCN PAM
ccuguaaucccagcacuuug

SEQ ID NO: 9280 - RNA, 20 nt, Artificial Sequence
  spacer sequence CTCN PAM
caaagugcugggauuacagg

SEQ ID NO: 9281 - RNA, 20 nt, Artificial Sequence
  spacer sequence CTCN PAM
ugccuugaccucccaaagug

SEQ ID NO: 9282 - RNA, 20 nt, Artificial Sequence
  spacer sequence CTCN PAM
agugauccuccugccuugac

SEQ ID NO: 9283 - RNA, 20 nt, Artificial Sequence
  spacer sequence CTCN PAM
ugggcuccagugauccuccu

SEQ ID NO: 9284 - RNA, 20 nt, Artificial Sequence
  spacer sequence CTCN PAM
cuguugcccaggcuggucuu

SEQ ID NO: 9285 - RNA, 20 nt, Artificial Sequence
  spacer sequence CTCN PAM
aucucuacaaaauuagccag

SEQ ID NO: 9286 - RNA, 20 nt, Artificial Sequence
  spacer sequence CTCN PAM
acaaaauuagccaggcaugg

SEQ ID NO: 9287 - RNA, 20 nt, Artificial Sequence
  spacer sequence CTCN PAM
ggaggcugaggugacaggau

SEQ ID NO: 9288 - RNA, 20 nt, Artificial Sequence
  spacer sequence CTCN PAM
ugaguagcugggacgacagg

SEQ ID NO: 9289 - RNA, 20 nt, Artificial Sequence
  spacer sequence CTCN PAM
gccuccugaguagcugggac

SEQ ID NO: 9290 - RNA, 20 nt, Artificial Sequence
  spacer sequence CTCN PAM
agccauccugucaccucagc

SEQ ID NO: 9291 - RNA, 20 nt, Artificial Sequence
  spacer sequence CTCN PAM
uaggcucaagccauccuguc

SEQ ID NO: 9292 - RNA, 20 nt, Artificial Sequence
  spacer sequence CTCN PAM
cugcagccuugaucuccuag

SEQ ID NO: 9293 - RNA, 20 nt, Artificial Sequence
  spacer sequence CTCN PAM
agccuaggcaacacagcgag

SEQ ID NO: 9294 - RNA, 20 nt, Artificial Sequence
  spacer sequence CTCN PAM
cuguguugccuaggcuagag

SEQ ID NO: 9295 - RNA, 20 nt, Artificial Sequence
  spacer sequence CTCN PAM
aaaacaaacaaacaaacaaa

SEQ ID NO: 9296 - RNA, 20 nt, Artificial Sequence
  spacer sequence CTCN PAM
cuccccuuuuuacuuuuuga

SEQ ID NO: 9297 - RNA, 20 nt, Artificial Sequence
  spacer sequence CTCN PAM
ccuuuuuacuuuuugaagcc

SEQ ID NO: 9298 - RNA, 20 nt, Artificial Sequence
  spacer sequence CTCN PAM
ccuugcucucuccuuccuca

SEQ ID NO: 9299 - RNA, 20 nt, Artificial Sequence
  spacer sequence CTCN PAM
cuccuuccucacauacucac

SEQ ID NO: 9300 - RNA, 20 nt, Artificial Sequence
  spacer sequence CTCN PAM
ccuuccucacauacucacca

SEQ ID NO: 9301 - RNA, 20 nt, Artificial Sequence
  spacer sequence CTCN PAM
uuccucacauacucaccagu

SEQ ID NO: 9302 - RNA, 20 nt, Artificial Sequence
  spacer sequence CTCN PAM
cauacucaccaguacucaug

SEQ ID NO: 9303 - RNA, 20 nt, Artificial Sequence
  spacer sequence CTCN PAM
ccaguacucaugcgcuucuc

SEQ ID NO: 9304 - RNA, 20 nt, Artificial Sequence
  spacer sequence CTCN PAM
ugcgcuucucagacccaaau

SEQ ID NO: 9305 - RNA, 20 nt, Artificial Sequence
  spacer sequence CTCN PAM
gacccaaaugcucugcuuau

SEQ ID NO: 9306 - RNA, 20 nt, Artificial Sequence
  spacer sequence CTCN PAM
gcuuaugguggauaacccca

SEQ ID NO: 9307 - RNA, 20 nt, Artificial Sequence
  spacer sequence CTCN PAM
gugggccucccucucucucu

SEQ ID NO: 9308 - RNA, 20 nt, Artificial Sequence
  spacer sequence CTCN PAM
cucucucucucucucucucu

SEQ ID NO: 9309 - RNA, 20 nt, Artificial Sequence
  spacer sequence CTCN PAM
cucucucucucucucucucu

SEQ ID NO: 9310 - RNA, 20 nt, Artificial Sequence
  spacer sequence CTCN PAM
cucucucucucucucucucu

SEQ ID NO: 9311 - RNA, 20 nt, Artificial Sequence
  spacer sequence CTCN PAM
cucucucucucucucucucu

SEQ ID NO: 9312 - RNA, 20 nt, Artificial Sequence
  spacer sequence CTCN PAM
cucucucucucucucucugu

SEQ ID NO: 9313 - RNA, 20 nt, Artificial Sequence
  spacer sequence CTCN PAM
cucucucucucucucuguca

SEQ ID NO: 9314 - RNA, 20 nt, Artificial Sequence
  spacer sequence CTCN PAM
cucucucucucucugucauu

SEQ ID NO: 9315 - RNA, 20 nt, Artificial Sequence
  spacer sequence CTCN PAM
cucucucucucugucauuac

SEQ ID NO: 9316 - RNA, 20 nt, Artificial Sequence
  spacer sequence CTCN PAM
cucucucucugucauuacca

SEQ ID NO: 9317 - RNA, 20 nt, Artificial Sequence
  spacer sequence CTCN PAM
cucucucugucauuaccaac

SEQ ID NO: 9318 - RNA, 20 nt, Artificial Sequence
  spacer sequence CTCN PAM
cucucugucauuaccaacuu

SEQ ID NO: 9319 - RNA, 20 nt, Artificial Sequence
  spacer sequence CTCN PAM
cucugucauuaccaacuucu

SEQ ID NO: 9320 - RNA, 20 nt, Artificial Sequence
  spacer sequence CTCN PAM
cugucauuaccaacuucuau

SEQ ID NO: 9321 - RNA, 20 nt, Artificial Sequence
  spacer sequence CTCN PAM
gucauuaccaacuucuauaa

SEQ ID NO: 9322 - RNA, 20 nt, Artificial Sequence
  spacer sequence CTCN PAM
gaauacaaagggcauucuca

SEQ ID NO: 9323 - RNA, 20 nt, Artificial Sequence
  spacer sequence CTCN PAM
uuucccugaaauguacuuug

SEQ ID NO: 9324 - RNA, 20 nt, Artificial Sequence
  spacer sequence CTCN PAM
agccgucuuucaggguagca

SEQ ID NO: 9325 - RNA, 20 nt, Artificial Sequence
  spacer sequence CTCN PAM
agacucuagccgucuuucag

SEQ ID NO: 9326 - RNA, 20 nt, Artificial Sequence
  spacer sequence CTCN PAM
ucaagacucuagccgucuuu

SEQ ID NO: 9327 - RNA, 20 nt, Artificial Sequence
  spacer sequence CTCN PAM
agugguggguguuuuguuuu

SEQ ID NO: 9328 - RNA, 20 nt, Artificial Sequence
  spacer sequence CTCN PAM
accaaaaucaagauacagaa

SEQ ID NO: 9329 - RNA, 20 nt, Artificial Sequence
  spacer sequence CTCN PAM
ugccccuuugcugucaaucc

SEQ ID NO: 9330 - RNA, 20 nt, Artificial Sequence
  spacer sequence CTCN PAM
gaccccuuccuucuaaccac

SEQ ID NO: 9331 - RNA, 20 nt, Artificial Sequence
  spacer sequence CTCN PAM
acacuguggugguagguggg

SEQ ID NO: 9332 - RNA, 20 nt, Artificial Sequence
  spacer sequence CTCN PAM
uacaggauaucgucuuuugu

SEQ ID NO: 9333 - RNA, 20 nt, Artificial Sequence
  spacer sequence CTCN PAM
guggaagaaauuaaacacaa

SEQ ID NO: 9334 - RNA, 20 nt, Artificial Sequence
  spacer sequence CTCN PAM
acaccauggaugaaucccag

SEQ ID NO: 9335 - RNA, 20 nt, Artificial Sequence
  spacer sequence CTCN PAM
uucauucuucuacuguugag

SEQ ID NO: 9336 - RNA, 20 nt, Artificial Sequence
  spacer sequence CTCN PAM
acaguagaagaaugaaagag

SEQ ID NO: 9337 - RNA, 20 nt, Artificial Sequence
  spacer sequence CTCN PAM
uagguaaacaucuaaggcau

SEQ ID NO: 9338 - RNA, 20 nt, Artificial Sequence
  spacer sequence CTCN PAM
aaaugccuuagauguuuacc

SEQ ID NO: 9339 - RNA, 20 nt, Artificial Sequence
  spacer sequence CTCN PAM
aaaccuuuucuguguucucg

SEQ ID NO: 9340 - RNA, 20 nt, Artificial Sequence
  spacer sequence CTCN PAM
aacucaaaaccuuuucugug

SEQ ID NO: 9341 - RNA, 20 nt, Artificial Sequence
  spacer sequence CTCN PAM
cuggacucaaacucaaaacc

SEQ ID NO: 9342 - RNA, 20 nt, Artificial Sequence
  spacer sequence CTCN PAM
uuuugucauccuccaggcug

SEQ ID NO: 9343 - RNA, 20 nt, Artificial Sequence
  spacer sequence CTCN PAM
aggcugccccccucccaccc

SEQ ID NO: 9344 - RNA, 20 nt, Artificial Sequence
  spacer sequence CTCN PAM
caccccauucccuggagagu

SEQ ID NO: 9345 - RNA, 20 nt, Artificial Sequence
  spacer sequence CTCN PAM
agggaauggggugggagggg

SEQ ID NO: 9346 - RNA, 20 nt, Artificial Sequence
  spacer sequence CTCN PAM
ccagggaauggggugggagg

SEQ ID NO: 9347 - RNA, 20 nt, Artificial Sequence
  spacer sequence CTCN PAM
aaacccuauaucccagcuau

SEQ ID NO: 9348 - RNA, 20 nt, Artificial Sequence
  spacer sequence CTCN PAM
gcuaccaaaugucauccuau

SEQ ID NO: 9349 - RNA, 20 nt, Artificial Sequence
  spacer sequence CTCN PAM
ccacuacacuaaggaaauga

SEQ ID NO: 9350 - RNA, 20 nt, Artificial Sequence
  spacer sequence CTCN PAM
acuacacuaaggaaaugaug

SEQ ID NO: 9351 - RNA, 20 nt, Artificial Sequence
  spacer sequence CTCN PAM
ucccaucauuuccuuagugu

SEQ ID NO: 9352 - RNA, 20 nt, Artificial Sequence
  spacer sequence CTCN PAM
gggucagagauaacuuaagu

SEQ ID NO: 9353 - RNA, 20 nt, Artificial Sequence
  spacer sequence CTCN PAM
gacccagaguccaauuuauu

SEQ ID NO: 9354 - RNA, 20 nt, Artificial Sequence
  spacer sequence CTCN PAM
gaacaccacacuuaaguuau

SEQ ID NO: 9355 - RNA, 20 nt, Artificial Sequence
  spacer sequence CTCN PAM
uaggacuccgaacaccacac

SEQ ID NO: 9356 - RNA, 20 nt, Artificial Sequence
  spacer sequence CTCN PAM
gaaauggacuuaguugaccu

SEQ ID NO: 9357 - RNA, 20 nt, Artificial Sequence
  spacer sequence CTCN PAM
cccauuagcagcauggagag

SEQ ID NO: 9358 - RNA, 20 nt, Artificial Sequence
  spacer sequence CTCN PAM
augcugcuaaugggggaggu

SEQ ID NO: 9359 - RNA, 20 nt, Artificial Sequence
  spacer sequence CTCN PAM
ccaugcugcuaaugggggag

SEQ ID NO: 9360 - RNA, 20 nt, Artificial Sequence
  spacer sequence CTCN PAM
uugacucuccaugcugcuaa

SEQ ID NO: 9361 - RNA, 20 nt, Artificial Sequence
  spacer sequence CTCN PAM
cacaacacuccagggaggca

SEQ ID NO: 9362 - RNA, 20 nt, Artificial Sequence
  spacer sequence CTCN PAM
agggaggcagcugcugccca

SEQ ID NO: 9363 - RNA, 20 nt, Artificial Sequence
  spacer sequence CTCN PAM
cuggaguguugugugagacc

SEQ ID NO: 9364 - RNA, 20 nt, Artificial Sequence
  spacer sequence CTCN PAM
cccucccccauccucaucag

SEQ ID NO: 9365 - RNA, 20 nt, Artificial Sequence
  spacer sequence CTCN PAM
cccauccucaucagcuuggc

SEQ ID NO: 9366 - RNA, 20 nt, Artificial Sequence
  spacer sequence CTCN PAM
ucagcuuggccauggcaggg

SEQ ID NO: 9367 - RNA, 20 nt, Artificial Sequence
  spacer sequence CTCN PAM
gaucccccagcccugccaug

SEQ ID NO: 9368 - RNA, 20 nt, Artificial Sequence
  spacer sequence CTCN PAM
cccagggguccuucugcuuc

SEQ ID NO: 9369 - RNA, 20 nt, Artificial Sequence
  spacer sequence CTCN PAM
agugggaccagagcugagug

SEQ ID NO: 9370 - RNA, 20 nt, Artificial Sequence
  spacer sequence CTCN PAM
ggucccacuggaggcccugu

SEQ ID NO: 9371 - RNA, 20 nt, Artificial Sequence
  spacer sequence CTCN PAM
gcucuggucccacuggaggc

SEQ ID NO: 9372 - RNA, 20 nt, Artificial Sequence
  spacer sequence CTCN PAM
ggcaguggcggaagcugauu

SEQ ID NO: 9373 - RNA, 20 nt, Artificial Sequence
  spacer sequence CTCN PAM
ccguaccuuccuuuaaucag

SEQ ID NO: 9374 - RNA, 20 nt, Artificial Sequence
  spacer sequence CTCN PAM
acuccccguaccuuccuuua

SEQ ID NO: 9375 - RNA, 20 nt, Artificial Sequence
  spacer sequence CTCN PAM
cccuugcauuguugucuaag

SEQ ID NO: 9376 - RNA, 20 nt, Artificial Sequence
  spacer sequence CTCN PAM
guucuguuuucuucaguuuc

SEQ ID NO: 9377 - RNA, 20 nt, Artificial Sequence
  spacer sequence CTCN PAM
guuuauugccaguagugguc

SEQ ID NO: 9378 - RNA, 20 nt, Artificial Sequence
  spacer sequence CTCN PAM
cuguuuauugccaguagugg

SEQ ID NO: 9379 - RNA, 20 nt, Artificial Sequence
  spacer sequence CTCN PAM
cccauggggcuucacuuucu

SEQ ID NO: 9380 - RNA, 20 nt, Artificial Sequence
  spacer sequence CTCN PAM
gguuucuuaaguaauguagg

SEQ ID NO: 9381 - RNA, 20 nt, Artificial Sequence
  spacer sequence CTCN PAM
aggauguauuuauugcccua

SEQ ID NO: 9382 - RNA, 20 nt, Artificial Sequence
  spacer sequence CTCN PAM
ugcuuagccuguguagcuca

SEQ ID NO: 9383 - RNA, 20 nt, Artificial Sequence
  spacer sequence CTCN PAM
cucuugcuuagccuguguag

SEQ ID NO: 9384 - RNA, 20 nt, Artificial Sequence
  spacer sequence CTCN PAM
cacucuugcuuagccugugu

SEQ ID NO: 9385 - RNA, 20 nt, Artificial Sequence
  spacer sequence CTCN PAM
cucacucuugcuuagccugu

SEQ ID NO: 9386 - RNA, 20 nt, Artificial Sequence
  spacer sequence CTCN PAM
cauguggccugucagcauca

SEQ ID NO: 9387 - RNA, 20 nt, Artificial Sequence
  spacer sequence CTCN PAM
cccauguggccugucagcau

SEQ ID NO: 9388 - RNA, 20 nt, Artificial Sequence
  spacer sequence CTCN PAM
cagcccacgucuucccacuc

SEQ ID NO: 9389 - RNA, 20 nt, Artificial Sequence
  spacer sequence CTCN PAM
cagcucccagcccacgucuu

SEQ ID NO: 9390 - RNA, 20 nt, Artificial Sequence
  spacer sequence CTCN PAM
ucugugcauggccucuaaac

SEQ ID NO: 9391 - RNA, 20 nt, Artificial Sequence
  spacer sequence CTCN PAM
aaacugggcagugaccaugg

SEQ ID NO: 9392 - RNA, 20 nt, Artificial Sequence
  spacer sequence CTCN PAM
ccacucuggaccuggguugc

SEQ ID NO: 9393 - RNA, 20 nt, Artificial Sequence
  spacer sequence CTCN PAM
ggaccuggguugccccucug

SEQ ID NO: 9394 - RNA, 20 nt, Artificial Sequence
  spacer sequence CTCN PAM
guaaacaaggagguuguaau

SEQ ID NO: 9395 - RNA, 20 nt, Artificial Sequence
  spacer sequence CTCN PAM
uuguuuacagaggggcaacc

SEQ ID NO: 9396 - RNA, 20 nt, Artificial Sequence
  spacer sequence CTCN PAM
aauacccuaaugucuuauaa

SEQ ID NO: 9397 - RNA, 20 nt, Artificial Sequence
  spacer sequence CTCN PAM
caucuuggcaaaaauugcau

SEQ ID NO: 9398 - RNA, 20 nt, Artificial Sequence
  spacer sequence CTCN PAM
ccauacucccaucuuggcaa

SEQ ID NO: 9399 - RNA, 20 nt, Artificial Sequence
  spacer sequence CTCN PAM
ccccauacucccaucuuggc

SEQ ID NO: 9400 - RNA, 20 nt, Artificial Sequence
  spacer sequence CTCN PAM
ucucuccccauacucccauc

SEQ ID NO: 9401 - RNA, 20 nt, Artificial Sequence
  spacer sequence CTCN PAM
gggccguuuccacucuucuc

SEQ ID NO: 9402 - RNA, 20 nt, Artificial Sequence
  spacer sequence CTCN PAM
gugagaugagauaucaaagg

SEQ ID NO: 9403 - RNA, 20 nt, Artificial Sequence
  spacer sequence CTCN PAM
cugagcucugggccguuucc

SEQ ID NO: 9404 - RNA, 20 nt, Artificial Sequence
  spacer sequence CTCN PAM
ucucacugagcucugggccg

SEQ ID NO: 9405 - RNA, 20 nt, Artificial Sequence
  spacer sequence CTCN PAM
cuaaucuccaauuggcaaag

SEQ ID NO: 9406 - RNA, 20 nt, Artificial Sequence
  spacer sequence CTCN PAM
aauuggcaaagccagacuug

SEQ ID NO: 9407 - RNA, 20 nt, Artificial Sequence
  spacer sequence CTCN PAM
uagcucauuccuaaugauuu

SEQ ID NO: 9408 - RNA, 20 nt, Artificial Sequence
  spacer sequence CTCN PAM
uuccuaaugauuuaucacca

SEQ ID NO: 9409 - RNA, 20 nt, Artificial Sequence
  spacer sequence CTCN PAM
uccguaaaauaggaauaaua

SEQ ID NO: 9410 - RNA, 20 nt, Artificial Sequence
  spacer sequence CTCN PAM
uuuuauuuucauacaaaccc

SEQ ID NO: 9411 - RNA, 20 nt, Artificial Sequence
  spacer sequence CTCN PAM
aggaacuuuacaaauacgca

SEQ ID NO: 9412 - RNA, 20 nt, Artificial Sequence
  spacer sequence CTCN PAM
gcucuaggaacuuuacaaau

SEQ ID NO: 9413 - RNA, 20 nt, Artificial Sequence
  spacer sequence CTCN PAM
gagcuugugaacuaaaaugc

SEQ ID NO: 9414 - RNA, 20 nt, Artificial Sequence
  spacer sequence CTCN PAM
gagcacuuacucugcucuag

SEQ ID NO: 9415 - RNA, 20 nt, Artificial Sequence
  spacer sequence CTCN PAM
ugguauuuauuaguuacacc

SEQ ID NO: 9416 - RNA, 20 nt, Artificial Sequence
  spacer sequence CTCN PAM
gcagaaacaaaguuaucagg

SEQ ID NO: 9417 - RNA, 20 nt, Artificial Sequence
  spacer sequence CTCN PAM
cuuuucccuuuucuucugac

SEQ ID NO: 9418 - RNA, 20 nt, Artificial Sequence
  spacer sequence CTCN PAM
cccuuuucccuuuucuucug

SEQ ID NO: 9419 - RNA, 20 nt, Artificial Sequence
  spacer sequence CTCN PAM
cccugacgucauauucuuuu

SEQ ID NO: 9420 - RNA, 20 nt, Artificial Sequence
  spacer sequence CTCN PAM
uaauuguccauuuuucaucu

SEQ ID NO: 9421 - RNA, 20 nt, Artificial Sequence
  spacer sequence CTCN PAM
ucauaauuguccauuuuuca

SEQ ID NO: 9422 - RNA, 20 nt, Artificial Sequence
  spacer sequence CTCN PAM
ccuccucauaauuguccauu

SEQ ID NO: 9423 - RNA, 20 nt, Artificial Sequence
  spacer sequence CTCN PAM
ccccuccucauaauugucca

SEQ ID NO: 9424 - RNA, 20 nt, Artificial Sequence
  spacer sequence CTCN PAM
uuuacaauuuugggagucca

SEQ ID NO: 9425 - RNA, 20 nt, Artificial Sequence
  spacer sequence CTCN PAM
caaaauuguaaaggagguga

SEQ ID NO: 9426 - RNA, 20 nt, Artificial Sequence
  spacer sequence CTCN PAM
augggaaugaaauaauuugu

SEQ ID NO: 9427 - RNA, 20 nt, Artificial Sequence
  spacer sequence CTCN PAM
aucaccaagagagccuuccg

SEQ ID NO: 9428 - RNA, 20 nt, Artificial Sequence
  spacer sequence CTCN PAM
uggugauggagaauuggauu

SEQ ID NO: 9429 - RNA, 20 nt, Artificial Sequence
  spacer sequence CTCN PAM
cuuggugauggagaauugga

SEQ ID NO: 9430 - RNA, 20 nt, Artificial Sequence
  spacer sequence CTCN PAM
uucggaaggcucucuuggug

SEQ ID NO: 9431 - RNA, 20 nt, Artificial Sequence
  spacer sequence CTCN PAM
aucgguggccguuugcccag

SEQ ID NO: 9432 - RNA, 20 nt, Artificial Sequence
  spacer sequence CTCN PAM
ccaucgguggccguuugccc

SEQ ID NO: 9433 - RNA, 20 nt, Artificial Sequence
  spacer sequence CTCN PAM
ucuaccccacccacgccccc

SEQ ID NO: 9434 - RNA, 20 nt, Artificial Sequence
  spacer sequence CTCN PAM
gauuagggugggggcguggg

SEQ ID NO: 9435 - RNA, 20 nt, Artificial Sequence
  spacer sequence CTCN PAM
aggaaggguuuggccucuga

SEQ ID NO: 9436 - RNA, 20 nt, Artificial Sequence
  spacer sequence CTCN PAM
uagacauaacacaccagggu

SEQ ID NO: 9437 - RNA, 20 nt, Artificial Sequence
  spacer sequence CTCN PAM
uuucuggccuauguuauuac

SEQ ID NO: 9438 - RNA, 20 nt, Artificial Sequence
  spacer sequence CTCN PAM
uacuuaugcacaccuggggc

SEQ ID NO: 9439 - RNA, 20 nt, Artificial Sequence
  spacer sequence CTCN PAM
augccccaggugugcauaag

SEQ ID NO: 9440 - RNA, 20 nt, Artificial Sequence
  spacer sequence CTCN PAM
cuacagauaacucccaaguc

SEQ ID NO: 9441 - RNA, 20 nt, Artificial Sequence
  spacer sequence CTCN PAM
caaguccugucuagcugccu

SEQ ID NO: 9442 - RNA, 20 nt, Artificial Sequence
  spacer sequence CTCN PAM
gaguagaacccccuauaaac

SEQ ID NO: 9443 - RNA, 20 nt, Artificial Sequence
  spacer sequence CTCN PAM
gagguacugauggaccuugg

SEQ ID NO: 9444 - RNA, 20 nt, Artificial Sequence
  spacer sequence CTCN PAM
gccuguugugaugcuuacau

SEQ ID NO: 9445 - RNA, 20 nt, Artificial Sequence
  spacer sequence CTCN PAM
aaccacagggaucacaacac

SEQ ID NO: 9446 - RNA, 20 nt, Artificial Sequence
  spacer sequence CTCN PAM
caaaccacagggaucacaac

SEQ ID NO: 9447 - RNA, 20 nt, Artificial Sequence
  spacer sequence CTCN PAM
aaacucucaaaccacaggga

SEQ ID NO: 9448 - RNA, 20 nt, Artificial Sequence
  spacer sequence CTCN PAM
augggcccucaaucagcaca

SEQ ID NO: 9449 - RNA, 20 nt, Artificial Sequence
  spacer sequence CTCN PAM
aucagcacauacacacaaaa

SEQ ID NO: 9450 - RNA, 20 nt, Artificial Sequence
  spacer sequence CTCN PAM
aagacaggcaauucaauacc

SEQ ID NO: 9451 - RNA, 20 nt, Artificial Sequence
  spacer sequence CTCN PAM
caugguggcaaggguuuuug

SEQ ID NO: 9452 - RNA, 20 nt, Artificial Sequence
  spacer sequence CTCN PAM
gccccaggcucccauggugg

SEQ ID NO: 9453 - RNA, 20 nt, Artificial Sequence
  spacer sequence CTCN PAM
aaauggugcugucauuuuuc

SEQ ID NO: 9454 - RNA, 20 nt, Artificial Sequence
  spacer sequence CTCN PAM
gaaaaaugacagcaccauuu

SEQ ID NO: 9455 - RNA, 20 nt, Artificial Sequence
  spacer sequence CTCN PAM
cagaaaaaugacagcaccau

SEQ ID NO: 9456 - RNA, 20 nt, Artificial Sequence
  spacer sequence CTCN PAM
aaauuacaaggguguuuuca

SEQ ID NO: 9457 - RNA, 20 nt, Artificial Sequence
  spacer sequence CTCN PAM
ggaaaagagaacaaacaaac

SEQ ID NO: 9458 - RNA, 20 nt, Artificial Sequence
  spacer sequence CTCN PAM
uuuccagagcugcaguaugu

SEQ ID NO: 9459 - RNA, 20 nt, Artificial Sequence
  spacer sequence CTCN PAM
uugguuuguuuguucucuuu

SEQ ID NO: 9460 - RNA, 20 nt, Artificial Sequence
  spacer sequence CTCN PAM
ggaucccuucucuuugguuu

SEQ ID NO: 9461 - RNA, 20 nt, Artificial Sequence
  spacer sequence CTCN PAM
uaugugaaaagucaauugau

SEQ ID NO: 9462 - RNA, 20 nt, Artificial Sequence
  spacer sequence CTCN PAM
gguuauccuaaagccuucau

SEQ ID NO: 9463 - RNA, 20 nt, Artificial Sequence
  spacer sequence CTCN PAM
ccuccgguuauccuaaagcc

SEQ ID NO: 9464 - RNA, 20 nt, Artificial Sequence
  spacer sequence CTCN PAM
ugggacaaggcauucuguaa

SEQ ID NO: 9465 - RNA, 20 nt, Artificial Sequence
  spacer sequence CTCN PAM
cacccugucccccaucugug

SEQ ID NO: 9466 - RNA, 20 nt, Artificial Sequence
  spacer sequence CTCN PAM
guaacaccacugggaugguc

SEQ ID NO: 9467 - RNA, 20 nt, Artificial Sequence
  spacer sequence CTCN PAM
uagggcuaucccuuugcccc

SEQ ID NO: 9468 - RNA, 20 nt, Artificial Sequence
  spacer sequence CTCN PAM
aguucugcccuggacacuug

SEQ ID NO: 9469 - RNA, 20 nt, Artificial Sequence
  spacer sequence CTCN PAM
gccugggaaaugguuucaca

SEQ ID NO: 9470 - RNA, 20 nt, Artificial Sequence
  spacer sequence CTCN PAM
gucucugccugggaaauggu

SEQ ID NO: 9471 - RNA, 20 nt, Artificial Sequence
  spacer sequence CTCN PAM
ggucagcucuggacacacag

SEQ ID NO: 9472 - RNA, 20 nt, Artificial Sequence
  spacer sequence CTCN PAM
ggacacacagcaaaagugag

SEQ ID NO: 9473 - RNA, 20 nt, Artificial Sequence
  spacer sequence CTCN PAM
cuuuugcuguguguccagag

SEQ ID NO: 9474 - RNA, 20 nt, Artificial Sequence
  spacer sequence CTCN PAM
gaacucacuuuugcugugug

SEQ ID NO: 9475 - RNA, 20 nt, Artificial Sequence
  spacer sequence CTCN PAM
uuccugcuucaggcuacucu

SEQ ID NO: 9476 - RNA, 20 nt, Artificial Sequence
  spacer sequence CTCN PAM
ucccucuuuccugcuucagg

SEQ ID NO: 9477 - RNA, 20 nt, Artificial Sequence
  spacer sequence CTCN PAM
cuucccucuuuccugcuuca

SEQ ID NO: 9478 - RNA, 20 nt, Artificial Sequence
  spacer sequence CTCN PAM
ucucuucccucuuuccugcu

SEQ ID NO: 9479 - RNA, 20 nt, Artificial Sequence
  spacer sequence CTCN PAM
aauccuugccuugaaccugc

SEQ ID NO: 9480 - RNA, 20 nt, Artificial Sequence
  spacer sequence CTCN PAM
uccagaagggguaacugucu

SEQ ID NO: 9481 - RNA, 20 nt, Artificial Sequence
  spacer sequence CTCN PAM
ccaggcucuuccagaagggg

SEQ ID NO: 9482 - RNA, 20 nt, Artificial Sequence
  spacer sequence CTCN PAM
ccugccuuguacaacccucu

SEQ ID NO: 9483 - RNA, 20 nt, Artificial Sequence
  spacer sequence CTCN PAM
ugccuuguacaacccucucu

SEQ ID NO: 9484 - RNA, 20 nt, Artificial Sequence
  spacer sequence CTCN PAM
cuccucaccgacuuucucuc

SEQ ID NO: 9485 - RNA, 20 nt, Artificial Sequence
  spacer sequence CTCN PAM
ccucaccgacuuucucuccc

SEQ ID NO: 9486 - RNA, 20 nt, Artificial Sequence
  spacer sequence CTCN PAM
ucaccgacuuucucucccag

SEQ ID NO: 9487 - RNA, 20 nt, Artificial Sequence
  spacer sequence CTCN PAM
ccgacuuucucucccagcag

SEQ ID NO: 9488 - RNA, 20 nt, Artificial Sequence
  spacer sequence CTCN PAM
cccagcagccagcaggggcc

SEQ ID NO: 9489 - RNA, 20 nt, Artificial Sequence
  spacer sequence CTCN PAM
cagcagccagcaggggccug

SEQ ID NO: 9490 - RNA, 20 nt, Artificial Sequence
  spacer sequence CTCN PAM
agguuccacugugagugcuc

SEQ ID NO: 9491 - RNA, 20 nt, Artificial Sequence
  spacer sequence CTCN PAM
caguggaaccuagaguggga

SEQ ID NO: 9492 - RNA, 20 nt, Artificial Sequence
  spacer sequence CTCN PAM
cucucucucucucucucacu

SEQ ID NO: 9493 - RNA, 20 nt, Artificial Sequence
  spacer sequence CTCN PAM
cucucucucucucucacuau

SEQ ID NO: 9494 - RNA, 20 nt, Artificial Sequence
  spacer sequence CTCN PAM
cucucucucucucacuaugc

SEQ ID NO: 9495 - RNA, 20 nt, Artificial Sequence
  spacer sequence CTCN PAM
cucucucucucacuaugcuc

SEQ ID NO: 9496 - RNA, 20 nt, Artificial Sequence
  spacer sequence CTCN PAM
cucucucucacuaugcuccc

SEQ ID NO: 9497 - RNA, 20 nt, Artificial Sequence
  spacer sequence CTCN PAM
cucucucacuaugcucccaa

SEQ ID NO: 9498 - RNA, 20 nt, Artificial Sequence
  spacer sequence CTCN PAM
cucucacuaugcucccaaga

SEQ ID NO: 9499 - RNA, 20 nt, Artificial Sequence
  spacer sequence CTCN PAM
cucacuaugcucccaagagg

SEQ ID NO: 9500 - RNA, 20 nt, Artificial Sequence
  spacer sequence CTCN PAM
cacuaugcucccaagaggag

SEQ ID NO: 9501 - RNA, 20 nt, Artificial Sequence
  spacer sequence CTCN PAM
cuaugcucccaagaggaguc

SEQ ID NO: 9502 - RNA, 20 nt, Artificial Sequence
  spacer sequence CTCN PAM
caagaggagucuuacaucaa

SEQ ID NO: 9503 - RNA, 20 nt, Artificial Sequence
  spacer sequence CTCN PAM
ugggagcauagugagagaga

SEQ ID NO: 9504 - RNA, 20 nt, Artificial Sequence
  spacer sequence CTCN PAM
ucuugggagcauagugagag

SEQ ID NO: 9505 - RNA, 20 nt, Artificial Sequence
  spacer sequence CTCN PAM
aaucucccucacuggauguc

SEQ ID NO: 9506 - RNA, 20 nt, Artificial Sequence
  spacer sequence CTCN PAM
cucacuggaugucacaguca

SEQ ID NO: 9507 - RNA, 20 nt, Artificial Sequence
  spacer sequence CTCN PAM
cuggaugucacagucauagg

SEQ ID NO: 9508 - RNA, 20 nt, Artificial Sequence
  spacer sequence CTCN PAM
uaugacuguccauggggaaa

SEQ ID NO: 9509 - RNA, 20 nt, Artificial Sequence
  spacer sequence CTCN PAM
ucucuuaugacuguccaugg

SEQ ID NO: 9510 - RNA, 20 nt, Artificial Sequence
  spacer sequence CTCN PAM
cacauggaaggaagcaagau

SEQ ID NO: 9511 - RNA, 20 nt, Artificial Sequence
  spacer sequence CTCN PAM
cauggaaggaagcaagaucu

SEQ ID NO: 9512 - RNA, 20 nt, Artificial Sequence
  spacer sequence CTCN PAM
acuccucccccaguguugag

SEQ ID NO: 9513 - RNA, 20 nt, Artificial Sequence
  spacer sequence CTCN PAM
ucccccaguguugaguggac

SEQ ID NO: 9514 - RNA, 20 nt, Artificial Sequence
  spacer sequence CTCN PAM
cccaguguugaguggacagg

SEQ ID NO: 9515 - RNA, 20 nt, Artificial Sequence
  spacer sequence CTCN PAM
acacugggggaggaguagag

SEQ ID NO: 9516 - RNA, 20 nt, Artificial Sequence
  spacer sequence CTCN PAM
cuguccacucaacacugggg

SEQ ID NO: 9517 - RNA, 20 nt, Artificial Sequence
  spacer sequence CTCN PAM
agcuuaggggaugcuagcua

SEQ ID NO: 9518 - RNA, 20 nt, Artificial Sequence
  spacer sequence CTCN PAM
agcucuagcuuaggggaugc

SEQ ID NO: 9519 - RNA, 20 nt, Artificial Sequence
  spacer sequence CTCN PAM
agcucuagcucuagcuuagg

SEQ ID NO: 9520 - RNA, 20 nt, Artificial Sequence
  spacer sequence CTCN PAM
agcaaaguccuuccaugcag

SEQ ID NO: 9521 - RNA, 20 nt, Artificial Sequence
  spacer sequence CTCN PAM
uuaaguguuuacaggucauu

SEQ ID NO: 9522 - RNA, 20 nt, Artificial Sequence
  spacer sequence CTCN PAM
agcucauuaaguguuuacag

SEQ ID NO: 9523 - RNA, 20 nt, Artificial Sequence
  spacer sequence CTCN PAM
uuacaaaaggaugcacagug

SEQ ID NO: 9524 - RNA, 20 nt, Artificial Sequence
  spacer sequence CTCN PAM
guuugaucaagucagauuuu

SEQ ID NO: 9525 - RNA, 20 nt, Artificial Sequence
  spacer sequence CTCN PAM
gguuagcaggccaaggauau

SEQ ID NO: 9526 - RNA, 20 nt, Artificial Sequence
  spacer sequence CTCN PAM
uauauccuuggccugcuaac

SEQ ID NO: 9527 - RNA, 20 nt, Artificial Sequence
  spacer sequence CTCN PAM
cauauauccuuggccugcua

SEQ ID NO: 9528 - RNA, 20 nt, Artificial Sequence
  spacer sequence CTCN PAM
ugaauugaauuagaacauuc

SEQ ID NO: 9529 - RNA, 20 nt, Artificial Sequence
  spacer sequence CTCN PAM
aucggcucuuaccagucacu

SEQ ID NO: 9530 - RNA, 20 nt, Artificial Sequence
  spacer sequence CTCN PAM
uaccagucacuaccuacguc

SEQ ID NO: 9531 - RNA, 20 nt, Artificial Sequence
  spacer sequence CTCN PAM
ggaaggugcaaagugccauc

SEQ ID NO: 9532 - RNA, 20 nt, Artificial Sequence
  spacer sequence CTCN PAM
uacucuucucuuucucugaa

SEQ ID NO: 9533 - RNA, 20 nt, Artificial Sequence
  spacer sequence CTCN PAM
ucucuuucucugaacuauca

SEQ ID NO: 9534 - RNA, 20 nt, Artificial Sequence
  spacer sequence CTCN PAM
uucucugaacuaucaccuua

SEQ ID NO: 9535 - RNA, 20 nt, Artificial Sequence
  spacer sequence CTCN PAM
gaacuaucaccuuacuauag

SEQ ID NO: 9536 - RNA, 20 nt, Artificial Sequence
  spacer sequence CTCN PAM
guggccucuuuugucucauu

SEQ ID NO: 9537 - RNA, 20 nt, Artificial Sequence
  spacer sequence CTCN PAM
uuugucucauuucucccuuu

SEQ ID NO: 9538 - RNA, 20 nt, Artificial Sequence
  spacer sequence CTCN PAM
uuucucccuuugcugaugau

SEQ ID NO: 9539 - RNA, 20 nt, Artificial Sequence
  spacer sequence CTCN PAM
cuuugcugaugauccaguag

SEQ ID NO: 9540 - RNA, 20 nt, Artificial Sequence
  spacer sequence CTCN PAM
acuggaucaucagcaaaggg

SEQ ID NO: 9541 - RNA, 20 nt, Artificial Sequence
  spacer sequence CTCN PAM
gcaggauggaagugagccag

SEQ ID NO: 9542 - RNA, 20 nt, Artificial Sequence
  spacer sequence CTCN PAM
cuuccauccugcagaggaag

SEQ ID NO: 9543 - RNA, 20 nt, Artificial Sequence
  spacer sequence CTCN PAM
cccuucuaucaccuggcuca

SEQ ID NO: 9544 - RNA, 20 nt, Artificial Sequence
  spacer sequence CTCN PAM
gccaaugaagcggugggucc

SEQ ID NO: 9545 - RNA, 20 nt, Artificial Sequence
  spacer sequence CTCN PAM
gcaacacccugaccuuuaug

SEQ ID NO: 9546 - RNA, 20 nt, Artificial Sequence
  spacer sequence CTCN PAM
uggauuuugugcauagcaau

SEQ ID NO: 9547 - RNA, 20 nt, Artificial Sequence
  spacer sequence CTCN PAM
augggccucuuggauuuugu

SEQ ID NO: 9548 - RNA, 20 nt, Artificial Sequence
  spacer sequence CTCN PAM
ccaccuccaugggccucuug

SEQ ID NO: 9549 - RNA, 20 nt, Artificial Sequence
  spacer sequence CTCN PAM
ucuccccaccuccaugggcc

SEQ ID NO: 9550 - RNA, 20 nt, Artificial Sequence
  spacer sequence CTCN PAM
agagcaggggucuucucuuu

SEQ ID NO: 9551 - RNA, 20 nt, Artificial Sequence
  spacer sequence CTCN PAM
ugagggucugccaggugggu

SEQ ID NO: 9552 - RNA, 20 nt, Artificial Sequence
  spacer sequence CTCN PAM
uugggggaggacaucacucu

SEQ ID NO: 9553 - RNA, 20 nt, Artificial Sequence
  spacer sequence CTCN PAM
cccaaagagaagaccccugc

SEQ ID NO: 9554 - RNA, 20 nt, Artificial Sequence
  spacer sequence CTCN PAM
uagcagggcuggggugaguc

SEQ ID NO: 9555 - RNA, 20 nt, Artificial Sequence
  spacer sequence CTCN PAM
ccccagcccugcuaagagug

SEQ ID NO: 9556 - RNA, 20 nt, Artificial Sequence
  spacer sequence CTCN PAM
cagacuuuugacucacccca

SEQ ID NO: 9557 - RNA, 20 nt, Artificial Sequence
  spacer sequence CTCN PAM
auucucccagacuuuugacu

SEQ ID NO: 9558 - RNA, 20 nt, Artificial Sequence
  spacer sequence CTCN PAM
acaccuccauucucccagac

SEQ ID NO: 9559 - RNA, 20 nt, Artificial Sequence
  spacer sequence CTCN PAM
auguagacggguguguggcu

SEQ ID NO: 9560 - RNA, 20 nt, Artificial Sequence
  spacer sequence CTCN PAM
uuaaggugacccagcagccc

SEQ ID NO: 9561 - RNA, 20 nt, Artificial Sequence
  spacer sequence CTCN PAM
acgcaccacuucugugccca

SEQ ID NO: 9562 - RNA, 20 nt, Artificial Sequence
  spacer sequence CTCN PAM
ucugacaggcccugcugguu

SEQ ID NO: 9563 - RNA, 20 nt, Artificial Sequence
  spacer sequence CTCN PAM
caggacaugcagcagugugu

SEQ ID NO: 9564 - RNA, 20 nt, Artificial Sequence
  spacer sequence CTCN PAM
cuaccgcgaccccuaucagu

SEQ ID NO: 9565 - RNA, 20 nt, Artificial Sequence
  spacer sequence CTCN PAM
guccagcccagccugggugu

SEQ ID NO: 9566 - RNA, 20 nt, Artificial Sequence
  spacer sequence CTCN PAM
gggcacacccugugaucuug

SEQ ID NO: 9567 - RNA, 20 nt, Artificial Sequence
  spacer sequence CTCN PAM
ccaccuucucagggcacacc

SEQ ID NO: 9568 - RNA, 20 nt, Artificial Sequence
  spacer sequence CTCN PAM
cagccuccaagcauugcauc

SEQ ID NO: 9569 - RNA, 20 nt, Artificial Sequence
  spacer sequence CTCN PAM
aagcauugcaucauccuggu

SEQ ID NO: 9570 - RNA, 20 nt, Artificial Sequence
  spacer sequence CTCN PAM
ggcaccugcauuuguuuuuc

SEQ ID NO: 9571 - RNA, 20 nt, Artificial Sequence
  spacer sequence CTCN PAM
gcccagcacacuaagccuau

SEQ ID NO: 9572 - RNA, 20 nt, Artificial Sequence
  spacer sequence CTCN PAM
gcucugcccagcacacuaag

SEQ ID NO: 9573 - RNA, 20 nt, Artificial Sequence
  spacer sequence CTCN PAM
gcucagcucugcccagcaca

SEQ ID NO: 9574 - RNA, 20 nt, Artificial Sequence
  spacer sequence CTCN PAM
accuacucacauaagaucag

SEQ ID NO: 9575 - RNA, 20 nt, Artificial Sequence
  spacer sequence CTCN PAM
cauaagaucaguaaagagaa

SEQ ID NO: 9576 - RNA, 20 nt, Artificial Sequence
  spacer sequence CTCN PAM
uuacugaucuuaugugagua

SEQ ID NO: 9577 - RNA, 20 nt, Artificial Sequence
  spacer sequence CTCN PAM
ucugccugcuuccuucucuu

SEQ ID NO: 9578 - RNA, 20 nt, Artificial Sequence
  spacer sequence CTCN PAM
ccuugucaccucaucugccu

SEQ ID NO: 9579 - RNA, 20 nt, Artificial Sequence
  spacer sequence CTCN PAM
cugguuucuccccuugucac

SEQ ID NO: 9580 - RNA, 20 nt, Artificial Sequence
  spacer sequence CTCN PAM
gaggagcuagagacuugugg

SEQ ID NO: 9581 - RNA, 20 nt, Artificial Sequence
  spacer sequence CTCN PAM
gagaacuggcagucuggcug

SEQ ID NO: 9582 - RNA, 20 nt, Artificial Sequence
  spacer sequence CTCN PAM
ucagagaacuggcagucugg

SEQ ID NO: 9583 - RNA, 20 nt, Artificial Sequence
  spacer sequence CTCN PAM
agcuccucagagaacuggca

SEQ ID NO: 9584 - RNA, 20 nt, Artificial Sequence
  spacer sequence CTCN PAM
cugauggauguacuaauaug

SEQ ID NO: 9585 - RNA, 20 nt, Artificial Sequence
  spacer sequence CTCN PAM
gauggauguacuaauaugua

SEQ ID NO: 9586 - RNA, 20 nt, Artificial Sequence
  spacer sequence CTCN PAM
gaugacuguccaacucaucc

SEQ ID NO: 9587 - RNA, 20 nt, Artificial Sequence
  spacer sequence CTCN PAM
uccagaaacuacguuugucu

SEQ ID NO: 9588 - RNA, 20 nt, Artificial Sequence
  spacer sequence CTCN PAM
ucaaugcccccccaccaccc

SEQ ID NO: 9589 - RNA, 20 nt, Artificial Sequence
  spacer sequence CTCN PAM
caucaaugcccccccaccac

SEQ ID NO: 9590 - RNA, 20 nt, Artificial Sequence
  spacer sequence CTCN PAM
cuggcuuuucugggagauca

SEQ ID NO: 9591 - RNA, 20 nt, Artificial Sequence
  spacer sequence CTCN PAM
cagaaaagccagcgagaaau

SEQ ID NO: 9592 - RNA, 20 nt, Artificial Sequence
  spacer sequence CTCN PAM
ggucucggggcccaagccaa

SEQ ID NO: 9593 - RNA, 20 nt, Artificial Sequence
  spacer sequence CTCN PAM
gggcccaagccaaagagcug

SEQ ID NO: 9594 - RNA, 20 nt, Artificial Sequence
  spacer sequence CTCN PAM
uuggcuugggccccgagacc

SEQ ID NO: 9595 - RNA, 20 nt, Artificial Sequence
  spacer sequence CTCN PAM
agcucuuuggcuugggcccc

SEQ ID NO: 9596 - RNA, 20 nt, Artificial Sequence
  spacer sequence CTCN PAM
accaggccuuagguucugug

SEQ ID NO: 9597 - RNA, 20 nt, Artificial Sequence
  spacer sequence CTCN PAM
ccuugcacauggcugucuug

SEQ ID NO: 9598 - RNA, 20 nt, Artificial Sequence
  spacer sequence CTCN PAM
cacagagcugcaggggugug

SEQ ID NO: 9599 - RNA, 20 nt, Artificial Sequence
  spacer sequence CTCN PAM
gugggagugacggaagggcg

SEQ ID NO: 9600 - RNA, 20 nt, Artificial Sequence
  spacer sequence CTCN PAM
agcacuguggcccagaaggg

SEQ ID NO: 9601 - RNA, 20 nt, Artificial Sequence
  spacer sequence CTCN PAM
ugaaggaauaaggcacgaug

SEQ ID NO: 9602 - RNA, 20 nt, Artificial Sequence
  spacer sequence CTCN PAM
ugggaaagguugcacauucu

SEQ ID NO: 9603 - RNA, 20 nt, Artificial Sequence
  spacer sequence CTCN PAM
ucuaagugauauuucuuccc

SEQ ID NO: 9604 - RNA, 20 nt, Artificial Sequence
  spacer sequence CTCN PAM
aagugauauuucuucccagg

SEQ ID NO: 9605 - RNA, 20 nt, Artificial Sequence
  spacer sequence CTCN PAM
uuaucuauaaaauggggcua

SEQ ID NO: 9606 - RNA, 20 nt, Artificial Sequence
  spacer sequence CTCN PAM
ggcucuuuaucuauaaaaug

SEQ ID NO: 9607 - RNA, 20 nt, Artificial Sequence
  spacer sequence CTCN PAM
uguguagcugacuuuagagu

SEQ ID NO: 9608 - RNA, 20 nt, Artificial Sequence
  spacer sequence CTCN PAM
aaagucagcuacacaugagu

SEQ ID NO: 9609 - RNA, 20 nt, Artificial Sequence
  spacer sequence CTCN PAM
uucaacgucccacuuucuca

SEQ ID NO: 9610 - RNA, 20 nt, Artificial Sequence
  spacer sequence CTCN PAM
agacaguguuugccacgggc

SEQ ID NO: 9611 - RNA, 20 nt, Artificial Sequence
  spacer sequence CTCN PAM
aaccccucauaccuccccac

SEQ ID NO: 9612 - RNA, 20 nt, Artificial Sequence
  spacer sequence CTCN PAM
uaccuccccaccaaccccau

SEQ ID NO: 9613 - RNA, 20 nt, Artificial Sequence
  spacer sequence CTCN PAM
ccaccaaccccaugcaggug

SEQ ID NO: 9614 - RNA, 20 nt, Artificial Sequence
  spacer sequence CTCN PAM
cugacaccugcaugggguug

SEQ ID NO: 9615 - RNA, 20 nt, Artificial Sequence
  spacer sequence CTCN PAM
ccggaccaaagggguggaca

SEQ ID NO: 9616 - RNA, 20 nt, Artificial Sequence
  spacer sequence CTCN PAM
accuugaguggagaggcugc

SEQ ID NO: 9617 - RNA, 20 nt, Artificial Sequence
  spacer sequence CTCN PAM
agguugagcgguuuccuuca

SEQ ID NO: 9618 - RNA, 20 nt, Artificial Sequence
  spacer sequence CTCN PAM
acucaagguugagcgguuuc

SEQ ID NO: 9619 - RNA, 20 nt, Artificial Sequence
  spacer sequence CTCN PAM
ccacucaagguugagcgguu

SEQ ID NO: 9620 - RNA, 20 nt, Artificial Sequence
  spacer sequence CTCN PAM
gggcagcaccugggccacag

SEQ ID NO: 9621 - RNA, 20 nt, Artificial Sequence
  spacer sequence CTCN PAM
uuccacaugcuguggcccag

SEQ ID NO: 9622 - RNA, 20 nt, Artificial Sequence
  spacer sequence CTCN PAM
gccaucugucuucucuuccu

SEQ ID NO: 9623 - RNA, 20 nt, Artificial Sequence
  spacer sequence CTCN PAM
uccuccuaauccauaagcac

SEQ ID NO: 9624 - RNA, 20 nt, Artificial Sequence
  spacer sequence CTCN PAM
uaauccauaagcaccagacc

SEQ ID NO: 9625 - RNA, 20 nt, Artificial Sequence
  spacer sequence CTCN PAM
agccccaugugcagcuccgg

SEQ ID NO: 9626 - RNA, 20 nt, Artificial Sequence
  spacer sequence CTCN PAM
ggaagcugcuagaccucaag

SEQ ID NO: 9627 - RNA, 20 nt, Artificial Sequence
  spacer sequence CTCN PAM
agcaggacuaagauucggag

SEQ ID NO: 9628 - RNA, 20 nt, Artificial Sequence
  spacer sequence CTCN PAM
gaaucuuaguccugcuugag

SEQ ID NO: 9629 - RNA, 20 nt, Artificial Sequence
  spacer sequence CTCN PAM
ccgaaucuuaguccugcuug

SEQ ID NO: 9630 - RNA, 20 nt, Artificial Sequence
  spacer sequence CTCN PAM
cuccgaaucuuaguccugcu

SEQ ID NO: 9631 - RNA, 20 nt, Artificial Sequence
  spacer sequence CTCN PAM
ucccaggcaggccagcccag

SEQ ID NO: 9632 - RNA, 20 nt, Artificial Sequence
  spacer sequence CTCN PAM
caggcaggccagcccaggug

SEQ ID NO: 9633 - RNA, 20 nt, Artificial Sequence
  spacer sequence CTCN PAM
ccugggcuggccugccuggg

SEQ ID NO: 9634 - RNA, 20 nt, Artificial Sequence
  spacer sequence CTCN PAM
agccaggcacucaccccacu

SEQ ID NO: 9635 - RNA, 20 nt, Artificial Sequence
  spacer sequence CTCN PAM
ccccacugccaggcuguuua

SEQ ID NO: 9636 - RNA, 20 nt, Artificial Sequence
  spacer sequence CTCN PAM
uagcugguguuugucuccug

SEQ ID NO: 9637 - RNA, 20 nt, Artificial Sequence
  spacer sequence CTCN PAM
ugucugcucuacuguagcuc

SEQ ID NO: 9638 - RNA, 20 nt, Artificial Sequence
  spacer sequence CTCN PAM
acuguagcucccucccuccu

SEQ ID NO: 9639 - RNA, 20 nt, Artificial Sequence
  spacer sequence CTCN PAM
cucccuccucuccuccuuuc

SEQ ID NO: 9640 - RNA, 20 nt, Artificial Sequence
  spacer sequence CTCN PAM
cuccucuccuccuuucgguc

SEQ ID NO: 9641 - RNA, 20 nt, Artificial Sequence
  spacer sequence CTCN PAM
ucuccuccuuucgguccucu

SEQ ID NO: 9642 - RNA, 20 nt, Artificial Sequence
  spacer sequence CTCN PAM
ccuccuuucgguccucugcc

SEQ ID NO: 9643 - RNA, 20 nt, Artificial Sequence
  spacer sequence CTCN PAM
uccuuucgguccucugccca

SEQ ID NO: 9644 - RNA, 20 nt, Artificial Sequence
  spacer sequence CTCN PAM
uuucgguccucugcccaggc

SEQ ID NO: 9645 - RNA, 20 nt, Artificial Sequence
  spacer sequence CTCN PAM
gcccaggccugccugaggcu

SEQ ID NO: 9646 - RNA, 20 nt, Artificial Sequence
  spacer sequence CTCN PAM
ggcaggccugggcagaggac

SEQ ID NO: 9647 - RNA, 20 nt, Artificial Sequence
  spacer sequence CTCN PAM
cuggcaggcagccucaggca

SEQ ID NO: 9648 - RNA, 20 nt, Artificial Sequence
  spacer sequence CTCN PAM
gugcccagggcaaagcccug

SEQ ID NO: 9649 - RNA, 20 nt, Artificial Sequence
  spacer sequence CTCN PAM
gggcacccuagcccucagug

SEQ ID NO: 9650 - RNA, 20 nt, Artificial Sequence
  spacer sequence CTCN PAM
cacacagguccugugcugcc

SEQ ID NO: 9651 - RNA, 20 nt, Artificial Sequence
  spacer sequence CTCN PAM
cacacacagguccugugcug

SEQ ID NO: 9652 - RNA, 20 nt, Artificial Sequence
  spacer sequence CTCN PAM
agaccaccgcucucacacac

SEQ ID NO: 9653 - RNA, 20 nt, Artificial Sequence
  spacer sequence CTCN PAM
caagaccaccgcucucacac

SEQ ID NO: 9654 - RNA, 20 nt, Artificial Sequence
  spacer sequence CTCN PAM
ccgccugggcuugacuuguc

SEQ ID NO: 9655 - RNA, 20 nt, Artificial Sequence
  spacer sequence CTCN PAM
ccugcccuaucccuaccugc

SEQ ID NO: 9656 - RNA, 20 nt, Artificial Sequence
  spacer sequence CTCN PAM
gcuuccccgccaccauuaac

SEQ ID NO: 9657 - RNA, 20 nt, Artificial Sequence
  spacer sequence CTCN PAM
gugggcugacagaugugccu

SEQ ID NO: 9658 - RNA, 20 nt, Artificial Sequence
  spacer sequence CTCN PAM
gaaggcacaucugucagccc

SEQ ID NO: 9659 - RNA, 20 nt, Artificial Sequence
  spacer sequence CTCN PAM
cugcccuucucugaaggcac

SEQ ID NO: 9660 - RNA, 20 nt, Artificial Sequence
  spacer sequence CTCN PAM
ggccaggcccccagcugcuc

SEQ ID NO: 9661 - RNA, 20 nt, Artificial Sequence
  spacer sequence CTCN PAM
gauguaaguuccugcuggga

SEQ ID NO: 9662 - RNA, 20 nt, Artificial Sequence
  spacer sequence CTCN PAM
uggguaggcugccugcucug

SEQ ID NO: 9663 - RNA, 20 nt, Artificial Sequence
  spacer sequence CTCN PAM
uuccuucccuggcucuuggg

SEQ ID NO: 9664 - RNA, 20 nt, Artificial Sequence
  spacer sequence CTCN PAM
ccuuccuucccuggcucuug

SEQ ID NO: 9665 - RNA, 20 nt, Artificial Sequence
  spacer sequence CTCN PAM
ggggcucuccuuccuucccu

SEQ ID NO: 9666 - RNA, 20 nt, Artificial Sequence
  spacer sequence CTCN PAM
ucaggacaggguucagagcu

SEQ ID NO: 9667 - RNA, 20 nt, Artificial Sequence
  spacer sequence CTCN PAM
ggacaggguucagagcuagg

SEQ ID NO: 9668 - RNA, 20 nt, Artificial Sequence
  spacer sequence CTCN PAM
gaacccuguccugaggaguu

SEQ ID NO: 9669 - RNA, 20 nt, Artificial Sequence
  spacer sequence CTCN PAM
guguagcagccaccagccua

SEQ ID NO: 9670 - RNA, 20 nt, Artificial Sequence
  spacer sequence CTCN PAM
accaguuaagguauaagaca

SEQ ID NO: 9671 - RNA, 20 nt, Artificial Sequence
  spacer sequence CTCN PAM
cagucggggcaccucacuuc

SEQ ID NO: 9672 - RNA, 20 nt, Artificial Sequence
  spacer sequence CTCN PAM
cuucaagccuugguggauag

SEQ ID NO: 9673 - RNA, 20 nt, Artificial Sequence
  spacer sequence CTCN PAM
ggcucccaaguuagacagau

SEQ ID NO: 9674 - RNA, 20 nt, Artificial Sequence
  spacer sequence CTCN PAM
caaguuagacagaugagcug

SEQ ID NO: 9675 - RNA, 20 nt, Artificial Sequence
  spacer sequence CTCN PAM
ucugucuaacuugggagccu

SEQ ID NO: 9676 - RNA, 20 nt, Artificial Sequence
  spacer sequence CTCN PAM
cagacacacagccaggaaau

SEQ ID NO: 9677 - RNA, 20 nt, Artificial Sequence
  spacer sequence CTCN PAM
uuaaccucuccaagccucag

SEQ ID NO: 9678 - RNA, 20 nt, Artificial Sequence
  spacer sequence CTCN PAM
ccaagccucaguuucuucac

SEQ ID NO: 9679 - RNA, 20 nt, Artificial Sequence
  spacer sequence CTCN PAM
aagccucaguuucuucacug

SEQ ID NO: 9680 - RNA, 20 nt, Artificial Sequence
  spacer sequence CTCN PAM
guuucuucacugguaaaaug

SEQ ID NO: 9681 - RNA, 20 nt, Artificial Sequence
  spacer sequence CTCN PAM
uuuaacuaguuccaucagca

SEQ ID NO: 9682 - RNA, 20 nt, Artificial Sequence
  spacer sequence CTCN PAM
ucuguaaaaugggagaaccc

SEQ ID NO: 9683 - RNA, 20 nt, Artificial Sequence
  spacer sequence CTCN PAM
guaaaaugggagaacccuga

SEQ ID NO: 9684 - RNA, 20 nt, Artificial Sequence
  spacer sequence CTCN PAM
cauuuuacagaggaggaugc

SEQ ID NO: 9685 - RNA, 20 nt, Artificial Sequence
  spacer sequence CTCN PAM
gccgaccucaugguugacuc

SEQ ID NO: 9686 - RNA, 20 nt, Artificial Sequence
  spacer sequence CTCN PAM
ugguugacucacucagcaac

SEQ ID NO: 9687 - RNA, 20 nt, Artificial Sequence
  spacer sequence CTCN PAM
cucagcaacagaggucucca

SEQ ID NO: 9688 - RNA, 20 nt, Artificial Sequence
  spacer sequence CTCN PAM
gcaacagaggucuccacagg

SEQ ID NO: 9689 - RNA, 20 nt, Artificial Sequence
  spacer sequence CTCN PAM
guugcugagugagucaacca

SEQ ID NO: 9690 - RNA, 20 nt, Artificial Sequence
  spacer sequence CTCN PAM
acaggagcccugcccacaug

SEQ ID NO: 9691 - RNA, 20 nt, Artificial Sequence
  spacer sequence CTCN PAM
uguggagaccucuguugcug

SEQ ID NO: 9692 - RNA, 20 nt, Artificial Sequence
  spacer sequence CTCN PAM
ugugggcagggcuccugugg

SEQ ID NO: 9693 - RNA, 20 nt, Artificial Sequence
  spacer sequence CTCN PAM
uuccauuuuguucuggcaag

SEQ ID NO: 9694 - RNA, 20 nt, Artificial Sequence
  spacer sequence CTCN PAM
uucccugcccucaaggagcu

SEQ ID NO: 9695 - RNA, 20 nt, Artificial Sequence
  spacer sequence CTCN PAM
aggagcucacaguccagugg

SEQ ID NO: 9696 - RNA, 20 nt, Artificial Sequence
  spacer sequence CTCN PAM
uugagggcagggaaugaggc

SEQ ID NO: 9697 - RNA, 20 nt, Artificial Sequence
  spacer sequence CTCN PAM
caguccaguggcucugucuu

SEQ ID NO: 9698 - RNA, 20 nt, Artificial Sequence
  spacer sequence CTCN PAM
gucuuuaauaucuauaagag

SEQ ID NO: 9699 - RNA, 20 nt, Artificial Sequence
  spacer sequence CTCN PAM
uauagauauuaaagacagag

SEQ ID NO: 9700 - RNA, 20 nt, Artificial Sequence
  spacer sequence CTCN PAM
uguaauaugauuaaucacuu

SEQ ID NO: 9701 - RNA, 20 nt, Artificial Sequence
  spacer sequence CTCN PAM
uucgggugcuucccugagug

SEQ ID NO: 9702 - RNA, 20 nt, Artificial Sequence
  spacer sequence CTCN PAM
gggaagcacccgaaagagaa

SEQ ID NO: 9703 - RNA, 20 nt, Artificial Sequence
  spacer sequence CTCN PAM
ugccacucagggaagcaccc

SEQ ID NO: 9704 - RNA, 20 nt, Artificial Sequence
  spacer sequence CTCN PAM
aaaaaaaaaaaaaaaaaaaa

SEQ ID NO: 9705 - RNA, 20 nt, Artificial Sequence
  spacer sequence CTCN PAM
gucucaaaaaaaaaaaaaaa

SEQ ID NO: 9706 - RNA, 20 nt, Artificial Sequence
  spacer sequence CTCN PAM
uguugcccaggcuggggugc

SEQ ID NO: 9707 - RNA, 20 nt, Artificial Sequence
  spacer sequence CTCN PAM
gcucaccaccucugccuccu

SEQ ID NO: 9708 - RNA, 20 nt, Artificial Sequence
  spacer sequence CTCN PAM
ccaccucugccuccuggguu

SEQ ID NO: 9709 - RNA, 20 nt, Artificial Sequence
  spacer sequence CTCN PAM
gccuccuggguucaagcaau

SEQ ID NO: 9710 - RNA, 20 nt, Artificial Sequence
  spacer sequence CTCN PAM
uggguucaagcaauucuccu

SEQ ID NO: 9711 - RNA, 20 nt, Artificial Sequence
  spacer sequence CTCN PAM
ucccucagccuccugaguag

SEQ ID NO: 9712 - RNA, 20 nt, Artificial Sequence
  spacer sequence CTCN PAM
cucagccuccugaguagcug

SEQ ID NO: 9713 - RNA, 20 nt, Artificial Sequence
  spacer sequence CTCN PAM
gccuccugaguagcugggau

SEQ ID NO: 9714 - RNA, 20 nt, Artificial Sequence
  spacer sequence CTCN PAM
ugaguagcugggauuacagg

SEQ ID NO: 9715 - RNA, 20 nt, Artificial Sequence
  spacer sequence CTCN PAM
ggaggcugagggaggagaau

SEQ ID NO: 9716 - RNA, 20 nt, Artificial Sequence
  spacer sequence CTCN PAM
auuaaaaauauaaacuuagc

SEQ ID NO: 9717 - RNA, 20 nt, Artificial Sequence
  spacer sequence CTCN PAM
ucucuauuaaaaauauaaac

SEQ ID NO: 9718 - RNA, 20 nt, Artificial Sequence
  spacer sequence CTCN PAM
auguuggucaggcuggucuc

SEQ ID NO: 9719 - RNA, 20 nt, Artificial Sequence
  spacer sequence CTCN PAM
aacucuugaccucaggugau

SEQ ID NO: 9720 - RNA, 20 nt, Artificial Sequence
  spacer sequence CTCN PAM
ugaccucaggugaucuaccc

SEQ ID NO: 9721 - RNA, 20 nt, Artificial Sequence
  spacer sequence CTCN PAM
ggugaucuacccaccucggc

SEQ ID NO: 9722 - RNA, 20 nt, Artificial Sequence
  spacer sequence CTCN PAM
gccucccaaagugcuggaau

SEQ ID NO: 9723 - RNA, 20 nt, Artificial Sequence
  spacer sequence CTCN PAM
caaagugcuggaauuacaga

SEQ ID NO: 9724 - RNA, 20 nt, Artificial Sequence
  spacer sequence CTCN PAM
cgucuguaauuccagcacuu

SEQ ID NO: 9725 - RNA, 20 nt, Artificial Sequence
  spacer sequence CTCN PAM
ucucacauaaaaauuuaaga

SEQ ID NO: 9726 - RNA, 20 nt, Artificial Sequence
  spacer sequence CTCN PAM
cauaaaaauuuaagacggga

SEQ ID NO: 9727 - RNA, 20 nt, Artificial Sequence
  spacer sequence CTCN PAM
gaaugcaucuuccuguuuuc

SEQ ID NO: 9728 - RNA, 20 nt, Artificial Sequence
  spacer sequence CTCN PAM
gccucucuacauuccaaaac

SEQ ID NO: 9729 - RNA, 20 nt, Artificial Sequence
  spacer sequence CTCN PAM
cuacauuccaaaacagccuu

SEQ ID NO: 9730 - RNA, 20 nt, Artificial Sequence
  spacer sequence CTCN PAM
acauuccaaaacagccuuuu

SEQ ID NO: 9731 - RNA, 20 nt, Artificial Sequence
  spacer sequence CTCN PAM
ggcuaacagagcuucaggga

SEQ ID NO: 9732 - RNA, 20 nt, Artificial Sequence
  spacer sequence CTCN PAM
guuagccugagauuucaccu

SEQ ID NO: 9733 - RNA, 20 nt, Artificial Sequence
  spacer sequence CTCN PAM
cugaagcucuguuagccuga

SEQ ID NO: 9734 - RNA, 20 nt, Artificial Sequence
  spacer sequence CTCN PAM
cuccacagagaagcuguacc

SEQ ID NO: 9735 - RNA, 20 nt, Artificial Sequence
  spacer sequence CTCN PAM
acagagaagcuguaccacca

SEQ ID NO: 9736 - RNA, 20 nt, Artificial Sequence
  spacer sequence CTCN PAM
guggagugaggcauauuuuu

SEQ ID NO: 9737 - RNA, 20 nt, Artificial Sequence
  spacer sequence CTCN PAM
guuuuccaggacuucuggug

SEQ ID NO: 9738 - RNA, 20 nt, Artificial Sequence
  spacer sequence CTCN PAM
caguuuuccaggacuucugg

SEQ ID NO: 9739 - RNA, 20 nt, Artificial Sequence
  spacer sequence CTCN PAM
agacuaucagaaugauauga

SEQ ID NO: 9740 - RNA, 20 nt, Artificial Sequence
  spacer sequence CTCN PAM
gauuguugcuuugauaagua

SEQ ID NO: 9741 - RNA, 20 nt, Artificial Sequence
  spacer sequence CTCN PAM
aaaugagcuuacaguuuaug

SEQ ID NO: 9742 - RNA, 20 nt, Artificial Sequence
  spacer sequence CTCN PAM
uuuggagggaccugaucucu

SEQ ID NO: 9743 - RNA, 20 nt, Artificial Sequence
  spacer sequence CTCN PAM
gcaaaucugcuauccaucau

SEQ ID NO: 9744 - RNA, 20 nt, Artificial Sequence
  spacer sequence CTCN PAM
aaagucagggaguagguaaa

SEQ ID NO: 9745 - RNA, 20 nt, Artificial Sequence
  spacer sequence CTCN PAM
cugacuuuggagcucagcaa

SEQ ID NO: 9746 - RNA, 20 nt, Artificial Sequence
  spacer sequence CTCN PAM
cuccuggcucuccucuacau

SEQ ID NO: 9747 - RNA, 20 nt, Artificial Sequence
  spacer sequence CTCN PAM
uggcucuccucuacauucug

SEQ ID NO: 9748 - RNA, 20 nt, Artificial Sequence
  spacer sequence CTCN PAM
ccucuacauucugugagcaa

SEQ ID NO: 9749 - RNA, 20 nt, Artificial Sequence
  spacer sequence CTCN PAM
ucuacauucugugagcaaac

SEQ ID NO: 9750 - RNA, 20 nt, Artificial Sequence
  spacer sequence CTCN PAM
acauucugugagcaaacgga

SEQ ID NO: 9751 - RNA, 20 nt, Artificial Sequence
  spacer sequence CTCN PAM
cagaauguagaggagagcca

SEQ ID NO: 9752 - RNA, 20 nt, Artificial Sequence
  spacer sequence CTCN PAM
gccuaauaaaacugcacaga

SEQ ID NO: 9753 - RNA, 20 nt, Artificial Sequence
  spacer sequence CTCN PAM
ucugaaucugaugaagaagu

SEQ ID NO: 9754 - RNA, 20 nt, Artificial Sequence
  spacer sequence CTCN PAM
cuagcacagauuugagcucu

SEQ ID NO: 9755 - RNA, 20 nt, Artificial Sequence
  spacer sequence CTCN PAM
aaucugugcuagcgagaaac

SEQ ID NO: 9756 - RNA, 20 nt, Artificial Sequence
  spacer sequence CTCN PAM
gccaucacacacuuuguaca

SEQ ID NO: 9757 - RNA, 20 nt, Artificial Sequence
  spacer sequence CTCN PAM
gguauugcuccuaaagaaag

SEQ ID NO: 9758 - RNA, 20 nt, Artificial Sequence
  spacer sequence CTCN PAM
uaaagaaagagccagcuucc

SEQ ID NO: 9759 - RNA, 20 nt, Artificial Sequence
  spacer sequence CTCN PAM
uucuuuaggagcaauaccug

SEQ ID NO: 9760 - RNA, 20 nt, Artificial Sequence
  spacer sequence CTCN PAM
uaucuuccuccaacauccaa

SEQ ID NO: 9761 - RNA, 20 nt, Artificial Sequence
  spacer sequence CTCN PAM
aacauccaaaagcaguguuc

SEQ ID NO: 9762 - RNA, 20 nt, Artificial Sequence
  spacer sequence CTCN PAM
uuucacugguauuucuuaaa

SEQ ID NO: 9763 - RNA, 20 nt, Artificial Sequence
  spacer sequence CTCN PAM
uuguguuguaauguucuuga

SEQ ID NO: 9764 - RNA, 20 nt, Artificial Sequence
  spacer sequence CTCN PAM
gaugaugauugaaaacaguu

SEQ ID NO: 9765 - RNA, 20 nt, Artificial Sequence
  spacer sequence CTCN PAM
gaucaugguagcacaguaga

SEQ ID NO: 9766 - RNA, 20 nt, Artificial Sequence
  spacer sequence CTCN PAM
acugugcuaccaugaucaga

SEQ ID NO: 9767 - RNA, 20 nt, Artificial Sequence
  spacer sequence CTCN PAM
uucugcucuacugugcuacc

SEQ ID NO: 9768 - RNA, 20 nt, Artificial Sequence
  spacer sequence CTCN PAM
auuggugaucaaaagaaaua

SEQ ID NO: 9769 - RNA, 20 nt, Artificial Sequence
  spacer sequence CTCN PAM
ccuggucacauaguuucugg

SEQ ID NO: 9770 - RNA, 20 nt, Artificial Sequence
  spacer sequence CTCN PAM
aagagaaucaagucucgagu

SEQ ID NO: 9771 - RNA, 20 nt, Artificial Sequence
  spacer sequence CTCN PAM
uagagauuaaguaccucccc

SEQ ID NO: 9772 - RNA, 20 nt, Artificial Sequence
  spacer sequence CTCN PAM
aguggguaaaaugagcuggg

SEQ ID NO: 9773 - RNA, 20 nt, Artificial Sequence
  spacer sequence CTCN PAM
agacuugauucucuuagaga

SEQ ID NO: 9774 - RNA, 20 nt, Artificial Sequence
  spacer sequence CTCN PAM
uuuuacccacucgagacuug

SEQ ID NO: 9775 - RNA, 20 nt, Artificial Sequence
  spacer sequence CTCN PAM
uuccccagcucauuuuaccc

SEQ ID NO: 9776 - RNA, 20 nt, Artificial Sequence
  spacer sequence CTCN PAM
cugguucacuccuuccccag

SEQ ID NO: 9777 - RNA, 20 nt, Artificial Sequence
  spacer sequence CTCN PAM
cagaagacacagccagacuu

SEQ ID NO: 9778 - RNA, 20 nt, Artificial Sequence
  spacer sequence CTCN PAM
uguccaaacaccuccuuguc

SEQ ID NO: 9779 - RNA, 20 nt, Artificial Sequence
  spacer sequence CTCN PAM
uugucuuuuaaggccugggc

SEQ ID NO: 9780 - RNA, 20 nt, Artificial Sequence
  spacer sequence CTCN PAM
aagccaguagccaucccccu

SEQ ID NO: 9781 - RNA, 20 nt, Artificial Sequence
  spacer sequence CTCN PAM
gcauuuguccuggcaauggg

SEQ ID NO: 9782 - RNA, 20 nt, Artificial Sequence
  spacer sequence CTCN PAM
cauugccaggacaaaugcag

SEQ ID NO: 9783 - RNA, 20 nt, Artificial Sequence
  spacer sequence CTCN PAM
uuccugcucccauugccagg

SEQ ID NO: 9784 - RNA, 20 nt, Artificial Sequence
  spacer sequence CTCN PAM
aaaccuggucacuccuaguc

SEQ ID NO: 9785 - RNA, 20 nt, Artificial Sequence
  spacer sequence CTCN PAM
uagucccaagauggagaagc

SEQ ID NO: 9786 - RNA, 20 nt, Artificial Sequence
  spacer sequence CTCN PAM
aucuugggacuaggagugac

SEQ ID NO: 9787 - RNA, 20 nt, Artificial Sequence
  spacer sequence CTCN PAM
ggaggcucugaccaggugga

SEQ ID NO: 9788 - RNA, 20 nt, Artificial Sequence
  spacer sequence CTCN PAM
ugaggcugcagaauggggcu

SEQ ID NO: 9789 - RNA, 20 nt, Artificial Sequence
  spacer sequence CTCN PAM
gaccagguggaaagccagaa

SEQ ID NO: 9790 - RNA, 20 nt, Artificial Sequence
  spacer sequence CTCN PAM
ugguuggaccccauucuggc

SEQ ID NO: 9791 - RNA, 20 nt, Artificial Sequence
  spacer sequence CTCN PAM
uugcagccaccugccuuuuc

SEQ ID NO: 9792 - RNA, 20 nt, Artificial Sequence
  spacer sequence CTCN PAM
cuucuccaggcauugugacu

SEQ ID NO: 9793 - RNA, 20 nt, Artificial Sequence
  spacer sequence CTCN PAM
aggcauugugacuuuuuauu

SEQ ID NO: 9794 - RNA, 20 nt, Artificial Sequence
  spacer sequence CTCN PAM
uggaaugccuguccaggcug

SEQ ID NO: 9795 - RNA, 20 nt, Artificial Sequence
  spacer sequence CTCN PAM
gagcacugcaacaauuuucu

SEQ ID NO: 9796 - RNA, 20 nt, Artificial Sequence
  spacer sequence CTCN PAM
gaggaagcaauagccuacug

SEQ ID NO: 9797 - RNA, 20 nt, Artificial Sequence
  spacer sequence CTCN PAM
ggacccucuccuccaccuau

SEQ ID NO: 9798 - RNA, 20 nt, Artificial Sequence
  spacer sequence CTCN PAM
ccuccaccuauucacagaug

SEQ ID NO: 9799 - RNA, 20 nt, Artificial Sequence
  spacer sequence CTCN PAM
uccaccuauucacagauggg

SEQ ID NO: 9800 - RNA, 20 nt, Artificial Sequence
  spacer sequence CTCN PAM
accuauucacagauggggca

SEQ ID NO: 9801 - RNA, 20 nt, Artificial Sequence
  spacer sequence CTCN PAM
cuccuauccauuagauugcc

SEQ ID NO: 9802 - RNA, 20 nt, Artificial Sequence
  spacer sequence CTCN PAM
uauccauuagauugcccaaa

SEQ ID NO: 9803 - RNA, 20 nt, Artificial Sequence
  spacer sequence CTCN PAM
ggucugagugcagaccaagc

SEQ ID NO: 9804 - RNA, 20 nt, Artificial Sequence
  spacer sequence CTCN PAM
gaccugagcgccacacauua

SEQ ID NO: 9805 - RNA, 20 nt, Artificial Sequence
  spacer sequence CTCN PAM
caauaccaguggcucuuuca

SEQ ID NO: 9806 - RNA, 20 nt, Artificial Sequence
  spacer sequence CTCN PAM
uucaggcuuacaaagccuug

SEQ ID NO: 9807 - RNA, 20 nt, Artificial Sequence
  spacer sequence CTCN PAM
guccuggguaggaacugcug

SEQ ID NO: 9808 - RNA, 20 nt, Artificial Sequence
  spacer sequence CTCN PAM
gcaaacacccagauggcccu

SEQ ID NO: 9809 - RNA, 20 nt, Artificial Sequence
  spacer sequence CTCN PAM
uggaaaccuauagcugccag

SEQ ID NO: 9810 - RNA, 20 nt, Artificial Sequence
  spacer sequence CTCN PAM
caaaaugucacauuucccug

SEQ ID NO: 9811 - RNA, 20 nt, Artificial Sequence
  spacer sequence CTCN PAM
uaaaucuucuaggcggguua

SEQ ID NO: 9812 - RNA, 20 nt, Artificial Sequence
  spacer sequence CTCN PAM
gacaaaagauccagaauauu

SEQ ID NO: 9813 - RNA, 20 nt, Artificial Sequence
  spacer sequence CTCN PAM
ugaaaauugguuauuggcug

SEQ ID NO: 9814 - RNA, 20 nt, Artificial Sequence
  spacer sequence CTCN PAM
uuccuuuccugcauuucuug

SEQ ID NO: 9815 - RNA, 20 nt, Artificial Sequence
  spacer sequence CTCN PAM
gcccccucguuccuuuccug

SEQ ID NO: 9816 - RNA, 20 nt, Artificial Sequence
  spacer sequence CTCN PAM
cugcccccucguuccuuucc

SEQ ID NO: 9817 - RNA, 20 nt, Artificial Sequence
  spacer sequence CTCN PAM
gugucuuucauucccucucu

SEQ ID NO: 9818 - RNA, 20 nt, Artificial Sequence
  spacer sequence CTCN PAM
aagccauguaggcuuccagc

SEQ ID NO: 9819 - RNA, 20 nt, Artificial Sequence
  spacer sequence CTCN PAM
gaaugugccgcucgaagcca

SEQ ID NO: 9820 - RNA, 20 nt, Artificial Sequence
  spacer sequence CTCN PAM
gaagaguaccacucagccga

SEQ ID NO: 9821 - RNA, 20 nt, Artificial Sequence
  spacer sequence CTCN PAM
ucagaguucucagaaugugc

SEQ ID NO: 9822 - RNA, 20 nt, Artificial Sequence
  spacer sequence CTCN PAM
gccgacacugcccccaugac

SEQ ID NO: 9823 - RNA, 20 nt, Artificial Sequence
  spacer sequence CTCN PAM
ucuuugacucacacuugccu

SEQ ID NO: 9824 - RNA, 20 nt, Artificial Sequence
  spacer sequence CTCN PAM
uugacucacacuugccuggc

SEQ ID NO: 9825 - RNA, 20 nt, Artificial Sequence
  spacer sequence CTCN PAM
cacuugccuggcaggacucc

SEQ ID NO: 9826 - RNA, 20 nt, Artificial Sequence
  spacer sequence CTCN PAM
ccaaacagaacagagaugcu

SEQ ID NO: 9827 - RNA, 20 nt, Artificial Sequence
  spacer sequence CTCN PAM
guucuguuuggggaguccug

SEQ ID NO: 9828 - RNA, 20 nt, Artificial Sequence
  spacer sequence CTCN PAM
gccgggcacaagagagcagg

SEQ ID NO: 9829 - RNA, 20 nt, Artificial Sequence
  spacer sequence CTCN PAM
ugugcccggcugagcaucuc

SEQ ID NO: 9830 - RNA, 20 nt, Artificial Sequence
  spacer sequence CTCN PAM
cuugugcccggcugagcauc

SEQ ID NO: 9831 - RNA, 20 nt, Artificial Sequence
  spacer sequence CTCN PAM
ugcugcacugugguuucccc

SEQ ID NO: 9832 - RNA, 20 nt, Artificial Sequence
  spacer sequence CTCN PAM
gccuuuucaguggguggcug

SEQ ID NO: 9833 - RNA, 20 nt, Artificial Sequence
  spacer sequence CTCN PAM
ucugccuuuucagugggugg

SEQ ID NO: 9834 - RNA, 20 nt, Artificial Sequence
  spacer sequence CTCN PAM
uggccagccugcucucccaa

SEQ ID NO: 9835 - RNA, 20 nt, Artificial Sequence
  spacer sequence CTCN PAM
cccaaagaaggaauaacaga

SEQ ID NO: 9836 - RNA, 20 nt, Artificial Sequence
  spacer sequence CTCN PAM
caaagaaggaauaacagaac

SEQ ID NO: 9837 - RNA, 20 nt, Artificial Sequence
  spacer sequence CTCN PAM
gacuacuucugguuuguaaa

SEQ ID NO: 9838 - RNA, 20 nt, Artificial Sequence
  spacer sequence CTCN PAM
cacuucaagaagaacauugg

SEQ ID NO: 9839 - RNA, 20 nt, Artificial Sequence
  spacer sequence CTCN PAM
gcaucgggacacccagaaaa

SEQ ID NO: 9840 - RNA, 20 nt, Artificial Sequence
  spacer sequence CTCN PAM
aaggcaaaaagcaaauagca

SEQ ID NO: 9841 - RNA, 20 nt, Artificial Sequence
  spacer sequence CTCN PAM
uucugcuauuugcuuuuugc

SEQ ID NO: 9842 - RNA, 20 nt, Artificial Sequence
  spacer sequence CTCN PAM
gucucugucucccccaagcc

SEQ ID NO: 9843 - RNA, 20 nt, Artificial Sequence
  spacer sequence CTCN PAM
gucucccccaagcccuccua

SEQ ID NO: 9844 - RNA, 20 nt, Artificial Sequence
  spacer sequence CTCN PAM
cccaagcccuccuagucaga

SEQ ID NO: 9845 - RNA, 20 nt, Artificial Sequence
  spacer sequence CTCN PAM
uagucagaacguucucucag

SEQ ID NO: 9846 - RNA, 20 nt, Artificial Sequence
  spacer sequence CTCN PAM
cagcauuucagcagguacug

SEQ ID NO: 9847 - RNA, 20 nt, Artificial Sequence
  spacer sequence CTCN PAM
gcauuucagcagguacugcu

SEQ ID NO: 9848 - RNA, 20 nt, Artificial Sequence
  spacer sequence CTCN PAM
ccuggaaauacagcugaugu

SEQ ID NO: 9849 - RNA, 20 nt, Artificial Sequence
  spacer sequence CTCN PAM
guaaauacaucagcuguauu

SEQ ID NO: 9850 - RNA, 20 nt, Artificial Sequence
  spacer sequence CTCN PAM
auauaauuucaagacuugau

SEQ ID NO: 9851 - RNA, 20 nt, Artificial Sequence
  spacer sequence CTCN PAM
cuauauaauuucaagacuug

SEQ ID NO: 9852 - RNA, 20 nt, Artificial Sequence
  spacer sequence CTCN PAM
ccuaccagugagcgcccacc

SEQ ID NO: 9853 - RNA, 20 nt, Artificial Sequence
  spacer sequence CTCN PAM
cugguaggggaggcauguga

SEQ ID NO: 9854 - RNA, 20 nt, Artificial Sequence
  spacer sequence CTCN PAM
aaacuauuaaaacagagcgu

SEQ ID NO: 9855 - RNA, 20 nt, Artificial Sequence
  spacer sequence CTCN PAM
guuuuaauaguuuggagcaa

SEQ ID NO: 9856 - RNA, 20 nt, Artificial Sequence
  spacer sequence CTCN PAM
uuauacuucuggguccaccc

SEQ ID NO: 9857 - RNA, 20 nt, Artificial Sequence
  spacer sequence CTCN PAM
ugcagccgcagggguagacu

SEQ ID NO: 9858 - RNA, 20 nt, Artificial Sequence
  spacer sequence CTCN PAM
cuaagcuucaacuacccuuu

SEQ ID NO: 9859 - RNA, 20 nt, Artificial Sequence
  spacer sequence CTCN PAM
aagcuucaacuacccuuucu

SEQ ID NO: 9860 - RNA, 20 nt, Artificial Sequence
  spacer sequence CTCN PAM
ugccucuucacaggguuacu

SEQ ID NO: 9861 - RNA, 20 nt, Artificial Sequence
  spacer sequence CTCN PAM
ucacaggguuacucaugagg

SEQ ID NO: 9862 - RNA, 20 nt, Artificial Sequence
  spacer sequence CTCN PAM
ugaggugagucucaauuuga

SEQ ID NO: 9863 - RNA, 20 nt, Artificial Sequence
  spacer sequence CTCN PAM
ugaguaacccugugaagagg

SEQ ID NO: 9864 - RNA, 20 nt, Artificial Sequence
  spacer sequence CTCN PAM
ccucaugaguaacccuguga

SEQ ID NO: 9865 - RNA, 20 nt, Artificial Sequence
  spacer sequence CTCN PAM
auuugacaauacuccucaaa

SEQ ID NO: 9866 - RNA, 20 nt, Artificial Sequence
  spacer sequence CTCN PAM
ucaaagggcuuacucaaaaa

SEQ ID NO: 9867 - RNA, 20 nt, Artificial Sequence
  spacer sequence CTCN PAM
aagggcuuacucaaaaaaaa

SEQ ID NO: 9868 - RNA, 20 nt, Artificial Sequence
  spacer sequence CTCN PAM
aaaaaaaaaugugauuuuau

SEQ ID NO: 9869 - RNA, 20 nt, Artificial Sequence
  spacer sequence CTCN PAM
uuacuaacagcacaauggac

SEQ ID NO: 9870 - RNA, 20 nt, Artificial Sequence
  spacer sequence CTCN PAM
agcuuuuuuggcuuaugaaa

SEQ ID NO: 9871 - RNA, 20 nt, Artificial Sequence
  spacer sequence CTCN PAM
gauccucuagcuuuuuuggc

SEQ ID NO: 9872 - RNA, 20 nt, Artificial Sequence
  spacer sequence CTCN PAM
ccgauccucuagcuuuuuug

SEQ ID NO: 9873 - RNA, 20 nt, Artificial Sequence
  spacer sequence CTCN PAM
gaaacggcuucaaggguguc

SEQ ID NO: 9874 - RNA, 20 nt, Artificial Sequence
  spacer sequence CTCN PAM
aacacauuucaccuacaagu

SEQ ID NO: 9875 - RNA, 20 nt, Artificial Sequence
  spacer sequence CTCN PAM
ucagguagucagccgaguga

SEQ ID NO: 9876 - RNA, 20 nt, Artificial Sequence
  spacer sequence CTCN PAM
gcugacuaccugaugaguga

SEQ ID NO: 9877 - RNA, 20 nt, Artificial Sequence
  spacer sequence CTCN PAM
cucggcugacuaccugauga

SEQ ID NO: 9878 - RNA, 20 nt, Artificial Sequence
  spacer sequence CTCN PAM
uuuaccuucuuguccaaccc

SEQ ID NO: 9879 - RNA, 20 nt, Artificial Sequence
  spacer sequence CTCN PAM
cucccucaaaugcauaccuc

SEQ ID NO: 9880 - RNA, 20 nt, Artificial Sequence
  spacer sequence CTCN PAM
cccucaaaugcauaccuccu

SEQ ID NO: 9881 - RNA, 20 nt, Artificial Sequence
  spacer sequence CTCN PAM
cucaaaugcauaccuccuuc

SEQ ID NO: 9882 - RNA, 20 nt, Artificial Sequence
  spacer sequence CTCN PAM
aaugcauaccuccuucucuu

SEQ ID NO: 9883 - RNA, 20 nt, Artificial Sequence
  spacer sequence CTCN PAM
uucucuuuccuccagcuccc

SEQ ID NO: 9884 - RNA, 20 nt, Artificial Sequence
  spacer sequence CTCN PAM
uuccuccagcucccuaagcu

SEQ ID NO: 9885 - RNA, 20 nt, Artificial Sequence
  spacer sequence CTCN PAM
agcucccuaagcuguuguuc

SEQ ID NO: 9886 - RNA, 20 nt, Artificial Sequence
  spacer sequence CTCN PAM
cuaagcuguuguucagggca

SEQ ID NO: 9887 - RNA, 20 nt, Artificial Sequence
  spacer sequence CTCN PAM
ucaggcugccagagcaagag

SEQ ID NO: 9888 - RNA, 20 nt, Artificial Sequence
  spacer sequence CTCN PAM
ggcagccugaagagcugucu

SEQ ID NO: 9889 - RNA, 20 nt, Artificial Sequence
  spacer sequence CTCN PAM
ugcucuggcagccugaagag

SEQ ID NO: 9890 - RNA, 20 nt, Artificial Sequence
  spacer sequence CTCN PAM
cuugcucuggcagccugaag

SEQ ID NO: 9891 - RNA, 20 nt, Artificial Sequence
  spacer sequence CTCN PAM
acaugcauucccaccucccg

SEQ ID NO: 9892 - RNA, 20 nt, Artificial Sequence
  spacer sequence CTCN PAM
cggaagcaggggacacagcu

SEQ ID NO: 9893 - RNA, 20 nt, Artificial Sequence
  spacer sequence CTCN PAM
gugacggaggguggguaacc

SEQ ID NO: 9894 - RNA, 20 nt, Artificial Sequence
  spacer sequence CTCN PAM
gucacagaguggccagcugu

SEQ ID NO: 9895 - RNA, 20 nt, Artificial Sequence
  spacer sequence CTCN PAM
cuaccugggucuaucauuuu

SEQ ID NO: 9896 - RNA, 20 nt, Artificial Sequence
  spacer sequence CTCN PAM
accugggucuaucauuuuag

SEQ ID NO: 9897 - RNA, 20 nt, Artificial Sequence
  spacer sequence CTCN PAM
uaaaugggaagggccaauua

SEQ ID NO: 9898 - RNA, 20 nt, Artificial Sequence
  spacer sequence CTCN PAM
gagaacaacucuaccugagg

SEQ ID NO: 9899 - RNA, 20 nt, Artificial Sequence
  spacer sequence CTCN PAM
gagauaucuguaauuggccc

SEQ ID NO: 9900 - RNA, 20 nt, Artificial Sequence
  spacer sequence CTCN PAM
accugagggagggggaaauc

SEQ ID NO: 9901 - RNA, 20 nt, Artificial Sequence
  spacer sequence CTCN PAM
gguagaguuguucucagaga

SEQ ID NO: 9902 - RNA, 20 nt, Artificial Sequence
  spacer sequence CTCN PAM
cucagguagaguuguucuca

SEQ ID NO: 9903 - RNA, 20 nt, Artificial Sequence
  spacer sequence CTCN PAM
caaaacaacggugggcagaa

SEQ ID NO: 9904 - RNA, 20 nt, Artificial Sequence
  spacer sequence CTCN PAM
acagcaucuggcagacgaac

SEQ ID NO: 9905 - RNA, 20 nt, Artificial Sequence
  spacer sequence CTCN PAM
caccaucugguuucacccgg

SEQ ID NO: 9906 - RNA, 20 nt, Artificial Sequence
  spacer sequence CTCN PAM
uaggcaagggauguuagcac

SEQ ID NO: 9907 - RNA, 20 nt, Artificial Sequence
  spacer sequence CTCN PAM
gugauuucuauggugggugu

SEQ ID NO: 9908 - RNA, 20 nt, Artificial Sequence
  spacer sequence CTCN PAM
cugugauuucuauggugggu

SEQ ID NO: 9909 - RNA, 20 nt, Artificial Sequence
  spacer sequence CTCN PAM
cacuuucucugagggcaugg

SEQ ID NO: 9910 - RNA, 20 nt, Artificial Sequence
  spacer sequence CTCN PAM
gagggcauggaggggaggca

SEQ ID NO: 9911 - RNA, 20 nt, Artificial Sequence
  spacer sequence CTCN PAM
gagaaagugggagugcuggc

SEQ ID NO: 9912 - RNA, 20 nt, Artificial Sequence
  spacer sequence CTCN PAM
augcccucagagaaaguggg

SEQ ID NO: 9913 - RNA, 20 nt, Artificial Sequence
  spacer sequence CTCN PAM
ccuccaugcccucagagaaa

SEQ ID NO: 9914 - RNA, 20 nt, Artificial Sequence
  spacer sequence CTCN PAM
ggccuccucauuuaauucuc

SEQ ID NO: 9915 - RNA, 20 nt, Artificial Sequence
  spacer sequence CTCN PAM
ucauuuaauucucucugcau

SEQ ID NO: 9916 - RNA, 20 nt, Artificial Sequence
  spacer sequence CTCN PAM
uuuaauucucucugcaucag

SEQ ID NO: 9917 - RNA, 20 nt, Artificial Sequence
  spacer sequence CTCN PAM
cugcaucagaggaagaguca

SEQ ID NO: 9918 - RNA, 20 nt, Artificial Sequence
  spacer sequence CTCN PAM
gcaucagaggaagagucacc

SEQ ID NO: 9919 - RNA, 20 nt, Artificial Sequence
  spacer sequence CTCN PAM
gaugcagagagaauuaaaug

SEQ ID NO: 9920 - RNA, 20 nt, Artificial Sequence
  spacer sequence CTCN PAM
uccucugaugcagagagaau

SEQ ID NO: 9921 - RNA, 20 nt, Artificial Sequence
  spacer sequence CTCN PAM
gauccaggacagagcuggcu

SEQ ID NO: 9922 - RNA, 20 nt, Artificial Sequence
  spacer sequence CTCN PAM
guccuggaucugaggaacac

SEQ ID NO: 9923 - RNA, 20 nt, Artificial Sequence
  spacer sequence CTCN PAM
ggacgccacaugggucaacc

SEQ ID NO: 9924 - RNA, 20 nt, Artificial Sequence
  spacer sequence CTCN PAM
gguugacccauguggcgucc

SEQ ID NO: 9925 - RNA, 20 nt, Artificial Sequence
  spacer sequence CTCN PAM
gacccuccaaggugacaaag

SEQ ID NO: 9926 - RNA, 20 nt, Artificial Sequence
  spacer sequence CTCN PAM
aaggugacaaagaccucacu

SEQ ID NO: 9927 - RNA, 20 nt, Artificial Sequence
  spacer sequence CTCN PAM
cuagacuguaucucauuuuu

SEQ ID NO: 9928 - RNA, 20 nt, Artificial Sequence
  spacer sequence CTCN PAM
uuuuuccagccucagugagc

SEQ ID NO: 9929 - RNA, 20 nt, Artificial Sequence
  spacer sequence CTCN PAM
gugagccggccccagcuggc

SEQ ID NO: 9930 - RNA, 20 nt, Artificial Sequence
  spacer sequence CTCN PAM
cugaggcuggaaaaaugaga

SEQ ID NO: 9931 - RNA, 20 nt, Artificial Sequence
  spacer sequence CTCN PAM
gcaugccagcuggggccggc

SEQ ID NO: 9932 - RNA, 20 nt, Artificial Sequence
  spacer sequence CTCN PAM
aagcagccaugcacaaaggc

SEQ ID NO: 9933 - RNA, 20 nt, Artificial Sequence
  spacer sequence CTCN PAM
cuaagaaaacgaccgugccc

SEQ ID NO: 9934 - RNA, 20 nt, Artificial Sequence
  spacer sequence CTCN PAM
uaaauggcgaaggcagcauu

SEQ ID NO: 9935 - RNA, 20 nt, Artificial Sequence
  spacer sequence CTCN PAM
uaaacgccugauauauaucc

SEQ ID NO: 9936 - RNA, 20 nt, Artificial Sequence
  spacer sequence CTCN PAM
aauaaugucuauaaugcuga

SEQ ID NO: 9937 - RNA, 20 nt, Artificial Sequence
  spacer sequence CTCN PAM
gcauuauagacauuauuuga

SEQ ID NO: 9938 - RNA, 20 nt, Artificial Sequence
  spacer sequence CTCN PAM
gcaaaacuaccuuuccgccu

SEQ ID NO: 9939 - RNA, 20 nt, Artificial Sequence
  spacer sequence CTCN PAM
guucaucacaugccuuacca

SEQ ID NO: 9940 - RNA, 20 nt, Artificial Sequence
  spacer sequence CTCN PAM
guuacgccaacauguuuaua

SEQ ID NO: 9941 - RNA, 20 nt, Artificial Sequence
  spacer sequence CTCN PAM
auuaugaacuaacucuaauu

SEQ ID NO: 9942 - RNA, 20 nt, Artificial Sequence
  spacer sequence CTCN PAM
aauuuuuguucugaaauacu

SEQ ID NO: 9943 - RNA, 20 nt, Artificial Sequence
  spacer sequence CTCN PAM
gucuguugggauauuauguu

SEQ ID NO: 9944 - RNA, 20 nt, Artificial Sequence
  spacer sequence CTCN PAM
ucuagcucugcagaaugcaa

SEQ ID NO: 9945 - RNA, 20 nt, Artificial Sequence
  spacer sequence CTCN PAM
gcagaaugcaaagcaagaca

SEQ ID NO: 9946 - RNA, 20 nt, Artificial Sequence
  spacer sequence CTCN PAM
cuuccuuccuuccuuccuuc

SEQ ID NO: 9947 - RNA, 20 nt, Artificial Sequence
  spacer sequence CTCN PAM
cucccuuccuuccuuccuuc

SEQ ID NO: 9948 - RNA, 20 nt, Artificial Sequence
  spacer sequence CTCN PAM
cucccucccuuccuuccuuc

SEQ ID NO: 9949 - RNA, 20 nt, Artificial Sequence
  spacer sequence CTCN PAM
ccucccucccucccuuccuu

SEQ ID NO: 9950 - RNA, 20 nt, Artificial Sequence
  spacer sequence CTCN PAM
ccuccccucccucccucccu

SEQ ID NO: 9951 - RNA, 20 nt, Artificial Sequence
  spacer sequence CTCN PAM
ccuccccuccccucccuccc

SEQ ID NO: 9952 - RNA, 20 nt, Artificial Sequence
  spacer sequence CTCN PAM
ccuccccuccccuccccucc

SEQ ID NO: 9953 - RNA, 20 nt, Artificial Sequence
  spacer sequence CTCN PAM
ccuccccuccccuccccucc

SEQ ID NO: 9954 - RNA, 20 nt, Artificial Sequence
  spacer sequence CTCN PAM
ccuccccuccccuccccucc

SEQ ID NO: 9955 - RNA, 20 nt, Artificial Sequence
  spacer sequence CTCN PAM
ccuccccuccccuccccucc

SEQ ID NO: 9956 - RNA, 20 nt, Artificial Sequence
  spacer sequence CTCN PAM
ccuccccuccccuccccucc

SEQ ID NO: 9957 - RNA, 20 nt, Artificial Sequence
  spacer sequence CTCN PAM
ccuccccuccccuccccucc

SEQ ID NO: 9958 - RNA, 20 nt, Artificial Sequence
  spacer sequence CTCN PAM
ccuccccuccccuccccucc

SEQ ID NO: 9959 - RNA, 20 nt, Artificial Sequence
  spacer sequence CTCN PAM
ccuccccuccccuccccucc

SEQ ID NO: 9960 - RNA, 20 nt, Artificial Sequence
  spacer sequence CTCN PAM
ccuccccuccccuccccucc

SEQ ID NO: 9961 - RNA, 20 nt, Artificial Sequence
  spacer sequence CTCN PAM
ccuccccuccccuccccucc

SEQ ID NO: 9962 - RNA, 20 nt, Artificial Sequence
  spacer sequence CTCN PAM
ccuccccuccccuccccucc

SEQ ID NO: 9963 - RNA, 20 nt, Artificial Sequence
  spacer sequence CTCN PAM
cuucccuucccuucccuucc

SEQ ID NO: 9964 - RNA, 20 nt, Artificial Sequence
  spacer sequence CTCN PAM
cucccuucccuucccuuccc

SEQ ID NO: 9965 - RNA, 20 nt, Artificial Sequence
  spacer sequence CTCN PAM
uucccucccucccuucccuu

SEQ ID NO: 9966 - RNA, 20 nt, Artificial Sequence
  spacer sequence CTCN PAM
uguugacuugaagcugcuuc

SEQ ID NO: 9967 - RNA, 20 nt, Artificial Sequence
  spacer sequence CTCN PAM
aaaacaucugaaaauguaaa

SEQ ID NO: 9968 - RNA, 20 nt, Artificial Sequence
  spacer sequence CTCN PAM
caagaaaugaggacaggcaa

SEQ ID NO: 9969 - RNA, 20 nt, Artificial Sequence
  spacer sequence CTCN PAM
agaaaugaggacaggcaagg

SEQ ID NO: 9970 - RNA, 20 nt, Artificial Sequence
  spacer sequence CTCN PAM
uuucuugagagacuccaaaa

SEQ ID NO: 9971 - RNA, 20 nt, Artificial Sequence
  spacer sequence CTCN PAM
cugcauaacagagucucuua

SEQ ID NO: 9972 - RNA, 20 nt, Artificial Sequence
  spacer sequence CTCN PAM
guuaugcagugagcuguuga

SEQ ID NO: 9973 - RNA, 20 nt, Artificial Sequence
  spacer sequence CTCN PAM
uacacagggcugccuccgca

SEQ ID NO: 9974 - RNA, 20 nt, Artificial Sequence
  spacer sequence CTCN PAM
gcaccugagcugagcuugcu

SEQ ID NO: 9975 - RNA, 20 nt, Artificial Sequence
  spacer sequence CTCN PAM
ggugcggaggcagcccugug

SEQ ID NO: 9976 - RNA, 20 nt, Artificial Sequence
  spacer sequence CTCN PAM
gcucaggugcggaggcagcc

SEQ ID NO: 9977 - RNA, 20 nt, Artificial Sequence
  spacer sequence CTCN PAM
ccgcacccgucgccccccac

SEQ ID NO: 9978 - RNA, 20 nt, Artificial Sequence
  spacer sequence CTCN PAM
uguaacaaaggacagcauac

SEQ ID NO: 9979 - RNA, 20 nt, Artificial Sequence
  spacer sequence CTCN PAM
guuagggcauuauccguaac

SEQ ID NO: 9980 - RNA, 20 nt, Artificial Sequence
  spacer sequence CTCN PAM
caugucauggugcuuacugc

SEQ ID NO: 9981 - RNA, 20 nt, Artificial Sequence
  spacer sequence CTCN PAM
ugucauggugcuuacugccc

SEQ ID NO: 9982 - RNA, 20 nt, Artificial Sequence
  spacer sequence CTCN PAM
acuacuuuuguuugugaaag

SEQ ID NO: 9983 - RNA, 20 nt, Artificial Sequence
  spacer sequence CTCN PAM
aagaaccaaccuaaaauucu

SEQ ID NO: 9984 - RNA, 20 nt, Artificial Sequence
  spacer sequence CTCN PAM
uaguuuuuauuuguguaauu

SEQ ID NO: 9985 - RNA, 20 nt, Artificial Sequence
  spacer sequence CTCN PAM
aacucauccacacuugguuc

SEQ ID NO: 9986 - RNA, 20 nt, Artificial Sequence
  spacer sequence CTCN PAM
uccacacuugguucaggaca

SEQ ID NO: 9987 - RNA, 20 nt, Artificial Sequence
  spacer sequence CTCN PAM
uucacaucaggccuucccug

SEQ ID NO: 9988 - RNA, 20 nt, Artificial Sequence
  spacer sequence CTCN PAM
ucuuucacaucaggccuucc

SEQ ID NO: 9989 - RNA, 20 nt, Artificial Sequence
  spacer sequence CTCN PAM
gucuccucuuucacaucagg

SEQ ID NO: 9990 - RNA, 20 nt, Artificial Sequence
  spacer sequence CTCN PAM
cugcaggggccacaggagca

SEQ ID NO: 9991 - RNA, 20 nt, Artificial Sequence
  spacer sequence CTCN PAM
uguggccccugcagggagug

SEQ ID NO: 9992 - RNA, 20 nt, Artificial Sequence
  spacer sequence CTCN PAM
gggacccggcugcagugcuu

SEQ ID NO: 9993 - RNA, 20 nt, Artificial Sequence
  spacer sequence CTCN PAM
cagcaacuggcaacccccug

SEQ ID NO: 9994 - RNA, 20 nt, Artificial Sequence
  spacer sequence CTCN PAM
caguugcauuccuuugccaa

SEQ ID NO: 9995 - RNA, 20 nt, Artificial Sequence
  spacer sequence CTCN PAM
ucagaacaggaaaaguccag

SEQ ID NO: 9996 - RNA, 20 nt, Artificial Sequence
  spacer sequence CTCN PAM
gggauguaaagcauuuggca

SEQ ID NO: 9997 - RNA, 20 nt, Artificial Sequence
  spacer sequence CTCN PAM
gguacuauggcaaacuggcc

SEQ ID NO: 9998 - RNA, 20 nt, Artificial Sequence
  spacer sequence CTCN PAM
uuggccaguuugccauagua

SEQ ID NO: 9999 - RNA, 20 nt, Artificial Sequence
  spacer sequence CTCN PAM
uagcaacgcuucucuuuggc

SEQ ID NO: 10000 - RNA, 20 nt, Artificial Sequence
  spacer sequence CTCN PAM
gcuuggcccaggaagaagcu

SEQ ID NO: 10001 - RNA, 20 nt, Artificial Sequence
  spacer sequence CTCN PAM
gcuacaggggccgugggaau

SEQ ID NO: 10002 - RNA, 20 nt, Artificial Sequence
  spacer sequence CTCN PAM
agcuauucccacggccccug

SEQ ID NO: 10003 - RNA, 20 nt, Artificial Sequence
  spacer sequence CTCN PAM
gggaaaugcacaggccucca

SEQ ID NO: 10004 - RNA, 20 nt, Artificial Sequence
  spacer sequence CTCN PAM
uuggcgacagggcuggaccu

SEQ ID NO: 10005 - RNA, 20 nt, Artificial Sequence
  spacer sequence CTCN PAM
ucucugagcucccccuuggg

SEQ ID NO: 10006 - RNA, 20 nt, Artificial Sequence
  spacer sequence CTCN PAM
gagcucccccuuggguuacc

SEQ ID NO: 10007 - RNA, 20 nt, Artificial Sequence
  spacer sequence CTCN PAM
gagaagaguccaggcugcca

SEQ ID NO: 10008 - RNA, 20 nt, Artificial Sequence
  spacer sequence CTCN PAM
cccuuggguuaccuaugauu

SEQ ID NO: 10009 - RNA, 20 nt, Artificial Sequence
  spacer sequence CTCN PAM
ucuggaaucauagguaaccc

SEQ ID NO: 10010 - RNA, 20 nt, Artificial Sequence
  spacer sequence CTCN PAM
auggugcuggcuuugccaca

SEQ ID NO: 10011 - RNA, 20 nt, Artificial Sequence
  spacer sequence CTCN PAM
guccccucuauggugcuggc

SEQ ID NO: 10012 - RNA, 20 nt, Artificial Sequence
  spacer sequence CTCN PAM
agguaggccuuagguuuccc

SEQ ID NO: 10013 - RNA, 20 nt, Artificial Sequence
  spacer sequence CTCN PAM
ggauucaaaagacaccuuaa

SEQ ID NO: 10014 - RNA, 20 nt, Artificial Sequence
  spacer sequence CTCN PAM
uugguccucaggauucaaaa

SEQ ID NO: 10015 - RNA, 20 nt, Artificial Sequence
  spacer sequence CTCN PAM
ccuaugacaaggaaccuguc

SEQ ID NO: 10016 - RNA, 20 nt, Artificial Sequence
  spacer sequence CTCN PAM
uaugacaaggaaccugucac

SEQ ID NO: 10017 - RNA, 20 nt, Artificial Sequence
  spacer sequence CTCN PAM
aggcuuuagcaaucacagaa

SEQ ID NO: 10018 - RNA, 20 nt, Artificial Sequence
  spacer sequence CTCN PAM
uccaaagaaaaguggcucag

SEQ ID NO: 10019 - RNA, 20 nt, Artificial Sequence
  spacer sequence CTCN PAM
aaagaaaaguggcucagaca

SEQ ID NO: 10020 - RNA, 20 nt, Artificial Sequence
  spacer sequence CTCN PAM
gacagaaacacugacucuua

SEQ ID NO: 10021 - RNA, 20 nt, Artificial Sequence
  spacer sequence CTCN PAM
uauuucucaucagacuccga

SEQ ID NO: 10022 - RNA, 20 nt, Artificial Sequence
  spacer sequence CTCN PAM
ucagacuccgaaaucacagg

SEQ ID NO: 10023 - RNA, 20 nt, Artificial Sequence
  spacer sequence CTCN PAM
gaaaucacaggcuucugguc

SEQ ID NO: 10024 - RNA, 20 nt, Artificial Sequence
  spacer sequence CTCN PAM
gcuugaaucuuuagaccaga

SEQ ID NO: 10025 - RNA, 20 nt, Artificial Sequence
  spacer sequence CTCN PAM
gcuuuggcuggcuuggaugu

SEQ ID NO: 10026 - RNA, 20 nt, Artificial Sequence
  spacer sequence CTCN PAM
uaacauccaagccagccaaa

SEQ ID NO: 10027 - RNA, 20 nt, Artificial Sequence
  spacer sequence CTCN PAM
aauggaaaaguaaaaaaauu

SEQ ID NO: 10028 - RNA, 20 nt, Artificial Sequence
  spacer sequence CTCN PAM
gcacucuccuuucaaggaaa

SEQ ID NO: 10029 - RNA, 20 nt, Artificial Sequence
  spacer sequence CTCN PAM
ccuuucaaggaaaaaggcuc

SEQ ID NO: 10030 - RNA, 20 nt, Artificial Sequence
  spacer sequence CTCN PAM
uuucaaggaaaaaggcucua

SEQ ID NO: 10031 - RNA, 20 nt, Artificial Sequence
  spacer sequence CTCN PAM
augugccagcccacuucuuu

SEQ ID NO: 10032 - RNA, 20 nt, Artificial Sequence
  spacer sequence CTCN PAM
cuuuccccauuucuggaaag

SEQ ID NO: 10033 - RNA, 20 nt, Artificial Sequence
  spacer sequence CTCN PAM
ucccuuuccccauuucugga

SEQ ID NO: 10034 - RNA, 20 nt, Artificial Sequence
  spacer sequence CTCN PAM
uccucccuuuccccauuucu

SEQ ID NO: 10035 - RNA, 20 nt, Artificial Sequence
  spacer sequence CTCN PAM
uuuccacagguucuccuccu

SEQ ID NO: 10036 - RNA, 20 nt, Artificial Sequence
  spacer sequence CTCN PAM
gguccacgguuagccccugg

SEQ ID NO: 10037 - RNA, 20 nt, Artificial Sequence
  spacer sequence CTCN PAM
gcugugcucagguccacggu

SEQ ID NO: 10038 - RNA, 20 nt, Artificial Sequence
  spacer sequence CTCN PAM
gaaaacgguucuguggaagc

SEQ ID NO: 10039 - RNA, 20 nt, Artificial Sequence
  spacer sequence CTCN PAM
cugccacgugucuugugcuu

SEQ ID NO: 10040 - RNA, 20 nt, Artificial Sequence
  spacer sequence CTCN PAM
cacugccacgugucuugugc

SEQ ID NO: 10041 - RNA, 20 nt, Artificial Sequence
  spacer sequence CTCN PAM
ggacucucacugccacgugu

SEQ ID NO: 10042 - RNA, 20 nt, Artificial Sequence
  spacer sequence CTCN PAM
auggucuaccugagaccuga

SEQ ID NO: 10043 - RNA, 20 nt, Artificial Sequence
  spacer sequence CTCN PAM
gguagaccaucgagcugcug

SEQ ID NO: 10044 - RNA, 20 nt, Artificial Sequence
  spacer sequence CTCN PAM
ggucucagguagaccaucga

SEQ ID NO: 10045 - RNA, 20 nt, Artificial Sequence
  spacer sequence CTCN PAM
guuguucuuuagcuaccaaa

SEQ ID NO: 10046 - RNA, 20 nt, Artificial Sequence
  spacer sequence CTCN PAM
uaaucuuuuuguucuuuuuc

SEQ ID NO: 10047 - RNA, 20 nt, Artificial Sequence
  spacer sequence CTCN PAM
uccuaaucuuuuuguucuuu

SEQ ID NO: 10048 - RNA, 20 nt, Artificial Sequence
  spacer sequence CTCN PAM
uccuccuaaucuuuuuguuc

SEQ ID NO: 10049 - RNA, 20 nt, Artificial Sequence
  spacer sequence CTCN PAM
ccaaagaacucgacuuaaau

SEQ ID NO: 10050 - RNA, 20 nt, Artificial Sequence
  spacer sequence CTCN PAM
acuuaaaucaucucagcuau

SEQ ID NO: 10051 - RNA, 20 nt, Artificial Sequence
  spacer sequence CTCN PAM
gcuauaggcagucaacuggg

SEQ ID NO: 10052 - RNA, 20 nt, Artificial Sequence
  spacer sequence CTCN PAM
ccgaacagccacaaucgggg

SEQ ID NO: 10053 - RNA, 20 nt, Artificial Sequence
  spacer sequence CTCN PAM
gaacagccacaaucgggggg

SEQ ID NO: 10054 - RNA, 20 nt, Artificial Sequence
  spacer sequence CTCN PAM
cuuuccccucacgaucuucc

SEQ ID NO: 10055 - RNA, 20 nt, Artificial Sequence
  spacer sequence CTCN PAM
uuccccucacgaucuuccug

SEQ ID NO: 10056 - RNA, 20 nt, Artificial Sequence
  spacer sequence CTCN PAM
cgaucuuccugaacagggca

SEQ ID NO: 10057 - RNA, 20 nt, Artificial Sequence
  spacer sequence CTCN PAM
uucaccacuucaggacuuca

SEQ ID NO: 10058 - RNA, 20 nt, Artificial Sequence
  spacer sequence CTCN PAM
gagcaccuccacagccuuuc

SEQ ID NO: 10059 - RNA, 20 nt, Artificial Sequence
  spacer sequence CTCN PAM
gaggaugggugugucugggg

SEQ ID NO: 10060 - RNA, 20 nt, Artificial Sequence
  spacer sequence CTCN PAM
acagccuuucuggcccaucc

SEQ ID NO: 10061 - RNA, 20 nt, Artificial Sequence
  spacer sequence CTCN PAM
cagucaccgagccacacauu

SEQ ID NO: 10062 - RNA, 20 nt, Artificial Sequence
  spacer sequence CTCN PAM
gugacugggagaauagaauu

SEQ ID NO: 10063 - RNA, 20 nt, Artificial Sequence
  spacer sequence CTCN PAM
ucccuuccuuucauacaacc

SEQ ID NO: 10064 - RNA, 20 nt, Artificial Sequence
  spacer sequence CTCN PAM
cuuccuuucauacaacccau

SEQ ID NO: 10065 - RNA, 20 nt, Artificial Sequence
  spacer sequence CTCN PAM
cguccccaccacccuggucc

SEQ ID NO: 10066 - RNA, 20 nt, Artificial Sequence
  spacer sequence CTCN PAM
cuuucccaugcuugagucuc

SEQ ID NO: 10067 - RNA, 20 nt, Artificial Sequence
  spacer sequence CTCN PAM
agcaugggaaagugaggcag

SEQ ID NO: 10068 - RNA, 20 nt, Artificial Sequence
  spacer sequence CTCN PAM
aaaugcggcccaagagacuc

SEQ ID NO: 10069 - RNA, 20 nt, Artificial Sequence
  spacer sequence CTCN PAM
ugggccgcauuuugagacuc

SEQ ID NO: 10070 - RNA, 20 nt, Artificial Sequence
  spacer sequence CTCN PAM
cuggaagcgcaagucauaug

SEQ ID NO: 10071 - RNA, 20 nt, Artificial Sequence
  spacer sequence CTCN PAM
ggaagcgcaagucauaugac

SEQ ID NO: 10072 - RNA, 20 nt, Artificial Sequence
  spacer sequence CTCN PAM
uccaguggcuuccaucuccc

SEQ ID NO: 10073 - RNA, 20 nt, Artificial Sequence
  spacer sequence CTCN PAM
aguggcuuccaucucccuug

SEQ ID NO: 10074 - RNA, 20 nt, Artificial Sequence
  spacer sequence CTCN PAM
cuuggagucagagccaaaaa

SEQ ID NO: 10075 - RNA, 20 nt, Artificial Sequence
  spacer sequence CTCN PAM
aagggagauggaagccacug

SEQ ID NO: 10076 - RNA, 20 nt, Artificial Sequence
  spacer sequence CTCN PAM
gacuccaagggagauggaag

SEQ ID NO: 10077 - RNA, 20 nt, Artificial Sequence
  spacer sequence CTCN PAM
acguccuucaaggagccagc

SEQ ID NO: 10078 - RNA, 20 nt, Artificial Sequence
  spacer sequence CTCN PAM
uugaaggacguagagcaggg

SEQ ID NO: 10079 - RNA, 20 nt, Artificial Sequence
  spacer sequence CTCN PAM
ucuccuccuccuccugcacu

SEQ ID NO: 10080 - RNA, 20 nt, Artificial Sequence
  spacer sequence CTCN PAM
ccuccuccuccugcacucuu

SEQ ID NO: 10081 - RNA, 20 nt, Artificial Sequence
  spacer sequence CTCN PAM
uccuccuccugcacucuuuc

SEQ ID NO: 10082 - RNA, 20 nt, Artificial Sequence
  spacer sequence CTCN PAM
uccuccugcacucuuuccac

SEQ ID NO: 10083 - RNA, 20 nt, Artificial Sequence
  spacer sequence CTCN PAM
uccugcacucuuuccacucu

SEQ ID NO: 10084 - RNA, 20 nt, Artificial Sequence
  spacer sequence CTCN PAM
ugcacucuuuccacucugac

SEQ ID NO: 10085 - RNA, 20 nt, Artificial Sequence
  spacer sequence CTCN PAM
uuccacucugaccucagggc

SEQ ID NO: 10086 - RNA, 20 nt, Artificial Sequence
  spacer sequence CTCN PAM
gaccucagggccccuugcuc

SEQ ID NO: 10087 - RNA, 20 nt, Artificial Sequence
  spacer sequence CTCN PAM
gggccccuugcuccuccucc

SEQ ID NO: 10088 - RNA, 20 nt, Artificial Sequence
  spacer sequence CTCN PAM
uccuccaguagccaggcgua

SEQ ID NO: 10089 - RNA, 20 nt, Artificial Sequence
  spacer sequence CTCN PAM
uccaguagccaggcguauua

SEQ ID NO: 10090 - RNA, 20 nt, Artificial Sequence
  spacer sequence CTCN PAM
aguagccaggcguauuacac

SEQ ID NO: 10091 - RNA, 20 nt, Artificial Sequence
  spacer sequence CTCN PAM
gcucucuacacacucuuccu

SEQ ID NO: 10092 - RNA, 20 nt, Artificial Sequence
  spacer sequence CTCN PAM
cuacacacucuuccuggaac

SEQ ID NO: 10093 - RNA, 20 nt, Artificial Sequence
  spacer sequence CTCN PAM
acacacucuuccuggaacca

SEQ ID NO: 10094 - RNA, 20 nt, Artificial Sequence
  spacer sequence CTCN PAM
uccuggaaccaucuucucaa

SEQ ID NO: 10095 - RNA, 20 nt, Artificial Sequence
  spacer sequence CTCN PAM
aaauucucauggccaacuuc

SEQ ID NO: 10096 - RNA, 20 nt, Artificial Sequence
  spacer sequence CTCN PAM
uggccaacuuccucaccucu

SEQ ID NO: 10097 - RNA, 20 nt, Artificial Sequence
  spacer sequence CTCN PAM
ccucuuuggagccuuugcuu

SEQ ID NO: 10098 - RNA, 20 nt, Artificial Sequence
  spacer sequence CTCN PAM
uuggagccuuugcuucucau

SEQ ID NO: 10099 - RNA, 20 nt, Artificial Sequence
  spacer sequence CTCN PAM
aaagaggugaggaaguuggc

SEQ ID NO: 10100 - RNA, 20 nt, Artificial Sequence
  spacer sequence CTCN PAM
uugggccuucccuaauuauc

SEQ ID NO: 10101 - RNA, 20 nt, Artificial Sequence
  spacer sequence CTCN PAM
uccccaccuuauuuucgugc

SEQ ID NO: 10102 - RNA, 20 nt, Artificial Sequence
  spacer sequence CTCN PAM
ugccauacuauauaauucac

SEQ ID NO: 10103 - RNA, 20 nt, Artificial Sequence
  spacer sequence CTCN PAM
ccccagcuagaaagggggug

SEQ ID NO: 10104 - RNA, 20 nt, Artificial Sequence
  spacer sequence CTCN PAM
ccagcuagaaagggggugcc

SEQ ID NO: 10105 - RNA, 20 nt, Artificial Sequence
  spacer sequence CTCN PAM
uguggcacccccuuucuagc

SEQ ID NO: 10106 - RNA, 20 nt, Artificial Sequence
  spacer sequence CTCN PAM
cugcucuuguggcacccccu

SEQ ID NO: 10107 - RNA, 20 nt, Artificial Sequence
  spacer sequence CTCN PAM
uucauuuuucaacaaauauu

SEQ ID NO: 10108 - RNA, 20 nt, Artificial Sequence
  spacer sequence CTCN PAM
uggcaguuuggaauugugaa

SEQ ID NO: 10109 - RNA, 20 nt, Artificial Sequence
  spacer sequence CTCN PAM
augccauaucuauaaaacug

SEQ ID NO: 10110 - RNA, 20 nt, Artificial Sequence
  spacer sequence CTCN PAM
aacccaagauccaaagcuaa

SEQ ID NO: 10111 - RNA, 20 nt, Artificial Sequence
  spacer sequence CTCN PAM
gggccuguggggaaaaugga

SEQ ID NO: 10112 - RNA, 20 nt, Artificial Sequence
  spacer sequence CTCN PAM
ucccugugggucucagggcc

SEQ ID NO: 10113 - RNA, 20 nt, Artificial Sequence
  spacer sequence CTCN PAM
auuuacauuauaaugcaaaa

SEQ ID NO: 10114 - RNA, 20 nt, Artificial Sequence
  spacer sequence CTCN PAM
accccuccauuuacauuaua

SEQ ID NO: 10115 - RNA, 20 nt, Artificial Sequence
  spacer sequence CTCN PAM
ugucaaggguucccccaaac

SEQ ID NO: 10116 - RNA, 20 nt, Artificial Sequence
  spacer sequence CTCN PAM
accuaagccuuaggaaagac

SEQ ID NO: 10117 - RNA, 20 nt, Artificial Sequence
  spacer sequence CTCN PAM
agaaagaggggcugagagcc

SEQ ID NO: 10118 - RNA, 20 nt, Artificial Sequence
  spacer sequence CTCN PAM
uucuagaggcuccaccuaag

SEQ ID NO: 10119 - RNA, 20 nt, Artificial Sequence
  spacer sequence CTCN PAM
gccccucuuucuagaggcuc

SEQ ID NO: 10120 - RNA, 20 nt, Artificial Sequence
  spacer sequence CTCN PAM
cagccccucuuucuagaggc

SEQ ID NO: 10121 - RNA, 20 nt, Artificial Sequence
  spacer sequence CTCN PAM
uccccaggcucucagccccu

SEQ ID NO: 10122 - RNA, 20 nt, Artificial Sequence
  spacer sequence CTCN PAM
gaguucuucccacuggggcu

SEQ ID NO: 10123 - RNA, 20 nt, Artificial Sequence
  spacer sequence CTCN PAM
gaggaacugcuggugguugg

SEQ ID NO: 10124 - RNA, 20 nt, Artificial Sequence
  spacer sequence CTCN PAM
gugugccuggaaacgcaguu

SEQ ID NO: 10125 - RNA, 20 nt, Artificial Sequence
  spacer sequence CTCN PAM
uauccaauacugugcagggg

SEQ ID NO: 10126 - RNA, 20 nt, Artificial Sequence
  spacer sequence CTCN PAM
acggcauuacucucccucca

SEQ ID NO: 10127 - RNA, 20 nt, Artificial Sequence
  spacer sequence CTCN PAM
cccuccauucuugcuuucag

SEQ ID NO: 10128 - RNA, 20 nt, Artificial Sequence
  spacer sequence CTCN PAM
cuccauucuugcuuucagau

SEQ ID NO: 10129 - RNA, 20 nt, Artificial Sequence
  spacer sequence CTCN PAM
auucuugcuuucagauucuc

SEQ ID NO: 10130 - RNA, 20 nt, Artificial Sequence
  spacer sequence CTCN PAM
cuccuccuggcaggggcacu

SEQ ID NO: 10131 - RNA, 20 nt, Artificial Sequence
  spacer sequence CTCN PAM
uccuggcaggggcacugggg

SEQ ID NO: 10132 - RNA, 20 nt, Artificial Sequence
  spacer sequence CTCN PAM
uggcaggggcacuggggagg

SEQ ID NO: 10133 - RNA, 20 nt, Artificial Sequence
  spacer sequence CTCN PAM
ccagugccccugccaggagg

SEQ ID NO: 10134 - RNA, 20 nt, Artificial Sequence
  spacer sequence CTCN PAM
ugcccuccccagugccccug

SEQ ID NO: 10135 - RNA, 20 nt, Artificial Sequence
  spacer sequence CTCN PAM
ccugcccuccccagugcccc

SEQ ID NO: 10136 - RNA, 20 nt, Artificial Sequence
  spacer sequence CTCN PAM
uucucuccugcccuccccag

SEQ ID NO: 10137 - RNA, 20 nt, Artificial Sequence
  spacer sequence CTCN PAM
gguagaagggauuugucccu

SEQ ID NO: 10138 - RNA, 20 nt, Artificial Sequence
  spacer sequence CTCN PAM
cagguagaagggauuugucc

SEQ ID NO: 10139 - RNA, 20 nt, Artificial Sequence
  spacer sequence CTCN PAM
ccaguaggcaauaacaagga

SEQ ID NO: 10140 - RNA, 20 nt, Artificial Sequence
  spacer sequence CTCN PAM
uuguuauugccuacugggga

SEQ ID NO: 10141 - RNA, 20 nt, Artificial Sequence
  spacer sequence CTCN PAM
ccaauuugggaaguaauguc

SEQ ID NO: 10142 - RNA, 20 nt, Artificial Sequence
  spacer sequence CTCN PAM
acucuuuuccguuaccaaua

SEQ ID NO: 10143 - RNA, 20 nt, Artificial Sequence
  spacer sequence CTCN PAM
uuuccguuaccaauaaaaca

SEQ ID NO: 10144 - RNA, 20 nt, Artificial Sequence
  spacer sequence CTCN PAM
gauuucugacaguucuuuuu

SEQ ID NO: 10145 - RNA, 20 nt, Artificial Sequence
  spacer sequence CTCN PAM
guuaacuuaaaauagcccca

SEQ ID NO: 10146 - RNA, 20 nt, Artificial Sequence
  spacer sequence CTCN PAM
aagagcuacacucuacauaa

SEQ ID NO: 10147 - RNA, 20 nt, Artificial Sequence
  spacer sequence CTCN PAM
uugagucuucaguuuugaau

SEQ ID NO: 10148 - RNA, 20 nt, Artificial Sequence
  spacer sequence CTCN PAM
acauaacugcacuauuaaug

SEQ ID NO: 10149 - RNA, 20 nt, Artificial Sequence
  spacer sequence CTCN PAM
gucaacguauuuuccaagcc

SEQ ID NO: 10150 - RNA, 20 nt, Artificial Sequence
  spacer sequence CTCN PAM
ccugccccuuagugucuuac

SEQ ID NO: 10151 - RNA, 20 nt, Artificial Sequence
  spacer sequence CTCN PAM
aagcuuucaacacucuguuu

SEQ ID NO: 10152 - RNA, 20 nt, Artificial Sequence
  spacer sequence CTCN PAM
guuucuaugaaggcaagggu

SEQ ID NO: 10153 - RNA, 20 nt, Artificial Sequence
  spacer sequence CTCN PAM
aacccuugccuucauagaaa

SEQ ID NO: 10154 - RNA, 20 nt, Artificial Sequence
  spacer sequence CTCN PAM
cuccaacccuugccuucaua

SEQ ID NO: 10155 - RNA, 20 nt, Artificial Sequence
  spacer sequence CTCN PAM
ucauuuuacugauuuauuug

SEQ ID NO: 10156 - RNA, 20 nt, Artificial Sequence
  spacer sequence CTCN PAM
gcuacgcccaguggcccagg

SEQ ID NO: 10157 - RNA, 20 nt, Artificial Sequence
  spacer sequence CTCN PAM
cacuaagguauccucccagc

SEQ ID NO: 10158 - RNA, 20 nt, Artificial Sequence
  spacer sequence CTCN PAM
cuaagguauccucccagcaa

SEQ ID NO: 10159 - RNA, 20 nt, Artificial Sequence
  spacer sequence CTCN PAM
cagcaauguagguguucaaa

SEQ ID NO: 10160 - RNA, 20 nt, Artificial Sequence
  spacer sequence CTCN PAM
uggcguaauacuugcucggc

SEQ ID NO: 10161 - RNA, 20 nt, Artificial Sequence
  spacer sequence CTCN PAM
gccaaagacauaguaacgcu

SEQ ID NO: 10162 - RNA, 20 nt, Artificial Sequence
  spacer sequence CTCN PAM
aaaaugaauaugugugcagc

SEQ ID NO: 10163 - RNA, 20 nt, Artificial Sequence
  spacer sequence CTCN PAM
uuagccuuccaaguuguuug

SEQ ID NO: 10164 - RNA, 20 nt, Artificial Sequence
  spacer sequence CTCN PAM
agugcuccuuagccuuccaa

SEQ ID NO: 10165 - RNA, 20 nt, Artificial Sequence
  spacer sequence CTCN PAM
ccagcuccagugcuccuuag

SEQ ID NO: 10166 - RNA, 20 nt, Artificial Sequence
  spacer sequence CTCN PAM
ccaccccuggagagcaguca

SEQ ID NO: 10167 - RNA, 20 nt, Artificial Sequence
  spacer sequence CTCN PAM
agggguggugagcacagggg

SEQ ID NO: 10168 - RNA, 20 nt, Artificial Sequence
  spacer sequence CTCN PAM
ccagggguggugagcacagg

SEQ ID NO: 10169 - RNA, 20 nt, Artificial Sequence
  spacer sequence CTCN PAM
gacugcucuccagggguggu

SEQ ID NO: 10170 - RNA, 20 nt, Artificial Sequence
  spacer sequence CTCN PAM
cugacugcucuccaggggug

SEQ ID NO: 10171 - RNA, 20 nt, Artificial Sequence
  spacer sequence CTCN PAM
gauguuuuaaaggaagccac

SEQ ID NO: 10172 - RNA, 20 nt, Artificial Sequence
  spacer sequence CTCN PAM
agguggcuuccuuuaaaaca

SEQ ID NO: 10173 - RNA, 20 nt, Artificial Sequence
  spacer sequence CTCN PAM
ugguggcugcccgaugcgcu

SEQ ID NO: 10174 - RNA, 20 nt, Artificial Sequence
  spacer sequence CTCN PAM
gaaucauucauuugggcuug

SEQ ID NO: 10175 - RNA, 20 nt, Artificial Sequence
  spacer sequence CTCN PAM
gccacaagcccaaaugaaug

SEQ ID NO: 10176 - RNA, 20 nt, Artificial Sequence
  spacer sequence CTCN PAM
cuuggccuguguccuugagc

SEQ ID NO: 10177 - RNA, 20 nt, Artificial Sequence
  spacer sequence CTCN PAM
aggacacaggccaagggagg

SEQ ID NO: 10178 - RNA, 20 nt, Artificial Sequence
  spacer sequence CTCN PAM
cagguauaaaggaucugucu

SEQ ID NO: 10179 - RNA, 20 nt, Artificial Sequence
  spacer sequence CTCN PAM
gguauaaaggaucugucucc

SEQ ID NO: 10180 - RNA, 20 nt, Artificial Sequence
  spacer sequence CTCN PAM
uucuaccugccccugugcca

SEQ ID NO: 10181 - RNA, 20 nt, Artificial Sequence
  spacer sequence CTCN PAM
ccucucaaaugagaaaggca

SEQ ID NO: 10182 - RNA, 20 nt, Artificial Sequence
  spacer sequence CTCN PAM
caaaugagaaaggcagcuuu

SEQ ID NO: 10183 - RNA, 20 nt, Artificial Sequence
  spacer sequence CTCN PAM
aaugagaaaggcagcuuuga

SEQ ID NO: 10184 - RNA, 20 nt, Artificial Sequence
  spacer sequence CTCN PAM
uuugagaggcgagugugugu

SEQ ID NO: 10185 - RNA, 20 nt, Artificial Sequence
  spacer sequence CTCN PAM
aagcugccuuucucauuuga

SEQ ID NO: 10186 - RNA, 20 nt, Artificial Sequence
  spacer sequence CTCN PAM
caaagcugccuuucucauuu

SEQ ID NO: 10187 - RNA, 20 nt, Artificial Sequence
  spacer sequence CTCN PAM
cucaaagcugccuuucucau

SEQ ID NO: 10188 - RNA, 20 nt, Artificial Sequence
  spacer sequence CTCN PAM
ccucccaacccagaaccuau

SEQ ID NO: 10189 - RNA, 20 nt, Artificial Sequence
  spacer sequence CTCN PAM
caacccagaaccuaucacaa

SEQ ID NO: 10190 - RNA, 20 nt, Artificial Sequence
  spacer sequence CTCN PAM
gcagagaguacaugcucaac

SEQ ID NO: 10191 - RNA, 20 nt, Artificial Sequence
  spacer sequence CTCN PAM
gcagagcauugugauagguu

SEQ ID NO: 10192 - RNA, 20 nt, Artificial Sequence
  spacer sequence CTCN PAM
cugcagagcauugugauagg

SEQ ID NO: 10193 - RNA, 20 nt, Artificial Sequence
  spacer sequence CTCN PAM
acaaauccaaugcuaaauug

SEQ ID NO: 10194 - RNA, 20 nt, Artificial Sequence
  spacer sequence CTCN PAM
cuuuuuacaauuuagcauug

SEQ ID NO: 10195 - RNA, 20 nt, Artificial Sequence
  spacer sequence CTCN PAM
ccucucagcucuaaauuauu

SEQ ID NO: 10196 - RNA, 20 nt, Artificial Sequence
  spacer sequence CTCN PAM
ucucagcucuaaauuauuug

SEQ ID NO: 10197 - RNA, 20 nt, Artificial Sequence
  spacer sequence CTCN PAM
cagcucuaaauuauuugguc

SEQ ID NO: 10198 - RNA, 20 nt, Artificial Sequence
  spacer sequence CTCN PAM
gcucuaaauuauuuggucua

SEQ ID NO: 10199 - RNA, 20 nt, Artificial Sequence
  spacer sequence CTCN PAM
aaauuauuuggucuaaagaa

SEQ ID NO: 10200 - RNA, 20 nt, Artificial Sequence
  spacer sequence CTCN PAM
auuuugcauaucuaauugga

SEQ ID NO: 10201 - RNA, 20 nt, Artificial Sequence
  spacer sequence CTCN PAM
aauuagauaugcaaaaugga

SEQ ID NO: 10202 - RNA, 20 nt, Artificial Sequence
  spacer sequence CTCN PAM
uuuagugucucaaguaugag

SEQ ID NO: 10203 - RNA, 20 nt, Artificial Sequence
  spacer sequence CTCN PAM
aguaugagucaccucugaug

SEQ ID NO: 10204 - RNA, 20 nt, Artificial Sequence
  spacer sequence CTCN PAM
uacuugagacacuaaaagag

SEQ ID NO: 10205 - RNA, 20 nt, Artificial Sequence
  spacer sequence CTCN PAM
gaugacggauaggagaacaa

SEQ ID NO: 10206 - RNA, 20 nt, Artificial Sequence
  spacer sequence CTCN PAM
uauccgucaucagaggugac

SEQ ID NO: 10207 - RNA, 20 nt, Artificial Sequence
  spacer sequence CTCN PAM
aaauggaugccaugugggug

SEQ ID NO: 10208 - RNA, 20 nt, Artificial Sequence
  spacer sequence CTCN PAM
uccaaauggaugccaugugg

SEQ ID NO: 10209 - RNA, 20 nt, Artificial Sequence
  spacer sequence CTCN PAM
gugucuccuccaaauggaug

SEQ ID NO: 10210 - RNA, 20 nt, Artificial Sequence
  spacer sequence CTCN PAM
uuucucugugucuccuccaa

SEQ ID NO: 10211 - RNA, 20 nt, Artificial Sequence
  spacer sequence CTCN PAM
uagacgucucagagauuaac

SEQ ID NO: 10212 - RNA, 20 nt, Artificial Sequence
  spacer sequence CTCN PAM
gagauuaacauuuucucaaa

SEQ ID NO: 10213 - RNA, 20 nt, Artificial Sequence
  spacer sequence CTCN PAM
gagacgucuaagaggugaaa

SEQ ID NO: 10214 - RNA, 20 nt, Artificial Sequence
  spacer sequence CTCN PAM
aaaaugaacacacagagcaa

SEQ ID NO: 10215 - RNA, 20 nt, Artificial Sequence
  spacer sequence CTCN PAM
guguguucauuuuugagaaa

SEQ ID NO: 10216 - RNA, 20 nt, Artificial Sequence
  spacer sequence CTCN PAM
ucagcuguugcucugugugu

SEQ ID NO: 10217 - RNA, 20 nt, Artificial Sequence
  spacer sequence CTCN PAM
gguuacccccugagaaaggc

SEQ ID NO: 10218 - RNA, 20 nt, Artificial Sequence
  spacer sequence CTCN PAM
ggggguaaccagagguggug

SEQ ID NO: 10219 - RNA, 20 nt, Artificial Sequence
  spacer sequence CTCN PAM
gccuuucucaggggguaacc

SEQ ID NO: 10220 - RNA, 20 nt, Artificial Sequence
  spacer sequence CTCN PAM
aauggugacuguucuggggg

SEQ ID NO: 10221 - RNA, 20 nt, Artificial Sequence
  spacer sequence CTCN PAM
ucaaauggugacuguucugg

SEQ ID NO: 10222 - RNA, 20 nt, Artificial Sequence
  spacer sequence CTCN PAM
ccucaaauggugacuguucu

SEQ ID NO: 10223 - RNA, 20 nt, Artificial Sequence
  spacer sequence CTCN PAM
ugaucccugaaccucuccuc

SEQ ID NO: 10224 - RNA, 20 nt, Artificial Sequence
  spacer sequence CTCN PAM
ccaccccacugaaauccaug

SEQ ID NO: 10225 - RNA, 20 nt, Artificial Sequence
  spacer sequence CTCN PAM
caggcuagacuauccaugga

SEQ ID NO: 10226 - RNA, 20 nt, Artificial Sequence
  spacer sequence CTCN PAM
ucuuugagcggcucuucccc

SEQ ID NO: 10227 - RNA, 20 nt, Artificial Sequence
  spacer sequence CTCN PAM
aagaugagaaagauaaagua

SEQ ID NO: 10228 - RNA, 20 nt, Artificial Sequence
  spacer sequence CTCN PAM
uccccagagucaggaugacu

SEQ ID NO: 10229 - RNA, 20 nt, Artificial Sequence
  spacer sequence CTCN PAM
ggggaagagccgcucaaaga

SEQ ID NO: 10230 - RNA, 20 nt, Artificial Sequence
  spacer sequence CTCN PAM
cacuagguuucagguacauc

SEQ ID NO: 10231 - RNA, 20 nt, Artificial Sequence
  spacer sequence CTCN PAM
cuagguuucagguacauccc

SEQ ID NO: 10232 - RNA, 20 nt, Artificial Sequence
  spacer sequence CTCN PAM
agucucugcagcugacacgg

SEQ ID NO: 10233 - RNA, 20 nt, Artificial Sequence
  spacer sequence CTCN PAM
gcagcugacacggcuccaag

SEQ ID NO: 10234 - RNA, 20 nt, Artificial Sequence
  spacer sequence CTCN PAM
aagaugcuaaauaugagaca

SEQ ID NO: 10235 - RNA, 20 nt, Artificial Sequence
  spacer sequence CTCN PAM
uauuuagcaucuuggagccg

SEQ ID NO: 10236 - RNA, 20 nt, Artificial Sequence
  spacer sequence CTCN PAM
uugucucauauuuagcaucu

SEQ ID NO: 10237 - RNA, 20 nt, Artificial Sequence
  spacer sequence CTCN PAM
ugggacuaaauuccuugucc

SEQ ID NO: 10238 - RNA, 20 nt, Artificial Sequence
  spacer sequence CTCN PAM
uucuagugccacuccuggga

SEQ ID NO: 10239 - RNA, 20 nt, Artificial Sequence
  spacer sequence CTCN PAM
cucaggagccaucugccggg

SEQ ID NO: 10240 - RNA, 20 nt, Artificial Sequence
  spacer sequence CTCN PAM
ggagccaucugccgggugcu

SEQ ID NO: 10241 - RNA, 20 nt, Artificial Sequence
  spacer sequence CTCN PAM
ugagggagcagggacuccuu

SEQ ID NO: 10242 - RNA, 20 nt, Artificial Sequence
  spacer sequence CTCN PAM
agaagcacccggcagauggc

SEQ ID NO: 10243 - RNA, 20 nt, Artificial Sequence
  spacer sequence CTCN PAM
acgccccacuugaggcuguc

SEQ ID NO: 10244 - RNA, 20 nt, Artificial Sequence
  spacer sequence CTCN PAM
aguggggcguggaggcagca

SEQ ID NO: 10245 - RNA, 20 nt, Artificial Sequence
  spacer sequence CTCN PAM
agccagccaccccaugggaa

SEQ ID NO: 10246 - RNA, 20 nt, Artificial Sequence
  spacer sequence CTCN PAM
agccagaacuccugcugcuu

SEQ ID NO: 10247 - RNA, 20 nt, Artificial Sequence
  spacer sequence CTCN PAM
ugcugcuucucucuuugugg

SEQ ID NO: 10248 - RNA, 20 nt, Artificial Sequence
  spacer sequence CTCN PAM
cuuuguggagcaaaucuuca

SEQ ID NO: 10249 - RNA, 20 nt, Artificial Sequence
  spacer sequence CTCN PAM
uuguggagcaaaucuucaug

SEQ ID NO: 10250 - RNA, 20 nt, Artificial Sequence
  spacer sequence CTCN PAM
acaaagagagaagcagcagg

SEQ ID NO: 10251 - RNA, 20 nt, Artificial Sequence
  spacer sequence CTCN PAM
cucuucugaaucuucccacc

SEQ ID NO: 10252 - RNA, 20 nt, Artificial Sequence
  spacer sequence CTCN PAM
cuucugaaucuucccacccu

SEQ ID NO: 10253 - RNA, 20 nt, Artificial Sequence
  spacer sequence CTCN PAM
ucugaaucuucccacccuuc

SEQ ID NO: 10254 - RNA, 20 nt, Artificial Sequence
  spacer sequence CTCN PAM
ccacucacacgcuaaaguaa

SEQ ID NO: 10255 - RNA, 20 nt, Artificial Sequence
  spacer sequence CTCN PAM
cacgcuaaaguaaaugaaua

SEQ ID NO: 10256 - RNA, 20 nt, Artificial Sequence
  spacer sequence CTCN PAM
ucccugaucaggacugaaaa

SEQ ID NO: 10257 - RNA, 20 nt, Artificial Sequence
  spacer sequence CTCN PAM
caucacaccacucucuggga

SEQ ID NO: 10258 - RNA, 20 nt, Artificial Sequence
  spacer sequence CTCN PAM
cugggaaaauagaacugagu

SEQ ID NO: 10259 - RNA, 20 nt, Artificial Sequence
  spacer sequence CTCN PAM
gggaaaauagaacugagucc

SEQ ID NO: 10260 - RNA, 20 nt, Artificial Sequence
  spacer sequence CTCN PAM
guucuauuuucccagagagu

SEQ ID NO: 10261 - RNA, 20 nt, Artificial Sequence
  spacer sequence CTCN PAM
agcacugggcacagcugggu

SEQ ID NO: 10262 - RNA, 20 nt, Artificial Sequence
  spacer sequence CTCN PAM
cucuucucaacaagccagag

SEQ ID NO: 10263 - RNA, 20 nt, Artificial Sequence
  spacer sequence CTCN PAM
cuucucaacaagccagagau

SEQ ID NO: 10264 - RNA, 20 nt, Artificial Sequence
  spacer sequence CTCN PAM
ucucaacaagccagagauuc

SEQ ID NO: 10265 - RNA, 20 nt, Artificial Sequence
  spacer sequence CTCN PAM
acaagccagagauucucugc

SEQ ID NO: 10266 - RNA, 20 nt, Artificial Sequence
  spacer sequence CTCN PAM
ggcuuguugagaagagagag

SEQ ID NO: 10267 - RNA, 20 nt, Artificial Sequence
  spacer sequence CTCN PAM
gccuuccagacaggcaccuc

SEQ ID NO: 10268 - RNA, 20 nt, Artificial Sequence
  spacer sequence CTCN PAM
augaagagaagcuguuccug

SEQ ID NO: 10269 - RNA, 20 nt, Artificial Sequence
  spacer sequence CTCN PAM
ucauggaggugccugucugg

SEQ ID NO: 10270 - RNA, 20 nt, Artificial Sequence
  spacer sequence CTCN PAM
ccacaagccaggaacagcuu

SEQ ID NO: 10271 - RNA, 20 nt, Artificial Sequence
  spacer sequence CTCN PAM
cuggauugagucgagaccug

SEQ ID NO: 10272 - RNA, 20 nt, Artificial Sequence
  spacer sequence CTCN PAM
auccagggaguuuugcucac

SEQ ID NO: 10273 - RNA, 20 nt, Artificial Sequence
  spacer sequence CTCN PAM
acucaauccagggaguuuug

SEQ ID NO: 10274 - RNA, 20 nt, Artificial Sequence
  spacer sequence CTCN PAM
agguucacaguccuaaaucc

SEQ ID NO: 10275 - RNA, 20 nt, Artificial Sequence
  spacer sequence CTCN PAM
gagaaggacagacuugaggg

SEQ ID NO: 10276 - RNA, 20 nt, Artificial Sequence
  spacer sequence CTCN PAM
gaggauuuaggacugugaac

SEQ ID NO: 10277 - RNA, 20 nt, Artificial Sequence
  spacer sequence CTCN PAM
agucuguccuucucugagga

SEQ ID NO: 10278 - RNA, 20 nt, Artificial Sequence
  spacer sequence CTCN PAM
gcccaugccaggccaccugu

SEQ ID NO: 10279 - RNA, 20 nt, Artificial Sequence
  spacer sequence CTCN PAM
gagccacaccagccaucucc

SEQ ID NO: 10280 - RNA, 20 nt, Artificial Sequence
  spacer sequence CTCN PAM
gaguccuugugugcugccuc

SEQ ID NO: 10281 - RNA, 20 nt, Artificial Sequence
  spacer sequence CTCN PAM
uuguggacuuuccugagagc

SEQ ID NO: 10282 - RNA, 20 nt, Artificial Sequence
  spacer sequence CTCN PAM
ggaaaguccacaaggagaug

SEQ ID NO: 10283 - RNA, 20 nt, Artificial Sequence
  spacer sequence CTCN PAM
caggaaaguccacaaggaga

SEQ ID NO: 10284 - RNA, 20 nt, Artificial Sequence
  spacer sequence CTCN PAM
aagcacucucugagaggcuu

SEQ ID NO: 10285 - RNA, 20 nt, Artificial Sequence
  spacer sequence CTCN PAM
cugagaggcuuccaggcugg

SEQ ID NO: 10286 - RNA, 20 nt, Artificial Sequence
  spacer sequence CTCN PAM
gagaggcuuccaggcuggag

SEQ ID NO: 10287 - RNA, 20 nt, Artificial Sequence
  spacer sequence CTCN PAM
gagagugcuuggagcacugc

SEQ ID NO: 10288 - RNA, 20 nt, Artificial Sequence
  spacer sequence CTCN PAM
cagagagugcuuggagcacu

SEQ ID NO: 10289 - RNA, 20 nt, Artificial Sequence
  spacer sequence CTCN PAM
agccuggaagccucucagag

SEQ ID NO: 10290 - RNA, 20 nt, Artificial Sequence
  spacer sequence CTCN PAM
gagaggcuuccaggcugggc

SEQ ID NO: 10291 - RNA, 20 nt, Artificial Sequence
  spacer sequence CTCN PAM
gagcuccagccuggaagccu

SEQ ID NO: 10292 - RNA, 20 nt, Artificial Sequence
  spacer sequence CTCN PAM
cagagcuccagccuggaagc

SEQ ID NO: 10293 - RNA, 20 nt, Artificial Sequence
  spacer sequence CTCN PAM
agccaugugguggaaacugg

SEQ ID NO: 10294 - RNA, 20 nt, Artificial Sequence
  spacer sequence CTCN PAM
gcacugcgaucccaccagug

SEQ ID NO: 10295 - RNA, 20 nt, Artificial Sequence
  spacer sequence CTCN PAM
uggcucagcacugcgauccc

SEQ ID NO: 10296 - RNA, 20 nt, Artificial Sequence
  spacer sequence CTCN PAM
aagucuugggacugcccaga

SEQ ID NO: 10297 - RNA, 20 nt, Artificial Sequence
  spacer sequence CTCN PAM
caccuguaaucucagcauuu

SEQ ID NO: 10298 - RNA, 20 nt, Artificial Sequence
  spacer sequence CTCN PAM
gcauuuugggaggccgaggc

SEQ ID NO: 10299 - RNA, 20 nt, Artificial Sequence
  spacer sequence CTCN PAM
caaaaugcugagauuacagg

SEQ ID NO: 10300 - RNA, 20 nt, Artificial Sequence
  spacer sequence CTCN PAM
gccucccaaaaugcugagau

SEQ ID NO: 10301 - RNA, 20 nt, Artificial Sequence
  spacer sequence CTCN PAM
ggugacccacacgccucggc

SEQ ID NO: 10302 - RNA, 20 nt, Artificial Sequence
  spacer sequence CTCN PAM
ugaccucaggugacccacac

SEQ ID NO: 10303 - RNA, 20 nt, Artificial Sequence
  spacer sequence CTCN PAM
acuuaaaaaaaaaaaaaaaa

SEQ ID NO: 10304 - RNA, 20 nt, Artificial Sequence
  spacer sequence CTCN PAM
caaguagcugggauuauagg

SEQ ID NO: 10305 - RNA, 20 nt, Artificial Sequence
  spacer sequence CTCN PAM
gccucccaaguagcugggau

SEQ ID NO: 10306 - RNA, 20 nt, Artificial Sequence
  spacer sequence CTCN PAM
ugccucagccucccaaguag

SEQ ID NO: 10307 - RNA, 20 nt, Artificial Sequence
  spacer sequence CTCN PAM
cagguucaagugauucuccu

SEQ ID NO: 10308 - RNA, 20 nt, Artificial Sequence
  spacer sequence CTCN PAM
gccucccagguucaagugau

SEQ ID NO: 10309 - RNA, 20 nt, Artificial Sequence
  spacer sequence CTCN PAM
uugcagccuccgccucccag

SEQ ID NO: 10310 - RNA, 20 nt, Artificial Sequence
  spacer sequence CTCN PAM
gcucauugcagccuccgccu

SEQ ID NO: 10311 - RNA, 20 nt, Artificial Sequence
  spacer sequence CTCN PAM
agccugggcgacagagcgag

SEQ ID NO: 10312 - RNA, 20 nt, Artificial Sequence
  spacer sequence CTCN PAM
gucgcccaggcuggagugca

SEQ ID NO: 10313 - RNA, 20 nt, Artificial Sequence
  spacer sequence CTCN PAM
cucugucgcccaggcuggag

SEQ ID NO: 10314 - RNA, 20 nt, Artificial Sequence
  spacer sequence CTCN PAM
aucucaaaaaaaaaaaaaaa

SEQ ID NO: 10315 - RNA, 20 nt, Artificial Sequence
  spacer sequence CTCN PAM
aaaaaaaaaaaaaauuaaau

SEQ ID NO: 10316 - RNA, 20 nt, Artificial Sequence
  spacer sequence CTCN PAM
cccacccaauuuaauuuuuu

SEQ ID NO: 10317 - RNA, 20 nt, Artificial Sequence
  spacer sequence CTCN PAM
gauuuuuuuccuaagaaacu

SEQ ID NO: 10318 - RNA, 20 nt, Artificial Sequence
  spacer sequence CTCN PAM
uauggugccuuacccuuuca

SEQ ID NO: 10319 - RNA, 20 nt, Artificial Sequence
  spacer sequence CTCN PAM
uaucaauggaauucacagcc

SEQ ID NO: 10320 - RNA, 20 nt, Artificial Sequence
  spacer sequence CTCN PAM
cuuaucaauggaauucacag

SEQ ID NO: 10321 - RNA, 20 nt, Artificial Sequence
  spacer sequence CTCN PAM
aauaucaaaggucuugcaua

SEQ ID NO: 10322 - RNA, 20 nt, Artificial Sequence
  spacer sequence CTCN PAM
uuucuuuuuuuuuuuuucuu

SEQ ID NO: 10323 - RNA, 20 nt, Artificial Sequence
  spacer sequence CTCN PAM
cuuuucuuuuuuuuuuuuuc

SEQ ID NO: 10324 - RNA, 20 nt, Artificial Sequence
  spacer sequence CTCN PAM
gucucucuuuucuuuuuuuu

SEQ ID NO: 10325 - RNA, 20 nt, Artificial Sequence
  spacer sequence CTCN PAM
cugucucucuuuucuuuuuu

SEQ ID NO: 10326 - RNA, 20 nt, Artificial Sequence
  spacer sequence CTCN PAM
cucugucucucuuuucuuuu

SEQ ID NO: 10327 - RNA, 20 nt, Artificial Sequence
  spacer sequence CTCN PAM
cucucugucucucuuuucuu

SEQ ID NO: 10328 - RNA, 20 nt, Artificial Sequence
  spacer sequence CTCN PAM
cucucucugucucucuuuuc

SEQ ID NO: 10329 - RNA, 20 nt, Artificial Sequence
  spacer sequence CTCN PAM
cucucucucugucucucuuu

SEQ ID NO: 10330 - RNA, 20 nt, Artificial Sequence
  spacer sequence CTCN PAM
uccaagagccagucaaagcc

SEQ ID NO: 10331 - RNA, 20 nt, Artificial Sequence
  spacer sequence CTCN PAM
uggaugaguuuaaaagguga

SEQ ID NO: 10332 - RNA, 20 nt, Artificial Sequence
  spacer sequence CTCN PAM
gccguucucccucuggugag

SEQ ID NO: 10333 - RNA, 20 nt, Artificial Sequence
  spacer sequence CTCN PAM
cucuggugagacaggcucua

SEQ ID NO: 10334 - RNA, 20 nt, Artificial Sequence
  spacer sequence CTCN PAM
ggugagacaggcucuagcuu

SEQ ID NO: 10335 - RNA, 20 nt, Artificial Sequence
  spacer sequence CTCN PAM
ccagagggagaacggcugag

SEQ ID NO: 10336 - RNA, 20 nt, Artificial Sequence
  spacer sequence CTCN PAM
agcuuguuuccagaaugcca

SEQ ID NO: 10337 - RNA, 20 nt, Artificial Sequence
  spacer sequence CTCN PAM
aggggacccccuaacuccaa

SEQ ID NO: 10338 - RNA, 20 nt, Artificial Sequence
  spacer sequence CTCN PAM
aaaguguugcccagaccuaa

SEQ ID NO: 10339 - RNA, 20 nt, Artificial Sequence
  spacer sequence CTCN PAM
cccacgugcuccuuccccaa

SEQ ID NO: 10340 - RNA, 20 nt, Artificial Sequence
  spacer sequence CTCN PAM
uuccccaacacuggcuucca

SEQ ID NO: 10341 - RNA, 20 nt, Artificial Sequence
  spacer sequence CTCN PAM
ccuggaagccaguguugggg

SEQ ID NO: 10342 - RNA, 20 nt, Artificial Sequence
  spacer sequence CTCN PAM
cucaccuggaagccaguguu

SEQ ID NO: 10343 - RNA, 20 nt, Artificial Sequence
  spacer sequence CTCN PAM
gcuugcagauucugucucgc

SEQ ID NO: 10344 - RNA, 20 nt, Artificial Sequence
  spacer sequence CTCN PAM
ccagggaggaagggggaaau

SEQ ID NO: 10345 - RNA, 20 nt, Artificial Sequence
  spacer sequence CTCN PAM
cuggggagaaagugaaaaag

SEQ ID NO: 10346 - RNA, 20 nt, Artificial Sequence
  spacer sequence CTCN PAM
caccuucccuggacagggag

SEQ ID NO: 10347 - RNA, 20 nt, Artificial Sequence
  spacer sequence CTCN PAM
cuguccagggaaggugugag

SEQ ID NO: 10348 - RNA, 20 nt, Artificial Sequence
  spacer sequence CTCN PAM
guucaaucaagcagcgugag

SEQ ID NO: 10349 - RNA, 20 nt, Artificial Sequence
  spacer sequence CTCN PAM
cgcugcuugauugaacagag

SEQ ID NO: 10350 - RNA, 20 nt, Artificial Sequence
  spacer sequence CTCN PAM
ugcccuccaaaagguuauaa

SEQ ID NO: 10351 - RNA, 20 nt, Artificial Sequence
  spacer sequence CTCN PAM
aaaagguuauaauuugagga

SEQ ID NO: 10352 - RNA, 20 nt, Artificial Sequence
  spacer sequence CTCN PAM
aauuauaaccuuuuggaggg

SEQ ID NO: 10353 - RNA, 20 nt, Artificial Sequence
  spacer sequence CTCN PAM
ucaaauuauaaccuuuugga

SEQ ID NO: 10354 - RNA, 20 nt, Artificial Sequence
  spacer sequence CTCN PAM
uccucaaauuauaaccuuuu

SEQ ID NO: 10355 - RNA, 20 nt, Artificial Sequence
  spacer sequence CTCN PAM
uggguguauuuucuccuccu

SEQ ID NO: 10356 - RNA, 20 nt, Artificial Sequence
  spacer sequence CTCN PAM
gggauuaguuaaaaggggau

SEQ ID NO: 10357 - RNA, 20 nt, Artificial Sequence
  spacer sequence CTCN PAM
uccaaagaaagccaaguugc

SEQ ID NO: 10358 - RNA, 20 nt, Artificial Sequence
  spacer sequence CTCN PAM
aaagaaagccaaguugcuga

SEQ ID NO: 10359 - RNA, 20 nt, Artificial Sequence
  spacer sequence CTCN PAM
gucagcaacuuggcuuucuu

SEQ ID NO: 10360 - RNA, 20 nt, Artificial Sequence
  spacer sequence CTCN PAM
ccaggccauuuuucuaggua

SEQ ID NO: 10361 - RNA, 20 nt, Artificial Sequence
  spacer sequence CTCN PAM
uucuagugggcuggaccucc

SEQ ID NO: 10362 - RNA, 20 nt, Artificial Sequence
  spacer sequence CTCN PAM
auaaauaucugugggaccca

SEQ ID NO: 10363 - RNA, 20 nt, Artificial Sequence
  spacer sequence CTCN PAM
cugaaacacagcccagugcu

SEQ ID NO: 10364 - RNA, 20 nt, Artificial Sequence
  spacer sequence CTCN PAM
gaaacacagcccagugcuuu

SEQ ID NO: 10365 - RNA, 20 nt, Artificial Sequence
  spacer sequence CTCN PAM
cugccugaaagcacugggcu

SEQ ID NO: 10366 - RNA, 20 nt, Artificial Sequence
  spacer sequence CTCN PAM
guccgccacccaccaccacu

SEQ ID NO: 10367 - RNA, 20 nt, Artificial Sequence
  spacer sequence CTCN PAM
caucucuguccgccacccac

SEQ ID NO: 10368 - RNA, 20 nt, Artificial Sequence
  spacer sequence CTCN PAM
ugaucacccaacuuuccagc

SEQ ID NO: 10369 - RNA, 20 nt, Artificial Sequence
  spacer sequence CTCN PAM
agucaggggcagaaaugggg

SEQ ID NO: 10370 - RNA, 20 nt, Artificial Sequence
  spacer sequence CTCN PAM
caggccacucaacccacugu

SEQ ID NO: 10371 - RNA, 20 nt, Artificial Sequence
  spacer sequence CTCN PAM
acccacugugaggucuuacu

SEQ ID NO: 10372 - RNA, 20 nt, Artificial Sequence
  spacer sequence CTCN PAM
caguggguugaguggccugg

SEQ ID NO: 10373 - RNA, 20 nt, Artificial Sequence
  spacer sequence CTCN PAM
guaauccccacaguaagacc

SEQ ID NO: 10374 - RNA, 20 nt, Artificial Sequence
  spacer sequence CTCN PAM
aauugacuuguucacuuccu

SEQ ID NO: 10375 - RNA, 20 nt, Artificial Sequence
  spacer sequence CTCN PAM
gggcaccgcugggccaacac

SEQ ID NO: 10376 - RNA, 20 nt, Artificial Sequence
  spacer sequence CTCN PAM
guggguguuggcccagcggu

SEQ ID NO: 10377 - RNA, 20 nt, Artificial Sequence
  spacer sequence CTCN PAM
aggguauuuguauuccagga

SEQ ID NO: 10378 - RNA, 20 nt, Artificial Sequence
  spacer sequence CTCN PAM
ucucaccacuucaauuaugu

SEQ ID NO: 10379 - RNA, 20 nt, Artificial Sequence
  spacer sequence CTCN PAM
ccacuucaauuaugucuuca

SEQ ID NO: 10380 - RNA, 20 nt, Artificial Sequence
  spacer sequence CTCN PAM
ugccagcuuugggugcucua

SEQ ID NO: 10381 - RNA, 20 nt, Artificial Sequence
  spacer sequence CTCN PAM
aagaugcuuucccaugucug

SEQ ID NO: 10382 - RNA, 20 nt, Artificial Sequence
  spacer sequence CTCN PAM
cugucaccucuccucacccc

SEQ ID NO: 10383 - RNA, 20 nt, Artificial Sequence
  spacer sequence CTCN PAM
ccucaccccagcacacagaa

SEQ ID NO: 10384 - RNA, 20 nt, Artificial Sequence
  spacer sequence CTCN PAM
ucaccccagcacacagaaaa

SEQ ID NO: 10385 - RNA, 20 nt, Artificial Sequence
  spacer sequence CTCN PAM
ccccagcacacagaaaagau

SEQ ID NO: 10386 - RNA, 20 nt, Artificial Sequence
  spacer sequence CTCN PAM
uauuauuaaaacacagguuu

SEQ ID NO: 10387 - RNA, 20 nt, Artificial Sequence
  spacer sequence CTCN PAM
aaaaagacuuggcucugcug

SEQ ID NO: 10388 - RNA, 20 nt, Artificial Sequence
  spacer sequence CTCN PAM
gcuggcucacagggaaucug

SEQ ID NO: 10389 - RNA, 20 nt, Artificial Sequence
  spacer sequence CTCN PAM
cagggaaucugggcuccgcu

SEQ ID NO: 10390 - RNA, 20 nt, Artificial Sequence
  spacer sequence CTCN PAM
gcucuuccaaaaccuuuguu

SEQ ID NO: 10391 - RNA, 20 nt, Artificial Sequence
  spacer sequence CTCN PAM
uccaaaaccuuuguucucca

SEQ ID NO: 10392 - RNA, 20 nt, Artificial Sequence
  spacer sequence CTCN PAM
agaugucagugcaaaguuau

SEQ ID NO: 10393 - RNA, 20 nt, Artificial Sequence
  spacer sequence CTCN PAM
cccccugagcuaacuuaccg

SEQ ID NO: 10394 - RNA, 20 nt, Artificial Sequence
  spacer sequence CTCN PAM
cccugagcuaacuuaccgag

SEQ ID NO: 10395 - RNA, 20 nt, Artificial Sequence
  spacer sequence CTCN PAM
gggggagagcuguucauaac

SEQ ID NO: 10396 - RNA, 20 nt, Artificial Sequence
  spacer sequence CTCN PAM
guaaguuagcucagggggag

SEQ ID NO: 10397 - RNA, 20 nt, Artificial Sequence
  spacer sequence CTCN PAM
cuuacugcucgguaaguuag

SEQ ID NO: 10398 - RNA, 20 nt, Artificial Sequence
  spacer sequence CTCN PAM
cuauauuucucagccuccau

SEQ ID NO: 10399 - RNA, 20 nt, Artificial Sequence
  spacer sequence CTCN PAM
gccuccaugaagucgucacu

SEQ ID NO: 10400 - RNA, 20 nt, Artificial Sequence
  spacer sequence CTCN PAM
augaagucgucacugggaga

SEQ ID NO: 10401 - RNA, 20 nt, Artificial Sequence
  spacer sequence CTCN PAM
cagugacgacuucauggagg

SEQ ID NO: 10402 - RNA, 20 nt, Artificial Sequence
  spacer sequence CTCN PAM
cccagugacgacuucaugga

SEQ ID NO: 10403 - RNA, 20 nt, Artificial Sequence
  spacer sequence CTCN PAM
ucucccagugacgacuucau

SEQ ID NO: 10404 - RNA, 20 nt, Artificial Sequence
  spacer sequence CTCN PAM
uggcuccucucccagugacg

SEQ ID NO: 10405 - RNA, 20 nt, Artificial Sequence
  spacer sequence CTCN PAM
cucuuggcuccucucccagu

SEQ ID NO: 10406 - RNA, 20 nt, Artificial Sequence
  spacer sequence CTCN PAM
uaaggugcccccucccucuu

SEQ ID NO: 10407 - RNA, 20 nt, Artificial Sequence
  spacer sequence CTCN PAM
ccgucauccggggaagugga

SEQ ID NO: 10408 - RNA, 20 nt, Artificial Sequence
  spacer sequence CTCN PAM
acuuccccggaugacgguga

SEQ ID NO: 10409 - RNA, 20 nt, Artificial Sequence
  spacer sequence CTCN PAM
ccacuuccccggaugacggu

SEQ ID NO: 10410 - RNA, 20 nt, Artificial Sequence
  spacer sequence CTCN PAM
ugucaggaguggagagcuaa

SEQ ID NO: 10411 - RNA, 20 nt, Artificial Sequence
  spacer sequence CTCN PAM
ugacacgaguucccugacuu

SEQ ID NO: 10412 - RNA, 20 nt, Artificial Sequence
  spacer sequence CTCN PAM
acuccugacacgaguucccu

SEQ ID NO: 10413 - RNA, 20 nt, Artificial Sequence
  spacer sequence CTCN PAM
ccacuccugacacgaguucc

SEQ ID NO: 10414 - RNA, 20 nt, Artificial Sequence
  spacer sequence CTCN PAM
auauggacaaggacagagag

SEQ ID NO: 10415 - RNA, 20 nt, Artificial Sequence
  spacer sequence CTCN PAM
guccuuguccauauugagcu

SEQ ID NO: 10416 - RNA, 20 nt, Artificial Sequence
  spacer sequence CTCN PAM
cuguccuuguccauauugag

SEQ ID NO: 10417 - RNA, 20 nt, Artificial Sequence
  spacer sequence CTCN PAM
caucccaggugccccucucu

SEQ ID NO: 10418 - RNA, 20 nt, Artificial Sequence
  spacer sequence CTCN PAM
caguuguccugaugccacau

SEQ ID NO: 10419 - RNA, 20 nt, Artificial Sequence
  spacer sequence CTCN PAM
aagauggcugacaaagaucu

SEQ ID NO: 10420 - RNA, 20 nt, Artificial Sequence
  spacer sequence CTCN PAM
gcuugguguccacuaggaau

SEQ ID NO: 10421 - RNA, 20 nt, Artificial Sequence
  spacer sequence CTCN PAM
ugcucagcuugguguccacu

SEQ ID NO: 10422 - RNA, 20 nt, Artificial Sequence
  spacer sequence CTCN PAM
uauguccugcuugcuuuuuu

SEQ ID NO: 10423 - RNA, 20 nt, Artificial Sequence
  spacer sequence CTCN PAM
guaguuaucagacuaauguu

SEQ ID NO: 10424 - RNA, 20 nt, Artificial Sequence
  spacer sequence CTCN PAM
aacauuagucugauaacuac

SEQ ID NO: 10425 - RNA, 20 nt, Artificial Sequence
  spacer sequence CTCN PAM
uuuacucaaacauuagucug

SEQ ID NO: 10426 - RNA, 20 nt, Artificial Sequence
  spacer sequence CTCN PAM
uuagaaucugcugguuuucc

SEQ ID NO: 10427 - RNA, 20 nt, Artificial Sequence
  spacer sequence CTCN PAM
cuuuagaaucugcugguuuu

SEQ ID NO: 10428 - RNA, 20 nt, Artificial Sequence
  spacer sequence CTCN PAM
uggaucuauuaucuuguaac

SEQ ID NO: 10429 - RNA, 20 nt, Artificial Sequence
  spacer sequence CTCN PAM
uuccugaaccugaacucaug

SEQ ID NO: 10430 - RNA, 20 nt, Artificial Sequence
  spacer sequence CTCN PAM
gccacuucuucuuccuaaau

SEQ ID NO: 10431 - RNA, 20 nt, Artificial Sequence
  spacer sequence CTCN PAM
ucaccagcuuugggcugaaa

SEQ ID NO: 10432 - RNA, 20 nt, Artificial Sequence
  spacer sequence CTCN PAM
ggaaugaagaggaaaugggu

SEQ ID NO: 10433 - RNA, 20 nt, Artificial Sequence
  spacer sequence CTCN PAM
ucauuccagagacgacaaag

SEQ ID NO: 10434 - RNA, 20 nt, Artificial Sequence
  spacer sequence CTCN PAM
aucgcaggaaauccuuccuu

SEQ ID NO: 10435 - RNA, 20 nt, Artificial Sequence
  spacer sequence CTCN PAM
caaucgcaggaaauccuucc

SEQ ID NO: 10436 - RNA, 20 nt, Artificial Sequence
  spacer sequence CTCN PAM
ccacccuaguucuauuuuua

SEQ ID NO: 10437 - RNA, 20 nt, Artificial Sequence
  spacer sequence CTCN PAM
uccucaccacccuaguucua

SEQ ID NO: 10438 - RNA, 20 nt, Artificial Sequence
  spacer sequence CTCN PAM
agaauuggccagcccaaccu

SEQ ID NO: 10439 - RNA, 20 nt, Artificial Sequence
  spacer sequence CTCN PAM
ggggcagauggcccuccaga

SEQ ID NO: 10440 - RNA, 20 nt, Artificial Sequence
  spacer sequence CTCN PAM
caggggcagauggcccucca

SEQ ID NO: 10441 - RNA, 20 nt, Artificial Sequence
  spacer sequence CTCN PAM
aucuacuccauuaucuccag

SEQ ID NO: 10442 - RNA, 20 nt, Artificial Sequence
  spacer sequence CTCN PAM
auuaucuccaguuaucugaa

SEQ ID NO: 10443 - RNA, 20 nt, Artificial Sequence
  spacer sequence CTCN PAM
aguuaucugaauaaaaaagc

SEQ ID NO: 10444 - RNA, 20 nt, Artificial Sequence
  spacer sequence CTCN PAM
caaaguguggcccuucuggg

SEQ ID NO: 10445 - RNA, 20 nt, Artificial Sequence
  spacer sequence CTCN PAM
gcccuuuuucggggcugguc

SEQ ID NO: 10446 - RNA, 20 nt, Artificial Sequence
  spacer sequence CTCN PAM
gcaacagcacaggugauugg

SEQ ID NO: 10447 - RNA, 20 nt, Artificial Sequence
  spacer sequence CTCN PAM
ccagguuagcacugccacaa

SEQ ID NO: 10448 - RNA, 20 nt, Artificial Sequence
  spacer sequence CTCN PAM
ucaacaaagcuccaguuaag

SEQ ID NO: 10449 - RNA, 20 nt, Artificial Sequence
  spacer sequence CTCN PAM
aguuaagaaaagcauuccag

SEQ ID NO: 10450 - RNA, 20 nt, Artificial Sequence
  spacer sequence CTCN PAM
gcaaagcacaugcgggccac

SEQ ID NO: 10451 - RNA, 20 nt, Artificial Sequence
  spacer sequence CTCN PAM
ggcuccugcuggccauggag

SEQ ID NO: 10452 - RNA, 20 nt, Artificial Sequence
  spacer sequence CTCN PAM
ugcuggccauggagaggcca

SEQ ID NO: 10453 - RNA, 20 nt, Artificial Sequence
  spacer sequence CTCN PAM
auggccagcaggagccagag

SEQ ID NO: 10454 - RNA, 20 nt, Artificial Sequence
  spacer sequence CTCN PAM
ccauggccagcaggagccag

SEQ ID NO: 10455 - RNA, 20 nt, Artificial Sequence
  spacer sequence CTCN PAM
gggccaagucuaccacugcc

SEQ ID NO: 10456 - RNA, 20 nt, Artificial Sequence
  spacer sequence CTCN PAM
ggcacucacuccccucuuag

SEQ ID NO: 10457 - RNA, 20 nt, Artificial Sequence
  spacer sequence CTCN PAM
cuccccucuuagccucaacc

SEQ ID NO: 10458 - RNA, 20 nt, Artificial Sequence
  spacer sequence CTCN PAM
ccucuuagccucaaccuuuc

SEQ ID NO: 10459 - RNA, 20 nt, Artificial Sequence
  spacer sequence CTCN PAM
uagccucaaccuuucucauc

SEQ ID NO: 10460 - RNA, 20 nt, Artificial Sequence
  spacer sequence CTCN PAM
accuuucucaucuguaaaau

SEQ ID NO: 10461 - RNA, 20 nt, Artificial Sequence
  spacer sequence CTCN PAM
ucuguaaaaugacaggguua

SEQ ID NO: 10462 - RNA, 20 nt, Artificial Sequence
  spacer sequence CTCN PAM
auaaguauucacuuuggcuu

SEQ ID NO: 10463 - RNA, 20 nt, Artificial Sequence
  spacer sequence CTCN PAM
aagagcugugcuuucuucua

SEQ ID NO: 10464 - RNA, 20 nt, Artificial Sequence
  spacer sequence CTCN PAM
uugagcauagauaguuuccu

SEQ ID NO: 10465 - RNA, 20 nt, Artificial Sequence
  spacer sequence CTCN PAM
gaaacucuugucgacuagag

SEQ ID NO: 10466 - RNA, 20 nt, Artificial Sequence
  spacer sequence CTCN PAM
ugucgacuagaggaacaaga

SEQ ID NO: 10467 - RNA, 20 nt, Artificial Sequence
  spacer sequence CTCN PAM
agucgacaagaguuucugag

SEQ ID NO: 10468 - RNA, 20 nt, Artificial Sequence
  spacer sequence CTCN PAM
aaaacccaauuuuaggggag

SEQ ID NO: 10469 - RNA, 20 nt, Artificial Sequence
  spacer sequence CTCN PAM
ccuaaaauuggguuuuagag

SEQ ID NO: 10470 - RNA, 20 nt, Artificial Sequence
  spacer sequence CTCN PAM
uccccuaaaauuggguuuua

SEQ ID NO: 10471 - RNA, 20 nt, Artificial Sequence
  spacer sequence CTCN PAM
ccuccccuaaaauuggguuu

SEQ ID NO: 10472 - RNA, 20 nt, Artificial Sequence
  spacer sequence CTCN PAM
ggccuucaaguaauuaauuu

SEQ ID NO: 10473 - RNA, 20 nt, Artificial Sequence
  spacer sequence CTCN PAM
gaaauuuggaaggccacaga

SEQ ID NO: 10474 - RNA, 20 nt, Artificial Sequence
  spacer sequence CTCN PAM
guggccuuccaaauuucuga

SEQ ID NO: 10475 - RNA, 20 nt, Artificial Sequence
  spacer sequence CTCN PAM
uagcuucaagcaaucuuccc

SEQ ID NO: 10476 - RNA, 20 nt, Artificial Sequence
  spacer sequence CTCN PAM
acaaaaagcuuaauaaauaa

SEQ ID NO: 10477 - RNA, 20 nt, Artificial Sequence
  spacer sequence CTCN PAM
gcaauuauuuuauuuuauuu

SEQ ID NO: 10478 - RNA, 20 nt, Artificial Sequence
  spacer sequence CTCN PAM
uucccucugucaacaucugc

SEQ ID NO: 10479 - RNA, 20 nt, Artificial Sequence
  spacer sequence CTCN PAM
gucaacaucugcugagcucu

SEQ ID NO: 10480 - RNA, 20 nt, Artificial Sequence
  spacer sequence CTCN PAM
gcagauguugacagagggaa

SEQ ID NO: 10481 - RNA, 20 nt, Artificial Sequence
  spacer sequence CTCN PAM
cauaauacauaaaacaucau

SEQ ID NO: 10482 - RNA, 20 nt, Artificial Sequence
  spacer sequence CTCN PAM
uaauacauaaaacaucauag

SEQ ID NO: 10483 - RNA, 20 nt, Artificial Sequence
  spacer sequence CTCN PAM
uuuaucuaugauguuuuaug

SEQ ID NO: 10484 - RNA, 20 nt, Artificial Sequence
  spacer sequence CTCN PAM
gagaauuuggcuacuacuua

SEQ ID NO: 10485 - RNA, 20 nt, Artificial Sequence
  spacer sequence CTCN PAM
gagucugcuucaugacaggc

SEQ ID NO: 10486 - RNA, 20 nt, Artificial Sequence
  spacer sequence CTCN PAM
aucgcagacauuuuaaaacu

SEQ ID NO: 10487 - RNA, 20 nt, Artificial Sequence
  spacer sequence CTCN PAM
ccugcauuuaaauaugaaua

SEQ ID NO: 10488 - RNA, 20 nt, Artificial Sequence
  spacer sequence CTCN PAM
uuauucauauuuaaaugcag

SEQ ID NO: 10489 - RNA, 20 nt, Artificial Sequence
  spacer sequence CTCN PAM
cucuuuauucauauuuaaau

SEQ ID NO: 10490 - RNA, 20 nt, Artificial Sequence
  spacer sequence CTCN PAM
caugugccauuuuuaccugg

SEQ ID NO: 10491 - RNA, 20 nt, Artificial Sequence
  spacer sequence CTCN PAM
agaucugagaaucaccacac

SEQ ID NO: 10492 - RNA, 20 nt, Artificial Sequence
  spacer sequence CTCN PAM
gaucuagagcaaugcuuccu

SEQ ID NO: 10493 - RNA, 20 nt, Artificial Sequence
  spacer sequence CTCN PAM
gguguguggugauucucaga

SEQ ID NO: 10494 - RNA, 20 nt, Artificial Sequence
  spacer sequence CTCN PAM
cugguguguggugauucuca

SEQ ID NO: 10495 - RNA, 20 nt, Artificial Sequence
  spacer sequence CTCN PAM
caugcccucucuggugugug

SEQ ID NO: 10496 - RNA, 20 nt, Artificial Sequence
  spacer sequence CTCN PAM
gcuggguuugugugucaccu

SEQ ID NO: 10497 - RNA, 20 nt, Artificial Sequence
  spacer sequence CTCN PAM
acguucucugcuggguuugu

SEQ ID NO: 10498 - RNA, 20 nt, Artificial Sequence
  spacer sequence CTCN PAM
uucucaacguucucugcugg

SEQ ID NO: 10499 - RNA, 20 nt, Artificial Sequence
  spacer sequence CTCN PAM
uaaaacucuuucucaacguu

SEQ ID NO: 10500 - RNA, 20 nt, Artificial Sequence
  spacer sequence CTCN PAM
ucaucagaguucacuuaaaa

SEQ ID NO: 10501 - RNA, 20 nt, Artificial Sequence
  spacer sequence CTCN PAM
gaugaugaguaggcucuuaa

SEQ ID NO: 10502 - RNA, 20 nt, Artificial Sequence
  spacer sequence CTCN PAM
ucaauuacuguucaaguuca

SEQ ID NO: 10503 - RNA, 20 nt, Artificial Sequence
  spacer sequence CTCN PAM
augggcaaagaucaagaggc

SEQ ID NO: 10504 - RNA, 20 nt, Artificial Sequence
  spacer sequence CTCN PAM
ugaucuuugcccaucgagca

SEQ ID NO: 10505 - RNA, 20 nt, Artificial Sequence
  spacer sequence CTCN PAM
cuacaauccacagcaaaagg

SEQ ID NO: 10506 - RNA, 20 nt, Artificial Sequence
  spacer sequence CTCN PAM
uuuugcuguggauuguaggg

SEQ ID NO: 10507 - RNA, 20 nt, Artificial Sequence
  spacer sequence CTCN PAM
ccuuuugcuguggauuguag

SEQ ID NO: 10508 - RNA, 20 nt, Artificial Sequence
  spacer sequence CTCN PAM
uuaaaagaaggaacucuccu

SEQ ID NO: 10509 - RNA, 20 nt, Artificial Sequence
  spacer sequence CTCN PAM
caacucuugagagaaaaugg

SEQ ID NO: 10510 - RNA, 20 nt, Artificial Sequence
  spacer sequence CTCN PAM
acucuugagagaaaauggac

SEQ ID NO: 10511 - RNA, 20 nt, Artificial Sequence
  spacer sequence CTCN PAM
ugagagaaaauggacagaag

SEQ ID NO: 10512 - RNA, 20 nt, Artificial Sequence
  spacer sequence CTCN PAM
agaguugagagaugugugcc

SEQ ID NO: 10513 - RNA, 20 nt, Artificial Sequence
  spacer sequence CTCN PAM
caagaguugagagaugugug

SEQ ID NO: 10514 - RNA, 20 nt, Artificial Sequence
  spacer sequence CTCN PAM
cuguuuccugcugguaucag

SEQ ID NO: 10515 - RNA, 20 nt, Artificial Sequence
  spacer sequence CTCN PAM
gguagguacuaccaaaccaa

SEQ ID NO: 10516 - RNA, 20 nt, Artificial Sequence
  spacer sequence CTCN PAM
caaguacaccaggaaccccu

SEQ ID NO: 10517 - RNA, 20 nt, Artificial Sequence
  spacer sequence CTCN PAM
gguucccuuucuugccccgc

SEQ ID NO: 10518 - RNA, 20 nt, Artificial Sequence
  spacer sequence CTCN PAM
gucuauggguaucaacaccu

SEQ ID NO: 10519 - RNA, 20 nt, Artificial Sequence
  spacer sequence CTCN PAM
auauugagagacauaaaaca

SEQ ID NO: 10520 - RNA, 20 nt, Artificial Sequence
  spacer sequence CTCN PAM
auauggagguuauagaauca

SEQ ID NO: 10521 - RNA, 20 nt, Artificial Sequence
  spacer sequence CTCN PAM
caauauggagguuauagaau

SEQ ID NO: 10522 - RNA, 20 nt, Artificial Sequence
  spacer sequence CTCN PAM
aggcagcugaaagucaguac

SEQ ID NO: 10523 - RNA, 20 nt, Artificial Sequence
  spacer sequence CTCN PAM
uuacagguuauagacacauu

SEQ ID NO: 10524 - RNA, 20 nt, Artificial Sequence
  spacer sequence CTCN PAM
ccuuacagguuauagacaca

SEQ ID NO: 10525 - RNA, 20 nt, Artificial Sequence
  spacer sequence CTCN PAM
ugcugcagagaaaaaauaag

SEQ ID NO: 10526 - RNA, 20 nt, Artificial Sequence
  spacer sequence CTCN PAM
gcagcaugagugcagucacc

SEQ ID NO: 10527 - RNA, 20 nt, Artificial Sequence
  spacer sequence CTCN PAM
cuugccugccugccugccug

SEQ ID NO: 10528 - RNA, 20 nt, Artificial Sequence
  spacer sequence CTCN PAM
uguaaggaaagaaggcaggc

SEQ ID NO: 10529 - RNA, 20 nt, Artificial Sequence
  spacer sequence CTCN PAM
ugaaaucugacgugcuuugc

SEQ ID NO: 10530 - RNA, 20 nt, Artificial Sequence
  spacer sequence CTCN PAM
aguggucaacuuacugcugu

SEQ ID NO: 10531 - RNA, 20 nt, Artificial Sequence
  spacer sequence CTCN PAM
cuuucuccaguggucaacuu

SEQ ID NO: 10532 - RNA, 20 nt, Artificial Sequence
  spacer sequence CTCN PAM
gaaaucuacaagauuccagu

SEQ ID NO: 10533 - RNA, 20 nt, Artificial Sequence
  spacer sequence CTCN PAM
cagcugcaugugucagaaca

SEQ ID NO: 10534 - RNA, 20 nt, Artificial Sequence
  spacer sequence CTCN PAM
cagucacauccuguauucuc

SEQ ID NO: 10535 - RNA, 20 nt, Artificial Sequence
  spacer sequence CTCN PAM
uaaauuacuccaaugacaaa

SEQ ID NO: 10536 - RNA, 20 nt, Artificial Sequence
  spacer sequence CTCN PAM
aaugacaaagaaaacucagu

SEQ ID NO: 10537 - RNA, 20 nt, Artificial Sequence
  spacer sequence CTCN PAM
gugaagacaaagagaucguu

SEQ ID NO: 10538 - RNA, 20 nt, Artificial Sequence
  spacer sequence CTCN PAM
uugucuucacugaguuuucu

SEQ ID NO: 10539 - RNA, 20 nt, Artificial Sequence
  spacer sequence CTCN PAM
ggaauucauggcuaugcuug

SEQ ID NO: 10540 - RNA, 20 nt, Artificial Sequence
  spacer sequence CTCN PAM
cuagacuuggaguguuaaaa

SEQ ID NO: 10541 - RNA, 20 nt, Artificial Sequence
  spacer sequence CTCN PAM
agacuuggaguguuaaaagu

SEQ ID NO: 10542 - RNA, 20 nt, Artificial Sequence
  spacer sequence CTCN PAM
aagucuagagagaauuaucc

SEQ ID NO: 10543 - RNA, 20 nt, Artificial Sequence
  spacer sequence CTCN PAM
ccucucucuggcaggagaau

SEQ ID NO: 10544 - RNA, 20 nt, Artificial Sequence
  spacer sequence CTCN PAM
cucuggcaggagaaucaugu

SEQ ID NO: 10545 - RNA, 20 nt, Artificial Sequence
  spacer sequence CTCN PAM
cuggcaggagaaucauguca

SEQ ID NO: 10546 - RNA, 20 nt, Artificial Sequence
  spacer sequence CTCN PAM
ggcaggagaaucaugucacu

SEQ ID NO: 10547 - RNA, 20 nt, Artificial Sequence
  spacer sequence CTCN PAM
ugccagagagaggggagaau

SEQ ID NO: 10548 - RNA, 20 nt, Artificial Sequence
  spacer sequence CTCN PAM
ucaaauaauucggccuaaau

SEQ ID NO: 10549 - RNA, 20 nt, Artificial Sequence
  spacer sequence CTCN PAM
ugcauaaauaauuuugcaau

SEQ ID NO: 10550 - RNA, 20 nt, Artificial Sequence
  spacer sequence CTCN PAM
aaaguucccaggcaaauggg

SEQ ID NO: 10551 - RNA, 20 nt, Artificial Sequence
  spacer sequence CTCN PAM
uuaauuuucacccuuacaau

SEQ ID NO: 10552 - RNA, 20 nt, Artificial Sequence
  spacer sequence CTCN PAM
ucugcagguuuuguuuauuu

SEQ ID NO: 10553 - RNA, 20 nt, Artificial Sequence
  spacer sequence CTCN PAM
aaauaaacaaaaccugcaga

SEQ ID NO: 10554 - RNA, 20 nt, Artificial Sequence
  spacer sequence CTCN PAM
ugucuugaaaaaaaaaguga

SEQ ID NO: 10555 - RNA, 20 nt, Artificial Sequence
  spacer sequence CTCN PAM
cugauuaguaaugcauuaug

SEQ ID NO: 10556 - RNA, 20 nt, Artificial Sequence
  spacer sequence CTCN PAM
agaauuuauacucacugauu

SEQ ID NO: 10557 - RNA, 20 nt, Artificial Sequence
  spacer sequence CTCN PAM
gacuccagaauuuauacuca

SEQ ID NO: 10558 - RNA, 20 nt, Artificial Sequence
  spacer sequence CTCN PAM
uuacuuuuauaaucuagauu

SEQ ID NO: 10559 - RNA, 20 nt, Artificial Sequence
  spacer sequence CTCN PAM
uucuuauaaacggaaugcga

SEQ ID NO: 10560 - RNA, 20 nt, Artificial Sequence
  spacer sequence CTCN PAM
cagaguuuucugaggaaaau

SEQ ID NO: 10561 - RNA, 20 nt, Artificial Sequence
  spacer sequence CTCN PAM
gugaggauaauuucuccuuc

SEQ ID NO: 10562 - RNA, 20 nt, Artificial Sequence
  spacer sequence CTCN PAM
gaaaacucugugaggauaau

SEQ ID NO: 10563 - RNA, 20 nt, Artificial Sequence
  spacer sequence CTCN PAM
gacucaacacuaugaggcau

SEQ ID NO: 10564 - RNA, 20 nt, Artificial Sequence
  spacer sequence CTCN PAM
acacuaugaggcauaagguc

SEQ ID NO: 10565 - RNA, 20 nt, Artificial Sequence
  spacer sequence CTCN PAM
uaguguugagucagagcaaa

SEQ ID NO: 10566 - RNA, 20 nt, Artificial Sequence
  spacer sequence CTCN PAM
uuggugcuucugugguugug

SEQ ID NO: 10567 - RNA, 20 nt, Artificial Sequence
  spacer sequence CTCN PAM
ccuuggugcuucugugguug

SEQ ID NO: 10568 - RNA, 20 nt, Artificial Sequence
  spacer sequence CTCN PAM
uuuugaugcaaauaucuuca

SEQ ID NO: 10569 - RNA, 20 nt, Artificial Sequence
  spacer sequence CTCN PAM
aguggguucccaccgguguu

SEQ ID NO: 10570 - RNA, 20 nt, Artificial Sequence
  spacer sequence CTCN PAM
guacacaaccuuugucaacc

SEQ ID NO: 10571 - RNA, 20 nt, Artificial Sequence
  spacer sequence CTCN PAM
auuucaucccuuuccaaaaa

SEQ ID NO: 10572 - RNA, 20 nt, Artificial Sequence
  spacer sequence CTCN PAM
ccauuucaucccuuuccaaa

SEQ ID NO: 10573 - RNA, 20 nt, Artificial Sequence
  spacer sequence CTCN PAM
cacacacacacacacacaca

SEQ ID NO: 10574 - RNA, 20 nt, Artificial Sequence
  spacer sequence CTCN PAM
cacaaauccuugagggugcc

SEQ ID NO: 10575 - RNA, 20 nt, Artificial Sequence
  spacer sequence CTCN PAM
aggauuugugugagugugug

SEQ ID NO: 10576 - RNA, 20 nt, Artificial Sequence
  spacer sequence CTCN PAM
cagauaacugagugacacuu

SEQ ID NO: 10577 - RNA, 20 nt, Artificial Sequence
  spacer sequence CTCN PAM
gauaacugagugacacuugc

SEQ ID NO: 10578 - RNA, 20 nt, Artificial Sequence
  spacer sequence CTCN PAM
guuaucugagaguggcgcuu

SEQ ID NO: 10579 - RNA, 20 nt, Artificial Sequence
  spacer sequence CTCN PAM
gugugaagcgagagagagcg

SEQ ID NO: 10580 - RNA, 20 nt, Artificial Sequence
  spacer sequence CTCN PAM
cuucacacagaggcuauuau

SEQ ID NO: 10581 - RNA, 20 nt, Artificial Sequence
  spacer sequence CTCN PAM
cgcuucacacagaggcuauu

SEQ ID NO: 10582 - RNA, 20 nt, Artificial Sequence
  spacer sequence CTCN PAM
cucgcuucacacagaggcua

SEQ ID NO: 10583 - RNA, 20 nt, Artificial Sequence
  spacer sequence CTCN PAM
cucucgcuucacacagaggc

SEQ ID NO: 10584 - RNA, 20 nt, Artificial Sequence
  spacer sequence CTCN PAM
gguuuuacaaaauguccgcu

SEQ ID NO: 10585 - RNA, 20 nt, Artificial Sequence
  spacer sequence CTCN PAM
gcuuccaggcagcagauacg

SEQ ID NO: 10586 - RNA, 20 nt, Artificial Sequence
  spacer sequence CTCN PAM
gccguaucugcugccuggaa

SEQ ID NO: 10587 - RNA, 20 nt, Artificial Sequence
  spacer sequence CTCN PAM
ucucugccguaucugcugcc

SEQ ID NO: 10588 - RNA, 20 nt, Artificial Sequence
  spacer sequence CTCN PAM
ccugugacgggcugcacgaa

SEQ ID NO: 10589 - RNA, 20 nt, Artificial Sequence
  spacer sequence CTCN PAM
gcaauugccacucugcuccc

SEQ ID NO: 10590 - RNA, 20 nt, Artificial Sequence
  spacer sequence CTCN PAM
gcucccuuucaucuuccauc

SEQ ID NO: 10591 - RNA, 20 nt, Artificial Sequence
  spacer sequence CTCN PAM
cuuucaucuuccaucuugug

SEQ ID NO: 10592 - RNA, 20 nt, Artificial Sequence
  spacer sequence CTCN PAM
cuuaaagggaaggcugcuua

SEQ ID NO: 10593 - RNA, 20 nt, Artificial Sequence
  spacer sequence CTCN PAM
gaaagaaggggacaaagaac

SEQ ID NO: 10594 - RNA, 20 nt, Artificial Sequence
  spacer sequence CTCN PAM
cagaaagaaggggacaaaga

SEQ ID NO: 10595 - RNA, 20 nt, Artificial Sequence
  spacer sequence CTCN PAM
ucucaggcaaaucaucuuuc

SEQ ID NO: 10596 - RNA, 20 nt, Artificial Sequence
  spacer sequence CTCN PAM
caggcaaaucaucuuucucu

SEQ ID NO: 10597 - RNA, 20 nt, Artificial Sequence
  spacer sequence CTCN PAM
ggcaaaucaucuuucucuaa

SEQ ID NO: 10598 - RNA, 20 nt, Artificial Sequence
  spacer sequence CTCN PAM
aauagccagggcucaaaugg

SEQ ID NO: 10599 - RNA, 20 nt, Artificial Sequence
  spacer sequence CTCN PAM
aauggccaaagaaagguccc

SEQ ID NO: 10600 - RNA, 20 nt, Artificial Sequence
  spacer sequence CTCN PAM
cguggcugguaguguuauga

SEQ ID NO: 10601 - RNA, 20 nt, Artificial Sequence
  spacer sequence CTCN PAM
ccacgaggcacagaggcacc

SEQ ID NO: 10602 - RNA, 20 nt, Artificial Sequence
  spacer sequence CTCN PAM
uggugagggucaggaagaag

SEQ ID NO: 10603 - RNA, 20 nt, Artificial Sequence
  spacer sequence CTCN PAM
gugccucguggugaggguca

SEQ ID NO: 10604 - RNA, 20 nt, Artificial Sequence
  spacer sequence CTCN PAM
agcaaacgccacaucugacu

SEQ ID NO: 10605 - RNA, 20 nt, Artificial Sequence
  spacer sequence CTCN PAM
gccucaugcacugaaaaaga

SEQ ID NO: 10606 - RNA, 20 nt, Artificial Sequence
  spacer sequence CTCN PAM
ugcacugaaaaagacaaggg

SEQ ID NO: 10607 - RNA, 20 nt, Artificial Sequence
  spacer sequence CTCN PAM
guucuuccaggagaaugggg

SEQ ID NO: 10608 - RNA, 20 nt, Artificial Sequence
  spacer sequence CTCN PAM
uggaagaacagagaucccuu

SEQ ID NO: 10609 - RNA, 20 nt, Artificial Sequence
  spacer sequence CTCN PAM
agucuuguaucugggaaguu

SEQ ID NO: 10610 - RNA, 20 nt, Artificial Sequence
  spacer sequence CTCN PAM
cagguacuuucuugcccaua

SEQ ID NO: 10611 - RNA, 20 nt, Artificial Sequence
  spacer sequence CTCN PAM
gagccaaacccuuggugaag

SEQ ID NO: 10612 - RNA, 20 nt, Artificial Sequence
  spacer sequence CTCN PAM
gagguagcaaggggacaagu

SEQ ID NO: 10613 - RNA, 20 nt, Artificial Sequence
  spacer sequence CTCN PAM
ccaccagucaggcaauaccu

SEQ ID NO: 10614 - RNA, 20 nt, Artificial Sequence
  spacer sequence CTCN PAM
accagucaggcaauaccuuu

SEQ ID NO: 10615 - RNA, 20 nt, Artificial Sequence
  spacer sequence CTCN PAM
aauacuacaaaaguagagag

SEQ ID NO: 10616 - RNA, 20 nt, Artificial Sequence
  spacer sequence CTCN PAM
acuuuuguaguauuugagau

SEQ ID NO: 10617 - RNA, 20 nt, Artificial Sequence
  spacer sequence CTCN PAM
cuacuuuuguaguauuugag

SEQ ID NO: 10618 - RNA, 20 nt, Artificial Sequence
  spacer sequence CTCN PAM
aaccaccacagcucacaguc

SEQ ID NO: 10619 - RNA, 20 nt, Artificial Sequence
  spacer sequence CTCN PAM
cagucauucuugucuucugu

SEQ ID NO: 10620 - RNA, 20 nt, Artificial Sequence
  spacer sequence CTCN PAM
cuagcccauuuuauuauuua

SEQ ID NO: 10621 - RNA, 20 nt, Artificial Sequence
  spacer sequence CTCN PAM
guauguauuuuuuaaacaua

SEQ ID NO: 10622 - RNA, 20 nt, Artificial Sequence
  spacer sequence CTCN PAM
uuuuuuuucuuuuaaauaca

SEQ ID NO: 10623 - RNA, 20 nt, Artificial Sequence
  spacer sequence CTCN PAM
ccuauuugguaauacgggac

SEQ ID NO: 10624 - RNA, 20 nt, Artificial Sequence
  spacer sequence CTCN PAM
gaaauacuucuuuccaucug

SEQ ID NO: 10625 - RNA, 20 nt, Artificial Sequence
  spacer sequence CTCN PAM
aaaacaugacccagauggaa

SEQ ID NO: 10626 - RNA, 20 nt, Artificial Sequence
  spacer sequence CTCN PAM
cuggaagggauccuccaaaa

SEQ ID NO: 10627 - RNA, 20 nt, Artificial Sequence
  spacer sequence CTCN PAM
gaagcuuuucuuggcagcuu

SEQ ID NO: 10628 - RNA, 20 nt, Artificial Sequence
  spacer sequence CTCN PAM
cuaaaaagggccuuguguaa

SEQ ID NO: 10629 - RNA, 20 nt, Artificial Sequence
  spacer sequence CTCN PAM
aaaaagggccuuguguaaag

SEQ ID NO: 10630 - RNA, 20 nt, Artificial Sequence
  spacer sequence CTCN PAM
ugccccuugcaguccuuugc

SEQ ID NO: 10631 - RNA, 20 nt, Artificial Sequence
  spacer sequence CTCN PAM
gagagucucugugacagucc

SEQ ID NO: 10632 - RNA, 20 nt, Artificial Sequence
  spacer sequence CTCN PAM
gagggugcauucagcccuga

SEQ ID NO: 10633 - RNA, 20 nt, Artificial Sequence
  spacer sequence CTCN PAM
cagagggugcauucagcccu

SEQ ID NO: 10634 - RNA, 20 nt, Artificial Sequence
  spacer sequence CTCN PAM
gugacaguccucccacaucg

SEQ ID NO: 10635 - RNA, 20 nt, Artificial Sequence
  spacer sequence CTCN PAM
cacaucgacugccccacagg

SEQ ID NO: 10636 - RNA, 20 nt, Artificial Sequence
  spacer sequence CTCN PAM
gggccuguggggcagucgau

SEQ ID NO: 10637 - RNA, 20 nt, Artificial Sequence
  spacer sequence CTCN PAM
cucacuccccaccauguggc

SEQ ID NO: 10638 - RNA, 20 nt, Artificial Sequence
  spacer sequence CTCN PAM
cuccccaccauguggcccau

SEQ ID NO: 10639 - RNA, 20 nt, Artificial Sequence
  spacer sequence CTCN PAM
ccaccauguggcccaucacc

SEQ ID NO: 10640 - RNA, 20 nt, Artificial Sequence
  spacer sequence CTCN PAM
caguguucagaacuggaauu

SEQ ID NO: 10641 - RNA, 20 nt, Artificial Sequence
  spacer sequence CTCN PAM
uggacgguucugcacagaau

SEQ ID NO: 10642 - RNA, 20 nt, Artificial Sequence
  spacer sequence CTCN PAM
gugaaugaauucugugcaga

SEQ ID NO: 10643 - RNA, 20 nt, Artificial Sequence
  spacer sequence CTCN PAM
ugccugcagaaccuugaccu

SEQ ID NO: 10644 - RNA, 20 nt, Artificial Sequence
  spacer sequence CTCN PAM
aaaagcauuuugaccuuauc

SEQ ID NO: 10645 - RNA, 20 nt, Artificial Sequence
  spacer sequence CTCN PAM
cugucucuaaaagcauuuug

SEQ ID NO: 10646 - RNA, 20 nt, Artificial Sequence
  spacer sequence CTCN PAM
ggaacuagugcuccagagag

SEQ ID NO: 10647 - RNA, 20 nt, Artificial Sequence
  spacer sequence CTCN PAM
agagagacacagagauugaa

SEQ ID NO: 10648 - RNA, 20 nt, Artificial Sequence
  spacer sequence CTCN PAM
ggagcacuaguuccagaggc

SEQ ID NO: 10649 - RNA, 20 nt, Artificial Sequence
  spacer sequence CTCN PAM
cuggagcacuaguuccagag

SEQ ID NO: 10650 - RNA, 20 nt, Artificial Sequence
  spacer sequence CTCN PAM
gugucucucuggagcacuag

SEQ ID NO: 10651 - RNA, 20 nt, Artificial Sequence
  spacer sequence CTCN PAM
guagacucuguggguaaaag

SEQ ID NO: 10652 - RNA, 20 nt, Artificial Sequence
  spacer sequence CTCN PAM
guggguaaaagcuuguugga

SEQ ID NO: 10653 - RNA, 20 nt, Artificial Sequence
  spacer sequence CTCN PAM
gcaucugguuaaauggacuu

SEQ ID NO: 10654 - RNA, 20 nt, Artificial Sequence
  spacer sequence CTCN PAM
uggcagaaccguaaagaagg

SEQ ID NO: 10655 - RNA, 20 nt, Artificial Sequence
  spacer sequence CTCN PAM
cuucuuuacgguucugccau

SEQ ID NO: 10656 - RNA, 20 nt, Artificial Sequence
  spacer sequence CTCN PAM
agguugcaacacguguugcc

SEQ ID NO: 10657 - RNA, 20 nt, Artificial Sequence
  spacer sequence CTCN PAM
acucaggggaggcacaaagg

SEQ ID NO: 10658 - RNA, 20 nt, Artificial Sequence
  spacer sequence CTCN PAM
ggggaggcacaaaggacagc

SEQ ID NO: 10659 - RNA, 20 nt, Artificial Sequence
  spacer sequence CTCN PAM
ccugaguugagaagacuggu

SEQ ID NO: 10660 - RNA, 20 nt, Artificial Sequence
  spacer sequence CTCN PAM
uaaauuugccacuaugaucc

SEQ ID NO: 10661 - RNA, 20 nt, Artificial Sequence
  spacer sequence CTCN PAM
auccagcgcuaugugaacaa

SEQ ID NO: 10662 - RNA, 20 nt, Artificial Sequence
  spacer sequence CTCN PAM
auacuauuuaucugaaaguc

SEQ ID NO: 10663 - RNA, 20 nt, Artificial Sequence
  spacer sequence CTCN PAM
cucucucccuuucuacacac

SEQ ID NO: 10664 - RNA, 20 nt, Artificial Sequence
  spacer sequence CTCN PAM
cucucccuuucuacacacac

SEQ ID NO: 10665 - RNA, 20 nt, Artificial Sequence
  spacer sequence CTCN PAM
cucccuuucuacacacacac

SEQ ID NO: 10666 - RNA, 20 nt, Artificial Sequence
  spacer sequence CTCN PAM
cccuuucuacacacacacag

SEQ ID NO: 10667 - RNA, 20 nt, Artificial Sequence
  spacer sequence CTCN PAM
cuuucuacacacacacaggc

SEQ ID NO: 10668 - RNA, 20 nt, Artificial Sequence
  spacer sequence CTCN PAM
uuuugaaaaaaaaaaaaauc

SEQ ID NO: 10669 - RNA, 20 nt, Artificial Sequence
  spacer sequence CTCN PAM
aguaagcaaaaucauucauu

SEQ ID NO: 10670 - RNA, 20 nt, Artificial Sequence
  spacer sequence CTCN PAM
aguuuugccuggcaaugaau

SEQ ID NO: 10671 - RNA, 20 nt, Artificial Sequence
  spacer sequence CTCN PAM
uaugauuucuaaauguauuu

SEQ ID NO: 10672 - RNA, 20 nt, Artificial Sequence
  spacer sequence CTCN PAM
ugugugcucguaugauuucu

SEQ ID NO: 10673 - RNA, 20 nt, Artificial Sequence
  spacer sequence CTCN PAM
aucaaguaaaugaaucacca

SEQ ID NO: 10674 - RNA, 20 nt, Artificial Sequence
  spacer sequence CTCN PAM
uauuuggcuuaaauaaauua

SEQ ID NO: 10675 - RNA, 20 nt, Artificial Sequence
  spacer sequence CTCN PAM
ggcugaaguuuaagauggga

SEQ ID NO: 10676 - RNA, 20 nt, Artificial Sequence
  spacer sequence CTCN PAM
ccauuaucaggggugcuuua

SEQ ID NO: 10677 - RNA, 20 nt, Artificial Sequence
  spacer sequence CTCN PAM
auuaucaggggugcuuuauu

SEQ ID NO: 10678 - RNA, 20 nt, Artificial Sequence
  spacer sequence CTCN PAM
aacaauaaagcaccccugau

SEQ ID NO: 10679 - RNA, 20 nt, Artificial Sequence
  spacer sequence CTCN PAM
caaacaauaaagcaccccug

SEQ ID NO: 10680 - RNA, 20 nt, Artificial Sequence
  spacer sequence CTCN PAM
ggaccacaggaacuagugug

SEQ ID NO: 10681 - RNA, 20 nt, Artificial Sequence
  spacer sequence CTCN PAM
aguuuucacacuaguuccug

SEQ ID NO: 10682 - RNA, 20 nt, Artificial Sequence
  spacer sequence CTCN PAM
cauuucgcaaacaaaauaug

SEQ ID NO: 10683 - RNA, 20 nt, Artificial Sequence
  spacer sequence CTCN PAM
cuaaugcggucagcuguguc

SEQ ID NO: 10684 - RNA, 20 nt, Artificial Sequence
  spacer sequence CTCN PAM
uauuguguugugcaaaugua

SEQ ID NO: 10685 - RNA, 20 nt, Artificial Sequence
  spacer sequence CTCN PAM
cccaccucuuauuguguugu

SEQ ID NO: 10686 - RNA, 20 nt, Artificial Sequence
  spacer sequence CTCN PAM
ucucccccaccucuuauugu

SEQ ID NO: 10687 - RNA, 20 nt, Artificial Sequence
  spacer sequence CTCN PAM
cuucucccccaccucuuauu

SEQ ID NO: 10688 - RNA, 20 nt, Artificial Sequence
  spacer sequence CTCN PAM
ggcaugaauguuaucaugcu

SEQ ID NO: 10689 - RNA, 20 nt, Artificial Sequence
  spacer sequence CTCN PAM
acuuuccccuuccauuauua

SEQ ID NO: 10690 - RNA, 20 nt, Artificial Sequence
  spacer sequence CTCN PAM
ggggggcugccauucauucg

SEQ ID NO: 10691 - RNA, 20 nt, Artificial Sequence
  spacer sequence CTCN PAM
gguaacaaaauaaaaucuua

SEQ ID NO: 10692 - RNA, 20 nt, Artificial Sequence
  spacer sequence CTCN PAM
ucuaucucugguaacaaaau

SEQ ID NO: 10693 - RNA, 20 nt, Artificial Sequence
  spacer sequence CTCN PAM
guaagggcacugguaaucag

SEQ ID NO: 10694 - RNA, 20 nt, Artificial Sequence
  spacer sequence CTCN PAM
uuaauuuauaauguuuuggg

SEQ ID NO: 10695 - RNA, 20 nt, Artificial Sequence
  spacer sequence CTCN PAM
agagugccuguguccuacaa

SEQ ID NO: 10696 - RNA, 20 nt, Artificial Sequence
  spacer sequence CTCN PAM
ugagaucuauagcuucaaua

SEQ ID NO: 10697 - RNA, 20 nt, Artificial Sequence
  spacer sequence CTCN PAM
gagcacaugggauaauaaaa

SEQ ID NO: 10698 - RNA, 20 nt, Artificial Sequence
  spacer sequence CTCN PAM
gaguaaggggcaaaugaauc

SEQ ID NO: 10699 - RNA, 20 nt, Artificial Sequence
  spacer sequence CTCN PAM
uucaaugccacauauaaaug

SEQ ID NO: 10700 - RNA, 20 nt, Artificial Sequence
  spacer sequence CTCN PAM
auuuaugcugucuucaacac

SEQ ID NO: 10701 - RNA, 20 nt, Artificial Sequence
  spacer sequence CTCN PAM
guuaguguugaagacagcau

SEQ ID NO: 10702 - RNA, 20 nt, Artificial Sequence
  spacer sequence CTCN PAM
cucuguuaguguugaagaca

SEQ ID NO: 10703 - RNA, 20 nt, Artificial Sequence
  spacer sequence CTCN PAM
cccucuguuaguguugaaga

SEQ ID NO: 10704 - RNA, 20 nt, Artificial Sequence
  spacer sequence CTCN PAM
agggacucagcauauguagg

SEQ ID NO: 10705 - RNA, 20 nt, Artificial Sequence
  spacer sequence CTCN PAM
gcauauguaggcuaugucca

SEQ ID NO: 10706 - RNA, 20 nt, Artificial Sequence
  spacer sequence CTCN PAM
guauggacauagccuacaua

SEQ ID NO: 10707 - RNA, 20 nt, Artificial Sequence
  spacer sequence CTCN PAM
caaaagcugguuucucugua

SEQ ID NO: 10708 - RNA, 20 nt, Artificial Sequence
  spacer sequence CTCN PAM
ucccaaaagcugguuucucu

SEQ ID NO: 10709 - RNA, 20 nt, Artificial Sequence
  spacer sequence CTCN PAM
uuccuccucccaaaagcugg

SEQ ID NO: 10710 - RNA, 20 nt, Artificial Sequence
  spacer sequence CTCN PAM
aaguuugcuuuuuugggcaa

SEQ ID NO: 10711 - RNA, 20 nt, Artificial Sequence
  spacer sequence CTCN PAM
aaagaauguaauguguauuu

SEQ ID NO: 10712 - RNA, 20 nt, Artificial Sequence
  spacer sequence CTCN PAM
aucuuuuaauuguugcaagc

SEQ ID NO: 10713 - RNA, 20 nt, Artificial Sequence
  spacer sequence CTCN PAM
accauagcuuccaucuuuga

SEQ ID NO: 10714 - RNA, 20 nt, Artificial Sequence
  spacer sequence CTCN PAM
aagauggaagcuauggugga

SEQ ID NO: 10715 - RNA, 20 nt, Artificial Sequence
  spacer sequence CTCN PAM
ccugcaaagacagcagaaua

SEQ ID NO: 10716 - RNA, 20 nt, Artificial Sequence
  spacer sequence CTCN PAM
cugcuauuuuuuggaaucua

SEQ ID NO: 10717 - RNA, 20 nt, Artificial Sequence
  spacer sequence CTCN PAM
aaguccccaugauguucuag

SEQ ID NO: 10718 - RNA, 20 nt, Artificial Sequence
  spacer sequence CTCN PAM
cuucaccuguuagcauuugu

SEQ ID NO: 10719 - RNA, 20 nt, Artificial Sequence
  spacer sequence CTCN PAM
cagcaugauacaauaagggu

SEQ ID NO: 10720 - RNA, 20 nt, Artificial Sequence
  spacer sequence CTCN PAM
cuguuaacacuaaaagucaa

SEQ ID NO: 10721 - RNA, 20 nt, Artificial Sequence
  spacer sequence CTCN PAM
guuaacacuaaaagucaaag

SEQ ID NO: 10722 - RNA, 20 nt, Artificial Sequence
  spacer sequence CTCN PAM
ccccaaaccagucuugguaa

SEQ ID NO: 10723 - RNA, 20 nt, Artificial Sequence
  spacer sequence CTCN PAM
auggcuuucacagaagggua

SEQ ID NO: 10724 - RNA, 20 nt, Artificial Sequence
  spacer sequence CTCN PAM
caauuggaaggucuucauac

SEQ ID NO: 10725 - RNA, 20 nt, Artificial Sequence
  spacer sequence CTCN PAM
auuggaaggucuucauacua

SEQ ID NO: 10726 - RNA, 20 nt, Artificial Sequence
  spacer sequence CTCN PAM
accagaaaauaacaguaucu

SEQ ID NO: 10727 - RNA, 20 nt, Artificial Sequence
  spacer sequence CTCN PAM
cacccugaacuucugcaaaa

SEQ ID NO: 10728 - RNA, 20 nt, Artificial Sequence
  spacer sequence CTCN PAM
cccugaacuucugcaaaauc

SEQ ID NO: 10729 - RNA, 20 nt, Artificial Sequence
  spacer sequence CTCN PAM
uucuuccccaaaagauuuuu

SEQ ID NO: 10730 - RNA, 20 nt, Artificial Sequence
  spacer sequence CTCN PAM
auacaucuaaucaauaaaua

SEQ ID NO: 10731 - RNA, 20 nt, Artificial Sequence
  spacer sequence CTCN PAM
uaugcaucuccccccacccc

SEQ ID NO: 10732 - RNA, 20 nt, Artificial Sequence
  spacer sequence CTCN PAM
ccccacccccucugcaucgc

SEQ ID NO: 10733 - RNA, 20 nt, Artificial Sequence
  spacer sequence CTCN PAM
gcaucgcagacagcagugcu

SEQ ID NO: 10734 - RNA, 20 nt, Artificial Sequence
  spacer sequence CTCN PAM
aaaggguccgcaaaauaaaa

SEQ ID NO: 10735 - RNA, 20 nt, Artificial Sequence
  spacer sequence CTCN PAM
uuugucccugaugcaaauua

SEQ ID NO: 10736 - RNA, 20 nt, Artificial Sequence
  spacer sequence CTCN PAM
gauuuuaaucugcagcgcau

SEQ ID NO: 10737 - RNA, 20 nt, Artificial Sequence
  spacer sequence CTCN PAM
ucucggauuaugaaacaaua

SEQ ID NO: 10738 - RNA, 20 nt, Artificial Sequence
  spacer sequence CTCN PAM
cggauuaugaaacaauacca

SEQ ID NO: 10739 - RNA, 20 nt, Artificial Sequence
  spacer sequence CTCN PAM
gauuaugaaacaauaccaag

SEQ ID NO: 10740 - RNA, 20 nt, Artificial Sequence
  spacer sequence CTCN PAM
ugacauagacacacugcacu

SEQ ID NO: 10741 - RNA, 20 nt, Artificial Sequence
  spacer sequence CTCN PAM
cugcgcuaaucucugcccag

SEQ ID NO: 10742 - RNA, 20 nt, Artificial Sequence
  spacer sequence CTCN PAM
gcccagccaacgcauucuua

SEQ ID NO: 10743 - RNA, 20 nt, Artificial Sequence
  spacer sequence CTCN PAM
uccaacagccucuuaaccag

SEQ ID NO: 10744 - RNA, 20 nt, Artificial Sequence
  spacer sequence CTCN PAM
uaaccaguccacugccccuc

SEQ ID NO: 10745 - RNA, 20 nt, Artificial Sequence
  spacer sequence CTCN PAM
gaggucuccccgguuauggc

SEQ ID NO: 10746 - RNA, 20 nt, Artificial Sequence
  spacer sequence CTCN PAM
gaggggcaguggacugguua

SEQ ID NO: 10747 - RNA, 20 nt, Artificial Sequence
  spacer sequence CTCN PAM
ccgguuauggcuuugcuaaa

SEQ ID NO: 10748 - RNA, 20 nt, Artificial Sequence
  spacer sequence CTCN PAM
caccauucgauauuuauugu

SEQ ID NO: 10749 - RNA, 20 nt, Artificial Sequence
  spacer sequence CTCN PAM
ccauucgauauuuauuguag

SEQ ID NO: 10750 - RNA, 20 nt, Artificial Sequence
  spacer sequence CTCN PAM
ugggacaucaaauuugugcu

SEQ ID NO: 10751 - RNA, 20 nt, Artificial Sequence
  spacer sequence CTCN PAM
gaugauggccuuuuguuucu

SEQ ID NO: 10752 - RNA, 20 nt, Artificial Sequence
  spacer sequence CTCN PAM
ucccuugaaaaucagugaaa

SEQ ID NO: 10753 - RNA, 20 nt, Artificial Sequence
  spacer sequence CTCN PAM
cacccccuaguuuuccuucu

SEQ ID NO: 10754 - RNA, 20 nt, Artificial Sequence
  spacer sequence CTCN PAM
cucgcacccccuaguuuucc

SEQ ID NO: 10755 - RNA, 20 nt, Artificial Sequence
  spacer sequence CTCN PAM
uagacugaaaugauaaagcu

SEQ ID NO: 10756 - RNA, 20 nt, Artificial Sequence
  spacer sequence CTCN PAM
uaguuuuauuugcugggucu

SEQ ID NO: 10757 - RNA, 20 nt, Artificial Sequence
  spacer sequence CTCN PAM
uccagggugacaagggagaa

SEQ ID NO: 10758 - RNA, 20 nt, Artificial Sequence
  spacer sequence CTCN PAM
cuugucacccuggaagagaa

SEQ ID NO: 10759 - RNA, 20 nt, Artificial Sequence
  spacer sequence CTCN PAM
ugacccaaggguauguagag

SEQ ID NO: 10760 - RNA, 20 nt, Artificial Sequence
  spacer sequence CTCN PAM
acauacccuugggucaagag

SEQ ID NO: 10761 - RNA, 20 nt, Artificial Sequence
  spacer sequence CTCN PAM
ucauugucucuacauacccu

SEQ ID NO: 10762 - RNA, 20 nt, Artificial Sequence
  spacer sequence CTCN PAM
uggcccucuucauugucucu

SEQ ID NO: 10763 - RNA, 20 nt, Artificial Sequence
  spacer sequence CTCN PAM
ccccuucucuuggcccucuu

SEQ ID NO: 10764 - RNA, 20 nt, Artificial Sequence
  spacer sequence CTCN PAM
auugaggacguccaugcccc

SEQ ID NO: 10765 - RNA, 20 nt, Artificial Sequence
  spacer sequence CTCN PAM
auggaggucaugcaagcccu

SEQ ID NO: 10766 - RNA, 20 nt, Artificial Sequence
  spacer sequence CTCN PAM
gucccggggcauggacgucc

SEQ ID NO: 10767 - RNA, 20 nt, Artificial Sequence
  spacer sequence CTCN PAM
aaagcuucacuuuuacuucg

SEQ ID NO: 10768 - RNA, 20 nt, Artificial Sequence
  spacer sequence CTCN PAM
ugacccacauggauucucag

SEQ ID NO: 10769 - RNA, 20 nt, Artificial Sequence
  spacer sequence CTCN PAM
gcagccaccuccaucccacc

SEQ ID NO: 10770 - RNA, 20 nt, Artificial Sequence
  spacer sequence CTCN PAM
aucccaccucaaacucagaa

SEQ ID NO: 10771 - RNA, 20 nt, Artificial Sequence
  spacer sequence CTCN PAM
aacucagaagacaaccugga

SEQ ID NO: 10772 - RNA, 20 nt, Artificial Sequence
  spacer sequence CTCN PAM
gaagacaaccuggaugugac

SEQ ID NO: 10773 - RNA, 20 nt, Artificial Sequence
  spacer sequence CTCN PAM
cuugguucuagcagaaggac

SEQ ID NO: 10774 - RNA, 20 nt, Artificial Sequence
  spacer sequence CTCN PAM
cuugguaaguccuucugcua

SEQ ID NO: 10775 - RNA, 20 nt, Artificial Sequence
  spacer sequence CTCN PAM
gcucacuugguaaguccuuc

SEQ ID NO: 10776 - RNA, 20 nt, Artificial Sequence
  spacer sequence CTCN PAM
cauccgauacucgccagugc

SEQ ID NO: 10777 - RNA, 20 nt, Artificial Sequence
  spacer sequence CTCN PAM
ccagugcugaggccaacucu

SEQ ID NO: 10778 - RNA, 20 nt, Artificial Sequence
  spacer sequence CTCN PAM
gcacuggcgaguaucggaug

SEQ ID NO: 10779 - RNA, 20 nt, Artificial Sequence
  spacer sequence CTCN PAM
uccacuccucccacggggcc

SEQ ID NO: 10780 - RNA, 20 nt, Artificial Sequence
  spacer sequence CTCN PAM
ucccacggggccuccgcaug

SEQ ID NO: 10781 - RNA, 20 nt, Artificial Sequence
  spacer sequence CTCN PAM
cacggggccuccgcaugaag

SEQ ID NO: 10782 - RNA, 20 nt, Artificial Sequence
  spacer sequence CTCN PAM
gcaugaaguaggcgcuucuc

SEQ ID NO: 10783 - RNA, 20 nt, Artificial Sequence
  spacer sequence CTCN PAM
acuaccaaaugauucugaaa

SEQ ID NO: 10784 - RNA, 20 nt, Artificial Sequence
  spacer sequence CTCN PAM
caguggaggucuauguuagc

SEQ ID NO: 10785 - RNA, 20 nt, Artificial Sequence
  spacer sequence CTCN PAM
guggaggucuauguuagccu

SEQ ID NO: 10786 - RNA, 20 nt, Artificial Sequence
  spacer sequence CTCN PAM
acugagagaauuucagaauc

SEQ ID NO: 10787 - RNA, 20 nt, Artificial Sequence
  spacer sequence CTCN PAM
auccuuucaaauuggccagg

SEQ ID NO: 10788 - RNA, 20 nt, Artificial Sequence
  spacer sequence CTCN PAM
ggucuugcuucagcaaauau

SEQ ID NO: 10789 - RNA, 20 nt, Artificial Sequence
  spacer sequence CTCN PAM
acaggcugcccugacgcuau

SEQ ID NO: 10790 - RNA, 20 nt, Artificial Sequence
  spacer sequence CTCN PAM
cagucacuccacaggcugcc

SEQ ID NO: 10791 - RNA, 20 nt, Artificial Sequence
  spacer sequence CTCN PAM
cccagucacuccacaggcug

SEQ ID NO: 10792 - RNA, 20 nt, Artificial Sequence
  spacer sequence CTCN PAM
ggggaagccacaugcggauc

SEQ ID NO: 10793 - RNA, 20 nt, Artificial Sequence
  spacer sequence CTCN PAM
auaugauccgcauguggcuu

SEQ ID NO: 10794 - RNA, 20 nt, Artificial Sequence
  spacer sequence CTCN PAM
aguuuccagcaugccuuccg

SEQ ID NO: 10795 - RNA, 20 nt, Artificial Sequence
  spacer sequence CTCN PAM
ucgaagcagauuaugacccc

SEQ ID NO: 10796 - RNA, 20 nt, Artificial Sequence
  spacer sequence CTCN PAM
aagcagauuaugacccccca

SEQ ID NO: 10797 - RNA, 20 nt, Artificial Sequence
  spacer sequence CTCN PAM
cucacacucagucucucccu

SEQ ID NO: 10798 - RNA, 20 nt, Artificial Sequence
  spacer sequence CTCN PAM
cacucagucucucccucccu

SEQ ID NO: 10799 - RNA, 20 nt, Artificial Sequence
  spacer sequence CTCN PAM
gucucucccucccuguauaa

SEQ ID NO: 10800 - RNA, 20 nt, Artificial Sequence
  spacer sequence CTCN PAM
cccucccuguauaauucuga

SEQ ID NO: 10801 - RNA, 20 nt, Artificial Sequence
  spacer sequence CTCN PAM
cucccuguauaauucugauu

SEQ ID NO: 10802 - RNA, 20 nt, Artificial Sequence
  spacer sequence CTCN PAM
cuguauaauucugauucucc

SEQ ID NO: 10803 - RNA, 20 nt, Artificial Sequence
  spacer sequence CTCN PAM
ccagccuuugaagguacgau

SEQ ID NO: 10804 - RNA, 20 nt, Artificial Sequence
  spacer sequence CTCN PAM
gaucguaccuucaaaggcug

SEQ ID NO: 10805 - RNA, 20 nt, Artificial Sequence
  spacer sequence CTCN PAM
guggcauuuacuucucggau

SEQ ID NO: 10806 - RNA, 20 nt, Artificial Sequence
  spacer sequence CTCN PAM
ccacuucuuaaaaguccgag

SEQ ID NO: 10807 - RNA, 20 nt, Artificial Sequence
  spacer sequence CTCN PAM
gacuuuuaagaaguggugag

SEQ ID NO: 10808 - RNA, 20 nt, Artificial Sequence
  spacer sequence CTCN PAM
uucagcccacugcagucucc

SEQ ID NO: 10809 - RNA, 20 nt, Artificial Sequence
  spacer sequence CTCN PAM
ugaccaagccacacacaaac

SEQ ID NO: 10810 - RNA, 20 nt, Artificial Sequence
  spacer sequence CTCN PAM
ucccucuguuucucaggacc

SEQ ID NO: 10811 - RNA, 20 nt, Artificial Sequence
  spacer sequence CTCN PAM
cucuguuucucaggacccuc

SEQ ID NO: 10812 - RNA, 20 nt, Artificial Sequence
  spacer sequence CTCN PAM
guuucucaggacccucacuu

SEQ ID NO: 10813 - RNA, 20 nt, Artificial Sequence
  spacer sequence CTCN PAM
ggacccucacuugauuucag

SEQ ID NO: 10814 - RNA, 20 nt, Artificial Sequence
  spacer sequence CTCN PAM
cuugauuucaggcucauucu

SEQ ID NO: 10815 - RNA, 20 nt, Artificial Sequence
  spacer sequence CTCN PAM
uucuggacagauggggaaau

SEQ ID NO: 10816 - RNA, 20 nt, Artificial Sequence
  spacer sequence CTCN PAM
gugcuccuucaauaugccca

SEQ ID NO: 10817 - RNA, 20 nt, Artificial Sequence
  spacer sequence CTCN PAM
uucaauaugcccagaacugg

SEQ ID NO: 10818 - RNA, 20 nt, Artificial Sequence
  spacer sequence CTCN PAM
aguucugggcauauugaagg

SEQ ID NO: 10819 - RNA, 20 nt, Artificial Sequence
  spacer sequence CTCN PAM
uucccagaagauugaaaaac

SEQ ID NO: 10820 - RNA, 20 nt, Artificial Sequence
  spacer sequence CTCN PAM
cauggguucuguggucaagu

SEQ ID NO: 10821 - RNA, 20 nt, Artificial Sequence
  spacer sequence CTCN PAM
ggugcuggacaguugucccu

SEQ ID NO: 10822 - RNA, 20 nt, Artificial Sequence
  spacer sequence CTCN PAM
ucaguacguuugcagcuuuc

SEQ ID NO: 10823 - RNA, 20 nt, Artificial Sequence
  spacer sequence CTCN PAM
gcuaccucuucaguacguuu

SEQ ID NO: 10824 - RNA, 20 nt, Artificial Sequence
  spacer sequence CTCN PAM
gggaagucauuuaacccuug

SEQ ID NO: 10825 - RNA, 20 nt, Artificial Sequence
  spacer sequence CTCN PAM
ucuaccaaaugaggcuaaug

SEQ ID NO: 10826 - RNA, 20 nt, Artificial Sequence
  spacer sequence CTCN PAM
accaaaugaggcuaauggga

SEQ ID NO: 10827 - RNA, 20 nt, Artificial Sequence
  spacer sequence CTCN PAM
uuugguagaggaggaaauug

SEQ ID NO: 10828 - RNA, 20 nt, Artificial Sequence
  spacer sequence CTCN PAM
cauuagccucauuugguaga

SEQ ID NO: 10829 - RNA, 20 nt, Artificial Sequence
  spacer sequence CTCN PAM
gaaaggaaacacucccauua

SEQ ID NO: 10830 - RNA, 20 nt, Artificial Sequence
  spacer sequence CTCN PAM
agaauugcuguugucauuau

SEQ ID NO: 10831 - RNA, 20 nt, Artificial Sequence
  spacer sequence CTCN PAM
gggggcugcaccuccagaau

SEQ ID NO: 10832 - RNA, 20 nt, Artificial Sequence
  spacer sequence CTCN PAM
cuccgggggcugcaccucca

SEQ ID NO: 10833 - RNA, 20 nt, Artificial Sequence
  spacer sequence CTCN PAM
uuuacuucucacauggacuc

SEQ ID NO: 10834 - RNA, 20 nt, Artificial Sequence
  spacer sequence CTCN PAM
cauggacucuaugagguaag

SEQ ID NO: 10835 - RNA, 20 nt, Artificial Sequence
  spacer sequence CTCN PAM
augagguaagggaccuugag

SEQ ID NO: 10836 - RNA, 20 nt, Artificial Sequence
  spacer sequence CTCN PAM
uagaguccaugugagaagua

SEQ ID NO: 10837 - RNA, 20 nt, Artificial Sequence
  spacer sequence CTCN PAM
aggucccuuaccucauagag

SEQ ID NO: 10838 - RNA, 20 nt, Artificial Sequence
  spacer sequence CTCN PAM
auuucacagagaggugaaau

SEQ ID NO: 10839 - RNA, 20 nt, Artificial Sequence
  spacer sequence CTCN PAM
gugaaauggagauaacucaa

SEQ ID NO: 10840 - RNA, 20 nt, Artificial Sequence
  spacer sequence CTCN PAM
cugugaaauggagauaacuc

SEQ ID NO: 10841 - RNA, 20 nt, Artificial Sequence
  spacer sequence CTCN PAM
gacucucccaaccagcuagc

SEQ ID NO: 10842 - RNA, 20 nt, Artificial Sequence
  spacer sequence CTCN PAM
cccaaccagcuagcaguaac

SEQ ID NO: 10843 - RNA, 20 nt, Artificial Sequence
  spacer sequence CTCN PAM
caaccagcuagcaguaacau

SEQ ID NO: 10844 - RNA, 20 nt, Artificial Sequence
  spacer sequence CTCN PAM
ggguucagauuucuauguua

SEQ ID NO: 10845 - RNA, 20 nt, Artificial Sequence
  spacer sequence CTCN PAM
cguaaggcaacacacgucua

SEQ ID NO: 10846 - RNA, 20 nt, Artificial Sequence
  spacer sequence CTCN PAM
uaaggcaacacacgucuaug

SEQ ID NO: 10847 - RNA, 20 nt, Artificial Sequence
  spacer sequence CTCN PAM
ccauagacguguguugccuu

SEQ ID NO: 10848 - RNA, 20 nt, Artificial Sequence
  spacer sequence CTCN PAM
ccccauagacguguguugcc

SEQ ID NO: 10849 - RNA, 20 nt, Artificial Sequence
  spacer sequence CTCN PAM
cacccacgagggagcugcca

SEQ ID NO: 10850 - RNA, 20 nt, Artificial Sequence
  spacer sequence CTCN PAM
ugggugggaguccccucucc

SEQ ID NO: 10851 - RNA, 20 nt, Artificial Sequence
  spacer sequence CTCN PAM
cucgugggugggaguccccu

SEQ ID NO: 10852 - RNA, 20 nt, Artificial Sequence
  spacer sequence CTCN PAM
uuauguuucugguggcagcu

SEQ ID NO: 10853 - RNA, 20 nt, Artificial Sequence
  spacer sequence CTCN PAM
gggucucauuauguuucugg

SEQ ID NO: 10854 - RNA, 20 nt, Artificial Sequence
  spacer sequence CTCN PAM
uuagacccccaccugcccug

SEQ ID NO: 10855 - RNA, 20 nt, Artificial Sequence
  spacer sequence CTCN PAM
ucucucaucccaaccugcuc

SEQ ID NO: 10856 - RNA, 20 nt, Artificial Sequence
  spacer sequence CTCN PAM
caucccaaccugcucacccc

SEQ ID NO: 10857 - RNA, 20 nt, Artificial Sequence
  spacer sequence CTCN PAM
ucccaaccugcucaccccau

SEQ ID NO: 10858 - RNA, 20 nt, Artificial Sequence
  spacer sequence CTCN PAM
ccccauaaugggggaacuac

SEQ ID NO: 10859 - RNA, 20 nt, Artificial Sequence
  spacer sequence CTCN PAM
aaguaguucccccauuaugg

SEQ ID NO: 10860 - RNA, 20 nt, Artificial Sequence
  spacer sequence CTCN PAM
uggggucucaaaguaguucc

SEQ ID NO: 10861 - RNA, 20 nt, Artificial Sequence
  spacer sequence CTCN PAM
uggcuuggaacugugugcuc

SEQ ID NO: 10862 - RNA, 20 nt, Artificial Sequence
  spacer sequence CTCN PAM
uuacuauuacgguuaugacu

SEQ ID NO: 10863 - RNA, 20 nt, Artificial Sequence
  spacer sequence CTCN PAM
gugcugggcacaugguaaaa

SEQ ID NO: 10864 - RNA, 20 nt, Artificial Sequence
  spacer sequence CTCN PAM
cauaggaugcucaaaggccc

SEQ ID NO: 10865 - RNA, 20 nt, Artificial Sequence
  spacer sequence CTCN PAM
uaggaugcucaaaggcccua

SEQ ID NO: 10866 - RNA, 20 nt, Artificial Sequence
  spacer sequence CTCN PAM
aaggcccuaugaggcaagcc

SEQ ID NO: 10867 - RNA, 20 nt, Artificial Sequence
  spacer sequence CTCN PAM
uagggccuuugagcauccua

SEQ ID NO: 10868 - RNA, 20 nt, Artificial Sequence
  spacer sequence CTCN PAM
ccacuuuacagauugaggaa

SEQ ID NO: 10869 - RNA, 20 nt, Artificial Sequence
  spacer sequence CTCN PAM
aucuguaaaguggggagaau

SEQ ID NO: 10870 - RNA, 20 nt, Artificial Sequence
  spacer sequence CTCN PAM
gcuuccucaaucuguaaagu

SEQ ID NO: 10871 - RNA, 20 nt, Artificial Sequence
  spacer sequence CTCN PAM
gccuaaaccauuuuauuucg

SEQ ID NO: 10872 - RNA, 20 nt, Artificial Sequence
  spacer sequence CTCN PAM
uugauuacacgaaauaaaau

SEQ ID NO: 10873 - RNA, 20 nt, Artificial Sequence
  spacer sequence CTCN PAM
uucugucccuccucccuuuc

SEQ ID NO: 10874 - RNA, 20 nt, Artificial Sequence
  spacer sequence CTCN PAM
ucccuuucuuaccagcucag

SEQ ID NO: 10875 - RNA, 20 nt, Artificial Sequence
  spacer sequence CTCN PAM
cuuucuuaccagcucagguu

SEQ ID NO: 10876 - RNA, 20 nt, Artificial Sequence
  spacer sequence CTCN PAM
gguuacaaagacaucuaggu

SEQ ID NO: 10877 - RNA, 20 nt, Artificial Sequence
  spacer sequence CTCN PAM
caccuagaugucuuuguaac

SEQ ID NO: 10878 - RNA, 20 nt, Artificial Sequence
  spacer sequence CTCN PAM
cccaccuagaugucuuugua

SEQ ID NO: 10879 - RNA, 20 nt, Artificial Sequence
  spacer sequence CTCN PAM
aagggcuuggcugaguuggc

SEQ ID NO: 10880 - RNA, 20 nt, Artificial Sequence
  spacer sequence CTCN PAM
gccaagcccuuagaggcagu

SEQ ID NO: 10881 - RNA, 20 nt, Artificial Sequence
  spacer sequence CTCN PAM
cgcccgccaacucagccaag

SEQ ID NO: 10882 - RNA, 20 nt, Artificial Sequence
  spacer sequence CTCN PAM
ggguuuaucccauggauacc

SEQ ID NO: 10883 - RNA, 20 nt, Artificial Sequence
  spacer sequence CTCN PAM
uuuucuaguagcaaauaaaa

SEQ ID NO: 10884 - RNA, 20 nt, Artificial Sequence
  spacer sequence CTCN PAM
cuuaugaggccuagccaggg

SEQ ID NO: 10885 - RNA, 20 nt, Artificial Sequence
  spacer sequence CTCN PAM
uaagggaggcaggauuuccu

SEQ ID NO: 10886 - RNA, 20 nt, Artificial Sequence
  spacer sequence CTCN PAM
ucuggugggaacuagaacau

SEQ ID NO: 10887 - RNA, 20 nt, Artificial Sequence
  spacer sequence CTCN PAM
ggugggaacuagaacaugcc

SEQ ID NO: 10888 - RNA, 20 nt, Artificial Sequence
  spacer sequence CTCN PAM
ugccaguuaguaacagggaa

SEQ ID NO: 10889 - RNA, 20 nt, Artificial Sequence
  spacer sequence CTCN PAM
ugccacaaguggcgaaguaa

SEQ ID NO: 10890 - RNA, 20 nt, Artificial Sequence
  spacer sequence CTCN PAM
uuuaaugugcagucuuugcc

SEQ ID NO: 10891 - RNA, 20 nt, Artificial Sequence
  spacer sequence CTCN PAM
ugcuugccaacauucauaua

SEQ ID NO: 10892 - RNA, 20 nt, Artificial Sequence
  spacer sequence CTCN PAM
uccuguguuuuuuaguuuau

SEQ ID NO: 10893 - RNA, 20 nt, Artificial Sequence
  spacer sequence CTCN PAM
auuuucuuaucuucuuggcc

SEQ ID NO: 10894 - RNA, 20 nt, Artificial Sequence
  spacer sequence CTCN PAM
aacaagagcaccuuuucccc

SEQ ID NO: 10895 - RNA, 20 nt, Artificial Sequence
  spacer sequence CTCN PAM
uguuagaggcgcagccuuuc

SEQ ID NO: 10896 - RNA, 20 nt, Artificial Sequence
  spacer sequence CTCN PAM
agaaaggccaggggugggga

SEQ ID NO: 10897 - RNA, 20 nt, Artificial Sequence
  spacer sequence CTCN PAM
aggaaggcucaagaaaggcc

SEQ ID NO: 10898 - RNA, 20 nt, Artificial Sequence
  spacer sequence CTCN PAM
gccaccgacagcuuaauuca

SEQ ID NO: 10899 - RNA, 20 nt, Artificial Sequence
  spacer sequence CTCN PAM
uuuuuuuuuuuuuuuuuaaa

SEQ ID NO: 10900 - RNA, 20 nt, Artificial Sequence
  spacer sequence CTCN PAM
uggugcagugggguggggcg

SEQ ID NO: 10901 - RNA, 20 nt, Artificial Sequence
  spacer sequence CTCN PAM
cacaccuggucgccugaaca

SEQ ID NO: 10902 - RNA, 20 nt, Artificial Sequence
  spacer sequence CTCN PAM
caccuggucgccugaacaca

SEQ ID NO: 10903 - RNA, 20 nt, Artificial Sequence
  spacer sequence CTCN PAM
gguuacuggcguuaucacaa

SEQ ID NO: 10904 - RNA, 20 nt, Artificial Sequence
  spacer sequence CTCN PAM
acugguucagaggagggaaa

SEQ ID NO: 10905 - RNA, 20 nt, Artificial Sequence
  spacer sequence CTCN PAM
gaaccaguugaggccagucu

SEQ ID NO: 10906 - RNA, 20 nt, Artificial Sequence
  spacer sequence CTCN PAM
ucugaaccaguugaggccag

SEQ ID NO: 10907 - RNA, 20 nt, Artificial Sequence
  spacer sequence CTCN PAM
auuuuuucccuccucugaac

SEQ ID NO: 10908 - RNA, 20 nt, Artificial Sequence
  spacer sequence CTCN PAM
uuuuuuuuuuauuuuuuauu

SEQ ID NO: 10909 - RNA, 20 nt, Artificial Sequence
  spacer sequence CTCN PAM
cuggucuuuuggcuaaaggc

SEQ ID NO: 10910 - RNA, 20 nt, Artificial Sequence
  spacer sequence CTCN PAM
caucuaaagccuggcccucg

SEQ ID NO: 10911 - RNA, 20 nt, Artificial Sequence
  spacer sequence CTCN PAM
ucuaaagccuggcccucggc

SEQ ID NO: 10912 - RNA, 20 nt, Artificial Sequence
  spacer sequence CTCN PAM
gccaaguucaucuguuaaug

SEQ ID NO: 10913 - RNA, 20 nt, Artificial Sequence
  spacer sequence CTCN PAM
cccaccucccacuaccccuc

SEQ ID NO: 10914 - RNA, 20 nt, Artificial Sequence
  spacer sequence CTCN PAM
cacuaccccuccugagucuu

SEQ ID NO: 10915 - RNA, 20 nt, Artificial Sequence
  spacer sequence CTCN PAM
ugagucuucucuguucuccu

SEQ ID NO: 10916 - RNA, 20 nt, Artificial Sequence
  spacer sequence CTCN PAM
ggagggguagugggaggugg

SEQ ID NO: 10917 - RNA, 20 nt, Artificial Sequence
  spacer sequence CTCN PAM
guucuccuaccucuuucgag

SEQ ID NO: 10918 - RNA, 20 nt, Artificial Sequence
  spacer sequence CTCN PAM
uaccucuuucgagcuccuaa

SEQ ID NO: 10919 - RNA, 20 nt, Artificial Sequence
  spacer sequence CTCN PAM
uucgagcuccuaaaaacuag

SEQ ID NO: 10920 - RNA, 20 nt, Artificial Sequence
  spacer sequence CTCN PAM
aaagagguaggagaacagag

SEQ ID NO: 10921 - RNA, 20 nt, Artificial Sequence
  spacer sequence CTCN PAM
uaaaaacuagacaucgauua

SEQ ID NO: 10922 - RNA, 20 nt, Artificial Sequence
  spacer sequence CTCN PAM
cuggccaugguguagccaga

SEQ ID NO: 10923 - RNA, 20 nt, Artificial Sequence
  spacer sequence CTCN PAM
cccuggccaugguguagcca

SEQ ID NO: 10924 - RNA, 20 nt, Artificial Sequence
  spacer sequence CTCN PAM
caauguacaauuuucccuuu

SEQ ID NO: 10925 - RNA, 20 nt, Artificial Sequence
  spacer sequence CTCN PAM
uucccucuugccacuaaccu

SEQ ID NO: 10926 - RNA, 20 nt, Artificial Sequence
  spacer sequence CTCN PAM
ugccacuaaccucuuuucuu

SEQ ID NO: 10927 - RNA, 20 nt, Artificial Sequence
  spacer sequence CTCN PAM
uuucuuuaccaccuucuccg

SEQ ID NO: 10928 - RNA, 20 nt, Artificial Sequence
  spacer sequence CTCN PAM
ggagcagauggacuugacca

SEQ ID NO: 10929 - RNA, 20 nt, Artificial Sequence
  spacer sequence CTCN PAM
ggagaaggugguaaagaaaa

SEQ ID NO: 10930 - RNA, 20 nt, Artificial Sequence
  spacer sequence CTCN PAM
uggcaaccucagaaauuaga

SEQ ID NO: 10931 - RNA, 20 nt, Artificial Sequence
  spacer sequence CTCN PAM
gaaauuagagaaaaaaaaaa

SEQ ID NO: 10932 - RNA, 20 nt, Artificial Sequence
  spacer sequence CTCN PAM
aauuucugagguugccagga

SEQ ID NO: 10933 - RNA, 20 nt, Artificial Sequence
  spacer sequence CTCN PAM
uuuuuuuuuuuucucuaauu

SEQ ID NO: 10934 - RNA, 20 nt, Artificial Sequence
  spacer sequence CTCN PAM
uggcuacccuacuccggucc

SEQ ID NO: 10935 - RNA, 20 nt, Artificial Sequence
  spacer sequence CTCN PAM
gguccagguuuuucuccucc

SEQ ID NO: 10936 - RNA, 20 nt, Artificial Sequence
  spacer sequence CTCN PAM
ucccucuguguugcccgacg

SEQ ID NO: 10937 - RNA, 20 nt, Artificial Sequence
  spacer sequence CTCN PAM
cucuguguugcccgacgguc

SEQ ID NO: 10938 - RNA, 20 nt, Artificial Sequence
  spacer sequence CTCN PAM
guguugcccgacgguccugc

SEQ ID NO: 10939 - RNA, 20 nt, Artificial Sequence
  spacer sequence CTCN PAM
cacacuaacacuaaaccaga

SEQ ID NO: 10940 - RNA, 20 nt, Artificial Sequence
  spacer sequence CTCN PAM
cacuaacacuaaaccagaaa

SEQ ID NO: 10941 - RNA, 20 nt, Artificial Sequence
  spacer sequence CTCN PAM
uuugcguucugcaagaauau

SEQ ID NO: 10942 - RNA, 20 nt, Artificial Sequence
  spacer sequence CTCN PAM
cuuaaaauauucuugcagaa

SEQ ID NO: 10943 - RNA, 20 nt, Artificial Sequence
  spacer sequence CTCN PAM
uuugaccauuuguaguuaua

SEQ ID NO: 10944 - RNA, 20 nt, Artificial Sequence
  spacer sequence CTCN PAM
cauuugaccauuuguaguua

SEQ ID NO: 10945 - RNA, 20 nt, Artificial Sequence
  spacer sequence CTCN PAM
aaaaaauauuaauaaaauac

SEQ ID NO: 10946 - RNA, 20 nt, Artificial Sequence
  spacer sequence CTCN PAM
auacacuuuggcaggacuca

SEQ ID NO: 10947 - RNA, 20 nt, Artificial Sequence
  spacer sequence CTCN PAM
gaccaaccacuaccauuaaa

SEQ ID NO: 10948 - RNA, 20 nt, Artificial Sequence
  spacer sequence CTCN PAM
agagcguguuuuggcagugc

SEQ ID NO: 10949 - RNA, 20 nt, Artificial Sequence
  spacer sequence CTCN PAM
ugaguuuaaugguagugguu

SEQ ID NO: 10950 - RNA, 20 nt, Artificial Sequence
  spacer sequence CTCN PAM
ugguggugucugcacagggc

SEQ ID NO: 10951 - RNA, 20 nt, Artificial Sequence
  spacer sequence CTCN PAM
uccuaaccacccucucugcc

SEQ ID NO: 10952 - RNA, 20 nt, Artificial Sequence
  spacer sequence CTCN PAM
cugccggccgcagcuguucu

SEQ ID NO: 10953 - RNA, 20 nt, Artificial Sequence
  spacer sequence CTCN PAM
gccggccgcagcuguucugu

SEQ ID NO: 10954 - RNA, 20 nt, Artificial Sequence
  spacer sequence CTCN PAM
aaggacaaaugaaauccccc

SEQ ID NO: 10955 - RNA, 20 nt, Artificial Sequence
  spacer sequence CTCN PAM
agacuagggcaccaugagca

SEQ ID NO: 10956 - RNA, 20 nt, Artificial Sequence
  spacer sequence CTCN PAM
uggugcccuagucuugaguu

SEQ ID NO: 10957 - RNA, 20 nt, Artificial Sequence
  spacer sequence CTCN PAM
gaauccugcaccagcguugg

SEQ ID NO: 10958 - RNA, 20 nt, Artificial Sequence
  spacer sequence CTCN PAM
acaacacucagccucacgcc

SEQ ID NO: 10959 - RNA, 20 nt, Artificial Sequence
  spacer sequence CTCN PAM
gccucacgccucaccccagc

SEQ ID NO: 10960 - RNA, 20 nt, Artificial Sequence
  spacer sequence CTCN PAM
cgccucaccccagcacuccc

SEQ ID NO: 10961 - RNA, 20 nt, Artificial Sequence
  spacer sequence CTCN PAM
ccccagcacucccugccucu

SEQ ID NO: 10962 - RNA, 20 nt, Artificial Sequence
  spacer sequence CTCN PAM
cugccucugccccucccccc

SEQ ID NO: 10963 - RNA, 20 nt, Artificial Sequence
  spacer sequence CTCN PAM
gccccuccccccaaauccaa

SEQ ID NO: 10964 - RNA, 20 nt, Artificial Sequence
  spacer sequence CTCN PAM
ccccaaauccaacacaccca

SEQ ID NO: 10965 - RNA, 20 nt, Artificial Sequence
  spacer sequence CTCN PAM
aaauuugaagaacuucugug

SEQ ID NO: 10966 - RNA, 20 nt, Artificial Sequence
  spacer sequence CTCN PAM
gcuaauuauuucccucauuu

SEQ ID NO: 10967 - RNA, 20 nt, Artificial Sequence
  spacer sequence CTCN PAM
uuuugcauuucaaggcacaa

SEQ ID NO: 10968 - RNA, 20 nt, Artificial Sequence
  spacer sequence CTCN PAM
cugguggucuauuaauaguu

SEQ ID NO: 10969 - RNA, 20 nt, Artificial Sequence
  spacer sequence CTCN PAM
aaacuucaaacuauuaauag

SEQ ID NO: 10970 - RNA, 20 nt, Artificial Sequence
  spacer sequence CTCN PAM
ggguauuaugauuugguuuc

SEQ ID NO: 10971 - RNA, 20 nt, Artificial Sequence
  spacer sequence CTCN PAM
cugccugguuuacugauuua

SEQ ID NO: 10972 - RNA, 20 nt, Artificial Sequence
  spacer sequence CTCN PAM
gccugguuuacugauuuaca

SEQ ID NO: 10973 - RNA, 20 nt, Artificial Sequence
  spacer sequence CTCN PAM
cuguggcaaacuguuuuuca

SEQ ID NO: 10974 - RNA, 20 nt, Artificial Sequence
  spacer sequence CTCN PAM
acucccuuuaaguacuucga

SEQ ID NO: 10975 - RNA, 20 nt, Artificial Sequence
  spacer sequence CTCN PAM
cuuuaaguacuucgaaaaac

SEQ ID NO: 10976 - RNA, 20 nt, Artificial Sequence
  spacer sequence CTCN PAM
uucaaaaucauguggcuuug

SEQ ID NO: 10977 - RNA, 20 nt, Artificial Sequence
  spacer sequence CTCN PAM
uuagcuccuucaaaaucaug

SEQ ID NO: 10978 - RNA, 20 nt, Artificial Sequence
  spacer sequence CTCN PAM
auuauauaacaaucuacccu

SEQ ID NO: 10979 - RNA, 20 nt, Artificial Sequence
  spacer sequence CTCN PAM
auauaagcagaaguuuccag

SEQ ID NO: 10980 - RNA, 20 nt, Artificial Sequence
  spacer sequence CTCN PAM
gcuauaauaacacuuuacau

SEQ ID NO: 10981 - RNA, 20 nt, Artificial Sequence
  spacer sequence CTCN PAM
uccaugcucacguuuuuaac

SEQ ID NO: 10982 - RNA, 20 nt, Artificial Sequence
  spacer sequence CTCN PAM
augcucacguuuuuaacucu

SEQ ID NO: 10983 - RNA, 20 nt, Artificial Sequence
  spacer sequence CTCN PAM
cguuuuuaacucuaauacug

SEQ ID NO: 10984 - RNA, 20 nt, Artificial Sequence
  spacer sequence CTCN PAM
aauacuguaaucuuucuugc

SEQ ID NO: 10985 - RNA, 20 nt, Artificial Sequence
  spacer sequence CTCN PAM
uggauagacugaauaauaag

SEQ ID NO: 10986 - RNA, 20 nt, Artificial Sequence
  spacer sequence CTCN PAM
cccaaacuuuacaagaaagg

SEQ ID NO: 10987 - RNA, 20 nt, Artificial Sequence
  spacer sequence CTCN PAM
cccccaaacuuuacaagaaa

SEQ ID NO: 10988 - RNA, 20 nt, Artificial Sequence
  spacer sequence CTCN PAM
cucccccaaacuuuacaaga

SEQ ID NO: 10989 - RNA, 20 nt, Artificial Sequence
  spacer sequence CTCN PAM
cucucccccaaacuuuacaa

SEQ ID NO: 10990 - RNA, 20 nt, Artificial Sequence
  spacer sequence CTCN PAM
cucucucccccaaacuuuac

SEQ ID NO: 10991 - RNA, 20 nt, Artificial Sequence
  spacer sequence CTCN PAM
ucucucucucccccaaacuu

SEQ ID NO: 10992 - RNA, 20 nt, Artificial Sequence
  spacer sequence CTCN PAM
ccucucucucucccccaaac

SEQ ID NO: 10993 - RNA, 20 nt, Artificial Sequence
  spacer sequence CTCN PAM
uucucuccucucucucuccc

SEQ ID NO: 10994 - RNA, 20 nt, Artificial Sequence
  spacer sequence CTCN PAM
cuuucucuccucucucucuc

SEQ ID NO: 10995 - RNA, 20 nt, Artificial Sequence
  spacer sequence CTCN PAM
uucuaucuugcaucaccccc

SEQ ID NO: 10996 - RNA, 20 nt, Artificial Sequence
  spacer sequence CTCN PAM
ccuucuaucuugcaucaccc

SEQ ID NO: 10997 - RNA, 20 nt, Artificial Sequence
  spacer sequence CTCN PAM
cuccuucuaucuugcaucac

SEQ ID NO: 10998 - RNA, 20 nt, Artificial Sequence
  spacer sequence CTCN PAM
acugcccacucagccccaca

SEQ ID NO: 10999 - RNA, 20 nt, Artificial Sequence
  spacer sequence CTCN PAM
gccccacauaaaguaugaag

SEQ ID NO: 11000 - RNA, 20 nt, Artificial Sequence
  spacer sequence CTCN PAM
ggccaacugcaugcauaauu

SEQ ID NO: 11001 - RNA, 20 nt, Artificial Sequence
  spacer sequence CTCN PAM
gacuucacagccuuuggucu

SEQ ID NO: 11002 - RNA, 20 nt, Artificial Sequence
  spacer sequence CTCN PAM
ccgacuucacagccuuuggu

SEQ ID NO: 11003 - RNA, 20 nt, Artificial Sequence
  spacer sequence CTCN PAM
acacacacaaauaaaaagcc

SEQ ID NO: 11004 - RNA, 20 nt, Artificial Sequence
  spacer sequence CTCN PAM
cagauggaccccaucaguuc

SEQ ID NO: 11005 - RNA, 20 nt, Artificial Sequence
  spacer sequence CTCN PAM
gagguuaaaauuauaguuau

SEQ ID NO: 11006 - RNA, 20 nt, Artificial Sequence
  spacer sequence CTCN PAM
gagggaccuagcacugcccu

SEQ ID NO: 11007 - RNA, 20 nt, Artificial Sequence
  spacer sequence CTCN PAM
uaaaccaaagaugaacauca

SEQ ID NO: 11008 - RNA, 20 nt, Artificial Sequence
  spacer sequence CTCN PAM
caaaaaucggaaaccguuag

SEQ ID NO: 11009 - RNA, 20 nt, Artificial Sequence
  spacer sequence CTCN PAM
aaaaucggaaaccguuaguu

SEQ ID NO: 11010 - RNA, 20 nt, Artificial Sequence
  spacer sequence CTCN PAM
uguaccuugagggagacacu

SEQ ID NO: 11011 - RNA, 20 nt, Artificial Sequence
  spacer sequence CTCN PAM
agguacacgagugcccuggu

SEQ ID NO: 11012 - RNA, 20 nt, Artificial Sequence
  spacer sequence CTCN PAM
cucaagguacacgagugccc

SEQ ID NO: 11013 - RNA, 20 nt, Artificial Sequence
  spacer sequence CTCN PAM
cagugucucccucaagguac

SEQ ID NO: 11014 - RNA, 20 nt, Artificial Sequence
  spacer sequence CTCN PAM
cugggcucccagugucuccc

SEQ ID NO: 11015 - RNA, 20 nt, Artificial Sequence
  spacer sequence CTCN PAM
aggcucccugggcucccagu

SEQ ID NO: 11016 - RNA, 20 nt, Artificial Sequence
  spacer sequence CTCN PAM
ucaccaaaguauauccuggu

SEQ ID NO: 11017 - RNA, 20 nt, Artificial Sequence
  spacer sequence CTCN PAM
ccucaucaccaaaguauauc

SEQ ID NO: 11018 - RNA, 20 nt, Artificial Sequence
  spacer sequence CTCN PAM
gagcagcagcugaaugagaa

SEQ ID NO: 11019 - RNA, 20 nt, Artificial Sequence
  spacer sequence CTCN PAM
gagcuacaauguguccuccc

SEQ ID NO: 11020 - RNA, 20 nt, Artificial Sequence
  spacer sequence CTCN PAM
uucagcugcugcucugagcu

SEQ ID NO: 11021 - RNA, 20 nt, Artificial Sequence
  spacer sequence CTCN PAM
uuuaucuuuuagaucaagua

SEQ ID NO: 11022 - RNA, 20 nt, Artificial Sequence
  spacer sequence CTCN PAM
uccaaaggaggaaccugaug

SEQ ID NO: 11023 - RNA, 20 nt, Artificial Sequence
  spacer sequence CTCN PAM
aaaggaggaaccugaugucu

SEQ ID NO: 11024 - RNA, 20 nt, Artificial Sequence
  spacer sequence CTCN PAM
uuuggaggagggaaggcuac

SEQ ID NO: 11025 - RNA, 20 nt, Artificial Sequence
  spacer sequence CTCN PAM
auguaucuggaagugccuca

SEQ ID NO: 11026 - RNA, 20 nt, Artificial Sequence
  spacer sequence CTCN PAM
aucauauacuuaaauuuuac

SEQ ID NO: 11027 - RNA, 20 nt, Artificial Sequence
  spacer sequence CTCN PAM
ccaaaugagaacgauuucca

SEQ ID NO: 11028 - RNA, 20 nt, Artificial Sequence
  spacer sequence CTCN PAM
uuuggggagaagacuguaaa

SEQ ID NO: 11029 - RNA, 20 nt, Artificial Sequence
  spacer sequence CTCN PAM
agguuagacuucuaauuccu

SEQ ID NO: 11030 - RNA, 20 nt, Artificial Sequence
  spacer sequence CTCN PAM
auucacuaaaggaaacuugg

SEQ ID NO: 11031 - RNA, 20 nt, Artificial Sequence
  spacer sequence CTCN PAM
uuucuacuggggcaucugag

SEQ ID NO: 11032 - RNA, 20 nt, Artificial Sequence
  spacer sequence CTCN PAM
gaugccccaguagaaaggag

SEQ ID NO: 11033 - RNA, 20 nt, Artificial Sequence
  spacer sequence CTCN PAM
ucagaugccccaguagaaag

SEQ ID NO: 11034 - RNA, 20 nt, Artificial Sequence
  spacer sequence CTCN PAM
uccucagaugccccaguaga

SEQ ID NO: 11035 - RNA, 20 nt, Artificial Sequence
  spacer sequence CTCN PAM
ccuccucagaugccccagua

SEQ ID NO: 11036 - RNA, 20 nt, Artificial Sequence
  spacer sequence CTCN PAM
guggcucuccuccucagaug

SEQ ID NO: 11037 - RNA, 20 nt, Artificial Sequence
  spacer sequence CTCN PAM
uucauuaauguaauuugcau

SEQ ID NO: 11038 - RNA, 20 nt, Artificial Sequence
  spacer sequence CTCN PAM
uggugaacuuuuaaucuuga

SEQ ID NO: 11039 - RNA, 20 nt, Artificial Sequence
  spacer sequence CTCN PAM
agauuaaaaguucaccaaga

SEQ ID NO: 11040 - RNA, 20 nt, Artificial Sequence
  spacer sequence CTCN PAM
uucagcaggcugacaggcca

SEQ ID NO: 11041 - RNA, 20 nt, Artificial Sequence
  spacer sequence CTCN PAM
uuugaauuuuaagcacuucu

SEQ ID NO: 11042 - RNA, 20 nt, Artificial Sequence
  spacer sequence CTCN PAM
uuuuuuuaaugcaaaauugu

SEQ ID NO: 11043 - RNA, 20 nt, Artificial Sequence
  spacer sequence CTCN PAM
gucuggaagauauuacaauu

SEQ ID NO: 11044 - RNA, 20 nt, Artificial Sequence
  spacer sequence CTCN PAM
auguuuaguuuaagcucagu

SEQ ID NO: 11045 - RNA, 20 nt, Artificial Sequence
  spacer sequence CTCN PAM
guuuguaucuuagccccuuu

SEQ ID NO: 11046 - RNA, 20 nt, Artificial Sequence
  spacer sequence CTCN PAM
uaagggcuuaguuuuaugaa

SEQ ID NO: 11047 - RNA, 20 nt, Artificial Sequence
  spacer sequence CTCN PAM
aaacaugguaauuuaucaaa

SEQ ID NO: 11048 - RNA, 20 nt, Artificial Sequence
  spacer sequence CTCN PAM
gggcuguuuuugauaaauua

SEQ ID NO: 11049 - RNA, 20 nt, Artificial Sequence
  spacer sequence CTCN PAM
uaggcaauacugcauagucc

SEQ ID NO: 11050 - RNA, 20 nt, Artificial Sequence
  spacer sequence CTCN PAM
aacagaacagauuaacacga

SEQ ID NO: 11051 - RNA, 20 nt, Artificial Sequence
  spacer sequence CTCN PAM
uguuaaucuguucuguugga

SEQ ID NO: 11052 - RNA, 20 nt, Artificial Sequence
  spacer sequence CTCN PAM
acccuuccaaaaagccuuuu

SEQ ID NO: 11053 - RNA, 20 nt, Artificial Sequence
  spacer sequence CTCN PAM
aguugucucuccuguguaaa

SEQ ID NO: 11054 - RNA, 20 nt, Artificial Sequence
  spacer sequence CTCN PAM
ccuguguaaacauccacugu

SEQ ID NO: 11055 - RNA, 20 nt, Artificial Sequence
  spacer sequence CTCN PAM
uguguaaacauccacugugg

SEQ ID NO: 11056 - RNA, 20 nt, Artificial Sequence
  spacer sequence CTCN PAM
aagccaaugaaaaagcuguu

SEQ ID NO: 11057 - RNA, 20 nt, Artificial Sequence
  spacer sequence CTCN PAM
uuucuugcugguuucccuuu

SEQ ID NO: 11058 - RNA, 20 nt, Artificial Sequence
  spacer sequence CTCN PAM
ugugcuucuccuuucuugcu

SEQ ID NO: 11059 - RNA, 20 nt, Artificial Sequence
  spacer sequence CTCN PAM
cuccugugcuucuccuuucu

SEQ ID NO: 11060 - RNA, 20 nt, Artificial Sequence
  spacer sequence CTCN PAM
cccuccugugcuucuccuuu

SEQ ID NO: 11061 - RNA, 20 nt, Artificial Sequence
  spacer sequence CTCN PAM
ucucccuccugugcuucucc

SEQ ID NO: 11062 - RNA, 20 nt, Artificial Sequence
  spacer sequence CTCN PAM
gaaguaaaccagaccuugcu

SEQ ID NO: 11063 - RNA, 20 nt, Artificial Sequence
  spacer sequence CTCN PAM
ucagaaguaaaccagaccuu

SEQ ID NO: 11064 - RNA, 20 nt, Artificial Sequence
  spacer sequence CTCN PAM
agcaacaggauuugcacucc

SEQ ID NO: 11065 - RNA, 20 nt, Artificial Sequence
  spacer sequence CTCN PAM
auucggcaccagccgcauuu

SEQ ID NO: 11066 - RNA, 20 nt, Artificial Sequence
  spacer sequence CTCN PAM
aauaacuggggugggauggu

SEQ ID NO: 11067 - RNA, 20 nt, Artificial Sequence
  spacer sequence CTCN PAM
cuaauaacuggggugggaug

SEQ ID NO: 11068 - RNA, 20 nt, Artificial Sequence
  spacer sequence CTCN PAM
agacuaguaauuggaaagcc

SEQ ID NO: 11069 - RNA, 20 nt, Artificial Sequence
  spacer sequence CTCN PAM
caccuugcuaaccuccugac

SEQ ID NO: 11070 - RNA, 20 nt, Artificial Sequence
  spacer sequence CTCN PAM
ugacauuuaaaaaauucuag

SEQ ID NO: 11071 - RNA, 20 nt, Artificial Sequence
  spacer sequence CTCN PAM
uccucuuccucccaacccca

SEQ ID NO: 11072 - RNA, 20 nt, Artificial Sequence
  spacer sequence CTCN PAM
ucuuccucccaaccccaacc

SEQ ID NO: 11073 - RNA, 20 nt, Artificial Sequence
  spacer sequence CTCN PAM
uccucccaaccccaaccucu

SEQ ID NO: 11074 - RNA, 20 nt, Artificial Sequence
  spacer sequence CTCN PAM
caaccccaaccucuccaacc

SEQ ID NO: 11075 - RNA, 20 nt, Artificial Sequence
  spacer sequence CTCN PAM
ccaacccaggugaaagcaag

SEQ ID NO: 11076 - RNA, 20 nt, Artificial Sequence
  spacer sequence CTCN PAM
aacccaggugaaagcaagaa

SEQ ID NO: 11077 - RNA, 20 nt, Artificial Sequence
  spacer sequence CTCN PAM
gcuggugugcaagucagacu

SEQ ID NO: 11078 - RNA, 20 nt, Artificial Sequence
  spacer sequence CTCN PAM
gucugacuugcacaccagcu

SEQ ID NO: 11079 - RNA, 20 nt, Artificial Sequence
  spacer sequence CTCN PAM
acugcuagacccaaaagcuc

SEQ ID NO: 11080 - RNA, 20 nt, Artificial Sequence
  spacer sequence CTCN PAM
cugcuguggggauuucauuu

SEQ ID NO: 11081 - RNA, 20 nt, Artificial Sequence
  spacer sequence CTCN PAM
gcuguggggauuucauuuga

SEQ ID NO: 11082 - RNA, 20 nt, Artificial Sequence
  spacer sequence CTCN PAM
cuccgcacccuucucccccu

SEQ ID NO: 11083 - RNA, 20 nt, Artificial Sequence
  spacer sequence CTCN PAM
ccgcacccuucucccccucu

SEQ ID NO: 11084 - RNA, 20 nt, Artificial Sequence
  spacer sequence CTCN PAM
gcacccuucucccccucucu

SEQ ID NO: 11085 - RNA, 20 nt, Artificial Sequence
  spacer sequence CTCN PAM
cccucucucccccagccuca

SEQ ID NO: 11086 - RNA, 20 nt, Artificial Sequence
  spacer sequence CTCN PAM
cucccccagccucagacuuu

SEQ ID NO: 11087 - RNA, 20 nt, Artificial Sequence
  spacer sequence CTCN PAM
cccccagccucagacuuucu

SEQ ID NO: 11088 - RNA, 20 nt, Artificial Sequence
  spacer sequence CTCN PAM
cccagccucagacuuucucc

SEQ ID NO: 11089 - RNA, 20 nt, Artificial Sequence
  spacer sequence CTCN PAM
gacuuucuccuagaguugau

SEQ ID NO: 11090 - RNA, 20 nt, Artificial Sequence
  spacer sequence CTCN PAM
uagaguugaucuuaccggaa

SEQ ID NO: 11091 - RNA, 20 nt, Artificial Sequence
  spacer sequence CTCN PAM
aggagaaagucugaggcugg

SEQ ID NO: 11092 - RNA, 20 nt, Artificial Sequence
  spacer sequence CTCN PAM
uuccgauuuccuugauaaca

SEQ ID NO: 11093 - RNA, 20 nt, Artificial Sequence
  spacer sequence CTCN PAM
cuucucuuuccgauuuccuu

SEQ ID NO: 11094 - RNA, 20 nt, Artificial Sequence
  spacer sequence CTCN PAM
gguacuacccccugauuucu

SEQ ID NO: 11095 - RNA, 20 nt, Artificial Sequence
  spacer sequence CTCN PAM
cuuauccuugggcccugcuc

SEQ ID NO: 11096 - RNA, 20 nt, Artificial Sequence
  spacer sequence CTCN PAM
uauccuugggcccugcucag

SEQ ID NO: 11097 - RNA, 20 nt, Artificial Sequence
  spacer sequence CTCN PAM
gaaaugugccacauuuuaac

SEQ ID NO: 11098 - RNA, 20 nt, Artificial Sequence
  spacer sequence CTCN PAM
gcauccuauccuuucuaaua

SEQ ID NO: 11099 - RNA, 20 nt, Artificial Sequence
  spacer sequence CTCN PAM
uacagaugguuguggaugug

SEQ ID NO: 11100 - RNA, 20 nt, Artificial Sequence
  spacer sequence CTCN PAM
acaugaguagaguucaauga

SEQ ID NO: 11101 - RNA, 20 nt, Artificial Sequence
  spacer sequence CTCN PAM
uguagaguaacauuaguguc

SEQ ID NO: 11102 - RNA, 20 nt, Artificial Sequence
  spacer sequence CTCN PAM
acucauguagaguaacauua

SEQ ID NO: 11103 - RNA, 20 nt, Artificial Sequence
  spacer sequence CTCN PAM
uugaacucuacucauguaga

SEQ ID NO: 11104 - RNA, 20 nt, Artificial Sequence
  spacer sequence CTCN PAM
guaguguagcauugguuucu

SEQ ID NO: 11105 - RNA, 20 nt, Artificial Sequence
  spacer sequence CTCN PAM
aauagggaaaaucacuugaa

SEQ ID NO: 11106 - RNA, 20 nt, Artificial Sequence
  spacer sequence CTCN PAM
aggcuuccuauaugcauucc

SEQ ID NO: 11107 - RNA, 20 nt, Artificial Sequence
  spacer sequence CTCN PAM
uuaaauacaauaccuauaua

SEQ ID NO: 11108 - RNA, 20 nt, Artificial Sequence
  spacer sequence CTCN PAM
uaucugcuuggggcagccug

SEQ ID NO: 11109 - RNA, 20 nt, Artificial Sequence
  spacer sequence CTCN PAM
ccuccuaucugcuuggggca

SEQ ID NO: 11110 - RNA, 20 nt, Artificial Sequence
  spacer sequence CTCN PAM
gggucccccuccccuccuau

SEQ ID NO: 11111 - RNA, 20 nt, Artificial Sequence
  spacer sequence CTCN PAM
auuguacaaacaaguacgug

SEQ ID NO: 11112 - RNA, 20 nt, Artificial Sequence
  spacer sequence CTCN PAM
aagaucagaagaaauacaua

SEQ ID NO: 11113 - RNA, 20 nt, Artificial Sequence
  spacer sequence CTCN PAM
aauguuuuaguuaaaaggac

SEQ ID NO: 11114 - RNA, 20 nt, Artificial Sequence
  spacer sequence CTCN PAM
uggaucuuugaaaacaacug

SEQ ID NO: 11115 - RNA, 20 nt, Artificial Sequence
  spacer sequence CTCN PAM
uuaacauaacaaaaacauaa

SEQ ID NO: 11116 - RNA, 20 nt, Artificial Sequence
  spacer sequence CTCN PAM
uguuauguuuuuguuauguu

SEQ ID NO: 11117 - RNA, 20 nt, Artificial Sequence
  spacer sequence CTCN PAM
aucacacccuaauauuuuaa

SEQ ID NO: 11118 - RNA, 20 nt, Artificial Sequence
  spacer sequence CTCN PAM
ccaucacacccuaauauuuu

SEQ ID NO: 11119 - RNA, 20 nt, Artificial Sequence
  spacer sequence CTCN PAM
cgagauuuaagauuuaacau

SEQ ID NO: 11120 - RNA, 20 nt, Artificial Sequence
  spacer sequence CTCN PAM
ugaguuucucuccaucacac

SEQ ID NO: 11121 - RNA, 20 nt, Artificial Sequence
  spacer sequence CTCN PAM
ccugccccgauccuuucagu

SEQ ID NO: 11122 - RNA, 20 nt, Artificial Sequence
  spacer sequence CTCN PAM
ccauuuuaacuccccugccc

SEQ ID NO: 11123 - RNA, 20 nt, Artificial Sequence
  spacer sequence CTCN PAM
gugaaccauuuacuccccau

SEQ ID NO: 11124 - RNA, 20 nt, Artificial Sequence
  spacer sequence CTCN PAM
agguauaccaugauuuuaug

SEQ ID NO: 11125 - RNA, 20 nt, Artificial Sequence
  spacer sequence CTCN PAM
uucaccaacucaagguauac

SEQ ID NO: 11126 - RNA, 20 nt, Artificial Sequence
  spacer sequence CTCN PAM
uaguuuuuugagguuuguuu

SEQ ID NO: 11127 - RNA, 20 nt, Artificial Sequence
  spacer sequence CTCN PAM
aaaaacuaagagaaccaaac

SEQ ID NO: 11128 - RNA, 20 nt, Artificial Sequence
  spacer sequence CTCN PAM
aacaaaaacaaaccucaaaa

SEQ ID NO: 11129 - RNA, 20 nt, Artificial Sequence
  spacer sequence CTCN PAM
ucaaacaaaaacaaaccuca

SEQ ID NO: 11130 - RNA, 20 nt, Artificial Sequence
  spacer sequence CTCN PAM
auauuuaaaauguacaggaa

SEQ ID NO: 11131 - RNA, 20 nt, Artificial Sequence
  spacer sequence CTCN PAM
aacauaagaauccaagcuac

SEQ ID NO: 11132 - RNA, 20 nt, Artificial Sequence
  spacer sequence CTCN PAM
ccuuucuauuugcuuuuuga

SEQ ID NO: 11133 - RNA, 20 nt, Artificial Sequence
  spacer sequence CTCN PAM
cauuaaaauaaagaauggaa

SEQ ID NO: 11134 - RNA, 20 nt, Artificial Sequence
  spacer sequence CTCN PAM
aucuaaaacuaaaaucaaau

SEQ ID NO: 11135 - RNA, 20 nt, Artificial Sequence
  spacer sequence CTCN PAM
cuguuguuagcauugccaau

SEQ ID NO: 11136 - RNA, 20 nt, Artificial Sequence
  spacer sequence CTCN PAM
uugugagugaccaaaggucc

SEQ ID NO: 11137 - RNA, 20 nt, Artificial Sequence
  spacer sequence CTCN PAM
caaugaguuuuuguuuguau

SEQ ID NO: 11138 - RNA, 20 nt, Artificial Sequence
  spacer sequence CTCN PAM
agguucccacugggaauucu

SEQ ID NO: 11139 - RNA, 20 nt, Artificial Sequence
  spacer sequence CTCN PAM
ggcagagacugauucaguuc

SEQ ID NO: 11140 - RNA, 20 nt, Artificial Sequence
  spacer sequence CTCN PAM
gccagagaauucccaguggg

SEQ ID NO: 11141 - RNA, 20 nt, Artificial Sequence
  spacer sequence CTCN PAM
ccucuuuuacaggaaguuua

SEQ ID NO: 11142 - RNA, 20 nt, Artificial Sequence
  spacer sequence CTCN PAM
uuuacaggaaguuuaaaccu

SEQ ID NO: 11143 - RNA, 20 nt, Artificial Sequence
  spacer sequence CTCN PAM
ccuuuagguauauauaauuu

SEQ ID NO: 11144 - RNA, 20 nt, Artificial Sequence
  spacer sequence CTCN PAM
gagaacuugguauuuuaucu

SEQ ID NO: 11145 - RNA, 20 nt, Artificial Sequence
  spacer sequence CTCN PAM
gagugcuaaacaacaaauua

SEQ ID NO: 11146 - RNA, 20 nt, Artificial Sequence
  spacer sequence CTCN PAM
uuagauagauaaaauaccaa

SEQ ID NO: 11147 - RNA, 20 nt, Artificial Sequence
  spacer sequence CTCN PAM
aucuuuugcccuuuuugauc

SEQ ID NO: 11148 - RNA, 20 nt, Artificial Sequence
  spacer sequence CTCN PAM
cuccaucuuuugcccuuuuu

SEQ ID NO: 11149 - RNA, 20 nt, Artificial Sequence
  spacer sequence CTCN PAM
gcucgcuccaucuuuugccc

SEQ ID NO: 11150 - RNA, 20 nt, Artificial Sequence
  spacer sequence CTCN PAM
ggugcauacgucaaucgugc

SEQ ID NO: 11151 - RNA, 20 nt, Artificial Sequence
  spacer sequence CTCN PAM
aaggcaacgcgcagugcacg

SEQ ID NO: 11152 - RNA, 20 nt, Artificial Sequence
  spacer sequence CTCN PAM
ucuaaggcaacgcgcagugc

SEQ ID NO: 11153 - RNA, 20 nt, Artificial Sequence
  spacer sequence CTCN PAM
caucagucuccagggugaac

SEQ ID NO: 11154 - RNA, 20 nt, Artificial Sequence
  spacer sequence CTCN PAM
agggugaaccaagagaugac

SEQ ID NO: 11155 - RNA, 20 nt, Artificial Sequence
  spacer sequence CTCN PAM
ugguucacccuggagacuga

SEQ ID NO: 11156 - RNA, 20 nt, Artificial Sequence
  spacer sequence CTCN PAM
agcaauguggacucaaaaau

SEQ ID NO: 11157 - RNA, 20 nt, Artificial Sequence
  spacer sequence CTCN PAM
aaaauauaauggugaaauau

SEQ ID NO: 11158 - RNA, 20 nt, Artificial Sequence
  spacer sequence CTCN PAM
cucucucucucucucugugu

SEQ ID NO: 11159 - RNA, 20 nt, Artificial Sequence
  spacer sequence CTCN PAM
cucucucucucucugugugu

SEQ ID NO: 11160 - RNA, 20 nt, Artificial Sequence
  spacer sequence CTCN PAM
cucucucucucugugugugu

SEQ ID NO: 11161 - RNA, 20 nt, Artificial Sequence
  spacer sequence CTCN PAM
cucucucucugugugugugu

SEQ ID NO: 11162 - RNA, 20 nt, Artificial Sequence
  spacer sequence CTCN PAM
cucucucugugugugugugu

SEQ ID NO: 11163 - RNA, 20 nt, Artificial Sequence
  spacer sequence CTCN PAM
cucucugugugugugugugu

SEQ ID NO: 11164 - RNA, 20 nt, Artificial Sequence
  spacer sequence CTCN PAM
cucugugugugugugugugu

SEQ ID NO: 11165 - RNA, 20 nt, Artificial Sequence
  spacer sequence CTCN PAM
cugugugugugugugugugu

SEQ ID NO: 11166 - RNA, 20 nt, Artificial Sequence
  spacer sequence CTCN PAM
gugugugugugugugugugu

SEQ ID NO: 11167 - RNA, 20 nt, Artificial Sequence
  spacer sequence CTCN PAM
uuccccauuacacacacaca

SEQ ID NO: 11168 - RNA, 20 nt, Artificial Sequence
  spacer sequence CTCN PAM
cuuuguucaaaucacauacu

SEQ ID NO: 11169 - RNA, 20 nt, Artificial Sequence
  spacer sequence CTCN PAM
auaccagcacaugcaaaaaa

SEQ ID NO: 11170 - RNA, 20 nt, Artificial Sequence
  spacer sequence CTCN PAM
caauucaccaccagaauuuu

SEQ ID NO: 11171 - RNA, 20 nt, Artificial Sequence
  spacer sequence CTCN PAM
gccaccucccaauucaccac

SEQ ID NO: 11172 - RNA, 20 nt, Artificial Sequence
  spacer sequence CTCN PAM
ccaacucugccaccucccaa

SEQ ID NO: 11173 - RNA, 20 nt, Artificial Sequence
  spacer sequence CTCN PAM
aagagaagaaaaggaugaug

SEQ ID NO: 11174 - RNA, 20 nt, Artificial Sequence
  spacer sequence CTCN PAM
uggaguugucuccccaacuc

SEQ ID NO: 11175 - RNA, 20 nt, Artificial Sequence
  spacer sequence CTCN PAM
uuugaucuauagcgaaauga

SEQ ID NO: 11176 - RNA, 20 nt, Artificial Sequence
  spacer sequence CTCN PAM
auaugccacaguuuccauuc

SEQ ID NO: 11177 - RNA, 20 nt, Artificial Sequence
  spacer sequence CTCN PAM
gcaucugacagggcauuuac

SEQ ID NO: 11178 - RNA, 20 nt, Artificial Sequence
  spacer sequence CTCN PAM
gaugggcgcauguaaaugcc

SEQ ID NO: 11179 - RNA, 20 nt, Artificial Sequence
  spacer sequence CTCN PAM
ggugccgcucagaugggcgc

SEQ ID NO: 11180 - RNA, 20 nt, Artificial Sequence
  spacer sequence CTCN PAM
caggugccgcucagaugggc

SEQ ID NO: 11181 - RNA, 20 nt, Artificial Sequence
  spacer sequence CTCN PAM
uccaaggugcaguaacugug

SEQ ID NO: 11182 - RNA, 20 nt, Artificial Sequence
  spacer sequence CTCN PAM
aaggugcaguaacugugcgc

SEQ ID NO: 11183 - RNA, 20 nt, Artificial Sequence
  spacer sequence CTCN PAM
ccuauucccugcugggauca

SEQ ID NO: 11184 - RNA, 20 nt, Artificial Sequence
  spacer sequence CTCN PAM
ccaccccccaugccucaaau

SEQ ID NO: 11185 - RNA, 20 nt, Artificial Sequence
  spacer sequence CTCN PAM
aauccuucccuugccaaccu

SEQ ID NO: 11186 - RNA, 20 nt, Artificial Sequence
  spacer sequence CTCN PAM
augccauugcagaaugacga

SEQ ID NO: 11187 - RNA, 20 nt, Artificial Sequence
  spacer sequence CTCN PAM
uucgucauucugcaauggca

SEQ ID NO: 11188 - RNA, 20 nt, Artificial Sequence
  spacer sequence CTCN PAM
gaaauagaccccaaguuacu

SEQ ID NO: 11189 - RNA, 20 nt, Artificial Sequence
  spacer sequence CTCN PAM
cuaugcauuuuuaaaacauu

SEQ ID NO: 11190 - RNA, 20 nt, Artificial Sequence
  spacer sequence CTCN PAM
cugcuuuuuacuggccagcu

SEQ ID NO: 11191 - RNA, 20 nt, Artificial Sequence
  spacer sequence CTCN PAM
auuugaagccaguaaacauc

SEQ ID NO: 11192 - RNA, 20 nt, Artificial Sequence
  spacer sequence CTCN PAM
aggagcacauguagagagcu

SEQ ID NO: 11193 - RNA, 20 nt, Artificial Sequence
  spacer sequence CTCN PAM
uagagaccaaaggcagauuu

SEQ ID NO: 11194 - RNA, 20 nt, Artificial Sequence
  spacer sequence CTCN PAM
acaugugcuccuagagacca

SEQ ID NO: 11195 - RNA, 20 nt, Artificial Sequence
  spacer sequence CTCN PAM
cuacaugugcuccuagagac

SEQ ID NO: 11196 - RNA, 20 nt, Artificial Sequence
  spacer sequence CTCN PAM
aguagcaauaauaugguucg

SEQ ID NO: 11197 - RNA, 20 nt, Artificial Sequence
  spacer sequence CTCN PAM
aauuaauuaggucauguugu

SEQ ID NO: 11198 - RNA, 20 nt, Artificial Sequence
  spacer sequence CTCN PAM
auacccuggucguaaagggg

SEQ ID NO: 11199 - RNA, 20 nt, Artificial Sequence
  spacer sequence CTCN PAM
ccuuuacgaccaggguauag

SEQ ID NO: 11200 - RNA, 20 nt, Artificial Sequence
  spacer sequence CTCN PAM
uaccuagguaaaugggcauc

SEQ ID NO: 11201 - RNA, 20 nt, Artificial Sequence
  spacer sequence CTCN PAM
uugguucuuuucuccuaccu

SEQ ID NO: 11202 - RNA, 20 nt, Artificial Sequence
  spacer sequence CTCN PAM
cuccuugguucuuuucuccu

SEQ ID NO: 11203 - RNA, 20 nt, Artificial Sequence
  spacer sequence CTCN PAM
cucccuccuugguucuuuuc

SEQ ID NO: 11204 - RNA, 20 nt, Artificial Sequence
  spacer sequence CTCN PAM
aaguuagaaucuuuuuuuuu

SEQ ID NO: 11205 - RNA, 20 nt, Artificial Sequence
  spacer sequence CTCN PAM
ugcuaaaaaaguggcaaggu

SEQ ID NO: 11206 - RNA, 20 nt, Artificial Sequence
  spacer sequence CTCN PAM
cuagcugugcuuucuacuuc

SEQ ID NO: 11207 - RNA, 20 nt, Artificial Sequence
  spacer sequence CTCN PAM
uuuauuaaacauuuucauug

SEQ ID NO: 11208 - RNA, 20 nt, Artificial Sequence
  spacer sequence CTCN PAM
augaaaauguuuaauaaagg

SEQ ID NO: 11209 - RNA, 20 nt, Artificial Sequence
  spacer sequence CTCN PAM
cacauuagccaaacuacaug

SEQ ID NO: 11210 - RNA, 20 nt, Artificial Sequence
  spacer sequence CTCN PAM
aaaagaugccauuaauaagc

SEQ ID NO: 11211 - RNA, 20 nt, Artificial Sequence
  spacer sequence CTCN PAM
ccuccucccugagcugaagg

SEQ ID NO: 11212 - RNA, 20 nt, Artificial Sequence
  spacer sequence CTCN PAM
ucccugagcugaagguugcc

SEQ ID NO: 11213 - RNA, 20 nt, Artificial Sequence
  spacer sequence CTCN PAM
cugagcugaagguugccugu

SEQ ID NO: 11214 - RNA, 20 nt, Artificial Sequence
  spacer sequence CTCN PAM
gggaggaggcgaguuggaug

SEQ ID NO: 11215 - RNA, 20 nt, Artificial Sequence
  spacer sequence CTCN PAM
acaauuauaugccacauuca

SEQ ID NO: 11216 - RNA, 20 nt, Artificial Sequence
  spacer sequence CTCN PAM
uagugaauguggcauauaau

SEQ ID NO: 11217 - RNA, 20 nt, Artificial Sequence
  spacer sequence CTCN PAM
guguuuauucugugaaagcu

SEQ ID NO: 11218 - RNA, 20 nt, Artificial Sequence
  spacer sequence CTCN PAM
cguucucuguguuuauucug

SEQ ID NO: 11219 - RNA, 20 nt, Artificial Sequence
  spacer sequence CTCN PAM
gcuccuguucuugaagugaa

SEQ ID NO: 11220 - RNA, 20 nt, Artificial Sequence
  spacer sequence CTCN PAM
uguucuugaagugaauacau

SEQ ID NO: 11221 - RNA, 20 nt, Artificial Sequence
  spacer sequence CTCN PAM
ugcuguuacagacaguuaau

SEQ ID NO: 11222 - RNA, 20 nt, Artificial Sequence
  spacer sequence CTCN PAM
acaucacacacaggaugauc

SEQ ID NO: 11223 - RNA, 20 nt, Artificial Sequence
  spacer sequence CTCN PAM
aaacauuauuuauaaaagau

SEQ ID NO: 11224 - RNA, 20 nt, Artificial Sequence
  spacer sequence CTCN PAM
aucaugcaaucacugugaca

SEQ ID NO: 11225 - RNA, 20 nt, Artificial Sequence
  spacer sequence CTCN PAM
uucuaagacaaauuguaaau

SEQ ID NO: 11226 - RNA, 20 nt, Artificial Sequence
  spacer sequence CTCN PAM
gacauuguacuuugacaaaa

SEQ ID NO: 11227 - RNA, 20 nt, Artificial Sequence
  spacer sequence CTCN PAM
gucuuauuuacaaauacagc

SEQ ID NO: 11228 - RNA, 20 nt, Artificial Sequence
  spacer sequence CTCN PAM
caguuucaugaacauuaguc

SEQ ID NO: 11229 - RNA, 20 nt, Artificial Sequence
  spacer sequence CTCN PAM
caaacauaggcucccuauga

SEQ ID NO: 11230 - RNA, 20 nt, Artificial Sequence
  spacer sequence CTCN PAM
cuaugaaaauccuagguacu

SEQ ID NO: 11231 - RNA, 20 nt, Artificial Sequence
  spacer sequence CTCN PAM
acucucuggauuuugaaggu

SEQ ID NO: 11232 - RNA, 20 nt, Artificial Sequence
  spacer sequence CTCN PAM
cuggauuuugaagguaagua

SEQ ID NO: 11233 - RNA, 20 nt, Artificial Sequence
  spacer sequence CTCN PAM
ggauuuugaagguaaguaaa

SEQ ID NO: 11234 - RNA, 20 nt, Artificial Sequence
  spacer sequence CTCN PAM
uuauuuaugugauucugaau

SEQ ID NO: 11235 - RNA, 20 nt, Artificial Sequence
  spacer sequence CTCN PAM
uuuacaauuacaccauaagg

SEQ ID NO: 11236 - RNA, 20 nt, Artificial Sequence
  spacer sequence CTCN PAM
aguucagucugagcuaggag

SEQ ID NO: 11237 - RNA, 20 nt, Artificial Sequence
  spacer sequence CTCN PAM
gacugaacuggaggauguau

SEQ ID NO: 11238 - RNA, 20 nt, Artificial Sequence
  spacer sequence CTCN PAM
uagcucagacugaacuggag

SEQ ID NO: 11239 - RNA, 20 nt, Artificial Sequence
  spacer sequence CTCN PAM
ccuagcucagacugaacugg

SEQ ID NO: 11240 - RNA, 20 nt, Artificial Sequence
  spacer sequence CTCN PAM
uaaaaguaaaucaaauacaa

SEQ ID NO: 11241 - RNA, 20 nt, Artificial Sequence
  spacer sequence CTCN PAM
cuucuuuagaguaucugucu

SEQ ID NO: 11242 - RNA, 20 nt, Artificial Sequence
  spacer sequence CTCN PAM
aaagaagggagauauaguaa

SEQ ID NO: 11243 - RNA, 20 nt, Artificial Sequence
  spacer sequence CTCN PAM
uuaaaaucaugaacauagac

SEQ ID NO: 11244 - RNA, 20 nt, Artificial Sequence
  spacer sequence CTCN PAM
uguugauauauaacauuuuu

SEQ ID NO: 11245 - RNA, 20 nt, Artificial Sequence
  spacer sequence CTCN PAM
agucucucaaaaagcuaacu

SEQ ID NO: 11246 - RNA, 20 nt, Artificial Sequence
  spacer sequence CTCN PAM
caaaaagcuaacuuuaugac

SEQ ID NO: 11247 - RNA, 20 nt, Artificial Sequence
  spacer sequence CTCN PAM
aaaagcuaacuuuaugacag

SEQ ID NO: 11248 - RNA, 20 nt, Artificial Sequence
  spacer sequence CTCN PAM
aaucugacaugaugggauaa

SEQ ID NO: 11249 - RNA, 20 nt, Artificial Sequence
  spacer sequence CTCN PAM
uauuuuaugauggggggaaa

SEQ ID NO: 11250 - RNA, 20 nt, Artificial Sequence
  spacer sequence CTCN PAM
gacugcaagucaaaggcugc

SEQ ID NO: 11251 - RNA, 20 nt, Artificial Sequence
  spacer sequence CTCN PAM
gauaucagcagccuuugacu

SEQ ID NO: 11252 - RNA, 20 nt, Artificial Sequence
  spacer sequence CTCN PAM
auggaucacaaucacacaau

SEQ ID NO: 11253 - RNA, 20 nt, Artificial Sequence
  spacer sequence CTCN PAM
uauguguacguggaugaagu

SEQ ID NO: 11254 - RNA, 20 nt, Artificial Sequence
  spacer sequence CTCN PAM
cccacuucauccacguacac

SEQ ID NO: 11255 - RNA, 20 nt, Artificial Sequence
  spacer sequence CTCN PAM
aaaaaauacucaguuugggc

SEQ ID NO: 11256 - RNA, 20 nt, Artificial Sequence
  spacer sequence CTCN PAM
guuugggccaggugcggucg

SEQ ID NO: 11257 - RNA, 20 nt, Artificial Sequence
  spacer sequence CTCN PAM
agccuguaaucccagcacuu

SEQ ID NO: 11258 - RNA, 20 nt, Artificial Sequence
  spacer sequence CTCN PAM
caaagugcugggauuacagg

SEQ ID NO: 11259 - RNA, 20 nt, Artificial Sequence
  spacer sequence CTCN PAM
ggugauccaccuggcuuggc

SEQ ID NO: 11260 - RNA, 20 nt, Artificial Sequence
  spacer sequence CTCN PAM
ugaccucaggugauccaccu

SEQ ID NO: 11261 - RNA, 20 nt, Artificial Sequence
  spacer sequence CTCN PAM
acugaaaauacaaaaaacua

SEQ ID NO: 11262 - RNA, 20 nt, Artificial Sequence
  spacer sequence CTCN PAM
caaguagcugggauuacagg

SEQ ID NO: 11263 - RNA, 20 nt, Artificial Sequence
  spacer sequence CTCN PAM
gccucccaaguagcugggau

SEQ ID NO: 11264 - RNA, 20 nt, Artificial Sequence
  spacer sequence CTCN PAM
ugccucagccucccaaguag

SEQ ID NO: 11265 - RNA, 20 nt, Artificial Sequence
  spacer sequence CTCN PAM
uagguucaagcgauucuccu

SEQ ID NO: 11266 - RNA, 20 nt, Artificial Sequence
  spacer sequence CTCN PAM
gccuccuagguucaagcgau

SEQ ID NO: 11267 - RNA, 20 nt, Artificial Sequence
  spacer sequence CTCN PAM
cugcaaccucugccuccuag

SEQ ID NO: 11268 - RNA, 20 nt, Artificial Sequence
  spacer sequence CTCN PAM
agccugggcaacaagagcaa

SEQ ID NO: 11269 - RNA, 20 nt, Artificial Sequence
  spacer sequence CTCN PAM
uguugcccaggcuggagugc

SEQ ID NO: 11270 - RNA, 20 nt, Artificial Sequence
  spacer sequence CTCN PAM
gucuaaaaaaaaaaaaaaaa

SEQ ID NO: 11271 - RNA, 20 nt, Artificial Sequence
  spacer sequence CTCN PAM
gcuuggagaggccugaguac

SEQ ID NO: 11272 - RNA, 20 nt, Artificial Sequence
  spacer sequence CTCN PAM
aagcugaguuuuuuuuuuuu

SEQ ID NO: 11273 - RNA, 20 nt, Artificial Sequence
  spacer sequence CTCN PAM
ccaagcugaguuuuuuuuuu

SEQ ID NO: 11274 - RNA, 20 nt, Artificial Sequence
  spacer sequence CTCN PAM
ggccucuccaagcugaguuu

SEQ ID NO: 11275 - RNA, 20 nt, Artificial Sequence
  spacer sequence CTCN PAM
agauuuaaagaacucugccu

SEQ ID NO: 11276 - RNA, 20 nt, Artificial Sequence
  spacer sequence CTCN PAM
gccuuauucuccuaucugaa

SEQ ID NO: 11277 - RNA, 20 nt, Artificial Sequence
  spacer sequence CTCN PAM
uaucugaaagucccgaauuc

SEQ ID NO: 11278 - RNA, 20 nt, Artificial Sequence
  spacer sequence CTCN PAM
cagugaacucaaauccaacu

SEQ ID NO: 11279 - RNA, 20 nt, Artificial Sequence
  spacer sequence CTCN PAM
aauccaacuuacaucacuuu

SEQ ID NO: 11280 - RNA, 20 nt, Artificial Sequence
  spacer sequence CTCN PAM
agaagaauguguuuggcaac

SEQ ID NO: 11281 - RNA, 20 nt, Artificial Sequence
  spacer sequence CTCN PAM
uuccuuaauacaaggcauug

SEQ ID NO: 11282 - RNA, 20 nt, Artificial Sequence
  spacer sequence CTCN PAM
uuucuuuuugugacacaauu

SEQ ID NO: 11283 - RNA, 20 nt, Artificial Sequence
  spacer sequence CTCN PAM
ucauaaaaagaaaagcagac

SEQ ID NO: 11284 - RNA, 20 nt, Artificial Sequence
  spacer sequence CTCN PAM
aaagcacgucugcacaauuc

SEQ ID NO: 11285 - RNA, 20 nt, Artificial Sequence
  spacer sequence CTCN PAM
ggugccccugaagcgaaguu

SEQ ID NO: 11286 - RNA, 20 nt, Artificial Sequence
  spacer sequence CTCN PAM
ggcccucaggugccccugaa

SEQ ID NO: 11287 - RNA, 20 nt, Artificial Sequence
  spacer sequence CTCN PAM
uaauucauuacugugaauua

SEQ ID NO: 11288 - RNA, 20 nt, Artificial Sequence
  spacer sequence CTCN PAM
uaauucacaguaaugaauua

SEQ ID NO: 11289 - RNA, 20 nt, Artificial Sequence
  spacer sequence CTCN PAM
cuuugagaugugaccacacu

SEQ ID NO: 11290 - RNA, 20 nt, Artificial Sequence
  spacer sequence CTCN PAM
aagugagaugucaguaacua

SEQ ID NO: 11291 - RNA, 20 nt, Artificial Sequence
  spacer sequence CTCN PAM
ccugggucacagcacuuguu

SEQ ID NO: 11292 - RNA, 20 nt, Artificial Sequence
  spacer sequence CTCN PAM
aagaugucuaagauauucaa

SEQ ID NO: 11293 - RNA, 20 nt, Artificial Sequence
  spacer sequence CTCN PAM
cuaagaugucuaagauauuc

SEQ ID NO: 11294 - RNA, 20 nt, Artificial Sequence
  spacer sequence CTCN PAM
guuaaaugauugauuauuag

SEQ ID NO: 11295 - RNA, 20 nt, Artificial Sequence
  spacer sequence CTCN PAM
aggcucugcuauuauacuug

SEQ ID NO: 11296 - RNA, 20 nt, Artificial Sequence
  spacer sequence CTCN PAM
gcuauuauacuuguucuuua

SEQ ID NO: 11297 - RNA, 20 nt, Artificial Sequence
  spacer sequence CTCN PAM
cugguugucuaaagguucug

SEQ ID NO: 11298 - RNA, 20 nt, Artificial Sequence
  spacer sequence CTCN PAM
uauuucccuacauagauuca

SEQ ID NO: 11299 - RNA, 20 nt, Artificial Sequence
  spacer sequence CTCN PAM
ucuaaauacagaggcacaga

SEQ ID NO: 11300 - RNA, 20 nt, Artificial Sequence
  spacer sequence CTCN PAM
aaauacagaggcacagaauu

SEQ ID NO: 11301 - RNA, 20 nt, Artificial Sequence
  spacer sequence CTCN PAM
guauuuagaggaggaaucua

SEQ ID NO: 11302 - RNA, 20 nt, Artificial Sequence
  spacer sequence CTCN PAM
aaaauucugugccucuguau

SEQ ID NO: 11303 - RNA, 20 nt, Artificial Sequence
  spacer sequence CTCN PAM
guaagaagugugguuuuaau

SEQ ID NO: 11304 - RNA, 20 nt, Artificial Sequence
  spacer sequence CTCN PAM
uuuaaaagacaaaacacagu

SEQ ID NO: 11305 - RNA, 20 nt, Artificial Sequence
  spacer sequence CTCN PAM
auauguaaauacgauguuac

SEQ ID NO: 11306 - RNA, 20 nt, Artificial Sequence
  spacer sequence CTCN PAM
auauuuggugauuuagcaag

SEQ ID NO: 11307 - RNA, 20 nt, Artificial Sequence
  spacer sequence CTCN PAM
gaagacgacaaauccccuuc

SEQ ID NO: 11308 - RNA, 20 nt, Artificial Sequence
  spacer sequence CTCN PAM
ugcuucauuaaucaugccuu

SEQ ID NO: 11309 - RNA, 20 nt, Artificial Sequence
  spacer sequence CTCN PAM
ccuaccccccagcaggaugu

SEQ ID NO: 11310 - RNA, 20 nt, Artificial Sequence
  spacer sequence CTCN PAM
acaaaugcagcuucccuagc

SEQ ID NO: 11311 - RNA, 20 nt, Artificial Sequence
  spacer sequence CTCN PAM
gauacuuucccuuuagugaa

SEQ ID NO: 11312 - RNA, 20 nt, Artificial Sequence
  spacer sequence CTCN PAM
agaauuugaucauuaaaacc

SEQ ID NO: 11313 - RNA, 20 nt, Artificial Sequence
  spacer sequence CTCN PAM
cccucuagaauuugaucauu

SEQ ID NO: 11314 - RNA, 20 nt, Artificial Sequence
  spacer sequence CTCN PAM
cccccucuagaauuugauca

SEQ ID NO: 11315 - RNA, 20 nt, Artificial Sequence
  spacer sequence CTCN PAM
ucucccccucuagaauuuga

SEQ ID NO: 11316 - RNA, 20 nt, Artificial Sequence
  spacer sequence CTCN PAM
agaccacugaccuauuaugg

SEQ ID NO: 11317 - RNA, 20 nt, Artificial Sequence
  spacer sequence CTCN PAM
gaccuaguuugaccacaaag

SEQ ID NO: 11318 - RNA, 20 nt, Artificial Sequence
  spacer sequence CTCN PAM
ccgaccuaguuugaccacaa

SEQ ID NO: 11319 - RNA, 20 nt, Artificial Sequence
  spacer sequence CTCN PAM
ugccuuucgggagcugggug

SEQ ID NO: 11320 - RNA, 20 nt, Artificial Sequence
  spacer sequence CTCN PAM
cgaaaggcaagagguuuguu

SEQ ID NO: 11321 - RNA, 20 nt, Artificial Sequence
  spacer sequence CTCN PAM
agcaaaaaauguuuugaggg

SEQ ID NO: 11322 - RNA, 20 nt, Artificial Sequence
  spacer sequence CTCN PAM
aaacauuuuuugcuugagca

SEQ ID NO: 11323 - RNA, 20 nt, Artificial Sequence
  spacer sequence CTCN PAM
aagugauaaacaguaacacu

SEQ ID NO: 11324 - RNA, 20 nt, Artificial Sequence
  spacer sequence CTCN PAM
agggaaaaggaauuaaaggc

SEQ ID NO: 11325 - RNA, 20 nt, Artificial Sequence
  spacer sequence CTCN PAM
gcagcucaagggaaaaggaa

SEQ ID NO: 11326 - RNA, 20 nt, Artificial Sequence
  spacer sequence CTCN PAM
cugcuaaaauuaaccaaagg

SEQ ID NO: 11327 - RNA, 20 nt, Artificial Sequence
  spacer sequence CTCN PAM
uuugguuaauuuuagcaggg

SEQ ID NO: 11328 - RNA, 20 nt, Artificial Sequence
  spacer sequence CTCN PAM
cuccuuugguuaauuuuagc

SEQ ID NO: 11329 - RNA, 20 nt, Artificial Sequence
  spacer sequence CTCN PAM
acuguuucugcuauaacaca

SEQ ID NO: 11330 - RNA, 20 nt, Artificial Sequence
  spacer sequence CTCN PAM
gaugugguuuugacagaugu

SEQ ID NO: 11331 - RNA, 20 nt, Artificial Sequence
  spacer sequence CTCN PAM
ugucucugaugugguuuuga

SEQ ID NO: 11332 - RNA, 20 nt, Artificial Sequence
  spacer sequence CTCN PAM
cuugucucugaugugguuuu

SEQ ID NO: 11333 - RNA, 20 nt, Artificial Sequence
  spacer sequence CTCN PAM
cucuugucucugaugugguu

SEQ ID NO: 11334 - RNA, 20 nt, Artificial Sequence
  spacer sequence CTCN PAM
gugcucucucuugucucuga

SEQ ID NO: 11335 - RNA, 20 nt, Artificial Sequence
  spacer sequence CTCN PAM
gcuaaaugauaaaugcuucu

SEQ ID NO: 11336 - RNA, 20 nt, Artificial Sequence
  spacer sequence CTCN PAM
ucagcuaaaugauaaaugcu

SEQ ID NO: 11337 - RNA, 20 nt, Artificial Sequence
  spacer sequence CTCN PAM
cugcagccugccuccucagc

SEQ ID NO: 11338 - RNA, 20 nt, Artificial Sequence
  spacer sequence CTCN PAM
aaaaguuuaagggcauguug

SEQ ID NO: 11339 - RNA, 20 nt, Artificial Sequence
  spacer sequence CTCN PAM
cuacucuggccuggccaguc

SEQ ID NO: 11340 - RNA, 20 nt, Artificial Sequence
  spacer sequence CTCN PAM
acucuggccuggccagucga

SEQ ID NO: 11341 - RNA, 20 nt, Artificial Sequence
  spacer sequence CTCN PAM
ggccuggccagucgaaaaug

SEQ ID NO: 11342 - RNA, 20 nt, Artificial Sequence
  spacer sequence CTCN PAM
guuaacucuuuccaccaccu

SEQ ID NO: 11343 - RNA, 20 nt, Artificial Sequence
  spacer sequence CTCN PAM
uuccaccaccuccaacuacc

SEQ ID NO: 11344 - RNA, 20 nt, Artificial Sequence
  spacer sequence CTCN PAM
aacuacccugccagcccacu

SEQ ID NO: 11345 - RNA, 20 nt, Artificial Sequence
  spacer sequence CTCN PAM
acuucagggaagccuugaga

SEQ ID NO: 11346 - RNA, 20 nt, Artificial Sequence
  spacer sequence CTCN PAM
aggcuucccugaaguagagu

SEQ ID NO: 11347 - RNA, 20 nt, Artificial Sequence
  spacer sequence CTCN PAM
uucucaaggcuucccugaag

SEQ ID NO: 11348 - RNA, 20 nt, Artificial Sequence
  spacer sequence CTCN PAM
uuagggguucagcucguucu

SEQ ID NO: 11349 - RNA, 20 nt, Artificial Sequence
  spacer sequence CTCN PAM
gaacaucuggccaggccucc

SEQ ID NO: 11350 - RNA, 20 nt, Artificial Sequence
  spacer sequence CTCN PAM
gacacgucaccaaggcugga

SEQ ID NO: 11351 - RNA, 20 nt, Artificial Sequence
  spacer sequence CTCN PAM
auacuucaaaaugagaaggu

SEQ ID NO: 11352 - RNA, 20 nt, Artificial Sequence
  spacer sequence CTCN PAM
uuuugaaguauugagcuuua

SEQ ID NO: 11353 - RNA, 20 nt, Artificial Sequence
  spacer sequence CTCN PAM
ggaucugucgauuuuggauu

SEQ ID NO: 11354 - RNA, 20 nt, Artificial Sequence
  spacer sequence CTCN PAM
cuggaucugucgauuuugga

SEQ ID NO: 11355 - RNA, 20 nt, Artificial Sequence
  spacer sequence CTCN PAM
cugaaucagauguaggcagg

SEQ ID NO: 11356 - RNA, 20 nt, Artificial Sequence
  spacer sequence CTCN PAM
augugacuguccaugacagc

SEQ ID NO: 11357 - RNA, 20 nt, Artificial Sequence
  spacer sequence CTCN PAM
auuacucuaugugacugucc

SEQ ID NO: 11358 - RNA, 20 nt, Artificial Sequence
  spacer sequence CTCN PAM
uuacugcuuggcuacagcac

SEQ ID NO: 11359 - RNA, 20 nt, Artificial Sequence
  spacer sequence CTCN PAM
gaaaaugaaaagaaaacaug

SEQ ID NO: 11360 - RNA, 20 nt, Artificial Sequence
  spacer sequence CTCN PAM
uugcuucucauuuaccugcu

SEQ ID NO: 11361 - RNA, 20 nt, Artificial Sequence
  spacer sequence CTCN PAM
uuuaccugcuauguguuccu

SEQ ID NO: 11362 - RNA, 20 nt, Artificial Sequence
  spacer sequence CTCN PAM
agaugacguugauaaacaau

SEQ ID NO: 11363 - RNA, 20 nt, Artificial Sequence
  spacer sequence CTCN PAM
ggcgugaccuggaugccaac

SEQ ID NO: 11364 - RNA, 20 nt, Artificial Sequence
  spacer sequence CTCN PAM
acgggauuggaugcuuuuuu

SEQ ID NO: 11365 - RNA, 20 nt, Artificial Sequence
  spacer sequence CTCN PAM
auuggugaaggggaaggugg

SEQ ID NO: 11366 - RNA, 20 nt, Artificial Sequence
  spacer sequence CTCN PAM
gcuuagaaaaagcuguggau

SEQ ID NO: 11367 - RNA, 20 nt, Artificial Sequence
  spacer sequence CTCN PAM
auaaaaauaagaaugucccc

SEQ ID NO: 11368 - RNA, 20 nt, Artificial Sequence
  spacer sequence CTCN PAM
ccugugggcagugccagaug

SEQ ID NO: 11369 - RNA, 20 nt, Artificial Sequence
  spacer sequence CTCN PAM
ucaccugugggcagugccag

SEQ ID NO: 11370 - RNA, 20 nt, Artificial Sequence
  spacer sequence CTCN PAM
agaaggggaucaugaccucc

SEQ ID NO: 11371 - RNA, 20 nt, Artificial Sequence
  spacer sequence CTCN PAM
caacgggccguggucugguu

SEQ ID NO: 11372 - RNA, 20 nt, Artificial Sequence
  spacer sequence CTCN PAM
ugaagccauucuuacagaug

SEQ ID NO: 11373 - RNA, 20 nt, Artificial Sequence
  spacer sequence CTCN PAM
gcugugguuggagaaacaaa

SEQ ID NO: 11374 - RNA, 20 nt, Artificial Sequence
  spacer sequence CTCN PAM
aaccacagccgagccucuug

SEQ ID NO: 11375 - RNA, 20 nt, Artificial Sequence
  spacer sequence CTCN PAM
aauaauugugcuuuuguuuc

SEQ ID NO: 11376 - RNA, 20 nt, Artificial Sequence
  spacer sequence CTCN PAM
ggcacucuaauaauugugcu

SEQ ID NO: 11377 - RNA, 20 nt, Artificial Sequence
  spacer sequence CTCN PAM
cuggcacucuaauaauugug

SEQ ID NO: 11378 - RNA, 20 nt, Artificial Sequence
  spacer sequence CTCN PAM
ccuuucuguccucucuggca

SEQ ID NO: 11379 - RNA, 20 nt, Artificial Sequence
  spacer sequence CTCN PAM
accccaugccaucccaccac

SEQ ID NO: 11380 - RNA, 20 nt, Artificial Sequence
  spacer sequence CTCN PAM
auauaauacccagaaaaugu

SEQ ID NO: 11381 - RNA, 20 nt, Artificial Sequence
  spacer sequence CTCN PAM
cauuuucuggguauuauaua

SEQ ID NO: 11382 - RNA, 20 nt, Artificial Sequence
  spacer sequence CTCN PAM
gguugauaaccuucacaucc

SEQ ID NO: 11383 - RNA, 20 nt, Artificial Sequence
  spacer sequence CTCN PAM
cugguugauaaccuucacau

SEQ ID NO: 11384 - RNA, 20 nt, Artificial Sequence
  spacer sequence CTCN PAM
uugacaaauuugcucucugg

SEQ ID NO: 11385 - RNA, 20 nt, Artificial Sequence
  spacer sequence CTCN PAM
agagaacacacacacacaca

SEQ ID NO: 11386 - RNA, 20 nt, Artificial Sequence
  spacer sequence CTCN PAM
ggaguuaugcaaggaagacu

SEQ ID NO: 11387 - RNA, 20 nt, Artificial Sequence
  spacer sequence CTCN PAM
uuucauucuuuggcacaaug

SEQ ID NO: 11388 - RNA, 20 nt, Artificial Sequence
  spacer sequence CTCN PAM
ccuuucauucuuuggcacaa

SEQ ID NO: 11389 - RNA, 20 nt, Artificial Sequence
  spacer sequence CTCN PAM
uaaguaaacagacauggcuu

SEQ ID NO: 11390 - RNA, 20 nt, Artificial Sequence
  spacer sequence CTCN PAM
cacucucagcagugccacaa

SEQ ID NO: 11391 - RNA, 20 nt, Artificial Sequence
  spacer sequence CTCN PAM
cucucagcagugccacaaaa

SEQ ID NO: 11392 - RNA, 20 nt, Artificial Sequence
  spacer sequence CTCN PAM
cagcagugccacaaaaucaa

SEQ ID NO: 11393 - RNA, 20 nt, Artificial Sequence
  spacer sequence CTCN PAM
gcagugccacaaaaucaaag

SEQ ID NO: 11394 - RNA, 20 nt, Artificial Sequence
  spacer sequence CTCN PAM
gacacauuagcuaaauggga

SEQ ID NO: 11395 - RNA, 20 nt, Artificial Sequence
  spacer sequence CTCN PAM
aaaguaucccauuuagcuaa

SEQ ID NO: 11396 - RNA, 20 nt, Artificial Sequence
  spacer sequence CTCN PAM
gaauaaaaaaaaaaugacua

SEQ ID NO: 11397 - RNA, 20 nt, Artificial Sequence
  spacer sequence CTCN PAM
gaaaugugguguuugcuuga

SEQ ID NO: 11398 - RNA, 20 nt, Artificial Sequence
  spacer sequence CTCN PAM
gccuugcucugaaauguggu

SEQ ID NO: 11399 - RNA, 20 nt, Artificial Sequence
  spacer sequence CTCN PAM
uucagaaaauuaguccacuu

SEQ ID NO: 11400 - RNA, 20 nt, Artificial Sequence
  spacer sequence CTCN PAM
aaaaugcuucauuaugagac

SEQ ID NO: 11401 - RNA, 20 nt, Artificial Sequence
  spacer sequence CTCN PAM
uaaugaagcauuuuggagcu

SEQ ID NO: 11402 - RNA, 20 nt, Artificial Sequence
  spacer sequence CTCN PAM
agcaucuacuuuaccagcuu

SEQ ID NO: 11403 - RNA, 20 nt, Artificial Sequence
  spacer sequence CTCN PAM
uuuccccuuuggaagcuuaa

SEQ ID NO: 11404 - RNA, 20 nt, Artificial Sequence
  spacer sequence CTCN PAM
cuuuuccccuuuggaagcuu

SEQ ID NO: 11405 - RNA, 20 nt, Artificial Sequence
  spacer sequence CTCN PAM
gcuugugaaaucuuaugcuu

SEQ ID NO: 11406 - RNA, 20 nt, Artificial Sequence
  spacer sequence CTCN PAM
aucaaaaaaaaaaaaaaaau

SEQ ID NO: 11407 - RNA, 20 nt, Artificial Sequence
  spacer sequence CTCN PAM
guggcuuuaaguucauuaaa

SEQ ID NO: 11408 - RNA, 20 nt, Artificial Sequence
  spacer sequence CTCN PAM
aauuaaaaucuauuuuuuga

SEQ ID NO: 11409 - RNA, 20 nt, Artificial Sequence
  spacer sequence CTCN PAM
gguuaaauuuauuucaaccc

SEQ ID NO: 11410 - RNA, 20 nt, Artificial Sequence
  spacer sequence CTCN PAM
auauucagccuggguagggu

SEQ ID NO: 11411 - RNA, 20 nt, Artificial Sequence
  spacer sequence CTCN PAM
agaucuucccccucaauauu

SEQ ID NO: 11412 - RNA, 20 nt, Artificial Sequence
  spacer sequence CTCN PAM
cagaugugcuaggugaaaua

SEQ ID NO: 11413 - RNA, 20 nt, Artificial Sequence
  spacer sequence CTCN PAM
auauuauuucaccuagcaca

SEQ ID NO: 11414 - RNA, 20 nt, Artificial Sequence
  spacer sequence CTCN PAM
caauauuauuucaccuagca

SEQ ID NO: 11415 - RNA, 20 nt, Artificial Sequence
  spacer sequence CTCN PAM
cucaauauuauuucaccuag

SEQ ID NO: 11416 - RNA, 20 nt, Artificial Sequence
  spacer sequence CTCN PAM
aguaggacaucucauaauuu

SEQ ID NO: 11417 - RNA, 20 nt, Artificial Sequence
  spacer sequence CTCN PAM
uaauuucuagccucugguac

SEQ ID NO: 11418 - RNA, 20 nt, Artificial Sequence
  spacer sequence CTCN PAM
gguacuccuccuaauuuaac

SEQ ID NO: 11419 - RNA, 20 nt, Artificial Sequence
  spacer sequence CTCN PAM
uccuaauuuaacauaagguc

SEQ ID NO: 11420 - RNA, 20 nt, Artificial Sequence
  spacer sequence CTCN PAM
uaauuuaacauaaggucacc

SEQ ID NO: 11421 - RNA, 20 nt, Artificial Sequence
  spacer sequence CTCN PAM
gcauugugccuuaaugucau

SEQ ID NO: 11422 - RNA, 20 nt, Artificial Sequence
  spacer sequence CTCN PAM
uacauuugcuuccauuuuga

SEQ ID NO: 11423 - RNA, 20 nt, Artificial Sequence
  spacer sequence CTCN PAM
cuuggucaaaauggaagcaa

SEQ ID NO: 11424 - RNA, 20 nt, Artificial Sequence
  spacer sequence CTCN PAM
uucucaaaauauuccuguug

SEQ ID NO: 11425 - RNA, 20 nt, Artificial Sequence
  spacer sequence CTCN PAM
aaauauuccuguugucugaa

SEQ ID NO: 11426 - RNA, 20 nt, Artificial Sequence
  spacer sequence CTCN PAM
gaacuuguagcuaaugcuaa

SEQ ID NO: 11427 - RNA, 20 nt, Artificial Sequence
  spacer sequence CTCN PAM
uagguaucaaauaguuaaag

SEQ ID NO: 11428 - RNA, 20 nt, Artificial Sequence
  spacer sequence CTCN PAM
gaauuaccacuucauuuccc

SEQ ID NO: 11429 - RNA, 20 nt, Artificial Sequence
  spacer sequence CTCN PAM
acauuucaccuaauuaauuu

SEQ ID NO: 11430 - RNA, 20 nt, Artificial Sequence
  spacer sequence CTCN PAM
uauaaaauuaauuaggugaa

SEQ ID NO: 11431 - RNA, 20 nt, Artificial Sequence
  spacer sequence CTCN PAM
acauuuucuaugcucuuaac

SEQ ID NO: 11432 - RNA, 20 nt, Artificial Sequence
  spacer sequence CTCN PAM
uaacguaaauuauugcuaau

SEQ ID NO: 11433 - RNA, 20 nt, Artificial Sequence
  spacer sequence CTCN PAM
uugcaaaacauuuggcuagu

SEQ ID NO: 11434 - RNA, 20 nt, Artificial Sequence
  spacer sequence CTCN PAM
gaacaccacuagccaaaugu

SEQ ID NO: 11435 - RNA, 20 nt, Artificial Sequence
  spacer sequence CTCN PAM
ugguguagucuacugauuug

SEQ ID NO: 11436 - RNA, 20 nt, Artificial Sequence
  spacer sequence CTCN PAM
guggcaaucaacauuuccuu

SEQ ID NO: 11437 - RNA, 20 nt, Artificial Sequence
  spacer sequence CTCN PAM
gcauuuuaaugcaaauuccc

SEQ ID NO: 11438 - RNA, 20 nt, Artificial Sequence
  spacer sequence CTCN PAM
gccauuuacccccucccuca

SEQ ID NO: 11439 - RNA, 20 nt, Artificial Sequence
  spacer sequence CTCN PAM
cucaauucaacuccauccuc

SEQ ID NO: 11440 - RNA, 20 nt, Artificial Sequence
  spacer sequence CTCN PAM
auucaacuccauccuccuuc

SEQ ID NO: 11441 - RNA, 20 nt, Artificial Sequence
  spacer sequence CTCN PAM
auccuccuucgccccaacaa

SEQ ID NO: 11442 - RNA, 20 nt, Artificial Sequence
  spacer sequence CTCN PAM
uucgccccaacaauaccaac

SEQ ID NO: 11443 - RNA, 20 nt, Artificial Sequence
  spacer sequence CTCN PAM
ggccuaaacuccggcuacaa

SEQ ID NO: 11444 - RNA, 20 nt, Artificial Sequence
  spacer sequence CTCN PAM
ggcuacaaagcagggagucc

SEQ ID NO: 11445 - RNA, 20 nt, Artificial Sequence
  spacer sequence CTCN PAM
cugcuuuguagccggaguuu

SEQ ID NO: 11446 - RNA, 20 nt, Artificial Sequence
  spacer sequence CTCN PAM
auugaaguggaagggagugg

SEQ ID NO: 11447 - RNA, 20 nt, Artificial Sequence
  spacer sequence CTCN PAM
cuuccacuucaaucgaggac

SEQ ID NO: 11448 - RNA, 20 nt, Artificial Sequence
  spacer sequence CTCN PAM
cuacgaggggaggaagaaau

SEQ ID NO: 11449 - RNA, 20 nt, Artificial Sequence
  spacer sequence CTCN PAM
acgaggggaggaagaaauag

SEQ ID NO: 11450 - RNA, 20 nt, Artificial Sequence
  spacer sequence CTCN PAM
uagagagaauucgcggcuaa

SEQ ID NO: 11451 - RNA, 20 nt, Artificial Sequence
  spacer sequence CTCN PAM
ccucguagagagaauucgcg

SEQ ID NO: 11452 - RNA, 20 nt, Artificial Sequence
  spacer sequence CTCN PAM
augucucagugacagacuga

SEQ ID NO: 11453 - RNA, 20 nt, Artificial Sequence
  spacer sequence CTCN PAM
gugacagacugagaucucuu

SEQ ID NO: 11454 - RNA, 20 nt, Artificial Sequence
  spacer sequence CTCN PAM
gucugucacugagacauuga

SEQ ID NO: 11455 - RNA, 20 nt, Artificial Sequence
  spacer sequence CTCN PAM
uuccucucuguguaguugca

SEQ ID NO: 11456 - RNA, 20 nt, Artificial Sequence
  spacer sequence CTCN PAM
cuguguaguugcaaaagaau

SEQ ID NO: 11457 - RNA, 20 nt, Artificial Sequence
  spacer sequence CTCN PAM
guguaguugcaaaagaauaa

SEQ ID NO: 11458 - RNA, 20 nt, Artificial Sequence
  spacer sequence CTCN PAM
uuaccaacauuuccuauaag

SEQ ID NO: 11459 - RNA, 20 nt, Artificial Sequence
  spacer sequence CTCN PAM
cuccuuaccaacauuuccua

SEQ ID NO: 11460 - RNA, 20 nt, Artificial Sequence
  spacer sequence CTCN PAM
uuuugcucgcuccuuaccaa

SEQ ID NO: 11461 - RNA, 20 nt, Artificial Sequence
  spacer sequence CTCN PAM
cguuuugcucgcuccuuacc

SEQ ID NO: 11462 - RNA, 20 nt, Artificial Sequence
  spacer sequence CTCN PAM
ccggcagcucucguuuugcu

SEQ ID NO: 11463 - RNA, 20 nt, Artificial Sequence
  spacer sequence CTCN PAM
gcuccccggcagcucucguu

SEQ ID NO: 11464 - RNA, 20 nt, Artificial Sequence
  spacer sequence CTCN PAM
cccuccgcuccccggcagcu

SEQ ID NO: 11465 - RNA, 20 nt, Artificial Sequence
  spacer sequence CTCN PAM
cuuucccccucccccuccgc

SEQ ID NO: 11466 - RNA, 20 nt, Artificial Sequence
  spacer sequence CTCN PAM
uugauugucuuaacagggua

SEQ ID NO: 11467 - RNA, 20 nt, Artificial Sequence
  spacer sequence CTCN PAM
guuugcuucuuuacccuguu

SEQ ID NO: 11468 - RNA, 20 nt, Artificial Sequence
  spacer sequence CTCN PAM
gaauuucagccuccguuugc

SEQ ID NO: 11469 - RNA, 20 nt, Artificial Sequence
  spacer sequence CTCN PAM
cugaauuucagccuccguuu

SEQ ID NO: 11470 - RNA, 20 nt, Artificial Sequence
  spacer sequence CTCN PAM
gaggcacaaagcgagcagcg

SEQ ID NO: 11471 - RNA, 20 nt, Artificial Sequence
  spacer sequence CTCN PAM
gaguccccgcgcccaacuuc

SEQ ID NO: 11472 - RNA, 20 nt, Artificial Sequence
  spacer sequence CTCN PAM
cuuugugccucagagucccc

SEQ ID NO: 11473 - RNA, 20 nt, Artificial Sequence
  spacer sequence CTCN PAM
cgccgcgcuugcugcgaaca

SEQ ID NO: 11474 - RNA, 20 nt, Artificial Sequence
  spacer sequence CTCN PAM
gggcccccgggccccaaggc

SEQ ID NO: 11475 - RNA, 20 nt, Artificial Sequence
  spacer sequence CTCN PAM
gucuccgggcccccgggccc

SEQ ID NO: 11476 - RNA, 20 nt, Artificial Sequence
  spacer sequence CTCN PAM
augcccguccagcucggcca

SEQ ID NO: 11477 - RNA, 20 nt, Artificial Sequence
  spacer sequence CTCN PAM
gccagcucggccgcggggug

SEQ ID NO: 11478 - RNA, 20 nt, Artificial Sequence
  spacer sequence CTCN PAM
gccgcggggugacgguuccc

SEQ ID NO: 11479 - RNA, 20 nt, Artificial Sequence
  spacer sequence CTCN PAM
cuuccuuuuucaccaacugg

SEQ ID NO: 11480 - RNA, 20 nt, Artificial Sequence
  spacer sequence CTCN PAM
guaucuccgcacacaccuca

SEQ ID NO: 11481 - RNA, 20 nt, Artificial Sequence
  spacer sequence CTCN PAM
gcacacaccucaagcgcggg

SEQ ID NO: 11482 - RNA, 20 nt, Artificial Sequence
  spacer sequence CTCN PAM
agcgcggguccugagauuca

SEQ ID NO: 11483 - RNA, 20 nt, Artificial Sequence
  spacer sequence CTCN PAM
ggacccgcgcuugaggugug

SEQ ID NO: 11484 - RNA, 20 nt, Artificial Sequence
  spacer sequence CTCN PAM
gcaaaugcauuucccccgca

SEQ ID NO: 11485 - RNA, 20 nt, Artificial Sequence
  spacer sequence CTCN PAM
gaaucacaacaauaguaaua

SEQ ID NO: 11486 - RNA, 20 nt, Artificial Sequence
  spacer sequence CTCN PAM
gaggcgagaggggggguguc

SEQ ID NO: 11487 - RNA, 20 nt, Artificial Sequence
  spacer sequence CTCN PAM
gagcucggaaucacaacaau

SEQ ID NO: 11488 - RNA, 20 nt, Artificial Sequence
  spacer sequence CTCN PAM
ccucggagcucggaaucaca

SEQ ID NO: 11489 - RNA, 20 nt, Artificial Sequence
  spacer sequence CTCN PAM
cgccucggagcucggaauca

SEQ ID NO: 11490 - RNA, 20 nt, Artificial Sequence
  spacer sequence CTCN PAM
gcagcccgacacccccccuc

SEQ ID NO: 11491 - RNA, 20 nt, Artificial Sequence
  spacer sequence CTCN PAM
gcuggcuugcugggcggcuc

SEQ ID NO: 11492 - RNA, 20 nt, Artificial Sequence
  spacer sequence CTCN PAM
guggccucggcuggcuugcu

SEQ ID NO: 11493 - RNA, 20 nt, Artificial Sequence
  spacer sequence CTCN PAM
cccccaugcaaagcacagac

SEQ ID NO: 11494 - RNA, 20 nt, Artificial Sequence
  spacer sequence CTCN PAM
cuucuuccacccccucaccc

SEQ ID NO: 11495 - RNA, 20 nt, Artificial Sequence
  spacer sequence CTCN PAM
agccucacuucuuccacccc

SEQ ID NO: 11496 - RNA, 20 nt, Artificial Sequence
  spacer sequence CTCN PAM
ucggccaugccccgaagccc

SEQ ID NO: 11497 - RNA, 20 nt, Artificial Sequence
  spacer sequence CTCN PAM
agggcuucggggcauggccg

SEQ ID NO: 11498 - RNA, 20 nt, Artificial Sequence
  spacer sequence CTCN PAM
cgguuccucccuaccaaaaa

SEQ ID NO: 11499 - RNA, 20 nt, Artificial Sequence
  spacer sequence CTCN PAM
cuaccaaaaaugccggcccc

SEQ ID NO: 11500 - RNA, 20 nt, Artificial Sequence
  spacer sequence CTCN PAM
gagcccggcgcgcgcugguc

SEQ ID NO: 11501 - RNA, 20 nt, Artificial Sequence
  spacer sequence CTCN PAM
gagcacggugcaguuuucgc

SEQ ID NO: 11502 - RNA, 20 nt, Artificial Sequence
  spacer sequence CTCN PAM
gcucgcgcacgggggugucg

SEQ ID NO: 11503 - RNA, 20 nt, Artificial Sequence
  spacer sequence CTCN PAM
cgcacgggggugucggccgc

SEQ ID NO: 11504 - RNA, 20 nt, Artificial Sequence
  spacer sequence CTCN PAM
gcggccccggccagaagcau

SEQ ID NO: 11505 - RNA, 20 nt, Artificial Sequence
  spacer sequence CTCN PAM
cccaucaccccguaugucuu

SEQ ID NO: 11506 - RNA, 20 nt, Artificial Sequence
  spacer sequence CTCN PAM
cccccaucaccccguauguc

SEQ ID NO: 11507 - RNA, 20 nt, Artificial Sequence
  spacer sequence CTCN PAM
caaagcucguuccuccccgg

SEQ ID NO: 11508 - RNA, 20 nt, Artificial Sequence
  spacer sequence CTCN PAM
uuccuccccggacgagaauc

SEQ ID NO: 11509 - RNA, 20 nt, Artificial Sequence
  spacer sequence CTCN PAM
ccggacgagaaucgccgggc

SEQ ID NO: 11510 - RNA, 20 nt, Artificial Sequence
  spacer sequence CTCN PAM
uccggggaggaacgagcuuu

SEQ ID NO: 11511 - RNA, 20 nt, Artificial Sequence
  spacer sequence CTCN PAM
ugcccggcgauucucguccg

SEQ ID NO: 11512 - RNA, 20 nt, Artificial Sequence
  spacer sequence CTCN PAM
cccaccuccugcccggcgau

SEQ ID NO: 11513 - RNA, 20 nt, Artificial Sequence
  spacer sequence CTCN PAM
gguacagguucaaguucgcu

SEQ ID NO: 11514 - RNA, 20 nt, Artificial Sequence
  spacer sequence CTCN PAM
gcgaacuugaaccuguacca

SEQ ID NO: 11515 - RNA, 20 nt, Artificial Sequence
  spacer sequence CTCN PAM
uagcgaccgaauggcucauu

SEQ ID NO: 11516 - RNA, 20 nt, Artificial Sequence
  spacer sequence CTCN PAM
uucagcccacauagcagagg

SEQ ID NO: 11517 - RNA, 20 nt, Artificial Sequence
  spacer sequence CTCN PAM
gcuaugugggcugaaugagc

SEQ ID NO: 11518 - RNA, 20 nt, Artificial Sequence
  spacer sequence CTCN PAM
guaccacccccccgcccccc

SEQ ID NO: 11519 - RNA, 20 nt, Artificial Sequence
  spacer sequence CTCN PAM
ugcccccucugagcacccag

SEQ ID NO: 11520 - RNA, 20 nt, Artificial Sequence
  spacer sequence CTCN PAM
gagcacccagaaaaugagga

SEQ ID NO: 11521 - RNA, 20 nt, Artificial Sequence
  spacer sequence CTCN PAM
gagggggcaggagccauccc

SEQ ID NO: 11522 - RNA, 20 nt, Artificial Sequence
  spacer sequence CTCN PAM
uuuucugggugcucagaggg

SEQ ID NO: 11523 - RNA, 20 nt, Artificial Sequence
  spacer sequence CTCN PAM
cccccucccaaacuggcccu

SEQ ID NO: 11524 - RNA, 20 nt, Artificial Sequence
  spacer sequence CTCN PAM
caaacuggcccuuuaacccc

SEQ ID NO: 11525 - RNA, 20 nt, Artificial Sequence
  spacer sequence CTCN PAM
ugucccgggguuaaagggcc

SEQ ID NO: 11526 - RNA, 20 nt, Artificial Sequence
  spacer sequence CTCN PAM
uccugucccgggguuaaagg

SEQ ID NO: 11527 - RNA, 20 nt, Artificial Sequence
  spacer sequence CTCN PAM
cagccuagagugucccaaga

SEQ ID NO: 11528 - RNA, 20 nt, Artificial Sequence
  spacer sequence CTCN PAM
aggcugggaggguuaguacc

SEQ ID NO: 11529 - RNA, 20 nt, Artificial Sequence
  spacer sequence CTCN PAM
uggguccaucuugggacacu

SEQ ID NO: 11530 - RNA, 20 nt, Artificial Sequence
  spacer sequence CTCN PAM
cuccuggguccaucuuggga

SEQ ID NO: 11531 - RNA, 20 nt, Artificial Sequence
  spacer sequence CTCN PAM
cccuccuggguccaucuugg

SEQ ID NO: 11532 - RNA, 20 nt, Artificial Sequence
  spacer sequence CTCN PAM
uaccccucucccuccugggu

SEQ ID NO: 11533 - RNA, 20 nt, Artificial Sequence
  spacer sequence CTCN PAM
cucguaccccucucccuccu

SEQ ID NO: 11534 - RNA, 20 nt, Artificial Sequence
  spacer sequence CTCN PAM
aaggacagaccggggcgcgc

SEQ ID NO: 11535 - RNA, 20 nt, Artificial Sequence
  spacer sequence CTCN PAM
ggaaagucaggcccuucuuc

SEQ ID NO: 11536 - RNA, 20 nt, Artificial Sequence
  spacer sequence CTCN PAM
cccggccgcgccggaugcgg

SEQ ID NO: 11537 - RNA, 20 nt, Artificial Sequence
  spacer sequence CTCN PAM
cccgcccccaacucccccgg

SEQ ID NO: 11538 - RNA, 20 nt, Artificial Sequence
  spacer sequence CTCN PAM
cccccgcccccaacuccccc

SEQ ID NO: 11539 - RNA, 20 nt, Artificial Sequence
  spacer sequence CTCN PAM
ccgcucucccccgcccccaa

SEQ ID NO: 11540 - RNA, 20 nt, Artificial Sequence
  spacer sequence CTCN PAM
cucgccgcucucccccgccc

SEQ ID NO: 11541 - RNA, 20 nt, Artificial Sequence
  spacer sequence CTCN PAM
caucccucccucgccgcucu

SEQ ID NO: 11542 - RNA, 20 nt, Artificial Sequence
  spacer sequence CTCN PAM
ccacccccucgcaucccucc

SEQ ID NO: 11543 - RNA, 20 nt, Artificial Sequence
  spacer sequence CTCN PAM
ccccacccccucgcaucccu

SEQ ID NO: 11544 - RNA, 20 nt, Artificial Sequence
  spacer sequence CTCN PAM
cucuccccacccccucgcau

SEQ ID NO: 11545 - RNA, 20 nt, Artificial Sequence
  spacer sequence CTCN PAM
cccaccccggcacguugcgc

SEQ ID NO: 11546 - RNA, 20 nt, Artificial Sequence
  spacer sequence CTCN PAM
auuuaugauucuuacuuuaa

SEQ ID NO: 11547 - RNA, 20 nt, Artificial Sequence
  spacer sequence CTCN PAM
cgccuuucuuucccuugcug

SEQ ID NO: 11548 - RNA, 20 nt, Artificial Sequence
  spacer sequence CTCN PAM
cgcugacugcgccuggaaag

SEQ ID NO: 11549 - RNA, 20 nt, Artificial Sequence
  spacer sequence CTCN PAM
uauacagacucacaagaacc

SEQ ID NO: 11550 - RNA, 20 nt, Artificial Sequence
  spacer sequence CTCN PAM
caagaaccucagaccaagcc

SEQ ID NO: 11551 - RNA, 20 nt, Artificial Sequence
  spacer sequence CTCN PAM
gaccaagccaggccugggga

SEQ ID NO: 11552 - RNA, 20 nt, Artificial Sequence
  spacer sequence CTCN PAM
uccccaggccuggcuugguc

SEQ ID NO: 11553 - RNA, 20 nt, Artificial Sequence
  spacer sequence CTCN PAM
gggucccaggauccagcgcc

SEQ ID NO: 11554 - RNA, 20 nt, Artificial Sequence
  spacer sequence CTCN PAM
aacacacuucuccccugccc

SEQ ID NO: 11555 - RNA, 20 nt, Artificial Sequence
  spacer sequence CTCN PAM
ccugcccuuccccggcaacc

SEQ ID NO: 11556 - RNA, 20 nt, Artificial Sequence
  spacer sequence CTCN PAM
gggcgcagggggacugguga

SEQ ID NO: 11557 - RNA, 20 nt, Artificial Sequence
  spacer sequence CTCN PAM
ucgcggucccgagcugugga

SEQ ID NO: 11558 - RNA, 20 nt, Artificial Sequence
  spacer sequence CTCN PAM
cggucccgagcuguggacaa

SEQ ID NO: 11559 - RNA, 20 nt, Artificial Sequence
  spacer sequence CTCN PAM
ggaccgcgaggaggucacca

SEQ ID NO: 11560 - RNA, 20 nt, Artificial Sequence
  spacer sequence CTCN PAM
uguccacagcucgggaccgc

SEQ ID NO: 11561 - RNA, 20 nt, Artificial Sequence
  spacer sequence CTCN PAM
gacgucucuuguccacagcu

SEQ ID NO: 11562 - RNA, 20 nt, Artificial Sequence
  spacer sequence CTCN PAM
gcccuggguacuuucucaga

SEQ ID NO: 11563 - RNA, 20 nt, Artificial Sequence
  spacer sequence CTCN PAM
ccuccgcccuggguacuuuc

SEQ ID NO: 11564 - RNA, 20 nt, Artificial Sequence
  spacer sequence CTCN PAM
ccuccccuccgcccugggua

SEQ ID NO: 11565 - RNA, 20 nt, Artificial Sequence
  spacer sequence CTCN PAM
gcuuugcaaagcauuuuuau

SEQ ID NO: 11566 - RNA, 20 nt, Artificial Sequence
  spacer sequence CTCN PAM
cagacugcgaaaucggcugg

SEQ ID NO: 11567 - RNA, 20 nt, Artificial Sequence
  spacer sequence CTCN PAM
accucccagacugcgaaauc

SEQ ID NO: 11568 - RNA, 20 nt, Artificial Sequence
  spacer sequence CTCN PAM
ucucgaccucccagacugcg

SEQ ID NO: 11569 - RNA, 20 nt, Artificial Sequence
  spacer sequence CTCN PAM
gcauugugcugggggcggac

SEQ ID NO: 11570 - RNA, 20 nt, Artificial Sequence
  spacer sequence CTCN PAM
gcgccagccuggcccguggu

SEQ ID NO: 11571 - RNA, 20 nt, Artificial Sequence
  spacer sequence CTCN PAM
ccgcgccccagcccagcccc

SEQ ID NO: 11572 - RNA, 20 nt, Artificial Sequence
  spacer sequence CTCN PAM
cccgggccuugcccgaccuc

SEQ ID NO: 11573 - RNA, 20 nt, Artificial Sequence
  spacer sequence CTCN PAM
ggggcugccgcgccgcgcuc

SEQ ID NO: 11574 - RNA, 20 nt, Artificial Sequence
  spacer sequence CTCN PAM
guccucugucuguuuguugg

SEQ ID NO: 11575 - RNA, 20 nt, Artificial Sequence
  spacer sequence CTCN PAM
gucuguuuguuggcaggagg

SEQ ID NO: 11576 - RNA, 20 nt, Artificial Sequence
  spacer sequence CTCN PAM
ugccaacaaacagacagagg

SEQ ID NO: 11577 - RNA, 20 nt, Artificial Sequence
  spacer sequence CTCN PAM
cgcacacgcggugcuuguaa

SEQ ID NO: 11578 - RNA, 20 nt, Artificial Sequence
  spacer sequence CTCN PAM
ugucugaauguuuacaagca

SEQ ID NO: 11579 - RNA, 20 nt, Artificial Sequence
  spacer sequence CTCN PAM
uacuauuuuuuggaagauuu

SEQ ID NO: 11580 - RNA, 20 nt, Artificial Sequence
  spacer sequence CTCN PAM
ucuuacuauuuuuuggaaga

SEQ ID NO: 11581 - RNA, 20 nt, Artificial Sequence
  spacer sequence CTCN PAM
cuccucuuacuauuuuuugg

SEQ ID NO: 11582 - RNA, 20 nt, Artificial Sequence
  spacer sequence CTCN PAM
cucccucuccgugccgucgg

SEQ ID NO: 11583 - RNA, 20 nt, Artificial Sequence
  spacer sequence CTCN PAM
cccucuccgugccgucggcg

SEQ ID NO: 11584 - RNA, 20 nt, Artificial Sequence
  spacer sequence CTCN PAM
cucuccgugccgucggcgcc

SEQ ID NO: 11585 - RNA, 20 nt, Artificial Sequence
  spacer sequence CTCN PAM
ccgugccgucggcgcccuaa

SEQ ID NO: 11586 - RNA, 20 nt, Artificial Sequence
  spacer sequence CTCN PAM
gugccgucggcgcccuaagu

SEQ ID NO: 11587 - RNA, 20 nt, Artificial Sequence
  spacer sequence CTCN PAM
ucccccaaaccccuucaguu

SEQ ID NO: 11588 - RNA, 20 nt, Artificial Sequence
  spacer sequence CTCN PAM
ucuagaaaaaaauuuacaau

SEQ ID NO: 11589 - RNA, 20 nt, Artificial Sequence
  spacer sequence CTCN PAM
caucuagaaaaaaauuuaca

SEQ ID NO: 11590 - RNA, 20 nt, Artificial Sequence
  spacer sequence CTCN PAM
caaucucucaucuagaaaaa

SEQ ID NO: 11591 - RNA, 20 nt, Artificial Sequence
  spacer sequence CTCN PAM
cccaccagccccccugcaaa

SEQ ID NO: 11592 - RNA, 20 nt, Artificial Sequence
  spacer sequence CTCN PAM
uugacucccccaccagcccc

SEQ ID NO: 11593 - RNA, 20 nt, Artificial Sequence
  spacer sequence CTCN PAM
gccaacccuuuucugugacg

SEQ ID NO: 11594 - RNA, 20 nt, Artificial Sequence
  spacer sequence CTCN PAM
ugccuuguuuuauuuauuuu

SEQ ID NO: 11595 - RNA, 20 nt, Artificial Sequence
  spacer sequence CTCN PAM
uugcugccucugagguucgg

SEQ ID NO: 11596 - RNA, 20 nt, Artificial Sequence
  spacer sequence CTCN PAM
gagguucggucgggagggga

SEQ ID NO: 11597 - RNA, 20 nt, Artificial Sequence
  spacer sequence CTCN PAM
gaggcagcaaggagaagacu

SEQ ID NO: 11598 - RNA, 20 nt, Artificial Sequence
  spacer sequence CTCN PAM
cgaccgaaccucagaggcag

SEQ ID NO: 11599 - RNA, 20 nt, Artificial Sequence
  spacer sequence CTCN PAM
ccucccgaccgaaccucaga

SEQ ID NO: 11600 - RNA, 20 nt, Artificial Sequence
  spacer sequence CTCN PAM
uggguugccgcugcccuccc

SEQ ID NO: 11601 - RNA, 20 nt, Artificial Sequence
  spacer sequence CTCN PAM
cucccucccucucccgcgug

SEQ ID NO: 11602 - RNA, 20 nt, Artificial Sequence
  spacer sequence CTCN PAM
cucccucucccgcgugcccc

SEQ ID NO: 11603 - RNA, 20 nt, Artificial Sequence
  spacer sequence CTCN PAM
cucucccgcgugcccccggc

SEQ ID NO: 11604 - RNA, 20 nt, Artificial Sequence
  spacer sequence CTCN PAM
cccgcgugcccccggccgcc

SEQ ID NO: 11605 - RNA, 20 nt, Artificial Sequence
  spacer sequence CTCN PAM
cgcgugcccccggccgccuc

SEQ ID NO: 11606 - RNA, 20 nt, Artificial Sequence
  spacer sequence CTCN PAM
ucccccggcccuagcuccug

SEQ ID NO: 11607 - RNA, 20 nt, Artificial Sequence
  spacer sequence CTCN PAM
cccggcccuagcuccugccc

SEQ ID NO: 11608 - RNA, 20 nt, Artificial Sequence
  spacer sequence CTCN PAM
ugcccuucggcggcggcggc

SEQ ID NO: 11609 - RNA, 20 nt, Artificial Sequence
  spacer sequence CTCN PAM
cgcgccgccgccgccgccgc

SEQ ID NO: 11610 - RNA, 20 nt, Artificial Sequence
  spacer sequence CTCN PAM
cgcuugcccucccgcgccgc

SEQ ID NO: 11611 - RNA, 20 nt, Artificial Sequence
  spacer sequence CTCN PAM
ucgcgcuugcccucccgcgc

SEQ ID NO: 11612 - RNA, 20 nt, Artificial Sequence
  spacer sequence CTCN PAM
ggccggaacaaaaggcggca

SEQ ID NO: 11613 - RNA, 20 nt, Artificial Sequence
  spacer sequence CTCN PAM
cguccuucccggucccacgg

SEQ ID NO: 11614 - RNA, 20 nt, Artificial Sequence
  spacer sequence CTCN PAM
ccccgucgccgcggccccuc

SEQ ID NO: 11615 - RNA, 20 nt, Artificial Sequence
  spacer sequence CTCN PAM
ccgucgccgcggccccucuc

SEQ ID NO: 11616 - RNA, 20 nt, Artificial Sequence
  spacer sequence CTCN PAM
cccgacuccgcggacucagg

SEQ ID NO: 11617 - RNA, 20 nt, Artificial Sequence
  spacer sequence CTCN PAM
cgacuccgcggacucaggag

SEQ ID NO: 11618 - RNA, 20 nt, Artificial Sequence
  spacer sequence CTCN PAM
gcggacucaggagcgccggg

SEQ ID NO: 11619 - RNA, 20 nt, Artificial Sequence
  spacer sequence CTCN PAM
ggagcgccgggggccccuuu

SEQ ID NO: 11620 - RNA, 20 nt, Artificial Sequence
  spacer sequence CTCN PAM
ugaguccgcggagucgggag

SEQ ID NO: 11621 - RNA, 20 nt, Artificial Sequence
  spacer sequence CTCN PAM
cuauuguggggaugacuacu

SEQ ID NO: 11622 - RNA, 20 nt, Artificial Sequence
  spacer sequence CTCN PAM
cgcugcacacuugaccguga

SEQ ID NO: 11623 - RNA, 20 nt, Artificial Sequence
  spacer sequence CTCN PAM
cggucaagugugcagcggga

SEQ ID NO: 11624 - RNA, 20 nt, Artificial Sequence
  spacer sequence CTCN PAM
ccucuuuucuccccgggaau

SEQ ID NO: 11625 - RNA, 20 nt, Artificial Sequence
  spacer sequence CTCN PAM
uuucuccccgggaaucguuu

SEQ ID NO: 11626 - RNA, 20 nt, Artificial Sequence
  spacer sequence CTCN PAM
ccgggaaucguuuuuuagac

SEQ ID NO: 11627 - RNA, 20 nt, Artificial Sequence
  spacer sequence CTCN PAM
cucccucccuacccccccau

SEQ ID NO: 11628 - RNA, 20 nt, Artificial Sequence
  spacer sequence CTCN PAM
cucccuacccccccauuuuc

SEQ ID NO: 11629 - RNA, 20 nt, Artificial Sequence
  spacer sequence CTCN PAM
cuacccccccauuuucuuac

SEQ ID NO: 11630 - RNA, 20 nt, Artificial Sequence
  spacer sequence CTCN PAM
ccguaagaaaaugggggggu

SEQ ID NO: 11631 - RNA, 20 nt, Artificial Sequence
  spacer sequence CTCN PAM
cuuuccccaccagcucccac

SEQ ID NO: 11632 - RNA, 20 nt, Artificial Sequence
  spacer sequence CTCN PAM
cacccccagguuugcaugug

SEQ ID NO: 11633 - RNA, 20 nt, Artificial Sequence
  spacer sequence CTCN PAM
caugcaaaccuggggguggg

SEQ ID NO: 11634 - RNA, 20 nt, Artificial Sequence
  spacer sequence CTCN PAM
ccccccgccccgccaguuuu

SEQ ID NO: 11635 - RNA, 20 nt, Artificial Sequence
  spacer sequence CTCN PAM
uuucgaaaaggaaugcaaug

SEQ ID NO: 11636 - RNA, 20 nt, Artificial Sequence
  spacer sequence CTCN PAM
uuuccgccgcuuuauuucuc

SEQ ID NO: 11637 - RNA, 20 nt, Artificial Sequence
  spacer sequence CTCN PAM
uuccuccuuuccgccgcuuu

SEQ ID NO: 11638 - RNA, 20 nt, Artificial Sequence
  spacer sequence CTCN PAM
ucuuuccuccuuuccgccgc

SEQ ID NO: 11639 - RNA, 20 nt, Artificial Sequence
  spacer sequence CTCN PAM
uccucuuuccuccuuuccgc

SEQ ID NO: 11640 - RNA, 20 nt, Artificial Sequence
  spacer sequence CTCN PAM
aaagugcauacacggcaaug

SEQ ID NO: 11641 - RNA, 20 nt, Artificial Sequence
  spacer sequence CTCN PAM
ucccaucuggaaccauugcc

SEQ ID NO: 11642 - RNA, 20 nt, Artificial Sequence
  spacer sequence CTCN PAM
uuuaccucgacucucggagg

SEQ ID NO: 11643 - RNA, 20 nt, Artificial Sequence
  spacer sequence CTCN PAM
acucucggagguuuuucucg

SEQ ID NO: 11644 - RNA, 20 nt, Artificial Sequence
  spacer sequence CTCN PAM
cggagguuuuucucgugaaa

SEQ ID NO: 11645 - RNA, 20 nt, Artificial Sequence
  spacer sequence CTCN PAM
gagguuuuucucgugaaaaa

SEQ ID NO: 11646 - RNA, 20 nt, Artificial Sequence
  spacer sequence CTCN PAM
gagagucgagguaaaagaga

SEQ ID NO: 11647 - RNA, 20 nt, Artificial Sequence
  spacer sequence CTCN PAM
ugaaaaauuuaaaaaugcau

SEQ ID NO: 11648 - RNA, 20 nt, Artificial Sequence
  spacer sequence CTCN PAM
cucccccucgcuuuugcuuc

SEQ ID NO: 11649 - RNA, 20 nt, Artificial Sequence
  spacer sequence CTCN PAM
cccccucgcuuuugcuucua

SEQ ID NO: 11650 - RNA, 20 nt, Artificial Sequence
  spacer sequence CTCN PAM
cccucgcuuuugcuucuagu

SEQ ID NO: 11651 - RNA, 20 nt, Artificial Sequence
  spacer sequence CTCN PAM
cuuuugcuucuaguccugcg

SEQ ID NO: 11652 - RNA, 20 nt, Artificial Sequence
  spacer sequence CTCN PAM
cgugauuauuaauaauuauu

SEQ ID NO: 11653 - RNA, 20 nt, Artificial Sequence
  spacer sequence CTCN PAM
ugauuauuaauaauuauuau

SEQ ID NO: 11654 - RNA, 20 nt, Artificial Sequence
  spacer sequence CTCN PAM
cguaaguaacccaauaauag

SEQ ID NO: 11655 - RNA, 20 nt, Artificial Sequence
  spacer sequence CTCN PAM
ccgcaagcaaggcaaacccc

SEQ ID NO: 11656 - RNA, 20 nt, Artificial Sequence
  spacer sequence CTCN PAM
guucacaucgggagagccgg

SEQ ID NO: 11657 - RNA, 20 nt, Artificial Sequence
  spacer sequence CTCN PAM
cgaugugaaccgagccgucg

SEQ ID NO: 11658 - RNA, 20 nt, Artificial Sequence
  spacer sequence CTCN PAM
cccgaugugaaccgagccgu

SEQ ID NO: 11659 - RNA, 20 nt, Artificial Sequence
  spacer sequence CTCN PAM
uucuuucuaacccggcucuc

SEQ ID NO: 11660 - RNA, 20 nt, Artificial Sequence
  spacer sequence CTCN PAM
agagaaaauaucuucaucag

SEQ ID NO: 11661 - RNA, 20 nt, Artificial Sequence
  spacer sequence CTCN PAM
ggagucuccuucuuucuaac

SEQ ID NO: 11662 - RNA, 20 nt, Artificial Sequence
  spacer sequence CTCN PAM
cacaauucaucuucccugcg

SEQ ID NO: 11663 - RNA, 20 nt, Artificial Sequence
  spacer sequence CTCN PAM
cccacaauucaucuucccug

SEQ ID NO: 11664 - RNA, 20 nt, Artificial Sequence
  spacer sequence CTCN PAM
uuuuuuuuuuuuuuuuuuuu

SEQ ID NO: 11665 - RNA, 20 nt, Artificial Sequence
  spacer sequence CTCN PAM
cucuuuuuuuuuuuuuuuuu

SEQ ID NO: 11666 - RNA, 20 nt, Artificial Sequence
  spacer sequence CTCN PAM
cccucuuuuuuuuuuuuuuu

SEQ ID NO: 11667 - RNA, 20 nt, Artificial Sequence
  spacer sequence CTCN PAM
cucccucuuuuuuuuuuuuu

SEQ ID NO: 11668 - RNA, 20 nt, Artificial Sequence
  spacer sequence CTCN PAM
cucucccucuuuuuuuuuuu

SEQ ID NO: 11669 - RNA, 20 nt, Artificial Sequence
  spacer sequence CTCN PAM
cucucucccucuuuuuuuuu

SEQ ID NO: 11670 - RNA, 20 nt, Artificial Sequence
  spacer sequence CTCN PAM
ucucucucucucccucuuuu

SEQ ID NO: 11671 - RNA, 20 nt, Artificial Sequence
  spacer sequence CTCN PAM
cuucucucucucucccucuu

SEQ ID NO: 11672 - RNA, 20 nt, Artificial Sequence
  spacer sequence CTCN PAM
aucucucuucucucucucuc

SEQ ID NO: 11673 - RNA, 20 nt, Artificial Sequence
  spacer sequence CTCN PAM
cucuaucucucuucucucuc

SEQ ID NO: 11674 - RNA, 20 nt, Artificial Sequence
  spacer sequence CTCN PAM
cccucuaucucucuucucuc

SEQ ID NO: 11675 - RNA, 20 nt, Artificial Sequence
  spacer sequence CTCN PAM
cucccucuaucucucuucuc

SEQ ID NO: 11676 - RNA, 20 nt, Artificial Sequence
  spacer sequence CTCN PAM
cucucccucuaucucucuuc

SEQ ID NO: 11677 - RNA, 20 nt, Artificial Sequence
  spacer sequence CTCN PAM
cucucucccucuaucucucu

SEQ ID NO: 11678 - RNA, 20 nt, Artificial Sequence
  spacer sequence CTCN PAM
cucucucucccucuaucucu

SEQ ID NO: 11679 - RNA, 20 nt, Artificial Sequence
  spacer sequence CTCN PAM
cucucucucucccucuaucu

SEQ ID NO: 11680 - RNA, 20 nt, Artificial Sequence
  spacer sequence CTCN PAM
cucucucucucucccucuau

SEQ ID NO: 11681 - RNA, 20 nt, Artificial Sequence
  spacer sequence CTCN PAM
ggggggcuuuugccauuuuu

SEQ ID NO: 11682 - RNA, 20 nt, Artificial Sequence
  spacer sequence CTCN PAM
ugacguucaaguucgcaggg

SEQ ID NO: 11683 - RNA, 20 nt, Artificial Sequence
  spacer sequence CTCN PAM
guccauccagacuccugacg

SEQ ID NO: 11684 - RNA, 20 nt, Artificial Sequence
  spacer sequence CTCN PAM
cccugcccauguuuugugug

SEQ ID NO: 11685 - RNA, 20 nt, Artificial Sequence
  spacer sequence CTCN PAM
ugcucgcccugcccauguuu

SEQ ID NO: 11686 - RNA, 20 nt, Artificial Sequence
  spacer sequence CTCN PAM
ccugcucgcccugcccaugu

SEQ ID NO: 11687 - RNA, 20 nt, Artificial Sequence
  spacer sequence CTCN PAM
ccuucucuccugcucgcccu

SEQ ID NO: 11688 - RNA, 20 nt, Artificial Sequence
  spacer sequence CTCN PAM
uccccuucucuccugcucgc

SEQ ID NO: 11689 - RNA, 20 nt, Artificial Sequence
  spacer sequence CTCN PAM
caccaauggacacacaucag

SEQ ID NO: 11690 - RNA, 20 nt, Artificial Sequence
  spacer sequence CTCN PAM
uuuucauguccagccccuga

SEQ ID NO: 11691 - RNA, 20 nt, Artificial Sequence
  spacer sequence CTCN PAM
ccgcacuggccauuggcuug

SEQ ID NO: 11692 - RNA, 20 nt, Artificial Sequence
  spacer sequence CTCN PAM
cccuccccgcacuggccauu

SEQ ID NO: 11693 - RNA, 20 nt, Artificial Sequence
  spacer sequence CTCN PAM
gcggacgccagacgcggccc

SEQ ID NO: 11694 - RNA, 20 nt, Artificial Sequence
  spacer sequence CTCN PAM
cccgggggccgcgucuggcg

SEQ ID NO: 11695 - RNA, 20 nt, Artificial Sequence
  spacer sequence CTCN PAM
gcccgccccucccccggggg

SEQ ID NO: 11696 - RNA, 20 nt, Artificial Sequence
  spacer sequence CTCN PAM
ccucggcccgccccuccccc

SEQ ID NO: 11697 - RNA, 20 nt, Artificial Sequence
  spacer sequence CTCN PAM
ccaguggccgcagcgagcgc

SEQ ID NO: 11698 - RNA, 20 nt, Artificial Sequence
  spacer sequence CTCN PAM
cugcggccacuggugagccc

SEQ ID NO: 11699 - RNA, 20 nt, Artificial Sequence
  spacer sequence CTCN PAM
cggccacgccaccgccgcgg

SEQ ID NO: 11700 - RNA, 20 nt, Artificial Sequence
  spacer sequence CTCN PAM
cccggccacgccaccgccgc

SEQ ID NO: 11701 - RNA, 20 nt, Artificial Sequence
  spacer sequence CTCN PAM
caccccugccaccccuuucu

SEQ ID NO: 11702 - RNA, 20 nt, Artificial Sequence
  spacer sequence CTCN PAM
cccccacccuuuccucccac

SEQ ID NO: 11703 - RNA, 20 nt, Artificial Sequence
  spacer sequence CTCN PAM
cccccacacacgcggacucu

SEQ ID NO: 11704 - RNA, 20 nt, Artificial Sequence
  spacer sequence CTCN PAM
aaaaugaaagauuauucaaa

SEQ ID NO: 11705 - RNA, 20 nt, Artificial Sequence
  spacer sequence CTCN PAM
auuuuuuucuuuuuugaaua

SEQ ID NO: 11706 - RNA, 20 nt, Artificial Sequence
  spacer sequence CTCN PAM
cucuauuuuuuucuuuuuug

SEQ ID NO: 11707 - RNA, 20 nt, Artificial Sequence
  spacer sequence CTCN PAM
cgcucuauuuuuuucuuuuu

SEQ ID NO: 11708 - RNA, 20 nt, Artificial Sequence
  spacer sequence CTCN PAM
cggugcacucucgcucuauu

SEQ ID NO: 11709 - RNA, 20 nt, Artificial Sequence
  spacer sequence CTCN PAM
gcccgcgcuuccccagcccg

SEQ ID NO: 11710 - RNA, 20 nt, Artificial Sequence
  spacer sequence CTCN PAM
accuggcuucccuccgcccg

SEQ ID NO: 11711 - RNA, 20 nt, Artificial Sequence
  spacer sequence CTCN PAM
cggacacccuccuccguacg

SEQ ID NO: 11712 - RNA, 20 nt, Artificial Sequence
  spacer sequence CTCN PAM
uccguacgcacacccacuuc

SEQ ID NO: 11713 - RNA, 20 nt, Artificial Sequence
  spacer sequence CTCN PAM
guacgcacacccacuucccc

SEQ ID NO: 11714 - RNA, 20 nt, Artificial Sequence
  spacer sequence CTCN PAM
ccgccgccgccgcgcucgcu

SEQ ID NO: 11715 - RNA, 20 nt, Artificial Sequence
  spacer sequence CTCN PAM
cuccccgcguguggacgcca

SEQ ID NO: 11716 - RNA, 20 nt, Artificial Sequence
  spacer sequence CTCN PAM
ccgcguguggacgccagggg

SEQ ID NO: 11717 - RNA, 20 nt, Artificial Sequence
  spacer sequence CTCN PAM
gggcuuuuacuucggccccu

SEQ ID NO: 11718 - RNA, 20 nt, Artificial Sequence
  spacer sequence CTCN PAM
ggaaacuuugcccgaggaga

SEQ ID NO: 11719 - RNA, 20 nt, Artificial Sequence
  spacer sequence CTCN PAM
ggcaaaguuucccgagcgca

SEQ ID NO: 11720 - RNA, 20 nt, Artificial Sequence
  spacer sequence CTCN PAM
ucgggcaaaguuucccgagc

SEQ ID NO: 11721 - RNA, 20 nt, Artificial Sequence
  spacer sequence CTCN PAM
ccucgggcaaaguuucccga

SEQ ID NO: 11722 - RNA, 20 nt, Artificial Sequence
  spacer sequence CTCN PAM
acuucgggugauuuuucuuu

SEQ ID NO: 11723 - RNA, 20 nt, Artificial Sequence
  spacer sequence CTCN PAM
caacuucgggugauuuuucu

SEQ ID NO: 11724 - RNA, 20 nt, Artificial Sequence
  spacer sequence CTCN PAM
gcucucaacuucgggugauu

SEQ ID NO: 11725 - RNA, 20 nt, Artificial Sequence
  spacer sequence CTCN PAM
aaguuacagcuccgcagcgg

SEQ ID NO: 11726 - RNA, 20 nt, Artificial Sequence
  spacer sequence CTCN PAM
gcagcgggcgaggggaggug

SEQ ID NO: 11727 - RNA, 20 nt, Artificial Sequence
  spacer sequence CTCN PAM
cccgcugcggagcuguaacu

SEQ ID NO: 11728 - RNA, 20 nt, Artificial Sequence
  spacer sequence CTCN PAM
ccucgcccgcugcggagcug

SEQ ID NO: 11729 - RNA, 20 nt, Artificial Sequence
  spacer sequence CTCN PAM
caccuccccucgcccgcugc

SEQ ID NO: 11730 - RNA, 20 nt, Artificial Sequence
  spacer sequence CTCN PAM
cucccaccuccccucgcccg

SEQ ID NO: 11731 - RNA, 20 nt, Artificial Sequence
  spacer sequence CTCN PAM
aaacuuaggcuggauuccgc

SEQ ID NO: 11732 - RNA, 20 nt, Artificial Sequence
  spacer sequence CTCN PAM
aggagcccgcgcggccugga

SEQ ID NO: 11733 - RNA, 20 nt, Artificial Sequence
  spacer sequence CTCN PAM
uggagacuugggcgcugccc

SEQ ID NO: 11734 - RNA, 20 nt, Artificial Sequence
  spacer sequence CTCN PAM
uuccaggccgcgcgggcucc

SEQ ID NO: 11735 - RNA, 20 nt, Artificial Sequence
  spacer sequence CTCN PAM
ccgguccccucuuuccaggc

SEQ ID NO: 11736 - RNA, 20 nt, Artificial Sequence
  spacer sequence CTCN PAM
ccccgguccccucuuuccag

SEQ ID NO: 11737 - RNA, 20 nt, Artificial Sequence
  spacer sequence CTCN PAM
ggccccggccugcgccgccu

SEQ ID NO: 11738 - RNA, 20 nt, Artificial Sequence
  spacer sequence CTCN PAM
gccuugggggcgcccucggg

SEQ ID NO: 11739 - RNA, 20 nt, Artificial Sequence
  spacer sequence CTCN PAM
gauucccggucccuggcucg

SEQ ID NO: 11740 - RNA, 20 nt, Artificial Sequence
  spacer sequence CTCN PAM
gcgcuuucaguugcauucag

SEQ ID NO: 11741 - RNA, 20 nt, Artificial Sequence
  spacer sequence CTCN PAM
uaagggucgcagaaagagag

SEQ ID NO: 11742 - RNA, 20 nt, Artificial Sequence
  spacer sequence CTCN PAM
uucugcgacccuuaggagcc

SEQ ID NO: 11743 - RNA, 20 nt, Artificial Sequence
  spacer sequence CTCN PAM
cuuucugcgacccuuaggag

SEQ ID NO: 11744 - RNA, 20 nt, Artificial Sequence
  spacer sequence CTCN PAM
ggcucucuuucugcgacccu

SEQ ID NO: 11745 - RNA, 20 nt, Artificial Sequence
  spacer sequence CTCN PAM
uucuuuauuccucgggcucu

SEQ ID NO: 11746 - RNA, 20 nt, Artificial Sequence
  spacer sequence CTCN PAM
ucguucuuuauuccucgggc

SEQ ID NO: 11747 - RNA, 20 nt, Artificial Sequence
  spacer sequence CTCN PAM
ggcuccucguucuuuauucc

SEQ ID NO: 11748 - RNA, 20 nt, Artificial Sequence
  spacer sequence CTCN PAM
gggggccagacucuggcucc

SEQ ID NO: 11749 - RNA, 20 nt, Artificial Sequence
  spacer sequence CTCN PAM
ccuccgggggccagacucug

SEQ ID NO: 11750 - RNA, 20 nt, Artificial Sequence
  spacer sequence CTCN PAM
ugcccaggcccccggcgcuc

SEQ ID NO: 11751 - RNA, 20 nt, Artificial Sequence
  spacer sequence CTCN PAM
cuugcccaggcccccggcgc

SEQ ID NO: 11752 - RNA, 20 nt, Artificial Sequence
  spacer sequence CTCN PAM
gugccucucuugcccaggcc

SEQ ID NO: 11753 - RNA, 20 nt, Artificial Sequence
  spacer sequence CTCN PAM
cugagaggccgaggacaaag

SEQ ID NO: 11754 - RNA, 20 nt, Artificial Sequence
  spacer sequence CTCN PAM
gagaggccgaggacaaagcg

SEQ ID NO: 11755 - RNA, 20 nt, Artificial Sequence
  spacer sequence CTCN PAM
gagagguggacgccucggug

SEQ ID NO: 11756 - RNA, 20 nt, Artificial Sequence
  spacer sequence CTCN PAM
cagagagguggacgccucgg

SEQ ID NO: 11757 - RNA, 20 nt, Artificial Sequence
  spacer sequence CTCN PAM
gccucucagagagguggacg

SEQ ID NO: 11758 - RNA, 20 nt, Artificial Sequence
  spacer sequence CTCN PAM
cgggacugcccgcgcuuugu

SEQ ID NO: 11759 - RNA, 20 nt, Artificial Sequence
  spacer sequence CTCN PAM
cggcgccgcgggaggucccc

SEQ ID NO: 11760 - RNA, 20 nt, Artificial Sequence
  spacer sequence CTCN PAM
cgcggcgccgugagcacauu

SEQ ID NO: 11761 - RNA, 20 nt, Artificial Sequence
  spacer sequence CTCN PAM
gggaccucccgcggcgccgu

SEQ ID NO: 11762 - RNA, 20 nt, Artificial Sequence
  spacer sequence CTCN PAM
cagggacccggcucggggac

SEQ ID NO: 11763 - RNA, 20 nt, Artificial Sequence
  spacer sequence CTCN PAM
cacuccagagcaacugcaaa

SEQ ID NO: 11764 - RNA, 20 nt, Artificial Sequence
  spacer sequence CTCN PAM
agagcaacugcaaaagcaca

SEQ ID NO: 11765 - RNA, 20 nt, Artificial Sequence
  spacer sequence CTCN PAM
ggagugggaggggguguguc

SEQ ID NO: 11766 - RNA, 20 nt, Artificial Sequence
  spacer sequence CTCN PAM
gugcuuuugcaguugcucug

SEQ ID NO: 11767 - RNA, 20 nt, Artificial Sequence
  spacer sequence CTCN PAM
gcccguaagaaacauuuucu

SEQ ID NO: 11768 - RNA, 20 nt, Artificial Sequence
  spacer sequence CTCN PAM
uucccuggguaacagcacag

SEQ ID NO: 11769 - RNA, 20 nt, Artificial Sequence
  spacer sequence CTCN PAM
auucccauuuucucuuuccc

SEQ ID NO: 11770 - RNA, 20 nt, Artificial Sequence
  spacer sequence CTCN PAM
ccauucccauuuucucuuuc

SEQ ID NO: 11771 - RNA, 20 nt, Artificial Sequence
  spacer sequence CTCN PAM
cuccauucccauuuucucuu

SEQ ID NO: 11772 - RNA, 20 nt, Artificial Sequence
  spacer sequence CTCN PAM
cucuccauucccauuuucuc

SEQ ID NO: 11773 - RNA, 20 nt, Artificial Sequence
  spacer sequence CTCN PAM
caggagcagcggggagacca

SEQ ID NO: 11774 - RNA, 20 nt, Artificial Sequence
  spacer sequence CTCN PAM
ugcgagccugucgcucucuc

SEQ ID NO: 11775 - RNA, 20 nt, Artificial Sequence
  spacer sequence CTCN PAM
ccgcugcuccugcgagccug

SEQ ID NO: 11776 - RNA, 20 nt, Artificial Sequence
  spacer sequence CTCN PAM
ccaccguggucuccccgcug

SEQ ID NO: 11777 - RNA, 20 nt, Artificial Sequence
  spacer sequence CTCN PAM
ggucaccgccgcgcucccca

SEQ ID NO: 11778 - RNA, 20 nt, Artificial Sequence
  spacer sequence CTCN PAM
ccaggcgccgccggccaagg

SEQ ID NO: 11779 - RNA, 20 nt, Artificial Sequence
  spacer sequence CTCN PAM
ugggugugcgccuuggccgg

SEQ ID NO: 11780 - RNA, 20 nt, Artificial Sequence
  spacer sequence CTCN PAM
cgccuuucugcagacguucc

SEQ ID NO: 11781 - RNA, 20 nt, Artificial Sequence
  spacer sequence CTCN PAM
ccuuucugcagacguucccu

SEQ ID NO: 11782 - RNA, 20 nt, Artificial Sequence
  spacer sequence CTCN PAM
uuaaugcacacacgcacaca

SEQ ID NO: 11783 - RNA, 20 nt, Artificial Sequence
  spacer sequence CTCN PAM
ggcgugggauacuuucaguu

SEQ ID NO: 11784 - RNA, 20 nt, Artificial Sequence
  spacer sequence CTCN PAM
cgccucccagccucccugcc

SEQ ID NO: 11785 - RNA, 20 nt, Artificial Sequence
  spacer sequence CTCN PAM
cagccucccugccugccagc

SEQ ID NO: 11786 - RNA, 20 nt, Artificial Sequence
  spacer sequence CTCN PAM
cugccugccagcaccacucu

SEQ ID NO: 11787 - RNA, 20 nt, Artificial Sequence
  spacer sequence CTCN PAM
gcagccgccgccgccgccgc

SEQ ID NO: 11788 - RNA, 20 nt, Artificial Sequence
  spacer sequence CTCN PAM
ccggcggcggcggcggcggc

SEQ ID NO: 11789 - RNA, 20 nt, Artificial Sequence
  spacer sequence CTCN PAM
uuccagauuuggaaucggac

SEQ ID NO: 11790 - RNA, 20 nt, Artificial Sequence
  spacer sequence CTCN PAM
ccccaacuccuuccagauuu

SEQ ID NO: 11791 - RNA, 20 nt, Artificial Sequence
  spacer sequence CTCN PAM
ccccccaacuccuuccagau

SEQ ID NO: 11792 - RNA, 20 nt, Artificial Sequence
  spacer sequence CTCN PAM
ucuccccccaacuccuucca

SEQ ID NO: 11793 - RNA, 20 nt, Artificial Sequence
  spacer sequence CTCN PAM
gguccaagggaggugcggag

SEQ ID NO: 11794 - RNA, 20 nt, Artificial Sequence
  spacer sequence CTCN PAM
cuuggaccugaguccauucu

SEQ ID NO: 11795 - RNA, 20 nt, Artificial Sequence
  spacer sequence CTCN PAM
gcaccucccuuggaccugag

SEQ ID NO: 11796 - RNA, 20 nt, Artificial Sequence
  spacer sequence CTCN PAM
acccugcacccuccgcaccu

SEQ ID NO: 11797 - RNA, 20 nt, Artificial Sequence
  spacer sequence CTCN PAM
cgggccauggcgacccgucu

SEQ ID NO: 11798 - RNA, 20 nt, Artificial Sequence
  spacer sequence CTCN PAM
gggucucgcgggccauggcg

SEQ ID NO: 11799 - RNA, 20 nt, Artificial Sequence
  spacer sequence CTCN PAM
cacauauccaccugcagcuc

SEQ ID NO: 11800 - RNA, 20 nt, Artificial Sequence
  spacer sequence CTCN PAM
gcagacacacucacacauau

SEQ ID NO: 11801 - RNA, 20 nt, Artificial Sequence
  spacer sequence CTCN PAM
cucugcagacacacucacac

SEQ ID NO: 11802 - RNA, 20 nt, Artificial Sequence
  spacer sequence CTCN PAM
ucgcucugcagacacacuca

SEQ ID NO: 11803 - RNA, 20 nt, Artificial Sequence
  spacer sequence CTCN PAM
uucccucuccucggagcggu

SEQ ID NO: 11804 - RNA, 20 nt, Artificial Sequence
  spacer sequence CTCN PAM
ccucggagcgguuccacaac

SEQ ID NO: 11805 - RNA, 20 nt, Artificial Sequence
  spacer sequence CTCN PAM
ucggagcgguuccacaaccc

SEQ ID NO: 11806 - RNA, 20 nt, Artificial Sequence
  spacer sequence CTCN PAM
gagcgguuccacaacccccg

SEQ ID NO: 11807 - RNA, 20 nt, Artificial Sequence
  spacer sequence CTCN PAM
gaggagagggaaggagggcu

SEQ ID NO: 11808 - RNA, 20 nt, Artificial Sequence
  spacer sequence CTCN PAM
ucccccucuucagucuaaag

SEQ ID NO: 11809 - RNA, 20 nt, Artificial Sequence
  spacer sequence CTCN PAM
ucagucuaaagggugucgcu

SEQ ID NO: 11810 - RNA, 20 nt, Artificial Sequence
  spacer sequence CTCN PAM
cccacccggugggggggcuu

SEQ ID NO: 11811 - RNA, 20 nt, Artificial Sequence
  spacer sequence CTCN PAM
cuuaaaacaauaaagccccc

SEQ ID NO: 11812 - RNA, 20 nt, Artificial Sequence
  spacer sequence CTCN PAM
cccaucccgcagcccugccg

SEQ ID NO: 11813 - RNA, 20 nt, Artificial Sequence
  spacer sequence CTCN PAM
gcggagcuucggaccccucu

SEQ ID NO: 11814 - RNA, 20 nt, Artificial Sequence
  spacer sequence CTCN PAM
gccgagcuaggcaagccagu

SEQ ID NO: 11815 - RNA, 20 nt, Artificial Sequence
  spacer sequence CTCN PAM
aaggaagaaaaggagguuuu

SEQ ID NO: 11816 - RNA, 20 nt, Artificial Sequence
  spacer sequence CTCN PAM
uuuucuuccuuagagggguc

SEQ ID NO: 11817 - RNA, 20 nt, Artificial Sequence
  spacer sequence CTCN PAM
acauugagagagaugugggc

SEQ ID NO: 11818 - RNA, 20 nt, Artificial Sequence
  spacer sequence CTCN PAM
auguugagcaucaaaaccuc

SEQ ID NO: 11819 - RNA, 20 nt, Artificial Sequence
  spacer sequence CTCN PAM
caauguugagcaucaaaacc

SEQ ID NO: 11820 - RNA, 20 nt, Artificial Sequence
  spacer sequence CTCN PAM
cucaauguugagcaucaaaa

SEQ ID NO: 11821 - RNA, 20 nt, Artificial Sequence
  spacer sequence CTCN PAM
aguuugugggagggagaccu

SEQ ID NO: 11822 - RNA, 20 nt, Artificial Sequence
  spacer sequence CTCN PAM
cacaaacuggagggaaacaa

SEQ ID NO: 11823 - RNA, 20 nt, Artificial Sequence
  spacer sequence CTCN PAM
cucccacaaacuggagggaa

SEQ ID NO: 11824 - RNA, 20 nt, Artificial Sequence
  spacer sequence CTCN PAM
aauucuguuuaagaagcggg

SEQ ID NO: 11825 - RNA, 20 nt, Artificial Sequence
  spacer sequence CTCN PAM
cgcuucuuaaacagaauuug

SEQ ID NO: 11826 - RNA, 20 nt, Artificial Sequence
  spacer sequence CTCN PAM
guagcuugugugugacacca

SEQ ID NO: 11827 - RNA, 20 nt, Artificial Sequence
  spacer sequence CTCN PAM
gugaaaaggggaaauggugu

SEQ ID NO: 11828 - RNA, 20 nt, Artificial Sequence
  spacer sequence CTCN PAM
gaagaacucagugaaaaggg

SEQ ID NO: 11829 - RNA, 20 nt, Artificial Sequence
  spacer sequence CTCN PAM
auuccaccacagucugcuuu

SEQ ID NO: 11830 - RNA, 20 nt, Artificial Sequence
  spacer sequence CTCN PAM
aaggcugguuuaacaagaca

SEQ ID NO: 11831 - RNA, 20 nt, Artificial Sequence
  spacer sequence CTCN PAM
cccgccaccccccaagaaga

SEQ ID NO: 11832 - RNA, 20 nt, Artificial Sequence
  spacer sequence CTCN PAM
aaccgucccccacgucgucc

SEQ ID NO: 11833 - RNA, 20 nt, Artificial Sequence
  spacer sequence CTCN PAM
ucaccuucccuccaaccguc

SEQ ID NO: 11834 - RNA, 20 nt, Artificial Sequence
  spacer sequence CTCN PAM
cuucaccuucccuccaaccg

SEQ ID NO: 11835 - RNA, 20 nt, Artificial Sequence
  spacer sequence CTCN PAM
caguugcacuuucuucuucc

SEQ ID NO: 11836 - RNA, 20 nt, Artificial Sequence
  spacer sequence CTCN PAM
cuauuguuaccugaaggggc

SEQ ID NO: 11837 - RNA, 20 nt, Artificial Sequence
  spacer sequence CTCN PAM
auagauggacuuuuauggac

SEQ ID NO: 11838 - RNA, 20 nt, Artificial Sequence
  spacer sequence CTCN PAM
uuuauauaucuucucuauag

SEQ ID NO: 11839 - RNA, 20 nt, Artificial Sequence
  spacer sequence CTCN PAM
cucauuuauauaucuucucu

SEQ ID NO: 11840 - RNA, 20 nt, Artificial Sequence
  spacer sequence CTCN PAM
cucgcucauuuauauaucuu

SEQ ID NO: 11841 - RNA, 20 nt, Artificial Sequence
  spacer sequence CTCN PAM
gaaagguucugugguucaca

SEQ ID NO: 11842 - RNA, 20 nt, Artificial Sequence
  spacer sequence CTCN PAM
gacgauggcacccuaucagg

SEQ ID NO: 11843 - RNA, 20 nt, Artificial Sequence
  spacer sequence CTCN PAM
uuuggcacccagggaaagca

SEQ ID NO: 11844 - RNA, 20 nt, Artificial Sequence
  spacer sequence CTCN PAM
ccuuuggcacccagggaaag

SEQ ID NO: 11845 - RNA, 20 nt, Artificial Sequence
  spacer sequence CTCN PAM
gcucccgccccucccccagc

SEQ ID NO: 11846 - RNA, 20 nt, Artificial Sequence
  spacer sequence CTCN PAM
cgccccucccccagccagau

SEQ ID NO: 11847 - RNA, 20 nt, Artificial Sequence
  spacer sequence CTCN PAM
cccagccagauuucacccag

SEQ ID NO: 11848 - RNA, 20 nt, Artificial Sequence
  spacer sequence CTCN PAM
uggucgucgaccccccuccc

SEQ ID NO: 11849 - RNA, 20 nt, Artificial Sequence
  spacer sequence CTCN PAM
ccggccccuggugcccuccc

SEQ ID NO: 11850 - RNA, 20 nt, Artificial Sequence
  spacer sequence CTCN PAM
ccuagggcgacaaccccucc

SEQ ID NO: 11851 - RNA, 20 nt, Artificial Sequence
  spacer sequence CTCN PAM
cucagcacugcuggaugcuc

SEQ ID NO: 11852 - RNA, 20 nt, Artificial Sequence
  spacer sequence CTCN PAM
gcacugcuggaugcucgcua

SEQ ID NO: 11853 - RNA, 20 nt, Artificial Sequence
  spacer sequence CTCN PAM
cuaaagagcccgaaaguggg

SEQ ID NO: 11854 - RNA, 20 nt, Artificial Sequence
  spacer sequence CTCN PAM
uuagcgagcauccagcagug

SEQ ID NO: 11855 - RNA, 20 nt, Artificial Sequence
  spacer sequence CTCN PAM
cccacuuucgggcucuuuag

SEQ ID NO: 11856 - RNA, 20 nt, Artificial Sequence
  spacer sequence CTCN PAM
ccucccccacuuucgggcuc

SEQ ID NO: 11857 - RNA, 20 nt, Artificial Sequence
  spacer sequence CTCN PAM
uaaaacgacacaucuuucuu

SEQ ID NO: 11858 - RNA, 20 nt, Artificial Sequence
  spacer sequence CTCN PAM
acaaaaccaccugcaucauu

SEQ ID NO: 11859 - RNA, 20 nt, Artificial Sequence
  spacer sequence CTCN PAM
acagccccaaacgaaguuaa

SEQ ID NO: 11860 - RNA, 20 nt, Artificial Sequence
  spacer sequence CTCN PAM
cauugaaaggguaauuacgu

SEQ ID NO: 11861 - RNA, 20 nt, Artificial Sequence
  spacer sequence CTCN PAM
uucccaaaccuuuggugacg

SEQ ID NO: 11862 - RNA, 20 nt, Artificial Sequence
  spacer sequence CTCN PAM
aggccagcagacgaccccuc

SEQ ID NO: 11863 - RNA, 20 nt, Artificial Sequence
  spacer sequence CTCN PAM
ccuucccuccucccccuuuu

SEQ ID NO: 11864 - RNA, 20 nt, Artificial Sequence
  spacer sequence CTCN PAM
ucccccuuuuuaucuugccc

SEQ ID NO: 11865 - RNA, 20 nt, Artificial Sequence
  spacer sequence CTCN PAM
cccuuuuuaucuugcccgcg

SEQ ID NO: 11866 - RNA, 20 nt, Artificial Sequence
  spacer sequence CTCN PAM
gcgggcaagauaaaaagggg

SEQ ID NO: 11867 - RNA, 20 nt, Artificial Sequence
  spacer sequence CTCN PAM
uccgcgggcaagauaaaaag

SEQ ID NO: 11868 - RNA, 20 nt, Artificial Sequence
  spacer sequence CTCN PAM
gaucuccguacuuaauagcc

SEQ ID NO: 11869 - RNA, 20 nt, Artificial Sequence
  spacer sequence CTCN PAM
guacuuaauagccaaguccu

SEQ ID NO: 11870 - RNA, 20 nt, Artificial Sequence
  spacer sequence CTCN PAM
aaaaauacgguggguuucua

SEQ ID NO: 11871 - RNA, 20 nt, Artificial Sequence
  spacer sequence CTCN PAM
acucuaaaaauacggugggu

SEQ ID NO: 11872 - RNA, 20 nt, Artificial Sequence
  spacer sequence CTCN PAM
cugcauuaggguauagaucu

SEQ ID NO: 11873 - RNA, 20 nt, Artificial Sequence
  spacer sequence CTCN PAM
cacugcauuaggguauagau

SEQ ID NO: 11874 - RNA, 20 nt, Artificial Sequence
  spacer sequence CTCN PAM
cucacugcauuaggguauag

SEQ ID NO: 11875 - RNA, 20 nt, Artificial Sequence
  spacer sequence CTCN PAM
uacuucauaccgaaaacuac

SEQ ID NO: 11876 - RNA, 20 nt, Artificial Sequence
  spacer sequence CTCN PAM
agacguaaccuuuuagaaaa

SEQ ID NO: 11877 - RNA, 20 nt, Artificial Sequence
  spacer sequence CTCN PAM
agggcucugaacgugaaugu

SEQ ID NO: 11878 - RNA, 20 nt, Artificial Sequence
  spacer sequence CTCN PAM
gaacgugaauguggucaaca

SEQ ID NO: 11879 - RNA, 20 nt, Artificial Sequence
  spacer sequence CTCN PAM
aagagggagacuuaauacag

SEQ ID NO: 11880 - RNA, 20 nt, Artificial Sequence
  spacer sequence CTCN PAM
ucgagcuguuuguugaccac

SEQ ID NO: 11881 - RNA, 20 nt, Artificial Sequence
  spacer sequence CTCN PAM
cucuucgagcuguuuguuga

SEQ ID NO: 11882 - RNA, 20 nt, Artificial Sequence
  spacer sequence CTCN PAM
gaccgaggaucgccuggcgc

SEQ ID NO: 11883 - RNA, 20 nt, Artificial Sequence
  spacer sequence CTCN PAM
guccgagggcugggacugua

SEQ ID NO: 11884 - RNA, 20 nt, Artificial Sequence
  spacer sequence CTCN PAM
cgccaggcgauccucggucc

SEQ ID NO: 11885 - RNA, 20 nt, Artificial Sequence
  spacer sequence CTCN PAM
ggcugagcuggaagaugaag

SEQ ID NO: 11886 - RNA, 20 nt, Artificial Sequence
  spacer sequence CTCN PAM
gcccgaguuccucgcgccag

SEQ ID NO: 11887 - RNA, 20 nt, Artificial Sequence
  spacer sequence CTCN PAM
aagauaaauaagugaaugac

SEQ ID NO: 11888 - RNA, 20 nt, Artificial Sequence
  spacer sequence CTCN PAM
auuuugugaccugccaauua

SEQ ID NO: 11889 - RNA, 20 nt, Artificial Sequence
  spacer sequence CTCN PAM
augauggaagugcuaggcug

SEQ ID NO: 11890 - RNA, 20 nt, Artificial Sequence
  spacer sequence CTCN PAM
caccuguaaucccagcacuu

SEQ ID NO: 11891 - RNA, 20 nt, Artificial Sequence
  spacer sequence CTCN PAM
gcuucccaaagugcugggau

SEQ ID NO: 11892 - RNA, 20 nt, Artificial Sequence
  spacer sequence CTCN PAM
caccucggcuucccaaagug

SEQ ID NO: 11893 - RNA, 20 nt, Artificial Sequence
  spacer sequence CTCN PAM
agugauccucccaccucggc

SEQ ID NO: 11894 - RNA, 20 nt, Artificial Sequence
  spacer sequence CTCN PAM
ugaccucaagugauccuccc

SEQ ID NO: 11895 - RNA, 20 nt, Artificial Sequence
  spacer sequence CTCN PAM
acuaaaaauacaaaaaauug

SEQ ID NO: 11896 - RNA, 20 nt, Artificial Sequence
  spacer sequence CTCN PAM
gcaauuuuuuguauuuuuag

SEQ ID NO: 11897 - RNA, 20 nt, Artificial Sequence
  spacer sequence CTCN PAM
caaguaggugggacuacaag

SEQ ID NO: 11898 - RNA, 20 nt, Artificial Sequence
  spacer sequence CTCN PAM
gccucccaaguaggugggac

SEQ ID NO: 11899 - RNA, 20 nt, Artificial Sequence
  spacer sequence CTCN PAM
gucccccagguucaagcgau

SEQ ID NO: 11900 - RNA, 20 nt, Artificial Sequence
  spacer sequence CTCN PAM
cugcaaccucugucccccag

SEQ ID NO: 11901 - RNA, 20 nt, Artificial Sequence
  spacer sequence CTCN PAM
agcccgggcaacagccuguc

SEQ ID NO: 11902 - RNA, 20 nt, Artificial Sequence
  spacer sequence CTCN PAM
aaaaaauaauaauaaaaaug

SEQ ID NO: 11903 - RNA, 20 nt, Artificial Sequence
  spacer sequence CTCN PAM
cuaacauuuuuauuauuauu

SEQ ID NO: 11904 - RNA, 20 nt, Artificial Sequence
  spacer sequence CTCN PAM
uccacaagcaacucccuaac

SEQ ID NO: 11905 - RNA, 20 nt, Artificial Sequence
  spacer sequence CTCN PAM
uccucuuccacaagcaacuc

SEQ ID NO: 11906 - RNA, 20 nt, Artificial Sequence
  spacer sequence CTCN PAM
ucuacucccagugugaccca

SEQ ID NO: 11907 - RNA, 20 nt, Artificial Sequence
  spacer sequence CTCN PAM
acucccagugugacccacag

SEQ ID NO: 11908 - RNA, 20 nt, Artificial Sequence
  spacer sequence CTCN PAM
cagugugacccacagguugg

SEQ ID NO: 11909 - RNA, 20 nt, Artificial Sequence
  spacer sequence CTCN PAM
caaccugugggucacacugg

SEQ ID NO: 11910 - RNA, 20 nt, Artificial Sequence
  spacer sequence CTCN PAM
agggaccucccaaccugugg

SEQ ID NO: 11911 - RNA, 20 nt, Artificial Sequence
  spacer sequence CTCN PAM
caaggaggcuccugggagaa

SEQ ID NO: 11912 - RNA, 20 nt, Artificial Sequence
  spacer sequence CTCN PAM
aggaggcuccugggagaacc

SEQ ID NO: 11913 - RNA, 20 nt, Artificial Sequence
  spacer sequence CTCN PAM
uugagagaugucugugccuu

SEQ ID NO: 11914 - RNA, 20 nt, Artificial Sequence
  spacer sequence CTCN PAM
ugggagaaccauuagucugg

SEQ ID NO: 11915 - RNA, 20 nt, Artificial Sequence
  spacer sequence CTCN PAM
caggagccuccuugagagau

SEQ ID NO: 11916 - RNA, 20 nt, Artificial Sequence
  spacer sequence CTCN PAM
ccaggcucccugggccuuua

SEQ ID NO: 11917 - RNA, 20 nt, Artificial Sequence
  spacer sequence CTCN PAM
aggcucccugggccuuuagc

SEQ ID NO: 11918 - RNA, 20 nt, Artificial Sequence
  spacer sequence CTCN PAM
cugggccuuuagcuagcuag

SEQ ID NO: 11919 - RNA, 20 nt, Artificial Sequence
  spacer sequence CTCN PAM
uuccuuccuuucuuccuucu

SEQ ID NO: 11920 - RNA, 20 nt, Artificial Sequence
  spacer sequence CTCN PAM
cuccuuccuuccuuucuucc

SEQ ID NO: 11921 - RNA, 20 nt, Artificial Sequence
  spacer sequence CTCN PAM
cucccuccuuccuuccuuuc

SEQ ID NO: 11922 - RNA, 20 nt, Artificial Sequence
  spacer sequence CTCN PAM
cucccucccuccuuccuucc

SEQ ID NO: 11923 - RNA, 20 nt, Artificial Sequence
  spacer sequence CTCN PAM
cucccucccucccuccuucc

SEQ ID NO: 11924 - RNA, 20 nt, Artificial Sequence
  spacer sequence CTCN PAM
cucccucccucccucccucc

SEQ ID NO: 11925 - RNA, 20 nt, Artificial Sequence
  spacer sequence CTCN PAM
uuucuuucuuucuuccuucc

SEQ ID NO: 11926 - RNA, 20 nt, Artificial Sequence
  spacer sequence CTCN PAM
cuccuuucuuucuuucuucc

SEQ ID NO: 11927 - RNA, 20 nt, Artificial Sequence
  spacer sequence CTCN PAM
cuuccucccuccuuucuuuc

SEQ ID NO: 11928 - RNA, 20 nt, Artificial Sequence
  spacer sequence CTCN PAM
cucccuuccucccuccuuuc

SEQ ID NO: 11929 - RNA, 20 nt, Artificial Sequence
  spacer sequence CTCN PAM
cucccucccuuccucccucc

SEQ ID NO: 11930 - RNA, 20 nt, Artificial Sequence
  spacer sequence CTCN PAM
uuccuuccucccucccuccc

SEQ ID NO: 11931 - RNA, 20 nt, Artificial Sequence
  spacer sequence CTCN PAM
cuccuuccuuccucccuccc

SEQ ID NO: 11932 - RNA, 20 nt, Artificial Sequence
  spacer sequence CTCN PAM
aagucuauacuuuccucuag

SEQ ID NO: 11933 - RNA, 20 nt, Artificial Sequence
  spacer sequence CTCN PAM
agaugaggcugcugugugcu

SEQ ID NO: 11934 - RNA, 20 nt, Artificial Sequence
  spacer sequence CTCN PAM
ucuagaggaaaguauagacu

SEQ ID NO: 11935 - RNA, 20 nt, Artificial Sequence
  spacer sequence CTCN PAM
uccccauacauuauugacuu

SEQ ID NO: 11936 - RNA, 20 nt, Artificial Sequence
  spacer sequence CTCN PAM
cucuuccccauacauuauug

SEQ ID NO: 11937 - RNA, 20 nt, Artificial Sequence
  spacer sequence CTCN PAM
uccaaggggccccuuacuua

SEQ ID NO: 11938 - RNA, 20 nt, Artificial Sequence
  spacer sequence CTCN PAM
uugucucuuccaaggggccc

SEQ ID NO: 11939 - RNA, 20 nt, Artificial Sequence
  spacer sequence CTCN PAM
guuuagcuuccuaauauuga

SEQ ID NO: 11940 - RNA, 20 nt, Artificial Sequence
  spacer sequence CTCN PAM
gugucuuugaugucaauauu

SEQ ID NO: 11941 - RNA, 20 nt, Artificial Sequence
  spacer sequence CTCN PAM
agugcaguacauucauugga

SEQ ID NO: 11942 - RNA, 20 nt, Artificial Sequence
  spacer sequence CTCN PAM
cuagugcaguacauucauug

SEQ ID NO: 11943 - RNA, 20 nt, Artificial Sequence
  spacer sequence CTCN PAM
uggaauaggguugccugauc

SEQ ID NO: 11944 - RNA, 20 nt, Artificial Sequence
  spacer sequence CTCN PAM
ccauccuuggugggaaucac

SEQ ID NO: 11945 - RNA, 20 nt, Artificial Sequence
  spacer sequence CTCN PAM
gaaaagauuaucucgaauau

SEQ ID NO: 11946 - RNA, 20 nt, Artificial Sequence
  spacer sequence CTCN PAM
aauaucagagcagcugaaca

SEQ ID NO: 11947 - RNA, 20 nt, Artificial Sequence
  spacer sequence CTCN PAM
gauauucgagauaaucuuuu

SEQ ID NO: 11948 - RNA, 20 nt, Artificial Sequence
  spacer sequence CTCN PAM
agcagcauacauuaucaaau

SEQ ID NO: 11949 - RNA, 20 nt, Artificial Sequence
  spacer sequence CTCN PAM
aaugagacuacuuuuaaagg

SEQ ID NO: 11950 - RNA, 20 nt, Artificial Sequence
  spacer sequence CTCN PAM
uuugagaaagcaguuuugua

SEQ ID NO: 11951 - RNA, 20 nt, Artificial Sequence
  spacer sequence CTCN PAM
augcuucccuaccccaugca

SEQ ID NO: 11952 - RNA, 20 nt, Artificial Sequence
  spacer sequence CTCN PAM
cucuuucccucucucucgua

SEQ ID NO: 11953 - RNA, 20 nt, Artificial Sequence
  spacer sequence CTCN PAM
cuuucccucucucucguaaa

SEQ ID NO: 11954 - RNA, 20 nt, Artificial Sequence
  spacer sequence CTCN PAM
uucccucucucucguaaaua

SEQ ID NO: 11955 - RNA, 20 nt, Artificial Sequence
  spacer sequence CTCN PAM
cucucguaaauaaaaaaaaa

SEQ ID NO: 11956 - RNA, 20 nt, Artificial Sequence
  spacer sequence CTCN PAM
cucguaaauaaaaaaaaaag

SEQ ID NO: 11957 - RNA, 20 nt, Artificial Sequence
  spacer sequence CTCN PAM
cguaaauaaaaaaaaaagca

SEQ ID NO: 11958 - RNA, 20 nt, Artificial Sequence
  spacer sequence CTCN PAM
uaaauaaaaaaaaaagcaac

SEQ ID NO: 11959 - RNA, 20 nt, Artificial Sequence
  spacer sequence CTCN PAM
cauuguuuuaaaucacauug

SEQ ID NO: 11960 - RNA, 20 nt, Artificial Sequence
  spacer sequence CTCN PAM
uaaaauuuggguuuauaaug

SEQ ID NO: 11961 - RNA, 20 nt, Artificial Sequence
  spacer sequence CTCN PAM
uaauuauagcagcccugcca

SEQ ID NO: 11962 - RNA, 20 nt, Artificial Sequence
  spacer sequence CTCN PAM
auaguaaugaaagcacaacu

SEQ ID NO: 11963 - RNA, 20 nt, Artificial Sequence
  spacer sequence CTCN PAM
uaaacuugggguuuauaaua

SEQ ID NO: 11964 - RNA, 20 nt, Artificial Sequence
  spacer sequence CTCN PAM
gcugaggaagcuuuuggauc

SEQ ID NO: 11965 - RNA, 20 nt, Artificial Sequence
  spacer sequence CTCN PAM
gcugaguuauucugccuuuu

SEQ ID NO: 11966 - RNA, 20 nt, Artificial Sequence
  spacer sequence CTCN PAM
cucucuccucuuucucucuc

SEQ ID NO: 11967 - RNA, 20 nt, Artificial Sequence
  spacer sequence CTCN PAM
cucuccucuuucucucucuc

SEQ ID NO: 11968 - RNA, 20 nt, Artificial Sequence
  spacer sequence CTCN PAM
cuccucuuucucucucucuc

SEQ ID NO: 11969 - RNA, 20 nt, Artificial Sequence
  spacer sequence CTCN PAM
ccucuuucucucucucucuc

SEQ ID NO: 11970 - RNA, 20 nt, Artificial Sequence
  spacer sequence CTCN PAM
ucuuucucucucucucucuc

SEQ ID NO: 11971 - RNA, 20 nt, Artificial Sequence
  spacer sequence CTCN PAM
uucucucucucucucucucu

SEQ ID NO: 11972 - RNA, 20 nt, Artificial Sequence
  spacer sequence CTCN PAM
cucucucucucucucuccug

SEQ ID NO: 11973 - RNA, 20 nt, Artificial Sequence
  spacer sequence CTCN PAM
cucucucucucucuccuguu

SEQ ID NO: 11974 - RNA, 20 nt, Artificial Sequence
  spacer sequence CTCN PAM
cucucucucucuccuguuuc

SEQ ID NO: 11975 - RNA, 20 nt, Artificial Sequence
  spacer sequence CTCN PAM
cucucucucuccuguuucuc

SEQ ID NO: 11976 - RNA, 20 nt, Artificial Sequence
  spacer sequence CTCN PAM
cucucucuccuguuucucuc

SEQ ID NO: 11977 - RNA, 20 nt, Artificial Sequence
  spacer sequence CTCN PAM
cucucuccuguuucucucuc

SEQ ID NO: 11978 - RNA, 20 nt, Artificial Sequence
  spacer sequence CTCN PAM
cucuccuguuucucucucuc

SEQ ID NO: 11979 - RNA, 20 nt, Artificial Sequence
  spacer sequence CTCN PAM
cuccuguuucucucucucuc

SEQ ID NO: 11980 - RNA, 20 nt, Artificial Sequence
  spacer sequence CTCN PAM
ccuguuucucucucucucua

SEQ ID NO: 11981 - RNA, 20 nt, Artificial Sequence
  spacer sequence CTCN PAM
uguuucucucucucucuauc

SEQ ID NO: 11982 - RNA, 20 nt, Artificial Sequence
  spacer sequence CTCN PAM
cucucucuaucucuucuguu

SEQ ID NO: 11983 - RNA, 20 nt, Artificial Sequence
  spacer sequence CTCN PAM
cucucuaucucuucuguuuc

SEQ ID NO: 11984 - RNA, 20 nt, Artificial Sequence
  spacer sequence CTCN PAM
cucuaucucuucuguuucuc

SEQ ID NO: 11985 - RNA, 20 nt, Artificial Sequence
  spacer sequence CTCN PAM
cuaucucuucuguuucucuc

SEQ ID NO: 11986 - RNA, 20 nt, Artificial Sequence
  spacer sequence CTCN PAM
aucucuucuguuucucucuc

SEQ ID NO: 11987 - RNA, 20 nt, Artificial Sequence
  spacer sequence CTCN PAM
ucuguuucucucucucuccc

SEQ ID NO: 11988 - RNA, 20 nt, Artificial Sequence
  spacer sequence CTCN PAM
cucucucccucucucuccuc

SEQ ID NO: 11989 - RNA, 20 nt, Artificial Sequence
  spacer sequence CTCN PAM
cucucccucucucuccucca

SEQ ID NO: 11990 - RNA, 20 nt, Artificial Sequence
  spacer sequence CTCN PAM
cucccucucucuccuccaga

SEQ ID NO: 11991 - RNA, 20 nt, Artificial Sequence
  spacer sequence CTCN PAM
cccucucucuccuccagaac

SEQ ID NO: 11992 - RNA, 20 nt, Artificial Sequence
  spacer sequence CTCN PAM
cucucucuccuccagaacau

SEQ ID NO: 11993 - RNA, 20 nt, Artificial Sequence
  spacer sequence CTCN PAM
cucuccuccagaacauuuca

SEQ ID NO: 11994 - RNA, 20 nt, Artificial Sequence
  spacer sequence CTCN PAM
cuccuccagaacauuucaga

SEQ ID NO: 11995 - RNA, 20 nt, Artificial Sequence
  spacer sequence CTCN PAM
ccuccagaacauuucagaau

SEQ ID NO: 11996 - RNA, 20 nt, Artificial Sequence
  spacer sequence CTCN PAM
uccagaacauuucagaaugu

SEQ ID NO: 11997 - RNA, 20 nt, Artificial Sequence
  spacer sequence CTCN PAM
agaacauuucagaauguuuu

SEQ ID NO: 11998 - RNA, 20 nt, Artificial Sequence
  spacer sequence CTCN PAM
uugcgauuuuauaaguuuuu

SEQ ID NO: 11999 - RNA, 20 nt, Artificial Sequence
  spacer sequence CTCN PAM
aggauaaaauaauaaaaacu

SEQ ID NO: 12000 - RNA, 20 nt, Artificial Sequence
  spacer sequence CTCN PAM
uacauauacacagagguaug

SEQ ID NO: 12001 - RNA, 20 nt, Artificial Sequence
  spacer sequence CTCN PAM
guguauauguaugaggucgc

SEQ ID NO: 12002 - RNA, 20 nt, Artificial Sequence
  spacer sequence CTCN PAM
gaucaucuuaauccugucua

SEQ ID NO: 12003 - RNA, 20 nt, Artificial Sequence
  spacer sequence CTCN PAM
uauuuuuaccacacaguugg

SEQ ID NO: 12004 - RNA, 20 nt, Artificial Sequence
  spacer sequence CTCN PAM
ggaugacugcaccaugcuau

SEQ ID NO: 12005 - RNA, 20 nt, Artificial Sequence
  spacer sequence CTCN PAM
gcuugacuuugacuguugac

SEQ ID NO: 12006 - RNA, 20 nt, Artificial Sequence
  spacer sequence CTCN PAM
gguccaccggauuauacaaa

SEQ ID NO: 12007 - RNA, 20 nt, Artificial Sequence
  spacer sequence CTCN PAM
gcaucggccacaucaucacc

SEQ ID NO: 12008 - RNA, 20 nt, Artificial Sequence
  spacer sequence CTCN PAM
ugcauauacucagcaucggc

SEQ ID NO: 12009 - RNA, 20 nt, Artificial Sequence
  spacer sequence CTCN PAM
aucgccaccaucaucaucau

SEQ ID NO: 12010 - RNA, 20 nt, Artificial Sequence
  spacer sequence CTCN PAM
aucaccaucaccaccaguau

SEQ ID NO: 12011 - RNA, 20 nt, Artificial Sequence
  spacer sequence CTCN PAM
ccaccccaucagcacuaccu

SEQ ID NO: 12012 - RNA, 20 nt, Artificial Sequence
  spacer sequence CTCN PAM
aauuaacauguccaccagag

SEQ ID NO: 12013 - RNA, 20 nt, Artificial Sequence
  spacer sequence CTCN PAM
gguggacauguuaauuagag

SEQ ID NO: 12014 - RNA, 20 nt, Artificial Sequence
  spacer sequence CTCN PAM
aacacuuuguuucuccaaau

SEQ ID NO: 12015 - RNA, 20 nt, Artificial Sequence
  spacer sequence CTCN PAM
aaaucuuguugcuuuagaaa

SEQ ID NO: 12016 - RNA, 20 nt, Artificial Sequence
  spacer sequence CTCN PAM
auaaacaucagguggcggac

SEQ ID NO: 12017 - RNA, 20 nt, Artificial Sequence
  spacer sequence CTCN PAM
uggcaccuccaccaaaaugu

SEQ ID NO: 12018 - RNA, 20 nt, Artificial Sequence
  spacer sequence CTCN PAM
accaaaaugugaccuuggcu

SEQ ID NO: 12019 - RNA, 20 nt, Artificial Sequence
  spacer sequence CTCN PAM
uggugggccuuucuguguga

SEQ ID NO: 12020 - RNA, 20 nt, Artificial Sequence
  spacer sequence CTCN PAM
ucugaaagugaaaagauuuc

SEQ ID NO: 12021 - RNA, 20 nt, Artificial Sequence
  spacer sequence CTCN PAM
auucccucugacugggauca

SEQ ID NO: 12022 - RNA, 20 nt, Artificial Sequence
  spacer sequence CTCN PAM
gacugggaucagaccaccaa

SEQ ID NO: 12023 - RNA, 20 nt, Artificial Sequence
  spacer sequence CTCN PAM
guggccuaauuugguggucu

SEQ ID NO: 12024 - RNA, 20 nt, Artificial Sequence
  spacer sequence CTCN PAM
cuucacaauagcuuuaguug

SEQ ID NO: 12025 - RNA, 20 nt, Artificial Sequence
  spacer sequence CTCN PAM
ucuggaauucaaugagugac

SEQ ID NO: 12026 - RNA, 20 nt, Artificial Sequence
  spacer sequence CTCN PAM
ggaauucaaugagugacaaa

SEQ ID NO: 12027 - RNA, 20 nt, Artificial Sequence
  spacer sequence CTCN PAM
uugaauuccagaggagacca

SEQ ID NO: 12028 - RNA, 20 nt, Artificial Sequence
  spacer sequence CTCN PAM
aguuccuucucuaccagugu

SEQ ID NO: 12029 - RNA, 20 nt, Artificial Sequence
  spacer sequence CTCN PAM
accagugucucauaaacccc

SEQ ID NO: 12030 - RNA, 20 nt, Artificial Sequence
  spacer sequence CTCN PAM
uaaaccccauaauugccuaa

SEQ ID NO: 12031 - RNA, 20 nt, Artificial Sequence
  spacer sequence CTCN PAM
agcugaaugccagucauucc

SEQ ID NO: 12032 - RNA, 20 nt, Artificial Sequence
  spacer sequence CTCN PAM
gggaaugacuggcauucagc

SEQ ID NO: 12033 - RNA, 20 nt, Artificial Sequence
  spacer sequence CTCN PAM
cugggaaugacuggcauuca

SEQ ID NO: 12034 - RNA, 20 nt, Artificial Sequence
  spacer sequence CTCN PAM
agaaauuaagacuuuuuuug

SEQ ID NO: 12035 - RNA, 20 nt, Artificial Sequence
  spacer sequence CTCN PAM
uagaaaaguucccuuugcug

SEQ ID NO: 12036 - RNA, 20 nt, Artificial Sequence
  spacer sequence CTCN PAM
gucaucuuucuuuggcagcu

SEQ ID NO: 12037 - RNA, 20 nt, Artificial Sequence
  spacer sequence CTCN PAM
acuaagcugccaaagaaaga

SEQ ID NO: 12038 - RNA, 20 nt, Artificial Sequence
  spacer sequence CTCN PAM
cuauucucccauucccaguu

SEQ ID NO: 12039 - RNA, 20 nt, Artificial Sequence
  spacer sequence CTCN PAM
auucucccauucccaguugc

SEQ ID NO: 12040 - RNA, 20 nt, Artificial Sequence
  spacer sequence CTCN PAM
cauucccaguugcacacaau

SEQ ID NO: 12041 - RNA, 20 nt, Artificial Sequence
  spacer sequence CTCN PAM
uucucuuaaaaaaaaaaaau

SEQ ID NO: 12042 - RNA, 20 nt, Artificial Sequence
  spacer sequence CTCN PAM
uaaaaaaaaaaaauccuugc

SEQ ID NO: 12043 - RNA, 20 nt, Artificial Sequence
  spacer sequence CTCN PAM
agauuccuauaaaaugaaga

SEQ ID NO: 12044 - RNA, 20 nt, Artificial Sequence
  spacer sequence CTCN PAM
auaaagaaggaaagaauaac

SEQ ID NO: 12045 - RNA, 20 nt, Artificial Sequence
  spacer sequence CTCN PAM
aauuaguaauaugaagcuag

SEQ ID NO: 12046 - RNA, 20 nt, Artificial Sequence
  spacer sequence CTCN PAM
cuauagguuuagaaccgcuc

SEQ ID NO: 12047 - RNA, 20 nt, Artificial Sequence
  spacer sequence CTCN PAM
cauagauccucgcuauaggu

SEQ ID NO: 12048 - RNA, 20 nt, Artificial Sequence
  spacer sequence CTCN PAM
ggucacucugacaccagauu

SEQ ID NO: 12049 - RNA, 20 nt, Artificial Sequence
  spacer sequence CTCN PAM
gacaccagauuuguacuuuc

SEQ ID NO: 12050 - RNA, 20 nt, Artificial Sequence
  spacer sequence CTCN PAM
agaaaguacaaaucuggugu

SEQ ID NO: 12051 - RNA, 20 nt, Artificial Sequence
  spacer sequence CTCN PAM
uuuaugggaaaucaaguuuu

SEQ ID NO: 12052 - RNA, 20 nt, Artificial Sequence
  spacer sequence CTCN PAM
uuauuuaccauucucauuua

SEQ ID NO: 12053 - RNA, 20 nt, Artificial Sequence
  spacer sequence CTCN PAM
aucacaguuuuuauaauguu

SEQ ID NO: 12054 - RNA, 20 nt, Artificial Sequence
  spacer sequence CTCN PAM
aaaguaacuaguuaagccau

SEQ ID NO: 12055 - RNA, 20 nt, Artificial Sequence
  spacer sequence CTCN PAM
uuucucaaaaguaacuaguu

SEQ ID NO: 12056 - RNA, 20 nt, Artificial Sequence
  spacer sequence CTCN PAM
aaaaaaaaaaaaaggcacau

SEQ ID NO: 12057 - RNA, 20 nt, Artificial Sequence
  spacer sequence CTCN PAM
gacucaaaaaaaaaaaaaag

SEQ ID NO: 12058 - RNA, 20 nt, Artificial Sequence
  spacer sequence CTCN PAM
cucuuucaccucuggaaugc

SEQ ID NO: 12059 - RNA, 20 nt, Artificial Sequence
  spacer sequence CTCN PAM
uucaccucuggaaugcagug

SEQ ID NO: 12060 - RNA, 20 nt, Artificial Sequence
  spacer sequence CTCN PAM
ggaaugcaguggcacaaucu

SEQ ID NO: 12061 - RNA, 20 nt, Artificial Sequence
  spacer sequence CTCN PAM
cugcaacuucugccuccagg

SEQ ID NO: 12062 - RNA, 20 nt, Artificial Sequence
  spacer sequence CTCN PAM
agguucaagcaauucucccu

SEQ ID NO: 12063 - RNA, 20 nt, Artificial Sequence
  spacer sequence CTCN PAM
cucccucaaccuccugagua

SEQ ID NO: 12064 - RNA, 20 nt, Artificial Sequence
  spacer sequence CTCN PAM
cucaaccuccugaguagcug

SEQ ID NO: 12065 - RNA, 20 nt, Artificial Sequence
  spacer sequence CTCN PAM
accuccugaguagcugggau

SEQ ID NO: 12066 - RNA, 20 nt, Artificial Sequence
  spacer sequence CTCN PAM
ugaguagcugggauuacagg

SEQ ID NO: 12067 - RNA, 20 nt, Artificial Sequence
  spacer sequence CTCN PAM
ggagguugagggagggagaa

SEQ ID NO: 12068 - RNA, 20 nt, Artificial Sequence
  spacer sequence CTCN PAM
acuaaaaaaauacaaaaauu

SEQ ID NO: 12069 - RNA, 20 nt, Artificial Sequence
  spacer sequence CTCN PAM
cuacuaaaaaaauacaaaaa

SEQ ID NO: 12070 - RNA, 20 nt, Artificial Sequence
  spacer sequence CTCN PAM
aacuccugaccucacgugau

SEQ ID NO: 12071 - RNA, 20 nt, Artificial Sequence
  spacer sequence CTCN PAM
ugaccucacgugauccaccc

SEQ ID NO: 12072 - RNA, 20 nt, Artificial Sequence
  spacer sequence CTCN PAM
cgugauccacccaccucagu

SEQ ID NO: 12073 - RNA, 20 nt, Artificial Sequence
  spacer sequence CTCN PAM
gucucccaaagugcugggau

SEQ ID NO: 12074 - RNA, 20 nt, Artificial Sequence
  spacer sequence CTCN PAM
caaagugcugggauuauagg

SEQ ID NO: 12075 - RNA, 20 nt, Artificial Sequence
  spacer sequence CTCN PAM
cgccuauaaucccagcacuu

SEQ ID NO: 12076 - RNA, 20 nt, Artificial Sequence
  spacer sequence CTCN PAM
cuaauaaguacucaauaauu

SEQ ID NO: 12077 - RNA, 20 nt, Artificial Sequence
  spacer sequence CTCN PAM
auaauugaaaauuauauuau

SEQ ID NO: 12078 - RNA, 20 nt, Artificial Sequence
  spacer sequence CTCN PAM
acacccacuuccaucagggg

SEQ ID NO: 12079 - RNA, 20 nt, Artificial Sequence
  spacer sequence CTCN PAM
cuguguauauuccauauaau

SEQ ID NO: 12080 - RNA, 20 nt, Artificial Sequence
  spacer sequence CTCN PAM
guguauauuccauauaauau

SEQ ID NO: 12081 - RNA, 20 nt, Artificial Sequence
  spacer sequence CTCN PAM
aacaacuuaggacuugggug

SEQ ID NO: 12082 - RNA, 20 nt, Artificial Sequence
  spacer sequence CTCN PAM
gucauuuucaucuuucucuc

SEQ ID NO: 12083 - RNA, 20 nt, Artificial Sequence
  spacer sequence CTCN PAM
cccucagcacagaguagaac

SEQ ID NO: 12084 - RNA, 20 nt, Artificial Sequence
  spacer sequence CTCN PAM
cucagcacagaguagaaccu

SEQ ID NO: 12085 - RNA, 20 nt, Artificial Sequence
  spacer sequence CTCN PAM
gcacagaguagaaccuuagg

SEQ ID NO: 12086 - RNA, 20 nt, Artificial Sequence
  spacer sequence CTCN PAM
gugcugagggagagaaagau

SEQ ID NO: 12087 - RNA, 20 nt, Artificial Sequence
  spacer sequence CTCN PAM
auucucagauuuugaaaugc

SEQ ID NO: 12088 - RNA, 20 nt, Artificial Sequence
  spacer sequence CTCN PAM
gauuuugaaaugcagcaaaa

SEQ ID NO: 12089 - RNA, 20 nt, Artificial Sequence
  spacer sequence CTCN PAM
ugaaauuuggcuguuugaau

SEQ ID NO: 12090 - RNA, 20 nt, Artificial Sequence
  spacer sequence CTCN PAM
guuaugaugcucuugaaauu

SEQ ID NO: 12091 - RNA, 20 nt, Artificial Sequence
  spacer sequence CTCN PAM
gagagacuaauucuggaggc

SEQ ID NO: 12092 - RNA, 20 nt, Artificial Sequence
  spacer sequence CTCN PAM
gaguuacucuguuaugaugc

SEQ ID NO: 12093 - RNA, 20 nt, Artificial Sequence
  spacer sequence CTCN PAM
cagaguuacucuguuaugau

SEQ ID NO: 12094 - RNA, 20 nt, Artificial Sequence
  spacer sequence CTCN PAM
agaauuagucucucagaguu

SEQ ID NO: 12095 - RNA, 20 nt, Artificial Sequence
  spacer sequence CTCN PAM
agacacuacguucuuuaaau

SEQ ID NO: 12096 - RNA, 20 nt, Artificial Sequence
  spacer sequence CTCN PAM
cagagcuuuauaugggcaac

SEQ ID NO: 12097 - RNA, 20 nt, Artificial Sequence
  spacer sequence CTCN PAM
gugagcuuugccuguugcaa

SEQ ID NO: 12098 - RNA, 20 nt, Artificial Sequence
  spacer sequence CTCN PAM
gggagcaagggaaauaucag

SEQ ID NO: 12099 - RNA, 20 nt, Artificial Sequence
  spacer sequence CTCN PAM
cugagccaggccagaaaaaa

SEQ ID NO: 12100 - RNA, 20 nt, Artificial Sequence
  spacer sequence CTCN PAM
ugacauaugaugaguaaaga

SEQ ID NO: 12101 - RNA, 20 nt, Artificial Sequence
  spacer sequence CTCN PAM
ucauaugucaagagcauaua

SEQ ID NO: 12102 - RNA, 20 nt, Artificial Sequence
  spacer sequence CTCN PAM
ucucaaaauauugaaucuug

SEQ ID NO: 12103 - RNA, 20 nt, Artificial Sequence
  spacer sequence CTCN PAM
aaauauugaaucuugaacuc

SEQ ID NO: 12104 - RNA, 20 nt, Artificial Sequence
  spacer sequence CTCN PAM
gagcuuaauuaguggauuuu

SEQ ID NO: 12105 - RNA, 20 nt, Artificial Sequence
  spacer sequence CTCN PAM
gaguucaagauucaauauuu

SEQ ID NO: 12106 - RNA, 20 nt, Artificial Sequence
  spacer sequence CTCN PAM
uuuuaaaacauguuuuauaa

SEQ ID NO: 12107 - RNA, 20 nt, Artificial Sequence
  spacer sequence CTCN PAM
ccuucaugggaacaugcagc

SEQ ID NO: 12108 - RNA, 20 nt, Artificial Sequence
  spacer sequence CTCN PAM
uucaugggaacaugcagcuu

SEQ ID NO: 12109 - RNA, 20 nt, Artificial Sequence
  spacer sequence CTCN PAM
guuugauuuauuuaugcuaa

SEQ ID NO: 12110 - RNA, 20 nt, Artificial Sequence
  spacer sequence CTCN PAM
aaccaaaaaggaacuccuuu

SEQ ID NO: 12111 - RNA, 20 nt, Artificial Sequence
  spacer sequence CTCN PAM
uuucuuuuaaaaaaaaauua

SEQ ID NO: 12112 - RNA, 20 nt, Artificial Sequence
  spacer sequence CTCN PAM
uuaacuuaaugugaccaaga

SEQ ID NO: 12113 - RNA, 20 nt, Artificial Sequence
  spacer sequence CTCN PAM
guauuuaaauuucuuucuug

SEQ ID NO: 12114 - RNA, 20 nt, Artificial Sequence
  spacer sequence CTCN PAM
guaagauugacaugauaucu

SEQ ID NO: 12115 - RNA, 20 nt, Artificial Sequence
  spacer sequence CTCN PAM
uuccuaaaaaaauuaauaaa

SEQ ID NO: 12116 - RNA, 20 nt, Artificial Sequence
  spacer sequence CTCN PAM
cauuccuaaaaaaauuaaua

SEQ ID NO: 12117 - RNA, 20 nt, Artificial Sequence
  spacer sequence CTCN PAM
ggauuaauauuuguuuccug

SEQ ID NO: 12118 - RNA, 20 nt, Artificial Sequence
  spacer sequence CTCN PAM
ggccggggaaauuuucacug

SEQ ID NO: 12119 - RNA, 20 nt, Artificial Sequence
  spacer sequence CTCN PAM
gcuuguuacucuggccgggg

SEQ ID NO: 12120 - RNA, 20 nt, Artificial Sequence
  spacer sequence CTCN PAM
cugcuuguuacucuggccgg

SEQ ID NO: 12121 - RNA, 20 nt, Artificial Sequence
  spacer sequence CTCN PAM
guguaacauuaggugaucuc

SEQ ID NO: 12122 - RNA, 20 nt, Artificial Sequence
  spacer sequence CTCN PAM
caguguaacauuaggugauc

SEQ ID NO: 12123 - RNA, 20 nt, Artificial Sequence
  spacer sequence CTCN PAM
uaucacccauuagucaccac

SEQ ID NO: 12124 - RNA, 20 nt, Artificial Sequence
  spacer sequence CTCN PAM
aguauuauugauagcacaua

SEQ ID NO: 12125 - RNA, 20 nt, Artificial Sequence
  spacer sequence CTCN PAM
ugauuuugauaggcauuugc

SEQ ID NO: 12126 - RNA, 20 nt, Artificial Sequence
  spacer sequence CTCN PAM
gcaucuuacccuuucuaugc

SEQ ID NO: 12127 - RNA, 20 nt, Artificial Sequence
  spacer sequence CTCN PAM
uucuuauuuuaucacaaguc

SEQ ID NO: 12128 - RNA, 20 nt, Artificial Sequence
  spacer sequence CTCN PAM
cuguaucuucaccagaaccu

SEQ ID NO: 12129 - RNA, 20 nt, Artificial Sequence
  spacer sequence CTCN PAM
gaauuagagcuucagucuca

SEQ ID NO: 12130 - RNA, 20 nt, Artificial Sequence
  spacer sequence CTCN PAM
aauucugagucauccugcuu

SEQ ID NO: 12131 - RNA, 20 nt, Artificial Sequence
  spacer sequence CTCN PAM
uccucccugaauguuccugu

SEQ ID NO: 12132 - RNA, 20 nt, Artificial Sequence
  spacer sequence CTCN PAM
cugaauguuccuguguccaa

SEQ ID NO: 12133 - RNA, 20 nt, Artificial Sequence
  spacer sequence CTCN PAM
uuaguuggugauacuuggac

SEQ ID NO: 12134 - RNA, 20 nt, Artificial Sequence
  spacer sequence CTCN PAM
cacuaaacugaaaccccugg

SEQ ID NO: 12135 - RNA, 20 nt, Artificial Sequence
  spacer sequence CTCN PAM
cuaaacugaaaccccuggug

SEQ ID NO: 12136 - RNA, 20 nt, Artificial Sequence
  spacer sequence CTCN PAM
agaccaaggugcaguuaaug

SEQ ID NO: 12137 - RNA, 20 nt, Artificial Sequence
  spacer sequence CTCN PAM
accucaagaccaaggugcag

SEQ ID NO: 12138 - RNA, 20 nt, Artificial Sequence
  spacer sequence CTCN PAM
accaaaagucagcaucauaa

SEQ ID NO: 12139 - RNA, 20 nt, Artificial Sequence
  spacer sequence CTCN PAM
ugaaaaccacuccaccaaaa

SEQ ID NO: 12140 - RNA, 20 nt, Artificial Sequence
  spacer sequence CTCN PAM
cuugaaaaccacuccaccaa

SEQ ID NO: 12141 - RNA, 20 nt, Artificial Sequence
  spacer sequence CTCN PAM
gcuugcucucuugaaaacca

SEQ ID NO: 12142 - RNA, 20 nt, Artificial Sequence
  spacer sequence CTCN PAM
ggccuguuugguucuggaug

SEQ ID NO: 12143 - RNA, 20 nt, Artificial Sequence
  spacer sequence CTCN PAM
uuguggaagcuguccauggu

SEQ ID NO: 12144 - RNA, 20 nt, Artificial Sequence
  spacer sequence CTCN PAM
gagccaauaaaaaugaaacu

SEQ ID NO: 12145 - RNA, 20 nt, Artificial Sequence
  spacer sequence CTCN PAM
gaguuccaaggauaccuuug

SEQ ID NO: 12146 - RNA, 20 nt, Artificial Sequence
  spacer sequence CTCN PAM
ucugagaccuaauuaacuuu

SEQ ID NO: 12147 - RNA, 20 nt, Artificial Sequence
  spacer sequence CTCN PAM
gaagagaauaguuucauuuu

SEQ ID NO: 12148 - RNA, 20 nt, Artificial Sequence
  spacer sequence CTCN PAM
ucauaagcaaagaacaaaug

SEQ ID NO: 12149 - RNA, 20 nt, Artificial Sequence
  spacer sequence CTCN PAM
ccuguaaggaauuuucuguu

SEQ ID NO: 12150 - RNA, 20 nt, Artificial Sequence
  spacer sequence CTCN PAM
aaagaacagaaaauuccuua

SEQ ID NO: 12151 - RNA, 20 nt, Artificial Sequence
  spacer sequence CTCN PAM
aaacauuaaguauuuuccua

SEQ ID NO: 12152 - RNA, 20 nt, Artificial Sequence
  spacer sequence CTCN PAM
uauuagucacugcuccuaua

SEQ ID NO: 12153 - RNA, 20 nt, Artificial Sequence
  spacer sequence CTCN PAM
uauaugauccuuuuucaugu

SEQ ID NO: 12154 - RNA, 20 nt, Artificial Sequence
  spacer sequence CTCN PAM
uuuaaaacaugaaaaaggau

SEQ ID NO: 12155 - RNA, 20 nt, Artificial Sequence
  spacer sequence CTCN PAM
ugcagguuccugugauugcu

SEQ ID NO: 12156 - RNA, 20 nt, Artificial Sequence
  spacer sequence CTCN PAM
gaaauuugcauauuuauagu

SEQ ID NO: 12157 - RNA, 20 nt, Artificial Sequence
  spacer sequence CTCN PAM
cagaaauuugcauauuuaua

SEQ ID NO: 12158 - RNA, 20 nt, Artificial Sequence
  spacer sequence CTCN PAM
aaguaguaagggaaacagga

SEQ ID NO: 12159 - RNA, 20 nt, Artificial Sequence
  spacer sequence CTCN PAM
ggcuuuccuguuucccuuac

SEQ ID NO: 12160 - RNA, 20 nt, Artificial Sequence
  spacer sequence CTCN PAM
uacuuucaaguaauucguau

SEQ ID NO: 12161 - RNA, 20 nt, Artificial Sequence
  spacer sequence CTCN PAM
cuuucuuggacaaccuguga

SEQ ID NO: 12162 - RNA, 20 nt, Artificial Sequence
  spacer sequence CTCN PAM
aggaacagccauaccugagu

SEQ ID NO: 12163 - RNA, 20 nt, Artificial Sequence
  spacer sequence CTCN PAM
gguauggcuguuccuggagc

SEQ ID NO: 12164 - RNA, 20 nt, Artificial Sequence
  spacer sequence CTCN PAM
gaacucagguauggcuguuc

SEQ ID NO: 12165 - RNA, 20 nt, Artificial Sequence
  spacer sequence CTCN PAM
cgucagccacaguuccacuu

SEQ ID NO: 12166 - RNA, 20 nt, Artificial Sequence
  spacer sequence CTCN PAM
accuaaaaucuggaaauuug

SEQ ID NO: 12167 - RNA, 20 nt, Artificial Sequence
  spacer sequence CTCN PAM
aacccuuuaaagaugcaugu

SEQ ID NO: 12168 - RNA, 20 nt, Artificial Sequence
  spacer sequence CTCN PAM
auguaacaugcaucuuuaaa

SEQ ID NO: 12169 - RNA, 20 nt, Artificial Sequence
  spacer sequence CTCN PAM
ccaagaucccaaacaccauu

SEQ ID NO: 12170 - RNA, 20 nt, Artificial Sequence
  spacer sequence CTCN PAM
aggaaauucuuaaaacauuu

SEQ ID NO: 12171 - RNA, 20 nt, Artificial Sequence
  spacer sequence CTCN PAM
caaaauuuuccuuuaauaga

SEQ ID NO: 12172 - RNA, 20 nt, Artificial Sequence
  spacer sequence CTCN PAM
auagucacucuauuacagau

SEQ ID NO: 12173 - RNA, 20 nt, Artificial Sequence
  spacer sequence CTCN PAM
auuacagauuuucauauuaa

SEQ ID NO: 12174 - RNA, 20 nt, Artificial Sequence
  spacer sequence CTCN PAM
acccauuagauucugucaug

SEQ ID NO: 12175 - RNA, 20 nt, Artificial Sequence
  spacer sequence CTCN PAM
ucaacccauuagauucuguc

SEQ ID NO: 12176 - RNA, 20 nt, Artificial Sequence
  spacer sequence CTCN PAM
uccucaacccauuagauucu

SEQ ID NO: 12177 - RNA, 20 nt, Artificial Sequence
  spacer sequence CTCN PAM
gaucaaaucacaaaaacugu

SEQ ID NO: 12178 - RNA, 20 nt, Artificial Sequence
  spacer sequence CTCN PAM
gguguacauuaaaaacucua

SEQ ID NO: 12179 - RNA, 20 nt, Artificial Sequence
  spacer sequence CTCN PAM
agauucugagccaccaaggc

SEQ ID NO: 12180 - RNA, 20 nt, Artificial Sequence
  spacer sequence CTCN PAM
gaaucuagaguuuuuaaugu

SEQ ID NO: 12181 - RNA, 20 nt, Artificial Sequence
  spacer sequence CTCN PAM
acuuuuucuguuagacucac

SEQ ID NO: 12182 - RNA, 20 nt, Artificial Sequence
  spacer sequence CTCN PAM
ccucaaucuuccccaaggcc

SEQ ID NO: 12183 - RNA, 20 nt, Artificial Sequence
  spacer sequence CTCN PAM
aucuuccccaaggccccaca

SEQ ID NO: 12184 - RNA, 20 nt, Artificial Sequence
  spacer sequence CTCN PAM
cuaauuuugcuauuuuuuaa

SEQ ID NO: 12185 - RNA, 20 nt, Artificial Sequence
  spacer sequence CTCN PAM
cuccuaauguaaacaucuca

SEQ ID NO: 12186 - RNA, 20 nt, Artificial Sequence
  spacer sequence CTCN PAM
ccuaauguaaacaucucacc

SEQ ID NO: 12187 - RNA, 20 nt, Artificial Sequence
  spacer sequence CTCN PAM
uaauguaaacaucucaccgu

SEQ ID NO: 12188 - RNA, 20 nt, Artificial Sequence
  spacer sequence CTCN PAM
ccguggcuacauacugaagu

SEQ ID NO: 12189 - RNA, 20 nt, Artificial Sequence
  spacer sequence CTCN PAM
guacuucuuuuccauauuca

SEQ ID NO: 12190 - RNA, 20 nt, Artificial Sequence
  spacer sequence CTCN PAM
acuuugcuguagcuguaaag

SEQ ID NO: 12191 - RNA, 20 nt, Artificial Sequence
  spacer sequence CTCN PAM
guccuccacuuugcuguagc

SEQ ID NO: 12192 - RNA, 20 nt, Artificial Sequence
  spacer sequence CTCN PAM
uugcugaaauuacauaggua

SEQ ID NO: 12193 - RNA, 20 nt, Artificial Sequence
  spacer sequence CTCN PAM
acacacaggauacaagauuc

SEQ ID NO: 12194 - RNA, 20 nt, Artificial Sequence
  spacer sequence CTCN PAM
gaccugagggcccacaagga

SEQ ID NO: 12195 - RNA, 20 nt, Artificial Sequence
  spacer sequence CTCN PAM
ggucagagcucaacacacag

SEQ ID NO: 12196 - RNA, 20 nt, Artificial Sequence
  spacer sequence CTCN PAM
uugugggcccucaggucaga

SEQ ID NO: 12197 - RNA, 20 nt, Artificial Sequence
  spacer sequence CTCN PAM
ccuugugggcccucagguca

SEQ ID NO: 12198 - RNA, 20 nt, Artificial Sequence
  spacer sequence CTCN PAM
cuuucucuccuugugggccc

SEQ ID NO: 12199 - RNA, 20 nt, Artificial Sequence
  spacer sequence CTCN PAM
cccuuucucuccuugugggc

SEQ ID NO: 12200 - RNA, 20 nt, Artificial Sequence
  spacer sequence CTCN PAM
cccaaaacuuaaacaagcac

SEQ ID NO: 12201 - RNA, 20 nt, Artificial Sequence
  spacer sequence CTCN PAM
auaugaucaggagaauuuuu

SEQ ID NO: 12202 - RNA, 20 nt, Artificial Sequence
  spacer sequence CTCN PAM
ugaucauauagagugauggg

SEQ ID NO: 12203 - RNA, 20 nt, Artificial Sequence
  spacer sequence CTCN PAM
agguuuuacugccacagaag

SEQ ID NO: 12204 - RNA, 20 nt, Artificial Sequence
  spacer sequence CTCN PAM
ucuuucccagaaccccugcc

SEQ ID NO: 12205 - RNA, 20 nt, Artificial Sequence
  spacer sequence CTCN PAM
uucccagaaccccugccaua

SEQ ID NO: 12206 - RNA, 20 nt, Artificial Sequence
  spacer sequence CTCN PAM
gucgcucaccuucuagacac

SEQ ID NO: 12207 - RNA, 20 nt, Artificial Sequence
  spacer sequence CTCN PAM
ccuucuagacacuccguaca

SEQ ID NO: 12208 - RNA, 20 nt, Artificial Sequence
  spacer sequence CTCN PAM
guacaaccauucaaucuauu

SEQ ID NO: 12209 - RNA, 20 nt, Artificial Sequence
  spacer sequence CTCN PAM
ugauucaauagauugaaugg

SEQ ID NO: 12210 - RNA, 20 nt, Artificial Sequence
  spacer sequence CTCN PAM
cagaugcagauaagaucaaa

SEQ ID NO: 12211 - RNA, 20 nt, Artificial Sequence
  spacer sequence CTCN PAM
aaggguuaauaaauuuagaa

SEQ ID NO: 12212 - RNA, 20 nt, Artificial Sequence
  spacer sequence CTCN PAM
ccccaauuaucauaaugaaa

SEQ ID NO: 12213 - RNA, 20 nt, Artificial Sequence
  spacer sequence CTCN PAM
ccccccaauuaucauaauga

SEQ ID NO: 12214 - RNA, 20 nt, Artificial Sequence
  spacer sequence CTCN PAM
cuccccccaauuaucauaau

SEQ ID NO: 12215 - RNA, 20 nt, Artificial Sequence
  spacer sequence CTCN PAM
ccuaggcugagguuugccug

SEQ ID NO: 12216 - RNA, 20 nt, Artificial Sequence
  spacer sequence CTCN PAM
uaggcugagguuugccugug

SEQ ID NO: 12217 - RNA, 20 nt, Artificial Sequence
  spacer sequence CTCN PAM
gccuaggagagugccuggga

SEQ ID NO: 12218 - RNA, 20 nt, Artificial Sequence
  spacer sequence CTCN PAM
agaaacaguucagucucuga

SEQ ID NO: 12219 - RNA, 20 nt, Artificial Sequence
  spacer sequence CTCN PAM
gaaaacaaugcaaaaggaaa

SEQ ID NO: 12220 - RNA, 20 nt, Artificial Sequence
  spacer sequence CTCN PAM
uuuuccuuuugcauuguuuu

SEQ ID NO: 12221 - RNA, 20 nt, Artificial Sequence
  spacer sequence CTCN PAM
ucuuuuuccuuuugcauugu

SEQ ID NO: 12222 - RNA, 20 nt, Artificial Sequence
  spacer sequence CTCN PAM
uucccuuucuucuucccccu

SEQ ID NO: 12223 - RNA, 20 nt, Artificial Sequence
  spacer sequence CTCN PAM
aacagauuuccaauggucca

SEQ ID NO: 12224 - RNA, 20 nt, Artificial Sequence
  spacer sequence CTCN PAM
acaaauuccuccaguaaguc

SEQ ID NO: 12225 - RNA, 20 nt, Artificial Sequence
  spacer sequence CTCN PAM
aguaagucaaacuucugaau

SEQ ID NO: 12226 - RNA, 20 nt, Artificial Sequence
  spacer sequence CTCN PAM
ccucccccaaagaagaacuc

SEQ ID NO: 12227 - RNA, 20 nt, Artificial Sequence
  spacer sequence CTCN PAM
cccaaagaagaacucuaagc

SEQ ID NO: 12228 - RNA, 20 nt, Artificial Sequence
  spacer sequence CTCN PAM
aagcaauuagaauuauaggu

SEQ ID NO: 12229 - RNA, 20 nt, Artificial Sequence
  spacer sequence CTCN PAM
ccuuuagcaggacuaccuau

SEQ ID NO: 12230 - RNA, 20 nt, Artificial Sequence
  spacer sequence CTCN PAM
ucuacuugcccauuacugau

SEQ ID NO: 12231 - RNA, 20 nt, Artificial Sequence
  spacer sequence CTCN PAM
cuuuuuugguaaccacgugc

SEQ ID NO: 12232 - RNA, 20 nt, Artificial Sequence
  spacer sequence CTCN PAM
cuaauguagccuaauaacaa

SEQ ID NO: 12233 - RNA, 20 nt, Artificial Sequence
  spacer sequence CTCN PAM
aauguagccuaauaacaauu

SEQ ID NO: 12234 - RNA, 20 nt, Artificial Sequence
  spacer sequence CTCN PAM
aaaucaaaucuaauagaaaa

SEQ ID NO: 12235 - RNA, 20 nt, Artificial Sequence
  spacer sequence CTCN PAM
aaggcacccacuggggcuuc

SEQ ID NO: 12236 - RNA, 20 nt, Artificial Sequence
  spacer sequence CTCN PAM
gccucgaaggcacccacugg

SEQ ID NO: 12237 - RNA, 20 nt, Artificial Sequence
  spacer sequence CTCN PAM
cagauagaucucugccucga

SEQ ID NO: 12238 - RNA, 20 nt, Artificial Sequence
  spacer sequence CTCN PAM
auagcagccugggcuaaccu

SEQ ID NO: 12239 - RNA, 20 nt, Artificial Sequence
  spacer sequence CTCN PAM
ggaaaggucaagguuagccc

SEQ ID NO: 12240 - RNA, 20 nt, Artificial Sequence
  spacer sequence CTCN PAM
aucuggugccagccugcuuu

SEQ ID NO: 12241 - RNA, 20 nt, Artificial Sequence
  spacer sequence CTCN PAM
uuuuuugcuucauagucaac

SEQ ID NO: 12242 - RNA, 20 nt, Artificial Sequence
  spacer sequence CTCN PAM
guucugccuugaucaauguu

SEQ ID NO: 12243 - RNA, 20 nt, Artificial Sequence
  spacer sequence CTCN PAM
ucuccuggaagggcugggca

SEQ ID NO: 12244 - RNA, 20 nt, Artificial Sequence
  spacer sequence CTCN PAM
uggaagggcugggcagacuc

SEQ ID NO: 12245 - RNA, 20 nt, Artificial Sequence
  spacer sequence CTCN PAM
ggagaacagcacauuucagu

SEQ ID NO: 12246 - RNA, 20 nt, Artificial Sequence
  spacer sequence CTCN PAM
ugagucugcccagcccuucc

SEQ ID NO: 12247 - RNA, 20 nt, Artificial Sequence
  spacer sequence CTCN PAM
uaugcaaucauaaaucuaca

SEQ ID NO: 12248 - RNA, 20 nt, Artificial Sequence
  spacer sequence CTCN PAM
uauguagauuuaugauugca

SEQ ID NO: 12249 - RNA, 20 nt, Artificial Sequence
  spacer sequence CTCN PAM
aaagauuuuuuuucucccuc

SEQ ID NO: 12250 - RNA, 20 nt, Artificial Sequence
  spacer sequence CTCN PAM
cucccaacagggauuuauaa

SEQ ID NO: 12251 - RNA, 20 nt, Artificial Sequence
  spacer sequence CTCN PAM
caacagggauuuauaagcuc

SEQ ID NO: 12252 - RNA, 20 nt, Artificial Sequence
  spacer sequence CTCN PAM
guaagagcucccggacaacg

SEQ ID NO: 12253 - RNA, 20 nt, Artificial Sequence
  spacer sequence CTCN PAM
uacagagcuuauaaaucccu

SEQ ID NO: 12254 - RNA, 20 nt, Artificial Sequence
  spacer sequence CTCN PAM
cggacaacggcuuuccccaa

SEQ ID NO: 12255 - RNA, 20 nt, Artificial Sequence
  spacer sequence CTCN PAM
aaugcugcaaauucauuuuu

SEQ ID NO: 12256 - RNA, 20 nt, Artificial Sequence
  spacer sequence CTCN PAM
cuggcuuuuaucuaggauuu

SEQ ID NO: 12257 - RNA, 20 nt, Artificial Sequence
  spacer sequence CTCN PAM
acacccauccucauuaugca

SEQ ID NO: 12258 - RNA, 20 nt, Artificial Sequence
  spacer sequence CTCN PAM
uuaugcauuucuagauagau

SEQ ID NO: 12259 - RNA, 20 nt, Artificial Sequence
  spacer sequence CTCN PAM
gaauucugaccccuuuuuua

SEQ ID NO: 12260 - RNA, 20 nt, Artificial Sequence
  spacer sequence CTCN PAM
ugaugguuaaaaaagggguc

SEQ ID NO: 12261 - RNA, 20 nt, Artificial Sequence
  spacer sequence CTCN PAM
ccucuugaugguuaaaaaag

SEQ ID NO: 12262 - RNA, 20 nt, Artificial Sequence
  spacer sequence CTCN PAM
ccccucuugaugguuaaaaa

SEQ ID NO: 12263 - RNA, 20 nt, Artificial Sequence
  spacer sequence CTCN PAM
uuaucucuccccucuugaug

SEQ ID NO: 12264 - RNA, 20 nt, Artificial Sequence
  spacer sequence CTCN PAM
cucuuuaucucuccccucuu

SEQ ID NO: 12265 - RNA, 20 nt, Artificial Sequence
  spacer sequence CTCN PAM
cccucuuuaucucuccccuc

SEQ ID NO: 12266 - RNA, 20 nt, Artificial Sequence
  spacer sequence CTCN PAM
cucccucuuuaucucucccc

SEQ ID NO: 12267 - RNA, 20 nt, Artificial Sequence
  spacer sequence CTCN PAM
ucucucccucuuuaucucuc

SEQ ID NO: 12268 - RNA, 20 nt, Artificial Sequence
  spacer sequence CTCN PAM
ccucucucccucuuuaucuc

SEQ ID NO: 12269 - RNA, 20 nt, Artificial Sequence
  spacer sequence CTCN PAM
gacucuccucucucccucuu

SEQ ID NO: 12270 - RNA, 20 nt, Artificial Sequence
  spacer sequence CTCN PAM
uuucucugacucuccucucu

SEQ ID NO: 12271 - RNA, 20 nt, Artificial Sequence
  spacer sequence CTCN PAM
gugucucuuuucucugacuc

SEQ ID NO: 12272 - RNA, 20 nt, Artificial Sequence
  spacer sequence CTCN PAM
ucugugucucuuuucucuga

SEQ ID NO: 12273 - RNA, 20 nt, Artificial Sequence
  spacer sequence CTCN PAM
ccucugugucucuuuucucu

SEQ ID NO: 12274 - RNA, 20 nt, Artificial Sequence
  spacer sequence CTCN PAM
cuccucugugucucuuuucu

SEQ ID NO: 12275 - RNA, 20 nt, Artificial Sequence
  spacer sequence CTCN PAM
guuuggcauguuuccaucug

SEQ ID NO: 12276 - RNA, 20 nt, Artificial Sequence
  spacer sequence CTCN PAM
cuguuuggcauguuuccauc

SEQ ID NO: 12277 - RNA, 20 nt, Artificial Sequence
  spacer sequence CTCN PAM
cucuguuuggcauguuucca

SEQ ID NO: 12278 - RNA, 20 nt, Artificial Sequence
  spacer sequence CTCN PAM
auucaaguguuacaucguua

SEQ ID NO: 12279 - RNA, 20 nt, Artificial Sequence
  spacer sequence CTCN PAM
ccucccuaggccacauuccu

SEQ ID NO: 12280 - RNA, 20 nt, Artificial Sequence
  spacer sequence CTCN PAM
ucccuaggccacauuccucc

SEQ ID NO: 12281 - RNA, 20 nt, Artificial Sequence
  spacer sequence CTCN PAM
cuaggccacauuccuccuuu

SEQ ID NO: 12282 - RNA, 20 nt, Artificial Sequence
  spacer sequence CTCN PAM
uuucccaaagacccacacga

SEQ ID NO: 12283 - RNA, 20 nt, Artificial Sequence
  spacer sequence CTCN PAM
uucuccagaucacccacuag

SEQ ID NO: 12284 - RNA, 20 nt, Artificial Sequence
  spacer sequence CTCN PAM
agaucacccacuagaguaca

SEQ ID NO: 12285 - RNA, 20 nt, Artificial Sequence
  spacer sequence CTCN PAM
agugggugaucuggagaagg

SEQ ID NO: 12286 - RNA, 20 nt, Artificial Sequence
  spacer sequence CTCN PAM
ucugccccacacucucuuuc

SEQ ID NO: 12287 - RNA, 20 nt, Artificial Sequence
  spacer sequence CTCN PAM
gccccacacucucuuucuuu

SEQ ID NO: 12288 - RNA, 20 nt, Artificial Sequence
  spacer sequence CTCN PAM
cuuucuuuccuccucuucuc

SEQ ID NO: 12289 - RNA, 20 nt, Artificial Sequence
  spacer sequence CTCN PAM
uucuuuccuccucuucucuc

SEQ ID NO: 12290 - RNA, 20 nt, Artificial Sequence
  spacer sequence CTCN PAM
ucuucucucuguaucagggg

SEQ ID NO: 12291 - RNA, 20 nt, Artificial Sequence
  spacer sequence CTCN PAM
ucucucuguaucaggggcug

SEQ ID NO: 12292 - RNA, 20 nt, Artificial Sequence
  spacer sequence CTCN PAM
cuguaucaggggcugggugg

SEQ ID NO: 12293 - RNA, 20 nt, Artificial Sequence
  spacer sequence CTCN PAM
guaucaggggcuggguggua

SEQ ID NO: 12294 - RNA, 20 nt, Artificial Sequence
  spacer sequence CTCN PAM
uuaccacccagccccugaua

SEQ ID NO: 12295 - RNA, 20 nt, Artificial Sequence
  spacer sequence CTCN PAM
gucagccucuuuaccaccca

SEQ ID NO: 12296 - RNA, 20 nt, Artificial Sequence
  spacer sequence CTCN PAM
cccucagucagccucuuuac

SEQ ID NO: 12297 - RNA, 20 nt, Artificial Sequence
  spacer sequence CTCN PAM
aaagaaauugacugacuggc

SEQ ID NO: 12298 - RNA, 20 nt, Artificial Sequence
  spacer sequence CTCN PAM
ggucauuuccauauauugaa

SEQ ID NO: 12299 - RNA, 20 nt, Artificial Sequence
  spacer sequence CTCN PAM
acacuuugucauuuuucuag

SEQ ID NO: 12300 - RNA, 20 nt, Artificial Sequence
  spacer sequence CTCN PAM
ucuccucacagaagccucau

SEQ ID NO: 12301 - RNA, 20 nt, Artificial Sequence
  spacer sequence CTCN PAM
ucacagaagccucauuucuu

SEQ ID NO: 12302 - RNA, 20 nt, Artificial Sequence
  spacer sequence CTCN PAM
cagaagccucauuucuugca

SEQ ID NO: 12303 - RNA, 20 nt, Artificial Sequence
  spacer sequence CTCN PAM
uuucuugcauuuugccuugc

SEQ ID NO: 12304 - RNA, 20 nt, Artificial Sequence
  spacer sequence CTCN PAM
ucccacuuccaaccuacacc

SEQ ID NO: 12305 - RNA, 20 nt, Artificial Sequence
  spacer sequence CTCN PAM
ccaaaucuugccccauccuc

SEQ ID NO: 12306 - RNA, 20 nt, Artificial Sequence
  spacer sequence CTCN PAM
aaaucuugccccauccucuc

SEQ ID NO: 12307 - RNA, 20 nt, Artificial Sequence
  spacer sequence CTCN PAM
ccaucgcucccaaccaccgc

SEQ ID NO: 12308 - RNA, 20 nt, Artificial Sequence
  spacer sequence CTCN PAM
aucgcucccaaccaccgcgc

SEQ ID NO: 12309 - RNA, 20 nt, Artificial Sequence
  spacer sequence CTCN PAM
caaccaccgcgcgcccccac

SEQ ID NO: 12310 - RNA, 20 nt, Artificial Sequence
  spacer sequence CTCN PAM
ggcuccccuguaauuggaaa

SEQ ID NO: 12311 - RNA, 20 nt, Artificial Sequence
  spacer sequence CTCN PAM
ccuguaauuggaaacauccg

SEQ ID NO: 12312 - RNA, 20 nt, Artificial Sequence
  spacer sequence CTCN PAM
gauuaucugagacaagaggc

SEQ ID NO: 12313 - RNA, 20 nt, Artificial Sequence
  spacer sequence CTCN PAM
gauaauccgaggcagggcag

SEQ ID NO: 12314 - RNA, 20 nt, Artificial Sequence
  spacer sequence CTCN PAM
ugucucagauaauccgaggc

SEQ ID NO: 12315 - RNA, 20 nt, Artificial Sequence
  spacer sequence CTCN PAM
uccugggcgccucuugucuc

SEQ ID NO: 12316 - RNA, 20 nt, Artificial Sequence
  spacer sequence CTCN PAM
uguaauccccaggaugggaa

SEQ ID NO: 12317 - RNA, 20 nt, Artificial Sequence
  spacer sequence CTCN PAM
agccccuuaugauaaagaaa

SEQ ID NO: 12318 - RNA, 20 nt, Artificial Sequence
  spacer sequence CTCN PAM
uuccuuaccccagcccccac

SEQ ID NO: 12319 - RNA, 20 nt, Artificial Sequence
  spacer sequence CTCN PAM
acccucgaggaguucccuua

SEQ ID NO: 12320 - RNA, 20 nt, Artificial Sequence
  spacer sequence CTCN PAM
aggaguucccuuagcaaacu

SEQ ID NO: 12321 - RNA, 20 nt, Artificial Sequence
  spacer sequence CTCN PAM
aggguggagugggggcuggg

SEQ ID NO: 12322 - RNA, 20 nt, Artificial Sequence
  spacer sequence CTCN PAM
ucgaggguggagugggggcu

SEQ ID NO: 12323 - RNA, 20 nt, Artificial Sequence
  spacer sequence CTCN PAM
auggcacugcauggcacaag

SEQ ID NO: 12324 - RNA, 20 nt, Artificial Sequence
  spacer sequence CTCN PAM
ccauggcacugcauggcaca

SEQ ID NO: 12325 - RNA, 20 nt, Artificial Sequence
  spacer sequence CTCN PAM
acacaagaaaagcaggaacc

SEQ ID NO: 12326 - RNA, 20 nt, Artificial Sequence
  spacer sequence CTCN PAM
ggugcccuccaccuaacccu

SEQ ID NO: 12327 - RNA, 20 nt, Artificial Sequence
  spacer sequence CTCN PAM
accuaacccugccccaaugc

SEQ ID NO: 12328 - RNA, 20 nt, Artificial Sequence
  spacer sequence CTCN PAM
ggucuuuuuugaacuaaugc

SEQ ID NO: 12329 - RNA, 20 nt, Artificial Sequence
  spacer sequence CTCN PAM
gcaaucugcaauuacuuugg

SEQ ID NO: 12330 - RNA, 20 nt, Artificial Sequence
  spacer sequence CTCN PAM
ggagcuaaacgcagccugaa

SEQ ID NO: 12331 - RNA, 20 nt, Artificial Sequence
  spacer sequence CTCN PAM
ugagaaauauccaaaguaau

SEQ ID NO: 12332 - RNA, 20 nt, Artificial Sequence
  spacer sequence CTCN PAM
agaaaaaaacaacagcgcgg

SEQ ID NO: 12333 - RNA, 20 nt, Artificial Sequence
  spacer sequence CTCN PAM
cucccagauccuacuugaga

SEQ ID NO: 12334 - RNA, 20 nt, Artificial Sequence
  spacer sequence CTCN PAM
cagauccuacuugagaucuc

SEQ ID NO: 12335 - RNA, 20 nt, Artificial Sequence
  spacer sequence CTCN PAM
aguaggaucugggagggagu

SEQ ID NO: 12336 - RNA, 20 nt, Artificial Sequence
  spacer sequence CTCN PAM
aaucuuucaacuugggucuc

SEQ ID NO: 12337 - RNA, 20 nt, Artificial Sequence
  spacer sequence CTCN PAM
guuuugccuacugggcagcc

SEQ ID NO: 12338 - RNA, 20 nt, Artificial Sequence
  spacer sequence CTCN PAM
cuuuuuuuuucuuucucuug

SEQ ID NO: 12339 - RNA, 20 nt, Artificial Sequence
  spacer sequence CTCN PAM
uuuuuuuucuuucucuugga

SEQ ID NO: 12340 - RNA, 20 nt, Artificial Sequence
  spacer sequence CTCN PAM
uggaucuaggaacaauaggc

SEQ ID NO: 12341 - RNA, 20 nt, Artificial Sequence
  spacer sequence CTCN PAM
gaaccuaauuaauuuuauua

SEQ ID NO: 12342 - RNA, 20 nt, Artificial Sequence
  spacer sequence CTCN PAM
aaugguuaauucccccaggc

SEQ ID NO: 12343 - RNA, 20 nt, Artificial Sequence
  spacer sequence CTCN PAM
acagcgucugcguccucaaa

SEQ ID NO: 12344 - RNA, 20 nt, Artificial Sequence
  spacer sequence CTCN PAM
ggugacucaacagcgucugc

SEQ ID NO: 12345 - RNA, 20 nt, Artificial Sequence
  spacer sequence CTCN PAM
caucauaagcuuauacuucc

SEQ ID NO: 12346 - RNA, 20 nt, Artificial Sequence
  spacer sequence CTCN PAM
ucacaaggucaaacaaaaac

SEQ ID NO: 12347 - RNA, 20 nt, Artificial Sequence
  spacer sequence CTCN PAM
aauugugcagaaccccggga

SEQ ID NO: 12348 - RNA, 20 nt, Artificial Sequence
  spacer sequence CTCN PAM
cccauucauaguuuguuguc

SEQ ID NO: 12349 - RNA, 20 nt, Artificial Sequence
  spacer sequence CTCN PAM
cacuauuuggaacugguggg

SEQ ID NO: 12350 - RNA, 20 nt, Artificial Sequence
  spacer sequence CTCN PAM
cuauuuggaacuggugggga

SEQ ID NO: 12351 - RNA, 20 nt, Artificial Sequence
  spacer sequence CTCN PAM
ccaccaguuccaaauaguga

SEQ ID NO: 12352 - RNA, 20 nt, Artificial Sequence
  spacer sequence CTCN PAM
ggugcauccuagaguggaua

SEQ ID NO: 12353 - RNA, 20 nt, Artificial Sequence
  spacer sequence CTCN PAM
aggaugcaccggagguucac

SEQ ID NO: 12354 - RNA, 20 nt, Artificial Sequence
  spacer sequence CTCN PAM
agagcgaaggaaaauguaac

SEQ ID NO: 12355 - RNA, 20 nt, Artificial Sequence
  spacer sequence CTCN PAM
ugagaaggcauauuggauuu

SEQ ID NO: 12356 - RNA, 20 nt, Artificial Sequence
  spacer sequence CTCN PAM
gguaauuugaaauacauuuu

SEQ ID NO: 12357 - RNA, 20 nt, Artificial Sequence
  spacer sequence CTCN PAM
uggaaaaaaccaauuuaaua

SEQ ID NO: 12358 - RNA, 20 nt, Artificial Sequence
  spacer sequence CTCN PAM
uaggaauucuaaugucauag

SEQ ID NO: 12359 - RNA, 20 nt, Artificial Sequence
  spacer sequence CTCN PAM
ugguuuuuuuuuuauauuau

SEQ ID NO: 12360 - RNA, 20 nt, Artificial Sequence
  spacer sequence CTCN PAM
ugaauauuuuaucauaucua

SEQ ID NO: 12361 - RNA, 20 nt, Artificial Sequence
  spacer sequence CTCN PAM
cugaaggaaaaugugcuuga

SEQ ID NO: 12362 - RNA, 20 nt, Artificial Sequence
  spacer sequence CTCN PAM
gaaggaaaaugugcuugaaa

SEQ ID NO: 12363 - RNA, 20 nt, Artificial Sequence
  spacer sequence CTCN PAM
uuuauggaauuuguuuugau

SEQ ID NO: 12364 - RNA, 20 nt, Artificial Sequence
  spacer sequence CTCN PAM
guaacauggaagcuaggaag

SEQ ID NO: 12365 - RNA, 20 nt, Artificial Sequence
  spacer sequence CTCN PAM
gccuuguacggucugagguu

SEQ ID NO: 12366 - RNA, 20 nt, Artificial Sequence
  spacer sequence CTCN PAM
gaccguacaaggcagagcuu

SEQ ID NO: 12367 - RNA, 20 nt, Artificial Sequence
  spacer sequence CTCN PAM
uuuuuagcuggcaugugcug

SEQ ID NO: 12368 - RNA, 20 nt, Artificial Sequence
  spacer sequence CTCN PAM
cuuauuucuacacucaugua

SEQ ID NO: 12369 - RNA, 20 nt, Artificial Sequence
  spacer sequence CTCN PAM
uguaauuuaacagguuugga

SEQ ID NO: 12370 - RNA, 20 nt, Artificial Sequence
  spacer sequence CTCN PAM
aaaccuguuaaauuacauga

SEQ ID NO: 12371 - RNA, 20 nt, Artificial Sequence
  spacer sequence CTCN PAM
ccaaaccuguuaaauuacau

SEQ ID NO: 12372 - RNA, 20 nt, Artificial Sequence
  spacer sequence CTCN PAM
caacuguugucauccuaugu

SEQ ID NO: 12373 - RNA, 20 nt, Artificial Sequence
  spacer sequence CTCN PAM
aacaaaaugcacuuuuuguu

SEQ ID NO: 12374 - RNA, 20 nt, Artificial Sequence
  spacer sequence CTCN PAM
cagcuuuuuacagcucccca

SEQ ID NO: 12375 - RNA, 20 nt, Artificial Sequence
  spacer sequence CTCN PAM
ccauggcaauuuucuguacu

SEQ ID NO: 12376 - RNA, 20 nt, Artificial Sequence
  spacer sequence CTCN PAM
cccauaugagacacuuugaa

SEQ ID NO: 12377 - RNA, 20 nt, Artificial Sequence
  spacer sequence CTCN PAM
uaugggggaggggcaguuga

SEQ ID NO: 12378 - RNA, 20 nt, Artificial Sequence
  spacer sequence CTCN PAM
aauucucagacugcucucug

SEQ ID NO: 12379 - RNA, 20 nt, Artificial Sequence
  spacer sequence CTCN PAM
gacugcucucugauggaacu

SEQ ID NO: 12380 - RNA, 20 nt, Artificial Sequence
  spacer sequence CTCN PAM
cugauggaacuaggagaauu

SEQ ID NO: 12381 - RNA, 20 nt, Artificial Sequence
  spacer sequence CTCN PAM
gauggaacuaggagaauugg

SEQ ID NO: 12382 - RNA, 20 nt, Artificial Sequence
  spacer sequence CTCN PAM
uaguuccaucagagagcagu

SEQ ID NO: 12383 - RNA, 20 nt, Artificial Sequence
  spacer sequence CTCN PAM
aauuauuucacauuuuuauu

SEQ ID NO: 12384 - RNA, 20 nt, Artificial Sequence
  spacer sequence CTCN PAM
aaugggggaaaaccaaaaau

SEQ ID NO: 12385 - RNA, 20 nt, Artificial Sequence
  spacer sequence CTCN PAM
ccucuuuuuuuuuuaugaua

SEQ ID NO: 12386 - RNA, 20 nt, Artificial Sequence
  spacer sequence CTCN PAM
uuuuuuuuuaugauaacaua

SEQ ID NO: 12387 - RNA, 20 nt, Artificial Sequence
  spacer sequence CTCN PAM
ccaagcaguuguugaacuau

SEQ ID NO: 12388 - RNA, 20 nt, Artificial Sequence
  spacer sequence CTCN PAM
aacgugcaauuauuuuuucc

SEQ ID NO: 12389 - RNA, 20 nt, Artificial Sequence
  spacer sequence CTCN PAM
aagucccuggguugauauga

SEQ ID NO: 12390 - RNA, 20 nt, Artificial Sequence
  spacer sequence CTCN PAM
gugucaacuaugucagagac

SEQ ID NO: 12391 - RNA, 20 nt, Artificial Sequence
  spacer sequence CTCN PAM
gacauaguugacaccgagga

SEQ ID NO: 12392 - RNA, 20 nt, Artificial Sequence
  spacer sequence CTCN PAM
gggaguggggagaaaagaaa

SEQ ID NO: 12393 - RNA, 20 nt, Artificial Sequence
  spacer sequence CTCN PAM
cagaggauacuuugaauguu

SEQ ID NO: 12394 - RNA, 20 nt, Artificial Sequence
  spacer sequence CTCN PAM
ccacucccagaggauacuuu

SEQ ID NO: 12395 - RNA, 20 nt, Artificial Sequence
  spacer sequence CTCN PAM
augaacccaaacuuggaggg

SEQ ID NO: 12396 - RNA, 20 nt, Artificial Sequence
  spacer sequence CTCN PAM
aaguuuggguucauggagac

SEQ ID NO: 12397 - RNA, 20 nt, Artificial Sequence
  spacer sequence CTCN PAM
ucaucuucauugcuugaauc

SEQ ID NO: 12398 - RNA, 20 nt, Artificial Sequence
  spacer sequence CTCN PAM
uggcucaucaucuucauugc

SEQ ID NO: 12399 - RNA, 20 nt, Artificial Sequence
  spacer sequence CTCN PAM
aucagaucuucuauuacacc

SEQ ID NO: 12400 - RNA, 20 nt, Artificial Sequence
  spacer sequence CTCN PAM
ccaucagaucuucuauuaca

SEQ ID NO: 12401 - RNA, 20 nt, Artificial Sequence
  spacer sequence CTCN PAM
uaaagaaaaauaaaaaaaaa

SEQ ID NO: 12402 - RNA, 20 nt, Artificial Sequence
  spacer sequence CTCN PAM
gacuguccagggaggagagg

SEQ ID NO: 12403 - RNA, 20 nt, Artificial Sequence
  spacer sequence CTCN PAM
cuggacagucagaguuuucu

SEQ ID NO: 12404 - RNA, 20 nt, Artificial Sequence
  spacer sequence CTCN PAM
ucccuggacagucagaguuu

SEQ ID NO: 12405 - RNA, 20 nt, Artificial Sequence
  spacer sequence CTCN PAM
ccucccuggacagucagagu

SEQ ID NO: 12406 - RNA, 20 nt, Artificial Sequence
  spacer sequence CTCN PAM
uuuuucuuauaaacagacau

SEQ ID NO: 12407 - RNA, 20 nt, Artificial Sequence
  spacer sequence CTCN PAM
cccuggcaaagggugauuau

SEQ ID NO: 12408 - RNA, 20 nt, Artificial Sequence
  spacer sequence CTCN PAM
ucccucccccuggcaaaggg

SEQ ID NO: 12409 - RNA, 20 nt, Artificial Sequence
  spacer sequence CTCN PAM
cucuucccucccccuggcaa

SEQ ID NO: 12410 - RNA, 20 nt, Artificial Sequence
  spacer sequence CTCN PAM
uuuuuaccugaacugaaacu

SEQ ID NO: 12411 - RNA, 20 nt, Artificial Sequence
  spacer sequence CTCN PAM
ucauuccaggggccugggaa

SEQ ID NO: 12412 - RNA, 20 nt, Artificial Sequence
  spacer sequence CTCN PAM
aacacgaugaagcaacgucc

SEQ ID NO: 12413 - RNA, 20 nt, Artificial Sequence
  spacer sequence CTCN PAM
ucaaaaaaugcuuccagacg

SEQ ID NO: 12414 - RNA, 20 nt, Artificial Sequence
  spacer sequence CTCN PAM
cuuucuacucaaaguauaau

SEQ ID NO: 12415 - RNA, 20 nt, Artificial Sequence
  spacer sequence CTCN PAM
uucuacucaaaguauaauuc

SEQ ID NO: 12416 - RNA, 20 nt, Artificial Sequence
  spacer sequence CTCN PAM
aaguauaauuccuugaacau

SEQ ID NO: 12417 - RNA, 20 nt, Artificial Sequence
  spacer sequence CTCN PAM
cuaaacuuauagaauauuga

SEQ ID NO: 12418 - RNA, 20 nt, Artificial Sequence
  spacer sequence CTCN PAM
aaacuuauagaauauugaau

SEQ ID NO: 12419 - RNA, 20 nt, Artificial Sequence
  spacer sequence CTCN PAM
uauuuagagucaguucaaua

SEQ ID NO: 12420 - RNA, 20 nt, Artificial Sequence
  spacer sequence CTCN PAM
aaauaagagaacuuccuauu

SEQ ID NO: 12421 - RNA, 20 nt, Artificial Sequence
  spacer sequence CTCN PAM
aaagcaccugguauugaacu

SEQ ID NO: 12422 - RNA, 20 nt, Artificial Sequence
  spacer sequence CTCN PAM
acaugugacacaguuuucug

SEQ ID NO: 12423 - RNA, 20 nt, Artificial Sequence
  spacer sequence CTCN PAM
gcaacauggaccuuuucuug

SEQ ID NO: 12424 - RNA, 20 nt, Artificial Sequence
  spacer sequence CTCN PAM
gacccacuccgcaacaugga

SEQ ID NO: 12425 - RNA, 20 nt, Artificial Sequence
  spacer sequence CTCN PAM
ccuggacucugacccacucc

SEQ ID NO: 12426 - RNA, 20 nt, Artificial Sequence
  spacer sequence CTCN PAM
cauacaagucugacugggga

SEQ ID NO: 12427 - RNA, 20 nt, Artificial Sequence
  spacer sequence CTCN PAM
uaccuauugccaguucccca

SEQ ID NO: 12428 - RNA, 20 nt, Artificial Sequence
  spacer sequence CTCN PAM
cugaccucuuaccuauugcc

SEQ ID NO: 12429 - RNA, 20 nt, Artificial Sequence
  spacer sequence CTCN PAM
cgcuuuggggcaccucccug

SEQ ID NO: 12430 - RNA, 20 nt, Artificial Sequence
  spacer sequence CTCN PAM
ccagcaguugaaaauucucc

SEQ ID NO: 12431 - RNA, 20 nt, Artificial Sequence
  spacer sequence CTCN PAM
uuccuccccagcaguugaaa

SEQ ID NO: 12432 - RNA, 20 nt, Artificial Sequence
  spacer sequence CTCN PAM
cauuuuccauguagcaaagc

SEQ ID NO: 12433 - RNA, 20 nt, Artificial Sequence
  spacer sequence CTCN PAM
ucucacauuuuccauguagc

SEQ ID NO: 12434 - RNA, 20 nt, Artificial Sequence
  spacer sequence CTCN PAM
gaguggaaauacuggccuga

SEQ ID NO: 12435 - RNA, 20 nt, Artificial Sequence
  spacer sequence CTCN PAM
gagugcucuucucacauuuu

SEQ ID NO: 12436 - RNA, 20 nt, Artificial Sequence
  spacer sequence CTCN PAM
ggccaguauuuccacucuga

SEQ ID NO: 12437 - RNA, 20 nt, Artificial Sequence
  spacer sequence CTCN PAM
aggcucaggccaguauuucc

SEQ ID NO: 12438 - RNA, 20 nt, Artificial Sequence
  spacer sequence CTCN PAM
ugcucuaggcucaggccagu

SEQ ID NO: 12439 - RNA, 20 nt, Artificial Sequence
  spacer sequence CTCN PAM
agcaggccuggugaguuugg

SEQ ID NO: 12440 - RNA, 20 nt, Artificial Sequence
  spacer sequence CTCN PAM
ccaggccugcuugagccucu

SEQ ID NO: 12441 - RNA, 20 nt, Artificial Sequence
  spacer sequence CTCN PAM
acugugcuucagcuacauca

SEQ ID NO: 12442 - RNA, 20 nt, Artificial Sequence
  spacer sequence CTCN PAM
cuuugcagacaucuuccugu

SEQ ID NO: 12443 - RNA, 20 nt, Artificial Sequence
  spacer sequence CTCN PAM
ccagacuugccccaaccucc

SEQ ID NO: 12444 - RNA, 20 nt, Artificial Sequence
  spacer sequence CTCN PAM
aggcaaaggaaaaccauuag

SEQ ID NO: 12445 - RNA, 20 nt, Artificial Sequence
  spacer sequence CTCN PAM
aaugguuuuccuuugccuag

SEQ ID NO: 12446 - RNA, 20 nt, Artificial Sequence
  spacer sequence CTCN PAM
aaaaccucuaaugguuuucc

SEQ ID NO: 12447 - RNA, 20 nt, Artificial Sequence
  spacer sequence CTCN PAM
uuggaaaaauugaaagcugg

SEQ ID NO: 12448 - RNA, 20 nt, Artificial Sequence
  spacer sequence CTCN PAM
agcuuucaauuuuuccaaag

SEQ ID NO: 12449 - RNA, 20 nt, Artificial Sequence
  spacer sequence CTCN PAM
aaauugccuccagcuuucaa

SEQ ID NO: 12450 - RNA, 20 nt, Artificial Sequence
  spacer sequence CTCN PAM
gccauucaacuuauuuuucu

SEQ ID NO: 12451 - RNA, 20 nt, Artificial Sequence
  spacer sequence CTCN PAM
gcagacuggcaaauagaaaa

SEQ ID NO: 12452 - RNA, 20 nt, Artificial Sequence
  spacer sequence CTCN PAM
ccaggaaugaaauauucacc

SEQ ID NO: 12453 - RNA, 20 nt, Artificial Sequence
  spacer sequence CTCN PAM
uucauaauugacgaugaugc

SEQ ID NO: 12454 - RNA, 20 nt, Artificial Sequence
  spacer sequence CTCN PAM
uagaaagucuacucuuugaa

SEQ ID NO: 12455 - RNA, 20 nt, Artificial Sequence
  spacer sequence CTCN PAM
uugaaugcuucuauaauugg

SEQ ID NO: 12456 - RNA, 20 nt, Artificial Sequence
  spacer sequence CTCN PAM
aaccccuugacccaauuugc

SEQ ID NO: 12457 - RNA, 20 nt, Artificial Sequence
  spacer sequence CTCN PAM
aauuuaugaaggaaaucccu

SEQ ID NO: 12458 - RNA, 20 nt, Artificial Sequence
  spacer sequence CTCN PAM
ucuccaccucuaggaagaaa

SEQ ID NO: 12459 - RNA, 20 nt, Artificial Sequence
  spacer sequence CTCN PAM
accucuaggaagaaacacuu

SEQ ID NO: 12460 - RNA, 20 nt, Artificial Sequence
  spacer sequence CTCN PAM
aggaagaaacacuugaagau

SEQ ID NO: 12461 - RNA, 20 nt, Artificial Sequence
  spacer sequence CTCN PAM
auuuggguucauuuuuuaaa

SEQ ID NO: 12462 - RNA, 20 nt, Artificial Sequence
  spacer sequence CTCN PAM
auaucucuauuuggguucau

SEQ ID NO: 12463 - RNA, 20 nt, Artificial Sequence
  spacer sequence CTCN PAM
uucauuugauuuuagguaau

SEQ ID NO: 12464 - RNA, 20 nt, Artificial Sequence
  spacer sequence CTCN PAM
ccauccaaccgguuaacaga

SEQ ID NO: 12465 - RNA, 20 nt, Artificial Sequence
  spacer sequence CTCN PAM
agcccuguaaaaacagaauc

SEQ ID NO: 12466 - RNA, 20 nt, Artificial Sequence
  spacer sequence CTCN PAM
ccagcccuguaaaaacagaa

SEQ ID NO: 12467 - RNA, 20 nt, Artificial Sequence
  spacer sequence CTCN PAM
ugucuuacuuuucuaguucu

SEQ ID NO: 12468 - RNA, 20 nt, Artificial Sequence
  spacer sequence CTCN PAM
gcuaauauaccgaaggcccu

SEQ ID NO: 12469 - RNA, 20 nt, Artificial Sequence
  spacer sequence CTCN PAM
uguaugacaagauucagccu

SEQ ID NO: 12470 - RNA, 20 nt, Artificial Sequence
  spacer sequence CTCN PAM
uccuguaugacaagauucag

SEQ ID NO: 12471 - RNA, 20 nt, Artificial Sequence
  spacer sequence CTCN PAM
guccagggcauggagcauga

SEQ ID NO: 12472 - RNA, 20 nt, Artificial Sequence
  spacer sequence CTCN PAM
augcccuggacugagaaaca

SEQ ID NO: 12473 - RNA, 20 nt, Artificial Sequence
  spacer sequence CTCN PAM
aaacacacacacauuccagg

SEQ ID NO: 12474 - RNA, 20 nt, Artificial Sequence
  spacer sequence CTCN PAM
caccccucuaaacacacaca

SEQ ID NO: 12475 - RNA, 20 nt, Artificial Sequence
  spacer sequence CTCN PAM
acccucccaccccucuaaac

SEQ ID NO: 12476 - RNA, 20 nt, Artificial Sequence
  spacer sequence CTCN PAM
ccacccucccaccccucuaa

SEQ ID NO: 12477 - RNA, 20 nt, Artificial Sequence
  spacer sequence CTCN PAM
ugagaaugaaggcugcuuug

SEQ ID NO: 12478 - RNA, 20 nt, Artificial Sequence
  spacer sequence CTCN PAM
agagaacuggguuccgaucu

SEQ ID NO: 12479 - RNA, 20 nt, Artificial Sequence
  spacer sequence CTCN PAM
aaaauuucucuuacaggauu

SEQ ID NO: 12480 - RNA, 20 nt, Artificial Sequence
  spacer sequence CTCN PAM
uacaggauuuaguuaaaaua

SEQ ID NO: 12481 - RNA, 20 nt, Artificial Sequence
  spacer sequence CTCN PAM
cauaaauauauauuuuaacu

SEQ ID NO: 12482 - RNA, 20 nt, Artificial Sequence
  spacer sequence CTCN PAM
uaauaagaaugagcaaaaug

SEQ ID NO: 12483 - RNA, 20 nt, Artificial Sequence
  spacer sequence CTCN PAM
uucuuauuaagagauuuuau

SEQ ID NO: 12484 - RNA, 20 nt, Artificial Sequence
  spacer sequence CTCN PAM
uuggcauuuggccuugaccc

SEQ ID NO: 12485 - RNA, 20 nt, Artificial Sequence
  spacer sequence CTCN PAM
aaacaucagccuucacuuua

SEQ ID NO: 12486 - RNA, 20 nt, Artificial Sequence
  spacer sequence CTCN PAM
agggaagagauauucauaaa

SEQ ID NO: 12487 - RNA, 20 nt, Artificial Sequence
  spacer sequence CTCN PAM
gaaauauagcuauuuaugaa

SEQ ID NO: 12488 - RNA, 20 nt, Artificial Sequence
  spacer sequence CTCN PAM
gaaaauuaguuuuggucuuu

SEQ ID NO: 12489 - RNA, 20 nt, Artificial Sequence
  spacer sequence CTCN PAM
uuuaaacaacuucuaguuca

SEQ ID NO: 12490 - RNA, 20 nt, Artificial Sequence
  spacer sequence CTCN PAM
aggguauaaucacuuuuuag

SEQ ID NO: 12491 - RNA, 20 nt, Artificial Sequence
  spacer sequence CTCN PAM
aucuaagaaacaaguuuaau

SEQ ID NO: 12492 - RNA, 20 nt, Artificial Sequence
  spacer sequence CTCN PAM
aauugccauauacuguaaac

SEQ ID NO: 12493 - RNA, 20 nt, Artificial Sequence
  spacer sequence CTCN PAM
guaagcauucauuagcuuag

SEQ ID NO: 12494 - RNA, 20 nt, Artificial Sequence
  spacer sequence CTCN PAM
cguuagcuugcaauaaaaau

SEQ ID NO: 12495 - RNA, 20 nt, Artificial Sequence
  spacer sequence CTCN PAM
aagugcuuuacaggcaucaa

SEQ ID NO: 12496 - RNA, 20 nt, Artificial Sequence
  spacer sequence CTCN PAM
uuuacuuauugcaaggggaa

SEQ ID NO: 12497 - RNA, 20 nt, Artificial Sequence
  spacer sequence CTCN PAM
uagccaauuaaaaauuucaa

SEQ ID NO: 12498 - RNA, 20 nt, Artificial Sequence
  spacer sequence CTCN PAM
auuuauucaugcaaaaggaa

SEQ ID NO: 12499 - RNA, 20 nt, Artificial Sequence
  spacer sequence CTCN PAM
uuggugucuaaucuguaaua

SEQ ID NO: 12500 - RNA, 20 nt, Artificial Sequence
  spacer sequence CTCN PAM
agcacagauccacuauguuc

SEQ ID NO: 12501 - RNA, 20 nt, Artificial Sequence
  spacer sequence CTCN PAM
cuuaccuccagcacagaucc

SEQ ID NO: 12502 - RNA, 20 nt, Artificial Sequence
  spacer sequence CTCN PAM
ggaaccccuaggguaucagc

SEQ ID NO: 12503 - RNA, 20 nt, Artificial Sequence
  spacer sequence CTCN PAM
aaggcccuggauucuauucc

SEQ ID NO: 12504 - RNA, 20 nt, Artificial Sequence
  spacer sequence CTCN PAM
gguuggaauagaauccaggg

SEQ ID NO: 12505 - RNA, 20 nt, Artificial Sequence
  spacer sequence CTCN PAM
aggacauuugaauuuugcuu

SEQ ID NO: 12506 - RNA, 20 nt, Artificial Sequence
  spacer sequence CTCN PAM
ggcuuuagggcagcgguugg

SEQ ID NO: 12507 - RNA, 20 nt, Artificial Sequence
  spacer sequence CTCN PAM
acagaagaaaucacauaaac

SEQ ID NO: 12508 - RNA, 20 nt, Artificial Sequence
  spacer sequence CTCN PAM
gaaauaaggccacuuccuau

SEQ ID NO: 12509 - RNA, 20 nt, Artificial Sequence
  spacer sequence CTCN PAM
ugauaugcuguucccugaaa

SEQ ID NO: 12510 - RNA, 20 nt, Artificial Sequence
  spacer sequence CTCN PAM
ggaugguaaagucaaaauag

SEQ ID NO: 12511 - RNA, 20 nt, Artificial Sequence
  spacer sequence CTCN PAM
ugaggaacaucugaaauguu

SEQ ID NO: 12512 - RNA, 20 nt, Artificial Sequence
  spacer sequence CTCN PAM
ugagaacucuggaugguaaa

SEQ ID NO: 12513 - RNA, 20 nt, Artificial Sequence
  spacer sequence CTCN PAM
agaagccugcaacauuucag

SEQ ID NO: 12514 - RNA, 20 nt, Artificial Sequence
  spacer sequence CTCN PAM
caaagugcugggauuacagg

SEQ ID NO: 12515 - RNA, 20 nt, Artificial Sequence
  spacer sequence CTCN PAM
gccucccaaagugcugggau

SEQ ID NO: 12516 - RNA, 20 nt, Artificial Sequence
  spacer sequence CTCN PAM
cucggccucccaaagugcug

SEQ ID NO: 12517 - RNA, 20 nt, Artificial Sequence
  spacer sequence CTCN PAM
ugugacccaccucccucggc

SEQ ID NO: 12518 - RNA, 20 nt, Artificial Sequence
  spacer sequence CTCN PAM
ugaccucaugugacccaccu

SEQ ID NO: 12519 - RNA, 20 nt, Artificial Sequence
  spacer sequence CTCN PAM
cgcuacuaaaaaugcaaaaa

SEQ ID NO: 12520 - RNA, 20 nt, Artificial Sequence
  spacer sequence CTCN PAM
cuacuaaaaaugcaaaaauu

SEQ ID NO: 12521 - RNA, 20 nt, Artificial Sequence
  spacer sequence CTCN PAM
uuucacauugauuuuggcuu

SEQ ID NO: 12522 - RNA, 20 nt, Artificial Sequence
  spacer sequence CTCN PAM
uuaauauuuucuguuguuuu

SEQ ID NO: 12523 - RNA, 20 nt, Artificial Sequence
  spacer sequence CTCN PAM
aaaccagucauaaaaauuug

SEQ ID NO: 12524 - RNA, 20 nt, Artificial Sequence
  spacer sequence CTCN PAM
gaccaaauuuuuaugacugg

SEQ ID NO: 12525 - RNA, 20 nt, Artificial Sequence
  spacer sequence CTCN PAM
caaacaccaaaauaaccuga

SEQ ID NO: 12526 - RNA, 20 nt, Artificial Sequence
  spacer sequence CTCN PAM
aacaccaaaauaaccugaau

SEQ ID NO: 12527 - RNA, 20 nt, Artificial Sequence
  spacer sequence CTCN PAM
ugaaacauaaacucuccaag

SEQ ID NO: 12528 - RNA, 20 nt, Artificial Sequence
  spacer sequence CTCN PAM
ccaagaggauuucuguuuua

SEQ ID NO: 12529 - RNA, 20 nt, Artificial Sequence
  spacer sequence CTCN PAM
aagaggauuucuguuuuaca

SEQ ID NO: 12530 - RNA, 20 nt, Artificial Sequence
  spacer sequence CTCN PAM
uggagaguuuauguuucaug

SEQ ID NO: 12531 - RNA, 20 nt, Artificial Sequence
  spacer sequence CTCN PAM
uacucuuauuuaugcgaaga

SEQ ID NO: 12532 - RNA, 20 nt, Artificial Sequence
  spacer sequence CTCN PAM
uauuuaugcgaagaauggau

SEQ ID NO: 12533 - RNA, 20 nt, Artificial Sequence
  spacer sequence CTCN PAM
agggcuucuguucaaccauu

SEQ ID NO: 12534 - RNA, 20 nt, Artificial Sequence
  spacer sequence CTCN PAM
aaaguugcuuuuugaugcca

SEQ ID NO: 12535 - RNA, 20 nt, Artificial Sequence
  spacer sequence CTCN PAM
cucgaaaguugcuuuuugau

SEQ ID NO: 12536 - RNA, 20 nt, Artificial Sequence
  spacer sequence CTCN PAM
cacucgaaaguugcuuuuug

SEQ ID NO: 12537 - RNA, 20 nt, Artificial Sequence
  spacer sequence CTCN PAM
ccucucacucgaaaguugcu

SEQ ID NO: 12538 - RNA, 20 nt, Artificial Sequence
  spacer sequence CTCN PAM
auauuuugauuauuuaauuu

SEQ ID NO: 12539 - RNA, 20 nt, Artificial Sequence
  spacer sequence CTCN PAM
augucuauuuaaaugugcug

SEQ ID NO: 12540 - RNA, 20 nt, Artificial Sequence
  spacer sequence CTCN PAM
gcccgagucagucaguuacc

SEQ ID NO: 12541 - RNA, 20 nt, Artificial Sequence
  spacer sequence CTCN PAM
ggcagagggauaccacgcaa

SEQ ID NO: 12542 - RNA, 20 nt, Artificial Sequence
  spacer sequence CTCN PAM
uggcaaaagcaaagacacug

SEQ ID NO: 12543 - RNA, 20 nt, Artificial Sequence
  spacer sequence CTCN PAM
uaaaguuuaagguguuggcu

SEQ ID NO: 12544 - RNA, 20 nt, Artificial Sequence
  spacer sequence CTCN PAM
uggguuaugcugcaaucgcc

SEQ ID NO: 12545 - RNA, 20 nt, Artificial Sequence
  spacer sequence CTCN PAM
ccacuuuauucucauggguu

SEQ ID NO: 12546 - RNA, 20 nt, Artificial Sequence
  spacer sequence CTCN PAM
ggaggaaaaacucaaucuca

SEQ ID NO: 12547 - RNA, 20 nt, Artificial Sequence
  spacer sequence CTCN PAM
ggagucuccccacuuuauuc

SEQ ID NO: 12548 - RNA, 20 nt, Artificial Sequence
  spacer sequence CTCN PAM
aucucacaccuacuaaauuu

SEQ ID NO: 12549 - RNA, 20 nt, Artificial Sequence
  spacer sequence CTCN PAM
caccuacuaaauuuucauau

SEQ ID NO: 12550 - RNA, 20 nt, Artificial Sequence
  spacer sequence CTCN PAM
acacugaaauguuucaacgu

SEQ ID NO: 12551 - RNA, 20 nt, Artificial Sequence
  spacer sequence CTCN PAM
ggaagacccauacaauaauu

SEQ ID NO: 12552 - RNA, 20 nt, Artificial Sequence
  spacer sequence CTCN PAM
guuuuuucaauuauuguaug

SEQ ID NO: 12553 - RNA, 20 nt, Artificial Sequence
  spacer sequence CTCN PAM
guaauugacuugguaauccu

SEQ ID NO: 12554 - RNA, 20 nt, Artificial Sequence
  spacer sequence CTCN PAM
caguaauugacuugguaauc

SEQ ID NO: 12555 - RNA, 20 nt, Artificial Sequence
  spacer sequence CTCN PAM
cucucaguaauugacuuggu

SEQ ID NO: 12556 - RNA, 20 nt, Artificial Sequence
  spacer sequence CTCN PAM
acuauuuccuuuuuauuuuu

SEQ ID NO: 12557 - RNA, 20 nt, Artificial Sequence
  spacer sequence CTCN PAM
cagggaguuaaaauucucuc

SEQ ID NO: 12558 - RNA, 20 nt, Artificial Sequence
  spacer sequence CTCN PAM
cugggagcuguuugaauuga

SEQ ID NO: 12559 - RNA, 20 nt, Artificial Sequence
  spacer sequence CTCN PAM
cuauauggugaacagugugu

SEQ ID NO: 12560 - RNA, 20 nt, Artificial Sequence
  spacer sequence CTCN PAM
auauggugaacagugugugc

SEQ ID NO: 12561 - RNA, 20 nt, Artificial Sequence
  spacer sequence CTCN PAM
ugcaauccaggucuuaaacc

SEQ ID NO: 12562 - RNA, 20 nt, Artificial Sequence
  spacer sequence CTCN PAM
ggcuauuguuuaacauucua

SEQ ID NO: 12563 - RNA, 20 nt, Artificial Sequence
  spacer sequence CTCN PAM
cauauguagaauguuaaaca

SEQ ID NO: 12564 - RNA, 20 nt, Artificial Sequence
  spacer sequence CTCN PAM
uucuuucauucuguaucuca

SEQ ID NO: 12565 - RNA, 20 nt, Artificial Sequence
  spacer sequence CTCN PAM
aggcaaucucaagcuuuagu

SEQ ID NO: 12566 - RNA, 20 nt, Artificial Sequence
  spacer sequence CTCN PAM
agcuuuaguaguucagacag

SEQ ID NO: 12567 - RNA, 20 nt, Artificial Sequence
  spacer sequence CTCN PAM
aacugacaauuaauauuaau

SEQ ID NO: 12568 - RNA, 20 nt, Artificial Sequence
  spacer sequence CTCN PAM
cgugugauaaugccacauug

SEQ ID NO: 12569 - RNA, 20 nt, Artificial Sequence
  spacer sequence CTCN PAM
gggagaaauagaaaaccuug

SEQ ID NO: 12570 - RNA, 20 nt, Artificial Sequence
  spacer sequence CTCN PAM
cugagccaaguaaucccuuu

SEQ ID NO: 12571 - RNA, 20 nt, Artificial Sequence
  spacer sequence CTCN PAM
uuccucuuuuguuuggacgc

SEQ ID NO: 12572 - RNA, 20 nt, Artificial Sequence
  spacer sequence CTCN PAM
uuuguuuggacgcagcucua

SEQ ID NO: 12573 - RNA, 20 nt, Artificial Sequence
  spacer sequence CTCN PAM
aggugugcuuaacuauuuuc

SEQ ID NO: 12574 - RNA, 20 nt, Artificial Sequence
  spacer sequence CTCN PAM
aggggaaaagaaacaaaaac

SEQ ID NO: 12575 - RNA, 20 nt, Artificial Sequence
  spacer sequence CTCN PAM
uuuuguuuuuguuucuuuuc

SEQ ID NO: 12576 - RNA, 20 nt, Artificial Sequence
  spacer sequence CTCN PAM
agaaugccucgucaccuguc

SEQ ID NO: 12577 - RNA, 20 nt, Artificial Sequence
  spacer sequence CTCN PAM
gaugaugagugagaaguugg

SEQ ID NO: 12578 - RNA, 20 nt, Artificial Sequence
  spacer sequence CTCN PAM
ucaucagagcaaaaguugaa

SEQ ID NO: 12579 - RNA, 20 nt, Artificial Sequence
  spacer sequence CTCN PAM
cucaucaucagagcaaaagu

SEQ ID NO: 12580 - RNA, 20 nt, Artificial Sequence
  spacer sequence CTCN PAM
ugaaaaaacacuucuaauuc

SEQ ID NO: 12581 - RNA, 20 nt, Artificial Sequence
  spacer sequence CTCN PAM
uccucuuugcuuguccuuua

SEQ ID NO: 12582 - RNA, 20 nt, Artificial Sequence
  spacer sequence CTCN PAM
uugcuuguccuuuagcacaa

SEQ ID NO: 12583 - RNA, 20 nt, Artificial Sequence
  spacer sequence CTCN PAM
cccuugugcuaaaggacaag

SEQ ID NO: 12584 - RNA, 20 nt, Artificial Sequence
  spacer sequence CTCN PAM
ggcggcagcugccugguucg

SEQ ID NO: 12585 - RNA, 20 nt, Artificial Sequence
  spacer sequence CTCN PAM
gccacccggggcgcccgccg

SEQ ID NO: 12586 - RNA, 20 nt, Artificial Sequence
  spacer sequence CTCN PAM
accgccccgcgggggaggcc

SEQ ID NO: 12587 - RNA, 20 nt, Artificial Sequence
  spacer sequence CTCN PAM
cccgcggggcgguggaggcg

SEQ ID NO: 12588 - RNA, 20 nt, Artificial Sequence
  spacer sequence CTCN PAM
ggccgcacgauggcgcccgc

SEQ ID NO: 12589 - RNA, 20 nt, Artificial Sequence
  spacer sequence CTCN PAM
gggggcgcaguguccagcuc

SEQ ID NO: 12590 - RNA, 20 nt, Artificial Sequence
  spacer sequence CTCN PAM
gcgccuccgggggcgcagug

SEQ ID NO: 12591 - RNA, 20 nt, Artificial Sequence
  spacer sequence CTCN PAM
aagcuccacggggacgcugg

SEQ ID NO: 12592 - RNA, 20 nt, Artificial Sequence
  spacer sequence CTCN PAM
acggggacgcuggugucauc

SEQ ID NO: 12593 - RNA, 20 nt, Artificial Sequence
  spacer sequence CTCN PAM
agguuaaauuuguuggagua

SEQ ID NO: 12594 - RNA, 20 nt, Artificial Sequence
  spacer sequence CTCN PAM
gguaauuggaaguagcuuaa

SEQ ID NO: 12595 - RNA, 20 nt, Artificial Sequence
  spacer sequence CTCN PAM
guggcuaugccacagaauca

SEQ ID NO: 12596 - RNA, 20 nt, Artificial Sequence
  spacer sequence CTCN PAM
uuaagcaccuaaggcagccc

SEQ ID NO: 12597 - RNA, 20 nt, Artificial Sequence
  spacer sequence CTCN PAM
ccugaucauaaagaagacgu

SEQ ID NO: 12598 - RNA, 20 nt, Artificial Sequence
  spacer sequence CTCN PAM
ugaucauaaagaagacguga

SEQ ID NO: 12599 - RNA, 20 nt, Artificial Sequence
  spacer sequence CTCN PAM
agcuuuuuccauuuggcaug

SEQ ID NO: 12600 - RNA, 20 nt, Artificial Sequence
  spacer sequence CTCN PAM
aagcaggcaggugaaccagg

SEQ ID NO: 12601 - RNA, 20 nt, Artificial Sequence
  spacer sequence CTCN PAM
ccaaaucagaugcuuugcuc

SEQ ID NO: 12602 - RNA, 20 nt, Artificial Sequence
  spacer sequence CTCN PAM
ugcuccccaaaucagaugcu

SEQ ID NO: 12603 - RNA, 20 nt, Artificial Sequence
  spacer sequence CTCN PAM
ccugcuccccaaaucagaug

SEQ ID NO: 12604 - RNA, 20 nt, Artificial Sequence
  spacer sequence CTCN PAM
ccugcucuccugcuccccaa

SEQ ID NO: 12605 - RNA, 20 nt, Artificial Sequence
  spacer sequence CTCN PAM
ccccugcucuccugcucccc

SEQ ID NO: 12606 - RNA, 20 nt, Artificial Sequence
  spacer sequence CTCN PAM
cuccccugcucuccugcucc

SEQ ID NO: 12607 - RNA, 20 nt, Artificial Sequence
  spacer sequence CTCN PAM
cucuccccugcucuccugcu

SEQ ID NO: 12608 - RNA, 20 nt, Artificial Sequence
  spacer sequence CTCN PAM
auaagcucucucuccccugc

SEQ ID NO: 12609 - RNA, 20 nt, Artificial Sequence
  spacer sequence CTCN PAM
ugccucagcugaggcuuauu

SEQ ID NO: 12610 - RNA, 20 nt, Artificial Sequence
  spacer sequence CTCN PAM
gcugaggcuuauuggccgug

SEQ ID NO: 12611 - RNA, 20 nt, Artificial Sequence
  spacer sequence CTCN PAM
gcugaggcaagaggcaucua

SEQ ID NO: 12612 - RNA, 20 nt, Artificial Sequence
  spacer sequence CTCN PAM
ugacacggccaauaagccuc

SEQ ID NO: 12613 - RNA, 20 nt, Artificial Sequence
  spacer sequence CTCN PAM
aguuccuuaacuacccccua

SEQ ID NO: 12614 - RNA, 20 nt, Artificial Sequence
  spacer sequence CTCN PAM
ccccucaaaagagaagauug

SEQ ID NO: 12615 - RNA, 20 nt, Artificial Sequence
  spacer sequence CTCN PAM
ccucaaaagagaagauuggc

SEQ ID NO: 12616 - RNA, 20 nt, Artificial Sequence
  spacer sequence CTCN PAM
aaagagaagauuggcgccau

SEQ ID NO: 12617 - RNA, 20 nt, Artificial Sequence
  spacer sequence CTCN PAM
uuugaggggagagaagggaa

SEQ ID NO: 12618 - RNA, 20 nt, Artificial Sequence
  spacer sequence CTCN PAM
uugaggaagacuuuggccuc

SEQ ID NO: 12619 - RNA, 20 nt, Artificial Sequence
  spacer sequence CTCN PAM
aggagccaauggcgccaauc

SEQ ID NO: 12620 - RNA, 20 nt, Artificial Sequence
  spacer sequence CTCN PAM
augugcaugugugugugugu

SEQ ID NO: 12621 - RNA, 20 nt, Artificial Sequence
  spacer sequence CTCN PAM
cgauggggauccaugaagcu

SEQ ID NO: 12622 - RNA, 20 nt, Artificial Sequence
  spacer sequence CTCN PAM
auggggauccaugaagcuuc

SEQ ID NO: 12623 - RNA, 20 nt, Artificial Sequence
  spacer sequence CTCN PAM
gccuugccuugggcuccccu

SEQ ID NO: 12624 - RNA, 20 nt, Artificial Sequence
  spacer sequence CTCN PAM
ccuugggcuccccuugggcu

SEQ ID NO: 12625 - RNA, 20 nt, Artificial Sequence
  spacer sequence CTCN PAM
ccuugggcuccuggcucacg

SEQ ID NO: 12626 - RNA, 20 nt, Artificial Sequence
  spacer sequence CTCN PAM
uggcucacgggagacagagg

SEQ ID NO: 12627 - RNA, 20 nt, Artificial Sequence
  spacer sequence CTCN PAM
cgggagacagagguugguga

SEQ ID NO: 12628 - RNA, 20 nt, Artificial Sequence
  spacer sequence CTCN PAM
cgugagccaggagcccaagg

SEQ ID NO: 12629 - RNA, 20 nt, Artificial Sequence
  spacer sequence CTCN PAM
gucucccgugagccaggagc

SEQ ID NO: 12630 - RNA, 20 nt, Artificial Sequence
  spacer sequence CTCN PAM
ccaaccucugucucccguga

SEQ ID NO: 12631 - RNA, 20 nt, Artificial Sequence
  spacer sequence CTCN PAM
augcacuucacaauuaauuc

SEQ ID NO: 12632 - RNA, 20 nt, Artificial Sequence
  spacer sequence CTCN PAM
caaugcacuucacaauuaau

SEQ ID NO: 12633 - RNA, 20 nt, Artificial Sequence
  spacer sequence CTCN PAM
gccgcgggacugguuuucau

SEQ ID NO: 12634 - RNA, 20 nt, Artificial Sequence
  spacer sequence CTCN PAM
ccgccgcgggacugguuuuc

SEQ ID NO: 12635 - RNA, 20 nt, Artificial Sequence
  spacer sequence CTCN PAM
uaggauaugacuguggcagc

SEQ ID NO: 12636 - RNA, 20 nt, Artificial Sequence
  spacer sequence CTCN PAM
gggguuugggcugccacagu

SEQ ID NO: 12637 - RNA, 20 nt, Artificial Sequence
  spacer sequence CTCN PAM
ccucugggguuugggcugcc

SEQ ID NO: 12638 - RNA, 20 nt, Artificial Sequence
  spacer sequence CTCN PAM
aggcugauagauuuucagag

SEQ ID NO: 12639 - RNA, 20 nt, Artificial Sequence
  spacer sequence CTCN PAM
gaaaaucuaucagccuugag

SEQ ID NO: 12640 - RNA, 20 nt, Artificial Sequence
  spacer sequence CTCN PAM
agucuccggcuucccuuccc

SEQ ID NO: 12641 - RNA, 20 nt, Artificial Sequence
  spacer sequence CTCN PAM
ggcuucccuucccuccaggg

SEQ ID NO: 12642 - RNA, 20 nt, Artificial Sequence
  spacer sequence CTCN PAM
agggcgggggugagcaaggc

SEQ ID NO: 12643 - RNA, 20 nt, Artificial Sequence
  spacer sequence CTCN PAM
cccccgcccuggagggaagg

SEQ ID NO: 12644 - RNA, 20 nt, Artificial Sequence
  spacer sequence CTCN PAM
gccuugcucacccccgcccu

SEQ ID NO: 12645 - RNA, 20 nt, Artificial Sequence
  spacer sequence CTCN PAM
ccagcccacgacccacucug

SEQ ID NO: 12646 - RNA, 20 nt, Artificial Sequence
  spacer sequence CTCN PAM
caucagcagccuuuggaagg

SEQ ID NO: 12647 - RNA, 20 nt, Artificial Sequence
  spacer sequence CTCN PAM
agaacguggggucagccuuc

SEQ ID NO: 12648 - RNA, 20 nt, Artificial Sequence
  spacer sequence CTCN PAM
caagaacguggggucagccu

SEQ ID NO: 12649 - RNA, 20 nt, Artificial Sequence
  spacer sequence CTCN PAM
cuucacuguucucuucccug

SEQ ID NO: 12650 - RNA, 20 nt, Artificial Sequence
  spacer sequence CTCN PAM
ucccugucugaaauggcagg

SEQ ID NO: 12651 - RNA, 20 nt, Artificial Sequence
  spacer sequence CTCN PAM
uaggucaccugccauuucag

SEQ ID NO: 12652 - RNA, 20 nt, Artificial Sequence
  spacer sequence CTCN PAM
cucuuaggucaccugccauu

SEQ ID NO: 12653 - RNA, 20 nt, Artificial Sequence
  spacer sequence CTCN PAM
aaaucaauuugcacaccgcu

SEQ ID NO: 12654 - RNA, 20 nt, Artificial Sequence
  spacer sequence CTCN PAM
gggcgcggccccggcucgcu

SEQ ID NO: 12655 - RNA, 20 nt, Artificial Sequence
  spacer sequence CTCN PAM
cugccgugucacugauccuc

SEQ ID NO: 12656 - RNA, 20 nt, Artificial Sequence
  spacer sequence CTCN PAM
ccaaaucgauucacacacca

SEQ ID NO: 12657 - RNA, 20 nt, Artificial Sequence
  spacer sequence CTCN PAM
aaaucgauucacacaccauu

SEQ ID NO: 12658 - RNA, 20 nt, Artificial Sequence
  spacer sequence CTCN PAM
ucagcacaccugccauguca

SEQ ID NO: 12659 - RNA, 20 nt, Artificial Sequence
  spacer sequence CTCN PAM
gcacaccugccaugucagau

SEQ ID NO: 12660 - RNA, 20 nt, Artificial Sequence
  spacer sequence CTCN PAM
aucugacauggcaggugugc

SEQ ID NO: 12661 - RNA, 20 nt, Artificial Sequence
  spacer sequence CTCN PAM
ccaucugacauggcaggugu

SEQ ID NO: 12662 - RNA, 20 nt, Artificial Sequence
  spacer sequence CTCN PAM
cuucaugcgucccucuccau

SEQ ID NO: 12663 - RNA, 20 nt, Artificial Sequence
  spacer sequence CTCN PAM
gccgcugccgccucuccucg

SEQ ID NO: 12664 - RNA, 20 nt, Artificial Sequence
  spacer sequence CTCN PAM
ccucgucccagcuccccacc

SEQ ID NO: 12665 - RNA, 20 nt, Artificial Sequence
  spacer sequence CTCN PAM
ucgucccagcuccccaccac

SEQ ID NO: 12666 - RNA, 20 nt, Artificial Sequence
  spacer sequence CTCN PAM
ucccagcuccccaccacguu

SEQ ID NO: 12667 - RNA, 20 nt, Artificial Sequence
  spacer sequence CTCN PAM
guguauucgccuucuggugu

SEQ ID NO: 12668 - RNA, 20 nt, Artificial Sequence
  spacer sequence CTCN PAM
augaaggaagcagugcauuu

SEQ ID NO: 12669 - RNA, 20 nt, Artificial Sequence
  spacer sequence CTCN PAM
gacuccuugccucucucuua

SEQ ID NO: 12670 - RNA, 20 nt, Artificial Sequence
  spacer sequence CTCN PAM
gaauugugcuucugucauca

SEQ ID NO: 12671 - RNA, 20 nt, Artificial Sequence
  spacer sequence CTCN PAM
cugaauugugcuucugucau

SEQ ID NO: 12672 - RNA, 20 nt, Artificial Sequence
  spacer sequence CTCN PAM
gacucucugaauugugcuuc

SEQ ID NO: 12673 - RNA, 20 nt, Artificial Sequence
  spacer sequence CTCN PAM
cugacucucugaauugugcu

SEQ ID NO: 12674 - RNA, 20 nt, Artificial Sequence
  spacer sequence CTCN PAM
cucugacucucugaauugug

SEQ ID NO: 12675 - RNA, 20 nt, Artificial Sequence
  spacer sequence CTCN PAM
gaagaguccacaaacaaagc

SEQ ID NO: 12676 - RNA, 20 nt, Artificial Sequence
  spacer sequence CTCN PAM
uuauaccaaugcagcuguaa

SEQ ID NO: 12677 - RNA, 20 nt, Artificial Sequence
  spacer sequence CTCN PAM
agauuagagguguuuccuau

SEQ ID NO: 12678 - RNA, 20 nt, Artificial Sequence
  spacer sequence CTCN PAM
aaucuugagggaaaccauuu

SEQ ID NO: 12679 - RNA, 20 nt, Artificial Sequence
  spacer sequence CTCN PAM
guuauaaauaggaaacaccu

SEQ ID NO: 12680 - RNA, 20 nt, Artificial Sequence
  spacer sequence CTCN PAM
cuggaagauuucuggaugac

SEQ ID NO: 12681 - RNA, 20 nt, Artificial Sequence
  spacer sequence CTCN PAM
ugagccacugaaaucaagau

SEQ ID NO: 12682 - RNA, 20 nt, Artificial Sequence
  spacer sequence CTCN PAM
agagcagacaaaagcaggau

SEQ ID NO: 12683 - RNA, 20 nt, Artificial Sequence
  spacer sequence CTCN PAM
gccuguggaagaaucuugau

SEQ ID NO: 12684 - RNA, 20 nt, Artificial Sequence
  spacer sequence CTCN PAM
cagcaaacucuuugacuuac

SEQ ID NO: 12685 - RNA, 20 nt, Artificial Sequence
  spacer sequence CTCN PAM
gcaaacucuuugacuuacug

SEQ ID NO: 12686 - RNA, 20 nt, Artificial Sequence
  spacer sequence CTCN PAM
uugacuuacuguccagguuc

SEQ ID NO: 12687 - RNA, 20 nt, Artificial Sequence
  spacer sequence CTCN PAM
gccaacagcaaauaagugag

SEQ ID NO: 12688 - RNA, 20 nt, Artificial Sequence
  spacer sequence CTCN PAM
cuuauuugcuguuggcagag

SEQ ID NO: 12689 - RNA, 20 nt, Artificial Sequence
  spacer sequence CTCN PAM
uuggaagcauucucacuuau

SEQ ID NO: 12690 - RNA, 20 nt, Artificial Sequence
  spacer sequence CTCN PAM
ucucauuuguaaaagggagu

SEQ ID NO: 12691 - RNA, 20 nt, Artificial Sequence
  spacer sequence CTCN PAM
uuuguaaaagggagugucag

SEQ ID NO: 12692 - RNA, 20 nt, Artificial Sequence
  spacer sequence CTCN PAM
cuuuuacaaaugagaagaga

SEQ ID NO: 12693 - RNA, 20 nt, Artificial Sequence
  spacer sequence CTCN PAM
uaugcauagcuaagaauagc

SEQ ID NO: 12694 - RNA, 20 nt, Artificial Sequence
  spacer sequence CTCN PAM
cagucuccuaugcauagcua

SEQ ID NO: 12695 - RNA, 20 nt, Artificial Sequence
  spacer sequence CTCN PAM
cuguggguuguggguagaug

SEQ ID NO: 12696 - RNA, 20 nt, Artificial Sequence
  spacer sequence CTCN PAM
guggguuguggguagauggu

SEQ ID NO: 12697 - RNA, 20 nt, Artificial Sequence
  spacer sequence CTCN PAM
ugcaaauguuuaaagaugaa

SEQ ID NO: 12698 - RNA, 20 nt, Artificial Sequence
  spacer sequence CTCN PAM
cagauauuauugcugaucug

SEQ ID NO: 12699 - RNA, 20 nt, Artificial Sequence
  spacer sequence CTCN PAM
uuucacuggugugaagcagc

SEQ ID NO: 12700 - RNA, 20 nt, Artificial Sequence
  spacer sequence CTCN PAM
ugcuuggaaugcccuuuccu

SEQ ID NO: 12701 - RNA, 20 nt, Artificial Sequence
  spacer sequence CTCN PAM
ggaccucacuuggcucccuc

SEQ ID NO: 12702 - RNA, 20 nt, Artificial Sequence
  spacer sequence CTCN PAM
cuuggcucccuccucacugu

SEQ ID NO: 12703 - RNA, 20 nt, Artificial Sequence
  spacer sequence CTCN PAM
cuccucacuguuuagaccuc

SEQ ID NO: 12704 - RNA, 20 nt, Artificial Sequence
  spacer sequence CTCN PAM
ucacuguuuagaccucaacu

SEQ ID NO: 12705 - RNA, 20 nt, Artificial Sequence
  spacer sequence CTCN PAM
cuguuuagaccucaacuuaa

SEQ ID NO: 12706 - RNA, 20 nt, Artificial Sequence
  spacer sequence CTCN PAM
acuuaaaugucaccuccaca

SEQ ID NO: 12707 - RNA, 20 nt, Artificial Sequence
  spacer sequence CTCN PAM
agaaguaagaaaguguucuu

SEQ ID NO: 12708 - RNA, 20 nt, Artificial Sequence
  spacer sequence CTCN PAM
gcagugaagucaucaggucc

SEQ ID NO: 12709 - RNA, 20 nt, Artificial Sequence
  spacer sequence CTCN PAM
aacucuucagaaaaauugaa

SEQ ID NO: 12710 - RNA, 20 nt, Artificial Sequence
  spacer sequence CTCN PAM
ucagaaaaauugaagagaag

SEQ ID NO: 12711 - RNA, 20 nt, Artificial Sequence
  spacer sequence CTCN PAM
ggccaagacuuccaguauua

SEQ ID NO: 12712 - RNA, 20 nt, Artificial Sequence
  spacer sequence CTCN PAM
ugccuaauugcucuggccaa

SEQ ID NO: 12713 - RNA, 20 nt, Artificial Sequence
  spacer sequence CTCN PAM
accaaaaaauuguuagaacu

SEQ ID NO: 12714 - RNA, 20 nt, Artificial Sequence
  spacer sequence CTCN PAM
guagacacuucucaaaauaa

SEQ ID NO: 12715 - RNA, 20 nt, Artificial Sequence
  spacer sequence CTCN PAM
aaauaauauauacaaauggc

SEQ ID NO: 12716 - RNA, 20 nt, Artificial Sequence
  spacer sequence CTCN PAM
ucaucauaaucagagaaaug

SEQ ID NO: 12717 - RNA, 20 nt, Artificial Sequence
  spacer sequence CTCN PAM
gauuaugaugaugagugaua

SEQ ID NO: 12718 - RNA, 20 nt, Artificial Sequence
  spacer sequence CTCN PAM
uuaugguuuugauuugcauu

SEQ ID NO: 12719 - RNA, 20 nt, Artificial Sequence
  spacer sequence CTCN PAM
auauccuagccagcauccau

SEQ ID NO: 12720 - RNA, 20 nt, Artificial Sequence
  spacer sequence CTCN PAM
aaaggguggccuagccauca

SEQ ID NO: 12721 - RNA, 20 nt, Artificial Sequence
  spacer sequence CTCN PAM
ccuguaaugccacuaguguu

SEQ ID NO: 12722 - RNA, 20 nt, Artificial Sequence
  spacer sequence CTCN PAM
guugccuuuuuauaaaccua

SEQ ID NO: 12723 - RNA, 20 nt, Artificial Sequence
  spacer sequence CTCN PAM
acccuccguugccuuuuuau

SEQ ID NO: 12724 - RNA, 20 nt, Artificial Sequence
  spacer sequence CTCN PAM
ccacccuccguugccuuuuu

SEQ ID NO: 12725 - RNA, 20 nt, Artificial Sequence
  spacer sequence CTCN PAM
cucuccacccuccguugccu

SEQ ID NO: 12726 - RNA, 20 nt, Artificial Sequence
  spacer sequence CTCN PAM
aggcaaaagcaccauuaugg

SEQ ID NO: 12727 - RNA, 20 nt, Artificial Sequence
  spacer sequence CTCN PAM
auaauggugcuuuugccuug

SEQ ID NO: 12728 - RNA, 20 nt, Artificial Sequence
  spacer sequence CTCN PAM
ccauaauggugcuuuugccu

SEQ ID NO: 12729 - RNA, 20 nt, Artificial Sequence
  spacer sequence CTCN PAM
uagccuugucugaaauguug

SEQ ID NO: 12730 - RNA, 20 nt, Artificial Sequence
  spacer sequence CTCN PAM
aaguucuucaaaaugcaauu

SEQ ID NO: 12731 - RNA, 20 nt, Artificial Sequence
  spacer sequence CTCN PAM
cccuucacccccgccccaac

SEQ ID NO: 12732 - RNA, 20 nt, Artificial Sequence
  spacer sequence CTCN PAM
uacucuauuuugggaacccu

SEQ ID NO: 12733 - RNA, 20 nt, Artificial Sequence
  spacer sequence CTCN PAM
auuuugggaacccucuuuuc

SEQ ID NO: 12734 - RNA, 20 nt, Artificial Sequence
  spacer sequence CTCN PAM
uuucguaaagaaccaggucu

SEQ ID NO: 12735 - RNA, 20 nt, Artificial Sequence
  spacer sequence CTCN PAM
gagacacagcuguggaucug

SEQ ID NO: 12736 - RNA, 20 nt, Artificial Sequence
  spacer sequence CTCN PAM
gagaccugguucuuuacgaa

SEQ ID NO: 12737 - RNA, 20 nt, Artificial Sequence
  spacer sequence CTCN PAM
ugccuuugacaucugagcaa

SEQ ID NO: 12738 - RNA, 20 nt, Artificial Sequence
  spacer sequence CTCN PAM
gaugucaaaggcaugagggg

SEQ ID NO: 12739 - RNA, 20 nt, Artificial Sequence
  spacer sequence CTCN PAM
ugcucagaugucaaaggcau

SEQ ID NO: 12740 - RNA, 20 nt, Artificial Sequence
  spacer sequence CTCN PAM
aauaucucuugcucagaugu

SEQ ID NO: 12741 - RNA, 20 nt, Artificial Sequence
  spacer sequence CTCN PAM
accacaaugaagauccacuu

SEQ ID NO: 12742 - RNA, 20 nt, Artificial Sequence
  spacer sequence CTCN PAM
gcccaccuguccacagagac

SEQ ID NO: 12743 - RNA, 20 nt, Artificial Sequence
  spacer sequence CTCN PAM
ccugucacaaaaagauaugg

SEQ ID NO: 12744 - RNA, 20 nt, Artificial Sequence
  spacer sequence CTCN PAM
augacuccccugucacaaaa

SEQ ID NO: 12745 - RNA, 20 nt, Artificial Sequence
  spacer sequence CTCN PAM
ucacuugcucugaaauuuau

SEQ ID NO: 12746 - RNA, 20 nt, Artificial Sequence
  spacer sequence CTCN PAM
gaaauuuaucugaagucaaa

SEQ ID NO: 12747 - RNA, 20 nt, Artificial Sequence
  spacer sequence CTCN PAM
uuuugacuucagauaaauuu

SEQ ID NO: 12748 - RNA, 20 nt, Artificial Sequence
  spacer sequence CTCN PAM
aagaaggucuaugugaccua

SEQ ID NO: 12749 - RNA, 20 nt, Artificial Sequence
  spacer sequence CTCN PAM
accaaaaugacuaugugcaa

SEQ ID NO: 12750 - RNA, 20 nt, Artificial Sequence
  spacer sequence CTCN PAM
augcaugauuacuugcacau

SEQ ID NO: 12751 - RNA, 20 nt, Artificial Sequence
  spacer sequence CTCN PAM
uuguccuuuucuuucuccau

SEQ ID NO: 12752 - RNA, 20 nt, Artificial Sequence
  spacer sequence CTCN PAM
uguguuucuguaaccaagcc

SEQ ID NO: 12753 - RNA, 20 nt, Artificial Sequence
  spacer sequence CTCN PAM
agaaccucagaaugugaccu

SEQ ID NO: 12754 - RNA, 20 nt, Artificial Sequence
  spacer sequence CTCN PAM
gaaugugaccuuauuuggaa

SEQ ID NO: 12755 - RNA, 20 nt, Artificial Sequence
  spacer sequence CTCN PAM
gcuaguuucuggagaugugc

SEQ ID NO: 12756 - RNA, 20 nt, Artificial Sequence
  spacer sequence CTCN PAM
cugcuaguuucuggagaugu

SEQ ID NO: 12757 - RNA, 20 nt, Artificial Sequence
  spacer sequence CTCN PAM
ucaaacucucugcuaguuuc

SEQ ID NO: 12758 - RNA, 20 nt, Artificial Sequence
  spacer sequence CTCN PAM
gaaggaaccagcccugcuga

SEQ ID NO: 12759 - RNA, 20 nt, Artificial Sequence
  spacer sequence CTCN PAM
uacaacaaagaauuaucaga

SEQ ID NO: 12760 - RNA, 20 nt, Artificial Sequence
  spacer sequence CTCN PAM
aaaugugaauaguuugaaga

SEQ ID NO: 12761 - RNA, 20 nt, Artificial Sequence
  spacer sequence CTCN PAM
gucuucaaacuauucacauu

SEQ ID NO: 12762 - RNA, 20 nt, Artificial Sequence
  spacer sequence CTCN PAM
gagggcguaagcaauucaca

SEQ ID NO: 12763 - RNA, 20 nt, Artificial Sequence
  spacer sequence CTCN PAM
gagcuuccauuucuguaccu

SEQ ID NO: 12764 - RNA, 20 nt, Artificial Sequence
  spacer sequence CTCN PAM
aagaaaauuagggcaaaacu

SEQ ID NO: 12765 - RNA, 20 nt, Artificial Sequence
  spacer sequence CTCN PAM
aguuuugcccuaauuuucuu

SEQ ID NO: 12766 - RNA, 20 nt, Artificial Sequence
  spacer sequence CTCN PAM
aggaucauguauaggagcau

SEQ ID NO: 12767 - RNA, 20 nt, Artificial Sequence
  spacer sequence CTCN PAM
uauacaugauccuugagcac

SEQ ID NO: 12768 - RNA, 20 nt, Artificial Sequence
  spacer sequence CTCN PAM
ggaaggcuuccaguuuuccu

SEQ ID NO: 12769 - RNA, 20 nt, Artificial Sequence
  spacer sequence CTCN PAM
uaugcauugcggauaugccu

SEQ ID NO: 12770 - RNA, 20 nt, Artificial Sequence
  spacer sequence CTCN PAM
cuggguuuuuuuuuguuguu

SEQ ID NO: 12771 - RNA, 20 nt, Artificial Sequence
  spacer sequence CTCN PAM
cagcacccugugcucagaag

SEQ ID NO: 12772 - RNA, 20 nt, Artificial Sequence
  spacer sequence CTCN PAM
gaagggaaccccgggcuagg

SEQ ID NO: 12773 - RNA, 20 nt, Artificial Sequence
  spacer sequence CTCN PAM
guggucaccaucuucaaaau

SEQ ID NO: 12774 - RNA, 20 nt, Artificial Sequence
  spacer sequence CTCN PAM
ugaccuauuguaguuucuuu

SEQ ID NO: 12775 - RNA, 20 nt, Artificial Sequence
  spacer sequence CTCN PAM
cuugaccuauuguaguuucu

SEQ ID NO: 12776 - RNA, 20 nt, Artificial Sequence
  spacer sequence CTCN PAM
cucuugaccuauuguaguuu

SEQ ID NO: 12777 - RNA, 20 nt, Artificial Sequence
  spacer sequence CTCN PAM
cucucucuugaccuauugua

SEQ ID NO: 12778 - RNA, 20 nt, Artificial Sequence
  spacer sequence CTCN PAM
uuuuaugccaguuagcagga

SEQ ID NO: 12779 - RNA, 20 nt, Artificial Sequence
  spacer sequence CTCN PAM
guucuuucagcuccuuuuau

SEQ ID NO: 12780 - RNA, 20 nt, Artificial Sequence
  spacer sequence CTCN PAM
aggaaacuuucugcuucuca

SEQ ID NO: 12781 - RNA, 20 nt, Artificial Sequence
  spacer sequence CTCN PAM
cagacacagggauaaaauga

SEQ ID NO: 12782 - RNA, 20 nt, Artificial Sequence
  spacer sequence CTCN PAM
aagaucugaaaucaggaaau

SEQ ID NO: 12783 - RNA, 20 nt, Artificial Sequence
  spacer sequence CTCN PAM
uauucucuaagaucugaaau

SEQ ID NO: 12784 - RNA, 20 nt, Artificial Sequence
  spacer sequence CTCN PAM
gcccuccuauucucuaagau

SEQ ID NO: 12785 - RNA, 20 nt, Artificial Sequence
  spacer sequence CTCN PAM
cuaaggcagguuggggcccu

SEQ ID NO: 12786 - RNA, 20 nt, Artificial Sequence
  spacer sequence CTCN PAM
gagagcaucucuucugagca

SEQ ID NO: 12787 - RNA, 20 nt, Artificial Sequence
  spacer sequence CTCN PAM
gagaagccuucgcugcccuc

SEQ ID NO: 12788 - RNA, 20 nt, Artificial Sequence
  spacer sequence CTCN PAM
cggagaagccuucgcugccc

SEQ ID NO: 12789 - RNA, 20 nt, Artificial Sequence
  spacer sequence CTCN PAM
ucugagcagaguccugagcg

SEQ ID NO: 12790 - RNA, 20 nt, Artificial Sequence
  spacer sequence CTCN PAM
gaagagaugcucucggagaa

SEQ ID NO: 12791 - RNA, 20 nt, Artificial Sequence
  spacer sequence CTCN PAM
gcucagaagagaugcucucg

SEQ ID NO: 12792 - RNA, 20 nt, Artificial Sequence
  spacer sequence CTCN PAM
ggacucugcucagaagagau

SEQ ID NO: 12793 - RNA, 20 nt, Artificial Sequence
  spacer sequence CTCN PAM
cucaggacucugcucagaag

SEQ ID NO: 12794 - RNA, 20 nt, Artificial Sequence
  spacer sequence CTCN PAM
gaaugguccucgcucaggac

SEQ ID NO: 12795 - RNA, 20 nt, Artificial Sequence
  spacer sequence CTCN PAM
guuuucuuccucugaauggu

SEQ ID NO: 12796 - RNA, 20 nt, Artificial Sequence
  spacer sequence CTCN PAM
uuggaauaacagcuccguuu

SEQ ID NO: 12797 - RNA, 20 nt, Artificial Sequence
  spacer sequence CTCN PAM
gccuccuuggaauaacagcu

SEQ ID NO: 12798 - RNA, 20 nt, Artificial Sequence
  spacer sequence CTCN PAM
cugccuccuuggaauaacag

SEQ ID NO: 12799 - RNA, 20 nt, Artificial Sequence
  spacer sequence CTCN PAM
agcuacuuggaaugauuugc

SEQ ID NO: 12800 - RNA, 20 nt, Artificial Sequence
  spacer sequence CTCN PAM
ucccuguacuccagcuacuu

SEQ ID NO: 12801 - RNA, 20 nt, Artificial Sequence
  spacer sequence CTCN PAM
ucuucccuguacuccagcua

SEQ ID NO: 12802 - RNA, 20 nt, Artificial Sequence
  spacer sequence CTCN PAM
gagaaggaggcccacaucac

SEQ ID NO: 12803 - RNA, 20 nt, Artificial Sequence
  spacer sequence CTCN PAM
gagugcuccucuucccugua

SEQ ID NO: 12804 - RNA, 20 nt, Artificial Sequence
  spacer sequence CTCN PAM
uucucugagugcuccucuuc

SEQ ID NO: 12805 - RNA, 20 nt, Artificial Sequence
  spacer sequence CTCN PAM
uugguucagguccuuguugc

SEQ ID NO: 12806 - RNA, 20 nt, Artificial Sequence
  spacer sequence CTCN PAM
auuccaacugccaccuccuu

SEQ ID NO: 12807 - RNA, 20 nt, Artificial Sequence
  spacer sequence CTCN PAM
ccauuccaacugccaccucc

SEQ ID NO: 12808 - RNA, 20 nt, Artificial Sequence
  spacer sequence CTCN PAM
aggucacccaacuggggguc

SEQ ID NO: 12809 - RNA, 20 nt, Artificial Sequence
  spacer sequence CTCN PAM
caaggucacccaacuggggg

SEQ ID NO: 12810 - RNA, 20 nt, Artificial Sequence
  spacer sequence CTCN PAM
uggaauaaauucaugggaua

SEQ ID NO: 12811 - RNA, 20 nt, Artificial Sequence
  spacer sequence CTCN PAM
augaucauguucugcuauug

SEQ ID NO: 12812 - RNA, 20 nt, Artificial Sequence
  spacer sequence CTCN PAM
ucuugaaagugggauagacc

SEQ ID NO: 12813 - RNA, 20 nt, Artificial Sequence
  spacer sequence CTCN PAM
ugaaagugggauagaccuag

SEQ ID NO: 12814 - RNA, 20 nt, Artificial Sequence
  spacer sequence CTCN PAM
aaugaauagaauauggcaaa

SEQ ID NO: 12815 - RNA, 20 nt, Artificial Sequence
  spacer sequence CTCN PAM
uaaccuuugccauauucuau

SEQ ID NO: 12816 - RNA, 20 nt, Artificial Sequence
  spacer sequence CTCN PAM
gaagaaacgucucauaaccu

SEQ ID NO: 12817 - RNA, 20 nt, Artificial Sequence
  spacer sequence CTCN PAM
aagcuacagcauuuaucauc

SEQ ID NO: 12818 - RNA, 20 nt, Artificial Sequence
  spacer sequence CTCN PAM
ucaguacaauaagcaagaua

SEQ ID NO: 12819 - RNA, 20 nt, Artificial Sequence
  spacer sequence CTCN PAM
uauuccuugugacuauaacc

SEQ ID NO: 12820 - RNA, 20 nt, Artificial Sequence
  spacer sequence CTCN PAM
aaauguacuugaaauuuuuc

SEQ ID NO: 12821 - RNA, 20 nt, Artificial Sequence
  spacer sequence CTCN PAM
agaaguucuccaaauguacu

SEQ ID NO: 12822 - RNA, 20 nt, Artificial Sequence
  spacer sequence CTCN PAM
acaaaaacaaauagauaaau

SEQ ID NO: 12823 - RNA, 20 nt, Artificial Sequence
  spacer sequence CTCN PAM
acugaaaaagaaagacaaaa

SEQ ID NO: 12824 - RNA, 20 nt, Artificial Sequence
  spacer sequence CTCN PAM
ugagcucaggugaccugccc

SEQ ID NO: 12825 - RNA, 20 nt, Artificial Sequence
  spacer sequence CTCN PAM
ggaguuccggaccagugugg

SEQ ID NO: 12826 - RNA, 20 nt, Artificial Sequence
  spacer sequence CTCN PAM
ggugaccugcccaccucaga

SEQ ID NO: 12827 - RNA, 20 nt, Artificial Sequence
  spacer sequence CTCN PAM
gacucccaaagugcugggau

SEQ ID NO: 12828 - RNA, 20 nt, Artificial Sequence
  spacer sequence CTCN PAM
caaagugcugggauuacagg

SEQ ID NO: 12829 - RNA, 20 nt, Artificial Sequence
  spacer sequence CTCN PAM
ugccuguaaucccagcacuu

SEQ ID NO: 12830 - RNA, 20 nt, Artificial Sequence
  spacer sequence CTCN PAM
aggccaggcaugcuggcuca

SEQ ID NO: 12831 - RNA, 20 nt, Artificial Sequence
  spacer sequence CTCN PAM
uuuauaaacaauaguugucu

SEQ ID NO: 12832 - RNA, 20 nt, Artificial Sequence
  spacer sequence CTCN PAM
acuuacaacacuuugacaua

SEQ ID NO: 12833 - RNA, 20 nt, Artificial Sequence
  spacer sequence CTCN PAM
uuguaugacugucucuccau

SEQ ID NO: 12834 - RNA, 20 nt, Artificial Sequence
  spacer sequence CTCN PAM
ccauuaagcuagaagaucuu

SEQ ID NO: 12835 - RNA, 20 nt, Artificial Sequence
  spacer sequence CTCN PAM
auuaagcuagaagaucuugg

SEQ ID NO: 12836 - RNA, 20 nt, Artificial Sequence
  spacer sequence CTCN PAM
ucuauucaacuuugcagccc

SEQ ID NO: 12837 - RNA, 20 nt, Artificial Sequence
  spacer sequence CTCN PAM
auucaacuuugcagcccuaa

SEQ ID NO: 12838 - RNA, 20 nt, Artificial Sequence
  spacer sequence CTCN PAM
uucaacaaacacuuggucac

SEQ ID NO: 12839 - RNA, 20 nt, Artificial Sequence
  spacer sequence CTCN PAM
aaaucucuaucaaacuuuug

SEQ ID NO: 12840 - RNA, 20 nt, Artificial Sequence
  spacer sequence CTCN PAM
aucaaacuuuuguuugauua

SEQ ID NO: 12841 - RNA, 20 nt, Artificial Sequence
  spacer sequence CTCN PAM
caagaggaauuuggauauua

SEQ ID NO: 12842 - RNA, 20 nt, Artificial Sequence
  spacer sequence CTCN PAM
ugggaguagaacuagauuaa

SEQ ID NO: 12843 - RNA, 20 nt, Artificial Sequence
  spacer sequence CTCN PAM
auuaauauccaaauuccucu

SEQ ID NO: 12844 - RNA, 20 nt, Artificial Sequence
  spacer sequence CTCN PAM
gcuaguuuugguuuaccaga

SEQ ID NO: 12845 - RNA, 20 nt, Artificial Sequence
  spacer sequence CTCN PAM
agcgcuauuuuuugacauuu

SEQ ID NO: 12846 - RNA, 20 nt, Artificial Sequence
  spacer sequence CTCN PAM
ccuacuuuuaacaaauguca

SEQ ID NO: 12847 - RNA, 20 nt, Artificial Sequence
  spacer sequence CTCN PAM
uguuuuaaacaauuuauacc

SEQ ID NO: 12848 - RNA, 20 nt, Artificial Sequence
  spacer sequence CTCN PAM
cgucucauguuuuaaacaau

SEQ ID NO: 12849 - RNA, 20 nt, Artificial Sequence
  spacer sequence CTCN PAM
cacuuucaaauucuuucuga

SEQ ID NO: 12850 - RNA, 20 nt, Artificial Sequence
  spacer sequence CTCN PAM
uaacuucuacagaaauucca

SEQ ID NO: 12851 - RNA, 20 nt, Artificial Sequence
  spacer sequence CTCN PAM
cugcuuugccguuuccuacg

SEQ ID NO: 12852 - RNA, 20 nt, Artificial Sequence
  spacer sequence CTCN PAM
uuuagacccggggcagagcu

SEQ ID NO: 12853 - RNA, 20 nt, Artificial Sequence
  spacer sequence CTCN PAM
gccccgggucuaaaugagaa

SEQ ID NO: 12854 - RNA, 20 nt, Artificial Sequence
  spacer sequence CTCN PAM
guuccgcuuuucaaugaaua

SEQ ID NO: 12855 - RNA, 20 nt, Artificial Sequence
  spacer sequence CTCN PAM
agucuggcuggggacacuau

SEQ ID NO: 12856 - RNA, 20 nt, Artificial Sequence
  spacer sequence CTCN PAM
gcucagguaacuauuaucuu

SEQ ID NO: 12857 - RNA, 20 nt, Artificial Sequence
  spacer sequence CTCN PAM
gguaacuauuaucuuauccu

SEQ ID NO: 12858 - RNA, 20 nt, Artificial Sequence
  spacer sequence CTCN PAM
aaagcauugggaaaauuuuc

SEQ ID NO: 12859 - RNA, 20 nt, Artificial Sequence
  spacer sequence CTCN PAM
auaccuguggaaagcggugg

SEQ ID NO: 12860 - RNA, 20 nt, Artificial Sequence
  spacer sequence CTCN PAM
uuucauuuagcuuacauuug

SEQ ID NO: 12861 - RNA, 20 nt, Artificial Sequence
  spacer sequence CTCN PAM
cuccuuucuucucaaacaag

SEQ ID NO: 12862 - RNA, 20 nt, Artificial Sequence
  spacer sequence CTCN PAM
ccuuucuucucaaacaaggg

SEQ ID NO: 12863 - RNA, 20 nt, Artificial Sequence
  spacer sequence CTCN PAM
uuucuucucaaacaaggggc

SEQ ID NO: 12864 - RNA, 20 nt, Artificial Sequence
  spacer sequence CTCN PAM
aacaaggggcccacuucggu

SEQ ID NO: 12865 - RNA, 20 nt, Artificial Sequence
  spacer sequence CTCN PAM
gcuaaaucguuucuaacgcu

SEQ ID NO: 12866 - RNA, 20 nt, Artificial Sequence
  spacer sequence CTCN PAM
cucauugucccacccugccu

SEQ ID NO: 12867 - RNA, 20 nt, Artificial Sequence
  spacer sequence CTCN PAM
uugucccacccugccucacc

SEQ ID NO: 12868 - RNA, 20 nt, Artificial Sequence
  spacer sequence CTCN PAM
ccucuggcuccaauuagagc

SEQ ID NO: 12869 - RNA, 20 nt, Artificial Sequence
  spacer sequence CTCN PAM
ggcuccaauuagagcaauau

SEQ ID NO: 12870 - RNA, 20 nt, Artificial Sequence
  spacer sequence CTCN PAM
aauuagagcaauauuuauuu

SEQ ID NO: 12871 - RNA, 20 nt, Artificial Sequence
  spacer sequence CTCN PAM
aauuggagccagaggugagg

SEQ ID NO: 12872 - RNA, 20 nt, Artificial Sequence
  spacer sequence CTCN PAM
guagccucuacucuucggaa

SEQ ID NO: 12873 - RNA, 20 nt, Artificial Sequence
  spacer sequence CTCN PAM
acucuucggaaaugaggcaa

SEQ ID NO: 12874 - RNA, 20 nt, Artificial Sequence
  spacer sequence CTCN PAM
ucggaaaugaggcaacgcag

SEQ ID NO: 12875 - RNA, 20 nt, Artificial Sequence
  spacer sequence CTCN PAM
uuuccgaagaguagaggcua

SEQ ID NO: 12876 - RNA, 20 nt, Artificial Sequence
  spacer sequence CTCN PAM
uguuaaaagcccuuuauuau

SEQ ID NO: 12877 - RNA, 20 nt, Artificial Sequence
  spacer sequence CTCN PAM
gacaagauccagcucgacaa

SEQ ID NO: 12878 - RNA, 20 nt, Artificial Sequence
  spacer sequence CTCN PAM
acaagauuguguuccuggag

SEQ ID NO: 12879 - RNA, 20 nt, Artificial Sequence
  spacer sequence CTCN PAM
aggaacacaaucuugucgag

SEQ ID NO: 12880 - RNA, 20 nt, Artificial Sequence
  spacer sequence CTCN PAM
uuuaucugucaucucacuuu

SEQ ID NO: 12881 - RNA, 20 nt, Artificial Sequence
  spacer sequence CTCN PAM
cuuucuaggucacaucauuu

SEQ ID NO: 12882 - RNA, 20 nt, Artificial Sequence
  spacer sequence CTCN PAM
auugcuuuaaaauauauaua

SEQ ID NO: 12883 - RNA, 20 nt, Artificial Sequence
  spacer sequence CTCN PAM
uccauugcuuuaaaauauau

SEQ ID NO: 12884 - RNA, 20 nt, Artificial Sequence
  spacer sequence CTCN PAM
gcauuccacuccuccauugc

SEQ ID NO: 12885 - RNA, 20 nt, Artificial Sequence
  spacer sequence CTCN PAM
cuccgcauuccacuccucca

SEQ ID NO: 12886 - RNA, 20 nt, Artificial Sequence
  spacer sequence CTCN PAM
uggugcuggaauguagaaaa

SEQ ID NO: 12887 - RNA, 20 nt, Artificial Sequence
  spacer sequence CTCN PAM
ucuaauuucaaugaagggca

SEQ ID NO: 12888 - RNA, 20 nt, Artificial Sequence
  spacer sequence CTCN PAM
ggaaaauggcagcaugcccu

SEQ ID NO: 12889 - RNA, 20 nt, Artificial Sequence
  spacer sequence CTCN PAM
uccuucucuggaaaauggca

SEQ ID NO: 12890 - RNA, 20 nt, Artificial Sequence
  spacer sequence CTCN PAM
augaacuaaaauaaacccca

SEQ ID NO: 12891 - RNA, 20 nt, Artificial Sequence
  spacer sequence CTCN PAM
gggauuuggggccucaagaa

SEQ ID NO: 12892 - RNA, 20 nt, Artificial Sequence
  spacer sequence CTCN PAM
agaacuccgggaggacccua

SEQ ID NO: 12893 - RNA, 20 nt, Artificial Sequence
  spacer sequence CTCN PAM
gggaggacccuacaggcccc

SEQ ID NO: 12894 - RNA, 20 nt, Artificial Sequence
  spacer sequence CTCN PAM
cggaguucuugaggccccaa

SEQ ID NO: 12895 - RNA, 20 nt, Artificial Sequence
  spacer sequence CTCN PAM
gagcccaagcucuuagcuug

SEQ ID NO: 12896 - RNA, 20 nt, Artificial Sequence
  spacer sequence CTCN PAM
gagccagacaguucaaguuc

SEQ ID NO: 12897 - RNA, 20 nt, Artificial Sequence
  spacer sequence CTCN PAM
uagcuugacuugguucaugu

SEQ ID NO: 12898 - RNA, 20 nt, Artificial Sequence
  spacer sequence CTCN PAM
aauauaucuuuuuuggggga

SEQ ID NO: 12899 - RNA, 20 nt, Artificial Sequence
  spacer sequence CTCN PAM
gaauguuaccuuauauggau

SEQ ID NO: 12900 - RNA, 20 nt, Artificial Sequence
  spacer sequence CTCN PAM
uuguaaagcaaagucacucu

SEQ ID NO: 12901 - RNA, 20 nt, Artificial Sequence
  spacer sequence CTCN PAM
aggcucaaaauucauuuagc

SEQ ID NO: 12902 - RNA, 20 nt, Artificial Sequence
  spacer sequence CTCN PAM
aaauucauuuagcaaaaagu

SEQ ID NO: 12903 - RNA, 20 nt, Artificial Sequence
  spacer sequence CTCN PAM
aauccuccuccugcccacca

SEQ ID NO: 12904 - RNA, 20 nt, Artificial Sequence
  spacer sequence CTCN PAM
uccugcccaccagacuuggg

SEQ ID NO: 12905 - RNA, 20 nt, Artificial Sequence
  spacer sequence CTCN PAM
ugcccaccagacuugggccu

SEQ ID NO: 12906 - RNA, 20 nt, Artificial Sequence
  spacer sequence CTCN PAM
uuugaagacccaggcccaag

SEQ ID NO: 12907 - RNA, 20 nt, Artificial Sequence
  spacer sequence CTCN PAM
aaaaagcuauauauaaguca

SEQ ID NO: 12908 - RNA, 20 nt, Artificial Sequence
  spacer sequence CTCN PAM
auaaauuuauugacuuauau

SEQ ID NO: 12909 - RNA, 20 nt, Artificial Sequence
  spacer sequence CTCN PAM
gggaagcuuccugauccccc

SEQ ID NO: 12910 - RNA, 20 nt, Artificial Sequence
  spacer sequence CTCN PAM
caucuauugcacuuuagguc

SEQ ID NO: 12911 - RNA, 20 nt, Artificial Sequence
  spacer sequence CTCN PAM
caccuguaauccuagcacuu

SEQ ID NO: 12912 - RNA, 20 nt, Artificial Sequence
  spacer sequence CTCN PAM
auuaaggcuagguguggugg

SEQ ID NO: 12913 - RNA, 20 nt, Artificial Sequence
  spacer sequence CTCN PAM
gauuaaacaguguuggccag

SEQ ID NO: 12914 - RNA, 20 nt, Artificial Sequence
  spacer sequence CTCN PAM
cacaguucuggagaccagaa

SEQ ID NO: 12915 - RNA, 20 nt, Artificial Sequence
  spacer sequence CTCN PAM
caguucuggagaccagaagg

SEQ ID NO: 12916 - RNA, 20 nt, Artificial Sequence
  spacer sequence CTCN PAM
agaacugugagagacuaaau

SEQ ID NO: 12917 - RNA, 20 nt, Artificial Sequence
  spacer sequence CTCN PAM
aaaggagagucuguucaugc

SEQ ID NO: 12918 - RNA, 20 nt, Artificial Sequence
  spacer sequence CTCN PAM
aguccccaaacaauaauaaa

SEQ ID NO: 12919 - RNA, 20 nt, Artificial Sequence
  spacer sequence CTCN PAM
ugccgaaucaaaguuuuauu

SEQ ID NO: 12920 - RNA, 20 nt, Artificial Sequence
  spacer sequence CTCN PAM
accagucuagaaaaugaaag

SEQ ID NO: 12921 - RNA, 20 nt, Artificial Sequence
  spacer sequence CTCN PAM
acugaaaguaguaaaauaag

SEQ ID NO: 12922 - RNA, 20 nt, Artificial Sequence
  spacer sequence CTCN PAM
cuugugaauaucacuauugu

SEQ ID NO: 12923 - RNA, 20 nt, Artificial Sequence
  spacer sequence CTCN PAM
uuccuuucucccuugugaau

SEQ ID NO: 12924 - RNA, 20 nt, Artificial Sequence
  spacer sequence CTCN PAM
uuuauuauauuuugggguuu

SEQ ID NO: 12925 - RNA, 20 nt, Artificial Sequence
  spacer sequence CTCN PAM
uauuccuauccuuugauuca

SEQ ID NO: 12926 - RNA, 20 nt, Artificial Sequence
  spacer sequence CTCN PAM
cauuaggucaaaaaaaaaau

SEQ ID NO: 12927 - RNA, 20 nt, Artificial Sequence
  spacer sequence CTCN PAM
ugcccuacaagauauuuuuu

SEQ ID NO: 12928 - RNA, 20 nt, Artificial Sequence
  spacer sequence CTCN PAM
uaacuccugcccuacaagau

SEQ ID NO: 12929 - RNA, 20 nt, Artificial Sequence
  spacer sequence CTCN PAM
gaguuucauggggaauagcc

SEQ ID NO: 12930 - RNA, 20 nt, Artificial Sequence
  spacer sequence CTCN PAM
gagcaacucuuaacuccugc

SEQ ID NO: 12931 - RNA, 20 nt, Artificial Sequence
  spacer sequence CTCN PAM
cacugggggcaaauaaaaga

SEQ ID NO: 12932 - RNA, 20 nt, Artificial Sequence
  spacer sequence CTCN PAM
cugggggcaaauaaaagaca

SEQ ID NO: 12933 - RNA, 20 nt, Artificial Sequence
  spacer sequence CTCN PAM
ugucuuuuauuugcccccag

SEQ ID NO: 12934 - RNA, 20 nt, Artificial Sequence
  spacer sequence CTCN PAM
uaaaucuccugucuuuuauu

SEQ ID NO: 12935 - RNA, 20 nt, Artificial Sequence
  spacer sequence CTCN PAM
gggauaauuugucuccuaaa

SEQ ID NO: 12936 - RNA, 20 nt, Artificial Sequence
  spacer sequence CTCN PAM
guucuaggaagcuuucucug

SEQ ID NO: 12937 - RNA, 20 nt, Artificial Sequence
  spacer sequence CTCN PAM
gaacauuucagccacuuguu

SEQ ID NO: 12938 - RNA, 20 nt, Artificial Sequence
  spacer sequence CTCN PAM
gugauaaaucacauuuauuu

SEQ ID NO: 12939 - RNA, 20 nt, Artificial Sequence
  spacer sequence CTCN PAM
agauggacuaaaauacaaaa

SEQ ID NO: 12940 - RNA, 20 nt, Artificial Sequence
  spacer sequence CTCN PAM
caagauggacuaaaauacaa

SEQ ID NO: 12941 - RNA, 20 nt, Artificial Sequence
  spacer sequence CTCN PAM
aauugacuuuacaauauugg

SEQ ID NO: 12942 - RNA, 20 nt, Artificial Sequence
  spacer sequence CTCN PAM
acauauuugcuaaagaaaga

SEQ ID NO: 12943 - RNA, 20 nt, Artificial Sequence
  spacer sequence CTCN PAM
uucuuuagcaaauauguuga

SEQ ID NO: 12944 - RNA, 20 nt, Artificial Sequence
  spacer sequence CTCN PAM
ucauauaccugauuuucuca

SEQ ID NO: 12945 - RNA, 20 nt, Artificial Sequence
  spacer sequence CTCN PAM
uauaccugauuuucucacca

SEQ ID NO: 12946 - RNA, 20 nt, Artificial Sequence
  spacer sequence CTCN PAM
ccauucuguuacagaauaug

SEQ ID NO: 12947 - RNA, 20 nt, Artificial Sequence
  spacer sequence CTCN PAM
uauucuguaacagaauggug

SEQ ID NO: 12948 - RNA, 20 nt, Artificial Sequence
  spacer sequence CTCN PAM
uuugugguggugcuugucuc

SEQ ID NO: 12949 - RNA, 20 nt, Artificial Sequence
  spacer sequence CTCN PAM
uauuggaaaccuuuaucucu

SEQ ID NO: 12950 - RNA, 20 nt, Artificial Sequence
  spacer sequence CTCN PAM
uugguauggaaauuuggggu

SEQ ID NO: 12951 - RNA, 20 nt, Artificial Sequence
  spacer sequence CTCN PAM
aagaagcauaaaccccaaau

SEQ ID NO: 12952 - RNA, 20 nt, Artificial Sequence
  spacer sequence CTCN PAM
ugaauucuuggcugcuaaac

SEQ ID NO: 12953 - RNA, 20 nt, Artificial Sequence
  spacer sequence CTCN PAM
ccugcccaagugugggagaa

SEQ ID NO: 12954 - RNA, 20 nt, Artificial Sequence
  spacer sequence CTCN PAM
cacacuugggcaggugagau

SEQ ID NO: 12955 - RNA, 20 nt, Artificial Sequence
  spacer sequence CTCN PAM
uguuuucucccacacuuggg

SEQ ID NO: 12956 - RNA, 20 nt, Artificial Sequence
  spacer sequence CTCN PAM
aaauagaaagauuuuucugg

SEQ ID NO: 12957 - RNA, 20 nt, Artificial Sequence
  spacer sequence CTCN PAM
aacaucugcuucuuggaucu

SEQ ID NO: 12958 - RNA, 20 nt, Artificial Sequence
  spacer sequence CTCN PAM
gggaggcucagaaacuggga

SEQ ID NO: 12959 - RNA, 20 nt, Artificial Sequence
  spacer sequence CTCN PAM
cagagauccaagaagcagau

SEQ ID NO: 12960 - RNA, 20 nt, Artificial Sequence
  spacer sequence CTCN PAM
gaaacugggaauccccuaag

SEQ ID NO: 12961 - RNA, 20 nt, Artificial Sequence
  spacer sequence CTCN PAM
cuucauccauaaaggugcuu

SEQ ID NO: 12962 - RNA, 20 nt, Artificial Sequence
  spacer sequence CTCN PAM
ggcucccccaaagagcggca

SEQ ID NO: 12963 - RNA, 20 nt, Artificial Sequence
  spacer sequence CTCN PAM
cccaaagagcggcaggcagg

SEQ ID NO: 12964 - RNA, 20 nt, Artificial Sequence
  spacer sequence CTCN PAM
uugggggagccagagcccuc

SEQ ID NO: 12965 - RNA, 20 nt, Artificial Sequence
  spacer sequence CTCN PAM
ugccugccgcucuuuggggg

SEQ ID NO: 12966 - RNA, 20 nt, Artificial Sequence
  spacer sequence CTCN PAM
ugcugcaucccugaaguggc

SEQ ID NO: 12967 - RNA, 20 nt, Artificial Sequence
  spacer sequence CTCN PAM
guuccuuuucguacacaucu

SEQ ID NO: 12968 - RNA, 20 nt, Artificial Sequence
  spacer sequence CTCN PAM
aguugggcuuuugguccaug

SEQ ID NO: 12969 - RNA, 20 nt, Artificial Sequence
  spacer sequence CTCN PAM
gaguaacaaugaccuuguga

SEQ ID NO: 12970 - RNA, 20 nt, Artificial Sequence
  spacer sequence CTCN PAM
gagcuguuuuaaaaaauuau

SEQ ID NO: 12971 - RNA, 20 nt, Artificial Sequence
  spacer sequence CTCN PAM
uaaaaugacggcuucccauu

SEQ ID NO: 12972 - RNA, 20 nt, Artificial Sequence
  spacer sequence CTCN PAM
guuaauucguaugcugcugu

SEQ ID NO: 12973 - RNA, 20 nt, Artificial Sequence
  spacer sequence CTCN PAM
gauugaacagcagcauacga

SEQ ID NO: 12974 - RNA, 20 nt, Artificial Sequence
  spacer sequence CTCN PAM
uggcuuuuaguuaaaaagcu

SEQ ID NO: 12975 - RNA, 20 nt, Artificial Sequence
  spacer sequence CTCN PAM
cugugagacagugggcaagu

SEQ ID NO: 12976 - RNA, 20 nt, Artificial Sequence
  spacer sequence CTCN PAM
cagcgaggcagaagccgggc

SEQ ID NO: 12977 - RNA, 20 nt, Artificial Sequence
  spacer sequence CTCN PAM
gugccuucaucucuaaaaug

SEQ ID NO: 12978 - RNA, 20 nt, Artificial Sequence
  spacer sequence CTCN PAM
aaaauggggauagcggcccc

SEQ ID NO: 12979 - RNA, 20 nt, Artificial Sequence
  spacer sequence CTCN PAM
cugaugucuaaagaaggcau

SEQ ID NO: 12980 - RNA, 20 nt, Artificial Sequence
  spacer sequence CTCN PAM
gaaaagguacccuaaagcca

SEQ ID NO: 12981 - RNA, 20 nt, Artificial Sequence
  spacer sequence CTCN PAM
ggacuuaaaacacaaacaga

SEQ ID NO: 12982 - RNA, 20 nt, Artificial Sequence
  spacer sequence CTCN PAM
gucuucaaaaucuguuugug

SEQ ID NO: 12983 - RNA, 20 nt, Artificial Sequence
  spacer sequence CTCN PAM
aguuucucugucuucaaaau

SEQ ID NO: 12984 - RNA, 20 nt, Artificial Sequence
  spacer sequence CTCN PAM
caaauuuccauuuaaaucuc

SEQ ID NO: 12985 - RNA, 20 nt, Artificial Sequence
  spacer sequence CTCN PAM
aauuuccauuuaaaucucca

SEQ ID NO: 12986 - RNA, 20 nt, Artificial Sequence
  spacer sequence CTCN PAM
aaccugaucuucucuaccaa

SEQ ID NO: 12987 - RNA, 20 nt, Artificial Sequence
  spacer sequence CTCN PAM
accaaguuccagagcaacac

SEQ ID NO: 12988 - RNA, 20 nt, Artificial Sequence
  spacer sequence CTCN PAM
ggaacuugguagagaagauc

SEQ ID NO: 12989 - RNA, 20 nt, Artificial Sequence
  spacer sequence CTCN PAM
auuuaugcuaaacaacgaua

SEQ ID NO: 12990 - RNA, 20 nt, Artificial Sequence
  spacer sequence CTCN PAM
uacccuaauuuucuguucau

SEQ ID NO: 12991 - RNA, 20 nt, Artificial Sequence
  spacer sequence CTCN PAM
acuucugacuggcuccaacu

SEQ ID NO: 12992 - RNA, 20 nt, Artificial Sequence
  spacer sequence CTCN PAM
auuuccaguccacauccaau

SEQ ID NO: 12993 - RNA, 20 nt, Artificial Sequence
  spacer sequence CTCN PAM
aaucucuauuuccaguccac

SEQ ID NO: 12994 - RNA, 20 nt, Artificial Sequence
  spacer sequence CTCN PAM
caaaucucuauuuccagucc

SEQ ID NO: 12995 - RNA, 20 nt, Artificial Sequence
  spacer sequence CTCN PAM
ucugguuucuuccuacuucu

SEQ ID NO: 12996 - RNA, 20 nt, Artificial Sequence
  spacer sequence CTCN PAM
agaagccaaagcaagagagu

SEQ ID NO: 12997 - RNA, 20 nt, Artificial Sequence
  spacer sequence CTCN PAM
ugcuuuggcuucuagagaau

SEQ ID NO: 12998 - RNA, 20 nt, Artificial Sequence
  spacer sequence CTCN PAM
cuugcuuuggcuucuagaga

SEQ ID NO: 12999 - RNA, 20 nt, Artificial Sequence
  spacer sequence CTCN PAM
ccuuggauuuuugacacuga

SEQ ID NO: 13000 - RNA, 20 nt, Artificial Sequence
  spacer sequence CTCN PAM
cauucccuccccuuggauuu

SEQ ID NO: 13001 - RNA, 20 nt, Artificial Sequence
  spacer sequence CTCN PAM
uuaagcucccauucccuccc

SEQ ID NO: 13002 - RNA, 20 nt, Artificial Sequence
  spacer sequence CTCN PAM
acaccacuagucauuagaaa

SEQ ID NO: 13003 - RNA, 20 nt, Artificial Sequence
  spacer sequence CTCN PAM
uugugguuuugauuugcauc

SEQ ID NO: 13004 - RNA, 20 nt, Artificial Sequence
  spacer sequence CTCN PAM
cacccauuagcauggcuacu

SEQ ID NO: 13005 - RNA, 20 nt, Artificial Sequence
  spacer sequence CTCN PAM
uuuuuccuuccucuccagcc

SEQ ID NO: 13006 - RNA, 20 nt, Artificial Sequence
  spacer sequence CTCN PAM
guagccauuaaauaauaacu

SEQ ID NO: 13007 - RNA, 20 nt, Artificial Sequence
  spacer sequence CTCN PAM
uuucauuuugcaaaguugaa

SEQ ID NO: 13008 - RNA, 20 nt, Artificial Sequence
  spacer sequence CTCN PAM
agaaaacucuuuucauuuug

SEQ ID NO: 13009 - RNA, 20 nt, Artificial Sequence
  spacer sequence CTCN PAM
cauuguugugcaaccauucc

SEQ ID NO: 13010 - RNA, 20 nt, Artificial Sequence
  spacer sequence CTCN PAM
caaagugcugggauuacagg

SEQ ID NO: 13011 - RNA, 20 nt, Artificial Sequence
  spacer sequence CTCN PAM
ugugauccaccugccuaggc

SEQ ID NO: 13012 - RNA, 20 nt, Artificial Sequence
  spacer sequence CTCN PAM
gugaauauuuuaaaauguga

SEQ ID NO: 13013 - RNA, 20 nt, Artificial Sequence
  spacer sequence CTCN PAM
uuguucaguuuaaaugggug

SEQ ID NO: 13014 - RNA, 20 nt, Artificial Sequence
  spacer sequence CTCN PAM
auaaauccauuucaaagaaa

SEQ ID NO: 13015 - RNA, 20 nt, Artificial Sequence
  spacer sequence CTCN PAM
gggauagucaaguaaaagaa

SEQ ID NO: 13016 - RNA, 20 nt, Artificial Sequence
  spacer sequence CTCN PAM
uuguaacugucauaacaaau

SEQ ID NO: 13017 - RNA, 20 nt, Artificial Sequence
  spacer sequence CTCN PAM
acugaaaccgcugcuaucac

SEQ ID NO: 13018 - RNA, 20 nt, Artificial Sequence
  spacer sequence CTCN PAM
aucuucaacuuugccaagga

SEQ ID NO: 13019 - RNA, 20 nt, Artificial Sequence
  spacer sequence CTCN PAM
caaucuucaacuuugccaag

SEQ ID NO: 13020 - RNA, 20 nt, Artificial Sequence
  spacer sequence CTCN PAM
cucucaaucuucaacuuugc

SEQ ID NO: 13021 - RNA, 20 nt, Artificial Sequence
  spacer sequence CTCN PAM
gcuuuccacagauuuccccu

SEQ ID NO: 13022 - RNA, 20 nt, Artificial Sequence
  spacer sequence CTCN PAM
auguagcaaauauuuauugu

SEQ ID NO: 13023 - RNA, 20 nt, Artificial Sequence
  spacer sequence CTCN PAM
uccuaaaucccauguuauua

SEQ ID NO: 13024 - RNA, 20 nt, Artificial Sequence
  spacer sequence CTCN PAM
cuuccuaaaucccauguuau

SEQ ID NO: 13025 - RNA, 20 nt, Artificial Sequence
  spacer sequence CTCN PAM
uugaaguccuacuuagacau

SEQ ID NO: 13026 - RNA, 20 nt, Artificial Sequence
  spacer sequence CTCN PAM
uuagucaauguggcaauaau

SEQ ID NO: 13027 - RNA, 20 nt, Artificial Sequence
  spacer sequence CTCN PAM
ucaauuauugccacauugac

SEQ ID NO: 13028 - RNA, 20 nt, Artificial Sequence
  spacer sequence CTCN PAM
ugagcuauauuucuggcaaa

SEQ ID NO: 13029 - RNA, 20 nt, Artificial Sequence
  spacer sequence CTCN PAM
agagcucaucaauuauugcc

SEQ ID NO: 13030 - RNA, 20 nt, Artificial Sequence
  spacer sequence CTCN PAM
cucagugacuuacccagaca

SEQ ID NO: 13031 - RNA, 20 nt, Artificial Sequence
  spacer sequence CTCN PAM
gugacuuacccagacaacua

SEQ ID NO: 13032 - RNA, 20 nt, Artificial Sequence
  spacer sequence CTCN PAM
auucaugguaagugcccuau

SEQ ID NO: 13033 - RNA, 20 nt, Artificial Sequence
  spacer sequence CTCN PAM
auagggcacuuaccaugaau

SEQ ID NO: 13034 - RNA, 20 nt, Artificial Sequence
  spacer sequence CTCN PAM
aaauguguauagcaugugau

SEQ ID NO: 13035 - RNA, 20 nt, Artificial Sequence
  spacer sequence CTCN PAM
uuauccgcaacauaaacucu

SEQ ID NO: 13036 - RNA, 20 nt, Artificial Sequence
  spacer sequence CTCN PAM
guacccacuaaacaguaacu

SEQ ID NO: 13037 - RNA, 20 nt, Artificial Sequence
  spacer sequence CTCN PAM
uucuccccagccccugguaa

SEQ ID NO: 13038 - RNA, 20 nt, Artificial Sequence
  spacer sequence CTCN PAM
ccagccccugguaaccucua

SEQ ID NO: 13039 - RNA, 20 nt, Artificial Sequence
  spacer sequence CTCN PAM
cauaaguagaaucauauaau

SEQ ID NO: 13040 - RNA, 20 nt, Artificial Sequence
  spacer sequence CTCN PAM
cuggcaacacacaagguucc

SEQ ID NO: 13041 - RNA, 20 nt, Artificial Sequence
  spacer sequence CTCN PAM
acauucucaccaauacuugu

SEQ ID NO: 13042 - RNA, 20 nt, Artificial Sequence
  spacer sequence CTCN PAM
uugugguuuugauuugcauu

SEQ ID NO: 13043 - RNA, 20 nt, Artificial Sequence
  spacer sequence CTCN PAM
ccaagcaugcagugaccaca

SEQ ID NO: 13044 - RNA, 20 nt, Artificial Sequence
  spacer sequence CTCN PAM
guguguugauuguaguggug

SEQ ID NO: 13045 - RNA, 20 nt, Artificial Sequence
  spacer sequence CTCN PAM
caccuauaaucccagcacuu

SEQ ID NO: 13046 - RNA, 20 nt, Artificial Sequence
  spacer sequence CTCN PAM
uuucaguuuuuuuuuuuuag

SEQ ID NO: 13047 - RNA, 20 nt, Artificial Sequence
  spacer sequence CTCN PAM
cuugccuuugcaccacauuc

SEQ ID NO: 13048 - RNA, 20 nt, Artificial Sequence
  spacer sequence CTCN PAM
gcaauuugacccucacuugc

SEQ ID NO: 13049 - RNA, 20 nt, Artificial Sequence
  spacer sequence CTCN PAM
cugcaauuugacccucacuu

SEQ ID NO: 13050 - RNA, 20 nt, Artificial Sequence
  spacer sequence CTCN PAM
cucugcaauuugacccucac

SEQ ID NO: 13051 - RNA, 20 nt, Artificial Sequence
  spacer sequence CTCN PAM
uggcucugucaccccaccgc

SEQ ID NO: 13052 - RNA, 20 nt, Artificial Sequence
  spacer sequence CTCN PAM
gucaccccaccgcuaucucc

SEQ ID NO: 13053 - RNA, 20 nt, Artificial Sequence
  spacer sequence CTCN PAM
uuuucccaccccucuauuuu

SEQ ID NO: 13054 - RNA, 20 nt, Artificial Sequence
  spacer sequence CTCN PAM
auuuuccuauucaucguguc

SEQ ID NO: 13055 - RNA, 20 nt, Artificial Sequence
  spacer sequence CTCN PAM
augacacgaugaauaggaaa

SEQ ID NO: 13056 - RNA, 20 nt, Artificial Sequence
  spacer sequence CTCN PAM
accggaaccaugcugggugg

SEQ ID NO: 13057 - RNA, 20 nt, Artificial Sequence
  spacer sequence CTCN PAM
cuuuaagaaacacauccuau

SEQ ID NO: 13058 - RNA, 20 nt, Artificial Sequence
  spacer sequence CTCN PAM
uggggcugugucuuugguca

SEQ ID NO: 13059 - RNA, 20 nt, Artificial Sequence
  spacer sequence CTCN PAM
agugucuccacugaaaacag

SEQ ID NO: 13060 - RNA, 20 nt, Artificial Sequence
  spacer sequence CTCN PAM
acugaaaacagguuccucuc

SEQ ID NO: 13061 - RNA, 20 nt, Artificial Sequence
  spacer sequence CTCN PAM
cugucagauggagagaugaa

SEQ ID NO: 13062 - RNA, 20 nt, Artificial Sequence
  spacer sequence CTCN PAM
gucagauggagagaugaaau

SEQ ID NO: 13063 - RNA, 20 nt, Artificial Sequence
  spacer sequence CTCN PAM
aucugacagagaggaaccug

SEQ ID NO: 13064 - RNA, 20 nt, Artificial Sequence
  spacer sequence CTCN PAM
ccaucugacagagaggaacc

SEQ ID NO: 13065 - RNA, 20 nt, Artificial Sequence
  spacer sequence CTCN PAM
ccuccugggucuggaagcug

SEQ ID NO: 13066 - RNA, 20 nt, Artificial Sequence
  spacer sequence CTCN PAM
ugggucuggaagcugcacgg

SEQ ID NO: 13067 - RNA, 20 nt, Artificial Sequence
  spacer sequence CTCN PAM
ugggguagauguuucagcgg

SEQ ID NO: 13068 - RNA, 20 nt, Artificial Sequence
  spacer sequence CTCN PAM
ccuguacucuguugcuuuca

SEQ ID NO: 13069 - RNA, 20 nt, Artificial Sequence
  spacer sequence CTCN PAM
guugcuuucaggcuuggugc

SEQ ID NO: 13070 - RNA, 20 nt, Artificial Sequence
  spacer sequence CTCN PAM
caagaaacaaagcaccaagc

SEQ ID NO: 13071 - RNA, 20 nt, Artificial Sequence
  spacer sequence CTCN PAM
ugccucagccucccaaguag

SEQ ID NO: 13072 - RNA, 20 nt, Artificial Sequence
  spacer sequence CTCN PAM
gccucccaaguagcugggac

SEQ ID NO: 13073 - RNA, 20 nt, Artificial Sequence
  spacer sequence CTCN PAM
caaguagcugggacuauagg

SEQ ID NO: 13074 - RNA, 20 nt, Artificial Sequence
  spacer sequence CTCN PAM
caccugaaaucccagcaguu

SEQ ID NO: 13075 - RNA, 20 nt, Artificial Sequence
  spacer sequence CTCN PAM
uaucccuuuaagaauaaaug

SEQ ID NO: 13076 - RNA, 20 nt, Artificial Sequence
  spacer sequence CTCN PAM
cuuaucccuuuaagaauaaa

SEQ ID NO: 13077 - RNA, 20 nt, Artificial Sequence
  spacer sequence CTCN PAM
aaaguuucucucuuaucccu

SEQ ID NO: 13078 - RNA, 20 nt, Artificial Sequence
  spacer sequence CTCN PAM
uugagaagggagacuuaaag

SEQ ID NO: 13079 - RNA, 20 nt, Artificial Sequence
  spacer sequence CTCN PAM
aagagaagccaagguacaau

SEQ ID NO: 13080 - RNA, 20 nt, Artificial Sequence
  spacer sequence CTCN PAM
cuucucaaagagaagccaag

SEQ ID NO: 13081 - RNA, 20 nt, Artificial Sequence
  spacer sequence CTCN PAM
uuaguuggaacauagaagua

SEQ ID NO: 13082 - RNA, 20 nt, Artificial Sequence
  spacer sequence CTCN PAM
uucuuuguaggcagaucugg

SEQ ID NO: 13083 - RNA, 20 nt, Artificial Sequence
  spacer sequence CTCN PAM
aacuugguaguagcuuuugu

SEQ ID NO: 13084 - RNA, 20 nt, Artificial Sequence
  spacer sequence CTCN PAM
ugcaggauacaaaagcuacu

SEQ ID NO: 13085 - RNA, 20 nt, Artificial Sequence
  spacer sequence CTCN PAM
aagugucuugggucaacugu

SEQ ID NO: 13086 - RNA, 20 nt, Artificial Sequence
  spacer sequence CTCN PAM
cugugccucucuuuaguuuu

SEQ ID NO: 13087 - RNA, 20 nt, Artificial Sequence
  spacer sequence CTCN PAM
gugccucucuuuaguuuuac

SEQ ID NO: 13088 - RNA, 20 nt, Artificial Sequence
  spacer sequence CTCN PAM
uucccuugaguaauccaccu

SEQ ID NO: 13089 - RNA, 20 nt, Artificial Sequence
  spacer sequence CTCN PAM
agggaaggagcuguuguaaa

SEQ ID NO: 13090 - RNA, 20 nt, Artificial Sequence
  spacer sequence CTCN PAM
cacuuucucuucacugcauc

SEQ ID NO: 13091 - RNA, 20 nt, Artificial Sequence
  spacer sequence CTCN PAM
uuucuauuccaggacugggu

SEQ ID NO: 13092 - RNA, 20 nt, Artificial Sequence
  spacer sequence CTCN PAM
cuuaugcuugauguuagaaa

SEQ ID NO: 13093 - RNA, 20 nt, Artificial Sequence
  spacer sequence CTCN PAM
uaugcuugauguuagaaagu

SEQ ID NO: 13094 - RNA, 20 nt, Artificial Sequence
  spacer sequence CTCN PAM
uaguagcacuuguacuuauu

SEQ ID NO: 13095 - RNA, 20 nt, Artificial Sequence
  spacer sequence CTCN PAM
augcauauuuguugaaugaa

SEQ ID NO: 13096 - RNA, 20 nt, Artificial Sequence
  spacer sequence CTCN PAM
guauguaacacaguaccuag

SEQ ID NO: 13097 - RNA, 20 nt, Artificial Sequence
  spacer sequence CTCN PAM
aggacagcagggaucuaucu

SEQ ID NO: 13098 - RNA, 20 nt, Artificial Sequence
  spacer sequence CTCN PAM
cugccuuucaauuuuaaaau

SEQ ID NO: 13099 - RNA, 20 nt, Artificial Sequence
  spacer sequence CTCN PAM
uuuucacuggucaguugaag

SEQ ID NO: 13100 - RNA, 20 nt, Artificial Sequence
  spacer sequence CTCN PAM
ucaagccugaccuucaacug

SEQ ID NO: 13101 - RNA, 20 nt, Artificial Sequence
  spacer sequence CTCN PAM
uucugucuuuuaaaccauga

SEQ ID NO: 13102 - RNA, 20 nt, Artificial Sequence
  spacer sequence CTCN PAM
uggcuauuaauccuuuucug

SEQ ID NO: 13103 - RNA, 20 nt, Artificial Sequence
  spacer sequence CTCN PAM
ccuggcuauuaauccuuuuc

SEQ ID NO: 13104 - RNA, 20 nt, Artificial Sequence
  spacer sequence CTCN PAM
gcucuccuggcuauuaaucc

SEQ ID NO: 13105 - RNA, 20 nt, Artificial Sequence
  spacer sequence CTCN PAM
cugcucuccuggcuauuaau

SEQ ID NO: 13106 - RNA, 20 nt, Artificial Sequence
  spacer sequence CTCN PAM
auuccaucacccaugagucc

SEQ ID NO: 13107 - RNA, 20 nt, Artificial Sequence
  spacer sequence CTCN PAM
ugggugauggaauugaguug

SEQ ID NO: 13108 - RNA, 20 nt, Artificial Sequence
  spacer sequence CTCN PAM
guaaggacucaugggugaug

SEQ ID NO: 13109 - RNA, 20 nt, Artificial Sequence
  spacer sequence CTCN PAM
guccagguggcagcucagua

SEQ ID NO: 13110 - RNA, 20 nt, Artificial Sequence
  spacer sequence CTCN PAM
ugcuaauaauauguggcugu

SEQ ID NO: 13111 - RNA, 20 nt, Artificial Sequence
  spacer sequence CTCN PAM
cugcaggaccuuggcacaca

SEQ ID NO: 13112 - RNA, 20 nt, Artificial Sequence
  spacer sequence CTCN PAM
agagcccauggugggugugg

SEQ ID NO: 13113 - RNA, 20 nt, Artificial Sequence
  spacer sequence CTCN PAM
ggagcaguuuccugucaagu

SEQ ID NO: 13114 - RNA, 20 nt, Artificial Sequence
  spacer sequence CTCN PAM
ggcccuaaucccacacccac

SEQ ID NO: 13115 - RNA, 20 nt, Artificial Sequence
  spacer sequence CTCN PAM
ucucaggcccuaaucccaca

SEQ ID NO: 13116 - RNA, 20 nt, Artificial Sequence
  spacer sequence CTCN PAM
ccacaaagauucacacguga

SEQ ID NO: 13117 - RNA, 20 nt, Artificial Sequence
  spacer sequence CTCN PAM
uuuuuccuugcuccccacaa

SEQ ID NO: 13118 - RNA, 20 nt, Artificial Sequence
  spacer sequence CTCN PAM
uauuugccucuuuuuuccuu

SEQ ID NO: 13119 - RNA, 20 nt, Artificial Sequence
  spacer sequence CTCN PAM
ggaaaguaauuaaccuuaga

SEQ ID NO: 13120 - RNA, 20 nt, Artificial Sequence
  spacer sequence CTCN PAM
cuggaaaguaauuaaccuua

SEQ ID NO: 13121 - RNA, 20 nt, Artificial Sequence
  spacer sequence CTCN PAM
aagugugaacucucuggaaa

SEQ ID NO: 13122 - RNA, 20 nt, Artificial Sequence
  spacer sequence CTCN PAM
acaauguugcucaaagugug

SEQ ID NO: 13123 - RNA, 20 nt, Artificial Sequence
  spacer sequence CTCN PAM
aagagucuauauuguucuau

SEQ ID NO: 13124 - RNA, 20 nt, Artificial Sequence
  spacer sequence CTCN PAM
uugaguauauaauagugcca

SEQ ID NO: 13125 - RNA, 20 nt, Artificial Sequence
  spacer sequence CTCN PAM
ucuggugcacagagacaggg

SEQ ID NO: 13126 - RNA, 20 nt, Artificial Sequence
  spacer sequence CTCN PAM
gugcaccagaagagugguua

SEQ ID NO: 13127 - RNA, 20 nt, Artificial Sequence
  spacer sequence CTCN PAM
uuucaaagugcuuggggugu

SEQ ID NO: 13128 - RNA, 20 nt, Artificial Sequence
  spacer sequence CTCN PAM
cuccacuaucuucagccucu

SEQ ID NO: 13129 - RNA, 20 nt, Artificial Sequence
  spacer sequence CTCN PAM
acuaucuucagccucucaga

SEQ ID NO: 13130 - RNA, 20 nt, Artificial Sequence
  spacer sequence CTCN PAM
cagaugaucauggcaucagu

SEQ ID NO: 13131 - RNA, 20 nt, Artificial Sequence
  spacer sequence CTCN PAM
gaugaucauggcaucaguua

SEQ ID NO: 13132 - RNA, 20 nt, Artificial Sequence
  spacer sequence CTCN PAM
gguaguuccuuauagcaaug

SEQ ID NO: 13133 - RNA, 20 nt, Artificial Sequence
  spacer sequence CTCN PAM
cauugcuauaaggaacuacc

SEQ ID NO: 13134 - RNA, 20 nt, Artificial Sequence
  spacer sequence CTCN PAM
uuugaagauaccaaaaugcu

SEQ ID NO: 13135 - RNA, 20 nt, Artificial Sequence
  spacer sequence CTCN PAM
augcuaagcuuuagcauuuu

SEQ ID NO: 13136 - RNA, 20 nt, Artificial Sequence
  spacer sequence CTCN PAM
ccaugcuaagcuuuagcauu

SEQ ID NO: 13137 - RNA, 20 nt, Artificial Sequence
  spacer sequence CTCN PAM
cuccaugcuaagcuuuagca

SEQ ID NO: 13138 - RNA, 20 nt, Artificial Sequence
  spacer sequence CTCN PAM
guuuucuuuccuuuaaaaug

SEQ ID NO: 13139 - RNA, 20 nt, Artificial Sequence
  spacer sequence CTCN PAM
uuuuaaaggaaagaaaacug

SEQ ID NO: 13140 - RNA, 20 nt, Artificial Sequence
  spacer sequence CTCN PAM
aaacugggguaauagccuca

SEQ ID NO: 13141 - RNA, 20 nt, Artificial Sequence
  spacer sequence CTCN PAM
uacccuuaauaaggugaaac

SEQ ID NO: 13142 - RNA, 20 nt, Artificial Sequence
  spacer sequence CTCN PAM
uuuuaaagcauuguacucuu

SEQ ID NO: 13143 - RNA, 20 nt, Artificial Sequence
  spacer sequence CTCN PAM
gucuggaauauuuguauuau

SEQ ID NO: 13144 - RNA, 20 nt, Artificial Sequence
  spacer sequence CTCN PAM
uccugguuuuuccaugucug

SEQ ID NO: 13145 - RNA, 20 nt, Artificial Sequence
  spacer sequence CTCN PAM
guaagaaauaagaaaacuaa

SEQ ID NO: 13146 - RNA, 20 nt, Artificial Sequence
  spacer sequence CTCN PAM
aggauauugucuuuauuuuc

SEQ ID NO: 13147 - RNA, 20 nt, Artificial Sequence
  spacer sequence CTCN PAM
cuugguaccccuaaugucuc

SEQ ID NO: 13148 - RNA, 20 nt, Artificial Sequence
  spacer sequence CTCN PAM
uucauucuguuucuccuccc

SEQ ID NO: 13149 - RNA, 20 nt, Artificial Sequence
  spacer sequence CTCN PAM
ucccagccuccuguuaccca

SEQ ID NO: 13150 - RNA, 20 nt, Artificial Sequence
  spacer sequence CTCN PAM
cagccuccuguuacccaucu

SEQ ID NO: 13151 - RNA, 20 nt, Artificial Sequence
  spacer sequence CTCN PAM
uguuacccaucuuucagaag

SEQ ID NO: 13152 - RNA, 20 nt, Artificial Sequence
  spacer sequence CTCN PAM
caggucuucugaaagauggg

SEQ ID NO: 13153 - RNA, 20 nt, Artificial Sequence
  spacer sequence CTCN PAM
acacuggccaacugaaauca

SEQ ID NO: 13154 - RNA, 20 nt, Artificial Sequence
  spacer sequence CTCN PAM
caggcuucuccaaccacaga

SEQ ID NO: 13155 - RNA, 20 nt, Artificial Sequence
  spacer sequence CTCN PAM
aaccacagauaugcaagaau

SEQ ID NO: 13156 - RNA, 20 nt, Artificial Sequence
  spacer sequence CTCN PAM
acugacacuuugaaaacauu

SEQ ID NO: 13157 - RNA, 20 nt, Artificial Sequence
  spacer sequence CTCN PAM
ccacugacacuuugaaaaca

SEQ ID NO: 13158 - RNA, 20 nt, Artificial Sequence
  spacer sequence CTCN PAM
guagaacuuaugcucuccac

SEQ ID NO: 13159 - RNA, 20 nt, Artificial Sequence
  spacer sequence CTCN PAM
caaguuugugcucaguagaa

SEQ ID NO: 13160 - RNA, 20 nt, Artificial Sequence
  spacer sequence CTCN PAM
ucauucaucagguaaaugcc

SEQ ID NO: 13161 - RNA, 20 nt, Artificial Sequence
  spacer sequence CTCN PAM
ugugcaaggcugcacuugcc

SEQ ID NO: 13162 - RNA, 20 nt, Artificial Sequence
  spacer sequence CTCN PAM
ucuuguuaaguaguugaaug

SEQ ID NO: 13163 - RNA, 20 nt, Artificial Sequence
  spacer sequence CTCN PAM
uuuauuauuuugagaaguua

SEQ ID NO: 13164 - RNA, 20 nt, Artificial Sequence
  spacer sequence CTCN PAM
aaauaauaaacgaggguccc

SEQ ID NO: 13165 - RNA, 20 nt, Artificial Sequence
  spacer sequence CTCN PAM
auuauuucacaggcaggaga

SEQ ID NO: 13166 - RNA, 20 nt, Artificial Sequence
  spacer sequence CTCN PAM
ugccugugaaauaauggaga

SEQ ID NO: 13167 - RNA, 20 nt, Artificial Sequence
  spacer sequence CTCN PAM
agauacaauagggacuggcc

SEQ ID NO: 13168 - RNA, 20 nt, Artificial Sequence
  spacer sequence CTCN PAM
uaaccauuuccaaugccaaa

SEQ ID NO: 13169 - RNA, 20 nt, Artificial Sequence
  spacer sequence CTCN PAM
cauaaccauuuccaaugcca

SEQ ID NO: 13170 - RNA, 20 nt, Artificial Sequence
  spacer sequence CTCN PAM
gugggaagcucucauaacca

SEQ ID NO: 13171 - RNA, 20 nt, Artificial Sequence
  spacer sequence CTCN PAM
gggcucagugggaagcucuc

SEQ ID NO: 13172 - RNA, 20 nt, Artificial Sequence
  spacer sequence CTCN PAM
aacuugacucugggcucagu

SEQ ID NO: 13173 - RNA, 20 nt, Artificial Sequence
  spacer sequence CTCN PAM
ugugcagaaaggagugggca

SEQ ID NO: 13174 - RNA, 20 nt, Artificial Sequence
  spacer sequence CTCN PAM
uuucugcacaggagaucucu

SEQ ID NO: 13175 - RNA, 20 nt, Artificial Sequence
  spacer sequence CTCN PAM
gcuauauugcagaauaaugg

SEQ ID NO: 13176 - RNA, 20 nt, Artificial Sequence
  spacer sequence CTCN PAM
auuuguacaagauaggaugc

SEQ ID NO: 13177 - RNA, 20 nt, Artificial Sequence
  spacer sequence CTCN PAM
gucugcugauucugaccaug

SEQ ID NO: 13178 - RNA, 20 nt, Artificial Sequence
  spacer sequence CTCN PAM
ugugucuugcuaagcacagg

SEQ ID NO: 13179 - RNA, 20 nt, Artificial Sequence
  spacer sequence CTCN PAM
uccuucagggguacuuuaua

SEQ ID NO: 13180 - RNA, 20 nt, Artificial Sequence
  spacer sequence CTCN PAM
guauugcuuauaaaguaccc

SEQ ID NO: 13181 - RNA, 20 nt, Artificial Sequence
  spacer sequence CTCN PAM
cuguauugcuuauaaaguac

SEQ ID NO: 13182 - RNA, 20 nt, Artificial Sequence
  spacer sequence CTCN PAM
aaauucgagauucaaacauu

SEQ ID NO: 13183 - RNA, 20 nt, Artificial Sequence
  spacer sequence CTCN PAM
aauuuagaguuuaguuuaaa

SEQ ID NO: 13184 - RNA, 20 nt, Artificial Sequence
  spacer sequence CTCN PAM
aaacaauuuuuuccccuaaa

SEQ ID NO: 13185 - RNA, 20 nt, Artificial Sequence
  spacer sequence CTCN PAM
aaacagggaaagcucauuuc

SEQ ID NO: 13186 - RNA, 20 nt, Artificial Sequence
  spacer sequence CTCN PAM
uuucacaguuuaaagaaaac

SEQ ID NO: 13187 - RNA, 20 nt, Artificial Sequence
  spacer sequence CTCN PAM
agccuugaagggagaggagg

SEQ ID NO: 13188 - RNA, 20 nt, Artificial Sequence
  spacer sequence CTCN PAM
ggcaagagaauauccucuuc

SEQ ID NO: 13189 - RNA, 20 nt, Artificial Sequence
  spacer sequence CTCN PAM
ugccagagggaccuucccuc

SEQ ID NO: 13190 - RNA, 20 nt, Artificial Sequence
  spacer sequence CTCN PAM
uccacccacuggcugaugcu

SEQ ID NO: 13191 - RNA, 20 nt, Artificial Sequence
  spacer sequence CTCN PAM
aaauucuacuauuaggacau

SEQ ID NO: 13192 - RNA, 20 nt, Artificial Sequence
  spacer sequence CTCN PAM
gggugggguaauacuuaaac

SEQ ID NO: 13193 - RNA, 20 nt, Artificial Sequence
  spacer sequence CTCN PAM
guggacuguaaagggcugau

SEQ ID NO: 13194 - RNA, 20 nt, Artificial Sequence
  spacer sequence CTCN PAM
ucgguggacuguaaagggcu

SEQ ID NO: 13195 - RNA, 20 nt, Artificial Sequence
  spacer sequence CTCN PAM
uuccuccucgguggacugua

SEQ ID NO: 13196 - RNA, 20 nt, Artificial Sequence
  spacer sequence CTCN PAM
ggguucagccuuucuguucu

SEQ ID NO: 13197 - RNA, 20 nt, Artificial Sequence
  spacer sequence CTCN PAM
uaaauuauuauaacaauacg

SEQ ID NO: 13198 - RNA, 20 nt, Artificial Sequence
  spacer sequence CTCN PAM
uccaaaugaauuuuguaaau

SEQ ID NO: 13199 - RNA, 20 nt, Artificial Sequence
  spacer sequence CTCN PAM
cagagauuagugauaaauca

SEQ ID NO: 13200 - RNA, 20 nt, Artificial Sequence
  spacer sequence CTCN PAM
gugagguagaucccacucuu

SEQ ID NO: 13201 - RNA, 20 nt, Artificial Sequence
  spacer sequence CTCN PAM
uauugauauucauuaaaaau

SEQ ID NO: 13202 - RNA, 20 nt, Artificial Sequence
  spacer sequence CTCN PAM
cuggcuagggaauagcucca

SEQ ID NO: 13203 - RNA, 20 nt, Artificial Sequence
  spacer sequence CTCN PAM
ggcuagggaauagcuccaua

SEQ ID NO: 13204 - RNA, 20 nt, Artificial Sequence
  spacer sequence CTCN PAM
auaaugacuuugugagcauu

SEQ ID NO: 13205 - RNA, 20 nt, Artificial Sequence
  spacer sequence CTCN PAM
caaagucauuauggagcuau

SEQ ID NO: 13206 - RNA, 20 nt, Artificial Sequence
  spacer sequence CTCN PAM
auauuuaguucaauagccuu

SEQ ID NO: 13207 - RNA, 20 nt, Artificial Sequence
  spacer sequence CTCN PAM
cuuugauuugauucuauuug

SEQ ID NO: 13208 - RNA, 20 nt, Artificial Sequence
  spacer sequence CTCN PAM
uccgaggagcugggcuguag

SEQ ID NO: 13209 - RNA, 20 nt, Artificial Sequence
  spacer sequence CTCN PAM
gaugagcaugucaggcugga

SEQ ID NO: 13210 - RNA, 20 nt, Artificial Sequence
  spacer sequence CTCN PAM
ucggaugagcaugucaggcu

SEQ ID NO: 13211 - RNA, 20 nt, Artificial Sequence
  spacer sequence CTCN PAM
ccuuccuagucguagaaagg

SEQ ID NO: 13212 - RNA, 20 nt, Artificial Sequence
  spacer sequence CTCN PAM
cuccccuuccuagucguaga

SEQ ID NO: 13213 - RNA, 20 nt, Artificial Sequence
  spacer sequence CTCN PAM
cccuccccuuccuagucgua

SEQ ID NO: 13214 - RNA, 20 nt, Artificial Sequence
  spacer sequence CTCN PAM
ucucccuccccuuccuaguc

SEQ ID NO: 13215 - RNA, 20 nt, Artificial Sequence
  spacer sequence CTCN PAM
ccucucccuccccuuccuag

SEQ ID NO: 13216 - RNA, 20 nt, Artificial Sequence
  spacer sequence CTCN PAM
ucuccucucccuccccuucc

SEQ ID NO: 13217 - RNA, 20 nt, Artificial Sequence
  spacer sequence CTCN PAM
caucuccucuccucucccuc

SEQ ID NO: 13218 - RNA, 20 nt, Artificial Sequence
  spacer sequence CTCN PAM
gucuugcuucucccaucucc

SEQ ID NO: 13219 - RNA, 20 nt, Artificial Sequence
  spacer sequence CTCN PAM
aguucaggucuaaagugggc

SEQ ID NO: 13220 - RNA, 20 nt, Artificial Sequence
  spacer sequence CTCN PAM
caaauguagacagaugccca

SEQ ID NO: 13221 - RNA, 20 nt, Artificial Sequence
  spacer sequence CTCN PAM
agguuucuagaagagaagga

SEQ ID NO: 13222 - RNA, 20 nt, Artificial Sequence
  spacer sequence CTCN PAM
ucuagaaaccuagagcuucu

SEQ ID NO: 13223 - RNA, 20 nt, Artificial Sequence
  spacer sequence CTCN PAM
uucucuucuagaaaccuaga

SEQ ID NO: 13224 - RNA, 20 nt, Artificial Sequence
  spacer sequence CTCN PAM
caccaauuuuccccuccuuc

SEQ ID NO: 13225 - RNA, 20 nt, Artificial Sequence
  spacer sequence CTCN PAM
aaaccucacaccaauuuucc

SEQ ID NO: 13226 - RNA, 20 nt, Artificial Sequence
  spacer sequence CTCN PAM
ccugcugugaugcaggcagu

SEQ ID NO: 13227 - RNA, 20 nt, Artificial Sequence
  spacer sequence CTCN PAM
ugcugugaugcaggcaguca

SEQ ID NO: 13228 - RNA, 20 nt, Artificial Sequence
  spacer sequence CTCN PAM
aaccuaaccaugcugacugc

SEQ ID NO: 13229 - RNA, 20 nt, Artificial Sequence
  spacer sequence CTCN PAM
cugggacacccggaugagag

SEQ ID NO: 13230 - RNA, 20 nt, Artificial Sequence
  spacer sequence CTCN PAM
uccgggugucccagggagcu

SEQ ID NO: 13231 - RNA, 20 nt, Artificial Sequence
  spacer sequence CTCN PAM
cauccgggugucccagggag

SEQ ID NO: 13232 - RNA, 20 nt, Artificial Sequence
  spacer sequence CTCN PAM
cugacucucauccggguguc

SEQ ID NO: 13233 - RNA, 20 nt, Artificial Sequence
  spacer sequence CTCN PAM
gucuucuuugcagaaagccu

SEQ ID NO: 13234 - RNA, 20 nt, Artificial Sequence
  spacer sequence CTCN PAM
gaucacuuucccuggugaaa

SEQ ID NO: 13235 - RNA, 20 nt, Artificial Sequence
  spacer sequence CTCN PAM
cagaucacuuucccugguga

SEQ ID NO: 13236 - RNA, 20 nt, Artificial Sequence
  spacer sequence CTCN PAM
uuacuccaaaagaaagaagg

SEQ ID NO: 13237 - RNA, 20 nt, Artificial Sequence
  spacer sequence CTCN PAM
aaaagaaagaaggucacagc

SEQ ID NO: 13238 - RNA, 20 nt, Artificial Sequence
  spacer sequence CTCN PAM
uucuucugauaaugguuucg

SEQ ID NO: 13239 - RNA, 20 nt, Artificial Sequence
  spacer sequence CTCN PAM
caguuugucucuuucuucug

SEQ ID NO: 13240 - RNA, 20 nt, Artificial Sequence
  spacer sequence CTCN PAM
gcacgucacauggcacagau

SEQ ID NO: 13241 - RNA, 20 nt, Artificial Sequence
  spacer sequence CTCN PAM
gaauacacucagcacgucac

SEQ ID NO: 13242 - RNA, 20 nt, Artificial Sequence
  spacer sequence CTCN PAM
gacauccauuuucuuuaagu

SEQ ID NO: 13243 - RNA, 20 nt, Artificial Sequence
  spacer sequence CTCN PAM
cccaccuuccucugacaucc

SEQ ID NO: 13244 - RNA, 20 nt, Artificial Sequence
  spacer sequence CTCN PAM
uuuagugaauuauucauugg

SEQ ID NO: 13245 - RNA, 20 nt, Artificial Sequence
  spacer sequence CTCN PAM
ccccagccuucauuacucag

SEQ ID NO: 13246 - RNA, 20 nt, Artificial Sequence
  spacer sequence CTCN PAM
gagcugucgcuguggauucu

SEQ ID NO: 13247 - RNA, 20 nt, Artificial Sequence
  spacer sequence CTCN PAM
gaguaaugaaggcuggggug

SEQ ID NO: 13248 - RNA, 20 nt, Artificial Sequence
  spacer sequence CTCN PAM
uugucuuugggaagggagag

SEQ ID NO: 13249 - RNA, 20 nt, Artificial Sequence
  spacer sequence CTCN PAM
cuucccaaagacaaggagua

SEQ ID NO: 13250 - RNA, 20 nt, Artificial Sequence
  spacer sequence CTCN PAM
cccuucccaaagacaaggag

SEQ ID NO: 13251 - RNA, 20 nt, Artificial Sequence
  spacer sequence CTCN PAM
ucuagaaauauuuccucucc

SEQ ID NO: 13252 - RNA, 20 nt, Artificial Sequence
  spacer sequence CTCN PAM
caagacaccuuccucuuuuc

SEQ ID NO: 13253 - RNA, 20 nt, Artificial Sequence
  spacer sequence CTCN PAM
uuucucucucucucuguuaa

SEQ ID NO: 13254 - RNA, 20 nt, Artificial Sequence
  spacer sequence CTCN PAM
ugagaucugaugguuuuacc

SEQ ID NO: 13255 - RNA, 20 nt, Artificial Sequence
  spacer sequence CTCN PAM
cgagacuaauucacaccacg

SEQ ID NO: 13256 - RNA, 20 nt, Artificial Sequence
  spacer sequence CTCN PAM
uucucucuuugccugcugcc

SEQ ID NO: 13257 - RNA, 20 nt, Artificial Sequence
  spacer sequence CTCN PAM
cuuugccugcugccauccau

SEQ ID NO: 13258 - RNA, 20 nt, Artificial Sequence
  spacer sequence CTCN PAM
uugccugcugccauccaugu

SEQ ID NO: 13259 - RNA, 20 nt, Artificial Sequence
  spacer sequence CTCN PAM
uccuugccuuccaucaugau

SEQ ID NO: 13260 - RNA, 20 nt, Artificial Sequence
  spacer sequence CTCN PAM
uugccuuccaucaugauuau

SEQ ID NO: 13261 - RNA, 20 nt, Artificial Sequence
  spacer sequence CTCN PAM
uaaucaugauggaaggcaag

SEQ ID NO: 13262 - RNA, 20 nt, Artificial Sequence
  spacer sequence CTCN PAM
caguuccacacggcuaggga

SEQ ID NO: 13263 - RNA, 20 nt, Artificial Sequence
  spacer sequence CTCN PAM
uucuuuuguaaauugcccag

SEQ ID NO: 13264 - RNA, 20 nt, Artificial Sequence
  spacer sequence CTCN PAM
ggcaauugugucuuugucag

SEQ ID NO: 13265 - RNA, 20 nt, Artificial Sequence
  spacer sequence CTCN PAM
cucuuggucuaaucccagac

SEQ ID NO: 13266 - RNA, 20 nt, Artificial Sequence
  spacer sequence CTCN PAM
uggucuaaucccagacaacc

SEQ ID NO: 13267 - RNA, 20 nt, Artificial Sequence
  spacer sequence CTCN PAM
gaaaaaguguuggguugucu

SEQ ID NO: 13268 - RNA, 20 nt, Artificial Sequence
  spacer sequence CTCN PAM
uuuguuuuguuguuuguuug

SEQ ID NO: 13269 - RNA, 20 nt, Artificial Sequence
  spacer sequence CTCN PAM
cccaaccuaccccuuuccac

SEQ ID NO: 13270 - RNA, 20 nt, Artificial Sequence
  spacer sequence CTCN PAM
guuaaugaccacccuucauc

SEQ ID NO: 13271 - RNA, 20 nt, Artificial Sequence
  spacer sequence CTCN PAM
cuguuaaugaccacccuuca

SEQ ID NO: 13272 - RNA, 20 nt, Artificial Sequence
  spacer sequence CTCN PAM
gucucucuguuaaugaccac

SEQ ID NO: 13273 - RNA, 20 nt, Artificial Sequence
  spacer sequence CTCN PAM
cugucucucuguuaaugacc

SEQ ID NO: 13274 - RNA, 20 nt, Artificial Sequence
  spacer sequence CTCN PAM
ucucucugucucucuguuaa

SEQ ID NO: 13275 - RNA, 20 nt, Artificial Sequence
  spacer sequence CTCN PAM
ugaggugaaccuagaagacc

SEQ ID NO: 13276 - RNA, 20 nt, Artificial Sequence
  spacer sequence CTCN PAM
agaggcacaugucagccucu

SEQ ID NO: 13277 - RNA, 20 nt, Artificial Sequence
  spacer sequence CTCN PAM
aaauauguaauucuugaugg

SEQ ID NO: 13278 - RNA, 20 nt, Artificial Sequence
  spacer sequence CTCN PAM
uggcuaugcauaugcaauau

SEQ ID NO: 13279 - RNA, 20 nt, Artificial Sequence
  spacer sequence CTCN PAM
aauuggaauuaaaaauuacu

SEQ ID NO: 13280 - RNA, 20 nt, Artificial Sequence
  spacer sequence CTCN PAM
guuuuugagcacuguguucu

SEQ ID NO: 13281 - RNA, 20 nt, Artificial Sequence
  spacer sequence CTCN PAM
aaaacagagucagaagaucu

SEQ ID NO: 13282 - RNA, 20 nt, Artificial Sequence
  spacer sequence CTCN PAM
gagagcauucuguaaucaca

SEQ ID NO: 13283 - RNA, 20 nt, Artificial Sequence
  spacer sequence CTCN PAM
gaggcacagcagaagcaaau

SEQ ID NO: 13284 - RNA, 20 nt, Artificial Sequence
  spacer sequence CTCN PAM
cagaggcacagcagaagcaa

SEQ ID NO: 13285 - RNA, 20 nt, Artificial Sequence
  spacer sequence CTCN PAM
uugaaaaucacagucugcca

SEQ ID NO: 13286 - RNA, 20 nt, Artificial Sequence
  spacer sequence CTCN PAM
uggcgaguggaaaacuuacc

SEQ ID NO: 13287 - RNA, 20 nt, Artificial Sequence
  spacer sequence CTCN PAM
ccaggagacgacggaauuua

SEQ ID NO: 13288 - RNA, 20 nt, Artificial Sequence
  spacer sequence CTCN PAM
uuaccccaguuuuuagggua

SEQ ID NO: 13289 - RNA, 20 nt, Artificial Sequence
  spacer sequence CTCN PAM
acagguuuccuguaugugca

SEQ ID NO: 13290 - RNA, 20 nt, Artificial Sequence
  spacer sequence CTCN PAM
auuucaaguggcuuugcaca

SEQ ID NO: 13291 - RNA, 20 nt, Artificial Sequence
  spacer sequence CTCN PAM
guugacacauacucaauuuc

SEQ ID NO: 13292 - RNA, 20 nt, Artificial Sequence
  spacer sequence CTCN PAM
cagccaggaccuauuggaaa

SEQ ID NO: 13293 - RNA, 20 nt, Artificial Sequence
  spacer sequence CTCN PAM
uuugucccaacuuucuggga

SEQ ID NO: 13294 - RNA, 20 nt, Artificial Sequence
  spacer sequence CTCN PAM
gcaggagagaaagugccuuu

SEQ ID NO: 13295 - RNA, 20 nt, Artificial Sequence
  spacer sequence CTCN PAM
ugcugagaaauuaacaccuu

SEQ ID NO: 13296 - RNA, 20 nt, Artificial Sequence
  spacer sequence CTCN PAM
ccugcugagaaauuaacacc

SEQ ID NO: 13297 - RNA, 20 nt, Artificial Sequence
  spacer sequence CTCN PAM
aucaccaggcccuaagccau

SEQ ID NO: 13298 - RNA, 20 nt, Artificial Sequence
  spacer sequence CTCN PAM
uacaaaaggguaaucauaua

SEQ ID NO: 13299 - RNA, 20 nt, Artificial Sequence
  spacer sequence CTCN PAM
uggcuuucuccuacaaaagg

SEQ ID NO: 13300 - RNA, 20 nt, Artificial Sequence
  spacer sequence CTCN PAM
uaaacuucccagucucuugg

SEQ ID NO: 13301 - RNA, 20 nt, Artificial Sequence
  spacer sequence CTCN PAM
aagauuauacucugauuacu

SEQ ID NO: 13302 - RNA, 20 nt, Artificial Sequence
  spacer sequence CTCN PAM
auuaugaucacauccaguuc

SEQ ID NO: 13303 - RNA, 20 nt, Artificial Sequence
  spacer sequence CTCN PAM
uaacaguguacuacauaauu

SEQ ID NO: 13304 - RNA, 20 nt, Artificial Sequence
  spacer sequence CTCN PAM
cagaagacugcugcauacau

SEQ ID NO: 13305 - RNA, 20 nt, Artificial Sequence
  spacer sequence CTCN PAM
ccaaguccaaucagcuacaa

SEQ ID NO: 13306 - RNA, 20 nt, Artificial Sequence
  spacer sequence CTCN PAM
gacccaaucuauacccccuu

SEQ ID NO: 13307 - RNA, 20 nt, Artificial Sequence
  spacer sequence CTCN PAM
uagaacaggucugggcacac

SEQ ID NO: 13308 - RNA, 20 nt, Artificial Sequence
  spacer sequence CTCN PAM
gaagaauaaaacuugacaug

SEQ ID NO: 13309 - RNA, 20 nt, Artificial Sequence
  spacer sequence CTCN PAM
aaugguuuugcaugucaagu

SEQ ID NO: 13310 - RNA, 20 nt, Artificial Sequence
  spacer sequence CTCN PAM
auuacuuauuacuguauauu

SEQ ID NO: 13311 - RNA, 20 nt, Artificial Sequence
  spacer sequence CTCN PAM
aguccccaagggaugugcuu

SEQ ID NO: 13312 - RNA, 20 nt, Artificial Sequence
  spacer sequence CTCN PAM
cacuaacuaguugaagcaag

SEQ ID NO: 13313 - RNA, 20 nt, Artificial Sequence
  spacer sequence CTCN PAM
cuaacuaguugaagcaagug

SEQ ID NO: 13314 - RNA, 20 nt, Artificial Sequence
  spacer sequence CTCN PAM
uucaucuaugcuacuguuuu

SEQ ID NO: 13315 - RNA, 20 nt, Artificial Sequence
  spacer sequence CTCN PAM
uuuaucuugaucacuaguua

SEQ ID NO: 13316 - RNA, 20 nt, Artificial Sequence
  spacer sequence CTCN PAM
cccuccuucuaucuuguugc

SEQ ID NO: 13317 - RNA, 20 nt, Artificial Sequence
  spacer sequence CTCN PAM
uucuaucuuguugcuccauu

SEQ ID NO: 13318 - RNA, 20 nt, Artificial Sequence
  spacer sequence CTCN PAM
auuauucuuaauacacagcu

SEQ ID NO: 13319 - RNA, 20 nt, Artificial Sequence
  spacer sequence CTCN PAM
ugguccaacauggcugcuca

SEQ ID NO: 13320 - RNA, 20 nt, Artificial Sequence
  spacer sequence CTCN PAM
uuaaggacacuuccuuggag

SEQ ID NO: 13321 - RNA, 20 nt, Artificial Sequence
  spacer sequence CTCN PAM
aaggaaguguccuuaaagag

SEQ ID NO: 13322 - RNA, 20 nt, Artificial Sequence
  spacer sequence CTCN PAM
uaaauucuaaccaauagguu

SEQ ID NO: 13323 - RNA, 20 nt, Artificial Sequence
  spacer sequence CTCN PAM
cuugcagugugguguggcca

SEQ ID NO: 13324 - RNA, 20 nt, Artificial Sequence
  spacer sequence CTCN PAM
aguuccuuugaggaagacug

SEQ ID NO: 13325 - RNA, 20 nt, Artificial Sequence
  spacer sequence CTCN PAM
aaggaacuugaguucugugg

SEQ ID NO: 13326 - RNA, 20 nt, Artificial Sequence
  spacer sequence CTCN PAM
cagugaagucacuagaaaug

SEQ ID NO: 13327 - RNA, 20 nt, Artificial Sequence
  spacer sequence CTCN PAM
ucugguugcaagugauagag

SEQ ID NO: 13328 - RNA, 20 nt, Artificial Sequence
  spacer sequence CTCN PAM
aucacuugcaaccagaagag

SEQ ID NO: 13329 - RNA, 20 nt, Artificial Sequence
  spacer sequence CTCN PAM
gucucagucuuggacucugc

SEQ ID NO: 13330 - RNA, 20 nt, Artificial Sequence
  spacer sequence CTCN PAM
gucuuggacucugcuucucu

SEQ ID NO: 13331 - RNA, 20 nt, Artificial Sequence
  spacer sequence CTCN PAM
gcuucucucugggacuggca

SEQ ID NO: 13332 - RNA, 20 nt, Artificial Sequence
  spacer sequence CTCN PAM
cugggacuggcaucauuccc

SEQ ID NO: 13333 - RNA, 20 nt, Artificial Sequence
  spacer sequence CTCN PAM
gggacuggcaucauucccag

SEQ ID NO: 13334 - RNA, 20 nt, Artificial Sequence
  spacer sequence CTCN PAM
gcuggaccagaguugacuuu

SEQ ID NO: 13335 - RNA, 20 nt, Artificial Sequence
  spacer sequence CTCN PAM
aagauguauaaaucaccucu

SEQ ID NO: 13336 - RNA, 20 nt, Artificial Sequence
  spacer sequence CTCN PAM
gacuggccuggagcugggug

SEQ ID NO: 13337 - RNA, 20 nt, Artificial Sequence
  spacer sequence CTCN PAM
aggccagucagagacaccau

SEQ ID NO: 13338 - RNA, 20 nt, Artificial Sequence
  spacer sequence CTCN PAM
aaccauaacacaacagaagc

SEQ ID NO: 13339 - RNA, 20 nt, Artificial Sequence
  spacer sequence CTCN PAM
cccccuguccccuaggcugu

SEQ ID NO: 13340 - RNA, 20 nt, Artificial Sequence
  spacer sequence CTCN PAM
ucagucagaugcuucugcau

SEQ ID NO: 13341 - RNA, 20 nt, Artificial Sequence
  spacer sequence CTCN PAM
agaaacacgacaugacuacc

SEQ ID NO: 13342 - RNA, 20 nt, Artificial Sequence
  spacer sequence CTCN PAM
gaggaccugcaugccugcag

SEQ ID NO: 13343 - RNA, 20 nt, Artificial Sequence
  spacer sequence CTCN PAM
gaggcuuucuccagaaacac

SEQ ID NO: 13344 - RNA, 20 nt, Artificial Sequence
  spacer sequence CTCN PAM
gcaggcaugcagguccucag

SEQ ID NO: 13345 - RNA, 20 nt, Artificial Sequence
  spacer sequence CTCN PAM
ucucccaucuccuacaccua

SEQ ID NO: 13346 - RNA, 20 nt, Artificial Sequence
  spacer sequence CTCN PAM
caucuccuacaccuagucca

SEQ ID NO: 13347 - RNA, 20 nt, Artificial Sequence
  spacer sequence CTCN PAM
uuaacaggaccaggagcaaa

SEQ ID NO: 13348 - RNA, 20 nt, Artificial Sequence
  spacer sequence CTCN PAM
ugguccuguuaaugagcaua

SEQ ID NO: 13349 - RNA, 20 nt, Artificial Sequence
  spacer sequence CTCN PAM
auuggugaucagcguguauu

SEQ ID NO: 13350 - RNA, 20 nt, Artificial Sequence
  spacer sequence CTCN PAM
guaugugucgcaugcucugc

SEQ ID NO: 13351 - RNA, 20 nt, Artificial Sequence
  spacer sequence CTCN PAM
gcugaaaccagcuuucugaa

SEQ ID NO: 13352 - RNA, 20 nt, Artificial Sequence
  spacer sequence CTCN PAM
gccuucagaaagcugguuuc

SEQ ID NO: 13353 - RNA, 20 nt, Artificial Sequence
  spacer sequence CTCN PAM
uucuuugcuuuacauuuuaa

SEQ ID NO: 13354 - RNA, 20 nt, Artificial Sequence
  spacer sequence CTCN PAM
ccuucagaucauggugagau

SEQ ID NO: 13355 - RNA, 20 nt, Artificial Sequence
  spacer sequence CTCN PAM
uucagaucauggugagauuc

SEQ ID NO: 13356 - RNA, 20 nt, Artificial Sequence
  spacer sequence CTCN PAM
ccaugaucugaaggagaggu

SEQ ID NO: 13357 - RNA, 20 nt, Artificial Sequence
  spacer sequence CTCN PAM
aaauaaauaaauaaaauuau

SEQ ID NO: 13358 - RNA, 20 nt, Artificial Sequence
  spacer sequence CTCN PAM
caucuguaaucccagcacuu

SEQ ID NO: 13359 - RNA, 20 nt, Artificial Sequence
  spacer sequence CTCN PAM
agggccccacccucuauuuu

SEQ ID NO: 13360 - RNA, 20 nt, Artificial Sequence
  spacer sequence CTCN PAM
auuuuuacuuugaaagauaa

SEQ ID NO: 13361 - RNA, 20 nt, Artificial Sequence
  spacer sequence CTCN PAM
uucccuacaccucacagcug

SEQ ID NO: 13362 - RNA, 20 nt, Artificial Sequence
  spacer sequence CTCN PAM
cagcugggauuugagcacag

SEQ ID NO: 13363 - RNA, 20 nt, Artificial Sequence
  spacer sequence CTCN PAM
aaucccagcugugaggugua

SEQ ID NO: 13364 - RNA, 20 nt, Artificial Sequence
  spacer sequence CTCN PAM
acaucuauagagguacaucu

SEQ ID NO: 13365 - RNA, 20 nt, Artificial Sequence
  spacer sequence CTCN PAM
auagauguggagggucggau

SEQ ID NO: 13366 - RNA, 20 nt, Artificial Sequence
  spacer sequence CTCN PAM
cuuuaauccaugugaccugu

SEQ ID NO: 13367 - RNA, 20 nt, Artificial Sequence
  spacer sequence CTCN PAM
cugggccuguuuccucaccu

SEQ ID NO: 13368 - RNA, 20 nt, Artificial Sequence
  spacer sequence CTCN PAM
ccuauaaaaaggaagugaua

SEQ ID NO: 13369 - RNA, 20 nt, Artificial Sequence
  spacer sequence CTCN PAM
aacacuuauuaauaaguguu

SEQ ID NO: 13370 - RNA, 20 nt, Artificial Sequence
  spacer sequence CTCN PAM
uggccuagucacaacagauu

SEQ ID NO: 13371 - RNA, 20 nt, Artificial Sequence
  spacer sequence CTCN PAM
augcuaaacaaucaaucuug

SEQ ID NO: 13372 - RNA, 20 nt, Artificial Sequence
  spacer sequence CTCN PAM
gcaggugauucugaugagua

SEQ ID NO: 13373 - RNA, 20 nt, Artificial Sequence
  spacer sequence CTCN PAM
ucagaaucaccugcagagcu

SEQ ID NO: 13374 - RNA, 20 nt, Artificial Sequence
  spacer sequence CTCN PAM
gaaucggagauuucaaaacu

SEQ ID NO: 13375 - RNA, 20 nt, Artificial Sequence
  spacer sequence CTCN PAM
gauucugagucccggcuacu

SEQ ID NO: 13376 - RNA, 20 nt, Artificial Sequence
  spacer sequence CTCN PAM
aucagaacuugacaaaugac

SEQ ID NO: 13377 - RNA, 20 nt, Artificial Sequence
  spacer sequence CTCN PAM
aaaauauaugcuacaugauc

SEQ ID NO: 13378 - RNA, 20 nt, Artificial Sequence
  spacer sequence CTCN PAM
auacuggcaaauuuuugucu

SEQ ID NO: 13379 - RNA, 20 nt, Artificial Sequence
  spacer sequence CTCN PAM
aauccacugucaaaagacaa

SEQ ID NO: 13380 - RNA, 20 nt, Artificial Sequence
  spacer sequence CTCN PAM
cugaauaugcugggccauuu

SEQ ID NO: 13381 - RNA, 20 nt, Artificial Sequence
  spacer sequence CTCN PAM
ugcgccucauaauugacaca

SEQ ID NO: 13382 - RNA, 20 nt, Artificial Sequence
  spacer sequence CTCN PAM
uaauugacacaaaaagcaau

SEQ ID NO: 13383 - RNA, 20 nt, Artificial Sequence
  spacer sequence CTCN PAM
uuuggaauugcuuuuugugu

SEQ ID NO: 13384 - RNA, 20 nt, Artificial Sequence
  spacer sequence CTCN PAM
aauacagcuguuacuaauaa

SEQ ID NO: 13385 - RNA, 20 nt, Artificial Sequence
  spacer sequence CTCN PAM
ccaaagcacugucauuaaaa

SEQ ID NO: 13386 - RNA, 20 nt, Artificial Sequence
  spacer sequence CTCN PAM
cacauccagaucaacauugu

SEQ ID NO: 13387 - RNA, 20 nt, Artificial Sequence
  spacer sequence CTCN PAM
uuauguacgggucaaacccg

SEQ ID NO: 13388 - RNA, 20 nt, Artificial Sequence
  spacer sequence CTCN PAM
caccacuguucccccuuuca

SEQ ID NO: 13389 - RNA, 20 nt, Artificial Sequence
  spacer sequence CTCN PAM
guucagggacaccagacuuu

SEQ ID NO: 13390 - RNA, 20 nt, Artificial Sequence
  spacer sequence CTCN PAM
ggaaacucugcaaccaggug

SEQ ID NO: 13391 - RNA, 20 nt, Artificial Sequence
  spacer sequence CTCN PAM
gcaaccaggugagaugauuc

SEQ ID NO: 13392 - RNA, 20 nt, Artificial Sequence
  spacer sequence CTCN PAM
ccugguugcagaguuuccug

SEQ ID NO: 13393 - RNA, 20 nt, Artificial Sequence
  spacer sequence CTCN PAM
aaacccucauaaugaaauuc

SEQ ID NO: 13394 - RNA, 20 nt, Artificial Sequence
  spacer sequence CTCN PAM
uaaugaaauucccucacauu

SEQ ID NO: 13395 - RNA, 20 nt, Artificial Sequence
  spacer sequence CTCN PAM
cauucuaucagauaaauccu

SEQ ID NO: 13396 - RNA, 20 nt, Artificial Sequence
  spacer sequence CTCN PAM
ccaguuaggauuuaucugau

SEQ ID NO: 13397 - RNA, 20 nt, Artificial Sequence
  spacer sequence CTCN PAM
caccaguuaggauuuaucug

SEQ ID NO: 13398 - RNA, 20 nt, Artificial Sequence
  spacer sequence CTCN PAM
aacaucuugcaguuauuuuc

SEQ ID NO: 13399 - RNA, 20 nt, Artificial Sequence
  spacer sequence CTCN PAM
ucugggaaagaaaauaacug

SEQ ID NO: 13400 - RNA, 20 nt, Artificial Sequence
  spacer sequence CTCN PAM
uaccucccgaaucugcugug

SEQ ID NO: 13401 - RNA, 20 nt, Artificial Sequence
  spacer sequence CTCN PAM
cgaaucugcuguggacauua

SEQ ID NO: 13402 - RNA, 20 nt, Artificial Sequence
  spacer sequence CTCN PAM
auccuacagacagaagacuc

SEQ ID NO: 13403 - RNA, 20 nt, Artificial Sequence
  spacer sequence CTCN PAM
uuaguuuccaaaccuaugac

SEQ ID NO: 13404 - RNA, 20 nt, Artificial Sequence
  spacer sequence CTCN PAM
gagccauucaaaugcugaug

SEQ ID NO: 13405 - RNA, 20 nt, Artificial Sequence
  spacer sequence CTCN PAM
gagaagcccuuacaugaaga

SEQ ID NO: 13406 - RNA, 20 nt, Artificial Sequence
  spacer sequence CTCN PAM
ucuccuacuguuuuaggcau

SEQ ID NO: 13407 - RNA, 20 nt, Artificial Sequence
  spacer sequence CTCN PAM
ccuacuguuuuaggcauuuu

SEQ ID NO: 13408 - RNA, 20 nt, Artificial Sequence
  spacer sequence CTCN PAM
uacuguuuuaggcauuuuga

SEQ ID NO: 13409 - RNA, 20 nt, Artificial Sequence
  spacer sequence CTCN PAM
ucuccucugccucuaacauu

SEQ ID NO: 13410 - RNA, 20 nt, Artificial Sequence
  spacer sequence CTCN PAM
ucugccucuaacauuucaga

SEQ ID NO: 13411 - RNA, 20 nt, Artificial Sequence
  spacer sequence CTCN PAM
gccucuaacauuucagaaua

SEQ ID NO: 13412 - RNA, 20 nt, Artificial Sequence
  spacer sequence CTCN PAM
aacauuucagaauauaaguc

SEQ ID NO: 13413 - RNA, 20 nt, Artificial Sequence
  spacer sequence CTCN PAM
aaauacauguuuuaaaagcc

SEQ ID NO: 13414 - RNA, 20 nt, Artificial Sequence
  spacer sequence CTCN PAM
gaaaguaacaagcauucacc

SEQ ID NO: 13415 - RNA, 20 nt, Artificial Sequence
  spacer sequence CTCN PAM
uaaggugaaugcuuguuacu

SEQ ID NO: 13416 - RNA, 20 nt, Artificial Sequence
  spacer sequence CTCN PAM
ucugugauucuuaagaauaa

SEQ ID NO: 13417 - RNA, 20 nt, Artificial Sequence
  spacer sequence CTCN PAM
aucugccuucacaccucccu

SEQ ID NO: 13418 - RNA, 20 nt, Artificial Sequence
  spacer sequence CTCN PAM
cuuuaaccccuccaacaggg

SEQ ID NO: 13419 - RNA, 20 nt, Artificial Sequence
  spacer sequence CTCN PAM
aacagggcgagaagccucuu

SEQ ID NO: 13420 - RNA, 20 nt, Artificial Sequence
  spacer sequence CTCN PAM
cccuguuggagggguuaaag

SEQ ID NO: 13421 - RNA, 20 nt, Artificial Sequence
  spacer sequence CTCN PAM
ugcguggggccuugcuuucc

SEQ ID NO: 13422 - RNA, 20 nt, Artificial Sequence
  spacer sequence CTCN PAM
gugcugguuucagagacauc

SEQ ID NO: 13423 - RNA, 20 nt, Artificial Sequence
  spacer sequence CTCN PAM
gaaaccagcacugagacaaa

SEQ ID NO: 13424 - RNA, 20 nt, Artificial Sequence
  spacer sequence CTCN PAM
guucucagggagcuaacuuu

SEQ ID NO: 13425 - RNA, 20 nt, Artificial Sequence
  spacer sequence CTCN PAM
gggagcuaacuuuagcagca

SEQ ID NO: 13426 - RNA, 20 nt, Artificial Sequence
  spacer sequence CTCN PAM
cugagaacagagcuggaugg

SEQ ID NO: 13427 - RNA, 20 nt, Artificial Sequence
  spacer sequence CTCN PAM
gccagcagaugcagaaucug

SEQ ID NO: 13428 - RNA, 20 nt, Artificial Sequence
  spacer sequence CTCN PAM
cucucgugugaggacauuua

SEQ ID NO: 13429 - RNA, 20 nt, Artificial Sequence
  spacer sequence CTCN PAM
cucgugugaggacauuuaau

SEQ ID NO: 13430 - RNA, 20 nt, Artificial Sequence
  spacer sequence CTCN PAM
cgugugaggacauuuaauau

SEQ ID NO: 13431 - RNA, 20 nt, Artificial Sequence
  spacer sequence CTCN PAM
ugugaggacauuuaauauau

SEQ ID NO: 13432 - RNA, 20 nt, Artificial Sequence
  spacer sequence CTCN PAM
cacgagagagagucagccau

SEQ ID NO: 13433 - RNA, 20 nt, Artificial Sequence
  spacer sequence CTCN PAM
ggauauauuaaauguccuca

SEQ ID NO: 13434 - RNA, 20 nt, Artificial Sequence
  spacer sequence CTCN PAM
agauaggacugcuuguuaac

SEQ ID NO: 13435 - RNA, 20 nt, Artificial Sequence
  spacer sequence CTCN PAM
gauuucuccucugggcaggc

SEQ ID NO: 13436 - RNA, 20 nt, Artificial Sequence
  spacer sequence CTCN PAM
ucugggcaggccagcaaauu

SEQ ID NO: 13437 - RNA, 20 nt, Artificial Sequence
  spacer sequence CTCN PAM
gggcaggccagcaaauuuau

SEQ ID NO: 13438 - RNA, 20 nt, Artificial Sequence
  spacer sequence CTCN PAM
ccuuucuccaaauaaagucu

SEQ ID NO: 13439 - RNA, 20 nt, Artificial Sequence
  spacer sequence CTCN PAM
aaauaaagucuuucuuucau

SEQ ID NO: 13440 - RNA, 20 nt, Artificial Sequence
  spacer sequence CTCN PAM
cugacucucccauuaaccuu

SEQ ID NO: 13441 - RNA, 20 nt, Artificial Sequence
  spacer sequence CTCN PAM
cccauuaaccuuuuaaccac

SEQ ID NO: 13442 - RNA, 20 nt, Artificial Sequence
  spacer sequence CTCN PAM
cauuaaccuuuuaaccacuu

SEQ ID NO: 13443 - RNA, 20 nt, Artificial Sequence
  spacer sequence CTCN PAM
agugguuaaaagguuaaugg

SEQ ID NO: 13444 - RNA, 20 nt, Artificial Sequence
  spacer sequence CTCN PAM
ucaagugguuaaaagguuaa

SEQ ID NO: 13445 - RNA, 20 nt, Artificial Sequence
  spacer sequence CTCN PAM
cuucaaaaggcggaguuuca

SEQ ID NO: 13446 - RNA, 20 nt, Artificial Sequence
  spacer sequence CTCN PAM
ucaaaaggcggaguuucauu

SEQ ID NO: 13447 - RNA, 20 nt, Artificial Sequence
  spacer sequence CTCN PAM
gccuuuugaagagagaagug

SEQ ID NO: 13448 - RNA, 20 nt, Artificial Sequence
  spacer sequence CTCN PAM
uuguuuuucucggaucacuc

SEQ ID NO: 13449 - RNA, 20 nt, Artificial Sequence
  spacer sequence CTCN PAM
caagcagcuggggcuacagg

SEQ ID NO: 13450 - RNA, 20 nt, Artificial Sequence
  spacer sequence CTCN PAM
gccucccaagcagcuggggc

SEQ ID NO: 13451 - RNA, 20 nt, Artificial Sequence
  spacer sequence CTCN PAM
ugccucagccucccaagcag

SEQ ID NO: 13452 - RNA, 20 nt, Artificial Sequence
  spacer sequence CTCN PAM
uggguucaagcaauucuccu

SEQ ID NO: 13453 - RNA, 20 nt, Artificial Sequence
  spacer sequence CTCN PAM
gccuccuggguucaagcaau

SEQ ID NO: 13454 - RNA, 20 nt, Artificial Sequence
  spacer sequence CTCN PAM
ccacagaaaggaaggcugug

SEQ ID NO: 13455 - RNA, 20 nt, Artificial Sequence
  spacer sequence CTCN PAM
ugguggcagccuccccacag

SEQ ID NO: 13456 - RNA, 20 nt, Artificial Sequence
  spacer sequence CTCN PAM
uuguuauaggggccaagaaa

SEQ ID NO: 13457 - RNA, 20 nt, Artificial Sequence
  spacer sequence CTCN PAM
uucucugaguggggaaguuc

SEQ ID NO: 13458 - RNA, 20 nt, Artificial Sequence
  spacer sequence CTCN PAM
gaguggggaaguucucaagu

SEQ ID NO: 13459 - RNA, 20 nt, Artificial Sequence
  spacer sequence CTCN PAM
gagaaagagucaucucauug

SEQ ID NO: 13460 - RNA, 20 nt, Artificial Sequence
  spacer sequence CTCN PAM
aguuuuaaucuuaauagccc

SEQ ID NO: 13461 - RNA, 20 nt, Artificial Sequence
  spacer sequence CTCN PAM
agaugggcccuuuuuggaag

SEQ ID NO: 13462 - RNA, 20 nt, Artificial Sequence
  spacer sequence CTCN PAM
aacuuucaaaauccucacaa

SEQ ID NO: 13463 - RNA, 20 nt, Artificial Sequence
  spacer sequence CTCN PAM
caaaugcauugugcagcaca

SEQ ID NO: 13464 - RNA, 20 nt, Artificial Sequence
  spacer sequence CTCN PAM
ucaggaugcugggguucugu

SEQ ID NO: 13465 - RNA, 20 nt, Artificial Sequence
  spacer sequence CTCN PAM
caaugaccacagaaccccag

SEQ ID NO: 13466 - RNA, 20 nt, Artificial Sequence
  spacer sequence CTCN PAM
ggcauuucucccaaugacca

SEQ ID NO: 13467 - RNA, 20 nt, Artificial Sequence
  spacer sequence CTCN PAM
acuauuggacuucuccaggc

SEQ ID NO: 13468 - RNA, 20 nt, Artificial Sequence
  spacer sequence CTCN PAM
aggccuuuaauauggaaugu

SEQ ID NO: 13469 - RNA, 20 nt, Artificial Sequence
  spacer sequence CTCN PAM
auauaauacuauuucuauga

SEQ ID NO: 13470 - RNA, 20 nt, Artificial Sequence
  spacer sequence CTCN PAM
cccagcauuuuacaaaauau

SEQ ID NO: 13471 - RNA, 20 nt, Artificial Sequence
  spacer sequence CTCN PAM
ccaaggacagaaagaauaag

SEQ ID NO: 13472 - RNA, 20 nt, Artificial Sequence
  spacer sequence CTCN PAM
gucuaggcaucccaggcuuu

SEQ ID NO: 13473 - RNA, 20 nt, Artificial Sequence
  spacer sequence CTCN PAM
gaugauucucugucuaggca

SEQ ID NO: 13474 - RNA, 20 nt, Artificial Sequence
  spacer sequence CTCN PAM
gcucugaugauucucugucu

SEQ ID NO: 13475 - RNA, 20 nt, Artificial Sequence
  spacer sequence CTCN PAM
gaaaugaaggaaggugagag

SEQ ID NO: 13476 - RNA, 20 nt, Artificial Sequence
  spacer sequence CTCN PAM
ccuuccuucauuucagaguc

SEQ ID NO: 13477 - RNA, 20 nt, Artificial Sequence
  spacer sequence CTCN PAM
caccuuccuucauuucagag

SEQ ID NO: 13478 - RNA, 20 nt, Artificial Sequence
  spacer sequence CTCN PAM
ucucucaccuuccuucauuu

SEQ ID NO: 13479 - RNA, 20 nt, Artificial Sequence
  spacer sequence CTCN PAM
cucaucucucaccuuccuuc

SEQ ID NO: 13480 - RNA, 20 nt, Artificial Sequence
  spacer sequence CTCN PAM
cccucccucaucucucaccu

SEQ ID NO: 13481 - RNA, 20 nt, Artificial Sequence
  spacer sequence CTCN PAM
cccccucccucaucucucac

SEQ ID NO: 13482 - RNA, 20 nt, Artificial Sequence
  spacer sequence CTCN PAM
cucccccucccucaucucuc

SEQ ID NO: 13483 - RNA, 20 nt, Artificial Sequence
  spacer sequence CTCN PAM
aaagcagcagagucauugaa

SEQ ID NO: 13484 - RNA, 20 nt, Artificial Sequence
  spacer sequence CTCN PAM
gcugcuuuugaguuguuaga

SEQ ID NO: 13485 - RNA, 20 nt, Artificial Sequence
  spacer sequence CTCN PAM
ucaauuacuucuuguuggcc

SEQ ID NO: 13486 - RNA, 20 nt, Artificial Sequence
  spacer sequence CTCN PAM
auuacuucuuguuggccaga

SEQ ID NO: 13487 - RNA, 20 nt, Artificial Sequence
  spacer sequence CTCN PAM
aagauaguaaacuuuaucau

SEQ ID NO: 13488 - RNA, 20 nt, Artificial Sequence
  spacer sequence CTCN PAM
guaugauaaaguuuacuauc

SEQ ID NO: 13489 - RNA, 20 nt, Artificial Sequence
  spacer sequence CTCN PAM
ugaccucuguaugauaaagu

SEQ ID NO: 13490 - RNA, 20 nt, Artificial Sequence
  spacer sequence CTCN PAM
acuagauaauuuuucacagu

SEQ ID NO: 13491 - RNA, 20 nt, Artificial Sequence
  spacer sequence CTCN PAM
guuuauuauaacgugugggu

SEQ ID NO: 13492 - RNA, 20 nt, Artificial Sequence
  spacer sequence CTCN PAM
cuauaaaaccacuuacuagg

SEQ ID NO: 13493 - RNA, 20 nt, Artificial Sequence
  spacer sequence CTCN PAM
ugcacagaaagucaaaucag

SEQ ID NO: 13494 - RNA, 20 nt, Artificial Sequence
  spacer sequence CTCN PAM
uaaaggagagguagcacaug

SEQ ID NO: 13495 - RNA, 20 nt, Artificial Sequence
  spacer sequence CTCN PAM
uuuaagagcacguccuuuua

SEQ ID NO: 13496 - RNA, 20 nt, Artificial Sequence
  spacer sequence CTCN PAM
ccuuuaagagcacguccuuu

SEQ ID NO: 13497 - RNA, 20 nt, Artificial Sequence
  spacer sequence CTCN PAM
cuuucccacacguacacaag

SEQ ID NO: 13498 - RNA, 20 nt, Artificial Sequence
  spacer sequence CTCN PAM
cugcaugccagagacacuca

SEQ ID NO: 13499 - RNA, 20 nt, Artificial Sequence
  spacer sequence CTCN PAM
gcaugccagagacacucaaa

SEQ ID NO: 13500 - RNA, 20 nt, Artificial Sequence
  spacer sequence CTCN PAM
ggcaugcagagaggcgaugg

SEQ ID NO: 13501 - RNA, 20 nt, Artificial Sequence
  spacer sequence CTCN PAM
aaagaauccuucucaguagu

SEQ ID NO: 13502 - RNA, 20 nt, Artificial Sequence
  spacer sequence CTCN PAM
guagucucguuucuuuuaca

SEQ ID NO: 13503 - RNA, 20 nt, Artificial Sequence
  spacer sequence CTCN PAM
uuucuuuuacagcugaguau

SEQ ID NO: 13504 - RNA, 20 nt, Artificial Sequence
  spacer sequence CTCN PAM
gcuguaaaagaaacgagacu

SEQ ID NO: 13505 - RNA, 20 nt, Artificial Sequence
  spacer sequence CTCN PAM
agauacuauaggugccagcc

SEQ ID NO: 13506 - RNA, 20 nt, Artificial Sequence
  spacer sequence CTCN PAM
caaauacuagucaugguauu

SEQ ID NO: 13507 - RNA, 20 nt, Artificial Sequence
  spacer sequence CTCN PAM
aauacuagucaugguauuuu

SEQ ID NO: 13508 - RNA, 20 nt, Artificial Sequence
  spacer sequence CTCN PAM
agggaaaaaaauaccaugac

SEQ ID NO: 13509 - RNA, 20 nt, Artificial Sequence
  spacer sequence CTCN PAM
uucaauauuaugacucuagg

SEQ ID NO: 13510 - RNA, 20 nt, Artificial Sequence
  spacer sequence CTCN PAM
caagagucacggauuuaaua

SEQ ID NO: 13511 - RNA, 20 nt, Artificial Sequence
  spacer sequence CTCN PAM
agagucacggauuuaauauu

SEQ ID NO: 13512 - RNA, 20 nt, Artificial Sequence
  spacer sequence CTCN PAM
ugagagcauuugcuggggaa

SEQ ID NO: 13513 - RNA, 20 nt, Artificial Sequence
  spacer sequence CTCN PAM
ggcuguaauauuaaauccgu

SEQ ID NO: 13514 - RNA, 20 nt, Artificial Sequence
  spacer sequence CTCN PAM
caggcuguaauauuaaaucc

SEQ ID NO: 13515 - RNA, 20 nt, Artificial Sequence
  spacer sequence CTCN PAM
cucaggcuguaauauuaaau

SEQ ID NO: 13516 - RNA, 20 nt, Artificial Sequence
  spacer sequence CTCN PAM
aaccuuggauuuuucuaaga

SEQ ID NO: 13517 - RNA, 20 nt, Artificial Sequence
  spacer sequence CTCN PAM
cucccacaguaauggcuuca

SEQ ID NO: 13518 - RNA, 20 nt, Artificial Sequence
  spacer sequence CTCN PAM
cccacaguaauggcuucaug

SEQ ID NO: 13519 - RNA, 20 nt, Artificial Sequence
  spacer sequence CTCN PAM
cacaguaauggcuucauggu

SEQ ID NO: 13520 - RNA, 20 nt, Artificial Sequence
  spacer sequence CTCN PAM
cccugaauugucccuaggga

SEQ ID NO: 13521 - RNA, 20 nt, Artificial Sequence
  spacer sequence CTCN PAM
cucacccugaauugucccua

SEQ ID NO: 13522 - RNA, 20 nt, Artificial Sequence
  spacer sequence CTCN PAM
ggguucacaauccuaucccc

SEQ ID NO: 13523 - RNA, 20 nt, Artificial Sequence
  spacer sequence CTCN PAM
cauucuuuaacuugucuuuc

SEQ ID NO: 13524 - RNA, 20 nt, Artificial Sequence
  spacer sequence CTCN PAM
uuagaauucacuucuuccaa

SEQ ID NO: 13525 - RNA, 20 nt, Artificial Sequence
  spacer sequence CTCN PAM
uagacuuguuggacuauugg

SEQ ID NO: 13526 - RNA, 20 nt, Artificial Sequence
  spacer sequence CTCN PAM
aaaguauuguugauuuccuu

SEQ ID NO: 13527 - RNA, 20 nt, Artificial Sequence
  spacer sequence CTCN PAM
ccacaaaaaucugcugaaua

SEQ ID NO: 13528 - RNA, 20 nt, Artificial Sequence
  spacer sequence CTCN PAM
auauuuauucagcagauuuu

SEQ ID NO: 13529 - RNA, 20 nt, Artificial Sequence
  spacer sequence CTCN PAM
auuuuguauuggaaucauaa

SEQ ID NO: 13530 - RNA, 20 nt, Artificial Sequence
  spacer sequence CTCN PAM
uuauucuuccaaauccucua

SEQ ID NO: 13531 - RNA, 20 nt, Artificial Sequence
  spacer sequence CTCN PAM
ccagccagggauaagaacua

SEQ ID NO: 13532 - RNA, 20 nt, Artificial Sequence
  spacer sequence CTCN PAM
cuuccucccuucuuguguau

SEQ ID NO: 13533 - RNA, 20 nt, Artificial Sequence
  spacer sequence CTCN PAM
cucccuuccucccuucuugu

SEQ ID NO: 13534 - RNA, 20 nt, Artificial Sequence
  spacer sequence CTCN PAM
cucccucccuuccucccuuc

SEQ ID NO: 13535 - RNA, 20 nt, Artificial Sequence
  spacer sequence CTCN PAM
cuuccucccucccucccuuc

SEQ ID NO: 13536 - RNA, 20 nt, Artificial Sequence
  spacer sequence CTCN PAM
cccuuccucccucccucccu

SEQ ID NO: 13537 - RNA, 20 nt, Artificial Sequence
  spacer sequence CTCN PAM
aacucucccuuccucccucc

SEQ ID NO: 13538 - RNA, 20 nt, Artificial Sequence
  spacer sequence CTCN PAM
cuccaacucucccuuccucc

SEQ ID NO: 13539 - RNA, 20 nt, Artificial Sequence
  spacer sequence CTCN PAM
cucccuccaacucucccuuc

SEQ ID NO: 13540 - RNA, 20 nt, Artificial Sequence
  spacer sequence CTCN PAM
cucccucccuccaacucucc

SEQ ID NO: 13541 - RNA, 20 nt, Artificial Sequence
  spacer sequence CTCN PAM
cucccucccucccuccaacu

SEQ ID NO: 13542 - RNA, 20 nt, Artificial Sequence
  spacer sequence CTCN PAM
cuuuuuuccuuccuuccuuc

SEQ ID NO: 13543 - RNA, 20 nt, Artificial Sequence
  spacer sequence CTCN PAM
cucccuuuuuuccuuccuuc

SEQ ID NO: 13544 - RNA, 20 nt, Artificial Sequence
  spacer sequence CTCN PAM
uauugguccccaagcauacg

SEQ ID NO: 13545 - RNA, 20 nt, Artificial Sequence
  spacer sequence CTCN PAM
agguaaagaaaauuuguaca

SEQ ID NO: 13546 - RNA, 20 nt, Artificial Sequence
  spacer sequence CTCN PAM
gaagucaacucaaggaaccc

SEQ ID NO: 13547 - RNA, 20 nt, Artificial Sequence
  spacer sequence CTCN PAM
aggaacccaaaauacaacca

SEQ ID NO: 13548 - RNA, 20 nt, Artificial Sequence
  spacer sequence CTCN PAM
gguaccauuuccuuuucgga

SEQ ID NO: 13549 - RNA, 20 nt, Artificial Sequence
  spacer sequence CTCN PAM
cuaaucuuuaugcuucaacu

SEQ ID NO: 13550 - RNA, 20 nt, Artificial Sequence
  spacer sequence CTCN PAM
cacuaaucuuuaugcuucaa

SEQ ID NO: 13551 - RNA, 20 nt, Artificial Sequence
  spacer sequence CTCN PAM
ugcaugcuggcuuuucuucc

SEQ ID NO: 13552 - RNA, 20 nt, Artificial Sequence
  spacer sequence CTCN PAM
uggcccucgugcaugcuggc

SEQ ID NO: 13553 - RNA, 20 nt, Artificial Sequence
  spacer sequence CTCN PAM
augcuuucccaauccuccug

SEQ ID NO: 13554 - RNA, 20 nt, Artificial Sequence
  spacer sequence CTCN PAM
guggccacuccaugcuuucc

SEQ ID NO: 13555 - RNA, 20 nt, Artificial Sequence
  spacer sequence CTCN PAM
guggcucaugccuguaaucc

SEQ ID NO: 13556 - RNA, 20 nt, Artificial Sequence
  spacer sequence CTCN PAM
ugccuguaauccuagcacuu

SEQ ID NO: 13557 - RNA, 20 nt, Artificial Sequence
  spacer sequence CTCN PAM
agugaucugcccaccuuggc

SEQ ID NO: 13558 - RNA, 20 nt, Artificial Sequence
  spacer sequence CTCN PAM
gaaguuugagaccagccuga

SEQ ID NO: 13559 - RNA, 20 nt, Artificial Sequence
  spacer sequence CTCN PAM
aacuucugagcucaagugau

SEQ ID NO: 13560 - RNA, 20 nt, Artificial Sequence
  spacer sequence CTCN PAM
guuucucuccacauggucau

SEQ ID NO: 13561 - RNA, 20 nt, Artificial Sequence
  spacer sequence CTCN PAM
ccacauggucaugucugugg

SEQ ID NO: 13562 - RNA, 20 nt, Artificial Sequence
  spacer sequence CTCN PAM
acauggucaugucugugggc

SEQ ID NO: 13563 - RNA, 20 nt, Artificial Sequence
  spacer sequence CTCN PAM
cagcaugguggcugcaucac

SEQ ID NO: 13564 - RNA, 20 nt, Artificial Sequence
  spacer sequence CTCN PAM
gucuucacauggccuucuuc

SEQ ID NO: 13565 - RNA, 20 nt, Artificial Sequence
  spacer sequence CTCN PAM
gccucagucuucacauggcc

SEQ ID NO: 13566 - RNA, 20 nt, Artificial Sequence
  spacer sequence CTCN PAM
uccagcuucuggugacuucu

SEQ ID NO: 13567 - RNA, 20 nt, Artificial Sequence
  spacer sequence CTCN PAM
guguugccaccucccguggg

SEQ ID NO: 13568 - RNA, 20 nt, Artificial Sequence
  spacer sequence CTCN PAM
cgugggggcugcaucaggug

SEQ ID NO: 13569 - RNA, 20 nt, Artificial Sequence
  spacer sequence CTCN PAM
uugauucaaucaccccaagu

SEQ ID NO: 13570 - RNA, 20 nt, Artificial Sequence
  spacer sequence CTCN PAM
uuucucuuugauucaaucac

SEQ ID NO: 13571 - RNA, 20 nt, Artificial Sequence
  spacer sequence CTCN PAM
ccuuucucuuugauucaauc

SEQ ID NO: 13572 - RNA, 20 nt, Artificial Sequence
  spacer sequence CTCN PAM
acucuccuuucucuuugauu

SEQ ID NO: 13573 - RNA, 20 nt, Artificial Sequence
  spacer sequence CTCN PAM
agagugcacagcugaaggga

SEQ ID NO: 13574 - RNA, 20 nt, Artificial Sequence
  spacer sequence CTCN PAM
agagaagucuauuagaaacu

SEQ ID NO: 13575 - RNA, 20 nt, Artificial Sequence
  spacer sequence CTCN PAM
ucccuucagcugugcacucu

SEQ ID NO: 13576 - RNA, 20 nt, Artificial Sequence
  spacer sequence CTCN PAM
cucugcuuccuaauagacua

SEQ ID NO: 13577 - RNA, 20 nt, Artificial Sequence
  spacer sequence CTCN PAM
gcuuccuaauagacuaacaa

SEQ ID NO: 13578 - RNA, 20 nt, Artificial Sequence
  spacer sequence CTCN PAM
cuaaaucuucuucggagacc

SEQ ID NO: 13579 - RNA, 20 nt, Artificial Sequence
  spacer sequence CTCN PAM
aaaucuucuucggagacccc

SEQ ID NO: 13580 - RNA, 20 nt, Artificial Sequence
  spacer sequence CTCN PAM
gaagaagauuuagagagguu

SEQ ID NO: 13581 - RNA, 20 nt, Artificial Sequence
  spacer sequence CTCN PAM
uucguucgagagccaaaaug

SEQ ID NO: 13582 - RNA, 20 nt, Artificial Sequence
  spacer sequence CTCN PAM
aacgaaagagcaacuggcgg

SEQ ID NO: 13583 - RNA, 20 nt, Artificial Sequence
  spacer sequence CTCN PAM
cgaacgaaagagcaacuggc

SEQ ID NO: 13584 - RNA, 20 nt, Artificial Sequence
  spacer sequence CTCN PAM
uuuuggcucucgaacgaaag

SEQ ID NO: 13585 - RNA, 20 nt, Artificial Sequence
  spacer sequence CTCN PAM
cauggucguagauagcaguc

SEQ ID NO: 13586 - RNA, 20 nt, Artificial Sequence
  spacer sequence CTCN PAM
uggucguagauagcaguccc

SEQ ID NO: 13587 - RNA, 20 nt, Artificial Sequence
  spacer sequence CTCN PAM
gguugaucagggacugcuau

SEQ ID NO: 13588 - RNA, 20 nt, Artificial Sequence
  spacer sequence CTCN PAM
uuuaauuggccuccgguuga

SEQ ID NO: 13589 - RNA, 20 nt, Artificial Sequence
  spacer sequence CTCN PAM
cuuuuaauuggccuccgguu

SEQ ID NO: 13590 - RNA, 20 nt, Artificial Sequence
  spacer sequence CTCN PAM
uccaaauauuuccacuucgc

SEQ ID NO: 13591 - RNA, 20 nt, Artificial Sequence
  spacer sequence CTCN PAM
aaauggauuccaaacagucc

SEQ ID NO: 13592 - RNA, 20 nt, Artificial Sequence
  spacer sequence CTCN PAM
gggaugcuuucaauuccuuu

SEQ ID NO: 13593 - RNA, 20 nt, Artificial Sequence
  spacer sequence CTCN PAM
cacccuuccuugcaaagcuu

SEQ ID NO: 13594 - RNA, 20 nt, Artificial Sequence
  spacer sequence CTCN PAM
cccuuccuugcaaagcuuaa

SEQ ID NO: 13595 - RNA, 20 nt, Artificial Sequence
  spacer sequence CTCN PAM
guuugguuacccaccgcccc

SEQ ID NO: 13596 - RNA, 20 nt, Artificial Sequence
  spacer sequence CTCN PAM
uccucuccacaccccaugau

SEQ ID NO: 13597 - RNA, 20 nt, Artificial Sequence
  spacer sequence CTCN PAM
ucuccacaccccaugauagg

SEQ ID NO: 13598 - RNA, 20 nt, Artificial Sequence
  spacer sequence CTCN PAM
ccacaccccaugauagggua

SEQ ID NO: 13599 - RNA, 20 nt, Artificial Sequence
  spacer sequence CTCN PAM
acaccccaugauaggguacu

SEQ ID NO: 13600 - RNA, 20 nt, Artificial Sequence
  spacer sequence CTCN PAM
ggucccuccuggccagggcu

SEQ ID NO: 13601 - RNA, 20 nt, Artificial Sequence
  spacer sequence CTCN PAM
uggccagggcuaguaaagaa

SEQ ID NO: 13602 - RNA, 20 nt, Artificial Sequence
  spacer sequence CTCN PAM
acaccuuucaggaaaacuac

SEQ ID NO: 13603 - RNA, 20 nt, Artificial Sequence
  spacer sequence CTCN PAM
aaggacuuauccacaguggu

SEQ ID NO: 13604 - RNA, 20 nt, Artificial Sequence
  spacer sequence CTCN PAM
acaugaggagaagaagaugg

SEQ ID NO: 13605 - RNA, 20 nt, Artificial Sequence
  spacer sequence CTCN PAM
uguugaguucucuaaggacu

SEQ ID NO: 13606 - RNA, 20 nt, Artificial Sequence
  spacer sequence CTCN PAM
ucauguugaguucucuaagg

SEQ ID NO: 13607 - RNA, 20 nt, Artificial Sequence
  spacer sequence CTCN PAM
aucuucuucuccucauguug

SEQ ID NO: 13608 - RNA, 20 nt, Artificial Sequence
  spacer sequence CTCN PAM
cuucugauuccuuucuccau

SEQ ID NO: 13609 - RNA, 20 nt, Artificial Sequence
  spacer sequence CTCN PAM
ccugcaccauccuucaggga

SEQ ID NO: 13610 - RNA, 20 nt, Artificial Sequence
  spacer sequence CTCN PAM
uugccuuuuuuuuuugccuc

SEQ ID NO: 13611 - RNA, 20 nt, Artificial Sequence
  spacer sequence CTCN PAM
ucuuugccuuuuuuuuuugc

SEQ ID NO: 13612 - RNA, 20 nt, Artificial Sequence
  spacer sequence CTCN PAM
cuccucuuugccuuuuuuuu

SEQ ID NO: 13613 - RNA, 20 nt, Artificial Sequence
  spacer sequence CTCN PAM
cccuccucuuugccuuuuuu

SEQ ID NO: 13614 - RNA, 20 nt, Artificial Sequence
  spacer sequence CTCN PAM
uucaccacuuucucucccuc

SEQ ID NO: 13615 - RNA, 20 nt, Artificial Sequence
  spacer sequence CTCN PAM
accuuucuauaccagucucu

SEQ ID NO: 13616 - RNA, 20 nt, Artificial Sequence
  spacer sequence CTCN PAM
aaaucaaggccaauuuuuua

SEQ ID NO: 13617 - RNA, 20 nt, Artificial Sequence
  spacer sequence GTCN PAM
ucuccaacgcagcaucugug

SEQ ID NO: 13618 - RNA, 20 nt, Artificial Sequence
  spacer sequence GTCN PAM
uccacccacgcccacgccca

SEQ ID NO: 13619 - RNA, 20 nt, Artificial Sequence
  spacer sequence GTCN PAM
cuauuauuuccuugcgugug

SEQ ID NO: 13620 - RNA, 20 nt, Artificial Sequence
  spacer sequence GTCN PAM
cagauacuugugaggcugag

SEQ ID NO: 13621 - RNA, 20 nt, Artificial Sequence
  spacer sequence GTCN PAM
cgaacuccuggccucaagug

SEQ ID NO: 13622 - RNA, 20 nt, Artificial Sequence
  spacer sequence GTCN PAM
ugagccaccacacucggcug

SEQ ID NO: 13623 - RNA, 20 nt, Artificial Sequence
  spacer sequence GTCN PAM
gaguuauuuuuaauaaguaa

SEQ ID NO: 13624 - RNA, 20 nt, Artificial Sequence
  spacer sequence GTCN PAM
aaguauaaggaacccccuga

SEQ ID NO: 13625 - RNA, 20 nt, Artificial Sequence
  spacer sequence GTCN PAM
gauagaccuggauucaaauu

SEQ ID NO: 13626 - RNA, 20 nt, Artificial Sequence
  spacer sequence GTCN PAM
aucagacaccauguaucugu

SEQ ID NO: 13627 - RNA, 20 nt, Artificial Sequence
  spacer sequence GTCN PAM
gaauuugaauccaggucuau

SEQ ID NO: 13628 - RNA, 20 nt, Artificial Sequence
  spacer sequence GTCN PAM
uguaacuaggaaguugcaga

SEQ ID NO: 13629 - RNA, 20 nt, Artificial Sequence
  spacer sequence GTCN PAM
aagaaauugaguaauuuucc

SEQ ID NO: 13630 - RNA, 20 nt, Artificial Sequence
  spacer sequence GTCN PAM
ucugaagaaauagagauaau

SEQ ID NO: 13631 - RNA, 20 nt, Artificial Sequence
  spacer sequence GTCN PAM
cuaccuauagcaacuuaaga

SEQ ID NO: 13632 - RNA, 20 nt, Artificial Sequence
  spacer sequence GTCN PAM
uacacuguguuaaagccuuc

SEQ ID NO: 13633 - RNA, 20 nt, Artificial Sequence
  spacer sequence GTCN PAM
guaaauacuagcauuauuca

SEQ ID NO: 13634 - RNA, 20 nt, Artificial Sequence
  spacer sequence GTCN PAM
aagaccuaaggacuaaauuc

SEQ ID NO: 13635 - RNA, 20 nt, Artificial Sequence
  spacer sequence GTCN PAM
uggacuuuuuuuuuaaguau

SEQ ID NO: 13636 - RNA, 20 nt, Artificial Sequence
  spacer sequence GTCN PAM
uuaggucuuggacuuuuuuu

SEQ ID NO: 13637 - RNA, 20 nt, Artificial Sequence
  spacer sequence GTCN PAM
ccacuucuccccacaugauu

SEQ ID NO: 13638 - RNA, 20 nt, Artificial Sequence
  spacer sequence GTCN PAM
ggagaguuaaagaacauguu

SEQ ID NO: 13639 - RNA, 20 nt, Artificial Sequence
  spacer sequence GTCN PAM
cccuggcccugguguuuuuu

SEQ ID NO: 13640 - RNA, 20 nt, Artificial Sequence
  spacer sequence GTCN PAM
uuucuuuauuuccugugcca

SEQ ID NO: 13641 - RNA, 20 nt, Artificial Sequence
  spacer sequence GTCN PAM
aagaucucuguuuacuagau

SEQ ID NO: 13642 - RNA, 20 nt, Artificial Sequence
  spacer sequence GTCN PAM
cuucccuugagacuggcaag

SEQ ID NO: 13643 - RNA, 20 nt, Artificial Sequence
  spacer sequence GTCN PAM
caagggaagagacuauccuu

SEQ ID NO: 13644 - RNA, 20 nt, Artificial Sequence
  spacer sequence GTCN PAM
gaaguuuguugguuguuuug

SEQ ID NO: 13645 - RNA, 20 nt, Artificial Sequence
  spacer sequence GTCN PAM
uguuuuguuuuguucuaauc

SEQ ID NO: 13646 - RNA, 20 nt, Artificial Sequence
  spacer sequence GTCN PAM
ucuuugcuuggauuagaaca

SEQ ID NO: 13647 - RNA, 20 nt, Artificial Sequence
  spacer sequence GTCN PAM
uuccagugugccuuuccacu

SEQ ID NO: 13648 - RNA, 20 nt, Artificial Sequence
  spacer sequence GTCN PAM
ggcuuucagaaucucuucuu

SEQ ID NO: 13649 - RNA, 20 nt, Artificial Sequence
  spacer sequence GTCN PAM
uaagaagagauucugaaagc

SEQ ID NO: 13650 - RNA, 20 nt, Artificial Sequence
  spacer sequence GTCN PAM
cucacaauuguccuaagaag

SEQ ID NO: 13651 - RNA, 20 nt, Artificial Sequence
  spacer sequence GTCN PAM
ugcugcuucaagcaacccuu

SEQ ID NO: 13652 - RNA, 20 nt, Artificial Sequence
  spacer sequence GTCN PAM
acccaacgcacagcauggau

SEQ ID NO: 13653 - RNA, 20 nt, Artificial Sequence
  spacer sequence GTCN PAM
aguguuaaugcgcacuggga

SEQ ID NO: 13654 - RNA, 20 nt, Artificial Sequence
  spacer sequence GTCN PAM
aagguacucuggguggaggg

SEQ ID NO: 13655 - RNA, 20 nt, Artificial Sequence
  spacer sequence GTCN PAM
uucuucuugaaauucuccag

SEQ ID NO: 13656 - RNA, 20 nt, Artificial Sequence
  spacer sequence GTCN PAM
guuugagcuuuuuuuuuuuu

SEQ ID NO: 13657 - RNA, 20 nt, Artificial Sequence
  spacer sequence GTCN PAM
auacaaucuacaacauauac

SEQ ID NO: 13658 - RNA, 20 nt, Artificial Sequence
  spacer sequence GTCN PAM
ccugcuaauccugagaacau

SEQ ID NO: 13659 - RNA, 20 nt, Artificial Sequence
  spacer sequence GTCN PAM
uccgauugucaaaacuugac

SEQ ID NO: 13660 - RNA, 20 nt, Artificial Sequence
  spacer sequence GTCN PAM
aaacuugaccccuccuuuga

SEQ ID NO: 13661 - RNA, 20 nt, Artificial Sequence
  spacer sequence GTCN PAM
aguuuugacaaucggaggac

SEQ ID NO: 13662 - RNA, 20 nt, Artificial Sequence
  spacer sequence GTCN PAM
aggguacacuuggagaacau

SEQ ID NO: 13663 - RNA, 20 nt, Artificial Sequence
  spacer sequence GTCN PAM
caauggccuuauguucucca

SEQ ID NO: 13664 - RNA, 20 nt, Artificial Sequence
  spacer sequence GTCN PAM
cugucucaauggccuuaugu

SEQ ID NO: 13665 - RNA, 20 nt, Artificial Sequence
  spacer sequence GTCN PAM
gucccugucucaauggccuu

SEQ ID NO: 13666 - RNA, 20 nt, Artificial Sequence
  spacer sequence GTCN PAM
caaugcacagauaggucggu

SEQ ID NO: 13667 - RNA, 20 nt, Artificial Sequence
  spacer sequence GTCN PAM
ugccauagcauuuaggaauu

SEQ ID NO: 13668 - RNA, 20 nt, Artificial Sequence
  spacer sequence GTCN PAM
cucacucaauaauuccuaaa

SEQ ID NO: 13669 - RNA, 20 nt, Artificial Sequence
  spacer sequence GTCN PAM
augucuuggcuguuguacaa

SEQ ID NO: 13670 - RNA, 20 nt, Artificial Sequence
  spacer sequence GTCN PAM
uggcuguuguacaaaacaca

SEQ ID NO: 13671 - RNA, 20 nt, Artificial Sequence
  spacer sequence GTCN PAM
aacuucccauucaaugcucg

SEQ ID NO: 13672 - RNA, 20 nt, Artificial Sequence
  spacer sequence GTCN PAM
cuuccaguucuggccuucca

SEQ ID NO: 13673 - RNA, 20 nt, Artificial Sequence
  spacer sequence GTCN PAM
uagagcugauccagguuucu

SEQ ID NO: 13674 - RNA, 20 nt, Artificial Sequence
  spacer sequence GTCN PAM
ggguuuuuuguuauuguuug

SEQ ID NO: 13675 - RNA, 20 nt, Artificial Sequence
  spacer sequence GTCN PAM
uuuguaccuuuuaauuacaa

SEQ ID NO: 13676 - RNA, 20 nt, Artificial Sequence
  spacer sequence GTCN PAM
uucaaagcuccuuuaugccc

SEQ ID NO: 13677 - RNA, 20 nt, Artificial Sequence
  spacer sequence GTCN PAM
ugccuggagcugaaagcacg

SEQ ID NO: 13678 - RNA, 20 nt, Artificial Sequence
  spacer sequence GTCN PAM
gaggaagugagagugcaggg

SEQ ID NO: 13679 - RNA, 20 nt, Artificial Sequence
  spacer sequence GTCN PAM
ccugauuccuagcccaugau

SEQ ID NO: 13680 - RNA, 20 nt, Artificial Sequence
  spacer sequence GTCN PAM
ccaacuugcugugcaacccu

SEQ ID NO: 13681 - RNA, 20 nt, Artificial Sequence
  spacer sequence GTCN PAM
uguugaggguugcacagcaa

SEQ ID NO: 13682 - RNA, 20 nt, Artificial Sequence
  spacer sequence GTCN PAM
cuuccagccucagcugugca

SEQ ID NO: 13683 - RNA, 20 nt, Artificial Sequence
  spacer sequence GTCN PAM
gcacagcugaggcuggaagg

SEQ ID NO: 13684 - RNA, 20 nt, Artificial Sequence
  spacer sequence GTCN PAM
agggggagugcaggugccuu

SEQ ID NO: 13685 - RNA, 20 nt, Artificial Sequence
  spacer sequence GTCN PAM
cacaacauugcaugagcauc

SEQ ID NO: 13686 - RNA, 20 nt, Artificial Sequence
  spacer sequence GTCN PAM
ugcuucgggcaggcagcugc

SEQ ID NO: 13687 - RNA, 20 nt, Artificial Sequence
  spacer sequence GTCN PAM
agagaagccuaagugagguc

SEQ ID NO: 13688 - RNA, 20 nt, Artificial Sequence
  spacer sequence GTCN PAM
ccuugaugauccagauaugg

SEQ ID NO: 13689 - RNA, 20 nt, Artificial Sequence
  spacer sequence GTCN PAM
ugggauccauaucuggauca

SEQ ID NO: 13690 - RNA, 20 nt, Artificial Sequence
  spacer sequence GTCN PAM
uuaggugucaugggauccau

SEQ ID NO: 13691 - RNA, 20 nt, Artificial Sequence
  spacer sequence GTCN PAM
agccucccuagauguguccu

SEQ ID NO: 13692 - RNA, 20 nt, Artificial Sequence
  spacer sequence GTCN PAM
ggcagagaggaauggagagg

SEQ ID NO: 13693 - RNA, 20 nt, Artificial Sequence
  spacer sequence GTCN PAM
caucucuccuguuucuaaca

SEQ ID NO: 13694 - RNA, 20 nt, Artificial Sequence
  spacer sequence GTCN PAM
uggaggugccuuccagguca

SEQ ID NO: 13695 - RNA, 20 nt, Artificial Sequence
  spacer sequence GTCN PAM
acccucuuugucuacagauu

SEQ ID NO: 13696 - RNA, 20 nt, Artificial Sequence
  spacer sequence GTCN PAM
acagauucagaaacugaguc

SEQ ID NO: 13697 - RNA, 20 nt, Artificial Sequence
  spacer sequence GTCN PAM
agagagaggaagucacucac

SEQ ID NO: 13698 - RNA, 20 nt, Artificial Sequence
  spacer sequence GTCN PAM
cucacuuggggcaugcagcu

SEQ ID NO: 13699 - RNA, 20 nt, Artificial Sequence
  spacer sequence GTCN PAM
ucaauggcaagccacucaac

SEQ ID NO: 13700 - RNA, 20 nt, Artificial Sequence
  spacer sequence GTCN PAM
cagagaagccagccagggcu

SEQ ID NO: 13701 - RNA, 20 nt, Artificial Sequence
  spacer sequence GTCN PAM
gcacguccacagugcagcag

SEQ ID NO: 13702 - RNA, 20 nt, Artificial Sequence
  spacer sequence GTCN PAM
acagugcagcaggugcccag

SEQ ID NO: 13703 - RNA, 20 nt, Artificial Sequence
  spacer sequence GTCN PAM
uggcugggcaccugcugcac

SEQ ID NO: 13704 - RNA, 20 nt, Artificial Sequence
  spacer sequence GTCN PAM
agagucuuggcugggcaccu

SEQ ID NO: 13705 - RNA, 20 nt, Artificial Sequence
  spacer sequence GTCN PAM
accacccgguguuccuggcu

SEQ ID NO: 13706 - RNA, 20 nt, Artificial Sequence
  spacer sequence GTCN PAM
ugcuuacaacaguugcaaga

SEQ ID NO: 13707 - RNA, 20 nt, Artificial Sequence
  spacer sequence GTCN PAM
ucagcugaccaguguucagg

SEQ ID NO: 13708 - RNA, 20 nt, Artificial Sequence
  spacer sequence GTCN PAM
gcugaagacaacgcugccac

SEQ ID NO: 13709 - RNA, 20 nt, Artificial Sequence
  spacer sequence GTCN PAM
ggccugaauucagaccacaa

SEQ ID NO: 13710 - RNA, 20 nt, Artificial Sequence
  spacer sequence GTCN PAM
gaauucaggcccgacuccca

SEQ ID NO: 13711 - RNA, 20 nt, Artificial Sequence
  spacer sequence GTCN PAM
aaauccucucuucuuugaaa

SEQ ID NO: 13712 - RNA, 20 nt, Artificial Sequence
  spacer sequence GTCN PAM
ccauccucugaacagcuugc

SEQ ID NO: 13713 - RNA, 20 nt, Artificial Sequence
  spacer sequence GTCN PAM
ugaguucugggcugccgcuu

SEQ ID NO: 13714 - RNA, 20 nt, Artificial Sequence
  spacer sequence GTCN PAM
ugggaccaaaggcugggcgu

SEQ ID NO: 13715 - RNA, 20 nt, Artificial Sequence
  spacer sequence GTCN PAM
caugaccucaggcacaugcg

SEQ ID NO: 13716 - RNA, 20 nt, Artificial Sequence
  spacer sequence GTCN PAM
ucaagaggagcaggauguuc

SEQ ID NO: 13717 - RNA, 20 nt, Artificial Sequence
  spacer sequence GTCN PAM
acaggcaaguaaguuguuau

SEQ ID NO: 13718 - RNA, 20 nt, Artificial Sequence
  spacer sequence GTCN PAM
uuuggggggaggaacuggaa

SEQ ID NO: 13719 - RNA, 20 nt, Artificial Sequence
  spacer sequence GTCN PAM
gacaucccucauguccccau

SEQ ID NO: 13720 - RNA, 20 nt, Artificial Sequence
  spacer sequence GTCN PAM
gacaggagaaacaagcauuu

SEQ ID NO: 13721 - RNA, 20 nt, Artificial Sequence
  spacer sequence GTCN PAM
ccaugccagcacccccaggc

SEQ ID NO: 13722 - RNA, 20 nt, Artificial Sequence
  spacer sequence GTCN PAM
gcaacucugccaccuuacac

SEQ ID NO: 13723 - RNA, 20 nt, Artificial Sequence
  spacer sequence GTCN PAM
uuucgguggacuccacacug

SEQ ID NO: 13724 - RNA, 20 nt, Artificial Sequence
  spacer sequence GTCN PAM
accgaaacgacccucaagcc

SEQ ID NO: 13725 - RNA, 20 nt, Artificial Sequence
  spacer sequence GTCN PAM
gugaggcaguguggagucca

SEQ ID NO: 13726 - RNA, 20 nt, Artificial Sequence
  spacer sequence GTCN PAM
uagccagcugugcugcaccu

SEQ ID NO: 13727 - RNA, 20 nt, Artificial Sequence
  spacer sequence GTCN PAM
ugccuugcauccucccuccc

SEQ ID NO: 13728 - RNA, 20 nt, Artificial Sequence
  spacer sequence GTCN PAM
ucauguuuuucccucuuugg

SEQ ID NO: 13729 - RNA, 20 nt, Artificial Sequence
  spacer sequence GTCN PAM
gaacauauccauagaggagg

SEQ ID NO: 13730 - RNA, 20 nt, Artificial Sequence
  spacer sequence GTCN PAM
gaaagggcccugggauaaau

SEQ ID NO: 13731 - RNA, 20 nt, Artificial Sequence
  spacer sequence GTCN PAM
acacgcaucaccugccaccc

SEQ ID NO: 13732 - RNA, 20 nt, Artificial Sequence
  spacer sequence GTCN PAM
cccagggacucccuccagcu

SEQ ID NO: 13733 - RNA, 20 nt, Artificial Sequence
  spacer sequence GTCN PAM
cugggggacgaguugggugg

SEQ ID NO: 13734 - RNA, 20 nt, Artificial Sequence
  spacer sequence GTCN PAM
ccuggccuuucccagagcug

SEQ ID NO: 13735 - RNA, 20 nt, Artificial Sequence
  spacer sequence GTCN PAM
gaguaaguaaaaccagaaac

SEQ ID NO: 13736 - RNA, 20 nt, Artificial Sequence
  spacer sequence GTCN PAM
agcaacacaguggcauuugc

SEQ ID NO: 13737 - RNA, 20 nt, Artificial Sequence
  spacer sequence GTCN PAM
ggaaauuauaggaucuuucu

SEQ ID NO: 13738 - RNA, 20 nt, Artificial Sequence
  spacer sequence GTCN PAM
uggucaauaauaauccgaga

SEQ ID NO: 13739 - RNA, 20 nt, Artificial Sequence
  spacer sequence GTCN PAM
auaauaauccgagagaaacc

SEQ ID NO: 13740 - RNA, 20 nt, Artificial Sequence
  spacer sequence GTCN PAM
gcccccgccuggccccagcu

SEQ ID NO: 13741 - RNA, 20 nt, Artificial Sequence
  spacer sequence GTCN PAM
cacagugacauuaacccagc

SEQ ID NO: 13742 - RNA, 20 nt, Artificial Sequence
  spacer sequence GTCN PAM
cugugagacccuuagccguu

SEQ ID NO: 13743 - RNA, 20 nt, Artificial Sequence
  spacer sequence GTCN PAM
guaagaaacccagaacuuga

SEQ ID NO: 13744 - RNA, 20 nt, Artificial Sequence
  spacer sequence GTCN PAM
aauuucaaagcuacaauagg

SEQ ID NO: 13745 - RNA, 20 nt, Artificial Sequence
  spacer sequence GTCN PAM
cacuucaggucagagauuag

SEQ ID NO: 13746 - RNA, 20 nt, Artificial Sequence
  spacer sequence GTCN PAM
gagauuagaacuuccaagcu

SEQ ID NO: 13747 - RNA, 20 nt, Artificial Sequence
  spacer sequence GTCN PAM
augcugaagcacgcuggugc

SEQ ID NO: 13748 - RNA, 20 nt, Artificial Sequence
  spacer sequence GTCN PAM
auggaguggaaaauucuaaa

SEQ ID NO: 13749 - RNA, 20 nt, Artificial Sequence
  spacer sequence GTCN PAM
aagauucuuaugucaaggca

SEQ ID NO: 13750 - RNA, 20 nt, Artificial Sequence
  spacer sequence GTCN PAM
aggcagaagaauagagcaca

SEQ ID NO: 13751 - RNA, 20 nt, Artificial Sequence
  spacer sequence GTCN PAM
ugugacagguggauguccau

SEQ ID NO: 13752 - RNA, 20 nt, Artificial Sequence
  spacer sequence GTCN PAM
caugacuaaauuguuuaacc

SEQ ID NO: 13753 - RNA, 20 nt, Artificial Sequence
  spacer sequence GTCN PAM
auuucuacucuuauucuacu

SEQ ID NO: 13754 - RNA, 20 nt, Artificial Sequence
  spacer sequence GTCN PAM
gcuggcugaccaguucccaa

SEQ ID NO: 13755 - RNA, 20 nt, Artificial Sequence
  spacer sequence GTCN PAM
gccagccgaccaucaagaga

SEQ ID NO: 13756 - RNA, 20 nt, Artificial Sequence
  spacer sequence GTCN PAM
ggauggcaaucccacagacu

SEQ ID NO: 13757 - RNA, 20 nt, Artificial Sequence
  spacer sequence GTCN PAM
gugggauugccauccugacu

SEQ ID NO: 13758 - RNA, 20 nt, Artificial Sequence
  spacer sequence GTCN PAM
cauucuucaacuacaccacc

SEQ ID NO: 13759 - RNA, 20 nt, Artificial Sequence
  spacer sequence GTCN PAM
gugagggguggaagguauca

SEQ ID NO: 13760 - RNA, 20 nt, Artificial Sequence
  spacer sequence GTCN PAM
uuccacaaggcaaagcuggu

SEQ ID NO: 13761 - RNA, 20 nt, Artificial Sequence
  spacer sequence GTCN PAM
ccaggugaugaaaacaguca

SEQ ID NO: 13762 - RNA, 20 nt, Artificial Sequence
  spacer sequence GTCN PAM
cuccacucuuguaaaccugu

SEQ ID NO: 13763 - RNA, 20 nt, Artificial Sequence
  spacer sequence GTCN PAM
gugcauuccaaagaaugccu

SEQ ID NO: 13764 - RNA, 20 nt, Artificial Sequence
  spacer sequence GTCN PAM
gcucuaagugcaacacccuc

SEQ ID NO: 13765 - RNA, 20 nt, Artificial Sequence
  spacer sequence GTCN PAM
cucuuccaggcaucuagccu

SEQ ID NO: 13766 - RNA, 20 nt, Artificial Sequence
  spacer sequence GTCN PAM
uauucuaaaccuuuuccaug

SEQ ID NO: 13767 - RNA, 20 nt, Artificial Sequence
  spacer sequence GTCN PAM
ccaguauuaauguuuaucaa

SEQ ID NO: 13768 - RNA, 20 nt, Artificial Sequence
  spacer sequence GTCN PAM
uaacuaagagcacagauuua

SEQ ID NO: 13769 - RNA, 20 nt, Artificial Sequence
  spacer sequence GTCN PAM
uaaaucugugcucuuaguua

SEQ ID NO: 13770 - RNA, 20 nt, Artificial Sequence
  spacer sequence GTCN PAM
uauugccucagaggacuggc

SEQ ID NO: 13771 - RNA, 20 nt, Artificial Sequence
  spacer sequence GTCN PAM
ucugaggcaauaugacuguu

SEQ ID NO: 13772 - RNA, 20 nt, Artificial Sequence
  spacer sequence GTCN PAM
cugugccaguccucugaggc

SEQ ID NO: 13773 - RNA, 20 nt, Artificial Sequence
  spacer sequence GTCN PAM
ggcauguccagauuccccag

SEQ ID NO: 13774 - RNA, 20 nt, Artificial Sequence
  spacer sequence GTCN PAM
agauuccccaguaaagguua

SEQ ID NO: 13775 - RNA, 20 nt, Artificial Sequence
  spacer sequence GTCN PAM
uuuuuccuuuucagauaaua

SEQ ID NO: 13776 - RNA, 20 nt, Artificial Sequence
  spacer sequence GTCN PAM
cuccagaggaaaccacuguu

SEQ ID NO: 13777 - RNA, 20 nt, Artificial Sequence
  spacer sequence GTCN PAM
guagcauggcagguuugauu

SEQ ID NO: 13778 - RNA, 20 nt, Artificial Sequence
  spacer sequence GTCN PAM
uuaugaaucaaaccugccau

SEQ ID NO: 13779 - RNA, 20 nt, Artificial Sequence
  spacer sequence GTCN PAM
uacauuacaucucagguagc

SEQ ID NO: 13780 - RNA, 20 nt, Artificial Sequence
  spacer sequence GTCN PAM
ggaugcaggccacaagccac

SEQ ID NO: 13781 - RNA, 20 nt, Artificial Sequence
  spacer sequence GTCN PAM
ccauauuuacuuccuguucc

SEQ ID NO: 13782 - RNA, 20 nt, Artificial Sequence
  spacer sequence GTCN PAM
agaugcaugaauaaaaauac

SEQ ID NO: 13783 - RNA, 20 nt, Artificial Sequence
  spacer sequence GTCN PAM
agugcugcuuuaauaaucau

SEQ ID NO: 13784 - RNA, 20 nt, Artificial Sequence
  spacer sequence GTCN PAM
uccaagacaccuucccagac

SEQ ID NO: 13785 - RNA, 20 nt, Artificial Sequence
  spacer sequence GTCN PAM
uggaagacgaggauuuugcc

SEQ ID NO: 13786 - RNA, 20 nt, Artificial Sequence
  spacer sequence GTCN PAM
gggaaggugucuuggaagac

SEQ ID NO: 13787 - RNA, 20 nt, Artificial Sequence
  spacer sequence GTCN PAM
gcagcauucucucccuacuc

SEQ ID NO: 13788 - RNA, 20 nt, Artificial Sequence
  spacer sequence GTCN PAM
ccagaaggagagccacccag

SEQ ID NO: 13789 - RNA, 20 nt, Artificial Sequence
  spacer sequence GTCN PAM
ugauuuaacauaagcaccac

SEQ ID NO: 13790 - RNA, 20 nt, Artificial Sequence
  spacer sequence GTCN PAM
uccaccacaucucaugacaa

SEQ ID NO: 13791 - RNA, 20 nt, Artificial Sequence
  spacer sequence GTCN PAM
ugagaugugguggaggacac

SEQ ID NO: 13792 - RNA, 20 nt, Artificial Sequence
  spacer sequence GTCN PAM
cacuggcuacaacaaaaaau

SEQ ID NO: 13793 - RNA, 20 nt, Artificial Sequence
  spacer sequence GTCN PAM
uuggcccgacacuccaggcc

SEQ ID NO: 13794 - RNA, 20 nt, Artificial Sequence
  spacer sequence GTCN PAM
ggccaaggacuuuagauuuu

SEQ ID NO: 13795 - RNA, 20 nt, Artificial Sequence
  spacer sequence GTCN PAM
ucucucuuucuggggaugca

SEQ ID NO: 13796 - RNA, 20 nt, Artificial Sequence
  spacer sequence GTCN PAM
gacuggccgagucccugucc

SEQ ID NO: 13797 - RNA, 20 nt, Artificial Sequence
  spacer sequence GTCN PAM
gacugcauccccagaaagag

SEQ ID NO: 13798 - RNA, 20 nt, Artificial Sequence
  spacer sequence GTCN PAM
cuguccaccaccuccaccuu

SEQ ID NO: 13799 - RNA, 20 nt, Artificial Sequence
  spacer sequence GTCN PAM
accaccuccaccuuuugcuc

SEQ ID NO: 13800 - RNA, 20 nt, Artificial Sequence
  spacer sequence GTCN PAM
uacucugucaccaggcugga

SEQ ID NO: 13801 - RNA, 20 nt, Artificial Sequence
  spacer sequence GTCN PAM
ccaggcuggagugcaguggc

SEQ ID NO: 13802 - RNA, 20 nt, Artificial Sequence
  spacer sequence GTCN PAM
cagcuacuugggaggcugag

SEQ ID NO: 13803 - RNA, 20 nt, Artificial Sequence
  spacer sequence GTCN PAM
cuacuaaaaaaauacaaaaa

SEQ ID NO: 13804 - RNA, 20 nt, Artificial Sequence
  spacer sequence GTCN PAM
agagauugagaucauccugg

SEQ ID NO: 13805 - RNA, 20 nt, Artificial Sequence
  spacer sequence GTCN PAM
ugguccccagccaauacaua

SEQ ID NO: 13806 - RNA, 20 nt, Artificial Sequence
  spacer sequence GTCN PAM
ccagccaauacauaaggauc

SEQ ID NO: 13807 - RNA, 20 nt, Artificial Sequence
  spacer sequence GTCN PAM
cuucaacuggaucgcaaauu

SEQ ID NO: 13808 - RNA, 20 nt, Artificial Sequence
  spacer sequence GTCN PAM
aacuugcuucuuuuccuuuc

SEQ ID NO: 13809 - RNA, 20 nt, Artificial Sequence
  spacer sequence GTCN PAM
acauuaaacuuuuggggcaa

SEQ ID NO: 13810 - RNA, 20 nt, Artificial Sequence
  spacer sequence GTCN PAM
gauagauauaacuacuaaau

SEQ ID NO: 13811 - RNA, 20 nt, Artificial Sequence
  spacer sequence GTCN PAM
uuucauucauuuuucuugcu

SEQ ID NO: 13812 - RNA, 20 nt, Artificial Sequence
  spacer sequence GTCN PAM
cuucucucuaauuuuagaug

SEQ ID NO: 13813 - RNA, 20 nt, Artificial Sequence
  spacer sequence GTCN PAM
acuaaaaauccuggucacuu

SEQ ID NO: 13814 - RNA, 20 nt, Artificial Sequence
  spacer sequence GTCN PAM
aaaucuauuuaaaugacuuu

SEQ ID NO: 13815 - RNA, 20 nt, Artificial Sequence
  spacer sequence GTCN PAM
uuuaaauagauuuugacuau

SEQ ID NO: 13816 - RNA, 20 nt, Artificial Sequence
  spacer sequence GTCN PAM
auuuaaauauuacacuaagg

SEQ ID NO: 13817 - RNA, 20 nt, Artificial Sequence
  spacer sequence GTCN PAM
agcugcuaaaaugaauaggc

SEQ ID NO: 13818 - RNA, 20 nt, Artificial Sequence
  spacer sequence GTCN PAM
cugccuauucauuuuagcag

SEQ ID NO: 13819 - RNA, 20 nt, Artificial Sequence
  spacer sequence GTCN PAM
uuuuuuaauuccaguuggcc

SEQ ID NO: 13820 - RNA, 20 nt, Artificial Sequence
  spacer sequence GTCN PAM
uggucauuuuuuaauuccag

SEQ ID NO: 13821 - RNA, 20 nt, Artificial Sequence
  spacer sequence GTCN PAM
aauuaauuuuuuaguccugg

SEQ ID NO: 13822 - RNA, 20 nt, Artificial Sequence
  spacer sequence GTCN PAM
uauugaaauuggagauauau

SEQ ID NO: 13823 - RNA, 20 nt, Artificial Sequence
  spacer sequence GTCN PAM
acaacuggaaacugcugcug

SEQ ID NO: 13824 - RNA, 20 nt, Artificial Sequence
  spacer sequence GTCN PAM
aggcugcagcuguuuaugag

SEQ ID NO: 13825 - RNA, 20 nt, Artificial Sequence
  spacer sequence GTCN PAM
gugggaauacauguuuuucc

SEQ ID NO: 13826 - RNA, 20 nt, Artificial Sequence
  spacer sequence GTCN PAM
uacagaugggccuaacgcug

SEQ ID NO: 13827 - RNA, 20 nt, Artificial Sequence
  spacer sequence GTCN PAM
guguauuuccuguaaaaugu

SEQ ID NO: 13828 - RNA, 20 nt, Artificial Sequence
  spacer sequence GTCN PAM
uauccuggccuugugcaggu

SEQ ID NO: 13829 - RNA, 20 nt, Artificial Sequence
  spacer sequence GTCN PAM
aaccagucauauccuggccu

SEQ ID NO: 13830 - RNA, 20 nt, Artificial Sequence
  spacer sequence GTCN PAM
uccggguaacucugcccccc

SEQ ID NO: 13831 - RNA, 20 nt, Artificial Sequence
  spacer sequence GTCN PAM
cuaacuggguggggggcaga

SEQ ID NO: 13832 - RNA, 20 nt, Artificial Sequence
  spacer sequence GTCN PAM
auaaggggucacuaacuggg

SEQ ID NO: 13833 - RNA, 20 nt, Artificial Sequence
  spacer sequence GTCN PAM
uccugccucugcuggccaua

SEQ ID NO: 13834 - RNA, 20 nt, Artificial Sequence
  spacer sequence GTCN PAM
gauacuguguggucuuccug

SEQ ID NO: 13835 - RNA, 20 nt, Artificial Sequence
  spacer sequence GTCN PAM
uuuaauggaugagcaacuca

SEQ ID NO: 13836 - RNA, 20 nt, Artificial Sequence
  spacer sequence GTCN PAM
ucccugcucccccuauauug

SEQ ID NO: 13837 - RNA, 20 nt, Artificial Sequence
  spacer sequence GTCN PAM
acacaucauagcugaagccu

SEQ ID NO: 13838 - RNA, 20 nt, Artificial Sequence
  spacer sequence GTCN PAM
cauuuuaugggaaauuggau

SEQ ID NO: 13839 - RNA, 20 nt, Artificial Sequence
  spacer sequence GTCN PAM
gugcaggaaauguaaaccaa

SEQ ID NO: 13840 - RNA, 20 nt, Artificial Sequence
  spacer sequence GTCN PAM
ccccugcugggucugugcag

SEQ ID NO: 13841 - RNA, 20 nt, Artificial Sequence
  spacer sequence GTCN PAM
uuccugucgccccugcuggg

SEQ ID NO: 13842 - RNA, 20 nt, Artificial Sequence
  spacer sequence GTCN PAM
gugagaguauucuggcuaaa

SEQ ID NO: 13843 - RNA, 20 nt, Artificial Sequence
  spacer sequence GTCN PAM
uggagcauggggcacuagca

SEQ ID NO: 13844 - RNA, 20 nt, Artificial Sequence
  spacer sequence GTCN PAM
uuaaaaauaaccaaauuuuc

SEQ ID NO: 13845 - RNA, 20 nt, Artificial Sequence
  spacer sequence GTCN PAM
uaaguccacugcaccugaca

SEQ ID NO: 13846 - RNA, 20 nt, Artificial Sequence
  spacer sequence GTCN PAM
acugcaccugacagaguauu

SEQ ID NO: 13847 - RNA, 20 nt, Artificial Sequence
  spacer sequence GTCN PAM
ggugcaguggacuuaagacc

SEQ ID NO: 13848 - RNA, 20 nt, Artificial Sequence
  spacer sequence GTCN PAM
agagaaaccagccuucuagg

SEQ ID NO: 13849 - RNA, 20 nt, Artificial Sequence
  spacer sequence GTCN PAM
ccuuuauguuuucagucaug

SEQ ID NO: 13850 - RNA, 20 nt, Artificial Sequence
  spacer sequence GTCN PAM
ugcaguuucaagccccaaaa

SEQ ID NO: 13851 - RNA, 20 nt, Artificial Sequence
  spacer sequence GTCN PAM
uuuauuuuucuucugaagaa

SEQ ID NO: 13852 - RNA, 20 nt, Artificial Sequence
  spacer sequence GTCN PAM
caaccaggggauaguaaagg

SEQ ID NO: 13853 - RNA, 20 nt, Artificial Sequence
  spacer sequence GTCN PAM
uccacguauauucacuaacu

SEQ ID NO: 13854 - RNA, 20 nt, Artificial Sequence
  spacer sequence GTCN PAM
cuccugcagucuuguucaca

SEQ ID NO: 13855 - RNA, 20 nt, Artificial Sequence
  spacer sequence GTCN PAM
uguucacacuguuaauuugc

SEQ ID NO: 13856 - RNA, 20 nt, Artificial Sequence
  spacer sequence GTCN PAM
uugaggaaaggguuugcuca

SEQ ID NO: 13857 - RNA, 20 nt, Artificial Sequence
  spacer sequence GTCN PAM
ucccuacuaaaggcauuaga

SEQ ID NO: 13858 - RNA, 20 nt, Artificial Sequence
  spacer sequence GTCN PAM
acuucagucaucccuacuaa

SEQ ID NO: 13859 - RNA, 20 nt, Artificial Sequence
  spacer sequence GTCN PAM
gacaaauaaucuguguuagc

SEQ ID NO: 13860 - RNA, 20 nt, Artificial Sequence
  spacer sequence GTCN PAM
gacagugaaucuuaacaucc

SEQ ID NO: 13861 - RNA, 20 nt, Artificial Sequence
  spacer sequence GTCN PAM
uccccuacuuugauaagcau

SEQ ID NO: 13862 - RNA, 20 nt, Artificial Sequence
  spacer sequence GTCN PAM
uuuuccauaacugcugaguc

SEQ ID NO: 13863 - RNA, 20 nt, Artificial Sequence
  spacer sequence GTCN PAM
cugcuagaaaaugguuaaag

SEQ ID NO: 13864 - RNA, 20 nt, Artificial Sequence
  spacer sequence GTCN PAM
ugaacuuuuccaucaaacug

SEQ ID NO: 13865 - RNA, 20 nt, Artificial Sequence
  spacer sequence GTCN PAM
cuaggagagaaaacuuuuug

SEQ ID NO: 13866 - RNA, 20 nt, Artificial Sequence
  spacer sequence GTCN PAM
augaaggugucagagcaaga

SEQ ID NO: 13867 - RNA, 20 nt, Artificial Sequence
  spacer sequence GTCN PAM
gagcaagacacaaaauccuc

SEQ ID NO: 13868 - RNA, 20 nt, Artificial Sequence
  spacer sequence GTCN PAM
ugcucugacaccuucauuga

SEQ ID NO: 13869 - RNA, 20 nt, Artificial Sequence
  spacer sequence GTCN PAM
cuugaggauuuugugucuug

SEQ ID NO: 13870 - RNA, 20 nt, Artificial Sequence
  spacer sequence GTCN PAM
ggaggccagggaggaccugg

SEQ ID NO: 13871 - RNA, 20 nt, Artificial Sequence
  spacer sequence GTCN PAM
ucccuggccuccugacuucc

SEQ ID NO: 13872 - RNA, 20 nt, Artificial Sequence
  spacer sequence GTCN PAM
aucuucugaaguuucuggcu

SEQ ID NO: 13873 - RNA, 20 nt, Artificial Sequence
  spacer sequence GTCN PAM
accuucuugaaacaaaacag

SEQ ID NO: 13874 - RNA, 20 nt, Artificial Sequence
  spacer sequence GTCN PAM
acagauuuacuuauuagagu

SEQ ID NO: 13875 - RNA, 20 nt, Artificial Sequence
  spacer sequence GTCN PAM
aauguaguuuuuguuugaac

SEQ ID NO: 13876 - RNA, 20 nt, Artificial Sequence
  spacer sequence GTCN PAM
uucuucuccagcguccuggu

SEQ ID NO: 13877 - RNA, 20 nt, Artificial Sequence
  spacer sequence GTCN PAM
ugguaaaggagacaacaaaa

SEQ ID NO: 13878 - RNA, 20 nt, Artificial Sequence
  spacer sequence GTCN PAM
ccuuuaccaggacgcuggag

SEQ ID NO: 13879 - RNA, 20 nt, Artificial Sequence
  spacer sequence GTCN PAM
accuuuuggcuguuuuguug

SEQ ID NO: 13880 - RNA, 20 nt, Artificial Sequence
  spacer sequence GTCN PAM
gucuaccuuuuggcuguuuu

SEQ ID NO: 13881 - RNA, 20 nt, Artificial Sequence
  spacer sequence GTCN PAM
ugacuaauugaaaguagacc

SEQ ID NO: 13882 - RNA, 20 nt, Artificial Sequence
  spacer sequence GTCN PAM
ggacuagaggauuucccagc

SEQ ID NO: 13883 - RNA, 20 nt, Artificial Sequence
  spacer sequence GTCN PAM
acuuucaauuagucaggacu

SEQ ID NO: 13884 - RNA, 20 nt, Artificial Sequence
  spacer sequence GTCN PAM
uuacacuuuaaaauaggugg

SEQ ID NO: 13885 - RNA, 20 nt, Artificial Sequence
  spacer sequence GTCN PAM
cuugagcccacuacacucau

SEQ ID NO: 13886 - RNA, 20 nt, Artificial Sequence
  spacer sequence GTCN PAM
cuugaaaaacuuuccuuaau

SEQ ID NO: 13887 - RNA, 20 nt, Artificial Sequence
  spacer sequence GTCN PAM
agugguauugagaaaaugca

SEQ ID NO: 13888 - RNA, 20 nt, Artificial Sequence
  spacer sequence GTCN PAM
uauucucaauuucuuuuuuu

SEQ ID NO: 13889 - RNA, 20 nt, Artificial Sequence
  spacer sequence GTCN PAM
uaagagaauaucacuuccca

SEQ ID NO: 13890 - RNA, 20 nt, Artificial Sequence
  spacer sequence GTCN PAM
agaaagaagcugccuuuggc

SEQ ID NO: 13891 - RNA, 20 nt, Artificial Sequence
  spacer sequence GTCN PAM
cccuucagggcuugguuuug

SEQ ID NO: 13892 - RNA, 20 nt, Artificial Sequence
  spacer sequence GTCN PAM
gcagcagcugugcuucgagu

SEQ ID NO: 13893 - RNA, 20 nt, Artificial Sequence
  spacer sequence GTCN PAM
uucaguaagugaauuuguug

SEQ ID NO: 13894 - RNA, 20 nt, Artificial Sequence
  spacer sequence GTCN PAM
ccggcagcccucucugcaua

SEQ ID NO: 13895 - RNA, 20 nt, Artificial Sequence
  spacer sequence GTCN PAM
cucuacaugagagggagagg

SEQ ID NO: 13896 - RNA, 20 nt, Artificial Sequence
  spacer sequence GTCN PAM
aauucauucaucccucuccc

SEQ ID NO: 13897 - RNA, 20 nt, Artificial Sequence
  spacer sequence GTCN PAM
gagagucauuuuggaggcuc

SEQ ID NO: 13898 - RNA, 20 nt, Artificial Sequence
  spacer sequence GTCN PAM
uuuuggaggcucagccguug

SEQ ID NO: 13899 - RNA, 20 nt, Artificial Sequence
  spacer sequence GTCN PAM
guuugugcugggauccggcc

SEQ ID NO: 13900 - RNA, 20 nt, Artificial Sequence
  spacer sequence GTCN PAM
uggucaguuugugcugggau

SEQ ID NO: 13901 - RNA, 20 nt, Artificial Sequence
  spacer sequence GTCN PAM
cuccuaccauuuagagaggg

SEQ ID NO: 13902 - RNA, 20 nt, Artificial Sequence
  spacer sequence GTCN PAM
uuuaggcuaccauuacggca

SEQ ID NO: 13903 - RNA, 20 nt, Artificial Sequence
  spacer sequence GTCN PAM
guuugccguaaugguagccu

SEQ ID NO: 13904 - RNA, 20 nt, Artificial Sequence
  spacer sequence GTCN PAM
gaacucugaagucaguuugc

SEQ ID NO: 13905 - RNA, 20 nt, Artificial Sequence
  spacer sequence GTCN PAM
cgccagccauucuuuuggua

SEQ ID NO: 13906 - RNA, 20 nt, Artificial Sequence
  spacer sequence GTCN PAM
uucccuuuggugccccuccu

SEQ ID NO: 13907 - RNA, 20 nt, Artificial Sequence
  spacer sequence GTCN PAM
ggugaaaagcuaggcucccg

SEQ ID NO: 13908 - RNA, 20 nt, Artificial Sequence
  spacer sequence GTCN PAM
uggaaaguuguauagggccu

SEQ ID NO: 13909 - RNA, 20 nt, Artificial Sequence
  spacer sequence GTCN PAM
uaauaaggcccuauacaacu

SEQ ID NO: 13910 - RNA, 20 nt, Artificial Sequence
  spacer sequence GTCN PAM
ggccagcccuacuagaaccg

SEQ ID NO: 13911 - RNA, 20 nt, Artificial Sequence
  spacer sequence GTCN PAM
ccuucccuugcauacuuccu

SEQ ID NO: 13912 - RNA, 20 nt, Artificial Sequence
  spacer sequence GTCN PAM
agagggaaggaaguaugcaa

SEQ ID NO: 13913 - RNA, 20 nt, Artificial Sequence
  spacer sequence GTCN PAM
ucaggaugggggugggggag

SEQ ID NO: 13914 - RNA, 20 nt, Artificial Sequence
  spacer sequence GTCN PAM
cuuuuaucaccaaagcccuu

SEQ ID NO: 13915 - RNA, 20 nt, Artificial Sequence
  spacer sequence GTCN PAM
ggaaagggcuuuggugauaa

SEQ ID NO: 13916 - RNA, 20 nt, Artificial Sequence
  spacer sequence GTCN PAM
agcacaauguuucacacugu

SEQ ID NO: 13917 - RNA, 20 nt, Artificial Sequence
  spacer sequence GTCN PAM
caugauucggcuacccaagg

SEQ ID NO: 13918 - RNA, 20 nt, Artificial Sequence
  spacer sequence GTCN PAM
auaaagagccagcagagaca

SEQ ID NO: 13919 - RNA, 20 nt, Artificial Sequence
  spacer sequence GTCN PAM
cugcuggcucuuuauggaca

SEQ ID NO: 13920 - RNA, 20 nt, Artificial Sequence
  spacer sequence GTCN PAM
ugcccuuuaaauauuagauu

SEQ ID NO: 13921 - RNA, 20 nt, Artificial Sequence
  spacer sequence GTCN PAM
augugagcuaauagcaggga

SEQ ID NO: 13922 - RNA, 20 nt, Artificial Sequence
  spacer sequence GTCN PAM
ugaaguucaauggagaaaac

SEQ ID NO: 13923 - RNA, 20 nt, Artificial Sequence
  spacer sequence GTCN PAM
cucauucuaccccuuuguuu

SEQ ID NO: 13924 - RNA, 20 nt, Artificial Sequence
  spacer sequence GTCN PAM
uaagcauguuucauuaaaua

SEQ ID NO: 13925 - RNA, 20 nt, Artificial Sequence
  spacer sequence GTCN PAM
uuguaauuacaagcucauau

SEQ ID NO: 13926 - RNA, 20 nt, Artificial Sequence
  spacer sequence GTCN PAM
cagcuuucauuuguacacuc

SEQ ID NO: 13927 - RNA, 20 nt, Artificial Sequence
  spacer sequence GTCN PAM
guaauauagcacuuagugag

SEQ ID NO: 13928 - RNA, 20 nt, Artificial Sequence
  spacer sequence GTCN PAM
ucuuuaaugucaguaauaua

SEQ ID NO: 13929 - RNA, 20 nt, Artificial Sequence
  spacer sequence GTCN PAM
uuuuuuguuuuuguuuuuuu

SEQ ID NO: 13930 - RNA, 20 nt, Artificial Sequence
  spacer sequence GTCN PAM
uuugcaacauacuuacuugc

SEQ ID NO: 13931 - RNA, 20 nt, Artificial Sequence
  spacer sequence GTCN PAM
uaacaccaccacaagaccuc

SEQ ID NO: 13932 - RNA, 20 nt, Artificial Sequence
  spacer sequence GTCN PAM
uguggugguguuaggacucu

SEQ ID NO: 13933 - RNA, 20 nt, Artificial Sequence
  spacer sequence GTCN PAM
ucacuauuccauaaguugag

SEQ ID NO: 13934 - RNA, 20 nt, Artificial Sequence
  spacer sequence GTCN PAM
acuguugagcaaauauccug

SEQ ID NO: 13935 - RNA, 20 nt, Artificial Sequence
  spacer sequence GTCN PAM
uucaggaaccaggauauuug

SEQ ID NO: 13936 - RNA, 20 nt, Artificial Sequence
  spacer sequence GTCN PAM
uauugcaaugggcauauaug

SEQ ID NO: 13937 - RNA, 20 nt, Artificial Sequence
  spacer sequence GTCN PAM
auggcuguguaucauaauuu

SEQ ID NO: 13938 - RNA, 20 nt, Artificial Sequence
  spacer sequence GTCN PAM
uccuaauggcuacaugaagg

SEQ ID NO: 13939 - RNA, 20 nt, Artificial Sequence
  spacer sequence GTCN PAM
uuguccuccuaauggcuaca

SEQ ID NO: 13940 - RNA, 20 nt, Artificial Sequence
  spacer sequence GTCN PAM
uuuugcauuuuuccauguua

SEQ ID NO: 13941 - RNA, 20 nt, Artificial Sequence
  spacer sequence GTCN PAM
uacuauuuccaguuucuuuu

SEQ ID NO: 13942 - RNA, 20 nt, Artificial Sequence
  spacer sequence GTCN PAM
uuaugaugcaaaagaaaugg

SEQ ID NO: 13943 - RNA, 20 nt, Artificial Sequence
  spacer sequence GTCN PAM
ccacaugaaacaucuuaauu

SEQ ID NO: 13944 - RNA, 20 nt, Artificial Sequence
  spacer sequence GTCN PAM
auggaaagcuaccugggaug

SEQ ID NO: 13945 - RNA, 20 nt, Artificial Sequence
  spacer sequence GTCN PAM
aagcugcaaguuguuuuagu

SEQ ID NO: 13946 - RNA, 20 nt, Artificial Sequence
  spacer sequence GTCN PAM
ucuguucucauucuucuuaa

SEQ ID NO: 13947 - RNA, 20 nt, Artificial Sequence
  spacer sequence GTCN PAM
ugcgucuucuguucucauuc

SEQ ID NO: 13948 - RNA, 20 nt, Artificial Sequence
  spacer sequence GTCN PAM
cacagaaaagaguguaccua

SEQ ID NO: 13949 - RNA, 20 nt, Artificial Sequence
  spacer sequence GTCN PAM
uaaaaaauuauuagcauuua

SEQ ID NO: 13950 - RNA, 20 nt, Artificial Sequence
  spacer sequence GTCN PAM
ccuccuaggaauuggcuuuu

SEQ ID NO: 13951 - RNA, 20 nt, Artificial Sequence
  spacer sequence GTCN PAM
ucaaaaguguuaugguaaaa

SEQ ID NO: 13952 - RNA, 20 nt, Artificial Sequence
  spacer sequence GTCN PAM
gugagucuacuccuaagacu

SEQ ID NO: 13953 - RNA, 20 nt, Artificial Sequence
  spacer sequence GTCN PAM
uaggaguagacucacagacc

SEQ ID NO: 13954 - RNA, 20 nt, Artificial Sequence
  spacer sequence GTCN PAM
uguacucagguugcauauaa

SEQ ID NO: 13955 - RNA, 20 nt, Artificial Sequence
  spacer sequence GTCN PAM
ggcuuccaagcugaauauga

SEQ ID NO: 13956 - RNA, 20 nt, Artificial Sequence
  spacer sequence GTCN PAM
uauuuuaaaauaugugcaau

SEQ ID NO: 13957 - RNA, 20 nt, Artificial Sequence
  spacer sequence GTCN PAM
gcaaaagagucauauuuuaa

SEQ ID NO: 13958 - RNA, 20 nt, Artificial Sequence
  spacer sequence GTCN PAM
ucgucagcaccugaaucaug

SEQ ID NO: 13959 - RNA, 20 nt, Artificial Sequence
  spacer sequence GTCN PAM
gcaccugaaucauggagaag

SEQ ID NO: 13960 - RNA, 20 nt, Artificial Sequence
  spacer sequence GTCN PAM
aagggggaaguuacagagua

SEQ ID NO: 13961 - RNA, 20 nt, Artificial Sequence
  spacer sequence GTCN PAM
gccugaaacagcuuuuuaaa

SEQ ID NO: 13962 - RNA, 20 nt, Artificial Sequence
  spacer sequence GTCN PAM
uacccuucgcuacagaaauc

SEQ ID NO: 13963 - RNA, 20 nt, Artificial Sequence
  spacer sequence GTCN PAM
aggaagaggguuauugcaga

SEQ ID NO: 13964 - RNA, 20 nt, Artificial Sequence
  spacer sequence GTCN PAM
cagguggcccaagcacagca

SEQ ID NO: 13965 - RNA, 20 nt, Artificial Sequence
  spacer sequence GTCN PAM
acgcaguugcccaagacaca

SEQ ID NO: 13966 - RNA, 20 nt, Artificial Sequence
  spacer sequence GTCN PAM
guucuugucuaguaugcaca

SEQ ID NO: 13967 - RNA, 20 nt, Artificial Sequence
  spacer sequence GTCN PAM
aguaugcacagacuccuuau

SEQ ID NO: 13968 - RNA, 20 nt, Artificial Sequence
  spacer sequence GTCN PAM
gugcauacuagacaagaacu

SEQ ID NO: 13969 - RNA, 20 nt, Artificial Sequence
  spacer sequence GTCN PAM
caaaacuaccauccuagcuc

SEQ ID NO: 13970 - RNA, 20 nt, Artificial Sequence
  spacer sequence GTCN PAM
gcauuaacacuguguagaau

SEQ ID NO: 13971 - RNA, 20 nt, Artificial Sequence
  spacer sequence GTCN PAM
gcuuagcacagguccgcauu

SEQ ID NO: 13972 - RNA, 20 nt, Artificial Sequence
  spacer sequence GTCN PAM
ugaaaugccuccuaaagccu

SEQ ID NO: 13973 - RNA, 20 nt, Artificial Sequence
  spacer sequence GTCN PAM
gaaaaguuuuucucauucua

SEQ ID NO: 13974 - RNA, 20 nt, Artificial Sequence
  spacer sequence GTCN PAM
ucggucucagccaaggcgcc

SEQ ID NO: 13975 - RNA, 20 nt, Artificial Sequence
  spacer sequence GTCN PAM
cagccaaggcgccuacuucg

SEQ ID NO: 13976 - RNA, 20 nt, Artificial Sequence
  spacer sequence GTCN PAM
cccaccuagaagcucacagu

SEQ ID NO: 13977 - RNA, 20 nt, Artificial Sequence
  spacer sequence GTCN PAM
gaguaaugcacccuaguugu

SEQ ID NO: 13978 - RNA, 20 nt, Artificial Sequence
  spacer sequence GTCN PAM
ccccugguugccccucaggg

SEQ ID NO: 13979 - RNA, 20 nt, Artificial Sequence
  spacer sequence GTCN PAM
agaaagagcaccaaguuucc

SEQ ID NO: 13980 - RNA, 20 nt, Artificial Sequence
  spacer sequence GTCN PAM
aaacccauagcugaaggccc

SEQ ID NO: 13981 - RNA, 20 nt, Artificial Sequence
  spacer sequence GTCN PAM
augcacacacacacacacac

SEQ ID NO: 13982 - RNA, 20 nt, Artificial Sequence
  spacer sequence GTCN PAM
uccaacuuuuccuuagguuu

SEQ ID NO: 13983 - RNA, 20 nt, Artificial Sequence
  spacer sequence GTCN PAM
ccaccccucucuagaugggg

SEQ ID NO: 13984 - RNA, 20 nt, Artificial Sequence
  spacer sequence GTCN PAM
guuuuguugcuuguuauugg

SEQ ID NO: 13985 - RNA, 20 nt, Artificial Sequence
  spacer sequence GTCN PAM
uucccuaacaugauugauga

SEQ ID NO: 13986 - RNA, 20 nt, Artificial Sequence
  spacer sequence GTCN PAM
agcaauuaaugaguaaaaau

SEQ ID NO: 13987 - RNA, 20 nt, Artificial Sequence
  spacer sequence GTCN PAM
uguuuguggcauuuaucagu

SEQ ID NO: 13988 - RNA, 20 nt, Artificial Sequence
  spacer sequence GTCN PAM
aaugcuaaagugcacguuac

SEQ ID NO: 13989 - RNA, 20 nt, Artificial Sequence
  spacer sequence GTCN PAM
ucaaauaaacaucuuccugg

SEQ ID NO: 13990 - RNA, 20 nt, Artificial Sequence
  spacer sequence GTCN PAM
ucaauuuaaagcaaauauau

SEQ ID NO: 13991 - RNA, 20 nt, Artificial Sequence
  spacer sequence GTCN PAM
uauauuuacaaacauucugc

SEQ ID NO: 13992 - RNA, 20 nt, Artificial Sequence
  spacer sequence GTCN PAM
ugaacagccccguuagggag

SEQ ID NO: 13993 - RNA, 20 nt, Artificial Sequence
  spacer sequence GTCN PAM
cccuaacggggcuguucaag

SEQ ID NO: 13994 - RNA, 20 nt, Artificial Sequence
  spacer sequence GTCN PAM
gaccuugacaccuuaaauua

SEQ ID NO: 13995 - RNA, 20 nt, Artificial Sequence
  spacer sequence GTCN PAM
gacucuuuucauuuggggca

SEQ ID NO: 13996 - RNA, 20 nt, Artificial Sequence
  spacer sequence GTCN PAM
aggucugacucuuuucauuu

SEQ ID NO: 13997 - RNA, 20 nt, Artificial Sequence
  spacer sequence GTCN PAM
guguuuagagcuaccucuuu

SEQ ID NO: 13998 - RNA, 20 nt, Artificial Sequence
  spacer sequence GTCN PAM
aaguacaacaauaaucugua

SEQ ID NO: 13999 - RNA, 20 nt, Artificial Sequence
  spacer sequence GTCN PAM
gcuucggcuacucgcuuauu

SEQ ID NO: 14000 - RNA, 20 nt, Artificial Sequence
  spacer sequence GTCN PAM
ggggucagcuucggcuacuc

SEQ ID NO: 14001 - RNA, 20 nt, Artificial Sequence
  spacer sequence GTCN PAM
uccucacuuccccaccucuc

SEQ ID NO: 14002 - RNA, 20 nt, Artificial Sequence
  spacer sequence GTCN PAM
ccaccccaguguugacacag

SEQ ID NO: 14003 - RNA, 20 nt, Artificial Sequence
  spacer sequence GTCN PAM
acacugggguggugacaucc

SEQ ID NO: 14004 - RNA, 20 nt, Artificial Sequence
  spacer sequence GTCN PAM
ccacaacuuccuagaauguu

SEQ ID NO: 14005 - RNA, 20 nt, Artificial Sequence
  spacer sequence GTCN PAM
uauuggcgauuguaauugug

SEQ ID NO: 14006 - RNA, 20 nt, Artificial Sequence
  spacer sequence GTCN PAM
uuucuuauugucuuauuggc

SEQ ID NO: 14007 - RNA, 20 nt, Artificial Sequence
  spacer sequence GTCN PAM
aguagaacucaacaaccugg

SEQ ID NO: 14008 - RNA, 20 nt, Artificial Sequence
  spacer sequence GTCN PAM
ugcugcuagguuggucaguu

SEQ ID NO: 14009 - RNA, 20 nt, Artificial Sequence
  spacer sequence GTCN PAM
auccauucuagaauaugaga

SEQ ID NO: 14010 - RNA, 20 nt, Artificial Sequence
  spacer sequence GTCN PAM
cuucauccuuacaauuaccc

SEQ ID NO: 14011 - RNA, 20 nt, Artificial Sequence
  spacer sequence GTCN PAM
aguguuuucauggauugggc

SEQ ID NO: 14012 - RNA, 20 nt, Artificial Sequence
  spacer sequence GTCN PAM
uggagguccaguguuuucau

SEQ ID NO: 14013 - RNA, 20 nt, Artificial Sequence
  spacer sequence GTCN PAM
caaaauuaaucagugaugga

SEQ ID NO: 14014 - RNA, 20 nt, Artificial Sequence
  spacer sequence GTCN PAM
gcuuggcugaacuguaagga

SEQ ID NO: 14015 - RNA, 20 nt, Artificial Sequence
  spacer sequence GTCN PAM
gaguuuucugucugcuuggc

SEQ ID NO: 14016 - RNA, 20 nt, Artificial Sequence
  spacer sequence GTCN PAM
ucagucugaguuuucugucu

SEQ ID NO: 14017 - RNA, 20 nt, Artificial Sequence
  spacer sequence GTCN PAM
gucuucagucugaguuuucu

SEQ ID NO: 14018 - RNA, 20 nt, Artificial Sequence
  spacer sequence GTCN PAM
gcuccugaucagaaggcaag

SEQ ID NO: 14019 - RNA, 20 nt, Artificial Sequence
  spacer sequence GTCN PAM
gggccuccuucuaggagcaa

SEQ ID NO: 14020 - RNA, 20 nt, Artificial Sequence
  spacer sequence GTCN PAM
uugcuccuagaaggaggccc

SEQ ID NO: 14021 - RNA, 20 nt, Artificial Sequence
  spacer sequence GTCN PAM
auacauuucaaaaacaaaac

SEQ ID NO: 14022 - RNA, 20 nt, Artificial Sequence
  spacer sequence GTCN PAM
auuauuguuuuguuuuugaa

SEQ ID NO: 14023 - RNA, 20 nt, Artificial Sequence
  spacer sequence GTCN PAM
ccacuauguccuuucaacug

SEQ ID NO: 14024 - RNA, 20 nt, Artificial Sequence
  spacer sequence GTCN PAM
uuucaacuguuuucugguuc

SEQ ID NO: 14025 - RNA, 20 nt, Artificial Sequence
  spacer sequence GTCN PAM
aguucaaagagaaggcuggg

SEQ ID NO: 14026 - RNA, 20 nt, Artificial Sequence
  spacer sequence GTCN PAM
agauuuccccagccuucucu

SEQ ID NO: 14027 - RNA, 20 nt, Artificial Sequence
  spacer sequence GTCN PAM
aggucuagauuuccccagcc

SEQ ID NO: 14028 - RNA, 20 nt, Artificial Sequence
  spacer sequence GTCN PAM
cuugcauuugguaauaauau

SEQ ID NO: 14029 - RNA, 20 nt, Artificial Sequence
  spacer sequence GTCN PAM
gauuagcagugggaaugugc

SEQ ID NO: 14030 - RNA, 20 nt, Artificial Sequence
  spacer sequence GTCN PAM
uuuugugauucaccaugucu

SEQ ID NO: 14031 - RNA, 20 nt, Artificial Sequence
  spacer sequence GTCN PAM
cucagaguuuuaaccagugg

SEQ ID NO: 14032 - RNA, 20 nt, Artificial Sequence
  spacer sequence GTCN PAM
acuugugcaauccaaguauu

SEQ ID NO: 14033 - RNA, 20 nt, Artificial Sequence
  spacer sequence GTCN PAM
gugguguuuuaguaaaaaaa

SEQ ID NO: 14034 - RNA, 20 nt, Artificial Sequence
  spacer sequence GTCN PAM
gagccaugauucagguacgg

SEQ ID NO: 14035 - RNA, 20 nt, Artificial Sequence
  spacer sequence GTCN PAM
ugaaucagaugcccguaccu

SEQ ID NO: 14036 - RNA, 20 nt, Artificial Sequence
  spacer sequence GTCN PAM
gcaguuaggagcagaguccu

SEQ ID NO: 14037 - RNA, 20 nt, Artificial Sequence
  spacer sequence GTCN PAM
caccauguugcccaggcugg

SEQ ID NO: 14038 - RNA, 20 nt, Artificial Sequence
  spacer sequence GTCN PAM
caaacuccugaccucaagag

SEQ ID NO: 14039 - RNA, 20 nt, Artificial Sequence
  spacer sequence GTCN PAM
ggaguuugagaccagccugg

SEQ ID NO: 14040 - RNA, 20 nt, Artificial Sequence
  spacer sequence GTCN PAM
cuuuaugagccaaaagaaua

SEQ ID NO: 14041 - RNA, 20 nt, Artificial Sequence
  spacer sequence GTCN PAM
agaaccauuaucaguaaaua

SEQ ID NO: 14042 - RNA, 20 nt, Artificial Sequence
  spacer sequence GTCN PAM
uucugcaaaguucaggcuuu

SEQ ID NO: 14043 - RNA, 20 nt, Artificial Sequence
  spacer sequence GTCN PAM
aguggauuaaaagccugaac

SEQ ID NO: 14044 - RNA, 20 nt, Artificial Sequence
  spacer sequence GTCN PAM
aggcuagagucuaguggauu

SEQ ID NO: 14045 - RNA, 20 nt, Artificial Sequence
  spacer sequence GTCN PAM
acuacaaagauugaaaggag

SEQ ID NO: 14046 - RNA, 20 nt, Artificial Sequence
  spacer sequence GTCN PAM
cauauguuaugugcuugaac

SEQ ID NO: 14047 - RNA, 20 nt, Artificial Sequence
  spacer sequence GTCN PAM
uucccaagaccuacacgcug

SEQ ID NO: 14048 - RNA, 20 nt, Artificial Sequence
  spacer sequence GTCN PAM
ugggaaggaccuagagauga

SEQ ID NO: 14049 - RNA, 20 nt, Artificial Sequence
  spacer sequence GTCN PAM
caauccagagguuuggaaau

SEQ ID NO: 14050 - RNA, 20 nt, Artificial Sequence
  spacer sequence GTCN PAM
gaacguggagucacagaagg

SEQ ID NO: 14051 - RNA, 20 nt, Artificial Sequence
  spacer sequence GTCN PAM
cagaaggcgucugugaaacc

SEQ ID NO: 14052 - RNA, 20 nt, Artificial Sequence
  spacer sequence GTCN PAM
gugaaacccaaagcccuugg

SEQ ID NO: 14053 - RNA, 20 nt, Artificial Sequence
  spacer sequence GTCN PAM
aagggcuuuggguuucacag

SEQ ID NO: 14054 - RNA, 20 nt, Artificial Sequence
  spacer sequence GTCN PAM
cagcguugccuguccaaggg

SEQ ID NO: 14055 - RNA, 20 nt, Artificial Sequence
  spacer sequence GTCN PAM
uuaauguaaacccuccugug

SEQ ID NO: 14056 - RNA, 20 nt, Artificial Sequence
  spacer sequence GTCN PAM
gagcacaggaggguuuacau

SEQ ID NO: 14057 - RNA, 20 nt, Artificial Sequence
  spacer sequence GTCN PAM
uacccccuucagacacaggg

SEQ ID NO: 14058 - RNA, 20 nt, Artificial Sequence
  spacer sequence GTCN PAM
gaaggggguaagacagccca

SEQ ID NO: 14059 - RNA, 20 nt, Artificial Sequence
  spacer sequence GTCN PAM
gcccuccacaggguccugca

SEQ ID NO: 14060 - RNA, 20 nt, Artificial Sequence
  spacer sequence GTCN PAM
ugcaggaggucuuguuucug

SEQ ID NO: 14061 - RNA, 20 nt, Artificial Sequence
  spacer sequence GTCN PAM
uguuucugagucaggggggc

SEQ ID NO: 14062 - RNA, 20 nt, Artificial Sequence
  spacer sequence GTCN PAM
ggggggccucuguuuaacca

SEQ ID NO: 14063 - RNA, 20 nt, Artificial Sequence
  spacer sequence GTCN PAM
gcucugguuaaacagaggcc

SEQ ID NO: 14064 - RNA, 20 nt, Artificial Sequence
  spacer sequence GTCN PAM
acuuugccccgcagaguugg

SEQ ID NO: 14065 - RNA, 20 nt, Artificial Sequence
  spacer sequence GTCN PAM
accuacguguaauuaugcug

SEQ ID NO: 14066 - RNA, 20 nt, Artificial Sequence
  spacer sequence GTCN PAM
ugagugauuuauugaagaac

SEQ ID NO: 14067 - RNA, 20 nt, Artificial Sequence
  spacer sequence GTCN PAM
cugauaauucucuucuuuuu

SEQ ID NO: 14068 - RNA, 20 nt, Artificial Sequence
  spacer sequence GTCN PAM
ggccuaaggagaacaaccag

SEQ ID NO: 14069 - RNA, 20 nt, Artificial Sequence
  spacer sequence GTCN PAM
cugguuguucuccuuaggcc

SEQ ID NO: 14070 - RNA, 20 nt, Artificial Sequence
  spacer sequence GTCN PAM
guguuuugaggccuuuccgu

SEQ ID NO: 14071 - RNA, 20 nt, Artificial Sequence
  spacer sequence GTCN PAM
cugaaaaagcaaaaugucag

SEQ ID NO: 14072 - RNA, 20 nt, Artificial Sequence
  spacer sequence GTCN PAM
uuaugcagccacaucagauc

SEQ ID NO: 14073 - RNA, 20 nt, Artificial Sequence
  spacer sequence GTCN PAM
agauggauuuuugggaucug

SEQ ID NO: 14074 - RNA, 20 nt, Artificial Sequence
  spacer sequence GTCN PAM
gggggagagagcucuccucu

SEQ ID NO: 14075 - RNA, 20 nt, Artificial Sequence
  spacer sequence GTCN PAM
gguauguuacuauucuuuua

SEQ ID NO: 14076 - RNA, 20 nt, Artificial Sequence
  spacer sequence GTCN PAM
ccucccaaaguaaaagaaua

SEQ ID NO: 14077 - RNA, 20 nt, Artificial Sequence
  spacer sequence GTCN PAM
aucagguacucgguucugcc

SEQ ID NO: 14078 - RNA, 20 nt, Artificial Sequence
  spacer sequence GTCN PAM
ccugguaggaagcagagaga

SEQ ID NO: 14079 - RNA, 20 nt, Artificial Sequence
  spacer sequence GTCN PAM
ucuccuucuugauaggaaag

SEQ ID NO: 14080 - RNA, 20 nt, Artificial Sequence
  spacer sequence GTCN PAM
ucugcguggcaccaccuggc

SEQ ID NO: 14081 - RNA, 20 nt, Artificial Sequence
  spacer sequence GTCN PAM
gaaaaagaacacagaauugg

SEQ ID NO: 14082 - RNA, 20 nt, Artificial Sequence
  spacer sequence GTCN PAM
aguucaguucaugagcccuu

SEQ ID NO: 14083 - RNA, 20 nt, Artificial Sequence
  spacer sequence GTCN PAM
guucucaucagcucuguuca

SEQ ID NO: 14084 - RNA, 20 nt, Artificial Sequence
  spacer sequence GTCN PAM
aaaugauuuuguuacuuaac

SEQ ID NO: 14085 - RNA, 20 nt, Artificial Sequence
  spacer sequence GTCN PAM
gaggagccagguucuuucac

SEQ ID NO: 14086 - RNA, 20 nt, Artificial Sequence
  spacer sequence GTCN PAM
ucauuauuacuguggccagu

SEQ ID NO: 14087 - RNA, 20 nt, Artificial Sequence
  spacer sequence GTCN PAM
ggaucugacauuguaaaauc

SEQ ID NO: 14088 - RNA, 20 nt, Artificial Sequence
  spacer sequence GTCN PAM
gauccugacuuauuucacag

SEQ ID NO: 14089 - RNA, 20 nt, Artificial Sequence
  spacer sequence GTCN PAM
ggaauuugccacuaggagcu

SEQ ID NO: 14090 - RNA, 20 nt, Artificial Sequence
  spacer sequence GTCN PAM
auuuuuugccuuuauauacu

SEQ ID NO: 14091 - RNA, 20 nt, Artificial Sequence
  spacer sequence GTCN PAM
ggcauuuggccccagagggg

SEQ ID NO: 14092 - RNA, 20 nt, Artificial Sequence
  spacer sequence GTCN PAM
cagugcugagcccagcucua

SEQ ID NO: 14093 - RNA, 20 nt, Artificial Sequence
  spacer sequence GTCN PAM
acaggcugggacuuugcuga

SEQ ID NO: 14094 - RNA, 20 nt, Artificial Sequence
  spacer sequence GTCN PAM
cagccuguugaccuuugggu

SEQ ID NO: 14095 - RNA, 20 nt, Artificial Sequence
  spacer sequence GTCN PAM
ccucucuagccucaguuucc

SEQ ID NO: 14096 - RNA, 20 nt, Artificial Sequence
  spacer sequence GTCN PAM
acuucaccagcaccagccac

SEQ ID NO: 14097 - RNA, 20 nt, Artificial Sequence
  spacer sequence GTCN PAM
uuacaagggccuucccugaa

SEQ ID NO: 14098 - RNA, 20 nt, Artificial Sequence
  spacer sequence GTCN PAM
aaggauuuaguuggcuucag

SEQ ID NO: 14099 - RNA, 20 nt, Artificial Sequence
  spacer sequence GTCN PAM
ucucuguccaaggauuuagu

SEQ ID NO: 14100 - RNA, 20 nt, Artificial Sequence
  spacer sequence GTCN PAM
ugcagaaucuucaugugauc

SEQ ID NO: 14101 - RNA, 20 nt, Artificial Sequence
  spacer sequence GTCN PAM
ugcagucuugcagaaucuuc

SEQ ID NO: 14102 - RNA, 20 nt, Artificial Sequence
  spacer sequence GTCN PAM
ccaaaaaaaaaaaaaaaaga

SEQ ID NO: 14103 - RNA, 20 nt, Artificial Sequence
  spacer sequence GTCN PAM
ucuggaaaaauguuguggcu

SEQ ID NO: 14104 - RNA, 20 nt, Artificial Sequence
  spacer sequence GTCN PAM
auuugucuucuggaaaaaug

SEQ ID NO: 14105 - RNA, 20 nt, Artificial Sequence
  spacer sequence GTCN PAM
caggaucaauaugagguuag

SEQ ID NO: 14106 - RNA, 20 nt, Artificial Sequence
  spacer sequence GTCN PAM
ugccggcugcccuauuuuca

SEQ ID NO: 14107 - RNA, 20 nt, Artificial Sequence
  spacer sequence GTCN PAM
aaauuuaguauuuuucaugc

SEQ ID NO: 14108 - RNA, 20 nt, Artificial Sequence
  spacer sequence GTCN PAM
uuugcaugagcaugaaaaau

SEQ ID NO: 14109 - RNA, 20 nt, Artificial Sequence
  spacer sequence GTCN PAM
cccucucccucucucaccuu

SEQ ID NO: 14110 - RNA, 20 nt, Artificial Sequence
  spacer sequence GTCN PAM
cgcccugguggagcauucua

SEQ ID NO: 14111 - RNA, 20 nt, Artificial Sequence
  spacer sequence GTCN PAM
gauguuuacagagaaaaggc

SEQ ID NO: 14112 - RNA, 20 nt, Artificial Sequence
  spacer sequence GTCN PAM
ccaaagaguguccuucuuuu

SEQ ID NO: 14113 - RNA, 20 nt, Artificial Sequence
  spacer sequence GTCN PAM
uucuuuugauuuuuuuucaa

SEQ ID NO: 14114 - RNA, 20 nt, Artificial Sequence
  spacer sequence GTCN PAM
uaaaauuucauauaaauggu

SEQ ID NO: 14115 - RNA, 20 nt, Artificial Sequence
  spacer sequence GTCN PAM
uuuuuaauuuuuaauuuuua

SEQ ID NO: 14116 - RNA, 20 nt, Artificial Sequence
  spacer sequence GTCN PAM
cacagauuuuuuuccaugau

SEQ ID NO: 14117 - RNA, 20 nt, Artificial Sequence
  spacer sequence GTCN PAM
cacuguuugucccacagauu

SEQ ID NO: 14118 - RNA, 20 nt, Artificial Sequence
  spacer sequence GTCN PAM
gugggagcccaggaaaggcc

SEQ ID NO: 14119 - RNA, 20 nt, Artificial Sequence
  spacer sequence GTCN PAM
ugcccaaacgcaaagcagca

SEQ ID NO: 14120 - RNA, 20 nt, Artificial Sequence
  spacer sequence GTCN PAM
aaacauaucucaguuucugg

SEQ ID NO: 14121 - RNA, 20 nt, Artificial Sequence
  spacer sequence GTCN PAM
caaaagccaaaaucagggua

SEQ ID NO: 14122 - RNA, 20 nt, Artificial Sequence
  spacer sequence GTCN PAM
agguugcuggcugaauucgg

SEQ ID NO: 14123 - RNA, 20 nt, Artificial Sequence
  spacer sequence GTCN PAM
ucuagccacaagaaaccgaa

SEQ ID NO: 14124 - RNA, 20 nt, Artificial Sequence
  spacer sequence GTCN PAM
uuuccuuguggcuggcaguc

SEQ ID NO: 14125 - RNA, 20 nt, Artificial Sequence
  spacer sequence GTCN PAM
ugagggaaaggugggaaucu

SEQ ID NO: 14126 - RNA, 20 nt, Artificial Sequence
  spacer sequence GTCN PAM
ugagauucccaccuuucccu

SEQ ID NO: 14127 - RNA, 20 nt, Artificial Sequence
  spacer sequence GTCN PAM
acugcuccuugucgugagau

SEQ ID NO: 14128 - RNA, 20 nt, Artificial Sequence
  spacer sequence GTCN PAM
cugucaacugcuccuugucg

SEQ ID NO: 14129 - RNA, 20 nt, Artificial Sequence
  spacer sequence GTCN PAM
cuaugugcuaaaagcaaacc

SEQ ID NO: 14130 - RNA, 20 nt, Artificial Sequence
  spacer sequence GTCN PAM
cucauuuugcaccucaguaa

SEQ ID NO: 14131 - RNA, 20 nt, Artificial Sequence
  spacer sequence GTCN PAM
gggccuccugguuucuugug

SEQ ID NO: 14132 - RNA, 20 nt, Artificial Sequence
  spacer sequence GTCN PAM
agcaggaguugagagccucu

SEQ ID NO: 14133 - RNA, 20 nt, Artificial Sequence
  spacer sequence GTCN PAM
ugcacaggaaaccccccagc

SEQ ID NO: 14134 - RNA, 20 nt, Artificial Sequence
  spacer sequence GTCN PAM
cauaggugccggauugaugg

SEQ ID NO: 14135 - RNA, 20 nt, Artificial Sequence
  spacer sequence GTCN PAM
uugcucagagaaagccugau

SEQ ID NO: 14136 - RNA, 20 nt, Artificial Sequence
  spacer sequence GTCN PAM
ggcuuauuuggcuuuauggg

SEQ ID NO: 14137 - RNA, 20 nt, Artificial Sequence
  spacer sequence GTCN PAM
cagggucaggcuuauuuggc

SEQ ID NO: 14138 - RNA, 20 nt, Artificial Sequence
  spacer sequence GTCN PAM
ggccuagcugggagguacag

SEQ ID NO: 14139 - RNA, 20 nt, Artificial Sequence
  spacer sequence GTCN PAM
uauuuuuauucauuuuucca

SEQ ID NO: 14140 - RNA, 20 nt, Artificial Sequence
  spacer sequence GTCN PAM
uuuaagcuuuuccacaugug

SEQ ID NO: 14141 - RNA, 20 nt, Artificial Sequence
  spacer sequence GTCN PAM
guuuuuguacuugugucuuu

SEQ ID NO: 14142 - RNA, 20 nt, Artificial Sequence
  spacer sequence GTCN PAM
gucuguuuuuguacuugugu

SEQ ID NO: 14143 - RNA, 20 nt, Artificial Sequence
  spacer sequence GTCN PAM
agaaccaaaacccuaagaau

SEQ ID NO: 14144 - RNA, 20 nt, Artificial Sequence
  spacer sequence GTCN PAM
auaaaguugggcuuuuucca

SEQ ID NO: 14145 - RNA, 20 nt, Artificial Sequence
  spacer sequence GTCN PAM
ggccucagcaacgggcagug

SEQ ID NO: 14146 - RNA, 20 nt, Artificial Sequence
  spacer sequence GTCN PAM
agggccugggagcagaggcc

SEQ ID NO: 14147 - RNA, 20 nt, Artificial Sequence
  spacer sequence GTCN PAM
cuccuaagaauccaggaucc

SEQ ID NO: 14148 - RNA, 20 nt, Artificial Sequence
  spacer sequence GTCN PAM
ggauccuggauucuuaggag

SEQ ID NO: 14149 - RNA, 20 nt, Artificial Sequence
  spacer sequence GTCN PAM
uuauuucccuuccugaugug

SEQ ID NO: 14150 - RNA, 20 nt, Artificial Sequence
  spacer sequence GTCN PAM
ccaucguaaauaaauaaagu

SEQ ID NO: 14151 - RNA, 20 nt, Artificial Sequence
  spacer sequence GTCN PAM
auauucuuugagggcccaaa

SEQ ID NO: 14152 - RNA, 20 nt, Artificial Sequence
  spacer sequence GTCN PAM
gcuguuuaacagagcagauu

SEQ ID NO: 14153 - RNA, 20 nt, Artificial Sequence
  spacer sequence GTCN PAM
guuuccccuaaagugcacga

SEQ ID NO: 14154 - RNA, 20 nt, Artificial Sequence
  spacer sequence GTCN PAM
aggaaggccuuucugagggc

SEQ ID NO: 14155 - RNA, 20 nt, Artificial Sequence
  spacer sequence GTCN PAM
gcccucagaaaggccuuccu

SEQ ID NO: 14156 - RNA, 20 nt, Artificial Sequence
  spacer sequence GTCN PAM
uucaguuuccagcuugaaug

SEQ ID NO: 14157 - RNA, 20 nt, Artificial Sequence
  spacer sequence GTCN PAM
ucuccauggugccugccuca

SEQ ID NO: 14158 - RNA, 20 nt, Artificial Sequence
  spacer sequence GTCN PAM
agagaccaccacaggcaaag

SEQ ID NO: 14159 - RNA, 20 nt, Artificial Sequence
  spacer sequence GTCN PAM
cuggacccuucagucuucuc

SEQ ID NO: 14160 - RNA, 20 nt, Artificial Sequence
  spacer sequence GTCN PAM
uugccugugguggucucugg

SEQ ID NO: 14161 - RNA, 20 nt, Artificial Sequence
  spacer sequence GTCN PAM
cuuggucuuugccuguggug

SEQ ID NO: 14162 - RNA, 20 nt, Artificial Sequence
  spacer sequence GTCN PAM
ccaggccuggcaggccacac

SEQ ID NO: 14163 - RNA, 20 nt, Artificial Sequence
  spacer sequence GTCN PAM
aagugcaaugagcaaacuaa

SEQ ID NO: 14164 - RNA, 20 nt, Artificial Sequence
  spacer sequence GTCN PAM
uggccucccauaguguuagg

SEQ ID NO: 14165 - RNA, 20 nt, Artificial Sequence
  spacer sequence GTCN PAM
cgaacuccugagcucaggca

SEQ ID NO: 14166 - RNA, 20 nt, Artificial Sequence
  spacer sequence GTCN PAM
cagcuacccaggaggcugag

SEQ ID NO: 14167 - RNA, 20 nt, Artificial Sequence
  spacer sequence GTCN PAM
ggaguacaguggcucaaucu

SEQ ID NO: 14168 - RNA, 20 nt, Artificial Sequence
  spacer sequence GTCN PAM
cucagucuggaguacagugg

SEQ ID NO: 14169 - RNA, 20 nt, Artificial Sequence
  spacer sequence GTCN PAM
uguugugucacucagucugg

SEQ ID NO: 14170 - RNA, 20 nt, Artificial Sequence
  spacer sequence GTCN PAM
uggucuucauuuccaucagu

SEQ ID NO: 14171 - RNA, 20 nt, Artificial Sequence
  spacer sequence GTCN PAM
ucauuuccaucagugauuga

SEQ ID NO: 14172 - RNA, 20 nt, Artificial Sequence
  spacer sequence GTCN PAM
aucacugauggaaaugaaga

SEQ ID NO: 14173 - RNA, 20 nt, Artificial Sequence
  spacer sequence GTCN PAM
gccagagcaacauucucagc

SEQ ID NO: 14174 - RNA, 20 nt, Artificial Sequence
  spacer sequence GTCN PAM
guguuucucacauucucuuu

SEQ ID NO: 14175 - RNA, 20 nt, Artificial Sequence
  spacer sequence GTCN PAM
acauucauggugcuccagaa

SEQ ID NO: 14176 - RNA, 20 nt, Artificial Sequence
  spacer sequence GTCN PAM
caccggaaggccacacucau

SEQ ID NO: 14177 - RNA, 20 nt, Artificial Sequence
  spacer sequence GTCN PAM
ugagcgagcaggggccucug

SEQ ID NO: 14178 - RNA, 20 nt, Artificial Sequence
  spacer sequence GTCN PAM
gguuggccuggcagaaggcu

SEQ ID NO: 14179 - RNA, 20 nt, Artificial Sequence
  spacer sequence GTCN PAM
uauugccucuaaaucaagug

SEQ ID NO: 14180 - RNA, 20 nt, Artificial Sequence
  spacer sequence GTCN PAM
ugcuucaucacuugauuuag

SEQ ID NO: 14181 - RNA, 20 nt, Artificial Sequence
  spacer sequence GTCN PAM
ggacacuuuuuuaaacgauu

SEQ ID NO: 14182 - RNA, 20 nt, Artificial Sequence
  spacer sequence GTCN PAM
ugacaguugucaugcuucau

SEQ ID NO: 14183 - RNA, 20 nt, Artificial Sequence
  spacer sequence GTCN PAM
ugagguuugugaacacauuc

SEQ ID NO: 14184 - RNA, 20 nt, Artificial Sequence
  spacer sequence GTCN PAM
cugaggaccaggaucuuuga

SEQ ID NO: 14185 - RNA, 20 nt, Artificial Sequence
  spacer sequence GTCN PAM
ucagggacacuugagauggg

SEQ ID NO: 14186 - RNA, 20 nt, Artificial Sequence
  spacer sequence GTCN PAM
aagauccugguccucaggga

SEQ ID NO: 14187 - RNA, 20 nt, Artificial Sequence
  spacer sequence GTCN PAM
cugugagaaucggccaccug

SEQ ID NO: 14188 - RNA, 20 nt, Artificial Sequence
  spacer sequence GTCN PAM
ccugaaaguugacauaaugc

SEQ ID NO: 14189 - RNA, 20 nt, Artificial Sequence
  spacer sequence GTCN PAM
acuuucaggggaccuggggc

SEQ ID NO: 14190 - RNA, 20 nt, Artificial Sequence
  spacer sequence GTCN PAM
aggcauuaugucaacuuuca

SEQ ID NO: 14191 - RNA, 20 nt, Artificial Sequence
  spacer sequence GTCN PAM
gugaagagagcuggagcaga

SEQ ID NO: 14192 - RNA, 20 nt, Artificial Sequence
  spacer sequence GTCN PAM
cuuauucccuucuuuuuuau

SEQ ID NO: 14193 - RNA, 20 nt, Artificial Sequence
  spacer sequence GTCN PAM
uuuauuugagcuuuaggcca

SEQ ID NO: 14194 - RNA, 20 nt, Artificial Sequence
  spacer sequence GTCN PAM
gcccagcaugccugcuggau

SEQ ID NO: 14195 - RNA, 20 nt, Artificial Sequence
  spacer sequence GTCN PAM
gacuuaacauuuggggaugc

SEQ ID NO: 14196 - RNA, 20 nt, Artificial Sequence
  spacer sequence GTCN PAM
gacauuuucuuagcugaugg

SEQ ID NO: 14197 - RNA, 20 nt, Artificial Sequence
  spacer sequence GTCN PAM
ucauuaacagaaaaauauuu

SEQ ID NO: 14198 - RNA, 20 nt, Artificial Sequence
  spacer sequence GTCN PAM
gccuuaccugcuucuguacu

SEQ ID NO: 14199 - RNA, 20 nt, Artificial Sequence
  spacer sequence GTCN PAM
uucuuccugacaccuuguug

SEQ ID NO: 14200 - RNA, 20 nt, Artificial Sequence
  spacer sequence GTCN PAM
ggaagaaagacauugcuuuc

SEQ ID NO: 14201 - RNA, 20 nt, Artificial Sequence
  spacer sequence GTCN PAM
ccagcaugcacacaggaagc

SEQ ID NO: 14202 - RNA, 20 nt, Artificial Sequence
  spacer sequence GTCN PAM
uuuuccccacaagccaagag

SEQ ID NO: 14203 - RNA, 20 nt, Artificial Sequence
  spacer sequence GTCN PAM
ucugcuccccacacuuaaau

SEQ ID NO: 14204 - RNA, 20 nt, Artificial Sequence
  spacer sequence GTCN PAM
ggaguucgagaccagccugg

SEQ ID NO: 14205 - RNA, 20 nt, Artificial Sequence
  spacer sequence GTCN PAM
cgaacuccugaccucaggug

SEQ ID NO: 14206 - RNA, 20 nt, Artificial Sequence
  spacer sequence GTCN PAM
uguguaaaccaagguuuuuc

SEQ ID NO: 14207 - RNA, 20 nt, Artificial Sequence
  spacer sequence GTCN PAM
gucuccaauuagaccagcag

SEQ ID NO: 14208 - RNA, 20 nt, Artificial Sequence
  spacer sequence GTCN PAM
ccaauuagaccagcaguucu

SEQ ID NO: 14209 - RNA, 20 nt, Artificial Sequence
  spacer sequence GTCN PAM
aauuggagacagacacaaag

SEQ ID NO: 14210 - RNA, 20 nt, Artificial Sequence
  spacer sequence GTCN PAM
acagugcagagguuaagaac

SEQ ID NO: 14211 - RNA, 20 nt, Artificial Sequence
  spacer sequence GTCN PAM
ccgggaacccugagggacaa

SEQ ID NO: 14212 - RNA, 20 nt, Artificial Sequence
  spacer sequence GTCN PAM
cucaggguucccggggacua

SEQ ID NO: 14213 - RNA, 20 nt, Artificial Sequence
  spacer sequence GTCN PAM
gguuuaaaaaauacauuauu

SEQ ID NO: 14214 - RNA, 20 nt, Artificial Sequence
  spacer sequence GTCN PAM
aauaaucaccuacuucuugc

SEQ ID NO: 14215 - RNA, 20 nt, Artificial Sequence
  spacer sequence GTCN PAM
gauugggucuaauaaucacc

SEQ ID NO: 14216 - RNA, 20 nt, Artificial Sequence
  spacer sequence GTCN PAM
gccuguuuggugauggaaga

SEQ ID NO: 14217 - RNA, 20 nt, Artificial Sequence
  spacer sequence GTCN PAM
ucagccuguuuggugaugga

SEQ ID NO: 14218 - RNA, 20 nt, Artificial Sequence
  spacer sequence GTCN PAM
aagggcagccccugccuacu

SEQ ID NO: 14219 - RNA, 20 nt, Artificial Sequence
  spacer sequence GTCN PAM
ccagcuucuagcacggugcu

SEQ ID NO: 14220 - RNA, 20 nt, Artificial Sequence
  spacer sequence GTCN PAM
auggcuaaguccggccuauc

SEQ ID NO: 14221 - RNA, 20 nt, Artificial Sequence
  spacer sequence GTCN PAM
ggccuaucaggacuggggcc

SEQ ID NO: 14222 - RNA, 20 nt, Artificial Sequence
  spacer sequence GTCN PAM
ugauaggccggacuuagcca

SEQ ID NO: 14223 - RNA, 20 nt, Artificial Sequence
  spacer sequence GTCN PAM
gcgcaagccccccaggcccc

SEQ ID NO: 14224 - RNA, 20 nt, Artificial Sequence
  spacer sequence GTCN PAM
gucuggcuggacggcacagu

SEQ ID NO: 14225 - RNA, 20 nt, Artificial Sequence
  spacer sequence GTCN PAM
ggcuggacggcacagucgga

SEQ ID NO: 14226 - RNA, 20 nt, Artificial Sequence
  spacer sequence GTCN PAM
agccagacugacaucugugg

SEQ ID NO: 14227 - RNA, 20 nt, Artificial Sequence
  spacer sequence GTCN PAM
gacaccuccgaaaggcuguc

SEQ ID NO: 14228 - RNA, 20 nt, Artificial Sequence
  spacer sequence GTCN PAM
gacugugccguccagccaga

SEQ ID NO: 14229 - RNA, 20 nt, Artificial Sequence
  spacer sequence GTCN PAM
acucccugucugagaauaaa

SEQ ID NO: 14230 - RNA, 20 nt, Artificial Sequence
  spacer sequence GTCN PAM
gagaauaaacaggaccacaa

SEQ ID NO: 14231 - RNA, 20 nt, Artificial Sequence
  spacer sequence GTCN PAM
uguuuauucucagacaggga

SEQ ID NO: 14232 - RNA, 20 nt, Artificial Sequence
  spacer sequence GTCN PAM
uacaaaaaaaaaaaauccaa

SEQ ID NO: 14233 - RNA, 20 nt, Artificial Sequence
  spacer sequence GTCN PAM
cucucucucacacacacaca

SEQ ID NO: 14234 - RNA, 20 nt, Artificial Sequence
  spacer sequence GTCN PAM
gcagaggcucagcccugccc

SEQ ID NO: 14235 - RNA, 20 nt, Artificial Sequence
  spacer sequence GTCN PAM
gugggcugagggauuggugu

SEQ ID NO: 14236 - RNA, 20 nt, Artificial Sequence
  spacer sequence GTCN PAM
ugggaaagucugugggcuga

SEQ ID NO: 14237 - RNA, 20 nt, Artificial Sequence
  spacer sequence GTCN PAM
gccucuuccucccccacacc

SEQ ID NO: 14238 - RNA, 20 nt, Artificial Sequence
  spacer sequence GTCN PAM
cccuucaucauaauuaagau

SEQ ID NO: 14239 - RNA, 20 nt, Artificial Sequence
  spacer sequence GTCN PAM
agugugugcaucuguaauuu

SEQ ID NO: 14240 - RNA, 20 nt, Artificial Sequence
  spacer sequence GTCN PAM
uuaccauuucugcuucuccc

SEQ ID NO: 14241 - RNA, 20 nt, Artificial Sequence
  spacer sequence GTCN PAM
acucaaagcugaccuuuaac

SEQ ID NO: 14242 - RNA, 20 nt, Artificial Sequence
  spacer sequence GTCN PAM
gcuuugaguugacucucaau

SEQ ID NO: 14243 - RNA, 20 nt, Artificial Sequence
  spacer sequence GTCN PAM
aucuucugaugaaaaggcug

SEQ ID NO: 14244 - RNA, 20 nt, Artificial Sequence
  spacer sequence GTCN PAM
agaagcucagcucagccagc

SEQ ID NO: 14245 - RNA, 20 nt, Artificial Sequence
  spacer sequence GTCN PAM
agucugcuuccagaauccag

SEQ ID NO: 14246 - RNA, 20 nt, Artificial Sequence
  spacer sequence GTCN PAM
gcuuccagaauccaggacac

SEQ ID NO: 14247 - RNA, 20 nt, Artificial Sequence
  spacer sequence GTCN PAM
uggauucuggaagcagacug

SEQ ID NO: 14248 - RNA, 20 nt, Artificial Sequence
  spacer sequence GTCN PAM
aauucaaaugccaaguucuu

SEQ ID NO: 14249 - RNA, 20 nt, Artificial Sequence
  spacer sequence GTCN PAM
auuucuucauguguaaaaca

SEQ ID NO: 14250 - RNA, 20 nt, Artificial Sequence
  spacer sequence GTCN PAM
gaggaguuaguacugauucu

SEQ ID NO: 14251 - RNA, 20 nt, Artificial Sequence
  spacer sequence GTCN PAM
ugcaaaccuccuaagaaugu

SEQ ID NO: 14252 - RNA, 20 nt, Artificial Sequence
  spacer sequence GTCN PAM
ugaaacuuguugggacaggu

SEQ ID NO: 14253 - RNA, 20 nt, Artificial Sequence
  spacer sequence GTCN PAM
gggggagcauugaacccuug

SEQ ID NO: 14254 - RNA, 20 nt, Artificial Sequence
  spacer sequence GTCN PAM
gcucaugcuacuucacaagu

SEQ ID NO: 14255 - RNA, 20 nt, Artificial Sequence
  spacer sequence GTCN PAM
cuuucagugugggagauguc

SEQ ID NO: 14256 - RNA, 20 nt, Artificial Sequence
  spacer sequence GTCN PAM
aagcaggucauuaagcaggu

SEQ ID NO: 14257 - RNA, 20 nt, Artificial Sequence
  spacer sequence GTCN PAM
uuaagcagguaaaauugacc

SEQ ID NO: 14258 - RNA, 20 nt, Artificial Sequence
  spacer sequence GTCN PAM
auuuuaccugcuuaaugacc

SEQ ID NO: 14259 - RNA, 20 nt, Artificial Sequence
  spacer sequence GTCN PAM
aaacagggugucgagcauuc

SEQ ID NO: 14260 - RNA, 20 nt, Artificial Sequence
  spacer sequence GTCN PAM
cugucaccauaguccucgaa

SEQ ID NO: 14261 - RNA, 20 nt, Artificial Sequence
  spacer sequence GTCN PAM
ccagagcuugaugaucuucg

SEQ ID NO: 14262 - RNA, 20 nt, Artificial Sequence
  spacer sequence GTCN PAM
gcagucagcccauauucccc

SEQ ID NO: 14263 - RNA, 20 nt, Artificial Sequence
  spacer sequence GTCN PAM
gcccauauuccccuguuccu

SEQ ID NO: 14264 - RNA, 20 nt, Artificial Sequence
  spacer sequence GTCN PAM
gaugcauuugaaauggcuuc

SEQ ID NO: 14265 - RNA, 20 nt, Artificial Sequence
  spacer sequence GTCN PAM
ucuccugaaaccucaaaggu

SEQ ID NO: 14266 - RNA, 20 nt, Artificial Sequence
  spacer sequence GTCN PAM
ggucaucuccugaaaccuca

SEQ ID NO: 14267 - RNA, 20 nt, Artificial Sequence
  spacer sequence GTCN PAM
gcagcccagggucgggucau

SEQ ID NO: 14268 - RNA, 20 nt, Artificial Sequence
  spacer sequence GTCN PAM
uugaaggugagccucggguc

SEQ ID NO: 14269 - RNA, 20 nt, Artificial Sequence
  spacer sequence GTCN PAM
uauuucgugccuguguccuu

SEQ ID NO: 14270 - RNA, 20 nt, Artificial Sequence
  spacer sequence GTCN PAM
auccccaaggccucagacag

SEQ ID NO: 14271 - RNA, 20 nt, Artificial Sequence
  spacer sequence GTCN PAM
gaggccuuggggauugacug

SEQ ID NO: 14272 - RNA, 20 nt, Artificial Sequence
  spacer sequence GTCN PAM
uguggcugucugaggccuug

SEQ ID NO: 14273 - RNA, 20 nt, Artificial Sequence
  spacer sequence GTCN PAM
gcaucccccuccuggggucc

SEQ ID NO: 14274 - RNA, 20 nt, Artificial Sequence
  spacer sequence GTCN PAM
ggccugucugcaucccccuc

SEQ ID NO: 14275 - RNA, 20 nt, Artificial Sequence
  spacer sequence GTCN PAM
uguucccccuccugugccug

SEQ ID NO: 14276 - RNA, 20 nt, Artificial Sequence
  spacer sequence GTCN PAM
acauuuuuuuuaauguggug

SEQ ID NO: 14277 - RNA, 20 nt, Artificial Sequence
  spacer sequence GTCN PAM
aauuucauucauuucuucug

SEQ ID NO: 14278 - RNA, 20 nt, Artificial Sequence
  spacer sequence GTCN PAM
gagagucugggugggaaggc

SEQ ID NO: 14279 - RNA, 20 nt, Artificial Sequence
  spacer sequence GTCN PAM
gggugggaaggcaacucaga

SEQ ID NO: 14280 - RNA, 20 nt, Artificial Sequence
  spacer sequence GTCN PAM
ucugaguugccuucccaccc

SEQ ID NO: 14281 - RNA, 20 nt, Artificial Sequence
  spacer sequence GTCN PAM
ccaagguacagaaacccaga

SEQ ID NO: 14282 - RNA, 20 nt, Artificial Sequence
  spacer sequence GTCN PAM
ggguuucuguaccuugggga

SEQ ID NO: 14283 - RNA, 20 nt, Artificial Sequence
  spacer sequence GTCN PAM
cccccccccccccacccaca

SEQ ID NO: 14284 - RNA, 20 nt, Artificial Sequence
  spacer sequence GTCN PAM
gucccccccccccccccacc

SEQ ID NO: 14285 - RNA, 20 nt, Artificial Sequence
  spacer sequence GTCN PAM
aacagcacguccgucccccc

SEQ ID NO: 14286 - RNA, 20 nt, Artificial Sequence
  spacer sequence GTCN PAM
ugugauauuaaacauggucu

SEQ ID NO: 14287 - RNA, 20 nt, Artificial Sequence
  spacer sequence GTCN PAM
cggaacugcgaacacugacc

SEQ ID NO: 14288 - RNA, 20 nt, Artificial Sequence
  spacer sequence GTCN PAM
guguucgcaguuccgagacc

SEQ ID NO: 14289 - RNA, 20 nt, Artificial Sequence
  spacer sequence GTCN PAM
ugguuagaggaagguauuuu

SEQ ID NO: 14290 - RNA, 20 nt, Artificial Sequence
  spacer sequence GTCN PAM
gaguaacacaaaauacuagg

SEQ ID NO: 14291 - RNA, 20 nt, Artificial Sequence
  spacer sequence GTCN PAM
uaguauuuuguguuacucug

SEQ ID NO: 14292 - RNA, 20 nt, Artificial Sequence
  spacer sequence GTCN PAM
agugguccuaguauuuugug

SEQ ID NO: 14293 - RNA, 20 nt, Artificial Sequence
  spacer sequence GTCN PAM
guguuaugucuagugguccu

SEQ ID NO: 14294 - RNA, 20 nt, Artificial Sequence
  spacer sequence GTCN PAM
ccaacccccaccuccaaccc

SEQ ID NO: 14295 - RNA, 20 nt, Artificial Sequence
  spacer sequence GTCN PAM
caaauguaagagaauuuuca

SEQ ID NO: 14296 - RNA, 20 nt, Artificial Sequence
  spacer sequence GTCN PAM
uuguauuuuauuuuuccuuu

SEQ ID NO: 14297 - RNA, 20 nt, Artificial Sequence
  spacer sequence GTCN PAM
gagugagaaaagcuguugug

SEQ ID NO: 14298 - RNA, 20 nt, Artificial Sequence
  spacer sequence GTCN PAM
ugcgucugagugagaaaagc

SEQ ID NO: 14299 - RNA, 20 nt, Artificial Sequence
  spacer sequence GTCN PAM
uuugguggcuagaaugcugg

SEQ ID NO: 14300 - RNA, 20 nt, Artificial Sequence
  spacer sequence GTCN PAM
guugucauuugguggcuaga

SEQ ID NO: 14301 - RNA, 20 nt, Artificial Sequence
  spacer sequence GTCN PAM
ucacuacccccuuauauuuu

SEQ ID NO: 14302 - RNA, 20 nt, Artificial Sequence
  spacer sequence GTCN PAM
agaguaauuaaacuugcuau

SEQ ID NO: 14303 - RNA, 20 nt, Artificial Sequence
  spacer sequence GTCN PAM
auuaugcaagauugugugug

SEQ ID NO: 14304 - RNA, 20 nt, Artificial Sequence
  spacer sequence GTCN PAM
gggugaauccugcuggcucc

SEQ ID NO: 14305 - RNA, 20 nt, Artificial Sequence
  spacer sequence GTCN PAM
ccuagcaugucugggugaau

SEQ ID NO: 14306 - RNA, 20 nt, Artificial Sequence
  spacer sequence GTCN PAM
auacggugcucccugucucc

SEQ ID NO: 14307 - RNA, 20 nt, Artificial Sequence
  spacer sequence GTCN PAM
gagauuccugaggccccacc

SEQ ID NO: 14308 - RNA, 20 nt, Artificial Sequence
  spacer sequence GTCN PAM
aagggugucugagauuccug

SEQ ID NO: 14309 - RNA, 20 nt, Artificial Sequence
  spacer sequence GTCN PAM
uaccagacaaaaaucuuccu

SEQ ID NO: 14310 - RNA, 20 nt, Artificial Sequence
  spacer sequence GTCN PAM
gguaugacuccugggaacuu

SEQ ID NO: 14311 - RNA, 20 nt, Artificial Sequence
  spacer sequence GTCN PAM
gcuuuuaaaaggaaucauga

SEQ ID NO: 14312 - RNA, 20 nt, Artificial Sequence
  spacer sequence GTCN PAM
gacaggggaaagugggcagg

SEQ ID NO: 14313 - RNA, 20 nt, Artificial Sequence
  spacer sequence GTCN PAM
gacagguagaggaagaaagc

SEQ ID NO: 14314 - RNA, 20 nt, Artificial Sequence
  spacer sequence GTCN PAM
gucacagguacacauugugu

SEQ ID NO: 14315 - RNA, 20 nt, Artificial Sequence
  spacer sequence GTCN PAM
cagguacacauuguguuucc

SEQ ID NO: 14316 - RNA, 20 nt, Artificial Sequence
  spacer sequence GTCN PAM
acaagcagugggggcauggc

SEQ ID NO: 14317 - RNA, 20 nt, Artificial Sequence
  spacer sequence GTCN PAM
aauaacugucaagugacuca

SEQ ID NO: 14318 - RNA, 20 nt, Artificial Sequence
  spacer sequence GTCN PAM
agugacucaacacuugacag

SEQ ID NO: 14319 - RNA, 20 nt, Artificial Sequence
  spacer sequence GTCN PAM
cuugacaguuauuugacuca

SEQ ID NO: 14320 - RNA, 20 nt, Artificial Sequence
  spacer sequence GTCN PAM
aguguugagucacuugacag

SEQ ID NO: 14321 - RNA, 20 nt, Artificial Sequence
  spacer sequence GTCN PAM
cuuccauacuggcuccuggu

SEQ ID NO: 14322 - RNA, 20 nt, Artificial Sequence
  spacer sequence GTCN PAM
ccaggagccaguauggaagg

SEQ ID NO: 14323 - RNA, 20 nt, Artificial Sequence
  spacer sequence GTCN PAM
ucugugaugugaggacuuga

SEQ ID NO: 14324 - RNA, 20 nt, Artificial Sequence
  spacer sequence GTCN PAM
ucacaucacagaggacaaaa

SEQ ID NO: 14325 - RNA, 20 nt, Artificial Sequence
  spacer sequence GTCN PAM
ccauguggauuaauggccca

SEQ ID NO: 14326 - RNA, 20 nt, Artificial Sequence
  spacer sequence GTCN PAM
agccgugcaguaagcuguag

SEQ ID NO: 14327 - RNA, 20 nt, Artificial Sequence
  spacer sequence GTCN PAM
cucggauggugucuagccgu

SEQ ID NO: 14328 - RNA, 20 nt, Artificial Sequence
  spacer sequence GTCN PAM
uacccugucccucggauggu

SEQ ID NO: 14329 - RNA, 20 nt, Artificial Sequence
  spacer sequence GTCN PAM
cggucuuacccugucccucg

SEQ ID NO: 14330 - RNA, 20 nt, Artificial Sequence
  spacer sequence GTCN PAM
uggugaggccacuugucacc

SEQ ID NO: 14331 - RNA, 20 nt, Artificial Sequence
  spacer sequence GTCN PAM
ccagaaggcccauuaugcua

SEQ ID NO: 14332 - RNA, 20 nt, Artificial Sequence
  spacer sequence GTCN PAM
ugguccuauaacacaaauug

SEQ ID NO: 14333 - RNA, 20 nt, Artificial Sequence
  spacer sequence GTCN PAM
uauaacacaaauugcaguau

SEQ ID NO: 14334 - RNA, 20 nt, Artificial Sequence
  spacer sequence GTCN PAM
cuuucaucagaacaggaaaa

SEQ ID NO: 14335 - RNA, 20 nt, Artificial Sequence
  spacer sequence GTCN PAM
gcaucuuuacaguaagccgu

SEQ ID NO: 14336 - RNA, 20 nt, Artificial Sequence
  spacer sequence GTCN PAM
ccuuucucccaccuuucuug

SEQ ID NO: 14337 - RNA, 20 nt, Artificial Sequence
  spacer sequence GTCN PAM
cauuuuuuaucuucuauagu

SEQ ID NO: 14338 - RNA, 20 nt, Artificial Sequence
  spacer sequence GTCN PAM
auggcucugguuugggcauu

SEQ ID NO: 14339 - RNA, 20 nt, Artificial Sequence
  spacer sequence GTCN PAM
gagagaaugcccaaaccaga

SEQ ID NO: 14340 - RNA, 20 nt, Artificial Sequence
  spacer sequence GTCN PAM
acaaaaauucaccaacugua

SEQ ID NO: 14341 - RNA, 20 nt, Artificial Sequence
  spacer sequence GTCN PAM
accauauacaaccauaugac

SEQ ID NO: 14342 - RNA, 20 nt, Artificial Sequence
  spacer sequence GTCN PAM
uaugguuguauaugguugac

SEQ ID NO: 14343 - RNA, 20 nt, Artificial Sequence
  spacer sequence GTCN PAM
guguucuacacaucacugug

SEQ ID NO: 14344 - RNA, 20 nt, Artificial Sequence
  spacer sequence GTCN PAM
ucuaucacuauuguuuugcc

SEQ ID NO: 14345 - RNA, 20 nt, Artificial Sequence
  spacer sequence GTCN PAM
agaguuuugcauuuugcaau

SEQ ID NO: 14346 - RNA, 20 nt, Artificial Sequence
  spacer sequence GTCN PAM
uugugguuggcuucuuucac

SEQ ID NO: 14347 - RNA, 20 nt, Artificial Sequence
  spacer sequence GTCN PAM
uuguguggauguauguucuc

SEQ ID NO: 14348 - RNA, 20 nt, Artificial Sequence
  spacer sequence GTCN PAM
uuagggaaaugcaaauuaaa

SEQ ID NO: 14349 - RNA, 20 nt, Artificial Sequence
  spacer sequence GTCN PAM
guucaaaucuuucgcucauu

SEQ ID NO: 14350 - RNA, 20 nt, Artificial Sequence
  spacer sequence GTCN PAM
auaguaagaaaucaaugcaa

SEQ ID NO: 14351 - RNA, 20 nt, Artificial Sequence
  spacer sequence GTCN PAM
gucuugucuuuuuacuuuau

SEQ ID NO: 14352 - RNA, 20 nt, Artificial Sequence
  spacer sequence GTCN PAM
ugucuuuuuacuuuauuaac

SEQ ID NO: 14353 - RNA, 20 nt, Artificial Sequence
  spacer sequence GTCN PAM
uuuuacuuuauuaacagugu

SEQ ID NO: 14354 - RNA, 20 nt, Artificial Sequence
  spacer sequence GTCN PAM
aaauucaguuaaucuuauau

SEQ ID NO: 14355 - RNA, 20 nt, Artificial Sequence
  spacer sequence GTCN PAM
aucucuggacuuuguucuau

SEQ ID NO: 14356 - RNA, 20 nt, Artificial Sequence
  spacer sequence GTCN PAM
agagauagacccaugcauau

SEQ ID NO: 14357 - RNA, 20 nt, Artificial Sequence
  spacer sequence GTCN PAM
gucuguacacuaacaccaca

SEQ ID NO: 14358 - RNA, 20 nt, Artificial Sequence
  spacer sequence GTCN PAM
guacacuaacaccacaaguu

SEQ ID NO: 14359 - RNA, 20 nt, Artificial Sequence
  spacer sequence GTCN PAM
gauagcacuguauaaguccu

SEQ ID NO: 14360 - RNA, 20 nt, Artificial Sequence
  spacer sequence GTCN PAM
uccaaauguguuuuucuuuu

SEQ ID NO: 14361 - RNA, 20 nt, Artificial Sequence
  spacer sequence GTCN PAM
auuucaacaaaaaaagccug

SEQ ID NO: 14362 - RNA, 20 nt, Artificial Sequence
  spacer sequence GTCN PAM
augcaaauccaaucaaaauc

SEQ ID NO: 14363 - RNA, 20 nt, Artificial Sequence
  spacer sequence GTCN PAM
uccaggagcuuaaaacauaa

SEQ ID NO: 14364 - RNA, 20 nt, Artificial Sequence
  spacer sequence GTCN PAM
caggcagacgugaggaugau

SEQ ID NO: 14365 - RNA, 20 nt, Artificial Sequence
  spacer sequence GTCN PAM
gccugugacucuacaccauu

SEQ ID NO: 14366 - RNA, 20 nt, Artificial Sequence
  spacer sequence GTCN PAM
uguauucuggcaguggcaca

SEQ ID NO: 14367 - RNA, 20 nt, Artificial Sequence
  spacer sequence GTCN PAM
ccacuuccuugugccacugc

SEQ ID NO: 14368 - RNA, 20 nt, Artificial Sequence
  spacer sequence GTCN PAM
cuguuucacaaucagggaaa

SEQ ID NO: 14369 - RNA, 20 nt, Artificial Sequence
  spacer sequence GTCN PAM
uagaaaucucaaguucuggg

SEQ ID NO: 14370 - RNA, 20 nt, Artificial Sequence
  spacer sequence GTCN PAM
gggaucuggugaacaaucgc

SEQ ID NO: 14371 - RNA, 20 nt, Artificial Sequence
  spacer sequence GTCN PAM
gucugacuuuagcuuccuuc

SEQ ID NO: 14372 - RNA, 20 nt, Artificial Sequence
  spacer sequence GTCN PAM
gacuuuagcuuccuucuaga

SEQ ID NO: 14373 - RNA, 20 nt, Artificial Sequence
  spacer sequence GTCN PAM
gacagacaugaaaucaacuu

SEQ ID NO: 14374 - RNA, 20 nt, Artificial Sequence
  spacer sequence GTCN PAM
cagagaucaucuaguccaca

SEQ ID NO: 14375 - RNA, 20 nt, Artificial Sequence
  spacer sequence GTCN PAM
acauuuuauagaugagcaaa

SEQ ID NO: 14376 - RNA, 20 nt, Artificial Sequence
  spacer sequence GTCN PAM
uuccaguucuuguuuugcuc

SEQ ID NO: 14377 - RNA, 20 nt, Artificial Sequence
  spacer sequence GTCN PAM
cagaguuaaacagugaauug

SEQ ID NO: 14378 - RNA, 20 nt, Artificial Sequence
  spacer sequence GTCN PAM
uagggugcuaccaauucacu

SEQ ID NO: 14379 - RNA, 20 nt, Artificial Sequence
  spacer sequence GTCN PAM
ucuguccucaaggcuguuga

SEQ ID NO: 14380 - RNA, 20 nt, Artificial Sequence
  spacer sequence GTCN PAM
ucaaggcuguugaccuuuug

SEQ ID NO: 14381 - RNA, 20 nt, Artificial Sequence
  spacer sequence GTCN PAM
acagccuugaggacagaaga

SEQ ID NO: 14382 - RNA, 20 nt, Artificial Sequence
  spacer sequence GTCN PAM
ucuccugucugucaccagag

SEQ ID NO: 14383 - RNA, 20 nt, Artificial Sequence
  spacer sequence GTCN PAM
gucaccagagccauuuacgu

SEQ ID NO: 14384 - RNA, 20 nt, Artificial Sequence
  spacer sequence GTCN PAM
ccagagccauuuacgucaca

SEQ ID NO: 14385 - RNA, 20 nt, Artificial Sequence
  spacer sequence GTCN PAM
cagaacuggagcucuuagaa

SEQ ID NO: 14386 - RNA, 20 nt, Artificial Sequence
  spacer sequence GTCN PAM
aucaguuggcugugccagaa

SEQ ID NO: 14387 - RNA, 20 nt, Artificial Sequence
  spacer sequence GTCN PAM
gaauuuggucuucaaguccc

SEQ ID NO: 14388 - RNA, 20 nt, Artificial Sequence
  spacer sequence GTCN PAM
ucaaguccccccgaugccuc

SEQ ID NO: 14389 - RNA, 20 nt, Artificial Sequence
  spacer sequence GTCN PAM
ccccgaugccuccuccuuuc

SEQ ID NO: 14390 - RNA, 20 nt, Artificial Sequence
  spacer sequence GTCN PAM
uguguugauagaugcacagg

SEQ ID NO: 14391 - RNA, 20 nt, Artificial Sequence
  spacer sequence GTCN PAM
cuaagcuuucuuaauaaugu

SEQ ID NO: 14392 - RNA, 20 nt, Artificial Sequence
  spacer sequence GTCN PAM
gguuauagaggggauuuuga

SEQ ID NO: 14393 - RNA, 20 nt, Artificial Sequence
  spacer sequence GTCN PAM
cugauuucugguuuauagcc

SEQ ID NO: 14394 - RNA, 20 nt, Artificial Sequence
  spacer sequence GTCN PAM
uccaggaaccagaguugaau

SEQ ID NO: 14395 - RNA, 20 nt, Artificial Sequence
  spacer sequence GTCN PAM
guuccaggcucacugaguuu

SEQ ID NO: 14396 - RNA, 20 nt, Artificial Sequence
  spacer sequence GTCN PAM
cuaauggguagcugaaucuc

SEQ ID NO: 14397 - RNA, 20 nt, Artificial Sequence
  spacer sequence GTCN PAM
uaaucuucccaccucccccc

SEQ ID NO: 14398 - RNA, 20 nt, Artificial Sequence
  spacer sequence GTCN PAM
ugucuuugagugaaagugcc

SEQ ID NO: 14399 - RNA, 20 nt, Artificial Sequence
  spacer sequence GTCN PAM
uugagugaaagugccacauu

SEQ ID NO: 14400 - RNA, 20 nt, Artificial Sequence
  spacer sequence GTCN PAM
agagugaauggggugggggc

SEQ ID NO: 14401 - RNA, 20 nt, Artificial Sequence
  spacer sequence GTCN PAM
gggcaccgcccccaccccau

SEQ ID NO: 14402 - RNA, 20 nt, Artificial Sequence
  spacer sequence GTCN PAM
ccaaaauaugcccccauccu

SEQ ID NO: 14403 - RNA, 20 nt, Artificial Sequence
  spacer sequence GTCN PAM
ugcccacagcguaggcacaa

SEQ ID NO: 14404 - RNA, 20 nt, Artificial Sequence
  spacer sequence GTCN PAM
ucugugaggugguccugccc

SEQ ID NO: 14405 - RNA, 20 nt, Artificial Sequence
  spacer sequence GTCN PAM
acaaggaaauuccuugugga

SEQ ID NO: 14406 - RNA, 20 nt, Artificial Sequence
  spacer sequence GTCN PAM
acaaggaauuuccuuguaga

SEQ ID NO: 14407 - RNA, 20 nt, Artificial Sequence
  spacer sequence GTCN PAM
uuuguccacaaggaauuucc

SEQ ID NO: 14408 - RNA, 20 nt, Artificial Sequence
  spacer sequence GTCN PAM
gauuagccuuucccagggaa

SEQ ID NO: 14409 - RNA, 20 nt, Artificial Sequence
  spacer sequence GTCN PAM
cuucuguaccuaugaccugg

SEQ ID NO: 14410 - RNA, 20 nt, Artificial Sequence
  spacer sequence GTCN PAM
uagguacagaagagacaaau

SEQ ID NO: 14411 - RNA, 20 nt, Artificial Sequence
  spacer sequence GTCN PAM
caccuuuccaaaccaagcca

SEQ ID NO: 14412 - RNA, 20 nt, Artificial Sequence
  spacer sequence GTCN PAM
aauggcauuucuaguucuag

SEQ ID NO: 14413 - RNA, 20 nt, Artificial Sequence
  spacer sequence GTCN PAM
uuauagcagcauguuuuaua

SEQ ID NO: 14414 - RNA, 20 nt, Artificial Sequence
  spacer sequence GTCN PAM
uugcuauugugaauagugcc

SEQ ID NO: 14415 - RNA, 20 nt, Artificial Sequence
  spacer sequence GTCN PAM
aacaaugauagacuggauua

SEQ ID NO: 14416 - RNA, 20 nt, Artificial Sequence
  spacer sequence GTCN PAM
aucauuguuggacauuuggg

SEQ ID NO: 14417 - RNA, 20 nt, Artificial Sequence
  spacer sequence GTCN PAM
augguaggcaguuagcacau

SEQ ID NO: 14418 - RNA, 20 nt, Artificial Sequence
  spacer sequence GTCN PAM
gagcugagguuagaacaaaa

SEQ ID NO: 14419 - RNA, 20 nt, Artificial Sequence
  spacer sequence GTCN PAM
uuaaacuuuuuuugaaaaca

SEQ ID NO: 14420 - RNA, 20 nt, Artificial Sequence
  spacer sequence GTCN PAM
cuccucuagugcucuagccu

SEQ ID NO: 14421 - RNA, 20 nt, Artificial Sequence
  spacer sequence GTCN PAM
aguuagaaaacgccuuuaag

SEQ ID NO: 14422 - RNA, 20 nt, Artificial Sequence
  spacer sequence GTCN PAM
cccgaugccaguugccaaau

SEQ ID NO: 14423 - RNA, 20 nt, Artificial Sequence
  spacer sequence GTCN PAM
ggaaggccgaacaauguuuc

SEQ ID NO: 14424 - RNA, 20 nt, Artificial Sequence
  spacer sequence GTCN PAM
uuuuacucaugguuguagga

SEQ ID NO: 14425 - RNA, 20 nt, Artificial Sequence
  spacer sequence GTCN PAM
uuucuugagacagcuuuucc

SEQ ID NO: 14426 - RNA, 20 nt, Artificial Sequence
  spacer sequence GTCN PAM
caagaaaggaccauacacgu

SEQ ID NO: 14427 - RNA, 20 nt, Artificial Sequence
  spacer sequence GTCN PAM
uccaauucuggaaaagcugu

SEQ ID NO: 14428 - RNA, 20 nt, Artificial Sequence
  spacer sequence GTCN PAM
uuucuccucuuucugggugg

SEQ ID NO: 14429 - RNA, 20 nt, Artificial Sequence
  spacer sequence GTCN PAM
augcauaacaaauuggggua

SEQ ID NO: 14430 - RNA, 20 nt, Artificial Sequence
  spacer sequence GTCN PAM
acuucccuuacaguucaggu

SEQ ID NO: 14431 - RNA, 20 nt, Artificial Sequence
  spacer sequence GTCN PAM
aaaagauuucuguauucugc

SEQ ID NO: 14432 - RNA, 20 nt, Artificial Sequence
  spacer sequence GTCN PAM
gagaggcuaacugcuguaac

SEQ ID NO: 14433 - RNA, 20 nt, Artificial Sequence
  spacer sequence GTCN PAM
ugcaccagaugucccugaag

SEQ ID NO: 14434 - RNA, 20 nt, Artificial Sequence
  spacer sequence GTCN PAM
agcuggucuugcaccagaug

SEQ ID NO: 14435 - RNA, 20 nt, Artificial Sequence
  spacer sequence GTCN PAM
aaacuagcuucugggauagg

SEQ ID NO: 14436 - RNA, 20 nt, Artificial Sequence
  spacer sequence GTCN PAM
cuuccuaucccagaagcuag

SEQ ID NO: 14437 - RNA, 20 nt, Artificial Sequence
  spacer sequence GTCN PAM
cuauuaaguaaauacugaaa

SEQ ID NO: 14438 - RNA, 20 nt, Artificial Sequence
  spacer sequence GTCN PAM
guuuuaaaaccagcaaagca

SEQ ID NO: 14439 - RNA, 20 nt, Artificial Sequence
  spacer sequence GTCN PAM
augccguguguuggaaagag

SEQ ID NO: 14440 - RNA, 20 nt, Artificial Sequence
  spacer sequence GTCN PAM
auguuuaucucuugaggccc

SEQ ID NO: 14441 - RNA, 20 nt, Artificial Sequence
  spacer sequence GTCN PAM
ccaccaguggcaaagcagag

SEQ ID NO: 14442 - RNA, 20 nt, Artificial Sequence
  spacer sequence GTCN PAM
cagaagaaccugguggcucc

SEQ ID NO: 14443 - RNA, 20 nt, Artificial Sequence
  spacer sequence GTCN PAM
gguugguuuucagagaacag

SEQ ID NO: 14444 - RNA, 20 nt, Artificial Sequence
  spacer sequence GTCN PAM
uugcucggugucagguuggu

SEQ ID NO: 14445 - RNA, 20 nt, Artificial Sequence
  spacer sequence GTCN PAM
uaaaaguagagauuuuaaaa

SEQ ID NO: 14446 - RNA, 20 nt, Artificial Sequence
  spacer sequence GTCN PAM
ucuguguagauguagguaau

SEQ ID NO: 14447 - RNA, 20 nt, Artificial Sequence
  spacer sequence GTCN PAM
augaguaauauuucauauuc

SEQ ID NO: 14448 - RNA, 20 nt, Artificial Sequence
  spacer sequence GTCN PAM
agaaggagaacugggagggg

SEQ ID NO: 14449 - RNA, 20 nt, Artificial Sequence
  spacer sequence GTCN PAM
cuauuaaggcagaugaacgu

SEQ ID NO: 14450 - RNA, 20 nt, Artificial Sequence
  spacer sequence GTCN PAM
aacucccacguucaucugcc

SEQ ID NO: 14451 - RNA, 20 nt, Artificial Sequence
  spacer sequence GTCN PAM
ccugcuuugagguucaauua

SEQ ID NO: 14452 - RNA, 20 nt, Artificial Sequence
  spacer sequence GTCN PAM
gggggcagugagaugcagag

SEQ ID NO: 14453 - RNA, 20 nt, Artificial Sequence
  spacer sequence GTCN PAM
cagagcacagaaaagauuug

SEQ ID NO: 14454 - RNA, 20 nt, Artificial Sequence
  spacer sequence GTCN PAM
ugagaggaucucaagcuggg

SEQ ID NO: 14455 - RNA, 20 nt, Artificial Sequence
  spacer sequence GTCN PAM
gcuggagaggcuuggcacca

SEQ ID NO: 14456 - RNA, 20 nt, Artificial Sequence
  spacer sequence GTCN PAM
gauucuuccccuuagagcac

SEQ ID NO: 14457 - RNA, 20 nt, Artificial Sequence
  spacer sequence GTCN PAM
gaaagacuugacuuuaccau

SEQ ID NO: 14458 - RNA, 20 nt, Artificial Sequence
  spacer sequence GTCN PAM
uucugacucaaaaauccaug

SEQ ID NO: 14459 - RNA, 20 nt, Artificial Sequence
  spacer sequence GTCN PAM
agucuuucugacucaaaaau

SEQ ID NO: 14460 - RNA, 20 nt, Artificial Sequence
  spacer sequence GTCN PAM
ucuagcuaguacaugguaaa

SEQ ID NO: 14461 - RNA, 20 nt, Artificial Sequence
  spacer sequence GTCN PAM
uuaucuggaaaauggcaaua

SEQ ID NO: 14462 - RNA, 20 nt, Artificial Sequence
  spacer sequence GTCN PAM
acucagugggcacuuggcag

SEQ ID NO: 14463 - RNA, 20 nt, Artificial Sequence
  spacer sequence GTCN PAM
auaaaugaaugucuacucag

SEQ ID NO: 14464 - RNA, 20 nt, Artificial Sequence
  spacer sequence GTCN PAM
aaaccaguuuguauuccaga

SEQ ID NO: 14465 - RNA, 20 nt, Artificial Sequence
  spacer sequence GTCN PAM
uauuuuucuuuuuaauagug

SEQ ID NO: 14466 - RNA, 20 nt, Artificial Sequence
  spacer sequence GTCN PAM
uggaaugaacacuauuaaaa

SEQ ID NO: 14467 - RNA, 20 nt, Artificial Sequence
  spacer sequence GTCN PAM
accacauuuuuguuauuuuc

SEQ ID NO: 14468 - RNA, 20 nt, Artificial Sequence
  spacer sequence GTCN PAM
ugguuccugaaaacuuuuuc

SEQ ID NO: 14469 - RNA, 20 nt, Artificial Sequence
  spacer sequence GTCN PAM
cacaacaaaaagacacaggu

SEQ ID NO: 14470 - RNA, 20 nt, Artificial Sequence
  spacer sequence GTCN PAM
uuuuguugugggacuugggu

SEQ ID NO: 14471 - RNA, 20 nt, Artificial Sequence
  spacer sequence GTCN PAM
gcauguagauguguguugau

SEQ ID NO: 14472 - RNA, 20 nt, Artificial Sequence
  spacer sequence GTCN PAM
ccugcuguggaccuaguauu

SEQ ID NO: 14473 - RNA, 20 nt, Artificial Sequence
  spacer sequence GTCN PAM
acagcaggugacucaacauu

SEQ ID NO: 14474 - RNA, 20 nt, Artificial Sequence
  spacer sequence GTCN PAM
uuuuccuugaaacacuuggu

SEQ ID NO: 14475 - RNA, 20 nt, Artificial Sequence
  spacer sequence GTCN PAM
ugcagguaguaagacauagu

SEQ ID NO: 14476 - RNA, 20 nt, Artificial Sequence
  spacer sequence GTCN PAM
uacuaccugcaagacacagu

SEQ ID NO: 14477 - RNA, 20 nt, Artificial Sequence
  spacer sequence GTCN PAM
gguguucaagaccagccugg

SEQ ID NO: 14478 - RNA, 20 nt, Artificial Sequence
  spacer sequence GTCN PAM
ugaacaccugaccucagaug

SEQ ID NO: 14479 - RNA, 20 nt, Artificial Sequence
  spacer sequence GTCN PAM
aaauccugucucuacuaaaa

SEQ ID NO: 14480 - RNA, 20 nt, Artificial Sequence
  spacer sequence GTCN PAM
cuacuaaaaaauacaaaaau

SEQ ID NO: 14481 - RNA, 20 nt, Artificial Sequence
  spacer sequence GTCN PAM
cagccucccgaguagcuaug

SEQ ID NO: 14482 - RNA, 20 nt, Artificial Sequence
  spacer sequence GTCN PAM
uacucuguugccuaaauugg

SEQ ID NO: 14483 - RNA, 20 nt, Artificial Sequence
  spacer sequence GTCN PAM
caaaaauaaaauaaacuaaa

SEQ ID NO: 14484 - RNA, 20 nt, Artificial Sequence
  spacer sequence GTCN PAM
uuuuauuuuaguuuauuuua

SEQ ID NO: 14485 - RNA, 20 nt, Artificial Sequence
  spacer sequence GTCN PAM
ugguugcagcuuugggcauc

SEQ ID NO: 14486 - RNA, 20 nt, Artificial Sequence
  spacer sequence GTCN PAM
uuuaaacucugccucguaaa

SEQ ID NO: 14487 - RNA, 20 nt, Artificial Sequence
  spacer sequence GTCN PAM
uuaggcugggaguauuuacg

SEQ ID NO: 14488 - RNA, 20 nt, Artificial Sequence
  spacer sequence GTCN PAM
gcuaaccccaauacauguua

SEQ ID NO: 14489 - RNA, 20 nt, Artificial Sequence
  spacer sequence GTCN PAM
uuuaucuuguuuagaaauca

SEQ ID NO: 14490 - RNA, 20 nt, Artificial Sequence
  spacer sequence GTCN PAM
ggaguggaaugcuuuuuuuu

SEQ ID NO: 14491 - RNA, 20 nt, Artificial Sequence
  spacer sequence GTCN PAM
caacuuggucaggaguggaa

SEQ ID NO: 14492 - RNA, 20 nt, Artificial Sequence
  spacer sequence GTCN PAM
aagugauuggccaguaggcg

SEQ ID NO: 14493 - RNA, 20 nt, Artificial Sequence
  spacer sequence GTCN PAM
ccuccuuccccugacuggcc

SEQ ID NO: 14494 - RNA, 20 nt, Artificial Sequence
  spacer sequence GTCN PAM
ggggaaggaggugacuucca

SEQ ID NO: 14495 - RNA, 20 nt, Artificial Sequence
  spacer sequence GTCN PAM
ccugccaugagcaaucugug

SEQ ID NO: 14496 - RNA, 20 nt, Artificial Sequence
  spacer sequence GTCN PAM
gggaggcggcugcucagggu

SEQ ID NO: 14497 - RNA, 20 nt, Artificial Sequence
  spacer sequence GTCN PAM
uguagaaucuaagagugacc

SEQ ID NO: 14498 - RNA, 20 nt, Artificial Sequence
  spacer sequence GTCN PAM
cucuuagauucuacaggacu

SEQ ID NO: 14499 - RNA, 20 nt, Artificial Sequence
  spacer sequence GTCN PAM
uaguuuucucaucuguagca

SEQ ID NO: 14500 - RNA, 20 nt, Artificial Sequence
  spacer sequence GTCN PAM
ugguccugaauccagugcca

SEQ ID NO: 14501 - RNA, 20 nt, Artificial Sequence
  spacer sequence GTCN PAM
ugaauccagugccaugccca

SEQ ID NO: 14502 - RNA, 20 nt, Artificial Sequence
  spacer sequence GTCN PAM
ucgggccacauggcugcugg

SEQ ID NO: 14503 - RNA, 20 nt, Artificial Sequence
  spacer sequence GTCN PAM
cagggagggggcugcugagg

SEQ ID NO: 14504 - RNA, 20 nt, Artificial Sequence
  spacer sequence GTCN PAM
gcucacauggggaguaggag

SEQ ID NO: 14505 - RNA, 20 nt, Artificial Sequence
  spacer sequence GTCN PAM
aggccuugaaggcaaacucc

SEQ ID NO: 14506 - RNA, 20 nt, Artificial Sequence
  spacer sequence GTCN PAM
cugcagcugccuuccucgcu

SEQ ID NO: 14507 - RNA, 20 nt, Artificial Sequence
  spacer sequence GTCN PAM
caucucagcucacuccccga

SEQ ID NO: 14508 - RNA, 20 nt, Artificial Sequence
  spacer sequence GTCN PAM
gggagugagcugagaugaga

SEQ ID NO: 14509 - RNA, 20 nt, Artificial Sequence
  spacer sequence GTCN PAM
gaguccuuucuucaggaacc

SEQ ID NO: 14510 - RNA, 20 nt, Artificial Sequence
  spacer sequence GTCN PAM
uuucuucaggaaccaucaag

SEQ ID NO: 14511 - RNA, 20 nt, Artificial Sequence
  spacer sequence GTCN PAM
ccucuccucagauagauuua

SEQ ID NO: 14512 - RNA, 20 nt, Artificial Sequence
  spacer sequence GTCN PAM
uuagucuccucuccucagau

SEQ ID NO: 14513 - RNA, 20 nt, Artificial Sequence
  spacer sequence GTCN PAM
ggauagcuaagcucuuuccu

SEQ ID NO: 14514 - RNA, 20 nt, Artificial Sequence
  spacer sequence GTCN PAM
cugggccacuccugaggcug

SEQ ID NO: 14515 - RNA, 20 nt, Artificial Sequence
  spacer sequence GTCN PAM
ggcuagugaggcauaguucu

SEQ ID NO: 14516 - RNA, 20 nt, Artificial Sequence
  spacer sequence GTCN PAM
ggccugaauugcuaucaccc

SEQ ID NO: 14517 - RNA, 20 nt, Artificial Sequence
  spacer sequence GTCN PAM
uaacccuuccauggaggggg

SEQ ID NO: 14518 - RNA, 20 nt, Artificial Sequence
  spacer sequence GTCN PAM
aaacccaggcaugggcauga

SEQ ID NO: 14519 - RNA, 20 nt, Artificial Sequence
  spacer sequence GTCN PAM
ugcccaugccuggguuuaga

SEQ ID NO: 14520 - RNA, 20 nt, Artificial Sequence
  spacer sequence GTCN PAM
uuucuggucaugcccaugcc

SEQ ID NO: 14521 - RNA, 20 nt, Artificial Sequence
  spacer sequence GTCN PAM
gcagaaugagucacaauacc

SEQ ID NO: 14522 - RNA, 20 nt, Artificial Sequence
  spacer sequence GTCN PAM
caauaccugcauccuaaucc

SEQ ID NO: 14523 - RNA, 20 nt, Artificial Sequence
  spacer sequence GTCN PAM
ggggguuuguuggaggccac

SEQ ID NO: 14524 - RNA, 20 nt, Artificial Sequence
  spacer sequence GTCN PAM
cuaugccacccagguauugc

SEQ ID NO: 14525 - RNA, 20 nt, Artificial Sequence
  spacer sequence GTCN PAM
aagcuaugacuaucuccuug

SEQ ID NO: 14526 - RNA, 20 nt, Artificial Sequence
  spacer sequence GTCN PAM
uagcuuugacaaauacuuuu

SEQ ID NO: 14527 - RNA, 20 nt, Artificial Sequence
  spacer sequence GTCN PAM
cuuccuugcccuccacccag

SEQ ID NO: 14528 - RNA, 20 nt, Artificial Sequence
  spacer sequence GTCN PAM
aaacuuccccuuuaaucuua

SEQ ID NO: 14529 - RNA, 20 nt, Artificial Sequence
  spacer sequence GTCN PAM
ucucucaggacucaggaaac

SEQ ID NO: 14530 - RNA, 20 nt, Artificial Sequence
  spacer sequence GTCN PAM
ugagagaugaccuggucgaa

SEQ ID NO: 14531 - RNA, 20 nt, Artificial Sequence
  spacer sequence GTCN PAM
ucugccucugucaccagcaa

SEQ ID NO: 14532 - RNA, 20 nt, Artificial Sequence
  spacer sequence GTCN PAM
ccagcaaauauaugcucagu

SEQ ID NO: 14533 - RNA, 20 nt, Artificial Sequence
  spacer sequence GTCN PAM
cuuuacuuuugaggccaguu

SEQ ID NO: 14534 - RNA, 20 nt, Artificial Sequence
  spacer sequence GTCN PAM
ucaggcuuuagaaccagaag

SEQ ID NO: 14535 - RNA, 20 nt, Artificial Sequence
  spacer sequence GTCN PAM
caguauguugcccaggcugg

SEQ ID NO: 14536 - RNA, 20 nt, Artificial Sequence
  spacer sequence GTCN PAM
uaugaucguggcucacugca

SEQ ID NO: 14537 - RNA, 20 nt, Artificial Sequence
  spacer sequence GTCN PAM
cccaggcuggaaugcagucg

SEQ ID NO: 14538 - RNA, 20 nt, Artificial Sequence
  spacer sequence GTCN PAM
ugcucugucacccaggcugg

SEQ ID NO: 14539 - RNA, 20 nt, Artificial Sequence
  spacer sequence GTCN PAM
uaaaaauaaaauaaaacaga

SEQ ID NO: 14540 - RNA, 20 nt, Artificial Sequence
  spacer sequence GTCN PAM
uuagaugaaaaaggcuggaa

SEQ ID NO: 14541 - RNA, 20 nt, Artificial Sequence
  spacer sequence GTCN PAM
cgaagguuaaaguccuuaga

SEQ ID NO: 14542 - RNA, 20 nt, Artificial Sequence
  spacer sequence GTCN PAM
auucugaaaaaacaaggaau

SEQ ID NO: 14543 - RNA, 20 nt, Artificial Sequence
  spacer sequence GTCN PAM
uuccuuguuuuuucagaaug

SEQ ID NO: 14544 - RNA, 20 nt, Artificial Sequence
  spacer sequence GTCN PAM
ucuugucucugccagccuua

SEQ ID NO: 14545 - RNA, 20 nt, Artificial Sequence
  spacer sequence GTCN PAM
cugccagccuuagucccuuu

SEQ ID NO: 14546 - RNA, 20 nt, Artificial Sequence
  spacer sequence GTCN PAM
cuuuuuuuuuuuuuuuuuuu

SEQ ID NO: 14547 - RNA, 20 nt, Artificial Sequence
  spacer sequence GTCN PAM
caaaaaaaaaaaaaaaaaaa

SEQ ID NO: 14548 - RNA, 20 nt, Artificial Sequence
  spacer sequence GTCN PAM
cgcucugucauccaagcugg

SEQ ID NO: 14549 - RNA, 20 nt, Artificial Sequence
  spacer sequence GTCN PAM
uccaagcuggagcauagugg

SEQ ID NO: 14550 - RNA, 20 nt, Artificial Sequence
  spacer sequence GTCN PAM
ucagcucaagcaaguagcua

SEQ ID NO: 14551 - RNA, 20 nt, Artificial Sequence
  spacer sequence GTCN PAM
aaguuugaaagccagcuuuu

SEQ ID NO: 14552 - RNA, 20 nt, Artificial Sequence
  spacer sequence GTCN PAM
auacugccuguuaggaaaca

SEQ ID NO: 14553 - RNA, 20 nt, Artificial Sequence
  spacer sequence GTCN PAM
caaacucacaguaaagagcu

SEQ ID NO: 14554 - RNA, 20 nt, Artificial Sequence
  spacer sequence GTCN PAM
ucaaauuccgugguugcugc

SEQ ID NO: 14555 - RNA, 20 nt, Artificial Sequence
  spacer sequence GTCN PAM
auuuuaaggccggggguuga

SEQ ID NO: 14556 - RNA, 20 nt, Artificial Sequence
  spacer sequence GTCN PAM
guuucauagucauuuauccc

SEQ ID NO: 14557 - RNA, 20 nt, Artificial Sequence
  spacer sequence GTCN PAM
uuuaucccacucuggggaua

SEQ ID NO: 14558 - RNA, 20 nt, Artificial Sequence
  spacer sequence GTCN PAM
caguaucagccagagaagag

SEQ ID NO: 14559 - RNA, 20 nt, Artificial Sequence
  spacer sequence GTCN PAM
caggccccagagaaugccuc

SEQ ID NO: 14560 - RNA, 20 nt, Artificial Sequence
  spacer sequence GTCN PAM
cauaccuuagugcugggaag

SEQ ID NO: 14561 - RNA, 20 nt, Artificial Sequence
  spacer sequence GTCN PAM
agguggugcucugcccaagg

SEQ ID NO: 14562 - RNA, 20 nt, Artificial Sequence
  spacer sequence GTCN PAM
cugggagagguccagguggu

SEQ ID NO: 14563 - RNA, 20 nt, Artificial Sequence
  spacer sequence GTCN PAM
uccacaccagccccuguccu

SEQ ID NO: 14564 - RNA, 20 nt, Artificial Sequence
  spacer sequence GTCN PAM
uuuacccuugggcccucucu

SEQ ID NO: 14565 - RNA, 20 nt, Artificial Sequence
  spacer sequence GTCN PAM
caagaaaaaaaaaaaaaaaa

SEQ ID NO: 14566 - RNA, 20 nt, Artificial Sequence
  spacer sequence GTCN PAM
cacucuugucacccaggcug

SEQ ID NO: 14567 - RNA, 20 nt, Artificial Sequence
  spacer sequence GTCN PAM
cccaggcuggacugcaguag

SEQ ID NO: 14568 - RNA, 20 nt, Artificial Sequence
  spacer sequence GTCN PAM
agccugggugacaagaguga

SEQ ID NO: 14569 - RNA, 20 nt, Artificial Sequence
  spacer sequence GTCN PAM
caguuaauuuugguauuuuc

SEQ ID NO: 14570 - RNA, 20 nt, Artificial Sequence
  spacer sequence GTCN PAM
ugaacuccuguccucaagug

SEQ ID NO: 14571 - RNA, 20 nt, Artificial Sequence
  spacer sequence GTCN PAM
ucaagugaccuuggccuccc

SEQ ID NO: 14572 - RNA, 20 nt, Artificial Sequence
  spacer sequence GTCN PAM
cuugaggacaggaguucaag

SEQ ID NO: 14573 - RNA, 20 nt, Artificial Sequence
  spacer sequence GTCN PAM
cugcgccuggccuguuugcu

SEQ ID NO: 14574 - RNA, 20 nt, Artificial Sequence
  spacer sequence GTCN PAM
guuuuaauuguguuaauaua

SEQ ID NO: 14575 - RNA, 20 nt, Artificial Sequence
  spacer sequence GTCN PAM
ucaucccaccgucuaccucc

SEQ ID NO: 14576 - RNA, 20 nt, Artificial Sequence
  spacer sequence GTCN PAM
accuccaacacuuuuucauc

SEQ ID NO: 14577 - RNA, 20 nt, Artificial Sequence
  spacer sequence GTCN PAM
cuaugaauuuacccaguaua

SEQ ID NO: 14578 - RNA, 20 nt, Artificial Sequence
  spacer sequence GTCN PAM
auccauguuguagcauaugu

SEQ ID NO: 14579 - RNA, 20 nt, Artificial Sequence
  spacer sequence GTCN PAM
aaauuucauuuauuuuuaug

SEQ ID NO: 14580 - RNA, 20 nt, Artificial Sequence
  spacer sequence GTCN PAM
caggaaaaaaaaaaaaaaaa

SEQ ID NO: 14581 - RNA, 20 nt, Artificial Sequence
  spacer sequence GTCN PAM
cccaggcuggagugcaaugg

SEQ ID NO: 14582 - RNA, 20 nt, Artificial Sequence
  spacer sequence GTCN PAM
cuacuaaaaauauaaaaauu

SEQ ID NO: 14583 - RNA, 20 nt, Artificial Sequence
  spacer sequence GTCN PAM
ugaacuccuggugucaagug

SEQ ID NO: 14584 - RNA, 20 nt, Artificial Sequence
  spacer sequence GTCN PAM
agugaucugcccgccucggc

SEQ ID NO: 14585 - RNA, 20 nt, Artificial Sequence
  spacer sequence GTCN PAM
caauaaacgcaaaguagaaa

SEQ ID NO: 14586 - RNA, 20 nt, Artificial Sequence
  spacer sequence GTCN PAM
aaugguggaaucacugugga

SEQ ID NO: 14587 - RNA, 20 nt, Artificial Sequence
  spacer sequence GTCN PAM
ccaucuucucuacauucuaa

SEQ ID NO: 14588 - RNA, 20 nt, Artificial Sequence
  spacer sequence GTCN PAM
uuaaccaucaauuaagcugg

SEQ ID NO: 14589 - RNA, 20 nt, Artificial Sequence
  spacer sequence GTCN PAM
aaggcccccagcuuaauuga

SEQ ID NO: 14590 - RNA, 20 nt, Artificial Sequence
  spacer sequence GTCN PAM
cagccaauucacagaggucu

SEQ ID NO: 14591 - RNA, 20 nt, Artificial Sequence
  spacer sequence GTCN PAM
ccggagagggcaccgaacca

SEQ ID NO: 14592 - RNA, 20 nt, Artificial Sequence
  spacer sequence GTCN PAM
uggagggaagaagcagcaag

SEQ ID NO: 14593 - RNA, 20 nt, Artificial Sequence
  spacer sequence GTCN PAM
ucugccuugcugcuucuucc

SEQ ID NO: 14594 - RNA, 20 nt, Artificial Sequence
  spacer sequence GTCN PAM
acagacuucauuuuaugcug

SEQ ID NO: 14595 - RNA, 20 nt, Artificial Sequence
  spacer sequence GTCN PAM
guagacuguuuuuuucucug

SEQ ID NO: 14596 - RNA, 20 nt, Artificial Sequence
  spacer sequence GTCN PAM
ucacacacuacugaaagcuc

SEQ ID NO: 14597 - RNA, 20 nt, Artificial Sequence
  spacer sequence GTCN PAM
ccaggguagagcuuucagua

SEQ ID NO: 14598 - RNA, 20 nt, Artificial Sequence
  spacer sequence GTCN PAM
agccagguccccaggguaga

SEQ ID NO: 14599 - RNA, 20 nt, Artificial Sequence
  spacer sequence GTCN PAM
cagucucucaaucagugaaa

SEQ ID NO: 14600 - RNA, 20 nt, Artificial Sequence
  spacer sequence GTCN PAM
cucaaucagugaaauggagg

SEQ ID NO: 14601 - RNA, 20 nt, Artificial Sequence
  spacer sequence GTCN PAM
ccuguguugcaaacuaaguu

SEQ ID NO: 14602 - RNA, 20 nt, Artificial Sequence
  spacer sequence GTCN PAM
cuggcuuuuggaggaggcgu

SEQ ID NO: 14603 - RNA, 20 nt, Artificial Sequence
  spacer sequence GTCN PAM
uggaggcggggugaagcagu

SEQ ID NO: 14604 - RNA, 20 nt, Artificial Sequence
  spacer sequence GTCN PAM
gcagcugccggaaaugcugg

SEQ ID NO: 14605 - RNA, 20 nt, Artificial Sequence
  spacer sequence GTCN PAM
agcccagauggagcaagggc

SEQ ID NO: 14606 - RNA, 20 nt, Artificial Sequence
  spacer sequence GTCN PAM
cacaggaaacugaaguuaaa

SEQ ID NO: 14607 - RNA, 20 nt, Artificial Sequence
  spacer sequence GTCN PAM
ggggagugggaucacuaauu

SEQ ID NO: 14608 - RNA, 20 nt, Artificial Sequence
  spacer sequence GTCN PAM
acuuugcuuuuuaaaaaugg

SEQ ID NO: 14609 - RNA, 20 nt, Artificial Sequence
  spacer sequence GTCN PAM
cuggaguaacuuacuuuugu

SEQ ID NO: 14610 - RNA, 20 nt, Artificial Sequence
  spacer sequence GTCN PAM
cuagaacggccacaugcauc

SEQ ID NO: 14611 - RNA, 20 nt, Artificial Sequence
  spacer sequence GTCN PAM
uacucuucguggcuucccuu

SEQ ID NO: 14612 - RNA, 20 nt, Artificial Sequence
  spacer sequence GTCN PAM
uauuuuuccaucugauccug

SEQ ID NO: 14613 - RNA, 20 nt, Artificial Sequence
  spacer sequence GTCN PAM
uugcagcugccugacugaaa

SEQ ID NO: 14614 - RNA, 20 nt, Artificial Sequence
  spacer sequence GTCN PAM
ggcagcugcaaagaccacag

SEQ ID NO: 14615 - RNA, 20 nt, Artificial Sequence
  spacer sequence GTCN PAM
cagugagaaaggaagcaucu

SEQ ID NO: 14616 - RNA, 20 nt, Artificial Sequence
  spacer sequence GTCN PAM
gggggccuagcuuacgucac

SEQ ID NO: 14617 - RNA, 20 nt, Artificial Sequence
  spacer sequence GTCN PAM
cuccucuuagccaggagucu

SEQ ID NO: 14618 - RNA, 20 nt, Artificial Sequence
  spacer sequence GTCN PAM
uucccacacuuguucagugc

SEQ ID NO: 14619 - RNA, 20 nt, Artificial Sequence
  spacer sequence GTCN PAM
ucacuccuuguugagacuug

SEQ ID NO: 14620 - RNA, 20 nt, Artificial Sequence
  spacer sequence GTCN PAM
caacaaggagugaagacacg

SEQ ID NO: 14621 - RNA, 20 nt, Artificial Sequence
  spacer sequence GTCN PAM
ggauuuccuuaauaagauga

SEQ ID NO: 14622 - RNA, 20 nt, Artificial Sequence
  spacer sequence GTCN PAM
aagaagccccugcaauaacc

SEQ ID NO: 14623 - RNA, 20 nt, Artificial Sequence
  spacer sequence GTCN PAM
gccucaagguuaacugaguu

SEQ ID NO: 14624 - RNA, 20 nt, Artificial Sequence
  spacer sequence GTCN PAM
ccuaaugaugaaacucaguu

SEQ ID NO: 14625 - RNA, 20 nt, Artificial Sequence
  spacer sequence GTCN PAM
ccaggucaccuaaugaugaa

SEQ ID NO: 14626 - RNA, 20 nt, Artificial Sequence
  spacer sequence GTCN PAM
uccggccccuucccucuccu

SEQ ID NO: 14627 - RNA, 20 nt, Artificial Sequence
  spacer sequence GTCN PAM
cuaacuuucacucuucagga

SEQ ID NO: 14628 - RNA, 20 nt, Artificial Sequence
  spacer sequence GTCN PAM
gccccugccuaacccucucc

SEQ ID NO: 14629 - RNA, 20 nt, Artificial Sequence
  spacer sequence GTCN PAM
auagcguccucuugggcuug

SEQ ID NO: 14630 - RNA, 20 nt, Artificial Sequence
  spacer sequence GTCN PAM
ucuugggcuugagccaacgc

SEQ ID NO: 14631 - RNA, 20 nt, Artificial Sequence
  spacer sequence GTCN PAM
cucagcaaacaucucauguc

SEQ ID NO: 14632 - RNA, 20 nt, Artificial Sequence
  spacer sequence GTCN PAM
ucaagggcuggacaucccuu

SEQ ID NO: 14633 - RNA, 20 nt, Artificial Sequence
  spacer sequence GTCN PAM
agcccuugaggacaugagau

SEQ ID NO: 14634 - RNA, 20 nt, Artificial Sequence
  spacer sequence GTCN PAM
ccuugauguuggcugcggag

SEQ ID NO: 14635 - RNA, 20 nt, Artificial Sequence
  spacer sequence GTCN PAM
auagggcgcaagcaugaaau

SEQ ID NO: 14636 - RNA, 20 nt, Artificial Sequence
  spacer sequence GTCN PAM
uccaaaugccuccuuuuuag

SEQ ID NO: 14637 - RNA, 20 nt, Artificial Sequence
  spacer sequence GTCN PAM
gaggguagggguagcacacu

SEQ ID NO: 14638 - RNA, 20 nt, Artificial Sequence
  spacer sequence GTCN PAM
cgaucugcguuuuagggagg

SEQ ID NO: 14639 - RNA, 20 nt, Artificial Sequence
  spacer sequence GTCN PAM
gaggagggaggggcugcagg

SEQ ID NO: 14640 - RNA, 20 nt, Artificial Sequence
  spacer sequence GTCN PAM
ucuguaagccaggugaaaug

SEQ ID NO: 14641 - RNA, 20 nt, Artificial Sequence
  spacer sequence GTCN PAM
acacacgaucccacaugagu

SEQ ID NO: 14642 - RNA, 20 nt, Artificial Sequence
  spacer sequence GTCN PAM
cuggcggggagcucccuuca

SEQ ID NO: 14643 - RNA, 20 nt, Artificial Sequence
  spacer sequence GTCN PAM
ucaucuguggagcccauggg

SEQ ID NO: 14644 - RNA, 20 nt, Artificial Sequence
  spacer sequence GTCN PAM
uccccaugggcuccacagau

SEQ ID NO: 14645 - RNA, 20 nt, Artificial Sequence
  spacer sequence GTCN PAM
ccagguggucauccccaugg

SEQ ID NO: 14646 - RNA, 20 nt, Artificial Sequence
  spacer sequence GTCN PAM
cugagaggaugcacucugug

SEQ ID NO: 14647 - RNA, 20 nt, Artificial Sequence
  spacer sequence GTCN PAM
gugaauucccucucagggug

SEQ ID NO: 14648 - RNA, 20 nt, Artificial Sequence
  spacer sequence GTCN PAM
guuccucuuucccugggugg

SEQ ID NO: 14649 - RNA, 20 nt, Artificial Sequence
  spacer sequence GTCN PAM
ucuccucuccaaaccacagg

SEQ ID NO: 14650 - RNA, 20 nt, Artificial Sequence
  spacer sequence GTCN PAM
gcuugugagccugugguuug

SEQ ID NO: 14651 - RNA, 20 nt, Artificial Sequence
  spacer sequence GTCN PAM
uugcaggaacuucacuugag

SEQ ID NO: 14652 - RNA, 20 nt, Artificial Sequence
  spacer sequence GTCN PAM
cugagagagguccacgagcc

SEQ ID NO: 14653 - RNA, 20 nt, Artificial Sequence
  spacer sequence GTCN PAM
acgagccacgcagggccacc

SEQ ID NO: 14654 - RNA, 20 nt, Artificial Sequence
  spacer sequence GTCN PAM
gcguacacagcuuucuuucc

SEQ ID NO: 14655 - RNA, 20 nt, Artificial Sequence
  spacer sequence GTCN PAM
cucaauuugcaucuuauaau

SEQ ID NO: 14656 - RNA, 20 nt, Artificial Sequence
  spacer sequence GTCN PAM
augaacuaaugcaauuuuua

SEQ ID NO: 14657 - RNA, 20 nt, Artificial Sequence
  spacer sequence GTCN PAM
guaauccagucugccacugc

SEQ ID NO: 14658 - RNA, 20 nt, Artificial Sequence
  spacer sequence GTCN PAM
gccacugcgaagaagccuuu

SEQ ID NO: 14659 - RNA, 20 nt, Artificial Sequence
  spacer sequence GTCN PAM
cagugcaaagaggugaaaaa

SEQ ID NO: 14660 - RNA, 20 nt, Artificial Sequence
  spacer sequence GTCN PAM
ccagaauauuaaaguaaugu

SEQ ID NO: 14661 - RNA, 20 nt, Artificial Sequence
  spacer sequence GTCN PAM
caauauuucuauagcuggca

SEQ ID NO: 14662 - RNA, 20 nt, Artificial Sequence
  spacer sequence GTCN PAM
uagcacuuugaaaacuguaa

SEQ ID NO: 14663 - RNA, 20 nt, Artificial Sequence
  spacer sequence GTCN PAM
gcuugguuccaaagaaggga

SEQ ID NO: 14664 - RNA, 20 nt, Artificial Sequence
  spacer sequence GTCN PAM
auccuuucuccaccacccag

SEQ ID NO: 14665 - RNA, 20 nt, Artificial Sequence
  spacer sequence GTCN PAM
uuugaacaugggaagguguc

SEQ ID NO: 14666 - RNA, 20 nt, Artificial Sequence
  spacer sequence GTCN PAM
acauuccuaaauggaaaucu

SEQ ID NO: 14667 - RNA, 20 nt, Artificial Sequence
  spacer sequence GTCN PAM
ucucacuugcuucagauuuu

SEQ ID NO: 14668 - RNA, 20 nt, Artificial Sequence
  spacer sequence GTCN PAM
cagcuagcagaacucuccuu

SEQ ID NO: 14669 - RNA, 20 nt, Artificial Sequence
  spacer sequence GTCN PAM
cauuucagccacugccagca

SEQ ID NO: 14670 - RNA, 20 nt, Artificial Sequence
  spacer sequence GTCN PAM
uuaccagcggagggcuccug

SEQ ID NO: 14671 - RNA, 20 nt, Artificial Sequence
  spacer sequence GTCN PAM
uucgaggucucucuccaggu

SEQ ID NO: 14672 - RNA, 20 nt, Artificial Sequence
  spacer sequence GTCN PAM
cucuccaggucuccacaggu

SEQ ID NO: 14673 - RNA, 20 nt, Artificial Sequence
  spacer sequence GTCN PAM
ccacaggugaaacuuuucca

SEQ ID NO: 14674 - RNA, 20 nt, Artificial Sequence
  spacer sequence GTCN PAM
ucccagcacacucacugggc

SEQ ID NO: 14675 - RNA, 20 nt, Artificial Sequence
  spacer sequence GTCN PAM
caccaccaagaaugcuggua

SEQ ID NO: 14676 - RNA, 20 nt, Artificial Sequence
  spacer sequence GTCN PAM
cucugaccucuacccucugc

SEQ ID NO: 14677 - RNA, 20 nt, Artificial Sequence
  spacer sequence GTCN PAM
gagagacguaggaggccuug

SEQ ID NO: 14678 - RNA, 20 nt, Artificial Sequence
  spacer sequence GTCN PAM
uguagcuuaauuaccuuucc

SEQ ID NO: 14679 - RNA, 20 nt, Artificial Sequence
  spacer sequence GTCN PAM
gaauucaaugugauuuccag

SEQ ID NO: 14680 - RNA, 20 nt, Artificial Sequence
  spacer sequence GTCN PAM
auagaacagauguggggugg

SEQ ID NO: 14681 - RNA, 20 nt, Artificial Sequence
  spacer sequence GTCN PAM
uugugucuauagaacagaug

SEQ ID NO: 14682 - RNA, 20 nt, Artificial Sequence
  spacer sequence GTCN PAM
uauccucagaagcuguauuc

SEQ ID NO: 14683 - RNA, 20 nt, Artificial Sequence
  spacer sequence GTCN PAM
uuauccucuaguuucuguag

SEQ ID NO: 14684 - RNA, 20 nt, Artificial Sequence
  spacer sequence GTCN PAM
uugagaucgucauagucguu

SEQ ID NO: 14685 - RNA, 20 nt, Artificial Sequence
  spacer sequence GTCN PAM
uagucguuacagaugaggca

SEQ ID NO: 14686 - RNA, 20 nt, Artificial Sequence
  spacer sequence GTCN PAM
uuacagaugaggcauuuuuu

SEQ ID NO: 14687 - RNA, 20 nt, Artificial Sequence
  spacer sequence GTCN PAM
agauagauguguguauacgg

SEQ ID NO: 14688 - RNA, 20 nt, Artificial Sequence
  spacer sequence GTCN PAM
cauauaguuccuuguguaua

SEQ ID NO: 14689 - RNA, 20 nt, Artificial Sequence
  spacer sequence GTCN PAM
gaaucaugguauauguaugg

SEQ ID NO: 14690 - RNA, 20 nt, Artificial Sequence
  spacer sequence GTCN PAM
uacauacuauacuuggguua

SEQ ID NO: 14691 - RNA, 20 nt, Artificial Sequence
  spacer sequence GTCN PAM
gcacaaggcuuaauccgugc

SEQ ID NO: 14692 - RNA, 20 nt, Artificial Sequence
  spacer sequence GTCN PAM
gugagcaggcaaacuuccuu

SEQ ID NO: 14693 - RNA, 20 nt, Artificial Sequence
  spacer sequence GTCN PAM
ccacucaaggucuauaccuc

SEQ ID NO: 14694 - RNA, 20 nt, Artificial Sequence
  spacer sequence GTCN PAM
auaccucacuuuuucauuac

SEQ ID NO: 14695 - RNA, 20 nt, Artificial Sequence
  spacer sequence GTCN PAM
ugguaauagcagaguguuuu

SEQ ID NO: 14696 - RNA, 20 nt, Artificial Sequence
  spacer sequence GTCN PAM
gagggguucaacacacaugg

SEQ ID NO: 14697 - RNA, 20 nt, Artificial Sequence
  spacer sequence GTCN PAM
caagagaacggccgggaggc

SEQ ID NO: 14698 - RNA, 20 nt, Artificial Sequence
  spacer sequence GTCN PAM
ugagguggggguguugcagg

SEQ ID NO: 14699 - RNA, 20 nt, Artificial Sequence
  spacer sequence GTCN PAM
cagcaaugcccacccugcaa

SEQ ID NO: 14700 - RNA, 20 nt, Artificial Sequence
  spacer sequence GTCN PAM
caggaguggagaccacagag

SEQ ID NO: 14701 - RNA, 20 nt, Artificial Sequence
  spacer sequence GTCN PAM
ccacuccugugaccugccau

SEQ ID NO: 14702 - RNA, 20 nt, Artificial Sequence
  spacer sequence GTCN PAM
uaauauuuagggcauauaaa

SEQ ID NO: 14703 - RNA, 20 nt, Artificial Sequence
  spacer sequence GTCN PAM
uaagucauaauauuuagggc

SEQ ID NO: 14704 - RNA, 20 nt, Artificial Sequence
  spacer sequence GTCN PAM
agugucuuaagucauaauau

SEQ ID NO: 14705 - RNA, 20 nt, Artificial Sequence
  spacer sequence GTCN PAM
uagacuaguccugcuuccag

SEQ ID NO: 14706 - RNA, 20 nt, Artificial Sequence
  spacer sequence GTCN PAM
augacuguccagugucuuaa

SEQ ID NO: 14707 - RNA, 20 nt, Artificial Sequence
  spacer sequence GTCN PAM
ugcuuccaggagaaacagga

SEQ ID NO: 14708 - RNA, 20 nt, Artificial Sequence
  spacer sequence GTCN PAM
uucccuaucucucuccccca

SEQ ID NO: 14709 - RNA, 20 nt, Artificial Sequence
  spacer sequence GTCN PAM
uaucaucugguguccuuccc

SEQ ID NO: 14710 - RNA, 20 nt, Artificial Sequence
  spacer sequence GTCN PAM
uaagucauaucaucuggugu

SEQ ID NO: 14711 - RNA, 20 nt, Artificial Sequence
  spacer sequence GTCN PAM
cuauuuuugaaaugcaagcu

SEQ ID NO: 14712 - RNA, 20 nt, Artificial Sequence
  spacer sequence GTCN PAM
uguaauaauauuauuuuauu

SEQ ID NO: 14713 - RNA, 20 nt, Artificial Sequence
  spacer sequence GTCN PAM
caaacuccuggcuucaaaug

SEQ ID NO: 14714 - RNA, 20 nt, Artificial Sequence
  spacer sequence GTCN PAM
uguuuuguugccaggcuggu

SEQ ID NO: 14715 - RNA, 20 nt, Artificial Sequence
  spacer sequence GTCN PAM
acaaaaagaaaaaaauucuu

SEQ ID NO: 14716 - RNA, 20 nt, Artificial Sequence
  spacer sequence GTCN PAM
caaagcaaaaugauaaaccu

SEQ ID NO: 14717 - RNA, 20 nt, Artificial Sequence
  spacer sequence GTCN PAM
cauuaagcacuuaacacuuu

SEQ ID NO: 14718 - RNA, 20 nt, Artificial Sequence
  spacer sequence GTCN PAM
uccuuuguguuguaaaaaua

SEQ ID NO: 14719 - RNA, 20 nt, Artificial Sequence
  spacer sequence GTCN PAM
uuuguguuguaaaaauaguc

SEQ ID NO: 14720 - RNA, 20 nt, Artificial Sequence
  spacer sequence GTCN PAM
aucccuaggaacuaacuggc

SEQ ID NO: 14721 - RNA, 20 nt, Artificial Sequence
  spacer sequence GTCN PAM
uuaucuuuaggcuguuugug

SEQ ID NO: 14722 - RNA, 20 nt, Artificial Sequence
  spacer sequence GTCN PAM
uugaugggucuagaccagca

SEQ ID NO: 14723 - RNA, 20 nt, Artificial Sequence
  spacer sequence GTCN PAM
agaccagcacaaauggggaa

SEQ ID NO: 14724 - RNA, 20 nt, Artificial Sequence
  spacer sequence GTCN PAM
agacccaucaaagacuguag

SEQ ID NO: 14725 - RNA, 20 nt, Artificial Sequence
  spacer sequence GTCN PAM
augucuauuugaauguguca

SEQ ID NO: 14726 - RNA, 20 nt, Artificial Sequence
  spacer sequence GTCN PAM
auuugaaugugucaaggaug

SEQ ID NO: 14727 - RNA, 20 nt, Artificial Sequence
  spacer sequence GTCN PAM
aggaugacuacauaguuuaa

SEQ ID NO: 14728 - RNA, 20 nt, Artificial Sequence
  spacer sequence GTCN PAM
uccuugacacauucaaauag

SEQ ID NO: 14729 - RNA, 20 nt, Artificial Sequence
  spacer sequence GTCN PAM
cuuggcuuguuuugaauucc

SEQ ID NO: 14730 - RNA, 20 nt, Artificial Sequence
  spacer sequence GTCN PAM
auagaaaaguuuuggaagag

SEQ ID NO: 14731 - RNA, 20 nt, Artificial Sequence
  spacer sequence GTCN PAM
guuaaugauuauucaaaauc

SEQ ID NO: 14732 - RNA, 20 nt, Artificial Sequence
  spacer sequence GTCN PAM
ggaguucaagaccagccugg

SEQ ID NO: 14733 - RNA, 20 nt, Artificial Sequence
  spacer sequence GTCN PAM
ugaacuccugaccucaggcg

SEQ ID NO: 14734 - RNA, 20 nt, Artificial Sequence
  spacer sequence GTCN PAM
cuacuaaaaauacaaaaaau

SEQ ID NO: 14735 - RNA, 20 nt, Artificial Sequence
  spacer sequence GTCN PAM
caaaaaaaaaaaaaaaaaaa

SEQ ID NO: 14736 - RNA, 20 nt, Artificial Sequence
  spacer sequence GTCN PAM
auaacauuuucuuaaaucuu

SEQ ID NO: 14737 - RNA, 20 nt, Artificial Sequence
  spacer sequence GTCN PAM
aaauuucuccauaacauggc

SEQ ID NO: 14738 - RNA, 20 nt, Artificial Sequence
  spacer sequence GTCN PAM
augaaacuaguggaacauaa

SEQ ID NO: 14739 - RNA, 20 nt, Artificial Sequence
  spacer sequence GTCN PAM
ggucagugcccuccagacac

SEQ ID NO: 14740 - RNA, 20 nt, Artificial Sequence
  spacer sequence GTCN PAM
gugcccuccagacacugcag

SEQ ID NO: 14741 - RNA, 20 nt, Artificial Sequence
  spacer sequence GTCN PAM
ggagggcacugaccagacca

SEQ ID NO: 14742 - RNA, 20 nt, Artificial Sequence
  spacer sequence GTCN PAM
ucuuuucucucugucaucua

SEQ ID NO: 14743 - RNA, 20 nt, Artificial Sequence
  spacer sequence GTCN PAM
ucuaaauucuagccugucuu

SEQ ID NO: 14744 - RNA, 20 nt, Artificial Sequence
  spacer sequence GTCN PAM
uugauggcuaaaagccuaac

SEQ ID NO: 14745 - RNA, 20 nt, Artificial Sequence
  spacer sequence GTCN PAM
uaugggggggcuaagauuau

SEQ ID NO: 14746 - RNA, 20 nt, Artificial Sequence
  spacer sequence GTCN PAM
ucaaagggauuacaguuggu

SEQ ID NO: 14747 - RNA, 20 nt, Artificial Sequence
  spacer sequence GTCN PAM
uguuccauuuggaaugaauu

SEQ ID NO: 14748 - RNA, 20 nt, Artificial Sequence
  spacer sequence GTCN PAM
guucagaagguuaaaauacg

SEQ ID NO: 14749 - RNA, 20 nt, Artificial Sequence
  spacer sequence GTCN PAM
acguauuuuaaccuucugaa

SEQ ID NO: 14750 - RNA, 20 nt, Artificial Sequence
  spacer sequence GTCN PAM
cuuaucuuuacaaagauugu

SEQ ID NO: 14751 - RNA, 20 nt, Artificial Sequence
  spacer sequence GTCN PAM
uucuuguaaauaacaacacc

SEQ ID NO: 14752 - RNA, 20 nt, Artificial Sequence
  spacer sequence GTCN PAM
caggcaaagggccugaguac

SEQ ID NO: 14753 - RNA, 20 nt, Artificial Sequence
  spacer sequence GTCN PAM
gugccuuuuaccucuuugca

SEQ ID NO: 14754 - RNA, 20 nt, Artificial Sequence
  spacer sequence GTCN PAM
ucccagcaucagaaauggac

SEQ ID NO: 14755 - RNA, 20 nt, Artificial Sequence
  spacer sequence GTCN PAM
auuucugaugcugggaggac

SEQ ID NO: 14756 - RNA, 20 nt, Artificial Sequence
  spacer sequence GTCN PAM
gcagaaccagagcccucaaa

SEQ ID NO: 14757 - RNA, 20 nt, Artificial Sequence
  spacer sequence GTCN PAM
auucaaagugguuuugcuuu

SEQ ID NO: 14758 - RNA, 20 nt, Artificial Sequence
  spacer sequence GTCN PAM
aaagguagagguugggagua

SEQ ID NO: 14759 - RNA, 20 nt, Artificial Sequence
  spacer sequence GTCN PAM
uauaacuacagaaugcuuac

SEQ ID NO: 14760 - RNA, 20 nt, Artificial Sequence
  spacer sequence GTCN PAM
aagguuuugcaaauaguacu

SEQ ID NO: 14761 - RNA, 20 nt, Artificial Sequence
  spacer sequence GTCN PAM
uuuaaagucucucuaagcuu

SEQ ID NO: 14762 - RNA, 20 nt, Artificial Sequence
  spacer sequence GTCN PAM
cucuaagcuuaaguagaaug

SEQ ID NO: 14763 - RNA, 20 nt, Artificial Sequence
  spacer sequence GTCN PAM
guaaucccagcacuuuggga

SEQ ID NO: 14764 - RNA, 20 nt, Artificial Sequence
  spacer sequence GTCN PAM
ggaguucgagaccagucuaa

SEQ ID NO: 14765 - RNA, 20 nt, Artificial Sequence
  spacer sequence GTCN PAM
cgaacuccugaccucaggug

SEQ ID NO: 14766 - RNA, 20 nt, Artificial Sequence
  spacer sequence GTCN PAM
aaucaacauagugaaagccc

SEQ ID NO: 14767 - RNA, 20 nt, Artificial Sequence
  spacer sequence GTCN PAM
cuacuaaaaauauaaaaauu

SEQ ID NO: 14768 - RNA, 20 nt, Artificial Sequence
  spacer sequence GTCN PAM
aauggcaugaucucagcuca

SEQ ID NO: 14769 - RNA, 20 nt, Artificial Sequence
  spacer sequence GTCN PAM
gccaaucaaggacgagaagg

SEQ ID NO: 14770 - RNA, 20 nt, Artificial Sequence
  spacer sequence GTCN PAM
uugauuggcagacugcccag

SEQ ID NO: 14771 - RNA, 20 nt, Artificial Sequence
  spacer sequence GTCN PAM
gagaucacauuucagaaaca

SEQ ID NO: 14772 - RNA, 20 nt, Artificial Sequence
  spacer sequence GTCN PAM
cucuucaccccuuuuccugc

SEQ ID NO: 14773 - RNA, 20 nt, Artificial Sequence
  spacer sequence GTCN PAM
ugcacacauuuuuuacacag

SEQ ID NO: 14774 - RNA, 20 nt, Artificial Sequence
  spacer sequence GTCN PAM
ucaugcacacauuuuuuaca

SEQ ID NO: 14775 - RNA, 20 nt, Artificial Sequence
  spacer sequence GTCN PAM
cagaaaaaaagcagcaagcg

SEQ ID NO: 14776 - RNA, 20 nt, Artificial Sequence
  spacer sequence GTCN PAM
auguuaagggugggcuuuuc

SEQ ID NO: 14777 - RNA, 20 nt, Artificial Sequence
  spacer sequence GTCN PAM
ugauggccacggggaugugg

SEQ ID NO: 14778 - RNA, 20 nt, Artificial Sequence
  spacer sequence GTCN PAM
acacuccagucccaagaggc

SEQ ID NO: 14779 - RNA, 20 nt, Artificial Sequence
  spacer sequence GTCN PAM
caagaggccggaacacaaga

SEQ ID NO: 14780 - RNA, 20 nt, Artificial Sequence
  spacer sequence GTCN PAM
cccacugcugugacuguugc

SEQ ID NO: 14781 - RNA, 20 nt, Artificial Sequence
  spacer sequence GTCN PAM
cagcagugggagacauucuu

SEQ ID NO: 14782 - RNA, 20 nt, Artificial Sequence
  spacer sequence GTCN PAM
uuccuuuuucagagggagga

SEQ ID NO: 14783 - RNA, 20 nt, Artificial Sequence
  spacer sequence GTCN PAM
caugcagaaagaggggacac

SEQ ID NO: 14784 - RNA, 20 nt, Artificial Sequence
  spacer sequence GTCN PAM
ccucuuucugcaugugacac

SEQ ID NO: 14785 - RNA, 20 nt, Artificial Sequence
  spacer sequence GTCN PAM
gcauggcaaugauaaagcca

SEQ ID NO: 14786 - RNA, 20 nt, Artificial Sequence
  spacer sequence GTCN PAM
agaccaaaaagcacaggaac

SEQ ID NO: 14787 - RNA, 20 nt, Artificial Sequence
  spacer sequence GTCN PAM
ggacugguaaauggugcugu

SEQ ID NO: 14788 - RNA, 20 nt, Artificial Sequence
  spacer sequence GTCN PAM
gagggaaaagaaaaugugcu

SEQ ID NO: 14789 - RNA, 20 nt, Artificial Sequence
  spacer sequence GTCN PAM
uuuguguggauuugccugca

SEQ ID NO: 14790 - RNA, 20 nt, Artificial Sequence
  spacer sequence GTCN PAM
cucugaaauagaagcaugag

SEQ ID NO: 14791 - RNA, 20 nt, Artificial Sequence
  spacer sequence GTCN PAM
cucuucuagaauacguagaa

SEQ ID NO: 14792 - RNA, 20 nt, Artificial Sequence
  spacer sequence GTCN PAM
gcuugcauuaccaucuaagg

SEQ ID NO: 14793 - RNA, 20 nt, Artificial Sequence
  spacer sequence GTCN PAM
cagaccauccucaacaggga

SEQ ID NO: 14794 - RNA, 20 nt, Artificial Sequence
  spacer sequence GTCN PAM
gagacgaaguaauuugccug

SEQ ID NO: 14795 - RNA, 20 nt, Artificial Sequence
  spacer sequence GTCN PAM
uucuccuauuucagggaggg

SEQ ID NO: 14796 - RNA, 20 nt, Artificial Sequence
  spacer sequence GTCN PAM
uggggcccgguagggcagca

SEQ ID NO: 14797 - RNA, 20 nt, Artificial Sequence
  spacer sequence GTCN PAM
acccauguccacuagaaaua

SEQ ID NO: 14798 - RNA, 20 nt, Artificial Sequence
  spacer sequence GTCN PAM
acuagaaauaaaugugaauc

SEQ ID NO: 14799 - RNA, 20 nt, Artificial Sequence
  spacer sequence GTCN PAM
cccuuugauucacauuuauu

SEQ ID NO: 14800 - RNA, 20 nt, Artificial Sequence
  spacer sequence GTCN PAM
ggaguuugagaccagccugg

SEQ ID NO: 14801 - RNA, 20 nt, Artificial Sequence
  spacer sequence GTCN PAM
caaacuccugaccucaggug

SEQ ID NO: 14802 - RNA, 20 nt, Artificial Sequence
  spacer sequence GTCN PAM
cccaggcuggagugcagugg

SEQ ID NO: 14803 - RNA, 20 nt, Artificial Sequence
  spacer sequence GTCN PAM
cacccugucucccaggcugg

SEQ ID NO: 14804 - RNA, 20 nt, Artificial Sequence
  spacer sequence GTCN PAM
agagaauggaacagauugug

SEQ ID NO: 14805 - RNA, 20 nt, Artificial Sequence
  spacer sequence GTCN PAM
cacaaucuguuccauucucu

SEQ ID NO: 14806 - RNA, 20 nt, Artificial Sequence
  spacer sequence GTCN PAM
uuggagaugaauuugguuug

SEQ ID NO: 14807 - RNA, 20 nt, Artificial Sequence
  spacer sequence GTCN PAM
cucagcaauucuuggucucc

SEQ ID NO: 14808 - RNA, 20 nt, Artificial Sequence
  spacer sequence GTCN PAM
ccagguuuauuucuaccguu

SEQ ID NO: 14809 - RNA, 20 nt, Artificial Sequence
  spacer sequence GTCN PAM
caaccugaauggauucuucu

SEQ ID NO: 14810 - RNA, 20 nt, Artificial Sequence
  spacer sequence GTCN PAM
uaggaauacuauuuuagaaa

SEQ ID NO: 14811 - RNA, 20 nt, Artificial Sequence
  spacer sequence GTCN PAM
gccugccccauacggaaaac

SEQ ID NO: 14812 - RNA, 20 nt, Artificial Sequence
  spacer sequence GTCN PAM
cuagggagagauuugccacu

SEQ ID NO: 14813 - RNA, 20 nt, Artificial Sequence
  spacer sequence GTCN PAM
cccagcuccugugcaaagga

SEQ ID NO: 14814 - RNA, 20 nt, Artificial Sequence
  spacer sequence GTCN PAM
gaauuggaacccaagucucc

SEQ ID NO: 14815 - RNA, 20 nt, Artificial Sequence
  spacer sequence GTCN PAM
auucuuuucuuaucuaauuu

SEQ ID NO: 14816 - RNA, 20 nt, Artificial Sequence
  spacer sequence GTCN PAM
guuuuucuaucuuaguuuaa

SEQ ID NO: 14817 - RNA, 20 nt, Artificial Sequence
  spacer sequence GTCN PAM
uugucuguuuuucuaucuua

SEQ ID NO: 14818 - RNA, 20 nt, Artificial Sequence
  spacer sequence GTCN PAM
uggaacuucucacuuccagu

SEQ ID NO: 14819 - RNA, 20 nt, Artificial Sequence
  spacer sequence GTCN PAM
cuccuaggcagucagaggaa

SEQ ID NO: 14820 - RNA, 20 nt, Artificial Sequence
  spacer sequence GTCN PAM
gaggaaagaaauauaauauu

SEQ ID NO: 14821 - RNA, 20 nt, Artificial Sequence
  spacer sequence GTCN PAM
gguggaaguuccaaaauaac

SEQ ID NO: 14822 - RNA, 20 nt, Artificial Sequence
  spacer sequence GTCN PAM
aagcuauguggcauacugua

SEQ ID NO: 14823 - RNA, 20 nt, Artificial Sequence
  spacer sequence GTCN PAM
ccggaaguaauaguaggauu

SEQ ID NO: 14824 - RNA, 20 nt, Artificial Sequence
  spacer sequence GTCN PAM
auguuaaccucacuaucaaa

SEQ ID NO: 14825 - RNA, 20 nt, Artificial Sequence
  spacer sequence GTCN PAM
acgcauacaaaaccugaaag

SEQ ID NO: 14826 - RNA, 20 nt, Artificial Sequence
  spacer sequence GTCN PAM
ggaauaucuuucagguuuug

SEQ ID NO: 14827 - RNA, 20 nt, Artificial Sequence
  spacer sequence GTCN PAM
aacugagugccccaaaccuu

SEQ ID NO: 14828 - RNA, 20 nt, Artificial Sequence
  spacer sequence GTCN PAM
uucucucccaucauggaccc

SEQ ID NO: 14829 - RNA, 20 nt, Artificial Sequence
  spacer sequence GTCN PAM
augaugggagagaaagacac

SEQ ID NO: 14830 - RNA, 20 nt, Artificial Sequence
  spacer sequence GTCN PAM
guuagaauugggguccauga

SEQ ID NO: 14831 - RNA, 20 nt, Artificial Sequence
  spacer sequence GTCN PAM
gggcgcgguggcuuacaccu

SEQ ID NO: 14832 - RNA, 20 nt, Artificial Sequence
  spacer sequence GTCN PAM
ggaguucgagaccagccuga

SEQ ID NO: 14833 - RNA, 20 nt, Artificial Sequence
  spacer sequence GTCN PAM
cgaacuccugaccucaugag

SEQ ID NO: 14834 - RNA, 20 nt, Artificial Sequence
  spacer sequence GTCN PAM
ggcuggucucgaacuccuga

SEQ ID NO: 14835 - RNA, 20 nt, Artificial Sequence
  spacer sequence GTCN PAM
cuacuaaaaauacaaaaauu

SEQ ID NO: 14836 - RNA, 20 nt, Artificial Sequence
  spacer sequence GTCN PAM
cacucuauugcccaggcugg

SEQ ID NO: 14837 - RNA, 20 nt, Artificial Sequence
  spacer sequence GTCN PAM
ccuccauccaaguggcuggg

SEQ ID NO: 14838 - RNA, 20 nt, Artificial Sequence
  spacer sequence GTCN PAM
cagccacuuggauggaggag

SEQ ID NO: 14839 - RNA, 20 nt, Artificial Sequence
  spacer sequence GTCN PAM
ucuagucugugcucauguca

SEQ ID NO: 14840 - RNA, 20 nt, Artificial Sequence
  spacer sequence GTCN PAM
gugcucaugucaggcaacca

SEQ ID NO: 14841 - RNA, 20 nt, Artificial Sequence
  spacer sequence GTCN PAM
ggcaaccaauuuaucucucu

SEQ ID NO: 14842 - RNA, 20 nt, Artificial Sequence
  spacer sequence GTCN PAM
ucucugcagaguggaacuuc

SEQ ID NO: 14843 - RNA, 20 nt, Artificial Sequence
  spacer sequence GTCN PAM
agaucaugguuauccaugaa

SEQ ID NO: 14844 - RNA, 20 nt, Artificial Sequence
  spacer sequence GTCN PAM
ucccaaauugucaaucuugu

SEQ ID NO: 14845 - RNA, 20 nt, Artificial Sequence
  spacer sequence GTCN PAM
aucuuguaugggguuucaaa

SEQ ID NO: 14846 - RNA, 20 nt, Artificial Sequence
  spacer sequence GTCN PAM
agcccuaggccaggugaggu

SEQ ID NO: 14847 - RNA, 20 nt, Artificial Sequence
  spacer sequence GTCN PAM
ccaucuccugaucucgugau

SEQ ID NO: 14848 - RNA, 20 nt, Artificial Sequence
  spacer sequence GTCN PAM
cagcuacuugggaagcugag

SEQ ID NO: 14849 - RNA, 20 nt, Artificial Sequence
  spacer sequence GTCN PAM
uugccacugcacuccagccu

SEQ ID NO: 14850 - RNA, 20 nt, Artificial Sequence
  spacer sequence GTCN PAM
cccaggcuggagugcagugg

SEQ ID NO: 14851 - RNA, 20 nt, Artificial Sequence
  spacer sequence GTCN PAM
uaaaaaaaaaaaaaaaaaaa

SEQ ID NO: 14852 - RNA, 20 nt, Artificial Sequence
  spacer sequence GTCN PAM
uucaacuuuaaaagccaugg

SEQ ID NO: 14853 - RNA, 20 nt, Artificial Sequence
  spacer sequence GTCN PAM
uuucccauggcuuuuaaagu

SEQ ID NO: 14854 - RNA, 20 nt, Artificial Sequence
  spacer sequence GTCN PAM
uuuuguucuguuuguuuuga

SEQ ID NO: 14855 - RNA, 20 nt, Artificial Sequence
  spacer sequence GTCN PAM
guuuguaaauaaguggauau

SEQ ID NO: 14856 - RNA, 20 nt, Artificial Sequence
  spacer sequence GTCN PAM
guguuucuacccccacuuuu

SEQ ID NO: 14857 - RNA, 20 nt, Artificial Sequence
  spacer sequence GTCN PAM
cuacacuuucauuucugguc

SEQ ID NO: 14858 - RNA, 20 nt, Artificial Sequence
  spacer sequence GTCN PAM
caagacccaggauuguuguu

SEQ ID NO: 14859 - RNA, 20 nt, Artificial Sequence
  spacer sequence GTCN PAM
ugagacaaguucagccuuug

SEQ ID NO: 14860 - RNA, 20 nt, Artificial Sequence
  spacer sequence GTCN PAM
cucuuucuaggcaucagcaa

SEQ ID NO: 14861 - RNA, 20 nt, Artificial Sequence
  spacer sequence GTCN PAM
uauguuucagcaacacauag

SEQ ID NO: 14862 - RNA, 20 nt, Artificial Sequence
  spacer sequence GTCN PAM
ggaagucccaacuaauugau

SEQ ID NO: 14863 - RNA, 20 nt, Artificial Sequence
  spacer sequence GTCN PAM
caacuaauugauaggaaguc

SEQ ID NO: 14864 - RNA, 20 nt, Artificial Sequence
  spacer sequence GTCN PAM
caaacaggccacucgugcaa

SEQ ID NO: 14865 - RNA, 20 nt, Artificial Sequence
  spacer sequence GTCN PAM
uggaaaagccacaggggaaa

SEQ ID NO: 14866 - RNA, 20 nt, Artificial Sequence
  spacer sequence GTCN PAM
guauguguaagccacaugug

SEQ ID NO: 14867 - RNA, 20 nt, Artificial Sequence
  spacer sequence GTCN PAM
gugaacauuuaugacuuaug

SEQ ID NO: 14868 - RNA, 20 nt, Artificial Sequence
  spacer sequence GTCN PAM
uaaauguucacagacacaca

SEQ ID NO: 14869 - RNA, 20 nt, Artificial Sequence
  spacer sequence GTCN PAM
agagcuaauuucaccaaacu

SEQ ID NO: 14870 - RNA, 20 nt, Artificial Sequence
  spacer sequence GTCN PAM
ugagaucugucccagagagc

SEQ ID NO: 14871 - RNA, 20 nt, Artificial Sequence
  spacer sequence GTCN PAM
cagagagcaggugaaauaau

SEQ ID NO: 14872 - RNA, 20 nt, Artificial Sequence
  spacer sequence GTCN PAM
cgugcauuauuucaccugcu

SEQ ID NO: 14873 - RNA, 20 nt, Artificial Sequence
  spacer sequence GTCN PAM
acaguagugaacuaccuuau

SEQ ID NO: 14874 - RNA, 20 nt, Artificial Sequence
  spacer sequence GTCN PAM
uuauuuauuaugaauaagca

SEQ ID NO: 14875 - RNA, 20 nt, Artificial Sequence
  spacer sequence GTCN PAM
gagcucuauuauugacaaac

SEQ ID NO: 14876 - RNA, 20 nt, Artificial Sequence
  spacer sequence GTCN PAM
auaauagagcucagacaccu

SEQ ID NO: 14877 - RNA, 20 nt, Artificial Sequence
  spacer sequence GTCN PAM
guucugaugugaacuucuuu

SEQ ID NO: 14878 - RNA, 20 nt, Artificial Sequence
  spacer sequence GTCN PAM
gcauuaagauauauuuccug

SEQ ID NO: 14879 - RNA, 20 nt, Artificial Sequence
  spacer sequence GTCN PAM
guaguuucuuauuaaauauu

SEQ ID NO: 14880 - RNA, 20 nt, Artificial Sequence
  spacer sequence GTCN PAM
uuuaauuuagcuuaggaaag

SEQ ID NO: 14881 - RNA, 20 nt, Artificial Sequence
  spacer sequence GTCN PAM
gacaguuaggaaaaccacac

SEQ ID NO: 14882 - RNA, 20 nt, Artificial Sequence
  spacer sequence GTCN PAM
gacuuauaauuugcauacca

SEQ ID NO: 14883 - RNA, 20 nt, Artificial Sequence
  spacer sequence GTCN PAM
guaggaaacagguacagaag

SEQ ID NO: 14884 - RNA, 20 nt, Artificial Sequence
  spacer sequence GTCN PAM
uauaagcauuaaaaauuaaa

SEQ ID NO: 14885 - RNA, 20 nt, Artificial Sequence
  spacer sequence GTCN PAM
auguuaagcacacuuuuuaa

SEQ ID NO: 14886 - RNA, 20 nt, Artificial Sequence
  spacer sequence GTCN PAM
uuuaaaaagugugcuuaaca

SEQ ID NO: 14887 - RNA, 20 nt, Artificial Sequence
  spacer sequence GTCN PAM
ccaaccccuuguuucuauac

SEQ ID NO: 14888 - RNA, 20 nt, Artificial Sequence
  spacer sequence GTCN PAM
ugagugaugcccuggcccuu

SEQ ID NO: 14889 - RNA, 20 nt, Artificial Sequence
  spacer sequence GTCN PAM
acgggcccucucuaugggac

SEQ ID NO: 14890 - RNA, 20 nt, Artificial Sequence
  spacer sequence GTCN PAM
cauagagagggcccguggac

SEQ ID NO: 14891 - RNA, 20 nt, Artificial Sequence
  spacer sequence GTCN PAM
guuuuuuuguuuuuacuuuu

SEQ ID NO: 14892 - RNA, 20 nt, Artificial Sequence
  spacer sequence GTCN PAM
uuccagccuaggccugcagc

SEQ ID NO: 14893 - RNA, 20 nt, Artificial Sequence
  spacer sequence GTCN PAM
ugcagaguccuuccagccua

SEQ ID NO: 14894 - RNA, 20 nt, Artificial Sequence
  spacer sequence GTCN PAM
ucgcacaacggcuucuugga

SEQ ID NO: 14895 - RNA, 20 nt, Artificial Sequence
  spacer sequence GTCN PAM
gaaaacaucacaaacuagca

SEQ ID NO: 14896 - RNA, 20 nt, Artificial Sequence
  spacer sequence GTCN PAM
uccugcuaguuugugauguu

SEQ ID NO: 14897 - RNA, 20 nt, Artificial Sequence
  spacer sequence GTCN PAM
gucauccugcuaguuuguga

SEQ ID NO: 14898 - RNA, 20 nt, Artificial Sequence
  spacer sequence GTCN PAM
gcguggucugucauccugcu

SEQ ID NO: 14899 - RNA, 20 nt, Artificial Sequence
  spacer sequence GTCN PAM
acugggcggcacgcguccac

SEQ ID NO: 14900 - RNA, 20 nt, Artificial Sequence
  spacer sequence GTCN PAM
acgucagcguggucugucau

SEQ ID NO: 14901 - RNA, 20 nt, Artificial Sequence
  spacer sequence GTCN PAM
accccaccccugggggcuuc

SEQ ID NO: 14902 - RNA, 20 nt, Artificial Sequence
  spacer sequence GTCN PAM
ccaaccucuuucuagguucu

SEQ ID NO: 14903 - RNA, 20 nt, Artificial Sequence
  spacer sequence GTCN PAM
caccuguacuuuuuuuuucc

SEQ ID NO: 14904 - RNA, 20 nt, Artificial Sequence
  spacer sequence GTCN PAM
agccacuggcaucuuaagca

SEQ ID NO: 14905 - RNA, 20 nt, Artificial Sequence
  spacer sequence GTCN PAM
gagauacuuggggaggggag

SEQ ID NO: 14906 - RNA, 20 nt, Artificial Sequence
  spacer sequence GTCN PAM
ucuucccaugccucccuccc

SEQ ID NO: 14907 - RNA, 20 nt, Artificial Sequence
  spacer sequence GTCN PAM
ucccaugccucccucccuuc

SEQ ID NO: 14908 - RNA, 20 nt, Artificial Sequence
  spacer sequence GTCN PAM
ccccaaggaggacccagguc

SEQ ID NO: 14909 - RNA, 20 nt, Artificial Sequence
  spacer sequence GTCN PAM
uccuuggggggacggaaggg

SEQ ID NO: 14910 - RNA, 20 nt, Artificial Sequence
  spacer sequence GTCN PAM
ccccaccccugcccaauugu

SEQ ID NO: 14911 - RNA, 20 nt, Artificial Sequence
  spacer sequence GTCN PAM
uaauaaacucgggacacacc

SEQ ID NO: 14912 - RNA, 20 nt, Artificial Sequence
  spacer sequence GTCN PAM
cgaguuuauuaggacuauca

SEQ ID NO: 14913 - RNA, 20 nt, Artificial Sequence
  spacer sequence GTCN PAM
uaagggcaaguguuuccuuc

SEQ ID NO: 14914 - RNA, 20 nt, Artificial Sequence
  spacer sequence GTCN PAM
uuugguugaggagagcggga

SEQ ID NO: 14915 - RNA, 20 nt, Artificial Sequence
  spacer sequence GTCN PAM
ccuuucccuccucccucucc

SEQ ID NO: 14916 - RNA, 20 nt, Artificial Sequence
  spacer sequence GTCN PAM
ucaaguucaacgucaaagca

SEQ ID NO: 14917 - RNA, 20 nt, Artificial Sequence
  spacer sequence GTCN PAM
aagcagccaaugauuuacaa

SEQ ID NO: 14918 - RNA, 20 nt, Artificial Sequence
  spacer sequence GTCN PAM
acagcaagggaggaaccccg

SEQ ID NO: 14919 - RNA, 20 nt, Artificial Sequence
  spacer sequence GTCN PAM
auguccacagcaagggagga

SEQ ID NO: 14920 - RNA, 20 nt, Artificial Sequence
  spacer sequence GTCN PAM
ggaugugccgaggaagaggg

SEQ ID NO: 14921 - RNA, 20 nt, Artificial Sequence
  spacer sequence GTCN PAM
ccauggcaacgaggccugga

SEQ ID NO: 14922 - RNA, 20 nt, Artificial Sequence
  spacer sequence GTCN PAM
ggggagaggaggccccaggc

SEQ ID NO: 14923 - RNA, 20 nt, Artificial Sequence
  spacer sequence GTCN PAM
ggaucucagcugcucucacg

SEQ ID NO: 14924 - RNA, 20 nt, Artificial Sequence
  spacer sequence GTCN PAM
ccgcugcucugcucaggggu

SEQ ID NO: 14925 - RNA, 20 nt, Artificial Sequence
  spacer sequence GTCN PAM
agguggguucuggggaaucc

SEQ ID NO: 14926 - RNA, 20 nt, Artificial Sequence
  spacer sequence GTCN PAM
agcgcuaagucacugucguc

SEQ ID NO: 14927 - RNA, 20 nt, Artificial Sequence
  spacer sequence GTCN PAM
cugucgucgaggccccuuua

SEQ ID NO: 14928 - RNA, 20 nt, Artificial Sequence
  spacer sequence GTCN PAM
ucgaggccccuuuagcugau

SEQ ID NO: 14929 - RNA, 20 nt, Artificial Sequence
  spacer sequence GTCN PAM
aggccccuuuagcugauacc

SEQ ID NO: 14930 - RNA, 20 nt, Artificial Sequence
  spacer sequence GTCN PAM
aaccugcuaccaauauucaa

SEQ ID NO: 14931 - RNA, 20 nt, Artificial Sequence
  spacer sequence GTCN PAM
auuagaauuugaauauuggu

SEQ ID NO: 14932 - RNA, 20 nt, Artificial Sequence
  spacer sequence GTCN PAM
uuguacuugagaaccuaaac

SEQ ID NO: 14933 - RNA, 20 nt, Artificial Sequence
  spacer sequence GTCN PAM
cuuucccauuuggaagggag

SEQ ID NO: 14934 - RNA, 20 nt, Artificial Sequence
  spacer sequence GTCN PAM
ugggauaccauuaauuccuc

SEQ ID NO: 14935 - RNA, 20 nt, Artificial Sequence
  spacer sequence GTCN PAM
ucuacggucaugggauacca

SEQ ID NO: 14936 - RNA, 20 nt, Artificial Sequence
  spacer sequence GTCN PAM
cuggccucgugcuguaugua

SEQ ID NO: 14937 - RNA, 20 nt, Artificial Sequence
  spacer sequence GTCN PAM
gcacuucugcuugcuggcau

SEQ ID NO: 14938 - RNA, 20 nt, Artificial Sequence
  spacer sequence GTCN PAM
ggucugcacuucugcuugcu

SEQ ID NO: 14939 - RNA, 20 nt, Artificial Sequence
  spacer sequence GTCN PAM
acaguucauagcuauagcag

SEQ ID NO: 14940 - RNA, 20 nt, Artificial Sequence
  spacer sequence GTCN PAM
auuucucuaacaauggguuc

SEQ ID NO: 14941 - RNA, 20 nt, Artificial Sequence
  spacer sequence GTCN PAM
ccuaaagcccugcauauuuc

SEQ ID NO: 14942 - RNA, 20 nt, Artificial Sequence
  spacer sequence GTCN PAM
uuuaagaaacauuuuuccaa

SEQ ID NO: 14943 - RNA, 20 nt, Artificial Sequence
  spacer sequence GTCN PAM
gaaaaaaagagaaugggaug

SEQ ID NO: 14944 - RNA, 20 nt, Artificial Sequence
  spacer sequence GTCN PAM
cugggccugguguguucagg

SEQ ID NO: 14945 - RNA, 20 nt, Artificial Sequence
  spacer sequence GTCN PAM
uaagaagucauguucaugug

SEQ ID NO: 14946 - RNA, 20 nt, Artificial Sequence
  spacer sequence GTCN PAM
uguucauguguguacggagg

SEQ ID NO: 14947 - RNA, 20 nt, Artificial Sequence
  spacer sequence GTCN PAM
cugugagcaaaguacuacaa

SEQ ID NO: 14948 - RNA, 20 nt, Artificial Sequence
  spacer sequence GTCN PAM
gugaauaaaccaccucauuu

SEQ ID NO: 14949 - RNA, 20 nt, Artificial Sequence
  spacer sequence GTCN PAM
uaaacaaagagaggauagca

SEQ ID NO: 14950 - RNA, 20 nt, Artificial Sequence
  spacer sequence GTCN PAM
agccuguuacaaaaacuuac

SEQ ID NO: 14951 - RNA, 20 nt, Artificial Sequence
  spacer sequence GTCN PAM
cuuaaaauccucaaguaagu

SEQ ID NO: 14952 - RNA, 20 nt, Artificial Sequence
  spacer sequence GTCN PAM
auaagucaggagacuaagua

SEQ ID NO: 14953 - RNA, 20 nt, Artificial Sequence
  spacer sequence GTCN PAM
ggagacuaaguaaccugaag

SEQ ID NO: 14954 - RNA, 20 nt, Artificial Sequence
  spacer sequence GTCN PAM
ccugacuuauugacgccuuc

SEQ ID NO: 14955 - RNA, 20 nt, Artificial Sequence
  spacer sequence GTCN PAM
caaaguuaaauaaauuuacu

SEQ ID NO: 14956 - RNA, 20 nt, Artificial Sequence
  spacer sequence GTCN PAM
guucaaauuucuuaaaucaa

SEQ ID NO: 14957 - RNA, 20 nt, Artificial Sequence
  spacer sequence GTCN PAM
gucaggaugcaaaaccuaau

SEQ ID NO: 14958 - RNA, 20 nt, Artificial Sequence
  spacer sequence GTCN PAM
ggaugcaaaaccuaauuacg

SEQ ID NO: 14959 - RNA, 20 nt, Artificial Sequence
  spacer sequence GTCN PAM
cuauuacucuuuuauuagga

SEQ ID NO: 14960 - RNA, 20 nt, Artificial Sequence
  spacer sequence GTCN PAM
auaaaaccucuguguguccc

SEQ ID NO: 14961 - RNA, 20 nt, Artificial Sequence
  spacer sequence GTCN PAM
aagucaccacaucuaaagcu

SEQ ID NO: 14962 - RNA, 20 nt, Artificial Sequence
  spacer sequence GTCN PAM
ccacaucuaaagcuggcaug

SEQ ID NO: 14963 - RNA, 20 nt, Artificial Sequence
  spacer sequence GTCN PAM
ugagcagcauuuuggauuca

SEQ ID NO: 14964 - RNA, 20 nt, Artificial Sequence
  spacer sequence GTCN PAM
cugaacuuagaaaagauaua

SEQ ID NO: 14965 - RNA, 20 nt, Artificial Sequence
  spacer sequence GTCN PAM
auguuuucugaaaagccagu

SEQ ID NO: 14966 - RNA, 20 nt, Artificial Sequence
  spacer sequence GTCN PAM
ugccuuuuaucugaggcaag

SEQ ID NO: 14967 - RNA, 20 nt, Artificial Sequence
  spacer sequence GTCN PAM
cucaguucuuaugcccuagu

SEQ ID NO: 14968 - RNA, 20 nt, Artificial Sequence
  spacer sequence GTCN PAM
ucuugugguagcauuuuuug

SEQ ID NO: 14969 - RNA, 20 nt, Artificial Sequence
  spacer sequence GTCN PAM
uauucauucaucuacacugg

SEQ ID NO: 14970 - RNA, 20 nt, Artificial Sequence
  spacer sequence GTCN PAM
cuguucccaguguagaugaa

SEQ ID NO: 14971 - RNA, 20 nt, Artificial Sequence
  spacer sequence GTCN PAM
cuuuuacaaauacugcaugu

SEQ ID NO: 14972 - RNA, 20 nt, Artificial Sequence
  spacer sequence GTCN PAM
auuuuaaaaauccuuagaaa

SEQ ID NO: 14973 - RNA, 20 nt, Artificial Sequence
  spacer sequence GTCN PAM
gaagauaauugaaggguauu

SEQ ID NO: 14974 - RNA, 20 nt, Artificial Sequence
  spacer sequence GTCN PAM
uccaggaagacccuaucaaa

SEQ ID NO: 14975 - RNA, 20 nt, Artificial Sequence
  spacer sequence GTCN PAM
uccuggaugacagcaaauaa

SEQ ID NO: 14976 - RNA, 20 nt, Artificial Sequence
  spacer sequence GTCN PAM
ggcuacaccccuaguggcug

SEQ ID NO: 14977 - RNA, 20 nt, Artificial Sequence
  spacer sequence GTCN PAM
cucucuuuuuuucucccucu

SEQ ID NO: 14978 - RNA, 20 nt, Artificial Sequence
  spacer sequence GTCN PAM
uuucucauaacaaaauaacc

SEQ ID NO: 14979 - RNA, 20 nt, Artificial Sequence
  spacer sequence GTCN PAM
aaaaguucuuuucuauucuc

SEQ ID NO: 14980 - RNA, 20 nt, Artificial Sequence
  spacer sequence GTCN PAM
gauguuaaaaacuuacucca

SEQ ID NO: 14981 - RNA, 20 nt, Artificial Sequence
  spacer sequence GTCN PAM
aggguuugagauaugucuau

SEQ ID NO: 14982 - RNA, 20 nt, Artificial Sequence
  spacer sequence GTCN PAM
auuuuaauauaguaaguacu

SEQ ID NO: 14983 - RNA, 20 nt, Artificial Sequence
  spacer sequence GTCN PAM
uuuucaggauuauuucuaug

SEQ ID NO: 14984 - RNA, 20 nt, Artificial Sequence
  spacer sequence GTCN PAM
gucuuuuucaggauuauuuc

SEQ ID NO: 14985 - RNA, 20 nt, Artificial Sequence
  spacer sequence GTCN PAM
aaugaggacacaagaagcuu

SEQ ID NO: 14986 - RNA, 20 nt, Artificial Sequence
  spacer sequence GTCN PAM
ucauuugacacacucuguaa

SEQ ID NO: 14987 - RNA, 20 nt, Artificial Sequence
  spacer sequence GTCN PAM
cuuuauugaaaaaauaaaaa

SEQ ID NO: 14988 - RNA, 20 nt, Artificial Sequence
  spacer sequence GTCN PAM
gcauuaaccuguucauacac

SEQ ID NO: 14989 - RNA, 20 nt, Artificial Sequence
  spacer sequence GTCN PAM
guguuuuuuuggcaguuguc

SEQ ID NO: 14990 - RNA, 20 nt, Artificial Sequence
  spacer sequence GTCN PAM
uuguuaaguucuauuggaaa

SEQ ID NO: 14991 - RNA, 20 nt, Artificial Sequence
  spacer sequence GTCN PAM
uuacaaccuggcuuuuuauu

SEQ ID NO: 14992 - RNA, 20 nt, Artificial Sequence
  spacer sequence GTCN PAM
ucuaaauaaaaaaaaaaaua

SEQ ID NO: 14993 - RNA, 20 nt, Artificial Sequence
  spacer sequence GTCN PAM
cuauuuauuauugcuuaugu

SEQ ID NO: 14994 - RNA, 20 nt, Artificial Sequence
  spacer sequence GTCN PAM
uaacuugaaauuuuaucuuu

SEQ ID NO: 14995 - RNA, 20 nt, Artificial Sequence
  spacer sequence GTCN PAM
auacuuuuuuguaaauggca

SEQ ID NO: 14996 - RNA, 20 nt, Artificial Sequence
  spacer sequence GTCN PAM
cuuuccuucuaucacccuac

SEQ ID NO: 14997 - RNA, 20 nt, Artificial Sequence
  spacer sequence GTCN PAM
uagggguuguacauauccuu

SEQ ID NO: 14998 - RNA, 20 nt, Artificial Sequence
  spacer sequence GTCN PAM
cauggauggcugucauaggg

SEQ ID NO: 14999 - RNA, 20 nt, Artificial Sequence
  spacer sequence GTCN PAM
cacuuuuuuguuucucucuu

SEQ ID NO: 15000 - RNA, 20 nt, Artificial Sequence
  spacer sequence GTCN PAM
uuuuuuuuuccacuaccaaa

SEQ ID NO: 15001 - RNA, 20 nt, Artificial Sequence
  spacer sequence GTCN PAM
uuuuucuguauuucuagaau

SEQ ID NO: 15002 - RNA, 20 nt, Artificial Sequence
  spacer sequence GTCN PAM
uguaacaccaccaagacaau

SEQ ID NO: 15003 - RNA, 20 nt, Artificial Sequence
  spacer sequence GTCN PAM
uggugguguuacaagacuug

SEQ ID NO: 15004 - RNA, 20 nt, Artificial Sequence
  spacer sequence GTCN PAM
aaguaaguaagcucaauagu

SEQ ID NO: 15005 - RNA, 20 nt, Artificial Sequence
  spacer sequence GTCN PAM
aguaaauggcuggcaaaguu

SEQ ID NO: 15006 - RNA, 20 nt, Artificial Sequence
  spacer sequence GTCN PAM
auacuuaagggaaaaguugc

SEQ ID NO: 15007 - RNA, 20 nt, Artificial Sequence
  spacer sequence GTCN PAM
uaucugagcagguuuauuuu

SEQ ID NO: 15008 - RNA, 20 nt, Artificial Sequence
  spacer sequence GTCN PAM
agugcuauuugaacaccaac

SEQ ID NO: 15009 - RNA, 20 nt, Artificial Sequence
  spacer sequence GTCN PAM
gugcucccuaaaaguuguac

SEQ ID NO: 15010 - RNA, 20 nt, Artificial Sequence
  spacer sequence GTCN PAM
cauuuaaaugcaagucuuaa

SEQ ID NO: 15011 - RNA, 20 nt, Artificial Sequence
  spacer sequence GTCN PAM
uaagaauucauaguuaauca

SEQ ID NO: 15012 - RNA, 20 nt, Artificial Sequence
  spacer sequence GTCN PAM
aaccuuauugucagccucuu

SEQ ID NO: 15013 - RNA, 20 nt, Artificial Sequence
  spacer sequence GTCN PAM
gccucuuccuuucaauaugg

SEQ ID NO: 15014 - RNA, 20 nt, Artificial Sequence
  spacer sequence GTCN PAM
uaaaguuuaucauuugauug

SEQ ID NO: 15015 - RNA, 20 nt, Artificial Sequence
  spacer sequence GTCN PAM
acuugacaaccaaguagauc

SEQ ID NO: 15016 - RNA, 20 nt, Artificial Sequence
  spacer sequence GTCN PAM
aguggacaaucaaaugauaa

SEQ ID NO: 15017 - RNA, 20 nt, Artificial Sequence
  spacer sequence GTCN PAM
uuuuaaaaauacuggcacca

SEQ ID NO: 15018 - RNA, 20 nt, Artificial Sequence
  spacer sequence GTCN PAM
uaguuaaucaucauuuuucc

SEQ ID NO: 15019 - RNA, 20 nt, Artificial Sequence
  spacer sequence GTCN PAM
ucuuuuuagguagccauugu

SEQ ID NO: 15020 - RNA, 20 nt, Artificial Sequence
  spacer sequence GTCN PAM
auucaaggccuuuuuucuuc

SEQ ID NO: 15021 - RNA, 20 nt, Artificial Sequence
  spacer sequence GTCN PAM
cuaaaggguuaaauguauca

SEQ ID NO: 15022 - RNA, 20 nt, Artificial Sequence
  spacer sequence GTCN PAM
gucucuaaaggguuaaaugu

SEQ ID NO: 15023 - RNA, 20 nt, Artificial Sequence
  spacer sequence GTCN PAM
auagaggguuaauccaaaga

SEQ ID NO: 15024 - RNA, 20 nt, Artificial Sequence
  spacer sequence GTCN PAM
uuggauuaacccucuauaga

SEQ ID NO: 15025 - RNA, 20 nt, Artificial Sequence
  spacer sequence GTCN PAM
uuuucucucucucucucuuu

SEQ ID NO: 15026 - RNA, 20 nt, Artificial Sequence
  spacer sequence GTCN PAM
cuaauucguugcugagcaaa

SEQ ID NO: 15027 - RNA, 20 nt, Artificial Sequence
  spacer sequence GTCN PAM
aaguuuaaaaaaaaacauac

SEQ ID NO: 15028 - RNA, 20 nt, Artificial Sequence
  spacer sequence GTCN PAM
ccagcacaccuguuuuuuuu

SEQ ID NO: 15029 - RNA, 20 nt, Artificial Sequence
  spacer sequence GTCN PAM
caugugauuuaaacaaacaa

SEQ ID NO: 15030 - RNA, 20 nt, Artificial Sequence
  spacer sequence GTCN PAM
ggugggagugagggaggggu

SEQ ID NO: 15031 - RNA, 20 nt, Artificial Sequence
  spacer sequence GTCN PAM
uuccccaccuggccaugcgu

SEQ ID NO: 15032 - RNA, 20 nt, Artificial Sequence
  spacer sequence GTCN PAM
acaggagaagccacacgggc

SEQ ID NO: 15033 - RNA, 20 nt, Artificial Sequence
  spacer sequence GTCN PAM
ucaagaacuguagcaaucuc

SEQ ID NO: 15034 - RNA, 20 nt, Artificial Sequence
  spacer sequence GTCN PAM
cugcgucugcccucuuuuga

SEQ ID NO: 15035 - RNA, 20 nt, Artificial Sequence
  spacer sequence GTCN PAM
gcccucuuuugagcugggcc

SEQ ID NO: 15036 - RNA, 20 nt, Artificial Sequence
  spacer sequence GTCN PAM
gggcccgggcaggcccagcu

SEQ ID NO: 15037 - RNA, 20 nt, Artificial Sequence
  spacer sequence GTCN PAM
agcuccccgggcggugugga

SEQ ID NO: 15038 - RNA, 20 nt, Artificial Sequence
  spacer sequence GTCN PAM
gagcacuccucggagaacgg

SEQ ID NO: 15039 - RNA, 20 nt, Artificial Sequence
  spacer sequence GTCN PAM
ggagucuccgaagcuaagga

SEQ ID NO: 15040 - RNA, 20 nt, Artificial Sequence
  spacer sequence GTCN PAM
ccgaagcuaaggaagggauc

SEQ ID NO: 15041 - RNA, 20 nt, Artificial Sequence
  spacer sequence GTCN PAM
aacuccuucucgagcuugau

SEQ ID NO: 15042 - RNA, 20 nt, Artificial Sequence
  spacer sequence GTCN PAM
aaaaagcugcugcugggcag

SEQ ID NO: 15043 - RNA, 20 nt, Artificial Sequence
  spacer sequence GTCN PAM
gccucggggggccuguccaa

SEQ ID NO: 15044 - RNA, 20 nt, Artificial Sequence
  spacer sequence GTCN PAM
augcgguccgacucgccggc

SEQ ID NO: 15045 - RNA, 20 nt, Artificial Sequence
  spacer sequence GTCN PAM
gacucgccggccaccgaguc

SEQ ID NO: 15046 - RNA, 20 nt, Artificial Sequence
  spacer sequence GTCN PAM
gaccgcauagacgauggcac

SEQ ID NO: 15047 - RNA, 20 nt, Artificial Sequence
  spacer sequence GTCN PAM
ucgucgcaagugucccugug

SEQ ID NO: 15048 - RNA, 20 nt, Artificial Sequence
  spacer sequence GTCN PAM
caagugucccuguggcccuc

SEQ ID NO: 15049 - RNA, 20 nt, Artificial Sequence
  spacer sequence GTCN PAM
cuguggcccucggccucggc

SEQ ID NO: 15050 - RNA, 20 nt, Artificial Sequence
  spacer sequence GTCN PAM
ugggcgagaagcauaagcgc

SEQ ID NO: 15051 - RNA, 20 nt, Artificial Sequence
  spacer sequence GTCN PAM
ugcagggcauggugcucagc

SEQ ID NO: 15052 - RNA, 20 nt, Artificial Sequence
  spacer sequence GTCN PAM
ggcagggcgcggcucucguc

SEQ ID NO: 15053 - RNA, 20 nt, Artificial Sequence
  spacer sequence GTCN PAM
cccacgcccacgaccgcgcc

SEQ ID NO: 15054 - RNA, 20 nt, Artificial Sequence
  spacer sequence GTCN PAM
ugggcgugggcgacgagagc

SEQ ID NO: 15055 - RNA, 20 nt, Artificial Sequence
  spacer sequence GTCN PAM
acccucucgcucuccgucag

SEQ ID NO: 15056 - RNA, 20 nt, Artificial Sequence
  spacer sequence GTCN PAM
gcuccuccuccuccucuucc

SEQ ID NO: 15057 - RNA, 20 nt, Artificial Sequence
  spacer sequence GTCN PAM
uccuccucuuccuccucguc

SEQ ID NO: 15058 - RNA, 20 nt, Artificial Sequence
  spacer sequence GTCN PAM
uccucuuccuccucgucccc

SEQ ID NO: 15059 - RNA, 20 nt, Artificial Sequence
  spacer sequence GTCN PAM
ccguucuccgggaucagguu

SEQ ID NO: 15060 - RNA, 20 nt, Artificial Sequence
  spacer sequence GTCN PAM
uucucgcucuugaacuuggc

SEQ ID NO: 15061 - RNA, 20 nt, Artificial Sequence
  spacer sequence GTCN PAM
gugguggccaaguucaagag

SEQ ID NO: 15062 - RNA, 20 nt, Artificial Sequence
  spacer sequence GTCN PAM
cuggugccggguuccgggga

SEQ ID NO: 15063 - RNA, 20 nt, Artificial Sequence
  spacer sequence GTCN PAM
cuccaccgccagcuccccgg

SEQ ID NO: 15064 - RNA, 20 nt, Artificial Sequence
  spacer sequence GTCN PAM
ucggacuugaccgucauggg

SEQ ID NO: 15065 - RNA, 20 nt, Artificial Sequence
  spacer sequence GTCN PAM
gacuugaccgucauggggga

SEQ ID NO: 15066 - RNA, 20 nt, Artificial Sequence
  spacer sequence GTCN PAM
gacgacggucucuccaccgc

SEQ ID NO: 15067 - RNA, 20 nt, Artificial Sequence
  spacer sequence GTCN PAM
aguccgacgacggucucucc

SEQ ID NO: 15068 - RNA, 20 nt, Artificial Sequence
  spacer sequence GTCN PAM
ugggggacgauuugugcaug

SEQ ID NO: 15069 - RNA, 20 nt, Artificial Sequence
  spacer sequence GTCN PAM
cccaugacggucaaguccga

SEQ ID NO: 15070 - RNA, 20 nt, Artificial Sequence
  spacer sequence GTCN PAM
ucauguggcgcuucagcuug

SEQ ID NO: 15071 - RNA, 20 nt, Artificial Sequence
  spacer sequence GTCN PAM
cacagguugcacuuguaggg

SEQ ID NO: 15072 - RNA, 20 nt, Artificial Sequence
  spacer sequence GTCN PAM
ugccgcagaacucgcaugac

SEQ ID NO: 15073 - RNA, 20 nt, Artificial Sequence
  spacer sequence GTCN PAM
ugcgaguucugcggcaagac

SEQ ID NO: 15074 - RNA, 20 nt, Artificial Sequence
  spacer sequence GTCN PAM
aagucaugcgaguucugcgg

SEQ ID NO: 15075 - RNA, 20 nt, Artificial Sequence
  spacer sequence GTCN PAM
aguccaagucaugcgaguuc

SEQ ID NO: 15076 - RNA, 20 nt, Artificial Sequence
  spacer sequence GTCN PAM
ccaggaagggcggcuugcua

SEQ ID NO: 15077 - RNA, 20 nt, Artificial Sequence
  spacer sequence GTCN PAM
ccaggccggcccagcccuau

SEQ ID NO: 15078 - RNA, 20 nt, Artificial Sequence
  spacer sequence GTCN PAM
agcccaccgcuguccccagg

SEQ ID NO: 15079 - RNA, 20 nt, Artificial Sequence
  spacer sequence GTCN PAM
ccuagagaaauccauggcgg

SEQ ID NO: 15080 - RNA, 20 nt, Artificial Sequence
  spacer sequence GTCN PAM
aaggcacucgggugaugggu

SEQ ID NO: 15081 - RNA, 20 nt, Artificial Sequence
  spacer sequence GTCN PAM
aagugaugucucgguggugg

SEQ ID NO: 15082 - RNA, 20 nt, Artificial Sequence
  spacer sequence GTCN PAM
cggugguggacuaaacaggg

SEQ ID NO: 15083 - RNA, 20 nt, Artificial Sequence
  spacer sequence GTCN PAM
accaccgagacaucacuugg

SEQ ID NO: 15084 - RNA, 20 nt, Artificial Sequence
  spacer sequence GTCN PAM
gcaauaugaaucccauggag

SEQ ID NO: 15085 - RNA, 20 nt, Artificial Sequence
  spacer sequence GTCN PAM
uucccagccaccucuccaug

SEQ ID NO: 15086 - RNA, 20 nt, Artificial Sequence
  spacer sequence GTCN PAM
ugaagggauaccaacccgcg

SEQ ID NO: 15087 - RNA, 20 nt, Artificial Sequence
  spacer sequence GTCN PAM
ggggacuuccguguucgcuu

SEQ ID NO: 15088 - RNA, 20 nt, Artificial Sequence
  spacer sequence GTCN PAM
ccugaccccgcggguuggua

SEQ ID NO: 15089 - RNA, 20 nt, Artificial Sequence
  spacer sequence GTCN PAM
gugagggcuuaggccuuggg

SEQ ID NO: 15090 - RNA, 20 nt, Artificial Sequence
  spacer sequence GTCN PAM
gagcauggguacccaguaaa

SEQ ID NO: 15091 - RNA, 20 nt, Artificial Sequence
  spacer sequence GTCN PAM
aauugaucuuccugccauua

SEQ ID NO: 15092 - RNA, 20 nt, Artificial Sequence
  spacer sequence GTCN PAM
ggauuuuucugcuuugggga

SEQ ID NO: 15093 - RNA, 20 nt, Artificial Sequence
  spacer sequence GTCN PAM
cuacauucuaggcaccucaa

SEQ ID NO: 15094 - RNA, 20 nt, Artificial Sequence
  spacer sequence GTCN PAM
ucuaaacuuuccaguuccau

SEQ ID NO: 15095 - RNA, 20 nt, Artificial Sequence
  spacer sequence GTCN PAM
aaguuucucacuuaacaagg

SEQ ID NO: 15096 - RNA, 20 nt, Artificial Sequence
  spacer sequence GTCN PAM
ccuuguccaaguuucucacu

SEQ ID NO: 15097 - RNA, 20 nt, Artificial Sequence
  spacer sequence GTCN PAM
cccaggggggaauagaaagc

SEQ ID NO: 15098 - RNA, 20 nt, Artificial Sequence
  spacer sequence GTCN PAM
acucacuacaauguucuaug

SEQ ID NO: 15099 - RNA, 20 nt, Artificial Sequence
  spacer sequence GTCN PAM
uuuuuccacggaaguauuuu

SEQ ID NO: 15100 - RNA, 20 nt, Artificial Sequence
  spacer sequence GTCN PAM
ggggugugagaauguugcua

SEQ ID NO: 15101 - RNA, 20 nt, Artificial Sequence
  spacer sequence GTCN PAM
caauuuugguuccacaacac

SEQ ID NO: 15102 - RNA, 20 nt, Artificial Sequence
  spacer sequence GTCN PAM
ccaugggguguuguggaacc

SEQ ID NO: 15103 - RNA, 20 nt, Artificial Sequence
  spacer sequence GTCN PAM
auuuuuaucucaaagaaugu

SEQ ID NO: 15104 - RNA, 20 nt, Artificial Sequence
  spacer sequence GTCN PAM
cccggucagacaaaugcaag

SEQ ID NO: 15105 - RNA, 20 nt, Artificial Sequence
  spacer sequence GTCN PAM
gacaaaugcaagucuggaaa

SEQ ID NO: 15106 - RNA, 20 nt, Artificial Sequence
  spacer sequence GTCN PAM
gaccgggggacaacuccuaa

SEQ ID NO: 15107 - RNA, 20 nt, Artificial Sequence
  spacer sequence GTCN PAM
ggaaaaguuaggaggagugg

SEQ ID NO: 15108 - RNA, 20 nt, Artificial Sequence
  spacer sequence GTCN PAM
gcaccagccacuccuccuaa

SEQ ID NO: 15109 - RNA, 20 nt, Artificial Sequence
  spacer sequence GTCN PAM
gcuuaagucggcaccagcca

SEQ ID NO: 15110 - RNA, 20 nt, Artificial Sequence
  spacer sequence GTCN PAM
uggcgcuggcuguuuuaacu

SEQ ID NO: 15111 - RNA, 20 nt, Artificial Sequence
  spacer sequence GTCN PAM
cagccgagggcgcaggaugu

SEQ ID NO: 15112 - RNA, 20 nt, Artificial Sequence
  spacer sequence GTCN PAM
acucuggccaguagccaagc

SEQ ID NO: 15113 - RNA, 20 nt, Artificial Sequence
  spacer sequence GTCN PAM
ggagaggggcccugcuuaag

SEQ ID NO: 15114 - RNA, 20 nt, Artificial Sequence
  spacer sequence GTCN PAM
cauuauuucccuugcugaaa

SEQ ID NO: 15115 - RNA, 20 nt, Artificial Sequence
  spacer sequence GTCN PAM
agcuggcccuucuuugccaa

SEQ ID NO: 15116 - RNA, 20 nt, Artificial Sequence
  spacer sequence GTCN PAM
guuauuccauauauauauau

SEQ ID NO: 15117 - RNA, 20 nt, Artificial Sequence
  spacer sequence GTCN PAM
acugcaacauuaaaaagggc

SEQ ID NO: 15118 - RNA, 20 nt, Artificial Sequence
  spacer sequence GTCN PAM
uuuggcuaccauuacuucug

SEQ ID NO: 15119 - RNA, 20 nt, Artificial Sequence
  spacer sequence GTCN PAM
guaacuuucuaagaaggaaa

SEQ ID NO: 15120 - RNA, 20 nt, Artificial Sequence
  spacer sequence GTCN PAM
gaaagaaaagccggcagggu

SEQ ID NO: 15121 - RNA, 20 nt, Artificial Sequence
  spacer sequence GTCN PAM
ucucaggagcccccaaacac

SEQ ID NO: 15122 - RNA, 20 nt, Artificial Sequence
  spacer sequence GTCN PAM
aaauaauggacuccugcccu

SEQ ID NO: 15123 - RNA, 20 nt, Artificial Sequence
  spacer sequence GTCN PAM
auuauuuagacaagugcuug

SEQ ID NO: 15124 - RNA, 20 nt, Artificial Sequence
  spacer sequence GTCN PAM
gggcaggaguccauuauuua

SEQ ID NO: 15125 - RNA, 20 nt, Artificial Sequence
  spacer sequence GTCN PAM
aauguggaagggggaaaaaa

SEQ ID NO: 15126 - RNA, 20 nt, Artificial Sequence
  spacer sequence GTCN PAM
gcguuuucuuucaaaaucuu

SEQ ID NO: 15127 - RNA, 20 nt, Artificial Sequence
  spacer sequence GTCN PAM
caaauaggcuggaaaaaaaa

SEQ ID NO: 15128 - RNA, 20 nt, Artificial Sequence
  spacer sequence GTCN PAM
ucccuagaucucugggugac

SEQ ID NO: 15129 - RNA, 20 nt, Artificial Sequence
  spacer sequence GTCN PAM
cccagagaucuagggaggac

SEQ ID NO: 15130 - RNA, 20 nt, Artificial Sequence
  spacer sequence GTCN PAM
ggcuaaauaggaaugauagu

SEQ ID NO: 15131 - RNA, 20 nt, Artificial Sequence
  spacer sequence GTCN PAM
gauaauccaaguccuuaaca

SEQ ID NO: 15132 - RNA, 20 nt, Artificial Sequence
  spacer sequence GTCN PAM
uuaacacguucaucacucca

SEQ ID NO: 15133 - RNA, 20 nt, Artificial Sequence
  spacer sequence GTCN PAM
uggauuucaaucgauguuuu

SEQ ID NO: 15134 - RNA, 20 nt, Artificial Sequence
  spacer sequence GTCN PAM
aguccuggauuucaaucgau

SEQ ID NO: 15135 - RNA, 20 nt, Artificial Sequence
  spacer sequence GTCN PAM
uugauaaaugccaaaaucug

SEQ ID NO: 15136 - RNA, 20 nt, Artificial Sequence
  spacer sequence GTCN PAM
auuuuauuuugcugcccuga

SEQ ID NO: 15137 - RNA, 20 nt, Artificial Sequence
  spacer sequence GTCN PAM
gagaaaauggcauuuuaucu

SEQ ID NO: 15138 - RNA, 20 nt, Artificial Sequence
  spacer sequence GTCN PAM
augagaagggcuguuacgau

SEQ ID NO: 15139 - RNA, 20 nt, Artificial Sequence
  spacer sequence GTCN PAM
caaucguaacagcccuucuc

SEQ ID NO: 15140 - RNA, 20 nt, Artificial Sequence
  spacer sequence GTCN PAM
acuaauagcaaaugaugcau

SEQ ID NO: 15141 - RNA, 20 nt, Artificial Sequence
  spacer sequence GTCN PAM
ucaauaaauguguuacuugc

SEQ ID NO: 15142 - RNA, 20 nt, Artificial Sequence
  spacer sequence GTCN PAM
uucuaaaucaucaaagaugu

SEQ ID NO: 15143 - RNA, 20 nt, Artificial Sequence
  spacer sequence GTCN PAM
guuuauugcucuaaaucaaa

SEQ ID NO: 15144 - RNA, 20 nt, Artificial Sequence
  spacer sequence GTCN PAM
caaguuccuaugcuuagggg

SEQ ID NO: 15145 - RNA, 20 nt, Artificial Sequence
  spacer sequence GTCN PAM
uuccuucccauaaaguaaaa

SEQ ID NO: 15146 - RNA, 20 nt, Artificial Sequence
  spacer sequence GTCN PAM
ccaaugugaaaaagucaugu

SEQ ID NO: 15147 - RNA, 20 nt, Artificial Sequence
  spacer sequence GTCN PAM
ugugaucuaagccucaagau

SEQ ID NO: 15148 - RNA, 20 nt, Artificial Sequence
  spacer sequence GTCN PAM
gagacuggaggccuagcucu

SEQ ID NO: 15149 - RNA, 20 nt, Artificial Sequence
  spacer sequence GTCN PAM
cagaccuccuuguucuucug

SEQ ID NO: 15150 - RNA, 20 nt, Artificial Sequence
  spacer sequence GTCN PAM
uuugauuucucugagucuug

SEQ ID NO: 15151 - RNA, 20 nt, Artificial Sequence
  spacer sequence GTCN PAM
uggaauuccuaucuguaaaa

SEQ ID NO: 15152 - RNA, 20 nt, Artificial Sequence
  spacer sequence GTCN PAM
uuugaacuucccaacaauuc

SEQ ID NO: 15153 - RNA, 20 nt, Artificial Sequence
  spacer sequence GTCN PAM
aaugugaaugugaguuuuca

SEQ ID NO: 15154 - RNA, 20 nt, Artificial Sequence
  spacer sequence GTCN PAM
uuacccucaguaauuaauca

SEQ ID NO: 15155 - RNA, 20 nt, Artificial Sequence
  spacer sequence GTCN PAM
caguccaggccuuaacccag

SEQ ID NO: 15156 - RNA, 20 nt, Artificial Sequence
  spacer sequence GTCN PAM
aggccuuaacccaggccaaa

SEQ ID NO: 15157 - RNA, 20 nt, Artificial Sequence
  spacer sequence GTCN PAM
ccccugcucuuuaacuagag

SEQ ID NO: 15158 - RNA, 20 nt, Artificial Sequence
  spacer sequence GTCN PAM
agaaagcucuagaacaaacc

SEQ ID NO: 15159 - RNA, 20 nt, Artificial Sequence
  spacer sequence GTCN PAM
cuccuaaauugguccugcca

SEQ ID NO: 15160 - RNA, 20 nt, Artificial Sequence
  spacer sequence GTCN PAM
ugccagcaggggcaccagca

SEQ ID NO: 15161 - RNA, 20 nt, Artificial Sequence
  spacer sequence GTCN PAM
ucucccaccuucccacaaag

SEQ ID NO: 15162 - RNA, 20 nt, Artificial Sequence
  spacer sequence GTCN PAM
gagcuugauagggaaccccu

SEQ ID NO: 15163 - RNA, 20 nt, Artificial Sequence
  spacer sequence GTCN PAM
aaucaaacucccagcccuca

SEQ ID NO: 15164 - RNA, 20 nt, Artificial Sequence
  spacer sequence GTCN PAM
uccugagggcugggaguuug

SEQ ID NO: 15165 - RNA, 20 nt, Artificial Sequence
  spacer sequence GTCN PAM
ucagccuggucuuccugagg

SEQ ID NO: 15166 - RNA, 20 nt, Artificial Sequence
  spacer sequence GTCN PAM
cugcaugcuggcuggguggg

SEQ ID NO: 15167 - RNA, 20 nt, Artificial Sequence
  spacer sequence GTCN PAM
cagauugcagaagguuuagg

SEQ ID NO: 15168 - RNA, 20 nt, Artificial Sequence
  spacer sequence GTCN PAM
ugagggcugggugguucagg

SEQ ID NO: 15169 - RNA, 20 nt, Artificial Sequence
  spacer sequence GTCN PAM
cagggugcaugcccugcucu

SEQ ID NO: 15170 - RNA, 20 nt, Artificial Sequence
  spacer sequence GTCN PAM
ucucccucccaucuaaaaac

SEQ ID NO: 15171 - RNA, 20 nt, Artificial Sequence
  spacer sequence GTCN PAM
cccuuagagccuuaacucug

SEQ ID NO: 15172 - RNA, 20 nt, Artificial Sequence
  spacer sequence GTCN PAM
uggagagagaauaacaaaga

SEQ ID NO: 15173 - RNA, 20 nt, Artificial Sequence
  spacer sequence GTCN PAM
cacuucuuuucuucuugaac

SEQ ID NO: 15174 - RNA, 20 nt, Artificial Sequence
  spacer sequence GTCN PAM
auuuauacaaauguuuucug

SEQ ID NO: 15175 - RNA, 20 nt, Artificial Sequence
  spacer sequence GTCN PAM
cuacuauaaaagcucacuug

SEQ ID NO: 15176 - RNA, 20 nt, Artificial Sequence
  spacer sequence GTCN PAM
aaauuaugugugggcaugaa

SEQ ID NO: 15177 - RNA, 20 nt, Artificial Sequence
  spacer sequence GTCN PAM
guuuaggguuauuccagagu

SEQ ID NO: 15178 - RNA, 20 nt, Artificial Sequence
  spacer sequence GTCN PAM
auggcacacaucuuuagcca

SEQ ID NO: 15179 - RNA, 20 nt, Artificial Sequence
  spacer sequence GTCN PAM
uaaaugaggccacaggagug

SEQ ID NO: 15180 - RNA, 20 nt, Artificial Sequence
  spacer sequence GTCN PAM
aguaauaaaaugggcuccag

SEQ ID NO: 15181 - RNA, 20 nt, Artificial Sequence
  spacer sequence GTCN PAM
ugcuccguggcuagugauug

SEQ ID NO: 15182 - RNA, 20 nt, Artificial Sequence
  spacer sequence GTCN PAM
ugucuugcuccguggcuagu

SEQ ID NO: 15183 - RNA, 20 nt, Artificial Sequence
  spacer sequence GTCN PAM
ucuccccagggucuugucuu

SEQ ID NO: 15184 - RNA, 20 nt, Artificial Sequence
  spacer sequence GTCN PAM
cucuggggcugaguggagug

SEQ ID NO: 15185 - RNA, 20 nt, Artificial Sequence
  spacer sequence GTCN PAM
uauguauuauuccauuacuc

SEQ ID NO: 15186 - RNA, 20 nt, Artificial Sequence
  spacer sequence GTCN PAM
auguguauagagaugagaau

SEQ ID NO: 15187 - RNA, 20 nt, Artificial Sequence
  spacer sequence GTCN PAM
uuuugacaaaagugaaaggg

SEQ ID NO: 15188 - RNA, 20 nt, Artificial Sequence
  spacer sequence GTCN PAM
aaaagaccgaaauugaaaac

SEQ ID NO: 15189 - RNA, 20 nt, Artificial Sequence
  spacer sequence GTCN PAM
uugguucauuugcuuauuua

SEQ ID NO: 15190 - RNA, 20 nt, Artificial Sequence
  spacer sequence GTCN PAM
uguggaaagaagauguguaa

SEQ ID NO: 15191 - RNA, 20 nt, Artificial Sequence
  spacer sequence GTCN PAM
auaaaguaaaguuaauguau

SEQ ID NO: 15192 - RNA, 20 nt, Artificial Sequence
  spacer sequence GTCN PAM
cauaaaaaacgauucacaaa

SEQ ID NO: 15193 - RNA, 20 nt, Artificial Sequence
  spacer sequence GTCN PAM
cacuuugcuuucucuguccc

SEQ ID NO: 15194 - RNA, 20 nt, Artificial Sequence
  spacer sequence GTCN PAM
cucugccccccucuucccau

SEQ ID NO: 15195 - RNA, 20 nt, Artificial Sequence
  spacer sequence GTCN PAM
agaaaugcccagguuucccc

SEQ ID NO: 15196 - RNA, 20 nt, Artificial Sequence
  spacer sequence GTCN PAM
acuggaaaccuuacacagau

SEQ ID NO: 15197 - RNA, 20 nt, Artificial Sequence
  spacer sequence GTCN PAM
aaucuuuaucuuccauugcu

SEQ ID NO: 15198 - RNA, 20 nt, Artificial Sequence
  spacer sequence GTCN PAM
aaauaacuuugaccauuaaa

SEQ ID NO: 15199 - RNA, 20 nt, Artificial Sequence
  spacer sequence GTCN PAM
aaguuauuuggaccccagaa

SEQ ID NO: 15200 - RNA, 20 nt, Artificial Sequence
  spacer sequence GTCN PAM
uuuaauggucaaaguuauuu

SEQ ID NO: 15201 - RNA, 20 nt, Artificial Sequence
  spacer sequence GTCN PAM
ggguuucugggugcuggcau

SEQ ID NO: 15202 - RNA, 20 nt, Artificial Sequence
  spacer sequence GTCN PAM
ucaccagaguacaacaaagu

SEQ ID NO: 15203 - RNA, 20 nt, Artificial Sequence
  spacer sequence GTCN PAM
cuugucuucaccagaguaca

SEQ ID NO: 15204 - RNA, 20 nt, Artificial Sequence
  spacer sequence GTCN PAM
augaaacauuuguagcacug

SEQ ID NO: 15205 - RNA, 20 nt, Artificial Sequence
  spacer sequence GTCN PAM
uccucuagcuaacuaaccau

SEQ ID NO: 15206 - RNA, 20 nt, Artificial Sequence
  spacer sequence GTCN PAM
aucuugagacagacuggagg

SEQ ID NO: 15207 - RNA, 20 nt, Artificial Sequence
  spacer sequence GTCN PAM
caagauggacagcuacaugg

SEQ ID NO: 15208 - RNA, 20 nt, Artificial Sequence
  spacer sequence GTCN PAM
gucucaagauggacagcuac

SEQ ID NO: 15209 - RNA, 20 nt, Artificial Sequence
  spacer sequence GTCN PAM
ccugcaccaucuauccucca

SEQ ID NO: 15210 - RNA, 20 nt, Artificial Sequence
  spacer sequence GTCN PAM
cccgcccuccccaaucauca

SEQ ID NO: 15211 - RNA, 20 nt, Artificial Sequence
  spacer sequence GTCN PAM
guuuuucuugucucccgccc

SEQ ID NO: 15212 - RNA, 20 nt, Artificial Sequence
  spacer sequence GTCN PAM
caaguguaaaauacauccug

SEQ ID NO: 15213 - RNA, 20 nt, Artificial Sequence
  spacer sequence GTCN PAM
caacugccuuggcugugcuu

SEQ ID NO: 15214 - RNA, 20 nt, Artificial Sequence
  spacer sequence GTCN PAM
guguaagagccuucucagca

SEQ ID NO: 15215 - RNA, 20 nt, Artificial Sequence
  spacer sequence GTCN PAM
gcuguuaccaggccugcaga

SEQ ID NO: 15216 - RNA, 20 nt, Artificial Sequence
  spacer sequence GTCN PAM
cuguagauguucucaggcua

SEQ ID NO: 15217 - RNA, 20 nt, Artificial Sequence
  spacer sequence GTCN PAM
gagaggaugaaaugucucug

SEQ ID NO: 15218 - RNA, 20 nt, Artificial Sequence
  spacer sequence GTCN PAM
uccugcuuguguugguucac

SEQ ID NO: 15219 - RNA, 20 nt, Artificial Sequence
  spacer sequence GTCN PAM
ggucuuccugcuuguguugg

SEQ ID NO: 15220 - RNA, 20 nt, Artificial Sequence
  spacer sequence GTCN PAM
acauuugacuguuuacguca

SEQ ID NO: 15221 - RNA, 20 nt, Artificial Sequence
  spacer sequence GTCN PAM
aauguagacauacuuguuug

SEQ ID NO: 15222 - RNA, 20 nt, Artificial Sequence
  spacer sequence GTCN PAM
agugaauugagaguguggcg

SEQ ID NO: 15223 - RNA, 20 nt, Artificial Sequence
  spacer sequence GTCN PAM
ugguauuuuucaaugagaaa

SEQ ID NO: 15224 - RNA, 20 nt, Artificial Sequence
  spacer sequence GTCN PAM
guuuuggcagcaaacuuagu

SEQ ID NO: 15225 - RNA, 20 nt, Artificial Sequence
  spacer sequence GTCN PAM
cuucccagaguaaguggcag

SEQ ID NO: 15226 - RNA, 20 nt, Artificial Sequence
  spacer sequence GTCN PAM
acaaacccauuagcccuaaa

SEQ ID NO: 15227 - RNA, 20 nt, Artificial Sequence
  spacer sequence GTCN PAM
gcuuguuuagggcuaauggg

SEQ ID NO: 15228 - RNA, 20 nt, Artificial Sequence
  spacer sequence GTCN PAM
ugccgucagcuuguuuaggg

SEQ ID NO: 15229 - RNA, 20 nt, Artificial Sequence
  spacer sequence GTCN PAM
ggccguguggcaaagugagg

SEQ ID NO: 15230 - RNA, 20 nt, Artificial Sequence
  spacer sequence GTCN PAM
caucugacuaucuggcagca

SEQ ID NO: 15231 - RNA, 20 nt, Artificial Sequence
  spacer sequence GTCN PAM
gaugagaccucacuuugcca

SEQ ID NO: 15232 - RNA, 20 nt, Artificial Sequence
  spacer sequence GTCN PAM
gucccuucauuuuacagaug

SEQ ID NO: 15233 - RNA, 20 nt, Artificial Sequence
  spacer sequence GTCN PAM
cuucauuuuacagaugggga

SEQ ID NO: 15234 - RNA, 20 nt, Artificial Sequence
  spacer sequence GTCN PAM
cuuaauuucucauggccuca

SEQ ID NO: 15235 - RNA, 20 nt, Artificial Sequence
  spacer sequence GTCN PAM
ggagauuaauucuaaucuuc

SEQ ID NO: 15236 - RNA, 20 nt, Artificial Sequence
  spacer sequence GTCN PAM
uuccugggaauuugucucuu

SEQ ID NO: 15237 - RNA, 20 nt, Artificial Sequence
  spacer sequence GTCN PAM
cuuccccccugcugcuccug

SEQ ID NO: 15238 - RNA, 20 nt, Artificial Sequence
  spacer sequence GTCN PAM
ucacugcccaacaagaaggu

SEQ ID NO: 15239 - RNA, 20 nt, Artificial Sequence
  spacer sequence GTCN PAM
uguuucuacugauccauuaa

SEQ ID NO: 15240 - RNA, 20 nt, Artificial Sequence
  spacer sequence GTCN PAM
ugggggaggguccagcccag

SEQ ID NO: 15241 - RNA, 20 nt, Artificial Sequence
  spacer sequence GTCN PAM
agcccagcagcgcuacaugg

SEQ ID NO: 15242 - RNA, 20 nt, Artificial Sequence
  spacer sequence GTCN PAM
guucauuggcaccuuucgaa

SEQ ID NO: 15243 - RNA, 20 nt, Artificial Sequence
  spacer sequence GTCN PAM
cacaauuggaaaacaaggcc

SEQ ID NO: 15244 - RNA, 20 nt, Artificial Sequence
  spacer sequence GTCN PAM
aauucugcaggggaagcaga

SEQ ID NO: 15245 - RNA, 20 nt, Artificial Sequence
  spacer sequence GTCN PAM
uugugagacucacccuugca

SEQ ID NO: 15246 - RNA, 20 nt, Artificial Sequence
  spacer sequence GTCN PAM
cacaaagacagugugcuuuu

SEQ ID NO: 15247 - RNA, 20 nt, Artificial Sequence
  spacer sequence GTCN PAM
aagcaaagccaacuggggac

SEQ ID NO: 15248 - RNA, 20 nt, Artificial Sequence
  spacer sequence GTCN PAM
ccaguuggcuuugcuuugac

SEQ ID NO: 15249 - RNA, 20 nt, Artificial Sequence
  spacer sequence GTCN PAM
auuuuacuuaccaaagagaa

SEQ ID NO: 15250 - RNA, 20 nt, Artificial Sequence
  spacer sequence GTCN PAM
aacucgaggagcagcucugc

SEQ ID NO: 15251 - RNA, 20 nt, Artificial Sequence
  spacer sequence GTCN PAM
ucuuuuuuucuuuguuagug

SEQ ID NO: 15252 - RNA, 20 nt, Artificial Sequence
  spacer sequence GTCN PAM
gcgcugugagaaucacuugc

SEQ ID NO: 15253 - RNA, 20 nt, Artificial Sequence
  spacer sequence GTCN PAM
gagguggugcccaagaauuu

SEQ ID NO: 15254 - RNA, 20 nt, Artificial Sequence
  spacer sequence GTCN PAM
uaggguaagggaaguaugaa

SEQ ID NO: 15255 - RNA, 20 nt, Artificial Sequence
  spacer sequence GTCN PAM
cugcccagggaauuucaaag

SEQ ID NO: 15256 - RNA, 20 nt, Artificial Sequence
  spacer sequence GTCN PAM
aggacccaccuccuuuagga

SEQ ID NO: 15257 - RNA, 20 nt, Artificial Sequence
  spacer sequence GTCN PAM
uggacaggagggaaaacagc

SEQ ID NO: 15258 - RNA, 20 nt, Artificial Sequence
  spacer sequence GTCN PAM
uaaaggagguggguccugga

SEQ ID NO: 15259 - RNA, 20 nt, Artificial Sequence
  spacer sequence GTCN PAM
aaaacaaauuaagcuuaggg

SEQ ID NO: 15260 - RNA, 20 nt, Artificial Sequence
  spacer sequence GTCN PAM
gucauugauaaggacaggga

SEQ ID NO: 15261 - RNA, 20 nt, Artificial Sequence
  spacer sequence GTCN PAM
uugauaaggacagggaacag

SEQ ID NO: 15262 - RNA, 20 nt, Artificial Sequence
  spacer sequence GTCN PAM
uuaucaaugacagacggagg

SEQ ID NO: 15263 - RNA, 20 nt, Artificial Sequence
  spacer sequence GTCN PAM
aggcucuccaucagguccag

SEQ ID NO: 15264 - RNA, 20 nt, Artificial Sequence
  spacer sequence GTCN PAM
agggccuucuuagcaugaga

SEQ ID NO: 15265 - RNA, 20 nt, Artificial Sequence
  spacer sequence GTCN PAM
caugcuaagaaggcccugga

SEQ ID NO: 15266 - RNA, 20 nt, Artificial Sequence
  spacer sequence GTCN PAM
ggcacaagcugguuugggug

SEQ ID NO: 15267 - RNA, 20 nt, Artificial Sequence
  spacer sequence GTCN PAM
ucacugcuuccauuaaagcc

SEQ ID NO: 15268 - RNA, 20 nt, Artificial Sequence
  spacer sequence GTCN PAM
gcuuuaauggaagcagugag

SEQ ID NO: 15269 - RNA, 20 nt, Artificial Sequence
  spacer sequence GTCN PAM
gcgaacgcagcuguggcaac

SEQ ID NO: 15270 - RNA, 20 nt, Artificial Sequence
  spacer sequence GTCN PAM
gugcaguugccacagcugcg

SEQ ID NO: 15271 - RNA, 20 nt, Artificial Sequence
  spacer sequence GTCN PAM
aguuccugcuguguccgugc

SEQ ID NO: 15272 - RNA, 20 nt, Artificial Sequence
  spacer sequence GTCN PAM
cucaaaugggacacauuucc

SEQ ID NO: 15273 - RNA, 20 nt, Artificial Sequence
  spacer sequence GTCN PAM
cauuugagagaccagaaagg

SEQ ID NO: 15274 - RNA, 20 nt, Artificial Sequence
  spacer sequence GTCN PAM
gaaaagggaaauguguccca

SEQ ID NO: 15275 - RNA, 20 nt, Artificial Sequence
  spacer sequence GTCN PAM
uacacuuuucugguggaagg

SEQ ID NO: 15276 - RNA, 20 nt, Artificial Sequence
  spacer sequence GTCN PAM
cucuagacccaguauuucca

SEQ ID NO: 15277 - RNA, 20 nt, Artificial Sequence
  spacer sequence GTCN PAM
agagagaccuuuaugaaaua

SEQ ID NO: 15278 - RNA, 20 nt, Artificial Sequence
  spacer sequence GTCN PAM
cuauuuuuaaauucagccau

SEQ ID NO: 15279 - RNA, 20 nt, Artificial Sequence
  spacer sequence GTCN PAM
cuuuacauuucuacauauau

SEQ ID NO: 15280 - RNA, 20 nt, Artificial Sequence
  spacer sequence GTCN PAM
aaaguugguacccaauauau

SEQ ID NO: 15281 - RNA, 20 nt, Artificial Sequence
  spacer sequence GTCN PAM
uuaaaucaaguuuuuugguu

SEQ ID NO: 15282 - RNA, 20 nt, Artificial Sequence
  spacer sequence GTCN PAM
aggaaucuuugagauguucu

SEQ ID NO: 15283 - RNA, 20 nt, Artificial Sequence
  spacer sequence GTCN PAM
acuaaucaacagguaauacu

SEQ ID NO: 15284 - RNA, 20 nt, Artificial Sequence
  spacer sequence GTCN PAM
uuaaacguguuggaaugaug

SEQ ID NO: 15285 - RNA, 20 nt, Artificial Sequence
  spacer sequence GTCN PAM
ugugguuuuaauaccuguua

SEQ ID NO: 15286 - RNA, 20 nt, Artificial Sequence
  spacer sequence GTCN PAM
caauauacacacaugcacau

SEQ ID NO: 15287 - RNA, 20 nt, Artificial Sequence
  spacer sequence GTCN PAM
guguacgugugugaaugugu

SEQ ID NO: 15288 - RNA, 20 nt, Artificial Sequence
  spacer sequence GTCN PAM
cacugaaaaaaaaaaaaaaa

SEQ ID NO: 15289 - RNA, 20 nt, Artificial Sequence
  spacer sequence GTCN PAM
cacguggaaugggcuaucuc

SEQ ID NO: 15290 - RNA, 20 nt, Artificial Sequence
  spacer sequence GTCN PAM
cgagauagcccauuccacgu

SEQ ID NO: 15291 - RNA, 20 nt, Artificial Sequence
  spacer sequence GTCN PAM
cagugucacgagauagccca

SEQ ID NO: 15292 - RNA, 20 nt, Artificial Sequence
  spacer sequence GTCN PAM
ucaaaaagagaauggaugac

SEQ ID NO: 15293 - RNA, 20 nt, Artificial Sequence
  spacer sequence GTCN PAM
uccauucucuuuuugaagac

SEQ ID NO: 15294 - RNA, 20 nt, Artificial Sequence
  spacer sequence GTCN PAM
cuauauuggugacaggccaa

SEQ ID NO: 15295 - RNA, 20 nt, Artificial Sequence
  spacer sequence GTCN PAM
ccaauauagagaccccuccu

SEQ ID NO: 15296 - RNA, 20 nt, Artificial Sequence
  spacer sequence GTCN PAM
uguauuuuggccugucacca

SEQ ID NO: 15297 - RNA, 20 nt, Artificial Sequence
  spacer sequence GTCN PAM
uuucgcaguccauaauccuc

SEQ ID NO: 15298 - RNA, 20 nt, Artificial Sequence
  spacer sequence GTCN PAM
auaauccucaagucccucag

SEQ ID NO: 15299 - RNA, 20 nt, Artificial Sequence
  spacer sequence GTCN PAM
cucagcucuuccauguacca

SEQ ID NO: 15300 - RNA, 20 nt, Artificial Sequence
  spacer sequence GTCN PAM
agaaggugguacauggaaga

SEQ ID NO: 15301 - RNA, 20 nt, Artificial Sequence
  spacer sequence GTCN PAM
gagcuagaggcuucuuuacc

SEQ ID NO: 15302 - RNA, 20 nt, Artificial Sequence
  spacer sequence GTCN PAM
uuucuauucagccgcaucua

SEQ ID NO: 15303 - RNA, 20 nt, Artificial Sequence
  spacer sequence GTCN PAM
agagcuagaugcggcugaau

SEQ ID NO: 15304 - RNA, 20 nt, Artificial Sequence
  spacer sequence GTCN PAM
gagaaucuaagugagaagaa

SEQ ID NO: 15305 - RNA, 20 nt, Artificial Sequence
  spacer sequence GTCN PAM
caggcauagcuaauguuugc

SEQ ID NO: 15306 - RNA, 20 nt, Artificial Sequence
  spacer sequence GTCN PAM
aucuguaaugaaaaugugcc

SEQ ID NO: 15307 - RNA, 20 nt, Artificial Sequence
  spacer sequence GTCN PAM
gugagugaugauaaagcugg

SEQ ID NO: 15308 - RNA, 20 nt, Artificial Sequence
  spacer sequence GTCN PAM
aaaucgcacucucuuuuguu

SEQ ID NO: 15309 - RNA, 20 nt, Artificial Sequence
  spacer sequence GTCN PAM
auaauuauugcuuucuuuug

SEQ ID NO: 15310 - RNA, 20 nt, Artificial Sequence
  spacer sequence GTCN PAM
uuagauuccuugauacuuca

SEQ ID NO: 15311 - RNA, 20 nt, Artificial Sequence
  spacer sequence GTCN PAM
cuggugaaguaucaaggaau

SEQ ID NO: 15312 - RNA, 20 nt, Artificial Sequence
  spacer sequence GTCN PAM
ucucuacuuccucccuuuau

SEQ ID NO: 15313 - RNA, 20 nt, Artificial Sequence
  spacer sequence GTCN PAM
ggccuaaacaaaauuuuucu

SEQ ID NO: 15314 - RNA, 20 nt, Artificial Sequence
  spacer sequence GTCN PAM
uuaacauaagcaaagcauau

SEQ ID NO: 15315 - RNA, 20 nt, Artificial Sequence
  spacer sequence GTCN PAM
uuggcuuaguugcuuuucag

SEQ ID NO: 15316 - RNA, 20 nt, Artificial Sequence
  spacer sequence GTCN PAM
ccuagauaaguuccgccauu

SEQ ID NO: 15317 - RNA, 20 nt, Artificial Sequence
  spacer sequence GTCN PAM
uuuuaugcagcugcccucuc

SEQ ID NO: 15318 - RNA, 20 nt, Artificial Sequence
  spacer sequence GTCN PAM
uaggacaauuuuuuuuuguu

SEQ ID NO: 15319 - RNA, 20 nt, Artificial Sequence
  spacer sequence GTCN PAM
uaagacaauuugucuuuuua

SEQ ID NO: 15320 - RNA, 20 nt, Artificial Sequence
  spacer sequence GTCN PAM
guguuuucuuuguacugccc

SEQ ID NO: 15321 - RNA, 20 nt, Artificial Sequence
  spacer sequence GTCN PAM
ugagagagguacagaugagc

SEQ ID NO: 15322 - RNA, 20 nt, Artificial Sequence
  spacer sequence GTCN PAM
acuggaugaaucagugugca

SEQ ID NO: 15323 - RNA, 20 nt, Artificial Sequence
  spacer sequence GTCN PAM
uauccuccgcugucaacugg

SEQ ID NO: 15324 - RNA, 20 nt, Artificial Sequence
  spacer sequence GTCN PAM
cagaaaucuucagaggauuu

SEQ ID NO: 15325 - RNA, 20 nt, Artificial Sequence
  spacer sequence GTCN PAM
cuuauuuucagaaaauguga

SEQ ID NO: 15326 - RNA, 20 nt, Artificial Sequence
  spacer sequence GTCN PAM
acaugguugugucccuuauu

SEQ ID NO: 15327 - RNA, 20 nt, Artificial Sequence
  spacer sequence GTCN PAM
gacaaacaaguguugauagc

SEQ ID NO: 15328 - RNA, 20 nt, Artificial Sequence
  spacer sequence GTCN PAM
gacucagaggaauaaaacau

SEQ ID NO: 15329 - RNA, 20 nt, Artificial Sequence
  spacer sequence GTCN PAM
cauugccaguuuaagauggg

SEQ ID NO: 15330 - RNA, 20 nt, Artificial Sequence
  spacer sequence GTCN PAM
gcaaguacaagcccaucuua

SEQ ID NO: 15331 - RNA, 20 nt, Artificial Sequence
  spacer sequence GTCN PAM
uuuguugaaaaugugucagc

SEQ ID NO: 15332 - RNA, 20 nt, Artificial Sequence
  spacer sequence GTCN PAM
cuucaaucaucaacuugacc

SEQ ID NO: 15333 - RNA, 20 nt, Artificial Sequence
  spacer sequence GTCN PAM
aguugaugauugaagagaca

SEQ ID NO: 15334 - RNA, 20 nt, Artificial Sequence
  spacer sequence GTCN PAM
ucagcugaggaucuuguuug

SEQ ID NO: 15335 - RNA, 20 nt, Artificial Sequence
  spacer sequence GTCN PAM
cugcuuccuaaaggaagaaa

SEQ ID NO: 15336 - RNA, 20 nt, Artificial Sequence
  spacer sequence GTCN PAM
cuccagaggaacaagucccu

SEQ ID NO: 15337 - RNA, 20 nt, Artificial Sequence
  spacer sequence GTCN PAM
ggaaccuaaguucugcaacc

SEQ ID NO: 15338 - RNA, 20 nt, Artificial Sequence
  spacer sequence GTCN PAM
cgaaacagcuggugaguggc

SEQ ID NO: 15339 - RNA, 20 nt, Artificial Sequence
  spacer sequence GTCN PAM
ucuccuuuuaaagauggaaa

SEQ ID NO: 15340 - RNA, 20 nt, Artificial Sequence
  spacer sequence GTCN PAM
aggccuccuuuggaccaacc

SEQ ID NO: 15341 - RNA, 20 nt, Artificial Sequence
  spacer sequence GTCN PAM
aaaggaggccuggacuugca

SEQ ID NO: 15342 - RNA, 20 nt, Artificial Sequence
  spacer sequence GTCN PAM
cuugguugguccaaaggagg

SEQ ID NO: 15343 - RNA, 20 nt, Artificial Sequence
  spacer sequence GTCN PAM
ugaggggaacagguguaucc

SEQ ID NO: 15344 - RNA, 20 nt, Artificial Sequence
  spacer sequence GTCN PAM
aggucaugaggggaacaggu

SEQ ID NO: 15345 - RNA, 20 nt, Artificial Sequence
  spacer sequence GTCN PAM
ccaggcuaauccuuaggcuu

SEQ ID NO: 15346 - RNA, 20 nt, Artificial Sequence
  spacer sequence GTCN PAM
caggagguugaaauccauca

SEQ ID NO: 15347 - RNA, 20 nt, Artificial Sequence
  spacer sequence GTCN PAM
ugcaaaguuuacaugucuga

SEQ ID NO: 15348 - RNA, 20 nt, Artificial Sequence
  spacer sequence GTCN PAM
gagcuucaaggaggaaaccu

SEQ ID NO: 15349 - RNA, 20 nt, Artificial Sequence
  spacer sequence GTCN PAM
ugagccaaugagacugaagg

SEQ ID NO: 15350 - RNA, 20 nt, Artificial Sequence
  spacer sequence GTCN PAM
cauuggcucaggacacaccu

SEQ ID NO: 15351 - RNA, 20 nt, Artificial Sequence
  spacer sequence GTCN PAM
gagaaccaggaagaaacuuc

SEQ ID NO: 15352 - RNA, 20 nt, Artificial Sequence
  spacer sequence GTCN PAM
agggaaaaggucucaguggc

SEQ ID NO: 15353 - RNA, 20 nt, Artificial Sequence
  spacer sequence GTCN PAM
caguggcucaugccagaagu

SEQ ID NO: 15354 - RNA, 20 nt, Artificial Sequence
  spacer sequence GTCN PAM
aguagcaaagcucggccuca

SEQ ID NO: 15355 - RNA, 20 nt, Artificial Sequence
  spacer sequence GTCN PAM
ugugugugccuuugugagca

SEQ ID NO: 15356 - RNA, 20 nt, Artificial Sequence
  spacer sequence GTCN PAM
ucuccccagccaccacaaac

SEQ ID NO: 15357 - RNA, 20 nt, Artificial Sequence
  spacer sequence GTCN PAM
ugguuugugguggcugggga

SEQ ID NO: 15358 - RNA, 20 nt, Artificial Sequence
  spacer sequence GTCN PAM
uugaccucccaccacacccc

SEQ ID NO: 15359 - RNA, 20 nt, Artificial Sequence
  spacer sequence GTCN PAM
aggaccacagggugcugggc

SEQ ID NO: 15360 - RNA, 20 nt, Artificial Sequence
  spacer sequence GTCN PAM
cccuuccaggcucauugaaa

SEQ ID NO: 15361 - RNA, 20 nt, Artificial Sequence
  spacer sequence GTCN PAM
uccuucccccaacccccaau

SEQ ID NO: 15362 - RNA, 20 nt, Artificial Sequence
  spacer sequence GTCN PAM
aguaguuaaugaucuguaaa

SEQ ID NO: 15363 - RNA, 20 nt, Artificial Sequence
  spacer sequence GTCN PAM
cuucuaacuacaaaggcaug

SEQ ID NO: 15364 - RNA, 20 nt, Artificial Sequence
  spacer sequence GTCN PAM
uuuaucgucccuucuaacua

SEQ ID NO: 15365 - RNA, 20 nt, Artificial Sequence
  spacer sequence GTCN PAM
cccgaauuguccagcuucac

SEQ ID NO: 15366 - RNA, 20 nt, Artificial Sequence
  spacer sequence GTCN PAM
agcuucacacaaacguauca

SEQ ID NO: 15367 - RNA, 20 nt, Artificial Sequence
  spacer sequence GTCN PAM
aaaugaugauuucccauccu

SEQ ID NO: 15368 - RNA, 20 nt, Artificial Sequence
  spacer sequence GTCN PAM
aucaaagccagcagaacaca

SEQ ID NO: 15369 - RNA, 20 nt, Artificial Sequence
  spacer sequence GTCN PAM
ucagaguaauuugggaguug

SEQ ID NO: 15370 - RNA, 20 nt, Artificial Sequence
  spacer sequence GTCN PAM
ugagaaaauacuagaauaag

SEQ ID NO: 15371 - RNA, 20 nt, Artificial Sequence
  spacer sequence GTCN PAM
cuuggaaacaccauguuuga

SEQ ID NO: 15372 - RNA, 20 nt, Artificial Sequence
  spacer sequence GTCN PAM
cucacagcaccacugccccu

SEQ ID NO: 15373 - RNA, 20 nt, Artificial Sequence
  spacer sequence GTCN PAM
gcaagugugggcagccccag

SEQ ID NO: 15374 - RNA, 20 nt, Artificial Sequence
  spacer sequence GTCN PAM
cuggggcugcccacacuugc

SEQ ID NO: 15375 - RNA, 20 nt, Artificial Sequence
  spacer sequence GTCN PAM
ggaaagcccuccaccuggcc

SEQ ID NO: 15376 - RNA, 20 nt, Artificial Sequence
  spacer sequence GTCN PAM
uggaugauaagucaggaaag

SEQ ID NO: 15377 - RNA, 20 nt, Artificial Sequence
  spacer sequence GTCN PAM
gugcacggagaaggggccag

SEQ ID NO: 15378 - RNA, 20 nt, Artificial Sequence
  spacer sequence GTCN PAM
ggccucccccaaggccaaca

SEQ ID NO: 15379 - RNA, 20 nt, Artificial Sequence
  spacer sequence GTCN PAM
uggccuuuauggaaagcuuu

SEQ ID NO: 15380 - RNA, 20 nt, Artificial Sequence
  spacer sequence GTCN PAM
caauuaaaaaaaaaaaaaaa

SEQ ID NO: 15381 - RNA, 20 nt, Artificial Sequence
  spacer sequence GTCN PAM
cacucuguugcccaggcugg

SEQ ID NO: 15382 - RNA, 20 nt, Artificial Sequence
  spacer sequence GTCN PAM
uccugccucagcucucaagu

SEQ ID NO: 15383 - RNA, 20 nt, Artificial Sequence
  spacer sequence GTCN PAM
uagcuacuugagagcugagg

SEQ ID NO: 15384 - RNA, 20 nt, Artificial Sequence
  spacer sequence GTCN PAM
cccuguggaaugagggaagg

SEQ ID NO: 15385 - RNA, 20 nt, Artificial Sequence
  spacer sequence GTCN PAM
ugcuguggacagggaggaca

SEQ ID NO: 15386 - RNA, 20 nt, Artificial Sequence
  spacer sequence GTCN PAM
acagcaggacacuucugaga

SEQ ID NO: 15387 - RNA, 20 nt, Artificial Sequence
  spacer sequence GTCN PAM
ucccuguccacagcaggaca

SEQ ID NO: 15388 - RNA, 20 nt, Artificial Sequence
  spacer sequence GTCN PAM
ugaagcccagcccuguccuc

SEQ ID NO: 15389 - RNA, 20 nt, Artificial Sequence
  spacer sequence GTCN PAM
gaaggugggcaggguccuga

SEQ ID NO: 15390 - RNA, 20 nt, Artificial Sequence
  spacer sequence GTCN PAM
ucuggacacuggucauacag

SEQ ID NO: 15391 - RNA, 20 nt, Artificial Sequence
  spacer sequence GTCN PAM
ggacacuggucauacagccc

SEQ ID NO: 15392 - RNA, 20 nt, Artificial Sequence
  spacer sequence GTCN PAM
agacgacagguuucugccgc

SEQ ID NO: 15393 - RNA, 20 nt, Artificial Sequence
  spacer sequence GTCN PAM
uacagccccuuucaggcaau

SEQ ID NO: 15394 - RNA, 20 nt, Artificial Sequence
  spacer sequence GTCN PAM
cucaauagugccagaaaggc

SEQ ID NO: 15395 - RNA, 20 nt, Artificial Sequence
  spacer sequence GTCN PAM
acacaccagucacucaauag

SEQ ID NO: 15396 - RNA, 20 nt, Artificial Sequence
  spacer sequence GTCN PAM
cagaguauuaggccugugaa

SEQ ID NO: 15397 - RNA, 20 nt, Artificial Sequence
  spacer sequence GTCN PAM
uggccaagagauucugagaa

SEQ ID NO: 15398 - RNA, 20 nt, Artificial Sequence
  spacer sequence GTCN PAM
uaugguuaacacagagcugc

SEQ ID NO: 15399 - RNA, 20 nt, Artificial Sequence
  spacer sequence GTCN PAM
agcaggucaggcucuaacau

SEQ ID NO: 15400 - RNA, 20 nt, Artificial Sequence
  spacer sequence GTCN PAM
ggcucuaacauuucuucagg

SEQ ID NO: 15401 - RNA, 20 nt, Artificial Sequence
  spacer sequence GTCN PAM
ugggaggaggccuggccucg

SEQ ID NO: 15402 - RNA, 20 nt, Artificial Sequence
  spacer sequence GTCN PAM
uucuuucagaaaacaggccu

SEQ ID NO: 15403 - RNA, 20 nt, Artificial Sequence
  spacer sequence GTCN PAM
ucaucucucuggcaaagucc

SEQ ID NO: 15404 - RNA, 20 nt, Artificial Sequence
  spacer sequence GTCN PAM
cacagaacaaaacacaggcc

SEQ ID NO: 15405 - RNA, 20 nt, Artificial Sequence
  spacer sequence GTCN PAM
aagccaaggccuguguuuug

SEQ ID NO: 15406 - RNA, 20 nt, Artificial Sequence
  spacer sequence GTCN PAM
gugguauaaaugaaggauua

SEQ ID NO: 15407 - RNA, 20 nt, Artificial Sequence
  spacer sequence GTCN PAM
agccaugggguguggcacug

SEQ ID NO: 15408 - RNA, 20 nt, Artificial Sequence
  spacer sequence GTCN PAM
guucuuggcucuacuaauuc

SEQ ID NO: 15409 - RNA, 20 nt, Artificial Sequence
  spacer sequence GTCN PAM
gggaacauuggauguuacuc

SEQ ID NO: 15410 - RNA, 20 nt, Artificial Sequence
  spacer sequence GTCN PAM
acguggggacucagccuaug

SEQ ID NO: 15411 - RNA, 20 nt, Artificial Sequence
  spacer sequence GTCN PAM
ccacguggaccugcuaggug

SEQ ID NO: 15412 - RNA, 20 nt, Artificial Sequence
  spacer sequence GTCN PAM
auaggcugaguccccacgug

SEQ ID NO: 15413 - RNA, 20 nt, Artificial Sequence
  spacer sequence GTCN PAM
caccgugguguguggccgcu

SEQ ID NO: 15414 - RNA, 20 nt, Artificial Sequence
  spacer sequence GTCN PAM
ccgggucccaccguggugug

SEQ ID NO: 15415 - RNA, 20 nt, Artificial Sequence
  spacer sequence GTCN PAM
cucuaagacugcuugggaaa

SEQ ID NO: 15416 - RNA, 20 nt, Artificial Sequence
  spacer sequence GTCN PAM
uagagagacucaaaacaaaa

SEQ ID NO: 15417 - RNA, 20 nt, Artificial Sequence
  spacer sequence GTCN PAM
cucaggucuagcauuuccac

SEQ ID NO: 15418 - RNA, 20 nt, Artificial Sequence
  spacer sequence GTCN PAM
agcauuuccacgcaguccca

SEQ ID NO: 15419 - RNA, 20 nt, Artificial Sequence
  spacer sequence GTCN PAM
caaccaugaggcugaccaga

SEQ ID NO: 15420 - RNA, 20 nt, Artificial Sequence
  spacer sequence GTCN PAM
gccucaugguugggacugcg

SEQ ID NO: 15421 - RNA, 20 nt, Artificial Sequence
  spacer sequence GTCN PAM
agcucucucaggucuacuag

SEQ ID NO: 15422 - RNA, 20 nt, Artificial Sequence
  spacer sequence GTCN PAM
acuaggaacaggaaagaaua

SEQ ID NO: 15423 - RNA, 20 nt, Artificial Sequence
  spacer sequence GTCN PAM
ccggcccacagaucucagcu

SEQ ID NO: 15424 - RNA, 20 nt, Artificial Sequence
  spacer sequence GTCN PAM
ggcgguggagaguguggacg

SEQ ID NO: 15425 - RNA, 20 nt, Artificial Sequence
  spacer sequence GTCN PAM
acacucuccaccgccugaca

SEQ ID NO: 15426 - RNA, 20 nt, Artificial Sequence
  spacer sequence GTCN PAM
gccugccguccacacucucc

SEQ ID NO: 15427 - RNA, 20 nt, Artificial Sequence
  spacer sequence GTCN PAM
gccucuuugaaaccgcguca

SEQ ID NO: 15428 - RNA, 20 nt, Artificial Sequence
  spacer sequence GTCN PAM
uguacuccugccccagcucu

SEQ ID NO: 15429 - RNA, 20 nt, Artificial Sequence
  spacer sequence GTCN PAM
uuuaucaauguaauucaagg

SEQ ID NO: 15430 - RNA, 20 nt, Artificial Sequence
  spacer sequence GTCN PAM
agggucugucaccauuuuaa

SEQ ID NO: 15431 - RNA, 20 nt, Artificial Sequence
  spacer sequence GTCN PAM
gucaccauuuuaaagaggcu

SEQ ID NO: 15432 - RNA, 20 nt, Artificial Sequence
  spacer sequence GTCN PAM
ccauuuuaaagaggcuuauu

SEQ ID NO: 15433 - RNA, 20 nt, Artificial Sequence
  spacer sequence GTCN PAM
cacgcugauaccuuacaugc

SEQ ID NO: 15434 - RNA, 20 nt, Artificial Sequence
  spacer sequence GTCN PAM
cucccuuccaccaaccguuu

SEQ ID NO: 15435 - RNA, 20 nt, Artificial Sequence
  spacer sequence GTCN PAM
acuucagauuucuuuccucc

SEQ ID NO: 15436 - RNA, 20 nt, Artificial Sequence
  spacer sequence GTCN PAM
caaccugucaacuucagauu

SEQ ID NO: 15437 - RNA, 20 nt, Artificial Sequence
  spacer sequence GTCN PAM
gccaagagccgcaggccaua

SEQ ID NO: 15438 - RNA, 20 nt, Artificial Sequence
  spacer sequence GTCN PAM
acagcuugcuccacaccgga

SEQ ID NO: 15439 - RNA, 20 nt, Artificial Sequence
  spacer sequence GTCN PAM
ucucaguggggccuccuccc

SEQ ID NO: 15440 - RNA, 20 nt, Artificial Sequence
  spacer sequence GTCN PAM
uuggugcagaguggggcagu

SEQ ID NO: 15441 - RNA, 20 nt, Artificial Sequence
  spacer sequence GTCN PAM
ccagcccccuggccuccagc

SEQ ID NO: 15442 - RNA, 20 nt, Artificial Sequence
  spacer sequence GTCN PAM
cucuucugaaccuggcucuc

SEQ ID NO: 15443 - RNA, 20 nt, Artificial Sequence
  spacer sequence GTCN PAM
cccuguaaucagcauguauc

SEQ ID NO: 15444 - RNA, 20 nt, Artificial Sequence
  spacer sequence GTCN PAM
ugguucuuagaagccuugaa

SEQ ID NO: 15445 - RNA, 20 nt, Artificial Sequence
  spacer sequence GTCN PAM
accucugacuguccagcacc

SEQ ID NO: 15446 - RNA, 20 nt, Artificial Sequence
  spacer sequence GTCN PAM
gagguagaccacugagucuu

SEQ ID NO: 15447 - RNA, 20 nt, Artificial Sequence
  spacer sequence GTCN PAM
agcaccaugcugggcaaaga

SEQ ID NO: 15448 - RNA, 20 nt, Artificial Sequence
  spacer sequence GTCN PAM
uuuagaauggcucuccaaca

SEQ ID NO: 15449 - RNA, 20 nt, Artificial Sequence
  spacer sequence GTCN PAM
uuccagccaggucauuuaga

SEQ ID NO: 15450 - RNA, 20 nt, Artificial Sequence
  spacer sequence GTCN PAM
cugcuggcuccauggccugg

SEQ ID NO: 15451 - RNA, 20 nt, Artificial Sequence
  spacer sequence GTCN PAM
gccuugacccaggagaggau

SEQ ID NO: 15452 - RNA, 20 nt, Artificial Sequence
  spacer sequence GTCN PAM
aggcugacccagaggcuccu

SEQ ID NO: 15453 - RNA, 20 nt, Artificial Sequence
  spacer sequence GTCN PAM
aucgcuucacuguacuauuu

SEQ ID NO: 15454 - RNA, 20 nt, Artificial Sequence
  spacer sequence GTCN PAM
auaacaaccauugaguaaau

SEQ ID NO: 15455 - RNA, 20 nt, Artificial Sequence
  spacer sequence GTCN PAM
aauuuccuuaagucuucugg

SEQ ID NO: 15456 - RNA, 20 nt, Artificial Sequence
  spacer sequence GTCN PAM
ucuggugaauuggucucaau

SEQ ID NO: 15457 - RNA, 20 nt, Artificial Sequence
  spacer sequence GTCN PAM
caauuacuagucuggguccc

SEQ ID NO: 15458 - RNA, 20 nt, Artificial Sequence
  spacer sequence GTCN PAM
gggucccuuucuuccuuccu

SEQ ID NO: 15459 - RNA, 20 nt, Artificial Sequence
  spacer sequence GTCN PAM
cuuucuuccuuccucucuca

SEQ ID NO: 15460 - RNA, 20 nt, Artificial Sequence
  spacer sequence GTCN PAM
caagagaaagaacaguguga

SEQ ID NO: 15461 - RNA, 20 nt, Artificial Sequence
  spacer sequence GTCN PAM
agcuuccuagccuuauuuuu

SEQ ID NO: 15462 - RNA, 20 nt, Artificial Sequence
  spacer sequence GTCN PAM
cccaaguugcacuagauccu

SEQ ID NO: 15463 - RNA, 20 nt, Artificial Sequence
  spacer sequence GTCN PAM
caagcagagauggguggcua

SEQ ID NO: 15464 - RNA, 20 nt, Artificial Sequence
  spacer sequence GTCN PAM
cccacgaccuacaccaggcc

SEQ ID NO: 15465 - RNA, 20 nt, Artificial Sequence
  spacer sequence GTCN PAM
ugggagacagagagaaggcc

SEQ ID NO: 15466 - RNA, 20 nt, Artificial Sequence
  spacer sequence GTCN PAM
gagggucacccagggcuaga

SEQ ID NO: 15467 - RNA, 20 nt, Artificial Sequence
  spacer sequence GTCN PAM
cccagggcuagaacuuaagc

SEQ ID NO: 15468 - RNA, 20 nt, Artificial Sequence
  spacer sequence GTCN PAM
uccuucaccugccagcuugu

SEQ ID NO: 15469 - RNA, 20 nt, Artificial Sequence
  spacer sequence GTCN PAM
ccuugaucccuguccuccuu

SEQ ID NO: 15470 - RNA, 20 nt, Artificial Sequence
  spacer sequence GTCN PAM
acgcuggccccuggcuaaga

SEQ ID NO: 15471 - RNA, 20 nt, Artificial Sequence
  spacer sequence GTCN PAM
uguuuuucuugacgcuccac

SEQ ID NO: 15472 - RNA, 20 nt, Artificial Sequence
  spacer sequence GTCN PAM
agaaaaacaagacaaaaaaa

SEQ ID NO: 15473 - RNA, 20 nt, Artificial Sequence
  spacer sequence GTCN PAM
aaaggcucucccaccaucac

SEQ ID NO: 15474 - RNA, 20 nt, Artificial Sequence
  spacer sequence GTCN PAM
uggaaugagcucagcaugcu

SEQ ID NO: 15475 - RNA, 20 nt, Artificial Sequence
  spacer sequence GTCN PAM
guguguugaggcuuuucccc

SEQ ID NO: 15476 - RNA, 20 nt, Artificial Sequence
  spacer sequence GTCN PAM
cuauaccuagguggguuucc

SEQ ID NO: 15477 - RNA, 20 nt, Artificial Sequence
  spacer sequence GTCN PAM
guucuaguccugcugucaaa

SEQ ID NO: 15478 - RNA, 20 nt, Artificial Sequence
  spacer sequence GTCN PAM
ugcugucaaaagaaaggggu

SEQ ID NO: 15479 - RNA, 20 nt, Artificial Sequence
  spacer sequence GTCN PAM
aaagaaagggguuggacuga

SEQ ID NO: 15480 - RNA, 20 nt, Artificial Sequence
  spacer sequence GTCN PAM
aaccccuuucuuuugacagc

SEQ ID NO: 15481 - RNA, 20 nt, Artificial Sequence
  spacer sequence GTCN PAM
uuuuuggaccuaacauccag

SEQ ID NO: 15482 - RNA, 20 nt, Artificial Sequence
  spacer sequence GTCN PAM
aaaaaugacaaacaagcccu

SEQ ID NO: 15483 - RNA, 20 nt, Artificial Sequence
  spacer sequence GTCN PAM
cuucugacucccaggaagag

SEQ ID NO: 15484 - RNA, 20 nt, Artificial Sequence
  spacer sequence GTCN PAM
gaagugaccuugaugaacug

SEQ ID NO: 15485 - RNA, 20 nt, Artificial Sequence
  spacer sequence GTCN PAM
gccucucuuccugggaguca

SEQ ID NO: 15486 - RNA, 20 nt, Artificial Sequence
  spacer sequence GTCN PAM
uaaguggcucaaaccacccg

SEQ ID NO: 15487 - RNA, 20 nt, Artificial Sequence
  spacer sequence GTCN PAM
aaaauguccuaaguggcuca

SEQ ID NO: 15488 - RNA, 20 nt, Artificial Sequence
  spacer sequence GTCN PAM
gcuccgugaacaggaaacag

SEQ ID NO: 15489 - RNA, 20 nt, Artificial Sequence
  spacer sequence GTCN PAM
caugccccuuucccacucug

SEQ ID NO: 15490 - RNA, 20 nt, Artificial Sequence
  spacer sequence GTCN PAM
cucuauucuucuugcuuccu

SEQ ID NO: 15491 - RNA, 20 nt, Artificial Sequence
  spacer sequence GTCN PAM
gaaaauggaauugcuccuuc

SEQ ID NO: 15492 - RNA, 20 nt, Artificial Sequence
  spacer sequence GTCN PAM
ucugcccuguuuucaggaag

SEQ ID NO: 15493 - RNA, 20 nt, Artificial Sequence
  spacer sequence GTCN PAM
uucaaaauagaauuuuugag

SEQ ID NO: 15494 - RNA, 20 nt, Artificial Sequence
  spacer sequence GTCN PAM
ucagaaagagaugauuacac

SEQ ID NO: 15495 - RNA, 20 nt, Artificial Sequence
  spacer sequence GTCN PAM
aguuggauauuuaaaauguc

SEQ ID NO: 15496 - RNA, 20 nt, Artificial Sequence
  spacer sequence GTCN PAM
agcuggaagaucauugauug

SEQ ID NO: 15497 - RNA, 20 nt, Artificial Sequence
  spacer sequence GTCN PAM
ccacugaaacaaaucuuucu

SEQ ID NO: 15498 - RNA, 20 nt, Artificial Sequence
  spacer sequence GTCN PAM
aacuuuugcugauaaaugcu

SEQ ID NO: 15499 - RNA, 20 nt, Artificial Sequence
  spacer sequence GTCN PAM
ugacaaggggaagaccagga

SEQ ID NO: 15500 - RNA, 20 nt, Artificial Sequence
  spacer sequence GTCN PAM
agaccauuucucuaccacgg

SEQ ID NO: 15501 - RNA, 20 nt, Artificial Sequence
  spacer sequence GTCN PAM
uccccuugucaagaccauuu

SEQ ID NO: 15502 - RNA, 20 nt, Artificial Sequence
  spacer sequence GTCN PAM
ucuuuuccuggucuuccccu

SEQ ID NO: 15503 - RNA, 20 nt, Artificial Sequence
  spacer sequence GTCN PAM
caauuugaggcaucgauuua

SEQ ID NO: 15504 - RNA, 20 nt, Artificial Sequence
  spacer sequence GTCN PAM
gaagacuugagaccaggcaa

SEQ ID NO: 15505 - RNA, 20 nt, Artificial Sequence
  spacer sequence GTCN PAM
ucugaccuuggccagggauc

SEQ ID NO: 15506 - RNA, 20 nt, Artificial Sequence
  spacer sequence GTCN PAM
caagucuucugaccuuggcc

SEQ ID NO: 15507 - RNA, 20 nt, Artificial Sequence
  spacer sequence GTCN PAM
cagaugaucucaggcaaguc

SEQ ID NO: 15508 - RNA, 20 nt, Artificial Sequence
  spacer sequence GTCN PAM
ccagguauagcugcaguccc

SEQ ID NO: 15509 - RNA, 20 nt, Artificial Sequence
  spacer sequence GTCN PAM
cuuuagccccagucuguuuc

SEQ ID NO: 15510 - RNA, 20 nt, Artificial Sequence
  spacer sequence GTCN PAM
guuucucuguccaaggcaga

SEQ ID NO: 15511 - RNA, 20 nt, Artificial Sequence
  spacer sequence GTCN PAM
aaggcagaacccaaaucaac

SEQ ID NO: 15512 - RNA, 20 nt, Artificial Sequence
  spacer sequence GTCN PAM
augucauguguuuugauugu

SEQ ID NO: 15513 - RNA, 20 nt, Artificial Sequence
  spacer sequence GTCN PAM
uguguuuugauuguaauauu

SEQ ID NO: 15514 - RNA, 20 nt, Artificial Sequence
  spacer sequence GTCN PAM
gaguuguugaacacagugcc

SEQ ID NO: 15515 - RNA, 20 nt, Artificial Sequence
  spacer sequence GTCN PAM
gaaauaacucaagagaggau

SEQ ID NO: 15516 - RNA, 20 nt, Artificial Sequence
  spacer sequence GTCN PAM
ccaggaaacaucaaaugaau

SEQ ID NO: 15517 - RNA, 20 nt, Artificial Sequence
  spacer sequence GTCN PAM
gcuaauaugccagcucauuc

SEQ ID NO: 15518 - RNA, 20 nt, Artificial Sequence
  spacer sequence GTCN PAM
gcugaagcauccagauacau

SEQ ID NO: 15519 - RNA, 20 nt, Artificial Sequence
  spacer sequence GTCN PAM
ccaaauucuuccuuuguugu

SEQ ID NO: 15520 - RNA, 20 nt, Artificial Sequence
  spacer sequence GTCN PAM
aagcacucgcccaaagcacu

SEQ ID NO: 15521 - RNA, 20 nt, Artificial Sequence
  spacer sequence GTCN PAM
cauagcuucuguuaaaaauc

SEQ ID NO: 15522 - RNA, 20 nt, Artificial Sequence
  spacer sequence GTCN PAM
caaugcagauaaucauuaca

SEQ ID NO: 15523 - RNA, 20 nt, Artificial Sequence
  spacer sequence GTCN PAM
ugucgaacagcuuuacucua

SEQ ID NO: 15524 - RNA, 20 nt, Artificial Sequence
  spacer sequence GTCN PAM
aacagcuuuacucuaauuua

SEQ ID NO: 15525 - RNA, 20 nt, Artificial Sequence
  spacer sequence GTCN PAM
cuaucgacagcucaugcuuu

SEQ ID NO: 15526 - RNA, 20 nt, Artificial Sequence
  spacer sequence GTCN PAM
auagugaccugcauuugcag

SEQ ID NO: 15527 - RNA, 20 nt, Artificial Sequence
  spacer sequence GTCN PAM
gugacaguuguuggguugcc

SEQ ID NO: 15528 - RNA, 20 nt, Artificial Sequence
  spacer sequence GTCN PAM
cagacgaagcaucaaaagca

SEQ ID NO: 15529 - RNA, 20 nt, Artificial Sequence
  spacer sequence GTCN PAM
agacucugacagugucagaa

SEQ ID NO: 15530 - RNA, 20 nt, Artificial Sequence
  spacer sequence GTCN PAM
ggacaacccugccagcuccu

SEQ ID NO: 15531 - RNA, 20 nt, Artificial Sequence
  spacer sequence GTCN PAM
gagucuggacaacccugcca

SEQ ID NO: 15532 - RNA, 20 nt, Artificial Sequence
  spacer sequence GTCN PAM
gaaaaugcagucaccacggc

SEQ ID NO: 15533 - RNA, 20 nt, Artificial Sequence
  spacer sequence GTCN PAM
ccacggcugcuucacaggaa

SEQ ID NO: 15534 - RNA, 20 nt, Artificial Sequence
  spacer sequence GTCN PAM
gcacacagucaguuucccug

SEQ ID NO: 15535 - RNA, 20 nt, Artificial Sequence
  spacer sequence GTCN PAM
guuucccuguagcccagaag

SEQ ID NO: 15536 - RNA, 20 nt, Artificial Sequence
  spacer sequence GTCN PAM
ucaacaacugggguccucug

SEQ ID NO: 15537 - RNA, 20 nt, Artificial Sequence
  spacer sequence GTCN PAM
ucugcugucaaaaacagcca

SEQ ID NO: 15538 - RNA, 20 nt, Artificial Sequence
  spacer sequence GTCN PAM
aaaacagccacauucaccag

SEQ ID NO: 15539 - RNA, 20 nt, Artificial Sequence
  spacer sequence GTCN PAM
gcagccgcaccuggugaggc

SEQ ID NO: 15540 - RNA, 20 nt, Artificial Sequence
  spacer sequence GTCN PAM
aggcuguacuuccaacaugg

SEQ ID NO: 15541 - RNA, 20 nt, Artificial Sequence
  spacer sequence GTCN PAM
ggggagaugggagaaggggu

SEQ ID NO: 15542 - RNA, 20 nt, Artificial Sequence
  spacer sequence GTCN PAM
ugaacacacaccccuucucc

SEQ ID NO: 15543 - RNA, 20 nt, Artificial Sequence
  spacer sequence GTCN PAM
uaaacaagugccacagagga

SEQ ID NO: 15544 - RNA, 20 nt, Artificial Sequence
  spacer sequence GTCN PAM
acuugcgaaauuguggcugc

SEQ ID NO: 15545 - RNA, 20 nt, Artificial Sequence
  spacer sequence GTCN PAM
cugcaaauaaaugcagucau

SEQ ID NO: 15546 - RNA, 20 nt, Artificial Sequence
  spacer sequence GTCN PAM
uccagaguguaauggaaguc

SEQ ID NO: 15547 - RNA, 20 nt, Artificial Sequence
  spacer sequence GTCN PAM
ggccuuggaguuacuggcuu

SEQ ID NO: 15548 - RNA, 20 nt, Artificial Sequence
  spacer sequence GTCN PAM
gggcuauggccucucacccc

SEQ ID NO: 15549 - RNA, 20 nt, Artificial Sequence
  spacer sequence GTCN PAM
cugugccguucagucugggc

SEQ ID NO: 15550 - RNA, 20 nt, Artificial Sequence
  spacer sequence GTCN PAM
ucuucguucuuggcuagcag

SEQ ID NO: 15551 - RNA, 20 nt, Artificial Sequence
  spacer sequence GTCN PAM
caggaauguccuccaugccu

SEQ ID NO: 15552 - RNA, 20 nt, Artificial Sequence
  spacer sequence GTCN PAM
uccaugccuuuaagcuaacu

SEQ ID NO: 15553 - RNA, 20 nt, Artificial Sequence
  spacer sequence GTCN PAM
gcccuggcucacaccguucu

SEQ ID NO: 15554 - RNA, 20 nt, Artificial Sequence
  spacer sequence GTCN PAM
agguuuauuuuucccuuaua

SEQ ID NO: 15555 - RNA, 20 nt, Artificial Sequence
  spacer sequence GTCN PAM
cgaagcugcugaauauuagg

SEQ ID NO: 15556 - RNA, 20 nt, Artificial Sequence
  spacer sequence GTCN PAM
cagcaaccuagauaugagaa

SEQ ID NO: 15557 - RNA, 20 nt, Artificial Sequence
  spacer sequence GTCN PAM
cgagugaaaggcaacuucac

SEQ ID NO: 15558 - RNA, 20 nt, Artificial Sequence
  spacer sequence GTCN PAM
aacacagucuauaaauacca

SEQ ID NO: 15559 - RNA, 20 nt, Artificial Sequence
  spacer sequence GTCN PAM
auaaauaccagcaaugcccc

SEQ ID NO: 15560 - RNA, 20 nt, Artificial Sequence
  spacer sequence GTCN PAM
cacagcaauuccaggucccc

SEQ ID NO: 15561 - RNA, 20 nt, Artificial Sequence
  spacer sequence GTCN PAM
cccagaaguagcccuucacc

SEQ ID NO: 15562 - RNA, 20 nt, Artificial Sequence
  spacer sequence GTCN PAM
agaguagagaacugugacaa

SEQ ID NO: 15563 - RNA, 20 nt, Artificial Sequence
  spacer sequence GTCN PAM
caguucucuacucuugaccu

SEQ ID NO: 15564 - RNA, 20 nt, Artificial Sequence
  spacer sequence GTCN PAM
aauccauuucagaauggaga

SEQ ID NO: 15565 - RNA, 20 nt, Artificial Sequence
  spacer sequence GTCN PAM
ugccuuucagcagcuguuca

SEQ ID NO: 15566 - RNA, 20 nt, Artificial Sequence
  spacer sequence GTCN PAM
cccuaggaugucuugccuuu

SEQ ID NO: 15567 - RNA, 20 nt, Artificial Sequence
  spacer sequence GTCN PAM
uuguucuguggguggaccau

SEQ ID NO: 15568 - RNA, 20 nt, Artificial Sequence
  spacer sequence GTCN PAM
acccacagaacaaggacccu

SEQ ID NO: 15569 - RNA, 20 nt, Artificial Sequence
  spacer sequence GTCN PAM
uucucuggaaaggagccaug

SEQ ID NO: 15570 - RNA, 20 nt, Artificial Sequence
  spacer sequence GTCN PAM
cacuuugauguguaggagag

SEQ ID NO: 15571 - RNA, 20 nt, Artificial Sequence
  spacer sequence GTCN PAM
uuagaaauuaucucucaaaa

SEQ ID NO: 15572 - RNA, 20 nt, Artificial Sequence
  spacer sequence GTCN PAM
guggauagggaaaauuucaa

SEQ ID NO: 15573 - RNA, 20 nt, Artificial Sequence
  spacer sequence GTCN PAM
aucacagggcuguggucugu

SEQ ID NO: 15574 - RNA, 20 nt, Artificial Sequence
  spacer sequence GTCN PAM
gguaauaaucugccagcuaa

SEQ ID NO: 15575 - RNA, 20 nt, Artificial Sequence
  spacer sequence GTCN PAM
accaucuaaugcuaucaagg

SEQ ID NO: 15576 - RNA, 20 nt, Artificial Sequence
  spacer sequence GTCN PAM
cacuguaauaccucugucaa

SEQ ID NO: 15577 - RNA, 20 nt, Artificial Sequence
  spacer sequence GTCN PAM
gagcccacagucugagaaug

SEQ ID NO: 15578 - RNA, 20 nt, Artificial Sequence
  spacer sequence GTCN PAM
gagaaugaccacaucccuuc

SEQ ID NO: 15579 - RNA, 20 nt, Artificial Sequence
  spacer sequence GTCN PAM
uucucagacugugggcucag

SEQ ID NO: 15580 - RNA, 20 nt, Artificial Sequence
  spacer sequence GTCN PAM
cccugggaagggaugugguc

SEQ ID NO: 15581 - RNA, 20 nt, Artificial Sequence
  spacer sequence GTCN PAM
ucccaggguguugaguggga

SEQ ID NO: 15582 - RNA, 20 nt, Artificial Sequence
  spacer sequence GTCN PAM
cucaaaccuggccauggcuc

SEQ ID NO: 15583 - RNA, 20 nt, Artificial Sequence
  spacer sequence GTCN PAM
uuuuuauucugauagaauag

SEQ ID NO: 15584 - RNA, 20 nt, Artificial Sequence
  spacer sequence GTCN PAM
aacguugcuauucaggcauu

SEQ ID NO: 15585 - RNA, 20 nt, Artificial Sequence
  spacer sequence GTCN PAM
agcgcuccuaaaugccugaa

SEQ ID NO: 15586 - RNA, 20 nt, Artificial Sequence
  spacer sequence GTCN PAM
auuagcuaagcucuucaugc

SEQ ID NO: 15587 - RNA, 20 nt, Artificial Sequence
  spacer sequence GTCN PAM
gcagagcccauguuacaucu

SEQ ID NO: 15588 - RNA, 20 nt, Artificial Sequence
  spacer sequence GTCN PAM
ggcuuucaggugucugcacc

SEQ ID NO: 15589 - RNA, 20 nt, Artificial Sequence
  spacer sequence GTCN PAM
gcaccccacaaugccacaca

SEQ ID NO: 15590 - RNA, 20 nt, Artificial Sequence
  spacer sequence GTCN PAM
ucuguauggaaauugggaaa

SEQ ID NO: 15591 - RNA, 20 nt, Artificial Sequence
  spacer sequence GTCN PAM
ucucaaauguagauuaucuu

SEQ ID NO: 15592 - RNA, 20 nt, Artificial Sequence
  spacer sequence GTCN PAM
aaauauaugaagaggaacau

SEQ ID NO: 15593 - RNA, 20 nt, Artificial Sequence
  spacer sequence GTCN PAM
auguuccucuucauauauuu

SEQ ID NO: 15594 - RNA, 20 nt, Artificial Sequence
  spacer sequence GTCN PAM
guaaaccuuuaguggcagau

SEQ ID NO: 15595 - RNA, 20 nt, Artificial Sequence
  spacer sequence GTCN PAM
aaaguaauagcacagagagg

SEQ ID NO: 15596 - RNA, 20 nt, Artificial Sequence
  spacer sequence GTCN PAM
cacgggcuguucaaagagug

SEQ ID NO: 15597 - RNA, 20 nt, Artificial Sequence
  spacer sequence GTCN PAM
gauucacuccucauguuccu

SEQ ID NO: 15598 - RNA, 20 nt, Artificial Sequence
  spacer sequence GTCN PAM
ugauuuuaacugaacaaugu

SEQ ID NO: 15599 - RNA, 20 nt, Artificial Sequence
  spacer sequence GTCN PAM
ccaagaauucagacugugag

SEQ ID NO: 15600 - RNA, 20 nt, Artificial Sequence
  spacer sequence GTCN PAM
gaauucuuggagacauuguu

SEQ ID NO: 15601 - RNA, 20 nt, Artificial Sequence
  spacer sequence GTCN PAM
ucuucccccucucacagucu

SEQ ID NO: 15602 - RNA, 20 nt, Artificial Sequence
  spacer sequence GTCN PAM
cuuuggugcagugggaauug

SEQ ID NO: 15603 - RNA, 20 nt, Artificial Sequence
  spacer sequence GTCN PAM
ucccugguuccucuccucug

SEQ ID NO: 15604 - RNA, 20 nt, Artificial Sequence
  spacer sequence GTCN PAM
uuggcaauccaguuacaauu

SEQ ID NO: 15605 - RNA, 20 nt, Artificial Sequence
  spacer sequence GTCN PAM
aauuguaacuggauugccaa

SEQ ID NO: 15606 - RNA, 20 nt, Artificial Sequence
  spacer sequence GTCN PAM
ucuuuaaaugcugucaaauu

SEQ ID NO: 15607 - RNA, 20 nt, Artificial Sequence
  spacer sequence GTCN PAM
uauuaucucaaguacuguca

SEQ ID NO: 15608 - RNA, 20 nt, Artificial Sequence
  spacer sequence GTCN PAM
uuucuuucacauuugcugua

SEQ ID NO: 15609 - RNA, 20 nt, Artificial Sequence
  spacer sequence GTCN PAM
uuuagguaaugucaucuaug

SEQ ID NO: 15610 - RNA, 20 nt, Artificial Sequence
  spacer sequence GTCN PAM
ucuaugaucaguuuuuguuu

SEQ ID NO: 15611 - RNA, 20 nt, Artificial Sequence
  spacer sequence GTCN PAM
gcaaaaaaugaaacaaaaac

SEQ ID NO: 15612 - RNA, 20 nt, Artificial Sequence
  spacer sequence GTCN PAM
cuaccaaaaauacagaaauu

SEQ ID NO: 15613 - RNA, 20 nt, Artificial Sequence
  spacer sequence GTCN PAM
ggcuggucucaaacucccga

SEQ ID NO: 15614 - RNA, 20 nt, Artificial Sequence
  spacer sequence GTCN PAM
caaacucccgaccuuaggug

SEQ ID NO: 15615 - RNA, 20 nt, Artificial Sequence
  spacer sequence GTCN PAM
ggaguuugagaccagccuga

SEQ ID NO: 15616 - RNA, 20 nt, Artificial Sequence
  spacer sequence GTCN PAM
uaaauaauagguggucaaaa

SEQ ID NO: 15617 - RNA, 20 nt, Artificial Sequence
  spacer sequence GTCN PAM
aaauguuucuaaaggguacc

SEQ ID NO: 15618 - RNA, 20 nt, Artificial Sequence
  spacer sequence GTCN PAM
aagguacccuuuagaaacau

SEQ ID NO: 15619 - RNA, 20 nt, Artificial Sequence
  spacer sequence GTCN PAM
acacuagcccacaugccaau

SEQ ID NO: 15620 - RNA, 20 nt, Artificial Sequence
  spacer sequence GTCN PAM
uugucagucacuuacacuau

SEQ ID NO: 15621 - RNA, 20 nt, Artificial Sequence
  spacer sequence GTCN PAM
gucacuuacacuauuucuca

SEQ ID NO: 15622 - RNA, 20 nt, Artificial Sequence
  spacer sequence GTCN PAM
cuuacacuauuucucauucc

SEQ ID NO: 15623 - RNA, 20 nt, Artificial Sequence
  spacer sequence GTCN PAM
uuuugcccacaacauaucca

SEQ ID NO: 15624 - RNA, 20 nt, Artificial Sequence
  spacer sequence GTCN PAM
ccuagaagcccuuauuucuu

SEQ ID NO: 15625 - RNA, 20 nt, Artificial Sequence
  spacer sequence GTCN PAM
uccuggaugaugaggcagcu

SEQ ID NO: 15626 - RNA, 20 nt, Artificial Sequence
  spacer sequence GTCN PAM
cuuggcacacaguguggcug

SEQ ID NO: 15627 - RNA, 20 nt, Artificial Sequence
  spacer sequence GTCN PAM
aacaagcuuuuguuuguggc

SEQ ID NO: 15628 - RNA, 20 nt, Artificial Sequence
  spacer sequence GTCN PAM
gacauuugaaauucuaacag

SEQ ID NO: 15629 - RNA, 20 nt, Artificial Sequence
  spacer sequence GTCN PAM
gacuuucuuuucagcuuccu

SEQ ID NO: 15630 - RNA, 20 nt, Artificial Sequence
  spacer sequence GTCN PAM
uagaggggaaagaaccucug

SEQ ID NO: 15631 - RNA, 20 nt, Artificial Sequence
  spacer sequence GTCN PAM
cuagcaucucugcuuuccuu

SEQ ID NO: 15632 - RNA, 20 nt, Artificial Sequence
  spacer sequence GTCN PAM
auuuacuaaccacuuuuauc

SEQ ID NO: 15633 - RNA, 20 nt, Artificial Sequence
  spacer sequence GTCN PAM
uccugcuuuggggguuauua

SEQ ID NO: 15634 - RNA, 20 nt, Artificial Sequence
  spacer sequence GTCN PAM
cauaucaucaaaaugauaaa

SEQ ID NO: 15635 - RNA, 20 nt, Artificial Sequence
  spacer sequence GTCN PAM
auccauguugggauacucag

SEQ ID NO: 15636 - RNA, 20 nt, Artificial Sequence
  spacer sequence GTCN PAM
cucuccuccaguccauccau

SEQ ID NO: 15637 - RNA, 20 nt, Artificial Sequence
  spacer sequence GTCN PAM
cuugucccucuccuccaguc

SEQ ID NO: 15638 - RNA, 20 nt, Artificial Sequence
  spacer sequence GTCN PAM
guauuggucccuugucccuc

SEQ ID NO: 15639 - RNA, 20 nt, Artificial Sequence
  spacer sequence GTCN PAM
uuccugcccacuccccaucu

SEQ ID NO: 15640 - RNA, 20 nt, Artificial Sequence
  spacer sequence GTCN PAM
ucuauauuaguaacagaccc

SEQ ID NO: 15641 - RNA, 20 nt, Artificial Sequence
  spacer sequence GTCN PAM
guuacuaauauagaggacug

SEQ ID NO: 15642 - RNA, 20 nt, Artificial Sequence
  spacer sequence GTCN PAM
accaacuccauccucuagaa

SEQ ID NO: 15643 - RNA, 20 nt, Artificial Sequence
  spacer sequence GTCN PAM
acaggggagaacucggcaug

SEQ ID NO: 15644 - RNA, 20 nt, Artificial Sequence
  spacer sequence GTCN PAM
ucacuuaacauccccuagca

SEQ ID NO: 15645 - RNA, 20 nt, Artificial Sequence
  spacer sequence GTCN PAM
ucugaucagaguauuucagc

SEQ ID NO: 15646 - RNA, 20 nt, Artificial Sequence
  spacer sequence GTCN PAM
aacuccuuaagccaucauuc

SEQ ID NO: 15647 - RNA, 20 nt, Artificial Sequence
  spacer sequence GTCN PAM
uaguuccccguacccaucaa

SEQ ID NO: 15648 - RNA, 20 nt, Artificial Sequence
  spacer sequence GTCN PAM
accuagucaccuuagcaaga

SEQ ID NO: 15649 - RNA, 20 nt, Artificial Sequence
  spacer sequence GTCN PAM
ccuuagcaagaagaaucaau

SEQ ID NO: 15650 - RNA, 20 nt, Artificial Sequence
  spacer sequence GTCN PAM
gggaguggugcaugggauga

SEQ ID NO: 15651 - RNA, 20 nt, Artificial Sequence
  spacer sequence GTCN PAM
cuguauugaagaaacucauu

SEQ ID NO: 15652 - RNA, 20 nt, Artificial Sequence
  spacer sequence GTCN PAM
caugcugugcugguacuuuc

SEQ ID NO: 15653 - RNA, 20 nt, Artificial Sequence
  spacer sequence GTCN PAM
uuuauaugcuauuuguugaa

SEQ ID NO: 15654 - RNA, 20 nt, Artificial Sequence
  spacer sequence GTCN PAM
gguuggcacauaaacuucac

SEQ ID NO: 15655 - RNA, 20 nt, Artificial Sequence
  spacer sequence GTCN PAM
gacagaguuaccaaaaaaug

SEQ ID NO: 15656 - RNA, 20 nt, Artificial Sequence
  spacer sequence GTCN PAM
gacuuuaccaaccuggcgca

SEQ ID NO: 15657 - RNA, 20 nt, Artificial Sequence
  spacer sequence GTCN PAM
uuuuuugguaacucugucag

SEQ ID NO: 15658 - RNA, 20 nt, Artificial Sequence
  spacer sequence GTCN PAM
gcuauagaguugcacaacca

SEQ ID NO: 15659 - RNA, 20 nt, Artificial Sequence
  spacer sequence GTCN PAM
ucugcaaagaaguuagucuc

SEQ ID NO: 15660 - RNA, 20 nt, Artificial Sequence
  spacer sequence GTCN PAM
cagccaccugcgcauccuca

SEQ ID NO: 15661 - RNA, 20 nt, Artificial Sequence
  spacer sequence GTCN PAM
uuuuuaguagugcugcauuu

SEQ ID NO: 15662 - RNA, 20 nt, Artificial Sequence
  spacer sequence GTCN PAM
auguuugcugcccucuggca

SEQ ID NO: 15663 - RNA, 20 nt, Artificial Sequence
  spacer sequence GTCN PAM
uaacuaucauuugaaaugcu

SEQ ID NO: 15664 - RNA, 20 nt, Artificial Sequence
  spacer sequence GTCN PAM
ggaguucaagaucaguuugg

SEQ ID NO: 15665 - RNA, 20 nt, Artificial Sequence
  spacer sequence GTCN PAM
aaacugaucuugaacuccug

SEQ ID NO: 15666 - RNA, 20 nt, Artificial Sequence
  spacer sequence GTCN PAM
cuacuaaaaauacaaaauua

SEQ ID NO: 15667 - RNA, 20 nt, Artificial Sequence
  spacer sequence GTCN PAM
caccaaaaaaagaaaaaaga

SEQ ID NO: 15668 - RNA, 20 nt, Artificial Sequence
  spacer sequence GTCN PAM
gcccagccuggagaacugag

SEQ ID NO: 15669 - RNA, 20 nt, Artificial Sequence
  spacer sequence GTCN PAM
aaacacccuaggcaucauca

SEQ ID NO: 15670 - RNA, 20 nt, Artificial Sequence
  spacer sequence GTCN PAM
uaccuggccacuuggcucuc

SEQ ID NO: 15671 - RNA, 20 nt, Artificial Sequence
  spacer sequence GTCN PAM
gugccugcguaguguugggu

SEQ ID NO: 15672 - RNA, 20 nt, Artificial Sequence
  spacer sequence GTCN PAM
uuagcacccaaauagguuca

SEQ ID NO: 15673 - RNA, 20 nt, Artificial Sequence
  spacer sequence GTCN PAM
acacaaaucugccaaauaaa

SEQ ID NO: 15674 - RNA, 20 nt, Artificial Sequence
  spacer sequence GTCN PAM
ucuccuuaagcggagaugcu

SEQ ID NO: 15675 - RNA, 20 nt, Artificial Sequence
  spacer sequence GTCN PAM
uauucaucaguaugucuucu

SEQ ID NO: 15676 - RNA, 20 nt, Artificial Sequence
  spacer sequence GTCN PAM
ccaacucagucuuauucauc

SEQ ID NO: 15677 - RNA, 20 nt, Artificial Sequence
  spacer sequence GTCN PAM
aggcaggaggaucacuggag

SEQ ID NO: 15678 - RNA, 20 nt, Artificial Sequence
  spacer sequence GTCN PAM
ugaacuccugggcuccagug

SEQ ID NO: 15679 - RNA, 20 nt, Artificial Sequence
  spacer sequence GTCN PAM
ucccagcuacucaggaggcu

SEQ ID NO: 15680 - RNA, 20 nt, Artificial Sequence
  spacer sequence GTCN PAM
cagcuacucaggaggcugag

SEQ ID NO: 15681 - RNA, 20 nt, Artificial Sequence
  spacer sequence GTCN PAM
ccucagccuccugaguagcu

SEQ ID NO: 15682 - RNA, 20 nt, Artificial Sequence
  spacer sequence GTCN PAM
cgcuguguugccuaggcuag

SEQ ID NO: 15683 - RNA, 20 nt, Artificial Sequence
  spacer sequence GTCN PAM
caaaaacaaacaaacaaaca

SEQ ID NO: 15684 - RNA, 20 nt, Artificial Sequence
  spacer sequence GTCN PAM
uuuguuuguuuguuuguuug

SEQ ID NO: 15685 - RNA, 20 nt, Artificial Sequence
  spacer sequence GTCN PAM
gagaagcgcaugaguacugg

SEQ ID NO: 15686 - RNA, 20 nt, Artificial Sequence
  spacer sequence GTCN PAM
uuaccaacuucuauaaaauc

SEQ ID NO: 15687 - RNA, 20 nt, Artificial Sequence
  spacer sequence GTCN PAM
uucaggguagcaccaaagua

SEQ ID NO: 15688 - RNA, 20 nt, Artificial Sequence
  spacer sequence GTCN PAM
ugaggagacccaaacaguua

SEQ ID NO: 15689 - RNA, 20 nt, Artificial Sequence
  spacer sequence GTCN PAM
ccucaagacucuagccgucu

SEQ ID NO: 15690 - RNA, 20 nt, Artificial Sequence
  spacer sequence GTCN PAM
guaaccuuuaacuguuuggg

SEQ ID NO: 15691 - RNA, 20 nt, Artificial Sequence
  spacer sequence GTCN PAM
gucuguaaccuuuaacuguu

SEQ ID NO: 15692 - RNA, 20 nt, Artificial Sequence
  spacer sequence GTCN PAM
uucauuuuaaguguacaguu

SEQ ID NO: 15693 - RNA, 20 nt, Artificial Sequence
  spacer sequence GTCN PAM
accagucuagaaagcccccu

SEQ ID NO: 15694 - RNA, 20 nt, Artificial Sequence
  spacer sequence GTCN PAM
agaaagcccccucaugcccc

SEQ ID NO: 15695 - RNA, 20 nt, Artificial Sequence
  spacer sequence GTCN PAM
auccccuucccuaacccucu

SEQ ID NO: 15696 - RNA, 20 nt, Artificial Sequence
  spacer sequence GTCN PAM
gaggguuagggaaggggauu

SEQ ID NO: 15697 - RNA, 20 nt, Artificial Sequence
  spacer sequence GTCN PAM
auuuguaacaaauucuagaa

SEQ ID NO: 15698 - RNA, 20 nt, Artificial Sequence
  spacer sequence GTCN PAM
uuuguguuuaauuucuucca

SEQ ID NO: 15699 - RNA, 20 nt, Artificial Sequence
  spacer sequence GTCN PAM
caacccacauggcaaccaau

SEQ ID NO: 15700 - RNA, 20 nt, Artificial Sequence
  spacer sequence GTCN PAM
aaaaguggucacaacccaca

SEQ ID NO: 15701 - RNA, 20 nt, Artificial Sequence
  spacer sequence GTCN PAM
auuguagcacuguucauagu

SEQ ID NO: 15702 - RNA, 20 nt, Artificial Sequence
  spacer sequence GTCN PAM
acauuucucuuagguaaaca

SEQ ID NO: 15703 - RNA, 20 nt, Artificial Sequence
  spacer sequence GTCN PAM
agggagcccucauuuuguca

SEQ ID NO: 15704 - RNA, 20 nt, Artificial Sequence
  spacer sequence GTCN PAM
uccuccaggcugccccccuc

SEQ ID NO: 15705 - RNA, 20 nt, Artificial Sequence
  spacer sequence GTCN PAM
uccuauuccgaauagaaacc

SEQ ID NO: 15706 - RNA, 20 nt, Artificial Sequence
  spacer sequence GTCN PAM
cuucccaucauuuccuuagu

SEQ ID NO: 15707 - RNA, 20 nt, Artificial Sequence
  spacer sequence GTCN PAM
aauuuauuuggccugauuca

SEQ ID NO: 15708 - RNA, 20 nt, Artificial Sequence
  spacer sequence GTCN PAM
gagauaacuuaaguguggug

SEQ ID NO: 15709 - RNA, 20 nt, Artificial Sequence
  spacer sequence GTCN PAM
uaagagcccccacuagcuca

SEQ ID NO: 15710 - RNA, 20 nt, Artificial Sequence
  spacer sequence GTCN PAM
auuucugagcuagugggggc

SEQ ID NO: 15711 - RNA, 20 nt, Artificial Sequence
  spacer sequence GTCN PAM
acuaaguccauuucugagcu

SEQ ID NO: 15712 - RNA, 20 nt, Artificial Sequence
  spacer sequence GTCN PAM
aggagaugacuucuaccuug

SEQ ID NO: 15713 - RNA, 20 nt, Artificial Sequence
  spacer sequence GTCN PAM
ucuccuugacucuccaugcu

SEQ ID NO: 15714 - RNA, 20 nt, Artificial Sequence
  spacer sequence GTCN PAM
uucuucccaaggccuuuggc

SEQ ID NO: 15715 - RNA, 20 nt, Artificial Sequence
  spacer sequence GTCN PAM
cacacaacacuccagggagg

SEQ ID NO: 15716 - RNA, 20 nt, Artificial Sequence
  spacer sequence GTCN PAM
acagcacugggcagcagcug

SEQ ID NO: 15717 - RNA, 20 nt, Artificial Sequence
  spacer sequence GTCN PAM
uucugcuuccuguucaccuc

SEQ ID NO: 15718 - RNA, 20 nt, Artificial Sequence
  spacer sequence GTCN PAM
cccccagggguccuucugcu

SEQ ID NO: 15719 - RNA, 20 nt, Artificial Sequence
  spacer sequence GTCN PAM
cacuggaggcccugucuccc

SEQ ID NO: 15720 - RNA, 20 nt, Artificial Sequence
  spacer sequence GTCN PAM
acuuccccuccacuccccgu

SEQ ID NO: 15721 - RNA, 20 nt, Artificial Sequence
  spacer sequence GTCN PAM
uuuguccacuuccccuccac

SEQ ID NO: 15722 - RNA, 20 nt, Artificial Sequence
  spacer sequence GTCN PAM
ugucuuuuguccacuucccc

SEQ ID NO: 15723 - RNA, 20 nt, Artificial Sequence
  spacer sequence GTCN PAM
aagauggcuguccugucuuu

SEQ ID NO: 15724 - RNA, 20 nt, Artificial Sequence
  spacer sequence GTCN PAM
cuguucuguuuucuucaguu

SEQ ID NO: 15725 - RNA, 20 nt, Artificial Sequence
  spacer sequence GTCN PAM
gcaucacccucucucacucu

SEQ ID NO: 15726 - RNA, 20 nt, Artificial Sequence
  spacer sequence GTCN PAM
ucccacucucccauguggcc

SEQ ID NO: 15727 - RNA, 20 nt, Artificial Sequence
  spacer sequence GTCN PAM
cugcccaguuuagaggccau

SEQ ID NO: 15728 - RNA, 20 nt, Artificial Sequence
  spacer sequence GTCN PAM
ccuccccacucuggaccugg

SEQ ID NO: 15729 - RNA, 20 nt, Artificial Sequence
  spacer sequence GTCN PAM
agaguggggaggugaccagg

SEQ ID NO: 15730 - RNA, 20 nt, Artificial Sequence
  spacer sequence GTCN PAM
uauaaaucuuaugcaauuuu

SEQ ID NO: 15731 - RNA, 20 nt, Artificial Sequence
  spacer sequence GTCN PAM
ccuuugauaucucaucucac

SEQ ID NO: 15732 - RNA, 20 nt, Artificial Sequence
  spacer sequence GTCN PAM
ggcuuugccaauuggagauu

SEQ ID NO: 15733 - RNA, 20 nt, Artificial Sequence
  spacer sequence GTCN PAM
guauugccccaagucuggcu

SEQ ID NO: 15734 - RNA, 20 nt, Artificial Sequence
  spacer sequence GTCN PAM
ucacagaaccagucuguauu

SEQ ID NO: 15735 - RNA, 20 nt, Artificial Sequence
  spacer sequence GTCN PAM
auauuuuaaauuccagcuga

SEQ ID NO: 15736 - RNA, 20 nt, Artificial Sequence
  spacer sequence GTCN PAM
gaagaaaagggaaaagggag

SEQ ID NO: 15737 - RNA, 20 nt, Artificial Sequence
  spacer sequence GTCN PAM
uauucuuuuccuuuuuccuc

SEQ ID NO: 15738 - RNA, 20 nt, Artificial Sequence
  spacer sequence GTCN PAM
gggggaggcaagucaguugg

SEQ ID NO: 15739 - RNA, 20 nt, Artificial Sequence
  spacer sequence GTCN PAM
guugggaacacagauccuaa

SEQ ID NO: 15740 - RNA, 20 nt, Artificial Sequence
  spacer sequence GTCN PAM
acccauccaucacauauagg

SEQ ID NO: 15741 - RNA, 20 nt, Artificial Sequence
  spacer sequence GTCN PAM
ggcuguccacccauccauca

SEQ ID NO: 15742 - RNA, 20 nt, Artificial Sequence
  spacer sequence GTCN PAM
auuuuucaucugucgggcug

SEQ ID NO: 15743 - RNA, 20 nt, Artificial Sequence
  spacer sequence GTCN PAM
gcacucuccccuccucauaa

SEQ ID NO: 15744 - RNA, 20 nt, Artificial Sequence
  spacer sequence GTCN PAM
acacggcauggcauacaaau

SEQ ID NO: 15745 - RNA, 20 nt, Artificial Sequence
  spacer sequence GTCN PAM
gccaguccucuucuacccca

SEQ ID NO: 15746 - RNA, 20 nt, Artificial Sequence
  spacer sequence GTCN PAM
ucuucuaccccacccacgcc

SEQ ID NO: 15747 - RNA, 20 nt, Artificial Sequence
  spacer sequence GTCN PAM
agugcaagcuaacaguugcu

SEQ ID NO: 15748 - RNA, 20 nt, Artificial Sequence
  spacer sequence GTCN PAM
auacaacuuugaagcuaguc

SEQ ID NO: 15749 - RNA, 20 nt, Artificial Sequence
  spacer sequence GTCN PAM
aagaguagaugccauaucuc

SEQ ID NO: 15750 - RNA, 20 nt, Artificial Sequence
  spacer sequence GTCN PAM
auacagguaauaacauaggc

SEQ ID NO: 15751 - RNA, 20 nt, Artificial Sequence
  spacer sequence GTCN PAM
ugucuagcugccuuccuuau

SEQ ID NO: 15752 - RNA, 20 nt, Artificial Sequence
  spacer sequence GTCN PAM
agcugccuuccuuaucacag

SEQ ID NO: 15753 - RNA, 20 nt, Artificial Sequence
  spacer sequence GTCN PAM
aucaguaccucagaguagaa

SEQ ID NO: 15754 - RNA, 20 nt, Artificial Sequence
  spacer sequence GTCN PAM
gguuugcccauggggcacag

SEQ ID NO: 15755 - RNA, 20 nt, Artificial Sequence
  spacer sequence GTCN PAM
ggcuguuuuccagggugggg

SEQ ID NO: 15756 - RNA, 20 nt, Artificial Sequence
  spacer sequence GTCN PAM
gcaccccacccuggaaaaca

SEQ ID NO: 15757 - RNA, 20 nt, Artificial Sequence
  spacer sequence GTCN PAM
uaacagacacacguaugugu

SEQ ID NO: 15758 - RNA, 20 nt, Artificial Sequence
  spacer sequence GTCN PAM
guuaugacguuauauguaag

SEQ ID NO: 15759 - RNA, 20 nt, Artificial Sequence
  spacer sequence GTCN PAM
aaauauucucaaugggcccu

SEQ ID NO: 15760 - RNA, 20 nt, Artificial Sequence
  spacer sequence GTCN PAM
uugagcaggaaaagaauuac

SEQ ID NO: 15761 - RNA, 20 nt, Artificial Sequence
  spacer sequence GTCN PAM
aacuguaauuccaggcucua

SEQ ID NO: 15762 - RNA, 20 nt, Artificial Sequence
  spacer sequence GTCN PAM
uuuuucugagagucucuaaa

SEQ ID NO: 15763 - RNA, 20 nt, Artificial Sequence
  spacer sequence GTCN PAM
cuaaauuacaaggguguuuu

SEQ ID NO: 15764 - RNA, 20 nt, Artificial Sequence
  spacer sequence GTCN PAM
cccucauaugugaaaaguca

SEQ ID NO: 15765 - RNA, 20 nt, Artificial Sequence
  spacer sequence GTCN PAM
auugauaaugaaggcuuuag

SEQ ID NO: 15766 - RNA, 20 nt, Artificial Sequence
  spacer sequence GTCN PAM
gaaaaacaaaucaugacuua

SEQ ID NO: 15767 - RNA, 20 nt, Artificial Sequence
  spacer sequence GTCN PAM
ugauuuguuuuuccgacuuc

SEQ ID NO: 15768 - RNA, 20 nt, Artificial Sequence
  spacer sequence GTCN PAM
aauacacguuuacagaaugc

SEQ ID NO: 15769 - RNA, 20 nt, Artificial Sequence
  spacer sequence GTCN PAM
cacgaggcaacacaggcuac

SEQ ID NO: 15770 - RNA, 20 nt, Artificial Sequence
  spacer sequence GTCN PAM
cccaucugugguagccugug

SEQ ID NO: 15771 - RNA, 20 nt, Artificial Sequence
  spacer sequence GTCN PAM
acucccacccugucccccau

SEQ ID NO: 15772 - RNA, 20 nt, Artificial Sequence
  spacer sequence GTCN PAM
agggcagaacuggagcuuug

SEQ ID NO: 15773 - RNA, 20 nt, Artificial Sequence
  spacer sequence GTCN PAM
cugccugggaaaugguuuca

SEQ ID NO: 15774 - RNA, 20 nt, Artificial Sequence
  spacer sequence GTCN PAM
gacaauaagucugccauugu

SEQ ID NO: 15775 - RNA, 20 nt, Artificial Sequence
  spacer sequence GTCN PAM
gacuggcagcaccagccuag

SEQ ID NO: 15776 - RNA, 20 nt, Artificial Sequence
  spacer sequence GTCN PAM
gccauuguccucuggucagc

SEQ ID NO: 15777 - RNA, 20 nt, Artificial Sequence
  spacer sequence GTCN PAM
ucuggucagcucuggacaca

SEQ ID NO: 15778 - RNA, 20 nt, Artificial Sequence
  spacer sequence GTCN PAM
gcucuggacacacagcaaaa

SEQ ID NO: 15779 - RNA, 20 nt, Artificial Sequence
  spacer sequence GTCN PAM
agagcugaccagaggacaau

SEQ ID NO: 15780 - RNA, 20 nt, Artificial Sequence
  spacer sequence GTCN PAM
caaauccuugccuugaaccu

SEQ ID NO: 15781 - RNA, 20 nt, Artificial Sequence
  spacer sequence GTCN PAM
gugaggagagaggguuguac

SEQ ID NO: 15782 - RNA, 20 nt, Artificial Sequence
  spacer sequence GTCN PAM
gggcuugcauuccauaaaug

SEQ ID NO: 15783 - RNA, 20 nt, Artificial Sequence
  spacer sequence GTCN PAM
guguggucagggcuugcauu

SEQ ID NO: 15784 - RNA, 20 nt, Artificial Sequence
  spacer sequence GTCN PAM
uggcauguaaguaagucugu

SEQ ID NO: 15785 - RNA, 20 nt, Artificial Sequence
  spacer sequence GTCN PAM
uacaucaaccccuuccucaa

SEQ ID NO: 15786 - RNA, 20 nt, Artificial Sequence
  spacer sequence GTCN PAM
cagucauaggccugaaaagc

SEQ ID NO: 15787 - RNA, 20 nt, Artificial Sequence
  spacer sequence GTCN PAM
uaggccugaaaagcagcaug

SEQ ID NO: 15788 - RNA, 20 nt, Artificial Sequence
  spacer sequence GTCN PAM
ugcuuuacaaaaauucaguu

SEQ ID NO: 15789 - RNA, 20 nt, Artificial Sequence
  spacer sequence GTCN PAM
auggggaaauggguccugcu

SEQ ID NO: 15790 - RNA, 20 nt, Artificial Sequence
  spacer sequence GTCN PAM
uaagagaugagugaacacaa

SEQ ID NO: 15791 - RNA, 20 nt, Artificial Sequence
  spacer sequence GTCN PAM
ucacgauuacuucacgauaa

SEQ ID NO: 15792 - RNA, 20 nt, Artificial Sequence
  spacer sequence GTCN PAM
cuuuggaauccagauuuauc

SEQ ID NO: 15793 - RNA, 20 nt, Artificial Sequence
  spacer sequence GTCN PAM
acucaacacugggggaggag

SEQ ID NO: 15794 - RNA, 20 nt, Artificial Sequence
  spacer sequence GTCN PAM
gcgguguacucccuguccac

SEQ ID NO: 15795 - RNA, 20 nt, Artificial Sequence
  spacer sequence GTCN PAM
uuccaugcaguagcuaauga

SEQ ID NO: 15796 - RNA, 20 nt, Artificial Sequence
  spacer sequence GTCN PAM
uuagcuacugcauggaagga

SEQ ID NO: 15797 - RNA, 20 nt, Artificial Sequence
  spacer sequence GTCN PAM
gauuuuucagaauaugaaua

SEQ ID NO: 15798 - RNA, 20 nt, Artificial Sequence
  spacer sequence GTCN PAM
uuaaguuaaucaaucccuag

SEQ ID NO: 15799 - RNA, 20 nt, Artificial Sequence
  spacer sequence GTCN PAM
agacuuaaacugccgcuccu

SEQ ID NO: 15800 - RNA, 20 nt, Artificial Sequence
  spacer sequence GTCN PAM
agacuucaaagcacucucau

SEQ ID NO: 15801 - RNA, 20 nt, Artificial Sequence
  spacer sequence GTCN PAM
accuggaauguucuaauuca

SEQ ID NO: 15802 - RNA, 20 nt, Artificial Sequence
  spacer sequence GTCN PAM
cuaccuacgucagugccaua

SEQ ID NO: 15803 - RNA, 20 nt, Artificial Sequence
  spacer sequence GTCN PAM
gugccauauccuauaauggu

SEQ ID NO: 15804 - RNA, 20 nt, Artificial Sequence
  spacer sequence GTCN PAM
uuaucaucaccauuauagga

SEQ ID NO: 15805 - RNA, 20 nt, Artificial Sequence
  spacer sequence GTCN PAM
agccuccuacucuucucuuu

SEQ ID NO: 15806 - RNA, 20 nt, Artificial Sequence
  spacer sequence GTCN PAM
uuugggggaaauaugugccu

SEQ ID NO: 15807 - RNA, 20 nt, Artificial Sequence
  spacer sequence GTCN PAM
cauuucucccuuugcugaug

SEQ ID NO: 15808 - RNA, 20 nt, Artificial Sequence
  spacer sequence GTCN PAM
uaaaugaaaccaagcuuccu

SEQ ID NO: 15809 - RNA, 20 nt, Artificial Sequence
  spacer sequence GTCN PAM
aggcucccccuucuaucacc

SEQ ID NO: 15810 - RNA, 20 nt, Artificial Sequence
  spacer sequence GTCN PAM
uccucggccaaugaagcggu

SEQ ID NO: 15811 - RNA, 20 nt, Artificial Sequence
  spacer sequence GTCN PAM
ggguguugcagagauugcua

SEQ ID NO: 15812 - RNA, 20 nt, Artificial Sequence
  spacer sequence GTCN PAM
cucaucuccccaccuccaug

SEQ ID NO: 15813 - RNA, 20 nt, Artificial Sequence
  spacer sequence GTCN PAM
gccaggugggucccucaucu

SEQ ID NO: 15814 - RNA, 20 nt, Artificial Sequence
  spacer sequence GTCN PAM
ucucuuugggggaggacauc

SEQ ID NO: 15815 - RNA, 20 nt, Artificial Sequence
  spacer sequence GTCN PAM
ucccccaaagagaagacccc

SEQ ID NO: 15816 - RNA, 20 nt, Artificial Sequence
  spacer sequence GTCN PAM
aaagucugggagaauggagg

SEQ ID NO: 15817 - RNA, 20 nt, Artificial Sequence
  spacer sequence GTCN PAM
gggagaauggagguguggag

SEQ ID NO: 15818 - RNA, 20 nt, Artificial Sequence
  spacer sequence GTCN PAM
gaccccaagcaggaagggcc

SEQ ID NO: 15819 - RNA, 20 nt, Artificial Sequence
  spacer sequence GTCN PAM
gacccaguuauccccuccac

SEQ ID NO: 15820 - RNA, 20 nt, Artificial Sequence
  spacer sequence GTCN PAM
acauagaggcccuuccugcu

SEQ ID NO: 15821 - RNA, 20 nt, Artificial Sequence
  spacer sequence GTCN PAM
ccuuaaggagccacacaccc

SEQ ID NO: 15822 - RNA, 20 nt, Artificial Sequence
  spacer sequence GTCN PAM
gaagaggcccuggacacuga

SEQ ID NO: 15823 - RNA, 20 nt, Artificial Sequence
  spacer sequence GTCN PAM
agggccucuucugacaggcc

SEQ ID NO: 15824 - RNA, 20 nt, Artificial Sequence
  spacer sequence GTCN PAM
ccaaggcugugcccagccuu

SEQ ID NO: 15825 - RNA, 20 nt, Artificial Sequence
  spacer sequence GTCN PAM
ugugagcgguccccaaggcu

SEQ ID NO: 15826 - RNA, 20 nt, Artificial Sequence
  spacer sequence GTCN PAM
gcacacacugcugcaugucc

SEQ ID NO: 15827 - RNA, 20 nt, Artificial Sequence
  spacer sequence GTCN PAM
cgguagggaguugucggcac

SEQ ID NO: 15828 - RNA, 20 nt, Artificial Sequence
  spacer sequence GTCN PAM
gcacugauaggggucgcggu

SEQ ID NO: 15829 - RNA, 20 nt, Artificial Sequence
  spacer sequence GTCN PAM
agcccagccugggugugcau

SEQ ID NO: 15830 - RNA, 20 nt, Artificial Sequence
  spacer sequence GTCN PAM
cacaagaucacagggugugc

SEQ ID NO: 15831 - RNA, 20 nt, Artificial Sequence
  spacer sequence GTCN PAM
caggccaauucuaggaaggg

SEQ ID NO: 15832 - RNA, 20 nt, Artificial Sequence
  spacer sequence GTCN PAM
gaucaccucugcucagcucu

SEQ ID NO: 15833 - RNA, 20 nt, Artificial Sequence
  spacer sequence GTCN PAM
ccucaucugccugcuuccuu

SEQ ID NO: 15834 - RNA, 20 nt, Artificial Sequence
  spacer sequence GTCN PAM
ucuauagguccaaguucgua

SEQ ID NO: 15835 - RNA, 20 nt, Artificial Sequence
  spacer sequence GTCN PAM
aaguucguacagacccagcc

SEQ ID NO: 15836 - RNA, 20 nt, Artificial Sequence
  spacer sequence GTCN PAM
guacgaacuuggaccuauag

SEQ ID NO: 15837 - RNA, 20 nt, Artificial Sequence
  spacer sequence GTCN PAM
ggcugggucuguacgaacuu

SEQ ID NO: 15838 - RNA, 20 nt, Artificial Sequence
  spacer sequence GTCN PAM
cuagcuccucagagaacugg

SEQ ID NO: 15839 - RNA, 20 nt, Artificial Sequence
  spacer sequence GTCN PAM
ucugaguuugaucaagauuu

SEQ ID NO: 15840 - RNA, 20 nt, Artificial Sequence
  spacer sequence GTCN PAM
aacucauccagaaacuacgu

SEQ ID NO: 15841 - RNA, 20 nt, Artificial Sequence
  spacer sequence GTCN PAM
aauagaacaggaagcaggug

SEQ ID NO: 15842 - RNA, 20 nt, Artificial Sequence
  spacer sequence GTCN PAM
ccacacaggcauccaaaggg

SEQ ID NO: 15843 - RNA, 20 nt, Artificial Sequence
  spacer sequence GTCN PAM
auuucucgcuggcuuuucug

SEQ ID NO: 15844 - RNA, 20 nt, Artificial Sequence
  spacer sequence GTCN PAM
cggggcccaagccaaagagc

SEQ ID NO: 15845 - RNA, 20 nt, Artificial Sequence
  spacer sequence GTCN PAM
ugcucuaccaggccuuaggu

SEQ ID NO: 15846 - RNA, 20 nt, Artificial Sequence
  spacer sequence GTCN PAM
cucccacagagcugcagggg

SEQ ID NO: 15847 - RNA, 20 nt, Artificial Sequence
  spacer sequence GTCN PAM
caccccugcagcucuguggg

SEQ ID NO: 15848 - RNA, 20 nt, Artificial Sequence
  spacer sequence GTCN PAM
aagcccaucgugccuuauuc

SEQ ID NO: 15849 - RNA, 20 nt, Artificial Sequence
  spacer sequence GTCN PAM
aucagccuauugggccucag

SEQ ID NO: 15850 - RNA, 20 nt, Artificial Sequence
  spacer sequence GTCN PAM
ggggccaccuagccagcagg

SEQ ID NO: 15851 - RNA, 20 nt, Artificial Sequence
  spacer sequence GTCN PAM
uuucaccugcuggcuaggug

SEQ ID NO: 15852 - RNA, 20 nt, Artificial Sequence
  spacer sequence GTCN PAM
gcuacacaugagucuuuuca

SEQ ID NO: 15853 - RNA, 20 nt, Artificial Sequence
  spacer sequence GTCN PAM
aagcuccuucaacgucccac

SEQ ID NO: 15854 - RNA, 20 nt, Artificial Sequence
  spacer sequence GTCN PAM
cacuuucucaagacaguguu

SEQ ID NO: 15855 - RNA, 20 nt, Artificial Sequence
  spacer sequence GTCN PAM
ugagaaagugggacguugaa

SEQ ID NO: 15856 - RNA, 20 nt, Artificial Sequence
  spacer sequence GTCN PAM
uuuugcuagcccuggcccgu

SEQ ID NO: 15857 - RNA, 20 nt, Artificial Sequence
  spacer sequence GTCN PAM
gugaggcccaggaacaugaa

SEQ ID NO: 15858 - RNA, 20 nt, Artificial Sequence
  spacer sequence GTCN PAM
ggggagcuucauguuccugg

SEQ ID NO: 15859 - RNA, 20 nt, Artificial Sequence
  spacer sequence GTCN PAM
accccuuugguccggggagc

SEQ ID NO: 15860 - RNA, 20 nt, Artificial Sequence
  spacer sequence GTCN PAM
ccuuccacaugcuguggccc

SEQ ID NO: 15861 - RNA, 20 nt, Artificial Sequence
  spacer sequence GTCN PAM
ucucuuccuccuaauccaua

SEQ ID NO: 15862 - RNA, 20 nt, Artificial Sequence
  spacer sequence GTCN PAM
ggugcuuauggauuaggagg

SEQ ID NO: 15863 - RNA, 20 nt, Artificial Sequence
  spacer sequence GTCN PAM
agcagcuuccggagcugcac

SEQ ID NO: 15864 - RNA, 20 nt, Artificial Sequence
  spacer sequence GTCN PAM
ugcuugaggucuagcagcuu

SEQ ID NO: 15865 - RNA, 20 nt, Artificial Sequence
  spacer sequence GTCN PAM
guggcugcucucuccgaauc

SEQ ID NO: 15866 - RNA, 20 nt, Artificial Sequence
  spacer sequence GTCN PAM
ccugucugcucuacuguagc

SEQ ID NO: 15867 - RNA, 20 nt, Artificial Sequence
  spacer sequence GTCN PAM
gcucuacuguagcucccucc

SEQ ID NO: 15868 - RNA, 20 nt, Artificial Sequence
  spacer sequence GTCN PAM
ucugcccaggccugccugag

SEQ ID NO: 15869 - RNA, 20 nt, Artificial Sequence
  spacer sequence GTCN PAM
gggcuuugcccugggcacug

SEQ ID NO: 15870 - RNA, 20 nt, Artificial Sequence
  spacer sequence GTCN PAM
ugugcugcccccacagcuuu

SEQ ID NO: 15871 - RNA, 20 nt, Artificial Sequence
  spacer sequence GTCN PAM
ugagagugaaaguggacaag

SEQ ID NO: 15872 - RNA, 20 nt, Artificial Sequence
  spacer sequence GTCN PAM
acuuucacucucaagaccac

SEQ ID NO: 15873 - RNA, 20 nt, Artificial Sequence
  spacer sequence GTCN PAM
agcccaggcggggaggggac

SEQ ID NO: 15874 - RNA, 20 nt, Artificial Sequence
  spacer sequence GTCN PAM
ccuccccgccugggcuugac

SEQ ID NO: 15875 - RNA, 20 nt, Artificial Sequence
  spacer sequence GTCN PAM
gcccacagaggcacgguuaa

SEQ ID NO: 15876 - RNA, 20 nt, Artificial Sequence
  spacer sequence GTCN PAM
cuuccauucuucugccauuu

SEQ ID NO: 15877 - RNA, 20 nt, Artificial Sequence
  spacer sequence GTCN PAM
gguuuauuccaucaauacac

SEQ ID NO: 15878 - RNA, 20 nt, Artificial Sequence
  spacer sequence GTCN PAM
ugaggaguugggaagugugg

SEQ ID NO: 15879 - RNA, 20 nt, Artificial Sequence
  spacer sequence GTCN PAM
cuguguagcagccaccagcc

SEQ ID NO: 15880 - RNA, 20 nt, Artificial Sequence
  spacer sequence GTCN PAM
uauaccuuaacugguggagg

SEQ ID NO: 15881 - RNA, 20 nt, Artificial Sequence
  spacer sequence GTCN PAM
gggcaccucacuucaagccu

SEQ ID NO: 15882 - RNA, 20 nt, Artificial Sequence
  spacer sequence GTCN PAM
aacuugggagccugaguguu

SEQ ID NO: 15883 - RNA, 20 nt, Artificial Sequence
  spacer sequence GTCN PAM
gggagcagcucuuuaaccuc

SEQ ID NO: 15884 - RNA, 20 nt, Artificial Sequence
  spacer sequence GTCN PAM
ucauacacauuuuaccagug

SEQ ID NO: 15885 - RNA, 20 nt, Artificial Sequence
  spacer sequence GTCN PAM
gugaagcaagccuagcuggg

SEQ ID NO: 15886 - RNA, 20 nt, Artificial Sequence
  spacer sequence GTCN PAM
cugcauccuccucuguaaaa

SEQ ID NO: 15887 - RNA, 20 nt, Artificial Sequence
  spacer sequence GTCN PAM
gcugagcaguucaggguucu

SEQ ID NO: 15888 - RNA, 20 nt, Artificial Sequence
  spacer sequence GTCN PAM
accaugaggucggcugagca

SEQ ID NO: 15889 - RNA, 20 nt, Artificial Sequence
  spacer sequence GTCN PAM
ccacaggagcccugcccaca

SEQ ID NO: 15890 - RNA, 20 nt, Artificial Sequence
  spacer sequence GTCN PAM
caugugggcagggcuccugu

SEQ ID NO: 15891 - RNA, 20 nt, Artificial Sequence
  spacer sequence GTCN PAM
uguuucagaagaugugccaa

SEQ ID NO: 15892 - RNA, 20 nt, Artificial Sequence
  spacer sequence GTCN PAM
aaaccuguagugcuacuugc

SEQ ID NO: 15893 - RNA, 20 nt, Artificial Sequence
  spacer sequence GTCN PAM
aguggcucugucuuuaauau

SEQ ID NO: 15894 - RNA, 20 nt, Artificial Sequence
  spacer sequence GTCN PAM
uuaauaucuauaagagcaca

SEQ ID NO: 15895 - RNA, 20 nt, Artificial Sequence
  spacer sequence GTCN PAM
caggaagccaugguccuuug

SEQ ID NO: 15896 - RNA, 20 nt, Artificial Sequence
  spacer sequence GTCN PAM
uuugggggaaaugaagaaca

SEQ ID NO: 15897 - RNA, 20 nt, Artificial Sequence
  spacer sequence GTCN PAM
guacuugcaaaaggccuuuc

SEQ ID NO: 15898 - RNA, 20 nt, Artificial Sequence
  spacer sequence GTCN PAM
caaaaaaaaaaaaaaaaaaa

SEQ ID NO: 15899 - RNA, 20 nt, Artificial Sequence
  spacer sequence GTCN PAM
cacaugccuguaaucccagc

SEQ ID NO: 15900 - RNA, 20 nt, Artificial Sequence
  spacer sequence GTCN PAM
ggcuggucucaaacucuuga

SEQ ID NO: 15901 - RNA, 20 nt, Artificial Sequence
  spacer sequence GTCN PAM
caaacucuugaccucaggug

SEQ ID NO: 15902 - RNA, 20 nt, Artificial Sequence
  spacer sequence GTCN PAM
agaguuugagaccagccuga

SEQ ID NO: 15903 - RNA, 20 nt, Artificial Sequence
  spacer sequence GTCN PAM
guaauuccagcacuuuggga

SEQ ID NO: 15904 - RNA, 20 nt, Artificial Sequence
  spacer sequence GTCN PAM
uaaauuuuuaugugagauga

SEQ ID NO: 15905 - RNA, 20 nt, Artificial Sequence
  spacer sequence GTCN PAM
ggccuuuccucccugaagcu

SEQ ID NO: 15906 - RNA, 20 nt, Artificial Sequence
  spacer sequence GTCN PAM
uggaaaacugagagguuugc

SEQ ID NO: 15907 - RNA, 20 nt, Artificial Sequence
  spacer sequence GTCN PAM
ugaguugcauuguuacaaca

SEQ ID NO: 15908 - RNA, 20 nt, Artificial Sequence
  spacer sequence GTCN PAM
cuccaaaugagcuuacaguu

SEQ ID NO: 15909 - RNA, 20 nt, Artificial Sequence
  spacer sequence GTCN PAM
gggaguagguaaacagugug

SEQ ID NO: 15910 - RNA, 20 nt, Artificial Sequence
  spacer sequence GTCN PAM
gcucccuccuggcucuccuc

SEQ ID NO: 15911 - RNA, 20 nt, Artificial Sequence
  spacer sequence GTCN PAM
cagccuaauaaaacugcaca

SEQ ID NO: 15912 - RNA, 20 nt, Artificial Sequence
  spacer sequence GTCN PAM
gugcaguuuuauuaggcuga

SEQ ID NO: 15913 - RNA, 20 nt, Artificial Sequence
  spacer sequence GTCN PAM
ugucacccagaaacuaugug

SEQ ID NO: 15914 - RNA, 20 nt, Artificial Sequence
  spacer sequence GTCN PAM
cccagaaacuaugugaccag

SEQ ID NO: 15915 - RNA, 20 nt, Artificial Sequence
  spacer sequence GTCN PAM
cauaguuucugggugacagg

SEQ ID NO: 15916 - RNA, 20 nt, Artificial Sequence
  spacer sequence GTCN PAM
cgaguggguaaaaugagcug

SEQ ID NO: 15917 - RNA, 20 nt, Artificial Sequence
  spacer sequence GTCN PAM
gucuggggcucccagaagac

SEQ ID NO: 15918 - RNA, 20 nt, Artificial Sequence
  spacer sequence GTCN PAM
ggggcucccagaagacacag

SEQ ID NO: 15919 - RNA, 20 nt, Artificial Sequence
  spacer sequence GTCN PAM
ucugggagccccagacagac

SEQ ID NO: 15920 - RNA, 20 nt, Artificial Sequence
  spacer sequence GTCN PAM
ggcugugucuucugggagcc

SEQ ID NO: 15921 - RNA, 20 nt, Artificial Sequence
  spacer sequence GTCN PAM
aaacaccuccuugucuuuua

SEQ ID NO: 15922 - RNA, 20 nt, Artificial Sequence
  spacer sequence GTCN PAM
uuuaaggccugggcugucua

SEQ ID NO: 15923 - RNA, 20 nt, Artificial Sequence
  spacer sequence GTCN PAM
agggggauggcuacuggcuu

SEQ ID NO: 15924 - RNA, 20 nt, Artificial Sequence
  spacer sequence GTCN PAM
gucaucuuaauacacacgga

SEQ ID NO: 15925 - RNA, 20 nt, Artificial Sequence
  spacer sequence GTCN PAM
ucuuaauacacacggaaugu

SEQ ID NO: 15926 - RNA, 20 nt, Artificial Sequence
  spacer sequence GTCN PAM
guguggaagggacagaccca

SEQ ID NO: 15927 - RNA, 20 nt, Artificial Sequence
  spacer sequence GTCN PAM
cuuccacacagacaccuuca

SEQ ID NO: 15928 - RNA, 20 nt, Artificial Sequence
  spacer sequence GTCN PAM
gucccuuccacacagacacc

SEQ ID NO: 15929 - RNA, 20 nt, Artificial Sequence
  spacer sequence GTCN PAM
uggcaaugggagcaggaaug

SEQ ID NO: 15930 - RNA, 20 nt, Artificial Sequence
  spacer sequence GTCN PAM
accuucucuaaaccugguca

SEQ ID NO: 15931 - RNA, 20 nt, Artificial Sequence
  spacer sequence GTCN PAM
cuccuagucccaagauggag

SEQ ID NO: 15932 - RNA, 20 nt, Artificial Sequence
  spacer sequence GTCN PAM
caagauggagaagccacauc

SEQ ID NO: 15933 - RNA, 20 nt, Artificial Sequence
  spacer sequence GTCN PAM
gagccuccugaggcugcaga

SEQ ID NO: 15934 - RNA, 20 nt, Artificial Sequence
  spacer sequence GTCN PAM
aaccaggagacccaagacag

SEQ ID NO: 15935 - RNA, 20 nt, Artificial Sequence
  spacer sequence GTCN PAM
ccugguuggaccccauucug

SEQ ID NO: 15936 - RNA, 20 nt, Artificial Sequence
  spacer sequence GTCN PAM
ugggucuccugguuggaccc

SEQ ID NO: 15937 - RNA, 20 nt, Artificial Sequence
  spacer sequence GTCN PAM
caaugccuggagaagugagg

SEQ ID NO: 15938 - RNA, 20 nt, Artificial Sequence
  spacer sequence GTCN PAM
aggcugcgguggguggcaug

SEQ ID NO: 15939 - RNA, 20 nt, Artificial Sequence
  spacer sequence GTCN PAM
ggcuccuggaaugccugucc

SEQ ID NO: 15940 - RNA, 20 nt, Artificial Sequence
  spacer sequence GTCN PAM
cuggaagacaguaggcuauu

SEQ ID NO: 15941 - RNA, 20 nt, Artificial Sequence
  spacer sequence GTCN PAM
uccagggacaugucuggcuc

SEQ ID NO: 15942 - RNA, 20 nt, Artificial Sequence
  spacer sequence GTCN PAM
agagaaaauuguugcagugc

SEQ ID NO: 15943 - RNA, 20 nt, Artificial Sequence
  spacer sequence GTCN PAM
gagugcagaccaagcuccca

SEQ ID NO: 15944 - RNA, 20 nt, Artificial Sequence
  spacer sequence GTCN PAM
gcacucagaccugagcgcca

SEQ ID NO: 15945 - RNA, 20 nt, Artificial Sequence
  spacer sequence GTCN PAM
uggguaggaacugcugggug

SEQ ID NO: 15946 - RNA, 20 nt, Artificial Sequence
  spacer sequence GTCN PAM
cauuucccuggcagcuauag

SEQ ID NO: 15947 - RNA, 20 nt, Artificial Sequence
  spacer sequence GTCN PAM
ucacaaaaugucacauuucc

SEQ ID NO: 15948 - RNA, 20 nt, Artificial Sequence
  spacer sequence GTCN PAM
cuugcagugggcuuuagggu

SEQ ID NO: 15949 - RNA, 20 nt, Artificial Sequence
  spacer sequence GTCN PAM
gagcuuuauuauuuuaauaa

SEQ ID NO: 15950 - RNA, 20 nt, Artificial Sequence
  spacer sequence GTCN PAM
uucauucccucucugccccc

SEQ ID NO: 15951 - RNA, 20 nt, Artificial Sequence
  spacer sequence GTCN PAM
gcugagugguacucuucaga

SEQ ID NO: 15952 - RNA, 20 nt, Artificial Sequence
  spacer sequence GTCN PAM
ugggggcagugucggcugag

SEQ ID NO: 15953 - RNA, 20 nt, Artificial Sequence
  spacer sequence GTCN PAM
ccucuuugacucacacuugc

SEQ ID NO: 15954 - RNA, 20 nt, Artificial Sequence
  spacer sequence GTCN PAM
aagaggagaccagggcccua

SEQ ID NO: 15955 - RNA, 20 nt, Artificial Sequence
  spacer sequence GTCN PAM
ugccaggcaagugugaguca

SEQ ID NO: 15956 - RNA, 20 nt, Artificial Sequence
  spacer sequence GTCN PAM
gccuggguccacccuuccuu

SEQ ID NO: 15957 - RNA, 20 nt, Artificial Sequence
  spacer sequence GTCN PAM
acccuuccuuucuuagucac

SEQ ID NO: 15958 - RNA, 20 nt, Artificial Sequence
  spacer sequence GTCN PAM
cugcaagauuucacccagcc

SEQ ID NO: 15959 - RNA, 20 nt, Artificial Sequence
  spacer sequence GTCN PAM
uauccuagcauucagauagg

SEQ ID NO: 15960 - RNA, 20 nt, Artificial Sequence
  spacer sequence GTCN PAM
accucugacuacuucugguu

SEQ ID NO: 15961 - RNA, 20 nt, Artificial Sequence
  spacer sequence GTCN PAM
gagguugacuuuuuuguucu

SEQ ID NO: 15962 - RNA, 20 nt, Artificial Sequence
  spacer sequence GTCN PAM
cgaugcugagcucccacuuc

SEQ ID NO: 15963 - RNA, 20 nt, Artificial Sequence
  spacer sequence GTCN PAM
gcugaaacagccaacucugu

SEQ ID NO: 15964 - RNA, 20 nt, Artificial Sequence
  spacer sequence GTCN PAM
cugucucccccaagcccucc

SEQ ID NO: 15965 - RNA, 20 nt, Artificial Sequence
  spacer sequence GTCN PAM
cccccaagcccuccuaguca

SEQ ID NO: 15966 - RNA, 20 nt, Artificial Sequence
  spacer sequence GTCN PAM
gaacguucucucagcauuuc

SEQ ID NO: 15967 - RNA, 20 nt, Artificial Sequence
  spacer sequence GTCN PAM
cuaagcaccaguagaaagcu

SEQ ID NO: 15968 - RNA, 20 nt, Artificial Sequence
  spacer sequence GTCN PAM
ugaaauuauauagagaggug

SEQ ID NO: 15969 - RNA, 20 nt, Artificial Sequence
  spacer sequence GTCN PAM
cugaaaaugcuuaaaagauc

SEQ ID NO: 15970 - RNA, 20 nt, Artificial Sequence
  spacer sequence GTCN PAM
ccccaaaaaaacagccuucu

SEQ ID NO: 15971 - RNA, 20 nt, Artificial Sequence
  spacer sequence GTCN PAM
accccacgcuuccacagccu

SEQ ID NO: 15972 - RNA, 20 nt, Artificial Sequence
  spacer sequence GTCN PAM
accccugcggcugcaugaga

SEQ ID NO: 15973 - RNA, 20 nt, Artificial Sequence
  spacer sequence GTCN PAM
caugcagccgcagggguaga

SEQ ID NO: 15974 - RNA, 20 nt, Artificial Sequence
  spacer sequence GTCN PAM
ggucucaugcagccgcaggg

SEQ ID NO: 15975 - RNA, 20 nt, Artificial Sequence
  spacer sequence GTCN PAM
caauuugacaauacuccuca

SEQ ID NO: 15976 - RNA, 20 nt, Artificial Sequence
  spacer sequence GTCN PAM
aauugagacucaccucauga

SEQ ID NO: 15977 - RNA, 20 nt, Artificial Sequence
  spacer sequence GTCN PAM
auugugcuguuaguaaugag

SEQ ID NO: 15978 - RNA, 20 nt, Artificial Sequence
  spacer sequence GTCN PAM
cuucuuuucucuccgauccu

SEQ ID NO: 15979 - RNA, 20 nt, Artificial Sequence
  spacer sequence GTCN PAM
uuuggcaccccauucuucca

SEQ ID NO: 15980 - RNA, 20 nt, Artificial Sequence
  spacer sequence GTCN PAM
ggacuuguaggugaaaugug

SEQ ID NO: 15981 - RNA, 20 nt, Artificial Sequence
  spacer sequence GTCN PAM
ugacaaagugguguguucuu

SEQ ID NO: 15982 - RNA, 20 nt, Artificial Sequence
  spacer sequence GTCN PAM
gcuuggggaaaaucacucau

SEQ ID NO: 15983 - RNA, 20 nt, Artificial Sequence
  spacer sequence GTCN PAM
gccgagugaggcugccuuca

SEQ ID NO: 15984 - RNA, 20 nt, Artificial Sequence
  spacer sequence GTCN PAM
agcugaaggcagccucacuc

SEQ ID NO: 15985 - RNA, 20 nt, Artificial Sequence
  spacer sequence GTCN PAM
uucccuuaggggccaaacca

SEQ ID NO: 15986 - RNA, 20 nt, Artificial Sequence
  spacer sequence GTCN PAM
aacccagugggccucucucc

SEQ ID NO: 15987 - RNA, 20 nt, Artificial Sequence
  spacer sequence GTCN PAM
gugcccugaacaacagcuua

SEQ ID NO: 15988 - RNA, 20 nt, Artificial Sequence
  spacer sequence GTCN PAM
uuauuuccuaacucucuugc

SEQ ID NO: 15989 - RNA, 20 nt, Artificial Sequence
  spacer sequence GTCN PAM
ccugcuuccgggagguggga

SEQ ID NO: 15990 - RNA, 20 nt, Artificial Sequence
  spacer sequence GTCN PAM
cagaguggccagcugugucc

SEQ ID NO: 15991 - RNA, 20 nt, Artificial Sequence
  spacer sequence GTCN PAM
aucauuuuagaauaaaucau

SEQ ID NO: 15992 - RNA, 20 nt, Artificial Sequence
  spacer sequence GTCN PAM
gccacgaaugauuuauucua

SEQ ID NO: 15993 - RNA, 20 nt, Artificial Sequence
  spacer sequence GTCN PAM
gccagaugcuguggagaugg

SEQ ID NO: 15994 - RNA, 20 nt, Artificial Sequence
  spacer sequence GTCN PAM
cauacccugcaaagcccuau

SEQ ID NO: 15995 - RNA, 20 nt, Artificial Sequence
  spacer sequence GTCN PAM
aaggauggcugggaaagggg

SEQ ID NO: 15996 - RNA, 20 nt, Artificial Sequence
  spacer sequence GTCN PAM
gaaagaacaccugggcccaa

SEQ ID NO: 15997 - RNA, 20 nt, Artificial Sequence
  spacer sequence GTCN PAM
uguuagccaaaugccagcac

SEQ ID NO: 15998 - RNA, 20 nt, Artificial Sequence
  spacer sequence GTCN PAM
ccuucacaggccagcugugg

SEQ ID NO: 15999 - RNA, 20 nt, Artificial Sequence
  spacer sequence GTCN PAM
gacuugccacaucuaaugcc

SEQ ID NO: 16000 - RNA, 20 nt, Artificial Sequence
  spacer sequence GTCN PAM
gaccacagcuggccugugaa

SEQ ID NO: 16001 - RNA, 20 nt, Artificial Sequence
  spacer sequence GTCN PAM
gucaaaccccuggaaaacuu

SEQ ID NO: 16002 - RNA, 20 nt, Artificial Sequence
  spacer sequence GTCN PAM
aaccccuggaaaacuucaga

SEQ ID NO: 16003 - RNA, 20 nt, Artificial Sequence
  spacer sequence GTCN PAM
gaaguuuuccagggguuuga

SEQ ID NO: 16004 - RNA, 20 nt, Artificial Sequence
  spacer sequence GTCN PAM
uggaucugaggaacacuguc

SEQ ID NO: 16005 - RNA, 20 nt, Artificial Sequence
  spacer sequence GTCN PAM
ugagccagcucuguccugga

SEQ ID NO: 16006 - RNA, 20 nt, Artificial Sequence
  spacer sequence GTCN PAM
acccgagcgcaccaguccuc

SEQ ID NO: 16007 - RNA, 20 nt, Artificial Sequence
  spacer sequence GTCN PAM
ucagacccuccaaggugaca

SEQ ID NO: 16008 - RNA, 20 nt, Artificial Sequence
  spacer sequence GTCN PAM
gaggacuggugcgcucgggu

SEQ ID NO: 16009 - RNA, 20 nt, Artificial Sequence
  spacer sequence GTCN PAM
ccuuggagggucugaggacu

SEQ ID NO: 16010 - RNA, 20 nt, Artificial Sequence
  spacer sequence GTCN PAM
uugucaccuuggagggucug

SEQ ID NO: 16011 - RNA, 20 nt, Artificial Sequence
  spacer sequence GTCN PAM
agugaggucuuugucaccuu

SEQ ID NO: 16012 - RNA, 20 nt, Artificial Sequence
  spacer sequence GTCN PAM
aggaaagcccuggcuauaca

SEQ ID NO: 16013 - RNA, 20 nt, Artificial Sequence
  spacer sequence GTCN PAM
uuuucuuagugagcugccuu

SEQ ID NO: 16014 - RNA, 20 nt, Artificial Sequence
  spacer sequence GTCN PAM
ccuaaauggcgaaggcagca

SEQ ID NO: 16015 - RNA, 20 nt, Artificial Sequence
  spacer sequence GTCN PAM
ucagugguaaaugcugccuu

SEQ ID NO: 16016 - RNA, 20 nt, Artificial Sequence
  spacer sequence GTCN PAM
gcaaccucaaauaaugucua

SEQ ID NO: 16017 - RNA, 20 nt, Artificial Sequence
  spacer sequence GTCN PAM
auaaugcugagauuuauaca

SEQ ID NO: 16018 - RNA, 20 nt, Artificial Sequence
  spacer sequence GTCN PAM
ggguguuaaaaggcacaugc

SEQ ID NO: 16019 - RNA, 20 nt, Artificial Sequence
  spacer sequence GTCN PAM
uugaccuuagucauaaacaa

SEQ ID NO: 16020 - RNA, 20 nt, Artificial Sequence
  spacer sequence GTCN PAM
aagacaguauuucagaacaa

SEQ ID NO: 16021 - RNA, 20 nt, Artificial Sequence
  spacer sequence GTCN PAM
uaaacaagcacuauuaaaaa

SEQ ID NO: 16022 - RNA, 20 nt, Artificial Sequence
  spacer sequence GTCN PAM
guugggauauuauguuuuuu

SEQ ID NO: 16023 - RNA, 20 nt, Artificial Sequence
  spacer sequence GTCN PAM
ugcuuugcauucugcagagc

SEQ ID NO: 16024 - RNA, 20 nt, Artificial Sequence
  spacer sequence GTCN PAM
aaaaccuacaaagacuauug

SEQ ID NO: 16025 - RNA, 20 nt, Artificial Sequence
  spacer sequence GTCN PAM
uuguagguuuuggacacagu

SEQ ID NO: 16026 - RNA, 20 nt, Artificial Sequence
  spacer sequence GTCN PAM
acaagagcacaauagucuuu

SEQ ID NO: 16027 - RNA, 20 nt, Artificial Sequence
  spacer sequence GTCN PAM
cucaagaaaugaggacaggc

SEQ ID NO: 16028 - RNA, 20 nt, Artificial Sequence
  spacer sequence GTCN PAM
ucauuucuugagagacucca

SEQ ID NO: 16029 - RNA, 20 nt, Artificial Sequence
  spacer sequence GTCN PAM
cuuacacagggcugccuccg

SEQ ID NO: 16030 - RNA, 20 nt, Artificial Sequence
  spacer sequence GTCN PAM
uaagucggcuacugcuucua

SEQ ID NO: 16031 - RNA, 20 nt, Artificial Sequence
  spacer sequence GTCN PAM
gcuacugcuucuaagucccc

SEQ ID NO: 16032 - RNA, 20 nt, Artificial Sequence
  spacer sequence GTCN PAM
ccagcuuuucuaagacauau

SEQ ID NO: 16033 - RNA, 20 nt, Artificial Sequence
  spacer sequence GTCN PAM
uagaaaagcuggggacuuag

SEQ ID NO: 16034 - RNA, 20 nt, Artificial Sequence
  spacer sequence GTCN PAM
uccaaacagcacaagacaga

SEQ ID NO: 16035 - RNA, 20 nt, Artificial Sequence
  spacer sequence GTCN PAM
ugugcuguuuggaagacaau

SEQ ID NO: 16036 - RNA, 20 nt, Artificial Sequence
  spacer sequence GTCN PAM
ccccccaccccacccgcuuu

SEQ ID NO: 16037 - RNA, 20 nt, Artificial Sequence
  spacer sequence GTCN PAM
uguauacaguuucaacagcu

SEQ ID NO: 16038 - RNA, 20 nt, Artificial Sequence
  spacer sequence GTCN PAM
ucacaguaauccaaugcucc

SEQ ID NO: 16039 - RNA, 20 nt, Artificial Sequence
  spacer sequence GTCN PAM
uuuguuacaggagcauugga

SEQ ID NO: 16040 - RNA, 20 nt, Artificial Sequence
  spacer sequence GTCN PAM
uuugugaauuuuuuuuuguu

SEQ ID NO: 16041 - RNA, 20 nt, Artificial Sequence
  spacer sequence GTCN PAM
ucgguguugguuccuauggg

SEQ ID NO: 16042 - RNA, 20 nt, Artificial Sequence
  spacer sequence GTCN PAM
ugcucaguuagggcauuauc

SEQ ID NO: 16043 - RNA, 20 nt, Artificial Sequence
  spacer sequence GTCN PAM
uggugcuuacugcccuuucu

SEQ ID NO: 16044 - RNA, 20 nt, Artificial Sequence
  spacer sequence GTCN PAM
gaauuuuagguugguucuuu

SEQ ID NO: 16045 - RNA, 20 nt, Artificial Sequence
  spacer sequence GTCN PAM
acccccacccccaaacaaca

SEQ ID NO: 16046 - RNA, 20 nt, Artificial Sequence
  spacer sequence GTCN PAM
ugaaccaaguguggaugagu

SEQ ID NO: 16047 - RNA, 20 nt, Artificial Sequence
  spacer sequence GTCN PAM
ccucuuucacaucaggccuu

SEQ ID NO: 16048 - RNA, 20 nt, Artificial Sequence
  spacer sequence GTCN PAM
cugagucugacuuuuaccca

SEQ ID NO: 16049 - RNA, 20 nt, Artificial Sequence
  spacer sequence GTCN PAM
gacuuuuacccaaacagggg

SEQ ID NO: 16050 - RNA, 20 nt, Artificial Sequence
  spacer sequence GTCN PAM
gacucagggacccggcugca

SEQ ID NO: 16051 - RNA, 20 nt, Artificial Sequence
  spacer sequence GTCN PAM
cgcagcaacuggcaaccccc

SEQ ID NO: 16052 - RNA, 20 nt, Artificial Sequence
  spacer sequence GTCN PAM
agugcaguuccacacugugc

SEQ ID NO: 16053 - RNA, 20 nt, Artificial Sequence
  spacer sequence GTCN PAM
ucuucagaacaggaaaaguc

SEQ ID NO: 16054 - RNA, 20 nt, Artificial Sequence
  spacer sequence GTCN PAM
uuugccugccaaaugcuuua

SEQ ID NO: 16055 - RNA, 20 nt, Artificial Sequence
  spacer sequence GTCN PAM
auucuccuagcaacgcuucu

SEQ ID NO: 16056 - RNA, 20 nt, Artificial Sequence
  spacer sequence GTCN PAM
ccuuggcgacagggcuggac

SEQ ID NO: 16057 - RNA, 20 nt, Artificial Sequence
  spacer sequence GTCN PAM
ccaaggagacccucagggaa

SEQ ID NO: 16058 - RNA, 20 nt, Artificial Sequence
  spacer sequence GTCN PAM
agcccugucgccaaggagac

SEQ ID NO: 16059 - RNA, 20 nt, Artificial Sequence
  spacer sequence GTCN PAM
aggcugccagugcaaagguc

SEQ ID NO: 16060 - RNA, 20 nt, Artificial Sequence
  spacer sequence GTCN PAM
ccucuauggugcuggcuuug

SEQ ID NO: 16061 - RNA, 20 nt, Artificial Sequence
  spacer sequence GTCN PAM
uuugaauccugaggaccaag

SEQ ID NO: 16062 - RNA, 20 nt, Artificial Sequence
  spacer sequence GTCN PAM
ucaggauucaaaagacaccu

SEQ ID NO: 16063 - RNA, 20 nt, Artificial Sequence
  spacer sequence GTCN PAM
uaggagagcuccuugguccu

SEQ ID NO: 16064 - RNA, 20 nt, Artificial Sequence
  spacer sequence GTCN PAM
cugguucuucugugauugcu

SEQ ID NO: 16065 - RNA, 20 nt, Artificial Sequence
  spacer sequence GTCN PAM
ucuaggcuuuagcaaucaca

SEQ ID NO: 16066 - RNA, 20 nt, Artificial Sequence
  spacer sequence GTCN PAM
gagccacuuuucuuuggagg

SEQ ID NO: 16067 - RNA, 20 nt, Artificial Sequence
  spacer sequence GTCN PAM
guguuucugucugagccacu

SEQ ID NO: 16068 - RNA, 20 nt, Artificial Sequence
  spacer sequence GTCN PAM
gaugagaaauaagagucagu

SEQ ID NO: 16069 - RNA, 20 nt, Artificial Sequence
  spacer sequence GTCN PAM
aaagauucaagcugagaaac

SEQ ID NO: 16070 - RNA, 20 nt, Artificial Sequence
  spacer sequence GTCN PAM
cagcuuuggcuggcuuggau

SEQ ID NO: 16071 - RNA, 20 nt, Artificial Sequence
  spacer sequence GTCN PAM
ucuuuuccacagguucuccu

SEQ ID NO: 16072 - RNA, 20 nt, Artificial Sequence
  spacer sequence GTCN PAM
acgguuagccccuggcuugg

SEQ ID NO: 16073 - RNA, 20 nt, Artificial Sequence
  spacer sequence GTCN PAM
guguggcucugcugugcuca

SEQ ID NO: 16074 - RNA, 20 nt, Artificial Sequence
  spacer sequence GTCN PAM
cagaaaacgguucuguggaa

SEQ ID NO: 16075 - RNA, 20 nt, Artificial Sequence
  spacer sequence GTCN PAM
ugugcuuccacagaaccguu

SEQ ID NO: 16076 - RNA, 20 nt, Artificial Sequence
  spacer sequence GTCN PAM
ugagaaguccaggaaaagau

SEQ ID NO: 16077 - RNA, 20 nt, Artificial Sequence
  spacer sequence GTCN PAM
aggaaaagaugcagcuucca

SEQ ID NO: 16078 - RNA, 20 nt, Artificial Sequence
  spacer sequence GTCN PAM
accugagaccugagaaaaca

SEQ ID NO: 16079 - RNA, 20 nt, Artificial Sequence
  spacer sequence GTCN PAM
cagguagaccaucgagcugc

SEQ ID NO: 16080 - RNA, 20 nt, Artificial Sequence
  spacer sequence GTCN PAM
uugguagcuaaagaacaaca

SEQ ID NO: 16081 - RNA, 20 nt, Artificial Sequence
  spacer sequence GTCN PAM
aguucuuuggggagggccag

SEQ ID NO: 16082 - RNA, 20 nt, Artificial Sequence
  spacer sequence GTCN PAM
acuggggcucuccgaacagc

SEQ ID NO: 16083 - RNA, 20 nt, Artificial Sequence
  spacer sequence GTCN PAM
agcauccacugaaguccuga

SEQ ID NO: 16084 - RNA, 20 nt, Artificial Sequence
  spacer sequence GTCN PAM
ugaaguggugaaggagcccc

SEQ ID NO: 16085 - RNA, 20 nt, Artificial Sequence
  spacer sequence GTCN PAM
ggggcuccuucaccacuuca

SEQ ID NO: 16086 - RNA, 20 nt, Artificial Sequence
  spacer sequence GTCN PAM
ccgagccacacauuuugggg

SEQ ID NO: 16087 - RNA, 20 nt, Artificial Sequence
  spacer sequence GTCN PAM
aucuugacuccucccuuccu

SEQ ID NO: 16088 - RNA, 20 nt, Artificial Sequence
  spacer sequence GTCN PAM
agauggaccccaaaaugugu

SEQ ID NO: 16089 - RNA, 20 nt, Artificial Sequence
  spacer sequence GTCN PAM
gcaaauccugccgguuuucc

SEQ ID NO: 16090 - RNA, 20 nt, Artificial Sequence
  spacer sequence GTCN PAM
agaauccagccccuucucac

SEQ ID NO: 16091 - RNA, 20 nt, Artificial Sequence
  spacer sequence GTCN PAM
ccaccacccugguccacgcc

SEQ ID NO: 16092 - RNA, 20 nt, Artificial Sequence
  spacer sequence GTCN PAM
acgccaccaucacuugccua

SEQ ID NO: 16093 - RNA, 20 nt, Artificial Sequence
  spacer sequence GTCN PAM
gaaggcaaauuuuaggcaag

SEQ ID NO: 16094 - RNA, 20 nt, Artificial Sequence
  spacer sequence GTCN PAM
caaaaugcggcccaagagac

SEQ ID NO: 16095 - RNA, 20 nt, Artificial Sequence
  spacer sequence GTCN PAM
cuugggccgcauuuugagac

SEQ ID NO: 16096 - RNA, 20 nt, Artificial Sequence
  spacer sequence GTCN PAM
uaugacaucacuccuccagu

SEQ ID NO: 16097 - RNA, 20 nt, Artificial Sequence
  spacer sequence GTCN PAM
uaugacuugcgcuuccagag

SEQ ID NO: 16098 - RNA, 20 nt, Artificial Sequence
  spacer sequence GTCN PAM
gagccaaaaaucccugcucu

SEQ ID NO: 16099 - RNA, 20 nt, Artificial Sequence
  spacer sequence GTCN PAM
uucaaggagccagcuggucu

SEQ ID NO: 16100 - RNA, 20 nt, Artificial Sequence
  spacer sequence GTCN PAM
ccucuccuccuccuccugca

SEQ ID NO: 16101 - RNA, 20 nt, Artificial Sequence
  spacer sequence GTCN PAM
gaguggaaagagugcaggag

SEQ ID NO: 16102 - RNA, 20 nt, Artificial Sequence
  spacer sequence GTCN PAM
cugcucucuacacacucuuc

SEQ ID NO: 16103 - RNA, 20 nt, Artificial Sequence
  spacer sequence GTCN PAM
ccaugcaccccuuaccccuc

SEQ ID NO: 16104 - RNA, 20 nt, Artificial Sequence
  spacer sequence GTCN PAM
cuccccagcuagaaaggggg

SEQ ID NO: 16105 - RNA, 20 nt, Artificial Sequence
  spacer sequence GTCN PAM
ggcagcccaaccugggggca

SEQ ID NO: 16106 - RNA, 20 nt, Artificial Sequence
  spacer sequence GTCN PAM
cagggccuguggggaaaaug

SEQ ID NO: 16107 - RNA, 20 nt, Artificial Sequence
  spacer sequence GTCN PAM
aggguucccccaaaccagcu

SEQ ID NO: 16108 - RNA, 20 nt, Artificial Sequence
  spacer sequence GTCN PAM
uuccuaaggcuuagguggag

SEQ ID NO: 16109 - RNA, 20 nt, Artificial Sequence
  spacer sequence GTCN PAM
cuuugccauggccuccuucu

SEQ ID NO: 16110 - RNA, 20 nt, Artificial Sequence
  spacer sequence GTCN PAM
aauuguaugcuaggguggga

SEQ ID NO: 16111 - RNA, 20 nt, Artificial Sequence
  spacer sequence GTCN PAM
gaauuaaaagaacucgccaa

SEQ ID NO: 16112 - RNA, 20 nt, Artificial Sequence
  spacer sequence GTCN PAM
uucuaugugacuccacucuu

SEQ ID NO: 16113 - RNA, 20 nt, Artificial Sequence
  spacer sequence GTCN PAM
cauagaaugacauuacuucc

SEQ ID NO: 16114 - RNA, 20 nt, Artificial Sequence
  spacer sequence GTCN PAM
gcaugaauagcaucuuuaag

SEQ ID NO: 16115 - RNA, 20 nt, Artificial Sequence
  spacer sequence GTCN PAM
gaaaucagagggaaauauua

SEQ ID NO: 16116 - RNA, 20 nt, Artificial Sequence
  spacer sequence GTCN PAM
ucaguuuugaaucagauuag

SEQ ID NO: 16117 - RNA, 20 nt, Artificial Sequence
  spacer sequence GTCN PAM
uuaauagugcaguuauguag

SEQ ID NO: 16118 - RNA, 20 nt, Artificial Sequence
  spacer sequence GTCN PAM
acguauuuuccaagccacag

SEQ ID NO: 16119 - RNA, 20 nt, Artificial Sequence
  spacer sequence GTCN PAM
uguaagacacuaaggggcag

SEQ ID NO: 16120 - RNA, 20 nt, Artificial Sequence
  spacer sequence GTCN PAM
uacaugacuagcugcuucuu

SEQ ID NO: 16121 - RNA, 20 nt, Artificial Sequence
  spacer sequence GTCN PAM
uuaauucuucuccaagcuuu

SEQ ID NO: 16122 - RNA, 20 nt, Artificial Sequence
  spacer sequence GTCN PAM
uuggccgagcaaguauuacg

SEQ ID NO: 16123 - RNA, 20 nt, Artificial Sequence
  spacer sequence GTCN PAM
cagucacuccaaaaugaaua

SEQ ID NO: 16124 - RNA, 20 nt, Artificial Sequence
  spacer sequence GTCN PAM
cuccaaaaugaauaugugug

SEQ ID NO: 16125 - RNA, 20 nt, Artificial Sequence
  spacer sequence GTCN PAM
gagaggaagccugcuuuccu

SEQ ID NO: 16126 - RNA, 20 nt, Artificial Sequence
  spacer sequence GTCN PAM
cuguggaacugcucauggug

SEQ ID NO: 16127 - RNA, 20 nt, Artificial Sequence
  spacer sequence GTCN PAM
cuucaccucccuuggccugu

SEQ ID NO: 16128 - RNA, 20 nt, Artificial Sequence
  spacer sequence GTCN PAM
uugagcuuuccuggcugcac

SEQ ID NO: 16129 - RNA, 20 nt, Artificial Sequence
  spacer sequence GTCN PAM
ccuucuaccugccccugugc

SEQ ID NO: 16130 - RNA, 20 nt, Artificial Sequence
  spacer sequence GTCN PAM
cacuuuuuacaauuuagcau

SEQ ID NO: 16131 - RNA, 20 nt, Artificial Sequence
  spacer sequence GTCN PAM
aaagaaaacugaagccccca

SEQ ID NO: 16132 - RNA, 20 nt, Artificial Sequence
  spacer sequence GTCN PAM
ccagauuaugaaccaacuuc

SEQ ID NO: 16133 - RNA, 20 nt, Artificial Sequence
  spacer sequence GTCN PAM
ucauaaggcugugaacgucg

SEQ ID NO: 16134 - RNA, 20 nt, Artificial Sequence
  spacer sequence GTCN PAM
caaguaugagucaccucuga

SEQ ID NO: 16135 - RNA, 20 nt, Artificial Sequence
  spacer sequence GTCN PAM
ccucugaugacggauaggag

SEQ ID NO: 16136 - RNA, 20 nt, Artificial Sequence
  spacer sequence GTCN PAM
ucagaggugacucauacuug

SEQ ID NO: 16137 - RNA, 20 nt, Artificial Sequence
  spacer sequence GTCN PAM
ccuccaaauggaugccaugu

SEQ ID NO: 16138 - RNA, 20 nt, Artificial Sequence
  spacer sequence GTCN PAM
aagaggugaaacuccuuucu

SEQ ID NO: 16139 - RNA, 20 nt, Artificial Sequence
  spacer sequence GTCN PAM
cagagauuaacauuuucuca

SEQ ID NO: 16140 - RNA, 20 nt, Artificial Sequence
  spacer sequence GTCN PAM
gcuguugcucuguguguuca

SEQ ID NO: 16141 - RNA, 20 nt, Artificial Sequence
  spacer sequence GTCN PAM
caguggaccacaccaccacc

SEQ ID NO: 16142 - RNA, 20 nt, Artificial Sequence
  spacer sequence GTCN PAM
acugugacucgucagcuguu

SEQ ID NO: 16143 - RNA, 20 nt, Artificial Sequence
  spacer sequence GTCN PAM
uuucucugccuuucucaggg

SEQ ID NO: 16144 - RNA, 20 nt, Artificial Sequence
  spacer sequence GTCN PAM
ccauuugaggagagguucag

SEQ ID NO: 16145 - RNA, 20 nt, Artificial Sequence
  spacer sequence GTCN PAM
ucaugaucccugaaccucuc

SEQ ID NO: 16146 - RNA, 20 nt, Artificial Sequence
  spacer sequence GTCN PAM
agccugugagggguuggggg

SEQ ID NO: 16147 - RNA, 20 nt, Artificial Sequence
  spacer sequence GTCN PAM
ggaugacucucacuagguuu

SEQ ID NO: 16148 - RNA, 20 nt, Artificial Sequence
  spacer sequence GTCN PAM
uccugacucuggggaagagc

SEQ ID NO: 16149 - RNA, 20 nt, Artificial Sequence
  spacer sequence GTCN PAM
ggggcaugauggggauguac

SEQ ID NO: 16150 - RNA, 20 nt, Artificial Sequence
  spacer sequence GTCN PAM
cugcagcugacacggcucca

SEQ ID NO: 16151 - RNA, 20 nt, Artificial Sequence
  spacer sequence GTCN PAM
gcugcagagacuggaguccg

SEQ ID NO: 16152 - RNA, 20 nt, Artificial Sequence
  spacer sequence GTCN PAM
cauauuuagcaucuuggagc

SEQ ID NO: 16153 - RNA, 20 nt, Artificial Sequence
  spacer sequence GTCN PAM
ccuccuugucucauauuuag

SEQ ID NO: 16154 - RNA, 20 nt, Artificial Sequence
  spacer sequence GTCN PAM
caggaguggcacuagaagga

SEQ ID NO: 16155 - RNA, 20 nt, Artificial Sequence
  spacer sequence GTCN PAM
cugcucccucaggagccauc

SEQ ID NO: 16156 - RNA, 20 nt, Artificial Sequence
  spacer sequence GTCN PAM
acagcagaaaccagcgccca

SEQ ID NO: 16157 - RNA, 20 nt, Artificial Sequence
  spacer sequence GTCN PAM
ugucuggaucuucccagucc

SEQ ID NO: 16158 - RNA, 20 nt, Artificial Sequence
  spacer sequence GTCN PAM
ggaucuucccaguccugccc

SEQ ID NO: 16159 - RNA, 20 nt, Artificial Sequence
  spacer sequence GTCN PAM
ugcccucucucuucugaauc

SEQ ID NO: 16160 - RNA, 20 nt, Artificial Sequence
  spacer sequence GTCN PAM
gugcuguuggguuuauucau

SEQ ID NO: 16161 - RNA, 20 nt, Artificial Sequence
  spacer sequence GTCN PAM
ugaucagggaugaguccgug

SEQ ID NO: 16162 - RNA, 20 nt, Artificial Sequence
  spacer sequence GTCN PAM
uagcucuagcacugggcaca

SEQ ID NO: 16163 - RNA, 20 nt, Artificial Sequence
  spacer sequence GTCN PAM
gcaccuacgaaggguccuau

SEQ ID NO: 16164 - RNA, 20 nt, Artificial Sequence
  spacer sequence GTCN PAM
uaugcagugaacaccuugca

SEQ ID NO: 16165 - RNA, 20 nt, Artificial Sequence
  spacer sequence GTCN PAM
gaagggcagacucucucuuc

SEQ ID NO: 16166 - RNA, 20 nt, Artificial Sequence
  spacer sequence GTCN PAM
gcccuucagacugcaaggug

SEQ ID NO: 16167 - RNA, 20 nt, Artificial Sequence
  spacer sequence GTCN PAM
ggaaggcagagaaucucugg

SEQ ID NO: 16168 - RNA, 20 nt, Artificial Sequence
  spacer sequence GTCN PAM
agaccuggauucuaguucca

SEQ ID NO: 16169 - RNA, 20 nt, Artificial Sequence
  spacer sequence GTCN PAM
cgacucaauccagggaguuu

SEQ ID NO: 16170 - RNA, 20 nt, Artificial Sequence
  spacer sequence GTCN PAM
uaaauccucagagaaggaca

SEQ ID NO: 16171 - RNA, 20 nt, Artificial Sequence
  spacer sequence GTCN PAM
uucucugaggauuuaggacu

SEQ ID NO: 16172 - RNA, 20 nt, Artificial Sequence
  spacer sequence GTCN PAM
guccuucucugaggauuuag

SEQ ID NO: 16173 - RNA, 20 nt, Artificial Sequence
  spacer sequence GTCN PAM
gcccucaagucuguccuucu

SEQ ID NO: 16174 - RNA, 20 nt, Artificial Sequence
  spacer sequence GTCN PAM
uugugugcugccucagccca

SEQ ID NO: 16175 - RNA, 20 nt, Artificial Sequence
  spacer sequence GTCN PAM
acaaggagauggcuggugug

SEQ ID NO: 16176 - RNA, 20 nt, Artificial Sequence
  spacer sequence GTCN PAM
caagacuuggagaacaagcc

SEQ ID NO: 16177 - RNA, 20 nt, Artificial Sequence
  spacer sequence GTCN PAM
ugggacugcccagaaauggg

SEQ ID NO: 16178 - RNA, 20 nt, Artificial Sequence
  spacer sequence GTCN PAM
ccugaggucaggaguucaag

SEQ ID NO: 16179 - RNA, 20 nt, Artificial Sequence
  spacer sequence GTCN PAM
ggaguucaagaccagccuag

SEQ ID NO: 16180 - RNA, 20 nt, Artificial Sequence
  spacer sequence GTCN PAM
ugaacuccugaccucaggug

SEQ ID NO: 16181 - RNA, 20 nt, Artificial Sequence
  spacer sequence GTCN PAM
cccaggcuggagugcagugc

SEQ ID NO: 16182 - RNA, 20 nt, Artificial Sequence
  spacer sequence GTCN PAM
cgcucugucgcccaggcugg

SEQ ID NO: 16183 - RNA, 20 nt, Artificial Sequence
  spacer sequence GTCN PAM
gacugucuuuacaacacaau

SEQ ID NO: 16184 - RNA, 20 nt, Artificial Sequence
  spacer sequence GTCN PAM
gaccaacuagauuuauuugc

SEQ ID NO: 16185 - RNA, 20 nt, Artificial Sequence
  spacer sequence GTCN PAM
uuacaacacaaugaaagggu

SEQ ID NO: 16186 - RNA, 20 nt, Artificial Sequence
  spacer sequence GTCN PAM
ugcauacacauacacuaaaa

SEQ ID NO: 16187 - RNA, 20 nt, Artificial Sequence
  spacer sequence GTCN PAM
cucuuuucuuuuuuuuuuuu

SEQ ID NO: 16188 - RNA, 20 nt, Artificial Sequence
  spacer sequence GTCN PAM
aagccacccaaaggaaagca

SEQ ID NO: 16189 - RNA, 20 nt, Artificial Sequence
  spacer sequence GTCN PAM
cuuccgaacucagccguucu

SEQ ID NO: 16190 - RNA, 20 nt, Artificial Sequence
  spacer sequence GTCN PAM
caccagagggagaacggcug

SEQ ID NO: 16191 - RNA, 20 nt, Artificial Sequence
  spacer sequence GTCN PAM
ccuggaggugugggaagcug

SEQ ID NO: 16192 - RNA, 20 nt, Artificial Sequence
  spacer sequence GTCN PAM
gggcaacacuuuggaguuag

SEQ ID NO: 16193 - RNA, 20 nt, Artificial Sequence
  spacer sequence GTCN PAM
cgcucaccuggaagccagug

SEQ ID NO: 16194 - RNA, 20 nt, Artificial Sequence
  spacer sequence GTCN PAM
agcagugaacucugcuugca

SEQ ID NO: 16195 - RNA, 20 nt, Artificial Sequence
  spacer sequence GTCN PAM
uuguggcuuucaccccaugg

SEQ ID NO: 16196 - RNA, 20 nt, Artificial Sequence
  spacer sequence GTCN PAM
agggaaggugugaggcuggg

SEQ ID NO: 16197 - RNA, 20 nt, Artificial Sequence
  spacer sequence GTCN PAM
uucucuguucaaucaagcag

SEQ ID NO: 16198 - RNA, 20 nt, Artificial Sequence
  spacer sequence GTCN PAM
uguuuuauuuuuugugccuu

SEQ ID NO: 16199 - RNA, 20 nt, Artificial Sequence
  spacer sequence GTCN PAM
cucugggauuaguuaaaagg

SEQ ID NO: 16200 - RNA, 20 nt, Artificial Sequence
  spacer sequence GTCN PAM
gcaacuuggcuuucuuugga

SEQ ID NO: 16201 - RNA, 20 nt, Artificial Sequence
  spacer sequence GTCN PAM
ggccuuccuaguuaccuaga

SEQ ID NO: 16202 - RNA, 20 nt, Artificial Sequence
  spacer sequence GTCN PAM
agcccacuagaaggagauac

SEQ ID NO: 16203 - RNA, 20 nt, Artificial Sequence
  spacer sequence GTCN PAM
cacagauauuuauggagggc

SEQ ID NO: 16204 - RNA, 20 nt, Artificial Sequence
  spacer sequence GTCN PAM
gccacccaccaccacuuucu

SEQ ID NO: 16205 - RNA, 20 nt, Artificial Sequence
  spacer sequence GTCN PAM
acucacaucucuguccgcca

SEQ ID NO: 16206 - RNA, 20 nt, Artificial Sequence
  spacer sequence GTCN PAM
guccacucacaucucugucc

SEQ ID NO: 16207 - RNA, 20 nt, Artificial Sequence
  spacer sequence GTCN PAM
gugucaguccacucacaucu

SEQ ID NO: 16208 - RNA, 20 nt, Artificial Sequence
  spacer sequence GTCN PAM
uuuggaagcccccaugucug

SEQ ID NO: 16209 - RNA, 20 nt, Artificial Sequence
  spacer sequence GTCN PAM
ggggcagaaauggggaagcu

SEQ ID NO: 16210 - RNA, 20 nt, Artificial Sequence
  spacer sequence GTCN PAM
uacuguggggauuaccgagu

SEQ ID NO: 16211 - RNA, 20 nt, Artificial Sequence
  spacer sequence GTCN PAM
ccaccaggcugcgcugaaca

SEQ ID NO: 16212 - RNA, 20 nt, Artificial Sequence
  spacer sequence GTCN PAM
auucgagaaagauccaauaa

SEQ ID NO: 16213 - RNA, 20 nt, Artificial Sequence
  spacer sequence GTCN PAM
uggaauacaaauacccugga

SEQ ID NO: 16214 - RNA, 20 nt, Artificial Sequence
  spacer sequence GTCN PAM
gaagggcgguggccccucuu

SEQ ID NO: 16215 - RNA, 20 nt, Artificial Sequence
  spacer sequence GTCN PAM
ucauugaacuggguuaugaa

SEQ ID NO: 16216 - RNA, 20 nt, Artificial Sequence
  spacer sequence GTCN PAM
ucacaggcuuauggccacaa

SEQ ID NO: 16217 - RNA, 20 nt, Artificial Sequence
  spacer sequence GTCN PAM
guaaugcuuuucauaucauc

SEQ ID NO: 16218 - RNA, 20 nt, Artificial Sequence
  spacer sequence GTCN PAM
ccucuccucaccccagcaca

SEQ ID NO: 16219 - RNA, 20 nt, Artificial Sequence
  spacer sequence GTCN PAM
uuguguuuaauaguacaaca

SEQ ID NO: 16220 - RNA, 20 nt, Artificial Sequence
  spacer sequence GTCN PAM
uuuuugaguuuccagcaaaa

SEQ ID NO: 16221 - RNA, 20 nt, Artificial Sequence
  spacer sequence GTCN PAM
gugcaaaguuaugaacagcu

SEQ ID NO: 16222 - RNA, 20 nt, Artificial Sequence
  spacer sequence GTCN PAM
ucacugggagaggagccaag

SEQ ID NO: 16223 - RNA, 20 nt, Artificial Sequence
  spacer sequence GTCN PAM
cugggagaggagccaagagg

SEQ ID NO: 16224 - RNA, 20 nt, Artificial Sequence
  spacer sequence GTCN PAM
ccuaaggugcccccucccuc

SEQ ID NO: 16225 - RNA, 20 nt, Artificial Sequence
  spacer sequence GTCN PAM
uccggggaaguggagaggaa

SEQ ID NO: 16226 - RNA, 20 nt, Artificial Sequence
  spacer sequence GTCN PAM
gggaacucgugucaggagug

SEQ ID NO: 16227 - RNA, 20 nt, Artificial Sequence
  spacer sequence GTCN PAM
ggaguggagagcuaagcuca

SEQ ID NO: 16228 - RNA, 20 nt, Artificial Sequence
  spacer sequence GTCN PAM
auauugagcuuagcucucca

SEQ ID NO: 16229 - RNA, 20 nt, Artificial Sequence
  spacer sequence GTCN PAM
uuguccauauugagcuuagc

SEQ ID NO: 16230 - RNA, 20 nt, Artificial Sequence
  spacer sequence GTCN PAM
ugaugccacauuucucccau

SEQ ID NO: 16231 - RNA, 20 nt, Artificial Sequence
  spacer sequence GTCN PAM
gccaucuuugagggcaguua

SEQ ID NO: 16232 - RNA, 20 nt, Artificial Sequence
  spacer sequence GTCN PAM
acuaggaaugcuagaucuuu

SEQ ID NO: 16233 - RNA, 20 nt, Artificial Sequence
  spacer sequence GTCN PAM
ucaaugaagcacugguuuuu

SEQ ID NO: 16234 - RNA, 20 nt, Artificial Sequence
  spacer sequence GTCN PAM
ugcuugcuuuuuuaaaaacc

SEQ ID NO: 16235 - RNA, 20 nt, Artificial Sequence
  spacer sequence GTCN PAM
gcacucuuauguccugcuug

SEQ ID NO: 16236 - RNA, 20 nt, Artificial Sequence
  spacer sequence GTCN PAM
uaugucugcacucuuauguc

SEQ ID NO: 16237 - RNA, 20 nt, Artificial Sequence
  spacer sequence GTCN PAM
aauggcaagauaucuuagug

SEQ ID NO: 16238 - RNA, 20 nt, Artificial Sequence
  spacer sequence GTCN PAM
gauaacuacagaguccaaug

SEQ ID NO: 16239 - RNA, 20 nt, Artificial Sequence
  spacer sequence GTCN PAM
ucucuggaaugaagaggaaa

SEQ ID NO: 16240 - RNA, 20 nt, Artificial Sequence
  spacer sequence GTCN PAM
cuggaaugaagaggaaaugg

SEQ ID NO: 16241 - RNA, 20 nt, Artificial Sequence
  spacer sequence GTCN PAM
accuucgaucccuuaugcuu

SEQ ID NO: 16242 - RNA, 20 nt, Artificial Sequence
  spacer sequence GTCN PAM
uuaaaaauagaacuagggug

SEQ ID NO: 16243 - RNA, 20 nt, Artificial Sequence
  spacer sequence GTCN PAM
uccuaccaccuuuccugcua

SEQ ID NO: 16244 - RNA, 20 nt, Artificial Sequence
  spacer sequence GTCN PAM
uuugcccuuucuucuugccu

SEQ ID NO: 16245 - RNA, 20 nt, Artificial Sequence
  spacer sequence GTCN PAM
gccaggaaugaaagugggaa

SEQ ID NO: 16246 - RNA, 20 nt, Artificial Sequence
  spacer sequence GTCN PAM
accacugccuagcaaguaga

SEQ ID NO: 16247 - RNA, 20 nt, Artificial Sequence
  spacer sequence GTCN PAM
acuugcuaggcagugguaga

SEQ ID NO: 16248 - RNA, 20 nt, Artificial Sequence
  spacer sequence GTCN PAM
uuuuacagaugagaaagguu

SEQ ID NO: 16249 - RNA, 20 nt, Artificial Sequence
  spacer sequence GTCN PAM
uaucauuaacccugucauuu

SEQ ID NO: 16250 - RNA, 20 nt, Artificial Sequence
  spacer sequence GTCN PAM
augucuacauagaagaugcu

SEQ ID NO: 16251 - RNA, 20 nt, Artificial Sequence
  spacer sequence GTCN PAM
acauagaagaugcucaauaa

SEQ ID NO: 16252 - RNA, 20 nt, Artificial Sequence
  spacer sequence GTCN PAM
acuagaggaacaagaaccuu

SEQ ID NO: 16253 - RNA, 20 nt, Artificial Sequence
  spacer sequence GTCN PAM
acaagaguuucugaggaauc

SEQ ID NO: 16254 - RNA, 20 nt, Artificial Sequence
  spacer sequence GTCN PAM
uuuaaaaauuuucucuccuc

SEQ ID NO: 16255 - RNA, 20 nt, Artificial Sequence
  spacer sequence GTCN PAM
ugaacuccuagcuucaagca

SEQ ID NO: 16256 - RNA, 20 nt, Artificial Sequence
  spacer sequence GTCN PAM
cuacaaaaagcuuaauaaau

SEQ ID NO: 16257 - RNA, 20 nt, Artificial Sequence
  spacer sequence GTCN PAM
agguuugauagauaaaaaac

SEQ ID NO: 16258 - RNA, 20 nt, Artificial Sequence
  spacer sequence GTCN PAM
cauucccucugucaacaucu

SEQ ID NO: 16259 - RNA, 20 nt, Artificial Sequence
  spacer sequence GTCN PAM
acaucugcugagcucucaua

SEQ ID NO: 16260 - RNA, 20 nt, Artificial Sequence
  spacer sequence GTCN PAM
caggauuagaccuaccguuc

SEQ ID NO: 16261 - RNA, 20 nt, Artificial Sequence
  spacer sequence GTCN PAM
aauccugugacuccuuuauc

SEQ ID NO: 16262 - RNA, 20 nt, Artificial Sequence
  spacer sequence GTCN PAM
ugaagcagacucagagaauu

SEQ ID NO: 16263 - RNA, 20 nt, Artificial Sequence
  spacer sequence GTCN PAM
gcuucaugacaggcuguaac

SEQ ID NO: 16264 - RNA, 20 nt, Artificial Sequence
  spacer sequence GTCN PAM
gcgauagagcagauucagga

SEQ ID NO: 16265 - RNA, 20 nt, Artificial Sequence
  spacer sequence GTCN PAM
ucuuacaggcauaauccuga

SEQ ID NO: 16266 - RNA, 20 nt, Artificial Sequence
  spacer sequence GTCN PAM
cuucugcucacucuuuauuc

SEQ ID NO: 16267 - RNA, 20 nt, Artificial Sequence
  spacer sequence GTCN PAM
ccccaugccuuugcgugugg

SEQ ID NO: 16268 - RNA, 20 nt, Artificial Sequence
  spacer sequence GTCN PAM
ccucccaugcccucucuggu

SEQ ID NO: 16269 - RNA, 20 nt, Artificial Sequence
  spacer sequence GTCN PAM
auccagaaucagaacguggg

SEQ ID NO: 16270 - RNA, 20 nt, Artificial Sequence
  spacer sequence GTCN PAM
uuaaaauccacgcccggccc

SEQ ID NO: 16271 - RNA, 20 nt, Artificial Sequence
  spacer sequence GTCN PAM
agcuggauggacaccaucca

SEQ ID NO: 16272 - RNA, 20 nt, Artificial Sequence
  spacer sequence GTCN PAM
auccagcuugaccugaacuu

SEQ ID NO: 16273 - RNA, 20 nt, Artificial Sequence
  spacer sequence GTCN PAM
uucaccaccagccguauuuc

SEQ ID NO: 16274 - RNA, 20 nt, Artificial Sequence
  spacer sequence GTCN PAM
guaacaagcagccccaggaa

SEQ ID NO: 16275 - RNA, 20 nt, Artificial Sequence
  spacer sequence GTCN PAM
uucaagguggguccugaagc

SEQ ID NO: 16276 - RNA, 20 nt, Artificial Sequence
  spacer sequence GTCN PAM
ugaagccacaguaagcacca

SEQ ID NO: 16277 - RNA, 20 nt, Artificial Sequence
  spacer sequence GTCN PAM
auuuucucucaagaguugag

SEQ ID NO: 16278 - RNA, 20 nt, Artificial Sequence
  spacer sequence GTCN PAM
cugguagguacuaccaaacc

SEQ ID NO: 16279 - RNA, 20 nt, Artificial Sequence
  spacer sequence GTCN PAM
ucagguucccuuucuugccc

SEQ ID NO: 16280 - RNA, 20 nt, Artificial Sequence
  spacer sequence GTCN PAM
auggguaucaacaccuuuaa

SEQ ID NO: 16281 - RNA, 20 nt, Artificial Sequence
  spacer sequence GTCN PAM
uuuugauucuauaaccucca

SEQ ID NO: 16282 - RNA, 20 nt, Artificial Sequence
  spacer sequence GTCN PAM
cucaauauggagguuauaga

SEQ ID NO: 16283 - RNA, 20 nt, Artificial Sequence
  spacer sequence GTCN PAM
ggugcugggcccugaacuau

SEQ ID NO: 16284 - RNA, 20 nt, Artificial Sequence
  spacer sequence GTCN PAM
guacaucagcuuuuuaauga

SEQ ID NO: 16285 - RNA, 20 nt, Artificial Sequence
  spacer sequence GTCN PAM
auaaccuguaaggagagaug

SEQ ID NO: 16286 - RNA, 20 nt, Artificial Sequence
  spacer sequence GTCN PAM
ccuuuuuccuacgauguucc

SEQ ID NO: 16287 - RNA, 20 nt, Artificial Sequence
  spacer sequence GTCN PAM
ucacuugccugccugccugc

SEQ ID NO: 16288 - RNA, 20 nt, Artificial Sequence
  spacer sequence GTCN PAM
gauuucaggagcgauuucuc

SEQ ID NO: 16289 - RNA, 20 nt, Artificial Sequence
  spacer sequence GTCN PAM
acuuacugcuguugcaaagc

SEQ ID NO: 16290 - RNA, 20 nt, Artificial Sequence
  spacer sequence GTCN PAM
gaacagaacuggccucagaa

SEQ ID NO: 16291 - RNA, 20 nt, Artificial Sequence
  spacer sequence GTCN PAM
caugcccacgugaauuccua

SEQ ID NO: 16292 - RNA, 20 nt, Artificial Sequence
  spacer sequence GTCN PAM
cauccuguauucuccuaaau

SEQ ID NO: 16293 - RNA, 20 nt, Artificial Sequence
  spacer sequence GTCN PAM
uuggaguaauuuaggagaau

SEQ ID NO: 16294 - RNA, 20 nt, Artificial Sequence
  spacer sequence GTCN PAM
ucacugaguuuucuuuguca

SEQ ID NO: 16295 - RNA, 20 nt, Artificial Sequence
  spacer sequence GTCN PAM
uuugccaauccauaacucag

SEQ ID NO: 16296 - RNA, 20 nt, Artificial Sequence
  spacer sequence GTCN PAM
agagagaauuauccaagcau

SEQ ID NO: 16297 - RNA, 20 nt, Artificial Sequence
  spacer sequence GTCN PAM
cuggcaagcaauuauuguau

SEQ ID NO: 16298 - RNA, 20 nt, Artificial Sequence
  spacer sequence GTCN PAM
ugaaaaaaaaagugaaaugu

SEQ ID NO: 16299 - RNA, 20 nt, Artificial Sequence
  spacer sequence GTCN PAM
gaggaccugaaaucaagugc

SEQ ID NO: 16300 - RNA, 20 nt, Artificial Sequence
  spacer sequence GTCN PAM
ucagacuccagaauuuauac

SEQ ID NO: 16301 - RNA, 20 nt, Artificial Sequence
  spacer sequence GTCN PAM
gagcaaaacaguuuacauca

SEQ ID NO: 16302 - RNA, 20 nt, Artificial Sequence
  spacer sequence GTCN PAM
uaaauucauaggcacaacca

SEQ ID NO: 16303 - RNA, 20 nt, Artificial Sequence
  spacer sequence GTCN PAM
gcucuuuuugaugcaaauau

SEQ ID NO: 16304 - RNA, 20 nt, Artificial Sequence
  spacer sequence GTCN PAM
cccacccccaccccauguug

SEQ ID NO: 16305 - RNA, 20 nt, Artificial Sequence
  spacer sequence GTCN PAM
ccuacggaaucuacaggaau

SEQ ID NO: 16306 - RNA, 20 nt, Artificial Sequence
  spacer sequence GTCN PAM
ggcugccccuucagauuccu

SEQ ID NO: 16307 - RNA, 20 nt, Artificial Sequence
  spacer sequence GTCN PAM
acccagcaugauaaaaccaa

SEQ ID NO: 16308 - RNA, 20 nt, Artificial Sequence
  spacer sequence GTCN PAM
gggaaacuauuugucuaaac

SEQ ID NO: 16309 - RNA, 20 nt, Artificial Sequence
  spacer sequence GTCN PAM
aaacacuuuuuggaaaggga

SEQ ID NO: 16310 - RNA, 20 nt, Artificial Sequence
  spacer sequence GTCN PAM
gcacacacacacacacacac

SEQ ID NO: 16311 - RNA, 20 nt, Artificial Sequence
  spacer sequence GTCN PAM
acugccagugaagccaaacc

SEQ ID NO: 16312 - RNA, 20 nt, Artificial Sequence
  spacer sequence GTCN PAM
cucaguuaucugagaguggc

SEQ ID NO: 16313 - RNA, 20 nt, Artificial Sequence
  spacer sequence GTCN PAM
gcucucucucgcuucacaca

SEQ ID NO: 16314 - RNA, 20 nt, Artificial Sequence
  spacer sequence GTCN PAM
cucugguuuuacaaaauguc

SEQ ID NO: 16315 - RNA, 20 nt, Artificial Sequence
  spacer sequence GTCN PAM
gggaauggugugaugugguu

SEQ ID NO: 16316 - RNA, 20 nt, Artificial Sequence
  spacer sequence GTCN PAM
cagcuuccaggcagcagaua

SEQ ID NO: 16317 - RNA, 20 nt, Artificial Sequence
  spacer sequence GTCN PAM
cugccguaucugcugccugg

SEQ ID NO: 16318 - RNA, 20 nt, Artificial Sequence
  spacer sequence GTCN PAM
caggggagccauggugggcc

SEQ ID NO: 16319 - RNA, 20 nt, Artificial Sequence
  spacer sequence GTCN PAM
cuggugggcuucgugcagcc

SEQ ID NO: 16320 - RNA, 20 nt, Artificial Sequence
  spacer sequence GTCN PAM
cacagcgacaguccuggcuu

SEQ ID NO: 16321 - RNA, 20 nt, Artificial Sequence
  spacer sequence GTCN PAM
cugugugacuugaaagcuag

SEQ ID NO: 16322 - RNA, 20 nt, Artificial Sequence
  spacer sequence GTCN PAM
uggcuuuugcuaucuagaag

SEQ ID NO: 16323 - RNA, 20 nt, Artificial Sequence
  spacer sequence GTCN PAM
ucccuuaaagggaaggcugc

SEQ ID NO: 16324 - RNA, 20 nt, Artificial Sequence
  spacer sequence GTCN PAM
aggguuaagcagccuucccu

SEQ ID NO: 16325 - RNA, 20 nt, Artificial Sequence
  spacer sequence GTCN PAM
ccuucuuucugagagugugg

SEQ ID NO: 16326 - RNA, 20 nt, Artificial Sequence
  spacer sequence GTCN PAM
aucuccucucaggcaaauca

SEQ ID NO: 16327 - RNA, 20 nt, Artificial Sequence
  spacer sequence GTCN PAM
caaagccuugucuucauaac

SEQ ID NO: 16328 - RNA, 20 nt, Artificial Sequence
  spacer sequence GTCN PAM
ucauaacacuaccagccacg

SEQ ID NO: 16329 - RNA, 20 nt, Artificial Sequence
  spacer sequence GTCN PAM
cagcugcuucuuccugaccc

SEQ ID NO: 16330 - RNA, 20 nt, Artificial Sequence
  spacer sequence GTCN PAM
ggaagaagcagcugggacgu

SEQ ID NO: 16331 - RNA, 20 nt, Artificial Sequence
  spacer sequence GTCN PAM
gauguggcguuugcuugagu

SEQ ID NO: 16332 - RNA, 20 nt, Artificial Sequence
  spacer sequence GTCN PAM
uuuucagugcaugaggcaga

SEQ ID NO: 16333 - RNA, 20 nt, Artificial Sequence
  spacer sequence GTCN PAM
cccauucuccuggaagaaca

SEQ ID NO: 16334 - RNA, 20 nt, Artificial Sequence
  spacer sequence GTCN PAM
guacugugcacuguccccca

SEQ ID NO: 16335 - RNA, 20 nt, Artificial Sequence
  spacer sequence GTCN PAM
uuuaagggucuguacugugc

SEQ ID NO: 16336 - RNA, 20 nt, Artificial Sequence
  spacer sequence GTCN PAM
uguaucugggaaguucauug

SEQ ID NO: 16337 - RNA, 20 nt, Artificial Sequence
  spacer sequence GTCN PAM
uaugggcaagaaaguaccug

SEQ ID NO: 16338 - RNA, 20 nt, Artificial Sequence
  spacer sequence GTCN PAM
ccuugcuaccucugagccaa

SEQ ID NO: 16339 - RNA, 20 nt, Artificial Sequence
  spacer sequence GTCN PAM
guguuguuucuucaccaagg

SEQ ID NO: 16340 - RNA, 20 nt, Artificial Sequence
  spacer sequence GTCN PAM
ggcaauaccuuuauuuucug

SEQ ID NO: 16341 - RNA, 20 nt, Artificial Sequence
  spacer sequence GTCN PAM
ccaaguccacaucuuccagc

SEQ ID NO: 16342 - RNA, 20 nt, Artificial Sequence
  spacer sequence GTCN PAM
acaucuuccagcuccaacca

SEQ ID NO: 16343 - RNA, 20 nt, Artificial Sequence
  spacer sequence GTCN PAM
uucuugucuucuguaacccu

SEQ ID NO: 16344 - RNA, 20 nt, Artificial Sequence
  spacer sequence GTCN PAM
ucuguaacccuaucgccucc

SEQ ID NO: 16345 - RNA, 20 nt, Artificial Sequence
  spacer sequence GTCN PAM
gggaucaacuuaaauaauaa

SEQ ID NO: 16346 - RNA, 20 nt, Artificial Sequence
  spacer sequence GTCN PAM
uaucauuucaucaguaaaca

SEQ ID NO: 16347 - RNA, 20 nt, Artificial Sequence
  spacer sequence GTCN PAM
caaauaaagucccguauuac

SEQ ID NO: 16348 - RNA, 20 nt, Artificial Sequence
  spacer sequence GTCN PAM
cguauuaccaaauaggggag

SEQ ID NO: 16349 - RNA, 20 nt, Artificial Sequence
  spacer sequence GTCN PAM
uguuuuggaggaucccuucc

SEQ ID NO: 16350 - RNA, 20 nt, Artificial Sequence
  spacer sequence GTCN PAM
ugaaccucacuggaagggau

SEQ ID NO: 16351 - RNA, 20 nt, Artificial Sequence
  spacer sequence GTCN PAM
gcccaagcuccugccccuug

SEQ ID NO: 16352 - RNA, 20 nt, Artificial Sequence
  spacer sequence GTCN PAM
uuugcccuguucagggcuga

SEQ ID NO: 16353 - RNA, 20 nt, Artificial Sequence
  spacer sequence GTCN PAM
cugugacaguccucccacau

SEQ ID NO: 16354 - RNA, 20 nt, Artificial Sequence
  spacer sequence GTCN PAM
cagagacucucagagggugc

SEQ ID NO: 16355 - RNA, 20 nt, Artificial Sequence
  spacer sequence GTCN PAM
ucccacaucgacugccccac

SEQ ID NO: 16356 - RNA, 20 nt, Artificial Sequence
  spacer sequence GTCN PAM
augugggaggacugucacag

SEQ ID NO: 16357 - RNA, 20 nt, Artificial Sequence
  spacer sequence GTCN PAM
cccucacuccccaccaugug

SEQ ID NO: 16358 - RNA, 20 nt, Artificial Sequence
  spacer sequence GTCN PAM
gauguggugaugggccacau

SEQ ID NO: 16359 - RNA, 20 nt, Artificial Sequence
  spacer sequence GTCN PAM
uggaagaaaguguucuccug

SEQ ID NO: 16360 - RNA, 20 nt, Artificial Sequence
  spacer sequence GTCN PAM
aggagaacacuuucuuccaa

SEQ ID NO: 16361 - RNA, 20 nt, Artificial Sequence
  spacer sequence GTCN PAM
uggauauacagcugacuaga

SEQ ID NO: 16362 - RNA, 20 nt, Artificial Sequence
  spacer sequence GTCN PAM
gcuguauauccaagacaugc

SEQ ID NO: 16363 - RNA, 20 nt, Artificial Sequence
  spacer sequence GTCN PAM
guuauguuccaaauggguuu

SEQ ID NO: 16364 - RNA, 20 nt, Artificial Sequence
  spacer sequence GTCN PAM
agguucugcaggcaagagca

SEQ ID NO: 16365 - RNA, 20 nt, Artificial Sequence
  spacer sequence GTCN PAM
aaaaauaguauuugcucuug

SEQ ID NO: 16366 - RNA, 20 nt, Artificial Sequence
  spacer sequence GTCN PAM
aaaugcuuuuagagacagug

SEQ ID NO: 16367 - RNA, 20 nt, Artificial Sequence
  spacer sequence GTCN PAM
cuaaaagcauuuugaccuua

SEQ ID NO: 16368 - RNA, 20 nt, Artificial Sequence
  spacer sequence GTCN PAM
acaauaaaaccuauugauca

SEQ ID NO: 16369 - RNA, 20 nt, Artificial Sequence
  spacer sequence GTCN PAM
cucuggagcacuaguuccag

SEQ ID NO: 16370 - RNA, 20 nt, Artificial Sequence
  spacer sequence GTCN PAM
acagagaaaacggccaggca

SEQ ID NO: 16371 - RNA, 20 nt, Artificial Sequence
  spacer sequence GTCN PAM
aacaagcuuuuacccacaga

SEQ ID NO: 16372 - RNA, 20 nt, Artificial Sequence
  spacer sequence GTCN PAM
auuuaaccagaugcagaggc

SEQ ID NO: 16373 - RNA, 20 nt, Artificial Sequence
  spacer sequence GTCN PAM
cagaaaauacacucauggca

SEQ ID NO: 16374 - RNA, 20 nt, Artificial Sequence
  spacer sequence GTCN PAM
ucucaacucaggggaggcac

SEQ ID NO: 16375 - RNA, 20 nt, Artificial Sequence
  spacer sequence GTCN PAM
uuugugccuccccugaguug

SEQ ID NO: 16376 - RNA, 20 nt, Artificial Sequence
  spacer sequence GTCN PAM
caagcaggaauccuggaugg

SEQ ID NO: 16377 - RNA, 20 nt, Artificial Sequence
  spacer sequence GTCN PAM
guuguucacauagcgcugga

SEQ ID NO: 16378 - RNA, 20 nt, Artificial Sequence
  spacer sequence GTCN PAM
gauuuugaugaaaagugguu

SEQ ID NO: 16379 - RNA, 20 nt, Artificial Sequence
  spacer sequence GTCN PAM
uuagaauucaccaugauucc

SEQ ID NO: 16380 - RNA, 20 nt, Artificial Sequence
  spacer sequence GTCN PAM
ucauaagauaaagcauauau

SEQ ID NO: 16381 - RNA, 20 nt, Artificial Sequence
  spacer sequence GTCN PAM
ugugugguacaccuauaaaa

SEQ ID NO: 16382 - RNA, 20 nt, Artificial Sequence
  spacer sequence GTCN PAM
cuggaaaauuacuuaacuag

SEQ ID NO: 16383 - RNA, 20 nt, Artificial Sequence
  spacer sequence GTCN PAM
auucuugaacguuugggcua

SEQ ID NO: 16384 - RNA, 20 nt, Artificial Sequence
  spacer sequence GTCN PAM
gugcuuaaagcuccuauuug

SEQ ID NO: 16385 - RNA, 20 nt, Artificial Sequence
  spacer sequence GTCN PAM
auuacauuaaugucugugcu

SEQ ID NO: 16386 - RNA, 20 nt, Artificial Sequence
  spacer sequence GTCN PAM
auuauguucccauaaauacc

SEQ ID NO: 16387 - RNA, 20 nt, Artificial Sequence
  spacer sequence GTCN PAM
cucaaacaauaaagcacccc

SEQ ID NO: 16388 - RNA, 20 nt, Artificial Sequence
  spacer sequence GTCN PAM
ggagucucucaaacaauaaa

SEQ ID NO: 16389 - RNA, 20 nt, Artificial Sequence
  spacer sequence GTCN PAM
caaugugauauauagauuau

SEQ ID NO: 16390 - RNA, 20 nt, Artificial Sequence
  spacer sequence GTCN PAM
gcugugucacaaugugauau

SEQ ID NO: 16391 - RNA, 20 nt, Artificial Sequence
  spacer sequence GTCN PAM
uggcucacuaaugcggucag

SEQ ID NO: 16392 - RNA, 20 nt, Artificial Sequence
  spacer sequence GTCN PAM
uagcggcagcuuccuaucau

SEQ ID NO: 16393 - RNA, 20 nt, Artificial Sequence
  spacer sequence GTCN PAM
gaauacauaauuuugucacc

SEQ ID NO: 16394 - RNA, 20 nt, Artificial Sequence
  spacer sequence GTCN PAM
ccuaucucuggcaugaaugu

SEQ ID NO: 16395 - RNA, 20 nt, Artificial Sequence
  spacer sequence GTCN PAM
uacaaggaacacauauuuca

SEQ ID NO: 16396 - RNA, 20 nt, Artificial Sequence
  spacer sequence GTCN PAM
agcaaauaccauuuauaugu

SEQ ID NO: 16397 - RNA, 20 nt, Artificial Sequence
  spacer sequence GTCN PAM
cagaacaggccauaugcuuu

SEQ ID NO: 16398 - RNA, 20 nt, Artificial Sequence
  spacer sequence GTCN PAM
ucaacacuaacagagggaga

SEQ ID NO: 16399 - RNA, 20 nt, Artificial Sequence
  spacer sequence GTCN PAM
cuggaguuaggaauuuuugc

SEQ ID NO: 16400 - RNA, 20 nt, Artificial Sequence
  spacer sequence GTCN PAM
auacagagaaaccagcuuuu

SEQ ID NO: 16401 - RNA, 20 nt, Artificial Sequence
  spacer sequence GTCN PAM
guuaauugaauuuaaaauac

SEQ ID NO: 16402 - RNA, 20 nt, Artificial Sequence
  spacer sequence GTCN PAM
uugcaggugagccccauuca

SEQ ID NO: 16403 - RNA, 20 nt, Artificial Sequence
  spacer sequence GTCN PAM
gugguguucauacuaugcua

SEQ ID NO: 16404 - RNA, 20 nt, Artificial Sequence
  spacer sequence GTCN PAM
ccaugauguucuagcauagu

SEQ ID NO: 16405 - RNA, 20 nt, Artificial Sequence
  spacer sequence GTCN PAM
cuaaguccccaugauguucu

SEQ ID NO: 16406 - RNA, 20 nt, Artificial Sequence
  spacer sequence GTCN PAM
aaacuaucuauuuuaccuac

SEQ ID NO: 16407 - RNA, 20 nt, Artificial Sequence
  spacer sequence GTCN PAM
uguaaaguagguaaaauaga

SEQ ID NO: 16408 - RNA, 20 nt, Artificial Sequence
  spacer sequence GTCN PAM
gaacccagguguccugguuu

SEQ ID NO: 16409 - RNA, 20 nt, Artificial Sequence
  spacer sequence GTCN PAM
ugguuuucagaucagugucu

SEQ ID NO: 16410 - RNA, 20 nt, Artificial Sequence
  spacer sequence GTCN PAM
cucuguuaacacuaaaaguc

SEQ ID NO: 16411 - RNA, 20 nt, Artificial Sequence
  spacer sequence GTCN PAM
aaguuugguucuggaaaauc

SEQ ID NO: 16412 - RNA, 20 nt, Artificial Sequence
  spacer sequence GTCN PAM
uuugggcauuacagauuuuc

SEQ ID NO: 16413 - RNA, 20 nt, Artificial Sequence
  spacer sequence GTCN PAM
ugguaauuucuccauggcuu

SEQ ID NO: 16414 - RNA, 20 nt, Artificial Sequence
  spacer sequence GTCN PAM
acuuggaaggccuuuacuaa

SEQ ID NO: 16415 - RNA, 20 nt, Artificial Sequence
  spacer sequence GTCN PAM
ucauacuacaggcagauacu

SEQ ID NO: 16416 - RNA, 20 nt, Artificial Sequence
  spacer sequence GTCN PAM
cuauacaucuaaucaauaaa

SEQ ID NO: 16417 - RNA, 20 nt, Artificial Sequence
  spacer sequence GTCN PAM
uauuuauuuauugauuagau

SEQ ID NO: 16418 - RNA, 20 nt, Artificial Sequence
  spacer sequence GTCN PAM
ccuaugcaucuccccccacc

SEQ ID NO: 16419 - RNA, 20 nt, Artificial Sequence
  spacer sequence GTCN PAM
gcgaugcagagggggugggg

SEQ ID NO: 16420 - RNA, 20 nt, Artificial Sequence
  spacer sequence GTCN PAM
gcaaaauaaaaaugugucgg

SEQ ID NO: 16421 - RNA, 20 nt, Artificial Sequence
  spacer sequence GTCN PAM
gguaauuaaauggguauuua

SEQ ID NO: 16422 - RNA, 20 nt, Artificial Sequence
  spacer sequence GTCN PAM
cugaugcaaauuauuaaguu

SEQ ID NO: 16423 - RNA, 20 nt, Artificial Sequence
  spacer sequence GTCN PAM
augucaggaggguguuaaag

SEQ ID NO: 16424 - RNA, 20 nt, Artificial Sequence
  spacer sequence GTCN PAM
ggaggguguuaaagaagaag

SEQ ID NO: 16425 - RNA, 20 nt, Artificial Sequence
  spacer sequence GTCN PAM
aacauuuucauugcaucuuc

SEQ ID NO: 16426 - RNA, 20 nt, Artificial Sequence
  spacer sequence GTCN PAM
uguaauuuauggcugcuuuc

SEQ ID NO: 16427 - RNA, 20 nt, Artificial Sequence
  spacer sequence GTCN PAM
ugaugaaacaaauaaagggc

SEQ ID NO: 16428 - RNA, 20 nt, Artificial Sequence
  spacer sequence GTCN PAM
gcccuuuauuuguuucauca

SEQ ID NO: 16429 - RNA, 20 nt, Artificial Sequence
  spacer sequence GTCN PAM
gauucauugugacacacaca

SEQ ID NO: 16430 - RNA, 20 nt, Artificial Sequence
  spacer sequence GTCN PAM
caaugaaucagacgcauuau

SEQ ID NO: 16431 - RNA, 20 nt, Artificial Sequence
  spacer sequence GTCN PAM
acagcauugauuuuuagucg

SEQ ID NO: 16432 - RNA, 20 nt, Artificial Sequence
  spacer sequence GTCN PAM
acauuucaaucagguugaag

SEQ ID NO: 16433 - RNA, 20 nt, Artificial Sequence
  spacer sequence GTCN PAM
acuaaaaaucaaugcuguug

SEQ ID NO: 16434 - RNA, 20 nt, Artificial Sequence
  spacer sequence GTCN PAM
acugccccucugaggucucc

SEQ ID NO: 16435 - RNA, 20 nt, Artificial Sequence
  spacer sequence GTCN PAM
ccccgguuauggcuuugcua

SEQ ID NO: 16436 - RNA, 20 nt, Artificial Sequence
  spacer sequence GTCN PAM
ccggccugccucuugggaca

SEQ ID NO: 16437 - RNA, 20 nt, Artificial Sequence
  spacer sequence GTCN PAM
caagaggcaggccggugacc

SEQ ID NO: 16438 - RNA, 20 nt, Artificial Sequence
  spacer sequence GTCN PAM
aggagacccagcaaauaaaa

SEQ ID NO: 16439 - RNA, 20 nt, Artificial Sequence
  spacer sequence GTCN PAM
ccuagacugaaaugauaaag

SEQ ID NO: 16440 - RNA, 20 nt, Artificial Sequence
  spacer sequence GTCN PAM
cccuggaagagaagcucuua

SEQ ID NO: 16441 - RNA, 20 nt, Artificial Sequence
  spacer sequence GTCN PAM
agaguguagugguucucccu

SEQ ID NO: 16442 - RNA, 20 nt, Artificial Sequence
  spacer sequence GTCN PAM
cuacauacccuugggucaag

SEQ ID NO: 16443 - RNA, 20 nt, Artificial Sequence
  spacer sequence GTCN PAM
ugcaagcccuucccccucac

SEQ ID NO: 16444 - RNA, 20 nt, Artificial Sequence
  spacer sequence GTCN PAM
ucaauggaggucaugcaagc

SEQ ID NO: 16445 - RNA, 20 nt, Artificial Sequence
  spacer sequence GTCN PAM
augccccgggacagagugcg

SEQ ID NO: 16446 - RNA, 20 nt, Artificial Sequence
  spacer sequence GTCN PAM
cggggcauggacguccucaa

SEQ ID NO: 16447 - RNA, 20 nt, Artificial Sequence
  spacer sequence GTCN PAM
agagcuccaaagcuucacuu

SEQ ID NO: 16448 - RNA, 20 nt, Artificial Sequence
  spacer sequence GTCN PAM
ucugaguuugaggugggaug

SEQ ID NO: 16449 - RNA, 20 nt, Artificial Sequence
  spacer sequence GTCN PAM
cauccagguugucuucugag

SEQ ID NO: 16450 - RNA, 20 nt, Artificial Sequence
  spacer sequence GTCN PAM
gucacauccagguugucuuc

SEQ ID NO: 16451 - RNA, 20 nt, Artificial Sequence
  spacer sequence GTCN PAM
uucugcuagaaccaagggag

SEQ ID NO: 16452 - RNA, 20 nt, Artificial Sequence
  spacer sequence GTCN PAM
auguuagccuggccaauuug

SEQ ID NO: 16453 - RNA, 20 nt, Artificial Sequence
  spacer sequence GTCN PAM
ugcuucagcaaauauuaaua

SEQ ID NO: 16454 - RNA, 20 nt, Artificial Sequence
  spacer sequence GTCN PAM
gggcagccuguggagugacu

SEQ ID NO: 16455 - RNA, 20 nt, Artificial Sequence
  spacer sequence GTCN PAM
cuccacaggcugcccugacg

SEQ ID NO: 16456 - RNA, 20 nt, Artificial Sequence
  spacer sequence GTCN PAM
acagcuccauaugauccgca

SEQ ID NO: 16457 - RNA, 20 nt, Artificial Sequence
  spacer sequence GTCN PAM
ggaaggcaugcuggaaacuu

SEQ ID NO: 16458 - RNA, 20 nt, Artificial Sequence
  spacer sequence GTCN PAM
uaaucugcuucgaggagguu

SEQ ID NO: 16459 - RNA, 20 nt, Artificial Sequence
  spacer sequence GTCN PAM
uaagaaacaccacugccacg

SEQ ID NO: 16460 - RNA, 20 nt, Artificial Sequence
  spacer sequence GTCN PAM
cucccucccuguauaauucu

SEQ ID NO: 16461 - RNA, 20 nt, Artificial Sequence
  spacer sequence GTCN PAM
cuguggcauuuacuucucgg

SEQ ID NO: 16462 - RNA, 20 nt, Artificial Sequence
  spacer sequence GTCN PAM
gagcuuaguuucucauucag

SEQ ID NO: 16463 - RNA, 20 nt, Artificial Sequence
  spacer sequence GTCN PAM
ccugaccaagccacacacaa

SEQ ID NO: 16464 - RNA, 20 nt, Artificial Sequence
  spacer sequence GTCN PAM
ggagacugcagugggcugaa

SEQ ID NO: 16465 - RNA, 20 nt, Artificial Sequence
  spacer sequence GTCN PAM
ugagaaacagagggaggagg

SEQ ID NO: 16466 - RNA, 20 nt, Artificial Sequence
  spacer sequence GTCN PAM
agaaugagccugaaaucaag

SEQ ID NO: 16467 - RNA, 20 nt, Artificial Sequence
  spacer sequence GTCN PAM
uuuccccaucuguccagaau

SEQ ID NO: 16468 - RNA, 20 nt, Artificial Sequence
  spacer sequence GTCN PAM
aguuuuucaaucuucuggga

SEQ ID NO: 16469 - RNA, 20 nt, Artificial Sequence
  spacer sequence GTCN PAM
cucccauggguucugugguc

SEQ ID NO: 16470 - RNA, 20 nt, Artificial Sequence
  spacer sequence GTCN PAM
agcaccagagcuuccugccc

SEQ ID NO: 16471 - RNA, 20 nt, Artificial Sequence
  spacer sequence GTCN PAM
acaguuguucaauccuuugg

SEQ ID NO: 16472 - RNA, 20 nt, Artificial Sequence
  spacer sequence GTCN PAM
uuuaacccuugaugaacccc

SEQ ID NO: 16473 - RNA, 20 nt, Artificial Sequence
  spacer sequence GTCN PAM
gacacaugguaauaaugaca

SEQ ID NO: 16474 - RNA, 20 nt, Artificial Sequence
  spacer sequence GTCN PAM
gacacauugauauuccaucc

SEQ ID NO: 16475 - RNA, 20 nt, Artificial Sequence
  spacer sequence GTCN PAM
uuauuaccaugugucugaca

SEQ ID NO: 16476 - RNA, 20 nt, Artificial Sequence
  spacer sequence GTCN PAM
gugcuuucccucauuuacuu

SEQ ID NO: 16477 - RNA, 20 nt, Artificial Sequence
  spacer sequence GTCN PAM
augugagaaguaaaugaggg

SEQ ID NO: 16478 - RNA, 20 nt, Artificial Sequence
  spacer sequence GTCN PAM
cuuaccucauagaguccaug

SEQ ID NO: 16479 - RNA, 20 nt, Artificial Sequence
  spacer sequence GTCN PAM
gagggaaucauuucaccucu

SEQ ID NO: 16480 - RNA, 20 nt, Artificial Sequence
  spacer sequence GTCN PAM
cacacccaggcaggcacaag

SEQ ID NO: 16481 - RNA, 20 nt, Artificial Sequence
  spacer sequence GTCN PAM
auggggagaggggacuccca

SEQ ID NO: 16482 - RNA, 20 nt, Artificial Sequence
  spacer sequence GTCN PAM
ccucuccccauagacgugug

SEQ ID NO: 16483 - RNA, 20 nt, Artificial Sequence
  spacer sequence GTCN PAM
cauuauguuucugguggcag

SEQ ID NO: 16484 - RNA, 20 nt, Artificial Sequence
  spacer sequence GTCN PAM
aaagagcucagggucucauu

SEQ ID NO: 16485 - RNA, 20 nt, Artificial Sequence
  spacer sequence GTCN PAM
caaaguaguucccccauuau

SEQ ID NO: 16486 - RNA, 20 nt, Artificial Sequence
  spacer sequence GTCN PAM
uaaccguaauaguaaugagc

SEQ ID NO: 16487 - RNA, 20 nt, Artificial Sequence
  spacer sequence GTCN PAM
caaaagcucauuacuauuac

SEQ ID NO: 16488 - RNA, 20 nt, Artificial Sequence
  spacer sequence GTCN PAM
agggcauauuuccccucuuu

SEQ ID NO: 16489 - RNA, 20 nt, Artificial Sequence
  spacer sequence GTCN PAM
cuccucccuuucuuaccagc

SEQ ID NO: 16490 - RNA, 20 nt, Artificial Sequence
  spacer sequence GTCN PAM
uuguaaccugagcugguaag

SEQ ID NO: 16491 - RNA, 20 nt, Artificial Sequence
  spacer sequence GTCN PAM
ucucucccaccuagaugucu

SEQ ID NO: 16492 - RNA, 20 nt, Artificial Sequence
  spacer sequence GTCN PAM
augaugggaaaaauauuuuu

SEQ ID NO: 16493 - RNA, 20 nt, Artificial Sequence
  spacer sequence GTCN PAM
gaaaugauauucacacaaua

SEQ ID NO: 16494 - RNA, 20 nt, Artificial Sequence
  spacer sequence GTCN PAM
ccaaaccacuugaaagcccu

SEQ ID NO: 16495 - RNA, 20 nt, Artificial Sequence
  spacer sequence GTCN PAM
ccuaggugggauucuaugaa

SEQ ID NO: 16496 - RNA, 20 nt, Artificial Sequence
  spacer sequence GTCN PAM
uugcccuccugccacaagug

SEQ ID NO: 16497 - RNA, 20 nt, Artificial Sequence
  spacer sequence GTCN PAM
ggaaguuauugggaugauga

SEQ ID NO: 16498 - RNA, 20 nt, Artificial Sequence
  spacer sequence GTCN PAM
ucaucccaauaacuuccuga

SEQ ID NO: 16499 - RNA, 20 nt, Artificial Sequence
  spacer sequence GTCN PAM
caauaaacuaaaaaacacag

SEQ ID NO: 16500 - RNA, 20 nt, Artificial Sequence
  spacer sequence GTCN PAM
uggguccugcccaggaaagg

SEQ ID NO: 16501 - RNA, 20 nt, Artificial Sequence
  spacer sequence GTCN PAM
ugcccaggaaaggcugcgcc

SEQ ID NO: 16502 - RNA, 20 nt, Artificial Sequence
  spacer sequence GTCN PAM
guggcugagaacgauaauau

SEQ ID NO: 16503 - RNA, 20 nt, Artificial Sequence
  spacer sequence GTCN PAM
ccugaacacaaccaaacccu

SEQ ID NO: 16504 - RNA, 20 nt, Artificial Sequence
  spacer sequence GTCN PAM
uuuggcuacauaugcggguu

SEQ ID NO: 16505 - RNA, 20 nt, Artificial Sequence
  spacer sequence GTCN PAM
cuuuuuuuuuuuauuuuuua

SEQ ID NO: 16506 - RNA, 20 nt, Artificial Sequence
  spacer sequence GTCN PAM
uuuggcuaaaggcaaaaaaa

SEQ ID NO: 16507 - RNA, 20 nt, Artificial Sequence
  spacer sequence GTCN PAM
gcagguauuuaaaaaagaaa

SEQ ID NO: 16508 - RNA, 20 nt, Artificial Sequence
  spacer sequence GTCN PAM
gggccccagugcagccaagc

SEQ ID NO: 16509 - RNA, 20 nt, Artificial Sequence
  spacer sequence GTCN PAM
auuaacagaugaacuuggcc

SEQ ID NO: 16510 - RNA, 20 nt, Artificial Sequence
  spacer sequence GTCN PAM
ucucuguucuccuaccucuu

SEQ ID NO: 16511 - RNA, 20 nt, Artificial Sequence
  spacer sequence GTCN PAM
aguuuuuaggagcucgaaag

SEQ ID NO: 16512 - RNA, 20 nt, Artificial Sequence
  spacer sequence GTCN PAM
gcgcuuuucccuuucuauuc

SEQ ID NO: 16513 - RNA, 20 nt, Artificial Sequence
  spacer sequence GTCN PAM
cagggugcgcccugaacuug

SEQ ID NO: 16514 - RNA, 20 nt, Artificial Sequence
  spacer sequence GTCN PAM
ggggucccagggugcgcccu

SEQ ID NO: 16515 - RNA, 20 nt, Artificial Sequence
  spacer sequence GTCN PAM
gcuaaaccagucuggcuaca

SEQ ID NO: 16516 - RNA, 20 nt, Artificial Sequence
  spacer sequence GTCN PAM
ggcuacaccauggccaggga

SEQ ID NO: 16517 - RNA, 20 nt, Artificial Sequence
  spacer sequence GTCN PAM
aucugcuccggagaaggugg

SEQ ID NO: 16518 - RNA, 20 nt, Artificial Sequence
  spacer sequence GTCN PAM
aguccaucugcuccggagaa

SEQ ID NO: 16519 - RNA, 20 nt, Artificial Sequence
  spacer sequence GTCN PAM
agguuuuucuccucccucug

SEQ ID NO: 16520 - RNA, 20 nt, Artificial Sequence
  spacer sequence GTCN PAM
ggcaacacagagggaggaga

SEQ ID NO: 16521 - RNA, 20 nt, Artificial Sequence
  spacer sequence GTCN PAM
ugcacacacagacacaaauc

SEQ ID NO: 16522 - RNA, 20 nt, Artificial Sequence
  spacer sequence GTCN PAM
gugugugcaggaccgucggg

SEQ ID NO: 16523 - RNA, 20 nt, Artificial Sequence
  spacer sequence GTCN PAM
aacgggauuugugucugugu

SEQ ID NO: 16524 - RNA, 20 nt, Artificial Sequence
  spacer sequence GTCN PAM
aaaagauucuguggguccaa

SEQ ID NO: 16525 - RNA, 20 nt, Artificial Sequence
  spacer sequence GTCN PAM
caguauuuaauuuauuuucu

SEQ ID NO: 16526 - RNA, 20 nt, Artificial Sequence
  spacer sequence GTCN PAM
ggguaaauuaauggauauga

SEQ ID NO: 16527 - RNA, 20 nt, Artificial Sequence
  spacer sequence GTCN PAM
aaugagagcaaggucccucc

SEQ ID NO: 16528 - RNA, 20 nt, Artificial Sequence
  spacer sequence GTCN PAM
cuccaaaaaauauuaauaaa

SEQ ID NO: 16529 - RNA, 20 nt, Artificial Sequence
  spacer sequence GTCN PAM
agccaaugaaacuugcucca

SEQ ID NO: 16530 - RNA, 20 nt, Artificial Sequence
  spacer sequence GTCN PAM
ugccaaaguguauggagcaa

SEQ ID NO: 16531 - RNA, 20 nt, Artificial Sequence
  spacer sequence GTCN PAM
gaguccugccaaaguguaug

SEQ ID NO: 16532 - RNA, 20 nt, Artificial Sequence
  spacer sequence GTCN PAM
gcacagggccccccaaugcc

SEQ ID NO: 16533 - RNA, 20 nt, Artificial Sequence
  spacer sequence GTCN PAM
ccugguggugucugcacagg

SEQ ID NO: 16534 - RNA, 20 nt, Artificial Sequence
  spacer sequence GTCN PAM
gcgucuccugguggugucug

SEQ ID NO: 16535 - RNA, 20 nt, Artificial Sequence
  spacer sequence GTCN PAM
auaacgucuuauucagccuu

SEQ ID NO: 16536 - RNA, 20 nt, Artificial Sequence
  spacer sequence GTCN PAM
uauucagccuuuccaugugg

SEQ ID NO: 16537 - RNA, 20 nt, Artificial Sequence
  spacer sequence GTCN PAM
ggaaguuacccacaggcugc

SEQ ID NO: 16538 - RNA, 20 nt, Artificial Sequence
  spacer sequence GTCN PAM
guguccacccugccccucaa

SEQ ID NO: 16539 - RNA, 20 nt, Artificial Sequence
  spacer sequence GTCN PAM
acccugccccucaaaggaca

SEQ ID NO: 16540 - RNA, 20 nt, Artificial Sequence
  spacer sequence GTCN PAM
uuugaggggcaggguggaca

SEQ ID NO: 16541 - RNA, 20 nt, Artificial Sequence
  spacer sequence GTCN PAM
gggggauuucauuuguccuu

SEQ ID NO: 16542 - RNA, 20 nt, Artificial Sequence
  spacer sequence GTCN PAM
ugaguucuucauuuaggugg

SEQ ID NO: 16543 - RNA, 20 nt, Artificial Sequence
  spacer sequence GTCN PAM
ccacaacacucagccucacg

SEQ ID NO: 16544 - RNA, 20 nt, Artificial Sequence
  spacer sequence GTCN PAM
uugugccuugaaaugcaaaa

SEQ ID NO: 16545 - RNA, 20 nt, Artificial Sequence
  spacer sequence GTCN PAM
aucucacugguggucuauua

SEQ ID NO: 16546 - RNA, 20 nt, Artificial Sequence
  spacer sequence GTCN PAM
auuaauaguuugaaguuuug

SEQ ID NO: 16547 - RNA, 20 nt, Artificial Sequence
  spacer sequence GTCN PAM
gaaggugguuguugcuuuuu

SEQ ID NO: 16548 - RNA, 20 nt, Artificial Sequence
  spacer sequence GTCN PAM
uuuccaguuuuuuaaaaagg

SEQ ID NO: 16549 - RNA, 20 nt, Artificial Sequence
  spacer sequence GTCN PAM
uucugaagaaacauuaacgc

SEQ ID NO: 16550 - RNA, 20 nt, Artificial Sequence
  spacer sequence GTCN PAM
uaauaaugaacaacacauga

SEQ ID NO: 16551 - RNA, 20 nt, Artificial Sequence
  spacer sequence GTCN PAM
uuugaaaauguauuuucagg

SEQ ID NO: 16552 - RNA, 20 nt, Artificial Sequence
  spacer sequence GTCN PAM
caccaccaaaauuuaauggu

SEQ ID NO: 16553 - RNA, 20 nt, Artificial Sequence
  spacer sequence GTCN PAM
ccauuaaauuuugguggugg

SEQ ID NO: 16554 - RNA, 20 nt, Artificial Sequence
  spacer sequence GTCN PAM
aguacacaaauaauucuaca

SEQ ID NO: 16555 - RNA, 20 nt, Artificial Sequence
  spacer sequence GTCN PAM
cuuuugacuuaccauuaugu

SEQ ID NO: 16556 - RNA, 20 nt, Artificial Sequence
  spacer sequence GTCN PAM
aaagugacuggaaacuucug

SEQ ID NO: 16557 - RNA, 20 nt, Artificial Sequence
  spacer sequence GTCN PAM
guguuuacauuccuggaagu

SEQ ID NO: 16558 - RNA, 20 nt, Artificial Sequence
  spacer sequence GTCN PAM
guuuauuuaacuuccaggaa

SEQ ID NO: 16559 - RNA, 20 nt, Artificial Sequence
  spacer sequence GTCN PAM
auccaggaguuuugccaugu

SEQ ID NO: 16560 - RNA, 20 nt, Artificial Sequence
  spacer sequence GTCN PAM
ucacaagccuuauuauucag

SEQ ID NO: 16561 - RNA, 20 nt, Artificial Sequence
  spacer sequence GTCN PAM
caaagaccuuccuauccaca

SEQ ID NO: 16562 - RNA, 20 nt, Artificial Sequence
  spacer sequence GTCN PAM
uugugacauauggaagccag

SEQ ID NO: 16563 - RNA, 20 nt, Artificial Sequence
  spacer sequence GTCN PAM
cguuggcuguggauaggaag

SEQ ID NO: 16564 - RNA, 20 nt, Artificial Sequence
  spacer sequence GTCN PAM
gcugaauaccccuuucucca

SEQ ID NO: 16565 - RNA, 20 nt, Artificial Sequence
  spacer sequence GTCN PAM
aaaaaaaucuucauacuuua

SEQ ID NO: 16566 - RNA, 20 nt, Artificial Sequence
  spacer sequence GTCN PAM
ccggccaacugcaugcauaa

SEQ ID NO: 16567 - RNA, 20 nt, Artificial Sequence
  spacer sequence GTCN PAM
gagagggcagaaucgcucga

SEQ ID NO: 16568 - RNA, 20 nt, Artificial Sequence
  spacer sequence GTCN PAM
agcgauucugcccucuccga

SEQ ID NO: 16569 - RNA, 20 nt, Artificial Sequence
  spacer sequence GTCN PAM
aucugugagauccaggggcu

SEQ ID NO: 16570 - RNA, 20 nt, Artificial Sequence
  spacer sequence GTCN PAM
cgguagggcagugcuagguc

SEQ ID NO: 16571 - RNA, 20 nt, Artificial Sequence
  spacer sequence GTCN PAM
cucggagguuaaaauuauag

SEQ ID NO: 16572 - RNA, 20 nt, Artificial Sequence
  spacer sequence GTCN PAM
cccucaagguacacgagugc

SEQ ID NO: 16573 - RNA, 20 nt, Artificial Sequence
  spacer sequence GTCN PAM
ccaggcucccugggcuccca

SEQ ID NO: 16574 - RNA, 20 nt, Artificial Sequence
  spacer sequence GTCN PAM
uccccucaucaccaaaguau

SEQ ID NO: 16575 - RNA, 20 nt, Artificial Sequence
  spacer sequence GTCN PAM
gccaaacccaggcccaaguc

SEQ ID NO: 16576 - RNA, 20 nt, Artificial Sequence
  spacer sequence GTCN PAM
uuuaggugccagccaucuau

SEQ ID NO: 16577 - RNA, 20 nt, Artificial Sequence
  spacer sequence GTCN PAM
uaauacacuauaauagccaa

SEQ ID NO: 16578 - RNA, 20 nt, Artificial Sequence
  spacer sequence GTCN PAM
ucuccccaaaugagaacgau

SEQ ID NO: 16579 - RNA, 20 nt, Artificial Sequence
  spacer sequence GTCN PAM
aaccuugaguaauuacauau

SEQ ID NO: 16580 - RNA, 20 nt, Artificial Sequence
  spacer sequence GTCN PAM
ucauguaaauuaaauauguc

SEQ ID NO: 16581 - RNA, 20 nt, Artificial Sequence
  spacer sequence GTCN PAM
aaucucuuggugaacuuuua

SEQ ID NO: 16582 - RNA, 20 nt, Artificial Sequence
  spacer sequence GTCN PAM
gccugcugaaggagaaaaaa

SEQ ID NO: 16583 - RNA, 20 nt, Artificial Sequence
  spacer sequence GTCN PAM
uuccaguaauugcgaauugu

SEQ ID NO: 16584 - RNA, 20 nt, Artificial Sequence
  spacer sequence GTCN PAM
uuagaauuuacaacuaggua

SEQ ID NO: 16585 - RNA, 20 nt, Artificial Sequence
  spacer sequence GTCN PAM
gcccacaccaugcauauuca

SEQ ID NO: 16586 - RNA, 20 nt, Artificial Sequence
  spacer sequence GTCN PAM
ggaagauauuacaauuuugc

SEQ ID NO: 16587 - RNA, 20 nt, Artificial Sequence
  spacer sequence GTCN PAM
agccaaaggggcuaagauac

SEQ ID NO: 16588 - RNA, 20 nt, Artificial Sequence
  spacer sequence GTCN PAM
cggacuuuguucauaaaacu

SEQ ID NO: 16589 - RNA, 20 nt, Artificial Sequence
  spacer sequence GTCN PAM
gugacgauguuugcagccuc

SEQ ID NO: 16590 - RNA, 20 nt, Artificial Sequence
  spacer sequence GTCN PAM
cucauaggcaauacugcaua

SEQ ID NO: 16591 - RNA, 20 nt, Artificial Sequence
  spacer sequence GTCN PAM
uccaacagaacagauuaaca

SEQ ID NO: 16592 - RNA, 20 nt, Artificial Sequence
  spacer sequence GTCN PAM
cuccacccuuccaaaaagcc

SEQ ID NO: 16593 - RNA, 20 nt, Artificial Sequence
  spacer sequence GTCN PAM
cuccuguguaaacauccacu

SEQ ID NO: 16594 - RNA, 20 nt, Artificial Sequence
  spacer sequence GTCN PAM
gguuuacuucugaggagugc

SEQ ID NO: 16595 - RNA, 20 nt, Artificial Sequence
  spacer sequence GTCN PAM
ugcagacaucagcugacauu

SEQ ID NO: 16596 - RNA, 20 nt, Artificial Sequence
  spacer sequence GTCN PAM
gcaugacccguucaccaugg

SEQ ID NO: 16597 - RNA, 20 nt, Artificial Sequence
  spacer sequence GTCN PAM
gcugaugucugcaugacccg

SEQ ID NO: 16598 - RNA, 20 nt, Artificial Sequence
  spacer sequence GTCN PAM
acccaccaccaccaucccac

SEQ ID NO: 16599 - RNA, 20 nt, Artificial Sequence
  spacer sequence GTCN PAM
ggagaagaauccuuugcuug

SEQ ID NO: 16600 - RNA, 20 nt, Artificial Sequence
  spacer sequence GTCN PAM
ggagguuagcaaggugugag

SEQ ID NO: 16601 - RNA, 20 nt, Artificial Sequence
  spacer sequence GTCN PAM
cuagaauuuuuuaaauguca

SEQ ID NO: 16602 - RNA, 20 nt, Artificial Sequence
  spacer sequence GTCN PAM
uaucucagcuggugugcaag

SEQ ID NO: 16603 - RNA, 20 nt, Artificial Sequence
  spacer sequence GTCN PAM
gacugagaauaacagcuucg

SEQ ID NO: 16604 - RNA, 20 nt, Artificial Sequence
  spacer sequence GTCN PAM
gacuugcacaccagcugaga

SEQ ID NO: 16605 - RNA, 20 nt, Artificial Sequence
  spacer sequence GTCN PAM
cagcuuaccgcuccacugcu

SEQ ID NO: 16606 - RNA, 20 nt, Artificial Sequence
  spacer sequence GTCN PAM
agcaguggagcgguaagcug

SEQ ID NO: 16607 - RNA, 20 nt, Artificial Sequence
  spacer sequence GTCN PAM
gaggcugggggagagagggg

SEQ ID NO: 16608 - RNA, 20 nt, Artificial Sequence
  spacer sequence GTCN PAM
acaguccugaccaauuccgu

SEQ ID NO: 16609 - RNA, 20 nt, Artificial Sequence
  spacer sequence GTCN PAM
ugaccaauuccguuugacac

SEQ ID NO: 16610 - RNA, 20 nt, Artificial Sequence
  spacer sequence GTCN PAM
ggacuguggaccuguggcuc

SEQ ID NO: 16611 - RNA, 20 nt, Artificial Sequence
  spacer sequence GTCN PAM
aacggaauuggucaggacug

SEQ ID NO: 16612 - RNA, 20 nt, Artificial Sequence
  spacer sequence GTCN PAM
caucccauaucaacccucau

SEQ ID NO: 16613 - RNA, 20 nt, Artificial Sequence
  spacer sequence GTCN PAM
cauuugcucuguaguguagc

SEQ ID NO: 16614 - RNA, 20 nt, Artificial Sequence
  spacer sequence GTCN PAM
gcagugugcaggcagcaggc

SEQ ID NO: 16615 - RNA, 20 nt, Artificial Sequence
  spacer sequence GTCN PAM
cccuccccuccuaucugcuu

SEQ ID NO: 16616 - RNA, 20 nt, Artificial Sequence
  spacer sequence GTCN PAM
cagcucugggucccccuccc

SEQ ID NO: 16617 - RNA, 20 nt, Artificial Sequence
  spacer sequence GTCN PAM
uuugugcuugucccagcucu

SEQ ID NO: 16618 - RNA, 20 nt, Artificial Sequence
  spacer sequence GTCN PAM
aacaacaaugccugcuguca

SEQ ID NO: 16619 - RNA, 20 nt, Artificial Sequence
  spacer sequence GTCN PAM
gcagcugaauuauuuuuaua

SEQ ID NO: 16620 - RNA, 20 nt, Artificial Sequence
  spacer sequence GTCN PAM
gugcugacuuguuaagcaau

SEQ ID NO: 16621 - RNA, 20 nt, Artificial Sequence
  spacer sequence GTCN PAM
gcacagacacguacuuguuu

SEQ ID NO: 16622 - RNA, 20 nt, Artificial Sequence
  spacer sequence GTCN PAM
cacagcuccaagaucagaag

SEQ ID NO: 16623 - RNA, 20 nt, Artificial Sequence
  spacer sequence GTCN PAM
uugaagcugcucaaauguuu

SEQ ID NO: 16624 - RNA, 20 nt, Artificial Sequence
  spacer sequence GTCN PAM
uuuuaacuaaaacauuugag

SEQ ID NO: 16625 - RNA, 20 nt, Artificial Sequence
  spacer sequence GTCN PAM
guuccuguacauuuuaaaua

SEQ ID NO: 16626 - RNA, 20 nt, Artificial Sequence
  spacer sequence GTCN PAM
cucacaaugaguuuuuguuu

SEQ ID NO: 16627 - RNA, 20 nt, Artificial Sequence
  spacer sequence GTCN PAM
ccagguauccccuucaucaa

SEQ ID NO: 16628 - RNA, 20 nt, Artificial Sequence
  spacer sequence GTCN PAM
cugccagagaauucccagug

SEQ ID NO: 16629 - RNA, 20 nt, Artificial Sequence
  spacer sequence GTCN PAM
aucgugcacugcgcguugcc

SEQ ID NO: 16630 - RNA, 20 nt, Artificial Sequence
  spacer sequence GTCN PAM
ccagggugaaccaagagaug

SEQ ID NO: 16631 - RNA, 20 nt, Artificial Sequence
  spacer sequence GTCN PAM
ucucuugguucacccuggag

SEQ ID NO: 16632 - RNA, 20 nt, Artificial Sequence
  spacer sequence GTCN PAM
gcaaacuucuaauucgccag

SEQ ID NO: 16633 - RNA, 20 nt, Artificial Sequence
  spacer sequence GTCN PAM
gaagcaguugugguagaucc

SEQ ID NO: 16634 - RNA, 20 nt, Artificial Sequence
  spacer sequence GTCN PAM
acauugcuugagguuuuaaa

SEQ ID NO: 16635 - RNA, 20 nt, Artificial Sequence
  spacer sequence GTCN PAM
uuuagaucaguacuagauuu

SEQ ID NO: 16636 - RNA, 20 nt, Artificial Sequence
  spacer sequence GTCN PAM
cucucucucucucucucugu

SEQ ID NO: 16637 - RNA, 20 nt, Artificial Sequence
  spacer sequence GTCN PAM
ccccaacucugccaccuccc

SEQ ID NO: 16638 - RNA, 20 nt, Artificial Sequence
  spacer sequence GTCN PAM
uucacacugggcuaucuaag

SEQ ID NO: 16639 - RNA, 20 nt, Artificial Sequence
  spacer sequence GTCN PAM
ggggaauuguauaaacuuag

SEQ ID NO: 16640 - RNA, 20 nt, Artificial Sequence
  spacer sequence GTCN PAM
gaugcggagcuggaauauua

SEQ ID NO: 16641 - RNA, 20 nt, Artificial Sequence
  spacer sequence GTCN PAM
cuucugaucccagcagggaa

SEQ ID NO: 16642 - RNA, 20 nt, Artificial Sequence
  spacer sequence GTCN PAM
uucugcaauggcauugaguu

SEQ ID NO: 16643 - RNA, 20 nt, Artificial Sequence
  spacer sequence GTCN PAM
auuucugagcucauucguca

SEQ ID NO: 16644 - RNA, 20 nt, Artificial Sequence
  spacer sequence GTCN PAM
cccugcuuuuuacuggccag

SEQ ID NO: 16645 - RNA, 20 nt, Artificial Sequence
  spacer sequence GTCN PAM
gauguuuacuggcuucaaau

SEQ ID NO: 16646 - RNA, 20 nt, Artificial Sequence
  spacer sequence GTCN PAM
cuaggagcacauguagagag

SEQ ID NO: 16647 - RNA, 20 nt, Artificial Sequence
  spacer sequence GTCN PAM
gguuacauuuccuggaaauu

SEQ ID NO: 16648 - RNA, 20 nt, Artificial Sequence
  spacer sequence GTCN PAM
caaacuuaauuuccaggaaa

SEQ ID NO: 16649 - RNA, 20 nt, Artificial Sequence
  spacer sequence GTCN PAM
uuuucugucacaaacuuaau

SEQ ID NO: 16650 - RNA, 20 nt, Artificial Sequence
  spacer sequence GTCN PAM
uguuguaaaaacuacguggc

SEQ ID NO: 16651 - RNA, 20 nt, Artificial Sequence
  spacer sequence GTCN PAM
uaaaggggagaagcuguuua

SEQ ID NO: 16652 - RNA, 20 nt, Artificial Sequence
  spacer sequence GTCN PAM
cccucccuccuugguucuuu

SEQ ID NO: 16653 - RNA, 20 nt, Artificial Sequence
  spacer sequence GTCN PAM
auuuccuauuuguauuacaa

SEQ ID NO: 16654 - RNA, 20 nt, Artificial Sequence
  spacer sequence GTCN PAM
uuauccauuaaauuauauag

SEQ ID NO: 16655 - RNA, 20 nt, Artificial Sequence
  spacer sequence GTCN PAM
gaacauauuuuaugaacuuc

SEQ ID NO: 16656 - RNA, 20 nt, Artificial Sequence
  spacer sequence GTCN PAM
uccaaauugauacauaacau

SEQ ID NO: 16657 - RNA, 20 nt, Artificial Sequence
  spacer sequence GTCN PAM
gcaguguuguuauuucaagg

SEQ ID NO: 16658 - RNA, 20 nt, Artificial Sequence
  spacer sequence GTCN PAM
uggcuaugucagcaguguug

SEQ ID NO: 16659 - RNA, 20 nt, Artificial Sequence
  spacer sequence GTCN PAM
agcuugaugcuaagugcuuu

SEQ ID NO: 16660 - RNA, 20 nt, Artificial Sequence
  spacer sequence GTCN PAM
guuuuuacauacaguaguac

SEQ ID NO: 16661 - RNA, 20 nt, Artificial Sequence
  spacer sequence GTCN PAM
aaugacuucuuugugcaaua

SEQ ID NO: 16662 - RNA, 20 nt, Artificial Sequence
  spacer sequence GTCN PAM
uuugacaaaauuuaccccaa

SEQ ID NO: 16663 - RNA, 20 nt, Artificial Sequence
  spacer sequence GTCN PAM
guucacacccuuuauugcac

SEQ ID NO: 16664 - RNA, 20 nt, Artificial Sequence
  spacer sequence GTCN PAM
cuggauguuaauuuaaucua

SEQ ID NO: 16665 - RNA, 20 nt, Artificial Sequence
  spacer sequence GTCN PAM
guaagaaaggaaacaaauuu

SEQ ID NO: 16666 - RNA, 20 nt, Artificial Sequence
  spacer sequence GTCN PAM
uggaaaaucauuaauuucac

SEQ ID NO: 16667 - RNA, 20 nt, Artificial Sequence
  spacer sequence GTCN PAM
ugacccugccugcacguuuc

SEQ ID NO: 16668 - RNA, 20 nt, Artificial Sequence
  spacer sequence GTCN PAM
ggacaggcaaccuucagcuc

SEQ ID NO: 16669 - RNA, 20 nt, Artificial Sequence
  spacer sequence GTCN PAM
cccucugcuccuguucuuga

SEQ ID NO: 16670 - RNA, 20 nt, Artificial Sequence
  spacer sequence GTCN PAM
guaacagcaggagacagaaa

SEQ ID NO: 16671 - RNA, 20 nt, Artificial Sequence
  spacer sequence GTCN PAM
ccugcuguuacagacaguua

SEQ ID NO: 16672 - RNA, 20 nt, Artificial Sequence
  spacer sequence GTCN PAM
acgugauaugaagaucaucc

SEQ ID NO: 16673 - RNA, 20 nt, Artificial Sequence
  spacer sequence GTCN PAM
ucuuuuauaaauaauguuuu

SEQ ID NO: 16674 - RNA, 20 nt, Artificial Sequence
  spacer sequence GTCN PAM
ccacaaggguaaugucugaa

SEQ ID NO: 16675 - RNA, 20 nt, Artificial Sequence
  spacer sequence GTCN PAM
gaagaaguuugggaucuuua

SEQ ID NO: 16676 - RNA, 20 nt, Artificial Sequence
  spacer sequence GTCN PAM
ugacaaugccaacaauugua

SEQ ID NO: 16677 - RNA, 20 nt, Artificial Sequence
  spacer sequence GTCN PAM
ggacuuuugaaagcuuaauu

SEQ ID NO: 16678 - RNA, 20 nt, Artificial Sequence
  spacer sequence GTCN PAM
uacaauuguuggcauuguca

SEQ ID NO: 16679 - RNA, 20 nt, Artificial Sequence
  spacer sequence GTCN PAM
cagugauugcaugauugagc

SEQ ID NO: 16680 - RNA, 20 nt, Artificial Sequence
  spacer sequence GTCN PAM
uagaaagaguuucucugaca

SEQ ID NO: 16681 - RNA, 20 nt, Artificial Sequence
  spacer sequence GTCN PAM
gagaaacucuuucuaagaca

SEQ ID NO: 16682 - RNA, 20 nt, Artificial Sequence
  spacer sequence GTCN PAM
aaguacaaugucagagaaac

SEQ ID NO: 16683 - RNA, 20 nt, Artificial Sequence
  spacer sequence GTCN PAM
uauuuacaaauacagcuugu

SEQ ID NO: 16684 - RNA, 20 nt, Artificial Sequence
  spacer sequence GTCN PAM
uauauacaagcuguauuugu

SEQ ID NO: 16685 - RNA, 20 nt, Artificial Sequence
  spacer sequence GTCN PAM
uuggauaguggccucacaaa

SEQ ID NO: 16686 - RNA, 20 nt, Artificial Sequence
  spacer sequence GTCN PAM
gucguuuuuauucagaauca

SEQ ID NO: 16687 - RNA, 20 nt, Artificial Sequence
  spacer sequence GTCN PAM
uuuuuauucagaaucacaua

SEQ ID NO: 16688 - RNA, 20 nt, Artificial Sequence
  spacer sequence GTCN PAM
uaauagcauacuauaauuua

SEQ ID NO: 16689 - RNA, 20 nt, Artificial Sequence
  spacer sequence GTCN PAM
cauuuacaauuacaccauaa

SEQ ID NO: 16690 - RNA, 20 nt, Artificial Sequence
  spacer sequence GTCN PAM
gagcuaggagagaaucagaa

SEQ ID NO: 16691 - RNA, 20 nt, Artificial Sequence
  spacer sequence GTCN PAM
gauauaucauuaucuaaaua

SEQ ID NO: 16692 - RNA, 20 nt, Artificial Sequence
  spacer sequence GTCN PAM
aggcaaauaauuuuaaauac

SEQ ID NO: 16693 - RNA, 20 nt, Artificial Sequence
  spacer sequence GTCN PAM
auguucaugauuuuaaagag

SEQ ID NO: 16694 - RNA, 20 nt, Artificial Sequence
  spacer sequence GTCN PAM
gcuccuguugauauauaaca

SEQ ID NO: 16695 - RNA, 20 nt, Artificial Sequence
  spacer sequence GTCN PAM
uauaaaauguaguaaagucu

SEQ ID NO: 16696 - RNA, 20 nt, Artificial Sequence
  spacer sequence GTCN PAM
uauuuuuucucuagucucuc

SEQ ID NO: 16697 - RNA, 20 nt, Artificial Sequence
  spacer sequence GTCN PAM
cucaaaaagcuaacuuuaug

SEQ ID NO: 16698 - RNA, 20 nt, Artificial Sequence
  spacer sequence GTCN PAM
uaaaguuagcuuuuugagag

SEQ ID NO: 16699 - RNA, 20 nt, Artificial Sequence
  spacer sequence GTCN PAM
gauuugagguuuuggcuuau

SEQ ID NO: 16700 - RNA, 20 nt, Artificial Sequence
  spacer sequence GTCN PAM
uuucuauaagggaacagcag

SEQ ID NO: 16701 - RNA, 20 nt, Artificial Sequence
  spacer sequence GTCN PAM
cauauuuuaugaugggggga

SEQ ID NO: 16702 - RNA, 20 nt, Artificial Sequence
  spacer sequence GTCN PAM
gagcuuucaauagggguuuu

SEQ ID NO: 16703 - RNA, 20 nt, Artificial Sequence
  spacer sequence GTCN PAM
aaggcugcugauaucugagg

SEQ ID NO: 16704 - RNA, 20 nt, Artificial Sequence
  spacer sequence GTCN PAM
aauauccacccucagauauc

SEQ ID NO: 16705 - RNA, 20 nt, Artificial Sequence
  spacer sequence GTCN PAM
cucaagccuguaaucccagc

SEQ ID NO: 16706 - RNA, 20 nt, Artificial Sequence
  spacer sequence GTCN PAM
ggaguucaagaccagccugg

SEQ ID NO: 16707 - RNA, 20 nt, Artificial Sequence
  spacer sequence GTCN PAM
ugaacuccugaccucaggug

SEQ ID NO: 16708 - RNA, 20 nt, Artificial Sequence
  spacer sequence GTCN PAM
aaaaaaaaaaaaaaaaaaaa

SEQ ID NO: 16709 - RNA, 20 nt, Artificial Sequence
  spacer sequence GTCN PAM
cgaauucuaagcuuuauuua

SEQ ID NO: 16710 - RNA, 20 nt, Artificial Sequence
  spacer sequence GTCN PAM
cuguuuuauucuugcuuccu

SEQ ID NO: 16711 - RNA, 20 nt, Artificial Sequence
  spacer sequence GTCN PAM
uuuaagcgugcuggguagga

SEQ ID NO: 16712 - RNA, 20 nt, Artificial Sequence
  spacer sequence GTCN PAM
caaaaagaaaggagaagcaa

SEQ ID NO: 16713 - RNA, 20 nt, Artificial Sequence
  spacer sequence GTCN PAM
gcuuuucuuuuuaugaugag

SEQ ID NO: 16714 - RNA, 20 nt, Artificial Sequence
  spacer sequence GTCN PAM
gcacaauuccaagucugcuu

SEQ ID NO: 16715 - RNA, 20 nt, Artificial Sequence
  spacer sequence GTCN PAM
uccagaacuucgcuucaggg

SEQ ID NO: 16716 - RNA, 20 nt, Artificial Sequence
  spacer sequence GTCN PAM
gaauuuaugugcaaugguag

SEQ ID NO: 16717 - RNA, 20 nt, Artificial Sequence
  spacer sequence GTCN PAM
ugauucuaguuacugacauc

SEQ ID NO: 16718 - RNA, 20 nt, Artificial Sequence
  spacer sequence GTCN PAM
guaacuagaaucacgacuuc

SEQ ID NO: 16719 - RNA, 20 nt, Artificial Sequence
  spacer sequence GTCN PAM
caucucaaagugagauguca

SEQ ID NO: 16720 - RNA, 20 nt, Artificial Sequence
  spacer sequence GTCN PAM
ugauuucuuucauuguguuu

SEQ ID NO: 16721 - RNA, 20 nt, Artificial Sequence
  spacer sequence GTCN PAM
cagcacuuguugugcgccca

SEQ ID NO: 16722 - RNA, 20 nt, Artificial Sequence
  spacer sequence GTCN PAM
aagauauucaaugggcgcac

SEQ ID NO: 16723 - RNA, 20 nt, Artificial Sequence
  spacer sequence GTCN PAM
caguuaaaugauugauuauu

SEQ ID NO: 16724 - RNA, 20 nt, Artificial Sequence
  spacer sequence GTCN PAM
aaagguucuguuauuauuuu

SEQ ID NO: 16725 - RNA, 20 nt, Artificial Sequence
  spacer sequence GTCN PAM
uaacuauauguaaggccuuc

SEQ ID NO: 16726 - RNA, 20 nt, Artificial Sequence
  spacer sequence GTCN PAM
uagauuaaccagcucaaaaa

SEQ ID NO: 16727 - RNA, 20 nt, Artificial Sequence
  spacer sequence GTCN PAM
caaauagguuauucagucuu

SEQ ID NO: 16728 - RNA, 20 nt, Artificial Sequence
  spacer sequence GTCN PAM
agcaagaauuaaaaccacac

SEQ ID NO: 16729 - RNA, 20 nt, Artificial Sequence
  spacer sequence GTCN PAM
gucaagcaagaauuaaaacc

SEQ ID NO: 16730 - RNA, 20 nt, Artificial Sequence
  spacer sequence GTCN PAM
uuuaaacgagcagcucgaua

SEQ ID NO: 16731 - RNA, 20 nt, Artificial Sequence
  spacer sequence GTCN PAM
ucggagauccaaagccuugc

SEQ ID NO: 16732 - RNA, 20 nt, Artificial Sequence
  spacer sequence GTCN PAM
ucuucggagauccaaagccu

SEQ ID NO: 16733 - RNA, 20 nt, Artificial Sequence
  spacer sequence GTCN PAM
caagacaacacauggaaaug

SEQ ID NO: 16734 - RNA, 20 nt, Artificial Sequence
  spacer sequence GTCN PAM
ugugacuggaaggaaaauga

SEQ ID NO: 16735 - RNA, 20 nt, Artificial Sequence
  spacer sequence GTCN PAM
uucccacauccugcuggggg

SEQ ID NO: 16736 - RNA, 20 nt, Artificial Sequence
  spacer sequence GTCN PAM
cauaagguaaauguggugga

SEQ ID NO: 16737 - RNA, 20 nt, Artificial Sequence
  spacer sequence GTCN PAM
uauuauuucuccucuccccc

SEQ ID NO: 16738 - RNA, 20 nt, Artificial Sequence
  spacer sequence GTCN PAM
agaggggauuaaaugucaua

SEQ ID NO: 16739 - RNA, 20 nt, Artificial Sequence
  spacer sequence GTCN PAM
guggucuagaggggauuaaa

SEQ ID NO: 16740 - RNA, 20 nt, Artificial Sequence
  spacer sequence GTCN PAM
aacuaggucggagagacaag

SEQ ID NO: 16741 - RNA, 20 nt, Artificial Sequence
  spacer sequence GTCN PAM
gagagacaaguuccagugaa

SEQ ID NO: 16742 - RNA, 20 nt, Artificial Sequence
  spacer sequence GTCN PAM
cuccgaccuaguuugaccac

SEQ ID NO: 16743 - RNA, 20 nt, Artificial Sequence
  spacer sequence GTCN PAM
gucaucacagaaucugcauu

SEQ ID NO: 16744 - RNA, 20 nt, Artificial Sequence
  spacer sequence GTCN PAM
ucacagaaucugcauugacu

SEQ ID NO: 16745 - RNA, 20 nt, Artificial Sequence
  spacer sequence GTCN PAM
augcagauucugugaugaca

SEQ ID NO: 16746 - RNA, 20 nt, Artificial Sequence
  spacer sequence GTCN PAM
aacaugcucaagcaaaaaau

SEQ ID NO: 16747 - RNA, 20 nt, Artificial Sequence
  spacer sequence GTCN PAM
cuauauaguguuacuguuua

SEQ ID NO: 16748 - RNA, 20 nt, Artificial Sequence
  spacer sequence GTCN PAM
cacugcuagccuuuaauucc

SEQ ID NO: 16749 - RNA, 20 nt, Artificial Sequence
  spacer sequence GTCN PAM
ggacuggacauuuguaaggg

SEQ ID NO: 16750 - RNA, 20 nt, Artificial Sequence
  spacer sequence GTCN PAM
agacuccacuguuucugcua

SEQ ID NO: 16751 - RNA, 20 nt, Artificial Sequence
  spacer sequence GTCN PAM
aguccagacuccacuguuuc

SEQ ID NO: 16752 - RNA, 20 nt, Artificial Sequence
  spacer sequence GTCN PAM
cccuuacaaauguccagucc

SEQ ID NO: 16753 - RNA, 20 nt, Artificial Sequence
  spacer sequence GTCN PAM
aaaccacaucagagacaaga

SEQ ID NO: 16754 - RNA, 20 nt, Artificial Sequence
  spacer sequence GTCN PAM
cugaugugguuuugacagau

SEQ ID NO: 16755 - RNA, 20 nt, Artificial Sequence
  spacer sequence GTCN PAM
aaccaaccuuuugaaauuuc

SEQ ID NO: 16756 - RNA, 20 nt, Artificial Sequence
  spacer sequence GTCN PAM
gugcgcuucagcaacugccc

SEQ ID NO: 16757 - RNA, 20 nt, Artificial Sequence
  spacer sequence GTCN PAM
aaaauggcaucuuaaaguca

SEQ ID NO: 16758 - RNA, 20 nt, Artificial Sequence
  spacer sequence GTCN PAM
aggucauggugucaucccac

SEQ ID NO: 16759 - RNA, 20 nt, Artificial Sequence
  spacer sequence GTCN PAM
uggugucaucccaccacggg

SEQ ID NO: 16760 - RNA, 20 nt, Artificial Sequence
  spacer sequence GTCN PAM
ucccaccacggggcuguguu

SEQ ID NO: 16761 - RNA, 20 nt, Artificial Sequence
  spacer sequence GTCN PAM
gcccggauggggcuguaauu

SEQ ID NO: 16762 - RNA, 20 nt, Artificial Sequence
  spacer sequence GTCN PAM
aacaagucauuggcugaacu

SEQ ID NO: 16763 - RNA, 20 nt, Artificial Sequence
  spacer sequence GTCN PAM
uuggcugaacugcaaaugcc

SEQ ID NO: 16764 - RNA, 20 nt, Artificial Sequence
  spacer sequence GTCN PAM
gaggcaaaguggccauauag

SEQ ID NO: 16765 - RNA, 20 nt, Artificial Sequence
  spacer sequence GTCN PAM
ccaaggcuggaaauggacaa

SEQ ID NO: 16766 - RNA, 20 nt, Artificial Sequence
  spacer sequence GTCN PAM
auuuccagccuuggugacgu

SEQ ID NO: 16767 - RNA, 20 nt, Artificial Sequence
  spacer sequence GTCN PAM
agcuuccauuguccauuucc

SEQ ID NO: 16768 - RNA, 20 nt, Artificial Sequence
  spacer sequence GTCN PAM
auuuuggauuucuuuucuuc

SEQ ID NO: 16769 - RNA, 20 nt, Artificial Sequence
  spacer sequence GTCN PAM
gauguguguaccuauccugc

SEQ ID NO: 16770 - RNA, 20 nt, Artificial Sequence
  spacer sequence GTCN PAM
agaacacagaaaaauaaaua

SEQ ID NO: 16771 - RNA, 20 nt, Artificial Sequence
  spacer sequence GTCN PAM
uggacagucacauagaguaa

SEQ ID NO: 16772 - RNA, 20 nt, Artificial Sequence
  spacer sequence GTCN PAM
augacagcccuguaauguua

SEQ ID NO: 16773 - RNA, 20 nt, Artificial Sequence
  spacer sequence GTCN PAM
cauagaguaauagagaaagc

SEQ ID NO: 16774 - RNA, 20 nt, Artificial Sequence
  spacer sequence GTCN PAM
ucuagaggaauuugccccaa

SEQ ID NO: 16775 - RNA, 20 nt, Artificial Sequence
  spacer sequence GTCN PAM
uccucuggcgugaccuggau

SEQ ID NO: 16776 - RNA, 20 nt, Artificial Sequence
  spacer sequence GTCN PAM
cgccagaggaugacgauugu

SEQ ID NO: 16777 - RNA, 20 nt, Artificial Sequence
  spacer sequence GTCN PAM
cccaaugggaaguucaucug

SEQ ID NO: 16778 - RNA, 20 nt, Artificial Sequence
  spacer sequence GTCN PAM
ugauccccuucuggagcucc

SEQ ID NO: 16779 - RNA, 20 nt, Artificial Sequence
  spacer sequence GTCN PAM
gguucaucaucuguaagaau

SEQ ID NO: 16780 - RNA, 20 nt, Artificial Sequence
  spacer sequence GTCN PAM
ucucuggcacucuaauaauu

SEQ ID NO: 16781 - RNA, 20 nt, Artificial Sequence
  spacer sequence GTCN PAM
augaggcaaaucaucacaua

SEQ ID NO: 16782 - RNA, 20 nt, Artificial Sequence
  spacer sequence GTCN PAM
uccuugcauaacuccagaga

SEQ ID NO: 16783 - RNA, 20 nt, Artificial Sequence
  spacer sequence GTCN PAM
gguuuguaaguuuagaaaga

SEQ ID NO: 16784 - RNA, 20 nt, Artificial Sequence
  spacer sequence GTCN PAM
auugugccaaagaaugaaag

SEQ ID NO: 16785 - RNA, 20 nt, Artificial Sequence
  spacer sequence GTCN PAM
guuuacuuaggaguauauac

SEQ ID NO: 16786 - RNA, 20 nt, Artificial Sequence
  spacer sequence GTCN PAM
caugaaaaaugugccacauu

SEQ ID NO: 16787 - RNA, 20 nt, Artificial Sequence
  spacer sequence GTCN PAM
uuuucuuauuacagcagugu

SEQ ID NO: 16788 - RNA, 20 nt, Artificial Sequence
  spacer sequence GTCN PAM
cagcauaauucacacugcca

SEQ ID NO: 16789 - RNA, 20 nt, Artificial Sequence
  spacer sequence GTCN PAM
gagaaauacugcccgugcau

SEQ ID NO: 16790 - RNA, 20 nt, Artificial Sequence
  spacer sequence GTCN PAM
uuuuuuuuuuauucugagaa

SEQ ID NO: 16791 - RNA, 20 nt, Artificial Sequence
  spacer sequence GTCN PAM
agcaaacaccacauuucaga

SEQ ID NO: 16792 - RNA, 20 nt, Artificial Sequence
  spacer sequence GTCN PAM
uuucuuuagacuugaaauac

SEQ ID NO: 16793 - RNA, 20 nt, Artificial Sequence
  spacer sequence GTCN PAM
aaagaaaggacuucucagcc

SEQ ID NO: 16794 - RNA, 20 nt, Artificial Sequence
  spacer sequence GTCN PAM
aaguggacuaauuuucugaa

SEQ ID NO: 16795 - RNA, 20 nt, Artificial Sequence
  spacer sequence GTCN PAM
acuuugacaacauuaggcga

SEQ ID NO: 16796 - RNA, 20 nt, Artificial Sequence
  spacer sequence GTCN PAM
cauaaugaagcauuuuggag

SEQ ID NO: 16797 - RNA, 20 nt, Artificial Sequence
  spacer sequence GTCN PAM
accuuguuauaccauccgcu

SEQ ID NO: 16798 - RNA, 20 nt, Artificial Sequence
  spacer sequence GTCN PAM
uucuuuccuguuugcuuuuu

SEQ ID NO: 16799 - RNA, 20 nt, Artificial Sequence
  spacer sequence GTCN PAM
cugcuugugaaaucuuaugc

SEQ ID NO: 16800 - RNA, 20 nt, Artificial Sequence
  spacer sequence GTCN PAM
uaaacaguuaaucagucuga

SEQ ID NO: 16801 - RNA, 20 nt, Artificial Sequence
  spacer sequence GTCN PAM
gaccuucuuuagcaagcugc

SEQ ID NO: 16802 - RNA, 20 nt, Artificial Sequence
  spacer sequence GTCN PAM
gacugauuaacuguuuaaga

SEQ ID NO: 16803 - RNA, 20 nt, Artificial Sequence
  spacer sequence GTCN PAM
uacuugagcacaggugcagc

SEQ ID NO: 16804 - RNA, 20 nt, Artificial Sequence
  spacer sequence GTCN PAM
ccacaggaauaugaagguua

SEQ ID NO: 16805 - RNA, 20 nt, Artificial Sequence
  spacer sequence GTCN PAM
uuauuaguaggaauauaacc

SEQ ID NO: 16806 - RNA, 20 nt, Artificial Sequence
  spacer sequence GTCN PAM
ucuuuuauuugaaaaguaug

SEQ ID NO: 16807 - RNA, 20 nt, Artificial Sequence
  spacer sequence GTCN PAM
uucuucucuuacauuugcuu

SEQ ID NO: 16808 - RNA, 20 nt, Artificial Sequence
  spacer sequence GTCN PAM
aaauggaagcaaauguaaga

SEQ ID NO: 16809 - RNA, 20 nt, Artificial Sequence
  spacer sequence GTCN PAM
gaauuaaggauuuuaaguac

SEQ ID NO: 16810 - RNA, 20 nt, Artificial Sequence
  spacer sequence GTCN PAM
guaaaccucagaacuuguag

SEQ ID NO: 16811 - RNA, 20 nt, Artificial Sequence
  spacer sequence GTCN PAM
uccuucagucuguaaaccuc

SEQ ID NO: 16812 - RNA, 20 nt, Artificial Sequence
  spacer sequence GTCN PAM
gacacauuucuaaaaguggg

SEQ ID NO: 16813 - RNA, 20 nt, Artificial Sequence
  spacer sequence GTCN PAM
gaccuugggaacaaaaaaaa

SEQ ID NO: 16814 - RNA, 20 nt, Artificial Sequence
  spacer sequence GTCN PAM
guuuugaaccacauuaccuu

SEQ ID NO: 16815 - RNA, 20 nt, Artificial Sequence
  spacer sequence GTCN PAM
ucuaaauguagugacugaac

SEQ ID NO: 16816 - RNA, 20 nt, Artificial Sequence
  spacer sequence GTCN PAM
cuacauuuagaagacuuuaa

SEQ ID NO: 16817 - RNA, 20 nt, Artificial Sequence
  spacer sequence GTCN PAM
ccuugcaaaacauuuggcua

SEQ ID NO: 16818 - RNA, 20 nt, Artificial Sequence
  spacer sequence GTCN PAM
gauuuuuaauaauauaccag

SEQ ID NO: 16819 - RNA, 20 nt, Artificial Sequence
  spacer sequence GTCN PAM
cacuuugucugauuuuuaau

SEQ ID NO: 16820 - RNA, 20 nt, Artificial Sequence
  spacer sequence GTCN PAM
acugauuugcauugacaucu

SEQ ID NO: 16821 - RNA, 20 nt, Artificial Sequence
  spacer sequence GTCN PAM
augcaaaucaguagacuaca

SEQ ID NO: 16822 - RNA, 20 nt, Artificial Sequence
  spacer sequence GTCN PAM
ucgauugaaguggaagggag

SEQ ID NO: 16823 - RNA, 20 nt, Artificial Sequence
  spacer sequence GTCN PAM
ugcuguuugaacguagaagc

SEQ ID NO: 16824 - RNA, 20 nt, Artificial Sequence
  spacer sequence GTCN PAM
caaugucucagugacagacu

SEQ ID NO: 16825 - RNA, 20 nt, Artificial Sequence
  spacer sequence GTCN PAM
cagugacagacugagaucuc

SEQ ID NO: 16826 - RNA, 20 nt, Artificial Sequence
  spacer sequence GTCN PAM
cugagacauugagacguucc

SEQ ID NO: 16827 - RNA, 20 nt, Artificial Sequence
  spacer sequence GTCN PAM
gucacugagacauugagacg

SEQ ID NO: 16828 - RNA, 20 nt, Artificial Sequence
  spacer sequence GTCN PAM
ucaaguuugcuuuccaaguc

SEQ ID NO: 16829 - RNA, 20 nt, Artificial Sequence
  spacer sequence GTCN PAM
uucuccuugauugucuuaac

SEQ ID NO: 16830 - RNA, 20 nt, Artificial Sequence
  spacer sequence GTCN PAM
uaacaggguaaagaagcaaa

SEQ ID NO: 16831 - RNA, 20 nt, Artificial Sequence
  spacer sequence GTCN PAM
acccuugccggggccccugc

SEQ ID NO: 16832 - RNA, 20 nt, Artificial Sequence
  spacer sequence GTCN PAM
ccgcgcccaacuucacuuuc

SEQ ID NO: 16833 - RNA, 20 nt, Artificial Sequence
  spacer sequence GTCN PAM
ccgggcccccgggccccaag

SEQ ID NO: 16834 - RNA, 20 nt, Artificial Sequence
  spacer sequence GTCN PAM
gggccccuggcugcccuccg

SEQ ID NO: 16835 - RNA, 20 nt, Artificial Sequence
  spacer sequence GTCN PAM
agcucggccagcucggccgc

SEQ ID NO: 16836 - RNA, 20 nt, Artificial Sequence
  spacer sequence GTCN PAM
ccccgcggccgagcuggccg

SEQ ID NO: 16837 - RNA, 20 nt, Artificial Sequence
  spacer sequence GTCN PAM
caguaucuccgcacacaccu

SEQ ID NO: 16838 - RNA, 20 nt, Artificial Sequence
  spacer sequence GTCN PAM
ugagauucauucugugucca

SEQ ID NO: 16839 - RNA, 20 nt, Artificial Sequence
  spacer sequence GTCN PAM
acaagcuuacacuuuuuacu

SEQ ID NO: 16840 - RNA, 20 nt, Artificial Sequence
  spacer sequence GTCN PAM
uuaauaaugaauaaccgcag

SEQ ID NO: 16841 - RNA, 20 nt, Artificial Sequence
  spacer sequence GTCN PAM
ggcugcagagccgcccagca

SEQ ID NO: 16842 - RNA, 20 nt, Artificial Sequence
  spacer sequence GTCN PAM
gugcuuugcaugggggugag

SEQ ID NO: 16843 - RNA, 20 nt, Artificial Sequence
  spacer sequence GTCN PAM
ccagccucacuucuuccacc

SEQ ID NO: 16844 - RNA, 20 nt, Artificial Sequence
  spacer sequence GTCN PAM
cagcucgcgcacgggggugu

SEQ ID NO: 16845 - RNA, 20 nt, Artificial Sequence
  spacer sequence GTCN PAM
gccgcgcgcccggucgcuuc

SEQ ID NO: 16846 - RNA, 20 nt, Artificial Sequence
  spacer sequence GTCN PAM
cuucuccgcggccccggcca

SEQ ID NO: 16847 - RNA, 20 nt, Artificial Sequence
  spacer sequence GTCN PAM
aaaugaagaacaaagacaua

SEQ ID NO: 16848 - RNA, 20 nt, Artificial Sequence
  spacer sequence GTCN PAM
uuguucuucauuuugacuuu

SEQ ID NO: 16849 - RNA, 20 nt, Artificial Sequence
  spacer sequence GTCN PAM
ggggaggaacgagcuuugcg

SEQ ID NO: 16850 - RNA, 20 nt, Artificial Sequence
  spacer sequence GTCN PAM
cuaggaggcagaacaagauc

SEQ ID NO: 16851 - RNA, 20 nt, Artificial Sequence
  spacer sequence GTCN PAM
ucaguaccacccccccgccc

SEQ ID NO: 16852 - RNA, 20 nt, Artificial Sequence
  spacer sequence GTCN PAM
ucauuuucugggugcucaga

SEQ ID NO: 16853 - RNA, 20 nt, Artificial Sequence
  spacer sequence GTCN PAM
cgggguuaaagggccaguuu

SEQ ID NO: 16854 - RNA, 20 nt, Artificial Sequence
  spacer sequence GTCN PAM
caagauggacccaggaggga

SEQ ID NO: 16855 - RNA, 20 nt, Artificial Sequence
  spacer sequence GTCN PAM
aucuugggacacucuaggcu

SEQ ID NO: 16856 - RNA, 20 nt, Artificial Sequence
  spacer sequence GTCN PAM
aggcugcucccucguacccc

SEQ ID NO: 16857 - RNA, 20 nt, Artificial Sequence
  spacer sequence GTCN PAM
guccuuugagcccccacugc

SEQ ID NO: 16858 - RNA, 20 nt, Artificial Sequence
  spacer sequence GTCN PAM
uuugagcccccacugcaucc

SEQ ID NO: 16859 - RNA, 20 nt, Artificial Sequence
  spacer sequence GTCN PAM
ggcccuucuucggaaggaug

SEQ ID NO: 16860 - RNA, 20 nt, Artificial Sequence
  spacer sequence GTCN PAM
ugcgaacacugcccuuccuu

SEQ ID NO: 16861 - RNA, 20 nt, Artificial Sequence
  spacer sequence GTCN PAM
gauccgcauccggcgcggcc

SEQ ID NO: 16862 - RNA, 20 nt, Artificial Sequence
  spacer sequence GTCN PAM
cacacuucggaagcuccccc

SEQ ID NO: 16863 - RNA, 20 nt, Artificial Sequence
  spacer sequence GTCN PAM
uuuaaaacugcaucaaaaau

SEQ ID NO: 16864 - RNA, 20 nt, Artificial Sequence
  spacer sequence GTCN PAM
gcgggagacagccaccacca

SEQ ID NO: 16865 - RNA, 20 nt, Artificial Sequence
  spacer sequence GTCN PAM
cccgcugacugcgccuggaa

SEQ ID NO: 16866 - RNA, 20 nt, Artificial Sequence
  spacer sequence GTCN PAM
guauaagagcuggugguggu

SEQ ID NO: 16867 - RNA, 20 nt, Artificial Sequence
  spacer sequence GTCN PAM
gagguucuugugagucugua

SEQ ID NO: 16868 - RNA, 20 nt, Artificial Sequence
  spacer sequence GTCN PAM
ugcccucuuccccaggccug

SEQ ID NO: 16869 - RNA, 20 nt, Artificial Sequence
  spacer sequence GTCN PAM
caggauccagcgcccuuaaa

SEQ ID NO: 16870 - RNA, 20 nt, Artificial Sequence
  spacer sequence GTCN PAM
ugcucggggcgcagggggac

SEQ ID NO: 16871 - RNA, 20 nt, Artificial Sequence
  spacer sequence GTCN PAM
cccugcgccccgagcacgac

SEQ ID NO: 16872 - RNA, 20 nt, Artificial Sequence
  spacer sequence GTCN PAM
ccagucccccugcgccccga

SEQ ID NO: 16873 - RNA, 20 nt, Artificial Sequence
  spacer sequence GTCN PAM
ggucaccagucccccugcgc

SEQ ID NO: 16874 - RNA, 20 nt, Artificial Sequence
  spacer sequence GTCN PAM
ccacgugcuuucccugccca

SEQ ID NO: 16875 - RNA, 20 nt, Artificial Sequence
  spacer sequence GTCN PAM
cgagcuguggacaagagacg

SEQ ID NO: 16876 - RNA, 20 nt, Artificial Sequence
  spacer sequence GTCN PAM
acagcucgggaccgcgagga

SEQ ID NO: 16877 - RNA, 20 nt, Artificial Sequence
  spacer sequence GTCN PAM
cuuguccacagcucgggacc

SEQ ID NO: 16878 - RNA, 20 nt, Artificial Sequence
  spacer sequence GTCN PAM
gagaaaguacccagggcgga

SEQ ID NO: 16879 - RNA, 20 nt, Artificial Sequence
  spacer sequence GTCN PAM
gggaggucgagaagaggucu

SEQ ID NO: 16880 - RNA, 20 nt, Artificial Sequence
  spacer sequence GTCN PAM
agaagaggucucggcauugu

SEQ ID NO: 16881 - RNA, 20 nt, Artificial Sequence
  spacer sequence GTCN PAM
cggcauugugcugggggcgg

SEQ ID NO: 16882 - RNA, 20 nt, Artificial Sequence
  spacer sequence GTCN PAM
gcccccagcacaaugccgag

SEQ ID NO: 16883 - RNA, 20 nt, Artificial Sequence
  spacer sequence GTCN PAM
ugguccgcccccagcacaau

SEQ ID NO: 16884 - RNA, 20 nt, Artificial Sequence
  spacer sequence GTCN PAM
ccgcgccagccuggcccgug

SEQ ID NO: 16885 - RNA, 20 nt, Artificial Sequence
  spacer sequence GTCN PAM
ggcaaggcccgggcgaggcc

SEQ ID NO: 16886 - RNA, 20 nt, Artificial Sequence
  spacer sequence GTCN PAM
ucugucuguuuguuggcagg

SEQ ID NO: 16887 - RNA, 20 nt, Artificial Sequence
  spacer sequence GTCN PAM
guuuguuggcaggaggcucc

SEQ ID NO: 16888 - RNA, 20 nt, Artificial Sequence
  spacer sequence GTCN PAM
gaauguuuacaagcaccgcg

SEQ ID NO: 16889 - RNA, 20 nt, Artificial Sequence
  spacer sequence GTCN PAM
gcgcccuaaguuugcaacug

SEQ ID NO: 16890 - RNA, 20 nt, Artificial Sequence
  spacer sequence GTCN PAM
aagagaaggccgucacagaa

SEQ ID NO: 16891 - RNA, 20 nt, Artificial Sequence
  spacer sequence GTCN PAM
cagaaaaggguuggcagagc

SEQ ID NO: 16892 - RNA, 20 nt, Artificial Sequence
  spacer sequence GTCN PAM
ucuccuugcugccucugagg

SEQ ID NO: 16893 - RNA, 20 nt, Artificial Sequence
  spacer sequence GTCN PAM
ggaggggagggcagcggcaa

SEQ ID NO: 16894 - RNA, 20 nt, Artificial Sequence
  spacer sequence GTCN PAM
gggcucccucccucccucuc

SEQ ID NO: 16895 - RNA, 20 nt, Artificial Sequence
  spacer sequence GTCN PAM
cgcugccuuuugugccggcu

SEQ ID NO: 16896 - RNA, 20 nt, Artificial Sequence
  spacer sequence GTCN PAM
cccguccuucccggucccac

SEQ ID NO: 16897 - RNA, 20 nt, Artificial Sequence
  spacer sequence GTCN PAM
uucccggucccacggcucuc

SEQ ID NO: 16898 - RNA, 20 nt, Artificial Sequence
  spacer sequence GTCN PAM
cacggcucuccccgucgccg

SEQ ID NO: 16899 - RNA, 20 nt, Artificial Sequence
  spacer sequence GTCN PAM
ccgcggccccucucccgacu

SEQ ID NO: 16900 - RNA, 20 nt, Artificial Sequence
  spacer sequence GTCN PAM
ggagaggggccgcggcgacg

SEQ ID NO: 16901 - RNA, 20 nt, Artificial Sequence
  spacer sequence GTCN PAM
gcggagucgggagaggggcc

SEQ ID NO: 16902 - RNA, 20 nt, Artificial Sequence
  spacer sequence GTCN PAM
uccccacaauagugagaaag

SEQ ID NO: 16903 - RNA, 20 nt, Artificial Sequence
  spacer sequence GTCN PAM
agugugcagcgggaggaaag

SEQ ID NO: 16904 - RNA, 20 nt, Artificial Sequence
  spacer sequence GTCN PAM
aaaagccagucucaccucuu

SEQ ID NO: 16905 - RNA, 20 nt, Artificial Sequence
  spacer sequence GTCN PAM
caccucuuuucuccccggga

SEQ ID NO: 16906 - RNA, 20 nt, Artificial Sequence
  spacer sequence GTCN PAM
aaaaaacgauucccggggag

SEQ ID NO: 16907 - RNA, 20 nt, Artificial Sequence
  spacer sequence GTCN PAM
aauuuuuguaaaauuaaaua

SEQ ID NO: 16908 - RNA, 20 nt, Artificial Sequence
  spacer sequence GTCN PAM
caaaagugcauacacggcaa

SEQ ID NO: 16909 - RNA, 20 nt, Artificial Sequence
  spacer sequence GTCN PAM
agguaaaagagauaaagggg

SEQ ID NO: 16910 - RNA, 20 nt, Artificial Sequence
  spacer sequence GTCN PAM
ugcgcgcucucgugauuauu

SEQ ID NO: 16911 - RNA, 20 nt, Artificial Sequence
  spacer sequence GTCN PAM
cgccgcaagcaaggcaaacc

SEQ ID NO: 16912 - RNA, 20 nt, Artificial Sequence
  spacer sequence GTCN PAM
gcccgccgccgccgccgccg

SEQ ID NO: 16913 - RNA, 20 nt, Artificial Sequence
  spacer sequence GTCN PAM
uccgcccgccgccgccgccg

SEQ ID NO: 16914 - RNA, 20 nt, Artificial Sequence
  spacer sequence GTCN PAM
ccuucuuucuaacccggcuc

SEQ ID NO: 16915 - RNA, 20 nt, Artificial Sequence
  spacer sequence GTCN PAM
aaaggcacugaugaagauau

SEQ ID NO: 16916 - RNA, 20 nt, Artificial Sequence
  spacer sequence GTCN PAM
uggcuuuuuuuuaagcaaaa

SEQ ID NO: 16917 - RNA, 20 nt, Artificial Sequence
  spacer sequence GTCN PAM
gcacuugaacuugcagcuca

SEQ ID NO: 16918 - RNA, 20 nt, Artificial Sequence
  spacer sequence GTCN PAM
cguccgcacuugaacuugca

SEQ ID NO: 16919 - RNA, 20 nt, Artificial Sequence
  spacer sequence GTCN PAM
cugcgaacuugaacgucagg

SEQ ID NO: 16920 - RNA, 20 nt, Artificial Sequence
  spacer sequence GTCN PAM
ggagucuggauggacagaga

SEQ ID NO: 16921 - RNA, 20 nt, Artificial Sequence
  spacer sequence GTCN PAM
ggauggacagagacacacaa

SEQ ID NO: 16922 - RNA, 20 nt, Artificial Sequence
  spacer sequence GTCN PAM
auccagacuccugacguuca

SEQ ID NO: 16923 - RNA, 20 nt, Artificial Sequence
  spacer sequence GTCN PAM
cuguccauccagacuccuga

SEQ ID NO: 16924 - RNA, 20 nt, Artificial Sequence
  spacer sequence GTCN PAM
auuggugugagcuuccccuu

SEQ ID NO: 16925 - RNA, 20 nt, Artificial Sequence
  spacer sequence GTCN PAM
agccccugauguguguccau

SEQ ID NO: 16926 - RNA, 20 nt, Artificial Sequence
  spacer sequence GTCN PAM
cuuuuucauguccagccccu

SEQ ID NO: 16927 - RNA, 20 nt, Artificial Sequence
  spacer sequence GTCN PAM
uggucucuuuuucaugucca

SEQ ID NO: 16928 - RNA, 20 nt, Artificial Sequence
  spacer sequence GTCN PAM
gcggagccccccgccccgca

SEQ ID NO: 16929 - RNA, 20 nt, Artificial Sequence
  spacer sequence GTCN PAM
ggcguccgcggagccccccg

SEQ ID NO: 16930 - RNA, 20 nt, Artificial Sequence
  spacer sequence GTCN PAM
ugcucccccccacccuuucc

SEQ ID NO: 16931 - RNA, 20 nt, Artificial Sequence
  spacer sequence GTCN PAM
gcgugugugggggggagcag

SEQ ID NO: 16932 - RNA, 20 nt, Artificial Sequence
  spacer sequence GTCN PAM
gggagcaacucuaccuggcu

SEQ ID NO: 16933 - RNA, 20 nt, Artificial Sequence
  spacer sequence GTCN PAM
acacgcggggagcgagcgcg

SEQ ID NO: 16934 - RNA, 20 nt, Artificial Sequence
  spacer sequence GTCN PAM
ucuccucgggcaaaguuucc

SEQ ID NO: 16935 - RNA, 20 nt, Artificial Sequence
  spacer sequence GTCN PAM
ggaagggcagcgcccaaguc

SEQ ID NO: 16936 - RNA, 20 nt, Artificial Sequence
  spacer sequence GTCN PAM
ccaggagcccgcgcggccug

SEQ ID NO: 16937 - RNA, 20 nt, Artificial Sequence
  spacer sequence GTCN PAM
ccucuuuccaggccgcgcgg

SEQ ID NO: 16938 - RNA, 20 nt, Artificial Sequence
  spacer sequence GTCN PAM
cuggcucggccuugggggcg

SEQ ID NO: 16939 - RNA, 20 nt, Artificial Sequence
  spacer sequence GTCN PAM
cuuggcggggcgcucagauu

SEQ ID NO: 16940 - RNA, 20 nt, Artificial Sequence
  spacer sequence GTCN PAM
gaaugcaacugaaagcgccg

SEQ ID NO: 16941 - RNA, 20 nt, Artificial Sequence
  spacer sequence GTCN PAM
ccggcuccuaagggucgcag

SEQ ID NO: 16942 - RNA, 20 nt, Artificial Sequence
  spacer sequence GTCN PAM
cagaaagagagcccgaggaa

SEQ ID NO: 16943 - RNA, 20 nt, Artificial Sequence
  spacer sequence GTCN PAM
ggcccccggaggggagcgcc

SEQ ID NO: 16944 - RNA, 20 nt, Artificial Sequence
  spacer sequence GTCN PAM
accucucugagaggccgagg

SEQ ID NO: 16945 - RNA, 20 nt, Artificial Sequence
  spacer sequence GTCN PAM
ucggccucucagagaggugg

SEQ ID NO: 16946 - RNA, 20 nt, Artificial Sequence
  spacer sequence GTCN PAM
cgggagucccagucccuggg

SEQ ID NO: 16947 - RNA, 20 nt, Artificial Sequence
  spacer sequence GTCN PAM
cagucccugggaaugugcuc

SEQ ID NO: 16948 - RNA, 20 nt, Artificial Sequence
  spacer sequence GTCN PAM
cugggaaugugcucacggcg

SEQ ID NO: 16949 - RNA, 20 nt, Artificial Sequence
  spacer sequence GTCN PAM
ccgagccgggucccugggag

SEQ ID NO: 16950 - RNA, 20 nt, Artificial Sequence
  spacer sequence GTCN PAM
cugggagggacacacccccu

SEQ ID NO: 16951 - RNA, 20 nt, Artificial Sequence
  spacer sequence GTCN PAM
cucccagggacccggcucgg

SEQ ID NO: 16952 - RNA, 20 nt, Artificial Sequence
  spacer sequence GTCN PAM
cucucucuccauucccauuu

SEQ ID NO: 16953 - RNA, 20 nt, Artificial Sequence
  spacer sequence GTCN PAM
ccccgcugcuccugcgagcc

SEQ ID NO: 16954 - RNA, 20 nt, Artificial Sequence
  spacer sequence GTCN PAM
ucucaccaccguggucuccc

SEQ ID NO: 16955 - RNA, 20 nt, Artificial Sequence
  spacer sequence GTCN PAM
ccgccgcgcuccccaggcgc

SEQ ID NO: 16956 - RNA, 20 nt, Artificial Sequence
  spacer sequence GTCN PAM
gcagaaaggcgagagggggc

SEQ ID NO: 16957 - RNA, 20 nt, Artificial Sequence
  spacer sequence GTCN PAM
ucccuaauuuccagggaacg

SEQ ID NO: 16958 - RNA, 20 nt, Artificial Sequence
  spacer sequence GTCN PAM
cuuuaaugcacacacgcaca

SEQ ID NO: 16959 - RNA, 20 nt, Artificial Sequence
  spacer sequence GTCN PAM
aaaagcgggcuucacucugg

SEQ ID NO: 16960 - RNA, 20 nt, Artificial Sequence
  spacer sequence GTCN PAM
ccuggcgccucccgccuccc

SEQ ID NO: 16961 - RNA, 20 nt, Artificial Sequence
  spacer sequence GTCN PAM
gauuccaaaucuggaaggag

SEQ ID NO: 16962 - RNA, 20 nt, Artificial Sequence
  spacer sequence GTCN PAM
auucuccucuccccccaacu

SEQ ID NO: 16963 - RNA, 20 nt, Artificial Sequence
  spacer sequence GTCN PAM
aagggaggugcggagggugc

SEQ ID NO: 16964 - RNA, 20 nt, Artificial Sequence
  spacer sequence GTCN PAM
ccacccugcacccuccgcac

SEQ ID NO: 16965 - RNA, 20 nt, Artificial Sequence
  spacer sequence GTCN PAM
ccauggcccgcgagacccug

SEQ ID NO: 16966 - RNA, 20 nt, Artificial Sequence
  spacer sequence GTCN PAM
cgcgggccauggcgacccgu

SEQ ID NO: 16967 - RNA, 20 nt, Artificial Sequence
  spacer sequence GTCN PAM
gcagagcgaggagcccuccu

SEQ ID NO: 16968 - RNA, 20 nt, Artificial Sequence
  spacer sequence GTCN PAM
ucucaucccccucuucaguc

SEQ ID NO: 16969 - RNA, 20 nt, Artificial Sequence
  spacer sequence GTCN PAM
aaagggugucgcuuccguaa

SEQ ID NO: 16970 - RNA, 20 nt, Artificial Sequence
  spacer sequence GTCN PAM
cuuccguaaacucacccacc

SEQ ID NO: 16971 - RNA, 20 nt, Artificial Sequence
  spacer sequence GTCN PAM
uaguaaaguuucaagucuac

SEQ ID NO: 16972 - RNA, 20 nt, Artificial Sequence
  spacer sequence GTCN PAM
acuguguuagaaaaugacug

SEQ ID NO: 16973 - RNA, 20 nt, Artificial Sequence
  spacer sequence GTCN PAM
uuuucuaacacaguagacuu

SEQ ID NO: 16974 - RNA, 20 nt, Artificial Sequence
  spacer sequence GTCN PAM
gaagcuccgccgagcuaggc

SEQ ID NO: 16975 - RNA, 20 nt, Artificial Sequence
  spacer sequence GTCN PAM
augugguuuguuguuuguug

SEQ ID NO: 16976 - RNA, 20 nt, Artificial Sequence
  spacer sequence GTCN PAM
cccucccacaaacuggaggg

SEQ ID NO: 16977 - RNA, 20 nt, Artificial Sequence
  spacer sequence GTCN PAM
cacacaagcuacagagcuua

SEQ ID NO: 16978 - RNA, 20 nt, Artificial Sequence
  spacer sequence GTCN PAM
gcaucucuauuccaccacag

SEQ ID NO: 16979 - RNA, 20 nt, Artificial Sequence
  spacer sequence GTCN PAM
gcuuuuugucuuguuaaacc

SEQ ID NO: 16980 - RNA, 20 nt, Artificial Sequence
  spacer sequence GTCN PAM
uguuaaaccagccuuggagu

SEQ ID NO: 16981 - RNA, 20 nt, Artificial Sequence
  spacer sequence GTCN PAM
ccaaaagaaugucuucuugg

SEQ ID NO: 16982 - RNA, 20 nt, Artificial Sequence
  spacer sequence GTCN PAM
ucuugggggguggcggggga

SEQ ID NO: 16983 - RNA, 20 nt, Artificial Sequence
  spacer sequence GTCN PAM
ucccccgccaccccccaaga

SEQ ID NO: 16984 - RNA, 20 nt, Artificial Sequence
  spacer sequence GTCN PAM
uccucccccgccacccccca

SEQ ID NO: 16985 - RNA, 20 nt, Artificial Sequence
  spacer sequence GTCN PAM
cccacgucguccucccccgc

SEQ ID NO: 16986 - RNA, 20 nt, Artificial Sequence
  spacer sequence GTCN PAM
auaaaaguccaucuauagag

SEQ ID NO: 16987 - RNA, 20 nt, Artificial Sequence
  spacer sequence GTCN PAM
aucuauagagaagauauaua

SEQ ID NO: 16988 - RNA, 20 nt, Artificial Sequence
  spacer sequence GTCN PAM
uuacuuuuuacacuacagcc

SEQ ID NO: 16989 - RNA, 20 nt, Artificial Sequence
  spacer sequence GTCN PAM
ucugaauuacaauucauuac

SEQ ID NO: 16990 - RNA, 20 nt, Artificial Sequence
  spacer sequence GTCN PAM
gagcgcacacaauuguguaa

SEQ ID NO: 16991 - RNA, 20 nt, Artificial Sequence
  spacer sequence GTCN PAM
gcuauguuauugcacuuguu

SEQ ID NO: 16992 - RNA, 20 nt, Artificial Sequence
  spacer sequence GTCN PAM
cugcuuaccucuccuuuggc

SEQ ID NO: 16993 - RNA, 20 nt, Artificial Sequence
  spacer sequence GTCN PAM
gggaaucgucgcugcuuacc

SEQ ID NO: 16994 - RNA, 20 nt, Artificial Sequence
  spacer sequence GTCN PAM
agaaaaccacggcugugugu

SEQ ID NO: 16995 - RNA, 20 nt, Artificial Sequence
  spacer sequence GTCN PAM
gcauuugaucccuccugguc

SEQ ID NO: 16996 - RNA, 20 nt, Artificial Sequence
  spacer sequence GTCN PAM
ucgaccccccuccccggccc

SEQ ID NO: 16997 - RNA, 20 nt, Artificial Sequence
  spacer sequence GTCN PAM
accccccuccccggccccug

SEQ ID NO: 16998 - RNA, 20 nt, Artificial Sequence
  spacer sequence GTCN PAM
acgaccaggagggaucaaau

SEQ ID NO: 16999 - RNA, 20 nt, Artificial Sequence
  spacer sequence GTCN PAM
cccuaggggagggcaccagg

SEQ ID NO: 17000 - RNA, 20 nt, Artificial Sequence
  spacer sequence GTCN PAM
uuuuaagagauuuuaaaaua

SEQ ID NO: 17001 - RNA, 20 nt, Artificial Sequence
  spacer sequence GTCN PAM
cuuuaaaugcgcacacuugg

SEQ ID NO: 17002 - RNA, 20 nt, Artificial Sequence
  spacer sequence GTCN PAM
uaauuuauuacuuucuaaaa

SEQ ID NO: 17003 - RNA, 20 nt, Artificial Sequence
  spacer sequence GTCN PAM
ccaaagguuugggaaagagc

SEQ ID NO: 17004 - RNA, 20 nt, Artificial Sequence
  spacer sequence GTCN PAM
ucaccaaagguuugggaaag

SEQ ID NO: 17005 - RNA, 20 nt, Artificial Sequence
  spacer sequence GTCN PAM
gcuggccuggaguuuacacg

SEQ ID NO: 17006 - RNA, 20 nt, Artificial Sequence
  spacer sequence GTCN PAM
ucugcuggccuggaguuuac

SEQ ID NO: 17007 - RNA, 20 nt, Artificial Sequence
  spacer sequence GTCN PAM
ccuccgcgggcaagauaaaa

SEQ ID NO: 17008 - RNA, 20 nt, Artificial Sequence
  spacer sequence GTCN PAM
uggggcgucuccuccgcggg

SEQ ID NO: 17009 - RNA, 20 nt, Artificial Sequence
  spacer sequence GTCN PAM
uaguuuaugcuuuauaaugu

SEQ ID NO: 17010 - RNA, 20 nt, Artificial Sequence
  spacer sequence GTCN PAM
acacauuauaaagcauaaac

SEQ ID NO: 17011 - RNA, 20 nt, Artificial Sequence
  spacer sequence GTCN PAM
guuagaaaacuugucaacac

SEQ ID NO: 17012 - RNA, 20 nt, Artificial Sequence
  spacer sequence GTCN PAM
guuagaaacccaccguauuu

SEQ ID NO: 17013 - RNA, 20 nt, Artificial Sequence
  spacer sequence GTCN PAM
uuucaguaguuuucgguaug

SEQ ID NO: 17014 - RNA, 20 nt, Artificial Sequence
  spacer sequence GTCN PAM
ggaggccacgcggcucauac

SEQ ID NO: 17015 - RNA, 20 nt, Artificial Sequence
  spacer sequence GTCN PAM
uuuuuuuuuucuaaaagguu

SEQ ID NO: 17016 - RNA, 20 nt, Artificial Sequence
  spacer sequence GTCN PAM
acaaacagcucgaagaggga

SEQ ID NO: 17017 - RNA, 20 nt, Artificial Sequence
  spacer sequence GTCN PAM
cccucuucgagcuguuuguu

SEQ ID NO: 17018 - RNA, 20 nt, Artificial Sequence
  spacer sequence GTCN PAM
cagcccucggaccgaggauc

SEQ ID NO: 17019 - RNA, 20 nt, Artificial Sequence
  spacer sequence GTCN PAM
gagggcugggacuguauuaa

SEQ ID NO: 17020 - RNA, 20 nt, Artificial Sequence
  spacer sequence GTCN PAM
gucaggauggaaacuacaag

SEQ ID NO: 17021 - RNA, 20 nt, Artificial Sequence
  spacer sequence GTCN PAM
ggauggaaacuacaagauua

SEQ ID NO: 17022 - RNA, 20 nt, Artificial Sequence
  spacer sequence GTCN PAM
gccuuuagggggaaacaccu

SEQ ID NO: 17023 - RNA, 20 nt, Artificial Sequence
  spacer sequence GTCN PAM
augaagguguuucccccuaa

SEQ ID NO: 17024 - RNA, 20 nt, Artificial Sequence
  spacer sequence GTCN PAM
uucacuuauuuaucuuugag

SEQ ID NO: 17025 - RNA, 20 nt, Artificial Sequence
  spacer sequence GTCN PAM
caaaauagagaacaggcagu

SEQ ID NO: 17026 - RNA, 20 nt, Artificial Sequence
  spacer sequence GTCN PAM
ucuucauaaaaauaaaacuu

SEQ ID NO: 17027 - RNA, 20 nt, Artificial Sequence
  spacer sequence GTCN PAM
caaugauggaagugcuaggc

SEQ ID NO: 17028 - RNA, 20 nt, Artificial Sequence
  spacer sequence GTCN PAM
uaacaacagccuagcacuuc

SEQ ID NO: 17029 - RNA, 20 nt, Artificial Sequence
  spacer sequence GTCN PAM
ggaguucaagaccagccugg

SEQ ID NO: 17030 - RNA, 20 nt, Artificial Sequence
  spacer sequence GTCN PAM
ugaacuccugaccucaagug

SEQ ID NO: 17031 - RNA, 20 nt, Artificial Sequence
  spacer sequence GTCN PAM
caccuacuugggaggcugag

SEQ ID NO: 17032 - RNA, 20 nt, Artificial Sequence
  spacer sequence GTCN PAM
cccagguucaagcgauucuu

SEQ ID NO: 17033 - RNA, 20 nt, Artificial Sequence
  spacer sequence GTCN PAM
caaaaaaauaauaauaaaaa

SEQ ID NO: 17034 - RNA, 20 nt, Artificial Sequence
  spacer sequence GTCN PAM
cacugggaguagaggaggaa

SEQ ID NO: 17035 - RNA, 20 nt, Artificial Sequence
  spacer sequence GTCN PAM
cuggaggacaguaucuauac

SEQ ID NO: 17036 - RNA, 20 nt, Artificial Sequence
  spacer sequence GTCN PAM
uccagggaccucccaaccug

SEQ ID NO: 17037 - RNA, 20 nt, Artificial Sequence
  spacer sequence GTCN PAM
gugccuuuguagaagguaua

SEQ ID NO: 17038 - RNA, 20 nt, Artificial Sequence
  spacer sequence GTCN PAM
ggcaucuuucucuccaggcu

SEQ ID NO: 17039 - RNA, 20 nt, Artificial Sequence
  spacer sequence GTCN PAM
gcgcuucaaacaccugaaug

SEQ ID NO: 17040 - RNA, 20 nt, Artificial Sequence
  spacer sequence GTCN PAM
auacuuuccucuagaugagg

SEQ ID NO: 17041 - RNA, 20 nt, Artificial Sequence
  spacer sequence GTCN PAM
auaauguauggggaagaggg

SEQ ID NO: 17042 - RNA, 20 nt, Artificial Sequence
  spacer sequence GTCN PAM
uaccacauaaguaaggggcc

SEQ ID NO: 17043 - RNA, 20 nt, Artificial Sequence
  spacer sequence GTCN PAM
cuuccaaggggccccuuacu

SEQ ID NO: 17044 - RNA, 20 nt, Artificial Sequence
  spacer sequence GTCN PAM
auauuaggaagcuaaacuga

SEQ ID NO: 17045 - RNA, 20 nt, Artificial Sequence
  spacer sequence GTCN PAM
uugaugucaauauuaggaag

SEQ ID NO: 17046 - RNA, 20 nt, Artificial Sequence
  spacer sequence GTCN PAM
aaugaauguacugcacuaga

SEQ ID NO: 17047 - RNA, 20 nt, Artificial Sequence
  spacer sequence GTCN PAM
aauaaauggucuuugauaaa

SEQ ID NO: 17048 - RNA, 20 nt, Artificial Sequence
  spacer sequence GTCN PAM
uugauaaauaauaaauuaau

SEQ ID NO: 17049 - RNA, 20 nt, Artificial Sequence
  spacer sequence GTCN PAM
ccagcagcauacauuaucaa

SEQ ID NO: 17050 - RNA, 20 nt, Artificial Sequence
  spacer sequence GTCN PAM
cauuugagaaagcaguuuug

SEQ ID NO: 17051 - RNA, 20 nt, Artificial Sequence
  spacer sequence GTCN PAM
gacauuuuguacagccagcu

SEQ ID NO: 17052 - RNA, 20 nt, Artificial Sequence
  spacer sequence GTCN PAM
gaccagaugugugugugugu

SEQ ID NO: 17053 - RNA, 20 nt, Artificial Sequence
  spacer sequence GTCN PAM
gcguuuccauuauaaaccca

SEQ ID NO: 17054 - RNA, 20 nt, Artificial Sequence
  spacer sequence GTCN PAM
gucagcguuuccauuauaaa

SEQ ID NO: 17055 - RNA, 20 nt, Artificial Sequence
  spacer sequence GTCN PAM
ggcagggcugcuauaauuaa

SEQ ID NO: 17056 - RNA, 20 nt, Artificial Sequence
  spacer sequence GTCN PAM
gucaguguuucuauuauaaa

SEQ ID NO: 17057 - RNA, 20 nt, Artificial Sequence
  spacer sequence GTCN PAM
guguuucuauuauaaacccc

SEQ ID NO: 17058 - RNA, 20 nt, Artificial Sequence
  spacer sequence GTCN PAM
agaugugaacuuguuuuaua

SEQ ID NO: 17059 - RNA, 20 nt, Artificial Sequence
  spacer sequence GTCN PAM
uauugccaacuuccagcuau

SEQ ID NO: 17060 - RNA, 20 nt, Artificial Sequence
  spacer sequence GTCN PAM
uagcuggaaguuggcaauaa

SEQ ID NO: 17061 - RNA, 20 nt, Artificial Sequence
  spacer sequence GTCN PAM
uuuauuuggacaaguacucu

SEQ ID NO: 17062 - RNA, 20 nt, Artificial Sequence
  spacer sequence GTCN PAM
aaauaaaggacuaacugccu

SEQ ID NO: 17063 - RNA, 20 nt, Artificial Sequence
  spacer sequence GTCN PAM
ugauuuuuaaguuguuucuu

SEQ ID NO: 17064 - RNA, 20 nt, Artificial Sequence
  spacer sequence GTCN PAM
caacauuccuuggcauauag

SEQ ID NO: 17065 - RNA, 20 nt, Artificial Sequence
  spacer sequence GTCN PAM
accaacugugugguaaaaau

SEQ ID NO: 17066 - RNA, 20 nt, Artificial Sequence
  spacer sequence GTCN PAM
uccugaguuacccaaggacu

SEQ ID NO: 17067 - RNA, 20 nt, Artificial Sequence
  spacer sequence GTCN PAM
uuggguaacucaggaugacu

SEQ ID NO: 17068 - RNA, 20 nt, Artificial Sequence
  spacer sequence GTCN PAM
agcagagaaauacauggugu

SEQ ID NO: 17069 - RNA, 20 nt, Artificial Sequence
  spacer sequence GTCN PAM
aagucaagcagagaaauaca

SEQ ID NO: 17070 - RNA, 20 nt, Artificial Sequence
  spacer sequence GTCN PAM
acagucaaagucaagcagag

SEQ ID NO: 17071 - RNA, 20 nt, Artificial Sequence
  spacer sequence GTCN PAM
accggauuauacaaaguaaa

SEQ ID NO: 17072 - RNA, 20 nt, Artificial Sequence
  spacer sequence GTCN PAM
accagagggcaguagaaaua

SEQ ID NO: 17073 - RNA, 20 nt, Artificial Sequence
  spacer sequence GTCN PAM
gccaccugauguuuauggag

SEQ ID NO: 17074 - RNA, 20 nt, Artificial Sequence
  spacer sequence GTCN PAM
cauuuugguggaggugccau

SEQ ID NO: 17075 - RNA, 20 nt, Artificial Sequence
  spacer sequence GTCN PAM
gccaacaacauccagccaag

SEQ ID NO: 17076 - RNA, 20 nt, Artificial Sequence
  spacer sequence GTCN PAM
cugacuucacacagaaaggc

SEQ ID NO: 17077 - RNA, 20 nt, Artificial Sequence
  spacer sequence GTCN PAM
gugaccuuagggucugccaa

SEQ ID NO: 17078 - RNA, 20 nt, Artificial Sequence
  spacer sequence GTCN PAM
gagggaauagaggaaaggaa

SEQ ID NO: 17079 - RNA, 20 nt, Artificial Sequence
  spacer sequence GTCN PAM
gaucccagucagagggaaua

SEQ ID NO: 17080 - RNA, 20 nt, Artificial Sequence
  spacer sequence GTCN PAM
ucaguggccuaauuuggugg

SEQ ID NO: 17081 - RNA, 20 nt, Artificial Sequence
  spacer sequence GTCN PAM
ccucuggaauucaaugagug

SEQ ID NO: 17082 - RNA, 20 nt, Artificial Sequence
  spacer sequence GTCN PAM
cucauugaauuccagaggag

SEQ ID NO: 17083 - RNA, 20 nt, Artificial Sequence
  spacer sequence GTCN PAM
ucaaaacaugucaccaggcu

SEQ ID NO: 17084 - RNA, 20 nt, Artificial Sequence
  spacer sequence GTCN PAM
ccaggcucaaguuccuucuc

SEQ ID NO: 17085 - RNA, 20 nt, Artificial Sequence
  spacer sequence GTCN PAM
cauaaaccccauaauugccu

SEQ ID NO: 17086 - RNA, 20 nt, Artificial Sequence
  spacer sequence GTCN PAM
uucccagagagcacugcaca

SEQ ID NO: 17087 - RNA, 20 nt, Artificial Sequence
  spacer sequence GTCN PAM
gggcugugcagugcucucug

SEQ ID NO: 17088 - RNA, 20 nt, Artificial Sequence
  spacer sequence GTCN PAM
cuucucuagaaauuaagacu

SEQ ID NO: 17089 - RNA, 20 nt, Artificial Sequence
  spacer sequence GTCN PAM
uaauuucuagagaagggacc

SEQ ID NO: 17090 - RNA, 20 nt, Artificial Sequence
  spacer sequence GTCN PAM
auagucuuuuuugguuuuuu

SEQ ID NO: 17091 - RNA, 20 nt, Artificial Sequence
  spacer sequence GTCN PAM
uuuuugguuuuuucuuguca

SEQ ID NO: 17092 - RNA, 20 nt, Artificial Sequence
  spacer sequence GTCN PAM
aauucagcaaagggaacuuu

SEQ ID NO: 17093 - RNA, 20 nt, Artificial Sequence
  spacer sequence GTCN PAM
ucuuucuuuggcagcuuagu

SEQ ID NO: 17094 - RNA, 20 nt, Artificial Sequence
  spacer sequence GTCN PAM
uaagaauuguuauucuuucc

SEQ ID NO: 17095 - RNA, 20 nt, Artificial Sequence
  spacer sequence GTCN PAM
cugcuuuuggaugauugguu

SEQ ID NO: 17096 - RNA, 20 nt, Artificial Sequence
  spacer sequence GTCN PAM
uaccgccuuaaaaaacaaaa

SEQ ID NO: 17097 - RNA, 20 nt, Artificial Sequence
  spacer sequence GTCN PAM
cauaaaguucaccagucaca

SEQ ID NO: 17098 - RNA, 20 nt, Artificial Sequence
  spacer sequence GTCN PAM
cacaugccaaagccauacaa

SEQ ID NO: 17099 - RNA, 20 nt, Artificial Sequence
  spacer sequence GTCN PAM
cucugacaccagauuuguac

SEQ ID NO: 17100 - RNA, 20 nt, Artificial Sequence
  spacer sequence GTCN PAM
gagugaccagagcuguguug

SEQ ID NO: 17101 - RNA, 20 nt, Artificial Sequence
  spacer sequence GTCN PAM
ggucauagauaucugugauc

SEQ ID NO: 17102 - RNA, 20 nt, Artificial Sequence
  spacer sequence GTCN PAM
uagauaucugugaucaucua

SEQ ID NO: 17103 - RNA, 20 nt, Artificial Sequence
  spacer sequence GTCN PAM
auaauauugccuacaaaaca

SEQ ID NO: 17104 - RNA, 20 nt, Artificial Sequence
  spacer sequence GTCN PAM
gagucucgcucuuucaccuc

SEQ ID NO: 17105 - RNA, 20 nt, Artificial Sequence
  spacer sequence GTCN PAM
cgcucuuucaccucuggaau

SEQ ID NO: 17106 - RNA, 20 nt, Artificial Sequence
  spacer sequence GTCN PAM
ggaguucgaggccagccugg

SEQ ID NO: 17107 - RNA, 20 nt, Artificial Sequence
  spacer sequence GTCN PAM
cccaaagugcugggauuaua

SEQ ID NO: 17108 - RNA, 20 nt, Artificial Sequence
  spacer sequence GTCN PAM
agccaauuuuuuguuuuggu

SEQ ID NO: 17109 - RNA, 20 nt, Artificial Sequence
  spacer sequence GTCN PAM
uuuucacuggcagcagcaac

SEQ ID NO: 17110 - RNA, 20 nt, Artificial Sequence
  spacer sequence GTCN PAM
cucuguguauauuccauaua

SEQ ID NO: 17111 - RNA, 20 nt, Artificial Sequence
  spacer sequence GTCN PAM
uaaaagccaccacaucaccc

SEQ ID NO: 17112 - RNA, 20 nt, Artificial Sequence
  spacer sequence GTCN PAM
uaaguuguuagagcuuauag

SEQ ID NO: 17113 - RNA, 20 nt, Artificial Sequence
  spacer sequence GTCN PAM
cugucauuuucaucuuucuc

SEQ ID NO: 17114 - RNA, 20 nt, Artificial Sequence
  spacer sequence GTCN PAM
uuuucaucuuucucucccuc

SEQ ID NO: 17115 - RNA, 20 nt, Artificial Sequence
  spacer sequence GTCN PAM
gguacaugaacaaagacuua

SEQ ID NO: 17116 - RNA, 20 nt, Artificial Sequence
  spacer sequence GTCN PAM
uuguucauguaccagacauu

SEQ ID NO: 17117 - RNA, 20 nt, Artificial Sequence
  spacer sequence GTCN PAM
augguagauaggauuuugaa

SEQ ID NO: 17118 - RNA, 20 nt, Artificial Sequence
  spacer sequence GTCN PAM
uuuuuauuguucucaauucu

SEQ ID NO: 17119 - RNA, 20 nt, Artificial Sequence
  spacer sequence GTCN PAM
cucagaguuacucuguuaug

SEQ ID NO: 17120 - RNA, 20 nt, Artificial Sequence
  spacer sequence GTCN PAM
ggagaaucagccuccagaau

SEQ ID NO: 17121 - RNA, 20 nt, Artificial Sequence
  spacer sequence GTCN PAM
ugauauuuaaagaacguagu

SEQ ID NO: 17122 - RNA, 20 nt, Artificial Sequence
  spacer sequence GTCN PAM
agcugguuuucauuugcaac

SEQ ID NO: 17123 - RNA, 20 nt, Artificial Sequence
  spacer sequence GTCN PAM
agagcauauacugauauuuc

SEQ ID NO: 17124 - RNA, 20 nt, Artificial Sequence
  spacer sequence GTCN PAM
uacuucuuuacucaucauau

SEQ ID NO: 17125 - RNA, 20 nt, Artificial Sequence
  spacer sequence GTCN PAM
gaagcuuaguuuauuuuaaa

SEQ ID NO: 17126 - RNA, 20 nt, Artificial Sequence
  spacer sequence GTCN PAM
ucagaauuccaagauggauc

SEQ ID NO: 17127 - RNA, 20 nt, Artificial Sequence
  spacer sequence GTCN PAM
cauuaaguuaaagagaucca

SEQ ID NO: 17128 - RNA, 20 nt, Artificial Sequence
  spacer sequence GTCN PAM
auacuuguguuuucagcuau

SEQ ID NO: 17129 - RNA, 20 nt, Artificial Sequence
  spacer sequence GTCN PAM
aucuuacugaggguaaaaua

SEQ ID NO: 17130 - RNA, 20 nt, Artificial Sequence
  spacer sequence GTCN PAM
uaaauguauuaauuuugguu

SEQ ID NO: 17131 - RNA, 20 nt, Artificial Sequence
  spacer sequence GTCN PAM
cuauggaugcuaaaagggac

SEQ ID NO: 17132 - RNA, 20 nt, Artificial Sequence
  spacer sequence GTCN PAM
cuuuuagcauccauagugac

SEQ ID NO: 17133 - RNA, 20 nt, Artificial Sequence
  spacer sequence GTCN PAM
ccacagcacuacgcguucuu

SEQ ID NO: 17134 - RNA, 20 nt, Artificial Sequence
  spacer sequence GTCN PAM
ccaguauuauugauagcaca

SEQ ID NO: 17135 - RNA, 20 nt, Artificial Sequence
  spacer sequence GTCN PAM
uuauuauguaaaaccuaauu

SEQ ID NO: 17136 - RNA, 20 nt, Artificial Sequence
  spacer sequence GTCN PAM
uguggaauuccacuaucaug

SEQ ID NO: 17137 - RNA, 20 nt, Artificial Sequence
  spacer sequence GTCN PAM
auuguacuuaauuuccuuuu

SEQ ID NO: 17138 - RNA, 20 nt, Artificial Sequence
  spacer sequence GTCN PAM
uccugcuuccucccuguauc

SEQ ID NO: 17139 - RNA, 20 nt, Artificial Sequence
  spacer sequence GTCN PAM
cauccucccugaauguuccu

SEQ ID NO: 17140 - RNA, 20 nt, Artificial Sequence
  spacer sequence GTCN PAM
aaguaucaccaacuaaagag

SEQ ID NO: 17141 - RNA, 20 nt, Artificial Sequence
  spacer sequence GTCN PAM
ugagguggagauaagauuag

SEQ ID NO: 17142 - RNA, 20 nt, Artificial Sequence
  spacer sequence GTCN PAM
gcaucauaauugaaauuaca

SEQ ID NO: 17143 - RNA, 20 nt, Artificial Sequence
  spacer sequence GTCN PAM
ggaccauggacagcuuccac

SEQ ID NO: 17144 - RNA, 20 nt, Artificial Sequence
  spacer sequence GTCN PAM
agacacucaggccuguuugg

SEQ ID NO: 17145 - RNA, 20 nt, Artificial Sequence
  spacer sequence GTCN PAM
augguccagacacucaggcc

SEQ ID NO: 17146 - RNA, 20 nt, Artificial Sequence
  spacer sequence GTCN PAM
agaagggcugaaagaaaagg

SEQ ID NO: 17147 - RNA, 20 nt, Artificial Sequence
  spacer sequence GTCN PAM
cagaagagaauaguuucauu

SEQ ID NO: 17148 - RNA, 20 nt, Artificial Sequence
  spacer sequence GTCN PAM
ggcaaugaauaaguaagucu

SEQ ID NO: 17149 - RNA, 20 nt, Artificial Sequence
  spacer sequence GTCN PAM
augcugauuuuuuuuucuca

SEQ ID NO: 17150 - RNA, 20 nt, Artificial Sequence
  spacer sequence GTCN PAM
cugauuccuugaaaauagau

SEQ ID NO: 17151 - RNA, 20 nt, Artificial Sequence
  spacer sequence GTCN PAM
uauaacuuccaaaauauucc

SEQ ID NO: 17152 - RNA, 20 nt, Artificial Sequence
  spacer sequence GTCN PAM
ccuauuagucacugcuccua

SEQ ID NO: 17153 - RNA, 20 nt, Artificial Sequence
  spacer sequence GTCN PAM
cugcuccuauaugauccuuu

SEQ ID NO: 17154 - RNA, 20 nt, Artificial Sequence
  spacer sequence GTCN PAM
ggaaagguaacagaaaaaua

SEQ ID NO: 17155 - RNA, 20 nt, Artificial Sequence
  spacer sequence GTCN PAM
aagaaagggagaauaaaauu

SEQ ID NO: 17156 - RNA, 20 nt, Artificial Sequence
  spacer sequence GTCN PAM
gccacaguuccacuuuaaac

SEQ ID NO: 17157 - RNA, 20 nt, Artificial Sequence
  spacer sequence GTCN PAM
uaguaaguggcaggaaauuc

SEQ ID NO: 17158 - RNA, 20 nt, Artificial Sequence
  spacer sequence GTCN PAM
uuagcuuauaguguagacug

SEQ ID NO: 17159 - RNA, 20 nt, Artificial Sequence
  spacer sequence GTCN PAM
acacuauaagcuaaugacuc

SEQ ID NO: 17160 - RNA, 20 nt, Artificial Sequence
  spacer sequence GTCN PAM
agucuacacuauaagcuaau

SEQ ID NO: 17161 - RNA, 20 nt, Artificial Sequence
  spacer sequence GTCN PAM
cucuauuacagauuuucaua

SEQ ID NO: 17162 - RNA, 20 nt, Artificial Sequence
  spacer sequence GTCN PAM
gcuaccccccgcccugccca

SEQ ID NO: 17163 - RNA, 20 nt, Artificial Sequence
  spacer sequence GTCN PAM
gaauuauaucauauuauucu

SEQ ID NO: 17164 - RNA, 20 nt, Artificial Sequence
  spacer sequence GTCN PAM
auugaauacauaauaugcau

SEQ ID NO: 17165 - RNA, 20 nt, Artificial Sequence
  spacer sequence GTCN PAM
ugugaauauauauucaggca

SEQ ID NO: 17166 - RNA, 20 nt, Artificial Sequence
  spacer sequence GTCN PAM
uugcucugaucaaaucacaa

SEQ ID NO: 17167 - RNA, 20 nt, Artificial Sequence
  spacer sequence GTCN PAM
aucacaucaaaucacauaca

SEQ ID NO: 17168 - RNA, 20 nt, Artificial Sequence
  spacer sequence GTCN PAM
ucuuauuuaaauucuaaagu

SEQ ID NO: 17169 - RNA, 20 nt, Artificial Sequence
  spacer sequence GTCN PAM
uucaucaaggcuugccuugg

SEQ ID NO: 17170 - RNA, 20 nt, Artificial Sequence
  spacer sequence GTCN PAM
aacagaaaaaguugaguguc

SEQ ID NO: 17171 - RNA, 20 nt, Artificial Sequence
  spacer sequence GTCN PAM
uccacuuugcuguagcugua

SEQ ID NO: 17172 - RNA, 20 nt, Artificial Sequence
  spacer sequence GTCN PAM
gagcucaacacacaggauac

SEQ ID NO: 17173 - RNA, 20 nt, Artificial Sequence
  spacer sequence GTCN PAM
cucaccuucuagacacuccg

SEQ ID NO: 17174 - RNA, 20 nt, Artificial Sequence
  spacer sequence GTCN PAM
agaaggugagcgacagagcg

SEQ ID NO: 17175 - RNA, 20 nt, Artificial Sequence
  spacer sequence GTCN PAM
cuugauucaauagauugaau

SEQ ID NO: 17176 - RNA, 20 nt, Artificial Sequence
  spacer sequence GTCN PAM
gcucacagaugcagauaaga

SEQ ID NO: 17177 - RNA, 20 nt, Artificial Sequence
  spacer sequence GTCN PAM
accugcuuaggcugcauauu

SEQ ID NO: 17178 - RNA, 20 nt, Artificial Sequence
  spacer sequence GTCN PAM
ucauguuuaaucuaguguag

SEQ ID NO: 17179 - RNA, 20 nt, Artificial Sequence
  spacer sequence GTCN PAM
uguaaaauaaaugcgggcua

SEQ ID NO: 17180 - RNA, 20 nt, Artificial Sequence
  spacer sequence GTCN PAM
cucuccccccaauuaucaua

SEQ ID NO: 17181 - RNA, 20 nt, Artificial Sequence
  spacer sequence GTCN PAM
gaaaaaugcuaguguggcua

SEQ ID NO: 17182 - RNA, 20 nt, Artificial Sequence
  spacer sequence GTCN PAM
gaucccaggcacucuccuag

SEQ ID NO: 17183 - RNA, 20 nt, Artificial Sequence
  spacer sequence GTCN PAM
cugaaaacaaugcaaaagga

SEQ ID NO: 17184 - RNA, 20 nt, Artificial Sequence
  spacer sequence GTCN PAM
ucuaacagauuuccaauggu

SEQ ID NO: 17185 - RNA, 20 nt, Artificial Sequence
  spacer sequence GTCN PAM
aaagccagaaagacugauuu

SEQ ID NO: 17186 - RNA, 20 nt, Artificial Sequence
  spacer sequence GTCN PAM
uucuggcuuuggaccauugg

SEQ ID NO: 17187 - RNA, 20 nt, Artificial Sequence
  spacer sequence GTCN PAM
accccuaauguaaugccuaa

SEQ ID NO: 17188 - RNA, 20 nt, Artificial Sequence
  spacer sequence GTCN PAM
aacuucugaaucaauaagga

SEQ ID NO: 17189 - RNA, 20 nt, Artificial Sequence
  spacer sequence GTCN PAM
ugcuaaaggggaggggggga

SEQ ID NO: 17190 - RNA, 20 nt, Artificial Sequence
  spacer sequence GTCN PAM
gucuucagauaaaaaaaaga

SEQ ID NO: 17191 - RNA, 20 nt, Artificial Sequence
  spacer sequence GTCN PAM
ucagauaaaaaaaagauauc

SEQ ID NO: 17192 - RNA, 20 nt, Artificial Sequence
  spacer sequence GTCN PAM
gaaagaaaagcuaugaauau

SEQ ID NO: 17193 - RNA, 20 nt, Artificial Sequence
  spacer sequence GTCN PAM
cagaaugaaaucgcuucauc

SEQ ID NO: 17194 - RNA, 20 nt, Artificial Sequence
  spacer sequence GTCN PAM
guagcagccucacagauaga

SEQ ID NO: 17195 - RNA, 20 nt, Artificial Sequence
  spacer sequence GTCN PAM
agguuagcccaggcugcuau

SEQ ID NO: 17196 - RNA, 20 nt, Artificial Sequence
  spacer sequence GTCN PAM
caggaaaggucaagguuagc

SEQ ID NO: 17197 - RNA, 20 nt, Artificial Sequence
  spacer sequence GTCN PAM
acauugaucaaggcagaacg

SEQ ID NO: 17198 - RNA, 20 nt, Artificial Sequence
  spacer sequence GTCN PAM
ccuggaagggcugggcagac

SEQ ID NO: 17199 - RNA, 20 nt, Artificial Sequence
  spacer sequence GTCN PAM
gcccagcccuuccaggagac

SEQ ID NO: 17200 - RNA, 20 nt, Artificial Sequence
  spacer sequence GTCN PAM
ugugauuugauauuucauuc

SEQ ID NO: 17201 - RNA, 20 nt, Artificial Sequence
  spacer sequence GTCN PAM
gggagcucuuacagagcuua

SEQ ID NO: 17202 - RNA, 20 nt, Artificial Sequence
  spacer sequence GTCN PAM
gauuugauuuugguaucuuu

SEQ ID NO: 17203 - RNA, 20 nt, Artificial Sequence
  spacer sequence GTCN PAM
gaauucagagauggaaaaac

SEQ ID NO: 17204 - RNA, 20 nt, Artificial Sequence
  spacer sequence GTCN PAM
gagaaaagagacacagagga

SEQ ID NO: 17205 - RNA, 20 nt, Artificial Sequence
  spacer sequence GTCN PAM
cuuuucucugacucuccucu

SEQ ID NO: 17206 - RNA, 20 nt, Artificial Sequence
  spacer sequence GTCN PAM
uugggaaaggaggaaugugg

SEQ ID NO: 17207 - RNA, 20 nt, Artificial Sequence
  spacer sequence GTCN PAM
ccuucuccagaucacccacu

SEQ ID NO: 17208 - RNA, 20 nt, Artificial Sequence
  spacer sequence GTCN PAM
gccucuuuaccacccagccc

SEQ ID NO: 17209 - RNA, 20 nt, Artificial Sequence
  spacer sequence GTCN PAM
cgugggcagcccgugggcag

SEQ ID NO: 17210 - RNA, 20 nt, Artificial Sequence
  spacer sequence GTCN PAM
auuucuuuugagcugcugcc

SEQ ID NO: 17211 - RNA, 20 nt, Artificial Sequence
  spacer sequence GTCN PAM
gucaauuucuuuugagcugc

SEQ ID NO: 17212 - RNA, 20 nt, Artificial Sequence
  spacer sequence GTCN PAM
uuuccauauauugaaaugcg

SEQ ID NO: 17213 - RNA, 20 nt, Artificial Sequence
  spacer sequence GTCN PAM
uuuuucuaguucugcuucau

SEQ ID NO: 17214 - RNA, 20 nt, Artificial Sequence
  spacer sequence GTCN PAM
cuucccacuuccaaccuaca

SEQ ID NO: 17215 - RNA, 20 nt, Artificial Sequence
  spacer sequence GTCN PAM
ggggugggggcgcgcggugg

SEQ ID NO: 17216 - RNA, 20 nt, Artificial Sequence
  spacer sequence GTCN PAM
acgacgauuuuuuccuuuuc

SEQ ID NO: 17217 - RNA, 20 nt, Artificial Sequence
  spacer sequence GTCN PAM
uagaccggauguuuccaauu

SEQ ID NO: 17218 - RNA, 20 nt, Artificial Sequence
  spacer sequence GTCN PAM
gaaaauuuuuugaaagggaa

SEQ ID NO: 17219 - RNA, 20 nt, Artificial Sequence
  spacer sequence GTCN PAM
cagauaauccgaggcagggc

SEQ ID NO: 17220 - RNA, 20 nt, Artificial Sequence
  spacer sequence GTCN PAM
uuuucuuuuuucuuuaucau

SEQ ID NO: 17221 - RNA, 20 nt, Artificial Sequence
  spacer sequence GTCN PAM
uuuaaguuugcuaagggaac

SEQ ID NO: 17222 - RNA, 20 nt, Artificial Sequence
  spacer sequence GTCN PAM
uuuuugaacuaaugcugugc

SEQ ID NO: 17223 - RNA, 20 nt, Artificial Sequence
  spacer sequence GTCN PAM
ccgcaaucugcaauuacuuu

SEQ ID NO: 17224 - RNA, 20 nt, Artificial Sequence
  spacer sequence GTCN PAM
cuguuuugccuacugggcag

SEQ ID NO: 17225 - RNA, 20 nt, Artificial Sequence
  spacer sequence GTCN PAM
gugggcaucacccuauaaag

SEQ ID NO: 17226 - RNA, 20 nt, Artificial Sequence
  spacer sequence GTCN PAM
uauugcauaaacagaucuuc

SEQ ID NO: 17227 - RNA, 20 nt, Artificial Sequence
  spacer sequence GTCN PAM
ucaaaugguuaauuccccca

SEQ ID NO: 17228 - RNA, 20 nt, Artificial Sequence
  spacer sequence GTCN PAM
gcguccucaaaugguuaauu

SEQ ID NO: 17229 - RNA, 20 nt, Artificial Sequence
  spacer sequence GTCN PAM
ccagagauuccauccucaca

SEQ ID NO: 17230 - RNA, 20 nt, Artificial Sequence
  spacer sequence GTCN PAM
gguuuuuguuugaccuugug

SEQ ID NO: 17231 - RNA, 20 nt, Artificial Sequence
  spacer sequence GTCN PAM
aacaaaaaccagacccggau

SEQ ID NO: 17232 - RNA, 20 nt, Artificial Sequence
  spacer sequence GTCN PAM
gaaucccgggguucugcaca

SEQ ID NO: 17233 - RNA, 20 nt, Artificial Sequence
  spacer sequence GTCN PAM
cuccaauugugcagaacccc

SEQ ID NO: 17234 - RNA, 20 nt, Artificial Sequence
  spacer sequence GTCN PAM
ggcaaugggaauauacggau

SEQ ID NO: 17235 - RNA, 20 nt, Artificial Sequence
  spacer sequence GTCN PAM
ugacagccccaaagcucuca

SEQ ID NO: 17236 - RNA, 20 nt, Artificial Sequence
  spacer sequence GTCN PAM
cgacaacaaacuaugaaugg

SEQ ID NO: 17237 - RNA, 20 nt, Artificial Sequence
  spacer sequence GTCN PAM
gaacuauuaaauugguuuuu

SEQ ID NO: 17238 - RNA, 20 nt, Artificial Sequence
  spacer sequence GTCN PAM
aagaacaauaugucugaacu

SEQ ID NO: 17239 - RNA, 20 nt, Artificial Sequence
  spacer sequence GTCN PAM
uagucucaugguuuuuuuuu

SEQ ID NO: 17240 - RNA, 20 nt, Artificial Sequence
  spacer sequence GTCN PAM
caugguuuuuuuuuuauauu

SEQ ID NO: 17241 - RNA, 20 nt, Artificial Sequence
  spacer sequence GTCN PAM
ccaaacuuucagauugaagc

SEQ ID NO: 17242 - RNA, 20 nt, Artificial Sequence
  spacer sequence GTCN PAM
gagguuugucuggaaagacc

SEQ ID NO: 17243 - RNA, 20 nt, Artificial Sequence
  spacer sequence GTCN PAM
ggaaagaccugccagcacau

SEQ ID NO: 17244 - RNA, 20 nt, Artificial Sequence
  spacer sequence GTCN PAM
uuccagacaaaccucagacc

SEQ ID NO: 17245 - RNA, 20 nt, Artificial Sequence
  spacer sequence GTCN PAM
auuaauaauaauaaaaaagc

SEQ ID NO: 17246 - RNA, 20 nt, Artificial Sequence
  spacer sequence GTCN PAM
uccuauguuccucuccaaac

SEQ ID NO: 17247 - RNA, 20 nt, Artificial Sequence
  spacer sequence GTCN PAM
uagaaugaaagcuguuagaa

SEQ ID NO: 17248 - RNA, 20 nt, Artificial Sequence
  spacer sequence GTCN PAM
aaucuacacuucacauaaaa

SEQ ID NO: 17249 - RNA, 20 nt, Artificial Sequence
  spacer sequence GTCN PAM
cuaacaaaaugcacuuuuug

SEQ ID NO: 17250 - RNA, 20 nt, Artificial Sequence
  spacer sequence GTCN PAM
cauaugggggaggggcaguu

SEQ ID NO: 17251 - RNA, 20 nt, Artificial Sequence
  spacer sequence GTCN PAM
gagaauuagagauuuuguua

SEQ ID NO: 17252 - RNA, 20 nt, Artificial Sequence
  spacer sequence GTCN PAM
guuucuuuuuuaaauuauuc

SEQ ID NO: 17253 - RNA, 20 nt, Artificial Sequence
  spacer sequence GTCN PAM
accuucucaaacgugcaauu

SEQ ID NO: 17254 - RNA, 20 nt, Artificial Sequence
  spacer sequence GTCN PAM
ugauaaacaaagcuaagcag

SEQ ID NO: 17255 - RNA, 20 nt, Artificial Sequence
  spacer sequence GTCN PAM
cuggguugauaugauaaagu

SEQ ID NO: 17256 - RNA, 20 nt, Artificial Sequence
  spacer sequence GTCN PAM
acuuuaucauaucaacccag

SEQ ID NO: 17257 - RNA, 20 nt, Artificial Sequence
  spacer sequence GTCN PAM
ucggugucaacuaugucaga

SEQ ID NO: 17258 - RNA, 20 nt, Artificial Sequence
  spacer sequence GTCN PAM
acuaugucagagaccuguaa

SEQ ID NO: 17259 - RNA, 20 nt, Artificial Sequence
  spacer sequence GTCN PAM
gagaccuguaagaacauuca

SEQ ID NO: 17260 - RNA, 20 nt, Artificial Sequence
  spacer sequence GTCN PAM
cugacauaguugacaccgag

SEQ ID NO: 17261 - RNA, 20 nt, Artificial Sequence
  spacer sequence GTCN PAM
ccaugaacccaaacuuggag

SEQ ID NO: 17262 - RNA, 20 nt, Artificial Sequence
  spacer sequence GTCN PAM
ggcauccaggacccagugga

SEQ ID NO: 17263 - RNA, 20 nt, Artificial Sequence
  spacer sequence GTCN PAM
uggaugccagaccaucaaca

SEQ ID NO: 17264 - RNA, 20 nt, Artificial Sequence
  spacer sequence GTCN PAM
uguggaagccuaggauaugg

SEQ ID NO: 17265 - RNA, 20 nt, Artificial Sequence
  spacer sequence GTCN PAM
gaguuuucuucucuuaaaga

SEQ ID NO: 17266 - RNA, 20 nt, Artificial Sequence
  spacer sequence GTCN PAM
agggaggagaggaugccucg

SEQ ID NO: 17267 - RNA, 20 nt, Artificial Sequence
  spacer sequence GTCN PAM
guuuauaagaaaaacgaggc

SEQ ID NO: 17268 - RNA, 20 nt, Artificial Sequence
  spacer sequence GTCN PAM
gcaauaaucacccuuugcca

SEQ ID NO: 17269 - RNA, 20 nt, Artificial Sequence
  spacer sequence GTCN PAM
uguugucaugccuaucaccg

SEQ ID NO: 17270 - RNA, 20 nt, Artificial Sequence
  spacer sequence GTCN PAM
ugccuaucaccgucacuguu

SEQ ID NO: 17271 - RNA, 20 nt, Artificial Sequence
  spacer sequence GTCN PAM
cuguucaguuucaguucagg

SEQ ID NO: 17272 - RNA, 20 nt, Artificial Sequence
  spacer sequence GTCN PAM
ucaucauuccaggggccugg

SEQ ID NO: 17273 - RNA, 20 nt, Artificial Sequence
  spacer sequence GTCN PAM
aaaaaugcuuccagacgacc

SEQ ID NO: 17274 - RNA, 20 nt, Artificial Sequence
  spacer sequence GTCN PAM
ggaagcauuuuuugacgagu

SEQ ID NO: 17275 - RNA, 20 nt, Artificial Sequence
  spacer sequence GTCN PAM
ucuggaagcauuuuuugacg

SEQ ID NO: 17276 - RNA, 20 nt, Artificial Sequence
  spacer sequence GTCN PAM
guucaauaccaggugcuuuu

SEQ ID NO: 17277 - RNA, 20 nt, Artificial Sequence
  spacer sequence GTCN PAM
cauguugaggggaccgaaga

SEQ ID NO: 17278 - RNA, 20 nt, Artificial Sequence
  spacer sequence GTCN PAM
ccucaacaugugacacaguu

SEQ ID NO: 17279 - RNA, 20 nt, Artificial Sequence
  spacer sequence GTCN PAM
ucgguccccucaacauguga

SEQ ID NO: 17280 - RNA, 20 nt, Artificial Sequence
  spacer sequence GTCN PAM
auguugcggagugggucaga

SEQ ID NO: 17281 - RNA, 20 nt, Artificial Sequence
  spacer sequence GTCN PAM
gaguccaggggagggacuca

SEQ ID NO: 17282 - RNA, 20 nt, Artificial Sequence
  spacer sequence GTCN PAM
aggggagggacucacauaca

SEQ ID NO: 17283 - RNA, 20 nt, Artificial Sequence
  spacer sequence GTCN PAM
cuccccuggacucugaccca

SEQ ID NO: 17284 - RNA, 20 nt, Artificial Sequence
  spacer sequence GTCN PAM
gacuggggaacuggcaauag

SEQ ID NO: 17285 - RNA, 20 nt, Artificial Sequence
  spacer sequence GTCN PAM
gacuuguaugugagucccuc

SEQ ID NO: 17286 - RNA, 20 nt, Artificial Sequence
  spacer sequence GTCN PAM
gggaggugccccaaagcggg

SEQ ID NO: 17287 - RNA, 20 nt, Artificial Sequence
  spacer sequence GTCN PAM
cuccacugugcuucagcuac

SEQ ID NO: 17288 - RNA, 20 nt, Artificial Sequence
  spacer sequence GTCN PAM
gcaaagggagguuggggcaa

SEQ ID NO: 17289 - RNA, 20 nt, Artificial Sequence
  spacer sequence GTCN PAM
ggggagaaccuggaaugucg

SEQ ID NO: 17290 - RNA, 20 nt, Artificial Sequence
  spacer sequence GTCN PAM
ucauucacagccuugaccug

SEQ ID NO: 17291 - RNA, 20 nt, Artificial Sequence
  spacer sequence GTCN PAM
uucacagccuugaccugaau

SEQ ID NO: 17292 - RNA, 20 nt, Artificial Sequence
  spacer sequence GTCN PAM
aggcugugaaugacgacauu

SEQ ID NO: 17293 - RNA, 20 nt, Artificial Sequence
  spacer sequence GTCN PAM
cccagcaccccuacuccaaa

SEQ ID NO: 17294 - RNA, 20 nt, Artificial Sequence
  spacer sequence GTCN PAM
gcagaggaaguggcccauau

SEQ ID NO: 17295 - RNA, 20 nt, Artificial Sequence
  spacer sequence GTCN PAM
aaaucauuucauuugcauau

SEQ ID NO: 17296 - RNA, 20 nt, Artificial Sequence
  spacer sequence GTCN PAM
auuaugaaagagaagauggu

SEQ ID NO: 17297 - RNA, 20 nt, Artificial Sequence
  spacer sequence GTCN PAM
acucuuugaaugcuucuaua

SEQ ID NO: 17298 - RNA, 20 nt, Artificial Sequence
  spacer sequence GTCN PAM
aauuauagaagcauucaaag

SEQ ID NO: 17299 - RNA, 20 nt, Artificial Sequence
  spacer sequence GTCN PAM
aagaaccuaauucauccuuc

SEQ ID NO: 17300 - RNA, 20 nt, Artificial Sequence
  spacer sequence GTCN PAM
agggguuagagguaaaaacu

SEQ ID NO: 17301 - RNA, 20 nt, Artificial Sequence
  spacer sequence GTCN PAM
uaccuuuuggcaaauugggu

SEQ ID NO: 17302 - RNA, 20 nt, Artificial Sequence
  spacer sequence GTCN PAM
aagccugcccacuauacaau

SEQ ID NO: 17303 - RNA, 20 nt, Artificial Sequence
  spacer sequence GTCN PAM
uguauuauucauccuuguuu

SEQ ID NO: 17304 - RNA, 20 nt, Artificial Sequence
  spacer sequence GTCN PAM
ugcuaaaaaccagcucacca

SEQ ID NO: 17305 - RNA, 20 nt, Artificial Sequence
  spacer sequence GTCN PAM
cuccagcccuguaaaaacag

SEQ ID NO: 17306 - RNA, 20 nt, Artificial Sequence
  spacer sequence GTCN PAM
uacuuuucuaguucuaucca

SEQ ID NO: 17307 - RNA, 20 nt, Artificial Sequence
  spacer sequence GTCN PAM
cauuuuucauacuguuauuu

SEQ ID NO: 17308 - RNA, 20 nt, Artificial Sequence
  spacer sequence GTCN PAM
uacaggaggagauuuuguuu

SEQ ID NO: 17309 - RNA, 20 nt, Artificial Sequence
  spacer sequence GTCN PAM
agggcauggagcaugauugg

SEQ ID NO: 17310 - RNA, 20 nt, Artificial Sequence
  spacer sequence GTCN PAM
guuuuacacgccuggaaugu

SEQ ID NO: 17311 - RNA, 20 nt, Artificial Sequence
  spacer sequence GTCN PAM
cuccacccucccaccccucu

SEQ ID NO: 17312 - RNA, 20 nt, Artificial Sequence
  spacer sequence GTCN PAM
uuaaaugccuucuucuuagc

SEQ ID NO: 17313 - RNA, 20 nt, Artificial Sequence
  spacer sequence GTCN PAM
aagcagccuucauucucaag

SEQ ID NO: 17314 - RNA, 20 nt, Artificial Sequence
  spacer sequence GTCN PAM
guuaaaauuuuuuuugcugu

SEQ ID NO: 17315 - RNA, 20 nt, Artificial Sequence
  spacer sequence GTCN PAM
gacuuuagaaaaauguuagg

SEQ ID NO: 17316 - RNA, 20 nt, Artificial Sequence
  spacer sequence GTCN PAM
gaccauagguguucaauuuu

SEQ ID NO: 17317 - RNA, 20 nt, Artificial Sequence
  spacer sequence GTCN PAM
gauauuccuaacauuuuucu

SEQ ID NO: 17318 - RNA, 20 nt, Artificial Sequence
  spacer sequence GTCN PAM
uaauuaagaauggaaguaag

SEQ ID NO: 17319 - RNA, 20 nt, Artificial Sequence
  spacer sequence GTCN PAM
uacauauucaugucauacca

SEQ ID NO: 17320 - RNA, 20 nt, Artificial Sequence
  spacer sequence GTCN PAM
uaccacagggucaaggccaa

SEQ ID NO: 17321 - RNA, 20 nt, Artificial Sequence
  spacer sequence GTCN PAM
aggccaaaugccaaagaguc

SEQ ID NO: 17322 - RNA, 20 nt, Artificial Sequence
  spacer sequence GTCN PAM
ugacacaaaaaaaauaccuu

SEQ ID NO: 17323 - RNA, 20 nt, Artificial Sequence
  spacer sequence GTCN PAM
cgacucuuuggcauuuggcc

SEQ ID NO: 17324 - RNA, 20 nt, Artificial Sequence
  spacer sequence GTCN PAM
uuuauuuuuaucuucuuuug

SEQ ID NO: 17325 - RNA, 20 nt, Artificial Sequence
  spacer sequence GTCN PAM
ucacacucaaauugccauau

SEQ ID NO: 17326 - RNA, 20 nt, Artificial Sequence
  spacer sequence GTCN PAM
guuagcaacucuuuuacuua

SEQ ID NO: 17327 - RNA, 20 nt, Artificial Sequence
  spacer sequence GTCN PAM
ugcccauuauuuuaaaauaa

SEQ ID NO: 17328 - RNA, 20 nt, Artificial Sequence
  spacer sequence GTCN PAM
uaggcaaugaaauaaagcag

SEQ ID NO: 17329 - RNA, 20 nt, Artificial Sequence
  spacer sequence GTCN PAM
guuucaugucuguuuguuuu

SEQ ID NO: 17330 - RNA, 20 nt, Artificial Sequence
  spacer sequence GTCN PAM
guuuguuuuacuaauuugaa

SEQ ID NO: 17331 - RNA, 20 nt, Artificial Sequence
  spacer sequence GTCN PAM
aaucuguaauaucugaaacc

SEQ ID NO: 17332 - RNA, 20 nt, Artificial Sequence
  spacer sequence GTCN PAM
uggaggccuuaggucuuuaa

SEQ ID NO: 17333 - RNA, 20 nt, Artificial Sequence
  spacer sequence GTCN PAM
auagguaucaucuaagcccc

SEQ ID NO: 17334 - RNA, 20 nt, Artificial Sequence
  spacer sequence GTCN PAM
auuugaaaaacggugugggg

SEQ ID NO: 17335 - RNA, 20 nt, Artificial Sequence
  spacer sequence GTCN PAM
aaauagaaucauaaguaguu

SEQ ID NO: 17336 - RNA, 20 nt, Artificial Sequence
  spacer sequence GTCN PAM
ugcccuaugcuaucuuuuaa

SEQ ID NO: 17337 - RNA, 20 nt, Artificial Sequence
  spacer sequence GTCN PAM
caugaggucaggaguucaag

SEQ ID NO: 17338 - RNA, 20 nt, Artificial Sequence
  spacer sequence GTCN PAM
ggaguucaagaccagccugg

SEQ ID NO: 17339 - RNA, 20 nt, Artificial Sequence
  spacer sequence GTCN PAM
ugaacuccugaccucaugug

SEQ ID NO: 17340 - RNA, 20 nt, Artificial Sequence
  spacer sequence GTCN PAM
uaaaaauuuggucagagcua

SEQ ID NO: 17341 - RNA, 20 nt, Artificial Sequence
  spacer sequence GTCN PAM
gagcuaagcuuggaauguua

SEQ ID NO: 17342 - RNA, 20 nt, Artificial Sequence
  spacer sequence GTCN PAM
gauccugcaagcgaauucuc

SEQ ID NO: 17343 - RNA, 20 nt, Artificial Sequence
  spacer sequence GTCN PAM
uuuuaaugguugaacagaag

SEQ ID NO: 17344 - RNA, 20 nt, Artificial Sequence
  spacer sequence GTCN PAM
uauuucugccuccagggcuu

SEQ ID NO: 17345 - RNA, 20 nt, Artificial Sequence
  spacer sequence GTCN PAM
ccaucuuuggcaucaaaaag

SEQ ID NO: 17346 - RNA, 20 nt, Artificial Sequence
  spacer sequence GTCN PAM
uuggaaagagauaagggaug

SEQ ID NO: 17347 - RNA, 20 nt, Artificial Sequence
  spacer sequence GTCN PAM
uaaaaaaauaacauugcaaa

SEQ ID NO: 17348 - RNA, 20 nt, Artificial Sequence
  spacer sequence GTCN PAM
cugaacaaguggcagaagcc

SEQ ID NO: 17349 - RNA, 20 nt, Artificial Sequence
  spacer sequence GTCN PAM
auuuaaaugugcugcaccau

SEQ ID NO: 17350 - RNA, 20 nt, Artificial Sequence
  spacer sequence GTCN PAM
ggucauugaaguaaacauuc

SEQ ID NO: 17351 - RNA, 20 nt, Artificial Sequence
  spacer sequence GTCN PAM
uugaaguaaacauucauuga

SEQ ID NO: 17352 - RNA, 20 nt, Artificial Sequence
  spacer sequence GTCN PAM
gucaguuacccagcaaggcu

SEQ ID NO: 17353 - RNA, 20 nt, Artificial Sequence
  spacer sequence GTCN PAM
guuacccagcaaggcugcag

SEQ ID NO: 17354 - RNA, 20 nt, Artificial Sequence
  spacer sequence GTCN PAM
uugcuuuugccaggagcaua

SEQ ID NO: 17355 - RNA, 20 nt, Artificial Sequence
  spacer sequence GTCN PAM
uucuuauagccaacaccuua

SEQ ID NO: 17356 - RNA, 20 nt, Artificial Sequence
  spacer sequence GTCN PAM
aaaggcgauugcagcauaac

SEQ ID NO: 17357 - RNA, 20 nt, Artificial Sequence
  spacer sequence GTCN PAM
ccccacuuuauucucauggg

SEQ ID NO: 17358 - RNA, 20 nt, Artificial Sequence
  spacer sequence GTCN PAM
uccugagguaggaaugcaaa

SEQ ID NO: 17359 - RNA, 20 nt, Artificial Sequence
  spacer sequence GTCN PAM
auuacugagagggagaaaaa

SEQ ID NO: 17360 - RNA, 20 nt, Artificial Sequence
  spacer sequence GTCN PAM
cuggcaagcccacagcaguu

SEQ ID NO: 17361 - RNA, 20 nt, Artificial Sequence
  spacer sequence GTCN PAM
gcagguguagaccccaaaug

SEQ ID NO: 17362 - RNA, 20 nt, Artificial Sequence
  spacer sequence GTCN PAM
acaccugcugaccaaaauau

SEQ ID NO: 17363 - RNA, 20 nt, Artificial Sequence
  spacer sequence GTCN PAM
uaaaccacuguucauuuggg

SEQ ID NO: 17364 - RNA, 20 nt, Artificial Sequence
  spacer sequence GTCN PAM
gaacuacuaaagcuugagau

SEQ ID NO: 17365 - RNA, 20 nt, Artificial Sequence
  spacer sequence GTCN PAM
guuagagaaucugucugaac

SEQ ID NO: 17366 - RNA, 20 nt, Artificial Sequence
  spacer sequence GTCN PAM
cuuuccucuuuuguuuggac

SEQ ID NO: 17367 - RNA, 20 nt, Artificial Sequence
  spacer sequence GTCN PAM
aaacaaaagaggaaagagac

SEQ ID NO: 17368 - RNA, 20 nt, Artificial Sequence
  spacer sequence GTCN PAM
gcaacaucuccaggggaaaa

SEQ ID NO: 17369 - RNA, 20 nt, Artificial Sequence
  spacer sequence GTCN PAM
auccaucucuuuuuguuuuu

SEQ ID NO: 17370 - RNA, 20 nt, Artificial Sequence
  spacer sequence GTCN PAM
gcacuuacaggucuauuucu

SEQ ID NO: 17371 - RNA, 20 nt, Artificial Sequence
  spacer sequence GTCN PAM
auuucuggaugcuuuagaau

SEQ ID NO: 17372 - RNA, 20 nt, Artificial Sequence
  spacer sequence GTCN PAM
ugguggcaagccaacuucuc

SEQ ID NO: 17373 - RNA, 20 nt, Artificial Sequence
  spacer sequence GTCN PAM
acaacauaacuacauauucu

SEQ ID NO: 17374 - RNA, 20 nt, Artificial Sequence
  spacer sequence GTCN PAM
ucuuugcuuguccuuuagca

SEQ ID NO: 17375 - RNA, 20 nt, Artificial Sequence
  spacer sequence GTCN PAM
uuuagcacaagggcgagcag

SEQ ID NO: 17376 - RNA, 20 nt, Artificial Sequence
  spacer sequence GTCN PAM
uacgcugcucgcccuugugc

SEQ ID NO: 17377 - RNA, 20 nt, Artificial Sequence
  spacer sequence GTCN PAM
uuguccuacgcugcucgccc

SEQ ID NO: 17378 - RNA, 20 nt, Artificial Sequence
  spacer sequence GTCN PAM
uugucugugccgccgccgug

SEQ ID NO: 17379 - RNA, 20 nt, Artificial Sequence
  spacer sequence GTCN PAM
gugccgccgccgugggccgg

SEQ ID NO: 17380 - RNA, 20 nt, Artificial Sequence
  spacer sequence GTCN PAM
gcaggaagcgggcgccaucg

SEQ ID NO: 17381 - RNA, 20 nt, Artificial Sequence
  spacer sequence GTCN PAM
agcucaggccgcacgauggc

SEQ ID NO: 17382 - RNA, 20 nt, Artificial Sequence
  spacer sequence GTCN PAM
caaaggaaagugguuaccgu

SEQ ID NO: 17383 - RNA, 20 nt, Artificial Sequence
  spacer sequence GTCN PAM
cuccugaucauaaagaagac

SEQ ID NO: 17384 - RNA, 20 nt, Artificial Sequence
  spacer sequence GTCN PAM
ucuuuaugaucaggagagac

SEQ ID NO: 17385 - RNA, 20 nt, Artificial Sequence
  spacer sequence GTCN PAM
aaaucuauauauaaauauac

SEQ ID NO: 17386 - RNA, 20 nt, Artificial Sequence
  spacer sequence GTCN PAM
ggagccaaagauauccucca

SEQ ID NO: 17387 - RNA, 20 nt, Artificial Sequence
  spacer sequence GTCN PAM
uccucaaggagccaauggcg

SEQ ID NO: 17388 - RNA, 20 nt, Artificial Sequence
  spacer sequence GTCN PAM
ucccaguggggaagcccuuu

SEQ ID NO: 17389 - RNA, 20 nt, Artificial Sequence
  spacer sequence GTCN PAM
cccgugagccaggagcccaa

SEQ ID NO: 17390 - RNA, 20 nt, Artificial Sequence
  spacer sequence GTCN PAM
cgcggcggagagauuauuac

SEQ ID NO: 17391 - RNA, 20 nt, Artificial Sequence
  spacer sequence GTCN PAM
uauccuaagagcuauuuuag

SEQ ID NO: 17392 - RNA, 20 nt, Artificial Sequence
  spacer sequence GTCN PAM
ccggcuucccuucccuccag

SEQ ID NO: 17393 - RNA, 20 nt, Artificial Sequence
  spacer sequence GTCN PAM
ugggcuggggagcacugucc

SEQ ID NO: 17394 - RNA, 20 nt, Artificial Sequence
  spacer sequence GTCN PAM
cuuccaaaggcugcugaugg

SEQ ID NO: 17395 - RNA, 20 nt, Artificial Sequence
  spacer sequence GTCN PAM
gccuucagcugcccucccau

SEQ ID NO: 17396 - RNA, 20 nt, Artificial Sequence
  spacer sequence GTCN PAM
ccagacuucccggcauaauu

SEQ ID NO: 17397 - RNA, 20 nt, Artificial Sequence
  spacer sequence GTCN PAM
ggggaccuucucucaagaac

SEQ ID NO: 17398 - RNA, 20 nt, Artificial Sequence
  spacer sequence GTCN PAM
gaaauggcaggugaccuaag

SEQ ID NO: 17399 - RNA, 20 nt, Artificial Sequence
  spacer sequence GTCN PAM
ccugccauuucagacaggga

SEQ ID NO: 17400 - RNA, 20 nt, Artificial Sequence
  spacer sequence GTCN PAM
cugauccucuccaaaucgau

SEQ ID NO: 17401 - RNA, 20 nt, Artificial Sequence
  spacer sequence GTCN PAM
gauggagagggacgcaugaa

SEQ ID NO: 17402 - RNA, 20 nt, Artificial Sequence
  spacer sequence GTCN PAM
cucuccaucugacauggcag

SEQ ID NO: 17403 - RNA, 20 nt, Artificial Sequence
  spacer sequence GTCN PAM
cagcuccccaccacguucca

SEQ ID NO: 17404 - RNA, 20 nt, Artificial Sequence
  spacer sequence GTCN PAM
caguguauucgccuucuggu

SEQ ID NO: 17405 - RNA, 20 nt, Artificial Sequence
  spacer sequence GTCN PAM
uacugugaaaaaacuuagcg

SEQ ID NO: 17406 - RNA, 20 nt, Artificial Sequence
  spacer sequence GTCN PAM
gagaaacagaugugaugaca

SEQ ID NO: 17407 - RNA, 20 nt, Artificial Sequence
  spacer sequence GTCN PAM
ucacaucuguuucucugacu

SEQ ID NO: 17408 - RNA, 20 nt, Artificial Sequence
  spacer sequence GTCN PAM
gagagagguaugaagaugug

SEQ ID NO: 17409 - RNA, 20 nt, Artificial Sequence
  spacer sequence GTCN PAM
aagaaaauguucuaccauaa

SEQ ID NO: 17410 - RNA, 20 nt, Artificial Sequence
  spacer sequence GTCN PAM
uccagaaaucuuccagggag

SEQ ID NO: 17411 - RNA, 20 nt, Artificial Sequence
  spacer sequence GTCN PAM
gcucuugagccacugaaauc

SEQ ID NO: 17412 - RNA, 20 nt, Artificial Sequence
  spacer sequence GTCN PAM
aagaguuugcugagaggaau

SEQ ID NO: 17413 - RNA, 20 nt, Artificial Sequence
  spacer sequence GTCN PAM
agguucugacacauuccucu

SEQ ID NO: 17414 - RNA, 20 nt, Artificial Sequence
  spacer sequence GTCN PAM
gaaccuggacaguaagucaa

SEQ ID NO: 17415 - RNA, 20 nt, Artificial Sequence
  spacer sequence GTCN PAM
gacugaaaauaguggccaac

SEQ ID NO: 17416 - RNA, 20 nt, Artificial Sequence
  spacer sequence GTCN PAM
gacacucccuuuuacaaaug

SEQ ID NO: 17417 - RNA, 20 nt, Artificial Sequence
  spacer sequence GTCN PAM
ccuaugcauagcuaagaaua

SEQ ID NO: 17418 - RNA, 20 nt, Artificial Sequence
  spacer sequence GTCN PAM
cucuguggguuguggguaga

SEQ ID NO: 17419 - RNA, 20 nt, Artificial Sequence
  spacer sequence GTCN PAM
caaacccugaaccaucuacc

SEQ ID NO: 17420 - RNA, 20 nt, Artificial Sequence
  spacer sequence GTCN PAM
aauauaccuaaccuauugaa

SEQ ID NO: 17421 - RNA, 20 nt, Artificial Sequence
  spacer sequence GTCN PAM
gcagaucagcaauaauaucu

SEQ ID NO: 17422 - RNA, 20 nt, Artificial Sequence
  spacer sequence GTCN PAM
ugaggaaagggcauuccaag

SEQ ID NO: 17423 - RNA, 20 nt, Artificial Sequence
  spacer sequence GTCN PAM
aaacagugaggagggagcca

SEQ ID NO: 17424 - RNA, 20 nt, Artificial Sequence
  spacer sequence GTCN PAM
ccuccacagaguuucucucc

SEQ ID NO: 17425 - RNA, 20 nt, Artificial Sequence
  spacer sequence GTCN PAM
gccuucaaagaucuuacauu

SEQ ID NO: 17426 - RNA, 20 nt, Artificial Sequence
  spacer sequence GTCN PAM
gguucauugcuauucuccag

SEQ ID NO: 17427 - RNA, 20 nt, Artificial Sequence
  spacer sequence GTCN PAM
uggguuuuucuucgauggga

SEQ ID NO: 17428 - RNA, 20 nt, Artificial Sequence
  spacer sequence GTCN PAM
ucagguccuggguuuuucuu

SEQ ID NO: 17429 - RNA, 20 nt, Artificial Sequence
  spacer sequence GTCN PAM
aauuagccuuuuucacagac

SEQ ID NO: 17430 - RNA, 20 nt, Artificial Sequence
  spacer sequence GTCN PAM
gugaaaaaggcuaauuugac

SEQ ID NO: 17431 - RNA, 20 nt, Artificial Sequence
  spacer sequence GTCN PAM
uuaggcauuucuaaguauaa

SEQ ID NO: 17432 - RNA, 20 nt, Artificial Sequence
  spacer sequence GTCN PAM
acugaguucuucuucucauu

SEQ ID NO: 17433 - RNA, 20 nt, Artificial Sequence
  spacer sequence GTCN PAM
ccccaguuaaaauggcuuuu

SEQ ID NO: 17434 - RNA, 20 nt, Artificial Sequence
  spacer sequence GTCN PAM
uuuugauaaaagccauuuua

SEQ ID NO: 17435 - RNA, 20 nt, Artificial Sequence
  spacer sequence GTCN PAM
augccuacacuucugaaugg

SEQ ID NO: 17436 - RNA, 20 nt, Artificial Sequence
  spacer sequence GTCN PAM
acuccccuguaaugccacua

SEQ ID NO: 17437 - RNA, 20 nt, Artificial Sequence
  spacer sequence GTCN PAM
cagcagaaauauuuuuuguc

SEQ ID NO: 17438 - RNA, 20 nt, Artificial Sequence
  spacer sequence GTCN PAM
uccaacauuucagacaaggc

SEQ ID NO: 17439 - RNA, 20 nt, Artificial Sequence
  spacer sequence GTCN PAM
gaaauguuggaagacaaaaa

SEQ ID NO: 17440 - RNA, 20 nt, Artificial Sequence
  spacer sequence GTCN PAM
cugagacacagcuguggauc

SEQ ID NO: 17441 - RNA, 20 nt, Artificial Sequence
  spacer sequence GTCN PAM
cagagaccugguucuuuacg

SEQ ID NO: 17442 - RNA, 20 nt, Artificial Sequence
  spacer sequence GTCN PAM
aaggcaugagggggauauca

SEQ ID NO: 17443 - RNA, 20 nt, Artificial Sequence
  spacer sequence GTCN PAM
caaaaagauauggccauggc

SEQ ID NO: 17444 - RNA, 20 nt, Artificial Sequence
  spacer sequence GTCN PAM
uugaguaauuccaaaauaag

SEQ ID NO: 17445 - RNA, 20 nt, Artificial Sequence
  spacer sequence GTCN PAM
uauuuuggaauuacucaaug

SEQ ID NO: 17446 - RNA, 20 nt, Artificial Sequence
  spacer sequence GTCN PAM
auaguaacacacggacaaga

SEQ ID NO: 17447 - RNA, 20 nt, Artificial Sequence
  spacer sequence GTCN PAM
aaauucccauucccucauca

SEQ ID NO: 17448 - RNA, 20 nt, Artificial Sequence
  spacer sequence GTCN PAM
aaaggaguggguuaccaaaa

SEQ ID NO: 17449 - RNA, 20 nt, Artificial Sequence
  spacer sequence GTCN PAM
augugaccuaaggaucauug

SEQ ID NO: 17450 - RNA, 20 nt, Artificial Sequence
  spacer sequence GTCN PAM
cauagaccuucuuggaggca

SEQ ID NO: 17451 - RNA, 20 nt, Artificial Sequence
  spacer sequence GTCN PAM
gcaagauuaaugaacuuguu

SEQ ID NO: 17452 - RNA, 20 nt, Artificial Sequence
  spacer sequence GTCN PAM
ggauauaaaguuaaucaaug

SEQ ID NO: 17453 - RNA, 20 nt, Artificial Sequence
  spacer sequence GTCN PAM
cuaauucacuaaucauugau

SEQ ID NO: 17454 - RNA, 20 nt, Artificial Sequence
  spacer sequence GTCN PAM
uuuugguagagcguggucac

SEQ ID NO: 17455 - RNA, 20 nt, Artificial Sequence
  spacer sequence GTCN PAM
uuuucuuucuccaugcauga

SEQ ID NO: 17456 - RNA, 20 nt, Artificial Sequence
  spacer sequence GTCN PAM
acaaacagcaauauucccuc

SEQ ID NO: 17457 - RNA, 20 nt, Artificial Sequence
  spacer sequence GTCN PAM
uaaccuccagaaccucagaa

SEQ ID NO: 17458 - RNA, 20 nt, Artificial Sequence
  spacer sequence GTCN PAM
cauucugagguucuggaggu

SEQ ID NO: 17459 - RNA, 20 nt, Artificial Sequence
  spacer sequence GTCN PAM
uuguagauguaauuauuuaa

SEQ ID NO: 17460 - RNA, 20 nt, Artificial Sequence
  spacer sequence GTCN PAM
uuuguuauggcagcgcuagg

SEQ ID NO: 17461 - RNA, 20 nt, Artificial Sequence
  spacer sequence GTCN PAM
cuuacaacaaagaauuauca

SEQ ID NO: 17462 - RNA, 20 nt, Artificial Sequence
  spacer sequence GTCN PAM
gauaauucuuuguuguaaga

SEQ ID NO: 17463 - RNA, 20 nt, Artificial Sequence
  spacer sequence GTCN PAM
ucaaacuauucacauuuuga

SEQ ID NO: 17464 - RNA, 20 nt, Artificial Sequence
  spacer sequence GTCN PAM
aaauuccacaggaaggauuu

SEQ ID NO: 17465 - RNA, 20 nt, Artificial Sequence
  spacer sequence GTCN PAM
cacagcacccugugcucaga

SEQ ID NO: 17466 - RNA, 20 nt, Artificial Sequence
  spacer sequence GTCN PAM
ccaucuucaaaaugucagua

SEQ ID NO: 17467 - RNA, 20 nt, Artificial Sequence
  spacer sequence GTCN PAM
guaacuauuuuuugacacgg

SEQ ID NO: 17468 - RNA, 20 nt, Artificial Sequence
  spacer sequence GTCN PAM
agagagagggagaaugaaaa

SEQ ID NO: 17469 - RNA, 20 nt, Artificial Sequence
  spacer sequence GTCN PAM
cuaguaguuggauaaauggu

SEQ ID NO: 17470 - RNA, 20 nt, Artificial Sequence
  spacer sequence GTCN PAM
acucagcccuccuauucucu

SEQ ID NO: 17471 - RNA, 20 nt, Artificial Sequence
  spacer sequence GTCN PAM
ugagcgaggaccauucagag

SEQ ID NO: 17472 - RNA, 20 nt, Artificial Sequence
  spacer sequence GTCN PAM
ucgcucaggacucugcucag

SEQ ID NO: 17473 - RNA, 20 nt, Artificial Sequence
  spacer sequence GTCN PAM
uuguugcuucuuguguggau

SEQ ID NO: 17474 - RNA, 20 nt, Artificial Sequence
  spacer sequence GTCN PAM
auucucuccauuccaacugc

SEQ ID NO: 17475 - RNA, 20 nt, Artificial Sequence
  spacer sequence GTCN PAM
cccaacugggggucaauucu

SEQ ID NO: 17476 - RNA, 20 nt, Artificial Sequence
  spacer sequence GTCN PAM
uccaugaucauguucugcua

SEQ ID NO: 17477 - RNA, 20 nt, Artificial Sequence
  spacer sequence GTCN PAM
aucccacuuucaagaggagg

SEQ ID NO: 17478 - RNA, 20 nt, Artificial Sequence
  spacer sequence GTCN PAM
cuaggucuaucccacuuuca

SEQ ID NO: 17479 - RNA, 20 nt, Artificial Sequence
  spacer sequence GTCN PAM
cauaaccuuugccauauucu

SEQ ID NO: 17480 - RNA, 20 nt, Artificial Sequence
  spacer sequence GTCN PAM
caaggaauaagagaagaaaa

SEQ ID NO: 17481 - RNA, 20 nt, Artificial Sequence
  spacer sequence GTCN PAM
uucuuuuucaguagagaugg

SEQ ID NO: 17482 - RNA, 20 nt, Artificial Sequence
  spacer sequence GTCN PAM
ggaacuccugagcucaggug

SEQ ID NO: 17483 - RNA, 20 nt, Artificial Sequence
  spacer sequence GTCN PAM
ccugagcucaggaguuccgg

SEQ ID NO: 17484 - RNA, 20 nt, Artificial Sequence
  spacer sequence GTCN PAM
gaggugggcaggucaccuga

SEQ ID NO: 17485 - RNA, 20 nt, Artificial Sequence
  spacer sequence GTCN PAM
aauucaguagaaguuauuag

SEQ ID NO: 17486 - RNA, 20 nt, Artificial Sequence
  spacer sequence GTCN PAM
aaguguuguaaguagagaac

SEQ ID NO: 17487 - RNA, 20 nt, Artificial Sequence
  spacer sequence GTCN PAM
uacaaagagauaugucaaag

SEQ ID NO: 17488 - RNA, 20 nt, Artificial Sequence
  spacer sequence GTCN PAM
cuccauuaagcuagaagauc

SEQ ID NO: 17489 - RNA, 20 nt, Artificial Sequence
  spacer sequence GTCN PAM
uccaagaucuucuagcuuaa

SEQ ID NO: 17490 - RNA, 20 nt, Artificial Sequence
  spacer sequence GTCN PAM
cuauugacucuacacuccau

SEQ ID NO: 17491 - RNA, 20 nt, Artificial Sequence
  spacer sequence GTCN PAM
aaaaauagcgcuggagaaug

SEQ ID NO: 17492 - RNA, 20 nt, Artificial Sequence
  spacer sequence GTCN PAM
cauguuuuaaacaauuuaua

SEQ ID NO: 17493 - RNA, 20 nt, Artificial Sequence
  spacer sequence GTCN PAM
aaguauucucacgucucaug

SEQ ID NO: 17494 - RNA, 20 nt, Artificial Sequence
  spacer sequence GTCN PAM
uuugcuaaauaaaugaauuc

SEQ ID NO: 17495 - RNA, 20 nt, Artificial Sequence
  spacer sequence GTCN PAM
aaaugagaacaauaucucag

SEQ ID NO: 17496 - RNA, 20 nt, Artificial Sequence
  spacer sequence GTCN PAM
uuguuaacaauuagacauga

SEQ ID NO: 17497 - RNA, 20 nt, Artificial Sequence
  spacer sequence GTCN PAM
uggcucuuuuuuuuuuuuuu

SEQ ID NO: 17498 - RNA, 20 nt, Artificial Sequence
  spacer sequence GTCN PAM
agcacuaauggggaaauaca

SEQ ID NO: 17499 - RNA, 20 nt, Artificial Sequence
  spacer sequence GTCN PAM
uacauuuuucuuuuguauuu

SEQ ID NO: 17500 - RNA, 20 nt, Artificial Sequence
  spacer sequence GTCN PAM
ggcuggggacacuauuauuu

SEQ ID NO: 17501 - RNA, 20 nt, Artificial Sequence
  spacer sequence GTCN PAM
ccagccagacuggagauucc

SEQ ID NO: 17502 - RNA, 20 nt, Artificial Sequence
  spacer sequence GTCN PAM
ggauaagauaauaguuaccu

SEQ ID NO: 17503 - RNA, 20 nt, Artificial Sequence
  spacer sequence GTCN PAM
uaacacugaauuuccuggcc

SEQ ID NO: 17504 - RNA, 20 nt, Artificial Sequence
  spacer sequence GTCN PAM
aggaaugaaggggaagaauc

SEQ ID NO: 17505 - RNA, 20 nt, Artificial Sequence
  spacer sequence GTCN PAM
ugaccaagcccuucaucuuc

SEQ ID NO: 17506 - RNA, 20 nt, Artificial Sequence
  spacer sequence GTCN PAM
agaccgaagugggccccuug

SEQ ID NO: 17507 - RNA, 20 nt, Artificial Sequence
  spacer sequence GTCN PAM
cacccugccucaccucuggc

SEQ ID NO: 17508 - RNA, 20 nt, Artificial Sequence
  spacer sequence GTCN PAM
cagaaaaucugcucugacaa

SEQ ID NO: 17509 - RNA, 20 nt, Artificial Sequence
  spacer sequence GTCN PAM
gagcagauuuucugugacca

SEQ ID NO: 17510 - RNA, 20 nt, Artificial Sequence
  spacer sequence GTCN PAM
agcuggaucuugucagagca

SEQ ID NO: 17511 - RNA, 20 nt, Artificial Sequence
  spacer sequence GTCN PAM
ucucacuuucuaggucacau

SEQ ID NO: 17512 - RNA, 20 nt, Artificial Sequence
  spacer sequence GTCN PAM
caucauuuccuagcaucuaa

SEQ ID NO: 17513 - RNA, 20 nt, Artificial Sequence
  spacer sequence GTCN PAM
guuuauauauauuuuaaagc

SEQ ID NO: 17514 - RNA, 20 nt, Artificial Sequence
  spacer sequence GTCN PAM
cuucuaauuucaaugaaggg

SEQ ID NO: 17515 - RNA, 20 nt, Artificial Sequence
  spacer sequence GTCN PAM
caaugaacuaaaauaaaccc

SEQ ID NO: 17516 - RNA, 20 nt, Artificial Sequence
  spacer sequence GTCN PAM
guguuuccggaagauuccag

SEQ ID NO: 17517 - RNA, 20 nt, Artificial Sequence
  spacer sequence GTCN PAM
ucccggaguucuugaggccc

SEQ ID NO: 17518 - RNA, 20 nt, Artificial Sequence
  spacer sequence GTCN PAM
ggcucagagcccaagcucuu

SEQ ID NO: 17519 - RNA, 20 nt, Artificial Sequence
  spacer sequence GTCN PAM
agcuaagagcuugggcucug

SEQ ID NO: 17520 - RNA, 20 nt, Artificial Sequence
  spacer sequence GTCN PAM
cccaaaaaagauauauugga

SEQ ID NO: 17521 - RNA, 20 nt, Artificial Sequence
  spacer sequence GTCN PAM
uaaccccuaguaccucagaa

SEQ ID NO: 17522 - RNA, 20 nt, Artificial Sequence
  spacer sequence GTCN PAM
uuaaauagguaaucaauuua

SEQ ID NO: 17523 - RNA, 20 nt, Artificial Sequence
  spacer sequence GTCN PAM
cucuaggcucaaaauucauu

SEQ ID NO: 17524 - RNA, 20 nt, Artificial Sequence
  spacer sequence GTCN PAM
cuccaggugcuguccauaaa

SEQ ID NO: 17525 - RNA, 20 nt, Artificial Sequence
  spacer sequence GTCN PAM
ggugggcaggaggaggauuc

SEQ ID NO: 17526 - RNA, 20 nt, Artificial Sequence
  spacer sequence GTCN PAM
ucaaaagagggcauggaacu

SEQ ID NO: 17527 - RNA, 20 nt, Artificial Sequence
  spacer sequence GTCN PAM
guauauguucccuuauuuag

SEQ ID NO: 17528 - RNA, 20 nt, Artificial Sequence
  spacer sequence GTCN PAM
auaaauuuauugaguaguuc

SEQ ID NO: 17529 - RNA, 20 nt, Artificial Sequence
  spacer sequence GTCN PAM
cugggaagcuuccugauccc

SEQ ID NO: 17530 - RNA, 20 nt, Artificial Sequence
  spacer sequence GTCN PAM
ucugauuaaacaguguuggc

SEQ ID NO: 17531 - RNA, 20 nt, Artificial Sequence
  spacer sequence GTCN PAM
cucacaguucuggagaccag

SEQ ID NO: 17532 - RNA, 20 nt, Artificial Sequence
  spacer sequence GTCN PAM
ccagaacugugagagacuaa

SEQ ID NO: 17533 - RNA, 20 nt, Artificial Sequence
  spacer sequence GTCN PAM
caaguccccaaacaauaaua

SEQ ID NO: 17534 - RNA, 20 nt, Artificial Sequence
  spacer sequence GTCN PAM
ccaaacaauaauaaaacuuu

SEQ ID NO: 17535 - RNA, 20 nt, Artificial Sequence
  spacer sequence GTCN PAM
agaaaaugaaagccacaaau

SEQ ID NO: 17536 - RNA, 20 nt, Artificial Sequence
  spacer sequence GTCN PAM
aacaaauaaccaguacaguc

SEQ ID NO: 17537 - RNA, 20 nt, Artificial Sequence
  spacer sequence GTCN PAM
acuguuuuuucuuuuuuuua

SEQ ID NO: 17538 - RNA, 20 nt, Artificial Sequence
  spacer sequence GTCN PAM
uauuuuuauccuuauuuuac

SEQ ID NO: 17539 - RNA, 20 nt, Artificial Sequence
  spacer sequence GTCN PAM
cacuuaauauguagcagauu

SEQ ID NO: 17540 - RNA, 20 nt, Artificial Sequence
  spacer sequence GTCN PAM
aaaaaaaaauaucuuguagg

SEQ ID NO: 17541 - RNA, 20 nt, Artificial Sequence
  spacer sequence GTCN PAM
uggaaaagaaguuggcuauu

SEQ ID NO: 17542 - RNA, 20 nt, Artificial Sequence
  spacer sequence GTCN PAM
uuuauuugcccccagugaga

SEQ ID NO: 17543 - RNA, 20 nt, Artificial Sequence
  spacer sequence GTCN PAM
ccuaaaucuccugucuuuua

SEQ ID NO: 17544 - RNA, 20 nt, Artificial Sequence
  spacer sequence GTCN PAM
gugcuuaugugcucugugau

SEQ ID NO: 17545 - RNA, 20 nt, Artificial Sequence
  spacer sequence GTCN PAM
gcaguuacaauuucacgucu

SEQ ID NO: 17546 - RNA, 20 nt, Artificial Sequence
  spacer sequence GTCN PAM
ccagaugugaagggaagucu

SEQ ID NO: 17547 - RNA, 20 nt, Artificial Sequence
  spacer sequence GTCN PAM
acuuuccuagauguaccuuu

SEQ ID NO: 17548 - RNA, 20 nt, Artificial Sequence
  spacer sequence GTCN PAM
aucuugagaggcauuucuua

SEQ ID NO: 17549 - RNA, 20 nt, Artificial Sequence
  spacer sequence GTCN PAM
auuugaguuuccaaggauga

SEQ ID NO: 17550 - RNA, 20 nt, Artificial Sequence
  spacer sequence GTCN PAM
uacuuaaaacaaccuuucac

SEQ ID NO: 17551 - RNA, 20 nt, Artificial Sequence
  spacer sequence GTCN PAM
ucgcagcauuuucuccucau

SEQ ID NO: 17552 - RNA, 20 nt, Artificial Sequence
  spacer sequence GTCN PAM
cauauucuguaacagaaugg

SEQ ID NO: 17553 - RNA, 20 nt, Artificial Sequence
  spacer sequence GTCN PAM
agaauaaauugccuuucuca

SEQ ID NO: 17554 - RNA, 20 nt, Artificial Sequence
  spacer sequence GTCN PAM
ccugccugccgcucuuuggg

SEQ ID NO: 17555 - RNA, 20 nt, Artificial Sequence
  spacer sequence GTCN PAM
ccgggcagcuccugcugcau

SEQ ID NO: 17556 - RNA, 20 nt, Artificial Sequence
  spacer sequence GTCN PAM
uuaaaacaccuacagauaua

SEQ ID NO: 17557 - RNA, 20 nt, Artificial Sequence
  spacer sequence GTCN PAM
aaaguauugucuuuaaaaca

SEQ ID NO: 17558 - RNA, 20 nt, Artificial Sequence
  spacer sequence GTCN PAM
uaauuuuagcugucaaaagu

SEQ ID NO: 17559 - RNA, 20 nt, Artificial Sequence
  spacer sequence GTCN PAM
gucaguuucucuguuccuuu

SEQ ID NO: 17560 - RNA, 20 nt, Artificial Sequence
  spacer sequence GTCN PAM
guuucucuguuccuuuucgu

SEQ ID NO: 17561 - RNA, 20 nt, Artificial Sequence
  spacer sequence GTCN PAM
augaucccauggcaugugca

SEQ ID NO: 17562 - RNA, 20 nt, Artificial Sequence
  spacer sequence GTCN PAM
uuguuacucagagcuguuuu

SEQ ID NO: 17563 - RNA, 20 nt, Artificial Sequence
  spacer sequence GTCN PAM
uuuuaggagauaauauagua

SEQ ID NO: 17564 - RNA, 20 nt, Artificial Sequence
  spacer sequence GTCN PAM
gaaagcugaaggccacaagg

SEQ ID NO: 17565 - RNA, 20 nt, Artificial Sequence
  spacer sequence GTCN PAM
ccuggcuuuuaguuaaaaag

SEQ ID NO: 17566 - RNA, 20 nt, Artificial Sequence
  spacer sequence GTCN PAM
cacagcgaggcagaagccgg

SEQ ID NO: 17567 - RNA, 20 nt, Artificial Sequence
  spacer sequence GTCN PAM
cuuaaccugccugcgucuca

SEQ ID NO: 17568 - RNA, 20 nt, Artificial Sequence
  spacer sequence GTCN PAM
cagugccuucaucucuaaaa

SEQ ID NO: 17569 - RNA, 20 nt, Artificial Sequence
  spacer sequence GTCN PAM
uugcacacuugggguucuua

SEQ ID NO: 17570 - RNA, 20 nt, Artificial Sequence
  spacer sequence GTCN PAM
aaagaaggcauggauaaaac

SEQ ID NO: 17571 - RNA, 20 nt, Artificial Sequence
  spacer sequence GTCN PAM
uguacugggcugcucugaaa

SEQ ID NO: 17572 - RNA, 20 nt, Artificial Sequence
  spacer sequence GTCN PAM
uuaauaacuauuuaggcagc

SEQ ID NO: 17573 - RNA, 20 nt, Artificial Sequence
  spacer sequence GTCN PAM
agagucauuaauaacuauuu

SEQ ID NO: 17574 - RNA, 20 nt, Artificial Sequence
  spacer sequence GTCN PAM
ucaaaaucuguuuguguuuu

SEQ ID NO: 17575 - RNA, 20 nt, Artificial Sequence
  spacer sequence GTCN PAM
caccaggguacaaguucucu

SEQ ID NO: 17576 - RNA, 20 nt, Artificial Sequence
  spacer sequence GTCN PAM
acauccaauccaccuccacu

SEQ ID NO: 17577 - RNA, 20 nt, Artificial Sequence
  spacer sequence GTCN PAM
ucauacaaaucauaaaaaua

SEQ ID NO: 17578 - RNA, 20 nt, Artificial Sequence
  spacer sequence GTCN PAM
aaaauccaaggggagggaau

SEQ ID NO: 17579 - RNA, 20 nt, Artificial Sequence
  spacer sequence GTCN PAM
agaaagaaaacuuauacccc

SEQ ID NO: 17580 - RNA, 20 nt, Artificial Sequence
  spacer sequence GTCN PAM
uuagaaagaugcaaaucaaa

SEQ ID NO: 17581 - RNA, 20 nt, Artificial Sequence
  spacer sequence GTCN PAM
gaauuuccuucguuuuuaag

SEQ ID NO: 17582 - RNA, 20 nt, Artificial Sequence
  spacer sequence GTCN PAM
aguaaaagaacugaucaaua

SEQ ID NO: 17583 - RNA, 20 nt, Artificial Sequence
  spacer sequence GTCN PAM
uaacaaauauugaucaguuc

SEQ ID NO: 17584 - RNA, 20 nt, Artificial Sequence
  spacer sequence GTCN PAM
ugucuaaguaggacuucaag

SEQ ID NO: 17585 - RNA, 20 nt, Artificial Sequence
  spacer sequence GTCN PAM
aaguaggacuucaaggaggc

SEQ ID NO: 17586 - RNA, 20 nt, Artificial Sequence
  spacer sequence GTCN PAM
uacuuagacaugacucucuu

SEQ ID NO: 17587 - RNA, 20 nt, Artificial Sequence
  spacer sequence GTCN PAM
auguggcaauaauugaugag

SEQ ID NO: 17588 - RNA, 20 nt, Artificial Sequence
  spacer sequence GTCN PAM
cugagugagugaugaaugaa

SEQ ID NO: 17589 - RNA, 20 nt, Artificial Sequence
  spacer sequence GTCN PAM
ggguaagucacugagugagu

SEQ ID NO: 17590 - RNA, 20 nt, Artificial Sequence
  spacer sequence GTCN PAM
ugcaagcuccauucauggua

SEQ ID NO: 17591 - RNA, 20 nt, Artificial Sequence
  spacer sequence GTCN PAM
gugaauuugccuauucuagg

SEQ ID NO: 17592 - RNA, 20 nt, Artificial Sequence
  spacer sequence GTCN PAM
gguuuauuuuacugagcgug

SEQ ID NO: 17593 - RNA, 20 nt, Artificial Sequence
  spacer sequence GTCN PAM
uuuguauuaucuucuuugaa

SEQ ID NO: 17594 - RNA, 20 nt, Artificial Sequence
  spacer sequence GTCN PAM
auucaaguucuuuugcccau

SEQ ID NO: 17595 - RNA, 20 nt, Artificial Sequence
  spacer sequence GTCN PAM
aggaaauacaaaaauauaaa

SEQ ID NO: 17596 - RNA, 20 nt, Artificial Sequence
  spacer sequence GTCN PAM
cugcaugcuuggugagaacc

SEQ ID NO: 17597 - RNA, 20 nt, Artificial Sequence
  spacer sequence GTCN PAM
cacugugcuuagcauuaugc

SEQ ID NO: 17598 - RNA, 20 nt, Artificial Sequence
  spacer sequence GTCN PAM
ucuuuucaguuuuuuuuuuu

SEQ ID NO: 17599 - RNA, 20 nt, Artificial Sequence
  spacer sequence GTCN PAM
uuaauaaaacaaauugaaug

SEQ ID NO: 17600 - RNA, 20 nt, Artificial Sequence
  spacer sequence GTCN PAM
aauugcagagagagcccaau

SEQ ID NO: 17601 - RNA, 20 nt, Artificial Sequence
  spacer sequence GTCN PAM
uggagaaaugcuugcaaagg

SEQ ID NO: 17602 - RNA, 20 nt, Artificial Sequence
  spacer sequence GTCN PAM
auuccacccagcaugguucc

SEQ ID NO: 17603 - RNA, 20 nt, Artificial Sequence
  spacer sequence GTCN PAM
caaccauccugaagauucag

SEQ ID NO: 17604 - RNA, 20 nt, Artificial Sequence
  spacer sequence GTCN PAM
gaaucuucaggaugguugug

SEQ ID NO: 17605 - RNA, 20 nt, Artificial Sequence
  spacer sequence GTCN PAM
uuggucaaagguaaccauua

SEQ ID NO: 17606 - RNA, 20 nt, Artificial Sequence
  spacer sequence GTCN PAM
aagguaaccauuauccuggg

SEQ ID NO: 17607 - RNA, 20 nt, Artificial Sequence
  spacer sequence GTCN PAM
caggauaaugguuaccuuug

SEQ ID NO: 17608 - RNA, 20 nt, Artificial Sequence
  spacer sequence GTCN PAM
ccacugaaaacagguuccuc

SEQ ID NO: 17609 - RNA, 20 nt, Artificial Sequence
  spacer sequence GTCN PAM
gauggagagaugaaauucuu

SEQ ID NO: 17610 - RNA, 20 nt, Artificial Sequence
  spacer sequence GTCN PAM
caccuccugggucuggaagc

SEQ ID NO: 17611 - RNA, 20 nt, Artificial Sequence
  spacer sequence GTCN PAM
ggaagcugcacgggcugccu

SEQ ID NO: 17612 - RNA, 20 nt, Artificial Sequence
  spacer sequence GTCN PAM
cagcuacuugggaggcugag

SEQ ID NO: 17613 - RNA, 20 nt, Artificial Sequence
  spacer sequence GTCN PAM
caaaaguuucucucuuaucc

SEQ ID NO: 17614 - RNA, 20 nt, Artificial Sequence
  spacer sequence GTCN PAM
cccuucucaaagagaagcca

SEQ ID NO: 17615 - RNA, 20 nt, Artificial Sequence
  spacer sequence GTCN PAM
ggggaugugaagauaaauug

SEQ ID NO: 17616 - RNA, 20 nt, Artificial Sequence
  spacer sequence GTCN PAM
cauuaguuggaacauagaag

SEQ ID NO: 17617 - RNA, 20 nt, Artificial Sequence
  spacer sequence GTCN PAM
caaacuugguaguagcuuuu

SEQ ID NO: 17618 - RNA, 20 nt, Artificial Sequence
  spacer sequence GTCN PAM
ucaugcaggauacaaaagcu

SEQ ID NO: 17619 - RNA, 20 nt, Artificial Sequence
  spacer sequence GTCN PAM
uucgugcacauuguaguuga

SEQ ID NO: 17620 - RNA, 20 nt, Artificial Sequence
  spacer sequence GTCN PAM
ucaacuacaaugugcacgaa

SEQ ID NO: 17621 - RNA, 20 nt, Artificial Sequence
  spacer sequence GTCN PAM
ugggucaacuguacucucug

SEQ ID NO: 17622 - RNA, 20 nt, Artificial Sequence
  spacer sequence GTCN PAM
acuguacucucugugccucu

SEQ ID NO: 17623 - RNA, 20 nt, Artificial Sequence
  spacer sequence GTCN PAM
uaguuccugcuuuccuuaga

SEQ ID NO: 17624 - RNA, 20 nt, Artificial Sequence
  spacer sequence GTCN PAM
uuucagaacacaaccaacag

SEQ ID NO: 17625 - RNA, 20 nt, Artificial Sequence
  spacer sequence GTCN PAM
uggaauagaaaugagaccuc

SEQ ID NO: 17626 - RNA, 20 nt, Artificial Sequence
  spacer sequence GTCN PAM
cauuucuauuccaggacugg

SEQ ID NO: 17627 - RNA, 20 nt, Artificial Sequence
  spacer sequence GTCN PAM
ccuaguagcacuuguacuua

SEQ ID NO: 17628 - RNA, 20 nt, Artificial Sequence
  spacer sequence GTCN PAM
aagcugaugauauucauuca

SEQ ID NO: 17629 - RNA, 20 nt, Artificial Sequence
  spacer sequence GTCN PAM
uggagugauacgugcuguug

SEQ ID NO: 17630 - RNA, 20 nt, Artificial Sequence
  spacer sequence GTCN PAM
acagcacguaucacuccagg

SEQ ID NO: 17631 - RNA, 20 nt, Artificial Sequence
  spacer sequence GTCN PAM
guugaaggucaggcuugaag

SEQ ID NO: 17632 - RNA, 20 nt, Artificial Sequence
  spacer sequence GTCN PAM
ggcuugaagagcuuuuuugg

SEQ ID NO: 17633 - RNA, 20 nt, Artificial Sequence
  spacer sequence GTCN PAM
uuuaaaccaugacagaaaag

SEQ ID NO: 17634 - RNA, 20 nt, Artificial Sequence
  spacer sequence GTCN PAM
ugguuuaaaagacagaauga

SEQ ID NO: 17635 - RNA, 20 nt, Artificial Sequence
  spacer sequence GTCN PAM
ggcucucugcucuccuggcu

SEQ ID NO: 17636 - RNA, 20 nt, Artificial Sequence
  spacer sequence GTCN PAM
uuacugagcugccaccugga

SEQ ID NO: 17637 - RNA, 20 nt, Artificial Sequence
  spacer sequence GTCN PAM
agguggcagcucaguaagga

SEQ ID NO: 17638 - RNA, 20 nt, Artificial Sequence
  spacer sequence GTCN PAM
ucucccugcaggaccuuggc

SEQ ID NO: 17639 - RNA, 20 nt, Artificial Sequence
  spacer sequence GTCN PAM
ugcagggagaagacacagcc

SEQ ID NO: 17640 - RNA, 20 nt, Artificial Sequence
  spacer sequence GTCN PAM
ugugugugccaagguccugc

SEQ ID NO: 17641 - RNA, 20 nt, Artificial Sequence
  spacer sequence GTCN PAM
agucuugugugugccaaggu

SEQ ID NO: 17642 - RNA, 20 nt, Artificial Sequence
  spacer sequence GTCN PAM
caucucaggcccuaauccca

SEQ ID NO: 17643 - RNA, 20 nt, Artificial Sequence
  spacer sequence GTCN PAM
aagguuaauuacuuuccaga

SEQ ID NO: 17644 - RNA, 20 nt, Artificial Sequence
  spacer sequence GTCN PAM
ccagccagcccuucuccaca

SEQ ID NO: 17645 - RNA, 20 nt, Artificial Sequence
  spacer sequence GTCN PAM
auauuguucuaugacaauua

SEQ ID NO: 17646 - RNA, 20 nt, Artificial Sequence
  spacer sequence GTCN PAM
uagaacaauauagacucuuu

SEQ ID NO: 17647 - RNA, 20 nt, Artificial Sequence
  spacer sequence GTCN PAM
aucccuuuacuguuaauugu

SEQ ID NO: 17648 - RNA, 20 nt, Artificial Sequence
  spacer sequence GTCN PAM
cugugcaccagaagaguggu

SEQ ID NO: 17649 - RNA, 20 nt, Artificial Sequence
  spacer sequence GTCN PAM
ucuaauaaugcccccguuuu

SEQ ID NO: 17650 - RNA, 20 nt, Artificial Sequence
  spacer sequence GTCN PAM
ccuuucaaagugcuuggggu

SEQ ID NO: 17651 - RNA, 20 nt, Artificial Sequence
  spacer sequence GTCN PAM
auucucacauugcuauaagg

SEQ ID NO: 17652 - RNA, 20 nt, Artificial Sequence
  spacer sequence GTCN PAM
cugcucuugucuugccccca

SEQ ID NO: 17653 - RNA, 20 nt, Artificial Sequence
  spacer sequence GTCN PAM
guuuccugucucugcucuug

SEQ ID NO: 17654 - RNA, 20 nt, Artificial Sequence
  spacer sequence GTCN PAM
cuuguaauucucaaaacugg

SEQ ID NO: 17655 - RNA, 20 nt, Artificial Sequence
  spacer sequence GTCN PAM
ggaauauuuguauuauacaa

SEQ ID NO: 17656 - RNA, 20 nt, Artificial Sequence
  spacer sequence GTCN PAM
guucuggcuuuagcacugaa

SEQ ID NO: 17657 - RNA, 20 nt, Artificial Sequence
  spacer sequence GTCN PAM
uuauuuucauagguuuauua

SEQ ID NO: 17658 - RNA, 20 nt, Artificial Sequence
  spacer sequence GTCN PAM
ucugaaagauggguaacagg

SEQ ID NO: 17659 - RNA, 20 nt, Artificial Sequence
  spacer sequence GTCN PAM
cugugugacucccaggcuuc

SEQ ID NO: 17660 - RNA, 20 nt, Artificial Sequence
  spacer sequence GTCN PAM
cacagugacugauuucaguu

SEQ ID NO: 17661 - RNA, 20 nt, Artificial Sequence
  spacer sequence GTCN PAM
guggagagcauaaguucuac

SEQ ID NO: 17662 - RNA, 20 nt, Artificial Sequence
  spacer sequence GTCN PAM
aauucaccuaggauauucuu

SEQ ID NO: 17663 - RNA, 20 nt, Artificial Sequence
  spacer sequence GTCN PAM
cagcaaaaccucuucuuguu

SEQ ID NO: 17664 - RNA, 20 nt, Artificial Sequence
  spacer sequence GTCN PAM
guuccugccaauaauucagu

SEQ ID NO: 17665 - RNA, 20 nt, Artificial Sequence
  spacer sequence GTCN PAM
ccauuauuucacaggcagga

SEQ ID NO: 17666 - RNA, 20 nt, Artificial Sequence
  spacer sequence GTCN PAM
cuauuguaucuugaguuugg

SEQ ID NO: 17667 - RNA, 20 nt, Artificial Sequence
  spacer sequence GTCN PAM
aguuagagaucuccugugca

SEQ ID NO: 17668 - RNA, 20 nt, Artificial Sequence
  spacer sequence GTCN PAM
gcugauucugaccaugcugg

SEQ ID NO: 17669 - RNA, 20 nt, Artificial Sequence
  spacer sequence GTCN PAM
gaaucagcagacagaggcac

SEQ ID NO: 17670 - RNA, 20 nt, Artificial Sequence
  spacer sequence GTCN PAM
acacuuaagaugcuuaucaa

SEQ ID NO: 17671 - RNA, 20 nt, Artificial Sequence
  spacer sequence GTCN PAM
gucuacacuuaagaugcuua

SEQ ID NO: 17672 - RNA, 20 nt, Artificial Sequence
  spacer sequence GTCN PAM
ugcuaagcacaggcacguuu

SEQ ID NO: 17673 - RNA, 20 nt, Artificial Sequence
  spacer sequence GTCN PAM
cccucuuccuucagggguac

SEQ ID NO: 17674 - RNA, 20 nt, Artificial Sequence
  spacer sequence GTCN PAM
ccaguuuuaggggaaaaaau

SEQ ID NO: 17675 - RNA, 20 nt, Artificial Sequence
  spacer sequence GTCN PAM
ucuaaacaauuuuuuccccu

SEQ ID NO: 17676 - RNA, 20 nt, Artificial Sequence
  spacer sequence GTCN PAM
uggcuuguccucuaaacaau

SEQ ID NO: 17677 - RNA, 20 nt, Artificial Sequence
  spacer sequence GTCN PAM
cucuggcaagagaauauccu

SEQ ID NO: 17678 - RNA, 20 nt, Artificial Sequence
  spacer sequence GTCN PAM
uaauaguagaauuuugagca

SEQ ID NO: 17679 - RNA, 20 nt, Artificial Sequence
  spacer sequence GTCN PAM
accgaggaggaaggagcugg

SEQ ID NO: 17680 - RNA, 20 nt, Artificial Sequence
  spacer sequence GTCN PAM
accuaagaaucuaagaaaag

SEQ ID NO: 17681 - RNA, 20 nt, Artificial Sequence
  spacer sequence GTCN PAM
cauuguucagcuaaugcuuu

SEQ ID NO: 17682 - RNA, 20 nt, Artificial Sequence
  spacer sequence GTCN PAM
aggggaagaaaacagaaugg

SEQ ID NO: 17683 - RNA, 20 nt, Artificial Sequence
  spacer sequence GTCN PAM
ugggguuucuccuauugaua

SEQ ID NO: 17684 - RNA, 20 nt, Artificial Sequence
  spacer sequence GTCN PAM
uuauggagcuauucccuagc

SEQ ID NO: 17685 - RNA, 20 nt, Artificial Sequence
  spacer sequence GTCN PAM
uaauguuuucuagcaguuag

SEQ ID NO: 17686 - RNA, 20 nt, Artificial Sequence
  spacer sequence GTCN PAM
ggcuggauacuguagcuaaa

SEQ ID NO: 17687 - RNA, 20 nt, Artificial Sequence
  spacer sequence GTCN PAM
uagaaagggaagaugaaaug

SEQ ID NO: 17688 - RNA, 20 nt, Artificial Sequence
  spacer sequence GTCN PAM
ugcuucucccaucuccucuc

SEQ ID NO: 17689 - RNA, 20 nt, Artificial Sequence
  spacer sequence GTCN PAM
aaagugggcaucugucuaca

SEQ ID NO: 17690 - RNA, 20 nt, Artificial Sequence
  spacer sequence GTCN PAM
acauuugggagaagcucuag

SEQ ID NO: 17691 - RNA, 20 nt, Artificial Sequence
  spacer sequence GTCN PAM
gcaugguuagguuugagcag

SEQ ID NO: 17692 - RNA, 20 nt, Artificial Sequence
  spacer sequence GTCN PAM
ggaagcucccugggacaccc

SEQ ID NO: 17693 - RNA, 20 nt, Artificial Sequence
  spacer sequence GTCN PAM
cagggagcuuccugaccaca

SEQ ID NO: 17694 - RNA, 20 nt, Artificial Sequence
  spacer sequence GTCN PAM
gggaggcuuucugcaaagaa

SEQ ID NO: 17695 - RNA, 20 nt, Artificial Sequence
  spacer sequence GTCN PAM
ucuuugcagaaagccucccu

SEQ ID NO: 17696 - RNA, 20 nt, Artificial Sequence
  spacer sequence GTCN PAM
cugcaguaucacaccaacuc

SEQ ID NO: 17697 - RNA, 20 nt, Artificial Sequence
  spacer sequence GTCN PAM
cagcacacacacacagaagu

SEQ ID NO: 17698 - RNA, 20 nt, Artificial Sequence
  spacer sequence GTCN PAM
cuuucuucugauaaugguuu

SEQ ID NO: 17699 - RNA, 20 nt, Artificial Sequence
  spacer sequence GTCN PAM
guuuaacuuugaacuuuaga

SEQ ID NO: 17700 - RNA, 20 nt, Artificial Sequence
  spacer sequence GTCN PAM
cauggcacagauggcgaaau

SEQ ID NO: 17701 - RNA, 20 nt, Artificial Sequence
  spacer sequence GTCN PAM
uucccuguuucuaacucaga

SEQ ID NO: 17702 - RNA, 20 nt, Artificial Sequence
  spacer sequence GTCN PAM
gaggaaggugggugaguauc

SEQ ID NO: 17703 - RNA, 20 nt, Artificial Sequence
  spacer sequence GTCN PAM
cuguggauucuugggccuug

SEQ ID NO: 17704 - RNA, 20 nt, Artificial Sequence
  spacer sequence GTCN PAM
uugggaagggagaggaaaua

SEQ ID NO: 17705 - RNA, 20 nt, Artificial Sequence
  spacer sequence GTCN PAM
ucuaaugaaaaagcccugua

SEQ ID NO: 17706 - RNA, 20 nt, Artificial Sequence
  spacer sequence GTCN PAM
ugggaguacccaacacaugc

SEQ ID NO: 17707 - RNA, 20 nt, Artificial Sequence
  spacer sequence GTCN PAM
cgugagaucugaugguuuua

SEQ ID NO: 17708 - RNA, 20 nt, Artificial Sequence
  spacer sequence GTCN PAM
aauuaaaccucuuucuuuug

SEQ ID NO: 17709 - RNA, 20 nt, Artificial Sequence
  spacer sequence GTCN PAM
cgggcaauugugucuuuguc

SEQ ID NO: 17710 - RNA, 20 nt, Artificial Sequence
  spacer sequence GTCN PAM
uugucagcagcgugaaaacg

SEQ ID NO: 17711 - RNA, 20 nt, Artificial Sequence
  spacer sequence GTCN PAM
gcagcgugaaaacggacuaa

SEQ ID NO: 17712 - RNA, 20 nt, Artificial Sequence
  spacer sequence GTCN PAM
aaucccagacaacccaacac

SEQ ID NO: 17713 - RNA, 20 nt, Artificial Sequence
  spacer sequence GTCN PAM
gggauuagaccaagagggag

SEQ ID NO: 17714 - RNA, 20 nt, Artificial Sequence
  spacer sequence GTCN PAM
uuuuugcaaaggugucaacc

SEQ ID NO: 17715 - RNA, 20 nt, Artificial Sequence
  spacer sequence GTCN PAM
accuccuuuguuuuguuguu

SEQ ID NO: 17716 - RNA, 20 nt, Artificial Sequence
  spacer sequence GTCN PAM
uuaacagagagacagagaga

SEQ ID NO: 17717 - RNA, 20 nt, Artificial Sequence
  spacer sequence GTCN PAM
cucuguuaaugaccacccuu

SEQ ID NO: 17718 - RNA, 20 nt, Artificial Sequence
  spacer sequence GTCN PAM
gccucuucucucugucucuc

SEQ ID NO: 17719 - RNA, 20 nt, Artificial Sequence
  spacer sequence GTCN PAM
ucuagguucaccucaagagg

SEQ ID NO: 17720 - RNA, 20 nt, Artificial Sequence
  spacer sequence GTCN PAM
aguaauuuuuaauuccaauu

SEQ ID NO: 17721 - RNA, 20 nt, Artificial Sequence
  spacer sequence GTCN PAM
gaagaucuaaauguagguca

SEQ ID NO: 17722 - RNA, 20 nt, Artificial Sequence
  spacer sequence GTCN PAM
gaauucugaaucagcagcag

SEQ ID NO: 17723 - RNA, 20 nt, Artificial Sequence
  spacer sequence GTCN PAM
ucugcauaaaacuucauauu

SEQ ID NO: 17724 - RNA, 20 nt, Artificial Sequence
  spacer sequence GTCN PAM
gccacuuucccauaaagcuu

SEQ ID NO: 17725 - RNA, 20 nt, Artificial Sequence
  spacer sequence GTCN PAM
ucuccuggcgaguggaaaac

SEQ ID NO: 17726 - RNA, 20 nt, Artificial Sequence
  spacer sequence GTCN PAM
ccuggcgaguggaaaacuua

SEQ ID NO: 17727 - RNA, 20 nt, Artificial Sequence
  spacer sequence GTCN PAM
aaaaccgcugauccaucucu

SEQ ID NO: 17728 - RNA, 20 nt, Artificial Sequence
  spacer sequence GTCN PAM
acagagauuuaauuaacucc

SEQ ID NO: 17729 - RNA, 20 nt, Artificial Sequence
  spacer sequence GTCN PAM
uggcugggaguuaauuaaau

SEQ ID NO: 17730 - RNA, 20 nt, Artificial Sequence
  spacer sequence GTCN PAM
caacuuucugggaucauuuc

SEQ ID NO: 17731 - RNA, 20 nt, Artificial Sequence
  spacer sequence GTCN PAM
gucccugccgguaaggccag

SEQ ID NO: 17732 - RNA, 20 nt, Artificial Sequence
  spacer sequence GTCN PAM
cugccgguaaggccagaaga

SEQ ID NO: 17733 - RNA, 20 nt, Artificial Sequence
  spacer sequence GTCN PAM
ugcaucuucuggccuuaccg

SEQ ID NO: 17734 - RNA, 20 nt, Artificial Sequence
  spacer sequence GTCN PAM
uuuuucauuuuuaaaaacug

SEQ ID NO: 17735 - RNA, 20 nt, Artificial Sequence
  spacer sequence GTCN PAM
cuuggcuuucuccuacaaaa

SEQ ID NO: 17736 - RNA, 20 nt, Artificial Sequence
  spacer sequence GTCN PAM
gcuuacucaauuaugaucac

SEQ ID NO: 17737 - RNA, 20 nt, Artificial Sequence
  spacer sequence GTCN PAM
ggaacauagaagggaaacuc

SEQ ID NO: 17738 - RNA, 20 nt, Artificial Sequence
  spacer sequence GTCN PAM
ucugugagcuugauugaugu

SEQ ID NO: 17739 - RNA, 20 nt, Artificial Sequence
  spacer sequence GTCN PAM
gccuccccaaguccaaucag

SEQ ID NO: 17740 - RNA, 20 nt, Artificial Sequence
  spacer sequence GTCN PAM
aaucagcuacaaugacaugg

SEQ ID NO: 17741 - RNA, 20 nt, Artificial Sequence
  spacer sequence GTCN PAM
uuguagcugauuggacuugg

SEQ ID NO: 17742 - RNA, 20 nt, Artificial Sequence
  spacer sequence GTCN PAM
gaguuacuaccuaacaaaag

SEQ ID NO: 17743 - RNA, 20 nt, Artificial Sequence
  spacer sequence GTCN PAM
gggcacacagaaagcauuuu

SEQ ID NO: 17744 - RNA, 20 nt, Artificial Sequence
  spacer sequence GTCN PAM
acucagaagaauaaaacuug

SEQ ID NO: 17745 - RNA, 20 nt, Artificial Sequence
  spacer sequence GTCN PAM
acuggcaggaucuuauuuua

SEQ ID NO: 17746 - RNA, 20 nt, Artificial Sequence
  spacer sequence GTCN PAM
aguuuuauucuucugagucg

SEQ ID NO: 17747 - RNA, 20 nt, Artificial Sequence
  spacer sequence GTCN PAM
ucuaaugguuuugcauguca

SEQ ID NO: 17748 - RNA, 20 nt, Artificial Sequence
  spacer sequence GTCN PAM
ccaagggaugugcuucucuu

SEQ ID NO: 17749 - RNA, 20 nt, Artificial Sequence
  spacer sequence GTCN PAM
acauuuauauugggaaaaau

SEQ ID NO: 17750 - RNA, 20 nt, Artificial Sequence
  spacer sequence GTCN PAM
cuuuuaucuugaucacuagu

SEQ ID NO: 17751 - RNA, 20 nt, Artificial Sequence
  spacer sequence GTCN PAM
aacauggcugcucaagucca

SEQ ID NO: 17752 - RNA, 20 nt, Artificial Sequence
  spacer sequence GTCN PAM
uuaaagagaaaaguaugcac

SEQ ID NO: 17753 - RNA, 20 nt, Artificial Sequence
  spacer sequence GTCN PAM
cccuugcagugugguguggc

SEQ ID NO: 17754 - RNA, 20 nt, Artificial Sequence
  spacer sequence GTCN PAM
uccucaaaggaacuugaguu

SEQ ID NO: 17755 - RNA, 20 nt, Artificial Sequence
  spacer sequence GTCN PAM
cuagaaauggacaugguaau

SEQ ID NO: 17756 - RNA, 20 nt, Artificial Sequence
  spacer sequence GTCN PAM
auuucuagugacuucacugg

SEQ ID NO: 17757 - RNA, 20 nt, Artificial Sequence
  spacer sequence GTCN PAM
gaauccaaccacauggcuca

SEQ ID NO: 17758 - RNA, 20 nt, Artificial Sequence
  spacer sequence GTCN PAM
cagucuuggacucugcuucu

SEQ ID NO: 17759 - RNA, 20 nt, Artificial Sequence
  spacer sequence GTCN PAM
uggacucugcuucucucugg

SEQ ID NO: 17760 - RNA, 20 nt, Artificial Sequence
  spacer sequence GTCN PAM
aagacugagacugagccaug

SEQ ID NO: 17761 - RNA, 20 nt, Artificial Sequence
  spacer sequence GTCN PAM
cagagagaagcagaguccaa

SEQ ID NO: 17762 - RNA, 20 nt, Artificial Sequence
  spacer sequence GTCN PAM
cugacuggccuggagcuggg

SEQ ID NO: 17763 - RNA, 20 nt, Artificial Sequence
  spacer sequence GTCN PAM
gagacaccaugauuggcuca

SEQ ID NO: 17764 - RNA, 20 nt, Artificial Sequence
  spacer sequence GTCN PAM
ccaccaaaaaucauguugac

SEQ ID NO: 17765 - RNA, 20 nt, Artificial Sequence
  spacer sequence GTCN PAM
ggcagggaccuggcaggaau

SEQ ID NO: 17766 - RNA, 20 nt, Artificial Sequence
  spacer sequence GTCN PAM
cugccugacauugccauccu

SEQ ID NO: 17767 - RNA, 20 nt, Artificial Sequence
  spacer sequence GTCN PAM
gaugcuucugcauggguugu

SEQ ID NO: 17768 - RNA, 20 nt, Artificial Sequence
  spacer sequence GTCN PAM
ugucguguuucuggagaaag

SEQ ID NO: 17769 - RNA, 20 nt, Artificial Sequence
  spacer sequence GTCN PAM
uguuucuggagaaagccucu

SEQ ID NO: 17770 - RNA, 20 nt, Artificial Sequence
  spacer sequence GTCN PAM
ucagaggcuuucuccagaaa

SEQ ID NO: 17771 - RNA, 20 nt, Artificial Sequence
  spacer sequence GTCN PAM
ggggcacagcucugcaggca

SEQ ID NO: 17772 - RNA, 20 nt, Artificial Sequence
  spacer sequence GTCN PAM
cccaucuccuacaccuaguc

SEQ ID NO: 17773 - RNA, 20 nt, Artificial Sequence
  spacer sequence GTCN PAM
uguuaaugagcauaaucacg

SEQ ID NO: 17774 - RNA, 20 nt, Artificial Sequence
  spacer sequence GTCN PAM
ucaggcauacuaagaauaac

SEQ ID NO: 17775 - RNA, 20 nt, Artificial Sequence
  spacer sequence GTCN PAM
auaagaacuaaaauuaaucu

SEQ ID NO: 17776 - RNA, 20 nt, Artificial Sequence
  spacer sequence GTCN PAM
ccauuggugaucagcgugua

SEQ ID NO: 17777 - RNA, 20 nt, Artificial Sequence
  spacer sequence GTCN PAM
caugcucugcugaaaccagc

SEQ ID NO: 17778 - RNA, 20 nt, Artificial Sequence
  spacer sequence GTCN PAM
acagaacuuggggaauuagu

SEQ ID NO: 17779 - RNA, 20 nt, Artificial Sequence
  spacer sequence GTCN PAM
cauucuuugcuuuacauuuu

SEQ ID NO: 17780 - RNA, 20 nt, Artificial Sequence
  spacer sequence GTCN PAM
augugaauuaaauaucauua

SEQ ID NO: 17781 - RNA, 20 nt, Artificial Sequence
  spacer sequence GTCN PAM
gauucugugcucaaauccca

SEQ ID NO: 17782 - RNA, 20 nt, Artificial Sequence
  spacer sequence GTCN PAM
cauggauuaaagugaguggu

SEQ ID NO: 17783 - RNA, 20 nt, Artificial Sequence
  spacer sequence GTCN PAM
ucacaggucacauggauuaa

SEQ ID NO: 17784 - RNA, 20 nt, Artificial Sequence
  spacer sequence GTCN PAM
cuuacacagcaucacacggc

SEQ ID NO: 17785 - RNA, 20 nt, Artificial Sequence
  spacer sequence GTCN PAM
gcccccuaguggucauguca

SEQ ID NO: 17786 - RNA, 20 nt, Artificial Sequence
  spacer sequence GTCN PAM
ugucacacagugugugcuua

SEQ ID NO: 17787 - RNA, 20 nt, Artificial Sequence
  spacer sequence GTCN PAM
cacagugugugcuuacgcag

SEQ ID NO: 17788 - RNA, 20 nt, Artificial Sequence
  spacer sequence GTCN PAM
ucugcguaagcacacacugu

SEQ ID NO: 17789 - RNA, 20 nt, Artificial Sequence
  spacer sequence GTCN PAM
aagguuaaucaaacacagau

SEQ ID NO: 17790 - RNA, 20 nt, Artificial Sequence
  spacer sequence GTCN PAM
caacagauuuuuaucuuaac

SEQ ID NO: 17791 - RNA, 20 nt, Artificial Sequence
  spacer sequence GTCN PAM
caauuguuccuguuuaauuu

SEQ ID NO: 17792 - RNA, 20 nt, Artificial Sequence
  spacer sequence GTCN PAM
cggcuacucaucagaaucac

SEQ ID NO: 17793 - RNA, 20 nt, Artificial Sequence
  spacer sequence GTCN PAM
aguucugauagaguuuugaa

SEQ ID NO: 17794 - RNA, 20 nt, Artificial Sequence
  spacer sequence GTCN PAM
uuugacaguggauuugaguu

SEQ ID NO: 17795 - RNA, 20 nt, Artificial Sequence
  spacer sequence GTCN PAM
aaagacaaaaauuugccagu

SEQ ID NO: 17796 - RNA, 20 nt, Artificial Sequence
  spacer sequence GTCN PAM
uacccaguuuauccugcaaa

SEQ ID NO: 17797 - RNA, 20 nt, Artificial Sequence
  spacer sequence GTCN PAM
aacacaacauauggccaagg

SEQ ID NO: 17798 - RNA, 20 nt, Artificial Sequence
  spacer sequence GTCN PAM
caugcgccucauaauugaca

SEQ ID NO: 17799 - RNA, 20 nt, Artificial Sequence
  spacer sequence GTCN PAM
auuaugaggcgcaugagaca

SEQ ID NO: 17800 - RNA, 20 nt, Artificial Sequence
  spacer sequence GTCN PAM
uuaaaagacaauguugaucu

SEQ ID NO: 17801 - RNA, 20 nt, Artificial Sequence
  spacer sequence GTCN PAM
uuuaaugacagugcuuuggg

SEQ ID NO: 17802 - RNA, 20 nt, Artificial Sequence
  spacer sequence GTCN PAM
cgccagcccucacacaucca

SEQ ID NO: 17803 - RNA, 20 nt, Artificial Sequence
  spacer sequence GTCN PAM
aacccgaauuuagaauugaa

SEQ ID NO: 17804 - RNA, 20 nt, Artificial Sequence
  spacer sequence GTCN PAM
gaaccgaacagccccugggc

SEQ ID NO: 17805 - RNA, 20 nt, Artificial Sequence
  spacer sequence GTCN PAM
cugaacagagauccucagca

SEQ ID NO: 17806 - RNA, 20 nt, Artificial Sequence
  spacer sequence GTCN PAM
ggugucccugaacagagauc

SEQ ID NO: 17807 - RNA, 20 nt, Artificial Sequence
  spacer sequence GTCN PAM
ucuaaacccucauaaugaaa

SEQ ID NO: 17808 - RNA, 20 nt, Artificial Sequence
  spacer sequence GTCN PAM
aucauaaaucaaccggacuu

SEQ ID NO: 17809 - RNA, 20 nt, Artificial Sequence
  spacer sequence GTCN PAM
gguugauuuaugauugacua

SEQ ID NO: 17810 - RNA, 20 nt, Artificial Sequence
  spacer sequence GTCN PAM
guaggauggaguuucccaau

SEQ ID NO: 17811 - RNA, 20 nt, Artificial Sequence
  spacer sequence GTCN PAM
uagguuuggaaacuaaggag

SEQ ID NO: 17812 - RNA, 20 nt, Artificial Sequence
  spacer sequence GTCN PAM
gaaaacuacaauaaugaaaa

SEQ ID NO: 17813 - RNA, 20 nt, Artificial Sequence
  spacer sequence GTCN PAM
caaaauacauguuuuaaaag

SEQ ID NO: 17814 - RNA, 20 nt, Artificial Sequence
  spacer sequence GTCN PAM
gguuuugaagccacaaggua

SEQ ID NO: 17815 - RNA, 20 nt, Artificial Sequence
  spacer sequence GTCN PAM
gcauuugggguccucaaucu

SEQ ID NO: 17816 - RNA, 20 nt, Artificial Sequence
  spacer sequence GTCN PAM
ucaaucugccuucacaccuc

SEQ ID NO: 17817 - RNA, 20 nt, Artificial Sequence
  spacer sequence GTCN PAM
cagugcugguuucagagaca

SEQ ID NO: 17818 - RNA, 20 nt, Artificial Sequence
  spacer sequence GTCN PAM
cugaaaccagcacugagaca

SEQ ID NO: 17819 - RNA, 20 nt, Artificial Sequence
  spacer sequence GTCN PAM
uggcagcccauccagcucug

SEQ ID NO: 17820 - RNA, 20 nt, Artificial Sequence
  spacer sequence GTCN PAM
aacuccgccagcagaugcag

SEQ ID NO: 17821 - RNA, 20 nt, Artificial Sequence
  spacer sequence GTCN PAM
gccauugggaagggcugcuu

SEQ ID NO: 17822 - RNA, 20 nt, Artificial Sequence
  spacer sequence GTCN PAM
ucacacgagagagagucagc

SEQ ID NO: 17823 - RNA, 20 nt, Artificial Sequence
  spacer sequence GTCN PAM
uaucuggagcccaucuucug

SEQ ID NO: 17824 - RNA, 20 nt, Artificial Sequence
  spacer sequence GTCN PAM
gaagaugggcuccagauagg

SEQ ID NO: 17825 - RNA, 20 nt, Artificial Sequence
  spacer sequence GTCN PAM
uucuuucauaggcucccuga

SEQ ID NO: 17826 - RNA, 20 nt, Artificial Sequence
  spacer sequence GTCN PAM
gggagccuaugaaagaaaga

SEQ ID NO: 17827 - RNA, 20 nt, Artificial Sequence
  spacer sequence GTCN PAM
uucccuuguacuuaaucucc

SEQ ID NO: 17828 - RNA, 20 nt, Artificial Sequence
  spacer sequence GTCN PAM
ucaaauauguccacaauuuc

SEQ ID NO: 17829 - RNA, 20 nt, Artificial Sequence
  spacer sequence GTCN PAM
acaauuucuuuaacacuucu

SEQ ID NO: 17830 - RNA, 20 nt, Artificial Sequence
  spacer sequence GTCN PAM
aacacaucauuucgcuguuu

SEQ ID NO: 17831 - RNA, 20 nt, Artificial Sequence
  spacer sequence GTCN PAM
auaaaguucauggagcccua

SEQ ID NO: 17832 - RNA, 20 nt, Artificial Sequence
  spacer sequence GTCN PAM
ucucauuguuauaggggcca

SEQ ID NO: 17833 - RNA, 20 nt, Artificial Sequence
  spacer sequence GTCN PAM
ccagaugggcccuuuuugga

SEQ ID NO: 17834 - RNA, 20 nt, Artificial Sequence
  spacer sequence GTCN PAM
uugggagaaaugccagaguc

SEQ ID NO: 17835 - RNA, 20 nt, Artificial Sequence
  spacer sequence GTCN PAM
aauguuucucuacuauugga

SEQ ID NO: 17836 - RNA, 20 nt, Artificial Sequence
  spacer sequence GTCN PAM
aauaguagagaaacauugga

SEQ ID NO: 17837 - RNA, 20 nt, Artificial Sequence
  spacer sequence GTCN PAM
cacccagcauuuuacaaaau

SEQ ID NO: 17838 - RNA, 20 nt, Artificial Sequence
  spacer sequence GTCN PAM
cagaucauucagcuuugauc

SEQ ID NO: 17839 - RNA, 20 nt, Artificial Sequence
  spacer sequence GTCN PAM
uaggaauguacaggggaaau

SEQ ID NO: 17840 - RNA, 20 nt, Artificial Sequence
  spacer sequence GTCN PAM
uuaaggaacuauuuccccug

SEQ ID NO: 17841 - RNA, 20 nt, Artificial Sequence
  spacer sequence GTCN PAM
uuggggagaaaaugggcuaa

SEQ ID NO: 17842 - RNA, 20 nt, Artificial Sequence
  spacer sequence GTCN PAM
aggcaucccaggcuuucaau

SEQ ID NO: 17843 - RNA, 20 nt, Artificial Sequence
  spacer sequence GTCN PAM
ccguaaagacucugaaauga

SEQ ID NO: 17844 - RNA, 20 nt, Artificial Sequence
  spacer sequence GTCN PAM
uuacggggacuuuuugaaaa

SEQ ID NO: 17845 - RNA, 20 nt, Artificial Sequence
  spacer sequence GTCN PAM
auguugaaagaauaaaguuu

SEQ ID NO: 17846 - RNA, 20 nt, Artificial Sequence
  spacer sequence GTCN PAM
aacaacucaaaagcagcaga

SEQ ID NO: 17847 - RNA, 20 nt, Artificial Sequence
  spacer sequence GTCN PAM
uugaaacacgauuguaaaac

SEQ ID NO: 17848 - RNA, 20 nt, Artificial Sequence
  spacer sequence GTCN PAM
ggccaacaagaaguaauuga

SEQ ID NO: 17849 - RNA, 20 nt, Artificial Sequence
  spacer sequence GTCN PAM
aauaauagguuugcuugucu

SEQ ID NO: 17850 - RNA, 20 nt, Artificial Sequence
  spacer sequence GTCN PAM
ugagaaaaagaccacaggua

SEQ ID NO: 17851 - RNA, 20 nt, Artificial Sequence
  spacer sequence GTCN PAM
uuuucucaugaccucuguau

SEQ ID NO: 17852 - RNA, 20 nt, Artificial Sequence
  spacer sequence GTCN PAM
aaucaguaaaacaucuuuuu

SEQ ID NO: 17853 - RNA, 20 nt, Artificial Sequence
  spacer sequence GTCN PAM
aaaagauguuuuacugauuu

SEQ ID NO: 17854 - RNA, 20 nt, Artificial Sequence
  spacer sequence GTCN PAM
uuuuaagugucagaaauaaa

SEQ ID NO: 17855 - RNA, 20 nt, Artificial Sequence
  spacer sequence GTCN PAM
gaaauaaaaggacgugcucu

SEQ ID NO: 17856 - RNA, 20 nt, Artificial Sequence
  spacer sequence GTCN PAM
uuuuauuucugacacuuaaa

SEQ ID NO: 17857 - RNA, 20 nt, Artificial Sequence
  spacer sequence GTCN PAM
cuggcaugcagagaggcgau

SEQ ID NO: 17858 - RNA, 20 nt, Artificial Sequence
  spacer sequence GTCN PAM
cguuucuuuuacagcugagu

SEQ ID NO: 17859 - RNA, 20 nt, Artificial Sequence
  spacer sequence GTCN PAM
ugguauuuuuuucccuagag

SEQ ID NO: 17860 - RNA, 20 nt, Artificial Sequence
  spacer sequence GTCN PAM
uaauauugaaugagacccag

SEQ ID NO: 17861 - RNA, 20 nt, Artificial Sequence
  spacer sequence GTCN PAM
cauucaauauuaugacucua

SEQ ID NO: 17862 - RNA, 20 nt, Artificial Sequence
  spacer sequence GTCN PAM
aucaucuuuuuauuuguauu

SEQ ID NO: 17863 - RNA, 20 nt, Artificial Sequence
  spacer sequence GTCN PAM
cggauuuaauauuacagccu

SEQ ID NO: 17864 - RNA, 20 nt, Artificial Sequence
  spacer sequence GTCN PAM
aacuauagcucaaaccuugg

SEQ ID NO: 17865 - RNA, 20 nt, Artificial Sequence
  spacer sequence GTCN PAM
cuagggacaauucaggguga

SEQ ID NO: 17866 - RNA, 20 nt, Artificial Sequence
  spacer sequence GTCN PAM
cuagggaccaugaagccauu

SEQ ID NO: 17867 - RNA, 20 nt, Artificial Sequence
  spacer sequence GTCN PAM
ugggugguuaaaccguagga

SEQ ID NO: 17868 - RNA, 20 nt, Artificial Sequence
  spacer sequence GTCN PAM
uuauguauccuacgguuuaa

SEQ ID NO: 17869 - RNA, 20 nt, Artificial Sequence
  spacer sequence GTCN PAM
uuccuuuuggggauaggauu

SEQ ID NO: 17870 - RNA, 20 nt, Artificial Sequence
  spacer sequence GTCN PAM
aacaagucuaggagcuuuuu

SEQ ID NO: 17871 - RNA, 20 nt, Artificial Sequence
  spacer sequence GTCN PAM
aggagcuuuuuauccauuca

SEQ ID NO: 17872 - RNA, 20 nt, Artificial Sequence
  spacer sequence GTCN PAM
agaaagcuguuucuuugcuu

SEQ ID NO: 17873 - RNA, 20 nt, Artificial Sequence
  spacer sequence GTCN PAM
ccccacaaaaaucugcugaa

SEQ ID NO: 17874 - RNA, 20 nt, Artificial Sequence
  spacer sequence GTCN PAM
auaucuaaaagucaaaaaua

SEQ ID NO: 17875 - RNA, 20 nt, Artificial Sequence
  spacer sequence GTCN PAM
aaaauaaaagcuccccagcc

SEQ ID NO: 17876 - RNA, 20 nt, Artificial Sequence
  spacer sequence GTCN PAM
acucaaggaacccaaaauac

SEQ ID NO: 17877 - RNA, 20 nt, Artificial Sequence
  spacer sequence GTCN PAM
cagaaaacuuccgaaaagga

SEQ ID NO: 17878 - RNA, 20 nt, Artificial Sequence
  spacer sequence GTCN PAM
cuugauuugcuuagaggaga

SEQ ID NO: 17879 - RNA, 20 nt, Artificial Sequence
  spacer sequence GTCN PAM
caaacuucugagcucaagug

SEQ ID NO: 17880 - RNA, 20 nt, Artificial Sequence
  spacer sequence GTCN PAM
ccucccuuuagccuuaguuu

SEQ ID NO: 17881 - RNA, 20 nt, Artificial Sequence
  spacer sequence GTCN PAM
ugucugugggccuggguuuc

SEQ ID NO: 17882 - RNA, 20 nt, Artificial Sequence
  spacer sequence GTCN PAM
gugggccuggguuuccucgc

SEQ ID NO: 17883 - RNA, 20 nt, Artificial Sequence
  spacer sequence GTCN PAM
ucacauggccuucuucccug

SEQ ID NO: 17884 - RNA, 20 nt, Artificial Sequence
  spacer sequence GTCN PAM
cugccucagucuucacaugg

SEQ ID NO: 17885 - RNA, 20 nt, Artificial Sequence
  spacer sequence GTCN PAM
ccagaagcuggaagaggcau

SEQ ID NO: 17886 - RNA, 20 nt, Artificial Sequence
  spacer sequence GTCN PAM
ccugaugcagcccccacggg

SEQ ID NO: 17887 - RNA, 20 nt, Artificial Sequence
  spacer sequence GTCN PAM
aaaguggcguucaaccagcc

SEQ ID NO: 17888 - RNA, 20 nt, Artificial Sequence
  spacer sequence GTCN PAM
uuaggcugguugaacgccac

SEQ ID NO: 17889 - RNA, 20 nt, Artificial Sequence
  spacer sequence GTCN PAM
auuagaaacuauccauguac

SEQ ID NO: 17890 - RNA, 20 nt, Artificial Sequence
  spacer sequence GTCN PAM
auuaggaagcagagggagcg

SEQ ID NO: 17891 - RNA, 20 nt, Artificial Sequence
  spacer sequence GTCN PAM
ccgaagaagauuuagagagg

SEQ ID NO: 17892 - RNA, 20 nt, Artificial Sequence
  spacer sequence GTCN PAM
ggaaaaucagcguauagaac

SEQ ID NO: 17893 - RNA, 20 nt, Artificial Sequence
  spacer sequence GTCN PAM
uagauagcagucccugauca

SEQ ID NO: 17894 - RNA, 20 nt, Artificial Sequence
  spacer sequence GTCN PAM
cugaucaaccggaggccaau

SEQ ID NO: 17895 - RNA, 20 nt, Artificial Sequence
  spacer sequence GTCN PAM
ugggauucucagggaugcuu

SEQ ID NO: 17896 - RNA, 20 nt, Artificial Sequence
  spacer sequence GTCN PAM
agcuaggaaaaggaauugaa

SEQ ID NO: 17897 - RNA, 20 nt, Artificial Sequence
  spacer sequence GTCN PAM
aauuuccauuuaagcuuugc

SEQ ID NO: 17898 - RNA, 20 nt, Artificial Sequence
  spacer sequence GTCN PAM
cuccuggccagggcuaguaa

SEQ ID NO: 17899 - RNA, 20 nt, Artificial Sequence
  spacer sequence GTCN PAM
cucuacaccuuucaggaaaa

SEQ ID NO: 17900 - RNA, 20 nt, Artificial Sequence
  spacer sequence GTCN PAM
cagcuuugugccuugcaaag

SEQ ID NO: 17901 - RNA, 20 nt, Artificial Sequence
  spacer sequence GTCN PAM
uuagagaacucaacaugagg

SEQ ID NO: 17902 - RNA, 20 nt, Artificial Sequence
  spacer sequence GTCN PAM
cugaaggauggugcagggga

SEQ ID NO: 17903 - RNA, 20 nt, Artificial Sequence
  spacer sequence GTCN PAM
cuaaaucaaggccaauuuuu

SEQ ID NO: 17904 - RNA, 20 nt, Artificial Sequence
  spacer sequence TTCN PAM
ccaacgcagcaucugugcca

SEQ ID NO: 17905 - RNA, 20 nt, Artificial Sequence
  spacer sequence TTCN PAM
ggcucugguugggggugggg

SEQ ID NO: 17906 - RNA, 20 nt, Artificial Sequence
  spacer sequence TTCN PAM
caucauucgggcucugguug

SEQ ID NO: 17907 - RNA, 20 nt, Artificial Sequence
  spacer sequence TTCN PAM
gcucuguucacaucauucgg

SEQ ID NO: 17908 - RNA, 20 nt, Artificial Sequence
  spacer sequence TTCN PAM
uugcgugugcagcucccccc

SEQ ID NO: 17909 - RNA, 20 nt, Artificial Sequence
  spacer sequence TTCN PAM
cacaagcauaaacaauccag

SEQ ID NO: 17910 - RNA, 20 nt, Artificial Sequence
  spacer sequence TTCN PAM
ugcgcccuuucucacaagca

SEQ ID NO: 17911 - RNA, 20 nt, Artificial Sequence
  spacer sequence TTCN PAM
ccuuuaacacugaugcuggg

SEQ ID NO: 17912 - RNA, 20 nt, Artificial Sequence
  spacer sequence TTCN PAM
agccaauuccaucccuucaa

SEQ ID NO: 17913 - RNA, 20 nt, Artificial Sequence
  spacer sequence TTCN PAM
aucccuucaagcccaccccc

SEQ ID NO: 17914 - RNA, 20 nt, Artificial Sequence
  spacer sequence TTCN PAM
agcccacccccaccuuugca

SEQ ID NO: 17915 - RNA, 20 nt, Artificial Sequence
  spacer sequence TTCN PAM
agcaauucuccugccucagc

SEQ ID NO: 17916 - RNA, 20 nt, Artificial Sequence
  spacer sequence TTCN PAM
ccugccucagccucacaagu

SEQ ID NO: 17917 - RNA, 20 nt, Artificial Sequence
  spacer sequence TTCN PAM
ucauguuggccaggcugguc

SEQ ID NO: 17918 - RNA, 20 nt, Artificial Sequence
  spacer sequence TTCN PAM
agaccagccuggccaacaug

SEQ ID NO: 17919 - RNA, 20 nt, Artificial Sequence
  spacer sequence TTCN PAM
ggaauuacagucgugagcca

SEQ ID NO: 17920 - RNA, 20 nt, Artificial Sequence
  spacer sequence TTCN PAM
agaacuuugggaggccaaag

SEQ ID NO: 17921 - RNA, 20 nt, Artificial Sequence
  spacer sequence TTCN PAM
ggggguuccuuauacuugga

SEQ ID NO: 17922 - RNA, 20 nt, Artificial Sequence
  spacer sequence TTCN PAM
uuauacuuggacagauacau

SEQ ID NO: 17923 - RNA, 20 nt, Artificial Sequence
  spacer sequence TTCN PAM
aauucugacucugcaacuuc

SEQ ID NO: 17924 - RNA, 20 nt, Artificial Sequence
  spacer sequence TTCN PAM
gacucugcaacuuccuaguu

SEQ ID NO: 17925 - RNA, 20 nt, Artificial Sequence
  spacer sequence TTCN PAM
uaguuacaugaccuugggaa

SEQ ID NO: 17926 - RNA, 20 nt, Artificial Sequence
  spacer sequence TTCN PAM
caaggucauguaacuaggaa

SEQ ID NO: 17927 - RNA, 20 nt, Artificial Sequence
  spacer sequence TTCN PAM
uugaccuucagcuugucauc

SEQ ID NO: 17928 - RNA, 20 nt, Artificial Sequence
  spacer sequence TTCN PAM
gcuugucaucugaagaaaua

SEQ ID NO: 17929 - RNA, 20 nt, Artificial Sequence
  spacer sequence TTCN PAM
gaugacaagcugaaggucaa

SEQ ID NO: 17930 - RNA, 20 nt, Artificial Sequence
  spacer sequence TTCN PAM
ucagaugacaagcugaaggu

SEQ ID NO: 17931 - RNA, 20 nt, Artificial Sequence
  spacer sequence TTCN PAM
uuuaauccucuuaaguugcu

SEQ ID NO: 17932 - RNA, 20 nt, Artificial Sequence
  spacer sequence TTCN PAM
uuaauuucauuuaauccucu

SEQ ID NO: 17933 - RNA, 20 nt, Artificial Sequence
  spacer sequence TTCN PAM
auaaaaacugcaagguauac

SEQ ID NO: 17934 - RNA, 20 nt, Artificial Sequence
  spacer sequence TTCN PAM
gcuccuguguccccacuucu

SEQ ID NO: 17935 - RNA, 20 nt, Artificial Sequence
  spacer sequence TTCN PAM
ccccacaugauuugaacaug

SEQ ID NO: 17936 - RNA, 20 nt, Artificial Sequence
  spacer sequence TTCN PAM
aaucauguggggagaagugg

SEQ ID NO: 17937 - RNA, 20 nt, Artificial Sequence
  spacer sequence TTCN PAM
uuaacucuccggaccuccau

SEQ ID NO: 17938 - RNA, 20 nt, Artificial Sequence
  spacer sequence TTCN PAM
cauaugcaagaugagaaggu

SEQ ID NO: 17939 - RNA, 20 nt, Artificial Sequence
  spacer sequence TTCN PAM
caucuugcauaugagaaaau

SEQ ID NO: 17940 - RNA, 20 nt, Artificial Sequence
  spacer sequence TTCN PAM
acaccguugaguaccuuucc

SEQ ID NO: 17941 - RNA, 20 nt, Artificial Sequence
  spacer sequence TTCN PAM
ucuggcauggaacaagaugc

SEQ ID NO: 17942 - RNA, 20 nt, Artificial Sequence
  spacer sequence TTCN PAM
augccagaggaaagguacuc

SEQ ID NO: 17943 - RNA, 20 nt, Artificial Sequence
  spacer sequence TTCN PAM
auccuugggcaucuuguucc

SEQ ID NO: 17944 - RNA, 20 nt, Artificial Sequence
  spacer sequence TTCN PAM
ugugccacuggcagggggug

SEQ ID NO: 17945 - RNA, 20 nt, Artificial Sequence
  spacer sequence TTCN PAM
uuauuuccugugccacuggc

SEQ ID NO: 17946 - RNA, 20 nt, Artificial Sequence
  spacer sequence TTCN PAM
ugggucauuucuuuauuucc

SEQ ID NO: 17947 - RNA, 20 nt, Artificial Sequence
  spacer sequence TTCN PAM
cuugagacuggcaagugagu

SEQ ID NO: 17948 - RNA, 20 nt, Artificial Sequence
  spacer sequence TTCN PAM
gacucacuugccagucucaa

SEQ ID NO: 17949 - RNA, 20 nt, Artificial Sequence
  spacer sequence TTCN PAM
aauccaagcaaagaggaccu

SEQ ID NO: 17950 - RNA, 20 nt, Artificial Sequence
  spacer sequence TTCN PAM
ucuccuaucccugagguccu

SEQ ID NO: 17951 - RNA, 20 nt, Artificial Sequence
  spacer sequence TTCN PAM
agugugccuuuccacuccca

SEQ ID NO: 17952 - RNA, 20 nt, Artificial Sequence
  spacer sequence TTCN PAM
acucccauuacuaccuccua

SEQ ID NO: 17953 - RNA, 20 nt, Artificial Sequence
  spacer sequence TTCN PAM
gaaucucuucuuaggacaau

SEQ ID NO: 17954 - RNA, 20 nt, Artificial Sequence
  spacer sequence TTCN PAM
gaaagccugacuuaggaggu

SEQ ID NO: 17955 - RNA, 20 nt, Artificial Sequence
  spacer sequence TTCN PAM
uaggacaauugugagggacu

SEQ ID NO: 17956 - RNA, 20 nt, Artificial Sequence
  spacer sequence TTCN PAM
agcaacccuuccuccagccu

SEQ ID NO: 17957 - RNA, 20 nt, Artificial Sequence
  spacer sequence TTCN PAM
uccagccuauccuagauagc

SEQ ID NO: 17958 - RNA, 20 nt, Artificial Sequence
  spacer sequence TTCN PAM
cagugcgcauuaacacuaga

SEQ ID NO: 17959 - RNA, 20 nt, Artificial Sequence
  spacer sequence TTCN PAM
ucccuccacccagaguaccu

SEQ ID NO: 17960 - RNA, 20 nt, Artificial Sequence
  spacer sequence TTCN PAM
cuccacccagaguaccuucg

SEQ ID NO: 17961 - RNA, 20 nt, Artificial Sequence
  spacer sequence TTCN PAM
acauucugauccuugaagcc

SEQ ID NO: 17962 - RNA, 20 nt, Artificial Sequence
  spacer sequence TTCN PAM
gauccuugaagccccagauc

SEQ ID NO: 17963 - RNA, 20 nt, Artificial Sequence
  spacer sequence TTCN PAM
aggaucagaaugucgaaggu

SEQ ID NO: 17964 - RNA, 20 nt, Artificial Sequence
  spacer sequence TTCN PAM
uacugcuuccaagaagcuca

SEQ ID NO: 17965 - RNA, 20 nt, Artificial Sequence
  spacer sequence TTCN PAM
aagaagcucauccucaugag

SEQ ID NO: 17966 - RNA, 20 nt, Artificial Sequence
  spacer sequence TTCN PAM
uggaagcaguaggaauugau

SEQ ID NO: 17967 - RNA, 20 nt, Artificial Sequence
  spacer sequence TTCN PAM
uggaugaaauagggaguucc

SEQ ID NO: 17968 - RNA, 20 nt, Artificial Sequence
  spacer sequence TTCN PAM
uccaagaacucaugaggaug

SEQ ID NO: 17969 - RNA, 20 nt, Artificial Sequence
  spacer sequence TTCN PAM
cacucacuggagaauuucaa

SEQ ID NO: 17970 - RNA, 20 nt, Artificial Sequence
  spacer sequence TTCN PAM
ccagugagugggaacucccu

SEQ ID NO: 17971 - RNA, 20 nt, Artificial Sequence
  spacer sequence TTCN PAM
agaagaaugacucaagcaca

SEQ ID NO: 17972 - RNA, 20 nt, Artificial Sequence
  spacer sequence TTCN PAM
ugaaauucuccagugagugg

SEQ ID NO: 17973 - RNA, 20 nt, Artificial Sequence
  spacer sequence TTCN PAM
ucuugaaauucuccagugag

SEQ ID NO: 17974 - RNA, 20 nt, Artificial Sequence
  spacer sequence TTCN PAM
ugagcaugugcuugagucau

SEQ ID NO: 17975 - RNA, 20 nt, Artificial Sequence
  spacer sequence TTCN PAM
ccauguucuauugaauuaaa

SEQ ID NO: 17976 - RNA, 20 nt, Artificial Sequence
  spacer sequence TTCN PAM
auugaauuaaaaaaaaaaaa

SEQ ID NO: 17977 - RNA, 20 nt, Artificial Sequence
  spacer sequence TTCN PAM
auagaacauggagaaccaau

SEQ ID NO: 17978 - RNA, 20 nt, Artificial Sequence
  spacer sequence TTCN PAM
cacccuacuauuccacccua

SEQ ID NO: 17979 - RNA, 20 nt, Artificial Sequence
  spacer sequence TTCN PAM
acccuaccuggccuaguccc

SEQ ID NO: 17980 - RNA, 20 nt, Artificial Sequence
  spacer sequence TTCN PAM
caggauuagcaggggacuag

SEQ ID NO: 17981 - RNA, 20 nt, Artificial Sequence
  spacer sequence TTCN PAM
aauccuaacuaaacucugcu

SEQ ID NO: 17982 - RNA, 20 nt, Artificial Sequence
  spacer sequence TTCN PAM
cuaauucuauccuccuucca

SEQ ID NO: 17983 - RNA, 20 nt, Artificial Sequence
  spacer sequence TTCN PAM
auccuccuuccaagcccuuu

SEQ ID NO: 17984 - RNA, 20 nt, Artificial Sequence
  spacer sequence TTCN PAM
aagcccuuuaacuccugugu

SEQ ID NO: 17985 - RNA, 20 nt, Artificial Sequence
  spacer sequence TTCN PAM
uguuuuucccuaggaaucag

SEQ ID NO: 17986 - RNA, 20 nt, Artificial Sequence
  spacer sequence TTCN PAM
cuaggaaucagaaucuccuu

SEQ ID NO: 17987 - RNA, 20 nt, Artificial Sequence
  spacer sequence TTCN PAM
uagggaaaaacaagaaacac

SEQ ID NO: 17988 - RNA, 20 nt, Artificial Sequence
  spacer sequence TTCN PAM
gauuccuagggaaaaacaag

SEQ ID NO: 17989 - RNA, 20 nt, Artificial Sequence
  spacer sequence TTCN PAM
gucaaggguacacuuggaga

SEQ ID NO: 17990 - RNA, 20 nt, Artificial Sequence
  spacer sequence TTCN PAM
ccaaguguacccuugacuga

SEQ ID NO: 17991 - RNA, 20 nt, Artificial Sequence
  spacer sequence TTCN PAM
uaaaugcuauggcaugacag

SEQ ID NO: 17992 - RNA, 20 nt, Artificial Sequence
  spacer sequence TTCN PAM
agagucccucacucaauaau

SEQ ID NO: 17993 - RNA, 20 nt, Artificial Sequence
  spacer sequence TTCN PAM
augcucguguguuuuguaca

SEQ ID NO: 17994 - RNA, 20 nt, Artificial Sequence
  spacer sequence TTCN PAM
cauucaaugcucguguguuu

SEQ ID NO: 17995 - RNA, 20 nt, Artificial Sequence
  spacer sequence TTCN PAM
aguucuggccuuccagaaac

SEQ ID NO: 17996 - RNA, 20 nt, Artificial Sequence
  spacer sequence TTCN PAM
ggccuuccagaaaccuggau

SEQ ID NO: 17997 - RNA, 20 nt, Artificial Sequence
  spacer sequence TTCN PAM
agaaaccuggaucagcucua

SEQ ID NO: 17998 - RNA, 20 nt, Artificial Sequence
  spacer sequence TTCN PAM
ggaaggccagaacuggaaga

SEQ ID NO: 17999 - RNA, 20 nt, Artificial Sequence
  spacer sequence TTCN PAM
gaacucugcuuuucccaaau

SEQ ID NO: 18000 - RNA, 20 nt, Artificial Sequence
  spacer sequence TTCN PAM
gaagaugucauagagcugau

SEQ ID NO: 18001 - RNA, 20 nt, Artificial Sequence
  spacer sequence TTCN PAM
caaaucccuuuggccccuug

SEQ ID NO: 18002 - RNA, 20 nt, Artificial Sequence
  spacer sequence TTCN PAM
cauuuaguugucuggguuuu

SEQ ID NO: 18003 - RNA, 20 nt, Artificial Sequence
  spacer sequence TTCN PAM
uugcaaaacauuaaauacaa

SEQ ID NO: 18004 - RNA, 20 nt, Artificial Sequence
  spacer sequence TTCN PAM
cauaguucaaaauaauuuug

SEQ ID NO: 18005 - RNA, 20 nt, Artificial Sequence
  spacer sequence TTCN PAM
aaauaauuuuguaauuaaaa

SEQ ID NO: 18006 - RNA, 20 nt, Artificial Sequence
  spacer sequence TTCN PAM
agauuuccuuuacgcaaaua

SEQ ID NO: 18007 - RNA, 20 nt, Artificial Sequence
  spacer sequence TTCN PAM
uuuacgcaaauacaaauaua

SEQ ID NO: 18008 - RNA, 20 nt, Artificial Sequence
  spacer sequence TTCN PAM
uacauuuuauuacacaaaca

SEQ ID NO: 18009 - RNA, 20 nt, Artificial Sequence
  spacer sequence TTCN PAM
cugcagcuggugagcaaauu

SEQ ID NO: 18010 - RNA, 20 nt, Artificial Sequence
  spacer sequence TTCN PAM
aagcuccuuuaugcccuacu

SEQ ID NO: 18011 - RNA, 20 nt, Artificial Sequence
  spacer sequence TTCN PAM
ugguuggcugcccuuccaua

SEQ ID NO: 18012 - RNA, 20 nt, Artificial Sequence
  spacer sequence TTCN PAM
auaaccuucuccaguccugc

SEQ ID NO: 18013 - RNA, 20 nt, Artificial Sequence
  spacer sequence TTCN PAM
ccaguccugccuggagcuga

SEQ ID NO: 18014 - RNA, 20 nt, Artificial Sequence
  spacer sequence TTCN PAM
gcuccaggcaggacuggaga

SEQ ID NO: 18015 - RNA, 20 nt, Artificial Sequence
  spacer sequence TTCN PAM
ucagacacauuuuuagagaa

SEQ ID NO: 18016 - RNA, 20 nt, Artificial Sequence
  spacer sequence TTCN PAM
cuaaaaaugugucugaggaa

SEQ ID NO: 18017 - RNA, 20 nt, Artificial Sequence
  spacer sequence TTCN PAM
aucugugguaugccaggccu

SEQ ID NO: 18018 - RNA, 20 nt, Artificial Sequence
  spacer sequence TTCN PAM
acuuggugggagagaaaaua

SEQ ID NO: 18019 - RNA, 20 nt, Artificial Sequence
  spacer sequence TTCN PAM
cucccaccaaguugaaaggc

SEQ ID NO: 18020 - RNA, 20 nt, Artificial Sequence
  spacer sequence TTCN PAM
uagcccaugauauuuucucu

SEQ ID NO: 18021 - RNA, 20 nt, Artificial Sequence
  spacer sequence TTCN PAM
ugcagcuguguccccaacuu

SEQ ID NO: 18022 - RNA, 20 nt, Artificial Sequence
  spacer sequence TTCN PAM
ucucaucuuuagaaugagga

SEQ ID NO: 18023 - RNA, 20 nt, Artificial Sequence
  spacer sequence TTCN PAM
caucuuuagaaugaggagau

SEQ ID NO: 18024 - RNA, 20 nt, Artificial Sequence
  spacer sequence TTCN PAM
aaagaugagaagaacgaggc

SEQ ID NO: 18025 - RNA, 20 nt, Artificial Sequence
  spacer sequence TTCN PAM
agggaucugcccacaccagc

SEQ ID NO: 18026 - RNA, 20 nt, Artificial Sequence
  spacer sequence TTCN PAM
agccucagcugugcagacau

SEQ ID NO: 18027 - RNA, 20 nt, Artificial Sequence
  spacer sequence TTCN PAM
ugggugcaaaguggcccuca

SEQ ID NO: 18028 - RNA, 20 nt, Artificial Sequence
  spacer sequence TTCN PAM
uuccccuggggccacaggcc

SEQ ID NO: 18029 - RNA, 20 nt, Artificial Sequence
  spacer sequence TTCN PAM
ccuggggccacaggcccggg

SEQ ID NO: 18030 - RNA, 20 nt, Artificial Sequence
  spacer sequence TTCN PAM
ggcaggcagcugccucuggg

SEQ ID NO: 18031 - RNA, 20 nt, Artificial Sequence
  spacer sequence TTCN PAM
ugguaagucaagagaagccu

SEQ ID NO: 18032 - RNA, 20 nt, Artificial Sequence
  spacer sequence TTCN PAM
cuugacuuaccaggaaaggc

SEQ ID NO: 18033 - RNA, 20 nt, Artificial Sequence
  spacer sequence TTCN PAM
aggccagcacugcucucacu

SEQ ID NO: 18034 - RNA, 20 nt, Artificial Sequence
  spacer sequence TTCN PAM
aggaugugagugagagcagu

SEQ ID NO: 18035 - RNA, 20 nt, Artificial Sequence
  spacer sequence TTCN PAM
ggugccaccugcuucaagga

SEQ ID NO: 18036 - RNA, 20 nt, Artificial Sequence
  spacer sequence TTCN PAM
ccauucuggugccaccugcu

SEQ ID NO: 18037 - RNA, 20 nt, Artificial Sequence
  spacer sequence TTCN PAM
caagagccucugugggggaa

SEQ ID NO: 18038 - RNA, 20 nt, Artificial Sequence
  spacer sequence TTCN PAM
cccacagaggcucuugggaa

SEQ ID NO: 18039 - RNA, 20 nt, Artificial Sequence
  spacer sequence TTCN PAM
ucuccauuccucucugcccg

SEQ ID NO: 18040 - RNA, 20 nt, Artificial Sequence
  spacer sequence TTCN PAM
ucucugcccgacugcccucc

SEQ ID NO: 18041 - RNA, 20 nt, Artificial Sequence
  spacer sequence TTCN PAM
accugcuguuagaaacagga

SEQ ID NO: 18042 - RNA, 20 nt, Artificial Sequence
  spacer sequence TTCN PAM
aacagcagguggaagcaggu

SEQ ID NO: 18043 - RNA, 20 nt, Artificial Sequence
  spacer sequence TTCN PAM
aggucacaucucuccuguuu

SEQ ID NO: 18044 - RNA, 20 nt, Artificial Sequence
  spacer sequence TTCN PAM
gaaacugaguccagagagag

SEQ ID NO: 18045 - RNA, 20 nt, Artificial Sequence
  spacer sequence TTCN PAM
gaaucuguagacaaagaggg

SEQ ID NO: 18046 - RNA, 20 nt, Artificial Sequence
  spacer sequence TTCN PAM
ucucucuggacucaguuucu

SEQ ID NO: 18047 - RNA, 20 nt, Artificial Sequence
  spacer sequence TTCN PAM
ucacucaggcagcugcaugc

SEQ ID NO: 18048 - RNA, 20 nt, Artificial Sequence
  spacer sequence TTCN PAM
auggcaagccacucaacacg

SEQ ID NO: 18049 - RNA, 20 nt, Artificial Sequence
  spacer sequence TTCN PAM
cugagacguguugaguggcu

SEQ ID NO: 18050 - RNA, 20 nt, Artificial Sequence
  spacer sequence TTCN PAM
cccuucuggaggccgcgucc

SEQ ID NO: 18051 - RNA, 20 nt, Artificial Sequence
  spacer sequence TTCN PAM
ggaggccgcguccgcacguc

SEQ ID NO: 18052 - RNA, 20 nt, Artificial Sequence
  spacer sequence TTCN PAM
cugagucgagagucuuggcu

SEQ ID NO: 18053 - RNA, 20 nt, Artificial Sequence
  spacer sequence TTCN PAM
cacccuguucccugagucga

SEQ ID NO: 18054 - RNA, 20 nt, Artificial Sequence
  spacer sequence TTCN PAM
cagggggagcagccaggaac

SEQ ID NO: 18055 - RNA, 20 nt, Artificial Sequence
  spacer sequence TTCN PAM
uggcugcucccccugagaag

SEQ ID NO: 18056 - RNA, 20 nt, Artificial Sequence
  spacer sequence TTCN PAM
cugcaccaguggcgaaggcu

SEQ ID NO: 18057 - RNA, 20 nt, Artificial Sequence
  spacer sequence TTCN PAM
ccacuggugcagagaacuga

SEQ ID NO: 18058 - RNA, 20 nt, Artificial Sequence
  spacer sequence TTCN PAM
ugcaacuguuguaagcagga

SEQ ID NO: 18059 - RNA, 20 nt, Artificial Sequence
  spacer sequence TTCN PAM
cugccuguccugcuuacaac

SEQ ID NO: 18060 - RNA, 20 nt, Artificial Sequence
  spacer sequence TTCN PAM
ucucuucccugccuguccug

SEQ ID NO: 18061 - RNA, 20 nt, Artificial Sequence
  spacer sequence TTCN PAM
gcugaccaguguucaggcug

SEQ ID NO: 18062 - RNA, 20 nt, Artificial Sequence
  spacer sequence TTCN PAM
ggcuggaacugggagucggg

SEQ ID NO: 18063 - RNA, 20 nt, Artificial Sequence
  spacer sequence TTCN PAM
agccugaacacuggucagcu

SEQ ID NO: 18064 - RNA, 20 nt, Artificial Sequence
  spacer sequence TTCN PAM
ggcccgacucccaguuccag

SEQ ID NO: 18065 - RNA, 20 nt, Artificial Sequence
  spacer sequence TTCN PAM
gaccacaaaaaaaagcuauu

SEQ ID NO: 18066 - RNA, 20 nt, Artificial Sequence
  spacer sequence TTCN PAM
cuauuagggauagagaucag

SEQ ID NO: 18067 - RNA, 20 nt, Artificial Sequence
  spacer sequence TTCN PAM
acaagcucugaucucuaucc

SEQ ID NO: 18068 - RNA, 20 nt, Artificial Sequence
  spacer sequence TTCN PAM
auugagugauccccacuucu

SEQ ID NO: 18069 - RNA, 20 nt, Artificial Sequence
  spacer sequence TTCN PAM
cucugccugucuaaauccuc

SEQ ID NO: 18070 - RNA, 20 nt, Artificial Sequence
  spacer sequence TTCN PAM
uugaaaagcagcucagagcu

SEQ ID NO: 18071 - RNA, 20 nt, Artificial Sequence
  spacer sequence TTCN PAM
aagaagagaggauuuagaca

SEQ ID NO: 18072 - RNA, 20 nt, Artificial Sequence
  spacer sequence TTCN PAM
ugaagccuuccuugccuacg

SEQ ID NO: 18073 - RNA, 20 nt, Artificial Sequence
  spacer sequence TTCN PAM
agaaagaggcagcucugagc

SEQ ID NO: 18074 - RNA, 20 nt, Artificial Sequence
  spacer sequence TTCN PAM
uugccuacgaacacccccau

SEQ ID NO: 18075 - RNA, 20 nt, Artificial Sequence
  spacer sequence TTCN PAM
uaggcaaggaaggcuucaag

SEQ ID NO: 18076 - RNA, 20 nt, Artificial Sequence
  spacer sequence TTCN PAM
gaggauggagacugcauggg

SEQ ID NO: 18077 - RNA, 20 nt, Artificial Sequence
  spacer sequence TTCN PAM
uucaggaggcaucaaggaac

SEQ ID NO: 18078 - RNA, 20 nt, Artificial Sequence
  spacer sequence TTCN PAM
ggaggcaucaaggaacuggg

SEQ ID NO: 18079 - RNA, 20 nt, Artificial Sequence
  spacer sequence TTCN PAM
uugaugccuccugaaggaaa

SEQ ID NO: 18080 - RNA, 20 nt, Artificial Sequence
  spacer sequence TTCN PAM
gggcugccgcuuagauuacg

SEQ ID NO: 18081 - RNA, 20 nt, Artificial Sequence
  spacer sequence TTCN PAM
agaggagcaggauguucuac

SEQ ID NO: 18082 - RNA, 20 nt, Artificial Sequence
  spacer sequence TTCN PAM
accccuuuagugcccuccgc

SEQ ID NO: 18083 - RNA, 20 nt, Artificial Sequence
  spacer sequence TTCN PAM
gcugggccgugggcugcgga

SEQ ID NO: 18084 - RNA, 20 nt, Artificial Sequence
  spacer sequence TTCN PAM
aguuccuccccccaaaggac

SEQ ID NO: 18085 - RNA, 20 nt, Artificial Sequence
  spacer sequence TTCN PAM
uccccccaaaggacagcgaa

SEQ ID NO: 18086 - RNA, 20 nt, Artificial Sequence
  spacer sequence TTCN PAM
cuguccuuuggggggaggaa

SEQ ID NO: 18087 - RNA, 20 nt, Artificial Sequence
  spacer sequence TTCN PAM
agagugugugguuggcuucg

SEQ ID NO: 18088 - RNA, 20 nt, Artificial Sequence
  spacer sequence TTCN PAM
ccugucagacaucccucaug

SEQ ID NO: 18089 - RNA, 20 nt, Artificial Sequence
  spacer sequence TTCN PAM
acggggagaggaguguaagg

SEQ ID NO: 18090 - RNA, 20 nt, Artificial Sequence
  spacer sequence TTCN PAM
ggaacuggcaucaggcuuga

SEQ ID NO: 18091 - RNA, 20 nt, Artificial Sequence
  spacer sequence TTCN PAM
agaagcccagucggcaacuc

SEQ ID NO: 18092 - RNA, 20 nt, Artificial Sequence
  spacer sequence TTCN PAM
guggacuccacacugccuca

SEQ ID NO: 18093 - RNA, 20 nt, Artificial Sequence
  spacer sequence TTCN PAM
cucuuuggcugccccugaag

SEQ ID NO: 18094 - RNA, 20 nt, Artificial Sequence
  spacer sequence TTCN PAM
ggggcagccaaagagggaaa

SEQ ID NO: 18095 - RNA, 20 nt, Artificial Sequence
  spacer sequence TTCN PAM
acucaacuccuccucuaugg

SEQ ID NO: 18096 - RNA, 20 nt, Artificial Sequence
  spacer sequence TTCN PAM
gacauguguaauuuauccca

SEQ ID NO: 18097 - RNA, 20 nt, Artificial Sequence
  spacer sequence TTCN PAM
gacuggaguuaaucucacau

SEQ ID NO: 18098 - RNA, 20 nt, Artificial Sequence
  spacer sequence TTCN PAM
cagagcuggagggagucccu

SEQ ID NO: 18099 - RNA, 20 nt, Artificial Sequence
  spacer sequence TTCN PAM
gguuuuacuuacucugaccc

SEQ ID NO: 18100 - RNA, 20 nt, Artificial Sequence
  spacer sequence TTCN PAM
cuguuucugguuuuacuuac

SEQ ID NO: 18101 - RNA, 20 nt, Artificial Sequence
  spacer sequence TTCN PAM
gugagguccagcaacacagu

SEQ ID NO: 18102 - RNA, 20 nt, Artificial Sequence
  spacer sequence TTCN PAM
aaaugugggcaggggcuucc

SEQ ID NO: 18103 - RNA, 20 nt, Artificial Sequence
  spacer sequence TTCN PAM
agaccguccuggucaauaau

SEQ ID NO: 18104 - RNA, 20 nt, Artificial Sequence
  spacer sequence TTCN PAM
cucggauuauuauugaccag

SEQ ID NO: 18105 - RNA, 20 nt, Artificial Sequence
  spacer sequence TTCN PAM
uccucguugugauuuguggc

SEQ ID NO: 18106 - RNA, 20 nt, Artificial Sequence
  spacer sequence TTCN PAM
ucguugugauuuguggcuug

SEQ ID NO: 18107 - RNA, 20 nt, Artificial Sequence
  spacer sequence TTCN PAM
uuaggcaaaguugcaggccc

SEQ ID NO: 18108 - RNA, 20 nt, Artificial Sequence
  spacer sequence TTCN PAM
ccagucugcccccgccuggc

SEQ ID NO: 18109 - RNA, 20 nt, Artificial Sequence
  spacer sequence TTCN PAM
ugagccucagcuggggccag

SEQ ID NO: 18110 - RNA, 20 nt, Artificial Sequence
  spacer sequence TTCN PAM
acacauguaauauucccgag

SEQ ID NO: 18111 - RNA, 20 nt, Artificial Sequence
  spacer sequence TTCN PAM
cgaguaguacuuaagcuugu

SEQ ID NO: 18112 - RNA, 20 nt, Artificial Sequence
  spacer sequence TTCN PAM
gcaucauaaaaaauggauuu

SEQ ID NO: 18113 - RNA, 20 nt, Artificial Sequence
  spacer sequence TTCN PAM
cacggugauguuaacacauc

SEQ ID NO: 18114 - RNA, 20 nt, Artificial Sequence
  spacer sequence TTCN PAM
aaaguuaaguuucucacggu

SEQ ID NO: 18115 - RNA, 20 nt, Artificial Sequence
  spacer sequence TTCN PAM
gcaacauguuaccaaacauu

SEQ ID NO: 18116 - RNA, 20 nt, Artificial Sequence
  spacer sequence TTCN PAM
uacacaguuacuuccauaca

SEQ ID NO: 18117 - RNA, 20 nt, Artificial Sequence
  spacer sequence TTCN PAM
auacaagguucaaggugguu

SEQ ID NO: 18118 - RNA, 20 nt, Artificial Sequence
  spacer sequence TTCN PAM
aggugguugguuauauuuaa

SEQ ID NO: 18119 - RNA, 20 nt, Artificial Sequence
  spacer sequence TTCN PAM
auauuuaaauauaaccaacc

SEQ ID NO: 18120 - RNA, 20 nt, Artificial Sequence
  spacer sequence TTCN PAM
cccuaccugaucacacugaa

SEQ ID NO: 18121 - RNA, 20 nt, Artificial Sequence
  spacer sequence TTCN PAM
gugugaucagguagggggaa

SEQ ID NO: 18122 - RNA, 20 nt, Artificial Sequence
  spacer sequence TTCN PAM
ggguuucuuacugacgcccu

SEQ ID NO: 18123 - RNA, 20 nt, Artificial Sequence
  spacer sequence TTCN PAM
uacugacgcccuugcuuccc

SEQ ID NO: 18124 - RNA, 20 nt, Artificial Sequence
  spacer sequence TTCN PAM
cuauuguagcuuugaaauua

SEQ ID NO: 18125 - RNA, 20 nt, Artificial Sequence
  spacer sequence TTCN PAM
aagcuacaauagggaagcaa

SEQ ID NO: 18126 - RNA, 20 nt, Artificial Sequence
  spacer sequence TTCN PAM
caagcacaauuaaaagucua

SEQ ID NO: 18127 - RNA, 20 nt, Artificial Sequence
  spacer sequence TTCN PAM
uugcagaacagaaaguuaca

SEQ ID NO: 18128 - RNA, 20 nt, Artificial Sequence
  spacer sequence TTCN PAM
gcaaugaaaauggccuccug

SEQ ID NO: 18129 - RNA, 20 nt, Artificial Sequence
  spacer sequence TTCN PAM
guucugcaaugaaaauggcc

SEQ ID NO: 18130 - RNA, 20 nt, Artificial Sequence
  spacer sequence TTCN PAM
uucuuuguuggcugggggua

SEQ ID NO: 18131 - RNA, 20 nt, Artificial Sequence
  spacer sequence TTCN PAM
uuguuggcuggggguagggu

SEQ ID NO: 18132 - RNA, 20 nt, Artificial Sequence
  spacer sequence TTCN PAM
uccucccuccuuacccuacc

SEQ ID NO: 18133 - RNA, 20 nt, Artificial Sequence
  spacer sequence TTCN PAM
cuuccuccucccuccuuacc

SEQ ID NO: 18134 - RNA, 20 nt, Artificial Sequence
  spacer sequence TTCN PAM
auuucaaugucucacuucag

SEQ ID NO: 18135 - RNA, 20 nt, Artificial Sequence
  spacer sequence TTCN PAM
augucucacuucaggucaga

SEQ ID NO: 18136 - RNA, 20 nt, Artificial Sequence
  spacer sequence TTCN PAM
ggucagagauuagaacuucc

SEQ ID NO: 18137 - RNA, 20 nt, Artificial Sequence
  spacer sequence TTCN PAM
aaucucugaccugaagugag

SEQ ID NO: 18138 - RNA, 20 nt, Artificial Sequence
  spacer sequence TTCN PAM
aagcucugugugaacagggc

SEQ ID NO: 18139 - RNA, 20 nt, Artificial Sequence
  spacer sequence TTCN PAM
cacagagcuuggaaguucua

SEQ ID NO: 18140 - RNA, 20 nt, Artificial Sequence
  spacer sequence TTCN PAM
cugggcugugauuuccugcu

SEQ ID NO: 18141 - RNA, 20 nt, Artificial Sequence
  spacer sequence TTCN PAM
ugcuccagcaccagcgugcu

SEQ ID NO: 18142 - RNA, 20 nt, Artificial Sequence
  spacer sequence TTCN PAM
gcauugacagaggagaaaaa

SEQ ID NO: 18143 - RNA, 20 nt, Artificial Sequence
  spacer sequence TTCN PAM
ccucugucaaugcugaagca

SEQ ID NO: 18144 - RNA, 20 nt, Artificial Sequence
  spacer sequence TTCN PAM
cuuucuguuggcacugaucg

SEQ ID NO: 18145 - RNA, 20 nt, Artificial Sequence
  spacer sequence TTCN PAM
guuggcacugaucgggaaau

SEQ ID NO: 18146 - RNA, 20 nt, Artificial Sequence
  spacer sequence TTCN PAM
cgaucagugccaacagaaag

SEQ ID NO: 18147 - RNA, 20 nt, Artificial Sequence
  spacer sequence TTCN PAM
ccacccuccagugccauagu

SEQ ID NO: 18148 - RNA, 20 nt, Artificial Sequence
  spacer sequence TTCN PAM
acuccauggacuauggcacu

SEQ ID NO: 18149 - RNA, 20 nt, Artificial Sequence
  spacer sequence TTCN PAM
aaauucaaaccuguuccagg

SEQ ID NO: 18150 - RNA, 20 nt, Artificial Sequence
  spacer sequence TTCN PAM
aaccuguuccaggucaaaga

SEQ ID NO: 18151 - RNA, 20 nt, Artificial Sequence
  spacer sequence TTCN PAM
aggucaaagauucuuauguc

SEQ ID NO: 18152 - RNA, 20 nt, Artificial Sequence
  spacer sequence TTCN PAM
uaugucaaggcagaagaaua

SEQ ID NO: 18153 - RNA, 20 nt, Artificial Sequence
  spacer sequence TTCN PAM
gccuugacauaagaaucuuu

SEQ ID NO: 18154 - RNA, 20 nt, Artificial Sequence
  spacer sequence TTCN PAM
ucugccuugacauaagaauc

SEQ ID NO: 18155 - RNA, 20 nt, Artificial Sequence
  spacer sequence TTCN PAM
uuuauaaagcuaauugauua

SEQ ID NO: 18156 - RNA, 20 nt, Artificial Sequence
  spacer sequence TTCN PAM
acucuuauucuacucuucuc

SEQ ID NO: 18157 - RNA, 20 nt, Artificial Sequence
  spacer sequence TTCN PAM
acucuucucuugauggucgg

SEQ ID NO: 18158 - RNA, 20 nt, Artificial Sequence
  spacer sequence TTCN PAM
cuugauggucggcuggcuga

SEQ ID NO: 18159 - RNA, 20 nt, Artificial Sequence
  spacer sequence TTCN PAM
caaaacacacucuuugcuuc

SEQ ID NO: 18160 - RNA, 20 nt, Artificial Sequence
  spacer sequence TTCN PAM
gucaggauggcaaucccaca

SEQ ID NO: 18161 - RNA, 20 nt, Artificial Sequence
  spacer sequence TTCN PAM
ucaacuacaccaccucccgc

SEQ ID NO: 18162 - RNA, 20 nt, Artificial Sequence
  spacer sequence TTCN PAM
acuacaccaccucccgccua

SEQ ID NO: 18163 - RNA, 20 nt, Artificial Sequence
  spacer sequence TTCN PAM
ucuuggcccuuccccaggau

SEQ ID NO: 18164 - RNA, 20 nt, Artificial Sequence
  spacer sequence TTCN PAM
uggcccuuccccaggauugc

SEQ ID NO: 18165 - RNA, 20 nt, Artificial Sequence
  spacer sequence TTCN PAM
ccaggauugcucuccaaccc

SEQ ID NO: 18166 - RNA, 20 nt, Artificial Sequence
  spacer sequence TTCN PAM
cuccaucuuuccauccuucc

SEQ ID NO: 18167 - RNA, 20 nt, Artificial Sequence
  spacer sequence TTCN PAM
auccuuccaagccucauuca

SEQ ID NO: 18168 - RNA, 20 nt, Artificial Sequence
  spacer sequence TTCN PAM
aagccucauucagccccagu

SEQ ID NO: 18169 - RNA, 20 nt, Artificial Sequence
  spacer sequence TTCN PAM
gccccaguuccucucugaag

SEQ ID NO: 18170 - RNA, 20 nt, Artificial Sequence
  spacer sequence TTCN PAM
ucucugaagcucccccugau

SEQ ID NO: 18171 - RNA, 20 nt, Artificial Sequence
  spacer sequence TTCN PAM
gagaggaacuggggcugaau

SEQ ID NO: 18172 - RNA, 20 nt, Artificial Sequence
  spacer sequence TTCN PAM
accccucacagaccucccug

SEQ ID NO: 18173 - RNA, 20 nt, Artificial Sequence
  spacer sequence TTCN PAM
acaaggcaaagcugguggca

SEQ ID NO: 18174 - RNA, 20 nt, Artificial Sequence
  spacer sequence TTCN PAM
ucaccuggcgacuuguacca

SEQ ID NO: 18175 - RNA, 20 nt, Artificial Sequence
  spacer sequence TTCN PAM
aaagaaugccuaagagggug

SEQ ID NO: 18176 - RNA, 20 nt, Artificial Sequence
  spacer sequence TTCN PAM
uuggaaugcacagacacaug

SEQ ID NO: 18177 - RNA, 20 nt, Artificial Sequence
  spacer sequence TTCN PAM
uccccaaacaggcaaguauu

SEQ ID NO: 18178 - RNA, 20 nt, Artificial Sequence
  spacer sequence TTCN PAM
aggcaucuagccuauggaaa

SEQ ID NO: 18179 - RNA, 20 nt, Artificial Sequence
  spacer sequence TTCN PAM
auaggcuagaugccuggaag

SEQ ID NO: 18180 - RNA, 20 nt, Artificial Sequence
  spacer sequence TTCN PAM
auguauaaacucauuuaaac

SEQ ID NO: 18181 - RNA, 20 nt, Artificial Sequence
  spacer sequence TTCN PAM
aaaccuuuuccauguauaaa

SEQ ID NO: 18182 - RNA, 20 nt, Artificial Sequence
  spacer sequence TTCN PAM
ggauuaaugguaguuguugc

SEQ ID NO: 18183 - RNA, 20 nt, Artificial Sequence
  spacer sequence TTCN PAM
cuguaauauuguuuauaaua

SEQ ID NO: 18184 - RNA, 20 nt, Artificial Sequence
  spacer sequence TTCN PAM
ggccauuuggguuugcucca

SEQ ID NO: 18185 - RNA, 20 nt, Artificial Sequence
  spacer sequence TTCN PAM
uucuggccauuuggguuugc

SEQ ID NO: 18186 - RNA, 20 nt, Artificial Sequence
  spacer sequence TTCN PAM
aaaacgauacucuuccuucu

SEQ ID NO: 18187 - RNA, 20 nt, Artificial Sequence
  spacer sequence TTCN PAM
uuuuaaaauguaccuacaau

SEQ ID NO: 18188 - RNA, 20 nt, Artificial Sequence
  spacer sequence TTCN PAM
guauauauaaauuuaauucu

SEQ ID NO: 18189 - RNA, 20 nt, Artificial Sequence
  spacer sequence TTCN PAM
ccauuucaguauauauaaau

SEQ ID NO: 18190 - RNA, 20 nt, Artificial Sequence
  spacer sequence TTCN PAM
gugguuugcuuuuuugauaa

SEQ ID NO: 18191 - RNA, 20 nt, Artificial Sequence
  spacer sequence TTCN PAM
ucuuuuuaagaacuagguag

SEQ ID NO: 18192 - RNA, 20 nt, Artificial Sequence
  spacer sequence TTCN PAM
uaaaaagaugaaaucauacu

SEQ ID NO: 18193 - RNA, 20 nt, Artificial Sequence
  spacer sequence TTCN PAM
uggcagcagcauaaagucau

SEQ ID NO: 18194 - RNA, 20 nt, Artificial Sequence
  spacer sequence TTCN PAM
cugccuacuaccuacgugag

SEQ ID NO: 18195 - RNA, 20 nt, Artificial Sequence
  spacer sequence TTCN PAM
ggagcucacguagguaguag

SEQ ID NO: 18196 - RNA, 20 nt, Artificial Sequence
  spacer sequence TTCN PAM
uuaucucucaaauggggaaa

SEQ ID NO: 18197 - RNA, 20 nt, Artificial Sequence
  spacer sequence TTCN PAM
ccauuugagagauaaggaaa

SEQ ID NO: 18198 - RNA, 20 nt, Artificial Sequence
  spacer sequence TTCN PAM
uauauguaaagcacuuagaa

SEQ ID NO: 18199 - RNA, 20 nt, Artificial Sequence
  spacer sequence TTCN PAM
aagugcuuuacauauaugaa

SEQ ID NO: 18200 - RNA, 20 nt, Artificial Sequence
  spacer sequence TTCN PAM
ccaguaaagguuaguucuua

SEQ ID NO: 18201 - RNA, 20 nt, Artificial Sequence
  spacer sequence TTCN PAM
uaccacuguuauuaucugaa

SEQ ID NO: 18202 - RNA, 20 nt, Artificial Sequence
  spacer sequence TTCN PAM
gauaauaacagugguaagaa

SEQ ID NO: 18203 - RNA, 20 nt, Artificial Sequence
  spacer sequence TTCN PAM
uuuucagauaauaacagugg

SEQ ID NO: 18204 - RNA, 20 nt, Artificial Sequence
  spacer sequence TTCN PAM
gucuuuuuuccuuuucagau

SEQ ID NO: 18205 - RNA, 20 nt, Artificial Sequence
  spacer sequence TTCN PAM
ucuggagagacaaauuagga

SEQ ID NO: 18206 - RNA, 20 nt, Artificial Sequence
  spacer sequence TTCN PAM
ccuaauuugucucuccagag

SEQ ID NO: 18207 - RNA, 20 nt, Artificial Sequence
  spacer sequence TTCN PAM
uuuucuccuaauuugucucu

SEQ ID NO: 18208 - RNA, 20 nt, Artificial Sequence
  spacer sequence TTCN PAM
gguuugguuuuguuuuacca

SEQ ID NO: 18209 - RNA, 20 nt, Artificial Sequence
  spacer sequence TTCN PAM
uaaggacaaacugcuaccug

SEQ ID NO: 18210 - RNA, 20 nt, Artificial Sequence
  spacer sequence TTCN PAM
ccauuucuaaauccugauuc

SEQ ID NO: 18211 - RNA, 20 nt, Artificial Sequence
  spacer sequence TTCN PAM
aaauccugauucuaauucca

SEQ ID NO: 18212 - RNA, 20 nt, Artificial Sequence
  spacer sequence TTCN PAM
aauuccaauccacagccaga

SEQ ID NO: 18213 - RNA, 20 nt, Artificial Sequence
  spacer sequence TTCN PAM
aauccacagccagaaaauua

SEQ ID NO: 18214 - RNA, 20 nt, Artificial Sequence
  spacer sequence TTCN PAM
ggcuguggauuggaauuaga

SEQ ID NO: 18215 - RNA, 20 nt, Artificial Sequence
  spacer sequence TTCN PAM
gcauguugugggguugcaga

SEQ ID NO: 18216 - RNA, 20 nt, Artificial Sequence
  spacer sequence TTCN PAM
ccauuuuucagcauguugug

SEQ ID NO: 18217 - RNA, 20 nt, Artificial Sequence
  spacer sequence TTCN PAM
uuuuuuaaaacagauguucu

SEQ ID NO: 18218 - RNA, 20 nt, Artificial Sequence
  spacer sequence TTCN PAM
cguuuaaaauaguaauugau

SEQ ID NO: 18219 - RNA, 20 nt, Artificial Sequence
  spacer sequence TTCN PAM
ucccguuuaaaauaguaauu

SEQ ID NO: 18220 - RNA, 20 nt, Artificial Sequence
  spacer sequence TTCN PAM
cuuucuucccguuuaaaaua

SEQ ID NO: 18221 - RNA, 20 nt, Artificial Sequence
  spacer sequence TTCN PAM
uguucccuuucuucccguuu

SEQ ID NO: 18222 - RNA, 20 nt, Artificial Sequence
  spacer sequence TTCN PAM
ugcaucuugacagccaaggu

SEQ ID NO: 18223 - RNA, 20 nt, Artificial Sequence
  spacer sequence TTCN PAM
uguaguagaagaugguucaa

SEQ ID NO: 18224 - RNA, 20 nt, Artificial Sequence
  spacer sequence TTCN PAM
acuacaggaagaugauuauu

SEQ ID NO: 18225 - RNA, 20 nt, Artificial Sequence
  spacer sequence TTCN PAM
aaauaccauaacuuuccuac

SEQ ID NO: 18226 - RNA, 20 nt, Artificial Sequence
  spacer sequence TTCN PAM
uacuacucccuuucaccugg

SEQ ID NO: 18227 - RNA, 20 nt, Artificial Sequence
  spacer sequence TTCN PAM
ccuggcaaaauccucgucuu

SEQ ID NO: 18228 - RNA, 20 nt, Artificial Sequence
  spacer sequence TTCN PAM
aagacaccuucccagacaac

SEQ ID NO: 18229 - RNA, 20 nt, Artificial Sequence
  spacer sequence TTCN PAM
cagacaacuccagucugcag

SEQ ID NO: 18230 - RNA, 20 nt, Artificial Sequence
  spacer sequence TTCN PAM
cucccuacucccaacucaga

SEQ ID NO: 18231 - RNA, 20 nt, Artificial Sequence
  spacer sequence TTCN PAM
cugcccucccgcaucugggu

SEQ ID NO: 18232 - RNA, 20 nt, Artificial Sequence
  spacer sequence TTCN PAM
ggugacucaugucaugauuu

SEQ ID NO: 18233 - RNA, 20 nt, Artificial Sequence
  spacer sequence TTCN PAM
ccacacucuggggccuuggg

SEQ ID NO: 18234 - RNA, 20 nt, Artificial Sequence
  spacer sequence TTCN PAM
guguccuccaccacaucuca

SEQ ID NO: 18235 - RNA, 20 nt, Artificial Sequence
  spacer sequence TTCN PAM
ggggaugcagucagacuggc

SEQ ID NO: 18236 - RNA, 20 nt, Artificial Sequence
  spacer sequence TTCN PAM
uuuuugagauggagucuuac

SEQ ID NO: 18237 - RNA, 20 nt, Artificial Sequence
  spacer sequence TTCN PAM
ccugccucagccucccaagu

SEQ ID NO: 18238 - RNA, 20 nt, Artificial Sequence
  spacer sequence TTCN PAM
ccauguuggccaggaugauc

SEQ ID NO: 18239 - RNA, 20 nt, Artificial Sequence
  spacer sequence TTCN PAM
auugcucacuuuuguggcca

SEQ ID NO: 18240 - RNA, 20 nt, Artificial Sequence
  spacer sequence TTCN PAM
ccuuauauuugccaucucua

SEQ ID NO: 18241 - RNA, 20 nt, Artificial Sequence
  spacer sequence TTCN PAM
cauacccaccucucgcuauu

SEQ ID NO: 18242 - RNA, 20 nt, Artificial Sequence
  spacer sequence TTCN PAM
uucaggccaacuuauuauaa

SEQ ID NO: 18243 - RNA, 20 nt, Artificial Sequence
  spacer sequence TTCN PAM
ggccaacuuauuauaauacc

SEQ ID NO: 18244 - RNA, 20 nt, Artificial Sequence
  spacer sequence TTCN PAM
cccacuccccucugcacccc

SEQ ID NO: 18245 - RNA, 20 nt, Artificial Sequence
  spacer sequence TTCN PAM
gcuaggcacaggaugagggg

SEQ ID NO: 18246 - RNA, 20 nt, Artificial Sequence
  spacer sequence TTCN PAM
gaggguggcuugugugauuu

SEQ ID NO: 18247 - RNA, 20 nt, Artificial Sequence
  spacer sequence TTCN PAM
acuggaucgcaaauuccugg

SEQ ID NO: 18248 - RNA, 20 nt, Artificial Sequence
  spacer sequence TTCN PAM
uggaaggcaggauacguguc

SEQ ID NO: 18249 - RNA, 20 nt, Artificial Sequence
  spacer sequence TTCN PAM
aggaauuugcgauccaguug

SEQ ID NO: 18250 - RNA, 20 nt, Artificial Sequence
  spacer sequence TTCN PAM
uuuccuuucucagauugggc

SEQ ID NO: 18251 - RNA, 20 nt, Artificial Sequence
  spacer sequence TTCN PAM
uuucucagauugggcaugag

SEQ ID NO: 18252 - RNA, 20 nt, Artificial Sequence
  spacer sequence TTCN PAM
cagauugggcaugaguggag

SEQ ID NO: 18253 - RNA, 20 nt, Artificial Sequence
  spacer sequence TTCN PAM
cucaacuccaagccuuugcu

SEQ ID NO: 18254 - RNA, 20 nt, Artificial Sequence
  spacer sequence TTCN PAM
cacuccgccuucccucaacu

SEQ ID NO: 18255 - RNA, 20 nt, Artificial Sequence
  spacer sequence TTCN PAM
uuuaguaguuauaucuaucu

SEQ ID NO: 18256 - RNA, 20 nt, Artificial Sequence
  spacer sequence TTCN PAM
uauuugucuuuucauucauu

SEQ ID NO: 18257 - RNA, 20 nt, Artificial Sequence
  spacer sequence TTCN PAM
uucauuuuucuugcugggaa

SEQ ID NO: 18258 - RNA, 20 nt, Artificial Sequence
  spacer sequence TTCN PAM
uuuuucuugcugggaaagaa

SEQ ID NO: 18259 - RNA, 20 nt, Artificial Sequence
  spacer sequence TTCN PAM
ugcugggaaagaaaaaaaaa

SEQ ID NO: 18260 - RNA, 20 nt, Artificial Sequence
  spacer sequence TTCN PAM
cagcaagaaaaaugaaugaa

SEQ ID NO: 18261 - RNA, 20 nt, Artificial Sequence
  spacer sequence TTCN PAM
uucccagcaagaaaaaugaa

SEQ ID NO: 18262 - RNA, 20 nt, Artificial Sequence
  spacer sequence TTCN PAM
gcucugauaagaugaauuuu

SEQ ID NO: 18263 - RNA, 20 nt, Artificial Sequence
  spacer sequence TTCN PAM
ucuuaucagagcugaaaguu

SEQ ID NO: 18264 - RNA, 20 nt, Artificial Sequence
  spacer sequence TTCN PAM
caaaagccaauaauuccaca

SEQ ID NO: 18265 - RNA, 20 nt, Artificial Sequence
  spacer sequence TTCN PAM
acauggcucaucuaaaauua

SEQ ID NO: 18266 - RNA, 20 nt, Artificial Sequence
  spacer sequence TTCN PAM
cucuaauuuuagaugagcca

SEQ ID NO: 18267 - RNA, 20 nt, Artificial Sequence
  spacer sequence TTCN PAM
uagggaauuggagcagcagg

SEQ ID NO: 18268 - RNA, 20 nt, Artificial Sequence
  spacer sequence TTCN PAM
cuaagaaagucauuuaaaua

SEQ ID NO: 18269 - RNA, 20 nt, Artificial Sequence
  spacer sequence TTCN PAM
ggcaucugauacauugccug

SEQ ID NO: 18270 - RNA, 20 nt, Artificial Sequence
  spacer sequence TTCN PAM
cuuaguguaauauuuaaaug

SEQ ID NO: 18271 - RNA, 20 nt, Artificial Sequence
  spacer sequence TTCN PAM
cuucccuuaguguaauauuu

SEQ ID NO: 18272 - RNA, 20 nt, Artificial Sequence
  spacer sequence TTCN PAM
uuuuagcagcuugaccaaac

SEQ ID NO: 18273 - RNA, 20 nt, Artificial Sequence
  spacer sequence TTCN PAM
gucccugccuauucauuuua

SEQ ID NO: 18274 - RNA, 20 nt, Artificial Sequence
  spacer sequence TTCN PAM
ccagggcauuucugucccug

SEQ ID NO: 18275 - RNA, 20 nt, Artificial Sequence
  spacer sequence TTCN PAM
ucuugaaucuauuugaaaga

SEQ ID NO: 18276 - RNA, 20 nt, Artificial Sequence
  spacer sequence TTCN PAM
agaugaaauacccagcacuu

SEQ ID NO: 18277 - RNA, 20 nt, Artificial Sequence
  spacer sequence TTCN PAM
aauagauucaagaugaaaua

SEQ ID NO: 18278 - RNA, 20 nt, Artificial Sequence
  spacer sequence TTCN PAM
acuauuuucuggaaucggua

SEQ ID NO: 18279 - RNA, 20 nt, Artificial Sequence
  spacer sequence TTCN PAM
ggaaucgguauuuguacaaa

SEQ ID NO: 18280 - RNA, 20 nt, Artificial Sequence
  spacer sequence TTCN PAM
agaaaauaguugaaguacua

SEQ ID NO: 18281 - RNA, 20 nt, Artificial Sequence
  spacer sequence TTCN PAM
aguuggccagcucggccugg

SEQ ID NO: 18282 - RNA, 20 nt, Artificial Sequence
  spacer sequence TTCN PAM
uuguuuagaaacacaaaaca

SEQ ID NO: 18283 - RNA, 20 nt, Artificial Sequence
  spacer sequence TTCN PAM
aaacaaggaaauugaggagu

SEQ ID NO: 18284 - RNA, 20 nt, Artificial Sequence
  spacer sequence TTCN PAM
auaggacuuuguuuuguguu

SEQ ID NO: 18285 - RNA, 20 nt, Artificial Sequence
  spacer sequence TTCN PAM
gucuacaacuggaaacugcu

SEQ ID NO: 18286 - RNA, 20 nt, Artificial Sequence
  spacer sequence TTCN PAM
aguuguagacugaaauauug

SEQ ID NO: 18287 - RNA, 20 nt, Artificial Sequence
  spacer sequence TTCN PAM
ucugcaggaaaaacauguau

SEQ ID NO: 18288 - RNA, 20 nt, Artificial Sequence
  spacer sequence TTCN PAM
gcaggaaaaacauguauucc

SEQ ID NO: 18289 - RNA, 20 nt, Artificial Sequence
  spacer sequence TTCN PAM
ugcagaagaaaaaaguuagc

SEQ ID NO: 18290 - RNA, 20 nt, Artificial Sequence
  spacer sequence TTCN PAM
cacugacaccuacugcuguc

SEQ ID NO: 18291 - RNA, 20 nt, Artificial Sequence
  spacer sequence TTCN PAM
aacauuuuacaggaaauaca

SEQ ID NO: 18292 - RNA, 20 nt, Artificial Sequence
  spacer sequence TTCN PAM
uguaaaauguuugaaaucuc

SEQ ID NO: 18293 - RNA, 20 nt, Artificial Sequence
  spacer sequence TTCN PAM
aguaggaucccaggaaaagg

SEQ ID NO: 18294 - RNA, 20 nt, Artificial Sequence
  spacer sequence TTCN PAM
ugggauccuacuggaaaagc

SEQ ID NO: 18295 - RNA, 20 nt, Artificial Sequence
  spacer sequence TTCN PAM
guuuugccaccaccugcaca

SEQ ID NO: 18296 - RNA, 20 nt, Artificial Sequence
  spacer sequence TTCN PAM
ugcagggguccuccggguaa

SEQ ID NO: 18297 - RNA, 20 nt, Artificial Sequence
  spacer sequence TTCN PAM
uauggccagcagaggcagga

SEQ ID NO: 18298 - RNA, 20 nt, Artificial Sequence
  spacer sequence TTCN PAM
ugccucugcuggccauagga

SEQ ID NO: 18299 - RNA, 20 nt, Artificial Sequence
  spacer sequence TTCN PAM
agcacaguugggauguugug

SEQ ID NO: 18300 - RNA, 20 nt, Artificial Sequence
  spacer sequence TTCN PAM
ccauaguucucaaagguuau

SEQ ID NO: 18301 - RNA, 20 nt, Artificial Sequence
  spacer sequence TTCN PAM
caaagguuauagaacccccu

SEQ ID NO: 18302 - RNA, 20 nt, Artificial Sequence
  spacer sequence TTCN PAM
auaaccuuugagaacuaugg

SEQ ID NO: 18303 - RNA, 20 nt, Artificial Sequence
  spacer sequence TTCN PAM
ucccuuguaaacucuuucag

SEQ ID NO: 18304 - RNA, 20 nt, Artificial Sequence
  spacer sequence TTCN PAM
cuuguaaacucuuucagcaa

SEQ ID NO: 18305 - RNA, 20 nt, Artificial Sequence
  spacer sequence TTCN PAM
gcaauagucuucccugcucc

SEQ ID NO: 18306 - RNA, 20 nt, Artificial Sequence
  spacer sequence TTCN PAM
cugcucccccuauauuguca

SEQ ID NO: 18307 - RNA, 20 nt, Artificial Sequence
  spacer sequence TTCN PAM
gcuaugauguguugacaaua

SEQ ID NO: 18308 - RNA, 20 nt, Artificial Sequence
  spacer sequence TTCN PAM
acugaggcuucagcuaugau

SEQ ID NO: 18309 - RNA, 20 nt, Artificial Sequence
  spacer sequence TTCN PAM
cauaaaaugggacaugaaaa

SEQ ID NO: 18310 - RNA, 20 nt, Artificial Sequence
  spacer sequence TTCN PAM
ugucccauuuuaugggaaau

SEQ ID NO: 18311 - RNA, 20 nt, Artificial Sequence
  spacer sequence TTCN PAM
ugcacagacccagcaggggc

SEQ ID NO: 18312 - RNA, 20 nt, Artificial Sequence
  spacer sequence TTCN PAM
ugucgccccugcugggucug

SEQ ID NO: 18313 - RNA, 20 nt, Artificial Sequence
  spacer sequence TTCN PAM
uuaaugucuuuccugucgcc

SEQ ID NO: 18314 - RNA, 20 nt, Artificial Sequence
  spacer sequence TTCN PAM
aaagcaaugggcuacauuuu

SEQ ID NO: 18315 - RNA, 20 nt, Artificial Sequence
  spacer sequence TTCN PAM
ggcuaaaauguagcccauug

SEQ ID NO: 18316 - RNA, 20 nt, Artificial Sequence
  spacer sequence TTCN PAM
uuuuagggucagugagagua

SEQ ID NO: 18317 - RNA, 20 nt, Artificial Sequence
  spacer sequence TTCN PAM
gauggcuaaaaucccauaua

SEQ ID NO: 18318 - RNA, 20 nt, Artificial Sequence
  spacer sequence TTCN PAM
uugaaaacgcucuucaacau

SEQ ID NO: 18319 - RNA, 20 nt, Artificial Sequence
  spacer sequence TTCN PAM
aagaauuauaugggauuuua

SEQ ID NO: 18320 - RNA, 20 nt, Artificial Sequence
  spacer sequence TTCN PAM
acauucccauuuuaauuucc

SEQ ID NO: 18321 - RNA, 20 nt, Artificial Sequence
  spacer sequence TTCN PAM
cauuuuaauuuccaaaauca

SEQ ID NO: 18322 - RNA, 20 nt, Artificial Sequence
  spacer sequence TTCN PAM
aaaaucaauauggcuugcua

SEQ ID NO: 18323 - RNA, 20 nt, Artificial Sequence
  spacer sequence TTCN PAM
uauugauggggaggaaggga

SEQ ID NO: 18324 - RNA, 20 nt, Artificial Sequence
  spacer sequence TTCN PAM
uccccaucaauaugaauugu

SEQ ID NO: 18325 - RNA, 20 nt, Artificial Sequence
  spacer sequence TTCN PAM
ucccuuccuccccaucaaua

SEQ ID NO: 18326 - RNA, 20 nt, Artificial Sequence
  spacer sequence TTCN PAM
auugaauggaaaauuugguu

SEQ ID NO: 18327 - RNA, 20 nt, Artificial Sequence
  spacer sequence TTCN PAM
auagaaaaauguucaucccu

SEQ ID NO: 18328 - RNA, 20 nt, Artificial Sequence
  spacer sequence TTCN PAM
auucaauagaaaaauguuca

SEQ ID NO: 18329 - RNA, 20 nt, Artificial Sequence
  spacer sequence TTCN PAM
aagagagaaaaaggucuuaa

SEQ ID NO: 18330 - RNA, 20 nt, Artificial Sequence
  spacer sequence TTCN PAM
cucuuggaauaauguccuua

SEQ ID NO: 18331 - RNA, 20 nt, Artificial Sequence
  spacer sequence TTCN PAM
uuuguuccuagaaggcuggu

SEQ ID NO: 18332 - RNA, 20 nt, Artificial Sequence
  spacer sequence TTCN PAM
uagaaggcugguuucucuug

SEQ ID NO: 18333 - RNA, 20 nt, Artificial Sequence
  spacer sequence TTCN PAM
aggaacaaaagaauacucug

SEQ ID NO: 18334 - RNA, 20 nt, Artificial Sequence
  spacer sequence TTCN PAM
cuugacaucucugcccucau

SEQ ID NO: 18335 - RNA, 20 nt, Artificial Sequence
  spacer sequence TTCN PAM
gucaugcaguuucaagcccc

SEQ ID NO: 18336 - RNA, 20 nt, Artificial Sequence
  spacer sequence TTCN PAM
agccccaaaacagaauguug

SEQ ID NO: 18337 - RNA, 20 nt, Artificial Sequence
  spacer sequence TTCN PAM
guuuuggggcuugaaacugc

SEQ ID NO: 18338 - RNA, 20 nt, Artificial Sequence
  spacer sequence TTCN PAM
ucugaagaaauggcacccug

SEQ ID NO: 18339 - RNA, 20 nt, Artificial Sequence
  spacer sequence TTCN PAM
gaagaaauggcacccugcuc

SEQ ID NO: 18340 - RNA, 20 nt, Artificial Sequence
  spacer sequence TTCN PAM
gaagaaaaauaaaugacaac

SEQ ID NO: 18341 - RNA, 20 nt, Artificial Sequence
  spacer sequence TTCN PAM
ucagaagaaaaauaaaugac

SEQ ID NO: 18342 - RNA, 20 nt, Artificial Sequence
  spacer sequence TTCN PAM
acguauauucacuaacuagg

SEQ ID NO: 18343 - RNA, 20 nt, Artificial Sequence
  spacer sequence TTCN PAM
cuaacuagguaauaaucacu

SEQ ID NO: 18344 - RNA, 20 nt, Artificial Sequence
  spacer sequence TTCN PAM
ugugcuaauggcaagugauu

SEQ ID NO: 18345 - RNA, 20 nt, Artificial Sequence
  spacer sequence TTCN PAM
gcagcaccacuuacgcacaa

SEQ ID NO: 18346 - RNA, 20 nt, Artificial Sequence
  spacer sequence TTCN PAM
agcucuucagcagcaccacu

SEQ ID NO: 18347 - RNA, 20 nt, Artificial Sequence
  spacer sequence TTCN PAM
cagguagguaaauggucccu

SEQ ID NO: 18348 - RNA, 20 nt, Artificial Sequence
  spacer sequence TTCN PAM
cacuguuaauuugcugagca

SEQ ID NO: 18349 - RNA, 20 nt, Artificial Sequence
  spacer sequence TTCN PAM
ucaaggacugugcaaacacc

SEQ ID NO: 18350 - RNA, 20 nt, Artificial Sequence
  spacer sequence TTCN PAM
ggcuccauguuaaggaagcu

SEQ ID NO: 18351 - RNA, 20 nt, Artificial Sequence
  spacer sequence TTCN PAM
gucaucccuacuaaaggcau

SEQ ID NO: 18352 - RNA, 20 nt, Artificial Sequence
  spacer sequence TTCN PAM
cugucagacaaauaaucugu

SEQ ID NO: 18353 - RNA, 20 nt, Artificial Sequence
  spacer sequence TTCN PAM
cuuguugcuuuucuucucaa

SEQ ID NO: 18354 - RNA, 20 nt, Artificial Sequence
  spacer sequence TTCN PAM
uucccuuguugcuuuucuuc

SEQ ID NO: 18355 - RNA, 20 nt, Artificial Sequence
  spacer sequence TTCN PAM
gaaucuuggaaggagaagug

SEQ ID NO: 18356 - RNA, 20 nt, Artificial Sequence
  spacer sequence TTCN PAM
gaauuguacuuucauucccu

SEQ ID NO: 18357 - RNA, 20 nt, Artificial Sequence
  spacer sequence TTCN PAM
aagauucagaauuguacuuu

SEQ ID NO: 18358 - RNA, 20 nt, Artificial Sequence
  spacer sequence TTCN PAM
ccuuccaagauucagaauug

SEQ ID NO: 18359 - RNA, 20 nt, Artificial Sequence
  spacer sequence TTCN PAM
cuucuccuuccaagauucag

SEQ ID NO: 18360 - RNA, 20 nt, Artificial Sequence
  spacer sequence TTCN PAM
uuucacuucuccuuccaaga

SEQ ID NO: 18361 - RNA, 20 nt, Artificial Sequence
  spacer sequence TTCN PAM
ccuacuuugauaagcauucu

SEQ ID NO: 18362 - RNA, 20 nt, Artificial Sequence
  spacer sequence TTCN PAM
gucuuccccuacuuugauaa

SEQ ID NO: 18363 - RNA, 20 nt, Artificial Sequence
  spacer sequence TTCN PAM
uuucugucuuccccuacuuu

SEQ ID NO: 18364 - RNA, 20 nt, Artificial Sequence
  spacer sequence TTCN PAM
ucuuuucugucuuccccuac

SEQ ID NO: 18365 - RNA, 20 nt, Artificial Sequence
  spacer sequence TTCN PAM
cauagucauuuuccauaacu

SEQ ID NO: 18366 - RNA, 20 nt, Artificial Sequence
  spacer sequence TTCN PAM
auaacugcugagucacugcu

SEQ ID NO: 18367 - RNA, 20 nt, Artificial Sequence
  spacer sequence TTCN PAM
agcagugacucagcaguuau

SEQ ID NO: 18368 - RNA, 20 nt, Artificial Sequence
  spacer sequence TTCN PAM
ugacaagccaacauaauacu

SEQ ID NO: 18369 - RNA, 20 nt, Artificial Sequence
  spacer sequence TTCN PAM
aucaaacuguguucauuugg

SEQ ID NO: 18370 - RNA, 20 nt, Artificial Sequence
  spacer sequence TTCN PAM
uuuggcaaaaaguuuucucu

SEQ ID NO: 18371 - RNA, 20 nt, Artificial Sequence
  spacer sequence TTCN PAM
cuccuagggaccaucagaac

SEQ ID NO: 18372 - RNA, 20 nt, Artificial Sequence
  spacer sequence TTCN PAM
gauggucccuaggagagaaa

SEQ ID NO: 18373 - RNA, 20 nt, Artificial Sequence
  spacer sequence TTCN PAM
uaagccaaguucugaugguc

SEQ ID NO: 18374 - RNA, 20 nt, Artificial Sequence
  spacer sequence TTCN PAM
caagguguuuggagagccug

SEQ ID NO: 18375 - RNA, 20 nt, Artificial Sequence
  spacer sequence TTCN PAM
ugcacauaagugcaacuccu

SEQ ID NO: 18376 - RNA, 20 nt, Artificial Sequence
  spacer sequence TTCN PAM
gaugaagucaaugaaggugu

SEQ ID NO: 18377 - RNA, 20 nt, Artificial Sequence
  spacer sequence TTCN PAM
ucagaauuuagauguauuaa

SEQ ID NO: 18378 - RNA, 20 nt, Artificial Sequence
  spacer sequence TTCN PAM
uugacuucaucagaauuuag

SEQ ID NO: 18379 - RNA, 20 nt, Artificial Sequence
  spacer sequence TTCN PAM
aguucacauggagauguuaa

SEQ ID NO: 18380 - RNA, 20 nt, Artificial Sequence
  spacer sequence TTCN PAM
cauggagauguuaacuccac

SEQ ID NO: 18381 - RNA, 20 nt, Artificial Sequence
  spacer sequence TTCN PAM
cuuugauaaguggaguuaac

SEQ ID NO: 18382 - RNA, 20 nt, Artificial Sequence
  spacer sequence TTCN PAM
uaauugagugccuuuuugua

SEQ ID NO: 18383 - RNA, 20 nt, Artificial Sequence
  spacer sequence TTCN PAM
acuuuucauaauugagugcc

SEQ ID NO: 18384 - RNA, 20 nt, Artificial Sequence
  spacer sequence TTCN PAM
uuuugguuucuacuuuucau

SEQ ID NO: 18385 - RNA, 20 nt, Artificial Sequence
  spacer sequence TTCN PAM
ugaauuuauuaccuuagaaa

SEQ ID NO: 18386 - RNA, 20 nt, Artificial Sequence
  spacer sequence TTCN PAM
ggaaaccccagcugaggcca

SEQ ID NO: 18387 - RNA, 20 nt, Artificial Sequence
  spacer sequence TTCN PAM
aagguaauaaauucaggaaa

SEQ ID NO: 18388 - RNA, 20 nt, Artificial Sequence
  spacer sequence TTCN PAM
acccaauaugguaguuggug

SEQ ID NO: 18389 - RNA, 20 nt, Artificial Sequence
  spacer sequence TTCN PAM
uaucucuaagucuuucccuc

SEQ ID NO: 18390 - RNA, 20 nt, Artificial Sequence
  spacer sequence TTCN PAM
uucauaucucuaagucuuuc

SEQ ID NO: 18391 - RNA, 20 nt, Artificial Sequence
  spacer sequence TTCN PAM
ccuuucuuucauaucucuaa

SEQ ID NO: 18392 - RNA, 20 nt, Artificial Sequence
  spacer sequence TTCN PAM
cuacuccuccucccuggccu

SEQ ID NO: 18393 - RNA, 20 nt, Artificial Sequence
  spacer sequence TTCN PAM
accguucccuacuccuccuc

SEQ ID NO: 18394 - RNA, 20 nt, Artificial Sequence
  spacer sequence TTCN PAM
uucuaccguucccuacuccu

SEQ ID NO: 18395 - RNA, 20 nt, Artificial Sequence
  spacer sequence TTCN PAM
acuugaauugugguucaguc

SEQ ID NO: 18396 - RNA, 20 nt, Artificial Sequence
  spacer sequence TTCN PAM
aguggaagguccaucuucug

SEQ ID NO: 18397 - RNA, 20 nt, Artificial Sequence
  spacer sequence TTCN PAM
guccaccuucuugaaacaaa

SEQ ID NO: 18398 - RNA, 20 nt, Artificial Sequence
  spacer sequence TTCN PAM
ugaaacaaaacaguaaugau

SEQ ID NO: 18399 - RNA, 20 nt, Artificial Sequence
  spacer sequence TTCN PAM
agaagguggacugaaccaca

SEQ ID NO: 18400 - RNA, 20 nt, Artificial Sequence
  spacer sequence TTCN PAM
auggccacaucuucugucau

SEQ ID NO: 18401 - RNA, 20 nt, Artificial Sequence
  spacer sequence TTCN PAM
cuauuucaugccaaaguuag

SEQ ID NO: 18402 - RNA, 20 nt, Artificial Sequence
  spacer sequence TTCN PAM
ugccaaaguuaggcauugaa

SEQ ID NO: 18403 - RNA, 20 nt, Artificial Sequence
  spacer sequence TTCN PAM
ucuccagcguccugguaaag

SEQ ID NO: 18404 - RNA, 20 nt, Artificial Sequence
  spacer sequence TTCN PAM
ccagcguccugguaaaggag

SEQ ID NO: 18405 - RNA, 20 nt, Artificial Sequence
  spacer sequence TTCN PAM
ccagggucugucuaccuuuu

SEQ ID NO: 18406 - RNA, 20 nt, Artificial Sequence
  spacer sequence TTCN PAM
cagcucuuuacaccucuucu

SEQ ID NO: 18407 - RNA, 20 nt, Artificial Sequence
  spacer sequence TTCN PAM
auuagucaggacuagaggau

SEQ ID NO: 18408 - RNA, 20 nt, Artificial Sequence
  spacer sequence TTCN PAM
ggugguguccuuacacuuua

SEQ ID NO: 18409 - RNA, 20 nt, Artificial Sequence
  spacer sequence TTCN PAM
uguuucuggugguguccuua

SEQ ID NO: 18410 - RNA, 20 nt, Artificial Sequence
  spacer sequence TTCN PAM
ucccacucuuguucuuaguc

SEQ ID NO: 18411 - RNA, 20 nt, Artificial Sequence
  spacer sequence TTCN PAM
gcauccacgcacaugagugu

SEQ ID NO: 18412 - RNA, 20 nt, Artificial Sequence
  spacer sequence TTCN PAM
agggacugcaggccauuuuu

SEQ ID NO: 18413 - RNA, 20 nt, Artificial Sequence
  spacer sequence TTCN PAM
uuaaucuugauguuacuuua

SEQ ID NO: 18414 - RNA, 20 nt, Artificial Sequence
  spacer sequence TTCN PAM
ggcccaacgaucuccuagua

SEQ ID NO: 18415 - RNA, 20 nt, Artificial Sequence
  spacer sequence TTCN PAM
aaugccacugcauuuucuca

SEQ ID NO: 18416 - RNA, 20 nt, Artificial Sequence
  spacer sequence TTCN PAM
caauaccacuugaccucuua

SEQ ID NO: 18417 - RNA, 20 nt, Artificial Sequence
  spacer sequence TTCN PAM
caauuucuuuuuuuacaaug

SEQ ID NO: 18418 - RNA, 20 nt, Artificial Sequence
  spacer sequence TTCN PAM
uuuuuuacaaugggaaguga

SEQ ID NO: 18419 - RNA, 20 nt, Artificial Sequence
  spacer sequence TTCN PAM
cauuguaaaaaaagaaauug

SEQ ID NO: 18420 - RNA, 20 nt, Artificial Sequence
  spacer sequence TTCN PAM
cuuaugacuagccugaugga

SEQ ID NO: 18421 - RNA, 20 nt, Artificial Sequence
  spacer sequence TTCN PAM
uucuggacauugaaaaaaua

SEQ ID NO: 18422 - RNA, 20 nt, Artificial Sequence
  spacer sequence TTCN PAM
ggacauugaaaaaauaccca

SEQ ID NO: 18423 - RNA, 20 nt, Artificial Sequence
  spacer sequence TTCN PAM
auguccagaaagaagcugcc

SEQ ID NO: 18424 - RNA, 20 nt, Artificial Sequence
  spacer sequence TTCN PAM
ugccugauagcuaccacccc

SEQ ID NO: 18425 - RNA, 20 nt, Artificial Sequence
  spacer sequence TTCN PAM
gggcuugguuuuggcacuga

SEQ ID NO: 18426 - RNA, 20 nt, Artificial Sequence
  spacer sequence TTCN PAM
ggaucaauggaaaaggcaga

SEQ ID NO: 18427 - RNA, 20 nt, Artificial Sequence
  spacer sequence TTCN PAM
auugauccugaaggccaugc

SEQ ID NO: 18428 - RNA, 20 nt, Artificial Sequence
  spacer sequence TTCN PAM
gccuuuuccauugauccuga

SEQ ID NO: 18429 - RNA, 20 nt, Artificial Sequence
  spacer sequence TTCN PAM
ggaaauuccgggccgucugc

SEQ ID NO: 18430 - RNA, 20 nt, Artificial Sequence
  spacer sequence TTCN PAM
ugaaggcaagccaggcccuc

SEQ ID NO: 18431 - RNA, 20 nt, Artificial Sequence
  spacer sequence TTCN PAM
gggccgucugcagcagcugu

SEQ ID NO: 18432 - RNA, 20 nt, Artificial Sequence
  spacer sequence TTCN PAM
aguaguacaacaaauucacu

SEQ ID NO: 18433 - RNA, 20 nt, Artificial Sequence
  spacer sequence TTCN PAM
cuuacugaaugacaacagcu

SEQ ID NO: 18434 - RNA, 20 nt, Artificial Sequence
  spacer sequence TTCN PAM
guaagugaauuuguuguacu

SEQ ID NO: 18435 - RNA, 20 nt, Artificial Sequence
  spacer sequence TTCN PAM
auuaaagccccugcauccaa

SEQ ID NO: 18436 - RNA, 20 nt, Artificial Sequence
  spacer sequence TTCN PAM
uuaugcagagagggcugccg

SEQ ID NO: 18437 - RNA, 20 nt, Artificial Sequence
  spacer sequence TTCN PAM
auguucuuuaugcagagagg

SEQ ID NO: 18438 - RNA, 20 nt, Artificial Sequence
  spacer sequence TTCN PAM
cugagugcccucagcccuag

SEQ ID NO: 18439 - RNA, 20 nt, Artificial Sequence
  spacer sequence TTCN PAM
ucccucucccucucauguag

SEQ ID NO: 18440 - RNA, 20 nt, Artificial Sequence
  spacer sequence TTCN PAM
uucaucccucucccucucau

SEQ ID NO: 18441 - RNA, 20 nt, Artificial Sequence
  spacer sequence TTCN PAM
acggcugagccuccaaaaug

SEQ ID NO: 18442 - RNA, 20 nt, Artificial Sequence
  spacer sequence TTCN PAM
agccuguccuggucaguuug

SEQ ID NO: 18443 - RNA, 20 nt, Artificial Sequence
  spacer sequence TTCN PAM
ugccccaggugcccacguca

SEQ ID NO: 18444 - RNA, 20 nt, Artificial Sequence
  spacer sequence TTCN PAM
cccucccuucuugccccagg

SEQ ID NO: 18445 - RNA, 20 nt, Artificial Sequence
  spacer sequence TTCN PAM
ccaucuccugcuucccccuc

SEQ ID NO: 18446 - RNA, 20 nt, Artificial Sequence
  spacer sequence TTCN PAM
ccucuaaaccuccuucgcca

SEQ ID NO: 18447 - RNA, 20 nt, Artificial Sequence
  spacer sequence TTCN PAM
cuacuuccccucuaaaccuc

SEQ ID NO: 18448 - RNA, 20 nt, Artificial Sequence
  spacer sequence TTCN PAM
uuuuucguuuuuacaaaaua

SEQ ID NO: 18449 - RNA, 20 nt, Artificial Sequence
  spacer sequence TTCN PAM
uuuuuacaaaauauguccuu

SEQ ID NO: 18450 - RNA, 20 nt, Artificial Sequence
  spacer sequence TTCN PAM
gaguucugacaugagcuuau

SEQ ID NO: 18451 - RNA, 20 nt, Artificial Sequence
  spacer sequence TTCN PAM
gacaugagcuuauuaggggg

SEQ ID NO: 18452 - RNA, 20 nt, Artificial Sequence
  spacer sequence TTCN PAM
gcccccuaauaagcucaugu

SEQ ID NO: 18453 - RNA, 20 nt, Artificial Sequence
  spacer sequence TTCN PAM
acaggcagcccucccuuucc

SEQ ID NO: 18454 - RNA, 20 nt, Artificial Sequence
  spacer sequence TTCN PAM
aguucuacaggcagcccucc

SEQ ID NO: 18455 - RNA, 20 nt, Artificial Sequence
  spacer sequence TTCN PAM
cauaaaauauacauagcaga

SEQ ID NO: 18456 - RNA, 20 nt, Artificial Sequence
  spacer sequence TTCN PAM
ccuucaguaacaaagauaaa

SEQ ID NO: 18457 - RNA, 20 nt, Artificial Sequence
  spacer sequence TTCN PAM
guaacaaagauaaaaucagg

SEQ ID NO: 18458 - RNA, 20 nt, Artificial Sequence
  spacer sequence TTCN PAM
cuuuggugccccuccuccau

SEQ ID NO: 18459 - RNA, 20 nt, Artificial Sequence
  spacer sequence TTCN PAM
augaaggugggcagcccuca

SEQ ID NO: 18460 - RNA, 20 nt, Artificial Sequence
  spacer sequence TTCN PAM
uggaaaugagccagcuggag

SEQ ID NO: 18461 - RNA, 20 nt, Artificial Sequence
  spacer sequence TTCN PAM
ugauaguaacagguuaccau

SEQ ID NO: 18462 - RNA, 20 nt, Artificial Sequence
  spacer sequence TTCN PAM
ccaacaauucaagucgggug

SEQ ID NO: 18463 - RNA, 20 nt, Artificial Sequence
  spacer sequence TTCN PAM
agucgggugaaaagcuaggc

SEQ ID NO: 18464 - RNA, 20 nt, Artificial Sequence
  spacer sequence TTCN PAM
cccgacuugaauuguuggag

SEQ ID NO: 18465 - RNA, 20 nt, Artificial Sequence
  spacer sequence TTCN PAM
gaauggaauuucuggaauuu

SEQ ID NO: 18466 - RNA, 20 nt, Artificial Sequence
  spacer sequence TTCN PAM
ggaggaucgccaugagcaga

SEQ ID NO: 18467 - RNA, 20 nt, Artificial Sequence
  spacer sequence TTCN PAM
aggcaaacauucuggaggau

SEQ ID NO: 18468 - RNA, 20 nt, Artificial Sequence
  spacer sequence TTCN PAM
auucuaggcaaacauucugg

SEQ ID NO: 18469 - RNA, 20 nt, Artificial Sequence
  spacer sequence TTCN PAM
gaauuaacaauucagagcaa

SEQ ID NO: 18470 - RNA, 20 nt, Artificial Sequence
  spacer sequence TTCN PAM
gaaguucgauucuaggcaaa

SEQ ID NO: 18471 - RNA, 20 nt, Artificial Sequence
  spacer sequence TTCN PAM
gagcaaaugccaacuccacc

SEQ ID NO: 18472 - RNA, 20 nt, Artificial Sequence
  spacer sequence TTCN PAM
ugguggaguuggcauuugcu

SEQ ID NO: 18473 - RNA, 20 nt, Artificial Sequence
  spacer sequence TTCN PAM
cagauucucucaauaggaau

SEQ ID NO: 18474 - RNA, 20 nt, Artificial Sequence
  spacer sequence TTCN PAM
cucaauaggaauaaauuacu

SEQ ID NO: 18475 - RNA, 20 nt, Artificial Sequence
  spacer sequence TTCN PAM
cuaauagauaagaggcuucc

SEQ ID NO: 18476 - RNA, 20 nt, Artificial Sequence
  spacer sequence TTCN PAM
uggagccggggugugggcuu

SEQ ID NO: 18477 - RNA, 20 nt, Artificial Sequence
  spacer sequence TTCN PAM
auagagcuagugcucaauaa

SEQ ID NO: 18478 - RNA, 20 nt, Artificial Sequence
  spacer sequence TTCN PAM
gcuuagauuuauugagcacu

SEQ ID NO: 18479 - RNA, 20 nt, Artificial Sequence
  spacer sequence TTCN PAM
auucugcuuagauuuauuga

SEQ ID NO: 18480 - RNA, 20 nt, Artificial Sequence
  spacer sequence TTCN PAM
guucaauucugcuuagauuu

SEQ ID NO: 18481 - RNA, 20 nt, Artificial Sequence
  spacer sequence TTCN PAM
uaagggccauucaguucaau

SEQ ID NO: 18482 - RNA, 20 nt, Artificial Sequence
  spacer sequence TTCN PAM
auuuccuaagggccauucag

SEQ ID NO: 18483 - RNA, 20 nt, Artificial Sequence
  spacer sequence TTCN PAM
aagacuaaggcauugccaaa

SEQ ID NO: 18484 - RNA, 20 nt, Artificial Sequence
  spacer sequence TTCN PAM
cugccgcuuucuucauugca

SEQ ID NO: 18485 - RNA, 20 nt, Artificial Sequence
  spacer sequence TTCN PAM
ucauugcagccaccaaauua

SEQ ID NO: 18486 - RNA, 20 nt, Artificial Sequence
  spacer sequence TTCN PAM
uugcagccaccaaauuaguu

SEQ ID NO: 18487 - RNA, 20 nt, Artificial Sequence
  spacer sequence TTCN PAM
aauuaaagugggcaacuaau

SEQ ID NO: 18488 - RNA, 20 nt, Artificial Sequence
  spacer sequence TTCN PAM
aguagggcuggccagacauc

SEQ ID NO: 18489 - RNA, 20 nt, Artificial Sequence
  spacer sequence TTCN PAM
gguucuaguagggcuggcca

SEQ ID NO: 18490 - RNA, 20 nt, Artificial Sequence
  spacer sequence TTCN PAM
cagcugggggcccaaguggc

SEQ ID NO: 18491 - RNA, 20 nt, Artificial Sequence
  spacer sequence TTCN PAM
ugugguugggucaccuuccc

SEQ ID NO: 18492 - RNA, 20 nt, Artificial Sequence
  spacer sequence TTCN PAM
cuugcauacuuccuucccuc

SEQ ID NO: 18493 - RNA, 20 nt, Artificial Sequence
  spacer sequence TTCN PAM
uucccucuugacuccuuucu

SEQ ID NO: 18494 - RNA, 20 nt, Artificial Sequence
  spacer sequence TTCN PAM
cucuugacuccuuucucccc

SEQ ID NO: 18495 - RNA, 20 nt, Artificial Sequence
  spacer sequence TTCN PAM
cccccacccccauccugagg

SEQ ID NO: 18496 - RNA, 20 nt, Artificial Sequence
  spacer sequence TTCN PAM
ugacaacacaucuguccagc

SEQ ID NO: 18497 - RNA, 20 nt, Artificial Sequence
  spacer sequence TTCN PAM
cacugucccaugauucggcu

SEQ ID NO: 18498 - RNA, 20 nt, Artificial Sequence
  spacer sequence TTCN PAM
gcuacccaaggcauuugcau

SEQ ID NO: 18499 - RNA, 20 nt, Artificial Sequence
  spacer sequence TTCN PAM
ugcccuugcagugaucaaag

SEQ ID NO: 18500 - RNA, 20 nt, Artificial Sequence
  spacer sequence TTCN PAM
gaagccuaccauccacuaag

SEQ ID NO: 18501 - RNA, 20 nt, Artificial Sequence
  spacer sequence TTCN PAM
gaaaggggauacccugucuc

SEQ ID NO: 18502 - RNA, 20 nt, Artificial Sequence
  spacer sequence TTCN PAM
uuacuuaguggaugguaggc

SEQ ID NO: 18503 - RNA, 20 nt, Artificial Sequence
  spacer sequence TTCN PAM
uuaaucaauguuucauggaa

SEQ ID NO: 18504 - RNA, 20 nt, Artificial Sequence
  spacer sequence TTCN PAM
uggaagggauaaauccuuua

SEQ ID NO: 18505 - RNA, 20 nt, Artificial Sequence
  spacer sequence TTCN PAM
augaaacauugauuaaugaa

SEQ ID NO: 18506 - RNA, 20 nt, Artificial Sequence
  spacer sequence TTCN PAM
ugauuuuucccccauuuaaa

SEQ ID NO: 18507 - RNA, 20 nt, Artificial Sequence
  spacer sequence TTCN PAM
cccauuuaaaaaaugcagug

SEQ ID NO: 18508 - RNA, 20 nt, Artificial Sequence
  spacer sequence TTCN PAM
ucccugcuauuagcucacau

SEQ ID NO: 18509 - RNA, 20 nt, Artificial Sequence
  spacer sequence TTCN PAM
cugcuauuagcucacauaga

SEQ ID NO: 18510 - RNA, 20 nt, Artificial Sequence
  spacer sequence TTCN PAM
cagccucccaaaacucaccc

SEQ ID NO: 18511 - RNA, 20 nt, Artificial Sequence
  spacer sequence TTCN PAM
cucugaggucaugaaguuca

SEQ ID NO: 18512 - RNA, 20 nt, Artificial Sequence
  spacer sequence TTCN PAM
ugaccucagagugaauguga

SEQ ID NO: 18513 - RNA, 20 nt, Artificial Sequence
  spacer sequence TTCN PAM
auggagaaaacaaaggggua

SEQ ID NO: 18514 - RNA, 20 nt, Artificial Sequence
  spacer sequence TTCN PAM
ccauugaacuucaugaccuc

SEQ ID NO: 18515 - RNA, 20 nt, Artificial Sequence
  spacer sequence TTCN PAM
accccuuuguuuucuccauu

SEQ ID NO: 18516 - RNA, 20 nt, Artificial Sequence
  spacer sequence TTCN PAM
gucccucauucuaccccuuu

SEQ ID NO: 18517 - RNA, 20 nt, Artificial Sequence
  spacer sequence TTCN PAM
aguuagucuuaagcauguuu

SEQ ID NO: 18518 - RNA, 20 nt, Artificial Sequence
  spacer sequence TTCN PAM
uuaaauaaaaccuucauaaa

SEQ ID NO: 18519 - RNA, 20 nt, Artificial Sequence
  spacer sequence TTCN PAM
uaaacccuaaaaaagaaugu

SEQ ID NO: 18520 - RNA, 20 nt, Artificial Sequence
  spacer sequence TTCN PAM
uuuuuaggguuuaugaaggu

SEQ ID NO: 18521 - RNA, 20 nt, Artificial Sequence
  spacer sequence TTCN PAM
uuuguacacucacuaagugc

SEQ ID NO: 18522 - RNA, 20 nt, Artificial Sequence
  spacer sequence TTCN PAM
uuaaugucaguaauauagca

SEQ ID NO: 18523 - RNA, 20 nt, Artificial Sequence
  spacer sequence TTCN PAM
ugucuucuuuaaugucagua

SEQ ID NO: 18524 - RNA, 20 nt, Artificial Sequence
  spacer sequence TTCN PAM
ugcuuguaaucccagcacuu

SEQ ID NO: 18525 - RNA, 20 nt, Artificial Sequence
  spacer sequence TTCN PAM
ucaagauggagucuugcucu

SEQ ID NO: 18526 - RNA, 20 nt, Artificial Sequence
  spacer sequence TTCN PAM
ugucuuuuuuuguuuuuguu

SEQ ID NO: 18527 - RNA, 20 nt, Artificial Sequence
  spacer sequence TTCN PAM
uauuaccaccacaaaaaccc

SEQ ID NO: 18528 - RNA, 20 nt, Artificial Sequence
  spacer sequence TTCN PAM
ccuaagguguggguuuuugu

SEQ ID NO: 18529 - RNA, 20 nt, Artificial Sequence
  spacer sequence TTCN PAM
gguaaauaggauaucacaga

SEQ ID NO: 18530 - RNA, 20 nt, Artificial Sequence
  spacer sequence TTCN PAM
uggaggauguugaccaaaga

SEQ ID NO: 18531 - RNA, 20 nt, Artificial Sequence
  spacer sequence TTCN PAM
guccuuugcaacauacuuac

SEQ ID NO: 18532 - RNA, 20 nt, Artificial Sequence
  spacer sequence TTCN PAM
gaggucuuguggugguguua

SEQ ID NO: 18533 - RNA, 20 nt, Artificial Sequence
  spacer sequence TTCN PAM
ccucaacuuauggaauagug

SEQ ID NO: 18534 - RNA, 20 nt, Artificial Sequence
  spacer sequence TTCN PAM
auaaguugaggagaacaugu

SEQ ID NO: 18535 - RNA, 20 nt, Artificial Sequence
  spacer sequence TTCN PAM
cuauuccauaaguugaggag

SEQ ID NO: 18536 - RNA, 20 nt, Artificial Sequence
  spacer sequence TTCN PAM
cacuguaauuguucuauaaa

SEQ ID NO: 18537 - RNA, 20 nt, Artificial Sequence
  spacer sequence TTCN PAM
auaaagccccuuuuccccau

SEQ ID NO: 18538 - RNA, 20 nt, Artificial Sequence
  spacer sequence TTCN PAM
ccauuaguuucaaaugcaau

SEQ ID NO: 18539 - RNA, 20 nt, Artificial Sequence
  spacer sequence TTCN PAM
aaugcaaugucuacuguuga

SEQ ID NO: 18540 - RNA, 20 nt, Artificial Sequence
  spacer sequence TTCN PAM
ugaaugacacuuuuuaaaaa

SEQ ID NO: 18541 - RNA, 20 nt, Artificial Sequence
  spacer sequence TTCN PAM
ggaaccaggauauuugcuca

SEQ ID NO: 18542 - RNA, 20 nt, Artificial Sequence
  spacer sequence TTCN PAM
auauuuguauuauuuguugc

SEQ ID NO: 18543 - RNA, 20 nt, Artificial Sequence
  spacer sequence TTCN PAM
cacuguuauaagucauauug

SEQ ID NO: 18544 - RNA, 20 nt, Artificial Sequence
  spacer sequence TTCN PAM
guuucccacuguuauaaguc

SEQ ID NO: 18545 - RNA, 20 nt, Artificial Sequence
  spacer sequence TTCN PAM
uguagccauuaggaggacaa

SEQ ID NO: 18546 - RNA, 20 nt, Artificial Sequence
  spacer sequence TTCN PAM
auguuacuguguagucuuug

SEQ ID NO: 18547 - RNA, 20 nt, Artificial Sequence
  spacer sequence TTCN PAM
cacuuagcaugugucauuuu

SEQ ID NO: 18548 - RNA, 20 nt, Artificial Sequence
  spacer sequence TTCN PAM
uuucccacuuagcauguguc

SEQ ID NO: 18549 - RNA, 20 nt, Artificial Sequence
  spacer sequence TTCN PAM
aguuucuuuucccacuuagc

SEQ ID NO: 18550 - RNA, 20 nt, Artificial Sequence
  spacer sequence TTCN PAM
agccuuuuuaaaaaauaagu

SEQ ID NO: 18551 - RNA, 20 nt, Artificial Sequence
  spacer sequence TTCN PAM
uuccagccuuuuuaaaaaau

SEQ ID NO: 18552 - RNA, 20 nt, Artificial Sequence
  spacer sequence TTCN PAM
cgaaauauccauaaugcucu

SEQ ID NO: 18553 - RNA, 20 nt, Artificial Sequence
  spacer sequence TTCN PAM
agaaguaaagauaagggaua

SEQ ID NO: 18554 - RNA, 20 nt, Artificial Sequence
  spacer sequence TTCN PAM
uuugcaucauaaagacagag

SEQ ID NO: 18555 - RNA, 20 nt, Artificial Sequence
  spacer sequence TTCN PAM
auuucuuuugcaucauaaag

SEQ ID NO: 18556 - RNA, 20 nt, Artificial Sequence
  spacer sequence TTCN PAM
uuaaagaguugcuagguuuc

SEQ ID NO: 18557 - RNA, 20 nt, Artificial Sequence
  spacer sequence TTCN PAM
aaauuaugccuacuuaaaaa

SEQ ID NO: 18558 - RNA, 20 nt, Artificial Sequence
  spacer sequence TTCN PAM
uuauuucaaaauuaugccua

SEQ ID NO: 18559 - RNA, 20 nt, Artificial Sequence
  spacer sequence TTCN PAM
aacuauaguaaacccaaauu

SEQ ID NO: 18560 - RNA, 20 nt, Artificial Sequence
  spacer sequence TTCN PAM
uguggagacagcuacccugg

SEQ ID NO: 18561 - RNA, 20 nt, Artificial Sequence
  spacer sequence TTCN PAM
auugacacagaguuauaggc

SEQ ID NO: 18562 - RNA, 20 nt, Artificial Sequence
  spacer sequence TTCN PAM
agauauuuucauuucaccug

SEQ ID NO: 18563 - RNA, 20 nt, Artificial Sequence
  spacer sequence TTCN PAM
uuucaccugaacaguuuauu

SEQ ID NO: 18564 - RNA, 20 nt, Artificial Sequence
  spacer sequence TTCN PAM
ccugaacaguuuauuucagu

SEQ ID NO: 18565 - RNA, 20 nt, Artificial Sequence
  spacer sequence TTCN PAM
ggugaaaugaaaauaucuag

SEQ ID NO: 18566 - RNA, 20 nt, Artificial Sequence
  spacer sequence TTCN PAM
guaucacuggaugggagaaa

SEQ ID NO: 18567 - RNA, 20 nt, Artificial Sequence
  spacer sequence TTCN PAM
aggguccacccaugaacagc

SEQ ID NO: 18568 - RNA, 20 nt, Artificial Sequence
  spacer sequence TTCN PAM
uggcuccguaucucucuccc

SEQ ID NO: 18569 - RNA, 20 nt, Artificial Sequence
  spacer sequence TTCN PAM
uccuggcuccguaucucucu

SEQ ID NO: 18570 - RNA, 20 nt, Artificial Sequence
  spacer sequence TTCN PAM
aaacugguaggcucauucuu

SEQ ID NO: 18571 - RNA, 20 nt, Artificial Sequence
  spacer sequence TTCN PAM
aagaucauacacagcggauc

SEQ ID NO: 18572 - RNA, 20 nt, Artificial Sequence
  spacer sequence TTCN PAM
uaacucuucaaagaucauac

SEQ ID NO: 18573 - RNA, 20 nt, Artificial Sequence
  spacer sequence TTCN PAM
ucuuaacucuucaaagauca

SEQ ID NO: 18574 - RNA, 20 nt, Artificial Sequence
  spacer sequence TTCN PAM
cauucuucuuaacucuucaa

SEQ ID NO: 18575 - RNA, 20 nt, Artificial Sequence
  spacer sequence TTCN PAM
guucucauucuucuuaacuc

SEQ ID NO: 18576 - RNA, 20 nt, Artificial Sequence
  spacer sequence TTCN PAM
aguggaucaugcauacuucu

SEQ ID NO: 18577 - RNA, 20 nt, Artificial Sequence
  spacer sequence TTCN PAM
uggccagaauccauucccaa

SEQ ID NO: 18578 - RNA, 20 nt, Artificial Sequence
  spacer sequence TTCN PAM
ggccaagaaguaugcaugau

SEQ ID NO: 18579 - RNA, 20 nt, Artificial Sequence
  spacer sequence TTCN PAM
caaaugagcaccucugcguc

SEQ ID NO: 18580 - RNA, 20 nt, Artificial Sequence
  spacer sequence TTCN PAM
gugagacgcagaggugcuca

SEQ ID NO: 18581 - RNA, 20 nt, Artificial Sequence
  spacer sequence TTCN PAM
uggcagcuggaaauaauuua

SEQ ID NO: 18582 - RNA, 20 nt, Artificial Sequence
  spacer sequence TTCN PAM
agcugccaugaacuaaauuu

SEQ ID NO: 18583 - RNA, 20 nt, Artificial Sequence
  spacer sequence TTCN PAM
acucaccgaagacuauagaa

SEQ ID NO: 18584 - RNA, 20 nt, Artificial Sequence
  spacer sequence TTCN PAM
cacauaagcuauaaaugcua

SEQ ID NO: 18585 - RNA, 20 nt, Artificial Sequence
  spacer sequence TTCN PAM
uaggaggagaccauugucuu

SEQ ID NO: 18586 - RNA, 20 nt, Artificial Sequence
  spacer sequence TTCN PAM
aauucaaauucauaagcaua

SEQ ID NO: 18587 - RNA, 20 nt, Artificial Sequence
  spacer sequence TTCN PAM
aauucauaagcauaaacuau

SEQ ID NO: 18588 - RNA, 20 nt, Artificial Sequence
  spacer sequence TTCN PAM
uaagcauaaacuaucuaaca

SEQ ID NO: 18589 - RNA, 20 nt, Artificial Sequence
  spacer sequence TTCN PAM
gcuuggaagccagaccuuau

SEQ ID NO: 18590 - RNA, 20 nt, Artificial Sequence
  spacer sequence TTCN PAM
aagcugaauaugauauuguc

SEQ ID NO: 18591 - RNA, 20 nt, Artificial Sequence
  spacer sequence TTCN PAM
cacuuuauaaggucuggcuu

SEQ ID NO: 18592 - RNA, 20 nt, Artificial Sequence
  spacer sequence TTCN PAM
gcgcacuccuaugguguguu

SEQ ID NO: 18593 - RNA, 20 nt, Artificial Sequence
  spacer sequence TTCN PAM
ucaucucaguguuuuugguc

SEQ ID NO: 18594 - RNA, 20 nt, Artificial Sequence
  spacer sequence TTCN PAM
gccauguucuucccagggaa

SEQ ID NO: 18595 - RNA, 20 nt, Artificial Sequence
  spacer sequence TTCN PAM
ucccagggaaacgauaggaa

SEQ ID NO: 18596 - RNA, 20 nt, Artificial Sequence
  spacer sequence TTCN PAM
cagggaaacgauaggaagaa

SEQ ID NO: 18597 - RNA, 20 nt, Artificial Sequence
  spacer sequence TTCN PAM
cugggaagaacauggcugaa

SEQ ID NO: 18598 - RNA, 20 nt, Artificial Sequence
  spacer sequence TTCN PAM
uaucguuucccugggaagaa

SEQ ID NO: 18599 - RNA, 20 nt, Artificial Sequence
  spacer sequence TTCN PAM
uccuaucguuucccugggaa

SEQ ID NO: 18600 - RNA, 20 nt, Artificial Sequence
  spacer sequence TTCN PAM
cccaggugaaaguccucguc

SEQ ID NO: 18601 - RNA, 20 nt, Artificial Sequence
  spacer sequence TTCN PAM
ccugggagaagagcucauuc

SEQ ID NO: 18602 - RNA, 20 nt, Artificial Sequence
  spacer sequence TTCN PAM
uggcaugagcagaguuuagg

SEQ ID NO: 18603 - RNA, 20 nt, Artificial Sequence
  spacer sequence TTCN PAM
uaaacucugcucaugccaag

SEQ ID NO: 18604 - RNA, 20 nt, Artificial Sequence
  spacer sequence TTCN PAM
uuucugaaacaggcacacag

SEQ ID NO: 18605 - RNA, 20 nt, Artificial Sequence
  spacer sequence TTCN PAM
gaaacaggcacacaggugcc

SEQ ID NO: 18606 - RNA, 20 nt, Artificial Sequence
  spacer sequence TTCN PAM
gaaaugaaaguaacuuccua

SEQ ID NO: 18607 - RNA, 20 nt, Artificial Sequence
  spacer sequence TTCN PAM
cccuuggacucucagguuuu

SEQ ID NO: 18608 - RNA, 20 nt, Artificial Sequence
  spacer sequence TTCN PAM
ggcagacuugcaaaaaccug

SEQ ID NO: 18609 - RNA, 20 nt, Artificial Sequence
  spacer sequence TTCN PAM
uugacucugggugggcugag

SEQ ID NO: 18610 - RNA, 20 nt, Artificial Sequence
  spacer sequence TTCN PAM
gcaauaacccucuuccuuga

SEQ ID NO: 18611 - RNA, 20 nt, Artificial Sequence
  spacer sequence TTCN PAM
aacuuaaugccuccuuucug

SEQ ID NO: 18612 - RNA, 20 nt, Artificial Sequence
  spacer sequence TTCN PAM
caaagugcugugcuugggcc

SEQ ID NO: 18613 - RNA, 20 nt, Artificial Sequence
  spacer sequence TTCN PAM
auauccucugagggucaacg

SEQ ID NO: 18614 - RNA, 20 nt, Artificial Sequence
  spacer sequence TTCN PAM
uugaaaauuaaaaccuucca

SEQ ID NO: 18615 - RNA, 20 nt, Artificial Sequence
  spacer sequence TTCN PAM
aagaacauccuaugaucuca

SEQ ID NO: 18616 - RNA, 20 nt, Artificial Sequence
  spacer sequence TTCN PAM
agaagugucaguucuugucu

SEQ ID NO: 18617 - RNA, 20 nt, Artificial Sequence
  spacer sequence TTCN PAM
ggaagguuuuaauuuucaaa

SEQ ID NO: 18618 - RNA, 20 nt, Artificial Sequence
  spacer sequence TTCN PAM
ugucuaguaugcacagacuc

SEQ ID NO: 18619 - RNA, 20 nt, Artificial Sequence
  spacer sequence TTCN PAM
aggaagccuauagccauucu

SEQ ID NO: 18620 - RNA, 20 nt, Artificial Sequence
  spacer sequence TTCN PAM
uagaaaauaugagcuaggau

SEQ ID NO: 18621 - RNA, 20 nt, Artificial Sequence
  spacer sequence TTCN PAM
acacaguguuaaugcggacc

SEQ ID NO: 18622 - RNA, 20 nt, Artificial Sequence
  spacer sequence TTCN PAM
ggucugcuuagcacaggucc

SEQ ID NO: 18623 - RNA, 20 nt, Artificial Sequence
  spacer sequence TTCN PAM
uuguuucuggucugcuuagc

SEQ ID NO: 18624 - RNA, 20 nt, Artificial Sequence
  spacer sequence TTCN PAM
ggacacguucagacuuggac

SEQ ID NO: 18625 - RNA, 20 nt, Artificial Sequence
  spacer sequence TTCN PAM
gcaucauguguuuagauggc

SEQ ID NO: 18626 - RNA, 20 nt, Artificial Sequence
  spacer sequence TTCN PAM
ugugccuccucaccagcccu

SEQ ID NO: 18627 - RNA, 20 nt, Artificial Sequence
  spacer sequence TTCN PAM
acgcaggauuccaaauaauc

SEQ ID NO: 18628 - RNA, 20 nt, Artificial Sequence
  spacer sequence TTCN PAM
aaauaaucaauuuucugccu

SEQ ID NO: 18629 - RNA, 20 nt, Artificial Sequence
  spacer sequence TTCN PAM
gccuguaguugcauguuuag

SEQ ID NO: 18630 - RNA, 20 nt, Artificial Sequence
  spacer sequence TTCN PAM
aaacaugcaacuacaggcag

SEQ ID NO: 18631 - RNA, 20 nt, Artificial Sequence
  spacer sequence TTCN PAM
cauucuaaacaugcaacuac

SEQ ID NO: 18632 - RNA, 20 nt, Artificial Sequence
  spacer sequence TTCN PAM
gaccuuugcuuuuuauucca

SEQ ID NO: 18633 - RNA, 20 nt, Artificial Sequence
  spacer sequence TTCN PAM
agauggaaucuguuuauaga

SEQ ID NO: 18634 - RNA, 20 nt, Artificial Sequence
  spacer sequence TTCN PAM
aucuggaauaaaaagcaaag

SEQ ID NO: 18635 - RNA, 20 nt, Artificial Sequence
  spacer sequence TTCN PAM
auaaacagauuccaucugga

SEQ ID NO: 18636 - RNA, 20 nt, Artificial Sequence
  spacer sequence TTCN PAM
ggggccacggagggguggag

SEQ ID NO: 18637 - RNA, 20 nt, Artificial Sequence
  spacer sequence TTCN PAM
uccaccccuccguggccccu

SEQ ID NO: 18638 - RNA, 20 nt, Artificial Sequence
  spacer sequence TTCN PAM
gggaaggcuuuggggcccca

SEQ ID NO: 18639 - RNA, 20 nt, Artificial Sequence
  spacer sequence TTCN PAM
cagaagcccccucugccaac

SEQ ID NO: 18640 - RNA, 20 nt, Artificial Sequence
  spacer sequence TTCN PAM
ucuucaaauagagcagcugc

SEQ ID NO: 18641 - RNA, 20 nt, Artificial Sequence
  spacer sequence TTCN PAM
aauagagcagcugcacuucu

SEQ ID NO: 18642 - RNA, 20 nt, Artificial Sequence
  spacer sequence TTCN PAM
accuaauugggcuuccacag

SEQ ID NO: 18643 - RNA, 20 nt, Artificial Sequence
  spacer sequence TTCN PAM
acagaaggccucauuuugcu

SEQ ID NO: 18644 - RNA, 20 nt, Artificial Sequence
  spacer sequence TTCN PAM
guggaagcccaauuagguag

SEQ ID NO: 18645 - RNA, 20 nt, Artificial Sequence
  spacer sequence TTCN PAM
ggcaaccccugggaggggcu

SEQ ID NO: 18646 - RNA, 20 nt, Artificial Sequence
  spacer sequence TTCN PAM
ccugcccugucccccaccua

SEQ ID NO: 18647 - RNA, 20 nt, Artificial Sequence
  spacer sequence TTCN PAM
uuugagaacuguccuuugaa

SEQ ID NO: 18648 - RNA, 20 nt, Artificial Sequence
  spacer sequence TTCN PAM
gaggcauuaauauguuucuu

SEQ ID NO: 18649 - RNA, 20 nt, Artificial Sequence
  spacer sequence TTCN PAM
uggugccacuucagaggcau

SEQ ID NO: 18650 - RNA, 20 nt, Artificial Sequence
  spacer sequence TTCN PAM
gggaggacagccuuggagac

SEQ ID NO: 18651 - RNA, 20 nt, Artificial Sequence
  spacer sequence TTCN PAM
gcuuacaccuucugggagga

SEQ ID NO: 18652 - RNA, 20 nt, Artificial Sequence
  spacer sequence TTCN PAM
ggacaauguccaaacccaua

SEQ ID NO: 18653 - RNA, 20 nt, Artificial Sequence
  spacer sequence TTCN PAM
gcuauggguuuggacauugu

SEQ ID NO: 18654 - RNA, 20 nt, Artificial Sequence
  spacer sequence TTCN PAM
cuccugucuaugcacacaca

SEQ ID NO: 18655 - RNA, 20 nt, Artificial Sequence
  spacer sequence TTCN PAM
aacuuuuccuuagguuugaa

SEQ ID NO: 18656 - RNA, 20 nt, Artificial Sequence
  spacer sequence TTCN PAM
uuagguuugaaauuucucug

SEQ ID NO: 18657 - RNA, 20 nt, Artificial Sequence
  spacer sequence TTCN PAM
aaccuaaggaaaaguuggaa

SEQ ID NO: 18658 - RNA, 20 nt, Artificial Sequence
  spacer sequence TTCN PAM
cugaauaaauacuggagggg

SEQ ID NO: 18659 - RNA, 20 nt, Artificial Sequence
  spacer sequence TTCN PAM
gagaaauuucaaaccuaagg

SEQ ID NO: 18660 - RNA, 20 nt, Artificial Sequence
  spacer sequence TTCN PAM
ccuaccccuccaguauuuau

SEQ ID NO: 18661 - RNA, 20 nt, Artificial Sequence
  spacer sequence TTCN PAM
caucaagguacauuugcccc

SEQ ID NO: 18662 - RNA, 20 nt, Artificial Sequence
  spacer sequence TTCN PAM
uaauuauuaauaacaaaaaa

SEQ ID NO: 18663 - RNA, 20 nt, Artificial Sequence
  spacer sequence TTCN PAM
ucaaucauguuagggaaaga

SEQ ID NO: 18664 - RNA, 20 nt, Artificial Sequence
  spacer sequence TTCN PAM
cuaacaugauugaugaaaau

SEQ ID NO: 18665 - RNA, 20 nt, Artificial Sequence
  spacer sequence TTCN PAM
agauuuugucauguuugugg

SEQ ID NO: 18666 - RNA, 20 nt, Artificial Sequence
  spacer sequence TTCN PAM
uccucuauaagaauucacuu

SEQ ID NO: 18667 - RNA, 20 nt, Artificial Sequence
  spacer sequence TTCN PAM
uauagaggaggaaauaaaua

SEQ ID NO: 18668 - RNA, 20 nt, Artificial Sequence
  spacer sequence TTCN PAM
cuuucauagccuccuucacc

SEQ ID NO: 18669 - RNA, 20 nt, Artificial Sequence
  spacer sequence TTCN PAM
uagccuccuucacccaaaug

SEQ ID NO: 18670 - RNA, 20 nt, Artificial Sequence
  spacer sequence TTCN PAM
cccaaauguguaugcauuac

SEQ ID NO: 18671 - RNA, 20 nt, Artificial Sequence
  spacer sequence TTCN PAM
aaaaaacccuaagcacaaaa

SEQ ID NO: 18672 - RNA, 20 nt, Artificial Sequence
  spacer sequence TTCN PAM
uauccacccaugguaacgug

SEQ ID NO: 18673 - RNA, 20 nt, Artificial Sequence
  spacer sequence TTCN PAM
uggaggucaaaugcuaaagu

SEQ ID NO: 18674 - RNA, 20 nt, Artificial Sequence
  spacer sequence TTCN PAM
aauaaacaucuuccuggagg

SEQ ID NO: 18675 - RNA, 20 nt, Artificial Sequence
  spacer sequence TTCN PAM
gcuuuauacagccacauuca

SEQ ID NO: 18676 - RNA, 20 nt, Artificial Sequence
  spacer sequence TTCN PAM
uuaacccaauugagucuuga

SEQ ID NO: 18677 - RNA, 20 nt, Artificial Sequence
  spacer sequence TTCN PAM
agacucaauuggguuaauga

SEQ ID NO: 18678 - RNA, 20 nt, Artificial Sequence
  spacer sequence TTCN PAM
guguuccacgugaguaaacu

SEQ ID NO: 18679 - RNA, 20 nt, Artificial Sequence
  spacer sequence TTCN PAM
acgugaguaaacugaggcac

SEQ ID NO: 18680 - RNA, 20 nt, Artificial Sequence
  spacer sequence TTCN PAM
cagaaugagguauaggaucu

SEQ ID NO: 18681 - RNA, 20 nt, Artificial Sequence
  spacer sequence TTCN PAM
gagaaaaguuacucuccacc

SEQ ID NO: 18682 - RNA, 20 nt, Artificial Sequence
  spacer sequence TTCN PAM
uuuggggcaaagacaagcug

SEQ ID NO: 18683 - RNA, 20 nt, Artificial Sequence
  spacer sequence TTCN PAM
aaaaccaaagagguagcucu

SEQ ID NO: 18684 - RNA, 20 nt, Artificial Sequence
  spacer sequence TTCN PAM
ugcugaauuccacauagaag

SEQ ID NO: 18685 - RNA, 20 nt, Artificial Sequence
  spacer sequence TTCN PAM
uccugcugaauuccacauag

SEQ ID NO: 18686 - RNA, 20 nt, Artificial Sequence
  spacer sequence TTCN PAM
cuucuuccugcugaauucca

SEQ ID NO: 18687 - RNA, 20 nt, Artificial Sequence
  spacer sequence TTCN PAM
uauuuacuauaacaaaauag

SEQ ID NO: 18688 - RNA, 20 nt, Artificial Sequence
  spacer sequence TTCN PAM
ucuaacacugggauaggaag

SEQ ID NO: 18689 - RNA, 20 nt, Artificial Sequence
  spacer sequence TTCN PAM
uaucccaguguuagaggaag

SEQ ID NO: 18690 - RNA, 20 nt, Artificial Sequence
  spacer sequence TTCN PAM
aauaagcgaguagccgaagc

SEQ ID NO: 18691 - RNA, 20 nt, Artificial Sequence
  spacer sequence TTCN PAM
gcuacucgcuuauuggaaug

SEQ ID NO: 18692 - RNA, 20 nt, Artificial Sequence
  spacer sequence TTCN PAM
uaccccauuuacuccucauu

SEQ ID NO: 18693 - RNA, 20 nt, Artificial Sequence
  spacer sequence TTCN PAM
uuccuaccccauuuacuccu

SEQ ID NO: 18694 - RNA, 20 nt, Artificial Sequence
  spacer sequence TTCN PAM
cuuaacaaguuuccuuccua

SEQ ID NO: 18695 - RNA, 20 nt, Artificial Sequence
  spacer sequence TTCN PAM
gauccaggagcugugucaac

SEQ ID NO: 18696 - RNA, 20 nt, Artificial Sequence
  spacer sequence TTCN PAM
uagaauguugcacuaugcca

SEQ ID NO: 18697 - RNA, 20 nt, Artificial Sequence
  spacer sequence TTCN PAM
aggaaguuguggggacauuu

SEQ ID NO: 18698 - RNA, 20 nt, Artificial Sequence
  spacer sequence TTCN PAM
gaggcuggcguugcccagga

SEQ ID NO: 18699 - RNA, 20 nt, Artificial Sequence
  spacer sequence TTCN PAM
uauugucuuauuggcgauug

SEQ ID NO: 18700 - RNA, 20 nt, Artificial Sequence
  spacer sequence TTCN PAM
uuucccuccucuuuggccca

SEQ ID NO: 18701 - RNA, 20 nt, Artificial Sequence
  spacer sequence TTCN PAM
cuccucuuuggcccagguug

SEQ ID NO: 18702 - RNA, 20 nt, Artificial Sequence
  spacer sequence TTCN PAM
acuggacaaauucuaccugu

SEQ ID NO: 18703 - RNA, 20 nt, Artificial Sequence
  spacer sequence TTCN PAM
accuguguguuuggaaagaa

SEQ ID NO: 18704 - RNA, 20 nt, Artificial Sequence
  spacer sequence TTCN PAM
aaacacacagguagaauuug

SEQ ID NO: 18705 - RNA, 20 nt, Artificial Sequence
  spacer sequence TTCN PAM
uuccaaacacacagguagaa

SEQ ID NO: 18706 - RNA, 20 nt, Artificial Sequence
  spacer sequence TTCN PAM
uuucuuuauaaacaauaaua

SEQ ID NO: 18707 - RNA, 20 nt, Artificial Sequence
  spacer sequence TTCN PAM
uuauaaacaauaauagagca

SEQ ID NO: 18708 - RNA, 20 nt, Artificial Sequence
  spacer sequence TTCN PAM
auugcucuauuauuguuuau

SEQ ID NO: 18709 - RNA, 20 nt, Artificial Sequence
  spacer sequence TTCN PAM
uggaaaccucauuguugcau

SEQ ID NO: 18710 - RNA, 20 nt, Artificial Sequence
  spacer sequence TTCN PAM
aagaaagcuuuccauugcuc

SEQ ID NO: 18711 - RNA, 20 nt, Artificial Sequence
  spacer sequence TTCN PAM
agaauaugagagauuucaau

SEQ ID NO: 18712 - RNA, 20 nt, Artificial Sequence
  spacer sequence TTCN PAM
agaauggauggacaagguca

SEQ ID NO: 18713 - RNA, 20 nt, Artificial Sequence
  spacer sequence TTCN PAM
auuguaauggugcaacuagc

SEQ ID NO: 18714 - RNA, 20 nt, Artificial Sequence
  spacer sequence TTCN PAM
gugcuaguugcaccauuaca

SEQ ID NO: 18715 - RNA, 20 nt, Artificial Sequence
  spacer sequence TTCN PAM
ugguccgggucagugcucug

SEQ ID NO: 18716 - RNA, 20 nt, Artificial Sequence
  spacer sequence TTCN PAM
uuauaguuccugguccgggu

SEQ ID NO: 18717 - RNA, 20 nt, Artificial Sequence
  spacer sequence TTCN PAM
caugauuaagucacuucauc

SEQ ID NO: 18718 - RNA, 20 nt, Artificial Sequence
  spacer sequence TTCN PAM
uccuuacaauuaccccaguu

SEQ ID NO: 18719 - RNA, 20 nt, Artificial Sequence
  spacer sequence TTCN PAM
caauuuauagaugagaaaac

SEQ ID NO: 18720 - RNA, 20 nt, Artificial Sequence
  spacer sequence TTCN PAM
uggauugggcagcucugguu

SEQ ID NO: 18721 - RNA, 20 nt, Artificial Sequence
  spacer sequence TTCN PAM
aucacugauuaauuuuguga

SEQ ID NO: 18722 - RNA, 20 nt, Artificial Sequence
  spacer sequence TTCN PAM
guguuccaucacugauuaau

SEQ ID NO: 18723 - RNA, 20 nt, Artificial Sequence
  spacer sequence TTCN PAM
auucuguguuccaucacuga

SEQ ID NO: 18724 - RNA, 20 nt, Artificial Sequence
  spacer sequence TTCN PAM
gccaagcagacagaaaacuc

SEQ ID NO: 18725 - RNA, 20 nt, Artificial Sequence
  spacer sequence TTCN PAM
gucugcuuggcugaacugua

SEQ ID NO: 18726 - RNA, 20 nt, Artificial Sequence
  spacer sequence TTCN PAM
gucugaguuuucugucugcu

SEQ ID NO: 18727 - RNA, 20 nt, Artificial Sequence
  spacer sequence TTCN PAM
aacccuugcccaggaugaaa

SEQ ID NO: 18728 - RNA, 20 nt, Artificial Sequence
  spacer sequence TTCN PAM
aggagcaaugacaggaguca

SEQ ID NO: 18729 - RNA, 20 nt, Artificial Sequence
  spacer sequence TTCN PAM
aaaacaaaacaauaauggac

SEQ ID NO: 18730 - RNA, 20 nt, Artificial Sequence
  spacer sequence TTCN PAM
aaaacauuccaaaugcauca

SEQ ID NO: 18731 - RNA, 20 nt, Artificial Sequence
  spacer sequence TTCN PAM
aaaugcaucaucucauuuag

SEQ ID NO: 18732 - RNA, 20 nt, Artificial Sequence
  spacer sequence TTCN PAM
ucuaacagcccugugaagaa

SEQ ID NO: 18733 - RNA, 20 nt, Artificial Sequence
  spacer sequence TTCN PAM
aacagcccugugaagaaagu

SEQ ID NO: 18734 - RNA, 20 nt, Artificial Sequence
  spacer sequence TTCN PAM
acuguuuucugguucaagau

SEQ ID NO: 18735 - RNA, 20 nt, Artificial Sequence
  spacer sequence TTCN PAM
gguucaagauccagcgguug

SEQ ID NO: 18736 - RNA, 20 nt, Artificial Sequence
  spacer sequence TTCN PAM
agauccagcgguugaagguc

SEQ ID NO: 18737 - RNA, 20 nt, Artificial Sequence
  spacer sequence TTCN PAM
accgcuggaucuugaaccag

SEQ ID NO: 18738 - RNA, 20 nt, Artificial Sequence
  spacer sequence TTCN PAM
aagagaaggcuggggaaauc

SEQ ID NO: 18739 - RNA, 20 nt, Artificial Sequence
  spacer sequence TTCN PAM
cuuugaacuugaccuucaac

SEQ ID NO: 18740 - RNA, 20 nt, Artificial Sequence
  spacer sequence TTCN PAM
ccagccuucucuuugaacuu

SEQ ID NO: 18741 - RNA, 20 nt, Artificial Sequence
  spacer sequence TTCN PAM
aauauauuauuaccaaaugc

SEQ ID NO: 18742 - RNA, 20 nt, Artificial Sequence
  spacer sequence TTCN PAM
augcacauucccacugcuaa

SEQ ID NO: 18743 - RNA, 20 nt, Artificial Sequence
  spacer sequence TTCN PAM
cacugcuaaucagacauggu

SEQ ID NO: 18744 - RNA, 20 nt, Artificial Sequence
  spacer sequence TTCN PAM
ccaugucugauuagcagugg

SEQ ID NO: 18745 - RNA, 20 nt, Artificial Sequence
  spacer sequence TTCN PAM
acguuuuuaucuguuugccu

SEQ ID NO: 18746 - RNA, 20 nt, Artificial Sequence
  spacer sequence TTCN PAM
uggcccacugguuaaaacuc

SEQ ID NO: 18747 - RNA, 20 nt, Artificial Sequence
  spacer sequence TTCN PAM
guguuuugaucacauaauac

SEQ ID NO: 18748 - RNA, 20 nt, Artificial Sequence
  spacer sequence TTCN PAM
uuuuuuuuuuuucgagaugu

SEQ ID NO: 18749 - RNA, 20 nt, Artificial Sequence
  spacer sequence TTCN PAM
agaugucacccaggcuggag

SEQ ID NO: 18750 - RNA, 20 nt, Artificial Sequence
  spacer sequence TTCN PAM
gguacgggcaucugauucag

SEQ ID NO: 18751 - RNA, 20 nt, Artificial Sequence
  spacer sequence TTCN PAM
ggacucugcuccuaacugcg

SEQ ID NO: 18752 - RNA, 20 nt, Artificial Sequence
  spacer sequence TTCN PAM
acaaaaaauacacaaauuag

SEQ ID NO: 18753 - RNA, 20 nt, Artificial Sequence
  spacer sequence TTCN PAM
uuuggcucauaaagagacuc

SEQ ID NO: 18754 - RNA, 20 nt, Artificial Sequence
  spacer sequence TTCN PAM
aagauuuguauuuuaaugag

SEQ ID NO: 18755 - RNA, 20 nt, Artificial Sequence
  spacer sequence TTCN PAM
agacauugcccuuccaagau

SEQ ID NO: 18756 - RNA, 20 nt, Artificial Sequence
  spacer sequence TTCN PAM
caaguaacgaauuagcagaa

SEQ ID NO: 18757 - RNA, 20 nt, Artificial Sequence
  spacer sequence TTCN PAM
uuacuugagaacuaagauau

SEQ ID NO: 18758 - RNA, 20 nt, Artificial Sequence
  spacer sequence TTCN PAM
gcuaauucguuacuugagaa

SEQ ID NO: 18759 - RNA, 20 nt, Artificial Sequence
  spacer sequence TTCN PAM
auuuucugcuaauucguuac

SEQ ID NO: 18760 - RNA, 20 nt, Artificial Sequence
  spacer sequence TTCN PAM
gcaaaguucaggcuuuuaau

SEQ ID NO: 18761 - RNA, 20 nt, Artificial Sequence
  spacer sequence TTCN PAM
ggcuuuuaauccacuagacu

SEQ ID NO: 18762 - RNA, 20 nt, Artificial Sequence
  spacer sequence TTCN PAM
uuuaaccaaagccugccugg

SEQ ID NO: 18763 - RNA, 20 nt, Artificial Sequence
  spacer sequence TTCN PAM
uuguuuuccccagaauacuu

SEQ ID NO: 18764 - RNA, 20 nt, Artificial Sequence
  spacer sequence TTCN PAM
ccagaauacuugcuaaauug

SEQ ID NO: 18765 - RNA, 20 nt, Artificial Sequence
  spacer sequence TTCN PAM
ggggaaaacaaagaaauaca

SEQ ID NO: 18766 - RNA, 20 nt, Artificial Sequence
  spacer sequence TTCN PAM
gucaacuacaaagauugaaa

SEQ ID NO: 18767 - RNA, 20 nt, Artificial Sequence
  spacer sequence TTCN PAM
cacaaauacccucagguuug

SEQ ID NO: 18768 - RNA, 20 nt, Artificial Sequence
  spacer sequence TTCN PAM
cuagaaugauucagagaacu

SEQ ID NO: 18769 - RNA, 20 nt, Artificial Sequence
  spacer sequence TTCN PAM
agugaauuaucaaaccugag

SEQ ID NO: 18770 - RNA, 20 nt, Artificial Sequence
  spacer sequence TTCN PAM
gagaacucuggaaggcgcua

SEQ ID NO: 18771 - RNA, 20 nt, Artificial Sequence
  spacer sequence TTCN PAM
cugaaucauucuagugaauu

SEQ ID NO: 18772 - RNA, 20 nt, Artificial Sequence
  spacer sequence TTCN PAM
agaguucucugaaucauucu

SEQ ID NO: 18773 - RNA, 20 nt, Artificial Sequence
  spacer sequence TTCN PAM
aaagagcacgugcccuagua

SEQ ID NO: 18774 - RNA, 20 nt, Artificial Sequence
  spacer sequence TTCN PAM
agcacauaacauaugagacu

SEQ ID NO: 18775 - RNA, 20 nt, Artificial Sequence
  spacer sequence TTCN PAM
guaguugagaaacuggauga

SEQ ID NO: 18776 - RNA, 20 nt, Artificial Sequence
  spacer sequence TTCN PAM
ccagaugcucuggaguggau

SEQ ID NO: 18777 - RNA, 20 nt, Artificial Sequence
  spacer sequence TTCN PAM
caagaccuacacgcugugau

SEQ ID NO: 18778 - RNA, 20 nt, Artificial Sequence
  spacer sequence TTCN PAM
ugaaaggcucaauuuccaaa

SEQ ID NO: 18779 - RNA, 20 nt, Artificial Sequence
  spacer sequence TTCN PAM
agaaucacagcguguagguc

SEQ ID NO: 18780 - RNA, 20 nt, Artificial Sequence
  spacer sequence TTCN PAM
aaaccucuggauugagacau

SEQ ID NO: 18781 - RNA, 20 nt, Artificial Sequence
  spacer sequence TTCN PAM
aagagaugucucaauccaga

SEQ ID NO: 18782 - RNA, 20 nt, Artificial Sequence
  spacer sequence TTCN PAM
cccaguucuaagagaugucu

SEQ ID NO: 18783 - RNA, 20 nt, Artificial Sequence
  spacer sequence TTCN PAM
aaucaggaguggucagaacg

SEQ ID NO: 18784 - RNA, 20 nt, Artificial Sequence
  spacer sequence TTCN PAM
gaccacuccugauuagaagc

SEQ ID NO: 18785 - RNA, 20 nt, Artificial Sequence
  spacer sequence TTCN PAM
gugacuccacguucugacca

SEQ ID NO: 18786 - RNA, 20 nt, Artificial Sequence
  spacer sequence TTCN PAM
cagacgccuucugugacucc

SEQ ID NO: 18787 - RNA, 20 nt, Artificial Sequence
  spacer sequence TTCN PAM
cggucccagcguugccuguc

SEQ ID NO: 18788 - RNA, 20 nt, Artificial Sequence
  spacer sequence TTCN PAM
uuuuuuccauaggcaugcug

SEQ ID NO: 18789 - RNA, 20 nt, Artificial Sequence
  spacer sequence TTCN PAM
auaggcaugcugugugugcc

SEQ ID NO: 18790 - RNA, 20 nt, Artificial Sequence
  spacer sequence TTCN PAM
gacacagggauuggggucgg

SEQ ID NO: 18791 - RNA, 20 nt, Artificial Sequence
  spacer sequence TTCN PAM
gagucaggggggccucuguu

SEQ ID NO: 18792 - RNA, 20 nt, Artificial Sequence
  spacer sequence TTCN PAM
agaauuucaaacaaaggcug

SEQ ID NO: 18793 - RNA, 20 nt, Artificial Sequence
  spacer sequence TTCN PAM
agaacaacagaguugcagua

SEQ ID NO: 18794 - RNA, 20 nt, Artificial Sequence
  spacer sequence TTCN PAM
aacaaaggcugaacccuagg

SEQ ID NO: 18795 - RNA, 20 nt, Artificial Sequence
  spacer sequence TTCN PAM
gccuuuguuugaaauucuag

SEQ ID NO: 18796 - RNA, 20 nt, Artificial Sequence
  spacer sequence TTCN PAM
uaggguucagccuuuguuug

SEQ ID NO: 18797 - RNA, 20 nt, Artificial Sequence
  spacer sequence TTCN PAM
uagugguguguuuuccuagg

SEQ ID NO: 18798 - RNA, 20 nt, Artificial Sequence
  spacer sequence TTCN PAM
ucuuagugguguguuuuccu

SEQ ID NO: 18799 - RNA, 20 nt, Artificial Sequence
  spacer sequence TTCN PAM
auaaaucacucaggacaauc

SEQ ID NO: 18800 - RNA, 20 nt, Artificial Sequence
  spacer sequence TTCN PAM
ucaauaaaucacucaggaca

SEQ ID NO: 18801 - RNA, 20 nt, Artificial Sequence
  spacer sequence TTCN PAM
cucacuuuuguucuucaaua

SEQ ID NO: 18802 - RNA, 20 nt, Artificial Sequence
  spacer sequence TTCN PAM
uucccucacuuuuguucuuc

SEQ ID NO: 18803 - RNA, 20 nt, Artificial Sequence
  spacer sequence TTCN PAM
uuuucuuucccucacuuuug

SEQ ID NO: 18804 - RNA, 20 nt, Artificial Sequence
  spacer sequence TTCN PAM
cuucuuuuucuuucccucac

SEQ ID NO: 18805 - RNA, 20 nt, Artificial Sequence
  spacer sequence TTCN PAM
cuuuccuccugucuggccua

SEQ ID NO: 18806 - RNA, 20 nt, Artificial Sequence
  spacer sequence TTCN PAM
uccugucuggccuaaggaga

SEQ ID NO: 18807 - RNA, 20 nt, Artificial Sequence
  spacer sequence TTCN PAM
ccuuaggccagacaggagga

SEQ ID NO: 18808 - RNA, 20 nt, Artificial Sequence
  spacer sequence TTCN PAM
cucccuccccaacggaaagg

SEQ ID NO: 18809 - RNA, 20 nt, Artificial Sequence
  spacer sequence TTCN PAM
guuggggagggagggaacac

SEQ ID NO: 18810 - RNA, 20 nt, Artificial Sequence
  spacer sequence TTCN PAM
gagacacgucuuuaugcagc

SEQ ID NO: 18811 - RNA, 20 nt, Artificial Sequence
  spacer sequence TTCN PAM
agugagucuagauggauuuu

SEQ ID NO: 18812 - RNA, 20 nt, Artificial Sequence
  spacer sequence TTCN PAM
uccagugagucuagauggau

SEQ ID NO: 18813 - RNA, 20 nt, Artificial Sequence
  spacer sequence TTCN PAM
uacagauauuuuccaaauga

SEQ ID NO: 18814 - RNA, 20 nt, Artificial Sequence
  spacer sequence TTCN PAM
aaaugaacagaaaccuaacc

SEQ ID NO: 18815 - RNA, 20 nt, Artificial Sequence
  spacer sequence TTCN PAM
uuuggaaaauaucuguauga

SEQ ID NO: 18816 - RNA, 20 nt, Artificial Sequence
  spacer sequence TTCN PAM
guucauuuggaaaauaucug

SEQ ID NO: 18817 - RNA, 20 nt, Artificial Sequence
  spacer sequence TTCN PAM
agccuugguuagguuucugu

SEQ ID NO: 18818 - RNA, 20 nt, Artificial Sequence
  spacer sequence TTCN PAM
cuaaagccaaauuccagccu

SEQ ID NO: 18819 - RNA, 20 nt, Artificial Sequence
  spacer sequence TTCN PAM
ggcuucucuaaagccaaauu

SEQ ID NO: 18820 - RNA, 20 nt, Artificial Sequence
  spacer sequence TTCN PAM
ucuggcuucucuaaagccaa

SEQ ID NO: 18821 - RNA, 20 nt, Artificial Sequence
  spacer sequence TTCN PAM
uuuacuuugggaggugacug

SEQ ID NO: 18822 - RNA, 20 nt, Artificial Sequence
  spacer sequence TTCN PAM
uaccagucaccucccaaagu

SEQ ID NO: 18823 - RNA, 20 nt, Artificial Sequence
  spacer sequence TTCN PAM
ggcucuuacucagagccuuc

SEQ ID NO: 18824 - RNA, 20 nt, Artificial Sequence
  spacer sequence TTCN PAM
cauguaaauucaucacugug

SEQ ID NO: 18825 - RNA, 20 nt, Artificial Sequence
  spacer sequence TTCN PAM
ucacugugauggaaagcagu

SEQ ID NO: 18826 - RNA, 20 nt, Artificial Sequence
  spacer sequence TTCN PAM
aucacagugaugaauuuaca

SEQ ID NO: 18827 - RNA, 20 nt, Artificial Sequence
  spacer sequence TTCN PAM
aaugcgcagcugagaacuug

SEQ ID NO: 18828 - RNA, 20 nt, Artificial Sequence
  spacer sequence TTCN PAM
cagcugcgcauuggaaaugc

SEQ ID NO: 18829 - RNA, 20 nt, Artificial Sequence
  spacer sequence TTCN PAM
caauagaucagggcuagagg

SEQ ID NO: 18830 - RNA, 20 nt, Artificial Sequence
  spacer sequence TTCN PAM
gcccaagaagcaauucggag

SEQ ID NO: 18831 - RNA, 20 nt, Artificial Sequence
  spacer sequence TTCN PAM
uaccaggugaccccaguacc

SEQ ID NO: 18832 - RNA, 20 nt, Artificial Sequence
  spacer sequence TTCN PAM
cucucugcuuccuaccaggu

SEQ ID NO: 18833 - RNA, 20 nt, Artificial Sequence
  spacer sequence TTCN PAM
gguaacuaccauguaacucc

SEQ ID NO: 18834 - RNA, 20 nt, Artificial Sequence
  spacer sequence TTCN PAM
uuuuuaaguuguuguuaaaa

SEQ ID NO: 18835 - RNA, 20 nt, Artificial Sequence
  spacer sequence TTCN PAM
cagauauacuuacuggcagg

SEQ ID NO: 18836 - RNA, 20 nt, Artificial Sequence
  spacer sequence TTCN PAM
ugcuuuaaaaauaauaauaa

SEQ ID NO: 18837 - RNA, 20 nt, Artificial Sequence
  spacer sequence TTCN PAM
aaaacaaauuuuuauuauua

SEQ ID NO: 18838 - RNA, 20 nt, Artificial Sequence
  spacer sequence TTCN PAM
uccuuuccuaucaagaagga

SEQ ID NO: 18839 - RNA, 20 nt, Artificial Sequence
  spacer sequence TTCN PAM
uaucaagaaggagaggacuu

SEQ ID NO: 18840 - RNA, 20 nt, Artificial Sequence
  spacer sequence TTCN PAM
ugauaggaaaggaugaaggu

SEQ ID NO: 18841 - RNA, 20 nt, Artificial Sequence
  spacer sequence TTCN PAM
cugccagaguuccaaggcag

SEQ ID NO: 18842 - RNA, 20 nt, Artificial Sequence
  spacer sequence TTCN PAM
aaggcagggucaugagauuc

SEQ ID NO: 18843 - RNA, 20 nt, Artificial Sequence
  spacer sequence TTCN PAM
caauuuuaugauuguaaaua

SEQ ID NO: 18844 - RNA, 20 nt, Artificial Sequence
  spacer sequence TTCN PAM
uucacaauuuuaugauugua

SEQ ID NO: 18845 - RNA, 20 nt, Artificial Sequence
  spacer sequence TTCN PAM
caaaacuacagauguuuuua

SEQ ID NO: 18846 - RNA, 20 nt, Artificial Sequence
  spacer sequence TTCN PAM
gaaagucugaaaaagaacac

SEQ ID NO: 18847 - RNA, 20 nt, Artificial Sequence
  spacer sequence TTCN PAM
gaacacuaaaaacaucugua

SEQ ID NO: 18848 - RNA, 20 nt, Artificial Sequence
  spacer sequence TTCN PAM
gacuuucugaacacuaaaaa

SEQ ID NO: 18849 - RNA, 20 nt, Artificial Sequence
  spacer sequence TTCN PAM
gccagagaaaagggcucaug

SEQ ID NO: 18850 - RNA, 20 nt, Artificial Sequence
  spacer sequence TTCN PAM
cuggcagaaggauggguaac

SEQ ID NO: 18851 - RNA, 20 nt, Artificial Sequence
  spacer sequence TTCN PAM
ugagcccuuuucucuggcag

SEQ ID NO: 18852 - RNA, 20 nt, Artificial Sequence
  spacer sequence TTCN PAM
guucaugagcccuuuucucu

SEQ ID NO: 18853 - RNA, 20 nt, Artificial Sequence
  spacer sequence TTCN PAM
cccucccucugauuggccca

SEQ ID NO: 18854 - RNA, 20 nt, Artificial Sequence
  spacer sequence TTCN PAM
gcucaggggcacucugugaa

SEQ ID NO: 18855 - RNA, 20 nt, Artificial Sequence
  spacer sequence TTCN PAM
cagagugccccugagcagaa

SEQ ID NO: 18856 - RNA, 20 nt, Artificial Sequence
  spacer sequence TTCN PAM
caucagcucuguucacagag

SEQ ID NO: 18857 - RNA, 20 nt, Artificial Sequence
  spacer sequence TTCN PAM
cuauccccauuguaaagaug

SEQ ID NO: 18858 - RNA, 20 nt, Artificial Sequence
  spacer sequence TTCN PAM
uucacuauccccauuguaaa

SEQ ID NO: 18859 - RNA, 20 nt, Artificial Sequence
  spacer sequence TTCN PAM
uaauacuacuggccacagua

SEQ ID NO: 18860 - RNA, 20 nt, Artificial Sequence
  spacer sequence TTCN PAM
gagcacuuccuaauacuacu

SEQ ID NO: 18861 - RNA, 20 nt, Artificial Sequence
  spacer sequence TTCN PAM
cagaguacaauuuucagagc

SEQ ID NO: 18862 - RNA, 20 nt, Artificial Sequence
  spacer sequence TTCN PAM
cccugggaaauagcuagcag

SEQ ID NO: 18863 - RNA, 20 nt, Artificial Sequence
  spacer sequence TTCN PAM
cagggagaaugcccuuuuug

SEQ ID NO: 18864 - RNA, 20 nt, Artificial Sequence
  spacer sequence TTCN PAM
agacuugggucuauuuuuug

SEQ ID NO: 18865 - RNA, 20 nt, Artificial Sequence
  spacer sequence TTCN PAM
cauuuauguuuugauuuaug

SEQ ID NO: 18866 - RNA, 20 nt, Artificial Sequence
  spacer sequence TTCN PAM
uaaaucaaaacauaaaugag

SEQ ID NO: 18867 - RNA, 20 nt, Artificial Sequence
  spacer sequence TTCN PAM
aaggaaagccuccaggcaca

SEQ ID NO: 18868 - RNA, 20 nt, Artificial Sequence
  spacer sequence TTCN PAM
uuagaaaaugauggaugcgu

SEQ ID NO: 18869 - RNA, 20 nt, Artificial Sequence
  spacer sequence TTCN PAM
ugugccuggaggcuuuccuu

SEQ ID NO: 18870 - RNA, 20 nt, Artificial Sequence
  spacer sequence TTCN PAM
guugugcauuuuuaucauuu

SEQ ID NO: 18871 - RNA, 20 nt, Artificial Sequence
  spacer sequence TTCN PAM
gcauggcuaacaagucaggc

SEQ ID NO: 18872 - RNA, 20 nt, Artificial Sequence
  spacer sequence TTCN PAM
gcaaagucccagccuguuga

SEQ ID NO: 18873 - RNA, 20 nt, Artificial Sequence
  spacer sequence TTCN PAM
ucagcaaagucccagccugu

SEQ ID NO: 18874 - RNA, 20 nt, Artificial Sequence
  spacer sequence TTCN PAM
uuuauuucuucagcaaaguc

SEQ ID NO: 18875 - RNA, 20 nt, Artificial Sequence
  spacer sequence TTCN PAM
ggagcuucagcuaacagccu

SEQ ID NO: 18876 - RNA, 20 nt, Artificial Sequence
  spacer sequence TTCN PAM
gcuaacagccuaccucagau

SEQ ID NO: 18877 - RNA, 20 nt, Artificial Sequence
  spacer sequence TTCN PAM
gagagccuaggagugaaucu

SEQ ID NO: 18878 - RNA, 20 nt, Artificial Sequence
  spacer sequence TTCN PAM
uuggguaggggguccccuca

SEQ ID NO: 18879 - RNA, 20 nt, Artificial Sequence
  spacer sequence TTCN PAM
aaacucagcauuucuagcuu

SEQ ID NO: 18880 - RNA, 20 nt, Artificial Sequence
  spacer sequence TTCN PAM
agcuuccaauacagauaccu

SEQ ID NO: 18881 - RNA, 20 nt, Artificial Sequence
  spacer sequence TTCN PAM
aauacagauaccucauuuuu

SEQ ID NO: 18882 - RNA, 20 nt, Artificial Sequence
  spacer sequence TTCN PAM
cauugcaacucugcccuuua

SEQ ID NO: 18883 - RNA, 20 nt, Artificial Sequence
  spacer sequence TTCN PAM
auaaucaaacugcuggguuc

SEQ ID NO: 18884 - RNA, 20 nt, Artificial Sequence
  spacer sequence TTCN PAM
ccagcaccagccaccugucc

SEQ ID NO: 18885 - RNA, 20 nt, Artificial Sequence
  spacer sequence TTCN PAM
uuuccaucuucaggucauua

SEQ ID NO: 18886 - RNA, 20 nt, Artificial Sequence
  spacer sequence TTCN PAM
aucuucaggucauuacaagg

SEQ ID NO: 18887 - RNA, 20 nt, Artificial Sequence
  spacer sequence TTCN PAM
ggucauuacaagggccuucc

SEQ ID NO: 18888 - RNA, 20 nt, Artificial Sequence
  spacer sequence TTCN PAM
cugaagccaacuaaauccuu

SEQ ID NO: 18889 - RNA, 20 nt, Artificial Sequence
  spacer sequence TTCN PAM
gggaaggcccuuguaaugac

SEQ ID NO: 18890 - RNA, 20 nt, Artificial Sequence
  spacer sequence TTCN PAM
ccuaauuuuggcaccuccac

SEQ ID NO: 18891 - RNA, 20 nt, Artificial Sequence
  spacer sequence TTCN PAM
agccaagcacagaggaaggg

SEQ ID NO: 18892 - RNA, 20 nt, Artificial Sequence
  spacer sequence TTCN PAM
ucugugcuuggcuggaagcc

SEQ ID NO: 18893 - RNA, 20 nt, Artificial Sequence
  spacer sequence TTCN PAM
uacccuuccucugugcuugg

SEQ ID NO: 18894 - RNA, 20 nt, Artificial Sequence
  spacer sequence TTCN PAM
uucauacccuuccucugugc

SEQ ID NO: 18895 - RNA, 20 nt, Artificial Sequence
  spacer sequence TTCN PAM
aauagccucaaagcaagauc

SEQ ID NO: 18896 - RNA, 20 nt, Artificial Sequence
  spacer sequence TTCN PAM
ugugaucuugcuuugaggcu

SEQ ID NO: 18897 - RNA, 20 nt, Artificial Sequence
  spacer sequence TTCN PAM
gcaagacugcacgacauuuu

SEQ ID NO: 18898 - RNA, 20 nt, Artificial Sequence
  spacer sequence TTCN PAM
uuuuucuuuuuucuuuuuuu

SEQ ID NO: 18899 - RNA, 20 nt, Artificial Sequence
  spacer sequence TTCN PAM
uuuuucuuuuuuuuuuuuuu

SEQ ID NO: 18900 - RNA, 20 nt, Artificial Sequence
  spacer sequence TTCN PAM
uuuuuuuuuuuuuuuggaga

SEQ ID NO: 18901 - RNA, 20 nt, Artificial Sequence
  spacer sequence TTCN PAM
agaagacaaauggacuaacc

SEQ ID NO: 18902 - RNA, 20 nt, Artificial Sequence
  spacer sequence TTCN PAM
ggaaaaauguuguggcuggg

SEQ ID NO: 18903 - RNA, 20 nt, Artificial Sequence
  spacer sequence TTCN PAM
uagucccaggaucaauauga

SEQ ID NO: 18904 - RNA, 20 nt, Artificial Sequence
  spacer sequence TTCN PAM
uuuaugaaguagagucuaua

SEQ ID NO: 18905 - RNA, 20 nt, Artificial Sequence
  spacer sequence TTCN PAM
ugcucaugcaaaggacaagc

SEQ ID NO: 18906 - RNA, 20 nt, Artificial Sequence
  spacer sequence TTCN PAM
uccuccauugaaaggaaagg

SEQ ID NO: 18907 - RNA, 20 nt, Artificial Sequence
  spacer sequence TTCN PAM
auggaggaggaagcuugucc

SEQ ID NO: 18908 - RNA, 20 nt, Artificial Sequence
  spacer sequence TTCN PAM
uuucaauggaggaggaagcu

SEQ ID NO: 18909 - RNA, 20 nt, Artificial Sequence
  spacer sequence TTCN PAM
uuuccuuucaauggaggagg

SEQ ID NO: 18910 - RNA, 20 nt, Artificial Sequence
  spacer sequence TTCN PAM
cccuuccuuuccuuucaaug

SEQ ID NO: 18911 - RNA, 20 nt, Artificial Sequence
  spacer sequence TTCN PAM
ugccucacggaaggugagag

SEQ ID NO: 18912 - RNA, 20 nt, Artificial Sequence
  spacer sequence TTCN PAM
gugaggcaggaagccccagc

SEQ ID NO: 18913 - RNA, 20 nt, Artificial Sequence
  spacer sequence TTCN PAM
gucucccucucccucucuca

SEQ ID NO: 18914 - RNA, 20 nt, Artificial Sequence
  spacer sequence TTCN PAM
uuuuugaagcagaggucacu

SEQ ID NO: 18915 - RNA, 20 nt, Artificial Sequence
  spacer sequence TTCN PAM
uggcaguuauucauuuuuga

SEQ ID NO: 18916 - RNA, 20 nt, Artificial Sequence
  spacer sequence TTCN PAM
uuugcuguggcucuccgcau

SEQ ID NO: 18917 - RNA, 20 nt, Artificial Sequence
  spacer sequence TTCN PAM
agggucagauguuuacagag

SEQ ID NO: 18918 - RNA, 20 nt, Artificial Sequence
  spacer sequence TTCN PAM
cuguaaacaucugacccuag

SEQ ID NO: 18919 - RNA, 20 nt, Artificial Sequence
  spacer sequence TTCN PAM
agcacuggcaccugccugcc

SEQ ID NO: 18920 - RNA, 20 nt, Artificial Sequence
  spacer sequence TTCN PAM
agcaaauuuuauuuaugcac

SEQ ID NO: 18921 - RNA, 20 nt, Artificial Sequence
  spacer sequence TTCN PAM
agugugcauaaauaaaauuu

SEQ ID NO: 18922 - RNA, 20 nt, Artificial Sequence
  spacer sequence TTCN PAM
aauuccagugugcauaaaua

SEQ ID NO: 18923 - RNA, 20 nt, Artificial Sequence
  spacer sequence TTCN PAM
uauaauuuucaggugucacc

SEQ ID NO: 18924 - RNA, 20 nt, Artificial Sequence
  spacer sequence TTCN PAM
ggugucaccaaagagugucc

SEQ ID NO: 18925 - RNA, 20 nt, Artificial Sequence
  spacer sequence TTCN PAM
uuugauuuuuuuucaacuau

SEQ ID NO: 18926 - RNA, 20 nt, Artificial Sequence
  spacer sequence TTCN PAM
acuauuuaaaauuguaaaac

SEQ ID NO: 18927 - RNA, 20 nt, Artificial Sequence
  spacer sequence TTCN PAM
uagcucacaagccacgcaaa

SEQ ID NO: 18928 - RNA, 20 nt, Artificial Sequence
  spacer sequence TTCN PAM
caugcauauuuuaauacuga

SEQ ID NO: 18929 - RNA, 20 nt, Artificial Sequence
  spacer sequence TTCN PAM
guauuaaaauaugcauggga

SEQ ID NO: 18930 - RNA, 20 nt, Artificial Sequence
  spacer sequence TTCN PAM
uauaaaugguauuauauggu

SEQ ID NO: 18931 - RNA, 20 nt, Artificial Sequence
  spacer sequence TTCN PAM
cuucuacagcugaucacucu

SEQ ID NO: 18932 - RNA, 20 nt, Artificial Sequence
  spacer sequence TTCN PAM
acagcugaucacucuuuuuc

SEQ ID NO: 18933 - RNA, 20 nt, Artificial Sequence
  spacer sequence TTCN PAM
acaucaaauuugcugagauu

SEQ ID NO: 18934 - RNA, 20 nt, Artificial Sequence
  spacer sequence TTCN PAM
guuaauucaucuuaacugcu

SEQ ID NO: 18935 - RNA, 20 nt, Artificial Sequence
  spacer sequence TTCN PAM
ucuuaacugcuguauaggaa

SEQ ID NO: 18936 - RNA, 20 nt, Artificial Sequence
  spacer sequence TTCN PAM
augauggucuuuuuuaauuu

SEQ ID NO: 18937 - RNA, 20 nt, Artificial Sequence
  spacer sequence TTCN PAM
cucccugaucacucacaggu

SEQ ID NO: 18938 - RNA, 20 nt, Artificial Sequence
  spacer sequence TTCN PAM
ugggcucccacugaccagca

SEQ ID NO: 18939 - RNA, 20 nt, Artificial Sequence
  spacer sequence TTCN PAM
cucucuggguuaaaugugaa

SEQ ID NO: 18940 - RNA, 20 nt, Artificial Sequence
  spacer sequence TTCN PAM
cauuuaacccagagagagaa

SEQ ID NO: 18941 - RNA, 20 nt, Artificial Sequence
  spacer sequence TTCN PAM
gagccauucacauuuaaccc

SEQ ID NO: 18942 - RNA, 20 nt, Artificial Sequence
  spacer sequence TTCN PAM
agcauguauuucugagccau

SEQ ID NO: 18943 - RNA, 20 nt, Artificial Sequence
  spacer sequence TTCN PAM
ucaugugcagcacucagggu

SEQ ID NO: 18944 - RNA, 20 nt, Artificial Sequence
  spacer sequence TTCN PAM
ccccacaccccagugguuca

SEQ ID NO: 18945 - RNA, 20 nt, Artificial Sequence
  spacer sequence TTCN PAM
accuucaauuuuucuaauau

SEQ ID NO: 18946 - RNA, 20 nt, Artificial Sequence
  spacer sequence TTCN PAM
auuuuucuaauauacaauua

SEQ ID NO: 18947 - RNA, 20 nt, Artificial Sequence
  spacer sequence TTCN PAM
aauauacaauuacauucauu

SEQ ID NO: 18948 - RNA, 20 nt, Artificial Sequence
  spacer sequence TTCN PAM
uuuucaguugccaccaaaau

SEQ ID NO: 18949 - RNA, 20 nt, Artificial Sequence
  spacer sequence TTCN PAM
guugccaccaaaauaaauua

SEQ ID NO: 18950 - RNA, 20 nt, Artificial Sequence
  spacer sequence TTCN PAM
gggccaguugaacucaguug

SEQ ID NO: 18951 - RNA, 20 nt, Artificial Sequence
  spacer sequence TTCN PAM
acuggcccagaaacugagau

SEQ ID NO: 18952 - RNA, 20 nt, Artificial Sequence
  spacer sequence TTCN PAM
ccagaaccuuuaggaggaag

SEQ ID NO: 18953 - RNA, 20 nt, Artificial Sequence
  spacer sequence TTCN PAM
uccccagaaccuuuaggagg

SEQ ID NO: 18954 - RNA, 20 nt, Artificial Sequence
  spacer sequence TTCN PAM
agcuuguccagguugcuggc

SEQ ID NO: 18955 - RNA, 20 nt, Artificial Sequence
  spacer sequence TTCN PAM
gccagcaaccuggacaagcu

SEQ ID NO: 18956 - RNA, 20 nt, Artificial Sequence
  spacer sequence TTCN PAM
guuucuuguggcuagaggac

SEQ ID NO: 18957 - RNA, 20 nt, Artificial Sequence
  spacer sequence TTCN PAM
uguggcuagaggacugcugu

SEQ ID NO: 18958 - RNA, 20 nt, Artificial Sequence
  spacer sequence TTCN PAM
cucaagacaucucagauauc

SEQ ID NO: 18959 - RNA, 20 nt, Artificial Sequence
  spacer sequence TTCN PAM
caccuuucccucaagacauc

SEQ ID NO: 18960 - RNA, 20 nt, Artificial Sequence
  spacer sequence TTCN PAM
ucugucacuaugugcuaaaa

SEQ ID NO: 18961 - RNA, 20 nt, Artificial Sequence
  spacer sequence TTCN PAM
caguggccaagaaucagaaa

SEQ ID NO: 18962 - RNA, 20 nt, Artificial Sequence
  spacer sequence TTCN PAM
uggccacugugaaggcacag

SEQ ID NO: 18963 - RNA, 20 nt, Artificial Sequence
  spacer sequence TTCN PAM
gauucuuggccacugugaag

SEQ ID NO: 18964 - RNA, 20 nt, Artificial Sequence
  spacer sequence TTCN PAM
gcuaaaacaagaguguaggg

SEQ ID NO: 18965 - RNA, 20 nt, Artificial Sequence
  spacer sequence TTCN PAM
ucagcuaaaacaagagugua

SEQ ID NO: 18966 - RNA, 20 nt, Artificial Sequence
  spacer sequence TTCN PAM
uaacguucuucagcuaaaac

SEQ ID NO: 18967 - RNA, 20 nt, Artificial Sequence
  spacer sequence TTCN PAM
uuucuuaacguucuucagcu

SEQ ID NO: 18968 - RNA, 20 nt, Artificial Sequence
  spacer sequence TTCN PAM
cuuucgagguacuguuuacu

SEQ ID NO: 18969 - RNA, 20 nt, Artificial Sequence
  spacer sequence TTCN PAM
agguacuguuuacugaggug

SEQ ID NO: 18970 - RNA, 20 nt, Artificial Sequence
  spacer sequence TTCN PAM
uguguuuggguccagcagga

SEQ ID NO: 18971 - RNA, 20 nt, Artificial Sequence
  spacer sequence TTCN PAM
gaggcucucaacuccugcug

SEQ ID NO: 18972 - RNA, 20 nt, Artificial Sequence
  spacer sequence TTCN PAM
ugugcaagacuuuacacauu

SEQ ID NO: 18973 - RNA, 20 nt, Artificial Sequence
  spacer sequence TTCN PAM
aucaauccggcaccuauggg

SEQ ID NO: 18974 - RNA, 20 nt, Artificial Sequence
  spacer sequence TTCN PAM
ugucccauaggugccggauu

SEQ ID NO: 18975 - RNA, 20 nt, Artificial Sequence
  spacer sequence TTCN PAM
uuuuuauuuggcuaucuggc

SEQ ID NO: 18976 - RNA, 20 nt, Artificial Sequence
  spacer sequence TTCN PAM
ugaaguuaauuaaugcugag

SEQ ID NO: 18977 - RNA, 20 nt, Artificial Sequence
  spacer sequence TTCN PAM
ggaaaguaaaaggugauucu

SEQ ID NO: 18978 - RNA, 20 nt, Artificial Sequence
  spacer sequence TTCN PAM
cugagcaaagacuccacauu

SEQ ID NO: 18979 - RNA, 20 nt, Artificial Sequence
  spacer sequence TTCN PAM
ucuguaccucccagcuaggc

SEQ ID NO: 18980 - RNA, 20 nt, Artificial Sequence
  spacer sequence TTCN PAM
cuucacacuccuucuggugu

SEQ ID NO: 18981 - RNA, 20 nt, Artificial Sequence
  spacer sequence TTCN PAM
cacuccuucugguguuuccc

SEQ ID NO: 18982 - RNA, 20 nt, Artificial Sequence
  spacer sequence TTCN PAM
gguguuucccuucugggucu

SEQ ID NO: 18983 - RNA, 20 nt, Artificial Sequence
  spacer sequence TTCN PAM
cuucugggucuuauuuuuau

SEQ ID NO: 18984 - RNA, 20 nt, Artificial Sequence
  spacer sequence TTCN PAM
gggucuuauuuuuauucauu

SEQ ID NO: 18985 - RNA, 20 nt, Artificial Sequence
  spacer sequence TTCN PAM
uuuuuccaguuuauaaaaca

SEQ ID NO: 18986 - RNA, 20 nt, Artificial Sequence
  spacer sequence TTCN PAM
aguuuauaaaacacacucac

SEQ ID NO: 18987 - RNA, 20 nt, Artificial Sequence
  spacer sequence TTCN PAM
acaugugccccaagggccca

SEQ ID NO: 18988 - RNA, 20 nt, Artificial Sequence
  spacer sequence TTCN PAM
ugacucuaagucagucuguu

SEQ ID NO: 18989 - RNA, 20 nt, Artificial Sequence
  spacer sequence TTCN PAM
uaggguuuugguucuugacu

SEQ ID NO: 18990 - RNA, 20 nt, Artificial Sequence
  spacer sequence TTCN PAM
ccucuaucucgcccccaccc

SEQ ID NO: 18991 - RNA, 20 nt, Artificial Sequence
  spacer sequence TTCN PAM
ccucccauauuuccuaaaag

SEQ ID NO: 18992 - RNA, 20 nt, Artificial Sequence
  spacer sequence TTCN PAM
uaaaagguccauaaaguugg

SEQ ID NO: 18993 - RNA, 20 nt, Artificial Sequence
  spacer sequence TTCN PAM
aaaggaaagggagguaggua

SEQ ID NO: 18994 - RNA, 20 nt, Artificial Sequence
  spacer sequence TTCN PAM
uuuggaaaaagcccaacuuu

SEQ ID NO: 18995 - RNA, 20 nt, Artificial Sequence
  spacer sequence TTCN PAM
gauaccuaccucccuuuccu

SEQ ID NO: 18996 - RNA, 20 nt, Artificial Sequence
  spacer sequence TTCN PAM
cuuaauaucuugauccaagg

SEQ ID NO: 18997 - RNA, 20 nt, Artificial Sequence
  spacer sequence TTCN PAM
cggagccuggugcuguagcc

SEQ ID NO: 18998 - RNA, 20 nt, Artificial Sequence
  spacer sequence TTCN PAM
agcaaccccuuugccaaacc

SEQ ID NO: 18999 - RNA, 20 nt, Artificial Sequence
  spacer sequence TTCN PAM
ggaggcuguccagggccugg

SEQ ID NO: 19000 - RNA, 20 nt, Artificial Sequence
  spacer sequence TTCN PAM
uaggagugacccggauguuc

SEQ ID NO: 19001 - RNA, 20 nt, Artificial Sequence
  spacer sequence TTCN PAM
cacaucaggaagggaaauaa

SEQ ID NO: 19002 - RNA, 20 nt, Artificial Sequence
  spacer sequence TTCN PAM
ugaugugggaaaucugagcu

SEQ ID NO: 19003 - RNA, 20 nt, Artificial Sequence
  spacer sequence TTCN PAM
cuuccugaugugggaaaucu

SEQ ID NO: 19004 - RNA, 20 nt, Artificial Sequence
  spacer sequence TTCN PAM
uaggccgggcgcagcaucuc

SEQ ID NO: 19005 - RNA, 20 nt, Artificial Sequence
  spacer sequence TTCN PAM
uugagggcccaaacaagaug

SEQ ID NO: 19006 - RNA, 20 nt, Artificial Sequence
  spacer sequence TTCN PAM
aaggcccaaucuucccuccc

SEQ ID NO: 19007 - RNA, 20 nt, Artificial Sequence
  spacer sequence TTCN PAM
cucccuuuuaaaaagugugc

SEQ ID NO: 19008 - RNA, 20 nt, Artificial Sequence
  spacer sequence TTCN PAM
agagcacacucuuuuuuuug

SEQ ID NO: 19009 - RNA, 20 nt, Artificial Sequence
  spacer sequence TTCN PAM
ucagaugaucagucagcugu

SEQ ID NO: 19010 - RNA, 20 nt, Artificial Sequence
  spacer sequence TTCN PAM
ccuaaagugcacgaggccca

SEQ ID NO: 19011 - RNA, 20 nt, Artificial Sequence
  spacer sequence TTCN PAM
ucuggggggucaaggaaggc

SEQ ID NO: 19012 - RNA, 20 nt, Artificial Sequence
  spacer sequence TTCN PAM
uugaccccccagaugaaguc

SEQ ID NO: 19013 - RNA, 20 nt, Artificial Sequence
  spacer sequence TTCN PAM
gagggcagacauucaagcug

SEQ ID NO: 19014 - RNA, 20 nt, Artificial Sequence
  spacer sequence TTCN PAM
agcuggaaacugaaggacac

SEQ ID NO: 19015 - RNA, 20 nt, Artificial Sequence
  spacer sequence TTCN PAM
agcuugaaugucugcccuca

SEQ ID NO: 19016 - RNA, 20 nt, Artificial Sequence
  spacer sequence TTCN PAM
guuuccagcuugaaugucug

SEQ ID NO: 19017 - RNA, 20 nt, Artificial Sequence
  spacer sequence TTCN PAM
ccuguuuaacuccauguguc

SEQ ID NO: 19018 - RNA, 20 nt, Artificial Sequence
  spacer sequence TTCN PAM
uccacuguucaccuguuuaa

SEQ ID NO: 19019 - RNA, 20 nt, Artificial Sequence
  spacer sequence TTCN PAM
ccauggugccugccucaaaa

SEQ ID NO: 19020 - RNA, 20 nt, Artificial Sequence
  spacer sequence TTCN PAM
gucuucuccauggugccugc

SEQ ID NO: 19021 - RNA, 20 nt, Artificial Sequence
  spacer sequence TTCN PAM
cguuuuuaaaaagaucucuc

SEQ ID NO: 19022 - RNA, 20 nt, Artificial Sequence
  spacer sequence TTCN PAM
agaccacccugggcaauaug

SEQ ID NO: 19023 - RNA, 20 nt, Artificial Sequence
  spacer sequence TTCN PAM
ccauauugcccagggugguc

SEQ ID NO: 19024 - RNA, 20 nt, Artificial Sequence
  spacer sequence TTCN PAM
uaugccucagccuccugggu

SEQ ID NO: 19025 - RNA, 20 nt, Artificial Sequence
  spacer sequence TTCN PAM
agcaauucuuaugccucagc

SEQ ID NO: 19026 - RNA, 20 nt, Artificial Sequence
  spacer sequence TTCN PAM
agggagaguuuuuuuuuuuu

SEQ ID NO: 19027 - RNA, 20 nt, Artificial Sequence
  spacer sequence TTCN PAM
uggagcucugagaaacgugg

SEQ ID NO: 19028 - RNA, 20 nt, Artificial Sequence
  spacer sequence TTCN PAM
cagagcuccaggaacaacag

SEQ ID NO: 19029 - RNA, 20 nt, Artificial Sequence
  spacer sequence TTCN PAM
aaccacguuucucagagcuc

SEQ ID NO: 19030 - RNA, 20 nt, Artificial Sequence
  spacer sequence TTCN PAM
ucagguuggcccuuuucaaa

SEQ ID NO: 19031 - RNA, 20 nt, Artificial Sequence
  spacer sequence TTCN PAM
uuuccaucagugauugacuu

SEQ ID NO: 19032 - RNA, 20 nt, Artificial Sequence
  spacer sequence TTCN PAM
aucagugauugacuuuugug

SEQ ID NO: 19033 - RNA, 20 nt, Artificial Sequence
  spacer sequence TTCN PAM
gaugguuugcugagaauguu

SEQ ID NO: 19034 - RNA, 20 nt, Artificial Sequence
  spacer sequence TTCN PAM
cagcaaaccaucugaaugca

SEQ ID NO: 19035 - RNA, 20 nt, Artificial Sequence
  spacer sequence TTCN PAM
ugucugccagagcaacauuc

SEQ ID NO: 19036 - RNA, 20 nt, Artificial Sequence
  spacer sequence TTCN PAM
cuuucgugucugccagagca

SEQ ID NO: 19037 - RNA, 20 nt, Artificial Sequence
  spacer sequence TTCN PAM
cacauucucuuucgugucug

SEQ ID NO: 19038 - RNA, 20 nt, Artificial Sequence
  spacer sequence TTCN PAM
ggagcaccaugaauguagac

SEQ ID NO: 19039 - RNA, 20 nt, Artificial Sequence
  spacer sequence TTCN PAM
uggugcuccagaacuguguc

SEQ ID NO: 19040 - RNA, 20 nt, Artificial Sequence
  spacer sequence TTCN PAM
ugguuacccaguguggggau

SEQ ID NO: 19041 - RNA, 20 nt, Artificial Sequence
  spacer sequence TTCN PAM
ggugagacccgcucuuccug

SEQ ID NO: 19042 - RNA, 20 nt, Artificial Sequence
  spacer sequence TTCN PAM
ugaggggcgcuucaggcacc

SEQ ID NO: 19043 - RNA, 20 nt, Artificial Sequence
  spacer sequence TTCN PAM
ggcaccagaggccccugcuc

SEQ ID NO: 19044 - RNA, 20 nt, Artificial Sequence
  spacer sequence TTCN PAM
gccaggccaaccagacuccu

SEQ ID NO: 19045 - RNA, 20 nt, Artificial Sequence
  spacer sequence TTCN PAM
aaucucuggugguugaggag

SEQ ID NO: 19046 - RNA, 20 nt, Artificial Sequence
  spacer sequence TTCN PAM
ucuaaucucuggugguugag

SEQ ID NO: 19047 - RNA, 20 nt, Artificial Sequence
  spacer sequence TTCN PAM
ucacuugauuuagaggcaau

SEQ ID NO: 19048 - RNA, 20 nt, Artificial Sequence
  spacer sequence TTCN PAM
caaaccucaggacaaaucgu

SEQ ID NO: 19049 - RNA, 20 nt, Artificial Sequence
  spacer sequence TTCN PAM
uccugaggcaaagaaaaaca

SEQ ID NO: 19050 - RNA, 20 nt, Artificial Sequence
  spacer sequence TTCN PAM
ugaggcaaagaaaaacaaaa

SEQ ID NO: 19051 - RNA, 20 nt, Artificial Sequence
  spacer sequence TTCN PAM
uugccucaggaagaaugugu

SEQ ID NO: 19052 - RNA, 20 nt, Artificial Sequence
  spacer sequence TTCN PAM
ucugggcaggaggagucaaa

SEQ ID NO: 19053 - RNA, 20 nt, Artificial Sequence
  spacer sequence TTCN PAM
agaagaacacuguucuccag

SEQ ID NO: 19054 - RNA, 20 nt, Artificial Sequence
  spacer sequence TTCN PAM
ggaagcuuccucugggcagg

SEQ ID NO: 19055 - RNA, 20 nt, Artificial Sequence
  spacer sequence TTCN PAM
ucuggaagcuuccucugggc

SEQ ID NO: 19056 - RNA, 20 nt, Artificial Sequence
  spacer sequence TTCN PAM
ccaguggcuguugggcugug

SEQ ID NO: 19057 - RNA, 20 nt, Artificial Sequence
  spacer sequence TTCN PAM
caggaaagggaagugggguc

SEQ ID NO: 19058 - RNA, 20 nt, Artificial Sequence
  spacer sequence TTCN PAM
ugugaaaaauaccacagccc

SEQ ID NO: 19059 - RNA, 20 nt, Artificial Sequence
  spacer sequence TTCN PAM
cuuuccugugaaaaauacca

SEQ ID NO: 19060 - RNA, 20 nt, Artificial Sequence
  spacer sequence TTCN PAM
cacagagaccccacuucccu

SEQ ID NO: 19061 - RNA, 20 nt, Artificial Sequence
  spacer sequence TTCN PAM
ggggaccuggggcagguggc

SEQ ID NO: 19062 - RNA, 20 nt, Artificial Sequence
  spacer sequence TTCN PAM
gcuccagcucucuucacaga

SEQ ID NO: 19063 - RNA, 20 nt, Artificial Sequence
  spacer sequence TTCN PAM
cagacccugaguggggagag

SEQ ID NO: 19064 - RNA, 20 nt, Artificial Sequence
  spacer sequence TTCN PAM
uccugcuuccauccuucaug

SEQ ID NO: 19065 - RNA, 20 nt, Artificial Sequence
  spacer sequence TTCN PAM
auccuucaugcagugcauga

SEQ ID NO: 19066 - RNA, 20 nt, Artificial Sequence
  spacer sequence TTCN PAM
ugcagugcaugaauaaauga

SEQ ID NO: 19067 - RNA, 20 nt, Artificial Sequence
  spacer sequence TTCN PAM
ugcacugcaugaaggaugga

SEQ ID NO: 19068 - RNA, 20 nt, Artificial Sequence
  spacer sequence TTCN PAM
uuuauucaugcacugcauga

SEQ ID NO: 19069 - RNA, 20 nt, Artificial Sequence
  spacer sequence TTCN PAM
cuuucauuuauucaugcacu

SEQ ID NO: 19070 - RNA, 20 nt, Artificial Sequence
  spacer sequence TTCN PAM
gcugaguacaccuucucuuu

SEQ ID NO: 19071 - RNA, 20 nt, Artificial Sequence
  spacer sequence TTCN PAM
uuucagcugaguacaccuuc

SEQ ID NO: 19072 - RNA, 20 nt, Artificial Sequence
  spacer sequence TTCN PAM
uuuuuauuuuccuuucagcu

SEQ ID NO: 19073 - RNA, 20 nt, Artificial Sequence
  spacer sequence TTCN PAM
cuucuuuuuuauuuuccuuu

SEQ ID NO: 19074 - RNA, 20 nt, Artificial Sequence
  spacer sequence TTCN PAM
uguuuuggccgggggggugu

SEQ ID NO: 19075 - RNA, 20 nt, Artificial Sequence
  spacer sequence TTCN PAM
aaaagccauugcauagguua

SEQ ID NO: 19076 - RNA, 20 nt, Artificial Sequence
  spacer sequence TTCN PAM
cuggggcgauuuuaaccuau

SEQ ID NO: 19077 - RNA, 20 nt, Artificial Sequence
  spacer sequence TTCN PAM
uggucauuuauuugagcuuu

SEQ ID NO: 19078 - RNA, 20 nt, Artificial Sequence
  spacer sequence TTCN PAM
auuaagcaccacagcccaag

SEQ ID NO: 19079 - RNA, 20 nt, Artificial Sequence
  spacer sequence TTCN PAM
caaaggaggccaucagcuaa

SEQ ID NO: 19080 - RNA, 20 nt, Artificial Sequence
  spacer sequence TTCN PAM
uagcugauggccuccuuugu

SEQ ID NO: 19081 - RNA, 20 nt, Artificial Sequence
  spacer sequence TTCN PAM
guuaaugaugacugagggug

SEQ ID NO: 19082 - RNA, 20 nt, Artificial Sequence
  spacer sequence TTCN PAM
ccacccucagucaucauuaa

SEQ ID NO: 19083 - RNA, 20 nt, Artificial Sequence
  spacer sequence TTCN PAM
cuuucuccacccucagucau

SEQ ID NO: 19084 - RNA, 20 nt, Artificial Sequence
  spacer sequence TTCN PAM
ccuucucuuucuccacccuc

SEQ ID NO: 19085 - RNA, 20 nt, Artificial Sequence
  spacer sequence TTCN PAM
ucuccuucucuuucuccacc

SEQ ID NO: 19086 - RNA, 20 nt, Artificial Sequence
  spacer sequence TTCN PAM
cuucuauuuuucacaacugc

SEQ ID NO: 19087 - RNA, 20 nt, Artificial Sequence
  spacer sequence TTCN PAM
auuuuucacaacugccccug

SEQ ID NO: 19088 - RNA, 20 nt, Artificial Sequence
  spacer sequence TTCN PAM
caacugccccugcuuuuccc

SEQ ID NO: 19089 - RNA, 20 nt, Artificial Sequence
  spacer sequence TTCN PAM
cuguucccccuccucuguug

SEQ ID NO: 19090 - RNA, 20 nt, Artificial Sequence
  spacer sequence TTCN PAM
cccuccucuguugaacagua

SEQ ID NO: 19091 - RNA, 20 nt, Artificial Sequence
  spacer sequence TTCN PAM
acagaggagggggaacaggg

SEQ ID NO: 19092 - RNA, 20 nt, Artificial Sequence
  spacer sequence TTCN PAM
guacuguucaacagaggagg

SEQ ID NO: 19093 - RNA, 20 nt, Artificial Sequence
  spacer sequence TTCN PAM
uacccagucugccuuaccug

SEQ ID NO: 19094 - RNA, 20 nt, Artificial Sequence
  spacer sequence TTCN PAM
caaaugauccuuucuuaccc

SEQ ID NO: 19095 - RNA, 20 nt, Artificial Sequence
  spacer sequence TTCN PAM
aaacuccuuuucccaaauga

SEQ ID NO: 19096 - RNA, 20 nt, Artificial Sequence
  spacer sequence TTCN PAM
uccugacaccuuguugccaa

SEQ ID NO: 19097 - RNA, 20 nt, Artificial Sequence
  spacer sequence TTCN PAM
ugacaccuuguugccaacag

SEQ ID NO: 19098 - RNA, 20 nt, Artificial Sequence
  spacer sequence TTCN PAM
ugugugcaugcuggugacug

SEQ ID NO: 19099 - RNA, 20 nt, Artificial Sequence
  spacer sequence TTCN PAM
ccacaagccaagagguaaaa

SEQ ID NO: 19100 - RNA, 20 nt, Artificial Sequence
  spacer sequence TTCN PAM
gcuccccacacuuaaaugca

SEQ ID NO: 19101 - RNA, 20 nt, Artificial Sequence
  spacer sequence TTCN PAM
guggcucacgccuguaauuc

SEQ ID NO: 19102 - RNA, 20 nt, Artificial Sequence
  spacer sequence TTCN PAM
aacacuuugggaggcugagg

SEQ ID NO: 19103 - RNA, 20 nt, Artificial Sequence
  spacer sequence TTCN PAM
agaccagccuggcugacaug

SEQ ID NO: 19104 - RNA, 20 nt, Artificial Sequence
  spacer sequence TTCN PAM
gaguuacuguggaagaggug

SEQ ID NO: 19105 - RNA, 20 nt, Artificial Sequence
  spacer sequence TTCN PAM
ugcacuccucugcucccagg

SEQ ID NO: 19106 - RNA, 20 nt, Artificial Sequence
  spacer sequence TTCN PAM
ugggagcagaggagugcaug

SEQ ID NO: 19107 - RNA, 20 nt, Artificial Sequence
  spacer sequence TTCN PAM
aucuuauuugucauguguaa

SEQ ID NO: 19108 - RNA, 20 nt, Artificial Sequence
  spacer sequence TTCN PAM
ccugccucaaccuccccagu

SEQ ID NO: 19109 - RNA, 20 nt, Artificial Sequence
  spacer sequence TTCN PAM
agugauucuccugccucaac

SEQ ID NO: 19110 - RNA, 20 nt, Artificial Sequence
  spacer sequence TTCN PAM
caaccagaggcaauuucacc

SEQ ID NO: 19111 - RNA, 20 nt, Artificial Sequence
  spacer sequence TTCN PAM
cccuccacucccaaggacau

SEQ ID NO: 19112 - RNA, 20 nt, Artificial Sequence
  spacer sequence TTCN PAM
ccugcccaaaaugucaacag

SEQ ID NO: 19113 - RNA, 20 nt, Artificial Sequence
  spacer sequence TTCN PAM
uaaccucugcacuguugaca

SEQ ID NO: 19114 - RNA, 20 nt, Artificial Sequence
  spacer sequence TTCN PAM
gagguucuuaaccucugcac

SEQ ID NO: 19115 - RNA, 20 nt, Artificial Sequence
  spacer sequence TTCN PAM
cagagcaaggauaucccauu

SEQ ID NO: 19116 - RNA, 20 nt, Artificial Sequence
  spacer sequence TTCN PAM
gcuaauugauuuguagaaga

SEQ ID NO: 19117 - RNA, 20 nt, Artificial Sequence
  spacer sequence TTCN PAM
acaaaucaauuagcagaaua

SEQ ID NO: 19118 - RNA, 20 nt, Artificial Sequence
  spacer sequence TTCN PAM
gaacuuguuuguuuuacuuu

SEQ ID NO: 19119 - RNA, 20 nt, Artificial Sequence
  spacer sequence TTCN PAM
gaaugcaaauuauuuacauu

SEQ ID NO: 19120 - RNA, 20 nt, Artificial Sequence
  spacer sequence TTCN PAM
cacccuuuaguccccgggaa

SEQ ID NO: 19121 - RNA, 20 nt, Artificial Sequence
  spacer sequence TTCN PAM
cggggacuaaagggugugaa

SEQ ID NO: 19122 - RNA, 20 nt, Artificial Sequence
  spacer sequence TTCN PAM
uaaacugguuaagaagcaaa

SEQ ID NO: 19123 - RNA, 20 nt, Artificial Sequence
  spacer sequence TTCN PAM
uaaccaguuuaugaaacacu

SEQ ID NO: 19124 - RNA, 20 nt, Artificial Sequence
  spacer sequence TTCN PAM
ggaauaauguauuuuuuaaa

SEQ ID NO: 19125 - RNA, 20 nt, Artificial Sequence
  spacer sequence TTCN PAM
ugaaaauuugcuucuuaacc

SEQ ID NO: 19126 - RNA, 20 nt, Artificial Sequence
  spacer sequence TTCN PAM
ugccugaguagcagcaagca

SEQ ID NO: 19127 - RNA, 20 nt, Artificial Sequence
  spacer sequence TTCN PAM
gcugugguugucgucagccu

SEQ ID NO: 19128 - RNA, 20 nt, Artificial Sequence
  spacer sequence TTCN PAM
aagagcuuuaacuaaacaaa

SEQ ID NO: 19129 - RNA, 20 nt, Artificial Sequence
  spacer sequence TTCN PAM
agcacggugcuuggcacaga

SEQ ID NO: 19130 - RNA, 20 nt, Artificial Sequence
  spacer sequence TTCN PAM
ucuuacaaaccccauaugga

SEQ ID NO: 19131 - RNA, 20 nt, Artificial Sequence
  spacer sequence TTCN PAM
cuuucucaggaggggguggg

SEQ ID NO: 19132 - RNA, 20 nt, Artificial Sequence
  spacer sequence TTCN PAM
caggagggggugggggucaa

SEQ ID NO: 19133 - RNA, 20 nt, Artificial Sequence
  spacer sequence TTCN PAM
gagguguccgacugugccgu

SEQ ID NO: 19134 - RNA, 20 nt, Artificial Sequence
  spacer sequence TTCN PAM
cagacagggaguggacagcc

SEQ ID NO: 19135 - RNA, 20 nt, Artificial Sequence
  spacer sequence TTCN PAM
uuaacucagaggucagcaga

SEQ ID NO: 19136 - RNA, 20 nt, Artificial Sequence
  spacer sequence TTCN PAM
caggacucuguccgccucuu

SEQ ID NO: 19137 - RNA, 20 nt, Artificial Sequence
  spacer sequence TTCN PAM
ucccccacacccuuccagau

SEQ ID NO: 19138 - RNA, 20 nt, Artificial Sequence
  spacer sequence TTCN PAM
agaugcucucgaguccucug

SEQ ID NO: 19139 - RNA, 20 nt, Artificial Sequence
  spacer sequence TTCN PAM
ccacugaggauguucuggcu

SEQ ID NO: 19140 - RNA, 20 nt, Artificial Sequence
  spacer sequence TTCN PAM
ucauaauuaagauuccccac

SEQ ID NO: 19141 - RNA, 20 nt, Artificial Sequence
  spacer sequence TTCN PAM
aacuuccuggaguucagagg

SEQ ID NO: 19142 - RNA, 20 nt, Artificial Sequence
  spacer sequence TTCN PAM
uggaguucagagggguccag

SEQ ID NO: 19143 - RNA, 20 nt, Artificial Sequence
  spacer sequence TTCN PAM
gagggguccagugugugcau

SEQ ID NO: 19144 - RNA, 20 nt, Artificial Sequence
  spacer sequence TTCN PAM
uaacccgagaagcuucaaac

SEQ ID NO: 19145 - RNA, 20 nt, Artificial Sequence
  spacer sequence TTCN PAM
cggguuaugaagggaugaua

SEQ ID NO: 19146 - RNA, 20 nt, Artificial Sequence
  spacer sequence TTCN PAM
aaccuuuaaagaauuagaua

SEQ ID NO: 19147 - RNA, 20 nt, Artificial Sequence
  spacer sequence TTCN PAM
uuaaagguuugaagcuucuc

SEQ ID NO: 19148 - RNA, 20 nt, Artificial Sequence
  spacer sequence TTCN PAM
uuccuuuaaaaaaaaaaaau

SEQ ID NO: 19149 - RNA, 20 nt, Artificial Sequence
  spacer sequence TTCN PAM
gcuucucccuaaaauguguu

SEQ ID NO: 19150 - RNA, 20 nt, Artificial Sequence
  spacer sequence TTCN PAM
cccuaaaauguguuuacccu

SEQ ID NO: 19151 - RNA, 20 nt, Artificial Sequence
  spacer sequence TTCN PAM
ggguaaacacauuuuaggga

SEQ ID NO: 19152 - RNA, 20 nt, Artificial Sequence
  spacer sequence TTCN PAM
guaagguuaauucaggguaa

SEQ ID NO: 19153 - RNA, 20 nt, Artificial Sequence
  spacer sequence TTCN PAM
cuagggagcaagaggagggc

SEQ ID NO: 19154 - RNA, 20 nt, Artificial Sequence
  spacer sequence TTCN PAM
ucagaagauugaccauauau

SEQ ID NO: 19155 - RNA, 20 nt, Artificial Sequence
  spacer sequence TTCN PAM
gaugaaaaggcugaggguua

SEQ ID NO: 19156 - RNA, 20 nt, Artificial Sequence
  spacer sequence TTCN PAM
ugauaaggaugaggggccaa

SEQ ID NO: 19157 - RNA, 20 nt, Artificial Sequence
  spacer sequence TTCN PAM
cccaggcuggcuucagucca

SEQ ID NO: 19158 - RNA, 20 nt, Artificial Sequence
  spacer sequence TTCN PAM
guccagaagcucagcucagc

SEQ ID NO: 19159 - RNA, 20 nt, Artificial Sequence
  spacer sequence TTCN PAM
ggacugaagccagccuggga

SEQ ID NO: 19160 - RNA, 20 nt, Artificial Sequence
  spacer sequence TTCN PAM
cuauguccagucugcuucca

SEQ ID NO: 19161 - RNA, 20 nt, Artificial Sequence
  spacer sequence TTCN PAM
agaauccaggacacucccau

SEQ ID NO: 19162 - RNA, 20 nt, Artificial Sequence
  spacer sequence TTCN PAM
ggaagcagacuggacauagg

SEQ ID NO: 19163 - RNA, 20 nt, Artificial Sequence
  spacer sequence TTCN PAM
aaaugcagggccaccaccaa

SEQ ID NO: 19164 - RNA, 20 nt, Artificial Sequence
  spacer sequence TTCN PAM
ucccaccagagguugcugcc

SEQ ID NO: 19165 - RNA, 20 nt, Artificial Sequence
  spacer sequence TTCN PAM
aaugccaaguucuucccacc

SEQ ID NO: 19166 - RNA, 20 nt, Artificial Sequence
  spacer sequence TTCN PAM
agccugucuaauucaaaugc

SEQ ID NO: 19167 - RNA, 20 nt, Artificial Sequence
  spacer sequence TTCN PAM
auucaagccugucuaauuca

SEQ ID NO: 19168 - RNA, 20 nt, Artificial Sequence
  spacer sequence TTCN PAM
ucccauacuggcugugugau

SEQ ID NO: 19169 - RNA, 20 nt, Artificial Sequence
  spacer sequence TTCN PAM
gagagguuaaguaacucagc

SEQ ID NO: 19170 - RNA, 20 nt, Artificial Sequence
  spacer sequence TTCN PAM
ucauguguaaaacauuuaaa

SEQ ID NO: 19171 - RNA, 20 nt, Artificial Sequence
  spacer sequence TTCN PAM
uguguaaaacauuuaaauca

SEQ ID NO: 19172 - RNA, 20 nt, Artificial Sequence
  spacer sequence TTCN PAM
uauuuauaugucagaggagu

SEQ ID NO: 19173 - RNA, 20 nt, Artificial Sequence
  spacer sequence TTCN PAM
uaaguaaaauaagcuuaaaa

SEQ ID NO: 19174 - RNA, 20 nt, Artificial Sequence
  spacer sequence TTCN PAM
ccaguuuuuaagcuuauuuu

SEQ ID NO: 19175 - RNA, 20 nt, Artificial Sequence
  spacer sequence TTCN PAM
uaggagguuugcaugacagc

SEQ ID NO: 19176 - RNA, 20 nt, Artificial Sequence
  spacer sequence TTCN PAM
uuaccauggguagggaaaaa

SEQ ID NO: 19177 - RNA, 20 nt, Artificial Sequence
  spacer sequence TTCN PAM
cuacccaugguaaagaauau

SEQ ID NO: 19178 - RNA, 20 nt, Artificial Sequence
  spacer sequence TTCN PAM
uguaaagggccagauaguaa

SEQ ID NO: 19179 - RNA, 20 nt, Artificial Sequence
  spacer sequence TTCN PAM
ugacuuuugagcaucacagg

SEQ ID NO: 19180 - RNA, 20 nt, Artificial Sequence
  spacer sequence TTCN PAM
gagguaucccugugaugcuc

SEQ ID NO: 19181 - RNA, 20 nt, Artificial Sequence
  spacer sequence TTCN PAM
cacugaagucugggggagca

SEQ ID NO: 19182 - RNA, 20 nt, Artificial Sequence
  spacer sequence TTCN PAM
gugugaaauauggcaagauc

SEQ ID NO: 19183 - RNA, 20 nt, Artificial Sequence
  spacer sequence TTCN PAM
aaaaucaagcaaaaagcagg

SEQ ID NO: 19184 - RNA, 20 nt, Artificial Sequence
  spacer sequence TTCN PAM
caaguucuaaaaucaagcaa

SEQ ID NO: 19185 - RNA, 20 nt, Artificial Sequence
  spacer sequence TTCN PAM
gugugggagaugucugcuca

SEQ ID NO: 19186 - RNA, 20 nt, Artificial Sequence
  spacer sequence TTCN PAM
cuacucuuaaaaauuugggu

SEQ ID NO: 19187 - RNA, 20 nt, Artificial Sequence
  spacer sequence TTCN PAM
uguuuucucuacucuuaaaa

SEQ ID NO: 19188 - RNA, 20 nt, Artificial Sequence
  spacer sequence TTCN PAM
ggcaccuugcuucuuugucc

SEQ ID NO: 19189 - RNA, 20 nt, Artificial Sequence
  spacer sequence TTCN PAM
uuguccaagcaggucauuaa

SEQ ID NO: 19190 - RNA, 20 nt, Artificial Sequence
  spacer sequence TTCN PAM
uaaauagaucaaggucaauu

SEQ ID NO: 19191 - RNA, 20 nt, Artificial Sequence
  spacer sequence TTCN PAM
aaaacggcagcuggucuaaa

SEQ ID NO: 19192 - RNA, 20 nt, Artificial Sequence
  spacer sequence TTCN PAM
ggaaggauuccauaaugcau

SEQ ID NO: 19193 - RNA, 20 nt, Artificial Sequence
  spacer sequence TTCN PAM
agaaaccgagcaguaccccc

SEQ ID NO: 19194 - RNA, 20 nt, Artificial Sequence
  spacer sequence TTCN PAM
auaaugcauggaggagugaa

SEQ ID NO: 19195 - RNA, 20 nt, Artificial Sequence
  spacer sequence TTCN PAM
cuccuccaugcauuauggaa

SEQ ID NO: 19196 - RNA, 20 nt, Artificial Sequence
  spacer sequence TTCN PAM
gcagcuuccuaaaauuaggg

SEQ ID NO: 19197 - RNA, 20 nt, Artificial Sequence
  spacer sequence TTCN PAM
uaaaauuagggaaaucgugu

SEQ ID NO: 19198 - RNA, 20 nt, Artificial Sequence
  spacer sequence TTCN PAM
cuaauuuuaggaagcugcag

SEQ ID NO: 19199 - RNA, 20 nt, Artificial Sequence
  spacer sequence TTCN PAM
ccugagcccugguagauauc

SEQ ID NO: 19200 - RNA, 20 nt, Artificial Sequence
  spacer sequence TTCN PAM
ccucuggcuuuggucaccag

SEQ ID NO: 19201 - RNA, 20 nt, Artificial Sequence
  spacer sequence TTCN PAM
gcggcccagaguucaccucu

SEQ ID NO: 19202 - RNA, 20 nt, Artificial Sequence
  spacer sequence TTCN PAM
uuucugcggcccagaguuca

SEQ ID NO: 19203 - RNA, 20 nt, Artificial Sequence
  spacer sequence TTCN PAM
ccuguuccugccccgcucca

SEQ ID NO: 19204 - RNA, 20 nt, Artificial Sequence
  spacer sequence TTCN PAM
ugccccgcuccacagggcaa

SEQ ID NO: 19205 - RNA, 20 nt, Artificial Sequence
  spacer sequence TTCN PAM
gagagcagcgauuauggcuu

SEQ ID NO: 19206 - RNA, 20 nt, Artificial Sequence
  spacer sequence TTCN PAM
aaugcaucugaccgcccagg

SEQ ID NO: 19207 - RNA, 20 nt, Artificial Sequence
  spacer sequence TTCN PAM
ucaccuuugagguuucagga

SEQ ID NO: 19208 - RNA, 20 nt, Artificial Sequence
  spacer sequence TTCN PAM
ggagaugacccgacccuggg

SEQ ID NO: 19209 - RNA, 20 nt, Artificial Sequence
  spacer sequence TTCN PAM
aggacacaggcacgaaauac

SEQ ID NO: 19210 - RNA, 20 nt, Artificial Sequence
  spacer sequence TTCN PAM
ugccuguguccuugaaggug

SEQ ID NO: 19211 - RNA, 20 nt, Artificial Sequence
  spacer sequence TTCN PAM
cccuccugugccuggucagg

SEQ ID NO: 19212 - RNA, 20 nt, Artificial Sequence
  spacer sequence TTCN PAM
caugccaccacauuaaaaaa

SEQ ID NO: 19213 - RNA, 20 nt, Artificial Sequence
  spacer sequence TTCN PAM
uucauuucuucugguuuacg

SEQ ID NO: 19214 - RNA, 20 nt, Artificial Sequence
  spacer sequence TTCN PAM
uuucuucugguuuacgaaaa

SEQ ID NO: 19215 - RNA, 20 nt, Artificial Sequence
  spacer sequence TTCN PAM
ucugguuuacgaaaagcaag

SEQ ID NO: 19216 - RNA, 20 nt, Artificial Sequence
  spacer sequence TTCN PAM
gguuuacgaaaagcaagucu

SEQ ID NO: 19217 - RNA, 20 nt, Artificial Sequence
  spacer sequence TTCN PAM
uaaaccagaagaaaugaaug

SEQ ID NO: 19218 - RNA, 20 nt, Artificial Sequence
  spacer sequence TTCN PAM
cacccagacucucagacuug

SEQ ID NO: 19219 - RNA, 20 nt, Artificial Sequence
  spacer sequence TTCN PAM
guaccuuggggacuguccuc

SEQ ID NO: 19220 - RNA, 20 nt, Artificial Sequence
  spacer sequence TTCN PAM
gagaccauguuuaauaucac

SEQ ID NO: 19221 - RNA, 20 nt, Artificial Sequence
  spacer sequence TTCN PAM
caguuccgagaccauguuua

SEQ ID NO: 19222 - RNA, 20 nt, Artificial Sequence
  spacer sequence TTCN PAM
ccccugccagcccugcccuu

SEQ ID NO: 19223 - RNA, 20 nt, Artificial Sequence
  spacer sequence TTCN PAM
cgccccugcucccccauuuc

SEQ ID NO: 19224 - RNA, 20 nt, Artificial Sequence
  spacer sequence TTCN PAM
aaucugaaauguagauuugg

SEQ ID NO: 19225 - RNA, 20 nt, Artificial Sequence
  spacer sequence TTCN PAM
gauuugaaaugggggagcag

SEQ ID NO: 19226 - RNA, 20 nt, Artificial Sequence
  spacer sequence TTCN PAM
ucuaaccaggacugaacguu

SEQ ID NO: 19227 - RNA, 20 nt, Artificial Sequence
  spacer sequence TTCN PAM
guccugguuagaggaaggua

SEQ ID NO: 19228 - RNA, 20 nt, Artificial Sequence
  spacer sequence TTCN PAM
gggugugcaaacguucaguc

SEQ ID NO: 19229 - RNA, 20 nt, Artificial Sequence
  spacer sequence TTCN PAM
augcauucagggugugcaaa

SEQ ID NO: 19230 - RNA, 20 nt, Artificial Sequence
  spacer sequence TTCN PAM
aaacaccacuauagcaguug

SEQ ID NO: 19231 - RNA, 20 nt, Artificial Sequence
  spacer sequence TTCN PAM
cuuacauuugagacuugggu

SEQ ID NO: 19232 - RNA, 20 nt, Artificial Sequence
  spacer sequence TTCN PAM
cuuuaucuccucgggcuugu

SEQ ID NO: 19233 - RNA, 20 nt, Artificial Sequence
  spacer sequence TTCN PAM
cuucacucuccuuauucauu

SEQ ID NO: 19234 - RNA, 20 nt, Artificial Sequence
  spacer sequence TTCN PAM
cucuccuuauucauuccaug

SEQ ID NO: 19235 - RNA, 20 nt, Artificial Sequence
  spacer sequence TTCN PAM
uuccauguccuuguauuuua

SEQ ID NO: 19236 - RNA, 20 nt, Artificial Sequence
  spacer sequence TTCN PAM
auguccuuguauuuuauuuu

SEQ ID NO: 19237 - RNA, 20 nt, Artificial Sequence
  spacer sequence TTCN PAM
uuuuauuaaaaaauauauau

SEQ ID NO: 19238 - RNA, 20 nt, Artificial Sequence
  spacer sequence TTCN PAM
cuagagcccuccuuuuuaaa

SEQ ID NO: 19239 - RNA, 20 nt, Artificial Sequence
  spacer sequence TTCN PAM
ugugcuguuuuaaaaaggag

SEQ ID NO: 19240 - RNA, 20 nt, Artificial Sequence
  spacer sequence TTCN PAM
acagccucccuuaaggugcc

SEQ ID NO: 19241 - RNA, 20 nt, Artificial Sequence
  spacer sequence TTCN PAM
agauguaauucuaaaccaca

SEQ ID NO: 19242 - RNA, 20 nt, Artificial Sequence
  spacer sequence TTCN PAM
aaaccacaaggaagaauauc

SEQ ID NO: 19243 - RNA, 20 nt, Artificial Sequence
  spacer sequence TTCN PAM
uugugguuuagaauuacauc

SEQ ID NO: 19244 - RNA, 20 nt, Artificial Sequence
  spacer sequence TTCN PAM
uccuugugguuuagaauuac

SEQ ID NO: 19245 - RNA, 20 nt, Artificial Sequence
  spacer sequence TTCN PAM
gccugugcagcuaaaaaauu

SEQ ID NO: 19246 - RNA, 20 nt, Artificial Sequence
  spacer sequence TTCN PAM
uaaauuuuuuagcugcacag

SEQ ID NO: 19247 - RNA, 20 nt, Artificial Sequence
  spacer sequence TTCN PAM
cacucagacgcaggacaccu

SEQ ID NO: 19248 - RNA, 20 nt, Artificial Sequence
  spacer sequence TTCN PAM
gcuggaggagguguccugcg

SEQ ID NO: 19249 - RNA, 20 nt, Artificial Sequence
  spacer sequence TTCN PAM
agccaccaaaugacaacaga

SEQ ID NO: 19250 - RNA, 20 nt, Artificial Sequence
  spacer sequence TTCN PAM
gaauuaaauuuuccuuuuuu

SEQ ID NO: 19251 - RNA, 20 nt, Artificial Sequence
  spacer sequence TTCN PAM
gaagucuguugucauuuggu

SEQ ID NO: 19252 - RNA, 20 nt, Artificial Sequence
  spacer sequence TTCN PAM
uuuuuuucccaauaaaucua

SEQ ID NO: 19253 - RNA, 20 nt, Artificial Sequence
  spacer sequence TTCN PAM
caauaaaucuauagucuuca

SEQ ID NO: 19254 - RNA, 20 nt, Artificial Sequence
  spacer sequence TTCN PAM
cuacccccuuauauuuucua

SEQ ID NO: 19255 - RNA, 20 nt, Artificial Sequence
  spacer sequence TTCN PAM
aaucuccuaaacucauuuaa

SEQ ID NO: 19256 - RNA, 20 nt, Artificial Sequence
  spacer sequence TTCN PAM
agaugcccccugauagcaag

SEQ ID NO: 19257 - RNA, 20 nt, Artificial Sequence
  spacer sequence TTCN PAM
uuccagaugcccccugauag

SEQ ID NO: 19258 - RNA, 20 nt, Artificial Sequence
  spacer sequence TTCN PAM
uuguauaaguaaaauuaaaa

SEQ ID NO: 19259 - RNA, 20 nt, Artificial Sequence
  spacer sequence TTCN PAM
aucccacauacaguguaggg

SEQ ID NO: 19260 - RNA, 20 nt, Artificial Sequence
  spacer sequence TTCN PAM
ccuacacuguaugugggauc

SEQ ID NO: 19261 - RNA, 20 nt, Artificial Sequence
  spacer sequence TTCN PAM
cccagacaugcuaggagaca

SEQ ID NO: 19262 - RNA, 20 nt, Artificial Sequence
  spacer sequence TTCN PAM
uccauacggugcucccuguc

SEQ ID NO: 19263 - RNA, 20 nt, Artificial Sequence
  spacer sequence TTCN PAM
ccccgaggcuucguccauac

SEQ ID NO: 19264 - RNA, 20 nt, Artificial Sequence
  spacer sequence TTCN PAM
ugaggccccacccugcccag

SEQ ID NO: 19265 - RNA, 20 nt, Artificial Sequence
  spacer sequence TTCN PAM
caggagucauaccagacaaa

SEQ ID NO: 19266 - RNA, 20 nt, Artificial Sequence
  spacer sequence TTCN PAM
uaagauuugaggauucauga

SEQ ID NO: 19267 - RNA, 20 nt, Artificial Sequence
  spacer sequence TTCN PAM
ugauuccuuuuaaaagcaga

SEQ ID NO: 19268 - RNA, 20 nt, Artificial Sequence
  spacer sequence TTCN PAM
uuuuaaaagcagacagaggu

SEQ ID NO: 19269 - RNA, 20 nt, Artificial Sequence
  spacer sequence TTCN PAM
uccucuaccugucugacagg

SEQ ID NO: 19270 - RNA, 20 nt, Artificial Sequence
  spacer sequence TTCN PAM
ucuaccugucugacagggga

SEQ ID NO: 19271 - RNA, 20 nt, Artificial Sequence
  spacer sequence TTCN PAM
ccugucagacagguagagga

SEQ ID NO: 19272 - RNA, 20 nt, Artificial Sequence
  spacer sequence TTCN PAM
ccuucugagaagggguagga

SEQ ID NO: 19273 - RNA, 20 nt, Artificial Sequence
  spacer sequence TTCN PAM
gagaagggguaggagguggg

SEQ ID NO: 19274 - RNA, 20 nt, Artificial Sequence
  spacer sequence TTCN PAM
cagaaggggaauuugggagg

SEQ ID NO: 19275 - RNA, 20 nt, Artificial Sequence
  spacer sequence TTCN PAM
aucuacaugcaccaugccau

SEQ ID NO: 19276 - RNA, 20 nt, Artificial Sequence
  spacer sequence TTCN PAM
uuuuugucuacaagcagugg

SEQ ID NO: 19277 - RNA, 20 nt, Artificial Sequence
  spacer sequence TTCN PAM
auacuggcuccuggugacug

SEQ ID NO: 19278 - RNA, 20 nt, Artificial Sequence
  spacer sequence TTCN PAM
gucaccaggagccaguaugg

SEQ ID NO: 19279 - RNA, 20 nt, Artificial Sequence
  spacer sequence TTCN PAM
ugcucaaguccucacaucac

SEQ ID NO: 19280 - RNA, 20 nt, Artificial Sequence
  spacer sequence TTCN PAM
ggccuccccagggaacuuua

SEQ ID NO: 19281 - RNA, 20 nt, Artificial Sequence
  spacer sequence TTCN PAM
cuggggaggccugaagccag

SEQ ID NO: 19282 - RNA, 20 nt, Artificial Sequence
  spacer sequence TTCN PAM
caccaggagguaaaguuccc

SEQ ID NO: 19283 - RNA, 20 nt, Artificial Sequence
  spacer sequence TTCN PAM
guuaugcuaacuguccccau

SEQ ID NO: 19284 - RNA, 20 nt, Artificial Sequence
  spacer sequence TTCN PAM
ggugacaaguggccucacca

SEQ ID NO: 19285 - RNA, 20 nt, Artificial Sequence
  spacer sequence TTCN PAM
cacgagggaucuuuugcccc

SEQ ID NO: 19286 - RNA, 20 nt, Artificial Sequence
  spacer sequence TTCN PAM
cuuaccaugagccuuuccca

SEQ ID NO: 19287 - RNA, 20 nt, Artificial Sequence
  spacer sequence TTCN PAM
agggaggugcguucucuuac

SEQ ID NO: 19288 - RNA, 20 nt, Artificial Sequence
  spacer sequence TTCN PAM
ggggagccuguuucguuuuc

SEQ ID NO: 19289 - RNA, 20 nt, Artificial Sequence
  spacer sequence TTCN PAM
uuuuccuguucugaugaaag

SEQ ID NO: 19290 - RNA, 20 nt, Artificial Sequence
  spacer sequence TTCN PAM
uguucugaugaaagugaccu

SEQ ID NO: 19291 - RNA, 20 nt, Artificial Sequence
  spacer sequence TTCN PAM
gaugaaagugaccugcaugu

SEQ ID NO: 19292 - RNA, 20 nt, Artificial Sequence
  spacer sequence TTCN PAM
ucagaacaggaaaacgaaac

SEQ ID NO: 19293 - RNA, 20 nt, Artificial Sequence
  spacer sequence TTCN PAM
ccacggcuuacuguaaagau

SEQ ID NO: 19294 - RNA, 20 nt, Artificial Sequence
  spacer sequence TTCN PAM
agcccuggugguuuugguca

SEQ ID NO: 19295 - RNA, 20 nt, Artificial Sequence
  spacer sequence TTCN PAM
acagguugggcagggcagcg

SEQ ID NO: 19296 - RNA, 20 nt, Artificial Sequence
  spacer sequence TTCN PAM
ccaggguucugcccacaggc

SEQ ID NO: 19297 - RNA, 20 nt, Artificial Sequence
  spacer sequence TTCN PAM
gcccacaggcugagccccug

SEQ ID NO: 19298 - RNA, 20 nt, Artificial Sequence
  spacer sequence TTCN PAM
cccuccuccuuugccaaucc

SEQ ID NO: 19299 - RNA, 20 nt, Artificial Sequence
  spacer sequence TTCN PAM
cccaccuuucuuggaucauc

SEQ ID NO: 19300 - RNA, 20 nt, Artificial Sequence
  spacer sequence TTCN PAM
uggaucaucucacacagagu

SEQ ID NO: 19301 - RNA, 20 nt, Artificial Sequence
  spacer sequence TTCN PAM
auagugcccagucuauggcu

SEQ ID NO: 19302 - RNA, 20 nt, Artificial Sequence
  spacer sequence TTCN PAM
cucugacucuaacuugcguu

SEQ ID NO: 19303 - RNA, 20 nt, Artificial Sequence
  spacer sequence TTCN PAM
cacaaacauguucucucucc

SEQ ID NO: 19304 - RNA, 20 nt, Artificial Sequence
  spacer sequence TTCN PAM
cucuccacauuguauuuucu

SEQ ID NO: 19305 - RNA, 20 nt, Artificial Sequence
  spacer sequence TTCN PAM
guagucaacaaaaauucacc

SEQ ID NO: 19306 - RNA, 20 nt, Artificial Sequence
  spacer sequence TTCN PAM
ccaacuguaagugcgcaauu

SEQ ID NO: 19307 - RNA, 20 nt, Artificial Sequence
  spacer sequence TTCN PAM
auugcgcacuuacaguuggu

SEQ ID NO: 19308 - RNA, 20 nt, Artificial Sequence
  spacer sequence TTCN PAM
acacaucacugugcuggugg

SEQ ID NO: 19309 - RNA, 20 nt, Artificial Sequence
  spacer sequence TTCN PAM
caacagccauggggccugga

SEQ ID NO: 19310 - RNA, 20 nt, Artificial Sequence
  spacer sequence TTCN PAM
aucacuauuguuuugccuug

SEQ ID NO: 19311 - RNA, 20 nt, Artificial Sequence
  spacer sequence TTCN PAM
gaauguagucuuugugguug

SEQ ID NO: 19312 - RNA, 20 nt, Artificial Sequence
  spacer sequence TTCN PAM
gaaugauugcaaaaugcaaa

SEQ ID NO: 19313 - RNA, 20 nt, Artificial Sequence
  spacer sequence TTCN PAM
uucacauagcauauuccuug

SEQ ID NO: 19314 - RNA, 20 nt, Artificial Sequence
  spacer sequence TTCN PAM
cauagcauauuccuugagau

SEQ ID NO: 19315 - RNA, 20 nt, Artificial Sequence
  spacer sequence TTCN PAM
uugagauucauccacauugu

SEQ ID NO: 19316 - RNA, 20 nt, Artificial Sequence
  spacer sequence TTCN PAM
uccacauuguugcaugcauc

SEQ ID NO: 19317 - RNA, 20 nt, Artificial Sequence
  spacer sequence TTCN PAM
guacuucagcucuuuuuaga

SEQ ID NO: 19318 - RNA, 20 nt, Artificial Sequence
  spacer sequence TTCN PAM
gcucuuuuuagagcugagua

SEQ ID NO: 19319 - RNA, 20 nt, Artificial Sequence
  spacer sequence TTCN PAM
aguguauggauagaucacaa

SEQ ID NO: 19320 - RNA, 20 nt, Artificial Sequence
  spacer sequence TTCN PAM
cauuuccccugggaauauag

SEQ ID NO: 19321 - RNA, 20 nt, Artificial Sequence
  spacer sequence TTCN PAM
ccugggaauauagcuagcag

SEQ ID NO: 19322 - RNA, 20 nt, Artificial Sequence
  spacer sequence TTCN PAM
caggggaaaugagaacauac

SEQ ID NO: 19323 - RNA, 20 nt, Artificial Sequence
  spacer sequence TTCN PAM
agugcauauguagugauauc

SEQ ID NO: 19324 - RNA, 20 nt, Artificial Sequence
  spacer sequence TTCN PAM
cuaaugacuaaugauguuca

SEQ ID NO: 19325 - RNA, 20 nt, Artificial Sequence
  spacer sequence TTCN PAM
gcaucuuuccauguguuuau

SEQ ID NO: 19326 - RNA, 20 nt, Artificial Sequence
  spacer sequence TTCN PAM
auguguuuauuugccaugcc

SEQ ID NO: 19327 - RNA, 20 nt, Artificial Sequence
  spacer sequence TTCN PAM
uugguggaaugucuguucaa

SEQ ID NO: 19328 - RNA, 20 nt, Artificial Sequence
  spacer sequence TTCN PAM
accaaagaaggcauggcaaa

SEQ ID NO: 19329 - RNA, 20 nt, Artificial Sequence
  spacer sequence TTCN PAM
aaucuuucgcucauuuucau

SEQ ID NO: 19330 - RNA, 20 nt, Artificial Sequence
  spacer sequence TTCN PAM
cucauuuucauuguguugca

SEQ ID NO: 19331 - RNA, 20 nt, Artificial Sequence
  spacer sequence TTCN PAM
uuguguugcauugauuucuu

SEQ ID NO: 19332 - RNA, 20 nt, Artificial Sequence
  spacer sequence TTCN PAM
uacuauugacuuuugagagu

SEQ ID NO: 19333 - RNA, 20 nt, Artificial Sequence
  spacer sequence TTCN PAM
ggauacaaguucuuuaucag

SEQ ID NO: 19334 - RNA, 20 nt, Artificial Sequence
  spacer sequence TTCN PAM
uuaucagauguauuuuuugc

SEQ ID NO: 19335 - RNA, 20 nt, Artificial Sequence
  spacer sequence TTCN PAM
cccagucugucuugucuuuu

SEQ ID NO: 19336 - RNA, 20 nt, Artificial Sequence
  spacer sequence TTCN PAM
aauuauuccagcuccuuuga

SEQ ID NO: 19337 - RNA, 20 nt, Artificial Sequence
  spacer sequence TTCN PAM
agcuccuuugaugaaaagau

SEQ ID NO: 19338 - RNA, 20 nt, Artificial Sequence
  spacer sequence TTCN PAM
ucaaaggagcuggaauaauu

SEQ ID NO: 19339 - RNA, 20 nt, Artificial Sequence
  spacer sequence TTCN PAM
cccauuaaacugcuugugca

SEQ ID NO: 19340 - RNA, 20 nt, Artificial Sequence
  spacer sequence TTCN PAM
guuaaucuuauaugcauggg

SEQ ID NO: 19341 - RNA, 20 nt, Artificial Sequence
  spacer sequence TTCN PAM
auugauccugucugucugua

SEQ ID NO: 19342 - RNA, 20 nt, Artificial Sequence
  spacer sequence TTCN PAM
aaacuugugguguuagugua

SEQ ID NO: 19343 - RNA, 20 nt, Artificial Sequence
  spacer sequence TTCN PAM
uuuucaaaauugcuuuaacu

SEQ ID NO: 19344 - RNA, 20 nt, Artificial Sequence
  spacer sequence TTCN PAM
aaauugcuuuaacuauuuua

SEQ ID NO: 19345 - RNA, 20 nt, Artificial Sequence
  spacer sequence TTCN PAM
acauacauuuuagaaucagu

SEQ ID NO: 19346 - RNA, 20 nt, Artificial Sequence
  spacer sequence TTCN PAM
aaaauguauguggaaaugca

SEQ ID NO: 19347 - RNA, 20 nt, Artificial Sequence
  spacer sequence TTCN PAM
acaaaaaaagccugcuggga

SEQ ID NO: 19348 - RNA, 20 nt, Artificial Sequence
  spacer sequence TTCN PAM
cucccuguuauguuuuaagc

SEQ ID NO: 19349 - RNA, 20 nt, Artificial Sequence
  spacer sequence TTCN PAM
uuguccuccaggagcuuaaa

SEQ ID NO: 19350 - RNA, 20 nt, Artificial Sequence
  spacer sequence TTCN PAM
ccaugguuccugagccauag

SEQ ID NO: 19351 - RNA, 20 nt, Artificial Sequence
  spacer sequence TTCN PAM
ugagccauaguaaacuaugu

SEQ ID NO: 19352 - RNA, 20 nt, Artificial Sequence
  spacer sequence TTCN PAM
cccuccccgcccccaaucac

SEQ ID NO: 19353 - RNA, 20 nt, Artificial Sequence
  spacer sequence TTCN PAM
gcuuuacccucucucgcuug

SEQ ID NO: 19354 - RNA, 20 nt, Artificial Sequence
  spacer sequence TTCN PAM
uugccuucugcuuuacccuc

SEQ ID NO: 19355 - RNA, 20 nt, Artificial Sequence
  spacer sequence TTCN PAM
ucauccucacgucugccugu

SEQ ID NO: 19356 - RNA, 20 nt, Artificial Sequence
  spacer sequence TTCN PAM
cauucaucauccucacgucu

SEQ ID NO: 19357 - RNA, 20 nt, Artificial Sequence
  spacer sequence TTCN PAM
ggcaguggcacaaggaagug

SEQ ID NO: 19358 - RNA, 20 nt, Artificial Sequence
  spacer sequence TTCN PAM
uugugccacugccagaauac

SEQ ID NO: 19359 - RNA, 20 nt, Artificial Sequence
  spacer sequence TTCN PAM
ucucauagccaaggucacug

SEQ ID NO: 19360 - RNA, 20 nt, Artificial Sequence
  spacer sequence TTCN PAM
cauagccaaggucacuguuu

SEQ ID NO: 19361 - RNA, 20 nt, Artificial Sequence
  spacer sequence TTCN PAM
caaucagggaaaguugcaag

SEQ ID NO: 19362 - RNA, 20 nt, Artificial Sequence
  spacer sequence TTCN PAM
cugauugugaaacagugacc

SEQ ID NO: 19363 - RNA, 20 nt, Artificial Sequence
  spacer sequence TTCN PAM
ggggaucuugcaacuuuccc

SEQ ID NO: 19364 - RNA, 20 nt, Artificial Sequence
  spacer sequence TTCN PAM
aggacaagcuaggguuccua

SEQ ID NO: 19365 - RNA, 20 nt, Artificial Sequence
  spacer sequence TTCN PAM
uagagucugggaucugguga

SEQ ID NO: 19366 - RNA, 20 nt, Artificial Sequence
  spacer sequence TTCN PAM
ccagaucccagacucuagga

SEQ ID NO: 19367 - RNA, 20 nt, Artificial Sequence
  spacer sequence TTCN PAM
uuggcgauuguucaccagau

SEQ ID NO: 19368 - RNA, 20 nt, Artificial Sequence
  spacer sequence TTCN PAM
auucuuuggcgauuguucac

SEQ ID NO: 19369 - RNA, 20 nt, Artificial Sequence
  spacer sequence TTCN PAM
auucuauucuuuggcgauug

SEQ ID NO: 19370 - RNA, 20 nt, Artificial Sequence
  spacer sequence TTCN PAM
ugucugucugacuuuagcuu

SEQ ID NO: 19371 - RNA, 20 nt, Artificial Sequence
  spacer sequence TTCN PAM
uucuagaaagagcuagaaag

SEQ ID NO: 19372 - RNA, 20 nt, Artificial Sequence
  spacer sequence TTCN PAM
agaaagagcuagaaaggucu

SEQ ID NO: 19373 - RNA, 20 nt, Artificial Sequence
  spacer sequence TTCN PAM
agaaggaagcuaaagucaga

SEQ ID NO: 19374 - RNA, 20 nt, Artificial Sequence
  spacer sequence TTCN PAM
agcucuuucuagaaggaagc

SEQ ID NO: 19375 - RNA, 20 nt, Artificial Sequence
  spacer sequence TTCN PAM
uguuuugcucaucuauaaaa

SEQ ID NO: 19376 - RNA, 20 nt, Artificial Sequence
  spacer sequence TTCN PAM
aguucuuguuuugcucaucu

SEQ ID NO: 19377 - RNA, 20 nt, Artificial Sequence
  spacer sequence TTCN PAM
cuguuuaacucugugaccuc

SEQ ID NO: 19378 - RNA, 20 nt, Artificial Sequence
  spacer sequence TTCN PAM
uagucuuagggugcuaccaa

SEQ ID NO: 19379 - RNA, 20 nt, Artificial Sequence
  spacer sequence TTCN PAM
guccucaaggcuguugaccu

SEQ ID NO: 19380 - RNA, 20 nt, Artificial Sequence
  spacer sequence TTCN PAM
gugacguaaauggcucuggu

SEQ ID NO: 19381 - RNA, 20 nt, Artificial Sequence
  spacer sequence TTCN PAM
aagagcuccaguucugugac

SEQ ID NO: 19382 - RNA, 20 nt, Artificial Sequence
  spacer sequence TTCN PAM
ggcacagccaacugauugac

SEQ ID NO: 19383 - RNA, 20 nt, Artificial Sequence
  spacer sequence TTCN PAM
gacuuucuggcacagccaac

SEQ ID NO: 19384 - RNA, 20 nt, Artificial Sequence
  spacer sequence TTCN PAM
aguccccccgaugccuccuc

SEQ ID NO: 19385 - RNA, 20 nt, Artificial Sequence
  spacer sequence TTCN PAM
ugugcaucuaucaacacaag

SEQ ID NO: 19386 - RNA, 20 nt, Artificial Sequence
  spacer sequence TTCN PAM
uaauaaugucuuguguugau

SEQ ID NO: 19387 - RNA, 20 nt, Artificial Sequence
  spacer sequence TTCN PAM
caucaaaauccccucuauaa

SEQ ID NO: 19388 - RNA, 20 nt, Artificial Sequence
  spacer sequence TTCN PAM
cugccauuugcuucaagcca

SEQ ID NO: 19389 - RNA, 20 nt, Artificial Sequence
  spacer sequence TTCN PAM
agccagcuuuggccuuccca

SEQ ID NO: 19390 - RNA, 20 nt, Artificial Sequence
  spacer sequence TTCN PAM
cagguauuuuggugagaugg

SEQ ID NO: 19391 - RNA, 20 nt, Artificial Sequence
  spacer sequence TTCN PAM
gguuuauagcccaucccauc

SEQ ID NO: 19392 - RNA, 20 nt, Artificial Sequence
  spacer sequence TTCN PAM
cuguaucuuccauuauaugc

SEQ ID NO: 19393 - RNA, 20 nt, Artificial Sequence
  spacer sequence TTCN PAM
ucccuguaucuuccauuaua

SEQ ID NO: 19394 - RNA, 20 nt, Artificial Sequence
  spacer sequence TTCN PAM
ggaguguguuaucuucuucc

SEQ ID NO: 19395 - RNA, 20 nt, Artificial Sequence
  spacer sequence TTCN PAM
gaaaccucacugccagaagc

SEQ ID NO: 19396 - RNA, 20 nt, Artificial Sequence
  spacer sequence TTCN PAM
gaaaaaguuuguuucuggag

SEQ ID NO: 19397 - RNA, 20 nt, Artificial Sequence
  spacer sequence TTCN PAM
ggcagugagguuucagaaaa

SEQ ID NO: 19398 - RNA, 20 nt, Artificial Sequence
  spacer sequence TTCN PAM
ugcuucuggcagugagguuu

SEQ ID NO: 19399 - RNA, 20 nt, Artificial Sequence
  spacer sequence TTCN PAM
uggaagacucaaaacucagu

SEQ ID NO: 19400 - RNA, 20 nt, Artificial Sequence
  spacer sequence TTCN PAM
aggaaccagaguugaauccu

SEQ ID NO: 19401 - RNA, 20 nt, Artificial Sequence
  spacer sequence TTCN PAM
aggcucacugaguuuugagu

SEQ ID NO: 19402 - RNA, 20 nt, Artificial Sequence
  spacer sequence TTCN PAM
aaccacaaauggcuuuaaaa

SEQ ID NO: 19403 - RNA, 20 nt, Artificial Sequence
  spacer sequence TTCN PAM
gcuacccauuagcgacaugg

SEQ ID NO: 19404 - RNA, 20 nt, Artificial Sequence
  spacer sequence TTCN PAM
caccuccccccuccaaggag

SEQ ID NO: 19405 - RNA, 20 nt, Artificial Sequence
  spacer sequence TTCN PAM
ccuuggaggggggagguggg

SEQ ID NO: 19406 - RNA, 20 nt, Artificial Sequence
  spacer sequence TTCN PAM
cucaaagacaagacaguaug

SEQ ID NO: 19407 - RNA, 20 nt, Artificial Sequence
  spacer sequence TTCN PAM
augcaaauugaguguccaga

SEQ ID NO: 19408 - RNA, 20 nt, Artificial Sequence
  spacer sequence TTCN PAM
cucuggacacucaauuugca

SEQ ID NO: 19409 - RNA, 20 nt, Artificial Sequence
  spacer sequence TTCN PAM
ccauggcugaguugcuggag

SEQ ID NO: 19410 - RNA, 20 nt, Artificial Sequence
  spacer sequence TTCN PAM
aagcuguuaacgcauuuuau

SEQ ID NO: 19411 - RNA, 20 nt, Artificial Sequence
  spacer sequence TTCN PAM
ggguaacagcaaugauuaau

SEQ ID NO: 19412 - RNA, 20 nt, Artificial Sequence
  spacer sequence TTCN PAM
uaggccauucaggguaacag

SEQ ID NO: 19413 - RNA, 20 nt, Artificial Sequence
  spacer sequence TTCN PAM
aggcccucuucugugaaaac

SEQ ID NO: 19414 - RNA, 20 nt, Artificial Sequence
  spacer sequence TTCN PAM
gugaaaacuauggaugccau

SEQ ID NO: 19415 - RNA, 20 nt, Artificial Sequence
  spacer sequence TTCN PAM
cagaagagggccuggaaaau

SEQ ID NO: 19416 - RNA, 20 nt, Artificial Sequence
  spacer sequence TTCN PAM
aauuaucacuacuacauuuu

SEQ ID NO: 19417 - RNA, 20 nt, Artificial Sequence
  spacer sequence TTCN PAM
cugucuccaaaauaugcccc

SEQ ID NO: 19418 - RNA, 20 nt, Artificial Sequence
  spacer sequence TTCN PAM
aggaugggggcauauuuugg

SEQ ID NO: 19419 - RNA, 20 nt, Artificial Sequence
  spacer sequence TTCN PAM
caguuaucuacaacaguuua

SEQ ID NO: 19420 - RNA, 20 nt, Artificial Sequence
  spacer sequence TTCN PAM
caugauaugaaaauucucaa

SEQ ID NO: 19421 - RNA, 20 nt, Artificial Sequence
  spacer sequence TTCN PAM
uaucaugugaaauucccagu

SEQ ID NO: 19422 - RNA, 20 nt, Artificial Sequence
  spacer sequence TTCN PAM
uccuacaugggcgucuauag

SEQ ID NO: 19423 - RNA, 20 nt, Artificial Sequence
  spacer sequence TTCN PAM
ucaauggcuaguggcugggg

SEQ ID NO: 19424 - RNA, 20 nt, Artificial Sequence
  spacer sequence TTCN PAM
uuguggguuguuggauugag

SEQ ID NO: 19425 - RNA, 20 nt, Artificial Sequence
  spacer sequence TTCN PAM
augguuuuauugccuaaaua

SEQ ID NO: 19426 - RNA, 20 nt, Artificial Sequence
  spacer sequence TTCN PAM
cagggauguuuucuccauaa

SEQ ID NO: 19427 - RNA, 20 nt, Artificial Sequence
  spacer sequence TTCN PAM
ccauaagauaaucagauuuu

SEQ ID NO: 19428 - RNA, 20 nt, Artificial Sequence
  spacer sequence TTCN PAM
gugaggugguccugcccaca

SEQ ID NO: 19429 - RNA, 20 nt, Artificial Sequence
  spacer sequence TTCN PAM
caccaucgcccacccauugu

SEQ ID NO: 19430 - RNA, 20 nt, Artificial Sequence
  spacer sequence TTCN PAM
auuccucaaaaagauagcua

SEQ ID NO: 19431 - RNA, 20 nt, Artificial Sequence
  spacer sequence TTCN PAM
ucaaaaagauagcuacuaac

SEQ ID NO: 19432 - RNA, 20 nt, Artificial Sequence
  spacer sequence TTCN PAM
uuguagacaaauugugaggg

SEQ ID NO: 19433 - RNA, 20 nt, Artificial Sequence
  spacer sequence TTCN PAM
uuguggacaaaugacagaca

SEQ ID NO: 19434 - RNA, 20 nt, Artificial Sequence
  spacer sequence TTCN PAM
cugggaaaggcuaaucagac

SEQ ID NO: 19435 - RNA, 20 nt, Artificial Sequence
  spacer sequence TTCN PAM
cagggaagcaaucagauaug

SEQ ID NO: 19436 - RNA, 20 nt, Artificial Sequence
  spacer sequence TTCN PAM
uuugagugucugauuagccu

SEQ ID NO: 19437 - RNA, 20 nt, Artificial Sequence
  spacer sequence TTCN PAM
guaccuaugaccuggaaacc

SEQ ID NO: 19438 - RNA, 20 nt, Artificial Sequence
  spacer sequence TTCN PAM
aggucauagguacagaagag

SEQ ID NO: 19439 - RNA, 20 nt, Artificial Sequence
  spacer sequence TTCN PAM
ugcugcgaguugucccaccu

SEQ ID NO: 19440 - RNA, 20 nt, Artificial Sequence
  spacer sequence TTCN PAM
aaaccaagccaauguaaauc

SEQ ID NO: 19441 - RNA, 20 nt, Artificial Sequence
  spacer sequence TTCN PAM
aguucuagaucccugaggaa

SEQ ID NO: 19442 - RNA, 20 nt, Artificial Sequence
  spacer sequence TTCN PAM
caauagcaaagacuuggaac

SEQ ID NO: 19443 - RNA, 20 nt, Artificial Sequence
  spacer sequence TTCN PAM
aagucuuugcuauugugaau

SEQ ID NO: 19444 - RNA, 20 nt, Artificial Sequence
  spacer sequence TTCN PAM
uaauccagucuaucauuguu

SEQ ID NO: 19445 - RNA, 20 nt, Artificial Sequence
  spacer sequence TTCN PAM
augguguauaugugccacau

SEQ ID NO: 19446 - RNA, 20 nt, Artificial Sequence
  spacer sequence TTCN PAM
uguccuuuguagggacauag

SEQ ID NO: 19447 - RNA, 20 nt, Artificial Sequence
  spacer sequence TTCN PAM
uaucccuauuauacugguag

SEQ ID NO: 19448 - RNA, 20 nt, Artificial Sequence
  spacer sequence TTCN PAM
uugugccaggaacuuugcaa

SEQ ID NO: 19449 - RNA, 20 nt, Artificial Sequence
  spacer sequence TTCN PAM
uggcacaaagaaguugcuca

SEQ ID NO: 19450 - RNA, 20 nt, Artificial Sequence
  spacer sequence TTCN PAM
uucagauccucaccacaacc

SEQ ID NO: 19451 - RNA, 20 nt, Artificial Sequence
  spacer sequence TTCN PAM
gauccucaccacaacccugg

SEQ ID NO: 19452 - RNA, 20 nt, Artificial Sequence
  spacer sequence TTCN PAM
ccaggguuguggugaggauc

SEQ ID NO: 19453 - RNA, 20 nt, Artificial Sequence
  spacer sequence TTCN PAM
aaccucagcucugacaugug

SEQ ID NO: 19454 - RNA, 20 nt, Artificial Sequence
  spacer sequence TTCN PAM
augucauuaaacuuuuuuug

SEQ ID NO: 19455 - RNA, 20 nt, Artificial Sequence
  spacer sequence TTCN PAM
aaaaaaguuuaaugacaugg

SEQ ID NO: 19456 - RNA, 20 nt, Artificial Sequence
  spacer sequence TTCN PAM
auuguugaguggauuugccc

SEQ ID NO: 19457 - RNA, 20 nt, Artificial Sequence
  spacer sequence TTCN PAM
cuuauuuuuccagccuuuaa

SEQ ID NO: 19458 - RNA, 20 nt, Artificial Sequence
  spacer sequence TTCN PAM
agccuuuaagcuguuuccag

SEQ ID NO: 19459 - RNA, 20 nt, Artificial Sequence
  spacer sequence TTCN PAM
uaggcuagagcacuagagga

SEQ ID NO: 19460 - RNA, 20 nt, Artificial Sequence
  spacer sequence TTCN PAM
aacuugaccuggcagucccu

SEQ ID NO: 19461 - RNA, 20 nt, Artificial Sequence
  spacer sequence TTCN PAM
cgaaagguuguaccaauuca

SEQ ID NO: 19462 - RNA, 20 nt, Artificial Sequence
  spacer sequence TTCN PAM
ggaaagcaauuuggcaacug

SEQ ID NO: 19463 - RNA, 20 nt, Artificial Sequence
  spacer sequence TTCN PAM
uauucccaaggagauaaaca

SEQ ID NO: 19464 - RNA, 20 nt, Artificial Sequence
  spacer sequence TTCN PAM
caaggagauaaacacuuaac

SEQ ID NO: 19465 - RNA, 20 nt, Artificial Sequence
  spacer sequence TTCN PAM
aaguuaaguguuuaucuccu

SEQ ID NO: 19466 - RNA, 20 nt, Artificial Sequence
  spacer sequence TTCN PAM
uuucaaaguuaaguguuuau

SEQ ID NO: 19467 - RNA, 20 nt, Artificial Sequence
  spacer sequence TTCN PAM
uuuaaacaaggugccggcuu

SEQ ID NO: 19468 - RNA, 20 nt, Artificial Sequence
  spacer sequence TTCN PAM
gcacaaaggcccucagaacc

SEQ ID NO: 19469 - RNA, 20 nt, Artificial Sequence
  spacer sequence TTCN PAM
gagggccuuugugcggaacu

SEQ ID NO: 19470 - RNA, 20 nt, Artificial Sequence
  spacer sequence TTCN PAM
cagggguucugagggccuuu

SEQ ID NO: 19471 - RNA, 20 nt, Artificial Sequence
  spacer sequence TTCN PAM
ucagcccaugguucacaggg

SEQ ID NO: 19472 - RNA, 20 nt, Artificial Sequence
  spacer sequence TTCN PAM
gccuuccugacuggcugguu

SEQ ID NO: 19473 - RNA, 20 nt, Artificial Sequence
  spacer sequence TTCN PAM
ugacuggcugguuaaauucc

SEQ ID NO: 19474 - RNA, 20 nt, Artificial Sequence
  spacer sequence TTCN PAM
caacaucccagaugucauuu

SEQ ID NO: 19475 - RNA, 20 nt, Artificial Sequence
  spacer sequence TTCN PAM
gugggguaaggggggaaaug

SEQ ID NO: 19476 - RNA, 20 nt, Artificial Sequence
  spacer sequence TTCN PAM
ccccuuaccccacugaaucu

SEQ ID NO: 19477 - RNA, 20 nt, Artificial Sequence
  spacer sequence TTCN PAM
auuuccccccuuaccccacu

SEQ ID NO: 19478 - RNA, 20 nt, Artificial Sequence
  spacer sequence TTCN PAM
gguugauuaucaugcaaaug

SEQ ID NO: 19479 - RNA, 20 nt, Artificial Sequence
  spacer sequence TTCN PAM
ugagacagcuuuuccagaau

SEQ ID NO: 19480 - RNA, 20 nt, Artificial Sequence
  spacer sequence TTCN PAM
agaauuggaugaccuucucc

SEQ ID NO: 19481 - RNA, 20 nt, Artificial Sequence
  spacer sequence TTCN PAM
ggaaaagcugucucaagaaa

SEQ ID NO: 19482 - RNA, 20 nt, Artificial Sequence
  spacer sequence TTCN PAM
ccaaguggauaaggauauuu

SEQ ID NO: 19483 - RNA, 20 nt, Artificial Sequence
  spacer sequence TTCN PAM
cugccagaucuuaagcuagg

SEQ ID NO: 19484 - RNA, 20 nt, Artificial Sequence
  spacer sequence TTCN PAM
augcccuagcuuaagaucug

SEQ ID NO: 19485 - RNA, 20 nt, Artificial Sequence
  spacer sequence TTCN PAM
auacacauacacaaagagaa

SEQ ID NO: 19486 - RNA, 20 nt, Artificial Sequence
  spacer sequence TTCN PAM
cuuuguguauguguauagaa

SEQ ID NO: 19487 - RNA, 20 nt, Artificial Sequence
  spacer sequence TTCN PAM
ggguggcuaaauauuugcac

SEQ ID NO: 19488 - RNA, 20 nt, Artificial Sequence
  spacer sequence TTCN PAM
ccucuuucuggguggcuaaa

SEQ ID NO: 19489 - RNA, 20 nt, Artificial Sequence
  spacer sequence TTCN PAM
uuuggccuuagguaccaucu

SEQ ID NO: 19490 - RNA, 20 nt, Artificial Sequence
  spacer sequence TTCN PAM
gaacaaauuuuuuuuaauug

SEQ ID NO: 19491 - RNA, 20 nt, Artificial Sequence
  spacer sequence TTCN PAM
gaaucuuccuuuggccuuag

SEQ ID NO: 19492 - RNA, 20 nt, Artificial Sequence
  spacer sequence TTCN PAM
cuaccccaauuuguuaugca

SEQ ID NO: 19493 - RNA, 20 nt, Artificial Sequence
  spacer sequence TTCN PAM
uuggcuaugucaaugcauaa

SEQ ID NO: 19494 - RNA, 20 nt, Artificial Sequence
  spacer sequence TTCN PAM
aagguuaaaauaggccaaua

SEQ ID NO: 19495 - RNA, 20 nt, Artificial Sequence
  spacer sequence TTCN PAM
auuuuccuuugugaauugga

SEQ ID NO: 19496 - RNA, 20 nt, Artificial Sequence
  spacer sequence TTCN PAM
uuugugaauuggaagaggga

SEQ ID NO: 19497 - RNA, 20 nt, Artificial Sequence
  spacer sequence TTCN PAM
caaaggaaaauagaaauguu

SEQ ID NO: 19498 - RNA, 20 nt, Artificial Sequence
  spacer sequence TTCN PAM
aauucacaaaggaaaauaga

SEQ ID NO: 19499 - RNA, 20 nt, Artificial Sequence
  spacer sequence TTCN PAM
ucucucccucuuccaauuca

SEQ ID NO: 19500 - RNA, 20 nt, Artificial Sequence
  spacer sequence TTCN PAM
uuuccucucucccucuucca

SEQ ID NO: 19501 - RNA, 20 nt, Artificial Sequence
  spacer sequence TTCN PAM
cuguaguuacuuggauuuuc

SEQ ID NO: 19502 - RNA, 20 nt, Artificial Sequence
  spacer sequence TTCN PAM
caccauaggcuagauauuaa

SEQ ID NO: 19503 - RNA, 20 nt, Artificial Sequence
  spacer sequence TTCN PAM
uaauaucuagccuauggugu

SEQ ID NO: 19504 - RNA, 20 nt, Artificial Sequence
  spacer sequence TTCN PAM
cuuacaguucagguagggcu

SEQ ID NO: 19505 - RNA, 20 nt, Artificial Sequence
  spacer sequence TTCN PAM
gguagggcugggccugcgug

SEQ ID NO: 19506 - RNA, 20 nt, Artificial Sequence
  spacer sequence TTCN PAM
guauucugccauuauuugaa

SEQ ID NO: 19507 - RNA, 20 nt, Artificial Sequence
  spacer sequence TTCN PAM
gccauuauuugaaaugcccu

SEQ ID NO: 19508 - RNA, 20 nt, Artificial Sequence
  spacer sequence TTCN PAM
aauaauggcagaauacagaa

SEQ ID NO: 19509 - RNA, 20 nt, Artificial Sequence
  spacer sequence TTCN PAM
gggauaggaagugacuuagu

SEQ ID NO: 19510 - RNA, 20 nt, Artificial Sequence
  spacer sequence TTCN PAM
uaucccagaagcuaguuugg

SEQ ID NO: 19511 - RNA, 20 nt, Artificial Sequence
  spacer sequence TTCN PAM
cccccagccccuaugccugu

SEQ ID NO: 19512 - RNA, 20 nt, Artificial Sequence
  spacer sequence TTCN PAM
ucauuuaaauuucaguauuu

SEQ ID NO: 19513 - RNA, 20 nt, Artificial Sequence
  spacer sequence TTCN PAM
guauuuacuuaauagggacc

SEQ ID NO: 19514 - RNA, 20 nt, Artificial Sequence
  spacer sequence TTCN PAM
gucaguuuuaaaaccagcaa

SEQ ID NO: 19515 - RNA, 20 nt, Artificial Sequence
  spacer sequence TTCN PAM
caggcauaccagcauggcug

SEQ ID NO: 19516 - RNA, 20 nt, Artificial Sequence
  spacer sequence TTCN PAM
cauaggguuuuggauggaug

SEQ ID NO: 19517 - RNA, 20 nt, Artificial Sequence
  spacer sequence TTCN PAM
cacuagucaccaccaguggc

SEQ ID NO: 19518 - RNA, 20 nt, Artificial Sequence
  spacer sequence TTCN PAM
uagccaucacauuuaaucuc

SEQ ID NO: 19519 - RNA, 20 nt, Artificial Sequence
  spacer sequence TTCN PAM
ucugggacuccaccccacaa

SEQ ID NO: 19520 - RNA, 20 nt, Artificial Sequence
  spacer sequence TTCN PAM
gggacuccaccccacaacuu

SEQ ID NO: 19521 - RNA, 20 nt, Artificial Sequence
  spacer sequence TTCN PAM
aaccucuccuguccaacugc

SEQ ID NO: 19522 - RNA, 20 nt, Artificial Sequence
  spacer sequence TTCN PAM
cagaggaggcuguuguggug

SEQ ID NO: 19523 - RNA, 20 nt, Artificial Sequence
  spacer sequence TTCN PAM
gagaagcugaguuaaauacc

SEQ ID NO: 19524 - RNA, 20 nt, Artificial Sequence
  spacer sequence TTCN PAM
cagaaguugccaauaaacuu

SEQ ID NO: 19525 - RNA, 20 nt, Artificial Sequence
  spacer sequence TTCN PAM
aguugauuucauagaacugu

SEQ ID NO: 19526 - RNA, 20 nt, Artificial Sequence
  spacer sequence TTCN PAM
uagaacugucauuucuguuc

SEQ ID NO: 19527 - RNA, 20 nt, Artificial Sequence
  spacer sequence TTCN PAM
cugaaaaccaaccugacacc

SEQ ID NO: 19528 - RNA, 20 nt, Artificial Sequence
  spacer sequence TTCN PAM
gagaacagaaaugacaguuc

SEQ ID NO: 19529 - RNA, 20 nt, Artificial Sequence
  spacer sequence TTCN PAM
accaaugaaacaccugcuua

SEQ ID NO: 19530 - RNA, 20 nt, Artificial Sequence
  spacer sequence TTCN PAM
uugguugaagaggucauugc

SEQ ID NO: 19531 - RNA, 20 nt, Artificial Sequence
  spacer sequence TTCN PAM
cuuaaaaaauaauacauugg

SEQ ID NO: 19532 - RNA, 20 nt, Artificial Sequence
  spacer sequence TTCN PAM
guucccuuaaaaaauaauac

SEQ ID NO: 19533 - RNA, 20 nt, Artificial Sequence
  spacer sequence TTCN PAM
gugcgugaucaaaaccuuuu

SEQ ID NO: 19534 - RNA, 20 nt, Artificial Sequence
  spacer sequence TTCN PAM
gcuaguagcauauggcucuu

SEQ ID NO: 19535 - RNA, 20 nt, Artificial Sequence
  spacer sequence TTCN PAM
caagagccauaugcuacuag

SEQ ID NO: 19536 - RNA, 20 nt, Artificial Sequence
  spacer sequence TTCN PAM
ucaauuauuucauuauugua

SEQ ID NO: 19537 - RNA, 20 nt, Artificial Sequence
  spacer sequence TTCN PAM
uuauuguaucaccuguguca

SEQ ID NO: 19538 - RNA, 20 nt, Artificial Sequence
  spacer sequence TTCN PAM
uaaaacaauaaccaacccaa

SEQ ID NO: 19539 - RNA, 20 nt, Artificial Sequence
  spacer sequence TTCN PAM
acaugcuuccuaaaacaaua

SEQ ID NO: 19540 - RNA, 20 nt, Artificial Sequence
  spacer sequence TTCN PAM
uauucucaccccucccaguu

SEQ ID NO: 19541 - RNA, 20 nt, Artificial Sequence
  spacer sequence TTCN PAM
caccccucccaguucuccuu

SEQ ID NO: 19542 - RNA, 20 nt, Artificial Sequence
  spacer sequence TTCN PAM
ccuucuggacuuagagcuag

SEQ ID NO: 19543 - RNA, 20 nt, Artificial Sequence
  spacer sequence TTCN PAM
ggacuuagagcuagucacua

SEQ ID NO: 19544 - RNA, 20 nt, Artificial Sequence
  spacer sequence TTCN PAM
ucugccuuaauagugacuag

SEQ ID NO: 19545 - RNA, 20 nt, Artificial Sequence
  spacer sequence TTCN PAM
uugucuaacucccacguuca

SEQ ID NO: 19546 - RNA, 20 nt, Artificial Sequence
  spacer sequence TTCN PAM
cuauuugaggguugaaaggc

SEQ ID NO: 19547 - RNA, 20 nt, Artificial Sequence
  spacer sequence TTCN PAM
acccucaaauagugaagagg

SEQ ID NO: 19548 - RNA, 20 nt, Artificial Sequence
  spacer sequence TTCN PAM
auuauaacuaccuggagugg

SEQ ID NO: 19549 - RNA, 20 nt, Artificial Sequence
  spacer sequence TTCN PAM
gccgcucuucucuauucaug

SEQ ID NO: 19550 - RNA, 20 nt, Artificial Sequence
  spacer sequence TTCN PAM
cuauucaugguuccugcaaa

SEQ ID NO: 19551 - RNA, 20 nt, Artificial Sequence
  spacer sequence TTCN PAM
ugguuccugcaaaucuuuuc

SEQ ID NO: 19552 - RNA, 20 nt, Artificial Sequence
  spacer sequence TTCN PAM
ugcaaaucuuuucugugcuc

SEQ ID NO: 19553 - RNA, 20 nt, Artificial Sequence
  spacer sequence TTCN PAM
gugcucugagacccagcuug

SEQ ID NO: 19554 - RNA, 20 nt, Artificial Sequence
  spacer sequence TTCN PAM
cccuucccugaauucauaua

SEQ ID NO: 19555 - RNA, 20 nt, Artificial Sequence
  spacer sequence TTCN PAM
cugaauucauauagcucuua

SEQ ID NO: 19556 - RNA, 20 nt, Artificial Sequence
  spacer sequence TTCN PAM
gggaagggagaauaugucag

SEQ ID NO: 19557 - RNA, 20 nt, Artificial Sequence
  spacer sequence TTCN PAM
uauagcucuuaaauuagcac

SEQ ID NO: 19558 - RNA, 20 nt, Artificial Sequence
  spacer sequence TTCN PAM
uccccuuagagcacacagag

SEQ ID NO: 19559 - RNA, 20 nt, Artificial Sequence
  spacer sequence TTCN PAM
ccuuagagcacacagagugc

SEQ ID NO: 19560 - RNA, 20 nt, Artificial Sequence
  spacer sequence TTCN PAM
caucaaacaugcugccucca

SEQ ID NO: 19561 - RNA, 20 nt, Artificial Sequence
  spacer sequence TTCN PAM
uaaauuaauuaauuaauaag

SEQ ID NO: 19562 - RNA, 20 nt, Artificial Sequence
  spacer sequence TTCN PAM
gacucaaaaauccaugcucu

SEQ ID NO: 19563 - RNA, 20 nt, Artificial Sequence
  spacer sequence TTCN PAM
agauaaagacauuggagcuu

SEQ ID NO: 19564 - RNA, 20 nt, Artificial Sequence
  spacer sequence TTCN PAM
uccaagccauguagcauuau

SEQ ID NO: 19565 - RNA, 20 nt, Artificial Sequence
  spacer sequence TTCN PAM
guuauuccuccaagccaugu

SEQ ID NO: 19566 - RNA, 20 nt, Artificial Sequence
  spacer sequence TTCN PAM
uuaccccugccaagugccca

SEQ ID NO: 19567 - RNA, 20 nt, Artificial Sequence
  spacer sequence TTCN PAM
uuuauugacugucuaaacca

SEQ ID NO: 19568 - RNA, 20 nt, Artificial Sequence
  spacer sequence TTCN PAM
agaguccuauuuuucuuuuu

SEQ ID NO: 19569 - RNA, 20 nt, Artificial Sequence
  spacer sequence TTCN PAM
uuuuaauaguguucauucca

SEQ ID NO: 19570 - RNA, 20 nt, Artificial Sequence
  spacer sequence TTCN PAM
uuccaagacaugucuaccac

SEQ ID NO: 19571 - RNA, 20 nt, Artificial Sequence
  spacer sequence TTCN PAM
aagacaugucuaccacauuu

SEQ ID NO: 19572 - RNA, 20 nt, Artificial Sequence
  spacer sequence TTCN PAM
ccuaucaauuaugaaaaagu

SEQ ID NO: 19573 - RNA, 20 nt, Artificial Sequence
  spacer sequence TTCN PAM
uaauugauaggugaaaauaa

SEQ ID NO: 19574 - RNA, 20 nt, Artificial Sequence
  spacer sequence TTCN PAM
ggaaccaagacccaaguccc

SEQ ID NO: 19575 - RNA, 20 nt, Artificial Sequence
  spacer sequence TTCN PAM
ugaaaacuuuuucauaauug

SEQ ID NO: 19576 - RNA, 20 nt, Artificial Sequence
  spacer sequence TTCN PAM
uaucugaaaauaaaaauucc

SEQ ID NO: 19577 - RNA, 20 nt, Artificial Sequence
  spacer sequence TTCN PAM
gauaagaaggcacaucaaca

SEQ ID NO: 19578 - RNA, 20 nt, Artificial Sequence
  spacer sequence TTCN PAM
ccaaacuuaauacaauuugg

SEQ ID NO: 19579 - RNA, 20 nt, Artificial Sequence
  spacer sequence TTCN PAM
caaauuguauuaaguuuggg

SEQ ID NO: 19580 - RNA, 20 nt, Artificial Sequence
  spacer sequence TTCN PAM
auugucauuuuccuugaaac

SEQ ID NO: 19581 - RNA, 20 nt, Artificial Sequence
  spacer sequence TTCN PAM
uugaaacacuugguacugug

SEQ ID NO: 19582 - RNA, 20 nt, Artificial Sequence
  spacer sequence TTCN PAM
aggaaaaugacaauugaaca

SEQ ID NO: 19583 - RNA, 20 nt, Artificial Sequence
  spacer sequence TTCN PAM
agaccagccuggccaacgug

SEQ ID NO: 19584 - RNA, 20 nt, Artificial Sequence
  spacer sequence TTCN PAM
acacguuggccaggcugguc

SEQ ID NO: 19585 - RNA, 20 nt, Artificial Sequence
  spacer sequence TTCN PAM
ccugucucagccucccgagu

SEQ ID NO: 19586 - RNA, 20 nt, Artificial Sequence
  spacer sequence TTCN PAM
agcgauucuccugucucagc

SEQ ID NO: 19587 - RNA, 20 nt, Artificial Sequence
  spacer sequence TTCN PAM
guuuacaaacacaaauggag

SEQ ID NO: 19588 - RNA, 20 nt, Artificial Sequence
  spacer sequence TTCN PAM
aaaguauugggaauuuaacu

SEQ ID NO: 19589 - RNA, 20 nt, Artificial Sequence
  spacer sequence TTCN PAM
caauacuuuggaaucauggc

SEQ ID NO: 19590 - RNA, 20 nt, Artificial Sequence
  spacer sequence TTCN PAM
ucccauccuaggcaguuaaa

SEQ ID NO: 19591 - RNA, 20 nt, Artificial Sequence
  spacer sequence TTCN PAM
aaaggcacuuaauucucugc

SEQ ID NO: 19592 - RNA, 20 nt, Artificial Sequence
  spacer sequence TTCN PAM
cugcauucuaagcuauauuu

SEQ ID NO: 19593 - RNA, 20 nt, Artificial Sequence
  spacer sequence TTCN PAM
aagcuauauuucaacaagca

SEQ ID NO: 19594 - RNA, 20 nt, Artificial Sequence
  spacer sequence TTCN PAM
acaagcaaaacuuccaaaca

SEQ ID NO: 19595 - RNA, 20 nt, Artificial Sequence
  spacer sequence TTCN PAM
aaacagaaucccaaaagaug

SEQ ID NO: 19596 - RNA, 20 nt, Artificial Sequence
  spacer sequence TTCN PAM
guuuggaaguuuugcuuguu

SEQ ID NO: 19597 - RNA, 20 nt, Artificial Sequence
  spacer sequence TTCN PAM
uggccuggggcugucuuggu

SEQ ID NO: 19598 - RNA, 20 nt, Artificial Sequence
  spacer sequence TTCN PAM
ggggcuguuugggggcauug

SEQ ID NO: 19599 - RNA, 20 nt, Artificial Sequence
  spacer sequence TTCN PAM
aaacaagauaaaagaccuga

SEQ ID NO: 19600 - RNA, 20 nt, Artificial Sequence
  spacer sequence TTCN PAM
uaaagauaauaaauccaauc

SEQ ID NO: 19601 - RNA, 20 nt, Artificial Sequence
  spacer sequence TTCN PAM
acuccugaccaaguugggac

SEQ ID NO: 19602 - RNA, 20 nt, Artificial Sequence
  spacer sequence TTCN PAM
cuggcguuuuggaagucacc

SEQ ID NO: 19603 - RNA, 20 nt, Artificial Sequence
  spacer sequence TTCN PAM
aaaacgccagggaaguuuac

SEQ ID NO: 19604 - RNA, 20 nt, Artificial Sequence
  spacer sequence TTCN PAM
ccugacuggccugcaccucc

SEQ ID NO: 19605 - RNA, 20 nt, Artificial Sequence
  spacer sequence TTCN PAM
cucucaccacagauugcuca

SEQ ID NO: 19606 - RNA, 20 nt, Artificial Sequence
  spacer sequence TTCN PAM
gggaugccuccugugccucu

SEQ ID NO: 19607 - RNA, 20 nt, Artificial Sequence
  spacer sequence TTCN PAM
uaccuggccacccugagcag

SEQ ID NO: 19608 - RNA, 20 nt, Artificial Sequence
  spacer sequence TTCN PAM
cuuccagugagaguccugua

SEQ ID NO: 19609 - RNA, 20 nt, Artificial Sequence
  spacer sequence TTCN PAM
agugagaguccuguagaauc

SEQ ID NO: 19610 - RNA, 20 nt, Artificial Sequence
  spacer sequence TTCN PAM
acaggacucucacuggaaga

SEQ ID NO: 19611 - RNA, 20 nt, Artificial Sequence
  spacer sequence TTCN PAM
aaggucacucuuagauucua

SEQ ID NO: 19612 - RNA, 20 nt, Artificial Sequence
  spacer sequence TTCN PAM
caucuguagcaggagccaac

SEQ ID NO: 19613 - RNA, 20 nt, Artificial Sequence
  spacer sequence TTCN PAM
cugggucuuaguuuucucau

SEQ ID NO: 19614 - RNA, 20 nt, Artificial Sequence
  spacer sequence TTCN PAM
cuucucugggucuuaguuuu

SEQ ID NO: 19615 - RNA, 20 nt, Artificial Sequence
  spacer sequence TTCN PAM
ucucuucucugggucuuagu

SEQ ID NO: 19616 - RNA, 20 nt, Artificial Sequence
  spacer sequence TTCN PAM
cguucuucucuucucugggu

SEQ ID NO: 19617 - RNA, 20 nt, Artificial Sequence
  spacer sequence TTCN PAM
guucacguucuucucuucuc

SEQ ID NO: 19618 - RNA, 20 nt, Artificial Sequence
  spacer sequence TTCN PAM
ggaccaagacucccgggcuc

SEQ ID NO: 19619 - RNA, 20 nt, Artificial Sequence
  spacer sequence TTCN PAM
ggccacauggcugcugggca

SEQ ID NO: 19620 - RNA, 20 nt, Artificial Sequence
  spacer sequence TTCN PAM
aggccuggacccaacacagc

SEQ ID NO: 19621 - RNA, 20 nt, Artificial Sequence
  spacer sequence TTCN PAM
ucgcugccagcgcuccugcc

SEQ ID NO: 19622 - RNA, 20 nt, Artificial Sequence
  spacer sequence TTCN PAM
auccucucaaagucagaguc

SEQ ID NO: 19623 - RNA, 20 nt, Artificial Sequence
  spacer sequence TTCN PAM
ucaggaaccaucaaggugag

SEQ ID NO: 19624 - RNA, 20 nt, Artificial Sequence
  spacer sequence TTCN PAM
ggaaccaucaaggugagaug

SEQ ID NO: 19625 - RNA, 20 nt, Artificial Sequence
  spacer sequence TTCN PAM
ugaagaaaggacucugacuu

SEQ ID NO: 19626 - RNA, 20 nt, Artificial Sequence
  spacer sequence TTCN PAM
cagauuaucugggagggguc

SEQ ID NO: 19627 - RNA, 20 nt, Artificial Sequence
  spacer sequence TTCN PAM
guaggccguuguuuuauuau

SEQ ID NO: 19628 - RNA, 20 nt, Artificial Sequence
  spacer sequence TTCN PAM
uucaguaggccguuguuuua

SEQ ID NO: 19629 - RNA, 20 nt, Artificial Sequence
  spacer sequence TTCN PAM
ggucaggauagcuaagcucu

SEQ ID NO: 19630 - RNA, 20 nt, Artificial Sequence
  spacer sequence TTCN PAM
gaugcccucuuuugagguug

SEQ ID NO: 19631 - RNA, 20 nt, Artificial Sequence
  spacer sequence TTCN PAM
gaggggaaggcaggggagcu

SEQ ID NO: 19632 - RNA, 20 nt, Artificial Sequence
  spacer sequence TTCN PAM
ccuccgaauucagaugcccu

SEQ ID NO: 19633 - RNA, 20 nt, Artificial Sequence
  spacer sequence TTCN PAM
ucagugccaucagcuauugc

SEQ ID NO: 19634 - RNA, 20 nt, Artificial Sequence
  spacer sequence TTCN PAM
gcuugcaauagcugauggca

SEQ ID NO: 19635 - RNA, 20 nt, Artificial Sequence
  spacer sequence TTCN PAM
acaugauugcauucagcuug

SEQ ID NO: 19636 - RNA, 20 nt, Artificial Sequence
  spacer sequence TTCN PAM
aagaaacggucuggccugaa

SEQ ID NO: 19637 - RNA, 20 nt, Artificial Sequence
  spacer sequence TTCN PAM
uggaagggcagggugugagu

SEQ ID NO: 19638 - RNA, 20 nt, Artificial Sequence
  spacer sequence TTCN PAM
ggccagaccguuucuuggaa

SEQ ID NO: 19639 - RNA, 20 nt, Artificial Sequence
  spacer sequence TTCN PAM
auggaggggggaggggugau

SEQ ID NO: 19640 - RNA, 20 nt, Artificial Sequence
  spacer sequence TTCN PAM
cacacucaccccacaacauc

SEQ ID NO: 19641 - RNA, 20 nt, Artificial Sequence
  spacer sequence TTCN PAM
ggucaugcccaugccugggu

SEQ ID NO: 19642 - RNA, 20 nt, Artificial Sequence
  spacer sequence TTCN PAM
aucuuguccuuucuggucau

SEQ ID NO: 19643 - RNA, 20 nt, Artificial Sequence
  spacer sequence TTCN PAM
cuugggguuuucaaucuugu

SEQ ID NO: 19644 - RNA, 20 nt, Artificial Sequence
  spacer sequence TTCN PAM
gcagacuucccuugggguuu

SEQ ID NO: 19645 - RNA, 20 nt, Artificial Sequence
  spacer sequence TTCN PAM
aaccgguucuguggccucca

SEQ ID NO: 19646 - RNA, 20 nt, Artificial Sequence
  spacer sequence TTCN PAM
guggccuccaacaaaccccc

SEQ ID NO: 19647 - RNA, 20 nt, Artificial Sequence
  spacer sequence TTCN PAM
cugagaaauuagggcaauag

SEQ ID NO: 19648 - RNA, 20 nt, Artificial Sequence
  spacer sequence TTCN PAM
cagagaaguaaacugaggcu

SEQ ID NO: 19649 - RNA, 20 nt, Artificial Sequence
  spacer sequence TTCN PAM
cauuuugucucuaugccacc

SEQ ID NO: 19650 - RNA, 20 nt, Artificial Sequence
  spacer sequence TTCN PAM
aacuuaaaaguauuugucaa

SEQ ID NO: 19651 - RNA, 20 nt, Artificial Sequence
  spacer sequence TTCN PAM
uugcccuccacccagauauu

SEQ ID NO: 19652 - RNA, 20 nt, Artificial Sequence
  spacer sequence TTCN PAM
gaguaaauaucuggguggag

SEQ ID NO: 19653 - RNA, 20 nt, Artificial Sequence
  spacer sequence TTCN PAM
gagaauuccccaaauuuacc

SEQ ID NO: 19654 - RNA, 20 nt, Artificial Sequence
  spacer sequence TTCN PAM
cugaaaauucugaguaaaua

SEQ ID NO: 19655 - RNA, 20 nt, Artificial Sequence
  spacer sequence TTCN PAM
ccaaauuuaccaagcaccuu

SEQ ID NO: 19656 - RNA, 20 nt, Artificial Sequence
  spacer sequence TTCN PAM
aaggugcuugguaaauuugg

SEQ ID NO: 19657 - RNA, 20 nt, Artificial Sequence
  spacer sequence TTCN PAM
uccaaggugcuugguaaauu

SEQ ID NO: 19658 - RNA, 20 nt, Artificial Sequence
  spacer sequence TTCN PAM
cuugcugcucaaauucccuu

SEQ ID NO: 19659 - RNA, 20 nt, Artificial Sequence
  spacer sequence TTCN PAM
cuuguaguuaaucccagcuu

SEQ ID NO: 19660 - RNA, 20 nt, Artificial Sequence
  spacer sequence TTCN PAM
uuaauaagauuaaaggggaa

SEQ ID NO: 19661 - RNA, 20 nt, Artificial Sequence
  spacer sequence TTCN PAM
ccuuuaaucuuauuaaggaa

SEQ ID NO: 19662 - RNA, 20 nt, Artificial Sequence
  spacer sequence TTCN PAM
accaggucaucucucaggac

SEQ ID NO: 19663 - RNA, 20 nt, Artificial Sequence
  spacer sequence TTCN PAM
ugaguccugagagaugaccu

SEQ ID NO: 19664 - RNA, 20 nt, Artificial Sequence
  spacer sequence TTCN PAM
agucaucugccucugucacc

SEQ ID NO: 19665 - RNA, 20 nt, Artificial Sequence
  spacer sequence TTCN PAM
gcacugauuugcucucaggu

SEQ ID NO: 19666 - RNA, 20 nt, Artificial Sequence
  spacer sequence TTCN PAM
gaauguaauuucauuucuga

SEQ ID NO: 19667 - RNA, 20 nt, Artificial Sequence
  spacer sequence TTCN PAM
gaaaccagugcagaggagcc

SEQ ID NO: 19668 - RNA, 20 nt, Artificial Sequence
  spacer sequence TTCN PAM
uuucugaagucccuuuacuu

SEQ ID NO: 19669 - RNA, 20 nt, Artificial Sequence
  spacer sequence TTCN PAM
gaagucccuuuacuuuugag

SEQ ID NO: 19670 - RNA, 20 nt, Artificial Sequence
  spacer sequence TTCN PAM
gaaaugaaauuacauucuga

SEQ ID NO: 19671 - RNA, 20 nt, Artificial Sequence
  spacer sequence TTCN PAM
ugagcuucugguucuaaagc

SEQ ID NO: 19672 - RNA, 20 nt, Artificial Sequence
  spacer sequence TTCN PAM
gguucuaaagccugaugaca

SEQ ID NO: 19673 - RNA, 20 nt, Artificial Sequence
  spacer sequence TTCN PAM
aaagccugaugacacuuuag

SEQ ID NO: 19674 - RNA, 20 nt, Artificial Sequence
  spacer sequence TTCN PAM
caccuguacuccuacaguuu

SEQ ID NO: 19675 - RNA, 20 nt, Artificial Sequence
  spacer sequence TTCN PAM
aggccagccugggcaacaua

SEQ ID NO: 19676 - RNA, 20 nt, Artificial Sequence
  spacer sequence TTCN PAM
agccugggugacagagcaag

SEQ ID NO: 19677 - RNA, 20 nt, Artificial Sequence
  spacer sequence TTCN PAM
caccuugcauuccagccuuu

SEQ ID NO: 19678 - RNA, 20 nt, Artificial Sequence
  spacer sequence TTCN PAM
agccuuuuucaucuaaggac

SEQ ID NO: 19679 - RNA, 20 nt, Artificial Sequence
  spacer sequence TTCN PAM
ucuaaggacuuuaaccuucg

SEQ ID NO: 19680 - RNA, 20 nt, Artificial Sequence
  spacer sequence TTCN PAM
ggaccgaacagagaaaucua

SEQ ID NO: 19681 - RNA, 20 nt, Artificial Sequence
  spacer sequence TTCN PAM
gucccgaagguuaaaguccu

SEQ ID NO: 19682 - RNA, 20 nt, Artificial Sequence
  spacer sequence TTCN PAM
cuguucggucccgaagguua

SEQ ID NO: 19683 - RNA, 20 nt, Artificial Sequence
  spacer sequence TTCN PAM
cuuuaagcaacaagauagug

SEQ ID NO: 19684 - RNA, 20 nt, Artificial Sequence
  spacer sequence TTCN PAM
gaaaaaacaaggaaugacca

SEQ ID NO: 19685 - RNA, 20 nt, Artificial Sequence
  spacer sequence TTCN PAM
gaauggacuccucucuuuuu

SEQ ID NO: 19686 - RNA, 20 nt, Artificial Sequence
  spacer sequence TTCN PAM
uuguuuuuucagaauggacu

SEQ ID NO: 19687 - RNA, 20 nt, Artificial Sequence
  spacer sequence TTCN PAM
ugucucugccagccuuaguc

SEQ ID NO: 19688 - RNA, 20 nt, Artificial Sequence
  spacer sequence TTCN PAM
gcucaagcaaguagcuaaga

SEQ ID NO: 19689 - RNA, 20 nt, Artificial Sequence
  spacer sequence TTCN PAM
aacuuggacuuggagccagg

SEQ ID NO: 19690 - RNA, 20 nt, Artificial Sequence
  spacer sequence TTCN PAM
auguuuccuaacaggcagua

SEQ ID NO: 19691 - RNA, 20 nt, Artificial Sequence
  spacer sequence TTCN PAM
uaacaggcaguauggacaac

SEQ ID NO: 19692 - RNA, 20 nt, Artificial Sequence
  spacer sequence TTCN PAM
uguuguccauacugccuguu

SEQ ID NO: 19693 - RNA, 20 nt, Artificial Sequence
  spacer sequence TTCN PAM
aaaaguuucauguuguccau

SEQ ID NO: 19694 - RNA, 20 nt, Artificial Sequence
  spacer sequence TTCN PAM
caacaaagguaaaaugcucc

SEQ ID NO: 19695 - RNA, 20 nt, Artificial Sequence
  spacer sequence TTCN PAM
ucuacuuccgaaaggcuuaa

SEQ ID NO: 19696 - RNA, 20 nt, Artificial Sequence
  spacer sequence TTCN PAM
acuuccgaaaggcuuaaaaa

SEQ ID NO: 19697 - RNA, 20 nt, Artificial Sequence
  spacer sequence TTCN PAM
gaaaggcuuaaaaauuauuc

SEQ ID NO: 19698 - RNA, 20 nt, Artificial Sequence
  spacer sequence TTCN PAM
gaaguagaagaaauaggggc

SEQ ID NO: 19699 - RNA, 20 nt, Artificial Sequence
  spacer sequence TTCN PAM
aaagugagaauauaauuaga

SEQ ID NO: 19700 - RNA, 20 nt, Artificial Sequence
  spacer sequence TTCN PAM
cacuuuugaauaauuuuuaa

SEQ ID NO: 19701 - RNA, 20 nt, Artificial Sequence
  spacer sequence TTCN PAM
ucuaauuauauucucacuuu

SEQ ID NO: 19702 - RNA, 20 nt, Artificial Sequence
  spacer sequence TTCN PAM
gugguugcugcuuccucuaa

SEQ ID NO: 19703 - RNA, 20 nt, Artificial Sequence
  spacer sequence TTCN PAM
caaucuccuccucaaaagaa

SEQ ID NO: 19704 - RNA, 20 nt, Artificial Sequence
  spacer sequence TTCN PAM
uuugaggaggagauugggaa

SEQ ID NO: 19705 - RNA, 20 nt, Artificial Sequence
  spacer sequence TTCN PAM
acuaaaguaaauagcucuaa

SEQ ID NO: 19706 - RNA, 20 nt, Artificial Sequence
  spacer sequence TTCN PAM
ucaagaaagcacucauauca

SEQ ID NO: 19707 - RNA, 20 nt, Artificial Sequence
  spacer sequence TTCN PAM
ugaugaacugcgcccuuaga

SEQ ID NO: 19708 - RNA, 20 nt, Artificial Sequence
  spacer sequence TTCN PAM
uagucauuuaucccacucug

SEQ ID NO: 19709 - RNA, 20 nt, Artificial Sequence
  spacer sequence TTCN PAM
aauuuauuuauguguuuuau

SEQ ID NO: 19710 - RNA, 20 nt, Artificial Sequence
  spacer sequence TTCN PAM
cccacccuagggauaugauc

SEQ ID NO: 19711 - RNA, 20 nt, Artificial Sequence
  spacer sequence TTCN PAM
uuuacugcauggcagcagcc

SEQ ID NO: 19712 - RNA, 20 nt, Artificial Sequence
  spacer sequence TTCN PAM
cuggcugauacugggacagu

SEQ ID NO: 19713 - RNA, 20 nt, Artificial Sequence
  spacer sequence TTCN PAM
cugcaggagucucaggcccc

SEQ ID NO: 19714 - RNA, 20 nt, Artificial Sequence
  spacer sequence TTCN PAM
cuggggccugagacuccugc

SEQ ID NO: 19715 - RNA, 20 nt, Artificial Sequence
  spacer sequence TTCN PAM
cagcacuaagguaugcgacc

SEQ ID NO: 19716 - RNA, 20 nt, Artificial Sequence
  spacer sequence TTCN PAM
uuuucaugauguacuguugu

SEQ ID NO: 19717 - RNA, 20 nt, Artificial Sequence
  spacer sequence TTCN PAM
ugauguacuguugugucuuc

SEQ ID NO: 19718 - RNA, 20 nt, Artificial Sequence
  spacer sequence TTCN PAM
acaccagccccuguccuuua

SEQ ID NO: 19719 - RNA, 20 nt, Artificial Sequence
  spacer sequence TTCN PAM
uccuuugccuccuuuuuugc

SEQ ID NO: 19720 - RNA, 20 nt, Artificial Sequence
  spacer sequence TTCN PAM
uuugccuccuuuuuugcuuu

SEQ ID NO: 19721 - RNA, 20 nt, Artificial Sequence
  spacer sequence TTCN PAM
guuguuguuuucuauuuggg

SEQ ID NO: 19722 - RNA, 20 nt, Artificial Sequence
  spacer sequence TTCN PAM
auuuggguuuguuugcuucc

SEQ ID NO: 19723 - RNA, 20 nt, Artificial Sequence
  spacer sequence TTCN PAM
uuuuuuuuuuuuuuuuuuuu

SEQ ID NO: 19724 - RNA, 20 nt, Artificial Sequence
  spacer sequence TTCN PAM
ugagacagagucucacucuu

SEQ ID NO: 19725 - RNA, 20 nt, Artificial Sequence
  spacer sequence TTCN PAM
agcgauucucgugccucagc

SEQ ID NO: 19726 - RNA, 20 nt, Artificial Sequence
  spacer sequence TTCN PAM
cgugccucagccucccaagu

SEQ ID NO: 19727 - RNA, 20 nt, Artificial Sequence
  spacer sequence TTCN PAM
guagagauaggguuucacca

SEQ ID NO: 19728 - RNA, 20 nt, Artificial Sequence
  spacer sequence TTCN PAM
ccauguuggccaggcugguc

SEQ ID NO: 19729 - RNA, 20 nt, Artificial Sequence
  spacer sequence TTCN PAM
agaccagccuggccaacaug

SEQ ID NO: 19730 - RNA, 20 nt, Artificial Sequence
  spacer sequence TTCN PAM
uuuaacagucuguuuuaauu

SEQ ID NO: 19731 - RNA, 20 nt, Artificial Sequence
  spacer sequence TTCN PAM
guggcauuaaguacguucac

SEQ ID NO: 19732 - RNA, 20 nt, Artificial Sequence
  spacer sequence TTCN PAM
caaugcuguguccucauccc

SEQ ID NO: 19733 - RNA, 20 nt, Artificial Sequence
  spacer sequence TTCN PAM
ucauccccagcauaaauucc

SEQ ID NO: 19734 - RNA, 20 nt, Artificial Sequence
  spacer sequence TTCN PAM
cuacccguuaaacaguagcu

SEQ ID NO: 19735 - RNA, 20 nt, Artificial Sequence
  spacer sequence TTCN PAM
ccauccccucauuaaucccu

SEQ ID NO: 19736 - RNA, 20 nt, Artificial Sequence
  spacer sequence TTCN PAM
auuuucugucucuaugaauu

SEQ ID NO: 19737 - RNA, 20 nt, Artificial Sequence
  spacer sequence TTCN PAM
gucucuaugaauuuacccag

SEQ ID NO: 19738 - RNA, 20 nt, Artificial Sequence
  spacer sequence TTCN PAM
uagagacagaaaauggaaua

SEQ ID NO: 19739 - RNA, 20 nt, Artificial Sequence
  spacer sequence TTCN PAM
augagguaccuauacugggu

SEQ ID NO: 19740 - RNA, 20 nt, Artificial Sequence
  spacer sequence TTCN PAM
acuuccaugagguaccuaua

SEQ ID NO: 19741 - RNA, 20 nt, Artificial Sequence
  spacer sequence TTCN PAM
uuuauuuuuauggcugaaua

SEQ ID NO: 19742 - RNA, 20 nt, Artificial Sequence
  spacer sequence TTCN PAM
gccauaaaaauaaaugaaau

SEQ ID NO: 19743 - RNA, 20 nt, Artificial Sequence
  spacer sequence TTCN PAM
acuguguguauagcucacau

SEQ ID NO: 19744 - RNA, 20 nt, Artificial Sequence
  spacer sequence TTCN PAM
ucucuucuuuucuuuuuuuu

SEQ ID NO: 19745 - RNA, 20 nt, Artificial Sequence
  spacer sequence TTCN PAM
uuucuuuuuuuuuuuuuuuu

SEQ ID NO: 19746 - RNA, 20 nt, Artificial Sequence
  spacer sequence TTCN PAM
uuuuuuuuuuuuuuuuuccu

SEQ ID NO: 19747 - RNA, 20 nt, Artificial Sequence
  spacer sequence TTCN PAM
ugagacagauuuucccucug

SEQ ID NO: 19748 - RNA, 20 nt, Artificial Sequence
  spacer sequence TTCN PAM
cucugucacccaggcuggag

SEQ ID NO: 19749 - RNA, 20 nt, Artificial Sequence
  spacer sequence TTCN PAM
cgugccucagccuccugagu

SEQ ID NO: 19750 - RNA, 20 nt, Artificial Sequence
  spacer sequence TTCN PAM
agcuacucaggaggcugagg

SEQ ID NO: 19751 - RNA, 20 nt, Artificial Sequence
  spacer sequence TTCN PAM
ccauguuggccaggcugguc

SEQ ID NO: 19752 - RNA, 20 nt, Artificial Sequence
  spacer sequence TTCN PAM
agaccagccuggccaacaug

SEQ ID NO: 19753 - RNA, 20 nt, Artificial Sequence
  spacer sequence TTCN PAM
ggaggccgaggcgggcagau

SEQ ID NO: 19754 - RNA, 20 nt, Artificial Sequence
  spacer sequence TTCN PAM
ucuuuuuauggaugcuuggg

SEQ ID NO: 19755 - RNA, 20 nt, Artificial Sequence
  spacer sequence TTCN PAM
acuuugcguuuauugugacu

SEQ ID NO: 19756 - RNA, 20 nt, Artificial Sequence
  spacer sequence TTCN PAM
uagcaguauuagucacaaua

SEQ ID NO: 19757 - RNA, 20 nt, Artificial Sequence
  spacer sequence TTCN PAM
auacacucacguucauagca

SEQ ID NO: 19758 - RNA, 20 nt, Artificial Sequence
  spacer sequence TTCN PAM
auucuuuuggcuauacaccu

SEQ ID NO: 19759 - RNA, 20 nt, Artificial Sequence
  spacer sequence TTCN PAM
uuuggcuauacaccugggag

SEQ ID NO: 19760 - RNA, 20 nt, Artificial Sequence
  spacer sequence TTCN PAM
acucccagguguauagccaa

SEQ ID NO: 19761 - RNA, 20 nt, Artificial Sequence
  spacer sequence TTCN PAM
ggaucguaugguaagugugc

SEQ ID NO: 19762 - RNA, 20 nt, Artificial Sequence
  spacer sequence TTCN PAM
caaaaaguugcacacuuacc

SEQ ID NO: 19763 - RNA, 20 nt, Artificial Sequence
  spacer sequence TTCN PAM
acagugauuccaccauuuga

SEQ ID NO: 19764 - RNA, 20 nt, Artificial Sequence
  spacer sequence TTCN PAM
accauuugacauucccacca

SEQ ID NO: 19765 - RNA, 20 nt, Artificial Sequence
  spacer sequence TTCN PAM
caccagcaaugcaugcgguc

SEQ ID NO: 19766 - RNA, 20 nt, Artificial Sequence
  spacer sequence TTCN PAM
cuacauucuaacuaacacuu

SEQ ID NO: 19767 - RNA, 20 nt, Artificial Sequence
  spacer sequence TTCN PAM
aacuaacacuuguuauuuuc

SEQ ID NO: 19768 - RNA, 20 nt, Artificial Sequence
  spacer sequence TTCN PAM
guuuuuguuuguuuguuuuu

SEQ ID NO: 19769 - RNA, 20 nt, Artificial Sequence
  spacer sequence TTCN PAM
aguaggcaugaagugguguu

SEQ ID NO: 19770 - RNA, 20 nt, Artificial Sequence
  spacer sequence TTCN PAM
ugccuacuagaauggcuauu

SEQ ID NO: 19771 - RNA, 20 nt, Artificial Sequence
  spacer sequence TTCN PAM
uccaccuccaucaaaaaaag

SEQ ID NO: 19772 - RNA, 20 nt, Artificial Sequence
  spacer sequence TTCN PAM
acccuauuccuccaccucca

SEQ ID NO: 19773 - RNA, 20 nt, Artificial Sequence
  spacer sequence TTCN PAM
cagaggucuaaggcccccag

SEQ ID NO: 19774 - RNA, 20 nt, Artificial Sequence
  spacer sequence TTCN PAM
guaugagguagcagccuccu

SEQ ID NO: 19775 - RNA, 20 nt, Artificial Sequence
  spacer sequence TTCN PAM
uaaguuugucaccggagagg

SEQ ID NO: 19776 - RNA, 20 nt, Artificial Sequence
  spacer sequence TTCN PAM
gugcccucuccggugacaaa

SEQ ID NO: 19777 - RNA, 20 nt, Artificial Sequence
  spacer sequence TTCN PAM
cuccaagacaauaaguuggu

SEQ ID NO: 19778 - RNA, 20 nt, Artificial Sequence
  spacer sequence TTCN PAM
ucccuccaagacaauaaguu

SEQ ID NO: 19779 - RNA, 20 nt, Artificial Sequence
  spacer sequence TTCN PAM
gccuugcugcuucuucccuc

SEQ ID NO: 19780 - RNA, 20 nt, Artificial Sequence
  spacer sequence TTCN PAM
agucuucugccuugcugcuu

SEQ ID NO: 19781 - RNA, 20 nt, Artificial Sequence
  spacer sequence TTCN PAM
cagagaaaaaaacagucuac

SEQ ID NO: 19782 - RNA, 20 nt, Artificial Sequence
  spacer sequence TTCN PAM
cugagaaguucaagucuucu

SEQ ID NO: 19783 - RNA, 20 nt, Artificial Sequence
  spacer sequence TTCN PAM
uuuuaugcuguccucacaca

SEQ ID NO: 19784 - RNA, 20 nt, Artificial Sequence
  spacer sequence TTCN PAM
guagugugugaggacagcau

SEQ ID NO: 19785 - RNA, 20 nt, Artificial Sequence
  spacer sequence TTCN PAM
aacuagcuguguuaucucag

SEQ ID NO: 19786 - RNA, 20 nt, Artificial Sequence
  spacer sequence TTCN PAM
cugauugagagacugagacu

SEQ ID NO: 19787 - RNA, 20 nt, Artificial Sequence
  spacer sequence TTCN PAM
cucguuggaugcucauugca

SEQ ID NO: 19788 - RNA, 20 nt, Artificial Sequence
  spacer sequence TTCN PAM
agcugcuacugccugcauuu

SEQ ID NO: 19789 - RNA, 20 nt, Artificial Sequence
  spacer sequence TTCN PAM
ucuagcugcuacugccugca

SEQ ID NO: 19790 - RNA, 20 nt, Artificial Sequence
  spacer sequence TTCN PAM
caaccauuuucuucuagcug

SEQ ID NO: 19791 - RNA, 20 nt, Artificial Sequence
  spacer sequence TTCN PAM
gauucccaaccauuuucuuc

SEQ ID NO: 19792 - RNA, 20 nt, Artificial Sequence
  spacer sequence TTCN PAM
uuucagauucccaaccauuu

SEQ ID NO: 19793 - RNA, 20 nt, Artificial Sequence
  spacer sequence TTCN PAM
uggggggcuuuaauucuuuu

SEQ ID NO: 19794 - RNA, 20 nt, Artificial Sequence
  spacer sequence TTCN PAM
ucucacgccuccuccaaaag

SEQ ID NO: 19795 - RNA, 20 nt, Artificial Sequence
  spacer sequence TTCN PAM
cacgccuccuccaaaagcca

SEQ ID NO: 19796 - RNA, 20 nt, Artificial Sequence
  spacer sequence TTCN PAM
ccccgccuccaggacugcug

SEQ ID NO: 19797 - RNA, 20 nt, Artificial Sequence
  spacer sequence TTCN PAM
ggcagcugcugacagaaugu

SEQ ID NO: 19798 - RNA, 20 nt, Artificial Sequence
  spacer sequence TTCN PAM
gucagcagcugccggaaaug

SEQ ID NO: 19799 - RNA, 20 nt, Artificial Sequence
  spacer sequence TTCN PAM
gaucccccguggcacaguca

SEQ ID NO: 19800 - RNA, 20 nt, Artificial Sequence
  spacer sequence TTCN PAM
aaggaagcacuuggagggau

SEQ ID NO: 19801 - RNA, 20 nt, Artificial Sequence
  spacer sequence TTCN PAM
uuugaagggugagcccuggg

SEQ ID NO: 19802 - RNA, 20 nt, Artificial Sequence
  spacer sequence TTCN PAM
caaaggucacacaggaaacu

SEQ ID NO: 19803 - RNA, 20 nt, Artificial Sequence
  spacer sequence TTCN PAM
ugugugaccuuugagaagcc

SEQ ID NO: 19804 - RNA, 20 nt, Artificial Sequence
  spacer sequence TTCN PAM
guuuccugugugaccuuuga

SEQ ID NO: 19805 - RNA, 20 nt, Artificial Sequence
  spacer sequence TTCN PAM
ccuauaguuuagauccaggc

SEQ ID NO: 19806 - RNA, 20 nt, Artificial Sequence
  spacer sequence TTCN PAM
aaugcuccuauuucuccuau

SEQ ID NO: 19807 - RNA, 20 nt, Artificial Sequence
  spacer sequence TTCN PAM
aauguguggauucaaaugcu

SEQ ID NO: 19808 - RNA, 20 nt, Artificial Sequence
  spacer sequence TTCN PAM
gcccaucugagagcguuuag

SEQ ID NO: 19809 - RNA, 20 nt, Artificial Sequence
  spacer sequence TTCN PAM
aauuaacaucaucagaucau

SEQ ID NO: 19810 - RNA, 20 nt, Artificial Sequence
  spacer sequence TTCN PAM
aaacgcuugagaaaaauguc

SEQ ID NO: 19811 - RNA, 20 nt, Artificial Sequence
  spacer sequence TTCN PAM
caagcguuuugaaguucaaa

SEQ ID NO: 19812 - RNA, 20 nt, Artificial Sequence
  spacer sequence TTCN PAM
auuuuuaaaaagcaaagugg

SEQ ID NO: 19813 - RNA, 20 nt, Artificial Sequence
  spacer sequence TTCN PAM
uuccauuuuuaaaaagcaaa

SEQ ID NO: 19814 - RNA, 20 nt, Artificial Sequence
  spacer sequence TTCN PAM
agugacaacacaauaaggaa

SEQ ID NO: 19815 - RNA, 20 nt, Artificial Sequence
  spacer sequence TTCN PAM
uuauuguguugucacuagaa

SEQ ID NO: 19816 - RNA, 20 nt, Artificial Sequence
  spacer sequence TTCN PAM
ucuccuaggauggauuuuau

SEQ ID NO: 19817 - RNA, 20 nt, Artificial Sequence
  spacer sequence TTCN PAM
ucuuggcccuuccaaaggcc

SEQ ID NO: 19818 - RNA, 20 nt, Artificial Sequence
  spacer sequence TTCN PAM
uggcccuuccaaaggccauu

SEQ ID NO: 19819 - RNA, 20 nt, Artificial Sequence
  spacer sequence TTCN PAM
aaaggccauuuaccucuggg

SEQ ID NO: 19820 - RNA, 20 nt, Artificial Sequence
  spacer sequence TTCN PAM
cucaucacccaggaauuacg

SEQ ID NO: 19821 - RNA, 20 nt, Artificial Sequence
  spacer sequence TTCN PAM
ugggugaugagugaacucug

SEQ ID NO: 19822 - RNA, 20 nt, Artificial Sequence
  spacer sequence TTCN PAM
cuuguagcaagcauaacccu

SEQ ID NO: 19823 - RNA, 20 nt, Artificial Sequence
  spacer sequence TTCN PAM
uggcuucccuuguagcaagc

SEQ ID NO: 19824 - RNA, 20 nt, Artificial Sequence
  spacer sequence TTCN PAM
aucugauccugucuuacucu

SEQ ID NO: 19825 - RNA, 20 nt, Artificial Sequence
  spacer sequence TTCN PAM
uacaaaggagguuggcucuu

SEQ ID NO: 19826 - RNA, 20 nt, Artificial Sequence
  spacer sequence TTCN PAM
auaaagcuuuuugcuuuuuu

SEQ ID NO: 19827 - RNA, 20 nt, Artificial Sequence
  spacer sequence TTCN PAM
ucaauaaagcuuuuugcuuu

SEQ ID NO: 19828 - RNA, 20 nt, Artificial Sequence
  spacer sequence TTCN PAM
gucaggcagcugcaaagacc

SEQ ID NO: 19829 - RNA, 20 nt, Artificial Sequence
  spacer sequence TTCN PAM
uuucucacugugacguaagc

SEQ ID NO: 19830 - RNA, 20 nt, Artificial Sequence
  spacer sequence TTCN PAM
cacugugacguaagcuaggc

SEQ ID NO: 19831 - RNA, 20 nt, Artificial Sequence
  spacer sequence TTCN PAM
aaaugcacgcucggcaccca

SEQ ID NO: 19832 - RNA, 20 nt, Artificial Sequence
  spacer sequence TTCN PAM
gaucaguuuuaucugagucu

SEQ ID NO: 19833 - RNA, 20 nt, Artificial Sequence
  spacer sequence TTCN PAM
cacacuuguucagugcaccc

SEQ ID NO: 19834 - RNA, 20 nt, Artificial Sequence
  spacer sequence TTCN PAM
gugcaccccagcaaaaccag

SEQ ID NO: 19835 - RNA, 20 nt, Artificial Sequence
  spacer sequence TTCN PAM
gugucuucacuccuuguuga

SEQ ID NO: 19836 - RNA, 20 nt, Artificial Sequence
  spacer sequence TTCN PAM
cuccuuguugagacuuggug

SEQ ID NO: 19837 - RNA, 20 nt, Artificial Sequence
  spacer sequence TTCN PAM
uuaacccauucacacuuaag

SEQ ID NO: 19838 - RNA, 20 nt, Artificial Sequence
  spacer sequence TTCN PAM
cacuuaaguguuaccucaac

SEQ ID NO: 19839 - RNA, 20 nt, Artificial Sequence
  spacer sequence TTCN PAM
cuccuaauuguguuauaaaa

SEQ ID NO: 19840 - RNA, 20 nt, Artificial Sequence
  spacer sequence TTCN PAM
ucuuauuaaggaaauccaga

SEQ ID NO: 19841 - RNA, 20 nt, Artificial Sequence
  spacer sequence TTCN PAM
uuaauaagaugaaaaucuuu

SEQ ID NO: 19842 - RNA, 20 nt, Artificial Sequence
  spacer sequence TTCN PAM
uagacuaacucugccccgcu

SEQ ID NO: 19843 - RNA, 20 nt, Artificial Sequence
  spacer sequence TTCN PAM
ucauuaggugaccuggggac

SEQ ID NO: 19844 - RNA, 20 nt, Artificial Sequence
  spacer sequence TTCN PAM
cucuccucccugcugucccu

SEQ ID NO: 19845 - RNA, 20 nt, Artificial Sequence
  spacer sequence TTCN PAM
cucuucaggagguggcuggu

SEQ ID NO: 19846 - RNA, 20 nt, Artificial Sequence
  spacer sequence TTCN PAM
ggagguggcugguggccuau

SEQ ID NO: 19847 - RNA, 20 nt, Artificial Sequence
  spacer sequence TTCN PAM
ggagaggguuaggcaggggc

SEQ ID NO: 19848 - RNA, 20 nt, Artificial Sequence
  spacer sequence TTCN PAM
uccgcagccaacaucaaggu

SEQ ID NO: 19849 - RNA, 20 nt, Artificial Sequence
  spacer sequence TTCN PAM
ugcuugcgcccuauugaccu

SEQ ID NO: 19850 - RNA, 20 nt, Artificial Sequence
  spacer sequence TTCN PAM
ugcaauaauuuucccucuaa

SEQ ID NO: 19851 - RNA, 20 nt, Artificial Sequence
  spacer sequence TTCN PAM
cucuaaucauaaagguuuaa

SEQ ID NO: 19852 - RNA, 20 nt, Artificial Sequence
  spacer sequence TTCN PAM
aaaugccuccuuuuuagggg

SEQ ID NO: 19853 - RNA, 20 nt, Artificial Sequence
  spacer sequence TTCN PAM
ucaaacccugcaagcccuaa

SEQ ID NO: 19854 - RNA, 20 nt, Artificial Sequence
  spacer sequence TTCN PAM
aacccugcaagcccuaaaug

SEQ ID NO: 19855 - RNA, 20 nt, Artificial Sequence
  spacer sequence TTCN PAM
ccauuuagggcuugcagggu

SEQ ID NO: 19856 - RNA, 20 nt, Artificial Sequence
  spacer sequence TTCN PAM
cacaaguucaugugccuccc

SEQ ID NO: 19857 - RNA, 20 nt, Artificial Sequence
  spacer sequence TTCN PAM
ugugccucccuaaaacgcag

SEQ ID NO: 19858 - RNA, 20 nt, Artificial Sequence
  spacer sequence TTCN PAM
ccuggcuuacagaugacgcu

SEQ ID NO: 19859 - RNA, 20 nt, Artificial Sequence
  spacer sequence TTCN PAM
cccagaacccccaggugagg

SEQ ID NO: 19860 - RNA, 20 nt, Artificial Sequence
  spacer sequence TTCN PAM
gggugaagggagcuccccgc

SEQ ID NO: 19861 - RNA, 20 nt, Artificial Sequence
  spacer sequence TTCN PAM
ucaccuggggguucugggug

SEQ ID NO: 19862 - RNA, 20 nt, Artificial Sequence
  spacer sequence TTCN PAM
gagagggggcagagcugagg

SEQ ID NO: 19863 - RNA, 20 nt, Artificial Sequence
  spacer sequence TTCN PAM
cucucagggugucacugaga

SEQ ID NO: 19864 - RNA, 20 nt, Artificial Sequence
  spacer sequence TTCN PAM
cugacucaaggguggcagga

SEQ ID NO: 19865 - RNA, 20 nt, Artificial Sequence
  spacer sequence TTCN PAM
ugccacccuugagucaguga

SEQ ID NO: 19866 - RNA, 20 nt, Artificial Sequence
  spacer sequence TTCN PAM
ggguaauuaguggccuuccu

SEQ ID NO: 19867 - RNA, 20 nt, Artificial Sequence
  spacer sequence TTCN PAM
cuggguggcacaaacagccu

SEQ ID NO: 19868 - RNA, 20 nt, Artificial Sequence
  spacer sequence TTCN PAM
ucuuucccuggguggcacaa

SEQ ID NO: 19869 - RNA, 20 nt, Artificial Sequence
  spacer sequence TTCN PAM
cauggggaagugcgucuucu

SEQ ID NO: 19870 - RNA, 20 nt, Artificial Sequence
  spacer sequence TTCN PAM
ccaugagaaaaaggucaguu

SEQ ID NO: 19871 - RNA, 20 nt, Artificial Sequence
  spacer sequence TTCN PAM
ccucuccaaaccacaggcuc

SEQ ID NO: 19872 - RNA, 20 nt, Artificial Sequence
  spacer sequence TTCN PAM
cuugagcuggucugcuugug

SEQ ID NO: 19873 - RNA, 20 nt, Artificial Sequence
  spacer sequence TTCN PAM
ugcaaugaccacugggugug

SEQ ID NO: 19874 - RNA, 20 nt, Artificial Sequence
  spacer sequence TTCN PAM
ggccccugcugagagggguc

SEQ ID NO: 19875 - RNA, 20 nt, Artificial Sequence
  spacer sequence TTCN PAM
ccugcccugguuuggaaccc

SEQ ID NO: 19876 - RNA, 20 nt, Artificial Sequence
  spacer sequence TTCN PAM
aaaccagggcaggggaaugg

SEQ ID NO: 19877 - RNA, 20 nt, Artificial Sequence
  spacer sequence TTCN PAM
uggcuuaggcugggaggcac

SEQ ID NO: 19878 - RNA, 20 nt, Artificial Sequence
  spacer sequence TTCN PAM
uuccuggcuuaggcugggag

SEQ ID NO: 19879 - RNA, 20 nt, Artificial Sequence
  spacer sequence TTCN PAM
gauauauucccacaagcaaa

SEQ ID NO: 19880 - RNA, 20 nt, Artificial Sequence
  spacer sequence TTCN PAM
cacaagcaaaauuaaauacc

SEQ ID NO: 19881 - RNA, 20 nt, Artificial Sequence
  spacer sequence TTCN PAM
cuaaaacacauguuacuggu

SEQ ID NO: 19882 - RNA, 20 nt, Artificial Sequence
  spacer sequence TTCN PAM
cccucaugaguucaauauaa

SEQ ID NO: 19883 - RNA, 20 nt, Artificial Sequence
  spacer sequence TTCN PAM
auauaaguccaugaacuaau

SEQ ID NO: 19884 - RNA, 20 nt, Artificial Sequence
  spacer sequence TTCN PAM
uggacuuauauugaacucau

SEQ ID NO: 19885 - RNA, 20 nt, Artificial Sequence
  spacer sequence TTCN PAM
ucuguguuaacauuaacacc

SEQ ID NO: 19886 - RNA, 20 nt, Artificial Sequence
  spacer sequence TTCN PAM
guguuaacauuaacacccuu

SEQ ID NO: 19887 - RNA, 20 nt, Artificial Sequence
  spacer sequence TTCN PAM
cucauaaggguguuaauguu

SEQ ID NO: 19888 - RNA, 20 nt, Artificial Sequence
  spacer sequence TTCN PAM
guacacuuuggggaguaaaa

SEQ ID NO: 19889 - RNA, 20 nt, Artificial Sequence
  spacer sequence TTCN PAM
cuggaggauguggcgggaua

SEQ ID NO: 19890 - RNA, 20 nt, Artificial Sequence
  spacer sequence TTCN PAM
cuuaugagcaaccacagcua

SEQ ID NO: 19891 - RNA, 20 nt, Artificial Sequence
  spacer sequence TTCN PAM
caguggcagacuggauuaca

SEQ ID NO: 19892 - RNA, 20 nt, Artificial Sequence
  spacer sequence TTCN PAM
ucgcaguggcagacuggauu

SEQ ID NO: 19893 - RNA, 20 nt, Artificial Sequence
  spacer sequence TTCN PAM
ccucuuugcacugagacaua

SEQ ID NO: 19894 - RNA, 20 nt, Artificial Sequence
  spacer sequence TTCN PAM
uucucuuacauuuagauuaa

SEQ ID NO: 19895 - RNA, 20 nt, Artificial Sequence
  spacer sequence TTCN PAM
cuuacauuuagauuaauuau

SEQ ID NO: 19896 - RNA, 20 nt, Artificial Sequence
  spacer sequence TTCN PAM
ggugacaauguuuuauaauu

SEQ ID NO: 19897 - RNA, 20 nt, Artificial Sequence
  spacer sequence TTCN PAM
guguauuaaacauuacuuua

SEQ ID NO: 19898 - RNA, 20 nt, Artificial Sequence
  spacer sequence TTCN PAM
cuucuguguauuaaacauua

SEQ ID NO: 19899 - RNA, 20 nt, Artificial Sequence
  spacer sequence TTCN PAM
agaguaccuuauucccuucu

SEQ ID NO: 19900 - RNA, 20 nt, Artificial Sequence
  spacer sequence TTCN PAM
cuaugaugauuuugccaguu

SEQ ID NO: 19901 - RNA, 20 nt, Artificial Sequence
  spacer sequence TTCN PAM
auagcuggcaaucaaaagau

SEQ ID NO: 19902 - RNA, 20 nt, Artificial Sequence
  spacer sequence TTCN PAM
cuagcuuuuuauuuuugcaa

SEQ ID NO: 19903 - RNA, 20 nt, Artificial Sequence
  spacer sequence TTCN PAM
aagugcuaugacaggauggu

SEQ ID NO: 19904 - RNA, 20 nt, Artificial Sequence
  spacer sequence TTCN PAM
gucagcuugguuccaaagaa

SEQ ID NO: 19905 - RNA, 20 nt, Artificial Sequence
  spacer sequence TTCN PAM
aaagaagggagaugauagga

SEQ ID NO: 19906 - RNA, 20 nt, Artificial Sequence
  spacer sequence TTCN PAM
uuggaaccaagcugacagaa

SEQ ID NO: 19907 - RNA, 20 nt, Artificial Sequence
  spacer sequence TTCN PAM
acuucagcaagccuaacaca

SEQ ID NO: 19908 - RNA, 20 nt, Artificial Sequence
  spacer sequence TTCN PAM
gcaagccuaacacagcuggg

SEQ ID NO: 19909 - RNA, 20 nt, Artificial Sequence
  spacer sequence TTCN PAM
ccaccacccagcuguguuag

SEQ ID NO: 19910 - RNA, 20 nt, Artificial Sequence
  spacer sequence TTCN PAM
aaggacgugugugugugugu

SEQ ID NO: 19911 - RNA, 20 nt, Artificial Sequence
  spacer sequence TTCN PAM
cauguucaaaggacgugugu

SEQ ID NO: 19912 - RNA, 20 nt, Artificial Sequence
  spacer sequence TTCN PAM
uaaauggaaaucucaagucc

SEQ ID NO: 19913 - RNA, 20 nt, Artificial Sequence
  spacer sequence TTCN PAM
auuuaggaauguugacaccu

SEQ ID NO: 19914 - RNA, 20 nt, Artificial Sequence
  spacer sequence TTCN PAM
gauuuuccaagcucuacugc

SEQ ID NO: 19915 - RNA, 20 nt, Artificial Sequence
  spacer sequence TTCN PAM
aagcucuacugcagccauac

SEQ ID NO: 19916 - RNA, 20 nt, Artificial Sequence
  spacer sequence TTCN PAM
uccgggguguauggcugcag

SEQ ID NO: 19917 - RNA, 20 nt, Artificial Sequence
  spacer sequence TTCN PAM
gaugauuccuccggggugua

SEQ ID NO: 19918 - RNA, 20 nt, Artificial Sequence
  spacer sequence TTCN PAM
gcuagcugugacucgguguu

SEQ ID NO: 19919 - RNA, 20 nt, Artificial Sequence
  spacer sequence TTCN PAM
gccacugccagcaaggagag

SEQ ID NO: 19920 - RNA, 20 nt, Artificial Sequence
  spacer sequence TTCN PAM
ucagggggcugcuccugggg

SEQ ID NO: 19921 - RNA, 20 nt, Artificial Sequence
  spacer sequence TTCN PAM
aggucucucuccaggucucc

SEQ ID NO: 19922 - RNA, 20 nt, Artificial Sequence
  spacer sequence TTCN PAM
ccuguggagaccuggagaga

SEQ ID NO: 19923 - RNA, 20 nt, Artificial Sequence
  spacer sequence TTCN PAM
acgaugauaaucauuuaaaa

SEQ ID NO: 19924 - RNA, 20 nt, Artificial Sequence
  spacer sequence TTCN PAM
gcuauuacugugauuauuuu

SEQ ID NO: 19925 - RNA, 20 nt, Artificial Sequence
  spacer sequence TTCN PAM
cagcacacucacugggcaag

SEQ ID NO: 19926 - RNA, 20 nt, Artificial Sequence
  spacer sequence TTCN PAM
gucacaccaccaagaaugcu

SEQ ID NO: 19927 - RNA, 20 nt, Artificial Sequence
  spacer sequence TTCN PAM
ugguggugugacagaagcau

SEQ ID NO: 19928 - RNA, 20 nt, Artificial Sequence
  spacer sequence TTCN PAM
accagcauucuugguggugu

SEQ ID NO: 19929 - RNA, 20 nt, Artificial Sequence
  spacer sequence TTCN PAM
caguguguuuuaaaacuaaa

SEQ ID NO: 19930 - RNA, 20 nt, Artificial Sequence
  spacer sequence TTCN PAM
guuuauccaugcccccuaau

SEQ ID NO: 19931 - RNA, 20 nt, Artificial Sequence
  spacer sequence TTCN PAM
auucucuucaaggccuccua

SEQ ID NO: 19932 - RNA, 20 nt, Artificial Sequence
  spacer sequence TTCN PAM
cuucaaggccuccuacgucu

SEQ ID NO: 19933 - RNA, 20 nt, Artificial Sequence
  spacer sequence TTCN PAM
aggccuccuacgucucucug

SEQ ID NO: 19934 - RNA, 20 nt, Artificial Sequence
  spacer sequence TTCN PAM
aaaauauacuggaugugaaa

SEQ ID NO: 19935 - RNA, 20 nt, Artificial Sequence
  spacer sequence TTCN PAM
aagagcagaggguagagguc

SEQ ID NO: 19936 - RNA, 20 nt, Artificial Sequence
  spacer sequence TTCN PAM
cauccaguauauuuucgaag

SEQ ID NO: 19937 - RNA, 20 nt, Artificial Sequence
  spacer sequence TTCN PAM
auuugcaacacggaggcccc

SEQ ID NO: 19938 - RNA, 20 nt, Artificial Sequence
  spacer sequence TTCN PAM
gacccaaggggccuccgugu

SEQ ID NO: 19939 - RNA, 20 nt, Artificial Sequence
  spacer sequence TTCN PAM
augugauuuccaguaggaga

SEQ ID NO: 19940 - RNA, 20 nt, Artificial Sequence
  spacer sequence TTCN PAM
aguaggagaggggauagguu

SEQ ID NO: 19941 - RNA, 20 nt, Artificial Sequence
  spacer sequence TTCN PAM
auagacacaaggacccccua

SEQ ID NO: 19942 - RNA, 20 nt, Artificial Sequence
  spacer sequence TTCN PAM
agccuuuaccuuuaacucca

SEQ ID NO: 19943 - RNA, 20 nt, Artificial Sequence
  spacer sequence TTCN PAM
ccuggaguuaaagguaaagg

SEQ ID NO: 19944 - RNA, 20 nt, Artificial Sequence
  spacer sequence TTCN PAM
cucugggcucccacucuucu

SEQ ID NO: 19945 - RNA, 20 nt, Artificial Sequence
  spacer sequence TTCN PAM
gaggauaagacuacagaaac

SEQ ID NO: 19946 - RNA, 20 nt, Artificial Sequence
  spacer sequence TTCN PAM
guagucuuauccucagaagc

SEQ ID NO: 19947 - RNA, 20 nt, Artificial Sequence
  spacer sequence TTCN PAM
ugugccacccguauacacac

SEQ ID NO: 19948 - RNA, 20 nt, Artificial Sequence
  spacer sequence TTCN PAM
uuguguauauaucuauuuau

SEQ ID NO: 19949 - RNA, 20 nt, Artificial Sequence
  spacer sequence TTCN PAM
cauacauauaccaugauucu

SEQ ID NO: 19950 - RNA, 20 nt, Artificial Sequence
  spacer sequence TTCN PAM
gacucaugggcaaaauggaa

SEQ ID NO: 19951 - RNA, 20 nt, Artificial Sequence
  spacer sequence TTCN PAM
auuuugcccaugagucagaa

SEQ ID NO: 19952 - RNA, 20 nt, Artificial Sequence
  spacer sequence TTCN PAM
uuuccauuuugcccaugagu

SEQ ID NO: 19953 - RNA, 20 nt, Artificial Sequence
  spacer sequence TTCN PAM
uucuuuuccauuuugcccau

SEQ ID NO: 19954 - RNA, 20 nt, Artificial Sequence
  spacer sequence TTCN PAM
aagggccuguuugcauagau

SEQ ID NO: 19955 - RNA, 20 nt, Artificial Sequence
  spacer sequence TTCN PAM
uaacccaaguauaguaugua

SEQ ID NO: 19956 - RNA, 20 nt, Artificial Sequence
  spacer sequence TTCN PAM
ugucagcacaaggcuuaauc

SEQ ID NO: 19957 - RNA, 20 nt, Artificial Sequence
  spacer sequence TTCN PAM
cuagcuaagcacccccucuu

SEQ ID NO: 19958 - RNA, 20 nt, Artificial Sequence
  spacer sequence TTCN PAM
uucacuagcuaagcaccccc

SEQ ID NO: 19959 - RNA, 20 nt, Artificial Sequence
  spacer sequence TTCN PAM
ucucacacaggccuugcuuu

SEQ ID NO: 19960 - RNA, 20 nt, Artificial Sequence
  spacer sequence TTCN PAM
ucccuguccccacucaaggu

SEQ ID NO: 19961 - RNA, 20 nt, Artificial Sequence
  spacer sequence TTCN PAM
uuacacuuuacuauauuuca

SEQ ID NO: 19962 - RNA, 20 nt, Artificial Sequence
  spacer sequence TTCN PAM
gugggaggggaaauaugggg

SEQ ID NO: 19963 - RNA, 20 nt, Artificial Sequence
  spacer sequence TTCN PAM
ccucccacugaaauauagua

SEQ ID NO: 19964 - RNA, 20 nt, Artificial Sequence
  spacer sequence TTCN PAM
caccucaggggaacacuucc

SEQ ID NO: 19965 - RNA, 20 nt, Artificial Sequence
  spacer sequence TTCN PAM
ccugaggugugaaaacacuc

SEQ ID NO: 19966 - RNA, 20 nt, Artificial Sequence
  spacer sequence TTCN PAM
auguguguugaaccccucag

SEQ ID NO: 19967 - RNA, 20 nt, Artificial Sequence
  spacer sequence TTCN PAM
acacacauggaaguguuccc

SEQ ID NO: 19968 - RNA, 20 nt, Artificial Sequence
  spacer sequence TTCN PAM
cuugugacugauccuuagca

SEQ ID NO: 19969 - RNA, 20 nt, Artificial Sequence
  spacer sequence TTCN PAM
cccagagcucuguggucucc

SEQ ID NO: 19970 - RNA, 20 nt, Artificial Sequence
  spacer sequence TTCN PAM
uccuagaguuucucccagag

SEQ ID NO: 19971 - RNA, 20 nt, Artificial Sequence
  spacer sequence TTCN PAM
uuuuuggugcuggauugcaa

SEQ ID NO: 19972 - RNA, 20 nt, Artificial Sequence
  spacer sequence TTCN PAM
uuauaugcccuaaauauuau

SEQ ID NO: 19973 - RNA, 20 nt, Artificial Sequence
  spacer sequence TTCN PAM
aggagaaacaggauaguagg

SEQ ID NO: 19974 - RNA, 20 nt, Artificial Sequence
  spacer sequence TTCN PAM
ccuggaagcaggacuagucu

SEQ ID NO: 19975 - RNA, 20 nt, Artificial Sequence
  spacer sequence TTCN PAM
cuaucucucucccccaugcc

SEQ ID NO: 19976 - RNA, 20 nt, Artificial Sequence
  spacer sequence TTCN PAM
aaaauagagacuugguauuu

SEQ ID NO: 19977 - RNA, 20 nt, Artificial Sequence
  spacer sequence TTCN PAM
cucucuuggagcuugcauuu

SEQ ID NO: 19978 - RNA, 20 nt, Artificial Sequence
  spacer sequence TTCN PAM
cugcacaaaguaaggcagug

SEQ ID NO: 19979 - RNA, 20 nt, Artificial Sequence
  spacer sequence TTCN PAM
uugguuauguauauacaugc

SEQ ID NO: 19980 - RNA, 20 nt, Artificial Sequence
  spacer sequence TTCN PAM
aauccaugccuuuauuacga

SEQ ID NO: 19981 - RNA, 20 nt, Artificial Sequence
  spacer sequence TTCN PAM
uaauaaaggcauggauuaga

SEQ ID NO: 19982 - RNA, 20 nt, Artificial Sequence
  spacer sequence TTCN PAM
ucuaauguuguggccaaaug

SEQ ID NO: 19983 - RNA, 20 nt, Artificial Sequence
  spacer sequence TTCN PAM
uugcaauaugcuuguuggua

SEQ ID NO: 19984 - RNA, 20 nt, Artificial Sequence
  spacer sequence TTCN PAM
ccuauuuguaaaaguuacau

SEQ ID NO: 19985 - RNA, 20 nt, Artificial Sequence
  spacer sequence TTCN PAM
uaaaucacagcuggguggug

SEQ ID NO: 19986 - RNA, 20 nt, Artificial Sequence
  spacer sequence TTCN PAM
aaugauccuccugccuuggc

SEQ ID NO: 19987 - RNA, 20 nt, Artificial Sequence
  spacer sequence TTCN PAM
uuuuguagacacagggucuu

SEQ ID NO: 19988 - RNA, 20 nt, Artificial Sequence
  spacer sequence TTCN PAM
uaaaucuccccucaaaaaag

SEQ ID NO: 19989 - RNA, 20 nt, Artificial Sequence
  spacer sequence TTCN PAM
uuuuugaggggagauuuaag

SEQ ID NO: 19990 - RNA, 20 nt, Artificial Sequence
  spacer sequence TTCN PAM
auucuuuuuucuguuagguu

SEQ ID NO: 19991 - RNA, 20 nt, Artificial Sequence
  spacer sequence TTCN PAM
uuuuucuguuagguuuauca

SEQ ID NO: 19992 - RNA, 20 nt, Artificial Sequence
  spacer sequence TTCN PAM
guuagguuuaucauuuugcu

SEQ ID NO: 19993 - RNA, 20 nt, Artificial Sequence
  spacer sequence TTCN PAM
ugucucauuaagcacuuaac

SEQ ID NO: 19994 - RNA, 20 nt, Artificial Sequence
  spacer sequence TTCN PAM
uagggauugacuauuuuuac

SEQ ID NO: 19995 - RNA, 20 nt, Artificial Sequence
  spacer sequence TTCN PAM
uuauggguugauccuacacc

SEQ ID NO: 19996 - RNA, 20 nt, Artificial Sequence
  spacer sequence TTCN PAM
uccuuauggguugauccuac

SEQ ID NO: 19997 - RNA, 20 nt, Artificial Sequence
  spacer sequence TTCN PAM
agcuucuacagucuuugaug

SEQ ID NO: 19998 - RNA, 20 nt, Artificial Sequence
  spacer sequence TTCN PAM
acagucuuugaugggucuag

SEQ ID NO: 19999 - RNA, 20 nt, Artificial Sequence
  spacer sequence TTCN PAM
ccauuugugcuggucuagac

SEQ ID NO: 20000 - RNA, 20 nt, Artificial Sequence
  spacer sequence TTCN PAM
aacaacagggucaaugucua

SEQ ID NO: 20001 - RNA, 20 nt, Artificial Sequence
  spacer sequence TTCN PAM
aauagacauugacccuguug

SEQ ID NO: 20002 - RNA, 20 nt, Artificial Sequence
  spacer sequence TTCN PAM
gcugugcauacaguacuugg

SEQ ID NO: 20003 - RNA, 20 nt, Artificial Sequence
  spacer sequence TTCN PAM
augaaacaaccagugccuuc

SEQ ID NO: 20004 - RNA, 20 nt, Artificial Sequence
  spacer sequence TTCN PAM
uugaaggauucugcugugca

SEQ ID NO: 20005 - RNA, 20 nt, Artificial Sequence
  spacer sequence TTCN PAM
aggaucggccuucuacuggu

SEQ ID NO: 20006 - RNA, 20 nt, Artificial Sequence
  spacer sequence TTCN PAM
acuggucucuuggcuuguuu

SEQ ID NO: 20007 - RNA, 20 nt, Artificial Sequence
  spacer sequence TTCN PAM
aaacaagccaagagaccagu

SEQ ID NO: 20008 - RNA, 20 nt, Artificial Sequence
  spacer sequence TTCN PAM
cuuucaaucuauuucaugcc

SEQ ID NO: 20009 - RNA, 20 nt, Artificial Sequence
  spacer sequence TTCN PAM
aucuauuucaugcccugcua

SEQ ID NO: 20010 - RNA, 20 nt, Artificial Sequence
  spacer sequence TTCN PAM
ugcccugcuacacucuucca

SEQ ID NO: 20011 - RNA, 20 nt, Artificial Sequence
  spacer sequence TTCN PAM
aaaacuuuucuauggacaug

SEQ ID NO: 20012 - RNA, 20 nt, Artificial Sequence
  spacer sequence TTCN PAM
auggacaugauuuugaauaa

SEQ ID NO: 20013 - RNA, 20 nt, Artificial Sequence
  spacer sequence TTCN PAM
aaaucauguccauagaaaag

SEQ ID NO: 20014 - RNA, 20 nt, Artificial Sequence
  spacer sequence TTCN PAM
uaaaucuuauagucaguuaa

SEQ ID NO: 20015 - RNA, 20 nt, Artificial Sequence
  spacer sequence TTCN PAM
agaccagccuggccaacaug

SEQ ID NO: 20016 - RNA, 20 nt, Artificial Sequence
  spacer sequence TTCN PAM
ucauguuggccaggcugguc

SEQ ID NO: 20017 - RNA, 20 nt, Artificial Sequence
  spacer sequence TTCN PAM
agcuacucgggaggcugagg

SEQ ID NO: 20018 - RNA, 20 nt, Artificial Sequence
  spacer sequence TTCN PAM
ccugccucagccucccgagu

SEQ ID NO: 20019 - RNA, 20 nt, Artificial Sequence
  spacer sequence TTCN PAM
agcaauucuccugccucagc

SEQ ID NO: 20020 - RNA, 20 nt, Artificial Sequence
  spacer sequence TTCN PAM
cucuuguugcccaagcuaga

SEQ ID NO: 20021 - RNA, 20 nt, Artificial Sequence
  spacer sequence TTCN PAM
uaaaucuuuuuuuuuuuuuu

SEQ ID NO: 20022 - RNA, 20 nt, Artificial Sequence
  spacer sequence TTCN PAM
ccauaacauggccccaaauu

SEQ ID NO: 20023 - RNA, 20 nt, Artificial Sequence
  spacer sequence TTCN PAM
caccuuauguuccacuaguu

SEQ ID NO: 20024 - RNA, 20 nt, Artificial Sequence
  spacer sequence TTCN PAM
acuaguuucauagacaaacc

SEQ ID NO: 20025 - RNA, 20 nt, Artificial Sequence
  spacer sequence TTCN PAM
uagacaaaccucuuccugcc

SEQ ID NO: 20026 - RNA, 20 nt, Artificial Sequence
  spacer sequence TTCN PAM
ugccauacuggucuggucag

SEQ ID NO: 20027 - RNA, 20 nt, Artificial Sequence
  spacer sequence TTCN PAM
aggcaguacugcagugucug

SEQ ID NO: 20028 - RNA, 20 nt, Artificial Sequence
  spacer sequence TTCN PAM
cucugucaucuaaauucuag

SEQ ID NO: 20029 - RNA, 20 nt, Artificial Sequence
  spacer sequence TTCN PAM
agccugucuuugauggcuaa

SEQ ID NO: 20030 - RNA, 20 nt, Artificial Sequence
  spacer sequence TTCN PAM
cugaggcccacagagauguu

SEQ ID NO: 20031 - RNA, 20 nt, Artificial Sequence
  spacer sequence TTCN PAM
ucugcauuccuccaguuggc

SEQ ID NO: 20032 - RNA, 20 nt, Artificial Sequence
  spacer sequence TTCN PAM
uccaguuggcaucucucacu

SEQ ID NO: 20033 - RNA, 20 nt, Artificial Sequence
  spacer sequence TTCN PAM
ccacgugccuagagccucuu

SEQ ID NO: 20034 - RNA, 20 nt, Artificial Sequence
  spacer sequence TTCN PAM
cccagccuacagugugcaag

SEQ ID NO: 20035 - RNA, 20 nt, Artificial Sequence
  spacer sequence TTCN PAM
cagaucaucagcauaagcaa

SEQ ID NO: 20036 - RNA, 20 nt, Artificial Sequence
  spacer sequence TTCN PAM
ccuguuugcaguauuaucuu

SEQ ID NO: 20037 - RNA, 20 nt, Artificial Sequence
  spacer sequence TTCN PAM
uugucuuguuccauuuggaa

SEQ ID NO: 20038 - RNA, 20 nt, Artificial Sequence
  spacer sequence TTCN PAM
auuuggaaugaauuaguggc

SEQ ID NO: 20039 - RNA, 20 nt, Artificial Sequence
  spacer sequence TTCN PAM
aaauggaacaagacaaagaa

SEQ ID NO: 20040 - RNA, 20 nt, Artificial Sequence
  spacer sequence TTCN PAM
uuccaaauggaacaagacaa

SEQ ID NO: 20041 - RNA, 20 nt, Artificial Sequence
  spacer sequence TTCN PAM
gaagguuaaaauacguggac

SEQ ID NO: 20042 - RNA, 20 nt, Artificial Sequence
  spacer sequence TTCN PAM
gaacugaccucuaacugauu

SEQ ID NO: 20043 - RNA, 20 nt, Artificial Sequence
  spacer sequence TTCN PAM
uguuacuaaccucuuucuaa

SEQ ID NO: 20044 - RNA, 20 nt, Artificial Sequence
  spacer sequence TTCN PAM
aaaucauugguguuguuauu

SEQ ID NO: 20045 - RNA, 20 nt, Artificial Sequence
  spacer sequence TTCN PAM
uguaaauaacaacaccaaug

SEQ ID NO: 20046 - RNA, 20 nt, Artificial Sequence
  spacer sequence TTCN PAM
ucacauauuuggcccagucc

SEQ ID NO: 20047 - RNA, 20 nt, Artificial Sequence
  spacer sequence TTCN PAM
aaugguagggaugaguauac

SEQ ID NO: 20048 - RNA, 20 nt, Artificial Sequence
  spacer sequence TTCN PAM
ucagugguacacacacuuaa

SEQ ID NO: 20049 - RNA, 20 nt, Artificial Sequence
  spacer sequence TTCN PAM
uacuucaucagugguacaca

SEQ ID NO: 20050 - RNA, 20 nt, Artificial Sequence
  spacer sequence TTCN PAM
ucauacuucaucagugguac

SEQ ID NO: 20051 - RNA, 20 nt, Artificial Sequence
  spacer sequence TTCN PAM
cauucauuccagaguacuca

SEQ ID NO: 20052 - RNA, 20 nt, Artificial Sequence
  spacer sequence TTCN PAM
uuccagaguacucaggcccu

SEQ ID NO: 20053 - RNA, 20 nt, Artificial Sequence
  spacer sequence TTCN PAM
agaguacucaggcccuuugc

SEQ ID NO: 20054 - RNA, 20 nt, Artificial Sequence
  spacer sequence TTCN PAM
cuuugcauguguagcuagca

SEQ ID NO: 20055 - RNA, 20 nt, Artificial Sequence
  spacer sequence TTCN PAM
auaucagcauuuuguaaagc

SEQ ID NO: 20056 - RNA, 20 nt, Artificial Sequence
  spacer sequence TTCN PAM
caccguaccagcuuaacugc

SEQ ID NO: 20057 - RNA, 20 nt, Artificial Sequence
  spacer sequence TTCN PAM
aauuaauuuaauucuccacu

SEQ ID NO: 20058 - RNA, 20 nt, Artificial Sequence
  spacer sequence TTCN PAM
ccacugguagcaauuucuga

SEQ ID NO: 20059 - RNA, 20 nt, Artificial Sequence
  spacer sequence TTCN PAM
gaugcacaaugucugugccu

SEQ ID NO: 20060 - RNA, 20 nt, Artificial Sequence
  spacer sequence TTCN PAM
ccagcacuuaacucagcagg

SEQ ID NO: 20061 - RNA, 20 nt, Artificial Sequence
  spacer sequence TTCN PAM
ugcuauaugcaaccugcuga

SEQ ID NO: 20062 - RNA, 20 nt, Artificial Sequence
  spacer sequence TTCN PAM
aucaacaaauauuuauuagg

SEQ ID NO: 20063 - RNA, 20 nt, Artificial Sequence
  spacer sequence TTCN PAM
uuuguucaaucaacaaauau

SEQ ID NO: 20064 - RNA, 20 nt, Artificial Sequence
  spacer sequence TTCN PAM
ccaucugccguauggcucau

SEQ ID NO: 20065 - RNA, 20 nt, Artificial Sequence
  spacer sequence TTCN PAM
cucuccaguauucuccaucu

SEQ ID NO: 20066 - RNA, 20 nt, Artificial Sequence
  spacer sequence TTCN PAM
ucagauaugccucacaaaac

SEQ ID NO: 20067 - RNA, 20 nt, Artificial Sequence
  spacer sequence TTCN PAM
gaugcugggaggaccgguau

SEQ ID NO: 20068 - RNA, 20 nt, Artificial Sequence
  spacer sequence TTCN PAM
guccauuucugaugcuggga

SEQ ID NO: 20069 - RNA, 20 nt, Artificial Sequence
  spacer sequence TTCN PAM
ugcugugguacuugcauuuc

SEQ ID NO: 20070 - RNA, 20 nt, Artificial Sequence
  spacer sequence TTCN PAM
gcagacuauggagcaaggcu

SEQ ID NO: 20071 - RNA, 20 nt, Artificial Sequence
  spacer sequence TTCN PAM
aagugguuuugcuuugaggg

SEQ ID NO: 20072 - RNA, 20 nt, Artificial Sequence
  spacer sequence TTCN PAM
uaaucaguuuaauuagcacu

SEQ ID NO: 20073 - RNA, 20 nt, Artificial Sequence
  spacer sequence TTCN PAM
uaccacuuguaaugccaaug

SEQ ID NO: 20074 - RNA, 20 nt, Artificial Sequence
  spacer sequence TTCN PAM
ggaugagguagauacuagga

SEQ ID NO: 20075 - RNA, 20 nt, Artificial Sequence
  spacer sequence TTCN PAM
guaguuauaugacaguagua

SEQ ID NO: 20076 - RNA, 20 nt, Artificial Sequence
  spacer sequence TTCN PAM
acuuaagcuuagagagacuu

SEQ ID NO: 20077 - RNA, 20 nt, Artificial Sequence
  spacer sequence TTCN PAM
uucuacuuaagcuuagagag

SEQ ID NO: 20078 - RNA, 20 nt, Artificial Sequence
  spacer sequence TTCN PAM
ugaucaucgugugguauagg

SEQ ID NO: 20079 - RNA, 20 nt, Artificial Sequence
  spacer sequence TTCN PAM
uccugaucaucgugugguau

SEQ ID NO: 20080 - RNA, 20 nt, Artificial Sequence
  spacer sequence TTCN PAM
ucuuccugaucaucgugugg

SEQ ID NO: 20081 - RNA, 20 nt, Artificial Sequence
  spacer sequence TTCN PAM
uauuucuucuuccugaucau

SEQ ID NO: 20082 - RNA, 20 nt, Artificial Sequence
  spacer sequence TTCN PAM
agaccagucuaaucaacaua

SEQ ID NO: 20083 - RNA, 20 nt, Artificial Sequence
  spacer sequence TTCN PAM
cuauguugauuagacugguc

SEQ ID NO: 20084 - RNA, 20 nt, Artificial Sequence
  spacer sequence TTCN PAM
ccuaccucagccuccagagu

SEQ ID NO: 20085 - RNA, 20 nt, Artificial Sequence
  spacer sequence TTCN PAM
agcaauucuccuaccucagc

SEQ ID NO: 20086 - RNA, 20 nt, Artificial Sequence
  spacer sequence TTCN PAM
uuuuuuuuuuuuugagaugg

SEQ ID NO: 20087 - RNA, 20 nt, Artificial Sequence
  spacer sequence TTCN PAM
aagcauguucuuuuuuuuuu

SEQ ID NO: 20088 - RNA, 20 nt, Artificial Sequence
  spacer sequence TTCN PAM
aggcacagugauaaggauuu

SEQ ID NO: 20089 - RNA, 20 nt, Artificial Sequence
  spacer sequence TTCN PAM
caauaaacauuagcugauau

SEQ ID NO: 20090 - RNA, 20 nt, Artificial Sequence
  spacer sequence TTCN PAM
acuuuaaccuacguuuuccu

SEQ ID NO: 20091 - RNA, 20 nt, Artificial Sequence
  spacer sequence TTCN PAM
ucuuuaccaagcucugggca

SEQ ID NO: 20092 - RNA, 20 nt, Artificial Sequence
  spacer sequence TTCN PAM
cguccuugauuggcagacug

SEQ ID NO: 20093 - RNA, 20 nt, Artificial Sequence
  spacer sequence TTCN PAM
cagucagagaucacauuuca

SEQ ID NO: 20094 - RNA, 20 nt, Artificial Sequence
  spacer sequence TTCN PAM
gaaacaucugggccuggauc

SEQ ID NO: 20095 - RNA, 20 nt, Artificial Sequence
  spacer sequence TTCN PAM
gaaaugugaucucugacuga

SEQ ID NO: 20096 - RNA, 20 nt, Artificial Sequence
  spacer sequence TTCN PAM
ggugccuggagauccaggcc

SEQ ID NO: 20097 - RNA, 20 nt, Artificial Sequence
  spacer sequence TTCN PAM
ucgggugccuggagauccag

SEQ ID NO: 20098 - RNA, 20 nt, Artificial Sequence
  spacer sequence TTCN PAM
cacagggccucggcaucuca

SEQ ID NO: 20099 - RNA, 20 nt, Artificial Sequence
  spacer sequence TTCN PAM
ugcuggaggguagcauggag

SEQ ID NO: 20100 - RNA, 20 nt, Artificial Sequence
  spacer sequence TTCN PAM
ccccuuuuccugcuggaggg

SEQ ID NO: 20101 - RNA, 20 nt, Artificial Sequence
  spacer sequence TTCN PAM
aacaaaaaucgcuugcugcu

SEQ ID NO: 20102 - RNA, 20 nt, Artificial Sequence
  spacer sequence TTCN PAM
aaaaccaaagcugucgucau

SEQ ID NO: 20103 - RNA, 20 nt, Artificial Sequence
  spacer sequence TTCN PAM
gugacauaagcuuauaaaga

SEQ ID NO: 20104 - RNA, 20 nt, Artificial Sequence
  spacer sequence TTCN PAM
uuauaagcuuaugucacaga

SEQ ID NO: 20105 - RNA, 20 nt, Artificial Sequence
  spacer sequence TTCN PAM
uugcuuuuggcuaguaaacc

SEQ ID NO: 20106 - RNA, 20 nt, Artificial Sequence
  spacer sequence TTCN PAM
ggccucuugggacuggagug

SEQ ID NO: 20107 - RNA, 20 nt, Artificial Sequence
  spacer sequence TTCN PAM
uguguuccggccucuuggga

SEQ ID NO: 20108 - RNA, 20 nt, Artificial Sequence
  spacer sequence TTCN PAM
cagcagcacgcaacagucac

SEQ ID NO: 20109 - RNA, 20 nt, Artificial Sequence
  spacer sequence TTCN PAM
uaccuccuacuucccagcag

SEQ ID NO: 20110 - RNA, 20 nt, Artificial Sequence
  spacer sequence TTCN PAM
uuuuucagagggaggaaugg

SEQ ID NO: 20111 - RNA, 20 nt, Artificial Sequence
  spacer sequence TTCN PAM
gagggaggaaugggccuuga

SEQ ID NO: 20112 - RNA, 20 nt, Artificial Sequence
  spacer sequence TTCN PAM
ucccucugaaaaaggaagga

SEQ ID NO: 20113 - RNA, 20 nt, Artificial Sequence
  spacer sequence TTCN PAM
aggcccauuccucccucuga

SEQ ID NO: 20114 - RNA, 20 nt, Artificial Sequence
  spacer sequence TTCN PAM
gcaugugacacauucaaggc

SEQ ID NO: 20115 - RNA, 20 nt, Artificial Sequence
  spacer sequence TTCN PAM
cugagcccacagcucagggu

SEQ ID NO: 20116 - RNA, 20 nt, Artificial Sequence
  spacer sequence TTCN PAM
ugugcuuuuuggucuggacu

SEQ ID NO: 20117 - RNA, 20 nt, Artificial Sequence
  spacer sequence TTCN PAM
cucugacacaggccuaugug

SEQ ID NO: 20118 - RNA, 20 nt, Artificial Sequence
  spacer sequence TTCN PAM
uuucccucugacacaggccu

SEQ ID NO: 20119 - RNA, 20 nt, Artificial Sequence
  spacer sequence TTCN PAM
cugagagcacauuuucuuuu

SEQ ID NO: 20120 - RNA, 20 nt, Artificial Sequence
  spacer sequence TTCN PAM
gcuucucugagagcacauuu

SEQ ID NO: 20121 - RNA, 20 nt, Artificial Sequence
  spacer sequence TTCN PAM
acaaauaaggcauauuggcu

SEQ ID NO: 20122 - RNA, 20 nt, Artificial Sequence
  spacer sequence TTCN PAM
uuaaagcgguccuuugugug

SEQ ID NO: 20123 - RNA, 20 nt, Artificial Sequence
  spacer sequence TTCN PAM
ugaguucugagcuuugggug

SEQ ID NO: 20124 - RNA, 20 nt, Artificial Sequence
  spacer sequence TTCN PAM
gagcuuugggugaguuucug

SEQ ID NO: 20125 - RNA, 20 nt, Artificial Sequence
  spacer sequence TTCN PAM
gaagaggaauauuugcauuu

SEQ ID NO: 20126 - RNA, 20 nt, Artificial Sequence
  spacer sequence TTCN PAM
gaaacucacccaaagcucag

SEQ ID NO: 20127 - RNA, 20 nt, Artificial Sequence
  spacer sequence TTCN PAM
ucuucagaaacucacccaaa

SEQ ID NO: 20128 - RNA, 20 nt, Artificial Sequence
  spacer sequence TTCN PAM
ccuuuguguggugaagcaac

SEQ ID NO: 20129 - RNA, 20 nt, Artificial Sequence
  spacer sequence TTCN PAM
ccacacaaaggggaaaaacc

SEQ ID NO: 20130 - RNA, 20 nt, Artificial Sequence
  spacer sequence TTCN PAM
gagugacugauuuuaccugu

SEQ ID NO: 20131 - RNA, 20 nt, Artificial Sequence
  spacer sequence TTCN PAM
auuucagagugacugauuuu

SEQ ID NO: 20132 - RNA, 20 nt, Artificial Sequence
  spacer sequence TTCN PAM
uuugggcucuaagauuugca

SEQ ID NO: 20133 - RNA, 20 nt, Artificial Sequence
  spacer sequence TTCN PAM
uaccucucaauuggcuuucu

SEQ ID NO: 20134 - RNA, 20 nt, Artificial Sequence
  spacer sequence TTCN PAM
acguauucuagaagagggac

SEQ ID NO: 20135 - RNA, 20 nt, Artificial Sequence
  spacer sequence TTCN PAM
agaagagggacaaaucagca

SEQ ID NO: 20136 - RNA, 20 nt, Artificial Sequence
  spacer sequence TTCN PAM
agaauacguagaaagccaau

SEQ ID NO: 20137 - RNA, 20 nt, Artificial Sequence
  spacer sequence TTCN PAM
cucucccugcugauuugucc

SEQ ID NO: 20138 - RNA, 20 nt, Artificial Sequence
  spacer sequence TTCN PAM
gcuucucucucccugcugau

SEQ ID NO: 20139 - RNA, 20 nt, Artificial Sequence
  spacer sequence TTCN PAM
gaaauggcagcgggaguugu

SEQ ID NO: 20140 - RNA, 20 nt, Artificial Sequence
  spacer sequence TTCN PAM
gaaccuucugcuucucucuc

SEQ ID NO: 20141 - RNA, 20 nt, Artificial Sequence
  spacer sequence TTCN PAM
uuagaugguaaugcaagcag

SEQ ID NO: 20142 - RNA, 20 nt, Artificial Sequence
  spacer sequence TTCN PAM
ggcaacuaucacugggggaa

SEQ ID NO: 20143 - RNA, 20 nt, Artificial Sequence
  spacer sequence TTCN PAM
cccagugauaguugccugaa

SEQ ID NO: 20144 - RNA, 20 nt, Artificial Sequence
  spacer sequence TTCN PAM
ucucagaccauccucaacag

SEQ ID NO: 20145 - RNA, 20 nt, Artificial Sequence
  spacer sequence TTCN PAM
cgcugucuuucuccuauuuc

SEQ ID NO: 20146 - RNA, 20 nt, Artificial Sequence
  spacer sequence TTCN PAM
ccuauuucagggagggcuuu

SEQ ID NO: 20147 - RNA, 20 nt, Artificial Sequence
  spacer sequence TTCN PAM
gggagggcuuugccugugca

SEQ ID NO: 20148 - RNA, 20 nt, Artificial Sequence
  spacer sequence TTCN PAM
aagucaacccauguccacua

SEQ ID NO: 20149 - RNA, 20 nt, Artificial Sequence
  spacer sequence TTCN PAM
aguggacauggguugacuuu

SEQ ID NO: 20150 - RNA, 20 nt, Artificial Sequence
  spacer sequence TTCN PAM
cauuuauuucuaguggacau

SEQ ID NO: 20151 - RNA, 20 nt, Artificial Sequence
  spacer sequence TTCN PAM
ugccagucacccuuugauuc

SEQ ID NO: 20152 - RNA, 20 nt, Artificial Sequence
  spacer sequence TTCN PAM
uuucuugccagucacccuuu

SEQ ID NO: 20153 - RNA, 20 nt, Artificial Sequence
  spacer sequence TTCN PAM
cccaccuuggccucccaaag

SEQ ID NO: 20154 - RNA, 20 nt, Artificial Sequence
  spacer sequence TTCN PAM
ccauguuagccaggcugguc

SEQ ID NO: 20155 - RNA, 20 nt, Artificial Sequence
  spacer sequence TTCN PAM
acuaaaaauacaaaaaauua

SEQ ID NO: 20156 - RNA, 20 nt, Artificial Sequence
  spacer sequence TTCN PAM
agcuacucaggaggcugagg

SEQ ID NO: 20157 - RNA, 20 nt, Artificial Sequence
  spacer sequence TTCN PAM
ccugccucagccuccugagu

SEQ ID NO: 20158 - RNA, 20 nt, Artificial Sequence
  spacer sequence TTCN PAM
agugauuccccugccucagc

SEQ ID NO: 20159 - RNA, 20 nt, Artificial Sequence
  spacer sequence TTCN PAM
uuuuuuuuuuugagauggag

SEQ ID NO: 20160 - RNA, 20 nt, Artificial Sequence
  spacer sequence TTCN PAM
uucuuuuuuuuuuuugagau

SEQ ID NO: 20161 - RNA, 20 nt, Artificial Sequence
  spacer sequence TTCN PAM
cuaacaggaugugauguggc

SEQ ID NO: 20162 - RNA, 20 nt, Artificial Sequence
  spacer sequence TTCN PAM
aauucaguggguguuucucu

SEQ ID NO: 20163 - RNA, 20 nt, Artificial Sequence
  spacer sequence TTCN PAM
guggguguuucucuuauauc

SEQ ID NO: 20164 - RNA, 20 nt, Artificial Sequence
  spacer sequence TTCN PAM
cuuauaucuugucuagagaa

SEQ ID NO: 20165 - RNA, 20 nt, Artificial Sequence
  spacer sequence TTCN PAM
cuagacaagauauaagagaa

SEQ ID NO: 20166 - RNA, 20 nt, Artificial Sequence
  spacer sequence TTCN PAM
auucucuagacaagauauaa

SEQ ID NO: 20167 - RNA, 20 nt, Artificial Sequence
  spacer sequence TTCN PAM
ucuccaaugacuuaaguggg

SEQ ID NO: 20168 - RNA, 20 nt, Artificial Sequence
  spacer sequence TTCN PAM
uggucuccagguuuauuucu

SEQ ID NO: 20169 - RNA, 20 nt, Artificial Sequence
  spacer sequence TTCN PAM
accguuggaggggugaauua

SEQ ID NO: 20170 - RNA, 20 nt, Artificial Sequence
  spacer sequence TTCN PAM
ccccuccaacgguagaaaua

SEQ ID NO: 20171 - RNA, 20 nt, Artificial Sequence
  spacer sequence TTCN PAM
uuaauucaccccuccaacgg

SEQ ID NO: 20172 - RNA, 20 nt, Artificial Sequence
  spacer sequence TTCN PAM
ucuuuaauucaccccuccaa

SEQ ID NO: 20173 - RNA, 20 nt, Artificial Sequence
  spacer sequence TTCN PAM
gguugugaccuaaaucuucu

SEQ ID NO: 20174 - RNA, 20 nt, Artificial Sequence
  spacer sequence TTCN PAM
ccgucauaggaauacuauuu

SEQ ID NO: 20175 - RNA, 20 nt, Artificial Sequence
  spacer sequence TTCN PAM
uaugacggagaagauuuagg

SEQ ID NO: 20176 - RNA, 20 nt, Artificial Sequence
  spacer sequence TTCN PAM
aaaauaguauuccuaugacg

SEQ ID NO: 20177 - RNA, 20 nt, Artificial Sequence
  spacer sequence TTCN PAM
guauggggcaggcugacaug

SEQ ID NO: 20178 - RNA, 20 nt, Artificial Sequence
  spacer sequence TTCN PAM
cugcuaguacuggcacuacc

SEQ ID NO: 20179 - RNA, 20 nt, Artificial Sequence
  spacer sequence TTCN PAM
uaaauccuucugaaaugcau

SEQ ID NO: 20180 - RNA, 20 nt, Artificial Sequence
  spacer sequence TTCN PAM
gaaaugcauacuuuucugcu

SEQ ID NO: 20181 - RNA, 20 nt, Artificial Sequence
  spacer sequence TTCN PAM
gaaggauuuaagaacaaacc

SEQ ID NO: 20182 - RNA, 20 nt, Artificial Sequence
  spacer sequence TTCN PAM
gcuauuccuauuucugaauu

SEQ ID NO: 20183 - RNA, 20 nt, Artificial Sequence
  spacer sequence TTCN PAM
uauuucugaauuuagugggu

SEQ ID NO: 20184 - RNA, 20 nt, Artificial Sequence
  spacer sequence TTCN PAM
gaauuuagugggucacuagg

SEQ ID NO: 20185 - RNA, 20 nt, Artificial Sequence
  spacer sequence TTCN PAM
gaaauaggaauagcagaaaa

SEQ ID NO: 20186 - RNA, 20 nt, Artificial Sequence
  spacer sequence TTCN PAM
aguggcaaaucucucccuag

SEQ ID NO: 20187 - RNA, 20 nt, Artificial Sequence
  spacer sequence TTCN PAM
uuugcacaggagcugggaga

SEQ ID NO: 20188 - RNA, 20 nt, Artificial Sequence
  spacer sequence TTCN PAM
aauucugacucagccacuaa

SEQ ID NO: 20189 - RNA, 20 nt, Artificial Sequence
  spacer sequence TTCN PAM
gacucagccacuaacugugu

SEQ ID NO: 20190 - RNA, 20 nt, Artificial Sequence
  spacer sequence TTCN PAM
agcuuggcuaugauguuuuu

SEQ ID NO: 20191 - RNA, 20 nt, Artificial Sequence
  spacer sequence TTCN PAM
cacugugaucuuagguacuu

SEQ ID NO: 20192 - RNA, 20 nt, Artificial Sequence
  spacer sequence TTCN PAM
cuuaaucuuugggcccuuau

SEQ ID NO: 20193 - RNA, 20 nt, Artificial Sequence
  spacer sequence TTCN PAM
gaucucuaaaaugagugauu

SEQ ID NO: 20194 - RNA, 20 nt, Artificial Sequence
  spacer sequence TTCN PAM
uuucaacuucagucuauucu

SEQ ID NO: 20195 - RNA, 20 nt, Artificial Sequence
  spacer sequence TTCN PAM
acuucagucuauucuuuucu

SEQ ID NO: 20196 - RNA, 20 nt, Artificial Sequence
  spacer sequence TTCN PAM
gucuauucuuuucuuaucua

SEQ ID NO: 20197 - RNA, 20 nt, Artificial Sequence
  spacer sequence TTCN PAM
uuucuuaucuaauuuauaga

SEQ ID NO: 20198 - RNA, 20 nt, Artificial Sequence
  spacer sequence TTCN PAM
uaucuaauuuauagaaucac

SEQ ID NO: 20199 - RNA, 20 nt, Artificial Sequence
  spacer sequence TTCN PAM
auaaauuagauaagaaaaga

SEQ ID NO: 20200 - RNA, 20 nt, Artificial Sequence
  spacer sequence TTCN PAM
uugugauucuauaaauuaga

SEQ ID NO: 20201 - RNA, 20 nt, Artificial Sequence
  spacer sequence TTCN PAM
aucauguauauaaaaguauu

SEQ ID NO: 20202 - RNA, 20 nt, Artificial Sequence
  spacer sequence TTCN PAM
auaaagcuuaaguacuuccu

SEQ ID NO: 20203 - RNA, 20 nt, Artificial Sequence
  spacer sequence TTCN PAM
ugggagcauuuuuuaaaaua

SEQ ID NO: 20204 - RNA, 20 nt, Artificial Sequence
  spacer sequence TTCN PAM
uuuugcuuuguauuuuaaaa

SEQ ID NO: 20205 - RNA, 20 nt, Artificial Sequence
  spacer sequence TTCN PAM
uaauaagauauccuaauuua

SEQ ID NO: 20206 - RNA, 20 nt, Artificial Sequence
  spacer sequence TTCN PAM
aucuuaguuuaaauuaggau

SEQ ID NO: 20207 - RNA, 20 nt, Artificial Sequence
  spacer sequence TTCN PAM
ggauuuuacuggaagugaga

SEQ ID NO: 20208 - RNA, 20 nt, Artificial Sequence
  spacer sequence TTCN PAM
aguaaaauccagaagcaguc

SEQ ID NO: 20209 - RNA, 20 nt, Artificial Sequence
  spacer sequence TTCN PAM
cacuuccaguaaaauccaga

SEQ ID NO: 20210 - RNA, 20 nt, Artificial Sequence
  spacer sequence TTCN PAM
augacuuaauguaacuccag

SEQ ID NO: 20211 - RNA, 20 nt, Artificial Sequence
  spacer sequence TTCN PAM
ccuggaguuacauuaaguca

SEQ ID NO: 20212 - RNA, 20 nt, Artificial Sequence
  spacer sequence TTCN PAM
guuugcauuccccuggaguu

SEQ ID NO: 20213 - RNA, 20 nt, Artificial Sequence
  spacer sequence TTCN PAM
ucugacugccuaggagagac

SEQ ID NO: 20214 - RNA, 20 nt, Artificial Sequence
  spacer sequence TTCN PAM
uuccucugacugccuaggag

SEQ ID NO: 20215 - RNA, 20 nt, Artificial Sequence
  spacer sequence TTCN PAM
cugcugguuaggaacucaag

SEQ ID NO: 20216 - RNA, 20 nt, Artificial Sequence
  spacer sequence TTCN PAM
uaaccagcagagaaacaaua

SEQ ID NO: 20217 - RNA, 20 nt, Artificial Sequence
  spacer sequence TTCN PAM
ucuugaguuccuaaccagca

SEQ ID NO: 20218 - RNA, 20 nt, Artificial Sequence
  spacer sequence TTCN PAM
agaguucaucuugaguuccu

SEQ ID NO: 20219 - RNA, 20 nt, Artificial Sequence
  spacer sequence TTCN PAM
ucaagaguucaucuugaguu

SEQ ID NO: 20220 - RNA, 20 nt, Artificial Sequence
  spacer sequence TTCN PAM
uucuucaagaguucaucuug

SEQ ID NO: 20221 - RNA, 20 nt, Artificial Sequence
  spacer sequence TTCN PAM
aaaauaacuggugaugcaag

SEQ ID NO: 20222 - RNA, 20 nt, Artificial Sequence
  spacer sequence TTCN PAM
accagacucaaaauuccuca

SEQ ID NO: 20223 - RNA, 20 nt, Artificial Sequence
  spacer sequence TTCN PAM
ucaaaucugcuuccuucaca

SEQ ID NO: 20224 - RNA, 20 nt, Artificial Sequence
  spacer sequence TTCN PAM
uucacacuauacuccaaaag

SEQ ID NO: 20225 - RNA, 20 nt, Artificial Sequence
  spacer sequence TTCN PAM
cacuauacuccaaaaggagu

SEQ ID NO: 20226 - RNA, 20 nt, Artificial Sequence
  spacer sequence TTCN PAM
uacaguaugccacauagcuu

SEQ ID NO: 20227 - RNA, 20 nt, Artificial Sequence
  spacer sequence TTCN PAM
guucuuacaguaugccacau

SEQ ID NO: 20228 - RNA, 20 nt, Artificial Sequence
  spacer sequence TTCN PAM
auucuaauccuacuauuacu

SEQ ID NO: 20229 - RNA, 20 nt, Artificial Sequence
  spacer sequence TTCN PAM
aauccuacuauuacuuccgg

SEQ ID NO: 20230 - RNA, 20 nt, Artificial Sequence
  spacer sequence TTCN PAM
ggggacacugauuuauaaaa

SEQ ID NO: 20231 - RNA, 20 nt, Artificial Sequence
  spacer sequence TTCN PAM
uauuuuauaaaucagugucc

SEQ ID NO: 20232 - RNA, 20 nt, Artificial Sequence
  spacer sequence TTCN PAM
uauuuuauaauucuuauuuu

SEQ ID NO: 20233 - RNA, 20 nt, Artificial Sequence
  spacer sequence TTCN PAM
uauuuuuaaaaauucuuauu

SEQ ID NO: 20234 - RNA, 20 nt, Artificial Sequence
  spacer sequence TTCN PAM
ucaauguuaaccucacuauc

SEQ ID NO: 20235 - RNA, 20 nt, Artificial Sequence
  spacer sequence TTCN PAM
gguuuuguaugcguugacau

SEQ ID NO: 20236 - RNA, 20 nt, Artificial Sequence
  spacer sequence TTCN PAM
ugaccacuugaagggcuugg

SEQ ID NO: 20237 - RNA, 20 nt, Artificial Sequence
  spacer sequence TTCN PAM
aguggucaggaauaucuuuc

SEQ ID NO: 20238 - RNA, 20 nt, Artificial Sequence
  spacer sequence TTCN PAM
gauuaaaaccaagcccuuca

SEQ ID NO: 20239 - RNA, 20 nt, Artificial Sequence
  spacer sequence TTCN PAM
aagagcauucagauuaaaac

SEQ ID NO: 20240 - RNA, 20 nt, Artificial Sequence
  spacer sequence TTCN PAM
gggcacuuuugcuuggaguu

SEQ ID NO: 20241 - RNA, 20 nt, Artificial Sequence
  spacer sequence TTCN PAM
aagauugcacuccuugccua

SEQ ID NO: 20242 - RNA, 20 nt, Artificial Sequence
  spacer sequence TTCN PAM
uuaaaugaucacugguuuuu

SEQ ID NO: 20243 - RNA, 20 nt, Artificial Sequence
  spacer sequence TTCN PAM
aaaaccagugaucauuuaaa

SEQ ID NO: 20244 - RNA, 20 nt, Artificial Sequence
  spacer sequence TTCN PAM
caaacaggcugauauucaac

SEQ ID NO: 20245 - RNA, 20 nt, Artificial Sequence
  spacer sequence TTCN PAM
acaugcuggaugcugggugc

SEQ ID NO: 20246 - RNA, 20 nt, Artificial Sequence
  spacer sequence TTCN PAM
cucccaucauggaccccaau

SEQ ID NO: 20247 - RNA, 20 nt, Artificial Sequence
  spacer sequence TTCN PAM
aacagaccuuuuuuauacag

SEQ ID NO: 20248 - RNA, 20 nt, Artificial Sequence
  spacer sequence TTCN PAM
agaccagccugaccaacaug

SEQ ID NO: 20249 - RNA, 20 nt, Artificial Sequence
  spacer sequence TTCN PAM
ccauguuggucaggcugguc

SEQ ID NO: 20250 - RNA, 20 nt, Artificial Sequence
  spacer sequence TTCN PAM
ccugccucagccuccugagu

SEQ ID NO: 20251 - RNA, 20 nt, Artificial Sequence
  spacer sequence TTCN PAM
agugguucuccugccucagc

SEQ ID NO: 20252 - RNA, 20 nt, Artificial Sequence
  spacer sequence TTCN PAM
gauuauuauuauuauuauua

SEQ ID NO: 20253 - RNA, 20 nt, Artificial Sequence
  spacer sequence TTCN PAM
caagccuuuugugggcuguu

SEQ ID NO: 20254 - RNA, 20 nt, Artificial Sequence
  spacer sequence TTCN PAM
gauugcagagagauaaauug

SEQ ID NO: 20255 - RNA, 20 nt, Artificial Sequence
  spacer sequence TTCN PAM
acucugcagagaggacacag

SEQ ID NO: 20256 - RNA, 20 nt, Artificial Sequence
  spacer sequence TTCN PAM
cacuguguccucucugcaga

SEQ ID NO: 20257 - RNA, 20 nt, Artificial Sequence
  spacer sequence TTCN PAM
cugcuucugccauucaugga

SEQ ID NO: 20258 - RNA, 20 nt, Artificial Sequence
  spacer sequence TTCN PAM
gccauucauggauaaccaug

SEQ ID NO: 20259 - RNA, 20 nt, Artificial Sequence
  spacer sequence TTCN PAM
uggauaaccaugaucuugac

SEQ ID NO: 20260 - RNA, 20 nt, Artificial Sequence
  spacer sequence TTCN PAM
caaauugucaaucuuguaug

SEQ ID NO: 20261 - RNA, 20 nt, Artificial Sequence
  spacer sequence TTCN PAM
aaagucuagcccuaggccag

SEQ ID NO: 20262 - RNA, 20 nt, Artificial Sequence
  spacer sequence TTCN PAM
ccguguuagccaggaugguc

SEQ ID NO: 20263 - RNA, 20 nt, Artificial Sequence
  spacer sequence TTCN PAM
caaguagcugggacuacagg

SEQ ID NO: 20264 - RNA, 20 nt, Artificial Sequence
  spacer sequence TTCN PAM
agggauccuccugccucagc

SEQ ID NO: 20265 - RNA, 20 nt, Artificial Sequence
  spacer sequence TTCN PAM
gucuuaaaaaaaaaaaaaaa

SEQ ID NO: 20266 - RNA, 20 nt, Artificial Sequence
  spacer sequence TTCN PAM
uaauaaauucuguaaauaaa

SEQ ID NO: 20267 - RNA, 20 nt, Artificial Sequence
  spacer sequence TTCN PAM
guaaauaaauuuuuguuguc

SEQ ID NO: 20268 - RNA, 20 nt, Artificial Sequence
  spacer sequence TTCN PAM
acuuuaaaagccaugggaaa

SEQ ID NO: 20269 - RNA, 20 nt, Artificial Sequence
  spacer sequence TTCN PAM
cauggcuuuuaaaguugaaa

SEQ ID NO: 20270 - RNA, 20 nt, Artificial Sequence
  spacer sequence TTCN PAM
guuuguuuugaggggguucu

SEQ ID NO: 20271 - RNA, 20 nt, Artificial Sequence
  spacer sequence TTCN PAM
ucuccacagugaagaggaua

SEQ ID NO: 20272 - RNA, 20 nt, Artificial Sequence
  spacer sequence TTCN PAM
ccacagugaagaggauaaaa

SEQ ID NO: 20273 - RNA, 20 nt, Artificial Sequence
  spacer sequence TTCN PAM
cuguggagaagaacccccuc

SEQ ID NO: 20274 - RNA, 20 nt, Artificial Sequence
  spacer sequence TTCN PAM
guuauccucuugccccuuaa

SEQ ID NO: 20275 - RNA, 20 nt, Artificial Sequence
  spacer sequence TTCN PAM
cagagucaguuuguaaauaa

SEQ ID NO: 20276 - RNA, 20 nt, Artificial Sequence
  spacer sequence TTCN PAM
ucucagagucaguuuguaaa

SEQ ID NO: 20277 - RNA, 20 nt, Artificial Sequence
  spacer sequence TTCN PAM
acccccacuuuuuauauauu

SEQ ID NO: 20278 - RNA, 20 nt, Artificial Sequence
  spacer sequence TTCN PAM
ggucuguguuucuaccccca

SEQ ID NO: 20279 - RNA, 20 nt, Artificial Sequence
  spacer sequence TTCN PAM
uuucuggucuguguuucuac

SEQ ID NO: 20280 - RNA, 20 nt, Artificial Sequence
  spacer sequence TTCN PAM
gccuuuguaacugcacuugg

SEQ ID NO: 20281 - RNA, 20 nt, Artificial Sequence
  spacer sequence TTCN PAM
guucuggccucccuuuggaa

SEQ ID NO: 20282 - RNA, 20 nt, Artificial Sequence
  spacer sequence TTCN PAM
ggccucccuuuggaaguggu

SEQ ID NO: 20283 - RNA, 20 nt, Artificial Sequence
  spacer sequence TTCN PAM
aaagggaggccagaacugaa

SEQ ID NO: 20284 - RNA, 20 nt, Artificial Sequence
  spacer sequence TTCN PAM
aggcaucagcaaggaguuca

SEQ ID NO: 20285 - RNA, 20 nt, Artificial Sequence
  spacer sequence TTCN PAM
gcacauuuagggaggaagcc

SEQ ID NO: 20286 - RNA, 20 nt, Artificial Sequence
  spacer sequence TTCN PAM
ucccuaaaugugcugaacuc

SEQ ID NO: 20287 - RNA, 20 nt, Artificial Sequence
  spacer sequence TTCN PAM
gugauggcuuccucccuaaa

SEQ ID NO: 20288 - RNA, 20 nt, Artificial Sequence
  spacer sequence TTCN PAM
gcaacacauaggcagagcau

SEQ ID NO: 20289 - RNA, 20 nt, Artificial Sequence
  spacer sequence TTCN PAM
uuaugaaauaacuucuuguc

SEQ ID NO: 20290 - RNA, 20 nt, Artificial Sequence
  spacer sequence TTCN PAM
uaaagaaacccucucccugc

SEQ ID NO: 20291 - RNA, 20 nt, Artificial Sequence
  spacer sequence TTCN PAM
ugucuggaagucccaacuaa

SEQ ID NO: 20292 - RNA, 20 nt, Artificial Sequence
  spacer sequence TTCN PAM
agacaagaaguuauuucaua

SEQ ID NO: 20293 - RNA, 20 nt, Artificial Sequence
  spacer sequence TTCN PAM
uaucaauuaguugggacuuc

SEQ ID NO: 20294 - RNA, 20 nt, Artificial Sequence
  spacer sequence TTCN PAM
augacaaauaacccugauug

SEQ ID NO: 20295 - RNA, 20 nt, Artificial Sequence
  spacer sequence TTCN PAM
ccuguggcuuuuccaugaca

SEQ ID NO: 20296 - RNA, 20 nt, Artificial Sequence
  spacer sequence TTCN PAM
cagugcacacaucuguuggu

SEQ ID NO: 20297 - RNA, 20 nt, Artificial Sequence
  spacer sequence TTCN PAM
uaccaacagaugugugcacu

SEQ ID NO: 20298 - RNA, 20 nt, Artificial Sequence
  spacer sequence TTCN PAM
cagacacacacauguggcuu

SEQ ID NO: 20299 - RNA, 20 nt, Artificial Sequence
  spacer sequence TTCN PAM
uguguuagcacauaagucau

SEQ ID NO: 20300 - RNA, 20 nt, Artificial Sequence
  spacer sequence TTCN PAM
ccaaacucuguuuaacugau

SEQ ID NO: 20301 - RNA, 20 nt, Artificial Sequence
  spacer sequence TTCN PAM
uguccagagcuaauuucacc

SEQ ID NO: 20302 - RNA, 20 nt, Artificial Sequence
  spacer sequence TTCN PAM
gguuucuuguccagagcuaa

SEQ ID NO: 20303 - RNA, 20 nt, Artificial Sequence
  spacer sequence TTCN PAM
cugcuuucucucuuacugau

SEQ ID NO: 20304 - RNA, 20 nt, Artificial Sequence
  spacer sequence TTCN PAM
cucuuacugauguggccucu

SEQ ID NO: 20305 - RNA, 20 nt, Artificial Sequence
  spacer sequence TTCN PAM
acuuuauggagguggagauu

SEQ ID NO: 20306 - RNA, 20 nt, Artificial Sequence
  spacer sequence TTCN PAM
ccugcucucugggacagauc

SEQ ID NO: 20307 - RNA, 20 nt, Artificial Sequence
  spacer sequence TTCN PAM
cuacuguagacagucauuau

SEQ ID NO: 20308 - RNA, 20 nt, Artificial Sequence
  spacer sequence TTCN PAM
uaauaaauaaugacugucua

SEQ ID NO: 20309 - RNA, 20 nt, Artificial Sequence
  spacer sequence TTCN PAM
ugcuuauucauaauaaauaa

SEQ ID NO: 20310 - RNA, 20 nt, Artificial Sequence
  spacer sequence TTCN PAM
caugccaauuauuuggcuau

SEQ ID NO: 20311 - RNA, 20 nt, Artificial Sequence
  spacer sequence TTCN PAM
cuaagcuagguaaucuagcc

SEQ ID NO: 20312 - RNA, 20 nt, Artificial Sequence
  spacer sequence TTCN PAM
ggcuagauuaccuagcuuag

SEQ ID NO: 20313 - RNA, 20 nt, Artificial Sequence
  spacer sequence TTCN PAM
ccacuuagguucacggccug

SEQ ID NO: 20314 - RNA, 20 nt, Artificial Sequence
  spacer sequence TTCN PAM
cggccuguaugugaaucuac

SEQ ID NO: 20315 - RNA, 20 nt, Artificial Sequence
  spacer sequence TTCN PAM
cauacaggccgugaaccuaa

SEQ ID NO: 20316 - RNA, 20 nt, Artificial Sequence
  spacer sequence TTCN PAM
aauucucuucuggaucucca

SEQ ID NO: 20317 - RNA, 20 nt, Artificial Sequence
  spacer sequence TTCN PAM
cuucuggaucuccaagcagu

SEQ ID NO: 20318 - RNA, 20 nt, Artificial Sequence
  spacer sequence TTCN PAM
ggaucuccaagcaguaaaaa

SEQ ID NO: 20319 - RNA, 20 nt, Artificial Sequence
  spacer sequence TTCN PAM
caguuugguauuuuuuacug

SEQ ID NO: 20320 - RNA, 20 nt, Artificial Sequence
  spacer sequence TTCN PAM
gugcaaauuaacugggccag

SEQ ID NO: 20321 - RNA, 20 nt, Artificial Sequence
  spacer sequence TTCN PAM
ggcccaguuaauuugcacag

SEQ ID NO: 20322 - RNA, 20 nt, Artificial Sequence
  spacer sequence TTCN PAM
uucuggcccaguuaauuugc

SEQ ID NO: 20323 - RNA, 20 nt, Artificial Sequence
  spacer sequence TTCN PAM
aaggaauagagcauugcugu

SEQ ID NO: 20324 - RNA, 20 nt, Artificial Sequence
  spacer sequence TTCN PAM
uuagaaauuagugccacaaa

SEQ ID NO: 20325 - RNA, 20 nt, Artificial Sequence
  spacer sequence TTCN PAM
gaugugaacuucuuuccucc

SEQ ID NO: 20326 - RNA, 20 nt, Artificial Sequence
  spacer sequence TTCN PAM
caucagaacagacaaucaca

SEQ ID NO: 20327 - RNA, 20 nt, Artificial Sequence
  spacer sequence TTCN PAM
uuccuccuauaauuuccccc

SEQ ID NO: 20328 - RNA, 20 nt, Artificial Sequence
  spacer sequence TTCN PAM
uccuauaauuuccccccucu

SEQ ID NO: 20329 - RNA, 20 nt, Artificial Sequence
  spacer sequence TTCN PAM
ccccucuaaaaucugcccca

SEQ ID NO: 20330 - RNA, 20 nt, Artificial Sequence
  spacer sequence TTCN PAM
ugauguaaguacuaaagaag

SEQ ID NO: 20331 - RNA, 20 nt, Artificial Sequence
  spacer sequence TTCN PAM
uuaguacuuacaucaggaaa

SEQ ID NO: 20332 - RNA, 20 nt, Artificial Sequence
  spacer sequence TTCN PAM
ugaagguuugggaaccuaaa

SEQ ID NO: 20333 - RNA, 20 nt, Artificial Sequence
  spacer sequence TTCN PAM
ggaaauauaucuuaaugcag

SEQ ID NO: 20334 - RNA, 20 nt, Artificial Sequence
  spacer sequence TTCN PAM
caaaccuucaggaaauauau

SEQ ID NO: 20335 - RNA, 20 nt, Artificial Sequence
  spacer sequence TTCN PAM
aauuuuagguucccaaaccu

SEQ ID NO: 20336 - RNA, 20 nt, Artificial Sequence
  spacer sequence TTCN PAM
uauuaaauauucuaauuuua

SEQ ID NO: 20337 - RNA, 20 nt, Artificial Sequence
  spacer sequence TTCN PAM
uuaggauuuaccgcucgccc

SEQ ID NO: 20338 - RNA, 20 nt, Artificial Sequence
  spacer sequence TTCN PAM
uuccuaagcuaaauuaaaag

SEQ ID NO: 20339 - RNA, 20 nt, Artificial Sequence
  spacer sequence TTCN PAM
uaagcuaaauuaaaagacaa

SEQ ID NO: 20340 - RNA, 20 nt, Artificial Sequence
  spacer sequence TTCN PAM
aauccugcaugguagccacc

SEQ ID NO: 20341 - RNA, 20 nt, Artificial Sequence
  spacer sequence TTCN PAM
aauauaugcuuuugguggcu

SEQ ID NO: 20342 - RNA, 20 nt, Artificial Sequence
  spacer sequence TTCN PAM
gcgugccauauuaugcauua

SEQ ID NO: 20343 - RNA, 20 nt, Artificial Sequence
  spacer sequence TTCN PAM
uaacugucugacuuauaauu

SEQ ID NO: 20344 - RNA, 20 nt, Artificial Sequence
  spacer sequence TTCN PAM
gcauuaauaaacagcaauau

SEQ ID NO: 20345 - RNA, 20 nt, Artificial Sequence
  spacer sequence TTCN PAM
caaguuuugcauuuugauuc

SEQ ID NO: 20346 - RNA, 20 nt, Artificial Sequence
  spacer sequence TTCN PAM
ccuugaaaauuuaugccauc

SEQ ID NO: 20347 - RNA, 20 nt, Artificial Sequence
  spacer sequence TTCN PAM
aggagaaucaaaaugcaaaa

SEQ ID NO: 20348 - RNA, 20 nt, Artificial Sequence
  spacer sequence TTCN PAM
ccuccuacaucuccugccca

SEQ ID NO: 20349 - RNA, 20 nt, Artificial Sequence
  spacer sequence TTCN PAM
caaaucuguuccuccuaccc

SEQ ID NO: 20350 - RNA, 20 nt, Artificial Sequence
  spacer sequence TTCN PAM
uccuacccacccgaugggug

SEQ ID NO: 20351 - RNA, 20 nt, Artificial Sequence
  spacer sequence TTCN PAM
uacagacacccaucgggugg

SEQ ID NO: 20352 - RNA, 20 nt, Artificial Sequence
  spacer sequence TTCN PAM
guaccuguuuccuacagaca

SEQ ID NO: 20353 - RNA, 20 nt, Artificial Sequence
  spacer sequence TTCN PAM
uuaauuuuuaaugcuuauaa

SEQ ID NO: 20354 - RNA, 20 nt, Artificial Sequence
  spacer sequence TTCN PAM
auguugucuuuuaaaaagug

SEQ ID NO: 20355 - RNA, 20 nt, Artificial Sequence
  spacer sequence TTCN PAM
auacauucuauguugucuuu

SEQ ID NO: 20356 - RNA, 20 nt, Artificial Sequence
  spacer sequence TTCN PAM
acaauacagguaauuagguu

SEQ ID NO: 20357 - RNA, 20 nt, Artificial Sequence
  spacer sequence TTCN PAM
gaagggccagggcaucacuc

SEQ ID NO: 20358 - RNA, 20 nt, Artificial Sequence
  spacer sequence TTCN PAM
gaaaccagccaaccuaauua

SEQ ID NO: 20359 - RNA, 20 nt, Artificial Sequence
  spacer sequence TTCN PAM
cuguuccaaugugggucugu

SEQ ID NO: 20360 - RNA, 20 nt, Artificial Sequence
  spacer sequence TTCN PAM
aaugugggucuguuuuuuug

SEQ ID NO: 20361 - RNA, 20 nt, Artificial Sequence
  spacer sequence TTCN PAM
agccuaggccugcagcgcca

SEQ ID NO: 20362 - RNA, 20 nt, Artificial Sequence
  spacer sequence TTCN PAM
cacaacggcuucuuggaggc

SEQ ID NO: 20363 - RNA, 20 nt, Artificial Sequence
  spacer sequence TTCN PAM
uggaggcuacugucagaaaa

SEQ ID NO: 20364 - RNA, 20 nt, Artificial Sequence
  spacer sequence TTCN PAM
gacaguagccuccaagaagc

SEQ ID NO: 20365 - RNA, 20 nt, Artificial Sequence
  spacer sequence TTCN PAM
aauuuucucagaacuuaagg

SEQ ID NO: 20366 - RNA, 20 nt, Artificial Sequence
  spacer sequence TTCN PAM
cagaacuuaagggcucucga

SEQ ID NO: 20367 - RNA, 20 nt, Artificial Sequence
  spacer sequence TTCN PAM
gagaaaauuugaagccccca

SEQ ID NO: 20368 - RNA, 20 nt, Artificial Sequence
  spacer sequence TTCN PAM
auccgaaaacugccacacau

SEQ ID NO: 20369 - RNA, 20 nt, Artificial Sequence
  spacer sequence TTCN PAM
gauggaagcucgagagcccu

SEQ ID NO: 20370 - RNA, 20 nt, Artificial Sequence
  spacer sequence TTCN PAM
gcguaguacccagagagcuc

SEQ ID NO: 20371 - RNA, 20 nt, Artificial Sequence
  spacer sequence TTCN PAM
cacacccccauucggcguag

SEQ ID NO: 20372 - RNA, 20 nt, Artificial Sequence
  spacer sequence TTCN PAM
ucacacacccccauucggcg

SEQ ID NO: 20373 - RNA, 20 nt, Artificial Sequence
  spacer sequence TTCN PAM
agguucuucacacaccccca

SEQ ID NO: 20374 - RNA, 20 nt, Artificial Sequence
  spacer sequence TTCN PAM
cccuccucugucuccaaccu

SEQ ID NO: 20375 - RNA, 20 nt, Artificial Sequence
  spacer sequence TTCN PAM
guucucuaacuagcuuuuua

SEQ ID NO: 20376 - RNA, 20 nt, Artificial Sequence
  spacer sequence TTCN PAM
cuaacuagcuuuuuaaaaau

SEQ ID NO: 20377 - RNA, 20 nt, Artificial Sequence
  spacer sequence TTCN PAM
aauuuuuaaaaagcuaguua

SEQ ID NO: 20378 - RNA, 20 nt, Artificial Sequence
  spacer sequence TTCN PAM
aacucagccuccccucccca

SEQ ID NO: 20379 - RNA, 20 nt, Artificial Sequence
  spacer sequence TTCN PAM
caugccucccucccuuccgu

SEQ ID NO: 20380 - RNA, 20 nt, Artificial Sequence
  spacer sequence TTCN PAM
guccccccaaggaggaccca

SEQ ID NO: 20381 - RNA, 20 nt, Artificial Sequence
  spacer sequence TTCN PAM
aggugugucccgaguuuauu

SEQ ID NO: 20382 - RNA, 20 nt, Artificial Sequence
  spacer sequence TTCN PAM
uuccaggugugucccgaguu

SEQ ID NO: 20383 - RNA, 20 nt, Artificial Sequence
  spacer sequence TTCN PAM
cagucauaagggcaaguguu

SEQ ID NO: 20384 - RNA, 20 nt, Artificial Sequence
  spacer sequence TTCN PAM
uacuaaguuuucucagucau

SEQ ID NO: 20385 - RNA, 20 nt, Artificial Sequence
  spacer sequence TTCN PAM
cuccucccucucccgcucuc

SEQ ID NO: 20386 - RNA, 20 nt, Artificial Sequence
  spacer sequence TTCN PAM
caaaauaauaauaaaauuau

SEQ ID NO: 20387 - RNA, 20 nt, Artificial Sequence
  spacer sequence TTCN PAM
uuauaauuuuauuauuauuu

SEQ ID NO: 20388 - RNA, 20 nt, Artificial Sequence
  spacer sequence TTCN PAM
uugugcugcuuuuacaucag

SEQ ID NO: 20389 - RNA, 20 nt, Artificial Sequence
  spacer sequence TTCN PAM
uguuuucguugugcugcuuu

SEQ ID NO: 20390 - RNA, 20 nt, Artificial Sequence
  spacer sequence TTCN PAM
acgucaaagcagccaaugau

SEQ ID NO: 20391 - RNA, 20 nt, Artificial Sequence
  spacer sequence TTCN PAM
ccucuuguaaaucauuggcu

SEQ ID NO: 20392 - RNA, 20 nt, Artificial Sequence
  spacer sequence TTCN PAM
gagauuuguucgccucuugu

SEQ ID NO: 20393 - RNA, 20 nt, Artificial Sequence
  spacer sequence TTCN PAM
cuucagagauuuguucgccu

SEQ ID NO: 20394 - RNA, 20 nt, Artificial Sequence
  spacer sequence TTCN PAM
gguuuucucuucagagauuu

SEQ ID NO: 20395 - RNA, 20 nt, Artificial Sequence
  spacer sequence TTCN PAM
uucaaacaugcaguuuucuu

SEQ ID NO: 20396 - RNA, 20 nt, Artificial Sequence
  spacer sequence TTCN PAM
aacaugcaguuuucuuuucu

SEQ ID NO: 20397 - RNA, 20 nt, Artificial Sequence
  spacer sequence TTCN PAM
uuucuuuuuuggaaggggga

SEQ ID NO: 20398 - RNA, 20 nt, Artificial Sequence
  spacer sequence TTCN PAM
uuuuuggaagggggaaggca

SEQ ID NO: 20399 - RNA, 20 nt, Artificial Sequence
  spacer sequence TTCN PAM
aaaaaagaaaagaaaacugc

SEQ ID NO: 20400 - RNA, 20 nt, Artificial Sequence
  spacer sequence TTCN PAM
cccuuccaaaaaagaaaaga

SEQ ID NO: 20401 - RNA, 20 nt, Artificial Sequence
  spacer sequence TTCN PAM
ccauugccuucccccuucca

SEQ ID NO: 20402 - RNA, 20 nt, Artificial Sequence
  spacer sequence TTCN PAM
cuucaccauugccuuccccc

SEQ ID NO: 20403 - RNA, 20 nt, Artificial Sequence
  spacer sequence TTCN PAM
ucccuucaccauugccuucc

SEQ ID NO: 20404 - RNA, 20 nt, Artificial Sequence
  spacer sequence TTCN PAM
uccgggguuccucccuugcu

SEQ ID NO: 20405 - RNA, 20 nt, Artificial Sequence
  spacer sequence TTCN PAM
ucccuugcuguggacauuga

SEQ ID NO: 20406 - RNA, 20 nt, Artificial Sequence
  spacer sequence TTCN PAM
agucaauguccacagcaagg

SEQ ID NO: 20407 - RNA, 20 nt, Artificial Sequence
  spacer sequence TTCN PAM
gcugcuucaagucaaugucc

SEQ ID NO: 20408 - RNA, 20 nt, Artificial Sequence
  spacer sequence TTCN PAM
ucggcacauccggacuccca

SEQ ID NO: 20409 - RNA, 20 nt, Artificial Sequence
  spacer sequence TTCN PAM
aggccucguugccauggcga

SEQ ID NO: 20410 - RNA, 20 nt, Artificial Sequence
  spacer sequence TTCN PAM
ggucgccauggcaacgaggc

SEQ ID NO: 20411 - RNA, 20 nt, Artificial Sequence
  spacer sequence TTCN PAM
ggggaaucccauucccaguc

SEQ ID NO: 20412 - RNA, 20 nt, Artificial Sequence
  spacer sequence TTCN PAM
ccagaacccaccuggacgca

SEQ ID NO: 20413 - RNA, 20 nt, Artificial Sequence
  spacer sequence TTCN PAM
caguccagcgcuaagucacu

SEQ ID NO: 20414 - RNA, 20 nt, Artificial Sequence
  spacer sequence TTCN PAM
uccaaccugcuaccaauauu

SEQ ID NO: 20415 - RNA, 20 nt, Artificial Sequence
  spacer sequence TTCN PAM
aauucuaauagacaaaguau

SEQ ID NO: 20416 - RNA, 20 nt, Artificial Sequence
  spacer sequence TTCN PAM
aauagacaaaguauaucaug

SEQ ID NO: 20417 - RNA, 20 nt, Artificial Sequence
  spacer sequence TTCN PAM
cagcuauuuaaaagcacagc

SEQ ID NO: 20418 - RNA, 20 nt, Artificial Sequence
  spacer sequence TTCN PAM
ccaaguauccucuaaagcgg

SEQ ID NO: 20419 - RNA, 20 nt, Artificial Sequence
  spacer sequence TTCN PAM
accaucccuaugaaagaucu

SEQ ID NO: 20420 - RNA, 20 nt, Artificial Sequence
  spacer sequence TTCN PAM
uagggaugguagaaaaggca

SEQ ID NO: 20421 - RNA, 20 nt, Artificial Sequence
  spacer sequence TTCN PAM
agggagcacguguaucagau

SEQ ID NO: 20422 - RNA, 20 nt, Artificial Sequence
  spacer sequence TTCN PAM
guaaaguggcaaaaacuauu

SEQ ID NO: 20423 - RNA, 20 nt, Artificial Sequence
  spacer sequence TTCN PAM
uuucuguaaaguggcaaaaa

SEQ ID NO: 20424 - RNA, 20 nt, Artificial Sequence
  spacer sequence TTCN PAM
gccaaguuuagguucucaag

SEQ ID NO: 20425 - RNA, 20 nt, Artificial Sequence
  spacer sequence TTCN PAM
caaguacaaugacccgugug

SEQ ID NO: 20426 - RNA, 20 nt, Artificial Sequence
  spacer sequence TTCN PAM
cacgggucauuguacuugag

SEQ ID NO: 20427 - RNA, 20 nt, Artificial Sequence
  spacer sequence TTCN PAM
cauuuggaagggaggaauua

SEQ ID NO: 20428 - RNA, 20 nt, Artificial Sequence
  spacer sequence TTCN PAM
aaaugggaaagagaccaauc

SEQ ID NO: 20429 - RNA, 20 nt, Artificial Sequence
  spacer sequence TTCN PAM
ucccuuccaaaugggaaaga

SEQ ID NO: 20430 - RNA, 20 nt, Artificial Sequence
  spacer sequence TTCN PAM
cagcgucaucuacggucaug

SEQ ID NO: 20431 - RNA, 20 nt, Artificial Sequence
  spacer sequence TTCN PAM
cucucucuauuucccagcgu

SEQ ID NO: 20432 - RNA, 20 nt, Artificial Sequence
  spacer sequence TTCN PAM
cucucucucucucucuuucu

SEQ ID NO: 20433 - RNA, 20 nt, Artificial Sequence
  spacer sequence TTCN PAM
ccuaaaggcugagucacugg

SEQ ID NO: 20434 - RNA, 20 nt, Artificial Sequence
  spacer sequence TTCN PAM
gcuugcuggcaucucguuau

SEQ ID NO: 20435 - RNA, 20 nt, Artificial Sequence
  spacer sequence TTCN PAM
uagcuauagcagcccuagag

SEQ ID NO: 20436 - RNA, 20 nt, Artificial Sequence
  spacer sequence TTCN PAM
cucuauguguucugaugucc

SEQ ID NO: 20437 - RNA, 20 nt, Artificial Sequence
  spacer sequence TTCN PAM
gauguccauuucucuaacaa

SEQ ID NO: 20438 - RNA, 20 nt, Artificial Sequence
  spacer sequence TTCN PAM
cuaacaauggguucguuuau

SEQ ID NO: 20439 - RNA, 20 nt, Artificial Sequence
  spacer sequence TTCN PAM
uuuauuuucuauugggaaau

SEQ ID NO: 20440 - RNA, 20 nt, Artificial Sequence
  spacer sequence TTCN PAM
auugggaaauaugcagggcu

SEQ ID NO: 20441 - RNA, 20 nt, Artificial Sequence
  spacer sequence TTCN PAM
caauagaaaauaaacgaacc

SEQ ID NO: 20442 - RNA, 20 nt, Artificial Sequence
  spacer sequence TTCN PAM
uaguugucuccuaaagcccu

SEQ ID NO: 20443 - RNA, 20 nt, Artificial Sequence
  spacer sequence TTCN PAM
uaaaagacugcuaacuuuua

SEQ ID NO: 20444 - RNA, 20 nt, Artificial Sequence
  spacer sequence TTCN PAM
aagcagguugagagaacucu

SEQ ID NO: 20445 - RNA, 20 nt, Artificial Sequence
  spacer sequence TTCN PAM
cucaaccugcuuggaaaaau

SEQ ID NO: 20446 - RNA, 20 nt, Artificial Sequence
  spacer sequence TTCN PAM
cacaauuuuuuuuuuauggg

SEQ ID NO: 20447 - RNA, 20 nt, Artificial Sequence
  spacer sequence TTCN PAM
cauaaaaaaaaaauuguggg

SEQ ID NO: 20448 - RNA, 20 nt, Artificial Sequence
  spacer sequence TTCN PAM
gacaacuucccauaaaaaaa

SEQ ID NO: 20449 - RNA, 20 nt, Artificial Sequence
  spacer sequence TTCN PAM
cuuuuuuucagacaacuucc

SEQ ID NO: 20450 - RNA, 20 nt, Artificial Sequence
  spacer sequence TTCN PAM
ugaacacaccaggcccaggg

SEQ ID NO: 20451 - RNA, 20 nt, Artificial Sequence
  spacer sequence TTCN PAM
ggaauguacccaucccauuc

SEQ ID NO: 20452 - RNA, 20 nt, Artificial Sequence
  spacer sequence TTCN PAM
guuacuccauugucccuggg

SEQ ID NO: 20453 - RNA, 20 nt, Artificial Sequence
  spacer sequence TTCN PAM
ucauuacgauucuguuacuc

SEQ ID NO: 20454 - RNA, 20 nt, Artificial Sequence
  spacer sequence TTCN PAM
uaugacuguguuguaacugu

SEQ ID NO: 20455 - RNA, 20 nt, Artificial Sequence
  spacer sequence TTCN PAM
uguguguacggagggggaaa

SEQ ID NO: 20456 - RNA, 20 nt, Artificial Sequence
  spacer sequence TTCN PAM
cccuccguacacacaugaac

SEQ ID NO: 20457 - RNA, 20 nt, Artificial Sequence
  spacer sequence TTCN PAM
uguuuuaagccucuuuuccc

SEQ ID NO: 20458 - RNA, 20 nt, Artificial Sequence
  spacer sequence TTCN PAM
ucccucagucucugugagca

SEQ ID NO: 20459 - RNA, 20 nt, Artificial Sequence
  spacer sequence TTCN PAM
caacuccuuuucaggaaggc

SEQ ID NO: 20460 - RNA, 20 nt, Artificial Sequence
  spacer sequence TTCN PAM
ggaaggcccgaaauaauccc

SEQ ID NO: 20461 - RNA, 20 nt, Artificial Sequence
  spacer sequence TTCN PAM
ugaaaaggaguugagaagcc

SEQ ID NO: 20462 - RNA, 20 nt, Artificial Sequence
  spacer sequence TTCN PAM
ggccuuccugaaaaggaguu

SEQ ID NO: 20463 - RNA, 20 nt, Artificial Sequence
  spacer sequence TTCN PAM
gcaaacugugucugugaaua

SEQ ID NO: 20464 - RNA, 20 nt, Artificial Sequence
  spacer sequence TTCN PAM
cagacacaguuugcugaaag

SEQ ID NO: 20465 - RNA, 20 nt, Artificial Sequence
  spacer sequence TTCN PAM
uuauuucuccaauuggaauu

SEQ ID NO: 20466 - RNA, 20 nt, Artificial Sequence
  spacer sequence TTCN PAM
ccaauuggaauuauaccuaa

SEQ ID NO: 20467 - RNA, 20 nt, Artificial Sequence
  spacer sequence TTCN PAM
aauuggagaaauaaggaaau

SEQ ID NO: 20468 - RNA, 20 nt, Artificial Sequence
  spacer sequence TTCN PAM
uuucaaguucucacuucuag

SEQ ID NO: 20469 - RNA, 20 nt, Artificial Sequence
  spacer sequence TTCN PAM
aguucucacuucuagcauua

SEQ ID NO: 20470 - RNA, 20 nt, Artificial Sequence
  spacer sequence TTCN PAM
cacuucuagcauuaugauua

SEQ ID NO: 20471 - RNA, 20 nt, Artificial Sequence
  spacer sequence TTCN PAM
agcauuaugauuauauacaa

SEQ ID NO: 20472 - RNA, 20 nt, Artificial Sequence
  spacer sequence TTCN PAM
auaucuacagaaugcccugg

SEQ ID NO: 20473 - RNA, 20 nt, Artificial Sequence
  spacer sequence TTCN PAM
guagauauagaacuguuuau

SEQ ID NO: 20474 - RNA, 20 nt, Artificial Sequence
  spacer sequence TTCN PAM
cagggcauucuguagauaua

SEQ ID NO: 20475 - RNA, 20 nt, Artificial Sequence
  spacer sequence TTCN PAM
cacuuucugccauggccagu

SEQ ID NO: 20476 - RNA, 20 nt, Artificial Sequence
  spacer sequence TTCN PAM
gccauggccagugcaaauga

SEQ ID NO: 20477 - RNA, 20 nt, Artificial Sequence
  spacer sequence TTCN PAM
uuugcacuggccauggcaga

SEQ ID NO: 20478 - RNA, 20 nt, Artificial Sequence
  spacer sequence TTCN PAM
ucauuugcacuggccauggc

SEQ ID NO: 20479 - RNA, 20 nt, Artificial Sequence
  spacer sequence TTCN PAM
ccucacuucuuagcaaccuu

SEQ ID NO: 20480 - RNA, 20 nt, Artificial Sequence
  spacer sequence TTCN PAM
uagcaaccuuuguaaugugu

SEQ ID NO: 20481 - RNA, 20 nt, Artificial Sequence
  spacer sequence TTCN PAM
agccuuuuuguagguccuaa

SEQ ID NO: 20482 - RNA, 20 nt, Artificial Sequence
  spacer sequence TTCN PAM
ggaaggagguaauauaggca

SEQ ID NO: 20483 - RNA, 20 nt, Artificial Sequence
  spacer sequence TTCN PAM
ugaacccauuugcuauccuc

SEQ ID NO: 20484 - RNA, 20 nt, Artificial Sequence
  spacer sequence TTCN PAM
agugccuauauuaccuccuu

SEQ ID NO: 20485 - RNA, 20 nt, Artificial Sequence
  spacer sequence TTCN PAM
gguuuaaaaucugugagaaa

SEQ ID NO: 20486 - RNA, 20 nt, Artificial Sequence
  spacer sequence TTCN PAM
cacagauuuuaaaccagaaa

SEQ ID NO: 20487 - RNA, 20 nt, Artificial Sequence
  spacer sequence TTCN PAM
auuucucacagauuuuaaac

SEQ ID NO: 20488 - RNA, 20 nt, Artificial Sequence
  spacer sequence TTCN PAM
uguuuauuaaguuguucuca

SEQ ID NO: 20489 - RNA, 20 nt, Artificial Sequence
  spacer sequence TTCN PAM
caaaugaagauuaaaaagaa

SEQ ID NO: 20490 - RNA, 20 nt, Artificial Sequence
  spacer sequence TTCN PAM
uuugagaacaacuuaauaaa

SEQ ID NO: 20491 - RNA, 20 nt, Artificial Sequence
  spacer sequence TTCN PAM
uuuuaaucuucauuugagaa

SEQ ID NO: 20492 - RNA, 20 nt, Artificial Sequence
  spacer sequence TTCN PAM
gguauguagagaacauucca

SEQ ID NO: 20493 - RNA, 20 nt, Artificial Sequence
  spacer sequence TTCN PAM
cuacauaccugaacugaugc

SEQ ID NO: 20494 - RNA, 20 nt, Artificial Sequence
  spacer sequence TTCN PAM
aucagcacgucaagccuguu

SEQ ID NO: 20495 - RNA, 20 nt, Artificial Sequence
  spacer sequence TTCN PAM
uaguaguuccucauuuaaaa

SEQ ID NO: 20496 - RNA, 20 nt, Artificial Sequence
  spacer sequence TTCN PAM
ucauuuaaaaaaaaaagauc

SEQ ID NO: 20497 - RNA, 20 nt, Artificial Sequence
  spacer sequence TTCN PAM
ugaucuuuuuuuuuuaaaug

SEQ ID NO: 20498 - RNA, 20 nt, Artificial Sequence
  spacer sequence TTCN PAM
ucuuacuauuggaaaugugc

SEQ ID NO: 20499 - RNA, 20 nt, Artificial Sequence
  spacer sequence TTCN PAM
aauaguaagaugaauucaug

SEQ ID NO: 20500 - RNA, 20 nt, Artificial Sequence
  spacer sequence TTCN PAM
ggauacaaaauaucauuuau

SEQ ID NO: 20501 - RNA, 20 nt, Artificial Sequence
  spacer sequence TTCN PAM
cauguuucuauuguucauca

SEQ ID NO: 20502 - RNA, 20 nt, Artificial Sequence
  spacer sequence TTCN PAM
auuguucaucagcuucagaa

SEQ ID NO: 20503 - RNA, 20 nt, Artificial Sequence
  spacer sequence TTCN PAM
ucagcuucagaaauaauauu

SEQ ID NO: 20504 - RNA, 20 nt, Artificial Sequence
  spacer sequence TTCN PAM
gaaauaauauuuuaucagaa

SEQ ID NO: 20505 - RNA, 20 nt, Artificial Sequence
  spacer sequence TTCN PAM
gaagcugaugaacaauagaa

SEQ ID NO: 20506 - RNA, 20 nt, Artificial Sequence
  spacer sequence TTCN PAM
gauaaaauauuauuucugaa

SEQ ID NO: 20507 - RNA, 20 nt, Artificial Sequence
  spacer sequence TTCN PAM
gguuacuuagucuccugacu

SEQ ID NO: 20508 - RNA, 20 nt, Artificial Sequence
  spacer sequence TTCN PAM
ucagguuacuuagucuccug

SEQ ID NO: 20509 - RNA, 20 nt, Artificial Sequence
  spacer sequence TTCN PAM
ccauuugauuuaagaaauuu

SEQ ID NO: 20510 - RNA, 20 nt, Artificial Sequence
  spacer sequence TTCN PAM
uaaaucaaauggggaauggg

SEQ ID NO: 20511 - RNA, 20 nt, Artificial Sequence
  spacer sequence TTCN PAM
aauuucuuaaaucaaauggg

SEQ ID NO: 20512 - RNA, 20 nt, Artificial Sequence
  spacer sequence TTCN PAM
gucugucaggaugcaaaacc

SEQ ID NO: 20513 - RNA, 20 nt, Artificial Sequence
  spacer sequence TTCN PAM
caguauaugcugcucuuagc

SEQ ID NO: 20514 - RNA, 20 nt, Artificial Sequence
  spacer sequence TTCN PAM
uuuuaauuucucaguauaug

SEQ ID NO: 20515 - RNA, 20 nt, Artificial Sequence
  spacer sequence TTCN PAM
acuccacccuauuaaauguc

SEQ ID NO: 20516 - RNA, 20 nt, Artificial Sequence
  spacer sequence TTCN PAM
ccagugccaugccagcuuua

SEQ ID NO: 20517 - RNA, 20 nt, Artificial Sequence
  spacer sequence TTCN PAM
aucugucuugagcagcauuu

SEQ ID NO: 20518 - RNA, 20 nt, Artificial Sequence
  spacer sequence TTCN PAM
guuuuggagaaaccuaaucc

SEQ ID NO: 20519 - RNA, 20 nt, Artificial Sequence
  spacer sequence TTCN PAM
ccaaaacugaauccaaaaug

SEQ ID NO: 20520 - RNA, 20 nt, Artificial Sequence
  spacer sequence TTCN PAM
aaguucagugacaaacauca

SEQ ID NO: 20521 - RNA, 20 nt, Artificial Sequence
  spacer sequence TTCN PAM
gugacaaacaucaaguucuc

SEQ ID NO: 20522 - RNA, 20 nt, Artificial Sequence
  spacer sequence TTCN PAM
caagguaccgcacgcccacc

SEQ ID NO: 20523 - RNA, 20 nt, Artificial Sequence
  spacer sequence TTCN PAM
ccaacauccuuucucagugg

SEQ ID NO: 20524 - RNA, 20 nt, Artificial Sequence
  spacer sequence TTCN PAM
caguggauuccucuagcccc

SEQ ID NO: 20525 - RNA, 20 nt, Artificial Sequence
  spacer sequence TTCN PAM
ucuagccccacucucuccuu

SEQ ID NO: 20526 - RNA, 20 nt, Artificial Sequence
  spacer sequence TTCN PAM
cacccaaacuggcuuuucag

SEQ ID NO: 20527 - RNA, 20 nt, Artificial Sequence
  spacer sequence TTCN PAM
gaaaacauugacuuucuuua

SEQ ID NO: 20528 - RNA, 20 nt, Artificial Sequence
  spacer sequence TTCN PAM
gaaaagccaguuuggguggg

SEQ ID NO: 20529 - RNA, 20 nt, Artificial Sequence
  spacer sequence TTCN PAM
uuauacuuuagaaagauaaa

SEQ ID NO: 20530 - RNA, 20 nt, Artificial Sequence
  spacer sequence TTCN PAM
aaaguauaaagaaagucaau

SEQ ID NO: 20531 - RNA, 20 nt, Artificial Sequence
  spacer sequence TTCN PAM
ugccucagauaaaaggcaug

SEQ ID NO: 20532 - RNA, 20 nt, Artificial Sequence
  spacer sequence TTCN PAM
ugucaugccuuuuaucugag

SEQ ID NO: 20533 - RNA, 20 nt, Artificial Sequence
  spacer sequence TTCN PAM
uaugcccuagugccugugag

SEQ ID NO: 20534 - RNA, 20 nt, Artificial Sequence
  spacer sequence TTCN PAM
ugugguagcauuuuuugucg

SEQ ID NO: 20535 - RNA, 20 nt, Artificial Sequence
  spacer sequence TTCN PAM
guugucuucuugugguagca

SEQ ID NO: 20536 - RNA, 20 nt, Artificial Sequence
  spacer sequence TTCN PAM
uauuuuuguaaaaaaccaaa

SEQ ID NO: 20537 - RNA, 20 nt, Artificial Sequence
  spacer sequence TTCN PAM
uucaucuacacugggaacag

SEQ ID NO: 20538 - RNA, 20 nt, Artificial Sequence
  spacer sequence TTCN PAM
ucuacacugggaacagggac

SEQ ID NO: 20539 - RNA, 20 nt, Artificial Sequence
  spacer sequence TTCN PAM
caguguagaugaaugaauac

SEQ ID NO: 20540 - RNA, 20 nt, Artificial Sequence
  spacer sequence TTCN PAM
aaggauuuuuaaaauagacc

SEQ ID NO: 20541 - RNA, 20 nt, Artificial Sequence
  spacer sequence TTCN PAM
gaccagccaguuaggucuau

SEQ ID NO: 20542 - RNA, 20 nt, Artificial Sequence
  spacer sequence TTCN PAM
auuaucuucugaccagccag

SEQ ID NO: 20543 - RNA, 20 nt, Artificial Sequence
  spacer sequence TTCN PAM
cgcccuuauuugcugucauc

SEQ ID NO: 20544 - RNA, 20 nt, Artificial Sequence
  spacer sequence TTCN PAM
uggaugacagcaaauaaggg

SEQ ID NO: 20545 - RNA, 20 nt, Artificial Sequence
  spacer sequence TTCN PAM
ugggaucucagaaccacaag

SEQ ID NO: 20546 - RNA, 20 nt, Artificial Sequence
  spacer sequence TTCN PAM
gagaucccaggaacccuaga

SEQ ID NO: 20547 - RNA, 20 nt, Artificial Sequence
  spacer sequence TTCN PAM
ugagaugcauagugguuugc

SEQ ID NO: 20548 - RNA, 20 nt, Artificial Sequence
  spacer sequence TTCN PAM
aaagauuucacuaugucugg

SEQ ID NO: 20549 - RNA, 20 nt, Artificial Sequence
  spacer sequence TTCN PAM
cuaugucuggcuacaccccu

SEQ ID NO: 20550 - RNA, 20 nt, Artificial Sequence
  spacer sequence TTCN PAM
uuucuuucgucucucucuuu

SEQ ID NO: 20551 - RNA, 20 nt, Artificial Sequence
  spacer sequence TTCN PAM
uucgucucucucuuuuuuuc

SEQ ID NO: 20552 - RNA, 20 nt, Artificial Sequence
  spacer sequence TTCN PAM
ucucucucuuuuuuucuccc

SEQ ID NO: 20553 - RNA, 20 nt, Artificial Sequence
  spacer sequence TTCN PAM
cccucuuuuuuaaacaaaac

SEQ ID NO: 20554 - RNA, 20 nt, Artificial Sequence
  spacer sequence TTCN PAM
agauuuuuagauuucaaaag

SEQ ID NO: 20555 - RNA, 20 nt, Artificial Sequence
  spacer sequence TTCN PAM
aaagugggguuauuuuguua

SEQ ID NO: 20556 - RNA, 20 nt, Artificial Sequence
  spacer sequence TTCN PAM
cauaacaaaauaaccccacu

SEQ ID NO: 20557 - RNA, 20 nt, Artificial Sequence
  spacer sequence TTCN PAM
auguaagagucuuuucucau

SEQ ID NO: 20558 - RNA, 20 nt, Artificial Sequence
  spacer sequence TTCN PAM
aagauaaagcaaggauggga

SEQ ID NO: 20559 - RNA, 20 nt, Artificial Sequence
  spacer sequence TTCN PAM
cccauccuugcuuuaucuua

SEQ ID NO: 20560 - RNA, 20 nt, Artificial Sequence
  spacer sequence TTCN PAM
auucucccauccuugcuuua

SEQ ID NO: 20561 - RNA, 20 nt, Artificial Sequence
  spacer sequence TTCN PAM
uuucuauucucccauccuug

SEQ ID NO: 20562 - RNA, 20 nt, Artificial Sequence
  spacer sequence TTCN PAM
uguugucuaaaaguucuuuu

SEQ ID NO: 20563 - RNA, 20 nt, Artificial Sequence
  spacer sequence TTCN PAM
uuuaaauuuuuugcuguucu

SEQ ID NO: 20564 - RNA, 20 nt, Artificial Sequence
  spacer sequence TTCN PAM
cuuauguuugaauggauuuc

SEQ ID NO: 20565 - RNA, 20 nt, Artificial Sequence
  spacer sequence TTCN PAM
aacauaagugaaaaaacuug

SEQ ID NO: 20566 - RNA, 20 nt, Artificial Sequence
  spacer sequence TTCN PAM
gcuaagagauggaguaaguu

SEQ ID NO: 20567 - RNA, 20 nt, Artificial Sequence
  spacer sequence TTCN PAM
gucugauguuaaaaacuuac

SEQ ID NO: 20568 - RNA, 20 nt, Artificial Sequence
  spacer sequence TTCN PAM
auuucuugaaaacuauucua

SEQ ID NO: 20569 - RNA, 20 nt, Artificial Sequence
  spacer sequence TTCN PAM
ugaaaacuauucuaaacugg

SEQ ID NO: 20570 - RNA, 20 nt, Artificial Sequence
  spacer sequence TTCN PAM
agaaauggaagguguuuuca

SEQ ID NO: 20571 - RNA, 20 nt, Artificial Sequence
  spacer sequence TTCN PAM
aaacuggaaagccuuaaaac

SEQ ID NO: 20572 - RNA, 20 nt, Artificial Sequence
  spacer sequence TTCN PAM
aguuuagaauaguuuucaag

SEQ ID NO: 20573 - RNA, 20 nt, Artificial Sequence
  spacer sequence TTCN PAM
uuuaggguauaauacacgca

SEQ ID NO: 20574 - RNA, 20 nt, Artificial Sequence
  spacer sequence TTCN PAM
gaugcguguauuauacccua

SEQ ID NO: 20575 - RNA, 20 nt, Artificial Sequence
  spacer sequence TTCN PAM
augggcauucugaugcgugu

SEQ ID NO: 20576 - RNA, 20 nt, Artificial Sequence
  spacer sequence TTCN PAM
ggauuauuucuaugggcauu

SEQ ID NO: 20577 - RNA, 20 nt, Artificial Sequence
  spacer sequence TTCN PAM
cuuaaaaccuguuauuuucu

SEQ ID NO: 20578 - RNA, 20 nt, Artificial Sequence
  spacer sequence TTCN PAM
ugcaaguaauuuacagagug

SEQ ID NO: 20579 - RNA, 20 nt, Artificial Sequence
  spacer sequence TTCN PAM
uguguccucauuugacacac

SEQ ID NO: 20580 - RNA, 20 nt, Artificial Sequence
  spacer sequence TTCN PAM
auaaagggacaaaaugggug

SEQ ID NO: 20581 - RNA, 20 nt, Artificial Sequence
  spacer sequence TTCN PAM
uacacccauuuugucccuuu

SEQ ID NO: 20582 - RNA, 20 nt, Artificial Sequence
  spacer sequence TTCN PAM
aauagaacuuaacaaagacc

SEQ ID NO: 20583 - RNA, 20 nt, Artificial Sequence
  spacer sequence TTCN PAM
auuggaaaaaccacugucug

SEQ ID NO: 20584 - RNA, 20 nt, Artificial Sequence
  spacer sequence TTCN PAM
ggucuuuguuaaguucuauu

SEQ ID NO: 20585 - RNA, 20 nt, Artificial Sequence
  spacer sequence TTCN PAM
uuguuuuuauuuuuuuuuuu

SEQ ID NO: 20586 - RNA, 20 nt, Artificial Sequence
  spacer sequence TTCN PAM
aaacagaggcacuuaauuug

SEQ ID NO: 20587 - RNA, 20 nt, Artificial Sequence
  spacer sequence TTCN PAM
aguuacgacaaacagcuuuc

SEQ ID NO: 20588 - RNA, 20 nt, Artificial Sequence
  spacer sequence TTCN PAM
uuacaggaauagaaaaggcc

SEQ ID NO: 20589 - RNA, 20 nt, Artificial Sequence
  spacer sequence TTCN PAM
uguaaugaaagcuguuuguc

SEQ ID NO: 20590 - RNA, 20 nt, Artificial Sequence
  spacer sequence TTCN PAM
auuccuguaaugaaagcugu

SEQ ID NO: 20591 - RNA, 20 nt, Artificial Sequence
  spacer sequence TTCN PAM
gcauugccauuuacaaaaaa

SEQ ID NO: 20592 - RNA, 20 nt, Artificial Sequence
  spacer sequence TTCN PAM
cuuuaauaugcuuugcauau

SEQ ID NO: 20593 - RNA, 20 nt, Artificial Sequence
  spacer sequence TTCN PAM
uaugcaaagcauauuaaaga

SEQ ID NO: 20594 - RNA, 20 nt, Artificial Sequence
  spacer sequence TTCN PAM
uuccaaucuaaauauaaagc

SEQ ID NO: 20595 - RNA, 20 nt, Artificial Sequence
  spacer sequence TTCN PAM
aaucuaaauauaaagcacca

SEQ ID NO: 20596 - RNA, 20 nt, Artificial Sequence
  spacer sequence TTCN PAM
uugccaaaaacuaaauggug

SEQ ID NO: 20597 - RNA, 20 nt, Artificial Sequence
  spacer sequence TTCN PAM
uuuuuuuuucuuucuuucuu

SEQ ID NO: 20598 - RNA, 20 nt, Artificial Sequence
  spacer sequence TTCN PAM
uucuuucuuuuacugcauau

SEQ ID NO: 20599 - RNA, 20 nt, Artificial Sequence
  spacer sequence TTCN PAM
uucuuuuacugcauaugaag

SEQ ID NO: 20600 - RNA, 20 nt, Artificial Sequence
  spacer sequence TTCN PAM
uuuacugcauaugaagguaa

SEQ ID NO: 20601 - RNA, 20 nt, Artificial Sequence
  spacer sequence TTCN PAM
uaugcaguaaaagaaagaaa

SEQ ID NO: 20602 - RNA, 20 nt, Artificial Sequence
  spacer sequence TTCN PAM
agcaucuuaccuucauaugc

SEQ ID NO: 20603 - RNA, 20 nt, Artificial Sequence
  spacer sequence TTCN PAM
aucacccuacauuccagcau

SEQ ID NO: 20604 - RNA, 20 nt, Artificial Sequence
  spacer sequence TTCN PAM
uucuaucacccuacauucca

SEQ ID NO: 20605 - RNA, 20 nt, Artificial Sequence
  spacer sequence TTCN PAM
ugcugccauacuguaugcag

SEQ ID NO: 20606 - RNA, 20 nt, Artificial Sequence
  spacer sequence TTCN PAM
uuuuuccugcugccauacug

SEQ ID NO: 20607 - RNA, 20 nt, Artificial Sequence
  spacer sequence TTCN PAM
agcaggcucccccaaaccgc

SEQ ID NO: 20608 - RNA, 20 nt, Artificial Sequence
  spacer sequence TTCN PAM
caucuguaaugucacacuuu

SEQ ID NO: 20609 - RNA, 20 nt, Artificial Sequence
  spacer sequence TTCN PAM
cucuuuuuuuuuuuuuugaa

SEQ ID NO: 20610 - RNA, 20 nt, Artificial Sequence
  spacer sequence TTCN PAM
aaaaaaaaaaaaagagagaa

SEQ ID NO: 20611 - RNA, 20 nt, Artificial Sequence
  spacer sequence TTCN PAM
acuaccaaaaaagguacauu

SEQ ID NO: 20612 - RNA, 20 nt, Artificial Sequence
  spacer sequence TTCN PAM
cuuaaaagguaucaauguac

SEQ ID NO: 20613 - RNA, 20 nt, Artificial Sequence
  spacer sequence TTCN PAM
auauaaauacuauagugccu

SEQ ID NO: 20614 - RNA, 20 nt, Artificial Sequence
  spacer sequence TTCN PAM
ucuaguguuaggcacuauag

SEQ ID NO: 20615 - RNA, 20 nt, Artificial Sequence
  spacer sequence TTCN PAM
aauaccauucuagaaauaca

SEQ ID NO: 20616 - RNA, 20 nt, Artificial Sequence
  spacer sequence TTCN PAM
agaaauacagaaaaaagacc

SEQ ID NO: 20617 - RNA, 20 nt, Artificial Sequence
  spacer sequence TTCN PAM
agaaugguauuugaauuaaa

SEQ ID NO: 20618 - RNA, 20 nt, Artificial Sequence
  spacer sequence TTCN PAM
guauuucuagaaugguauuu

SEQ ID NO: 20619 - RNA, 20 nt, Artificial Sequence
  spacer sequence TTCN PAM
uaugcuaaaauacauuuaug

SEQ ID NO: 20620 - RNA, 20 nt, Artificial Sequence
  spacer sequence TTCN PAM
uauauuuaaguacuauauaa

SEQ ID NO: 20621 - RNA, 20 nt, Artificial Sequence
  spacer sequence TTCN PAM
ccaauguauguuuuuuuuuu

SEQ ID NO: 20622 - RNA, 20 nt, Artificial Sequence
  spacer sequence TTCN PAM
gguuguaaaaaaaaaaaaca

SEQ ID NO: 20623 - RNA, 20 nt, Artificial Sequence
  spacer sequence TTCN PAM
augccuuggauacacaccgc

SEQ ID NO: 20624 - RNA, 20 nt, Artificial Sequence
  spacer sequence TTCN PAM
acuaccauuuuuaaauggau

SEQ ID NO: 20625 - RNA, 20 nt, Artificial Sequence
  spacer sequence TTCN PAM
auugucuuggugguguuaca

SEQ ID NO: 20626 - RNA, 20 nt, Artificial Sequence
  spacer sequence TTCN PAM
ccccuaaacauaaugaagug

SEQ ID NO: 20627 - RNA, 20 nt, Artificial Sequence
  spacer sequence TTCN PAM
uuauguuuaggggggaacug

SEQ ID NO: 20628 - RNA, 20 nt, Artificial Sequence
  spacer sequence TTCN PAM
uaacauuuauauuuaaaaaa

SEQ ID NO: 20629 - RNA, 20 nt, Artificial Sequence
  spacer sequence TTCN PAM
acagugcaaggauuuuuuug

SEQ ID NO: 20630 - RNA, 20 nt, Artificial Sequence
  spacer sequence TTCN PAM
cuucuacagugcaaggauuu

SEQ ID NO: 20631 - RNA, 20 nt, Artificial Sequence
  spacer sequence TTCN PAM
uuucuauguuaaguguauuc

SEQ ID NO: 20632 - RNA, 20 nt, Artificial Sequence
  spacer sequence TTCN PAM
auguuaaguguauucuguuu

SEQ ID NO: 20633 - RNA, 20 nt, Artificial Sequence
  spacer sequence TTCN PAM
guuuccauucacagcgcuug

SEQ ID NO: 20634 - RNA, 20 nt, Artificial Sequence
  spacer sequence TTCN PAM
auucacagcgcuugcaaugu

SEQ ID NO: 20635 - RNA, 20 nt, Artificial Sequence
  spacer sequence TTCN PAM
cagcgcuugcaauguugcgu

SEQ ID NO: 20636 - RNA, 20 nt, Artificial Sequence
  spacer sequence TTCN PAM
auuuuuuuucagcauucuug

SEQ ID NO: 20637 - RNA, 20 nt, Artificial Sequence
  spacer sequence TTCN PAM
gcauucuugcaacuuuuccc

SEQ ID NO: 20638 - RNA, 20 nt, Artificial Sequence
  spacer sequence TTCN PAM
ugcaacuuuucccuuaagua

SEQ ID NO: 20639 - RNA, 20 nt, Artificial Sequence
  spacer sequence TTCN PAM
cuuaaguauagaccuguaaa

SEQ ID NO: 20640 - RNA, 20 nt, Artificial Sequence
  spacer sequence TTCN PAM
caguuuacaggucuauacuu

SEQ ID NO: 20641 - RNA, 20 nt, Artificial Sequence
  spacer sequence TTCN PAM
cuaaucagagauacagaggu

SEQ ID NO: 20642 - RNA, 20 nt, Artificial Sequence
  spacer sequence TTCN PAM
aauagcacuugacucugccu

SEQ ID NO: 20643 - RNA, 20 nt, Artificial Sequence
  spacer sequence TTCN PAM
uuuuuauuaagcuagcaucu

SEQ ID NO: 20644 - RNA, 20 nt, Artificial Sequence
  spacer sequence TTCN PAM
uuguuuuuauuuuuauuuuu

SEQ ID NO: 20645 - RNA, 20 nt, Artificial Sequence
  spacer sequence TTCN PAM
auguuaacacaaauagcaca

SEQ ID NO: 20646 - RNA, 20 nt, Artificial Sequence
  spacer sequence TTCN PAM
auacacugugugcuauuugu

SEQ ID NO: 20647 - RNA, 20 nt, Artificial Sequence
  spacer sequence TTCN PAM
uuuccauacacugugugcua

SEQ ID NO: 20648 - RNA, 20 nt, Artificial Sequence
  spacer sequence TTCN PAM
uuucuuuuccauacacugug

SEQ ID NO: 20649 - RNA, 20 nt, Artificial Sequence
  spacer sequence TTCN PAM
uucucuucuuuuuuuaagaa

SEQ ID NO: 20650 - RNA, 20 nt, Artificial Sequence
  spacer sequence TTCN PAM
cuucuuuuuuuaagaauguc

SEQ ID NO: 20651 - RNA, 20 nt, Artificial Sequence
  spacer sequence TTCN PAM
uuuuuuaagaaugucacauu

SEQ ID NO: 20652 - RNA, 20 nt, Artificial Sequence
  spacer sequence TTCN PAM
uaaaaaaagaagagaaagaa

SEQ ID NO: 20653 - RNA, 20 nt, Artificial Sequence
  spacer sequence TTCN PAM
uaagacuugcauuuaaaugu

SEQ ID NO: 20654 - RNA, 20 nt, Artificial Sequence
  spacer sequence TTCN PAM
uaguuaaucaucauuguauc

SEQ ID NO: 20655 - RNA, 20 nt, Artificial Sequence
  spacer sequence TTCN PAM
aguuuuaaauggcaaauagu

SEQ ID NO: 20656 - RNA, 20 nt, Artificial Sequence
  spacer sequence TTCN PAM
ucuguuccccucugucaaac

SEQ ID NO: 20657 - RNA, 20 nt, Artificial Sequence
  spacer sequence TTCN PAM
guuccccucugucaaaccuu

SEQ ID NO: 20658 - RNA, 20 nt, Artificial Sequence
  spacer sequence TTCN PAM
ccucugucaaaccuuauugu

SEQ ID NO: 20659 - RNA, 20 nt, Artificial Sequence
  spacer sequence TTCN PAM
uuucaauaugguauacaagg

SEQ ID NO: 20660 - RNA, 20 nt, Artificial Sequence
  spacer sequence TTCN PAM
auaugguauacaaggucuua

SEQ ID NO: 20661 - RNA, 20 nt, Artificial Sequence
  spacer sequence TTCN PAM
uuuggugccaguauuuuuaa

SEQ ID NO: 20662 - RNA, 20 nt, Artificial Sequence
  spacer sequence TTCN PAM
uaaaaugaacuccuuacuag

SEQ ID NO: 20663 - RNA, 20 nt, Artificial Sequence
  spacer sequence TTCN PAM
uuuuaugaagauauuugcuu

SEQ ID NO: 20664 - RNA, 20 nt, Artificial Sequence
  spacer sequence TTCN PAM
agggcuuuugcacauuacac

SEQ ID NO: 20665 - RNA, 20 nt, Artificial Sequence
  spacer sequence TTCN PAM
auuuaaucauuguuuaaaaa

SEQ ID NO: 20666 - RNA, 20 nt, Artificial Sequence
  spacer sequence TTCN PAM
uuuaagcucucaccaggagc

SEQ ID NO: 20667 - RNA, 20 nt, Artificial Sequence
  spacer sequence TTCN PAM
uuuaguuuaauuuuauaaac

SEQ ID NO: 20668 - RNA, 20 nt, Artificial Sequence
  spacer sequence TTCN PAM
cacaacaauggcuaccuaaa

SEQ ID NO: 20669 - RNA, 20 nt, Artificial Sequence
  spacer sequence TTCN PAM
auauuguauuucucacaaca

SEQ ID NO: 20670 - RNA, 20 nt, Artificial Sequence
  spacer sequence TTCN PAM
uaagguuuauuaccucaccc

SEQ ID NO: 20671 - RNA, 20 nt, Artificial Sequence
  spacer sequence TTCN PAM
gcauugggugagguaauaaa

SEQ ID NO: 20672 - RNA, 20 nt, Artificial Sequence
  spacer sequence TTCN PAM
acuuguuauaaacuuguagc

SEQ ID NO: 20673 - RNA, 20 nt, Artificial Sequence
  spacer sequence TTCN PAM
uucuacuuguuauaaacuug

SEQ ID NO: 20674 - RNA, 20 nt, Artificial Sequence
  spacer sequence TTCN PAM
aucauuugguuuuaaaauau

SEQ ID NO: 20675 - RNA, 20 nt, Artificial Sequence
  spacer sequence TTCN PAM
guuuuucuguuaauuuguca

SEQ ID NO: 20676 - RNA, 20 nt, Artificial Sequence
  spacer sequence TTCN PAM
guuaauuugucaauucaagg

SEQ ID NO: 20677 - RNA, 20 nt, Artificial Sequence
  spacer sequence TTCN PAM
aggccuuuuuucuuccuuuc

SEQ ID NO: 20678 - RNA, 20 nt, Artificial Sequence
  spacer sequence TTCN PAM
uccuuuccaauugauacauu

SEQ ID NO: 20679 - RNA, 20 nt, Artificial Sequence
  spacer sequence TTCN PAM
uuuccaauugauacauuuaa

SEQ ID NO: 20680 - RNA, 20 nt, Artificial Sequence
  spacer sequence TTCN PAM
aauugauacauuuaacccuu

SEQ ID NO: 20681 - RNA, 20 nt, Artificial Sequence
  spacer sequence TTCN PAM
gugcuaucuauucugucuau

SEQ ID NO: 20682 - RNA, 20 nt, Artificial Sequence
  spacer sequence TTCN PAM
gucuauagaggguuaaucca

SEQ ID NO: 20683 - RNA, 20 nt, Artificial Sequence
  spacer sequence TTCN PAM
uccucacguuauaaaauaaa

SEQ ID NO: 20684 - RNA, 20 nt, Artificial Sequence
  spacer sequence TTCN PAM
guaauacauaucauguacag

SEQ ID NO: 20685 - RNA, 20 nt, Artificial Sequence
  spacer sequence TTCN PAM
cucucucucucuuuuucucu

SEQ ID NO: 20686 - RNA, 20 nt, Artificial Sequence
  spacer sequence TTCN PAM
cucagaacggaacuggaaac

SEQ ID NO: 20687 - RNA, 20 nt, Artificial Sequence
  spacer sequence TTCN PAM
gagagaaaaagagagagaga

SEQ ID NO: 20688 - RNA, 20 nt, Artificial Sequence
  spacer sequence TTCN PAM
guucugagagaaaaagagag

SEQ ID NO: 20689 - RNA, 20 nt, Artificial Sequence
  spacer sequence TTCN PAM
aguuccguucugagagaaaa

SEQ ID NO: 20690 - RNA, 20 nt, Artificial Sequence
  spacer sequence TTCN PAM
uugcugagcaaacauguugc

SEQ ID NO: 20691 - RNA, 20 nt, Artificial Sequence
  spacer sequence TTCN PAM
cuugugcaauaauuuacaug

SEQ ID NO: 20692 - RNA, 20 nt, Artificial Sequence
  spacer sequence TTCN PAM
aacggugagaacauaaagga

SEQ ID NO: 20693 - RNA, 20 nt, Artificial Sequence
  spacer sequence TTCN PAM
caccguuugaaugcaugauc

SEQ ID NO: 20694 - RNA, 20 nt, Artificial Sequence
  spacer sequence TTCN PAM
uuuauguucucaccguuuga

SEQ ID NO: 20695 - RNA, 20 nt, Artificial Sequence
  spacer sequence TTCN PAM
uuuuuuuuuuuuuuccuuua

SEQ ID NO: 20696 - RNA, 20 nt, Artificial Sequence
  spacer sequence TTCN PAM
uuuuccuuuuuuuuuuuuuu

SEQ ID NO: 20697 - RNA, 20 nt, Artificial Sequence
  spacer sequence TTCN PAM
uuuuucuuuuuccuuuuuuu

SEQ ID NO: 20698 - RNA, 20 nt, Artificial Sequence
  spacer sequence TTCN PAM
uuuucuuuuuucuuuuuccu

SEQ ID NO: 20699 - RNA, 20 nt, Artificial Sequence
  spacer sequence TTCN PAM
uuuucuuuuucuuuuuucuu

SEQ ID NO: 20700 - RNA, 20 nt, Artificial Sequence
  spacer sequence TTCN PAM
uagcuucguuacuucuguuu

SEQ ID NO: 20701 - RNA, 20 nt, Artificial Sequence
  spacer sequence TTCN PAM
uuacuucuguuuguuuguuu

SEQ ID NO: 20702 - RNA, 20 nt, Artificial Sequence
  spacer sequence TTCN PAM
guuuguuuguuuguuuguuu

SEQ ID NO: 20703 - RNA, 20 nt, Artificial Sequence
  spacer sequence TTCN PAM
agucccaugugauuuaaaca

SEQ ID NO: 20704 - RNA, 20 nt, Artificial Sequence
  spacer sequence TTCN PAM
ccaucgcccuccagccccac

SEQ ID NO: 20705 - RNA, 20 nt, Artificial Sequence
  spacer sequence TTCN PAM
ccacuccccuuccccaucgc

SEQ ID NO: 20706 - RNA, 20 nt, Artificial Sequence
  spacer sequence TTCN PAM
guuuuuauaucauuauucaa

SEQ ID NO: 20707 - RNA, 20 nt, Artificial Sequence
  spacer sequence TTCN PAM
acacucgaucacugugccau

SEQ ID NO: 20708 - RNA, 20 nt, Artificial Sequence
  spacer sequence TTCN PAM
uguguuucuccaggguacug

SEQ ID NO: 20709 - RNA, 20 nt, Artificial Sequence
  spacer sequence TTCN PAM
ccaggguacuguacacgcua

SEQ ID NO: 20710 - RNA, 20 nt, Artificial Sequence
  spacer sequence TTCN PAM
cauuuguaaacguccuuccc

SEQ ID NO: 20711 - RNA, 20 nt, Artificial Sequence
  spacer sequence TTCN PAM
ccaccuggccaugcguuuuc

SEQ ID NO: 20712 - RNA, 20 nt, Artificial Sequence
  spacer sequence TTCN PAM
ugugccuggugagcuugcua

SEQ ID NO: 20713 - RNA, 20 nt, Artificial Sequence
  spacer sequence TTCN PAM
cccguguggcuucuccugug

SEQ ID NO: 20714 - RNA, 20 nt, Artificial Sequence
  spacer sequence TTCN PAM
ccuguggacagugagauugc

SEQ ID NO: 20715 - RNA, 20 nt, Artificial Sequence
  spacer sequence TTCN PAM
ugaagacuuucccacaguac

SEQ ID NO: 20716 - RNA, 20 nt, Artificial Sequence
  spacer sequence TTCN PAM
agaacuguagcaaucucacu

SEQ ID NO: 20717 - RNA, 20 nt, Artificial Sequence
  spacer sequence TTCN PAM
cacaguacucacaagugucg

SEQ ID NO: 20718 - RNA, 20 nt, Artificial Sequence
  spacer sequence TTCN PAM
cgugccgcugcgccccgaga

SEQ ID NO: 20719 - RNA, 20 nt, Artificial Sequence
  spacer sequence TTCN PAM
ccacaccgcccggggagcug

SEQ ID NO: 20720 - RNA, 20 nt, Artificial Sequence
  spacer sequence TTCN PAM
ccgaggagugcuccgacgag

SEQ ID NO: 20721 - RNA, 20 nt, Artificial Sequence
  spacer sequence TTCN PAM
gagacuccagacaaucgccu

SEQ ID NO: 20722 - RNA, 20 nt, Artificial Sequence
  spacer sequence TTCN PAM
uuagcuucggagacuccaga

SEQ ID NO: 20723 - RNA, 20 nt, Artificial Sequence
  spacer sequence TTCN PAM
ccguguugggcaucgcggcc

SEQ ID NO: 20724 - RNA, 20 nt, Artificial Sequence
  spacer sequence TTCN PAM
accugcccccggccgcgaug

SEQ ID NO: 20725 - RNA, 20 nt, Artificial Sequence
  spacer sequence TTCN PAM
cgagcuugaugcgcuuagag

SEQ ID NO: 20726 - RNA, 20 nt, Artificial Sequence
  spacer sequence TTCN PAM
cuaagcgcaucaagcucgag

SEQ ID NO: 20727 - RNA, 20 nt, Artificial Sequence
  spacer sequence TTCN PAM
ucgcaagugucccuguggcc

SEQ ID NO: 20728 - RNA, 20 nt, Artificial Sequence
  spacer sequence TTCN PAM
cgcccaggaccugguggaag

SEQ ID NO: 20729 - RNA, 20 nt, Artificial Sequence
  spacer sequence TTCN PAM
accagguccugggcgagaag

SEQ ID NO: 20730 - RNA, 20 nt, Artificial Sequence
  spacer sequence TTCN PAM
gcgaggccuuccaccagguc

SEQ ID NO: 20731 - RNA, 20 nt, Artificial Sequence
  spacer sequence TTCN PAM
cgugguggcgcgccgccucc

SEQ ID NO: 20732 - RNA, 20 nt, Artificial Sequence
  spacer sequence TTCN PAM
ggcugagccuggaggcggcg

SEQ ID NO: 20733 - RNA, 20 nt, Artificial Sequence
  spacer sequence TTCN PAM
uccucuucuuccucuuccuc

SEQ ID NO: 20734 - RNA, 20 nt, Artificial Sequence
  spacer sequence TTCN PAM
uccucuuccucgucguccuc

SEQ ID NO: 20735 - RNA, 20 nt, Artificial Sequence
  spacer sequence TTCN PAM
ucuuccucgucguccuccuc

SEQ ID NO: 20736 - RNA, 20 nt, Artificial Sequence
  spacer sequence TTCN PAM
ucgucguccuccucuuccuc

SEQ ID NO: 20737 - RNA, 20 nt, Artificial Sequence
  spacer sequence TTCN PAM
uccucguccccguucuccgg

SEQ ID NO: 20738 - RNA, 20 nt, Artificial Sequence
  spacer sequence TTCN PAM
ccgggaucagguuggggucg

SEQ ID NO: 20739 - RNA, 20 nt, Artificial Sequence
  spacer sequence TTCN PAM
cgcucuugaacuuggccacc

SEQ ID NO: 20740 - RNA, 20 nt, Artificial Sequence
  spacer sequence TTCN PAM
agagcgagaacgaccccaac

SEQ ID NO: 20741 - RNA, 20 nt, Artificial Sequence
  spacer sequence TTCN PAM
ggggagcuggcgguggagag

SEQ ID NO: 20742 - RNA, 20 nt, Artificial Sequence
  spacer sequence TTCN PAM
uguggcgcuucagcuugcug

SEQ ID NO: 20743 - RNA, 20 nt, Artificial Sequence
  spacer sequence TTCN PAM
gcuugcuggccugggugcac

SEQ ID NO: 20744 - RNA, 20 nt, Artificial Sequence
  spacer sequence TTCN PAM
cgcccguguggcugcgccgg

SEQ ID NO: 20745 - RNA, 20 nt, Artificial Sequence
  spacer sequence TTCN PAM
gagcaaccugguggugcacc

SEQ ID NO: 20746 - RNA, 20 nt, Artificial Sequence
  spacer sequence TTCN PAM
aauuucagagcaaccuggug

SEQ ID NO: 20747 - RNA, 20 nt, Artificial Sequence
  spacer sequence TTCN PAM
gcggcaagacguucaaauuu

SEQ ID NO: 20748 - RNA, 20 nt, Artificial Sequence
  spacer sequence TTCN PAM
uggcgacgcccccccucccu

SEQ ID NO: 20749 - RNA, 20 nt, Artificial Sequence
  spacer sequence TTCN PAM
agccagguagcaagccgccc

SEQ ID NO: 20750 - RNA, 20 nt, Artificial Sequence
  spacer sequence TTCN PAM
cugccagcucucuaagucuc

SEQ ID NO: 20751 - RNA, 20 nt, Artificial Sequence
  spacer sequence TTCN PAM
cuaggagacuuagagagcug

SEQ ID NO: 20752 - RNA, 20 nt, Artificial Sequence
  spacer sequence TTCN PAM
accgcagcacccugucaaag

SEQ ID NO: 20753 - RNA, 20 nt, Artificial Sequence
  spacer sequence TTCN PAM
gcccccaggcgcucuaugcg

SEQ ID NO: 20754 - RNA, 20 nt, Artificial Sequence
  spacer sequence TTCN PAM
acccacucccccccuguuua

SEQ ID NO: 20755 - RNA, 20 nt, Artificial Sequence
  spacer sequence TTCN PAM
gccaggccggaagccucucu

SEQ ID NO: 20756 - RNA, 20 nt, Artificial Sequence
  spacer sequence TTCN PAM
ggccuggcagaagggcgcuu

SEQ ID NO: 20757 - RNA, 20 nt, Artificial Sequence
  spacer sequence TTCN PAM
uagcagguuaaagggguuau

SEQ ID NO: 20758 - RNA, 20 nt, Artificial Sequence
  spacer sequence TTCN PAM
uauugcagacaauaaccccu

SEQ ID NO: 20759 - RNA, 20 nt, Artificial Sequence
  spacer sequence TTCN PAM
cagccaccucuccaugggau

SEQ ID NO: 20760 - RNA, 20 nt, Artificial Sequence
  spacer sequence TTCN PAM
gcaccuaguccugaagggau

SEQ ID NO: 20761 - RNA, 20 nt, Artificial Sequence
  spacer sequence TTCN PAM
ggacuaggugcagaaugucc

SEQ ID NO: 20762 - RNA, 20 nt, Artificial Sequence
  spacer sequence TTCN PAM
guguucgcuuucuaaguaga

SEQ ID NO: 20763 - RNA, 20 nt, Artificial Sequence
  spacer sequence TTCN PAM
cuuucuaaguagauucuuaa

SEQ ID NO: 20764 - RNA, 20 nt, Artificial Sequence
  spacer sequence TTCN PAM
aaguagauucuuaauccaug

SEQ ID NO: 20765 - RNA, 20 nt, Artificial Sequence
  spacer sequence TTCN PAM
uaauccaugaguguucugug

SEQ ID NO: 20766 - RNA, 20 nt, Artificial Sequence
  spacer sequence TTCN PAM
gugcguguugcaagagaaac

SEQ ID NO: 20767 - RNA, 20 nt, Artificial Sequence
  spacer sequence TTCN PAM
cuugcaacacgcacagaaca

SEQ ID NO: 20768 - RNA, 20 nt, Artificial Sequence
  spacer sequence TTCN PAM
ccagugcaugguuucucuug

SEQ ID NO: 20769 - RNA, 20 nt, Artificial Sequence
  spacer sequence TTCN PAM
accuccagccuucccugccc

SEQ ID NO: 20770 - RNA, 20 nt, Artificial Sequence
  spacer sequence TTCN PAM
cugcccccaccccucaaccc

SEQ ID NO: 20771 - RNA, 20 nt, Artificial Sequence
  spacer sequence TTCN PAM
ugccauuaaacucaguucua

SEQ ID NO: 20772 - RNA, 20 nt, Artificial Sequence
  spacer sequence TTCN PAM
agaaauuuuauauccaaucc

SEQ ID NO: 20773 - RNA, 20 nt, Artificial Sequence
  spacer sequence TTCN PAM
agaacugaguuuaauggcag

SEQ ID NO: 20774 - RNA, 20 nt, Artificial Sequence
  spacer sequence TTCN PAM
gcuuuggggauuggauauaa

SEQ ID NO: 20775 - RNA, 20 nt, Artificial Sequence
  spacer sequence TTCN PAM
ggcuugaggaugaagguccc

SEQ ID NO: 20776 - RNA, 20 nt, Artificial Sequence
  spacer sequence TTCN PAM
uccucaagccagaacugguc

SEQ ID NO: 20777 - RNA, 20 nt, Artificial Sequence
  spacer sequence TTCN PAM
aggcaccucaacaaaugucu

SEQ ID NO: 20778 - RNA, 20 nt, Artificial Sequence
  spacer sequence TTCN PAM
aaacuuuccaguuccaucag

SEQ ID NO: 20779 - RNA, 20 nt, Artificial Sequence
  spacer sequence TTCN PAM
aguuccaucagcuguaguuu

SEQ ID NO: 20780 - RNA, 20 nt, Artificial Sequence
  spacer sequence TTCN PAM
aucagcuguaguuuggggca

SEQ ID NO: 20781 - RNA, 20 nt, Artificial Sequence
  spacer sequence TTCN PAM
uccuuguuaagugagaaacu

SEQ ID NO: 20782 - RNA, 20 nt, Artificial Sequence
  spacer sequence TTCN PAM
cacuuaacaaggaggaaaca

SEQ ID NO: 20783 - RNA, 20 nt, Artificial Sequence
  spacer sequence TTCN PAM
uugggucaccuuguccaagu

SEQ ID NO: 20784 - RNA, 20 nt, Artificial Sequence
  spacer sequence TTCN PAM
uaaaucccagcuuucuauuc

SEQ ID NO: 20785 - RNA, 20 nt, Artificial Sequence
  spacer sequence TTCN PAM
auuccccccugggugacagg

SEQ ID NO: 20786 - RNA, 20 nt, Artificial Sequence
  spacer sequence TTCN PAM
ccccugggugacaggugaac

SEQ ID NO: 20787 - RNA, 20 nt, Artificial Sequence
  spacer sequence TTCN PAM
ccugucacccaggggggaau

SEQ ID NO: 20788 - RNA, 20 nt, Artificial Sequence
  spacer sequence TTCN PAM
aaauaggcaaacauuucaua

SEQ ID NO: 20789 - RNA, 20 nt, Artificial Sequence
  spacer sequence TTCN PAM
uagagguaucaaaaaagggg

SEQ ID NO: 20790 - RNA, 20 nt, Artificial Sequence
  spacer sequence TTCN PAM
ccuuuuuugauaccucuaug

SEQ ID NO: 20791 - RNA, 20 nt, Artificial Sequence
  spacer sequence TTCN PAM
uccccuuuuuugauaccucu

SEQ ID NO: 20792 - RNA, 20 nt, Artificial Sequence
  spacer sequence TTCN PAM
auggcccuaaagaugcuuuc

SEQ ID NO: 20793 - RNA, 20 nt, Artificial Sequence
  spacer sequence TTCN PAM
gcauuagccugaaacacacu

SEQ ID NO: 20794 - RNA, 20 nt, Artificial Sequence
  spacer sequence TTCN PAM
ggcuaaugcugaaagcaucu

SEQ ID NO: 20795 - RNA, 20 nt, Artificial Sequence
  spacer sequence TTCN PAM
guggaaaaaagacuagcaac

SEQ ID NO: 20796 - RNA, 20 nt, Artificial Sequence
  spacer sequence TTCN PAM
acggaaguauuuuaugagua

SEQ ID NO: 20797 - RNA, 20 nt, Artificial Sequence
  spacer sequence TTCN PAM
cacaccccagacugugggag

SEQ ID NO: 20798 - RNA, 20 nt, Artificial Sequence
  spacer sequence TTCN PAM
acaacaccccauggggacgu

SEQ ID NO: 20799 - RNA, 20 nt, Artificial Sequence
  spacer sequence TTCN PAM
uugagauaaaaauggacguc

SEQ ID NO: 20800 - RNA, 20 nt, Artificial Sequence
  spacer sequence TTCN PAM
gauuuuuuaaacauucuuug

SEQ ID NO: 20801 - RNA, 20 nt, Artificial Sequence
  spacer sequence TTCN PAM
uucagauuuuuuaaacauuc

SEQ ID NO: 20802 - RNA, 20 nt, Artificial Sequence
  spacer sequence TTCN PAM
uucagauuuaacggauaggc

SEQ ID NO: 20803 - RNA, 20 nt, Artificial Sequence
  spacer sequence TTCN PAM
gauuuaacggauaggcugua

SEQ ID NO: 20804 - RNA, 20 nt, Artificial Sequence
  spacer sequence TTCN PAM
agacuugcauuugucugacc

SEQ ID NO: 20805 - RNA, 20 nt, Artificial Sequence
  spacer sequence TTCN PAM
uuaaacuaggaugcuguguc

SEQ ID NO: 20806 - RNA, 20 nt, Artificial Sequence
  spacer sequence TTCN PAM
cagccugcugccugucaugg

SEQ ID NO: 20807 - RNA, 20 nt, Artificial Sequence
  spacer sequence TTCN PAM
cguuguuagccucucaaaac

SEQ ID NO: 20808 - RNA, 20 nt, Artificial Sequence
  spacer sequence TTCN PAM
caacuggagcugagucccag

SEQ ID NO: 20809 - RNA, 20 nt, Artificial Sequence
  spacer sequence TTCN PAM
uucucaacuggagcugaguc

SEQ ID NO: 20810 - RNA, 20 nt, Artificial Sequence
  spacer sequence TTCN PAM
guuucuuucucaacuggagc

SEQ ID NO: 20811 - RNA, 20 nt, Artificial Sequence
  spacer sequence TTCN PAM
gcuagucaacucuggccagu

SEQ ID NO: 20812 - RNA, 20 nt, Artificial Sequence
  spacer sequence TTCN PAM
cuugcugaaaagaacccaag

SEQ ID NO: 20813 - RNA, 20 nt, Artificial Sequence
  spacer sequence TTCN PAM
gcaagggaaauaaugugacu

SEQ ID NO: 20814 - RNA, 20 nt, Artificial Sequence
  spacer sequence TTCN PAM
uuucagcaagggaaauaaug

SEQ ID NO: 20815 - RNA, 20 nt, Artificial Sequence
  spacer sequence TTCN PAM
uugccaaaguggcauuuacc

SEQ ID NO: 20816 - RNA, 20 nt, Artificial Sequence
  spacer sequence TTCN PAM
caaaauauuucauuugggga

SEQ ID NO: 20817 - RNA, 20 nt, Artificial Sequence
  spacer sequence TTCN PAM
uuuggggagauggcuaaauu

SEQ ID NO: 20818 - RNA, 20 nt, Artificial Sequence
  spacer sequence TTCN PAM
auauauauauauauuuaaug

SEQ ID NO: 20819 - RNA, 20 nt, Artificial Sequence
  spacer sequence TTCN PAM
gcccuuuuuaauguugcagu

SEQ ID NO: 20820 - RNA, 20 nt, Artificial Sequence
  spacer sequence TTCN PAM
cauccucguccuuuggcuac

SEQ ID NO: 20821 - RNA, 20 nt, Artificial Sequence
  spacer sequence TTCN PAM
cagagauucugaaaaaaaaa

SEQ ID NO: 20822 - RNA, 20 nt, Artificial Sequence
  spacer sequence TTCN PAM
gaaaaaaaaagccuuaaaau

SEQ ID NO: 20823 - RNA, 20 nt, Artificial Sequence
  spacer sequence TTCN PAM
gaaucucugggaaguuuugu

SEQ ID NO: 20824 - RNA, 20 nt, Artificial Sequence
  spacer sequence TTCN PAM
caguuauauuuuaaggcuuu

SEQ ID NO: 20825 - RNA, 20 nt, Artificial Sequence
  spacer sequence TTCN PAM
ccuucuuuuaaaagaagggc

SEQ ID NO: 20826 - RNA, 20 nt, Artificial Sequence
  spacer sequence TTCN PAM
uuuaaaagaagggcugcaag

SEQ ID NO: 20827 - RNA, 20 nt, Artificial Sequence
  spacer sequence TTCN PAM
uuuaaaagaaggagaaaagu

SEQ ID NO: 20828 - RNA, 20 nt, Artificial Sequence
  spacer sequence TTCN PAM
uuaaggccacagcuaguauu

SEQ ID NO: 20829 - RNA, 20 nt, Artificial Sequence
  spacer sequence TTCN PAM
aagaaggaaaaaaaaaaaaa

SEQ ID NO: 20830 - RNA, 20 nt, Artificial Sequence
  spacer sequence TTCN PAM
uagaaaguuacugacaaaua

SEQ ID NO: 20831 - RNA, 20 nt, Artificial Sequence
  spacer sequence TTCN PAM
uucuuagaaaguuacugaca

SEQ ID NO: 20832 - RNA, 20 nt, Artificial Sequence
  spacer sequence TTCN PAM
cacucuuaaccucccuggua

SEQ ID NO: 20833 - RNA, 20 nt, Artificial Sequence
  spacer sequence TTCN PAM
ucauucucacucuuaaccuc

SEQ ID NO: 20834 - RNA, 20 nt, Artificial Sequence
  spacer sequence TTCN PAM
gacuugcuaaauggaggcau

SEQ ID NO: 20835 - RNA, 20 nt, Artificial Sequence
  spacer sequence TTCN PAM
uucugacuugcuaaauggag

SEQ ID NO: 20836 - RNA, 20 nt, Artificial Sequence
  spacer sequence TTCN PAM
caggagcccccaaacacugg

SEQ ID NO: 20837 - RNA, 20 nt, Artificial Sequence
  spacer sequence TTCN PAM
aaaauaagccagccucgcuc

SEQ ID NO: 20838 - RNA, 20 nt, Artificial Sequence
  spacer sequence TTCN PAM
aacauuugucuaauguggaa

SEQ ID NO: 20839 - RNA, 20 nt, Artificial Sequence
  spacer sequence TTCN PAM
acauuagacaaauguuugaa

SEQ ID NO: 20840 - RNA, 20 nt, Artificial Sequence
  spacer sequence TTCN PAM
cccuuccacauuagacaaau

SEQ ID NO: 20841 - RNA, 20 nt, Artificial Sequence
  spacer sequence TTCN PAM
gccuuuuuucccccuuccac

SEQ ID NO: 20842 - RNA, 20 nt, Artificial Sequence
  spacer sequence TTCN PAM
aaaucuuucugccuuuuuuc

SEQ ID NO: 20843 - RNA, 20 nt, Artificial Sequence
  spacer sequence TTCN PAM
uucaaaaucuuucugccuuu

SEQ ID NO: 20844 - RNA, 20 nt, Artificial Sequence
  spacer sequence TTCN PAM
aagggaaauaaaaagcuuca

SEQ ID NO: 20845 - RNA, 20 nt, Artificial Sequence
  spacer sequence TTCN PAM
cuuugaagagaggaggcaaa

SEQ ID NO: 20846 - RNA, 20 nt, Artificial Sequence
  spacer sequence TTCN PAM
uugagaacauuuuuauaaau

SEQ ID NO: 20847 - RNA, 20 nt, Artificial Sequence
  spacer sequence TTCN PAM
caaugaagcuuuuuauuucc

SEQ ID NO: 20848 - RNA, 20 nt, Artificial Sequence
  spacer sequence TTCN PAM
acaacaacaaaaaauuuaua

SEQ ID NO: 20849 - RNA, 20 nt, Artificial Sequence
  spacer sequence TTCN PAM
agccuauuugggacccaagu

SEQ ID NO: 20850 - RNA, 20 nt, Artificial Sequence
  spacer sequence TTCN PAM
aacuacaugauccucugugg

SEQ ID NO: 20851 - RNA, 20 nt, Artificial Sequence
  spacer sequence TTCN PAM
uccuuguccucccuagaucu

SEQ ID NO: 20852 - RNA, 20 nt, Artificial Sequence
  spacer sequence TTCN PAM
uauuuagccugacgaucuga

SEQ ID NO: 20853 - RNA, 20 nt, Artificial Sequence
  spacer sequence TTCN PAM
ucacuccaaaugccuuaaaa

SEQ ID NO: 20854 - RNA, 20 nt, Artificial Sequence
  spacer sequence TTCN PAM
aucgauguuuuauaagguaa

SEQ ID NO: 20855 - RNA, 20 nt, Artificial Sequence
  spacer sequence TTCN PAM
caugugccaugaauuguagu

SEQ ID NO: 20856 - RNA, 20 nt, Artificial Sequence
  spacer sequence TTCN PAM
uggcacaugugaaaccagca

SEQ ID NO: 20857 - RNA, 20 nt, Artificial Sequence
  spacer sequence TTCN PAM
aaaaggcuuaaaugagaaaa

SEQ ID NO: 20858 - RNA, 20 nt, Artificial Sequence
  spacer sequence TTCN PAM
cauuuaagccuuuuugaaag

SEQ ID NO: 20859 - RNA, 20 nt, Artificial Sequence
  spacer sequence TTCN PAM
gagccaguuaugugaucaug

SEQ ID NO: 20860 - RNA, 20 nt, Artificial Sequence
  spacer sequence TTCN PAM
cugaccugauguaugagaga

SEQ ID NO: 20861 - RNA, 20 nt, Artificial Sequence
  spacer sequence TTCN PAM
cuaucgcauuuuaguauucc

SEQ ID NO: 20862 - RNA, 20 nt, Artificial Sequence
  spacer sequence TTCN PAM
caucaacuagauauucuaga

SEQ ID NO: 20863 - RNA, 20 nt, Artificial Sequence
  spacer sequence TTCN PAM
agaucaugagggcagcuagu

SEQ ID NO: 20864 - RNA, 20 nt, Artificial Sequence
  spacer sequence TTCN PAM
cauugacauuaugauuacac

SEQ ID NO: 20865 - RNA, 20 nt, Artificial Sequence
  spacer sequence TTCN PAM
aagcagcucucuccauguaa

SEQ ID NO: 20866 - RNA, 20 nt, Artificial Sequence
  spacer sequence TTCN PAM
ccauauaaucuguauuucac

SEQ ID NO: 20867 - RNA, 20 nt, Artificial Sequence
  spacer sequence TTCN PAM
cucagcucaugccgguguac

SEQ ID NO: 20868 - RNA, 20 nt, Artificial Sequence
  spacer sequence TTCN PAM
aaauuccuaaacugcaguca

SEQ ID NO: 20869 - RNA, 20 nt, Artificial Sequence
  spacer sequence TTCN PAM
uaaacugcagucaucaauaa

SEQ ID NO: 20870 - RNA, 20 nt, Artificial Sequence
  spacer sequence TTCN PAM
caaauuauggcaaguaacac

SEQ ID NO: 20871 - RNA, 20 nt, Artificial Sequence
  spacer sequence TTCN PAM
uaacaucuuugaugauuuag

SEQ ID NO: 20872 - RNA, 20 nt, Artificial Sequence
  spacer sequence TTCN PAM
aaaucaucaaagauguuaug

SEQ ID NO: 20873 - RNA, 20 nt, Artificial Sequence
  spacer sequence TTCN PAM
agucuuucuaaaucaucaaa

SEQ ID NO: 20874 - RNA, 20 nt, Artificial Sequence
  spacer sequence TTCN PAM
uguguggcaaaauuagggcu

SEQ ID NO: 20875 - RNA, 20 nt, Artificial Sequence
  spacer sequence TTCN PAM
ucauuuacucugaugaaaau

SEQ ID NO: 20876 - RNA, 20 nt, Artificial Sequence
  spacer sequence TTCN PAM
uuuacucugaugaaaaucaa

SEQ ID NO: 20877 - RNA, 20 nt, Artificial Sequence
  spacer sequence TTCN PAM
ucagaguaaaugaagaauau

SEQ ID NO: 20878 - RNA, 20 nt, Artificial Sequence
  spacer sequence TTCN PAM
caauuugagagccucauugg

SEQ ID NO: 20879 - RNA, 20 nt, Artificial Sequence
  spacer sequence TTCN PAM
uaugcuuaggggccaggugu

SEQ ID NO: 20880 - RNA, 20 nt, Artificial Sequence
  spacer sequence TTCN PAM
uuuuacuuuaugggaaggaa

SEQ ID NO: 20881 - RNA, 20 nt, Artificial Sequence
  spacer sequence TTCN PAM
cauaaaguaaaaugaaauaa

SEQ ID NO: 20882 - RNA, 20 nt, Artificial Sequence
  spacer sequence TTCN PAM
uucccauaaaguaaaaugaa

SEQ ID NO: 20883 - RNA, 20 nt, Artificial Sequence
  spacer sequence TTCN PAM
aguaugucaccaaugugaaa

SEQ ID NO: 20884 - RNA, 20 nt, Artificial Sequence
  spacer sequence TTCN PAM
cauuggugacauacuagaaa

SEQ ID NO: 20885 - RNA, 20 nt, Artificial Sequence
  spacer sequence TTCN PAM
gaagaacaaggaggucugag

SEQ ID NO: 20886 - RNA, 20 nt, Artificial Sequence
  spacer sequence TTCN PAM
gaaucuugaggcuuagauca

SEQ ID NO: 20887 - RNA, 20 nt, Artificial Sequence
  spacer sequence TTCN PAM
ucugaaucuugaggcuuaga

SEQ ID NO: 20888 - RNA, 20 nt, Artificial Sequence
  spacer sequence TTCN PAM
cugagucuuggaauuccuau

SEQ ID NO: 20889 - RNA, 20 nt, Artificial Sequence
  spacer sequence TTCN PAM
aagacucagagaaaucaaau

SEQ ID NO: 20890 - RNA, 20 nt, Artificial Sequence
  spacer sequence TTCN PAM
uaucuguaaaaugagcauaa

SEQ ID NO: 20891 - RNA, 20 nt, Artificial Sequence
  spacer sequence TTCN PAM
uacagguacuguuuuuaugc

SEQ ID NO: 20892 - RNA, 20 nt, Artificial Sequence
  spacer sequence TTCN PAM
caacaauucuuacagguacu

SEQ ID NO: 20893 - RNA, 20 nt, Artificial Sequence
  spacer sequence TTCN PAM
aaugacagaaguauauaaaa

SEQ ID NO: 20894 - RNA, 20 nt, Artificial Sequence
  spacer sequence TTCN PAM
gucauuugaacuucccaaca

SEQ ID NO: 20895 - RNA, 20 nt, Artificial Sequence
  spacer sequence TTCN PAM
accugauaguuuacagaggg

SEQ ID NO: 20896 - RNA, 20 nt, Artificial Sequence
  spacer sequence TTCN PAM
cauucgaccugauaguuuac

SEQ ID NO: 20897 - RNA, 20 nt, Artificial Sequence
  spacer sequence TTCN PAM
uuacuaccaggggugauuaa

SEQ ID NO: 20898 - RNA, 20 nt, Artificial Sequence
  spacer sequence TTCN PAM
ggguguguaaugugguuagu

SEQ ID NO: 20899 - RNA, 20 nt, Artificial Sequence
  spacer sequence TTCN PAM
agaggaaggucccaguccag

SEQ ID NO: 20900 - RNA, 20 nt, Artificial Sequence
  spacer sequence TTCN PAM
ucuggaagccguucggggug

SEQ ID NO: 20901 - RNA, 20 nt, Artificial Sequence
  spacer sequence TTCN PAM
cuguggccacucugcugugu

SEQ ID NO: 20902 - RNA, 20 nt, Artificial Sequence
  spacer sequence TTCN PAM
agagcucauagcacuucccu

SEQ ID NO: 20903 - RNA, 20 nt, Artificial Sequence
  spacer sequence TTCN PAM
acuuggcggcauuaaccugc

SEQ ID NO: 20904 - RNA, 20 nt, Artificial Sequence
  spacer sequence TTCN PAM
agagcuuucuggacccccac

SEQ ID NO: 20905 - RNA, 20 nt, Artificial Sequence
  spacer sequence TTCN PAM
ggacccccacaacccacuuc

SEQ ID NO: 20906 - RNA, 20 nt, Artificial Sequence
  spacer sequence TTCN PAM
acauaccuuguucuggucac

SEQ ID NO: 20907 - RNA, 20 nt, Artificial Sequence
  spacer sequence TTCN PAM
ggucacuccuaaauuggucc

SEQ ID NO: 20908 - RNA, 20 nt, Artificial Sequence
  spacer sequence TTCN PAM
cacaaagggaggguacauag

SEQ ID NO: 20909 - RNA, 20 nt, Artificial Sequence
  spacer sequence TTCN PAM
cuaucaagcucagacuuucc

SEQ ID NO: 20910 - RNA, 20 nt, Artificial Sequence
  spacer sequence TTCN PAM
uaccagucaaaucaaacucc

SEQ ID NO: 20911 - RNA, 20 nt, Artificial Sequence
  spacer sequence TTCN PAM
ugagggcugggaguuugauu

SEQ ID NO: 20912 - RNA, 20 nt, Artificial Sequence
  spacer sequence TTCN PAM
gccuggucuuccugagggcu

SEQ ID NO: 20913 - RNA, 20 nt, Artificial Sequence
  spacer sequence TTCN PAM
cggucuucagccuggucuuc

SEQ ID NO: 20914 - RNA, 20 nt, Artificial Sequence
  spacer sequence TTCN PAM
cuggcaacagcccuuggccu

SEQ ID NO: 20915 - RNA, 20 nt, Artificial Sequence
  spacer sequence TTCN PAM
gaggaggguggaguugagag

SEQ ID NO: 20916 - RNA, 20 nt, Artificial Sequence
  spacer sequence TTCN PAM
aucccuucccuccaaaagug

SEQ ID NO: 20917 - RNA, 20 nt, Artificial Sequence
  spacer sequence TTCN PAM
cuccaaaaguggcuccguuu

SEQ ID NO: 20918 - RNA, 20 nt, Artificial Sequence
  spacer sequence TTCN PAM
acagccccaugcaggcccca

SEQ ID NO: 20919 - RNA, 20 nt, Artificial Sequence
  spacer sequence TTCN PAM
agucccugcaugcuggcugg

SEQ ID NO: 20920 - RNA, 20 nt, Artificial Sequence
  spacer sequence TTCN PAM
gcaaucugugaccuaaccca

SEQ ID NO: 20921 - RNA, 20 nt, Artificial Sequence
  spacer sequence TTCN PAM
cccaagcugggccuaagccu

SEQ ID NO: 20922 - RNA, 20 nt, Artificial Sequence
  spacer sequence TTCN PAM
gggguuaaaagcaccucauc

SEQ ID NO: 20923 - RNA, 20 nt, Artificial Sequence
  spacer sequence TTCN PAM
uaagcccucagguccugagg

SEQ ID NO: 20924 - RNA, 20 nt, Artificial Sequence
  spacer sequence TTCN PAM
cacaauaacucuuuguuacc

SEQ ID NO: 20925 - RNA, 20 nt, Artificial Sequence
  spacer sequence TTCN PAM
aagccaguuguuuauuuuug

SEQ ID NO: 20926 - RNA, 20 nt, Artificial Sequence
  spacer sequence TTCN PAM
gauaccauuuacaagauggg

SEQ ID NO: 20927 - RNA, 20 nt, Artificial Sequence
  spacer sequence TTCN PAM
cucuccaugaccuuuuuccu

SEQ ID NO: 20928 - RNA, 20 nt, Artificial Sequence
  spacer sequence TTCN PAM
uuuucuuuuuuuuucuuucc

SEQ ID NO: 20929 - RNA, 20 nt, Artificial Sequence
  spacer sequence TTCN PAM
uuuuuuuucuuuccacagca

SEQ ID NO: 20930 - RNA, 20 nt, Artificial Sequence
  spacer sequence TTCN PAM
uuccacagcagguuauuuuu

SEQ ID NO: 20931 - RNA, 20 nt, Artificial Sequence
  spacer sequence TTCN PAM
acagcagguuauuuuucauu

SEQ ID NO: 20932 - RNA, 20 nt, Artificial Sequence
  spacer sequence TTCN PAM
uuuacuuucaaauaaaaauu

SEQ ID NO: 20933 - RNA, 20 nt, Artificial Sequence
  spacer sequence TTCN PAM
aauaaaaauuagaugucaca

SEQ ID NO: 20934 - RNA, 20 nt, Artificial Sequence
  spacer sequence TTCN PAM
uuucuucuugaaccugcuuu

SEQ ID NO: 20935 - RNA, 20 nt, Artificial Sequence
  spacer sequence TTCN PAM
ucuugaaccugcuuuuuugu

SEQ ID NO: 20936 - RNA, 20 nt, Artificial Sequence
  spacer sequence TTCN PAM
ugaaccugcuuuuuuguguu

SEQ ID NO: 20937 - RNA, 20 nt, Artificial Sequence
  spacer sequence TTCN PAM
agaagaaaagaagugugaca

SEQ ID NO: 20938 - RNA, 20 nt, Artificial Sequence
  spacer sequence TTCN PAM
acccuaaacacaaaaaagca

SEQ ID NO: 20939 - RNA, 20 nt, Artificial Sequence
  spacer sequence TTCN PAM
uaccauguguuccuacacag

SEQ ID NO: 20940 - RNA, 20 nt, Artificial Sequence
  spacer sequence TTCN PAM
uacacagagaagcaaacugu

SEQ ID NO: 20941 - RNA, 20 nt, Artificial Sequence
  spacer sequence TTCN PAM
cuguguaggaacacauggua

SEQ ID NO: 20942 - RNA, 20 nt, Artificial Sequence
  spacer sequence TTCN PAM
aaaacaguaucuuucagaaa

SEQ ID NO: 20943 - RNA, 20 nt, Artificial Sequence
  spacer sequence TTCN PAM
gaaaacauuuguauaaaugg

SEQ ID NO: 20944 - RNA, 20 nt, Artificial Sequence
  spacer sequence TTCN PAM
gaaagauacuguuuuagaaa

SEQ ID NO: 20945 - RNA, 20 nt, Artificial Sequence
  spacer sequence TTCN PAM
uaaaauggucccuacuauaa

SEQ ID NO: 20946 - RNA, 20 nt, Artificial Sequence
  spacer sequence TTCN PAM
agugagcuuuuauaguaggg

SEQ ID NO: 20947 - RNA, 20 nt, Artificial Sequence
  spacer sequence TTCN PAM
cauuuuaacuacaaugaugu

SEQ ID NO: 20948 - RNA, 20 nt, Artificial Sequence
  spacer sequence TTCN PAM
cuaaaaccaggagaaaaauu

SEQ ID NO: 20949 - RNA, 20 nt, Artificial Sequence
  spacer sequence TTCN PAM
ccugguuuuagagaaaaaug

SEQ ID NO: 20950 - RNA, 20 nt, Artificial Sequence
  spacer sequence TTCN PAM
ugcccacacauaauuuugac

SEQ ID NO: 20951 - RNA, 20 nt, Artificial Sequence
  spacer sequence TTCN PAM
aauacacauguaaauacaua

SEQ ID NO: 20952 - RNA, 20 nt, Artificial Sequence
  spacer sequence TTCN PAM
uuauguauuuacauguguau

SEQ ID NO: 20953 - RNA, 20 nt, Artificial Sequence
  spacer sequence TTCN PAM
aaugcauauuccuuauguau

SEQ ID NO: 20954 - RNA, 20 nt, Artificial Sequence
  spacer sequence TTCN PAM
agaguuauuccaaugcauau

SEQ ID NO: 20955 - RNA, 20 nt, Artificial Sequence
  spacer sequence TTCN PAM
ggccuuggcuaaagaugugu

SEQ ID NO: 20956 - RNA, 20 nt, Artificial Sequence
  spacer sequence TTCN PAM
cuccuguggccucauuuagg

SEQ ID NO: 20957 - RNA, 20 nt, Artificial Sequence
  spacer sequence TTCN PAM
aucacuagccacggagcaag

SEQ ID NO: 20958 - RNA, 20 nt, Artificial Sequence
  spacer sequence TTCN PAM
ccccagggucuugucuugcu

SEQ ID NO: 20959 - RNA, 20 nt, Artificial Sequence
  spacer sequence TTCN PAM
ucacuggaggcugggagcug

SEQ ID NO: 20960 - RNA, 20 nt, Artificial Sequence
  spacer sequence TTCN PAM
uuccucacuggaggcuggga

SEQ ID NO: 20961 - RNA, 20 nt, Artificial Sequence
  spacer sequence TTCN PAM
cuccccuuuuucuuuccuca

SEQ ID NO: 20962 - RNA, 20 nt, Artificial Sequence
  spacer sequence TTCN PAM
ucccuccccuuuuucuuucc

SEQ ID NO: 20963 - RNA, 20 nt, Artificial Sequence
  spacer sequence TTCN PAM
auuacucacuuggcagccgc

SEQ ID NO: 20964 - RNA, 20 nt, Artificial Sequence
  spacer sequence TTCN PAM
aaaauagauugucauaugua

SEQ ID NO: 20965 - RNA, 20 nt, Artificial Sequence
  spacer sequence TTCN PAM
guacuuaaaaaguaagggca

SEQ ID NO: 20966 - RNA, 20 nt, Artificial Sequence
  spacer sequence TTCN PAM
agaaauucucaucucuauac

SEQ ID NO: 20967 - RNA, 20 nt, Artificial Sequence
  spacer sequence TTCN PAM
ggaaauugcccuuacuuuuu

SEQ ID NO: 20968 - RNA, 20 nt, Artificial Sequence
  spacer sequence TTCN PAM
caucucuauacacauggaca

SEQ ID NO: 20969 - RNA, 20 nt, Artificial Sequence
  spacer sequence TTCN PAM
acaaauguccauguguauag

SEQ ID NO: 20970 - RNA, 20 nt, Artificial Sequence
  spacer sequence TTCN PAM
ucuacaaauguccaugugua

SEQ ID NO: 20971 - RNA, 20 nt, Artificial Sequence
  spacer sequence TTCN PAM
gcacucaucccaggcguggg

SEQ ID NO: 20972 - RNA, 20 nt, Artificial Sequence
  spacer sequence TTCN PAM
gcacauggagcucuaauccc

SEQ ID NO: 20973 - RNA, 20 nt, Artificial Sequence
  spacer sequence TTCN PAM
gcacuggaggggccucuccu

SEQ ID NO: 20974 - RNA, 20 nt, Artificial Sequence
  spacer sequence TTCN PAM
cagauaaacuucugcacugg

SEQ ID NO: 20975 - RNA, 20 nt, Artificial Sequence
  spacer sequence TTCN PAM
uucacagauaaacuucugca

SEQ ID NO: 20976 - RNA, 20 nt, Artificial Sequence
  spacer sequence TTCN PAM
auuccauuaaaauagauuac

SEQ ID NO: 20977 - RNA, 20 nt, Artificial Sequence
  spacer sequence TTCN PAM
auuaaaauagauuacaacau

SEQ ID NO: 20978 - RNA, 20 nt, Artificial Sequence
  spacer sequence TTCN PAM
ggccuugggccuguuaacua

SEQ ID NO: 20979 - RNA, 20 nt, Artificial Sequence
  spacer sequence TTCN PAM
uuuguuucaggccuugggcc

SEQ ID NO: 20980 - RNA, 20 nt, Artificial Sequence
  spacer sequence TTCN PAM
cagaguuucuguuuuguuuu

SEQ ID NO: 20981 - RNA, 20 nt, Artificial Sequence
  spacer sequence TTCN PAM
guuuuguuuucaauuucggu

SEQ ID NO: 20982 - RNA, 20 nt, Artificial Sequence
  spacer sequence TTCN PAM
auuucggucuuuuugacaaa

SEQ ID NO: 20983 - RNA, 20 nt, Artificial Sequence
  spacer sequence TTCN PAM
gucuuuuugacaaaagugaa

SEQ ID NO: 20984 - RNA, 20 nt, Artificial Sequence
  spacer sequence TTCN PAM
cuuuugucaaaaagaccgaa

SEQ ID NO: 20985 - RNA, 20 nt, Artificial Sequence
  spacer sequence TTCN PAM
uaaaacaaacccuuucacuu

SEQ ID NO: 20986 - RNA, 20 nt, Artificial Sequence
  spacer sequence TTCN PAM
uuugcuuauuuauuuguugu

SEQ ID NO: 20987 - RNA, 20 nt, Artificial Sequence
  spacer sequence TTCN PAM
acaagacaauaaucaaacaa

SEQ ID NO: 20988 - RNA, 20 nt, Artificial Sequence
  spacer sequence TTCN PAM
uuccacaagacaauaaucaa

SEQ ID NO: 20989 - RNA, 20 nt, Artificial Sequence
  spacer sequence TTCN PAM
ccuugcugcuuacacaucuu

SEQ ID NO: 20990 - RNA, 20 nt, Artificial Sequence
  spacer sequence TTCN PAM
aggcuacccacaauauuacc

SEQ ID NO: 20991 - RNA, 20 nt, Artificial Sequence
  spacer sequence TTCN PAM
uaucagcauuuugcuuuuug

SEQ ID NO: 20992 - RNA, 20 nt, Artificial Sequence
  spacer sequence TTCN PAM
caaaucuacucauuuccuau

SEQ ID NO: 20993 - RNA, 20 nt, Artificial Sequence
  spacer sequence TTCN PAM
cugucccucugccccccucu

SEQ ID NO: 20994 - RNA, 20 nt, Artificial Sequence
  spacer sequence TTCN PAM
caugcuauauuuaugauagc

SEQ ID NO: 20995 - RNA, 20 nt, Artificial Sequence
  spacer sequence TTCN PAM
gugauaggggaaaccugggc

SEQ ID NO: 20996 - RNA, 20 nt, Artificial Sequence
  spacer sequence TTCN PAM
ccuaucacugaaggcgcuau

SEQ ID NO: 20997 - RNA, 20 nt, Artificial Sequence
  spacer sequence TTCN PAM
ggacugagcugggccauacu

SEQ ID NO: 20998 - RNA, 20 nt, Artificial Sequence
  spacer sequence TTCN PAM
agaguauggcccagcucagu

SEQ ID NO: 20999 - RNA, 20 nt, Artificial Sequence
  spacer sequence TTCN PAM
aguugacaggauucuagagu

SEQ ID NO: 21000 - RNA, 20 nt, Artificial Sequence
  spacer sequence TTCN PAM
cacaauacaaagcaauggaa

SEQ ID NO: 21001 - RNA, 20 nt, Artificial Sequence
  spacer sequence TTCN PAM
auugcuuuguauugugagaa

SEQ ID NO: 21002 - RNA, 20 nt, Artificial Sequence
  spacer sequence TTCN PAM
gggguccaaauaacuuugac

SEQ ID NO: 21003 - RNA, 20 nt, Artificial Sequence
  spacer sequence TTCN PAM
uugucauuuaauggucaaag

SEQ ID NO: 21004 - RNA, 20 nt, Artificial Sequence
  spacer sequence TTCN PAM
uuccuugucauuuaaugguc

SEQ ID NO: 21005 - RNA, 20 nt, Artificial Sequence
  spacer sequence TTCN PAM
aauaaugccagcacccagaa

SEQ ID NO: 21006 - RNA, 20 nt, Artificial Sequence
  spacer sequence TTCN PAM
gggugcuggcauuauuggaa

SEQ ID NO: 21007 - RNA, 20 nt, Artificial Sequence
  spacer sequence TTCN PAM
ccauuuuacugcacuuuguu

SEQ ID NO: 21008 - RNA, 20 nt, Artificial Sequence
  spacer sequence TTCN PAM
ccagaguacaacaaagugca

SEQ ID NO: 21009 - RNA, 20 nt, Artificial Sequence
  spacer sequence TTCN PAM
cacacuaauaaaaugaaucu

SEQ ID NO: 21010 - RNA, 20 nt, Artificial Sequence
  spacer sequence TTCN PAM
uuuuauuagugugagaaguc

SEQ ID NO: 21011 - RNA, 20 nt, Artificial Sequence
  spacer sequence TTCN PAM
uugacuauuagauucauuuu

SEQ ID NO: 21012 - RNA, 20 nt, Artificial Sequence
  spacer sequence TTCN PAM
caaaaaaaucucagugcuac

SEQ ID NO: 21013 - RNA, 20 nt, Artificial Sequence
  spacer sequence TTCN PAM
ucuucucaaaaaaaucucag

SEQ ID NO: 21014 - RNA, 20 nt, Artificial Sequence
  spacer sequence TTCN PAM
aaguccuccucuagcuaacu

SEQ ID NO: 21015 - RNA, 20 nt, Artificial Sequence
  spacer sequence TTCN PAM
agagguuuggaguucaugau

SEQ ID NO: 21016 - RNA, 20 nt, Artificial Sequence
  spacer sequence TTCN PAM
ugaugauuggggagggcggg

SEQ ID NO: 21017 - RNA, 20 nt, Artificial Sequence
  spacer sequence TTCN PAM
ugucucccgcccuccccaau

SEQ ID NO: 21018 - RNA, 20 nt, Artificial Sequence
  spacer sequence TTCN PAM
ccaucaaagucuguuuuucu

SEQ ID NO: 21019 - RNA, 20 nt, Artificial Sequence
  spacer sequence TTCN PAM
auuagcuuaauauuaagagc

SEQ ID NO: 21020 - RNA, 20 nt, Artificial Sequence
  spacer sequence TTCN PAM
aagugcucuuaauauuaagc

SEQ ID NO: 21021 - RNA, 20 nt, Artificial Sequence
  spacer sequence TTCN PAM
ccuuauauagagcacacugc

SEQ ID NO: 21022 - RNA, 20 nt, Artificial Sequence
  spacer sequence TTCN PAM
uuucgcaaggagccuggugg

SEQ ID NO: 21023 - RNA, 20 nt, Artificial Sequence
  spacer sequence TTCN PAM
caaggagccugguggguaac

SEQ ID NO: 21024 - RNA, 20 nt, Artificial Sequence
  spacer sequence TTCN PAM
cagcagcacaccaucguuac

SEQ ID NO: 21025 - RNA, 20 nt, Artificial Sequence
  spacer sequence TTCN PAM
cucugcaggccugguaacag

SEQ ID NO: 21026 - RNA, 20 nt, Artificial Sequence
  spacer sequence TTCN PAM
accagggcuucccucugcag

SEQ ID NO: 21027 - RNA, 20 nt, Artificial Sequence
  spacer sequence TTCN PAM
caggcuagguggugcuucca

SEQ ID NO: 21028 - RNA, 20 nt, Artificial Sequence
  spacer sequence TTCN PAM
uccucucugacccaaaacaa

SEQ ID NO: 21029 - RNA, 20 nt, Artificial Sequence
  spacer sequence TTCN PAM
cuuugugguguuuauuuugu

SEQ ID NO: 21030 - RNA, 20 nt, Artificial Sequence
  spacer sequence TTCN PAM
ugcuuguguugguucacuuu

SEQ ID NO: 21031 - RNA, 20 nt, Artificial Sequence
  spacer sequence TTCN PAM
cuugacguaaacagucaaau

SEQ ID NO: 21032 - RNA, 20 nt, Artificial Sequence
  spacer sequence TTCN PAM
augagaaaucugagaaucca

SEQ ID NO: 21033 - RNA, 20 nt, Artificial Sequence
  spacer sequence TTCN PAM
cauugaaaaauaccaugaca

SEQ ID NO: 21034 - RNA, 20 nt, Artificial Sequence
  spacer sequence TTCN PAM
cagauuucucauugaaaaau

SEQ ID NO: 21035 - RNA, 20 nt, Artificial Sequence
  spacer sequence TTCN PAM
cuaaguuugcugccaaaaca

SEQ ID NO: 21036 - RNA, 20 nt, Artificial Sequence
  spacer sequence TTCN PAM
uaggaaacacaggcaaccca

SEQ ID NO: 21037 - RNA, 20 nt, Artificial Sequence
  spacer sequence TTCN PAM
uaagaaaaggaugucuguuu

SEQ ID NO: 21038 - RNA, 20 nt, Artificial Sequence
  spacer sequence TTCN PAM
aauucucugccacuuacucu

SEQ ID NO: 21039 - RNA, 20 nt, Artificial Sequence
  spacer sequence TTCN PAM
cugccacuuacucugggaag

SEQ ID NO: 21040 - RNA, 20 nt, Artificial Sequence
  spacer sequence TTCN PAM
cagaguaaguggcagagaau

SEQ ID NO: 21041 - RNA, 20 nt, Artificial Sequence
  spacer sequence TTCN PAM
gggucucuucccagaguaag

SEQ ID NO: 21042 - RNA, 20 nt, Artificial Sequence
  spacer sequence TTCN PAM
gcaggccuccagcaagaaau

SEQ ID NO: 21043 - RNA, 20 nt, Artificial Sequence
  spacer sequence TTCN PAM
ugcuggaggccugcugaagc

SEQ ID NO: 21044 - RNA, 20 nt, Artificial Sequence
  spacer sequence TTCN PAM
cccauuucuugcuggaggcc

SEQ ID NO: 21045 - RNA, 20 nt, Artificial Sequence
  spacer sequence TTCN PAM
ugcgaggggcuaggcaugga

SEQ ID NO: 21046 - RNA, 20 nt, Artificial Sequence
  spacer sequence TTCN PAM
aaguuguaaaaaacccuagc

SEQ ID NO: 21047 - RNA, 20 nt, Artificial Sequence
  spacer sequence TTCN PAM
uuuuacagauggggaaacug

SEQ ID NO: 21048 - RNA, 20 nt, Artificial Sequence
  spacer sequence TTCN PAM
ccaucuguaaaaugaaggga

SEQ ID NO: 21049 - RNA, 20 nt, Artificial Sequence
  spacer sequence TTCN PAM
cauggccucaguuuccccau

SEQ ID NO: 21050 - RNA, 20 nt, Artificial Sequence
  spacer sequence TTCN PAM
cauugugguuaaucaucagu

SEQ ID NO: 21051 - RNA, 20 nt, Artificial Sequence
  spacer sequence TTCN PAM
aaucuucacauugugguuaa

SEQ ID NO: 21052 - RNA, 20 nt, Artificial Sequence
  spacer sequence TTCN PAM
ugggaauuugucucuucccc

SEQ ID NO: 21053 - RNA, 20 nt, Artificial Sequence
  spacer sequence TTCN PAM
caggaaagaccacuggauca

SEQ ID NO: 21054 - RNA, 20 nt, Artificial Sequence
  spacer sequence TTCN PAM
ccccugcugcuccugccgug

SEQ ID NO: 21055 - RNA, 20 nt, Artificial Sequence
  spacer sequence TTCN PAM
cugcccaacaagaagguccu

SEQ ID NO: 21056 - RNA, 20 nt, Artificial Sequence
  spacer sequence TTCN PAM
uguugggcagugaagaccac

SEQ ID NO: 21057 - RNA, 20 nt, Artificial Sequence
  spacer sequence TTCN PAM
acugauccauuaagcaguac

SEQ ID NO: 21058 - RNA, 20 nt, Artificial Sequence
  spacer sequence TTCN PAM
aaaggugccaaugaacugac

SEQ ID NO: 21059 - RNA, 20 nt, Artificial Sequence
  spacer sequence TTCN PAM
aaagccccauguagcgcugc

SEQ ID NO: 21060 - RNA, 20 nt, Artificial Sequence
  spacer sequence TTCN PAM
uuggcaccuuucgaaagccc

SEQ ID NO: 21061 - RNA, 20 nt, Artificial Sequence
  spacer sequence TTCN PAM
aauugugagaccaagucagu

SEQ ID NO: 21062 - RNA, 20 nt, Artificial Sequence
  spacer sequence TTCN PAM
cccucuaccucugcuucccc

SEQ ID NO: 21063 - RNA, 20 nt, Artificial Sequence
  spacer sequence TTCN PAM
ccugcagaauuagacagcua

SEQ ID NO: 21064 - RNA, 20 nt, Artificial Sequence
  spacer sequence TTCN PAM
gcaggggaagcagagguaga

SEQ ID NO: 21065 - RNA, 20 nt, Artificial Sequence
  spacer sequence TTCN PAM
aucagccuaagaagcuauuu

SEQ ID NO: 21066 - RNA, 20 nt, Artificial Sequence
  spacer sequence TTCN PAM
uaggcugauagaaauguuuu

SEQ ID NO: 21067 - RNA, 20 nt, Artificial Sequence
  spacer sequence TTCN PAM
aaaguaaauagcuucuuagg

SEQ ID NO: 21068 - RNA, 20 nt, Artificial Sequence
  spacer sequence TTCN PAM
uucaggaagagggucaaagc

SEQ ID NO: 21069 - RNA, 20 nt, Artificial Sequence
  spacer sequence TTCN PAM
ggaagagggucaaagcaaag

SEQ ID NO: 21070 - RNA, 20 nt, Artificial Sequence
  spacer sequence TTCN PAM
ugaaggaagauaaaugcaag

SEQ ID NO: 21071 - RNA, 20 nt, Artificial Sequence
  spacer sequence TTCN PAM
gcugcuucuuccacuaaaca

SEQ ID NO: 21072 - RNA, 20 nt, Artificial Sequence
  spacer sequence TTCN PAM
uccacuaaacacauccauaa

SEQ ID NO: 21073 - RNA, 20 nt, Artificial Sequence
  spacer sequence TTCN PAM
acuaaacacauccauaauau

SEQ ID NO: 21074 - RNA, 20 nt, Artificial Sequence
  spacer sequence TTCN PAM
cuuugguaaguaaaaucgac

SEQ ID NO: 21075 - RNA, 20 nt, Artificial Sequence
  spacer sequence TTCN PAM
cacaugaacuggaaaugcua

SEQ ID NO: 21076 - RNA, 20 nt, Artificial Sequence
  spacer sequence TTCN PAM
ugugggaaugucgauuuuac

SEQ ID NO: 21077 - RNA, 20 nt, Artificial Sequence
  spacer sequence TTCN PAM
aguucaugugggaaugucga

SEQ ID NO: 21078 - RNA, 20 nt, Artificial Sequence
  spacer sequence TTCN PAM
ugcuaugaugccuucaauua

SEQ ID NO: 21079 - RNA, 20 nt, Artificial Sequence
  spacer sequence TTCN PAM
auuauuucaucacggcuuag

SEQ ID NO: 21080 - RNA, 20 nt, Artificial Sequence
  spacer sequence TTCN PAM
ucacggcuuaggcaaaguaa

SEQ ID NO: 21081 - RNA, 20 nt, Artificial Sequence
  spacer sequence TTCN PAM
gagcgucaaacucgaggagc

SEQ ID NO: 21082 - RNA, 20 nt, Artificial Sequence
  spacer sequence TTCN PAM
caggccaagguggggaaaag

SEQ ID NO: 21083 - RNA, 20 nt, Artificial Sequence
  spacer sequence TTCN PAM
ccaccuuggccugggaaggc

SEQ ID NO: 21084 - RNA, 20 nt, Artificial Sequence
  spacer sequence TTCN PAM
uuucccaccuucgcuuucau

SEQ ID NO: 21085 - RNA, 20 nt, Artificial Sequence
  spacer sequence TTCN PAM
caccuucgcuuucauucucc

SEQ ID NO: 21086 - RNA, 20 nt, Artificial Sequence
  spacer sequence TTCN PAM
cuuucauucuccccagccag

SEQ ID NO: 21087 - RNA, 20 nt, Artificial Sequence
  spacer sequence TTCN PAM
uucuccccagccagagaugg

SEQ ID NO: 21088 - RNA, 20 nt, Artificial Sequence
  spacer sequence TTCN PAM
ccccagccagagaugggcuc

SEQ ID NO: 21089 - RNA, 20 nt, Artificial Sequence
  spacer sequence TTCN PAM
uagccagcaaccagagccca

SEQ ID NO: 21090 - RNA, 20 nt, Artificial Sequence
  spacer sequence TTCN PAM
uuguuagugcucuuaggcaa

SEQ ID NO: 21091 - RNA, 20 nt, Artificial Sequence
  spacer sequence TTCN PAM
cacagcgcagacccaggccc

SEQ ID NO: 21092 - RNA, 20 nt, Artificial Sequence
  spacer sequence TTCN PAM
aaaugcaaauucuugggcac

SEQ ID NO: 21093 - RNA, 20 nt, Artificial Sequence
  spacer sequence TTCN PAM
ugggcaccaccucagacuua

SEQ ID NO: 21094 - RNA, 20 nt, Artificial Sequence
  spacer sequence TTCN PAM
guaagucugagguggugccc

SEQ ID NO: 21095 - RNA, 20 nt, Artificial Sequence
  spacer sequence TTCN PAM
gauucaguaagucugaggug

SEQ ID NO: 21096 - RNA, 20 nt, Artificial Sequence
  spacer sequence TTCN PAM
ccacccucaauuucugauuc

SEQ ID NO: 21097 - RNA, 20 nt, Artificial Sequence
  spacer sequence TTCN PAM
auguugaauaaauucuccag

SEQ ID NO: 21098 - RNA, 20 nt, Artificial Sequence
  spacer sequence TTCN PAM
acauagaaggcugcuucccc

SEQ ID NO: 21099 - RNA, 20 nt, Artificial Sequence
  spacer sequence TTCN PAM
ccaggugauucucaugcaca

SEQ ID NO: 21100 - RNA, 20 nt, Artificial Sequence
  spacer sequence TTCN PAM
caugcacacucaagcugaau

SEQ ID NO: 21101 - RNA, 20 nt, Artificial Sequence
  spacer sequence TTCN PAM
gcuugagugugcaugagaau

SEQ ID NO: 21102 - RNA, 20 nt, Artificial Sequence
  spacer sequence TTCN PAM
cuuacccuaagacagcagug

SEQ ID NO: 21103 - RNA, 20 nt, Artificial Sequence
  spacer sequence TTCN PAM
uacuucccuuacccuaagac

SEQ ID NO: 21104 - RNA, 20 nt, Artificial Sequence
  spacer sequence TTCN PAM
agcguucauacuucccuuac

SEQ ID NO: 21105 - RNA, 20 nt, Artificial Sequence
  spacer sequence TTCN PAM
aagcuuccagcguucauacu

SEQ ID NO: 21106 - RNA, 20 nt, Artificial Sequence
  spacer sequence TTCN PAM
cugggcagagacccaugggc

SEQ ID NO: 21107 - RNA, 20 nt, Artificial Sequence
  spacer sequence TTCN PAM
cuccuguccaggacccaccu

SEQ ID NO: 21108 - RNA, 20 nt, Artificial Sequence
  spacer sequence TTCN PAM
aguccuaaaggagguggguc

SEQ ID NO: 21109 - RNA, 20 nt, Artificial Sequence
  spacer sequence TTCN PAM
cuaagcuuaauuuguuuuug

SEQ ID NO: 21110 - RNA, 20 nt, Artificial Sequence
  spacer sequence TTCN PAM
uaauggagggauccuuaggg

SEQ ID NO: 21111 - RNA, 20 nt, Artificial Sequence
  spacer sequence TTCN PAM
gguuccacccuccgucuguc

SEQ ID NO: 21112 - RNA, 20 nt, Artificial Sequence
  spacer sequence TTCN PAM
acccuccgucugucauugau

SEQ ID NO: 21113 - RNA, 20 nt, Artificial Sequence
  spacer sequence TTCN PAM
cuguccuuaucaaugacaga

SEQ ID NO: 21114 - RNA, 20 nt, Artificial Sequence
  spacer sequence TTCN PAM
uagcaugagacaacacccaa

SEQ ID NO: 21115 - RNA, 20 nt, Artificial Sequence
  spacer sequence TTCN PAM
auuaaagccgacaugucagc

SEQ ID NO: 21116 - RNA, 20 nt, Artificial Sequence
  spacer sequence TTCN PAM
cugacaugucggcuuuaaug

SEQ ID NO: 21117 - RNA, 20 nt, Artificial Sequence
  spacer sequence TTCN PAM
ugcuguguccgugcaguugc

SEQ ID NO: 21118 - RNA, 20 nt, Artificial Sequence
  spacer sequence TTCN PAM
cuuucuggucucucaaaugg

SEQ ID NO: 21119 - RNA, 20 nt, Artificial Sequence
  spacer sequence TTCN PAM
ggucucucaaaugggacaca

SEQ ID NO: 21120 - RNA, 20 nt, Artificial Sequence
  spacer sequence TTCN PAM
cuuuucugacucaaucuuuu

SEQ ID NO: 21121 - RNA, 20 nt, Artificial Sequence
  spacer sequence TTCN PAM
gacucaaucuuuuuucaaau

SEQ ID NO: 21122 - RNA, 20 nt, Artificial Sequence
  spacer sequence TTCN PAM
aaugucuuacacuuuucugg

SEQ ID NO: 21123 - RNA, 20 nt, Artificial Sequence
  spacer sequence TTCN PAM
gguggaagguguuucaaccu

SEQ ID NO: 21124 - RNA, 20 nt, Artificial Sequence
  spacer sequence TTCN PAM
accagaaaaguguaagacau

SEQ ID NO: 21125 - RNA, 20 nt, Artificial Sequence
  spacer sequence TTCN PAM
accuguucuauuucauaaag

SEQ ID NO: 21126 - RNA, 20 nt, Artificial Sequence
  spacer sequence TTCN PAM
auuucauaaaggucucucua

SEQ ID NO: 21127 - RNA, 20 nt, Artificial Sequence
  spacer sequence TTCN PAM
uaaaggucucucuagaccca

SEQ ID NO: 21128 - RNA, 20 nt, Artificial Sequence
  spacer sequence TTCN PAM
acuuggggccucagaaaugc

SEQ ID NO: 21129 - RNA, 20 nt, Artificial Sequence
  spacer sequence TTCN PAM
gaggccccaaguggaaauac

SEQ ID NO: 21130 - RNA, 20 nt, Artificial Sequence
  spacer sequence TTCN PAM
uuauggcugaauuuaaaaau

SEQ ID NO: 21131 - RNA, 20 nt, Artificial Sequence
  spacer sequence TTCN PAM
gccauaaggaaacuuugcaa

SEQ ID NO: 21132 - RNA, 20 nt, Artificial Sequence
  spacer sequence TTCN PAM
gguuucauuaaaaaauaugc

SEQ ID NO: 21133 - RNA, 20 nt, Artificial Sequence
  spacer sequence TTCN PAM
uuaaaaaauaugcagcaaac

SEQ ID NO: 21134 - RNA, 20 nt, Artificial Sequence
  spacer sequence TTCN PAM
caguuugcugcauauuuuuu

SEQ ID NO: 21135 - RNA, 20 nt, Artificial Sequence
  spacer sequence TTCN PAM
acauauauuggguaccaacu

SEQ ID NO: 21136 - RNA, 20 nt, Artificial Sequence
  spacer sequence TTCN PAM
uggaauuuaagucauuaaau

SEQ ID NO: 21137 - RNA, 20 nt, Artificial Sequence
  spacer sequence TTCN PAM
aggaacaucccacugggcuu

SEQ ID NO: 21138 - RNA, 20 nt, Artificial Sequence
  spacer sequence TTCN PAM
ucaagaacaucucaaagauu

SEQ ID NO: 21139 - RNA, 20 nt, Artificial Sequence
  spacer sequence TTCN PAM
ugaggaaaccaaaaaacuug

SEQ ID NO: 21140 - RNA, 20 nt, Artificial Sequence
  spacer sequence TTCN PAM
uugacuauuaacaugcuauu

SEQ ID NO: 21141 - RNA, 20 nt, Artificial Sequence
  spacer sequence TTCN PAM
gaaacuaaucacugggugug

SEQ ID NO: 21142 - RNA, 20 nt, Artificial Sequence
  spacer sequence TTCN PAM
gaaacaaauagcauguuaau

SEQ ID NO: 21143 - RNA, 20 nt, Artificial Sequence
  spacer sequence TTCN PAM
aaaugugccaaaacagcuaa

SEQ ID NO: 21144 - RNA, 20 nt, Artificial Sequence
  spacer sequence TTCN PAM
aacacguuuaaugacugcuu

SEQ ID NO: 21145 - RNA, 20 nt, Artificial Sequence
  spacer sequence TTCN PAM
cuaaaauguacgugugugug

SEQ ID NO: 21146 - RNA, 20 nt, Artificial Sequence
  spacer sequence TTCN PAM
uguguguguauaugugagug

SEQ ID NO: 21147 - RNA, 20 nt, Artificial Sequence
  spacer sequence TTCN PAM
cacacguacacagacacaua

SEQ ID NO: 21148 - RNA, 20 nt, Artificial Sequence
  spacer sequence TTCN PAM
uaaacauauguuuuuagaua

SEQ ID NO: 21149 - RNA, 20 nt, Artificial Sequence
  spacer sequence TTCN PAM
cuguuuuuuuuuuuuuuuca

SEQ ID NO: 21150 - RNA, 20 nt, Artificial Sequence
  spacer sequence TTCN PAM
gugagacaggcacaaaagca

SEQ ID NO: 21151 - RNA, 20 nt, Artificial Sequence
  spacer sequence TTCN PAM
acgugggacagcucuacugc

SEQ ID NO: 21152 - RNA, 20 nt, Artificial Sequence
  spacer sequence TTCN PAM
uucacccugggucuucaaaa

SEQ ID NO: 21153 - RNA, 20 nt, Artificial Sequence
  spacer sequence TTCN PAM
cccugggucuucaaaaagag

SEQ ID NO: 21154 - RNA, 20 nt, Artificial Sequence
  spacer sequence TTCN PAM
aaaagagaauggaugacacu

SEQ ID NO: 21155 - RNA, 20 nt, Artificial Sequence
  spacer sequence TTCN PAM
cuuuuugaagacccagggug

SEQ ID NO: 21156 - RNA, 20 nt, Artificial Sequence
  spacer sequence TTCN PAM
caguccauaauccucaaguc

SEQ ID NO: 21157 - RNA, 20 nt, Artificial Sequence
  spacer sequence TTCN PAM
auguaccaccuucuagacua

SEQ ID NO: 21158 - RNA, 20 nt, Artificial Sequence
  spacer sequence TTCN PAM
agacuacacuuaaaaugcau

SEQ ID NO: 21159 - RNA, 20 nt, Artificial Sequence
  spacer sequence TTCN PAM
ggaugcauuuuaaguguagu

SEQ ID NO: 21160 - RNA, 20 nt, Artificial Sequence
  spacer sequence TTCN PAM
ggguacuuuacaaacguuca

SEQ ID NO: 21161 - RNA, 20 nt, Artificial Sequence
  spacer sequence TTCN PAM
uucaggguacuuuacaaacg

SEQ ID NO: 21162 - RNA, 20 nt, Artificial Sequence
  spacer sequence TTCN PAM
aguucugaauccgauuacua

SEQ ID NO: 21163 - RNA, 20 nt, Artificial Sequence
  spacer sequence TTCN PAM
gaauccgauuacuagguuca

SEQ ID NO: 21164 - RNA, 20 nt, Artificial Sequence
  spacer sequence TTCN PAM
gaacuggaauggguuccuuc

SEQ ID NO: 21165 - RNA, 20 nt, Artificial Sequence
  spacer sequence TTCN PAM
agccacacaaauaacaacag

SEQ ID NO: 21166 - RNA, 20 nt, Artificial Sequence
  spacer sequence TTCN PAM
uuaccuaacugcaaaguaaa

SEQ ID NO: 21167 - RNA, 20 nt, Artificial Sequence
  spacer sequence TTCN PAM
auucagccgcaucuagcucu

SEQ ID NO: 21168 - RNA, 20 nt, Artificial Sequence
  spacer sequence TTCN PAM
gccgcaucuagcucuugacc

SEQ ID NO: 21169 - RNA, 20 nt, Artificial Sequence
  spacer sequence TTCN PAM
ucucacuuagauucucugac

SEQ ID NO: 21170 - RNA, 20 nt, Artificial Sequence
  spacer sequence TTCN PAM
cacuuagauucucugacuua

SEQ ID NO: 21171 - RNA, 20 nt, Artificial Sequence
  spacer sequence TTCN PAM
cugacuuaucagaguauuau

SEQ ID NO: 21172 - RNA, 20 nt, Artificial Sequence
  spacer sequence TTCN PAM
uuacagauugacacaacuca

SEQ ID NO: 21173 - RNA, 20 nt, Artificial Sequence
  spacer sequence TTCN PAM
uaauuaaccuucugauauug

SEQ ID NO: 21174 - RNA, 20 nt, Artificial Sequence
  spacer sequence TTCN PAM
gauauugucaaaaucgcacu

SEQ ID NO: 21175 - RNA, 20 nt, Artificial Sequence
  spacer sequence TTCN PAM
agaaaugagcauuuacaugu

SEQ ID NO: 21176 - RNA, 20 nt, Artificial Sequence
  spacer sequence TTCN PAM
agaacaaaagagagugcgau

SEQ ID NO: 21177 - RNA, 20 nt, Artificial Sequence
  spacer sequence TTCN PAM
uucauugcuuuuuuacuggc

SEQ ID NO: 21178 - RNA, 20 nt, Artificial Sequence
  spacer sequence TTCN PAM
uugcuuuuuuacuggcuguu

SEQ ID NO: 21179 - RNA, 20 nt, Artificial Sequence
  spacer sequence TTCN PAM
uuaaaaaguguauucugcaa

SEQ ID NO: 21180 - RNA, 20 nt, Artificial Sequence
  spacer sequence TTCN PAM
gcaaaaacaaaagaaagcaa

SEQ ID NO: 21181 - RNA, 20 nt, Artificial Sequence
  spacer sequence TTCN PAM
uuuguuuuugcagaauacac

SEQ ID NO: 21182 - RNA, 20 nt, Artificial Sequence
  spacer sequence TTCN PAM
auauuguagugucuauaauu

SEQ ID NO: 21183 - RNA, 20 nt, Artificial Sequence
  spacer sequence TTCN PAM
ucccugaaacucucucaugg

SEQ ID NO: 21184 - RNA, 20 nt, Artificial Sequence
  spacer sequence TTCN PAM
cugaaacucucucauggucc

SEQ ID NO: 21185 - RNA, 20 nt, Artificial Sequence
  spacer sequence TTCN PAM
gggaagaaauucuauauugu

SEQ ID NO: 21186 - RNA, 20 nt, Artificial Sequence
  spacer sequence TTCN PAM
uugauacuucaccagugacu

SEQ ID NO: 21187 - RNA, 20 nt, Artificial Sequence
  spacer sequence TTCN PAM
ccagugacuuuaauaacauc

SEQ ID NO: 21188 - RNA, 20 nt, Artificial Sequence
  spacer sequence TTCN PAM
ccuuuuaagaguucuccucc

SEQ ID NO: 21189 - RNA, 20 nt, Artificial Sequence
  spacer sequence TTCN PAM
ccuccuaggcuuuuucucaa

SEQ ID NO: 21190 - RNA, 20 nt, Artificial Sequence
  spacer sequence TTCN PAM
caauaaagggaggaaguaga

SEQ ID NO: 21191 - RNA, 20 nt, Artificial Sequence
  spacer sequence TTCN PAM
ucccuuuauugagaaaaagc

SEQ ID NO: 21192 - RNA, 20 nt, Artificial Sequence
  spacer sequence TTCN PAM
gcaagcugugucuuuaacau

SEQ ID NO: 21193 - RNA, 20 nt, Artificial Sequence
  spacer sequence TTCN PAM
aaaaaaaaaaaaucuugcuu

SEQ ID NO: 21194 - RNA, 20 nt, Artificial Sequence
  spacer sequence TTCN PAM
gaaaagcaacuaagccaaag

SEQ ID NO: 21195 - RNA, 20 nt, Artificial Sequence
  spacer sequence TTCN PAM
gaaaagcaagauuuuuuuuu

SEQ ID NO: 21196 - RNA, 20 nt, Artificial Sequence
  spacer sequence TTCN PAM
aucuuuguguugaaaugcag

SEQ ID NO: 21197 - RNA, 20 nt, Artificial Sequence
  spacer sequence TTCN PAM
acacaaagauggaacacaau

SEQ ID NO: 21198 - RNA, 20 nt, Artificial Sequence
  spacer sequence TTCN PAM
cacuaaaaggcaaauccuuc

SEQ ID NO: 21199 - RNA, 20 nt, Artificial Sequence
  spacer sequence TTCN PAM
uuucaaaagguugaauagga

SEQ ID NO: 21200 - RNA, 20 nt, Artificial Sequence
  spacer sequence TTCN PAM
aaagguugaauaggauggua

SEQ ID NO: 21201 - RNA, 20 nt, Artificial Sequence
  spacer sequence TTCN PAM
accuuuugaaaugaaggauu

SEQ ID NO: 21202 - RNA, 20 nt, Artificial Sequence
  spacer sequence TTCN PAM
uuuuuuaaguaccauccuau

SEQ ID NO: 21203 - RNA, 20 nt, Artificial Sequence
  spacer sequence TTCN PAM
agcugguuaaauuuagggug

SEQ ID NO: 21204 - RNA, 20 nt, Artificial Sequence
  spacer sequence TTCN PAM
cuccaauaauauucuuuggc

SEQ ID NO: 21205 - RNA, 20 nt, Artificial Sequence
  spacer sequence TTCN PAM
uuggcucugggcccaaagua

SEQ ID NO: 21206 - RNA, 20 nt, Artificial Sequence
  spacer sequence TTCN PAM
cuugaucgugaauuagauaa

SEQ ID NO: 21207 - RNA, 20 nt, Artificial Sequence
  spacer sequence TTCN PAM
cgaucaagugaaaauacuuu

SEQ ID NO: 21208 - RNA, 20 nt, Artificial Sequence
  spacer sequence TTCN PAM
aaggcaaaagcuuaaagugu

SEQ ID NO: 21209 - RNA, 20 nt, Artificial Sequence
  spacer sequence TTCN PAM
gccauucuaaggcaaaagcu

SEQ ID NO: 21210 - RNA, 20 nt, Artificial Sequence
  spacer sequence TTCN PAM
caggauaaauuccauucauu

SEQ ID NO: 21211 - RNA, 20 nt, Artificial Sequence
  spacer sequence TTCN PAM
auucauucauucucucaugc

SEQ ID NO: 21212 - RNA, 20 nt, Artificial Sequence
  spacer sequence TTCN PAM
uucauucucucaugcauuca

SEQ ID NO: 21213 - RNA, 20 nt, Artificial Sequence
  spacer sequence TTCN PAM
uucucucaugcauucauuca

SEQ ID NO: 21214 - RNA, 20 nt, Artificial Sequence
  spacer sequence TTCN PAM
cucaugcauucauucaaccu

SEQ ID NO: 21215 - RNA, 20 nt, Artificial Sequence
  spacer sequence TTCN PAM
uucaaccucucaugcauuca

SEQ ID NO: 21216 - RNA, 20 nt, Artificial Sequence
  spacer sequence TTCN PAM
accucucaugcauucauuca

SEQ ID NO: 21217 - RNA, 20 nt, Artificial Sequence
  spacer sequence TTCN PAM
uucaacaaauauuuaccgag

SEQ ID NO: 21218 - RNA, 20 nt, Artificial Sequence
  spacer sequence TTCN PAM
acaaauauuuaccgagugcc

SEQ ID NO: 21219 - RNA, 20 nt, Artificial Sequence
  spacer sequence TTCN PAM
uuguacugcccacagcggcu

SEQ ID NO: 21220 - RNA, 20 nt, Artificial Sequence
  spacer sequence TTCN PAM
cccacagcaggcuucauuua

SEQ ID NO: 21221 - RNA, 20 nt, Artificial Sequence
  spacer sequence TTCN PAM
uuuaguagaaaagguaaggc

SEQ ID NO: 21222 - RNA, 20 nt, Artificial Sequence
  spacer sequence TTCN PAM
acuaaaugaagccugcugug

SEQ ID NO: 21223 - RNA, 20 nt, Artificial Sequence
  spacer sequence TTCN PAM
gugcaggccuuaccuuuucu

SEQ ID NO: 21224 - RNA, 20 nt, Artificial Sequence
  spacer sequence TTCN PAM
acauggggguagagcaauuu

SEQ ID NO: 21225 - RNA, 20 nt, Artificial Sequence
  spacer sequence TTCN PAM
auagcagcucaucuguaccu

SEQ ID NO: 21226 - RNA, 20 nt, Artificial Sequence
  spacer sequence TTCN PAM
aaggaagagaaauuauuucc

SEQ ID NO: 21227 - RNA, 20 nt, Artificial Sequence
  spacer sequence TTCN PAM
uuugaauuuccauagcagcu

SEQ ID NO: 21228 - RNA, 20 nt, Artificial Sequence
  spacer sequence TTCN PAM
cuuccuuugaauuuccauag

SEQ ID NO: 21229 - RNA, 20 nt, Artificial Sequence
  spacer sequence TTCN PAM
auuuggaagggagggagaga

SEQ ID NO: 21230 - RNA, 20 nt, Artificial Sequence
  spacer sequence TTCN PAM
aaauggaaauaauuucucuu

SEQ ID NO: 21231 - RNA, 20 nt, Artificial Sequence
  spacer sequence TTCN PAM
caaagccucucucccucccu

SEQ ID NO: 21232 - RNA, 20 nt, Artificial Sequence
  spacer sequence TTCN PAM
ucuuucccaaagccucucuc

SEQ ID NO: 21233 - RNA, 20 nt, Artificial Sequence
  spacer sequence TTCN PAM
cuuggcucuccagguuuaac

SEQ ID NO: 21234 - RNA, 20 nt, Artificial Sequence
  spacer sequence TTCN PAM
uuuuaucuaggauauccuuu

SEQ ID NO: 21235 - RNA, 20 nt, Artificial Sequence
  spacer sequence TTCN PAM
cucuaagcaucuuuaccugc

SEQ ID NO: 21236 - RNA, 20 nt, Artificial Sequence
  spacer sequence TTCN PAM
caucaaaauauugcacacug

SEQ ID NO: 21237 - RNA, 20 nt, Artificial Sequence
  spacer sequence TTCN PAM
uccaguugacagcggaggau

SEQ ID NO: 21238 - RNA, 20 nt, Artificial Sequence
  spacer sequence TTCN PAM
gaggauuuauuuagaugguc

SEQ ID NO: 21239 - RNA, 20 nt, Artificial Sequence
  spacer sequence TTCN PAM
gugacaucuucagcuuucac

SEQ ID NO: 21240 - RNA, 20 nt, Artificial Sequence
  spacer sequence TTCN PAM
gcuuucacaagugcguauuu

SEQ ID NO: 21241 - RNA, 20 nt, Artificial Sequence
  spacer sequence TTCN PAM
caagugcguauuuuccaauu

SEQ ID NO: 21242 - RNA, 20 nt, Artificial Sequence
  spacer sequence TTCN PAM
aauuucacauuuucugaaaa

SEQ ID NO: 21243 - RNA, 20 nt, Artificial Sequence
  spacer sequence TTCN PAM
cauuuucugaaaauaaggga

SEQ ID NO: 21244 - RNA, 20 nt, Artificial Sequence
  spacer sequence TTCN PAM
gaaaauaagggacacaacca

SEQ ID NO: 21245 - RNA, 20 nt, Artificial Sequence
  spacer sequence TTCN PAM
gaaaaugugaaauuggaaaa

SEQ ID NO: 21246 - RNA, 20 nt, Artificial Sequence
  spacer sequence TTCN PAM
caagaguccacaugguugug

SEQ ID NO: 21247 - RNA, 20 nt, Artificial Sequence
  spacer sequence TTCN PAM
uggaguuucacaagagucca

SEQ ID NO: 21248 - RNA, 20 nt, Artificial Sequence
  spacer sequence TTCN PAM
ucuguucuguuuucccccca

SEQ ID NO: 21249 - RNA, 20 nt, Artificial Sequence
  spacer sequence TTCN PAM
guuuuccccccaccucaauu

SEQ ID NO: 21250 - RNA, 20 nt, Artificial Sequence
  spacer sequence TTCN PAM
ccccaccucaauuguuucuu

SEQ ID NO: 21251 - RNA, 20 nt, Artificial Sequence
  spacer sequence TTCN PAM
ucccccaaugaaugugggug

SEQ ID NO: 21252 - RNA, 20 nt, Artificial Sequence
  spacer sequence TTCN PAM
cccaaugaauguggguggcc

SEQ ID NO: 21253 - RNA, 20 nt, Artificial Sequence
  spacer sequence TTCN PAM
uugggggaagaaacaauuga

SEQ ID NO: 21254 - RNA, 20 nt, Artificial Sequence
  spacer sequence TTCN PAM
ucugagucagacaaacaagu

SEQ ID NO: 21255 - RNA, 20 nt, Artificial Sequence
  spacer sequence TTCN PAM
uccuugcaauacugccuccc

SEQ ID NO: 21256 - RNA, 20 nt, Artificial Sequence
  spacer sequence TTCN PAM
uugcaauacugccucccugg

SEQ ID NO: 21257 - RNA, 20 nt, Artificial Sequence
  spacer sequence TTCN PAM
gaugucucauugccaguuua

SEQ ID NO: 21258 - RNA, 20 nt, Artificial Sequence
  spacer sequence TTCN PAM
acaaaugacugugcaagaaa

SEQ ID NO: 21259 - RNA, 20 nt, Artificial Sequence
  spacer sequence TTCN PAM
ugcacagucauuuguugaaa

SEQ ID NO: 21260 - RNA, 20 nt, Artificial Sequence
  spacer sequence TTCN PAM
uacacuacuuugucucuuca

SEQ ID NO: 21261 - RNA, 20 nt, Artificial Sequence
  spacer sequence TTCN PAM
aucaucaacuugaccauccc

SEQ ID NO: 21262 - RNA, 20 nt, Artificial Sequence
  spacer sequence TTCN PAM
ccucuuucuucuuuucaaag

SEQ ID NO: 21263 - RNA, 20 nt, Artificial Sequence
  spacer sequence TTCN PAM
ucuuuucaaagccaugggga

SEQ ID NO: 21264 - RNA, 20 nt, Artificial Sequence
  spacer sequence TTCN PAM
uuucaaagccauggggagga

SEQ ID NO: 21265 - RNA, 20 nt, Artificial Sequence
  spacer sequence TTCN PAM
aagccauggggaggauaggg

SEQ ID NO: 21266 - RNA, 20 nt, Artificial Sequence
  spacer sequence TTCN PAM
gagaugcccuugcucuaugu

SEQ ID NO: 21267 - RNA, 20 nt, Artificial Sequence
  spacer sequence TTCN PAM
cacugccaccacuccccgga

SEQ ID NO: 21268 - RNA, 20 nt, Artificial Sequence
  spacer sequence TTCN PAM
uuucuuccuuuaggaagcag

SEQ ID NO: 21269 - RNA, 20 nt, Artificial Sequence
  spacer sequence TTCN PAM
uccuuuaggaagcagggacu

SEQ ID NO: 21270 - RNA, 20 nt, Artificial Sequence
  spacer sequence TTCN PAM
uuuaggaagcagggacuugu

SEQ ID NO: 21271 - RNA, 20 nt, Artificial Sequence
  spacer sequence TTCN PAM
uaaaggaagaaaagaauccg

SEQ ID NO: 21272 - RNA, 20 nt, Artificial Sequence
  spacer sequence TTCN PAM
ucuggagagacugcuagagg

SEQ ID NO: 21273 - RNA, 20 nt, Artificial Sequence
  spacer sequence TTCN PAM
ucuagcagucucuccagagg

SEQ ID NO: 21274 - RNA, 20 nt, Artificial Sequence
  spacer sequence TTCN PAM
ugacuuuccucuagcagucu

SEQ ID NO: 21275 - RNA, 20 nt, Artificial Sequence
  spacer sequence TTCN PAM
gcaaccccaacucugccacu

SEQ ID NO: 21276 - RNA, 20 nt, Artificial Sequence
  spacer sequence TTCN PAM
ugacuuugaauaaauccuuu

SEQ ID NO: 21277 - RNA, 20 nt, Artificial Sequence
  spacer sequence TTCN PAM
aagucacgaaacagcuggug

SEQ ID NO: 21278 - RNA, 20 nt, Artificial Sequence
  spacer sequence TTCN PAM
uucuggcccuaaguguuucc

SEQ ID NO: 21279 - RNA, 20 nt, Artificial Sequence
  spacer sequence TTCN PAM
ggcccuaaguguuuccaucu

SEQ ID NO: 21280 - RNA, 20 nt, Artificial Sequence
  spacer sequence TTCN PAM
aucuuuaaaaggagaagacu

SEQ ID NO: 21281 - RNA, 20 nt, Artificial Sequence
  spacer sequence TTCN PAM
ccuuuuaaagauggaaacac

SEQ ID NO: 21282 - RNA, 20 nt, Artificial Sequence
  spacer sequence TTCN PAM
cucuccugccucccaugcaa

SEQ ID NO: 21283 - RNA, 20 nt, Artificial Sequence
  spacer sequence TTCN PAM
agcacggccuauaguagguc

SEQ ID NO: 21284 - RNA, 20 nt, Artificial Sequence
  spacer sequence TTCN PAM
ccucaugaccuugaccugga

SEQ ID NO: 21285 - RNA, 20 nt, Artificial Sequence
  spacer sequence TTCN PAM
gggcugggcuugguccccag

SEQ ID NO: 21286 - RNA, 20 nt, Artificial Sequence
  spacer sequence TTCN PAM
accuccugggacacagucuu

SEQ ID NO: 21287 - RNA, 20 nt, Artificial Sequence
  spacer sequence TTCN PAM
aggaggaaaccuaggugugu

SEQ ID NO: 21288 - RNA, 20 nt, Artificial Sequence
  spacer sequence TTCN PAM
uccuugaagcucagacaugu

SEQ ID NO: 21289 - RNA, 20 nt, Artificial Sequence
  spacer sequence TTCN PAM
gucucauuggcucaggacac

SEQ ID NO: 21290 - RNA, 20 nt, Artificial Sequence
  spacer sequence TTCN PAM
cugaccuucagucucauugg

SEQ ID NO: 21291 - RNA, 20 nt, Artificial Sequence
  spacer sequence TTCN PAM
ugguucucugaccuucaguc

SEQ ID NO: 21292 - RNA, 20 nt, Artificial Sequence
  spacer sequence TTCN PAM
uccugguucucugaccuuca

SEQ ID NO: 21293 - RNA, 20 nt, Artificial Sequence
  spacer sequence TTCN PAM
ccaaacccaggcuaaauguc

SEQ ID NO: 21294 - RNA, 20 nt, Artificial Sequence
  spacer sequence TTCN PAM
cuugacauuuagccuggguu

SEQ ID NO: 21295 - RNA, 20 nt, Artificial Sequence
  spacer sequence TTCN PAM
ggcaugagccacugagaccu

SEQ ID NO: 21296 - RNA, 20 nt, Artificial Sequence
  spacer sequence TTCN PAM
uagaguccugugugugccuu

SEQ ID NO: 21297 - RNA, 20 nt, Artificial Sequence
  spacer sequence TTCN PAM
uggaaagccauguguaaaau

SEQ ID NO: 21298 - RNA, 20 nt, Artificial Sequence
  spacer sequence TTCN PAM
aagaacccuccaugcugaug

SEQ ID NO: 21299 - RNA, 20 nt, Artificial Sequence
  spacer sequence TTCN PAM
uuuuacacauggcuuuccaa

SEQ ID NO: 21300 - RNA, 20 nt, Artificial Sequence
  spacer sequence TTCN PAM
guaaaauaaaucauauuugc

SEQ ID NO: 21301 - RNA, 20 nt, Artificial Sequence
  spacer sequence TTCN PAM
gagauguuucgucacccuuc

SEQ ID NO: 21302 - RNA, 20 nt, Artificial Sequence
  spacer sequence TTCN PAM
ucacccuuccaggcucauug

SEQ ID NO: 21303 - RNA, 20 nt, Artificial Sequence
  spacer sequence TTCN PAM
aggcucauugaaaauuggca

SEQ ID NO: 21304 - RNA, 20 nt, Artificial Sequence
  spacer sequence TTCN PAM
augagccuggaagggugacg

SEQ ID NO: 21305 - RNA, 20 nt, Artificial Sequence
  spacer sequence TTCN PAM
aacauuuuaccuuuuaagug

SEQ ID NO: 21306 - RNA, 20 nt, Artificial Sequence
  spacer sequence TTCN PAM
uucccccaacccccaauauc

SEQ ID NO: 21307 - RNA, 20 nt, Artificial Sequence
  spacer sequence TTCN PAM
cccaacccccaauauccucu

SEQ ID NO: 21308 - RNA, 20 nt, Artificial Sequence
  spacer sequence TTCN PAM
gugggggagcucacuauuua

SEQ ID NO: 21309 - RNA, 20 nt, Artificial Sequence
  spacer sequence TTCN PAM
uuaaauagugagcuccccca

SEQ ID NO: 21310 - RNA, 20 nt, Artificial Sequence
  spacer sequence TTCN PAM
ccacaggguuucuuuaaaua

SEQ ID NO: 21311 - RNA, 20 nt, Artificial Sequence
  spacer sequence TTCN PAM
aaagguuucaccacaggguu

SEQ ID NO: 21312 - RNA, 20 nt, Artificial Sequence
  spacer sequence TTCN PAM
guaaugugaaaaaucacucu

SEQ ID NO: 21313 - RNA, 20 nt, Artificial Sequence
  spacer sequence TTCN PAM
cauuacagaaagauuguuaa

SEQ ID NO: 21314 - RNA, 20 nt, Artificial Sequence
  spacer sequence TTCN PAM
auuaaugagauuuuugugug

SEQ ID NO: 21315 - RNA, 20 nt, Artificial Sequence
  spacer sequence TTCN PAM
gaaaguggggcucaacugca

SEQ ID NO: 21316 - RNA, 20 nt, Artificial Sequence
  spacer sequence TTCN PAM
gaaggcccaauacacacaaa

SEQ ID NO: 21317 - RNA, 20 nt, Artificial Sequence
  spacer sequence TTCN PAM
aacuacaaaggcauggauug

SEQ ID NO: 21318 - RNA, 20 nt, Artificial Sequence
  spacer sequence TTCN PAM
gggcagugucuuuuaucguc

SEQ ID NO: 21319 - RNA, 20 nt, Artificial Sequence
  spacer sequence TTCN PAM
gucacccgaauuguccagcu

SEQ ID NO: 21320 - RNA, 20 nt, Artificial Sequence
  spacer sequence TTCN PAM
ggugacagaaauauguucag

SEQ ID NO: 21321 - RNA, 20 nt, Artificial Sequence
  spacer sequence TTCN PAM
cacaaacguaucacaaacac

SEQ ID NO: 21322 - RNA, 20 nt, Artificial Sequence
  spacer sequence TTCN PAM
cgaguggggcagggaggcau

SEQ ID NO: 21323 - RNA, 20 nt, Artificial Sequence
  spacer sequence TTCN PAM
uuucucgaguggggcaggga

SEQ ID NO: 21324 - RNA, 20 nt, Artificial Sequence
  spacer sequence TTCN PAM
ucauuucucgaguggggcag

SEQ ID NO: 21325 - RNA, 20 nt, Artificial Sequence
  spacer sequence TTCN PAM
cauccuuuucuucauuucuc

SEQ ID NO: 21326 - RNA, 20 nt, Artificial Sequence
  spacer sequence TTCN PAM
agguguccaaaugaugauuu

SEQ ID NO: 21327 - RNA, 20 nt, Artificial Sequence
  spacer sequence TTCN PAM
cccagguuaaguauuagaua

SEQ ID NO: 21328 - RNA, 20 nt, Artificial Sequence
  spacer sequence TTCN PAM
ucagguaucuaauacuuaac

SEQ ID NO: 21329 - RNA, 20 nt, Artificial Sequence
  spacer sequence TTCN PAM
ccuuccucagguaucuaaua

SEQ ID NO: 21330 - RNA, 20 nt, Artificial Sequence
  spacer sequence TTCN PAM
acugagcauucaggaagagg

SEQ ID NO: 21331 - RNA, 20 nt, Artificial Sequence
  spacer sequence TTCN PAM
ggaagaggcauggggcugug

SEQ ID NO: 21332 - RNA, 20 nt, Artificial Sequence
  spacer sequence TTCN PAM
ugaaugcucaguugaaaaug

SEQ ID NO: 21333 - RNA, 20 nt, Artificial Sequence
  spacer sequence TTCN PAM
cagccccaugccucuuccug

SEQ ID NO: 21334 - RNA, 20 nt, Artificial Sequence
  spacer sequence TTCN PAM
caucgcauccaucuucacag

SEQ ID NO: 21335 - RNA, 20 nt, Artificial Sequence
  spacer sequence TTCN PAM
gauaacaccugccagagcag

SEQ ID NO: 21336 - RNA, 20 nt, Artificial Sequence
  spacer sequence TTCN PAM
cugcucuggcagguguuauc

SEQ ID NO: 21337 - RNA, 20 nt, Artificial Sequence
  spacer sequence TTCN PAM
gcuggcuuugauagacaagc

SEQ ID NO: 21338 - RNA, 20 nt, Artificial Sequence
  spacer sequence TTCN PAM
gaguaauuugggaguugugu

SEQ ID NO: 21339 - RNA, 20 nt, Artificial Sequence
  spacer sequence TTCN PAM
aucggucuugagaaaauacu

SEQ ID NO: 21340 - RNA, 20 nt, Artificial Sequence
  spacer sequence TTCN PAM
caagaccgaucgaaaugaua

SEQ ID NO: 21341 - RNA, 20 nt, Artificial Sequence
  spacer sequence TTCN PAM
aguauuuucucaagaccgau

SEQ ID NO: 21342 - RNA, 20 nt, Artificial Sequence
  spacer sequence TTCN PAM
uuagcuuauucuaguauuuu

SEQ ID NO: 21343 - RNA, 20 nt, Artificial Sequence
  spacer sequence TTCN PAM
ccuaaugcuaucccuccccu

SEQ ID NO: 21344 - RNA, 20 nt, Artificial Sequence
  spacer sequence TTCN PAM
gcacauguaucccagaacuu

SEQ ID NO: 21345 - RNA, 20 nt, Artificial Sequence
  spacer sequence TTCN PAM
gggauacaugugcagaaugu

SEQ ID NO: 21346 - RNA, 20 nt, Artificial Sequence
  spacer sequence TTCN PAM
uuauuuauuuuacucuaagu

SEQ ID NO: 21347 - RNA, 20 nt, Artificial Sequence
  spacer sequence TTCN PAM
uucuuuauuuauuuuacucu

SEQ ID NO: 21348 - RNA, 20 nt, Artificial Sequence
  spacer sequence TTCN PAM
uucuuucuuuauuuauuuua

SEQ ID NO: 21349 - RNA, 20 nt, Artificial Sequence
  spacer sequence TTCN PAM
uucuuucuuucuuuauuuau

SEQ ID NO: 21350 - RNA, 20 nt, Artificial Sequence
  spacer sequence TTCN PAM
uucuuucuuucuuucuuuau

SEQ ID NO: 21351 - RNA, 20 nt, Artificial Sequence
  spacer sequence TTCN PAM
aagagacuccugauguuuug

SEQ ID NO: 21352 - RNA, 20 nt, Artificial Sequence
  spacer sequence TTCN PAM
ugggcacuguggaaacaggg

SEQ ID NO: 21353 - RNA, 20 nt, Artificial Sequence
  spacer sequence TTCN PAM
acagugcccacgaacaaaac

SEQ ID NO: 21354 - RNA, 20 nt, Artificial Sequence
  spacer sequence TTCN PAM
ugacuuaucauccaagacug

SEQ ID NO: 21355 - RNA, 20 nt, Artificial Sequence
  spacer sequence TTCN PAM
ccgugcacagaccagucuug

SEQ ID NO: 21356 - RNA, 20 nt, Artificial Sequence
  spacer sequence TTCN PAM
ggccccuucuccgugcacag

SEQ ID NO: 21357 - RNA, 20 nt, Artificial Sequence
  spacer sequence TTCN PAM
ucuggccccuucuccgugca

SEQ ID NO: 21358 - RNA, 20 nt, Artificial Sequence
  spacer sequence TTCN PAM
uggggcugccuguucuucug

SEQ ID NO: 21359 - RNA, 20 nt, Artificial Sequence
  spacer sequence TTCN PAM
uaaggaagcacaucuguccu

SEQ ID NO: 21360 - RNA, 20 nt, Artificial Sequence
  spacer sequence TTCN PAM
uuaagaagggcuagaguugg

SEQ ID NO: 21361 - RNA, 20 nt, Artificial Sequence
  spacer sequence TTCN PAM
auaaaggccaggacagaugu

SEQ ID NO: 21362 - RNA, 20 nt, Artificial Sequence
  spacer sequence TTCN PAM
agcaguccuccugccucagc

SEQ ID NO: 21363 - RNA, 20 nt, Artificial Sequence
  spacer sequence TTCN PAM
acccagccugggcaacaugg

SEQ ID NO: 21364 - RNA, 20 nt, Artificial Sequence
  spacer sequence TTCN PAM
ucccaaaguacucuccucac

SEQ ID NO: 21365 - RNA, 20 nt, Artificial Sequence
  spacer sequence TTCN PAM
caaaguacucuccucacauc

SEQ ID NO: 21366 - RNA, 20 nt, Artificial Sequence
  spacer sequence TTCN PAM
acagggcgacuguuggggca

SEQ ID NO: 21367 - RNA, 20 nt, Artificial Sequence
  spacer sequence TTCN PAM
cucauuccacagggcgacug

SEQ ID NO: 21368 - RNA, 20 nt, Artificial Sequence
  spacer sequence TTCN PAM
ucacugggaggugaggcuaa

SEQ ID NO: 21369 - RNA, 20 nt, Artificial Sequence
  spacer sequence TTCN PAM
aguuccucacugggagguga

SEQ ID NO: 21370 - RNA, 20 nt, Artificial Sequence
  spacer sequence TTCN PAM
gagaucuucgaguuccucac

SEQ ID NO: 21371 - RNA, 20 nt, Artificial Sequence
  spacer sequence TTCN PAM
ggacccugcccaccuucuga

SEQ ID NO: 21372 - RNA, 20 nt, Artificial Sequence
  spacer sequence TTCN PAM
gacaaaccccucccacugcc

SEQ ID NO: 21373 - RNA, 20 nt, Artificial Sequence
  spacer sequence TTCN PAM
gccgcggcccugagguggca

SEQ ID NO: 21374 - RNA, 20 nt, Artificial Sequence
  spacer sequence TTCN PAM
ggcaaucuccucacuugccu

SEQ ID NO: 21375 - RNA, 20 nt, Artificial Sequence
  spacer sequence TTCN PAM
ggcacuauugagugacuggu

SEQ ID NO: 21376 - RNA, 20 nt, Artificial Sequence
  spacer sequence TTCN PAM
ggggaagcguggaaggcacu

SEQ ID NO: 21377 - RNA, 20 nt, Artificial Sequence
  spacer sequence TTCN PAM
ccugaaguccacacaccagu

SEQ ID NO: 21378 - RNA, 20 nt, Artificial Sequence
  spacer sequence TTCN PAM
acgcuuccccugaaguccac

SEQ ID NO: 21379 - RNA, 20 nt, Artificial Sequence
  spacer sequence TTCN PAM
caggccuaauacucugugac

SEQ ID NO: 21380 - RNA, 20 nt, Artificial Sequence
  spacer sequence TTCN PAM
gagaaccagaacuggccauu

SEQ ID NO: 21381 - RNA, 20 nt, Artificial Sequence
  spacer sequence TTCN PAM
cagaaucucuuggccaagac

SEQ ID NO: 21382 - RNA, 20 nt, Artificial Sequence
  spacer sequence TTCN PAM
gguucucagaaucucuuggc

SEQ ID NO: 21383 - RNA, 20 nt, Artificial Sequence
  spacer sequence TTCN PAM
ccagaauuaaaaccuauuau

SEQ ID NO: 21384 - RNA, 20 nt, Artificial Sequence
  spacer sequence TTCN PAM
ggagaauggccaguucuggu

SEQ ID NO: 21385 - RNA, 20 nt, Artificial Sequence
  spacer sequence TTCN PAM
gagcagcucuguguuaacca

SEQ ID NO: 21386 - RNA, 20 nt, Artificial Sequence
  spacer sequence TTCN PAM
cauaauuucugagcagcucu

SEQ ID NO: 21387 - RNA, 20 nt, Artificial Sequence
  spacer sequence TTCN PAM
aagcucuaccaaaaaaaaug

SEQ ID NO: 21388 - RNA, 20 nt, Artificial Sequence
  spacer sequence TTCN PAM
ucaggaauaaaacuaggcug

SEQ ID NO: 21389 - RNA, 20 nt, Artificial Sequence
  spacer sequence TTCN PAM
ggaauaaaacuaggcugccc

SEQ ID NO: 21390 - RNA, 20 nt, Artificial Sequence
  spacer sequence TTCN PAM
ugaagaaauguuagagccug

SEQ ID NO: 21391 - RNA, 20 nt, Artificial Sequence
  spacer sequence TTCN PAM
gccucaccucaggcgagagg

SEQ ID NO: 21392 - RNA, 20 nt, Artificial Sequence
  spacer sequence TTCN PAM
uucagccucaccucaggcga

SEQ ID NO: 21393 - RNA, 20 nt, Artificial Sequence
  spacer sequence TTCN PAM
uucagaaaacaggccucugc

SEQ ID NO: 21394 - RNA, 20 nt, Artificial Sequence
  spacer sequence TTCN PAM
gaaaacaggccucugcccgg

SEQ ID NO: 21395 - RNA, 20 nt, Artificial Sequence
  spacer sequence TTCN PAM
gaaagaaggacuugccguca

SEQ ID NO: 21396 - RNA, 20 nt, Artificial Sequence
  spacer sequence TTCN PAM
cugcagugccucagcaccuu

SEQ ID NO: 21397 - RNA, 20 nt, Artificial Sequence
  spacer sequence TTCN PAM
cgccucccaggcacacagca

SEQ ID NO: 21398 - RNA, 20 nt, Artificial Sequence
  spacer sequence TTCN PAM
gugggacuuugccagagaga

SEQ ID NO: 21399 - RNA, 20 nt, Artificial Sequence
  spacer sequence TTCN PAM
cuccucccuggcuuuuuacc

SEQ ID NO: 21400 - RNA, 20 nt, Artificial Sequence
  spacer sequence TTCN PAM
uaauccuucauuuauaccac

SEQ ID NO: 21401 - RNA, 20 nt, Artificial Sequence
  spacer sequence TTCN PAM
uuuauaccacugaccaaucu

SEQ ID NO: 21402 - RNA, 20 nt, Artificial Sequence
  spacer sequence TTCN PAM
agauuggucagugguauaaa

SEQ ID NO: 21403 - RNA, 20 nt, Artificial Sequence
  spacer sequence TTCN PAM
cugagcaaauuggagaugcc

SEQ ID NO: 21404 - RNA, 20 nt, Artificial Sequence
  spacer sequence TTCN PAM
uggcucuacuaauucugcug

SEQ ID NO: 21405 - RNA, 20 nt, Artificial Sequence
  spacer sequence TTCN PAM
gcugauuccauaugaguaac

SEQ ID NO: 21406 - RNA, 20 nt, Artificial Sequence
  spacer sequence TTCN PAM
auaugaguaacauccaaugu

SEQ ID NO: 21407 - RNA, 20 nt, Artificial Sequence
  spacer sequence TTCN PAM
cagacaccuccaagcuccuc

SEQ ID NO: 21408 - RNA, 20 nt, Artificial Sequence
  spacer sequence TTCN PAM
acuccuuucuacccaccuag

SEQ ID NO: 21409 - RNA, 20 nt, Artificial Sequence
  spacer sequence TTCN PAM
acccaccuagcagguccacg

SEQ ID NO: 21410 - RNA, 20 nt, Artificial Sequence
  spacer sequence TTCN PAM
caagcagucuuagagagacu

SEQ ID NO: 21411 - RNA, 20 nt, Artificial Sequence
  spacer sequence TTCN PAM
acgcagucccaaccaugagg

SEQ ID NO: 21412 - RNA, 20 nt, Artificial Sequence
  spacer sequence TTCN PAM
uaguagaccugagagagcuu

SEQ ID NO: 21413 - RNA, 20 nt, Artificial Sequence
  spacer sequence TTCN PAM
uguuccuaguagaccugaga

SEQ ID NO: 21414 - RNA, 20 nt, Artificial Sequence
  spacer sequence TTCN PAM
uuccuguuccuaguagaccu

SEQ ID NO: 21415 - RNA, 20 nt, Artificial Sequence
  spacer sequence TTCN PAM
gccugaggggcuuguuaagg

SEQ ID NO: 21416 - RNA, 20 nt, Artificial Sequence
  spacer sequence TTCN PAM
agggccucaaccuucuacug

SEQ ID NO: 21417 - RNA, 20 nt, Artificial Sequence
  spacer sequence TTCN PAM
acugcuggguagaaagcccc

SEQ ID NO: 21418 - RNA, 20 nt, Artificial Sequence
  spacer sequence TTCN PAM
acccagcaguagaagguuga

SEQ ID NO: 21419 - RNA, 20 nt, Artificial Sequence
  spacer sequence TTCN PAM
aagaggccgaccaggcaaga

SEQ ID NO: 21420 - RNA, 20 nt, Artificial Sequence
  spacer sequence TTCN PAM
ugccuggucggccucuuuga

SEQ ID NO: 21421 - RNA, 20 nt, Artificial Sequence
  spacer sequence TTCN PAM
aggcaaagagucaagggucu

SEQ ID NO: 21422 - RNA, 20 nt, Artificial Sequence
  spacer sequence TTCN PAM
uuugauuuuauuuuauuuuc

SEQ ID NO: 21423 - RNA, 20 nt, Artificial Sequence
  spacer sequence TTCN PAM
uacaaaaucugaaaaugaaa

SEQ ID NO: 21424 - RNA, 20 nt, Artificial Sequence
  spacer sequence TTCN PAM
gauuuuguaagaaaauaaaa

SEQ ID NO: 21425 - RNA, 20 nt, Artificial Sequence
  spacer sequence TTCN PAM
uuuucagauuuuguaagaaa

SEQ ID NO: 21426 - RNA, 20 nt, Artificial Sequence
  spacer sequence TTCN PAM
gucccucccuuccaccaacc

SEQ ID NO: 21427 - RNA, 20 nt, Artificial Sequence
  spacer sequence TTCN PAM
accaaccguuuuuugauuua

SEQ ID NO: 21428 - RNA, 20 nt, Artificial Sequence
  spacer sequence TTCN PAM
uccuccccauaaaucaaaaa

SEQ ID NO: 21429 - RNA, 20 nt, Artificial Sequence
  spacer sequence TTCN PAM
uuccuccuccccauaaauca

SEQ ID NO: 21430 - RNA, 20 nt, Artificial Sequence
  spacer sequence TTCN PAM
gauuucuuuccuccucccca

SEQ ID NO: 21431 - RNA, 20 nt, Artificial Sequence
  spacer sequence TTCN PAM
cacucaaaagcugcuuuugu

SEQ ID NO: 21432 - RNA, 20 nt, Artificial Sequence
  spacer sequence TTCN PAM
ccgggaggaggccccacuga

SEQ ID NO: 21433 - RNA, 20 nt, Artificial Sequence
  spacer sequence TTCN PAM
ccccuccucgcuguccuugg

SEQ ID NO: 21434 - RNA, 20 nt, Artificial Sequence
  spacer sequence TTCN PAM
uguccccagcccccuggccu

SEQ ID NO: 21435 - RNA, 20 nt, Artificial Sequence
  spacer sequence TTCN PAM
gaaccuggcucuccacucca

SEQ ID NO: 21436 - RNA, 20 nt, Artificial Sequence
  spacer sequence TTCN PAM
gaagagagacauauccuuua

SEQ ID NO: 21437 - RNA, 20 nt, Artificial Sequence
  spacer sequence TTCN PAM
ccuggauccaagucucccug

SEQ ID NO: 21438 - RNA, 20 nt, Artificial Sequence
  spacer sequence TTCN PAM
ccaacuaaaaguucaaggcu

SEQ ID NO: 21439 - RNA, 20 nt, Artificial Sequence
  spacer sequence TTCN PAM
aggcuucuaagaaccaagac

SEQ ID NO: 21440 - RNA, 20 nt, Artificial Sequence
  spacer sequence TTCN PAM
aagaaccaagacucaguggu

SEQ ID NO: 21441 - RNA, 20 nt, Artificial Sequence
  spacer sequence TTCN PAM
uagaagccuugaacuuuuag

SEQ ID NO: 21442 - RNA, 20 nt, Artificial Sequence
  spacer sequence TTCN PAM
uugcccagcauggugcugga

SEQ ID NO: 21443 - RNA, 20 nt, Artificial Sequence
  spacer sequence TTCN PAM
agcgcugugcagugaacuuu

SEQ ID NO: 21444 - RNA, 20 nt, Artificial Sequence
  spacer sequence TTCN PAM
cugcacagcgcuugaauccu

SEQ ID NO: 21445 - RNA, 20 nt, Artificial Sequence
  spacer sequence TTCN PAM
uccuguuggagagccauucu

SEQ ID NO: 21446 - RNA, 20 nt, Artificial Sequence
  spacer sequence TTCN PAM
uguuggagagccauucuaaa

SEQ ID NO: 21447 - RNA, 20 nt, Artificial Sequence
  spacer sequence TTCN PAM
aaaugaccuggcuggaagga

SEQ ID NO: 21448 - RNA, 20 nt, Artificial Sequence
  spacer sequence TTCN PAM
agccaggucauuuagaaugg

SEQ ID NO: 21449 - RNA, 20 nt, Artificial Sequence
  spacer sequence TTCN PAM
ccuggucacugcuggcucca

SEQ ID NO: 21450 - RNA, 20 nt, Artificial Sequence
  spacer sequence TTCN PAM
cuaguaaaugauucacuaac

SEQ ID NO: 21451 - RNA, 20 nt, Artificial Sequence
  spacer sequence TTCN PAM
cuaaccaaggagccucuggg

SEQ ID NO: 21452 - RNA, 20 nt, Artificial Sequence
  spacer sequence TTCN PAM
aggggcuguaauccucuccu

SEQ ID NO: 21453 - RNA, 20 nt, Artificial Sequence
  spacer sequence TTCN PAM
cuguacuauuuuggcaaucu

SEQ ID NO: 21454 - RNA, 20 nt, Artificial Sequence
  spacer sequence TTCN PAM
cuuuccaaaugcuguguaau

SEQ ID NO: 21455 - RNA, 20 nt, Artificial Sequence
  spacer sequence TTCN PAM
aaaugcuguguaauuacaca

SEQ ID NO: 21456 - RNA, 20 nt, Artificial Sequence
  spacer sequence TTCN PAM
uuaagucuucuggugaauug

SEQ ID NO: 21457 - RNA, 20 nt, Artificial Sequence
  spacer sequence TTCN PAM
ggugaauuggucucaauuac

SEQ ID NO: 21458 - RNA, 20 nt, Artificial Sequence
  spacer sequence TTCN PAM
ccagaagacuuaaggaaauu

SEQ ID NO: 21459 - RNA, 20 nt, Artificial Sequence
  spacer sequence TTCN PAM
uccuuccucucucaauuugu

SEQ ID NO: 21460 - RNA, 20 nt, Artificial Sequence
  spacer sequence TTCN PAM
uuccucucucaauuuguuuu

SEQ ID NO: 21461 - RNA, 20 nt, Artificial Sequence
  spacer sequence TTCN PAM
ucucucaauuuguuuuagca

SEQ ID NO: 21462 - RNA, 20 nt, Artificial Sequence
  spacer sequence TTCN PAM
ucuauucucauccccuaccu

SEQ ID NO: 21463 - RNA, 20 nt, Artificial Sequence
  spacer sequence TTCN PAM
cauccccuaccugcaccccc

SEQ ID NO: 21464 - RNA, 20 nt, Artificial Sequence
  spacer sequence TTCN PAM
cuugggacagagaugggggu

SEQ ID NO: 21465 - RNA, 20 nt, Artificial Sequence
  spacer sequence TTCN PAM
uucucuugggacagagaugg

SEQ ID NO: 21466 - RNA, 20 nt, Artificial Sequence
  spacer sequence TTCN PAM
cacuguucuuucucuuggga

SEQ ID NO: 21467 - RNA, 20 nt, Artificial Sequence
  spacer sequence TTCN PAM
agcggagguacuucacacug

SEQ ID NO: 21468 - RNA, 20 nt, Artificial Sequence
  spacer sequence TTCN PAM
aaaauaggauuauucaagcg

SEQ ID NO: 21469 - RNA, 20 nt, Artificial Sequence
  spacer sequence TTCN PAM
aaauaguuuuugcuccacua

SEQ ID NO: 21470 - RNA, 20 nt, Artificial Sequence
  spacer sequence TTCN PAM
uagccuuauuuuuaagcccu

SEQ ID NO: 21471 - RNA, 20 nt, Artificial Sequence
  spacer sequence TTCN PAM
agccagccuguaaugccccu

SEQ ID NO: 21472 - RNA, 20 nt, Artificial Sequence
  spacer sequence TTCN PAM
cccugcaucugaggcaggga

SEQ ID NO: 21473 - RNA, 20 nt, Artificial Sequence
  spacer sequence TTCN PAM
cugagcugcggccaccacug

SEQ ID NO: 21474 - RNA, 20 nt, Artificial Sequence
  spacer sequence TTCN PAM
ucccugagcugcggccacca

SEQ ID NO: 21475 - RNA, 20 nt, Artificial Sequence
  spacer sequence TTCN PAM
uucuucccugagcugcggcc

SEQ ID NO: 21476 - RNA, 20 nt, Artificial Sequence
  spacer sequence TTCN PAM
cagccccaaaacugggaagg

SEQ ID NO: 21477 - RNA, 20 nt, Artificial Sequence
  spacer sequence TTCN PAM
caguuuuggggcugggaagc

SEQ ID NO: 21478 - RNA, 20 nt, Artificial Sequence
  spacer sequence TTCN PAM
agggcccuucccaguuuugg

SEQ ID NO: 21479 - RNA, 20 nt, Artificial Sequence
  spacer sequence TTCN PAM
caaaccuagccacccaucuc

SEQ ID NO: 21480 - RNA, 20 nt, Artificial Sequence
  spacer sequence TTCN PAM
agcaugucccaagcagagau

SEQ ID NO: 21481 - RNA, 20 nt, Artificial Sequence
  spacer sequence TTCN PAM
ugccuuccagcaugucccaa

SEQ ID NO: 21482 - RNA, 20 nt, Artificial Sequence
  spacer sequence TTCN PAM
cucuucuugccuuccagcau

SEQ ID NO: 21483 - RNA, 20 nt, Artificial Sequence
  spacer sequence TTCN PAM
aggaguuacuuguuucucuc

SEQ ID NO: 21484 - RNA, 20 nt, Artificial Sequence
  spacer sequence TTCN PAM
uuuuuguuuucaaggaguua

SEQ ID NO: 21485 - RNA, 20 nt, Artificial Sequence
  spacer sequence TTCN PAM
uaggaucccugcuucauuuu

SEQ ID NO: 21486 - RNA, 20 nt, Artificial Sequence
  spacer sequence TTCN PAM
gaacccagggccuucucucu

SEQ ID NO: 21487 - RNA, 20 nt, Artificial Sequence
  spacer sequence TTCN PAM
gaauguuuuuacuuuuccua

SEQ ID NO: 21488 - RNA, 20 nt, Artificial Sequence
  spacer sequence TTCN PAM
cucugucucccacgaccuac

SEQ ID NO: 21489 - RNA, 20 nt, Artificial Sequence
  spacer sequence TTCN PAM
caccucugcuuugcggcuuu

SEQ ID NO: 21490 - RNA, 20 nt, Artificial Sequence
  spacer sequence TTCN PAM
agcccugggugacccucuga

SEQ ID NO: 21491 - RNA, 20 nt, Artificial Sequence
  spacer sequence TTCN PAM
ccugccagcuugugggcugg

SEQ ID NO: 21492 - RNA, 20 nt, Artificial Sequence
  spacer sequence TTCN PAM
gcugcaguugcucuuagcca

SEQ ID NO: 21493 - RNA, 20 nt, Artificial Sequence
  spacer sequence TTCN PAM
ucuccauuuccauggcucgu

SEQ ID NO: 21494 - RNA, 20 nt, Artificial Sequence
  spacer sequence TTCN PAM
ccauuuccauggcucgugaa

SEQ ID NO: 21495 - RNA, 20 nt, Artificial Sequence
  spacer sequence TTCN PAM
auggcucgugaauuuuuuug

SEQ ID NO: 21496 - RNA, 20 nt, Artificial Sequence
  spacer sequence TTCN PAM
cgagccauggaaauggagaa

SEQ ID NO: 21497 - RNA, 20 nt, Artificial Sequence
  spacer sequence TTCN PAM
ugacgcuccacccccuacau

SEQ ID NO: 21498 - RNA, 20 nt, Artificial Sequence
  spacer sequence TTCN PAM
uuuccccacaugcuccagca

SEQ ID NO: 21499 - RNA, 20 nt, Artificial Sequence
  spacer sequence TTCN PAM
ccacaugcuccagcacauac

SEQ ID NO: 21500 - RNA, 20 nt, Artificial Sequence
  spacer sequence TTCN PAM
acaagugagauuaauuuucu

SEQ ID NO: 21501 - RNA, 20 nt, Artificial Sequence
  spacer sequence TTCN PAM
aacagaacccuaguacauuc

SEQ ID NO: 21502 - RNA, 20 nt, Artificial Sequence
  spacer sequence TTCN PAM
guuagaaaauuaaucucacu

SEQ ID NO: 21503 - RNA, 20 nt, Artificial Sequence
  spacer sequence TTCN PAM
gugugauggugggagagccu

SEQ ID NO: 21504 - RNA, 20 nt, Artificial Sequence
  spacer sequence TTCN PAM
aggacacugugauggucaaa

SEQ ID NO: 21505 - RNA, 20 nt, Artificial Sequence
  spacer sequence TTCN PAM
cagagagcaugcugagcuca

SEQ ID NO: 21506 - RNA, 20 nt, Artificial Sequence
  spacer sequence TTCN PAM
cuucccagagagcaugcuga

SEQ ID NO: 21507 - RNA, 20 nt, Artificial Sequence
  spacer sequence TTCN PAM
caauucacuucccagagagc

SEQ ID NO: 21508 - RNA, 20 nt, Artificial Sequence
  spacer sequence TTCN PAM
cuuucccaauucacuuccca

SEQ ID NO: 21509 - RNA, 20 nt, Artificial Sequence
  spacer sequence TTCN PAM
ccauucacuuucccaauuca

SEQ ID NO: 21510 - RNA, 20 nt, Artificial Sequence
  spacer sequence TTCN PAM
auggggcugucuguguguug

SEQ ID NO: 21511 - RNA, 20 nt, Artificial Sequence
  spacer sequence TTCN PAM
ccagcucaggaaacccaccu

SEQ ID NO: 21512 - RNA, 20 nt, Artificial Sequence
  spacer sequence TTCN PAM
ugagcuggagaauuuuccau

SEQ ID NO: 21513 - RNA, 20 nt, Artificial Sequence
  spacer sequence TTCN PAM
ccggaaccucuggucuguuc

SEQ ID NO: 21514 - RNA, 20 nt, Artificial Sequence
  spacer sequence TTCN PAM
ggagaaggucucuauaccua

SEQ ID NO: 21515 - RNA, 20 nt, Artificial Sequence
  spacer sequence TTCN PAM
aguccugcugucaaaagaaa

SEQ ID NO: 21516 - RNA, 20 nt, Artificial Sequence
  spacer sequence TTCN PAM
uuugacagcaggacuagaac

SEQ ID NO: 21517 - RNA, 20 nt, Artificial Sequence
  spacer sequence TTCN PAM
caguggagggcuuguuuguc

SEQ ID NO: 21518 - RNA, 20 nt, Artificial Sequence
  spacer sequence TTCN PAM
ucaaggucacuucugacucc

SEQ ID NO: 21519 - RNA, 20 nt, Artificial Sequence
  spacer sequence TTCN PAM
gacucccaggaagagaggca

SEQ ID NO: 21520 - RNA, 20 nt, Artificial Sequence
  spacer sequence TTCN PAM
ugggagucagaagugaccuu

SEQ ID NO: 21521 - RNA, 20 nt, Artificial Sequence
  spacer sequence TTCN PAM
aucuugagaguuuaguuugg

SEQ ID NO: 21522 - RNA, 20 nt, Artificial Sequence
  spacer sequence TTCN PAM
gguugugguuucucuuccuc

SEQ ID NO: 21523 - RNA, 20 nt, Artificial Sequence
  spacer sequence TTCN PAM
cuuccuccauuaaaaaaaaa

SEQ ID NO: 21524 - RNA, 20 nt, Artificial Sequence
  spacer sequence TTCN PAM
uccauuaaaaaaaaaaauug

SEQ ID NO: 21525 - RNA, 20 nt, Artificial Sequence
  spacer sequence TTCN PAM
guuuccuguucacggagcgg

SEQ ID NO: 21526 - RNA, 20 nt, Artificial Sequence
  spacer sequence TTCN PAM
uguucacggagcggacagaa

SEQ ID NO: 21527 - RNA, 20 nt, Artificial Sequence
  spacer sequence TTCN PAM
cggagcggacagaaggaggg

SEQ ID NO: 21528 - RNA, 20 nt, Artificial Sequence
  spacer sequence TTCN PAM
guccgcuccgugaacaggaa

SEQ ID NO: 21529 - RNA, 20 nt, Artificial Sequence
  spacer sequence TTCN PAM
cggcucugcuccauguauca

SEQ ID NO: 21530 - RNA, 20 nt, Artificial Sequence
  spacer sequence TTCN PAM
ggauauucucggcucugcuc

SEQ ID NO: 21531 - RNA, 20 nt, Artificial Sequence
  spacer sequence TTCN PAM
ccaguuccggauauucucgg

SEQ ID NO: 21532 - RNA, 20 nt, Artificial Sequence
  spacer sequence TTCN PAM
cacuuuucuccaguuccgga

SEQ ID NO: 21533 - RNA, 20 nt, Artificial Sequence
  spacer sequence TTCN PAM
uggcuuccaaacaguuguaa

SEQ ID NO: 21534 - RNA, 20 nt, Artificial Sequence
  spacer sequence TTCN PAM
aaacaguuguaauuuccacu

SEQ ID NO: 21535 - RNA, 20 nt, Artificial Sequence
  spacer sequence TTCN PAM
acugccacugcuuaguuccu

SEQ ID NO: 21536 - RNA, 20 nt, Artificial Sequence
  spacer sequence TTCN PAM
ugggcaccaggcauacagag

SEQ ID NO: 21537 - RNA, 20 nt, Artificial Sequence
  spacer sequence TTCN PAM
cacucuguaugccuggugcc

SEQ ID NO: 21538 - RNA, 20 nt, Artificial Sequence
  spacer sequence TTCN PAM
uguggauuuaaaugccaaau

SEQ ID NO: 21539 - RNA, 20 nt, Artificial Sequence
  spacer sequence TTCN PAM
ugcuuccuguggauuuaaau

SEQ ID NO: 21540 - RNA, 20 nt, Artificial Sequence
  spacer sequence TTCN PAM
ucuugcuuccuguggauuua

SEQ ID NO: 21541 - RNA, 20 nt, Artificial Sequence
  spacer sequence TTCN PAM
ucugcaaaucuauaaauaag

SEQ ID NO: 21542 - RNA, 20 nt, Artificial Sequence
  spacer sequence TTCN PAM
cgcguaugugaaggagcaau

SEQ ID NO: 21543 - RNA, 20 nt, Artificial Sequence
  spacer sequence TTCN PAM
cauacgcgagaagugcauuu

SEQ ID NO: 21544 - RNA, 20 nt, Artificial Sequence
  spacer sequence TTCN PAM
auuuucagacuuggaaaguu

SEQ ID NO: 21545 - RNA, 20 nt, Artificial Sequence
  spacer sequence TTCN PAM
gacuuggaaaguucuccaua

SEQ ID NO: 21546 - RNA, 20 nt, Artificial Sequence
  spacer sequence TTCN PAM
aagucugaaaauggaauugc

SEQ ID NO: 21547 - RNA, 20 nt, Artificial Sequence
  spacer sequence TTCN PAM
ccauaauuaaguaucaccca

SEQ ID NO: 21548 - RNA, 20 nt, Artificial Sequence
  spacer sequence TTCN PAM
ggguugggugauacuuaauu

SEQ ID NO: 21549 - RNA, 20 nt, Artificial Sequence
  spacer sequence TTCN PAM
ugaaaacagggcagaagacu

SEQ ID NO: 21550 - RNA, 20 nt, Artificial Sequence
  spacer sequence TTCN PAM
ggaagcugaucuuaaccuug

SEQ ID NO: 21551 - RNA, 20 nt, Artificial Sequence
  spacer sequence TTCN PAM
gcccuguuuucaggaagcug

SEQ ID NO: 21552 - RNA, 20 nt, Artificial Sequence
  spacer sequence TTCN PAM
gugguagcucaaaaauucua

SEQ ID NO: 21553 - RNA, 20 nt, Artificial Sequence
  spacer sequence TTCN PAM
auuuugaaggacagguuagu

SEQ ID NO: 21554 - RNA, 20 nt, Artificial Sequence
  spacer sequence TTCN PAM
aaauagaauuuuugagcuac

SEQ ID NO: 21555 - RNA, 20 nt, Artificial Sequence
  spacer sequence TTCN PAM
guucaugugauuauacagug

SEQ ID NO: 21556 - RNA, 20 nt, Artificial Sequence
  spacer sequence TTCN PAM
ugugauuauacagugccuug

SEQ ID NO: 21557 - RNA, 20 nt, Artificial Sequence
  spacer sequence TTCN PAM
agaauguguaaucaucucuu

SEQ ID NO: 21558 - RNA, 20 nt, Artificial Sequence
  spacer sequence TTCN PAM
agaaagcaaggcacuguaua

SEQ ID NO: 21559 - RNA, 20 nt, Artificial Sequence
  spacer sequence TTCN PAM
gaugacauuuuaaauaucca

SEQ ID NO: 21560 - RNA, 20 nt, Artificial Sequence
  spacer sequence TTCN PAM
agcuugacucugcuaucaau

SEQ ID NO: 21561 - RNA, 20 nt, Artificial Sequence
  spacer sequence TTCN PAM
guggggacucugccaaucaa

SEQ ID NO: 21562 - RNA, 20 nt, Artificial Sequence
  spacer sequence TTCN PAM
uucaaacauuacagaaauga

SEQ ID NO: 21563 - RNA, 20 nt, Artificial Sequence
  spacer sequence TTCN PAM
aacauuacagaaaugaugau

SEQ ID NO: 21564 - RNA, 20 nt, Artificial Sequence
  spacer sequence TTCN PAM
guaauguuugaaagaaagau

SEQ ID NO: 21565 - RNA, 20 nt, Artificial Sequence
  spacer sequence TTCN PAM
ugcagugccuuuaucaguaa

SEQ ID NO: 21566 - RNA, 20 nt, Artificial Sequence
  spacer sequence TTCN PAM
gcccaugauuacuuugcgag

SEQ ID NO: 21567 - RNA, 20 nt, Artificial Sequence
  spacer sequence TTCN PAM
caaacaucucgcaaaguaau

SEQ ID NO: 21568 - RNA, 20 nt, Artificial Sequence
  spacer sequence TTCN PAM
ucucaaacaucucgcaaagu

SEQ ID NO: 21569 - RNA, 20 nt, Artificial Sequence
  spacer sequence TTCN PAM
caugaauaacugcaaggaua

SEQ ID NO: 21570 - RNA, 20 nt, Artificial Sequence
  spacer sequence TTCN PAM
ugggaaauaauauaaaucac

SEQ ID NO: 21571 - RNA, 20 nt, Artificial Sequence
  spacer sequence TTCN PAM
ccuccaacuacccacacuau

SEQ ID NO: 21572 - RNA, 20 nt, Artificial Sequence
  spacer sequence TTCN PAM
cucgccuguguugauucucc

SEQ ID NO: 21573 - RNA, 20 nt, Artificial Sequence
  spacer sequence TTCN PAM
ugaacaaugcuagccaacaa

SEQ ID NO: 21574 - RNA, 20 nt, Artificial Sequence
  spacer sequence TTCN PAM
ggaaguguagcauuaaggag

SEQ ID NO: 21575 - RNA, 20 nt, Artificial Sequence
  spacer sequence TTCN PAM
ccucuaauauauaucccgug

SEQ ID NO: 21576 - RNA, 20 nt, Artificial Sequence
  spacer sequence TTCN PAM
cuaccacgggauauauauua

SEQ ID NO: 21577 - RNA, 20 nt, Artificial Sequence
  spacer sequence TTCN PAM
ccuugucaagaccauuucuc

SEQ ID NO: 21578 - RNA, 20 nt, Artificial Sequence
  spacer sequence TTCN PAM
uggucuuccccuugucaaga

SEQ ID NO: 21579 - RNA, 20 nt, Artificial Sequence
  spacer sequence TTCN PAM
uuuccuggucuuccccuugu

SEQ ID NO: 21580 - RNA, 20 nt, Artificial Sequence
  spacer sequence TTCN PAM
ggccuuugaaaagugguuua

SEQ ID NO: 21581 - RNA, 20 nt, Artificial Sequence
  spacer sequence TTCN PAM
aaggccugaauggagcugau

SEQ ID NO: 21582 - RNA, 20 nt, Artificial Sequence
  spacer sequence TTCN PAM
ccugcccagugcaaagaucc

SEQ ID NO: 21583 - RNA, 20 nt, Artificial Sequence
  spacer sequence TTCN PAM
gaccuuggccagggaucuuu

SEQ ID NO: 21584 - RNA, 20 nt, Artificial Sequence
  spacer sequence TTCN PAM
cuguccaaggcagaacccaa

SEQ ID NO: 21585 - RNA, 20 nt, Artificial Sequence
  spacer sequence TTCN PAM
gccuuggacagagaaacaga

SEQ ID NO: 21586 - RNA, 20 nt, Artificial Sequence
  spacer sequence TTCN PAM
acaacucagacccuguggaa

SEQ ID NO: 21587 - RNA, 20 nt, Artificial Sequence
  spacer sequence TTCN PAM
acagggucugaguuguugaa

SEQ ID NO: 21588 - RNA, 20 nt, Artificial Sequence
  spacer sequence TTCN PAM
gacaacugcagcauuccaca

SEQ ID NO: 21589 - RNA, 20 nt, Artificial Sequence
  spacer sequence TTCN PAM
uggggacgagcauccucucu

SEQ ID NO: 21590 - RNA, 20 nt, Artificial Sequence
  spacer sequence TTCN PAM
uuugauguuuccuggggacg

SEQ ID NO: 21591 - RNA, 20 nt, Artificial Sequence
  spacer sequence TTCN PAM
uuacuguaauccacgucugc

SEQ ID NO: 21592 - RNA, 20 nt, Artificial Sequence
  spacer sequence TTCN PAM
guuuuagauuuuccuuacug

SEQ ID NO: 21593 - RNA, 20 nt, Artificial Sequence
  spacer sequence TTCN PAM
gcagacaacaaaggaagaau

SEQ ID NO: 21594 - RNA, 20 nt, Artificial Sequence
  spacer sequence TTCN PAM
uuuguugucugcugaagcau

SEQ ID NO: 21595 - RNA, 20 nt, Artificial Sequence
  spacer sequence TTCN PAM
uccuuuguugucugcugaag

SEQ ID NO: 21596 - RNA, 20 nt, Artificial Sequence
  spacer sequence TTCN PAM
agugcuuugggcgagugcuu

SEQ ID NO: 21597 - RNA, 20 nt, Artificial Sequence
  spacer sequence TTCN PAM
uuuuauuuuucuuuccuauu

SEQ ID NO: 21598 - RNA, 20 nt, Artificial Sequence
  spacer sequence TTCN PAM
uuccuauuuuuguucuucug

SEQ ID NO: 21599 - RNA, 20 nt, Artificial Sequence
  spacer sequence TTCN PAM
uauuuuuguucuucugguug

SEQ ID NO: 21600 - RNA, 20 nt, Artificial Sequence
  spacer sequence TTCN PAM
ucugguuguucuuucuuucu

SEQ ID NO: 21601 - RNA, 20 nt, Artificial Sequence
  spacer sequence TTCN PAM
gguuguucuuucuuucuucc

SEQ ID NO: 21602 - RNA, 20 nt, Artificial Sequence
  spacer sequence TTCN PAM
uucuuucuuccuuuucuccc

SEQ ID NO: 21603 - RNA, 20 nt, Artificial Sequence
  spacer sequence TTCN PAM
uucuuccuuuucucccuuuu

SEQ ID NO: 21604 - RNA, 20 nt, Artificial Sequence
  spacer sequence TTCN PAM
uccuuuucucccuuuuuuuc

SEQ ID NO: 21605 - RNA, 20 nt, Artificial Sequence
  spacer sequence TTCN PAM
uuuucucccuuuuuuucuuu

SEQ ID NO: 21606 - RNA, 20 nt, Artificial Sequence
  spacer sequence TTCN PAM
cccuuuuuuucuuuccuucu

SEQ ID NO: 21607 - RNA, 20 nt, Artificial Sequence
  spacer sequence TTCN PAM
uuccuucuuuuucuuucuug

SEQ ID NO: 21608 - RNA, 20 nt, Artificial Sequence
  spacer sequence TTCN PAM
uucuuuuucuuucuugguug

SEQ ID NO: 21609 - RNA, 20 nt, Artificial Sequence
  spacer sequence TTCN PAM
uuuucuuucuugguugcuuu

SEQ ID NO: 21610 - RNA, 20 nt, Artificial Sequence
  spacer sequence TTCN PAM
uucuugguugcuuuuuuuuc

SEQ ID NO: 21611 - RNA, 20 nt, Artificial Sequence
  spacer sequence TTCN PAM
ugguugcuuuuuuuuccccc

SEQ ID NO: 21612 - RNA, 20 nt, Artificial Sequence
  spacer sequence TTCN PAM
cccuuugaaacugaaccauu

SEQ ID NO: 21613 - RNA, 20 nt, Artificial Sequence
  spacer sequence TTCN PAM
aagggggaaaaaaaagcaac

SEQ ID NO: 21614 - RNA, 20 nt, Artificial Sequence
  spacer sequence TTCN PAM
guuucaaagggggaaaaaaa

SEQ ID NO: 21615 - RNA, 20 nt, Artificial Sequence
  spacer sequence TTCN PAM
guuaaaaaucagaagcuugu

SEQ ID NO: 21616 - RNA, 20 nt, Artificial Sequence
  spacer sequence TTCN PAM
gauuuuuaacagaagcuaug

SEQ ID NO: 21617 - RNA, 20 nt, Artificial Sequence
  spacer sequence TTCN PAM
acaagaccccucauacgcgg

SEQ ID NO: 21618 - RNA, 20 nt, Artificial Sequence
  spacer sequence TTCN PAM
aauuaacagaggagcucuaa

SEQ ID NO: 21619 - RNA, 20 nt, Artificial Sequence
  spacer sequence TTCN PAM
gcaaaugcaggucacuaucg

SEQ ID NO: 21620 - RNA, 20 nt, Artificial Sequence
  spacer sequence TTCN PAM
ucugugacaguuguuggguu

SEQ ID NO: 21621 - RNA, 20 nt, Artificial Sequence
  spacer sequence TTCN PAM
aggagcuggcaggguugucc

SEQ ID NO: 21622 - RNA, 20 nt, Artificial Sequence
  spacer sequence TTCN PAM
gacacugucagagucuggac

SEQ ID NO: 21623 - RNA, 20 nt, Artificial Sequence
  spacer sequence TTCN PAM
caggaaguuacacgcaaggu

SEQ ID NO: 21624 - RNA, 20 nt, Artificial Sequence
  spacer sequence TTCN PAM
ugugaagcagccguggugac

SEQ ID NO: 21625 - RNA, 20 nt, Artificial Sequence
  spacer sequence TTCN PAM
cuguagcccagaagccugau

SEQ ID NO: 21626 - RNA, 20 nt, Artificial Sequence
  spacer sequence TTCN PAM
gggcuacagggaaacugacu

SEQ ID NO: 21627 - RNA, 20 nt, Artificial Sequence
  spacer sequence TTCN PAM
ucaggcuucugggcuacagg

SEQ ID NO: 21628 - RNA, 20 nt, Artificial Sequence
  spacer sequence TTCN PAM
gcugaaaauagcucgaauuc

SEQ ID NO: 21629 - RNA, 20 nt, Artificial Sequence
  spacer sequence TTCN PAM
gcugaaugugagugcagauu

SEQ ID NO: 21630 - RNA, 20 nt, Artificial Sequence
  spacer sequence TTCN PAM
agcuauuuucagcugaaugu

SEQ ID NO: 21631 - RNA, 20 nt, Artificial Sequence
  spacer sequence TTCN PAM
aacccucucucccccugccu

SEQ ID NO: 21632 - RNA, 20 nt, Artificial Sequence
  spacer sequence TTCN PAM
ccuuuuccuccuuucuacuu

SEQ ID NO: 21633 - RNA, 20 nt, Artificial Sequence
  spacer sequence TTCN PAM
uccuuucuacuuccuugccu

SEQ ID NO: 21634 - RNA, 20 nt, Artificial Sequence
  spacer sequence TTCN PAM
acuuccuugccucucuuucu

SEQ ID NO: 21635 - RNA, 20 nt, Artificial Sequence
  spacer sequence TTCN PAM
uugccucucuuucuccaacc

SEQ ID NO: 21636 - RNA, 20 nt, Artificial Sequence
  spacer sequence TTCN PAM
ccaaccucuguuuccagcau

SEQ ID NO: 21637 - RNA, 20 nt, Artificial Sequence
  spacer sequence TTCN PAM
agcaucuucuuucucaucuu

SEQ ID NO: 21638 - RNA, 20 nt, Artificial Sequence
  spacer sequence TTCN PAM
uucucaucuucucucucuuu

SEQ ID NO: 21639 - RNA, 20 nt, Artificial Sequence
  spacer sequence TTCN PAM
caucuucucucucuuuaguc

SEQ ID NO: 21640 - RNA, 20 nt, Artificial Sequence
  spacer sequence TTCN PAM
cucucuuuaguccucaacaa

SEQ ID NO: 21641 - RNA, 20 nt, Artificial Sequence
  spacer sequence TTCN PAM
ccagaaagggaaguagguuu

SEQ ID NO: 21642 - RNA, 20 nt, Artificial Sequence
  spacer sequence TTCN PAM
ggugaauguggcuguuuuug

SEQ ID NO: 21643 - RNA, 20 nt, Artificial Sequence
  spacer sequence TTCN PAM
cuuucuggugaauguggcug

SEQ ID NO: 21644 - RNA, 20 nt, Artificial Sequence
  spacer sequence TTCN PAM
cugaaacagcagugauugug

SEQ ID NO: 21645 - RNA, 20 nt, Artificial Sequence
  spacer sequence TTCN PAM
gugaaaagcaacccgguuua

SEQ ID NO: 21646 - RNA, 20 nt, Artificial Sequence
  spacer sequence TTCN PAM
acaaucacugcuguuucagu

SEQ ID NO: 21647 - RNA, 20 nt, Artificial Sequence
  spacer sequence TTCN PAM
guuccacaaucacugcuguu

SEQ ID NO: 21648 - RNA, 20 nt, Artificial Sequence
  spacer sequence TTCN PAM
uauuuuuuugcaccggucag

SEQ ID NO: 21649 - RNA, 20 nt, Artificial Sequence
  spacer sequence TTCN PAM
aacauggcucacguguuuuu

SEQ ID NO: 21650 - RNA, 20 nt, Artificial Sequence
  spacer sequence TTCN PAM
uaagagaagggggaauuugg

SEQ ID NO: 21651 - RNA, 20 nt, Artificial Sequence
  spacer sequence TTCN PAM
cuuaagaaaaaacacgugag

SEQ ID NO: 21652 - RNA, 20 nt, Artificial Sequence
  spacer sequence TTCN PAM
cccuucucuuaagaaaaaac

SEQ ID NO: 21653 - RNA, 20 nt, Artificial Sequence
  spacer sequence TTCN PAM
uuuuuugccccccuccaaau

SEQ ID NO: 21654 - RNA, 20 nt, Artificial Sequence
  spacer sequence TTCN PAM
ccuucuuuuuuugccccccu

SEQ ID NO: 21655 - RNA, 20 nt, Artificial Sequence
  spacer sequence TTCN PAM
ucucuuucuccuucuuuuuu

SEQ ID NO: 21656 - RNA, 20 nt, Artificial Sequence
  spacer sequence TTCN PAM
cgagugguuaaccuuuccuc

SEQ ID NO: 21657 - RNA, 20 nt, Artificial Sequence
  spacer sequence TTCN PAM
ugcccuuaucaccauuccag

SEQ ID NO: 21658 - RNA, 20 nt, Artificial Sequence
  spacer sequence TTCN PAM
aguauaaaaccucaaauuau

SEQ ID NO: 21659 - RNA, 20 nt, Artificial Sequence
  spacer sequence TTCN PAM
cauaauuugagguuuuauac

SEQ ID NO: 21660 - RNA, 20 nt, Artificial Sequence
  spacer sequence TTCN PAM
cacuuaggaacaccucauua

SEQ ID NO: 21661 - RNA, 20 nt, Artificial Sequence
  spacer sequence TTCN PAM
uaagugagaauucccauaau

SEQ ID NO: 21662 - RNA, 20 nt, Artificial Sequence
  spacer sequence TTCN PAM
auaaugagguguuccuaagu

SEQ ID NO: 21663 - RNA, 20 nt, Artificial Sequence
  spacer sequence TTCN PAM
cccaucuccccagaccccca

SEQ ID NO: 21664 - RNA, 20 nt, Artificial Sequence
  spacer sequence TTCN PAM
ugaccauguguguaaacuug

SEQ ID NO: 21665 - RNA, 20 nt, Artificial Sequence
  spacer sequence TTCN PAM
agccaaaaagaaauccucug

SEQ ID NO: 21666 - RNA, 20 nt, Artificial Sequence
  spacer sequence TTCN PAM
uuuuggcuugaacuugauaa

SEQ ID NO: 21667 - RNA, 20 nt, Artificial Sequence
  spacer sequence TTCN PAM
uauuuugauuuaaauacugu

SEQ ID NO: 21668 - RNA, 20 nt, Artificial Sequence
  spacer sequence TTCN PAM
aaggcuaugccuugguggug

SEQ ID NO: 21669 - RNA, 20 nt, Artificial Sequence
  spacer sequence TTCN PAM
uccaaggcuaugccuuggug

SEQ ID NO: 21670 - RNA, 20 nt, Artificial Sequence
  spacer sequence TTCN PAM
caaguugaccuuuucaccag

SEQ ID NO: 21671 - RNA, 20 nt, Artificial Sequence
  spacer sequence TTCN PAM
ccaggccagugccuaauuuc

SEQ ID NO: 21672 - RNA, 20 nt, Artificial Sequence
  spacer sequence TTCN PAM
uaaacaggccccuucuuccu

SEQ ID NO: 21673 - RNA, 20 nt, Artificial Sequence
  spacer sequence TTCN PAM
uccuugaagucacugcaaau

SEQ ID NO: 21674 - RNA, 20 nt, Artificial Sequence
  spacer sequence TTCN PAM
uugaagucacugcaaauaaa

SEQ ID NO: 21675 - RNA, 20 nt, Artificial Sequence
  spacer sequence TTCN PAM
aggaagaaggggccuguuua

SEQ ID NO: 21676 - RNA, 20 nt, Artificial Sequence
  spacer sequence TTCN PAM
auuacacucuggaugacugc

SEQ ID NO: 21677 - RNA, 20 nt, Artificial Sequence
  spacer sequence TTCN PAM
uaagccaguaacuccaaggc

SEQ ID NO: 21678 - RNA, 20 nt, Artificial Sequence
  spacer sequence TTCN PAM
gucugggcuauggccucuca

SEQ ID NO: 21679 - RNA, 20 nt, Artificial Sequence
  spacer sequence TTCN PAM
ugcuggaguggccuugcucc

SEQ ID NO: 21680 - RNA, 20 nt, Artificial Sequence
  spacer sequence TTCN PAM
uucuuggcuagcagaugcua

SEQ ID NO: 21681 - RNA, 20 nt, Artificial Sequence
  spacer sequence TTCN PAM
uggcuagcagaugcuagucc

SEQ ID NO: 21682 - RNA, 20 nt, Artificial Sequence
  spacer sequence TTCN PAM
ugggacuagcaucugcuagc

SEQ ID NO: 21683 - RNA, 20 nt, Artificial Sequence
  spacer sequence TTCN PAM
guuuuugcaguuagcuuaaa

SEQ ID NO: 21684 - RNA, 20 nt, Artificial Sequence
  spacer sequence TTCN PAM
accuauaagggaaaaauaaa

SEQ ID NO: 21685 - RNA, 20 nt, Artificial Sequence
  spacer sequence TTCN PAM
cuuauagguagaauauaaaa

SEQ ID NO: 21686 - RNA, 20 nt, Artificial Sequence
  spacer sequence TTCN PAM
aggucuagguuuauuuuucc

SEQ ID NO: 21687 - RNA, 20 nt, Artificial Sequence
  spacer sequence TTCN PAM
uuuuaaaugaguugauuggc

SEQ ID NO: 21688 - RNA, 20 nt, Artificial Sequence
  spacer sequence TTCN PAM
ugacguuggauggaggguuu

SEQ ID NO: 21689 - RNA, 20 nt, Artificial Sequence
  spacer sequence TTCN PAM
gcagcuucgugacguuggau

SEQ ID NO: 21690 - RNA, 20 nt, Artificial Sequence
  spacer sequence TTCN PAM
ugggaagcugucccagcaac

SEQ ID NO: 21691 - RNA, 20 nt, Artificial Sequence
  spacer sequence TTCN PAM
caggaaccuaauauucagca

SEQ ID NO: 21692 - RNA, 20 nt, Artificial Sequence
  spacer sequence TTCN PAM
cauaucuagguugcugggac

SEQ ID NO: 21693 - RNA, 20 nt, Artificial Sequence
  spacer sequence TTCN PAM
ggggugagaagugaaguugc

SEQ ID NO: 21694 - RNA, 20 nt, Artificial Sequence
  spacer sequence TTCN PAM
caccccagaauagcaagcgu

SEQ ID NO: 21695 - RNA, 20 nt, Artificial Sequence
  spacer sequence TTCN PAM
cuucucaccccagaauagca

SEQ ID NO: 21696 - RNA, 20 nt, Artificial Sequence
  spacer sequence TTCN PAM
cucgggacugucaaacacag

SEQ ID NO: 21697 - RNA, 20 nt, Artificial Sequence
  spacer sequence TTCN PAM
caaggggcauugcugguauu

SEQ ID NO: 21698 - RNA, 20 nt, Artificial Sequence
  spacer sequence TTCN PAM
cuggguugagcucagcccgu

SEQ ID NO: 21699 - RNA, 20 nt, Artificial Sequence
  spacer sequence TTCN PAM
caaaggucacacagcaauuc

SEQ ID NO: 21700 - RNA, 20 nt, Artificial Sequence
  spacer sequence TTCN PAM
aggucccccagaaguagccc

SEQ ID NO: 21701 - RNA, 20 nt, Artificial Sequence
  spacer sequence TTCN PAM
gggggaccuggaauugcugu

SEQ ID NO: 21702 - RNA, 20 nt, Artificial Sequence
  spacer sequence TTCN PAM
ccagauggaucccaucacca

SEQ ID NO: 21703 - RNA, 20 nt, Artificial Sequence
  spacer sequence TTCN PAM
aagagcuaucuggugauggg

SEQ ID NO: 21704 - RNA, 20 nt, Artificial Sequence
  spacer sequence TTCN PAM
cauuuucaacaagaaggcug

SEQ ID NO: 21705 - RNA, 20 nt, Artificial Sequence
  spacer sequence TTCN PAM
acaagaaggcugaggaauga

SEQ ID NO: 21706 - RNA, 20 nt, Artificial Sequence
  spacer sequence TTCN PAM
uguugaaaaugagaaucaga

SEQ ID NO: 21707 - RNA, 20 nt, Artificial Sequence
  spacer sequence TTCN PAM
ucagccuucuuguugaaaau

SEQ ID NO: 21708 - RNA, 20 nt, Artificial Sequence
  spacer sequence TTCN PAM
uuccccaacuuucuuucucc

SEQ ID NO: 21709 - RNA, 20 nt, Artificial Sequence
  spacer sequence TTCN PAM
ccaacuuucuuucuccaacc

SEQ ID NO: 21710 - RNA, 20 nt, Artificial Sequence
  spacer sequence TTCN PAM
uucuccaaccuucugcucug

SEQ ID NO: 21711 - RNA, 20 nt, Artificial Sequence
  spacer sequence TTCN PAM
ccaaccuucugcucugguuc

SEQ ID NO: 21712 - RNA, 20 nt, Artificial Sequence
  spacer sequence TTCN PAM
gcucugguucuccucucccc

SEQ ID NO: 21713 - RNA, 20 nt, Artificial Sequence
  spacer sequence TTCN PAM
ccucucccccaccacacgua

SEQ ID NO: 21714 - RNA, 20 nt, Artificial Sequence
  spacer sequence TTCN PAM
auaucuacccaaaaucucca

SEQ ID NO: 21715 - RNA, 20 nt, Artificial Sequence
  spacer sequence TTCN PAM
aucagcaggucaagaguaga

SEQ ID NO: 21716 - RNA, 20 nt, Artificial Sequence
  spacer sequence TTCN PAM
cuacucuugaccugcugaua

SEQ ID NO: 21717 - RNA, 20 nt, Artificial Sequence
  spacer sequence TTCN PAM
ccauucugaaauggauuuga

SEQ ID NO: 21718 - RNA, 20 nt, Artificial Sequence
  spacer sequence TTCN PAM
gaaauggauuugacugaaca

SEQ ID NO: 21719 - RNA, 20 nt, Artificial Sequence
  spacer sequence TTCN PAM
gaauggagaacagcuuguca

SEQ ID NO: 21720 - RNA, 20 nt, Artificial Sequence
  spacer sequence TTCN PAM
gucaaauccauuucagaaug

SEQ ID NO: 21721 - RNA, 20 nt, Artificial Sequence
  spacer sequence TTCN PAM
gcagcuguucagucaaaucc

SEQ ID NO: 21722 - RNA, 20 nt, Artificial Sequence
  spacer sequence TTCN PAM
ggguccuuguucugugggug

SEQ ID NO: 21723 - RNA, 20 nt, Artificial Sequence
  spacer sequence TTCN PAM
guggguggaccauggcuccu

SEQ ID NO: 21724 - RNA, 20 nt, Artificial Sequence
  spacer sequence TTCN PAM
agagaaugacuugugauuug

SEQ ID NO: 21725 - RNA, 20 nt, Artificial Sequence
  spacer sequence TTCN PAM
cuggaaaggagccauggucc

SEQ ID NO: 21726 - RNA, 20 nt, Artificial Sequence
  spacer sequence TTCN PAM
cucuccuacacaucaaagug

SEQ ID NO: 21727 - RNA, 20 nt, Artificial Sequence
  spacer sequence TTCN PAM
cacacaaugagaaagaacgg

SEQ ID NO: 21728 - RNA, 20 nt, Artificial Sequence
  spacer sequence TTCN PAM
cauugugugagaaggaggca

SEQ ID NO: 21729 - RNA, 20 nt, Artificial Sequence
  spacer sequence TTCN PAM
uucucauugugugagaagga

SEQ ID NO: 21730 - RNA, 20 nt, Artificial Sequence
  spacer sequence TTCN PAM
aagaguucacuuucugcaca

SEQ ID NO: 21731 - RNA, 20 nt, Artificial Sequence
  spacer sequence TTCN PAM
cuuucugcacauauguguag

SEQ ID NO: 21732 - RNA, 20 nt, Artificial Sequence
  spacer sequence TTCN PAM
gcacauauguguaguuaagu

SEQ ID NO: 21733 - RNA, 20 nt, Artificial Sequence
  spacer sequence TTCN PAM
guacuuaacuacacauaugu

SEQ ID NO: 21734 - RNA, 20 nt, Artificial Sequence
  spacer sequence TTCN PAM
cacuucaguacuuaacuaca

SEQ ID NO: 21735 - RNA, 20 nt, Artificial Sequence
  spacer sequence TTCN PAM
agaaaacuauacuuaggcac

SEQ ID NO: 21736 - RNA, 20 nt, Artificial Sequence
  spacer sequence TTCN PAM
ugaauuucucacuucaguac

SEQ ID NO: 21737 - RNA, 20 nt, Artificial Sequence
  spacer sequence TTCN PAM
aaagaccuaccaaucuaaga

SEQ ID NO: 21738 - RNA, 20 nt, Artificial Sequence
  spacer sequence TTCN PAM
guaucuuagauugguagguc

SEQ ID NO: 21739 - RNA, 20 nt, Artificial Sequence
  spacer sequence TTCN PAM
uucaguaucuuagauuggua

SEQ ID NO: 21740 - RNA, 20 nt, Artificial Sequence
  spacer sequence TTCN PAM
gggccugauguagccauuuu

SEQ ID NO: 21741 - RNA, 20 nt, Artificial Sequence
  spacer sequence TTCN PAM
aggcuuuucugggccugaug

SEQ ID NO: 21742 - RNA, 20 nt, Artificial Sequence
  spacer sequence TTCN PAM
cuauccacagaccacagccc

SEQ ID NO: 21743 - RNA, 20 nt, Artificial Sequence
  spacer sequence TTCN PAM
ucucaaagccagaggaucuc

SEQ ID NO: 21744 - RNA, 20 nt, Artificial Sequence
  spacer sequence TTCN PAM
gugcauuauucaucucaaag

SEQ ID NO: 21745 - RNA, 20 nt, Artificial Sequence
  spacer sequence TTCN PAM
caugucugguaauaaucugc

SEQ ID NO: 21746 - RNA, 20 nt, Artificial Sequence
  spacer sequence TTCN PAM
ggcccaauccugauguugag

SEQ ID NO: 21747 - RNA, 20 nt, Artificial Sequence
  spacer sequence TTCN PAM
cucaggaaggccuugauagc

SEQ ID NO: 21748 - RNA, 20 nt, Artificial Sequence
  spacer sequence TTCN PAM
ugagagaaguuucaggccca

SEQ ID NO: 21749 - RNA, 20 nt, Artificial Sequence
  spacer sequence TTCN PAM
cagacugugggcucagacuc

SEQ ID NO: 21750 - RNA, 20 nt, Artificial Sequence
  spacer sequence TTCN PAM
cagggagacguucccacuca

SEQ ID NO: 21751 - RNA, 20 nt, Artificial Sequence
  spacer sequence TTCN PAM
cacucaacacccugggaaga

SEQ ID NO: 21752 - RNA, 20 nt, Artificial Sequence
  spacer sequence TTCN PAM
caggguguugagugggaacg

SEQ ID NO: 21753 - RNA, 20 nt, Artificial Sequence
  spacer sequence TTCN PAM
caguagucuucccagggugu

SEQ ID NO: 21754 - RNA, 20 nt, Artificial Sequence
  spacer sequence TTCN PAM
uguauuugcccuuuucccug

SEQ ID NO: 21755 - RNA, 20 nt, Artificial Sequence
  spacer sequence TTCN PAM
cugcuaacagaaauggaauc

SEQ ID NO: 21756 - RNA, 20 nt, Artificial Sequence
  spacer sequence TTCN PAM
guuagcagggaaaagggcaa

SEQ ID NO: 21757 - RNA, 20 nt, Artificial Sequence
  spacer sequence TTCN PAM
auuucuguuagcagggaaaa

SEQ ID NO: 21758 - RNA, 20 nt, Artificial Sequence
  spacer sequence TTCN PAM
gauuccauuucuguuagcag

SEQ ID NO: 21759 - RNA, 20 nt, Artificial Sequence
  spacer sequence TTCN PAM
aucagaauaaaaaagacucg

SEQ ID NO: 21760 - RNA, 20 nt, Artificial Sequence
  spacer sequence TTCN PAM
gauagaauaguaaucuuaaa

SEQ ID NO: 21761 - RNA, 20 nt, Artificial Sequence
  spacer sequence TTCN PAM
aagcgaaggcaaaugccccu

SEQ ID NO: 21762 - RNA, 20 nt, Artificial Sequence
  spacer sequence TTCN PAM
cuuugaaucucccgagucuu

SEQ ID NO: 21763 - RNA, 20 nt, Artificial Sequence
  spacer sequence TTCN PAM
ggcauuuaggagcgcuagac

SEQ ID NO: 21764 - RNA, 20 nt, Artificial Sequence
  spacer sequence TTCN PAM
cugccuccaaccugugauuu

SEQ ID NO: 21765 - RNA, 20 nt, Artificial Sequence
  spacer sequence TTCN PAM
ugccuuguggcaaaucacag

SEQ ID NO: 21766 - RNA, 20 nt, Artificial Sequence
  spacer sequence TTCN PAM
ccuuccugccuuguggcaaa

SEQ ID NO: 21767 - RNA, 20 nt, Artificial Sequence
  spacer sequence TTCN PAM
cacacuuagggguguugcac

SEQ ID NO: 21768 - RNA, 20 nt, Artificial Sequence
  spacer sequence TTCN PAM
aaccuuuuacccauguaaug

SEQ ID NO: 21769 - RNA, 20 nt, Artificial Sequence
  spacer sequence TTCN PAM
uugauuaaaggcaaaauauu

SEQ ID NO: 21770 - RNA, 20 nt, Artificial Sequence
  spacer sequence TTCN PAM
ugcuaaugucagcagagccc

SEQ ID NO: 21771 - RNA, 20 nt, Artificial Sequence
  spacer sequence TTCN PAM
ggugucugcaccccacaaug

SEQ ID NO: 21772 - RNA, 20 nt, Artificial Sequence
  spacer sequence TTCN PAM
acucucgguguguggcauug

SEQ ID NO: 21773 - RNA, 20 nt, Artificial Sequence
  spacer sequence TTCN PAM
uuuuccacucucggugugug

SEQ ID NO: 21774 - RNA, 20 nt, Artificial Sequence
  spacer sequence TTCN PAM
gcagggggagcaguguagug

SEQ ID NO: 21775 - RNA, 20 nt, Artificial Sequence
  spacer sequence TTCN PAM
ucaucuguauggaaauuggg

SEQ ID NO: 21776 - RNA, 20 nt, Artificial Sequence
  spacer sequence TTCN PAM
auacagaugacgaaaacgua

SEQ ID NO: 21777 - RNA, 20 nt, Artificial Sequence
  spacer sequence TTCN PAM
caauuuccauacagaugacg

SEQ ID NO: 21778 - RNA, 20 nt, Artificial Sequence
  spacer sequence TTCN PAM
caaauguagauuaucuuccc

SEQ ID NO: 21779 - RNA, 20 nt, Artificial Sequence
  spacer sequence TTCN PAM
cuugggauccuucuggaggg

SEQ ID NO: 21780 - RNA, 20 nt, Artificial Sequence
  spacer sequence TTCN PAM
ggagggcuauaaauaauaga

SEQ ID NO: 21781 - RNA, 20 nt, Artificial Sequence
  spacer sequence TTCN PAM
auuauuuauagcccuccaga

SEQ ID NO: 21782 - RNA, 20 nt, Artificial Sequence
  spacer sequence TTCN PAM
uuuuuaaauaucuaauguug

SEQ ID NO: 21783 - RNA, 20 nt, Artificial Sequence
  spacer sequence TTCN PAM
gauuaagggaaaacuaaaug

SEQ ID NO: 21784 - RNA, 20 nt, Artificial Sequence
  spacer sequence TTCN PAM
cuuaaucugaaucuguauuc

SEQ ID NO: 21785 - RNA, 20 nt, Artificial Sequence
  spacer sequence TTCN PAM
ggauuuuauaaaggcaucau

SEQ ID NO: 21786 - RNA, 20 nt, Artificial Sequence
  spacer sequence TTCN PAM
ugccuuuuuuuguuuuguuu

SEQ ID NO: 21787 - RNA, 20 nt, Artificial Sequence
  spacer sequence TTCN PAM
uuuucaugccuuuuuuuguu

SEQ ID NO: 21788 - RNA, 20 nt, Artificial Sequence
  spacer sequence TTCN PAM
cuggcaaccacaccagccuu

SEQ ID NO: 21789 - RNA, 20 nt, Artificial Sequence
  spacer sequence TTCN PAM
aaguaaccauuucccacucc

SEQ ID NO: 21790 - RNA, 20 nt, Artificial Sequence
  spacer sequence TTCN PAM
cacucccuuauuuaugagca

SEQ ID NO: 21791 - RNA, 20 nt, Artificial Sequence
  spacer sequence TTCN PAM
gcugcucauaaauaagggag

SEQ ID NO: 21792 - RNA, 20 nt, Artificial Sequence
  spacer sequence TTCN PAM
caucaaccauucuaucuaag

SEQ ID NO: 21793 - RNA, 20 nt, Artificial Sequence
  spacer sequence TTCN PAM
aucuaaggaagcugcagaaa

SEQ ID NO: 21794 - RNA, 20 nt, Artificial Sequence
  spacer sequence TTCN PAM
uuagauagaaugguugauga

SEQ ID NO: 21795 - RNA, 20 nt, Artificial Sequence
  spacer sequence TTCN PAM
gcagcuuccuuagauagaau

SEQ ID NO: 21796 - RNA, 20 nt, Artificial Sequence
  spacer sequence TTCN PAM
ccuuucugcagcuuccuuag

SEQ ID NO: 21797 - RNA, 20 nt, Artificial Sequence
  spacer sequence TTCN PAM
aguuuucaccuuucugcagc

SEQ ID NO: 21798 - RNA, 20 nt, Artificial Sequence
  spacer sequence TTCN PAM
uaaauuuccaguuuucaccu

SEQ ID NO: 21799 - RNA, 20 nt, Artificial Sequence
  spacer sequence TTCN PAM
cauuaaagguucauaaauuu

SEQ ID NO: 21800 - RNA, 20 nt, Artificial Sequence
  spacer sequence TTCN PAM
uauccagauuucccauuaaa

SEQ ID NO: 21801 - RNA, 20 nt, Artificial Sequence
  spacer sequence TTCN PAM
uauauuuagaccaaauucuu

SEQ ID NO: 21802 - RNA, 20 nt, Artificial Sequence
  spacer sequence TTCN PAM
ucuucauauauuuagaccaa

SEQ ID NO: 21803 - RNA, 20 nt, Artificial Sequence
  spacer sequence TTCN PAM
caacucuagaauggagcccu

SEQ ID NO: 21804 - RNA, 20 nt, Artificial Sequence
  spacer sequence TTCN PAM
agaguugggaaaaccaaguc

SEQ ID NO: 21805 - RNA, 20 nt, Artificial Sequence
  spacer sequence TTCN PAM
ccagguuuagaugagggcuc

SEQ ID NO: 21806 - RNA, 20 nt, Artificial Sequence
  spacer sequence TTCN PAM
uauauugcuuccccagguuu

SEQ ID NO: 21807 - RNA, 20 nt, Artificial Sequence
  spacer sequence TTCN PAM
cauuauguagaaacauuuaa

SEQ ID NO: 21808 - RNA, 20 nt, Artificial Sequence
  spacer sequence TTCN PAM
acauaaugagaauaaauugu

SEQ ID NO: 21809 - RNA, 20 nt, Artificial Sequence
  spacer sequence TTCN PAM
aggauaauuuaaauguuucu

SEQ ID NO: 21810 - RNA, 20 nt, Artificial Sequence
  spacer sequence TTCN PAM
aagaguguuucuuccuuucc

SEQ ID NO: 21811 - RNA, 20 nt, Artificial Sequence
  spacer sequence TTCN PAM
uccuuuccuucuaggaacau

SEQ ID NO: 21812 - RNA, 20 nt, Artificial Sequence
  spacer sequence TTCN PAM
uuuccuucuaggaacaugag

SEQ ID NO: 21813 - RNA, 20 nt, Artificial Sequence
  spacer sequence TTCN PAM
uucuaggaacaugaggagug

SEQ ID NO: 21814 - RNA, 20 nt, Artificial Sequence
  spacer sequence TTCN PAM
aggaacaugaggagugaauc

SEQ ID NO: 21815 - RNA, 20 nt, Artificial Sequence
  spacer sequence TTCN PAM
uagaaggaaaggaagaaaca

SEQ ID NO: 21816 - RNA, 20 nt, Artificial Sequence
  spacer sequence TTCN PAM
cuccucauguuccuagaagg

SEQ ID NO: 21817 - RNA, 20 nt, Artificial Sequence
  spacer sequence TTCN PAM
ucaaagccuguaaaagauac

SEQ ID NO: 21818 - RNA, 20 nt, Artificial Sequence
  spacer sequence TTCN PAM
guuaaaaucaugacucaggu

SEQ ID NO: 21819 - RNA, 20 nt, Artificial Sequence
  spacer sequence TTCN PAM
uggagacauuguucaguuaa

SEQ ID NO: 21820 - RNA, 20 nt, Artificial Sequence
  spacer sequence TTCN PAM
gacugugagagggggaagaa

SEQ ID NO: 21821 - RNA, 20 nt, Artificial Sequence
  spacer sequence TTCN PAM
cccucucacagucugaauuc

SEQ ID NO: 21822 - RNA, 20 nt, Artificial Sequence
  spacer sequence TTCN PAM
ucccccucucacagucugaa

SEQ ID NO: 21823 - RNA, 20 nt, Artificial Sequence
  spacer sequence TTCN PAM
cacugcaccaaagagacggu

SEQ ID NO: 21824 - RNA, 20 nt, Artificial Sequence
  spacer sequence TTCN PAM
ucuccucuguccuuggcaau

SEQ ID NO: 21825 - RNA, 20 nt, Artificial Sequence
  spacer sequence TTCN PAM
cauuugcuguaauccuguua

SEQ ID NO: 21826 - RNA, 20 nt, Artificial Sequence
  spacer sequence TTCN PAM
uucacauuugcuguaauccu

SEQ ID NO: 21827 - RNA, 20 nt, Artificial Sequence
  spacer sequence TTCN PAM
uuuuuugcugacacagaacu

SEQ ID NO: 21828 - RNA, 20 nt, Artificial Sequence
  spacer sequence TTCN PAM
gugucagcaaaaaaugaaac

SEQ ID NO: 21829 - RNA, 20 nt, Artificial Sequence
  spacer sequence TTCN PAM
cuggaaacccuguuauggcu

SEQ ID NO: 21830 - RNA, 20 nt, Artificial Sequence
  spacer sequence TTCN PAM
agugaauuguauaaguagca

SEQ ID NO: 21831 - RNA, 20 nt, Artificial Sequence
  spacer sequence TTCN PAM
cccaaugaaagaaaauacuu

SEQ ID NO: 21832 - RNA, 20 nt, Artificial Sequence
  spacer sequence TTCN PAM
uugggggaagcaaacuauuu

SEQ ID NO: 21833 - RNA, 20 nt, Artificial Sequence
  spacer sequence TTCN PAM
uucauugggggaagcaaacu

SEQ ID NO: 21834 - RNA, 20 nt, Artificial Sequence
  spacer sequence TTCN PAM
ccugcaguacaguaaguauu

SEQ ID NO: 21835 - RNA, 20 nt, Artificial Sequence
  spacer sequence TTCN PAM
guaaaacuuucuaguuuugc

SEQ ID NO: 21836 - RNA, 20 nt, Artificial Sequence
  spacer sequence TTCN PAM
aguuuugcuuaacaugaaaa

SEQ ID NO: 21837 - RNA, 20 nt, Artificial Sequence
  spacer sequence TTCN PAM
uguuaagcaaaacuagaaag

SEQ ID NO: 21838 - RNA, 20 nt, Artificial Sequence
  spacer sequence TTCN PAM
aaucaguaucaauagccaaa

SEQ ID NO: 21839 - RNA, 20 nt, Artificial Sequence
  spacer sequence TTCN PAM
gagguggaguuucgcucuug

SEQ ID NO: 21840 - RNA, 20 nt, Artificial Sequence
  spacer sequence TTCN PAM
cucuuguugcccgggcugga

SEQ ID NO: 21841 - RNA, 20 nt, Artificial Sequence
  spacer sequence TTCN PAM
agcgauucuccugccucagc

SEQ ID NO: 21842 - RNA, 20 nt, Artificial Sequence
  spacer sequence TTCN PAM
ccugccucagccucccaagu

SEQ ID NO: 21843 - RNA, 20 nt, Artificial Sequence
  spacer sequence TTCN PAM
guauuuuugguagagacggg

SEQ ID NO: 21844 - RNA, 20 nt, Artificial Sequence
  spacer sequence TTCN PAM
ccauguuggucaggcugguc

SEQ ID NO: 21845 - RNA, 20 nt, Artificial Sequence
  spacer sequence TTCN PAM
aagaaaaaaaaugcugugug

SEQ ID NO: 21846 - RNA, 20 nt, Artificial Sequence
  spacer sequence TTCN PAM
uugaagauaaauuuguuuug

SEQ ID NO: 21847 - RNA, 20 nt, Artificial Sequence
  spacer sequence TTCN PAM
aaaggguaccuuagacccca

SEQ ID NO: 21848 - RNA, 20 nt, Artificial Sequence
  spacer sequence TTCN PAM
ccaaacucuaaagcaacagu

SEQ ID NO: 21849 - RNA, 20 nt, Artificial Sequence
  spacer sequence TTCN PAM
acuuuauuuuccccaaacuc

SEQ ID NO: 21850 - RNA, 20 nt, Artificial Sequence
  spacer sequence TTCN PAM
cacugugagagccagucaac

SEQ ID NO: 21851 - RNA, 20 nt, Artificial Sequence
  spacer sequence TTCN PAM
cauuccauuucuuuuauguc

SEQ ID NO: 21852 - RNA, 20 nt, Artificial Sequence
  spacer sequence TTCN PAM
auuucuuuuaugucauuuug

SEQ ID NO: 21853 - RNA, 20 nt, Artificial Sequence
  spacer sequence TTCN PAM
uuuaugucauuuugcccaca

SEQ ID NO: 21854 - RNA, 20 nt, Artificial Sequence
  spacer sequence TTCN PAM
uacaauagaggcauuuggaa

SEQ ID NO: 21855 - RNA, 20 nt, Artificial Sequence
  spacer sequence TTCN PAM
aaaugccucuauuguaugaa

SEQ ID NO: 21856 - RNA, 20 nt, Artificial Sequence
  spacer sequence TTCN PAM
uaacuaauuucugccgcugg

SEQ ID NO: 21857 - RNA, 20 nt, Artificial Sequence
  spacer sequence TTCN PAM
gccgcuggaaguuuguuccu

SEQ ID NO: 21858 - RNA, 20 nt, Artificial Sequence
  spacer sequence TTCN PAM
agcggcagaaauuaguuagg

SEQ ID NO: 21859 - RNA, 20 nt, Artificial Sequence
  spacer sequence TTCN PAM
uaaagccaccaagucuccua

SEQ ID NO: 21860 - RNA, 20 nt, Artificial Sequence
  spacer sequence TTCN PAM
aggagacuugguggcuuuag

SEQ ID NO: 21861 - RNA, 20 nt, Artificial Sequence
  spacer sequence TTCN PAM
uggcaguaaacacacggcgg

SEQ ID NO: 21862 - RNA, 20 nt, Artificial Sequence
  spacer sequence TTCN PAM
uuugagauaggugcugguca

SEQ ID NO: 21863 - RNA, 20 nt, Artificial Sequence
  spacer sequence TTCN PAM
gaguagaagaggaagcaccu

SEQ ID NO: 21864 - RNA, 20 nt, Artificial Sequence
  spacer sequence TTCN PAM
acucagaauuuucuuuugag

SEQ ID NO: 21865 - RNA, 20 nt, Artificial Sequence
  spacer sequence TTCN PAM
ucuucuacucagaauuuucu

SEQ ID NO: 21866 - RNA, 20 nt, Artificial Sequence
  spacer sequence TTCN PAM
ggugcuuccucuucuacuca

SEQ ID NO: 21867 - RNA, 20 nt, Artificial Sequence
  spacer sequence TTCN PAM
uucaggugcuuccucuucua

SEQ ID NO: 21868 - RNA, 20 nt, Artificial Sequence
  spacer sequence TTCN PAM
gcuuccuucaggugcuuccu

SEQ ID NO: 21869 - RNA, 20 nt, Artificial Sequence
  spacer sequence TTCN PAM
uuucagcuuccuucaggugc

SEQ ID NO: 21870 - RNA, 20 nt, Artificial Sequence
  spacer sequence TTCN PAM
aaugucagacuuucuuuuca

SEQ ID NO: 21871 - RNA, 20 nt, Artificial Sequence
  spacer sequence TTCN PAM
aacagagguucuuuccccuc

SEQ ID NO: 21872 - RNA, 20 nt, Artificial Sequence
  spacer sequence TTCN PAM
uuccccucuaggacacucug

SEQ ID NO: 21873 - RNA, 20 nt, Artificial Sequence
  spacer sequence TTCN PAM
ccucuaggacacucuggguc

SEQ ID NO: 21874 - RNA, 20 nt, Artificial Sequence
  spacer sequence TTCN PAM
uuguucccuggcucaucucc

SEQ ID NO: 21875 - RNA, 20 nt, Artificial Sequence
  spacer sequence TTCN PAM
cuggcucaucuccugagccc

SEQ ID NO: 21876 - RNA, 20 nt, Artificial Sequence
  spacer sequence TTCN PAM
ccuuuccaacugucuauuua

SEQ ID NO: 21877 - RNA, 20 nt, Artificial Sequence
  spacer sequence TTCN PAM
aacugucuauuuacuaacca

SEQ ID NO: 21878 - RNA, 20 nt, Artificial Sequence
  spacer sequence TTCN PAM
ggcuagcuuaauaaccccca

SEQ ID NO: 21879 - RNA, 20 nt, Artificial Sequence
  spacer sequence TTCN PAM
uaucccugugaucucucuuu

SEQ ID NO: 21880 - RNA, 20 nt, Artificial Sequence
  spacer sequence TTCN PAM
ugauagcauuuaucauuuug

SEQ ID NO: 21881 - RNA, 20 nt, Artificial Sequence
  spacer sequence TTCN PAM
gaacgucauuccugcccacu

SEQ ID NO: 21882 - RNA, 20 nt, Artificial Sequence
  spacer sequence TTCN PAM
gaaucaagggcccaucaggg

SEQ ID NO: 21883 - RNA, 20 nt, Artificial Sequence
  spacer sequence TTCN PAM
ugcccacuccccaucugcaa

SEQ ID NO: 21884 - RNA, 20 nt, Artificial Sequence
  spacer sequence TTCN PAM
uuuugccuuugcccccauug

SEQ ID NO: 21885 - RNA, 20 nt, Artificial Sequence
  spacer sequence TTCN PAM
aagauuuaaacaguccucua

SEQ ID NO: 21886 - RNA, 20 nt, Artificial Sequence
  spacer sequence TTCN PAM
auucugcuagugaaaggaaa

SEQ ID NO: 21887 - RNA, 20 nt, Artificial Sequence
  spacer sequence TTCN PAM
gcuagugaaaggaaacccua

SEQ ID NO: 21888 - RNA, 20 nt, Artificial Sequence
  spacer sequence TTCN PAM
cuagcagaauggaaccagau

SEQ ID NO: 21889 - RNA, 20 nt, Artificial Sequence
  spacer sequence TTCN PAM
uuucacuagcagaauggaac

SEQ ID NO: 21890 - RNA, 20 nt, Artificial Sequence
  spacer sequence TTCN PAM
agaggauggaguugguugac

SEQ ID NO: 21891 - RNA, 20 nt, Artificial Sequence
  spacer sequence TTCN PAM
ccccuguugacuuauauguu

SEQ ID NO: 21892 - RNA, 20 nt, Artificial Sequence
  spacer sequence TTCN PAM
ugccgaguucuccccuguug

SEQ ID NO: 21893 - RNA, 20 nt, Artificial Sequence
  spacer sequence TTCN PAM
cuguuauacccuucaugccg

SEQ ID NO: 21894 - RNA, 20 nt, Artificial Sequence
  spacer sequence TTCN PAM
acaacucauccacccccuuu

SEQ ID NO: 21895 - RNA, 20 nt, Artificial Sequence
  spacer sequence TTCN PAM
gaucagaguauuucagcagc

SEQ ID NO: 21896 - RNA, 20 nt, Artificial Sequence
  spacer sequence TTCN PAM
gcagcccucugugaucuaua

SEQ ID NO: 21897 - RNA, 20 nt, Artificial Sequence
  spacer sequence TTCN PAM
agagcuccacaauccaacuc

SEQ ID NO: 21898 - RNA, 20 nt, Artificial Sequence
  spacer sequence TTCN PAM
auuccagucuuaguuccccg

SEQ ID NO: 21899 - RNA, 20 nt, Artificial Sequence
  spacer sequence TTCN PAM
agucuuaguuccccguaccc

SEQ ID NO: 21900 - RNA, 20 nt, Artificial Sequence
  spacer sequence TTCN PAM
ccguacccaucaaggaaaau

SEQ ID NO: 21901 - RNA, 20 nt, Artificial Sequence
  spacer sequence TTCN PAM
uugauggguacggggaacua

SEQ ID NO: 21902 - RNA, 20 nt, Artificial Sequence
  spacer sequence TTCN PAM
gcccaaguaaaaaucccuuc

SEQ ID NO: 21903 - RNA, 20 nt, Artificial Sequence
  spacer sequence TTCN PAM
guucucauuuccuuccuggc

SEQ ID NO: 21904 - RNA, 20 nt, Artificial Sequence
  spacer sequence TTCN PAM
cauuuccuuccuggcuuuuc

SEQ ID NO: 21905 - RNA, 20 nt, Artificial Sequence
  spacer sequence TTCN PAM
uuccuggcuuuucuucuucu

SEQ ID NO: 21906 - RNA, 20 nt, Artificial Sequence
  spacer sequence TTCN PAM
uggcuuuucuucuucuucuc

SEQ ID NO: 21907 - RNA, 20 nt, Artificial Sequence
  spacer sequence TTCN PAM
ucuucuucucuuaccuccug

SEQ ID NO: 21908 - RNA, 20 nt, Artificial Sequence
  spacer sequence TTCN PAM
ucuucucuuaccuccuggaa

SEQ ID NO: 21909 - RNA, 20 nt, Artificial Sequence
  spacer sequence TTCN PAM
ucucuuaccuccuggaaucc

SEQ ID NO: 21910 - RNA, 20 nt, Artificial Sequence
  spacer sequence TTCN PAM
cuuaccuccuggaauccugc

SEQ ID NO: 21911 - RNA, 20 nt, Artificial Sequence
  spacer sequence TTCN PAM
aggagguaagagaagaagaa

SEQ ID NO: 21912 - RNA, 20 nt, Artificial Sequence
  spacer sequence TTCN PAM
aggccucaaugaaggucuac

SEQ ID NO: 21913 - RNA, 20 nt, Artificial Sequence
  spacer sequence TTCN PAM
uugaggccuugaaguaugag

SEQ ID NO: 21914 - RNA, 20 nt, Artificial Sequence
  spacer sequence TTCN PAM
ugcuaaggugacuagguaga

SEQ ID NO: 21915 - RNA, 20 nt, Artificial Sequence
  spacer sequence TTCN PAM
ucuugcuaaggugacuaggu

SEQ ID NO: 21916 - RNA, 20 nt, Artificial Sequence
  spacer sequence TTCN PAM
ccaaccucauagaacacuca

SEQ ID NO: 21917 - RNA, 20 nt, Artificial Sequence
  spacer sequence TTCN PAM
augagguuggagaaggauga

SEQ ID NO: 21918 - RNA, 20 nt, Artificial Sequence
  spacer sequence TTCN PAM
uguguucccaaugaguuucu

SEQ ID NO: 21919 - RNA, 20 nt, Artificial Sequence
  spacer sequence TTCN PAM
caaugaguuucuucaauaca

SEQ ID NO: 21920 - RNA, 20 nt, Artificial Sequence
  spacer sequence TTCN PAM
ucaauacagggacucuuucu

SEQ ID NO: 21921 - RNA, 20 nt, Artificial Sequence
  spacer sequence TTCN PAM
auacagggacucuuucuccu

SEQ ID NO: 21922 - RNA, 20 nt, Artificial Sequence
  spacer sequence TTCN PAM
ccuacuugcuucuauuauau

SEQ ID NO: 21923 - RNA, 20 nt, Artificial Sequence
  spacer sequence TTCN PAM
auuauauuugaaaguaccag

SEQ ID NO: 21924 - RNA, 20 nt, Artificial Sequence
  spacer sequence TTCN PAM
aauauaauagaagcaaguag

SEQ ID NO: 21925 - RNA, 20 nt, Artificial Sequence
  spacer sequence TTCN PAM
uauauucuaggaauucaaca

SEQ ID NO: 21926 - RNA, 20 nt, Artificial Sequence
  spacer sequence TTCN PAM
aggaauucaacaaauagcau

SEQ ID NO: 21927 - RNA, 20 nt, Artificial Sequence
  spacer sequence TTCN PAM
uagaauauaugaauaucaug

SEQ ID NO: 21928 - RNA, 20 nt, Artificial Sequence
  spacer sequence TTCN PAM
acaaauagcauauaaaugac

SEQ ID NO: 21929 - RNA, 20 nt, Artificial Sequence
  spacer sequence TTCN PAM
uaaaagggaaguuauuuuuc

SEQ ID NO: 21930 - RNA, 20 nt, Artificial Sequence
  spacer sequence TTCN PAM
cuuuuaggaagguaaaucag

SEQ ID NO: 21931 - RNA, 20 nt, Artificial Sequence
  spacer sequence TTCN PAM
aaauaucauuucuguucaaa

SEQ ID NO: 21932 - RNA, 20 nt, Artificial Sequence
  spacer sequence TTCN PAM
guucaaaaugguaauuuuaa

SEQ ID NO: 21933 - RNA, 20 nt, Artificial Sequence
  spacer sequence TTCN PAM
aaaugguaauuuuaaccuuc

SEQ ID NO: 21934 - RNA, 20 nt, Artificial Sequence
  spacer sequence TTCN PAM
uagcacccacaaacauuucc

SEQ ID NO: 21935 - RNA, 20 nt, Artificial Sequence
  spacer sequence TTCN PAM
cuucugauaucuacuugaac

SEQ ID NO: 21936 - RNA, 20 nt, Artificial Sequence
  spacer sequence TTCN PAM
gauaucuacuugaacuuuca

SEQ ID NO: 21937 - RNA, 20 nt, Artificial Sequence
  spacer sequence TTCN PAM
aguagauaucagaagggaaa

SEQ ID NO: 21938 - RNA, 20 nt, Artificial Sequence
  spacer sequence TTCN PAM
gauaaaaaaaaaaaagcaag

SEQ ID NO: 21939 - RNA, 20 nt, Artificial Sequence
  spacer sequence TTCN PAM
ugcuaaucuuuguguagcau

SEQ ID NO: 21940 - RNA, 20 nt, Artificial Sequence
  spacer sequence TTCN PAM
ccagggugugggguggcugu

SEQ ID NO: 21941 - RNA, 20 nt, Artificial Sequence
  spacer sequence TTCN PAM
cauuugcucuucuccagggu

SEQ ID NO: 21942 - RNA, 20 nt, Artificial Sequence
  spacer sequence TTCN PAM
auaugugaagcccaacuacg

SEQ ID NO: 21943 - RNA, 20 nt, Artificial Sequence
  spacer sequence TTCN PAM
cauauagaagauguugucau

SEQ ID NO: 21944 - RNA, 20 nt, Artificial Sequence
  spacer sequence TTCN PAM
accauggucaucugcaaaga

SEQ ID NO: 21945 - RNA, 20 nt, Artificial Sequence
  spacer sequence TTCN PAM
uugcagaugaccaugguuga

SEQ ID NO: 21946 - RNA, 20 nt, Artificial Sequence
  spacer sequence TTCN PAM
aaaaacguauucuuaaugcu

SEQ ID NO: 21947 - RNA, 20 nt, Artificial Sequence
  spacer sequence TTCN PAM
uaaugcuguuuuaaaugcag

SEQ ID NO: 21948 - RNA, 20 nt, Artificial Sequence
  spacer sequence TTCN PAM
gcuauuaaguacaguaaaag

SEQ ID NO: 21949 - RNA, 20 nt, Artificial Sequence
  spacer sequence TTCN PAM
uuuuacuguacuuaauagcu

SEQ ID NO: 21950 - RNA, 20 nt, Artificial Sequence
  spacer sequence TTCN PAM
aaugauaguuaggacuuccu

SEQ ID NO: 21951 - RNA, 20 nt, Artificial Sequence
  spacer sequence TTCN PAM
agaucaguuuggacaacaca

SEQ ID NO: 21952 - RNA, 20 nt, Artificial Sequence
  spacer sequence TTCN PAM
cuguguuguccaaacugauc

SEQ ID NO: 21953 - RNA, 20 nt, Artificial Sequence
  spacer sequence TTCN PAM
agcgaucuccugccucagcc

SEQ ID NO: 21954 - RNA, 20 nt, Artificial Sequence
  spacer sequence TTCN PAM
gccucccagguucaagcgau

SEQ ID NO: 21955 - RNA, 20 nt, Artificial Sequence
  spacer sequence TTCN PAM
agcccgggcaacaagaguaa

SEQ ID NO: 21956 - RNA, 20 nt, Artificial Sequence
  spacer sequence TTCN PAM
uuuuuuggugagacggagau

SEQ ID NO: 21957 - RNA, 20 nt, Artificial Sequence
  spacer sequence TTCN PAM
uuuuucuuuuuuuggugaga

SEQ ID NO: 21958 - RNA, 20 nt, Artificial Sequence
  spacer sequence TTCN PAM
uuuuuuuuuuuuucuuuuuu

SEQ ID NO: 21959 - RNA, 20 nt, Artificial Sequence
  spacer sequence TTCN PAM
uucuuuuuuuuuuuuuucuu

SEQ ID NO: 21960 - RNA, 20 nt, Artificial Sequence
  spacer sequence TTCN PAM
ccaggcugggcugacugccc

SEQ ID NO: 21961 - RNA, 20 nt, Artificial Sequence
  spacer sequence TTCN PAM
auguuaagaacccaaaucca

SEQ ID NO: 21962 - RNA, 20 nt, Artificial Sequence
  spacer sequence TTCN PAM
uaacauggaaaacgucugug

SEQ ID NO: 21963 - RNA, 20 nt, Artificial Sequence
  spacer sequence TTCN PAM
gaaaaggcaguccacacaaa

SEQ ID NO: 21964 - RNA, 20 nt, Artificial Sequence
  spacer sequence TTCN PAM
gaaccuauuugggugcuaag

SEQ ID NO: 21965 - RNA, 20 nt, Artificial Sequence
  spacer sequence TTCN PAM
uuuauuuggcagauuugugu

SEQ ID NO: 21966 - RNA, 20 nt, Artificial Sequence
  spacer sequence TTCN PAM
gauauugcauuuacgcuaaa

SEQ ID NO: 21967 - RNA, 20 nt, Artificial Sequence
  spacer sequence TTCN PAM
aagguauuuagcguaaaugc

SEQ ID NO: 21968 - RNA, 20 nt, Artificial Sequence
  spacer sequence TTCN PAM
cucucaauuuccaagguauu

SEQ ID NO: 21969 - RNA, 20 nt, Artificial Sequence
  spacer sequence TTCN PAM
ucuccagauucccucucaau

SEQ ID NO: 21970 - RNA, 20 nt, Artificial Sequence
  spacer sequence TTCN PAM
uacauccaucuuccucucca

SEQ ID NO: 21971 - RNA, 20 nt, Artificial Sequence
  spacer sequence TTCN PAM
uguaaagugaggguuuuugu

SEQ ID NO: 21972 - RNA, 20 nt, Artificial Sequence
  spacer sequence TTCN PAM
gcacaggagaugcuacauug

SEQ ID NO: 21973 - RNA, 20 nt, Artificial Sequence
  spacer sequence TTCN PAM
ccuuaagcggagaugcuaac

SEQ ID NO: 21974 - RNA, 20 nt, Artificial Sequence
  spacer sequence TTCN PAM
ucaguaugucuucuccuuaa

SEQ ID NO: 21975 - RNA, 20 nt, Artificial Sequence
  spacer sequence TTCN PAM
agaccagccugggcaacagg

SEQ ID NO: 21976 - RNA, 20 nt, Artificial Sequence
  spacer sequence TTCN PAM
cccuguugcccaggcugguc

SEQ ID NO: 21977 - RNA, 20 nt, Artificial Sequence
  spacer sequence TTCN PAM
uagcucacugcagccuugau

SEQ ID NO: 21978 - RNA, 20 nt, Artificial Sequence
  spacer sequence TTCN PAM
aaacauuagcccaauuaguu

SEQ ID NO: 21979 - RNA, 20 nt, Artificial Sequence
  spacer sequence TTCN PAM
agggaagaaaaaaacuuagu

SEQ ID NO: 21980 - RNA, 20 nt, Artificial Sequence
  spacer sequence TTCN PAM
cuagaaauacauuuauucua

SEQ ID NO: 21981 - RNA, 20 nt, Artificial Sequence
  spacer sequence TTCN PAM
ucccuagaaauacauuuauu

SEQ ID NO: 21982 - RNA, 20 nt, Artificial Sequence
  spacer sequence TTCN PAM
aaaaguaaaaaggggaggga

SEQ ID NO: 21983 - RNA, 20 nt, Artificial Sequence
  spacer sequence TTCN PAM
agcaggcuucaaaaaguaaa

SEQ ID NO: 21984 - RNA, 20 nt, Artificial Sequence
  spacer sequence TTCN PAM
aggaaaacagauuuccuccc

SEQ ID NO: 21985 - RNA, 20 nt, Artificial Sequence
  spacer sequence TTCN PAM
uagaauuccagcaggcuuca

SEQ ID NO: 21986 - RNA, 20 nt, Artificial Sequence
  spacer sequence TTCN PAM
uccccuugcucucuccuucc

SEQ ID NO: 21987 - RNA, 20 nt, Artificial Sequence
  spacer sequence TTCN PAM
ucacauacucaccaguacuc

SEQ ID NO: 21988 - RNA, 20 nt, Artificial Sequence
  spacer sequence TTCN PAM
cagacccaaaugcucugcuu

SEQ ID NO: 21989 - RNA, 20 nt, Artificial Sequence
  spacer sequence TTCN PAM
auaaaaucucagaauacaaa

SEQ ID NO: 21990 - RNA, 20 nt, Artificial Sequence
  spacer sequence TTCN PAM
gagauuuuauagaaguuggu

SEQ ID NO: 21991 - RNA, 20 nt, Artificial Sequence
  spacer sequence TTCN PAM
cauuucccugaaauguacuu

SEQ ID NO: 21992 - RNA, 20 nt, Artificial Sequence
  spacer sequence TTCN PAM
cugaaauguacuuuggugcu

SEQ ID NO: 21993 - RNA, 20 nt, Artificial Sequence
  spacer sequence TTCN PAM
gggaaaugagaaugcccuuu

SEQ ID NO: 21994 - RNA, 20 nt, Artificial Sequence
  spacer sequence TTCN PAM
ggguagcaccaaaguacauu

SEQ ID NO: 21995 - RNA, 20 nt, Artificial Sequence
  spacer sequence TTCN PAM
acuccagugguggguguuuu

SEQ ID NO: 21996 - RNA, 20 nt, Artificial Sequence
  spacer sequence TTCN PAM
cuuuagcuuuauuaagguau

SEQ ID NO: 21997 - RNA, 20 nt, Artificial Sequence
  spacer sequence TTCN PAM
uuuuaaguguacaguuggau

SEQ ID NO: 21998 - RNA, 20 nt, Artificial Sequence
  spacer sequence TTCN PAM
auuugccaguuguauacagc

SEQ ID NO: 21999 - RNA, 20 nt, Artificial Sequence
  spacer sequence TTCN PAM
guaucuugauuuugguggag

SEQ ID NO: 22000 - RNA, 20 nt, Artificial Sequence
  spacer sequence TTCN PAM
agacugguggacguguucug

SEQ ID NO: 22001 - RNA, 20 nt, Artificial Sequence
  spacer sequence TTCN PAM
cuaacccucugaccccuucc

SEQ ID NO: 22002 - RNA, 20 nt, Artificial Sequence
  spacer sequence TTCN PAM
uucuaaccacugaaccccca

SEQ ID NO: 22003 - RNA, 20 nt, Artificial Sequence
  spacer sequence TTCN PAM
aaccacugaacccccaccua

SEQ ID NO: 22004 - RNA, 20 nt, Artificial Sequence
  spacer sequence TTCN PAM
gugguuagaaggaagggguc

SEQ ID NO: 22005 - RNA, 20 nt, Artificial Sequence
  spacer sequence TTCN PAM
caacacuguggugguaggug

SEQ ID NO: 22006 - RNA, 20 nt, Artificial Sequence
  spacer sequence TTCN PAM
agaauuuguuacaaauggac

SEQ ID NO: 22007 - RNA, 20 nt, Artificial Sequence
  spacer sequence TTCN PAM
agaauucucaacacuguggu

SEQ ID NO: 22008 - RNA, 20 nt, Artificial Sequence
  spacer sequence TTCN PAM
uccacagagcagaaugauuc

SEQ ID NO: 22009 - RNA, 20 nt, Artificial Sequence
  spacer sequence TTCN PAM
acagagcagaaugauucugg

SEQ ID NO: 22010 - RNA, 20 nt, Artificial Sequence
  spacer sequence TTCN PAM
gcucuguggaagaaauuaaa

SEQ ID NO: 22011 - RNA, 20 nt, Artificial Sequence
  spacer sequence TTCN PAM
gggauucauccauggugugg

SEQ ID NO: 22012 - RNA, 20 nt, Artificial Sequence
  spacer sequence TTCN PAM
uccaugguguggaguguguu

SEQ ID NO: 22013 - RNA, 20 nt, Artificial Sequence
  spacer sequence TTCN PAM
uucuucuacuguugaguugu

SEQ ID NO: 22014 - RNA, 20 nt, Artificial Sequence
  spacer sequence TTCN PAM
ucuacuguugaguuguauuc

SEQ ID NO: 22015 - RNA, 20 nt, Artificial Sequence
  spacer sequence TTCN PAM
acuguugaguuguauuccac

SEQ ID NO: 22016 - RNA, 20 nt, Artificial Sequence
  spacer sequence TTCN PAM
accauagggcguuuauccau

SEQ ID NO: 22017 - RNA, 20 nt, Artificial Sequence
  spacer sequence TTCN PAM
accuauugguugccaugugg

SEQ ID NO: 22018 - RNA, 20 nt, Artificial Sequence
  spacer sequence TTCN PAM
uaguggucaaaaagugguca

SEQ ID NO: 22019 - RNA, 20 nt, Artificial Sequence
  spacer sequence TTCN PAM
uauaaacacaucuacacagu

SEQ ID NO: 22020 - RNA, 20 nt, Artificial Sequence
  spacer sequence TTCN PAM
cuuagguaaacaucuaaggc

SEQ ID NO: 22021 - RNA, 20 nt, Artificial Sequence
  spacer sequence TTCN PAM
agaacacagaaaagguuuug

SEQ ID NO: 22022 - RNA, 20 nt, Artificial Sequence
  spacer sequence TTCN PAM
cgaaaugccuuagauguuua

SEQ ID NO: 22023 - RNA, 20 nt, Artificial Sequence
  spacer sequence TTCN PAM
guguucucgaaaugccuuag

SEQ ID NO: 22024 - RNA, 20 nt, Artificial Sequence
  spacer sequence TTCN PAM
cuggagaguucaacuccaaa

SEQ ID NO: 22025 - RNA, 20 nt, Artificial Sequence
  spacer sequence TTCN PAM
acuccaaacccuauauccca

SEQ ID NO: 22026 - RNA, 20 nt, Artificial Sequence
  spacer sequence TTCN PAM
gaauagaaaccucuccacua

SEQ ID NO: 22027 - RNA, 20 nt, Artificial Sequence
  spacer sequence TTCN PAM
gaauaggaugacauuuggua

SEQ ID NO: 22028 - RNA, 20 nt, Artificial Sequence
  spacer sequence TTCN PAM
auucggaauaggaugacauu

SEQ ID NO: 22029 - RNA, 20 nt, Artificial Sequence
  spacer sequence TTCN PAM
uuaguguaguggagagguuu

SEQ ID NO: 22030 - RNA, 20 nt, Artificial Sequence
  spacer sequence TTCN PAM
caucauuuccuuaguguagu

SEQ ID NO: 22031 - RNA, 20 nt, Artificial Sequence
  spacer sequence TTCN PAM
uaaaaugggcauucauuuga

SEQ ID NO: 22032 - RNA, 20 nt, Artificial Sequence
  spacer sequence TTCN PAM
uuugaaucaggccaaauaaa

SEQ ID NO: 22033 - RNA, 20 nt, Artificial Sequence
  spacer sequence TTCN PAM
aaugaaugcccauuuuaaga

SEQ ID NO: 22034 - RNA, 20 nt, Artificial Sequence
  spacer sequence TTCN PAM
gaguccuaagagcccccacu

SEQ ID NO: 22035 - RNA, 20 nt, Artificial Sequence
  spacer sequence TTCN PAM
gagcuagugggggcucuuag

SEQ ID NO: 22036 - RNA, 20 nt, Artificial Sequence
  spacer sequence TTCN PAM
accuugccaaaggccuuggg

SEQ ID NO: 22037 - RNA, 20 nt, Artificial Sequence
  spacer sequence TTCN PAM
caaggccuuuggcaagguag

SEQ ID NO: 22038 - RNA, 20 nt, Artificial Sequence
  spacer sequence TTCN PAM
ucccaaggccuuuggcaagg

SEQ ID NO: 22039 - RNA, 20 nt, Artificial Sequence
  spacer sequence TTCN PAM
gugcaggaaauuaagauucc

SEQ ID NO: 22040 - RNA, 20 nt, Artificial Sequence
  spacer sequence TTCN PAM
ugcacugaagcuuugcuguc

SEQ ID NO: 22041 - RNA, 20 nt, Artificial Sequence
  spacer sequence TTCN PAM
cccugccucccccuccccca

SEQ ID NO: 22042 - RNA, 20 nt, Artificial Sequence
  spacer sequence TTCN PAM
ccucugaucccccagcccug

SEQ ID NO: 22043 - RNA, 20 nt, Artificial Sequence
  spacer sequence TTCN PAM
uguucaccucugauccccca

SEQ ID NO: 22044 - RNA, 20 nt, Artificial Sequence
  spacer sequence TTCN PAM
gcuuccuguucaccucugau

SEQ ID NO: 22045 - RNA, 20 nt, Artificial Sequence
  spacer sequence TTCN PAM
gccacugccugaggccacuc

SEQ ID NO: 22046 - RNA, 20 nt, Artificial Sequence
  spacer sequence TTCN PAM
uuuaaucagcuuccgccacu

SEQ ID NO: 22047 - RNA, 20 nt, Artificial Sequence
  spacer sequence TTCN PAM
ccuccacuccccguaccuuc

SEQ ID NO: 22048 - RNA, 20 nt, Artificial Sequence
  spacer sequence TTCN PAM
cccccuugcauuguugucua

SEQ ID NO: 22049 - RNA, 20 nt, Artificial Sequence
  spacer sequence TTCN PAM
guuucucccccuugcauugu

SEQ ID NO: 22050 - RNA, 20 nt, Artificial Sequence
  spacer sequence TTCN PAM
ucaguuucucccccuugcau

SEQ ID NO: 22051 - RNA, 20 nt, Artificial Sequence
  spacer sequence TTCN PAM
guuuucuucaguuucucccc

SEQ ID NO: 22052 - RNA, 20 nt, Artificial Sequence
  spacer sequence TTCN PAM
cucuguuuauugccaguagu

SEQ ID NO: 22053 - RNA, 20 nt, Artificial Sequence
  spacer sequence TTCN PAM
cuuucucucuguuuauugcc

SEQ ID NO: 22054 - RNA, 20 nt, Artificial Sequence
  spacer sequence TTCN PAM
uaaguaauguaggugugccu

SEQ ID NO: 22055 - RNA, 20 nt, Artificial Sequence
  spacer sequence TTCN PAM
uacgccuagggcaauaaaua

SEQ ID NO: 22056 - RNA, 20 nt, Artificial Sequence
  spacer sequence TTCN PAM
cacucucccauguggccugu

SEQ ID NO: 22057 - RNA, 20 nt, Artificial Sequence
  spacer sequence TTCN PAM
caucugugcauggccucuaa

SEQ ID NO: 22058 - RNA, 20 nt, Artificial Sequence
  spacer sequence TTCN PAM
cuccccauacucccaucuug

SEQ ID NO: 22059 - RNA, 20 nt, Artificial Sequence
  spacer sequence TTCN PAM
acucuucucuccccauacuc

SEQ ID NO: 22060 - RNA, 20 nt, Artificial Sequence
  spacer sequence TTCN PAM
uccccuuugauaucucaucu

SEQ ID NO: 22061 - RNA, 20 nt, Artificial Sequence
  spacer sequence TTCN PAM
uuccaucucccuaaucucca

SEQ ID NO: 22062 - RNA, 20 nt, Artificial Sequence
  spacer sequence TTCN PAM
aucucccuaaucuccaauug

SEQ ID NO: 22063 - RNA, 20 nt, Artificial Sequence
  spacer sequence TTCN PAM
gugaugacaaauaacuccua

SEQ ID NO: 22064 - RNA, 20 nt, Artificial Sequence
  spacer sequence TTCN PAM
uaaugauuuaucaccaaaug

SEQ ID NO: 22065 - RNA, 20 nt, Artificial Sequence
  spacer sequence TTCN PAM
uucuucagcuggaauuuaaa

SEQ ID NO: 22066 - RNA, 20 nt, Artificial Sequence
  spacer sequence TTCN PAM
ucagcuggaauuuaaaauau

SEQ ID NO: 22067 - RNA, 20 nt, Artificial Sequence
  spacer sequence TTCN PAM
gcuggaauuuaaaauaugga

SEQ ID NO: 22068 - RNA, 20 nt, Artificial Sequence
  spacer sequence TTCN PAM
agcugaagaaagaacauuug

SEQ ID NO: 22069 - RNA, 20 nt, Artificial Sequence
  spacer sequence TTCN PAM
uauuuuacggaugaguccau

SEQ ID NO: 22070 - RNA, 20 nt, Artificial Sequence
  spacer sequence TTCN PAM
uaggguuuguaugaaaauaa

SEQ ID NO: 22071 - RNA, 20 nt, Artificial Sequence
  spacer sequence TTCN PAM
uacaaacccuaugaagcaua

SEQ ID NO: 22072 - RNA, 20 nt, Artificial Sequence
  spacer sequence TTCN PAM
uagagcagaguaagugcucc

SEQ ID NO: 22073 - RNA, 20 nt, Artificial Sequence
  spacer sequence TTCN PAM
caagcucggagcacuuacuc

SEQ ID NO: 22074 - RNA, 20 nt, Artificial Sequence
  spacer sequence TTCN PAM
gcugagguguaacuaauaaa

SEQ ID NO: 22075 - RNA, 20 nt, Artificial Sequence
  spacer sequence TTCN PAM
ccaauuccuaguuuggguca

SEQ ID NO: 22076 - RNA, 20 nt, Artificial Sequence
  spacer sequence TTCN PAM
uaguuugggucagaagaaaa

SEQ ID NO: 22077 - RNA, 20 nt, Artificial Sequence
  spacer sequence TTCN PAM
gacccaaacuaggaauuggg

SEQ ID NO: 22078 - RNA, 20 nt, Artificial Sequence
  spacer sequence TTCN PAM
ucugacccaaacuaggaauu

SEQ ID NO: 22079 - RNA, 20 nt, Artificial Sequence
  spacer sequence TTCN PAM
cuuuucuucugacccaaacu

SEQ ID NO: 22080 - RNA, 20 nt, Artificial Sequence
  spacer sequence TTCN PAM
ucucccuuuucccuuuucuu

SEQ ID NO: 22081 - RNA, 20 nt, Artificial Sequence
  spacer sequence TTCN PAM
uuuuuccucucccuuuuccc

SEQ ID NO: 22082 - RNA, 20 nt, Artificial Sequence
  spacer sequence TTCN PAM
uuuccuuuuuccucucccuu

SEQ ID NO: 22083 - RNA, 20 nt, Artificial Sequence
  spacer sequence TTCN PAM
caacugacuugccucccccu

SEQ ID NO: 22084 - RNA, 20 nt, Artificial Sequence
  spacer sequence TTCN PAM
ucugucgggcuguccaccca

SEQ ID NO: 22085 - RNA, 20 nt, Artificial Sequence
  spacer sequence TTCN PAM
ccugucugcacucuccccuc

SEQ ID NO: 22086 - RNA, 20 nt, Artificial Sequence
  spacer sequence TTCN PAM
ccuccuuuacaauuuuggga

SEQ ID NO: 22087 - RNA, 20 nt, Artificial Sequence
  spacer sequence TTCN PAM
uucccauugagaaauaaaau

SEQ ID NO: 22088 - RNA, 20 nt, Artificial Sequence
  spacer sequence TTCN PAM
cauugagaaauaaaauccaa

SEQ ID NO: 22089 - RNA, 20 nt, Artificial Sequence
  spacer sequence TTCN PAM
caaugggaaugaaauaauuu

SEQ ID NO: 22090 - RNA, 20 nt, Artificial Sequence
  spacer sequence TTCN PAM
ccaucaccaagagagccuuc

SEQ ID NO: 22091 - RNA, 20 nt, Artificial Sequence
  spacer sequence TTCN PAM
gaaagaggccccccugggca

SEQ ID NO: 22092 - RNA, 20 nt, Artificial Sequence
  spacer sequence TTCN PAM
gaaggcucucuuggugaugg

SEQ ID NO: 22093 - RNA, 20 nt, Artificial Sequence
  spacer sequence TTCN PAM
accccacccacgcccccacc

SEQ ID NO: 22094 - RNA, 20 nt, Artificial Sequence
  spacer sequence TTCN PAM
uggagccugugauaaaagca

SEQ ID NO: 22095 - RNA, 20 nt, Artificial Sequence
  spacer sequence TTCN PAM
aaguuguauugacccuggug

SEQ ID NO: 22096 - RNA, 20 nt, Artificial Sequence
  spacer sequence TTCN PAM
ggccuauguuauuaccugua

SEQ ID NO: 22097 - RNA, 20 nt, Artificial Sequence
  spacer sequence TTCN PAM
agugcaaaguccauacaggu

SEQ ID NO: 22098 - RNA, 20 nt, Artificial Sequence
  spacer sequence TTCN PAM
gccaucucacuacagauaac

SEQ ID NO: 22099 - RNA, 20 nt, Artificial Sequence
  spacer sequence TTCN PAM
uuaucacaggaauagcaccc

SEQ ID NO: 22100 - RNA, 20 nt, Artificial Sequence
  spacer sequence TTCN PAM
ugugauaaggaaggcagcua

SEQ ID NO: 22101 - RNA, 20 nt, Artificial Sequence
  spacer sequence TTCN PAM
acucugagguacugauggac

SEQ ID NO: 22102 - RNA, 20 nt, Artificial Sequence
  spacer sequence TTCN PAM
aggguggggugcagacauuc

SEQ ID NO: 22103 - RNA, 20 nt, Artificial Sequence
  spacer sequence TTCN PAM
cugccuguugugaugcuuac

SEQ ID NO: 22104 - RNA, 20 nt, Artificial Sequence
  spacer sequence TTCN PAM
cuaaaagucaaaauauucuc

SEQ ID NO: 22105 - RNA, 20 nt, Artificial Sequence
  spacer sequence TTCN PAM
caaugggcccucaaucagca

SEQ ID NO: 22106 - RNA, 20 nt, Artificial Sequence
  spacer sequence TTCN PAM
agguaccuuuuguguguaug

SEQ ID NO: 22107 - RNA, 20 nt, Artificial Sequence
  spacer sequence TTCN PAM
uuuccugcucaaagacaggc

SEQ ID NO: 22108 - RNA, 20 nt, Artificial Sequence
  spacer sequence TTCN PAM
ugcucaaagacaggcaauuc

SEQ ID NO: 22109 - RNA, 20 nt, Artificial Sequence
  spacer sequence TTCN PAM
auaccccuucccccaaccaa

SEQ ID NO: 22110 - RNA, 20 nt, Artificial Sequence
  spacer sequence TTCN PAM
cccaaccaaaaacccuugcc

SEQ ID NO: 22111 - RNA, 20 nt, Artificial Sequence
  spacer sequence TTCN PAM
cugccccaggcucccauggu

SEQ ID NO: 22112 - RNA, 20 nt, Artificial Sequence
  spacer sequence TTCN PAM
cugugccuucucugccccag

SEQ ID NO: 22113 - RNA, 20 nt, Artificial Sequence
  spacer sequence TTCN PAM
aggcucuaaauggugcuguc

SEQ ID NO: 22114 - RNA, 20 nt, Artificial Sequence
  spacer sequence TTCN PAM
gagagucucuaaauuacaag

SEQ ID NO: 22115 - RNA, 20 nt, Artificial Sequence
  spacer sequence TTCN PAM
cuauucuuagcuauuuuuua

SEQ ID NO: 22116 - RNA, 20 nt, Artificial Sequence
  spacer sequence TTCN PAM
uagcuauuuuuuaaaacacc

SEQ ID NO: 22117 - RNA, 20 nt, Artificial Sequence
  spacer sequence TTCN PAM
uagguguuuuaaaaaauagc

SEQ ID NO: 22118 - RNA, 20 nt, Artificial Sequence
  spacer sequence TTCN PAM
agagcugcaguauguuucuu

SEQ ID NO: 22119 - RNA, 20 nt, Artificial Sequence
  spacer sequence TTCN PAM
cuuuuccagagcugcaguau

SEQ ID NO: 22120 - RNA, 20 nt, Artificial Sequence
  spacer sequence TTCN PAM
cuuugguuuguuuguucucu

SEQ ID NO: 22121 - RNA, 20 nt, Artificial Sequence
  spacer sequence TTCN PAM
cauaugagggugaccucugg

SEQ ID NO: 22122 - RNA, 20 nt, Artificial Sequence
  spacer sequence TTCN PAM
uuaucaauugacuuuucaca

SEQ ID NO: 22123 - RNA, 20 nt, Artificial Sequence
  spacer sequence TTCN PAM
aucaucuccccuccgguuau

SEQ ID NO: 22124 - RNA, 20 nt, Artificial Sequence
  spacer sequence TTCN PAM
ugcacaggugcauugcuuuc

SEQ ID NO: 22125 - RNA, 20 nt, Artificial Sequence
  spacer sequence TTCN PAM
guaauccauuuccugcacag

SEQ ID NO: 22126 - RNA, 20 nt, Artificial Sequence
  spacer sequence TTCN PAM
cuguuuccguaauccauuuc

SEQ ID NO: 22127 - RNA, 20 nt, Artificial Sequence
  spacer sequence TTCN PAM
ugaaaucccagaaaaccaga

SEQ ID NO: 22128 - RNA, 20 nt, Artificial Sequence
  spacer sequence TTCN PAM
ugaacaauucccuguuuccg

SEQ ID NO: 22129 - RNA, 20 nt, Artificial Sequence
  spacer sequence TTCN PAM
gggauuucaugaacaauucc

SEQ ID NO: 22130 - RNA, 20 nt, Artificial Sequence
  spacer sequence TTCN PAM
gguuuucugggauuucauga

SEQ ID NO: 22131 - RNA, 20 nt, Artificial Sequence
  spacer sequence TTCN PAM
cgguucugguuuucugggau

SEQ ID NO: 22132 - RNA, 20 nt, Artificial Sequence
  spacer sequence TTCN PAM
ggaagucggaaaaacaaauc

SEQ ID NO: 22133 - RNA, 20 nt, Artificial Sequence
  spacer sequence TTCN PAM
agaacuuucccgguucuggu

SEQ ID NO: 22134 - RNA, 20 nt, Artificial Sequence
  spacer sequence TTCN PAM
gacuuccagaacuuucccgg

SEQ ID NO: 22135 - RNA, 20 nt, Artificial Sequence
  spacer sequence TTCN PAM
auugcuuaagucaugauuug

SEQ ID NO: 22136 - RNA, 20 nt, Artificial Sequence
  spacer sequence TTCN PAM
guaaacguguauuggacuuc

SEQ ID NO: 22137 - RNA, 20 nt, Artificial Sequence
  spacer sequence TTCN PAM
gcccuggacacuugccucau

SEQ ID NO: 22138 - RNA, 20 nt, Artificial Sequence
  spacer sequence TTCN PAM
caaagcuccaguucugcccu

SEQ ID NO: 22139 - RNA, 20 nt, Artificial Sequence
  spacer sequence TTCN PAM
caggcagagacagagcacua

SEQ ID NO: 22140 - RNA, 20 nt, Artificial Sequence
  spacer sequence TTCN PAM
gaguagccugaagcaggaaa

SEQ ID NO: 22141 - RNA, 20 nt, Artificial Sequence
  spacer sequence TTCN PAM
ggcuacucugaacucacuuu

SEQ ID NO: 22142 - RNA, 20 nt, Artificial Sequence
  spacer sequence TTCN PAM
ugcuucaggcuacucugaac

SEQ ID NO: 22143 - RNA, 20 nt, Artificial Sequence
  spacer sequence TTCN PAM
cucuuuccugcuucaggcua

SEQ ID NO: 22144 - RNA, 20 nt, Artificial Sequence
  spacer sequence TTCN PAM
acuuugcugcagguucaagg

SEQ ID NO: 22145 - RNA, 20 nt, Artificial Sequence
  spacer sequence TTCN PAM
aggcaaggauuugagacagu

SEQ ID NO: 22146 - RNA, 20 nt, Artificial Sequence
  spacer sequence TTCN PAM
ggaagagccuggugaguaca

SEQ ID NO: 22147 - RNA, 20 nt, Artificial Sequence
  spacer sequence TTCN PAM
agaagggguaacugucucaa

SEQ ID NO: 22148 - RNA, 20 nt, Artificial Sequence
  spacer sequence TTCN PAM
cucccagcagccagcagggg

SEQ ID NO: 22149 - RNA, 20 nt, Artificial Sequence
  spacer sequence TTCN PAM
auaaauggcccaggccccug

SEQ ID NO: 22150 - RNA, 20 nt, Artificial Sequence
  spacer sequence TTCN PAM
cacucuagguuccacuguga

SEQ ID NO: 22151 - RNA, 20 nt, Artificial Sequence
  spacer sequence TTCN PAM
acugugagugcucucucucu

SEQ ID NO: 22152 - RNA, 20 nt, Artificial Sequence
  spacer sequence TTCN PAM
ucaaaucucccucacuggau

SEQ ID NO: 22153 - RNA, 20 nt, Artificial Sequence
  spacer sequence TTCN PAM
ggccuaugacugugacaucc

SEQ ID NO: 22154 - RNA, 20 nt, Artificial Sequence
  spacer sequence TTCN PAM
guuugcaugcugcuuuucag

SEQ ID NO: 22155 - RNA, 20 nt, Artificial Sequence
  spacer sequence TTCN PAM
ccauggacagucauaagaga

SEQ ID NO: 22156 - RNA, 20 nt, Artificial Sequence
  spacer sequence TTCN PAM
cucaucucuuaugacugucc

SEQ ID NO: 22157 - RNA, 20 nt, Artificial Sequence
  spacer sequence TTCN PAM
gucuucacgauuacuucacg

SEQ ID NO: 22158 - RNA, 20 nt, Artificial Sequence
  spacer sequence TTCN PAM
cgauuacuucacgauaaauc

SEQ ID NO: 22159 - RNA, 20 nt, Artificial Sequence
  spacer sequence TTCN PAM
cgauaaaucuggauuccaaa

SEQ ID NO: 22160 - RNA, 20 nt, Artificial Sequence
  spacer sequence TTCN PAM
aaagggacuauaagcucuca

SEQ ID NO: 22161 - RNA, 20 nt, Artificial Sequence
  spacer sequence TTCN PAM
augugagagcuuauaguccc

SEQ ID NO: 22162 - RNA, 20 nt, Artificial Sequence
  spacer sequence TTCN PAM
uuccaugugagagcuuauag

SEQ ID NO: 22163 - RNA, 20 nt, Artificial Sequence
  spacer sequence TTCN PAM
aauucccuuuagcuagcauc

SEQ ID NO: 22164 - RNA, 20 nt, Artificial Sequence
  spacer sequence TTCN PAM
cuuuagcuagcauccccuaa

SEQ ID NO: 22165 - RNA, 20 nt, Artificial Sequence
  spacer sequence TTCN PAM
uugcagccuuccuuuucucu

SEQ ID NO: 22166 - RNA, 20 nt, Artificial Sequence
  spacer sequence TTCN PAM
uuuucucuagcaaaguccuu

SEQ ID NO: 22167 - RNA, 20 nt, Artificial Sequence
  spacer sequence TTCN PAM
cuagcaaaguccuuccaugc

SEQ ID NO: 22168 - RNA, 20 nt, Artificial Sequence
  spacer sequence TTCN PAM
augcaguagcuaaugaccug

SEQ ID NO: 22169 - RNA, 20 nt, Artificial Sequence
  spacer sequence TTCN PAM
cuagcucauuaaguguuuac

SEQ ID NO: 22170 - RNA, 20 nt, Artificial Sequence
  spacer sequence TTCN PAM
auugaaaggaauaccacugu

SEQ ID NO: 22171 - RNA, 20 nt, Artificial Sequence
  spacer sequence TTCN PAM
auggaauguuucucuagcuc

SEQ ID NO: 22172 - RNA, 20 nt, Artificial Sequence
  spacer sequence TTCN PAM
uuucaauggaauguuucucu

SEQ ID NO: 22173 - RNA, 20 nt, Artificial Sequence
  spacer sequence TTCN PAM
ccccucuuuacaaaaggaug

SEQ ID NO: 22174 - RNA, 20 nt, Artificial Sequence
  spacer sequence TTCN PAM
uuuuacaaaagauuuucccc

SEQ ID NO: 22175 - RNA, 20 nt, Artificial Sequence
  spacer sequence TTCN PAM
gaauaugaauagcuaguauu

SEQ ID NO: 22176 - RNA, 20 nt, Artificial Sequence
  spacer sequence TTCN PAM
gaaaaaucugacuugaucaa

SEQ ID NO: 22177 - RNA, 20 nt, Artificial Sequence
  spacer sequence TTCN PAM
uauucugaaaaaucugacuu

SEQ ID NO: 22178 - RNA, 20 nt, Artificial Sequence
  spacer sequence TTCN PAM
agcauauaugaacugucuuu

SEQ ID NO: 22179 - RNA, 20 nt, Artificial Sequence
  spacer sequence TTCN PAM
uauaugcuugaauacuagcu

SEQ ID NO: 22180 - RNA, 20 nt, Artificial Sequence
  spacer sequence TTCN PAM
agggauugauuaacuuaaag

SEQ ID NO: 22181 - RNA, 20 nt, Artificial Sequence
  spacer sequence TTCN PAM
aagcacucucauauauccuu

SEQ ID NO: 22182 - RNA, 20 nt, Artificial Sequence
  spacer sequence TTCN PAM
ggagcggcaguuuaagucua

SEQ ID NO: 22183 - RNA, 20 nt, Artificial Sequence
  spacer sequence TTCN PAM
auucaggagcggcaguuuaa

SEQ ID NO: 22184 - RNA, 20 nt, Artificial Sequence
  spacer sequence TTCN PAM
aauucaauucaggagcggca

SEQ ID NO: 22185 - RNA, 20 nt, Artificial Sequence
  spacer sequence TTCN PAM
agguagacagauucauggcc

SEQ ID NO: 22186 - RNA, 20 nt, Artificial Sequence
  spacer sequence TTCN PAM
uggccccuaacaucaggaau

SEQ ID NO: 22187 - RNA, 20 nt, Artificial Sequence
  spacer sequence TTCN PAM
ugauguuaggggccaugaau

SEQ ID NO: 22188 - RNA, 20 nt, Artificial Sequence
  spacer sequence TTCN PAM
agcugauuccugauguuagg

SEQ ID NO: 22189 - RNA, 20 nt, Artificial Sequence
  spacer sequence TTCN PAM
acuggauggcacuuugcacc

SEQ ID NO: 22190 - RNA, 20 nt, Artificial Sequence
  spacer sequence TTCN PAM
agagcaauuuaacauccuuu

SEQ ID NO: 22191 - RNA, 20 nt, Artificial Sequence
  spacer sequence TTCN PAM
aaaaaaaguaaaggauguua

SEQ ID NO: 22192 - RNA, 20 nt, Artificial Sequence
  spacer sequence TTCN PAM
gguccagccuccuacucuuc

SEQ ID NO: 22193 - RNA, 20 nt, Artificial Sequence
  spacer sequence TTCN PAM
cuuucucugaacuaucaccu

SEQ ID NO: 22194 - RNA, 20 nt, Artificial Sequence
  spacer sequence TTCN PAM
cugaacuaucaccuuacuau

SEQ ID NO: 22195 - RNA, 20 nt, Artificial Sequence
  spacer sequence TTCN PAM
gagaaagagaagaguaggag

SEQ ID NO: 22196 - RNA, 20 nt, Artificial Sequence
  spacer sequence TTCN PAM
cccaaaggacucaguggccu

SEQ ID NO: 22197 - RNA, 20 nt, Artificial Sequence
  spacer sequence TTCN PAM
cccuuugcugaugauccagu

SEQ ID NO: 22198 - RNA, 20 nt, Artificial Sequence
  spacer sequence TTCN PAM
cuacuggaucaucagcaaag

SEQ ID NO: 22199 - RNA, 20 nt, Artificial Sequence
  spacer sequence TTCN PAM
uuuaggacaaugugcaggau

SEQ ID NO: 22200 - RNA, 20 nt, Artificial Sequence
  spacer sequence TTCN PAM
ucugcaggauggaagugagc

SEQ ID NO: 22201 - RNA, 20 nt, Artificial Sequence
  spacer sequence TTCN PAM
auccugcagaggaagcuugg

SEQ ID NO: 22202 - RNA, 20 nt, Artificial Sequence
  spacer sequence TTCN PAM
aucaccuggcucacuuccau

SEQ ID NO: 22203 - RNA, 20 nt, Artificial Sequence
  spacer sequence TTCN PAM
uuggccgaggaugaccccau

SEQ ID NO: 22204 - RNA, 20 nt, Artificial Sequence
  spacer sequence TTCN PAM
cuuugggggaggacaucacu

SEQ ID NO: 22205 - RNA, 20 nt, Artificial Sequence
  spacer sequence TTCN PAM
cccagacuuuugacucaccc

SEQ ID NO: 22206 - RNA, 20 nt, Artificial Sequence
  spacer sequence TTCN PAM
ugcuuggggucugacccagu

SEQ ID NO: 22207 - RNA, 20 nt, Artificial Sequence
  spacer sequence TTCN PAM
gugcccagggcugcuggguc

SEQ ID NO: 22208 - RNA, 20 nt, Artificial Sequence
  spacer sequence TTCN PAM
gacaggcccugcugguuauc

SEQ ID NO: 22209 - RNA, 20 nt, Artificial Sequence
  spacer sequence TTCN PAM
guguccagggccucuucuga

SEQ ID NO: 22210 - RNA, 20 nt, Artificial Sequence
  spacer sequence TTCN PAM
cagggcacacccugugaucu

SEQ ID NO: 22211 - RNA, 20 nt, Artificial Sequence
  spacer sequence TTCN PAM
ugguaccaggaugaugcaau

SEQ ID NO: 22212 - RNA, 20 nt, Artificial Sequence
  spacer sequence TTCN PAM
cuuccuagaauuggccuggg

SEQ ID NO: 22213 - RNA, 20 nt, Artificial Sequence
  spacer sequence TTCN PAM
uagaauuggccugggacauu

SEQ ID NO: 22214 - RNA, 20 nt, Artificial Sequence
  spacer sequence TTCN PAM
aggaagggaaguggguaugg

SEQ ID NO: 22215 - RNA, 20 nt, Artificial Sequence
  spacer sequence TTCN PAM
uuauuuagccaccucuggca

SEQ ID NO: 22216 - RNA, 20 nt, Artificial Sequence
  spacer sequence TTCN PAM
aauuuuaauagcaaauaggc

SEQ ID NO: 22217 - RNA, 20 nt, Artificial Sequence
  spacer sequence TTCN PAM
cuuuacugaucuuaugugag

SEQ ID NO: 22218 - RNA, 20 nt, Artificial Sequence
  spacer sequence TTCN PAM
uucucuuuacugaucuuaug

SEQ ID NO: 22219 - RNA, 20 nt, Artificial Sequence
  spacer sequence TTCN PAM
ccccuugucaccucaucugc

SEQ ID NO: 22220 - RNA, 20 nt, Artificial Sequence
  spacer sequence TTCN PAM
uacagacccagccagacugc

SEQ ID NO: 22221 - RNA, 20 nt, Artificial Sequence
  spacer sequence TTCN PAM
cugaggagcuagagacuugu

SEQ ID NO: 22222 - RNA, 20 nt, Artificial Sequence
  spacer sequence TTCN PAM
uuaagccacaagucucuagc

SEQ ID NO: 22223 - RNA, 20 nt, Artificial Sequence
  spacer sequence TTCN PAM
aauguauguauaagguacau

SEQ ID NO: 22224 - RNA, 20 nt, Artificial Sequence
  spacer sequence TTCN PAM
ggaugaguuggacagucauc

SEQ ID NO: 22225 - RNA, 20 nt, Artificial Sequence
  spacer sequence TTCN PAM
auuagacaaacguaguuucu

SEQ ID NO: 22226 - RNA, 20 nt, Artificial Sequence
  spacer sequence TTCN PAM
uguucuauuagacaaacgua

SEQ ID NO: 22227 - RNA, 20 nt, Artificial Sequence
  spacer sequence TTCN PAM
ucuucauuuuccauuccacu

SEQ ID NO: 22228 - RNA, 20 nt, Artificial Sequence
  spacer sequence TTCN PAM
ucauuuuccauuccacugau

SEQ ID NO: 22229 - RNA, 20 nt, Artificial Sequence
  spacer sequence TTCN PAM
uuuuccauuccacugauucu

SEQ ID NO: 22230 - RNA, 20 nt, Artificial Sequence
  spacer sequence TTCN PAM
auuccacugauucugucccc

SEQ ID NO: 22231 - RNA, 20 nt, Artificial Sequence
  spacer sequence TTCN PAM
acugauucuguccccacaca

SEQ ID NO: 22232 - RNA, 20 nt, Artificial Sequence
  spacer sequence TTCN PAM
guccccacacaggcauccaa

SEQ ID NO: 22233 - RNA, 20 nt, Artificial Sequence
  spacer sequence TTCN PAM
cuuuggaugccugugugggg

SEQ ID NO: 22234 - RNA, 20 nt, Artificial Sequence
  spacer sequence TTCN PAM
ucccuuuggaugccugugug

SEQ ID NO: 22235 - RNA, 20 nt, Artificial Sequence
  spacer sequence TTCN PAM
cgcuggcuuuucugggagau

SEQ ID NO: 22236 - RNA, 20 nt, Artificial Sequence
  spacer sequence TTCN PAM
gggagaucacccuacaaugu

SEQ ID NO: 22237 - RNA, 20 nt, Artificial Sequence
  spacer sequence TTCN PAM
ccaguauucagguuucuggg

SEQ ID NO: 22238 - RNA, 20 nt, Artificial Sequence
  spacer sequence TTCN PAM
gguuucugggcugccauuau

SEQ ID NO: 22239 - RNA, 20 nt, Artificial Sequence
  spacer sequence TTCN PAM
gggcugccauuaucuucucu

SEQ ID NO: 22240 - RNA, 20 nt, Artificial Sequence
  spacer sequence TTCN PAM
cuggucucggggcccaagcc

SEQ ID NO: 22241 - RNA, 20 nt, Artificial Sequence
  spacer sequence TTCN PAM
ccagcucuuuggcuugggcc

SEQ ID NO: 22242 - RNA, 20 nt, Artificial Sequence
  spacer sequence TTCN PAM
guggccagauacuguucucc

SEQ ID NO: 22243 - RNA, 20 nt, Artificial Sequence
  spacer sequence TTCN PAM
gucacucccacagagcugca

SEQ ID NO: 22244 - RNA, 20 nt, Artificial Sequence
  spacer sequence TTCN PAM
gggccacagugcuggaggcu

SEQ ID NO: 22245 - RNA, 20 nt, Artificial Sequence
  spacer sequence TTCN PAM
gccuccagcacuguggccca

SEQ ID NO: 22246 - RNA, 20 nt, Artificial Sequence
  spacer sequence TTCN PAM
uucaggagcaauacuccugg

SEQ ID NO: 22247 - RNA, 20 nt, Artificial Sequence
  spacer sequence TTCN PAM
ggagcaauacuccugggaaa

SEQ ID NO: 22248 - RNA, 20 nt, Artificial Sequence
  spacer sequence TTCN PAM
caggaguauugcuccugaag

SEQ ID NO: 22249 - RNA, 20 nt, Artificial Sequence
  spacer sequence TTCN PAM
guaacuccucuaagugauau

SEQ ID NO: 22250 - RNA, 20 nt, Artificial Sequence
  spacer sequence TTCN PAM
ucccaggggcaaaaaaggaa

SEQ ID NO: 22251 - RNA, 20 nt, Artificial Sequence
  spacer sequence TTCN PAM
caggggcaaaaaaggaaauu

SEQ ID NO: 22252 - RNA, 20 nt, Artificial Sequence
  spacer sequence TTCN PAM
uuuuuugccccugggaagaa

SEQ ID NO: 22253 - RNA, 20 nt, Artificial Sequence
  spacer sequence TTCN PAM
ccugcuggcuagguggcccc

SEQ ID NO: 22254 - RNA, 20 nt, Artificial Sequence
  spacer sequence TTCN PAM
acgucccacuuucucaagac

SEQ ID NO: 22255 - RNA, 20 nt, Artificial Sequence
  spacer sequence TTCN PAM
caagacaguguuugccacgg

SEQ ID NO: 22256 - RNA, 20 nt, Artificial Sequence
  spacer sequence TTCN PAM
ugggccucacugacaccugc

SEQ ID NO: 22257 - RNA, 20 nt, Artificial Sequence
  spacer sequence TTCN PAM
uguuccugggccucacugac

SEQ ID NO: 22258 - RNA, 20 nt, Artificial Sequence
  spacer sequence TTCN PAM
gugcuguccaccccuuuggu

SEQ ID NO: 22259 - RNA, 20 nt, Artificial Sequence
  spacer sequence TTCN PAM
uucagugcuguccaccccuu

SEQ ID NO: 22260 - RNA, 20 nt, Artificial Sequence
  spacer sequence TTCN PAM
cagcagccucuccacucaag

SEQ ID NO: 22261 - RNA, 20 nt, Artificial Sequence
  spacer sequence TTCN PAM
acaugcuguggcccaggugc

SEQ ID NO: 22262 - RNA, 20 nt, Artificial Sequence
  spacer sequence TTCN PAM
uaagcugccugguacucugc

SEQ ID NO: 22263 - RNA, 20 nt, Artificial Sequence
  spacer sequence TTCN PAM
cuuccuccuaauccauaagc

SEQ ID NO: 22264 - RNA, 20 nt, Artificial Sequence
  spacer sequence TTCN PAM
uccuaauccauaagcaccag

SEQ ID NO: 22265 - RNA, 20 nt, Artificial Sequence
  spacer sequence TTCN PAM
ggagcugcacauggggcuug

SEQ ID NO: 22266 - RNA, 20 nt, Artificial Sequence
  spacer sequence TTCN PAM
gagagagcagccaccgaccu

SEQ ID NO: 22267 - RNA, 20 nt, Artificial Sequence
  spacer sequence TTCN PAM
guccucugcccaggccugcc

SEQ ID NO: 22268 - RNA, 20 nt, Artificial Sequence
  spacer sequence TTCN PAM
auccagggcacagccgcagg

SEQ ID NO: 22269 - RNA, 20 nt, Artificial Sequence
  spacer sequence TTCN PAM
cucucaagaccaccgcucuc

SEQ ID NO: 22270 - RNA, 20 nt, Artificial Sequence
  spacer sequence TTCN PAM
cggggccaguucccccauua

SEQ ID NO: 22271 - RNA, 20 nt, Artificial Sequence
  spacer sequence TTCN PAM
cccauuaugcacugccucug

SEQ ID NO: 22272 - RNA, 20 nt, Artificial Sequence
  spacer sequence TTCN PAM
ccgccaccauuaaccgugcc

SEQ ID NO: 22273 - RNA, 20 nt, Artificial Sequence
  spacer sequence TTCN PAM
gagaagggcagggagcagcu

SEQ ID NO: 22274 - RNA, 20 nt, Artificial Sequence
  spacer sequence TTCN PAM
cugaaggcacaucugucagc

SEQ ID NO: 22275 - RNA, 20 nt, Artificial Sequence
  spacer sequence TTCN PAM
ugcugggaugauugcucugg

SEQ ID NO: 22276 - RNA, 20 nt, Artificial Sequence
  spacer sequence TTCN PAM
cuggcucuuggguaggcugc

SEQ ID NO: 22277 - RNA, 20 nt, Artificial Sequence
  spacer sequence TTCN PAM
uucccuggcucuuggguagg

SEQ ID NO: 22278 - RNA, 20 nt, Artificial Sequence
  spacer sequence TTCN PAM
caggggcucuccuuccuucc

SEQ ID NO: 22279 - RNA, 20 nt, Artificial Sequence
  spacer sequence TTCN PAM
gccauuuuuucucaggggcu

SEQ ID NO: 22280 - RNA, 20 nt, Artificial Sequence
  spacer sequence TTCN PAM
ucugccauuuuuucucaggg

SEQ ID NO: 22281 - RNA, 20 nt, Artificial Sequence
  spacer sequence TTCN PAM
auucuucugccauuuuuucu

SEQ ID NO: 22282 - RNA, 20 nt, Artificial Sequence
  spacer sequence TTCN PAM
aucaauacacguagucccuu

SEQ ID NO: 22283 - RNA, 20 nt, Artificial Sequence
  spacer sequence TTCN PAM
caacuccucaggacaggguu

SEQ ID NO: 22284 - RNA, 20 nt, Artificial Sequence
  spacer sequence TTCN PAM
gagcuaggcugguggcugcu

SEQ ID NO: 22285 - RNA, 20 nt, Artificial Sequence
  spacer sequence TTCN PAM
agguuugaugccuacagccc

SEQ ID NO: 22286 - RNA, 20 nt, Artificial Sequence
  spacer sequence TTCN PAM
agccuugguggauagguaag

SEQ ID NO: 22287 - RNA, 20 nt, Artificial Sequence
  spacer sequence TTCN PAM
ucuuaccuauccaccaaggc

SEQ ID NO: 22288 - RNA, 20 nt, Artificial Sequence
  spacer sequence TTCN PAM
ucuaccaccaauuuccuggc

SEQ ID NO: 22289 - RNA, 20 nt, Artificial Sequence
  spacer sequence TTCN PAM
uggcugugugucugggagca

SEQ ID NO: 22290 - RNA, 20 nt, Artificial Sequence
  spacer sequence TTCN PAM
ucacugguaaaauguguaug

SEQ ID NO: 22291 - RNA, 20 nt, Artificial Sequence
  spacer sequence TTCN PAM
cugguaaaauguguaugaug

SEQ ID NO: 22292 - RNA, 20 nt, Artificial Sequence
  spacer sequence TTCN PAM
aucagcaaccccagguuggc

SEQ ID NO: 22293 - RNA, 20 nt, Artificial Sequence
  spacer sequence TTCN PAM
cagacacucuuuuaacuagu

SEQ ID NO: 22294 - RNA, 20 nt, Artificial Sequence
  spacer sequence TTCN PAM
gggucgcugcauccuccucu

SEQ ID NO: 22295 - RNA, 20 nt, Artificial Sequence
  spacer sequence TTCN PAM
cccauuuuacagaggaggau

SEQ ID NO: 22296 - RNA, 20 nt, Artificial Sequence
  spacer sequence TTCN PAM
ggguucucccauuuuacaga

SEQ ID NO: 22297 - RNA, 20 nt, Artificial Sequence
  spacer sequence TTCN PAM
gaaacaagaccuguuucugg

SEQ ID NO: 22298 - RNA, 20 nt, Artificial Sequence
  spacer sequence TTCN PAM
gaagaugugccaaagauguc

SEQ ID NO: 22299 - RNA, 20 nt, Artificial Sequence
  spacer sequence TTCN PAM
ggaaaguuguugguaaacau

SEQ ID NO: 22300 - RNA, 20 nt, Artificial Sequence
  spacer sequence TTCN PAM
agaaacaggucuuguuucag

SEQ ID NO: 22301 - RNA, 20 nt, Artificial Sequence
  spacer sequence TTCN PAM
gaaacacuaccuucauucug

SEQ ID NO: 22302 - RNA, 20 nt, Artificial Sequence
  spacer sequence TTCN PAM
gaaacaauaauauaaauaag

SEQ ID NO: 22303 - RNA, 20 nt, Artificial Sequence
  spacer sequence TTCN PAM
uucugcuuugauucaauggc

SEQ ID NO: 22304 - RNA, 20 nt, Artificial Sequence
  spacer sequence TTCN PAM
gcuuugauucaauggcagcc

SEQ ID NO: 22305 - RNA, 20 nt, Artificial Sequence
  spacer sequence TTCN PAM
auggcagccaauuuaauuca

SEQ ID NO: 22306 - RNA, 20 nt, Artificial Sequence
  spacer sequence TTCN PAM
uuugguccaaaccuguagug

SEQ ID NO: 22307 - RNA, 20 nt, Artificial Sequence
  spacer sequence TTCN PAM
ggcaaguagcacuacagguu

SEQ ID NO: 22308 - RNA, 20 nt, Artificial Sequence
  spacer sequence TTCN PAM
auuuuguucuggcaaguagc

SEQ ID NO: 22309 - RNA, 20 nt, Artificial Sequence
  spacer sequence TTCN PAM
cugcccucaaggagcucaca

SEQ ID NO: 22310 - RNA, 20 nt, Artificial Sequence
  spacer sequence TTCN PAM
ugugacacuuaccugugcuc

SEQ ID NO: 22311 - RNA, 20 nt, Artificial Sequence
  spacer sequence TTCN PAM
cccaaaggaccauggcuucc

SEQ ID NO: 22312 - RNA, 20 nt, Artificial Sequence
  spacer sequence TTCN PAM
uuucccccaaaggaccaugg

SEQ ID NO: 22313 - RNA, 20 nt, Artificial Sequence
  spacer sequence TTCN PAM
ucauuucccccaaaggacca

SEQ ID NO: 22314 - RNA, 20 nt, Artificial Sequence
  spacer sequence TTCN PAM
aaauacuuuaccugguuugu

SEQ ID NO: 22315 - RNA, 20 nt, Artificial Sequence
  spacer sequence TTCN PAM
cuuucgggugcuucccugag

SEQ ID NO: 22316 - RNA, 20 nt, Artificial Sequence
  spacer sequence TTCN PAM
ggugcuucccugaguggcaa

SEQ ID NO: 22317 - RNA, 20 nt, Artificial Sequence
  spacer sequence TTCN PAM
cugaguggcaagagggaaag

SEQ ID NO: 22318 - RNA, 20 nt, Artificial Sequence
  spacer sequence TTCN PAM
cucuugccacucagggaagc

SEQ ID NO: 22319 - RNA, 20 nt, Artificial Sequence
  spacer sequence TTCN PAM
uuuuuuuuuuuuuuuuuuuu

SEQ ID NO: 22320 - RNA, 20 nt, Artificial Sequence
  spacer sequence TTCN PAM
cucuuguugcccaggcuggg

SEQ ID NO: 22321 - RNA, 20 nt, Artificial Sequence
  spacer sequence TTCN PAM
agcaauucuccucccucagc

SEQ ID NO: 22322 - RNA, 20 nt, Artificial Sequence
  spacer sequence TTCN PAM
ccucccucagccuccugagu

SEQ ID NO: 22323 - RNA, 20 nt, Artificial Sequence
  spacer sequence TTCN PAM
ccauguuggucaggcugguc

SEQ ID NO: 22324 - RNA, 20 nt, Artificial Sequence
  spacer sequence TTCN PAM
agcacuuugggaggccgagg

SEQ ID NO: 22325 - RNA, 20 nt, Artificial Sequence
  spacer sequence TTCN PAM
uaauuacagcagugugcuca

SEQ ID NO: 22326 - RNA, 20 nt, Artificial Sequence
  spacer sequence TTCN PAM
cgucuuaaauuuuuauguga

SEQ ID NO: 22327 - RNA, 20 nt, Artificial Sequence
  spacer sequence TTCN PAM
uguuuucccgucuuaaauuu

SEQ ID NO: 22328 - RNA, 20 nt, Artificial Sequence
  spacer sequence TTCN PAM
gagaaguuauaucagccccu

SEQ ID NO: 22329 - RNA, 20 nt, Artificial Sequence
  spacer sequence TTCN PAM
cagaaugcaucuuccuguuu

SEQ ID NO: 22330 - RNA, 20 nt, Artificial Sequence
  spacer sequence TTCN PAM
aaaacagccuuuuauucuaa

SEQ ID NO: 22331 - RNA, 20 nt, Artificial Sequence
  spacer sequence TTCN PAM
aauuauuuuacuagugaauu

SEQ ID NO: 22332 - RNA, 20 nt, Artificial Sequence
  spacer sequence TTCN PAM
cuaguaaaauaauuagaaua

SEQ ID NO: 22333 - RNA, 20 nt, Artificial Sequence
  spacer sequence TTCN PAM
auaauucacuaguaaaauaa

SEQ ID NO: 22334 - RNA, 20 nt, Artificial Sequence
  spacer sequence TTCN PAM
uucuacacaacuuguguugc

SEQ ID NO: 22335 - RNA, 20 nt, Artificial Sequence
  spacer sequence TTCN PAM
acacaacuuguguugcacua

SEQ ID NO: 22336 - RNA, 20 nt, Artificial Sequence
  spacer sequence TTCN PAM
ccuagugcaacacaaguugu

SEQ ID NO: 22337 - RNA, 20 nt, Artificial Sequence
  spacer sequence TTCN PAM
gggaggaaaggccagaccaa

SEQ ID NO: 22338 - RNA, 20 nt, Artificial Sequence
  spacer sequence TTCN PAM
ucccugaagcucuguuagcc

SEQ ID NO: 22339 - RNA, 20 nt, Artificial Sequence
  spacer sequence TTCN PAM
cuguggagugaggcauauuu

SEQ ID NO: 22340 - RNA, 20 nt, Artificial Sequence
  spacer sequence TTCN PAM
ggugguacagcuucucugug

SEQ ID NO: 22341 - RNA, 20 nt, Artificial Sequence
  spacer sequence TTCN PAM
aggacuucuggugguacagc

SEQ ID NO: 22342 - RNA, 20 nt, Artificial Sequence
  spacer sequence TTCN PAM
gauagucuugaguugcauug

SEQ ID NO: 22343 - RNA, 20 nt, Artificial Sequence
  spacer sequence TTCN PAM
uaucauucugauagucuuga

SEQ ID NO: 22344 - RNA, 20 nt, Artificial Sequence
  spacer sequence TTCN PAM
ccagcuuuuacaaagcagga

SEQ ID NO: 22345 - RNA, 20 nt, Artificial Sequence
  spacer sequence TTCN PAM
cacuguuuaccuacucccug

SEQ ID NO: 22346 - RNA, 20 nt, Artificial Sequence
  spacer sequence TTCN PAM
gugagcaaacggaaaaauaa

SEQ ID NO: 22347 - RNA, 20 nt, Artificial Sequence
  spacer sequence TTCN PAM
guuugcucacagaauguaga

SEQ ID NO: 22348 - RNA, 20 nt, Artificial Sequence
  spacer sequence TTCN PAM
gaugguuuauuuuuccguuu

SEQ ID NO: 22349 - RNA, 20 nt, Artificial Sequence
  spacer sequence TTCN PAM
gucugugcaguuuuauuagg

SEQ ID NO: 22350 - RNA, 20 nt, Artificial Sequence
  spacer sequence TTCN PAM
ucaucagauucagaagagua

SEQ ID NO: 22351 - RNA, 20 nt, Artificial Sequence
  spacer sequence TTCN PAM
ucagauucagaagaguagca

SEQ ID NO: 22352 - RNA, 20 nt, Artificial Sequence
  spacer sequence TTCN PAM
gaagaguagcaggggguuuc

SEQ ID NO: 22353 - RNA, 20 nt, Artificial Sequence
  spacer sequence TTCN PAM
gaaucugaugaagaaguuau

SEQ ID NO: 22354 - RNA, 20 nt, Artificial Sequence
  spacer sequence TTCN PAM
cgcuagcacagauuugagcu

SEQ ID NO: 22355 - RNA, 20 nt, Artificial Sequence
  spacer sequence TTCN PAM
gggaucucagguauugcucc

SEQ ID NO: 22356 - RNA, 20 nt, Artificial Sequence
  spacer sequence TTCN PAM
uuaggagcaauaccugagau

SEQ ID NO: 22357 - RNA, 20 nt, Artificial Sequence
  spacer sequence TTCN PAM
uucucuuaucuuccuccaac

SEQ ID NO: 22358 - RNA, 20 nt, Artificial Sequence
  spacer sequence TTCN PAM
cuuaucuuccuccaacaucc

SEQ ID NO: 22359 - RNA, 20 nt, Artificial Sequence
  spacer sequence TTCN PAM
uccaacauccaaaagcagug

SEQ ID NO: 22360 - RNA, 20 nt, Artificial Sequence
  spacer sequence TTCN PAM
cacccaaucccaugcuuucu

SEQ ID NO: 22361 - RNA, 20 nt, Artificial Sequence
  spacer sequence TTCN PAM
aauauuaaaauaugaauuua

SEQ ID NO: 22362 - RNA, 20 nt, Artificial Sequence
  spacer sequence TTCN PAM
uauuuuaauauuagaaagca

SEQ ID NO: 22363 - RNA, 20 nt, Artificial Sequence
  spacer sequence TTCN PAM
uaaauucauauuuuaauauu

SEQ ID NO: 22364 - RNA, 20 nt, Artificial Sequence
  spacer sequence TTCN PAM
cugguauuucuuaaauucau

SEQ ID NO: 22365 - RNA, 20 nt, Artificial Sequence
  spacer sequence TTCN PAM
gguuuaaaaaaucucuuuuc

SEQ ID NO: 22366 - RNA, 20 nt, Artificial Sequence
  spacer sequence TTCN PAM
ugauauguuaauaaaacugu

SEQ ID NO: 22367 - RNA, 20 nt, Artificial Sequence
  spacer sequence TTCN PAM
aucaucaucagagaaaaaca

SEQ ID NO: 22368 - RNA, 20 nt, Artificial Sequence
  spacer sequence TTCN PAM
cugaugaugauugaaaacag

SEQ ID NO: 22369 - RNA, 20 nt, Artificial Sequence
  spacer sequence TTCN PAM
gcucuacugugcuaccauga

SEQ ID NO: 22370 - RNA, 20 nt, Artificial Sequence
  spacer sequence TTCN PAM
uuugaucaccaauugagugc

SEQ ID NO: 22371 - RNA, 20 nt, Artificial Sequence
  spacer sequence TTCN PAM
aguccugucacccagaaacu

SEQ ID NO: 22372 - RNA, 20 nt, Artificial Sequence
  spacer sequence TTCN PAM
gggugacaggacuagaauuu

SEQ ID NO: 22373 - RNA, 20 nt, Artificial Sequence
  spacer sequence TTCN PAM
cuuagagauuaaguaccucc

SEQ ID NO: 22374 - RNA, 20 nt, Artificial Sequence
  spacer sequence TTCN PAM
ccagcucauuuuacccacuc

SEQ ID NO: 22375 - RNA, 20 nt, Artificial Sequence
  spacer sequence TTCN PAM
cuccuuccccagcucauuuu

SEQ ID NO: 22376 - RNA, 20 nt, Artificial Sequence
  spacer sequence TTCN PAM
cacugguucacuccuucccc

SEQ ID NO: 22377 - RNA, 20 nt, Artificial Sequence
  spacer sequence TTCN PAM
uucucacugguucacuccuu

SEQ ID NO: 22378 - RNA, 20 nt, Artificial Sequence
  spacer sequence TTCN PAM
gggagccccagacagaccag

SEQ ID NO: 22379 - RNA, 20 nt, Artificial Sequence
  spacer sequence TTCN PAM
uucuugcucuuguccaaaca

SEQ ID NO: 22380 - RNA, 20 nt, Artificial Sequence
  spacer sequence TTCN PAM
ugcucuuguccaaacaccuc

SEQ ID NO: 22381 - RNA, 20 nt, Artificial Sequence
  spacer sequence TTCN PAM
guguguauuaagaugacaga

SEQ ID NO: 22382 - RNA, 20 nt, Artificial Sequence
  spacer sequence TTCN PAM
acacauuccguguguauuaa

SEQ ID NO: 22383 - RNA, 20 nt, Artificial Sequence
  spacer sequence TTCN PAM
uuucaacacauuccgugugu

SEQ ID NO: 22384 - RNA, 20 nt, Artificial Sequence
  spacer sequence TTCN PAM
acacagacaccuucauuuca

SEQ ID NO: 22385 - RNA, 20 nt, Artificial Sequence
  spacer sequence TTCN PAM
ugcucccauugccaggacaa

SEQ ID NO: 22386 - RNA, 20 nt, Artificial Sequence
  spacer sequence TTCN PAM
cuaaaccuggucacuccuag

SEQ ID NO: 22387 - RNA, 20 nt, Artificial Sequence
  spacer sequence TTCN PAM
ccaucuugggacuaggagug

SEQ ID NO: 22388 - RNA, 20 nt, Artificial Sequence
  spacer sequence TTCN PAM
gcagccucaggaggcucuga

SEQ ID NO: 22389 - RNA, 20 nt, Artificial Sequence
  spacer sequence TTCN PAM
accuggucagagccuccuga

SEQ ID NO: 22390 - RNA, 20 nt, Artificial Sequence
  spacer sequence TTCN PAM
ggcuuuccaccuggucagag

SEQ ID NO: 22391 - RNA, 20 nt, Artificial Sequence
  spacer sequence TTCN PAM
gucuugggucuccugguugg

SEQ ID NO: 22392 - RNA, 20 nt, Artificial Sequence
  spacer sequence TTCN PAM
ccaggcauugugacuuuuua

SEQ ID NO: 22393 - RNA, 20 nt, Artificial Sequence
  spacer sequence TTCN PAM
aggagccagacaugucccug

SEQ ID NO: 22394 - RNA, 20 nt, Artificial Sequence
  spacer sequence TTCN PAM
agggacaugucuggcuccug

SEQ ID NO: 22395 - RNA, 20 nt, Artificial Sequence
  spacer sequence TTCN PAM
ucugagcacugcaacaauuu

SEQ ID NO: 22396 - RNA, 20 nt, Artificial Sequence
  spacer sequence TTCN PAM
cuggacccucuccuccaccu

SEQ ID NO: 22397 - RNA, 20 nt, Artificial Sequence
  spacer sequence TTCN PAM
cagauggggcauaacccucc

SEQ ID NO: 22398 - RNA, 20 nt, Artificial Sequence
  spacer sequence TTCN PAM
cagauuugggcaaucuaaug

SEQ ID NO: 22399 - RNA, 20 nt, Artificial Sequence
  spacer sequence TTCN PAM
ggcuuacaaagccuuggugg

SEQ ID NO: 22400 - RNA, 20 nt, Artificial Sequence
  spacer sequence TTCN PAM
acacccagcaguuccuaccc

SEQ ID NO: 22401 - RNA, 20 nt, Artificial Sequence
  spacer sequence TTCN PAM
uacccaggacugagaagccc

SEQ ID NO: 22402 - RNA, 20 nt, Artificial Sequence
  spacer sequence TTCN PAM
caguccuggguaggaacugc

SEQ ID NO: 22403 - RNA, 20 nt, Artificial Sequence
  spacer sequence TTCN PAM
cccuccuggaaaccuauagc

SEQ ID NO: 22404 - RNA, 20 nt, Artificial Sequence
  spacer sequence TTCN PAM
aggagggugaacaagggcca

SEQ ID NO: 22405 - RNA, 20 nt, Artificial Sequence
  spacer sequence TTCN PAM
cuggcagcuauagguuucca

SEQ ID NO: 22406 - RNA, 20 nt, Artificial Sequence
  spacer sequence TTCN PAM
aggcggguuaaauuaguccu

SEQ ID NO: 22407 - RNA, 20 nt, Artificial Sequence
  spacer sequence TTCN PAM
ggaucuuuugucagagcuuu

SEQ ID NO: 22408 - RNA, 20 nt, Artificial Sequence
  spacer sequence TTCN PAM
cauucaucuaaaccuccuga

SEQ ID NO: 22409 - RNA, 20 nt, Artificial Sequence
  spacer sequence TTCN PAM
ucuaaaccuccugaaaauug

SEQ ID NO: 22410 - RNA, 20 nt, Artificial Sequence
  spacer sequence TTCN PAM
ggagguuuagaugaauguga

SEQ ID NO: 22411 - RNA, 20 nt, Artificial Sequence
  spacer sequence TTCN PAM
uugauucuagaaaaaaaaga

SEQ ID NO: 22412 - RNA, 20 nt, Artificial Sequence
  spacer sequence TTCN PAM
agaaaaaaaagaaagcaaga

SEQ ID NO: 22413 - RNA, 20 nt, Artificial Sequence
  spacer sequence TTCN PAM
agaaucaacgaagcagccaa

SEQ ID NO: 22414 - RNA, 20 nt, Artificial Sequence
  spacer sequence TTCN PAM
uuuuuuucuagaaucaacga

SEQ ID NO: 22415 - RNA, 20 nt, Artificial Sequence
  spacer sequence TTCN PAM
ugcuuucuuuuuuuucuaga

SEQ ID NO: 22416 - RNA, 20 nt, Artificial Sequence
  spacer sequence TTCN PAM
ugcauuucuugcuuucuuuu

SEQ ID NO: 22417 - RNA, 20 nt, Artificial Sequence
  spacer sequence TTCN PAM
uuuccugcauuucuugcuuu

SEQ ID NO: 22418 - RNA, 20 nt, Artificial Sequence
  spacer sequence TTCN PAM
cucucugcccccucguuccu

SEQ ID NO: 22419 - RNA, 20 nt, Artificial Sequence
  spacer sequence TTCN PAM
uucccucucugcccccucgu

SEQ ID NO: 22420 - RNA, 20 nt, Artificial Sequence
  spacer sequence TTCN PAM
agcagaugggguuuuggcug

SEQ ID NO: 22421 - RNA, 20 nt, Artificial Sequence
  spacer sequence TTCN PAM
agcaggcuucuagcagaugg

SEQ ID NO: 22422 - RNA, 20 nt, Artificial Sequence
  spacer sequence TTCN PAM
agcggcacauucugagaacu

SEQ ID NO: 22423 - RNA, 20 nt, Artificial Sequence
  spacer sequence TTCN PAM
gagaacucugaagaguacca

SEQ ID NO: 22424 - RNA, 20 nt, Artificial Sequence
  spacer sequence TTCN PAM
cagaaugugccgcucgaagc

SEQ ID NO: 22425 - RNA, 20 nt, Artificial Sequence
  spacer sequence TTCN PAM
gaguucucagaaugugccgc

SEQ ID NO: 22426 - RNA, 20 nt, Artificial Sequence
  spacer sequence TTCN PAM
guuuggggaguccugccagg

SEQ ID NO: 22427 - RNA, 20 nt, Artificial Sequence
  spacer sequence TTCN PAM
ccagcaauuccagaacugcu

SEQ ID NO: 22428 - RNA, 20 nt, Artificial Sequence
  spacer sequence TTCN PAM
agaacugcugccuaccggca

SEQ ID NO: 22429 - RNA, 20 nt, Artificial Sequence
  spacer sequence TTCN PAM
ggaauugcuggggaaaccac

SEQ ID NO: 22430 - RNA, 20 nt, Artificial Sequence
  spacer sequence TTCN PAM
ucauugauccugcaugcgug

SEQ ID NO: 22431 - RNA, 20 nt, Artificial Sequence
  spacer sequence TTCN PAM
gggucugccuggguccaccc

SEQ ID NO: 22432 - RNA, 20 nt, Artificial Sequence
  spacer sequence TTCN PAM
uuucuuagucacugcaagau

SEQ ID NO: 22433 - RNA, 20 nt, Artificial Sequence
  spacer sequence TTCN PAM
uagucacugcaagauuucac

SEQ ID NO: 22434 - RNA, 20 nt, Artificial Sequence
  spacer sequence TTCN PAM
cccagcccagccacccacug

SEQ ID NO: 22435 - RNA, 20 nt, Artificial Sequence
  spacer sequence TTCN PAM
guggguggcugggcugggug

SEQ ID NO: 22436 - RNA, 20 nt, Artificial Sequence
  spacer sequence TTCN PAM
gauagguggccuccucugcc

SEQ ID NO: 22437 - RNA, 20 nt, Artificial Sequence
  spacer sequence TTCN PAM
agugugucauauccuagcau

SEQ ID NO: 22438 - RNA, 20 nt, Artificial Sequence
  spacer sequence TTCN PAM
uccuggccagccugcucucc

SEQ ID NO: 22439 - RNA, 20 nt, Artificial Sequence
  spacer sequence TTCN PAM
uugggagagcaggcuggcca

SEQ ID NO: 22440 - RNA, 20 nt, Artificial Sequence
  spacer sequence TTCN PAM
uucuuugggagagcaggcug

SEQ ID NO: 22441 - RNA, 20 nt, Artificial Sequence
  spacer sequence TTCN PAM
guuauuccuucuuugggaga

SEQ ID NO: 22442 - RNA, 20 nt, Artificial Sequence
  spacer sequence TTCN PAM
gguuuguaaauuuauaccaa

SEQ ID NO: 22443 - RNA, 20 nt, Artificial Sequence
  spacer sequence TTCN PAM
ucuugaagugggagcucagc

SEQ ID NO: 22444 - RNA, 20 nt, Artificial Sequence
  spacer sequence TTCN PAM
ugaagugggagcucagcauc

SEQ ID NO: 22445 - RNA, 20 nt, Artificial Sequence
  spacer sequence TTCN PAM
agaagaacauugguauaaau

SEQ ID NO: 22446 - RNA, 20 nt, Artificial Sequence
  spacer sequence TTCN PAM
gggugucccgaugcugagcu

SEQ ID NO: 22447 - RNA, 20 nt, Artificial Sequence
  spacer sequence TTCN PAM
gcuauuugcuuuuugccuug

SEQ ID NO: 22448 - RNA, 20 nt, Artificial Sequence
  spacer sequence TTCN PAM
gcagacucauucugcuauuu

SEQ ID NO: 22449 - RNA, 20 nt, Artificial Sequence
  spacer sequence TTCN PAM
gacuaggagggcuuggggga

SEQ ID NO: 22450 - RNA, 20 nt, Artificial Sequence
  spacer sequence TTCN PAM
cucagcauuucagcagguac

SEQ ID NO: 22451 - RNA, 20 nt, Artificial Sequence
  spacer sequence TTCN PAM
gcagguacugcucaccugga

SEQ ID NO: 22452 - RNA, 20 nt, Artificial Sequence
  spacer sequence TTCN PAM
aggugagcaguaccugcuga

SEQ ID NO: 22453 - RNA, 20 nt, Artificial Sequence
  spacer sequence TTCN PAM
caguaaauacaucagcugua

SEQ ID NO: 22454 - RNA, 20 nt, Artificial Sequence
  spacer sequence TTCN PAM
ucaagcuuucuacuggugcu

SEQ ID NO: 22455 - RNA, 20 nt, Artificial Sequence
  spacer sequence TTCN PAM
agcuuucuacuggugcuuag

SEQ ID NO: 22456 - RNA, 20 nt, Artificial Sequence
  spacer sequence TTCN PAM
acuggugcuuagggacaaug

SEQ ID NO: 22457 - RNA, 20 nt, Artificial Sequence
  spacer sequence TTCN PAM
agacuugauuggcauugucc

SEQ ID NO: 22458 - RNA, 20 nt, Artificial Sequence
  spacer sequence TTCN PAM
accucucuauauaauuucaa

SEQ ID NO: 22459 - RNA, 20 nt, Artificial Sequence
  spacer sequence TTCN PAM
gggacagauauguaccugau

SEQ ID NO: 22460 - RNA, 20 nt, Artificial Sequence
  spacer sequence TTCN PAM
uaucacaugccuccccuacc

SEQ ID NO: 22461 - RNA, 20 nt, Artificial Sequence
  spacer sequence TTCN PAM
uugcuccaaacuauuaaaac

SEQ ID NO: 22462 - RNA, 20 nt, Artificial Sequence
  spacer sequence TTCN PAM
gcaagccacaacuucccuac

SEQ ID NO: 22463 - RNA, 20 nt, Artificial Sequence
  spacer sequence TTCN PAM
cuacccugugugcaggcugu

SEQ ID NO: 22464 - RNA, 20 nt, Artificial Sequence
  spacer sequence TTCN PAM
acagccugcacacaggguag

SEQ ID NO: 22465 - RNA, 20 nt, Artificial Sequence
  spacer sequence TTCN PAM
ggguccaccccacgcuucca

SEQ ID NO: 22466 - RNA, 20 nt, Artificial Sequence
  spacer sequence TTCN PAM
ggaucagaaucccuagucua

SEQ ID NO: 22467 - RNA, 20 nt, Artificial Sequence
  spacer sequence TTCN PAM
gauccagaacuccuuauacu

SEQ ID NO: 22468 - RNA, 20 nt, Artificial Sequence
  spacer sequence TTCN PAM
acuacccuuucuccugccuc

SEQ ID NO: 22469 - RNA, 20 nt, Artificial Sequence
  spacer sequence TTCN PAM
ccugccucuucacaggguua

SEQ ID NO: 22470 - RNA, 20 nt, Artificial Sequence
  spacer sequence TTCN PAM
caggguuacucaugagguga

SEQ ID NO: 22471 - RNA, 20 nt, Artificial Sequence
  spacer sequence TTCN PAM
aaagggaugggcccaauuuu

SEQ ID NO: 22472 - RNA, 20 nt, Artificial Sequence
  spacer sequence TTCN PAM
aauguccauugugcuguuag

SEQ ID NO: 22473 - RNA, 20 nt, Artificial Sequence
  spacer sequence TTCN PAM
uaagccaaaaaagcuagagg

SEQ ID NO: 22474 - RNA, 20 nt, Artificial Sequence
  spacer sequence TTCN PAM
cuccgauccucuagcuuuuu

SEQ ID NO: 22475 - RNA, 20 nt, Artificial Sequence
  spacer sequence TTCN PAM
uuucucuccgauccucuagc

SEQ ID NO: 22476 - RNA, 20 nt, Artificial Sequence
  spacer sequence TTCN PAM
gaguauccgucccuucuuuu

SEQ ID NO: 22477 - RNA, 20 nt, Artificial Sequence
  spacer sequence TTCN PAM
aggguguccuuuggcacccc

SEQ ID NO: 22478 - RNA, 20 nt, Artificial Sequence
  spacer sequence TTCN PAM
uccagauuguuccaaaugcc

SEQ ID NO: 22479 - RNA, 20 nt, Artificial Sequence
  spacer sequence TTCN PAM
agauuguuccaaaugccugc

SEQ ID NO: 22480 - RNA, 20 nt, Artificial Sequence
  spacer sequence TTCN PAM
aaaugccugcugcaguaaua

SEQ ID NO: 22481 - RNA, 20 nt, Artificial Sequence
  spacer sequence TTCN PAM
uuuggggcuguuauuacugc

SEQ ID NO: 22482 - RNA, 20 nt, Artificial Sequence
  spacer sequence TTCN PAM
ccuacaaguccugacaaagu

SEQ ID NO: 22483 - RNA, 20 nt, Artificial Sequence
  spacer sequence TTCN PAM
ccaagcugacagcugcucca

SEQ ID NO: 22484 - RNA, 20 nt, Artificial Sequence
  spacer sequence TTCN PAM
gcuggacaaacacugcaucc

SEQ ID NO: 22485 - RNA, 20 nt, Artificial Sequence
  spacer sequence TTCN PAM
cuguguggaugcaguguuug

SEQ ID NO: 22486 - RNA, 20 nt, Artificial Sequence
  spacer sequence TTCN PAM
uguccuucccuuaggggcca

SEQ ID NO: 22487 - RNA, 20 nt, Artificial Sequence
  spacer sequence TTCN PAM
cuuaggggccaaaccagccc

SEQ ID NO: 22488 - RNA, 20 nt, Artificial Sequence
  spacer sequence TTCN PAM
uguccaacccagugggccuc

SEQ ID NO: 22489 - RNA, 20 nt, Artificial Sequence
  spacer sequence TTCN PAM
cuuuccuccagcucccuaag

SEQ ID NO: 22490 - RNA, 20 nt, Artificial Sequence
  spacer sequence TTCN PAM
uccagcucccuaagcuguug

SEQ ID NO: 22491 - RNA, 20 nt, Artificial Sequence
  spacer sequence TTCN PAM
gggcacagacagcucuucag

SEQ ID NO: 22492 - RNA, 20 nt, Artificial Sequence
  spacer sequence TTCN PAM
ggcugccagagcaagagagu

SEQ ID NO: 22493 - RNA, 20 nt, Artificial Sequence
  spacer sequence TTCN PAM
uaacucucuugcucuggcag

SEQ ID NO: 22494 - RNA, 20 nt, Artificial Sequence
  spacer sequence TTCN PAM
caccucccggaagcagggga

SEQ ID NO: 22495 - RNA, 20 nt, Artificial Sequence
  spacer sequence TTCN PAM
gggaggugggaaugcaugug

SEQ ID NO: 22496 - RNA, 20 nt, Artificial Sequence
  spacer sequence TTCN PAM
aaaaugauagacccagguag

SEQ ID NO: 22497 - RNA, 20 nt, Artificial Sequence
  spacer sequence TTCN PAM
uggcugacucuuaaauggga

SEQ ID NO: 22498 - RNA, 20 nt, Artificial Sequence
  spacer sequence TTCN PAM
cauuuaagagucagccacga

SEQ ID NO: 22499 - RNA, 20 nt, Artificial Sequence
  spacer sequence TTCN PAM
cagagauaucuguaauuggc

SEQ ID NO: 22500 - RNA, 20 nt, Artificial Sequence
  spacer sequence TTCN PAM
cccucccucagguagaguug

SEQ ID NO: 22501 - RNA, 20 nt, Artificial Sequence
  spacer sequence TTCN PAM
gcccaccguuguuuugggag

SEQ ID NO: 22502 - RNA, 20 nt, Artificial Sequence
  spacer sequence TTCN PAM
ggguauuuacgggaugcaga

SEQ ID NO: 22503 - RNA, 20 nt, Artificial Sequence
  spacer sequence TTCN PAM
ucugccagaugcuguggaga

SEQ ID NO: 22504 - RNA, 20 nt, Artificial Sequence
  spacer sequence TTCN PAM
cccgggcugcaaagccuagu

SEQ ID NO: 22505 - RNA, 20 nt, Artificial Sequence
  spacer sequence TTCN PAM
cgcaccaucugguuucaccc

SEQ ID NO: 22506 - RNA, 20 nt, Artificial Sequence
  spacer sequence TTCN PAM
cuaucuucucgcaccaucug

SEQ ID NO: 22507 - RNA, 20 nt, Artificial Sequence
  spacer sequence TTCN PAM
cagccauccuuugacaccca

SEQ ID NO: 22508 - RNA, 20 nt, Artificial Sequence
  spacer sequence TTCN PAM
auggugggugucaaaggaug

SEQ ID NO: 22509 - RNA, 20 nt, Artificial Sequence
  spacer sequence TTCN PAM
gaccucucugugauuucuau

SEQ ID NO: 22510 - RNA, 20 nt, Artificial Sequence
  spacer sequence TTCN PAM
uucugaccucucugugauuu

SEQ ID NO: 22511 - RNA, 20 nt, Artificial Sequence
  spacer sequence TTCN PAM
cugagggcauggaggggagg

SEQ ID NO: 22512 - RNA, 20 nt, Artificial Sequence
  spacer sequence TTCN PAM
cucugcaucagaggaagagu

SEQ ID NO: 22513 - RNA, 20 nt, Artificial Sequence
  spacer sequence TTCN PAM
ucugaugcagagagaauuaa

SEQ ID NO: 22514 - RNA, 20 nt, Artificial Sequence
  spacer sequence TTCN PAM
caggccagcuguggucugac

SEQ ID NO: 22515 - RNA, 20 nt, Artificial Sequence
  spacer sequence TTCN PAM
ggucugucaaaccccuggaa

SEQ ID NO: 22516 - RNA, 20 nt, Artificial Sequence
  spacer sequence TTCN PAM
agggguuugacagaccagaa

SEQ ID NO: 22517 - RNA, 20 nt, Artificial Sequence
  spacer sequence TTCN PAM
gacaguguuccucagaucca

SEQ ID NO: 22518 - RNA, 20 nt, Artificial Sequence
  spacer sequence TTCN PAM
ucagauccaggacagagcug

SEQ ID NO: 22519 - RNA, 20 nt, Artificial Sequence
  spacer sequence TTCN PAM
agccucagugagccggcccc

SEQ ID NO: 22520 - RNA, 20 nt, Artificial Sequence
  spacer sequence TTCN PAM
uggacucagcaugccagcug

SEQ ID NO: 22521 - RNA, 20 nt, Artificial Sequence
  spacer sequence TTCN PAM
uagugagcugccuuuaucau

SEQ ID NO: 22522 - RNA, 20 nt, Artificial Sequence
  spacer sequence TTCN PAM
ccauuuaggagacugcuggg

SEQ ID NO: 22523 - RNA, 20 nt, Artificial Sequence
  spacer sequence TTCN PAM
uccuaaacgccugauauaua

SEQ ID NO: 22524 - RNA, 20 nt, Artificial Sequence
  spacer sequence TTCN PAM
gucagcaaccucaaauaaug

SEQ ID NO: 22525 - RNA, 20 nt, Artificial Sequence
  spacer sequence TTCN PAM
uuauagccucugcaaaacua

SEQ ID NO: 22526 - RNA, 20 nt, Artificial Sequence
  spacer sequence TTCN PAM
gccuaaacauucaauuaaug

SEQ ID NO: 22527 - RNA, 20 nt, Artificial Sequence
  spacer sequence TTCN PAM
auuaauguaauuaaauugcu

SEQ ID NO: 22528 - RNA, 20 nt, Artificial Sequence
  spacer sequence TTCN PAM
auaguuuggaucccaaguua

SEQ ID NO: 22529 - RNA, 20 nt, Artificial Sequence
  spacer sequence TTCN PAM
ucacaugccuuaccagucag

SEQ ID NO: 22530 - RNA, 20 nt, Artificial Sequence
  spacer sequence TTCN PAM
uaauugaguacauauguacg

SEQ ID NO: 22531 - RNA, 20 nt, Artificial Sequence
  spacer sequence TTCN PAM
gaaauacugucuuugaccuu

SEQ ID NO: 22532 - RNA, 20 nt, Artificial Sequence
  spacer sequence TTCN PAM
gaacaaaaauuagaguuagu

SEQ ID NO: 22533 - RNA, 20 nt, Artificial Sequence
  spacer sequence TTCN PAM
agcucugcagaaugcaaagc

SEQ ID NO: 22534 - RNA, 20 nt, Artificial Sequence
  spacer sequence TTCN PAM
gcagagcuagaagagcauuu

SEQ ID NO: 22535 - RNA, 20 nt, Artificial Sequence
  spacer sequence TTCN PAM
uugucuugcuuugcauucug

SEQ ID NO: 22536 - RNA, 20 nt, Artificial Sequence
  spacer sequence TTCN PAM
uccuugucuugcuuugcauu

SEQ ID NO: 22537 - RNA, 20 nt, Artificial Sequence
  spacer sequence TTCN PAM
uuucuuccuugucuugcuuu

SEQ ID NO: 22538 - RNA, 20 nt, Artificial Sequence
  spacer sequence TTCN PAM
uuccuuucuuccuugucuug

SEQ ID NO: 22539 - RNA, 20 nt, Artificial Sequence
  spacer sequence TTCN PAM
uuccuuccuuucuuccuugu

SEQ ID NO: 22540 - RNA, 20 nt, Artificial Sequence
  spacer sequence TTCN PAM
uuccuuccuuccuuucuucc

SEQ ID NO: 22541 - RNA, 20 nt, Artificial Sequence
  spacer sequence TTCN PAM
uuccuuccuuccuuccuuuc

SEQ ID NO: 22542 - RNA, 20 nt, Artificial Sequence
  spacer sequence TTCN PAM
uuccuuccuuccuuccuucc

SEQ ID NO: 22543 - RNA, 20 nt, Artificial Sequence
  spacer sequence TTCN PAM
ccuccccuccccuccccucc

SEQ ID NO: 22544 - RNA, 20 nt, Artificial Sequence
  spacer sequence TTCN PAM
cuuccccuccccuccccucc

SEQ ID NO: 22545 - RNA, 20 nt, Artificial Sequence
  spacer sequence TTCN PAM
cuucccuuccccuccccucc

SEQ ID NO: 22546 - RNA, 20 nt, Artificial Sequence
  spacer sequence TTCN PAM
cuucccuucccuuccccucc

SEQ ID NO: 22547 - RNA, 20 nt, Artificial Sequence
  spacer sequence TTCN PAM
cuucccuucccuucccuucc

SEQ ID NO: 22548 - RNA, 20 nt, Artificial Sequence
  spacer sequence TTCN PAM
cuucccuucccuucccuucc

SEQ ID NO: 22549 - RNA, 20 nt, Artificial Sequence
  spacer sequence TTCN PAM
cuucccuucccuucccuucc

SEQ ID NO: 22550 - RNA, 20 nt, Artificial Sequence
  spacer sequence TTCN PAM
cuucccuucccuucccuucc

SEQ ID NO: 22551 - RNA, 20 nt, Artificial Sequence
  spacer sequence TTCN PAM
cuucccuucccuucccuucc

SEQ ID NO: 22552 - RNA, 20 nt, Artificial Sequence
  spacer sequence TTCN PAM
cuucccuucccuucccuucc

SEQ ID NO: 22553 - RNA, 20 nt, Artificial Sequence
  spacer sequence TTCN PAM
cuucccuucccuucccuucc

SEQ ID NO: 22554 - RNA, 20 nt, Artificial Sequence
  spacer sequence TTCN PAM
cuucccuucccuucccuucc

SEQ ID NO: 22555 - RNA, 20 nt, Artificial Sequence
  spacer sequence TTCN PAM
cucccucccuucccuucccu

SEQ ID NO: 22556 - RNA, 20 nt, Artificial Sequence
  spacer sequence TTCN PAM
ugaaaagcuagaaaacugug

SEQ ID NO: 22557 - RNA, 20 nt, Artificial Sequence
  spacer sequence TTCN PAM
agaaaggcaagggcccuccu

SEQ ID NO: 22558 - RNA, 20 nt, Artificial Sequence
  spacer sequence TTCN PAM
agcuuuucaagaaaggcaag

SEQ ID NO: 22559 - RNA, 20 nt, Artificial Sequence
  spacer sequence TTCN PAM
agucaacaagagcacaauag

SEQ ID NO: 22560 - RNA, 20 nt, Artificial Sequence
  spacer sequence TTCN PAM
guucaagccagaaaaguuaa

SEQ ID NO: 22561 - RNA, 20 nt, Artificial Sequence
  spacer sequence TTCN PAM
agccagaaaaguuaaaaccu

SEQ ID NO: 22562 - RNA, 20 nt, Artificial Sequence
  spacer sequence TTCN PAM
ggcuugaacggaagcagcuu

SEQ ID NO: 22563 - RNA, 20 nt, Artificial Sequence
  spacer sequence TTCN PAM
caagguuuuaacuuuucugg

SEQ ID NO: 22564 - RNA, 20 nt, Artificial Sequence
  spacer sequence TTCN PAM
gauguuuuggagucucucaa

SEQ ID NO: 22565 - RNA, 20 nt, Artificial Sequence
  spacer sequence TTCN PAM
ugagagacuccaaaacaucu

SEQ ID NO: 22566 - RNA, 20 nt, Artificial Sequence
  spacer sequence TTCN PAM
ccuugccuguccucauuucu

SEQ ID NO: 22567 - RNA, 20 nt, Artificial Sequence
  spacer sequence TTCN PAM
uccccuugccuguccucauu

SEQ ID NO: 22568 - RNA, 20 nt, Artificial Sequence
  spacer sequence TTCN PAM
acaugcagcuguuucaacag

SEQ ID NO: 22569 - RNA, 20 nt, Artificial Sequence
  spacer sequence TTCN PAM
acagcucacugcauaacaga

SEQ ID NO: 22570 - RNA, 20 nt, Artificial Sequence
  spacer sequence TTCN PAM
aaguccccagcuuuucuaag

SEQ ID NO: 22571 - RNA, 20 nt, Artificial Sequence
  spacer sequence TTCN PAM
aagacauauggcagaaaugu

SEQ ID NO: 22572 - RNA, 20 nt, Artificial Sequence
  spacer sequence TTCN PAM
gccauaugucuuagaaaagc

SEQ ID NO: 22573 - RNA, 20 nt, Artificial Sequence
  spacer sequence TTCN PAM
acauuucugccauaugucuu

SEQ ID NO: 22574 - RNA, 20 nt, Artificial Sequence
  spacer sequence TTCN PAM
aaacagcacaagacagaaag

SEQ ID NO: 22575 - RNA, 20 nt, Artificial Sequence
  spacer sequence TTCN PAM
gucuugugcuguuuggaaga

SEQ ID NO: 22576 - RNA, 20 nt, Artificial Sequence
  spacer sequence TTCN PAM
ccccgcacccgucgcccccc

SEQ ID NO: 22577 - RNA, 20 nt, Artificial Sequence
  spacer sequence TTCN PAM
cuucuccccgcacccgucgc

SEQ ID NO: 22578 - RNA, 20 nt, Artificial Sequence
  spacer sequence TTCN PAM
ucccuucuccccgcacccgu

SEQ ID NO: 22579 - RNA, 20 nt, Artificial Sequence
  spacer sequence TTCN PAM
acagcuuguuuuuacuucuu

SEQ ID NO: 22580 - RNA, 20 nt, Artificial Sequence
  spacer sequence TTCN PAM
caguaauccaaugcuccugu

SEQ ID NO: 22581 - RNA, 20 nt, Artificial Sequence
  spacer sequence TTCN PAM
aaagcaaaagaacaaaaaaa

SEQ ID NO: 22582 - RNA, 20 nt, Artificial Sequence
  spacer sequence TTCN PAM
uuugcuuuagaaacuguaau

SEQ ID NO: 22583 - RNA, 20 nt, Artificial Sequence
  spacer sequence TTCN PAM
caaaagacauauuacacacg

SEQ ID NO: 22584 - RNA, 20 nt, Artificial Sequence
  spacer sequence TTCN PAM
aaagcuuuaaaaucauaugg

SEQ ID NO: 22585 - RNA, 20 nt, Artificial Sequence
  spacer sequence TTCN PAM
guguugguuccuaugggguu

SEQ ID NO: 22586 - RNA, 20 nt, Artificial Sequence
  spacer sequence TTCN PAM
uaugggguuacggauaaugc

SEQ ID NO: 22587 - RNA, 20 nt, Artificial Sequence
  spacer sequence TTCN PAM
uuuuuguguuugcaucuguc

SEQ ID NO: 22588 - RNA, 20 nt, Artificial Sequence
  spacer sequence TTCN PAM
gguuuauugugauuucuuuu

SEQ ID NO: 22589 - RNA, 20 nt, Artificial Sequence
  spacer sequence TTCN PAM
cucaugucauggugcuuacu

SEQ ID NO: 22590 - RNA, 20 nt, Artificial Sequence
  spacer sequence TTCN PAM
uucacaaacaaaaguaguug

SEQ ID NO: 22591 - RNA, 20 nt, Artificial Sequence
  spacer sequence TTCN PAM
caaacaaaaguaguugagca

SEQ ID NO: 22592 - RNA, 20 nt, Artificial Sequence
  spacer sequence TTCN PAM
ucucaaagaaccaaccuaaa

SEQ ID NO: 22593 - RNA, 20 nt, Artificial Sequence
  spacer sequence TTCN PAM
uugagaugaauaacuacuua

SEQ ID NO: 22594 - RNA, 20 nt, Artificial Sequence
  spacer sequence TTCN PAM
gacaggcccagcacugucua

SEQ ID NO: 22595 - RNA, 20 nt, Artificial Sequence
  spacer sequence TTCN PAM
uccuaguuuuuauuugugua

SEQ ID NO: 22596 - RNA, 20 nt, Artificial Sequence
  spacer sequence TTCN PAM
ggacacagggaaggccugau

SEQ ID NO: 22597 - RNA, 20 nt, Artificial Sequence
  spacer sequence TTCN PAM
cuguguccugaaccaagugu

SEQ ID NO: 22598 - RNA, 20 nt, Artificial Sequence
  spacer sequence TTCN PAM
caucaggccuucccuguguc

SEQ ID NO: 22599 - RNA, 20 nt, Artificial Sequence
  spacer sequence TTCN PAM
cugucuccucuuucacauca

SEQ ID NO: 22600 - RNA, 20 nt, Artificial Sequence
  spacer sequence TTCN PAM
ugggugugcagaauuacacc

SEQ ID NO: 22601 - RNA, 20 nt, Artificial Sequence
  spacer sequence TTCN PAM
gcacacccaggaagcuucuc

SEQ ID NO: 22602 - RNA, 20 nt, Artificial Sequence
  spacer sequence TTCN PAM
uuugccaacuagguaaugug

SEQ ID NO: 22603 - RNA, 20 nt, Artificial Sequence
  spacer sequence TTCN PAM
ggaauagcacaguguggaac

SEQ ID NO: 22604 - RNA, 20 nt, Artificial Sequence
  spacer sequence TTCN PAM
agaaccucccaguugcauuc

SEQ ID NO: 22605 - RNA, 20 nt, Artificial Sequence
  spacer sequence TTCN PAM
acacugugcuauuccagaac

SEQ ID NO: 22606 - RNA, 20 nt, Artificial Sequence
  spacer sequence TTCN PAM
uguucugaagaggacuuugc

SEQ ID NO: 22607 - RNA, 20 nt, Artificial Sequence
  spacer sequence TTCN PAM
gaagaggacuuugcuuuccu

SEQ ID NO: 22608 - RNA, 20 nt, Artificial Sequence
  spacer sequence TTCN PAM
gaacaggaaaaguccagugc

SEQ ID NO: 22609 - RNA, 20 nt, Artificial Sequence
  spacer sequence TTCN PAM
uccgggauguaaagcauuug

SEQ ID NO: 22610 - RNA, 20 nt, Artificial Sequence
  spacer sequence TTCN PAM
cuuuggccaguuugccauag

SEQ ID NO: 22611 - RNA, 20 nt, Artificial Sequence
  spacer sequence TTCN PAM
ccuagcaacgcuucucuuug

SEQ ID NO: 22612 - RNA, 20 nt, Artificial Sequence
  spacer sequence TTCN PAM
ugccguguccauucuccuag

SEQ ID NO: 22613 - RNA, 20 nt, Artificial Sequence
  spacer sequence TTCN PAM
ugggccaagcugaggcuguu

SEQ ID NO: 22614 - RNA, 20 nt, Artificial Sequence
  spacer sequence TTCN PAM
uccugggccaagcugaggcu

SEQ ID NO: 22615 - RNA, 20 nt, Artificial Sequence
  spacer sequence TTCN PAM
cacggccccuguagcugagc

SEQ ID NO: 22616 - RNA, 20 nt, Artificial Sequence
  spacer sequence TTCN PAM
cugagggucuccuuggcgac

SEQ ID NO: 22617 - RNA, 20 nt, Artificial Sequence
  spacer sequence TTCN PAM
cugagcucccccuuggguua

SEQ ID NO: 22618 - RNA, 20 nt, Artificial Sequence
  spacer sequence TTCN PAM
agaagaguuuguucuacaug

SEQ ID NO: 22619 - RNA, 20 nt, Artificial Sequence
  spacer sequence TTCN PAM
ggaaucauagguaacccaag

SEQ ID NO: 22620 - RNA, 20 nt, Artificial Sequence
  spacer sequence TTCN PAM
acauguggcaaagccagcac

SEQ ID NO: 22621 - RNA, 20 nt, Artificial Sequence
  spacer sequence TTCN PAM
cucuguccccucuauggugc

SEQ ID NO: 22622 - RNA, 20 nt, Artificial Sequence
  spacer sequence TTCN PAM
aaagacaccuuaaguagcag

SEQ ID NO: 22623 - RNA, 20 nt, Artificial Sequence
  spacer sequence TTCN PAM
uugucauaggagagcuccuu

SEQ ID NO: 22624 - RNA, 20 nt, Artificial Sequence
  spacer sequence TTCN PAM
ucugugauugcuaaagccua

SEQ ID NO: 22625 - RNA, 20 nt, Artificial Sequence
  spacer sequence TTCN PAM
gugauugcuaaagccuagag

SEQ ID NO: 22626 - RNA, 20 nt, Artificial Sequence
  spacer sequence TTCN PAM
uuggaggagguccucuaggc

SEQ ID NO: 22627 - RNA, 20 nt, Artificial Sequence
  spacer sequence TTCN PAM
gucugagccacuuuucuuug

SEQ ID NO: 22628 - RNA, 20 nt, Artificial Sequence
  spacer sequence TTCN PAM
caucagacuccgaaaucaca

SEQ ID NO: 22629 - RNA, 20 nt, Artificial Sequence
  spacer sequence TTCN PAM
gagucugaugagaaauaaga

SEQ ID NO: 22630 - RNA, 20 nt, Artificial Sequence
  spacer sequence TTCN PAM
ggucuaaagauucaagcuga

SEQ ID NO: 22631 - RNA, 20 nt, Artificial Sequence
  spacer sequence TTCN PAM
agcugagaaacaagaaagca

SEQ ID NO: 22632 - RNA, 20 nt, Artificial Sequence
  spacer sequence TTCN PAM
cagcuugaaucuuuagacca

SEQ ID NO: 22633 - RNA, 20 nt, Artificial Sequence
  spacer sequence TTCN PAM
uguuucucagcuugaaucuu

SEQ ID NO: 22634 - RNA, 20 nt, Artificial Sequence
  spacer sequence TTCN PAM
ggcccuugcaaauuaccccc

SEQ ID NO: 22635 - RNA, 20 nt, Artificial Sequence
  spacer sequence TTCN PAM
aagaauuuuuuuacuuuucc

SEQ ID NO: 22636 - RNA, 20 nt, Artificial Sequence
  spacer sequence TTCN PAM
uggaauccucauaacaucca

SEQ ID NO: 22637 - RNA, 20 nt, Artificial Sequence
  spacer sequence TTCN PAM
auuagagggcucugcacucu

SEQ ID NO: 22638 - RNA, 20 nt, Artificial Sequence
  spacer sequence TTCN PAM
aggaaaaaggcucuaugugc

SEQ ID NO: 22639 - RNA, 20 nt, Artificial Sequence
  spacer sequence TTCN PAM
uugaaaggagagugcagagc

SEQ ID NO: 22640 - RNA, 20 nt, Artificial Sequence
  spacer sequence TTCN PAM
uuccagaaauggggaaaggg

SEQ ID NO: 22641 - RNA, 20 nt, Artificial Sequence
  spacer sequence TTCN PAM
agaaauggggaaagggagga

SEQ ID NO: 22642 - RNA, 20 nt, Artificial Sequence
  spacer sequence TTCN PAM
ggaaagaagugggcuggcac

SEQ ID NO: 22643 - RNA, 20 nt, Artificial Sequence
  spacer sequence TTCN PAM
ccauuucuggaaagaagugg

SEQ ID NO: 22644 - RNA, 20 nt, Artificial Sequence
  spacer sequence TTCN PAM
ccuccucccuuuccccauuu

SEQ ID NO: 22645 - RNA, 20 nt, Artificial Sequence
  spacer sequence TTCN PAM
acagguucuccuccucccuu

SEQ ID NO: 22646 - RNA, 20 nt, Artificial Sequence
  spacer sequence TTCN PAM
ggaagaaauuccaagccagg

SEQ ID NO: 22647 - RNA, 20 nt, Artificial Sequence
  spacer sequence TTCN PAM
ggaaauccguuguccucuuu

SEQ ID NO: 22648 - RNA, 20 nt, Artificial Sequence
  spacer sequence TTCN PAM
uccggaaauccguuguccuc

SEQ ID NO: 22649 - RNA, 20 nt, Artificial Sequence
  spacer sequence TTCN PAM
aagccaggggcuaaccgugg

SEQ ID NO: 22650 - RNA, 20 nt, Artificial Sequence
  spacer sequence TTCN PAM
gagacguccguguggcucug

SEQ ID NO: 22651 - RNA, 20 nt, Artificial Sequence
  spacer sequence TTCN PAM
guggaagcacaagacacgug

SEQ ID NO: 22652 - RNA, 20 nt, Artificial Sequence
  spacer sequence TTCN PAM
acagaaccguuuucugagac

SEQ ID NO: 22653 - RNA, 20 nt, Artificial Sequence
  spacer sequence TTCN PAM
caggacucucacugccacgu

SEQ ID NO: 22654 - RNA, 20 nt, Artificial Sequence
  spacer sequence TTCN PAM
uggacuucucaggacucuca

SEQ ID NO: 22655 - RNA, 20 nt, Artificial Sequence
  spacer sequence TTCN PAM
aacccauuccuaaauaucac

SEQ ID NO: 22656 - RNA, 20 nt, Artificial Sequence
  spacer sequence TTCN PAM
uaaauaucaccaauuaacag

SEQ ID NO: 22657 - RNA, 20 nt, Artificial Sequence
  spacer sequence TTCN PAM
caggucucagguagaccauc

SEQ ID NO: 22658 - RNA, 20 nt, Artificial Sequence
  spacer sequence TTCN PAM
uuuguuuucucaggucucag

SEQ ID NO: 22659 - RNA, 20 nt, Artificial Sequence
  spacer sequence TTCN PAM
cuucguuuguuuucucaggu

SEQ ID NO: 22660 - RNA, 20 nt, Artificial Sequence
  spacer sequence TTCN PAM
uucccuucguuuguuuucuc

SEQ ID NO: 22661 - RNA, 20 nt, Artificial Sequence
  spacer sequence TTCN PAM
ugcauuucuuucccuucguu

SEQ ID NO: 22662 - RNA, 20 nt, Artificial Sequence
  spacer sequence TTCN PAM
ggaucaaaagaucaaguugu

SEQ ID NO: 22663 - RNA, 20 nt, Artificial Sequence
  spacer sequence TTCN PAM
uuagcuaccaaagacaacuu

SEQ ID NO: 22664 - RNA, 20 nt, Artificial Sequence
  spacer sequence TTCN PAM
cuguuguucuuuagcuacca

SEQ ID NO: 22665 - RNA, 20 nt, Artificial Sequence
  spacer sequence TTCN PAM
uucucuguuguucuuuagcu

SEQ ID NO: 22666 - RNA, 20 nt, Artificial Sequence
  spacer sequence TTCN PAM
uuuuccuucucuguuguucu

SEQ ID NO: 22667 - RNA, 20 nt, Artificial Sequence
  spacer sequence TTCN PAM
ccuccuccuaaucuuuuugu

SEQ ID NO: 22668 - RNA, 20 nt, Artificial Sequence
  spacer sequence TTCN PAM
uuggggagggccagguguuu

SEQ ID NO: 22669 - RNA, 20 nt, Artificial Sequence
  spacer sequence TTCN PAM
gagagccccaguugacugcc

SEQ ID NO: 22670 - RNA, 20 nt, Artificial Sequence
  spacer sequence TTCN PAM
ccucacgaucuuccugaaca

SEQ ID NO: 22671 - RNA, 20 nt, Artificial Sequence
  spacer sequence TTCN PAM
ugaacagggcaguagucuag

SEQ ID NO: 22672 - RNA, 20 nt, Artificial Sequence
  spacer sequence TTCN PAM
ggaagaucgugaggggaaag

SEQ ID NO: 22673 - RNA, 20 nt, Artificial Sequence
  spacer sequence TTCN PAM
guggaugcuagacuacugcc

SEQ ID NO: 22674 - RNA, 20 nt, Artificial Sequence
  spacer sequence TTCN PAM
ggacuucaguggaugcuaga

SEQ ID NO: 22675 - RNA, 20 nt, Artificial Sequence
  spacer sequence TTCN PAM
ccacuucaggacuucagugg

SEQ ID NO: 22676 - RNA, 20 nt, Artificial Sequence
  spacer sequence TTCN PAM
ggcccaucccaauaaacagc

SEQ ID NO: 22677 - RNA, 20 nt, Artificial Sequence
  spacer sequence TTCN PAM
auucucccagucaccgagcc

SEQ ID NO: 22678 - RNA, 20 nt, Artificial Sequence
  spacer sequence TTCN PAM
cccagucaccgagccacaca

SEQ ID NO: 22679 - RNA, 20 nt, Artificial Sequence
  spacer sequence TTCN PAM
uuucauacaacccaucccac

SEQ ID NO: 22680 - RNA, 20 nt, Artificial Sequence
  spacer sequence TTCN PAM
uacaacccaucccaccaguc

SEQ ID NO: 22681 - RNA, 20 nt, Artificial Sequence
  spacer sequence TTCN PAM
cuucgaaguauguccagaau

SEQ ID NO: 22682 - RNA, 20 nt, Artificial Sequence
  spacer sequence TTCN PAM
aaguauguccagaauccagc

SEQ ID NO: 22683 - RNA, 20 nt, Artificial Sequence
  spacer sequence TTCN PAM
aagggaaaaccggcaggauu

SEQ ID NO: 22684 - RNA, 20 nt, Artificial Sequence
  spacer sequence TTCN PAM
ggacauacuucgaagggaaa

SEQ ID NO: 22685 - RNA, 20 nt, Artificial Sequence
  spacer sequence TTCN PAM
cacguccccaccacccuggu

SEQ ID NO: 22686 - RNA, 20 nt, Artificial Sequence
  spacer sequence TTCN PAM
gacugcuucugccucacuuu

SEQ ID NO: 22687 - RNA, 20 nt, Artificial Sequence
  spacer sequence TTCN PAM
gccucacuuucccaugcuug

SEQ ID NO: 22688 - RNA, 20 nt, Artificial Sequence
  spacer sequence TTCN PAM
caugcuugagucucaaaaug

SEQ ID NO: 22689 - RNA, 20 nt, Artificial Sequence
  spacer sequence TTCN PAM
agagagucucuugggccgca

SEQ ID NO: 22690 - RNA, 20 nt, Artificial Sequence
  spacer sequence TTCN PAM
aucucccuuggagucagagc

SEQ ID NO: 22691 - RNA, 20 nt, Artificial Sequence
  spacer sequence TTCN PAM
aggagccagcuggucuccuc

SEQ ID NO: 22692 - RNA, 20 nt, Artificial Sequence
  spacer sequence TTCN PAM
acucugaccucagggccccu

SEQ ID NO: 22693 - RNA, 20 nt, Artificial Sequence
  spacer sequence TTCN PAM
uggaaccaucuucucaaaau

SEQ ID NO: 22694 - RNA, 20 nt, Artificial Sequence
  spacer sequence TTCN PAM
aggaagaguguguagagagc

SEQ ID NO: 22695 - RNA, 20 nt, Artificial Sequence
  spacer sequence TTCN PAM
caaaauucucauggccaacu

SEQ ID NO: 22696 - RNA, 20 nt, Artificial Sequence
  spacer sequence TTCN PAM
cauggccaacuuccucaccu

SEQ ID NO: 22697 - RNA, 20 nt, Artificial Sequence
  spacer sequence TTCN PAM
ucaccucuuuggagccuuug

SEQ ID NO: 22698 - RNA, 20 nt, Artificial Sequence
  spacer sequence TTCN PAM
cauugggccuucccuaauua

SEQ ID NO: 22699 - RNA, 20 nt, Artificial Sequence
  spacer sequence TTCN PAM
cuaauuauccuauuuaaaag

SEQ ID NO: 22700 - RNA, 20 nt, Artificial Sequence
  spacer sequence TTCN PAM
ccaccuuauuuucgugcagg

SEQ ID NO: 22701 - RNA, 20 nt, Artificial Sequence
  spacer sequence TTCN PAM
ugcaggcaguuugaucuucu

SEQ ID NO: 22702 - RNA, 20 nt, Artificial Sequence
  spacer sequence TTCN PAM
cuugccauacuauauaauuc

SEQ ID NO: 22703 - RNA, 20 nt, Artificial Sequence
  spacer sequence TTCN PAM
cauauuuauuggugcaucuu

SEQ ID NO: 22704 - RNA, 20 nt, Artificial Sequence
  spacer sequence TTCN PAM
gucucuccccagcuagaaag

SEQ ID NO: 22705 - RNA, 20 nt, Artificial Sequence
  spacer sequence TTCN PAM
agcuggggagagacagaaga

SEQ ID NO: 22706 - RNA, 20 nt, Artificial Sequence
  spacer sequence TTCN PAM
augcccaacaccaagaaccg

SEQ ID NO: 22707 - RNA, 20 nt, Artificial Sequence
  spacer sequence TTCN PAM
ugguguugggcauagaaagc

SEQ ID NO: 22708 - RNA, 20 nt, Artificial Sequence
  spacer sequence TTCN PAM
cagcauguggcagguguuca

SEQ ID NO: 22709 - RNA, 20 nt, Artificial Sequence
  spacer sequence TTCN PAM
aaauauuuguugaaaaauga

SEQ ID NO: 22710 - RNA, 20 nt, Artificial Sequence
  spacer sequence TTCN PAM
acaaauauuuugaacaccug

SEQ ID NO: 22711 - RNA, 20 nt, Artificial Sequence
  spacer sequence TTCN PAM
uuuuucaacaaauauuuuga

SEQ ID NO: 22712 - RNA, 20 nt, Artificial Sequence
  spacer sequence TTCN PAM
cucauucauuuuucaacaaa

SEQ ID NO: 22713 - RNA, 20 nt, Artificial Sequence
  spacer sequence TTCN PAM
caauuccaaacugccaggag

SEQ ID NO: 22714 - RNA, 20 nt, Artificial Sequence
  spacer sequence TTCN PAM
aaacugccaggaggccacuc

SEQ ID NO: 22715 - RNA, 20 nt, Artificial Sequence
  spacer sequence TTCN PAM
auuuuccccacaggcccuga

SEQ ID NO: 22716 - RNA, 20 nt, Artificial Sequence
  spacer sequence TTCN PAM
ccacaggcccugagacccac

SEQ ID NO: 22717 - RNA, 20 nt, Artificial Sequence
  spacer sequence TTCN PAM
cugugggucucagggccugu

SEQ ID NO: 22718 - RNA, 20 nt, Artificial Sequence
  spacer sequence TTCN PAM
cccaaaccagcucaaccccu

SEQ ID NO: 22719 - RNA, 20 nt, Artificial Sequence
  spacer sequence TTCN PAM
uuugguuuuaacuggcuccu

SEQ ID NO: 22720 - RNA, 20 nt, Artificial Sequence
  spacer sequence TTCN PAM
uaaggcuuagguggagccuc

SEQ ID NO: 22721 - RNA, 20 nt, Artificial Sequence
  spacer sequence TTCN PAM
agaggcuccaccuaagccuu

SEQ ID NO: 22722 - RNA, 20 nt, Artificial Sequence
  spacer sequence TTCN PAM
ccaggcucucagccccucuu

SEQ ID NO: 22723 - RNA, 20 nt, Artificial Sequence
  spacer sequence TTCN PAM
ucagaguucuucccacuggg

SEQ ID NO: 22724 - RNA, 20 nt, Artificial Sequence
  spacer sequence TTCN PAM
ucccacuggggcugugcagc

SEQ ID NO: 22725 - RNA, 20 nt, Artificial Sequence
  spacer sequence TTCN PAM
cacuggggcugugcagccaa

SEQ ID NO: 22726 - RNA, 20 nt, Artificial Sequence
  spacer sequence TTCN PAM
aggcacacugagaugcccau

SEQ ID NO: 22727 - RNA, 20 nt, Artificial Sequence
  spacer sequence TTCN PAM
ugcuuucagauucucccucc

SEQ ID NO: 22728 - RNA, 20 nt, Artificial Sequence
  spacer sequence TTCN PAM
gauucucccuccuccuggca

SEQ ID NO: 22729 - RNA, 20 nt, Artificial Sequence
  spacer sequence TTCN PAM
cccuccuccuggcaggggca

SEQ ID NO: 22730 - RNA, 20 nt, Artificial Sequence
  spacer sequence TTCN PAM
cuccugcccuccccagugcc

SEQ ID NO: 22731 - RNA, 20 nt, Artificial Sequence
  spacer sequence TTCN PAM
accugagagcccgggaugca

SEQ ID NO: 22732 - RNA, 20 nt, Artificial Sequence
  spacer sequence TTCN PAM
ggcugcaucccgggcucuca

SEQ ID NO: 22733 - RNA, 20 nt, Artificial Sequence
  spacer sequence TTCN PAM
cacccuagcauacaauuuga

SEQ ID NO: 22734 - RNA, 20 nt, Artificial Sequence
  spacer sequence TTCN PAM
ccugucaaauuguaugcuag

SEQ ID NO: 22735 - RNA, 20 nt, Artificial Sequence
  spacer sequence TTCN PAM
ccuuguuauugccuacuggg

SEQ ID NO: 22736 - RNA, 20 nt, Artificial Sequence
  spacer sequence TTCN PAM
gacuucuccuuguuauugcc

SEQ ID NO: 22737 - RNA, 20 nt, Artificial Sequence
  spacer sequence TTCN PAM
uuuaauucagacuucuccuu

SEQ ID NO: 22738 - RNA, 20 nt, Artificial Sequence
  spacer sequence TTCN PAM
caaauuggcgaguucuuuua

SEQ ID NO: 22739 - RNA, 20 nt, Artificial Sequence
  spacer sequence TTCN PAM
augugacuccacucuuuucc

SEQ ID NO: 22740 - RNA, 20 nt, Artificial Sequence
  spacer sequence TTCN PAM
guuaccaauaaaacacuuaa

SEQ ID NO: 22741 - RNA, 20 nt, Artificial Sequence
  spacer sequence TTCN PAM
ugcagacauaaagugcuaau

SEQ ID NO: 22742 - RNA, 20 nt, Artificial Sequence
  spacer sequence TTCN PAM
uaaugcuaauauuucccucu

SEQ ID NO: 22743 - RNA, 20 nt, Artificial Sequence
  spacer sequence TTCN PAM
cucugauuucugacaguucu

SEQ ID NO: 22744 - RNA, 20 nt, Artificial Sequence
  spacer sequence TTCN PAM
gacaguucuuuuuuuuuccu

SEQ ID NO: 22745 - RNA, 20 nt, Artificial Sequence
  spacer sequence TTCN PAM
uuuuuuuuccuucuucuuuu

SEQ ID NO: 22746 - RNA, 20 nt, Artificial Sequence
  spacer sequence TTCN PAM
uucuucuuuuuuggggcuau

SEQ ID NO: 22747 - RNA, 20 nt, Artificial Sequence
  spacer sequence TTCN PAM
ucuuuuuuggggcuauuuua

SEQ ID NO: 22748 - RNA, 20 nt, Artificial Sequence
  spacer sequence TTCN PAM
uuuuuggggcuauuuuaagu

SEQ ID NO: 22749 - RNA, 20 nt, Artificial Sequence
  spacer sequence TTCN PAM
aaacugaagacucaaagagc

SEQ ID NO: 22750 - RNA, 20 nt, Artificial Sequence
  spacer sequence TTCN PAM
guuuugaaucagauuagcgc

SEQ ID NO: 22751 - RNA, 20 nt, Artificial Sequence
  spacer sequence TTCN PAM
ugaaaacaaucaucacucag

SEQ ID NO: 22752 - RNA, 20 nt, Artificial Sequence
  spacer sequence TTCN PAM
ugaaauggugcaacauguaa

SEQ ID NO: 22753 - RNA, 20 nt, Artificial Sequence
  spacer sequence TTCN PAM
aagccacagaaaauaaguug

SEQ ID NO: 22754 - RNA, 20 nt, Artificial Sequence
  spacer sequence TTCN PAM
guggcuuggaaaauacguug

SEQ ID NO: 22755 - RNA, 20 nt, Artificial Sequence
  spacer sequence TTCN PAM
acuuauuuucuguggcuugg

SEQ ID NO: 22756 - RNA, 20 nt, Artificial Sequence
  spacer sequence TTCN PAM
acuuauuucaacuuauuuuc

SEQ ID NO: 22757 - RNA, 20 nt, Artificial Sequence
  spacer sequence TTCN PAM
uugccuacugcauuuucaac

SEQ ID NO: 22758 - RNA, 20 nt, Artificial Sequence
  spacer sequence TTCN PAM
ucuccaagcuuucaacacuc

SEQ ID NO: 22759 - RNA, 20 nt, Artificial Sequence
  spacer sequence TTCN PAM
ccaagcuuucaacacucugu

SEQ ID NO: 22760 - RNA, 20 nt, Artificial Sequence
  spacer sequence TTCN PAM
acacucuguuucuaugaagg

SEQ ID NO: 22761 - RNA, 20 nt, Artificial Sequence
  spacer sequence TTCN PAM
augaaggcaaggguuggagg

SEQ ID NO: 22762 - RNA, 20 nt, Artificial Sequence
  spacer sequence TTCN PAM
uagaaacagaguguugaaag

SEQ ID NO: 22763 - RNA, 20 nt, Artificial Sequence
  spacer sequence TTCN PAM
uucaaauaaaucaguaaaau

SEQ ID NO: 22764 - RNA, 20 nt, Artificial Sequence
  spacer sequence TTCN PAM
aauaaaucaguaaaaugaug

SEQ ID NO: 22765 - RNA, 20 nt, Artificial Sequence
  spacer sequence TTCN PAM
ucugcuacgcccaguggccc

SEQ ID NO: 22766 - RNA, 20 nt, Artificial Sequence
  spacer sequence TTCN PAM
aaggcaaaagaaagggaacc

SEQ ID NO: 22767 - RNA, 20 nt, Artificial Sequence
  spacer sequence TTCN PAM
uuugccuuugaacaccuaca

SEQ ID NO: 22768 - RNA, 20 nt, Artificial Sequence
  spacer sequence TTCN PAM
cuuucuuuugccuuugaaca

SEQ ID NO: 22769 - RNA, 20 nt, Artificial Sequence
  spacer sequence TTCN PAM
caggaaauacaagugucaca

SEQ ID NO: 22770 - RNA, 20 nt, Artificial Sequence
  spacer sequence TTCN PAM
ugggaagcguuacuaugucu

SEQ ID NO: 22771 - RNA, 20 nt, Artificial Sequence
  spacer sequence TTCN PAM
uuuuggagugacugugacac

SEQ ID NO: 22772 - RNA, 20 nt, Artificial Sequence
  spacer sequence TTCN PAM
aacaacuuggaaggcuaagg

SEQ ID NO: 22773 - RNA, 20 nt, Artificial Sequence
  spacer sequence TTCN PAM
aaguuguuugaauuaaguug

SEQ ID NO: 22774 - RNA, 20 nt, Artificial Sequence
  spacer sequence TTCN PAM
ucugcagcuccccagcucca

SEQ ID NO: 22775 - RNA, 20 nt, Artificial Sequence
  spacer sequence TTCN PAM
ucucugacugcucuccaggg

SEQ ID NO: 22776 - RNA, 20 nt, Artificial Sequence
  spacer sequence TTCN PAM
ucagauguuuuaaaggaagc

SEQ ID NO: 22777 - RNA, 20 nt, Artificial Sequence
  spacer sequence TTCN PAM
uuuaaaacaucugaggaaag

SEQ ID NO: 22778 - RNA, 20 nt, Artificial Sequence
  spacer sequence TTCN PAM
acagugacagguggggcucu

SEQ ID NO: 22779 - RNA, 20 nt, Artificial Sequence
  spacer sequence TTCN PAM
acaucagcgcaucgggcagc

SEQ ID NO: 22780 - RNA, 20 nt, Artificial Sequence
  spacer sequence TTCN PAM
gaguuccacaucagcgcauc

SEQ ID NO: 22781 - RNA, 20 nt, Artificial Sequence
  spacer sequence TTCN PAM
uuugggcuuguggcugagcu

SEQ ID NO: 22782 - RNA, 20 nt, Artificial Sequence
  spacer sequence TTCN PAM
ccucccuuggccuguguccu

SEQ ID NO: 22783 - RNA, 20 nt, Artificial Sequence
  spacer sequence TTCN PAM
uggcugcacaucuugcucuc

SEQ ID NO: 22784 - RNA, 20 nt, Artificial Sequence
  spacer sequence TTCN PAM
accugccccugugccacaca

SEQ ID NO: 22785 - RNA, 20 nt, Artificial Sequence
  spacer sequence TTCN PAM
cauuugagaggcgagugugu

SEQ ID NO: 22786 - RNA, 20 nt, Artificial Sequence
  spacer sequence TTCN PAM
cggcuccccucccaacccag

SEQ ID NO: 22787 - RNA, 20 nt, Artificial Sequence
  spacer sequence TTCN PAM
ggguugggaggggagccggg

SEQ ID NO: 22788 - RNA, 20 nt, Artificial Sequence
  spacer sequence TTCN PAM
uuagaccaaauaauuuagag

SEQ ID NO: 22789 - RNA, 20 nt, Artificial Sequence
  spacer sequence TTCN PAM
guuuucuuuagaccaaauaa

SEQ ID NO: 22790 - RNA, 20 nt, Artificial Sequence
  spacer sequence TTCN PAM
auaauauaauuaucaaggca

SEQ ID NO: 22791 - RNA, 20 nt, Artificial Sequence
  spacer sequence TTCN PAM
aguaacguagggaugccuug

SEQ ID NO: 22792 - RNA, 20 nt, Artificial Sequence
  spacer sequence TTCN PAM
uaaucuggcgacguucacag

SEQ ID NO: 22793 - RNA, 20 nt, Artificial Sequence
  spacer sequence TTCN PAM
cagccuuaugaagacaguuu

SEQ ID NO: 22794 - RNA, 20 nt, Artificial Sequence
  spacer sequence TTCN PAM
uaaggcugugaacgucgcca

SEQ ID NO: 22795 - RNA, 20 nt, Artificial Sequence
  spacer sequence TTCN PAM
cuuuuagugucucaaguaug

SEQ ID NO: 22796 - RNA, 20 nt, Artificial Sequence
  spacer sequence TTCN PAM
ccuauccgucaucagaggug

SEQ ID NO: 22797 - RNA, 20 nt, Artificial Sequence
  spacer sequence TTCN PAM
uuuacuuuagguguguauug

SEQ ID NO: 22798 - RNA, 20 nt, Artificial Sequence
  spacer sequence TTCN PAM
cugugucuccuccaaaugga

SEQ ID NO: 22799 - RNA, 20 nt, Artificial Sequence
  spacer sequence TTCN PAM
ccucuuagacgucucagaga

SEQ ID NO: 22800 - RNA, 20 nt, Artificial Sequence
  spacer sequence TTCN PAM
caaaaaugaacacacagagc

SEQ ID NO: 22801 - RNA, 20 nt, Artificial Sequence
  spacer sequence TTCN PAM
uuuuugagaaaauguuaauc

SEQ ID NO: 22802 - RNA, 20 nt, Artificial Sequence
  spacer sequence TTCN PAM
caggggguaaccagaggugg

SEQ ID NO: 22803 - RNA, 20 nt, Artificial Sequence
  spacer sequence TTCN PAM
cugccuuucucaggggguaa

SEQ ID NO: 22804 - RNA, 20 nt, Artificial Sequence
  spacer sequence TTCN PAM
ggggguccuuucucugccuu

SEQ ID NO: 22805 - RNA, 20 nt, Artificial Sequence
  spacer sequence TTCN PAM
gggaucaugaggacucacca

SEQ ID NO: 22806 - RNA, 20 nt, Artificial Sequence
  spacer sequence TTCN PAM
gugggguggugaguccucau

SEQ ID NO: 22807 - RNA, 20 nt, Artificial Sequence
  spacer sequence TTCN PAM
caucuuugagcggcucuucc

SEQ ID NO: 22808 - RNA, 20 nt, Artificial Sequence
  spacer sequence TTCN PAM
ccagagucaggaugacucuc

SEQ ID NO: 22809 - RNA, 20 nt, Artificial Sequence
  spacer sequence TTCN PAM
gguacauccccaucaugccc

SEQ ID NO: 22810 - RNA, 20 nt, Artificial Sequence
  spacer sequence TTCN PAM
uuguccccuccuugucucau

SEQ ID NO: 22811 - RNA, 20 nt, Artificial Sequence
  spacer sequence TTCN PAM
agugccacuccugggacuaa

SEQ ID NO: 22812 - RNA, 20 nt, Artificial Sequence
  spacer sequence TTCN PAM
ggagaugcugccuccacgcc

SEQ ID NO: 22813 - RNA, 20 nt, Artificial Sequence
  spacer sequence TTCN PAM
gcuguggacagccucaagug

SEQ ID NO: 22814 - RNA, 20 nt, Artificial Sequence
  spacer sequence TTCN PAM
caugggguggcuggcuugag

SEQ ID NO: 22815 - RNA, 20 nt, Artificial Sequence
  spacer sequence TTCN PAM
ggcuagaggcuaacccaaca

SEQ ID NO: 22816 - RNA, 20 nt, Artificial Sequence
  spacer sequence TTCN PAM
cucuuuguggagcaaaucuu

SEQ ID NO: 22817 - RNA, 20 nt, Artificial Sequence
  spacer sequence TTCN PAM
uguccugucuggaucuuccc

SEQ ID NO: 22818 - RNA, 20 nt, Artificial Sequence
  spacer sequence TTCN PAM
caguccugcccucucucuuc

SEQ ID NO: 22819 - RNA, 20 nt, Artificial Sequence
  spacer sequence TTCN PAM
gaaucuucccacccuuccaa

SEQ ID NO: 22820 - RNA, 20 nt, Artificial Sequence
  spacer sequence TTCN PAM
gaagagagagggcaggacug

SEQ ID NO: 22821 - RNA, 20 nt, Artificial Sequence
  spacer sequence TTCN PAM
cacccuuccaagggccugcu

SEQ ID NO: 22822 - RNA, 20 nt, Artificial Sequence
  spacer sequence TTCN PAM
aagggccugcugccuaaucc

SEQ ID NO: 22823 - RNA, 20 nt, Artificial Sequence
  spacer sequence TTCN PAM
uuuacuuuagcgugugagug

SEQ ID NO: 22824 - RNA, 20 nt, Artificial Sequence
  spacer sequence TTCN PAM
guccugaucagggaugaguc

SEQ ID NO: 22825 - RNA, 20 nt, Artificial Sequence
  spacer sequence TTCN PAM
uuuuucaguccugaucaggg

SEQ ID NO: 22826 - RNA, 20 nt, Artificial Sequence
  spacer sequence TTCN PAM
uuuucuuuuuucaguccuga

SEQ ID NO: 22827 - RNA, 20 nt, Artificial Sequence
  spacer sequence TTCN PAM
cagagaguggugugauggga

SEQ ID NO: 22828 - RNA, 20 nt, Artificial Sequence
  spacer sequence TTCN PAM
auuuucccagagaguggugu

SEQ ID NO: 22829 - RNA, 20 nt, Artificial Sequence
  spacer sequence TTCN PAM
uaggugcugacccagcugug

SEQ ID NO: 22830 - RNA, 20 nt, Artificial Sequence
  spacer sequence TTCN PAM
cugcauaggacccuucguag

SEQ ID NO: 22831 - RNA, 20 nt, Artificial Sequence
  spacer sequence TTCN PAM
gacugcaagguguucacugc

SEQ ID NO: 22832 - RNA, 20 nt, Artificial Sequence
  spacer sequence TTCN PAM
caacaagccagagauucucu

SEQ ID NO: 22833 - RNA, 20 nt, Artificial Sequence
  spacer sequence TTCN PAM
cugccuuccagacaggcacc

SEQ ID NO: 22834 - RNA, 20 nt, Artificial Sequence
  spacer sequence TTCN PAM
agacaggcaccuccaugaag

SEQ ID NO: 22835 - RNA, 20 nt, Artificial Sequence
  spacer sequence TTCN PAM
uggaggugccugucuggaag

SEQ ID NO: 22836 - RNA, 20 nt, Artificial Sequence
  spacer sequence TTCN PAM
cuucauggaggugccugucu

SEQ ID NO: 22837 - RNA, 20 nt, Artificial Sequence
  spacer sequence TTCN PAM
uggcuuguggugagcaaaac

SEQ ID NO: 22838 - RNA, 20 nt, Artificial Sequence
  spacer sequence TTCN PAM
aguuccacuacuuugaauuc

SEQ ID NO: 22839 - RNA, 20 nt, Artificial Sequence
  spacer sequence TTCN PAM
acuacuuugaauucucuagg

SEQ ID NO: 22840 - RNA, 20 nt, Artificial Sequence
  spacer sequence TTCN PAM
aaguaguggaacuagaaucc

SEQ ID NO: 22841 - RNA, 20 nt, Artificial Sequence
  spacer sequence TTCN PAM
cuagguucacaguccuaaau

SEQ ID NO: 22842 - RNA, 20 nt, Artificial Sequence
  spacer sequence TTCN PAM
caguccuaaauccucagaga

SEQ ID NO: 22843 - RNA, 20 nt, Artificial Sequence
  spacer sequence TTCN PAM
cugaggauuuaggacuguga

SEQ ID NO: 22844 - RNA, 20 nt, Artificial Sequence
  spacer sequence TTCN PAM
ugagagcacgugcagcuagc

SEQ ID NO: 22845 - RNA, 20 nt, Artificial Sequence
  spacer sequence TTCN PAM
aggcuggagcucugagaggc

SEQ ID NO: 22846 - RNA, 20 nt, Artificial Sequence
  spacer sequence TTCN PAM
aggcugggcuaccuccagcc

SEQ ID NO: 22847 - RNA, 20 nt, Artificial Sequence
  spacer sequence TTCN PAM
accacauggcuggagguagc

SEQ ID NO: 22848 - RNA, 20 nt, Artificial Sequence
  spacer sequence TTCN PAM
uuugcuaccaguuuccacca

SEQ ID NO: 22849 - RNA, 20 nt, Artificial Sequence
  spacer sequence TTCN PAM
gggcuuccuuugcuaccagu

SEQ ID NO: 22850 - RNA, 20 nt, Artificial Sequence
  spacer sequence TTCN PAM
guuguggcccuucugggcuu

SEQ ID NO: 22851 - RNA, 20 nt, Artificial Sequence
  spacer sequence TTCN PAM
aguucaguuguggcccuucu

SEQ ID NO: 22852 - RNA, 20 nt, Artificial Sequence
  spacer sequence TTCN PAM
uuagccuucuaguucaguug

SEQ ID NO: 22853 - RNA, 20 nt, Artificial Sequence
  spacer sequence TTCN PAM
gggcagucccaagacuugga

SEQ ID NO: 22854 - RNA, 20 nt, Artificial Sequence
  spacer sequence TTCN PAM
ccaagucuugggacugccca

SEQ ID NO: 22855 - RNA, 20 nt, Artificial Sequence
  spacer sequence TTCN PAM
gauggcuuguucuccaaguc

SEQ ID NO: 22856 - RNA, 20 nt, Artificial Sequence
  spacer sequence TTCN PAM
auuuucagauggcuuguucu

SEQ ID NO: 22857 - RNA, 20 nt, Artificial Sequence
  spacer sequence TTCN PAM
agaccagccuagccaacaug

SEQ ID NO: 22858 - RNA, 20 nt, Artificial Sequence
  spacer sequence TTCN PAM
ccauguuggcuaggcugguc

SEQ ID NO: 22859 - RNA, 20 nt, Artificial Sequence
  spacer sequence TTCN PAM
ccugccucagccucccaagu

SEQ ID NO: 22860 - RNA, 20 nt, Artificial Sequence
  spacer sequence TTCN PAM
agugauucuccugccucagc

SEQ ID NO: 22861 - RNA, 20 nt, Artificial Sequence
  spacer sequence TTCN PAM
uaggaaaaaaaucagaguug

SEQ ID NO: 22862 - RNA, 20 nt, Artificial Sequence
  spacer sequence TTCN PAM
uaagaaacucccccacccaa

SEQ ID NO: 22863 - RNA, 20 nt, Artificial Sequence
  spacer sequence TTCN PAM
uuguguuguaaagacaguca

SEQ ID NO: 22864 - RNA, 20 nt, Artificial Sequence
  spacer sequence TTCN PAM
cagccucuuauggugccuua

SEQ ID NO: 22865 - RNA, 20 nt, Artificial Sequence
  spacer sequence TTCN PAM
auugauaagagaggauuucc

SEQ ID NO: 22866 - RNA, 20 nt, Artificial Sequence
  spacer sequence TTCN PAM
cuacucaaauaucaaagguc

SEQ ID NO: 22867 - RNA, 20 nt, Artificial Sequence
  spacer sequence TTCN PAM
guuuuaguguauguguaugc

SEQ ID NO: 22868 - RNA, 20 nt, Artificial Sequence
  spacer sequence TTCN PAM
uuuuucuguuuuaguguaug

SEQ ID NO: 22869 - RNA, 20 nt, Artificial Sequence
  spacer sequence TTCN PAM
uuuuuuuuuuuucuuuuuuc

SEQ ID NO: 22870 - RNA, 20 nt, Artificial Sequence
  spacer sequence TTCN PAM
cucucucucucugucucucu

SEQ ID NO: 22871 - RNA, 20 nt, Artificial Sequence
  spacer sequence TTCN PAM
uuuggguggcuuugacuggc

SEQ ID NO: 22872 - RNA, 20 nt, Artificial Sequence
  spacer sequence TTCN PAM
gaacucagccguucucccuc

SEQ ID NO: 22873 - RNA, 20 nt, Artificial Sequence
  spacer sequence TTCN PAM
gaagggacuggggccugcuu

SEQ ID NO: 22874 - RNA, 20 nt, Artificial Sequence
  spacer sequence TTCN PAM
cccucuggugagacaggcuc

SEQ ID NO: 22875 - RNA, 20 nt, Artificial Sequence
  spacer sequence TTCN PAM
agaaugccacuaccagcuuc

SEQ ID NO: 22876 - RNA, 20 nt, Artificial Sequence
  spacer sequence TTCN PAM
ggaaacaagcuagagccugu

SEQ ID NO: 22877 - RNA, 20 nt, Artificial Sequence
  spacer sequence TTCN PAM
cacaccuccaggggaccccc

SEQ ID NO: 22878 - RNA, 20 nt, Artificial Sequence
  spacer sequence TTCN PAM
ccaacacuggcuuccaggug

SEQ ID NO: 22879 - RNA, 20 nt, Artificial Sequence
  spacer sequence TTCN PAM
aggugagcgagacagaaucu

SEQ ID NO: 22880 - RNA, 20 nt, Artificial Sequence
  spacer sequence TTCN PAM
gucucgcucaccuggaagcc

SEQ ID NO: 22881 - RNA, 20 nt, Artificial Sequence
  spacer sequence TTCN PAM
cugcuugaccauggggugaa

SEQ ID NO: 22882 - RNA, 20 nt, Artificial Sequence
  spacer sequence TTCN PAM
ccccauggucaagcagugaa

SEQ ID NO: 22883 - RNA, 20 nt, Artificial Sequence
  spacer sequence TTCN PAM
cuuuuucacuuucuccccag

SEQ ID NO: 22884 - RNA, 20 nt, Artificial Sequence
  spacer sequence TTCN PAM
cuuucuccccagggaggaag

SEQ ID NO: 22885 - RNA, 20 nt, Artificial Sequence
  spacer sequence TTCN PAM
ccccagggaggaagggggaa

SEQ ID NO: 22886 - RNA, 20 nt, Artificial Sequence
  spacer sequence TTCN PAM
ucccuggggagaaagugaaa

SEQ ID NO: 22887 - RNA, 20 nt, Artificial Sequence
  spacer sequence TTCN PAM
cccuuccucccuggggagaa

SEQ ID NO: 22888 - RNA, 20 nt, Artificial Sequence
  spacer sequence TTCN PAM
cuggacagggagcuggggau

SEQ ID NO: 22889 - RNA, 20 nt, Artificial Sequence
  spacer sequence TTCN PAM
aagcccggucuuucucuguu

SEQ ID NO: 22890 - RNA, 20 nt, Artificial Sequence
  spacer sequence TTCN PAM
cuguucaaucaagcagcgug

SEQ ID NO: 22891 - RNA, 20 nt, Artificial Sequence
  spacer sequence TTCN PAM
aucaagcagcgugagcaaag

SEQ ID NO: 22892 - RNA, 20 nt, Artificial Sequence
  spacer sequence TTCN PAM
uauguaguauuuaaucugua

SEQ ID NO: 22893 - RNA, 20 nt, Artificial Sequence
  spacer sequence TTCN PAM
uggugccuaacauaaugcug

SEQ ID NO: 22894 - RNA, 20 nt, Artificial Sequence
  spacer sequence TTCN PAM
ccuccucaaauuauaaccuu

SEQ ID NO: 22895 - RNA, 20 nt, Artificial Sequence
  spacer sequence TTCN PAM
cauuggcucguggguguauu

SEQ ID NO: 22896 - RNA, 20 nt, Artificial Sequence
  spacer sequence TTCN PAM
uuggaggaggugucacucug

SEQ ID NO: 22897 - RNA, 20 nt, Artificial Sequence
  spacer sequence TTCN PAM
uaguuaccuagaaaaauggc

SEQ ID NO: 22898 - RNA, 20 nt, Artificial Sequence
  spacer sequence TTCN PAM
agguaacuaggaaggccuga

SEQ ID NO: 22899 - RNA, 20 nt, Artificial Sequence
  spacer sequence TTCN PAM
agugggcuggaccuccccag

SEQ ID NO: 22900 - RNA, 20 nt, Artificial Sequence
  spacer sequence TTCN PAM
guaucuccuucuagugggcu

SEQ ID NO: 22901 - RNA, 20 nt, Artificial Sequence
  spacer sequence TTCN PAM
gagagguagcugggucccac

SEQ ID NO: 22902 - RNA, 20 nt, Artificial Sequence
  spacer sequence TTCN PAM
ggcagggagaaagugguggu

SEQ ID NO: 22903 - RNA, 20 nt, Artificial Sequence
  spacer sequence TTCN PAM
cccugccugaaagcacuggg

SEQ ID NO: 22904 - RNA, 20 nt, Artificial Sequence
  spacer sequence TTCN PAM
aaaugacucuugaucaccca

SEQ ID NO: 22905 - RNA, 20 nt, Artificial Sequence
  spacer sequence TTCN PAM
agcuuccccauuucugcccc

SEQ ID NO: 22906 - RNA, 20 nt, Artificial Sequence
  spacer sequence TTCN PAM
ccauuucugccccugacuug

SEQ ID NO: 22907 - RNA, 20 nt, Artificial Sequence
  spacer sequence TTCN PAM
gccccugacuugagcuccca

SEQ ID NO: 22908 - RNA, 20 nt, Artificial Sequence
  spacer sequence TTCN PAM
gcgcagccugguggugacuc

SEQ ID NO: 22909 - RNA, 20 nt, Artificial Sequence
  spacer sequence TTCN PAM
uguucagcgcagccuggugg

SEQ ID NO: 22910 - RNA, 20 nt, Artificial Sequence
  spacer sequence TTCN PAM
cuuccuguucagcgcagccu

SEQ ID NO: 22911 - RNA, 20 nt, Artificial Sequence
  spacer sequence TTCN PAM
agaaagauccaauaagggaa

SEQ ID NO: 22912 - RNA, 20 nt, Artificial Sequence
  spacer sequence TTCN PAM
cgaauugacuuguucacuuc

SEQ ID NO: 22913 - RNA, 20 nt, Artificial Sequence
  spacer sequence TTCN PAM
cuuauuggaucuuucucgaa

SEQ ID NO: 22914 - RNA, 20 nt, Artificial Sequence
  spacer sequence TTCN PAM
cugggcaccgcugggccaac

SEQ ID NO: 22915 - RNA, 20 nt, Artificial Sequence
  spacer sequence TTCN PAM
aggaccccuccguggguguu

SEQ ID NO: 22916 - RNA, 20 nt, Artificial Sequence
  spacer sequence TTCN PAM
gacuccaggguauuuguauu

SEQ ID NO: 22917 - RNA, 20 nt, Artificial Sequence
  spacer sequence TTCN PAM
caccacuucaauuaugucuu

SEQ ID NO: 22918 - RNA, 20 nt, Artificial Sequence
  spacer sequence TTCN PAM
auuaugucuucauugaacug

SEQ ID NO: 22919 - RNA, 20 nt, Artificial Sequence
  spacer sequence TTCN PAM
uugaacuggguuaugaaaaa

SEQ ID NO: 22920 - RNA, 20 nt, Artificial Sequence
  spacer sequence TTCN PAM
augaagacauaauugaagug

SEQ ID NO: 22921 - RNA, 20 nt, Artificial Sequence
  spacer sequence TTCN PAM
uaacccaguucaaugaagac

SEQ ID NO: 22922 - RNA, 20 nt, Artificial Sequence
  spacer sequence TTCN PAM
cuuuuucauaacccaguuca

SEQ ID NO: 22923 - RNA, 20 nt, Artificial Sequence
  spacer sequence TTCN PAM
aucccugcuucccuuuuuca

SEQ ID NO: 22924 - RNA, 20 nt, Artificial Sequence
  spacer sequence TTCN PAM
caugucuguaaugcuuuuca

SEQ ID NO: 22925 - RNA, 20 nt, Artificial Sequence
  spacer sequence TTCN PAM
uaucauccuacacacucacu

SEQ ID NO: 22926 - RNA, 20 nt, Artificial Sequence
  spacer sequence TTCN PAM
gugugcuggggugaggagag

SEQ ID NO: 22927 - RNA, 20 nt, Artificial Sequence
  spacer sequence TTCN PAM
agcaaaaccuguguuuuaau

SEQ ID NO: 22928 - RNA, 20 nt, Artificial Sequence
  spacer sequence TTCN PAM
cugugagccagcagagccaa

SEQ ID NO: 22929 - RNA, 20 nt, Artificial Sequence
  spacer sequence TTCN PAM
aaaaccuuuguucuccagau

SEQ ID NO: 22930 - RNA, 20 nt, Artificial Sequence
  spacer sequence TTCN PAM
ccagaugucagugcaaaguu

SEQ ID NO: 22931 - RNA, 20 nt, Artificial Sequence
  spacer sequence TTCN PAM
uaacuuugcacugacaucug

SEQ ID NO: 22932 - RNA, 20 nt, Artificial Sequence
  spacer sequence TTCN PAM
ugccucacuuacugcucggu

SEQ ID NO: 22933 - RNA, 20 nt, Artificial Sequence
  spacer sequence TTCN PAM
cagccuccaugaagucguca

SEQ ID NO: 22934 - RNA, 20 nt, Artificial Sequence
  spacer sequence TTCN PAM
uggaggcugagaaauauagu

SEQ ID NO: 22935 - RNA, 20 nt, Artificial Sequence
  spacer sequence TTCN PAM
ccggaugacggugaguuacg

SEQ ID NO: 22936 - RNA, 20 nt, Artificial Sequence
  spacer sequence TTCN PAM
ucuccacuuccccggaugac

SEQ ID NO: 22937 - RNA, 20 nt, Artificial Sequence
  spacer sequence TTCN PAM
cugacuuccucuccacuucc

SEQ ID NO: 22938 - RNA, 20 nt, Artificial Sequence
  spacer sequence TTCN PAM
cccaucccaggugccccucu

SEQ ID NO: 22939 - RNA, 20 nt, Artificial Sequence
  spacer sequence TTCN PAM
cucccaguuguccugaugcc

SEQ ID NO: 22940 - RNA, 20 nt, Artificial Sequence
  spacer sequence TTCN PAM
uaguggacaccaagcugagc

SEQ ID NO: 22941 - RNA, 20 nt, Artificial Sequence
  spacer sequence TTCN PAM
uugaugacucaugcucagcu

SEQ ID NO: 22942 - RNA, 20 nt, Artificial Sequence
  spacer sequence TTCN PAM
uuagucuuaugucugcacuc

SEQ ID NO: 22943 - RNA, 20 nt, Artificial Sequence
  spacer sequence TTCN PAM
acauucuuuagucuuauguc

SEQ ID NO: 22944 - RNA, 20 nt, Artificial Sequence
  spacer sequence TTCN PAM
agcucuuuuacucaaacauu

SEQ ID NO: 22945 - RNA, 20 nt, Artificial Sequence
  spacer sequence TTCN PAM
aaagagaggcauagaaacaa

SEQ ID NO: 22946 - RNA, 20 nt, Artificial Sequence
  spacer sequence TTCN PAM
augccucucuuuagaaucug

SEQ ID NO: 22947 - RNA, 20 nt, Artificial Sequence
  spacer sequence TTCN PAM
gguucaggaaagagauuauu

SEQ ID NO: 22948 - RNA, 20 nt, Artificial Sequence
  spacer sequence TTCN PAM
ggaaagagauuauuuaggaa

SEQ ID NO: 22949 - RNA, 20 nt, Artificial Sequence
  spacer sequence TTCN PAM
ugaaccugaacucauggauc

SEQ ID NO: 22950 - RNA, 20 nt, Artificial Sequence
  spacer sequence TTCN PAM
uaaauaaucucuuuccugaa

SEQ ID NO: 22951 - RNA, 20 nt, Artificial Sequence
  spacer sequence TTCN PAM
uccuaaauaaucucuuuccu

SEQ ID NO: 22952 - RNA, 20 nt, Artificial Sequence
  spacer sequence TTCN PAM
ucuuccuaaauaaucucuuu

SEQ ID NO: 22953 - RNA, 20 nt, Artificial Sequence
  spacer sequence TTCN PAM
ccgccacuucuucuuccuaa

SEQ ID NO: 22954 - RNA, 20 nt, Artificial Sequence
  spacer sequence TTCN PAM
auucuccgccacuucuucuu

SEQ ID NO: 22955 - RNA, 20 nt, Artificial Sequence
  spacer sequence TTCN PAM
uuccauucuccgccacuucu

SEQ ID NO: 22956 - RNA, 20 nt, Artificial Sequence
  spacer sequence TTCN PAM
ucauuccauucuccgccacu

SEQ ID NO: 22957 - RNA, 20 nt, Artificial Sequence
  spacer sequence TTCN PAM
uauuuuacauucuucauucc

SEQ ID NO: 22958 - RNA, 20 nt, Artificial Sequence
  spacer sequence TTCN PAM
gcccaaagcuggugaugaga

SEQ ID NO: 22959 - RNA, 20 nt, Artificial Sequence
  spacer sequence TTCN PAM
agagacgacaaaguaucuca

SEQ ID NO: 22960 - RNA, 20 nt, Artificial Sequence
  spacer sequence TTCN PAM
uuccagagacgacaaaguau

SEQ ID NO: 22961 - RNA, 20 nt, Artificial Sequence
  spacer sequence TTCN PAM
ucuucauuccagagacgaca

SEQ ID NO: 22962 - RNA, 20 nt, Artificial Sequence
  spacer sequence TTCN PAM
uuuuaaacccauuuccucuu

SEQ ID NO: 22963 - RNA, 20 nt, Artificial Sequence
  spacer sequence TTCN PAM
aucccuuaugcuucauuuua

SEQ ID NO: 22964 - RNA, 20 nt, Artificial Sequence
  spacer sequence TTCN PAM
uuuugucuaccuucgauccc

SEQ ID NO: 22965 - RNA, 20 nt, Artificial Sequence
  spacer sequence TTCN PAM
ugcgauugagaggugucuuu

SEQ ID NO: 22966 - RNA, 20 nt, Artificial Sequence
  spacer sequence TTCN PAM
auuuuuaaagacaccucuca

SEQ ID NO: 22967 - RNA, 20 nt, Artificial Sequence
  spacer sequence TTCN PAM
ucaccacccuaguucuauuu

SEQ ID NO: 22968 - RNA, 20 nt, Artificial Sequence
  spacer sequence TTCN PAM
ggagggccaucugccccuga

SEQ ID NO: 22969 - RNA, 20 nt, Artificial Sequence
  spacer sequence TTCN PAM
uucaccaccccaacuccauc

SEQ ID NO: 22970 - RNA, 20 nt, Artificial Sequence
  spacer sequence TTCN PAM
ccaccccaacuccaucuacu

SEQ ID NO: 22971 - RNA, 20 nt, Artificial Sequence
  spacer sequence TTCN PAM
gauaacuggagauaauggag

SEQ ID NO: 22972 - RNA, 20 nt, Artificial Sequence
  spacer sequence TTCN PAM
cugggcacaccauguaaacc

SEQ ID NO: 22973 - RNA, 20 nt, Artificial Sequence
  spacer sequence TTCN PAM
gggguuuacauggugugccc

SEQ ID NO: 22974 - RNA, 20 nt, Artificial Sequence
  spacer sequence TTCN PAM
ugcuagggcucccaaagugu

SEQ ID NO: 22975 - RNA, 20 nt, Artificial Sequence
  spacer sequence TTCN PAM
uaccaccuuuccugcuaggg

SEQ ID NO: 22976 - RNA, 20 nt, Artificial Sequence
  spacer sequence TTCN PAM
gggcuggucuuccuaccacc

SEQ ID NO: 22977 - RNA, 20 nt, Artificial Sequence
  spacer sequence TTCN PAM
cugcccuuuuucggggcugg

SEQ ID NO: 22978 - RNA, 20 nt, Artificial Sequence
  spacer sequence TTCN PAM
cuguuuucucugcccuuuuu

SEQ ID NO: 22979 - RNA, 20 nt, Artificial Sequence
  spacer sequence TTCN PAM
uuucccuguuuucucugccc

SEQ ID NO: 22980 - RNA, 20 nt, Artificial Sequence
  spacer sequence TTCN PAM
ugccuuguuccuuucccugu

SEQ ID NO: 22981 - RNA, 20 nt, Artificial Sequence
  spacer sequence TTCN PAM
ucuugccuuguuccuuuccc

SEQ ID NO: 22982 - RNA, 20 nt, Artificial Sequence
  spacer sequence TTCN PAM
cugcaacagcacaggugauu

SEQ ID NO: 22983 - RNA, 20 nt, Artificial Sequence
  spacer sequence TTCN PAM
acaaagcuccaguuaagaaa

SEQ ID NO: 22984 - RNA, 20 nt, Artificial Sequence
  spacer sequence TTCN PAM
uaacuggagcuuuguugaag

SEQ ID NO: 22985 - RNA, 20 nt, Artificial Sequence
  spacer sequence TTCN PAM
agccaucaccgauaaaagcg

SEQ ID NO: 22986 - RNA, 20 nt, Artificial Sequence
  spacer sequence TTCN PAM
ucugcaaagcacaugcgggc

SEQ ID NO: 22987 - RNA, 20 nt, Artificial Sequence
  spacer sequence TTCN PAM
uggcugacuguaccaaucgc

SEQ ID NO: 22988 - RNA, 20 nt, Artificial Sequence
  spacer sequence TTCN PAM
uuccuggcugacuguaccaa

SEQ ID NO: 22989 - RNA, 20 nt, Artificial Sequence
  spacer sequence TTCN PAM
cacuuucauuccuggcugac

SEQ ID NO: 22990 - RNA, 20 nt, Artificial Sequence
  spacer sequence TTCN PAM
caucuguaaaaugacagggu

SEQ ID NO: 22991 - RNA, 20 nt, Artificial Sequence
  spacer sequence TTCN PAM
caagucuaugucuacauaga

SEQ ID NO: 22992 - RNA, 20 nt, Artificial Sequence
  spacer sequence TTCN PAM
auguagacauagacuuguga

SEQ ID NO: 22993 - RNA, 20 nt, Artificial Sequence
  spacer sequence TTCN PAM
cuuuggcuuuccacgaagga

SEQ ID NO: 22994 - RNA, 20 nt, Artificial Sequence
  spacer sequence TTCN PAM
acgaaggaaacuaucuaugc

SEQ ID NO: 22995 - RNA, 20 nt, Artificial Sequence
  spacer sequence TTCN PAM
uggaaagccaaagugaauac

SEQ ID NO: 22996 - RNA, 20 nt, Artificial Sequence
  spacer sequence TTCN PAM
uucguggaaagccaaaguga

SEQ ID NO: 22997 - RNA, 20 nt, Artificial Sequence
  spacer sequence TTCN PAM
ucuaugauuccucagaaacu

SEQ ID NO: 22998 - RNA, 20 nt, Artificial Sequence
  spacer sequence TTCN PAM
augauuccucagaaacucuu

SEQ ID NO: 22999 - RNA, 20 nt, Artificial Sequence
  spacer sequence TTCN PAM
ucagaaacucuugucgacua

SEQ ID NO: 23000 - RNA, 20 nt, Artificial Sequence
  spacer sequence TTCN PAM
gaggaaucauagaagaaagc

SEQ ID NO: 23001 - RNA, 20 nt, Artificial Sequence
  spacer sequence TTCN PAM
ucuagucgacaagaguuucu

SEQ ID NO: 23002 - RNA, 20 nt, Artificial Sequence
  spacer sequence TTCN PAM
uguuccucuagucgacaaga

SEQ ID NO: 23003 - RNA, 20 nt, Artificial Sequence
  spacer sequence TTCN PAM
cuccuccccuaaaauugggu

SEQ ID NO: 23004 - RNA, 20 nt, Artificial Sequence
  spacer sequence TTCN PAM
aguaauuaauuuaaagucuu

SEQ ID NO: 23005 - RNA, 20 nt, Artificial Sequence
  spacer sequence TTCN PAM
gagauuauaggcauaagcaa

SEQ ID NO: 23006 - RNA, 20 nt, Artificial Sequence
  spacer sequence TTCN PAM
aaauuucugagauuauaggc

SEQ ID NO: 23007 - RNA, 20 nt, Artificial Sequence
  spacer sequence TTCN PAM
cucuguggccuuccaaauuu

SEQ ID NO: 23008 - RNA, 20 nt, Artificial Sequence
  spacer sequence TTCN PAM
agcaaucuucccucuguggc

SEQ ID NO: 23009 - RNA, 20 nt, Artificial Sequence
  spacer sequence TTCN PAM
agaccagccugggcaacaua

SEQ ID NO: 23010 - RNA, 20 nt, Artificial Sequence
  spacer sequence TTCN PAM
aagaaaauauaaaauuuggc

SEQ ID NO: 23011 - RNA, 20 nt, Artificial Sequence
  spacer sequence TTCN PAM
uugaaaagauagcuaaaucu

SEQ ID NO: 23012 - RNA, 20 nt, Artificial Sequence
  spacer sequence TTCN PAM
cucugucaacaucugcugag

SEQ ID NO: 23013 - RNA, 20 nt, Artificial Sequence
  spacer sequence TTCN PAM
auaccaguguguuacagccu

SEQ ID NO: 23014 - RNA, 20 nt, Artificial Sequence
  spacer sequence TTCN PAM
ugacaggcuguaacacacug

SEQ ID NO: 23015 - RNA, 20 nt, Artificial Sequence
  spacer sequence TTCN PAM
cugagucugcuucaugacag

SEQ ID NO: 23016 - RNA, 20 nt, Artificial Sequence
  spacer sequence TTCN PAM
ggauuaugccuguaagauga

SEQ ID NO: 23017 - RNA, 20 nt, Artificial Sequence
  spacer sequence TTCN PAM
aacucaccugcauuuaaaua

SEQ ID NO: 23018 - RNA, 20 nt, Artificial Sequence
  spacer sequence TTCN PAM
uauuuaaaugcaggugaguu

SEQ ID NO: 23019 - RNA, 20 nt, Artificial Sequence
  spacer sequence TTCN PAM
gcucacucuuuauucauauu

SEQ ID NO: 23020 - RNA, 20 nt, Artificial Sequence
  spacer sequence TTCN PAM
caugugcgaugcccucccau

SEQ ID NO: 23021 - RNA, 20 nt, Artificial Sequence
  spacer sequence TTCN PAM
cacacgcaaaggcauggggg

SEQ ID NO: 23022 - RNA, 20 nt, Artificial Sequence
  spacer sequence TTCN PAM
ugccuuguccccccaugccu

SEQ ID NO: 23023 - RNA, 20 nt, Artificial Sequence
  spacer sequence TTCN PAM
cagaucuagagcaaugcuuc

SEQ ID NO: 23024 - RNA, 20 nt, Artificial Sequence
  spacer sequence TTCN PAM
cugcuggguuugugugucac

SEQ ID NO: 23025 - RNA, 20 nt, Artificial Sequence
  spacer sequence TTCN PAM
caacguucucugcuggguuu

SEQ ID NO: 23026 - RNA, 20 nt, Artificial Sequence
  spacer sequence TTCN PAM
cuuaaaaguccauccagaau

SEQ ID NO: 23027 - RNA, 20 nt, Artificial Sequence
  spacer sequence TTCN PAM
ggauggacuuuuaagugaac

SEQ ID NO: 23028 - RNA, 20 nt, Artificial Sequence
  spacer sequence TTCN PAM
gauucuggauggacuuuuaa

SEQ ID NO: 23029 - RNA, 20 nt, Artificial Sequence
  spacer sequence TTCN PAM
ugggggccgggcguggauuu

SEQ ID NO: 23030 - RNA, 20 nt, Artificial Sequence
  spacer sequence TTCN PAM
aguucaggucaagcuggaug

SEQ ID NO: 23031 - RNA, 20 nt, Artificial Sequence
  spacer sequence TTCN PAM
ggucaagcuggauggacacc

SEQ ID NO: 23032 - RNA, 20 nt, Artificial Sequence
  spacer sequence TTCN PAM
ccaccagccguauuuccugg

SEQ ID NO: 23033 - RNA, 20 nt, Artificial Sequence
  spacer sequence TTCN PAM
uggggcugcuuguuacugac

SEQ ID NO: 23034 - RNA, 20 nt, Artificial Sequence
  spacer sequence TTCN PAM
gucauucaagguggguccug

SEQ ID NO: 23035 - RNA, 20 nt, Artificial Sequence
  spacer sequence TTCN PAM
agguggguccugaagccaca

SEQ ID NO: 23036 - RNA, 20 nt, Artificial Sequence
  spacer sequence TTCN PAM
ggacccaccuugaaugacag

SEQ ID NO: 23037 - RNA, 20 nt, Artificial Sequence
  spacer sequence TTCN PAM
uucuuuuaaagagcgauggc

SEQ ID NO: 23038 - RNA, 20 nt, Artificial Sequence
  spacer sequence TTCN PAM
uuuaaagagcgauggcacac

SEQ ID NO: 23039 - RNA, 20 nt, Artificial Sequence
  spacer sequence TTCN PAM
cucaagaguugagagaugug

SEQ ID NO: 23040 - RNA, 20 nt, Artificial Sequence
  spacer sequence TTCN PAM
guccauuuucucucaagagu

SEQ ID NO: 23041 - RNA, 20 nt, Artificial Sequence
  spacer sequence TTCN PAM
auccugauaccagcaggaaa

SEQ ID NO: 23042 - RNA, 20 nt, Artificial Sequence
  spacer sequence TTCN PAM
ugcugguaucaggauugaaa

SEQ ID NO: 23043 - RNA, 20 nt, Artificial Sequence
  spacer sequence TTCN PAM
ugguuugguaguaccuacca

SEQ ID NO: 23044 - RNA, 20 nt, Artificial Sequence
  spacer sequence TTCN PAM
uuucucccaaguacaccagg

SEQ ID NO: 23045 - RNA, 20 nt, Artificial Sequence
  spacer sequence TTCN PAM
cccaaguacaccaggaaccc

SEQ ID NO: 23046 - RNA, 20 nt, Artificial Sequence
  spacer sequence TTCN PAM
ugguguacuugggagaaaag

SEQ ID NO: 23047 - RNA, 20 nt, Artificial Sequence
  spacer sequence TTCN PAM
aauacaggcgcuacaaaaaa

SEQ ID NO: 23048 - RNA, 20 nt, Artificial Sequence
  spacer sequence TTCN PAM
uuuuuuguagcgccuguauu

SEQ ID NO: 23049 - RNA, 20 nt, Artificial Sequence
  spacer sequence TTCN PAM
caccuauuucuuuuuuugua

SEQ ID NO: 23050 - RNA, 20 nt, Artificial Sequence
  spacer sequence TTCN PAM
ugccccgcuuucacaccuau

SEQ ID NO: 23051 - RNA, 20 nt, Artificial Sequence
  spacer sequence TTCN PAM
cuuucuugccccgcuuucac

SEQ ID NO: 23052 - RNA, 20 nt, Artificial Sequence
  spacer sequence TTCN PAM
auaaccuccauauugagaga

SEQ ID NO: 23053 - RNA, 20 nt, Artificial Sequence
  spacer sequence TTCN PAM
guguuuuaugucucucaaua

SEQ ID NO: 23054 - RNA, 20 nt, Artificial Sequence
  spacer sequence TTCN PAM
gggcccagcaccugacaggu

SEQ ID NO: 23055 - RNA, 20 nt, Artificial Sequence
  spacer sequence TTCN PAM
gcugccuggagauaguucag

SEQ ID NO: 23056 - RNA, 20 nt, Artificial Sequence
  spacer sequence TTCN PAM
caucauuaaaaagcugaugu

SEQ ID NO: 23057 - RNA, 20 nt, Artificial Sequence
  spacer sequence TTCN PAM
aacauguuuuuaaucuuuaa

SEQ ID NO: 23058 - RNA, 20 nt, Artificial Sequence
  spacer sequence TTCN PAM
acacccaucucuccuuacag

SEQ ID NO: 23059 - RNA, 20 nt, Artificial Sequence
  spacer sequence TTCN PAM
uacgauguuccacacccauc

SEQ ID NO: 23060 - RNA, 20 nt, Artificial Sequence
  spacer sequence TTCN PAM
cugcagcaugagugcaguca

SEQ ID NO: 23061 - RNA, 20 nt, Artificial Sequence
  spacer sequence TTCN PAM
uuccuuacaagagaaaucgc

SEQ ID NO: 23062 - RNA, 20 nt, Artificial Sequence
  spacer sequence TTCN PAM
uuacaagagaaaucgcuccu

SEQ ID NO: 23063 - RNA, 20 nt, Artificial Sequence
  spacer sequence TTCN PAM
cuuguaaggaaagaaggcag

SEQ ID NO: 23064 - RNA, 20 nt, Artificial Sequence
  spacer sequence TTCN PAM
ggagcgauuucucuuguaag

SEQ ID NO: 23065 - RNA, 20 nt, Artificial Sequence
  spacer sequence TTCN PAM
ccaguggucaacuuacugcu

SEQ ID NO: 23066 - RNA, 20 nt, Artificial Sequence
  spacer sequence TTCN PAM
agccucacuuucuccagugg

SEQ ID NO: 23067 - RNA, 20 nt, Artificial Sequence
  spacer sequence TTCN PAM
agugguuccagccucacuuu

SEQ ID NO: 23068 - RNA, 20 nt, Artificial Sequence
  spacer sequence TTCN PAM
gaggccaguucuguucugac

SEQ ID NO: 23069 - RNA, 20 nt, Artificial Sequence
  spacer sequence TTCN PAM
guucugacacaugcagcugg

SEQ ID NO: 23070 - RNA, 20 nt, Artificial Sequence
  spacer sequence TTCN PAM
gacacaugcagcugggagcc

SEQ ID NO: 23071 - RNA, 20 nt, Artificial Sequence
  spacer sequence TTCN PAM
uaaaccaguggcucccagcu

SEQ ID NO: 23072 - RNA, 20 nt, Artificial Sequence
  spacer sequence TTCN PAM
cgugggcaugggacugugcu

SEQ ID NO: 23073 - RNA, 20 nt, Artificial Sequence
  spacer sequence TTCN PAM
gaaagggcucccagucacau

SEQ ID NO: 23074 - RNA, 20 nt, Artificial Sequence
  spacer sequence TTCN PAM
gaauaagcacagucccaugc

SEQ ID NO: 23075 - RNA, 20 nt, Artificial Sequence
  spacer sequence TTCN PAM
ccuaaauuacuccaaugaca

SEQ ID NO: 23076 - RNA, 20 nt, Artificial Sequence
  spacer sequence TTCN PAM
uugucauuggaguaauuuag

SEQ ID NO: 23077 - RNA, 20 nt, Artificial Sequence
  spacer sequence TTCN PAM
cugaguuuucuuugucauug

SEQ ID NO: 23078 - RNA, 20 nt, Artificial Sequence
  spacer sequence TTCN PAM
uaggcauugucauuugccaa

SEQ ID NO: 23079 - RNA, 20 nt, Artificial Sequence
  spacer sequence TTCN PAM
ugaguuauggauuggcaaau

SEQ ID NO: 23080 - RNA, 20 nt, Artificial Sequence
  spacer sequence TTCN PAM
uggcuaugcuuggauaauuc

SEQ ID NO: 23081 - RNA, 20 nt, Artificial Sequence
  spacer sequence TTCN PAM
cucuagacuuggaguguuaa

SEQ ID NO: 23082 - RNA, 20 nt, Artificial Sequence
  spacer sequence TTCN PAM
ccccucucucuggcaggaga

SEQ ID NO: 23083 - RNA, 20 nt, Artificial Sequence
  spacer sequence TTCN PAM
ccugccagagagaggggaga

SEQ ID NO: 23084 - RNA, 20 nt, Artificial Sequence
  spacer sequence TTCN PAM
aauaauucggccuaaauuuu

SEQ ID NO: 23085 - RNA, 20 nt, Artificial Sequence
  spacer sequence TTCN PAM
gccuaaauuuucauuuaugc

SEQ ID NO: 23086 - RNA, 20 nt, Artificial Sequence
  spacer sequence TTCN PAM
uuuaugccuguguauuuaug

SEQ ID NO: 23087 - RNA, 20 nt, Artificial Sequence
  spacer sequence TTCN PAM
uuuucugaaaauugaaaaau

SEQ ID NO: 23088 - RNA, 20 nt, Artificial Sequence
  spacer sequence TTCN PAM
gaaaauugaaaaauucagaa

SEQ ID NO: 23089 - RNA, 20 nt, Artificial Sequence
  spacer sequence TTCN PAM
gaaaaagaagccauaauacu

SEQ ID NO: 23090 - RNA, 20 nt, Artificial Sequence
  spacer sequence TTCN PAM
auuuucagaaaaagaagcca

SEQ ID NO: 23091 - RNA, 20 nt, Artificial Sequence
  spacer sequence TTCN PAM
gaaagccaaagauaauagaa

SEQ ID NO: 23092 - RNA, 20 nt, Artificial Sequence
  spacer sequence TTCN PAM
gaauuuuucaauuuucagaa

SEQ ID NO: 23093 - RNA, 20 nt, Artificial Sequence
  spacer sequence TTCN PAM
auuaucuuuggcuuucugaa

SEQ ID NO: 23094 - RNA, 20 nt, Artificial Sequence
  spacer sequence TTCN PAM
uaccuaaucaauauaccuug

SEQ ID NO: 23095 - RNA, 20 nt, Artificial Sequence
  spacer sequence TTCN PAM
ucaaaaguucccaggcaaau

SEQ ID NO: 23096 - RNA, 20 nt, Artificial Sequence
  spacer sequence TTCN PAM
caggcaaauggguuccucuu

SEQ ID NO: 23097 - RNA, 20 nt, Artificial Sequence
  spacer sequence TTCN PAM
ucuuuaauuuucacccuuac

SEQ ID NO: 23098 - RNA, 20 nt, Artificial Sequence
  spacer sequence TTCN PAM
cccuuacaauaaacucuucu

SEQ ID NO: 23099 - RNA, 20 nt, Artificial Sequence
  spacer sequence TTCN PAM
gcagguuuuguuuauuuuga

SEQ ID NO: 23100 - RNA, 20 nt, Artificial Sequence
  spacer sequence TTCN PAM
ucaaaauaaacaaaaccugc

SEQ ID NO: 23101 - RNA, 20 nt, Artificial Sequence
  spacer sequence TTCN PAM
cuuuuuuuuucaagacauga

SEQ ID NO: 23102 - RNA, 20 nt, Artificial Sequence
  spacer sequence TTCN PAM
agacaugaggugugaaugau

SEQ ID NO: 23103 - RNA, 20 nt, Artificial Sequence
  spacer sequence TTCN PAM
caccucaugucuugaaaaaa

SEQ ID NO: 23104 - RNA, 20 nt, Artificial Sequence
  spacer sequence TTCN PAM
guuuacauauccaaauacug

SEQ ID NO: 23105 - RNA, 20 nt, Artificial Sequence
  spacer sequence TTCN PAM
ggagucugaggaccugaaau

SEQ ID NO: 23106 - RNA, 20 nt, Artificial Sequence
  spacer sequence TTCN PAM
gguccucagacuccagaauu

SEQ ID NO: 23107 - RNA, 20 nt, Artificial Sequence
  spacer sequence TTCN PAM
gugggauaauguacacauuu

SEQ ID NO: 23108 - RNA, 20 nt, Artificial Sequence
  spacer sequence TTCN PAM
cauuccguuuauaagaagga

SEQ ID NO: 23109 - RNA, 20 nt, Artificial Sequence
  spacer sequence TTCN PAM
guuuauaagaaggagaaauu

SEQ ID NO: 23110 - RNA, 20 nt, Artificial Sequence
  spacer sequence TTCN PAM
uauaaacggaaugcgaaugu

SEQ ID NO: 23111 - RNA, 20 nt, Artificial Sequence
  spacer sequence TTCN PAM
ccuucuuauaaacggaaugc

SEQ ID NO: 23112 - RNA, 20 nt, Artificial Sequence
  spacer sequence TTCN PAM
gaggaaaauuaaauaagugg

SEQ ID NO: 23113 - RNA, 20 nt, Artificial Sequence
  spacer sequence TTCN PAM
ucagaaaacucugugaggau

SEQ ID NO: 23114 - RNA, 20 nt, Artificial Sequence
  spacer sequence TTCN PAM
uaggcacaaccacagaagca

SEQ ID NO: 23115 - RNA, 20 nt, Artificial Sequence
  spacer sequence TTCN PAM
gugguugugccuaugaauuu

SEQ ID NO: 23116 - RNA, 20 nt, Artificial Sequence
  spacer sequence TTCN PAM
cucuccuuggugcuucugug

SEQ ID NO: 23117 - RNA, 20 nt, Artificial Sequence
  spacer sequence TTCN PAM
guaggcgaccaacauggggu

SEQ ID NO: 23118 - RNA, 20 nt, Artificial Sequence
  spacer sequence TTCN PAM
uguagauuccguaggcgacc

SEQ ID NO: 23119 - RNA, 20 nt, Artificial Sequence
  spacer sequence TTCN PAM
gauuccuguagauuccguag

SEQ ID NO: 23120 - RNA, 20 nt, Artificial Sequence
  spacer sequence TTCN PAM
gccuauaccacccaucagau

SEQ ID NO: 23121 - RNA, 20 nt, Artificial Sequence
  spacer sequence TTCN PAM
guugguggcugaucugaugg

SEQ ID NO: 23122 - RNA, 20 nt, Artificial Sequence
  spacer sequence TTCN PAM
ccaguggguucccaccggug

SEQ ID NO: 23123 - RNA, 20 nt, Artificial Sequence
  spacer sequence TTCN PAM
caccgguguuuucgugcaag

SEQ ID NO: 23124 - RNA, 20 nt, Artificial Sequence
  spacer sequence TTCN PAM
ugcaagcuuagccccuucuu

SEQ ID NO: 23125 - RNA, 20 nt, Artificial Sequence
  spacer sequence TTCN PAM
uugcagaaaaaaagauauug

SEQ ID NO: 23126 - RNA, 20 nt, Artificial Sequence
  spacer sequence TTCN PAM
gcaaagaaggggcuaagcuu

SEQ ID NO: 23127 - RNA, 20 nt, Artificial Sequence
  spacer sequence TTCN PAM
acuguuggcacaucaauauc

SEQ ID NO: 23128 - RNA, 20 nt, Artificial Sequence
  spacer sequence TTCN PAM
uucuacuguuggcacaucaa

SEQ ID NO: 23129 - RNA, 20 nt, Artificial Sequence
  spacer sequence TTCN PAM
ucuuucuacuguuggcacau

SEQ ID NO: 23130 - RNA, 20 nt, Artificial Sequence
  spacer sequence TTCN PAM
agcucuguacacaaccuuug

SEQ ID NO: 23131 - RNA, 20 nt, Artificial Sequence
  spacer sequence TTCN PAM
cagacuugguuuuaucaugc

SEQ ID NO: 23132 - RNA, 20 nt, Artificial Sequence
  spacer sequence TTCN PAM
aaaaaguguuuagacaaaua

SEQ ID NO: 23133 - RNA, 20 nt, Artificial Sequence
  spacer sequence TTCN PAM
ucccuuuccaaaaaguguuu

SEQ ID NO: 23134 - RNA, 20 nt, Artificial Sequence
  spacer sequence TTCN PAM
ucuccauuucaucccuuucc

SEQ ID NO: 23135 - RNA, 20 nt, Artificial Sequence
  spacer sequence TTCN PAM
uuuccucuccauuucauccc

SEQ ID NO: 23136 - RNA, 20 nt, Artificial Sequence
  spacer sequence TTCN PAM
uuuuccuuuccucuccauuu

SEQ ID NO: 23137 - RNA, 20 nt, Artificial Sequence
  spacer sequence TTCN PAM
acaacagcugccuuccauug

SEQ ID NO: 23138 - RNA, 20 nt, Artificial Sequence
  spacer sequence TTCN PAM
auugucuacugccagugaag

SEQ ID NO: 23139 - RNA, 20 nt, Artificial Sequence
  spacer sequence TTCN PAM
cuggcaguagacaauggaag

SEQ ID NO: 23140 - RNA, 20 nt, Artificial Sequence
  spacer sequence TTCN PAM
cacagaggcuauuauuagca

SEQ ID NO: 23141 - RNA, 20 nt, Artificial Sequence
  spacer sequence TTCN PAM
cagacccaggcccaggccca

SEQ ID NO: 23142 - RNA, 20 nt, Artificial Sequence
  spacer sequence TTCN PAM
aggcagcagauacggcagag

SEQ ID NO: 23143 - RNA, 20 nt, Artificial Sequence
  spacer sequence TTCN PAM
ugcagcccgucacaggggag

SEQ ID NO: 23144 - RNA, 20 nt, Artificial Sequence
  spacer sequence TTCN PAM
agucacacagcgacaguccu

SEQ ID NO: 23145 - RNA, 20 nt, Artificial Sequence
  spacer sequence TTCN PAM
agauagcaaaagccaggacu

SEQ ID NO: 23146 - RNA, 20 nt, Artificial Sequence
  spacer sequence TTCN PAM
ucuagauagcaaaagccagg

SEQ ID NO: 23147 - RNA, 20 nt, Artificial Sequence
  spacer sequence TTCN PAM
ccuuuccagcucugcaauug

SEQ ID NO: 23148 - RNA, 20 nt, Artificial Sequence
  spacer sequence TTCN PAM
agcucugcaauugccacucu

SEQ ID NO: 23149 - RNA, 20 nt, Artificial Sequence
  spacer sequence TTCN PAM
ucuuccaucuugugccccag

SEQ ID NO: 23150 - RNA, 20 nt, Artificial Sequence
  spacer sequence TTCN PAM
aucuugugccccaguccucc

SEQ ID NO: 23151 - RNA, 20 nt, Artificial Sequence
  spacer sequence TTCN PAM
cuuuaagggaggacuggggc

SEQ ID NO: 23152 - RNA, 20 nt, Artificial Sequence
  spacer sequence TTCN PAM
uuguccccuucuuucugaga

SEQ ID NO: 23153 - RNA, 20 nt, Artificial Sequence
  spacer sequence TTCN PAM
uucugagaguguggucaauc

SEQ ID NO: 23154 - RNA, 20 nt, Artificial Sequence
  spacer sequence TTCN PAM
gagaguguggucaaucuccu

SEQ ID NO: 23155 - RNA, 20 nt, Artificial Sequence
  spacer sequence TTCN PAM
cuaauagccagggcucaaau

SEQ ID NO: 23156 - RNA, 20 nt, Artificial Sequence
  spacer sequence TTCN PAM
uuggccauuugagcccuggc

SEQ ID NO: 23157 - RNA, 20 nt, Artificial Sequence
  spacer sequence TTCN PAM
uaacacuaccagccacguga

SEQ ID NO: 23158 - RNA, 20 nt, Artificial Sequence
  spacer sequence TTCN PAM
uccugacccucaccacgagg

SEQ ID NO: 23159 - RNA, 20 nt, Artificial Sequence
  spacer sequence TTCN PAM
ugacccucaccacgaggcac

SEQ ID NO: 23160 - RNA, 20 nt, Artificial Sequence
  spacer sequence TTCN PAM
gcacaggugccucugugccu

SEQ ID NO: 23161 - RNA, 20 nt, Artificial Sequence
  spacer sequence TTCN PAM
gugcaugaggcagagucaga

SEQ ID NO: 23162 - RNA, 20 nt, Artificial Sequence
  spacer sequence TTCN PAM
uccaggagaaugggggacag

SEQ ID NO: 23163 - RNA, 20 nt, Artificial Sequence
  spacer sequence TTCN PAM
aggagaaugggggacagugc

SEQ ID NO: 23164 - RNA, 20 nt, Artificial Sequence
  spacer sequence TTCN PAM
ccuggaagaacagagauccc

SEQ ID NO: 23165 - RNA, 20 nt, Artificial Sequence
  spacer sequence TTCN PAM
caaugaacuucccagauaca

SEQ ID NO: 23166 - RNA, 20 nt, Artificial Sequence
  spacer sequence TTCN PAM
uugugaaggggucauuuaag

SEQ ID NO: 23167 - RNA, 20 nt, Artificial Sequence
  spacer sequence TTCN PAM
cagauacaagacuugagcuc

SEQ ID NO: 23168 - RNA, 20 nt, Artificial Sequence
  spacer sequence TTCN PAM
ugcccauaggacacuugucc

SEQ ID NO: 23169 - RNA, 20 nt, Artificial Sequence
  spacer sequence TTCN PAM
ccaaggguuuggcucagagg

SEQ ID NO: 23170 - RNA, 20 nt, Artificial Sequence
  spacer sequence TTCN PAM
ucaccaaggguuuggcucag

SEQ ID NO: 23171 - RNA, 20 nt, Artificial Sequence
  spacer sequence TTCN PAM
ggaaaaaucucaaauacuac

SEQ ID NO: 23172 - RNA, 20 nt, Artificial Sequence
  spacer sequence TTCN PAM
agaaaauaaagguauugccu

SEQ ID NO: 23173 - RNA, 20 nt, Artificial Sequence
  spacer sequence TTCN PAM
cucuacuuuuguaguauuug

SEQ ID NO: 23174 - RNA, 20 nt, Artificial Sequence
  spacer sequence TTCN PAM
agcuccaaccaccacagcuc

SEQ ID NO: 23175 - RNA, 20 nt, Artificial Sequence
  spacer sequence TTCN PAM
ugucuucuguaacccuaucg

SEQ ID NO: 23176 - RNA, 20 nt, Artificial Sequence
  spacer sequence TTCN PAM
guaacccuaucgccucccua

SEQ ID NO: 23177 - RNA, 20 nt, Artificial Sequence
  spacer sequence TTCN PAM
ucaguaaacaccucuguaug

SEQ ID NO: 23178 - RNA, 20 nt, Artificial Sequence
  spacer sequence TTCN PAM
uauguuuaaaaaauacauac

SEQ ID NO: 23179 - RNA, 20 nt, Artificial Sequence
  spacer sequence TTCN PAM
uuuaaauacaacugcaaaac

SEQ ID NO: 23180 - RNA, 20 nt, Artificial Sequence
  spacer sequence TTCN PAM
gaguuuaaaauaacuccccu

SEQ ID NO: 23181 - RNA, 20 nt, Artificial Sequence
  spacer sequence TTCN PAM
uuccaucugggucauguuuu

SEQ ID NO: 23182 - RNA, 20 nt, Artificial Sequence
  spacer sequence TTCN PAM
aucugggucauguuuuggag

SEQ ID NO: 23183 - RNA, 20 nt, Artificial Sequence
  spacer sequence TTCN PAM
agugagguucaagacugaag

SEQ ID NO: 23184 - RNA, 20 nt, Artificial Sequence
  spacer sequence TTCN PAM
agacugaagcugccaagaaa

SEQ ID NO: 23185 - RNA, 20 nt, Artificial Sequence
  spacer sequence TTCN PAM
gucuugaaccucacuggaag

SEQ ID NO: 23186 - RNA, 20 nt, Artificial Sequence
  spacer sequence TTCN PAM
uggcagcuucagucuugaac

SEQ ID NO: 23187 - RNA, 20 nt, Artificial Sequence
  spacer sequence TTCN PAM
gagaaucacacucucuaaaa

SEQ ID NO: 23188 - RNA, 20 nt, Artificial Sequence
  spacer sequence TTCN PAM
cugaagcuuuucuuggcagc

SEQ ID NO: 23189 - RNA, 20 nt, Artificial Sequence
  spacer sequence TTCN PAM
gggcugaaugcacccucuga

SEQ ID NO: 23190 - RNA, 20 nt, Artificial Sequence
  spacer sequence TTCN PAM
gcccugaacagggcaaagga

SEQ ID NO: 23191 - RNA, 20 nt, Artificial Sequence
  spacer sequence TTCN PAM
gaacuggaauucauuugucu

SEQ ID NO: 23192 - RNA, 20 nt, Artificial Sequence
  spacer sequence TTCN PAM
gaacacugggagugcaccug

SEQ ID NO: 23193 - RNA, 20 nt, Artificial Sequence
  spacer sequence TTCN PAM
aguucugaacacugggagug

SEQ ID NO: 23194 - RNA, 20 nt, Artificial Sequence
  spacer sequence TTCN PAM
uuugucuuggaagaaagugu

SEQ ID NO: 23195 - RNA, 20 nt, Artificial Sequence
  spacer sequence TTCN PAM
aagacaaaugaauuccaguu

SEQ ID NO: 23196 - RNA, 20 nt, Artificial Sequence
  spacer sequence TTCN PAM
uccaagacaaaugaauucca

SEQ ID NO: 23197 - RNA, 20 nt, Artificial Sequence
  spacer sequence TTCN PAM
ccuggacgguucugcacaga

SEQ ID NO: 23198 - RNA, 20 nt, Artificial Sequence
  spacer sequence TTCN PAM
gcacagaauucauucacaga

SEQ ID NO: 23199 - RNA, 20 nt, Artificial Sequence
  spacer sequence TTCN PAM
gugcagaaccguccaggaga

SEQ ID NO: 23200 - RNA, 20 nt, Artificial Sequence
  spacer sequence TTCN PAM
uucacagagcaugucuugga

SEQ ID NO: 23201 - RNA, 20 nt, Artificial Sequence
  spacer sequence TTCN PAM
cagagcaugucuuggauaua

SEQ ID NO: 23202 - RNA, 20 nt, Artificial Sequence
  spacer sequence TTCN PAM
aaauggguuuucacagguca

SEQ ID NO: 23203 - RNA, 20 nt, Artificial Sequence
  spacer sequence TTCN PAM
caggucaagguucugcaggc

SEQ ID NO: 23204 - RNA, 20 nt, Artificial Sequence
  spacer sequence TTCN PAM
gcaggcaagagcaaauacua

SEQ ID NO: 23205 - RNA, 20 nt, Artificial Sequence
  spacer sequence TTCN PAM
agaggcugaucaauagguuu

SEQ ID NO: 23206 - RNA, 20 nt, Artificial Sequence
  spacer sequence TTCN PAM
aucucugugucucucuggag

SEQ ID NO: 23207 - RNA, 20 nt, Artificial Sequence
  spacer sequence TTCN PAM
cuguagacucuguggguaaa

SEQ ID NO: 23208 - RNA, 20 nt, Artificial Sequence
  spacer sequence TTCN PAM
ggauauaaaauaaguaagaa

SEQ ID NO: 23209 - RNA, 20 nt, Artificial Sequence
  spacer sequence TTCN PAM
uacuuauuuuauauccugaa

SEQ ID NO: 23210 - RNA, 20 nt, Artificial Sequence
  spacer sequence TTCN PAM
guaaucuguacacaguuacu

SEQ ID NO: 23211 - RNA, 20 nt, Artificial Sequence
  spacer sequence TTCN PAM
gugaccugccucugcaucug

SEQ ID NO: 23212 - RNA, 20 nt, Artificial Sequence
  spacer sequence TTCN PAM
gccaugaguguauuuucugu

SEQ ID NO: 23213 - RNA, 20 nt, Artificial Sequence
  spacer sequence TTCN PAM
uuacgguucugccaugagug

SEQ ID NO: 23214 - RNA, 20 nt, Artificial Sequence
  spacer sequence TTCN PAM
aggcaacacguguugcaacc

SEQ ID NO: 23215 - RNA, 20 nt, Artificial Sequence
  spacer sequence TTCN PAM
cuagguugcaacacguguug

SEQ ID NO: 23216 - RNA, 20 nt, Artificial Sequence
  spacer sequence TTCN PAM
uucucuagguugcaacacgu

SEQ ID NO: 23217 - RNA, 20 nt, Artificial Sequence
  spacer sequence TTCN PAM
caacucaggggaggcacaaa

SEQ ID NO: 23218 - RNA, 20 nt, Artificial Sequence
  spacer sequence TTCN PAM
ugcuugggacuguugcuccu

SEQ ID NO: 23219 - RNA, 20 nt, Artificial Sequence
  spacer sequence TTCN PAM
cauagcgcuggauugaggau

SEQ ID NO: 23220 - RNA, 20 nt, Artificial Sequence
  spacer sequence TTCN PAM
gauaaauaguauggagauaa

SEQ ID NO: 23221 - RNA, 20 nt, Artificial Sequence
  spacer sequence TTCN PAM
ucaaaaucugacuuaagcaa

SEQ ID NO: 23222 - RNA, 20 nt, Artificial Sequence
  spacer sequence TTCN PAM
acauggauagcuuucaaaaa

SEQ ID NO: 23223 - RNA, 20 nt, Artificial Sequence
  spacer sequence TTCN PAM
aaaacuucuauauugauuug

SEQ ID NO: 23224 - RNA, 20 nt, Artificial Sequence
  spacer sequence TTCN PAM
auauugauuugauggaauca

SEQ ID NO: 23225 - RNA, 20 nt, Artificial Sequence
  spacer sequence TTCN PAM
aucaaaucaauauagaaguu

SEQ ID NO: 23226 - RNA, 20 nt, Artificial Sequence
  spacer sequence TTCN PAM
ccaugauuccaucaaaucaa

SEQ ID NO: 23227 - RNA, 20 nt, Artificial Sequence
  spacer sequence TTCN PAM
aaagacuuuccuauucucuc

SEQ ID NO: 23228 - RNA, 20 nt, Artificial Sequence
  spacer sequence TTCN PAM
uauucucucucucucccuuu

SEQ ID NO: 23229 - RNA, 20 nt, Artificial Sequence
  spacer sequence TTCN PAM
cucucucucccuuucuacac

SEQ ID NO: 23230 - RNA, 20 nt, Artificial Sequence
  spacer sequence TTCN PAM
acacacacacaggcacacaa

SEQ ID NO: 23231 - RNA, 20 nt, Artificial Sequence
  spacer sequence TTCN PAM
uacaugcauauacguaugua

SEQ ID NO: 23232 - RNA, 20 nt, Artificial Sequence
  spacer sequence TTCN PAM
aaaagaguuaauaagccuuu

SEQ ID NO: 23233 - RNA, 20 nt, Artificial Sequence
  spacer sequence TTCN PAM
uugccaggcaaaacuugaga

SEQ ID NO: 23234 - RNA, 20 nt, Artificial Sequence
  spacer sequence TTCN PAM
caaguuuugccuggcaauga

SEQ ID NO: 23235 - RNA, 20 nt, Artificial Sequence
  spacer sequence TTCN PAM
aaauguauuucucaaguuuu

SEQ ID NO: 23236 - RNA, 20 nt, Artificial Sequence
  spacer sequence TTCN PAM
uuuacuugauugagcuccug

SEQ ID NO: 23237 - RNA, 20 nt, Artificial Sequence
  spacer sequence TTCN PAM
gugccuuggugauucauuua

SEQ ID NO: 23238 - RNA, 20 nt, Artificial Sequence
  spacer sequence TTCN PAM
agugacuuucugugccuugg

SEQ ID NO: 23239 - RNA, 20 nt, Artificial Sequence
  spacer sequence TTCN PAM
agaauugaccaagguuuaag

SEQ ID NO: 23240 - RNA, 20 nt, Artificial Sequence
  spacer sequence TTCN PAM
ugaacguuugggcuaguuaa

SEQ ID NO: 23241 - RNA, 20 nt, Artificial Sequence
  spacer sequence TTCN PAM
gccagagaucuaaaacuuug

SEQ ID NO: 23242 - RNA, 20 nt, Artificial Sequence
  spacer sequence TTCN PAM
aaguuuuagaucucuggcug

SEQ ID NO: 23243 - RNA, 20 nt, Artificial Sequence
  spacer sequence TTCN PAM
cauaaauaccucuccauuau

SEQ ID NO: 23244 - RNA, 20 nt, Artificial Sequence
  spacer sequence TTCN PAM
ugugguccggagucucucaa

SEQ ID NO: 23245 - RNA, 20 nt, Artificial Sequence
  spacer sequence TTCN PAM
cacuaguuccugugguccgg

SEQ ID NO: 23246 - RNA, 20 nt, Artificial Sequence
  spacer sequence TTCN PAM
uuuaucauccgcucccauuu

SEQ ID NO: 23247 - RNA, 20 nt, Artificial Sequence
  spacer sequence TTCN PAM
caaacaaaauaugccauggu

SEQ ID NO: 23248 - RNA, 20 nt, Artificial Sequence
  spacer sequence TTCN PAM
uaucaugcauuaacaauaca

SEQ ID NO: 23249 - RNA, 20 nt, Artificial Sequence
  spacer sequence TTCN PAM
cccccaccucuuauuguguu

SEQ ID NO: 23250 - RNA, 20 nt, Artificial Sequence
  spacer sequence TTCN PAM
cucuucucccccaccucuua

SEQ ID NO: 23251 - RNA, 20 nt, Artificial Sequence
  spacer sequence TTCN PAM
uagcccaauguucucucuuc

SEQ ID NO: 23252 - RNA, 20 nt, Artificial Sequence
  spacer sequence TTCN PAM
ugucugaauacauaauuuug

SEQ ID NO: 23253 - RNA, 20 nt, Artificial Sequence
  spacer sequence TTCN PAM
gacaugaaguuuaggauuuc

SEQ ID NO: 23254 - RNA, 20 nt, Artificial Sequence
  spacer sequence TTCN PAM
ugccagagauaggugacaaa

SEQ ID NO: 23255 - RNA, 20 nt, Artificial Sequence
  spacer sequence TTCN PAM
gguaauaauggaaggggaaa

SEQ ID NO: 23256 - RNA, 20 nt, Artificial Sequence
  spacer sequence TTCN PAM
auuauuaccugaaauaaaag

SEQ ID NO: 23257 - RNA, 20 nt, Artificial Sequence
  spacer sequence TTCN PAM
ccuuccauuauuaccugaaa

SEQ ID NO: 23258 - RNA, 20 nt, Artificial Sequence
  spacer sequence TTCN PAM
uucggccuguuauuugcuuu

SEQ ID NO: 23259 - RNA, 20 nt, Artificial Sequence
  spacer sequence TTCN PAM
gccuguuauuugcuuuuggg

SEQ ID NO: 23260 - RNA, 20 nt, Artificial Sequence
  spacer sequence TTCN PAM
uuguuuuuguuuuuguuuuu

SEQ ID NO: 23261 - RNA, 20 nt, Artificial Sequence
  spacer sequence TTCN PAM
uuuuucuuguuuuuuaagau

SEQ ID NO: 23262 - RNA, 20 nt, Artificial Sequence
  spacer sequence TTCN PAM
uguuuuuuaagauuuuauuu

SEQ ID NO: 23263 - RNA, 20 nt, Artificial Sequence
  spacer sequence TTCN PAM
aucucugguaacaaaauaaa

SEQ ID NO: 23264 - RNA, 20 nt, Artificial Sequence
  spacer sequence TTCN PAM
gauuuugcaugcucuucuau

SEQ ID NO: 23265 - RNA, 20 nt, Artificial Sequence
  spacer sequence TTCN PAM
auaaaaagguaauuuauuua

SEQ ID NO: 23266 - RNA, 20 nt, Artificial Sequence
  spacer sequence TTCN PAM
uuguaggacacaggcacucu

SEQ ID NO: 23267 - RNA, 20 nt, Artificial Sequence
  spacer sequence TTCN PAM
caacugauucauuugccccu

SEQ ID NO: 23268 - RNA, 20 nt, Artificial Sequence
  spacer sequence TTCN PAM
uuugccccuuacucugagca

SEQ ID NO: 23269 - RNA, 20 nt, Artificial Sequence
  spacer sequence TTCN PAM
uuuauuaucccaugugcuca

SEQ ID NO: 23270 - RNA, 20 nt, Artificial Sequence
  spacer sequence TTCN PAM
aaguuauccuuuggauaaug

SEQ ID NO: 23271 - RNA, 20 nt, Artificial Sequence
  spacer sequence TTCN PAM
gcaugcuucugaaaacauuu

SEQ ID NO: 23272 - RNA, 20 nt, Artificial Sequence
  spacer sequence TTCN PAM
gaaaacauuucauaucucau

SEQ ID NO: 23273 - RNA, 20 nt, Artificial Sequence
  spacer sequence TTCN PAM
gaagcaugcugaaaaagggc

SEQ ID NO: 23274 - RNA, 20 nt, Artificial Sequence
  spacer sequence TTCN PAM
uaucucauucaaugccacau

SEQ ID NO: 23275 - RNA, 20 nt, Artificial Sequence
  spacer sequence TTCN PAM
augccacauauaaaugguau

SEQ ID NO: 23276 - RNA, 20 nt, Artificial Sequence
  spacer sequence TTCN PAM
acacuguccagcaaauacca

SEQ ID NO: 23277 - RNA, 20 nt, Artificial Sequence
  spacer sequence TTCN PAM
guuuuccacacuguccagca

SEQ ID NO: 23278 - RNA, 20 nt, Artificial Sequence
  spacer sequence TTCN PAM
gggacaugcgaucuuugcaa

SEQ ID NO: 23279 - RNA, 20 nt, Artificial Sequence
  spacer sequence TTCN PAM
ucauguagguaaaagcauau

SEQ ID NO: 23280 - RNA, 20 nt, Artificial Sequence
  spacer sequence TTCN PAM
uuuuuuauucaucauguagg

SEQ ID NO: 23281 - RNA, 20 nt, Artificial Sequence
  spacer sequence TTCN PAM
cucaauuuaugcugucuuca

SEQ ID NO: 23282 - RNA, 20 nt, Artificial Sequence
  spacer sequence TTCN PAM
acacuaacagagggagaguu

SEQ ID NO: 23283 - RNA, 20 nt, Artificial Sequence
  spacer sequence TTCN PAM
ucuaaacauguugcaucgga

SEQ ID NO: 23284 - RNA, 20 nt, Artificial Sequence
  spacer sequence TTCN PAM
aaacauguugcaucggaugc

SEQ ID NO: 23285 - RNA, 20 nt, Artificial Sequence
  spacer sequence TTCN PAM
uaacuccagggacucagcau

SEQ ID NO: 23286 - RNA, 20 nt, Artificial Sequence
  spacer sequence TTCN PAM
cuguauggacauagccuaca

SEQ ID NO: 23287 - RNA, 20 nt, Artificial Sequence
  spacer sequence TTCN PAM
uccucccaaaagcugguuuc

SEQ ID NO: 23288 - RNA, 20 nt, Artificial Sequence
  spacer sequence TTCN PAM
uccuuccuccucccaaaagc

SEQ ID NO: 23289 - RNA, 20 nt, Artificial Sequence
  spacer sequence TTCN PAM
gugauauuuuccuccuuccu

SEQ ID NO: 23290 - RNA, 20 nt, Artificial Sequence
  spacer sequence TTCN PAM
gucaguuaauugaauuuaaa

SEQ ID NO: 23291 - RNA, 20 nt, Artificial Sequence
  spacer sequence TTCN PAM
auuaacugacugaauucagu

SEQ ID NO: 23292 - RNA, 20 nt, Artificial Sequence
  spacer sequence TTCN PAM
aacaaccagguauuuuaaau

SEQ ID NO: 23293 - RNA, 20 nt, Artificial Sequence
  spacer sequence TTCN PAM
acuauuucuuuuucaaaaac

SEQ ID NO: 23294 - RNA, 20 nt, Artificial Sequence
  spacer sequence TTCN PAM
uuuucaaaaacguacuucua

SEQ ID NO: 23295 - RNA, 20 nt, Artificial Sequence
  spacer sequence TTCN PAM
aaaacguacuucuauuuuga

SEQ ID NO: 23296 - RNA, 20 nt, Artificial Sequence
  spacer sequence TTCN PAM
auuuugauguaguuacauuu

SEQ ID NO: 23297 - RNA, 20 nt, Artificial Sequence
  spacer sequence TTCN PAM
ccaaguuugcuuuuuugggc

SEQ ID NO: 23298 - RNA, 20 nt, Artificial Sequence
  spacer sequence TTCN PAM
uuggaguuuuucaaaaaaaa

SEQ ID NO: 23299 - RNA, 20 nt, Artificial Sequence
  spacer sequence TTCN PAM
aaaaaaacagcuugcaacaa

SEQ ID NO: 23300 - RNA, 20 nt, Artificial Sequence
  spacer sequence TTCN PAM
ccaucuuuuaauuguugcaa

SEQ ID NO: 23301 - RNA, 20 nt, Artificial Sequence
  spacer sequence TTCN PAM
agccuuauaagauuucucca

SEQ ID NO: 23302 - RNA, 20 nt, Artificial Sequence
  spacer sequence TTCN PAM
gugaauuaucaccauuccau

SEQ ID NO: 23303 - RNA, 20 nt, Artificial Sequence
  spacer sequence TTCN PAM
cagaaguuuccagccuuaua

SEQ ID NO: 23304 - RNA, 20 nt, Artificial Sequence
  spacer sequence TTCN PAM
auuauacugcacuucaauuu

SEQ ID NO: 23305 - RNA, 20 nt, Artificial Sequence
  spacer sequence TTCN PAM
auuuugcuuccagcaauuug

SEQ ID NO: 23306 - RNA, 20 nt, Artificial Sequence
  spacer sequence TTCN PAM
agcaauuugaaagaugccuu

SEQ ID NO: 23307 - RNA, 20 nt, Artificial Sequence
  spacer sequence TTCN PAM
aauugcuggaagcaaaauug

SEQ ID NO: 23308 - RNA, 20 nt, Artificial Sequence
  spacer sequence TTCN PAM
guuggggaaucacgaaucca

SEQ ID NO: 23309 - RNA, 20 nt, Artificial Sequence
  spacer sequence TTCN PAM
ccaacagaaagcuuaaaggc

SEQ ID NO: 23310 - RNA, 20 nt, Artificial Sequence
  spacer sequence TTCN PAM
ugauuccccaacagaaagcu

SEQ ID NO: 23311 - RNA, 20 nt, Artificial Sequence
  spacer sequence TTCN PAM
aucuuugaggcaaaucaaga

SEQ ID NO: 23312 - RNA, 20 nt, Artificial Sequence
  spacer sequence TTCN PAM
ugauuugccucaaagaugga

SEQ ID NO: 23313 - RNA, 20 nt, Artificial Sequence
  spacer sequence TTCN PAM
gcugucuuugcaggugagcc

SEQ ID NO: 23314 - RNA, 20 nt, Artificial Sequence
  spacer sequence TTCN PAM
gcaacuagauuccaaaaaau

SEQ ID NO: 23315 - RNA, 20 nt, Artificial Sequence
  spacer sequence TTCN PAM
aaaaaauagcagggagaaaa

SEQ ID NO: 23316 - RNA, 20 nt, Artificial Sequence
  spacer sequence TTCN PAM
cccugcuauuuuuuggaauc

SEQ ID NO: 23317 - RNA, 20 nt, Artificial Sequence
  spacer sequence TTCN PAM
uacuaugcuagaacaucaug

SEQ ID NO: 23318 - RNA, 20 nt, Artificial Sequence
  spacer sequence TTCN PAM
agcauaguaugaacaccacu

SEQ ID NO: 23319 - RNA, 20 nt, Artificial Sequence
  spacer sequence TTCN PAM
uugucuuguaaaguagguaa

SEQ ID NO: 23320 - RNA, 20 nt, Artificial Sequence
  spacer sequence TTCN PAM
ccuguuagcauuuguuuccu

SEQ ID NO: 23321 - RNA, 20 nt, Artificial Sequence
  spacer sequence TTCN PAM
gacccuuauuguaucaugcu

SEQ ID NO: 23322 - RNA, 20 nt, Artificial Sequence
  spacer sequence TTCN PAM
gaucagugucucucuguuaa

SEQ ID NO: 23323 - RNA, 20 nt, Artificial Sequence
  spacer sequence TTCN PAM
ggaaaaucuguaaugcccaa

SEQ ID NO: 23324 - RNA, 20 nt, Artificial Sequence
  spacer sequence TTCN PAM
agaaccaaacuuugacuuuu

SEQ ID NO: 23325 - RNA, 20 nt, Artificial Sequence
  spacer sequence TTCN PAM
ccauggcuuucacagaaggg

SEQ ID NO: 23326 - RNA, 20 nt, Artificial Sequence
  spacer sequence TTCN PAM
cagaaggguaaaugucuacu

SEQ ID NO: 23327 - RNA, 20 nt, Artificial Sequence
  spacer sequence TTCN PAM
gugaaagccauggagaaauu

SEQ ID NO: 23328 - RNA, 20 nt, Artificial Sequence
  spacer sequence TTCN PAM
aaguagacauuuacccuucu

SEQ ID NO: 23329 - RNA, 20 nt, Artificial Sequence
  spacer sequence TTCN PAM
uccuucauucguguuuggua

SEQ ID NO: 23330 - RNA, 20 nt, Artificial Sequence
  spacer sequence TTCN PAM
uucauucguguuugguaauc

SEQ ID NO: 23331 - RNA, 20 nt, Artificial Sequence
  spacer sequence TTCN PAM
uucguguuugguaaucaaaa

SEQ ID NO: 23332 - RNA, 20 nt, Artificial Sequence
  spacer sequence TTCN PAM
uguuugguaaucaaaaauag

SEQ ID NO: 23333 - RNA, 20 nt, Artificial Sequence
  spacer sequence TTCN PAM
aauugagagcauuaugauaa

SEQ ID NO: 23334 - RNA, 20 nt, Artificial Sequence
  spacer sequence TTCN PAM
uacuacaggcagauacuguu

SEQ ID NO: 23335 - RNA, 20 nt, Artificial Sequence
  spacer sequence TTCN PAM
gguagaggauggcagcaggg

SEQ ID NO: 23336 - RNA, 20 nt, Artificial Sequence
  spacer sequence TTCN PAM
cagcccugcugccauccucu

SEQ ID NO: 23337 - RNA, 20 nt, Artificial Sequence
  spacer sequence TTCN PAM
uuuuucccagcccugcugcc

SEQ ID NO: 23338 - RNA, 20 nt, Artificial Sequence
  spacer sequence TTCN PAM
aaccacaguagguuuuuucu

SEQ ID NO: 23339 - RNA, 20 nt, Artificial Sequence
  spacer sequence TTCN PAM
auaacaaugauuucacuuuc

SEQ ID NO: 23340 - RNA, 20 nt, Artificial Sequence
  spacer sequence TTCN PAM
cuuucuagauauaaaacagg

SEQ ID NO: 23341 - RNA, 20 nt, Artificial Sequence
  spacer sequence TTCN PAM
agauauaaaacaggcauggu

SEQ ID NO: 23342 - RNA, 20 nt, Artificial Sequence
  spacer sequence TTCN PAM
cucacccugaacuucugcaa

SEQ ID NO: 23343 - RNA, 20 nt, Artificial Sequence
  spacer sequence TTCN PAM
gggugagagaaaccaugccu

SEQ ID NO: 23344 - RNA, 20 nt, Artificial Sequence
  spacer sequence TTCN PAM
gcaaaaucuagauuugauca

SEQ ID NO: 23345 - RNA, 20 nt, Artificial Sequence
  spacer sequence TTCN PAM
gaaacuggugauuugaucaa

SEQ ID NO: 23346 - RNA, 20 nt, Artificial Sequence
  spacer sequence TTCN PAM
gaauuugaucaaaucuagau

SEQ ID NO: 23347 - RNA, 20 nt, Artificial Sequence
  spacer sequence TTCN PAM
gaaucccauauuuugggaug

SEQ ID NO: 23348 - RNA, 20 nt, Artificial Sequence
  spacer sequence TTCN PAM
gaauuugaucaaaucaccag

SEQ ID NO: 23349 - RNA, 20 nt, Artificial Sequence
  spacer sequence TTCN PAM
agcagaaagcuauugguugg

SEQ ID NO: 23350 - RNA, 20 nt, Artificial Sequence
  spacer sequence TTCN PAM
gcuagaacacaucaucccaa

SEQ ID NO: 23351 - RNA, 20 nt, Artificial Sequence
  spacer sequence TTCN PAM
uccccaaaagauuuuuaaau

SEQ ID NO: 23352 - RNA, 20 nt, Artificial Sequence
  spacer sequence TTCN PAM
ccaaaagauuuuuaaauagu

SEQ ID NO: 23353 - RNA, 20 nt, Artificial Sequence
  spacer sequence TTCN PAM
ucuuuaaaaggauuucaacu

SEQ ID NO: 23354 - RNA, 20 nt, Artificial Sequence
  spacer sequence TTCN PAM
acuucagauugugcccacgc

SEQ ID NO: 23355 - RNA, 20 nt, Artificial Sequence
  spacer sequence TTCN PAM
gauugugcccacgccaaagu

SEQ ID NO: 23356 - RNA, 20 nt, Artificial Sequence
  spacer sequence TTCN PAM
caaaugguaaaggauaaaca

SEQ ID NO: 23357 - RNA, 20 nt, Artificial Sequence
  spacer sequence TTCN PAM
aauuauaaauacccauuuaa

SEQ ID NO: 23358 - RNA, 20 nt, Artificial Sequence
  spacer sequence TTCN PAM
uaauccgagaggaggccuau

SEQ ID NO: 23359 - RNA, 20 nt, Artificial Sequence
  spacer sequence TTCN PAM
agugcagugugucuauguca

SEQ ID NO: 23360 - RNA, 20 nt, Artificial Sequence
  spacer sequence TTCN PAM
uuaacacccuccugacauag

SEQ ID NO: 23361 - RNA, 20 nt, Artificial Sequence
  spacer sequence TTCN PAM
ucuuuaacacccuccugaca

SEQ ID NO: 23362 - RNA, 20 nt, Artificial Sequence
  spacer sequence TTCN PAM
uugcaucuucuucuuuaaca

SEQ ID NO: 23363 - RNA, 20 nt, Artificial Sequence
  spacer sequence TTCN PAM
cguugucaaacauuuucauu

SEQ ID NO: 23364 - RNA, 20 nt, Artificial Sequence
  spacer sequence TTCN PAM
ucaugacuuuuacacaguug

SEQ ID NO: 23365 - RNA, 20 nt, Artificial Sequence
  spacer sequence TTCN PAM
uugugacacacacaacuccc

SEQ ID NO: 23366 - RNA, 20 nt, Artificial Sequence
  spacer sequence TTCN PAM
uaagcggggaacuacuuagc

SEQ ID NO: 23367 - RNA, 20 nt, Artificial Sequence
  spacer sequence TTCN PAM
ccgcuuaagaaugcguuggc

SEQ ID NO: 23368 - RNA, 20 nt, Artificial Sequence
  spacer sequence TTCN PAM
uggugcuaaguaguuccccg

SEQ ID NO: 23369 - RNA, 20 nt, Artificial Sequence
  spacer sequence TTCN PAM
aucagguugaaguagaaaua

SEQ ID NO: 23370 - RNA, 20 nt, Artificial Sequence
  spacer sequence TTCN PAM
accugauugaaaugucgacu

SEQ ID NO: 23371 - RNA, 20 nt, Artificial Sequence
  spacer sequence TTCN PAM
acuucaaccugauugaaaug

SEQ ID NO: 23372 - RNA, 20 nt, Artificial Sequence
  spacer sequence TTCN PAM
auugcucucaccauucgaua

SEQ ID NO: 23373 - RNA, 20 nt, Artificial Sequence
  spacer sequence TTCN PAM
auauuuauuguagcuuugcc

SEQ ID NO: 23374 - RNA, 20 nt, Artificial Sequence
  spacer sequence TTCN PAM
ggccaagugccuggaugugg

SEQ ID NO: 23375 - RNA, 20 nt, Artificial Sequence
  spacer sequence TTCN PAM
uuagguaagcacaaauuuga

SEQ ID NO: 23376 - RNA, 20 nt, Artificial Sequence
  spacer sequence TTCN PAM
gccuucguuagguaagcaca

SEQ ID NO: 23377 - RNA, 20 nt, Artificial Sequence
  spacer sequence TTCN PAM
guuucugccuucguuaggua

SEQ ID NO: 23378 - RNA, 20 nt, Artificial Sequence
  spacer sequence TTCN PAM
uuuucuguuucugccuucgu

SEQ ID NO: 23379 - RNA, 20 nt, Artificial Sequence
  spacer sequence TTCN PAM
uuuucuuuuucuguuucugc

SEQ ID NO: 23380 - RNA, 20 nt, Artificial Sequence
  spacer sequence TTCN PAM
cugauuuucaagggaagaga

SEQ ID NO: 23381 - RNA, 20 nt, Artificial Sequence
  spacer sequence TTCN PAM
agggaagagaaggaaaacua

SEQ ID NO: 23382 - RNA, 20 nt, Artificial Sequence
  spacer sequence TTCN PAM
cuugaaaaucagugaaaauc

SEQ ID NO: 23383 - RNA, 20 nt, Artificial Sequence
  spacer sequence TTCN PAM
cuucccuugaaaaucaguga

SEQ ID NO: 23384 - RNA, 20 nt, Artificial Sequence
  spacer sequence TTCN PAM
uucucuucccuugaaaauca

SEQ ID NO: 23385 - RNA, 20 nt, Artificial Sequence
  spacer sequence TTCN PAM
cucgcucgcacccccuaguu

SEQ ID NO: 23386 - RNA, 20 nt, Artificial Sequence
  spacer sequence TTCN PAM
uauuucccucgcucgcaccc

SEQ ID NO: 23387 - RNA, 20 nt, Artificial Sequence
  spacer sequence TTCN PAM
aaagccaugauacgccuuuu

SEQ ID NO: 23388 - RNA, 20 nt, Artificial Sequence
  spacer sequence TTCN PAM
gcuuuaucauuucagucuag

SEQ ID NO: 23389 - RNA, 20 nt, Artificial Sequence
  spacer sequence TTCN PAM
gucuaggagacccagcaaau

SEQ ID NO: 23390 - RNA, 20 nt, Artificial Sequence
  spacer sequence TTCN PAM
cuuccagggugacaagggag

SEQ ID NO: 23391 - RNA, 20 nt, Artificial Sequence
  spacer sequence TTCN PAM
agggugacaagggagaacca

SEQ ID NO: 23392 - RNA, 20 nt, Artificial Sequence
  spacer sequence TTCN PAM
cccuugucacccuggaagag

SEQ ID NO: 23393 - RNA, 20 nt, Artificial Sequence
  spacer sequence TTCN PAM
uugucucuacauacccuugg

SEQ ID NO: 23394 - RNA, 20 nt, Artificial Sequence
  spacer sequence TTCN PAM
cuuggcccucuucauugucu

SEQ ID NO: 23395 - RNA, 20 nt, Artificial Sequence
  spacer sequence TTCN PAM
cccucaccccuucucuuggc

SEQ ID NO: 23396 - RNA, 20 nt, Artificial Sequence
  spacer sequence TTCN PAM
cacucugucccggggcaugg

SEQ ID NO: 23397 - RNA, 20 nt, Artificial Sequence
  spacer sequence TTCN PAM
cuuuuacuucgcacucuguc

SEQ ID NO: 23398 - RNA, 20 nt, Artificial Sequence
  spacer sequence TTCN PAM
cagcagccaccuccauccca

SEQ ID NO: 23399 - RNA, 20 nt, Artificial Sequence
  spacer sequence TTCN PAM
gaguuugaggugggauggag

SEQ ID NO: 23400 - RNA, 20 nt, Artificial Sequence
  spacer sequence TTCN PAM
uugugauggaucugaacagc

SEQ ID NO: 23401 - RNA, 20 nt, Artificial Sequence
  spacer sequence TTCN PAM
gauccaucacaaagaaguug

SEQ ID NO: 23402 - RNA, 20 nt, Artificial Sequence
  spacer sequence TTCN PAM
agcagaaggacuuaccaagu

SEQ ID NO: 23403 - RNA, 20 nt, Artificial Sequence
  spacer sequence TTCN PAM
gcuagaaccaagggaggcug

SEQ ID NO: 23404 - RNA, 20 nt, Artificial Sequence
  spacer sequence TTCN PAM
acuccucccacggggccucc

SEQ ID NO: 23405 - RNA, 20 nt, Artificial Sequence
  spacer sequence TTCN PAM
ugcggaggccccgugggagg

SEQ ID NO: 23406 - RNA, 20 nt, Artificial Sequence
  spacer sequence TTCN PAM
caacuaccaaaugauucuga

SEQ ID NO: 23407 - RNA, 20 nt, Artificial Sequence
  spacer sequence TTCN PAM
gaaauucucucaguggaggu

SEQ ID NO: 23408 - RNA, 20 nt, Artificial Sequence
  spacer sequence TTCN PAM
gaaucauuugguaguugaga

SEQ ID NO: 23409 - RNA, 20 nt, Artificial Sequence
  spacer sequence TTCN PAM
cucaguggaggucuauguua

SEQ ID NO: 23410 - RNA, 20 nt, Artificial Sequence
  spacer sequence TTCN PAM
aauuggccaggcuaacauag

SEQ ID NO: 23411 - RNA, 20 nt, Artificial Sequence
  spacer sequence TTCN PAM
ccauccuuucaaauuggcca

SEQ ID NO: 23412 - RNA, 20 nt, Artificial Sequence
  spacer sequence TTCN PAM
uguauucuccauccuuucaa

SEQ ID NO: 23413 - RNA, 20 nt, Artificial Sequence
  spacer sequence TTCN PAM
aaaaccaaauguuacuguuu

SEQ ID NO: 23414 - RNA, 20 nt, Artificial Sequence
  spacer sequence TTCN PAM
uugcagauggauuacacaau

SEQ ID NO: 23415 - RNA, 20 nt, Artificial Sequence
  spacer sequence TTCN PAM
gcaaauauuaauagcgucag

SEQ ID NO: 23416 - RNA, 20 nt, Artificial Sequence
  spacer sequence TTCN PAM
gcugcgugguggccucuccc

SEQ ID NO: 23417 - RNA, 20 nt, Artificial Sequence
  spacer sequence TTCN PAM
ccagaggcaaguuuucagcu

SEQ ID NO: 23418 - RNA, 20 nt, Artificial Sequence
  spacer sequence TTCN PAM
auucaaaacuucccucaagu

SEQ ID NO: 23419 - RNA, 20 nt, Artificial Sequence
  spacer sequence TTCN PAM
aaacuucccucaaguuucca

SEQ ID NO: 23420 - RNA, 20 nt, Artificial Sequence
  spacer sequence TTCN PAM
cucaaguuuccagcaugccu

SEQ ID NO: 23421 - RNA, 20 nt, Artificial Sequence
  spacer sequence TTCN PAM
agcaugccuuccggacuugc

SEQ ID NO: 23422 - RNA, 20 nt, Artificial Sequence
  spacer sequence TTCN PAM
ggacuugccuuaccacagcc

SEQ ID NO: 23423 - RNA, 20 nt, Artificial Sequence
  spacer sequence TTCN PAM
gccagaaaugaaaaccuccu

SEQ ID NO: 23424 - RNA, 20 nt, Artificial Sequence
  spacer sequence TTCN PAM
ggcugaacaaggcuguggua

SEQ ID NO: 23425 - RNA, 20 nt, Artificial Sequence
  spacer sequence TTCN PAM
uuucuggcugaacaaggcug

SEQ ID NO: 23426 - RNA, 20 nt, Artificial Sequence
  spacer sequence TTCN PAM
aggagguuuucauuucuggc

SEQ ID NO: 23427 - RNA, 20 nt, Artificial Sequence
  spacer sequence TTCN PAM
ggggggucauaaucugcuuc

SEQ ID NO: 23428 - RNA, 20 nt, Artificial Sequence
  spacer sequence TTCN PAM
uaggacgauggguucugggg

SEQ ID NO: 23429 - RNA, 20 nt, Artificial Sequence
  spacer sequence TTCN PAM
gauucuccccagccuuugaa

SEQ ID NO: 23430 - RNA, 20 nt, Artificial Sequence
  spacer sequence TTCN PAM
ccccagccuuugaagguacg

SEQ ID NO: 23431 - RNA, 20 nt, Artificial Sequence
  spacer sequence TTCN PAM
aaggcuggggagaaucagaa

SEQ ID NO: 23432 - RNA, 20 nt, Artificial Sequence
  spacer sequence TTCN PAM
cggaucguaccuucaaaggc

SEQ ID NO: 23433 - RNA, 20 nt, Artificial Sequence
  spacer sequence TTCN PAM
guguguugucucuguggcau

SEQ ID NO: 23434 - RNA, 20 nt, Artificial Sequence
  spacer sequence TTCN PAM
uaaaaguccgagcuuaguuu

SEQ ID NO: 23435 - RNA, 20 nt, Artificial Sequence
  spacer sequence TTCN PAM
cauucagcccacugcagucu

SEQ ID NO: 23436 - RNA, 20 nt, Artificial Sequence
  spacer sequence TTCN PAM
gcccacugcagucuccugac

SEQ ID NO: 23437 - RNA, 20 nt, Artificial Sequence
  spacer sequence TTCN PAM
caggacccucacuugauuuc

SEQ ID NO: 23438 - RNA, 20 nt, Artificial Sequence
  spacer sequence TTCN PAM
ggcucauucuggacagaugg

SEQ ID NO: 23439 - RNA, 20 nt, Artificial Sequence
  spacer sequence TTCN PAM
ggacagauggggaaaugacu

SEQ ID NO: 23440 - RNA, 20 nt, Artificial Sequence
  spacer sequence TTCN PAM
ccaucuguccagaaugagcc

SEQ ID NO: 23441 - RNA, 20 nt, Artificial Sequence
  spacer sequence TTCN PAM
uuacauugcaacuuuuccca

SEQ ID NO: 23442 - RNA, 20 nt, Artificial Sequence
  spacer sequence TTCN PAM
caacagcuccgugcuccuuc

SEQ ID NO: 23443 - RNA, 20 nt, Artificial Sequence
  spacer sequence TTCN PAM
auaugcccagaacuggaggg

SEQ ID NO: 23444 - RNA, 20 nt, Artificial Sequence
  spacer sequence TTCN PAM
gggcauauugaaggagcacg

SEQ ID NO: 23445 - RNA, 20 nt, Artificial Sequence
  spacer sequence TTCN PAM
ccuccaguucugggcauauu

SEQ ID NO: 23446 - RNA, 20 nt, Artificial Sequence
  spacer sequence TTCN PAM
ucucuuucccagaagauuga

SEQ ID NO: 23447 - RNA, 20 nt, Artificial Sequence
  spacer sequence TTCN PAM
cuuucccagaagauugaaaa

SEQ ID NO: 23448 - RNA, 20 nt, Artificial Sequence
  spacer sequence TTCN PAM
cagaagauugaaaaacuuga

SEQ ID NO: 23449 - RNA, 20 nt, Artificial Sequence
  spacer sequence TTCN PAM
gggaaagagaagaauguucc

SEQ ID NO: 23450 - RNA, 20 nt, Artificial Sequence
  spacer sequence TTCN PAM
aucuucugggaaagagaaga

SEQ ID NO: 23451 - RNA, 20 nt, Artificial Sequence
  spacer sequence TTCN PAM
guggucaaguuuuucaaucu

SEQ ID NO: 23452 - RNA, 20 nt, Artificial Sequence
  spacer sequence TTCN PAM
ugcccaguuguugccuggca

SEQ ID NO: 23453 - RNA, 20 nt, Artificial Sequence
  spacer sequence TTCN PAM
gcggugccaggcaacaacug

SEQ ID NO: 23454 - RNA, 20 nt, Artificial Sequence
  spacer sequence TTCN PAM
ucagcggugccaggcaacaa

SEQ ID NO: 23455 - RNA, 20 nt, Artificial Sequence
  spacer sequence TTCN PAM
guacguuugcagcuuucuuc

SEQ ID NO: 23456 - RNA, 20 nt, Artificial Sequence
  spacer sequence TTCN PAM
auccuuuggccugcggccgc

SEQ ID NO: 23457 - RNA, 20 nt, Artificial Sequence
  spacer sequence TTCN PAM
cugaggguccacaguuguuc

SEQ ID NO: 23458 - RNA, 20 nt, Artificial Sequence
  spacer sequence TTCN PAM
ucaaggguuaaaugacuucc

SEQ ID NO: 23459 - RNA, 20 nt, Artificial Sequence
  spacer sequence TTCN PAM
uccucuaccaaaugaggcua

SEQ ID NO: 23460 - RNA, 20 nt, Artificial Sequence
  spacer sequence TTCN PAM
uuuccgagguuguuguggga

SEQ ID NO: 23461 - RNA, 20 nt, Artificial Sequence
  spacer sequence TTCN PAM
gagguuguugugggauggaa

SEQ ID NO: 23462 - RNA, 20 nt, Artificial Sequence
  spacer sequence TTCN PAM
aucccacaacaaccucggaa

SEQ ID NO: 23463 - RNA, 20 nt, Artificial Sequence
  spacer sequence TTCN PAM
ggaggugcagcccccggagc

SEQ ID NO: 23464 - RNA, 20 nt, Artificial Sequence
  spacer sequence TTCN PAM
cucauuuacuucucacaugg

SEQ ID NO: 23465 - RNA, 20 nt, Artificial Sequence
  spacer sequence TTCN PAM
cacauggacucuaugaggua

SEQ ID NO: 23466 - RNA, 20 nt, Artificial Sequence
  spacer sequence TTCN PAM
cagagaggugaaaugauucc

SEQ ID NO: 23467 - RNA, 20 nt, Artificial Sequence
  spacer sequence TTCN PAM
ccucucugugaaauggagau

SEQ ID NO: 23468 - RNA, 20 nt, Artificial Sequence
  spacer sequence TTCN PAM
cucagacucucccaaccagc

SEQ ID NO: 23469 - RNA, 20 nt, Artificial Sequence
  spacer sequence TTCN PAM
auguuacugcuagcugguug

SEQ ID NO: 23470 - RNA, 20 nt, Artificial Sequence
  spacer sequence TTCN PAM
gauuucuauguuacugcuag

SEQ ID NO: 23471 - RNA, 20 nt, Artificial Sequence
  spacer sequence TTCN PAM
gguggcagcucccucguggg

SEQ ID NO: 23472 - RNA, 20 nt, Artificial Sequence
  spacer sequence TTCN PAM
cucaucccaaccugcucacc

SEQ ID NO: 23473 - RNA, 20 nt, Artificial Sequence
  spacer sequence TTCN PAM
cccauuauggggugagcagg

SEQ ID NO: 23474 - RNA, 20 nt, Artificial Sequence
  spacer sequence TTCN PAM
aagccaugagucauaaccgu

SEQ ID NO: 23475 - RNA, 20 nt, Artificial Sequence
  spacer sequence TTCN PAM
ccccacuuuacagauugagg

SEQ ID NO: 23476 - RNA, 20 nt, Artificial Sequence
  spacer sequence TTCN PAM
ucaaucuguaaaguggggag

SEQ ID NO: 23477 - RNA, 20 nt, Artificial Sequence
  spacer sequence TTCN PAM
cuaagccuccgcuuccucaa

SEQ ID NO: 23478 - RNA, 20 nt, Artificial Sequence
  spacer sequence TTCN PAM
uucccuaagccuccgcuucc

SEQ ID NO: 23479 - RNA, 20 nt, Artificial Sequence
  spacer sequence TTCN PAM
aguugugcaaccuugggcag

SEQ ID NO: 23480 - RNA, 20 nt, Artificial Sequence
  spacer sequence TTCN PAM
uuacccucagccuaaaccau

SEQ ID NO: 23481 - RNA, 20 nt, Artificial Sequence
  spacer sequence TTCN PAM
uguaaucaaagagaagaaga

SEQ ID NO: 23482 - RNA, 20 nt, Artificial Sequence
  spacer sequence TTCN PAM
cuuugauuacacgaaauaaa

SEQ ID NO: 23483 - RNA, 20 nt, Artificial Sequence
  spacer sequence TTCN PAM
ucucuuugauuacacgaaau

SEQ ID NO: 23484 - RNA, 20 nt, Artificial Sequence
  spacer sequence TTCN PAM
ucuucucuuugauuacacga

SEQ ID NO: 23485 - RNA, 20 nt, Artificial Sequence
  spacer sequence TTCN PAM
uuucuucuucucuuugauua

SEQ ID NO: 23486 - RNA, 20 nt, Artificial Sequence
  spacer sequence TTCN PAM
uucuuuucuucuucucuuug

SEQ ID NO: 23487 - RNA, 20 nt, Artificial Sequence
  spacer sequence TTCN PAM
ccucuuucugucccuccucc

SEQ ID NO: 23488 - RNA, 20 nt, Artificial Sequence
  spacer sequence TTCN PAM
gucccuccucccuuucuuac

SEQ ID NO: 23489 - RNA, 20 nt, Artificial Sequence
  spacer sequence TTCN PAM
uaccagcucagguuacaaag

SEQ ID NO: 23490 - RNA, 20 nt, Artificial Sequence
  spacer sequence TTCN PAM
cucccaccuagaugucuuug

SEQ ID NO: 23491 - RNA, 20 nt, Artificial Sequence
  spacer sequence TTCN PAM
caguuuuuauuugcuacuag

SEQ ID NO: 23492 - RNA, 20 nt, Artificial Sequence
  spacer sequence TTCN PAM
aguagcaaauaaaaacuggg

SEQ ID NO: 23493 - RNA, 20 nt, Artificial Sequence
  spacer sequence TTCN PAM
ccuuuucuaguagcaaauaa

SEQ ID NO: 23494 - RNA, 20 nt, Artificial Sequence
  spacer sequence TTCN PAM
uucuccuuuucuaguagcaa

SEQ ID NO: 23495 - RNA, 20 nt, Artificial Sequence
  spacer sequence TTCN PAM
ccuggcuaggccucauaagg

SEQ ID NO: 23496 - RNA, 20 nt, Artificial Sequence
  spacer sequence TTCN PAM
agucuaugaugggaaaaaua

SEQ ID NO: 23497 - RNA, 20 nt, Artificial Sequence
  spacer sequence TTCN PAM
caucauagacuugaaaaggc

SEQ ID NO: 23498 - RNA, 20 nt, Artificial Sequence
  spacer sequence TTCN PAM
cacaauaaaaaauauuuuuc

SEQ ID NO: 23499 - RNA, 20 nt, Artificial Sequence
  spacer sequence TTCN PAM
gacagguccccaaaccacuu

SEQ ID NO: 23500 - RNA, 20 nt, Artificial Sequence
  spacer sequence TTCN PAM
agugguuuggggaccugucu

SEQ ID NO: 23501 - RNA, 20 nt, Artificial Sequence
  spacer sequence TTCN PAM
augaacccagcuuuagcccc

SEQ ID NO: 23502 - RNA, 20 nt, Artificial Sequence
  spacer sequence TTCN PAM
uagaaucccaccuaggggac

SEQ ID NO: 23503 - RNA, 20 nt, Artificial Sequence
  spacer sequence TTCN PAM
caccagaggagcugcugggg

SEQ ID NO: 23504 - RNA, 20 nt, Artificial Sequence
  spacer sequence TTCN PAM
aguucccaccagaggagcug

SEQ ID NO: 23505 - RNA, 20 nt, Artificial Sequence
  spacer sequence TTCN PAM
cuguuacuaacuggcaggag

SEQ ID NO: 23506 - RNA, 20 nt, Artificial Sequence
  spacer sequence TTCN PAM
auuacuucgccacuuguggc

SEQ ID NO: 23507 - RNA, 20 nt, Artificial Sequence
  spacer sequence TTCN PAM
ccacuuguggcaggagggca

SEQ ID NO: 23508 - RNA, 20 nt, Artificial Sequence
  spacer sequence TTCN PAM
ugacauuuuuagcucuuuua

SEQ ID NO: 23509 - RNA, 20 nt, Artificial Sequence
  spacer sequence TTCN PAM
uauaugaaugcauaauguca

SEQ ID NO: 23510 - RNA, 20 nt, Artificial Sequence
  spacer sequence TTCN PAM
uauaugaauguuggcaagca

SEQ ID NO: 23511 - RNA, 20 nt, Artificial Sequence
  spacer sequence TTCN PAM
uguguuuuuuaguuuauugu

SEQ ID NO: 23512 - RNA, 20 nt, Artificial Sequence
  spacer sequence TTCN PAM
uggccucuuccuguguuuuu

SEQ ID NO: 23513 - RNA, 20 nt, Artificial Sequence
  spacer sequence TTCN PAM
uaucuucuuggccucuuccu

SEQ ID NO: 23514 - RNA, 20 nt, Artificial Sequence
  spacer sequence TTCN PAM
cgauuuucuuaucuucuugg

SEQ ID NO: 23515 - RNA, 20 nt, Artificial Sequence
  spacer sequence TTCN PAM
ugggcaggacccaggaccga

SEQ ID NO: 23516 - RNA, 20 nt, Artificial Sequence
  spacer sequence TTCN PAM
ccaccccuggccuuucuuga

SEQ ID NO: 23517 - RNA, 20 nt, Artificial Sequence
  spacer sequence TTCN PAM
ugagccuuccuugagccuuc

SEQ ID NO: 23518 - RNA, 20 nt, Artificial Sequence
  spacer sequence TTCN PAM
uugagccuuccuugcauauu

SEQ ID NO: 23519 - RNA, 20 nt, Artificial Sequence
  spacer sequence TTCN PAM
uugcauauuaucguucucag

SEQ ID NO: 23520 - RNA, 20 nt, Artificial Sequence
  spacer sequence TTCN PAM
cagccaccgacagcuuaauu

SEQ ID NO: 23521 - RNA, 20 nt, Artificial Sequence
  spacer sequence TTCN PAM
caggcccuuccaacaaguua

SEQ ID NO: 23522 - RNA, 20 nt, Artificial Sequence
  spacer sequence TTCN PAM
aacaaguuaaacuucagcca

SEQ ID NO: 23523 - RNA, 20 nt, Artificial Sequence
  spacer sequence TTCN PAM
gccauuuaaaaaaaaaaaaa

SEQ ID NO: 23524 - RNA, 20 nt, Artificial Sequence
  spacer sequence TTCN PAM
acugauuucuuaccugcaca

SEQ ID NO: 23525 - RNA, 20 nt, Artificial Sequence
  spacer sequence TTCN PAM
uaccugcacacgcaggcacg

SEQ ID NO: 23526 - RNA, 20 nt, Artificial Sequence
  spacer sequence TTCN PAM
ggcgaccaggugugagagcu

SEQ ID NO: 23527 - RNA, 20 nt, Artificial Sequence
  spacer sequence TTCN PAM
caucuggcccucggguuacu

SEQ ID NO: 23528 - RNA, 20 nt, Artificial Sequence
  spacer sequence TTCN PAM
caacggcaagccaggaaaga

SEQ ID NO: 23529 - RNA, 20 nt, Artificial Sequence
  spacer sequence TTCN PAM
uggcuugccguugggaaaaa

SEQ ID NO: 23530 - RNA, 20 nt, Artificial Sequence
  spacer sequence TTCN PAM
aucaucuuuccuggcuugcc

SEQ ID NO: 23531 - RNA, 20 nt, Artificial Sequence
  spacer sequence TTCN PAM
gaggagggaaaaaauugagc

SEQ ID NO: 23532 - RNA, 20 nt, Artificial Sequence
  spacer sequence TTCN PAM
cuccucugaaccaguugagg

SEQ ID NO: 23533 - RNA, 20 nt, Artificial Sequence
  spacer sequence TTCN PAM
uuuuuaaauaccugcugacu

SEQ ID NO: 23534 - RNA, 20 nt, Artificial Sequence
  spacer sequence TTCN PAM
uucuuuuuuaaauaccugcu

SEQ ID NO: 23535 - RNA, 20 nt, Artificial Sequence
  spacer sequence TTCN PAM
uucuuucuuuuuuaaauacc

SEQ ID NO: 23536 - RNA, 20 nt, Artificial Sequence
  spacer sequence TTCN PAM
uuuuucuuucuuucuuuuuu

SEQ ID NO: 23537 - RNA, 20 nt, Artificial Sequence
  spacer sequence TTCN PAM
guguuuuuuuuuuccuuuuu

SEQ ID NO: 23538 - RNA, 20 nt, Artificial Sequence
  spacer sequence TTCN PAM
ucuguuaauggacaaccaca

SEQ ID NO: 23539 - RNA, 20 nt, Artificial Sequence
  spacer sequence TTCN PAM
cuguucuccuaccucuuucg

SEQ ID NO: 23540 - RNA, 20 nt, Artificial Sequence
  spacer sequence TTCN PAM
ccuaccucuuucgagcuccu

SEQ ID NO: 23541 - RNA, 20 nt, Artificial Sequence
  spacer sequence TTCN PAM
agcuccuaaaaacuagacau

SEQ ID NO: 23542 - RNA, 20 nt, Artificial Sequence
  spacer sequence TTCN PAM
cuuucuauucaagauaaaca

SEQ ID NO: 23543 - RNA, 20 nt, Artificial Sequence
  spacer sequence TTCN PAM
auucaagauaaacaaagugc

SEQ ID NO: 23544 - RNA, 20 nt, Artificial Sequence
  spacer sequence TTCN PAM
agauaaacaaagugcuucaa

SEQ ID NO: 23545 - RNA, 20 nt, Artificial Sequence
  spacer sequence TTCN PAM
aguucagggcgcacccuggg

SEQ ID NO: 23546 - RNA, 20 nt, Artificial Sequence
  spacer sequence TTCN PAM
gggcgcacccugggaccccu

SEQ ID NO: 23547 - RNA, 20 nt, Artificial Sequence
  spacer sequence TTCN PAM
gucugcuaaaccagucuggc

SEQ ID NO: 23548 - RNA, 20 nt, Artificial Sequence
  spacer sequence TTCN PAM
cuuugugcuccuucccucuu

SEQ ID NO: 23549 - RNA, 20 nt, Artificial Sequence
  spacer sequence TTCN PAM
cucuugccacuaaccucuuu

SEQ ID NO: 23550 - RNA, 20 nt, Artificial Sequence
  spacer sequence TTCN PAM
uuaccaccuucuccggagca

SEQ ID NO: 23551 - RNA, 20 nt, Artificial Sequence
  spacer sequence TTCN PAM
ccggagcagauggacuugac

SEQ ID NO: 23552 - RNA, 20 nt, Artificial Sequence
  spacer sequence TTCN PAM
gagguugccaggaggggcuu

SEQ ID NO: 23553 - RNA, 20 nt, Artificial Sequence
  spacer sequence TTCN PAM
cuaauuucugagguugccag

SEQ ID NO: 23554 - RNA, 20 nt, Artificial Sequence
  spacer sequence TTCN PAM
ccucccucuguguugcccga

SEQ ID NO: 23555 - RNA, 20 nt, Artificial Sequence
  spacer sequence TTCN PAM
guggguccaacgggauuugu

SEQ ID NO: 23556 - RNA, 20 nt, Artificial Sequence
  spacer sequence TTCN PAM
acccucucacacuaacacua

SEQ ID NO: 23557 - RNA, 20 nt, Artificial Sequence
  spacer sequence TTCN PAM
gguuuaguguuagugugaga

SEQ ID NO: 23558 - RNA, 20 nt, Artificial Sequence
  spacer sequence TTCN PAM
gcaagaauauuuuaagugag

SEQ ID NO: 23559 - RNA, 20 nt, Artificial Sequence
  spacer sequence TTCN PAM
ugcagaacgcaaaggagggg

SEQ ID NO: 23560 - RNA, 20 nt, Artificial Sequence
  spacer sequence TTCN PAM
guacugguuguaaaaagugu

SEQ ID NO: 23561 - RNA, 20 nt, Artificial Sequence
  spacer sequence TTCN PAM
uuaauauuauuuauuaugua

SEQ ID NO: 23562 - RNA, 20 nt, Artificial Sequence
  spacer sequence TTCN PAM
uaagccuuggccagggcuuu

SEQ ID NO: 23563 - RNA, 20 nt, Artificial Sequence
  spacer sequence TTCN PAM
ugcaaggggaaaguccagcc

SEQ ID NO: 23564 - RNA, 20 nt, Artificial Sequence
  spacer sequence TTCN PAM
ccuugcaugaaauaauaaaa

SEQ ID NO: 23565 - RNA, 20 nt, Artificial Sequence
  spacer sequence TTCN PAM
uuggcuggacuuuccccuug

SEQ ID NO: 23566 - RNA, 20 nt, Artificial Sequence
  spacer sequence TTCN PAM
gccuuuccauguggucggga

SEQ ID NO: 23567 - RNA, 20 nt, Artificial Sequence
  spacer sequence TTCN PAM
auguggucgggaaguuaccc

SEQ ID NO: 23568 - RNA, 20 nt, Artificial Sequence
  spacer sequence TTCN PAM
cgaccacauggaaaggcuga

SEQ ID NO: 23569 - RNA, 20 nt, Artificial Sequence
  spacer sequence TTCN PAM
cucuuccuaaccacccucuc

SEQ ID NO: 23570 - RNA, 20 nt, Artificial Sequence
  spacer sequence TTCN PAM
uaaccacccucucugccggc

SEQ ID NO: 23571 - RNA, 20 nt, Artificial Sequence
  spacer sequence TTCN PAM
gucaguguccacccugcccc

SEQ ID NO: 23572 - RNA, 20 nt, Artificial Sequence
  spacer sequence TTCN PAM
uuuguccuuugaggggcagg

SEQ ID NO: 23573 - RNA, 20 nt, Artificial Sequence
  spacer sequence TTCN PAM
cacugggucugggggauuuc

SEQ ID NO: 23574 - RNA, 20 nt, Artificial Sequence
  spacer sequence TTCN PAM
uuuaggugggcuuauuuccc

SEQ ID NO: 23575 - RNA, 20 nt, Artificial Sequence
  spacer sequence TTCN PAM
ucauuuaggugggcuuauuu

SEQ ID NO: 23576 - RNA, 20 nt, Artificial Sequence
  spacer sequence TTCN PAM
gagccuuaacccagaugcuc

SEQ ID NO: 23577 - RNA, 20 nt, Artificial Sequence
  spacer sequence TTCN PAM
aacgcuggugcaggauuccg

SEQ ID NO: 23578 - RNA, 20 nt, Artificial Sequence
  spacer sequence TTCN PAM
ugccacaccgccgggccccu

SEQ ID NO: 23579 - RNA, 20 nt, Artificial Sequence
  spacer sequence TTCN PAM
auugugcgguggguguguug

SEQ ID NO: 23580 - RNA, 20 nt, Artificial Sequence
  spacer sequence TTCN PAM
ugaucuuaauuagauucgau

SEQ ID NO: 23581 - RNA, 20 nt, Artificial Sequence
  spacer sequence TTCN PAM
uccugaucuuaauuagauuc

SEQ ID NO: 23582 - RNA, 20 nt, Artificial Sequence
  spacer sequence TTCN PAM
uuucacuguacccccaguaa

SEQ ID NO: 23583 - RNA, 20 nt, Artificial Sequence
  spacer sequence TTCN PAM
cuguacccccaguaaucaca

SEQ ID NO: 23584 - RNA, 20 nt, Artificial Sequence
  spacer sequence TTCN PAM
gugauuacuggggguacagu

SEQ ID NO: 23585 - RNA, 20 nt, Artificial Sequence
  spacer sequence TTCN PAM
ucaaauuuugagaauuuugu

SEQ ID NO: 23586 - RNA, 20 nt, Artificial Sequence
  spacer sequence TTCN PAM
aauuuugagaauuuuguucc

SEQ ID NO: 23587 - RNA, 20 nt, Artificial Sequence
  spacer sequence TTCN PAM
caaaauuugaagaacuucug

SEQ ID NO: 23588 - RNA, 20 nt, Artificial Sequence
  spacer sequence TTCN PAM
ucugcuaauuauuucccuca

SEQ ID NO: 23589 - RNA, 20 nt, Artificial Sequence
  spacer sequence TTCN PAM
cucauuuugcauuucaaggc

SEQ ID NO: 23590 - RNA, 20 nt, Artificial Sequence
  spacer sequence TTCN PAM
aggcacaaagacagucuauc

SEQ ID NO: 23591 - RNA, 20 nt, Artificial Sequence
  spacer sequence TTCN PAM
aacuauuaauagaccaccag

SEQ ID NO: 23592 - RNA, 20 nt, Artificial Sequence
  spacer sequence TTCN PAM
gacgcucaaaacuucaaacu

SEQ ID NO: 23593 - RNA, 20 nt, Artificial Sequence
  spacer sequence TTCN PAM
uuuuaaaacuauucugucau

SEQ ID NO: 23594 - RNA, 20 nt, Artificial Sequence
  spacer sequence TTCN PAM
gucauuuccaguuuuuuaaa

SEQ ID NO: 23595 - RNA, 20 nt, Artificial Sequence
  spacer sequence TTCN PAM
aguuuuuuaaaaagguuuug

SEQ ID NO: 23596 - RNA, 20 nt, Artificial Sequence
  spacer sequence TTCN PAM
uuuuuugguggugguggcgu

SEQ ID NO: 23597 - RNA, 20 nt, Artificial Sequence
  spacer sequence TTCN PAM
ucagaaagacagcuucuggg

SEQ ID NO: 23598 - RNA, 20 nt, Artificial Sequence
  spacer sequence TTCN PAM
gaaagacagcuucugggcca

SEQ ID NO: 23599 - RNA, 20 nt, Artificial Sequence
  spacer sequence TTCN PAM
gaagaaacauuaacgccacc

SEQ ID NO: 23600 - RNA, 20 nt, Artificial Sequence
  spacer sequence TTCN PAM
gggccacucuggguauuaug

SEQ ID NO: 23601 - RNA, 20 nt, Artificial Sequence
  spacer sequence TTCN PAM
cccuuacaauaguuacucuc

SEQ ID NO: 23602 - RNA, 20 nt, Artificial Sequence
  spacer sequence TTCN PAM
guaaaucaguaaaccaggca

SEQ ID NO: 23603 - RNA, 20 nt, Artificial Sequence
  spacer sequence TTCN PAM
cauaccaagguucuguaaau

SEQ ID NO: 23604 - RNA, 20 nt, Artificial Sequence
  spacer sequence TTCN PAM
ccauucacauaccaagguuc

SEQ ID NO: 23605 - RNA, 20 nt, Artificial Sequence
  spacer sequence TTCN PAM
uuuucgccauucacauacca

SEQ ID NO: 23606 - RNA, 20 nt, Artificial Sequence
  spacer sequence TTCN PAM
uuuuuuuucuuuuucgccau

SEQ ID NO: 23607 - RNA, 20 nt, Artificial Sequence
  spacer sequence TTCN PAM
uuccuuuuuuuucuuuuucg

SEQ ID NO: 23608 - RNA, 20 nt, Artificial Sequence
  spacer sequence TTCN PAM
uuuuuucuuuccuuuuuuuu

SEQ ID NO: 23609 - RNA, 20 nt, Artificial Sequence
  spacer sequence TTCN PAM
uuggcauaaggauauguuug

SEQ ID NO: 23610 - RNA, 20 nt, Artificial Sequence
  spacer sequence TTCN PAM
gaucauguguuguucauuau

SEQ ID NO: 23611 - RNA, 20 nt, Artificial Sequence
  spacer sequence TTCN PAM
uuauuaugacuuuacuugaa

SEQ ID NO: 23612 - RNA, 20 nt, Artificial Sequence
  spacer sequence TTCN PAM
aguaaagucauaauaaugaa

SEQ ID NO: 23613 - RNA, 20 nt, Artificial Sequence
  spacer sequence TTCN PAM
cuuauaugcuuucuaccccu

SEQ ID NO: 23614 - RNA, 20 nt, Artificial Sequence
  spacer sequence TTCN PAM
accccuccacucccuuuaag

SEQ ID NO: 23615 - RNA, 20 nt, Artificial Sequence
  spacer sequence TTCN PAM
aaaaacaguacaauuuuuuu

SEQ ID NO: 23616 - RNA, 20 nt, Artificial Sequence
  spacer sequence TTCN PAM
aaguacuuaaagggagugga

SEQ ID NO: 23617 - RNA, 20 nt, Artificial Sequence
  spacer sequence TTCN PAM
ccaucuguaaauucccugaa

SEQ ID NO: 23618 - RNA, 20 nt, Artificial Sequence
  spacer sequence TTCN PAM
cugaaaauacauuuucaaaa

SEQ ID NO: 23619 - RNA, 20 nt, Artificial Sequence
  spacer sequence TTCN PAM
gggaauuuacagauggugaa

SEQ ID NO: 23620 - RNA, 20 nt, Artificial Sequence
  spacer sequence TTCN PAM
aaagacuuaugcaaagccac

SEQ ID NO: 23621 - RNA, 20 nt, Artificial Sequence
  spacer sequence TTCN PAM
aaaucauguggcuuugcaua

SEQ ID NO: 23622 - RNA, 20 nt, Artificial Sequence
  spacer sequence TTCN PAM
uaagucaccauuaaauuuug

SEQ ID NO: 23623 - RNA, 20 nt, Artificial Sequence
  spacer sequence TTCN PAM
aauacuuuuuauuuacuucc

SEQ ID NO: 23624 - RNA, 20 nt, Artificial Sequence
  spacer sequence TTCN PAM
uguagaauuauuuguguacu

SEQ ID NO: 23625 - RNA, 20 nt, Artificial Sequence
  spacer sequence TTCN PAM
acaggaaguaaauaaaaagu

SEQ ID NO: 23626 - RNA, 20 nt, Artificial Sequence
  spacer sequence TTCN PAM
ccauuauauaacaaucuacc

SEQ ID NO: 23627 - RNA, 20 nt, Artificial Sequence
  spacer sequence TTCN PAM
aauagauuggcauaaucuag

SEQ ID NO: 23628 - RNA, 20 nt, Artificial Sequence
  spacer sequence TTCN PAM
uucuaauagauuggcauaau

SEQ ID NO: 23629 - RNA, 20 nt, Artificial Sequence
  spacer sequence TTCN PAM
gcuuauauggaguacaaauu

SEQ ID NO: 23630 - RNA, 20 nt, Artificial Sequence
  spacer sequence TTCN PAM
agucacuuuugacuuaccau

SEQ ID NO: 23631 - RNA, 20 nt, Artificial Sequence
  spacer sequence TTCN PAM
auguaaaguguuauuauagc

SEQ ID NO: 23632 - RNA, 20 nt, Artificial Sequence
  spacer sequence TTCN PAM
ugcugcuucuagggcugugu

SEQ ID NO: 23633 - RNA, 20 nt, Artificial Sequence
  spacer sequence TTCN PAM
agggcugugucaguguuuac

SEQ ID NO: 23634 - RNA, 20 nt, Artificial Sequence
  spacer sequence TTCN PAM
uggaaguuaaauaaaccgac

SEQ ID NO: 23635 - RNA, 20 nt, Artificial Sequence
  spacer sequence TTCN PAM
aggaauguaaacacugacac

SEQ ID NO: 23636 - RNA, 20 nt, Artificial Sequence
  spacer sequence TTCN PAM
gucuauccaggaguuuugcc

SEQ ID NO: 23637 - RNA, 20 nt, Artificial Sequence
  spacer sequence TTCN PAM
uguaaaguuugggggagaga

SEQ ID NO: 23638 - RNA, 20 nt, Artificial Sequence
  spacer sequence TTCN PAM
cuccucucucucucccccaa

SEQ ID NO: 23639 - RNA, 20 nt, Artificial Sequence
  spacer sequence TTCN PAM
cucuuucucuccucucucuc

SEQ ID NO: 23640 - RNA, 20 nt, Artificial Sequence
  spacer sequence TTCN PAM
uucucucuuucucuccucuc

SEQ ID NO: 23641 - RNA, 20 nt, Artificial Sequence
  spacer sequence TTCN PAM
uuccuucucucuuucucucc

SEQ ID NO: 23642 - RNA, 20 nt, Artificial Sequence
  spacer sequence TTCN PAM
aucuugcaucacccccuuca

SEQ ID NO: 23643 - RNA, 20 nt, Artificial Sequence
  spacer sequence TTCN PAM
auaugucacaaagaccuucc

SEQ ID NO: 23644 - RNA, 20 nt, Artificial Sequence
  spacer sequence TTCN PAM
uauccacagccaacgcgacu

SEQ ID NO: 23645 - RNA, 20 nt, Artificial Sequence
  spacer sequence TTCN PAM
gucgcguuggcuguggauag

SEQ ID NO: 23646 - RNA, 20 nt, Artificial Sequence
  spacer sequence TTCN PAM
uaaauaccgggucagcugaa

SEQ ID NO: 23647 - RNA, 20 nt, Artificial Sequence
  spacer sequence TTCN PAM
gcugacccgguauuuaagaa

SEQ ID NO: 23648 - RNA, 20 nt, Artificial Sequence
  spacer sequence TTCN PAM
ccacugcccacucagcccca

SEQ ID NO: 23649 - RNA, 20 nt, Artificial Sequence
  spacer sequence TTCN PAM
uacuuuauguggggcugagu

SEQ ID NO: 23650 - RNA, 20 nt, Artificial Sequence
  spacer sequence TTCN PAM
aauagcaaauuauccauuag

SEQ ID NO: 23651 - RNA, 20 nt, Artificial Sequence
  spacer sequence TTCN PAM
ucauaucuuaguaaagcaau

SEQ ID NO: 23652 - RNA, 20 nt, Artificial Sequence
  spacer sequence TTCN PAM
ugauguaauugcuuuacuaa

SEQ ID NO: 23653 - RNA, 20 nt, Artificial Sequence
  spacer sequence TTCN PAM
acacgcacuaucauuuucuu

SEQ ID NO: 23654 - RNA, 20 nt, Artificial Sequence
  spacer sequence TTCN PAM
cagccuuuggucuccggcca

SEQ ID NO: 23655 - RNA, 20 nt, Artificial Sequence
  spacer sequence TTCN PAM
gcccucuccgacuucacagc

SEQ ID NO: 23656 - RNA, 20 nt, Artificial Sequence
  spacer sequence TTCN PAM
ucuuacugccuaaaaaguuc

SEQ ID NO: 23657 - RNA, 20 nt, Artificial Sequence
  spacer sequence TTCN PAM
ugcacuuaauaauuuauuug

SEQ ID NO: 23658 - RNA, 20 nt, Artificial Sequence
  spacer sequence TTCN PAM
ggauacuguuucccagcuga

SEQ ID NO: 23659 - RNA, 20 nt, Artificial Sequence
  spacer sequence TTCN PAM
cagcugaauauuaacaacuu

SEQ ID NO: 23660 - RNA, 20 nt, Artificial Sequence
  spacer sequence TTCN PAM
gcugggaaacaguauccaga

SEQ ID NO: 23661 - RNA, 20 nt, Artificial Sequence
  spacer sequence TTCN PAM
guuuaaaguuguuaauauuc

SEQ ID NO: 23662 - RNA, 20 nt, Artificial Sequence
  spacer sequence TTCN PAM
auccauaccaugcuaaaagc

SEQ ID NO: 23663 - RNA, 20 nt, Artificial Sequence
  spacer sequence TTCN PAM
uacacacuguucauuuucca

SEQ ID NO: 23664 - RNA, 20 nt, Artificial Sequence
  spacer sequence TTCN PAM
uuuuccaucacaauuuauuu

SEQ ID NO: 23665 - RNA, 20 nt, Artificial Sequence
  spacer sequence TTCN PAM
aucacaauuuauuuucuuuc

SEQ ID NO: 23666 - RNA, 20 nt, Artificial Sequence
  spacer sequence TTCN PAM
uucauuaaacauucguuuua

SEQ ID NO: 23667 - RNA, 20 nt, Artificial Sequence
  spacer sequence TTCN PAM
uuaaacauucguuuuaauca

SEQ ID NO: 23668 - RNA, 20 nt, Artificial Sequence
  spacer sequence TTCN PAM
uuuuaaucagaauaucaguu

SEQ ID NO: 23669 - RNA, 20 nt, Artificial Sequence
  spacer sequence TTCN PAM
gauuaaaacgaauguuuaau

SEQ ID NO: 23670 - RNA, 20 nt, Artificial Sequence
  spacer sequence TTCN PAM
gauucugcuuguuaaccagu

SEQ ID NO: 23671 - RNA, 20 nt, Artificial Sequence
  spacer sequence TTCN PAM
gcuuguuaaccagugauaaa

SEQ ID NO: 23672 - RNA, 20 nt, Artificial Sequence
  spacer sequence TTCN PAM
ucuuugguuuaugaguuuau

SEQ ID NO: 23673 - RNA, 20 nt, Artificial Sequence
  spacer sequence TTCN PAM
acagcaaaggcaaacaccaa

SEQ ID NO: 23674 - RNA, 20 nt, Artificial Sequence
  spacer sequence TTCN PAM
gauuuuugagagccugugau

SEQ ID NO: 23675 - RNA, 20 nt, Artificial Sequence
  spacer sequence TTCN PAM
ccaccagggcacucguguac

SEQ ID NO: 23676 - RNA, 20 nt, Artificial Sequence
  spacer sequence TTCN PAM
gcugcugcucugagcuacaa

SEQ ID NO: 23677 - RNA, 20 nt, Artificial Sequence
  spacer sequence TTCN PAM
cauucagcugcugcucugag

SEQ ID NO: 23678 - RNA, 20 nt, Artificial Sequence
  spacer sequence TTCN PAM
uuagauagauggcuggcacc

SEQ ID NO: 23679 - RNA, 20 nt, Artificial Sequence
  spacer sequence TTCN PAM
ucuuuagauagauggcuggc

SEQ ID NO: 23680 - RNA, 20 nt, Artificial Sequence
  spacer sequence TTCN PAM
aacaaugcuuuagguuucuu

SEQ ID NO: 23681 - RNA, 20 nt, Artificial Sequence
  spacer sequence TTCN PAM
guagccuucccuccuccaaa

SEQ ID NO: 23682 - RNA, 20 nt, Artificial Sequence
  spacer sequence TTCN PAM
cuccuccaaaggaggaaccu

SEQ ID NO: 23683 - RNA, 20 nt, Artificial Sequence
  spacer sequence TTCN PAM
uccuuuggaggagggaaggc

SEQ ID NO: 23684 - RNA, 20 nt, Artificial Sequence
  spacer sequence TTCN PAM
ugccaucaaacugcuaacaa

SEQ ID NO: 23685 - RNA, 20 nt, Artificial Sequence
  spacer sequence TTCN PAM
uggggaacagaaacaggcaa

SEQ ID NO: 23686 - RNA, 20 nt, Artificial Sequence
  spacer sequence TTCN PAM
ccacgaacauugcagggcag

SEQ ID NO: 23687 - RNA, 20 nt, Artificial Sequence
  spacer sequence TTCN PAM
guuccccacgaacauugcag

SEQ ID NO: 23688 - RNA, 20 nt, Artificial Sequence
  spacer sequence TTCN PAM
cuauguaucuggaagugccu

SEQ ID NO: 23689 - RNA, 20 nt, Artificial Sequence
  spacer sequence TTCN PAM
agauacauagagaaauaugu

SEQ ID NO: 23690 - RNA, 20 nt, Artificial Sequence
  spacer sequence TTCN PAM
ccccaaaugagaacgauuuc

SEQ ID NO: 23691 - RNA, 20 nt, Artificial Sequence
  spacer sequence TTCN PAM
cauuuggggagaagacugua

SEQ ID NO: 23692 - RNA, 20 nt, Artificial Sequence
  spacer sequence TTCN PAM
agccaacacguucacaaacu

SEQ ID NO: 23693 - RNA, 20 nt, Artificial Sequence
  spacer sequence TTCN PAM
caaacuguacuuaacguuaa

SEQ ID NO: 23694 - RNA, 20 nt, Artificial Sequence
  spacer sequence TTCN PAM
uuuaacguuaaguacaguuu

SEQ ID NO: 23695 - RNA, 20 nt, Artificial Sequence
  spacer sequence TTCN PAM
aauuccucaauucacuaaag

SEQ ID NO: 23696 - RNA, 20 nt, Artificial Sequence
  spacer sequence TTCN PAM
ucaauucacuaaaggaaacu

SEQ ID NO: 23697 - RNA, 20 nt, Artificial Sequence
  spacer sequence TTCN PAM
cuaaaggaaacuuggcaaga

SEQ ID NO: 23698 - RNA, 20 nt, Artificial Sequence
  spacer sequence TTCN PAM
uuuagugaauugaggaauua

SEQ ID NO: 23699 - RNA, 20 nt, Artificial Sequence
  spacer sequence TTCN PAM
ugccaaguuuccuuuaguga

SEQ ID NO: 23700 - RNA, 20 nt, Artificial Sequence
  spacer sequence TTCN PAM
acuggggcaucugaggagga

SEQ ID NO: 23701 - RNA, 20 nt, Artificial Sequence
  spacer sequence TTCN PAM
uaugcaaauuacauuaauga

SEQ ID NO: 23702 - RNA, 20 nt, Artificial Sequence
  spacer sequence TTCN PAM
uuaauguaauuugcauauga

SEQ ID NO: 23703 - RNA, 20 nt, Artificial Sequence
  spacer sequence TTCN PAM
ccaagagauuugacauauuu

SEQ ID NO: 23704 - RNA, 20 nt, Artificial Sequence
  spacer sequence TTCN PAM
caagauuaaaaguucaccaa

SEQ ID NO: 23705 - RNA, 20 nt, Artificial Sequence
  spacer sequence TTCN PAM
ucucaagauuaaaaguucac

SEQ ID NO: 23706 - RNA, 20 nt, Artificial Sequence
  spacer sequence TTCN PAM
aucuugcaaaauugaugaug

SEQ ID NO: 23707 - RNA, 20 nt, Artificial Sequence
  spacer sequence TTCN PAM
uagauuuucaaucuugcaaa

SEQ ID NO: 23708 - RNA, 20 nt, Artificial Sequence
  spacer sequence TTCN PAM
ccuuuuuuuucuccuucagc

SEQ ID NO: 23709 - RNA, 20 nt, Artificial Sequence
  spacer sequence TTCN PAM
ccuucagcaggcugacaggc

SEQ ID NO: 23710 - RNA, 20 nt, Artificial Sequence
  spacer sequence TTCN PAM
gcaggcugacaggccagccu

SEQ ID NO: 23711 - RNA, 20 nt, Artificial Sequence
  spacer sequence TTCN PAM
gugcacaucaggcuggccug

SEQ ID NO: 23712 - RNA, 20 nt, Artificial Sequence
  spacer sequence TTCN PAM
caauuacuggaaggaccuaa

SEQ ID NO: 23713 - RNA, 20 nt, Artificial Sequence
  spacer sequence TTCN PAM
aguaauugcgaauuguuuug

SEQ ID NO: 23714 - RNA, 20 nt, Artificial Sequence
  spacer sequence TTCN PAM
aaugaccauuagguccuucc

SEQ ID NO: 23715 - RNA, 20 nt, Artificial Sequence
  spacer sequence TTCN PAM
uuaccuaguuguaaauucua

SEQ ID NO: 23716 - RNA, 20 nt, Artificial Sequence
  spacer sequence TTCN PAM
guucauuaccuaguuguaaa

SEQ ID NO: 23717 - RNA, 20 nt, Artificial Sequence
  spacer sequence TTCN PAM
uaaagcaauuuagccuuuga

SEQ ID NO: 23718 - RNA, 20 nt, Artificial Sequence
  spacer sequence TTCN PAM
aaggcuaaauugcuuuauga

SEQ ID NO: 23719 - RNA, 20 nt, Artificial Sequence
  spacer sequence TTCN PAM
uuaaucuucaaaggcuaaau

SEQ ID NO: 23720 - RNA, 20 nt, Artificial Sequence
  spacer sequence TTCN PAM
aaugagcuuuagcaaauuau

SEQ ID NO: 23721 - RNA, 20 nt, Artificial Sequence
  spacer sequence TTCN PAM
uccaaaaagcaaaggguuuu

SEQ ID NO: 23722 - RNA, 20 nt, Artificial Sequence
  spacer sequence TTCN PAM
uccuaugauuuccucauuuu

SEQ ID NO: 23723 - RNA, 20 nt, Artificial Sequence
  spacer sequence TTCN PAM
uaugauuuccucauuuuuuu

SEQ ID NO: 23724 - RNA, 20 nt, Artificial Sequence
  spacer sequence TTCN PAM
ucauuuuuuuaaugcaaaau

SEQ ID NO: 23725 - RNA, 20 nt, Artificial Sequence
  spacer sequence TTCN PAM
agacugagcuuaaacuaaac

SEQ ID NO: 23726 - RNA, 20 nt, Artificial Sequence
  spacer sequence TTCN PAM
agucaagccaaaggggcuaa

SEQ ID NO: 23727 - RNA, 20 nt, Artificial Sequence
  spacer sequence TTCN PAM
uaaaacuaagcccuuaagag

SEQ ID NO: 23728 - RNA, 20 nt, Artificial Sequence
  spacer sequence TTCN PAM
guuggaggacuaugcaguau

SEQ ID NO: 23729 - RNA, 20 nt, Artificial Sequence
  spacer sequence TTCN PAM
aaaaagccuuuucccccuca

SEQ ID NO: 23730 - RNA, 20 nt, Artificial Sequence
  spacer sequence TTCN PAM
cccucaaguugucucuccug

SEQ ID NO: 23731 - RNA, 20 nt, Artificial Sequence
  spacer sequence TTCN PAM
uuggcuuggaguggcauuaa

SEQ ID NO: 23732 - RNA, 20 nt, Artificial Sequence
  spacer sequence TTCN PAM
aaaauuaaugccacuccaag

SEQ ID NO: 23733 - RNA, 20 nt, Artificial Sequence
  spacer sequence TTCN PAM
gcuuccaaagggaaaccagc

SEQ ID NO: 23734 - RNA, 20 nt, Artificial Sequence
  spacer sequence TTCN PAM
aaagggaaaccagcaagaaa

SEQ ID NO: 23735 - RNA, 20 nt, Artificial Sequence
  spacer sequence TTCN PAM
cuuuggaagcagaaacuucu

SEQ ID NO: 23736 - RNA, 20 nt, Artificial Sequence
  spacer sequence TTCN PAM
ugcugguuucccuuuggaag

SEQ ID NO: 23737 - RNA, 20 nt, Artificial Sequence
  spacer sequence TTCN PAM
ccuuucuugcugguuucccu

SEQ ID NO: 23738 - RNA, 20 nt, Artificial Sequence
  spacer sequence TTCN PAM
gaggagugcaaauccuguug

SEQ ID NO: 23739 - RNA, 20 nt, Artificial Sequence
  spacer sequence TTCN PAM
gauuuccuccauucggcacc

SEQ ID NO: 23740 - RNA, 20 nt, Artificial Sequence
  spacer sequence TTCN PAM
uccauucggcaccagccgca

SEQ ID NO: 23741 - RNA, 20 nt, Artificial Sequence
  spacer sequence TTCN PAM
gcaccagccgcauuuaaucc

SEQ ID NO: 23742 - RNA, 20 nt, Artificial Sequence
  spacer sequence TTCN PAM
ccauggauuaaaugcggcug

SEQ ID NO: 23743 - RNA, 20 nt, Artificial Sequence
  spacer sequence TTCN PAM
gaaaguugugguguccaccc

SEQ ID NO: 23744 - RNA, 20 nt, Artificial Sequence
  spacer sequence TTCN PAM
gaaugucagcugaugucugc

SEQ ID NO: 23745 - RNA, 20 nt, Artificial Sequence
  spacer sequence TTCN PAM
cacgauacucucuaauaacu

SEQ ID NO: 23746 - RNA, 20 nt, Artificial Sequence
  spacer sequence TTCN PAM
aauuacuagucuggagaaga

SEQ ID NO: 23747 - RNA, 20 nt, Artificial Sequence
  spacer sequence TTCN PAM
ccagacuaguaauuggaaag

SEQ ID NO: 23748 - RNA, 20 nt, Artificial Sequence
  spacer sequence TTCN PAM
ucuccagacuaguaauugga

SEQ ID NO: 23749 - RNA, 20 nt, Artificial Sequence
  spacer sequence TTCN PAM
agcaaaggauucuucuccag

SEQ ID NO: 23750 - RNA, 20 nt, Artificial Sequence
  spacer sequence TTCN PAM
agugacagaauucccaauga

SEQ ID NO: 23751 - RNA, 20 nt, Artificial Sequence
  spacer sequence TTCN PAM
gucacuagaauuuuuuaaau

SEQ ID NO: 23752 - RNA, 20 nt, Artificial Sequence
  spacer sequence TTCN PAM
caaugaacuccuccucuucc

SEQ ID NO: 23753 - RNA, 20 nt, Artificial Sequence
  spacer sequence TTCN PAM
uugggaauucugucacuaga

SEQ ID NO: 23754 - RNA, 20 nt, Artificial Sequence
  spacer sequence TTCN PAM
ucccaaccccaaccucucca

SEQ ID NO: 23755 - RNA, 20 nt, Artificial Sequence
  spacer sequence TTCN PAM
ccuggguuggagagguuggg

SEQ ID NO: 23756 - RNA, 20 nt, Artificial Sequence
  spacer sequence TTCN PAM
ugcuuucaccuggguuggag

SEQ ID NO: 23757 - RNA, 20 nt, Artificial Sequence
  spacer sequence TTCN PAM
cagucugacuugcacaccag

SEQ ID NO: 23758 - RNA, 20 nt, Artificial Sequence
  spacer sequence TTCN PAM
aaaggccacgugucccagcu

SEQ ID NO: 23759 - RNA, 20 nt, Artificial Sequence
  spacer sequence TTCN PAM
aagcuguuauucucagucug

SEQ ID NO: 23760 - RNA, 20 nt, Artificial Sequence
  spacer sequence TTCN PAM
uuugaacugcuaucgaagaa

SEQ ID NO: 23761 - RNA, 20 nt, Artificial Sequence
  spacer sequence TTCN PAM
aaugaaauccccacagcaga

SEQ ID NO: 23762 - RNA, 20 nt, Artificial Sequence
  spacer sequence TTCN PAM
auagcaguucaaaugaaauc

SEQ ID NO: 23763 - RNA, 20 nt, Artificial Sequence
  spacer sequence TTCN PAM
ucgauagcaguucaaaugaa

SEQ ID NO: 23764 - RNA, 20 nt, Artificial Sequence
  spacer sequence TTCN PAM
aagaaccucucuccgcaccc

SEQ ID NO: 23765 - RNA, 20 nt, Artificial Sequence
  spacer sequence TTCN PAM
uggaauauucuucgauagca

SEQ ID NO: 23766 - RNA, 20 nt, Artificial Sequence
  spacer sequence TTCN PAM
cccccucucucccccagccu

SEQ ID NO: 23767 - RNA, 20 nt, Artificial Sequence
  spacer sequence TTCN PAM
ccuagaguugaucuuaccgg

SEQ ID NO: 23768 - RNA, 20 nt, Artificial Sequence
  spacer sequence TTCN PAM
gguaagaucaacucuaggag

SEQ ID NO: 23769 - RNA, 20 nt, Artificial Sequence
  spacer sequence TTCN PAM
uugauaacauccacauuucc

SEQ ID NO: 23770 - RNA, 20 nt, Artificial Sequence
  spacer sequence TTCN PAM
gauuuccuugauaacaucca

SEQ ID NO: 23771 - RNA, 20 nt, Artificial Sequence
  spacer sequence TTCN PAM
cuuuccgauuuccuugauaa

SEQ ID NO: 23772 - RNA, 20 nt, Artificial Sequence
  spacer sequence TTCN PAM
cccuucucuuuccgauuucc

SEQ ID NO: 23773 - RNA, 20 nt, Artificial Sequence
  spacer sequence TTCN PAM
uaacucucuuauccuugggc

SEQ ID NO: 23774 - RNA, 20 nt, Artificial Sequence
  spacer sequence TTCN PAM
gagcagggcccaaggauaag

SEQ ID NO: 23775 - RNA, 20 nt, Artificial Sequence
  spacer sequence TTCN PAM
aauaaauguuaaaauguggc

SEQ ID NO: 23776 - RNA, 20 nt, Artificial Sequence
  spacer sequence TTCN PAM
augcagcucugcauccuauc

SEQ ID NO: 23777 - RNA, 20 nt, Artificial Sequence
  spacer sequence TTCN PAM
guuugacacuaauguuacuc

SEQ ID NO: 23778 - RNA, 20 nt, Artificial Sequence
  spacer sequence TTCN PAM
augaggguugauaugggaug

SEQ ID NO: 23779 - RNA, 20 nt, Artificial Sequence
  spacer sequence TTCN PAM
gauuugcccugucacauccc

SEQ ID NO: 23780 - RNA, 20 nt, Artificial Sequence
  spacer sequence TTCN PAM
aaacuuuuguuuuuaaucua

SEQ ID NO: 23781 - RNA, 20 nt, Artificial Sequence
  spacer sequence TTCN PAM
agucccauuugcucuguagu

SEQ ID NO: 23782 - RNA, 20 nt, Artificial Sequence
  spacer sequence TTCN PAM
ccuaacugccuucaagugau

SEQ ID NO: 23783 - RNA, 20 nt, Artificial Sequence
  spacer sequence TTCN PAM
agugauuuucccuauuagag

SEQ ID NO: 23784 - RNA, 20 nt, Artificial Sequence
  spacer sequence TTCN PAM
cuauuagagcguuugccugc

SEQ ID NO: 23785 - RNA, 20 nt, Artificial Sequence
  spacer sequence TTCN PAM
gaugugauugcgguguugcc

SEQ ID NO: 23786 - RNA, 20 nt, Artificial Sequence
  spacer sequence TTCN PAM
acuuuacuuucugaugugau

SEQ ID NO: 23787 - RNA, 20 nt, Artificial Sequence
  spacer sequence TTCN PAM
uauaugcauuccacuuuacu

SEQ ID NO: 23788 - RNA, 20 nt, Artificial Sequence
  spacer sequence TTCN PAM
ucuuuaaauacaauaccuau

SEQ ID NO: 23789 - RNA, 20 nt, Artificial Sequence
  spacer sequence TTCN PAM
ggucagcagugugcaggcag

SEQ ID NO: 23790 - RNA, 20 nt, Artificial Sequence
  spacer sequence TTCN PAM
gcugcugacagcaggcauug

SEQ ID NO: 23791 - RNA, 20 nt, Artificial Sequence
  spacer sequence TTCN PAM
uguauaaaaauaauucagcu

SEQ ID NO: 23792 - RNA, 20 nt, Artificial Sequence
  spacer sequence TTCN PAM
acauacaaguggauugcuua

SEQ ID NO: 23793 - RNA, 20 nt, Artificial Sequence
  spacer sequence TTCN PAM
uucuugcuaccagucacaca

SEQ ID NO: 23794 - RNA, 20 nt, Artificial Sequence
  spacer sequence TTCN PAM
ugcuaccagucacacagcuc

SEQ ID NO: 23795 - RNA, 20 nt, Artificial Sequence
  spacer sequence TTCN PAM
gaucuuggagcugugugacu

SEQ ID NO: 23796 - RNA, 20 nt, Artificial Sequence
  spacer sequence TTCN PAM
ucugaucuuggagcugugug

SEQ ID NO: 23797 - RNA, 20 nt, Artificial Sequence
  spacer sequence TTCN PAM
aagacuauguauuucuucug

SEQ ID NO: 23798 - RNA, 20 nt, Artificial Sequence
  spacer sequence TTCN PAM
aagauccaagaguaucuuua

SEQ ID NO: 23799 - RNA, 20 nt, Artificial Sequence
  spacer sequence TTCN PAM
gauaaagauacucuuggauc

SEQ ID NO: 23800 - RNA, 20 nt, Artificial Sequence
  spacer sequence TTCN PAM
uuauugauuuuuuucuccuu

SEQ ID NO: 23801 - RNA, 20 nt, Artificial Sequence
  spacer sequence TTCN PAM
ccuuaacauaacaaaaacau

SEQ ID NO: 23802 - RNA, 20 nt, Artificial Sequence
  spacer sequence TTCN PAM
cauguuauguuuuuguuaug

SEQ ID NO: 23803 - RNA, 20 nt, Artificial Sequence
  spacer sequence TTCN PAM
gccuuuaaaucauucuucag

SEQ ID NO: 23804 - RNA, 20 nt, Artificial Sequence
  spacer sequence TTCN PAM
ucaguagccaauguucaguu

SEQ ID NO: 23805 - RNA, 20 nt, Artificial Sequence
  spacer sequence TTCN PAM
guagccaauguucaguuuua

SEQ ID NO: 23806 - RNA, 20 nt, Artificial Sequence
  spacer sequence TTCN PAM
guuuuaaauguaaaggaaua

SEQ ID NO: 23807 - RNA, 20 nt, Artificial Sequence
  spacer sequence TTCN PAM
uuuacauuuaaaacugaaca

SEQ ID NO: 23808 - RNA, 20 nt, Artificial Sequence
  spacer sequence TTCN PAM
cuccaucacacccuaauauu

SEQ ID NO: 23809 - RNA, 20 nt, Artificial Sequence
  spacer sequence TTCN PAM
aguuaaaacaaugcauuaac

SEQ ID NO: 23810 - RNA, 20 nt, Artificial Sequence
  spacer sequence TTCN PAM
guuuccaguuaaaacaaugc

SEQ ID NO: 23811 - RNA, 20 nt, Artificial Sequence
  spacer sequence TTCN PAM
cugagggguuccccccuaaa

SEQ ID NO: 23812 - RNA, 20 nt, Artificial Sequence
  spacer sequence TTCN PAM
ccccuaaauguaaauaaauc

SEQ ID NO: 23813 - RNA, 20 nt, Artificial Sequence
  spacer sequence TTCN PAM
ccaacucaagguauaccaug

SEQ ID NO: 23814 - RNA, 20 nt, Artificial Sequence
  spacer sequence TTCN PAM
ccuucaccaacucaagguau

SEQ ID NO: 23815 - RNA, 20 nt, Artificial Sequence
  spacer sequence TTCN PAM
gguuugguucucuuaguuuu

SEQ ID NO: 23816 - RNA, 20 nt, Artificial Sequence
  spacer sequence TTCN PAM
cuuaguuuuuugagguuugu

SEQ ID NO: 23817 - RNA, 20 nt, Artificial Sequence
  spacer sequence TTCN PAM
uguacauuuuaaauauagag

SEQ ID NO: 23818 - RNA, 20 nt, Artificial Sequence
  spacer sequence TTCN PAM
uauguuggagcacaaagcac

SEQ ID NO: 23819 - RNA, 20 nt, Artificial Sequence
  spacer sequence TTCN PAM
cuaaaaauuaacagauguga

SEQ ID NO: 23820 - RNA, 20 nt, Artificial Sequence
  spacer sequence TTCN PAM
uugcagccuuuuuaugcauc

SEQ ID NO: 23821 - RNA, 20 nt, Artificial Sequence
  spacer sequence TTCN PAM
uaauauguaaugaugcauaa

SEQ ID NO: 23822 - RNA, 20 nt, Artificial Sequence
  spacer sequence TTCN PAM
uuuucuuaauauguaaugau

SEQ ID NO: 23823 - RNA, 20 nt, Artificial Sequence
  spacer sequence TTCN PAM
ucaguuguucauuuucuuaa

SEQ ID NO: 23824 - RNA, 20 nt, Artificial Sequence
  spacer sequence TTCN PAM
uuguguuuuuuagaaaguuc

SEQ ID NO: 23825 - RNA, 20 nt, Artificial Sequence
  spacer sequence TTCN PAM
aaaaaacacaaggaagcuuu

SEQ ID NO: 23826 - RNA, 20 nt, Artificial Sequence
  spacer sequence TTCN PAM
aaaagcaaauagaaaggcga

SEQ ID NO: 23827 - RNA, 20 nt, Artificial Sequence
  spacer sequence TTCN PAM
auuugcuuuuugaacuuucu

SEQ ID NO: 23828 - RNA, 20 nt, Artificial Sequence
  spacer sequence TTCN PAM
uuuugaaggcacccuugcag

SEQ ID NO: 23829 - RNA, 20 nt, Artificial Sequence
  spacer sequence TTCN PAM
aaaagaaaaccagugcuguu

SEQ ID NO: 23830 - RNA, 20 nt, Artificial Sequence
  spacer sequence TTCN PAM
caauaauuccauucuuuauu

SEQ ID NO: 23831 - RNA, 20 nt, Artificial Sequence
  spacer sequence TTCN PAM
auucuuuauuuuaaugggag

SEQ ID NO: 23832 - RNA, 20 nt, Artificial Sequence
  spacer sequence TTCN PAM
uuauuuuaaugggaguuuuu

SEQ ID NO: 23833 - RNA, 20 nt, Artificial Sequence
  spacer sequence TTCN PAM
ccucuaucuaaaacuaaaau

SEQ ID NO: 23834 - RNA, 20 nt, Artificial Sequence
  spacer sequence TTCN PAM
uuggcaaugcuaacaacagu

SEQ ID NO: 23835 - RNA, 20 nt, Artificial Sequence
  spacer sequence TTCN PAM
cacuguuguuagcauugcca

SEQ ID NO: 23836 - RNA, 20 nt, Artificial Sequence
  spacer sequence TTCN PAM
ucaacauaccugcuccaggu

SEQ ID NO: 23837 - RNA, 20 nt, Artificial Sequence
  spacer sequence TTCN PAM
cacugggaauucucuggcag

SEQ ID NO: 23838 - RNA, 20 nt, Artificial Sequence
  spacer sequence TTCN PAM
cagugggaaccuggagcagg

SEQ ID NO: 23839 - RNA, 20 nt, Artificial Sequence
  spacer sequence TTCN PAM
cuggcagagacugauucagu

SEQ ID NO: 23840 - RNA, 20 nt, Artificial Sequence
  spacer sequence TTCN PAM
guucugaauaacaugcugcc

SEQ ID NO: 23841 - RNA, 20 nt, Artificial Sequence
  spacer sequence TTCN PAM
gaauaacaugcugccagccc

SEQ ID NO: 23842 - RNA, 20 nt, Artificial Sequence
  spacer sequence TTCN PAM
gaacugaaucagucucugcc

SEQ ID NO: 23843 - RNA, 20 nt, Artificial Sequence
  spacer sequence TTCN PAM
agauagggcuggcagcaugu

SEQ ID NO: 23844 - RNA, 20 nt, Artificial Sequence
  spacer sequence TTCN PAM
cgccucuuuuacaggaaguu

SEQ ID NO: 23845 - RNA, 20 nt, Artificial Sequence
  spacer sequence TTCN PAM
uguaaaagaggcgagaaggc

SEQ ID NO: 23846 - RNA, 20 nt, Artificial Sequence
  spacer sequence TTCN PAM
cagagugcuaaacaacaaau

SEQ ID NO: 23847 - RNA, 20 nt, Artificial Sequence
  spacer sequence TTCN PAM
agcagcauugcaucagaucc

SEQ ID NO: 23848 - RNA, 20 nt, Artificial Sequence
  spacer sequence TTCN PAM
cccuggagacugaugugagu

SEQ ID NO: 23849 - RNA, 20 nt, Artificial Sequence
  spacer sequence TTCN PAM
guucccugucugcaaacuuc

SEQ ID NO: 23850 - RNA, 20 nt, Artificial Sequence
  spacer sequence TTCN PAM
cugucugcaaacuucuaauu

SEQ ID NO: 23851 - RNA, 20 nt, Artificial Sequence
  spacer sequence TTCN PAM
aauucgccaguucuuagcag

SEQ ID NO: 23852 - RNA, 20 nt, Artificial Sequence
  spacer sequence TTCN PAM
ccaguucuuagcagcuuauu

SEQ ID NO: 23853 - RNA, 20 nt, Artificial Sequence
  spacer sequence TTCN PAM
uagcagcuuauuuuuccaag

SEQ ID NO: 23854 - RNA, 20 nt, Artificial Sequence
  spacer sequence TTCN PAM
aaguguuuuguuucaggaaa

SEQ ID NO: 23855 - RNA, 20 nt, Artificial Sequence
  spacer sequence TTCN PAM
ggaaacguguauuuuucuuu

SEQ ID NO: 23856 - RNA, 20 nt, Artificial Sequence
  spacer sequence TTCN PAM
ugaaacaaaacacuuggaaa

SEQ ID NO: 23857 - RNA, 20 nt, Artificial Sequence
  spacer sequence TTCN PAM
uuauacguuuuguggaucua

SEQ ID NO: 23858 - RNA, 20 nt, Artificial Sequence
  spacer sequence TTCN PAM
gacagcuguugauucuguua

SEQ ID NO: 23859 - RNA, 20 nt, Artificial Sequence
  spacer sequence TTCN PAM
guuaaaggaacacauuauaa

SEQ ID NO: 23860 - RNA, 20 nt, Artificial Sequence
  spacer sequence TTCN PAM
uuuaacagaaucaacagcug

SEQ ID NO: 23861 - RNA, 20 nt, Artificial Sequence
  spacer sequence TTCN PAM
uuaaaaccucaagcaaugug

SEQ ID NO: 23862 - RNA, 20 nt, Artificial Sequence
  spacer sequence TTCN PAM
ccauuauauuuuugagucca

SEQ ID NO: 23863 - RNA, 20 nt, Artificial Sequence
  spacer sequence TTCN PAM
auuaaaauauuucaccauua

SEQ ID NO: 23864 - RNA, 20 nt, Artificial Sequence
  spacer sequence TTCN PAM
aguugaaaguuguuuuuuaa

SEQ ID NO: 23865 - RNA, 20 nt, Artificial Sequence
  spacer sequence TTCN PAM
acuggaauuccauuaaaaua

SEQ ID NO: 23866 - RNA, 20 nt, Artificial Sequence
  spacer sequence TTCN PAM
uuuguacuuuuuuuaaaaaa

SEQ ID NO: 23867 - RNA, 20 nt, Artificial Sequence
  spacer sequence TTCN PAM
guaccuucauuuguacuuuu

SEQ ID NO: 23868 - RNA, 20 nt, Artificial Sequence
  spacer sequence TTCN PAM
guuuaaaucuaguacugauc

SEQ ID NO: 23869 - RNA, 20 nt, Artificial Sequence
  spacer sequence TTCN PAM
ccauuacacacacacacaca

SEQ ID NO: 23870 - RNA, 20 nt, Artificial Sequence
  spacer sequence TTCN PAM
aaucacauacuuuuaacggg

SEQ ID NO: 23871 - RNA, 20 nt, Artificial Sequence
  spacer sequence TTCN PAM
cguuaaaaguaugugauuug

SEQ ID NO: 23872 - RNA, 20 nt, Artificial Sequence
  spacer sequence TTCN PAM
agcuuuucccguuaaaagua

SEQ ID NO: 23873 - RNA, 20 nt, Artificial Sequence
  spacer sequence TTCN PAM
aacgccuguaauuaaccaua

SEQ ID NO: 23874 - RNA, 20 nt, Artificial Sequence
  spacer sequence TTCN PAM
uaugguuaauuacaggcguu

SEQ ID NO: 23875 - RNA, 20 nt, Artificial Sequence
  spacer sequence TTCN PAM
ccauaccagcacaugcaaaa

SEQ ID NO: 23876 - RNA, 20 nt, Artificial Sequence
  spacer sequence TTCN PAM
gguggugaauugggaggugg

SEQ ID NO: 23877 - RNA, 20 nt, Artificial Sequence
  spacer sequence TTCN PAM
ccaccagaauuuuuuugcau

SEQ ID NO: 23878 - RNA, 20 nt, Artificial Sequence
  spacer sequence TTCN PAM
cuuggaguugucuccccaac

SEQ ID NO: 23879 - RNA, 20 nt, Artificial Sequence
  spacer sequence TTCN PAM
ucucuuggaguugucucccc

SEQ ID NO: 23880 - RNA, 20 nt, Artificial Sequence
  spacer sequence TTCN PAM
uuucgcuauagaucaaagga

SEQ ID NO: 23881 - RNA, 20 nt, Artificial Sequence
  spacer sequence TTCN PAM
cuauagaucaaaggagaaca

SEQ ID NO: 23882 - RNA, 20 nt, Artificial Sequence
  spacer sequence TTCN PAM
ccuuugaucuauagcgaaau

SEQ ID NO: 23883 - RNA, 20 nt, Artificial Sequence
  spacer sequence TTCN PAM
uguucuccuuugaucuauag

SEQ ID NO: 23884 - RNA, 20 nt, Artificial Sequence
  spacer sequence TTCN PAM
auucuuguucuccuuugauc

SEQ ID NO: 23885 - RNA, 20 nt, Artificial Sequence
  spacer sequence TTCN PAM
auugcugucuuucacacugg

SEQ ID NO: 23886 - RNA, 20 nt, Artificial Sequence
  spacer sequence TTCN PAM
cacugggcuaucuaaguuua

SEQ ID NO: 23887 - RNA, 20 nt, Artificial Sequence
  spacer sequence TTCN PAM
ccagacuagcugcauauuaa

SEQ ID NO: 23888 - RNA, 20 nt, Artificial Sequence
  spacer sequence TTCN PAM
accaccacaccauaauaaag

SEQ ID NO: 23889 - RNA, 20 nt, Artificial Sequence
  spacer sequence TTCN PAM
uccaccaccacaccauaaua

SEQ ID NO: 23890 - RNA, 20 nt, Artificial Sequence
  spacer sequence TTCN PAM
agcuccgcaucugacagggc

SEQ ID NO: 23891 - RNA, 20 nt, Artificial Sequence
  spacer sequence TTCN PAM
uuugccuuuacaauaggcgc

SEQ ID NO: 23892 - RNA, 20 nt, Artificial Sequence
  spacer sequence TTCN PAM
cugcugggaucagaagugac

SEQ ID NO: 23893 - RNA, 20 nt, Artificial Sequence
  spacer sequence TTCN PAM
gaucccagcagggaauaggu

SEQ ID NO: 23894 - RNA, 20 nt, Artificial Sequence
  spacer sequence TTCN PAM
cuugccaaccuaacucaaug

SEQ ID NO: 23895 - RNA, 20 nt, Artificial Sequence
  spacer sequence TTCN PAM
gcaauggcauugaguuaggu

SEQ ID NO: 23896 - RNA, 20 nt, Artificial Sequence
  spacer sequence TTCN PAM
ucauucugcaauggcauuga

SEQ ID NO: 23897 - RNA, 20 nt, Artificial Sequence
  spacer sequence TTCN PAM
gagcucauucgucauucugc

SEQ ID NO: 23898 - RNA, 20 nt, Artificial Sequence
  spacer sequence TTCN PAM
uagcaggguuaguaacuugg

SEQ ID NO: 23899 - RNA, 20 nt, Artificial Sequence
  spacer sequence TTCN PAM
gcaaaggcuuuugcuguucu

SEQ ID NO: 23900 - RNA, 20 nt, Artificial Sequence
  spacer sequence TTCN PAM
aaugaacccaauauggaaua

SEQ ID NO: 23901 - RNA, 20 nt, Artificial Sequence
  spacer sequence TTCN PAM
uuggaauuugucucccugcu

SEQ ID NO: 23902 - RNA, 20 nt, Artificial Sequence
  spacer sequence TTCN PAM
auauuggguucauuggaauu

SEQ ID NO: 23903 - RNA, 20 nt, Artificial Sequence
  spacer sequence TTCN PAM
aaucaguuuuaaaauguaac

SEQ ID NO: 23904 - RNA, 20 nt, Artificial Sequence
  spacer sequence TTCN PAM
aauugaguuuggcaucaagu

SEQ ID NO: 23905 - RNA, 20 nt, Artificial Sequence
  spacer sequence TTCN PAM
uuagcucucuacaugugcuc

SEQ ID NO: 23906 - RNA, 20 nt, Artificial Sequence
  spacer sequence TTCN PAM
uauuugucagguuacauuuc

SEQ ID NO: 23907 - RNA, 20 nt, Artificial Sequence
  spacer sequence TTCN PAM
uggaaauuaaguuugugaca

SEQ ID NO: 23908 - RNA, 20 nt, Artificial Sequence
  spacer sequence TTCN PAM
aggaaauguaaccugacaaa

SEQ ID NO: 23909 - RNA, 20 nt, Artificial Sequence
  spacer sequence TTCN PAM
gucacaaacuuaauuuccag

SEQ ID NO: 23910 - RNA, 20 nt, Artificial Sequence
  spacer sequence TTCN PAM
ugcucaaauuaauuagguca

SEQ ID NO: 23911 - RNA, 20 nt, Artificial Sequence
  spacer sequence TTCN PAM
ccccuuuacgaccaggguau

SEQ ID NO: 23912 - RNA, 20 nt, Artificial Sequence
  spacer sequence TTCN PAM
ccuaccuagguaaaugggca

SEQ ID NO: 23913 - RNA, 20 nt, Artificial Sequence
  spacer sequence TTCN PAM
uuucuccuaccuagguaaau

SEQ ID NO: 23914 - RNA, 20 nt, Artificial Sequence
  spacer sequence TTCN PAM
uauuuguauuacaaauaaaa

SEQ ID NO: 23915 - RNA, 20 nt, Artificial Sequence
  spacer sequence TTCN PAM
gacuauauaauuuaauggau

SEQ ID NO: 23916 - RNA, 20 nt, Artificial Sequence
  spacer sequence TTCN PAM
uaaaauauguucagacuaua

SEQ ID NO: 23917 - RNA, 20 nt, Artificial Sequence
  spacer sequence TTCN PAM
uuaaugucauccaaauugau

SEQ ID NO: 23918 - RNA, 20 nt, Artificial Sequence
  spacer sequence TTCN PAM
aaucaagcagguuuuuaugu

SEQ ID NO: 23919 - RNA, 20 nt, Artificial Sequence
  spacer sequence TTCN PAM
aacuuagagcccacuuuuaa

SEQ ID NO: 23920 - RNA, 20 nt, Artificial Sequence
  spacer sequence TTCN PAM
aggauuaaaaaaaaagauuc

SEQ ID NO: 23921 - RNA, 20 nt, Artificial Sequence
  spacer sequence TTCN PAM
uuugggucauggcuauguca

SEQ ID NO: 23922 - RNA, 20 nt, Artificial Sequence
  spacer sequence TTCN PAM
gauuucauuugggucauggc

SEQ ID NO: 23923 - RNA, 20 nt, Artificial Sequence
  spacer sequence TTCN PAM
gcuuguucagauuucauuug

SEQ ID NO: 23924 - RNA, 20 nt, Artificial Sequence
  spacer sequence TTCN PAM
uugugcaauaaaggguguga

SEQ ID NO: 23925 - RNA, 20 nt, Artificial Sequence
  spacer sequence TTCN PAM
cacccuuuauugcacaaaga

SEQ ID NO: 23926 - RNA, 20 nt, Artificial Sequence
  spacer sequence TTCN PAM
acuucgguuaaauuuaauau

SEQ ID NO: 23927 - RNA, 20 nt, Artificial Sequence
  spacer sequence TTCN PAM
guuaaauuuaauauuucccc

SEQ ID NO: 23928 - RNA, 20 nt, Artificial Sequence
  spacer sequence TTCN PAM
ccccaaaggaaagccaaaau

SEQ ID NO: 23929 - RNA, 20 nt, Artificial Sequence
  spacer sequence TTCN PAM
uuuggggggaaauauuaaau

SEQ ID NO: 23930 - RNA, 20 nt, Artificial Sequence
  spacer sequence TTCN PAM
uuucuuacugaccagcacgc

SEQ ID NO: 23931 - RNA, 20 nt, Artificial Sequence
  spacer sequence TTCN PAM
uacugaccagcacgcaaagc

SEQ ID NO: 23932 - RNA, 20 nt, Artificial Sequence
  spacer sequence TTCN PAM
ccuauucuccuuuauuaaac

SEQ ID NO: 23933 - RNA, 20 nt, Artificial Sequence
  spacer sequence TTCN PAM
ccuuuauuaaacauuuucau

SEQ ID NO: 23934 - RNA, 20 nt, Artificial Sequence
  spacer sequence TTCN PAM
uugagaaaucacaaaaaucu

SEQ ID NO: 23935 - RNA, 20 nt, Artificial Sequence
  spacer sequence TTCN PAM
caaugaaaauguuuaauaaa

SEQ ID NO: 23936 - RNA, 20 nt, Artificial Sequence
  spacer sequence TTCN PAM
cuaggauuugcauguuuuuu

SEQ ID NO: 23937 - RNA, 20 nt, Artificial Sequence
  spacer sequence TTCN PAM
auguaguuuggcuaaugugg

SEQ ID NO: 23938 - RNA, 20 nt, Artificial Sequence
  spacer sequence TTCN PAM
cacugcagcuuccauguagu

SEQ ID NO: 23939 - RNA, 20 nt, Artificial Sequence
  spacer sequence TTCN PAM
aggacucuaaaagaugccau

SEQ ID NO: 23940 - RNA, 20 nt, Artificial Sequence
  spacer sequence TTCN PAM
gcucagggaggaggcgaguu

SEQ ID NO: 23941 - RNA, 20 nt, Artificial Sequence
  spacer sequence TTCN PAM
acacccaguugcauuuucca

SEQ ID NO: 23942 - RNA, 20 nt, Artificial Sequence
  spacer sequence TTCN PAM
agcccaugugcagcuccaca

SEQ ID NO: 23943 - RNA, 20 nt, Artificial Sequence
  spacer sequence TTCN PAM
cuaagagaaaggugugcaaa

SEQ ID NO: 23944 - RNA, 20 nt, Artificial Sequence
  spacer sequence TTCN PAM
cuuagugaauguggcauaua

SEQ ID NO: 23945 - RNA, 20 nt, Artificial Sequence
  spacer sequence TTCN PAM
gauccuuuauaguaaaggca

SEQ ID NO: 23946 - RNA, 20 nt, Artificial Sequence
  spacer sequence TTCN PAM
uuguuguguugcaaguugug

SEQ ID NO: 23947 - RNA, 20 nt, Artificial Sequence
  spacer sequence TTCN PAM
uaaaucaccccauuccuugu

SEQ ID NO: 23948 - RNA, 20 nt, Artificial Sequence
  spacer sequence TTCN PAM
cagaauaaacacagagaacg

SEQ ID NO: 23949 - RNA, 20 nt, Artificial Sequence
  spacer sequence TTCN PAM
gugaaagcuuaaaaaaacaa

SEQ ID NO: 23950 - RNA, 20 nt, Artificial Sequence
  spacer sequence TTCN PAM
cuguguuuauucugugaaag

SEQ ID NO: 23951 - RNA, 20 nt, Artificial Sequence
  spacer sequence TTCN PAM
cucccguucucuguguuuau

SEQ ID NO: 23952 - RNA, 20 nt, Artificial Sequence
  spacer sequence TTCN PAM
ugaagugaauacauauuugu

SEQ ID NO: 23953 - RNA, 20 nt, Artificial Sequence
  spacer sequence TTCN PAM
agaacaggagcagaggggga

SEQ ID NO: 23954 - RNA, 20 nt, Artificial Sequence
  spacer sequence TTCN PAM
cuucaagaacaggagcagag

SEQ ID NO: 23955 - RNA, 20 nt, Artificial Sequence
  spacer sequence TTCN PAM
aauaaaaggccauuuuuaca

SEQ ID NO: 23956 - RNA, 20 nt, Artificial Sequence
  spacer sequence TTCN PAM
gucuccugcuguuacagaca

SEQ ID NO: 23957 - RNA, 20 nt, Artificial Sequence
  spacer sequence TTCN PAM
uaucacguggaccuauucuc

SEQ ID NO: 23958 - RNA, 20 nt, Artificial Sequence
  spacer sequence TTCN PAM
caaaacauuauuuauaaaag

SEQ ID NO: 23959 - RNA, 20 nt, Artificial Sequence
  spacer sequence TTCN PAM
uagucaucuuuuauaaauaa

SEQ ID NO: 23960 - RNA, 20 nt, Artificial Sequence
  spacer sequence TTCN PAM
gugucaccacaaggguaaug

SEQ ID NO: 23961 - RNA, 20 nt, Artificial Sequence
  spacer sequence TTCN PAM
gacauuacccuuguggugac

SEQ ID NO: 23962 - RNA, 20 nt, Artificial Sequence
  spacer sequence TTCN PAM
ucagacauuacccuuguggu

SEQ ID NO: 23963 - RNA, 20 nt, Artificial Sequence
  spacer sequence TTCN PAM
acauuuuagauauauuuuuu

SEQ ID NO: 23964 - RNA, 20 nt, Artificial Sequence
  spacer sequence TTCN PAM
uuuuggcuuuccuuaguaag

SEQ ID NO: 23965 - RNA, 20 nt, Artificial Sequence
  spacer sequence TTCN PAM
uuaguaaguuuagcagccau

SEQ ID NO: 23966 - RNA, 20 nt, Artificial Sequence
  spacer sequence TTCN PAM
aaaguccugacaaugccaac

SEQ ID NO: 23967 - RNA, 20 nt, Artificial Sequence
  spacer sequence TTCN PAM
gcggcucaaucaugcaauca

SEQ ID NO: 23968 - RNA, 20 nt, Artificial Sequence
  spacer sequence TTCN PAM
auuuacaauuugucuuagaa

SEQ ID NO: 23969 - RNA, 20 nt, Artificial Sequence
  spacer sequence TTCN PAM
aagacaaauuguaaauagaa

SEQ ID NO: 23970 - RNA, 20 nt, Artificial Sequence
  spacer sequence TTCN PAM
cugacauuguacuuugacaa

SEQ ID NO: 23971 - RNA, 20 nt, Artificial Sequence
  spacer sequence TTCN PAM
caaccuuucucugucuuauu

SEQ ID NO: 23972 - RNA, 20 nt, Artificial Sequence
  spacer sequence TTCN PAM
cugucuuauuuacaaauaca

SEQ ID NO: 23973 - RNA, 20 nt, Artificial Sequence
  spacer sequence TTCN PAM
ugaacauuagucuuuggaua

SEQ ID NO: 23974 - RNA, 20 nt, Artificial Sequence
  spacer sequence TTCN PAM
ugaaacugggaguccuauau

SEQ ID NO: 23975 - RNA, 20 nt, Artificial Sequence
  spacer sequence TTCN PAM
uagggagccuauguuuguga

SEQ ID NO: 23976 - RNA, 20 nt, Artificial Sequence
  spacer sequence TTCN PAM
aauaaguaccuaggauuuuc

SEQ ID NO: 23977 - RNA, 20 nt, Artificial Sequence
  spacer sequence TTCN PAM
cuacucucuggauuuugaag

SEQ ID NO: 23978 - RNA, 20 nt, Artificial Sequence
  spacer sequence TTCN PAM
aaauccagagaguagagaau

SEQ ID NO: 23979 - RNA, 20 nt, Artificial Sequence
  spacer sequence TTCN PAM
ccaguauauuguuuuuugug

SEQ ID NO: 23980 - RNA, 20 nt, Artificial Sequence
  spacer sequence TTCN PAM
gcauggcaguuaaaacaaaa

SEQ ID NO: 23981 - RNA, 20 nt, Artificial Sequence
  spacer sequence TTCN PAM
cuucagaagucagucguuuu

SEQ ID NO: 23982 - RNA, 20 nt, Artificial Sequence
  spacer sequence TTCN PAM
gaagucagucguuuuuauuc

SEQ ID NO: 23983 - RNA, 20 nt, Artificial Sequence
  spacer sequence TTCN PAM
gaagugaauuuucagcaugg

SEQ ID NO: 23984 - RNA, 20 nt, Artificial Sequence
  spacer sequence TTCN PAM
gaaucacauaaauaaagaga

SEQ ID NO: 23985 - RNA, 20 nt, Artificial Sequence
  spacer sequence TTCN PAM
gaauaaaaacgacugacuuc

SEQ ID NO: 23986 - RNA, 20 nt, Artificial Sequence
  spacer sequence TTCN PAM
cuuuauuuaugugauucuga

SEQ ID NO: 23987 - RNA, 20 nt, Artificial Sequence
  spacer sequence TTCN PAM
uuucucuuuauuuaugugau

SEQ ID NO: 23988 - RNA, 20 nt, Artificial Sequence
  spacer sequence TTCN PAM
gucugagcuaggagagaauc

SEQ ID NO: 23989 - RNA, 20 nt, Artificial Sequence
  spacer sequence TTCN PAM
cuccuagcucagacugaacu

SEQ ID NO: 23990 - RNA, 20 nt, Artificial Sequence
  spacer sequence TTCN PAM
gauucucuccuagcucagac

SEQ ID NO: 23991 - RNA, 20 nt, Artificial Sequence
  spacer sequence TTCN PAM
uuuuguauccauucugauuc

SEQ ID NO: 23992 - RNA, 20 nt, Artificial Sequence
  spacer sequence TTCN PAM
uuuucuaaauucugaaaagc

SEQ ID NO: 23993 - RNA, 20 nt, Artificial Sequence
  spacer sequence TTCN PAM
aaauucugaaaagcauauug

SEQ ID NO: 23994 - RNA, 20 nt, Artificial Sequence
  spacer sequence TTCN PAM
gaaaagcauauuguauuuga

SEQ ID NO: 23995 - RNA, 20 nt, Artificial Sequence
  spacer sequence TTCN PAM
gaauuuagaaaaugaacuua

SEQ ID NO: 23996 - RNA, 20 nt, Artificial Sequence
  spacer sequence TTCN PAM
auuuugaauuacuauaucuc

SEQ ID NO: 23997 - RNA, 20 nt, Artificial Sequence
  spacer sequence TTCN PAM
aaauggaaauacauuagcau

SEQ ID NO: 23998 - RNA, 20 nt, Artificial Sequence
  spacer sequence TTCN PAM
uuagaguaucugucugauau

SEQ ID NO: 23999 - RNA, 20 nt, Artificial Sequence
  spacer sequence TTCN PAM
ugauuuuaaagagaaaaaau

SEQ ID NO: 24000 - RNA, 20 nt, Artificial Sequence
  spacer sequence TTCN PAM
cuuuaaaaucaugaacauag

SEQ ID NO: 24001 - RNA, 20 nt, Artificial Sequence
  spacer sequence TTCN PAM
cuagucucucaaaaagcuaa

SEQ ID NO: 24002 - RNA, 20 nt, Artificial Sequence
  spacer sequence TTCN PAM
uaugugcaauaagccaaaac

SEQ ID NO: 24003 - RNA, 20 nt, Artificial Sequence
  spacer sequence TTCN PAM
auaagggaacagcaguuuca

SEQ ID NO: 24004 - RNA, 20 nt, Artificial Sequence
  spacer sequence TTCN PAM
cuuauagaaaagacccaaac

SEQ ID NO: 24005 - RNA, 20 nt, Artificial Sequence
  spacer sequence TTCN PAM
cauucaguaaucuuccauga

SEQ ID NO: 24006 - RNA, 20 nt, Artificial Sequence
  spacer sequence TTCN PAM
guaaucuuccaugaauauuu

SEQ ID NO: 24007 - RNA, 20 nt, Artificial Sequence
  spacer sequence TTCN PAM
augaauauuuccccccauca

SEQ ID NO: 24008 - RNA, 20 nt, Artificial Sequence
  spacer sequence TTCN PAM
uggaagauuacugaauguga

SEQ ID NO: 24009 - RNA, 20 nt, Artificial Sequence
  spacer sequence TTCN PAM
ccccaucauaaaauaugaga

SEQ ID NO: 24010 - RNA, 20 nt, Artificial Sequence
  spacer sequence TTCN PAM
uuuuuuuuagucucauauuu

SEQ ID NO: 24011 - RNA, 20 nt, Artificial Sequence
  spacer sequence TTCN PAM
auagggguuuuguuuuguuu

SEQ ID NO: 24012 - RNA, 20 nt, Artificial Sequence
  spacer sequence TTCN PAM
ucaauaugugugucaaauau

SEQ ID NO: 24013 - RNA, 20 nt, Artificial Sequence
  spacer sequence TTCN PAM
cagcuaaauuaauacuacuu

SEQ ID NO: 24014 - RNA, 20 nt, Artificial Sequence
  spacer sequence TTCN PAM
augaucucaauggaucacaa

SEQ ID NO: 24015 - RNA, 20 nt, Artificial Sequence
  spacer sequence TTCN PAM
aaauauugugugauugugau

SEQ ID NO: 24016 - RNA, 20 nt, Artificial Sequence
  spacer sequence TTCN PAM
uuuuauuuaaauauucaaaa

SEQ ID NO: 24017 - RNA, 20 nt, Artificial Sequence
  spacer sequence TTCN PAM
uccacguacacauaugagcu

SEQ ID NO: 24018 - RNA, 20 nt, Artificial Sequence
  spacer sequence TTCN PAM
ccagguaaaaagaauccucu

SEQ ID NO: 24019 - RNA, 20 nt, Artificial Sequence
  spacer sequence TTCN PAM
uuuuaccuggugaauagaug

SEQ ID NO: 24020 - RNA, 20 nt, Artificial Sequence
  spacer sequence TTCN PAM
agaccagccuggccaacaug

SEQ ID NO: 24021 - RNA, 20 nt, Artificial Sequence
  spacer sequence TTCN PAM
ccauguuggccaggcugguc

SEQ ID NO: 24022 - RNA, 20 nt, Artificial Sequence
  spacer sequence TTCN PAM
guagaggcaggguuucacca

SEQ ID NO: 24023 - RNA, 20 nt, Artificial Sequence
  spacer sequence TTCN PAM
ccugccucagccucccaagu

SEQ ID NO: 24024 - RNA, 20 nt, Artificial Sequence
  spacer sequence TTCN PAM
agcgauucuccugccucagc

SEQ ID NO: 24025 - RNA, 20 nt, Artificial Sequence
  spacer sequence TTCN PAM
cuguacucaggccucuccaa

SEQ ID NO: 24026 - RNA, 20 nt, Artificial Sequence
  spacer sequence TTCN PAM
uuaaaucuugaguaaaaugg

SEQ ID NO: 24027 - RNA, 20 nt, Artificial Sequence
  spacer sequence TTCN PAM
ccuaucugaaagucccgaau

SEQ ID NO: 24028 - RNA, 20 nt, Artificial Sequence
  spacer sequence TTCN PAM
gauaggagaauaaggcagag

SEQ ID NO: 24029 - RNA, 20 nt, Artificial Sequence
  spacer sequence TTCN PAM
ggacuuucagauaggagaau

SEQ ID NO: 24030 - RNA, 20 nt, Artificial Sequence
  spacer sequence TTCN PAM
aagcuuuauuuaucuuagga

SEQ ID NO: 24031 - RNA, 20 nt, Artificial Sequence
  spacer sequence TTCN PAM
uaagauaaauaaagcuuaga

SEQ ID NO: 24032 - RNA, 20 nt, Artificial Sequence
  spacer sequence TTCN PAM
uccuaagauaaauaaagcuu

SEQ ID NO: 24033 - RNA, 20 nt, Artificial Sequence
  spacer sequence TTCN PAM
ugcuuccugccuauaaaaua

SEQ ID NO: 24034 - RNA, 20 nt, Artificial Sequence
  spacer sequence TTCN PAM
ugccuauaaaauaguacagg

SEQ ID NO: 24035 - RNA, 20 nt, Artificial Sequence
  spacer sequence TTCN PAM
cugugagccuguacuauuuu

SEQ ID NO: 24036 - RNA, 20 nt, Artificial Sequence
  spacer sequence TTCN PAM
uacccagcacgcuuaaauga

SEQ ID NO: 24037 - RNA, 20 nt, Artificial Sequence
  spacer sequence TTCN PAM
ucuagagauucaucaauaua

SEQ ID NO: 24038 - RNA, 20 nt, Artificial Sequence
  spacer sequence TTCN PAM
agagauucaucaauauaucu

SEQ ID NO: 24039 - RNA, 20 nt, Artificial Sequence
  spacer sequence TTCN PAM
ucaauauaucucuuuccuua

SEQ ID NO: 24040 - RNA, 20 nt, Artificial Sequence
  spacer sequence TTCN PAM
uuaauacaaggcauugcuuc

SEQ ID NO: 24041 - RNA, 20 nt, Artificial Sequence
  spacer sequence TTCN PAM
ccuuucuuuuugugacacaa

SEQ ID NO: 24042 - RNA, 20 nt, Artificial Sequence
  spacer sequence TTCN PAM
uuuugugacacaauucaaau

SEQ ID NO: 24043 - RNA, 20 nt, Artificial Sequence
  spacer sequence TTCN PAM
aauaucuacugaaugauuac

SEQ ID NO: 24044 - RNA, 20 nt, Artificial Sequence
  spacer sequence TTCN PAM
guagauauuugaauuguguc

SEQ ID NO: 24045 - RNA, 20 nt, Artificial Sequence
  spacer sequence TTCN PAM
uuccucaucauaaaaagaaa

SEQ ID NO: 24046 - RNA, 20 nt, Artificial Sequence
  spacer sequence TTCN PAM
ucaucauaaaaagaaaagca

SEQ ID NO: 24047 - RNA, 20 nt, Artificial Sequence
  spacer sequence TTCN PAM
uuuuaugaugaggaaggaaa

SEQ ID NO: 24048 - RNA, 20 nt, Artificial Sequence
  spacer sequence TTCN PAM
aagucugcuuuucuuuuuau

SEQ ID NO: 24049 - RNA, 20 nt, Artificial Sequence
  spacer sequence TTCN PAM
cuaaagcacgucugcacaau

SEQ ID NO: 24050 - RNA, 20 nt, Artificial Sequence
  spacer sequence TTCN PAM
agaacuucgcuucaggggca

SEQ ID NO: 24051 - RNA, 20 nt, Artificial Sequence
  spacer sequence TTCN PAM
ggaagacggcugugugugua

SEQ ID NO: 24052 - RNA, 20 nt, Artificial Sequence
  spacer sequence TTCN PAM
cuucaggggcaccugagggc

SEQ ID NO: 24053 - RNA, 20 nt, Artificial Sequence
  spacer sequence TTCN PAM
ggggcaccugagggccagag

SEQ ID NO: 24054 - RNA, 20 nt, Artificial Sequence
  spacer sequence TTCN PAM
gacgcucuggcccucaggug

SEQ ID NO: 24055 - RNA, 20 nt, Artificial Sequence
  spacer sequence TTCN PAM
accauugcacauaaauuccg

SEQ ID NO: 24056 - RNA, 20 nt, Artificial Sequence
  spacer sequence TTCN PAM
ccauaggaaacucuuaauuc

SEQ ID NO: 24057 - RNA, 20 nt, Artificial Sequence
  spacer sequence TTCN PAM
uauggugaaguuaacauucu

SEQ ID NO: 24058 - RNA, 20 nt, Artificial Sequence
  spacer sequence TTCN PAM
uuacugugaauuaugagaag

SEQ ID NO: 24059 - RNA, 20 nt, Artificial Sequence
  spacer sequence TTCN PAM
caguaaugaauuaagaguuu

SEQ ID NO: 24060 - RNA, 20 nt, Artificial Sequence
  spacer sequence TTCN PAM
cauaauucacaguaaugaau

SEQ ID NO: 24061 - RNA, 20 nt, Artificial Sequence
  spacer sequence TTCN PAM
aguuacugacaucucacuuu

SEQ ID NO: 24062 - RNA, 20 nt, Artificial Sequence
  spacer sequence TTCN PAM
gccaguuccagggugggaac

SEQ ID NO: 24063 - RNA, 20 nt, Artificial Sequence
  spacer sequence TTCN PAM
agggugggaacaggugauua

SEQ ID NO: 24064 - RNA, 20 nt, Artificial Sequence
  spacer sequence TTCN PAM
cacccuggaacuggcugaac

SEQ ID NO: 24065 - RNA, 20 nt, Artificial Sequence
  spacer sequence TTCN PAM
uuguguuuaaucaccuguuc

SEQ ID NO: 24066 - RNA, 20 nt, Artificial Sequence
  spacer sequence TTCN PAM
uucauuguguuuaaucaccu

SEQ ID NO: 24067 - RNA, 20 nt, Artificial Sequence
  spacer sequence TTCN PAM
ugcacgaaagguuuaccuca

SEQ ID NO: 24068 - RNA, 20 nt, Artificial Sequence
  spacer sequence TTCN PAM
ugcaugaauaauuacaaagu

SEQ ID NO: 24069 - RNA, 20 nt, Artificial Sequence
  spacer sequence TTCN PAM
augggcgcacaacaagugcu

SEQ ID NO: 24070 - RNA, 20 nt, Artificial Sequence
  spacer sequence TTCN PAM
ucucaguuaaaugauugauu

SEQ ID NO: 24071 - RNA, 20 nt, Artificial Sequence
  spacer sequence TTCN PAM
cuaggcucugcuauuauacu

SEQ ID NO: 24072 - RNA, 20 nt, Artificial Sequence
  spacer sequence TTCN PAM
uuaaaaaaauaauaacagaa

SEQ ID NO: 24073 - RNA, 20 nt, Artificial Sequence
  spacer sequence TTCN PAM
guuauuauuuuuuuaaagaa

SEQ ID NO: 24074 - RNA, 20 nt, Artificial Sequence
  spacer sequence TTCN PAM
agcaaauaucucuuauuucc

SEQ ID NO: 24075 - RNA, 20 nt, Artificial Sequence
  spacer sequence TTCN PAM
cuacauagauucacaacuau

SEQ ID NO: 24076 - RNA, 20 nt, Artificial Sequence
  spacer sequence TTCN PAM
caacuauagcaguaaaaguc

SEQ ID NO: 24077 - RNA, 20 nt, Artificial Sequence
  spacer sequence TTCN PAM
ccccagcauuuagauuccuc

SEQ ID NO: 24078 - RNA, 20 nt, Artificial Sequence
  spacer sequence TTCN PAM
uccucuaaauacagaggcac

SEQ ID NO: 24079 - RNA, 20 nt, Artificial Sequence
  spacer sequence TTCN PAM
gugccucuguauuuagagga

SEQ ID NO: 24080 - RNA, 20 nt, Artificial Sequence
  spacer sequence TTCN PAM
gucuuagauuaaccagcuca

SEQ ID NO: 24081 - RNA, 20 nt, Artificial Sequence
  spacer sequence TTCN PAM
uacugaggucccaaauaggu

SEQ ID NO: 24082 - RNA, 20 nt, Artificial Sequence
  spacer sequence TTCN PAM
ugcuugacagacacuguguu

SEQ ID NO: 24083 - RNA, 20 nt, Artificial Sequence
  spacer sequence TTCN PAM
gagauccaaagccuugcuaa

SEQ ID NO: 24084 - RNA, 20 nt, Artificial Sequence
  spacer sequence TTCN PAM
gccugcucuugcuucauuaa

SEQ ID NO: 24085 - RNA, 20 nt, Artificial Sequence
  spacer sequence TTCN PAM
uuaaucaugccuuacacuuc

SEQ ID NO: 24086 - RNA, 20 nt, Artificial Sequence
  spacer sequence TTCN PAM
guucauuuuccuuccaguca

SEQ ID NO: 24087 - RNA, 20 nt, Artificial Sequence
  spacer sequence TTCN PAM
uuuuccuuccagucacaaga

SEQ ID NO: 24088 - RNA, 20 nt, Artificial Sequence
  spacer sequence TTCN PAM
uuccagucacaagacaacac

SEQ ID NO: 24089 - RNA, 20 nt, Artificial Sequence
  spacer sequence TTCN PAM
agucacaagacaacacaugg

SEQ ID NO: 24090 - RNA, 20 nt, Artificial Sequence
  spacer sequence TTCN PAM
auguguugucuugugacugg

SEQ ID NO: 24091 - RNA, 20 nt, Artificial Sequence
  spacer sequence TTCN PAM
cacauccugcugggggguag

SEQ ID NO: 24092 - RNA, 20 nt, Artificial Sequence
  spacer sequence TTCN PAM
ccuacaugucacauaaggua

SEQ ID NO: 24093 - RNA, 20 nt, Artificial Sequence
  spacer sequence TTCN PAM
agaaauacacuccacaaaug

SEQ ID NO: 24094 - RNA, 20 nt, Artificial Sequence
  spacer sequence TTCN PAM
ugaauccaccacauuuaccu

SEQ ID NO: 24095 - RNA, 20 nt, Artificial Sequence
  spacer sequence TTCN PAM
cuagcagcagauuucccauu

SEQ ID NO: 24096 - RNA, 20 nt, Artificial Sequence
  spacer sequence TTCN PAM
cauuucacuaaagggaaagu

SEQ ID NO: 24097 - RNA, 20 nt, Artificial Sequence
  spacer sequence TTCN PAM
cuaaagggaaaguaucugag

SEQ ID NO: 24098 - RNA, 20 nt, Artificial Sequence
  spacer sequence TTCN PAM
cuuuagugaaaugggaaauc

SEQ ID NO: 24099 - RNA, 20 nt, Artificial Sequence
  spacer sequence TTCN PAM
gugauagcacucagauacuu

SEQ ID NO: 24100 - RNA, 20 nt, Artificial Sequence
  spacer sequence TTCN PAM
uuuuuuagugcuuucuguga

SEQ ID NO: 24101 - RNA, 20 nt, Artificial Sequence
  spacer sequence TTCN PAM
uucuuuuuuuagugcuuucu

SEQ ID NO: 24102 - RNA, 20 nt, Artificial Sequence
  spacer sequence TTCN PAM
agagggggagaggagaaaua

SEQ ID NO: 24103 - RNA, 20 nt, Artificial Sequence
  spacer sequence TTCN PAM
ccucucccccucuagaauuu

SEQ ID NO: 24104 - RNA, 20 nt, Artificial Sequence
  spacer sequence TTCN PAM
acuuuguggucaaacuaggu

SEQ ID NO: 24105 - RNA, 20 nt, Artificial Sequence
  spacer sequence TTCN PAM
agugaaucaauucaugauau

SEQ ID NO: 24106 - RNA, 20 nt, Artificial Sequence
  spacer sequence TTCN PAM
cuggaacuugucucuccgac

SEQ ID NO: 24107 - RNA, 20 nt, Artificial Sequence
  spacer sequence TTCN PAM
ugauaugcacuaccuuuccu

SEQ ID NO: 24108 - RNA, 20 nt, Artificial Sequence
  spacer sequence TTCN PAM
uaaaacugaacaaaccucuu

SEQ ID NO: 24109 - RNA, 20 nt, Artificial Sequence
  spacer sequence TTCN PAM
guuuuaggaaagguagugca

SEQ ID NO: 24110 - RNA, 20 nt, Artificial Sequence
  spacer sequence TTCN PAM
ggagcugggugguagguaga

SEQ ID NO: 24111 - RNA, 20 nt, Artificial Sequence
  spacer sequence TTCN PAM
aucuaccuaccacccagcuc

SEQ ID NO: 24112 - RNA, 20 nt, Artificial Sequence
  spacer sequence TTCN PAM
uccaucuaccuaccacccag

SEQ ID NO: 24113 - RNA, 20 nt, Artificial Sequence
  spacer sequence TTCN PAM
gugaugacagacaugccaug

SEQ ID NO: 24114 - RNA, 20 nt, Artificial Sequence
  spacer sequence TTCN PAM
cuaagugauaaacaguaaca

SEQ ID NO: 24115 - RNA, 20 nt, Artificial Sequence
  spacer sequence TTCN PAM
cuucucuaagugauaaacag

SEQ ID NO: 24116 - RNA, 20 nt, Artificial Sequence
  spacer sequence TTCN PAM
uuuucccuugagcugccgag

SEQ ID NO: 24117 - RNA, 20 nt, Artificial Sequence
  spacer sequence TTCN PAM
cuugagcugccgagaaaccc

SEQ ID NO: 24118 - RNA, 20 nt, Artificial Sequence
  spacer sequence TTCN PAM
cggcagcucaagggaaaagg

SEQ ID NO: 24119 - RNA, 20 nt, Artificial Sequence
  spacer sequence TTCN PAM
acagcccucccuccuuuggu

SEQ ID NO: 24120 - RNA, 20 nt, Artificial Sequence
  spacer sequence TTCN PAM
aagaaaauuuuuacauugug

SEQ ID NO: 24121 - RNA, 20 nt, Artificial Sequence
  spacer sequence TTCN PAM
uggaaaaauacacacacgua

SEQ ID NO: 24122 - RNA, 20 nt, Artificial Sequence
  spacer sequence TTCN PAM
gcuauaacacaauguaaaaa

SEQ ID NO: 24123 - RNA, 20 nt, Artificial Sequence
  spacer sequence TTCN PAM
cugugcucucucuugucucu

SEQ ID NO: 24124 - RNA, 20 nt, Artificial Sequence
  spacer sequence TTCN PAM
ugucaaaccaaccuuuugaa

SEQ ID NO: 24125 - RNA, 20 nt, Artificial Sequence
  spacer sequence TTCN PAM
aaagguugguuugacaggaa

SEQ ID NO: 24126 - RNA, 20 nt, Artificial Sequence
  spacer sequence TTCN PAM
aacaugcccuuaaacuuuuc

SEQ ID NO: 24127 - RNA, 20 nt, Artificial Sequence
  spacer sequence TTCN PAM
aguaagcaugucugugcgcu

SEQ ID NO: 24128 - RNA, 20 nt, Artificial Sequence
  spacer sequence TTCN PAM
gcaacugcccucucuacucu

SEQ ID NO: 24129 - RNA, 20 nt, Artificial Sequence
  spacer sequence TTCN PAM
acuggccaggccagaguaga

SEQ ID NO: 24130 - RNA, 20 nt, Artificial Sequence
  spacer sequence TTCN PAM
gggcuagccuuggauccaua

SEQ ID NO: 24131 - RNA, 20 nt, Artificial Sequence
  spacer sequence TTCN PAM
accaccuccaacuacccugc

SEQ ID NO: 24132 - RNA, 20 nt, Artificial Sequence
  spacer sequence TTCN PAM
gggaagccuugagaacgagc

SEQ ID NO: 24133 - RNA, 20 nt, Artificial Sequence
  spacer sequence TTCN PAM
cugaaguagagugggcuggc

SEQ ID NO: 24134 - RNA, 20 nt, Artificial Sequence
  spacer sequence TTCN PAM
caaggcuucccugaaguaga

SEQ ID NO: 24135 - RNA, 20 nt, Artificial Sequence
  spacer sequence TTCN PAM
gcucguucucaaggcuuccc

SEQ ID NO: 24136 - RNA, 20 nt, Artificial Sequence
  spacer sequence TTCN PAM
gagucaaacaagucauuggc

SEQ ID NO: 24137 - RNA, 20 nt, Artificial Sequence
  spacer sequence TTCN PAM
gccaaugacuuguuugacuc

SEQ ID NO: 24138 - RNA, 20 nt, Artificial Sequence
  spacer sequence TTCN PAM
agccuuggugacgugucaga

SEQ ID NO: 24139 - RNA, 20 nt, Artificial Sequence
  spacer sequence TTCN PAM
auuguccauuuccagccuug

SEQ ID NO: 24140 - RNA, 20 nt, Artificial Sequence
  spacer sequence TTCN PAM
aaaugagaagguggggaugg

SEQ ID NO: 24141 - RNA, 20 nt, Artificial Sequence
  spacer sequence TTCN PAM
cauuuugaaguauugagcuu

SEQ ID NO: 24142 - RNA, 20 nt, Artificial Sequence
  spacer sequence TTCN PAM
ccauccccaccuucucauuu

SEQ ID NO: 24143 - RNA, 20 nt, Artificial Sequence
  spacer sequence TTCN PAM
uccccauccccaccuucuca

SEQ ID NO: 24144 - RNA, 20 nt, Artificial Sequence
  spacer sequence TTCN PAM
uuucuuccccauccccaccu

SEQ ID NO: 24145 - RNA, 20 nt, Artificial Sequence
  spacer sequence TTCN PAM
cucuggaucugucgauuuug

SEQ ID NO: 24146 - RNA, 20 nt, Artificial Sequence
  spacer sequence TTCN PAM
gugagguggaaaauauuuau

SEQ ID NO: 24147 - RNA, 20 nt, Artificial Sequence
  spacer sequence TTCN PAM
accucacugaaucagaugua

SEQ ID NO: 24148 - RNA, 20 nt, Artificial Sequence
  spacer sequence TTCN PAM
guguucuggacguaagcaac

SEQ ID NO: 24149 - RNA, 20 nt, Artificial Sequence
  spacer sequence TTCN PAM
ggacguaagcaacagaaaug

SEQ ID NO: 24150 - RNA, 20 nt, Artificial Sequence
  spacer sequence TTCN PAM
guugcuuacguccagaacac

SEQ ID NO: 24151 - RNA, 20 nt, Artificial Sequence
  spacer sequence TTCN PAM
cuauuacucuaugugacugu

SEQ ID NO: 24152 - RNA, 20 nt, Artificial Sequence
  spacer sequence TTCN PAM
caacuccuuacugcuuggcu

SEQ ID NO: 24153 - RNA, 20 nt, Artificial Sequence
  spacer sequence TTCN PAM
gaggugcuguagccaagcag

SEQ ID NO: 24154 - RNA, 20 nt, Artificial Sequence
  spacer sequence TTCN PAM
uuuucagaggugcuguagcc

SEQ ID NO: 24155 - RNA, 20 nt, Artificial Sequence
  spacer sequence TTCN PAM
uuucauuuucagaggugcug

SEQ ID NO: 24156 - RNA, 20 nt, Artificial Sequence
  spacer sequence TTCN PAM
ccuugcuucucauuuaccug

SEQ ID NO: 24157 - RNA, 20 nt, Artificial Sequence
  spacer sequence TTCN PAM
cauuuaccugcuauguguuc

SEQ ID NO: 24158 - RNA, 20 nt, Artificial Sequence
  spacer sequence TTCN PAM
uguuuggggcaaauuccucu

SEQ ID NO: 24159 - RNA, 20 nt, Artificial Sequence
  spacer sequence TTCN PAM
ucuagaugacguugauaaac

SEQ ID NO: 24160 - RNA, 20 nt, Artificial Sequence
  spacer sequence TTCN PAM
ucucgauuggugaaggggaa

SEQ ID NO: 24161 - RNA, 20 nt, Artificial Sequence
  spacer sequence TTCN PAM
ccaaucgagaugaaaaaagc

SEQ ID NO: 24162 - RNA, 20 nt, Artificial Sequence
  spacer sequence TTCN PAM
ccuucaccaaucgagaugaa

SEQ ID NO: 24163 - RNA, 20 nt, Artificial Sequence
  spacer sequence TTCN PAM
aagcagaggcugccauugca

SEQ ID NO: 24164 - RNA, 20 nt, Artificial Sequence
  spacer sequence TTCN PAM
guuugugcucgauaaaaaua

SEQ ID NO: 24165 - RNA, 20 nt, Artificial Sequence
  spacer sequence TTCN PAM
uauuuuuaucgagcacaaac

SEQ ID NO: 24166 - RNA, 20 nt, Artificial Sequence
  spacer sequence TTCN PAM
cauugggggacauucuuauu

SEQ ID NO: 24167 - RNA, 20 nt, Artificial Sequence
  spacer sequence TTCN PAM
ucuggcacugcccacaggug

SEQ ID NO: 24168 - RNA, 20 nt, Artificial Sequence
  spacer sequence TTCN PAM
ggagcucccaacgggccgug

SEQ ID NO: 24169 - RNA, 20 nt, Artificial Sequence
  spacer sequence TTCN PAM
ucaucuguaagaauggcuuc

SEQ ID NO: 24170 - RNA, 20 nt, Artificial Sequence
  spacer sequence TTCN PAM
uacagaugaugaaccagacc

SEQ ID NO: 24171 - RNA, 20 nt, Artificial Sequence
  spacer sequence TTCN PAM
agaggcucggcugugguugg

SEQ ID NO: 24172 - RNA, 20 nt, Artificial Sequence
  spacer sequence TTCN PAM
ccaaccacagccgagccucu

SEQ ID NO: 24173 - RNA, 20 nt, Artificial Sequence
  spacer sequence TTCN PAM
guccucucuggcacucuaau

SEQ ID NO: 24174 - RNA, 20 nt, Artificial Sequence
  spacer sequence TTCN PAM
ccccuuucuguccucucugg

SEQ ID NO: 24175 - RNA, 20 nt, Artificial Sequence
  spacer sequence TTCN PAM
aggcuucucuauauaauacc

SEQ ID NO: 24176 - RNA, 20 nt, Artificial Sequence
  spacer sequence TTCN PAM
cuauauaauacccagaaaau

SEQ ID NO: 24177 - RNA, 20 nt, Artificial Sequence
  spacer sequence TTCN PAM
ggguauuauauagagaagcc

SEQ ID NO: 24178 - RNA, 20 nt, Artificial Sequence
  spacer sequence TTCN PAM
cauccuuguacuuuuuguau

SEQ ID NO: 24179 - RNA, 20 nt, Artificial Sequence
  spacer sequence TTCN PAM
uuacauaugugaugauuugc

SEQ ID NO: 24180 - RNA, 20 nt, Artificial Sequence
  spacer sequence TTCN PAM
uugcauaacuccagagaaca

SEQ ID NO: 24181 - RNA, 20 nt, Artificial Sequence
  spacer sequence TTCN PAM
cuggaguuaugcaaggaaga

SEQ ID NO: 24182 - RNA, 20 nt, Artificial Sequence
  spacer sequence TTCN PAM
aaacuuacaaaccagacaca

SEQ ID NO: 24183 - RNA, 20 nt, Artificial Sequence
  spacer sequence TTCN PAM
uucuaaacuuacaaaccaga

SEQ ID NO: 24184 - RNA, 20 nt, Artificial Sequence
  spacer sequence TTCN PAM
cuguguuaacuauuuaagua

SEQ ID NO: 24185 - RNA, 20 nt, Artificial Sequence
  spacer sequence TTCN PAM
uuauguucccuguguuaacu

SEQ ID NO: 24186 - RNA, 20 nt, Artificial Sequence
  spacer sequence TTCN PAM
uguaguuauuauuuaagcuu

SEQ ID NO: 24187 - RNA, 20 nt, Artificial Sequence
  spacer sequence TTCN PAM
auccacuuuuuuuuuuaacc

SEQ ID NO: 24188 - RNA, 20 nt, Artificial Sequence
  spacer sequence TTCN PAM
uuuuuccuauacaccaaguu

SEQ ID NO: 24189 - RNA, 20 nt, Artificial Sequence
  spacer sequence TTCN PAM
uauacaccaaguuguccauu

SEQ ID NO: 24190 - RNA, 20 nt, Artificial Sequence
  spacer sequence TTCN PAM
uuggcacaauggacaacuug

SEQ ID NO: 24191 - RNA, 20 nt, Artificial Sequence
  spacer sequence TTCN PAM
uucuuuggcacaauggacaa

SEQ ID NO: 24192 - RNA, 20 nt, Artificial Sequence
  spacer sequence TTCN PAM
ccucuccuuucauucuuugg

SEQ ID NO: 24193 - RNA, 20 nt, Artificial Sequence
  spacer sequence TTCN PAM
cacacaaagggugugugugu

SEQ ID NO: 24194 - RNA, 20 nt, Artificial Sequence
  spacer sequence TTCN PAM
uaaauuagaaagcuacuaug

SEQ ID NO: 24195 - RNA, 20 nt, Artificial Sequence
  spacer sequence TTCN PAM
aauuuaugaagccaugucug

SEQ ID NO: 24196 - RNA, 20 nt, Artificial Sequence
  spacer sequence TTCN PAM
ugugacauaguagcuuucua

SEQ ID NO: 24197 - RNA, 20 nt, Artificial Sequence
  spacer sequence TTCN PAM
uauuacagcaguguaaaugu

SEQ ID NO: 24198 - RNA, 20 nt, Artificial Sequence
  spacer sequence TTCN PAM
uaggugcaugcagucguuuu

SEQ ID NO: 24199 - RNA, 20 nt, Artificial Sequence
  spacer sequence TTCN PAM
cacugccaaaaaccuuucug

SEQ ID NO: 24200 - RNA, 20 nt, Artificial Sequence
  spacer sequence TTCN PAM
gcucucacucucagcagugc

SEQ ID NO: 24201 - RNA, 20 nt, Artificial Sequence
  spacer sequence TTCN PAM
uugauuuuguggcacugcug

SEQ ID NO: 24202 - RNA, 20 nt, Artificial Sequence
  spacer sequence TTCN PAM
cagacacauuagcuaaaugg

SEQ ID NO: 24203 - RNA, 20 nt, Artificial Sequence
  spacer sequence TTCN PAM
uaaguacucaaaaguauccc

SEQ ID NO: 24204 - RNA, 20 nt, Artificial Sequence
  spacer sequence TTCN PAM
gagaaauggaaugccuauaa

SEQ ID NO: 24205 - RNA, 20 nt, Artificial Sequence
  spacer sequence TTCN PAM
cagaauaaaaaaaaaaugac

SEQ ID NO: 24206 - RNA, 20 nt, Artificial Sequence
  spacer sequence TTCN PAM
auuucucagaauaaaaaaaa

SEQ ID NO: 24207 - RNA, 20 nt, Artificial Sequence
  spacer sequence TTCN PAM
aaacauguuugcacuuggug

SEQ ID NO: 24208 - RNA, 20 nt, Artificial Sequence
  spacer sequence TTCN PAM
gauuuuuauaucauagaugc

SEQ ID NO: 24209 - RNA, 20 nt, Artificial Sequence
  spacer sequence TTCN PAM
gagcaaggcugagaaguccu

SEQ ID NO: 24210 - RNA, 20 nt, Artificial Sequence
  spacer sequence TTCN PAM
cagccuugcucugaaaugug

SEQ ID NO: 24211 - RNA, 20 nt, Artificial Sequence
  spacer sequence TTCN PAM
uuagacuugaaauacuucgc

SEQ ID NO: 24212 - RNA, 20 nt, Artificial Sequence
  spacer sequence TTCN PAM
agucuaaagaaaggacuucu

SEQ ID NO: 24213 - RNA, 20 nt, Artificial Sequence
  spacer sequence TTCN PAM
ccuaauguugucaaagugga

SEQ ID NO: 24214 - RNA, 20 nt, Artificial Sequence
  spacer sequence TTCN PAM
gaaugagcuccaaaaugcuu

SEQ ID NO: 24215 - RNA, 20 nt, Artificial Sequence
  spacer sequence TTCN PAM
gaaaauuaguccacuuugac

SEQ ID NO: 24216 - RNA, 20 nt, Artificial Sequence
  spacer sequence TTCN PAM
uuaugagacuauuucugcac

SEQ ID NO: 24217 - RNA, 20 nt, Artificial Sequence
  spacer sequence TTCN PAM
gcacacauaaucaccagcgg

SEQ ID NO: 24218 - RNA, 20 nt, Artificial Sequence
  spacer sequence TTCN PAM
uuccuguuugcuuuuuuuuu

SEQ ID NO: 24219 - RNA, 20 nt, Artificial Sequence
  spacer sequence TTCN PAM
uguuugcuuuuuuuuuuaac

SEQ ID NO: 24220 - RNA, 20 nt, Artificial Sequence
  spacer sequence TTCN PAM
aucauuuuuuaagcuuccaa

SEQ ID NO: 24221 - RNA, 20 nt, Artificial Sequence
  spacer sequence TTCN PAM
aaaggggaaaagagaguugg

SEQ ID NO: 24222 - RNA, 20 nt, Artificial Sequence
  spacer sequence TTCN PAM
ccuuuggaagcuuaaaaaau

SEQ ID NO: 24223 - RNA, 20 nt, Artificial Sequence
  spacer sequence TTCN PAM
caagcagagacuuaccaacu

SEQ ID NO: 24224 - RNA, 20 nt, Artificial Sequence
  spacer sequence TTCN PAM
guuuuauuaacuggcagcau

SEQ ID NO: 24225 - RNA, 20 nt, Artificial Sequence
  spacer sequence TTCN PAM
gcuucaguuuuauuaacugg

SEQ ID NO: 24226 - RNA, 20 nt, Artificial Sequence
  spacer sequence TTCN PAM
uuagcaagcugccaauuuua

SEQ ID NO: 24227 - RNA, 20 nt, Artificial Sequence
  spacer sequence TTCN PAM
uuaaauguaaaauuggcagc

SEQ ID NO: 24228 - RNA, 20 nt, Artificial Sequence
  spacer sequence TTCN PAM
cuguggcuuuaaguucauua

SEQ ID NO: 24229 - RNA, 20 nt, Artificial Sequence
  spacer sequence TTCN PAM
acacucaaauuaaaaucuau

SEQ ID NO: 24230 - RNA, 20 nt, Artificial Sequence
  spacer sequence TTCN PAM
aauauucuacacucaaauua

SEQ ID NO: 24231 - RNA, 20 nt, Artificial Sequence
  spacer sequence TTCN PAM
cuggauuuuugcacuuuauc

SEQ ID NO: 24232 - RNA, 20 nt, Artificial Sequence
  spacer sequence TTCN PAM
acccuacccaggcugaauau

SEQ ID NO: 24233 - RNA, 20 nt, Artificial Sequence
  spacer sequence TTCN PAM
gccuggguaggguugaaaua

SEQ ID NO: 24234 - RNA, 20 nt, Artificial Sequence
  spacer sequence TTCN PAM
cccucaauauucagccuggg

SEQ ID NO: 24235 - RNA, 20 nt, Artificial Sequence
  spacer sequence TTCN PAM
ccuagcacaucugggaguua

SEQ ID NO: 24236 - RNA, 20 nt, Artificial Sequence
  spacer sequence TTCN PAM
agccucugguacuccuccua

SEQ ID NO: 24237 - RNA, 20 nt, Artificial Sequence
  spacer sequence TTCN PAM
uguggugaccuuauguuaaa

SEQ ID NO: 24238 - RNA, 20 nt, Artificial Sequence
  spacer sequence TTCN PAM
uauuccuguggugaccuuau

SEQ ID NO: 24239 - RNA, 20 nt, Artificial Sequence
  spacer sequence TTCN PAM
uacuaauaaagacaguaaag

SEQ ID NO: 24240 - RNA, 20 nt, Artificial Sequence
  spacer sequence TTCN PAM
uugcccaacauacuggccaa

SEQ ID NO: 24241 - RNA, 20 nt, Artificial Sequence
  spacer sequence TTCN PAM
guauuuaucuuuuggccagu

SEQ ID NO: 24242 - RNA, 20 nt, Artificial Sequence
  spacer sequence TTCN PAM
aauaaaagaagacaaacaga

SEQ ID NO: 24243 - RNA, 20 nt, Artificial Sequence
  spacer sequence TTCN PAM
uuuauuugaaaaguaugcau

SEQ ID NO: 24244 - RNA, 20 nt, Artificial Sequence
  spacer sequence TTCN PAM
guuugucuucuuuuauuuga

SEQ ID NO: 24245 - RNA, 20 nt, Artificial Sequence
  spacer sequence TTCN PAM
ucucuuacauuugcuuccau

SEQ ID NO: 24246 - RNA, 20 nt, Artificial Sequence
  spacer sequence TTCN PAM
cuuacauuugcuuccauuuu

SEQ ID NO: 24247 - RNA, 20 nt, Artificial Sequence
  spacer sequence TTCN PAM
auuuugaccaagugaggaau

SEQ ID NO: 24248 - RNA, 20 nt, Artificial Sequence
  spacer sequence TTCN PAM
ucacuuggucaaaauggaag

SEQ ID NO: 24249 - RNA, 20 nt, Artificial Sequence
  spacer sequence TTCN PAM
cuauuccucacuuggucaaa

SEQ ID NO: 24250 - RNA, 20 nt, Artificial Sequence
  spacer sequence TTCN PAM
caaaauauuccuguugucug

SEQ ID NO: 24251 - RNA, 20 nt, Artificial Sequence
  spacer sequence TTCN PAM
uguugucugaauuaaggauu

SEQ ID NO: 24252 - RNA, 20 nt, Artificial Sequence
  spacer sequence TTCN PAM
gacaacaggaauauuuugag

SEQ ID NO: 24253 - RNA, 20 nt, Artificial Sequence
  spacer sequence TTCN PAM
gagguuuacagacugaagga

SEQ ID NO: 24254 - RNA, 20 nt, Artificial Sequence
  spacer sequence TTCN PAM
gucuguaaaccucagaacuu

SEQ ID NO: 24255 - RNA, 20 nt, Artificial Sequence
  spacer sequence TTCN PAM
uucagucuguaaaccucaga

SEQ ID NO: 24256 - RNA, 20 nt, Artificial Sequence
  spacer sequence TTCN PAM
uaagucuuccuucagucugu

SEQ ID NO: 24257 - RNA, 20 nt, Artificial Sequence
  spacer sequence TTCN PAM
auguacuaguaaguuugaua

SEQ ID NO: 24258 - RNA, 20 nt, Artificial Sequence
  spacer sequence TTCN PAM
accguuaagauucuuuuuuu

SEQ ID NO: 24259 - RNA, 20 nt, Artificial Sequence
  spacer sequence TTCN PAM
uuuuuuuuuuuuuuuguucc

SEQ ID NO: 24260 - RNA, 20 nt, Artificial Sequence
  spacer sequence TTCN PAM
caaggucugacacauuucua

SEQ ID NO: 24261 - RNA, 20 nt, Artificial Sequence
  spacer sequence TTCN PAM
aaaagugggaauauuauuua

SEQ ID NO: 24262 - RNA, 20 nt, Artificial Sequence
  spacer sequence TTCN PAM
cacuuuuagaaaugugucag

SEQ ID NO: 24263 - RNA, 20 nt, Artificial Sequence
  spacer sequence TTCN PAM
uuuugcaccuaaauaauauu

SEQ ID NO: 24264 - RNA, 20 nt, Artificial Sequence
  spacer sequence TTCN PAM
ccuagguaucaaauaguuaa

SEQ ID NO: 24265 - RNA, 20 nt, Artificial Sequence
  spacer sequence TTCN PAM
aaacagacuugguuaaaguc

SEQ ID NO: 24266 - RNA, 20 nt, Artificial Sequence
  spacer sequence TTCN PAM
aaauguagugacugaacuga

SEQ ID NO: 24267 - RNA, 20 nt, Artificial Sequence
  spacer sequence TTCN PAM
gucacuacauuuagaagacu

SEQ ID NO: 24268 - RNA, 20 nt, Artificial Sequence
  spacer sequence TTCN PAM
cgguuuugauuguaaaucag

SEQ ID NO: 24269 - RNA, 20 nt, Artificial Sequence
  spacer sequence TTCN PAM
uuucccgguuuugauuguaa

SEQ ID NO: 24270 - RNA, 20 nt, Artificial Sequence
  spacer sequence TTCN PAM
gagguugcugauuacaccuc

SEQ ID NO: 24271 - RNA, 20 nt, Artificial Sequence
  spacer sequence TTCN PAM
ccuaauuaauuuuauaggag

SEQ ID NO: 24272 - RNA, 20 nt, Artificial Sequence
  spacer sequence TTCN PAM
ugaaaauaacaagaugauca

SEQ ID NO: 24273 - RNA, 20 nt, Artificial Sequence
  spacer sequence TTCN PAM
agaacuuugccuccuauaaa

SEQ ID NO: 24274 - RNA, 20 nt, Artificial Sequence
  spacer sequence TTCN PAM
augcucuuaacguaaauuau

SEQ ID NO: 24275 - RNA, 20 nt, Artificial Sequence
  spacer sequence TTCN PAM
uguuaauuagcaauaauuua

SEQ ID NO: 24276 - RNA, 20 nt, Artificial Sequence
  spacer sequence TTCN PAM
aauguaugaaauacguuuaa

SEQ ID NO: 24277 - RNA, 20 nt, Artificial Sequence
  spacer sequence TTCN PAM
uacauuagaauauaauucuu

SEQ ID NO: 24278 - RNA, 20 nt, Artificial Sequence
  spacer sequence TTCN PAM
gagaaauaccaaaacguguu

SEQ ID NO: 24279 - RNA, 20 nt, Artificial Sequence
  spacer sequence TTCN PAM
cugaacaccacuagccaaau

SEQ ID NO: 24280 - RNA, 20 nt, Artificial Sequence
  spacer sequence TTCN PAM
uugugucccacuuugucuga

SEQ ID NO: 24281 - RNA, 20 nt, Artificial Sequence
  spacer sequence TTCN PAM
uauuuucuuugugucccacu

SEQ ID NO: 24282 - RNA, 20 nt, Artificial Sequence
  spacer sequence TTCN PAM
caugguguagucuacugauu

SEQ ID NO: 24283 - RNA, 20 nt, Artificial Sequence
  spacer sequence TTCN PAM
caguggcaaucaacauuucc

SEQ ID NO: 24284 - RNA, 20 nt, Artificial Sequence
  spacer sequence TTCN PAM
uuucugggcaucugauaauu

SEQ ID NO: 24285 - RNA, 20 nt, Artificial Sequence
  spacer sequence TTCN PAM
gggcaucugauaauuucucu

SEQ ID NO: 24286 - RNA, 20 nt, Artificial Sequence
  spacer sequence TTCN PAM
cugcauuuuaaugcaaauuc

SEQ ID NO: 24287 - RNA, 20 nt, Artificial Sequence
  spacer sequence TTCN PAM
ccuuucccuaaaaaccuucc

SEQ ID NO: 24288 - RNA, 20 nt, Artificial Sequence
  spacer sequence TTCN PAM
cuaaaaaccuuccuaacccu

SEQ ID NO: 24289 - RNA, 20 nt, Artificial Sequence
  spacer sequence TTCN PAM
uaacccucagccauuuaccc

SEQ ID NO: 24290 - RNA, 20 nt, Artificial Sequence
  spacer sequence TTCN PAM
acuccauccuccuucgcccc

SEQ ID NO: 24291 - RNA, 20 nt, Artificial Sequence
  spacer sequence TTCN PAM
ccccaacaauaccaacauuu

SEQ ID NO: 24292 - RNA, 20 nt, Artificial Sequence
  spacer sequence TTCN PAM
aagcuccggccuaaacuccg

SEQ ID NO: 24293 - RNA, 20 nt, Artificial Sequence
  spacer sequence TTCN PAM
aucgaggacucccugcuuug

SEQ ID NO: 24294 - RNA, 20 nt, Artificial Sequence
  spacer sequence TTCN PAM
acuucaaucgaggacucccu

SEQ ID NO: 24295 - RNA, 20 nt, Artificial Sequence
  spacer sequence TTCN PAM
cggcuaauuauuaugauuau

SEQ ID NO: 24296 - RNA, 20 nt, Artificial Sequence
  spacer sequence TTCN PAM
cucuacgaggggaggaagaa

SEQ ID NO: 24297 - RNA, 20 nt, Artificial Sequence
  spacer sequence TTCN PAM
uccccucguagagagaauuc

SEQ ID NO: 24298 - RNA, 20 nt, Artificial Sequence
  spacer sequence TTCN PAM
uccuccccucguagagagaa

SEQ ID NO: 24299 - RNA, 20 nt, Artificial Sequence
  spacer sequence TTCN PAM
auuucuuccuccccucguag

SEQ ID NO: 24300 - RNA, 20 nt, Artificial Sequence
  spacer sequence TTCN PAM
acguucaaacagcaagacag

SEQ ID NO: 24301 - RNA, 20 nt, Artificial Sequence
  spacer sequence TTCN PAM
aacagcaagacagccuggaa

SEQ ID NO: 24302 - RNA, 20 nt, Artificial Sequence
  spacer sequence TTCN PAM
aggcugucuugcuguuugaa

SEQ ID NO: 24303 - RNA, 20 nt, Artificial Sequence
  spacer sequence TTCN PAM
ucucuguguaguugcaaaag

SEQ ID NO: 24304 - RNA, 20 nt, Artificial Sequence
  spacer sequence TTCN PAM
uuugcaacuacacagagagg

SEQ ID NO: 24305 - RNA, 20 nt, Artificial Sequence
  spacer sequence TTCN PAM
cuuaaauuuauucuuuugca

SEQ ID NO: 24306 - RNA, 20 nt, Artificial Sequence
  spacer sequence TTCN PAM
uauaaggauuauuuuuuucc

SEQ ID NO: 24307 - RNA, 20 nt, Artificial Sequence
  spacer sequence TTCN PAM
cccucccccuccgcuccccg

SEQ ID NO: 24308 - RNA, 20 nt, Artificial Sequence
  spacer sequence TTCN PAM
aguuugcuuuccaaguccuu

SEQ ID NO: 24309 - RNA, 20 nt, Artificial Sequence
  spacer sequence TTCN PAM
aaguccuucuccuugauugu

SEQ ID NO: 24310 - RNA, 20 nt, Artificial Sequence
  spacer sequence TTCN PAM
ccuugauugucuuaacaggg

SEQ ID NO: 24311 - RNA, 20 nt, Artificial Sequence
  spacer sequence TTCN PAM
uuacccuguuaagacaauca

SEQ ID NO: 24312 - RNA, 20 nt, Artificial Sequence
  spacer sequence TTCN PAM
gccuccguuugcuucuuuac

SEQ ID NO: 24313 - RNA, 20 nt, Artificial Sequence
  spacer sequence TTCN PAM
gagaggaaaagcaaagaaac

SEQ ID NO: 24314 - RNA, 20 nt, Artificial Sequence
  spacer sequence TTCN PAM
ucucugaauuucagccuccg

SEQ ID NO: 24315 - RNA, 20 nt, Artificial Sequence
  spacer sequence TTCN PAM
uugcuuuuccucucugaauu

SEQ ID NO: 24316 - RNA, 20 nt, Artificial Sequence
  spacer sequence TTCN PAM
gcacgguccacccuugccgg

SEQ ID NO: 24317 - RNA, 20 nt, Artificial Sequence
  spacer sequence TTCN PAM
cuuucugcacgguccacccu

SEQ ID NO: 24318 - RNA, 20 nt, Artificial Sequence
  spacer sequence TTCN PAM
cagcaagcgcggcgggagcc

SEQ ID NO: 24319 - RNA, 20 nt, Artificial Sequence
  spacer sequence TTCN PAM
cugggccugccaguugguga

SEQ ID NO: 24320 - RNA, 20 nt, Artificial Sequence
  spacer sequence TTCN PAM
ccaacuggcaggcccaggga

SEQ ID NO: 24321 - RNA, 20 nt, Artificial Sequence
  spacer sequence TTCN PAM
uuuuucaccaacuggcaggc

SEQ ID NO: 24322 - RNA, 20 nt, Artificial Sequence
  spacer sequence TTCN PAM
aaaccucacuuccuuuuuca

SEQ ID NO: 24323 - RNA, 20 nt, Artificial Sequence
  spacer sequence TTCN PAM
uucuguguccacaagcuuac

SEQ ID NO: 24324 - RNA, 20 nt, Artificial Sequence
  spacer sequence TTCN PAM
guguccacaagcuuacacuu

SEQ ID NO: 24325 - RNA, 20 nt, Artificial Sequence
  spacer sequence TTCN PAM
cccgcaauucugggcacugg

SEQ ID NO: 24326 - RNA, 20 nt, Artificial Sequence
  spacer sequence TTCN PAM
gggcacugggugugcgcggc

SEQ ID NO: 24327 - RNA, 20 nt, Artificial Sequence
  spacer sequence TTCN PAM
uuauuaaugacgcugccugc

SEQ ID NO: 24328 - RNA, 20 nt, Artificial Sequence
  spacer sequence TTCN PAM
gagcuccgaggcgagagggg

SEQ ID NO: 24329 - RNA, 20 nt, Artificial Sequence
  spacer sequence TTCN PAM
acccccucacccccaugcaa

SEQ ID NO: 24330 - RNA, 20 nt, Artificial Sequence
  spacer sequence TTCN PAM
uccacccccucacccccaug

SEQ ID NO: 24331 - RNA, 20 nt, Artificial Sequence
  spacer sequence TTCN PAM
gccaugccccgaagcccuag

SEQ ID NO: 24332 - RNA, 20 nt, Artificial Sequence
  spacer sequence TTCN PAM
gggcauggccgaagaggggg

SEQ ID NO: 24333 - RNA, 20 nt, Artificial Sequence
  spacer sequence TTCN PAM
ucccuaccaaaaaugccggc

SEQ ID NO: 24334 - RNA, 20 nt, Artificial Sequence
  spacer sequence TTCN PAM
gggccggcauuuuugguagg

SEQ ID NO: 24335 - RNA, 20 nt, Artificial Sequence
  spacer sequence TTCN PAM
uucggggccggcauuuuugg

SEQ ID NO: 24336 - RNA, 20 nt, Artificial Sequence
  spacer sequence TTCN PAM
cuuucuuucggggccggcau

SEQ ID NO: 24337 - RNA, 20 nt, Artificial Sequence
  spacer sequence TTCN PAM
ccgcggccccggccagaagc

SEQ ID NO: 24338 - RNA, 20 nt, Artificial Sequence
  spacer sequence TTCN PAM
ggccggggccgcggagaagc

SEQ ID NO: 24339 - RNA, 20 nt, Artificial Sequence
  spacer sequence TTCN PAM
uuuugacuuuaaaaaugcuu

SEQ ID NO: 24340 - RNA, 20 nt, Artificial Sequence
  spacer sequence TTCN PAM
ucauuuugacuuuaaaaaug

SEQ ID NO: 24341 - RNA, 20 nt, Artificial Sequence
  spacer sequence TTCN PAM
cucccccaucaccccguaug

SEQ ID NO: 24342 - RNA, 20 nt, Artificial Sequence
  spacer sequence TTCN PAM
cuuucucucccccaucaccc

SEQ ID NO: 24343 - RNA, 20 nt, Artificial Sequence
  spacer sequence TTCN PAM
gccuaaccguucuuuccccc

SEQ ID NO: 24344 - RNA, 20 nt, Artificial Sequence
  spacer sequence TTCN PAM
uuccccccacccccacccuc

SEQ ID NO: 24345 - RNA, 20 nt, Artificial Sequence
  spacer sequence TTCN PAM
ccccacccccacccucgcaa

SEQ ID NO: 24346 - RNA, 20 nt, Artificial Sequence
  spacer sequence TTCN PAM
uccccggacgagaaucgccg

SEQ ID NO: 24347 - RNA, 20 nt, Artificial Sequence
  spacer sequence TTCN PAM
cguccggggaggaacgagcu

SEQ ID NO: 24348 - RNA, 20 nt, Artificial Sequence
  spacer sequence TTCN PAM
aguucgcugagcuuucuuga

SEQ ID NO: 24349 - RNA, 20 nt, Artificial Sequence
  spacer sequence TTCN PAM
cugagcuuucuugaucuugu

SEQ ID NO: 24350 - RNA, 20 nt, Artificial Sequence
  spacer sequence TTCN PAM
ugaucuuguucugccuccua

SEQ ID NO: 24351 - RNA, 20 nt, Artificial Sequence
  spacer sequence TTCN PAM
gccuccuagcgaccgaaugg

SEQ ID NO: 24352 - RNA, 20 nt, Artificial Sequence
  spacer sequence TTCN PAM
gucgcuaggaggcagaacaa

SEQ ID NO: 24353 - RNA, 20 nt, Artificial Sequence
  spacer sequence TTCN PAM
gcccacauagcagaggcggg

SEQ ID NO: 24354 - RNA, 20 nt, Artificial Sequence
  spacer sequence TTCN PAM
gggugcucagagggggcagg

SEQ ID NO: 24355 - RNA, 20 nt, Artificial Sequence
  spacer sequence TTCN PAM
guccucauuuucugggugcu

SEQ ID NO: 24356 - RNA, 20 nt, Artificial Sequence
  spacer sequence TTCN PAM
uucuguccucauuuucuggg

SEQ ID NO: 24357 - RNA, 20 nt, Artificial Sequence
  spacer sequence TTCN PAM
gaagaagggccugacuuucc

SEQ ID NO: 24358 - RNA, 20 nt, Artificial Sequence
  spacer sequence TTCN PAM
gaaggaugcagugggggcuc

SEQ ID NO: 24359 - RNA, 20 nt, Artificial Sequence
  spacer sequence TTCN PAM
ucggaaggaugcaguggggg

SEQ ID NO: 24360 - RNA, 20 nt, Artificial Sequence
  spacer sequence TTCN PAM
cgaguccugcgaacacugcc

SEQ ID NO: 24361 - RNA, 20 nt, Artificial Sequence
  spacer sequence TTCN PAM
caggacucgggaaagucagg

SEQ ID NO: 24362 - RNA, 20 nt, Artificial Sequence
  spacer sequence TTCN PAM
uucccgccgguaccuggccg

SEQ ID NO: 24363 - RNA, 20 nt, Artificial Sequence
  spacer sequence TTCN PAM
cgccgguaccuggccgggcu

SEQ ID NO: 24364 - RNA, 20 nt, Artificial Sequence
  spacer sequence TTCN PAM
caccgccgcgcgccgcgucu

SEQ ID NO: 24365 - RNA, 20 nt, Artificial Sequence
  spacer sequence TTCN PAM
gaagugugugacaaguucca

SEQ ID NO: 24366 - RNA, 20 nt, Artificial Sequence
  spacer sequence TTCN PAM
gaagcucccccaccccggca

SEQ ID NO: 24367 - RNA, 20 nt, Artificial Sequence
  spacer sequence TTCN PAM
agggcccagugaaaaauuaa

SEQ ID NO: 24368 - RNA, 20 nt, Artificial Sequence
  spacer sequence TTCN PAM
cugggcccuggaacuuguca

SEQ ID NO: 24369 - RNA, 20 nt, Artificial Sequence
  spacer sequence TTCN PAM
cugugcgcaccccccaccac

SEQ ID NO: 24370 - RNA, 20 nt, Artificial Sequence
  spacer sequence TTCN PAM
guguuuuuuuaaaggggugg

SEQ ID NO: 24371 - RNA, 20 nt, Artificial Sequence
  spacer sequence TTCN PAM
uacuuuaaauuuuugaugca

SEQ ID NO: 24372 - RNA, 20 nt, Artificial Sequence
  spacer sequence TTCN PAM
cccccuacucaauuuaugau

SEQ ID NO: 24373 - RNA, 20 nt, Artificial Sequence
  spacer sequence TTCN PAM
uucccuugcugccaaacuuu

SEQ ID NO: 24374 - RNA, 20 nt, Artificial Sequence
  spacer sequence TTCN PAM
cuugcugccaaacuuuccua

SEQ ID NO: 24375 - RNA, 20 nt, Artificial Sequence
  spacer sequence TTCN PAM
uaagugcccaccgcccgccu

SEQ ID NO: 24376 - RNA, 20 nt, Artificial Sequence
  spacer sequence TTCN PAM
aggcgcagucagcgggagac

SEQ ID NO: 24377 - RNA, 20 nt, Artificial Sequence
  spacer sequence TTCN PAM
ugugagucuguauaagagcu

SEQ ID NO: 24378 - RNA, 20 nt, Artificial Sequence
  spacer sequence TTCN PAM
ccaggccuggcuuggucuga

SEQ ID NO: 24379 - RNA, 20 nt, Artificial Sequence
  spacer sequence TTCN PAM
cccuuugggucuugcccucu

SEQ ID NO: 24380 - RNA, 20 nt, Artificial Sequence
  spacer sequence TTCN PAM
ccccugcccuuccccggcaa

SEQ ID NO: 24381 - RNA, 20 nt, Artificial Sequence
  spacer sequence TTCN PAM
ccggcaaccccgccaccugg

SEQ ID NO: 24382 - RNA, 20 nt, Artificial Sequence
  spacer sequence TTCN PAM
cugcccaccccccaccccgc

SEQ ID NO: 24383 - RNA, 20 nt, Artificial Sequence
  spacer sequence TTCN PAM
cagacgucucuuguccacag

SEQ ID NO: 24384 - RNA, 20 nt, Artificial Sequence
  spacer sequence TTCN PAM
gcgccuccccuccccuccgc

SEQ ID NO: 24385 - RNA, 20 nt, Artificial Sequence
  spacer sequence TTCN PAM
cccagccgauuucgcagucu

SEQ ID NO: 24386 - RNA, 20 nt, Artificial Sequence
  spacer sequence TTCN PAM
cagucugggaggucgagaag

SEQ ID NO: 24387 - RNA, 20 nt, Artificial Sequence
  spacer sequence TTCN PAM
cgaccucccagacugcgaaa

SEQ ID NO: 24388 - RNA, 20 nt, Artificial Sequence
  spacer sequence TTCN PAM
gacacgagauuuuucccaau

SEQ ID NO: 24389 - RNA, 20 nt, Artificial Sequence
  spacer sequence TTCN PAM
caaucaaaauccacuuccac

SEQ ID NO: 24390 - RNA, 20 nt, Artificial Sequence
  spacer sequence TTCN PAM
acuuuuuuugaaaaucuucc

SEQ ID NO: 24391 - RNA, 20 nt, Artificial Sequence
  spacer sequence TTCN PAM
aaaaaaguggaaguggauuu

SEQ ID NO: 24392 - RNA, 20 nt, Artificial Sequence
  spacer sequence TTCN PAM
aaaaaauaguaagaggaggg

SEQ ID NO: 24393 - RNA, 20 nt, Artificial Sequence
  spacer sequence TTCN PAM
ucucucccucuccgugccgu

SEQ ID NO: 24394 - RNA, 20 nt, Artificial Sequence
  spacer sequence TTCN PAM
guugcaaacuuagggcgccg

SEQ ID NO: 24395 - RNA, 20 nt, Artificial Sequence
  spacer sequence TTCN PAM
cccaaaccccuucaguugca

SEQ ID NO: 24396 - RNA, 20 nt, Artificial Sequence
  spacer sequence TTCN PAM
agaugagagauugugagauu

SEQ ID NO: 24397 - RNA, 20 nt, Artificial Sequence
  spacer sequence TTCN PAM
cuuugacucccccaccagcc

SEQ ID NO: 24398 - RNA, 20 nt, Artificial Sequence
  spacer sequence TTCN PAM
gugacggccuucucuuugac

SEQ ID NO: 24399 - RNA, 20 nt, Artificial Sequence
  spacer sequence TTCN PAM
guuugggggcaagaaauugu

SEQ ID NO: 24400 - RNA, 20 nt, Artificial Sequence
  spacer sequence TTCN PAM
ugcccccaaaccgaagccaa

SEQ ID NO: 24401 - RNA, 20 nt, Artificial Sequence
  spacer sequence TTCN PAM
cuugccuuguuuuauuuauu

SEQ ID NO: 24402 - RNA, 20 nt, Artificial Sequence
  spacer sequence TTCN PAM
ccuugcugccucugagguuc

SEQ ID NO: 24403 - RNA, 20 nt, Artificial Sequence
  spacer sequence TTCN PAM
gucgggaggggagggcagcg

SEQ ID NO: 24404 - RNA, 20 nt, Artificial Sequence
  spacer sequence TTCN PAM
gcggcggcggcggcggcggc

SEQ ID NO: 24405 - RNA, 20 nt, Artificial Sequence
  spacer sequence TTCN PAM
ggccagagguggguguuugu

SEQ ID NO: 24406 - RNA, 20 nt, Artificial Sequence
  spacer sequence TTCN PAM
cggucccacggcucuccccg

SEQ ID NO: 24407 - RNA, 20 nt, Artificial Sequence
  spacer sequence TTCN PAM
acagugccacuuucucacua

SEQ ID NO: 24408 - RNA, 20 nt, Artificial Sequence
  spacer sequence TTCN PAM
cacuauuguggggaugacua

SEQ ID NO: 24409 - RNA, 20 nt, Artificial Sequence
  spacer sequence TTCN PAM
ucccgcugcacacuugaccg

SEQ ID NO: 24410 - RNA, 20 nt, Artificial Sequence
  spacer sequence TTCN PAM
ccccgggaaucguuuuuuag

SEQ ID NO: 24411 - RNA, 20 nt, Artificial Sequence
  spacer sequence TTCN PAM
cggggagaaaagaggugaga

SEQ ID NO: 24412 - RNA, 20 nt, Artificial Sequence
  spacer sequence TTCN PAM
uacggugagugggaagcaac

SEQ ID NO: 24413 - RNA, 20 nt, Artificial Sequence
  spacer sequence TTCN PAM
cacucaccguaagaaaaugg

SEQ ID NO: 24414 - RNA, 20 nt, Artificial Sequence
  spacer sequence TTCN PAM
ccaccagcucccacccccag

SEQ ID NO: 24415 - RNA, 20 nt, Artificial Sequence
  spacer sequence TTCN PAM
caaccuuagcauuguucauu

SEQ ID NO: 24416 - RNA, 20 nt, Artificial Sequence
  spacer sequence TTCN PAM
uuauuuugcaaaacuggcgg

SEQ ID NO: 24417 - RNA, 20 nt, Artificial Sequence
  spacer sequence TTCN PAM
acuccccccccgccccgcca

SEQ ID NO: 24418 - RNA, 20 nt, Artificial Sequence
  spacer sequence TTCN PAM
uuuucgaaaagagaaauaaa

SEQ ID NO: 24419 - RNA, 20 nt, Artificial Sequence
  spacer sequence TTCN PAM
aaaagagaaauaaagcggcg

SEQ ID NO: 24420 - RNA, 20 nt, Artificial Sequence
  spacer sequence TTCN PAM
aaaaggaaugcaaugauucc

SEQ ID NO: 24421 - RNA, 20 nt, Artificial Sequence
  spacer sequence TTCN PAM
cuuuucgaaaaggaaugcaa

SEQ ID NO: 24422 - RNA, 20 nt, Artificial Sequence
  spacer sequence TTCN PAM
gccgcuuuauuucucuuuuc

SEQ ID NO: 24423 - RNA, 20 nt, Artificial Sequence
  spacer sequence TTCN PAM
uccuuuccgccgcuuuauuu

SEQ ID NO: 24424 - RNA, 20 nt, Artificial Sequence
  spacer sequence TTCN PAM
agaugggaugaggguuuuuu

SEQ ID NO: 24425 - RNA, 20 nt, Artificial Sequence
  spacer sequence TTCN PAM
cccuuuaucucuuuuaccuc

SEQ ID NO: 24426 - RNA, 20 nt, Artificial Sequence
  spacer sequence TTCN PAM
cgugaaaaauuuaaaaaugc

SEQ ID NO: 24427 - RNA, 20 nt, Artificial Sequence
  spacer sequence TTCN PAM
cgagaaaaaccuccgagagu

SEQ ID NO: 24428 - RNA, 20 nt, Artificial Sequence
  spacer sequence TTCN PAM
aguccugcgcgcucucguga

SEQ ID NO: 24429 - RNA, 20 nt, Artificial Sequence
  spacer sequence TTCN PAM
cgcguaaguaacccaauaau

SEQ ID NO: 24430 - RNA, 20 nt, Artificial Sequence
  spacer sequence TTCN PAM
cguuugcuuaagugcugggg

SEQ ID NO: 24431 - RNA, 20 nt, Artificial Sequence
  spacer sequence TTCN PAM
caucgggagagccggguuag

SEQ ID NO: 24432 - RNA, 20 nt, Artificial Sequence
  spacer sequence TTCN PAM
aacccggcucucccgaugug

SEQ ID NO: 24433 - RNA, 20 nt, Artificial Sequence
  spacer sequence TTCN PAM
uucuaacccggcucucccga

SEQ ID NO: 24434 - RNA, 20 nt, Artificial Sequence
  spacer sequence TTCN PAM
cuggagucuccuucuuucua

SEQ ID NO: 24435 - RNA, 20 nt, Artificial Sequence
  spacer sequence TTCN PAM
ucagugccuuuugacaucca

SEQ ID NO: 24436 - RNA, 20 nt, Artificial Sequence
  spacer sequence TTCN PAM
aauuuauuuuggaugucaaa

SEQ ID NO: 24437 - RNA, 20 nt, Artificial Sequence
  spacer sequence TTCN PAM
cugcgccaucuuuguauuau

SEQ ID NO: 24438 - RNA, 20 nt, Artificial Sequence
  spacer sequence TTCN PAM
ucuucccugcgccaucuuug

SEQ ID NO: 24439 - RNA, 20 nt, Artificial Sequence
  spacer sequence TTCN PAM
cucucucucccucuuuuuuu

SEQ ID NO: 24440 - RNA, 20 nt, Artificial Sequence
  spacer sequence TTCN PAM
ucucucucucucucucuccc

SEQ ID NO: 24441 - RNA, 20 nt, Artificial Sequence
  spacer sequence TTCN PAM
agugcggacgugacgucccu

SEQ ID NO: 24442 - RNA, 20 nt, Artificial Sequence
  spacer sequence TTCN PAM
cagggacgucacguccgcac

SEQ ID NO: 24443 - RNA, 20 nt, Artificial Sequence
  spacer sequence TTCN PAM
aguucgcagggacgucacgu

SEQ ID NO: 24444 - RNA, 20 nt, Artificial Sequence
  spacer sequence TTCN PAM
cuccugcucgcccugcccau

SEQ ID NO: 24445 - RNA, 20 nt, Artificial Sequence
  spacer sequence TTCN PAM
cuccuccccuucucuccugc

SEQ ID NO: 24446 - RNA, 20 nt, Artificial Sequence
  spacer sequence TTCN PAM
ccuucccuccuccccuucuc

SEQ ID NO: 24447 - RNA, 20 nt, Artificial Sequence
  spacer sequence TTCN PAM
uguccagccccugaugugug

SEQ ID NO: 24448 - RNA, 20 nt, Artificial Sequence
  spacer sequence TTCN PAM
cucccggccacgccaccgcc

SEQ ID NO: 24449 - RNA, 20 nt, Artificial Sequence
  spacer sequence TTCN PAM
ucucucccggccacgccacc

SEQ ID NO: 24450 - RNA, 20 nt, Artificial Sequence
  spacer sequence TTCN PAM
ucccaccccugccaccccuu

SEQ ID NO: 24451 - RNA, 20 nt, Artificial Sequence
  spacer sequence TTCN PAM
uuuuagaguccgcgugugug

SEQ ID NO: 24452 - RNA, 20 nt, Artificial Sequence
  spacer sequence TTCN PAM
aaaaagaaaaaaauagagcg

SEQ ID NO: 24453 - RNA, 20 nt, Artificial Sequence
  spacer sequence TTCN PAM
uuuuugaauaaucuuucauu

SEQ ID NO: 24454 - RNA, 20 nt, Artificial Sequence
  spacer sequence TTCN PAM
ccagcccggggcugcagccu

SEQ ID NO: 24455 - RNA, 20 nt, Artificial Sequence
  spacer sequence TTCN PAM
cuccgcccgcgcuuccccag

SEQ ID NO: 24456 - RNA, 20 nt, Artificial Sequence
  spacer sequence TTCN PAM
ccuccccgccgccgccgcgc

SEQ ID NO: 24457 - RNA, 20 nt, Artificial Sequence
  spacer sequence TTCN PAM
gccccuggcguccacacgcg

SEQ ID NO: 24458 - RNA, 20 nt, Artificial Sequence
  spacer sequence TTCN PAM
cgagcgcagccgcgggcucg

SEQ ID NO: 24459 - RNA, 20 nt, Artificial Sequence
  spacer sequence TTCN PAM
uugcuguccucuccucgggc

SEQ ID NO: 24460 - RNA, 20 nt, Artificial Sequence
  spacer sequence TTCN PAM
ggugauuuuucuuugcuguc

SEQ ID NO: 24461 - RNA, 20 nt, Artificial Sequence
  spacer sequence TTCN PAM
gcguugccgugcgcucccuc

SEQ ID NO: 24462 - RNA, 20 nt, Artificial Sequence
  spacer sequence TTCN PAM
ggacccgcagcccuccaaac

SEQ ID NO: 24463 - RNA, 20 nt, Artificial Sequence
  spacer sequence TTCN PAM
aggccgcgcgggcuccugga

SEQ ID NO: 24464 - RNA, 20 nt, Artificial Sequence
  spacer sequence TTCN PAM
cggucccuggcucggccuug

SEQ ID NO: 24465 - RNA, 20 nt, Artificial Sequence
  spacer sequence TTCN PAM
gacccagucgcuuggcgggg

SEQ ID NO: 24466 - RNA, 20 nt, Artificial Sequence
  spacer sequence TTCN PAM
guugcauucagacccagucg

SEQ ID NO: 24467 - RNA, 20 nt, Artificial Sequence
  spacer sequence TTCN PAM
gcgacccuuaggagccgggg

SEQ ID NO: 24468 - RNA, 20 nt, Artificial Sequence
  spacer sequence TTCN PAM
ucgggcucucuuucugcgac

SEQ ID NO: 24469 - RNA, 20 nt, Artificial Sequence
  spacer sequence TTCN PAM
uuauuccucgggcucucuuu

SEQ ID NO: 24470 - RNA, 20 nt, Artificial Sequence
  spacer sequence TTCN PAM
cagggacugggacucccggg

SEQ ID NO: 24471 - RNA, 20 nt, Artificial Sequence
  spacer sequence TTCN PAM
caucccucugugcuuuugca

SEQ ID NO: 24472 - RNA, 20 nt, Artificial Sequence
  spacer sequence TTCN PAM
ucccaucccucugugcuuuu

SEQ ID NO: 24473 - RNA, 20 nt, Artificial Sequence
  spacer sequence TTCN PAM
uacgggcagagcacaacugu

SEQ ID NO: 24474 - RNA, 20 nt, Artificial Sequence
  spacer sequence TTCN PAM
ugugcuguuacccagggaaa

SEQ ID NO: 24475 - RNA, 20 nt, Artificial Sequence
  spacer sequence TTCN PAM
cuggguaacagcacaggaac

SEQ ID NO: 24476 - RNA, 20 nt, Artificial Sequence
  spacer sequence TTCN PAM
cuuucccuggguaacagcac

SEQ ID NO: 24477 - RNA, 20 nt, Artificial Sequence
  spacer sequence TTCN PAM
cauuuucucuuucccugggu

SEQ ID NO: 24478 - RNA, 20 nt, Artificial Sequence
  spacer sequence TTCN PAM
gcagacguucccuggaaauu

SEQ ID NO: 24479 - RNA, 20 nt, Artificial Sequence
  spacer sequence TTCN PAM
cuggaaauuagggaagaccu

SEQ ID NO: 24480 - RNA, 20 nt, Artificial Sequence
  spacer sequence TTCN PAM
agggaacgucugcagaaagg

SEQ ID NO: 24481 - RNA, 20 nt, Artificial Sequence
  spacer sequence TTCN PAM
cuaauuuccagggaacgucu

SEQ ID NO: 24482 - RNA, 20 nt, Artificial Sequence
  spacer sequence TTCN PAM
aacaggucuucccuaauuuc

SEQ ID NO: 24483 - RNA, 20 nt, Artificial Sequence
  spacer sequence TTCN PAM
cucuggcgugggauacuuuc

SEQ ID NO: 24484 - RNA, 20 nt, Artificial Sequence
  spacer sequence TTCN PAM
guuuuacguaaaauguacag

SEQ ID NO: 24485 - RNA, 20 nt, Artificial Sequence
  spacer sequence TTCN PAM
aaucgcagggggugcuguug

SEQ ID NO: 24486 - RNA, 20 nt, Artificial Sequence
  spacer sequence TTCN PAM
gaaacgugccuguaaagucc

SEQ ID NO: 24487 - RNA, 20 nt, Artificial Sequence
  spacer sequence TTCN PAM
gaauaaacuuuccaaucgca

SEQ ID NO: 24488 - RNA, 20 nt, Artificial Sequence
  spacer sequence TTCN PAM
aaaucuggaaggaguugggg

SEQ ID NO: 24489 - RNA, 20 nt, Artificial Sequence
  spacer sequence TTCN PAM
agauuuggaaucggacugcg

SEQ ID NO: 24490 - RNA, 20 nt, Artificial Sequence
  spacer sequence TTCN PAM
ccucuccccccaacuccuuc

SEQ ID NO: 24491 - RNA, 20 nt, Artificial Sequence
  spacer sequence TTCN PAM
cucuccucggagcgguucca

SEQ ID NO: 24492 - RNA, 20 nt, Artificial Sequence
  spacer sequence TTCN PAM
acaacccccgucuucucauc

SEQ ID NO: 24493 - RNA, 20 nt, Artificial Sequence
  spacer sequence TTCN PAM
caucccccucuucagucuaa

SEQ ID NO: 24494 - RNA, 20 nt, Artificial Sequence
  spacer sequence TTCN PAM
gucuaaagggugucgcuucc

SEQ ID NO: 24495 - RNA, 20 nt, Artificial Sequence
  spacer sequence TTCN PAM
guaaacucacccacccggug

SEQ ID NO: 24496 - RNA, 20 nt, Artificial Sequence
  spacer sequence TTCN PAM
uguuucgucuuaguaaaguu

SEQ ID NO: 24497 - RNA, 20 nt, Artificial Sequence
  spacer sequence TTCN PAM
ucuuaguaaaguuucaaguc

SEQ ID NO: 24498 - RNA, 20 nt, Artificial Sequence
  spacer sequence TTCN PAM
agucuacuguguuagaaaau

SEQ ID NO: 24499 - RNA, 20 nt, Artificial Sequence
  spacer sequence TTCN PAM
aacacaguagacuugaaacu

SEQ ID NO: 24500 - RNA, 20 nt, Artificial Sequence
  spacer sequence TTCN PAM
gaccccucuaaggaagaaaa

SEQ ID NO: 24501 - RNA, 20 nt, Artificial Sequence
  spacer sequence TTCN PAM
uuagagggguccgaagcucc

SEQ ID NO: 24502 - RNA, 20 nt, Artificial Sequence
  spacer sequence TTCN PAM
uccuuagagggguccgaagc

SEQ ID NO: 24503 - RNA, 20 nt, Artificial Sequence
  spacer sequence TTCN PAM
cuccaguuugugggagggag

SEQ ID NO: 24504 - RNA, 20 nt, Artificial Sequence
  spacer sequence TTCN PAM
guuuaagaagcgggaggauu

SEQ ID NO: 24505 - RNA, 20 nt, Artificial Sequence
  spacer sequence TTCN PAM
uaaacagaauuugaggucuc

SEQ ID NO: 24506 - RNA, 20 nt, Artificial Sequence
  spacer sequence TTCN PAM
cuagaaguuaagcucuguag

SEQ ID NO: 24507 - RNA, 20 nt, Artificial Sequence
  spacer sequence TTCN PAM
agugaauccucccgcuucuu

SEQ ID NO: 24508 - RNA, 20 nt, Artificial Sequence
  spacer sequence TTCN PAM
ccuuuucacugaguucuuca

SEQ ID NO: 24509 - RNA, 20 nt, Artificial Sequence
  spacer sequence TTCN PAM
cugaguucuucagagcaggu

SEQ ID NO: 24510 - RNA, 20 nt, Artificial Sequence
  spacer sequence TTCN PAM
ucagagcaggucagcaucuc

SEQ ID NO: 24511 - RNA, 20 nt, Artificial Sequence
  spacer sequence TTCN PAM
gagcaggucagcaucucuau

SEQ ID NO: 24512 - RNA, 20 nt, Artificial Sequence
  spacer sequence TTCN PAM
accacagucugcuuuuuguc

SEQ ID NO: 24513 - RNA, 20 nt, Artificial Sequence
  spacer sequence TTCN PAM
uuuggugacuccaaggcugg

SEQ ID NO: 24514 - RNA, 20 nt, Artificial Sequence
  spacer sequence TTCN PAM
ugggggguggcgggggagga

SEQ ID NO: 24515 - RNA, 20 nt, Artificial Sequence
  spacer sequence TTCN PAM
cuccaaccgucccccacguc

SEQ ID NO: 24516 - RNA, 20 nt, Artificial Sequence
  spacer sequence TTCN PAM
ccuucccuccaaccgucccc

SEQ ID NO: 24517 - RNA, 20 nt, Artificial Sequence
  spacer sequence TTCN PAM
cucucuucaccuucccucca

SEQ ID NO: 24518 - RNA, 20 nt, Artificial Sequence
  spacer sequence TTCN PAM
ucccucucuucaccuucccu

SEQ ID NO: 24519 - RNA, 20 nt, Artificial Sequence
  spacer sequence TTCN PAM
ucuucccucucuucaccuuc

SEQ ID NO: 24520 - RNA, 20 nt, Artificial Sequence
  spacer sequence TTCN PAM
aaggccucccaguugcacuu

SEQ ID NO: 24521 - RNA, 20 nt, Artificial Sequence
  spacer sequence TTCN PAM
uuuauuuauuuauuuuucaa

SEQ ID NO: 24522 - RNA, 20 nt, Artificial Sequence
  spacer sequence TTCN PAM
gguaacaauagugagccaga

SEQ ID NO: 24523 - RNA, 20 nt, Artificial Sequence
  spacer sequence TTCN PAM
uucagaaccaagcuuuucag

SEQ ID NO: 24524 - RNA, 20 nt, Artificial Sequence
  spacer sequence TTCN PAM
gaaccaagcuuuucagauuu

SEQ ID NO: 24525 - RNA, 20 nt, Artificial Sequence
  spacer sequence TTCN PAM
gaaagaaucuggcucacuau

SEQ ID NO: 24526 - RNA, 20 nt, Artificial Sequence
  spacer sequence TTCN PAM
gauuugaauauuguucccac

SEQ ID NO: 24527 - RNA, 20 nt, Artificial Sequence
  spacer sequence TTCN PAM
aaucugaaaagcuugguucu

SEQ ID NO: 24528 - RNA, 20 nt, Artificial Sequence
  spacer sequence TTCN PAM
cacccguccauaaaagucca

SEQ ID NO: 24529 - RNA, 20 nt, Artificial Sequence
  spacer sequence TTCN PAM
cuauagauggacuuuuaugg

SEQ ID NO: 24530 - RNA, 20 nt, Artificial Sequence
  spacer sequence TTCN PAM
acaacacucacucgcucauu

SEQ ID NO: 24531 - RNA, 20 nt, Artificial Sequence
  spacer sequence TTCN PAM
ggguuggcuguaguguaaaa

SEQ ID NO: 24532 - RNA, 20 nt, Artificial Sequence
  spacer sequence TTCN PAM
gagguaauaaagucauuacu

SEQ ID NO: 24533 - RNA, 20 nt, Artificial Sequence
  spacer sequence TTCN PAM
gugguucacauuuaacaguc

SEQ ID NO: 24534 - RNA, 20 nt, Artificial Sequence
  spacer sequence TTCN PAM
cauuuaacagucuucugaau

SEQ ID NO: 24535 - RNA, 20 nt, Artificial Sequence
  spacer sequence TTCN PAM
gaauuacaauucauuacaca

SEQ ID NO: 24536 - RNA, 20 nt, Artificial Sequence
  spacer sequence TTCN PAM
gaagacuguuaaaugugaac

SEQ ID NO: 24537 - RNA, 20 nt, Artificial Sequence
  spacer sequence TTCN PAM
uuacacaauugugugcgcuc

SEQ ID NO: 24538 - RNA, 20 nt, Artificial Sequence
  spacer sequence TTCN PAM
aauaaauaacuggcaacauu

SEQ ID NO: 24539 - RNA, 20 nt, Artificial Sequence
  spacer sequence TTCN PAM
uuuuuaaaaaaaaacauagg

SEQ ID NO: 24540 - RNA, 20 nt, Artificial Sequence
  spacer sequence TTCN PAM
uauguuuuuuuuuaaaaagg

SEQ ID NO: 24541 - RNA, 20 nt, Artificial Sequence
  spacer sequence TTCN PAM
gauuccaggggguuccuucc

SEQ ID NO: 24542 - RNA, 20 nt, Artificial Sequence
  spacer sequence TTCN PAM
aggggguuccuuccuaaacc

SEQ ID NO: 24543 - RNA, 20 nt, Artificial Sequence
  spacer sequence TTCN PAM
uuccuaaaccacaucuuaaa

SEQ ID NO: 24544 - RNA, 20 nt, Artificial Sequence
  spacer sequence TTCN PAM
uaaaccacaucuuaaaacau

SEQ ID NO: 24545 - RNA, 20 nt, Artificial Sequence
  spacer sequence TTCN PAM
cugggugccaaaggagaggu

SEQ ID NO: 24546 - RNA, 20 nt, Artificial Sequence
  spacer sequence TTCN PAM
ccgacauauauuuaauuuca

SEQ ID NO: 24547 - RNA, 20 nt, Artificial Sequence
  spacer sequence TTCN PAM
ccaucauaauaugcccaggg

SEQ ID NO: 24548 - RNA, 20 nt, Artificial Sequence
  spacer sequence TTCN PAM
cccugggcauauuaugaugg

SEQ ID NO: 24549 - RNA, 20 nt, Artificial Sequence
  spacer sequence TTCN PAM
cauuucacccugggcauauu

SEQ ID NO: 24550 - RNA, 20 nt, Artificial Sequence
  spacer sequence TTCN PAM
cccaguccagaaaaccacgg

SEQ ID NO: 24551 - RNA, 20 nt, Artificial Sequence
  spacer sequence TTCN PAM
ggacugggugaaaucuggcu

SEQ ID NO: 24552 - RNA, 20 nt, Artificial Sequence
  spacer sequence TTCN PAM
ggcucuuuagcgagcaucca

SEQ ID NO: 24553 - RNA, 20 nt, Artificial Sequence
  spacer sequence TTCN PAM
uuaaacacacauacaaaccc

SEQ ID NO: 24554 - RNA, 20 nt, Artificial Sequence
  spacer sequence TTCN PAM
cccccucuacaaaaccaccu

SEQ ID NO: 24555 - RNA, 20 nt, Artificial Sequence
  spacer sequence TTCN PAM
agaaguggcuuuuagaaagu

SEQ ID NO: 24556 - RNA, 20 nt, Artificial Sequence
  spacer sequence TTCN PAM
ggaaagguaaauauacuuau

SEQ ID NO: 24557 - RNA, 20 nt, Artificial Sequence
  spacer sequence TTCN PAM
aaaagccacuucuggaaagg

SEQ ID NO: 24558 - RNA, 20 nt, Artificial Sequence
  spacer sequence TTCN PAM
ggccguucaguuaacuucgu

SEQ ID NO: 24559 - RNA, 20 nt, Artificial Sequence
  spacer sequence TTCN PAM
guuaacuucguuuggggcug

SEQ ID NO: 24560 - RNA, 20 nt, Artificial Sequence
  spacer sequence TTCN PAM
uuuggggcuguagagcuguu

SEQ ID NO: 24561 - RNA, 20 nt, Artificial Sequence
  spacer sequence TTCN PAM
augggagcagcaacagcucu

SEQ ID NO: 24562 - RNA, 20 nt, Artificial Sequence
  spacer sequence TTCN PAM
gugggcucuuucccaaaccu

SEQ ID NO: 24563 - RNA, 20 nt, Artificial Sequence
  spacer sequence TTCN PAM
caaaccuuuggugacgacac

SEQ ID NO: 24564 - RNA, 20 nt, Artificial Sequence
  spacer sequence TTCN PAM
cuccucccccuuuuuaucuu

SEQ ID NO: 24565 - RNA, 20 nt, Artificial Sequence
  spacer sequence TTCN PAM
ugcaguauauauucugccuc

SEQ ID NO: 24566 - RNA, 20 nt, Artificial Sequence
  spacer sequence TTCN PAM
gccucugaucuccguacuua

SEQ ID NO: 24567 - RNA, 20 nt, Artificial Sequence
  spacer sequence TTCN PAM
aacagacuuucugaaauaau

SEQ ID NO: 24568 - RNA, 20 nt, Artificial Sequence
  spacer sequence TTCN PAM
gaaauaaugcacauauauuc

SEQ ID NO: 24569 - RNA, 20 nt, Artificial Sequence
  spacer sequence TTCN PAM
gaaagucuguuagaaaacuu

SEQ ID NO: 24570 - RNA, 20 nt, Artificial Sequence
  spacer sequence TTCN PAM
cgucgguuagaaacccaccg

SEQ ID NO: 24571 - RNA, 20 nt, Artificial Sequence
  spacer sequence TTCN PAM
aaccgacgugaauauaugug

SEQ ID NO: 24572 - RNA, 20 nt, Artificial Sequence
  spacer sequence TTCN PAM
uaguccuuucaguaguuuuc

SEQ ID NO: 24573 - RNA, 20 nt, Artificial Sequence
  spacer sequence TTCN PAM
guaguuuucgguaugaagua

SEQ ID NO: 24574 - RNA, 20 nt, Artificial Sequence
  spacer sequence TTCN PAM
guaugaaguaugagccgcgu

SEQ ID NO: 24575 - RNA, 20 nt, Artificial Sequence
  spacer sequence TTCN PAM
uaccgaaaacuacugaaagg

SEQ ID NO: 24576 - RNA, 20 nt, Artificial Sequence
  spacer sequence TTCN PAM
aaaagguuacgucuggaggc

SEQ ID NO: 24577 - RNA, 20 nt, Artificial Sequence
  spacer sequence TTCN PAM
gagcccuugagcuaaaagca

SEQ ID NO: 24578 - RNA, 20 nt, Artificial Sequence
  spacer sequence TTCN PAM
cguucagagcccuugagcua

SEQ ID NO: 24579 - RNA, 20 nt, Artificial Sequence
  spacer sequence TTCN PAM
agcuguuuguugaccacauu

SEQ ID NO: 24580 - RNA, 20 nt, Artificial Sequence
  spacer sequence TTCN PAM
ucgcgccaggcgauccucgg

SEQ ID NO: 24581 - RNA, 20 nt, Artificial Sequence
  spacer sequence TTCN PAM
agcucagcccgaguuccucg

SEQ ID NO: 24582 - RNA, 20 nt, Artificial Sequence
  spacer sequence TTCN PAM
ucuuccagcucagcccgagu

SEQ ID NO: 24583 - RNA, 20 nt, Artificial Sequence
  spacer sequence TTCN PAM
auccugacagaccuuuuaac

SEQ ID NO: 24584 - RNA, 20 nt, Artificial Sequence
  spacer sequence TTCN PAM
cugucugccuuuagggggaa

SEQ ID NO: 24585 - RNA, 20 nt, Artificial Sequence
  spacer sequence TTCN PAM
cccuaaaggcagacagugaa

SEQ ID NO: 24586 - RNA, 20 nt, Artificial Sequence
  spacer sequence TTCN PAM
uagacucaaagauaaauaag

SEQ ID NO: 24587 - RNA, 20 nt, Artificial Sequence
  spacer sequence TTCN PAM
cuuauuuaucuuugagucua

SEQ ID NO: 24588 - RNA, 20 nt, Artificial Sequence
  spacer sequence TTCN PAM
gucauucacuuauuuaucuu

SEQ ID NO: 24589 - RNA, 20 nt, Artificial Sequence
  spacer sequence TTCN PAM
uucagucauucacuuauuua

SEQ ID NO: 24590 - RNA, 20 nt, Artificial Sequence
  spacer sequence TTCN PAM
uucuugauuuuuacuuuagc

SEQ ID NO: 24591 - RNA, 20 nt, Artificial Sequence
  spacer sequence TTCN PAM
ugauuuuuacuuuagccuuu

SEQ ID NO: 24592 - RNA, 20 nt, Artificial Sequence
  spacer sequence TTCN PAM
ucuuuuuauuucuuuucuuu

SEQ ID NO: 24593 - RNA, 20 nt, Artificial Sequence
  spacer sequence TTCN PAM
uuuuauuucuuuucuuuuaa

SEQ ID NO: 24594 - RNA, 20 nt, Artificial Sequence
  spacer sequence TTCN PAM
uuucuuuuaauuuuuauuuu

SEQ ID NO: 24595 - RNA, 20 nt, Artificial Sequence
  spacer sequence TTCN PAM
uuuaauuuuuauuuuuuguu

SEQ ID NO: 24596 - RNA, 20 nt, Artificial Sequence
  spacer sequence TTCN PAM
uaauuggcaggucacaaaau

SEQ ID NO: 24597 - RNA, 20 nt, Artificial Sequence
  spacer sequence TTCN PAM
cuauuuugugaccugccaau

SEQ ID NO: 24598 - RNA, 20 nt, Artificial Sequence
  spacer sequence TTCN PAM
uaaaaauaaaacuuagguuu

SEQ ID NO: 24599 - RNA, 20 nt, Artificial Sequence
  spacer sequence TTCN PAM
augcuuggcauagguuuugu

SEQ ID NO: 24600 - RNA, 20 nt, Artificial Sequence
  spacer sequence TTCN PAM
aucauugagacccaaaauac

SEQ ID NO: 24601 - RNA, 20 nt, Artificial Sequence
  spacer sequence TTCN PAM
uuugucuuaacaacagccua

SEQ ID NO: 24602 - RNA, 20 nt, Artificial Sequence
  spacer sequence TTCN PAM
uuuuuccuuugucuuaacaa

SEQ ID NO: 24603 - RNA, 20 nt, Artificial Sequence
  spacer sequence TTCN PAM
caacauuuuaaaauucauuu

SEQ ID NO: 24604 - RNA, 20 nt, Artificial Sequence
  spacer sequence TTCN PAM
caaagugcugggauuacagg

SEQ ID NO: 24605 - RNA, 20 nt, Artificial Sequence
  spacer sequence TTCN PAM
agaccagccuggccaacaau

SEQ ID NO: 24606 - RNA, 20 nt, Artificial Sequence
  spacer sequence TTCN PAM
cauuguuggccaggcugguc

SEQ ID NO: 24607 - RNA, 20 nt, Artificial Sequence
  spacer sequence TTCN PAM
ugugccucagccucccaagu

SEQ ID NO: 24608 - RNA, 20 nt, Artificial Sequence
  spacer sequence TTCN PAM
agcgauucuugugccucagc

SEQ ID NO: 24609 - RNA, 20 nt, Artificial Sequence
  spacer sequence TTCN PAM
acaagcaacucccuaacauu

SEQ ID NO: 24610 - RNA, 20 nt, Artificial Sequence
  spacer sequence TTCN PAM
uuuuccuccucuacucccag

SEQ ID NO: 24611 - RNA, 20 nt, Artificial Sequence
  spacer sequence TTCN PAM
uccucuacucccagugugac

SEQ ID NO: 24612 - RNA, 20 nt, Artificial Sequence
  spacer sequence TTCN PAM
acaaaggcacagacaucucu

SEQ ID NO: 24613 - RNA, 20 nt, Artificial Sequence
  spacer sequence TTCN PAM
cccaggagccuccuugagag

SEQ ID NO: 24614 - RNA, 20 nt, Artificial Sequence
  spacer sequence TTCN PAM
cuccaggcucccugggccuu

SEQ ID NO: 24615 - RNA, 20 nt, Artificial Sequence
  spacer sequence TTCN PAM
aacaccugaaugaaccuauc

SEQ ID NO: 24616 - RNA, 20 nt, Artificial Sequence
  spacer sequence TTCN PAM
gguguuugaagcgcugacug

SEQ ID NO: 24617 - RNA, 20 nt, Artificial Sequence
  spacer sequence TTCN PAM
uucagguguuugaagcgcug

SEQ ID NO: 24618 - RNA, 20 nt, Artificial Sequence
  spacer sequence TTCN PAM
uuggauagguucauucaggu

SEQ ID NO: 24619 - RNA, 20 nt, Artificial Sequence
  spacer sequence TTCN PAM
uuuuucuuuggauagguuca

SEQ ID NO: 24620 - RNA, 20 nt, Artificial Sequence
  spacer sequence TTCN PAM
uuuuccuuuuucuuuggaua

SEQ ID NO: 24621 - RNA, 20 nt, Artificial Sequence
  spacer sequence TTCN PAM
uuccuuuuccuuuuucuuug

SEQ ID NO: 24622 - RNA, 20 nt, Artificial Sequence
  spacer sequence TTCN PAM
uucuuuccuuuuccuuuuuc

SEQ ID NO: 24623 - RNA, 20 nt, Artificial Sequence
  spacer sequence TTCN PAM
uccuucuuuccuuuuccuuu

SEQ ID NO: 24624 - RNA, 20 nt, Artificial Sequence
  spacer sequence TTCN PAM
uuucuuccuucuuuccuuuu

SEQ ID NO: 24625 - RNA, 20 nt, Artificial Sequence
  spacer sequence TTCN PAM
uuccuuucuuccuucuuucc

SEQ ID NO: 24626 - RNA, 20 nt, Artificial Sequence
  spacer sequence TTCN PAM
ucccucccucccucccuccc

SEQ ID NO: 24627 - RNA, 20 nt, Artificial Sequence
  spacer sequence TTCN PAM
uuccucccucccucccuccc

SEQ ID NO: 24628 - RNA, 20 nt, Artificial Sequence
  spacer sequence TTCN PAM
uuccuuccucccucccuccc

SEQ ID NO: 24629 - RNA, 20 nt, Artificial Sequence
  spacer sequence TTCN PAM
uuccuuccuuccucccuccc

SEQ ID NO: 24630 - RNA, 20 nt, Artificial Sequence
  spacer sequence TTCN PAM
uuccuuccuuccuuccuccc

SEQ ID NO: 24631 - RNA, 20 nt, Artificial Sequence
  spacer sequence TTCN PAM
uccuuccuuccuuccuuccu

SEQ ID NO: 24632 - RNA, 20 nt, Artificial Sequence
  spacer sequence TTCN PAM
uucuuccuuccuuccuuccu

SEQ ID NO: 24633 - RNA, 20 nt, Artificial Sequence
  spacer sequence TTCN PAM
uucuuucuuccuuccuuccu

SEQ ID NO: 24634 - RNA, 20 nt, Artificial Sequence
  spacer sequence TTCN PAM
ucccuccuuucuuucuuucu

SEQ ID NO: 24635 - RNA, 20 nt, Artificial Sequence
  spacer sequence TTCN PAM
ucccucccucccuuccuccc

SEQ ID NO: 24636 - RNA, 20 nt, Artificial Sequence
  spacer sequence TTCN PAM
uuccucccucccucccuucc

SEQ ID NO: 24637 - RNA, 20 nt, Artificial Sequence
  spacer sequence TTCN PAM
gcucgcuccuuccuuccucc

SEQ ID NO: 24638 - RNA, 20 nt, Artificial Sequence
  spacer sequence TTCN PAM
ucuagaugaggcugcugugu

SEQ ID NO: 24639 - RNA, 20 nt, Artificial Sequence
  spacer sequence TTCN PAM
ccauacauuauugacuuagc

SEQ ID NO: 24640 - RNA, 20 nt, Artificial Sequence
  spacer sequence TTCN PAM
aaggggccccuuacuuaugu

SEQ ID NO: 24641 - RNA, 20 nt, Artificial Sequence
  spacer sequence TTCN PAM
aguuagaacgcuacugaaug

SEQ ID NO: 24642 - RNA, 20 nt, Artificial Sequence
  spacer sequence TTCN PAM
aacuagaacucuuugucucu

SEQ ID NO: 24643 - RNA, 20 nt, Artificial Sequence
  spacer sequence TTCN PAM
guagcguucuaacuagaacu

SEQ ID NO: 24644 - RNA, 20 nt, Artificial Sequence
  spacer sequence TTCN PAM
uucaguagcguucuaacuag

SEQ ID NO: 24645 - RNA, 20 nt, Artificial Sequence
  spacer sequence TTCN PAM
uaauauugacaucaaagaca

SEQ ID NO: 24646 - RNA, 20 nt, Artificial Sequence
  spacer sequence TTCN PAM
uuggacuggcagcauugccc

SEQ ID NO: 24647 - RNA, 20 nt, Artificial Sequence
  spacer sequence TTCN PAM
uaaugcaauaaucagcacac

SEQ ID NO: 24648 - RNA, 20 nt, Artificial Sequence
  spacer sequence TTCN PAM
uguauguggugauaggauuu

SEQ ID NO: 24649 - RNA, 20 nt, Artificial Sequence
  spacer sequence TTCN PAM
auucauuuucccccaaaacu

SEQ ID NO: 24650 - RNA, 20 nt, Artificial Sequence
  spacer sequence TTCN PAM
uuuucccccaaaacuaauaa

SEQ ID NO: 24651 - RNA, 20 nt, Artificial Sequence
  spacer sequence TTCN PAM
cccaaaacuaauaaggcuuu

SEQ ID NO: 24652 - RNA, 20 nt, Artificial Sequence
  spacer sequence TTCN PAM
aagaguguguuuaaacauaa

SEQ ID NO: 24653 - RNA, 20 nt, Artificial Sequence
  spacer sequence TTCN PAM
caccaaggauggugagcuca

SEQ ID NO: 24654 - RNA, 20 nt, Artificial Sequence
  spacer sequence TTCN PAM
gagcucaccauccuuggugg

SEQ ID NO: 24655 - RNA, 20 nt, Artificial Sequence
  spacer sequence TTCN PAM
agauaaucuuuucugagcuc

SEQ ID NO: 24656 - RNA, 20 nt, Artificial Sequence
  spacer sequence TTCN PAM
gcugcucugauauucgagau

SEQ ID NO: 24657 - RNA, 20 nt, Artificial Sequence
  spacer sequence TTCN PAM
aucgucuccagcagcauaca

SEQ ID NO: 24658 - RNA, 20 nt, Artificial Sequence
  spacer sequence TTCN PAM
aaauaagccaguaucaauaa

SEQ ID NO: 24659 - RNA, 20 nt, Artificial Sequence
  spacer sequence TTCN PAM
uuuuuuuuuuaacauugcuu

SEQ ID NO: 24660 - RNA, 20 nt, Artificial Sequence
  spacer sequence TTCN PAM
caaaugagacuacuuuuaaa

SEQ ID NO: 24661 - RNA, 20 nt, Artificial Sequence
  spacer sequence TTCN PAM
uuuaaaaguagucucauuug

SEQ ID NO: 24662 - RNA, 20 nt, Artificial Sequence
  spacer sequence TTCN PAM
aacuugauucucuaugcuuc

SEQ ID NO: 24663 - RNA, 20 nt, Artificial Sequence
  spacer sequence TTCN PAM
cuaugcuucccuaccccaug

SEQ ID NO: 24664 - RNA, 20 nt, Artificial Sequence
  spacer sequence TTCN PAM
cuaccccaugcaucuuuuac

SEQ ID NO: 24665 - RNA, 20 nt, Artificial Sequence
  spacer sequence TTCN PAM
cuugcuaaagguaaaagaug

SEQ ID NO: 24666 - RNA, 20 nt, Artificial Sequence
  spacer sequence TTCN PAM
aacccaaucuuaaaaacaac

SEQ ID NO: 24667 - RNA, 20 nt, Artificial Sequence
  spacer sequence TTCN PAM
ccuauaugccucucucuuuc

SEQ ID NO: 24668 - RNA, 20 nt, Artificial Sequence
  spacer sequence TTCN PAM
cucucucucguaaauaaaaa

SEQ ID NO: 24669 - RNA, 20 nt, Artificial Sequence
  spacer sequence TTCN PAM
gcccaaugugauuuaaaaca

SEQ ID NO: 24670 - RNA, 20 nt, Artificial Sequence
  spacer sequence TTCN PAM
auuauaaacccaaauuuuaa

SEQ ID NO: 24671 - RNA, 20 nt, Artificial Sequence
  spacer sequence TTCN PAM
uuauagcagugucuggcagg

SEQ ID NO: 24672 - RNA, 20 nt, Artificial Sequence
  spacer sequence TTCN PAM
uuacuauagaggcacuauag

SEQ ID NO: 24673 - RNA, 20 nt, Artificial Sequence
  spacer sequence TTCN PAM
auuauaaaccccaaguuuaa

SEQ ID NO: 24674 - RNA, 20 nt, Artificial Sequence
  spacer sequence TTCN PAM
acccagugccauuuaaauag

SEQ ID NO: 24675 - RNA, 20 nt, Artificial Sequence
  spacer sequence TTCN PAM
aguuaucaguccagauguga

SEQ ID NO: 24676 - RNA, 20 nt, Artificial Sequence
  spacer sequence TTCN PAM
caucuggacugauaacuuga

SEQ ID NO: 24677 - RNA, 20 nt, Artificial Sequence
  spacer sequence TTCN PAM
gccuuuuauaaaacaaguuc

SEQ ID NO: 24678 - RNA, 20 nt, Artificial Sequence
  spacer sequence TTCN PAM
ucagcugaguuauucugccu

SEQ ID NO: 24679 - RNA, 20 nt, Artificial Sequence
  spacer sequence TTCN PAM
cucucucucucucucucucc

SEQ ID NO: 24680 - RNA, 20 nt, Artificial Sequence
  spacer sequence TTCN PAM
cucucucucuaucucuucug

SEQ ID NO: 24681 - RNA, 20 nt, Artificial Sequence
  spacer sequence TTCN PAM
guuucucucucucucccucu

SEQ ID NO: 24682 - RNA, 20 nt, Artificial Sequence
  spacer sequence TTCN PAM
cucucucucccucucucucc

SEQ ID NO: 24683 - RNA, 20 nt, Artificial Sequence
  spacer sequence TTCN PAM
ggaggagagagagggagaga

SEQ ID NO: 24684 - RNA, 20 nt, Artificial Sequence
  spacer sequence TTCN PAM
gaauguuuuuaguaguuuca

SEQ ID NO: 24685 - RNA, 20 nt, Artificial Sequence
  spacer sequence TTCN PAM
gaaauguucuggaggagaga

SEQ ID NO: 24686 - RNA, 20 nt, Artificial Sequence
  spacer sequence TTCN PAM
gauggucuuauugccaacuu

SEQ ID NO: 24687 - RNA, 20 nt, Artificial Sequence
  spacer sequence TTCN PAM
agcuaugacuucacugccug

SEQ ID NO: 24688 - RNA, 20 nt, Artificial Sequence
  spacer sequence TTCN PAM
cugccugaaaggaaauuuua

SEQ ID NO: 24689 - RNA, 20 nt, Artificial Sequence
  spacer sequence TTCN PAM
ggcagugaagucauagcugg

SEQ ID NO: 24690 - RNA, 20 nt, Artificial Sequence
  spacer sequence TTCN PAM
uuucaggcagugaagucaua

SEQ ID NO: 24691 - RNA, 20 nt, Artificial Sequence
  spacer sequence TTCN PAM
uacauauauauaggcgcaca

SEQ ID NO: 24692 - RNA, 20 nt, Artificial Sequence
  spacer sequence TTCN PAM
gugugugcgccuauauauau

SEQ ID NO: 24693 - RNA, 20 nt, Artificial Sequence
  spacer sequence TTCN PAM
uucugugugugcgccuauau

SEQ ID NO: 24694 - RNA, 20 nt, Artificial Sequence
  spacer sequence TTCN PAM
uuggcauauagucuugauuu

SEQ ID NO: 24695 - RNA, 20 nt, Artificial Sequence
  spacer sequence TTCN PAM
gugcuaccuucugaugaaaa

SEQ ID NO: 24696 - RNA, 20 nt, Artificial Sequence
  spacer sequence TTCN PAM
gaugaaaaaguaugaacuua

SEQ ID NO: 24697 - RNA, 20 nt, Artificial Sequence
  spacer sequence TTCN PAM
ucagaagguagcacagaaug

SEQ ID NO: 24698 - RNA, 20 nt, Artificial Sequence
  spacer sequence TTCN PAM
uacuuuuucaucagaaggua

SEQ ID NO: 24699 - RNA, 20 nt, Artificial Sequence
  spacer sequence TTCN PAM
gguaaguucauacuuuuuca

SEQ ID NO: 24700 - RNA, 20 nt, Artificial Sequence
  spacer sequence TTCN PAM
uuucugguaaguucauacuu

SEQ ID NO: 24701 - RNA, 20 nt, Artificial Sequence
  spacer sequence TTCN PAM
caucuuauuucauaaaaggu

SEQ ID NO: 24702 - RNA, 20 nt, Artificial Sequence
  spacer sequence TTCN PAM
uaaaagguacagcuuuccug

SEQ ID NO: 24703 - RNA, 20 nt, Artificial Sequence
  spacer sequence TTCN PAM
uggcaucacuugguuuguuu

SEQ ID NO: 24704 - RNA, 20 nt, Artificial Sequence
  spacer sequence TTCN PAM
aaacaaaccaagugaugcca

SEQ ID NO: 24705 - RNA, 20 nt, Artificial Sequence
  spacer sequence TTCN PAM
cugcuugacuuugacuguug

SEQ ID NO: 24706 - RNA, 20 nt, Artificial Sequence
  spacer sequence TTCN PAM
ucaaucugucaacagucaaa

SEQ ID NO: 24707 - RNA, 20 nt, Artificial Sequence
  spacer sequence TTCN PAM
ucaucaaucugucaacaguc

SEQ ID NO: 24708 - RNA, 20 nt, Artificial Sequence
  spacer sequence TTCN PAM
aaacucugguccaccggauu

SEQ ID NO: 24709 - RNA, 20 nt, Artificial Sequence
  spacer sequence TTCN PAM
uauuaugguggugguauacc

SEQ ID NO: 24710 - RNA, 20 nt, Artificial Sequence
  spacer sequence TTCN PAM
ucaugcauauacucagcauc

SEQ ID NO: 24711 - RNA, 20 nt, Artificial Sequence
  spacer sequence TTCN PAM
ccaucaccaucaccaccagu

SEQ ID NO: 24712 - RNA, 20 nt, Artificial Sequence
  spacer sequence TTCN PAM
cuaauuaacauguccaccag

SEQ ID NO: 24713 - RNA, 20 nt, Artificial Sequence
  spacer sequence TTCN PAM
acugcccucugguggacaug

SEQ ID NO: 24714 - RNA, 20 nt, Artificial Sequence
  spacer sequence TTCN PAM
uccuauuucuacugcccucu

SEQ ID NO: 24715 - RNA, 20 nt, Artificial Sequence
  spacer sequence TTCN PAM
aaccuuaccccaucuuucau

SEQ ID NO: 24716 - RNA, 20 nt, Artificial Sequence
  spacer sequence TTCN PAM
ccaaaucuuguugcuuuaga

SEQ ID NO: 24717 - RNA, 20 nt, Artificial Sequence
  spacer sequence TTCN PAM
aaagcaacaagauuuggaga

SEQ ID NO: 24718 - RNA, 20 nt, Artificial Sequence
  spacer sequence TTCN PAM
cuuuaacuuguccgccaccu

SEQ ID NO: 24719 - RNA, 20 nt, Artificial Sequence
  spacer sequence TTCN PAM
cacagaaaggcccaccaaga

SEQ ID NO: 24720 - RNA, 20 nt, Artificial Sequence
  spacer sequence TTCN PAM
gugugaagucagugaccuua

SEQ ID NO: 24721 - RNA, 20 nt, Artificial Sequence
  spacer sequence TTCN PAM
gaaaucuuuucacuuucaga

SEQ ID NO: 24722 - RNA, 20 nt, Artificial Sequence
  spacer sequence TTCN PAM
gaaugcagaugugguugcug

SEQ ID NO: 24723 - RNA, 20 nt, Artificial Sequence
  spacer sequence TTCN PAM
cuuucagaagagcaguuccu

SEQ ID NO: 24724 - RNA, 20 nt, Artificial Sequence
  spacer sequence TTCN PAM
gaagagcaguuccuuuccuc

SEQ ID NO: 24725 - RNA, 20 nt, Artificial Sequence
  spacer sequence TTCN PAM
gaaagugaaaagauuucuga

SEQ ID NO: 24726 - RNA, 20 nt, Artificial Sequence
  spacer sequence TTCN PAM
uuuccucuauucccucugac

SEQ ID NO: 24727 - RNA, 20 nt, Artificial Sequence
  spacer sequence TTCN PAM
ucuauucccucugacuggga

SEQ ID NO: 24728 - RNA, 20 nt, Artificial Sequence
  spacer sequence TTCN PAM
cucugacugggaucagacca

SEQ ID NO: 24729 - RNA, 20 nt, Artificial Sequence
  spacer sequence TTCN PAM
cacuucacaauagcuuuagu

SEQ ID NO: 24730 - RNA, 20 nt, Artificial Sequence
  spacer sequence TTCN PAM
caauagcuuuaguuggucuc

SEQ ID NO: 24731 - RNA, 20 nt, Artificial Sequence
  spacer sequence TTCN PAM
agaggagaccaacuaaagcu

SEQ ID NO: 24732 - RNA, 20 nt, Artificial Sequence
  spacer sequence TTCN PAM
augagugacaaaagggaagc

SEQ ID NO: 24733 - RNA, 20 nt, Artificial Sequence
  spacer sequence TTCN PAM
cuuuugucacucauugaauu

SEQ ID NO: 24734 - RNA, 20 nt, Artificial Sequence
  spacer sequence TTCN PAM
uucucuaccagugucucaua

SEQ ID NO: 24735 - RNA, 20 nt, Artificial Sequence
  spacer sequence TTCN PAM
cuaccagugucucauaaacc

SEQ ID NO: 24736 - RNA, 20 nt, Artificial Sequence
  spacer sequence TTCN PAM
gcuggagugguuaugggguu

SEQ ID NO: 24737 - RNA, 20 nt, Artificial Sequence
  spacer sequence TTCN PAM
cagagagcacugcacagccc

SEQ ID NO: 24738 - RNA, 20 nt, Artificial Sequence
  spacer sequence TTCN PAM
ggucccuucucuagaaauua

SEQ ID NO: 24739 - RNA, 20 nt, Artificial Sequence
  spacer sequence TTCN PAM
cuagaaauuaagacuuuuuu

SEQ ID NO: 24740 - RNA, 20 nt, Artificial Sequence
  spacer sequence TTCN PAM
agagaagggaccagaauagu

SEQ ID NO: 24741 - RNA, 20 nt, Artificial Sequence
  spacer sequence TTCN PAM
ugucaaauucagcaaaggga

SEQ ID NO: 24742 - RNA, 20 nt, Artificial Sequence
  spacer sequence TTCN PAM
gcaaagggaacuuuucuagg

SEQ ID NO: 24743 - RNA, 20 nt, Artificial Sequence
  spacer sequence TTCN PAM
cuuugcugaauuugacaaga

SEQ ID NO: 24744 - RNA, 20 nt, Artificial Sequence
  spacer sequence TTCN PAM
aggagaaaauaccuaucccu

SEQ ID NO: 24745 - RNA, 20 nt, Artificial Sequence
  spacer sequence TTCN PAM
ccuagaaaaguucccuuugc

SEQ ID NO: 24746 - RNA, 20 nt, Artificial Sequence
  spacer sequence TTCN PAM
uuggcagcuuaguagagaau

SEQ ID NO: 24747 - RNA, 20 nt, Artificial Sequence
  spacer sequence TTCN PAM
cuacuaagcugccaaagaaa

SEQ ID NO: 24748 - RNA, 20 nt, Artificial Sequence
  spacer sequence TTCN PAM
cccauucccaguugcacaca

SEQ ID NO: 24749 - RNA, 20 nt, Artificial Sequence
  spacer sequence TTCN PAM
caguugcacacaauuugccu

SEQ ID NO: 24750 - RNA, 20 nt, Artificial Sequence
  spacer sequence TTCN PAM
cuuucucuuaaaaaaaaaaa

SEQ ID NO: 24751 - RNA, 20 nt, Artificial Sequence
  spacer sequence TTCN PAM
cuuaaaaaaaaaaaauccuu

SEQ ID NO: 24752 - RNA, 20 nt, Artificial Sequence
  spacer sequence TTCN PAM
guuaucugaaccuccagauu

SEQ ID NO: 24753 - RNA, 20 nt, Artificial Sequence
  spacer sequence TTCN PAM
gauaacugaacuugugcaag

SEQ ID NO: 24754 - RNA, 20 nt, Artificial Sequence
  spacer sequence TTCN PAM
uauaaaaugaagaaucuggu

SEQ ID NO: 24755 - RNA, 20 nt, Artificial Sequence
  spacer sequence TTCN PAM
uuuuauaggaaucuggaggu

SEQ ID NO: 24756 - RNA, 20 nt, Artificial Sequence
  spacer sequence TTCN PAM
ucauuuuauaggaaucugga

SEQ ID NO: 24757 - RNA, 20 nt, Artificial Sequence
  spacer sequence TTCN PAM
uaggaccagauucuucauuu

SEQ ID NO: 24758 - RNA, 20 nt, Artificial Sequence
  spacer sequence TTCN PAM
uuccuucuuuauggagcacu

SEQ ID NO: 24759 - RNA, 20 nt, Artificial Sequence
  spacer sequence TTCN PAM
uucuuuauggagcacugcac

SEQ ID NO: 24760 - RNA, 20 nt, Artificial Sequence
  spacer sequence TTCN PAM
uuauggagcacugcacugug

SEQ ID NO: 24761 - RNA, 20 nt, Artificial Sequence
  spacer sequence TTCN PAM
ccagucacacaugccaaagc

SEQ ID NO: 24762 - RNA, 20 nt, Artificial Sequence
  spacer sequence TTCN PAM
uauuacuaauuugagcgguu

SEQ ID NO: 24763 - RNA, 20 nt, Artificial Sequence
  spacer sequence TTCN PAM
aaaccuauagcgaggaucua

SEQ ID NO: 24764 - RNA, 20 nt, Artificial Sequence
  spacer sequence TTCN PAM
ggagaaaaacuugauuuccc

SEQ ID NO: 24765 - RNA, 20 nt, Artificial Sequence
  spacer sequence TTCN PAM
ccagaaaguacaaaucuggu

SEQ ID NO: 24766 - RNA, 20 nt, Artificial Sequence
  spacer sequence TTCN PAM
cauaaaugagaaugguaaau

SEQ ID NO: 24767 - RNA, 20 nt, Artificial Sequence
  spacer sequence TTCN PAM
cauuuaugggaaaucaaguu

SEQ ID NO: 24768 - RNA, 20 nt, Artificial Sequence
  spacer sequence TTCN PAM
aauggcuuaacuaguuacuu

SEQ ID NO: 24769 - RNA, 20 nt, Artificial Sequence
  spacer sequence TTCN PAM
caaaaguaacuaguuaagcc

SEQ ID NO: 24770 - RNA, 20 nt, Artificial Sequence
  spacer sequence TTCN PAM
gugcuaccacuuguuuugua

SEQ ID NO: 24771 - RNA, 20 nt, Artificial Sequence
  spacer sequence TTCN PAM
uagcauguauuugugaaugu

SEQ ID NO: 24772 - RNA, 20 nt, Artificial Sequence
  spacer sequence TTCN PAM
caaauacaugcuaggaauag

SEQ ID NO: 24773 - RNA, 20 nt, Artificial Sequence
  spacer sequence TTCN PAM
ccucuggaaugcaguggcac

SEQ ID NO: 24774 - RNA, 20 nt, Artificial Sequence
  spacer sequence TTCN PAM
agaggugaaagagcgagacu

SEQ ID NO: 24775 - RNA, 20 nt, Artificial Sequence
  spacer sequence TTCN PAM
gccuccagguucaagcaauu

SEQ ID NO: 24776 - RNA, 20 nt, Artificial Sequence
  spacer sequence TTCN PAM
agcaauucucccucccucaa

SEQ ID NO: 24777 - RNA, 20 nt, Artificial Sequence
  spacer sequence TTCN PAM
cccucccucaaccuccugag

SEQ ID NO: 24778 - RNA, 20 nt, Artificial Sequence
  spacer sequence TTCN PAM
cuauguuggccaggcuggcc

SEQ ID NO: 24779 - RNA, 20 nt, Artificial Sequence
  spacer sequence TTCN PAM
aggccagccuggccaacaua

SEQ ID NO: 24780 - RNA, 20 nt, Artificial Sequence
  spacer sequence TTCN PAM
cuaacacauaguaggcacuu

SEQ ID NO: 24781 - RNA, 20 nt, Artificial Sequence
  spacer sequence TTCN PAM
ugaaucaaggaaugaauucc

SEQ ID NO: 24782 - RNA, 20 nt, Artificial Sequence
  spacer sequence TTCN PAM
ggaaauguauuaagugccua

SEQ ID NO: 24783 - RNA, 20 nt, Artificial Sequence
  spacer sequence TTCN PAM
uugauucaggaaauguauua

SEQ ID NO: 24784 - RNA, 20 nt, Artificial Sequence
  spacer sequence TTCN PAM
uuccuugauucaggaaaugu

SEQ ID NO: 24785 - RNA, 20 nt, Artificial Sequence
  spacer sequence TTCN PAM
acaaauauauuuucaguugc

SEQ ID NO: 24786 - RNA, 20 nt, Artificial Sequence
  spacer sequence TTCN PAM
guugcugcugccagugaaaa

SEQ ID NO: 24787 - RNA, 20 nt, Artificial Sequence
  spacer sequence TTCN PAM
cuggcagcagcaacugaaaa

SEQ ID NO: 24788 - RNA, 20 nt, Artificial Sequence
  spacer sequence TTCN PAM
auuauugaguacuuauuagu

SEQ ID NO: 24789 - RNA, 20 nt, Artificial Sequence
  spacer sequence TTCN PAM
uuuuuuaaauaguuaagaaa

SEQ ID NO: 24790 - RNA, 20 nt, Artificial Sequence
  spacer sequence TTCN PAM
uaacuauuuaaaaaaugaaa

SEQ ID NO: 24791 - RNA, 20 nt, Artificial Sequence
  spacer sequence TTCN PAM
aucagggggaaacaauuaca

SEQ ID NO: 24792 - RNA, 20 nt, Artificial Sequence
  spacer sequence TTCN PAM
cccugauggaagugggugug

SEQ ID NO: 24793 - RNA, 20 nt, Artificial Sequence
  spacer sequence TTCN PAM
auauaauaucuguguauaua

SEQ ID NO: 24794 - RNA, 20 nt, Artificial Sequence
  spacer sequence TTCN PAM
ucuuucucucccucagcaca

SEQ ID NO: 24795 - RNA, 20 nt, Artificial Sequence
  spacer sequence TTCN PAM
cucccucagcacagaguaga

SEQ ID NO: 24796 - RNA, 20 nt, Artificial Sequence
  spacer sequence TTCN PAM
acucugugcugagggagaga

SEQ ID NO: 24797 - RNA, 20 nt, Artificial Sequence
  spacer sequence TTCN PAM
uaagguucuacucugugcug

SEQ ID NO: 24798 - RNA, 20 nt, Artificial Sequence
  spacer sequence TTCN PAM
uguaccagacauuuuccuaa

SEQ ID NO: 24799 - RNA, 20 nt, Artificial Sequence
  spacer sequence TTCN PAM
caggaacuucaaaauccuau

SEQ ID NO: 24800 - RNA, 20 nt, Artificial Sequence
  spacer sequence TTCN PAM
ugggaaucuaagugguuuac

SEQ ID NO: 24801 - RNA, 20 nt, Artificial Sequence
  spacer sequence TTCN PAM
aaauccuaucuaccauagac

SEQ ID NO: 24802 - RNA, 20 nt, Artificial Sequence
  spacer sequence TTCN PAM
caauucucagauuuugaaau

SEQ ID NO: 24803 - RNA, 20 nt, Artificial Sequence
  spacer sequence TTCN PAM
cagauuuugaaaugcagcaa

SEQ ID NO: 24804 - RNA, 20 nt, Artificial Sequence
  spacer sequence TTCN PAM
aaaucugagaauugagaaca

SEQ ID NO: 24805 - RNA, 20 nt, Artificial Sequence
  spacer sequence TTCN PAM
aacagccaaauuucaagagc

SEQ ID NO: 24806 - RNA, 20 nt, Artificial Sequence
  spacer sequence TTCN PAM
agagcaucauaacagaguaa

SEQ ID NO: 24807 - RNA, 20 nt, Artificial Sequence
  spacer sequence TTCN PAM
ggaggcugauucuccagaca

SEQ ID NO: 24808 - RNA, 20 nt, Artificial Sequence
  spacer sequence TTCN PAM
ccagacacuacguucuuuaa

SEQ ID NO: 24809 - RNA, 20 nt, Artificial Sequence
  spacer sequence TTCN PAM
uuaaauaucaagaccugucu

SEQ ID NO: 24810 - RNA, 20 nt, Artificial Sequence
  spacer sequence TTCN PAM
uuugcaacaggcaaagcuca

SEQ ID NO: 24811 - RNA, 20 nt, Artificial Sequence
  spacer sequence TTCN PAM
cauacacccccaaacaguga

SEQ ID NO: 24812 - RNA, 20 nt, Artificial Sequence
  spacer sequence TTCN PAM
ggccuggcucagggagcaag

SEQ ID NO: 24813 - RNA, 20 nt, Artificial Sequence
  spacer sequence TTCN PAM
cuugcucccugagccaggcc

SEQ ID NO: 24814 - RNA, 20 nt, Artificial Sequence
  spacer sequence TTCN PAM
uuacucaucauaugucaaga

SEQ ID NO: 24815 - RNA, 20 nt, Artificial Sequence
  spacer sequence TTCN PAM
cuucucaaaauauugaaucu

SEQ ID NO: 24816 - RNA, 20 nt, Artificial Sequence
  spacer sequence TTCN PAM
caaaauauugaaucuugaac

SEQ ID NO: 24817 - RNA, 20 nt, Artificial Sequence
  spacer sequence TTCN PAM
auauuuugagaagagaaggu

SEQ ID NO: 24818 - RNA, 20 nt, Artificial Sequence
  spacer sequence TTCN PAM
agauucaauauuuugagaag

SEQ ID NO: 24819 - RNA, 20 nt, Artificial Sequence
  spacer sequence TTCN PAM
gacuacaaauauauuagggg

SEQ ID NO: 24820 - RNA, 20 nt, Artificial Sequence
  spacer sequence TTCN PAM
ccuaauauauuuguagucag

SEQ ID NO: 24821 - RNA, 20 nt, Artificial Sequence
  spacer sequence TTCN PAM
aauaauguauaugcuuuccc

SEQ ID NO: 24822 - RNA, 20 nt, Artificial Sequence
  spacer sequence TTCN PAM
agaaaauuuuaaauaugcuc

SEQ ID NO: 24823 - RNA, 20 nt, Artificial Sequence
  spacer sequence TTCN PAM
agaaccuuuaaaucaauaca

SEQ ID NO: 24824 - RNA, 20 nt, Artificial Sequence
  spacer sequence TTCN PAM
uauaaaacauguuuuaaaau

SEQ ID NO: 24825 - RNA, 20 nt, Artificial Sequence
  spacer sequence TTCN PAM
ugggaacaugcagcuuucca

SEQ ID NO: 24826 - RNA, 20 nt, Artificial Sequence
  spacer sequence TTCN PAM
caugaaggagaguugauuuc

SEQ ID NO: 24827 - RNA, 20 nt, Artificial Sequence
  spacer sequence TTCN PAM
auuuuuuuucuuuuauuuua

SEQ ID NO: 24828 - RNA, 20 nt, Artificial Sequence
  spacer sequence TTCN PAM
uuuauuuuagcauaaauaaa

SEQ ID NO: 24829 - RNA, 20 nt, Artificial Sequence
  spacer sequence TTCN PAM
uuuuugguuggaggcugccu

SEQ ID NO: 24830 - RNA, 20 nt, Artificial Sequence
  spacer sequence TTCN PAM
uuuaaaaaaaaauuauauga

SEQ ID NO: 24831 - RNA, 20 nt, Artificial Sequence
  spacer sequence TTCN PAM
gaauuccaagauggaucguu

SEQ ID NO: 24832 - RNA, 20 nt, Artificial Sequence
  spacer sequence TTCN PAM
gaagacauuacuaaagcuaa

SEQ ID NO: 24833 - RNA, 20 nt, Artificial Sequence
  spacer sequence TTCN PAM
aagauggaucguuucuuucc

SEQ ID NO: 24834 - RNA, 20 nt, Artificial Sequence
  spacer sequence TTCN PAM
uuccacugauguucacauuu

SEQ ID NO: 24835 - RNA, 20 nt, Artificial Sequence
  spacer sequence TTCN PAM
acugauguucacauuuaagg

SEQ ID NO: 24836 - RNA, 20 nt, Artificial Sequence
  spacer sequence TTCN PAM
cauuuaaggggcuggaucuc

SEQ ID NO: 24837 - RNA, 20 nt, Artificial Sequence
  spacer sequence TTCN PAM
uggucacauuaaguuaaaga

SEQ ID NO: 24838 - RNA, 20 nt, Artificial Sequence
  spacer sequence TTCN PAM
uucuuggucacauuaaguua

SEQ ID NO: 24839 - RNA, 20 nt, Artificial Sequence
  spacer sequence TTCN PAM
gcuauuuuacccucaguaag

SEQ ID NO: 24840 - RNA, 20 nt, Artificial Sequence
  spacer sequence TTCN PAM
auacuuacaauuuuuaaaca

SEQ ID NO: 24841 - RNA, 20 nt, Artificial Sequence
  spacer sequence TTCN PAM
aaaauguuuaaaaauuguaa

SEQ ID NO: 24842 - RNA, 20 nt, Artificial Sequence
  spacer sequence TTCN PAM
uucuaaaauguuuaaaaauu

SEQ ID NO: 24843 - RNA, 20 nt, Artificial Sequence
  spacer sequence TTCN PAM
uccuucuaaaauguuuaaaa

SEQ ID NO: 24844 - RNA, 20 nt, Artificial Sequence
  spacer sequence TTCN PAM
guugguaucuuuuauuaauu

SEQ ID NO: 24845 - RNA, 20 nt, Artificial Sequence
  spacer sequence TTCN PAM
uaaaaaaauuaauaaaagau

SEQ ID NO: 24846 - RNA, 20 nt, Artificial Sequence
  spacer sequence TTCN PAM
ugguuguugguuaaucucuc

SEQ ID NO: 24847 - RNA, 20 nt, Artificial Sequence
  spacer sequence TTCN PAM
acacaauaccaaaugccuaa

SEQ ID NO: 24848 - RNA, 20 nt, Artificial Sequence
  spacer sequence TTCN PAM
gugcaaguuuacauacaaug

SEQ ID NO: 24849 - RNA, 20 nt, Artificial Sequence
  spacer sequence TTCN PAM
gugaaaauuuccccggccag

SEQ ID NO: 24850 - RNA, 20 nt, Artificial Sequence
  spacer sequence TTCN PAM
cugaaauaauuacugccauc

SEQ ID NO: 24851 - RNA, 20 nt, Artificial Sequence
  spacer sequence TTCN PAM
ccggccagaguaacaagcag

SEQ ID NO: 24852 - RNA, 20 nt, Artificial Sequence
  spacer sequence TTCN PAM
accucucaguguaacauuag

SEQ ID NO: 24853 - RNA, 20 nt, Artificial Sequence
  spacer sequence TTCN PAM
uguauucuaccucucagugu

SEQ ID NO: 24854 - RNA, 20 nt, Artificial Sequence
  spacer sequence TTCN PAM
cuuaucacccauuagucacc

SEQ ID NO: 24855 - RNA, 20 nt, Artificial Sequence
  spacer sequence TTCN PAM
gcuugcuguuugggcauuua

SEQ ID NO: 24856 - RNA, 20 nt, Artificial Sequence
  spacer sequence TTCN PAM
ggaaaaauuauuuuuauccu

SEQ ID NO: 24857 - RNA, 20 nt, Artificial Sequence
  spacer sequence TTCN PAM
ugaaauuagguuuuacauaa

SEQ ID NO: 24858 - RNA, 20 nt, Artificial Sequence
  spacer sequence TTCN PAM
augcaaaugccuaucaaaau

SEQ ID NO: 24859 - RNA, 20 nt, Artificial Sequence
  spacer sequence TTCN PAM
cugcaucuuacccuuucuau

SEQ ID NO: 24860 - RNA, 20 nt, Artificial Sequence
  spacer sequence TTCN PAM
acaagacacggccuucucug

SEQ ID NO: 24861 - RNA, 20 nt, Artificial Sequence
  spacer sequence TTCN PAM
acuaucaugaaggaugugcu

SEQ ID NO: 24862 - RNA, 20 nt, Artificial Sequence
  spacer sequence TTCN PAM
ugauaguggaauuccacaag

SEQ ID NO: 24863 - RNA, 20 nt, Artificial Sequence
  spacer sequence TTCN PAM
auaagcacuguguacaccgg

SEQ ID NO: 24864 - RNA, 20 nt, Artificial Sequence
  spacer sequence TTCN PAM
uuuaaauggccgguguacac

SEQ ID NO: 24865 - RNA, 20 nt, Artificial Sequence
  spacer sequence TTCN PAM
uuuucuuuuaaauggccggu

SEQ ID NO: 24866 - RNA, 20 nt, Artificial Sequence
  spacer sequence TTCN PAM
uauuuuaucacaagucuauu

SEQ ID NO: 24867 - RNA, 20 nt, Artificial Sequence
  spacer sequence TTCN PAM
ggugaagauacagggaggaa

SEQ ID NO: 24868 - RNA, 20 nt, Artificial Sequence
  spacer sequence TTCN PAM
ccagaaccucuuucuuauuu

SEQ ID NO: 24869 - RNA, 20 nt, Artificial Sequence
  spacer sequence TTCN PAM
ucccuguaucuucaccagaa

SEQ ID NO: 24870 - RNA, 20 nt, Artificial Sequence
  spacer sequence TTCN PAM
gagucauccugcuuccuccc

SEQ ID NO: 24871 - RNA, 20 nt, Artificial Sequence
  spacer sequence TTCN PAM
gucucauccucccugaaugu

SEQ ID NO: 24872 - RNA, 20 nt, Artificial Sequence
  spacer sequence TTCN PAM
gggaggaugagacugaagcu

SEQ ID NO: 24873 - RNA, 20 nt, Artificial Sequence
  spacer sequence TTCN PAM
uguguccaaguaucaccaac

SEQ ID NO: 24874 - RNA, 20 nt, Artificial Sequence
  spacer sequence TTCN PAM
uauacucuuuaguuggugau

SEQ ID NO: 24875 - RNA, 20 nt, Artificial Sequence
  spacer sequence TTCN PAM
guuuagugagagauuucaua

SEQ ID NO: 24876 - RNA, 20 nt, Artificial Sequence
  spacer sequence TTCN PAM
ccagggguuucaguuuagug

SEQ ID NO: 24877 - RNA, 20 nt, Artificial Sequence
  spacer sequence TTCN PAM
ggguguaauuucaauuauga

SEQ ID NO: 24878 - RNA, 20 nt, Artificial Sequence
  spacer sequence TTCN PAM
auuaugaugcugacuuuugg

SEQ ID NO: 24879 - RNA, 20 nt, Artificial Sequence
  spacer sequence TTCN PAM
agagagcaagcagaguaaca

SEQ ID NO: 24880 - RNA, 20 nt, Artificial Sequence
  spacer sequence TTCN PAM
ggaugccagauuuuuguuac

SEQ ID NO: 24881 - RNA, 20 nt, Artificial Sequence
  spacer sequence TTCN PAM
acaaagaggaucggucaaga

SEQ ID NO: 24882 - RNA, 20 nt, Artificial Sequence
  spacer sequence TTCN PAM
ugaccgauccucuuugugga

SEQ ID NO: 24883 - RNA, 20 nt, Artificial Sequence
  spacer sequence TTCN PAM
gcccuucuugaccgauccuc

SEQ ID NO: 24884 - RNA, 20 nt, Artificial Sequence
  spacer sequence TTCN PAM
uucagcccuucuugaccgau

SEQ ID NO: 24885 - RNA, 20 nt, Artificial Sequence
  spacer sequence TTCN PAM
aaggauaccuuugauauacc

SEQ ID NO: 24886 - RNA, 20 nt, Artificial Sequence
  spacer sequence TTCN PAM
uuuuuauuggcucugaguuc

SEQ ID NO: 24887 - RNA, 20 nt, Artificial Sequence
  spacer sequence TTCN PAM
cuucugagaccuaauuaacu

SEQ ID NO: 24888 - RNA, 20 nt, Artificial Sequence
  spacer sequence TTCN PAM
gagaccuaauuaacuuuuau

SEQ ID NO: 24889 - RNA, 20 nt, Artificial Sequence
  spacer sequence TTCN PAM
uugcuuaugaugagaacuaa

SEQ ID NO: 24890 - RNA, 20 nt, Artificial Sequence
  spacer sequence TTCN PAM
caucauaagcaaagaacaaa

SEQ ID NO: 24891 - RNA, 20 nt, Artificial Sequence
  spacer sequence TTCN PAM
auggcacauauauuguuuua

SEQ ID NO: 24892 - RNA, 20 nt, Artificial Sequence
  spacer sequence TTCN PAM
ucgccuguaaggaauuuucu

SEQ ID NO: 24893 - RNA, 20 nt, Artificial Sequence
  spacer sequence TTCN PAM
uuacaggcgaggaaaagcca

SEQ ID NO: 24894 - RNA, 20 nt, Artificial Sequence
  spacer sequence TTCN PAM
guucuuuagagguagucagg

SEQ ID NO: 24895 - RNA, 20 nt, Artificial Sequence
  spacer sequence TTCN PAM
uuagagguagucaggcaaug

SEQ ID NO: 24896 - RNA, 20 nt, Artificial Sequence
  spacer sequence TTCN PAM
uugccugacuaccucuaaag

SEQ ID NO: 24897 - RNA, 20 nt, Artificial Sequence
  spacer sequence TTCN PAM
caaaacauuaaguauuuucc

SEQ ID NO: 24898 - RNA, 20 nt, Artificial Sequence
  spacer sequence TTCN PAM
uauaucuauuuucaaggaau

SEQ ID NO: 24899 - RNA, 20 nt, Artificial Sequence
  spacer sequence TTCN PAM
aggaaucagggacuuagucc

SEQ ID NO: 24900 - RNA, 20 nt, Artificial Sequence
  spacer sequence TTCN PAM
uugaaaauagauauaggaaa

SEQ ID NO: 24901 - RNA, 20 nt, Artificial Sequence
  spacer sequence TTCN PAM
aaaauauuccuuucguaucc

SEQ ID NO: 24902 - RNA, 20 nt, Artificial Sequence
  spacer sequence TTCN PAM
uuucguauccuaaaacaaaa

SEQ ID NO: 24903 - RNA, 20 nt, Artificial Sequence
  spacer sequence TTCN PAM
uauccuaaaacaaaacaaaa

SEQ ID NO: 24904 - RNA, 20 nt, Artificial Sequence
  spacer sequence TTCN PAM
ggaaacaaauuucaugcuuc

SEQ ID NO: 24905 - RNA, 20 nt, Artificial Sequence
  spacer sequence TTCN PAM
ugaauauuuuuguuuuuguu

SEQ ID NO: 24906 - RNA, 20 nt, Artificial Sequence
  spacer sequence TTCN PAM
ugcuuccuugcaaggauuag

SEQ ID NO: 24907 - RNA, 20 nt, Artificial Sequence
  spacer sequence TTCN PAM
uugcaaggauuagucuccua

SEQ ID NO: 24908 - RNA, 20 nt, Artificial Sequence
  spacer sequence TTCN PAM
uguuuuaaaggaggauauau

SEQ ID NO: 24909 - RNA, 20 nt, Artificial Sequence
  spacer sequence TTCN PAM
guuaccuuuccugacuguaa

SEQ ID NO: 24910 - RNA, 20 nt, Artificial Sequence
  spacer sequence TTCN PAM
ugacuguaaagcaaucacag

SEQ ID NO: 24911 - RNA, 20 nt, Artificial Sequence
  spacer sequence TTCN PAM
ugugauugcuuuacagucag

SEQ ID NO: 24912 - RNA, 20 nt, Artificial Sequence
  spacer sequence TTCN PAM
gagagauaacuguuuucagu

SEQ ID NO: 24913 - RNA, 20 nt, Artificial Sequence
  spacer sequence TTCN PAM
gugguuaugccuccaaguag

SEQ ID NO: 24914 - RNA, 20 nt, Artificial Sequence
  spacer sequence TTCN PAM
cuuacuacuuggaggcauaa

SEQ ID NO: 24915 - RNA, 20 nt, Artificial Sequence
  spacer sequence TTCN PAM
uguuucccuuacuacuugga

SEQ ID NO: 24916 - RNA, 20 nt, Artificial Sequence
  spacer sequence TTCN PAM
uccuacuuucaaguaauucg

SEQ ID NO: 24917 - RNA, 20 nt, Artificial Sequence
  spacer sequence TTCN PAM
aguaauucguauguuggugg

SEQ ID NO: 24918 - RNA, 20 nt, Artificial Sequence
  spacer sequence TTCN PAM
uauguugguggugcccccug

SEQ ID NO: 24919 - RNA, 20 nt, Artificial Sequence
  spacer sequence TTCN PAM
uggacaaccugugauugcag

SEQ ID NO: 24920 - RNA, 20 nt, Artificial Sequence
  spacer sequence TTCN PAM
cccuuucuuggacaaccugu

SEQ ID NO: 24921 - RNA, 20 nt, Artificial Sequence
  spacer sequence TTCN PAM
gaagcauuuagaucugguua

SEQ ID NO: 24922 - RNA, 20 nt, Artificial Sequence
  spacer sequence TTCN PAM
gaauuuuauucucccuuucu

SEQ ID NO: 24923 - RNA, 20 nt, Artificial Sequence
  spacer sequence TTCN PAM
cauauuaaccagaucuaaau

SEQ ID NO: 24924 - RNA, 20 nt, Artificial Sequence
  spacer sequence TTCN PAM
ccugcuccaggaacagccau

SEQ ID NO: 24925 - RNA, 20 nt, Artificial Sequence
  spacer sequence TTCN PAM
uggagcaggggaagugggca

SEQ ID NO: 24926 - RNA, 20 nt, Artificial Sequence
  spacer sequence TTCN PAM
gaguuccucccgucagccac

SEQ ID NO: 24927 - RNA, 20 nt, Artificial Sequence
  spacer sequence TTCN PAM
ucccgucagccacaguucca

SEQ ID NO: 24928 - RNA, 20 nt, Artificial Sequence
  spacer sequence TTCN PAM
acuuuaaacauuccucaacc

SEQ ID NO: 24929 - RNA, 20 nt, Artificial Sequence
  spacer sequence TTCN PAM
ucaaccuaaaaucuggaaau

SEQ ID NO: 24930 - RNA, 20 nt, Artificial Sequence
  spacer sequence TTCN PAM
agauuuuagguugaggaaug

SEQ ID NO: 24931 - RNA, 20 nt, Artificial Sequence
  spacer sequence TTCN PAM
aagaaugaaauguuuuaaga

SEQ ID NO: 24932 - RNA, 20 nt, Artificial Sequence
  spacer sequence TTCN PAM
uugaaaaugguguuugggau

SEQ ID NO: 24933 - RNA, 20 nt, Artificial Sequence
  spacer sequence TTCN PAM
uucuuugaaaaugguguuug

SEQ ID NO: 24934 - RNA, 20 nt, Artificial Sequence
  spacer sequence TTCN PAM
uaaaacauuucauucuuuga

SEQ ID NO: 24935 - RNA, 20 nt, Artificial Sequence
  spacer sequence TTCN PAM
uagagguuaccuaaugauaa

SEQ ID NO: 24936 - RNA, 20 nt, Artificial Sequence
  spacer sequence TTCN PAM
gaauuagaagaauuuccugc

SEQ ID NO: 24937 - RNA, 20 nt, Artificial Sequence
  spacer sequence TTCN PAM
gaauuuauuaucauuaggua

SEQ ID NO: 24938 - RNA, 20 nt, Artificial Sequence
  spacer sequence TTCN PAM
aauucagaauuuauuaucau

SEQ ID NO: 24939 - RNA, 20 nt, Artificial Sequence
  spacer sequence TTCN PAM
ucuaauucagaauuuauuau

SEQ ID NO: 24940 - RNA, 20 nt, Artificial Sequence
  spacer sequence TTCN PAM
ugccacuuacuaggacauua

SEQ ID NO: 24941 - RNA, 20 nt, Artificial Sequence
  spacer sequence TTCN PAM
aauguccuaguaaguggcag

SEQ ID NO: 24942 - RNA, 20 nt, Artificial Sequence
  spacer sequence TTCN PAM
guucuaauguccuaguaagu

SEQ ID NO: 24943 - RNA, 20 nt, Artificial Sequence
  spacer sequence TTCN PAM
cuuucuguucuaauguccua

SEQ ID NO: 24944 - RNA, 20 nt, Artificial Sequence
  spacer sequence TTCN PAM
uuuaauagauaaagccauuu

SEQ ID NO: 24945 - RNA, 20 nt, Artificial Sequence
  spacer sequence TTCN PAM
aaauaaaaugaaauaaaaua

SEQ ID NO: 24946 - RNA, 20 nt, Artificial Sequence
  spacer sequence TTCN PAM
uuuuauuuugaauaucaaaa

SEQ ID NO: 24947 - RNA, 20 nt, Artificial Sequence
  spacer sequence TTCN PAM
uuuauuuauuuuauuucauu

SEQ ID NO: 24948 - RNA, 20 nt, Artificial Sequence
  spacer sequence TTCN PAM
augugccuaacuugguuguu

SEQ ID NO: 24949 - RNA, 20 nt, Artificial Sequence
  spacer sequence TTCN PAM
uauuaagaugggcagggcgg

SEQ ID NO: 24950 - RNA, 20 nt, Artificial Sequence
  spacer sequence TTCN PAM
gucagcuaccccccgcccug

SEQ ID NO: 24951 - RNA, 20 nt, Artificial Sequence
  spacer sequence TTCN PAM
guucugucagcuaccccccg

SEQ ID NO: 24952 - RNA, 20 nt, Artificial Sequence
  spacer sequence TTCN PAM
gaccugugauggucuauuga

SEQ ID NO: 24953 - RNA, 20 nt, Artificial Sequence
  spacer sequence TTCN PAM
auagaccaucacaggucuga

SEQ ID NO: 24954 - RNA, 20 nt, Artificial Sequence
  spacer sequence TTCN PAM
ggcaauuuaaaaaugcauau

SEQ ID NO: 24955 - RNA, 20 nt, Artificial Sequence
  spacer sequence TTCN PAM
caugacagaaucuaaugggu

SEQ ID NO: 24956 - RNA, 20 nt, Artificial Sequence
  spacer sequence TTCN PAM
gucaugugaauauauauuca

SEQ ID NO: 24957 - RNA, 20 nt, Artificial Sequence
  spacer sequence TTCN PAM
auaaaaguguaugugauuug

SEQ ID NO: 24958 - RNA, 20 nt, Artificial Sequence
  spacer sequence TTCN PAM
uauuuaaauucuaaaguuga

SEQ ID NO: 24959 - RNA, 20 nt, Artificial Sequence
  spacer sequence TTCN PAM
aaaguugaaauagauaaaag

SEQ ID NO: 24960 - RNA, 20 nt, Artificial Sequence
  spacer sequence TTCN PAM
acuuuagaauuuaaauaaga

SEQ ID NO: 24961 - RNA, 20 nt, Artificial Sequence
  spacer sequence TTCN PAM
uuuuaucuauuucaacuuua

SEQ ID NO: 24962 - RNA, 20 nt, Artificial Sequence
  spacer sequence TTCN PAM
uuugguagguuuaauuuccu

SEQ ID NO: 24963 - RNA, 20 nt, Artificial Sequence
  spacer sequence TTCN PAM
gagccaccaaggcaagccuu

SEQ ID NO: 24964 - RNA, 20 nt, Artificial Sequence
  spacer sequence TTCN PAM
ucaaggcuugccuugguggc

SEQ ID NO: 24965 - RNA, 20 nt, Artificial Sequence
  spacer sequence TTCN PAM
guuagacucaccucaaucuu

SEQ ID NO: 24966 - RNA, 20 nt, Artificial Sequence
  spacer sequence TTCN PAM
ccaaggccccacacucccua

SEQ ID NO: 24967 - RNA, 20 nt, Artificial Sequence
  spacer sequence TTCN PAM
uaaaacugauguuaaaaaau

SEQ ID NO: 24968 - RNA, 20 nt, Artificial Sequence
  spacer sequence TTCN PAM
guauguagccacggugagau

SEQ ID NO: 24969 - RNA, 20 nt, Artificial Sequence
  spacer sequence TTCN PAM
aacuucaguauguagccacg

SEQ ID NO: 24970 - RNA, 20 nt, Artificial Sequence
  spacer sequence TTCN PAM
acuuagcucuguacuucuuu

SEQ ID NO: 24971 - RNA, 20 nt, Artificial Sequence
  spacer sequence TTCN PAM
uuuccauauucagaucuuua

SEQ ID NO: 24972 - RNA, 20 nt, Artificial Sequence
  spacer sequence TTCN PAM
auauucagaucuuuacagcu

SEQ ID NO: 24973 - RNA, 20 nt, Artificial Sequence
  spacer sequence TTCN PAM
gaucuuuacagcuacagcaa

SEQ ID NO: 24974 - RNA, 20 nt, Artificial Sequence
  spacer sequence TTCN PAM
ucaguccuccacuuugcugu

SEQ ID NO: 24975 - RNA, 20 nt, Artificial Sequence
  spacer sequence TTCN PAM
gcaaugagccugccuuuauc

SEQ ID NO: 24976 - RNA, 20 nt, Artificial Sequence
  spacer sequence TTCN PAM
uggauggugcagauaaaggc

SEQ ID NO: 24977 - RNA, 20 nt, Artificial Sequence
  spacer sequence TTCN PAM
cuccuugugggcccucaggu

SEQ ID NO: 24978 - RNA, 20 nt, Artificial Sequence
  spacer sequence TTCN PAM
cucccuuucucuccuugugg

SEQ ID NO: 24979 - RNA, 20 nt, Artificial Sequence
  spacer sequence TTCN PAM
gccugguaaauagcauccac

SEQ ID NO: 24980 - RNA, 20 nt, Artificial Sequence
  spacer sequence TTCN PAM
aauuaguucugccugguaaa

SEQ ID NO: 24981 - RNA, 20 nt, Artificial Sequence
  spacer sequence TTCN PAM
ucacccaaaacuuaaacaag

SEQ ID NO: 24982 - RNA, 20 nt, Artificial Sequence
  spacer sequence TTCN PAM
ccugaucauauagagugaug

SEQ ID NO: 24983 - RNA, 20 nt, Artificial Sequence
  spacer sequence TTCN PAM
guggcaguaaaaccuggagu

SEQ ID NO: 24984 - RNA, 20 nt, Artificial Sequence
  spacer sequence TTCN PAM
ccuucuguggcaguaaaacc

SEQ ID NO: 24985 - RNA, 20 nt, Artificial Sequence
  spacer sequence TTCN PAM
aacaguucaccuucuguggc

SEQ ID NO: 24986 - RNA, 20 nt, Artificial Sequence
  spacer sequence TTCN PAM
uuuucuaacaguucaccuuc

SEQ ID NO: 24987 - RNA, 20 nt, Artificial Sequence
  spacer sequence TTCN PAM
caacugcuguuuugugcaug

SEQ ID NO: 24988 - RNA, 20 nt, Artificial Sequence
  spacer sequence TTCN PAM
auucccaacugcuguuuugu

SEQ ID NO: 24989 - RNA, 20 nt, Artificial Sequence
  spacer sequence TTCN PAM
cagaaccccugccauauacg

SEQ ID NO: 24990 - RNA, 20 nt, Artificial Sequence
  spacer sequence TTCN PAM
gggaaagaggagcuuccauu

SEQ ID NO: 24991 - RNA, 20 nt, Artificial Sequence
  spacer sequence TTCN PAM
agacacuccguacaaccauu

SEQ ID NO: 24992 - RNA, 20 nt, Artificial Sequence
  spacer sequence TTCN PAM
aucuauugaaucaagagacu

SEQ ID NO: 24993 - RNA, 20 nt, Artificial Sequence
  spacer sequence TTCN PAM
auagauugaaugguuguacg

SEQ ID NO: 24994 - RNA, 20 nt, Artificial Sequence
  spacer sequence TTCN PAM
aaauuuauuaacccuuggag

SEQ ID NO: 24995 - RNA, 20 nt, Artificial Sequence
  spacer sequence TTCN PAM
uuaagauauggcugugcugu

SEQ ID NO: 24996 - RNA, 20 nt, Artificial Sequence
  spacer sequence TTCN PAM
uuaugauaauuggggggaga

SEQ ID NO: 24997 - RNA, 20 nt, Artificial Sequence
  spacer sequence TTCN PAM
gacagucucucuccccccaa

SEQ ID NO: 24998 - RNA, 20 nt, Artificial Sequence
  spacer sequence TTCN PAM
caggcaaaccucagccuagg

SEQ ID NO: 24999 - RNA, 20 nt, Artificial Sequence
  spacer sequence TTCN PAM
cuucacaggcaaaccucagc

SEQ ID NO: 25000 - RNA, 20 nt, Artificial Sequence
  spacer sequence TTCN PAM
ccagaaacaguucagucucu

SEQ ID NO: 25001 - RNA, 20 nt, Artificial Sequence
  spacer sequence TTCN PAM
ggagaaaauuucacuucaca

SEQ ID NO: 25002 - RNA, 20 nt, Artificial Sequence
  spacer sequence TTCN PAM
gucucugaaaacaaugcaaa

SEQ ID NO: 25003 - RNA, 20 nt, Artificial Sequence
  spacer sequence TTCN PAM
gagacugaacuguuucugga

SEQ ID NO: 25004 - RNA, 20 nt, Artificial Sequence
  spacer sequence TTCN PAM
uuuugcauuguuuucagaga

SEQ ID NO: 25005 - RNA, 20 nt, Artificial Sequence
  spacer sequence TTCN PAM
cccuccucuuuuuccuuuug

SEQ ID NO: 25006 - RNA, 20 nt, Artificial Sequence
  spacer sequence TTCN PAM
ucccccuccucuuuuuccuu

SEQ ID NO: 25007 - RNA, 20 nt, Artificial Sequence
  spacer sequence TTCN PAM
ucuucccccuccucuuuuuc

SEQ ID NO: 25008 - RNA, 20 nt, Artificial Sequence
  spacer sequence TTCN PAM
cuuucuucuucccccuccuc

SEQ ID NO: 25009 - RNA, 20 nt, Artificial Sequence
  spacer sequence TTCN PAM
aaugguccaaagccagaaag

SEQ ID NO: 25010 - RNA, 20 nt, Artificial Sequence
  spacer sequence TTCN PAM
ggcuuuggaccauuggaaau

SEQ ID NO: 25011 - RNA, 20 nt, Artificial Sequence
  spacer sequence TTCN PAM
agccagugucaaccccuaau

SEQ ID NO: 25012 - RNA, 20 nt, Artificial Sequence
  spacer sequence TTCN PAM
uuaggcauuacauuaggggu

SEQ ID NO: 25013 - RNA, 20 nt, Artificial Sequence
  spacer sequence TTCN PAM
aaaggcacacaccugggaaa

SEQ ID NO: 25014 - RNA, 20 nt, Artificial Sequence
  spacer sequence TTCN PAM
caggugugugccuuuggaaa

SEQ ID NO: 25015 - RNA, 20 nt, Artificial Sequence
  spacer sequence TTCN PAM
uccaguaagucaaacuucug

SEQ ID NO: 25016 - RNA, 20 nt, Artificial Sequence
  spacer sequence TTCN PAM
gaaucaauaaggaucagcua

SEQ ID NO: 25017 - RNA, 20 nt, Artificial Sequence
  spacer sequence TTCN PAM
gaaguuugacuuacuggagg

SEQ ID NO: 25018 - RNA, 20 nt, Artificial Sequence
  spacer sequence TTCN PAM
agcaauagcugauccuuauu

SEQ ID NO: 25019 - RNA, 20 nt, Artificial Sequence
  spacer sequence TTCN PAM
uuccagcaauagcugauccu

SEQ ID NO: 25020 - RNA, 20 nt, Artificial Sequence
  spacer sequence TTCN PAM
ccuccccucccccaaagaag

SEQ ID NO: 25021 - RNA, 20 nt, Artificial Sequence
  spacer sequence TTCN PAM
uugggggaggggaggugaaa

SEQ ID NO: 25022 - RNA, 20 nt, Artificial Sequence
  spacer sequence TTCN PAM
ucuuugggggaggggaggug

SEQ ID NO: 25023 - RNA, 20 nt, Artificial Sequence
  spacer sequence TTCN PAM
aauugcuuagaguucuucuu

SEQ ID NO: 25024 - RNA, 20 nt, Artificial Sequence
  spacer sequence TTCN PAM
cccccuccccuuuagcagga

SEQ ID NO: 25025 - RNA, 20 nt, Artificial Sequence
  spacer sequence TTCN PAM
uuuaauauguuagucugucu

SEQ ID NO: 25026 - RNA, 20 nt, Artificial Sequence
  spacer sequence TTCN PAM
gauaaaaaaaagauauccau

SEQ ID NO: 25027 - RNA, 20 nt, Artificial Sequence
  spacer sequence TTCN PAM
acuugcccauuacugauguu

SEQ ID NO: 25028 - RNA, 20 nt, Artificial Sequence
  spacer sequence TTCN PAM
uagcuuuucuuucagacaca

SEQ ID NO: 25029 - RNA, 20 nt, Artificial Sequence
  spacer sequence TTCN PAM
uucagacacaaacugcuagg

SEQ ID NO: 25030 - RNA, 20 nt, Artificial Sequence
  spacer sequence TTCN PAM
gacacaaacugcuaggcaug

SEQ ID NO: 25031 - RNA, 20 nt, Artificial Sequence
  spacer sequence TTCN PAM
gaugaagcgauuucauucug

SEQ ID NO: 25032 - RNA, 20 nt, Artificial Sequence
  spacer sequence TTCN PAM
ucugaaugcuaaaauuguua

SEQ ID NO: 25033 - RNA, 20 nt, Artificial Sequence
  spacer sequence TTCN PAM
uucugugacugccuuuucua

SEQ ID NO: 25034 - RNA, 20 nt, Artificial Sequence
  spacer sequence TTCN PAM
gugacugccuuuucuauuag

SEQ ID NO: 25035 - RNA, 20 nt, Artificial Sequence
  spacer sequence TTCN PAM
auuagauuugauuuugagaa

SEQ ID NO: 25036 - RNA, 20 nt, Artificial Sequence
  spacer sequence TTCN PAM
caaaaucaaaucuaauagaa

SEQ ID NO: 25037 - RNA, 20 nt, Artificial Sequence
  spacer sequence TTCN PAM
aggcagagaucuaucuguga

SEQ ID NO: 25038 - RNA, 20 nt, Artificial Sequence
  spacer sequence TTCN PAM
ugagaccccgcuccaucugg

SEQ ID NO: 25039 - RNA, 20 nt, Artificial Sequence
  spacer sequence TTCN PAM
accacccccccuccuuuuuu

SEQ ID NO: 25040 - RNA, 20 nt, Artificial Sequence
  spacer sequence TTCN PAM
uagucaacauugaucaaggc

SEQ ID NO: 25041 - RNA, 20 nt, Artificial Sequence
  spacer sequence TTCN PAM
gccuugaucaauguugacua

SEQ ID NO: 25042 - RNA, 20 nt, Artificial Sequence
  spacer sequence TTCN PAM
aggagacgaggcgcuccguu

SEQ ID NO: 25043 - RNA, 20 nt, Artificial Sequence
  spacer sequence TTCN PAM
ccugagucugcccagcccuu

SEQ ID NO: 25044 - RNA, 20 nt, Artificial Sequence
  spacer sequence TTCN PAM
guauauggaaaugaucaagc

SEQ ID NO: 25045 - RNA, 20 nt, Artificial Sequence
  spacer sequence TTCN PAM
auauacugaaaugugcuguu

SEQ ID NO: 25046 - RNA, 20 nt, Artificial Sequence
  spacer sequence TTCN PAM
uucaccuccaaagauuuuuu

SEQ ID NO: 25047 - RNA, 20 nt, Artificial Sequence
  spacer sequence TTCN PAM
ccuccaaagauuuuuuuucu

SEQ ID NO: 25048 - RNA, 20 nt, Artificial Sequence
  spacer sequence TTCN PAM
cccucccaacagggauuuau

SEQ ID NO: 25049 - RNA, 20 nt, Artificial Sequence
  spacer sequence TTCN PAM
ccaacaccuggaaauuauca

SEQ ID NO: 25050 - RNA, 20 nt, Artificial Sequence
  spacer sequence TTCN PAM
agguguuggggaaagccguu

SEQ ID NO: 25051 - RNA, 20 nt, Artificial Sequence
  spacer sequence TTCN PAM
ugcuugcugaaugaugcuaa

SEQ ID NO: 25052 - RNA, 20 nt, Artificial Sequence
  spacer sequence TTCN PAM
gcaagcaggaagcuugauaa

SEQ ID NO: 25053 - RNA, 20 nt, Artificial Sequence
  spacer sequence TTCN PAM
uuuuuaacaacucacuggcu

SEQ ID NO: 25054 - RNA, 20 nt, Artificial Sequence
  spacer sequence TTCN PAM
uuaauaaaaaucuaccaaag

SEQ ID NO: 25055 - RNA, 20 nt, Artificial Sequence
  spacer sequence TTCN PAM
agucagauuugauuuuggua

SEQ ID NO: 25056 - RNA, 20 nt, Artificial Sequence
  spacer sequence TTCN PAM
agauagauggguuuuuccau

SEQ ID NO: 25057 - RNA, 20 nt, Artificial Sequence
  spacer sequence TTCN PAM
aucucugaauucugaccccu

SEQ ID NO: 25058 - RNA, 20 nt, Artificial Sequence
  spacer sequence TTCN PAM
gagauggaaaaacccaucua

SEQ ID NO: 25059 - RNA, 20 nt, Artificial Sequence
  spacer sequence TTCN PAM
gaccccuuuuuuaaccauca

SEQ ID NO: 25060 - RNA, 20 nt, Artificial Sequence
  spacer sequence TTCN PAM
cugacucuccucucucccuc

SEQ ID NO: 25061 - RNA, 20 nt, Artificial Sequence
  spacer sequence TTCN PAM
cucuccucugugucucuuuu

SEQ ID NO: 25062 - RNA, 20 nt, Artificial Sequence
  spacer sequence TTCN PAM
aucuguuucucucuccucug

SEQ ID NO: 25063 - RNA, 20 nt, Artificial Sequence
  spacer sequence TTCN PAM
aguguuacaucguuaccucu

SEQ ID NO: 25064 - RNA, 20 nt, Artificial Sequence
  spacer sequence TTCN PAM
agcuccauucaaguguuaca

SEQ ID NO: 25065 - RNA, 20 nt, Artificial Sequence
  spacer sequence TTCN PAM
cuccucccuaggccacauuc

SEQ ID NO: 25066 - RNA, 20 nt, Artificial Sequence
  spacer sequence TTCN PAM
uccuuucccaaagacccaca

SEQ ID NO: 25067 - RNA, 20 nt, Artificial Sequence
  spacer sequence TTCN PAM
caaagacccacacgaacguc

SEQ ID NO: 25068 - RNA, 20 nt, Artificial Sequence
  spacer sequence TTCN PAM
ugugggucuuugggaaagga

SEQ ID NO: 25069 - RNA, 20 nt, Artificial Sequence
  spacer sequence TTCN PAM
ccagaucacccacuagagua

SEQ ID NO: 25070 - RNA, 20 nt, Artificial Sequence
  spacer sequence TTCN PAM
uuccuccucuucucucugua

SEQ ID NO: 25071 - RNA, 20 nt, Artificial Sequence
  spacer sequence TTCN PAM
uccucuucucucuguaucag

SEQ ID NO: 25072 - RNA, 20 nt, Artificial Sequence
  spacer sequence TTCN PAM
cucuguaucaggggcugggu

SEQ ID NO: 25073 - RNA, 20 nt, Artificial Sequence
  spacer sequence TTCN PAM
uuugagcugcugccgccgcu

SEQ ID NO: 25074 - RNA, 20 nt, Artificial Sequence
  spacer sequence TTCN PAM
auauauggaaaugaccagag

SEQ ID NO: 25075 - RNA, 20 nt, Artificial Sequence
  spacer sequence TTCN PAM
auauauugaaaugcgcccaa

SEQ ID NO: 25076 - RNA, 20 nt, Artificial Sequence
  spacer sequence TTCN PAM
gcaauaaaucagcacucaac

SEQ ID NO: 25077 - RNA, 20 nt, Artificial Sequence
  spacer sequence TTCN PAM
aguucugcuucauuuuccua

SEQ ID NO: 25078 - RNA, 20 nt, Artificial Sequence
  spacer sequence TTCN PAM
gcuucauuuuccuauuuucc

SEQ ID NO: 25079 - RNA, 20 nt, Artificial Sequence
  spacer sequence TTCN PAM
uuuuccuauuuuccucuucu

SEQ ID NO: 25080 - RNA, 20 nt, Artificial Sequence
  spacer sequence TTCN PAM
uauuuuccucuucuccucac

SEQ ID NO: 25081 - RNA, 20 nt, Artificial Sequence
  spacer sequence TTCN PAM
ucuucuccucacagaagccu

SEQ ID NO: 25082 - RNA, 20 nt, Artificial Sequence
  spacer sequence TTCN PAM
ccucacagaagccucauuuc

SEQ ID NO: 25083 - RNA, 20 nt, Artificial Sequence
  spacer sequence TTCN PAM
gugaggagaagaggaaaaua

SEQ ID NO: 25084 - RNA, 20 nt, Artificial Sequence
  spacer sequence TTCN PAM
ugcauuuugccuugccgcgu

SEQ ID NO: 25085 - RNA, 20 nt, Artificial Sequence
  spacer sequence TTCN PAM
cacuuccaaccuacacccuc

SEQ ID NO: 25086 - RNA, 20 nt, Artificial Sequence
  spacer sequence TTCN PAM
aaccuacacccucuccaaau

SEQ ID NO: 25087 - RNA, 20 nt, Artificial Sequence
  spacer sequence TTCN PAM
guucucuggcuccccuguaa

SEQ ID NO: 25088 - RNA, 20 nt, Artificial Sequence
  spacer sequence TTCN PAM
cuggcuccccuguaauugga

SEQ ID NO: 25089 - RNA, 20 nt, Artificial Sequence
  spacer sequence TTCN PAM
aauuacaggggagccagaga

SEQ ID NO: 25090 - RNA, 20 nt, Artificial Sequence
  spacer sequence TTCN PAM
uuuucuuucccuuucaaaaa

SEQ ID NO: 25091 - RNA, 20 nt, Artificial Sequence
  spacer sequence TTCN PAM
uucccuuucaaaaaauuuuc

SEQ ID NO: 25092 - RNA, 20 nt, Artificial Sequence
  spacer sequence TTCN PAM
cuuucaaaaaauuuuccgac

SEQ ID NO: 25093 - RNA, 20 nt, Artificial Sequence
  spacer sequence TTCN PAM
aaaaauuuuccgacaaaauc

SEQ ID NO: 25094 - RNA, 20 nt, Artificial Sequence
  spacer sequence TTCN PAM
gacaaaaucaggcaguauuu

SEQ ID NO: 25095 - RNA, 20 nt, Artificial Sequence
  spacer sequence TTCN PAM
cauccuggggauuacaugag

SEQ ID NO: 25096 - RNA, 20 nt, Artificial Sequence
  spacer sequence TTCN PAM
uuaucauaaggggcuugagg

SEQ ID NO: 25097 - RNA, 20 nt, Artificial Sequence
  spacer sequence TTCN PAM
uuuuucuuuaucauaagggg

SEQ ID NO: 25098 - RNA, 20 nt, Artificial Sequence
  spacer sequence TTCN PAM
uuaccccagcccccacucca

SEQ ID NO: 25099 - RNA, 20 nt, Artificial Sequence
  spacer sequence TTCN PAM
cuuagcaaacuuaaaagacu

SEQ ID NO: 25100 - RNA, 20 nt, Artificial Sequence
  spacer sequence TTCN PAM
gauagucuuuuaaguuugcu

SEQ ID NO: 25101 - RNA, 20 nt, Artificial Sequence
  spacer sequence TTCN PAM
ggcuagccauccagcgcucu

SEQ ID NO: 25102 - RNA, 20 nt, Artificial Sequence
  spacer sequence TTCN PAM
ucuggcuagccauccagcgc

SEQ ID NO: 25103 - RNA, 20 nt, Artificial Sequence
  spacer sequence TTCN PAM
cuuuucuucuggcuagccau

SEQ ID NO: 25104 - RNA, 20 nt, Artificial Sequence
  spacer sequence TTCN PAM
acuacaaccuucccuuuucu

SEQ ID NO: 25105 - RNA, 20 nt, Artificial Sequence
  spacer sequence TTCN PAM
ugcuuuucuuguguagagcc

SEQ ID NO: 25106 - RNA, 20 nt, Artificial Sequence
  spacer sequence TTCN PAM
uguguagagccuccggugcc

SEQ ID NO: 25107 - RNA, 20 nt, Artificial Sequence
  spacer sequence TTCN PAM
aaaaagacccgaggcauugg

SEQ ID NO: 25108 - RNA, 20 nt, Artificial Sequence
  spacer sequence TTCN PAM
caggagcuaaacgcagccug

SEQ ID NO: 25109 - RNA, 20 nt, Artificial Sequence
  spacer sequence TTCN PAM
ggcugcguuuagcuccugag

SEQ ID NO: 25110 - RNA, 20 nt, Artificial Sequence
  spacer sequence TTCN PAM
uggcgcgugcaaaaaaaaaa

SEQ ID NO: 25111 - RNA, 20 nt, Artificial Sequence
  spacer sequence TTCN PAM
ccuuuuuuuuuuuuuuugca

SEQ ID NO: 25112 - RNA, 20 nt, Artificial Sequence
  spacer sequence TTCN PAM
ggaguuuuuuuuuuuuuuuu

SEQ ID NO: 25113 - RNA, 20 nt, Artificial Sequence
  spacer sequence TTCN PAM
guucagaagcaaacgcuacc

SEQ ID NO: 25114 - RNA, 20 nt, Artificial Sequence
  spacer sequence TTCN PAM
gaagcaaacgcuaccuaguu

SEQ ID NO: 25115 - RNA, 20 nt, Artificial Sequence
  spacer sequence TTCN PAM
gaaccgaacuaaaaaaaaaa

SEQ ID NO: 25116 - RNA, 20 nt, Artificial Sequence
  spacer sequence TTCN PAM
uccacucccucccagauccu

SEQ ID NO: 25117 - RNA, 20 nt, Artificial Sequence
  spacer sequence TTCN PAM
acucccucccagauccuacu

SEQ ID NO: 25118 - RNA, 20 nt, Artificial Sequence
  spacer sequence TTCN PAM
acuugggucucuguuuugcc

SEQ ID NO: 25119 - RNA, 20 nt, Artificial Sequence
  spacer sequence TTCN PAM
uucucuuggaucuaggaaca

SEQ ID NO: 25120 - RNA, 20 nt, Artificial Sequence
  spacer sequence TTCN PAM
cuuggaucuaggaacaauag

SEQ ID NO: 25121 - RNA, 20 nt, Artificial Sequence
  spacer sequence TTCN PAM
uagauccaagagaaagaaaa

SEQ ID NO: 25122 - RNA, 20 nt, Artificial Sequence
  spacer sequence TTCN PAM
gagcuuuauagggugaugcc

SEQ ID NO: 25123 - RNA, 20 nt, Artificial Sequence
  spacer sequence TTCN PAM
uuuaauaaaauuaauuaggu

SEQ ID NO: 25124 - RNA, 20 nt, Artificial Sequence
  spacer sequence TTCN PAM
cccaggcugucauauugcau

SEQ ID NO: 25125 - RNA, 20 nt, Artificial Sequence
  spacer sequence TTCN PAM
auccucacaucauaagcuua

SEQ ID NO: 25126 - RNA, 20 nt, Artificial Sequence
  spacer sequence TTCN PAM
ugccccauuugauccugggc

SEQ ID NO: 25127 - RNA, 20 nt, Artificial Sequence
  spacer sequence TTCN PAM
caaggucaaacaaaaaccag

SEQ ID NO: 25128 - RNA, 20 nt, Artificial Sequence
  spacer sequence TTCN PAM
gacaagcucuucacaagguc

SEQ ID NO: 25129 - RNA, 20 nt, Artificial Sequence
  spacer sequence TTCN PAM
gcacaauuggagggacaccc

SEQ ID NO: 25130 - RNA, 20 nt, Artificial Sequence
  spacer sequence TTCN PAM
gggugucccuccaauugugc

SEQ ID NO: 25131 - RNA, 20 nt, Artificial Sequence
  spacer sequence TTCN PAM
cauugccagacggcaguuga

SEQ ID NO: 25132 - RNA, 20 nt, Artificial Sequence
  spacer sequence TTCN PAM
acugccgucuggcaauggga

SEQ ID NO: 25133 - RNA, 20 nt, Artificial Sequence
  spacer sequence TTCN PAM
uaguuuguugucgugacagc

SEQ ID NO: 25134 - RNA, 20 nt, Artificial Sequence
  spacer sequence TTCN PAM
aaauagugagagcuuugggg

SEQ ID NO: 25135 - RNA, 20 nt, Artificial Sequence
  spacer sequence TTCN PAM
cgcugccccacaccucccca

SEQ ID NO: 25136 - RNA, 20 nt, Artificial Sequence
  spacer sequence TTCN PAM
ugaaaauaaucugcuuagaa

SEQ ID NO: 25137 - RNA, 20 nt, Artificial Sequence
  spacer sequence TTCN PAM
agaaaauauccacucuagga

SEQ ID NO: 25138 - RNA, 20 nt, Artificial Sequence
  spacer sequence TTCN PAM
aagcagauuauuuucaagaa

SEQ ID NO: 25139 - RNA, 20 nt, Artificial Sequence
  spacer sequence TTCN PAM
augaaauccaauaugccuuc

SEQ ID NO: 25140 - RNA, 20 nt, Artificial Sequence
  spacer sequence TTCN PAM
uagaaugugauuucuaagca

SEQ ID NO: 25141 - RNA, 20 nt, Artificial Sequence
  spacer sequence TTCN PAM
caagagcgaaggaaaaugua

SEQ ID NO: 25142 - RNA, 20 nt, Artificial Sequence
  spacer sequence TTCN PAM
cucuugagaaggcauauugg

SEQ ID NO: 25143 - RNA, 20 nt, Artificial Sequence
  spacer sequence TTCN PAM
uucgcucuugagaaggcaua

SEQ ID NO: 25144 - RNA, 20 nt, Artificial Sequence
  spacer sequence TTCN PAM
ugccacucugguaauuugaa

SEQ ID NO: 25145 - RNA, 20 nt, Artificial Sequence
  spacer sequence TTCN PAM
aauuaccagaguggcaggaa

SEQ ID NO: 25146 - RNA, 20 nt, Artificial Sequence
  spacer sequence TTCN PAM
aggagguuauuaaaaaugua

SEQ ID NO: 25147 - RNA, 20 nt, Artificial Sequence
  spacer sequence TTCN PAM
gacauauuguucuuugacuu

SEQ ID NO: 25148 - RNA, 20 nt, Artificial Sequence
  spacer sequence TTCN PAM
uugacuuaauaucccugugu

SEQ ID NO: 25149 - RNA, 20 nt, Artificial Sequence
  spacer sequence TTCN PAM
uuaauugccaaaacaaaguu

SEQ ID NO: 25150 - RNA, 20 nt, Artificial Sequence
  spacer sequence TTCN PAM
uuuacaagggcuaacuguau

SEQ ID NO: 25151 - RNA, 20 nt, Artificial Sequence
  spacer sequence TTCN PAM
uaggagauauacaguuagcc

SEQ ID NO: 25152 - RNA, 20 nt, Artificial Sequence
  spacer sequence TTCN PAM
aaugucauagucucaugguu

SEQ ID NO: 25153 - RNA, 20 nt, Artificial Sequence
  spacer sequence TTCN PAM
acauggaucuagaaacguau

SEQ ID NO: 25154 - RNA, 20 nt, Artificial Sequence
  spacer sequence TTCN PAM
agauccauguugaacaaaau

SEQ ID NO: 25155 - RNA, 20 nt, Artificial Sequence
  spacer sequence TTCN PAM
auacauaugcuauacguuuc

SEQ ID NO: 25156 - RNA, 20 nt, Artificial Sequence
  spacer sequence TTCN PAM
agagcucucugaaggaaaau

SEQ ID NO: 25157 - RNA, 20 nt, Artificial Sequence
  spacer sequence TTCN PAM
gagagcucuugaauauuuua

SEQ ID NO: 25158 - RNA, 20 nt, Artificial Sequence
  spacer sequence TTCN PAM
uucagagagcucuugaauau

SEQ ID NO: 25159 - RNA, 20 nt, Artificial Sequence
  spacer sequence TTCN PAM
agcacauuuuccuucagaga

SEQ ID NO: 25160 - RNA, 20 nt, Artificial Sequence
  spacer sequence TTCN PAM
auaaaagaggggguuauuuu

SEQ ID NO: 25161 - RNA, 20 nt, Artificial Sequence
  spacer sequence TTCN PAM
uuuuacuaucuauagaucua

SEQ ID NO: 25162 - RNA, 20 nt, Artificial Sequence
  spacer sequence TTCN PAM
uucuuuuuacuaucuauaga

SEQ ID NO: 25163 - RNA, 20 nt, Artificial Sequence
  spacer sequence TTCN PAM
uucauucuuuuuacuaucua

SEQ ID NO: 25164 - RNA, 20 nt, Artificial Sequence
  spacer sequence TTCN PAM
caguuucuuucauucuuuuu

SEQ ID NO: 25165 - RNA, 20 nt, Artificial Sequence
  spacer sequence TTCN PAM
guguaauucacaguuucuuu

SEQ ID NO: 25166 - RNA, 20 nt, Artificial Sequence
  spacer sequence TTCN PAM
uagcuuccauguuacagagc

SEQ ID NO: 25167 - RNA, 20 nt, Artificial Sequence
  spacer sequence TTCN PAM
auguuacagagcuuuaggaa

SEQ ID NO: 25168 - RNA, 20 nt, Artificial Sequence
  spacer sequence TTCN PAM
uaaagcucuguaacauggaa

SEQ ID NO: 25169 - RNA, 20 nt, Artificial Sequence
  spacer sequence TTCN PAM
gauugaagcucugccuugua

SEQ ID NO: 25170 - RNA, 20 nt, Artificial Sequence
  spacer sequence TTCN PAM
aucugaaaguuuggggacua

SEQ ID NO: 25171 - RNA, 20 nt, Artificial Sequence
  spacer sequence TTCN PAM
agacaaaccucagaccguac

SEQ ID NO: 25172 - RNA, 20 nt, Artificial Sequence
  spacer sequence TTCN PAM
acacucauguaauuuaacag

SEQ ID NO: 25173 - RNA, 20 nt, Artificial Sequence
  spacer sequence TTCN PAM
ucuccaaaccuguuaaauua

SEQ ID NO: 25174 - RNA, 20 nt, Artificial Sequence
  spacer sequence TTCN PAM
cacaacuguugucauccuau

SEQ ID NO: 25175 - RNA, 20 nt, Artificial Sequence
  spacer sequence TTCN PAM
aauauaugcaguucuaacag

SEQ ID NO: 25176 - RNA, 20 nt, Artificial Sequence
  spacer sequence TTCN PAM
aacagcuuucauucuaagac

SEQ ID NO: 25177 - RNA, 20 nt, Artificial Sequence
  spacer sequence TTCN PAM
uucuaagacgccaaaccuuc

SEQ ID NO: 25178 - RNA, 20 nt, Artificial Sequence
  spacer sequence TTCN PAM
aagacgccaaaccuuccgaa

SEQ ID NO: 25179 - RNA, 20 nt, Artificial Sequence
  spacer sequence TTCN PAM
gaaaauagaauggcuuaaca

SEQ ID NO: 25180 - RNA, 20 nt, Artificial Sequence
  spacer sequence TTCN PAM
gaagguuuggcgucuuagaa

SEQ ID NO: 25181 - RNA, 20 nt, Artificial Sequence
  spacer sequence TTCN PAM
auuuucggaagguuuggcgu

SEQ ID NO: 25182 - RNA, 20 nt, Artificial Sequence
  spacer sequence TTCN PAM
uuuuuauauuaaaaguccaa

SEQ ID NO: 25183 - RNA, 20 nt, Artificial Sequence
  spacer sequence TTCN PAM
cauaaaauguuuuuuuauca

SEQ ID NO: 25184 - RNA, 20 nt, Artificial Sequence
  spacer sequence TTCN PAM
accaaaaaagcaaacaucuu

SEQ ID NO: 25185 - RNA, 20 nt, Artificial Sequence
  spacer sequence TTCN PAM
agauguuugcuuuuuuggua

(The sequence listing continues in the following parts.)

What is claimed is:

1. A system comprising a Class 2 Type V CRISPR protein and a first guide ribonucleic acid (gRNA), wherein the gRNA comprises a targeting sequence complementary to a target nucleic acid sequence comprising a polypyrimidine tract-binding protein 1 (BCL11A) gene.

2. The system of claim 1, wherein the gRNA comprises a targeting sequence complementary to a target nucleic acid sequence selected from the group consisting of:
a. a BCL11A intron;
b. a BCL11A exon;
c. a BCL11A intron-exon junction;
d. a BCL11A regulatory element; and
e. an intergenic region.

3. The system of claim 1 or claim 2, wherein the BCL11A gene comprises a wild-type sequence.

4. The system of any one of claims 1-3, wherein the gRNA is a single-molecule gRNA (sgRNA).

5. The system of any one of claims 1-4, wherein the gRNA is a dual-molecule gRNA (dgRNA).

6. The system of any one of claims 1-5, wherein the targeting sequence of the gRNA comprises a sequence selected from the group consisting of SEQ ID NOS: 272-2100 and 2286-26789, or a sequence having at least about 65%, at least about 75%, at least about 85%, or at least about 95% identity thereto.

7. The system of any one of claims 1-5, wherein the targeting sequence of the gRNA comprises a sequence selected from the group consisting of SEQ ID NOS: 272-2100 and 2286-26789.

8. The system of claim 7, wherein the targeting sequence has a single nucleotide removed from the 3′ end of the sequence.

9. The system of claim 7, wherein the targeting sequence has two nucleotides removed from the 3′ end of the sequence.

10. The system of claim 7, wherein the targeting sequence has three nucleotides removed from the 3′ end of the sequence.

11. The system of claim 7, wherein the targeting sequence has four nucleotides removed from the 3′ end of the sequence.

12. The system of claim 7, wherein the targeting sequence has five nucleotides removed from the 3′ end of the sequence.

13. The system of any one of claims 1-12, wherein the targeting sequence of the gRNA is complementary to a sequence of a BCL11A exon.

14. The system of claim 13, wherein the targeting sequence of the gRNA is complementary to a sequence selected from the group consisting of a BCL11A exon 1 sequence, BCL11A exon 2 sequence, BCL11A exon 3 sequence, BCL11A exon 4 sequence, BCL11A exon 5 sequence, BCL11A exon 6 sequence, BCL11A exon 7 sequence, BCL11A exon 8 sequence, and a BCL11A exon 9 sequence.

15. The system of claim 14, wherein the targeting sequence of the gRNA is complementary to a sequence selected from the group consisting of a BCL11A exon 1 sequence, BCL11A exon 2 sequence, and a BCL11A exon 3 sequence.

16. The system of any one of claims 1-12, wherein the targeting sequence of the gRNA is complementary to a sequence of a BCL11A regulatory element.

17. The system of claim 16, wherein the targeting sequence of the gRNA is complementary to a sequence of a promoter of the BCL11A gene.

18. The system of claim 16, wherein the targeting sequence of the gRNA is complementary to a sequence of an enhancer regulatory element.

19. The system of claim 18, wherein the targeting sequence of the gRNA is complementary to a sequence that comprises a GATA1 erythroid-specific enhancer binding site (GATA1) of the BCL11A gene.

20. The system of claim 16, wherein the targeting sequence of the gRNA is complementary to a sequence that is 5′ to the GATA1 binding site of the BCL11A gene.

21. The system of claim 19 or claim 20, wherein the targeting sequence of the gRNA comprises a sequence of UGGAGCCUGUGAUAAAAGCA (SEQ ID NO: 22), or a sequence having at least 90% or 95% sequence identity thereto.

22. The system of claim 19, wherein the targeting sequence of the gRNA consists of a sequence of UGGAGCCUGUGAUAAAAGCA (SEQ ID NO: 22).

23. The system of claim 18, wherein the targeting sequence of the gRNA comprises a sequence of UGCUUUUAUCACAGGCUCCA (SEQ ID NO: 23), or a sequence having at least 90% or 95% sequence identity thereto.

24. The system of claim 18, wherein the targeting sequence of the gRNA consists of a sequence of UGCUUUUAUCACAGGCUCCA (SEQ ID NO: 23).

25. The system of claim 19 or claim 20, wherein the targeting sequence of the gRNA comprises a sequence of CAGGCUCCAGGAAGGGUUUG (SEQ ID NO: 2949), or a sequence having at least 90% or 95% sequence identity thereto.

26. The system of claim 19 or claim 20, wherein the targeting sequence of the gRNA consists of a sequence of CAGGCUCCAGGAAGGGUUUG (SEQ ID NO: 2949).

27. The system of claim 19 or claim 20, wherein the targeting sequence of the gRNA comprises a sequence of GAGGCCAAACCCUUCCUGGA (SEQ ID NO: 2948), or a sequence having at least 90% or 95% sequence identity thereto.

28. The system of claim 19 or claim 20, wherein the targeting sequence of the gRNA consists of a sequence of CAGGCUCCAGGAAGGGUUUG (SEQ ID NO: 2948).

29. The system of claim 19 or claim 20, wherein the targeting sequence of the gRNA comprises a sequence of AGUGCAAGCUAACAGUUGCU (SEQ ID NO: 15747), or a sequence having at least 90% or 95% sequence identity thereto.

30. The system of claim 19 or claim 20, wherein the targeting sequence of the gRNA consists of a sequence of AGUGCAAGCUAACAGUUGCU (SEQ ID NO: 15747).

31. The system of claim 19 or claim 20, wherein the targeting sequence of the gRNA comprises a sequence of AUACAACUUUGAAGCUAGUC (SEQ ID NO: 15748), or a sequence having at least 90% or 95% sequence identity thereto.

32. The system of claim 19 or claim 20, wherein the targeting sequence of the gRNA consists of a sequence of AUACAACUUUGAAGCUAGUC (SEQ ID NO: 15748).

33. The system of any one of claims 1-32, further comprising a second gRNA, wherein the second gRNA has a targeting sequence complementary to a different or overlapping portion of the BCL11A target nucleic acid compared to the targeting sequence of the gRNA of the first gRNA.

34. The system of claim 33, wherein the targeting sequence of the second gRNA is complementary to a sequence of the target nucleic acid that is 5′ or 3′ to the GATA1 binding site sequence.

35. The system of claim 33, wherein the first and the second gRNA each have a targeting sequence complementary to a sequence within the promoter of the BCL11A gene.

36. The system of any one of claims 1-35, wherein the first or second gRNA has a scaffold comprising a sequence selected from the group consisting of SEQ ID NOS: 2238-2285, 26794-26839 and 27219-27265, or a sequence having at least about 50%, at least about 60%, at least about 70%, at least about 80%, at least about 90%, at least about 95%, at least about 96%, at least about 97%, at least about 98%, at least about 99% sequence identity thereto.

37. The system of any one of claims 1-36, wherein the first or second gRNA has a scaffold comprising a sequence selected from the group consisting of SEQ ID NOs: 2238-2285, 26794-26839 and 27219-27265.

38. The system of any one of claims 1-36, wherein the first or second gRNA has a scaffold consisting of a sequence selected from the group consisting of SEQ ID NOs: 2238-2285, 26794-26839 and 27219-27265.

39. The system of claim 38, wherein the first or second gRNA has a scaffold consisting of the sequence of SEQ ID NO: 2238 or SEQ ID NO: 26800.

40. The system of any one of claims 36-39, wherein targeting sequence is linked to the 3′ end of the scaffold of the gRNA.

41. The system of any one of claims 1-40, wherein the Class 2 Type V CRISPR protein is a CasX variant protein comprising a sequence selected from the group consisting of SEQ ID NOS: 59, 72-99, 101-148, and 26908-27154, or a sequence having at least about 50%, at least about 60%, at least about 70%, at least about 80%, at least about 90%, or at least about 95%, or at least about 95%, or at least about 96%, or at least about 97%, or at least about 98%, or at least about 99% sequence identity thereto.

42. The system of claim 41, wherein the Class 2 Type V CRISPR protein is a CasX variant protein comprising a sequence selected from the group consisting of SEQ ID NOS: 59, 72-99, 101-148, and 26908-27154.

43. The system of claim 41, wherein the CasX variant protein consists of a sequence selected from the group consisting of SEQ ID NOS: 59, 72-99, 101-148, and 26908-27154.

44. The system of claim 42, wherein the CasX variant protein consists of a sequence selected from the group consisting of SEQ ID NOS: 126, 27043, 27046, 27050.

45. The system of claim 41, wherein the CasX variant protein comprises at least one modification relative to a reference CasX protein having a sequence selected from SEQ ID NOS:1-3.

46. The system of claim 45, wherein the at least one modification comprises at least one amino acid substitution, deletion, or substitution in a domain of the CasX variant protein relative to the reference CasX protein.

47. The system of claim 46, wherein the domain is selected from the group consisting of a non-target strand binding (NTSB) domain, a target strand loading (TSL) domain, a helical I domain, a helical II domain, an oligonucleotide binding domain (OBD), and a RuvC DNA cleavage domain.

48. The system of any one of claims 41-47, wherein the CasX variant protein does not comprise an HNH domain.

49. The system of any one of claims 41-48, wherein the CasX variant protein further comprises one or more nuclear localization signals (NLS).

50. The system of claim 49, wherein the one or more NLS are selected from the group of sequences consisting of PKKKRKV (SEQ ID NO: 168), KRPAATKKAGQAKKKK (SEQ ID NO: 169), PAAKRVKLD (SEQ ID NO: 170), RQRRNELKRSP (SEQ ID NO: 171), NQSSNFGPMKGGNFGGRSSGPYGGGGQYFAKPRNQGGY (SEQ ID NO: 172), RMRIZFKNKGKDTAELRRRRVEVSVELRKAKKDEQILKRRNV (SEQ ID NO: 173), VSRKRPRP (SEQ ID NO: 174), PPKKARED (SEQ ID NO: 175), PQPKKKPL (SEQ ID NO: 176), SALIKKKKKMAP (SEQ ID NO: 177), DRLRR (SEQ ID NO: 178), PKQKKRK (SEQ ID NO: 179), RKLKKKIKKL (SEQ ID NO: 180), REKKKFLKRR (SEQ ID NO: 181), KRKGDEVDGVDEVAKKKSKK (SEQ ID NO: 182), RKCLQAGMNLEARKTKK (SEQ ID NO: 183), PRPRKIPR (SEQ ID NO: 184), PPRKKRTVV (SEQ ID NO: 185), NLSKKKKRKREK (SEQ ID NO: 186), RRPSRPFRKP (SEQ ID NO: 187), KRPRSPSS (SEQ ID NO: 188), KRGINDRNFWRGENERKTR (SEQ ID NO: 189), PRPPKMARYDN (SEQ ID NO: 190), KRSFSKAF (SEQ ID NO: 191), KLKIKRPVK (SEQ ID NO: 192), PKKKRKVPPPPAAKRVKLD (SEQ ID NO: 193), PKTRRRPRRSQRKRPPT (SEQ ID NO:26792), SRRRKANPTKLSENAKKLAKEVEN (SEQ ID NO: 194), KTRRRPRRSQRKRPPT (SEQ ID NO: 195), RRKKRRPRRKKRR (SEQ ID NO: 196), PKKKSRKPKKKSRK (SEQ ID NO: 197), HKKKHPDASVNFSEFSK (SEQ ID NO: 198), QRPGPYDRPQRPGPYDRP (SEQ ID NO: 199), LSPSLSPLLSPSLSPL (SEQ ID NO: 200), RGKGGKGLGKGGAKRHRK (SEQ ID NO: 201), PKRGRGRPKRGRGR (SEQ ID NO: 202), PKKKRKVPPPPAAKRVKLD (SEQ ID NO: 203), PKKKRKVPPPPKKKRKV (SEQ ID NO: 204), PAKRARRGYKC (SEQ ID NO: 27199), KLGPRKATGRW (SEQ ID NO: 27200), PRRKREE (SEQ ID NO: 27201), PYRGRKE (SEQ ID NO: 27202), PLRKRPRR (SEQ ID NO: 27203), PLRKRPRRGSPLRKRPRR (SEQ ID NO: 27204), PAAKRVKLDGGKRTADGSEFESPKKKRKV (SEQ ID NO: 27205), PAAKRVKLDGGKRTADGSEFESPKKKRKVGIHGVPAA (SEQ ID NO: 27206), PAAKRVKLDGGKRTADGSEFESPKKKRKVAEAAAKEAAAKEAAAKA (SEQ ID NO: 207), PAAKRVKLDGGKRTADGSEFESPKKKRKVPG (SEQ ID NO: 27208), KRKGSPERGERKRHW (SEQ ID NO: 27209), KRTADSQHSTPPKTKRKVEFEPKKKRKV (SEQ ID NO: 27210), and PKKKRKVGGSKRTADSQHSTPPKTKRKVEFEPKKKRKV (SEQ ID NO: 27211), wherein the one or more NLS are linked to the CRISPR protein or to adjacent NLS with a linker peptide wherein the linker peptide is selected from the group consisting of RS, (G)n (SEQ ID NO: 27212), (GS)n (SEQ ID NO: 27213), (GSGGS)n (SEQ ID NO: 214), (GGSGGS)n (SEQ ID NO: 215), (GGGS)n (SEQ ID NO: 216), GGSG (SEQ ID NO: 217), GGSGG (SEQ ID NO: 218), GSGSG (SEQ ID NO: 219), GSGGG (SEQ ID NO: 220), GGGSG (SEQ ID NO: 221), GSSSG (SEQ ID NO: 222), GPGP (SEQ ID NO: 223), GGP, PPP, PPAPPA (SEQ ID NO: 224), PPPG (SEQ ID NO: 27214), PPPGPPP (SEQ ID NO: 225), PPP(GGGS)n (SEQ ID NO: 27215), (GGGS)nPPP (SEQ ID NO: 27216), AEAAAKEAAAKEAAAKA (SEQ ID NO: 27217), and TPPKTKRKVEFE (SEQ ID NO: 27218), wherein n is 1 to 5.

51. The system of claim 49 or claim 50, wherein the one or more NLS are located at or near the C-terminus of the CasX variant protein.

52. The system of claim 49 or claim 50, wherein the one or more NLS are located at or near the N-terminus of the CasX variant protein.

53. The system of claim 49 or claim 50, comprising one or more NLS located at or near the N-terminus and at or near the C-terminus of the CasX variant protein.

54. The system of any one of claims 41-53, wherein the CasX variant is capable of forming a ribonuclear protein complex (RNP) with a guide nucleic acid (gRNA).

55. The system of claim 54, wherein an RNP of the CasX variant protein and the gRNA variant exhibit at least one or more improved characteristics as compared to an RNP of a reference CasX protein of SEQ ID NO: 1, SEQ ID NO: 2, or SEQ ID NO: 3 and a gRNA comprising a sequence of any one of SEQ ID NOs: 4-16.

56. The system of claim 55, wherein the improved characteristic is selected from one or more of the group consisting of improved folding of the CasX variant; improved binding affinity to a guide nucleic acid (gRNA); improved binding affinity to a target DNA; improved ability to utilize a greater spectrum of one or more protospacer adjacent motif (PAM) sequences, including ATC, CTC, GTC, or TTC, in the editing of target DNA; improved unwinding of the target DNA; increased editing activity; improved editing efficiency; improved editing specificity; increased nuclease activity; improved target nucleic acid sequence cleavage rate; increased target strand loading for double strand cleavage; decreased target strand loading for single strand nicking; decreased off-target cleavage; improved binding of non-target DNA strand; improved protein stability; improved protein solubility; improved ribonuclear protein complex (RNP) formation; higher percentage of cleavage-competent RNP; improved protein:gRNA complex (RNP) stability; improved protein:gRNA complex solubility; improved protein yield; improved protein expression; and improved fusion characteristics.

57. The system of claim 55 or claim 56, wherein the improved characteristic of the RNP of the CasX variant protein and the gRNA variant is at least about 1.1 to about 100-fold or more improved relative to the RNP of the reference CasX protein of SEQ ID NO: 1, SEQ ID NO: 2, or SEQ ID NO: 3 and the gRNA comprising a sequence of any one of SEQ ID NOs: 4-16.

58. The system of claim 55 or claim 56, wherein the improved characteristic of the CasX variant protein is at least about 1.1, at least about 2, at least about 10, at least about 100-fold or more improved relative to the reference CasX protein of SEQ ID NO: 1, SEQ ID NO: 2, or SEQ ID NO: 3 and the gRNA comprising a sequence of any one of SEQ ID NOs: 4-16.

59. The system of claim 55 or claim 56, wherein the improved characteristic of the CasX variant protein is at least about 1.1, at least about 2, at least about 10, at least about 100-fold or more improved relative to the reference CasX protein of SEQ ID NO: 1, SEQ ID NO: 2, or SEQ ID NO: 3 and the gNA comprising a sequence of any one of SEQ ID NOS: 4-16.

60. The system of any one of claims 55-59, wherein the improved characteristic comprises editing efficiency, and the RNP of the CasX variant protein and the gRNA variant comprises a 1.1 to 100-fold improvement in editing efficiency compared to the RNP of the reference CasX protein of SEQ ID NO: 2 and the gRNA of any one of SEQ ID NOs: 4-16.

61. The system of any one of claims 54-59, wherein the RNP comprising the CasX variant and the gRNA variant exhibits greater editing efficiency and/or binding of a target nucleic acid sequence when any one of the PAM sequences TTC, ATC, GTC, or CTC is located 1 nucleotide 5′ to the non-target strand of a protospacer having identity with the targeting sequence of the gRNA in a cellular assay system compared to the editing efficiency and/or binding of an RNP comprising a reference CasX protein and a reference gRNA in a comparable assay system.

62. The system of claim 61, wherein the PAM sequence is TTC.

63. The system of claim 62, wherein the targeting sequence of the gRNA comprises a sequence selected from the group consisting of SEQ ID NOS: 17904-26789.

64. The system of claim 61, wherein the PAM sequence is ATC.

65. The system of claim 64, wherein the targeting sequence of the gRNA comprises a sequence selected from the group consisting of SEQ ID NOS: 272-2100 and 2286-5625.

66. The system of claim 61, wherein the PAM sequence is CTC.

67. The system of claim 66, wherein the targeting sequence of the gRNA comprises a sequence selected from the group consisting of SEQ ID NOS: 5626-13616.

68. The system of claim 61, wherein the PAM sequence is GTC.

69. The system of claim 66, wherein the targeting sequence of the gRNA comprises a sequence selected from the group consisting of SEQ ID NOS: 13617-17903.

70. The system of any one of claims 61-68, wherein the increased binding affinity for the one or more PAM sequences is at least 1.5-fold greater compared to the binding affinity of any one of the reference CasX proteins of SEQ ID NOS: 1-3 for the PAM sequences.

71. The system of any one of claims 54-70, wherein the RNP has at least a 5%, at least a 10%, at least a 15%, or at least a 20% higher percentage of cleavage-competent RNP compared to an RNP of the reference CasX protein and the gRNA of SEQ ID NOs: 4-16.

72. The system of any one of claims 41-71, wherein the CasX variant protein comprises a RuvC DNA cleavage domain having nickase activity.

73. The system of any one of claims 41-71, wherein the CasX variant protein comprises a RuvC DNA cleavage domain having double-stranded cleavage activity.

74. The system of any one of claims 1-54, wherein the CasX protein is a catalytically inactive CasX (dCasX) protein, and wherein the dCasX and the gRNA retain the ability to bind to the BCL11A target nucleic acid.

75. The system of claim 74, wherein the dCasX comprises a mutation at residues:
a. D672, E769, and/or D935 corresponding to the CasX protein of SEQ ID NO:1; or
b. D659, E756 and/or D922 corresponding to the CasX protein of SEQ ID NO: 2.

76. The system of claim 75, wherein the mutation is a substitution of alanine for the residue.

77. The system of any one of claims 1-73, further comprising a donor template nucleic acid.

78. The system of claim 77, wherein the donor template comprises a nucleic acid comprising at least a portion of a BCL11A gene selected from the group consisting of a BCL11A exon, a BCL11A intron, a BCL11A intron-exon junction, a BCL11A regulatory element, and the GATA1 binding site sequence.

79. The system of claim 78, wherein the donor template sequence comprises one or more mutations relative to a corresponding portion of a wild-type BCL11A gene.

80. The system of claim 78 or claim 79, wherein the donor template comprises a nucleic acid comprising at least a portion of a BCL11A exon selected from the group consisting of BCL11A exon 1, BCL11A exon 2, BCL11A exon 3, BCL11A exon 4, BCL11A exon 5, BCL11A exon 6, BCL11A exon 7, BCL11A exon 8, and BCL11A exon 9.

81. The system of claim 80, wherein the donor template comprises a nucleic acid comprising at least a portion of a BCL11A exon selected from the group consisting of BCL11A exon 1, BCL11A exon 2, and BCL11A exon 3.

82. The system of any one of claims 77-81, wherein the donor template ranges in size from 10-15,000 nucleotides.

83. The system of any one of claims 77-82, wherein the donor template is a single-stranded DNA template or a single stranded RNA template.

84. The system of any one of claims 77-82, wherein the donor template is a double-stranded DNA template.

85. The system of any one of claims 77-84, wherein the donor template comprises homologous arms at or near the 5′ and 3′ ends of the donor template that are complementary to sequences flanking cleavage sites in the BCL11A target nucleic acid introduced by the Class 2 Type V CRISPR protein.

86. A nucleic acid comprising the donor template of any one of claims 77-85.

87. A nucleic acid comprising a sequence that encodes the CasX of any one of claims 41-76.

88. A nucleic acid comprising a sequence that encodes the gRNA of any one of claims 1-40.

89. The nucleic acid of claim 87, wherein the sequence that encodes the CasX protein is codon optimized for expression in a eukaryotic cell.

90. A vector comprising the gRNA of any one of claims 1-40, the CasX protein of any one of claims 41-76, or the nucleic acid of any one of claims 86-89.

91. The vector of claim 90, wherein the vector further comprises one or more promoters.

92. The vector of claim 90 or claim 91, wherein the vector is selected from the group consisting of a retroviral vector, a lentiviral vector, an adenoviral vector, an adeno-associated viral (AAV) vector, a herpes simplex virus (HSV) vector, a virus-like particle (VLP), a CasX delivery particle (XDP), a plasmid, a minicircle, a nanoplasmid, a DNA vector, and an RNA vector.

93. The vector of claim 92, wherein the vector is an AAV vector.

94. The vector of claim 93, wherein the AAV vector is selected from AAV1, AAV2, AAV3, AAV4, AAV5, AAV6, AAV7, AAV8, AAV9, AAV10, AAV-Rh74, or AAVRh10.

95. The vector of claim 94, wherein the AAV vector is selected from AAV1, AAV2, AAV5, AAV8, or AAV9.

96. The vector of claim 94 or claim 95, wherein the AAV vector comprises a nucleic acid comprising the following components:
a. 5′ ITR;
b. a 3′ ITR; and
c. a transgene comprising the nucleic acid of claim 87 operably linked to a first promoter and the nucleic acid of claim 88 operably linked to a second promoter.

97. The vector of claim 96, wherein the nucleic acid further comprises a poly(A) sequence 3′ to the sequence encoding the CasX protein.

98. The vector of claim 96 or claim 97, wherein the nucleic acid further comprises one or more enhancer elements.

99. The vector of any one of claims 96-98, wherein a single AAV particle is capable of containing the nucleic acid, wherein the AAV particle has all the components necessary to transduce and effectively modify a target nucleic in a target cell.

100. The vector of claim 92, wherein the vector is a retroviral vector.

101. The vector of claim 92, wherein the vector is a XDP comprising one or more components of a gag polyprotein.

102. The vector of claim 101, wherein the one or more components of the gag polyprotein are selected from the group consisting of a matrix protein (MA), a nucleocapsid protein (NC), a capsid protein (CA), a p1 peptide, a p6 peptide, a P2A peptide, a P2B peptide, a P10 peptide, a p12 peptide, a PP 21/24 peptide, a P12/P3/P8 peptide, and a P20 peptide.

103. The vector of claim 101 or claim 102, wherein the XDP comprises the one or more components of the gag polyprotein, the CasX variant protein, and the gRNA.

104. The vector of claim 103, wherein the CasX variant protein and the gRNA are associated together in an RNP.

105. The vector of any one of claims 101-104, further comprising the donor template.

106. The vector of any one of claims 101-104, further comprising a pseudotyping viral envelope glycoprotein or antibody fragment that provides for binding and fusion of the XDP to a target cell.

107. The vector of claim 106, wherein the target cell is selected from the group consisting of a hematopoietic stem cell (HSC), a hematopoietic progenitor cell (HPC), a CD34+ cell, a mesenchymal stem cell (MSC), an embryonic stem (ES) cell, an induced pluripotent stem cell (iPSC), a common myeloid progenitor cell, a proerythroblast cell, and an erythroblast cell.

108. A host cell comprising the vector of any one of claims 90-107.

109. The host cell of claim 108, wherein the host cell is selected from the group consisting of Baby Hamster Kidney fibroblast (BHK) cells, human embryonic kidney 293 (HEK293) cells, human embryonic kidney 293T (HEK293T) cells, NS0 cells, SP2/0 cells, YO myeloma cells, P3X63 mouse myeloma cells, PER cells, PER.C6 cells, hybridoma cells, NIH3T3 cells, CV-1 (simian) in Origin with SV40 genetic material (COS) cells, HeLa, Chinese hamster ovary (CHO) cells, and yeast cells.

110. A method of modifying a BCL11A target nucleic acid sequence in a population of cells, the method comprising introducing into cells of the population:
a. the system of any one of claims 1-85;
b. the nucleic acid of any one of claims 86-89;
c. the vector as in any one of claims 90-100;
d. the XDP of any one of claims 101-107; or
e. combinations of two or more of (a)-(d),
wherein the BCL11A gene target nucleic acid sequence of the cells targeted by the first gRNA is modified by the CasX variant protein.

111. The method of claim 110, wherein the modifying comprises introducing a single-stranded break in the BCL11A gene target nucleic acid sequence of the cells of the population.

112. The method of claim 110, wherein the modifying comprises introducing a double-stranded break in the BCL11A gene target nucleic acid sequence of the cells of the population.

113. The method of any one of claims 110-112, further comprising introducing into the cells of the population a second gRNA or a nucleic acid encoding the second gRNA, wherein the second gRNA has a targeting sequence complementary to a different or overlapping portion of the BCL11A gene target nucleic acid compared to the first gRNA, resulting in an additional break in the BCL11A target nucleic acid of the cells of the population.

114. The method of any one of claims 110-113, wherein the modifying comprises introducing an insertion, deletion, substitution, duplication, or inversion of one or more nucleotides in the BCL11A gene of the cells of the population.

115. The method of claim 110-114, wherein a GATA1 binding site sequence of the target nucleic acid is modified.

116. The method of any one of claims 110-113, wherein the method comprises insertion of the donor template into the break site(s) of the BCL11A gene target nucleic acid sequence of the cells of the population.

117. The method of claim 114, wherein the insertion of the donor template is mediated by homology-directed repair (HDR) or homology-independent targeted integration (HITI).

118. The method of claim 116 or claim 117, wherein the GATA1 binding site sequence of the target nucleic acid is modified.

119. The method of any one of claims 116-118, wherein insertion of the donor template results in a knock-down or knock-out of the BCL11A gene in the cells of the population.

120. The method of any one of claims 110-119, wherein the BCL11A gene of the cells of the population is modified such that expression of the BCL11A protein is reduced by at least about 10%, at least about 20%, at least about 30%, at least about 40%, at least about 50%, at least about 60%, at least about 70%, at least about 80%, or at least about 90% in comparison to cells in which the BCL11A gene has not been modified.

121. The method of any one of claims 110-119, wherein the BCL11A gene of the cells of the population is modified such that at least about 10%, at least about 20%, at least about 30%, at least about 40%, at least about 50%, at least about 60%, at least about 70%, at least about 80%, or at least about 90% of the modified cells do not express a detectable level of BCL11A protein.

122. The method of any one of claims 110-121, wherein the cells are eukaryotic.

123. The method of claim 122, wherein the eukaryotic cells are selected from the group consisting of rodent cells, mouse cells, rat cells, and non-human primate cells.

124. The method of claim 122, wherein the eukaryotic cells are human cells.

125. The method of any one of claims 122-124, wherein the eukaryotic cell is selected from the group consisting of a hematopoietic stem cell (HSC), a hematopoietic progenitor cell (HPC), a CD34+ cell, a mesenchymal stem cell (MSC), induced pluripotent stem cell (iPSC), a common myeloid progenitor cell, a proerythroblast cell, and an erythroblast cell.

126. The method of any one of claim 110-125, wherein the modification of the BCL11A gene target nucleic acid sequence of the population of cells occurs in vitro or ex vivo.

127. The method of any one of claim 110-125, wherein the modification of the BCL11A gene target nucleic acid sequence of the population of cells occurs in vivo in a subject.

128. The method of claim 127, wherein the subject is selected from the group consisting of a rodent, a mouse, a rat, and a non-human primate.

129. The method of claim 127, wherein the subject is a human.

130. The method of any one of claims 127-129, wherein the method comprises administering a therapeutically effective dose of the AAV vector to the subject.

131. The method of claim 130, wherein the AAV vector is administered to the subject at a dose of at least about 1×10⁵ vector genomes/kg (vg/kg), at least about 1×10⁶ vg/kg, at least about 1×10⁷ vg/kg, at least about 1×10⁸ vg/kg, at least about 1×10⁹ vg/kg, at least about 1×10¹⁰ vg/kg, at least about 1×10¹¹ vg/kg, at least about 1×10¹² vg/kg, at least about 1×10¹³ vg/kg, at least about 1×10¹⁴ vg/kg, at least about 1×10¹⁵ vg/kg, or at least about 1×10¹⁶ vg/kg.

132. The method of claim 130, wherein the AAV vector is administered to the subject at a dose of at least about 1×10⁵ vg/kg to about 1×10¹⁶ vg/kg, at least about 1×10⁶ vg/kg to about 1×10¹⁵ vg/kg, or at least about 1×10⁷ vg/kg to about 1×10¹⁴ vg/kg.

133. The method of any one of claims 127-129, wherein the method comprises administering a therapeutically effective dose of a XDP to the subject.

134. The method of claim 133, wherein the XDP is administered to the subject at a dose of at least about 1×10⁵ particles/kg, at least about 1×10⁶ particles/kg, at least about 1×10⁷ particles/kg at least about 1×10⁸ particles/kg, at least about 1×10⁹ particles/kg, at least about 1×10¹⁰ particles/kg, at least about 1×10¹¹ particles/kg, at least about 1×10¹² particles/kg, at least about 1×10¹³ particles/kg, at least about 1×10¹⁴ particles/kg, at least about 1×10¹⁵ particles/kg, at least about 1×10¹⁶ particles/kg.

135. The method of claim 133, wherein the XDP is administered to the subject at a dose of at least about 1×10⁵ particles/kg to about 1×10¹⁶ particles/kg, or at least about 1×10⁶ particles/kg to about 1×10¹⁵ particles/kg, or at least about 1×10⁷ particles/kg to about 1×10¹⁴ particles/kg

136. The method of any one of claims 128-135, wherein the vector or XDP is administered to the subject by a route of administration selected from transplantation, local injection, systemic infusion, or combinations thereof.

137. The method of any one of claims 128-136, wherein the method results in an increased levels of hemoglobin F (HbF) in circulating blood of the subject of at least about 5%, at least about 10%, at least about 20%, at least about 30%, at least about 40%, or at least about 50% compared to the levels of HbF in the subject prior to treatment.

138. The method of any one of claims 128-137, wherein the method results in a ratio of HbF to hemoglobin S (HbS) in circulating blood of the subject of at least 0.01:1.0, at least 0.025:1.0, at least 0.05:1.0, at least 0.075:1.0 at least 0.1:1.0, at least 0.2:1.0, at least 0.3:1.0, at least 0.4:1.0, at least 0.5:1:0, at least 0.75:1.0, at least 1.0:1.0, at least 1.25:1.0, at least 1.5:1.0, or at least 1.75:1.0.

139. The method of any one of claims 128-138, wherein the method results in HbF levels of at least about 5%, or at least about 10%, or at least about 20%, or at least about 30% of total hemoglobin in circulating blood of the subject.

140. The method of any one of claims 110-139, further comprising contacting the BCL11A gene target nucleic acid sequence of the population of cells with:
a. an additional CRISPR nuclease and a gRNA targeting a different or overlapping portion of the BCL11A target nucleic acid compared to the first gRNA;
b. a polynucleotide encoding the additional CRISPR nuclease and the gRNA of (a);
c. a vector comprising the polynucleotide of (b); or
d. a XDP comprising the additional CRISPR nuclease and the gRNA of (a) wherein the contacting results in modification of the BCL11A gene at a different location in the sequence compared to the sequence targeted by the first gRNA.

141. The method of claim 140, wherein the additional CRISPR nuclease is a CasX protein having a sequence different from the CasX protein of any of the preceding claims.

142. The method of claim 140, wherein the additional CRISPR nuclease is not a CasX protein.

143. The method of claim 142, wherein the additional CRISPR nuclease is selected from the group consisting of Cas9, Cas12a, Cas12b, Cas12c, Cas12d (CasY), Cas12j, Cas12k, Cas13a, Cas13b, Cas13c, Cas13d, Cas14, Cpf1, C2cl, Csn2, and sequence variants thereof.

144. A population of cells modified by the method of any one of claims 110-143, wherein the cells have been modified such that at least 70%, at least 75%, at least 80%, at least 85%, at least 90%, or at least 95% of the modified cells do not express a detectable level of BCL11A protein.

145. A population of cells modified by the method of any one of claims 110-143, wherein the cells have been modified such that the expression of BCL11A protein is reduced by at least 70%, at least 75%, at least 80%, at least 85%, at least 90%, or at least 95% compared to cells where the BCL11A gene has not been modified.

146. A method of treating a hemoglobinopathy in a subject in need thereof, the method comprising administering to the subject a therapeutically effective amount of the cells of claim 144 or claim 145.

147. The method of claim 146, wherein the hemoglobinopathy is a sickle cell disease or beta-thalassemia.

148. The method of claim 146 or claim 147, wherein the cells are autologous with respect to the subject to be administered the cells.

149. The method of claim 146 or claim 147, wherein the cells are allogeneic with respect to the subject to be administered the cells.

150. The method of any one of claims 146-149, wherein the cells or their progeny persist in the subject for at least one month, two month, three months, four months, five months, six months, seven months, eight months, nine months, ten months, eleven months, twelve months, thirteen months, fourteen month, fifteen months, sixteen months, seventeen months, eighteen months, nineteen months, twenty months, twenty-one months, twenty-two months, twenty-three months, two years, three years, four years, or five years after administration of the modified cells to the subject.

151. The method of any one of claims 146-150, wherein the method results in an increased levels of hemoglobin F (HbF) in circulating blood of at least about 5%, at least about 10%, at least about 20%, at least about 30%, at least about 40%, or at least about 50% compared to the levels of HbF in the subject prior to treatment.

152. The method of any one of claims 146-150, wherein the method results in a ratio of HbF to hemoglobin S (HbS) in the subject of at least 0.01:1.0, at least 0.025:1.0, at least 0.05:1.0, at least 0.075:1.0 at least 0.1:1.0, at least 0.2:1.0, at least 0.3:1.0, at least 0.4:1.0, at least 0.5:1:0, at least 0.75:1.0, at least 1.0:1.0, at least 1.25:1.0, at least 1.5:1.0, or at least 1.75:1.0.

153. The method of any one of claims 146-150, wherein the method results in HbF levels of at least about 5%, or at least about 10%, or at least about 20%, or at least about 30% of total circulating hemoglobin in the subject.

154. The method of any one of claims 146-153, wherein the subject is selected from the group consisting of a rodent, a mouse, a rat, and a non-human primate.

155. The method of any one of claims 146-153, wherein the subject is a human.

156. A method of treating a hemoglobinopathy in a subject in need thereof, comprising modifying a BCL11A gene in cells of the subject, the modifying comprising contacting said cells with a therapeutically effective dose of:
a. the system of any one of claims 1-85;
b. the nucleic acid of any one of claims 86-89;
c. the vector as in any one of claims 90-100;
d. the XDP of any one of claims 101-104; or
e. combinations of two or more of (a)-(d),
wherein the BCL11A gene of the cells targeted by the first gRNA is modified by the CasX protein.

157. The method of claim 156, wherein the hemoglobinopathy is sickle cell disease or beta-thalassemia.

158. The method of any one of claim 156 or claim 157, wherein the cell is selected from the group consisting of hematopoietic stem cells (HSC), hematopoietic progenitor cells (HPC), CD34+ cells, mesenchymal stem cells (MSC), induced pluripotent stem cells (iPSC), common myeloid progenitor cells, proerythroblast cells, and erythroblast cells.

159. The method of any one of claims 156-158, wherein the modifying comprises introducing a single-stranded break in the BCL11A gene of the cells.

160. The method of any one of claims 156-158, wherein the modifying comprises introducing a double-stranded break in the BCL11A gene of the cells.

161. The method of any one of claims 156-160, further comprising introducing into the cells of the subject a second gRNA or a nucleic acid encoding the second gRNA, wherein the second gRNA has a targeting sequence complementary to a different or overlapping portion of the target nucleic acid compared to the first gRNA, resulting in an additional break in the BCL11A target nucleic acid of the cells of the subject.

162. The method of any one of claims 156-161, wherein the modifying comprises introducing an insertion, deletion, substitution, duplication, or inversion of one or more nucleotides in the BCL11A gene of the cells.

163. The method of claim 162, wherein the modifying results in a knock-down or knock-out of the BCL11A gene in the modified cells of the subject.

164. The method of any one of claims 156-163, wherein the BCL11A gene of the cells are modified such that expression of the BCL11A protein by the modified cells is reduced by at least about 10%, at least about 20%, at least about 30%, at least about 40%, at least about 50%, at least about 60%, at least about 70%, at least about 80%, or at least about 90% in comparison to cells that have not been modified.

165. The method of any one of claims 156-163, wherein the BCL11A gene of the cells of the subject are modified such that at least 70%, at least 75%, at least 80%, at least 85%, at least 90%, or at least 95% of the modified cells do not express a detectable level of BCL11A protein.

166. The method of any one of claims 156-165, wherein the method results in an increased levels of hemoglobin F (HbF) in circulating blood of the subject of at least about 5%, at least about 10%, at least about 20%, at least about 30%, at least about 40%, or at least about 50% compared to the levels of HbF in the subject prior to treatment.

167. The method of any one of claims 156-166, wherein the method results in a ratio of HbF to hemoglobin S (HbS) in circulating blood of the subject of at least 0.01:1.0, at least 0.025:1.0, at least 0.05:1.0, at least 0.075:1.0 at least 0.1:1.0, at least 0.2:1.0, at least 0.3:1.0, at least 0.4:1.0, at least 0.5:1:0, at least 0.75:1.0, at least 1.0:1.0, at least 1.25:1.0, at least 1.5:1.0, or at least 1.75:1.0.

168. The method of any one of claims 156-165, wherein the method results in HbF levels of at least about 5%, or at least about 10%, or at least about 20%, or at least about 30% of total hemoglobin in circulating blood of the subject.

169. The method of any one of claims 156-161, wherein the method comprises insertion of the donor template into the break site(s) of the BCL11A gene target nucleic acid sequence of the cells.

170. The method of claim 168, wherein the insertion of the donor template is mediated by homology-directed repair (HDR) or homology-independent targeted integration (HITI).

171. The method of claim 168 or claim 170, wherein insertion of the donor template results in a knock-down or knock-out of the BCL11A gene in the modified cells of the subject.

172. The method of any one of claims 166-171, wherein the BCL11A gene of the cells are modified such that expression of the BCL11A protein by the modified cells is reduced by at least about 10%, at least about 20%, at least about 30%, at least about 40%, at least about 50%, at least about 60%, at least about 70%, at least about 80%, or at least about 90% in comparison to cells that have not been modified.

173. The method of any one of claims 166-171, wherein the BCL11A gene of the cells of the subject are modified such that at least 70%, at least 75%, at least 80%, at least 85%, at least 90%, or at least 95% of the modified cells do not express a detectable level of BCL11A protein.

174. The method of any one of claims 166-173, wherein the method results in an increased levels of hemoglobin F (HbF) in circulating blood of the subject of at least about 5%, at least about 10%, at least about 20%, at least about 30%, at least about 40%, or at least about 50% compared to the levels of HbF in the subject prior to treatment.

175. The method of any one of claims 166-173, wherein the method results in a ratio of HbF to hemoglobin S (HbS) in circulating blood of the subject of at least 0.01:1.0, at least 0.025:1.0, at least 0.05:1.0, at least 0.075:1.0 at least 0.1:1.0, at least 0.2:1.0, at least 0.3:1.0, at least 0.4:1.0, at least 0.5:1:0, at least 0.75:1.0, at least 1.0:1.0, at least 1.25:1.0, at least 1.5:1.0, or at least 1.75:1.0.

176. The method of any one of claims 166-173, wherein the method results in HbF levels of at least about 5%, or at least about 10%, or at least about 20%, or at least about 30% of total hemoglobin in circulating blood of the subject.

177. The method of any one of claims 156-175, wherein the subject is selected from the group consisting of rodent, mouse, rat, and non-human primate.

178. The method of any one of claims 156-175, wherein the subject is a human.

179. The method of any one of claims 156-178, wherein the vector is AAV and is administered to the subject at a dose of at least about 1×10⁵ vector genomes/kg (vg/kg), at least about 1×10⁶ vg/kg, at least about 1×10⁷ vg/kg, at least about 1×10⁸ vg/kg, at least about 1×109 vg/kg, at least about 1×10¹⁰ vg/kg, at least about 1×10¹¹ vg/kg, at least about 1×10¹² vg/kg, at least about 1×10¹³ vg/kg, at least about 1×10¹⁴ vg/kg, at least about 1×10¹⁵ vg/kg, or at least about 1×10¹⁶ vg/kg.

180. The method of any one of claims 156-178, wherein the vector is AAV and is administered to the subject at a dose of at least about 1×10⁵ vg/kg to about 1×10¹⁶ vg/kg, at least about 1×10⁶ vg/kg to about 1×10¹⁵ vg/kg, or at least about 1×10⁷ vg/kg to about 1×10¹⁴ vg/kg.

181. The method of any one of claims 156-178, wherein the XDP is administered to the subject at a dose of at least about 1×10⁵ particles/kg, at least about 1×10⁶ particles/kg, at least about 1×10⁷ particles/kg at least about 1×10⁸ particles/kg, at least about 1×10⁹ particles/kg, at least about 1×10¹⁰ particles/kg, at least about 1×10¹¹ particles/kg, at least about 1×10¹² particles/kg, at least about 1×10¹³ particles/kg, at least about 1×10¹⁴ particles/kg, at least about 1×10¹⁵ particles/kg, at least about 1×10¹⁶ particles/kg.

182. The method of any one of claims 156-178, wherein the XDP is administered to the subject at a dose of at least about 1×10⁵ particles/kg to about 1×10¹⁶ particles/kg, or at least about 1×10⁶ particles/kg to about 1×10¹⁵ particles/kg, or at least about 1×10⁷ particles/kg to about 1×10¹⁴ particles/kg.

183. The method of any one of claims 156-182, wherein the vector or XDP is administered to the subject by a route of administration selected from intraparenchymal, intravenous, intra-arterial, intraperitoneal, intracapsular, subcutaneously, intramuscularly, intraabdominally, or combinations thereof, wherein the administering method is injection, transfusion, or implantation.

184. The method of any one of claims 156-183, wherein the method results in improvement in at least one clinically-relevant endpoint in the subject.

185. The method of claim 184, wherein the method results in improvement in at least one clinically-relevant parameter selected from the group consisting of occurrence of end-organ disease, albuminuria, hypertension, hyposthenia, hyposthenuria, diastolic dysfunction, functional exercise capacity, acute coronary syndrome, pain events, pain severity, anemia, hemolysis, tissue hypoxia, organ dysfunction, abnormal hematocrit values, childhood mortality, incidence of strokes, hemoglobin levels compared to baseline, HbF levels, reduced incidence of pulmonary embolisms, incidence of vaso-occlusive crises, concentration of hemoglobin S in erythrocytes, rate of hospitalizations, liver iron concentration, required blood transfusions, and quality of life score.

186. The method of claim 184, wherein the method results in improvement in at least two clinically-relevant parameters selected from the group consisting of occurrence of end-organ disease, albuminuria, hypertension, hyposthenia, hyposthenuria, diastolic dysfunction, functional exercise capacity, acute coronary syndrome, pain events, pain severity, anemia, hemolysis, tissue hypoxia, organ dysfunction, abnormal hematocrit values, childhood mortality, incidence of strokes, hemoglobin levels compared to baseline, HbF levels, reduced incidence of pulmonary embolisms, incidence of vaso-occlusive crises, concentration of hemoglobin S in erythrocytes, rate of hospitalizations, liver iron concentration, required blood transfusions, and quality of life score.

187. A method for treating a subject with a hemoglobinopathy, the method comprising:
a. isolating induced pluripotent stem cells (iPSC) or hematopoietic stem cells (HSC) from a subject;
b. modifying the BCL11A target nucleic acid of the iPSC or HSC by the method of any one of claims 110-126;
c. differentiating the modified iPSC or HSC into a hematopoietic progenitor cell; and
d. implanting the hematopoietic progenitor cell into the subject with the hemoglobinopathy,
wherein the method results in an increased levels of hemoglobin F (HbF) in circulating blood of the subject of at least about 5%, at least about 10%, at least about 20%, at least about 30%, at least about 40%, or at least about 50% compared to the levels of HbF in the subject prior to treatment.

188. The method of claim 187, wherein the iPSC or HSC is autologous and is isolated from the subject's bone marrow or peripheral blood.

189. The method of claim 187, wherein the iPSC or HSC is allogeneic and is isolated from a different subject's bone marrow or peripheral blood.

190. The method of any one of claims 187-189, wherein the implanting comprises administering the hematopoietic progenitor cell to the subject by transplantation, local injection, systemic infusion, or combinations thereof.

191. The method of any one of claims 187-190, wherein the hemoglobinopathy is sickle cell disease or beta-thalassemia.

192. A method of increasing fetal hemoglobin (HbF) in a subject by genome editing, the method comprising:
a. administering to the subject an effective dose of the vector of any one of claims 90-100 or the XDP of any one of claims 101-107, wherein the vector or XDP delivers the CasX:gRNA system to cells of the subject;
b. the BCL11A target nucleic acid of cells of the subject are edited by the CasX targeted by the first gRNA;
c. the editing comprises introducing an insertion, deletion, substitution, duplication, or inversion of one or more nucleotides in the target nucleic acid sequence such that expression of BCL11A protein is reduced or eliminated,
wherein the method results in an increased levels of hemoglobin F (HbF) in circulating blood of the subject of at least about 5%, at least about 10%, at least about 20%, at least about 30%, at least about 40%, or at least about 50% compared to the levels of HbF in the subject prior to treatment.

193. The method of claim 192, wherein the method results in a ratio of HbF to hemoglobin S (HbS) in the subject of at least 0.01:1.0, at least 0.025:1.0, at least 0.05:1.0, at least 0.075:1.0 at least 0.1:1.0, at least 0.2:1.0, at least 0.3:1.0, at least 0.4:1.0, at least 0.5:1:0, at least 0.75:1.0, at least 1.0:1.0, at least 1.25:1.0, at least 1.5:1.0, or at least 1.75:1.0.

194. The method of claim 192 or claim 193, wherein the method results in HbF levels of at least about 5%, or at least about 10%, or at least about 20%, or at least about 30% of total circulating hemoglobin in the subject.

195. The method of any one of claims 192-194, wherein the cells are selected from the group consisting of hematopoietic stem cells (HSC), hematopoietic progenitor cells (HPC), CD34+ cells, mesenchymal stem cells (MSC), induced pluripotent stem cells (iPSC), common myeloid progenitor cells, proerythroblast cells, and erythroblast cells.

196. The method of any one of claims 192-195, wherein the target nucleic acid of the cells has been edited such that expression of the BCL11A protein is reduced by at least about 10%, at least about 20%, at least about 30%, at least about 40%, at least about 50%, at least about 60%, at least about 70%, at least about 80%, or at least about 90% in comparison to target nucleic acid of cells that have not been edited.

197. The method of any one of claims 192-196, wherein the subject is selected from the group consisting of mouse, rat, pig, and non-human primate.

198. The method of any one of claims 192-196, wherein the subject is a human.

199. The method of any one of claims 192-198, wherein the vector is administered at a dose of at least about 1×10⁵ vector genomes/kg (vg/kg), at least about 1×10⁶ vg/kg, at least about 1×10⁷ vg/kg, at least about 1×10⁸ vg/kg, at least about 1×10⁹ vg/kg, at least about 1×10¹⁰ vg/kg at least about 1×10¹¹ vg/kg, at least about 1×10¹² vg/kg, at least about 1×10¹³ vg/kg, at least about 1×10¹⁴ vg/kg, at least about 1×10¹⁵ vg/kg, or at least about 1×10¹⁶ vg/kg.

200. The method of any one of claims 192-198, wherein the XDP is administered at a dose of at least about 1×10⁵ particles/kg, at least about 1×10⁶ particles/kg, at least about 1×10⁷ particles/kg, at least about 1×10⁸ particles/kg, at least about 1×10⁹ particles/kg, at least about 1×10¹⁰ particles/kg at least about 1×10¹¹ particles/kg, at least about 1×10¹² particles/kg, at least about 1×10¹³ particles/kg, at least about 1×10¹⁴ particles/kg, at least about 1×10¹⁵ particles/kg, or at least about 1×10¹⁶ particles/kg.

201. The method of any one of claims 192-200, wherein the vector or XDP is administered by a route of administration selected from transplantation, local injection, systemic infusion, or combinations thereof.

202. The system of any one of claims 1-85, the nucleic acid of any one of claims 86-89, the vector of any one of 90-95, the XDP of any one of claims 101-104, the host cell of claim 108 or claim 109, or the population of cells of claim 144 or claim 145, for use as a medicament for the treatment of a hemoglobinopathy.

203. The system of claim 1, wherein the target nucleic acid sequence is complementary to a non-target strand sequence located 1 nucleotide 3′ of a protospacer adjacent motif (PAM) sequence.

204. The system of claim 203, wherein the PAM sequence comprises a TC motif.

205. The system of claim 204, wherein the PAM sequence comprises ATC, GTC, CTC or TTC.

206. The system of any one of claims 203-205, wherein the Class 2 Type V CRISPR protein comprises a RuvC domain.

207. The system of claim 206, wherein the RuvC domain generates a staggered double-stranded break in the target nucleic acid sequence.

208. The system of any one of claims 203-207, wherein the Class 2 Type V CRISPR protein does not comprise an HNH nuclease domain.
